(19) United States
(12) Patent Application Publication
(10) Pub. No.: US 2026/0097123 A1
(43) Pub. Date: Apr. 9, 2026

(54) Biallelic Knockout of CIITA

(71) Applicant: EMENDOBIO INC., Wilmington, DE (US)

(72) Inventor: Rafi EMMANUEL, Ramla (IL)

(21) Appl. No.: 19/113,015

(22) PCT Filed: Sep. 19, 2023
(86) PCT No.: PCT/US2023/074587

§ 371 Date: Mar. 19, 2025

Related U.S. Application Data
(60) Provisional application No. 63/376,275, filed on Sep. 19, 2022.

(51) Int. Cl. A61K 40/50; A61K 40/11; C12N 9/22; C12N 15/11; C12N 15/90

(52) U.S. Cl. CPC A61K 40/50; A61K 40/11; C12N 9/226; C12N 15/11; C12N 15/907; C12N 2310/20

(57) ABSTRACT

Compositions comprising an RNA molecule comprising a guide sequence portion having 17-50 contiguous nucleotides containing nucleotides in the sequence set forth in any one of SEQ ID NOs: 1-34199 and methods and uses thereof.

[0001] This application is a Section 371 national stage of PCT International Application No. PCT/US2023/074587, filed Sep. 18, 2023, and claims the benefit of U.S. Provisional Application No. 63/376,275 filed Sep. 19, 2022, the content of which is hereby incorporated by reference.

[0002] Throughout this application, various publications are referenced, including referenced in parenthesis. The disclosures of all publications mentioned in this application in their entireties are hereby incorporated by reference into this application in order to provide additional description of the art to which this invention pertains and of the features in the art which can be employed with this invention.

### REFERENCE TO SEQUENCE LISTING

[0003] This application incorporates-by-reference nucleotide sequences which are present in the file named “230919_92042-A-PCT_Sequence_Listing_AWG.xml”, which is 29,588 kilobytes in size, and which was created on Sep. 19, 2023 in the IBM-PC machine format, having an operating system compatibility with MS-Windows, which is contained in the XML file filed Mar. 19, 2023 as part of this application.

### BACKGROUND OF INVENTION

[0004] Chimeric antigen receptors (CAR) provide a promising approach for immunotherapy. However, to make such therapies (e.g., CAR-T cell therapies) more accessible, it is highly desirable to develop an allogeneic adoptive transfer strategy in which universal CAR cells derived from cells of healthy donors can be applied to treat multiple patients. In order to implement such a strategy, the immunogenicity and reactivity of CAR-T cells must be optimized to avoid harmful reactions, such as rejection by the host or graft-versus-host-disease.

### SUMMARY OF THE INVENTION

[0005] CIITA encodes a protein that localizes in the nucleus and acts as a positive regulator of class II major histocompatibility complex gene transcription. Disclosed are approaches for knocking out the CIITA gene in cells to be utilized for immunotherapy approaches, such as CAR-T therapy. A cell modified to have a CIITA knockout improves performance of the cell in allogeneic adoptive transfer therapy. Such cells have improved activity, retention, and/or expansion qualities for use in adoptive cancer immunotherapy. Specifically, a CIITA knockout lowers the immunogenicity of the modified cell to avoid rejection by the host's immune system during allogeneic adoptive transfer. Accordingly, biallelic knockout of the CIITA gene in cells as described herein may be utilized to minimize the immunogenicity of the cells. The disclosed approaches for knocking out the CIITA gene in cells, for example, allogeneic immune cells, are utilized to increase the persistence and/or the engraftment of the cells in the presence of a host's immune cells.

[0006] The present disclosure also provides a method for inactivating alleles of the Class II, major histocompatibility complex, transactivator (CIITA) gene in a cell, the method comprising
[0007] introducing to the cell a composition comprising:
   [0008] a CRISPR nuclease, or a polynucleotide molecule encoding the CRISPR nuclease; and
   [0009] an RNA molecule comprising a guide sequence portion having 17-50 nucleotides, or a polynucleotide molecule encoding the RNA molecule,
[0010] wherein a complex of the CRISPR nuclease and the RNA molecule affects a double strand break in the allele of the CIITA gene.

[0011] In some embodiments, the RNA molecule comprises a guide sequence portion that targets a sequence that is located within any one of Exons 1-20 of the CIITA gene, or a sequence that is located within a genomic range selected from any one of 16:10904698-10904857, 16:10906453-10908194, 16:10908983-10909232, 16:10910142-10910304, 16:10915524-10915695, 16:10916321-10916504, 16:10918394-10918571, 16:10922121-10922295, 16:10922361-10922535, 16:10923182-10923370, 16:10877156-10877427, 16:10935070-10936438, 16:10895236-10895473, 16:10895623-10895809, 16:10898624-10898777, 16:10898879-10899047, 16:10901468-10901603, 16:10901992-10902229, 16:10902612-10902846, and 16:10903685-10903940. In some embodiments, the guide sequence portion of the RNA molecule comprises 17-50 contiguous nucleotides containing nucleotides in the sequence set forth in any one of SEQ ID NOs: 1-34199.

[0012] According to embodiments of the present invention, there is provided an RNA molecule comprising a guide sequence portion having 17-50 contiguous nucleotides containing nucleotides in the sequence set forth in any one of SEQ ID NOs: 1-34199.

[0013] According to embodiments of the present invention, there is provided a composition comprising an RNA molecule comprising a guide sequence portion having 17-50 contiguous nucleotides containing nucleotides in the sequence set forth in any one of SEQ ID NOs: 1-34199 and a CRISPR nuclease.

[0014] According to embodiments of the present invention, there is provided a method for inactivating a CIITA allele in a cell, the method comprising delivering to the cell a composition comprising an RNA molecule comprising a guide sequence portion having 17-50 contiguous nucleotides containing nucleotides in the sequence set forth in any one of SEQ ID NOs: 1-34199 and a CRISPR nuclease. In some embodiments, the cell is a lymphocyte. In some embodiments, the cell is a T cell. In some embodiments, the cell is a T regulatory cell. In some embodiments, the cell is a B cell. In some embodiments, the cell is a natural killer (NK) cell. In some embodiments, the cell is a macrophage. In some embodiments, the cell is a stem cell. In some embodiments, the cell is an iPSC. In some embodiments, the cell is a fibroblast, blood cell, hepatocyte, keratinocyte, or any other cell type capable of being reprogrammed to an induced pluripotent stem cell (iPSC). In some embodiments, the delivering to the cell is performed in vivo, ex vivo, or in vitro. In some embodiments, the method is performed ex vivo and the cell is provided/explanted from an individual patient. In some embodiments, the method further comprises the step of introducing the resulting cell, with the modified/knocked out CIITA allele, into an individual patient. In some embodiments, the cell is originated from the individual patient to be treated. In some embodiments, the cell is originated from a donor. In some embodiments, the cell is allogeneic to the individual patient to which it is introduced.

[0015] According to embodiments of the present invention, there is provided a method for treating, reducing, and/or preventing host-versus-graft rejection (HvG), the method comprising delivering to a cell of a subject having or at risk of experiencing host-versus-graft rejection (HvG) a composition comprising an RNA molecule comprising a guide sequence portion having 17-50 contiguous nucleotides containing nucleotides in the sequence set forth in any one of SEQ ID NOs: 1-34199 and a CRISPR nuclease.

[0016] According to embodiments of the present invention, there is provided a method for improving the activity and/or retention and/or expansion of a cell for adoptive cell therapy, the method comprising delivering to a cell of a subject in need of the adoptive cell therapy a composition comprising an RNA molecule comprising a guide sequence portion having 17-50 contiguous nucleotides containing nucleotides in the sequence set forth in any one of SEQ ID NOS: 1-34199 and a CRISPR nuclease.

[0017] In embodiments, the method is for increasing persistence and/or engraftment of a cell in a host subject, the method comprising delivering to the cell a composition comprising an RNA molecule comprising a guide sequence portion having 17-50 contiguous nucleotides containing nucleotides in the sequence set forth in any one of SEQ ID NOs: 1-34199 and a CRISPR nuclease; and introducing the cell to the host subject. In some embodiments, the cell is further differentiated prior to introducing the cell to the host subject. In some embodiments, the cell is further engineered to express a chimeric antigen receptor. In some embodiments, the cell is a stem cell, an iPSC, or a progenitor cell and is differentiated to a T cell prior to introducing the cell to the host subject. In some embodiments, the cell is a T cell. In some embodiments, the cell is further engineered to have additional genes inactivated and/or knocked-out in order to improve the use of the cell for adoptive transfer, e.g. knockout of additional genes to avoid graft-versus-host disease (GVHD) following introduction of the cell into a host subject.

[0018] According to embodiments of the present invention, there is provided use of a composition comprising an RNA molecule comprising a guide sequence portion having 17-50 contiguous nucleotides containing nucleotides in the sequence set forth in any one of SEQ ID NOs: 1-34199 and a CRISPR nuclease for inactivating a CIITA allele in a cell, comprising delivering to the cell the composition comprising an RNA molecule comprising a guide sequence portion having 17-50 contiguous nucleotides containing nucleotides in the sequence set forth in any one of SEQ ID NOS: 1-34199 and a CRISPR nuclease.

[0019] According to embodiments of the present invention, there is provided a medicament comprising an RNA molecule comprising a guide sequence portion having 17-50 contiguous nucleotides containing nucleotides in the sequence set forth in any one of SEQ ID NOs: 1-34199 and a CRISPR nuclease for use in inactivating a CIITA allele in a cell, wherein the medicament is administered by delivering to the cell the composition comprising an RNA molecule comprising a guide sequence portion having 17-50 contiguous nucleotides containing nucleotides in the sequence set forth in any one of SEQ ID NOs: 1-34199 and a CRISPR nuclease.

[0020] According to embodiments of the present invention, there is provided use of a composition comprising an RNA molecule comprising a guide sequence portion having 17-50 contiguous nucleotides containing nucleotides in the sequence set forth in any one of SEQ ID NOs: 1-34199 and a CRISPR nuclease for treating, ameliorating, or preventing host-versus-graft rejection (HvG) or increasing persistence of the cell upon engraftment, comprising delivering to a cell of a subject having or at risk of experiencing host-versus-graft rejection the composition of comprising an RNA molecule comprising a guide sequence portion having 17-50 contiguous nucleotides containing nucleotides in the sequence set forth in any one of SEQ ID NOs: 1-34199 and a CRISPR nuclease.

[0021] According to embodiments of the present invention, there is provided a medicament comprising the composition comprising an RNA molecule comprising a guide sequence portion having 17-50 contiguous nucleotides containing nucleotides in the sequence set forth in any one of SEQ ID NOs: 1-34199 and a CRISPR nuclease for use in treating, ameliorating, or preventing host-versus-graft rejection (HvG), wherein the medicament is administered by delivering to a cell of a subject having or at risk of experiencing host-versus-graft rejection (HvG) the composition comprising an RNA molecule comprising a guide sequence portion having 17-50 contiguous nucleotides containing nucleotides in the sequence set forth in any one of SEQ ID NOs: 1-34199 and a CRISPR nuclease.

[0022] According to embodiments of the present invention, there is provided use of a composition comprising an RNA molecule comprising a guide sequence portion having 17-50 contiguous nucleotides containing nucleotides in the sequence set forth in any one of SEQ ID NOs: 1-34199 and a CRISPR nuclease for improving the activity and/or retention and/or expansion of a cell for adoptive cell therapy or increasing persistence of the cell upon engraftment, comprising delivering to a cell of a subject in need of the adoptive cell therapy the composition of comprising an RNA molecule comprising a guide sequence portion having 17-50 contiguous nucleotides containing nucleotides in the sequence set forth in any one of SEQ ID NOs: 1-34199 and a CRISPR nuclease.

[0023] According to embodiments of the present invention, there is provided a kit for inactivating a CIITA allele in a cell, comprising an RNA molecule comprising a guide sequence portion having 17-50 contiguous nucleotides containing nucleotides in the sequence set forth in any one of SEQ ID NOs: 1-34199, a CRISPR nuclease, and/or a tracrRNA molecule; and instructions for delivering the RNA molecule; CRISPR nuclease, and/or the tracrRNA to the cell.

[0024] According to embodiments of the present invention, there is provided a method of treating a disease or disorder, the method comprising delivering any one of the compositions or the modified cells described herein to the subject, preferably wherein the disease or disorder is cancer.

[0025] According to some embodiments of the present invention, there is provided a kit for treating or preventing host-versus-graft rejection (HvG) in a subject, comprising an RNA molecule comprising a guide sequence portion having 17-50 contiguous nucleotides containing nucleotides in the sequence set forth in any one of SEQ ID NOs: 1-34199, a CRISPR nuclease, and optionally a tracrRNA molecule; and instructions for delivering the RNA molecule; CRISPR nuclease, and optionally the tracrRNA to a cell of a subject having or at risk of host-versus-graft rejection (HvG).

### BRIEF DESCRIPTION OF THE DRAWINGS

[0026] FIG. 1: CIITA editing in HeLa cells. OMNI-103 CRISPR nuclease was expressed in a mammalian cell system (HeLa cells) by DNA transfection, together with an sgRNA-expressing plasmid. Transfection efficiency (% transfection) was determined by flow cytometry measurement of mCherry signal. All tests were done in triplicate. ‘OMNI nuclease only’ (i.e. no guide) transfected cells served as a negative control, and no editing was observed in those cells (data not shown).

[0027] FIG. 2: CIITA editing in primary T cells. T cells obtained from two donors were thawed and activated with beads for 72 h. Then, a cleavage activity assay was performed with OMNI-103 CRISPR nuclease (113 pmol)+sgRNA (226 pmol) and 2×10⁶ cells per treatment. After seven (7) days, genomic DNA was isolated from ˜100,000 cells, manual PCR was performed, and the samples were analyzed by next-generation sequencing (NGS).

### DETAILED DESCRIPTION

[0028] Unless otherwise defined, all technical and/or scientific terms used herein have the same meaning as commonly understood by one of ordinary skill in the art to which the invention pertains. Although methods and materials similar or equivalent to those described herein can be used in the practice or testing of embodiments of the invention, exemplary methods and/or materials are described below. In case of conflict, the patent specification, including definitions, will control. In addition, the materials, methods, and examples are illustrative only and are not intended to be necessarily limiting.

[0029] It should be understood that the terms “a” and “an” as used above and elsewhere herein refer to “one or more” of the enumerated components. It will be clear to one of ordinary skill in the art that the use of the singular includes the plural unless specifically stated otherwise. Therefore, the terms “a,” “an” and “at least one” are used interchangeably in this application.

[0030] For purposes of better understanding the present teachings and in no way limiting the scope of the teachings, unless otherwise indicated, all numbers expressing quantities, percentages or proportions, and other numerical values used in the specification and claims, are to be understood as being modified in all instances by the term “about.” Accordingly, unless indicated to the contrary, the numerical parameters set forth in the following specification and attached claims are approximations that may vary depending upon the desired properties sought to be obtained. At the very least, each numerical parameter should at least be construed in light of the number of reported significant digits and by applying ordinary rounding techniques.

[0031] Unless otherwise stated, adjectives such as “substantially” and “about” modifying a condition or relationship characteristic of a feature or features of an embodiment of the invention, are understood to mean that the condition or characteristic is defined to within tolerances that are acceptable for operation of the embodiment for an application for which it is intended. Unless otherwise indicated, the word “or” in the specification and claims is considered to be the inclusive “or” rather than the exclusive or, and indicates at least one of, or any combination of items it conjoins.

[0032] In the description and claims of the present application, each of the verbs, “comprise,” “include” and “have” and conjugates thereof, are used to indicate that the object or objects of the verb are not necessarily a complete listing of components, elements or parts of the subject or subjects of the verb. Other terms as used herein are meant to be defined by their well-known meanings in the art.

[0033] In some embodiments of the present invention, a DNA nuclease is utilized to affect a DNA break at a target site to induce cellular repair mechanisms, for example, but not limited to, non-homologous end-joining (NHEJ). During classical NHEJ, two ends of a double-strand break (DSB) site are ligated together in a fast but also inaccurate manner (i.e. frequently resulting in mutation of the DNA at the cleavage site in the form of small insertion or deletions).

[0034] As used herein, the term “modified cells” refers to cells in which a double strand break is affected by a complex of an RNA molecule and the CRISPR nuclease as a result of hybridization with the target sequence, i.e. on-target hybridization.

[0035] This invention provides a modified cell or cells obtained by use of any of the methods described herein. In an embodiment these modified cell or cells are capable of giving rise to progeny cells. In an embodiment these modified cell or cells are capable of giving rise to progeny cells after engraftment. As a non-limiting example, the modified cells may be hematopoietic stem cells (HSCs), or any cell suitable for an allogenic cell transplant or autologous cell transplant.

[0036] As used herein, the term “targeting sequence” or “targeting molecule” refers a nucleotide sequence or molecule comprising a nucleotide sequence that is capable of hybridizing to a specific target sequence, e.g., the targeting sequence has a nucleotide sequence which is at least partially complementary to the sequence being targeted along the length of the targeting sequence. The targeting sequence or targeting molecule may be part of an RNA molecule that can form a complex with a CRISPR nuclease, either alone or in combination with other RNA molecules, with the targeting sequence serving as the targeting portion of the CRISPR complex. When the molecule having the targeting sequence is present contemporaneously with the CRISPR nuclease, the RNA molecule, alone or in combination with an additional one or more RNA molecules (e.g. a tracrRNA molecule), is capable of targeting the CRISPR nuclease to the specific target sequence. As non-limiting example, a guide sequence portion of a CRISPR RNA molecule or single-guide RNA molecule may serve as a targeting molecule. Each possibility represents a separate embodiment. A targeting sequence can be custom designed to target any desired sequence.

[0037] The term “targets” as used herein, refers to preferentially hybridizing a targeting sequence of a targeting molecule to a nucleic acid having a targeted nucleotide sequence. It is understood that the term “targets” encompasses variable hybridization efficiencies, such that there is preferential targeting of the nucleic acid having the targeted nucleotide sequence, but unintentional off-target hybridization in addition to on-target hybridization might also occur. It is understood that where an RNA molecule targets a sequence, a complex of the RNA molecule and a CRISPR nuclease molecule targets the sequence for nuclease activity.

[0038] The “guide sequence portion” of an RNA molecule refers to a nucleotide sequence that is capable of hybridizing to a specific target DNA sequence, e.g., the guide sequence portion has a nucleotide sequence which is partially or fully complementary to the DNA sequence being targeted along the length of the guide sequence portion. In some embodiments, the guide sequence portion is 17, 18, 19, 20, 21, 22, 23, 24, 25, 26, 27, 28, 29, 30, 31, 32, 33, 34, 35, 36, 37, 38, 39, 40, 41, 42, 43, 44, 45, 46, 47, 48, 49 or 50 nucleotides in length, or approximately 17-50, 17-49, 17-48, 17-47, 17-46, 17-45, 17-44, 17-43, 17-42, 17-41, 17-40, 17-39, 17-38, 17-37, 17-36, 17-35, 17-34, 17-33, 17-31, 17-50, 17-29, 17-28, 17-27, 17-26, 17-25, 17-24, 17-22, 17-21, 18-25, 18-24, 18-23, 18-22, 18-21, 19-25, 19-24, 19-23, 19-22, 19-21, 19-20, 20-22, 18-20, 20-21, 21-22, or 17-20 nucleotides in length. Preferably, the entire length of the guide sequence portion is fully complementary to the DNA sequence being targeted along the length of the guide sequence portion. The guide sequence portion may be part of an RNA molecule that can form a complex with a CRISPR nuclease with the guide sequence portion serving as the DNA targeting portion of the CRISPR complex. When the RNA molecule having the guide sequence portion is present contemporaneously with the CRISPR molecule, alone or in combination with an additional one or more RNA molecules (e.g. a tracrRNA molecule), the RNA molecule is capable of targeting the CRISPR nuclease to the specific target DNA sequence. Accordingly, a CRISPR complex can be formed by direct binding of the RNA molecule having the guide sequence portion to a CRISPR nuclease or by binding of the RNA molecule having the guide sequence portion and an additional one or more RNA molecules to the CRISPR nuclease. Each possibility represents a separate embodiment. A guide sequence portion can be custom designed to target any desired sequence. Accordingly, a molecule comprising a “guide sequence portion” is a type of targeting molecule. In some embodiments, the guide sequence portion comprises a sequence that is the same as, or differs by no more than 1, 2, 3, 4, or 5 nucleotides from, a guide sequence portion described herein, e.g., a guide sequence set forth in any of SEQ ID NOs: 1-34199. Each possibility represents a separate embodiment. In some of these embodiments, the guide sequence portion comprises a sequence that is the same as a sequence set forth in any of SEQ ID NOs: 1-34199. Throughout this application, the terms “guide molecule,” “RNA guide molecule,” “guide RNA molecule,” and “gRNA molecule” are synonymous with a molecule comprising a guide sequence portion.

[0039] The term “non-discriminatory” as used herein refers to a guide sequence portion of an RNA molecule that targets a specific DNA sequence that is common to all alleles of a gene.

[0040] In embodiments of the present invention, an RNA molecule comprises a guide sequence portion having 17-50 contiguous nucleotides containing nucleotides in the sequence set forth in any one of SEQ ID NOs: 1-34199.

[0041] The RNA molecule and/or the guide sequence portion of the RNA molecule may contain modified nucleotides. Exemplary modifications to nucleotides/polynucleotides may be synthetic and encompass polynucleotides which contain nucleotides comprising bases other than the naturally occurring adenine, cytosine, thymine, uracil, or guanine bases. Modifications to polynucleotides include polynucleotides which contain synthetic, non-naturally occurring nucleosides e.g., locked nucleic acids. Modifications to polynucleotides may be utilized to increase or decrease stability of an RNA. An example of a modified polynucleotide is an mRNA containing 1-methyl pseudo-uridine. For examples of modified polynucleotides and their uses, see U.S. Pat. No. 8,278,036, PCT International Publication No. WO/2015/006747, and Weissman and Kariko (2015), each of which is hereby incorporated by reference.

[0042] As used herein, “contiguous nucleotides” set forth in a SEQ ID NO refers to nucleotides in a sequence of nucleotides in the order set forth in the SEQ ID NO without any intervening nucleotides.

[0043] In embodiments of the present invention, the guide sequence portion may be 17-50 nucleotides in length and contain 20-22 contiguous nucleotides in the sequence set forth in any one of SEQ ID NOs: 1-34199. In embodiments of the present invention, the guide sequence portion may be less than 22 nucleotides in length. For example, in embodiments of the present invention the guide sequence portion may be 17, 18, 19, 20, or 21 nucleotides in length. In such embodiments the guide sequence portion may consist of 17, 18, 19, 20, or 21 nucleotides, respectively, in the sequence of 17-22 contiguous nucleotides set forth in any one of SEQ ID NOs: 1-34199. For example, a guide sequence portion having 17 nucleotides in the sequence of 17 contiguous nucleotides set forth in SEQ ID NO: 34195 may consist of any one of the following nucleotide sequences (nucleotides excluded from the contiguous sequence are marked in strike-through):

(SEQ ID NO: 34195)
AAAAAAAUGUACUUGGUUCC
17 nucleotide guide sequence 1:
(SEQ ID NO: 34196) [symbol]
AAAAUGUACUUGGUUCC
17 nucleotide guide sequence 2:
(SEQ ID NO: 34197) [symbol]
AAAAAUGUACUUGGUUC [symbol]
17 nucleotide guide sequence 3:
(SEQ ID NO: 34198) [symbol]
AAAAAAUGUACUUGGUU [symbol]
17 nucleotide guide sequence 4:
(SEQ ID NO: 34199)
AAAAAAAUGUACUUGGU

[symbol]

[0044] In embodiments of the present invention, the guide sequence portion may be greater than 20 nucleotides in length. For example, in embodiments of the present invention the guide sequence portion may be 21, 22, 23, 24, 25, 26, 27, 28, 29, or 30 nucleotides in length. In such embodiments the guide sequence portion comprises 17-50 nucleotides containing the sequence of 20, 21 or 22 contiguous nucleotides set forth in any one of SEQ ID NOs: 1-34199 and additional nucleotides fully complimentary to a nucleotide or sequence of nucleotides adjacent to the 3′ end of the target sequence, 5′ end of the target sequence, or both.

[0045] In embodiments of the present invention a CRISPR nuclease and an RNA molecule comprising a guide sequence portion form a CRISPR complex that binds to a target DNA sequence to effect cleavage of the target DNA sequence. CRISPR nucleases, e.g. Cpf1, may form a CRISPR complex comprising a CRISPR nuclease and RNA molecule without a further tracrRNA molecule. Alternatively, CRISPR nucleases, e.g. Cas9, may form a CRISPR complex between the CRISPR nuclease, an RNA molecule, and a tracrRNA molecule. A guide sequence portion, which comprises a nucleotide sequence that is capable of hybridizing to a specific target DNA sequence, and a sequence portion that participates in CRIPSR nuclease binding, e.g. a tracrRNA sequence portion, can be located on the same RNA molecule. Alternatively, a guide sequence portion may be located on one RNA molecule and a sequence portion that participates in CRIPSR nuclease binding, e.g. a tracrRNA portion, may located on a separate RNA molecule. A single RNA molecule comprising a guide sequence portion (e.g. a DNA-targeting RNA sequence) and at least one CRISPR protein-binding RNA sequence portion (e.g. a tracrRNA sequence portion), can form a complex with a CRISPR nuclease and serve as the DNA-targeting molecule. In some embodiments, a first RNA molecule (e.g. a crRNA molecule) comprising a DNA-targeting RNA portion, which includes a guide sequence portion, and a separate RNA molecule (e.g. a tracrRNA molecule) comprising a CRISPR protein-binding RNA sequence interact by base pairing to form an RNA complex (e.g. a crRNA:tracrRNA complex) that targets the CRISPR nuclease to a DNA target site or, alternatively, are fused together to form an RNA molecule (e.g. a sgRNA molecule) that complexes with the CRISPR nuclease and targets the CRISPR nuclease to a DNA target site.

[0046] In embodiments of the present invention, an RNA molecule comprising a guide sequence portion may further comprise the sequence of a tracrRNA molecule. Such embodiments may be designed as a synthetic fusion of the guide portion of the RNA molecule and the trans-activating crRNA (tracrRNA). (See Jinek et al., 2012). In such an embodiment, the RNA molecule is a single guide RNA (sgRNA) molecule. Embodiments of the present invention may also form CRISPR complexes utilizing a separate tracrRNA molecule and a separate RNA molecule comprising a guide sequence portion (e.g. a crRNA molecule). In such embodiments the tracrRNA molecule may hybridize with the RNA molecule via basepairing and may be advantageous in certain applications of the invention described herein.

[0047] The term “tracr mate sequence” refers to a sequence sufficiently complementary to a tracrRNA molecule so as to hybridize to the tracrRNA via basepairing and promote the formation of a CRISPR complex. (See U.S. Pat. No. 8,906,616). In embodiments of the present invention, the RNA molecule may further comprise a portion having a tracr mate sequence.

[0048] A “gene,” for the purposes of the present disclosure, includes a DNA region encoding a gene product, as well as all DNA regions which regulate the production of the gene product, whether or not such regulatory sequences are adjacent to coding and/or transcribed sequences. Accordingly, a gene includes, but is not necessarily limited to, promoter sequences, terminators, translational regulatory sequences such as ribosome binding sites and internal ribosome entry sites, enhancers, silencers, insulators, boundary elements, replication origins, matrix attachment sites and locus control regions.

[0049] “Eukaryotic” cells include, but are not limited to, fungal cells (such as yeast), plant cells, animal cells, mammalian cells and human cells.

[0050] The term “nuclease” as used herein refers to an enzyme capable of cleaving the phosphodiester bonds between the nucleotide subunits of nucleic acid. A nuclease may be isolated or derived from a natural source. The natural source may be any living organism. Alternatively, a nuclease may be a modified or a synthetic protein which retains the phosphodiester bond cleaving activity. Gene modification can be achieved using a nuclease, for example a CRISPR nuclease.

[0051] According to embodiments of the present invention, there is provided a method for inactivating alleles of the Class II, major histocompatibility complex, transactivator (CIITA) gene in a cell, the method comprising
[0052] introducing to the cell a composition comprising:
   [0053] at least one CRISPR nuclease, or a polynucleotide molecule encoding a CRISPR nuclease; and
   [0054] an RNA molecule comprising a guide sequence portion, or a polynucleotide molecule encoding the same,
[0055] wherein a complex of the CRISPR nuclease and the RNA molecule affects a double strand break in alleles of the CIITA gene, and
[0056] wherein the guide sequence portion of the RNA molecule comprises 17-50 contiguous nucleotides containing nucleotides in the sequence set forth in any one of SEQ ID NOs: 1-34199.

[0057] In some embodiments, the guide sequence portion contains a sequence of nucleotides as listed in SEQ ID NOs: 1-34199, or a portion of any one of SEQ ID NOs: 1-34199, and optionally contains additional nucleotides prepended or appended to the beginning or end of the sequence of nucleotides. As a non-limiting example, a 17-nucleotide sequence found within SEQ ID NO: 1 may form a guide sequence portion. Additionally, a guide sequence portion may comprise a 17-nucleotide sequence found within SEQ ID NO: 1 and further include additional nucleotides 5′ or 3′ of the 17-nucleotide sequence found within SEQ ID NO: 1.

[0058] In some embodiments, the RNA molecule is a crRNA molecule and the composition further comprises a tracrRNA molecule that forms a crRNA:tracrRNA complex with the crRNA molecule. In some embodiments, the RNA molecule is an sgRNA molecule.

[0059] In some embodiments, the composition comprises additional RNA molecules comprising a guide sequence portion comprising 17-50 contiguous nucleotides containing nucleotides in the sequence set forth in any one of SEQ ID NOs: 1-34199.

[0060] In some embodiments, the guide sequence portion of the RNA molecule comprises 17-50 contiguous nucleotides containing nucleotides in the sequence set forth in any one of SEQ ID NOs: 1-34199 modified to comprise up to five mismatches relative to the target site.

[0061] In some embodiments, the method is a method of preparing modified immune cells (e.g., T cells) for use in immunotherapy. In some embodiments, the method is performed in vitro or ex vivo.

[0062] In some embodiments, the composition is introduced to a cell in a subject or to a cell in culture.

[0063] In some embodiments, the cell is a lymphocyte, a T cell, a T regulatory cell, a B cell, a natural killer (NK) cell, a macrophage, a stem cell, or a fibroblast, blood cell, hepatocyte, keratinocyte, or any other cell type capable of being reprogrammed to an induced pluripotent stem cell (iPSC).

[0064] In some embodiments, the cell is a hematopoietic stem cell (HSC), induced pluripotent stem cell (iPS cell), iPSc-derived cell, natural killer cell (NK), iPS-derived NK cell (INK), T cell, innate-like T cell (iT), natural killer T cell (NKT), γδ T cell, iPSc-derived T cell, invariant NKT cells (iNKT), iPSc-derived NKT, monocyte, or macrophage.

[0065] In some embodiments, the CRISPR nuclease and the RNA molecule are introduced to the cell at substantially the same time or at different times.

[0066] In some embodiments, alleles of the CIITA gene in the cell are subjected to an insertion or deletion mutation.

[0067] In some embodiments, the insertion or deletion mutation creates an early stop codon.

[0068] In some embodiments, the inactivating results in a truncated protein encoded by the mutated allele. For example, the method of inactivating mutates a CIITA allele such that the mutated allele encodes a truncated form of a CIITA protein.

[0069] In some embodiments, the composition introduced to the cell further comprises a second RNA molecule comprising a guide sequence portion, wherein the guide sequence portion of the second RNA molecule comprises 17-50 contiguous nucleotides containing nucleotides in the sequence set forth in any one of SEQ ID NOs: 1-34199, preferably wherein the guide sequence portion of the second RNA molecule differs from the guide sequence portion of the first RNA molecule.

[0070] According to embodiments of the present invention, there is provided a method for inactivating alleles of the Class II, major histocompatibility complex, transactivator (CIITA) gene in a cell, the method comprising
[0071] introducing to the cell a composition comprising:
   [0072] at least one CRISPR nuclease, or a polynucleotide molecule encoding a CRISPR nuclease; and
   [0073] an RNA molecule comprising a guide sequence portion, or a polynucleotide molecule encoding the RNA molecule,
[0074] wherein a complex of the CRISPR nuclease and the RNA molecule affects a double strand break in alleles of the CIITA gene,
[0075] wherein the guide sequence portion of the RNA molecule comprises 17-50 contiguous nucleotides containing nucleotides in the sequence set forth in any one of SEQ ID NOs: 1-34199 modified to contain 1, 2, 3, 4, or 5 nucleotide mismatches relative to a fully-complementary target sequence of the guide sequence portion.

[0076] In some embodiments, the guide sequence portion of the RNA molecule comprises 1, 2, 3, 4, or 5 nucleotide mismatches relative to a fully-complementary target sequence of the guide sequence portion.

[0077] In some embodiments, the guide sequence portion provides higher targeting specificity to the complex of the CRISPR nuclease and the RNA molecule relative to a guide sequence portion that has higher complementarity to an allele of the CIITA gene.

[0078] In some embodiments, the composition introduced to the cell further comprises a second RNA molecule comprising a guide sequence portion, wherein the guide sequence portion of the second RNA molecule comprises 17-50 contiguous nucleotides containing nucleotides in the sequence set forth in any one of SEQ ID NOs: 1-34199, or any one of SEQ ID NOs: 1-34199 modified to contain 1, 2, 3, 4, or 5 nucleotide mismatches relative to a fully-complementary target sequence of the guide sequence portion, preferably wherein the guide sequence portion of the second RNA molecule differs from the guide sequence portion of the first RNA molecule.

[0079] According to embodiments of the present invention, there is provided a composition comprising an RNA molecule which comprises 17-50 contiguous nucleotides containing nucleotides in the sequence set forth in any one of SEQ ID NOs: 1-34199.

[0080] In some embodiments, the composition further comprises a second RNA molecule which comprises a guide sequence portion comprising 17-50 contiguous nucleotides containing nucleotides in the sequence set forth in any one of SEQ ID NOs: 1-34199, preferably wherein the guide sequence portion of the second RNA molecule differs from the guide sequence portion of the first RNA molecule.

[0081] According to embodiments of the present invention, there is provided a composition comprising an RNA molecule which comprises a guide sequence portion comprising 17-50 contiguous nucleotides containing nucleotides in the sequence set forth in any one of SEQ ID NOS: 1-34199, or any one of SEQ ID NOs: 1-34199 modified to contain 1, 2, 3, 4, or 5 nucleotide mismatches relative to a fully-complementary target sequence of the guide sequence portion.

[0082] In some embodiments, the composition further comprises a second RNA molecule which comprises a guide sequence portion comprising 17-50 contiguous nucleotides containing nucleotides in the sequence set forth in any one of SEQ ID NOs: 1-34199, or any one of SEQ ID NOs: 1-34199 modified to contain 1, 2, 3, 4, or 5 nucleotide mismatches relative to a fully-complementary target sequence of the guide sequence portion, preferably wherein the guide sequence portion of the second RNA molecule differs from the guide sequence portion of the first RNA molecule.

[0083] In some embodiments, any one of the compositions described herein further comprises a CRISPR nuclease.

[0084] In some embodiments, any one of the compositions described herein further comprises a tracrRNA molecule.

[0085] According to embodiments of the present invention, there is provided a cell modified by any one of the methods described herein or modified using the any one of the compositions described herein. The modified cell may also have additional genes altered in order to improve their use for adoptive transfer, for example, reducing or preventing graft-versus-host disease (GVHD).

[0086] Preferably all alleles of the CIITA gene are inactivated such that the modified cell cannot express a full-length, functional CIITA protein product.

[0087] In some embodiments, the cell is any one of a wherein the cell is a lymphocyte, a T cell, a T regulatory cell, a B cell, a natural killer (NK) cell, a macrophage, a stem cell, or a fibroblast, blood cell, hepatocyte, keratinocyte, or any other cell type capable of being reprogrammed to an induced pluripotent stem cell (iPSC).

[0088] In some embodiments, the cell is a hematopoietic stem cell (HSC), induced pluripotent stem cell (iPS cell), iPSc-derived cell, natural killer cell (NK), iPS-derived NK cell (iNK), T cell, innate-like T cell (iT), natural killer T cell (NKT), γδ T cell, iPSc-derived T cell, invariant NKT cell (INKT), iPSc-derived NKT, monocyte, or macrophage.

[0089] In some embodiments, the cell is a stem cell or any cell type capable of being reprogrammed to an induced pluripotent stem cell (iPSC).

[0090] In some embodiments, the stem cell is differentiated after it is modified.

[0091] In some embodiments, the stem cell is differentiated into any one of a lymphocyte, a T cell, a T regulatory cell, a B cell, a natural killer (NK) cell, innate-like T cell (iT), natural killer T cells (NKT), γδ T cell, invariant NKT cells (INKT), monocyte, or macrophage.

[0092] According to embodiments of the present invention, there is provided a medicament comprising any one of the compositions described herein for use in inactivating a CIITA allele in a cell, wherein the medicament is administered by delivering to the cell the composition.

[0093] According to embodiments of the present invention, there is provided a use of any one of the compositions or modified cells described herein for treating, ameliorating, or preventing host-versus-graft rejection (HvG), comprising delivering the composition or the modified cell to a subject experiencing or at risk of experiencing host-versus-graft rejection (HvG).

[0094] According to embodiments of the present invention, there is provided a medicament comprising any one of the compositions or modified cells described herein for use in treating, ameliorating, or preventing host-versus-graft rejection (HvG), wherein the medicament is administered by delivering the composition or the modified cell to a subject experiencing or at risk of experiencing host-versus-graft rejection (HvG).

[0095] According to embodiments of the present invention, there is provided a kit for inactivating a CIITA allele in a cell, comprising any one of the compositions described herein and instructions for delivering the composition to the cell.

[0096] In some embodiments, the composition is delivered to the cell ex vivo.

[0097] According to embodiments of the present invention, there is provided a kit for treating or preventing host-versus-graft rejection (HvG) in a subject, comprising any one of the compositions or modified cells described herein and instructions for delivering the composition or modified cell to a subject experiencing or at risk of experiencing host-versus-graft rejection (HvG).

[0098] According to embodiments of the present invention, there is provided any one of the compositions or modified cells described herein for use in treating, ameliorating, or preventing host-versus-graft rejection (HvG), comprising delivering the composition or modified cell to a subject experiencing or at risk of experiencing host-versus-graft rejection (HvG).

[0099] According to embodiments of the present invention, there is provided use any one of the compositions or modified cells described herein for adoptive immunotherapy, comprising delivering the composition or modified cell to a subject in need of adoptive immunotherapy.

[0100] According to embodiments of the present invention, there is provided a medicament comprising t the compositions or modified cells for use in adoptive immunotherapy, wherein the medicament is administered by delivering the composition or modified cell to a subject in need of adoptive immunotherapy.

[0101] According to embodiments of the present invention, there is provided a kit for administering adoptive immunotherapy to a subject, comprising any one of the compositions or modified cells described herein and instructions for delivering the composition or modified cell to a subject in need of adoptive immunotherapy.

[0102] According to embodiments of the present invention, there is provided any one of the compositions or modified cells described herein for use in adoptive immunotherapy, comprising delivering the composition or modified cell described herein to a subject in need of adoptive immunotherapy.

[0103] A method of treating a disease or disorder, the method comprising delivering any one of the compositions or modified cells described herein to the subject, preferably wherein the disease or disorder is cancer.

[0104] According to embodiments of the present invention, there is provided a composition, method, process, kit, or use as characterized by one or more elements disclosed herein.

[0105] According to embodiments of the present invention, the modified immune cells (e.g., T cells) obtained by the described methods are intended to be used as a medicament for treating a cancer, infection, or immune disease in a subject in need thereof. The administration of the modified immune cell or a population thereof to a subject may be carried out in any convenient manner known in the art, including, but not limited to, aerosol inhalation, injection, ingestion, transfusion, implantation or transplantation. Injection or transfusion may be performed subcutaneously, intradermally, intratumorally, intranodally, intramedullary, intramuscularly, by intravenous or intralymphatic injection, or intraperitoneally. According to embodiments of the present invention, there is provided a method for adoptive cell therapy or prophylaxis comprising administering the modified cells to a subject suffering from or determined to be at risk of suffering from a cancer or an infection.

[0106] According to embodiments of the present invention, there is provided use of any one of the compositions or modified cells described herein for reducing or preventing host versus graft response (HvG) during treating, ameliorating, or preventing cancer, a disease, or an infection in a subject, comprising delivering the composition or modified cell to a subject experiencing or at risk of experiencing host-versus-graft rejection (HvG).

[0107] According to embodiments of the present invention, there is provided a medicament comprising any one of the modified cells described herein for treating, ameliorating, or preventing host-versus-graft rejection (HvG), such that the medicament is administered by delivering the composition to a subject experiencing or at risk of experiencing host-versus-graft rejection (HvG).

[0108] According to embodiments of the present invention, there is provided an RNA molecule for use in modifying a cell (e.g. lymphocyte, T-cell, CAR-T cell) to treat, ameliorate, or prevent host-versus-graft rejection (HvG) in a subject. The RNA molecule may be delivered to the cell ex vivo, in vitro, or in vivo.

[0109] According to embodiments of the present invention, there is provided a kit for inactivating a CIITA allele in a cell, comprising any one of the compositions described herein and instructions for delivering the composition to the cell.

[0110] According to embodiments of the present invention, there is provided use of any one of the compositions or modified cells described herein for adoptive immunotherapy, comprising delivering the composition or modified cell to a subject in need of adoptive immunotherapy.

[0111] According to embodiments of the present invention, there is provided a medicament comprising any one of the compositions or modified cells described herein for use in adoptive immunotherapy, wherein the medicament is administered by delivering the composition or modified cell to a subject in need of adoptive immunotherapy.

[0112] According to embodiments of the present invention, there is provided a cell modified by the method described herein or modified using the compositions described herein.

[0113] According to embodiments of the present invention, there is provided a gene editing composition comprising an RNA molecule comprising a guide sequence portion having 17-50 contiguous nucleotides containing nucleotides in the sequence set forth in any one of SEQ ID NOS: 1-34199. In some embodiments, the RNA molecule further comprises a portion having a sequence which binds to a CRISPR nuclease. In some embodiments, the sequence which binds to a CRISPR nuclease is a tracrRNA sequence. In some embodiments the RNA comprising a guide sequence portion is a crRNA molecule. In some embodiments an RNA molecule comprising a guide sequence portion is a single-guide RNA (sgRNA) molecule.

[0114] In some embodiments, the RNA molecule further comprises a portion having a tracr mate sequence.

[0115] In some embodiments, the RNA molecule may further comprise one or more linker portions.

[0116] According to embodiments of the present invention, an RNA molecule may be up to 1000, 900, 800, 700, 600, 500, 450, 400, 350, 300, 290, 280, 270, 260, 250, 240, 230, 220, 210, 200, 190, 180, 170, 160, 150, 140, 130, 120, 110, or 100 nucleotides in length. Each possibility represents a separate embodiment. In embodiments of the present invention, the RNA molecule may be 17 up to 300 nucleotides in length, 100 up to 300 nucleotides in length, 150 up to 300 nucleotides in length, 100 up to 500 nucleotides in length, 100 up to 400 nucleotides in length, 200 up to 300 nucleotides in length, 100 to 200 nucleotides in length, or 150 up to 250 nucleotides in length. Each possibility represents a separate embodiment.

[0117] According to some embodiments of the present invention, the composition further comprises a tracrRNA molecule.

[0118] According to some embodiments of the present invention, there is provided a method for inactivating CIITA expression in a cell, the method comprising delivering to the cell a composition comprising an RNA molecule comprising a guide sequence portion having 17-50 contiguous nucleotides containing nucleotides in the sequence set forth in any one of SEQ ID NOs: 1-34199 and a CRISPR nuclease.

[0119] According to some embodiments of the present invention, there is provided a method for preventing host-versus-graft rejection (HvG), the method comprising delivering to a cell of a subject a composition comprising an RNA molecule comprising a guide sequence portion having 17-50 contiguous nucleotides containing nucleotides in the sequence set forth in any one of SEQ ID NOS: 1-34199 and a CRISPR nuclease.

[0120] According to embodiments of the present invention, at least one CRISPR nuclease and the RNA molecule or RNA molecules are delivered to the subject and/or cells substantially at the same time or at different times.

[0121] In some embodiments, a tracrRNA molecule is delivered to the subject and/or cells substantially at the same time or at different times as the CRISPR nuclease and RNA molecule or RNA molecules.

[0122] The compositions and methods of the present disclosure may be utilized for treating, preventing, ameliorating, or slowing progression of host-versus-graft rejection (HvG).

[0123] Any one of, or combination of, the strategies for deactivating CIITA expression described herein may be used in the context of the invention.

[0124] In embodiments of the present invention, a guide RNA molecule is used to direct a CRISPR nuclease to an exon or a splice site of a CIITA allele in order to create a double-stranded break (DSB), leading to insertion or deletion of nucleotides by inducing an error-prone non-homologous end-joining (NHEJ) mechanism and formation of a frameshift mutation in the CIITA allele. The frameshift mutation may result in, for example, inactivation or knockout of the CIITA allele by generation of an early stop codon in the CIITA allele and to generation of a truncated protein or to nonsense-mediated mRNA decay of the transcript of the allele. In further embodiments, one RNA molecule is used to direct a CRISPR nuclease to a promoter of a CIITA allele.

[0125] In some embodiments, the method is utilized for treating a subject at risk for host-versus-graft rejection (HvG), which are disease phenotypes resulting from expression of the CIITA gene. In such embodiments, the method results in improvement, amelioration, or prevention of the disease phenotype.

[0126] Embodiments of compositions described herein include at least one CRISPR nuclease, guide RNA molecule(s), and optionally a tracrRNA molecule(s), being effective in a subject or cells at the same time. The at least one CRISPR nuclease, guide RNA molecule(s), and optional tracrRNA molecule(s) may be delivered substantially at the same time or can be delivered at different times but have effect at the same time. For example, this includes delivering the CRISPR nuclease to the subject or cells before the guide RNA molecule and/or tracrRNA molecule is substantially extant in the subject or cells.

[0127] In some embodiments, the cell is a lymphocyte. In some embodiments, the cell is a T cell. In some embodiments, the cell is a T regulatory cell. In some embodiments, the cell is a B cell. In some embodiments, the cell is a natural killer (NK) cell. In some embodiments, the cell is a macrophage. In some embodiments, the cell is a stem cell. In some embodiments, the cell is a fibroblast, blood cell, hepatocyte, keratinocyte, or any other cell type capable of being reprogrammed to an induced pluripotent stem cell (iPSC).

### CIITA Editing Strategies

[0128] The present invention provides methods to knockout CIITA alleles in cells of a subject, thereby improving the performance of the cells, or cells derived therefrom, in adoptive transfer therapies. The present invention also provides methods to knockout CIITA alleles in cells of a subject, thereby avoiding host-versus-graft rejection (HvG) upon adoptive transfer of the cells, or cells derived therefrom, to a subject in need of the adoptive transfer.

[0129] CIITA editing strategies include, but are not limited to, biallelic knockout by targeting any one of, or a combination of, Exons 1-20, including within thirty nucleotides upstream and downstream of the exons to flank splice donor and acceptor sites, as frameshifts in these exons lead to non-functional, truncated CIITA proteins or non-sense mediated decay of the mutated CIITA transcripts.

### CRISPR Nucleases and PAM Recognition

[0130] In some embodiments, the sequence specific nuclease is selected from CRISPR nucleases, or is a functional variant thereof. In some embodiments, the sequence specific nuclease is an RNA guided DNA nuclease. In such embodiments, the RNA sequence which guides the RNA guided DNA nuclease (e.g., Cpf1) binds to and/or directs the RNA guided DNA nuclease to all CIITA alleles in a cell. In some embodiments, the CRISPR complex does not further comprise a tracrRNA. A skilled artisan will appreciate that RNA molecules can be engineered to bind to a target of choice in a genome by commonly known methods in the art.

[0131] The term “PAM” as used herein refers to a nucleotide sequence of a target DNA located in proximity to the targeted DNA sequence and recognized by the CRISPR nuclease complex. The PAM sequence may differ depending on the nuclease identity. In addition, there are CRISPR nucleases that can target almost all PAMs. In some embodiments of the present invention, a CRISPR system utilizes one or more RNA molecules having a guide sequence portion to direct a CRISPR nuclease to a target DNA site via Watson-Crick base-pairing between the guide sequence portion and the protospacer on the target DNA site, which is next to the protospacer adjacent motif (PAM), which is an additional requirement for target recognition. The CRISPR nuclease then mediates cleavage of the target DNA site to create a double-stranded break within the protospacer. In a non-limiting example, a type II CRISPR system utilizes a mature crRNA:tracrRNA complex that directs the CRISPR nuclease, e.g. Cas9 to the target DNA the target DNA via Watson-Crick base-pairing between the guide sequence portion of the crRNA and the protospacer on the target DNA next to the protospacer adjacent motif (PAM). A skilled artisan will appreciate that each of the engineered RNA molecule of the present invention is further designed such as to associate with a target genomic DNA sequence of interest next to a protospacer adjacent motif (PAM), e.g., a PAM matching the sequence relevant for the type of CRISPR nuclease utilized, such as for a non-limiting example, NGG or NAG, wherein “N” is any nucleobase, for Streptococcus pyogenes Cas9 WT (SpCAS9); NNGRRT for Staphylococcus aureus (SaCas9); NNNVRYM for Jejuni Cas9 WT; NGAN or NGNG for SpCas9-VQR variant; NGCG for SpCas9-VRER variant; NGAG for SpCas9-EQR variant; NRRH for SpCas9-NRRH variant, wherein N is any nucleobase, R is A or G and H is A, C, or T; NRTH for SpCas9-NRTH variant, wherein N is any nucleobase, R is A or G and H is A, C, or T; NRCH for SpCas9-NRCH variant, wherein N is any nucleobase, R is A or G and H is A, C, or T; NG for SpG variant of SpCas9 wherein N is any nucleobase; NG or NA for SpCas9-NG variant of SpCas9 wherein N is any nucleobase; NR or NRN or NYN for SpRY variant of SpCas9, wherein N is any nucleobase, R is A or G and Y is C or T; NNG for Streptococcus canis Cas9 variant (ScCas9), wherein N is any nucleobase; NNNRRT for SaKKH-Cas9 variant of Staphylococcus aureus (SaCas9), wherein N is any nucleobase, and R is A or G; NNNNGATT for Neisseria meningitidis (NmCas9), wherein N is any nucleobase; TTN for Alicyclobacillus acidiphilus Cas12b (AacCas12b), wherein N is any nucleobase; or TTTV for Cpf1, wherein V is A, C or G. RNA molecules of the present invention are each designed to form complexes in conjunction with one or more different CRISPR nucleases and designed to target polynucleotide sequences of interest utilizing one or more different PAM sequences respective to the CRISPR nuclease utilized.

[0132] In some embodiments, an RNA-guided DNA nuclease e.g., a CRISPR nuclease, may be used to cause a DNA break, either double or single-stranded in nature, at a desired location in the genome of a cell. The most commonly used RNA-guided DNA nucleases are derived from CRISPR systems, however, other RNA-guided DNA nucleases are also contemplated for use in the genome editing compositions and methods described herein. For instance, see U.S. Patent Publication No. 2015/0211023, incorporated herein by reference.

[0133] CRISPR systems that may be used in the practice of the invention vary greatly. CRISPR systems can be a type I, a type II, or a type III system. Non-limiting examples of suitable CRISPR proteins include Cas3, Cas4, Cas5, Cas5e (or CasD), Cas6, Cashe, Cas6f, Cas7, Cas8a1, Cas8a2, Cas8b, Cas8c, Cas9, Cas10, Cas1 Od, CasF, CasG, CasH, Csy1, Csy2, Csy3, Cse1 (or CasA), Cse2 (or CasB), Cse3 (or CasE), Cse4 (or CasC), Csc1, Csc2, Csa5, Csn2, Csm2, Csm3, Csm4, Csm5, Csm6, Cmr1, Cmr3, Cmr4, Cmr5, Cmr6, Csb1, Csb2, Csb3, Csx17, Csx14, Csx10, Csx16, CsaX, Csx3, Csz1, Csx15, Csf1, Csf2, Csf3, Csf4, and Cul966.

[0134] In some embodiments, the RNA-guided DNA nuclease is a CRISPR nuclease derived from a type II CRISPR system (e.g., Cas9). The CRISPR nuclease may be derived from Streptococcus pyogenes, Streptococcus thermophilus, Streptococcus sp., Staphylococcus aureus, Neisseria meningitidis, Treponema denticola, Nocardiopsis dassonvillei, Streptomyces pristinaespiralis, Streptomyces viridochromogenes, Streptomyces viridochromogenes, Streptosporangium roseum, Streptosporangium roseum, Alicyclobacillus acidocaldarius, Bacillus pseudomycoides, Bacillus selenitireducens, Exiguobacterium sibiricum, Lactobacillus delbrueckii, Lactobacillus salivarius, Microscilla marina, Burkholderiales bacterium, Polaromonas naphthalenivorans, Polaromonas sp., Crocosphaera watsonii, Cyanothece sp., Microcystis aeruginosa, Synechococcus sp., Acetohalobium arabaticum, Ammonifex degensii, Caldicelulosiruptor becscii, Candidatus Desulforudis, Clostridium botulinum, Clostridium difficile, Finegoldia magna, Natranaerobius thermophilus, Pelotomaculum thermopropionicum, Acidithiobacillus caldus, Acidithiobacillus ferrooxidans, Allochromatium vinosum, Marinobacter sp., Nitrosococcus halophilus, Nitrosococcus watsoni, Pseudoalteromonas haloplanktis, Ktedonobacter racemifer, Methanohalobium evestigatum, Anabaena variabilis, Nodularia spumigena, Nostoc sp., Arthrospira maxima, Arthrospira platensis, Arthrospira sp., Lyngbya sp., Microcoleus chthonoplastes, Oscillatoria sp., Petrotoga mobilis, Thermosipho africanus, Acaryochloris marina, or any species which encodes a CRISPR nuclease with a known PAM sequence. CRISPR nucleases encoded by uncultured bacteria may also be used in the context of the invention. (See Burstein et al. Nature, 2017). Variants of CRIPSR proteins having known PAM sequences e.g., SpCas9 D1135E variant, SpCas9 VQR variant, SpCas9 EQR variant, or SpCas9 VRER variant may also be used in the context of the invention.

[0135] Thus, an RNA guided DNA nuclease of a CRISPR system, such as a Cas9 protein or modified Cas9 or homolog or ortholog of Cas9, or other RNA guided DNA nucleases belonging to other types of CRISPR systems, such as Cpf1 and its homologs and orthologs, may be used in the compositions of the present invention. Additional CRISPR nucleases may also be used, for example, the nucleases described in PCT International Application Publication Nos. WO2020/223514 and WO2020/223553, which are hereby incorporated by reference.

[0136] In certain embodiments, the CRIPSR nuclease may be a “functional derivative” of a naturally occurring Cas protein. A “functional derivative” of a native sequence polypeptide is a compound having a qualitative biological property in common with a native sequence polypeptide. “Functional derivatives” include, but are not limited to, fragments of a native sequence and derivatives of a native sequence polypeptide and its fragments, provided that they have a biological activity in common with a corresponding native sequence polypeptide. A biological activity contemplated herein is the ability of the functional derivative to hydrolyze a DNA substrate into fragments. The term “derivative” encompasses both amino acid sequence variants of polypeptide, covalent modifications, and fusions thereof. Suitable derivatives of a Cas polypeptide or a fragment thereof include but are not limited to mutants, fusions, covalent modifications of Cas protein or a fragment thereof. Derivatives include, but are not limited to, CRISPR nickases, catalytically inactive or “dead” CRISPR nucleases, and fusion of a CRISPR nuclease or derivative thereof to other enzymes such as base editors or retrotransposons. See for example, Anzalone et al. (2019) and PCT International Application No. PCT/US2020/037560.

[0137] In some embodiments, the CRISPR nuclease or derivative thereof may be fused to a protein that has an enzymatic activity. In some embodiments, the enzymatic activity modifies a target DNA. In some embodiments, the enzymatic activity is nuclease activity, methyltransferase activity, demethylase activity, DNA repair activity, DNA damage activity, deamination activity, dismutase activity, alkylation activity, depurination activity, oxidation activity, pyrimidine dimer forming activity, integrase activity, transposase activity, recombinase activity, polymerase activity, ligase activity, helicase activity, photolyase activity or glycosylase activity. In some cases, the enzymatic activity is nuclease activity. In some cases, the nuclease activity introduces a double strand break in the target DNA. In some cases, the enzymatic activity modifies a target polypeptide associated with the target DNA. In some cases, the enzymatic activity is methyltransferase activity, demethylase activity, acetyltransferase activity, deacetylase activity, kinase activity, phosphatase activity, ubiquitin ligase activity, deubiquitinating activity, adenylation activity, deadenylation activity, SUMOylating activity, deSUMOylating activity, ribosylation activity, deribosylation activity, myristoylation activity or demyristoylation activity. In some cases, the target polypeptide is a histone and the enzymatic activity is methyltransferase activity, demethylase activity, acetyltransferase activity, deacetylase activity, kinase activity, phosphatase activity, ubiquitin ligase activity or deubiquitinating activity.

[0138] Cas protein, which includes Cas protein or a fragment thereof, as well as derivatives of Cas protein or a fragment thereof, may be obtainable from a cell or synthesized chemically or by a combination of these two procedures. The cell may be a cell that naturally produces Cas protein, or a cell that naturally produces Cas protein and is genetically engineered to produce the endogenous Cas protein at a higher expression level or to produce a Cas protein from an exogenously introduced nucleic acid, which nucleic acid encodes a Cas that is same or different from the endogenous Cas. In some cases, the cell does not naturally produce Cas protein and is genetically engineered to produce a Cas protein.

[0139] In some embodiments, the CRISPR nuclease is Cpf1. Cpf1 is a single RNA-guided endonuclease which utilizes a T-rich protospacer-adjacent motif. Cpf1 cleaves DNA via a staggered DNA double-stranded break. Two Cpf1 enzymes from Acidaminococcus and Lachnospiraceae have been shown to carry out efficient genome-editing activity in human cells. (See Zetsche et al., 2015).

[0140] Thus, an RNA guided DNA nuclease of a Type II CRISPR System, such as a Cas9 protein or modified Cas9 or homologs, orthologues, or variants of Cas9, or other RNA guided DNA nucleases belonging to other types of CRISPR systems, such as Cpf1 and its homologs, orthologues, or variants, may be used in the present invention.

[0141] In some embodiments, the guide molecule comprises one or more chemical modifications which imparts a new or improved property (e.g., improved stability from degradation, improved hybridization energetics, or improved binding properties with an RNA guided DNA nuclease). Suitable chemical modifications include, but are not limited to: modified bases, modified sugar moieties, or modified inter-nucleoside linkages. Non-limiting examples of suitable chemical modifications include: 4-acetylcytidine, 5-(carboxyhydroxymethyl) uridine, 2′-O-methylcytidine, 5-carboxymethylaminomethyl-2-thiouridine, 5-carboxymethylaminomethyluridine, dihydrouridine, 2′-O-methylpseudouridine, “beta, D-galactosylqueuosine”, 2′-O-methylguanosine, inosine, N6-isopentenyladenosine. I-methyladenosine, 1-methylpseudouridine, 1-methylguanosine, 1-methylinosine, “2,2-dimethylguanosine”, 2-methyladenosine, 2-methylguanosine, 3-methylcytidine, 5-methylcytidine, N6-methyladenosine, 7-methylguanosine, 5-methylaminomethyluridine, 5-methoxyaminomethyl-2-thiouridine, “beta, D-mannosylqueuosine”, 5-methoxycarbonylmethyl-2-thiouridine, S-methoxycarbonylmethyluridine, 5-methoxyuridine, 2-methylthio-N6-isopentenyladenosine, N-((9-beta-D-ribofuranosyl-2-methylthiopurine-6-yl)carbamoyl)threonine, N-((9-beta-D-ribofuranosylpurine-6-yl)N-methylcarbamoyl) threonine, uridine-5-oxyacetic acid-methylester, uridine-5-oxyacetic acid, wybutoxosine, queuosine, 2-thiocytidine, 5-methyl-2-thiouridine, 2-thiouridine, 4-thiouridine, 5-methyluridine, N-((9-beta-D-ribofuranosylpurine-6-yl)-carbamoyl)threonine, 2′-O-methyl-5-methyluridine, 2′-O-methyluridine, wybutosine, “3-(3-amino-3-carboxy-propyl) uridine, (acp3)u”. 2′-0-methyl (M), 3′-phosphorothioate (MS), 3′-thioPACE (MSP), pseudouridine, or 1-methyl pseudo-uridine. Each possibility represents a separate embodiment of the present invention.

[0142] In addition to targeting CIITA alleles by a RNA-guided CRISPR nuclease, other means of inhibiting CIITA expression in a target cell include but are not limited to use of a gapmer, shRNA, siRNA, a customized TALEN, meganuclease, or zinc finger nuclease, a small molecule inhibitor, and any other method known in the art for reducing or eliminating expression of a gene in a target cell. See, for example, U.S. Pat. Nos. 6,506,559; 7,560,438; 8,420,391; 8,552,171; 7,056,704; 7,078,196; 8,362,231; 8,372,968; 9,045,754; and PCT International Publication Nos. WO/2004/067736; WO/2006/097853; WO/2003/087341; WO/2000/0415661; WO/2003/080809; WO/2010/079430; WO/2010/079430; WO/2011/072246; WO/2018/057989; and WO/2017/164230, the entire contents of each of which are incorporated herein by reference.

[0143] Advantageously, the guide RNA molecules presented herein provide improved CIITA knockout efficiency when complexed with a CRISPR nuclease in a cell relative to other guide RNA molecules. These specifically designed sequences may also be useful for identifying CIITA target sites for other nucleotide targeting-based gene-editing or gene-silencing methods, for example, siRNA, TALENs, meganucleases or zinc-finger nucleases.

### Delivery to Cells

[0144] Any one of the compositions described herein may be delivered to a target cell by any suitable means. RNA molecule compositions of the present invention may be targeted to any cell which contains and/or expresses a CIITA allele, such as a mammalian lymphocyte or stem cell. For example, in one embodiment the RNA molecule specifically targets CIITA alleles in a target cell and the target cell is a lymphocyte, a T cell, a T regulatory cell, a B cell, a natural killer (NK) cell, a macrophage, a stem cell, or a fibroblast, blood cell, hepatocyte, keratinocyte, or any other cell type capable of being reprogrammed to an induced pluripotent stem cell (iPSC). The delivery to the cell may be performed in vivo, ex vivo, or in vitro. Further, the nucleic acid compositions described herein may be delivered to a cell as one or more of DNA molecules, RNA molecules, ribonucleoproteins (RNP), nucleic acid vectors, or any combination thereof.

[0145] In some embodiments, the RNA molecule comprises a chemical modification. Non-limiting examples of suitable chemical modifications include 2′-0-methyl (M), 2′-0-methyl. 3′phosphorothioate (MS) or 2′-0-methyl, 3′thioPACE (MSP), pseudouridine, and 1-methyl pseudo-uridine. Each possibility represents a separate embodiment of the present invention.

[0146] In some embodiments, any one of the compositions described herein is delivered to a cell in-vivo. The composition may be delivered to the cell by any known in-vivo delivery method, including but not limited to, viral transduction, for example, using a lentivirus or adeno-associated virus (AAV), nanoparticle delivery, etc. Additional detailed delivery methods are described throughout this section.

[0147] In some embodiments, any one of the compositions described herein is delivered to a cell ex-vivo. The composition may be delivered to the cell by any known ex-vivo delivery method, including but not limited to, nucleofection, electroporation, viral transduction, for example, using a lentivirus or adeno-associated virus (AAV), nanoparticle delivery, liposomes, etc. Additional detailed delivery methods are described throughout this section.

[0148] Any suitable viral vector system may be used to deliver nucleic acid compositions e.g., the RNA molecule compositions of the subject invention. Conventional viral and non-viral based gene transfer methods can be used to introduce nucleic acids and target tissues. In certain embodiments, nucleic acids are administered for in vivo or ex vivo gene therapy uses. Non-viral vector delivery systems include naked nucleic acid, and nucleic acid complexed with a delivery vehicle such as a liposome or poloxamer. For a review of gene therapy procedures, see Anderson (1992); Nabel & Felgner (1993); Mitani & Caskey (1993); Dillon (1993); Miller (1992); Van Brunt (1988); Vigne (1995); Kremer & Perricaudet (1995); Haddada et al. (1995); and Yu et al. (1994).

[0149] Methods of non-viral delivery of nucleic acids and/or proteins include electroporation, lipofection, microinjection, biolistics, particle gun acceleration, virosomes, liposomes, immunoliposomes, lipid nanoparticles (LNPs), polycation or lipid:nucleic acid conjugates, artificial virions, and agent-enhanced uptake of nucleic acids or can be delivered to plant cells by bacteria or viruses (e.g., Agrobacterium, Rhizobium sp. NGR234, Sinorhizoboiummeliloti, Mesorhizobium loti, tobacco mosaic virus, potato virus X, cauliflower mosaic virus and cassava vein mosaic virus). (See, e.g., Chung et al., 2006). Sonoporation using, e.g., the Sonitron 2000 system (Rich-Mar), can also be used for delivery of nucleic acids. Cationic-lipid mediated delivery of proteins and/or nucleic acids is also contemplated as an in vivo, ex vivo, or in vitro delivery method. (See Zuris et al. (2015); see also Coelho et al. (2013); Judge et al. (2006); and Basha et al. (2011)).

[0150] Non-viral vectors, such as transposon-based systems e.g. recombinant Sleeping Beauty transposon systems or recombinant PiggyBac transposon systems, may also be delivered to a target cell and utilized for transposition of a polynucleotide sequence of a molecule of the composition or a polynucleotide sequence encoding a molecule of the composition in the target cell.

[0151] Additional exemplary nucleic acid delivery systems include those provided by Amaxa® Biosystems (Cologne, Germany), Maxcyte, Inc. (Rockville, Md.), BTX Molecular Delivery Systems (Holliston, Mass.) and Copernicus Therapeutics Inc., (see, e.g., U.S. Pat. No. 6,008,336). Lipofection is described in e.g., U.S. Pat. Nos. 5,049,386, 4,946,787; and 4,897,355, and lipofection reagents are sold commercially (e.g., Transfectam™, Lipofectin™ and Lipofectamine™ RNAiMAX). Cationic and neutral lipids that are suitable for efficient receptor-recognition lipofection of polynucleotides include those disclosed in PCT International Publication Nos. WO/1991/017424 and WO/1991/016024. Delivery can be to cells (ex vivo administration) or target tissues (in vivo administration).

[0152] The preparation of lipid:nucleic acid complexes, including targeted liposomes such as immunolipid complexes, is well known to one of skill in the art (see, e.g., Crystal, Science (1995); Blaese et al., (1995); Behr et al., (1994); Remy et al. (1994); Gao and Huang (1995); Ahmad and Allen (1992); U.S. Pat. Nos. 4,186,183; 4,217,344; 4,235,871; 4,261,975; 4,485,054; 4,501,728; 4,774,085; 4,837,028; and 4,946,787).

[0153] Additional methods of delivery include the use of packaging the nucleic acids to be delivered into EnGeneIC delivery vehicles (EDVs). These EDVs are specifically delivered to target tissues using bispecific antibodies where one arm of the antibody has specificity for the target tissue and the other has specificity for the EDV. The antibody brings the EDVs to the target cell surface and then the EDV is brought into the cell by endocytosis. Once in the cell, the contents are released (See MacDiarmid et al., 2009).

[0154] Delivery vehicles include, but are not limited to, bacteria, preferably non-pathogenic, vehicles, nanoparticles, exosomes, microvesicles, gene gun delivery, for example, by attachment of a composition to a gold particle which is fired into a cell using via a “gene-gun”, viral vehicles, including but not limited to lentiviruses, AAV, and retroviruses), virus-like particles (VLPs). large VLPs (LVLPs), lentivirus-like particles, transposons, viral vectors, naked vectors, DNA, or RNA, among other delivery vehicles known in the art.

[0155] The delivery of a CRISPR nuclease and/or a polynucleotide encoding the CRIPSR nuclease, and optionally additional nucleotide molecules and/or additional proteins or peptides, may be performed by utilizing a single delivery vehicle or method or a combination of different delivery vehicles or methods. For example, a CRISPR nuclease may be delivered to a cell utilizing an LNP, and a crRNA molecule and tracrRNA molecule may be delivered to the cell utilizing AAV. Alternatively, a CRISPR nuclease may be delivered to a cell utilizing an AAV particle, and a crRNA molecule and tracrRNA molecule may be delivered to the cell utilizing a separate AAV particle, which may be advantageous due to size limitations.

[0156] The use of RNA or DNA viral based systems for viral mediated delivery of nucleic acids take advantage of highly evolved processes for targeting a virus to specific cells in the body and trafficking the viral payload to the nucleus. Viral vectors can be administered directly to patients (in vivo) or they can be used to treat cells in vitro and the modified cells are administered to patients (ex vivo). Conventional viral based systems for the delivery of nucleic acids include, but are not limited to, retroviral, lentivirus, adenoviral, adeno-associated, vaccinia and herpes simplex virus vectors for gene transfer. An RNA virus may be utilized for delivery of the compositions described herein. Additionally, high transduction efficiencies have been observed in many different cell types and target tissues. Nucleic acid of the invention may be delivered by non-integrating lentivirus. Optionally, RNA delivery with Lentivirus is utilized. Optionally the lentivirus includes mRNA of the nuclease and a guide RNA molecule. Optionally, the lentivirus includes the nuclease protein and a guide RNA molecule. Optionally the lentivirus includes mRNA of the nuclease, a guide RNA molecule, and a tracrRNA molecule. Optionally, the lentivirus includes the nuclease protein, a guide RNA molecule, and a tracrRNA molecule.

[0157] The tropism of a retrovirus can be altered by incorporating foreign envelope proteins, expanding the potential target population of target cells. Lentiviral vectors are retroviral vectors that are able to transduce or infect non-dividing cells and typically produce high viral titers. Selection of a retroviral gene transfer system depends on the target tissue. Retroviral vectors are comprised of cis-acting long terminal repeats with packaging capacity for up to 6-10 kb of foreign sequence. The minimum cis-acting LTRs are sufficient for replication and packaging of the vectors, which are then used to integrate the therapeutic gene into the target cell to provide permanent transgene expression. Widely used retroviral vectors include those based upon murine leukemia virus (MuLV), gibbon ape leukemia virus (GaLV), Simian Immunodeficiency virus (SIV), human immunodeficiency virus (HIV), and combinations thereof (See, e.g., Buchschacher et al. (1992); Johann et al. (1992); Sommerfelt et al. (1990); Wilson et al. (1989); Miller et al. (1991); PCT International Publication No. WO/1994/026877A1).

[0158] At least six viral vector approaches are currently available for gene transfer in clinical trials, which utilize approaches that involve complementation of defective vectors by genes inserted into helper cell lines to generate the transducing agent.

[0159] pLASN and MFG-S are examples of retroviral vectors that have been used in clinical trials (See Dunbar et al., 1995; Kohn et al., 1995; Malech et al., 1997). PA317/pLASN was the first therapeutic vector used in a gene therapy trial (Blaese et al., 1995). Transduction efficiencies of 50% or greater have been observed for MFG-S packaged vectors. (Ellem et al., (1997); Dranoff et al., 1997).

[0160] Packaging cells are used to form virus particles that are capable of infecting a host cell. Such cells include 293 cells, which package adenovirus, AAV, and Psi-2 cells or PA317 cells, which package retrovirus. Viral vectors used in gene therapy are usually generated by a producer cell line that packages a nucleic acid vector into a viral particle. The vectors typically contain the minimal viral sequences required for packaging and subsequent integration into a host (if applicable), other viral sequences being replaced by an expression cassette encoding the protein to be expressed. The missing viral functions are supplied in trans by the packaging cell line. For example, AAV vectors used in gene therapy typically only possess inverted terminal repeat (ITR) sequences from the AAV genome which are required for packaging and integration into the host genome. Viral DNA is packaged in a cell line, which contains a helper plasmid encoding the other AAV genes, namely rep and cap, but lacking ITR sequences. The cell line is also infected with adenovirus as a helper. The helper virus promotes replication of the AAV vector and expression of AAV genes from the helper plasmid. The helper plasmid is not packaged in significant amounts due to a lack of ITR sequences. Contamination with adenovirus can be reduced by, e.g., heat treatment to which adenovirus is more sensitive than AAV. Additionally, AAV can be produced at clinical scale using baculovirus systems (see U.S. Pat. No. 7,479,554).

[0161] In many gene therapy applications, it is desirable that the gene therapy vector be delivered with a high degree of specificity to a particular tissue type. Accordingly, a viral vector can be modified to have specificity for a given cell type by expressing a ligand as a fusion protein with a viral coat protein on the outer surface of the virus. The ligand is chosen to have affinity for a receptor known to be present on the cell type of interest. For example, Han et al. (1995) reported that Moloney murine leukemia virus can be modified to express human heregulin fused to gp70, and the recombinant virus infects certain human breast cancer cells expressing human epidermal growth factor receptor. This principle can be extended to other virus-target cell pairs, in which the target cell expresses a receptor and the virus expresses a fusion protein comprising a ligand for the cell-surface receptor. For example, filamentous phage can be engineered to display antibody fragments (e.g., FAB or Fv) having specific binding affinity for virtually any chosen cellular receptor. Although the above description applies primarily to viral vectors, the same principles can be applied to nonviral vectors. Such vectors can be engineered to contain specific uptake sequences which favor uptake by specific target cells.

[0162] Gene therapy vectors can be delivered in vivo by administration to an individual patient, for example by systemic administration (e.g., intravitreal, intravenous, intraperitoneal, intramuscular, subdermal, or intracranial infusion) or topical application.

[0163] Alternatively, vectors can be delivered to cells ex vivo, such as cells explanted from an individual patient (e.g., lymphocytes, bone marrow aspirates, tissue biopsy) or universal donor hematopoietic stem cells, followed by reimplantation of the cells into a patient, optionally after selection for cells which have incorporated the vector. A non-limiting exemplary ex vivo approach may involve removal of tissue (e.g., peripheral blood, bone marrow, and spleen) from a patient for culture, nucleic acid transfer to the cultured cells (e.g., hematopoietic stem cells), followed by grafting the cells to a target tissue (e.g., bone marrow, and spleen) of the patient. In some embodiments, the stem cell or hematopoietic stem cell may be further treated with a viability enhancer.

[0164] Ex vivo cell transfection for diagnostics, research, or for gene therapy (e.g., via re-infusion of the transfected cells into the host organism) is well known to those of skill in the art. In a preferred embodiment, cells are isolated from the subject organism, transfected with a nucleic acid composition, and re-infused back into the subject organism (e.g., patient). Various cell types suitable for ex vivo transfection are well known to those of skill in the art (See, e.g., Freshney, “Culture of Animal Cells, A Manual of Basic Technique and Specialized Applications (6th edition, 2010) and the references cited therein for a discussion of how to isolate and culture cells from patients).

[0165] Vectors (e.g., retroviruses, liposomes, etc.) containing therapeutic nucleic acid compositions can also be administered directly to an organism for transduction of cells in vivo. Administration is by any of the routes normally used for introducing a molecule into ultimate contact with blood or tissue cells including, but not limited to, injection, infusion, topical application (e.g., eye drops and cream) and electroporation. Suitable methods of administering such nucleic acids are available and well known to those of skill in the art, and, although more than one route can be used to administer a particular composition, a particular route can often provide a more immediate and more effective reaction than another route. According to some embodiments, the composition is delivered via IV injection.

[0166] Vectors suitable for introduction of transgenes into immune cells (e.g., T-cells) include non-integrating lentivirus vectors. See, e.g., U.S. Patent Publication No. 2009/0117617.

[0167] As mentioned above, the compositions described herein may be delivered to a target cell using a non-integrating lentiviral particle method, e.g. a LentiFlash® system. Such a method may be used to deliver mRNA or other types of RNAs into the target cell, such that delivery of the RNAs to the target cell results in assembly of the compositions described herein inside of the target cell. See also PCT International Publication Nos. WO/2013/014537, WO/2014/016690, WO/2016/185125, WO/2017/194902, and WO/2017/194903.

[0168] Pharmaceutically acceptable carriers are determined in part by the particular composition being administered, as well as by the particular method used to administer the composition. Accordingly, there is a wide variety of suitable formulations of pharmaceutical compositions available, as described below (See, e.g., Remington's Pharmaceutical Sciences, 17th ed., 1989).

Examples of RNA Guide Sequences which Specifically Target Alleles of CIITA Gene

[0169] Although a large number of guide sequences can be designed to target the CIITA gene, the nucleotide sequences described in Table 2 and are identified by SEQ ID NOs: 1-34194 were specifically selected to effectively implement the methods set forth herein.

[0170] Table 2 lists guide sequences designed for use as described in the embodiments above to associate specific sequences within a CIITA allele. Each engineered guide molecule is further designed such as to associate with a target genomic DNA sequence of interest that lies next to a protospacer adjacent motif (PAM), e.g., a PAM matching the sequence NGG or NAG, where “N” is any nucleobase. The guide sequences were designed to work in conjunction with one or more different CRISPR nucleases, including, but not limited to, e.g. SpCas9WT (PAM SEQ: NGG), SpCas9.VQR.1 (PAM SEQ: NGAN), SpCas9.VQR.2 (PAM SEQ: NGNG), SpCas9.EQR (PAM SEQ: NGAG), SpCas9.VRER (PAM SEQ: NGCG), SaCas9WT (PAM SEQ: NNGRRT), SpRY (PAM SEQ: NRN or NYN), NmCas9WT (PAM SEQ: NNNNGATT), Cpf1 (PAM SEQ: TTTV), JeCas9WT (PAM SEQ: NNNVRYM), OMNI-50 (PAM SEQ: NGG), OMNI-79 (PAM SEQ: NGG), OMNI-103 (PAM SEQ: NNRACT), OMNI-159 (NNNNCMAN), or OMNI-124 (PAM SEQ: NNGNRMNN).

[0171] Additional description of OMNI CRISPR nucleases is provided in PCT International Application Publication No. WO 2023/019269 A2, PCT International Application Publication Nos. WO 2022/170199 A2 and WO 2023/107946 A2, U.S. Pat. No. 11,666,641 B2 and PCT International Application Publication Nos. WO 2020/223514 A2, WO 2022/098693 A1, and WO 2023/019263 A1, U.S. Application Publication No. 2023/0122086 A1 and PCT International Application Publication Nos. WO 2021/248016 A2 and WO 2023/102407 A2, PCT International Application Publication No. WO 2022/087135 A1, and PCT International Application Publication No. WO 2022/226215 A1, the contents of each of which are hereby incorporated by reference.

[0172] RNA molecules of the present invention are each designed to form complexes in conjunction with one or more different CRISPR nucleases and designed to target polynucleotide sequences of interest utilizing one or more different PAM sequences respective to the CRISPR nuclease utilized.

[0173] As used herein, the following nucleotide identifiers are used to represent a referenced nucleotide base(s):

TABLE 1

| | |
|---|---|
| Nucleotide | |
| reference | Base(s) represented |

| | | | | |
|---|---|---|---|---|
| A | A | | | |
| C | | C | | |
| G | | | G | |
| T | | | | T |
| W | A | | | T |
| S | | C | G | |
| M | A | C | | |
| K | | | G | T |
| R | A | | G | |
| Y | | C | | T |
| B | | C | G | T |
| D | A | | G | T |
| H | A | C | | T |
| V | A | C | G | |
| N | A | C | G | T |

TABLE 2
Guide sequence portions designed to associate with specific CIITA gene targets

| | SEQ ID NOs: of | SEQ ID NOs: of | SEQ ID NOs: of |
|---|---|---|---|
| Target | 20 base guides | 21 base guides | 22 base guides |
| 16: 10904698-10904857 | 1-266 | 267-530 | 531-792 |
| Exon 10, including 30 nt | | | |
| upstream and 30 nt downstream | | | |
| of the exon | | | |
| 16: 10906453-10908194 | 793-4094 | 4095-7206 | 7207-10394 |
| Exon 11, including 30 nt | | | |
| upstream and 30 nt downstream | | | |
| of the exon | | | |
| 16: 10908983-10909232 | 10395-10840 | 10841-11284 | 11285-11726 |
| Exon 12, including 30 nt | | | |
| upstream and 30 nt downstream | | | |
| of the exon | | | |
| 16: 10910142-10910304 | 11727-11998 | 11999-12268 | 12269-12536 |
| Exon 13, including 30 nt | | | |
| upstream and 30 nt downstream | | | |
| of the exon | | | |
| 16: 10915524-10915695 | 12537-12826 | 12827-13114 | 13115-13400 |
| Exon 14, including 30 nt | | | |
| upstream and 30 nt downstream | | | |
| of the exon | | | |
| 16: 10916321-10916504 | 13401-13714 | 13715-14026 | 14027-14336 |
| Exon 15, including 30 nt | | | |
| upstream and 30 nt downstream | | | |
| of the exon | | | |
| 16: 10918394-10918571 | 14337-14638 | 14639-14938 | 14939-15236 |
| Exon 16, including 30 nt | | | |
| upstream and 30 nt downstream | | | |
| of the exon | | | |
| 16: 10922121-10922295 | 15237-15532 | 15533-15818 | 15819-16105 |
| Exon 17, including 30 nt | | | |
| upstream and 30 nt downstream | | | |
| of the exon | | | |
| 16: 10922361-10922535 | 16106-16393 | 16394-16663 | 16664-16937 |
| Exon 18, including 30 nt | | | |
| upstream and 30 nt downstream | | | |
| of the exon | | | |
| 16: 10923182-10923370 | 16938-17261 | 17262-17583 | 17584-17903 |
| Exon 19, including 30 nt | | | |
| upstream and 30 nt downstream | | | |
| of the exon | | | |
| 16: 10877156-10877427 | 17904-18393 | 18394-18881 | 18882-19367 |
| Exon 1, including 30 nt | | | |
| upstream and 30 nt downstream | | | |
| of the exon | | | |
| 16: 10935070-10936438 | 19368-21580 | 21581-23705 | 23706-25900 |
| Exon 20, including 30 nt | | | |
| upstream and 30 nt downstream | | | |
| of the exon | | | |
| 16: 10895236-10895473 | 25901-26322 | 26323-26742 | 26743-27160 |
| Exon 2, including 30 nt | | | |
| upstream and 30 nt downstream | | | |
| of the exon | | | |
| 16: 10895623-10895809 | 27161-27480 | 27481-27798 | 27799-28114 |
| Exon 3, including 30 nt | | | |
| upstream and 30 nt downstream | | | |
| of the exon | | | |
| 16: 10898624-10898777 | 28115-28368 | 28369-28620 | 28621-28870 |
| Exon 4, including 30 nt | | | |
| upstream and 30 nt downstream | | | |
| of the exon | | | |
| 16: 10898879-10899047 | 28871-29154 | 29155-29436 | 29437-29716 |
| Exon 5, including 30 nt | | | |
| upstream and 30 nt downstream | | | |
| of the exon | | | |
| 16: 10901468-10901603 | 29717-29934 | 29935-30150 | 30151-30364 |
| Exon 6, including 30 nt | | | |
| upstream and 30 nt downstream | | | |
| of the exon | | | |
| 16: 10901992-10902229 | 30365-30786 | 30787-31206 | 31207-31624 |
| Exon 7, including 30 nt | | | |
| upstream and 30 nt downstream | | | |
| of the exon | | | |
| 16: 10902612-10902846 | 31625-32034 | 32035-32432 | 32433-32832 |
| Exon 8, including 30 nt | | | |
| upstream and 30 nt downstream | | | |
| of the exon | | | |
| 16: 10903685-10903940 | 32833-33290 | 33291-33742 | 33743-34194 |
| Exon 9, including 30 nt | | | |
| upstream and 30 nt downstream | | | |
| of the exon | | | |

The indicated locations listed in column 1 of the Table 2 are based on gnomAD v3 database and UCSC Genome Browser assembly ID: hg38, Sequencing/Assembly provider ID: Genome Reference Consortium Human GRCh38.p12 (GCA_000001405.27). Assembly date: December 2013 initial release; December 2017 patch release 12.

[0174] Examples are provided below to facilitate a more complete understanding of the invention. The following examples illustrate the exemplary modes of making and practicing the invention. However, the scope of the invention is not limited to specific embodiments disclosed in these Examples, which are for purposes of illustration only.

### EXPERIMENTAL DETAILS

### Example 1: CIITA Modification Analysis

[0175] Guide sequences comprising 17-50 contiguous nucleotides containing nucleotides in the sequence set forth in any one of SEQ ID NOs: 1-34194 are screened for high on target activity using a CRISPR nuclease in T cells. On target activity is determined by DNA capillary electrophoresis analysis.

### Example 2: CIITA Editing in HeLa and Primary T Cells

[0176] CIITA editing in HeLa cells and primary T cells using a subset of the disclosed CTLA-targeting guide sequence portions are shown in FIG. 1 and FIG. 2.

[0177] A summary table of the CIITA editing data is shown below:

TABLE 3

| | | | % editing | % editing |
|---|---|---|---|---|
| Target | | | NGS | NGS |
| Site | Spacer Name | Guide Sequence Portion | (HeLa) | (T-cells) |
| 2 | hCIITA_S2_22bp_II | AGGUAGCCACCUUCUAGGGGCC | 68.08 | 62.73 |
| | | SEQ ID NO: 26812) | | |
| 3 | hCIITA_S3_22bp_II | CCAGAACCCGACACAGACACCA | 76.37 | 71.21 |
| | | SEQ ID NO: 27897) | | |
| 4 | hCIITA_S4_22bp_II | UCCAUGUCACACAACAGCCUGC | 31.82 | |
| | | (SEQ ID NO: 28044) | | |
| 5 | hCIITA_S5_22bp_II | ACGUCUUUUCUGACUUUUCUGC | 23.17 | |
| | | (SEQ ID NO: 29458) | | |
| 7 | hCIITA_S7_22bp_II | CACAGCUGAGCCCCCCACUGUG | 37.53 | |
| | | SEQ ID NO: 31294) | | |
| 8 | hCIITA_S8_22bp_II | AGUCGCUCACUGGUCCCACUAG | 31.66 | |
| | | SEQ ID NO: 31275) | | |
| 9 | hCIITA_S9_22bp_II | AGUCUCCUAGUGGGACCAGUGA | 86.41 | |
| | | (SEQ ID NO: 31276) | | |
| 10 | hCIITA_S10_22bp_II | GGAGAUUCAGGCAGCUCAACGA | 75.41 | |
| | | SEQ ID NO: 32698) | | |
| 11 | hCIITA_S11_22bp_II | GGCAGAGUGGAGAUGGUGGGGA | 64.60 | 62.53 |
| | | (SEQ ID NO: 32704) | | |
| 12 | hCIITA_S12_22bp_II | UACGUGUCCUGCAGUGAGCGGU | 30.90 | |
| | | (SEQ ID NO: 9831) | | |
| 13 | hCIITA_S13_22bp_II | GCAGCAGCAAGAGCCUGGAGCG | 61.72 | |
| | | SEQ ID NO: 9031) | | |
| 14 | Hciita_S14_22bp_II | CUGGAGCGGGAACUGGCCACCC | 56.55 | |
| | | (SEQ ID NO: 8688) | | |
| 15 | hCIITA_S15_22bp_II | CCAAGCUGCCCUCCACGCUCAC | 42.87 | |
| | | (SEQ ID NO: 8042) | | |

[0178] OMNI-103 related sequences are provided in the table below:

TABLE 4

| | | OMNI-103 DNA sequence | |
|---|---|---|---|
| OMNI-103 Amino Acid | OMNI-103 DNA | codon optimized for | OMNI-103 sgRNA |
| Sequence | sequence | expression in human cells | scaffold sequence |
| SEQ ID NO: 34200 | SEQ ID NO: 34201 | SEQ ID NO: 34202 | SEQ ID NO: 34203 |

### REFERENCES

[0179] 1. Ahmad and Allen (1992) “Antibody-mediated Specific Binging and Cytotoxicity of Lipsome-entrapped Doxorubicin to Lung Cancer Cells in Vitro”, Cancer Research 52:4817-20.
[0180] 2. Anderson (1992) “Human gene therapy”, Science 256:808-13.
[0181] 3. Anzalone et al. (2019) “Search-and-replace genome editing without double-strand brakes or donor DNA”, Nature 576, 149-157.
[0182] 4. Basha et al. (2011) “Influence of Cationic Lipid Composition on Gene Silencing Properties of Lipid Nanoparticle Formulations of siRNA in Antigen-Presenting Cells”, Mol. Ther. 19(12):2186-200.
[0183] 5. Behr (1994) Gene transfer with synthetic cationic amphiphiles: Prospects for gene therapy”, Bioconjugate Chem 5:382-89.
[0184] 6. Blaese (1995) “Vectors in cancer therapy: how will they deliver”, Cancer Gene Ther. 2:291-97.
[0185] 7. Blaese et al. (1995) “T lymphocyte-directed gene therapy for ADA-SCID: initial trial results after 4 years”, Science 270(5235):475-80.
[0186] 8. Buchschacher and Panganiban (1992) “Human immunodeficiency virus vectors for inducible expression of foreign genes”, J. Virol. 66:2731-39.
[0187] 9. Burstein et al. (2017) “New CRISPR-Cas systems from uncultivated microbes”, Nature 542:237-41.
[0188] 10. Chang and Wilson (1987) “Modification of DNA ends can decrease end-joining relative to homologous recombination in mammalian cells”, Proc. Natl. Acad. Sci. USA 84:4959-4963.
[0189] 11. Chung et al. (2006) “Agrobacterium is not alone: gene transfer to plants by viruses and other bacteria”, Trends Plant Sci. 11(1):1-4.
[0190] 12. Coelho et al. (2013) “Safety and efficacy of RNAi therapy for transthyretin amyloidosis” N. Engl. J. Med. 369, 819-829.
[0191] 13. Collias and Beisel (2021) “CRISPR technologies and the search for the PAM-free nuclease”, Nature Communications 12, 555.
[0192] 14. Crystal (1995) “Transfer of genes to humans: early lessons and obstacles to success”, Science 270(5235):404-10.
[0193] 15. Dillon (1993) “Regulation gene expression in gene therapy” Trends in Biotechnology 11(5):167-173.
[0194] 16. Dranoff et al. (1997) “A phase I study of vaccination with autologous, irradiated melanoma cells engineered to secrete human granulocyte macrophage colony stimulating factor”, Hum. Gene Ther. 8(1):111-23.
[0195] 17. Dunbar et al. (1995) “Retrovirally marked CD34-enriched peripheral blood and bone marrow cells contribute to long-term engraftment after autologous transplantation”, Blood 85:3048-57.
[0196] 18. Ellem et al. (1997) “A case report: immune responses and clinical course of the first human use of ganulocyte/macrophage-colony-stimulating-factor-tranduced autologous melanoma cells for immunotherapy”, Cancer Immunol Immunother 44:10-20.
[0197] 19. Gao and Huang (1995) “Cationic liposome-mediated gene transfer” Gene Ther. 2(10):710-22.
[0198] 20. Haddada et al. (1995) “Gene Therapy Using Adenovirus Vectors”, in: The Molecular Repertoire of Adenoviruses III: Biology and Pathogenesis, ed. Doerfler and Böhm, pp. 297-306.
[0199] 21. Han et al. (1995) “Ligand-directed retro-viral targeting of human breast cancer cells”, Proc Natl Acad Sci U.S.A. 92(21):9747-51.
[0200] 22. Hu et al. (2018) “Evolved Cas9 variants with broad PAM compatibility and high DNA specificity”, Nature 556(7699):57-63.
[0201] 23. Jinek et al. (2012) “A programmable dual-RNA-guided DNA endonuclease in adaptive bacterial immunity,” Science 337(6096):816-21.
[0202] 24. Johan et al. (1992) “GLVR1, a receptor for gibbon ape leukemia virus, is homologous to a phosphate permease of Neurospora crassa and is expressed at high levels in the brain and thymus”, J Virol 66(3):1635-40.
[0203] 25. Judge et al. (2006) “Design of noninflammatory synthetic siRNA mediating potent gene silencing in vivo”, Mol Ther. 13(3):494-505.
[0204] 26. Kohn et al. (1995) “Engraftment of gene-modified umbilical cord blood cells in neonates with adnosine deaminase deficiency”, Nature Medicine 1:1017-23.
[0205] 27. Kremer and Perricaudet (1995) “Adenovirus and adeno-associated virus mediated gene transfer”, Br. Med. Bull. 51(1):31-44.
[0206] 28. Macdiarmid et al. (2009) “Sequential treatment of drug-resistant tumors with targeted minicells containing siRNA or a cytotoxic drug”, Nat Biotehcnol. 27(7):643-51.
[0207] 29. Malech et al. (1997) “Prolonged production of NADPH oxidase-corrected granulocyes after gene therapy of chronic granulomatous disease”, PNAS 94(22):12133-38.
[0208] 30. Miller et al. (1991) “Construction and properties of retrovirus packaging cells based on gibbon ape leukemia virus”, J Virol. 65(5):2220-24.
[0209] 31. Miller (1992) “Human gene therapy comes of age”, Nature 357:455-60.
[0210] 32. Mitani and Caskey (1993) “Delivering therapeutic genes-matching approach and application”, Trends in Biotechnology 11(5):162-66.
[0211] 33. Nabel and Felgner (1993) “Direct gene transfer for immunotherapy and immunization”, Trends in Biotechnology 11(5):211-15.
[0212] 34. Nishimasu et al. (2018) “Engineered CRISPR-Cas9 nuclease with expanded targeting space”, Science 361(6408):1259-1262.
[0213] 35. Remy et al. (1994) “Gene Transfer with a Series of Lipphilic DNA-Binding Molecules”, Bioconjugate Chem. 5(6):647-54.
[0214] 36. Sentmanat et al. (2018) “A Survey of Validation Strategies for CRISPR-Cas9 Editing”, Scientific Reports 8:888, doi: 10.1038/s41598-018-19441-8.
[0215] 37. Sommerfelt et al. (1990) “Localization of the receptor gene for type D simian retroviruses on human chromosome 19”, J. Virol. 64(12):6214-20.
[0216] 38. Van Brunt (1988) “Molecular framing: transgenic animals as bioactors” Biotechnology 6:1149-54.
[0217] 39. Vigne et al. (1995) “Third-generation adenovectors for gene therapy”, Restorative Neurology and Neuroscience 8(1,2):35-36.
[0218] 40. Walton et al. (2020) “Unconstrained genome targeting with near-PAMless engineered CRISPR-Cas9 variants”, Science 368(6488):290-296.
[0219] 41. Weissman and Kariko (2015) “mRNA: Fulfilling the promise of gene therapy”, Molecular Therapy (9):1416-7.
[0220] 42. Wilson et al. (1989) “Formation of infectious hybrid virion with gibbon ape leukemia virus and human T-cell leukemia virus retroviral envelope glycoproteins and the gag and pol proteins of Moloney murine leukemia virus”, J. Virol. 63:2374-78.
[0221] 43. Yu et al. (1994) “Progress towards gene therapy for HIV infection”, Gene Ther. 1(1):13-26.
[0222] 44. Zetsche et al. (2015) “Cpf1 is a single RNA-guided endonuclease of a class 2 CRIPSR-Cas system” Cell 163(3):759-71.
[0223] 45. Zuris et al. (2015) “Cationic lipid-mediated delivery of proteins enables efficient protein based genome editing in vitro and in vivo” Nat Biotechnol. 33(1):73-80

The application's sequence listing, which the Patent Office published only in electronic form, follows.

SEQUENCE LISTING (34203 sequences)

SEQ ID NO: 1 - RNA, 20 nt, synthetic construct
  source 1..20: mol_type = other RNA
aaaatggcctggtgagtgat

SEQ ID NO: 2 - RNA, 20 nt, synthetic construct
  source 1..20: mol_type = other RNA
aaatctggcacctgcttctc

SEQ ID NO: 3 - RNA, 20 nt, synthetic construct
  source 1..20: mol_type = other RNA
aaatggcctggtgagtgatg

SEQ ID NO: 4 - RNA, 20 nt, synthetic construct
  source 1..20: mol_type = other RNA
aacaagcttccaaaatggcc

SEQ ID NO: 5 - RNA, 20 nt, synthetic construct
  source 1..20: mol_type = other RNA
aaccctcaccctaaatctgg

SEQ ID NO: 6 - RNA, 20 nt, synthetic construct
  source 1..20: mol_type = other RNA
aagacgtcccccacccaatg

SEQ ID NO: 7 - RNA, 20 nt, synthetic construct
  source 1..20: mol_type = other RNA
aagcaggtgccagatttagg

SEQ ID NO: 8 - RNA, 20 nt, synthetic construct
  source 1..20: mol_type = other RNA
aagcttccaaaatggcctgg

SEQ ID NO: 9 - RNA, 20 nt, synthetic construct
  source 1..20: mol_type = other RNA
aagcttgttggagacctctc

SEQ ID NO: 10 - RNA, 20 nt, synthetic construct
  source 1..20: mol_type = other RNA
aatctggcacctgcttctcc

SEQ ID NO: 11 - RNA, 20 nt, synthetic construct
  source 1..20: mol_type = other RNA
aatgcccggcagctggagag

SEQ ID NO: 12 - RNA, 20 nt, synthetic construct
  source 1..20: mol_type = other RNA
aatggcctggtgagtgatgc

SEQ ID NO: 13 - RNA, 20 nt, synthetic construct
  source 1..20: mol_type = other RNA
acaagacgtcccccacccaa

SEQ ID NO: 14 - RNA, 20 nt, synthetic construct
  source 1..20: mol_type = other RNA
acaagcttccaaaatggcct

SEQ ID NO: 15 - RNA, 20 nt, synthetic construct
  source 1..20: mol_type = other RNA
accacccagggcagagagat

SEQ ID NO: 16 - RNA, 20 nt, synthetic construct
  source 1..20: mol_type = other RNA
accaggccattttggaagct

SEQ ID NO: 17 - RNA, 20 nt, synthetic construct
  source 1..20: mol_type = other RNA
acccaatgcccggcagctgg

SEQ ID NO: 18 - RNA, 20 nt, synthetic construct
  source 1..20: mol_type = other RNA
acccagggcagagagatccc

SEQ ID NO: 19 - RNA, 20 nt, synthetic construct
  source 1..20: mol_type = other RNA
accctaaatctggcacctgc

SEQ ID NO: 20 - RNA, 20 nt, synthetic construct
  source 1..20: mol_type = other RNA
accctcaccctaaatctggc

SEQ ID NO: 21 - RNA, 20 nt, synthetic construct
  source 1..20: mol_type = other RNA
acctctccagctgccgggca

SEQ ID NO: 22 - RNA, 20 nt, synthetic construct
  source 1..20: mol_type = other RNA
acctgcttctccatctccag

SEQ ID NO: 23 - RNA, 20 nt, synthetic construct
  source 1..20: mol_type = other RNA
acgtcccccacccaatgccc

SEQ ID NO: 24 - RNA, 20 nt, synthetic construct
  source 1..20: mol_type = other RNA
acgtcttgtgctctggagat

SEQ ID NO: 25 - RNA, 20 nt, synthetic construct
  source 1..20: mol_type = other RNA
actcaccaggccattttgga

SEQ ID NO: 26 - RNA, 20 nt, synthetic construct
  source 1..20: mol_type = other RNA
agaagcaggtgccagattta

SEQ ID NO: 27 - RNA, 20 nt, synthetic construct
  source 1..20: mol_type = other RNA
agacctctccagctgccggg

SEQ ID NO: 28 - RNA, 20 nt, synthetic construct
  source 1..20: mol_type = other RNA
agacgtcccccacccaatgc

SEQ ID NO: 29 - RNA, 20 nt, synthetic construct
  source 1..20: mol_type = other RNA
agagagatcccgcatcactc

SEQ ID NO: 30 - RNA, 20 nt, synthetic construct
  source 1..20: mol_type = other RNA
agagatcccgcatcactcac

SEQ ID NO: 31 - RNA, 20 nt, synthetic construct
  source 1..20: mol_type = other RNA
agagcacaagacgtccccca

SEQ ID NO: 32 - RNA, 20 nt, synthetic construct
  source 1..20: mol_type = other RNA
agaggtctccaacaagcttc

SEQ ID NO: 33 - RNA, 20 nt, synthetic construct
  source 1..20: mol_type = other RNA
agatcccgcatcactcacca

SEQ ID NO: 34 - RNA, 20 nt, synthetic construct
  source 1..20: mol_type = other RNA
agatggagaagcaggtgcca

SEQ ID NO: 35 - RNA, 20 nt, synthetic construct
  source 1..20: mol_type = other RNA
agcacaagacgtcccccacc

SEQ ID NO: 36 - RNA, 20 nt, synthetic construct
  source 1..20: mol_type = other RNA
agcaggtgccagatttaggg

SEQ ID NO: 37 - RNA, 20 nt, synthetic construct
  source 1..20: mol_type = other RNA
agctgccgggcattgggtgg

SEQ ID NO: 38 - RNA, 20 nt, synthetic construct
  source 1..20: mol_type = other RNA
agctggagaggtctccaaca

SEQ ID NO: 39 - RNA, 20 nt, synthetic construct
  source 1..20: mol_type = other RNA
agcttccaaaatggcctggt

SEQ ID NO: 40 - RNA, 20 nt, synthetic construct
  source 1..20: mol_type = other RNA
agcttgttggagacctctcc

SEQ ID NO: 41 - RNA, 20 nt, synthetic construct
  source 1..20: mol_type = other RNA
aggccattttggaagcttgt

SEQ ID NO: 42 - RNA, 20 nt, synthetic construct
  source 1..20: mol_type = other RNA
agggcagagagatcccgcat

SEQ ID NO: 43 - RNA, 20 nt, synthetic construct
  source 1..20: mol_type = other RNA
aggtctccaacaagcttcca

SEQ ID NO: 44 - RNA, 20 nt, synthetic construct
  source 1..20: mol_type = other RNA
aggtgccagatttagggtga

SEQ ID NO: 45 - RNA, 20 nt, synthetic construct
  source 1..20: mol_type = other RNA
agtgatgcgggatctctctg

SEQ ID NO: 46 - RNA, 20 nt, synthetic construct
  source 1..20: mol_type = other RNA
atcactcaccaggccatttt

SEQ ID NO: 47 - RNA, 20 nt, synthetic construct
  source 1..20: mol_type = other RNA
atcccgcatcactcaccagg

SEQ ID NO: 48 - RNA, 20 nt, synthetic construct
  source 1..20: mol_type = other RNA
atctccaccacccagggcag

SEQ ID NO: 49 - RNA, 20 nt, synthetic construct
  source 1..20: mol_type = other RNA
atctccagagcacaagacgt

SEQ ID NO: 50 - RNA, 20 nt, synthetic construct
  source 1..20: mol_type = other RNA
atctctctgccctgggtggt

SEQ ID NO: 51 - RNA, 20 nt, synthetic construct
  source 1..20: mol_type = other RNA
atctggcacctgcttctcca

SEQ ID NO: 52 - RNA, 20 nt, synthetic construct
  source 1..20: mol_type = other RNA
atgcccggcagctggagagg

SEQ ID NO: 53 - RNA, 20 nt, synthetic construct
  source 1..20: mol_type = other RNA
atgcgggatctctctgccct

SEQ ID NO: 54 - RNA, 20 nt, synthetic construct
  source 1..20: mol_type = other RNA
atggagaagcaggtgccaga

SEQ ID NO: 55 - RNA, 20 nt, synthetic construct
  source 1..20: mol_type = other RNA
atggcctggtgagtgatgcg

SEQ ID NO: 56 - RNA, 20 nt, synthetic construct
  source 1..20: mol_type = other RNA
attgggtgggggacgtcttg

SEQ ID NO: 57 - RNA, 20 nt, synthetic construct
  source 1..20: mol_type = other RNA
attttggaagcttgttggag

SEQ ID NO: 58 - RNA, 20 nt, synthetic construct
  source 1..20: mol_type = other RNA
caaaatggcctggtgagtga

SEQ ID NO: 59 - RNA, 20 nt, synthetic construct
  source 1..20: mol_type = other RNA
caacaagcttccaaaatggc

SEQ ID NO: 60 - RNA, 20 nt, synthetic construct
  source 1..20: mol_type = other RNA
caagacgtcccccacccaat

SEQ ID NO: 61 - RNA, 20 nt, synthetic construct
  source 1..20: mol_type = other RNA
caagcttccaaaatggcctg

SEQ ID NO: 62 - RNA, 20 nt, synthetic construct
  source 1..20: mol_type = other RNA
caatgcccggcagctggaga

SEQ ID NO: 63 - RNA, 20 nt, synthetic construct
  source 1..20: mol_type = other RNA
cacaagacgtcccccaccca

SEQ ID NO: 64 - RNA, 20 nt, synthetic construct
  source 1..20: mol_type = other RNA
caccacccagggcagagaga

SEQ ID NO: 65 - RNA, 20 nt, synthetic construct
  source 1..20: mol_type = other RNA
caccaggccattttggaagc

SEQ ID NO: 66 - RNA, 20 nt, synthetic construct
  source 1..20: mol_type = other RNA
cacccaatgcccggcagctg

SEQ ID NO: 67 - RNA, 20 nt, synthetic construct
  source 1..20: mol_type = other RNA
cacccagggcagagagatcc

SEQ ID NO: 68 - RNA, 20 nt, synthetic construct
  source 1..20: mol_type = other RNA
caccctaaatctggcacctg

SEQ ID NO: 69 - RNA, 20 nt, synthetic construct
  source 1..20: mol_type = other RNA
cacctgcttctccatctcca

SEQ ID NO: 70 - RNA, 20 nt, synthetic construct
  source 1..20: mol_type = other RNA
cactcaccaggccattttgg

SEQ ID NO: 71 - RNA, 20 nt, synthetic construct
  source 1..20: mol_type = other RNA
cagagagatcccgcatcact

SEQ ID NO: 72 - RNA, 20 nt, synthetic construct
  source 1..20: mol_type = other RNA
cagagcacaagacgtccccc

SEQ ID NO: 73 - RNA, 20 nt, synthetic construct
  source 1..20: mol_type = other RNA
cagctgccgggcattgggtg

SEQ ID NO: 74 - RNA, 20 nt, synthetic construct
  source 1..20: mol_type = other RNA
cagctggagaggtctccaac

SEQ ID NO: 75 - RNA, 20 nt, synthetic construct
  source 1..20: mol_type = other RNA
caggccattttggaagcttg

SEQ ID NO: 76 - RNA, 20 nt, synthetic construct
  source 1..20: mol_type = other RNA
cagggcagagagatcccgca

SEQ ID NO: 77 - RNA, 20 nt, synthetic construct
  source 1..20: mol_type = other RNA
caggtgccagatttagggtg

SEQ ID NO: 78 - RNA, 20 nt, synthetic construct
  source 1..20: mol_type = other RNA
catcactcaccaggccattt

SEQ ID NO: 79 - RNA, 20 nt, synthetic construct
  source 1..20: mol_type = other RNA
catctccaccacccagggca

SEQ ID NO: 80 - RNA, 20 nt, synthetic construct
  source 1..20: mol_type = other RNA
catctccagagcacaagacg

SEQ ID NO: 81 - RNA, 20 nt, synthetic construct
  source 1..20: mol_type = other RNA
cattgggtgggggacgtctt

SEQ ID NO: 82 - RNA, 20 nt, synthetic construct
  source 1..20: mol_type = other RNA
cattttggaagcttgttgga

SEQ ID NO: 83 - RNA, 20 nt, synthetic construct
  source 1..20: mol_type = other RNA
ccaaaatggcctggtgagtg

SEQ ID NO: 84 - RNA, 20 nt, synthetic construct
  source 1..20: mol_type = other RNA
ccaacaagcttccaaaatgg

SEQ ID NO: 85 - RNA, 20 nt, synthetic construct
  source 1..20: mol_type = other RNA
ccaatgcccggcagctggag

SEQ ID NO: 86 - RNA, 20 nt, synthetic construct
  source 1..20: mol_type = other RNA
ccaccacccagggcagagag

SEQ ID NO: 87 - RNA, 20 nt, synthetic construct
  source 1..20: mol_type = other RNA
ccacccaatgcccggcagct

SEQ ID NO: 88 - RNA, 20 nt, synthetic construct
  source 1..20: mol_type = other RNA
ccacccagggcagagagatc

SEQ ID NO: 89 - RNA, 20 nt, synthetic construct
  source 1..20: mol_type = other RNA
ccagagcacaagacgtcccc

SEQ ID NO: 90 - RNA, 20 nt, synthetic construct
  source 1..20: mol_type = other RNA
ccagctgccgggcattgggt

SEQ ID NO: 91 - RNA, 20 nt, synthetic construct
  source 1..20: mol_type = other RNA
ccaggccattttggaagctt

SEQ ID NO: 92 - RNA, 20 nt, synthetic construct
  source 1..20: mol_type = other RNA
ccagggcagagagatcccgc

SEQ ID NO: 93 - RNA, 20 nt, synthetic construct
  source 1..20: mol_type = other RNA
ccatctccaccacccagggc

SEQ ID NO: 94 - RNA, 20 nt, synthetic construct
  source 1..20: mol_type = other RNA
ccatctccagagcacaagac

SEQ ID NO: 95 - RNA, 20 nt, synthetic construct
  source 1..20: mol_type = other RNA
ccattttggaagcttgttgg

SEQ ID NO: 96 - RNA, 20 nt, synthetic construct
  source 1..20: mol_type = other RNA
cccaatgcccggcagctgga

SEQ ID NO: 97 - RNA, 20 nt, synthetic construct
  source 1..20: mol_type = other RNA
cccacccaatgcccggcagc

SEQ ID NO: 98 - RNA, 20 nt, synthetic construct
  source 1..20: mol_type = other RNA
cccagggcagagagatcccg

SEQ ID NO: 99 - RNA, 20 nt, synthetic construct
  source 1..20: mol_type = other RNA
ccccacccaatgcccggcag

SEQ ID NO: 100 - RNA, 20 nt, synthetic construct
  source 1..20: mol_type = other RNA
cccccacccaatgcccggca

SEQ ID NO: 101 - RNA, 20 nt, synthetic construct
  source 1..20: mol_type = other RNA
cccgcatcactcaccaggcc

SEQ ID NO: 102 - RNA, 20 nt, synthetic construct
  source 1..20: mol_type = other RNA
cccggcagctggagaggtct

SEQ ID NO: 103 - RNA, 20 nt, synthetic construct
  source 1..20: mol_type = other RNA
ccctaaatctggcacctgct

SEQ ID NO: 104 - RNA, 20 nt, synthetic construct
  source 1..20: mol_type = other RNA
ccctcaccctaaatctggca

SEQ ID NO: 105 - RNA, 20 nt, synthetic construct
  source 1..20: mol_type = other RNA
ccgcatcactcaccaggcca

SEQ ID NO: 106 - RNA, 20 nt, synthetic construct
  source 1..20: mol_type = other RNA
ccggcagctggagaggtctc

SEQ ID NO: 107 - RNA, 20 nt, synthetic construct
  source 1..20: mol_type = other RNA
ccgggcattgggtgggggac

SEQ ID NO: 108 - RNA, 20 nt, synthetic construct
  source 1..20: mol_type = other RNA
cctaaatctggcacctgctt

SEQ ID NO: 109 - RNA, 20 nt, synthetic construct
  source 1..20: mol_type = other RNA
cctcaccctaaatctggcac

SEQ ID NO: 110 - RNA, 20 nt, synthetic construct
  source 1..20: mol_type = other RNA
cctctccagctgccgggcat

SEQ ID NO: 111 - RNA, 20 nt, synthetic construct
  source 1..20: mol_type = other RNA
cctgcttctccatctccaga

SEQ ID NO: 112 - RNA, 20 nt, synthetic construct
  source 1..20: mol_type = other RNA
cctggtgagtgatgcgggat

SEQ ID NO: 113 - RNA, 20 nt, synthetic construct
  source 1..20: mol_type = other RNA
cgcatcactcaccaggccat

SEQ ID NO: 114 - RNA, 20 nt, synthetic construct
  source 1..20: mol_type = other RNA
cggcagctggagaggtctcc

SEQ ID NO: 115 - RNA, 20 nt, synthetic construct
  source 1..20: mol_type = other RNA
cgggatctctctgccctggg

SEQ ID NO: 116 - RNA, 20 nt, synthetic construct
  source 1..20: mol_type = other RNA
cgggcattgggtgggggacg

SEQ ID NO: 117 - RNA, 20 nt, synthetic construct
  source 1..20: mol_type = other RNA
cgtcccccacccaatgcccg

SEQ ID NO: 118 - RNA, 20 nt, synthetic construct
  source 1..20: mol_type = other RNA
cgtcttgtgctctggagatg

SEQ ID NO: 119 - RNA, 20 nt, synthetic construct
  source 1..20: mol_type = other RNA
ctaaatctggcacctgcttc

SEQ ID NO: 120 - RNA, 20 nt, synthetic construct
  source 1..20: mol_type = other RNA
ctcaccaggccattttggaa

SEQ ID NO: 121 - RNA, 20 nt, synthetic construct
  source 1..20: mol_type = other RNA
ctcaccctaaatctggcacc

SEQ ID NO: 122 - RNA, 20 nt, synthetic construct
  source 1..20: mol_type = other RNA
ctccaacaagcttccaaaat

SEQ ID NO: 123 - RNA, 20 nt, synthetic construct
  source 1..20: mol_type = other RNA
ctccaccacccagggcagag

SEQ ID NO: 124 - RNA, 20 nt, synthetic construct
  source 1..20: mol_type = other RNA
ctccagagcacaagacgtcc

SEQ ID NO: 125 - RNA, 20 nt, synthetic construct
  source 1..20: mol_type = other RNA
ctccagctgccgggcattgg

SEQ ID NO: 126 - RNA, 20 nt, synthetic construct
  source 1..20: mol_type = other RNA
ctccatctccagagcacaag

SEQ ID NO: 127 - RNA, 20 nt, synthetic construct
  source 1..20: mol_type = other RNA
ctctccagctgccgggcatt

SEQ ID NO: 128 - RNA, 20 nt, synthetic construct
  source 1..20: mol_type = other RNA
ctctctgccctgggtggtgg

SEQ ID NO: 129 - RNA, 20 nt, synthetic construct
  source 1..20: mol_type = other RNA
ctctggagatggagaagcag

SEQ ID NO: 130 - RNA, 20 nt, synthetic construct
  source 1..20: mol_type = other RNA
ctgccgggcattgggtgggg

SEQ ID NO: 131 - RNA, 20 nt, synthetic construct
  source 1..20: mol_type = other RNA
ctgcttctccatctccagag

SEQ ID NO: 132 - RNA, 20 nt, synthetic construct
  source 1..20: mol_type = other RNA
ctggagaggtctccaacaag

SEQ ID NO: 133 - RNA, 20 nt, synthetic construct
  source 1..20: mol_type = other RNA
ctggagatggagaagcaggt

SEQ ID NO: 134 - RNA, 20 nt, synthetic construct
  source 1..20: mol_type = other RNA
ctggcacctgcttctccatc

SEQ ID NO: 135 - RNA, 20 nt, synthetic construct
  source 1..20: mol_type = other RNA
ctggtgagtgatgcgggatc

SEQ ID NO: 136 - RNA, 20 nt, synthetic construct
  source 1..20: mol_type = other RNA
cttccaaaatggcctggtga

SEQ ID NO: 137 - RNA, 20 nt, synthetic construct
  source 1..20: mol_type = other RNA
cttccatctccaccacccag

SEQ ID NO: 138 - RNA, 20 nt, synthetic construct
  source 1..20: mol_type = other RNA
cttctccatctccagagcac

SEQ ID NO: 139 - RNA, 20 nt, synthetic construct
  source 1..20: mol_type = other RNA
cttgtgctctggagatggag

SEQ ID NO: 140 - RNA, 20 nt, synthetic construct
  source 1..20: mol_type = other RNA
cttgttggagacctctccag

SEQ ID NO: 141 - RNA, 20 nt, synthetic construct
  source 1..20: mol_type = other RNA
gaagcaggtgccagatttag

SEQ ID NO: 142 - RNA, 20 nt, synthetic construct
  source 1..20: mol_type = other RNA
gaagcttgttggagacctct

SEQ ID NO: 143 - RNA, 20 nt, synthetic construct
  source 1..20: mol_type = other RNA
gacctctccagctgccgggc

SEQ ID NO: 144 - RNA, 20 nt, synthetic construct
  source 1..20: mol_type = other RNA
gacgtcccccacccaatgcc

SEQ ID NO: 145 - RNA, 20 nt, synthetic construct
  source 1..20: mol_type = other RNA
gacgtcttgtgctctggaga

SEQ ID NO: 146 - RNA, 20 nt, synthetic construct
  source 1..20: mol_type = other RNA
gagaagcaggtgccagattt

SEQ ID NO: 147 - RNA, 20 nt, synthetic construct
  source 1..20: mol_type = other RNA
gagacctctccagctgccgg

SEQ ID NO: 148 - RNA, 20 nt, synthetic construct
  source 1..20: mol_type = other RNA
gagagatcccgcatcactca

SEQ ID NO: 149 - RNA, 20 nt, synthetic construct
  source 1..20: mol_type = other RNA
gagaggtctccaacaagctt

SEQ ID NO: 150 - RNA, 20 nt, synthetic construct
  source 1..20: mol_type = other RNA
gagatcccgcatcactcacc

SEQ ID NO: 151 - RNA, 20 nt, synthetic construct
  source 1..20: mol_type = other RNA
gagatggagaagcaggtgcc

SEQ ID NO: 152 - RNA, 20 nt, synthetic construct
  source 1..20: mol_type = other RNA
gagcacaagacgtcccccac

SEQ ID NO: 153 - RNA, 20 nt, synthetic construct
  source 1..20: mol_type = other RNA
gaggtctccaacaagcttcc

SEQ ID NO: 154 - RNA, 20 nt, synthetic construct
  source 1..20: mol_type = other RNA
gagtgatgcgggatctctct

SEQ ID NO: 155 - RNA, 20 nt, synthetic construct
  source 1..20: mol_type = other RNA
gatcccgcatcactcaccag

SEQ ID NO: 156 - RNA, 20 nt, synthetic construct
  source 1..20: mol_type = other RNA
gatctctctgccctgggtgg

SEQ ID NO: 157 - RNA, 20 nt, synthetic construct
  source 1..20: mol_type = other RNA
gatgcgggatctctctgccc

SEQ ID NO: 158 - RNA, 20 nt, synthetic construct
  source 1..20: mol_type = other RNA
gatggagaagcaggtgccag

SEQ ID NO: 159 - RNA, 20 nt, synthetic construct
  source 1..20: mol_type = other RNA
gcacaagacgtcccccaccc

SEQ ID NO: 160 - RNA, 20 nt, synthetic construct
  source 1..20: mol_type = other RNA
gcacctgcttctccatctcc

SEQ ID NO: 161 - RNA, 20 nt, synthetic construct
  source 1..20: mol_type = other RNA
gcagagagatcccgcatcac

SEQ ID NO: 162 - RNA, 20 nt, synthetic construct
  source 1..20: mol_type = other RNA
gcagctggagaggtctccaa

SEQ ID NO: 163 - RNA, 20 nt, synthetic construct
  source 1..20: mol_type = other RNA
gcaggtgccagatttagggt

SEQ ID NO: 164 - RNA, 20 nt, synthetic construct
  source 1..20: mol_type = other RNA
gcatcactcaccaggccatt

SEQ ID NO: 165 - RNA, 20 nt, synthetic construct
  source 1..20: mol_type = other RNA
gcattgggtgggggacgtct

SEQ ID NO: 166 - RNA, 20 nt, synthetic construct
  source 1..20: mol_type = other RNA
gccattttggaagcttgttg

SEQ ID NO: 167 - RNA, 20 nt, synthetic construct
  source 1..20: mol_type = other RNA
gcccggcagctggagaggtc

SEQ ID NO: 168 - RNA, 20 nt, synthetic construct
  source 1..20: mol_type = other RNA
gccgggcattgggtggggga

SEQ ID NO: 169 - RNA, 20 nt, synthetic construct
  source 1..20: mol_type = other RNA
gcctggtgagtgatgcggga

SEQ ID NO: 170 - RNA, 20 nt, synthetic construct
  source 1..20: mol_type = other RNA
gcgggatctctctgccctgg

SEQ ID NO: 171 - RNA, 20 nt, synthetic construct
  source 1..20: mol_type = other RNA
gctctggagatggagaagca

SEQ ID NO: 172 - RNA, 20 nt, synthetic construct
  source 1..20: mol_type = other RNA
gctgccgggcattgggtggg

SEQ ID NO: 173 - RNA, 20 nt, synthetic construct
  source 1..20: mol_type = other RNA
gctggagaggtctccaacaa

SEQ ID NO: 174 - RNA, 20 nt, synthetic construct
  source 1..20: mol_type = other RNA
gcttccaaaatggcctggtg

SEQ ID NO: 175 - RNA, 20 nt, synthetic construct
  source 1..20: mol_type = other RNA
gcttctccatctccagagca

SEQ ID NO: 176 - RNA, 20 nt, synthetic construct
  source 1..20: mol_type = other RNA
gcttgttggagacctctcca

SEQ ID NO: 177 - RNA, 20 nt, synthetic construct
  source 1..20: mol_type = other RNA
ggaagcttgttggagacctc

SEQ ID NO: 178 - RNA, 20 nt, synthetic construct
  source 1..20: mol_type = other RNA
ggacgtcttgtgctctggag

SEQ ID NO: 179 - RNA, 20 nt, synthetic construct
  source 1..20: mol_type = other RNA
ggagaagcaggtgccagatt

SEQ ID NO: 180 - RNA, 20 nt, synthetic construct
  source 1..20: mol_type = other RNA
ggagacctctccagctgccg

SEQ ID NO: 181 - RNA, 20 nt, synthetic construct
  source 1..20: mol_type = other RNA
ggagaggtctccaacaagct

SEQ ID NO: 182 - RNA, 20 nt, synthetic construct
  source 1..20: mol_type = other RNA
ggagatggagaagcaggtgc

SEQ ID NO: 183 - RNA, 20 nt, synthetic construct
  source 1..20: mol_type = other RNA
ggatctctctgccctgggtg

SEQ ID NO: 184 - RNA, 20 nt, synthetic construct
  source 1..20: mol_type = other RNA
ggcacctgcttctccatctc

SEQ ID NO: 185 - RNA, 20 nt, synthetic construct
  source 1..20: mol_type = other RNA
ggcagagagatcccgcatca

SEQ ID NO: 186 - RNA, 20 nt, synthetic construct
  source 1..20: mol_type = other RNA
ggcagctggagaggtctcca

SEQ ID NO: 187 - RNA, 20 nt, synthetic construct
  source 1..20: mol_type = other RNA
ggcattgggtgggggacgtc

SEQ ID NO: 188 - RNA, 20 nt, synthetic construct
  source 1..20: mol_type = other RNA
ggccattttggaagcttgtt

SEQ ID NO: 189 - RNA, 20 nt, synthetic construct
  source 1..20: mol_type = other RNA
ggcctggtgagtgatgcggg

SEQ ID NO: 190 - RNA, 20 nt, synthetic construct
  source 1..20: mol_type = other RNA
gggacgtcttgtgctctgga

SEQ ID NO: 191 - RNA, 20 nt, synthetic construct
  source 1..20: mol_type = other RNA
gggatctctctgccctgggt

SEQ ID NO: 192 - RNA, 20 nt, synthetic construct
  source 1..20: mol_type = other RNA
gggcagagagatcccgcatc

SEQ ID NO: 193 - RNA, 20 nt, synthetic construct
  source 1..20: mol_type = other RNA
gggcattgggtgggggacgt

SEQ ID NO: 194 - RNA, 20 nt, synthetic construct
  source 1..20: mol_type = other RNA
ggggacgtcttgtgctctgg

SEQ ID NO: 195 - RNA, 20 nt, synthetic construct
  source 1..20: mol_type = other RNA
gggggacgtcttgtgctctg

SEQ ID NO: 196 - RNA, 20 nt, synthetic construct
  source 1..20: mol_type = other RNA
ggggtaaccctcaccctaaa

SEQ ID NO: 197 - RNA, 20 nt, synthetic construct
  source 1..20: mol_type = other RNA
gggtaaccctcaccctaaat

SEQ ID NO: 198 - RNA, 20 nt, synthetic construct
  source 1..20: mol_type = other RNA
gggtgggggacgtcttgtgc

SEQ ID NO: 199 - RNA, 20 nt, synthetic construct
  source 1..20: mol_type = other RNA
ggtaaccctcaccctaaatc

SEQ ID NO: 200 - RNA, 20 nt, synthetic construct
  source 1..20: mol_type = other RNA
ggtctccaacaagcttccaa

SEQ ID NO: 201 - RNA, 20 nt, synthetic construct
  source 1..20: mol_type = other RNA
ggtgagtgatgcgggatctc

SEQ ID NO: 202 - RNA, 20 nt, synthetic construct
  source 1..20: mol_type = other RNA
ggtgccagatttagggtgag

SEQ ID NO: 203 - RNA, 20 nt, synthetic construct
  source 1..20: mol_type = other RNA
ggtgggggacgtcttgtgct

SEQ ID NO: 204 - RNA, 20 nt, synthetic construct
  source 1..20: mol_type = other RNA
gtaaccctcaccctaaatct

SEQ ID NO: 205 - RNA, 20 nt, synthetic construct
  source 1..20: mol_type = other RNA
gtcccccacccaatgcccgg

SEQ ID NO: 206 - RNA, 20 nt, synthetic construct
  source 1..20: mol_type = other RNA
gtctccaacaagcttccaaa

SEQ ID NO: 207 - RNA, 20 nt, synthetic construct
  source 1..20: mol_type = other RNA
gtcttgtgctctggagatgg

SEQ ID NO: 208 - RNA, 20 nt, synthetic construct
  source 1..20: mol_type = other RNA
gtgagtgatgcgggatctct

SEQ ID NO: 209 - RNA, 20 nt, synthetic construct
  source 1..20: mol_type = other RNA
gtgatgcgggatctctctgc

SEQ ID NO: 210 - RNA, 20 nt, synthetic construct
  source 1..20: mol_type = other RNA
gtgccagatttagggtgagg

SEQ ID NO: 211 - RNA, 20 nt, synthetic construct
  source 1..20: mol_type = other RNA
gtgctctggagatggagaag

SEQ ID NO: 212 - RNA, 20 nt, synthetic construct
  source 1..20: mol_type = other RNA
gtgggggacgtcttgtgctc

SEQ ID NO: 213 - RNA, 20 nt, synthetic construct
  source 1..20: mol_type = other RNA
gttggagacctctccagctg

SEQ ID NO: 214 - RNA, 20 nt, synthetic construct
  source 1..20: mol_type = other RNA
taaatctggcacctgcttct

SEQ ID NO: 215 - RNA, 20 nt, synthetic construct
  source 1..20: mol_type = other RNA
taaccctcaccctaaatctg

SEQ ID NO: 216 - RNA, 20 nt, synthetic construct
  source 1..20: mol_type = other RNA
tcaccaggccattttggaag

SEQ ID NO: 217 - RNA, 20 nt, synthetic construct
  source 1..20: mol_type = other RNA
tcaccctaaatctggcacct

SEQ ID NO: 218 - RNA, 20 nt, synthetic construct
  source 1..20: mol_type = other RNA
tcactcaccaggccattttg

SEQ ID NO: 219 - RNA, 20 nt, synthetic construct
  source 1..20: mol_type = other RNA
tccaaaatggcctggtgagt

SEQ ID NO: 220 - RNA, 20 nt, synthetic construct
  source 1..20: mol_type = other RNA
tccaacaagcttccaaaatg

SEQ ID NO: 221 - RNA, 20 nt, synthetic construct
  source 1..20: mol_type = other RNA
tccaccacccagggcagaga

SEQ ID NO: 222 - RNA, 20 nt, synthetic construct
  source 1..20: mol_type = other RNA
tccagagcacaagacgtccc

SEQ ID NO: 223 - RNA, 20 nt, synthetic construct
  source 1..20: mol_type = other RNA
tccagctgccgggcattggg

SEQ ID NO: 224 - RNA, 20 nt, synthetic construct
  source 1..20: mol_type = other RNA
tccatctccaccacccaggg

SEQ ID NO: 225 - RNA, 20 nt, synthetic construct
  source 1..20: mol_type = other RNA
tccatctccagagcacaaga

SEQ ID NO: 226 - RNA, 20 nt, synthetic construct
  source 1..20: mol_type = other RNA
tcccccacccaatgcccggc

SEQ ID NO: 227 - RNA, 20 nt, synthetic construct
  source 1..20: mol_type = other RNA
tcccgcatcactcaccaggc

SEQ ID NO: 228 - RNA, 20 nt, synthetic construct
  source 1..20: mol_type = other RNA
tctccaacaagcttccaaaa

SEQ ID NO: 229 - RNA, 20 nt, synthetic construct
  source 1..20: mol_type = other RNA
tctccaccacccagggcaga

SEQ ID NO: 230 - RNA, 20 nt, synthetic construct
  source 1..20: mol_type = other RNA
tctccagagcacaagacgtc

SEQ ID NO: 231 - RNA, 20 nt, synthetic construct
  source 1..20: mol_type = other RNA
tctccagctgccgggcattg

SEQ ID NO: 232 - RNA, 20 nt, synthetic construct
  source 1..20: mol_type = other RNA
tctccatctccagagcacaa

SEQ ID NO: 233 - RNA, 20 nt, synthetic construct
  source 1..20: mol_type = other RNA
tctctctgccctgggtggtg

SEQ ID NO: 234 - RNA, 20 nt, synthetic construct
  source 1..20: mol_type = other RNA
tctctgccctgggtggtgga

SEQ ID NO: 235 - RNA, 20 nt, synthetic construct
  source 1..20: mol_type = other RNA
tctggagatggagaagcagg

SEQ ID NO: 236 - RNA, 20 nt, synthetic construct
  source 1..20: mol_type = other RNA
tctggcacctgcttctccat

SEQ ID NO: 237 - RNA, 20 nt, synthetic construct
  source 1..20: mol_type = other RNA
tcttgtgctctggagatgga

SEQ ID NO: 238 - RNA, 20 nt, synthetic construct
  source 1..20: mol_type = other RNA
tgagtgatgcgggatctctc

SEQ ID NO: 239 - RNA, 20 nt, synthetic construct
  source 1..20: mol_type = other RNA
tgatgcgggatctctctgcc

SEQ ID NO: 240 - RNA, 20 nt, synthetic construct
  source 1..20: mol_type = other RNA
tgcccggcagctggagaggt

SEQ ID NO: 241 - RNA, 20 nt, synthetic construct
  source 1..20: mol_type = other RNA
tgccgggcattgggtggggg

SEQ ID NO: 242 - RNA, 20 nt, synthetic construct
  source 1..20: mol_type = other RNA
tgcgggatctctctgccctg

SEQ ID NO: 243 - RNA, 20 nt, synthetic construct
  source 1..20: mol_type = other RNA
tgctctggagatggagaagc

SEQ ID NO: 244 - RNA, 20 nt, synthetic construct
  source 1..20: mol_type = other RNA
tgcttctccatctccagagc

SEQ ID NO: 245 - RNA, 20 nt, synthetic construct
  source 1..20: mol_type = other RNA
tggaagcttgttggagacct

SEQ ID NO: 246 - RNA, 20 nt, synthetic construct
  source 1..20: mol_type = other RNA
tggagaagcaggtgccagat

SEQ ID NO: 247 - RNA, 20 nt, synthetic construct
  source 1..20: mol_type = other RNA
tggagacctctccagctgcc

SEQ ID NO: 248 - RNA, 20 nt, synthetic construct
  source 1..20: mol_type = other RNA
tggagaggtctccaacaagc

SEQ ID NO: 249 - RNA, 20 nt, synthetic construct
  source 1..20: mol_type = other RNA
tggagatggagaagcaggtg

SEQ ID NO: 250 - RNA, 20 nt, synthetic construct
  source 1..20: mol_type = other RNA
tggcacctgcttctccatct

SEQ ID NO: 251 - RNA, 20 nt, synthetic construct
  source 1..20: mol_type = other RNA
tggcctggtgagtgatgcgg

SEQ ID NO: 252 - RNA, 20 nt, synthetic construct
  source 1..20: mol_type = other RNA
tgggggacgtcttgtgctct

SEQ ID NO: 253 - RNA, 20 nt, synthetic construct
  source 1..20: mol_type = other RNA
tgggtgggggacgtcttgtg

SEQ ID NO: 254 - RNA, 20 nt, synthetic construct
  source 1..20: mol_type = other RNA
tggtgagtgatgcgggatct

SEQ ID NO: 255 - RNA, 20 nt, synthetic construct
  source 1..20: mol_type = other RNA
tgtgctctggagatggagaa

SEQ ID NO: 256 - RNA, 20 nt, synthetic construct
  source 1..20: mol_type = other RNA
tgttggagacctctccagct

SEQ ID NO: 257 - RNA, 20 nt, synthetic construct
  source 1..20: mol_type = other RNA
ttccaaaatggcctggtgag

SEQ ID NO: 258 - RNA, 20 nt, synthetic construct
  source 1..20: mol_type = other RNA
ttccatctccaccacccagg

SEQ ID NO: 259 - RNA, 20 nt, synthetic construct
  source 1..20: mol_type = other RNA
ttctccatctccagagcaca

SEQ ID NO: 260 - RNA, 20 nt, synthetic construct
  source 1..20: mol_type = other RNA
ttggaagcttgttggagacc

SEQ ID NO: 261 - RNA, 20 nt, synthetic construct
  source 1..20: mol_type = other RNA
ttggagacctctccagctgc

SEQ ID NO: 262 - RNA, 20 nt, synthetic construct
  source 1..20: mol_type = other RNA
ttgggtgggggacgtcttgt

SEQ ID NO: 263 - RNA, 20 nt, synthetic construct
  source 1..20: mol_type = other RNA
ttgtgctctggagatggaga

SEQ ID NO: 264 - RNA, 20 nt, synthetic construct
  source 1..20: mol_type = other RNA
ttgttggagacctctccagc

SEQ ID NO: 265 - RNA, 20 nt, synthetic construct
  source 1..20: mol_type = other RNA
tttggaagcttgttggagac

SEQ ID NO: 266 - RNA, 20 nt, synthetic construct
  source 1..20: mol_type = other RNA
ttttggaagcttgttggaga

SEQ ID NO: 267 - RNA, 21 nt, synthetic construct
  source 1..21: mol_type = other RNA
aaaatggcctggtgagtgatg

SEQ ID NO: 268 - RNA, 21 nt, synthetic construct
  source 1..21: mol_type = other RNA
aaatctggcacctgcttctcc

SEQ ID NO: 269 - RNA, 21 nt, synthetic construct
  source 1..21: mol_type = other RNA
aaatggcctggtgagtgatgc

SEQ ID NO: 270 - RNA, 21 nt, synthetic construct
  source 1..21: mol_type = other RNA
aacaagcttccaaaatggcct

SEQ ID NO: 271 - RNA, 21 nt, synthetic construct
  source 1..21: mol_type = other RNA
aaccctcaccctaaatctggc

SEQ ID NO: 272 - RNA, 21 nt, synthetic construct
  source 1..21: mol_type = other RNA
aagacgtcccccacccaatgc

SEQ ID NO: 273 - RNA, 21 nt, synthetic construct
  source 1..21: mol_type = other RNA
aagcaggtgccagatttaggg

SEQ ID NO: 274 - RNA, 21 nt, synthetic construct
  source 1..21: mol_type = other RNA
aagcttccaaaatggcctggt

SEQ ID NO: 275 - RNA, 21 nt, synthetic construct
  source 1..21: mol_type = other RNA
aagcttgttggagacctctcc

SEQ ID NO: 276 - RNA, 21 nt, synthetic construct
  source 1..21: mol_type = other RNA
aatctggcacctgcttctcca

SEQ ID NO: 277 - RNA, 21 nt, synthetic construct
  source 1..21: mol_type = other RNA
aatgcccggcagctggagagg

SEQ ID NO: 278 - RNA, 21 nt, synthetic construct
  source 1..21: mol_type = other RNA
aatggcctggtgagtgatgcg

SEQ ID NO: 279 - RNA, 21 nt, synthetic construct
  source 1..21: mol_type = other RNA
acaagacgtcccccacccaat

SEQ ID NO: 280 - RNA, 21 nt, synthetic construct
  source 1..21: mol_type = other RNA
acaagcttccaaaatggcctg

SEQ ID NO: 281 - RNA, 21 nt, synthetic construct
  source 1..21: mol_type = other RNA
accacccagggcagagagatc

SEQ ID NO: 282 - RNA, 21 nt, synthetic construct
  source 1..21: mol_type = other RNA
accaggccattttggaagctt

SEQ ID NO: 283 - RNA, 21 nt, synthetic construct
  source 1..21: mol_type = other RNA
acccaatgcccggcagctgga

SEQ ID NO: 284 - RNA, 21 nt, synthetic construct
  source 1..21: mol_type = other RNA
acccagggcagagagatcccg

SEQ ID NO: 285 - RNA, 21 nt, synthetic construct
  source 1..21: mol_type = other RNA
accctaaatctggcacctgct

SEQ ID NO: 286 - RNA, 21 nt, synthetic construct
  source 1..21: mol_type = other RNA
accctcaccctaaatctggca

SEQ ID NO: 287 - RNA, 21 nt, synthetic construct
  source 1..21: mol_type = other RNA
acctctccagctgccgggcat

SEQ ID NO: 288 - RNA, 21 nt, synthetic construct
  source 1..21: mol_type = other RNA
acctgcttctccatctccaga

SEQ ID NO: 289 - RNA, 21 nt, synthetic construct
  source 1..21: mol_type = other RNA
acgtcccccacccaatgcccg

SEQ ID NO: 290 - RNA, 21 nt, synthetic construct
  source 1..21: mol_type = other RNA
acgtcttgtgctctggagatg

SEQ ID NO: 291 - RNA, 21 nt, synthetic construct
  source 1..21: mol_type = other RNA
actcaccaggccattttggaa

SEQ ID NO: 292 - RNA, 21 nt, synthetic construct
  source 1..21: mol_type = other RNA
agaagcaggtgccagatttag

SEQ ID NO: 293 - RNA, 21 nt, synthetic construct
  source 1..21: mol_type = other RNA
agacctctccagctgccgggc

SEQ ID NO: 294 - RNA, 21 nt, synthetic construct
  source 1..21: mol_type = other RNA
agacgtcccccacccaatgcc

SEQ ID NO: 295 - RNA, 21 nt, synthetic construct
  source 1..21: mol_type = other RNA
agagagatcccgcatcactca

SEQ ID NO: 296 - RNA, 21 nt, synthetic construct
  source 1..21: mol_type = other RNA
agagatcccgcatcactcacc

SEQ ID NO: 297 - RNA, 21 nt, synthetic construct
  source 1..21: mol_type = other RNA
agagcacaagacgtcccccac

SEQ ID NO: 298 - RNA, 21 nt, synthetic construct
  source 1..21: mol_type = other RNA
agaggtctccaacaagcttcc

SEQ ID NO: 299 - RNA, 21 nt, synthetic construct
  source 1..21: mol_type = other RNA
agatcccgcatcactcaccag

SEQ ID NO: 300 - RNA, 21 nt, synthetic construct
  source 1..21: mol_type = other RNA
agatggagaagcaggtgccag

SEQ ID NO: 301 - RNA, 21 nt, synthetic construct
  source 1..21: mol_type = other RNA
agcacaagacgtcccccaccc

SEQ ID NO: 302 - RNA, 21 nt, synthetic construct
  source 1..21: mol_type = other RNA
agcaggtgccagatttagggt

SEQ ID NO: 303 - RNA, 21 nt, synthetic construct
  source 1..21: mol_type = other RNA
agctgccgggcattgggtggg

SEQ ID NO: 304 - RNA, 21 nt, synthetic construct
  source 1..21: mol_type = other RNA
agctggagaggtctccaacaa

SEQ ID NO: 305 - RNA, 21 nt, synthetic construct
  source 1..21: mol_type = other RNA
agcttccaaaatggcctggtg

SEQ ID NO: 306 - RNA, 21 nt, synthetic construct
  source 1..21: mol_type = other RNA
agcttgttggagacctctcca

SEQ ID NO: 307 - RNA, 21 nt, synthetic construct
  source 1..21: mol_type = other RNA
aggccattttggaagcttgtt

SEQ ID NO: 308 - RNA, 21 nt, synthetic construct
  source 1..21: mol_type = other RNA
agggcagagagatcccgcatc

SEQ ID NO: 309 - RNA, 21 nt, synthetic construct
  source 1..21: mol_type = other RNA
aggtctccaacaagcttccaa

SEQ ID NO: 310 - RNA, 21 nt, synthetic construct
  source 1..21: mol_type = other RNA
aggtgccagatttagggtgag

SEQ ID NO: 311 - RNA, 21 nt, synthetic construct
  source 1..21: mol_type = other RNA
agtgatgcgggatctctctgc

SEQ ID NO: 312 - RNA, 21 nt, synthetic construct
  source 1..21: mol_type = other RNA
atcactcaccaggccattttg

SEQ ID NO: 313 - RNA, 21 nt, synthetic construct
  source 1..21: mol_type = other RNA
atcccgcatcactcaccaggc

SEQ ID NO: 314 - RNA, 21 nt, synthetic construct
  source 1..21: mol_type = other RNA
atctccaccacccagggcaga

SEQ ID NO: 315 - RNA, 21 nt, synthetic construct
  source 1..21: mol_type = other RNA
atctccagagcacaagacgtc

SEQ ID NO: 316 - RNA, 21 nt, synthetic construct
  source 1..21: mol_type = other RNA
atctctctgccctgggtggtg

SEQ ID NO: 317 - RNA, 21 nt, synthetic construct
  source 1..21: mol_type = other RNA
atctggcacctgcttctccat

SEQ ID NO: 318 - RNA, 21 nt, synthetic construct
  source 1..21: mol_type = other RNA
atgcccggcagctggagaggt

SEQ ID NO: 319 - RNA, 21 nt, synthetic construct
  source 1..21: mol_type = other RNA
atgcgggatctctctgccctg

SEQ ID NO: 320 - RNA, 21 nt, synthetic construct
  source 1..21: mol_type = other RNA
atggagaagcaggtgccagat

SEQ ID NO: 321 - RNA, 21 nt, synthetic construct
  source 1..21: mol_type = other RNA
atggcctggtgagtgatgcgg

SEQ ID NO: 322 - RNA, 21 nt, synthetic construct
  source 1..21: mol_type = other RNA
attgggtgggggacgtcttgt

SEQ ID NO: 323 - RNA, 21 nt, synthetic construct
  source 1..21: mol_type = other RNA
attttggaagcttgttggaga

SEQ ID NO: 324 - RNA, 21 nt, synthetic construct
  source 1..21: mol_type = other RNA
caaaatggcctggtgagtgat

SEQ ID NO: 325 - RNA, 21 nt, synthetic construct
  source 1..21: mol_type = other RNA
caacaagcttccaaaatggcc

SEQ ID NO: 326 - RNA, 21 nt, synthetic construct
  source 1..21: mol_type = other RNA
caagacgtcccccacccaatg

SEQ ID NO: 327 - RNA, 21 nt, synthetic construct
  source 1..21: mol_type = other RNA
caagcttccaaaatggcctgg

SEQ ID NO: 328 - RNA, 21 nt, synthetic construct
  source 1..21: mol_type = other RNA
caatgcccggcagctggagag

SEQ ID NO: 329 - RNA, 21 nt, synthetic construct
  source 1..21: mol_type = other RNA
cacaagacgtcccccacccaa

SEQ ID NO: 330 - RNA, 21 nt, synthetic construct
  source 1..21: mol_type = other RNA
caccacccagggcagagagat

SEQ ID NO: 331 - RNA, 21 nt, synthetic construct
  source 1..21: mol_type = other RNA
caccaggccattttggaagct

SEQ ID NO: 332 - RNA, 21 nt, synthetic construct
  source 1..21: mol_type = other RNA
cacccaatgcccggcagctgg

SEQ ID NO: 333 - RNA, 21 nt, synthetic construct
  source 1..21: mol_type = other RNA
cacccagggcagagagatccc

SEQ ID NO: 334 - RNA, 21 nt, synthetic construct
  source 1..21: mol_type = other RNA
caccctaaatctggcacctgc

SEQ ID NO: 335 - RNA, 21 nt, synthetic construct
  source 1..21: mol_type = other RNA
cacctgcttctccatctccag

SEQ ID NO: 336 - RNA, 21 nt, synthetic construct
  source 1..21: mol_type = other RNA
cactcaccaggccattttgga

SEQ ID NO: 337 - RNA, 21 nt, synthetic construct
  source 1..21: mol_type = other RNA
cagagagatcccgcatcactc

SEQ ID NO: 338 - RNA, 21 nt, synthetic construct
  source 1..21: mol_type = other RNA
cagagcacaagacgtccccca

SEQ ID NO: 339 - RNA, 21 nt, synthetic construct
  source 1..21: mol_type = other RNA
cagctgccgggcattgggtgg

SEQ ID NO: 340 - RNA, 21 nt, synthetic construct
  source 1..21: mol_type = other RNA
cagctggagaggtctccaaca

SEQ ID NO: 341 - RNA, 21 nt, synthetic construct
  source 1..21: mol_type = other RNA
caggccattttggaagcttgt

SEQ ID NO: 342 - RNA, 21 nt, synthetic construct
  source 1..21: mol_type = other RNA
cagggcagagagatcccgcat

SEQ ID NO: 343 - RNA, 21 nt, synthetic construct
  source 1..21: mol_type = other RNA
caggtgccagatttagggtga

SEQ ID NO: 344 - RNA, 21 nt, synthetic construct
  source 1..21: mol_type = other RNA
catcactcaccaggccatttt

SEQ ID NO: 345 - RNA, 21 nt, synthetic construct
  source 1..21: mol_type = other RNA
catctccaccacccagggcag

SEQ ID NO: 346 - RNA, 21 nt, synthetic construct
  source 1..21: mol_type = other RNA
catctccagagcacaagacgt

SEQ ID NO: 347 - RNA, 21 nt, synthetic construct
  source 1..21: mol_type = other RNA
cattgggtgggggacgtcttg

SEQ ID NO: 348 - RNA, 21 nt, synthetic construct
  source 1..21: mol_type = other RNA
cattttggaagcttgttggag

SEQ ID NO: 349 - RNA, 21 nt, synthetic construct
  source 1..21: mol_type = other RNA
ccaaaatggcctggtgagtga

SEQ ID NO: 350 - RNA, 21 nt, synthetic construct
  source 1..21: mol_type = other RNA
ccaacaagcttccaaaatggc

SEQ ID NO: 351 - RNA, 21 nt, synthetic construct
  source 1..21: mol_type = other RNA
ccaatgcccggcagctggaga

SEQ ID NO: 352 - RNA, 21 nt, synthetic construct
  source 1..21: mol_type = other RNA
ccaccacccagggcagagaga

SEQ ID NO: 353 - RNA, 21 nt, synthetic construct
  source 1..21: mol_type = other RNA
ccacccaatgcccggcagctg

SEQ ID NO: 354 - RNA, 21 nt, synthetic construct
  source 1..21: mol_type = other RNA
ccacccagggcagagagatcc

SEQ ID NO: 355 - RNA, 21 nt, synthetic construct
  source 1..21: mol_type = other RNA
ccagagcacaagacgtccccc

SEQ ID NO: 356 - RNA, 21 nt, synthetic construct
  source 1..21: mol_type = other RNA
ccagctgccgggcattgggtg

SEQ ID NO: 357 - RNA, 21 nt, synthetic construct
  source 1..21: mol_type = other RNA
ccaggccattttggaagcttg

SEQ ID NO: 358 - RNA, 21 nt, synthetic construct
  source 1..21: mol_type = other RNA
ccagggcagagagatcccgca

SEQ ID NO: 359 - RNA, 21 nt, synthetic construct
  source 1..21: mol_type = other RNA
ccatctccaccacccagggca

SEQ ID NO: 360 - RNA, 21 nt, synthetic construct
  source 1..21: mol_type = other RNA
ccatctccagagcacaagacg

SEQ ID NO: 361 - RNA, 21 nt, synthetic construct
  source 1..21: mol_type = other RNA
ccattttggaagcttgttgga

SEQ ID NO: 362 - RNA, 21 nt, synthetic construct
  source 1..21: mol_type = other RNA
cccaatgcccggcagctggag

SEQ ID NO: 363 - RNA, 21 nt, synthetic construct
  source 1..21: mol_type = other RNA
cccacccaatgcccggcagct

SEQ ID NO: 364 - RNA, 21 nt, synthetic construct
  source 1..21: mol_type = other RNA
cccagggcagagagatcccgc

SEQ ID NO: 365 - RNA, 21 nt, synthetic construct
  source 1..21: mol_type = other RNA
ccccacccaatgcccggcagc

SEQ ID NO: 366 - RNA, 21 nt, synthetic construct
  source 1..21: mol_type = other RNA
cccccacccaatgcccggcag

SEQ ID NO: 367 - RNA, 21 nt, synthetic construct
  source 1..21: mol_type = other RNA
cccgcatcactcaccaggcca

SEQ ID NO: 368 - RNA, 21 nt, synthetic construct
  source 1..21: mol_type = other RNA
cccggcagctggagaggtctc

SEQ ID NO: 369 - RNA, 21 nt, synthetic construct
  source 1..21: mol_type = other RNA
ccctaaatctggcacctgctt

SEQ ID NO: 370 - RNA, 21 nt, synthetic construct
  source 1..21: mol_type = other RNA
ccctcaccctaaatctggcac

SEQ ID NO: 371 - RNA, 21 nt, synthetic construct
  source 1..21: mol_type = other RNA
ccgcatcactcaccaggccat

SEQ ID NO: 372 - RNA, 21 nt, synthetic construct
  source 1..21: mol_type = other RNA
ccggcagctggagaggtctcc

SEQ ID NO: 373 - RNA, 21 nt, synthetic construct
  source 1..21: mol_type = other RNA
ccgggcattgggtgggggacg

SEQ ID NO: 374 - RNA, 21 nt, synthetic construct
  source 1..21: mol_type = other RNA
cctaaatctggcacctgcttc

SEQ ID NO: 375 - RNA, 21 nt, synthetic construct
  source 1..21: mol_type = other RNA
cctcaccctaaatctggcacc

SEQ ID NO: 376 - RNA, 21 nt, synthetic construct
  source 1..21: mol_type = other RNA
cctctccagctgccgggcatt

SEQ ID NO: 377 - RNA, 21 nt, synthetic construct
  source 1..21: mol_type = other RNA
cctgcttctccatctccagag

SEQ ID NO: 378 - RNA, 21 nt, synthetic construct
  source 1..21: mol_type = other RNA
cctggtgagtgatgcgggatc

SEQ ID NO: 379 - RNA, 21 nt, synthetic construct
  source 1..21: mol_type = other RNA
cgcatcactcaccaggccatt

SEQ ID NO: 380 - RNA, 21 nt, synthetic construct
  source 1..21: mol_type = other RNA
cggcagctggagaggtctcca

SEQ ID NO: 381 - RNA, 21 nt, synthetic construct
  source 1..21: mol_type = other RNA
cgggatctctctgccctgggt

SEQ ID NO: 382 - RNA, 21 nt, synthetic construct
  source 1..21: mol_type = other RNA
cgggcattgggtgggggacgt

SEQ ID NO: 383 - RNA, 21 nt, synthetic construct
  source 1..21: mol_type = other RNA
cgtcccccacccaatgcccgg

SEQ ID NO: 384 - RNA, 21 nt, synthetic construct
  source 1..21: mol_type = other RNA
cgtcttgtgctctggagatgg

SEQ ID NO: 385 - RNA, 21 nt, synthetic construct
  source 1..21: mol_type = other RNA
ctaaatctggcacctgcttct

SEQ ID NO: 386 - RNA, 21 nt, synthetic construct
  source 1..21: mol_type = other RNA
ctcaccaggccattttggaag

SEQ ID NO: 387 - RNA, 21 nt, synthetic construct
  source 1..21: mol_type = other RNA
ctcaccctaaatctggcacct

SEQ ID NO: 388 - RNA, 21 nt, synthetic construct
  source 1..21: mol_type = other RNA
ctccaacaagcttccaaaatg

SEQ ID NO: 389 - RNA, 21 nt, synthetic construct
  source 1..21: mol_type = other RNA
ctccaccacccagggcagaga

SEQ ID NO: 390 - RNA, 21 nt, synthetic construct
  source 1..21: mol_type = other RNA
ctccagagcacaagacgtccc

SEQ ID NO: 391 - RNA, 21 nt, synthetic construct
  source 1..21: mol_type = other RNA
ctccagctgccgggcattggg

SEQ ID NO: 392 - RNA, 21 nt, synthetic construct
  source 1..21: mol_type = other RNA
ctccatctccagagcacaaga

SEQ ID NO: 393 - RNA, 21 nt, synthetic construct
  source 1..21: mol_type = other RNA
ctctccagctgccgggcattg

SEQ ID NO: 394 - RNA, 21 nt, synthetic construct
  source 1..21: mol_type = other RNA
ctctctgccctgggtggtgga

SEQ ID NO: 395 - RNA, 21 nt, synthetic construct
  source 1..21: mol_type = other RNA
ctctggagatggagaagcagg

SEQ ID NO: 396 - RNA, 21 nt, synthetic construct
  source 1..21: mol_type = other RNA
ctgccgggcattgggtggggg

SEQ ID NO: 397 - RNA, 21 nt, synthetic construct
  source 1..21: mol_type = other RNA
ctgcttctccatctccagagc

SEQ ID NO: 398 - RNA, 21 nt, synthetic construct
  source 1..21: mol_type = other RNA
ctggagaggtctccaacaagc

SEQ ID NO: 399 - RNA, 21 nt, synthetic construct
  source 1..21: mol_type = other RNA
ctggagatggagaagcaggtg

SEQ ID NO: 400 - RNA, 21 nt, synthetic construct
  source 1..21: mol_type = other RNA
ctggcacctgcttctccatct

SEQ ID NO: 401 - RNA, 21 nt, synthetic construct
  source 1..21: mol_type = other RNA
ctggtgagtgatgcgggatct

SEQ ID NO: 402 - RNA, 21 nt, synthetic construct
  source 1..21: mol_type = other RNA
cttccaaaatggcctggtgag

SEQ ID NO: 403 - RNA, 21 nt, synthetic construct
  source 1..21: mol_type = other RNA
cttccatctccaccacccagg

SEQ ID NO: 404 - RNA, 21 nt, synthetic construct
  source 1..21: mol_type = other RNA
cttctccatctccagagcaca

SEQ ID NO: 405 - RNA, 21 nt, synthetic construct
  source 1..21: mol_type = other RNA
cttgtgctctggagatggaga

SEQ ID NO: 406 - RNA, 21 nt, synthetic construct
  source 1..21: mol_type = other RNA
cttgttggagacctctccagc

SEQ ID NO: 407 - RNA, 21 nt, synthetic construct
  source 1..21: mol_type = other RNA
gaagcaggtgccagatttagg

SEQ ID NO: 408 - RNA, 21 nt, synthetic construct
  source 1..21: mol_type = other RNA
gaagcttgttggagacctctc

SEQ ID NO: 409 - RNA, 21 nt, synthetic construct
  source 1..21: mol_type = other RNA
gacctctccagctgccgggca

SEQ ID NO: 410 - RNA, 21 nt, synthetic construct
  source 1..21: mol_type = other RNA
gacgtcccccacccaatgccc

SEQ ID NO: 411 - RNA, 21 nt, synthetic construct
  source 1..21: mol_type = other RNA
gacgtcttgtgctctggagat

SEQ ID NO: 412 - RNA, 21 nt, synthetic construct
  source 1..21: mol_type = other RNA
gagaagcaggtgccagattta

SEQ ID NO: 413 - RNA, 21 nt, synthetic construct
  source 1..21: mol_type = other RNA
gagacctctccagctgccggg

SEQ ID NO: 414 - RNA, 21 nt, synthetic construct
  source 1..21: mol_type = other RNA
gagagatcccgcatcactcac

SEQ ID NO: 415 - RNA, 21 nt, synthetic construct
  source 1..21: mol_type = other RNA
gagaggtctccaacaagcttc

SEQ ID NO: 416 - RNA, 21 nt, synthetic construct
  source 1..21: mol_type = other RNA
gagatcccgcatcactcacca

SEQ ID NO: 417 - RNA, 21 nt, synthetic construct
  source 1..21: mol_type = other RNA
gagatggagaagcaggtgcca

SEQ ID NO: 418 - RNA, 21 nt, synthetic construct
  source 1..21: mol_type = other RNA
gagcacaagacgtcccccacc

SEQ ID NO: 419 - RNA, 21 nt, synthetic construct
  source 1..21: mol_type = other RNA
gaggtctccaacaagcttcca

SEQ ID NO: 420 - RNA, 21 nt, synthetic construct
  source 1..21: mol_type = other RNA
gagtgatgcgggatctctctg

SEQ ID NO: 421 - RNA, 21 nt, synthetic construct
  source 1..21: mol_type = other RNA
gatcccgcatcactcaccagg

SEQ ID NO: 422 - RNA, 21 nt, synthetic construct
  source 1..21: mol_type = other RNA
gatctctctgccctgggtggt

SEQ ID NO: 423 - RNA, 21 nt, synthetic construct
  source 1..21: mol_type = other RNA
gatgcgggatctctctgccct

SEQ ID NO: 424 - RNA, 21 nt, synthetic construct
  source 1..21: mol_type = other RNA
gatggagaagcaggtgccaga

SEQ ID NO: 425 - RNA, 21 nt, synthetic construct
  source 1..21: mol_type = other RNA
gcacaagacgtcccccaccca

SEQ ID NO: 426 - RNA, 21 nt, synthetic construct
  source 1..21: mol_type = other RNA
gcacctgcttctccatctcca

SEQ ID NO: 427 - RNA, 21 nt, synthetic construct
  source 1..21: mol_type = other RNA
gcagagagatcccgcatcact

SEQ ID NO: 428 - RNA, 21 nt, synthetic construct
  source 1..21: mol_type = other RNA
gcagctggagaggtctccaac

SEQ ID NO: 429 - RNA, 21 nt, synthetic construct
  source 1..21: mol_type = other RNA
gcaggtgccagatttagggtg

SEQ ID NO: 430 - RNA, 21 nt, synthetic construct
  source 1..21: mol_type = other RNA
gcatcactcaccaggccattt

SEQ ID NO: 431 - RNA, 21 nt, synthetic construct
  source 1..21: mol_type = other RNA
gcattgggtgggggacgtctt

SEQ ID NO: 432 - RNA, 21 nt, synthetic construct
  source 1..21: mol_type = other RNA
gccattttggaagcttgttgg

SEQ ID NO: 433 - RNA, 21 nt, synthetic construct
  source 1..21: mol_type = other RNA
gcccggcagctggagaggtct

SEQ ID NO: 434 - RNA, 21 nt, synthetic construct
  source 1..21: mol_type = other RNA
gccgggcattgggtgggggac

SEQ ID NO: 435 - RNA, 21 nt, synthetic construct
  source 1..21: mol_type = other RNA
gcctggtgagtgatgcgggat

SEQ ID NO: 436 - RNA, 21 nt, synthetic construct
  source 1..21: mol_type = other RNA
gcgggatctctctgccctggg

SEQ ID NO: 437 - RNA, 21 nt, synthetic construct
  source 1..21: mol_type = other RNA
gctctggagatggagaagcag

SEQ ID NO: 438 - RNA, 21 nt, synthetic construct
  source 1..21: mol_type = other RNA
gctgccgggcattgggtgggg

SEQ ID NO: 439 - RNA, 21 nt, synthetic construct
  source 1..21: mol_type = other RNA
gctggagaggtctccaacaag

SEQ ID NO: 440 - RNA, 21 nt, synthetic construct
  source 1..21: mol_type = other RNA
gcttccaaaatggcctggtga

SEQ ID NO: 441 - RNA, 21 nt, synthetic construct
  source 1..21: mol_type = other RNA
gcttctccatctccagagcac

SEQ ID NO: 442 - RNA, 21 nt, synthetic construct
  source 1..21: mol_type = other RNA
gcttgttggagacctctccag

SEQ ID NO: 443 - RNA, 21 nt, synthetic construct
  source 1..21: mol_type = other RNA
ggaagcttgttggagacctct

SEQ ID NO: 444 - RNA, 21 nt, synthetic construct
  source 1..21: mol_type = other RNA
ggacgtcttgtgctctggaga

SEQ ID NO: 445 - RNA, 21 nt, synthetic construct
  source 1..21: mol_type = other RNA
ggagaagcaggtgccagattt

SEQ ID NO: 446 - RNA, 21 nt, synthetic construct
  source 1..21: mol_type = other RNA
ggagacctctccagctgccgg

SEQ ID NO: 447 - RNA, 21 nt, synthetic construct
  source 1..21: mol_type = other RNA
ggagaggtctccaacaagctt

SEQ ID NO: 448 - RNA, 21 nt, synthetic construct
  source 1..21: mol_type = other RNA
ggagatggagaagcaggtgcc

SEQ ID NO: 449 - RNA, 21 nt, synthetic construct
  source 1..21: mol_type = other RNA
ggatctctctgccctgggtgg

SEQ ID NO: 450 - RNA, 21 nt, synthetic construct
  source 1..21: mol_type = other RNA
ggcacctgcttctccatctcc

SEQ ID NO: 451 - RNA, 21 nt, synthetic construct
  source 1..21: mol_type = other RNA
ggcagagagatcccgcatcac

SEQ ID NO: 452 - RNA, 21 nt, synthetic construct
  source 1..21: mol_type = other RNA
ggcagctggagaggtctccaa

SEQ ID NO: 453 - RNA, 21 nt, synthetic construct
  source 1..21: mol_type = other RNA
ggcattgggtgggggacgtct

SEQ ID NO: 454 - RNA, 21 nt, synthetic construct
  source 1..21: mol_type = other RNA
ggccattttggaagcttgttg

SEQ ID NO: 455 - RNA, 21 nt, synthetic construct
  source 1..21: mol_type = other RNA
ggcctggtgagtgatgcggga

SEQ ID NO: 456 - RNA, 21 nt, synthetic construct
  source 1..21: mol_type = other RNA
gggacgtcttgtgctctggag

SEQ ID NO: 457 - RNA, 21 nt, synthetic construct
  source 1..21: mol_type = other RNA
gggatctctctgccctgggtg

SEQ ID NO: 458 - RNA, 21 nt, synthetic construct
  source 1..21: mol_type = other RNA
gggcagagagatcccgcatca

SEQ ID NO: 459 - RNA, 21 nt, synthetic construct
  source 1..21: mol_type = other RNA
gggcattgggtgggggacgtc

SEQ ID NO: 460 - RNA, 21 nt, synthetic construct
  source 1..21: mol_type = other RNA
ggggacgtcttgtgctctgga

SEQ ID NO: 461 - RNA, 21 nt, synthetic construct
  source 1..21: mol_type = other RNA
gggggacgtcttgtgctctgg

SEQ ID NO: 462 - RNA, 21 nt, synthetic construct
  source 1..21: mol_type = other RNA
ggggtaaccctcaccctaaat

SEQ ID NO: 463 - RNA, 21 nt, synthetic construct
  source 1..21: mol_type = other RNA
gggtaaccctcaccctaaatc

SEQ ID NO: 464 - RNA, 21 nt, synthetic construct
  source 1..21: mol_type = other RNA
gggtgggggacgtcttgtgct

SEQ ID NO: 465 - RNA, 21 nt, synthetic construct
  source 1..21: mol_type = other RNA
ggtaaccctcaccctaaatct

SEQ ID NO: 466 - RNA, 21 nt, synthetic construct
  source 1..21: mol_type = other RNA
ggtctccaacaagcttccaaa

SEQ ID NO: 467 - RNA, 21 nt, synthetic construct
  source 1..21: mol_type = other RNA
ggtgagtgatgcgggatctct

SEQ ID NO: 468 - RNA, 21 nt, synthetic construct
  source 1..21: mol_type = other RNA
ggtgccagatttagggtgagg

SEQ ID NO: 469 - RNA, 21 nt, synthetic construct
  source 1..21: mol_type = other RNA
ggtgggggacgtcttgtgctc

SEQ ID NO: 470 - RNA, 21 nt, synthetic construct
  source 1..21: mol_type = other RNA
gtaaccctcaccctaaatctg

SEQ ID NO: 471 - RNA, 21 nt, synthetic construct
  source 1..21: mol_type = other RNA
gtcccccacccaatgcccggc

SEQ ID NO: 472 - RNA, 21 nt, synthetic construct
  source 1..21: mol_type = other RNA
gtctccaacaagcttccaaaa

SEQ ID NO: 473 - RNA, 21 nt, synthetic construct
  source 1..21: mol_type = other RNA
gtcttgtgctctggagatgga

SEQ ID NO: 474 - RNA, 21 nt, synthetic construct
  source 1..21: mol_type = other RNA
gtgagtgatgcgggatctctc

SEQ ID NO: 475 - RNA, 21 nt, synthetic construct
  source 1..21: mol_type = other RNA
gtgatgcgggatctctctgcc

SEQ ID NO: 476 - RNA, 21 nt, synthetic construct
  source 1..21: mol_type = other RNA
gtgctctggagatggagaagc

SEQ ID NO: 477 - RNA, 21 nt, synthetic construct
  source 1..21: mol_type = other RNA
gtgggggacgtcttgtgctct

SEQ ID NO: 478 - RNA, 21 nt, synthetic construct
  source 1..21: mol_type = other RNA
gttggagacctctccagctgc

SEQ ID NO: 479 - RNA, 21 nt, synthetic construct
  source 1..21: mol_type = other RNA
taaatctggcacctgcttctc

SEQ ID NO: 480 - RNA, 21 nt, synthetic construct
  source 1..21: mol_type = other RNA
taaccctcaccctaaatctgg

SEQ ID NO: 481 - RNA, 21 nt, synthetic construct
  source 1..21: mol_type = other RNA
tcaccaggccattttggaagc

SEQ ID NO: 482 - RNA, 21 nt, synthetic construct
  source 1..21: mol_type = other RNA
tcaccctaaatctggcacctg

SEQ ID NO: 483 - RNA, 21 nt, synthetic construct
  source 1..21: mol_type = other RNA
tcactcaccaggccattttgg

SEQ ID NO: 484 - RNA, 21 nt, synthetic construct
  source 1..21: mol_type = other RNA
tccaaaatggcctggtgagtg

SEQ ID NO: 485 - RNA, 21 nt, synthetic construct
  source 1..21: mol_type = other RNA
tccaacaagcttccaaaatgg

SEQ ID NO: 486 - RNA, 21 nt, synthetic construct
  source 1..21: mol_type = other RNA
tccaccacccagggcagagag

SEQ ID NO: 487 - RNA, 21 nt, synthetic construct
  source 1..21: mol_type = other RNA
tccagagcacaagacgtcccc

SEQ ID NO: 488 - RNA, 21 nt, synthetic construct
  source 1..21: mol_type = other RNA
tccagctgccgggcattgggt

SEQ ID NO: 489 - RNA, 21 nt, synthetic construct
  source 1..21: mol_type = other RNA
tccatctccaccacccagggc

SEQ ID NO: 490 - RNA, 21 nt, synthetic construct
  source 1..21: mol_type = other RNA
tccatctccagagcacaagac

SEQ ID NO: 491 - RNA, 21 nt, synthetic construct
  source 1..21: mol_type = other RNA
tcccccacccaatgcccggca

SEQ ID NO: 492 - RNA, 21 nt, synthetic construct
  source 1..21: mol_type = other RNA
tcccgcatcactcaccaggcc

SEQ ID NO: 493 - RNA, 21 nt, synthetic construct
  source 1..21: mol_type = other RNA
tctccaacaagcttccaaaat

SEQ ID NO: 494 - RNA, 21 nt, synthetic construct
  source 1..21: mol_type = other RNA
tctccaccacccagggcagag

SEQ ID NO: 495 - RNA, 21 nt, synthetic construct
  source 1..21: mol_type = other RNA
tctccagagcacaagacgtcc

SEQ ID NO: 496 - RNA, 21 nt, synthetic construct
  source 1..21: mol_type = other RNA
tctccagctgccgggcattgg

SEQ ID NO: 497 - RNA, 21 nt, synthetic construct
  source 1..21: mol_type = other RNA
tctccatctccagagcacaag

SEQ ID NO: 498 - RNA, 21 nt, synthetic construct
  source 1..21: mol_type = other RNA
tctctctgccctgggtggtgg

SEQ ID NO: 499 - RNA, 21 nt, synthetic construct
  source 1..21: mol_type = other RNA
tctggagatggagaagcaggt

SEQ ID NO: 500 - RNA, 21 nt, synthetic construct
  source 1..21: mol_type = other RNA
tctggcacctgcttctccatc

SEQ ID NO: 501 - RNA, 21 nt, synthetic construct
  source 1..21: mol_type = other RNA
tcttgtgctctggagatggag

SEQ ID NO: 502 - RNA, 21 nt, synthetic construct
  source 1..21: mol_type = other RNA
tgagtgatgcgggatctctct

SEQ ID NO: 503 - RNA, 21 nt, synthetic construct
  source 1..21: mol_type = other RNA
tgatgcgggatctctctgccc

SEQ ID NO: 504 - RNA, 21 nt, synthetic construct
  source 1..21: mol_type = other RNA
tgcccggcagctggagaggtc

SEQ ID NO: 505 - RNA, 21 nt, synthetic construct
  source 1..21: mol_type = other RNA
tgccgggcattgggtggggga

SEQ ID NO: 506 - RNA, 21 nt, synthetic construct
  source 1..21: mol_type = other RNA
tgcgggatctctctgccctgg

SEQ ID NO: 507 - RNA, 21 nt, synthetic construct
  source 1..21: mol_type = other RNA
tgctctggagatggagaagca

SEQ ID NO: 508 - RNA, 21 nt, synthetic construct
  source 1..21: mol_type = other RNA
tgcttctccatctccagagca

SEQ ID NO: 509 - RNA, 21 nt, synthetic construct
  source 1..21: mol_type = other RNA
tggaagcttgttggagacctc

SEQ ID NO: 510 - RNA, 21 nt, synthetic construct
  source 1..21: mol_type = other RNA
tggagaagcaggtgccagatt

SEQ ID NO: 511 - RNA, 21 nt, synthetic construct
  source 1..21: mol_type = other RNA
tggagacctctccagctgccg

SEQ ID NO: 512 - RNA, 21 nt, synthetic construct
  source 1..21: mol_type = other RNA
tggagaggtctccaacaagct

SEQ ID NO: 513 - RNA, 21 nt, synthetic construct
  source 1..21: mol_type = other RNA
tggagatggagaagcaggtgc

SEQ ID NO: 514 - RNA, 21 nt, synthetic construct
  source 1..21: mol_type = other RNA
tggcacctgcttctccatctc

SEQ ID NO: 515 - RNA, 21 nt, synthetic construct
  source 1..21: mol_type = other RNA
tggcctggtgagtgatgcggg

SEQ ID NO: 516 - RNA, 21 nt, synthetic construct
  source 1..21: mol_type = other RNA
tgggggacgtcttgtgctctg

SEQ ID NO: 517 - RNA, 21 nt, synthetic construct
  source 1..21: mol_type = other RNA
tgggtgggggacgtcttgtgc

SEQ ID NO: 518 - RNA, 21 nt, synthetic construct
  source 1..21: mol_type = other RNA
tggtgagtgatgcgggatctc

SEQ ID NO: 519 - RNA, 21 nt, synthetic construct
  source 1..21: mol_type = other RNA
tgtgctctggagatggagaag

SEQ ID NO: 520 - RNA, 21 nt, synthetic construct
  source 1..21: mol_type = other RNA
tgttggagacctctccagctg

SEQ ID NO: 521 - RNA, 21 nt, synthetic construct
  source 1..21: mol_type = other RNA
ttccaaaatggcctggtgagt

SEQ ID NO: 522 - RNA, 21 nt, synthetic construct
  source 1..21: mol_type = other RNA
ttccatctccaccacccaggg

SEQ ID NO: 523 - RNA, 21 nt, synthetic construct
  source 1..21: mol_type = other RNA
ttctccatctccagagcacaa

SEQ ID NO: 524 - RNA, 21 nt, synthetic construct
  source 1..21: mol_type = other RNA
ttggaagcttgttggagacct

SEQ ID NO: 525 - RNA, 21 nt, synthetic construct
  source 1..21: mol_type = other RNA
ttggagacctctccagctgcc

SEQ ID NO: 526 - RNA, 21 nt, synthetic construct
  source 1..21: mol_type = other RNA
ttgggtgggggacgtcttgtg

SEQ ID NO: 527 - RNA, 21 nt, synthetic construct
  source 1..21: mol_type = other RNA
ttgtgctctggagatggagaa

SEQ ID NO: 528 - RNA, 21 nt, synthetic construct
  source 1..21: mol_type = other RNA
ttgttggagacctctccagct

SEQ ID NO: 529 - RNA, 21 nt, synthetic construct
  source 1..21: mol_type = other RNA
tttggaagcttgttggagacc

SEQ ID NO: 530 - RNA, 21 nt, synthetic construct
  source 1..21: mol_type = other RNA
ttttggaagcttgttggagac

SEQ ID NO: 531 - RNA, 22 nt, synthetic construct
  source 1..22: mol_type = other RNA
aaaatggcctggtgagtgatgc

SEQ ID NO: 532 - RNA, 22 nt, synthetic construct
  source 1..22: mol_type = other RNA
aaatctggcacctgcttctcca

SEQ ID NO: 533 - RNA, 22 nt, synthetic construct
  source 1..22: mol_type = other RNA
aaatggcctggtgagtgatgcg

SEQ ID NO: 534 - RNA, 22 nt, synthetic construct
  source 1..22: mol_type = other RNA
aacaagcttccaaaatggcctg

SEQ ID NO: 535 - RNA, 22 nt, synthetic construct
  source 1..22: mol_type = other RNA
aaccctcaccctaaatctggca

SEQ ID NO: 536 - RNA, 22 nt, synthetic construct
  source 1..22: mol_type = other RNA
aagacgtcccccacccaatgcc

SEQ ID NO: 537 - RNA, 22 nt, synthetic construct
  source 1..22: mol_type = other RNA
aagcaggtgccagatttagggt

SEQ ID NO: 538 - RNA, 22 nt, synthetic construct
  source 1..22: mol_type = other RNA
aagcttccaaaatggcctggtg

SEQ ID NO: 539 - RNA, 22 nt, synthetic construct
  source 1..22: mol_type = other RNA
aagcttgttggagacctctcca

SEQ ID NO: 540 - RNA, 22 nt, synthetic construct
  source 1..22: mol_type = other RNA
aatctggcacctgcttctccat

SEQ ID NO: 541 - RNA, 22 nt, synthetic construct
  source 1..22: mol_type = other RNA
aatgcccggcagctggagaggt

SEQ ID NO: 542 - RNA, 22 nt, synthetic construct
  source 1..22: mol_type = other RNA
aatggcctggtgagtgatgcgg

SEQ ID NO: 543 - RNA, 22 nt, synthetic construct
  source 1..22: mol_type = other RNA
acaagacgtcccccacccaatg

SEQ ID NO: 544 - RNA, 22 nt, synthetic construct
  source 1..22: mol_type = other RNA
acaagcttccaaaatggcctgg

SEQ ID NO: 545 - RNA, 22 nt, synthetic construct
  source 1..22: mol_type = other RNA
accacccagggcagagagatcc

SEQ ID NO: 546 - RNA, 22 nt, synthetic construct
  source 1..22: mol_type = other RNA
accaggccattttggaagcttg

SEQ ID NO: 547 - RNA, 22 nt, synthetic construct
  source 1..22: mol_type = other RNA
acccaatgcccggcagctggag

SEQ ID NO: 548 - RNA, 22 nt, synthetic construct
  source 1..22: mol_type = other RNA
acccagggcagagagatcccgc

SEQ ID NO: 549 - RNA, 22 nt, synthetic construct
  source 1..22: mol_type = other RNA
accctaaatctggcacctgctt

SEQ ID NO: 550 - RNA, 22 nt, synthetic construct
  source 1..22: mol_type = other RNA
accctcaccctaaatctggcac

SEQ ID NO: 551 - RNA, 22 nt, synthetic construct
  source 1..22: mol_type = other RNA
acctctccagctgccgggcatt

SEQ ID NO: 552 - RNA, 22 nt, synthetic construct
  source 1..22: mol_type = other RNA
acctgcttctccatctccagag

SEQ ID NO: 553 - RNA, 22 nt, synthetic construct
  source 1..22: mol_type = other RNA
acgtcccccacccaatgcccgg

SEQ ID NO: 554 - RNA, 22 nt, synthetic construct
  source 1..22: mol_type = other RNA
acgtcttgtgctctggagatgg

SEQ ID NO: 555 - RNA, 22 nt, synthetic construct
  source 1..22: mol_type = other RNA
actcaccaggccattttggaag

SEQ ID NO: 556 - RNA, 22 nt, synthetic construct
  source 1..22: mol_type = other RNA
agaagcaggtgccagatttagg

SEQ ID NO: 557 - RNA, 22 nt, synthetic construct
  source 1..22: mol_type = other RNA
agacctctccagctgccgggca

SEQ ID NO: 558 - RNA, 22 nt, synthetic construct
  source 1..22: mol_type = other RNA
agacgtcccccacccaatgccc

SEQ ID NO: 559 - RNA, 22 nt, synthetic construct
  source 1..22: mol_type = other RNA
agagagatcccgcatcactcac

SEQ ID NO: 560 - RNA, 22 nt, synthetic construct
  source 1..22: mol_type = other RNA
agagatcccgcatcactcacca

SEQ ID NO: 561 - RNA, 22 nt, synthetic construct
  source 1..22: mol_type = other RNA
agagcacaagacgtcccccacc

SEQ ID NO: 562 - RNA, 22 nt, synthetic construct
  source 1..22: mol_type = other RNA
agaggtctccaacaagcttcca

SEQ ID NO: 563 - RNA, 22 nt, synthetic construct
  source 1..22: mol_type = other RNA
agatcccgcatcactcaccagg

SEQ ID NO: 564 - RNA, 22 nt, synthetic construct
  source 1..22: mol_type = other RNA
agatggagaagcaggtgccaga

SEQ ID NO: 565 - RNA, 22 nt, synthetic construct
  source 1..22: mol_type = other RNA
agcacaagacgtcccccaccca

SEQ ID NO: 566 - RNA, 22 nt, synthetic construct
  source 1..22: mol_type = other RNA
agcaggtgccagatttagggtg

SEQ ID NO: 567 - RNA, 22 nt, synthetic construct
  source 1..22: mol_type = other RNA
agctgccgggcattgggtgggg

SEQ ID NO: 568 - RNA, 22 nt, synthetic construct
  source 1..22: mol_type = other RNA
agctggagaggtctccaacaag

SEQ ID NO: 569 - RNA, 22 nt, synthetic construct
  source 1..22: mol_type = other RNA
agcttccaaaatggcctggtga

SEQ ID NO: 570 - RNA, 22 nt, synthetic construct
  source 1..22: mol_type = other RNA
agcttgttggagacctctccag

SEQ ID NO: 571 - RNA, 22 nt, synthetic construct
  source 1..22: mol_type = other RNA
aggccattttggaagcttgttg

SEQ ID NO: 572 - RNA, 22 nt, synthetic construct
  source 1..22: mol_type = other RNA
agggcagagagatcccgcatca

SEQ ID NO: 573 - RNA, 22 nt, synthetic construct
  source 1..22: mol_type = other RNA
aggtctccaacaagcttccaaa

SEQ ID NO: 574 - RNA, 22 nt, synthetic construct
  source 1..22: mol_type = other RNA
aggtgccagatttagggtgagg

SEQ ID NO: 575 - RNA, 22 nt, synthetic construct
  source 1..22: mol_type = other RNA
agtgatgcgggatctctctgcc

SEQ ID NO: 576 - RNA, 22 nt, synthetic construct
  source 1..22: mol_type = other RNA
atcactcaccaggccattttgg

SEQ ID NO: 577 - RNA, 22 nt, synthetic construct
  source 1..22: mol_type = other RNA
atcccgcatcactcaccaggcc

SEQ ID NO: 578 - RNA, 22 nt, synthetic construct
  source 1..22: mol_type = other RNA
atctccaccacccagggcagag

SEQ ID NO: 579 - RNA, 22 nt, synthetic construct
  source 1..22: mol_type = other RNA
atctccagagcacaagacgtcc

SEQ ID NO: 580 - RNA, 22 nt, synthetic construct
  source 1..22: mol_type = other RNA
atctctctgccctgggtggtgg

SEQ ID NO: 581 - RNA, 22 nt, synthetic construct
  source 1..22: mol_type = other RNA
atctggcacctgcttctccatc

SEQ ID NO: 582 - RNA, 22 nt, synthetic construct
  source 1..22: mol_type = other RNA
atgcccggcagctggagaggtc

SEQ ID NO: 583 - RNA, 22 nt, synthetic construct
  source 1..22: mol_type = other RNA
atgcgggatctctctgccctgg

SEQ ID NO: 584 - RNA, 22 nt, synthetic construct
  source 1..22: mol_type = other RNA
atggagaagcaggtgccagatt

SEQ ID NO: 585 - RNA, 22 nt, synthetic construct
  source 1..22: mol_type = other RNA
atggcctggtgagtgatgcggg

SEQ ID NO: 586 - RNA, 22 nt, synthetic construct
  source 1..22: mol_type = other RNA
attgggtgggggacgtcttgtg

SEQ ID NO: 587 - RNA, 22 nt, synthetic construct
  source 1..22: mol_type = other RNA
attttggaagcttgttggagac

SEQ ID NO: 588 - RNA, 22 nt, synthetic construct
  source 1..22: mol_type = other RNA
caaaatggcctggtgagtgatg

SEQ ID NO: 589 - RNA, 22 nt, synthetic construct
  source 1..22: mol_type = other RNA
caacaagcttccaaaatggcct

SEQ ID NO: 590 - RNA, 22 nt, synthetic construct
  source 1..22: mol_type = other RNA
caagacgtcccccacccaatgc

SEQ ID NO: 591 - RNA, 22 nt, synthetic construct
  source 1..22: mol_type = other RNA
caagcttccaaaatggcctggt

SEQ ID NO: 592 - RNA, 22 nt, synthetic construct
  source 1..22: mol_type = other RNA
caatgcccggcagctggagagg

SEQ ID NO: 593 - RNA, 22 nt, synthetic construct
  source 1..22: mol_type = other RNA
cacaagacgtcccccacccaat

SEQ ID NO: 594 - RNA, 22 nt, synthetic construct
  source 1..22: mol_type = other RNA
caccacccagggcagagagatc

SEQ ID NO: 595 - RNA, 22 nt, synthetic construct
  source 1..22: mol_type = other RNA
caccaggccattttggaagctt

SEQ ID NO: 596 - RNA, 22 nt, synthetic construct
  source 1..22: mol_type = other RNA
cacccaatgcccggcagctgga

SEQ ID NO: 597 - RNA, 22 nt, synthetic construct
  source 1..22: mol_type = other RNA
cacccagggcagagagatcccg

SEQ ID NO: 598 - RNA, 22 nt, synthetic construct
  source 1..22: mol_type = other RNA
caccctaaatctggcacctgct

SEQ ID NO: 599 - RNA, 22 nt, synthetic construct
  source 1..22: mol_type = other RNA
cacctgcttctccatctccaga

SEQ ID NO: 600 - RNA, 22 nt, synthetic construct
  source 1..22: mol_type = other RNA
cactcaccaggccattttggaa

SEQ ID NO: 601 - RNA, 22 nt, synthetic construct
  source 1..22: mol_type = other RNA
cagagagatcccgcatcactca

SEQ ID NO: 602 - RNA, 22 nt, synthetic construct
  source 1..22: mol_type = other RNA
cagagcacaagacgtcccccac

SEQ ID NO: 603 - RNA, 22 nt, synthetic construct
  source 1..22: mol_type = other RNA
cagctgccgggcattgggtggg

SEQ ID NO: 604 - RNA, 22 nt, synthetic construct
  source 1..22: mol_type = other RNA
cagctggagaggtctccaacaa

SEQ ID NO: 605 - RNA, 22 nt, synthetic construct
  source 1..22: mol_type = other RNA
caggccattttggaagcttgtt

SEQ ID NO: 606 - RNA, 22 nt, synthetic construct
  source 1..22: mol_type = other RNA
cagggcagagagatcccgcatc

SEQ ID NO: 607 - RNA, 22 nt, synthetic construct
  source 1..22: mol_type = other RNA
caggtgccagatttagggtgag

SEQ ID NO: 608 - RNA, 22 nt, synthetic construct
  source 1..22: mol_type = other RNA
catcactcaccaggccattttg

SEQ ID NO: 609 - RNA, 22 nt, synthetic construct
  source 1..22: mol_type = other RNA
catctccaccacccagggcaga

SEQ ID NO: 610 - RNA, 22 nt, synthetic construct
  source 1..22: mol_type = other RNA
catctccagagcacaagacgtc

SEQ ID NO: 611 - RNA, 22 nt, synthetic construct
  source 1..22: mol_type = other RNA
cattgggtgggggacgtcttgt

SEQ ID NO: 612 - RNA, 22 nt, synthetic construct
  source 1..22: mol_type = other RNA
cattttggaagcttgttggaga

SEQ ID NO: 613 - RNA, 22 nt, synthetic construct
  source 1..22: mol_type = other RNA
ccaaaatggcctggtgagtgat

SEQ ID NO: 614 - RNA, 22 nt, synthetic construct
  source 1..22: mol_type = other RNA
ccaacaagcttccaaaatggcc

SEQ ID NO: 615 - RNA, 22 nt, synthetic construct
  source 1..22: mol_type = other RNA
ccaatgcccggcagctggagag

SEQ ID NO: 616 - RNA, 22 nt, synthetic construct
  source 1..22: mol_type = other RNA
ccaccacccagggcagagagat

SEQ ID NO: 617 - RNA, 22 nt, synthetic construct
  source 1..22: mol_type = other RNA
ccacccaatgcccggcagctgg

SEQ ID NO: 618 - RNA, 22 nt, synthetic construct
  source 1..22: mol_type = other RNA
ccacccagggcagagagatccc

SEQ ID NO: 619 - RNA, 22 nt, synthetic construct
  source 1..22: mol_type = other RNA
ccagagcacaagacgtccccca

SEQ ID NO: 620 - RNA, 22 nt, synthetic construct
  source 1..22: mol_type = other RNA
ccagctgccgggcattgggtgg

SEQ ID NO: 621 - RNA, 22 nt, synthetic construct
  source 1..22: mol_type = other RNA
ccaggccattttggaagcttgt

SEQ ID NO: 622 - RNA, 22 nt, synthetic construct
  source 1..22: mol_type = other RNA
ccagggcagagagatcccgcat

SEQ ID NO: 623 - RNA, 22 nt, synthetic construct
  source 1..22: mol_type = other RNA
ccatctccaccacccagggcag

SEQ ID NO: 624 - RNA, 22 nt, synthetic construct
  source 1..22: mol_type = other RNA
ccatctccagagcacaagacgt

SEQ ID NO: 625 - RNA, 22 nt, synthetic construct
  source 1..22: mol_type = other RNA
ccattttggaagcttgttggag

SEQ ID NO: 626 - RNA, 22 nt, synthetic construct
  source 1..22: mol_type = other RNA
cccaatgcccggcagctggaga

SEQ ID NO: 627 - RNA, 22 nt, synthetic construct
  source 1..22: mol_type = other RNA
cccacccaatgcccggcagctg

SEQ ID NO: 628 - RNA, 22 nt, synthetic construct
  source 1..22: mol_type = other RNA
cccagggcagagagatcccgca

SEQ ID NO: 629 - RNA, 22 nt, synthetic construct
  source 1..22: mol_type = other RNA
ccccacccaatgcccggcagct

SEQ ID NO: 630 - RNA, 22 nt, synthetic construct
  source 1..22: mol_type = other RNA
cccccacccaatgcccggcagc

SEQ ID NO: 631 - RNA, 22 nt, synthetic construct
  source 1..22: mol_type = other RNA
cccgcatcactcaccaggccat

SEQ ID NO: 632 - RNA, 22 nt, synthetic construct
  source 1..22: mol_type = other RNA
cccggcagctggagaggtctcc

SEQ ID NO: 633 - RNA, 22 nt, synthetic construct
  source 1..22: mol_type = other RNA
ccctaaatctggcacctgcttc

SEQ ID NO: 634 - RNA, 22 nt, synthetic construct
  source 1..22: mol_type = other RNA
ccctcaccctaaatctggcacc

SEQ ID NO: 635 - RNA, 22 nt, synthetic construct
  source 1..22: mol_type = other RNA
ccgcatcactcaccaggccatt

SEQ ID NO: 636 - RNA, 22 nt, synthetic construct
  source 1..22: mol_type = other RNA
ccggcagctggagaggtctcca

SEQ ID NO: 637 - RNA, 22 nt, synthetic construct
  source 1..22: mol_type = other RNA
ccgggcattgggtgggggacgt

SEQ ID NO: 638 - RNA, 22 nt, synthetic construct
  source 1..22: mol_type = other RNA
cctaaatctggcacctgcttct

SEQ ID NO: 639 - RNA, 22 nt, synthetic construct
  source 1..22: mol_type = other RNA
cctcaccctaaatctggcacct

SEQ ID NO: 640 - RNA, 22 nt, synthetic construct
  source 1..22: mol_type = other RNA
cctctccagctgccgggcattg

SEQ ID NO: 641 - RNA, 22 nt, synthetic construct
  source 1..22: mol_type = other RNA
cctgcttctccatctccagagc

SEQ ID NO: 642 - RNA, 22 nt, synthetic construct
  source 1..22: mol_type = other RNA
cctggtgagtgatgcgggatct

SEQ ID NO: 643 - RNA, 22 nt, synthetic construct
  source 1..22: mol_type = other RNA
cgcatcactcaccaggccattt

SEQ ID NO: 644 - RNA, 22 nt, synthetic construct
  source 1..22: mol_type = other RNA
cggcagctggagaggtctccaa

SEQ ID NO: 645 - RNA, 22 nt, synthetic construct
  source 1..22: mol_type = other RNA
cgggatctctctgccctgggtg

SEQ ID NO: 646 - RNA, 22 nt, synthetic construct
  source 1..22: mol_type = other RNA
cgggcattgggtgggggacgtc

SEQ ID NO: 647 - RNA, 22 nt, synthetic construct
  source 1..22: mol_type = other RNA
cgtcccccacccaatgcccggc

SEQ ID NO: 648 - RNA, 22 nt, synthetic construct
  source 1..22: mol_type = other RNA
cgtcttgtgctctggagatgga

SEQ ID NO: 649 - RNA, 22 nt, synthetic construct
  source 1..22: mol_type = other RNA
ctaaatctggcacctgcttctc

SEQ ID NO: 650 - RNA, 22 nt, synthetic construct
  source 1..22: mol_type = other RNA
ctcaccaggccattttggaagc

SEQ ID NO: 651 - RNA, 22 nt, synthetic construct
  source 1..22: mol_type = other RNA
ctcaccctaaatctggcacctg

SEQ ID NO: 652 - RNA, 22 nt, synthetic construct
  source 1..22: mol_type = other RNA
ctccaacaagcttccaaaatgg

SEQ ID NO: 653 - RNA, 22 nt, synthetic construct
  source 1..22: mol_type = other RNA
ctccaccacccagggcagagag

SEQ ID NO: 654 - RNA, 22 nt, synthetic construct
  source 1..22: mol_type = other RNA
ctccagagcacaagacgtcccc

SEQ ID NO: 655 - RNA, 22 nt, synthetic construct
  source 1..22: mol_type = other RNA
ctccagctgccgggcattgggt

SEQ ID NO: 656 - RNA, 22 nt, synthetic construct
  source 1..22: mol_type = other RNA
ctccatctccagagcacaagac

SEQ ID NO: 657 - RNA, 22 nt, synthetic construct
  source 1..22: mol_type = other RNA
ctctccagctgccgggcattgg

SEQ ID NO: 658 - RNA, 22 nt, synthetic construct
  source 1..22: mol_type = other RNA
ctctggagatggagaagcaggt

SEQ ID NO: 659 - RNA, 22 nt, synthetic construct
  source 1..22: mol_type = other RNA
ctgccgggcattgggtggggga

SEQ ID NO: 660 - RNA, 22 nt, synthetic construct
  source 1..22: mol_type = other RNA
ctgcttctccatctccagagca

SEQ ID NO: 661 - RNA, 22 nt, synthetic construct
  source 1..22: mol_type = other RNA
ctggagaggtctccaacaagct

SEQ ID NO: 662 - RNA, 22 nt, synthetic construct
  source 1..22: mol_type = other RNA
ctggagatggagaagcaggtgc

SEQ ID NO: 663 - RNA, 22 nt, synthetic construct
  source 1..22: mol_type = other RNA
ctggcacctgcttctccatctc

SEQ ID NO: 664 - RNA, 22 nt, synthetic construct
  source 1..22: mol_type = other RNA
ctggtgagtgatgcgggatctc

SEQ ID NO: 665 - RNA, 22 nt, synthetic construct
  source 1..22: mol_type = other RNA
cttccaaaatggcctggtgagt

SEQ ID NO: 666 - RNA, 22 nt, synthetic construct
  source 1..22: mol_type = other RNA
cttccatctccaccacccaggg

SEQ ID NO: 667 - RNA, 22 nt, synthetic construct
  source 1..22: mol_type = other RNA
cttctccatctccagagcacaa

SEQ ID NO: 668 - RNA, 22 nt, synthetic construct
  source 1..22: mol_type = other RNA
cttgtgctctggagatggagaa

SEQ ID NO: 669 - RNA, 22 nt, synthetic construct
  source 1..22: mol_type = other RNA
cttgttggagacctctccagct

SEQ ID NO: 670 - RNA, 22 nt, synthetic construct
  source 1..22: mol_type = other RNA
gaagcaggtgccagatttaggg

SEQ ID NO: 671 - RNA, 22 nt, synthetic construct
  source 1..22: mol_type = other RNA
gaagcttgttggagacctctcc

SEQ ID NO: 672 - RNA, 22 nt, synthetic construct
  source 1..22: mol_type = other RNA
gacctctccagctgccgggcat

SEQ ID NO: 673 - RNA, 22 nt, synthetic construct
  source 1..22: mol_type = other RNA
gacgtcccccacccaatgcccg

SEQ ID NO: 674 - RNA, 22 nt, synthetic construct
  source 1..22: mol_type = other RNA
gacgtcttgtgctctggagatg

SEQ ID NO: 675 - RNA, 22 nt, synthetic construct
  source 1..22: mol_type = other RNA
gagaagcaggtgccagatttag

SEQ ID NO: 676 - RNA, 22 nt, synthetic construct
  source 1..22: mol_type = other RNA
gagacctctccagctgccgggc

SEQ ID NO: 677 - RNA, 22 nt, synthetic construct
  source 1..22: mol_type = other RNA
gagagatcccgcatcactcacc

SEQ ID NO: 678 - RNA, 22 nt, synthetic construct
  source 1..22: mol_type = other RNA
gagaggtctccaacaagcttcc

SEQ ID NO: 679 - RNA, 22 nt, synthetic construct
  source 1..22: mol_type = other RNA
gagatcccgcatcactcaccag

SEQ ID NO: 680 - RNA, 22 nt, synthetic construct
  source 1..22: mol_type = other RNA
gagatggagaagcaggtgccag

SEQ ID NO: 681 - RNA, 22 nt, synthetic construct
  source 1..22: mol_type = other RNA
gagcacaagacgtcccccaccc

SEQ ID NO: 682 - RNA, 22 nt, synthetic construct
  source 1..22: mol_type = other RNA
gaggtctccaacaagcttccaa

SEQ ID NO: 683 - RNA, 22 nt, synthetic construct
  source 1..22: mol_type = other RNA
gagtgatgcgggatctctctgc

SEQ ID NO: 684 - RNA, 22 nt, synthetic construct
  source 1..22: mol_type = other RNA
gatcccgcatcactcaccaggc

SEQ ID NO: 685 - RNA, 22 nt, synthetic construct
  source 1..22: mol_type = other RNA
gatctctctgccctgggtggtg

SEQ ID NO: 686 - RNA, 22 nt, synthetic construct
  source 1..22: mol_type = other RNA
gatgcgggatctctctgccctg

SEQ ID NO: 687 - RNA, 22 nt, synthetic construct
  source 1..22: mol_type = other RNA
gatggagaagcaggtgccagat

SEQ ID NO: 688 - RNA, 22 nt, synthetic construct
  source 1..22: mol_type = other RNA
gcacaagacgtcccccacccaa

SEQ ID NO: 689 - RNA, 22 nt, synthetic construct
  source 1..22: mol_type = other RNA
gcacctgcttctccatctccag

SEQ ID NO: 690 - RNA, 22 nt, synthetic construct
  source 1..22: mol_type = other RNA
gcagagagatcccgcatcactc

SEQ ID NO: 691 - RNA, 22 nt, synthetic construct
  source 1..22: mol_type = other RNA
gcagctggagaggtctccaaca

SEQ ID NO: 692 - RNA, 22 nt, synthetic construct
  source 1..22: mol_type = other RNA
gcaggtgccagatttagggtga

SEQ ID NO: 693 - RNA, 22 nt, synthetic construct
  source 1..22: mol_type = other RNA
gcatcactcaccaggccatttt

SEQ ID NO: 694 - RNA, 22 nt, synthetic construct
  source 1..22: mol_type = other RNA
gcattgggtgggggacgtcttg

SEQ ID NO: 695 - RNA, 22 nt, synthetic construct
  source 1..22: mol_type = other RNA
gccattttggaagcttgttgga

SEQ ID NO: 696 - RNA, 22 nt, synthetic construct
  source 1..22: mol_type = other RNA
gcccggcagctggagaggtctc

SEQ ID NO: 697 - RNA, 22 nt, synthetic construct
  source 1..22: mol_type = other RNA
gccgggcattgggtgggggacg

SEQ ID NO: 698 - RNA, 22 nt, synthetic construct
  source 1..22: mol_type = other RNA
gcctggtgagtgatgcgggatc

SEQ ID NO: 699 - RNA, 22 nt, synthetic construct
  source 1..22: mol_type = other RNA
gcgggatctctctgccctgggt

SEQ ID NO: 700 - RNA, 22 nt, synthetic construct
  source 1..22: mol_type = other RNA
gctctggagatggagaagcagg

SEQ ID NO: 701 - RNA, 22 nt, synthetic construct
  source 1..22: mol_type = other RNA
gctgccgggcattgggtggggg

SEQ ID NO: 702 - RNA, 22 nt, synthetic construct
  source 1..22: mol_type = other RNA
gctggagaggtctccaacaagc

SEQ ID NO: 703 - RNA, 22 nt, synthetic construct
  source 1..22: mol_type = other RNA
gcttccaaaatggcctggtgag

SEQ ID NO: 704 - RNA, 22 nt, synthetic construct
  source 1..22: mol_type = other RNA
gcttctccatctccagagcaca

SEQ ID NO: 705 - RNA, 22 nt, synthetic construct
  source 1..22: mol_type = other RNA
gcttgttggagacctctccagc

SEQ ID NO: 706 - RNA, 22 nt, synthetic construct
  source 1..22: mol_type = other RNA
ggaagcttgttggagacctctc

SEQ ID NO: 707 - RNA, 22 nt, synthetic construct
  source 1..22: mol_type = other RNA
ggacgtcttgtgctctggagat

SEQ ID NO: 708 - RNA, 22 nt, synthetic construct
  source 1..22: mol_type = other RNA
ggagaagcaggtgccagattta

SEQ ID NO: 709 - RNA, 22 nt, synthetic construct
  source 1..22: mol_type = other RNA
ggagacctctccagctgccggg

SEQ ID NO: 710 - RNA, 22 nt, synthetic construct
  source 1..22: mol_type = other RNA
ggagaggtctccaacaagcttc

SEQ ID NO: 711 - RNA, 22 nt, synthetic construct
  source 1..22: mol_type = other RNA
ggagatggagaagcaggtgcca

SEQ ID NO: 712 - RNA, 22 nt, synthetic construct
  source 1..22: mol_type = other RNA
ggatctctctgccctgggtggt

SEQ ID NO: 713 - RNA, 22 nt, synthetic construct
  source 1..22: mol_type = other RNA
ggcacctgcttctccatctcca

SEQ ID NO: 714 - RNA, 22 nt, synthetic construct
  source 1..22: mol_type = other RNA
ggcagagagatcccgcatcact

SEQ ID NO: 715 - RNA, 22 nt, synthetic construct
  source 1..22: mol_type = other RNA
ggcagctggagaggtctccaac

SEQ ID NO: 716 - RNA, 22 nt, synthetic construct
  source 1..22: mol_type = other RNA
ggcattgggtgggggacgtctt

SEQ ID NO: 717 - RNA, 22 nt, synthetic construct
  source 1..22: mol_type = other RNA
ggccattttggaagcttgttgg

SEQ ID NO: 718 - RNA, 22 nt, synthetic construct
  source 1..22: mol_type = other RNA
ggcctggtgagtgatgcgggat

SEQ ID NO: 719 - RNA, 22 nt, synthetic construct
  source 1..22: mol_type = other RNA
gggacgtcttgtgctctggaga

SEQ ID NO: 720 - RNA, 22 nt, synthetic construct
  source 1..22: mol_type = other RNA
gggatctctctgccctgggtgg

SEQ ID NO: 721 - RNA, 22 nt, synthetic construct
  source 1..22: mol_type = other RNA
gggcagagagatcccgcatcac

SEQ ID NO: 722 - RNA, 22 nt, synthetic construct
  source 1..22: mol_type = other RNA
gggcattgggtgggggacgtct

SEQ ID NO: 723 - RNA, 22 nt, synthetic construct
  source 1..22: mol_type = other RNA
ggggacgtcttgtgctctggag

SEQ ID NO: 724 - RNA, 22 nt, synthetic construct
  source 1..22: mol_type = other RNA
gggggacgtcttgtgctctgga

SEQ ID NO: 725 - RNA, 22 nt, synthetic construct
  source 1..22: mol_type = other RNA
ggggtaaccctcaccctaaatc

SEQ ID NO: 726 - RNA, 22 nt, synthetic construct
  source 1..22: mol_type = other RNA
gggtaaccctcaccctaaatct

SEQ ID NO: 727 - RNA, 22 nt, synthetic construct
  source 1..22: mol_type = other RNA
gggtgggggacgtcttgtgctc

SEQ ID NO: 728 - RNA, 22 nt, synthetic construct
  source 1..22: mol_type = other RNA
ggtaaccctcaccctaaatctg

SEQ ID NO: 729 - RNA, 22 nt, synthetic construct
  source 1..22: mol_type = other RNA
ggtctccaacaagcttccaaaa

SEQ ID NO: 730 - RNA, 22 nt, synthetic construct
  source 1..22: mol_type = other RNA
ggtgagtgatgcgggatctctc

SEQ ID NO: 731 - RNA, 22 nt, synthetic construct
  source 1..22: mol_type = other RNA
ggtgggggacgtcttgtgctct

SEQ ID NO: 732 - RNA, 22 nt, synthetic construct
  source 1..22: mol_type = other RNA
gtaaccctcaccctaaatctgg

SEQ ID NO: 733 - RNA, 22 nt, synthetic construct
  source 1..22: mol_type = other RNA
gtcccccacccaatgcccggca

SEQ ID NO: 734 - RNA, 22 nt, synthetic construct
  source 1..22: mol_type = other RNA
gtctccaacaagcttccaaaat

SEQ ID NO: 735 - RNA, 22 nt, synthetic construct
  source 1..22: mol_type = other RNA
gtcttgtgctctggagatggag

SEQ ID NO: 736 - RNA, 22 nt, synthetic construct
  source 1..22: mol_type = other RNA
gtgagtgatgcgggatctctct

SEQ ID NO: 737 - RNA, 22 nt, synthetic construct
  source 1..22: mol_type = other RNA
gtgatgcgggatctctctgccc

SEQ ID NO: 738 - RNA, 22 nt, synthetic construct
  source 1..22: mol_type = other RNA
gtgctctggagatggagaagca

SEQ ID NO: 739 - RNA, 22 nt, synthetic construct
  source 1..22: mol_type = other RNA
gtgggggacgtcttgtgctctg

SEQ ID NO: 740 - RNA, 22 nt, synthetic construct
  source 1..22: mol_type = other RNA
gttggagacctctccagctgcc

SEQ ID NO: 741 - RNA, 22 nt, synthetic construct
  source 1..22: mol_type = other RNA
taaatctggcacctgcttctcc

SEQ ID NO: 742 - RNA, 22 nt, synthetic construct
  source 1..22: mol_type = other RNA
taaccctcaccctaaatctggc

SEQ ID NO: 743 - RNA, 22 nt, synthetic construct
  source 1..22: mol_type = other RNA
tcaccaggccattttggaagct

SEQ ID NO: 744 - RNA, 22 nt, synthetic construct
  source 1..22: mol_type = other RNA
tcaccctaaatctggcacctgc

SEQ ID NO: 745 - RNA, 22 nt, synthetic construct
  source 1..22: mol_type = other RNA
tcactcaccaggccattttgga

SEQ ID NO: 746 - RNA, 22 nt, synthetic construct
  source 1..22: mol_type = other RNA
tccaaaatggcctggtgagtga

SEQ ID NO: 747 - RNA, 22 nt, synthetic construct
  source 1..22: mol_type = other RNA
tccaacaagcttccaaaatggc

SEQ ID NO: 748 - RNA, 22 nt, synthetic construct
  source 1..22: mol_type = other RNA
tccaccacccagggcagagaga

SEQ ID NO: 749 - RNA, 22 nt, synthetic construct
  source 1..22: mol_type = other RNA
tccagagcacaagacgtccccc

SEQ ID NO: 750 - RNA, 22 nt, synthetic construct
  source 1..22: mol_type = other RNA
tccagctgccgggcattgggtg

SEQ ID NO: 751 - RNA, 22 nt, synthetic construct
  source 1..22: mol_type = other RNA
tccatctccaccacccagggca

SEQ ID NO: 752 - RNA, 22 nt, synthetic construct
  source 1..22: mol_type = other RNA
tccatctccagagcacaagacg

SEQ ID NO: 753 - RNA, 22 nt, synthetic construct
  source 1..22: mol_type = other RNA
tcccccacccaatgcccggcag

SEQ ID NO: 754 - RNA, 22 nt, synthetic construct
  source 1..22: mol_type = other RNA
tcccgcatcactcaccaggcca

SEQ ID NO: 755 - RNA, 22 nt, synthetic construct
  source 1..22: mol_type = other RNA
tctccaacaagcttccaaaatg

SEQ ID NO: 756 - RNA, 22 nt, synthetic construct
  source 1..22: mol_type = other RNA
tctccaccacccagggcagaga

SEQ ID NO: 757 - RNA, 22 nt, synthetic construct
  source 1..22: mol_type = other RNA
tctccagagcacaagacgtccc

SEQ ID NO: 758 - RNA, 22 nt, synthetic construct
  source 1..22: mol_type = other RNA
tctccagctgccgggcattggg

SEQ ID NO: 759 - RNA, 22 nt, synthetic construct
  source 1..22: mol_type = other RNA
tctccatctccagagcacaaga

SEQ ID NO: 760 - RNA, 22 nt, synthetic construct
  source 1..22: mol_type = other RNA
tctctctgccctgggtggtgga

SEQ ID NO: 761 - RNA, 22 nt, synthetic construct
  source 1..22: mol_type = other RNA
tctggagatggagaagcaggtg

SEQ ID NO: 762 - RNA, 22 nt, synthetic construct
  source 1..22: mol_type = other RNA
tctggcacctgcttctccatct

SEQ ID NO: 763 - RNA, 22 nt, synthetic construct
  source 1..22: mol_type = other RNA
tcttgtgctctggagatggaga

SEQ ID NO: 764 - RNA, 22 nt, synthetic construct
  source 1..22: mol_type = other RNA
tgagtgatgcgggatctctctg

SEQ ID NO: 765 - RNA, 22 nt, synthetic construct
  source 1..22: mol_type = other RNA
tgatgcgggatctctctgccct

SEQ ID NO: 766 - RNA, 22 nt, synthetic construct
  source 1..22: mol_type = other RNA
tgcccggcagctggagaggtct

SEQ ID NO: 767 - RNA, 22 nt, synthetic construct
  source 1..22: mol_type = other RNA
tgccgggcattgggtgggggac

SEQ ID NO: 768 - RNA, 22 nt, synthetic construct
  source 1..22: mol_type = other RNA
tgcgggatctctctgccctggg

SEQ ID NO: 769 - RNA, 22 nt, synthetic construct
  source 1..22: mol_type = other RNA
tgctctggagatggagaagcag

SEQ ID NO: 770 - RNA, 22 nt, synthetic construct
  source 1..22: mol_type = other RNA
tgcttctccatctccagagcac

SEQ ID NO: 771 - RNA, 22 nt, synthetic construct
  source 1..22: mol_type = other RNA
tggaagcttgttggagacctct

SEQ ID NO: 772 - RNA, 22 nt, synthetic construct
  source 1..22: mol_type = other RNA
tggagaagcaggtgccagattt

SEQ ID NO: 773 - RNA, 22 nt, synthetic construct
  source 1..22: mol_type = other RNA
tggagacctctccagctgccgg

SEQ ID NO: 774 - RNA, 22 nt, synthetic construct
  source 1..22: mol_type = other RNA
tggagaggtctccaacaagctt

SEQ ID NO: 775 - RNA, 22 nt, synthetic construct
  source 1..22: mol_type = other RNA
tggagatggagaagcaggtgcc

SEQ ID NO: 776 - RNA, 22 nt, synthetic construct
  source 1..22: mol_type = other RNA
tggcacctgcttctccatctcc

SEQ ID NO: 777 - RNA, 22 nt, synthetic construct
  source 1..22: mol_type = other RNA
tggcctggtgagtgatgcggga

SEQ ID NO: 778 - RNA, 22 nt, synthetic construct
  source 1..22: mol_type = other RNA
tgggggacgtcttgtgctctgg

SEQ ID NO: 779 - RNA, 22 nt, synthetic construct
  source 1..22: mol_type = other RNA
tgggtgggggacgtcttgtgct

SEQ ID NO: 780 - RNA, 22 nt, synthetic construct
  source 1..22: mol_type = other RNA
tggtgagtgatgcgggatctct

SEQ ID NO: 781 - RNA, 22 nt, synthetic construct
  source 1..22: mol_type = other RNA
tgtgctctggagatggagaagc

SEQ ID NO: 782 - RNA, 22 nt, synthetic construct
  source 1..22: mol_type = other RNA
tgttggagacctctccagctgc

SEQ ID NO: 783 - RNA, 22 nt, synthetic construct
  source 1..22: mol_type = other RNA
ttccaaaatggcctggtgagtg

SEQ ID NO: 784 - RNA, 22 nt, synthetic construct
  source 1..22: mol_type = other RNA
ttccatctccaccacccagggc

SEQ ID NO: 785 - RNA, 22 nt, synthetic construct
  source 1..22: mol_type = other RNA
ttctccatctccagagcacaag

SEQ ID NO: 786 - RNA, 22 nt, synthetic construct
  source 1..22: mol_type = other RNA
ttggaagcttgttggagacctc

SEQ ID NO: 787 - RNA, 22 nt, synthetic construct
  source 1..22: mol_type = other RNA
ttggagacctctccagctgccg

SEQ ID NO: 788 - RNA, 22 nt, synthetic construct
  source 1..22: mol_type = other RNA
ttgggtgggggacgtcttgtgc

SEQ ID NO: 789 - RNA, 22 nt, synthetic construct
  source 1..22: mol_type = other RNA
ttgtgctctggagatggagaag

SEQ ID NO: 790 - RNA, 22 nt, synthetic construct
  source 1..22: mol_type = other RNA
ttgttggagacctctccagctg

SEQ ID NO: 791 - RNA, 22 nt, synthetic construct
  source 1..22: mol_type = other RNA
tttggaagcttgttggagacct

SEQ ID NO: 792 - RNA, 22 nt, synthetic construct
  source 1..22: mol_type = other RNA
ttttggaagcttgttggagacc

SEQ ID NO: 793 - RNA, 20 nt, synthetic construct
  source 1..20: mol_type = other RNA
aaaacctcatcggccgccac

SEQ ID NO: 794 - RNA, 20 nt, synthetic construct
  source 1..20: mol_type = other RNA
aaaagagaggcggccgggga

SEQ ID NO: 795 - RNA, 20 nt, synthetic construct
  source 1..20: mol_type = other RNA
aaaaggccggccagcagccc

SEQ ID NO: 796 - RNA, 20 nt, synthetic construct
  source 1..20: mol_type = other RNA
aaacctcatcggccgccacg

SEQ ID NO: 797 - RNA, 20 nt, synthetic construct
  source 1..20: mol_type = other RNA
aaacgggtgacacagctgag

SEQ ID NO: 798 - RNA, 20 nt, synthetic construct
  source 1..20: mol_type = other RNA
aaagagaggcggccggggag

SEQ ID NO: 799 - RNA, 20 nt, synthetic construct
  source 1..20: mol_type = other RNA
aaagcgtggcacgccctcca

SEQ ID NO: 800 - RNA, 20 nt, synthetic construct
  source 1..20: mol_type = other RNA
aaagctggtcagggcaagag

SEQ ID NO: 801 - RNA, 20 nt, synthetic construct
  source 1..20: mol_type = other RNA
aaaggccaggggcgtgtcag

SEQ ID NO: 802 - RNA, 20 nt, synthetic construct
  source 1..20: mol_type = other RNA
aaaggccggccagcagcccc

SEQ ID NO: 803 - RNA, 20 nt, synthetic construct
  source 1..20: mol_type = other RNA
aaaggcttagtccaacaccc

SEQ ID NO: 804 - RNA, 20 nt, synthetic construct
  source 1..20: mol_type = other RNA
aaagtaccctacaggaggac

SEQ ID NO: 805 - RNA, 20 nt, synthetic construct
  source 1..20: mol_type = other RNA
aaagtagcgcatcacgtatg

SEQ ID NO: 806 - RNA, 20 nt, synthetic construct
  source 1..20: mol_type = other RNA
aaagtagggctgtggctgtg

SEQ ID NO: 807 - RNA, 20 nt, synthetic construct
  source 1..20: mol_type = other RNA
aaagtcgtactggggaagcc

SEQ ID NO: 808 - RNA, 20 nt, synthetic construct
  source 1..20: mol_type = other RNA
aaatagggcgtcggccttgc

SEQ ID NO: 809 - RNA, 20 nt, synthetic construct
  source 1..20: mol_type = other RNA
aaatcaaggacaaggagctc

SEQ ID NO: 810 - RNA, 20 nt, synthetic construct
  source 1..20: mol_type = other RNA
aaatgccagtgctgcggagg

SEQ ID NO: 811 - RNA, 20 nt, synthetic construct
  source 1..20: mol_type = other RNA
aaattccagcctcctcggcc

SEQ ID NO: 812 - RNA, 20 nt, synthetic construct
  source 1..20: mol_type = other RNA
aacacaaggatgtctcttcc

SEQ ID NO: 813 - RNA, 20 nt, synthetic construct
  source 1..20: mol_type = other RNA
aacacccaccgcgggccgca

SEQ ID NO: 814 - RNA, 20 nt, synthetic construct
  source 1..20: mol_type = other RNA
aacagcacctcagccaggcc

SEQ ID NO: 815 - RNA, 20 nt, synthetic construct
  source 1..20: mol_type = other RNA
aaccgtccgggggatgccta

SEQ ID NO: 816 - RNA, 20 nt, synthetic construct
  source 1..20: mol_type = other RNA
aacctcatcggccgccacga

SEQ ID NO: 817 - RNA, 20 nt, synthetic construct
  source 1..20: mol_type = other RNA
aacctcggagcagcttcttc

SEQ ID NO: 818 - RNA, 20 nt, synthetic construct
  source 1..20: mol_type = other RNA
aacgcggtcaggtctcttca

SEQ ID NO: 819 - RNA, 20 nt, synthetic construct
  source 1..20: mol_type = other RNA
aacggcagctggcccaagga

SEQ ID NO: 820 - RNA, 20 nt, synthetic construct
  source 1..20: mol_type = other RNA
aacgggtgacacagctgagt

SEQ ID NO: 821 - RNA, 20 nt, synthetic construct
  source 1..20: mol_type = other RNA
aactgctccaccggctctgc

SEQ ID NO: 822 - RNA, 20 nt, synthetic construct
  source 1..20: mol_type = other RNA
aactggccaccccggactgg

SEQ ID NO: 823 - RNA, 20 nt, synthetic construct
  source 1..20: mol_type = other RNA
aactggctggagggcgtgcc

SEQ ID NO: 824 - RNA, 20 nt, synthetic construct
  source 1..20: mol_type = other RNA
aactggtcctcctgtagggt

SEQ ID NO: 825 - RNA, 20 nt, synthetic construct
  source 1..20: mol_type = other RNA
aagaagaggccctatgacaa

SEQ ID NO: 826 - RNA, 20 nt, synthetic construct
  source 1..20: mol_type = other RNA
aagaagctgctccgaggttg

SEQ ID NO: 827 - RNA, 20 nt, synthetic construct
  source 1..20: mol_type = other RNA
aagaagtggccggtcccgga

SEQ ID NO: 828 - RNA, 20 nt, synthetic construct
  source 1..20: mol_type = other RNA
aagacaaagtcgtactgggg

SEQ ID NO: 829 - RNA, 20 nt, synthetic construct
  source 1..20: mol_type = other RNA
aagacagagccctgacgctc

SEQ ID NO: 830 - RNA, 20 nt, synthetic construct
  source 1..20: mol_type = other RNA
aagacttctccctggacctc

SEQ ID NO: 831 - RNA, 20 nt, synthetic construct
  source 1..20: mol_type = other RNA
aagagacctgaccgcgttct

SEQ ID NO: 832 - RNA, 20 nt, synthetic construct
  source 1..20: mol_type = other RNA
aagagaggcggccggggagc

SEQ ID NO: 833 - RNA, 20 nt, synthetic construct
  source 1..20: mol_type = other RNA
aagagcagatcctgcaggcc

SEQ ID NO: 834 - RNA, 20 nt, synthetic construct
  source 1..20: mol_type = other RNA
aagagcctggagcgggaact

SEQ ID NO: 835 - RNA, 20 nt, synthetic construct
  source 1..20: mol_type = other RNA
aagagctattgggctggggc

SEQ ID NO: 836 - RNA, 20 nt, synthetic construct
  source 1..20: mol_type = other RNA
aagaggccctatgacaactg

SEQ ID NO: 837 - RNA, 20 nt, synthetic construct
  source 1..20: mol_type = other RNA
aagatcagcccagccagaaa

SEQ ID NO: 838 - RNA, 20 nt, synthetic construct
  source 1..20: mol_type = other RNA
aagatggcttcctgcacagc

SEQ ID NO: 839 - RNA, 20 nt, synthetic construct
  source 1..20: mol_type = other RNA
aagatgtggctgaaaacctc

SEQ ID NO: 840 - RNA, 20 nt, synthetic construct
  source 1..20: mol_type = other RNA
aagcaatggcaggggacaga

SEQ ID NO: 841 - RNA, 20 nt, synthetic construct
  source 1..20: mol_type = other RNA
aagcaccttctgcttcctgt

SEQ ID NO: 842 - RNA, 20 nt, synthetic construct
  source 1..20: mol_type = other RNA
aagcagaaggtgcttgcgag

SEQ ID NO: 843 - RNA, 20 nt, synthetic construct
  source 1..20: mol_type = other RNA
aagcattgcaggaggaagct

SEQ ID NO: 844 - RNA, 20 nt, synthetic construct
  source 1..20: mol_type = other RNA
aagccatcttgcgcttccag

SEQ ID NO: 845 - RNA, 20 nt, synthetic construct
  source 1..20: mol_type = other RNA
aagcccaggcccggctcact

SEQ ID NO: 846 - RNA, 20 nt, synthetic construct
  source 1..20: mol_type = other RNA
aagcccctcaccccacctga

SEQ ID NO: 847 - RNA, 20 nt, synthetic construct
  source 1..20: mol_type = other RNA
aagccggacagctcaaatag

SEQ ID NO: 848 - RNA, 20 nt, synthetic construct
  source 1..20: mol_type = other RNA
aagccggccacaagcccagg

SEQ ID NO: 849 - RNA, 20 nt, synthetic construct
  source 1..20: mol_type = other RNA
aagccgtctaggatgagcag

SEQ ID NO: 850 - RNA, 20 nt, synthetic construct
  source 1..20: mol_type = other RNA
aagcctttggccatcgccca

SEQ ID NO: 851 - RNA, 20 nt, synthetic construct
  source 1..20: mol_type = other RNA
aagcgcaagatggcttcctg

SEQ ID NO: 852 - RNA, 20 nt, synthetic construct
  source 1..20: mol_type = other RNA
aagcggctgcagccggggac

SEQ ID NO: 853 - RNA, 20 nt, synthetic construct
  source 1..20: mol_type = other RNA
aagcgtggcacgccctccag

SEQ ID NO: 854 - RNA, 20 nt, synthetic construct
  source 1..20: mol_type = other RNA
aagctccagcagggcctctg

SEQ ID NO: 855 - RNA, 20 nt, synthetic construct
  source 1..20: mol_type = other RNA
aagctgccctccacgctcac

SEQ ID NO: 856 - RNA, 20 nt, synthetic construct
  source 1..20: mol_type = other RNA
aagctgctccgaggttgcac

SEQ ID NO: 857 - RNA, 20 nt, synthetic construct
  source 1..20: mol_type = other RNA
aagctggcctgggagctggg

SEQ ID NO: 858 - RNA, 20 nt, synthetic construct
  source 1..20: mol_type = other RNA
aagctggggaaggccagctc

SEQ ID NO: 859 - RNA, 20 nt, synthetic construct
  source 1..20: mol_type = other RNA
aagctggtcagggcaagagc

SEQ ID NO: 860 - RNA, 20 nt, synthetic construct
  source 1..20: mol_type = other RNA
aaggaagaagaggccctatg

SEQ ID NO: 861 - RNA, 20 nt, synthetic construct
  source 1..20: mol_type = other RNA
aaggacaaggagctcccgca

SEQ ID NO: 862 - RNA, 20 nt, synthetic construct
  source 1..20: mol_type = other RNA
aaggagcaccggcggccgcg

SEQ ID NO: 863 - RNA, 20 nt, synthetic construct
  source 1..20: mol_type = other RNA
aaggagctcccgcagtacct

SEQ ID NO: 864 - RNA, 20 nt, synthetic construct
  source 1..20: mol_type = other RNA
aaggaggcctggctgaggtg

SEQ ID NO: 865 - RNA, 20 nt, synthetic construct
  source 1..20: mol_type = other RNA
aaggatgtctcttccccaag

SEQ ID NO: 866 - RNA, 20 nt, synthetic construct
  source 1..20: mol_type = other RNA
aaggccagctcggactctgc

SEQ ID NO: 867 - RNA, 20 nt, synthetic construct
  source 1..20: mol_type = other RNA
aaggccaggggcgtgtcagg

SEQ ID NO: 868 - RNA, 20 nt, synthetic construct
  source 1..20: mol_type = other RNA
aaggccgacgccctatttga

SEQ ID NO: 869 - RNA, 20 nt, synthetic construct
  source 1..20: mol_type = other RNA
aaggccggccagcagccccc

SEQ ID NO: 870 - RNA, 20 nt, synthetic construct
  source 1..20: mol_type = other RNA
aaggccttgcccagtacatg

SEQ ID NO: 871 - RNA, 20 nt, synthetic construct
  source 1..20: mol_type = other RNA
aaggccttggaggcggcggg

SEQ ID NO: 872 - RNA, 20 nt, synthetic construct
  source 1..20: mol_type = other RNA
aaggcttagtccaacaccca

SEQ ID NO: 873 - RNA, 20 nt, synthetic construct
  source 1..20: mol_type = other RNA
aaggtgcttgcgaggtacct

SEQ ID NO: 874 - RNA, 20 nt, synthetic construct
  source 1..20: mol_type = other RNA
aagtaccctacaggaggacc

SEQ ID NO: 875 - RNA, 20 nt, synthetic construct
  source 1..20: mol_type = other RNA
aagtagcgcatcacgtatgc

SEQ ID NO: 876 - RNA, 20 nt, synthetic construct
  source 1..20: mol_type = other RNA
aagtagggctgtggctgtga

SEQ ID NO: 877 - RNA, 20 nt, synthetic construct
  source 1..20: mol_type = other RNA
aagtcgtactggggaagccg

SEQ ID NO: 878 - RNA, 20 nt, synthetic construct
  source 1..20: mol_type = other RNA
aagtcttggcccgccgcctc

SEQ ID NO: 879 - RNA, 20 nt, synthetic construct
  source 1..20: mol_type = other RNA
aagtggccggtcccggagga

SEQ ID NO: 880 - RNA, 20 nt, synthetic construct
  source 1..20: mol_type = other RNA
aatagctcttgccctgacca

SEQ ID NO: 881 - RNA, 20 nt, synthetic construct
  source 1..20: mol_type = other RNA
aatagggcgtcggccttgct

SEQ ID NO: 882 - RNA, 20 nt, synthetic construct
  source 1..20: mol_type = other RNA
aatcaaggacaaggagctcc

SEQ ID NO: 883 - RNA, 20 nt, synthetic construct
  source 1..20: mol_type = other RNA
aatcactcgtgtctcacgcg

SEQ ID NO: 884 - RNA, 20 nt, synthetic construct
  source 1..20: mol_type = other RNA
aatccagaggggcaaatgcc

SEQ ID NO: 885 - RNA, 20 nt, synthetic construct
  source 1..20: mol_type = other RNA
aatgccagtgctgcggaggt

SEQ ID NO: 886 - RNA, 20 nt, synthetic construct
  source 1..20: mol_type = other RNA
aatgcccaacacaaggatgt

SEQ ID NO: 887 - RNA, 20 nt, synthetic construct
  source 1..20: mol_type = other RNA
aatgctaggtactgcgggag

SEQ ID NO: 888 - RNA, 20 nt, synthetic construct
  source 1..20: mol_type = other RNA
aatgcttcctgggggccctg

SEQ ID NO: 889 - RNA, 20 nt, synthetic construct
  source 1..20: mol_type = other RNA
aatggcaggggacagagaag

SEQ ID NO: 890 - RNA, 20 nt, synthetic construct
  source 1..20: mol_type = other RNA
aattccagcctcctcggcct

SEQ ID NO: 891 - RNA, 20 nt, synthetic construct
  source 1..20: mol_type = other RNA
aatttggcagcacgtggtac

SEQ ID NO: 892 - RNA, 20 nt, synthetic construct
  source 1..20: mol_type = other RNA
acaaagtagggctgtggctg

SEQ ID NO: 893 - RNA, 20 nt, synthetic construct
  source 1..20: mol_type = other RNA
acaaagtcgtactggggaag

SEQ ID NO: 894 - RNA, 20 nt, synthetic construct
  source 1..20: mol_type = other RNA
acaactggctggagggcgtg

SEQ ID NO: 895 - RNA, 20 nt, synthetic construct
  source 1..20: mol_type = other RNA
acaagcccaggcccggctca

SEQ ID NO: 896 - RNA, 20 nt, synthetic construct
  source 1..20: mol_type = other RNA
acaaggagctcccgcagtac

SEQ ID NO: 897 - RNA, 20 nt, synthetic construct
  source 1..20: mol_type = other RNA
acaaggatgtctcttcccca

SEQ ID NO: 898 - RNA, 20 nt, synthetic construct
  source 1..20: mol_type = other RNA
acacaaggatgtctcttccc

SEQ ID NO: 899 - RNA, 20 nt, synthetic construct
  source 1..20: mol_type = other RNA
acacagctgagtcccacgag

SEQ ID NO: 900 - RNA, 20 nt, synthetic construct
  source 1..20: mol_type = other RNA
acacccaccgcgggccgcag

SEQ ID NO: 901 - RNA, 20 nt, synthetic construct
  source 1..20: mol_type = other RNA
acacgagtgattgctgtgct

SEQ ID NO: 902 - RNA, 20 nt, synthetic construct
  source 1..20: mol_type = other RNA
acacgcccctggcctttgca

SEQ ID NO: 903 - RNA, 20 nt, synthetic construct
  source 1..20: mol_type = other RNA
acacgtatggtgccgagccc

SEQ ID NO: 904 - RNA, 20 nt, synthetic construct
  source 1..20: mol_type = other RNA
acactgcccggcacaaagta

SEQ ID NO: 905 - RNA, 20 nt, synthetic construct
  source 1..20: mol_type = other RNA
acactgcgggcgcggcagct

SEQ ID NO: 906 - RNA, 20 nt, synthetic construct
  source 1..20: mol_type = other RNA
acagagaagacaaagtcgta

SEQ ID NO: 907 - RNA, 20 nt, synthetic construct
  source 1..20: mol_type = other RNA
acagagcaccaagacagagc

SEQ ID NO: 908 - RNA, 20 nt, synthetic construct
  source 1..20: mol_type = other RNA
acagagccctgacgctcctc

SEQ ID NO: 909 - RNA, 20 nt, synthetic construct
  source 1..20: mol_type = other RNA
acagcaatcactcgtgtctc

SEQ ID NO: 910 - RNA, 20 nt, synthetic construct
  source 1..20: mol_type = other RNA
acagcacctcagccaggcct

SEQ ID NO: 911 - RNA, 20 nt, synthetic construct
  source 1..20: mol_type = other RNA
acagcacgtgcggaccggca

SEQ ID NO: 912 - RNA, 20 nt, synthetic construct
  source 1..20: mol_type = other RNA
acagccacagccctactttg

SEQ ID NO: 913 - RNA, 20 nt, synthetic construct
  source 1..20: mol_type = other RNA
acagccactcgtggcggccg

SEQ ID NO: 914 - RNA, 20 nt, synthetic construct
  source 1..20: mol_type = other RNA
acagccctactttgtgccgg

SEQ ID NO: 915 - RNA, 20 nt, synthetic construct
  source 1..20: mol_type = other RNA
acagctcaaatagggcgtcg

SEQ ID NO: 916 - RNA, 20 nt, synthetic construct
  source 1..20: mol_type = other RNA
acagctgagtcccacgaggc

SEQ ID NO: 917 - RNA, 20 nt, synthetic construct
  source 1..20: mol_type = other RNA
acaggaagcagaaggtgctt

SEQ ID NO: 918 - RNA, 20 nt, synthetic construct
  source 1..20: mol_type = other RNA
acaggagctccccggccgcc

SEQ ID NO: 919 - RNA, 20 nt, synthetic construct
  source 1..20: mol_type = other RNA
acaggaggaccagttcccat

SEQ ID NO: 920 - RNA, 20 nt, synthetic construct
  source 1..20: mol_type = other RNA
acagggcccccaggaagcat

SEQ ID NO: 921 - RNA, 20 nt, synthetic construct
  source 1..20: mol_type = other RNA
acatacccccaccctgacac

SEQ ID NO: 922 - RNA, 20 nt, synthetic construct
  source 1..20: mol_type = other RNA
acatagagtcccgtgagcgt

SEQ ID NO: 923 - RNA, 20 nt, synthetic construct
  source 1..20: mol_type = other RNA
acatcaaagtaccctacagg

SEQ ID NO: 924 - RNA, 20 nt, synthetic construct
  source 1..20: mol_type = other RNA
acatcttgaagagacctgac

SEQ ID NO: 925 - RNA, 20 nt, synthetic construct
  source 1..20: mol_type = other RNA
acatgtactgggcaaggcct

SEQ ID NO: 926 - RNA, 20 nt, synthetic construct
  source 1..20: mol_type = other RNA
acatgtgcatcaggaggcgt

SEQ ID NO: 927 - RNA, 20 nt, synthetic construct
  source 1..20: mol_type = other RNA
accaagacagagccctgacg

SEQ ID NO: 928 - RNA, 20 nt, synthetic construct
  source 1..20: mol_type = other RNA
accacgtgctgccaaattcc

SEQ ID NO: 929 - RNA, 20 nt, synthetic construct
  source 1..20: mol_type = other RNA
accagatccacctccactag

SEQ ID NO: 930 - RNA, 20 nt, synthetic construct
  source 1..20: mol_type = other RNA
accagctttgcccagcacag

SEQ ID NO: 931 - RNA, 20 nt, synthetic construct
  source 1..20: mol_type = other RNA
accagttcccatccgcagac

SEQ ID NO: 932 - RNA, 20 nt, synthetic construct
  source 1..20: mol_type = other RNA
accatacgtgtcctgcagtg

SEQ ID NO: 933 - RNA, 20 nt, synthetic construct
  source 1..20: mol_type = other RNA
acccaccgcgggccgcagag

SEQ ID NO: 934 - RNA, 20 nt, synthetic construct
  source 1..20: mol_type = other RNA
accccaaggaagaagaggcc

SEQ ID NO: 935 - RNA, 20 nt, synthetic construct
  source 1..20: mol_type = other RNA
accccacctgaaacgggtga

SEQ ID NO: 936 - RNA, 20 nt, synthetic construct
  source 1..20: mol_type = other RNA
acccccaccctgacacgccc

SEQ ID NO: 937 - RNA, 20 nt, synthetic construct
  source 1..20: mol_type = other RNA
accccggactgggcagaacg

SEQ ID NO: 938 - RNA, 20 nt, synthetic construct
  source 1..20: mol_type = other RNA
acccgcctcacgcctcctga

SEQ ID NO: 939 - RNA, 20 nt, synthetic construct
  source 1..20: mol_type = other RNA
acccgtttcaggtggggtga

SEQ ID NO: 940 - RNA, 20 nt, synthetic construct
  source 1..20: mol_type = other RNA
accctacaggaggaccagtt

SEQ ID NO: 941 - RNA, 20 nt, synthetic construct
  source 1..20: mol_type = other RNA
accctcctcctcacagcccg

SEQ ID NO: 942 - RNA, 20 nt, synthetic construct
  source 1..20: mol_type = other RNA
accctgacacgcccctggcc

SEQ ID NO: 943 - RNA, 20 nt, synthetic construct
  source 1..20: mol_type = other RNA
accgaggcagccgccgatgg

SEQ ID NO: 944 - RNA, 20 nt, synthetic construct
  source 1..20: mol_type = other RNA
accgcgggccgcagagtccg

SEQ ID NO: 945 - RNA, 20 nt, synthetic construct
  source 1..20: mol_type = other RNA
accgcgttctgctcatccta

SEQ ID NO: 946 - RNA, 20 nt, synthetic construct
  source 1..20: mol_type = other RNA
accgctcactgcaggacacg

SEQ ID NO: 947 - RNA, 20 nt, synthetic construct
  source 1..20: mol_type = other RNA
accggcaccggcggagccct

SEQ ID NO: 948 - RNA, 20 nt, synthetic construct
  source 1..20: mol_type = other RNA
accggccacttcttctcagt

SEQ ID NO: 949 - RNA, 20 nt, synthetic construct
  source 1..20: mol_type = other RNA
accggcggagccctgctccc

SEQ ID NO: 950 - RNA, 20 nt, synthetic construct
  source 1..20: mol_type = other RNA
accggcggccgcgtgagaca

SEQ ID NO: 951 - RNA, 20 nt, synthetic construct
  source 1..20: mol_type = other RNA
accggctctgcaaaggccag

SEQ ID NO: 952 - RNA, 20 nt, synthetic construct
  source 1..20: mol_type = other RNA
accgtccgggggatgcctat

SEQ ID NO: 953 - RNA, 20 nt, synthetic construct
  source 1..20: mol_type = other RNA
acctagcattgaccccaagg

SEQ ID NO: 954 - RNA, 20 nt, synthetic construct
  source 1..20: mol_type = other RNA
acctcagccaggcctccttg

SEQ ID NO: 955 - RNA, 20 nt, synthetic construct
  source 1..20: mol_type = other RNA
acctcatcggccgccacgag

SEQ ID NO: 956 - RNA, 20 nt, synthetic construct
  source 1..20: mol_type = other RNA
acctccactaggatgccatc

SEQ ID NO: 957 - RNA, 20 nt, synthetic construct
  source 1..20: mol_type = other RNA
acctccgcagcactggcatt

SEQ ID NO: 958 - RNA, 20 nt, synthetic construct
  source 1..20: mol_type = other RNA
acctcgcaagcaccttctgc

SEQ ID NO: 959 - RNA, 20 nt, synthetic construct
  source 1..20: mol_type = other RNA
acctcggagcagcttcttct

SEQ ID NO: 960 - RNA, 20 nt, synthetic construct
  source 1..20: mol_type = other RNA
acctgaaacgggtgacacag

SEQ ID NO: 961 - RNA, 20 nt, synthetic construct
  source 1..20: mol_type = other RNA
acctgaagcggctgcagccg

SEQ ID NO: 962 - RNA, 20 nt, synthetic construct
  source 1..20: mol_type = other RNA
acctgaccgcgttctgctca

SEQ ID NO: 963 - RNA, 20 nt, synthetic construct
  source 1..20: mol_type = other RNA
acctgggcgatggccaaagg

SEQ ID NO: 964 - RNA, 20 nt, synthetic construct
  source 1..20: mol_type = other RNA
accttctgcttcctgtccac

SEQ ID NO: 965 - RNA, 20 nt, synthetic construct
  source 1..20: mol_type = other RNA
acgactttgtcttctctgtc

SEQ ID NO: 966 - RNA, 20 nt, synthetic construct
  source 1..20: mol_type = other RNA
acgaggccgaggaggctgga

SEQ ID NO: 967 - RNA, 20 nt, synthetic construct
  source 1..20: mol_type = other RNA
acgaggctccccaatccaga

SEQ ID NO: 968 - RNA, 20 nt, synthetic construct
  source 1..20: mol_type = other RNA
acgagtgattgctgtgctgg

SEQ ID NO: 969 - RNA, 20 nt, synthetic construct
  source 1..20: mol_type = other RNA
acgagtggctgtgggcccag

SEQ ID NO: 970 - RNA, 20 nt, synthetic construct
  source 1..20: mol_type = other RNA
acgccaagctgccctccacg

SEQ ID NO: 971 - RNA, 20 nt, synthetic construct
  source 1..20: mol_type = other RNA
acgcccctggcctttgcaga

SEQ ID NO: 972 - RNA, 20 nt, synthetic construct
  source 1..20: mol_type = other RNA
acgccctatttgagctgtcc

SEQ ID NO: 973 - RNA, 20 nt, synthetic construct
  source 1..20: mol_type = other RNA
acgccctccagccagttgtc

SEQ ID NO: 974 - RNA, 20 nt, synthetic construct
  source 1..20: mol_type = other RNA
acgcctcctgatgcacatgt

SEQ ID NO: 975 - RNA, 20 nt, synthetic construct
  source 1..20: mol_type = other RNA
acgcggccgccggtgctcct

SEQ ID NO: 976 - RNA, 20 nt, synthetic construct
  source 1..20: mol_type = other RNA
acgcggtcaggtctcttcaa

SEQ ID NO: 977 - RNA, 20 nt, synthetic construct
  source 1..20: mol_type = other RNA
acgctcacgggactctatgt

SEQ ID NO: 978 - RNA, 20 nt, synthetic construct
  source 1..20: mol_type = other RNA
acgctcctccgggaccggcc

SEQ ID NO: 979 - RNA, 20 nt, synthetic construct
  source 1..20: mol_type = other RNA
acgctttctggctgggctga

SEQ ID NO: 980 - RNA, 20 nt, synthetic construct
  source 1..20: mol_type = other RNA
acggcagctggcccaaggag

SEQ ID NO: 981 - RNA, 20 nt, synthetic construct
  source 1..20: mol_type = other RNA
acggcccagcaggccgacat

SEQ ID NO: 982 - RNA, 20 nt, synthetic construct
  source 1..20: mol_type = other RNA
acggcttcgaggagctggaa

SEQ ID NO: 983 - RNA, 20 nt, synthetic construct
  source 1..20: mol_type = other RNA
acgggactctatgtcggcct

SEQ ID NO: 984 - RNA, 20 nt, synthetic construct
  source 1..20: mol_type = other RNA
acgggtgacacagctgagtc

SEQ ID NO: 985 - RNA, 20 nt, synthetic construct
  source 1..20: mol_type = other RNA
acggttcaagcaatggcagg

SEQ ID NO: 986 - RNA, 20 nt, synthetic construct
  source 1..20: mol_type = other RNA
acgtatgcctgggcctgctc

SEQ ID NO: 987 - RNA, 20 nt, synthetic construct
  source 1..20: mol_type = other RNA
acgtatggtgccgagcccgc

SEQ ID NO: 988 - RNA, 20 nt, synthetic construct
  source 1..20: mol_type = other RNA
acgtctgcggatgggaactg

SEQ ID NO: 989 - RNA, 20 nt, synthetic construct
  source 1..20: mol_type = other RNA
acgtgaggacctgggcgatg

SEQ ID NO: 990 - RNA, 20 nt, synthetic construct
  source 1..20: mol_type = other RNA
acgtgatgcgctactttgag

SEQ ID NO: 991 - RNA, 20 nt, synthetic construct
  source 1..20: mol_type = other RNA
acgtgcggaccggcaccggc

SEQ ID NO: 992 - RNA, 20 nt, synthetic construct
  source 1..20: mol_type = other RNA
acgtgctgccaaattccagc

SEQ ID NO: 993 - RNA, 20 nt, synthetic construct
  source 1..20: mol_type = other RNA
acgtgctgtgcaggaagcca

SEQ ID NO: 994 - RNA, 20 nt, synthetic construct
  source 1..20: mol_type = other RNA
acgtggtacaggagctcccc

SEQ ID NO: 995 - RNA, 20 nt, synthetic construct
  source 1..20: mol_type = other RNA
acgtgtcctgcagtgagcgg

SEQ ID NO: 996 - RNA, 20 nt, synthetic construct
  source 1..20: mol_type = other RNA
actaagcctttggccatcgc

SEQ ID NO: 997 - RNA, 20 nt, synthetic construct
  source 1..20: mol_type = other RNA
actaggatgccatccgggcc

SEQ ID NO: 998 - RNA, 20 nt, synthetic construct
  source 1..20: mol_type = other RNA
actcagagccagccacaggg

SEQ ID NO: 999 - RNA, 20 nt, synthetic construct
  source 1..20: mol_type = other RNA
actcagctgtgtcacccgtt

SEQ ID NO: 1000 - RNA, 20 nt, synthetic construct
  source 1..20: mol_type = other RNA
actcgggccatcggcggctg

SEQ ID NO: 1001 - RNA, 20 nt, synthetic construct
  source 1..20: mol_type = other RNA
actcgtggcggccgatgagg

SEQ ID NO: 1002 - RNA, 20 nt, synthetic construct
  source 1..20: mol_type = other RNA
actcgtgtctcacgcggccg

SEQ ID NO: 1003 - RNA, 20 nt, synthetic construct
  source 1..20: mol_type = other RNA
actctatgtcggcctgctgg

SEQ ID NO: 1004 - RNA, 20 nt, synthetic construct
  source 1..20: mol_type = other RNA
actctgcggcccgcggtggg

SEQ ID NO: 1005 - RNA, 20 nt, synthetic construct
  source 1..20: mol_type = other RNA
actgagaagaagtggccggt

SEQ ID NO: 1006 - RNA, 20 nt, synthetic construct
  source 1..20: mol_type = other RNA
actgcaggacacgtatggtg

SEQ ID NO: 1007 - RNA, 20 nt, synthetic construct
  source 1..20: mol_type = other RNA
actgccccagcccaatagct

SEQ ID NO: 1008 - RNA, 20 nt, synthetic construct
  source 1..20: mol_type = other RNA
actgcccggcacaaagtagg

SEQ ID NO: 1009 - RNA, 20 nt, synthetic construct
  source 1..20: mol_type = other RNA
actgcgcccacgaggccgag

SEQ ID NO: 1010 - RNA, 20 nt, synthetic construct
  source 1..20: mol_type = other RNA
actgcgggagctccttgtcc

SEQ ID NO: 1011 - RNA, 20 nt, synthetic construct
  source 1..20: mol_type = other RNA
actgcgggcgcggcagctgc

SEQ ID NO: 1012 - RNA, 20 nt, synthetic construct
  source 1..20: mol_type = other RNA
actgctccaccggctctgca

SEQ ID NO: 1013 - RNA, 20 nt, synthetic construct
  source 1..20: mol_type = other RNA
actggcatttgcccctctgg

SEQ ID NO: 1014 - RNA, 20 nt, synthetic construct
  source 1..20: mol_type = other RNA
actggccaccccggactggg

SEQ ID NO: 1015 - RNA, 20 nt, synthetic construct
  source 1..20: mol_type = other RNA
actggctggagggcgtgcca

SEQ ID NO: 1016 - RNA, 20 nt, synthetic construct
  source 1..20: mol_type = other RNA
actgggcaaggccttggagg

SEQ ID NO: 1017 - RNA, 20 nt, synthetic construct
  source 1..20: mol_type = other RNA
actgggcagaacggcagctg

SEQ ID NO: 1018 - RNA, 20 nt, synthetic construct
  source 1..20: mol_type = other RNA
actggggaagccggccacaa

SEQ ID NO: 1019 - RNA, 20 nt, synthetic construct
  source 1..20: mol_type = other RNA
actggtcctcctgtagggta

SEQ ID NO: 1020 - RNA, 20 nt, synthetic construct
  source 1..20: mol_type = other RNA
acttctccctggacctccgc

SEQ ID NO: 1021 - RNA, 20 nt, synthetic construct
  source 1..20: mol_type = other RNA
acttcttctcagtcacagcc

SEQ ID NO: 1022 - RNA, 20 nt, synthetic construct
  source 1..20: mol_type = other RNA
actttgagagctcagggatg

SEQ ID NO: 1023 - RNA, 20 nt, synthetic construct
  source 1..20: mol_type = other RNA
actttgatgtctgcggccca

SEQ ID NO: 1024 - RNA, 20 nt, synthetic construct
  source 1..20: mol_type = other RNA
actttgtcttctctgtcccc

SEQ ID NO: 1025 - RNA, 20 nt, synthetic construct
  source 1..20: mol_type = other RNA
actttgtgccgggcagtgtg

SEQ ID NO: 1026 - RNA, 20 nt, synthetic construct
  source 1..20: mol_type = other RNA
agaaaagagaggcggccggg

SEQ ID NO: 1027 - RNA, 20 nt, synthetic construct
  source 1..20: mol_type = other RNA
agaaagcgtggcacgccctc

SEQ ID NO: 1028 - RNA, 20 nt, synthetic construct
  source 1..20: mol_type = other RNA
agaacgcggtcaggtctctt

SEQ ID NO: 1029 - RNA, 20 nt, synthetic construct
  source 1..20: mol_type = other RNA
agaacggcagctggcccaag

SEQ ID NO: 1030 - RNA, 20 nt, synthetic construct
  source 1..20: mol_type = other RNA
agaactgctccaccggctct

SEQ ID NO: 1031 - RNA, 20 nt, synthetic construct
  source 1..20: mol_type = other RNA
agaagaagctgctccgaggt

SEQ ID NO: 1032 - RNA, 20 nt, synthetic construct
  source 1..20: mol_type = other RNA
agaagaagtggccggtcccg

SEQ ID NO: 1033 - RNA, 20 nt, synthetic construct
  source 1..20: mol_type = other RNA
agaagacaaagtcgtactgg

SEQ ID NO: 1034 - RNA, 20 nt, synthetic construct
  source 1..20: mol_type = other RNA
agaagagcagatcctgcagg

SEQ ID NO: 1035 - RNA, 20 nt, synthetic construct
  source 1..20: mol_type = other RNA
agaagaggccctatgacaac

SEQ ID NO: 1036 - RNA, 20 nt, synthetic construct
  source 1..20: mol_type = other RNA
agaagccggacagctcaaat

SEQ ID NO: 1037 - RNA, 20 nt, synthetic construct
  source 1..20: mol_type = other RNA
agaagctgctccgaggttgc

SEQ ID NO: 1038 - RNA, 20 nt, synthetic construct
  source 1..20: mol_type = other RNA
agaaggtgcttgcgaggtac

SEQ ID NO: 1039 - RNA, 20 nt, synthetic construct
  source 1..20: mol_type = other RNA
agaagtcttggcccgccgcc

SEQ ID NO: 1040 - RNA, 20 nt, synthetic construct
  source 1..20: mol_type = other RNA
agaagtggccggtcccggag

SEQ ID NO: 1041 - RNA, 20 nt, synthetic construct
  source 1..20: mol_type = other RNA
agacaaagtcgtactgggga

SEQ ID NO: 1042 - RNA, 20 nt, synthetic construct
  source 1..20: mol_type = other RNA
agacacgagtgattgctgtg

SEQ ID NO: 1043 - RNA, 20 nt, synthetic construct
  source 1..20: mol_type = other RNA
agacagagccctgacgctcc

SEQ ID NO: 1044 - RNA, 20 nt, synthetic construct
  source 1..20: mol_type = other RNA
agacatcaaagtaccctaca

SEQ ID NO: 1045 - RNA, 20 nt, synthetic construct
  source 1..20: mol_type = other RNA
agacctgaccgcgttctgct

SEQ ID NO: 1046 - RNA, 20 nt, synthetic construct
  source 1..20: mol_type = other RNA
agacggcttcgaggagctgg

SEQ ID NO: 1047 - RNA, 20 nt, synthetic construct
  source 1..20: mol_type = other RNA
agacgtgaggacctgggcga

SEQ ID NO: 1048 - RNA, 20 nt, synthetic construct
  source 1..20: mol_type = other RNA
agacttctccctggacctcc

SEQ ID NO: 1049 - RNA, 20 nt, synthetic construct
  source 1..20: mol_type = other RNA
agagaagacaaagtcgtact

SEQ ID NO: 1050 - RNA, 20 nt, synthetic construct
  source 1..20: mol_type = other RNA
agagacctgaccgcgttctg

SEQ ID NO: 1051 - RNA, 20 nt, synthetic construct
  source 1..20: mol_type = other RNA
agagaggcggccggggagct

SEQ ID NO: 1052 - RNA, 20 nt, synthetic construct
  source 1..20: mol_type = other RNA
agagcaccaagacagagccc

SEQ ID NO: 1053 - RNA, 20 nt, synthetic construct
  source 1..20: mol_type = other RNA
agagcagatcctgcaggcca

SEQ ID NO: 1054 - RNA, 20 nt, synthetic construct
  source 1..20: mol_type = other RNA
agagccagccacagggcccc

SEQ ID NO: 1055 - RNA, 20 nt, synthetic construct
  source 1..20: mol_type = other RNA
agagccctgacgctcctccg

SEQ ID NO: 1056 - RNA, 20 nt, synthetic construct
  source 1..20: mol_type = other RNA
agagccggtggagcagttct

SEQ ID NO: 1057 - RNA, 20 nt, synthetic construct
  source 1..20: mol_type = other RNA
agagcctgagcaaggccgac

SEQ ID NO: 1058 - RNA, 20 nt, synthetic construct
  source 1..20: mol_type = other RNA
agagcctggagcgggaactg

SEQ ID NO: 1059 - RNA, 20 nt, synthetic construct
  source 1..20: mol_type = other RNA
agagctattgggctggggca

SEQ ID NO: 1060 - RNA, 20 nt, synthetic construct
  source 1..20: mol_type = other RNA
agagctcagggatgacagag

SEQ ID NO: 1061 - RNA, 20 nt, synthetic construct
  source 1..20: mol_type = other RNA
agagctggcacactgcccgg

SEQ ID NO: 1062 - RNA, 20 nt, synthetic construct
  source 1..20: mol_type = other RNA
agagctggccaagctggcct

SEQ ID NO: 1063 - RNA, 20 nt, synthetic construct
  source 1..20: mol_type = other RNA
agaggagcagcagcaagagc

SEQ ID NO: 1064 - RNA, 20 nt, synthetic construct
  source 1..20: mol_type = other RNA
agaggccctatgacaactgg

SEQ ID NO: 1065 - RNA, 20 nt, synthetic construct
  source 1..20: mol_type = other RNA
agaggccctgctggagcttg

SEQ ID NO: 1066 - RNA, 20 nt, synthetic construct
  source 1..20: mol_type = other RNA
agaggcggccggggagctcc

SEQ ID NO: 1067 - RNA, 20 nt, synthetic construct
  source 1..20: mol_type = other RNA
agaggggcaaatgccagtgc

SEQ ID NO: 1068 - RNA, 20 nt, synthetic construct
  source 1..20: mol_type = other RNA
agagtcccgtgagcgtggag

SEQ ID NO: 1069 - RNA, 20 nt, synthetic construct
  source 1..20: mol_type = other RNA
agagtccgagctggccttcc

SEQ ID NO: 1070 - RNA, 20 nt, synthetic construct
  source 1..20: mol_type = other RNA
agatcagcccagccagaaag

SEQ ID NO: 1071 - RNA, 20 nt, synthetic construct
  source 1..20: mol_type = other RNA
agatccacctccactaggat

SEQ ID NO: 1072 - RNA, 20 nt, synthetic construct
  source 1..20: mol_type = other RNA
agatcctgcaggccataggc

SEQ ID NO: 1073 - RNA, 20 nt, synthetic construct
  source 1..20: mol_type = other RNA
agatggcttcctgcacagca

SEQ ID NO: 1074 - RNA, 20 nt, synthetic construct
  source 1..20: mol_type = other RNA
agatgtggctgaaaacctca

SEQ ID NO: 1075 - RNA, 20 nt, synthetic construct
  source 1..20: mol_type = other RNA
agcaagagcctggagcggga

SEQ ID NO: 1076 - RNA, 20 nt, synthetic construct
  source 1..20: mol_type = other RNA
agcaaggccgacgccctatt

SEQ ID NO: 1077 - RNA, 20 nt, synthetic construct
  source 1..20: mol_type = other RNA
agcaatcactcgtgtctcac

SEQ ID NO: 1078 - RNA, 20 nt, synthetic construct
  source 1..20: mol_type = other RNA
agcaatggcaggggacagag

SEQ ID NO: 1079 - RNA, 20 nt, synthetic construct
  source 1..20: mol_type = other RNA
agcacagcaatcactcgtgt

SEQ ID NO: 1080 - RNA, 20 nt, synthetic construct
  source 1..20: mol_type = other RNA
agcaccaagacagagccctg

SEQ ID NO: 1081 - RNA, 20 nt, synthetic construct
  source 1..20: mol_type = other RNA
agcaccggcggccgcgtgag

SEQ ID NO: 1082 - RNA, 20 nt, synthetic construct
  source 1..20: mol_type = other RNA
agcacctcagccaggcctcc

SEQ ID NO: 1083 - RNA, 20 nt, synthetic construct
  source 1..20: mol_type = other RNA
agcaccttctgcttcctgtc

SEQ ID NO: 1084 - RNA, 20 nt, synthetic construct
  source 1..20: mol_type = other RNA
agcacgtgcggaccggcacc

SEQ ID NO: 1085 - RNA, 20 nt, synthetic construct
  source 1..20: mol_type = other RNA
agcacgtggtacaggagctc

SEQ ID NO: 1086 - RNA, 20 nt, synthetic construct
  source 1..20: mol_type = other RNA
agcactggcatttgcccctc

SEQ ID NO: 1087 - RNA, 20 nt, synthetic construct
  source 1..20: mol_type = other RNA
agcagaacgcggtcaggtct

SEQ ID NO: 1088 - RNA, 20 nt, synthetic construct
  source 1..20: mol_type = other RNA
agcagaaggtgcttgcgagg

SEQ ID NO: 1089 - RNA, 20 nt, synthetic construct
  source 1..20: mol_type = other RNA
agcagatcctgcaggccata

SEQ ID NO: 1090 - RNA, 20 nt, synthetic construct
  source 1..20: mol_type = other RNA
agcagcaagagcctggagcg

SEQ ID NO: 1091 - RNA, 20 nt, synthetic construct
  source 1..20: mol_type = other RNA
agcagcagcaagagcctgga

SEQ ID NO: 1092 - RNA, 20 nt, synthetic construct
  source 1..20: mol_type = other RNA
agcagcccccggagggagca

SEQ ID NO: 1093 - RNA, 20 nt, synthetic construct
  source 1..20: mol_type = other RNA
agcagctccagcagctgccg

SEQ ID NO: 1094 - RNA, 20 nt, synthetic construct
  source 1..20: mol_type = other RNA
agcagctgccgcgcccgcag

SEQ ID NO: 1095 - RNA, 20 nt, synthetic construct
  source 1..20: mol_type = other RNA
agcagcttcttctggaaaag

SEQ ID NO: 1096 - RNA, 20 nt, synthetic construct
  source 1..20: mol_type = other RNA
agcaggcccaggcatacgtg

SEQ ID NO: 1097 - RNA, 20 nt, synthetic construct
  source 1..20: mol_type = other RNA
agcaggccgacatagagtcc

SEQ ID NO: 1098 - RNA, 20 nt, synthetic construct
  source 1..20: mol_type = other RNA
agcagggcctctgagagctg

SEQ ID NO: 1099 - RNA, 20 nt, synthetic construct
  source 1..20: mol_type = other RNA
agcagggctccgccggtgcc

SEQ ID NO: 1100 - RNA, 20 nt, synthetic construct
  source 1..20: mol_type = other RNA
agcagttctaccgctcactg

SEQ ID NO: 1101 - RNA, 20 nt, synthetic construct
  source 1..20: mol_type = other RNA
agcattgaccccaaggaaga

SEQ ID NO: 1102 - RNA, 20 nt, synthetic construct
  source 1..20: mol_type = other RNA
agcattgcaggaggaagctg

SEQ ID NO: 1103 - RNA, 20 nt, synthetic construct
  source 1..20: mol_type = other RNA
agccaacagcacctcagcca

SEQ ID NO: 1104 - RNA, 20 nt, synthetic construct
  source 1..20: mol_type = other RNA
agccacagccctactttgtg

SEQ ID NO: 1105 - RNA, 20 nt, synthetic construct
  source 1..20: mol_type = other RNA
agccacagggcccccaggaa

SEQ ID NO: 1106 - RNA, 20 nt, synthetic construct
  source 1..20: mol_type = other RNA
agccacatcttgaagagacc

SEQ ID NO: 1107 - RNA, 20 nt, synthetic construct
  source 1..20: mol_type = other RNA
agccactcgtggcggccgat

SEQ ID NO: 1108 - RNA, 20 nt, synthetic construct
  source 1..20: mol_type = other RNA
agccagaaagcgtggcacgc

SEQ ID NO: 1109 - RNA, 20 nt, synthetic construct
  source 1..20: mol_type = other RNA
agccagccacagggccccca

SEQ ID NO: 1110 - RNA, 20 nt, synthetic construct
  source 1..20: mol_type = other RNA
agccaggcctccttgggcca

SEQ ID NO: 1111 - RNA, 20 nt, synthetic construct
  source 1..20: mol_type = other RNA
agccagttgtcatagggcct

SEQ ID NO: 1112 - RNA, 20 nt, synthetic construct
  source 1..20: mol_type = other RNA
agccatcttgcgcttccagc

SEQ ID NO: 1113 - RNA, 20 nt, synthetic construct
  source 1..20: mol_type = other RNA
agcccaatagctcttgccct

SEQ ID NO: 1114 - RNA, 20 nt, synthetic construct
  source 1..20: mol_type = other RNA
agcccagccagaaagcgtgg

SEQ ID NO: 1115 - RNA, 20 nt, synthetic construct
  source 1..20: mol_type = other RNA
agcccaggcccggctcactg

SEQ ID NO: 1116 - RNA, 20 nt, synthetic construct
  source 1..20: mol_type = other RNA
agcccccggagggagcaggg

SEQ ID NO: 1117 - RNA, 20 nt, synthetic construct
  source 1..20: mol_type = other RNA
agcccctcaccccacctgaa

SEQ ID NO: 1118 - RNA, 20 nt, synthetic construct
  source 1..20: mol_type = other RNA
agcccgcaggcccggatggc

SEQ ID NO: 1119 - RNA, 20 nt, synthetic construct
  source 1..20: mol_type = other RNA
agccctactcgggccatcgg

SEQ ID NO: 1120 - RNA, 20 nt, synthetic construct
  source 1..20: mol_type = other RNA
agccctactttgtgccgggc

SEQ ID NO: 1121 - RNA, 20 nt, synthetic construct
  source 1..20: mol_type = other RNA
agccctgacgctcctccggg

SEQ ID NO: 1122 - RNA, 20 nt, synthetic construct
  source 1..20: mol_type = other RNA
agccctgctccctccggggg

SEQ ID NO: 1123 - RNA, 20 nt, synthetic construct
  source 1..20: mol_type = other RNA
agccgccgatggcccgagta

SEQ ID NO: 1124 - RNA, 20 nt, synthetic construct
  source 1..20: mol_type = other RNA
agccgcttcaggtacctcgc

SEQ ID NO: 1125 - RNA, 20 nt, synthetic construct
  source 1..20: mol_type = other RNA
agccggacagctcaaatagg

SEQ ID NO: 1126 - RNA, 20 nt, synthetic construct
  source 1..20: mol_type = other RNA
agccggccacaagcccaggc

SEQ ID NO: 1127 - RNA, 20 nt, synthetic construct
  source 1..20: mol_type = other RNA
agccgggcctgggcttgtgg

SEQ ID NO: 1128 - RNA, 20 nt, synthetic construct
  source 1..20: mol_type = other RNA
agccggggacactgcgggcg

SEQ ID NO: 1129 - RNA, 20 nt, synthetic construct
  source 1..20: mol_type = other RNA
agccggtggagcagttctac

SEQ ID NO: 1130 - RNA, 20 nt, synthetic construct
  source 1..20: mol_type = other RNA
agccgtctaggatgagcaga

SEQ ID NO: 1131 - RNA, 20 nt, synthetic construct
  source 1..20: mol_type = other RNA
agcctcccgcccgctgcctg

SEQ ID NO: 1132 - RNA, 20 nt, synthetic construct
  source 1..20: mol_type = other RNA
agcctcctcggcctcgtggg

SEQ ID NO: 1133 - RNA, 20 nt, synthetic construct
  source 1..20: mol_type = other RNA
agcctcgtgggactcagctg

SEQ ID NO: 1134 - RNA, 20 nt, synthetic construct
  source 1..20: mol_type = other RNA
agcctgagcaaggccgacgc

SEQ ID NO: 1135 - RNA, 20 nt, synthetic construct
  source 1..20: mol_type = other RNA
agcctggagcgggaactggc

SEQ ID NO: 1136 - RNA, 20 nt, synthetic construct
  source 1..20: mol_type = other RNA
agcctggcctgcaccagatc

SEQ ID NO: 1137 - RNA, 20 nt, synthetic construct
  source 1..20: mol_type = other RNA
agcctttggccatcgcccag

SEQ ID NO: 1138 - RNA, 20 nt, synthetic construct
  source 1..20: mol_type = other RNA
agcgcaagatggcttcctgc

SEQ ID NO: 1139 - RNA, 20 nt, synthetic construct
  source 1..20: mol_type = other RNA
agcgcatcacgtatgcctgg

SEQ ID NO: 1140 - RNA, 20 nt, synthetic construct
  source 1..20: mol_type = other RNA
agcggctgcagccggggaca

SEQ ID NO: 1141 - RNA, 20 nt, synthetic construct
  source 1..20: mol_type = other RNA
agcgggaactggccaccccg

SEQ ID NO: 1142 - RNA, 20 nt, synthetic construct
  source 1..20: mol_type = other RNA
agcgggcgggaggctggaag

SEQ ID NO: 1143 - RNA, 20 nt, synthetic construct
  source 1..20: mol_type = other RNA
agcggtagaactgctccacc

SEQ ID NO: 1144 - RNA, 20 nt, synthetic construct
  source 1..20: mol_type = other RNA
agcgtcagggctctgtcttg

SEQ ID NO: 1145 - RNA, 20 nt, synthetic construct
  source 1..20: mol_type = other RNA
agcgtggagggcagcttggc

SEQ ID NO: 1146 - RNA, 20 nt, synthetic construct
  source 1..20: mol_type = other RNA
agcgtggcacgccctccagc

SEQ ID NO: 1147 - RNA, 20 nt, synthetic construct
  source 1..20: mol_type = other RNA
agctattgggctggggcagt

SEQ ID NO: 1148 - RNA, 20 nt, synthetic construct
  source 1..20: mol_type = other RNA
agctcaaatagggcgtcggc

SEQ ID NO: 1149 - RNA, 20 nt, synthetic construct
  source 1..20: mol_type = other RNA
agctcagggatgacagagca

SEQ ID NO: 1150 - RNA, 20 nt, synthetic construct
  source 1..20: mol_type = other RNA
agctccagcagctgccgcgc

SEQ ID NO: 1151 - RNA, 20 nt, synthetic construct
  source 1..20: mol_type = other RNA
agctccagcagggcctctga

SEQ ID NO: 1152 - RNA, 20 nt, synthetic construct
  source 1..20: mol_type = other RNA
agctcccaggccagcttggc

SEQ ID NO: 1153 - RNA, 20 nt, synthetic construct
  source 1..20: mol_type = other RNA
agctccccggccgcctctct

SEQ ID NO: 1154 - RNA, 20 nt, synthetic construct
  source 1..20: mol_type = other RNA
agctcccgcagtacctagca

SEQ ID NO: 1155 - RNA, 20 nt, synthetic construct
  source 1..20: mol_type = other RNA
agctcctcgaagccgtctag

SEQ ID NO: 1156 - RNA, 20 nt, synthetic construct
  source 1..20: mol_type = other RNA
agctcctgtaccacgtgctg

SEQ ID NO: 1157 - RNA, 20 nt, synthetic construct
  source 1..20: mol_type = other RNA
agctccttgtccttgatttc

SEQ ID NO: 1158 - RNA, 20 nt, synthetic construct
  source 1..20: mol_type = other RNA
agctcggactctgcggcccg

SEQ ID NO: 1159 - RNA, 20 nt, synthetic construct
  source 1..20: mol_type = other RNA
agctctcaaagtagcgcatc

SEQ ID NO: 1160 - RNA, 20 nt, synthetic construct
  source 1..20: mol_type = other RNA
agctctcagaggccctgctg

SEQ ID NO: 1161 - RNA, 20 nt, synthetic construct
  source 1..20: mol_type = other RNA
agctctgccagggccccggg

SEQ ID NO: 1162 - RNA, 20 nt, synthetic construct
  source 1..20: mol_type = other RNA
agctcttgccctgaccagct

SEQ ID NO: 1163 - RNA, 20 nt, synthetic construct
  source 1..20: mol_type = other RNA
agctgagtcccacgaggctc

SEQ ID NO: 1164 - RNA, 20 nt, synthetic construct
  source 1..20: mol_type = other RNA
agctgccctccacgctcacg

SEQ ID NO: 1165 - RNA, 20 nt, synthetic construct
  source 1..20: mol_type = other RNA
agctgccgcgcccgcagtgt

SEQ ID NO: 1166 - RNA, 20 nt, synthetic construct
  source 1..20: mol_type = other RNA
agctgccgttctgcccagtc

SEQ ID NO: 1167 - RNA, 20 nt, synthetic construct
  source 1..20: mol_type = other RNA
agctgctccgaggttgcacc

SEQ ID NO: 1168 - RNA, 20 nt, synthetic construct
  source 1..20: mol_type = other RNA
agctgctgcactgcgcccac

SEQ ID NO: 1169 - RNA, 20 nt, synthetic construct
  source 1..20: mol_type = other RNA
agctgctggagctgctgcac

SEQ ID NO: 1170 - RNA, 20 nt, synthetic construct
  source 1..20: mol_type = other RNA
agctggaagcgcaagatggc

SEQ ID NO: 1171 - RNA, 20 nt, synthetic construct
  source 1..20: mol_type = other RNA
agctggcacactgcccggca

SEQ ID NO: 1172 - RNA, 20 nt, synthetic construct
  source 1..20: mol_type = other RNA
agctggccaagctggcctgg

SEQ ID NO: 1173 - RNA, 20 nt, synthetic construct
  source 1..20: mol_type = other RNA
agctggcccaaggaggcctg

SEQ ID NO: 1174 - RNA, 20 nt, synthetic construct
  source 1..20: mol_type = other RNA
agctggcctgggagctgggc

SEQ ID NO: 1175 - RNA, 20 nt, synthetic construct
  source 1..20: mol_type = other RNA
agctggccttccccagcttc

SEQ ID NO: 1176 - RNA, 20 nt, synthetic construct
  source 1..20: mol_type = other RNA
agctgggccgcagacatcaa

SEQ ID NO: 1177 - RNA, 20 nt, synthetic construct
  source 1..20: mol_type = other RNA
agctggggaaggccagctcg

SEQ ID NO: 1178 - RNA, 20 nt, synthetic construct
  source 1..20: mol_type = other RNA
agctggtcagggcaagagct

SEQ ID NO: 1179 - RNA, 20 nt, synthetic construct
  source 1..20: mol_type = other RNA
agctgtccggcttctccatg

SEQ ID NO: 1180 - RNA, 20 nt, synthetic construct
  source 1..20: mol_type = other RNA
agctgtgtcacccgtttcag

SEQ ID NO: 1181 - RNA, 20 nt, synthetic construct
  source 1..20: mol_type = other RNA
agcttcctcctgcaatgctt

SEQ ID NO: 1182 - RNA, 20 nt, synthetic construct
  source 1..20: mol_type = other RNA
agcttcttctggaaaaggcc

SEQ ID NO: 1183 - RNA, 20 nt, synthetic construct
  source 1..20: mol_type = other RNA
agcttggccagctctgccag

SEQ ID NO: 1184 - RNA, 20 nt, synthetic construct
  source 1..20: mol_type = other RNA
agcttggcgtcctccccaag

SEQ ID NO: 1185 - RNA, 20 nt, synthetic construct
  source 1..20: mol_type = other RNA
agcttggggaggacgccaag

SEQ ID NO: 1186 - RNA, 20 nt, synthetic construct
  source 1..20: mol_type = other RNA
agctttgcccagcacagcaa

SEQ ID NO: 1187 - RNA, 20 nt, synthetic construct
  source 1..20: mol_type = other RNA
aggaagaagaggccctatga

SEQ ID NO: 1188 - RNA, 20 nt, synthetic construct
  source 1..20: mol_type = other RNA
aggaagcagaaggtgcttgc

SEQ ID NO: 1189 - RNA, 20 nt, synthetic construct
  source 1..20: mol_type = other RNA
aggaagcattgcaggaggaa

SEQ ID NO: 1190 - RNA, 20 nt, synthetic construct
  source 1..20: mol_type = other RNA
aggaagccatcttgcgcttc

SEQ ID NO: 1191 - RNA, 20 nt, synthetic construct
  source 1..20: mol_type = other RNA
aggaagctggggaaggccag

SEQ ID NO: 1192 - RNA, 20 nt, synthetic construct
  source 1..20: mol_type = other RNA
aggacaaggagctcccgcag

SEQ ID NO: 1193 - RNA, 20 nt, synthetic construct
  source 1..20: mol_type = other RNA
aggacacgtatggtgccgag

SEQ ID NO: 1194 - RNA, 20 nt, synthetic construct
  source 1..20: mol_type = other RNA
aggaccagttcccatccgca

SEQ ID NO: 1195 - RNA, 20 nt, synthetic construct
  source 1..20: mol_type = other RNA
aggacctgggcgatggccaa

SEQ ID NO: 1196 - RNA, 20 nt, synthetic construct
  source 1..20: mol_type = other RNA
aggacgccaagctgccctcc

SEQ ID NO: 1197 - RNA, 20 nt, synthetic construct
  source 1..20: mol_type = other RNA
aggagcaccggcggccgcgt

SEQ ID NO: 1198 - RNA, 20 nt, synthetic construct
  source 1..20: mol_type = other RNA
aggagcagcagcaagagcct

SEQ ID NO: 1199 - RNA, 20 nt, synthetic construct
  source 1..20: mol_type = other RNA
aggagcgtcagggctctgtc

SEQ ID NO: 1200 - RNA, 20 nt, synthetic construct
  source 1..20: mol_type = other RNA
aggagctccccggccgcctc

SEQ ID NO: 1201 - RNA, 20 nt, synthetic construct
  source 1..20: mol_type = other RNA
aggagctcccgcagtaccta

SEQ ID NO: 1202 - RNA, 20 nt, synthetic construct
  source 1..20: mol_type = other RNA
aggagctggaagcgcaagat

SEQ ID NO: 1203 - RNA, 20 nt, synthetic construct
  source 1..20: mol_type = other RNA
aggaggaagctggggaaggc

SEQ ID NO: 1204 - RNA, 20 nt, synthetic construct
  source 1..20: mol_type = other RNA
aggaggaccagttcccatcc

SEQ ID NO: 1205 - RNA, 20 nt, synthetic construct
  source 1..20: mol_type = other RNA
aggaggagggtgcaacctcg

SEQ ID NO: 1206 - RNA, 20 nt, synthetic construct
  source 1..20: mol_type = other RNA
aggaggcctggctgaggtgc

SEQ ID NO: 1207 - RNA, 20 nt, synthetic construct
  source 1..20: mol_type = other RNA
aggaggcgtgaggcgggtgc

SEQ ID NO: 1208 - RNA, 20 nt, synthetic construct
  source 1..20: mol_type = other RNA
aggaggctggaatttggcag

SEQ ID NO: 1209 - RNA, 20 nt, synthetic construct
  source 1..20: mol_type = other RNA
aggagggtgcaacctcggag

SEQ ID NO: 1210 - RNA, 20 nt, synthetic construct
  source 1..20: mol_type = other RNA
aggatctgctcttctccctg

SEQ ID NO: 1211 - RNA, 20 nt, synthetic construct
  source 1..20: mol_type = other RNA
aggatgagcagaacgcggtc

SEQ ID NO: 1212 - RNA, 20 nt, synthetic construct
  source 1..20: mol_type = other RNA
aggatgccatccgggcctgc

SEQ ID NO: 1213 - RNA, 20 nt, synthetic construct
  source 1..20: mol_type = other RNA
aggatgtctcttccccaagc

SEQ ID NO: 1214 - RNA, 20 nt, synthetic construct
  source 1..20: mol_type = other RNA
aggcagccgccgatggcccg

SEQ ID NO: 1215 - RNA, 20 nt, synthetic construct
  source 1..20: mol_type = other RNA
aggcagcgggcgggaggctg

SEQ ID NO: 1216 - RNA, 20 nt, synthetic construct
  source 1..20: mol_type = other RNA
aggcatacgtgatgcgctac

SEQ ID NO: 1217 - RNA, 20 nt, synthetic construct
  source 1..20: mol_type = other RNA
aggcatcccccggacggttc

SEQ ID NO: 1218 - RNA, 20 nt, synthetic construct
  source 1..20: mol_type = other RNA
aggccagctcggactctgcg

SEQ ID NO: 1219 - RNA, 20 nt, synthetic construct
  source 1..20: mol_type = other RNA
aggccagcttggccagctct

SEQ ID NO: 1220 - RNA, 20 nt, synthetic construct
  source 1..20: mol_type = other RNA
aggccaggctggagaggagc

SEQ ID NO: 1221 - RNA, 20 nt, synthetic construct
  source 1..20: mol_type = other RNA
aggccaggggcgtgtcaggg

SEQ ID NO: 1222 - RNA, 20 nt, synthetic construct
  source 1..20: mol_type = other RNA
aggccataggcatcccccgg

SEQ ID NO: 1223 - RNA, 20 nt, synthetic construct
  source 1..20: mol_type = other RNA
aggcccaggcatacgtgatg

SEQ ID NO: 1224 - RNA, 20 nt, synthetic construct
  source 1..20: mol_type = other RNA
aggcccggatggcatcctag

SEQ ID NO: 1225 - RNA, 20 nt, synthetic construct
  source 1..20: mol_type = other RNA
aggcccggctcactgcccca

SEQ ID NO: 1226 - RNA, 20 nt, synthetic construct
  source 1..20: mol_type = other RNA
aggccctatgacaactggct

SEQ ID NO: 1227 - RNA, 20 nt, synthetic construct
  source 1..20: mol_type = other RNA
aggccctgctggagcttggg

SEQ ID NO: 1228 - RNA, 20 nt, synthetic construct
  source 1..20: mol_type = other RNA
aggccgacatagagtcccgt

SEQ ID NO: 1229 - RNA, 20 nt, synthetic construct
  source 1..20: mol_type = other RNA
aggccgacgccctatttgag

SEQ ID NO: 1230 - RNA, 20 nt, synthetic construct
  source 1..20: mol_type = other RNA
aggccgaggaggctggaatt

SEQ ID NO: 1231 - RNA, 20 nt, synthetic construct
  source 1..20: mol_type = other RNA
aggcctccttgggccagctg

SEQ ID NO: 1232 - RNA, 20 nt, synthetic construct
  source 1..20: mol_type = other RNA
aggcctggctgaggtgctgt

SEQ ID NO: 1233 - RNA, 20 nt, synthetic construct
  source 1..20: mol_type = other RNA
aggccttgcccagtacatgt

SEQ ID NO: 1234 - RNA, 20 nt, synthetic construct
  source 1..20: mol_type = other RNA
aggccttggaggcggcgggc

SEQ ID NO: 1235 - RNA, 20 nt, synthetic construct
  source 1..20: mol_type = other RNA
aggcggccggggagctcctg

SEQ ID NO: 1236 - RNA, 20 nt, synthetic construct
  source 1..20: mol_type = other RNA
aggcggcgggccaagacttc

SEQ ID NO: 1237 - RNA, 20 nt, synthetic construct
  source 1..20: mol_type = other RNA
aggcgggtgcccagaaaaga

SEQ ID NO: 1238 - RNA, 20 nt, synthetic construct
  source 1..20: mol_type = other RNA
aggcgtgaggcgggtgccca

SEQ ID NO: 1239 - RNA, 20 nt, synthetic construct
  source 1..20: mol_type = other RNA
aggctccccaatccagaggg

SEQ ID NO: 1240 - RNA, 20 nt, synthetic construct
  source 1..20: mol_type = other RNA
aggctctggaccaggcggcc

SEQ ID NO: 1241 - RNA, 20 nt, synthetic construct
  source 1..20: mol_type = other RNA
aggctcttgctgctgctcct

SEQ ID NO: 1242 - RNA, 20 nt, synthetic construct
  source 1..20: mol_type = other RNA
aggctggaagatcagcccag

SEQ ID NO: 1243 - RNA, 20 nt, synthetic construct
  source 1..20: mol_type = other RNA
aggctggaatttggcagcac

SEQ ID NO: 1244 - RNA, 20 nt, synthetic construct
  source 1..20: mol_type = other RNA
aggctggagaggagcagcag

SEQ ID NO: 1245 - RNA, 20 nt, synthetic construct
  source 1..20: mol_type = other RNA
aggcttagtccaacacccac

SEQ ID NO: 1246 - RNA, 20 nt, synthetic construct
  source 1..20: mol_type = other RNA
agggagaagagcagatcctg

SEQ ID NO: 1247 - RNA, 20 nt, synthetic construct
  source 1..20: mol_type = other RNA
agggagaagtcttggcccgc

SEQ ID NO: 1248 - RNA, 20 nt, synthetic construct
  source 1..20: mol_type = other RNA
agggagcagggctccgccgg

SEQ ID NO: 1249 - RNA, 20 nt, synthetic construct
  source 1..20: mol_type = other RNA
agggatgacagagcaccaag

SEQ ID NO: 1250 - RNA, 20 nt, synthetic construct
  source 1..20: mol_type = other RNA
agggcaagagctattgggct

SEQ ID NO: 1251 - RNA, 20 nt, synthetic construct
  source 1..20: mol_type = other RNA
agggcagcttggcgtcctcc

SEQ ID NO: 1252 - RNA, 20 nt, synthetic construct
  source 1..20: mol_type = other RNA
agggcccccaggaagcattg

SEQ ID NO: 1253 - RNA, 20 nt, synthetic construct
  source 1..20: mol_type = other RNA
agggcctctgagagctggca

SEQ ID NO: 1254 - RNA, 20 nt, synthetic construct
  source 1..20: mol_type = other RNA
agggcctcttcttccttggg

SEQ ID NO: 1255 - RNA, 20 nt, synthetic construct
  source 1..20: mol_type = other RNA
agggcgtcggccttgctcag

SEQ ID NO: 1256 - RNA, 20 nt, synthetic construct
  source 1..20: mol_type = other RNA
agggcgtgccacgctttctg

SEQ ID NO: 1257 - RNA, 20 nt, synthetic construct
  source 1..20: mol_type = other RNA
agggctcccaggcagcgggc

SEQ ID NO: 1258 - RNA, 20 nt, synthetic construct
  source 1..20: mol_type = other RNA
agggctccgccggtgccggt

SEQ ID NO: 1259 - RNA, 20 nt, synthetic construct
  source 1..20: mol_type = other RNA
agggctctgtcttggtgctc

SEQ ID NO: 1260 - RNA, 20 nt, synthetic construct
  source 1..20: mol_type = other RNA
agggctgcacggcccagcag

SEQ ID NO: 1261 - RNA, 20 nt, synthetic construct
  source 1..20: mol_type = other RNA
agggctgtggctgtgactga

SEQ ID NO: 1262 - RNA, 20 nt, synthetic construct
  source 1..20: mol_type = other RNA
aggggacagagaagacaaag

SEQ ID NO: 1263 - RNA, 20 nt, synthetic construct
  source 1..20: mol_type = other RNA
aggggcaaatgccagtgctg

SEQ ID NO: 1264 - RNA, 20 nt, synthetic construct
  source 1..20: mol_type = other RNA
aggggcgtgtcagggtgggg

SEQ ID NO: 1265 - RNA, 20 nt, synthetic construct
  source 1..20: mol_type = other RNA
aggggcttggggaagagaca

SEQ ID NO: 1266 - RNA, 20 nt, synthetic construct
  source 1..20: mol_type = other RNA
agggtactttgatgtctgcg

SEQ ID NO: 1267 - RNA, 20 nt, synthetic construct
  source 1..20: mol_type = other RNA
agggtgcaacctcggagcag

SEQ ID NO: 1268 - RNA, 20 nt, synthetic construct
  source 1..20: mol_type = other RNA
aggtacctcgcaagcacctt

SEQ ID NO: 1269 - RNA, 20 nt, synthetic construct
  source 1..20: mol_type = other RNA
aggtacctgaagcggctgca

SEQ ID NO: 1270 - RNA, 20 nt, synthetic construct
  source 1..20: mol_type = other RNA
aggtactgcgggagctcctt

SEQ ID NO: 1271 - RNA, 20 nt, synthetic construct
  source 1..20: mol_type = other RNA
aggtccagggagaagtcttg

SEQ ID NO: 1272 - RNA, 20 nt, synthetic construct
  source 1..20: mol_type = other RNA
aggtcctcacgtctgcggat

SEQ ID NO: 1273 - RNA, 20 nt, synthetic construct
  source 1..20: mol_type = other RNA
aggtctcttcaagatgtggc

SEQ ID NO: 1274 - RNA, 20 nt, synthetic construct
  source 1..20: mol_type = other RNA
aggtgctgttggctgccaag

SEQ ID NO: 1275 - RNA, 20 nt, synthetic construct
  source 1..20: mol_type = other RNA
aggtgcttgcgaggtacctg

SEQ ID NO: 1276 - RNA, 20 nt, synthetic construct
  source 1..20: mol_type = other RNA
aggtggatctggtgcaggcc

SEQ ID NO: 1277 - RNA, 20 nt, synthetic construct
  source 1..20: mol_type = other RNA
aggtggggtgaggggcttgg

SEQ ID NO: 1278 - RNA, 20 nt, synthetic construct
  source 1..20: mol_type = other RNA
aggttgcaccctcctcctca

SEQ ID NO: 1279 - RNA, 20 nt, synthetic construct
  source 1..20: mol_type = other RNA
aggttttcagccacatcttg

SEQ ID NO: 1280 - RNA, 20 nt, synthetic construct
  source 1..20: mol_type = other RNA
agtacatgtgcatcaggagg

SEQ ID NO: 1281 - RNA, 20 nt, synthetic construct
  source 1..20: mol_type = other RNA
agtaccctacaggaggacca

SEQ ID NO: 1282 - RNA, 20 nt, synthetic construct
  source 1..20: mol_type = other RNA
agtacctagcattgacccca

SEQ ID NO: 1283 - RNA, 20 nt, synthetic construct
  source 1..20: mol_type = other RNA
agtacgactttgtcttctct

SEQ ID NO: 1284 - RNA, 20 nt, synthetic construct
  source 1..20: mol_type = other RNA
agtagcgcatcacgtatgcc

SEQ ID NO: 1285 - RNA, 20 nt, synthetic construct
  source 1..20: mol_type = other RNA
agtagggctcccaggcagcg

SEQ ID NO: 1286 - RNA, 20 nt, synthetic construct
  source 1..20: mol_type = other RNA
agtagggctgtggctgtgac

SEQ ID NO: 1287 - RNA, 20 nt, synthetic construct
  source 1..20: mol_type = other RNA
agtcacagccacagccctac

SEQ ID NO: 1288 - RNA, 20 nt, synthetic construct
  source 1..20: mol_type = other RNA
agtccaacacccaccgcggg

SEQ ID NO: 1289 - RNA, 20 nt, synthetic construct
  source 1..20: mol_type = other RNA
agtcccacgaggctccccaa

SEQ ID NO: 1290 - RNA, 20 nt, synthetic construct
  source 1..20: mol_type = other RNA
agtcccgtgagcgtggaggg

SEQ ID NO: 1291 - RNA, 20 nt, synthetic construct
  source 1..20: mol_type = other RNA
agtccgagctggccttcccc

SEQ ID NO: 1292 - RNA, 20 nt, synthetic construct
  source 1..20: mol_type = other RNA
agtccggggtggccagttcc

SEQ ID NO: 1293 - RNA, 20 nt, synthetic construct
  source 1..20: mol_type = other RNA
agtcgtactggggaagccgg

SEQ ID NO: 1294 - RNA, 20 nt, synthetic construct
  source 1..20: mol_type = other RNA
agtcttggcccgccgcctcc

SEQ ID NO: 1295 - RNA, 20 nt, synthetic construct
  source 1..20: mol_type = other RNA
agtgagccgggcctgggctt

SEQ ID NO: 1296 - RNA, 20 nt, synthetic construct
  source 1..20: mol_type = other RNA
agtgagcggtagaactgctc

SEQ ID NO: 1297 - RNA, 20 nt, synthetic construct
  source 1..20: mol_type = other RNA
agtgattgctgtgctgggca

SEQ ID NO: 1298 - RNA, 20 nt, synthetic construct
  source 1..20: mol_type = other RNA
agtgcagcagctccagcagc

SEQ ID NO: 1299 - RNA, 20 nt, synthetic construct
  source 1..20: mol_type = other RNA
agtgctgcggaggtccaggg

SEQ ID NO: 1300 - RNA, 20 nt, synthetic construct
  source 1..20: mol_type = other RNA
agtggaggtggatctggtgc

SEQ ID NO: 1301 - RNA, 20 nt, synthetic construct
  source 1..20: mol_type = other RNA
agtggccggtcccggaggag

SEQ ID NO: 1302 - RNA, 20 nt, synthetic construct
  source 1..20: mol_type = other RNA
agtggcgaaatcaaggacaa

SEQ ID NO: 1303 - RNA, 20 nt, synthetic construct
  source 1..20: mol_type = other RNA
agtggctgtgggcccaggga

SEQ ID NO: 1304 - RNA, 20 nt, synthetic construct
  source 1..20: mol_type = other RNA
agtgtccccggctgcagccg

SEQ ID NO: 1305 - RNA, 20 nt, synthetic construct
  source 1..20: mol_type = other RNA
agtgtgccagctctcagagg

SEQ ID NO: 1306 - RNA, 20 nt, synthetic construct
  source 1..20: mol_type = other RNA
agttcccatccgcagacgtg

SEQ ID NO: 1307 - RNA, 20 nt, synthetic construct
  source 1..20: mol_type = other RNA
agttcccgctccaggctctt

SEQ ID NO: 1308 - RNA, 20 nt, synthetic construct
  source 1..20: mol_type = other RNA
agttctaccgctcactgcag

SEQ ID NO: 1309 - RNA, 20 nt, synthetic construct
  source 1..20: mol_type = other RNA
agttgtcatagggcctcttc

SEQ ID NO: 1310 - RNA, 20 nt, synthetic construct
  source 1..20: mol_type = other RNA
atacccccaccctgacacgc

SEQ ID NO: 1311 - RNA, 20 nt, synthetic construct
  source 1..20: mol_type = other RNA
atacgtgatgcgctactttg

SEQ ID NO: 1312 - RNA, 20 nt, synthetic construct
  source 1..20: mol_type = other RNA
atacgtgtcctgcagtgagc

SEQ ID NO: 1313 - RNA, 20 nt, synthetic construct
  source 1..20: mol_type = other RNA
atagagtcccgtgagcgtgg

SEQ ID NO: 1314 - RNA, 20 nt, synthetic construct
  source 1..20: mol_type = other RNA
atagctcttgccctgaccag

SEQ ID NO: 1315 - RNA, 20 nt, synthetic construct
  source 1..20: mol_type = other RNA
ataggcatcccccggacggt

SEQ ID NO: 1316 - RNA, 20 nt, synthetic construct
  source 1..20: mol_type = other RNA
atagggcctcttcttccttg

SEQ ID NO: 1317 - RNA, 20 nt, synthetic construct
  source 1..20: mol_type = other RNA
atagggcgtcggccttgctc

SEQ ID NO: 1318 - RNA, 20 nt, synthetic construct
  source 1..20: mol_type = other RNA
atcaaagtaccctacaggag

SEQ ID NO: 1319 - RNA, 20 nt, synthetic construct
  source 1..20: mol_type = other RNA
atcaaggacaaggagctccc

SEQ ID NO: 1320 - RNA, 20 nt, synthetic construct
  source 1..20: mol_type = other RNA
atcacgtatgcctgggcctg

SEQ ID NO: 1321 - RNA, 20 nt, synthetic construct
  source 1..20: mol_type = other RNA
atcactcgtgtctcacgcgg

SEQ ID NO: 1322 - RNA, 20 nt, synthetic construct
  source 1..20: mol_type = other RNA
atcagcccagccagaaagcg

SEQ ID NO: 1323 - RNA, 20 nt, synthetic construct
  source 1..20: mol_type = other RNA
atcaggaggcgtgaggcggg

SEQ ID NO: 1324 - RNA, 20 nt, synthetic construct
  source 1..20: mol_type = other RNA
atccacctccactaggatgc

SEQ ID NO: 1325 - RNA, 20 nt, synthetic construct
  source 1..20: mol_type = other RNA
atccagaggggcaaatgcca

SEQ ID NO: 1326 - RNA, 20 nt, synthetic construct
  source 1..20: mol_type = other RNA
atcccccggacggttcaagc

SEQ ID NO: 1327 - RNA, 20 nt, synthetic construct
  source 1..20: mol_type = other RNA
atccctgagctctcaaagta

SEQ ID NO: 1328 - RNA, 20 nt, synthetic construct
  source 1..20: mol_type = other RNA
atccgcagacgtgaggacct

SEQ ID NO: 1329 - RNA, 20 nt, synthetic construct
  source 1..20: mol_type = other RNA
atccgggcctgcgggctcgg

SEQ ID NO: 1330 - RNA, 20 nt, synthetic construct
  source 1..20: mol_type = other RNA
atcctagacggcttcgagga

SEQ ID NO: 1331 - RNA, 20 nt, synthetic construct
  source 1..20: mol_type = other RNA
atcctagtggaggtggatct

SEQ ID NO: 1332 - RNA, 20 nt, synthetic construct
  source 1..20: mol_type = other RNA
atcctgcaggccataggcat

SEQ ID NO: 1333 - RNA, 20 nt, synthetic construct
  source 1..20: mol_type = other RNA
atcgcccaggtcctcacgtc

SEQ ID NO: 1334 - RNA, 20 nt, synthetic construct
  source 1..20: mol_type = other RNA
atcggccgccacgagtggct

SEQ ID NO: 1335 - RNA, 20 nt, synthetic construct
  source 1..20: mol_type = other RNA
atcggcggctgcctcggtgg

SEQ ID NO: 1336 - RNA, 20 nt, synthetic construct
  source 1..20: mol_type = other RNA
atctgctcttctccctgggc

SEQ ID NO: 1337 - RNA, 20 nt, synthetic construct
  source 1..20: mol_type = other RNA
atctggtgcaggccaggctg

SEQ ID NO: 1338 - RNA, 20 nt, synthetic construct
  source 1..20: mol_type = other RNA
atcttccagcctcccgcccg

SEQ ID NO: 1339 - RNA, 20 nt, synthetic construct
  source 1..20: mol_type = other RNA
atcttgaagagacctgaccg

SEQ ID NO: 1340 - RNA, 20 nt, synthetic construct
  source 1..20: mol_type = other RNA
atcttgcgcttccagctcct

SEQ ID NO: 1341 - RNA, 20 nt, synthetic construct
  source 1..20: mol_type = other RNA
atgacaactggctggagggc

SEQ ID NO: 1342 - RNA, 20 nt, synthetic construct
  source 1..20: mol_type = other RNA
atgacagagcaccaagacag

SEQ ID NO: 1343 - RNA, 20 nt, synthetic construct
  source 1..20: mol_type = other RNA
atgagcagaacgcggtcagg

SEQ ID NO: 1344 - RNA, 20 nt, synthetic construct
  source 1..20: mol_type = other RNA
atgaggttttcagccacatc

SEQ ID NO: 1345 - RNA, 20 nt, synthetic construct
  source 1..20: mol_type = other RNA
atgcacatgtactgggcaag

SEQ ID NO: 1346 - RNA, 20 nt, synthetic construct
  source 1..20: mol_type = other RNA
atgccagtgctgcggaggtc

SEQ ID NO: 1347 - RNA, 20 nt, synthetic construct
  source 1..20: mol_type = other RNA
atgccatccgggcctgcggg

SEQ ID NO: 1348 - RNA, 20 nt, synthetic construct
  source 1..20: mol_type = other RNA
atgcccaacacaaggatgtc

SEQ ID NO: 1349 - RNA, 20 nt, synthetic construct
  source 1..20: mol_type = other RNA
atgcctatggcctgcaggat

SEQ ID NO: 1350 - RNA, 20 nt, synthetic construct
  source 1..20: mol_type = other RNA
atgcctgggcctgctccatg

SEQ ID NO: 1351 - RNA, 20 nt, synthetic construct
  source 1..20: mol_type = other RNA
atgcgctactttgagagctc

SEQ ID NO: 1352 - RNA, 20 nt, synthetic construct
  source 1..20: mol_type = other RNA
atgctaggtactgcgggagc

SEQ ID NO: 1353 - RNA, 20 nt, synthetic construct
  source 1..20: mol_type = other RNA
atgcttcctgggggccctgt

SEQ ID NO: 1354 - RNA, 20 nt, synthetic construct
  source 1..20: mol_type = other RNA
atggagaagccggacagctc

SEQ ID NO: 1355 - RNA, 20 nt, synthetic construct
  source 1..20: mol_type = other RNA
atggagcaggcccaggcata

SEQ ID NO: 1356 - RNA, 20 nt, synthetic construct
  source 1..20: mol_type = other RNA
atggcaggggacagagaaga

SEQ ID NO: 1357 - RNA, 20 nt, synthetic construct
  source 1..20: mol_type = other RNA
atggcatcctagtggaggtg

SEQ ID NO: 1358 - RNA, 20 nt, synthetic construct
  source 1..20: mol_type = other RNA
atggccaaaggcttagtcca

SEQ ID NO: 1359 - RNA, 20 nt, synthetic construct
  source 1..20: mol_type = other RNA
atggcccgagtagggctccc

SEQ ID NO: 1360 - RNA, 20 nt, synthetic construct
  source 1..20: mol_type = other RNA
atggcctgcaggatctgctc

SEQ ID NO: 1361 - RNA, 20 nt, synthetic construct
  source 1..20: mol_type = other RNA
atggcttcctgcacagcacg

SEQ ID NO: 1362 - RNA, 20 nt, synthetic construct
  source 1..20: mol_type = other RNA
atgggaactggtcctcctgt

SEQ ID NO: 1363 - RNA, 20 nt, synthetic construct
  source 1..20: mol_type = other RNA
atggtgccgagcccgcaggc

SEQ ID NO: 1364 - RNA, 20 nt, synthetic construct
  source 1..20: mol_type = other RNA
atgtactgggcaaggccttg

SEQ ID NO: 1365 - RNA, 20 nt, synthetic construct
  source 1..20: mol_type = other RNA
atgtcggcctgctgggccgt

SEQ ID NO: 1366 - RNA, 20 nt, synthetic construct
  source 1..20: mol_type = other RNA
atgtctcttccccaagcccc

SEQ ID NO: 1367 - RNA, 20 nt, synthetic construct
  source 1..20: mol_type = other RNA
atgtctgcggcccagctccc

SEQ ID NO: 1368 - RNA, 20 nt, synthetic construct
  source 1..20: mol_type = other RNA
atgtgcatcaggaggcgtga

SEQ ID NO: 1369 - RNA, 20 nt, synthetic construct
  source 1..20: mol_type = other RNA
atgtggctgaaaacctcatc

SEQ ID NO: 1370 - RNA, 20 nt, synthetic construct
  source 1..20: mol_type = other RNA
attccagcctcctcggcctc

SEQ ID NO: 1371 - RNA, 20 nt, synthetic construct
  source 1..20: mol_type = other RNA
attgaccccaaggaagaaga

SEQ ID NO: 1372 - RNA, 20 nt, synthetic construct
  source 1..20: mol_type = other RNA
attgcaggaggaagctgggg

SEQ ID NO: 1373 - RNA, 20 nt, synthetic construct
  source 1..20: mol_type = other RNA
attgctgtgctgggcaaagc

SEQ ID NO: 1374 - RNA, 20 nt, synthetic construct
  source 1..20: mol_type = other RNA
attgcttgaaccgtccgggg

SEQ ID NO: 1375 - RNA, 20 nt, synthetic construct
  source 1..20: mol_type = other RNA
attgggctggggcagtgagc

SEQ ID NO: 1376 - RNA, 20 nt, synthetic construct
  source 1..20: mol_type = other RNA
attggggagcctcgtgggac

SEQ ID NO: 1377 - RNA, 20 nt, synthetic construct
  source 1..20: mol_type = other RNA
atttcgccactcagagccag

SEQ ID NO: 1378 - RNA, 20 nt, synthetic construct
  source 1..20: mol_type = other RNA
atttgagctgtccggcttct

SEQ ID NO: 1379 - RNA, 20 nt, synthetic construct
  source 1..20: mol_type = other RNA
atttgcccctctggattggg

SEQ ID NO: 1380 - RNA, 20 nt, synthetic construct
  source 1..20: mol_type = other RNA
atttggcagcacgtggtaca

SEQ ID NO: 1381 - RNA, 20 nt, synthetic construct
  source 1..20: mol_type = other RNA
caaagctggtcagggcaaga

SEQ ID NO: 1382 - RNA, 20 nt, synthetic construct
  source 1..20: mol_type = other RNA
caaaggccaggggcgtgtca

SEQ ID NO: 1383 - RNA, 20 nt, synthetic construct
  source 1..20: mol_type = other RNA
caaaggcttagtccaacacc

SEQ ID NO: 1384 - RNA, 20 nt, synthetic construct
  source 1..20: mol_type = other RNA
caaagtaccctacaggagga

SEQ ID NO: 1385 - RNA, 20 nt, synthetic construct
  source 1..20: mol_type = other RNA
caaagtagcgcatcacgtat

SEQ ID NO: 1386 - RNA, 20 nt, synthetic construct
  source 1..20: mol_type = other RNA
caaagtagggctgtggctgt

SEQ ID NO: 1387 - RNA, 20 nt, synthetic construct
  source 1..20: mol_type = other RNA
caaagtcgtactggggaagc

SEQ ID NO: 1388 - RNA, 20 nt, synthetic construct
  source 1..20: mol_type = other RNA
caaatagggcgtcggccttg

SEQ ID NO: 1389 - RNA, 20 nt, synthetic construct
  source 1..20: mol_type = other RNA
caaatgccagtgctgcggag

SEQ ID NO: 1390 - RNA, 20 nt, synthetic construct
  source 1..20: mol_type = other RNA
caaattccagcctcctcggc

SEQ ID NO: 1391 - RNA, 20 nt, synthetic construct
  source 1..20: mol_type = other RNA
caacacaaggatgtctcttc

SEQ ID NO: 1392 - RNA, 20 nt, synthetic construct
  source 1..20: mol_type = other RNA
caacacccaccgcgggccgc

SEQ ID NO: 1393 - RNA, 20 nt, synthetic construct
  source 1..20: mol_type = other RNA
caacagcacctcagccaggc

SEQ ID NO: 1394 - RNA, 20 nt, synthetic construct
  source 1..20: mol_type = other RNA
caacctcggagcagcttctt

SEQ ID NO: 1395 - RNA, 20 nt, synthetic construct
  source 1..20: mol_type = other RNA
caactggctggagggcgtgc

SEQ ID NO: 1396 - RNA, 20 nt, synthetic construct
  source 1..20: mol_type = other RNA
caagacagagccctgacgct

SEQ ID NO: 1397 - RNA, 20 nt, synthetic construct
  source 1..20: mol_type = other RNA
caagacttctccctggacct

SEQ ID NO: 1398 - RNA, 20 nt, synthetic construct
  source 1..20: mol_type = other RNA
caagagcctggagcgggaac

SEQ ID NO: 1399 - RNA, 20 nt, synthetic construct
  source 1..20: mol_type = other RNA
caagagctattgggctgggg

SEQ ID NO: 1400 - RNA, 20 nt, synthetic construct
  source 1..20: mol_type = other RNA
caagatggcttcctgcacag

SEQ ID NO: 1401 - RNA, 20 nt, synthetic construct
  source 1..20: mol_type = other RNA
caagatgtggctgaaaacct

SEQ ID NO: 1402 - RNA, 20 nt, synthetic construct
  source 1..20: mol_type = other RNA
caagcaatggcaggggacag

SEQ ID NO: 1403 - RNA, 20 nt, synthetic construct
  source 1..20: mol_type = other RNA
caagcaccttctgcttcctg

SEQ ID NO: 1404 - RNA, 20 nt, synthetic construct
  source 1..20: mol_type = other RNA
caagcccaggcccggctcac

SEQ ID NO: 1405 - RNA, 20 nt, synthetic construct
  source 1..20: mol_type = other RNA
caagcccctcaccccacctg

SEQ ID NO: 1406 - RNA, 20 nt, synthetic construct
  source 1..20: mol_type = other RNA
caagctccagcagggcctct

SEQ ID NO: 1407 - RNA, 20 nt, synthetic construct
  source 1..20: mol_type = other RNA
caagctgccctccacgctca

SEQ ID NO: 1408 - RNA, 20 nt, synthetic construct
  source 1..20: mol_type = other RNA
caagctggcctgggagctgg

SEQ ID NO: 1409 - RNA, 20 nt, synthetic construct
  source 1..20: mol_type = other RNA
caaggaagaagaggccctat

SEQ ID NO: 1410 - RNA, 20 nt, synthetic construct
  source 1..20: mol_type = other RNA
caaggacaaggagctcccgc

SEQ ID NO: 1411 - RNA, 20 nt, synthetic construct
  source 1..20: mol_type = other RNA
caaggagcaccggcggccgc

SEQ ID NO: 1412 - RNA, 20 nt, synthetic construct
  source 1..20: mol_type = other RNA
caaggagctcccgcagtacc

SEQ ID NO: 1413 - RNA, 20 nt, synthetic construct
  source 1..20: mol_type = other RNA
caaggaggcctggctgaggt

SEQ ID NO: 1414 - RNA, 20 nt, synthetic construct
  source 1..20: mol_type = other RNA
caaggatgtctcttccccaa

SEQ ID NO: 1415 - RNA, 20 nt, synthetic construct
  source 1..20: mol_type = other RNA
caaggccgacgccctatttg

SEQ ID NO: 1416 - RNA, 20 nt, synthetic construct
  source 1..20: mol_type = other RNA
caaggccttgcccagtacat

SEQ ID NO: 1417 - RNA, 20 nt, synthetic construct
  source 1..20: mol_type = other RNA
caaggccttggaggcggcgg

SEQ ID NO: 1418 - RNA, 20 nt, synthetic construct
  source 1..20: mol_type = other RNA
caatagctcttgccctgacc

SEQ ID NO: 1419 - RNA, 20 nt, synthetic construct
  source 1..20: mol_type = other RNA
caatcactcgtgtctcacgc

SEQ ID NO: 1420 - RNA, 20 nt, synthetic construct
  source 1..20: mol_type = other RNA
caatccagaggggcaaatgc

SEQ ID NO: 1421 - RNA, 20 nt, synthetic construct
  source 1..20: mol_type = other RNA
caatgctaggtactgcggga

SEQ ID NO: 1422 - RNA, 20 nt, synthetic construct
  source 1..20: mol_type = other RNA
caatgcttcctgggggccct

SEQ ID NO: 1423 - RNA, 20 nt, synthetic construct
  source 1..20: mol_type = other RNA
caatggcaggggacagagaa

SEQ ID NO: 1424 - RNA, 20 nt, synthetic construct
  source 1..20: mol_type = other RNA
cacaaagtagggctgtggct

SEQ ID NO: 1425 - RNA, 20 nt, synthetic construct
  source 1..20: mol_type = other RNA
cacaagcccaggcccggctc

SEQ ID NO: 1426 - RNA, 20 nt, synthetic construct
  source 1..20: mol_type = other RNA
cacaaggatgtctcttcccc

SEQ ID NO: 1427 - RNA, 20 nt, synthetic construct
  source 1..20: mol_type = other RNA
cacactgcccggcacaaagt

SEQ ID NO: 1428 - RNA, 20 nt, synthetic construct
  source 1..20: mol_type = other RNA
cacagcaatcactcgtgtct

SEQ ID NO: 1429 - RNA, 20 nt, synthetic construct
  source 1..20: mol_type = other RNA
cacagcacgtgcggaccggc

SEQ ID NO: 1430 - RNA, 20 nt, synthetic construct
  source 1..20: mol_type = other RNA
cacagccacagccctacttt

SEQ ID NO: 1431 - RNA, 20 nt, synthetic construct
  source 1..20: mol_type = other RNA
cacagccactcgtggcggcc

SEQ ID NO: 1432 - RNA, 20 nt, synthetic construct
  source 1..20: mol_type = other RNA
cacagccctactttgtgccg

SEQ ID NO: 1433 - RNA, 20 nt, synthetic construct
  source 1..20: mol_type = other RNA
cacagctgagtcccacgagg

SEQ ID NO: 1434 - RNA, 20 nt, synthetic construct
  source 1..20: mol_type = other RNA
cacagggcccccaggaagca

SEQ ID NO: 1435 - RNA, 20 nt, synthetic construct
  source 1..20: mol_type = other RNA
cacatacccccaccctgaca

SEQ ID NO: 1436 - RNA, 20 nt, synthetic construct
  source 1..20: mol_type = other RNA
cacatcttgaagagacctga

SEQ ID NO: 1437 - RNA, 20 nt, synthetic construct
  source 1..20: mol_type = other RNA
cacatgtactgggcaaggcc

SEQ ID NO: 1438 - RNA, 20 nt, synthetic construct
  source 1..20: mol_type = other RNA
caccaagacagagccctgac

SEQ ID NO: 1439 - RNA, 20 nt, synthetic construct
  source 1..20: mol_type = other RNA
caccagatccacctccacta

SEQ ID NO: 1440 - RNA, 20 nt, synthetic construct
  source 1..20: mol_type = other RNA
caccatacgtgtcctgcagt

SEQ ID NO: 1441 - RNA, 20 nt, synthetic construct
  source 1..20: mol_type = other RNA
cacccaccgcgggccgcaga

SEQ ID NO: 1442 - RNA, 20 nt, synthetic construct
  source 1..20: mol_type = other RNA
caccccacctgaaacgggtg

SEQ ID NO: 1443 - RNA, 20 nt, synthetic construct
  source 1..20: mol_type = other RNA
caccccggactgggcagaac

SEQ ID NO: 1444 - RNA, 20 nt, synthetic construct
  source 1..20: mol_type = other RNA
cacccgcctcacgcctcctg

SEQ ID NO: 1445 - RNA, 20 nt, synthetic construct
  source 1..20: mol_type = other RNA
cacccgtttcaggtggggtg

SEQ ID NO: 1446 - RNA, 20 nt, synthetic construct
  source 1..20: mol_type = other RNA
caccctcctcctcacagccc

SEQ ID NO: 1447 - RNA, 20 nt, synthetic construct
  source 1..20: mol_type = other RNA
caccctgacacgcccctggc

SEQ ID NO: 1448 - RNA, 20 nt, synthetic construct
  source 1..20: mol_type = other RNA
caccgaggcagccgccgatg

SEQ ID NO: 1449 - RNA, 20 nt, synthetic construct
  source 1..20: mol_type = other RNA
caccgcgggccgcagagtcc

SEQ ID NO: 1450 - RNA, 20 nt, synthetic construct
  source 1..20: mol_type = other RNA
caccggcggagccctgctcc

SEQ ID NO: 1451 - RNA, 20 nt, synthetic construct
  source 1..20: mol_type = other RNA
caccggcggccgcgtgagac

SEQ ID NO: 1452 - RNA, 20 nt, synthetic construct
  source 1..20: mol_type = other RNA
caccggctctgcaaaggcca

SEQ ID NO: 1453 - RNA, 20 nt, synthetic construct
  source 1..20: mol_type = other RNA
cacctcagccaggcctcctt

SEQ ID NO: 1454 - RNA, 20 nt, synthetic construct
  source 1..20: mol_type = other RNA
cacctccactaggatgccat

SEQ ID NO: 1455 - RNA, 20 nt, synthetic construct
  source 1..20: mol_type = other RNA
cacctgaaacgggtgacaca

SEQ ID NO: 1456 - RNA, 20 nt, synthetic construct
  source 1..20: mol_type = other RNA
caccttctgcttcctgtcca

SEQ ID NO: 1457 - RNA, 20 nt, synthetic construct
  source 1..20: mol_type = other RNA
cacgaggccgaggaggctgg

SEQ ID NO: 1458 - RNA, 20 nt, synthetic construct
  source 1..20: mol_type = other RNA
cacgaggctccccaatccag

SEQ ID NO: 1459 - RNA, 20 nt, synthetic construct
  source 1..20: mol_type = other RNA
cacgagtgattgctgtgctg

SEQ ID NO: 1460 - RNA, 20 nt, synthetic construct
  source 1..20: mol_type = other RNA
cacgagtggctgtgggccca

SEQ ID NO: 1461 - RNA, 20 nt, synthetic construct
  source 1..20: mol_type = other RNA
cacgcccctggcctttgcag

SEQ ID NO: 1462 - RNA, 20 nt, synthetic construct
  source 1..20: mol_type = other RNA
cacgccctccagccagttgt

SEQ ID NO: 1463 - RNA, 20 nt, synthetic construct
  source 1..20: mol_type = other RNA
cacgcctcctgatgcacatg

SEQ ID NO: 1464 - RNA, 20 nt, synthetic construct
  source 1..20: mol_type = other RNA
cacgctcacgggactctatg

SEQ ID NO: 1465 - RNA, 20 nt, synthetic construct
  source 1..20: mol_type = other RNA
cacgctttctggctgggctg

SEQ ID NO: 1466 - RNA, 20 nt, synthetic construct
  source 1..20: mol_type = other RNA
cacggcccagcaggccgaca

SEQ ID NO: 1467 - RNA, 20 nt, synthetic construct
  source 1..20: mol_type = other RNA
cacgggactctatgtcggcc

SEQ ID NO: 1468 - RNA, 20 nt, synthetic construct
  source 1..20: mol_type = other RNA
cacgtatgcctgggcctgct

SEQ ID NO: 1469 - RNA, 20 nt, synthetic construct
  source 1..20: mol_type = other RNA
cacgtatggtgccgagcccg

SEQ ID NO: 1470 - RNA, 20 nt, synthetic construct
  source 1..20: mol_type = other RNA
cacgtctgcggatgggaact

SEQ ID NO: 1471 - RNA, 20 nt, synthetic construct
  source 1..20: mol_type = other RNA
cacgtgcggaccggcaccgg

SEQ ID NO: 1472 - RNA, 20 nt, synthetic construct
  source 1..20: mol_type = other RNA
cacgtgctgccaaattccag

SEQ ID NO: 1473 - RNA, 20 nt, synthetic construct
  source 1..20: mol_type = other RNA
cacgtgctgtgcaggaagcc

SEQ ID NO: 1474 - RNA, 20 nt, synthetic construct
  source 1..20: mol_type = other RNA
cacgtggtacaggagctccc

SEQ ID NO: 1475 - RNA, 20 nt, synthetic construct
  source 1..20: mol_type = other RNA
cactaggatgccatccgggc

SEQ ID NO: 1476 - RNA, 20 nt, synthetic construct
  source 1..20: mol_type = other RNA
cactcagagccagccacagg

SEQ ID NO: 1477 - RNA, 20 nt, synthetic construct
  source 1..20: mol_type = other RNA
cactcgtggcggccgatgag

SEQ ID NO: 1478 - RNA, 20 nt, synthetic construct
  source 1..20: mol_type = other RNA
cactcgtgtctcacgcggcc

SEQ ID NO: 1479 - RNA, 20 nt, synthetic construct
  source 1..20: mol_type = other RNA
cactgcaggacacgtatggt

SEQ ID NO: 1480 - RNA, 20 nt, synthetic construct
  source 1..20: mol_type = other RNA
cactgccccagcccaatagc

SEQ ID NO: 1481 - RNA, 20 nt, synthetic construct
  source 1..20: mol_type = other RNA
cactgcccggcacaaagtag

SEQ ID NO: 1482 - RNA, 20 nt, synthetic construct
  source 1..20: mol_type = other RNA
cactgcgcccacgaggccga

SEQ ID NO: 1483 - RNA, 20 nt, synthetic construct
  source 1..20: mol_type = other RNA
cactgcgggcgcggcagctg

SEQ ID NO: 1484 - RNA, 20 nt, synthetic construct
  source 1..20: mol_type = other RNA
cactggcatttgcccctctg

SEQ ID NO: 1485 - RNA, 20 nt, synthetic construct
  source 1..20: mol_type = other RNA
cacttcttctcagtcacagc

SEQ ID NO: 1486 - RNA, 20 nt, synthetic construct
  source 1..20: mol_type = other RNA
cagaaaagagaggcggccgg

SEQ ID NO: 1487 - RNA, 20 nt, synthetic construct
  source 1..20: mol_type = other RNA
cagaaagcgtggcacgccct

SEQ ID NO: 1488 - RNA, 20 nt, synthetic construct
  source 1..20: mol_type = other RNA
cagaacgcggtcaggtctct

SEQ ID NO: 1489 - RNA, 20 nt, synthetic construct
  source 1..20: mol_type = other RNA
cagaacggcagctggcccaa

SEQ ID NO: 1490 - RNA, 20 nt, synthetic construct
  source 1..20: mol_type = other RNA
cagaagaagctgctccgagg

SEQ ID NO: 1491 - RNA, 20 nt, synthetic construct
  source 1..20: mol_type = other RNA
cagaaggtgcttgcgaggta

SEQ ID NO: 1492 - RNA, 20 nt, synthetic construct
  source 1..20: mol_type = other RNA
cagacatcaaagtaccctac

SEQ ID NO: 1493 - RNA, 20 nt, synthetic construct
  source 1..20: mol_type = other RNA
cagacgtgaggacctgggcg

SEQ ID NO: 1494 - RNA, 20 nt, synthetic construct
  source 1..20: mol_type = other RNA
cagagaagacaaagtcgtac

SEQ ID NO: 1495 - RNA, 20 nt, synthetic construct
  source 1..20: mol_type = other RNA
cagagcaccaagacagagcc

SEQ ID NO: 1496 - RNA, 20 nt, synthetic construct
  source 1..20: mol_type = other RNA
cagagccagccacagggccc

SEQ ID NO: 1497 - RNA, 20 nt, synthetic construct
  source 1..20: mol_type = other RNA
cagagccctgacgctcctcc

SEQ ID NO: 1498 - RNA, 20 nt, synthetic construct
  source 1..20: mol_type = other RNA
cagagccggtggagcagttc

SEQ ID NO: 1499 - RNA, 20 nt, synthetic construct
  source 1..20: mol_type = other RNA
cagagcctgagcaaggccga

SEQ ID NO: 1500 - RNA, 20 nt, synthetic construct
  source 1..20: mol_type = other RNA
cagagctggccaagctggcc

SEQ ID NO: 1501 - RNA, 20 nt, synthetic construct
  source 1..20: mol_type = other RNA
cagaggccctgctggagctt

SEQ ID NO: 1502 - RNA, 20 nt, synthetic construct
  source 1..20: mol_type = other RNA
cagaggggcaaatgccagtg

SEQ ID NO: 1503 - RNA, 20 nt, synthetic construct
  source 1..20: mol_type = other RNA
cagagtccgagctggccttc

SEQ ID NO: 1504 - RNA, 20 nt, synthetic construct
  source 1..20: mol_type = other RNA
cagatccacctccactagga

SEQ ID NO: 1505 - RNA, 20 nt, synthetic construct
  source 1..20: mol_type = other RNA
cagatcctgcaggccatagg

SEQ ID NO: 1506 - RNA, 20 nt, synthetic construct
  source 1..20: mol_type = other RNA
cagcaagagcctggagcggg

SEQ ID NO: 1507 - RNA, 20 nt, synthetic construct
  source 1..20: mol_type = other RNA
cagcaatcactcgtgtctca

SEQ ID NO: 1508 - RNA, 20 nt, synthetic construct
  source 1..20: mol_type = other RNA
cagcacagcaatcactcgtg

SEQ ID NO: 1509 - RNA, 20 nt, synthetic construct
  source 1..20: mol_type = other RNA
cagcacctcagccaggcctc

SEQ ID NO: 1510 - RNA, 20 nt, synthetic construct
  source 1..20: mol_type = other RNA
cagcacgtgcggaccggcac

SEQ ID NO: 1511 - RNA, 20 nt, synthetic construct
  source 1..20: mol_type = other RNA
cagcacgtggtacaggagct

SEQ ID NO: 1512 - RNA, 20 nt, synthetic construct
  source 1..20: mol_type = other RNA
cagcactggcatttgcccct

SEQ ID NO: 1513 - RNA, 20 nt, synthetic construct
  source 1..20: mol_type = other RNA
cagcagcaagagcctggagc

SEQ ID NO: 1514 - RNA, 20 nt, synthetic construct
  source 1..20: mol_type = other RNA
cagcagcccccggagggagc

SEQ ID NO: 1515 - RNA, 20 nt, synthetic construct
  source 1..20: mol_type = other RNA
cagcagctccagcagctgcc

SEQ ID NO: 1516 - RNA, 20 nt, synthetic construct
  source 1..20: mol_type = other RNA
cagcagctgccgcgcccgca

SEQ ID NO: 1517 - RNA, 20 nt, synthetic construct
  source 1..20: mol_type = other RNA
cagcaggccgacatagagtc

SEQ ID NO: 1518 - RNA, 20 nt, synthetic construct
  source 1..20: mol_type = other RNA
cagcagggcctctgagagct

SEQ ID NO: 1519 - RNA, 20 nt, synthetic construct
  source 1..20: mol_type = other RNA
cagccaacagcacctcagcc

SEQ ID NO: 1520 - RNA, 20 nt, synthetic construct
  source 1..20: mol_type = other RNA
cagccacagccctactttgt

SEQ ID NO: 1521 - RNA, 20 nt, synthetic construct
  source 1..20: mol_type = other RNA
cagccacagggcccccagga

SEQ ID NO: 1522 - RNA, 20 nt, synthetic construct
  source 1..20: mol_type = other RNA
cagccacatcttgaagagac

SEQ ID NO: 1523 - RNA, 20 nt, synthetic construct
  source 1..20: mol_type = other RNA
cagccactcgtggcggccga

SEQ ID NO: 1524 - RNA, 20 nt, synthetic construct
  source 1..20: mol_type = other RNA
cagccagaaagcgtggcacg

SEQ ID NO: 1525 - RNA, 20 nt, synthetic construct
  source 1..20: mol_type = other RNA
cagccaggcctccttgggcc

SEQ ID NO: 1526 - RNA, 20 nt, synthetic construct
  source 1..20: mol_type = other RNA
cagccagttgtcatagggcc

SEQ ID NO: 1527 - RNA, 20 nt, synthetic construct
  source 1..20: mol_type = other RNA
cagcccaatagctcttgccc

SEQ ID NO: 1528 - RNA, 20 nt, synthetic construct
  source 1..20: mol_type = other RNA
cagcccagccagaaagcgtg

SEQ ID NO: 1529 - RNA, 20 nt, synthetic construct
  source 1..20: mol_type = other RNA
cagcccccggagggagcagg

SEQ ID NO: 1530 - RNA, 20 nt, synthetic construct
  source 1..20: mol_type = other RNA
cagccctactttgtgccggg

SEQ ID NO: 1531 - RNA, 20 nt, synthetic construct
  source 1..20: mol_type = other RNA
cagccgccgatggcccgagt

SEQ ID NO: 1532 - RNA, 20 nt, synthetic construct
  source 1..20: mol_type = other RNA
cagccgcttcaggtacctcg

SEQ ID NO: 1533 - RNA, 20 nt, synthetic construct
  source 1..20: mol_type = other RNA
cagccggggacactgcgggc

SEQ ID NO: 1534 - RNA, 20 nt, synthetic construct
  source 1..20: mol_type = other RNA
cagcctcccgcccgctgcct

SEQ ID NO: 1535 - RNA, 20 nt, synthetic construct
  source 1..20: mol_type = other RNA
cagcctcctcggcctcgtgg

SEQ ID NO: 1536 - RNA, 20 nt, synthetic construct
  source 1..20: mol_type = other RNA
cagcctggcctgcaccagat

SEQ ID NO: 1537 - RNA, 20 nt, synthetic construct
  source 1..20: mol_type = other RNA
cagcgggcgggaggctggaa

SEQ ID NO: 1538 - RNA, 20 nt, synthetic construct
  source 1..20: mol_type = other RNA
cagctcaaatagggcgtcgg

SEQ ID NO: 1539 - RNA, 20 nt, synthetic construct
  source 1..20: mol_type = other RNA
cagctccagcagctgccgcg

SEQ ID NO: 1540 - RNA, 20 nt, synthetic construct
  source 1..20: mol_type = other RNA
cagctcccaggccagcttgg

SEQ ID NO: 1541 - RNA, 20 nt, synthetic construct
  source 1..20: mol_type = other RNA
cagctcctcgaagccgtcta

SEQ ID NO: 1542 - RNA, 20 nt, synthetic construct
  source 1..20: mol_type = other RNA
cagctcggactctgcggccc

SEQ ID NO: 1543 - RNA, 20 nt, synthetic construct
  source 1..20: mol_type = other RNA
cagctctcagaggccctgct

SEQ ID NO: 1544 - RNA, 20 nt, synthetic construct
  source 1..20: mol_type = other RNA
cagctctgccagggccccgg

SEQ ID NO: 1545 - RNA, 20 nt, synthetic construct
  source 1..20: mol_type = other RNA
cagctgagtcccacgaggct

SEQ ID NO: 1546 - RNA, 20 nt, synthetic construct
  source 1..20: mol_type = other RNA
cagctgccgcgcccgcagtg

SEQ ID NO: 1547 - RNA, 20 nt, synthetic construct
  source 1..20: mol_type = other RNA
cagctgccgttctgcccagt

SEQ ID NO: 1548 - RNA, 20 nt, synthetic construct
  source 1..20: mol_type = other RNA
cagctgctggagctgctgca

SEQ ID NO: 1549 - RNA, 20 nt, synthetic construct
  source 1..20: mol_type = other RNA
cagctggcccaaggaggcct

SEQ ID NO: 1550 - RNA, 20 nt, synthetic construct
  source 1..20: mol_type = other RNA
cagctgtgtcacccgtttca

SEQ ID NO: 1551 - RNA, 20 nt, synthetic construct
  source 1..20: mol_type = other RNA
cagcttcctcctgcaatgct

SEQ ID NO: 1552 - RNA, 20 nt, synthetic construct
  source 1..20: mol_type = other RNA
cagcttcttctggaaaaggc

SEQ ID NO: 1553 - RNA, 20 nt, synthetic construct
  source 1..20: mol_type = other RNA
cagcttggccagctctgcca

SEQ ID NO: 1554 - RNA, 20 nt, synthetic construct
  source 1..20: mol_type = other RNA
cagcttggcgtcctccccaa

SEQ ID NO: 1555 - RNA, 20 nt, synthetic construct
  source 1..20: mol_type = other RNA
cagctttgcccagcacagca

SEQ ID NO: 1556 - RNA, 20 nt, synthetic construct
  source 1..20: mol_type = other RNA
caggaagcagaaggtgcttg

SEQ ID NO: 1557 - RNA, 20 nt, synthetic construct
  source 1..20: mol_type = other RNA
caggaagcattgcaggagga

SEQ ID NO: 1558 - RNA, 20 nt, synthetic construct
  source 1..20: mol_type = other RNA
caggaagccatcttgcgctt

SEQ ID NO: 1559 - RNA, 20 nt, synthetic construct
  source 1..20: mol_type = other RNA
caggacacgtatggtgccga

SEQ ID NO: 1560 - RNA, 20 nt, synthetic construct
  source 1..20: mol_type = other RNA
caggagctccccggccgcct

SEQ ID NO: 1561 - RNA, 20 nt, synthetic construct
  source 1..20: mol_type = other RNA
caggaggaagctggggaagg

SEQ ID NO: 1562 - RNA, 20 nt, synthetic construct
  source 1..20: mol_type = other RNA
caggaggaccagttcccatc

SEQ ID NO: 1563 - RNA, 20 nt, synthetic construct
  source 1..20: mol_type = other RNA
caggaggcgtgaggcgggtg

SEQ ID NO: 1564 - RNA, 20 nt, synthetic construct
  source 1..20: mol_type = other RNA
caggatctgctcttctccct

SEQ ID NO: 1565 - RNA, 20 nt, synthetic construct
  source 1..20: mol_type = other RNA
caggcagcgggcgggaggct

SEQ ID NO: 1566 - RNA, 20 nt, synthetic construct
  source 1..20: mol_type = other RNA
caggcatacgtgatgcgcta

SEQ ID NO: 1567 - RNA, 20 nt, synthetic construct
  source 1..20: mol_type = other RNA
caggccagcttggccagctc

SEQ ID NO: 1568 - RNA, 20 nt, synthetic construct
  source 1..20: mol_type = other RNA
caggccaggctggagaggag

SEQ ID NO: 1569 - RNA, 20 nt, synthetic construct
  source 1..20: mol_type = other RNA
caggccataggcatcccccg

SEQ ID NO: 1570 - RNA, 20 nt, synthetic construct
  source 1..20: mol_type = other RNA
caggcccaggcatacgtgat

SEQ ID NO: 1571 - RNA, 20 nt, synthetic construct
  source 1..20: mol_type = other RNA
caggcccggatggcatccta

SEQ ID NO: 1572 - RNA, 20 nt, synthetic construct
  source 1..20: mol_type = other RNA
caggcccggctcactgcccc

SEQ ID NO: 1573 - RNA, 20 nt, synthetic construct
  source 1..20: mol_type = other RNA
caggccgacatagagtcccg

SEQ ID NO: 1574 - RNA, 20 nt, synthetic construct
  source 1..20: mol_type = other RNA
caggcctccttgggccagct

SEQ ID NO: 1575 - RNA, 20 nt, synthetic construct
  source 1..20: mol_type = other RNA
caggctctggaccaggcggc

SEQ ID NO: 1576 - RNA, 20 nt, synthetic construct
  source 1..20: mol_type = other RNA
caggctcttgctgctgctcc

SEQ ID NO: 1577 - RNA, 20 nt, synthetic construct
  source 1..20: mol_type = other RNA
caggctggagaggagcagca

SEQ ID NO: 1578 - RNA, 20 nt, synthetic construct
  source 1..20: mol_type = other RNA
cagggagaagagcagatcct

SEQ ID NO: 1579 - RNA, 20 nt, synthetic construct
  source 1..20: mol_type = other RNA
cagggagaagtcttggcccg

SEQ ID NO: 1580 - RNA, 20 nt, synthetic construct
  source 1..20: mol_type = other RNA
cagggatgacagagcaccaa

SEQ ID NO: 1581 - RNA, 20 nt, synthetic construct
  source 1..20: mol_type = other RNA
cagggcaagagctattgggc

SEQ ID NO: 1582 - RNA, 20 nt, synthetic construct
  source 1..20: mol_type = other RNA
cagggcccccaggaagcatt

SEQ ID NO: 1583 - RNA, 20 nt, synthetic construct
  source 1..20: mol_type = other RNA
cagggcctctgagagctggc

SEQ ID NO: 1584 - RNA, 20 nt, synthetic construct
  source 1..20: mol_type = other RNA
cagggctctgtcttggtgct

SEQ ID NO: 1585 - RNA, 20 nt, synthetic construct
  source 1..20: mol_type = other RNA
caggggacagagaagacaaa

SEQ ID NO: 1586 - RNA, 20 nt, synthetic construct
  source 1..20: mol_type = other RNA
caggggcgtgtcagggtggg

SEQ ID NO: 1587 - RNA, 20 nt, synthetic construct
  source 1..20: mol_type = other RNA
caggtacctcgcaagcacct

SEQ ID NO: 1588 - RNA, 20 nt, synthetic construct
  source 1..20: mol_type = other RNA
caggtcctcacgtctgcgga

SEQ ID NO: 1589 - RNA, 20 nt, synthetic construct
  source 1..20: mol_type = other RNA
caggtctcttcaagatgtgg

SEQ ID NO: 1590 - RNA, 20 nt, synthetic construct
  source 1..20: mol_type = other RNA
caggtggggtgaggggcttg

SEQ ID NO: 1591 - RNA, 20 nt, synthetic construct
  source 1..20: mol_type = other RNA
cagtacatgtgcatcaggag

SEQ ID NO: 1592 - RNA, 20 nt, synthetic construct
  source 1..20: mol_type = other RNA
cagtacctagcattgacccc

SEQ ID NO: 1593 - RNA, 20 nt, synthetic construct
  source 1..20: mol_type = other RNA
cagtacgactttgtcttctc

SEQ ID NO: 1594 - RNA, 20 nt, synthetic construct
  source 1..20: mol_type = other RNA
cagtcacagccacagcccta

SEQ ID NO: 1595 - RNA, 20 nt, synthetic construct
  source 1..20: mol_type = other RNA
cagtccggggtggccagttc

SEQ ID NO: 1596 - RNA, 20 nt, synthetic construct
  source 1..20: mol_type = other RNA
cagtgagccgggcctgggct

SEQ ID NO: 1597 - RNA, 20 nt, synthetic construct
  source 1..20: mol_type = other RNA
cagtgagcggtagaactgct

SEQ ID NO: 1598 - RNA, 20 nt, synthetic construct
  source 1..20: mol_type = other RNA
cagtgcagcagctccagcag

SEQ ID NO: 1599 - RNA, 20 nt, synthetic construct
  source 1..20: mol_type = other RNA
cagtgctgcggaggtccagg

SEQ ID NO: 1600 - RNA, 20 nt, synthetic construct
  source 1..20: mol_type = other RNA
cagtgtccccggctgcagcc

SEQ ID NO: 1601 - RNA, 20 nt, synthetic construct
  source 1..20: mol_type = other RNA
cagtgtgccagctctcagag

SEQ ID NO: 1602 - RNA, 20 nt, synthetic construct
  source 1..20: mol_type = other RNA
cagttcccatccgcagacgt

SEQ ID NO: 1603 - RNA, 20 nt, synthetic construct
  source 1..20: mol_type = other RNA
cagttcccgctccaggctct

SEQ ID NO: 1604 - RNA, 20 nt, synthetic construct
  source 1..20: mol_type = other RNA
cagttctaccgctcactgca

SEQ ID NO: 1605 - RNA, 20 nt, synthetic construct
  source 1..20: mol_type = other RNA
cagttgtcatagggcctctt

SEQ ID NO: 1606 - RNA, 20 nt, synthetic construct
  source 1..20: mol_type = other RNA
catacccccaccctgacacg

SEQ ID NO: 1607 - RNA, 20 nt, synthetic construct
  source 1..20: mol_type = other RNA
catacgtgatgcgctacttt

SEQ ID NO: 1608 - RNA, 20 nt, synthetic construct
  source 1..20: mol_type = other RNA
catacgtgtcctgcagtgag

SEQ ID NO: 1609 - RNA, 20 nt, synthetic construct
  source 1..20: mol_type = other RNA
catagagtcccgtgagcgtg

SEQ ID NO: 1610 - RNA, 20 nt, synthetic construct
  source 1..20: mol_type = other RNA
cataggcatcccccggacgg

SEQ ID NO: 1611 - RNA, 20 nt, synthetic construct
  source 1..20: mol_type = other RNA
catagggcctcttcttcctt

SEQ ID NO: 1612 - RNA, 20 nt, synthetic construct
  source 1..20: mol_type = other RNA
catcaaagtaccctacagga

SEQ ID NO: 1613 - RNA, 20 nt, synthetic construct
  source 1..20: mol_type = other RNA
catcacgtatgcctgggcct

SEQ ID NO: 1614 - RNA, 20 nt, synthetic construct
  source 1..20: mol_type = other RNA
catcaggaggcgtgaggcgg

SEQ ID NO: 1615 - RNA, 20 nt, synthetic construct
  source 1..20: mol_type = other RNA
catcccccggacggttcaag

SEQ ID NO: 1616 - RNA, 20 nt, synthetic construct
  source 1..20: mol_type = other RNA
catccctgagctctcaaagt

SEQ ID NO: 1617 - RNA, 20 nt, synthetic construct
  source 1..20: mol_type = other RNA
catccgcagacgtgaggacc

SEQ ID NO: 1618 - RNA, 20 nt, synthetic construct
  source 1..20: mol_type = other RNA
catccgggcctgcgggctcg

SEQ ID NO: 1619 - RNA, 20 nt, synthetic construct
  source 1..20: mol_type = other RNA
catcctagacggcttcgagg

SEQ ID NO: 1620 - RNA, 20 nt, synthetic construct
  source 1..20: mol_type = other RNA
catcctagtggaggtggatc

SEQ ID NO: 1621 - RNA, 20 nt, synthetic construct
  source 1..20: mol_type = other RNA
catcgcccaggtcctcacgt

SEQ ID NO: 1622 - RNA, 20 nt, synthetic construct
  source 1..20: mol_type = other RNA
catcggccgccacgagtggc

SEQ ID NO: 1623 - RNA, 20 nt, synthetic construct
  source 1..20: mol_type = other RNA
catcggcggctgcctcggtg

SEQ ID NO: 1624 - RNA, 20 nt, synthetic construct
  source 1..20: mol_type = other RNA
catcttgaagagacctgacc

SEQ ID NO: 1625 - RNA, 20 nt, synthetic construct
  source 1..20: mol_type = other RNA
catcttgcgcttccagctcc

SEQ ID NO: 1626 - RNA, 20 nt, synthetic construct
  source 1..20: mol_type = other RNA
catggagaagccggacagct

SEQ ID NO: 1627 - RNA, 20 nt, synthetic construct
  source 1..20: mol_type = other RNA
catggagcaggcccaggcat

SEQ ID NO: 1628 - RNA, 20 nt, synthetic construct
  source 1..20: mol_type = other RNA
catgtactgggcaaggcctt

SEQ ID NO: 1629 - RNA, 20 nt, synthetic construct
  source 1..20: mol_type = other RNA
catgtgcatcaggaggcgtg

SEQ ID NO: 1630 - RNA, 20 nt, synthetic construct
  source 1..20: mol_type = other RNA
cattgaccccaaggaagaag

SEQ ID NO: 1631 - RNA, 20 nt, synthetic construct
  source 1..20: mol_type = other RNA
cattgcaggaggaagctggg

SEQ ID NO: 1632 - RNA, 20 nt, synthetic construct
  source 1..20: mol_type = other RNA
cattgcttgaaccgtccggg

SEQ ID NO: 1633 - RNA, 20 nt, synthetic construct
  source 1..20: mol_type = other RNA
catttgcccctctggattgg

SEQ ID NO: 1634 - RNA, 20 nt, synthetic construct
  source 1..20: mol_type = other RNA
ccaaaggcttagtccaacac

SEQ ID NO: 1635 - RNA, 20 nt, synthetic construct
  source 1..20: mol_type = other RNA
ccaaattccagcctcctcgg

SEQ ID NO: 1636 - RNA, 20 nt, synthetic construct
  source 1..20: mol_type = other RNA
ccaacacaaggatgtctctt

SEQ ID NO: 1637 - RNA, 20 nt, synthetic construct
  source 1..20: mol_type = other RNA
ccaacacccaccgcgggccg

SEQ ID NO: 1638 - RNA, 20 nt, synthetic construct
  source 1..20: mol_type = other RNA
ccaacagcacctcagccagg

SEQ ID NO: 1639 - RNA, 20 nt, synthetic construct
  source 1..20: mol_type = other RNA
ccaagacagagccctgacgc

SEQ ID NO: 1640 - RNA, 20 nt, synthetic construct
  source 1..20: mol_type = other RNA
ccaagacttctccctggacc

SEQ ID NO: 1641 - RNA, 20 nt, synthetic construct
  source 1..20: mol_type = other RNA
ccaagcccctcaccccacct

SEQ ID NO: 1642 - RNA, 20 nt, synthetic construct
  source 1..20: mol_type = other RNA
ccaagctccagcagggcctc

SEQ ID NO: 1643 - RNA, 20 nt, synthetic construct
  source 1..20: mol_type = other RNA
ccaagctgccctccacgctc

SEQ ID NO: 1644 - RNA, 20 nt, synthetic construct
  source 1..20: mol_type = other RNA
ccaagctggcctgggagctg

SEQ ID NO: 1645 - RNA, 20 nt, synthetic construct
  source 1..20: mol_type = other RNA
ccaaggaagaagaggcccta

SEQ ID NO: 1646 - RNA, 20 nt, synthetic construct
  source 1..20: mol_type = other RNA
ccaaggagcaccggcggccg

SEQ ID NO: 1647 - RNA, 20 nt, synthetic construct
  source 1..20: mol_type = other RNA
ccaaggaggcctggctgagg

SEQ ID NO: 1648 - RNA, 20 nt, synthetic construct
  source 1..20: mol_type = other RNA
ccaaggccttgcccagtaca

SEQ ID NO: 1649 - RNA, 20 nt, synthetic construct
  source 1..20: mol_type = other RNA
ccaatagctcttgccctgac

SEQ ID NO: 1650 - RNA, 20 nt, synthetic construct
  source 1..20: mol_type = other RNA
ccaatccagaggggcaaatg

SEQ ID NO: 1651 - RNA, 20 nt, synthetic construct
  source 1..20: mol_type = other RNA
ccacaagcccaggcccggct

SEQ ID NO: 1652 - RNA, 20 nt, synthetic construct
  source 1..20: mol_type = other RNA
ccacagccactcgtggcggc

SEQ ID NO: 1653 - RNA, 20 nt, synthetic construct
  source 1..20: mol_type = other RNA
ccacagccctactttgtgcc

SEQ ID NO: 1654 - RNA, 20 nt, synthetic construct
  source 1..20: mol_type = other RNA
ccacagggcccccaggaagc

SEQ ID NO: 1655 - RNA, 20 nt, synthetic construct
  source 1..20: mol_type = other RNA
ccacatcttgaagagacctg

SEQ ID NO: 1656 - RNA, 20 nt, synthetic construct
  source 1..20: mol_type = other RNA
ccaccccggactgggcagaa

SEQ ID NO: 1657 - RNA, 20 nt, synthetic construct
  source 1..20: mol_type = other RNA
ccaccctgacacgcccctgg

SEQ ID NO: 1658 - RNA, 20 nt, synthetic construct
  source 1..20: mol_type = other RNA
ccaccgaggcagccgccgat

SEQ ID NO: 1659 - RNA, 20 nt, synthetic construct
  source 1..20: mol_type = other RNA
ccaccgcgggccgcagagtc

SEQ ID NO: 1660 - RNA, 20 nt, synthetic construct
  source 1..20: mol_type = other RNA
ccaccggctctgcaaaggcc

SEQ ID NO: 1661 - RNA, 20 nt, synthetic construct
  source 1..20: mol_type = other RNA
ccacctccactaggatgcca

SEQ ID NO: 1662 - RNA, 20 nt, synthetic construct
  source 1..20: mol_type = other RNA
ccacctgaaacgggtgacac

SEQ ID NO: 1663 - RNA, 20 nt, synthetic construct
  source 1..20: mol_type = other RNA
ccacgaggccgaggaggctg

SEQ ID NO: 1664 - RNA, 20 nt, synthetic construct
  source 1..20: mol_type = other RNA
ccacgaggctccccaatcca

SEQ ID NO: 1665 - RNA, 20 nt, synthetic construct
  source 1..20: mol_type = other RNA
ccacgagtggctgtgggccc

SEQ ID NO: 1666 - RNA, 20 nt, synthetic construct
  source 1..20: mol_type = other RNA
ccacgctcacgggactctat

SEQ ID NO: 1667 - RNA, 20 nt, synthetic construct
  source 1..20: mol_type = other RNA
ccacgctttctggctgggct

SEQ ID NO: 1668 - RNA, 20 nt, synthetic construct
  source 1..20: mol_type = other RNA
ccacgtgctgccaaattcca

SEQ ID NO: 1669 - RNA, 20 nt, synthetic construct
  source 1..20: mol_type = other RNA
ccactaggatgccatccggg

SEQ ID NO: 1670 - RNA, 20 nt, synthetic construct
  source 1..20: mol_type = other RNA
ccactcagagccagccacag

SEQ ID NO: 1671 - RNA, 20 nt, synthetic construct
  source 1..20: mol_type = other RNA
ccactcgtggcggccgatga

SEQ ID NO: 1672 - RNA, 20 nt, synthetic construct
  source 1..20: mol_type = other RNA
ccacttcttctcagtcacag

SEQ ID NO: 1673 - RNA, 20 nt, synthetic construct
  source 1..20: mol_type = other RNA
ccagaaaagagaggcggccg

SEQ ID NO: 1674 - RNA, 20 nt, synthetic construct
  source 1..20: mol_type = other RNA
ccagaaagcgtggcacgccc

SEQ ID NO: 1675 - RNA, 20 nt, synthetic construct
  source 1..20: mol_type = other RNA
ccagaagaagctgctccgag

SEQ ID NO: 1676 - RNA, 20 nt, synthetic construct
  source 1..20: mol_type = other RNA
ccagagcctgagcaaggccg

SEQ ID NO: 1677 - RNA, 20 nt, synthetic construct
  source 1..20: mol_type = other RNA
ccagaggggcaaatgccagt

SEQ ID NO: 1678 - RNA, 20 nt, synthetic construct
  source 1..20: mol_type = other RNA
ccagatccacctccactagg

SEQ ID NO: 1679 - RNA, 20 nt, synthetic construct
  source 1..20: mol_type = other RNA
ccagcacagcaatcactcgt

SEQ ID NO: 1680 - RNA, 20 nt, synthetic construct
  source 1..20: mol_type = other RNA
ccagcagcccccggagggag

SEQ ID NO: 1681 - RNA, 20 nt, synthetic construct
  source 1..20: mol_type = other RNA
ccagcaggccgacatagagt

SEQ ID NO: 1682 - RNA, 20 nt, synthetic construct
  source 1..20: mol_type = other RNA
ccagcagggcctctgagagc

SEQ ID NO: 1683 - RNA, 20 nt, synthetic construct
  source 1..20: mol_type = other RNA
ccagccacagggcccccagg

SEQ ID NO: 1684 - RNA, 20 nt, synthetic construct
  source 1..20: mol_type = other RNA
ccagccagaaagcgtggcac

SEQ ID NO: 1685 - RNA, 20 nt, synthetic construct
  source 1..20: mol_type = other RNA
ccagccagttgtcatagggc

SEQ ID NO: 1686 - RNA, 20 nt, synthetic construct
  source 1..20: mol_type = other RNA
ccagcccaatagctcttgcc

SEQ ID NO: 1687 - RNA, 20 nt, synthetic construct
  source 1..20: mol_type = other RNA
ccagcctcctcggcctcgtg

SEQ ID NO: 1688 - RNA, 20 nt, synthetic construct
  source 1..20: mol_type = other RNA
ccagcctggcctgcaccaga

SEQ ID NO: 1689 - RNA, 20 nt, synthetic construct
  source 1..20: mol_type = other RNA
ccagctcccaggccagcttg

SEQ ID NO: 1690 - RNA, 20 nt, synthetic construct
  source 1..20: mol_type = other RNA
ccagctcctcgaagccgtct

SEQ ID NO: 1691 - RNA, 20 nt, synthetic construct
  source 1..20: mol_type = other RNA
ccagctcggactctgcggcc

SEQ ID NO: 1692 - RNA, 20 nt, synthetic construct
  source 1..20: mol_type = other RNA
ccagctctcagaggccctgc

SEQ ID NO: 1693 - RNA, 20 nt, synthetic construct
  source 1..20: mol_type = other RNA
ccagctctgccagggccccg

SEQ ID NO: 1694 - RNA, 20 nt, synthetic construct
  source 1..20: mol_type = other RNA
ccagctgccgttctgcccag

SEQ ID NO: 1695 - RNA, 20 nt, synthetic construct
  source 1..20: mol_type = other RNA
ccagcttcctcctgcaatgc

SEQ ID NO: 1696 - RNA, 20 nt, synthetic construct
  source 1..20: mol_type = other RNA
ccagcttggccagctctgcc

SEQ ID NO: 1697 - RNA, 20 nt, synthetic construct
  source 1..20: mol_type = other RNA
ccagctttgcccagcacagc

SEQ ID NO: 1698 - RNA, 20 nt, synthetic construct
  source 1..20: mol_type = other RNA
ccaggaagcattgcaggagg

SEQ ID NO: 1699 - RNA, 20 nt, synthetic construct
  source 1..20: mol_type = other RNA
ccaggcatacgtgatgcgct

SEQ ID NO: 1700 - RNA, 20 nt, synthetic construct
  source 1..20: mol_type = other RNA
ccaggccagcttggccagct

SEQ ID NO: 1701 - RNA, 20 nt, synthetic construct
  source 1..20: mol_type = other RNA
ccaggcccggctcactgccc

SEQ ID NO: 1702 - RNA, 20 nt, synthetic construct
  source 1..20: mol_type = other RNA
ccaggcctccttgggccagc

SEQ ID NO: 1703 - RNA, 20 nt, synthetic construct
  source 1..20: mol_type = other RNA
ccaggctcttgctgctgctc

SEQ ID NO: 1704 - RNA, 20 nt, synthetic construct
  source 1..20: mol_type = other RNA
ccaggctggagaggagcagc

SEQ ID NO: 1705 - RNA, 20 nt, synthetic construct
  source 1..20: mol_type = other RNA
ccagggagaagagcagatcc

SEQ ID NO: 1706 - RNA, 20 nt, synthetic construct
  source 1..20: mol_type = other RNA
ccagggagaagtcttggccc

SEQ ID NO: 1707 - RNA, 20 nt, synthetic construct
  source 1..20: mol_type = other RNA
ccaggggcgtgtcagggtgg

SEQ ID NO: 1708 - RNA, 20 nt, synthetic construct
  source 1..20: mol_type = other RNA
ccaggtcctcacgtctgcgg

SEQ ID NO: 1709 - RNA, 20 nt, synthetic construct
  source 1..20: mol_type = other RNA
ccagtacatgtgcatcagga

SEQ ID NO: 1710 - RNA, 20 nt, synthetic construct
  source 1..20: mol_type = other RNA
ccagtacgactttgtcttct

SEQ ID NO: 1711 - RNA, 20 nt, synthetic construct
  source 1..20: mol_type = other RNA
ccagtccggggtggccagtt

SEQ ID NO: 1712 - RNA, 20 nt, synthetic construct
  source 1..20: mol_type = other RNA
ccagtgctgcggaggtccag

SEQ ID NO: 1713 - RNA, 20 nt, synthetic construct
  source 1..20: mol_type = other RNA
ccagttcccatccgcagacg

SEQ ID NO: 1714 - RNA, 20 nt, synthetic construct
  source 1..20: mol_type = other RNA
ccagttcccgctccaggctc

SEQ ID NO: 1715 - RNA, 20 nt, synthetic construct
  source 1..20: mol_type = other RNA
ccagttgtcatagggcctct

SEQ ID NO: 1716 - RNA, 20 nt, synthetic construct
  source 1..20: mol_type = other RNA
ccatacgtgtcctgcagtga

SEQ ID NO: 1717 - RNA, 20 nt, synthetic construct
  source 1..20: mol_type = other RNA
ccataggcatcccccggacg

SEQ ID NO: 1718 - RNA, 20 nt, synthetic construct
  source 1..20: mol_type = other RNA
ccatccgcagacgtgaggac

SEQ ID NO: 1719 - RNA, 20 nt, synthetic construct
  source 1..20: mol_type = other RNA
ccatccgggcctgcgggctc

SEQ ID NO: 1720 - RNA, 20 nt, synthetic construct
  source 1..20: mol_type = other RNA
ccatcgcccaggtcctcacg

SEQ ID NO: 1721 - RNA, 20 nt, synthetic construct
  source 1..20: mol_type = other RNA
ccatcggcggctgcctcggt

SEQ ID NO: 1722 - RNA, 20 nt, synthetic construct
  source 1..20: mol_type = other RNA
ccatcttgcgcttccagctc

SEQ ID NO: 1723 - RNA, 20 nt, synthetic construct
  source 1..20: mol_type = other RNA
ccatggagaagccggacagc

SEQ ID NO: 1724 - RNA, 20 nt, synthetic construct
  source 1..20: mol_type = other RNA
ccatggagcaggcccaggca

SEQ ID NO: 1725 - RNA, 20 nt, synthetic construct
  source 1..20: mol_type = other RNA
ccattgcttgaaccgtccgg

SEQ ID NO: 1726 - RNA, 20 nt, synthetic construct
  source 1..20: mol_type = other RNA
cccaacacaaggatgtctct

SEQ ID NO: 1727 - RNA, 20 nt, synthetic construct
  source 1..20: mol_type = other RNA
cccaagcccctcaccccacc

SEQ ID NO: 1728 - RNA, 20 nt, synthetic construct
  source 1..20: mol_type = other RNA
cccaagctccagcagggcct

SEQ ID NO: 1729 - RNA, 20 nt, synthetic construct
  source 1..20: mol_type = other RNA
cccaaggaagaagaggccct

SEQ ID NO: 1730 - RNA, 20 nt, synthetic construct
  source 1..20: mol_type = other RNA
cccaaggaggcctggctgag

SEQ ID NO: 1731 - RNA, 20 nt, synthetic construct
  source 1..20: mol_type = other RNA
cccaatagctcttgccctga

SEQ ID NO: 1732 - RNA, 20 nt, synthetic construct
  source 1..20: mol_type = other RNA
cccaatccagaggggcaaat

SEQ ID NO: 1733 - RNA, 20 nt, synthetic construct
  source 1..20: mol_type = other RNA
cccacagccactcgtggcgg

SEQ ID NO: 1734 - RNA, 20 nt, synthetic construct
  source 1..20: mol_type = other RNA
cccaccctgacacgcccctg

SEQ ID NO: 1735 - RNA, 20 nt, synthetic construct
  source 1..20: mol_type = other RNA
cccaccgcgggccgcagagt

SEQ ID NO: 1736 - RNA, 20 nt, synthetic construct
  source 1..20: mol_type = other RNA
cccacctgaaacgggtgaca

SEQ ID NO: 1737 - RNA, 20 nt, synthetic construct
  source 1..20: mol_type = other RNA
cccacgaggccgaggaggct

SEQ ID NO: 1738 - RNA, 20 nt, synthetic construct
  source 1..20: mol_type = other RNA
cccacgaggctccccaatcc

SEQ ID NO: 1739 - RNA, 20 nt, synthetic construct
  source 1..20: mol_type = other RNA
cccagaaaagagaggcggcc

SEQ ID NO: 1740 - RNA, 20 nt, synthetic construct
  source 1..20: mol_type = other RNA
cccagcacagcaatcactcg

SEQ ID NO: 1741 - RNA, 20 nt, synthetic construct
  source 1..20: mol_type = other RNA
cccagcaggccgacatagag

SEQ ID NO: 1742 - RNA, 20 nt, synthetic construct
  source 1..20: mol_type = other RNA
cccagccagaaagcgtggca

SEQ ID NO: 1743 - RNA, 20 nt, synthetic construct
  source 1..20: mol_type = other RNA
cccagcccaatagctcttgc

SEQ ID NO: 1744 - RNA, 20 nt, synthetic construct
  source 1..20: mol_type = other RNA
cccagctcccaggccagctt

SEQ ID NO: 1745 - RNA, 20 nt, synthetic construct
  source 1..20: mol_type = other RNA
cccagcttcctcctgcaatg

SEQ ID NO: 1746 - RNA, 20 nt, synthetic construct
  source 1..20: mol_type = other RNA
cccaggaagcattgcaggag

SEQ ID NO: 1747 - RNA, 20 nt, synthetic construct
  source 1..20: mol_type = other RNA
cccaggcatacgtgatgcgc

SEQ ID NO: 1748 - RNA, 20 nt, synthetic construct
  source 1..20: mol_type = other RNA
cccaggccagcttggccagc

SEQ ID NO: 1749 - RNA, 20 nt, synthetic construct
  source 1..20: mol_type = other RNA
cccaggcccggctcactgcc

SEQ ID NO: 1750 - RNA, 20 nt, synthetic construct
  source 1..20: mol_type = other RNA
cccagggagaagagcagatc

SEQ ID NO: 1751 - RNA, 20 nt, synthetic construct
  source 1..20: mol_type = other RNA
cccaggtcctcacgtctgcg

SEQ ID NO: 1752 - RNA, 20 nt, synthetic construct
  source 1..20: mol_type = other RNA
cccagtacatgtgcatcagg

SEQ ID NO: 1753 - RNA, 20 nt, synthetic construct
  source 1..20: mol_type = other RNA
cccagtacgactttgtcttc

SEQ ID NO: 1754 - RNA, 20 nt, synthetic construct
  source 1..20: mol_type = other RNA
cccagtccggggtggccagt

SEQ ID NO: 1755 - RNA, 20 nt, synthetic construct
  source 1..20: mol_type = other RNA
cccatccgcagacgtgagga

SEQ ID NO: 1756 - RNA, 20 nt, synthetic construct
  source 1..20: mol_type = other RNA
ccccaagcccctcaccccac

SEQ ID NO: 1757 - RNA, 20 nt, synthetic construct
  source 1..20: mol_type = other RNA
ccccaagctccagcagggcc

SEQ ID NO: 1758 - RNA, 20 nt, synthetic construct
  source 1..20: mol_type = other RNA
ccccaaggaagaagaggccc

SEQ ID NO: 1759 - RNA, 20 nt, synthetic construct
  source 1..20: mol_type = other RNA
ccccaatccagaggggcaaa

SEQ ID NO: 1760 - RNA, 20 nt, synthetic construct
  source 1..20: mol_type = other RNA
ccccaccctgacacgcccct

SEQ ID NO: 1761 - RNA, 20 nt, synthetic construct
  source 1..20: mol_type = other RNA
ccccacctgaaacgggtgac

SEQ ID NO: 1762 - RNA, 20 nt, synthetic construct
  source 1..20: mol_type = other RNA
ccccagcccaatagctcttg

SEQ ID NO: 1763 - RNA, 20 nt, synthetic construct
  source 1..20: mol_type = other RNA
ccccagcttcctcctgcaat

SEQ ID NO: 1764 - RNA, 20 nt, synthetic construct
  source 1..20: mol_type = other RNA
ccccaggaagcattgcagga

SEQ ID NO: 1765 - RNA, 20 nt, synthetic construct
  source 1..20: mol_type = other RNA
ccccagtacgactttgtctt

SEQ ID NO: 1766 - RNA, 20 nt, synthetic construct
  source 1..20: mol_type = other RNA
cccccaccctgacacgcccc

SEQ ID NO: 1767 - RNA, 20 nt, synthetic construct
  source 1..20: mol_type = other RNA
cccccaggaagcattgcagg

SEQ ID NO: 1768 - RNA, 20 nt, synthetic construct
  source 1..20: mol_type = other RNA
cccccggacggttcaagcaa

SEQ ID NO: 1769 - RNA, 20 nt, synthetic construct
  source 1..20: mol_type = other RNA
cccccggagggagcagggct

SEQ ID NO: 1770 - RNA, 20 nt, synthetic construct
  source 1..20: mol_type = other RNA
ccccggacggttcaagcaat

SEQ ID NO: 1771 - RNA, 20 nt, synthetic construct
  source 1..20: mol_type = other RNA
ccccggactgggcagaacgg

SEQ ID NO: 1772 - RNA, 20 nt, synthetic construct
  source 1..20: mol_type = other RNA
ccccggagggagcagggctc

SEQ ID NO: 1773 - RNA, 20 nt, synthetic construct
  source 1..20: mol_type = other RNA
ccccggccgcctctcttttc

SEQ ID NO: 1774 - RNA, 20 nt, synthetic construct
  source 1..20: mol_type = other RNA
ccccggctgcagccgcttca

SEQ ID NO: 1775 - RNA, 20 nt, synthetic construct
  source 1..20: mol_type = other RNA
cccctcaccccacctgaaac

SEQ ID NO: 1776 - RNA, 20 nt, synthetic construct
  source 1..20: mol_type = other RNA
cccctctggattggggagcc

SEQ ID NO: 1777 - RNA, 20 nt, synthetic construct
  source 1..20: mol_type = other RNA
cccctgccattgcttgaacc

SEQ ID NO: 1778 - RNA, 20 nt, synthetic construct
  source 1..20: mol_type = other RNA
cccctggcctttgcagagcc

SEQ ID NO: 1779 - RNA, 20 nt, synthetic construct
  source 1..20: mol_type = other RNA
cccgagtagggctcccaggc

SEQ ID NO: 1780 - RNA, 20 nt, synthetic construct
  source 1..20: mol_type = other RNA
cccgcaggcccggatggcat

SEQ ID NO: 1781 - RNA, 20 nt, synthetic construct
  source 1..20: mol_type = other RNA
cccgcagtacctagcattga

SEQ ID NO: 1782 - RNA, 20 nt, synthetic construct
  source 1..20: mol_type = other RNA
cccgcagtgtccccggctgc

SEQ ID NO: 1783 - RNA, 20 nt, synthetic construct
  source 1..20: mol_type = other RNA
cccgccgcctccaaggcctt

SEQ ID NO: 1784 - RNA, 20 nt, synthetic construct
  source 1..20: mol_type = other RNA
cccgcctcacgcctcctgat

SEQ ID NO: 1785 - RNA, 20 nt, synthetic construct
  source 1..20: mol_type = other RNA
cccgcggtgggtgttggact

SEQ ID NO: 1786 - RNA, 20 nt, synthetic construct
  source 1..20: mol_type = other RNA
cccgctccaggctcttgctg

SEQ ID NO: 1787 - RNA, 20 nt, synthetic construct
  source 1..20: mol_type = other RNA
cccgctgcctgggagcccta

SEQ ID NO: 1788 - RNA, 20 nt, synthetic construct
  source 1..20: mol_type = other RNA
cccggacggttcaagcaatg

SEQ ID NO: 1789 - RNA, 20 nt, synthetic construct
  source 1..20: mol_type = other RNA
cccggactgggcagaacggc

SEQ ID NO: 1790 - RNA, 20 nt, synthetic construct
  source 1..20: mol_type = other RNA
cccggaggagcgtcagggct

SEQ ID NO: 1791 - RNA, 20 nt, synthetic construct
  source 1..20: mol_type = other RNA
cccggagggagcagggctcc

SEQ ID NO: 1792 - RNA, 20 nt, synthetic construct
  source 1..20: mol_type = other RNA
cccggatggcatcctagtgg

SEQ ID NO: 1793 - RNA, 20 nt, synthetic construct
  source 1..20: mol_type = other RNA
cccggcacaaagtagggctg

SEQ ID NO: 1794 - RNA, 20 nt, synthetic construct
  source 1..20: mol_type = other RNA
cccggccgcctctcttttct

SEQ ID NO: 1795 - RNA, 20 nt, synthetic construct
  source 1..20: mol_type = other RNA
cccggctcactgccccagcc

SEQ ID NO: 1796 - RNA, 20 nt, synthetic construct
  source 1..20: mol_type = other RNA
cccggctgcagccgcttcag

SEQ ID NO: 1797 - RNA, 20 nt, synthetic construct
  source 1..20: mol_type = other RNA
cccggggccctggcagagct

SEQ ID NO: 1798 - RNA, 20 nt, synthetic construct
  source 1..20: mol_type = other RNA
cccgtgagcgtggagggcag

SEQ ID NO: 1799 - RNA, 20 nt, synthetic construct
  source 1..20: mol_type = other RNA
cccgtttcaggtggggtgag

SEQ ID NO: 1800 - RNA, 20 nt, synthetic construct
  source 1..20: mol_type = other RNA
ccctacaggaggaccagttc

SEQ ID NO: 1801 - RNA, 20 nt, synthetic construct
  source 1..20: mol_type = other RNA
ccctactcgggccatcggcg

SEQ ID NO: 1802 - RNA, 20 nt, synthetic construct
  source 1..20: mol_type = other RNA
ccctactttgtgccgggcag

SEQ ID NO: 1803 - RNA, 20 nt, synthetic construct
  source 1..20: mol_type = other RNA
ccctatgacaactggctgga

SEQ ID NO: 1804 - RNA, 20 nt, synthetic construct
  source 1..20: mol_type = other RNA
ccctatttgagctgtccggc

SEQ ID NO: 1805 - RNA, 20 nt, synthetic construct
  source 1..20: mol_type = other RNA
ccctcaccccacctgaaacg

SEQ ID NO: 1806 - RNA, 20 nt, synthetic construct
  source 1..20: mol_type = other RNA
ccctccacgctcacgggact

SEQ ID NO: 1807 - RNA, 20 nt, synthetic construct
  source 1..20: mol_type = other RNA
ccctccagccagttgtcata

SEQ ID NO: 1808 - RNA, 20 nt, synthetic construct
  source 1..20: mol_type = other RNA
ccctcctcctcacagcccgg

SEQ ID NO: 1809 - RNA, 20 nt, synthetic construct
  source 1..20: mol_type = other RNA
ccctctggattggggagcct

SEQ ID NO: 1810 - RNA, 20 nt, synthetic construct
  source 1..20: mol_type = other RNA
ccctgacacgcccctggcct

SEQ ID NO: 1811 - RNA, 20 nt, synthetic construct
  source 1..20: mol_type = other RNA
ccctgaccagctttgcccag

SEQ ID NO: 1812 - RNA, 20 nt, synthetic construct
  source 1..20: mol_type = other RNA
ccctgacgctcctccgggac

SEQ ID NO: 1813 - RNA, 20 nt, synthetic construct
  source 1..20: mol_type = other RNA
ccctgagctctcaaagtagc

SEQ ID NO: 1814 - RNA, 20 nt, synthetic construct
  source 1..20: mol_type = other RNA
ccctgccattgcttgaaccg

SEQ ID NO: 1815 - RNA, 20 nt, synthetic construct
  source 1..20: mol_type = other RNA
ccctgctccctccgggggct

SEQ ID NO: 1816 - RNA, 20 nt, synthetic construct
  source 1..20: mol_type = other RNA
ccctgctggagcttggggag

SEQ ID NO: 1817 - RNA, 20 nt, synthetic construct
  source 1..20: mol_type = other RNA
ccctggacctccgcagcact

SEQ ID NO: 1818 - RNA, 20 nt, synthetic construct
  source 1..20: mol_type = other RNA
ccctggcagagctggccaag

SEQ ID NO: 1819 - RNA, 20 nt, synthetic construct
  source 1..20: mol_type = other RNA
ccctggcctttgcagagccg

SEQ ID NO: 1820 - RNA, 20 nt, synthetic construct
  source 1..20: mol_type = other RNA
ccctgggcccacagccactc

SEQ ID NO: 1821 - RNA, 20 nt, synthetic construct
  source 1..20: mol_type = other RNA
ccctgtggctggctctgagt

SEQ ID NO: 1822 - RNA, 20 nt, synthetic construct
  source 1..20: mol_type = other RNA
ccgacatagagtcccgtgag

SEQ ID NO: 1823 - RNA, 20 nt, synthetic construct
  source 1..20: mol_type = other RNA
ccgacgccctatttgagctg

SEQ ID NO: 1824 - RNA, 20 nt, synthetic construct
  source 1..20: mol_type = other RNA
ccgagcccgcaggcccggat

SEQ ID NO: 1825 - RNA, 20 nt, synthetic construct
  source 1..20: mol_type = other RNA
ccgagctggccttccccagc

SEQ ID NO: 1826 - RNA, 20 nt, synthetic construct
  source 1..20: mol_type = other RNA
ccgaggaggctggaatttgg

SEQ ID NO: 1827 - RNA, 20 nt, synthetic construct
  source 1..20: mol_type = other RNA
ccgaggcagccgccgatggc

SEQ ID NO: 1828 - RNA, 20 nt, synthetic construct
  source 1..20: mol_type = other RNA
ccgaggttgcaccctcctcc

SEQ ID NO: 1829 - RNA, 20 nt, synthetic construct
  source 1..20: mol_type = other RNA
ccgagtagggctcccaggca

SEQ ID NO: 1830 - RNA, 20 nt, synthetic construct
  source 1..20: mol_type = other RNA
ccgatgaggttttcagccac

SEQ ID NO: 1831 - RNA, 20 nt, synthetic construct
  source 1..20: mol_type = other RNA
ccgatggcccgagtagggct

SEQ ID NO: 1832 - RNA, 20 nt, synthetic construct
  source 1..20: mol_type = other RNA
ccgcacgtgctgtgcaggaa

SEQ ID NO: 1833 - RNA, 20 nt, synthetic construct
  source 1..20: mol_type = other RNA
ccgcagacatcaaagtaccc

SEQ ID NO: 1834 - RNA, 20 nt, synthetic construct
  source 1..20: mol_type = other RNA
ccgcagacgtgaggacctgg

SEQ ID NO: 1835 - RNA, 20 nt, synthetic construct
  source 1..20: mol_type = other RNA
ccgcagagtccgagctggcc

SEQ ID NO: 1836 - RNA, 20 nt, synthetic construct
  source 1..20: mol_type = other RNA
ccgcagcactggcatttgcc

SEQ ID NO: 1837 - RNA, 20 nt, synthetic construct
  source 1..20: mol_type = other RNA
ccgcaggcccggatggcatc

SEQ ID NO: 1838 - RNA, 20 nt, synthetic construct
  source 1..20: mol_type = other RNA
ccgcagtacctagcattgac

SEQ ID NO: 1839 - RNA, 20 nt, synthetic construct
  source 1..20: mol_type = other RNA
ccgcagtgtccccggctgca

SEQ ID NO: 1840 - RNA, 20 nt, synthetic construct
  source 1..20: mol_type = other RNA
ccgccacgagtggctgtggg

SEQ ID NO: 1841 - RNA, 20 nt, synthetic construct
  source 1..20: mol_type = other RNA
ccgccgatggcccgagtagg

SEQ ID NO: 1842 - RNA, 20 nt, synthetic construct
  source 1..20: mol_type = other RNA
ccgccgcctccaaggccttg

SEQ ID NO: 1843 - RNA, 20 nt, synthetic construct
  source 1..20: mol_type = other RNA
ccgccggtgctccttggcag

SEQ ID NO: 1844 - RNA, 20 nt, synthetic construct
  source 1..20: mol_type = other RNA
ccgcctcacgcctcctgatg

SEQ ID NO: 1845 - RNA, 20 nt, synthetic construct
  source 1..20: mol_type = other RNA
ccgcctccaaggccttgccc

SEQ ID NO: 1846 - RNA, 20 nt, synthetic construct
  source 1..20: mol_type = other RNA
ccgcctctcttttctgggca

SEQ ID NO: 1847 - RNA, 20 nt, synthetic construct
  source 1..20: mol_type = other RNA
ccgcctggtccagagcctga

SEQ ID NO: 1848 - RNA, 20 nt, synthetic construct
  source 1..20: mol_type = other RNA
ccgcgggccgcagagtccga

SEQ ID NO: 1849 - RNA, 20 nt, synthetic construct
  source 1..20: mol_type = other RNA
ccgcggtgggtgttggacta

SEQ ID NO: 1850 - RNA, 20 nt, synthetic construct
  source 1..20: mol_type = other RNA
ccgcgtgagacacgagtgat

SEQ ID NO: 1851 - RNA, 20 nt, synthetic construct
  source 1..20: mol_type = other RNA
ccgcgttctgctcatcctag

SEQ ID NO: 1852 - RNA, 20 nt, synthetic construct
  source 1..20: mol_type = other RNA
ccgctcactgcaggacacgt

SEQ ID NO: 1853 - RNA, 20 nt, synthetic construct
  source 1..20: mol_type = other RNA
ccgctccaggctcttgctgc

SEQ ID NO: 1854 - RNA, 20 nt, synthetic construct
  source 1..20: mol_type = other RNA
ccgctgcctgggagccctac

SEQ ID NO: 1855 - RNA, 20 nt, synthetic construct
  source 1..20: mol_type = other RNA
ccgcttcaggtacctcgcaa

SEQ ID NO: 1856 - RNA, 20 nt, synthetic construct
  source 1..20: mol_type = other RNA
ccggacagctcaaatagggc

SEQ ID NO: 1857 - RNA, 20 nt, synthetic construct
  source 1..20: mol_type = other RNA
ccggacggttcaagcaatgg

SEQ ID NO: 1858 - RNA, 20 nt, synthetic construct
  source 1..20: mol_type = other RNA
ccggactgggcagaacggca

SEQ ID NO: 1859 - RNA, 20 nt, synthetic construct
  source 1..20: mol_type = other RNA
ccggaggagcgtcagggctc

SEQ ID NO: 1860 - RNA, 20 nt, synthetic construct
  source 1..20: mol_type = other RNA
ccggagggagcagggctccg

SEQ ID NO: 1861 - RNA, 20 nt, synthetic construct
  source 1..20: mol_type = other RNA
ccggatggcatcctagtgga

SEQ ID NO: 1862 - RNA, 20 nt, synthetic construct
  source 1..20: mol_type = other RNA
ccggcacaaagtagggctgt

SEQ ID NO: 1863 - RNA, 20 nt, synthetic construct
  source 1..20: mol_type = other RNA
ccggccacaagcccaggccc

SEQ ID NO: 1864 - RNA, 20 nt, synthetic construct
  source 1..20: mol_type = other RNA
ccggccacttcttctcagtc

SEQ ID NO: 1865 - RNA, 20 nt, synthetic construct
  source 1..20: mol_type = other RNA
ccggccgcctctcttttctg

SEQ ID NO: 1866 - RNA, 20 nt, synthetic construct
  source 1..20: mol_type = other RNA
ccggccttttccagaagaag

SEQ ID NO: 1867 - RNA, 20 nt, synthetic construct
  source 1..20: mol_type = other RNA
ccggcggagccctgctccct

SEQ ID NO: 1868 - RNA, 20 nt, synthetic construct
  source 1..20: mol_type = other RNA
ccggcggccgcgtgagacac

SEQ ID NO: 1869 - RNA, 20 nt, synthetic construct
  source 1..20: mol_type = other RNA
ccggctcactgccccagccc

SEQ ID NO: 1870 - RNA, 20 nt, synthetic construct
  source 1..20: mol_type = other RNA
ccggctctgcaaaggccagg

SEQ ID NO: 1871 - RNA, 20 nt, synthetic construct
  source 1..20: mol_type = other RNA
ccggctgcagccgcttcagg

SEQ ID NO: 1872 - RNA, 20 nt, synthetic construct
  source 1..20: mol_type = other RNA
ccggcttccccagtacgact

SEQ ID NO: 1873 - RNA, 20 nt, synthetic construct
  source 1..20: mol_type = other RNA
ccggcttctccatggagcag

SEQ ID NO: 1874 - RNA, 20 nt, synthetic construct
  source 1..20: mol_type = other RNA
ccgggaccggccacttcttc

SEQ ID NO: 1875 - RNA, 20 nt, synthetic construct
  source 1..20: mol_type = other RNA
ccgggcagtgtgccagctct

SEQ ID NO: 1876 - RNA, 20 nt, synthetic construct
  source 1..20: mol_type = other RNA
ccgggcctgggcttgtggcc

SEQ ID NO: 1877 - RNA, 20 nt, synthetic construct
  source 1..20: mol_type = other RNA
ccgggctgtgaggaggaggg

SEQ ID NO: 1878 - RNA, 20 nt, synthetic construct
  source 1..20: mol_type = other RNA
ccggggagctcctgtaccac

SEQ ID NO: 1879 - RNA, 20 nt, synthetic construct
  source 1..20: mol_type = other RNA
ccggggccctggcagagctg

SEQ ID NO: 1880 - RNA, 20 nt, synthetic construct
  source 1..20: mol_type = other RNA
ccggggccgcctggtccaga

SEQ ID NO: 1881 - RNA, 20 nt, synthetic construct
  source 1..20: mol_type = other RNA
ccggggccgggctgtgagga

SEQ ID NO: 1882 - RNA, 20 nt, synthetic construct
  source 1..20: mol_type = other RNA
ccgggggatgcctatggcct

SEQ ID NO: 1883 - RNA, 20 nt, synthetic construct
  source 1..20: mol_type = other RNA
ccggggtggccagttcccgc

SEQ ID NO: 1884 - RNA, 20 nt, synthetic construct
  source 1..20: mol_type = other RNA
ccggtcccggaggagcgtca

SEQ ID NO: 1885 - RNA, 20 nt, synthetic construct
  source 1..20: mol_type = other RNA
ccggtccgcacgtgctgtgc

SEQ ID NO: 1886 - RNA, 20 nt, synthetic construct
  source 1..20: mol_type = other RNA
ccggtgccggtccgcacgtg

SEQ ID NO: 1887 - RNA, 20 nt, synthetic construct
  source 1..20: mol_type = other RNA
ccggtgctccttggcagcca

SEQ ID NO: 1888 - RNA, 20 nt, synthetic construct
  source 1..20: mol_type = other RNA
ccggtggagcagttctaccg

SEQ ID NO: 1889 - RNA, 20 nt, synthetic construct
  source 1..20: mol_type = other RNA
ccgtccgggggatgcctatg

SEQ ID NO: 1890 - RNA, 20 nt, synthetic construct
  source 1..20: mol_type = other RNA
ccgtctaggatgagcagaac

SEQ ID NO: 1891 - RNA, 20 nt, synthetic construct
  source 1..20: mol_type = other RNA
ccgtgagcgtggagggcagc

SEQ ID NO: 1892 - RNA, 20 nt, synthetic construct
  source 1..20: mol_type = other RNA
ccgtgcagccctcgacagcc

SEQ ID NO: 1893 - RNA, 20 nt, synthetic construct
  source 1..20: mol_type = other RNA
ccgttctgcccagtccgggg

SEQ ID NO: 1894 - RNA, 20 nt, synthetic construct
  source 1..20: mol_type = other RNA
ccgtttcaggtggggtgagg

SEQ ID NO: 1895 - RNA, 20 nt, synthetic construct
  source 1..20: mol_type = other RNA
cctacaggaggaccagttcc

SEQ ID NO: 1896 - RNA, 20 nt, synthetic construct
  source 1..20: mol_type = other RNA
cctactcgggccatcggcgg

SEQ ID NO: 1897 - RNA, 20 nt, synthetic construct
  source 1..20: mol_type = other RNA
cctactttgtgccgggcagt

SEQ ID NO: 1898 - RNA, 20 nt, synthetic construct
  source 1..20: mol_type = other RNA
cctagacggcttcgaggagc

SEQ ID NO: 1899 - RNA, 20 nt, synthetic construct
  source 1..20: mol_type = other RNA
cctagcattgaccccaagga

SEQ ID NO: 1900 - RNA, 20 nt, synthetic construct
  source 1..20: mol_type = other RNA
cctagtggaggtggatctgg

SEQ ID NO: 1901 - RNA, 20 nt, synthetic construct
  source 1..20: mol_type = other RNA
cctatgacaactggctggag

SEQ ID NO: 1902 - RNA, 20 nt, synthetic construct
  source 1..20: mol_type = other RNA
cctatggcctgcaggatctg

SEQ ID NO: 1903 - RNA, 20 nt, synthetic construct
  source 1..20: mol_type = other RNA
cctatttgagctgtccggct

SEQ ID NO: 1904 - RNA, 20 nt, synthetic construct
  source 1..20: mol_type = other RNA
cctcaccccacctgaaacgg

SEQ ID NO: 1905 - RNA, 20 nt, synthetic construct
  source 1..20: mol_type = other RNA
cctcacgcctcctgatgcac

SEQ ID NO: 1906 - RNA, 20 nt, synthetic construct
  source 1..20: mol_type = other RNA
cctcacgtctgcggatggga

SEQ ID NO: 1907 - RNA, 20 nt, synthetic construct
  source 1..20: mol_type = other RNA
cctcagccaggcctccttgg

SEQ ID NO: 1908 - RNA, 20 nt, synthetic construct
  source 1..20: mol_type = other RNA
cctcatcggccgccacgagt

SEQ ID NO: 1909 - RNA, 20 nt, synthetic construct
  source 1..20: mol_type = other RNA
cctccaaggccttgcccagt

SEQ ID NO: 1910 - RNA, 20 nt, synthetic construct
  source 1..20: mol_type = other RNA
cctccacgctcacgggactc

SEQ ID NO: 1911 - RNA, 20 nt, synthetic construct
  source 1..20: mol_type = other RNA
cctccactaggatgccatcc

SEQ ID NO: 1912 - RNA, 20 nt, synthetic construct
  source 1..20: mol_type = other RNA
cctccagccagttgtcatag

SEQ ID NO: 1913 - RNA, 20 nt, synthetic construct
  source 1..20: mol_type = other RNA
cctccccaagctccagcagg

SEQ ID NO: 1914 - RNA, 20 nt, synthetic construct
  source 1..20: mol_type = other RNA
cctccgcagcactggcattt

SEQ ID NO: 1915 - RNA, 20 nt, synthetic construct
  source 1..20: mol_type = other RNA
cctccgggaccggccacttc

SEQ ID NO: 1916 - RNA, 20 nt, synthetic construct
  source 1..20: mol_type = other RNA
cctcctcacagcccggcccc

SEQ ID NO: 1917 - RNA, 20 nt, synthetic construct
  source 1..20: mol_type = other RNA
cctcctcctcacagcccggc

SEQ ID NO: 1918 - RNA, 20 nt, synthetic construct
  source 1..20: mol_type = other RNA
cctcctcggcctcgtgggcg

SEQ ID NO: 1919 - RNA, 20 nt, synthetic construct
  source 1..20: mol_type = other RNA
cctcctgatgcacatgtact

SEQ ID NO: 1920 - RNA, 20 nt, synthetic construct
  source 1..20: mol_type = other RNA
cctcctgcaatgcttcctgg

SEQ ID NO: 1921 - RNA, 20 nt, synthetic construct
  source 1..20: mol_type = other RNA
cctcctgtagggtactttga

SEQ ID NO: 1922 - RNA, 20 nt, synthetic construct
  source 1..20: mol_type = other RNA
cctccttgggccagctgccg

SEQ ID NO: 1923 - RNA, 20 nt, synthetic construct
  source 1..20: mol_type = other RNA
cctcgaagccgtctaggatg

SEQ ID NO: 1924 - RNA, 20 nt, synthetic construct
  source 1..20: mol_type = other RNA
cctcgcaagcaccttctgct

SEQ ID NO: 1925 - RNA, 20 nt, synthetic construct
  source 1..20: mol_type = other RNA
cctcggagcagcttcttctg

SEQ ID NO: 1926 - RNA, 20 nt, synthetic construct
  source 1..20: mol_type = other RNA
cctcggcctcgtgggcgcag

SEQ ID NO: 1927 - RNA, 20 nt, synthetic construct
  source 1..20: mol_type = other RNA
cctcggtggacaggaagcag

SEQ ID NO: 1928 - RNA, 20 nt, synthetic construct
  source 1..20: mol_type = other RNA
cctcgtgggactcagctgtg

SEQ ID NO: 1929 - RNA, 20 nt, synthetic construct
  source 1..20: mol_type = other RNA
cctcgtgggcgcagtgcagc

SEQ ID NO: 1930 - RNA, 20 nt, synthetic construct
  source 1..20: mol_type = other RNA
cctctcacatacccccaccc

SEQ ID NO: 1931 - RNA, 20 nt, synthetic construct
  source 1..20: mol_type = other RNA
cctctccagcctggcctgca

SEQ ID NO: 1932 - RNA, 20 nt, synthetic construct
  source 1..20: mol_type = other RNA
cctctcttttctgggcaccc

SEQ ID NO: 1933 - RNA, 20 nt, synthetic construct
  source 1..20: mol_type = other RNA
cctctgagagctggcacact

SEQ ID NO: 1934 - RNA, 20 nt, synthetic construct
  source 1..20: mol_type = other RNA
cctctggattggggagcctc

SEQ ID NO: 1935 - RNA, 20 nt, synthetic construct
  source 1..20: mol_type = other RNA
cctcttcttccttggggtca

SEQ ID NO: 1936 - RNA, 20 nt, synthetic construct
  source 1..20: mol_type = other RNA
cctgaaacgggtgacacagc

SEQ ID NO: 1937 - RNA, 20 nt, synthetic construct
  source 1..20: mol_type = other RNA
cctgaagcggctgcagccgg

SEQ ID NO: 1938 - RNA, 20 nt, synthetic construct
  source 1..20: mol_type = other RNA
cctgacacgcccctggcctt

SEQ ID NO: 1939 - RNA, 20 nt, synthetic construct
  source 1..20: mol_type = other RNA
cctgaccagctttgcccagc

SEQ ID NO: 1940 - RNA, 20 nt, synthetic construct
  source 1..20: mol_type = other RNA
cctgaccgcgttctgctcat

SEQ ID NO: 1941 - RNA, 20 nt, synthetic construct
  source 1..20: mol_type = other RNA
cctgacgctcctccgggacc

SEQ ID NO: 1942 - RNA, 20 nt, synthetic construct
  source 1..20: mol_type = other RNA
cctgagcaaggccgacgccc

SEQ ID NO: 1943 - RNA, 20 nt, synthetic construct
  source 1..20: mol_type = other RNA
cctgagctctcaaagtagcg

SEQ ID NO: 1944 - RNA, 20 nt, synthetic construct
  source 1..20: mol_type = other RNA
cctgatgcacatgtactggg

SEQ ID NO: 1945 - RNA, 20 nt, synthetic construct
  source 1..20: mol_type = other RNA
cctgcaatgcttcctggggg

SEQ ID NO: 1946 - RNA, 20 nt, synthetic construct
  source 1..20: mol_type = other RNA
cctgcacagcacgtgcggac

SEQ ID NO: 1947 - RNA, 20 nt, synthetic construct
  source 1..20: mol_type = other RNA
cctgcaccagatccacctcc

SEQ ID NO: 1948 - RNA, 20 nt, synthetic construct
  source 1..20: mol_type = other RNA
cctgcaggatctgctcttct

SEQ ID NO: 1949 - RNA, 20 nt, synthetic construct
  source 1..20: mol_type = other RNA
cctgcaggccataggcatcc

SEQ ID NO: 1950 - RNA, 20 nt, synthetic construct
  source 1..20: mol_type = other RNA
cctgcagtgagcggtagaac

SEQ ID NO: 1951 - RNA, 20 nt, synthetic construct
  source 1..20: mol_type = other RNA
cctgccattgcttgaaccgt

SEQ ID NO: 1952 - RNA, 20 nt, synthetic construct
  source 1..20: mol_type = other RNA
cctgcgggctcggcaccata

SEQ ID NO: 1953 - RNA, 20 nt, synthetic construct
  source 1..20: mol_type = other RNA
cctgctccatggagaagccg

SEQ ID NO: 1954 - RNA, 20 nt, synthetic construct
  source 1..20: mol_type = other RNA
cctgctccctccgggggctg

SEQ ID NO: 1955 - RNA, 20 nt, synthetic construct
  source 1..20: mol_type = other RNA
cctgctggagcttggggagg

SEQ ID NO: 1956 - RNA, 20 nt, synthetic construct
  source 1..20: mol_type = other RNA
cctgctgggccgtgcagccc

SEQ ID NO: 1957 - RNA, 20 nt, synthetic construct
  source 1..20: mol_type = other RNA
cctggacctccgcagcactg

SEQ ID NO: 1958 - RNA, 20 nt, synthetic construct
  source 1..20: mol_type = other RNA
cctggagcgggaactggcca

SEQ ID NO: 1959 - RNA, 20 nt, synthetic construct
  source 1..20: mol_type = other RNA
cctggcagagctggccaagc

SEQ ID NO: 1960 - RNA, 20 nt, synthetic construct
  source 1..20: mol_type = other RNA
cctggcctgcaccagatcca

SEQ ID NO: 1961 - RNA, 20 nt, synthetic construct
  source 1..20: mol_type = other RNA
cctggcctttgcagagccgg

SEQ ID NO: 1962 - RNA, 20 nt, synthetic construct
  source 1..20: mol_type = other RNA
cctggctgaggtgctgttgg

SEQ ID NO: 1963 - RNA, 20 nt, synthetic construct
  source 1..20: mol_type = other RNA
cctgggagccctactcgggc

SEQ ID NO: 1964 - RNA, 20 nt, synthetic construct
  source 1..20: mol_type = other RNA
cctgggagctgggccgcaga

SEQ ID NO: 1965 - RNA, 20 nt, synthetic construct
  source 1..20: mol_type = other RNA
cctgggcccacagccactcg

SEQ ID NO: 1966 - RNA, 20 nt, synthetic construct
  source 1..20: mol_type = other RNA
cctgggcctgctccatggag

SEQ ID NO: 1967 - RNA, 20 nt, synthetic construct
  source 1..20: mol_type = other RNA
cctgggcgatggccaaaggc

SEQ ID NO: 1968 - RNA, 20 nt, synthetic construct
  source 1..20: mol_type = other RNA
cctgggcttgtggccggctt

SEQ ID NO: 1969 - RNA, 20 nt, synthetic construct
  source 1..20: mol_type = other RNA
cctgggggccctgtggctgg

SEQ ID NO: 1970 - RNA, 20 nt, synthetic construct
  source 1..20: mol_type = other RNA
cctggtccagagcctgagca

SEQ ID NO: 1971 - RNA, 20 nt, synthetic construct
  source 1..20: mol_type = other RNA
cctgtaccacgtgctgccaa

SEQ ID NO: 1972 - RNA, 20 nt, synthetic construct
  source 1..20: mol_type = other RNA
cctgtagggtactttgatgt

SEQ ID NO: 1973 - RNA, 20 nt, synthetic construct
  source 1..20: mol_type = other RNA
cctgtccaccgaggcagccg

SEQ ID NO: 1974 - RNA, 20 nt, synthetic construct
  source 1..20: mol_type = other RNA
cctgtggctggctctgagtg

SEQ ID NO: 1975 - RNA, 20 nt, synthetic construct
  source 1..20: mol_type = other RNA
ccttccccagcttcctcctg

SEQ ID NO: 1976 - RNA, 20 nt, synthetic construct
  source 1..20: mol_type = other RNA
ccttctgcttcctgtccacc

SEQ ID NO: 1977 - RNA, 20 nt, synthetic construct
  source 1..20: mol_type = other RNA
ccttgatttcgccactcaga

SEQ ID NO: 1978 - RNA, 20 nt, synthetic construct
  source 1..20: mol_type = other RNA
ccttgcccagtacatgtgca

SEQ ID NO: 1979 - RNA, 20 nt, synthetic construct
  source 1..20: mol_type = other RNA
ccttgctcaggctctggacc

SEQ ID NO: 1980 - RNA, 20 nt, synthetic construct
  source 1..20: mol_type = other RNA
ccttggaggcggcgggccaa

SEQ ID NO: 1981 - RNA, 20 nt, synthetic construct
  source 1..20: mol_type = other RNA
ccttggcagccaacagcacc

SEQ ID NO: 1982 - RNA, 20 nt, synthetic construct
  source 1..20: mol_type = other RNA
ccttgggccagctgccgttc

SEQ ID NO: 1983 - RNA, 20 nt, synthetic construct
  source 1..20: mol_type = other RNA
ccttggggtcaatgctaggt

SEQ ID NO: 1984 - RNA, 20 nt, synthetic construct
  source 1..20: mol_type = other RNA
ccttgtccttgatttcgcca

SEQ ID NO: 1985 - RNA, 20 nt, synthetic construct
  source 1..20: mol_type = other RNA
cctttgcagagccggtggag

SEQ ID NO: 1986 - RNA, 20 nt, synthetic construct
  source 1..20: mol_type = other RNA
cctttggccatcgcccaggt

SEQ ID NO: 1987 - RNA, 20 nt, synthetic construct
  source 1..20: mol_type = other RNA
ccttttccagaagaagctgc

SEQ ID NO: 1988 - RNA, 20 nt, synthetic construct
  source 1..20: mol_type = other RNA
cgaaatcaaggacaaggagc

SEQ ID NO: 1989 - RNA, 20 nt, synthetic construct
  source 1..20: mol_type = other RNA
cgaagccgtctaggatgagc

SEQ ID NO: 1990 - RNA, 20 nt, synthetic construct
  source 1..20: mol_type = other RNA
cgacatagagtcccgtgagc

SEQ ID NO: 1991 - RNA, 20 nt, synthetic construct
  source 1..20: mol_type = other RNA
cgacgccctatttgagctgt

SEQ ID NO: 1992 - RNA, 20 nt, synthetic construct
  source 1..20: mol_type = other RNA
cgactttgtcttctctgtcc

SEQ ID NO: 1993 - RNA, 20 nt, synthetic construct
  source 1..20: mol_type = other RNA
cgagcccgcaggcccggatg

SEQ ID NO: 1994 - RNA, 20 nt, synthetic construct
  source 1..20: mol_type = other RNA
cgagctggccttccccagct

SEQ ID NO: 1995 - RNA, 20 nt, synthetic construct
  source 1..20: mol_type = other RNA
cgaggagctggaagcgcaag

SEQ ID NO: 1996 - RNA, 20 nt, synthetic construct
  source 1..20: mol_type = other RNA
cgaggaggctggaatttggc

SEQ ID NO: 1997 - RNA, 20 nt, synthetic construct
  source 1..20: mol_type = other RNA
cgaggcagccgccgatggcc

SEQ ID NO: 1998 - RNA, 20 nt, synthetic construct
  source 1..20: mol_type = other RNA
cgaggccgaggaggctggaa

SEQ ID NO: 1999 - RNA, 20 nt, synthetic construct
  source 1..20: mol_type = other RNA
cgaggctccccaatccagag

SEQ ID NO: 2000 - RNA, 20 nt, synthetic construct
  source 1..20: mol_type = other RNA
cgagggctgcacggcccagc

SEQ ID NO: 2001 - RNA, 20 nt, synthetic construct
  source 1..20: mol_type = other RNA
cgaggtacctgaagcggctg

SEQ ID NO: 2002 - RNA, 20 nt, synthetic construct
  source 1..20: mol_type = other RNA
cgaggttgcaccctcctcct

SEQ ID NO: 2003 - RNA, 20 nt, synthetic construct
  source 1..20: mol_type = other RNA
cgagtagggctcccaggcag

SEQ ID NO: 2004 - RNA, 20 nt, synthetic construct
  source 1..20: mol_type = other RNA
cgagtgattgctgtgctggg

SEQ ID NO: 2005 - RNA, 20 nt, synthetic construct
  source 1..20: mol_type = other RNA
cgagtggctgtgggcccagg

SEQ ID NO: 2006 - RNA, 20 nt, synthetic construct
  source 1..20: mol_type = other RNA
cgatgaggttttcagccaca

SEQ ID NO: 2007 - RNA, 20 nt, synthetic construct
  source 1..20: mol_type = other RNA
cgatggccaaaggcttagtc

SEQ ID NO: 2008 - RNA, 20 nt, synthetic construct
  source 1..20: mol_type = other RNA
cgatggcccgagtagggctc

SEQ ID NO: 2009 - RNA, 20 nt, synthetic construct
  source 1..20: mol_type = other RNA
cgcaagatggcttcctgcac

SEQ ID NO: 2010 - RNA, 20 nt, synthetic construct
  source 1..20: mol_type = other RNA
cgcaagcaccttctgcttcc

SEQ ID NO: 2011 - RNA, 20 nt, synthetic construct
  source 1..20: mol_type = other RNA
cgcacgtgctgtgcaggaag

SEQ ID NO: 2012 - RNA, 20 nt, synthetic construct
  source 1..20: mol_type = other RNA
cgcagacatcaaagtaccct

SEQ ID NO: 2013 - RNA, 20 nt, synthetic construct
  source 1..20: mol_type = other RNA
cgcagacgtgaggacctggg

SEQ ID NO: 2014 - RNA, 20 nt, synthetic construct
  source 1..20: mol_type = other RNA
cgcagagtccgagctggcct

SEQ ID NO: 2015 - RNA, 20 nt, synthetic construct
  source 1..20: mol_type = other RNA
cgcagcactggcatttgccc

SEQ ID NO: 2016 - RNA, 20 nt, synthetic construct
  source 1..20: mol_type = other RNA
cgcaggcccggatggcatcc

SEQ ID NO: 2017 - RNA, 20 nt, synthetic construct
  source 1..20: mol_type = other RNA
cgcagtacctagcattgacc

SEQ ID NO: 2018 - RNA, 20 nt, synthetic construct
  source 1..20: mol_type = other RNA
cgcagtgcagcagctccagc

SEQ ID NO: 2019 - RNA, 20 nt, synthetic construct
  source 1..20: mol_type = other RNA
cgcagtgtccccggctgcag

SEQ ID NO: 2020 - RNA, 20 nt, synthetic construct
  source 1..20: mol_type = other RNA
cgcatcacgtatgcctgggc

SEQ ID NO: 2021 - RNA, 20 nt, synthetic construct
  source 1..20: mol_type = other RNA
cgccaagctgccctccacgc

SEQ ID NO: 2022 - RNA, 20 nt, synthetic construct
  source 1..20: mol_type = other RNA
cgccacgagtggctgtgggc

SEQ ID NO: 2023 - RNA, 20 nt, synthetic construct
  source 1..20: mol_type = other RNA
cgccactcagagccagccac

SEQ ID NO: 2024 - RNA, 20 nt, synthetic construct
  source 1..20: mol_type = other RNA
cgcccacgaggccgaggagg

SEQ ID NO: 2025 - RNA, 20 nt, synthetic construct
  source 1..20: mol_type = other RNA
cgcccaggtcctcacgtctg

SEQ ID NO: 2026 - RNA, 20 nt, synthetic construct
  source 1..20: mol_type = other RNA
cgcccctggcctttgcagag

SEQ ID NO: 2027 - RNA, 20 nt, synthetic construct
  source 1..20: mol_type = other RNA
cgcccgcagtgtccccggct

SEQ ID NO: 2028 - RNA, 20 nt, synthetic construct
  source 1..20: mol_type = other RNA
cgccctatttgagctgtccg

SEQ ID NO: 2029 - RNA, 20 nt, synthetic construct
  source 1..20: mol_type = other RNA
cgccctccagccagttgtca

SEQ ID NO: 2030 - RNA, 20 nt, synthetic construct
  source 1..20: mol_type = other RNA
cgccgatggcccgagtaggg

SEQ ID NO: 2031 - RNA, 20 nt, synthetic construct
  source 1..20: mol_type = other RNA
cgccgcctccaaggccttgc

SEQ ID NO: 2032 - RNA, 20 nt, synthetic construct
  source 1..20: mol_type = other RNA
cgccggtgctccttggcagc

SEQ ID NO: 2033 - RNA, 20 nt, synthetic construct
  source 1..20: mol_type = other RNA
cgcctcacgcctcctgatgc

SEQ ID NO: 2034 - RNA, 20 nt, synthetic construct
  source 1..20: mol_type = other RNA
cgcctccaaggccttgccca

SEQ ID NO: 2035 - RNA, 20 nt, synthetic construct
  source 1..20: mol_type = other RNA
cgcctcctgatgcacatgta

SEQ ID NO: 2036 - RNA, 20 nt, synthetic construct
  source 1..20: mol_type = other RNA
cgcctctcttttctgggcac

SEQ ID NO: 2037 - RNA, 20 nt, synthetic construct
  source 1..20: mol_type = other RNA
cgcctggtccagagcctgag

SEQ ID NO: 2038 - RNA, 20 nt, synthetic construct
  source 1..20: mol_type = other RNA
cgcggcagctgctggagctg

SEQ ID NO: 2039 - RNA, 20 nt, synthetic construct
  source 1..20: mol_type = other RNA
cgcggccgccggtgctcctt

SEQ ID NO: 2040 - RNA, 20 nt, synthetic construct
  source 1..20: mol_type = other RNA
cgcgggccgcagagtccgag

SEQ ID NO: 2041 - RNA, 20 nt, synthetic construct
  source 1..20: mol_type = other RNA
cgcggtcaggtctcttcaag

SEQ ID NO: 2042 - RNA, 20 nt, synthetic construct
  source 1..20: mol_type = other RNA
cgcggtgggtgttggactaa

SEQ ID NO: 2043 - RNA, 20 nt, synthetic construct
  source 1..20: mol_type = other RNA
cgcgtgagacacgagtgatt

SEQ ID NO: 2044 - RNA, 20 nt, synthetic construct
  source 1..20: mol_type = other RNA
cgcgttctgctcatcctaga

SEQ ID NO: 2045 - RNA, 20 nt, synthetic construct
  source 1..20: mol_type = other RNA
cgctactttgagagctcagg

SEQ ID NO: 2046 - RNA, 20 nt, synthetic construct
  source 1..20: mol_type = other RNA
cgctcacgggactctatgtc

SEQ ID NO: 2047 - RNA, 20 nt, synthetic construct
  source 1..20: mol_type = other RNA
cgctcactgcaggacacgta

SEQ ID NO: 2048 - RNA, 20 nt, synthetic construct
  source 1..20: mol_type = other RNA
cgctccaggctcttgctgct

SEQ ID NO: 2049 - RNA, 20 nt, synthetic construct
  source 1..20: mol_type = other RNA
cgctcctccgggaccggcca

SEQ ID NO: 2050 - RNA, 20 nt, synthetic construct
  source 1..20: mol_type = other RNA
cgctgcctgggagccctact

SEQ ID NO: 2051 - RNA, 20 nt, synthetic construct
  source 1..20: mol_type = other RNA
cgcttcaggtacctcgcaag

SEQ ID NO: 2052 - RNA, 20 nt, synthetic construct
  source 1..20: mol_type = other RNA
cgcttccagctcctcgaagc

SEQ ID NO: 2053 - RNA, 20 nt, synthetic construct
  source 1..20: mol_type = other RNA
cgctttctggctgggctgat

SEQ ID NO: 2054 - RNA, 20 nt, synthetic construct
  source 1..20: mol_type = other RNA
cggacagctcaaatagggcg

SEQ ID NO: 2055 - RNA, 20 nt, synthetic construct
  source 1..20: mol_type = other RNA
cggacggttcaagcaatggc

SEQ ID NO: 2056 - RNA, 20 nt, synthetic construct
  source 1..20: mol_type = other RNA
cggactctgcggcccgcggt

SEQ ID NO: 2057 - RNA, 20 nt, synthetic construct
  source 1..20: mol_type = other RNA
cggactgggcagaacggcag

SEQ ID NO: 2058 - RNA, 20 nt, synthetic construct
  source 1..20: mol_type = other RNA
cggagcagcttcttctggaa

SEQ ID NO: 2059 - RNA, 20 nt, synthetic construct
  source 1..20: mol_type = other RNA
cggagccctgctccctccgg

SEQ ID NO: 2060 - RNA, 20 nt, synthetic construct
  source 1..20: mol_type = other RNA
cggaggagcgtcagggctct

SEQ ID NO: 2061 - RNA, 20 nt, synthetic construct
  source 1..20: mol_type = other RNA
cggagggagcagggctccgc

SEQ ID NO: 2062 - RNA, 20 nt, synthetic construct
  source 1..20: mol_type = other RNA
cggaggtccagggagaagtc

SEQ ID NO: 2063 - RNA, 20 nt, synthetic construct
  source 1..20: mol_type = other RNA
cggatggcatcctagtggag

SEQ ID NO: 2064 - RNA, 20 nt, synthetic construct
  source 1..20: mol_type = other RNA
cggatgggaactggtcctcc

SEQ ID NO: 2065 - RNA, 20 nt, synthetic construct
  source 1..20: mol_type = other RNA
cggcacaaagtagggctgtg

SEQ ID NO: 2066 - RNA, 20 nt, synthetic construct
  source 1..20: mol_type = other RNA
cggcaccatacgtgtcctgc

SEQ ID NO: 2067 - RNA, 20 nt, synthetic construct
  source 1..20: mol_type = other RNA
cggcagctgctggagctgct

SEQ ID NO: 2068 - RNA, 20 nt, synthetic construct
  source 1..20: mol_type = other RNA
cggcagctggcccaaggagg

SEQ ID NO: 2069 - RNA, 20 nt, synthetic construct
  source 1..20: mol_type = other RNA
cggccacaagcccaggcccg

SEQ ID NO: 2070 - RNA, 20 nt, synthetic construct
  source 1..20: mol_type = other RNA
cggccacttcttctcagtca

SEQ ID NO: 2071 - RNA, 20 nt, synthetic construct
  source 1..20: mol_type = other RNA
cggcccagcaggccgacata

SEQ ID NO: 2072 - RNA, 20 nt, synthetic construct
  source 1..20: mol_type = other RNA
cggcccagctcccaggccag

SEQ ID NO: 2073 - RNA, 20 nt, synthetic construct
  source 1..20: mol_type = other RNA
cggcccgcggtgggtgttgg

SEQ ID NO: 2074 - RNA, 20 nt, synthetic construct
  source 1..20: mol_type = other RNA
cggccgatgaggttttcagc

SEQ ID NO: 2075 - RNA, 20 nt, synthetic construct
  source 1..20: mol_type = other RNA
cggccgccacgagtggctgt

SEQ ID NO: 2076 - RNA, 20 nt, synthetic construct
  source 1..20: mol_type = other RNA
cggccgccggtgctccttgg

SEQ ID NO: 2077 - RNA, 20 nt, synthetic construct
  source 1..20: mol_type = other RNA
cggccgcctctcttttctgg

SEQ ID NO: 2078 - RNA, 20 nt, synthetic construct
  source 1..20: mol_type = other RNA
cggccgcgtgagacacgagt

SEQ ID NO: 2079 - RNA, 20 nt, synthetic construct
  source 1..20: mol_type = other RNA
cggccggggagctcctgtac

SEQ ID NO: 2080 - RNA, 20 nt, synthetic construct
  source 1..20: mol_type = other RNA
cggcctcgtgggcgcagtgc

SEQ ID NO: 2081 - RNA, 20 nt, synthetic construct
  source 1..20: mol_type = other RNA
cggcctgctgggccgtgcag

SEQ ID NO: 2082 - RNA, 20 nt, synthetic construct
  source 1..20: mol_type = other RNA
cggccttgctcaggctctgg

SEQ ID NO: 2083 - RNA, 20 nt, synthetic construct
  source 1..20: mol_type = other RNA
cggccttttccagaagaagc

SEQ ID NO: 2084 - RNA, 20 nt, synthetic construct
  source 1..20: mol_type = other RNA
cggcggagccctgctccctc

SEQ ID NO: 2085 - RNA, 20 nt, synthetic construct
  source 1..20: mol_type = other RNA
cggcggccgcgtgagacacg

SEQ ID NO: 2086 - RNA, 20 nt, synthetic construct
  source 1..20: mol_type = other RNA
cggcggctgcctcggtggac

SEQ ID NO: 2087 - RNA, 20 nt, synthetic construct
  source 1..20: mol_type = other RNA
cggcgggccaagacttctcc

SEQ ID NO: 2088 - RNA, 20 nt, synthetic construct
  source 1..20: mol_type = other RNA
cggctcactgccccagccca

SEQ ID NO: 2089 - RNA, 20 nt, synthetic construct
  source 1..20: mol_type = other RNA
cggctctgcaaaggccaggg

SEQ ID NO: 2090 - RNA, 20 nt, synthetic construct
  source 1..20: mol_type = other RNA
cggctgcagccgcttcaggt

SEQ ID NO: 2091 - RNA, 20 nt, synthetic construct
  source 1..20: mol_type = other RNA
cggctgcagccggggacact

SEQ ID NO: 2092 - RNA, 20 nt, synthetic construct
  source 1..20: mol_type = other RNA
cggctgcctcggtggacagg

SEQ ID NO: 2093 - RNA, 20 nt, synthetic construct
  source 1..20: mol_type = other RNA
cggcttccccagtacgactt

SEQ ID NO: 2094 - RNA, 20 nt, synthetic construct
  source 1..20: mol_type = other RNA
cggcttcgaggagctggaag

SEQ ID NO: 2095 - RNA, 20 nt, synthetic construct
  source 1..20: mol_type = other RNA
cggcttctccatggagcagg

SEQ ID NO: 2096 - RNA, 20 nt, synthetic construct
  source 1..20: mol_type = other RNA
cgggaactggccaccccgga

SEQ ID NO: 2097 - RNA, 20 nt, synthetic construct
  source 1..20: mol_type = other RNA
cgggaccggccacttcttct

SEQ ID NO: 2098 - RNA, 20 nt, synthetic construct
  source 1..20: mol_type = other RNA
cgggactctatgtcggcctg

SEQ ID NO: 2099 - RNA, 20 nt, synthetic construct
  source 1..20: mol_type = other RNA
cgggagctccttgtccttga

SEQ ID NO: 2100 - RNA, 20 nt, synthetic construct
  source 1..20: mol_type = other RNA
cgggaggctggaagatcagc

SEQ ID NO: 2101 - RNA, 20 nt, synthetic construct
  source 1..20: mol_type = other RNA
cgggcagtgtgccagctctc

SEQ ID NO: 2102 - RNA, 20 nt, synthetic construct
  source 1..20: mol_type = other RNA
cgggccaagacttctccctg

SEQ ID NO: 2103 - RNA, 20 nt, synthetic construct
  source 1..20: mol_type = other RNA
cgggccatcggcggctgcct

SEQ ID NO: 2104 - RNA, 20 nt, synthetic construct
  source 1..20: mol_type = other RNA
cgggccgcagagtccgagct

SEQ ID NO: 2105 - RNA, 20 nt, synthetic construct
  source 1..20: mol_type = other RNA
cgggcctgggcttgtggccg

SEQ ID NO: 2106 - RNA, 20 nt, synthetic construct
  source 1..20: mol_type = other RNA
cgggcgcggcagctgctgga

SEQ ID NO: 2107 - RNA, 20 nt, synthetic construct
  source 1..20: mol_type = other RNA
cgggcgggaggctggaagat

SEQ ID NO: 2108 - RNA, 20 nt, synthetic construct
  source 1..20: mol_type = other RNA
cgggctcggcaccatacgtg

SEQ ID NO: 2109 - RNA, 20 nt, synthetic construct
  source 1..20: mol_type = other RNA
cgggctgtgaggaggagggt

SEQ ID NO: 2110 - RNA, 20 nt, synthetic construct
  source 1..20: mol_type = other RNA
cggggagctcctgtaccacg

SEQ ID NO: 2111 - RNA, 20 nt, synthetic construct
  source 1..20: mol_type = other RNA
cggggccctggcagagctgg

SEQ ID NO: 2112 - RNA, 20 nt, synthetic construct
  source 1..20: mol_type = other RNA
cggggccgcctggtccagag

SEQ ID NO: 2113 - RNA, 20 nt, synthetic construct
  source 1..20: mol_type = other RNA
cggggccgggctgtgaggag

SEQ ID NO: 2114 - RNA, 20 nt, synthetic construct
  source 1..20: mol_type = other RNA
cgggggatgcctatggcctg

SEQ ID NO: 2115 - RNA, 20 nt, synthetic construct
  source 1..20: mol_type = other RNA
cggggtggccagttcccgct

SEQ ID NO: 2116 - RNA, 20 nt, synthetic construct
  source 1..20: mol_type = other RNA
cgggtgacacagctgagtcc

SEQ ID NO: 2117 - RNA, 20 nt, synthetic construct
  source 1..20: mol_type = other RNA
cgggtgcccagaaaagagag

SEQ ID NO: 2118 - RNA, 20 nt, synthetic construct
  source 1..20: mol_type = other RNA
cggtagaactgctccaccgg

SEQ ID NO: 2119 - RNA, 20 nt, synthetic construct
  source 1..20: mol_type = other RNA
cggtcaggtctcttcaagat

SEQ ID NO: 2120 - RNA, 20 nt, synthetic construct
  source 1..20: mol_type = other RNA
cggtcccggaggagcgtcag

SEQ ID NO: 2121 - RNA, 20 nt, synthetic construct
  source 1..20: mol_type = other RNA
cggtccgcacgtgctgtgca

SEQ ID NO: 2122 - RNA, 20 nt, synthetic construct
  source 1..20: mol_type = other RNA
cggtgccggtccgcacgtgc

SEQ ID NO: 2123 - RNA, 20 nt, synthetic construct
  source 1..20: mol_type = other RNA
cggtgctccttggcagccaa

SEQ ID NO: 2124 - RNA, 20 nt, synthetic construct
  source 1..20: mol_type = other RNA
cggtggacaggaagcagaag

SEQ ID NO: 2125 - RNA, 20 nt, synthetic construct
  source 1..20: mol_type = other RNA
cggtggagcagttctaccgc

SEQ ID NO: 2126 - RNA, 20 nt, synthetic construct
  source 1..20: mol_type = other RNA
cggtgggtgttggactaagc

SEQ ID NO: 2127 - RNA, 20 nt, synthetic construct
  source 1..20: mol_type = other RNA
cggttcaagcaatggcaggg

SEQ ID NO: 2128 - RNA, 20 nt, synthetic construct
  source 1..20: mol_type = other RNA
cgtactggggaagccggcca

SEQ ID NO: 2129 - RNA, 20 nt, synthetic construct
  source 1..20: mol_type = other RNA
cgtatgcctgggcctgctcc

SEQ ID NO: 2130 - RNA, 20 nt, synthetic construct
  source 1..20: mol_type = other RNA
cgtatggtgccgagcccgca

SEQ ID NO: 2131 - RNA, 20 nt, synthetic construct
  source 1..20: mol_type = other RNA
cgtcagggctctgtcttggt

SEQ ID NO: 2132 - RNA, 20 nt, synthetic construct
  source 1..20: mol_type = other RNA
cgtccgggggatgcctatgg

SEQ ID NO: 2133 - RNA, 20 nt, synthetic construct
  source 1..20: mol_type = other RNA
cgtcctccccaagctccagc

SEQ ID NO: 2134 - RNA, 20 nt, synthetic construct
  source 1..20: mol_type = other RNA
cgtcggccttgctcaggctc

SEQ ID NO: 2135 - RNA, 20 nt, synthetic construct
  source 1..20: mol_type = other RNA
cgtctaggatgagcagaacg

SEQ ID NO: 2136 - RNA, 20 nt, synthetic construct
  source 1..20: mol_type = other RNA
cgtctgcggatgggaactgg

SEQ ID NO: 2137 - RNA, 20 nt, synthetic construct
  source 1..20: mol_type = other RNA
cgtgagacacgagtgattgc

SEQ ID NO: 2138 - RNA, 20 nt, synthetic construct
  source 1..20: mol_type = other RNA
cgtgagcgtggagggcagct

SEQ ID NO: 2139 - RNA, 20 nt, synthetic construct
  source 1..20: mol_type = other RNA
cgtgaggacctgggcgatgg

SEQ ID NO: 2140 - RNA, 20 nt, synthetic construct
  source 1..20: mol_type = other RNA
cgtgaggcgggtgcccagaa

SEQ ID NO: 2141 - RNA, 20 nt, synthetic construct
  source 1..20: mol_type = other RNA
cgtgatgcgctactttgaga

SEQ ID NO: 2142 - RNA, 20 nt, synthetic construct
  source 1..20: mol_type = other RNA
cgtgcagccctcgacagccc

SEQ ID NO: 2143 - RNA, 20 nt, synthetic construct
  source 1..20: mol_type = other RNA
cgtgccacgctttctggctg

SEQ ID NO: 2144 - RNA, 20 nt, synthetic construct
  source 1..20: mol_type = other RNA
cgtgctgccaaattccagcc

SEQ ID NO: 2145 - RNA, 20 nt, synthetic construct
  source 1..20: mol_type = other RNA
cgtgctgtgcaggaagccat

SEQ ID NO: 2146 - RNA, 20 nt, synthetic construct
  source 1..20: mol_type = other RNA
cgtggagggcagcttggcgt

SEQ ID NO: 2147 - RNA, 20 nt, synthetic construct
  source 1..20: mol_type = other RNA
cgtggcacgccctccagcca

SEQ ID NO: 2148 - RNA, 20 nt, synthetic construct
  source 1..20: mol_type = other RNA
cgtggcggccgatgaggttt

SEQ ID NO: 2149 - RNA, 20 nt, synthetic construct
  source 1..20: mol_type = other RNA
cgtgggactcagctgtgtca

SEQ ID NO: 2150 - RNA, 20 nt, synthetic construct
  source 1..20: mol_type = other RNA
cgtgggcgcagtgcagcagc

SEQ ID NO: 2151 - RNA, 20 nt, synthetic construct
  source 1..20: mol_type = other RNA
cgtggtacaggagctccccg

SEQ ID NO: 2152 - RNA, 20 nt, synthetic construct
  source 1..20: mol_type = other RNA
cgtgtcagggtgggggtatg

SEQ ID NO: 2153 - RNA, 20 nt, synthetic construct
  source 1..20: mol_type = other RNA
cgtgtcctgcagtgagcggt

SEQ ID NO: 2154 - RNA, 20 nt, synthetic construct
  source 1..20: mol_type = other RNA
cgtgtctcacgcggccgccg

SEQ ID NO: 2155 - RNA, 20 nt, synthetic construct
  source 1..20: mol_type = other RNA
cgttctgcccagtccggggt

SEQ ID NO: 2156 - RNA, 20 nt, synthetic construct
  source 1..20: mol_type = other RNA
cgttctgctcatcctagacg

SEQ ID NO: 2157 - RNA, 20 nt, synthetic construct
  source 1..20: mol_type = other RNA
cgtttcaggtggggtgaggg

SEQ ID NO: 2158 - RNA, 20 nt, synthetic construct
  source 1..20: mol_type = other RNA
ctaagcctttggccatcgcc

SEQ ID NO: 2159 - RNA, 20 nt, synthetic construct
  source 1..20: mol_type = other RNA
ctacaggaggaccagttccc

SEQ ID NO: 2160 - RNA, 20 nt, synthetic construct
  source 1..20: mol_type = other RNA
ctaccgctcactgcaggaca

SEQ ID NO: 2161 - RNA, 20 nt, synthetic construct
  source 1..20: mol_type = other RNA
ctactcgggccatcggcggc

SEQ ID NO: 2162 - RNA, 20 nt, synthetic construct
  source 1..20: mol_type = other RNA
ctactttgagagctcaggga

SEQ ID NO: 2163 - RNA, 20 nt, synthetic construct
  source 1..20: mol_type = other RNA
ctactttgtgccgggcagtg

SEQ ID NO: 2164 - RNA, 20 nt, synthetic construct
  source 1..20: mol_type = other RNA
ctagacggcttcgaggagct

SEQ ID NO: 2165 - RNA, 20 nt, synthetic construct
  source 1..20: mol_type = other RNA
ctagcattgaccccaaggaa

SEQ ID NO: 2166 - RNA, 20 nt, synthetic construct
  source 1..20: mol_type = other RNA
ctaggatgagcagaacgcgg

SEQ ID NO: 2167 - RNA, 20 nt, synthetic construct
  source 1..20: mol_type = other RNA
ctaggatgccatccgggcct

SEQ ID NO: 2168 - RNA, 20 nt, synthetic construct
  source 1..20: mol_type = other RNA
ctaggtactgcgggagctcc

SEQ ID NO: 2169 - RNA, 20 nt, synthetic construct
  source 1..20: mol_type = other RNA
ctagtggaggtggatctggt

SEQ ID NO: 2170 - RNA, 20 nt, synthetic construct
  source 1..20: mol_type = other RNA
ctatgacaactggctggagg

SEQ ID NO: 2171 - RNA, 20 nt, synthetic construct
  source 1..20: mol_type = other RNA
ctatggcctgcaggatctgc

SEQ ID NO: 2172 - RNA, 20 nt, synthetic construct
  source 1..20: mol_type = other RNA
ctatgtcggcctgctgggcc

SEQ ID NO: 2173 - RNA, 20 nt, synthetic construct
  source 1..20: mol_type = other RNA
ctattgggctggggcagtga

SEQ ID NO: 2174 - RNA, 20 nt, synthetic construct
  source 1..20: mol_type = other RNA
ctatttgagctgtccggctt

SEQ ID NO: 2175 - RNA, 20 nt, synthetic construct
  source 1..20: mol_type = other RNA
ctcaaagtagcgcatcacgt

SEQ ID NO: 2176 - RNA, 20 nt, synthetic construct
  source 1..20: mol_type = other RNA
ctcaaatagggcgtcggcct

SEQ ID NO: 2177 - RNA, 20 nt, synthetic construct
  source 1..20: mol_type = other RNA
ctcacatacccccaccctga

SEQ ID NO: 2178 - RNA, 20 nt, synthetic construct
  source 1..20: mol_type = other RNA
ctcaccccacctgaaacggg

SEQ ID NO: 2179 - RNA, 20 nt, synthetic construct
  source 1..20: mol_type = other RNA
ctcacgcctcctgatgcaca

SEQ ID NO: 2180 - RNA, 20 nt, synthetic construct
  source 1..20: mol_type = other RNA
ctcacgcggccgccggtgct

SEQ ID NO: 2181 - RNA, 20 nt, synthetic construct
  source 1..20: mol_type = other RNA
ctcacgggactctatgtcgg

SEQ ID NO: 2182 - RNA, 20 nt, synthetic construct
  source 1..20: mol_type = other RNA
ctcacgtctgcggatgggaa

SEQ ID NO: 2183 - RNA, 20 nt, synthetic construct
  source 1..20: mol_type = other RNA
ctcactgcaggacacgtatg

SEQ ID NO: 2184 - RNA, 20 nt, synthetic construct
  source 1..20: mol_type = other RNA
ctcactgccccagcccaata

SEQ ID NO: 2185 - RNA, 20 nt, synthetic construct
  source 1..20: mol_type = other RNA
ctcagagccagccacagggc

SEQ ID NO: 2186 - RNA, 20 nt, synthetic construct
  source 1..20: mol_type = other RNA
ctcagaggccctgctggagc

SEQ ID NO: 2187 - RNA, 20 nt, synthetic construct
  source 1..20: mol_type = other RNA
ctcagccaggcctccttggg

SEQ ID NO: 2188 - RNA, 20 nt, synthetic construct
  source 1..20: mol_type = other RNA
ctcagctgtgtcacccgttt

SEQ ID NO: 2189 - RNA, 20 nt, synthetic construct
  source 1..20: mol_type = other RNA
ctcaggctctggaccaggcg

SEQ ID NO: 2190 - RNA, 20 nt, synthetic construct
  source 1..20: mol_type = other RNA
ctcagggatgacagagcacc

SEQ ID NO: 2191 - RNA, 20 nt, synthetic construct
  source 1..20: mol_type = other RNA
ctcagtcacagccacagccc

SEQ ID NO: 2192 - RNA, 20 nt, synthetic construct
  source 1..20: mol_type = other RNA
ctcatcctagacggcttcga

SEQ ID NO: 2193 - RNA, 20 nt, synthetic construct
  source 1..20: mol_type = other RNA
ctcatcggccgccacgagtg

SEQ ID NO: 2194 - RNA, 20 nt, synthetic construct
  source 1..20: mol_type = other RNA
ctccaaggccttgcccagta

SEQ ID NO: 2195 - RNA, 20 nt, synthetic construct
  source 1..20: mol_type = other RNA
ctccaccggctctgcaaagg

SEQ ID NO: 2196 - RNA, 20 nt, synthetic construct
  source 1..20: mol_type = other RNA
ctccacgctcacgggactct

SEQ ID NO: 2197 - RNA, 20 nt, synthetic construct
  source 1..20: mol_type = other RNA
ctccactaggatgccatccg

SEQ ID NO: 2198 - RNA, 20 nt, synthetic construct
  source 1..20: mol_type = other RNA
ctccagcagctgccgcgccc

SEQ ID NO: 2199 - RNA, 20 nt, synthetic construct
  source 1..20: mol_type = other RNA
ctccagcagggcctctgaga

SEQ ID NO: 2200 - RNA, 20 nt, synthetic construct
  source 1..20: mol_type = other RNA
ctccagccagttgtcatagg

SEQ ID NO: 2201 - RNA, 20 nt, synthetic construct
  source 1..20: mol_type = other RNA
ctccagcctggcctgcacca

SEQ ID NO: 2202 - RNA, 20 nt, synthetic construct
  source 1..20: mol_type = other RNA
ctccaggctcttgctgctgc

SEQ ID NO: 2203 - RNA, 20 nt, synthetic construct
  source 1..20: mol_type = other RNA
ctccatggagaagccggaca

SEQ ID NO: 2204 - RNA, 20 nt, synthetic construct
  source 1..20: mol_type = other RNA
ctccatggagcaggcccagg

SEQ ID NO: 2205 - RNA, 20 nt, synthetic construct
  source 1..20: mol_type = other RNA
ctcccaggcagcgggcggga

SEQ ID NO: 2206 - RNA, 20 nt, synthetic construct
  source 1..20: mol_type = other RNA
ctcccaggccagcttggcca

SEQ ID NO: 2207 - RNA, 20 nt, synthetic construct
  source 1..20: mol_type = other RNA
ctccccaagctccagcaggg

SEQ ID NO: 2208 - RNA, 20 nt, synthetic construct
  source 1..20: mol_type = other RNA
ctccccaatccagaggggca

SEQ ID NO: 2209 - RNA, 20 nt, synthetic construct
  source 1..20: mol_type = other RNA
ctccccggccgcctctcttt

SEQ ID NO: 2210 - RNA, 20 nt, synthetic construct
  source 1..20: mol_type = other RNA
ctcccgcagtacctagcatt

SEQ ID NO: 2211 - RNA, 20 nt, synthetic construct
  source 1..20: mol_type = other RNA
ctcccgcccgctgcctggga

SEQ ID NO: 2212 - RNA, 20 nt, synthetic construct
  source 1..20: mol_type = other RNA
ctccctccgggggctgctgg

SEQ ID NO: 2213 - RNA, 20 nt, synthetic construct
  source 1..20: mol_type = other RNA
ctccctggacctccgcagca

SEQ ID NO: 2214 - RNA, 20 nt, synthetic construct
  source 1..20: mol_type = other RNA
ctccctgggcccacagccac

SEQ ID NO: 2215 - RNA, 20 nt, synthetic construct
  source 1..20: mol_type = other RNA
ctccgaggttgcaccctcct

SEQ ID NO: 2216 - RNA, 20 nt, synthetic construct
  source 1..20: mol_type = other RNA
ctccgcagcactggcatttg

SEQ ID NO: 2217 - RNA, 20 nt, synthetic construct
  source 1..20: mol_type = other RNA
ctccgggaccggccacttct

SEQ ID NO: 2218 - RNA, 20 nt, synthetic construct
  source 1..20: mol_type = other RNA
ctcctcacagcccggccccg

SEQ ID NO: 2219 - RNA, 20 nt, synthetic construct
  source 1..20: mol_type = other RNA
ctcctccgggaccggccact

SEQ ID NO: 2220 - RNA, 20 nt, synthetic construct
  source 1..20: mol_type = other RNA
ctcctcctcacagcccggcc

SEQ ID NO: 2221 - RNA, 20 nt, synthetic construct
  source 1..20: mol_type = other RNA
ctcctcgaagccgtctagga

SEQ ID NO: 2222 - RNA, 20 nt, synthetic construct
  source 1..20: mol_type = other RNA
ctcctcggcctcgtgggcgc

SEQ ID NO: 2223 - RNA, 20 nt, synthetic construct
  source 1..20: mol_type = other RNA
ctcctctccagcctggcctg

SEQ ID NO: 2224 - RNA, 20 nt, synthetic construct
  source 1..20: mol_type = other RNA
ctcctgatgcacatgtactg

SEQ ID NO: 2225 - RNA, 20 nt, synthetic construct
  source 1..20: mol_type = other RNA
ctcctgcaatgcttcctggg

SEQ ID NO: 2226 - RNA, 20 nt, synthetic construct
  source 1..20: mol_type = other RNA
ctcctgtaccacgtgctgcc

SEQ ID NO: 2227 - RNA, 20 nt, synthetic construct
  source 1..20: mol_type = other RNA
ctcctgtagggtactttgat

SEQ ID NO: 2228 - RNA, 20 nt, synthetic construct
  source 1..20: mol_type = other RNA
ctccttggcagccaacagca

SEQ ID NO: 2229 - RNA, 20 nt, synthetic construct
  source 1..20: mol_type = other RNA
ctccttgggccagctgccgt

SEQ ID NO: 2230 - RNA, 20 nt, synthetic construct
  source 1..20: mol_type = other RNA
ctccttgtccttgatttcgc

SEQ ID NO: 2231 - RNA, 20 nt, synthetic construct
  source 1..20: mol_type = other RNA
ctcgaagccgtctaggatga

SEQ ID NO: 2232 - RNA, 20 nt, synthetic construct
  source 1..20: mol_type = other RNA
ctcgcaagcaccttctgctt

SEQ ID NO: 2233 - RNA, 20 nt, synthetic construct
  source 1..20: mol_type = other RNA
ctcggactctgcggcccgcg

SEQ ID NO: 2234 - RNA, 20 nt, synthetic construct
  source 1..20: mol_type = other RNA
ctcggagcagcttcttctgg

SEQ ID NO: 2235 - RNA, 20 nt, synthetic construct
  source 1..20: mol_type = other RNA
ctcggcaccatacgtgtcct

SEQ ID NO: 2236 - RNA, 20 nt, synthetic construct
  source 1..20: mol_type = other RNA
ctcggcctcgtgggcgcagt

SEQ ID NO: 2237 - RNA, 20 nt, synthetic construct
  source 1..20: mol_type = other RNA
ctcgggccatcggcggctgc

SEQ ID NO: 2238 - RNA, 20 nt, synthetic construct
  source 1..20: mol_type = other RNA
ctcggtggacaggaagcaga

SEQ ID NO: 2239 - RNA, 20 nt, synthetic construct
  source 1..20: mol_type = other RNA
ctcgtggcggccgatgaggt

SEQ ID NO: 2240 - RNA, 20 nt, synthetic construct
  source 1..20: mol_type = other RNA
ctcgtgggactcagctgtgt

SEQ ID NO: 2241 - RNA, 20 nt, synthetic construct
  source 1..20: mol_type = other RNA
ctcgtgggcgcagtgcagca

SEQ ID NO: 2242 - RNA, 20 nt, synthetic construct
  source 1..20: mol_type = other RNA
ctcgtgtctcacgcggccgc

SEQ ID NO: 2243 - RNA, 20 nt, synthetic construct
  source 1..20: mol_type = other RNA
ctctatgtcggcctgctggg

SEQ ID NO: 2244 - RNA, 20 nt, synthetic construct
  source 1..20: mol_type = other RNA
ctctcaaagtagcgcatcac

SEQ ID NO: 2245 - RNA, 20 nt, synthetic construct
  source 1..20: mol_type = other RNA
ctctcacatacccccaccct

SEQ ID NO: 2246 - RNA, 20 nt, synthetic construct
  source 1..20: mol_type = other RNA
ctctcagaggccctgctgga

SEQ ID NO: 2247 - RNA, 20 nt, synthetic construct
  source 1..20: mol_type = other RNA
ctctccagcctggcctgcac

SEQ ID NO: 2248 - RNA, 20 nt, synthetic construct
  source 1..20: mol_type = other RNA
ctctcttttctgggcacccg

SEQ ID NO: 2249 - RNA, 20 nt, synthetic construct
  source 1..20: mol_type = other RNA
ctctgagagctggcacactg

SEQ ID NO: 2250 - RNA, 20 nt, synthetic construct
  source 1..20: mol_type = other RNA
ctctgagtggcgaaatcaag

SEQ ID NO: 2251 - RNA, 20 nt, synthetic construct
  source 1..20: mol_type = other RNA
ctctgcaaaggccaggggcg

SEQ ID NO: 2252 - RNA, 20 nt, synthetic construct
  source 1..20: mol_type = other RNA
ctctgcggcccgcggtgggt

SEQ ID NO: 2253 - RNA, 20 nt, synthetic construct
  source 1..20: mol_type = other RNA
ctctggaccaggcggccccg

SEQ ID NO: 2254 - RNA, 20 nt, synthetic construct
  source 1..20: mol_type = other RNA
ctctggattggggagcctcg

SEQ ID NO: 2255 - RNA, 20 nt, synthetic construct
  source 1..20: mol_type = other RNA
ctctgtcatccctgagctct

SEQ ID NO: 2256 - RNA, 20 nt, synthetic construct
  source 1..20: mol_type = other RNA
ctctgtcccctgccattgct

SEQ ID NO: 2257 - RNA, 20 nt, synthetic construct
  source 1..20: mol_type = other RNA
ctctgtcttggtgctctgtc

SEQ ID NO: 2258 - RNA, 20 nt, synthetic construct
  source 1..20: mol_type = other RNA
ctcttcaagatgtggctgaa

SEQ ID NO: 2259 - RNA, 20 nt, synthetic construct
  source 1..20: mol_type = other RNA
ctcttccccaagcccctcac

SEQ ID NO: 2260 - RNA, 20 nt, synthetic construct
  source 1..20: mol_type = other RNA
ctcttctccctgggcccaca

SEQ ID NO: 2261 - RNA, 20 nt, synthetic construct
  source 1..20: mol_type = other RNA
ctcttcttccttggggtcaa

SEQ ID NO: 2262 - RNA, 20 nt, synthetic construct
  source 1..20: mol_type = other RNA
ctcttgccctgaccagcttt

SEQ ID NO: 2263 - RNA, 20 nt, synthetic construct
  source 1..20: mol_type = other RNA
ctcttgctgctgctcctctc

SEQ ID NO: 2264 - RNA, 20 nt, synthetic construct
  source 1..20: mol_type = other RNA
ctcttttctgggcacccgcc

SEQ ID NO: 2265 - RNA, 20 nt, synthetic construct
  source 1..20: mol_type = other RNA
ctgaaaacctcatcggccgc

SEQ ID NO: 2266 - RNA, 20 nt, synthetic construct
  source 1..20: mol_type = other RNA
ctgaaacgggtgacacagct

SEQ ID NO: 2267 - RNA, 20 nt, synthetic construct
  source 1..20: mol_type = other RNA
ctgaagcggctgcagccggg

SEQ ID NO: 2268 - RNA, 20 nt, synthetic construct
  source 1..20: mol_type = other RNA
ctgacacgcccctggccttt

SEQ ID NO: 2269 - RNA, 20 nt, synthetic construct
  source 1..20: mol_type = other RNA
ctgaccagctttgcccagca

SEQ ID NO: 2270 - RNA, 20 nt, synthetic construct
  source 1..20: mol_type = other RNA
ctgaccgcgttctgctcatc

SEQ ID NO: 2271 - RNA, 20 nt, synthetic construct
  source 1..20: mol_type = other RNA
ctgacgctcctccgggaccg

SEQ ID NO: 2272 - RNA, 20 nt, synthetic construct
  source 1..20: mol_type = other RNA
ctgagaagaagtggccggtc

SEQ ID NO: 2273 - RNA, 20 nt, synthetic construct
  source 1..20: mol_type = other RNA
ctgagagctggcacactgcc

SEQ ID NO: 2274 - RNA, 20 nt, synthetic construct
  source 1..20: mol_type = other RNA
ctgagcaaggccgacgccct

SEQ ID NO: 2275 - RNA, 20 nt, synthetic construct
  source 1..20: mol_type = other RNA
ctgagctctcaaagtagcgc

SEQ ID NO: 2276 - RNA, 20 nt, synthetic construct
  source 1..20: mol_type = other RNA
ctgaggtgctgttggctgcc

SEQ ID NO: 2277 - RNA, 20 nt, synthetic construct
  source 1..20: mol_type = other RNA
ctgagtcccacgaggctccc

SEQ ID NO: 2278 - RNA, 20 nt, synthetic construct
  source 1..20: mol_type = other RNA
ctgagtggcgaaatcaagga

SEQ ID NO: 2279 - RNA, 20 nt, synthetic construct
  source 1..20: mol_type = other RNA
ctgatcttccagcctcccgc

SEQ ID NO: 2280 - RNA, 20 nt, synthetic construct
  source 1..20: mol_type = other RNA
ctgatgcacatgtactgggc

SEQ ID NO: 2281 - RNA, 20 nt, synthetic construct
  source 1..20: mol_type = other RNA
ctgcaaaggccaggggcgtg

SEQ ID NO: 2282 - RNA, 20 nt, synthetic construct
  source 1..20: mol_type = other RNA
ctgcaatgcttcctgggggc

SEQ ID NO: 2283 - RNA, 20 nt, synthetic construct
  source 1..20: mol_type = other RNA
ctgcacagcacgtgcggacc

SEQ ID NO: 2284 - RNA, 20 nt, synthetic construct
  source 1..20: mol_type = other RNA
ctgcaccagatccacctcca

SEQ ID NO: 2285 - RNA, 20 nt, synthetic construct
  source 1..20: mol_type = other RNA
ctgcacggcccagcaggccg

SEQ ID NO: 2286 - RNA, 20 nt, synthetic construct
  source 1..20: mol_type = other RNA
ctgcactgcgcccacgaggc

SEQ ID NO: 2287 - RNA, 20 nt, synthetic construct
  source 1..20: mol_type = other RNA
ctgcagccgcttcaggtacc

SEQ ID NO: 2288 - RNA, 20 nt, synthetic construct
  source 1..20: mol_type = other RNA
ctgcagccggggacactgcg

SEQ ID NO: 2289 - RNA, 20 nt, synthetic construct
  source 1..20: mol_type = other RNA
ctgcaggacacgtatggtgc

SEQ ID NO: 2290 - RNA, 20 nt, synthetic construct
  source 1..20: mol_type = other RNA
ctgcaggatctgctcttctc

SEQ ID NO: 2291 - RNA, 20 nt, synthetic construct
  source 1..20: mol_type = other RNA
ctgcaggccataggcatccc

SEQ ID NO: 2292 - RNA, 20 nt, synthetic construct
  source 1..20: mol_type = other RNA
ctgcagtgagcggtagaact

SEQ ID NO: 2293 - RNA, 20 nt, synthetic construct
  source 1..20: mol_type = other RNA
ctgccaaattccagcctcct

SEQ ID NO: 2294 - RNA, 20 nt, synthetic construct
  source 1..20: mol_type = other RNA
ctgccaaggagcaccggcgg

SEQ ID NO: 2295 - RNA, 20 nt, synthetic construct
  source 1..20: mol_type = other RNA
ctgccattgcttgaaccgtc

SEQ ID NO: 2296 - RNA, 20 nt, synthetic construct
  source 1..20: mol_type = other RNA
ctgcccagtccggggtggcc

SEQ ID NO: 2297 - RNA, 20 nt, synthetic construct
  source 1..20: mol_type = other RNA
ctgccccagcccaatagctc

SEQ ID NO: 2298 - RNA, 20 nt, synthetic construct
  source 1..20: mol_type = other RNA
ctgcccggcacaaagtaggg

SEQ ID NO: 2299 - RNA, 20 nt, synthetic construct
  source 1..20: mol_type = other RNA
ctgccctccacgctcacggg

SEQ ID NO: 2300 - RNA, 20 nt, synthetic construct
  source 1..20: mol_type = other RNA
ctgccgcgcccgcagtgtcc

SEQ ID NO: 2301 - RNA, 20 nt, synthetic construct
  source 1..20: mol_type = other RNA
ctgccgttctgcccagtccg

SEQ ID NO: 2302 - RNA, 20 nt, synthetic construct
  source 1..20: mol_type = other RNA
ctgcctcggtggacaggaag

SEQ ID NO: 2303 - RNA, 20 nt, synthetic construct
  source 1..20: mol_type = other RNA
ctgcctctcacataccccca

SEQ ID NO: 2304 - RNA, 20 nt, synthetic construct
  source 1..20: mol_type = other RNA
ctgcctgggagccctactcg

SEQ ID NO: 2305 - RNA, 20 nt, synthetic construct
  source 1..20: mol_type = other RNA
ctgcgcccacgaggccgagg

SEQ ID NO: 2306 - RNA, 20 nt, synthetic construct
  source 1..20: mol_type = other RNA
ctgcggaggtccagggagaa

SEQ ID NO: 2307 - RNA, 20 nt, synthetic construct
  source 1..20: mol_type = other RNA
ctgcggatgggaactggtcc

SEQ ID NO: 2308 - RNA, 20 nt, synthetic construct
  source 1..20: mol_type = other RNA
ctgcggcccagctcccaggc

SEQ ID NO: 2309 - RNA, 20 nt, synthetic construct
  source 1..20: mol_type = other RNA
ctgcggcccgcggtgggtgt

SEQ ID NO: 2310 - RNA, 20 nt, synthetic construct
  source 1..20: mol_type = other RNA
ctgcgggagctccttgtcct

SEQ ID NO: 2311 - RNA, 20 nt, synthetic construct
  source 1..20: mol_type = other RNA
ctgcgggcgcggcagctgct

SEQ ID NO: 2312 - RNA, 20 nt, synthetic construct
  source 1..20: mol_type = other RNA
ctgcgggctcggcaccatac

SEQ ID NO: 2313 - RNA, 20 nt, synthetic construct
  source 1..20: mol_type = other RNA
ctgctcatcctagacggctt

SEQ ID NO: 2314 - RNA, 20 nt, synthetic construct
  source 1..20: mol_type = other RNA
ctgctccaccggctctgcaa

SEQ ID NO: 2315 - RNA, 20 nt, synthetic construct
  source 1..20: mol_type = other RNA
ctgctccatggagaagccgg

SEQ ID NO: 2316 - RNA, 20 nt, synthetic construct
  source 1..20: mol_type = other RNA
ctgctccctccgggggctgc

SEQ ID NO: 2317 - RNA, 20 nt, synthetic construct
  source 1..20: mol_type = other RNA
ctgctccgaggttgcaccct

SEQ ID NO: 2318 - RNA, 20 nt, synthetic construct
  source 1..20: mol_type = other RNA
ctgctcctctccagcctggc

SEQ ID NO: 2319 - RNA, 20 nt, synthetic construct
  source 1..20: mol_type = other RNA
ctgctcttctccctgggccc

SEQ ID NO: 2320 - RNA, 20 nt, synthetic construct
  source 1..20: mol_type = other RNA
ctgctgcactgcgcccacga

SEQ ID NO: 2321 - RNA, 20 nt, synthetic construct
  source 1..20: mol_type = other RNA
ctgctgctcctctccagcct

SEQ ID NO: 2322 - RNA, 20 nt, synthetic construct
  source 1..20: mol_type = other RNA
ctgctggagctgctgcactg

SEQ ID NO: 2323 - RNA, 20 nt, synthetic construct
  source 1..20: mol_type = other RNA
ctgctggagcttggggagga

SEQ ID NO: 2324 - RNA, 20 nt, synthetic construct
  source 1..20: mol_type = other RNA
ctgctggccggccttttcca

SEQ ID NO: 2325 - RNA, 20 nt, synthetic construct
  source 1..20: mol_type = other RNA
ctgctgggccgtgcagccct

SEQ ID NO: 2326 - RNA, 20 nt, synthetic construct
  source 1..20: mol_type = other RNA
ctgcttcctgtccaccgagg

SEQ ID NO: 2327 - RNA, 20 nt, synthetic construct
  source 1..20: mol_type = other RNA
ctggaaaaggccggccagca

SEQ ID NO: 2328 - RNA, 20 nt, synthetic construct
  source 1..20: mol_type = other RNA
ctggaagatcagcccagcca

SEQ ID NO: 2329 - RNA, 20 nt, synthetic construct
  source 1..20: mol_type = other RNA
ctggaagcgcaagatggctt

SEQ ID NO: 2330 - RNA, 20 nt, synthetic construct
  source 1..20: mol_type = other RNA
ctggaatttggcagcacgtg

SEQ ID NO: 2331 - RNA, 20 nt, synthetic construct
  source 1..20: mol_type = other RNA
ctggacctccgcagcactgg

SEQ ID NO: 2332 - RNA, 20 nt, synthetic construct
  source 1..20: mol_type = other RNA
ctggagaggagcagcagcaa

SEQ ID NO: 2333 - RNA, 20 nt, synthetic construct
  source 1..20: mol_type = other RNA
ctggagcgggaactggccac

SEQ ID NO: 2334 - RNA, 20 nt, synthetic construct
  source 1..20: mol_type = other RNA
ctggagctgctgcactgcgc

SEQ ID NO: 2335 - RNA, 20 nt, synthetic construct
  source 1..20: mol_type = other RNA
ctggagcttggggaggacgc

SEQ ID NO: 2336 - RNA, 20 nt, synthetic construct
  source 1..20: mol_type = other RNA
ctggagggcgtgccacgctt

SEQ ID NO: 2337 - RNA, 20 nt, synthetic construct
  source 1..20: mol_type = other RNA
ctggattggggagcctcgtg

SEQ ID NO: 2338 - RNA, 20 nt, synthetic construct
  source 1..20: mol_type = other RNA
ctggcacactgcccggcaca

SEQ ID NO: 2339 - RNA, 20 nt, synthetic construct
  source 1..20: mol_type = other RNA
ctggcagagctggccaagct

SEQ ID NO: 2340 - RNA, 20 nt, synthetic construct
  source 1..20: mol_type = other RNA
ctggcatttgcccctctgga

SEQ ID NO: 2341 - RNA, 20 nt, synthetic construct
  source 1..20: mol_type = other RNA
ctggccaagctggcctggga

SEQ ID NO: 2342 - RNA, 20 nt, synthetic construct
  source 1..20: mol_type = other RNA
ctggccaccccggactgggc

SEQ ID NO: 2343 - RNA, 20 nt, synthetic construct
  source 1..20: mol_type = other RNA
ctggcccaaggaggcctggc

SEQ ID NO: 2344 - RNA, 20 nt, synthetic construct
  source 1..20: mol_type = other RNA
ctggccggccttttccagaa

SEQ ID NO: 2345 - RNA, 20 nt, synthetic construct
  source 1..20: mol_type = other RNA
ctggcctgcaccagatccac

SEQ ID NO: 2346 - RNA, 20 nt, synthetic construct
  source 1..20: mol_type = other RNA
ctggcctgggagctgggccg

SEQ ID NO: 2347 - RNA, 20 nt, synthetic construct
  source 1..20: mol_type = other RNA
ctggccttccccagcttcct

SEQ ID NO: 2348 - RNA, 20 nt, synthetic construct
  source 1..20: mol_type = other RNA
ctggcctttgcagagccggt

SEQ ID NO: 2349 - RNA, 20 nt, synthetic construct
  source 1..20: mol_type = other RNA
ctggctctgagtggcgaaat

SEQ ID NO: 2350 - RNA, 20 nt, synthetic construct
  source 1..20: mol_type = other RNA
ctggctgaggtgctgttggc

SEQ ID NO: 2351 - RNA, 20 nt, synthetic construct
  source 1..20: mol_type = other RNA
ctggctggagggcgtgccac

SEQ ID NO: 2352 - RNA, 20 nt, synthetic construct
  source 1..20: mol_type = other RNA
ctggctgggctgatcttcca

SEQ ID NO: 2353 - RNA, 20 nt, synthetic construct
  source 1..20: mol_type = other RNA
ctgggagccctactcgggcc

SEQ ID NO: 2354 - RNA, 20 nt, synthetic construct
  source 1..20: mol_type = other RNA
ctgggagctgggccgcagac

SEQ ID NO: 2355 - RNA, 20 nt, synthetic construct
  source 1..20: mol_type = other RNA
ctgggcaaagctggtcaggg

SEQ ID NO: 2356 - RNA, 20 nt, synthetic construct
  source 1..20: mol_type = other RNA
ctgggcaaggccttggaggc

SEQ ID NO: 2357 - RNA, 20 nt, synthetic construct
  source 1..20: mol_type = other RNA
ctgggcacccgcctcacgcc

SEQ ID NO: 2358 - RNA, 20 nt, synthetic construct
  source 1..20: mol_type = other RNA
ctgggcagaacggcagctgg

SEQ ID NO: 2359 - RNA, 20 nt, synthetic construct
  source 1..20: mol_type = other RNA
ctgggcccacagccactcgt

SEQ ID NO: 2360 - RNA, 20 nt, synthetic construct
  source 1..20: mol_type = other RNA
ctgggccgcagacatcaaag

SEQ ID NO: 2361 - RNA, 20 nt, synthetic construct
  source 1..20: mol_type = other RNA
ctgggccgtgcagccctcga

SEQ ID NO: 2362 - RNA, 20 nt, synthetic construct
  source 1..20: mol_type = other RNA
ctgggcctgctccatggaga

SEQ ID NO: 2363 - RNA, 20 nt, synthetic construct
  source 1..20: mol_type = other RNA
ctgggcgatggccaaaggct

SEQ ID NO: 2364 - RNA, 20 nt, synthetic construct
  source 1..20: mol_type = other RNA
ctgggctgatcttccagcct

SEQ ID NO: 2365 - RNA, 20 nt, synthetic construct
  source 1..20: mol_type = other RNA
ctgggcttgtggccggcttc

SEQ ID NO: 2366 - RNA, 20 nt, synthetic construct
  source 1..20: mol_type = other RNA
ctggggaagccggccacaag

SEQ ID NO: 2367 - RNA, 20 nt, synthetic construct
  source 1..20: mol_type = other RNA
ctggggaaggccagctcgga

SEQ ID NO: 2368 - RNA, 20 nt, synthetic construct
  source 1..20: mol_type = other RNA
ctggggcagtgagccgggcc

SEQ ID NO: 2369 - RNA, 20 nt, synthetic construct
  source 1..20: mol_type = other RNA
ctgggggccctgtggctggc

SEQ ID NO: 2370 - RNA, 20 nt, synthetic construct
  source 1..20: mol_type = other RNA
ctggtcagggcaagagctat

SEQ ID NO: 2371 - RNA, 20 nt, synthetic construct
  source 1..20: mol_type = other RNA
ctggtccagagcctgagcaa

SEQ ID NO: 2372 - RNA, 20 nt, synthetic construct
  source 1..20: mol_type = other RNA
ctggtcctcctgtagggtac

SEQ ID NO: 2373 - RNA, 20 nt, synthetic construct
  source 1..20: mol_type = other RNA
ctggtgcaggccaggctgga

SEQ ID NO: 2374 - RNA, 20 nt, synthetic construct
  source 1..20: mol_type = other RNA
ctgtaccacgtgctgccaaa

SEQ ID NO: 2375 - RNA, 20 nt, synthetic construct
  source 1..20: mol_type = other RNA
ctgtagggtactttgatgtc

SEQ ID NO: 2376 - RNA, 20 nt, synthetic construct
  source 1..20: mol_type = other RNA
ctgtcatccctgagctctca

SEQ ID NO: 2377 - RNA, 20 nt, synthetic construct
  source 1..20: mol_type = other RNA
ctgtccaccgaggcagccgc

SEQ ID NO: 2378 - RNA, 20 nt, synthetic construct
  source 1..20: mol_type = other RNA
ctgtcccctgccattgcttg

SEQ ID NO: 2379 - RNA, 20 nt, synthetic construct
  source 1..20: mol_type = other RNA
ctgtccggcttctccatgga

SEQ ID NO: 2380 - RNA, 20 nt, synthetic construct
  source 1..20: mol_type = other RNA
ctgtcgagggctgcacggcc

SEQ ID NO: 2381 - RNA, 20 nt, synthetic construct
  source 1..20: mol_type = other RNA
ctgtcttggtgctctgtcat

SEQ ID NO: 2382 - RNA, 20 nt, synthetic construct
  source 1..20: mol_type = other RNA
ctgtgactgagaagaagtgg

SEQ ID NO: 2383 - RNA, 20 nt, synthetic construct
  source 1..20: mol_type = other RNA
ctgtgaggaggagggtgcaa

SEQ ID NO: 2384 - RNA, 20 nt, synthetic construct
  source 1..20: mol_type = other RNA
ctgtgcaggaagccatcttg

SEQ ID NO: 2385 - RNA, 20 nt, synthetic construct
  source 1..20: mol_type = other RNA
ctgtgctgggcaaagctggt

SEQ ID NO: 2386 - RNA, 20 nt, synthetic construct
  source 1..20: mol_type = other RNA
ctgtggctggctctgagtgg

SEQ ID NO: 2387 - RNA, 20 nt, synthetic construct
  source 1..20: mol_type = other RNA
ctgtggctgtgactgagaag

SEQ ID NO: 2388 - RNA, 20 nt, synthetic construct
  source 1..20: mol_type = other RNA
ctgtgggcccagggagaaga

SEQ ID NO: 2389 - RNA, 20 nt, synthetic construct
  source 1..20: mol_type = other RNA
ctgtgtcacccgtttcaggt

SEQ ID NO: 2390 - RNA, 20 nt, synthetic construct
  source 1..20: mol_type = other RNA
ctgttggctgccaaggagca

SEQ ID NO: 2391 - RNA, 20 nt, synthetic construct
  source 1..20: mol_type = other RNA
cttagtccaacacccaccgc

SEQ ID NO: 2392 - RNA, 20 nt, synthetic construct
  source 1..20: mol_type = other RNA
cttcaagatgtggctgaaaa

SEQ ID NO: 2393 - RNA, 20 nt, synthetic construct
  source 1..20: mol_type = other RNA
cttcaggtacctcgcaagca

SEQ ID NO: 2394 - RNA, 20 nt, synthetic construct
  source 1..20: mol_type = other RNA
cttccagcctcccgcccgct

SEQ ID NO: 2395 - RNA, 20 nt, synthetic construct
  source 1..20: mol_type = other RNA
cttccagctcctcgaagccg

SEQ ID NO: 2396 - RNA, 20 nt, synthetic construct
  source 1..20: mol_type = other RNA
cttccccaagcccctcaccc

SEQ ID NO: 2397 - RNA, 20 nt, synthetic construct
  source 1..20: mol_type = other RNA
cttccccagcttcctcctgc

SEQ ID NO: 2398 - RNA, 20 nt, synthetic construct
  source 1..20: mol_type = other RNA
cttccccagtacgactttgt

SEQ ID NO: 2399 - RNA, 20 nt, synthetic construct
  source 1..20: mol_type = other RNA
cttcctcctgcaatgcttcc

SEQ ID NO: 2400 - RNA, 20 nt, synthetic construct
  source 1..20: mol_type = other RNA
cttcctgcacagcacgtgcg

SEQ ID NO: 2401 - RNA, 20 nt, synthetic construct
  source 1..20: mol_type = other RNA
cttcctgggggccctgtggc

SEQ ID NO: 2402 - RNA, 20 nt, synthetic construct
  source 1..20: mol_type = other RNA
cttcctgtccaccgaggcag

SEQ ID NO: 2403 - RNA, 20 nt, synthetic construct
  source 1..20: mol_type = other RNA
cttccttggggtcaatgcta

SEQ ID NO: 2404 - RNA, 20 nt, synthetic construct
  source 1..20: mol_type = other RNA
cttcgaggagctggaagcgc

SEQ ID NO: 2405 - RNA, 20 nt, synthetic construct
  source 1..20: mol_type = other RNA
cttctcagtcacagccacag

SEQ ID NO: 2406 - RNA, 20 nt, synthetic construct
  source 1..20: mol_type = other RNA
cttctccatggagcaggccc

SEQ ID NO: 2407 - RNA, 20 nt, synthetic construct
  source 1..20: mol_type = other RNA
cttctccctggacctccgca

SEQ ID NO: 2408 - RNA, 20 nt, synthetic construct
  source 1..20: mol_type = other RNA
cttctccctgggcccacagc

SEQ ID NO: 2409 - RNA, 20 nt, synthetic construct
  source 1..20: mol_type = other RNA
cttctctgtcccctgccatt

SEQ ID NO: 2410 - RNA, 20 nt, synthetic construct
  source 1..20: mol_type = other RNA
cttctgcttcctgtccaccg

SEQ ID NO: 2411 - RNA, 20 nt, synthetic construct
  source 1..20: mol_type = other RNA
cttctggaaaaggccggcca

SEQ ID NO: 2412 - RNA, 20 nt, synthetic construct
  source 1..20: mol_type = other RNA
cttcttccttggggtcaatg

SEQ ID NO: 2413 - RNA, 20 nt, synthetic construct
  source 1..20: mol_type = other RNA
cttcttctcagtcacagcca

SEQ ID NO: 2414 - RNA, 20 nt, synthetic construct
  source 1..20: mol_type = other RNA
cttcttctggaaaaggccgg

SEQ ID NO: 2415 - RNA, 20 nt, synthetic construct
  source 1..20: mol_type = other RNA
cttgaaccgtccgggggatg

SEQ ID NO: 2416 - RNA, 20 nt, synthetic construct
  source 1..20: mol_type = other RNA
cttgaagagacctgaccgcg

SEQ ID NO: 2417 - RNA, 20 nt, synthetic construct
  source 1..20: mol_type = other RNA
cttgatttcgccactcagag

SEQ ID NO: 2418 - RNA, 20 nt, synthetic construct
  source 1..20: mol_type = other RNA
cttgcccagtacatgtgcat

SEQ ID NO: 2419 - RNA, 20 nt, synthetic construct
  source 1..20: mol_type = other RNA
cttgccctgaccagctttgc

SEQ ID NO: 2420 - RNA, 20 nt, synthetic construct
  source 1..20: mol_type = other RNA
cttgcgaggtacctgaagcg

SEQ ID NO: 2421 - RNA, 20 nt, synthetic construct
  source 1..20: mol_type = other RNA
cttgcgcttccagctcctcg

SEQ ID NO: 2422 - RNA, 20 nt, synthetic construct
  source 1..20: mol_type = other RNA
cttgctcaggctctggacca

SEQ ID NO: 2423 - RNA, 20 nt, synthetic construct
  source 1..20: mol_type = other RNA
cttgctgctgctcctctcca

SEQ ID NO: 2424 - RNA, 20 nt, synthetic construct
  source 1..20: mol_type = other RNA
cttggaggcggcgggccaag

SEQ ID NO: 2425 - RNA, 20 nt, synthetic construct
  source 1..20: mol_type = other RNA
cttggcagccaacagcacct

SEQ ID NO: 2426 - RNA, 20 nt, synthetic construct
  source 1..20: mol_type = other RNA
cttggccagctctgccaggg

SEQ ID NO: 2427 - RNA, 20 nt, synthetic construct
  source 1..20: mol_type = other RNA
cttggcccgccgcctccaag

SEQ ID NO: 2428 - RNA, 20 nt, synthetic construct
  source 1..20: mol_type = other RNA
cttggcgtcctccccaagct

SEQ ID NO: 2429 - RNA, 20 nt, synthetic construct
  source 1..20: mol_type = other RNA
cttgggccagctgccgttct

SEQ ID NO: 2430 - RNA, 20 nt, synthetic construct
  source 1..20: mol_type = other RNA
cttggggaagagacatcctt

SEQ ID NO: 2431 - RNA, 20 nt, synthetic construct
  source 1..20: mol_type = other RNA
cttggggaggacgccaagct

SEQ ID NO: 2432 - RNA, 20 nt, synthetic construct
  source 1..20: mol_type = other RNA
cttggggtcaatgctaggta

SEQ ID NO: 2433 - RNA, 20 nt, synthetic construct
  source 1..20: mol_type = other RNA
cttggtgctctgtcatccct

SEQ ID NO: 2434 - RNA, 20 nt, synthetic construct
  source 1..20: mol_type = other RNA
cttgtccttgatttcgccac

SEQ ID NO: 2435 - RNA, 20 nt, synthetic construct
  source 1..20: mol_type = other RNA
cttgtggccggcttccccag

SEQ ID NO: 2436 - RNA, 20 nt, synthetic construct
  source 1..20: mol_type = other RNA
ctttctggctgggctgatct

SEQ ID NO: 2437 - RNA, 20 nt, synthetic construct
  source 1..20: mol_type = other RNA
ctttgagagctcagggatga

SEQ ID NO: 2438 - RNA, 20 nt, synthetic construct
  source 1..20: mol_type = other RNA
ctttgatgtctgcggcccag

SEQ ID NO: 2439 - RNA, 20 nt, synthetic construct
  source 1..20: mol_type = other RNA
ctttgcagagccggtggagc

SEQ ID NO: 2440 - RNA, 20 nt, synthetic construct
  source 1..20: mol_type = other RNA
ctttgcccagcacagcaatc

SEQ ID NO: 2441 - RNA, 20 nt, synthetic construct
  source 1..20: mol_type = other RNA
ctttggccatcgcccaggtc

SEQ ID NO: 2442 - RNA, 20 nt, synthetic construct
  source 1..20: mol_type = other RNA
ctttgtcttctctgtcccct

SEQ ID NO: 2443 - RNA, 20 nt, synthetic construct
  source 1..20: mol_type = other RNA
ctttgtgccgggcagtgtgc

SEQ ID NO: 2444 - RNA, 20 nt, synthetic construct
  source 1..20: mol_type = other RNA
cttttccagaagaagctgct

SEQ ID NO: 2445 - RNA, 20 nt, synthetic construct
  source 1..20: mol_type = other RNA
cttttctgggcacccgcctc

SEQ ID NO: 2446 - RNA, 20 nt, synthetic construct
  source 1..20: mol_type = other RNA
gaaaacctcatcggccgcca

SEQ ID NO: 2447 - RNA, 20 nt, synthetic construct
  source 1..20: mol_type = other RNA
gaaaagagaggcggccgggg

SEQ ID NO: 2448 - RNA, 20 nt, synthetic construct
  source 1..20: mol_type = other RNA
gaaaaggccggccagcagcc

SEQ ID NO: 2449 - RNA, 20 nt, synthetic construct
  source 1..20: mol_type = other RNA
gaaacgggtgacacagctga

SEQ ID NO: 2450 - RNA, 20 nt, synthetic construct
  source 1..20: mol_type = other RNA
gaaagcgtggcacgccctcc

SEQ ID NO: 2451 - RNA, 20 nt, synthetic construct
  source 1..20: mol_type = other RNA
gaaatcaaggacaaggagct

SEQ ID NO: 2452 - RNA, 20 nt, synthetic construct
  source 1..20: mol_type = other RNA
gaaccgtccgggggatgcct

SEQ ID NO: 2453 - RNA, 20 nt, synthetic construct
  source 1..20: mol_type = other RNA
gaacgcggtcaggtctcttc

SEQ ID NO: 2454 - RNA, 20 nt, synthetic construct
  source 1..20: mol_type = other RNA
gaacggcagctggcccaagg

SEQ ID NO: 2455 - RNA, 20 nt, synthetic construct
  source 1..20: mol_type = other RNA
gaactgctccaccggctctg

SEQ ID NO: 2456 - RNA, 20 nt, synthetic construct
  source 1..20: mol_type = other RNA
gaactggccaccccggactg

SEQ ID NO: 2457 - RNA, 20 nt, synthetic construct
  source 1..20: mol_type = other RNA
gaactggtcctcctgtaggg

SEQ ID NO: 2458 - RNA, 20 nt, synthetic construct
  source 1..20: mol_type = other RNA
gaagaagaggccctatgaca

SEQ ID NO: 2459 - RNA, 20 nt, synthetic construct
  source 1..20: mol_type = other RNA
gaagaagctgctccgaggtt

SEQ ID NO: 2460 - RNA, 20 nt, synthetic construct
  source 1..20: mol_type = other RNA
gaagaagtggccggtcccgg

SEQ ID NO: 2461 - RNA, 20 nt, synthetic construct
  source 1..20: mol_type = other RNA
gaagacaaagtcgtactggg

SEQ ID NO: 2462 - RNA, 20 nt, synthetic construct
  source 1..20: mol_type = other RNA
gaagagacctgaccgcgttc

SEQ ID NO: 2463 - RNA, 20 nt, synthetic construct
  source 1..20: mol_type = other RNA
gaagagcagatcctgcaggc

SEQ ID NO: 2464 - RNA, 20 nt, synthetic construct
  source 1..20: mol_type = other RNA
gaagaggccctatgacaact

SEQ ID NO: 2465 - RNA, 20 nt, synthetic construct
  source 1..20: mol_type = other RNA
gaagatcagcccagccagaa

SEQ ID NO: 2466 - RNA, 20 nt, synthetic construct
  source 1..20: mol_type = other RNA
gaagcagaaggtgcttgcga

SEQ ID NO: 2467 - RNA, 20 nt, synthetic construct
  source 1..20: mol_type = other RNA
gaagcattgcaggaggaagc

SEQ ID NO: 2468 - RNA, 20 nt, synthetic construct
  source 1..20: mol_type = other RNA
gaagccatcttgcgcttcca

SEQ ID NO: 2469 - RNA, 20 nt, synthetic construct
  source 1..20: mol_type = other RNA
gaagccggacagctcaaata

SEQ ID NO: 2470 - RNA, 20 nt, synthetic construct
  source 1..20: mol_type = other RNA
gaagccggccacaagcccag

SEQ ID NO: 2471 - RNA, 20 nt, synthetic construct
  source 1..20: mol_type = other RNA
gaagccgtctaggatgagca

SEQ ID NO: 2472 - RNA, 20 nt, synthetic construct
  source 1..20: mol_type = other RNA
gaagcgcaagatggcttcct

SEQ ID NO: 2473 - RNA, 20 nt, synthetic construct
  source 1..20: mol_type = other RNA
gaagcggctgcagccgggga

SEQ ID NO: 2474 - RNA, 20 nt, synthetic construct
  source 1..20: mol_type = other RNA
gaagctgctccgaggttgca

SEQ ID NO: 2475 - RNA, 20 nt, synthetic construct
  source 1..20: mol_type = other RNA
gaagctggggaaggccagct

SEQ ID NO: 2476 - RNA, 20 nt, synthetic construct
  source 1..20: mol_type = other RNA
gaaggccagctcggactctg

SEQ ID NO: 2477 - RNA, 20 nt, synthetic construct
  source 1..20: mol_type = other RNA
gaaggtgcttgcgaggtacc

SEQ ID NO: 2478 - RNA, 20 nt, synthetic construct
  source 1..20: mol_type = other RNA
gaagtcttggcccgccgcct

SEQ ID NO: 2479 - RNA, 20 nt, synthetic construct
  source 1..20: mol_type = other RNA
gaagtggccggtcccggagg

SEQ ID NO: 2480 - RNA, 20 nt, synthetic construct
  source 1..20: mol_type = other RNA
gaatttggcagcacgtggta

SEQ ID NO: 2481 - RNA, 20 nt, synthetic construct
  source 1..20: mol_type = other RNA
gacaaagtcgtactggggaa

SEQ ID NO: 2482 - RNA, 20 nt, synthetic construct
  source 1..20: mol_type = other RNA
gacaactggctggagggcgt

SEQ ID NO: 2483 - RNA, 20 nt, synthetic construct
  source 1..20: mol_type = other RNA
gacaaggagctcccgcagta

SEQ ID NO: 2484 - RNA, 20 nt, synthetic construct
  source 1..20: mol_type = other RNA
gacacagctgagtcccacga

SEQ ID NO: 2485 - RNA, 20 nt, synthetic construct
  source 1..20: mol_type = other RNA
gacacgagtgattgctgtgc

SEQ ID NO: 2486 - RNA, 20 nt, synthetic construct
  source 1..20: mol_type = other RNA
gacacgcccctggcctttgc

SEQ ID NO: 2487 - RNA, 20 nt, synthetic construct
  source 1..20: mol_type = other RNA
gacacgtatggtgccgagcc

SEQ ID NO: 2488 - RNA, 20 nt, synthetic construct
  source 1..20: mol_type = other RNA
gacactgcgggcgcggcagc

SEQ ID NO: 2489 - RNA, 20 nt, synthetic construct
  source 1..20: mol_type = other RNA
gacagagaagacaaagtcgt

SEQ ID NO: 2490 - RNA, 20 nt, synthetic construct
  source 1..20: mol_type = other RNA
gacagagcaccaagacagag

SEQ ID NO: 2491 - RNA, 20 nt, synthetic construct
  source 1..20: mol_type = other RNA
gacagagccctgacgctcct

SEQ ID NO: 2492 - RNA, 20 nt, synthetic construct
  source 1..20: mol_type = other RNA
gacagctcaaatagggcgtc

SEQ ID NO: 2493 - RNA, 20 nt, synthetic construct
  source 1..20: mol_type = other RNA
gacaggaagcagaaggtgct

SEQ ID NO: 2494 - RNA, 20 nt, synthetic construct
  source 1..20: mol_type = other RNA
gacatagagtcccgtgagcg

SEQ ID NO: 2495 - RNA, 20 nt, synthetic construct
  source 1..20: mol_type = other RNA
gacatcaaagtaccctacag

SEQ ID NO: 2496 - RNA, 20 nt, synthetic construct
  source 1..20: mol_type = other RNA
gaccagctttgcccagcaca

SEQ ID NO: 2497 - RNA, 20 nt, synthetic construct
  source 1..20: mol_type = other RNA
gaccagttcccatccgcaga

SEQ ID NO: 2498 - RNA, 20 nt, synthetic construct
  source 1..20: mol_type = other RNA
gaccccaaggaagaagaggc

SEQ ID NO: 2499 - RNA, 20 nt, synthetic construct
  source 1..20: mol_type = other RNA
gaccgcgttctgctcatcct

SEQ ID NO: 2500 - RNA, 20 nt, synthetic construct
  source 1..20: mol_type = other RNA
gaccggccacttcttctcag

SEQ ID NO: 2501 - RNA, 20 nt, synthetic construct
  source 1..20: mol_type = other RNA
gacctccgcagcactggcat

SEQ ID NO: 2502 - RNA, 20 nt, synthetic construct
  source 1..20: mol_type = other RNA
gacctgaccgcgttctgctc

SEQ ID NO: 2503 - RNA, 20 nt, synthetic construct
  source 1..20: mol_type = other RNA
gacctgggcgatggccaaag

SEQ ID NO: 2504 - RNA, 20 nt, synthetic construct
  source 1..20: mol_type = other RNA
gacgccaagctgccctccac

SEQ ID NO: 2505 - RNA, 20 nt, synthetic construct
  source 1..20: mol_type = other RNA
gacgccctatttgagctgtc

SEQ ID NO: 2506 - RNA, 20 nt, synthetic construct
  source 1..20: mol_type = other RNA
gacgctcctccgggaccggc

SEQ ID NO: 2507 - RNA, 20 nt, synthetic construct
  source 1..20: mol_type = other RNA
gacggcttcgaggagctgga

SEQ ID NO: 2508 - RNA, 20 nt, synthetic construct
  source 1..20: mol_type = other RNA
gacggttcaagcaatggcag

SEQ ID NO: 2509 - RNA, 20 nt, synthetic construct
  source 1..20: mol_type = other RNA
gacgtgaggacctgggcgat

SEQ ID NO: 2510 - RNA, 20 nt, synthetic construct
  source 1..20: mol_type = other RNA
gactaagcctttggccatcg

SEQ ID NO: 2511 - RNA, 20 nt, synthetic construct
  source 1..20: mol_type = other RNA
gactcagctgtgtcacccgt

SEQ ID NO: 2512 - RNA, 20 nt, synthetic construct
  source 1..20: mol_type = other RNA
gactctatgtcggcctgctg

SEQ ID NO: 2513 - RNA, 20 nt, synthetic construct
  source 1..20: mol_type = other RNA
gactctgcggcccgcggtgg

SEQ ID NO: 2514 - RNA, 20 nt, synthetic construct
  source 1..20: mol_type = other RNA
gactgagaagaagtggccgg

SEQ ID NO: 2515 - RNA, 20 nt, synthetic construct
  source 1..20: mol_type = other RNA
gactgggcagaacggcagct

SEQ ID NO: 2516 - RNA, 20 nt, synthetic construct
  source 1..20: mol_type = other RNA
gacttctccctggacctccg

SEQ ID NO: 2517 - RNA, 20 nt, synthetic construct
  source 1..20: mol_type = other RNA
gactttgtcttctctgtccc

SEQ ID NO: 2518 - RNA, 20 nt, synthetic construct
  source 1..20: mol_type = other RNA
gagaagaagtggccggtccc

SEQ ID NO: 2519 - RNA, 20 nt, synthetic construct
  source 1..20: mol_type = other RNA
gagaagacaaagtcgtactg

SEQ ID NO: 2520 - RNA, 20 nt, synthetic construct
  source 1..20: mol_type = other RNA
gagaagagcagatcctgcag

SEQ ID NO: 2521 - RNA, 20 nt, synthetic construct
  source 1..20: mol_type = other RNA
gagaagccggacagctcaaa

SEQ ID NO: 2522 - RNA, 20 nt, synthetic construct
  source 1..20: mol_type = other RNA
gagaagtcttggcccgccgc

SEQ ID NO: 2523 - RNA, 20 nt, synthetic construct
  source 1..20: mol_type = other RNA
gagacacgagtgattgctgt

SEQ ID NO: 2524 - RNA, 20 nt, synthetic construct
  source 1..20: mol_type = other RNA
gagacctgaccgcgttctgc

SEQ ID NO: 2525 - RNA, 20 nt, synthetic construct
  source 1..20: mol_type = other RNA
gagagctcagggatgacaga

SEQ ID NO: 2526 - RNA, 20 nt, synthetic construct
  source 1..20: mol_type = other RNA
gagagctggcacactgcccg

SEQ ID NO: 2527 - RNA, 20 nt, synthetic construct
  source 1..20: mol_type = other RNA
gagaggagcagcagcaagag

SEQ ID NO: 2528 - RNA, 20 nt, synthetic construct
  source 1..20: mol_type = other RNA
gagaggcggccggggagctc

SEQ ID NO: 2529 - RNA, 20 nt, synthetic construct
  source 1..20: mol_type = other RNA
gagcaaggccgacgccctat

SEQ ID NO: 2530 - RNA, 20 nt, synthetic construct
  source 1..20: mol_type = other RNA
gagcaccaagacagagccct

SEQ ID NO: 2531 - RNA, 20 nt, synthetic construct
  source 1..20: mol_type = other RNA
gagcaccggcggccgcgtga

SEQ ID NO: 2532 - RNA, 20 nt, synthetic construct
  source 1..20: mol_type = other RNA
gagcagaacgcggtcaggtc

SEQ ID NO: 2533 - RNA, 20 nt, synthetic construct
  source 1..20: mol_type = other RNA
gagcagatcctgcaggccat

SEQ ID NO: 2534 - RNA, 20 nt, synthetic construct
  source 1..20: mol_type = other RNA
gagcagcagcaagagcctgg

SEQ ID NO: 2535 - RNA, 20 nt, synthetic construct
  source 1..20: mol_type = other RNA
gagcagcttcttctggaaaa

SEQ ID NO: 2536 - RNA, 20 nt, synthetic construct
  source 1..20: mol_type = other RNA
gagcaggcccaggcatacgt

SEQ ID NO: 2537 - RNA, 20 nt, synthetic construct
  source 1..20: mol_type = other RNA
gagcagggctccgccggtgc

SEQ ID NO: 2538 - RNA, 20 nt, synthetic construct
  source 1..20: mol_type = other RNA
gagcagttctaccgctcact

SEQ ID NO: 2539 - RNA, 20 nt, synthetic construct
  source 1..20: mol_type = other RNA
gagccagccacagggccccc

SEQ ID NO: 2540 - RNA, 20 nt, synthetic construct
  source 1..20: mol_type = other RNA
gagcccgcaggcccggatgg

SEQ ID NO: 2541 - RNA, 20 nt, synthetic construct
  source 1..20: mol_type = other RNA
gagccctactcgggccatcg

SEQ ID NO: 2542 - RNA, 20 nt, synthetic construct
  source 1..20: mol_type = other RNA
gagccctgacgctcctccgg

SEQ ID NO: 2543 - RNA, 20 nt, synthetic construct
  source 1..20: mol_type = other RNA
gagccctgctccctccgggg

SEQ ID NO: 2544 - RNA, 20 nt, synthetic construct
  source 1..20: mol_type = other RNA
gagccgggcctgggcttgtg

SEQ ID NO: 2545 - RNA, 20 nt, synthetic construct
  source 1..20: mol_type = other RNA
gagccggtggagcagttcta

SEQ ID NO: 2546 - RNA, 20 nt, synthetic construct
  source 1..20: mol_type = other RNA
gagcctcgtgggactcagct

SEQ ID NO: 2547 - RNA, 20 nt, synthetic construct
  source 1..20: mol_type = other RNA
gagcctgagcaaggccgacg

SEQ ID NO: 2548 - RNA, 20 nt, synthetic construct
  source 1..20: mol_type = other RNA
gagcctggagcgggaactgg

SEQ ID NO: 2549 - RNA, 20 nt, synthetic construct
  source 1..20: mol_type = other RNA
gagcgggaactggccacccc

SEQ ID NO: 2550 - RNA, 20 nt, synthetic construct
  source 1..20: mol_type = other RNA
gagcggtagaactgctccac

SEQ ID NO: 2551 - RNA, 20 nt, synthetic construct
  source 1..20: mol_type = other RNA
gagcgtcagggctctgtctt

SEQ ID NO: 2552 - RNA, 20 nt, synthetic construct
  source 1..20: mol_type = other RNA
gagcgtggagggcagcttgg

SEQ ID NO: 2553 - RNA, 20 nt, synthetic construct
  source 1..20: mol_type = other RNA
gagctattgggctggggcag

SEQ ID NO: 2554 - RNA, 20 nt, synthetic construct
  source 1..20: mol_type = other RNA
gagctcagggatgacagagc

SEQ ID NO: 2555 - RNA, 20 nt, synthetic construct
  source 1..20: mol_type = other RNA
gagctccccggccgcctctc

SEQ ID NO: 2556 - RNA, 20 nt, synthetic construct
  source 1..20: mol_type = other RNA
gagctcccgcagtacctagc

SEQ ID NO: 2557 - RNA, 20 nt, synthetic construct
  source 1..20: mol_type = other RNA
gagctcctgtaccacgtgct

SEQ ID NO: 2558 - RNA, 20 nt, synthetic construct
  source 1..20: mol_type = other RNA
gagctccttgtccttgattt

SEQ ID NO: 2559 - RNA, 20 nt, synthetic construct
  source 1..20: mol_type = other RNA
gagctctcaaagtagcgcat

SEQ ID NO: 2560 - RNA, 20 nt, synthetic construct
  source 1..20: mol_type = other RNA
gagctgctgcactgcgccca

SEQ ID NO: 2561 - RNA, 20 nt, synthetic construct
  source 1..20: mol_type = other RNA
gagctggaagcgcaagatgg

SEQ ID NO: 2562 - RNA, 20 nt, synthetic construct
  source 1..20: mol_type = other RNA
gagctggcacactgcccggc

SEQ ID NO: 2563 - RNA, 20 nt, synthetic construct
  source 1..20: mol_type = other RNA
gagctggccaagctggcctg

SEQ ID NO: 2564 - RNA, 20 nt, synthetic construct
  source 1..20: mol_type = other RNA
gagctggccttccccagctt

SEQ ID NO: 2565 - RNA, 20 nt, synthetic construct
  source 1..20: mol_type = other RNA
gagctgggccgcagacatca

SEQ ID NO: 2566 - RNA, 20 nt, synthetic construct
  source 1..20: mol_type = other RNA
gagctgtccggcttctccat

SEQ ID NO: 2567 - RNA, 20 nt, synthetic construct
  source 1..20: mol_type = other RNA
gagcttggggaggacgccaa

SEQ ID NO: 2568 - RNA, 20 nt, synthetic construct
  source 1..20: mol_type = other RNA
gaggaagctggggaaggcca

SEQ ID NO: 2569 - RNA, 20 nt, synthetic construct
  source 1..20: mol_type = other RNA
gaggaccagttcccatccgc

SEQ ID NO: 2570 - RNA, 20 nt, synthetic construct
  source 1..20: mol_type = other RNA
gaggacctgggcgatggcca

SEQ ID NO: 2571 - RNA, 20 nt, synthetic construct
  source 1..20: mol_type = other RNA
gaggacgccaagctgccctc

SEQ ID NO: 2572 - RNA, 20 nt, synthetic construct
  source 1..20: mol_type = other RNA
gaggagcagcagcaagagcc

SEQ ID NO: 2573 - RNA, 20 nt, synthetic construct
  source 1..20: mol_type = other RNA
gaggagcgtcagggctctgt

SEQ ID NO: 2574 - RNA, 20 nt, synthetic construct
  source 1..20: mol_type = other RNA
gaggagctggaagcgcaaga

SEQ ID NO: 2575 - RNA, 20 nt, synthetic construct
  source 1..20: mol_type = other RNA
gaggaggagggtgcaacctc

SEQ ID NO: 2576 - RNA, 20 nt, synthetic construct
  source 1..20: mol_type = other RNA
gaggaggctggaatttggca

SEQ ID NO: 2577 - RNA, 20 nt, synthetic construct
  source 1..20: mol_type = other RNA
gaggagggtgcaacctcgga

SEQ ID NO: 2578 - RNA, 20 nt, synthetic construct
  source 1..20: mol_type = other RNA
gaggcagccgccgatggccc

SEQ ID NO: 2579 - RNA, 20 nt, synthetic construct
  source 1..20: mol_type = other RNA
gaggccctatgacaactggc

SEQ ID NO: 2580 - RNA, 20 nt, synthetic construct
  source 1..20: mol_type = other RNA
gaggccctgctggagcttgg

SEQ ID NO: 2581 - RNA, 20 nt, synthetic construct
  source 1..20: mol_type = other RNA
gaggccgaggaggctggaat

SEQ ID NO: 2582 - RNA, 20 nt, synthetic construct
  source 1..20: mol_type = other RNA
gaggcctggctgaggtgctg

SEQ ID NO: 2583 - RNA, 20 nt, synthetic construct
  source 1..20: mol_type = other RNA
gaggcggccggggagctcct

SEQ ID NO: 2584 - RNA, 20 nt, synthetic construct
  source 1..20: mol_type = other RNA
gaggcggcgggccaagactt

SEQ ID NO: 2585 - RNA, 20 nt, synthetic construct
  source 1..20: mol_type = other RNA
gaggcgggtgcccagaaaag

SEQ ID NO: 2586 - RNA, 20 nt, synthetic construct
  source 1..20: mol_type = other RNA
gaggcgtgaggcgggtgccc

SEQ ID NO: 2587 - RNA, 20 nt, synthetic construct
  source 1..20: mol_type = other RNA
gaggctccccaatccagagg

SEQ ID NO: 2588 - RNA, 20 nt, synthetic construct
  source 1..20: mol_type = other RNA
gaggctggaagatcagccca

SEQ ID NO: 2589 - RNA, 20 nt, synthetic construct
  source 1..20: mol_type = other RNA
gaggctggaatttggcagca

SEQ ID NO: 2590 - RNA, 20 nt, synthetic construct
  source 1..20: mol_type = other RNA
gagggagcagggctccgccg

SEQ ID NO: 2591 - RNA, 20 nt, synthetic construct
  source 1..20: mol_type = other RNA
gagggcagcttggcgtcctc

SEQ ID NO: 2592 - RNA, 20 nt, synthetic construct
  source 1..20: mol_type = other RNA
gagggcgtgccacgctttct

SEQ ID NO: 2593 - RNA, 20 nt, synthetic construct
  source 1..20: mol_type = other RNA
gagggctgcacggcccagca

SEQ ID NO: 2594 - RNA, 20 nt, synthetic construct
  source 1..20: mol_type = other RNA
gaggggcaaatgccagtgct

SEQ ID NO: 2595 - RNA, 20 nt, synthetic construct
  source 1..20: mol_type = other RNA
gaggggcttggggaagagac

SEQ ID NO: 2596 - RNA, 20 nt, synthetic construct
  source 1..20: mol_type = other RNA
gagggtgcaacctcggagca

SEQ ID NO: 2597 - RNA, 20 nt, synthetic construct
  source 1..20: mol_type = other RNA
gaggtacctgaagcggctgc

SEQ ID NO: 2598 - RNA, 20 nt, synthetic construct
  source 1..20: mol_type = other RNA
gaggtccagggagaagtctt

SEQ ID NO: 2599 - RNA, 20 nt, synthetic construct
  source 1..20: mol_type = other RNA
gaggtgctgttggctgccaa

SEQ ID NO: 2600 - RNA, 20 nt, synthetic construct
  source 1..20: mol_type = other RNA
gaggtggatctggtgcaggc

SEQ ID NO: 2601 - RNA, 20 nt, synthetic construct
  source 1..20: mol_type = other RNA
gaggttgcaccctcctcctc

SEQ ID NO: 2602 - RNA, 20 nt, synthetic construct
  source 1..20: mol_type = other RNA
gaggttttcagccacatctt

SEQ ID NO: 2603 - RNA, 20 nt, synthetic construct
  source 1..20: mol_type = other RNA
gagtagggctcccaggcagc

SEQ ID NO: 2604 - RNA, 20 nt, synthetic construct
  source 1..20: mol_type = other RNA
gagtcccacgaggctcccca

SEQ ID NO: 2605 - RNA, 20 nt, synthetic construct
  source 1..20: mol_type = other RNA
gagtcccgtgagcgtggagg

SEQ ID NO: 2606 - RNA, 20 nt, synthetic construct
  source 1..20: mol_type = other RNA
gagtccgagctggccttccc

SEQ ID NO: 2607 - RNA, 20 nt, synthetic construct
  source 1..20: mol_type = other RNA
gagtgattgctgtgctgggc

SEQ ID NO: 2608 - RNA, 20 nt, synthetic construct
  source 1..20: mol_type = other RNA
gagtggcgaaatcaaggaca

SEQ ID NO: 2609 - RNA, 20 nt, synthetic construct
  source 1..20: mol_type = other RNA
gagtggctgtgggcccaggg

SEQ ID NO: 2610 - RNA, 20 nt, synthetic construct
  source 1..20: mol_type = other RNA
gatcagcccagccagaaagc

SEQ ID NO: 2611 - RNA, 20 nt, synthetic construct
  source 1..20: mol_type = other RNA
gatccacctccactaggatg

SEQ ID NO: 2612 - RNA, 20 nt, synthetic construct
  source 1..20: mol_type = other RNA
gatcctgcaggccataggca

SEQ ID NO: 2613 - RNA, 20 nt, synthetic construct
  source 1..20: mol_type = other RNA
gatctgctcttctccctggg

SEQ ID NO: 2614 - RNA, 20 nt, synthetic construct
  source 1..20: mol_type = other RNA
gatctggtgcaggccaggct

SEQ ID NO: 2615 - RNA, 20 nt, synthetic construct
  source 1..20: mol_type = other RNA
gatcttccagcctcccgccc

SEQ ID NO: 2616 - RNA, 20 nt, synthetic construct
  source 1..20: mol_type = other RNA
gatgacagagcaccaagaca

SEQ ID NO: 2617 - RNA, 20 nt, synthetic construct
  source 1..20: mol_type = other RNA
gatgagcagaacgcggtcag

SEQ ID NO: 2618 - RNA, 20 nt, synthetic construct
  source 1..20: mol_type = other RNA
gatgaggttttcagccacat

SEQ ID NO: 2619 - RNA, 20 nt, synthetic construct
  source 1..20: mol_type = other RNA
gatgcacatgtactgggcaa

SEQ ID NO: 2620 - RNA, 20 nt, synthetic construct
  source 1..20: mol_type = other RNA
gatgccatccgggcctgcgg

SEQ ID NO: 2621 - RNA, 20 nt, synthetic construct
  source 1..20: mol_type = other RNA
gatgcctatggcctgcagga

SEQ ID NO: 2622 - RNA, 20 nt, synthetic construct
  source 1..20: mol_type = other RNA
gatgcgctactttgagagct

SEQ ID NO: 2623 - RNA, 20 nt, synthetic construct
  source 1..20: mol_type = other RNA
gatggcatcctagtggaggt

SEQ ID NO: 2624 - RNA, 20 nt, synthetic construct
  source 1..20: mol_type = other RNA
gatggccaaaggcttagtcc

SEQ ID NO: 2625 - RNA, 20 nt, synthetic construct
  source 1..20: mol_type = other RNA
gatggcccgagtagggctcc

SEQ ID NO: 2626 - RNA, 20 nt, synthetic construct
  source 1..20: mol_type = other RNA
gatggcttcctgcacagcac

SEQ ID NO: 2627 - RNA, 20 nt, synthetic construct
  source 1..20: mol_type = other RNA
gatgggaactggtcctcctg

SEQ ID NO: 2628 - RNA, 20 nt, synthetic construct
  source 1..20: mol_type = other RNA
gatgtctcttccccaagccc

SEQ ID NO: 2629 - RNA, 20 nt, synthetic construct
  source 1..20: mol_type = other RNA
gatgtctgcggcccagctcc

SEQ ID NO: 2630 - RNA, 20 nt, synthetic construct
  source 1..20: mol_type = other RNA
gatgtggctgaaaacctcat

SEQ ID NO: 2631 - RNA, 20 nt, synthetic construct
  source 1..20: mol_type = other RNA
gattgctgtgctgggcaaag

SEQ ID NO: 2632 - RNA, 20 nt, synthetic construct
  source 1..20: mol_type = other RNA
gattggggagcctcgtggga

SEQ ID NO: 2633 - RNA, 20 nt, synthetic construct
  source 1..20: mol_type = other RNA
gatttcgccactcagagcca

SEQ ID NO: 2634 - RNA, 20 nt, synthetic construct
  source 1..20: mol_type = other RNA
gcaaagctggtcagggcaag

SEQ ID NO: 2635 - RNA, 20 nt, synthetic construct
  source 1..20: mol_type = other RNA
gcaaaggccaggggcgtgtc

SEQ ID NO: 2636 - RNA, 20 nt, synthetic construct
  source 1..20: mol_type = other RNA
gcaaatgccagtgctgcgga

SEQ ID NO: 2637 - RNA, 20 nt, synthetic construct
  source 1..20: mol_type = other RNA
gcaacctcggagcagcttct

SEQ ID NO: 2638 - RNA, 20 nt, synthetic construct
  source 1..20: mol_type = other RNA
gcaagagcctggagcgggaa

SEQ ID NO: 2639 - RNA, 20 nt, synthetic construct
  source 1..20: mol_type = other RNA
gcaagagctattgggctggg

SEQ ID NO: 2640 - RNA, 20 nt, synthetic construct
  source 1..20: mol_type = other RNA
gcaagatggcttcctgcaca

SEQ ID NO: 2641 - RNA, 20 nt, synthetic construct
  source 1..20: mol_type = other RNA
gcaagcaccttctgcttcct

SEQ ID NO: 2642 - RNA, 20 nt, synthetic construct
  source 1..20: mol_type = other RNA
gcaaggccgacgccctattt

SEQ ID NO: 2643 - RNA, 20 nt, synthetic construct
  source 1..20: mol_type = other RNA
gcaaggccttggaggcggcg

SEQ ID NO: 2644 - RNA, 20 nt, synthetic construct
  source 1..20: mol_type = other RNA
gcaatcactcgtgtctcacg

SEQ ID NO: 2645 - RNA, 20 nt, synthetic construct
  source 1..20: mol_type = other RNA
gcaatgcttcctgggggccc

SEQ ID NO: 2646 - RNA, 20 nt, synthetic construct
  source 1..20: mol_type = other RNA
gcaatggcaggggacagaga

SEQ ID NO: 2647 - RNA, 20 nt, synthetic construct
  source 1..20: mol_type = other RNA
gcacaaagtagggctgtggc

SEQ ID NO: 2648 - RNA, 20 nt, synthetic construct
  source 1..20: mol_type = other RNA
gcacactgcccggcacaaag

SEQ ID NO: 2649 - RNA, 20 nt, synthetic construct
  source 1..20: mol_type = other RNA
gcacagcaatcactcgtgtc

SEQ ID NO: 2650 - RNA, 20 nt, synthetic construct
  source 1..20: mol_type = other RNA
gcacagcacgtgcggaccgg

SEQ ID NO: 2651 - RNA, 20 nt, synthetic construct
  source 1..20: mol_type = other RNA
gcacatgtactgggcaaggc

SEQ ID NO: 2652 - RNA, 20 nt, synthetic construct
  source 1..20: mol_type = other RNA
gcaccaagacagagccctga

SEQ ID NO: 2653 - RNA, 20 nt, synthetic construct
  source 1..20: mol_type = other RNA
gcaccagatccacctccact

SEQ ID NO: 2654 - RNA, 20 nt, synthetic construct
  source 1..20: mol_type = other RNA
gcaccatacgtgtcctgcag

SEQ ID NO: 2655 - RNA, 20 nt, synthetic construct
  source 1..20: mol_type = other RNA
gcacccgcctcacgcctcct

SEQ ID NO: 2656 - RNA, 20 nt, synthetic construct
  source 1..20: mol_type = other RNA
gcaccctcctcctcacagcc

SEQ ID NO: 2657 - RNA, 20 nt, synthetic construct
  source 1..20: mol_type = other RNA
gcaccggcggagccctgctc

SEQ ID NO: 2658 - RNA, 20 nt, synthetic construct
  source 1..20: mol_type = other RNA
gcaccggcggccgcgtgaga

SEQ ID NO: 2659 - RNA, 20 nt, synthetic construct
  source 1..20: mol_type = other RNA
gcacctcagccaggcctcct

SEQ ID NO: 2660 - RNA, 20 nt, synthetic construct
  source 1..20: mol_type = other RNA
gcaccttctgcttcctgtcc

SEQ ID NO: 2661 - RNA, 20 nt, synthetic construct
  source 1..20: mol_type = other RNA
gcacgccctccagccagttg

SEQ ID NO: 2662 - RNA, 20 nt, synthetic construct
  source 1..20: mol_type = other RNA
gcacggcccagcaggccgac

SEQ ID NO: 2663 - RNA, 20 nt, synthetic construct
  source 1..20: mol_type = other RNA
gcacgtgcggaccggcaccg

SEQ ID NO: 2664 - RNA, 20 nt, synthetic construct
  source 1..20: mol_type = other RNA
gcacgtgctgtgcaggaagc

SEQ ID NO: 2665 - RNA, 20 nt, synthetic construct
  source 1..20: mol_type = other RNA
gcacgtggtacaggagctcc

SEQ ID NO: 2666 - RNA, 20 nt, synthetic construct
  source 1..20: mol_type = other RNA
gcactgcgcccacgaggccg

SEQ ID NO: 2667 - RNA, 20 nt, synthetic construct
  source 1..20: mol_type = other RNA
gcactggcatttgcccctct

SEQ ID NO: 2668 - RNA, 20 nt, synthetic construct
  source 1..20: mol_type = other RNA
gcagaacgcggtcaggtctc

SEQ ID NO: 2669 - RNA, 20 nt, synthetic construct
  source 1..20: mol_type = other RNA
gcagaacggcagctggccca

SEQ ID NO: 2670 - RNA, 20 nt, synthetic construct
  source 1..20: mol_type = other RNA
gcagaaggtgcttgcgaggt

SEQ ID NO: 2671 - RNA, 20 nt, synthetic construct
  source 1..20: mol_type = other RNA
gcagacatcaaagtacccta

SEQ ID NO: 2672 - RNA, 20 nt, synthetic construct
  source 1..20: mol_type = other RNA
gcagacgtgaggacctgggc

SEQ ID NO: 2673 - RNA, 20 nt, synthetic construct
  source 1..20: mol_type = other RNA
gcagagccggtggagcagtt

SEQ ID NO: 2674 - RNA, 20 nt, synthetic construct
  source 1..20: mol_type = other RNA
gcagagctggccaagctggc

SEQ ID NO: 2675 - RNA, 20 nt, synthetic construct
  source 1..20: mol_type = other RNA
gcagagtccgagctggcctt

SEQ ID NO: 2676 - RNA, 20 nt, synthetic construct
  source 1..20: mol_type = other RNA
gcagatcctgcaggccatag

SEQ ID NO: 2677 - RNA, 20 nt, synthetic construct
  source 1..20: mol_type = other RNA
gcagcaagagcctggagcgg

SEQ ID NO: 2678 - RNA, 20 nt, synthetic construct
  source 1..20: mol_type = other RNA
gcagcacgtggtacaggagc

SEQ ID NO: 2679 - RNA, 20 nt, synthetic construct
  source 1..20: mol_type = other RNA
gcagcactggcatttgcccc

SEQ ID NO: 2680 - RNA, 20 nt, synthetic construct
  source 1..20: mol_type = other RNA
gcagcagcaagagcctggag

SEQ ID NO: 2681 - RNA, 20 nt, synthetic construct
  source 1..20: mol_type = other RNA
gcagcagctccagcagctgc

SEQ ID NO: 2682 - RNA, 20 nt, synthetic construct
  source 1..20: mol_type = other RNA
gcagccaacagcacctcagc

SEQ ID NO: 2683 - RNA, 20 nt, synthetic construct
  source 1..20: mol_type = other RNA
gcagcccccggagggagcag

SEQ ID NO: 2684 - RNA, 20 nt, synthetic construct
  source 1..20: mol_type = other RNA
gcagccctcgacagcccccc

SEQ ID NO: 2685 - RNA, 20 nt, synthetic construct
  source 1..20: mol_type = other RNA
gcagccgccgatggcccgag

SEQ ID NO: 2686 - RNA, 20 nt, synthetic construct
  source 1..20: mol_type = other RNA
gcagccgcttcaggtacctc

SEQ ID NO: 2687 - RNA, 20 nt, synthetic construct
  source 1..20: mol_type = other RNA
gcagccggggacactgcggg

SEQ ID NO: 2688 - RNA, 20 nt, synthetic construct
  source 1..20: mol_type = other RNA
gcagcgggcgggaggctgga

SEQ ID NO: 2689 - RNA, 20 nt, synthetic construct
  source 1..20: mol_type = other RNA
gcagctccagcagctgccgc

SEQ ID NO: 2690 - RNA, 20 nt, synthetic construct
  source 1..20: mol_type = other RNA
gcagctgccgcgcccgcagt

SEQ ID NO: 2691 - RNA, 20 nt, synthetic construct
  source 1..20: mol_type = other RNA
gcagctgctggagctgctgc

SEQ ID NO: 2692 - RNA, 20 nt, synthetic construct
  source 1..20: mol_type = other RNA
gcagctggcccaaggaggcc

SEQ ID NO: 2693 - RNA, 20 nt, synthetic construct
  source 1..20: mol_type = other RNA
gcagcttcttctggaaaagg

SEQ ID NO: 2694 - RNA, 20 nt, synthetic construct
  source 1..20: mol_type = other RNA
gcagcttggcgtcctcccca

SEQ ID NO: 2695 - RNA, 20 nt, synthetic construct
  source 1..20: mol_type = other RNA
gcaggaagccatcttgcgct

SEQ ID NO: 2696 - RNA, 20 nt, synthetic construct
  source 1..20: mol_type = other RNA
gcaggacacgtatggtgccg

SEQ ID NO: 2697 - RNA, 20 nt, synthetic construct
  source 1..20: mol_type = other RNA
gcaggaggaagctggggaag

SEQ ID NO: 2698 - RNA, 20 nt, synthetic construct
  source 1..20: mol_type = other RNA
gcaggatctgctcttctccc

SEQ ID NO: 2699 - RNA, 20 nt, synthetic construct
  source 1..20: mol_type = other RNA
gcaggccaggctggagagga

SEQ ID NO: 2700 - RNA, 20 nt, synthetic construct
  source 1..20: mol_type = other RNA
gcaggccataggcatccccc

SEQ ID NO: 2701 - RNA, 20 nt, synthetic construct
  source 1..20: mol_type = other RNA
gcaggcccaggcatacgtga

SEQ ID NO: 2702 - RNA, 20 nt, synthetic construct
  source 1..20: mol_type = other RNA
gcaggcccggatggcatcct

SEQ ID NO: 2703 - RNA, 20 nt, synthetic construct
  source 1..20: mol_type = other RNA
gcaggccgacatagagtccc

SEQ ID NO: 2704 - RNA, 20 nt, synthetic construct
  source 1..20: mol_type = other RNA
gcagggcctctgagagctgg

SEQ ID NO: 2705 - RNA, 20 nt, synthetic construct
  source 1..20: mol_type = other RNA
gcaggggacagagaagacaa

SEQ ID NO: 2706 - RNA, 20 nt, synthetic construct
  source 1..20: mol_type = other RNA
gcagtacctagcattgaccc

SEQ ID NO: 2707 - RNA, 20 nt, synthetic construct
  source 1..20: mol_type = other RNA
gcagtgagccgggcctgggc

SEQ ID NO: 2708 - RNA, 20 nt, synthetic construct
  source 1..20: mol_type = other RNA
gcagtgagcggtagaactgc

SEQ ID NO: 2709 - RNA, 20 nt, synthetic construct
  source 1..20: mol_type = other RNA
gcagtgcagcagctccagca

SEQ ID NO: 2710 - RNA, 20 nt, synthetic construct
  source 1..20: mol_type = other RNA
gcagtgtccccggctgcagc

SEQ ID NO: 2711 - RNA, 20 nt, synthetic construct
  source 1..20: mol_type = other RNA
gcagtgtgccagctctcaga

SEQ ID NO: 2712 - RNA, 20 nt, synthetic construct
  source 1..20: mol_type = other RNA
gcagttctaccgctcactgc

SEQ ID NO: 2713 - RNA, 20 nt, synthetic construct
  source 1..20: mol_type = other RNA
gcatacgtgatgcgctactt

SEQ ID NO: 2714 - RNA, 20 nt, synthetic construct
  source 1..20: mol_type = other RNA
gcatcacgtatgcctgggcc

SEQ ID NO: 2715 - RNA, 20 nt, synthetic construct
  source 1..20: mol_type = other RNA
gcatcaggaggcgtgaggcg

SEQ ID NO: 2716 - RNA, 20 nt, synthetic construct
  source 1..20: mol_type = other RNA
gcatcccccggacggttcaa

SEQ ID NO: 2717 - RNA, 20 nt, synthetic construct
  source 1..20: mol_type = other RNA
gcatcctagtggaggtggat

SEQ ID NO: 2718 - RNA, 20 nt, synthetic construct
  source 1..20: mol_type = other RNA
gcattgaccccaaggaagaa

SEQ ID NO: 2719 - RNA, 20 nt, synthetic construct
  source 1..20: mol_type = other RNA
gcattgcaggaggaagctgg

SEQ ID NO: 2720 - RNA, 20 nt, synthetic construct
  source 1..20: mol_type = other RNA
gcatttgcccctctggattg

SEQ ID NO: 2721 - RNA, 20 nt, synthetic construct
  source 1..20: mol_type = other RNA
gccaaaggcttagtccaaca

SEQ ID NO: 2722 - RNA, 20 nt, synthetic construct
  source 1..20: mol_type = other RNA
gccaaattccagcctcctcg

SEQ ID NO: 2723 - RNA, 20 nt, synthetic construct
  source 1..20: mol_type = other RNA
gccaacagcacctcagccag

SEQ ID NO: 2724 - RNA, 20 nt, synthetic construct
  source 1..20: mol_type = other RNA
gccaagacttctccctggac

SEQ ID NO: 2725 - RNA, 20 nt, synthetic construct
  source 1..20: mol_type = other RNA
gccaagctgccctccacgct

SEQ ID NO: 2726 - RNA, 20 nt, synthetic construct
  source 1..20: mol_type = other RNA
gccaagctggcctgggagct

SEQ ID NO: 2727 - RNA, 20 nt, synthetic construct
  source 1..20: mol_type = other RNA
gccaaggagcaccggcggcc

SEQ ID NO: 2728 - RNA, 20 nt, synthetic construct
  source 1..20: mol_type = other RNA
gccacaagcccaggcccggc

SEQ ID NO: 2729 - RNA, 20 nt, synthetic construct
  source 1..20: mol_type = other RNA
gccacagccctactttgtgc

SEQ ID NO: 2730 - RNA, 20 nt, synthetic construct
  source 1..20: mol_type = other RNA
gccacagggcccccaggaag

SEQ ID NO: 2731 - RNA, 20 nt, synthetic construct
  source 1..20: mol_type = other RNA
gccacatcttgaagagacct

SEQ ID NO: 2732 - RNA, 20 nt, synthetic construct
  source 1..20: mol_type = other RNA
gccaccccggactgggcaga

SEQ ID NO: 2733 - RNA, 20 nt, synthetic construct
  source 1..20: mol_type = other RNA
gccacgagtggctgtgggcc

SEQ ID NO: 2734 - RNA, 20 nt, synthetic construct
  source 1..20: mol_type = other RNA
gccacgctttctggctgggc

SEQ ID NO: 2735 - RNA, 20 nt, synthetic construct
  source 1..20: mol_type = other RNA
gccactcagagccagccaca

SEQ ID NO: 2736 - RNA, 20 nt, synthetic construct
  source 1..20: mol_type = other RNA
gccactcgtggcggccgatg

SEQ ID NO: 2737 - RNA, 20 nt, synthetic construct
  source 1..20: mol_type = other RNA
gccacttcttctcagtcaca

SEQ ID NO: 2738 - RNA, 20 nt, synthetic construct
  source 1..20: mol_type = other RNA
gccagaaagcgtggcacgcc

SEQ ID NO: 2739 - RNA, 20 nt, synthetic construct
  source 1..20: mol_type = other RNA
gccagcagcccccggaggga

SEQ ID NO: 2740 - RNA, 20 nt, synthetic construct
  source 1..20: mol_type = other RNA
gccagccacagggcccccag

SEQ ID NO: 2741 - RNA, 20 nt, synthetic construct
  source 1..20: mol_type = other RNA
gccagctcggactctgcggc

SEQ ID NO: 2742 - RNA, 20 nt, synthetic construct
  source 1..20: mol_type = other RNA
gccagctctcagaggccctg

SEQ ID NO: 2743 - RNA, 20 nt, synthetic construct
  source 1..20: mol_type = other RNA
gccagctctgccagggcccc

SEQ ID NO: 2744 - RNA, 20 nt, synthetic construct
  source 1..20: mol_type = other RNA
gccagctgccgttctgccca

SEQ ID NO: 2745 - RNA, 20 nt, synthetic construct
  source 1..20: mol_type = other RNA
gccagcttggccagctctgc

SEQ ID NO: 2746 - RNA, 20 nt, synthetic construct
  source 1..20: mol_type = other RNA
gccaggcctccttgggccag

SEQ ID NO: 2747 - RNA, 20 nt, synthetic construct
  source 1..20: mol_type = other RNA
gccaggctggagaggagcag

SEQ ID NO: 2748 - RNA, 20 nt, synthetic construct
  source 1..20: mol_type = other RNA
gccaggggcgtgtcagggtg

SEQ ID NO: 2749 - RNA, 20 nt, synthetic construct
  source 1..20: mol_type = other RNA
gccagtgctgcggaggtcca

SEQ ID NO: 2750 - RNA, 20 nt, synthetic construct
  source 1..20: mol_type = other RNA
gccagttcccgctccaggct

SEQ ID NO: 2751 - RNA, 20 nt, synthetic construct
  source 1..20: mol_type = other RNA
gccagttgtcatagggcctc

SEQ ID NO: 2752 - RNA, 20 nt, synthetic construct
  source 1..20: mol_type = other RNA
gccataggcatcccccggac

SEQ ID NO: 2753 - RNA, 20 nt, synthetic construct
  source 1..20: mol_type = other RNA
gccatccgggcctgcgggct

SEQ ID NO: 2754 - RNA, 20 nt, synthetic construct
  source 1..20: mol_type = other RNA
gccatcgcccaggtcctcac

SEQ ID NO: 2755 - RNA, 20 nt, synthetic construct
  source 1..20: mol_type = other RNA
gccatcggcggctgcctcgg

SEQ ID NO: 2756 - RNA, 20 nt, synthetic construct
  source 1..20: mol_type = other RNA
gccatcttgcgcttccagct

SEQ ID NO: 2757 - RNA, 20 nt, synthetic construct
  source 1..20: mol_type = other RNA
gccattgcttgaaccgtccg

SEQ ID NO: 2758 - RNA, 20 nt, synthetic construct
  source 1..20: mol_type = other RNA
gcccaacacaaggatgtctc

SEQ ID NO: 2759 - RNA, 20 nt, synthetic construct
  source 1..20: mol_type = other RNA
gcccaaggaggcctggctga

SEQ ID NO: 2760 - RNA, 20 nt, synthetic construct
  source 1..20: mol_type = other RNA
gcccaatagctcttgccctg

SEQ ID NO: 2761 - RNA, 20 nt, synthetic construct
  source 1..20: mol_type = other RNA
gcccacagccactcgtggcg

SEQ ID NO: 2762 - RNA, 20 nt, synthetic construct
  source 1..20: mol_type = other RNA
gcccacgaggccgaggaggc

SEQ ID NO: 2763 - RNA, 20 nt, synthetic construct
  source 1..20: mol_type = other RNA
gcccagaaaagagaggcggc

SEQ ID NO: 2764 - RNA, 20 nt, synthetic construct
  source 1..20: mol_type = other RNA
gcccagcacagcaatcactc

SEQ ID NO: 2765 - RNA, 20 nt, synthetic construct
  source 1..20: mol_type = other RNA
gcccagcaggccgacataga

SEQ ID NO: 2766 - RNA, 20 nt, synthetic construct
  source 1..20: mol_type = other RNA
gcccagccagaaagcgtggc

SEQ ID NO: 2767 - RNA, 20 nt, synthetic construct
  source 1..20: mol_type = other RNA
gcccagctcccaggccagct

SEQ ID NO: 2768 - RNA, 20 nt, synthetic construct
  source 1..20: mol_type = other RNA
gcccaggcatacgtgatgcg

SEQ ID NO: 2769 - RNA, 20 nt, synthetic construct
  source 1..20: mol_type = other RNA
gcccaggcccggctcactgc

SEQ ID NO: 2770 - RNA, 20 nt, synthetic construct
  source 1..20: mol_type = other RNA
gcccagggagaagagcagat

SEQ ID NO: 2771 - RNA, 20 nt, synthetic construct
  source 1..20: mol_type = other RNA
gcccaggtcctcacgtctgc

SEQ ID NO: 2772 - RNA, 20 nt, synthetic construct
  source 1..20: mol_type = other RNA
gcccagtacatgtgcatcag

SEQ ID NO: 2773 - RNA, 20 nt, synthetic construct
  source 1..20: mol_type = other RNA
gcccagtccggggtggccag

SEQ ID NO: 2774 - RNA, 20 nt, synthetic construct
  source 1..20: mol_type = other RNA
gccccagcccaatagctctt

SEQ ID NO: 2775 - RNA, 20 nt, synthetic construct
  source 1..20: mol_type = other RNA
gcccccaggaagcattgcag

SEQ ID NO: 2776 - RNA, 20 nt, synthetic construct
  source 1..20: mol_type = other RNA
gcccctcaccccacctgaaa

SEQ ID NO: 2777 - RNA, 20 nt, synthetic construct
  source 1..20: mol_type = other RNA
gcccctctggattggggagc

SEQ ID NO: 2778 - RNA, 20 nt, synthetic construct
  source 1..20: mol_type = other RNA
gcccctggcctttgcagagc

SEQ ID NO: 2779 - RNA, 20 nt, synthetic construct
  source 1..20: mol_type = other RNA
gcccgagtagggctcccagg

SEQ ID NO: 2780 - RNA, 20 nt, synthetic construct
  source 1..20: mol_type = other RNA
gcccgcaggcccggatggca

SEQ ID NO: 2781 - RNA, 20 nt, synthetic construct
  source 1..20: mol_type = other RNA
gcccgcagtgtccccggctg

SEQ ID NO: 2782 - RNA, 20 nt, synthetic construct
  source 1..20: mol_type = other RNA
gcccgccgcctccaaggcct

SEQ ID NO: 2783 - RNA, 20 nt, synthetic construct
  source 1..20: mol_type = other RNA
gcccgcggtgggtgttggac

SEQ ID NO: 2784 - RNA, 20 nt, synthetic construct
  source 1..20: mol_type = other RNA
gcccgctgcctgggagccct

SEQ ID NO: 2785 - RNA, 20 nt, synthetic construct
  source 1..20: mol_type = other RNA
gcccggatggcatcctagtg

SEQ ID NO: 2786 - RNA, 20 nt, synthetic construct
  source 1..20: mol_type = other RNA
gcccggcacaaagtagggct

SEQ ID NO: 2787 - RNA, 20 nt, synthetic construct
  source 1..20: mol_type = other RNA
gcccggctcactgccccagc

SEQ ID NO: 2788 - RNA, 20 nt, synthetic construct
  source 1..20: mol_type = other RNA
gccctactcgggccatcggc

SEQ ID NO: 2789 - RNA, 20 nt, synthetic construct
  source 1..20: mol_type = other RNA
gccctactttgtgccgggca

SEQ ID NO: 2790 - RNA, 20 nt, synthetic construct
  source 1..20: mol_type = other RNA
gccctatgacaactggctgg

SEQ ID NO: 2791 - RNA, 20 nt, synthetic construct
  source 1..20: mol_type = other RNA
gccctatttgagctgtccgg

SEQ ID NO: 2792 - RNA, 20 nt, synthetic construct
  source 1..20: mol_type = other RNA
gccctccacgctcacgggac

SEQ ID NO: 2793 - RNA, 20 nt, synthetic construct
  source 1..20: mol_type = other RNA
gccctccagccagttgtcat

SEQ ID NO: 2794 - RNA, 20 nt, synthetic construct
  source 1..20: mol_type = other RNA
gccctgaccagctttgccca

SEQ ID NO: 2795 - RNA, 20 nt, synthetic construct
  source 1..20: mol_type = other RNA
gccctgacgctcctccggga

SEQ ID NO: 2796 - RNA, 20 nt, synthetic construct
  source 1..20: mol_type = other RNA
gccctgctggagcttgggga

SEQ ID NO: 2797 - RNA, 20 nt, synthetic construct
  source 1..20: mol_type = other RNA
gccctggcagagctggccaa

SEQ ID NO: 2798 - RNA, 20 nt, synthetic construct
  source 1..20: mol_type = other RNA
gccctgtggctggctctgag

SEQ ID NO: 2799 - RNA, 20 nt, synthetic construct
  source 1..20: mol_type = other RNA
gccgacatagagtcccgtga

SEQ ID NO: 2800 - RNA, 20 nt, synthetic construct
  source 1..20: mol_type = other RNA
gccgacgccctatttgagct

SEQ ID NO: 2801 - RNA, 20 nt, synthetic construct
  source 1..20: mol_type = other RNA
gccgaggaggctggaatttg

SEQ ID NO: 2802 - RNA, 20 nt, synthetic construct
  source 1..20: mol_type = other RNA
gccgatgaggttttcagcca

SEQ ID NO: 2803 - RNA, 20 nt, synthetic construct
  source 1..20: mol_type = other RNA
gccgatggcccgagtagggc

SEQ ID NO: 2804 - RNA, 20 nt, synthetic construct
  source 1..20: mol_type = other RNA
gccgcagacatcaaagtacc

SEQ ID NO: 2805 - RNA, 20 nt, synthetic construct
  source 1..20: mol_type = other RNA
gccgcagagtccgagctggc

SEQ ID NO: 2806 - RNA, 20 nt, synthetic construct
  source 1..20: mol_type = other RNA
gccgccacgagtggctgtgg

SEQ ID NO: 2807 - RNA, 20 nt, synthetic construct
  source 1..20: mol_type = other RNA
gccgccgatggcccgagtag

SEQ ID NO: 2808 - RNA, 20 nt, synthetic construct
  source 1..20: mol_type = other RNA
gccgccggtgctccttggca

SEQ ID NO: 2809 - RNA, 20 nt, synthetic construct
  source 1..20: mol_type = other RNA
gccgcctccaaggccttgcc

SEQ ID NO: 2810 - RNA, 20 nt, synthetic construct
  source 1..20: mol_type = other RNA
gccgcctctcttttctgggc

SEQ ID NO: 2811 - RNA, 20 nt, synthetic construct
  source 1..20: mol_type = other RNA
gccgcctggtccagagcctg

SEQ ID NO: 2812 - RNA, 20 nt, synthetic construct
  source 1..20: mol_type = other RNA
gccgcgtgagacacgagtga

SEQ ID NO: 2813 - RNA, 20 nt, synthetic construct
  source 1..20: mol_type = other RNA
gccgcttcaggtacctcgca

SEQ ID NO: 2814 - RNA, 20 nt, synthetic construct
  source 1..20: mol_type = other RNA
gccggacagctcaaataggg

SEQ ID NO: 2815 - RNA, 20 nt, synthetic construct
  source 1..20: mol_type = other RNA
gccggccacaagcccaggcc

SEQ ID NO: 2816 - RNA, 20 nt, synthetic construct
  source 1..20: mol_type = other RNA
gccggccttttccagaagaa

SEQ ID NO: 2817 - RNA, 20 nt, synthetic construct
  source 1..20: mol_type = other RNA
gccggcttccccagtacgac

SEQ ID NO: 2818 - RNA, 20 nt, synthetic construct
  source 1..20: mol_type = other RNA
gccgggcagtgtgccagctc

SEQ ID NO: 2819 - RNA, 20 nt, synthetic construct
  source 1..20: mol_type = other RNA
gccgggcctgggcttgtggc

SEQ ID NO: 2820 - RNA, 20 nt, synthetic construct
  source 1..20: mol_type = other RNA
gccgggctgtgaggaggagg

SEQ ID NO: 2821 - RNA, 20 nt, synthetic construct
  source 1..20: mol_type = other RNA
gccggggagctcctgtacca

SEQ ID NO: 2822 - RNA, 20 nt, synthetic construct
  source 1..20: mol_type = other RNA
gccggtcccggaggagcgtc

SEQ ID NO: 2823 - RNA, 20 nt, synthetic construct
  source 1..20: mol_type = other RNA
gccggtccgcacgtgctgtg

SEQ ID NO: 2824 - RNA, 20 nt, synthetic construct
  source 1..20: mol_type = other RNA
gccggtgccggtccgcacgt

SEQ ID NO: 2825 - RNA, 20 nt, synthetic construct
  source 1..20: mol_type = other RNA
gccggtgctccttggcagcc

SEQ ID NO: 2826 - RNA, 20 nt, synthetic construct
  source 1..20: mol_type = other RNA
gccggtggagcagttctacc

SEQ ID NO: 2827 - RNA, 20 nt, synthetic construct
  source 1..20: mol_type = other RNA
gccgtctaggatgagcagaa

SEQ ID NO: 2828 - RNA, 20 nt, synthetic construct
  source 1..20: mol_type = other RNA
gccgtgcagccctcgacagc

SEQ ID NO: 2829 - RNA, 20 nt, synthetic construct
  source 1..20: mol_type = other RNA
gccgttctgcccagtccggg

SEQ ID NO: 2830 - RNA, 20 nt, synthetic construct
  source 1..20: mol_type = other RNA
gcctatggcctgcaggatct

SEQ ID NO: 2831 - RNA, 20 nt, synthetic construct
  source 1..20: mol_type = other RNA
gcctcacgcctcctgatgca

SEQ ID NO: 2832 - RNA, 20 nt, synthetic construct
  source 1..20: mol_type = other RNA
gcctccaaggccttgcccag

SEQ ID NO: 2833 - RNA, 20 nt, synthetic construct
  source 1..20: mol_type = other RNA
gcctcctcggcctcgtgggc

SEQ ID NO: 2834 - RNA, 20 nt, synthetic construct
  source 1..20: mol_type = other RNA
gcctcctgatgcacatgtac

SEQ ID NO: 2835 - RNA, 20 nt, synthetic construct
  source 1..20: mol_type = other RNA
gcctccttgggccagctgcc

SEQ ID NO: 2836 - RNA, 20 nt, synthetic construct
  source 1..20: mol_type = other RNA
gcctcggtggacaggaagca

SEQ ID NO: 2837 - RNA, 20 nt, synthetic construct
  source 1..20: mol_type = other RNA
gcctcgtgggactcagctgt

SEQ ID NO: 2838 - RNA, 20 nt, synthetic construct
  source 1..20: mol_type = other RNA
gcctcgtgggcgcagtgcag

SEQ ID NO: 2839 - RNA, 20 nt, synthetic construct
  source 1..20: mol_type = other RNA
gcctctcacatacccccacc

SEQ ID NO: 2840 - RNA, 20 nt, synthetic construct
  source 1..20: mol_type = other RNA
gcctctcttttctgggcacc

SEQ ID NO: 2841 - RNA, 20 nt, synthetic construct
  source 1..20: mol_type = other RNA
gcctctgagagctggcacac

SEQ ID NO: 2842 - RNA, 20 nt, synthetic construct
  source 1..20: mol_type = other RNA
gcctcttcttccttggggtc

SEQ ID NO: 2843 - RNA, 20 nt, synthetic construct
  source 1..20: mol_type = other RNA
gcctgagcaaggccgacgcc

SEQ ID NO: 2844 - RNA, 20 nt, synthetic construct
  source 1..20: mol_type = other RNA
gcctgcaccagatccacctc

SEQ ID NO: 2845 - RNA, 20 nt, synthetic construct
  source 1..20: mol_type = other RNA
gcctgcaggatctgctcttc

SEQ ID NO: 2846 - RNA, 20 nt, synthetic construct
  source 1..20: mol_type = other RNA
gcctgcgggctcggcaccat

SEQ ID NO: 2847 - RNA, 20 nt, synthetic construct
  source 1..20: mol_type = other RNA
gcctgctccatggagaagcc

SEQ ID NO: 2848 - RNA, 20 nt, synthetic construct
  source 1..20: mol_type = other RNA
gcctgctgggccgtgcagcc

SEQ ID NO: 2849 - RNA, 20 nt, synthetic construct
  source 1..20: mol_type = other RNA
gcctggagcgggaactggcc

SEQ ID NO: 2850 - RNA, 20 nt, synthetic construct
  source 1..20: mol_type = other RNA
gcctggcctgcaccagatcc

SEQ ID NO: 2851 - RNA, 20 nt, synthetic construct
  source 1..20: mol_type = other RNA
gcctggctgaggtgctgttg

SEQ ID NO: 2852 - RNA, 20 nt, synthetic construct
  source 1..20: mol_type = other RNA
gcctgggagccctactcggg

SEQ ID NO: 2853 - RNA, 20 nt, synthetic construct
  source 1..20: mol_type = other RNA
gcctgggagctgggccgcag

SEQ ID NO: 2854 - RNA, 20 nt, synthetic construct
  source 1..20: mol_type = other RNA
gcctgggcctgctccatgga

SEQ ID NO: 2855 - RNA, 20 nt, synthetic construct
  source 1..20: mol_type = other RNA
gcctgggcttgtggccggct

SEQ ID NO: 2856 - RNA, 20 nt, synthetic construct
  source 1..20: mol_type = other RNA
gcctggtccagagcctgagc

SEQ ID NO: 2857 - RNA, 20 nt, synthetic construct
  source 1..20: mol_type = other RNA
gccttccccagcttcctcct

SEQ ID NO: 2858 - RNA, 20 nt, synthetic construct
  source 1..20: mol_type = other RNA
gccttgcccagtacatgtgc

SEQ ID NO: 2859 - RNA, 20 nt, synthetic construct
  source 1..20: mol_type = other RNA
gccttgctcaggctctggac

SEQ ID NO: 2860 - RNA, 20 nt, synthetic construct
  source 1..20: mol_type = other RNA
gccttggaggcggcgggcca

SEQ ID NO: 2861 - RNA, 20 nt, synthetic construct
  source 1..20: mol_type = other RNA
gcctttgcagagccggtgga

SEQ ID NO: 2862 - RNA, 20 nt, synthetic construct
  source 1..20: mol_type = other RNA
gcctttggccatcgcccagg

SEQ ID NO: 2863 - RNA, 20 nt, synthetic construct
  source 1..20: mol_type = other RNA
gccttttccagaagaagctg

SEQ ID NO: 2864 - RNA, 20 nt, synthetic construct
  source 1..20: mol_type = other RNA
gcgaaatcaaggacaaggag

SEQ ID NO: 2865 - RNA, 20 nt, synthetic construct
  source 1..20: mol_type = other RNA
gcgaggtacctgaagcggct

SEQ ID NO: 2866 - RNA, 20 nt, synthetic construct
  source 1..20: mol_type = other RNA
gcgatggccaaaggcttagt

SEQ ID NO: 2867 - RNA, 20 nt, synthetic construct
  source 1..20: mol_type = other RNA
gcgcaagatggcttcctgca

SEQ ID NO: 2868 - RNA, 20 nt, synthetic construct
  source 1..20: mol_type = other RNA
gcgcagtgcagcagctccag

SEQ ID NO: 2869 - RNA, 20 nt, synthetic construct
  source 1..20: mol_type = other RNA
gcgcatcacgtatgcctggg

SEQ ID NO: 2870 - RNA, 20 nt, synthetic construct
  source 1..20: mol_type = other RNA
gcgcccacgaggccgaggag

SEQ ID NO: 2871 - RNA, 20 nt, synthetic construct
  source 1..20: mol_type = other RNA
gcgcggcagctgctggagct

SEQ ID NO: 2872 - RNA, 20 nt, synthetic construct
  source 1..20: mol_type = other RNA
gcgctactttgagagctcag

SEQ ID NO: 2873 - RNA, 20 nt, synthetic construct
  source 1..20: mol_type = other RNA
gcgcttccagctcctcgaag

SEQ ID NO: 2874 - RNA, 20 nt, synthetic construct
  source 1..20: mol_type = other RNA
gcggagccctgctccctccg

SEQ ID NO: 2875 - RNA, 20 nt, synthetic construct
  source 1..20: mol_type = other RNA
gcggaggtccagggagaagt

SEQ ID NO: 2876 - RNA, 20 nt, synthetic construct
  source 1..20: mol_type = other RNA
gcggatgggaactggtcctc

SEQ ID NO: 2877 - RNA, 20 nt, synthetic construct
  source 1..20: mol_type = other RNA
gcggcagctgctggagctgc

SEQ ID NO: 2878 - RNA, 20 nt, synthetic construct
  source 1..20: mol_type = other RNA
gcggcccagctcccaggcca

SEQ ID NO: 2879 - RNA, 20 nt, synthetic construct
  source 1..20: mol_type = other RNA
gcggcccgcggtgggtgttg

SEQ ID NO: 2880 - RNA, 20 nt, synthetic construct
  source 1..20: mol_type = other RNA
gcggccgatgaggttttcag

SEQ ID NO: 2881 - RNA, 20 nt, synthetic construct
  source 1..20: mol_type = other RNA
gcggccgccggtgctccttg

SEQ ID NO: 2882 - RNA, 20 nt, synthetic construct
  source 1..20: mol_type = other RNA
gcggccgcgtgagacacgag

SEQ ID NO: 2883 - RNA, 20 nt, synthetic construct
  source 1..20: mol_type = other RNA
gcggccggggagctcctgta

SEQ ID NO: 2884 - RNA, 20 nt, synthetic construct
  source 1..20: mol_type = other RNA
gcggcgggccaagacttctc

SEQ ID NO: 2885 - RNA, 20 nt, synthetic construct
  source 1..20: mol_type = other RNA
gcggctgcagccggggacac

SEQ ID NO: 2886 - RNA, 20 nt, synthetic construct
  source 1..20: mol_type = other RNA
gcggctgcctcggtggacag

SEQ ID NO: 2887 - RNA, 20 nt, synthetic construct
  source 1..20: mol_type = other RNA
gcgggaactggccaccccgg

SEQ ID NO: 2888 - RNA, 20 nt, synthetic construct
  source 1..20: mol_type = other RNA
gcgggagctccttgtccttg

SEQ ID NO: 2889 - RNA, 20 nt, synthetic construct
  source 1..20: mol_type = other RNA
gcgggaggctggaagatcag

SEQ ID NO: 2890 - RNA, 20 nt, synthetic construct
  source 1..20: mol_type = other RNA
gcgggccaagacttctccct

SEQ ID NO: 2891 - RNA, 20 nt, synthetic construct
  source 1..20: mol_type = other RNA
gcgggccgcagagtccgagc

SEQ ID NO: 2892 - RNA, 20 nt, synthetic construct
  source 1..20: mol_type = other RNA
gcgggcgggaggctggaaga

SEQ ID NO: 2893 - RNA, 20 nt, synthetic construct
  source 1..20: mol_type = other RNA
gcgggctcggcaccatacgt

SEQ ID NO: 2894 - RNA, 20 nt, synthetic construct
  source 1..20: mol_type = other RNA
gcgggtgcccagaaaagaga

SEQ ID NO: 2895 - RNA, 20 nt, synthetic construct
  source 1..20: mol_type = other RNA
gcggtagaactgctccaccg

SEQ ID NO: 2896 - RNA, 20 nt, synthetic construct
  source 1..20: mol_type = other RNA
gcggtcaggtctcttcaaga

SEQ ID NO: 2897 - RNA, 20 nt, synthetic construct
  source 1..20: mol_type = other RNA
gcggtgggtgttggactaag

SEQ ID NO: 2898 - RNA, 20 nt, synthetic construct
  source 1..20: mol_type = other RNA
gcgtcagggctctgtcttgg

SEQ ID NO: 2899 - RNA, 20 nt, synthetic construct
  source 1..20: mol_type = other RNA
gcgtcctccccaagctccag

SEQ ID NO: 2900 - RNA, 20 nt, synthetic construct
  source 1..20: mol_type = other RNA
gcgtcggccttgctcaggct

SEQ ID NO: 2901 - RNA, 20 nt, synthetic construct
  source 1..20: mol_type = other RNA
gcgtgagacacgagtgattg

SEQ ID NO: 2902 - RNA, 20 nt, synthetic construct
  source 1..20: mol_type = other RNA
gcgtgaggcgggtgcccaga

SEQ ID NO: 2903 - RNA, 20 nt, synthetic construct
  source 1..20: mol_type = other RNA
gcgtgccacgctttctggct

SEQ ID NO: 2904 - RNA, 20 nt, synthetic construct
  source 1..20: mol_type = other RNA
gcgtggagggcagcttggcg

SEQ ID NO: 2905 - RNA, 20 nt, synthetic construct
  source 1..20: mol_type = other RNA
gcgtggcacgccctccagcc

SEQ ID NO: 2906 - RNA, 20 nt, synthetic construct
  source 1..20: mol_type = other RNA
gcgtgtcagggtgggggtat

SEQ ID NO: 2907 - RNA, 20 nt, synthetic construct
  source 1..20: mol_type = other RNA
gcgttctgctcatcctagac

SEQ ID NO: 2908 - RNA, 20 nt, synthetic construct
  source 1..20: mol_type = other RNA
gctactttgagagctcaggg

SEQ ID NO: 2909 - RNA, 20 nt, synthetic construct
  source 1..20: mol_type = other RNA
gctaggtactgcgggagctc

SEQ ID NO: 2910 - RNA, 20 nt, synthetic construct
  source 1..20: mol_type = other RNA
gctattgggctggggcagtg

SEQ ID NO: 2911 - RNA, 20 nt, synthetic construct
  source 1..20: mol_type = other RNA
gctcaaatagggcgtcggcc

SEQ ID NO: 2912 - RNA, 20 nt, synthetic construct
  source 1..20: mol_type = other RNA
gctcacgggactctatgtcg

SEQ ID NO: 2913 - RNA, 20 nt, synthetic construct
  source 1..20: mol_type = other RNA
gctcactgcaggacacgtat

SEQ ID NO: 2914 - RNA, 20 nt, synthetic construct
  source 1..20: mol_type = other RNA
gctcactgccccagcccaat

SEQ ID NO: 2915 - RNA, 20 nt, synthetic construct
  source 1..20: mol_type = other RNA
gctcaggctctggaccaggc

SEQ ID NO: 2916 - RNA, 20 nt, synthetic construct
  source 1..20: mol_type = other RNA
gctcagggatgacagagcac

SEQ ID NO: 2917 - RNA, 20 nt, synthetic construct
  source 1..20: mol_type = other RNA
gctcatcctagacggcttcg

SEQ ID NO: 2918 - RNA, 20 nt, synthetic construct
  source 1..20: mol_type = other RNA
gctccaccggctctgcaaag

SEQ ID NO: 2919 - RNA, 20 nt, synthetic construct
  source 1..20: mol_type = other RNA
gctccagcagctgccgcgcc

SEQ ID NO: 2920 - RNA, 20 nt, synthetic construct
  source 1..20: mol_type = other RNA
gctccagcagggcctctgag

SEQ ID NO: 2921 - RNA, 20 nt, synthetic construct
  source 1..20: mol_type = other RNA
gctccaggctcttgctgctg

SEQ ID NO: 2922 - RNA, 20 nt, synthetic construct
  source 1..20: mol_type = other RNA
gctccatggagaagccggac

SEQ ID NO: 2923 - RNA, 20 nt, synthetic construct
  source 1..20: mol_type = other RNA
gctcccaggccagcttggcc

SEQ ID NO: 2924 - RNA, 20 nt, synthetic construct
  source 1..20: mol_type = other RNA
gctccccaatccagaggggc

SEQ ID NO: 2925 - RNA, 20 nt, synthetic construct
  source 1..20: mol_type = other RNA
gctccccggccgcctctctt

SEQ ID NO: 2926 - RNA, 20 nt, synthetic construct
  source 1..20: mol_type = other RNA
gctcccgcagtacctagcat

SEQ ID NO: 2927 - RNA, 20 nt, synthetic construct
  source 1..20: mol_type = other RNA
gctccctccgggggctgctg

SEQ ID NO: 2928 - RNA, 20 nt, synthetic construct
  source 1..20: mol_type = other RNA
gctccgaggttgcaccctcc

SEQ ID NO: 2929 - RNA, 20 nt, synthetic construct
  source 1..20: mol_type = other RNA
gctcctccgggaccggccac

SEQ ID NO: 2930 - RNA, 20 nt, synthetic construct
  source 1..20: mol_type = other RNA
gctcctcgaagccgtctagg

SEQ ID NO: 2931 - RNA, 20 nt, synthetic construct
  source 1..20: mol_type = other RNA
gctcctctccagcctggcct

SEQ ID NO: 2932 - RNA, 20 nt, synthetic construct
  source 1..20: mol_type = other RNA
gctcctgtaccacgtgctgc

SEQ ID NO: 2933 - RNA, 20 nt, synthetic construct
  source 1..20: mol_type = other RNA
gctccttggcagccaacagc

SEQ ID NO: 2934 - RNA, 20 nt, synthetic construct
  source 1..20: mol_type = other RNA
gctccttgtccttgatttcg

SEQ ID NO: 2935 - RNA, 20 nt, synthetic construct
  source 1..20: mol_type = other RNA
gctcggactctgcggcccgc

SEQ ID NO: 2936 - RNA, 20 nt, synthetic construct
  source 1..20: mol_type = other RNA
gctcggcaccatacgtgtcc

SEQ ID NO: 2937 - RNA, 20 nt, synthetic construct
  source 1..20: mol_type = other RNA
gctctcaaagtagcgcatca

SEQ ID NO: 2938 - RNA, 20 nt, synthetic construct
  source 1..20: mol_type = other RNA
gctctcagaggccctgctgg

SEQ ID NO: 2939 - RNA, 20 nt, synthetic construct
  source 1..20: mol_type = other RNA
gctctgagtggcgaaatcaa

SEQ ID NO: 2940 - RNA, 20 nt, synthetic construct
  source 1..20: mol_type = other RNA
gctctgcaaaggccaggggc

SEQ ID NO: 2941 - RNA, 20 nt, synthetic construct
  source 1..20: mol_type = other RNA
gctctggaccaggcggcccc

SEQ ID NO: 2942 - RNA, 20 nt, synthetic construct
  source 1..20: mol_type = other RNA
gctctgtcatccctgagctc

SEQ ID NO: 2943 - RNA, 20 nt, synthetic construct
  source 1..20: mol_type = other RNA
gctctgtcttggtgctctgt

SEQ ID NO: 2944 - RNA, 20 nt, synthetic construct
  source 1..20: mol_type = other RNA
gctcttctccctgggcccac

SEQ ID NO: 2945 - RNA, 20 nt, synthetic construct
  source 1..20: mol_type = other RNA
gctcttgccctgaccagctt

SEQ ID NO: 2946 - RNA, 20 nt, synthetic construct
  source 1..20: mol_type = other RNA
gctcttgctgctgctcctct

SEQ ID NO: 2947 - RNA, 20 nt, synthetic construct
  source 1..20: mol_type = other RNA
gctgaaaacctcatcggccg

SEQ ID NO: 2948 - RNA, 20 nt, synthetic construct
  source 1..20: mol_type = other RNA
gctgaggtgctgttggctgc

SEQ ID NO: 2949 - RNA, 20 nt, synthetic construct
  source 1..20: mol_type = other RNA
gctgagtcccacgaggctcc

SEQ ID NO: 2950 - RNA, 20 nt, synthetic construct
  source 1..20: mol_type = other RNA
gctgatcttccagcctcccg

SEQ ID NO: 2951 - RNA, 20 nt, synthetic construct
  source 1..20: mol_type = other RNA
gctgcacggcccagcaggcc

SEQ ID NO: 2952 - RNA, 20 nt, synthetic construct
  source 1..20: mol_type = other RNA
gctgcactgcgcccacgagg

SEQ ID NO: 2953 - RNA, 20 nt, synthetic construct
  source 1..20: mol_type = other RNA
gctgcagccgcttcaggtac

SEQ ID NO: 2954 - RNA, 20 nt, synthetic construct
  source 1..20: mol_type = other RNA
gctgcagccggggacactgc

SEQ ID NO: 2955 - RNA, 20 nt, synthetic construct
  source 1..20: mol_type = other RNA
gctgccaaattccagcctcc

SEQ ID NO: 2956 - RNA, 20 nt, synthetic construct
  source 1..20: mol_type = other RNA
gctgccaaggagcaccggcg

SEQ ID NO: 2957 - RNA, 20 nt, synthetic construct
  source 1..20: mol_type = other RNA
gctgccctccacgctcacgg

SEQ ID NO: 2958 - RNA, 20 nt, synthetic construct
  source 1..20: mol_type = other RNA
gctgccgcgcccgcagtgtc

SEQ ID NO: 2959 - RNA, 20 nt, synthetic construct
  source 1..20: mol_type = other RNA
gctgccgttctgcccagtcc

SEQ ID NO: 2960 - RNA, 20 nt, synthetic construct
  source 1..20: mol_type = other RNA
gctgcctcggtggacaggaa

SEQ ID NO: 2961 - RNA, 20 nt, synthetic construct
  source 1..20: mol_type = other RNA
gctgcctgggagccctactc

SEQ ID NO: 2962 - RNA, 20 nt, synthetic construct
  source 1..20: mol_type = other RNA
gctgcggaggtccagggaga

SEQ ID NO: 2963 - RNA, 20 nt, synthetic construct
  source 1..20: mol_type = other RNA
gctgctccgaggttgcaccc

SEQ ID NO: 2964 - RNA, 20 nt, synthetic construct
  source 1..20: mol_type = other RNA
gctgctcctctccagcctgg

SEQ ID NO: 2965 - RNA, 20 nt, synthetic construct
  source 1..20: mol_type = other RNA
gctgctgcactgcgcccacg

SEQ ID NO: 2966 - RNA, 20 nt, synthetic construct
  source 1..20: mol_type = other RNA
gctgctgctcctctccagcc

SEQ ID NO: 2967 - RNA, 20 nt, synthetic construct
  source 1..20: mol_type = other RNA
gctgctggagctgctgcact

SEQ ID NO: 2968 - RNA, 20 nt, synthetic construct
  source 1..20: mol_type = other RNA
gctgctggccggccttttcc

SEQ ID NO: 2969 - RNA, 20 nt, synthetic construct
  source 1..20: mol_type = other RNA
gctggaagatcagcccagcc

SEQ ID NO: 2970 - RNA, 20 nt, synthetic construct
  source 1..20: mol_type = other RNA
gctggaagcgcaagatggct

SEQ ID NO: 2971 - RNA, 20 nt, synthetic construct
  source 1..20: mol_type = other RNA
gctggaatttggcagcacgt

SEQ ID NO: 2972 - RNA, 20 nt, synthetic construct
  source 1..20: mol_type = other RNA
gctggagaggagcagcagca

SEQ ID NO: 2973 - RNA, 20 nt, synthetic construct
  source 1..20: mol_type = other RNA
gctggagctgctgcactgcg

SEQ ID NO: 2974 - RNA, 20 nt, synthetic construct
  source 1..20: mol_type = other RNA
gctggagcttggggaggacg

SEQ ID NO: 2975 - RNA, 20 nt, synthetic construct
  source 1..20: mol_type = other RNA
gctggagggcgtgccacgct

SEQ ID NO: 2976 - RNA, 20 nt, synthetic construct
  source 1..20: mol_type = other RNA
gctggcacactgcccggcac

SEQ ID NO: 2977 - RNA, 20 nt, synthetic construct
  source 1..20: mol_type = other RNA
gctggccaagctggcctggg

SEQ ID NO: 2978 - RNA, 20 nt, synthetic construct
  source 1..20: mol_type = other RNA
gctggcccaaggaggcctgg

SEQ ID NO: 2979 - RNA, 20 nt, synthetic construct
  source 1..20: mol_type = other RNA
gctggccggccttttccaga

SEQ ID NO: 2980 - RNA, 20 nt, synthetic construct
  source 1..20: mol_type = other RNA
gctggcctgggagctgggcc

SEQ ID NO: 2981 - RNA, 20 nt, synthetic construct
  source 1..20: mol_type = other RNA
gctggccttccccagcttcc

SEQ ID NO: 2982 - RNA, 20 nt, synthetic construct
  source 1..20: mol_type = other RNA
gctggctctgagtggcgaaa

SEQ ID NO: 2983 - RNA, 20 nt, synthetic construct
  source 1..20: mol_type = other RNA
gctgggcaaagctggtcagg

SEQ ID NO: 2984 - RNA, 20 nt, synthetic construct
  source 1..20: mol_type = other RNA
gctgggccgcagacatcaaa

SEQ ID NO: 2985 - RNA, 20 nt, synthetic construct
  source 1..20: mol_type = other RNA
gctgggccgtgcagccctcg

SEQ ID NO: 2986 - RNA, 20 nt, synthetic construct
  source 1..20: mol_type = other RNA
gctgggctgatcttccagcc

SEQ ID NO: 2987 - RNA, 20 nt, synthetic construct
  source 1..20: mol_type = other RNA
gctggggaaggccagctcgg

SEQ ID NO: 2988 - RNA, 20 nt, synthetic construct
  source 1..20: mol_type = other RNA
gctggggcagtgagccgggc

SEQ ID NO: 2989 - RNA, 20 nt, synthetic construct
  source 1..20: mol_type = other RNA
gctggtcagggcaagagcta

SEQ ID NO: 2990 - RNA, 20 nt, synthetic construct
  source 1..20: mol_type = other RNA
gctgtccggcttctccatgg

SEQ ID NO: 2991 - RNA, 20 nt, synthetic construct
  source 1..20: mol_type = other RNA
gctgtcgagggctgcacggc

SEQ ID NO: 2992 - RNA, 20 nt, synthetic construct
  source 1..20: mol_type = other RNA
gctgtgactgagaagaagtg

SEQ ID NO: 2993 - RNA, 20 nt, synthetic construct
  source 1..20: mol_type = other RNA
gctgtgaggaggagggtgca

SEQ ID NO: 2994 - RNA, 20 nt, synthetic construct
  source 1..20: mol_type = other RNA
gctgtgcaggaagccatctt

SEQ ID NO: 2995 - RNA, 20 nt, synthetic construct
  source 1..20: mol_type = other RNA
gctgtgctgggcaaagctgg

SEQ ID NO: 2996 - RNA, 20 nt, synthetic construct
  source 1..20: mol_type = other RNA
gctgtggctgtgactgagaa

SEQ ID NO: 2997 - RNA, 20 nt, synthetic construct
  source 1..20: mol_type = other RNA
gctgtgggcccagggagaag

SEQ ID NO: 2998 - RNA, 20 nt, synthetic construct
  source 1..20: mol_type = other RNA
gctgtgtcacccgtttcagg

SEQ ID NO: 2999 - RNA, 20 nt, synthetic construct
  source 1..20: mol_type = other RNA
gctgttggctgccaaggagc

SEQ ID NO: 3000 - RNA, 20 nt, synthetic construct
  source 1..20: mol_type = other RNA
gcttagtccaacacccaccg

SEQ ID NO: 3001 - RNA, 20 nt, synthetic construct
  source 1..20: mol_type = other RNA
gcttcaggtacctcgcaagc

SEQ ID NO: 3002 - RNA, 20 nt, synthetic construct
  source 1..20: mol_type = other RNA
gcttccagctcctcgaagcc

SEQ ID NO: 3003 - RNA, 20 nt, synthetic construct
  source 1..20: mol_type = other RNA
gcttccccagtacgactttg

SEQ ID NO: 3004 - RNA, 20 nt, synthetic construct
  source 1..20: mol_type = other RNA
gcttcctcctgcaatgcttc

SEQ ID NO: 3005 - RNA, 20 nt, synthetic construct
  source 1..20: mol_type = other RNA
gcttcctgcacagcacgtgc

SEQ ID NO: 3006 - RNA, 20 nt, synthetic construct
  source 1..20: mol_type = other RNA
gcttcctgggggccctgtgg

SEQ ID NO: 3007 - RNA, 20 nt, synthetic construct
  source 1..20: mol_type = other RNA
gcttcctgtccaccgaggca

SEQ ID NO: 3008 - RNA, 20 nt, synthetic construct
  source 1..20: mol_type = other RNA
gcttcgaggagctggaagcg

SEQ ID NO: 3009 - RNA, 20 nt, synthetic construct
  source 1..20: mol_type = other RNA
gcttctccatggagcaggcc

SEQ ID NO: 3010 - RNA, 20 nt, synthetic construct
  source 1..20: mol_type = other RNA
gcttcttctggaaaaggccg

SEQ ID NO: 3011 - RNA, 20 nt, synthetic construct
  source 1..20: mol_type = other RNA
gcttgaaccgtccgggggat

SEQ ID NO: 3012 - RNA, 20 nt, synthetic construct
  source 1..20: mol_type = other RNA
gcttgcgaggtacctgaagc

SEQ ID NO: 3013 - RNA, 20 nt, synthetic construct
  source 1..20: mol_type = other RNA
gcttggccagctctgccagg

SEQ ID NO: 3014 - RNA, 20 nt, synthetic construct
  source 1..20: mol_type = other RNA
gcttggcgtcctccccaagc

SEQ ID NO: 3015 - RNA, 20 nt, synthetic construct
  source 1..20: mol_type = other RNA
gcttggggaagagacatcct

SEQ ID NO: 3016 - RNA, 20 nt, synthetic construct
  source 1..20: mol_type = other RNA
gcttggggaggacgccaagc

SEQ ID NO: 3017 - RNA, 20 nt, synthetic construct
  source 1..20: mol_type = other RNA
gcttgtggccggcttcccca

SEQ ID NO: 3018 - RNA, 20 nt, synthetic construct
  source 1..20: mol_type = other RNA
gctttctggctgggctgatc

SEQ ID NO: 3019 - RNA, 20 nt, synthetic construct
  source 1..20: mol_type = other RNA
gctttgcccagcacagcaat

SEQ ID NO: 3020 - RNA, 20 nt, synthetic construct
  source 1..20: mol_type = other RNA
ggaaaaggccggccagcagc

SEQ ID NO: 3021 - RNA, 20 nt, synthetic construct
  source 1..20: mol_type = other RNA
ggaactggccaccccggact

SEQ ID NO: 3022 - RNA, 20 nt, synthetic construct
  source 1..20: mol_type = other RNA
ggaactggtcctcctgtagg

SEQ ID NO: 3023 - RNA, 20 nt, synthetic construct
  source 1..20: mol_type = other RNA
ggaagaagaggccctatgac

SEQ ID NO: 3024 - RNA, 20 nt, synthetic construct
  source 1..20: mol_type = other RNA
ggaagatcagcccagccaga

SEQ ID NO: 3025 - RNA, 20 nt, synthetic construct
  source 1..20: mol_type = other RNA
ggaagcagaaggtgcttgcg

SEQ ID NO: 3026 - RNA, 20 nt, synthetic construct
  source 1..20: mol_type = other RNA
ggaagcattgcaggaggaag

SEQ ID NO: 3027 - RNA, 20 nt, synthetic construct
  source 1..20: mol_type = other RNA
ggaagccatcttgcgcttcc

SEQ ID NO: 3028 - RNA, 20 nt, synthetic construct
  source 1..20: mol_type = other RNA
ggaagccggccacaagccca

SEQ ID NO: 3029 - RNA, 20 nt, synthetic construct
  source 1..20: mol_type = other RNA
ggaagcgcaagatggcttcc

SEQ ID NO: 3030 - RNA, 20 nt, synthetic construct
  source 1..20: mol_type = other RNA
ggaagctggggaaggccagc

SEQ ID NO: 3031 - RNA, 20 nt, synthetic construct
  source 1..20: mol_type = other RNA
ggaaggccagctcggactct

SEQ ID NO: 3032 - RNA, 20 nt, synthetic construct
  source 1..20: mol_type = other RNA
ggaatttggcagcacgtggt

SEQ ID NO: 3033 - RNA, 20 nt, synthetic construct
  source 1..20: mol_type = other RNA
ggacaaggagctcccgcagt

SEQ ID NO: 3034 - RNA, 20 nt, synthetic construct
  source 1..20: mol_type = other RNA
ggacacgtatggtgccgagc

SEQ ID NO: 3035 - RNA, 20 nt, synthetic construct
  source 1..20: mol_type = other RNA
ggacactgcgggcgcggcag

SEQ ID NO: 3036 - RNA, 20 nt, synthetic construct
  source 1..20: mol_type = other RNA
ggacagagaagacaaagtcg

SEQ ID NO: 3037 - RNA, 20 nt, synthetic construct
  source 1..20: mol_type = other RNA
ggacagctcaaatagggcgt

SEQ ID NO: 3038 - RNA, 20 nt, synthetic construct
  source 1..20: mol_type = other RNA
ggacaggaagcagaaggtgc

SEQ ID NO: 3039 - RNA, 20 nt, synthetic construct
  source 1..20: mol_type = other RNA
ggaccagttcccatccgcag

SEQ ID NO: 3040 - RNA, 20 nt, synthetic construct
  source 1..20: mol_type = other RNA
ggaccggccacttcttctca

SEQ ID NO: 3041 - RNA, 20 nt, synthetic construct
  source 1..20: mol_type = other RNA
ggacctccgcagcactggca

SEQ ID NO: 3042 - RNA, 20 nt, synthetic construct
  source 1..20: mol_type = other RNA
ggacctgggcgatggccaaa

SEQ ID NO: 3043 - RNA, 20 nt, synthetic construct
  source 1..20: mol_type = other RNA
ggacgccaagctgccctcca

SEQ ID NO: 3044 - RNA, 20 nt, synthetic construct
  source 1..20: mol_type = other RNA
ggacggttcaagcaatggca

SEQ ID NO: 3045 - RNA, 20 nt, synthetic construct
  source 1..20: mol_type = other RNA
ggactaagcctttggccatc

SEQ ID NO: 3046 - RNA, 20 nt, synthetic construct
  source 1..20: mol_type = other RNA
ggactcagctgtgtcacccg

SEQ ID NO: 3047 - RNA, 20 nt, synthetic construct
  source 1..20: mol_type = other RNA
ggactctatgtcggcctgct

SEQ ID NO: 3048 - RNA, 20 nt, synthetic construct
  source 1..20: mol_type = other RNA
ggactctgcggcccgcggtg

SEQ ID NO: 3049 - RNA, 20 nt, synthetic construct
  source 1..20: mol_type = other RNA
ggactgggcagaacggcagc

SEQ ID NO: 3050 - RNA, 20 nt, synthetic construct
  source 1..20: mol_type = other RNA
ggagaagagcagatcctgca

SEQ ID NO: 3051 - RNA, 20 nt, synthetic construct
  source 1..20: mol_type = other RNA
ggagaagccggacagctcaa

SEQ ID NO: 3052 - RNA, 20 nt, synthetic construct
  source 1..20: mol_type = other RNA
ggagaagtcttggcccgccg

SEQ ID NO: 3053 - RNA, 20 nt, synthetic construct
  source 1..20: mol_type = other RNA
ggagaggagcagcagcaaga

SEQ ID NO: 3054 - RNA, 20 nt, synthetic construct
  source 1..20: mol_type = other RNA
ggagcagcagcaagagcctg

SEQ ID NO: 3055 - RNA, 20 nt, synthetic construct
  source 1..20: mol_type = other RNA
ggagcagcttcttctggaaa

SEQ ID NO: 3056 - RNA, 20 nt, synthetic construct
  source 1..20: mol_type = other RNA
ggagcaggcccaggcatacg

SEQ ID NO: 3057 - RNA, 20 nt, synthetic construct
  source 1..20: mol_type = other RNA
ggagcagggctccgccggtg

SEQ ID NO: 3058 - RNA, 20 nt, synthetic construct
  source 1..20: mol_type = other RNA
ggagcagttctaccgctcac

SEQ ID NO: 3059 - RNA, 20 nt, synthetic construct
  source 1..20: mol_type = other RNA
ggagccctactcgggccatc

SEQ ID NO: 3060 - RNA, 20 nt, synthetic construct
  source 1..20: mol_type = other RNA
ggagccctgctccctccggg

SEQ ID NO: 3061 - RNA, 20 nt, synthetic construct
  source 1..20: mol_type = other RNA
ggagcctcgtgggactcagc

SEQ ID NO: 3062 - RNA, 20 nt, synthetic construct
  source 1..20: mol_type = other RNA
ggagcgggaactggccaccc

SEQ ID NO: 3063 - RNA, 20 nt, synthetic construct
  source 1..20: mol_type = other RNA
ggagcgtcagggctctgtct

SEQ ID NO: 3064 - RNA, 20 nt, synthetic construct
  source 1..20: mol_type = other RNA
ggagctccccggccgcctct

SEQ ID NO: 3065 - RNA, 20 nt, synthetic construct
  source 1..20: mol_type = other RNA
ggagctcccgcagtacctag

SEQ ID NO: 3066 - RNA, 20 nt, synthetic construct
  source 1..20: mol_type = other RNA
ggagctcctgtaccacgtgc

SEQ ID NO: 3067 - RNA, 20 nt, synthetic construct
  source 1..20: mol_type = other RNA
ggagctccttgtccttgatt

SEQ ID NO: 3068 - RNA, 20 nt, synthetic construct
  source 1..20: mol_type = other RNA
ggagctgctgcactgcgccc

SEQ ID NO: 3069 - RNA, 20 nt, synthetic construct
  source 1..20: mol_type = other RNA
ggagctggaagcgcaagatg

SEQ ID NO: 3070 - RNA, 20 nt, synthetic construct
  source 1..20: mol_type = other RNA
ggagctgggccgcagacatc

SEQ ID NO: 3071 - RNA, 20 nt, synthetic construct
  source 1..20: mol_type = other RNA
ggagcttggggaggacgcca

SEQ ID NO: 3072 - RNA, 20 nt, synthetic construct
  source 1..20: mol_type = other RNA
ggaggaagctggggaaggcc

SEQ ID NO: 3073 - RNA, 20 nt, synthetic construct
  source 1..20: mol_type = other RNA
ggaggaccagttcccatccg

SEQ ID NO: 3074 - RNA, 20 nt, synthetic construct
  source 1..20: mol_type = other RNA
ggaggacgccaagctgccct

SEQ ID NO: 3075 - RNA, 20 nt, synthetic construct
  source 1..20: mol_type = other RNA
ggaggagcgtcagggctctg

SEQ ID NO: 3076 - RNA, 20 nt, synthetic construct
  source 1..20: mol_type = other RNA
ggaggagggtgcaacctcgg

SEQ ID NO: 3077 - RNA, 20 nt, synthetic construct
  source 1..20: mol_type = other RNA
ggaggcctggctgaggtgct

SEQ ID NO: 3078 - RNA, 20 nt, synthetic construct
  source 1..20: mol_type = other RNA
ggaggcggcgggccaagact

SEQ ID NO: 3079 - RNA, 20 nt, synthetic construct
  source 1..20: mol_type = other RNA
ggaggcgtgaggcgggtgcc

SEQ ID NO: 3080 - RNA, 20 nt, synthetic construct
  source 1..20: mol_type = other RNA
ggaggctggaagatcagccc

SEQ ID NO: 3081 - RNA, 20 nt, synthetic construct
  source 1..20: mol_type = other RNA
ggaggctggaatttggcagc

SEQ ID NO: 3082 - RNA, 20 nt, synthetic construct
  source 1..20: mol_type = other RNA
ggagggagcagggctccgcc

SEQ ID NO: 3083 - RNA, 20 nt, synthetic construct
  source 1..20: mol_type = other RNA
ggagggcagcttggcgtcct

SEQ ID NO: 3084 - RNA, 20 nt, synthetic construct
  source 1..20: mol_type = other RNA
ggagggcgtgccacgctttc

SEQ ID NO: 3085 - RNA, 20 nt, synthetic construct
  source 1..20: mol_type = other RNA
ggagggtgcaacctcggagc

SEQ ID NO: 3086 - RNA, 20 nt, synthetic construct
  source 1..20: mol_type = other RNA
ggaggtccagggagaagtct

SEQ ID NO: 3087 - RNA, 20 nt, synthetic construct
  source 1..20: mol_type = other RNA
ggaggtggatctggtgcagg

SEQ ID NO: 3088 - RNA, 20 nt, synthetic construct
  source 1..20: mol_type = other RNA
ggatctgctcttctccctgg

SEQ ID NO: 3089 - RNA, 20 nt, synthetic construct
  source 1..20: mol_type = other RNA
ggatctggtgcaggccaggc

SEQ ID NO: 3090 - RNA, 20 nt, synthetic construct
  source 1..20: mol_type = other RNA
ggatgacagagcaccaagac

SEQ ID NO: 3091 - RNA, 20 nt, synthetic construct
  source 1..20: mol_type = other RNA
ggatgagcagaacgcggtca

SEQ ID NO: 3092 - RNA, 20 nt, synthetic construct
  source 1..20: mol_type = other RNA
ggatgccatccgggcctgcg

SEQ ID NO: 3093 - RNA, 20 nt, synthetic construct
  source 1..20: mol_type = other RNA
ggatgcctatggcctgcagg

SEQ ID NO: 3094 - RNA, 20 nt, synthetic construct
  source 1..20: mol_type = other RNA
ggatggcatcctagtggagg

SEQ ID NO: 3095 - RNA, 20 nt, synthetic construct
  source 1..20: mol_type = other RNA
ggatgggaactggtcctcct

SEQ ID NO: 3096 - RNA, 20 nt, synthetic construct
  source 1..20: mol_type = other RNA
ggatgtctcttccccaagcc

SEQ ID NO: 3097 - RNA, 20 nt, synthetic construct
  source 1..20: mol_type = other RNA
ggattggggagcctcgtggg

SEQ ID NO: 3098 - RNA, 20 nt, synthetic construct
  source 1..20: mol_type = other RNA
ggcaaagctggtcagggcaa

SEQ ID NO: 3099 - RNA, 20 nt, synthetic construct
  source 1..20: mol_type = other RNA
ggcaaatgccagtgctgcgg

SEQ ID NO: 3100 - RNA, 20 nt, synthetic construct
  source 1..20: mol_type = other RNA
ggcaagagctattgggctgg

SEQ ID NO: 3101 - RNA, 20 nt, synthetic construct
  source 1..20: mol_type = other RNA
ggcaaggccttggaggcggc

SEQ ID NO: 3102 - RNA, 20 nt, synthetic construct
  source 1..20: mol_type = other RNA
ggcacaaagtagggctgtgg

SEQ ID NO: 3103 - RNA, 20 nt, synthetic construct
  source 1..20: mol_type = other RNA
ggcacactgcccggcacaaa

SEQ ID NO: 3104 - RNA, 20 nt, synthetic construct
  source 1..20: mol_type = other RNA
ggcaccatacgtgtcctgca

SEQ ID NO: 3105 - RNA, 20 nt, synthetic construct
  source 1..20: mol_type = other RNA
ggcacccgcctcacgcctcc

SEQ ID NO: 3106 - RNA, 20 nt, synthetic construct
  source 1..20: mol_type = other RNA
ggcaccggcggagccctgct

SEQ ID NO: 3107 - RNA, 20 nt, synthetic construct
  source 1..20: mol_type = other RNA
ggcacgccctccagccagtt

SEQ ID NO: 3108 - RNA, 20 nt, synthetic construct
  source 1..20: mol_type = other RNA
ggcagaacggcagctggccc

SEQ ID NO: 3109 - RNA, 20 nt, synthetic construct
  source 1..20: mol_type = other RNA
ggcagagctggccaagctgg

SEQ ID NO: 3110 - RNA, 20 nt, synthetic construct
  source 1..20: mol_type = other RNA
ggcagcacgtggtacaggag

SEQ ID NO: 3111 - RNA, 20 nt, synthetic construct
  source 1..20: mol_type = other RNA
ggcagccaacagcacctcag

SEQ ID NO: 3112 - RNA, 20 nt, synthetic construct
  source 1..20: mol_type = other RNA
ggcagccgccgatggcccga

SEQ ID NO: 3113 - RNA, 20 nt, synthetic construct
  source 1..20: mol_type = other RNA
ggcagctgctggagctgctg

SEQ ID NO: 3114 - RNA, 20 nt, synthetic construct
  source 1..20: mol_type = other RNA
ggcagctggcccaaggaggc

SEQ ID NO: 3115 - RNA, 20 nt, synthetic construct
  source 1..20: mol_type = other RNA
ggcagcttggcgtcctcccc

SEQ ID NO: 3116 - RNA, 20 nt, synthetic construct
  source 1..20: mol_type = other RNA
ggcaggggacagagaagaca

SEQ ID NO: 3117 - RNA, 20 nt, synthetic construct
  source 1..20: mol_type = other RNA
ggcagtgagccgggcctggg

SEQ ID NO: 3118 - RNA, 20 nt, synthetic construct
  source 1..20: mol_type = other RNA
ggcagtgtgccagctctcag

SEQ ID NO: 3119 - RNA, 20 nt, synthetic construct
  source 1..20: mol_type = other RNA
ggcatacgtgatgcgctact

SEQ ID NO: 3120 - RNA, 20 nt, synthetic construct
  source 1..20: mol_type = other RNA
ggcatcccccggacggttca

SEQ ID NO: 3121 - RNA, 20 nt, synthetic construct
  source 1..20: mol_type = other RNA
ggcatcctagtggaggtgga

SEQ ID NO: 3122 - RNA, 20 nt, synthetic construct
  source 1..20: mol_type = other RNA
ggcatttgcccctctggatt

SEQ ID NO: 3123 - RNA, 20 nt, synthetic construct
  source 1..20: mol_type = other RNA
ggccaaaggcttagtccaac

SEQ ID NO: 3124 - RNA, 20 nt, synthetic construct
  source 1..20: mol_type = other RNA
ggccaagacttctccctgga

SEQ ID NO: 3125 - RNA, 20 nt, synthetic construct
  source 1..20: mol_type = other RNA
ggccaagctggcctgggagc

SEQ ID NO: 3126 - RNA, 20 nt, synthetic construct
  source 1..20: mol_type = other RNA
ggccacaagcccaggcccgg

SEQ ID NO: 3127 - RNA, 20 nt, synthetic construct
  source 1..20: mol_type = other RNA
ggccaccccggactgggcag

SEQ ID NO: 3128 - RNA, 20 nt, synthetic construct
  source 1..20: mol_type = other RNA
ggccacttcttctcagtcac

SEQ ID NO: 3129 - RNA, 20 nt, synthetic construct
  source 1..20: mol_type = other RNA
ggccagctcggactctgcgg

SEQ ID NO: 3130 - RNA, 20 nt, synthetic construct
  source 1..20: mol_type = other RNA
ggccagctctgccagggccc

SEQ ID NO: 3131 - RNA, 20 nt, synthetic construct
  source 1..20: mol_type = other RNA
ggccagctgccgttctgccc

SEQ ID NO: 3132 - RNA, 20 nt, synthetic construct
  source 1..20: mol_type = other RNA
ggccagcttggccagctctg

SEQ ID NO: 3133 - RNA, 20 nt, synthetic construct
  source 1..20: mol_type = other RNA
ggccaggctggagaggagca

SEQ ID NO: 3134 - RNA, 20 nt, synthetic construct
  source 1..20: mol_type = other RNA
ggccaggggcgtgtcagggt

SEQ ID NO: 3135 - RNA, 20 nt, synthetic construct
  source 1..20: mol_type = other RNA
ggccagttcccgctccaggc

SEQ ID NO: 3136 - RNA, 20 nt, synthetic construct
  source 1..20: mol_type = other RNA
ggccataggcatcccccgga

SEQ ID NO: 3137 - RNA, 20 nt, synthetic construct
  source 1..20: mol_type = other RNA
ggccatcgcccaggtcctca

SEQ ID NO: 3138 - RNA, 20 nt, synthetic construct
  source 1..20: mol_type = other RNA
ggccatcggcggctgcctcg

SEQ ID NO: 3139 - RNA, 20 nt, synthetic construct
  source 1..20: mol_type = other RNA
ggcccaaggaggcctggctg

SEQ ID NO: 3140 - RNA, 20 nt, synthetic construct
  source 1..20: mol_type = other RNA
ggcccacagccactcgtggc

SEQ ID NO: 3141 - RNA, 20 nt, synthetic construct
  source 1..20: mol_type = other RNA
ggcccagcaggccgacatag

SEQ ID NO: 3142 - RNA, 20 nt, synthetic construct
  source 1..20: mol_type = other RNA
ggcccagctcccaggccagc

SEQ ID NO: 3143 - RNA, 20 nt, synthetic construct
  source 1..20: mol_type = other RNA
ggcccaggcatacgtgatgc

SEQ ID NO: 3144 - RNA, 20 nt, synthetic construct
  source 1..20: mol_type = other RNA
ggcccagggagaagagcaga

SEQ ID NO: 3145 - RNA, 20 nt, synthetic construct
  source 1..20: mol_type = other RNA
ggcccccaggaagcattgca

SEQ ID NO: 3146 - RNA, 20 nt, synthetic construct
  source 1..20: mol_type = other RNA
ggcccgagtagggctcccag

SEQ ID NO: 3147 - RNA, 20 nt, synthetic construct
  source 1..20: mol_type = other RNA
ggcccgcggtgggtgttgga

SEQ ID NO: 3148 - RNA, 20 nt, synthetic construct
  source 1..20: mol_type = other RNA
ggcccggatggcatcctagt

SEQ ID NO: 3149 - RNA, 20 nt, synthetic construct
  source 1..20: mol_type = other RNA
ggcccggctcactgccccag

SEQ ID NO: 3150 - RNA, 20 nt, synthetic construct
  source 1..20: mol_type = other RNA
ggccctatgacaactggctg

SEQ ID NO: 3151 - RNA, 20 nt, synthetic construct
  source 1..20: mol_type = other RNA
ggccctgctggagcttgggg

SEQ ID NO: 3152 - RNA, 20 nt, synthetic construct
  source 1..20: mol_type = other RNA
ggccctggcagagctggcca

SEQ ID NO: 3153 - RNA, 20 nt, synthetic construct
  source 1..20: mol_type = other RNA
ggccctgtggctggctctga

SEQ ID NO: 3154 - RNA, 20 nt, synthetic construct
  source 1..20: mol_type = other RNA
ggccgacatagagtcccgtg

SEQ ID NO: 3155 - RNA, 20 nt, synthetic construct
  source 1..20: mol_type = other RNA
ggccgacgccctatttgagc

SEQ ID NO: 3156 - RNA, 20 nt, synthetic construct
  source 1..20: mol_type = other RNA
ggccgaggaggctggaattt

SEQ ID NO: 3157 - RNA, 20 nt, synthetic construct
  source 1..20: mol_type = other RNA
ggccgatgaggttttcagcc

SEQ ID NO: 3158 - RNA, 20 nt, synthetic construct
  source 1..20: mol_type = other RNA
ggccgcagacatcaaagtac

SEQ ID NO: 3159 - RNA, 20 nt, synthetic construct
  source 1..20: mol_type = other RNA
ggccgcagagtccgagctgg

SEQ ID NO: 3160 - RNA, 20 nt, synthetic construct
  source 1..20: mol_type = other RNA
ggccgccacgagtggctgtg

SEQ ID NO: 3161 - RNA, 20 nt, synthetic construct
  source 1..20: mol_type = other RNA
ggccgccggtgctccttggc

SEQ ID NO: 3162 - RNA, 20 nt, synthetic construct
  source 1..20: mol_type = other RNA
ggccgcctctcttttctggg

SEQ ID NO: 3163 - RNA, 20 nt, synthetic construct
  source 1..20: mol_type = other RNA
ggccgcctggtccagagcct

SEQ ID NO: 3164 - RNA, 20 nt, synthetic construct
  source 1..20: mol_type = other RNA
ggccgcgtgagacacgagtg

SEQ ID NO: 3165 - RNA, 20 nt, synthetic construct
  source 1..20: mol_type = other RNA
ggccggccttttccagaaga

SEQ ID NO: 3166 - RNA, 20 nt, synthetic construct
  source 1..20: mol_type = other RNA
ggccggcttccccagtacga

SEQ ID NO: 3167 - RNA, 20 nt, synthetic construct
  source 1..20: mol_type = other RNA
ggccgggctgtgaggaggag

SEQ ID NO: 3168 - RNA, 20 nt, synthetic construct
  source 1..20: mol_type = other RNA
ggccggggagctcctgtacc

SEQ ID NO: 3169 - RNA, 20 nt, synthetic construct
  source 1..20: mol_type = other RNA
ggccggtcccggaggagcgt

SEQ ID NO: 3170 - RNA, 20 nt, synthetic construct
  source 1..20: mol_type = other RNA
ggccgtgcagccctcgacag

SEQ ID NO: 3171 - RNA, 20 nt, synthetic construct
  source 1..20: mol_type = other RNA
ggcctccttgggccagctgc

SEQ ID NO: 3172 - RNA, 20 nt, synthetic construct
  source 1..20: mol_type = other RNA
ggcctcgtgggcgcagtgca

SEQ ID NO: 3173 - RNA, 20 nt, synthetic construct
  source 1..20: mol_type = other RNA
ggcctctgagagctggcaca

SEQ ID NO: 3174 - RNA, 20 nt, synthetic construct
  source 1..20: mol_type = other RNA
ggcctcttcttccttggggt

SEQ ID NO: 3175 - RNA, 20 nt, synthetic construct
  source 1..20: mol_type = other RNA
ggcctgcaccagatccacct

SEQ ID NO: 3176 - RNA, 20 nt, synthetic construct
  source 1..20: mol_type = other RNA
ggcctgcaggatctgctctt

SEQ ID NO: 3177 - RNA, 20 nt, synthetic construct
  source 1..20: mol_type = other RNA
ggcctgcgggctcggcacca

SEQ ID NO: 3178 - RNA, 20 nt, synthetic construct
  source 1..20: mol_type = other RNA
ggcctgctccatggagaagc

SEQ ID NO: 3179 - RNA, 20 nt, synthetic construct
  source 1..20: mol_type = other RNA
ggcctgctgggccgtgcagc

SEQ ID NO: 3180 - RNA, 20 nt, synthetic construct
  source 1..20: mol_type = other RNA
ggcctggctgaggtgctgtt

SEQ ID NO: 3181 - RNA, 20 nt, synthetic construct
  source 1..20: mol_type = other RNA
ggcctgggagctgggccgca

SEQ ID NO: 3182 - RNA, 20 nt, synthetic construct
  source 1..20: mol_type = other RNA
ggcctgggcttgtggccggc

SEQ ID NO: 3183 - RNA, 20 nt, synthetic construct
  source 1..20: mol_type = other RNA
ggccttccccagcttcctcc

SEQ ID NO: 3184 - RNA, 20 nt, synthetic construct
  source 1..20: mol_type = other RNA
ggccttgcccagtacatgtg

SEQ ID NO: 3185 - RNA, 20 nt, synthetic construct
  source 1..20: mol_type = other RNA
ggccttgctcaggctctgga

SEQ ID NO: 3186 - RNA, 20 nt, synthetic construct
  source 1..20: mol_type = other RNA
ggcctttgcagagccggtgg

SEQ ID NO: 3187 - RNA, 20 nt, synthetic construct
  source 1..20: mol_type = other RNA
ggccttttccagaagaagct

SEQ ID NO: 3188 - RNA, 20 nt, synthetic construct
  source 1..20: mol_type = other RNA
ggcgaaatcaaggacaagga

SEQ ID NO: 3189 - RNA, 20 nt, synthetic construct
  source 1..20: mol_type = other RNA
ggcgatggccaaaggcttag

SEQ ID NO: 3190 - RNA, 20 nt, synthetic construct
  source 1..20: mol_type = other RNA
ggcgcagtgcagcagctcca

SEQ ID NO: 3191 - RNA, 20 nt, synthetic construct
  source 1..20: mol_type = other RNA
ggcgcggcagctgctggagc

SEQ ID NO: 3192 - RNA, 20 nt, synthetic construct
  source 1..20: mol_type = other RNA
ggcggagccctgctccctcc

SEQ ID NO: 3193 - RNA, 20 nt, synthetic construct
  source 1..20: mol_type = other RNA
ggcggccgatgaggttttca

SEQ ID NO: 3194 - RNA, 20 nt, synthetic construct
  source 1..20: mol_type = other RNA
ggcggccgcgtgagacacga

SEQ ID NO: 3195 - RNA, 20 nt, synthetic construct
  source 1..20: mol_type = other RNA
ggcggccggggagctcctgt

SEQ ID NO: 3196 - RNA, 20 nt, synthetic construct
  source 1..20: mol_type = other RNA
ggcggcgggccaagacttct

SEQ ID NO: 3197 - RNA, 20 nt, synthetic construct
  source 1..20: mol_type = other RNA
ggcggctgcctcggtggaca

SEQ ID NO: 3198 - RNA, 20 nt, synthetic construct
  source 1..20: mol_type = other RNA
ggcgggaggctggaagatca

SEQ ID NO: 3199 - RNA, 20 nt, synthetic construct
  source 1..20: mol_type = other RNA
ggcgggccaagacttctccc

SEQ ID NO: 3200 - RNA, 20 nt, synthetic construct
  source 1..20: mol_type = other RNA
ggcgggtgcccagaaaagag

SEQ ID NO: 3201 - RNA, 20 nt, synthetic construct
  source 1..20: mol_type = other RNA
ggcgtcctccccaagctcca

SEQ ID NO: 3202 - RNA, 20 nt, synthetic construct
  source 1..20: mol_type = other RNA
ggcgtcggccttgctcaggc

SEQ ID NO: 3203 - RNA, 20 nt, synthetic construct
  source 1..20: mol_type = other RNA
ggcgtgaggcgggtgcccag

SEQ ID NO: 3204 - RNA, 20 nt, synthetic construct
  source 1..20: mol_type = other RNA
ggcgtgccacgctttctggc

SEQ ID NO: 3205 - RNA, 20 nt, synthetic construct
  source 1..20: mol_type = other RNA
ggcgtgtcagggtgggggta

SEQ ID NO: 3206 - RNA, 20 nt, synthetic construct
  source 1..20: mol_type = other RNA
ggctcactgccccagcccaa

SEQ ID NO: 3207 - RNA, 20 nt, synthetic construct
  source 1..20: mol_type = other RNA
ggctccccaatccagagggg

SEQ ID NO: 3208 - RNA, 20 nt, synthetic construct
  source 1..20: mol_type = other RNA
ggctcggcaccatacgtgtc

SEQ ID NO: 3209 - RNA, 20 nt, synthetic construct
  source 1..20: mol_type = other RNA
ggctctgagtggcgaaatca

SEQ ID NO: 3210 - RNA, 20 nt, synthetic construct
  source 1..20: mol_type = other RNA
ggctctgcaaaggccagggg

SEQ ID NO: 3211 - RNA, 20 nt, synthetic construct
  source 1..20: mol_type = other RNA
ggctctggaccaggcggccc

SEQ ID NO: 3212 - RNA, 20 nt, synthetic construct
  source 1..20: mol_type = other RNA
ggctctgtcttggtgctctg

SEQ ID NO: 3213 - RNA, 20 nt, synthetic construct
  source 1..20: mol_type = other RNA
ggctcttgctgctgctcctc

SEQ ID NO: 3214 - RNA, 20 nt, synthetic construct
  source 1..20: mol_type = other RNA
ggctgaaaacctcatcggcc

SEQ ID NO: 3215 - RNA, 20 nt, synthetic construct
  source 1..20: mol_type = other RNA
ggctgaggtgctgttggctg

SEQ ID NO: 3216 - RNA, 20 nt, synthetic construct
  source 1..20: mol_type = other RNA
ggctgatcttccagcctccc

SEQ ID NO: 3217 - RNA, 20 nt, synthetic construct
  source 1..20: mol_type = other RNA
ggctgcacggcccagcaggc

SEQ ID NO: 3218 - RNA, 20 nt, synthetic construct
  source 1..20: mol_type = other RNA
ggctgcagccgcttcaggta

SEQ ID NO: 3219 - RNA, 20 nt, synthetic construct
  source 1..20: mol_type = other RNA
ggctgcagccggggacactg

SEQ ID NO: 3220 - RNA, 20 nt, synthetic construct
  source 1..20: mol_type = other RNA
ggctgccaaggagcaccggc

SEQ ID NO: 3221 - RNA, 20 nt, synthetic construct
  source 1..20: mol_type = other RNA
ggctgcctcggtggacagga

SEQ ID NO: 3222 - RNA, 20 nt, synthetic construct
  source 1..20: mol_type = other RNA
ggctgctggccggccttttc

SEQ ID NO: 3223 - RNA, 20 nt, synthetic construct
  source 1..20: mol_type = other RNA
ggctggaagatcagcccagc

SEQ ID NO: 3224 - RNA, 20 nt, synthetic construct
  source 1..20: mol_type = other RNA
ggctggaatttggcagcacg

SEQ ID NO: 3225 - RNA, 20 nt, synthetic construct
  source 1..20: mol_type = other RNA
ggctggagaggagcagcagc

SEQ ID NO: 3226 - RNA, 20 nt, synthetic construct
  source 1..20: mol_type = other RNA
ggctggagggcgtgccacgc

SEQ ID NO: 3227 - RNA, 20 nt, synthetic construct
  source 1..20: mol_type = other RNA
ggctggctctgagtggcgaa

SEQ ID NO: 3228 - RNA, 20 nt, synthetic construct
  source 1..20: mol_type = other RNA
ggctgggctgatcttccagc

SEQ ID NO: 3229 - RNA, 20 nt, synthetic construct
  source 1..20: mol_type = other RNA
ggctggggcagtgagccggg

SEQ ID NO: 3230 - RNA, 20 nt, synthetic construct
  source 1..20: mol_type = other RNA
ggctgtcgagggctgcacgg

SEQ ID NO: 3231 - RNA, 20 nt, synthetic construct
  source 1..20: mol_type = other RNA
ggctgtgactgagaagaagt

SEQ ID NO: 3232 - RNA, 20 nt, synthetic construct
  source 1..20: mol_type = other RNA
ggctgtgaggaggagggtgc

SEQ ID NO: 3233 - RNA, 20 nt, synthetic construct
  source 1..20: mol_type = other RNA
ggctgtggctgtgactgaga

SEQ ID NO: 3234 - RNA, 20 nt, synthetic construct
  source 1..20: mol_type = other RNA
ggctgtgggcccagggagaa

SEQ ID NO: 3235 - RNA, 20 nt, synthetic construct
  source 1..20: mol_type = other RNA
ggcttagtccaacacccacc

SEQ ID NO: 3236 - RNA, 20 nt, synthetic construct
  source 1..20: mol_type = other RNA
ggcttccccagtacgacttt

SEQ ID NO: 3237 - RNA, 20 nt, synthetic construct
  source 1..20: mol_type = other RNA
ggcttcctgcacagcacgtg

SEQ ID NO: 3238 - RNA, 20 nt, synthetic construct
  source 1..20: mol_type = other RNA
ggcttcgaggagctggaagc

SEQ ID NO: 3239 - RNA, 20 nt, synthetic construct
  source 1..20: mol_type = other RNA
ggcttctccatggagcaggc

SEQ ID NO: 3240 - RNA, 20 nt, synthetic construct
  source 1..20: mol_type = other RNA
ggcttggggaagagacatcc

SEQ ID NO: 3241 - RNA, 20 nt, synthetic construct
  source 1..20: mol_type = other RNA
ggcttgtggccggcttcccc

SEQ ID NO: 3242 - RNA, 20 nt, synthetic construct
  source 1..20: mol_type = other RNA
gggaactggccaccccggac

SEQ ID NO: 3243 - RNA, 20 nt, synthetic construct
  source 1..20: mol_type = other RNA
gggaactggtcctcctgtag

SEQ ID NO: 3244 - RNA, 20 nt, synthetic construct
  source 1..20: mol_type = other RNA
gggaagagacatccttgtgt

SEQ ID NO: 3245 - RNA, 20 nt, synthetic construct
  source 1..20: mol_type = other RNA
gggaagccggccacaagccc

SEQ ID NO: 3246 - RNA, 20 nt, synthetic construct
  source 1..20: mol_type = other RNA
gggaaggccagctcggactc

SEQ ID NO: 3247 - RNA, 20 nt, synthetic construct
  source 1..20: mol_type = other RNA
gggacactgcgggcgcggca

SEQ ID NO: 3248 - RNA, 20 nt, synthetic construct
  source 1..20: mol_type = other RNA
gggacagagaagacaaagtc

SEQ ID NO: 3249 - RNA, 20 nt, synthetic construct
  source 1..20: mol_type = other RNA
gggaccggccacttcttctc

SEQ ID NO: 3250 - RNA, 20 nt, synthetic construct
  source 1..20: mol_type = other RNA
gggactcagctgtgtcaccc

SEQ ID NO: 3251 - RNA, 20 nt, synthetic construct
  source 1..20: mol_type = other RNA
gggactctatgtcggcctgc

SEQ ID NO: 3252 - RNA, 20 nt, synthetic construct
  source 1..20: mol_type = other RNA
gggagaagagcagatcctgc

SEQ ID NO: 3253 - RNA, 20 nt, synthetic construct
  source 1..20: mol_type = other RNA
gggagaagtcttggcccgcc

SEQ ID NO: 3254 - RNA, 20 nt, synthetic construct
  source 1..20: mol_type = other RNA
gggagcagggctccgccggt

SEQ ID NO: 3255 - RNA, 20 nt, synthetic construct
  source 1..20: mol_type = other RNA
gggagccctactcgggccat

SEQ ID NO: 3256 - RNA, 20 nt, synthetic construct
  source 1..20: mol_type = other RNA
gggagcctcgtgggactcag

SEQ ID NO: 3257 - RNA, 20 nt, synthetic construct
  source 1..20: mol_type = other RNA
gggagctcctgtaccacgtg

SEQ ID NO: 3258 - RNA, 20 nt, synthetic construct
  source 1..20: mol_type = other RNA
gggagctccttgtccttgat

SEQ ID NO: 3259 - RNA, 20 nt, synthetic construct
  source 1..20: mol_type = other RNA
gggagctgggccgcagacat

SEQ ID NO: 3260 - RNA, 20 nt, synthetic construct
  source 1..20: mol_type = other RNA
gggaggacgccaagctgccc

SEQ ID NO: 3261 - RNA, 20 nt, synthetic construct
  source 1..20: mol_type = other RNA
gggaggctggaagatcagcc

SEQ ID NO: 3262 - RNA, 20 nt, synthetic construct
  source 1..20: mol_type = other RNA
gggatgacagagcaccaaga

SEQ ID NO: 3263 - RNA, 20 nt, synthetic construct
  source 1..20: mol_type = other RNA
gggatgcctatggcctgcag

SEQ ID NO: 3264 - RNA, 20 nt, synthetic construct
  source 1..20: mol_type = other RNA
gggcaaagctggtcagggca

SEQ ID NO: 3265 - RNA, 20 nt, synthetic construct
  source 1..20: mol_type = other RNA
gggcaaatgccagtgctgcg

SEQ ID NO: 3266 - RNA, 20 nt, synthetic construct
  source 1..20: mol_type = other RNA
gggcaagagctattgggctg

SEQ ID NO: 3267 - RNA, 20 nt, synthetic construct
  source 1..20: mol_type = other RNA
gggcaaggccttggaggcgg

SEQ ID NO: 3268 - RNA, 20 nt, synthetic construct
  source 1..20: mol_type = other RNA
gggcacccgcctcacgcctc

SEQ ID NO: 3269 - RNA, 20 nt, synthetic construct
  source 1..20: mol_type = other RNA
gggcagaacggcagctggcc

SEQ ID NO: 3270 - RNA, 20 nt, synthetic construct
  source 1..20: mol_type = other RNA
gggcagcttggcgtcctccc

SEQ ID NO: 3271 - RNA, 20 nt, synthetic construct
  source 1..20: mol_type = other RNA
gggcagtgagccgggcctgg

SEQ ID NO: 3272 - RNA, 20 nt, synthetic construct
  source 1..20: mol_type = other RNA
gggcagtgtgccagctctca

SEQ ID NO: 3273 - RNA, 20 nt, synthetic construct
  source 1..20: mol_type = other RNA
gggccaagacttctccctgg

SEQ ID NO: 3274 - RNA, 20 nt, synthetic construct
  source 1..20: mol_type = other RNA
gggccagctgccgttctgcc

SEQ ID NO: 3275 - RNA, 20 nt, synthetic construct
  source 1..20: mol_type = other RNA
gggccatcggcggctgcctc

SEQ ID NO: 3276 - RNA, 20 nt, synthetic construct
  source 1..20: mol_type = other RNA
gggcccacagccactcgtgg

SEQ ID NO: 3277 - RNA, 20 nt, synthetic construct
  source 1..20: mol_type = other RNA
gggcccagggagaagagcag

SEQ ID NO: 3278 - RNA, 20 nt, synthetic construct
  source 1..20: mol_type = other RNA
gggcccccaggaagcattgc

SEQ ID NO: 3279 - RNA, 20 nt, synthetic construct
  source 1..20: mol_type = other RNA
gggccctggcagagctggcc

SEQ ID NO: 3280 - RNA, 20 nt, synthetic construct
  source 1..20: mol_type = other RNA
gggccctgtggctggctctg

SEQ ID NO: 3281 - RNA, 20 nt, synthetic construct
  source 1..20: mol_type = other RNA
gggccgcagacatcaaagta

SEQ ID NO: 3282 - RNA, 20 nt, synthetic construct
  source 1..20: mol_type = other RNA
gggccgcagagtccgagctg

SEQ ID NO: 3283 - RNA, 20 nt, synthetic construct
  source 1..20: mol_type = other RNA
gggccgcctggtccagagcc

SEQ ID NO: 3284 - RNA, 20 nt, synthetic construct
  source 1..20: mol_type = other RNA
gggccgggctgtgaggagga

SEQ ID NO: 3285 - RNA, 20 nt, synthetic construct
  source 1..20: mol_type = other RNA
gggccgtgcagccctcgaca

SEQ ID NO: 3286 - RNA, 20 nt, synthetic construct
  source 1..20: mol_type = other RNA
gggcctctgagagctggcac

SEQ ID NO: 3287 - RNA, 20 nt, synthetic construct
  source 1..20: mol_type = other RNA
gggcctcttcttccttgggg

SEQ ID NO: 3288 - RNA, 20 nt, synthetic construct
  source 1..20: mol_type = other RNA
gggcctgctccatggagaag

SEQ ID NO: 3289 - RNA, 20 nt, synthetic construct
  source 1..20: mol_type = other RNA
gggcctgggcttgtggccgg

SEQ ID NO: 3290 - RNA, 20 nt, synthetic construct
  source 1..20: mol_type = other RNA
gggcgatggccaaaggctta

SEQ ID NO: 3291 - RNA, 20 nt, synthetic construct
  source 1..20: mol_type = other RNA
gggcgcagtgcagcagctcc

SEQ ID NO: 3292 - RNA, 20 nt, synthetic construct
  source 1..20: mol_type = other RNA
gggcgcggcagctgctggag

SEQ ID NO: 3293 - RNA, 20 nt, synthetic construct
  source 1..20: mol_type = other RNA
gggcgggaggctggaagatc

SEQ ID NO: 3294 - RNA, 20 nt, synthetic construct
  source 1..20: mol_type = other RNA
gggcgtcggccttgctcagg

SEQ ID NO: 3295 - RNA, 20 nt, synthetic construct
  source 1..20: mol_type = other RNA
gggcgtgccacgctttctgg

SEQ ID NO: 3296 - RNA, 20 nt, synthetic construct
  source 1..20: mol_type = other RNA
gggcgtgtcagggtgggggt

SEQ ID NO: 3297 - RNA, 20 nt, synthetic construct
  source 1..20: mol_type = other RNA
gggctcggcaccatacgtgt

SEQ ID NO: 3298 - RNA, 20 nt, synthetic construct
  source 1..20: mol_type = other RNA
gggctctgtcttggtgctct

SEQ ID NO: 3299 - RNA, 20 nt, synthetic construct
  source 1..20: mol_type = other RNA
gggctgatcttccagcctcc

SEQ ID NO: 3300 - RNA, 20 nt, synthetic construct
  source 1..20: mol_type = other RNA
gggctgcacggcccagcagg

SEQ ID NO: 3301 - RNA, 20 nt, synthetic construct
  source 1..20: mol_type = other RNA
gggctgctggccggcctttt

SEQ ID NO: 3302 - RNA, 20 nt, synthetic construct
  source 1..20: mol_type = other RNA
gggctggggcagtgagccgg

SEQ ID NO: 3303 - RNA, 20 nt, synthetic construct
  source 1..20: mol_type = other RNA
gggctgtcgagggctgcacg

SEQ ID NO: 3304 - RNA, 20 nt, synthetic construct
  source 1..20: mol_type = other RNA
gggctgtgaggaggagggtg

SEQ ID NO: 3305 - RNA, 20 nt, synthetic construct
  source 1..20: mol_type = other RNA
gggctgtggctgtgactgag

SEQ ID NO: 3306 - RNA, 20 nt, synthetic construct
  source 1..20: mol_type = other RNA
gggcttggggaagagacatc

SEQ ID NO: 3307 - RNA, 20 nt, synthetic construct
  source 1..20: mol_type = other RNA
gggcttgtggccggcttccc

SEQ ID NO: 3308 - RNA, 20 nt, synthetic construct
  source 1..20: mol_type = other RNA
ggggaagagacatccttgtg

SEQ ID NO: 3309 - RNA, 20 nt, synthetic construct
  source 1..20: mol_type = other RNA
ggggaagccggccacaagcc

SEQ ID NO: 3310 - RNA, 20 nt, synthetic construct
  source 1..20: mol_type = other RNA
ggggaaggccagctcggact

SEQ ID NO: 3311 - RNA, 20 nt, synthetic construct
  source 1..20: mol_type = other RNA
ggggacagagaagacaaagt

SEQ ID NO: 3312 - RNA, 20 nt, synthetic construct
  source 1..20: mol_type = other RNA
ggggagcctcgtgggactca

SEQ ID NO: 3313 - RNA, 20 nt, synthetic construct
  source 1..20: mol_type = other RNA
ggggagctcctgtaccacgt

SEQ ID NO: 3314 - RNA, 20 nt, synthetic construct
  source 1..20: mol_type = other RNA
ggggaggacgccaagctgcc

SEQ ID NO: 3315 - RNA, 20 nt, synthetic construct
  source 1..20: mol_type = other RNA
ggggatgcctatggcctgca

SEQ ID NO: 3316 - RNA, 20 nt, synthetic construct
  source 1..20: mol_type = other RNA
ggggcaaatgccagtgctgc

SEQ ID NO: 3317 - RNA, 20 nt, synthetic construct
  source 1..20: mol_type = other RNA
ggggcagtgagccgggcctg

SEQ ID NO: 3318 - RNA, 20 nt, synthetic construct
  source 1..20: mol_type = other RNA
ggggccctggcagagctggc

SEQ ID NO: 3319 - RNA, 20 nt, synthetic construct
  source 1..20: mol_type = other RNA
ggggccctgtggctggctct

SEQ ID NO: 3320 - RNA, 20 nt, synthetic construct
  source 1..20: mol_type = other RNA
ggggccgcctggtccagagc

SEQ ID NO: 3321 - RNA, 20 nt, synthetic construct
  source 1..20: mol_type = other RNA
ggggccgggctgtgaggagg

SEQ ID NO: 3322 - RNA, 20 nt, synthetic construct
  source 1..20: mol_type = other RNA
ggggcgtgtcagggtggggg

SEQ ID NO: 3323 - RNA, 20 nt, synthetic construct
  source 1..20: mol_type = other RNA
ggggctgctggccggccttt

SEQ ID NO: 3324 - RNA, 20 nt, synthetic construct
  source 1..20: mol_type = other RNA
ggggctgtcgagggctgcac

SEQ ID NO: 3325 - RNA, 20 nt, synthetic construct
  source 1..20: mol_type = other RNA
ggggcttggggaagagacat

SEQ ID NO: 3326 - RNA, 20 nt, synthetic construct
  source 1..20: mol_type = other RNA
gggggatgcctatggcctgc

SEQ ID NO: 3327 - RNA, 20 nt, synthetic construct
  source 1..20: mol_type = other RNA
gggggccctgtggctggctc

SEQ ID NO: 3328 - RNA, 20 nt, synthetic construct
  source 1..20: mol_type = other RNA
gggggctgctggccggcctt

SEQ ID NO: 3329 - RNA, 20 nt, synthetic construct
  source 1..20: mol_type = other RNA
gggggctgtcgagggctgca

SEQ ID NO: 3330 - RNA, 20 nt, synthetic construct
  source 1..20: mol_type = other RNA
ggggggctgtcgagggctgc

SEQ ID NO: 3331 - RNA, 20 nt, synthetic construct
  source 1..20: mol_type = other RNA
ggggtcaatgctaggtactg

SEQ ID NO: 3332 - RNA, 20 nt, synthetic construct
  source 1..20: mol_type = other RNA
ggggtgaggggcttggggaa

SEQ ID NO: 3333 - RNA, 20 nt, synthetic construct
  source 1..20: mol_type = other RNA
ggggtggccagttcccgctc

SEQ ID NO: 3334 - RNA, 20 nt, synthetic construct
  source 1..20: mol_type = other RNA
gggtactttgatgtctgcgg

SEQ ID NO: 3335 - RNA, 20 nt, synthetic construct
  source 1..20: mol_type = other RNA
gggtcaatgctaggtactgc

SEQ ID NO: 3336 - RNA, 20 nt, synthetic construct
  source 1..20: mol_type = other RNA
gggtgacacagctgagtccc

SEQ ID NO: 3337 - RNA, 20 nt, synthetic construct
  source 1..20: mol_type = other RNA
gggtgaggggcttggggaag

SEQ ID NO: 3338 - RNA, 20 nt, synthetic construct
  source 1..20: mol_type = other RNA
gggtgcaacctcggagcagc

SEQ ID NO: 3339 - RNA, 20 nt, synthetic construct
  source 1..20: mol_type = other RNA
gggtgcccagaaaagagagg

SEQ ID NO: 3340 - RNA, 20 nt, synthetic construct
  source 1..20: mol_type = other RNA
gggtggccagttcccgctcc

SEQ ID NO: 3341 - RNA, 20 nt, synthetic construct
  source 1..20: mol_type = other RNA
gggtgttggactaagccttt

SEQ ID NO: 3342 - RNA, 20 nt, synthetic construct
  source 1..20: mol_type = other RNA
ggtacaggagctccccggcc

SEQ ID NO: 3343 - RNA, 20 nt, synthetic construct
  source 1..20: mol_type = other RNA
ggtacctcgcaagcaccttc

SEQ ID NO: 3344 - RNA, 20 nt, synthetic construct
  source 1..20: mol_type = other RNA
ggtacctgaagcggctgcag

SEQ ID NO: 3345 - RNA, 20 nt, synthetic construct
  source 1..20: mol_type = other RNA
ggtactgcgggagctccttg

SEQ ID NO: 3346 - RNA, 20 nt, synthetic construct
  source 1..20: mol_type = other RNA
ggtactttgatgtctgcggc

SEQ ID NO: 3347 - RNA, 20 nt, synthetic construct
  source 1..20: mol_type = other RNA
ggtagaactgctccaccggc

SEQ ID NO: 3348 - RNA, 20 nt, synthetic construct
  source 1..20: mol_type = other RNA
ggtcaatgctaggtactgcg

SEQ ID NO: 3349 - RNA, 20 nt, synthetic construct
  source 1..20: mol_type = other RNA
ggtcagggcaagagctattg

SEQ ID NO: 3350 - RNA, 20 nt, synthetic construct
  source 1..20: mol_type = other RNA
ggtcaggtctcttcaagatg

SEQ ID NO: 3351 - RNA, 20 nt, synthetic construct
  source 1..20: mol_type = other RNA
ggtccagagcctgagcaagg

SEQ ID NO: 3352 - RNA, 20 nt, synthetic construct
  source 1..20: mol_type = other RNA
ggtccagggagaagtcttgg

SEQ ID NO: 3353 - RNA, 20 nt, synthetic construct
  source 1..20: mol_type = other RNA
ggtcccggaggagcgtcagg

SEQ ID NO: 3354 - RNA, 20 nt, synthetic construct
  source 1..20: mol_type = other RNA
ggtccgcacgtgctgtgcag

SEQ ID NO: 3355 - RNA, 20 nt, synthetic construct
  source 1..20: mol_type = other RNA
ggtcctcacgtctgcggatg

SEQ ID NO: 3356 - RNA, 20 nt, synthetic construct
  source 1..20: mol_type = other RNA
ggtcctcctgtagggtactt

SEQ ID NO: 3357 - RNA, 20 nt, synthetic construct
  source 1..20: mol_type = other RNA
ggtctcttcaagatgtggct

SEQ ID NO: 3358 - RNA, 20 nt, synthetic construct
  source 1..20: mol_type = other RNA
ggtgacacagctgagtccca

SEQ ID NO: 3359 - RNA, 20 nt, synthetic construct
  source 1..20: mol_type = other RNA
ggtgaggggcttggggaaga

SEQ ID NO: 3360 - RNA, 20 nt, synthetic construct
  source 1..20: mol_type = other RNA
ggtgcaacctcggagcagct

SEQ ID NO: 3361 - RNA, 20 nt, synthetic construct
  source 1..20: mol_type = other RNA
ggtgcaggccaggctggaga

SEQ ID NO: 3362 - RNA, 20 nt, synthetic construct
  source 1..20: mol_type = other RNA
ggtgcccagaaaagagaggc

SEQ ID NO: 3363 - RNA, 20 nt, synthetic construct
  source 1..20: mol_type = other RNA
ggtgccggtccgcacgtgct

SEQ ID NO: 3364 - RNA, 20 nt, synthetic construct
  source 1..20: mol_type = other RNA
ggtgctccttggcagccaac

SEQ ID NO: 3365 - RNA, 20 nt, synthetic construct
  source 1..20: mol_type = other RNA
ggtgctctgtcatccctgag

SEQ ID NO: 3366 - RNA, 20 nt, synthetic construct
  source 1..20: mol_type = other RNA
ggtgctgttggctgccaagg

SEQ ID NO: 3367 - RNA, 20 nt, synthetic construct
  source 1..20: mol_type = other RNA
ggtgcttgcgaggtacctga

SEQ ID NO: 3368 - RNA, 20 nt, synthetic construct
  source 1..20: mol_type = other RNA
ggtggacaggaagcagaagg

SEQ ID NO: 3369 - RNA, 20 nt, synthetic construct
  source 1..20: mol_type = other RNA
ggtggagcagttctaccgct

SEQ ID NO: 3370 - RNA, 20 nt, synthetic construct
  source 1..20: mol_type = other RNA
ggtggatctggtgcaggcca

SEQ ID NO: 3371 - RNA, 20 nt, synthetic construct
  source 1..20: mol_type = other RNA
ggtggccagttcccgctcca

SEQ ID NO: 3372 - RNA, 20 nt, synthetic construct
  source 1..20: mol_type = other RNA
ggtggggtgaggggcttggg

SEQ ID NO: 3373 - RNA, 20 nt, synthetic construct
  source 1..20: mol_type = other RNA
ggtgggtgttggactaagcc

SEQ ID NO: 3374 - RNA, 20 nt, synthetic construct
  source 1..20: mol_type = other RNA
ggtgttggactaagcctttg

SEQ ID NO: 3375 - RNA, 20 nt, synthetic construct
  source 1..20: mol_type = other RNA
ggttcaagcaatggcagggg

SEQ ID NO: 3376 - RNA, 20 nt, synthetic construct
  source 1..20: mol_type = other RNA
ggttgcaccctcctcctcac

SEQ ID NO: 3377 - RNA, 20 nt, synthetic construct
  source 1..20: mol_type = other RNA
ggttttcagccacatcttga

SEQ ID NO: 3378 - RNA, 20 nt, synthetic construct
  source 1..20: mol_type = other RNA
gtacaggagctccccggccg

SEQ ID NO: 3379 - RNA, 20 nt, synthetic construct
  source 1..20: mol_type = other RNA
gtacatgtgcatcaggaggc

SEQ ID NO: 3380 - RNA, 20 nt, synthetic construct
  source 1..20: mol_type = other RNA
gtaccacgtgctgccaaatt

SEQ ID NO: 3381 - RNA, 20 nt, synthetic construct
  source 1..20: mol_type = other RNA
gtaccctacaggaggaccag

SEQ ID NO: 3382 - RNA, 20 nt, synthetic construct
  source 1..20: mol_type = other RNA
gtacctagcattgaccccaa

SEQ ID NO: 3383 - RNA, 20 nt, synthetic construct
  source 1..20: mol_type = other RNA
gtacctcgcaagcaccttct

SEQ ID NO: 3384 - RNA, 20 nt, synthetic construct
  source 1..20: mol_type = other RNA
gtacctgaagcggctgcagc

SEQ ID NO: 3385 - RNA, 20 nt, synthetic construct
  source 1..20: mol_type = other RNA
gtacgactttgtcttctctg

SEQ ID NO: 3386 - RNA, 20 nt, synthetic construct
  source 1..20: mol_type = other RNA
gtactgcgggagctccttgt

SEQ ID NO: 3387 - RNA, 20 nt, synthetic construct
  source 1..20: mol_type = other RNA
gtactgggcaaggccttgga

SEQ ID NO: 3388 - RNA, 20 nt, synthetic construct
  source 1..20: mol_type = other RNA
gtactggggaagccggccac

SEQ ID NO: 3389 - RNA, 20 nt, synthetic construct
  source 1..20: mol_type = other RNA
gtactttgatgtctgcggcc

SEQ ID NO: 3390 - RNA, 20 nt, synthetic construct
  source 1..20: mol_type = other RNA
gtagaactgctccaccggct

SEQ ID NO: 3391 - RNA, 20 nt, synthetic construct
  source 1..20: mol_type = other RNA
gtagcgcatcacgtatgcct

SEQ ID NO: 3392 - RNA, 20 nt, synthetic construct
  source 1..20: mol_type = other RNA
gtagggctcccaggcagcgg

SEQ ID NO: 3393 - RNA, 20 nt, synthetic construct
  source 1..20: mol_type = other RNA
gtagggctgtggctgtgact

SEQ ID NO: 3394 - RNA, 20 nt, synthetic construct
  source 1..20: mol_type = other RNA
gtagggtactttgatgtctg

SEQ ID NO: 3395 - RNA, 20 nt, synthetic construct
  source 1..20: mol_type = other RNA
gtatgcctgggcctgctcca

SEQ ID NO: 3396 - RNA, 20 nt, synthetic construct
  source 1..20: mol_type = other RNA
gtatggtgccgagcccgcag

SEQ ID NO: 3397 - RNA, 20 nt, synthetic construct
  source 1..20: mol_type = other RNA
gtcaatgctaggtactgcgg

SEQ ID NO: 3398 - RNA, 20 nt, synthetic construct
  source 1..20: mol_type = other RNA
gtcacagccacagccctact

SEQ ID NO: 3399 - RNA, 20 nt, synthetic construct
  source 1..20: mol_type = other RNA
gtcacccgtttcaggtgggg

SEQ ID NO: 3400 - RNA, 20 nt, synthetic construct
  source 1..20: mol_type = other RNA
gtcagggcaagagctattgg

SEQ ID NO: 3401 - RNA, 20 nt, synthetic construct
  source 1..20: mol_type = other RNA
gtcagggctctgtcttggtg

SEQ ID NO: 3402 - RNA, 20 nt, synthetic construct
  source 1..20: mol_type = other RNA
gtcaggtctcttcaagatgt

SEQ ID NO: 3403 - RNA, 20 nt, synthetic construct
  source 1..20: mol_type = other RNA
gtcatagggcctcttcttcc

SEQ ID NO: 3404 - RNA, 20 nt, synthetic construct
  source 1..20: mol_type = other RNA
gtcatccctgagctctcaaa

SEQ ID NO: 3405 - RNA, 20 nt, synthetic construct
  source 1..20: mol_type = other RNA
gtccaacacccaccgcgggc

SEQ ID NO: 3406 - RNA, 20 nt, synthetic construct
  source 1..20: mol_type = other RNA
gtccaccgaggcagccgccg

SEQ ID NO: 3407 - RNA, 20 nt, synthetic construct
  source 1..20: mol_type = other RNA
gtccagagcctgagcaaggc

SEQ ID NO: 3408 - RNA, 20 nt, synthetic construct
  source 1..20: mol_type = other RNA
gtccagggagaagtcttggc

SEQ ID NO: 3409 - RNA, 20 nt, synthetic construct
  source 1..20: mol_type = other RNA
gtcccacgaggctccccaat

SEQ ID NO: 3410 - RNA, 20 nt, synthetic construct
  source 1..20: mol_type = other RNA
gtccccggctgcagccgctt

SEQ ID NO: 3411 - RNA, 20 nt, synthetic construct
  source 1..20: mol_type = other RNA
gtcccctgccattgcttgaa

SEQ ID NO: 3412 - RNA, 20 nt, synthetic construct
  source 1..20: mol_type = other RNA
gtcccggaggagcgtcaggg

SEQ ID NO: 3413 - RNA, 20 nt, synthetic construct
  source 1..20: mol_type = other RNA
gtcccgtgagcgtggagggc

SEQ ID NO: 3414 - RNA, 20 nt, synthetic construct
  source 1..20: mol_type = other RNA
gtccgagctggccttcccca

SEQ ID NO: 3415 - RNA, 20 nt, synthetic construct
  source 1..20: mol_type = other RNA
gtccgcacgtgctgtgcagg

SEQ ID NO: 3416 - RNA, 20 nt, synthetic construct
  source 1..20: mol_type = other RNA
gtccggcttctccatggagc

SEQ ID NO: 3417 - RNA, 20 nt, synthetic construct
  source 1..20: mol_type = other RNA
gtccgggggatgcctatggc

SEQ ID NO: 3418 - RNA, 20 nt, synthetic construct
  source 1..20: mol_type = other RNA
gtccggggtggccagttccc

SEQ ID NO: 3419 - RNA, 20 nt, synthetic construct
  source 1..20: mol_type = other RNA
gtcctcacgtctgcggatgg

SEQ ID NO: 3420 - RNA, 20 nt, synthetic construct
  source 1..20: mol_type = other RNA
gtcctccccaagctccagca

SEQ ID NO: 3421 - RNA, 20 nt, synthetic construct
  source 1..20: mol_type = other RNA
gtcctcctgtagggtacttt

SEQ ID NO: 3422 - RNA, 20 nt, synthetic construct
  source 1..20: mol_type = other RNA
gtcctgcagtgagcggtaga

SEQ ID NO: 3423 - RNA, 20 nt, synthetic construct
  source 1..20: mol_type = other RNA
gtccttgatttcgccactca

SEQ ID NO: 3424 - RNA, 20 nt, synthetic construct
  source 1..20: mol_type = other RNA
gtcgagggctgcacggccca

SEQ ID NO: 3425 - RNA, 20 nt, synthetic construct
  source 1..20: mol_type = other RNA
gtcggcctgctgggccgtgc

SEQ ID NO: 3426 - RNA, 20 nt, synthetic construct
  source 1..20: mol_type = other RNA
gtcggccttgctcaggctct

SEQ ID NO: 3427 - RNA, 20 nt, synthetic construct
  source 1..20: mol_type = other RNA
gtcgtactggggaagccggc

SEQ ID NO: 3428 - RNA, 20 nt, synthetic construct
  source 1..20: mol_type = other RNA
gtctaggatgagcagaacgc

SEQ ID NO: 3429 - RNA, 20 nt, synthetic construct
  source 1..20: mol_type = other RNA
gtctcacgcggccgccggtg

SEQ ID NO: 3430 - RNA, 20 nt, synthetic construct
  source 1..20: mol_type = other RNA
gtctcttcaagatgtggctg

SEQ ID NO: 3431 - RNA, 20 nt, synthetic construct
  source 1..20: mol_type = other RNA
gtctcttccccaagcccctc

SEQ ID NO: 3432 - RNA, 20 nt, synthetic construct
  source 1..20: mol_type = other RNA
gtctgcggatgggaactggt

SEQ ID NO: 3433 - RNA, 20 nt, synthetic construct
  source 1..20: mol_type = other RNA
gtctgcggcccagctcccag

SEQ ID NO: 3434 - RNA, 20 nt, synthetic construct
  source 1..20: mol_type = other RNA
gtcttctctgtcccctgcca

SEQ ID NO: 3435 - RNA, 20 nt, synthetic construct
  source 1..20: mol_type = other RNA
gtcttggcccgccgcctcca

SEQ ID NO: 3436 - RNA, 20 nt, synthetic construct
  source 1..20: mol_type = other RNA
gtcttggtgctctgtcatcc

SEQ ID NO: 3437 - RNA, 20 nt, synthetic construct
  source 1..20: mol_type = other RNA
gtgacacagctgagtcccac

SEQ ID NO: 3438 - RNA, 20 nt, synthetic construct
  source 1..20: mol_type = other RNA
gtgactgagaagaagtggcc

SEQ ID NO: 3439 - RNA, 20 nt, synthetic construct
  source 1..20: mol_type = other RNA
gtgagacacgagtgattgct

SEQ ID NO: 3440 - RNA, 20 nt, synthetic construct
  source 1..20: mol_type = other RNA
gtgagccgggcctgggcttg

SEQ ID NO: 3441 - RNA, 20 nt, synthetic construct
  source 1..20: mol_type = other RNA
gtgagcggtagaactgctcc

SEQ ID NO: 3442 - RNA, 20 nt, synthetic construct
  source 1..20: mol_type = other RNA
gtgagcgtggagggcagctt

SEQ ID NO: 3443 - RNA, 20 nt, synthetic construct
  source 1..20: mol_type = other RNA
gtgaggacctgggcgatggc

SEQ ID NO: 3444 - RNA, 20 nt, synthetic construct
  source 1..20: mol_type = other RNA
gtgaggaggagggtgcaacc

SEQ ID NO: 3445 - RNA, 20 nt, synthetic construct
  source 1..20: mol_type = other RNA
gtgaggcgggtgcccagaaa

SEQ ID NO: 3446 - RNA, 20 nt, synthetic construct
  source 1..20: mol_type = other RNA
gtgaggggcttggggaagag

SEQ ID NO: 3447 - RNA, 20 nt, synthetic construct
  source 1..20: mol_type = other RNA
gtgatgcgctactttgagag

SEQ ID NO: 3448 - RNA, 20 nt, synthetic construct
  source 1..20: mol_type = other RNA
gtgattgctgtgctgggcaa

SEQ ID NO: 3449 - RNA, 20 nt, synthetic construct
  source 1..20: mol_type = other RNA
gtgcaacctcggagcagctt

SEQ ID NO: 3450 - RNA, 20 nt, synthetic construct
  source 1..20: mol_type = other RNA
gtgcagcagctccagcagct

SEQ ID NO: 3451 - RNA, 20 nt, synthetic construct
  source 1..20: mol_type = other RNA
gtgcagccctcgacagcccc

SEQ ID NO: 3452 - RNA, 20 nt, synthetic construct
  source 1..20: mol_type = other RNA
gtgcaggaagccatcttgcg

SEQ ID NO: 3453 - RNA, 20 nt, synthetic construct
  source 1..20: mol_type = other RNA
gtgcaggccaggctggagag

SEQ ID NO: 3454 - RNA, 20 nt, synthetic construct
  source 1..20: mol_type = other RNA
gtgcatcaggaggcgtgagg

SEQ ID NO: 3455 - RNA, 20 nt, synthetic construct
  source 1..20: mol_type = other RNA
gtgccacgctttctggctgg

SEQ ID NO: 3456 - RNA, 20 nt, synthetic construct
  source 1..20: mol_type = other RNA
gtgccagctctcagaggccc

SEQ ID NO: 3457 - RNA, 20 nt, synthetic construct
  source 1..20: mol_type = other RNA
gtgcccagaaaagagaggcg

SEQ ID NO: 3458 - RNA, 20 nt, synthetic construct
  source 1..20: mol_type = other RNA
gtgccgggcagtgtgccagc

SEQ ID NO: 3459 - RNA, 20 nt, synthetic construct
  source 1..20: mol_type = other RNA
gtgccggtccgcacgtgctg

SEQ ID NO: 3460 - RNA, 20 nt, synthetic construct
  source 1..20: mol_type = other RNA
gtgctccttggcagccaaca

SEQ ID NO: 3461 - RNA, 20 nt, synthetic construct
  source 1..20: mol_type = other RNA
gtgctctgtcatccctgagc

SEQ ID NO: 3462 - RNA, 20 nt, synthetic construct
  source 1..20: mol_type = other RNA
gtgctgccaaattccagcct

SEQ ID NO: 3463 - RNA, 20 nt, synthetic construct
  source 1..20: mol_type = other RNA
gtgctgcggaggtccaggga

SEQ ID NO: 3464 - RNA, 20 nt, synthetic construct
  source 1..20: mol_type = other RNA
gtgctgggcaaagctggtca

SEQ ID NO: 3465 - RNA, 20 nt, synthetic construct
  source 1..20: mol_type = other RNA
gtgctgtgcaggaagccatc

SEQ ID NO: 3466 - RNA, 20 nt, synthetic construct
  source 1..20: mol_type = other RNA
gtgctgttggctgccaagga

SEQ ID NO: 3467 - RNA, 20 nt, synthetic construct
  source 1..20: mol_type = other RNA
gtgcttgcgaggtacctgaa

SEQ ID NO: 3468 - RNA, 20 nt, synthetic construct
  source 1..20: mol_type = other RNA
gtggacaggaagcagaaggt

SEQ ID NO: 3469 - RNA, 20 nt, synthetic construct
  source 1..20: mol_type = other RNA
gtggagcagttctaccgctc

SEQ ID NO: 3470 - RNA, 20 nt, synthetic construct
  source 1..20: mol_type = other RNA
gtggagggcagcttggcgtc

SEQ ID NO: 3471 - RNA, 20 nt, synthetic construct
  source 1..20: mol_type = other RNA
gtggaggtggatctggtgca

SEQ ID NO: 3472 - RNA, 20 nt, synthetic construct
  source 1..20: mol_type = other RNA
gtggatctggtgcaggccag

SEQ ID NO: 3473 - RNA, 20 nt, synthetic construct
  source 1..20: mol_type = other RNA
gtggcacgccctccagccag

SEQ ID NO: 3474 - RNA, 20 nt, synthetic construct
  source 1..20: mol_type = other RNA
gtggccagttcccgctccag

SEQ ID NO: 3475 - RNA, 20 nt, synthetic construct
  source 1..20: mol_type = other RNA
gtggccggcttccccagtac

SEQ ID NO: 3476 - RNA, 20 nt, synthetic construct
  source 1..20: mol_type = other RNA
gtggccggtcccggaggagc

SEQ ID NO: 3477 - RNA, 20 nt, synthetic construct
  source 1..20: mol_type = other RNA
gtggcgaaatcaaggacaag

SEQ ID NO: 3478 - RNA, 20 nt, synthetic construct
  source 1..20: mol_type = other RNA
gtggcggccgatgaggtttt

SEQ ID NO: 3479 - RNA, 20 nt, synthetic construct
  source 1..20: mol_type = other RNA
gtggctgaaaacctcatcgg

SEQ ID NO: 3480 - RNA, 20 nt, synthetic construct
  source 1..20: mol_type = other RNA
gtggctggctctgagtggcg

SEQ ID NO: 3481 - RNA, 20 nt, synthetic construct
  source 1..20: mol_type = other RNA
gtggctgtgactgagaagaa

SEQ ID NO: 3482 - RNA, 20 nt, synthetic construct
  source 1..20: mol_type = other RNA
gtggctgtgggcccagggag

SEQ ID NO: 3483 - RNA, 20 nt, synthetic construct
  source 1..20: mol_type = other RNA
gtgggactcagctgtgtcac

SEQ ID NO: 3484 - RNA, 20 nt, synthetic construct
  source 1..20: mol_type = other RNA
gtgggcccagggagaagagc

SEQ ID NO: 3485 - RNA, 20 nt, synthetic construct
  source 1..20: mol_type = other RNA
gtgggcgcagtgcagcagct

SEQ ID NO: 3486 - RNA, 20 nt, synthetic construct
  source 1..20: mol_type = other RNA
gtggggtgaggggcttgggg

SEQ ID NO: 3487 - RNA, 20 nt, synthetic construct
  source 1..20: mol_type = other RNA
gtgggtgttggactaagcct

SEQ ID NO: 3488 - RNA, 20 nt, synthetic construct
  source 1..20: mol_type = other RNA
gtggtacaggagctccccgg

SEQ ID NO: 3489 - RNA, 20 nt, synthetic construct
  source 1..20: mol_type = other RNA
gtgtcacccgtttcaggtgg

SEQ ID NO: 3490 - RNA, 20 nt, synthetic construct
  source 1..20: mol_type = other RNA
gtgtcagggtgggggtatgt

SEQ ID NO: 3491 - RNA, 20 nt, synthetic construct
  source 1..20: mol_type = other RNA
gtgtccccggctgcagccgc

SEQ ID NO: 3492 - RNA, 20 nt, synthetic construct
  source 1..20: mol_type = other RNA
gtgtcctgcagtgagcggta

SEQ ID NO: 3493 - RNA, 20 nt, synthetic construct
  source 1..20: mol_type = other RNA
gtgtctcacgcggccgccgg

SEQ ID NO: 3494 - RNA, 20 nt, synthetic construct
  source 1..20: mol_type = other RNA
gtgtgccagctctcagaggc

SEQ ID NO: 3495 - RNA, 20 nt, synthetic construct
  source 1..20: mol_type = other RNA
gtgttggactaagcctttgg

SEQ ID NO: 3496 - RNA, 20 nt, synthetic construct
  source 1..20: mol_type = other RNA
gttcaagcaatggcagggga

SEQ ID NO: 3497 - RNA, 20 nt, synthetic construct
  source 1..20: mol_type = other RNA
gttcccatccgcagacgtga

SEQ ID NO: 3498 - RNA, 20 nt, synthetic construct
  source 1..20: mol_type = other RNA
gttcccgctccaggctcttg

SEQ ID NO: 3499 - RNA, 20 nt, synthetic construct
  source 1..20: mol_type = other RNA
gttctaccgctcactgcagg

SEQ ID NO: 3500 - RNA, 20 nt, synthetic construct
  source 1..20: mol_type = other RNA
gttctgcccagtccggggtg

SEQ ID NO: 3501 - RNA, 20 nt, synthetic construct
  source 1..20: mol_type = other RNA
gttctgctcatcctagacgg

SEQ ID NO: 3502 - RNA, 20 nt, synthetic construct
  source 1..20: mol_type = other RNA
gttgcaccctcctcctcaca

SEQ ID NO: 3503 - RNA, 20 nt, synthetic construct
  source 1..20: mol_type = other RNA
gttggactaagcctttggcc

SEQ ID NO: 3504 - RNA, 20 nt, synthetic construct
  source 1..20: mol_type = other RNA
gttggctgccaaggagcacc

SEQ ID NO: 3505 - RNA, 20 nt, synthetic construct
  source 1..20: mol_type = other RNA
gttgtcatagggcctcttct

SEQ ID NO: 3506 - RNA, 20 nt, synthetic construct
  source 1..20: mol_type = other RNA
gtttcaggtggggtgagggg

SEQ ID NO: 3507 - RNA, 20 nt, synthetic construct
  source 1..20: mol_type = other RNA
gttttcagccacatcttgaa

SEQ ID NO: 3508 - RNA, 20 nt, synthetic construct
  source 1..20: mol_type = other RNA
taagcctttggccatcgccc

SEQ ID NO: 3509 - RNA, 20 nt, synthetic construct
  source 1..20: mol_type = other RNA
tacaggagctccccggccgc

SEQ ID NO: 3510 - RNA, 20 nt, synthetic construct
  source 1..20: mol_type = other RNA
tacaggaggaccagttccca

SEQ ID NO: 3511 - RNA, 20 nt, synthetic construct
  source 1..20: mol_type = other RNA
tacatgtgcatcaggaggcg

SEQ ID NO: 3512 - RNA, 20 nt, synthetic construct
  source 1..20: mol_type = other RNA
taccacgtgctgccaaattc

SEQ ID NO: 3513 - RNA, 20 nt, synthetic construct
  source 1..20: mol_type = other RNA
tacccccaccctgacacgcc

SEQ ID NO: 3514 - RNA, 20 nt, synthetic construct
  source 1..20: mol_type = other RNA
taccctacaggaggaccagt

SEQ ID NO: 3515 - RNA, 20 nt, synthetic construct
  source 1..20: mol_type = other RNA
taccgctcactgcaggacac

SEQ ID NO: 3516 - RNA, 20 nt, synthetic construct
  source 1..20: mol_type = other RNA
tacctagcattgaccccaag

SEQ ID NO: 3517 - RNA, 20 nt, synthetic construct
  source 1..20: mol_type = other RNA
tacctcgcaagcaccttctg

SEQ ID NO: 3518 - RNA, 20 nt, synthetic construct
  source 1..20: mol_type = other RNA
tacctgaagcggctgcagcc

SEQ ID NO: 3519 - RNA, 20 nt, synthetic construct
  source 1..20: mol_type = other RNA
tacgactttgtcttctctgt

SEQ ID NO: 3520 - RNA, 20 nt, synthetic construct
  source 1..20: mol_type = other RNA
tacgtgatgcgctactttga

SEQ ID NO: 3521 - RNA, 20 nt, synthetic construct
  source 1..20: mol_type = other RNA
tacgtgtcctgcagtgagcg

SEQ ID NO: 3522 - RNA, 20 nt, synthetic construct
  source 1..20: mol_type = other RNA
tactcgggccatcggcggct

SEQ ID NO: 3523 - RNA, 20 nt, synthetic construct
  source 1..20: mol_type = other RNA
tactgcgggagctccttgtc

SEQ ID NO: 3524 - RNA, 20 nt, synthetic construct
  source 1..20: mol_type = other RNA
tactgggcaaggccttggag

SEQ ID NO: 3525 - RNA, 20 nt, synthetic construct
  source 1..20: mol_type = other RNA
tactggggaagccggccaca

SEQ ID NO: 3526 - RNA, 20 nt, synthetic construct
  source 1..20: mol_type = other RNA
tactttgagagctcagggat

SEQ ID NO: 3527 - RNA, 20 nt, synthetic construct
  source 1..20: mol_type = other RNA
tactttgatgtctgcggccc

SEQ ID NO: 3528 - RNA, 20 nt, synthetic construct
  source 1..20: mol_type = other RNA
tactttgtgccgggcagtgt

SEQ ID NO: 3529 - RNA, 20 nt, synthetic construct
  source 1..20: mol_type = other RNA
tagaactgctccaccggctc

SEQ ID NO: 3530 - RNA, 20 nt, synthetic construct
  source 1..20: mol_type = other RNA
tagacggcttcgaggagctg

SEQ ID NO: 3531 - RNA, 20 nt, synthetic construct
  source 1..20: mol_type = other RNA
tagagtcccgtgagcgtgga

SEQ ID NO: 3532 - RNA, 20 nt, synthetic construct
  source 1..20: mol_type = other RNA
tagcattgaccccaaggaag

SEQ ID NO: 3533 - RNA, 20 nt, synthetic construct
  source 1..20: mol_type = other RNA
tagcgcatcacgtatgcctg

SEQ ID NO: 3534 - RNA, 20 nt, synthetic construct
  source 1..20: mol_type = other RNA
tagctcttgccctgaccagc

SEQ ID NO: 3535 - RNA, 20 nt, synthetic construct
  source 1..20: mol_type = other RNA
taggatgagcagaacgcggt

SEQ ID NO: 3536 - RNA, 20 nt, synthetic construct
  source 1..20: mol_type = other RNA
taggatgccatccgggcctg

SEQ ID NO: 3537 - RNA, 20 nt, synthetic construct
  source 1..20: mol_type = other RNA
taggcatcccccggacggtt

SEQ ID NO: 3538 - RNA, 20 nt, synthetic construct
  source 1..20: mol_type = other RNA
tagggcctcttcttccttgg

SEQ ID NO: 3539 - RNA, 20 nt, synthetic construct
  source 1..20: mol_type = other RNA
tagggcgtcggccttgctca

SEQ ID NO: 3540 - RNA, 20 nt, synthetic construct
  source 1..20: mol_type = other RNA
tagggctcccaggcagcggg

SEQ ID NO: 3541 - RNA, 20 nt, synthetic construct
  source 1..20: mol_type = other RNA
tagggctgtggctgtgactg

SEQ ID NO: 3542 - RNA, 20 nt, synthetic construct
  source 1..20: mol_type = other RNA
tagggtactttgatgtctgc

SEQ ID NO: 3543 - RNA, 20 nt, synthetic construct
  source 1..20: mol_type = other RNA
taggtactgcgggagctcct

SEQ ID NO: 3544 - RNA, 20 nt, synthetic construct
  source 1..20: mol_type = other RNA
tagtccaacacccaccgcgg

SEQ ID NO: 3545 - RNA, 20 nt, synthetic construct
  source 1..20: mol_type = other RNA
tagtggaggtggatctggtg

SEQ ID NO: 3546 - RNA, 20 nt, synthetic construct
  source 1..20: mol_type = other RNA
tatgacaactggctggaggg

SEQ ID NO: 3547 - RNA, 20 nt, synthetic construct
  source 1..20: mol_type = other RNA
tatgcctgggcctgctccat

SEQ ID NO: 3548 - RNA, 20 nt, synthetic construct
  source 1..20: mol_type = other RNA
tatggcctgcaggatctgct

SEQ ID NO: 3549 - RNA, 20 nt, synthetic construct
  source 1..20: mol_type = other RNA
tatggtgccgagcccgcagg

SEQ ID NO: 3550 - RNA, 20 nt, synthetic construct
  source 1..20: mol_type = other RNA
tatgtcggcctgctgggccg

SEQ ID NO: 3551 - RNA, 20 nt, synthetic construct
  source 1..20: mol_type = other RNA
tattgggctggggcagtgag

SEQ ID NO: 3552 - RNA, 20 nt, synthetic construct
  source 1..20: mol_type = other RNA
tatttgagctgtccggcttc

SEQ ID NO: 3553 - RNA, 20 nt, synthetic construct
  source 1..20: mol_type = other RNA
tcaaagtaccctacaggagg

SEQ ID NO: 3554 - RNA, 20 nt, synthetic construct
  source 1..20: mol_type = other RNA
tcaaagtagcgcatcacgta

SEQ ID NO: 3555 - RNA, 20 nt, synthetic construct
  source 1..20: mol_type = other RNA
tcaaatagggcgtcggcctt

SEQ ID NO: 3556 - RNA, 20 nt, synthetic construct
  source 1..20: mol_type = other RNA
tcaagatgtggctgaaaacc

SEQ ID NO: 3557 - RNA, 20 nt, synthetic construct
  source 1..20: mol_type = other RNA
tcaagcaatggcaggggaca

SEQ ID NO: 3558 - RNA, 20 nt, synthetic construct
  source 1..20: mol_type = other RNA
tcaaggacaaggagctcccg

SEQ ID NO: 3559 - RNA, 20 nt, synthetic construct
  source 1..20: mol_type = other RNA
tcaatgctaggtactgcggg

SEQ ID NO: 3560 - RNA, 20 nt, synthetic construct
  source 1..20: mol_type = other RNA
tcacagccacagccctactt

SEQ ID NO: 3561 - RNA, 20 nt, synthetic construct
  source 1..20: mol_type = other RNA
tcacatacccccaccctgac

SEQ ID NO: 3562 - RNA, 20 nt, synthetic construct
  source 1..20: mol_type = other RNA
tcaccccacctgaaacgggt

SEQ ID NO: 3563 - RNA, 20 nt, synthetic construct
  source 1..20: mol_type = other RNA
tcacccgtttcaggtggggt

SEQ ID NO: 3564 - RNA, 20 nt, synthetic construct
  source 1..20: mol_type = other RNA
tcacgcctcctgatgcacat

SEQ ID NO: 3565 - RNA, 20 nt, synthetic construct
  source 1..20: mol_type = other RNA
tcacgcggccgccggtgctc

SEQ ID NO: 3566 - RNA, 20 nt, synthetic construct
  source 1..20: mol_type = other RNA
tcacgggactctatgtcggc

SEQ ID NO: 3567 - RNA, 20 nt, synthetic construct
  source 1..20: mol_type = other RNA
tcacgtatgcctgggcctgc

SEQ ID NO: 3568 - RNA, 20 nt, synthetic construct
  source 1..20: mol_type = other RNA
tcacgtctgcggatgggaac

SEQ ID NO: 3569 - RNA, 20 nt, synthetic construct
  source 1..20: mol_type = other RNA
tcactcgtgtctcacgcggc

SEQ ID NO: 3570 - RNA, 20 nt, synthetic construct
  source 1..20: mol_type = other RNA
tcactgcaggacacgtatgg

SEQ ID NO: 3571 - RNA, 20 nt, synthetic construct
  source 1..20: mol_type = other RNA
tcactgccccagcccaatag

SEQ ID NO: 3572 - RNA, 20 nt, synthetic construct
  source 1..20: mol_type = other RNA
tcagagccagccacagggcc

SEQ ID NO: 3573 - RNA, 20 nt, synthetic construct
  source 1..20: mol_type = other RNA
tcagaggccctgctggagct

SEQ ID NO: 3574 - RNA, 20 nt, synthetic construct
  source 1..20: mol_type = other RNA
tcagccacatcttgaagaga

SEQ ID NO: 3575 - RNA, 20 nt, synthetic construct
  source 1..20: mol_type = other RNA
tcagccaggcctccttgggc

SEQ ID NO: 3576 - RNA, 20 nt, synthetic construct
  source 1..20: mol_type = other RNA
tcagcccagccagaaagcgt

SEQ ID NO: 3577 - RNA, 20 nt, synthetic construct
  source 1..20: mol_type = other RNA
tcagctgtgtcacccgtttc

SEQ ID NO: 3578 - RNA, 20 nt, synthetic construct
  source 1..20: mol_type = other RNA
tcaggaggcgtgaggcgggt

SEQ ID NO: 3579 - RNA, 20 nt, synthetic construct
  source 1..20: mol_type = other RNA
tcaggctctggaccaggcgg

SEQ ID NO: 3580 - RNA, 20 nt, synthetic construct
  source 1..20: mol_type = other RNA
tcagggatgacagagcacca

SEQ ID NO: 3581 - RNA, 20 nt, synthetic construct
  source 1..20: mol_type = other RNA
tcagggcaagagctattggg

SEQ ID NO: 3582 - RNA, 20 nt, synthetic construct
  source 1..20: mol_type = other RNA
tcagggctctgtcttggtgc

SEQ ID NO: 3583 - RNA, 20 nt, synthetic construct
  source 1..20: mol_type = other RNA
tcaggtacctcgcaagcacc

SEQ ID NO: 3584 - RNA, 20 nt, synthetic construct
  source 1..20: mol_type = other RNA
tcaggtctcttcaagatgtg

SEQ ID NO: 3585 - RNA, 20 nt, synthetic construct
  source 1..20: mol_type = other RNA
tcaggtggggtgaggggctt

SEQ ID NO: 3586 - RNA, 20 nt, synthetic construct
  source 1..20: mol_type = other RNA
tcagtcacagccacagccct

SEQ ID NO: 3587 - RNA, 20 nt, synthetic construct
  source 1..20: mol_type = other RNA
tcatagggcctcttcttcct

SEQ ID NO: 3588 - RNA, 20 nt, synthetic construct
  source 1..20: mol_type = other RNA
tcatccctgagctctcaaag

SEQ ID NO: 3589 - RNA, 20 nt, synthetic construct
  source 1..20: mol_type = other RNA
tcatcctagacggcttcgag

SEQ ID NO: 3590 - RNA, 20 nt, synthetic construct
  source 1..20: mol_type = other RNA
tcatcggccgccacgagtgg

SEQ ID NO: 3591 - RNA, 20 nt, synthetic construct
  source 1..20: mol_type = other RNA
tccaacacccaccgcgggcc

SEQ ID NO: 3592 - RNA, 20 nt, synthetic construct
  source 1..20: mol_type = other RNA
tccaaggccttgcccagtac

SEQ ID NO: 3593 - RNA, 20 nt, synthetic construct
  source 1..20: mol_type = other RNA
tccaccgaggcagccgccga

SEQ ID NO: 3594 - RNA, 20 nt, synthetic construct
  source 1..20: mol_type = other RNA
tccaccggctctgcaaaggc

SEQ ID NO: 3595 - RNA, 20 nt, synthetic construct
  source 1..20: mol_type = other RNA
tccacctccactaggatgcc

SEQ ID NO: 3596 - RNA, 20 nt, synthetic construct
  source 1..20: mol_type = other RNA
tccacgctcacgggactcta

SEQ ID NO: 3597 - RNA, 20 nt, synthetic construct
  source 1..20: mol_type = other RNA
tccactaggatgccatccgg

SEQ ID NO: 3598 - RNA, 20 nt, synthetic construct
  source 1..20: mol_type = other RNA
tccagaagaagctgctccga

SEQ ID NO: 3599 - RNA, 20 nt, synthetic construct
  source 1..20: mol_type = other RNA
tccagagcctgagcaaggcc

SEQ ID NO: 3600 - RNA, 20 nt, synthetic construct
  source 1..20: mol_type = other RNA
tccagaggggcaaatgccag

SEQ ID NO: 3601 - RNA, 20 nt, synthetic construct
  source 1..20: mol_type = other RNA
tccagcagctgccgcgcccg

SEQ ID NO: 3602 - RNA, 20 nt, synthetic construct
  source 1..20: mol_type = other RNA
tccagcagggcctctgagag

SEQ ID NO: 3603 - RNA, 20 nt, synthetic construct
  source 1..20: mol_type = other RNA
tccagccagttgtcataggg

SEQ ID NO: 3604 - RNA, 20 nt, synthetic construct
  source 1..20: mol_type = other RNA
tccagcctcccgcccgctgc

SEQ ID NO: 3605 - RNA, 20 nt, synthetic construct
  source 1..20: mol_type = other RNA
tccagcctcctcggcctcgt

SEQ ID NO: 3606 - RNA, 20 nt, synthetic construct
  source 1..20: mol_type = other RNA
tccagcctggcctgcaccag

SEQ ID NO: 3607 - RNA, 20 nt, synthetic construct
  source 1..20: mol_type = other RNA
tccagctcctcgaagccgtc

SEQ ID NO: 3608 - RNA, 20 nt, synthetic construct
  source 1..20: mol_type = other RNA
tccaggctcttgctgctgct

SEQ ID NO: 3609 - RNA, 20 nt, synthetic construct
  source 1..20: mol_type = other RNA
tccagggagaagtcttggcc

SEQ ID NO: 3610 - RNA, 20 nt, synthetic construct
  source 1..20: mol_type = other RNA
tccatggagaagccggacag

SEQ ID NO: 3611 - RNA, 20 nt, synthetic construct
  source 1..20: mol_type = other RNA
tccatggagcaggcccaggc

SEQ ID NO: 3612 - RNA, 20 nt, synthetic construct
  source 1..20: mol_type = other RNA
tcccacgaggctccccaatc

SEQ ID NO: 3613 - RNA, 20 nt, synthetic construct
  source 1..20: mol_type = other RNA
tcccaggcagcgggcgggag

SEQ ID NO: 3614 - RNA, 20 nt, synthetic construct
  source 1..20: mol_type = other RNA
tcccaggccagcttggccag

SEQ ID NO: 3615 - RNA, 20 nt, synthetic construct
  source 1..20: mol_type = other RNA
tcccatccgcagacgtgagg

SEQ ID NO: 3616 - RNA, 20 nt, synthetic construct
  source 1..20: mol_type = other RNA
tccccaagcccctcacccca

SEQ ID NO: 3617 - RNA, 20 nt, synthetic construct
  source 1..20: mol_type = other RNA
tccccaagctccagcagggc

SEQ ID NO: 3618 - RNA, 20 nt, synthetic construct
  source 1..20: mol_type = other RNA
tccccaatccagaggggcaa

SEQ ID NO: 3619 - RNA, 20 nt, synthetic construct
  source 1..20: mol_type = other RNA
tccccagcttcctcctgcaa

SEQ ID NO: 3620 - RNA, 20 nt, synthetic construct
  source 1..20: mol_type = other RNA
tccccagtacgactttgtct

SEQ ID NO: 3621 - RNA, 20 nt, synthetic construct
  source 1..20: mol_type = other RNA
tcccccggacggttcaagca

SEQ ID NO: 3622 - RNA, 20 nt, synthetic construct
  source 1..20: mol_type = other RNA
tccccggccgcctctctttt

SEQ ID NO: 3623 - RNA, 20 nt, synthetic construct
  source 1..20: mol_type = other RNA
tccccggctgcagccgcttc

SEQ ID NO: 3624 - RNA, 20 nt, synthetic construct
  source 1..20: mol_type = other RNA
tcccctgccattgcttgaac

SEQ ID NO: 3625 - RNA, 20 nt, synthetic construct
  source 1..20: mol_type = other RNA
tcccgcagtacctagcattg

SEQ ID NO: 3626 - RNA, 20 nt, synthetic construct
  source 1..20: mol_type = other RNA
tcccgcccgctgcctgggag

SEQ ID NO: 3627 - RNA, 20 nt, synthetic construct
  source 1..20: mol_type = other RNA
tcccgctccaggctcttgct

SEQ ID NO: 3628 - RNA, 20 nt, synthetic construct
  source 1..20: mol_type = other RNA
tcccggaggagcgtcagggc

SEQ ID NO: 3629 - RNA, 20 nt, synthetic construct
  source 1..20: mol_type = other RNA
tcccgtgagcgtggagggca

SEQ ID NO: 3630 - RNA, 20 nt, synthetic construct
  source 1..20: mol_type = other RNA
tccctccgggggctgctggc

SEQ ID NO: 3631 - RNA, 20 nt, synthetic construct
  source 1..20: mol_type = other RNA
tccctgagctctcaaagtag

SEQ ID NO: 3632 - RNA, 20 nt, synthetic construct
  source 1..20: mol_type = other RNA
tccctggacctccgcagcac

SEQ ID NO: 3633 - RNA, 20 nt, synthetic construct
  source 1..20: mol_type = other RNA
tccctgggcccacagccact

SEQ ID NO: 3634 - RNA, 20 nt, synthetic construct
  source 1..20: mol_type = other RNA
tccgagctggccttccccag

SEQ ID NO: 3635 - RNA, 20 nt, synthetic construct
  source 1..20: mol_type = other RNA
tccgaggttgcaccctcctc

SEQ ID NO: 3636 - RNA, 20 nt, synthetic construct
  source 1..20: mol_type = other RNA
tccgcacgtgctgtgcagga

SEQ ID NO: 3637 - RNA, 20 nt, synthetic construct
  source 1..20: mol_type = other RNA
tccgcagacgtgaggacctg

SEQ ID NO: 3638 - RNA, 20 nt, synthetic construct
  source 1..20: mol_type = other RNA
tccgcagcactggcatttgc

SEQ ID NO: 3639 - RNA, 20 nt, synthetic construct
  source 1..20: mol_type = other RNA
tccgccggtgccggtccgca

SEQ ID NO: 3640 - RNA, 20 nt, synthetic construct
  source 1..20: mol_type = other RNA
tccggcttctccatggagca

SEQ ID NO: 3641 - RNA, 20 nt, synthetic construct
  source 1..20: mol_type = other RNA
tccgggaccggccacttctt

SEQ ID NO: 3642 - RNA, 20 nt, synthetic construct
  source 1..20: mol_type = other RNA
tccgggggatgcctatggcc

SEQ ID NO: 3643 - RNA, 20 nt, synthetic construct
  source 1..20: mol_type = other RNA
tccggggtggccagttcccg

SEQ ID NO: 3644 - RNA, 20 nt, synthetic construct
  source 1..20: mol_type = other RNA
tcctagacggcttcgaggag

SEQ ID NO: 3645 - RNA, 20 nt, synthetic construct
  source 1..20: mol_type = other RNA
tcctagtggaggtggatctg

SEQ ID NO: 3646 - RNA, 20 nt, synthetic construct
  source 1..20: mol_type = other RNA
tcctcacagcccggccccgg

SEQ ID NO: 3647 - RNA, 20 nt, synthetic construct
  source 1..20: mol_type = other RNA
tcctcacgtctgcggatggg

SEQ ID NO: 3648 - RNA, 20 nt, synthetic construct
  source 1..20: mol_type = other RNA
tcctccccaagctccagcag

SEQ ID NO: 3649 - RNA, 20 nt, synthetic construct
  source 1..20: mol_type = other RNA
tcctccgggaccggccactt

SEQ ID NO: 3650 - RNA, 20 nt, synthetic construct
  source 1..20: mol_type = other RNA
tcctcctcacagcccggccc

SEQ ID NO: 3651 - RNA, 20 nt, synthetic construct
  source 1..20: mol_type = other RNA
tcctcctgcaatgcttcctg

SEQ ID NO: 3652 - RNA, 20 nt, synthetic construct
  source 1..20: mol_type = other RNA
tcctcctgtagggtactttg

SEQ ID NO: 3653 - RNA, 20 nt, synthetic construct
  source 1..20: mol_type = other RNA
tcctcgaagccgtctaggat

SEQ ID NO: 3654 - RNA, 20 nt, synthetic construct
  source 1..20: mol_type = other RNA
tcctcggcctcgtgggcgca

SEQ ID NO: 3655 - RNA, 20 nt, synthetic construct
  source 1..20: mol_type = other RNA
tcctctccagcctggcctgc

SEQ ID NO: 3656 - RNA, 20 nt, synthetic construct
  source 1..20: mol_type = other RNA
tcctgatgcacatgtactgg

SEQ ID NO: 3657 - RNA, 20 nt, synthetic construct
  source 1..20: mol_type = other RNA
tcctgcaatgcttcctgggg

SEQ ID NO: 3658 - RNA, 20 nt, synthetic construct
  source 1..20: mol_type = other RNA
tcctgcacagcacgtgcgga

SEQ ID NO: 3659 - RNA, 20 nt, synthetic construct
  source 1..20: mol_type = other RNA
tcctgcaggccataggcatc

SEQ ID NO: 3660 - RNA, 20 nt, synthetic construct
  source 1..20: mol_type = other RNA
tcctgcagtgagcggtagaa

SEQ ID NO: 3661 - RNA, 20 nt, synthetic construct
  source 1..20: mol_type = other RNA
tcctgggggccctgtggctg

SEQ ID NO: 3662 - RNA, 20 nt, synthetic construct
  source 1..20: mol_type = other RNA
tcctgtaccacgtgctgcca

SEQ ID NO: 3663 - RNA, 20 nt, synthetic construct
  source 1..20: mol_type = other RNA
tcctgtagggtactttgatg

SEQ ID NO: 3664 - RNA, 20 nt, synthetic construct
  source 1..20: mol_type = other RNA
tcctgtccaccgaggcagcc

SEQ ID NO: 3665 - RNA, 20 nt, synthetic construct
  source 1..20: mol_type = other RNA
tccttgatttcgccactcag

SEQ ID NO: 3666 - RNA, 20 nt, synthetic construct
  source 1..20: mol_type = other RNA
tccttggcagccaacagcac

SEQ ID NO: 3667 - RNA, 20 nt, synthetic construct
  source 1..20: mol_type = other RNA
tccttgggccagctgccgtt

SEQ ID NO: 3668 - RNA, 20 nt, synthetic construct
  source 1..20: mol_type = other RNA
tccttggggtcaatgctagg

SEQ ID NO: 3669 - RNA, 20 nt, synthetic construct
  source 1..20: mol_type = other RNA
tccttgtccttgatttcgcc

SEQ ID NO: 3670 - RNA, 20 nt, synthetic construct
  source 1..20: mol_type = other RNA
tcgaagccgtctaggatgag

SEQ ID NO: 3671 - RNA, 20 nt, synthetic construct
  source 1..20: mol_type = other RNA
tcgaggagctggaagcgcaa

SEQ ID NO: 3672 - RNA, 20 nt, synthetic construct
  source 1..20: mol_type = other RNA
tcgagggctgcacggcccag

SEQ ID NO: 3673 - RNA, 20 nt, synthetic construct
  source 1..20: mol_type = other RNA
tcgcaagcaccttctgcttc

SEQ ID NO: 3674 - RNA, 20 nt, synthetic construct
  source 1..20: mol_type = other RNA
tcgccactcagagccagcca

SEQ ID NO: 3675 - RNA, 20 nt, synthetic construct
  source 1..20: mol_type = other RNA
tcgcccaggtcctcacgtct

SEQ ID NO: 3676 - RNA, 20 nt, synthetic construct
  source 1..20: mol_type = other RNA
tcggactctgcggcccgcgg

SEQ ID NO: 3677 - RNA, 20 nt, synthetic construct
  source 1..20: mol_type = other RNA
tcggagcagcttcttctgga

SEQ ID NO: 3678 - RNA, 20 nt, synthetic construct
  source 1..20: mol_type = other RNA
tcggcaccatacgtgtcctg

SEQ ID NO: 3679 - RNA, 20 nt, synthetic construct
  source 1..20: mol_type = other RNA
tcggccgccacgagtggctg

SEQ ID NO: 3680 - RNA, 20 nt, synthetic construct
  source 1..20: mol_type = other RNA
tcggcctcgtgggcgcagtg

SEQ ID NO: 3681 - RNA, 20 nt, synthetic construct
  source 1..20: mol_type = other RNA
tcggcctgctgggccgtgca

SEQ ID NO: 3682 - RNA, 20 nt, synthetic construct
  source 1..20: mol_type = other RNA
tcggccttgctcaggctctg

SEQ ID NO: 3683 - RNA, 20 nt, synthetic construct
  source 1..20: mol_type = other RNA
tcggcggctgcctcggtgga

SEQ ID NO: 3684 - RNA, 20 nt, synthetic construct
  source 1..20: mol_type = other RNA
tcgggccatcggcggctgcc

SEQ ID NO: 3685 - RNA, 20 nt, synthetic construct
  source 1..20: mol_type = other RNA
tcggtggacaggaagcagaa

SEQ ID NO: 3686 - RNA, 20 nt, synthetic construct
  source 1..20: mol_type = other RNA
tcgtactggggaagccggcc

SEQ ID NO: 3687 - RNA, 20 nt, synthetic construct
  source 1..20: mol_type = other RNA
tcgtggcggccgatgaggtt

SEQ ID NO: 3688 - RNA, 20 nt, synthetic construct
  source 1..20: mol_type = other RNA
tcgtgggactcagctgtgtc

SEQ ID NO: 3689 - RNA, 20 nt, synthetic construct
  source 1..20: mol_type = other RNA
tcgtgggcgcagtgcagcag

SEQ ID NO: 3690 - RNA, 20 nt, synthetic construct
  source 1..20: mol_type = other RNA
tcgtgtctcacgcggccgcc

SEQ ID NO: 3691 - RNA, 20 nt, synthetic construct
  source 1..20: mol_type = other RNA
tctaccgctcactgcaggac

SEQ ID NO: 3692 - RNA, 20 nt, synthetic construct
  source 1..20: mol_type = other RNA
tctaggatgagcagaacgcg

SEQ ID NO: 3693 - RNA, 20 nt, synthetic construct
  source 1..20: mol_type = other RNA
tctatgtcggcctgctgggc

SEQ ID NO: 3694 - RNA, 20 nt, synthetic construct
  source 1..20: mol_type = other RNA
tctcaaagtagcgcatcacg

SEQ ID NO: 3695 - RNA, 20 nt, synthetic construct
  source 1..20: mol_type = other RNA
tctcacatacccccaccctg

SEQ ID NO: 3696 - RNA, 20 nt, synthetic construct
  source 1..20: mol_type = other RNA
tctcacgcggccgccggtgc

SEQ ID NO: 3697 - RNA, 20 nt, synthetic construct
  source 1..20: mol_type = other RNA
tctcagaggccctgctggag

SEQ ID NO: 3698 - RNA, 20 nt, synthetic construct
  source 1..20: mol_type = other RNA
tctcagtcacagccacagcc

SEQ ID NO: 3699 - RNA, 20 nt, synthetic construct
  source 1..20: mol_type = other RNA
tctccagcctggcctgcacc

SEQ ID NO: 3700 - RNA, 20 nt, synthetic construct
  source 1..20: mol_type = other RNA
tctccatggagcaggcccag

SEQ ID NO: 3701 - RNA, 20 nt, synthetic construct
  source 1..20: mol_type = other RNA
tctccctggacctccgcagc

SEQ ID NO: 3702 - RNA, 20 nt, synthetic construct
  source 1..20: mol_type = other RNA
tctccctgggcccacagcca

SEQ ID NO: 3703 - RNA, 20 nt, synthetic construct
  source 1..20: mol_type = other RNA
tctctgtcccctgccattgc

SEQ ID NO: 3704 - RNA, 20 nt, synthetic construct
  source 1..20: mol_type = other RNA
tctcttcaagatgtggctga

SEQ ID NO: 3705 - RNA, 20 nt, synthetic construct
  source 1..20: mol_type = other RNA
tctcttccccaagcccctca

SEQ ID NO: 3706 - RNA, 20 nt, synthetic construct
  source 1..20: mol_type = other RNA
tctcttttctgggcacccgc

SEQ ID NO: 3707 - RNA, 20 nt, synthetic construct
  source 1..20: mol_type = other RNA
tctgagagctggcacactgc

SEQ ID NO: 3708 - RNA, 20 nt, synthetic construct
  source 1..20: mol_type = other RNA
tctgagtggcgaaatcaagg

SEQ ID NO: 3709 - RNA, 20 nt, synthetic construct
  source 1..20: mol_type = other RNA
tctgcaaaggccaggggcgt

SEQ ID NO: 3710 - RNA, 20 nt, synthetic construct
  source 1..20: mol_type = other RNA
tctgcccagtccggggtggc

SEQ ID NO: 3711 - RNA, 20 nt, synthetic construct
  source 1..20: mol_type = other RNA
tctgcggatgggaactggtc

SEQ ID NO: 3712 - RNA, 20 nt, synthetic construct
  source 1..20: mol_type = other RNA
tctgcggcccagctcccagg

SEQ ID NO: 3713 - RNA, 20 nt, synthetic construct
  source 1..20: mol_type = other RNA
tctgcggcccgcggtgggtg

SEQ ID NO: 3714 - RNA, 20 nt, synthetic construct
  source 1..20: mol_type = other RNA
tctgctcatcctagacggct

SEQ ID NO: 3715 - RNA, 20 nt, synthetic construct
  source 1..20: mol_type = other RNA
tctgctcttctccctgggcc

SEQ ID NO: 3716 - RNA, 20 nt, synthetic construct
  source 1..20: mol_type = other RNA
tctgcttcctgtccaccgag

SEQ ID NO: 3717 - RNA, 20 nt, synthetic construct
  source 1..20: mol_type = other RNA
tctggaaaaggccggccagc

SEQ ID NO: 3718 - RNA, 20 nt, synthetic construct
  source 1..20: mol_type = other RNA
tctggaccaggcggccccgg

SEQ ID NO: 3719 - RNA, 20 nt, synthetic construct
  source 1..20: mol_type = other RNA
tctggattggggagcctcgt

SEQ ID NO: 3720 - RNA, 20 nt, synthetic construct
  source 1..20: mol_type = other RNA
tctggctgggctgatcttcc

SEQ ID NO: 3721 - RNA, 20 nt, synthetic construct
  source 1..20: mol_type = other RNA
tctgggcacccgcctcacgc

SEQ ID NO: 3722 - RNA, 20 nt, synthetic construct
  source 1..20: mol_type = other RNA
tctggtgcaggccaggctgg

SEQ ID NO: 3723 - RNA, 20 nt, synthetic construct
  source 1..20: mol_type = other RNA
tctgtcatccctgagctctc

SEQ ID NO: 3724 - RNA, 20 nt, synthetic construct
  source 1..20: mol_type = other RNA
tctgtcccctgccattgctt

SEQ ID NO: 3725 - RNA, 20 nt, synthetic construct
  source 1..20: mol_type = other RNA
tctgtcttggtgctctgtca

SEQ ID NO: 3726 - RNA, 20 nt, synthetic construct
  source 1..20: mol_type = other RNA
tcttcaagatgtggctgaaa

SEQ ID NO: 3727 - RNA, 20 nt, synthetic construct
  source 1..20: mol_type = other RNA
tcttccagcctcccgcccgc

SEQ ID NO: 3728 - RNA, 20 nt, synthetic construct
  source 1..20: mol_type = other RNA
tcttccccaagcccctcacc

SEQ ID NO: 3729 - RNA, 20 nt, synthetic construct
  source 1..20: mol_type = other RNA
tcttccttggggtcaatgct

SEQ ID NO: 3730 - RNA, 20 nt, synthetic construct
  source 1..20: mol_type = other RNA
tcttctcagtcacagccaca

SEQ ID NO: 3731 - RNA, 20 nt, synthetic construct
  source 1..20: mol_type = other RNA
tcttctccctgggcccacag

SEQ ID NO: 3732 - RNA, 20 nt, synthetic construct
  source 1..20: mol_type = other RNA
tcttctctgtcccctgccat

SEQ ID NO: 3733 - RNA, 20 nt, synthetic construct
  source 1..20: mol_type = other RNA
tcttctggaaaaggccggcc

SEQ ID NO: 3734 - RNA, 20 nt, synthetic construct
  source 1..20: mol_type = other RNA
tcttcttccttggggtcaat

SEQ ID NO: 3735 - RNA, 20 nt, synthetic construct
  source 1..20: mol_type = other RNA
tcttgaagagacctgaccgc

SEQ ID NO: 3736 - RNA, 20 nt, synthetic construct
  source 1..20: mol_type = other RNA
tcttgccctgaccagctttg

SEQ ID NO: 3737 - RNA, 20 nt, synthetic construct
  source 1..20: mol_type = other RNA
tcttgcgcttccagctcctc

SEQ ID NO: 3738 - RNA, 20 nt, synthetic construct
  source 1..20: mol_type = other RNA
tcttgctgctgctcctctcc

SEQ ID NO: 3739 - RNA, 20 nt, synthetic construct
  source 1..20: mol_type = other RNA
tcttggcccgccgcctccaa

SEQ ID NO: 3740 - RNA, 20 nt, synthetic construct
  source 1..20: mol_type = other RNA
tcttggtgctctgtcatccc

SEQ ID NO: 3741 - RNA, 20 nt, synthetic construct
  source 1..20: mol_type = other RNA
tcttttctgggcacccgcct

SEQ ID NO: 3742 - RNA, 20 nt, synthetic construct
  source 1..20: mol_type = other RNA
tgaaaacctcatcggccgcc

SEQ ID NO: 3743 - RNA, 20 nt, synthetic construct
  source 1..20: mol_type = other RNA
tgaaacgggtgacacagctg

SEQ ID NO: 3744 - RNA, 20 nt, synthetic construct
  source 1..20: mol_type = other RNA
tgaaccgtccgggggatgcc

SEQ ID NO: 3745 - RNA, 20 nt, synthetic construct
  source 1..20: mol_type = other RNA
tgaagagacctgaccgcgtt

SEQ ID NO: 3746 - RNA, 20 nt, synthetic construct
  source 1..20: mol_type = other RNA
tgaagcggctgcagccgggg

SEQ ID NO: 3747 - RNA, 20 nt, synthetic construct
  source 1..20: mol_type = other RNA
tgacaactggctggagggcg

SEQ ID NO: 3748 - RNA, 20 nt, synthetic construct
  source 1..20: mol_type = other RNA
tgacacagctgagtcccacg

SEQ ID NO: 3749 - RNA, 20 nt, synthetic construct
  source 1..20: mol_type = other RNA
tgacacgcccctggcctttg

SEQ ID NO: 3750 - RNA, 20 nt, synthetic construct
  source 1..20: mol_type = other RNA
tgacagagcaccaagacaga

SEQ ID NO: 3751 - RNA, 20 nt, synthetic construct
  source 1..20: mol_type = other RNA
tgaccagctttgcccagcac

SEQ ID NO: 3752 - RNA, 20 nt, synthetic construct
  source 1..20: mol_type = other RNA
tgaccccaaggaagaagagg

SEQ ID NO: 3753 - RNA, 20 nt, synthetic construct
  source 1..20: mol_type = other RNA
tgaccgcgttctgctcatcc

SEQ ID NO: 3754 - RNA, 20 nt, synthetic construct
  source 1..20: mol_type = other RNA
tgacgctcctccgggaccgg

SEQ ID NO: 3755 - RNA, 20 nt, synthetic construct
  source 1..20: mol_type = other RNA
tgactgagaagaagtggccg

SEQ ID NO: 3756 - RNA, 20 nt, synthetic construct
  source 1..20: mol_type = other RNA
tgagaagaagtggccggtcc

SEQ ID NO: 3757 - RNA, 20 nt, synthetic construct
  source 1..20: mol_type = other RNA
tgagacacgagtgattgctg

SEQ ID NO: 3758 - RNA, 20 nt, synthetic construct
  source 1..20: mol_type = other RNA
tgagagctcagggatgacag

SEQ ID NO: 3759 - RNA, 20 nt, synthetic construct
  source 1..20: mol_type = other RNA
tgagagctggcacactgccc

SEQ ID NO: 3760 - RNA, 20 nt, synthetic construct
  source 1..20: mol_type = other RNA
tgagcaaggccgacgcccta

SEQ ID NO: 3761 - RNA, 20 nt, synthetic construct
  source 1..20: mol_type = other RNA
tgagcagaacgcggtcaggt

SEQ ID NO: 3762 - RNA, 20 nt, synthetic construct
  source 1..20: mol_type = other RNA
tgagccgggcctgggcttgt

SEQ ID NO: 3763 - RNA, 20 nt, synthetic construct
  source 1..20: mol_type = other RNA
tgagcggtagaactgctcca

SEQ ID NO: 3764 - RNA, 20 nt, synthetic construct
  source 1..20: mol_type = other RNA
tgagcgtggagggcagcttg

SEQ ID NO: 3765 - RNA, 20 nt, synthetic construct
  source 1..20: mol_type = other RNA
tgagctctcaaagtagcgca

SEQ ID NO: 3766 - RNA, 20 nt, synthetic construct
  source 1..20: mol_type = other RNA
tgagctgtccggcttctcca

SEQ ID NO: 3767 - RNA, 20 nt, synthetic construct
  source 1..20: mol_type = other RNA
tgaggacctgggcgatggcc

SEQ ID NO: 3768 - RNA, 20 nt, synthetic construct
  source 1..20: mol_type = other RNA
tgaggaggagggtgcaacct

SEQ ID NO: 3769 - RNA, 20 nt, synthetic construct
  source 1..20: mol_type = other RNA
tgaggcgggtgcccagaaaa

SEQ ID NO: 3770 - RNA, 20 nt, synthetic construct
  source 1..20: mol_type = other RNA
tgaggggcttggggaagaga

SEQ ID NO: 3771 - RNA, 20 nt, synthetic construct
  source 1..20: mol_type = other RNA
tgaggtgctgttggctgcca

SEQ ID NO: 3772 - RNA, 20 nt, synthetic construct
  source 1..20: mol_type = other RNA
tgaggttttcagccacatct

SEQ ID NO: 3773 - RNA, 20 nt, synthetic construct
  source 1..20: mol_type = other RNA
tgagtcccacgaggctcccc

SEQ ID NO: 3774 - RNA, 20 nt, synthetic construct
  source 1..20: mol_type = other RNA
tgagtggcgaaatcaaggac

SEQ ID NO: 3775 - RNA, 20 nt, synthetic construct
  source 1..20: mol_type = other RNA
tgatcttccagcctcccgcc

SEQ ID NO: 3776 - RNA, 20 nt, synthetic construct
  source 1..20: mol_type = other RNA
tgatgcacatgtactgggca

SEQ ID NO: 3777 - RNA, 20 nt, synthetic construct
  source 1..20: mol_type = other RNA
tgatgcgctactttgagagc

SEQ ID NO: 3778 - RNA, 20 nt, synthetic construct
  source 1..20: mol_type = other RNA
tgatgtctgcggcccagctc

SEQ ID NO: 3779 - RNA, 20 nt, synthetic construct
  source 1..20: mol_type = other RNA
tgattgctgtgctgggcaaa

SEQ ID NO: 3780 - RNA, 20 nt, synthetic construct
  source 1..20: mol_type = other RNA
tgatttcgccactcagagcc

SEQ ID NO: 3781 - RNA, 20 nt, synthetic construct
  source 1..20: mol_type = other RNA
tgcaaaggccaggggcgtgt

SEQ ID NO: 3782 - RNA, 20 nt, synthetic construct
  source 1..20: mol_type = other RNA
tgcaacctcggagcagcttc

SEQ ID NO: 3783 - RNA, 20 nt, synthetic construct
  source 1..20: mol_type = other RNA
tgcaatgcttcctgggggcc

SEQ ID NO: 3784 - RNA, 20 nt, synthetic construct
  source 1..20: mol_type = other RNA
tgcacagcacgtgcggaccg

SEQ ID NO: 3785 - RNA, 20 nt, synthetic construct
  source 1..20: mol_type = other RNA
tgcacatgtactgggcaagg

SEQ ID NO: 3786 - RNA, 20 nt, synthetic construct
  source 1..20: mol_type = other RNA
tgcaccagatccacctccac

SEQ ID NO: 3787 - RNA, 20 nt, synthetic construct
  source 1..20: mol_type = other RNA
tgcaccctcctcctcacagc

SEQ ID NO: 3788 - RNA, 20 nt, synthetic construct
  source 1..20: mol_type = other RNA
tgcacggcccagcaggccga

SEQ ID NO: 3789 - RNA, 20 nt, synthetic construct
  source 1..20: mol_type = other RNA
tgcactgcgcccacgaggcc

SEQ ID NO: 3790 - RNA, 20 nt, synthetic construct
  source 1..20: mol_type = other RNA
tgcagagccggtggagcagt

SEQ ID NO: 3791 - RNA, 20 nt, synthetic construct
  source 1..20: mol_type = other RNA
tgcagcagctccagcagctg

SEQ ID NO: 3792 - RNA, 20 nt, synthetic construct
  source 1..20: mol_type = other RNA
tgcagccctcgacagccccc

SEQ ID NO: 3793 - RNA, 20 nt, synthetic construct
  source 1..20: mol_type = other RNA
tgcagccgcttcaggtacct

SEQ ID NO: 3794 - RNA, 20 nt, synthetic construct
  source 1..20: mol_type = other RNA
tgcagccggggacactgcgg

SEQ ID NO: 3795 - RNA, 20 nt, synthetic construct
  source 1..20: mol_type = other RNA
tgcaggaagccatcttgcgc

SEQ ID NO: 3796 - RNA, 20 nt, synthetic construct
  source 1..20: mol_type = other RNA
tgcaggacacgtatggtgcc

SEQ ID NO: 3797 - RNA, 20 nt, synthetic construct
  source 1..20: mol_type = other RNA
tgcaggaggaagctggggaa

SEQ ID NO: 3798 - RNA, 20 nt, synthetic construct
  source 1..20: mol_type = other RNA
tgcaggatctgctcttctcc

SEQ ID NO: 3799 - RNA, 20 nt, synthetic construct
  source 1..20: mol_type = other RNA
tgcaggccaggctggagagg

SEQ ID NO: 3800 - RNA, 20 nt, synthetic construct
  source 1..20: mol_type = other RNA
tgcaggccataggcatcccc

SEQ ID NO: 3801 - RNA, 20 nt, synthetic construct
  source 1..20: mol_type = other RNA
tgcagtgagcggtagaactg

SEQ ID NO: 3802 - RNA, 20 nt, synthetic construct
  source 1..20: mol_type = other RNA
tgcatcaggaggcgtgaggc

SEQ ID NO: 3803 - RNA, 20 nt, synthetic construct
  source 1..20: mol_type = other RNA
tgccaaattccagcctcctc

SEQ ID NO: 3804 - RNA, 20 nt, synthetic construct
  source 1..20: mol_type = other RNA
tgccaaggagcaccggcggc

SEQ ID NO: 3805 - RNA, 20 nt, synthetic construct
  source 1..20: mol_type = other RNA
tgccacgctttctggctggg

SEQ ID NO: 3806 - RNA, 20 nt, synthetic construct
  source 1..20: mol_type = other RNA
tgccagctctcagaggccct

SEQ ID NO: 3807 - RNA, 20 nt, synthetic construct
  source 1..20: mol_type = other RNA
tgccagtgctgcggaggtcc

SEQ ID NO: 3808 - RNA, 20 nt, synthetic construct
  source 1..20: mol_type = other RNA
tgccatccgggcctgcgggc

SEQ ID NO: 3809 - RNA, 20 nt, synthetic construct
  source 1..20: mol_type = other RNA
tgccattgcttgaaccgtcc

SEQ ID NO: 3810 - RNA, 20 nt, synthetic construct
  source 1..20: mol_type = other RNA
tgcccaacacaaggatgtct

SEQ ID NO: 3811 - RNA, 20 nt, synthetic construct
  source 1..20: mol_type = other RNA
tgcccagaaaagagaggcgg

SEQ ID NO: 3812 - RNA, 20 nt, synthetic construct
  source 1..20: mol_type = other RNA
tgcccagcacagcaatcact

SEQ ID NO: 3813 - RNA, 20 nt, synthetic construct
  source 1..20: mol_type = other RNA
tgcccagtacatgtgcatca

SEQ ID NO: 3814 - RNA, 20 nt, synthetic construct
  source 1..20: mol_type = other RNA
tgcccagtccggggtggcca

SEQ ID NO: 3815 - RNA, 20 nt, synthetic construct
  source 1..20: mol_type = other RNA
tgccccagcccaatagctct

SEQ ID NO: 3816 - RNA, 20 nt, synthetic construct
  source 1..20: mol_type = other RNA
tgcccctctggattggggag

SEQ ID NO: 3817 - RNA, 20 nt, synthetic construct
  source 1..20: mol_type = other RNA
tgcccggcacaaagtagggc

SEQ ID NO: 3818 - RNA, 20 nt, synthetic construct
  source 1..20: mol_type = other RNA
tgccctccacgctcacggga

SEQ ID NO: 3819 - RNA, 20 nt, synthetic construct
  source 1..20: mol_type = other RNA
tgccctgaccagctttgccc

SEQ ID NO: 3820 - RNA, 20 nt, synthetic construct
  source 1..20: mol_type = other RNA
tgccgcgcccgcagtgtccc

SEQ ID NO: 3821 - RNA, 20 nt, synthetic construct
  source 1..20: mol_type = other RNA
tgccgggcagtgtgccagct

SEQ ID NO: 3822 - RNA, 20 nt, synthetic construct
  source 1..20: mol_type = other RNA
tgccggtccgcacgtgctgt

SEQ ID NO: 3823 - RNA, 20 nt, synthetic construct
  source 1..20: mol_type = other RNA
tgccgttctgcccagtccgg

SEQ ID NO: 3824 - RNA, 20 nt, synthetic construct
  source 1..20: mol_type = other RNA
tgcctatggcctgcaggatc

SEQ ID NO: 3825 - RNA, 20 nt, synthetic construct
  source 1..20: mol_type = other RNA
tgcctcggtggacaggaagc

SEQ ID NO: 3826 - RNA, 20 nt, synthetic construct
  source 1..20: mol_type = other RNA
tgcctctcacatacccccac

SEQ ID NO: 3827 - RNA, 20 nt, synthetic construct
  source 1..20: mol_type = other RNA
tgcctgggagccctactcgg

SEQ ID NO: 3828 - RNA, 20 nt, synthetic construct
  source 1..20: mol_type = other RNA
tgcctgggcctgctccatgg

SEQ ID NO: 3829 - RNA, 20 nt, synthetic construct
  source 1..20: mol_type = other RNA
tgcgaggtacctgaagcggc

SEQ ID NO: 3830 - RNA, 20 nt, synthetic construct
  source 1..20: mol_type = other RNA
tgcgcccacgaggccgagga

SEQ ID NO: 3831 - RNA, 20 nt, synthetic construct
  source 1..20: mol_type = other RNA
tgcgctactttgagagctca

SEQ ID NO: 3832 - RNA, 20 nt, synthetic construct
  source 1..20: mol_type = other RNA
tgcgcttccagctcctcgaa

SEQ ID NO: 3833 - RNA, 20 nt, synthetic construct
  source 1..20: mol_type = other RNA
tgcggaccggcaccggcgga

SEQ ID NO: 3834 - RNA, 20 nt, synthetic construct
  source 1..20: mol_type = other RNA
tgcggaggtccagggagaag

SEQ ID NO: 3835 - RNA, 20 nt, synthetic construct
  source 1..20: mol_type = other RNA
tgcggatgggaactggtcct

SEQ ID NO: 3836 - RNA, 20 nt, synthetic construct
  source 1..20: mol_type = other RNA
tgcggcccagctcccaggcc

SEQ ID NO: 3837 - RNA, 20 nt, synthetic construct
  source 1..20: mol_type = other RNA
tgcggcccgcggtgggtgtt

SEQ ID NO: 3838 - RNA, 20 nt, synthetic construct
  source 1..20: mol_type = other RNA
tgcgggagctccttgtcctt

SEQ ID NO: 3839 - RNA, 20 nt, synthetic construct
  source 1..20: mol_type = other RNA
tgcgggcgcggcagctgctg

SEQ ID NO: 3840 - RNA, 20 nt, synthetic construct
  source 1..20: mol_type = other RNA
tgcgggctcggcaccatacg

SEQ ID NO: 3841 - RNA, 20 nt, synthetic construct
  source 1..20: mol_type = other RNA
tgctaggtactgcgggagct

SEQ ID NO: 3842 - RNA, 20 nt, synthetic construct
  source 1..20: mol_type = other RNA
tgctcaggctctggaccagg

SEQ ID NO: 3843 - RNA, 20 nt, synthetic construct
  source 1..20: mol_type = other RNA
tgctcatcctagacggcttc

SEQ ID NO: 3844 - RNA, 20 nt, synthetic construct
  source 1..20: mol_type = other RNA
tgctccaccggctctgcaaa

SEQ ID NO: 3845 - RNA, 20 nt, synthetic construct
  source 1..20: mol_type = other RNA
tgctccatggagaagccgga

SEQ ID NO: 3846 - RNA, 20 nt, synthetic construct
  source 1..20: mol_type = other RNA
tgctccctccgggggctgct

SEQ ID NO: 3847 - RNA, 20 nt, synthetic construct
  source 1..20: mol_type = other RNA
tgctccgaggttgcaccctc

SEQ ID NO: 3848 - RNA, 20 nt, synthetic construct
  source 1..20: mol_type = other RNA
tgctcctctccagcctggcc

SEQ ID NO: 3849 - RNA, 20 nt, synthetic construct
  source 1..20: mol_type = other RNA
tgctccttggcagccaacag

SEQ ID NO: 3850 - RNA, 20 nt, synthetic construct
  source 1..20: mol_type = other RNA
tgctctgtcatccctgagct

SEQ ID NO: 3851 - RNA, 20 nt, synthetic construct
  source 1..20: mol_type = other RNA
tgctcttctccctgggccca

SEQ ID NO: 3852 - RNA, 20 nt, synthetic construct
  source 1..20: mol_type = other RNA
tgctgcactgcgcccacgag

SEQ ID NO: 3853 - RNA, 20 nt, synthetic construct
  source 1..20: mol_type = other RNA
tgctgccaaattccagcctc

SEQ ID NO: 3854 - RNA, 20 nt, synthetic construct
  source 1..20: mol_type = other RNA
tgctgcggaggtccagggag

SEQ ID NO: 3855 - RNA, 20 nt, synthetic construct
  source 1..20: mol_type = other RNA
tgctgctcctctccagcctg

SEQ ID NO: 3856 - RNA, 20 nt, synthetic construct
  source 1..20: mol_type = other RNA
tgctgctgctcctctccagc

SEQ ID NO: 3857 - RNA, 20 nt, synthetic construct
  source 1..20: mol_type = other RNA
tgctggagctgctgcactgc

SEQ ID NO: 3858 - RNA, 20 nt, synthetic construct
  source 1..20: mol_type = other RNA
tgctggagcttggggaggac

SEQ ID NO: 3859 - RNA, 20 nt, synthetic construct
  source 1..20: mol_type = other RNA
tgctggccggccttttccag

SEQ ID NO: 3860 - RNA, 20 nt, synthetic construct
  source 1..20: mol_type = other RNA
tgctgggcaaagctggtcag

SEQ ID NO: 3861 - RNA, 20 nt, synthetic construct
  source 1..20: mol_type = other RNA
tgctgggccgtgcagccctc

SEQ ID NO: 3862 - RNA, 20 nt, synthetic construct
  source 1..20: mol_type = other RNA
tgctgtgcaggaagccatct

SEQ ID NO: 3863 - RNA, 20 nt, synthetic construct
  source 1..20: mol_type = other RNA
tgctgtgctgggcaaagctg

SEQ ID NO: 3864 - RNA, 20 nt, synthetic construct
  source 1..20: mol_type = other RNA
tgctgttggctgccaaggag

SEQ ID NO: 3865 - RNA, 20 nt, synthetic construct
  source 1..20: mol_type = other RNA
tgcttcctgggggccctgtg

SEQ ID NO: 3866 - RNA, 20 nt, synthetic construct
  source 1..20: mol_type = other RNA
tgcttcctgtccaccgaggc

SEQ ID NO: 3867 - RNA, 20 nt, synthetic construct
  source 1..20: mol_type = other RNA
tgcttgaaccgtccggggga

SEQ ID NO: 3868 - RNA, 20 nt, synthetic construct
  source 1..20: mol_type = other RNA
tgcttgcgaggtacctgaag

SEQ ID NO: 3869 - RNA, 20 nt, synthetic construct
  source 1..20: mol_type = other RNA
tggaaaaggccggccagcag

SEQ ID NO: 3870 - RNA, 20 nt, synthetic construct
  source 1..20: mol_type = other RNA
tggaagatcagcccagccag

SEQ ID NO: 3871 - RNA, 20 nt, synthetic construct
  source 1..20: mol_type = other RNA
tggaagcgcaagatggcttc

SEQ ID NO: 3872 - RNA, 20 nt, synthetic construct
  source 1..20: mol_type = other RNA
tggaatttggcagcacgtgg

SEQ ID NO: 3873 - RNA, 20 nt, synthetic construct
  source 1..20: mol_type = other RNA
tggacaggaagcagaaggtg

SEQ ID NO: 3874 - RNA, 20 nt, synthetic construct
  source 1..20: mol_type = other RNA
tggacctccgcagcactggc

SEQ ID NO: 3875 - RNA, 20 nt, synthetic construct
  source 1..20: mol_type = other RNA
tggactaagcctttggccat

SEQ ID NO: 3876 - RNA, 20 nt, synthetic construct
  source 1..20: mol_type = other RNA
tggagaagccggacagctca

SEQ ID NO: 3877 - RNA, 20 nt, synthetic construct
  source 1..20: mol_type = other RNA
tggagaggagcagcagcaag

SEQ ID NO: 3878 - RNA, 20 nt, synthetic construct
  source 1..20: mol_type = other RNA
tggagcaggcccaggcatac

SEQ ID NO: 3879 - RNA, 20 nt, synthetic construct
  source 1..20: mol_type = other RNA
tggagcagttctaccgctca

SEQ ID NO: 3880 - RNA, 20 nt, synthetic construct
  source 1..20: mol_type = other RNA
tggagcgggaactggccacc

SEQ ID NO: 3881 - RNA, 20 nt, synthetic construct
  source 1..20: mol_type = other RNA
tggagctgctgcactgcgcc

SEQ ID NO: 3882 - RNA, 20 nt, synthetic construct
  source 1..20: mol_type = other RNA
tggagcttggggaggacgcc

SEQ ID NO: 3883 - RNA, 20 nt, synthetic construct
  source 1..20: mol_type = other RNA
tggaggcggcgggccaagac

SEQ ID NO: 3884 - RNA, 20 nt, synthetic construct
  source 1..20: mol_type = other RNA
tggagggcagcttggcgtcc

SEQ ID NO: 3885 - RNA, 20 nt, synthetic construct
  source 1..20: mol_type = other RNA
tggagggcgtgccacgcttt

SEQ ID NO: 3886 - RNA, 20 nt, synthetic construct
  source 1..20: mol_type = other RNA
tggaggtggatctggtgcag

SEQ ID NO: 3887 - RNA, 20 nt, synthetic construct
  source 1..20: mol_type = other RNA
tggatctggtgcaggccagg

SEQ ID NO: 3888 - RNA, 20 nt, synthetic construct
  source 1..20: mol_type = other RNA
tggattggggagcctcgtgg

SEQ ID NO: 3889 - RNA, 20 nt, synthetic construct
  source 1..20: mol_type = other RNA
tggcacactgcccggcacaa

SEQ ID NO: 3890 - RNA, 20 nt, synthetic construct
  source 1..20: mol_type = other RNA
tggcacgccctccagccagt

SEQ ID NO: 3891 - RNA, 20 nt, synthetic construct
  source 1..20: mol_type = other RNA
tggcagagctggccaagctg

SEQ ID NO: 3892 - RNA, 20 nt, synthetic construct
  source 1..20: mol_type = other RNA
tggcagcacgtggtacagga

SEQ ID NO: 3893 - RNA, 20 nt, synthetic construct
  source 1..20: mol_type = other RNA
tggcagccaacagcacctca

SEQ ID NO: 3894 - RNA, 20 nt, synthetic construct
  source 1..20: mol_type = other RNA
tggcaggggacagagaagac

SEQ ID NO: 3895 - RNA, 20 nt, synthetic construct
  source 1..20: mol_type = other RNA
tggcatcctagtggaggtgg

SEQ ID NO: 3896 - RNA, 20 nt, synthetic construct
  source 1..20: mol_type = other RNA
tggcatttgcccctctggat

SEQ ID NO: 3897 - RNA, 20 nt, synthetic construct
  source 1..20: mol_type = other RNA
tggccaaaggcttagtccaa

SEQ ID NO: 3898 - RNA, 20 nt, synthetic construct
  source 1..20: mol_type = other RNA
tggccaagctggcctgggag

SEQ ID NO: 3899 - RNA, 20 nt, synthetic construct
  source 1..20: mol_type = other RNA
tggccaccccggactgggca

SEQ ID NO: 3900 - RNA, 20 nt, synthetic construct
  source 1..20: mol_type = other RNA
tggccagctctgccagggcc

SEQ ID NO: 3901 - RNA, 20 nt, synthetic construct
  source 1..20: mol_type = other RNA
tggccagttcccgctccagg

SEQ ID NO: 3902 - RNA, 20 nt, synthetic construct
  source 1..20: mol_type = other RNA
tggccatcgcccaggtcctc

SEQ ID NO: 3903 - RNA, 20 nt, synthetic construct
  source 1..20: mol_type = other RNA
tggcccaaggaggcctggct

SEQ ID NO: 3904 - RNA, 20 nt, synthetic construct
  source 1..20: mol_type = other RNA
tggcccgagtagggctccca

SEQ ID NO: 3905 - RNA, 20 nt, synthetic construct
  source 1..20: mol_type = other RNA
tggcccgccgcctccaaggc

SEQ ID NO: 3906 - RNA, 20 nt, synthetic construct
  source 1..20: mol_type = other RNA
tggccggccttttccagaag

SEQ ID NO: 3907 - RNA, 20 nt, synthetic construct
  source 1..20: mol_type = other RNA
tggccggcttccccagtacg

SEQ ID NO: 3908 - RNA, 20 nt, synthetic construct
  source 1..20: mol_type = other RNA
tggccggtcccggaggagcg

SEQ ID NO: 3909 - RNA, 20 nt, synthetic construct
  source 1..20: mol_type = other RNA
tggcctgcaccagatccacc

SEQ ID NO: 3910 - RNA, 20 nt, synthetic construct
  source 1..20: mol_type = other RNA
tggcctgcaggatctgctct

SEQ ID NO: 3911 - RNA, 20 nt, synthetic construct
  source 1..20: mol_type = other RNA
tggcctgggagctgggccgc

SEQ ID NO: 3912 - RNA, 20 nt, synthetic construct
  source 1..20: mol_type = other RNA
tggccttccccagcttcctc

SEQ ID NO: 3913 - RNA, 20 nt, synthetic construct
  source 1..20: mol_type = other RNA
tggcctttgcagagccggtg

SEQ ID NO: 3914 - RNA, 20 nt, synthetic construct
  source 1..20: mol_type = other RNA
tggcgaaatcaaggacaagg

SEQ ID NO: 3915 - RNA, 20 nt, synthetic construct
  source 1..20: mol_type = other RNA
tggcggccgatgaggttttc

SEQ ID NO: 3916 - RNA, 20 nt, synthetic construct
  source 1..20: mol_type = other RNA
tggcgtcctccccaagctcc

SEQ ID NO: 3917 - RNA, 20 nt, synthetic construct
  source 1..20: mol_type = other RNA
tggctctgagtggcgaaatc

SEQ ID NO: 3918 - RNA, 20 nt, synthetic construct
  source 1..20: mol_type = other RNA
tggctgaaaacctcatcggc

SEQ ID NO: 3919 - RNA, 20 nt, synthetic construct
  source 1..20: mol_type = other RNA
tggctgaggtgctgttggct

SEQ ID NO: 3920 - RNA, 20 nt, synthetic construct
  source 1..20: mol_type = other RNA
tggctgccaaggagcaccgg

SEQ ID NO: 3921 - RNA, 20 nt, synthetic construct
  source 1..20: mol_type = other RNA
tggctggagggcgtgccacg

SEQ ID NO: 3922 - RNA, 20 nt, synthetic construct
  source 1..20: mol_type = other RNA
tggctggctctgagtggcga

SEQ ID NO: 3923 - RNA, 20 nt, synthetic construct
  source 1..20: mol_type = other RNA
tggctgggctgatcttccag

SEQ ID NO: 3924 - RNA, 20 nt, synthetic construct
  source 1..20: mol_type = other RNA
tggctgtgactgagaagaag

SEQ ID NO: 3925 - RNA, 20 nt, synthetic construct
  source 1..20: mol_type = other RNA
tggctgtgggcccagggaga

SEQ ID NO: 3926 - RNA, 20 nt, synthetic construct
  source 1..20: mol_type = other RNA
tggcttcctgcacagcacgt

SEQ ID NO: 3927 - RNA, 20 nt, synthetic construct
  source 1..20: mol_type = other RNA
tgggaactggtcctcctgta

SEQ ID NO: 3928 - RNA, 20 nt, synthetic construct
  source 1..20: mol_type = other RNA
tgggactcagctgtgtcacc

SEQ ID NO: 3929 - RNA, 20 nt, synthetic construct
  source 1..20: mol_type = other RNA
tgggagccctactcgggcca

SEQ ID NO: 3930 - RNA, 20 nt, synthetic construct
  source 1..20: mol_type = other RNA
tgggagctgggccgcagaca

SEQ ID NO: 3931 - RNA, 20 nt, synthetic construct
  source 1..20: mol_type = other RNA
tgggcaaagctggtcagggc

SEQ ID NO: 3932 - RNA, 20 nt, synthetic construct
  source 1..20: mol_type = other RNA
tgggcaaggccttggaggcg

SEQ ID NO: 3933 - RNA, 20 nt, synthetic construct
  source 1..20: mol_type = other RNA
tgggcacccgcctcacgcct

SEQ ID NO: 3934 - RNA, 20 nt, synthetic construct
  source 1..20: mol_type = other RNA
tgggcagaacggcagctggc

SEQ ID NO: 3935 - RNA, 20 nt, synthetic construct
  source 1..20: mol_type = other RNA
tgggccagctgccgttctgc

SEQ ID NO: 3936 - RNA, 20 nt, synthetic construct
  source 1..20: mol_type = other RNA
tgggcccacagccactcgtg

SEQ ID NO: 3937 - RNA, 20 nt, synthetic construct
  source 1..20: mol_type = other RNA
tgggcccagggagaagagca

SEQ ID NO: 3938 - RNA, 20 nt, synthetic construct
  source 1..20: mol_type = other RNA
tgggccgcagacatcaaagt

SEQ ID NO: 3939 - RNA, 20 nt, synthetic construct
  source 1..20: mol_type = other RNA
tgggccgtgcagccctcgac

SEQ ID NO: 3940 - RNA, 20 nt, synthetic construct
  source 1..20: mol_type = other RNA
tgggcctgctccatggagaa

SEQ ID NO: 3941 - RNA, 20 nt, synthetic construct
  source 1..20: mol_type = other RNA
tgggcgatggccaaaggctt

SEQ ID NO: 3942 - RNA, 20 nt, synthetic construct
  source 1..20: mol_type = other RNA
tgggcgcagtgcagcagctc

SEQ ID NO: 3943 - RNA, 20 nt, synthetic construct
  source 1..20: mol_type = other RNA
tgggctgatcttccagcctc

SEQ ID NO: 3944 - RNA, 20 nt, synthetic construct
  source 1..20: mol_type = other RNA
tgggctggggcagtgagccg

SEQ ID NO: 3945 - RNA, 20 nt, synthetic construct
  source 1..20: mol_type = other RNA
tgggcttgtggccggcttcc

SEQ ID NO: 3946 - RNA, 20 nt, synthetic construct
  source 1..20: mol_type = other RNA
tggggaagagacatccttgt

SEQ ID NO: 3947 - RNA, 20 nt, synthetic construct
  source 1..20: mol_type = other RNA
tggggaagccggccacaagc

SEQ ID NO: 3948 - RNA, 20 nt, synthetic construct
  source 1..20: mol_type = other RNA
tggggaaggccagctcggac

SEQ ID NO: 3949 - RNA, 20 nt, synthetic construct
  source 1..20: mol_type = other RNA
tggggagcctcgtgggactc

SEQ ID NO: 3950 - RNA, 20 nt, synthetic construct
  source 1..20: mol_type = other RNA
tggggaggacgccaagctgc

SEQ ID NO: 3951 - RNA, 20 nt, synthetic construct
  source 1..20: mol_type = other RNA
tggggcagtgagccgggcct

SEQ ID NO: 3952 - RNA, 20 nt, synthetic construct
  source 1..20: mol_type = other RNA
tgggggccctgtggctggct

SEQ ID NO: 3953 - RNA, 20 nt, synthetic construct
  source 1..20: mol_type = other RNA
tggggtcaatgctaggtact

SEQ ID NO: 3954 - RNA, 20 nt, synthetic construct
  source 1..20: mol_type = other RNA
tggggtgaggggcttgggga

SEQ ID NO: 3955 - RNA, 20 nt, synthetic construct
  source 1..20: mol_type = other RNA
tgggtgttggactaagcctt

SEQ ID NO: 3956 - RNA, 20 nt, synthetic construct
  source 1..20: mol_type = other RNA
tggtacaggagctccccggc

SEQ ID NO: 3957 - RNA, 20 nt, synthetic construct
  source 1..20: mol_type = other RNA
tggtcagggcaagagctatt

SEQ ID NO: 3958 - RNA, 20 nt, synthetic construct
  source 1..20: mol_type = other RNA
tggtccagagcctgagcaag

SEQ ID NO: 3959 - RNA, 20 nt, synthetic construct
  source 1..20: mol_type = other RNA
tggtcctcctgtagggtact

SEQ ID NO: 3960 - RNA, 20 nt, synthetic construct
  source 1..20: mol_type = other RNA
tggtgcaggccaggctggag

SEQ ID NO: 3961 - RNA, 20 nt, synthetic construct
  source 1..20: mol_type = other RNA
tggtgccgagcccgcaggcc

SEQ ID NO: 3962 - RNA, 20 nt, synthetic construct
  source 1..20: mol_type = other RNA
tggtgctctgtcatccctga

SEQ ID NO: 3963 - RNA, 20 nt, synthetic construct
  source 1..20: mol_type = other RNA
tgtaccacgtgctgccaaat

SEQ ID NO: 3964 - RNA, 20 nt, synthetic construct
  source 1..20: mol_type = other RNA
tgtactgggcaaggccttgg

SEQ ID NO: 3965 - RNA, 20 nt, synthetic construct
  source 1..20: mol_type = other RNA
tgtagggtactttgatgtct

SEQ ID NO: 3966 - RNA, 20 nt, synthetic construct
  source 1..20: mol_type = other RNA
tgtcacccgtttcaggtggg

SEQ ID NO: 3967 - RNA, 20 nt, synthetic construct
  source 1..20: mol_type = other RNA
tgtcagggtgggggtatgtg

SEQ ID NO: 3968 - RNA, 20 nt, synthetic construct
  source 1..20: mol_type = other RNA
tgtcatagggcctcttcttc

SEQ ID NO: 3969 - RNA, 20 nt, synthetic construct
  source 1..20: mol_type = other RNA
tgtcatccctgagctctcaa

SEQ ID NO: 3970 - RNA, 20 nt, synthetic construct
  source 1..20: mol_type = other RNA
tgtccaccgaggcagccgcc

SEQ ID NO: 3971 - RNA, 20 nt, synthetic construct
  source 1..20: mol_type = other RNA
tgtccccggctgcagccgct

SEQ ID NO: 3972 - RNA, 20 nt, synthetic construct
  source 1..20: mol_type = other RNA
tgtcccctgccattgcttga

SEQ ID NO: 3973 - RNA, 20 nt, synthetic construct
  source 1..20: mol_type = other RNA
tgtccggcttctccatggag

SEQ ID NO: 3974 - RNA, 20 nt, synthetic construct
  source 1..20: mol_type = other RNA
tgtcctgcagtgagcggtag

SEQ ID NO: 3975 - RNA, 20 nt, synthetic construct
  source 1..20: mol_type = other RNA
tgtccttgatttcgccactc

SEQ ID NO: 3976 - RNA, 20 nt, synthetic construct
  source 1..20: mol_type = other RNA
tgtcgagggctgcacggccc

SEQ ID NO: 3977 - RNA, 20 nt, synthetic construct
  source 1..20: mol_type = other RNA
tgtcggcctgctgggccgtg

SEQ ID NO: 3978 - RNA, 20 nt, synthetic construct
  source 1..20: mol_type = other RNA
tgtctcacgcggccgccggt

SEQ ID NO: 3979 - RNA, 20 nt, synthetic construct
  source 1..20: mol_type = other RNA
tgtctcttccccaagcccct

SEQ ID NO: 3980 - RNA, 20 nt, synthetic construct
  source 1..20: mol_type = other RNA
tgtctgcggcccagctccca

SEQ ID NO: 3981 - RNA, 20 nt, synthetic construct
  source 1..20: mol_type = other RNA
tgtcttctctgtcccctgcc

SEQ ID NO: 3982 - RNA, 20 nt, synthetic construct
  source 1..20: mol_type = other RNA
tgtcttggtgctctgtcatc

SEQ ID NO: 3983 - RNA, 20 nt, synthetic construct
  source 1..20: mol_type = other RNA
tgtgactgagaagaagtggc

SEQ ID NO: 3984 - RNA, 20 nt, synthetic construct
  source 1..20: mol_type = other RNA
tgtgaggaggagggtgcaac

SEQ ID NO: 3985 - RNA, 20 nt, synthetic construct
  source 1..20: mol_type = other RNA
tgtgcaggaagccatcttgc

SEQ ID NO: 3986 - RNA, 20 nt, synthetic construct
  source 1..20: mol_type = other RNA
tgtgcatcaggaggcgtgag

SEQ ID NO: 3987 - RNA, 20 nt, synthetic construct
  source 1..20: mol_type = other RNA
tgtgccagctctcagaggcc

SEQ ID NO: 3988 - RNA, 20 nt, synthetic construct
  source 1..20: mol_type = other RNA
tgtgccgggcagtgtgccag

SEQ ID NO: 3989 - RNA, 20 nt, synthetic construct
  source 1..20: mol_type = other RNA
tgtgctgggcaaagctggtc

SEQ ID NO: 3990 - RNA, 20 nt, synthetic construct
  source 1..20: mol_type = other RNA
tgtggccggcttccccagta

SEQ ID NO: 3991 - RNA, 20 nt, synthetic construct
  source 1..20: mol_type = other RNA
tgtggctgaaaacctcatcg

SEQ ID NO: 3992 - RNA, 20 nt, synthetic construct
  source 1..20: mol_type = other RNA
tgtggctggctctgagtggc

SEQ ID NO: 3993 - RNA, 20 nt, synthetic construct
  source 1..20: mol_type = other RNA
tgtggctgtgactgagaaga

SEQ ID NO: 3994 - RNA, 20 nt, synthetic construct
  source 1..20: mol_type = other RNA
tgtgggcccagggagaagag

SEQ ID NO: 3995 - RNA, 20 nt, synthetic construct
  source 1..20: mol_type = other RNA
tgtgtcacccgtttcaggtg

SEQ ID NO: 3996 - RNA, 20 nt, synthetic construct
  source 1..20: mol_type = other RNA
tgttggactaagcctttggc

SEQ ID NO: 3997 - RNA, 20 nt, synthetic construct
  source 1..20: mol_type = other RNA
tgttggctgccaaggagcac

SEQ ID NO: 3998 - RNA, 20 nt, synthetic construct
  source 1..20: mol_type = other RNA
ttagtccaacacccaccgcg

SEQ ID NO: 3999 - RNA, 20 nt, synthetic construct
  source 1..20: mol_type = other RNA
ttcaagatgtggctgaaaac

SEQ ID NO: 4000 - RNA, 20 nt, synthetic construct
  source 1..20: mol_type = other RNA
ttcaagcaatggcaggggac

SEQ ID NO: 4001 - RNA, 20 nt, synthetic construct
  source 1..20: mol_type = other RNA
ttcagccacatcttgaagag

SEQ ID NO: 4002 - RNA, 20 nt, synthetic construct
  source 1..20: mol_type = other RNA
ttcaggtacctcgcaagcac

SEQ ID NO: 4003 - RNA, 20 nt, synthetic construct
  source 1..20: mol_type = other RNA
ttcaggtggggtgaggggct

SEQ ID NO: 4004 - RNA, 20 nt, synthetic construct
  source 1..20: mol_type = other RNA
ttccagaagaagctgctccg

SEQ ID NO: 4005 - RNA, 20 nt, synthetic construct
  source 1..20: mol_type = other RNA
ttccagcctcccgcccgctg

SEQ ID NO: 4006 - RNA, 20 nt, synthetic construct
  source 1..20: mol_type = other RNA
ttccagcctcctcggcctcg

SEQ ID NO: 4007 - RNA, 20 nt, synthetic construct
  source 1..20: mol_type = other RNA
ttccagctcctcgaagccgt

SEQ ID NO: 4008 - RNA, 20 nt, synthetic construct
  source 1..20: mol_type = other RNA
ttcccatccgcagacgtgag

SEQ ID NO: 4009 - RNA, 20 nt, synthetic construct
  source 1..20: mol_type = other RNA
ttccccaagcccctcacccc

SEQ ID NO: 4010 - RNA, 20 nt, synthetic construct
  source 1..20: mol_type = other RNA
ttccccagcttcctcctgca

SEQ ID NO: 4011 - RNA, 20 nt, synthetic construct
  source 1..20: mol_type = other RNA
ttccccagtacgactttgtc

SEQ ID NO: 4012 - RNA, 20 nt, synthetic construct
  source 1..20: mol_type = other RNA
ttcccgctccaggctcttgc

SEQ ID NO: 4013 - RNA, 20 nt, synthetic construct
  source 1..20: mol_type = other RNA
ttcctcctgcaatgcttcct

SEQ ID NO: 4014 - RNA, 20 nt, synthetic construct
  source 1..20: mol_type = other RNA
ttcctgcacagcacgtgcgg

SEQ ID NO: 4015 - RNA, 20 nt, synthetic construct
  source 1..20: mol_type = other RNA
ttcctgggggccctgtggct

SEQ ID NO: 4016 - RNA, 20 nt, synthetic construct
  source 1..20: mol_type = other RNA
ttcctgtccaccgaggcagc

SEQ ID NO: 4017 - RNA, 20 nt, synthetic construct
  source 1..20: mol_type = other RNA
ttccttggggtcaatgctag

SEQ ID NO: 4018 - RNA, 20 nt, synthetic construct
  source 1..20: mol_type = other RNA
ttcgaggagctggaagcgca

SEQ ID NO: 4019 - RNA, 20 nt, synthetic construct
  source 1..20: mol_type = other RNA
ttcgccactcagagccagcc

SEQ ID NO: 4020 - RNA, 20 nt, synthetic construct
  source 1..20: mol_type = other RNA
ttctaccgctcactgcagga

SEQ ID NO: 4021 - RNA, 20 nt, synthetic construct
  source 1..20: mol_type = other RNA
ttctcagtcacagccacagc

SEQ ID NO: 4022 - RNA, 20 nt, synthetic construct
  source 1..20: mol_type = other RNA
ttctccatggagcaggccca

SEQ ID NO: 4023 - RNA, 20 nt, synthetic construct
  source 1..20: mol_type = other RNA
ttctccctggacctccgcag

SEQ ID NO: 4024 - RNA, 20 nt, synthetic construct
  source 1..20: mol_type = other RNA
ttctccctgggcccacagcc

SEQ ID NO: 4025 - RNA, 20 nt, synthetic construct
  source 1..20: mol_type = other RNA
ttctctgtcccctgccattg

SEQ ID NO: 4026 - RNA, 20 nt, synthetic construct
  source 1..20: mol_type = other RNA
ttctgcccagtccggggtgg

SEQ ID NO: 4027 - RNA, 20 nt, synthetic construct
  source 1..20: mol_type = other RNA
ttctgctcatcctagacggc

SEQ ID NO: 4028 - RNA, 20 nt, synthetic construct
  source 1..20: mol_type = other RNA
ttctgcttcctgtccaccga

SEQ ID NO: 4029 - RNA, 20 nt, synthetic construct
  source 1..20: mol_type = other RNA
ttctggaaaaggccggccag

SEQ ID NO: 4030 - RNA, 20 nt, synthetic construct
  source 1..20: mol_type = other RNA
ttctggctgggctgatcttc

SEQ ID NO: 4031 - RNA, 20 nt, synthetic construct
  source 1..20: mol_type = other RNA
ttctgggcacccgcctcacg

SEQ ID NO: 4032 - RNA, 20 nt, synthetic construct
  source 1..20: mol_type = other RNA
ttcttccttggggtcaatgc

SEQ ID NO: 4033 - RNA, 20 nt, synthetic construct
  source 1..20: mol_type = other RNA
ttcttctcagtcacagccac

SEQ ID NO: 4034 - RNA, 20 nt, synthetic construct
  source 1..20: mol_type = other RNA
ttcttctggaaaaggccggc

SEQ ID NO: 4035 - RNA, 20 nt, synthetic construct
  source 1..20: mol_type = other RNA
ttgaaccgtccgggggatgc

SEQ ID NO: 4036 - RNA, 20 nt, synthetic construct
  source 1..20: mol_type = other RNA
ttgaagagacctgaccgcgt

SEQ ID NO: 4037 - RNA, 20 nt, synthetic construct
  source 1..20: mol_type = other RNA
ttgaccccaaggaagaagag

SEQ ID NO: 4038 - RNA, 20 nt, synthetic construct
  source 1..20: mol_type = other RNA
ttgagagctcagggatgaca

SEQ ID NO: 4039 - RNA, 20 nt, synthetic construct
  source 1..20: mol_type = other RNA
ttgagctgtccggcttctcc

SEQ ID NO: 4040 - RNA, 20 nt, synthetic construct
  source 1..20: mol_type = other RNA
ttgatgtctgcggcccagct

SEQ ID NO: 4041 - RNA, 20 nt, synthetic construct
  source 1..20: mol_type = other RNA
ttgatttcgccactcagagc

SEQ ID NO: 4042 - RNA, 20 nt, synthetic construct
  source 1..20: mol_type = other RNA
ttgcaccctcctcctcacag

SEQ ID NO: 4043 - RNA, 20 nt, synthetic construct
  source 1..20: mol_type = other RNA
ttgcagagccggtggagcag

SEQ ID NO: 4044 - RNA, 20 nt, synthetic construct
  source 1..20: mol_type = other RNA
ttgcaggaggaagctgggga

SEQ ID NO: 4045 - RNA, 20 nt, synthetic construct
  source 1..20: mol_type = other RNA
ttgcccagcacagcaatcac

SEQ ID NO: 4046 - RNA, 20 nt, synthetic construct
  source 1..20: mol_type = other RNA
ttgcccagtacatgtgcatc

SEQ ID NO: 4047 - RNA, 20 nt, synthetic construct
  source 1..20: mol_type = other RNA
ttgcccctctggattgggga

SEQ ID NO: 4048 - RNA, 20 nt, synthetic construct
  source 1..20: mol_type = other RNA
ttgccctgaccagctttgcc

SEQ ID NO: 4049 - RNA, 20 nt, synthetic construct
  source 1..20: mol_type = other RNA
ttgcgaggtacctgaagcgg

SEQ ID NO: 4050 - RNA, 20 nt, synthetic construct
  source 1..20: mol_type = other RNA
ttgcgcttccagctcctcga

SEQ ID NO: 4051 - RNA, 20 nt, synthetic construct
  source 1..20: mol_type = other RNA
ttgctcaggctctggaccag

SEQ ID NO: 4052 - RNA, 20 nt, synthetic construct
  source 1..20: mol_type = other RNA
ttgctgctgctcctctccag

SEQ ID NO: 4053 - RNA, 20 nt, synthetic construct
  source 1..20: mol_type = other RNA
ttgctgtgctgggcaaagct

SEQ ID NO: 4054 - RNA, 20 nt, synthetic construct
  source 1..20: mol_type = other RNA
ttgcttgaaccgtccggggg

SEQ ID NO: 4055 - RNA, 20 nt, synthetic construct
  source 1..20: mol_type = other RNA
ttggactaagcctttggcca

SEQ ID NO: 4056 - RNA, 20 nt, synthetic construct
  source 1..20: mol_type = other RNA
ttggaggcggcgggccaaga

SEQ ID NO: 4057 - RNA, 20 nt, synthetic construct
  source 1..20: mol_type = other RNA
ttggcagcacgtggtacagg

SEQ ID NO: 4058 - RNA, 20 nt, synthetic construct
  source 1..20: mol_type = other RNA
ttggcagccaacagcacctc

SEQ ID NO: 4059 - RNA, 20 nt, synthetic construct
  source 1..20: mol_type = other RNA
ttggccagctctgccagggc

SEQ ID NO: 4060 - RNA, 20 nt, synthetic construct
  source 1..20: mol_type = other RNA
ttggccatcgcccaggtcct

SEQ ID NO: 4061 - RNA, 20 nt, synthetic construct
  source 1..20: mol_type = other RNA
ttggcccgccgcctccaagg

SEQ ID NO: 4062 - RNA, 20 nt, synthetic construct
  source 1..20: mol_type = other RNA
ttggcgtcctccccaagctc

SEQ ID NO: 4063 - RNA, 20 nt, synthetic construct
  source 1..20: mol_type = other RNA
ttggctgccaaggagcaccg

SEQ ID NO: 4064 - RNA, 20 nt, synthetic construct
  source 1..20: mol_type = other RNA
ttgggccagctgccgttctg

SEQ ID NO: 4065 - RNA, 20 nt, synthetic construct
  source 1..20: mol_type = other RNA
ttgggctggggcagtgagcc

SEQ ID NO: 4066 - RNA, 20 nt, synthetic construct
  source 1..20: mol_type = other RNA
ttggggaagagacatccttg

SEQ ID NO: 4067 - RNA, 20 nt, synthetic construct
  source 1..20: mol_type = other RNA
ttggggagcctcgtgggact

SEQ ID NO: 4068 - RNA, 20 nt, synthetic construct
  source 1..20: mol_type = other RNA
ttggggaggacgccaagctg

SEQ ID NO: 4069 - RNA, 20 nt, synthetic construct
  source 1..20: mol_type = other RNA
ttggggtcaatgctaggtac

SEQ ID NO: 4070 - RNA, 20 nt, synthetic construct
  source 1..20: mol_type = other RNA
ttggtgctctgtcatccctg

SEQ ID NO: 4071 - RNA, 20 nt, synthetic construct
  source 1..20: mol_type = other RNA
ttgtcatagggcctcttctt

SEQ ID NO: 4072 - RNA, 20 nt, synthetic construct
  source 1..20: mol_type = other RNA
ttgtccttgatttcgccact

SEQ ID NO: 4073 - RNA, 20 nt, synthetic construct
  source 1..20: mol_type = other RNA
ttgtcttctctgtcccctgc

SEQ ID NO: 4074 - RNA, 20 nt, synthetic construct
  source 1..20: mol_type = other RNA
ttgtgccgggcagtgtgcca

SEQ ID NO: 4075 - RNA, 20 nt, synthetic construct
  source 1..20: mol_type = other RNA
ttgtggccggcttccccagt

SEQ ID NO: 4076 - RNA, 20 nt, synthetic construct
  source 1..20: mol_type = other RNA
tttcagccacatcttgaaga

SEQ ID NO: 4077 - RNA, 20 nt, synthetic construct
  source 1..20: mol_type = other RNA
tttcaggtggggtgaggggc

SEQ ID NO: 4078 - RNA, 20 nt, synthetic construct
  source 1..20: mol_type = other RNA
tttccagaagaagctgctcc

SEQ ID NO: 4079 - RNA, 20 nt, synthetic construct
  source 1..20: mol_type = other RNA
tttcgccactcagagccagc

SEQ ID NO: 4080 - RNA, 20 nt, synthetic construct
  source 1..20: mol_type = other RNA
tttctggctgggctgatctt

SEQ ID NO: 4081 - RNA, 20 nt, synthetic construct
  source 1..20: mol_type = other RNA
tttctgggcacccgcctcac

SEQ ID NO: 4082 - RNA, 20 nt, synthetic construct
  source 1..20: mol_type = other RNA
tttgagagctcagggatgac

SEQ ID NO: 4083 - RNA, 20 nt, synthetic construct
  source 1..20: mol_type = other RNA
tttgagctgtccggcttctc

SEQ ID NO: 4084 - RNA, 20 nt, synthetic construct
  source 1..20: mol_type = other RNA
tttgatgtctgcggcccagc

SEQ ID NO: 4085 - RNA, 20 nt, synthetic construct
  source 1..20: mol_type = other RNA
tttgcagagccggtggagca

SEQ ID NO: 4086 - RNA, 20 nt, synthetic construct
  source 1..20: mol_type = other RNA
tttgcccagcacagcaatca

SEQ ID NO: 4087 - RNA, 20 nt, synthetic construct
  source 1..20: mol_type = other RNA
tttgcccctctggattgggg

SEQ ID NO: 4088 - RNA, 20 nt, synthetic construct
  source 1..20: mol_type = other RNA
tttggcagcacgtggtacag

SEQ ID NO: 4089 - RNA, 20 nt, synthetic construct
  source 1..20: mol_type = other RNA
tttggccatcgcccaggtcc

SEQ ID NO: 4090 - RNA, 20 nt, synthetic construct
  source 1..20: mol_type = other RNA
tttgtcttctctgtcccctg

SEQ ID NO: 4091 - RNA, 20 nt, synthetic construct
  source 1..20: mol_type = other RNA
tttgtgccgggcagtgtgcc

SEQ ID NO: 4092 - RNA, 20 nt, synthetic construct
  source 1..20: mol_type = other RNA
ttttcagccacatcttgaag

SEQ ID NO: 4093 - RNA, 20 nt, synthetic construct
  source 1..20: mol_type = other RNA
ttttccagaagaagctgctc

SEQ ID NO: 4094 - RNA, 20 nt, synthetic construct
  source 1..20: mol_type = other RNA
ttttctgggcacccgcctca

SEQ ID NO: 4095 - RNA, 21 nt, synthetic construct
  source 1..21: mol_type = other RNA
aaaacctcatcggccgccacg

SEQ ID NO: 4096 - RNA, 21 nt, synthetic construct
  source 1..21: mol_type = other RNA
aaaagagaggcggccggggag

SEQ ID NO: 4097 - RNA, 21 nt, synthetic construct
  source 1..21: mol_type = other RNA
aaaaggccggccagcagcccc

SEQ ID NO: 4098 - RNA, 21 nt, synthetic construct
  source 1..21: mol_type = other RNA
aaacctcatcggccgccacga

SEQ ID NO: 4099 - RNA, 21 nt, synthetic construct
  source 1..21: mol_type = other RNA
aaacgggtgacacagctgagt

SEQ ID NO: 4100 - RNA, 21 nt, synthetic construct
  source 1..21: mol_type = other RNA
aaagagaggcggccggggagc

SEQ ID NO: 4101 - RNA, 21 nt, synthetic construct
  source 1..21: mol_type = other RNA
aaagcgtggcacgccctccag

SEQ ID NO: 4102 - RNA, 21 nt, synthetic construct
  source 1..21: mol_type = other RNA
aaagctggtcagggcaagagc

SEQ ID NO: 4103 - RNA, 21 nt, synthetic construct
  source 1..21: mol_type = other RNA
aaaggccaggggcgtgtcagg

SEQ ID NO: 4104 - RNA, 21 nt, synthetic construct
  source 1..21: mol_type = other RNA
aaaggccggccagcagccccc

SEQ ID NO: 4105 - RNA, 21 nt, synthetic construct
  source 1..21: mol_type = other RNA
aaaggcttagtccaacaccca

SEQ ID NO: 4106 - RNA, 21 nt, synthetic construct
  source 1..21: mol_type = other RNA
aaagtaccctacaggaggacc

SEQ ID NO: 4107 - RNA, 21 nt, synthetic construct
  source 1..21: mol_type = other RNA
aaagtagcgcatcacgtatgc

SEQ ID NO: 4108 - RNA, 21 nt, synthetic construct
  source 1..21: mol_type = other RNA
aaagtagggctgtggctgtga

SEQ ID NO: 4109 - RNA, 21 nt, synthetic construct
  source 1..21: mol_type = other RNA
aaagtcgtactggggaagccg

SEQ ID NO: 4110 - RNA, 21 nt, synthetic construct
  source 1..21: mol_type = other RNA
aaatagggcgtcggccttgct

SEQ ID NO: 4111 - RNA, 21 nt, synthetic construct
  source 1..21: mol_type = other RNA
aaatcaaggacaaggagctcc

SEQ ID NO: 4112 - RNA, 21 nt, synthetic construct
  source 1..21: mol_type = other RNA
aaatgccagtgctgcggaggt

SEQ ID NO: 4113 - RNA, 21 nt, synthetic construct
  source 1..21: mol_type = other RNA
aaattccagcctcctcggcct

SEQ ID NO: 4114 - RNA, 21 nt, synthetic construct
  source 1..21: mol_type = other RNA
aacacaaggatgtctcttccc

SEQ ID NO: 4115 - RNA, 21 nt, synthetic construct
  source 1..21: mol_type = other RNA
aacacccaccgcgggccgcag

SEQ ID NO: 4116 - RNA, 21 nt, synthetic construct
  source 1..21: mol_type = other RNA
aacagcacctcagccaggcct

SEQ ID NO: 4117 - RNA, 21 nt, synthetic construct
  source 1..21: mol_type = other RNA
aaccgtccgggggatgcctat

SEQ ID NO: 4118 - RNA, 21 nt, synthetic construct
  source 1..21: mol_type = other RNA
aacctcatcggccgccacgag

SEQ ID NO: 4119 - RNA, 21 nt, synthetic construct
  source 1..21: mol_type = other RNA
aacctcggagcagcttcttct

SEQ ID NO: 4120 - RNA, 21 nt, synthetic construct
  source 1..21: mol_type = other RNA
aacgcggtcaggtctcttcaa

SEQ ID NO: 4121 - RNA, 21 nt, synthetic construct
  source 1..21: mol_type = other RNA
aacggcagctggcccaaggag

SEQ ID NO: 4122 - RNA, 21 nt, synthetic construct
  source 1..21: mol_type = other RNA
aacgggtgacacagctgagtc

SEQ ID NO: 4123 - RNA, 21 nt, synthetic construct
  source 1..21: mol_type = other RNA
aactgctccaccggctctgca

SEQ ID NO: 4124 - RNA, 21 nt, synthetic construct
  source 1..21: mol_type = other RNA
aactggccaccccggactggg

SEQ ID NO: 4125 - RNA, 21 nt, synthetic construct
  source 1..21: mol_type = other RNA
aactggctggagggcgtgcca

SEQ ID NO: 4126 - RNA, 21 nt, synthetic construct
  source 1..21: mol_type = other RNA
aactggtcctcctgtagggta

SEQ ID NO: 4127 - RNA, 21 nt, synthetic construct
  source 1..21: mol_type = other RNA
aagaagaggccctatgacaac

SEQ ID NO: 4128 - RNA, 21 nt, synthetic construct
  source 1..21: mol_type = other RNA
aagaagctgctccgaggttgc

SEQ ID NO: 4129 - RNA, 21 nt, synthetic construct
  source 1..21: mol_type = other RNA
aagaagtggccggtcccggag

SEQ ID NO: 4130 - RNA, 21 nt, synthetic construct
  source 1..21: mol_type = other RNA
aagacaaagtcgtactgggga

SEQ ID NO: 4131 - RNA, 21 nt, synthetic construct
  source 1..21: mol_type = other RNA
aagacagagccctgacgctcc

SEQ ID NO: 4132 - RNA, 21 nt, synthetic construct
  source 1..21: mol_type = other RNA
aagacttctccctggacctcc

SEQ ID NO: 4133 - RNA, 21 nt, synthetic construct
  source 1..21: mol_type = other RNA
aagagacctgaccgcgttctg

SEQ ID NO: 4134 - RNA, 21 nt, synthetic construct
  source 1..21: mol_type = other RNA
aagagaggcggccggggagct

SEQ ID NO: 4135 - RNA, 21 nt, synthetic construct
  source 1..21: mol_type = other RNA
aagagcagatcctgcaggcca

SEQ ID NO: 4136 - RNA, 21 nt, synthetic construct
  source 1..21: mol_type = other RNA
aagagcctggagcgggaactg

SEQ ID NO: 4137 - RNA, 21 nt, synthetic construct
  source 1..21: mol_type = other RNA
aagagctattgggctggggca

SEQ ID NO: 4138 - RNA, 21 nt, synthetic construct
  source 1..21: mol_type = other RNA
aagaggccctatgacaactgg

SEQ ID NO: 4139 - RNA, 21 nt, synthetic construct
  source 1..21: mol_type = other RNA
aagatcagcccagccagaaag

SEQ ID NO: 4140 - RNA, 21 nt, synthetic construct
  source 1..21: mol_type = other RNA
aagatggcttcctgcacagca

SEQ ID NO: 4141 - RNA, 21 nt, synthetic construct
  source 1..21: mol_type = other RNA
aagatgtggctgaaaacctca

SEQ ID NO: 4142 - RNA, 21 nt, synthetic construct
  source 1..21: mol_type = other RNA
aagcaatggcaggggacagag

SEQ ID NO: 4143 - RNA, 21 nt, synthetic construct
  source 1..21: mol_type = other RNA
aagcaccttctgcttcctgtc

SEQ ID NO: 4144 - RNA, 21 nt, synthetic construct
  source 1..21: mol_type = other RNA
aagcagaaggtgcttgcgagg

SEQ ID NO: 4145 - RNA, 21 nt, synthetic construct
  source 1..21: mol_type = other RNA
aagcattgcaggaggaagctg

SEQ ID NO: 4146 - RNA, 21 nt, synthetic construct
  source 1..21: mol_type = other RNA
aagccatcttgcgcttccagc

SEQ ID NO: 4147 - RNA, 21 nt, synthetic construct
  source 1..21: mol_type = other RNA
aagcccaggcccggctcactg

SEQ ID NO: 4148 - RNA, 21 nt, synthetic construct
  source 1..21: mol_type = other RNA
aagcccctcaccccacctgaa

SEQ ID NO: 4149 - RNA, 21 nt, synthetic construct
  source 1..21: mol_type = other RNA
aagccggacagctcaaatagg

SEQ ID NO: 4150 - RNA, 21 nt, synthetic construct
  source 1..21: mol_type = other RNA
aagccggccacaagcccaggc

SEQ ID NO: 4151 - RNA, 21 nt, synthetic construct
  source 1..21: mol_type = other RNA
aagccgtctaggatgagcaga

SEQ ID NO: 4152 - RNA, 21 nt, synthetic construct
  source 1..21: mol_type = other RNA
aagcctttggccatcgcccag

SEQ ID NO: 4153 - RNA, 21 nt, synthetic construct
  source 1..21: mol_type = other RNA
aagcgcaagatggcttcctgc

SEQ ID NO: 4154 - RNA, 21 nt, synthetic construct
  source 1..21: mol_type = other RNA
aagcggctgcagccggggaca

SEQ ID NO: 4155 - RNA, 21 nt, synthetic construct
  source 1..21: mol_type = other RNA
aagcgtggcacgccctccagc

SEQ ID NO: 4156 - RNA, 21 nt, synthetic construct
  source 1..21: mol_type = other RNA
aagctccagcagggcctctga

SEQ ID NO: 4157 - RNA, 21 nt, synthetic construct
  source 1..21: mol_type = other RNA
aagctgccctccacgctcacg

SEQ ID NO: 4158 - RNA, 21 nt, synthetic construct
  source 1..21: mol_type = other RNA
aagctgctccgaggttgcacc

SEQ ID NO: 4159 - RNA, 21 nt, synthetic construct
  source 1..21: mol_type = other RNA
aagctggcctgggagctgggc

SEQ ID NO: 4160 - RNA, 21 nt, synthetic construct
  source 1..21: mol_type = other RNA
aagctggggaaggccagctcg

SEQ ID NO: 4161 - RNA, 21 nt, synthetic construct
  source 1..21: mol_type = other RNA
aagctggtcagggcaagagct

SEQ ID NO: 4162 - RNA, 21 nt, synthetic construct
  source 1..21: mol_type = other RNA
aaggaagaagaggccctatga

SEQ ID NO: 4163 - RNA, 21 nt, synthetic construct
  source 1..21: mol_type = other RNA
aaggacaaggagctcccgcag

SEQ ID NO: 4164 - RNA, 21 nt, synthetic construct
  source 1..21: mol_type = other RNA
aaggagcaccggcggccgcgt

SEQ ID NO: 4165 - RNA, 21 nt, synthetic construct
  source 1..21: mol_type = other RNA
aaggagctcccgcagtaccta

SEQ ID NO: 4166 - RNA, 21 nt, synthetic construct
  source 1..21: mol_type = other RNA
aaggaggcctggctgaggtgc

SEQ ID NO: 4167 - RNA, 21 nt, synthetic construct
  source 1..21: mol_type = other RNA
aaggatgtctcttccccaagc

SEQ ID NO: 4168 - RNA, 21 nt, synthetic construct
  source 1..21: mol_type = other RNA
aaggccagctcggactctgcg

SEQ ID NO: 4169 - RNA, 21 nt, synthetic construct
  source 1..21: mol_type = other RNA
aaggccaggggcgtgtcaggg

SEQ ID NO: 4170 - RNA, 21 nt, synthetic construct
  source 1..21: mol_type = other RNA
aaggccgacgccctatttgag

SEQ ID NO: 4171 - RNA, 21 nt, synthetic construct
  source 1..21: mol_type = other RNA
aaggccttgcccagtacatgt

SEQ ID NO: 4172 - RNA, 21 nt, synthetic construct
  source 1..21: mol_type = other RNA
aaggccttggaggcggcgggc

SEQ ID NO: 4173 - RNA, 21 nt, synthetic construct
  source 1..21: mol_type = other RNA
aaggcttagtccaacacccac

SEQ ID NO: 4174 - RNA, 21 nt, synthetic construct
  source 1..21: mol_type = other RNA
aaggtgcttgcgaggtacctg

SEQ ID NO: 4175 - RNA, 21 nt, synthetic construct
  source 1..21: mol_type = other RNA
aagtaccctacaggaggacca

SEQ ID NO: 4176 - RNA, 21 nt, synthetic construct
  source 1..21: mol_type = other RNA
aagtagcgcatcacgtatgcc

SEQ ID NO: 4177 - RNA, 21 nt, synthetic construct
  source 1..21: mol_type = other RNA
aagtagggctgtggctgtgac

SEQ ID NO: 4178 - RNA, 21 nt, synthetic construct
  source 1..21: mol_type = other RNA
aagtcgtactggggaagccgg

SEQ ID NO: 4179 - RNA, 21 nt, synthetic construct
  source 1..21: mol_type = other RNA
aagtcttggcccgccgcctcc

SEQ ID NO: 4180 - RNA, 21 nt, synthetic construct
  source 1..21: mol_type = other RNA
aagtggccggtcccggaggag

SEQ ID NO: 4181 - RNA, 21 nt, synthetic construct
  source 1..21: mol_type = other RNA
aatagctcttgccctgaccag

SEQ ID NO: 4182 - RNA, 21 nt, synthetic construct
  source 1..21: mol_type = other RNA
aatagggcgtcggccttgctc

SEQ ID NO: 4183 - RNA, 21 nt, synthetic construct
  source 1..21: mol_type = other RNA
aatcaaggacaaggagctccc

SEQ ID NO: 4184 - RNA, 21 nt, synthetic construct
  source 1..21: mol_type = other RNA
aatcactcgtgtctcacgcgg

SEQ ID NO: 4185 - RNA, 21 nt, synthetic construct
  source 1..21: mol_type = other RNA
aatccagaggggcaaatgcca

SEQ ID NO: 4186 - RNA, 21 nt, synthetic construct
  source 1..21: mol_type = other RNA
aatgccagtgctgcggaggtc

SEQ ID NO: 4187 - RNA, 21 nt, synthetic construct
  source 1..21: mol_type = other RNA
aatgcccaacacaaggatgtc

SEQ ID NO: 4188 - RNA, 21 nt, synthetic construct
  source 1..21: mol_type = other RNA
aatgctaggtactgcgggagc

SEQ ID NO: 4189 - RNA, 21 nt, synthetic construct
  source 1..21: mol_type = other RNA
aatgcttcctgggggccctgt

SEQ ID NO: 4190 - RNA, 21 nt, synthetic construct
  source 1..21: mol_type = other RNA
aatggcaggggacagagaaga

SEQ ID NO: 4191 - RNA, 21 nt, synthetic construct
  source 1..21: mol_type = other RNA
aattccagcctcctcggcctc

SEQ ID NO: 4192 - RNA, 21 nt, synthetic construct
  source 1..21: mol_type = other RNA
aatttggcagcacgtggtaca

SEQ ID NO: 4193 - RNA, 21 nt, synthetic construct
  source 1..21: mol_type = other RNA
acaaagtagggctgtggctgt

SEQ ID NO: 4194 - RNA, 21 nt, synthetic construct
  source 1..21: mol_type = other RNA
acaaagtcgtactggggaagc

SEQ ID NO: 4195 - RNA, 21 nt, synthetic construct
  source 1..21: mol_type = other RNA
acaactggctggagggcgtgc

SEQ ID NO: 4196 - RNA, 21 nt, synthetic construct
  source 1..21: mol_type = other RNA
acaagcccaggcccggctcac

SEQ ID NO: 4197 - RNA, 21 nt, synthetic construct
  source 1..21: mol_type = other RNA
acaaggagctcccgcagtacc

SEQ ID NO: 4198 - RNA, 21 nt, synthetic construct
  source 1..21: mol_type = other RNA
acaaggatgtctcttccccaa

SEQ ID NO: 4199 - RNA, 21 nt, synthetic construct
  source 1..21: mol_type = other RNA
acacaaggatgtctcttcccc

SEQ ID NO: 4200 - RNA, 21 nt, synthetic construct
  source 1..21: mol_type = other RNA
acacagctgagtcccacgagg

SEQ ID NO: 4201 - RNA, 21 nt, synthetic construct
  source 1..21: mol_type = other RNA
acacccaccgcgggccgcaga

SEQ ID NO: 4202 - RNA, 21 nt, synthetic construct
  source 1..21: mol_type = other RNA
acacgagtgattgctgtgctg

SEQ ID NO: 4203 - RNA, 21 nt, synthetic construct
  source 1..21: mol_type = other RNA
acacgcccctggcctttgcag

SEQ ID NO: 4204 - RNA, 21 nt, synthetic construct
  source 1..21: mol_type = other RNA
acacgtatggtgccgagcccg

SEQ ID NO: 4205 - RNA, 21 nt, synthetic construct
  source 1..21: mol_type = other RNA
acactgcccggcacaaagtag

SEQ ID NO: 4206 - RNA, 21 nt, synthetic construct
  source 1..21: mol_type = other RNA
acactgcgggcgcggcagctg

SEQ ID NO: 4207 - RNA, 21 nt, synthetic construct
  source 1..21: mol_type = other RNA
acagagaagacaaagtcgtac

SEQ ID NO: 4208 - RNA, 21 nt, synthetic construct
  source 1..21: mol_type = other RNA
acagagcaccaagacagagcc

SEQ ID NO: 4209 - RNA, 21 nt, synthetic construct
  source 1..21: mol_type = other RNA
acagagccctgacgctcctcc

SEQ ID NO: 4210 - RNA, 21 nt, synthetic construct
  source 1..21: mol_type = other RNA
acagcaatcactcgtgtctca

SEQ ID NO: 4211 - RNA, 21 nt, synthetic construct
  source 1..21: mol_type = other RNA
acagcacctcagccaggcctc

SEQ ID NO: 4212 - RNA, 21 nt, synthetic construct
  source 1..21: mol_type = other RNA
acagcacgtgcggaccggcac

SEQ ID NO: 4213 - RNA, 21 nt, synthetic construct
  source 1..21: mol_type = other RNA
acagccacagccctactttgt

SEQ ID NO: 4214 - RNA, 21 nt, synthetic construct
  source 1..21: mol_type = other RNA
acagccactcgtggcggccga

SEQ ID NO: 4215 - RNA, 21 nt, synthetic construct
  source 1..21: mol_type = other RNA
acagccctactttgtgccggg

SEQ ID NO: 4216 - RNA, 21 nt, synthetic construct
  source 1..21: mol_type = other RNA
acagctcaaatagggcgtcgg

SEQ ID NO: 4217 - RNA, 21 nt, synthetic construct
  source 1..21: mol_type = other RNA
acagctgagtcccacgaggct

SEQ ID NO: 4218 - RNA, 21 nt, synthetic construct
  source 1..21: mol_type = other RNA
acaggaagcagaaggtgcttg

SEQ ID NO: 4219 - RNA, 21 nt, synthetic construct
  source 1..21: mol_type = other RNA
acaggagctccccggccgcct

SEQ ID NO: 4220 - RNA, 21 nt, synthetic construct
  source 1..21: mol_type = other RNA
acaggaggaccagttcccatc

SEQ ID NO: 4221 - RNA, 21 nt, synthetic construct
  source 1..21: mol_type = other RNA
acagggcccccaggaagcatt

SEQ ID NO: 4222 - RNA, 21 nt, synthetic construct
  source 1..21: mol_type = other RNA
acatacccccaccctgacacg

SEQ ID NO: 4223 - RNA, 21 nt, synthetic construct
  source 1..21: mol_type = other RNA
acatagagtcccgtgagcgtg

SEQ ID NO: 4224 - RNA, 21 nt, synthetic construct
  source 1..21: mol_type = other RNA
acatcaaagtaccctacagga

SEQ ID NO: 4225 - RNA, 21 nt, synthetic construct
  source 1..21: mol_type = other RNA
acatcttgaagagacctgacc

SEQ ID NO: 4226 - RNA, 21 nt, synthetic construct
  source 1..21: mol_type = other RNA
acatgtactgggcaaggcctt

SEQ ID NO: 4227 - RNA, 21 nt, synthetic construct
  source 1..21: mol_type = other RNA
acatgtgcatcaggaggcgtg

SEQ ID NO: 4228 - RNA, 21 nt, synthetic construct
  source 1..21: mol_type = other RNA
accaagacagagccctgacgc

SEQ ID NO: 4229 - RNA, 21 nt, synthetic construct
  source 1..21: mol_type = other RNA
accacgtgctgccaaattcca

SEQ ID NO: 4230 - RNA, 21 nt, synthetic construct
  source 1..21: mol_type = other RNA
accagatccacctccactagg

SEQ ID NO: 4231 - RNA, 21 nt, synthetic construct
  source 1..21: mol_type = other RNA
accagctttgcccagcacagc

SEQ ID NO: 4232 - RNA, 21 nt, synthetic construct
  source 1..21: mol_type = other RNA
accagttcccatccgcagacg

SEQ ID NO: 4233 - RNA, 21 nt, synthetic construct
  source 1..21: mol_type = other RNA
accatacgtgtcctgcagtga

SEQ ID NO: 4234 - RNA, 21 nt, synthetic construct
  source 1..21: mol_type = other RNA
acccaccgcgggccgcagagt

SEQ ID NO: 4235 - RNA, 21 nt, synthetic construct
  source 1..21: mol_type = other RNA
accccaaggaagaagaggccc

SEQ ID NO: 4236 - RNA, 21 nt, synthetic construct
  source 1..21: mol_type = other RNA
accccacctgaaacgggtgac

SEQ ID NO: 4237 - RNA, 21 nt, synthetic construct
  source 1..21: mol_type = other RNA
acccccaccctgacacgcccc

SEQ ID NO: 4238 - RNA, 21 nt, synthetic construct
  source 1..21: mol_type = other RNA
accccggactgggcagaacgg

SEQ ID NO: 4239 - RNA, 21 nt, synthetic construct
  source 1..21: mol_type = other RNA
acccgcctcacgcctcctgat

SEQ ID NO: 4240 - RNA, 21 nt, synthetic construct
  source 1..21: mol_type = other RNA
acccgtttcaggtggggtgag

SEQ ID NO: 4241 - RNA, 21 nt, synthetic construct
  source 1..21: mol_type = other RNA
accctacaggaggaccagttc

SEQ ID NO: 4242 - RNA, 21 nt, synthetic construct
  source 1..21: mol_type = other RNA
accctcctcctcacagcccgg

SEQ ID NO: 4243 - RNA, 21 nt, synthetic construct
  source 1..21: mol_type = other RNA
accctgacacgcccctggcct

SEQ ID NO: 4244 - RNA, 21 nt, synthetic construct
  source 1..21: mol_type = other RNA
accgaggcagccgccgatggc

SEQ ID NO: 4245 - RNA, 21 nt, synthetic construct
  source 1..21: mol_type = other RNA
accgcgggccgcagagtccga

SEQ ID NO: 4246 - RNA, 21 nt, synthetic construct
  source 1..21: mol_type = other RNA
accgcgttctgctcatcctag

SEQ ID NO: 4247 - RNA, 21 nt, synthetic construct
  source 1..21: mol_type = other RNA
accgctcactgcaggacacgt

SEQ ID NO: 4248 - RNA, 21 nt, synthetic construct
  source 1..21: mol_type = other RNA
accggccacttcttctcagtc

SEQ ID NO: 4249 - RNA, 21 nt, synthetic construct
  source 1..21: mol_type = other RNA
accggcggagccctgctccct

SEQ ID NO: 4250 - RNA, 21 nt, synthetic construct
  source 1..21: mol_type = other RNA
accggcggccgcgtgagacac

SEQ ID NO: 4251 - RNA, 21 nt, synthetic construct
  source 1..21: mol_type = other RNA
accggctctgcaaaggccagg

SEQ ID NO: 4252 - RNA, 21 nt, synthetic construct
  source 1..21: mol_type = other RNA
accgtccgggggatgcctatg

SEQ ID NO: 4253 - RNA, 21 nt, synthetic construct
  source 1..21: mol_type = other RNA
acctagcattgaccccaagga

SEQ ID NO: 4254 - RNA, 21 nt, synthetic construct
  source 1..21: mol_type = other RNA
acctcagccaggcctccttgg

SEQ ID NO: 4255 - RNA, 21 nt, synthetic construct
  source 1..21: mol_type = other RNA
acctcatcggccgccacgagt

SEQ ID NO: 4256 - RNA, 21 nt, synthetic construct
  source 1..21: mol_type = other RNA
acctccactaggatgccatcc

SEQ ID NO: 4257 - RNA, 21 nt, synthetic construct
  source 1..21: mol_type = other RNA
acctccgcagcactggcattt

SEQ ID NO: 4258 - RNA, 21 nt, synthetic construct
  source 1..21: mol_type = other RNA
acctcgcaagcaccttctgct

SEQ ID NO: 4259 - RNA, 21 nt, synthetic construct
  source 1..21: mol_type = other RNA
acctcggagcagcttcttctg

SEQ ID NO: 4260 - RNA, 21 nt, synthetic construct
  source 1..21: mol_type = other RNA
acctgaaacgggtgacacagc

SEQ ID NO: 4261 - RNA, 21 nt, synthetic construct
  source 1..21: mol_type = other RNA
acctgaagcggctgcagccgg

SEQ ID NO: 4262 - RNA, 21 nt, synthetic construct
  source 1..21: mol_type = other RNA
acctgaccgcgttctgctcat

SEQ ID NO: 4263 - RNA, 21 nt, synthetic construct
  source 1..21: mol_type = other RNA
acctgggcgatggccaaaggc

SEQ ID NO: 4264 - RNA, 21 nt, synthetic construct
  source 1..21: mol_type = other RNA
accttctgcttcctgtccacc

SEQ ID NO: 4265 - RNA, 21 nt, synthetic construct
  source 1..21: mol_type = other RNA
acgactttgtcttctctgtcc

SEQ ID NO: 4266 - RNA, 21 nt, synthetic construct
  source 1..21: mol_type = other RNA
acgaggccgaggaggctggaa

SEQ ID NO: 4267 - RNA, 21 nt, synthetic construct
  source 1..21: mol_type = other RNA
acgaggctccccaatccagag

SEQ ID NO: 4268 - RNA, 21 nt, synthetic construct
  source 1..21: mol_type = other RNA
acgagtgattgctgtgctggg

SEQ ID NO: 4269 - RNA, 21 nt, synthetic construct
  source 1..21: mol_type = other RNA
acgagtggctgtgggcccagg

SEQ ID NO: 4270 - RNA, 21 nt, synthetic construct
  source 1..21: mol_type = other RNA
acgccaagctgccctccacgc

SEQ ID NO: 4271 - RNA, 21 nt, synthetic construct
  source 1..21: mol_type = other RNA
acgcccctggcctttgcagag

SEQ ID NO: 4272 - RNA, 21 nt, synthetic construct
  source 1..21: mol_type = other RNA
acgccctatttgagctgtccg

SEQ ID NO: 4273 - RNA, 21 nt, synthetic construct
  source 1..21: mol_type = other RNA
acgccctccagccagttgtca

SEQ ID NO: 4274 - RNA, 21 nt, synthetic construct
  source 1..21: mol_type = other RNA
acgcctcctgatgcacatgta

SEQ ID NO: 4275 - RNA, 21 nt, synthetic construct
  source 1..21: mol_type = other RNA
acgcggccgccggtgctcctt

SEQ ID NO: 4276 - RNA, 21 nt, synthetic construct
  source 1..21: mol_type = other RNA
acgcggtcaggtctcttcaag

SEQ ID NO: 4277 - RNA, 21 nt, synthetic construct
  source 1..21: mol_type = other RNA
acgctcacgggactctatgtc

SEQ ID NO: 4278 - RNA, 21 nt, synthetic construct
  source 1..21: mol_type = other RNA
acgctcctccgggaccggcca

SEQ ID NO: 4279 - RNA, 21 nt, synthetic construct
  source 1..21: mol_type = other RNA
acgctttctggctgggctgat

SEQ ID NO: 4280 - RNA, 21 nt, synthetic construct
  source 1..21: mol_type = other RNA
acggcagctggcccaaggagg

SEQ ID NO: 4281 - RNA, 21 nt, synthetic construct
  source 1..21: mol_type = other RNA
acggcccagcaggccgacata

SEQ ID NO: 4282 - RNA, 21 nt, synthetic construct
  source 1..21: mol_type = other RNA
acggcttcgaggagctggaag

SEQ ID NO: 4283 - RNA, 21 nt, synthetic construct
  source 1..21: mol_type = other RNA
acgggactctatgtcggcctg

SEQ ID NO: 4284 - RNA, 21 nt, synthetic construct
  source 1..21: mol_type = other RNA
acgggtgacacagctgagtcc

SEQ ID NO: 4285 - RNA, 21 nt, synthetic construct
  source 1..21: mol_type = other RNA
acggttcaagcaatggcaggg

SEQ ID NO: 4286 - RNA, 21 nt, synthetic construct
  source 1..21: mol_type = other RNA
acgtatgcctgggcctgctcc

SEQ ID NO: 4287 - RNA, 21 nt, synthetic construct
  source 1..21: mol_type = other RNA
acgtatggtgccgagcccgca

SEQ ID NO: 4288 - RNA, 21 nt, synthetic construct
  source 1..21: mol_type = other RNA
acgtctgcggatgggaactgg

SEQ ID NO: 4289 - RNA, 21 nt, synthetic construct
  source 1..21: mol_type = other RNA
acgtgaggacctgggcgatgg

SEQ ID NO: 4290 - RNA, 21 nt, synthetic construct
  source 1..21: mol_type = other RNA
acgtgatgcgctactttgaga

SEQ ID NO: 4291 - RNA, 21 nt, synthetic construct
  source 1..21: mol_type = other RNA
acgtgctgccaaattccagcc

SEQ ID NO: 4292 - RNA, 21 nt, synthetic construct
  source 1..21: mol_type = other RNA
acgtgctgtgcaggaagccat

SEQ ID NO: 4293 - RNA, 21 nt, synthetic construct
  source 1..21: mol_type = other RNA
acgtggtacaggagctccccg

SEQ ID NO: 4294 - RNA, 21 nt, synthetic construct
  source 1..21: mol_type = other RNA
acgtgtcctgcagtgagcggt

SEQ ID NO: 4295 - RNA, 21 nt, synthetic construct
  source 1..21: mol_type = other RNA
actaagcctttggccatcgcc

SEQ ID NO: 4296 - RNA, 21 nt, synthetic construct
  source 1..21: mol_type = other RNA
actaggatgccatccgggcct

SEQ ID NO: 4297 - RNA, 21 nt, synthetic construct
  source 1..21: mol_type = other RNA
actcagagccagccacagggc

SEQ ID NO: 4298 - RNA, 21 nt, synthetic construct
  source 1..21: mol_type = other RNA
actcagctgtgtcacccgttt

SEQ ID NO: 4299 - RNA, 21 nt, synthetic construct
  source 1..21: mol_type = other RNA
actcgggccatcggcggctgc

SEQ ID NO: 4300 - RNA, 21 nt, synthetic construct
  source 1..21: mol_type = other RNA
actcgtggcggccgatgaggt

SEQ ID NO: 4301 - RNA, 21 nt, synthetic construct
  source 1..21: mol_type = other RNA
actcgtgtctcacgcggccgc

SEQ ID NO: 4302 - RNA, 21 nt, synthetic construct
  source 1..21: mol_type = other RNA
actctatgtcggcctgctggg

SEQ ID NO: 4303 - RNA, 21 nt, synthetic construct
  source 1..21: mol_type = other RNA
actctgcggcccgcggtgggt

SEQ ID NO: 4304 - RNA, 21 nt, synthetic construct
  source 1..21: mol_type = other RNA
actgagaagaagtggccggtc

SEQ ID NO: 4305 - RNA, 21 nt, synthetic construct
  source 1..21: mol_type = other RNA
actgcaggacacgtatggtgc

SEQ ID NO: 4306 - RNA, 21 nt, synthetic construct
  source 1..21: mol_type = other RNA
actgccccagcccaatagctc

SEQ ID NO: 4307 - RNA, 21 nt, synthetic construct
  source 1..21: mol_type = other RNA
actgcccggcacaaagtaggg

SEQ ID NO: 4308 - RNA, 21 nt, synthetic construct
  source 1..21: mol_type = other RNA
actgcgcccacgaggccgagg

SEQ ID NO: 4309 - RNA, 21 nt, synthetic construct
  source 1..21: mol_type = other RNA
actgcgggagctccttgtcct

SEQ ID NO: 4310 - RNA, 21 nt, synthetic construct
  source 1..21: mol_type = other RNA
actgcgggcgcggcagctgct

SEQ ID NO: 4311 - RNA, 21 nt, synthetic construct
  source 1..21: mol_type = other RNA
actgctccaccggctctgcaa

SEQ ID NO: 4312 - RNA, 21 nt, synthetic construct
  source 1..21: mol_type = other RNA
actggcatttgcccctctgga

SEQ ID NO: 4313 - RNA, 21 nt, synthetic construct
  source 1..21: mol_type = other RNA
actggccaccccggactgggc

SEQ ID NO: 4314 - RNA, 21 nt, synthetic construct
  source 1..21: mol_type = other RNA
actggctggagggcgtgccac

SEQ ID NO: 4315 - RNA, 21 nt, synthetic construct
  source 1..21: mol_type = other RNA
actgggcaaggccttggaggc

SEQ ID NO: 4316 - RNA, 21 nt, synthetic construct
  source 1..21: mol_type = other RNA
actgggcagaacggcagctgg

SEQ ID NO: 4317 - RNA, 21 nt, synthetic construct
  source 1..21: mol_type = other RNA
actggggaagccggccacaag

SEQ ID NO: 4318 - RNA, 21 nt, synthetic construct
  source 1..21: mol_type = other RNA
actggtcctcctgtagggtac

SEQ ID NO: 4319 - RNA, 21 nt, synthetic construct
  source 1..21: mol_type = other RNA
acttctccctggacctccgca

SEQ ID NO: 4320 - RNA, 21 nt, synthetic construct
  source 1..21: mol_type = other RNA
acttcttctcagtcacagcca

SEQ ID NO: 4321 - RNA, 21 nt, synthetic construct
  source 1..21: mol_type = other RNA
actttgagagctcagggatga

SEQ ID NO: 4322 - RNA, 21 nt, synthetic construct
  source 1..21: mol_type = other RNA
actttgatgtctgcggcccag

SEQ ID NO: 4323 - RNA, 21 nt, synthetic construct
  source 1..21: mol_type = other RNA
actttgtcttctctgtcccct

SEQ ID NO: 4324 - RNA, 21 nt, synthetic construct
  source 1..21: mol_type = other RNA
actttgtgccgggcagtgtgc

SEQ ID NO: 4325 - RNA, 21 nt, synthetic construct
  source 1..21: mol_type = other RNA
agaaaagagaggcggccgggg

SEQ ID NO: 4326 - RNA, 21 nt, synthetic construct
  source 1..21: mol_type = other RNA
agaaagcgtggcacgccctcc

SEQ ID NO: 4327 - RNA, 21 nt, synthetic construct
  source 1..21: mol_type = other RNA
agaacgcggtcaggtctcttc

SEQ ID NO: 4328 - RNA, 21 nt, synthetic construct
  source 1..21: mol_type = other RNA
agaacggcagctggcccaagg

SEQ ID NO: 4329 - RNA, 21 nt, synthetic construct
  source 1..21: mol_type = other RNA
agaactgctccaccggctctg

SEQ ID NO: 4330 - RNA, 21 nt, synthetic construct
  source 1..21: mol_type = other RNA
agaagaagctgctccgaggtt

SEQ ID NO: 4331 - RNA, 21 nt, synthetic construct
  source 1..21: mol_type = other RNA
agaagaagtggccggtcccgg

SEQ ID NO: 4332 - RNA, 21 nt, synthetic construct
  source 1..21: mol_type = other RNA
agaagacaaagtcgtactggg

SEQ ID NO: 4333 - RNA, 21 nt, synthetic construct
  source 1..21: mol_type = other RNA
agaagagcagatcctgcaggc

SEQ ID NO: 4334 - RNA, 21 nt, synthetic construct
  source 1..21: mol_type = other RNA
agaagaggccctatgacaact

SEQ ID NO: 4335 - RNA, 21 nt, synthetic construct
  source 1..21: mol_type = other RNA
agaagccggacagctcaaata

SEQ ID NO: 4336 - RNA, 21 nt, synthetic construct
  source 1..21: mol_type = other RNA
agaagctgctccgaggttgca

SEQ ID NO: 4337 - RNA, 21 nt, synthetic construct
  source 1..21: mol_type = other RNA
agaaggtgcttgcgaggtacc

SEQ ID NO: 4338 - RNA, 21 nt, synthetic construct
  source 1..21: mol_type = other RNA
agaagtcttggcccgccgcct

SEQ ID NO: 4339 - RNA, 21 nt, synthetic construct
  source 1..21: mol_type = other RNA
agaagtggccggtcccggagg

SEQ ID NO: 4340 - RNA, 21 nt, synthetic construct
  source 1..21: mol_type = other RNA
agacaaagtcgtactggggaa

SEQ ID NO: 4341 - RNA, 21 nt, synthetic construct
  source 1..21: mol_type = other RNA
agacacgagtgattgctgtgc

SEQ ID NO: 4342 - RNA, 21 nt, synthetic construct
  source 1..21: mol_type = other RNA
agacagagccctgacgctcct

SEQ ID NO: 4343 - RNA, 21 nt, synthetic construct
  source 1..21: mol_type = other RNA
agacatcaaagtaccctacag

SEQ ID NO: 4344 - RNA, 21 nt, synthetic construct
  source 1..21: mol_type = other RNA
agacctgaccgcgttctgctc

SEQ ID NO: 4345 - RNA, 21 nt, synthetic construct
  source 1..21: mol_type = other RNA
agacggcttcgaggagctgga

SEQ ID NO: 4346 - RNA, 21 nt, synthetic construct
  source 1..21: mol_type = other RNA
agacgtgaggacctgggcgat

SEQ ID NO: 4347 - RNA, 21 nt, synthetic construct
  source 1..21: mol_type = other RNA
agacttctccctggacctccg

SEQ ID NO: 4348 - RNA, 21 nt, synthetic construct
  source 1..21: mol_type = other RNA
agagaagacaaagtcgtactg

SEQ ID NO: 4349 - RNA, 21 nt, synthetic construct
  source 1..21: mol_type = other RNA
agagacctgaccgcgttctgc

SEQ ID NO: 4350 - RNA, 21 nt, synthetic construct
  source 1..21: mol_type = other RNA
agagaggcggccggggagctc

SEQ ID NO: 4351 - RNA, 21 nt, synthetic construct
  source 1..21: mol_type = other RNA
agagcaccaagacagagccct

SEQ ID NO: 4352 - RNA, 21 nt, synthetic construct
  source 1..21: mol_type = other RNA
agagcagatcctgcaggccat

SEQ ID NO: 4353 - RNA, 21 nt, synthetic construct
  source 1..21: mol_type = other RNA
agagccagccacagggccccc

SEQ ID NO: 4354 - RNA, 21 nt, synthetic construct
  source 1..21: mol_type = other RNA
agagccctgacgctcctccgg

SEQ ID NO: 4355 - RNA, 21 nt, synthetic construct
  source 1..21: mol_type = other RNA
agagccggtggagcagttcta

SEQ ID NO: 4356 - RNA, 21 nt, synthetic construct
  source 1..21: mol_type = other RNA
agagcctgagcaaggccgacg

SEQ ID NO: 4357 - RNA, 21 nt, synthetic construct
  source 1..21: mol_type = other RNA
agagcctggagcgggaactgg

SEQ ID NO: 4358 - RNA, 21 nt, synthetic construct
  source 1..21: mol_type = other RNA
agagctattgggctggggcag

SEQ ID NO: 4359 - RNA, 21 nt, synthetic construct
  source 1..21: mol_type = other RNA
agagctcagggatgacagagc

SEQ ID NO: 4360 - RNA, 21 nt, synthetic construct
  source 1..21: mol_type = other RNA
agagctggcacactgcccggc

SEQ ID NO: 4361 - RNA, 21 nt, synthetic construct
  source 1..21: mol_type = other RNA
agagctggccaagctggcctg

SEQ ID NO: 4362 - RNA, 21 nt, synthetic construct
  source 1..21: mol_type = other RNA
agaggagcagcagcaagagcc

SEQ ID NO: 4363 - RNA, 21 nt, synthetic construct
  source 1..21: mol_type = other RNA
agaggccctatgacaactggc

SEQ ID NO: 4364 - RNA, 21 nt, synthetic construct
  source 1..21: mol_type = other RNA
agaggccctgctggagcttgg

SEQ ID NO: 4365 - RNA, 21 nt, synthetic construct
  source 1..21: mol_type = other RNA
agaggcggccggggagctcct

SEQ ID NO: 4366 - RNA, 21 nt, synthetic construct
  source 1..21: mol_type = other RNA
agaggggcaaatgccagtgct

SEQ ID NO: 4367 - RNA, 21 nt, synthetic construct
  source 1..21: mol_type = other RNA
agagtcccgtgagcgtggagg

SEQ ID NO: 4368 - RNA, 21 nt, synthetic construct
  source 1..21: mol_type = other RNA
agagtccgagctggccttccc

SEQ ID NO: 4369 - RNA, 21 nt, synthetic construct
  source 1..21: mol_type = other RNA
agatcagcccagccagaaagc

SEQ ID NO: 4370 - RNA, 21 nt, synthetic construct
  source 1..21: mol_type = other RNA
agatccacctccactaggatg

SEQ ID NO: 4371 - RNA, 21 nt, synthetic construct
  source 1..21: mol_type = other RNA
agatcctgcaggccataggca

SEQ ID NO: 4372 - RNA, 21 nt, synthetic construct
  source 1..21: mol_type = other RNA
agatggcttcctgcacagcac

SEQ ID NO: 4373 - RNA, 21 nt, synthetic construct
  source 1..21: mol_type = other RNA
agatgtggctgaaaacctcat

SEQ ID NO: 4374 - RNA, 21 nt, synthetic construct
  source 1..21: mol_type = other RNA
agcaagagcctggagcgggaa

SEQ ID NO: 4375 - RNA, 21 nt, synthetic construct
  source 1..21: mol_type = other RNA
agcaaggccgacgccctattt

SEQ ID NO: 4376 - RNA, 21 nt, synthetic construct
  source 1..21: mol_type = other RNA
agcaatcactcgtgtctcacg

SEQ ID NO: 4377 - RNA, 21 nt, synthetic construct
  source 1..21: mol_type = other RNA
agcaatggcaggggacagaga

SEQ ID NO: 4378 - RNA, 21 nt, synthetic construct
  source 1..21: mol_type = other RNA
agcacagcaatcactcgtgtc

SEQ ID NO: 4379 - RNA, 21 nt, synthetic construct
  source 1..21: mol_type = other RNA
agcaccaagacagagccctga

SEQ ID NO: 4380 - RNA, 21 nt, synthetic construct
  source 1..21: mol_type = other RNA
agcaccggcggccgcgtgaga

SEQ ID NO: 4381 - RNA, 21 nt, synthetic construct
  source 1..21: mol_type = other RNA
agcacctcagccaggcctcct

SEQ ID NO: 4382 - RNA, 21 nt, synthetic construct
  source 1..21: mol_type = other RNA
agcaccttctgcttcctgtcc

SEQ ID NO: 4383 - RNA, 21 nt, synthetic construct
  source 1..21: mol_type = other RNA
agcacgtgcggaccggcaccg

SEQ ID NO: 4384 - RNA, 21 nt, synthetic construct
  source 1..21: mol_type = other RNA
agcacgtggtacaggagctcc

SEQ ID NO: 4385 - RNA, 21 nt, synthetic construct
  source 1..21: mol_type = other RNA
agcactggcatttgcccctct

SEQ ID NO: 4386 - RNA, 21 nt, synthetic construct
  source 1..21: mol_type = other RNA
agcagaacgcggtcaggtctc

SEQ ID NO: 4387 - RNA, 21 nt, synthetic construct
  source 1..21: mol_type = other RNA
agcagaaggtgcttgcgaggt

SEQ ID NO: 4388 - RNA, 21 nt, synthetic construct
  source 1..21: mol_type = other RNA
agcagatcctgcaggccatag

SEQ ID NO: 4389 - RNA, 21 nt, synthetic construct
  source 1..21: mol_type = other RNA
agcagcaagagcctggagcgg

SEQ ID NO: 4390 - RNA, 21 nt, synthetic construct
  source 1..21: mol_type = other RNA
agcagcagcaagagcctggag

SEQ ID NO: 4391 - RNA, 21 nt, synthetic construct
  source 1..21: mol_type = other RNA
agcagcccccggagggagcag

SEQ ID NO: 4392 - RNA, 21 nt, synthetic construct
  source 1..21: mol_type = other RNA
agcagctccagcagctgccgc

SEQ ID NO: 4393 - RNA, 21 nt, synthetic construct
  source 1..21: mol_type = other RNA
agcagctgccgcgcccgcagt

SEQ ID NO: 4394 - RNA, 21 nt, synthetic construct
  source 1..21: mol_type = other RNA
agcagcttcttctggaaaagg

SEQ ID NO: 4395 - RNA, 21 nt, synthetic construct
  source 1..21: mol_type = other RNA
agcaggcccaggcatacgtga

SEQ ID NO: 4396 - RNA, 21 nt, synthetic construct
  source 1..21: mol_type = other RNA
agcaggccgacatagagtccc

SEQ ID NO: 4397 - RNA, 21 nt, synthetic construct
  source 1..21: mol_type = other RNA
agcagggcctctgagagctgg

SEQ ID NO: 4398 - RNA, 21 nt, synthetic construct
  source 1..21: mol_type = other RNA
agcagttctaccgctcactgc

SEQ ID NO: 4399 - RNA, 21 nt, synthetic construct
  source 1..21: mol_type = other RNA
agcattgaccccaaggaagaa

SEQ ID NO: 4400 - RNA, 21 nt, synthetic construct
  source 1..21: mol_type = other RNA
agcattgcaggaggaagctgg

SEQ ID NO: 4401 - RNA, 21 nt, synthetic construct
  source 1..21: mol_type = other RNA
agccaacagcacctcagccag

SEQ ID NO: 4402 - RNA, 21 nt, synthetic construct
  source 1..21: mol_type = other RNA
agccacagccctactttgtgc

SEQ ID NO: 4403 - RNA, 21 nt, synthetic construct
  source 1..21: mol_type = other RNA
agccacagggcccccaggaag

SEQ ID NO: 4404 - RNA, 21 nt, synthetic construct
  source 1..21: mol_type = other RNA
agccacatcttgaagagacct

SEQ ID NO: 4405 - RNA, 21 nt, synthetic construct
  source 1..21: mol_type = other RNA
agccactcgtggcggccgatg

SEQ ID NO: 4406 - RNA, 21 nt, synthetic construct
  source 1..21: mol_type = other RNA
agccagaaagcgtggcacgcc

SEQ ID NO: 4407 - RNA, 21 nt, synthetic construct
  source 1..21: mol_type = other RNA
agccagccacagggcccccag

SEQ ID NO: 4408 - RNA, 21 nt, synthetic construct
  source 1..21: mol_type = other RNA
agccaggcctccttgggccag

SEQ ID NO: 4409 - RNA, 21 nt, synthetic construct
  source 1..21: mol_type = other RNA
agccagttgtcatagggcctc

SEQ ID NO: 4410 - RNA, 21 nt, synthetic construct
  source 1..21: mol_type = other RNA
agccatcttgcgcttccagct

SEQ ID NO: 4411 - RNA, 21 nt, synthetic construct
  source 1..21: mol_type = other RNA
agcccaatagctcttgccctg

SEQ ID NO: 4412 - RNA, 21 nt, synthetic construct
  source 1..21: mol_type = other RNA
agcccagccagaaagcgtggc

SEQ ID NO: 4413 - RNA, 21 nt, synthetic construct
  source 1..21: mol_type = other RNA
agcccaggcccggctcactgc

SEQ ID NO: 4414 - RNA, 21 nt, synthetic construct
  source 1..21: mol_type = other RNA
agcccctcaccccacctgaaa

SEQ ID NO: 4415 - RNA, 21 nt, synthetic construct
  source 1..21: mol_type = other RNA
agcccgcaggcccggatggca

SEQ ID NO: 4416 - RNA, 21 nt, synthetic construct
  source 1..21: mol_type = other RNA
agccctactcgggccatcggc

SEQ ID NO: 4417 - RNA, 21 nt, synthetic construct
  source 1..21: mol_type = other RNA
agccctactttgtgccgggca

SEQ ID NO: 4418 - RNA, 21 nt, synthetic construct
  source 1..21: mol_type = other RNA
agccctgacgctcctccggga

SEQ ID NO: 4419 - RNA, 21 nt, synthetic construct
  source 1..21: mol_type = other RNA
agccgccgatggcccgagtag

SEQ ID NO: 4420 - RNA, 21 nt, synthetic construct
  source 1..21: mol_type = other RNA
agccgcttcaggtacctcgca

SEQ ID NO: 4421 - RNA, 21 nt, synthetic construct
  source 1..21: mol_type = other RNA
agccggacagctcaaataggg

SEQ ID NO: 4422 - RNA, 21 nt, synthetic construct
  source 1..21: mol_type = other RNA
agccggccacaagcccaggcc

SEQ ID NO: 4423 - RNA, 21 nt, synthetic construct
  source 1..21: mol_type = other RNA
agccgggcctgggcttgtggc

SEQ ID NO: 4424 - RNA, 21 nt, synthetic construct
  source 1..21: mol_type = other RNA
agccggtggagcagttctacc

SEQ ID NO: 4425 - RNA, 21 nt, synthetic construct
  source 1..21: mol_type = other RNA
agccgtctaggatgagcagaa

SEQ ID NO: 4426 - RNA, 21 nt, synthetic construct
  source 1..21: mol_type = other RNA
agcctcctcggcctcgtgggc

SEQ ID NO: 4427 - RNA, 21 nt, synthetic construct
  source 1..21: mol_type = other RNA
agcctcgtgggactcagctgt

SEQ ID NO: 4428 - RNA, 21 nt, synthetic construct
  source 1..21: mol_type = other RNA
agcctgagcaaggccgacgcc

SEQ ID NO: 4429 - RNA, 21 nt, synthetic construct
  source 1..21: mol_type = other RNA
agcctggagcgggaactggcc

SEQ ID NO: 4430 - RNA, 21 nt, synthetic construct
  source 1..21: mol_type = other RNA
agcctggcctgcaccagatcc

SEQ ID NO: 4431 - RNA, 21 nt, synthetic construct
  source 1..21: mol_type = other RNA
agcctttggccatcgcccagg

SEQ ID NO: 4432 - RNA, 21 nt, synthetic construct
  source 1..21: mol_type = other RNA
agcgcaagatggcttcctgca

SEQ ID NO: 4433 - RNA, 21 nt, synthetic construct
  source 1..21: mol_type = other RNA
agcgcatcacgtatgcctggg

SEQ ID NO: 4434 - RNA, 21 nt, synthetic construct
  source 1..21: mol_type = other RNA
agcggctgcagccggggacac

SEQ ID NO: 4435 - RNA, 21 nt, synthetic construct
  source 1..21: mol_type = other RNA
agcgggaactggccaccccgg

SEQ ID NO: 4436 - RNA, 21 nt, synthetic construct
  source 1..21: mol_type = other RNA
agcgggcgggaggctggaaga

SEQ ID NO: 4437 - RNA, 21 nt, synthetic construct
  source 1..21: mol_type = other RNA
agcggtagaactgctccaccg

SEQ ID NO: 4438 - RNA, 21 nt, synthetic construct
  source 1..21: mol_type = other RNA
agcgtcagggctctgtcttgg

SEQ ID NO: 4439 - RNA, 21 nt, synthetic construct
  source 1..21: mol_type = other RNA
agcgtggagggcagcttggcg

SEQ ID NO: 4440 - RNA, 21 nt, synthetic construct
  source 1..21: mol_type = other RNA
agcgtggcacgccctccagcc

SEQ ID NO: 4441 - RNA, 21 nt, synthetic construct
  source 1..21: mol_type = other RNA
agctattgggctggggcagtg

SEQ ID NO: 4442 - RNA, 21 nt, synthetic construct
  source 1..21: mol_type = other RNA
agctcaaatagggcgtcggcc

SEQ ID NO: 4443 - RNA, 21 nt, synthetic construct
  source 1..21: mol_type = other RNA
agctcagggatgacagagcac

SEQ ID NO: 4444 - RNA, 21 nt, synthetic construct
  source 1..21: mol_type = other RNA
agctccagcagctgccgcgcc

SEQ ID NO: 4445 - RNA, 21 nt, synthetic construct
  source 1..21: mol_type = other RNA
agctccagcagggcctctgag

SEQ ID NO: 4446 - RNA, 21 nt, synthetic construct
  source 1..21: mol_type = other RNA
agctcccaggccagcttggcc

SEQ ID NO: 4447 - RNA, 21 nt, synthetic construct
  source 1..21: mol_type = other RNA
agctccccggccgcctctctt

SEQ ID NO: 4448 - RNA, 21 nt, synthetic construct
  source 1..21: mol_type = other RNA
agctcccgcagtacctagcat

SEQ ID NO: 4449 - RNA, 21 nt, synthetic construct
  source 1..21: mol_type = other RNA
agctcctcgaagccgtctagg

SEQ ID NO: 4450 - RNA, 21 nt, synthetic construct
  source 1..21: mol_type = other RNA
agctcctgtaccacgtgctgc

SEQ ID NO: 4451 - RNA, 21 nt, synthetic construct
  source 1..21: mol_type = other RNA
agctccttgtccttgatttcg

SEQ ID NO: 4452 - RNA, 21 nt, synthetic construct
  source 1..21: mol_type = other RNA
agctcggactctgcggcccgc

SEQ ID NO: 4453 - RNA, 21 nt, synthetic construct
  source 1..21: mol_type = other RNA
agctctcaaagtagcgcatca

SEQ ID NO: 4454 - RNA, 21 nt, synthetic construct
  source 1..21: mol_type = other RNA
agctctcagaggccctgctgg

SEQ ID NO: 4455 - RNA, 21 nt, synthetic construct
  source 1..21: mol_type = other RNA
agctcttgccctgaccagctt

SEQ ID NO: 4456 - RNA, 21 nt, synthetic construct
  source 1..21: mol_type = other RNA
agctgagtcccacgaggctcc

SEQ ID NO: 4457 - RNA, 21 nt, synthetic construct
  source 1..21: mol_type = other RNA
agctgccctccacgctcacgg

SEQ ID NO: 4458 - RNA, 21 nt, synthetic construct
  source 1..21: mol_type = other RNA
agctgccgcgcccgcagtgtc

SEQ ID NO: 4459 - RNA, 21 nt, synthetic construct
  source 1..21: mol_type = other RNA
agctgccgttctgcccagtcc

SEQ ID NO: 4460 - RNA, 21 nt, synthetic construct
  source 1..21: mol_type = other RNA
agctgctccgaggttgcaccc

SEQ ID NO: 4461 - RNA, 21 nt, synthetic construct
  source 1..21: mol_type = other RNA
agctgctgcactgcgcccacg

SEQ ID NO: 4462 - RNA, 21 nt, synthetic construct
  source 1..21: mol_type = other RNA
agctgctggagctgctgcact

SEQ ID NO: 4463 - RNA, 21 nt, synthetic construct
  source 1..21: mol_type = other RNA
agctggaagcgcaagatggct

SEQ ID NO: 4464 - RNA, 21 nt, synthetic construct
  source 1..21: mol_type = other RNA
agctggcacactgcccggcac

SEQ ID NO: 4465 - RNA, 21 nt, synthetic construct
  source 1..21: mol_type = other RNA
agctggccaagctggcctggg

SEQ ID NO: 4466 - RNA, 21 nt, synthetic construct
  source 1..21: mol_type = other RNA
agctggcccaaggaggcctgg

SEQ ID NO: 4467 - RNA, 21 nt, synthetic construct
  source 1..21: mol_type = other RNA
agctggcctgggagctgggcc

SEQ ID NO: 4468 - RNA, 21 nt, synthetic construct
  source 1..21: mol_type = other RNA
agctggccttccccagcttcc

SEQ ID NO: 4469 - RNA, 21 nt, synthetic construct
  source 1..21: mol_type = other RNA
agctgggccgcagacatcaaa

SEQ ID NO: 4470 - RNA, 21 nt, synthetic construct
  source 1..21: mol_type = other RNA
agctggggaaggccagctcgg

SEQ ID NO: 4471 - RNA, 21 nt, synthetic construct
  source 1..21: mol_type = other RNA
agctggtcagggcaagagcta

SEQ ID NO: 4472 - RNA, 21 nt, synthetic construct
  source 1..21: mol_type = other RNA
agctgtccggcttctccatgg

SEQ ID NO: 4473 - RNA, 21 nt, synthetic construct
  source 1..21: mol_type = other RNA
agctgtgtcacccgtttcagg

SEQ ID NO: 4474 - RNA, 21 nt, synthetic construct
  source 1..21: mol_type = other RNA
agcttcctcctgcaatgcttc

SEQ ID NO: 4475 - RNA, 21 nt, synthetic construct
  source 1..21: mol_type = other RNA
agcttcttctggaaaaggccg

SEQ ID NO: 4476 - RNA, 21 nt, synthetic construct
  source 1..21: mol_type = other RNA
agcttggccagctctgccagg

SEQ ID NO: 4477 - RNA, 21 nt, synthetic construct
  source 1..21: mol_type = other RNA
agcttggcgtcctccccaagc

SEQ ID NO: 4478 - RNA, 21 nt, synthetic construct
  source 1..21: mol_type = other RNA
agcttggggaggacgccaagc

SEQ ID NO: 4479 - RNA, 21 nt, synthetic construct
  source 1..21: mol_type = other RNA
agctttgcccagcacagcaat

SEQ ID NO: 4480 - RNA, 21 nt, synthetic construct
  source 1..21: mol_type = other RNA
aggaagaagaggccctatgac

SEQ ID NO: 4481 - RNA, 21 nt, synthetic construct
  source 1..21: mol_type = other RNA
aggaagcagaaggtgcttgcg

SEQ ID NO: 4482 - RNA, 21 nt, synthetic construct
  source 1..21: mol_type = other RNA
aggaagcattgcaggaggaag

SEQ ID NO: 4483 - RNA, 21 nt, synthetic construct
  source 1..21: mol_type = other RNA
aggaagccatcttgcgcttcc

SEQ ID NO: 4484 - RNA, 21 nt, synthetic construct
  source 1..21: mol_type = other RNA
aggaagctggggaaggccagc

SEQ ID NO: 4485 - RNA, 21 nt, synthetic construct
  source 1..21: mol_type = other RNA
aggacaaggagctcccgcagt

SEQ ID NO: 4486 - RNA, 21 nt, synthetic construct
  source 1..21: mol_type = other RNA
aggacacgtatggtgccgagc

SEQ ID NO: 4487 - RNA, 21 nt, synthetic construct
  source 1..21: mol_type = other RNA
aggaccagttcccatccgcag

SEQ ID NO: 4488 - RNA, 21 nt, synthetic construct
  source 1..21: mol_type = other RNA
aggacctgggcgatggccaaa

SEQ ID NO: 4489 - RNA, 21 nt, synthetic construct
  source 1..21: mol_type = other RNA
aggacgccaagctgccctcca

SEQ ID NO: 4490 - RNA, 21 nt, synthetic construct
  source 1..21: mol_type = other RNA
aggagcagcagcaagagcctg

SEQ ID NO: 4491 - RNA, 21 nt, synthetic construct
  source 1..21: mol_type = other RNA
aggagcgtcagggctctgtct

SEQ ID NO: 4492 - RNA, 21 nt, synthetic construct
  source 1..21: mol_type = other RNA
aggagctccccggccgcctct

SEQ ID NO: 4493 - RNA, 21 nt, synthetic construct
  source 1..21: mol_type = other RNA
aggagctcccgcagtacctag

SEQ ID NO: 4494 - RNA, 21 nt, synthetic construct
  source 1..21: mol_type = other RNA
aggagctggaagcgcaagatg

SEQ ID NO: 4495 - RNA, 21 nt, synthetic construct
  source 1..21: mol_type = other RNA
aggaggaagctggggaaggcc

SEQ ID NO: 4496 - RNA, 21 nt, synthetic construct
  source 1..21: mol_type = other RNA
aggaggaccagttcccatccg

SEQ ID NO: 4497 - RNA, 21 nt, synthetic construct
  source 1..21: mol_type = other RNA
aggaggagggtgcaacctcgg

SEQ ID NO: 4498 - RNA, 21 nt, synthetic construct
  source 1..21: mol_type = other RNA
aggaggcctggctgaggtgct

SEQ ID NO: 4499 - RNA, 21 nt, synthetic construct
  source 1..21: mol_type = other RNA
aggaggcgtgaggcgggtgcc

SEQ ID NO: 4500 - RNA, 21 nt, synthetic construct
  source 1..21: mol_type = other RNA
aggaggctggaatttggcagc

SEQ ID NO: 4501 - RNA, 21 nt, synthetic construct
  source 1..21: mol_type = other RNA
aggagggtgcaacctcggagc

SEQ ID NO: 4502 - RNA, 21 nt, synthetic construct
  source 1..21: mol_type = other RNA
aggatctgctcttctccctgg

SEQ ID NO: 4503 - RNA, 21 nt, synthetic construct
  source 1..21: mol_type = other RNA
aggatgagcagaacgcggtca

SEQ ID NO: 4504 - RNA, 21 nt, synthetic construct
  source 1..21: mol_type = other RNA
aggatgccatccgggcctgcg

SEQ ID NO: 4505 - RNA, 21 nt, synthetic construct
  source 1..21: mol_type = other RNA
aggatgtctcttccccaagcc

SEQ ID NO: 4506 - RNA, 21 nt, synthetic construct
  source 1..21: mol_type = other RNA
aggcagccgccgatggcccga

SEQ ID NO: 4507 - RNA, 21 nt, synthetic construct
  source 1..21: mol_type = other RNA
aggcatacgtgatgcgctact

SEQ ID NO: 4508 - RNA, 21 nt, synthetic construct
  source 1..21: mol_type = other RNA
aggcatcccccggacggttca

SEQ ID NO: 4509 - RNA, 21 nt, synthetic construct
  source 1..21: mol_type = other RNA
aggccagctcggactctgcgg

SEQ ID NO: 4510 - RNA, 21 nt, synthetic construct
  source 1..21: mol_type = other RNA
aggccagcttggccagctctg

SEQ ID NO: 4511 - RNA, 21 nt, synthetic construct
  source 1..21: mol_type = other RNA
aggccaggctggagaggagca

SEQ ID NO: 4512 - RNA, 21 nt, synthetic construct
  source 1..21: mol_type = other RNA
aggccaggggcgtgtcagggt

SEQ ID NO: 4513 - RNA, 21 nt, synthetic construct
  source 1..21: mol_type = other RNA
aggccataggcatcccccgga

SEQ ID NO: 4514 - RNA, 21 nt, synthetic construct
  source 1..21: mol_type = other RNA
aggcccaggcatacgtgatgc

SEQ ID NO: 4515 - RNA, 21 nt, synthetic construct
  source 1..21: mol_type = other RNA
aggcccggatggcatcctagt

SEQ ID NO: 4516 - RNA, 21 nt, synthetic construct
  source 1..21: mol_type = other RNA
aggcccggctcactgccccag

SEQ ID NO: 4517 - RNA, 21 nt, synthetic construct
  source 1..21: mol_type = other RNA
aggccctatgacaactggctg

SEQ ID NO: 4518 - RNA, 21 nt, synthetic construct
  source 1..21: mol_type = other RNA
aggccctgctggagcttgggg

SEQ ID NO: 4519 - RNA, 21 nt, synthetic construct
  source 1..21: mol_type = other RNA
aggccgacatagagtcccgtg

SEQ ID NO: 4520 - RNA, 21 nt, synthetic construct
  source 1..21: mol_type = other RNA
aggccgacgccctatttgagc

SEQ ID NO: 4521 - RNA, 21 nt, synthetic construct
  source 1..21: mol_type = other RNA
aggccgaggaggctggaattt

SEQ ID NO: 4522 - RNA, 21 nt, synthetic construct
  source 1..21: mol_type = other RNA
aggcctccttgggccagctgc

SEQ ID NO: 4523 - RNA, 21 nt, synthetic construct
  source 1..21: mol_type = other RNA
aggcctggctgaggtgctgtt

SEQ ID NO: 4524 - RNA, 21 nt, synthetic construct
  source 1..21: mol_type = other RNA
aggccttgcccagtacatgtg

SEQ ID NO: 4525 - RNA, 21 nt, synthetic construct
  source 1..21: mol_type = other RNA
aggcggccggggagctcctgt

SEQ ID NO: 4526 - RNA, 21 nt, synthetic construct
  source 1..21: mol_type = other RNA
aggcggcgggccaagacttct

SEQ ID NO: 4527 - RNA, 21 nt, synthetic construct
  source 1..21: mol_type = other RNA
aggcgggtgcccagaaaagag

SEQ ID NO: 4528 - RNA, 21 nt, synthetic construct
  source 1..21: mol_type = other RNA
aggcgtgaggcgggtgcccag

SEQ ID NO: 4529 - RNA, 21 nt, synthetic construct
  source 1..21: mol_type = other RNA
aggctccccaatccagagggg

SEQ ID NO: 4530 - RNA, 21 nt, synthetic construct
  source 1..21: mol_type = other RNA
aggctctggaccaggcggccc

SEQ ID NO: 4531 - RNA, 21 nt, synthetic construct
  source 1..21: mol_type = other RNA
aggctcttgctgctgctcctc

SEQ ID NO: 4532 - RNA, 21 nt, synthetic construct
  source 1..21: mol_type = other RNA
aggctggaagatcagcccagc

SEQ ID NO: 4533 - RNA, 21 nt, synthetic construct
  source 1..21: mol_type = other RNA
aggctggaatttggcagcacg

SEQ ID NO: 4534 - RNA, 21 nt, synthetic construct
  source 1..21: mol_type = other RNA
aggctggagaggagcagcagc

SEQ ID NO: 4535 - RNA, 21 nt, synthetic construct
  source 1..21: mol_type = other RNA
aggcttagtccaacacccacc

SEQ ID NO: 4536 - RNA, 21 nt, synthetic construct
  source 1..21: mol_type = other RNA
agggagaagagcagatcctgc

SEQ ID NO: 4537 - RNA, 21 nt, synthetic construct
  source 1..21: mol_type = other RNA
agggagaagtcttggcccgcc

SEQ ID NO: 4538 - RNA, 21 nt, synthetic construct
  source 1..21: mol_type = other RNA
agggagcagggctccgccggt

SEQ ID NO: 4539 - RNA, 21 nt, synthetic construct
  source 1..21: mol_type = other RNA
agggatgacagagcaccaaga

SEQ ID NO: 4540 - RNA, 21 nt, synthetic construct
  source 1..21: mol_type = other RNA
agggcaagagctattgggctg

SEQ ID NO: 4541 - RNA, 21 nt, synthetic construct
  source 1..21: mol_type = other RNA
agggcagcttggcgtcctccc

SEQ ID NO: 4542 - RNA, 21 nt, synthetic construct
  source 1..21: mol_type = other RNA
agggcccccaggaagcattgc

SEQ ID NO: 4543 - RNA, 21 nt, synthetic construct
  source 1..21: mol_type = other RNA
agggcctctgagagctggcac

SEQ ID NO: 4544 - RNA, 21 nt, synthetic construct
  source 1..21: mol_type = other RNA
agggcctcttcttccttgggg

SEQ ID NO: 4545 - RNA, 21 nt, synthetic construct
  source 1..21: mol_type = other RNA
agggcgtcggccttgctcagg

SEQ ID NO: 4546 - RNA, 21 nt, synthetic construct
  source 1..21: mol_type = other RNA
agggcgtgccacgctttctgg

SEQ ID NO: 4547 - RNA, 21 nt, synthetic construct
  source 1..21: mol_type = other RNA
agggctctgtcttggtgctct

SEQ ID NO: 4548 - RNA, 21 nt, synthetic construct
  source 1..21: mol_type = other RNA
agggctgcacggcccagcagg

SEQ ID NO: 4549 - RNA, 21 nt, synthetic construct
  source 1..21: mol_type = other RNA
agggctgtggctgtgactgag

SEQ ID NO: 4550 - RNA, 21 nt, synthetic construct
  source 1..21: mol_type = other RNA
aggggacagagaagacaaagt

SEQ ID NO: 4551 - RNA, 21 nt, synthetic construct
  source 1..21: mol_type = other RNA
aggggcaaatgccagtgctgc

SEQ ID NO: 4552 - RNA, 21 nt, synthetic construct
  source 1..21: mol_type = other RNA
aggggcgtgtcagggtggggg

SEQ ID NO: 4553 - RNA, 21 nt, synthetic construct
  source 1..21: mol_type = other RNA
aggggcttggggaagagacat

SEQ ID NO: 4554 - RNA, 21 nt, synthetic construct
  source 1..21: mol_type = other RNA
agggtactttgatgtctgcgg

SEQ ID NO: 4555 - RNA, 21 nt, synthetic construct
  source 1..21: mol_type = other RNA
agggtgcaacctcggagcagc

SEQ ID NO: 4556 - RNA, 21 nt, synthetic construct
  source 1..21: mol_type = other RNA
aggtacctcgcaagcaccttc

SEQ ID NO: 4557 - RNA, 21 nt, synthetic construct
  source 1..21: mol_type = other RNA
aggtacctgaagcggctgcag

SEQ ID NO: 4558 - RNA, 21 nt, synthetic construct
  source 1..21: mol_type = other RNA
aggtactgcgggagctccttg

SEQ ID NO: 4559 - RNA, 21 nt, synthetic construct
  source 1..21: mol_type = other RNA
aggtccagggagaagtcttgg

SEQ ID NO: 4560 - RNA, 21 nt, synthetic construct
  source 1..21: mol_type = other RNA
aggtcctcacgtctgcggatg

SEQ ID NO: 4561 - RNA, 21 nt, synthetic construct
  source 1..21: mol_type = other RNA
aggtctcttcaagatgtggct

SEQ ID NO: 4562 - RNA, 21 nt, synthetic construct
  source 1..21: mol_type = other RNA
aggtgctgttggctgccaagg

SEQ ID NO: 4563 - RNA, 21 nt, synthetic construct
  source 1..21: mol_type = other RNA
aggtgcttgcgaggtacctga

SEQ ID NO: 4564 - RNA, 21 nt, synthetic construct
  source 1..21: mol_type = other RNA
aggtggatctggtgcaggcca

SEQ ID NO: 4565 - RNA, 21 nt, synthetic construct
  source 1..21: mol_type = other RNA
aggtggggtgaggggcttggg

SEQ ID NO: 4566 - RNA, 21 nt, synthetic construct
  source 1..21: mol_type = other RNA
aggttgcaccctcctcctcac

SEQ ID NO: 4567 - RNA, 21 nt, synthetic construct
  source 1..21: mol_type = other RNA
aggttttcagccacatcttga

SEQ ID NO: 4568 - RNA, 21 nt, synthetic construct
  source 1..21: mol_type = other RNA
agtacatgtgcatcaggaggc

SEQ ID NO: 4569 - RNA, 21 nt, synthetic construct
  source 1..21: mol_type = other RNA
agtaccctacaggaggaccag

SEQ ID NO: 4570 - RNA, 21 nt, synthetic construct
  source 1..21: mol_type = other RNA
agtacctagcattgaccccaa

SEQ ID NO: 4571 - RNA, 21 nt, synthetic construct
  source 1..21: mol_type = other RNA
agtacgactttgtcttctctg

SEQ ID NO: 4572 - RNA, 21 nt, synthetic construct
  source 1..21: mol_type = other RNA
agtagcgcatcacgtatgcct

SEQ ID NO: 4573 - RNA, 21 nt, synthetic construct
  source 1..21: mol_type = other RNA
agtagggctcccaggcagcgg

SEQ ID NO: 4574 - RNA, 21 nt, synthetic construct
  source 1..21: mol_type = other RNA
agtagggctgtggctgtgact

SEQ ID NO: 4575 - RNA, 21 nt, synthetic construct
  source 1..21: mol_type = other RNA
agtcacagccacagccctact

SEQ ID NO: 4576 - RNA, 21 nt, synthetic construct
  source 1..21: mol_type = other RNA
agtccaacacccaccgcgggc

SEQ ID NO: 4577 - RNA, 21 nt, synthetic construct
  source 1..21: mol_type = other RNA
agtcccacgaggctccccaat

SEQ ID NO: 4578 - RNA, 21 nt, synthetic construct
  source 1..21: mol_type = other RNA
agtcccgtgagcgtggagggc

SEQ ID NO: 4579 - RNA, 21 nt, synthetic construct
  source 1..21: mol_type = other RNA
agtccgagctggccttcccca

SEQ ID NO: 4580 - RNA, 21 nt, synthetic construct
  source 1..21: mol_type = other RNA
agtccggggtggccagttccc

SEQ ID NO: 4581 - RNA, 21 nt, synthetic construct
  source 1..21: mol_type = other RNA
agtcgtactggggaagccggc

SEQ ID NO: 4582 - RNA, 21 nt, synthetic construct
  source 1..21: mol_type = other RNA
agtcttggcccgccgcctcca

SEQ ID NO: 4583 - RNA, 21 nt, synthetic construct
  source 1..21: mol_type = other RNA
agtgagccgggcctgggcttg

SEQ ID NO: 4584 - RNA, 21 nt, synthetic construct
  source 1..21: mol_type = other RNA
agtgagcggtagaactgctcc

SEQ ID NO: 4585 - RNA, 21 nt, synthetic construct
  source 1..21: mol_type = other RNA
agtgattgctgtgctgggcaa

SEQ ID NO: 4586 - RNA, 21 nt, synthetic construct
  source 1..21: mol_type = other RNA
agtgcagcagctccagcagct

SEQ ID NO: 4587 - RNA, 21 nt, synthetic construct
  source 1..21: mol_type = other RNA
agtgctgcggaggtccaggga

SEQ ID NO: 4588 - RNA, 21 nt, synthetic construct
  source 1..21: mol_type = other RNA
agtggaggtggatctggtgca

SEQ ID NO: 4589 - RNA, 21 nt, synthetic construct
  source 1..21: mol_type = other RNA
agtggccggtcccggaggagc

SEQ ID NO: 4590 - RNA, 21 nt, synthetic construct
  source 1..21: mol_type = other RNA
agtggcgaaatcaaggacaag

SEQ ID NO: 4591 - RNA, 21 nt, synthetic construct
  source 1..21: mol_type = other RNA
agtggctgtgggcccagggag

SEQ ID NO: 4592 - RNA, 21 nt, synthetic construct
  source 1..21: mol_type = other RNA
agtgtccccggctgcagccgc

SEQ ID NO: 4593 - RNA, 21 nt, synthetic construct
  source 1..21: mol_type = other RNA
agtgtgccagctctcagaggc

SEQ ID NO: 4594 - RNA, 21 nt, synthetic construct
  source 1..21: mol_type = other RNA
agttcccatccgcagacgtga

SEQ ID NO: 4595 - RNA, 21 nt, synthetic construct
  source 1..21: mol_type = other RNA
agttcccgctccaggctcttg

SEQ ID NO: 4596 - RNA, 21 nt, synthetic construct
  source 1..21: mol_type = other RNA
agttctaccgctcactgcagg

SEQ ID NO: 4597 - RNA, 21 nt, synthetic construct
  source 1..21: mol_type = other RNA
agttgtcatagggcctcttct

SEQ ID NO: 4598 - RNA, 21 nt, synthetic construct
  source 1..21: mol_type = other RNA
atacccccaccctgacacgcc

SEQ ID NO: 4599 - RNA, 21 nt, synthetic construct
  source 1..21: mol_type = other RNA
atacgtgatgcgctactttga

SEQ ID NO: 4600 - RNA, 21 nt, synthetic construct
  source 1..21: mol_type = other RNA
atacgtgtcctgcagtgagcg

SEQ ID NO: 4601 - RNA, 21 nt, synthetic construct
  source 1..21: mol_type = other RNA
atagagtcccgtgagcgtgga

SEQ ID NO: 4602 - RNA, 21 nt, synthetic construct
  source 1..21: mol_type = other RNA
atagctcttgccctgaccagc

SEQ ID NO: 4603 - RNA, 21 nt, synthetic construct
  source 1..21: mol_type = other RNA
ataggcatcccccggacggtt

SEQ ID NO: 4604 - RNA, 21 nt, synthetic construct
  source 1..21: mol_type = other RNA
atagggcctcttcttccttgg

SEQ ID NO: 4605 - RNA, 21 nt, synthetic construct
  source 1..21: mol_type = other RNA
atagggcgtcggccttgctca

SEQ ID NO: 4606 - RNA, 21 nt, synthetic construct
  source 1..21: mol_type = other RNA
atcaaagtaccctacaggagg

SEQ ID NO: 4607 - RNA, 21 nt, synthetic construct
  source 1..21: mol_type = other RNA
atcaaggacaaggagctcccg

SEQ ID NO: 4608 - RNA, 21 nt, synthetic construct
  source 1..21: mol_type = other RNA
atcacgtatgcctgggcctgc

SEQ ID NO: 4609 - RNA, 21 nt, synthetic construct
  source 1..21: mol_type = other RNA
atcactcgtgtctcacgcggc

SEQ ID NO: 4610 - RNA, 21 nt, synthetic construct
  source 1..21: mol_type = other RNA
atcagcccagccagaaagcgt

SEQ ID NO: 4611 - RNA, 21 nt, synthetic construct
  source 1..21: mol_type = other RNA
atcaggaggcgtgaggcgggt

SEQ ID NO: 4612 - RNA, 21 nt, synthetic construct
  source 1..21: mol_type = other RNA
atccacctccactaggatgcc

SEQ ID NO: 4613 - RNA, 21 nt, synthetic construct
  source 1..21: mol_type = other RNA
atccagaggggcaaatgccag

SEQ ID NO: 4614 - RNA, 21 nt, synthetic construct
  source 1..21: mol_type = other RNA
atcccccggacggttcaagca

SEQ ID NO: 4615 - RNA, 21 nt, synthetic construct
  source 1..21: mol_type = other RNA
atccctgagctctcaaagtag

SEQ ID NO: 4616 - RNA, 21 nt, synthetic construct
  source 1..21: mol_type = other RNA
atccgcagacgtgaggacctg

SEQ ID NO: 4617 - RNA, 21 nt, synthetic construct
  source 1..21: mol_type = other RNA
atcctagacggcttcgaggag

SEQ ID NO: 4618 - RNA, 21 nt, synthetic construct
  source 1..21: mol_type = other RNA
atcctagtggaggtggatctg

SEQ ID NO: 4619 - RNA, 21 nt, synthetic construct
  source 1..21: mol_type = other RNA
atcctgcaggccataggcatc

SEQ ID NO: 4620 - RNA, 21 nt, synthetic construct
  source 1..21: mol_type = other RNA
atcgcccaggtcctcacgtct

SEQ ID NO: 4621 - RNA, 21 nt, synthetic construct
  source 1..21: mol_type = other RNA
atcggccgccacgagtggctg

SEQ ID NO: 4622 - RNA, 21 nt, synthetic construct
  source 1..21: mol_type = other RNA
atcggcggctgcctcggtgga

SEQ ID NO: 4623 - RNA, 21 nt, synthetic construct
  source 1..21: mol_type = other RNA
atctgctcttctccctgggcc

SEQ ID NO: 4624 - RNA, 21 nt, synthetic construct
  source 1..21: mol_type = other RNA
atctggtgcaggccaggctgg

SEQ ID NO: 4625 - RNA, 21 nt, synthetic construct
  source 1..21: mol_type = other RNA
atcttccagcctcccgcccgc

SEQ ID NO: 4626 - RNA, 21 nt, synthetic construct
  source 1..21: mol_type = other RNA
atcttgaagagacctgaccgc

SEQ ID NO: 4627 - RNA, 21 nt, synthetic construct
  source 1..21: mol_type = other RNA
atcttgcgcttccagctcctc

SEQ ID NO: 4628 - RNA, 21 nt, synthetic construct
  source 1..21: mol_type = other RNA
atgacaactggctggagggcg

SEQ ID NO: 4629 - RNA, 21 nt, synthetic construct
  source 1..21: mol_type = other RNA
atgacagagcaccaagacaga

SEQ ID NO: 4630 - RNA, 21 nt, synthetic construct
  source 1..21: mol_type = other RNA
atgagcagaacgcggtcaggt

SEQ ID NO: 4631 - RNA, 21 nt, synthetic construct
  source 1..21: mol_type = other RNA
atgaggttttcagccacatct

SEQ ID NO: 4632 - RNA, 21 nt, synthetic construct
  source 1..21: mol_type = other RNA
atgcacatgtactgggcaagg

SEQ ID NO: 4633 - RNA, 21 nt, synthetic construct
  source 1..21: mol_type = other RNA
atgccagtgctgcggaggtcc

SEQ ID NO: 4634 - RNA, 21 nt, synthetic construct
  source 1..21: mol_type = other RNA
atgccatccgggcctgcgggc

SEQ ID NO: 4635 - RNA, 21 nt, synthetic construct
  source 1..21: mol_type = other RNA
atgcccaacacaaggatgtct

SEQ ID NO: 4636 - RNA, 21 nt, synthetic construct
  source 1..21: mol_type = other RNA
atgcctatggcctgcaggatc

SEQ ID NO: 4637 - RNA, 21 nt, synthetic construct
  source 1..21: mol_type = other RNA
atgcctgggcctgctccatgg

SEQ ID NO: 4638 - RNA, 21 nt, synthetic construct
  source 1..21: mol_type = other RNA
atgcgctactttgagagctca

SEQ ID NO: 4639 - RNA, 21 nt, synthetic construct
  source 1..21: mol_type = other RNA
atgctaggtactgcgggagct

SEQ ID NO: 4640 - RNA, 21 nt, synthetic construct
  source 1..21: mol_type = other RNA
atgcttcctgggggccctgtg

SEQ ID NO: 4641 - RNA, 21 nt, synthetic construct
  source 1..21: mol_type = other RNA
atggagaagccggacagctca

SEQ ID NO: 4642 - RNA, 21 nt, synthetic construct
  source 1..21: mol_type = other RNA
atggagcaggcccaggcatac

SEQ ID NO: 4643 - RNA, 21 nt, synthetic construct
  source 1..21: mol_type = other RNA
atggcaggggacagagaagac

SEQ ID NO: 4644 - RNA, 21 nt, synthetic construct
  source 1..21: mol_type = other RNA
atggcatcctagtggaggtgg

SEQ ID NO: 4645 - RNA, 21 nt, synthetic construct
  source 1..21: mol_type = other RNA
atggccaaaggcttagtccaa

SEQ ID NO: 4646 - RNA, 21 nt, synthetic construct
  source 1..21: mol_type = other RNA
atggcccgagtagggctccca

SEQ ID NO: 4647 - RNA, 21 nt, synthetic construct
  source 1..21: mol_type = other RNA
atggcctgcaggatctgctct

SEQ ID NO: 4648 - RNA, 21 nt, synthetic construct
  source 1..21: mol_type = other RNA
atggcttcctgcacagcacgt

SEQ ID NO: 4649 - RNA, 21 nt, synthetic construct
  source 1..21: mol_type = other RNA
atgggaactggtcctcctgta

SEQ ID NO: 4650 - RNA, 21 nt, synthetic construct
  source 1..21: mol_type = other RNA
atggtgccgagcccgcaggcc

SEQ ID NO: 4651 - RNA, 21 nt, synthetic construct
  source 1..21: mol_type = other RNA
atgtactgggcaaggccttgg

SEQ ID NO: 4652 - RNA, 21 nt, synthetic construct
  source 1..21: mol_type = other RNA
atgtcggcctgctgggccgtg

SEQ ID NO: 4653 - RNA, 21 nt, synthetic construct
  source 1..21: mol_type = other RNA
atgtctcttccccaagcccct

SEQ ID NO: 4654 - RNA, 21 nt, synthetic construct
  source 1..21: mol_type = other RNA
atgtctgcggcccagctccca

SEQ ID NO: 4655 - RNA, 21 nt, synthetic construct
  source 1..21: mol_type = other RNA
atgtgcatcaggaggcgtgag

SEQ ID NO: 4656 - RNA, 21 nt, synthetic construct
  source 1..21: mol_type = other RNA
atgtggctgaaaacctcatcg

SEQ ID NO: 4657 - RNA, 21 nt, synthetic construct
  source 1..21: mol_type = other RNA
attccagcctcctcggcctcg

SEQ ID NO: 4658 - RNA, 21 nt, synthetic construct
  source 1..21: mol_type = other RNA
attgaccccaaggaagaagag

SEQ ID NO: 4659 - RNA, 21 nt, synthetic construct
  source 1..21: mol_type = other RNA
attgcaggaggaagctgggga

SEQ ID NO: 4660 - RNA, 21 nt, synthetic construct
  source 1..21: mol_type = other RNA
attgctgtgctgggcaaagct

SEQ ID NO: 4661 - RNA, 21 nt, synthetic construct
  source 1..21: mol_type = other RNA
attgcttgaaccgtccggggg

SEQ ID NO: 4662 - RNA, 21 nt, synthetic construct
  source 1..21: mol_type = other RNA
attgggctggggcagtgagcc

SEQ ID NO: 4663 - RNA, 21 nt, synthetic construct
  source 1..21: mol_type = other RNA
attggggagcctcgtgggact

SEQ ID NO: 4664 - RNA, 21 nt, synthetic construct
  source 1..21: mol_type = other RNA
atttcgccactcagagccagc

SEQ ID NO: 4665 - RNA, 21 nt, synthetic construct
  source 1..21: mol_type = other RNA
atttgagctgtccggcttctc

SEQ ID NO: 4666 - RNA, 21 nt, synthetic construct
  source 1..21: mol_type = other RNA
atttgcccctctggattgggg

SEQ ID NO: 4667 - RNA, 21 nt, synthetic construct
  source 1..21: mol_type = other RNA
atttggcagcacgtggtacag

SEQ ID NO: 4668 - RNA, 21 nt, synthetic construct
  source 1..21: mol_type = other RNA
caaagctggtcagggcaagag

SEQ ID NO: 4669 - RNA, 21 nt, synthetic construct
  source 1..21: mol_type = other RNA
caaaggccaggggcgtgtcag

SEQ ID NO: 4670 - RNA, 21 nt, synthetic construct
  source 1..21: mol_type = other RNA
caaaggcttagtccaacaccc

SEQ ID NO: 4671 - RNA, 21 nt, synthetic construct
  source 1..21: mol_type = other RNA
caaagtaccctacaggaggac

SEQ ID NO: 4672 - RNA, 21 nt, synthetic construct
  source 1..21: mol_type = other RNA
caaagtagcgcatcacgtatg

SEQ ID NO: 4673 - RNA, 21 nt, synthetic construct
  source 1..21: mol_type = other RNA
caaagtagggctgtggctgtg

SEQ ID NO: 4674 - RNA, 21 nt, synthetic construct
  source 1..21: mol_type = other RNA
caaagtcgtactggggaagcc

SEQ ID NO: 4675 - RNA, 21 nt, synthetic construct
  source 1..21: mol_type = other RNA
caaatagggcgtcggccttgc

SEQ ID NO: 4676 - RNA, 21 nt, synthetic construct
  source 1..21: mol_type = other RNA
caaatgccagtgctgcggagg

SEQ ID NO: 4677 - RNA, 21 nt, synthetic construct
  source 1..21: mol_type = other RNA
caaattccagcctcctcggcc

SEQ ID NO: 4678 - RNA, 21 nt, synthetic construct
  source 1..21: mol_type = other RNA
caacacaaggatgtctcttcc

SEQ ID NO: 4679 - RNA, 21 nt, synthetic construct
  source 1..21: mol_type = other RNA
caacacccaccgcgggccgca

SEQ ID NO: 4680 - RNA, 21 nt, synthetic construct
  source 1..21: mol_type = other RNA
caacagcacctcagccaggcc

SEQ ID NO: 4681 - RNA, 21 nt, synthetic construct
  source 1..21: mol_type = other RNA
caacctcggagcagcttcttc

SEQ ID NO: 4682 - RNA, 21 nt, synthetic construct
  source 1..21: mol_type = other RNA
caactggctggagggcgtgcc

SEQ ID NO: 4683 - RNA, 21 nt, synthetic construct
  source 1..21: mol_type = other RNA
caagacagagccctgacgctc

SEQ ID NO: 4684 - RNA, 21 nt, synthetic construct
  source 1..21: mol_type = other RNA
caagacttctccctggacctc

SEQ ID NO: 4685 - RNA, 21 nt, synthetic construct
  source 1..21: mol_type = other RNA
caagagcctggagcgggaact

SEQ ID NO: 4686 - RNA, 21 nt, synthetic construct
  source 1..21: mol_type = other RNA
caagagctattgggctggggc

SEQ ID NO: 4687 - RNA, 21 nt, synthetic construct
  source 1..21: mol_type = other RNA
caagatggcttcctgcacagc

SEQ ID NO: 4688 - RNA, 21 nt, synthetic construct
  source 1..21: mol_type = other RNA
caagatgtggctgaaaacctc

SEQ ID NO: 4689 - RNA, 21 nt, synthetic construct
  source 1..21: mol_type = other RNA
caagcaatggcaggggacaga

SEQ ID NO: 4690 - RNA, 21 nt, synthetic construct
  source 1..21: mol_type = other RNA
caagcaccttctgcttcctgt

SEQ ID NO: 4691 - RNA, 21 nt, synthetic construct
  source 1..21: mol_type = other RNA
caagcccaggcccggctcact

SEQ ID NO: 4692 - RNA, 21 nt, synthetic construct
  source 1..21: mol_type = other RNA
caagcccctcaccccacctga

SEQ ID NO: 4693 - RNA, 21 nt, synthetic construct
  source 1..21: mol_type = other RNA
caagctccagcagggcctctg

SEQ ID NO: 4694 - RNA, 21 nt, synthetic construct
  source 1..21: mol_type = other RNA
caagctgccctccacgctcac

SEQ ID NO: 4695 - RNA, 21 nt, synthetic construct
  source 1..21: mol_type = other RNA
caagctggcctgggagctggg

SEQ ID NO: 4696 - RNA, 21 nt, synthetic construct
  source 1..21: mol_type = other RNA
caaggaagaagaggccctatg

SEQ ID NO: 4697 - RNA, 21 nt, synthetic construct
  source 1..21: mol_type = other RNA
caaggacaaggagctcccgca

SEQ ID NO: 4698 - RNA, 21 nt, synthetic construct
  source 1..21: mol_type = other RNA
caaggagctcccgcagtacct

SEQ ID NO: 4699 - RNA, 21 nt, synthetic construct
  source 1..21: mol_type = other RNA
caaggaggcctggctgaggtg

SEQ ID NO: 4700 - RNA, 21 nt, synthetic construct
  source 1..21: mol_type = other RNA
caaggatgtctcttccccaag

SEQ ID NO: 4701 - RNA, 21 nt, synthetic construct
  source 1..21: mol_type = other RNA
caaggccgacgccctatttga

SEQ ID NO: 4702 - RNA, 21 nt, synthetic construct
  source 1..21: mol_type = other RNA
caaggccttgcccagtacatg

SEQ ID NO: 4703 - RNA, 21 nt, synthetic construct
  source 1..21: mol_type = other RNA
caaggccttggaggcggcggg

SEQ ID NO: 4704 - RNA, 21 nt, synthetic construct
  source 1..21: mol_type = other RNA
caatagctcttgccctgacca

SEQ ID NO: 4705 - RNA, 21 nt, synthetic construct
  source 1..21: mol_type = other RNA
caatcactcgtgtctcacgcg

SEQ ID NO: 4706 - RNA, 21 nt, synthetic construct
  source 1..21: mol_type = other RNA
caatccagaggggcaaatgcc

SEQ ID NO: 4707 - RNA, 21 nt, synthetic construct
  source 1..21: mol_type = other RNA
caatgctaggtactgcgggag

SEQ ID NO: 4708 - RNA, 21 nt, synthetic construct
  source 1..21: mol_type = other RNA
caatgcttcctgggggccctg

SEQ ID NO: 4709 - RNA, 21 nt, synthetic construct
  source 1..21: mol_type = other RNA
caatggcaggggacagagaag

SEQ ID NO: 4710 - RNA, 21 nt, synthetic construct
  source 1..21: mol_type = other RNA
cacaaagtagggctgtggctg

SEQ ID NO: 4711 - RNA, 21 nt, synthetic construct
  source 1..21: mol_type = other RNA
cacaagcccaggcccggctca

SEQ ID NO: 4712 - RNA, 21 nt, synthetic construct
  source 1..21: mol_type = other RNA
cacaaggatgtctcttcccca

SEQ ID NO: 4713 - RNA, 21 nt, synthetic construct
  source 1..21: mol_type = other RNA
cacactgcccggcacaaagta

SEQ ID NO: 4714 - RNA, 21 nt, synthetic construct
  source 1..21: mol_type = other RNA
cacagcaatcactcgtgtctc

SEQ ID NO: 4715 - RNA, 21 nt, synthetic construct
  source 1..21: mol_type = other RNA
cacagcacgtgcggaccggca

SEQ ID NO: 4716 - RNA, 21 nt, synthetic construct
  source 1..21: mol_type = other RNA
cacagccacagccctactttg

SEQ ID NO: 4717 - RNA, 21 nt, synthetic construct
  source 1..21: mol_type = other RNA
cacagccactcgtggcggccg

SEQ ID NO: 4718 - RNA, 21 nt, synthetic construct
  source 1..21: mol_type = other RNA
cacagccctactttgtgccgg

SEQ ID NO: 4719 - RNA, 21 nt, synthetic construct
  source 1..21: mol_type = other RNA
cacagctgagtcccacgaggc

SEQ ID NO: 4720 - RNA, 21 nt, synthetic construct
  source 1..21: mol_type = other RNA
cacagggcccccaggaagcat

SEQ ID NO: 4721 - RNA, 21 nt, synthetic construct
  source 1..21: mol_type = other RNA
cacatacccccaccctgacac

SEQ ID NO: 4722 - RNA, 21 nt, synthetic construct
  source 1..21: mol_type = other RNA
cacatcttgaagagacctgac

SEQ ID NO: 4723 - RNA, 21 nt, synthetic construct
  source 1..21: mol_type = other RNA
cacatgtactgggcaaggcct

SEQ ID NO: 4724 - RNA, 21 nt, synthetic construct
  source 1..21: mol_type = other RNA
caccaagacagagccctgacg

SEQ ID NO: 4725 - RNA, 21 nt, synthetic construct
  source 1..21: mol_type = other RNA
caccagatccacctccactag

SEQ ID NO: 4726 - RNA, 21 nt, synthetic construct
  source 1..21: mol_type = other RNA
caccatacgtgtcctgcagtg

SEQ ID NO: 4727 - RNA, 21 nt, synthetic construct
  source 1..21: mol_type = other RNA
caccccacctgaaacgggtga

SEQ ID NO: 4728 - RNA, 21 nt, synthetic construct
  source 1..21: mol_type = other RNA
caccccggactgggcagaacg

SEQ ID NO: 4729 - RNA, 21 nt, synthetic construct
  source 1..21: mol_type = other RNA
cacccgcctcacgcctcctga

SEQ ID NO: 4730 - RNA, 21 nt, synthetic construct
  source 1..21: mol_type = other RNA
cacccgtttcaggtggggtga

SEQ ID NO: 4731 - RNA, 21 nt, synthetic construct
  source 1..21: mol_type = other RNA
caccctcctcctcacagcccg

SEQ ID NO: 4732 - RNA, 21 nt, synthetic construct
  source 1..21: mol_type = other RNA
caccctgacacgcccctggcc

SEQ ID NO: 4733 - RNA, 21 nt, synthetic construct
  source 1..21: mol_type = other RNA
caccgaggcagccgccgatgg

SEQ ID NO: 4734 - RNA, 21 nt, synthetic construct
  source 1..21: mol_type = other RNA
caccggcggccgcgtgagaca

SEQ ID NO: 4735 - RNA, 21 nt, synthetic construct
  source 1..21: mol_type = other RNA
caccggctctgcaaaggccag

SEQ ID NO: 4736 - RNA, 21 nt, synthetic construct
  source 1..21: mol_type = other RNA
cacctcagccaggcctccttg

SEQ ID NO: 4737 - RNA, 21 nt, synthetic construct
  source 1..21: mol_type = other RNA
cacctccactaggatgccatc

SEQ ID NO: 4738 - RNA, 21 nt, synthetic construct
  source 1..21: mol_type = other RNA
cacctgaaacgggtgacacag

SEQ ID NO: 4739 - RNA, 21 nt, synthetic construct
  source 1..21: mol_type = other RNA
caccttctgcttcctgtccac

SEQ ID NO: 4740 - RNA, 21 nt, synthetic construct
  source 1..21: mol_type = other RNA
cacgaggccgaggaggctgga

SEQ ID NO: 4741 - RNA, 21 nt, synthetic construct
  source 1..21: mol_type = other RNA
cacgaggctccccaatccaga

SEQ ID NO: 4742 - RNA, 21 nt, synthetic construct
  source 1..21: mol_type = other RNA
cacgagtgattgctgtgctgg

SEQ ID NO: 4743 - RNA, 21 nt, synthetic construct
  source 1..21: mol_type = other RNA
cacgagtggctgtgggcccag

SEQ ID NO: 4744 - RNA, 21 nt, synthetic construct
  source 1..21: mol_type = other RNA
cacgcccctggcctttgcaga

SEQ ID NO: 4745 - RNA, 21 nt, synthetic construct
  source 1..21: mol_type = other RNA
cacgccctccagccagttgtc

SEQ ID NO: 4746 - RNA, 21 nt, synthetic construct
  source 1..21: mol_type = other RNA
cacgcctcctgatgcacatgt

SEQ ID NO: 4747 - RNA, 21 nt, synthetic construct
  source 1..21: mol_type = other RNA
cacgctcacgggactctatgt

SEQ ID NO: 4748 - RNA, 21 nt, synthetic construct
  source 1..21: mol_type = other RNA
cacgctttctggctgggctga

SEQ ID NO: 4749 - RNA, 21 nt, synthetic construct
  source 1..21: mol_type = other RNA
cacggcccagcaggccgacat

SEQ ID NO: 4750 - RNA, 21 nt, synthetic construct
  source 1..21: mol_type = other RNA
cacgggactctatgtcggcct

SEQ ID NO: 4751 - RNA, 21 nt, synthetic construct
  source 1..21: mol_type = other RNA
cacgtatgcctgggcctgctc

SEQ ID NO: 4752 - RNA, 21 nt, synthetic construct
  source 1..21: mol_type = other RNA
cacgtatggtgccgagcccgc

SEQ ID NO: 4753 - RNA, 21 nt, synthetic construct
  source 1..21: mol_type = other RNA
cacgtctgcggatgggaactg

SEQ ID NO: 4754 - RNA, 21 nt, synthetic construct
  source 1..21: mol_type = other RNA
cacgtgctgccaaattccagc

SEQ ID NO: 4755 - RNA, 21 nt, synthetic construct
  source 1..21: mol_type = other RNA
cacgtgctgtgcaggaagcca

SEQ ID NO: 4756 - RNA, 21 nt, synthetic construct
  source 1..21: mol_type = other RNA
cacgtggtacaggagctcccc

SEQ ID NO: 4757 - RNA, 21 nt, synthetic construct
  source 1..21: mol_type = other RNA
cactaggatgccatccgggcc

SEQ ID NO: 4758 - RNA, 21 nt, synthetic construct
  source 1..21: mol_type = other RNA
cactcagagccagccacaggg

SEQ ID NO: 4759 - RNA, 21 nt, synthetic construct
  source 1..21: mol_type = other RNA
cactcgtggcggccgatgagg

SEQ ID NO: 4760 - RNA, 21 nt, synthetic construct
  source 1..21: mol_type = other RNA
cactcgtgtctcacgcggccg

SEQ ID NO: 4761 - RNA, 21 nt, synthetic construct
  source 1..21: mol_type = other RNA
cactgcaggacacgtatggtg

SEQ ID NO: 4762 - RNA, 21 nt, synthetic construct
  source 1..21: mol_type = other RNA
cactgccccagcccaatagct

SEQ ID NO: 4763 - RNA, 21 nt, synthetic construct
  source 1..21: mol_type = other RNA
cactgcccggcacaaagtagg

SEQ ID NO: 4764 - RNA, 21 nt, synthetic construct
  source 1..21: mol_type = other RNA
cactgcgcccacgaggccgag

SEQ ID NO: 4765 - RNA, 21 nt, synthetic construct
  source 1..21: mol_type = other RNA
cactggcatttgcccctctgg

SEQ ID NO: 4766 - RNA, 21 nt, synthetic construct
  source 1..21: mol_type = other RNA
cacttcttctcagtcacagcc

SEQ ID NO: 4767 - RNA, 21 nt, synthetic construct
  source 1..21: mol_type = other RNA
cagaaaagagaggcggccggg

SEQ ID NO: 4768 - RNA, 21 nt, synthetic construct
  source 1..21: mol_type = other RNA
cagaaagcgtggcacgccctc

SEQ ID NO: 4769 - RNA, 21 nt, synthetic construct
  source 1..21: mol_type = other RNA
cagaacgcggtcaggtctctt

SEQ ID NO: 4770 - RNA, 21 nt, synthetic construct
  source 1..21: mol_type = other RNA
cagaacggcagctggcccaag

SEQ ID NO: 4771 - RNA, 21 nt, synthetic construct
  source 1..21: mol_type = other RNA
cagaagaagctgctccgaggt

SEQ ID NO: 4772 - RNA, 21 nt, synthetic construct
  source 1..21: mol_type = other RNA
cagaaggtgcttgcgaggtac

SEQ ID NO: 4773 - RNA, 21 nt, synthetic construct
  source 1..21: mol_type = other RNA
cagacatcaaagtaccctaca

SEQ ID NO: 4774 - RNA, 21 nt, synthetic construct
  source 1..21: mol_type = other RNA
cagacgtgaggacctgggcga

SEQ ID NO: 4775 - RNA, 21 nt, synthetic construct
  source 1..21: mol_type = other RNA
cagagaagacaaagtcgtact

SEQ ID NO: 4776 - RNA, 21 nt, synthetic construct
  source 1..21: mol_type = other RNA
cagagcaccaagacagagccc

SEQ ID NO: 4777 - RNA, 21 nt, synthetic construct
  source 1..21: mol_type = other RNA
cagagccagccacagggcccc

SEQ ID NO: 4778 - RNA, 21 nt, synthetic construct
  source 1..21: mol_type = other RNA
cagagccctgacgctcctccg

SEQ ID NO: 4779 - RNA, 21 nt, synthetic construct
  source 1..21: mol_type = other RNA
cagagccggtggagcagttct

SEQ ID NO: 4780 - RNA, 21 nt, synthetic construct
  source 1..21: mol_type = other RNA
cagagcctgagcaaggccgac

SEQ ID NO: 4781 - RNA, 21 nt, synthetic construct
  source 1..21: mol_type = other RNA
cagagctggccaagctggcct

SEQ ID NO: 4782 - RNA, 21 nt, synthetic construct
  source 1..21: mol_type = other RNA
cagaggccctgctggagcttg

SEQ ID NO: 4783 - RNA, 21 nt, synthetic construct
  source 1..21: mol_type = other RNA
cagaggggcaaatgccagtgc

SEQ ID NO: 4784 - RNA, 21 nt, synthetic construct
  source 1..21: mol_type = other RNA
cagagtccgagctggccttcc

SEQ ID NO: 4785 - RNA, 21 nt, synthetic construct
  source 1..21: mol_type = other RNA
cagatccacctccactaggat

SEQ ID NO: 4786 - RNA, 21 nt, synthetic construct
  source 1..21: mol_type = other RNA
cagatcctgcaggccataggc

SEQ ID NO: 4787 - RNA, 21 nt, synthetic construct
  source 1..21: mol_type = other RNA
cagcaagagcctggagcggga

SEQ ID NO: 4788 - RNA, 21 nt, synthetic construct
  source 1..21: mol_type = other RNA
cagcaatcactcgtgtctcac

SEQ ID NO: 4789 - RNA, 21 nt, synthetic construct
  source 1..21: mol_type = other RNA
cagcacagcaatcactcgtgt

SEQ ID NO: 4790 - RNA, 21 nt, synthetic construct
  source 1..21: mol_type = other RNA
cagcacctcagccaggcctcc

SEQ ID NO: 4791 - RNA, 21 nt, synthetic construct
  source 1..21: mol_type = other RNA
cagcacgtgcggaccggcacc

SEQ ID NO: 4792 - RNA, 21 nt, synthetic construct
  source 1..21: mol_type = other RNA
cagcacgtggtacaggagctc

SEQ ID NO: 4793 - RNA, 21 nt, synthetic construct
  source 1..21: mol_type = other RNA
cagcactggcatttgcccctc

SEQ ID NO: 4794 - RNA, 21 nt, synthetic construct
  source 1..21: mol_type = other RNA
cagcagcaagagcctggagcg

SEQ ID NO: 4795 - RNA, 21 nt, synthetic construct
  source 1..21: mol_type = other RNA
cagcagcccccggagggagca

SEQ ID NO: 4796 - RNA, 21 nt, synthetic construct
  source 1..21: mol_type = other RNA
cagcagctccagcagctgccg

SEQ ID NO: 4797 - RNA, 21 nt, synthetic construct
  source 1..21: mol_type = other RNA
cagcaggccgacatagagtcc

SEQ ID NO: 4798 - RNA, 21 nt, synthetic construct
  source 1..21: mol_type = other RNA
cagcagggcctctgagagctg

SEQ ID NO: 4799 - RNA, 21 nt, synthetic construct
  source 1..21: mol_type = other RNA
cagccaacagcacctcagcca

SEQ ID NO: 4800 - RNA, 21 nt, synthetic construct
  source 1..21: mol_type = other RNA
cagccacagccctactttgtg

SEQ ID NO: 4801 - RNA, 21 nt, synthetic construct
  source 1..21: mol_type = other RNA
cagccacagggcccccaggaa

SEQ ID NO: 4802 - RNA, 21 nt, synthetic construct
  source 1..21: mol_type = other RNA
cagccacatcttgaagagacc

SEQ ID NO: 4803 - RNA, 21 nt, synthetic construct
  source 1..21: mol_type = other RNA
cagccactcgtggcggccgat

SEQ ID NO: 4804 - RNA, 21 nt, synthetic construct
  source 1..21: mol_type = other RNA
cagccagaaagcgtggcacgc

SEQ ID NO: 4805 - RNA, 21 nt, synthetic construct
  source 1..21: mol_type = other RNA
cagccaggcctccttgggcca

SEQ ID NO: 4806 - RNA, 21 nt, synthetic construct
  source 1..21: mol_type = other RNA
cagccagttgtcatagggcct

SEQ ID NO: 4807 - RNA, 21 nt, synthetic construct
  source 1..21: mol_type = other RNA
cagcccaatagctcttgccct

SEQ ID NO: 4808 - RNA, 21 nt, synthetic construct
  source 1..21: mol_type = other RNA
cagcccagccagaaagcgtgg

SEQ ID NO: 4809 - RNA, 21 nt, synthetic construct
  source 1..21: mol_type = other RNA
cagccctactttgtgccgggc

SEQ ID NO: 4810 - RNA, 21 nt, synthetic construct
  source 1..21: mol_type = other RNA
cagccgccgatggcccgagta

SEQ ID NO: 4811 - RNA, 21 nt, synthetic construct
  source 1..21: mol_type = other RNA
cagccgcttcaggtacctcgc

SEQ ID NO: 4812 - RNA, 21 nt, synthetic construct
  source 1..21: mol_type = other RNA
cagcctcctcggcctcgtggg

SEQ ID NO: 4813 - RNA, 21 nt, synthetic construct
  source 1..21: mol_type = other RNA
cagcctggcctgcaccagatc

SEQ ID NO: 4814 - RNA, 21 nt, synthetic construct
  source 1..21: mol_type = other RNA
cagcgggcgggaggctggaag

SEQ ID NO: 4815 - RNA, 21 nt, synthetic construct
  source 1..21: mol_type = other RNA
cagctcaaatagggcgtcggc

SEQ ID NO: 4816 - RNA, 21 nt, synthetic construct
  source 1..21: mol_type = other RNA
cagctccagcagctgccgcgc

SEQ ID NO: 4817 - RNA, 21 nt, synthetic construct
  source 1..21: mol_type = other RNA
cagctcccaggccagcttggc

SEQ ID NO: 4818 - RNA, 21 nt, synthetic construct
  source 1..21: mol_type = other RNA
cagctcctcgaagccgtctag

SEQ ID NO: 4819 - RNA, 21 nt, synthetic construct
  source 1..21: mol_type = other RNA
cagctcggactctgcggcccg

SEQ ID NO: 4820 - RNA, 21 nt, synthetic construct
  source 1..21: mol_type = other RNA
cagctctcagaggccctgctg

SEQ ID NO: 4821 - RNA, 21 nt, synthetic construct
  source 1..21: mol_type = other RNA
cagctgagtcccacgaggctc

SEQ ID NO: 4822 - RNA, 21 nt, synthetic construct
  source 1..21: mol_type = other RNA
cagctgccgcgcccgcagtgt

SEQ ID NO: 4823 - RNA, 21 nt, synthetic construct
  source 1..21: mol_type = other RNA
cagctgccgttctgcccagtc

SEQ ID NO: 4824 - RNA, 21 nt, synthetic construct
  source 1..21: mol_type = other RNA
cagctgctggagctgctgcac

SEQ ID NO: 4825 - RNA, 21 nt, synthetic construct
  source 1..21: mol_type = other RNA
cagctggcccaaggaggcctg

SEQ ID NO: 4826 - RNA, 21 nt, synthetic construct
  source 1..21: mol_type = other RNA
cagctgtgtcacccgtttcag

SEQ ID NO: 4827 - RNA, 21 nt, synthetic construct
  source 1..21: mol_type = other RNA
cagcttcctcctgcaatgctt

SEQ ID NO: 4828 - RNA, 21 nt, synthetic construct
  source 1..21: mol_type = other RNA
cagcttcttctggaaaaggcc

SEQ ID NO: 4829 - RNA, 21 nt, synthetic construct
  source 1..21: mol_type = other RNA
cagcttggccagctctgccag

SEQ ID NO: 4830 - RNA, 21 nt, synthetic construct
  source 1..21: mol_type = other RNA
cagcttggcgtcctccccaag

SEQ ID NO: 4831 - RNA, 21 nt, synthetic construct
  source 1..21: mol_type = other RNA
cagctttgcccagcacagcaa

SEQ ID NO: 4832 - RNA, 21 nt, synthetic construct
  source 1..21: mol_type = other RNA
caggaagcagaaggtgcttgc

SEQ ID NO: 4833 - RNA, 21 nt, synthetic construct
  source 1..21: mol_type = other RNA
caggaagcattgcaggaggaa

SEQ ID NO: 4834 - RNA, 21 nt, synthetic construct
  source 1..21: mol_type = other RNA
caggaagccatcttgcgcttc

SEQ ID NO: 4835 - RNA, 21 nt, synthetic construct
  source 1..21: mol_type = other RNA
caggacacgtatggtgccgag

SEQ ID NO: 4836 - RNA, 21 nt, synthetic construct
  source 1..21: mol_type = other RNA
caggaggaagctggggaaggc

SEQ ID NO: 4837 - RNA, 21 nt, synthetic construct
  source 1..21: mol_type = other RNA
caggaggaccagttcccatcc

SEQ ID NO: 4838 - RNA, 21 nt, synthetic construct
  source 1..21: mol_type = other RNA
caggaggcgtgaggcgggtgc

SEQ ID NO: 4839 - RNA, 21 nt, synthetic construct
  source 1..21: mol_type = other RNA
caggatctgctcttctccctg

SEQ ID NO: 4840 - RNA, 21 nt, synthetic construct
  source 1..21: mol_type = other RNA
caggcatacgtgatgcgctac

SEQ ID NO: 4841 - RNA, 21 nt, synthetic construct
  source 1..21: mol_type = other RNA
caggccagcttggccagctct

SEQ ID NO: 4842 - RNA, 21 nt, synthetic construct
  source 1..21: mol_type = other RNA
caggccaggctggagaggagc

SEQ ID NO: 4843 - RNA, 21 nt, synthetic construct
  source 1..21: mol_type = other RNA
caggccataggcatcccccgg

SEQ ID NO: 4844 - RNA, 21 nt, synthetic construct
  source 1..21: mol_type = other RNA
caggcccaggcatacgtgatg

SEQ ID NO: 4845 - RNA, 21 nt, synthetic construct
  source 1..21: mol_type = other RNA
caggcccggatggcatcctag

SEQ ID NO: 4846 - RNA, 21 nt, synthetic construct
  source 1..21: mol_type = other RNA
caggcccggctcactgcccca

SEQ ID NO: 4847 - RNA, 21 nt, synthetic construct
  source 1..21: mol_type = other RNA
caggccgacatagagtcccgt

SEQ ID NO: 4848 - RNA, 21 nt, synthetic construct
  source 1..21: mol_type = other RNA
caggcctccttgggccagctg

SEQ ID NO: 4849 - RNA, 21 nt, synthetic construct
  source 1..21: mol_type = other RNA
caggctctggaccaggcggcc

SEQ ID NO: 4850 - RNA, 21 nt, synthetic construct
  source 1..21: mol_type = other RNA
caggctcttgctgctgctcct

SEQ ID NO: 4851 - RNA, 21 nt, synthetic construct
  source 1..21: mol_type = other RNA
caggctggagaggagcagcag

SEQ ID NO: 4852 - RNA, 21 nt, synthetic construct
  source 1..21: mol_type = other RNA
cagggagaagagcagatcctg

SEQ ID NO: 4853 - RNA, 21 nt, synthetic construct
  source 1..21: mol_type = other RNA
cagggagaagtcttggcccgc

SEQ ID NO: 4854 - RNA, 21 nt, synthetic construct
  source 1..21: mol_type = other RNA
cagggatgacagagcaccaag

SEQ ID NO: 4855 - RNA, 21 nt, synthetic construct
  source 1..21: mol_type = other RNA
cagggcaagagctattgggct

SEQ ID NO: 4856 - RNA, 21 nt, synthetic construct
  source 1..21: mol_type = other RNA
cagggcccccaggaagcattg

SEQ ID NO: 4857 - RNA, 21 nt, synthetic construct
  source 1..21: mol_type = other RNA
cagggcctctgagagctggca

SEQ ID NO: 4858 - RNA, 21 nt, synthetic construct
  source 1..21: mol_type = other RNA
cagggctctgtcttggtgctc

SEQ ID NO: 4859 - RNA, 21 nt, synthetic construct
  source 1..21: mol_type = other RNA
caggggacagagaagacaaag

SEQ ID NO: 4860 - RNA, 21 nt, synthetic construct
  source 1..21: mol_type = other RNA
caggggcgtgtcagggtgggg

SEQ ID NO: 4861 - RNA, 21 nt, synthetic construct
  source 1..21: mol_type = other RNA
caggtacctcgcaagcacctt

SEQ ID NO: 4862 - RNA, 21 nt, synthetic construct
  source 1..21: mol_type = other RNA
caggtcctcacgtctgcggat

SEQ ID NO: 4863 - RNA, 21 nt, synthetic construct
  source 1..21: mol_type = other RNA
caggtctcttcaagatgtggc

SEQ ID NO: 4864 - RNA, 21 nt, synthetic construct
  source 1..21: mol_type = other RNA
caggtggggtgaggggcttgg

SEQ ID NO: 4865 - RNA, 21 nt, synthetic construct
  source 1..21: mol_type = other RNA
cagtacatgtgcatcaggagg

SEQ ID NO: 4866 - RNA, 21 nt, synthetic construct
  source 1..21: mol_type = other RNA
cagtacctagcattgacccca

SEQ ID NO: 4867 - RNA, 21 nt, synthetic construct
  source 1..21: mol_type = other RNA
cagtacgactttgtcttctct

SEQ ID NO: 4868 - RNA, 21 nt, synthetic construct
  source 1..21: mol_type = other RNA
cagtcacagccacagccctac

SEQ ID NO: 4869 - RNA, 21 nt, synthetic construct
  source 1..21: mol_type = other RNA
cagtccggggtggccagttcc

SEQ ID NO: 4870 - RNA, 21 nt, synthetic construct
  source 1..21: mol_type = other RNA
cagtgagccgggcctgggctt

SEQ ID NO: 4871 - RNA, 21 nt, synthetic construct
  source 1..21: mol_type = other RNA
cagtgagcggtagaactgctc

SEQ ID NO: 4872 - RNA, 21 nt, synthetic construct
  source 1..21: mol_type = other RNA
cagtgcagcagctccagcagc

SEQ ID NO: 4873 - RNA, 21 nt, synthetic construct
  source 1..21: mol_type = other RNA
cagtgctgcggaggtccaggg

SEQ ID NO: 4874 - RNA, 21 nt, synthetic construct
  source 1..21: mol_type = other RNA
cagtgtccccggctgcagccg

SEQ ID NO: 4875 - RNA, 21 nt, synthetic construct
  source 1..21: mol_type = other RNA
cagtgtgccagctctcagagg

SEQ ID NO: 4876 - RNA, 21 nt, synthetic construct
  source 1..21: mol_type = other RNA
cagttcccatccgcagacgtg

SEQ ID NO: 4877 - RNA, 21 nt, synthetic construct
  source 1..21: mol_type = other RNA
cagttcccgctccaggctctt

SEQ ID NO: 4878 - RNA, 21 nt, synthetic construct
  source 1..21: mol_type = other RNA
cagttctaccgctcactgcag

SEQ ID NO: 4879 - RNA, 21 nt, synthetic construct
  source 1..21: mol_type = other RNA
cagttgtcatagggcctcttc

SEQ ID NO: 4880 - RNA, 21 nt, synthetic construct
  source 1..21: mol_type = other RNA
catacccccaccctgacacgc

SEQ ID NO: 4881 - RNA, 21 nt, synthetic construct
  source 1..21: mol_type = other RNA
catacgtgatgcgctactttg

SEQ ID NO: 4882 - RNA, 21 nt, synthetic construct
  source 1..21: mol_type = other RNA
catacgtgtcctgcagtgagc

SEQ ID NO: 4883 - RNA, 21 nt, synthetic construct
  source 1..21: mol_type = other RNA
catagagtcccgtgagcgtgg

SEQ ID NO: 4884 - RNA, 21 nt, synthetic construct
  source 1..21: mol_type = other RNA
cataggcatcccccggacggt

SEQ ID NO: 4885 - RNA, 21 nt, synthetic construct
  source 1..21: mol_type = other RNA
catagggcctcttcttccttg

SEQ ID NO: 4886 - RNA, 21 nt, synthetic construct
  source 1..21: mol_type = other RNA
catcaaagtaccctacaggag

SEQ ID NO: 4887 - RNA, 21 nt, synthetic construct
  source 1..21: mol_type = other RNA
catcacgtatgcctgggcctg

SEQ ID NO: 4888 - RNA, 21 nt, synthetic construct
  source 1..21: mol_type = other RNA
catcaggaggcgtgaggcggg

SEQ ID NO: 4889 - RNA, 21 nt, synthetic construct
  source 1..21: mol_type = other RNA
catcccccggacggttcaagc

SEQ ID NO: 4890 - RNA, 21 nt, synthetic construct
  source 1..21: mol_type = other RNA
catccctgagctctcaaagta

SEQ ID NO: 4891 - RNA, 21 nt, synthetic construct
  source 1..21: mol_type = other RNA
catccgcagacgtgaggacct

SEQ ID NO: 4892 - RNA, 21 nt, synthetic construct
  source 1..21: mol_type = other RNA
catcctagacggcttcgagga

SEQ ID NO: 4893 - RNA, 21 nt, synthetic construct
  source 1..21: mol_type = other RNA
catcctagtggaggtggatct

SEQ ID NO: 4894 - RNA, 21 nt, synthetic construct
  source 1..21: mol_type = other RNA
catcgcccaggtcctcacgtc

SEQ ID NO: 4895 - RNA, 21 nt, synthetic construct
  source 1..21: mol_type = other RNA
catcggccgccacgagtggct

SEQ ID NO: 4896 - RNA, 21 nt, synthetic construct
  source 1..21: mol_type = other RNA
catcggcggctgcctcggtgg

SEQ ID NO: 4897 - RNA, 21 nt, synthetic construct
  source 1..21: mol_type = other RNA
catcttgaagagacctgaccg

SEQ ID NO: 4898 - RNA, 21 nt, synthetic construct
  source 1..21: mol_type = other RNA
catcttgcgcttccagctcct

SEQ ID NO: 4899 - RNA, 21 nt, synthetic construct
  source 1..21: mol_type = other RNA
catggagaagccggacagctc

SEQ ID NO: 4900 - RNA, 21 nt, synthetic construct
  source 1..21: mol_type = other RNA
catggagcaggcccaggcata

SEQ ID NO: 4901 - RNA, 21 nt, synthetic construct
  source 1..21: mol_type = other RNA
catgtactgggcaaggccttg

SEQ ID NO: 4902 - RNA, 21 nt, synthetic construct
  source 1..21: mol_type = other RNA
catgtgcatcaggaggcgtga

SEQ ID NO: 4903 - RNA, 21 nt, synthetic construct
  source 1..21: mol_type = other RNA
cattgaccccaaggaagaaga

SEQ ID NO: 4904 - RNA, 21 nt, synthetic construct
  source 1..21: mol_type = other RNA
cattgcaggaggaagctgggg

SEQ ID NO: 4905 - RNA, 21 nt, synthetic construct
  source 1..21: mol_type = other RNA
cattgcttgaaccgtccgggg

SEQ ID NO: 4906 - RNA, 21 nt, synthetic construct
  source 1..21: mol_type = other RNA
catttgcccctctggattggg

SEQ ID NO: 4907 - RNA, 21 nt, synthetic construct
  source 1..21: mol_type = other RNA
ccaaaggcttagtccaacacc

SEQ ID NO: 4908 - RNA, 21 nt, synthetic construct
  source 1..21: mol_type = other RNA
ccaaattccagcctcctcggc

SEQ ID NO: 4909 - RNA, 21 nt, synthetic construct
  source 1..21: mol_type = other RNA
ccaacacaaggatgtctcttc

SEQ ID NO: 4910 - RNA, 21 nt, synthetic construct
  source 1..21: mol_type = other RNA
ccaacagcacctcagccaggc

SEQ ID NO: 4911 - RNA, 21 nt, synthetic construct
  source 1..21: mol_type = other RNA
ccaagacagagccctgacgct

SEQ ID NO: 4912 - RNA, 21 nt, synthetic construct
  source 1..21: mol_type = other RNA
ccaagacttctccctggacct

SEQ ID NO: 4913 - RNA, 21 nt, synthetic construct
  source 1..21: mol_type = other RNA
ccaagcccctcaccccacctg

SEQ ID NO: 4914 - RNA, 21 nt, synthetic construct
  source 1..21: mol_type = other RNA
ccaagctccagcagggcctct

SEQ ID NO: 4915 - RNA, 21 nt, synthetic construct
  source 1..21: mol_type = other RNA
ccaagctgccctccacgctca

SEQ ID NO: 4916 - RNA, 21 nt, synthetic construct
  source 1..21: mol_type = other RNA
ccaagctggcctgggagctgg

SEQ ID NO: 4917 - RNA, 21 nt, synthetic construct
  source 1..21: mol_type = other RNA
ccaaggaagaagaggccctat

SEQ ID NO: 4918 - RNA, 21 nt, synthetic construct
  source 1..21: mol_type = other RNA
ccaaggaggcctggctgaggt

SEQ ID NO: 4919 - RNA, 21 nt, synthetic construct
  source 1..21: mol_type = other RNA
ccaaggccttgcccagtacat

SEQ ID NO: 4920 - RNA, 21 nt, synthetic construct
  source 1..21: mol_type = other RNA
ccaatagctcttgccctgacc

SEQ ID NO: 4921 - RNA, 21 nt, synthetic construct
  source 1..21: mol_type = other RNA
ccaatccagaggggcaaatgc

SEQ ID NO: 4922 - RNA, 21 nt, synthetic construct
  source 1..21: mol_type = other RNA
ccacaagcccaggcccggctc

SEQ ID NO: 4923 - RNA, 21 nt, synthetic construct
  source 1..21: mol_type = other RNA
ccacagccactcgtggcggcc

SEQ ID NO: 4924 - RNA, 21 nt, synthetic construct
  source 1..21: mol_type = other RNA
ccacagccctactttgtgccg

SEQ ID NO: 4925 - RNA, 21 nt, synthetic construct
  source 1..21: mol_type = other RNA
ccacagggcccccaggaagca

SEQ ID NO: 4926 - RNA, 21 nt, synthetic construct
  source 1..21: mol_type = other RNA
ccacatcttgaagagacctga

SEQ ID NO: 4927 - RNA, 21 nt, synthetic construct
  source 1..21: mol_type = other RNA
ccaccccggactgggcagaac

SEQ ID NO: 4928 - RNA, 21 nt, synthetic construct
  source 1..21: mol_type = other RNA
ccaccctgacacgcccctggc

SEQ ID NO: 4929 - RNA, 21 nt, synthetic construct
  source 1..21: mol_type = other RNA
ccaccgaggcagccgccgatg

SEQ ID NO: 4930 - RNA, 21 nt, synthetic construct
  source 1..21: mol_type = other RNA
ccaccggctctgcaaaggcca

SEQ ID NO: 4931 - RNA, 21 nt, synthetic construct
  source 1..21: mol_type = other RNA
ccacctccactaggatgccat

SEQ ID NO: 4932 - RNA, 21 nt, synthetic construct
  source 1..21: mol_type = other RNA
ccacctgaaacgggtgacaca

SEQ ID NO: 4933 - RNA, 21 nt, synthetic construct
  source 1..21: mol_type = other RNA
ccacgaggccgaggaggctgg

SEQ ID NO: 4934 - RNA, 21 nt, synthetic construct
  source 1..21: mol_type = other RNA
ccacgaggctccccaatccag

SEQ ID NO: 4935 - RNA, 21 nt, synthetic construct
  source 1..21: mol_type = other RNA
ccacgagtggctgtgggccca

SEQ ID NO: 4936 - RNA, 21 nt, synthetic construct
  source 1..21: mol_type = other RNA
ccacgctcacgggactctatg

SEQ ID NO: 4937 - RNA, 21 nt, synthetic construct
  source 1..21: mol_type = other RNA
ccacgctttctggctgggctg

SEQ ID NO: 4938 - RNA, 21 nt, synthetic construct
  source 1..21: mol_type = other RNA
ccacgtgctgccaaattccag

SEQ ID NO: 4939 - RNA, 21 nt, synthetic construct
  source 1..21: mol_type = other RNA
ccactaggatgccatccgggc

SEQ ID NO: 4940 - RNA, 21 nt, synthetic construct
  source 1..21: mol_type = other RNA
ccactcagagccagccacagg

SEQ ID NO: 4941 - RNA, 21 nt, synthetic construct
  source 1..21: mol_type = other RNA
ccactcgtggcggccgatgag

SEQ ID NO: 4942 - RNA, 21 nt, synthetic construct
  source 1..21: mol_type = other RNA
ccacttcttctcagtcacagc

SEQ ID NO: 4943 - RNA, 21 nt, synthetic construct
  source 1..21: mol_type = other RNA
ccagaaaagagaggcggccgg

SEQ ID NO: 4944 - RNA, 21 nt, synthetic construct
  source 1..21: mol_type = other RNA
ccagaaagcgtggcacgccct

SEQ ID NO: 4945 - RNA, 21 nt, synthetic construct
  source 1..21: mol_type = other RNA
ccagaagaagctgctccgagg

SEQ ID NO: 4946 - RNA, 21 nt, synthetic construct
  source 1..21: mol_type = other RNA
ccagagcctgagcaaggccga

SEQ ID NO: 4947 - RNA, 21 nt, synthetic construct
  source 1..21: mol_type = other RNA
ccagaggggcaaatgccagtg

SEQ ID NO: 4948 - RNA, 21 nt, synthetic construct
  source 1..21: mol_type = other RNA
ccagatccacctccactagga

SEQ ID NO: 4949 - RNA, 21 nt, synthetic construct
  source 1..21: mol_type = other RNA
ccagcacagcaatcactcgtg

SEQ ID NO: 4950 - RNA, 21 nt, synthetic construct
  source 1..21: mol_type = other RNA
ccagcaggccgacatagagtc

SEQ ID NO: 4951 - RNA, 21 nt, synthetic construct
  source 1..21: mol_type = other RNA
ccagcagggcctctgagagct

SEQ ID NO: 4952 - RNA, 21 nt, synthetic construct
  source 1..21: mol_type = other RNA
ccagccacagggcccccagga

SEQ ID NO: 4953 - RNA, 21 nt, synthetic construct
  source 1..21: mol_type = other RNA
ccagccagaaagcgtggcacg

SEQ ID NO: 4954 - RNA, 21 nt, synthetic construct
  source 1..21: mol_type = other RNA
ccagccagttgtcatagggcc

SEQ ID NO: 4955 - RNA, 21 nt, synthetic construct
  source 1..21: mol_type = other RNA
ccagcccaatagctcttgccc

SEQ ID NO: 4956 - RNA, 21 nt, synthetic construct
  source 1..21: mol_type = other RNA
ccagcctcctcggcctcgtgg

SEQ ID NO: 4957 - RNA, 21 nt, synthetic construct
  source 1..21: mol_type = other RNA
ccagcctggcctgcaccagat

SEQ ID NO: 4958 - RNA, 21 nt, synthetic construct
  source 1..21: mol_type = other RNA
ccagctcccaggccagcttgg

SEQ ID NO: 4959 - RNA, 21 nt, synthetic construct
  source 1..21: mol_type = other RNA
ccagctcctcgaagccgtcta

SEQ ID NO: 4960 - RNA, 21 nt, synthetic construct
  source 1..21: mol_type = other RNA
ccagctcggactctgcggccc

SEQ ID NO: 4961 - RNA, 21 nt, synthetic construct
  source 1..21: mol_type = other RNA
ccagctctcagaggccctgct

SEQ ID NO: 4962 - RNA, 21 nt, synthetic construct
  source 1..21: mol_type = other RNA
ccagctgccgttctgcccagt

SEQ ID NO: 4963 - RNA, 21 nt, synthetic construct
  source 1..21: mol_type = other RNA
ccagcttcctcctgcaatgct

SEQ ID NO: 4964 - RNA, 21 nt, synthetic construct
  source 1..21: mol_type = other RNA
ccagcttggccagctctgcca

SEQ ID NO: 4965 - RNA, 21 nt, synthetic construct
  source 1..21: mol_type = other RNA
ccagctttgcccagcacagca

SEQ ID NO: 4966 - RNA, 21 nt, synthetic construct
  source 1..21: mol_type = other RNA
ccaggaagcattgcaggagga

SEQ ID NO: 4967 - RNA, 21 nt, synthetic construct
  source 1..21: mol_type = other RNA
ccaggcatacgtgatgcgcta

SEQ ID NO: 4968 - RNA, 21 nt, synthetic construct
  source 1..21: mol_type = other RNA
ccaggccagcttggccagctc

SEQ ID NO: 4969 - RNA, 21 nt, synthetic construct
  source 1..21: mol_type = other RNA
ccaggcctccttgggccagct

SEQ ID NO: 4970 - RNA, 21 nt, synthetic construct
  source 1..21: mol_type = other RNA
ccaggctcttgctgctgctcc

SEQ ID NO: 4971 - RNA, 21 nt, synthetic construct
  source 1..21: mol_type = other RNA
ccaggctggagaggagcagca

SEQ ID NO: 4972 - RNA, 21 nt, synthetic construct
  source 1..21: mol_type = other RNA
ccagggagaagagcagatcct

SEQ ID NO: 4973 - RNA, 21 nt, synthetic construct
  source 1..21: mol_type = other RNA
ccagggagaagtcttggcccg

SEQ ID NO: 4974 - RNA, 21 nt, synthetic construct
  source 1..21: mol_type = other RNA
ccaggggcgtgtcagggtggg

SEQ ID NO: 4975 - RNA, 21 nt, synthetic construct
  source 1..21: mol_type = other RNA
ccaggtcctcacgtctgcgga

SEQ ID NO: 4976 - RNA, 21 nt, synthetic construct
  source 1..21: mol_type = other RNA
ccagtacatgtgcatcaggag

SEQ ID NO: 4977 - RNA, 21 nt, synthetic construct
  source 1..21: mol_type = other RNA
ccagtacgactttgtcttctc

SEQ ID NO: 4978 - RNA, 21 nt, synthetic construct
  source 1..21: mol_type = other RNA
ccagtccggggtggccagttc

SEQ ID NO: 4979 - RNA, 21 nt, synthetic construct
  source 1..21: mol_type = other RNA
ccagtgctgcggaggtccagg

SEQ ID NO: 4980 - RNA, 21 nt, synthetic construct
  source 1..21: mol_type = other RNA
ccagttcccatccgcagacgt

SEQ ID NO: 4981 - RNA, 21 nt, synthetic construct
  source 1..21: mol_type = other RNA
ccagttcccgctccaggctct

SEQ ID NO: 4982 - RNA, 21 nt, synthetic construct
  source 1..21: mol_type = other RNA
ccagttgtcatagggcctctt

SEQ ID NO: 4983 - RNA, 21 nt, synthetic construct
  source 1..21: mol_type = other RNA
ccatacgtgtcctgcagtgag

SEQ ID NO: 4984 - RNA, 21 nt, synthetic construct
  source 1..21: mol_type = other RNA
ccataggcatcccccggacgg

SEQ ID NO: 4985 - RNA, 21 nt, synthetic construct
  source 1..21: mol_type = other RNA
ccatccgcagacgtgaggacc

SEQ ID NO: 4986 - RNA, 21 nt, synthetic construct
  source 1..21: mol_type = other RNA
ccatcgcccaggtcctcacgt

SEQ ID NO: 4987 - RNA, 21 nt, synthetic construct
  source 1..21: mol_type = other RNA
ccatcggcggctgcctcggtg

SEQ ID NO: 4988 - RNA, 21 nt, synthetic construct
  source 1..21: mol_type = other RNA
ccatcttgcgcttccagctcc

SEQ ID NO: 4989 - RNA, 21 nt, synthetic construct
  source 1..21: mol_type = other RNA
ccatggagaagccggacagct

SEQ ID NO: 4990 - RNA, 21 nt, synthetic construct
  source 1..21: mol_type = other RNA
ccatggagcaggcccaggcat

SEQ ID NO: 4991 - RNA, 21 nt, synthetic construct
  source 1..21: mol_type = other RNA
ccattgcttgaaccgtccggg

SEQ ID NO: 4992 - RNA, 21 nt, synthetic construct
  source 1..21: mol_type = other RNA
cccaacacaaggatgtctctt

SEQ ID NO: 4993 - RNA, 21 nt, synthetic construct
  source 1..21: mol_type = other RNA
cccaagcccctcaccccacct

SEQ ID NO: 4994 - RNA, 21 nt, synthetic construct
  source 1..21: mol_type = other RNA
cccaagctccagcagggcctc

SEQ ID NO: 4995 - RNA, 21 nt, synthetic construct
  source 1..21: mol_type = other RNA
cccaaggaagaagaggcccta

SEQ ID NO: 4996 - RNA, 21 nt, synthetic construct
  source 1..21: mol_type = other RNA
cccaaggaggcctggctgagg

SEQ ID NO: 4997 - RNA, 21 nt, synthetic construct
  source 1..21: mol_type = other RNA
cccaatagctcttgccctgac

SEQ ID NO: 4998 - RNA, 21 nt, synthetic construct
  source 1..21: mol_type = other RNA
cccaatccagaggggcaaatg

SEQ ID NO: 4999 - RNA, 21 nt, synthetic construct
  source 1..21: mol_type = other RNA
cccacagccactcgtggcggc

SEQ ID NO: 5000 - RNA, 21 nt, synthetic construct
  source 1..21: mol_type = other RNA
cccaccctgacacgcccctgg

SEQ ID NO: 5001 - RNA, 21 nt, synthetic construct
  source 1..21: mol_type = other RNA
cccacctgaaacgggtgacac

SEQ ID NO: 5002 - RNA, 21 nt, synthetic construct
  source 1..21: mol_type = other RNA
cccacgaggccgaggaggctg

SEQ ID NO: 5003 - RNA, 21 nt, synthetic construct
  source 1..21: mol_type = other RNA
cccacgaggctccccaatcca

SEQ ID NO: 5004 - RNA, 21 nt, synthetic construct
  source 1..21: mol_type = other RNA
cccagaaaagagaggcggccg

SEQ ID NO: 5005 - RNA, 21 nt, synthetic construct
  source 1..21: mol_type = other RNA
cccagcacagcaatcactcgt

SEQ ID NO: 5006 - RNA, 21 nt, synthetic construct
  source 1..21: mol_type = other RNA
cccagcaggccgacatagagt

SEQ ID NO: 5007 - RNA, 21 nt, synthetic construct
  source 1..21: mol_type = other RNA
cccagccagaaagcgtggcac

SEQ ID NO: 5008 - RNA, 21 nt, synthetic construct
  source 1..21: mol_type = other RNA
cccagcccaatagctcttgcc

SEQ ID NO: 5009 - RNA, 21 nt, synthetic construct
  source 1..21: mol_type = other RNA
cccagctcccaggccagcttg

SEQ ID NO: 5010 - RNA, 21 nt, synthetic construct
  source 1..21: mol_type = other RNA
cccagcttcctcctgcaatgc

SEQ ID NO: 5011 - RNA, 21 nt, synthetic construct
  source 1..21: mol_type = other RNA
cccaggaagcattgcaggagg

SEQ ID NO: 5012 - RNA, 21 nt, synthetic construct
  source 1..21: mol_type = other RNA
cccaggcatacgtgatgcgct

SEQ ID NO: 5013 - RNA, 21 nt, synthetic construct
  source 1..21: mol_type = other RNA
cccaggccagcttggccagct

SEQ ID NO: 5014 - RNA, 21 nt, synthetic construct
  source 1..21: mol_type = other RNA
cccagggagaagagcagatcc

SEQ ID NO: 5015 - RNA, 21 nt, synthetic construct
  source 1..21: mol_type = other RNA
cccaggtcctcacgtctgcgg

SEQ ID NO: 5016 - RNA, 21 nt, synthetic construct
  source 1..21: mol_type = other RNA
cccagtacatgtgcatcagga

SEQ ID NO: 5017 - RNA, 21 nt, synthetic construct
  source 1..21: mol_type = other RNA
cccagtacgactttgtcttct

SEQ ID NO: 5018 - RNA, 21 nt, synthetic construct
  source 1..21: mol_type = other RNA
cccagtccggggtggccagtt

SEQ ID NO: 5019 - RNA, 21 nt, synthetic construct
  source 1..21: mol_type = other RNA
cccatccgcagacgtgaggac

SEQ ID NO: 5020 - RNA, 21 nt, synthetic construct
  source 1..21: mol_type = other RNA
ccccaagcccctcaccccacc

SEQ ID NO: 5021 - RNA, 21 nt, synthetic construct
  source 1..21: mol_type = other RNA
ccccaagctccagcagggcct

SEQ ID NO: 5022 - RNA, 21 nt, synthetic construct
  source 1..21: mol_type = other RNA
ccccaaggaagaagaggccct

SEQ ID NO: 5023 - RNA, 21 nt, synthetic construct
  source 1..21: mol_type = other RNA
ccccaatccagaggggcaaat

SEQ ID NO: 5024 - RNA, 21 nt, synthetic construct
  source 1..21: mol_type = other RNA
ccccaccctgacacgcccctg

SEQ ID NO: 5025 - RNA, 21 nt, synthetic construct
  source 1..21: mol_type = other RNA
ccccacctgaaacgggtgaca

SEQ ID NO: 5026 - RNA, 21 nt, synthetic construct
  source 1..21: mol_type = other RNA
ccccagcccaatagctcttgc

SEQ ID NO: 5027 - RNA, 21 nt, synthetic construct
  source 1..21: mol_type = other RNA
ccccagcttcctcctgcaatg

SEQ ID NO: 5028 - RNA, 21 nt, synthetic construct
  source 1..21: mol_type = other RNA
ccccaggaagcattgcaggag

SEQ ID NO: 5029 - RNA, 21 nt, synthetic construct
  source 1..21: mol_type = other RNA
ccccagtacgactttgtcttc

SEQ ID NO: 5030 - RNA, 21 nt, synthetic construct
  source 1..21: mol_type = other RNA
cccccaccctgacacgcccct

SEQ ID NO: 5031 - RNA, 21 nt, synthetic construct
  source 1..21: mol_type = other RNA
cccccaggaagcattgcagga

SEQ ID NO: 5032 - RNA, 21 nt, synthetic construct
  source 1..21: mol_type = other RNA
cccccggacggttcaagcaat

SEQ ID NO: 5033 - RNA, 21 nt, synthetic construct
  source 1..21: mol_type = other RNA
ccccggacggttcaagcaatg

SEQ ID NO: 5034 - RNA, 21 nt, synthetic construct
  source 1..21: mol_type = other RNA
ccccggactgggcagaacggc

SEQ ID NO: 5035 - RNA, 21 nt, synthetic construct
  source 1..21: mol_type = other RNA
ccccggccgcctctcttttct

SEQ ID NO: 5036 - RNA, 21 nt, synthetic construct
  source 1..21: mol_type = other RNA
ccccggctgcagccgcttcag

SEQ ID NO: 5037 - RNA, 21 nt, synthetic construct
  source 1..21: mol_type = other RNA
cccctcaccccacctgaaacg

SEQ ID NO: 5038 - RNA, 21 nt, synthetic construct
  source 1..21: mol_type = other RNA
cccctctggattggggagcct

SEQ ID NO: 5039 - RNA, 21 nt, synthetic construct
  source 1..21: mol_type = other RNA
cccctgccattgcttgaaccg

SEQ ID NO: 5040 - RNA, 21 nt, synthetic construct
  source 1..21: mol_type = other RNA
cccctggcctttgcagagccg

SEQ ID NO: 5041 - RNA, 21 nt, synthetic construct
  source 1..21: mol_type = other RNA
cccgagtagggctcccaggca

SEQ ID NO: 5042 - RNA, 21 nt, synthetic construct
  source 1..21: mol_type = other RNA
cccgcaggcccggatggcatc

SEQ ID NO: 5043 - RNA, 21 nt, synthetic construct
  source 1..21: mol_type = other RNA
cccgcagtacctagcattgac

SEQ ID NO: 5044 - RNA, 21 nt, synthetic construct
  source 1..21: mol_type = other RNA
cccgcagtgtccccggctgca

SEQ ID NO: 5045 - RNA, 21 nt, synthetic construct
  source 1..21: mol_type = other RNA
cccgccgcctccaaggccttg

SEQ ID NO: 5046 - RNA, 21 nt, synthetic construct
  source 1..21: mol_type = other RNA
cccgcctcacgcctcctgatg

SEQ ID NO: 5047 - RNA, 21 nt, synthetic construct
  source 1..21: mol_type = other RNA
cccgcggtgggtgttggacta

SEQ ID NO: 5048 - RNA, 21 nt, synthetic construct
  source 1..21: mol_type = other RNA
cccgctccaggctcttgctgc

SEQ ID NO: 5049 - RNA, 21 nt, synthetic construct
  source 1..21: mol_type = other RNA
cccgctgcctgggagccctac

SEQ ID NO: 5050 - RNA, 21 nt, synthetic construct
  source 1..21: mol_type = other RNA
cccggacggttcaagcaatgg

SEQ ID NO: 5051 - RNA, 21 nt, synthetic construct
  source 1..21: mol_type = other RNA
cccggactgggcagaacggca

SEQ ID NO: 5052 - RNA, 21 nt, synthetic construct
  source 1..21: mol_type = other RNA
cccggaggagcgtcagggctc

SEQ ID NO: 5053 - RNA, 21 nt, synthetic construct
  source 1..21: mol_type = other RNA
cccggatggcatcctagtgga

SEQ ID NO: 5054 - RNA, 21 nt, synthetic construct
  source 1..21: mol_type = other RNA
cccggcacaaagtagggctgt

SEQ ID NO: 5055 - RNA, 21 nt, synthetic construct
  source 1..21: mol_type = other RNA
cccggccgcctctcttttctg

SEQ ID NO: 5056 - RNA, 21 nt, synthetic construct
  source 1..21: mol_type = other RNA
cccggctgcagccgcttcagg

SEQ ID NO: 5057 - RNA, 21 nt, synthetic construct
  source 1..21: mol_type = other RNA
cccgtgagcgtggagggcagc

SEQ ID NO: 5058 - RNA, 21 nt, synthetic construct
  source 1..21: mol_type = other RNA
cccgtttcaggtggggtgagg

SEQ ID NO: 5059 - RNA, 21 nt, synthetic construct
  source 1..21: mol_type = other RNA
ccctacaggaggaccagttcc

SEQ ID NO: 5060 - RNA, 21 nt, synthetic construct
  source 1..21: mol_type = other RNA
ccctactcgggccatcggcgg

SEQ ID NO: 5061 - RNA, 21 nt, synthetic construct
  source 1..21: mol_type = other RNA
ccctactttgtgccgggcagt

SEQ ID NO: 5062 - RNA, 21 nt, synthetic construct
  source 1..21: mol_type = other RNA
ccctatgacaactggctggag

SEQ ID NO: 5063 - RNA, 21 nt, synthetic construct
  source 1..21: mol_type = other RNA
ccctatttgagctgtccggct

SEQ ID NO: 5064 - RNA, 21 nt, synthetic construct
  source 1..21: mol_type = other RNA
ccctcaccccacctgaaacgg

SEQ ID NO: 5065 - RNA, 21 nt, synthetic construct
  source 1..21: mol_type = other RNA
ccctccacgctcacgggactc

SEQ ID NO: 5066 - RNA, 21 nt, synthetic construct
  source 1..21: mol_type = other RNA
ccctccagccagttgtcatag

SEQ ID NO: 5067 - RNA, 21 nt, synthetic construct
  source 1..21: mol_type = other RNA
ccctcctcctcacagcccggc

SEQ ID NO: 5068 - RNA, 21 nt, synthetic construct
  source 1..21: mol_type = other RNA
ccctctggattggggagcctc

SEQ ID NO: 5069 - RNA, 21 nt, synthetic construct
  source 1..21: mol_type = other RNA
ccctgacacgcccctggcctt

SEQ ID NO: 5070 - RNA, 21 nt, synthetic construct
  source 1..21: mol_type = other RNA
ccctgaccagctttgcccagc

SEQ ID NO: 5071 - RNA, 21 nt, synthetic construct
  source 1..21: mol_type = other RNA
ccctgacgctcctccgggacc

SEQ ID NO: 5072 - RNA, 21 nt, synthetic construct
  source 1..21: mol_type = other RNA
ccctgagctctcaaagtagcg

SEQ ID NO: 5073 - RNA, 21 nt, synthetic construct
  source 1..21: mol_type = other RNA
ccctgccattgcttgaaccgt

SEQ ID NO: 5074 - RNA, 21 nt, synthetic construct
  source 1..21: mol_type = other RNA
ccctgctggagcttggggagg

SEQ ID NO: 5075 - RNA, 21 nt, synthetic construct
  source 1..21: mol_type = other RNA
ccctggacctccgcagcactg

SEQ ID NO: 5076 - RNA, 21 nt, synthetic construct
  source 1..21: mol_type = other RNA
ccctggcagagctggccaagc

SEQ ID NO: 5077 - RNA, 21 nt, synthetic construct
  source 1..21: mol_type = other RNA
ccctggcctttgcagagccgg

SEQ ID NO: 5078 - RNA, 21 nt, synthetic construct
  source 1..21: mol_type = other RNA
ccctgggcccacagccactcg

SEQ ID NO: 5079 - RNA, 21 nt, synthetic construct
  source 1..21: mol_type = other RNA
ccctgtggctggctctgagtg

SEQ ID NO: 5080 - RNA, 21 nt, synthetic construct
  source 1..21: mol_type = other RNA
ccgacatagagtcccgtgagc

SEQ ID NO: 5081 - RNA, 21 nt, synthetic construct
  source 1..21: mol_type = other RNA
ccgacgccctatttgagctgt

SEQ ID NO: 5082 - RNA, 21 nt, synthetic construct
  source 1..21: mol_type = other RNA
ccgagctggccttccccagct

SEQ ID NO: 5083 - RNA, 21 nt, synthetic construct
  source 1..21: mol_type = other RNA
ccgaggaggctggaatttggc

SEQ ID NO: 5084 - RNA, 21 nt, synthetic construct
  source 1..21: mol_type = other RNA
ccgaggttgcaccctcctcct

SEQ ID NO: 5085 - RNA, 21 nt, synthetic construct
  source 1..21: mol_type = other RNA
ccgagtagggctcccaggcag

SEQ ID NO: 5086 - RNA, 21 nt, synthetic construct
  source 1..21: mol_type = other RNA
ccgatgaggttttcagccaca

SEQ ID NO: 5087 - RNA, 21 nt, synthetic construct
  source 1..21: mol_type = other RNA
ccgatggcccgagtagggctc

SEQ ID NO: 5088 - RNA, 21 nt, synthetic construct
  source 1..21: mol_type = other RNA
ccgcacgtgctgtgcaggaag

SEQ ID NO: 5089 - RNA, 21 nt, synthetic construct
  source 1..21: mol_type = other RNA
ccgcagacatcaaagtaccct

SEQ ID NO: 5090 - RNA, 21 nt, synthetic construct
  source 1..21: mol_type = other RNA
ccgcagacgtgaggacctggg

SEQ ID NO: 5091 - RNA, 21 nt, synthetic construct
  source 1..21: mol_type = other RNA
ccgcagagtccgagctggcct

SEQ ID NO: 5092 - RNA, 21 nt, synthetic construct
  source 1..21: mol_type = other RNA
ccgcagcactggcatttgccc

SEQ ID NO: 5093 - RNA, 21 nt, synthetic construct
  source 1..21: mol_type = other RNA
ccgcaggcccggatggcatcc

SEQ ID NO: 5094 - RNA, 21 nt, synthetic construct
  source 1..21: mol_type = other RNA
ccgcagtacctagcattgacc

SEQ ID NO: 5095 - RNA, 21 nt, synthetic construct
  source 1..21: mol_type = other RNA
ccgcagtgtccccggctgcag

SEQ ID NO: 5096 - RNA, 21 nt, synthetic construct
  source 1..21: mol_type = other RNA
ccgccacgagtggctgtgggc

SEQ ID NO: 5097 - RNA, 21 nt, synthetic construct
  source 1..21: mol_type = other RNA
ccgccgatggcccgagtaggg

SEQ ID NO: 5098 - RNA, 21 nt, synthetic construct
  source 1..21: mol_type = other RNA
ccgccgcctccaaggccttgc

SEQ ID NO: 5099 - RNA, 21 nt, synthetic construct
  source 1..21: mol_type = other RNA
ccgccggtgctccttggcagc

SEQ ID NO: 5100 - RNA, 21 nt, synthetic construct
  source 1..21: mol_type = other RNA
ccgcctcacgcctcctgatgc

SEQ ID NO: 5101 - RNA, 21 nt, synthetic construct
  source 1..21: mol_type = other RNA
ccgcctccaaggccttgccca

SEQ ID NO: 5102 - RNA, 21 nt, synthetic construct
  source 1..21: mol_type = other RNA
ccgcctctcttttctgggcac

SEQ ID NO: 5103 - RNA, 21 nt, synthetic construct
  source 1..21: mol_type = other RNA
ccgcctggtccagagcctgag

SEQ ID NO: 5104 - RNA, 21 nt, synthetic construct
  source 1..21: mol_type = other RNA
ccgcggtgggtgttggactaa

SEQ ID NO: 5105 - RNA, 21 nt, synthetic construct
  source 1..21: mol_type = other RNA
ccgcgtgagacacgagtgatt

SEQ ID NO: 5106 - RNA, 21 nt, synthetic construct
  source 1..21: mol_type = other RNA
ccgcgttctgctcatcctaga

SEQ ID NO: 5107 - RNA, 21 nt, synthetic construct
  source 1..21: mol_type = other RNA
ccgctcactgcaggacacgta

SEQ ID NO: 5108 - RNA, 21 nt, synthetic construct
  source 1..21: mol_type = other RNA
ccgctccaggctcttgctgct

SEQ ID NO: 5109 - RNA, 21 nt, synthetic construct
  source 1..21: mol_type = other RNA
ccgctgcctgggagccctact

SEQ ID NO: 5110 - RNA, 21 nt, synthetic construct
  source 1..21: mol_type = other RNA
ccgcttcaggtacctcgcaag

SEQ ID NO: 5111 - RNA, 21 nt, synthetic construct
  source 1..21: mol_type = other RNA
ccggacagctcaaatagggcg

SEQ ID NO: 5112 - RNA, 21 nt, synthetic construct
  source 1..21: mol_type = other RNA
ccggacggttcaagcaatggc

SEQ ID NO: 5113 - RNA, 21 nt, synthetic construct
  source 1..21: mol_type = other RNA
ccggactgggcagaacggcag

SEQ ID NO: 5114 - RNA, 21 nt, synthetic construct
  source 1..21: mol_type = other RNA
ccggaggagcgtcagggctct

SEQ ID NO: 5115 - RNA, 21 nt, synthetic construct
  source 1..21: mol_type = other RNA
ccggatggcatcctagtggag

SEQ ID NO: 5116 - RNA, 21 nt, synthetic construct
  source 1..21: mol_type = other RNA
ccggcacaaagtagggctgtg

SEQ ID NO: 5117 - RNA, 21 nt, synthetic construct
  source 1..21: mol_type = other RNA
ccggccacttcttctcagtca

SEQ ID NO: 5118 - RNA, 21 nt, synthetic construct
  source 1..21: mol_type = other RNA
ccggccgcctctcttttctgg

SEQ ID NO: 5119 - RNA, 21 nt, synthetic construct
  source 1..21: mol_type = other RNA
ccggccttttccagaagaagc

SEQ ID NO: 5120 - RNA, 21 nt, synthetic construct
  source 1..21: mol_type = other RNA
ccggctcactgccccagccca

SEQ ID NO: 5121 - RNA, 21 nt, synthetic construct
  source 1..21: mol_type = other RNA
ccggctctgcaaaggccaggg

SEQ ID NO: 5122 - RNA, 21 nt, synthetic construct
  source 1..21: mol_type = other RNA
ccggctgcagccgcttcaggt

SEQ ID NO: 5123 - RNA, 21 nt, synthetic construct
  source 1..21: mol_type = other RNA
ccggcttccccagtacgactt

SEQ ID NO: 5124 - RNA, 21 nt, synthetic construct
  source 1..21: mol_type = other RNA
ccggcttctccatggagcagg

SEQ ID NO: 5125 - RNA, 21 nt, synthetic construct
  source 1..21: mol_type = other RNA
ccgggaccggccacttcttct

SEQ ID NO: 5126 - RNA, 21 nt, synthetic construct
  source 1..21: mol_type = other RNA
ccgggcagtgtgccagctctc

SEQ ID NO: 5127 - RNA, 21 nt, synthetic construct
  source 1..21: mol_type = other RNA
ccgggctgtgaggaggagggt

SEQ ID NO: 5128 - RNA, 21 nt, synthetic construct
  source 1..21: mol_type = other RNA
ccggggagctcctgtaccacg

SEQ ID NO: 5129 - RNA, 21 nt, synthetic construct
  source 1..21: mol_type = other RNA
ccgggggatgcctatggcctg

SEQ ID NO: 5130 - RNA, 21 nt, synthetic construct
  source 1..21: mol_type = other RNA
ccggggtggccagttcccgct

SEQ ID NO: 5131 - RNA, 21 nt, synthetic construct
  source 1..21: mol_type = other RNA
ccggtcccggaggagcgtcag

SEQ ID NO: 5132 - RNA, 21 nt, synthetic construct
  source 1..21: mol_type = other RNA
ccggtccgcacgtgctgtgca

SEQ ID NO: 5133 - RNA, 21 nt, synthetic construct
  source 1..21: mol_type = other RNA
ccggtgctccttggcagccaa

SEQ ID NO: 5134 - RNA, 21 nt, synthetic construct
  source 1..21: mol_type = other RNA
ccggtggagcagttctaccgc

SEQ ID NO: 5135 - RNA, 21 nt, synthetic construct
  source 1..21: mol_type = other RNA
ccgtccgggggatgcctatgg

SEQ ID NO: 5136 - RNA, 21 nt, synthetic construct
  source 1..21: mol_type = other RNA
ccgtctaggatgagcagaacg

SEQ ID NO: 5137 - RNA, 21 nt, synthetic construct
  source 1..21: mol_type = other RNA
ccgtgagcgtggagggcagct

SEQ ID NO: 5138 - RNA, 21 nt, synthetic construct
  source 1..21: mol_type = other RNA
ccgtgcagccctcgacagccc

SEQ ID NO: 5139 - RNA, 21 nt, synthetic construct
  source 1..21: mol_type = other RNA
ccgttctgcccagtccggggt

SEQ ID NO: 5140 - RNA, 21 nt, synthetic construct
  source 1..21: mol_type = other RNA
ccgtttcaggtggggtgaggg

SEQ ID NO: 5141 - RNA, 21 nt, synthetic construct
  source 1..21: mol_type = other RNA
cctacaggaggaccagttccc

SEQ ID NO: 5142 - RNA, 21 nt, synthetic construct
  source 1..21: mol_type = other RNA
cctactcgggccatcggcggc

SEQ ID NO: 5143 - RNA, 21 nt, synthetic construct
  source 1..21: mol_type = other RNA
cctactttgtgccgggcagtg

SEQ ID NO: 5144 - RNA, 21 nt, synthetic construct
  source 1..21: mol_type = other RNA
cctagacggcttcgaggagct

SEQ ID NO: 5145 - RNA, 21 nt, synthetic construct
  source 1..21: mol_type = other RNA
cctagcattgaccccaaggaa

SEQ ID NO: 5146 - RNA, 21 nt, synthetic construct
  source 1..21: mol_type = other RNA
cctagtggaggtggatctggt

SEQ ID NO: 5147 - RNA, 21 nt, synthetic construct
  source 1..21: mol_type = other RNA
cctatgacaactggctggagg

SEQ ID NO: 5148 - RNA, 21 nt, synthetic construct
  source 1..21: mol_type = other RNA
cctatggcctgcaggatctgc

SEQ ID NO: 5149 - RNA, 21 nt, synthetic construct
  source 1..21: mol_type = other RNA
cctatttgagctgtccggctt

SEQ ID NO: 5150 - RNA, 21 nt, synthetic construct
  source 1..21: mol_type = other RNA
cctcaccccacctgaaacggg

SEQ ID NO: 5151 - RNA, 21 nt, synthetic construct
  source 1..21: mol_type = other RNA
cctcacgcctcctgatgcaca

SEQ ID NO: 5152 - RNA, 21 nt, synthetic construct
  source 1..21: mol_type = other RNA
cctcacgtctgcggatgggaa

SEQ ID NO: 5153 - RNA, 21 nt, synthetic construct
  source 1..21: mol_type = other RNA
cctcagccaggcctccttggg

SEQ ID NO: 5154 - RNA, 21 nt, synthetic construct
  source 1..21: mol_type = other RNA
cctcatcggccgccacgagtg

SEQ ID NO: 5155 - RNA, 21 nt, synthetic construct
  source 1..21: mol_type = other RNA
cctccaaggccttgcccagta

SEQ ID NO: 5156 - RNA, 21 nt, synthetic construct
  source 1..21: mol_type = other RNA
cctccacgctcacgggactct

SEQ ID NO: 5157 - RNA, 21 nt, synthetic construct
  source 1..21: mol_type = other RNA
cctccactaggatgccatccg

SEQ ID NO: 5158 - RNA, 21 nt, synthetic construct
  source 1..21: mol_type = other RNA
cctccagccagttgtcatagg

SEQ ID NO: 5159 - RNA, 21 nt, synthetic construct
  source 1..21: mol_type = other RNA
cctccccaagctccagcaggg

SEQ ID NO: 5160 - RNA, 21 nt, synthetic construct
  source 1..21: mol_type = other RNA
cctccgcagcactggcatttg

SEQ ID NO: 5161 - RNA, 21 nt, synthetic construct
  source 1..21: mol_type = other RNA
cctccgggaccggccacttct

SEQ ID NO: 5162 - RNA, 21 nt, synthetic construct
  source 1..21: mol_type = other RNA
cctcctcctcacagcccggcc

SEQ ID NO: 5163 - RNA, 21 nt, synthetic construct
  source 1..21: mol_type = other RNA
cctcctgatgcacatgtactg

SEQ ID NO: 5164 - RNA, 21 nt, synthetic construct
  source 1..21: mol_type = other RNA
cctcctgcaatgcttcctggg

SEQ ID NO: 5165 - RNA, 21 nt, synthetic construct
  source 1..21: mol_type = other RNA
cctcctgtagggtactttgat

SEQ ID NO: 5166 - RNA, 21 nt, synthetic construct
  source 1..21: mol_type = other RNA
cctccttgggccagctgccgt

SEQ ID NO: 5167 - RNA, 21 nt, synthetic construct
  source 1..21: mol_type = other RNA
cctcgaagccgtctaggatga

SEQ ID NO: 5168 - RNA, 21 nt, synthetic construct
  source 1..21: mol_type = other RNA
cctcgcaagcaccttctgctt

SEQ ID NO: 5169 - RNA, 21 nt, synthetic construct
  source 1..21: mol_type = other RNA
cctcggagcagcttcttctgg

SEQ ID NO: 5170 - RNA, 21 nt, synthetic construct
  source 1..21: mol_type = other RNA
cctcggcctcgtgggcgcagt

SEQ ID NO: 5171 - RNA, 21 nt, synthetic construct
  source 1..21: mol_type = other RNA
cctcggtggacaggaagcaga

SEQ ID NO: 5172 - RNA, 21 nt, synthetic construct
  source 1..21: mol_type = other RNA
cctcgtgggactcagctgtgt

SEQ ID NO: 5173 - RNA, 21 nt, synthetic construct
  source 1..21: mol_type = other RNA
cctcgtgggcgcagtgcagca

SEQ ID NO: 5174 - RNA, 21 nt, synthetic construct
  source 1..21: mol_type = other RNA
cctctcacatacccccaccct

SEQ ID NO: 5175 - RNA, 21 nt, synthetic construct
  source 1..21: mol_type = other RNA
cctctccagcctggcctgcac

SEQ ID NO: 5176 - RNA, 21 nt, synthetic construct
  source 1..21: mol_type = other RNA
cctctcttttctgggcacccg

SEQ ID NO: 5177 - RNA, 21 nt, synthetic construct
  source 1..21: mol_type = other RNA
cctctgagagctggcacactg

SEQ ID NO: 5178 - RNA, 21 nt, synthetic construct
  source 1..21: mol_type = other RNA
cctctggattggggagcctcg

SEQ ID NO: 5179 - RNA, 21 nt, synthetic construct
  source 1..21: mol_type = other RNA
cctcttcttccttggggtcaa

SEQ ID NO: 5180 - RNA, 21 nt, synthetic construct
  source 1..21: mol_type = other RNA
cctgaaacgggtgacacagct

SEQ ID NO: 5181 - RNA, 21 nt, synthetic construct
  source 1..21: mol_type = other RNA
cctgaagcggctgcagccggg

SEQ ID NO: 5182 - RNA, 21 nt, synthetic construct
  source 1..21: mol_type = other RNA
cctgacacgcccctggccttt

SEQ ID NO: 5183 - RNA, 21 nt, synthetic construct
  source 1..21: mol_type = other RNA
cctgaccagctttgcccagca

SEQ ID NO: 5184 - RNA, 21 nt, synthetic construct
  source 1..21: mol_type = other RNA
cctgaccgcgttctgctcatc

SEQ ID NO: 5185 - RNA, 21 nt, synthetic construct
  source 1..21: mol_type = other RNA
cctgacgctcctccgggaccg

SEQ ID NO: 5186 - RNA, 21 nt, synthetic construct
  source 1..21: mol_type = other RNA
cctgagcaaggccgacgccct

SEQ ID NO: 5187 - RNA, 21 nt, synthetic construct
  source 1..21: mol_type = other RNA
cctgagctctcaaagtagcgc

SEQ ID NO: 5188 - RNA, 21 nt, synthetic construct
  source 1..21: mol_type = other RNA
cctgatgcacatgtactgggc

SEQ ID NO: 5189 - RNA, 21 nt, synthetic construct
  source 1..21: mol_type = other RNA
cctgcaatgcttcctgggggc

SEQ ID NO: 5190 - RNA, 21 nt, synthetic construct
  source 1..21: mol_type = other RNA
cctgcacagcacgtgcggacc

SEQ ID NO: 5191 - RNA, 21 nt, synthetic construct
  source 1..21: mol_type = other RNA
cctgcaccagatccacctcca

SEQ ID NO: 5192 - RNA, 21 nt, synthetic construct
  source 1..21: mol_type = other RNA
cctgcaggatctgctcttctc

SEQ ID NO: 5193 - RNA, 21 nt, synthetic construct
  source 1..21: mol_type = other RNA
cctgcaggccataggcatccc

SEQ ID NO: 5194 - RNA, 21 nt, synthetic construct
  source 1..21: mol_type = other RNA
cctgcagtgagcggtagaact

SEQ ID NO: 5195 - RNA, 21 nt, synthetic construct
  source 1..21: mol_type = other RNA
cctgccattgcttgaaccgtc

SEQ ID NO: 5196 - RNA, 21 nt, synthetic construct
  source 1..21: mol_type = other RNA
cctgcgggctcggcaccatac

SEQ ID NO: 5197 - RNA, 21 nt, synthetic construct
  source 1..21: mol_type = other RNA
cctgctccatggagaagccgg

SEQ ID NO: 5198 - RNA, 21 nt, synthetic construct
  source 1..21: mol_type = other RNA
cctgctggagcttggggagga

SEQ ID NO: 5199 - RNA, 21 nt, synthetic construct
  source 1..21: mol_type = other RNA
cctgctgggccgtgcagccct

SEQ ID NO: 5200 - RNA, 21 nt, synthetic construct
  source 1..21: mol_type = other RNA
cctggacctccgcagcactgg

SEQ ID NO: 5201 - RNA, 21 nt, synthetic construct
  source 1..21: mol_type = other RNA
cctggagcgggaactggccac

SEQ ID NO: 5202 - RNA, 21 nt, synthetic construct
  source 1..21: mol_type = other RNA
cctggcagagctggccaagct

SEQ ID NO: 5203 - RNA, 21 nt, synthetic construct
  source 1..21: mol_type = other RNA
cctggcctgcaccagatccac

SEQ ID NO: 5204 - RNA, 21 nt, synthetic construct
  source 1..21: mol_type = other RNA
cctggcctttgcagagccggt

SEQ ID NO: 5205 - RNA, 21 nt, synthetic construct
  source 1..21: mol_type = other RNA
cctggctgaggtgctgttggc

SEQ ID NO: 5206 - RNA, 21 nt, synthetic construct
  source 1..21: mol_type = other RNA
cctgggagccctactcgggcc

SEQ ID NO: 5207 - RNA, 21 nt, synthetic construct
  source 1..21: mol_type = other RNA
cctgggagctgggccgcagac

SEQ ID NO: 5208 - RNA, 21 nt, synthetic construct
  source 1..21: mol_type = other RNA
cctgggcccacagccactcgt

SEQ ID NO: 5209 - RNA, 21 nt, synthetic construct
  source 1..21: mol_type = other RNA
cctgggcctgctccatggaga

SEQ ID NO: 5210 - RNA, 21 nt, synthetic construct
  source 1..21: mol_type = other RNA
cctgggcgatggccaaaggct

SEQ ID NO: 5211 - RNA, 21 nt, synthetic construct
  source 1..21: mol_type = other RNA
cctgggcttgtggccggcttc

SEQ ID NO: 5212 - RNA, 21 nt, synthetic construct
  source 1..21: mol_type = other RNA
cctggtccagagcctgagcaa

SEQ ID NO: 5213 - RNA, 21 nt, synthetic construct
  source 1..21: mol_type = other RNA
cctgtaccacgtgctgccaaa

SEQ ID NO: 5214 - RNA, 21 nt, synthetic construct
  source 1..21: mol_type = other RNA
cctgtagggtactttgatgtc

SEQ ID NO: 5215 - RNA, 21 nt, synthetic construct
  source 1..21: mol_type = other RNA
cctgtccaccgaggcagccgc

SEQ ID NO: 5216 - RNA, 21 nt, synthetic construct
  source 1..21: mol_type = other RNA
cctgtggctggctctgagtgg

SEQ ID NO: 5217 - RNA, 21 nt, synthetic construct
  source 1..21: mol_type = other RNA
ccttccccagcttcctcctgc

SEQ ID NO: 5218 - RNA, 21 nt, synthetic construct
  source 1..21: mol_type = other RNA
ccttctgcttcctgtccaccg

SEQ ID NO: 5219 - RNA, 21 nt, synthetic construct
  source 1..21: mol_type = other RNA
ccttgatttcgccactcagag

SEQ ID NO: 5220 - RNA, 21 nt, synthetic construct
  source 1..21: mol_type = other RNA
ccttgcccagtacatgtgcat

SEQ ID NO: 5221 - RNA, 21 nt, synthetic construct
  source 1..21: mol_type = other RNA
ccttgctcaggctctggacca

SEQ ID NO: 5222 - RNA, 21 nt, synthetic construct
  source 1..21: mol_type = other RNA
ccttggaggcggcgggccaag

SEQ ID NO: 5223 - RNA, 21 nt, synthetic construct
  source 1..21: mol_type = other RNA
ccttggcagccaacagcacct

SEQ ID NO: 5224 - RNA, 21 nt, synthetic construct
  source 1..21: mol_type = other RNA
ccttgggccagctgccgttct

SEQ ID NO: 5225 - RNA, 21 nt, synthetic construct
  source 1..21: mol_type = other RNA
ccttggggtcaatgctaggta

SEQ ID NO: 5226 - RNA, 21 nt, synthetic construct
  source 1..21: mol_type = other RNA
ccttgtccttgatttcgccac

SEQ ID NO: 5227 - RNA, 21 nt, synthetic construct
  source 1..21: mol_type = other RNA
cctttgcagagccggtggagc

SEQ ID NO: 5228 - RNA, 21 nt, synthetic construct
  source 1..21: mol_type = other RNA
cctttggccatcgcccaggtc

SEQ ID NO: 5229 - RNA, 21 nt, synthetic construct
  source 1..21: mol_type = other RNA
ccttttccagaagaagctgct

SEQ ID NO: 5230 - RNA, 21 nt, synthetic construct
  source 1..21: mol_type = other RNA
cgaaatcaaggacaaggagct

SEQ ID NO: 5231 - RNA, 21 nt, synthetic construct
  source 1..21: mol_type = other RNA
cgaagccgtctaggatgagca

SEQ ID NO: 5232 - RNA, 21 nt, synthetic construct
  source 1..21: mol_type = other RNA
cgacatagagtcccgtgagcg

SEQ ID NO: 5233 - RNA, 21 nt, synthetic construct
  source 1..21: mol_type = other RNA
cgacgccctatttgagctgtc

SEQ ID NO: 5234 - RNA, 21 nt, synthetic construct
  source 1..21: mol_type = other RNA
cgactttgtcttctctgtccc

SEQ ID NO: 5235 - RNA, 21 nt, synthetic construct
  source 1..21: mol_type = other RNA
cgagctggccttccccagctt

SEQ ID NO: 5236 - RNA, 21 nt, synthetic construct
  source 1..21: mol_type = other RNA
cgaggagctggaagcgcaaga

SEQ ID NO: 5237 - RNA, 21 nt, synthetic construct
  source 1..21: mol_type = other RNA
cgaggaggctggaatttggca

SEQ ID NO: 5238 - RNA, 21 nt, synthetic construct
  source 1..21: mol_type = other RNA
cgaggccgaggaggctggaat

SEQ ID NO: 5239 - RNA, 21 nt, synthetic construct
  source 1..21: mol_type = other RNA
cgaggctccccaatccagagg

SEQ ID NO: 5240 - RNA, 21 nt, synthetic construct
  source 1..21: mol_type = other RNA
cgagggctgcacggcccagca

SEQ ID NO: 5241 - RNA, 21 nt, synthetic construct
  source 1..21: mol_type = other RNA
cgaggtacctgaagcggctgc

SEQ ID NO: 5242 - RNA, 21 nt, synthetic construct
  source 1..21: mol_type = other RNA
cgaggttgcaccctcctcctc

SEQ ID NO: 5243 - RNA, 21 nt, synthetic construct
  source 1..21: mol_type = other RNA
cgagtagggctcccaggcagc

SEQ ID NO: 5244 - RNA, 21 nt, synthetic construct
  source 1..21: mol_type = other RNA
cgagtgattgctgtgctgggc

SEQ ID NO: 5245 - RNA, 21 nt, synthetic construct
  source 1..21: mol_type = other RNA
cgagtggctgtgggcccaggg

SEQ ID NO: 5246 - RNA, 21 nt, synthetic construct
  source 1..21: mol_type = other RNA
cgatgaggttttcagccacat

SEQ ID NO: 5247 - RNA, 21 nt, synthetic construct
  source 1..21: mol_type = other RNA
cgatggccaaaggcttagtcc

SEQ ID NO: 5248 - RNA, 21 nt, synthetic construct
  source 1..21: mol_type = other RNA
cgatggcccgagtagggctcc

SEQ ID NO: 5249 - RNA, 21 nt, synthetic construct
  source 1..21: mol_type = other RNA
cgcaagatggcttcctgcaca

SEQ ID NO: 5250 - RNA, 21 nt, synthetic construct
  source 1..21: mol_type = other RNA
cgcaagcaccttctgcttcct

SEQ ID NO: 5251 - RNA, 21 nt, synthetic construct
  source 1..21: mol_type = other RNA
cgcacgtgctgtgcaggaagc

SEQ ID NO: 5252 - RNA, 21 nt, synthetic construct
  source 1..21: mol_type = other RNA
cgcagacatcaaagtacccta

SEQ ID NO: 5253 - RNA, 21 nt, synthetic construct
  source 1..21: mol_type = other RNA
cgcagacgtgaggacctgggc

SEQ ID NO: 5254 - RNA, 21 nt, synthetic construct
  source 1..21: mol_type = other RNA
cgcagagtccgagctggcctt

SEQ ID NO: 5255 - RNA, 21 nt, synthetic construct
  source 1..21: mol_type = other RNA
cgcagcactggcatttgcccc

SEQ ID NO: 5256 - RNA, 21 nt, synthetic construct
  source 1..21: mol_type = other RNA
cgcaggcccggatggcatcct

SEQ ID NO: 5257 - RNA, 21 nt, synthetic construct
  source 1..21: mol_type = other RNA
cgcagtacctagcattgaccc

SEQ ID NO: 5258 - RNA, 21 nt, synthetic construct
  source 1..21: mol_type = other RNA
cgcagtgcagcagctccagca

SEQ ID NO: 5259 - RNA, 21 nt, synthetic construct
  source 1..21: mol_type = other RNA
cgcagtgtccccggctgcagc

SEQ ID NO: 5260 - RNA, 21 nt, synthetic construct
  source 1..21: mol_type = other RNA
cgcatcacgtatgcctgggcc

SEQ ID NO: 5261 - RNA, 21 nt, synthetic construct
  source 1..21: mol_type = other RNA
cgccaagctgccctccacgct

SEQ ID NO: 5262 - RNA, 21 nt, synthetic construct
  source 1..21: mol_type = other RNA
cgccacgagtggctgtgggcc

SEQ ID NO: 5263 - RNA, 21 nt, synthetic construct
  source 1..21: mol_type = other RNA
cgccactcagagccagccaca

SEQ ID NO: 5264 - RNA, 21 nt, synthetic construct
  source 1..21: mol_type = other RNA
cgcccaggtcctcacgtctgc

SEQ ID NO: 5265 - RNA, 21 nt, synthetic construct
  source 1..21: mol_type = other RNA
cgcccctggcctttgcagagc

SEQ ID NO: 5266 - RNA, 21 nt, synthetic construct
  source 1..21: mol_type = other RNA
cgccctatttgagctgtccgg

SEQ ID NO: 5267 - RNA, 21 nt, synthetic construct
  source 1..21: mol_type = other RNA
cgccctccagccagttgtcat

SEQ ID NO: 5268 - RNA, 21 nt, synthetic construct
  source 1..21: mol_type = other RNA
cgccgatggcccgagtagggc

SEQ ID NO: 5269 - RNA, 21 nt, synthetic construct
  source 1..21: mol_type = other RNA
cgccgcctccaaggccttgcc

SEQ ID NO: 5270 - RNA, 21 nt, synthetic construct
  source 1..21: mol_type = other RNA
cgccggtgctccttggcagcc

SEQ ID NO: 5271 - RNA, 21 nt, synthetic construct
  source 1..21: mol_type = other RNA
cgcctcacgcctcctgatgca

SEQ ID NO: 5272 - RNA, 21 nt, synthetic construct
  source 1..21: mol_type = other RNA
cgcctccaaggccttgcccag

SEQ ID NO: 5273 - RNA, 21 nt, synthetic construct
  source 1..21: mol_type = other RNA
cgcctcctgatgcacatgtac

SEQ ID NO: 5274 - RNA, 21 nt, synthetic construct
  source 1..21: mol_type = other RNA
cgcctctcttttctgggcacc

SEQ ID NO: 5275 - RNA, 21 nt, synthetic construct
  source 1..21: mol_type = other RNA
cgcctggtccagagcctgagc

SEQ ID NO: 5276 - RNA, 21 nt, synthetic construct
  source 1..21: mol_type = other RNA
cgcggcagctgctggagctgc

SEQ ID NO: 5277 - RNA, 21 nt, synthetic construct
  source 1..21: mol_type = other RNA
cgcggtcaggtctcttcaaga

SEQ ID NO: 5278 - RNA, 21 nt, synthetic construct
  source 1..21: mol_type = other RNA
cgcggtgggtgttggactaag

SEQ ID NO: 5279 - RNA, 21 nt, synthetic construct
  source 1..21: mol_type = other RNA
cgcgtgagacacgagtgattg

SEQ ID NO: 5280 - RNA, 21 nt, synthetic construct
  source 1..21: mol_type = other RNA
cgcgttctgctcatcctagac

SEQ ID NO: 5281 - RNA, 21 nt, synthetic construct
  source 1..21: mol_type = other RNA
cgctactttgagagctcaggg

SEQ ID NO: 5282 - RNA, 21 nt, synthetic construct
  source 1..21: mol_type = other RNA
cgctcacgggactctatgtcg

SEQ ID NO: 5283 - RNA, 21 nt, synthetic construct
  source 1..21: mol_type = other RNA
cgctcactgcaggacacgtat

SEQ ID NO: 5284 - RNA, 21 nt, synthetic construct
  source 1..21: mol_type = other RNA
cgctccaggctcttgctgctg

SEQ ID NO: 5285 - RNA, 21 nt, synthetic construct
  source 1..21: mol_type = other RNA
cgctgcctgggagccctactc

SEQ ID NO: 5286 - RNA, 21 nt, synthetic construct
  source 1..21: mol_type = other RNA
cgcttcaggtacctcgcaagc

SEQ ID NO: 5287 - RNA, 21 nt, synthetic construct
  source 1..21: mol_type = other RNA
cgcttccagctcctcgaagcc

SEQ ID NO: 5288 - RNA, 21 nt, synthetic construct
  source 1..21: mol_type = other RNA
cgctttctggctgggctgatc

SEQ ID NO: 5289 - RNA, 21 nt, synthetic construct
  source 1..21: mol_type = other RNA
cggacagctcaaatagggcgt

SEQ ID NO: 5290 - RNA, 21 nt, synthetic construct
  source 1..21: mol_type = other RNA
cggacggttcaagcaatggca

SEQ ID NO: 5291 - RNA, 21 nt, synthetic construct
  source 1..21: mol_type = other RNA
cggactgggcagaacggcagc

SEQ ID NO: 5292 - RNA, 21 nt, synthetic construct
  source 1..21: mol_type = other RNA
cggagcagcttcttctggaaa

SEQ ID NO: 5293 - RNA, 21 nt, synthetic construct
  source 1..21: mol_type = other RNA
cggaggagcgtcagggctctg

SEQ ID NO: 5294 - RNA, 21 nt, synthetic construct
  source 1..21: mol_type = other RNA
cggaggtccagggagaagtct

SEQ ID NO: 5295 - RNA, 21 nt, synthetic construct
  source 1..21: mol_type = other RNA
cggatggcatcctagtggagg

SEQ ID NO: 5296 - RNA, 21 nt, synthetic construct
  source 1..21: mol_type = other RNA
cggatgggaactggtcctcct

SEQ ID NO: 5297 - RNA, 21 nt, synthetic construct
  source 1..21: mol_type = other RNA
cggcacaaagtagggctgtgg

SEQ ID NO: 5298 - RNA, 21 nt, synthetic construct
  source 1..21: mol_type = other RNA
cggcaccatacgtgtcctgca

SEQ ID NO: 5299 - RNA, 21 nt, synthetic construct
  source 1..21: mol_type = other RNA
cggcagctgctggagctgctg

SEQ ID NO: 5300 - RNA, 21 nt, synthetic construct
  source 1..21: mol_type = other RNA
cggcagctggcccaaggaggc

SEQ ID NO: 5301 - RNA, 21 nt, synthetic construct
  source 1..21: mol_type = other RNA
cggccacttcttctcagtcac

SEQ ID NO: 5302 - RNA, 21 nt, synthetic construct
  source 1..21: mol_type = other RNA
cggcccagcaggccgacatag

SEQ ID NO: 5303 - RNA, 21 nt, synthetic construct
  source 1..21: mol_type = other RNA
cggcccgcggtgggtgttgga

SEQ ID NO: 5304 - RNA, 21 nt, synthetic construct
  source 1..21: mol_type = other RNA
cggccgatgaggttttcagcc

SEQ ID NO: 5305 - RNA, 21 nt, synthetic construct
  source 1..21: mol_type = other RNA
cggccgccacgagtggctgtg

SEQ ID NO: 5306 - RNA, 21 nt, synthetic construct
  source 1..21: mol_type = other RNA
cggccgcctctcttttctggg

SEQ ID NO: 5307 - RNA, 21 nt, synthetic construct
  source 1..21: mol_type = other RNA
cggccgcgtgagacacgagtg

SEQ ID NO: 5308 - RNA, 21 nt, synthetic construct
  source 1..21: mol_type = other RNA
cggccggggagctcctgtacc

SEQ ID NO: 5309 - RNA, 21 nt, synthetic construct
  source 1..21: mol_type = other RNA
cggcctcgtgggcgcagtgca

SEQ ID NO: 5310 - RNA, 21 nt, synthetic construct
  source 1..21: mol_type = other RNA
cggccttgctcaggctctgga

SEQ ID NO: 5311 - RNA, 21 nt, synthetic construct
  source 1..21: mol_type = other RNA
cggccttttccagaagaagct

SEQ ID NO: 5312 - RNA, 21 nt, synthetic construct
  source 1..21: mol_type = other RNA
cggcggccgcgtgagacacga

SEQ ID NO: 5313 - RNA, 21 nt, synthetic construct
  source 1..21: mol_type = other RNA
cggcggctgcctcggtggaca

SEQ ID NO: 5314 - RNA, 21 nt, synthetic construct
  source 1..21: mol_type = other RNA
cggcgggccaagacttctccc

SEQ ID NO: 5315 - RNA, 21 nt, synthetic construct
  source 1..21: mol_type = other RNA
cggctcactgccccagcccaa

SEQ ID NO: 5316 - RNA, 21 nt, synthetic construct
  source 1..21: mol_type = other RNA
cggctctgcaaaggccagggg

SEQ ID NO: 5317 - RNA, 21 nt, synthetic construct
  source 1..21: mol_type = other RNA
cggctgcagccgcttcaggta

SEQ ID NO: 5318 - RNA, 21 nt, synthetic construct
  source 1..21: mol_type = other RNA
cggctgcagccggggacactg

SEQ ID NO: 5319 - RNA, 21 nt, synthetic construct
  source 1..21: mol_type = other RNA
cggctgcctcggtggacagga

SEQ ID NO: 5320 - RNA, 21 nt, synthetic construct
  source 1..21: mol_type = other RNA
cggcttccccagtacgacttt

SEQ ID NO: 5321 - RNA, 21 nt, synthetic construct
  source 1..21: mol_type = other RNA
cggcttcgaggagctggaagc

SEQ ID NO: 5322 - RNA, 21 nt, synthetic construct
  source 1..21: mol_type = other RNA
cggcttctccatggagcaggc

SEQ ID NO: 5323 - RNA, 21 nt, synthetic construct
  source 1..21: mol_type = other RNA
cgggaactggccaccccggac

SEQ ID NO: 5324 - RNA, 21 nt, synthetic construct
  source 1..21: mol_type = other RNA
cgggaccggccacttcttctc

SEQ ID NO: 5325 - RNA, 21 nt, synthetic construct
  source 1..21: mol_type = other RNA
cgggactctatgtcggcctgc

SEQ ID NO: 5326 - RNA, 21 nt, synthetic construct
  source 1..21: mol_type = other RNA
cgggagctccttgtccttgat

SEQ ID NO: 5327 - RNA, 21 nt, synthetic construct
  source 1..21: mol_type = other RNA
cgggaggctggaagatcagcc

SEQ ID NO: 5328 - RNA, 21 nt, synthetic construct
  source 1..21: mol_type = other RNA
cgggcagtgtgccagctctca

SEQ ID NO: 5329 - RNA, 21 nt, synthetic construct
  source 1..21: mol_type = other RNA
cgggccaagacttctccctgg

SEQ ID NO: 5330 - RNA, 21 nt, synthetic construct
  source 1..21: mol_type = other RNA
cgggccgcagagtccgagctg

SEQ ID NO: 5331 - RNA, 21 nt, synthetic construct
  source 1..21: mol_type = other RNA
cgggcgggaggctggaagatc

SEQ ID NO: 5332 - RNA, 21 nt, synthetic construct
  source 1..21: mol_type = other RNA
cgggctcggcaccatacgtgt

SEQ ID NO: 5333 - RNA, 21 nt, synthetic construct
  source 1..21: mol_type = other RNA
cgggctgtgaggaggagggtg

SEQ ID NO: 5334 - RNA, 21 nt, synthetic construct
  source 1..21: mol_type = other RNA
cggggagctcctgtaccacgt

SEQ ID NO: 5335 - RNA, 21 nt, synthetic construct
  source 1..21: mol_type = other RNA
cgggggatgcctatggcctgc

SEQ ID NO: 5336 - RNA, 21 nt, synthetic construct
  source 1..21: mol_type = other RNA
cggggtggccagttcccgctc

SEQ ID NO: 5337 - RNA, 21 nt, synthetic construct
  source 1..21: mol_type = other RNA
cgggtgacacagctgagtccc

SEQ ID NO: 5338 - RNA, 21 nt, synthetic construct
  source 1..21: mol_type = other RNA
cgggtgcccagaaaagagagg

SEQ ID NO: 5339 - RNA, 21 nt, synthetic construct
  source 1..21: mol_type = other RNA
cggtagaactgctccaccggc

SEQ ID NO: 5340 - RNA, 21 nt, synthetic construct
  source 1..21: mol_type = other RNA
cggtcaggtctcttcaagatg

SEQ ID NO: 5341 - RNA, 21 nt, synthetic construct
  source 1..21: mol_type = other RNA
cggtcccggaggagcgtcagg

SEQ ID NO: 5342 - RNA, 21 nt, synthetic construct
  source 1..21: mol_type = other RNA
cggtccgcacgtgctgtgcag

SEQ ID NO: 5343 - RNA, 21 nt, synthetic construct
  source 1..21: mol_type = other RNA
cggtgccggtccgcacgtgct

SEQ ID NO: 5344 - RNA, 21 nt, synthetic construct
  source 1..21: mol_type = other RNA
cggtgctccttggcagccaac

SEQ ID NO: 5345 - RNA, 21 nt, synthetic construct
  source 1..21: mol_type = other RNA
cggtggacaggaagcagaagg

SEQ ID NO: 5346 - RNA, 21 nt, synthetic construct
  source 1..21: mol_type = other RNA
cggtggagcagttctaccgct

SEQ ID NO: 5347 - RNA, 21 nt, synthetic construct
  source 1..21: mol_type = other RNA
cggtgggtgttggactaagcc

SEQ ID NO: 5348 - RNA, 21 nt, synthetic construct
  source 1..21: mol_type = other RNA
cggttcaagcaatggcagggg

SEQ ID NO: 5349 - RNA, 21 nt, synthetic construct
  source 1..21: mol_type = other RNA
cgtactggggaagccggccac

SEQ ID NO: 5350 - RNA, 21 nt, synthetic construct
  source 1..21: mol_type = other RNA
cgtatgcctgggcctgctcca

SEQ ID NO: 5351 - RNA, 21 nt, synthetic construct
  source 1..21: mol_type = other RNA
cgtatggtgccgagcccgcag

SEQ ID NO: 5352 - RNA, 21 nt, synthetic construct
  source 1..21: mol_type = other RNA
cgtcagggctctgtcttggtg

SEQ ID NO: 5353 - RNA, 21 nt, synthetic construct
  source 1..21: mol_type = other RNA
cgtccgggggatgcctatggc

SEQ ID NO: 5354 - RNA, 21 nt, synthetic construct
  source 1..21: mol_type = other RNA
cgtcctccccaagctccagca

SEQ ID NO: 5355 - RNA, 21 nt, synthetic construct
  source 1..21: mol_type = other RNA
cgtcggccttgctcaggctct

SEQ ID NO: 5356 - RNA, 21 nt, synthetic construct
  source 1..21: mol_type = other RNA
cgtctaggatgagcagaacgc

SEQ ID NO: 5357 - RNA, 21 nt, synthetic construct
  source 1..21: mol_type = other RNA
cgtctgcggatgggaactggt

SEQ ID NO: 5358 - RNA, 21 nt, synthetic construct
  source 1..21: mol_type = other RNA
cgtgagacacgagtgattgct

SEQ ID NO: 5359 - RNA, 21 nt, synthetic construct
  source 1..21: mol_type = other RNA
cgtgagcgtggagggcagctt

SEQ ID NO: 5360 - RNA, 21 nt, synthetic construct
  source 1..21: mol_type = other RNA
cgtgaggacctgggcgatggc

SEQ ID NO: 5361 - RNA, 21 nt, synthetic construct
  source 1..21: mol_type = other RNA
cgtgaggcgggtgcccagaaa

SEQ ID NO: 5362 - RNA, 21 nt, synthetic construct
  source 1..21: mol_type = other RNA
cgtgatgcgctactttgagag

SEQ ID NO: 5363 - RNA, 21 nt, synthetic construct
  source 1..21: mol_type = other RNA
cgtgcagccctcgacagcccc

SEQ ID NO: 5364 - RNA, 21 nt, synthetic construct
  source 1..21: mol_type = other RNA
cgtgccacgctttctggctgg

SEQ ID NO: 5365 - RNA, 21 nt, synthetic construct
  source 1..21: mol_type = other RNA
cgtgctgccaaattccagcct

SEQ ID NO: 5366 - RNA, 21 nt, synthetic construct
  source 1..21: mol_type = other RNA
cgtgctgtgcaggaagccatc

SEQ ID NO: 5367 - RNA, 21 nt, synthetic construct
  source 1..21: mol_type = other RNA
cgtggagggcagcttggcgtc

SEQ ID NO: 5368 - RNA, 21 nt, synthetic construct
  source 1..21: mol_type = other RNA
cgtggcacgccctccagccag

SEQ ID NO: 5369 - RNA, 21 nt, synthetic construct
  source 1..21: mol_type = other RNA
cgtggcggccgatgaggtttt

SEQ ID NO: 5370 - RNA, 21 nt, synthetic construct
  source 1..21: mol_type = other RNA
cgtgggactcagctgtgtcac

SEQ ID NO: 5371 - RNA, 21 nt, synthetic construct
  source 1..21: mol_type = other RNA
cgtgggcgcagtgcagcagct

SEQ ID NO: 5372 - RNA, 21 nt, synthetic construct
  source 1..21: mol_type = other RNA
cgtggtacaggagctccccgg

SEQ ID NO: 5373 - RNA, 21 nt, synthetic construct
  source 1..21: mol_type = other RNA
cgtgtcagggtgggggtatgt

SEQ ID NO: 5374 - RNA, 21 nt, synthetic construct
  source 1..21: mol_type = other RNA
cgtgtcctgcagtgagcggta

SEQ ID NO: 5375 - RNA, 21 nt, synthetic construct
  source 1..21: mol_type = other RNA
cgttctgcccagtccggggtg

SEQ ID NO: 5376 - RNA, 21 nt, synthetic construct
  source 1..21: mol_type = other RNA
cgttctgctcatcctagacgg

SEQ ID NO: 5377 - RNA, 21 nt, synthetic construct
  source 1..21: mol_type = other RNA
cgtttcaggtggggtgagggg

SEQ ID NO: 5378 - RNA, 21 nt, synthetic construct
  source 1..21: mol_type = other RNA
ctaagcctttggccatcgccc

SEQ ID NO: 5379 - RNA, 21 nt, synthetic construct
  source 1..21: mol_type = other RNA
ctacaggaggaccagttccca

SEQ ID NO: 5380 - RNA, 21 nt, synthetic construct
  source 1..21: mol_type = other RNA
ctaccgctcactgcaggacac

SEQ ID NO: 5381 - RNA, 21 nt, synthetic construct
  source 1..21: mol_type = other RNA
ctactcgggccatcggcggct

SEQ ID NO: 5382 - RNA, 21 nt, synthetic construct
  source 1..21: mol_type = other RNA
ctactttgagagctcagggat

SEQ ID NO: 5383 - RNA, 21 nt, synthetic construct
  source 1..21: mol_type = other RNA
ctactttgtgccgggcagtgt

SEQ ID NO: 5384 - RNA, 21 nt, synthetic construct
  source 1..21: mol_type = other RNA
ctagacggcttcgaggagctg

SEQ ID NO: 5385 - RNA, 21 nt, synthetic construct
  source 1..21: mol_type = other RNA
ctagcattgaccccaaggaag

SEQ ID NO: 5386 - RNA, 21 nt, synthetic construct
  source 1..21: mol_type = other RNA
ctaggatgagcagaacgcggt

SEQ ID NO: 5387 - RNA, 21 nt, synthetic construct
  source 1..21: mol_type = other RNA
ctaggatgccatccgggcctg

SEQ ID NO: 5388 - RNA, 21 nt, synthetic construct
  source 1..21: mol_type = other RNA
ctaggtactgcgggagctcct

SEQ ID NO: 5389 - RNA, 21 nt, synthetic construct
  source 1..21: mol_type = other RNA
ctagtggaggtggatctggtg

SEQ ID NO: 5390 - RNA, 21 nt, synthetic construct
  source 1..21: mol_type = other RNA
ctatgacaactggctggaggg

SEQ ID NO: 5391 - RNA, 21 nt, synthetic construct
  source 1..21: mol_type = other RNA
ctatggcctgcaggatctgct

SEQ ID NO: 5392 - RNA, 21 nt, synthetic construct
  source 1..21: mol_type = other RNA
ctatgtcggcctgctgggccg

SEQ ID NO: 5393 - RNA, 21 nt, synthetic construct
  source 1..21: mol_type = other RNA
ctattgggctggggcagtgag

SEQ ID NO: 5394 - RNA, 21 nt, synthetic construct
  source 1..21: mol_type = other RNA
ctatttgagctgtccggcttc

SEQ ID NO: 5395 - RNA, 21 nt, synthetic construct
  source 1..21: mol_type = other RNA
ctcaaagtagcgcatcacgta

SEQ ID NO: 5396 - RNA, 21 nt, synthetic construct
  source 1..21: mol_type = other RNA
ctcaaatagggcgtcggcctt

SEQ ID NO: 5397 - RNA, 21 nt, synthetic construct
  source 1..21: mol_type = other RNA
ctcacatacccccaccctgac

SEQ ID NO: 5398 - RNA, 21 nt, synthetic construct
  source 1..21: mol_type = other RNA
ctcaccccacctgaaacgggt

SEQ ID NO: 5399 - RNA, 21 nt, synthetic construct
  source 1..21: mol_type = other RNA
ctcacgcctcctgatgcacat

SEQ ID NO: 5400 - RNA, 21 nt, synthetic construct
  source 1..21: mol_type = other RNA
ctcacgggactctatgtcggc

SEQ ID NO: 5401 - RNA, 21 nt, synthetic construct
  source 1..21: mol_type = other RNA
ctcacgtctgcggatgggaac

SEQ ID NO: 5402 - RNA, 21 nt, synthetic construct
  source 1..21: mol_type = other RNA
ctcactgcaggacacgtatgg

SEQ ID NO: 5403 - RNA, 21 nt, synthetic construct
  source 1..21: mol_type = other RNA
ctcactgccccagcccaatag

SEQ ID NO: 5404 - RNA, 21 nt, synthetic construct
  source 1..21: mol_type = other RNA
ctcagagccagccacagggcc

SEQ ID NO: 5405 - RNA, 21 nt, synthetic construct
  source 1..21: mol_type = other RNA
ctcagaggccctgctggagct

SEQ ID NO: 5406 - RNA, 21 nt, synthetic construct
  source 1..21: mol_type = other RNA
ctcagccaggcctccttgggc

SEQ ID NO: 5407 - RNA, 21 nt, synthetic construct
  source 1..21: mol_type = other RNA
ctcagctgtgtcacccgtttc

SEQ ID NO: 5408 - RNA, 21 nt, synthetic construct
  source 1..21: mol_type = other RNA
ctcaggctctggaccaggcgg

SEQ ID NO: 5409 - RNA, 21 nt, synthetic construct
  source 1..21: mol_type = other RNA
ctcagggatgacagagcacca

SEQ ID NO: 5410 - RNA, 21 nt, synthetic construct
  source 1..21: mol_type = other RNA
ctcagtcacagccacagccct

SEQ ID NO: 5411 - RNA, 21 nt, synthetic construct
  source 1..21: mol_type = other RNA
ctcatcctagacggcttcgag

SEQ ID NO: 5412 - RNA, 21 nt, synthetic construct
  source 1..21: mol_type = other RNA
ctcatcggccgccacgagtgg

SEQ ID NO: 5413 - RNA, 21 nt, synthetic construct
  source 1..21: mol_type = other RNA
ctccaaggccttgcccagtac

SEQ ID NO: 5414 - RNA, 21 nt, synthetic construct
  source 1..21: mol_type = other RNA
ctccaccggctctgcaaaggc

SEQ ID NO: 5415 - RNA, 21 nt, synthetic construct
  source 1..21: mol_type = other RNA
ctccacgctcacgggactcta

SEQ ID NO: 5416 - RNA, 21 nt, synthetic construct
  source 1..21: mol_type = other RNA
ctccactaggatgccatccgg

SEQ ID NO: 5417 - RNA, 21 nt, synthetic construct
  source 1..21: mol_type = other RNA
ctccagcagggcctctgagag

SEQ ID NO: 5418 - RNA, 21 nt, synthetic construct
  source 1..21: mol_type = other RNA
ctccagccagttgtcataggg

SEQ ID NO: 5419 - RNA, 21 nt, synthetic construct
  source 1..21: mol_type = other RNA
ctccagcctggcctgcaccag

SEQ ID NO: 5420 - RNA, 21 nt, synthetic construct
  source 1..21: mol_type = other RNA
ctccaggctcttgctgctgct

SEQ ID NO: 5421 - RNA, 21 nt, synthetic construct
  source 1..21: mol_type = other RNA
ctccatggagaagccggacag

SEQ ID NO: 5422 - RNA, 21 nt, synthetic construct
  source 1..21: mol_type = other RNA
ctccatggagcaggcccaggc

SEQ ID NO: 5423 - RNA, 21 nt, synthetic construct
  source 1..21: mol_type = other RNA
ctcccaggccagcttggccag

SEQ ID NO: 5424 - RNA, 21 nt, synthetic construct
  source 1..21: mol_type = other RNA
ctccccaagctccagcagggc

SEQ ID NO: 5425 - RNA, 21 nt, synthetic construct
  source 1..21: mol_type = other RNA
ctccccaatccagaggggcaa

SEQ ID NO: 5426 - RNA, 21 nt, synthetic construct
  source 1..21: mol_type = other RNA
ctccccggccgcctctctttt

SEQ ID NO: 5427 - RNA, 21 nt, synthetic construct
  source 1..21: mol_type = other RNA
ctcccgcagtacctagcattg

SEQ ID NO: 5428 - RNA, 21 nt, synthetic construct
  source 1..21: mol_type = other RNA
ctccctggacctccgcagcac

SEQ ID NO: 5429 - RNA, 21 nt, synthetic construct
  source 1..21: mol_type = other RNA
ctccctgggcccacagccact

SEQ ID NO: 5430 - RNA, 21 nt, synthetic construct
  source 1..21: mol_type = other RNA
ctccgaggttgcaccctcctc

SEQ ID NO: 5431 - RNA, 21 nt, synthetic construct
  source 1..21: mol_type = other RNA
ctccgcagcactggcatttgc

SEQ ID NO: 5432 - RNA, 21 nt, synthetic construct
  source 1..21: mol_type = other RNA
ctccgggaccggccacttctt

SEQ ID NO: 5433 - RNA, 21 nt, synthetic construct
  source 1..21: mol_type = other RNA
ctcctccgggaccggccactt

SEQ ID NO: 5434 - RNA, 21 nt, synthetic construct
  source 1..21: mol_type = other RNA
ctcctcctcacagcccggccc

SEQ ID NO: 5435 - RNA, 21 nt, synthetic construct
  source 1..21: mol_type = other RNA
ctcctcgaagccgtctaggat

SEQ ID NO: 5436 - RNA, 21 nt, synthetic construct
  source 1..21: mol_type = other RNA
ctcctcggcctcgtgggcgca

SEQ ID NO: 5437 - RNA, 21 nt, synthetic construct
  source 1..21: mol_type = other RNA
ctcctctccagcctggcctgc

SEQ ID NO: 5438 - RNA, 21 nt, synthetic construct
  source 1..21: mol_type = other RNA
ctcctgatgcacatgtactgg

SEQ ID NO: 5439 - RNA, 21 nt, synthetic construct
  source 1..21: mol_type = other RNA
ctcctgcaatgcttcctgggg

SEQ ID NO: 5440 - RNA, 21 nt, synthetic construct
  source 1..21: mol_type = other RNA
ctcctgtaccacgtgctgcca

SEQ ID NO: 5441 - RNA, 21 nt, synthetic construct
  source 1..21: mol_type = other RNA
ctcctgtagggtactttgatg

SEQ ID NO: 5442 - RNA, 21 nt, synthetic construct
  source 1..21: mol_type = other RNA
ctccttggcagccaacagcac

SEQ ID NO: 5443 - RNA, 21 nt, synthetic construct
  source 1..21: mol_type = other RNA
ctccttgggccagctgccgtt

SEQ ID NO: 5444 - RNA, 21 nt, synthetic construct
  source 1..21: mol_type = other RNA
ctccttgtccttgatttcgcc

SEQ ID NO: 5445 - RNA, 21 nt, synthetic construct
  source 1..21: mol_type = other RNA
ctcgaagccgtctaggatgag

SEQ ID NO: 5446 - RNA, 21 nt, synthetic construct
  source 1..21: mol_type = other RNA
ctcgcaagcaccttctgcttc

SEQ ID NO: 5447 - RNA, 21 nt, synthetic construct
  source 1..21: mol_type = other RNA
ctcggagcagcttcttctgga

SEQ ID NO: 5448 - RNA, 21 nt, synthetic construct
  source 1..21: mol_type = other RNA
ctcggcaccatacgtgtcctg

SEQ ID NO: 5449 - RNA, 21 nt, synthetic construct
  source 1..21: mol_type = other RNA
ctcggcctcgtgggcgcagtg

SEQ ID NO: 5450 - RNA, 21 nt, synthetic construct
  source 1..21: mol_type = other RNA
ctcggtggacaggaagcagaa

SEQ ID NO: 5451 - RNA, 21 nt, synthetic construct
  source 1..21: mol_type = other RNA
ctcgtggcggccgatgaggtt

SEQ ID NO: 5452 - RNA, 21 nt, synthetic construct
  source 1..21: mol_type = other RNA
ctcgtgggactcagctgtgtc

SEQ ID NO: 5453 - RNA, 21 nt, synthetic construct
  source 1..21: mol_type = other RNA
ctcgtgggcgcagtgcagcag

SEQ ID NO: 5454 - RNA, 21 nt, synthetic construct
  source 1..21: mol_type = other RNA
ctcgtgtctcacgcggccgcc

SEQ ID NO: 5455 - RNA, 21 nt, synthetic construct
  source 1..21: mol_type = other RNA
ctctatgtcggcctgctgggc

SEQ ID NO: 5456 - RNA, 21 nt, synthetic construct
  source 1..21: mol_type = other RNA
ctctcaaagtagcgcatcacg

SEQ ID NO: 5457 - RNA, 21 nt, synthetic construct
  source 1..21: mol_type = other RNA
ctctcacatacccccaccctg

SEQ ID NO: 5458 - RNA, 21 nt, synthetic construct
  source 1..21: mol_type = other RNA
ctctcagaggccctgctggag

SEQ ID NO: 5459 - RNA, 21 nt, synthetic construct
  source 1..21: mol_type = other RNA
ctctccagcctggcctgcacc

SEQ ID NO: 5460 - RNA, 21 nt, synthetic construct
  source 1..21: mol_type = other RNA
ctctcttttctgggcacccgc

SEQ ID NO: 5461 - RNA, 21 nt, synthetic construct
  source 1..21: mol_type = other RNA
ctctgagagctggcacactgc

SEQ ID NO: 5462 - RNA, 21 nt, synthetic construct
  source 1..21: mol_type = other RNA
ctctgagtggcgaaatcaagg

SEQ ID NO: 5463 - RNA, 21 nt, synthetic construct
  source 1..21: mol_type = other RNA
ctctgcaaaggccaggggcgt

SEQ ID NO: 5464 - RNA, 21 nt, synthetic construct
  source 1..21: mol_type = other RNA
ctctggattggggagcctcgt

SEQ ID NO: 5465 - RNA, 21 nt, synthetic construct
  source 1..21: mol_type = other RNA
ctctgtcatccctgagctctc

SEQ ID NO: 5466 - RNA, 21 nt, synthetic construct
  source 1..21: mol_type = other RNA
ctctgtcccctgccattgctt

SEQ ID NO: 5467 - RNA, 21 nt, synthetic construct
  source 1..21: mol_type = other RNA
ctctgtcttggtgctctgtca

SEQ ID NO: 5468 - RNA, 21 nt, synthetic construct
  source 1..21: mol_type = other RNA
ctcttcaagatgtggctgaaa

SEQ ID NO: 5469 - RNA, 21 nt, synthetic construct
  source 1..21: mol_type = other RNA
ctcttccccaagcccctcacc

SEQ ID NO: 5470 - RNA, 21 nt, synthetic construct
  source 1..21: mol_type = other RNA
ctcttctccctgggcccacag

SEQ ID NO: 5471 - RNA, 21 nt, synthetic construct
  source 1..21: mol_type = other RNA
ctcttcttccttggggtcaat

SEQ ID NO: 5472 - RNA, 21 nt, synthetic construct
  source 1..21: mol_type = other RNA
ctcttgccctgaccagctttg

SEQ ID NO: 5473 - RNA, 21 nt, synthetic construct
  source 1..21: mol_type = other RNA
ctcttgctgctgctcctctcc

SEQ ID NO: 5474 - RNA, 21 nt, synthetic construct
  source 1..21: mol_type = other RNA
ctcttttctgggcacccgcct

SEQ ID NO: 5475 - RNA, 21 nt, synthetic construct
  source 1..21: mol_type = other RNA
ctgaaaacctcatcggccgcc

SEQ ID NO: 5476 - RNA, 21 nt, synthetic construct
  source 1..21: mol_type = other RNA
ctgaaacgggtgacacagctg

SEQ ID NO: 5477 - RNA, 21 nt, synthetic construct
  source 1..21: mol_type = other RNA
ctgaagcggctgcagccgggg

SEQ ID NO: 5478 - RNA, 21 nt, synthetic construct
  source 1..21: mol_type = other RNA
ctgacacgcccctggcctttg

SEQ ID NO: 5479 - RNA, 21 nt, synthetic construct
  source 1..21: mol_type = other RNA
ctgaccagctttgcccagcac

SEQ ID NO: 5480 - RNA, 21 nt, synthetic construct
  source 1..21: mol_type = other RNA
ctgaccgcgttctgctcatcc

SEQ ID NO: 5481 - RNA, 21 nt, synthetic construct
  source 1..21: mol_type = other RNA
ctgacgctcctccgggaccgg

SEQ ID NO: 5482 - RNA, 21 nt, synthetic construct
  source 1..21: mol_type = other RNA
ctgagaagaagtggccggtcc

SEQ ID NO: 5483 - RNA, 21 nt, synthetic construct
  source 1..21: mol_type = other RNA
ctgagagctggcacactgccc

SEQ ID NO: 5484 - RNA, 21 nt, synthetic construct
  source 1..21: mol_type = other RNA
ctgagcaaggccgacgcccta

SEQ ID NO: 5485 - RNA, 21 nt, synthetic construct
  source 1..21: mol_type = other RNA
ctgagctctcaaagtagcgca

SEQ ID NO: 5486 - RNA, 21 nt, synthetic construct
  source 1..21: mol_type = other RNA
ctgaggtgctgttggctgcca

SEQ ID NO: 5487 - RNA, 21 nt, synthetic construct
  source 1..21: mol_type = other RNA
ctgagtcccacgaggctcccc

SEQ ID NO: 5488 - RNA, 21 nt, synthetic construct
  source 1..21: mol_type = other RNA
ctgagtggcgaaatcaaggac

SEQ ID NO: 5489 - RNA, 21 nt, synthetic construct
  source 1..21: mol_type = other RNA
ctgatcttccagcctcccgcc

SEQ ID NO: 5490 - RNA, 21 nt, synthetic construct
  source 1..21: mol_type = other RNA
ctgatgcacatgtactgggca

SEQ ID NO: 5491 - RNA, 21 nt, synthetic construct
  source 1..21: mol_type = other RNA
ctgcaaaggccaggggcgtgt

SEQ ID NO: 5492 - RNA, 21 nt, synthetic construct
  source 1..21: mol_type = other RNA
ctgcaatgcttcctgggggcc

SEQ ID NO: 5493 - RNA, 21 nt, synthetic construct
  source 1..21: mol_type = other RNA
ctgcacagcacgtgcggaccg

SEQ ID NO: 5494 - RNA, 21 nt, synthetic construct
  source 1..21: mol_type = other RNA
ctgcaccagatccacctccac

SEQ ID NO: 5495 - RNA, 21 nt, synthetic construct
  source 1..21: mol_type = other RNA
ctgcacggcccagcaggccga

SEQ ID NO: 5496 - RNA, 21 nt, synthetic construct
  source 1..21: mol_type = other RNA
ctgcactgcgcccacgaggcc

SEQ ID NO: 5497 - RNA, 21 nt, synthetic construct
  source 1..21: mol_type = other RNA
ctgcagccgcttcaggtacct

SEQ ID NO: 5498 - RNA, 21 nt, synthetic construct
  source 1..21: mol_type = other RNA
ctgcagccggggacactgcgg

SEQ ID NO: 5499 - RNA, 21 nt, synthetic construct
  source 1..21: mol_type = other RNA
ctgcaggacacgtatggtgcc

SEQ ID NO: 5500 - RNA, 21 nt, synthetic construct
  source 1..21: mol_type = other RNA
ctgcaggatctgctcttctcc

SEQ ID NO: 5501 - RNA, 21 nt, synthetic construct
  source 1..21: mol_type = other RNA
ctgcaggccataggcatcccc

SEQ ID NO: 5502 - RNA, 21 nt, synthetic construct
  source 1..21: mol_type = other RNA
ctgcagtgagcggtagaactg

SEQ ID NO: 5503 - RNA, 21 nt, synthetic construct
  source 1..21: mol_type = other RNA
ctgccaaattccagcctcctc

SEQ ID NO: 5504 - RNA, 21 nt, synthetic construct
  source 1..21: mol_type = other RNA
ctgccaaggagcaccggcggc

SEQ ID NO: 5505 - RNA, 21 nt, synthetic construct
  source 1..21: mol_type = other RNA
ctgccattgcttgaaccgtcc

SEQ ID NO: 5506 - RNA, 21 nt, synthetic construct
  source 1..21: mol_type = other RNA
ctgcccagtccggggtggcca

SEQ ID NO: 5507 - RNA, 21 nt, synthetic construct
  source 1..21: mol_type = other RNA
ctgccccagcccaatagctct

SEQ ID NO: 5508 - RNA, 21 nt, synthetic construct
  source 1..21: mol_type = other RNA
ctgcccggcacaaagtagggc

SEQ ID NO: 5509 - RNA, 21 nt, synthetic construct
  source 1..21: mol_type = other RNA
ctgccctccacgctcacggga

SEQ ID NO: 5510 - RNA, 21 nt, synthetic construct
  source 1..21: mol_type = other RNA
ctgccgttctgcccagtccgg

SEQ ID NO: 5511 - RNA, 21 nt, synthetic construct
  source 1..21: mol_type = other RNA
ctgcctcggtggacaggaagc

SEQ ID NO: 5512 - RNA, 21 nt, synthetic construct
  source 1..21: mol_type = other RNA
ctgcctctcacatacccccac

SEQ ID NO: 5513 - RNA, 21 nt, synthetic construct
  source 1..21: mol_type = other RNA
ctgcctgggagccctactcgg

SEQ ID NO: 5514 - RNA, 21 nt, synthetic construct
  source 1..21: mol_type = other RNA
ctgcgcccacgaggccgagga

SEQ ID NO: 5515 - RNA, 21 nt, synthetic construct
  source 1..21: mol_type = other RNA
ctgcggaggtccagggagaag

SEQ ID NO: 5516 - RNA, 21 nt, synthetic construct
  source 1..21: mol_type = other RNA
ctgcggatgggaactggtcct

SEQ ID NO: 5517 - RNA, 21 nt, synthetic construct
  source 1..21: mol_type = other RNA
ctgcggcccgcggtgggtgtt

SEQ ID NO: 5518 - RNA, 21 nt, synthetic construct
  source 1..21: mol_type = other RNA
ctgcgggagctccttgtcctt

SEQ ID NO: 5519 - RNA, 21 nt, synthetic construct
  source 1..21: mol_type = other RNA
ctgcgggctcggcaccatacg

SEQ ID NO: 5520 - RNA, 21 nt, synthetic construct
  source 1..21: mol_type = other RNA
ctgctcatcctagacggcttc

SEQ ID NO: 5521 - RNA, 21 nt, synthetic construct
  source 1..21: mol_type = other RNA
ctgctccaccggctctgcaaa

SEQ ID NO: 5522 - RNA, 21 nt, synthetic construct
  source 1..21: mol_type = other RNA
ctgctccatggagaagccgga

SEQ ID NO: 5523 - RNA, 21 nt, synthetic construct
  source 1..21: mol_type = other RNA
ctgctccctccgggggctgct

SEQ ID NO: 5524 - RNA, 21 nt, synthetic construct
  source 1..21: mol_type = other RNA
ctgctccgaggttgcaccctc

SEQ ID NO: 5525 - RNA, 21 nt, synthetic construct
  source 1..21: mol_type = other RNA
ctgctcctctccagcctggcc

SEQ ID NO: 5526 - RNA, 21 nt, synthetic construct
  source 1..21: mol_type = other RNA
ctgctcttctccctgggccca

SEQ ID NO: 5527 - RNA, 21 nt, synthetic construct
  source 1..21: mol_type = other RNA
ctgctgcactgcgcccacgag

SEQ ID NO: 5528 - RNA, 21 nt, synthetic construct
  source 1..21: mol_type = other RNA
ctgctgctcctctccagcctg

SEQ ID NO: 5529 - RNA, 21 nt, synthetic construct
  source 1..21: mol_type = other RNA
ctgctggagctgctgcactgc

SEQ ID NO: 5530 - RNA, 21 nt, synthetic construct
  source 1..21: mol_type = other RNA
ctgctggagcttggggaggac

SEQ ID NO: 5531 - RNA, 21 nt, synthetic construct
  source 1..21: mol_type = other RNA
ctgctggccggccttttccag

SEQ ID NO: 5532 - RNA, 21 nt, synthetic construct
  source 1..21: mol_type = other RNA
ctgctgggccgtgcagccctc

SEQ ID NO: 5533 - RNA, 21 nt, synthetic construct
  source 1..21: mol_type = other RNA
ctgcttcctgtccaccgaggc

SEQ ID NO: 5534 - RNA, 21 nt, synthetic construct
  source 1..21: mol_type = other RNA
ctggaaaaggccggccagcag

SEQ ID NO: 5535 - RNA, 21 nt, synthetic construct
  source 1..21: mol_type = other RNA
ctggaagatcagcccagccag

SEQ ID NO: 5536 - RNA, 21 nt, synthetic construct
  source 1..21: mol_type = other RNA
ctggaagcgcaagatggcttc

SEQ ID NO: 5537 - RNA, 21 nt, synthetic construct
  source 1..21: mol_type = other RNA
ctggaatttggcagcacgtgg

SEQ ID NO: 5538 - RNA, 21 nt, synthetic construct
  source 1..21: mol_type = other RNA
ctggacctccgcagcactggc

SEQ ID NO: 5539 - RNA, 21 nt, synthetic construct
  source 1..21: mol_type = other RNA
ctggagaggagcagcagcaag

SEQ ID NO: 5540 - RNA, 21 nt, synthetic construct
  source 1..21: mol_type = other RNA
ctggagcgggaactggccacc

SEQ ID NO: 5541 - RNA, 21 nt, synthetic construct
  source 1..21: mol_type = other RNA
ctggagctgctgcactgcgcc

SEQ ID NO: 5542 - RNA, 21 nt, synthetic construct
  source 1..21: mol_type = other RNA
ctggagcttggggaggacgcc

SEQ ID NO: 5543 - RNA, 21 nt, synthetic construct
  source 1..21: mol_type = other RNA
ctggagggcgtgccacgcttt

SEQ ID NO: 5544 - RNA, 21 nt, synthetic construct
  source 1..21: mol_type = other RNA
ctggattggggagcctcgtgg

SEQ ID NO: 5545 - RNA, 21 nt, synthetic construct
  source 1..21: mol_type = other RNA
ctggcacactgcccggcacaa

SEQ ID NO: 5546 - RNA, 21 nt, synthetic construct
  source 1..21: mol_type = other RNA
ctggcagagctggccaagctg

SEQ ID NO: 5547 - RNA, 21 nt, synthetic construct
  source 1..21: mol_type = other RNA
ctggcatttgcccctctggat

SEQ ID NO: 5548 - RNA, 21 nt, synthetic construct
  source 1..21: mol_type = other RNA
ctggccaagctggcctgggag

SEQ ID NO: 5549 - RNA, 21 nt, synthetic construct
  source 1..21: mol_type = other RNA
ctggccaccccggactgggca

SEQ ID NO: 5550 - RNA, 21 nt, synthetic construct
  source 1..21: mol_type = other RNA
ctggcccaaggaggcctggct

SEQ ID NO: 5551 - RNA, 21 nt, synthetic construct
  source 1..21: mol_type = other RNA
ctggccggccttttccagaag

SEQ ID NO: 5552 - RNA, 21 nt, synthetic construct
  source 1..21: mol_type = other RNA
ctggcctgcaccagatccacc

SEQ ID NO: 5553 - RNA, 21 nt, synthetic construct
  source 1..21: mol_type = other RNA
ctggccttccccagcttcctc

SEQ ID NO: 5554 - RNA, 21 nt, synthetic construct
  source 1..21: mol_type = other RNA
ctggcctttgcagagccggtg

SEQ ID NO: 5555 - RNA, 21 nt, synthetic construct
  source 1..21: mol_type = other RNA
ctggctctgagtggcgaaatc

SEQ ID NO: 5556 - RNA, 21 nt, synthetic construct
  source 1..21: mol_type = other RNA
ctggctgaggtgctgttggct

SEQ ID NO: 5557 - RNA, 21 nt, synthetic construct
  source 1..21: mol_type = other RNA
ctggctggagggcgtgccacg

SEQ ID NO: 5558 - RNA, 21 nt, synthetic construct
  source 1..21: mol_type = other RNA
ctggctgggctgatcttccag

SEQ ID NO: 5559 - RNA, 21 nt, synthetic construct
  source 1..21: mol_type = other RNA
ctgggagccctactcgggcca

SEQ ID NO: 5560 - RNA, 21 nt, synthetic construct
  source 1..21: mol_type = other RNA
ctgggagctgggccgcagaca

SEQ ID NO: 5561 - RNA, 21 nt, synthetic construct
  source 1..21: mol_type = other RNA
ctgggcaaagctggtcagggc

SEQ ID NO: 5562 - RNA, 21 nt, synthetic construct
  source 1..21: mol_type = other RNA
ctgggcaaggccttggaggcg

SEQ ID NO: 5563 - RNA, 21 nt, synthetic construct
  source 1..21: mol_type = other RNA
ctgggcacccgcctcacgcct

SEQ ID NO: 5564 - RNA, 21 nt, synthetic construct
  source 1..21: mol_type = other RNA
ctgggcagaacggcagctggc

SEQ ID NO: 5565 - RNA, 21 nt, synthetic construct
  source 1..21: mol_type = other RNA
ctgggcccacagccactcgtg

SEQ ID NO: 5566 - RNA, 21 nt, synthetic construct
  source 1..21: mol_type = other RNA
ctgggccgcagacatcaaagt

SEQ ID NO: 5567 - RNA, 21 nt, synthetic construct
  source 1..21: mol_type = other RNA
ctgggccgtgcagccctcgac

SEQ ID NO: 5568 - RNA, 21 nt, synthetic construct
  source 1..21: mol_type = other RNA
ctgggcctgctccatggagaa

SEQ ID NO: 5569 - RNA, 21 nt, synthetic construct
  source 1..21: mol_type = other RNA
ctgggcgatggccaaaggctt

SEQ ID NO: 5570 - RNA, 21 nt, synthetic construct
  source 1..21: mol_type = other RNA
ctgggctgatcttccagcctc

SEQ ID NO: 5571 - RNA, 21 nt, synthetic construct
  source 1..21: mol_type = other RNA
ctgggcttgtggccggcttcc

SEQ ID NO: 5572 - RNA, 21 nt, synthetic construct
  source 1..21: mol_type = other RNA
ctggggaagccggccacaagc

SEQ ID NO: 5573 - RNA, 21 nt, synthetic construct
  source 1..21: mol_type = other RNA
ctggggaaggccagctcggac

SEQ ID NO: 5574 - RNA, 21 nt, synthetic construct
  source 1..21: mol_type = other RNA
ctggggcagtgagccgggcct

SEQ ID NO: 5575 - RNA, 21 nt, synthetic construct
  source 1..21: mol_type = other RNA
ctgggggccctgtggctggct

SEQ ID NO: 5576 - RNA, 21 nt, synthetic construct
  source 1..21: mol_type = other RNA
ctggtcagggcaagagctatt

SEQ ID NO: 5577 - RNA, 21 nt, synthetic construct
  source 1..21: mol_type = other RNA
ctggtccagagcctgagcaag

SEQ ID NO: 5578 - RNA, 21 nt, synthetic construct
  source 1..21: mol_type = other RNA
ctggtcctcctgtagggtact

SEQ ID NO: 5579 - RNA, 21 nt, synthetic construct
  source 1..21: mol_type = other RNA
ctggtgcaggccaggctggag

SEQ ID NO: 5580 - RNA, 21 nt, synthetic construct
  source 1..21: mol_type = other RNA
ctgtaccacgtgctgccaaat

SEQ ID NO: 5581 - RNA, 21 nt, synthetic construct
  source 1..21: mol_type = other RNA
ctgtagggtactttgatgtct

SEQ ID NO: 5582 - RNA, 21 nt, synthetic construct
  source 1..21: mol_type = other RNA
ctgtcatccctgagctctcaa

SEQ ID NO: 5583 - RNA, 21 nt, synthetic construct
  source 1..21: mol_type = other RNA
ctgtccaccgaggcagccgcc

SEQ ID NO: 5584 - RNA, 21 nt, synthetic construct
  source 1..21: mol_type = other RNA
ctgtcccctgccattgcttga

SEQ ID NO: 5585 - RNA, 21 nt, synthetic construct
  source 1..21: mol_type = other RNA
ctgtccggcttctccatggag

SEQ ID NO: 5586 - RNA, 21 nt, synthetic construct
  source 1..21: mol_type = other RNA
ctgtcgagggctgcacggccc

SEQ ID NO: 5587 - RNA, 21 nt, synthetic construct
  source 1..21: mol_type = other RNA
ctgtcttggtgctctgtcatc

SEQ ID NO: 5588 - RNA, 21 nt, synthetic construct
  source 1..21: mol_type = other RNA
ctgtgactgagaagaagtggc

SEQ ID NO: 5589 - RNA, 21 nt, synthetic construct
  source 1..21: mol_type = other RNA
ctgtgaggaggagggtgcaac

SEQ ID NO: 5590 - RNA, 21 nt, synthetic construct
  source 1..21: mol_type = other RNA
ctgtgcaggaagccatcttgc

SEQ ID NO: 5591 - RNA, 21 nt, synthetic construct
  source 1..21: mol_type = other RNA
ctgtgctgggcaaagctggtc

SEQ ID NO: 5592 - RNA, 21 nt, synthetic construct
  source 1..21: mol_type = other RNA
ctgtggctggctctgagtggc

SEQ ID NO: 5593 - RNA, 21 nt, synthetic construct
  source 1..21: mol_type = other RNA
ctgtggctgtgactgagaaga

SEQ ID NO: 5594 - RNA, 21 nt, synthetic construct
  source 1..21: mol_type = other RNA
ctgtgggcccagggagaagag

SEQ ID NO: 5595 - RNA, 21 nt, synthetic construct
  source 1..21: mol_type = other RNA
ctgtgtcacccgtttcaggtg

SEQ ID NO: 5596 - RNA, 21 nt, synthetic construct
  source 1..21: mol_type = other RNA
ctgttggctgccaaggagcac

SEQ ID NO: 5597 - RNA, 21 nt, synthetic construct
  source 1..21: mol_type = other RNA
cttagtccaacacccaccgcg

SEQ ID NO: 5598 - RNA, 21 nt, synthetic construct
  source 1..21: mol_type = other RNA
cttcaagatgtggctgaaaac

SEQ ID NO: 5599 - RNA, 21 nt, synthetic construct
  source 1..21: mol_type = other RNA
cttcaggtacctcgcaagcac

SEQ ID NO: 5600 - RNA, 21 nt, synthetic construct
  source 1..21: mol_type = other RNA
cttccagcctcccgcccgctg

SEQ ID NO: 5601 - RNA, 21 nt, synthetic construct
  source 1..21: mol_type = other RNA
cttccagctcctcgaagccgt

SEQ ID NO: 5602 - RNA, 21 nt, synthetic construct
  source 1..21: mol_type = other RNA
cttccccaagcccctcacccc

SEQ ID NO: 5603 - RNA, 21 nt, synthetic construct
  source 1..21: mol_type = other RNA
cttccccagcttcctcctgca

SEQ ID NO: 5604 - RNA, 21 nt, synthetic construct
  source 1..21: mol_type = other RNA
cttccccagtacgactttgtc

SEQ ID NO: 5605 - RNA, 21 nt, synthetic construct
  source 1..21: mol_type = other RNA
cttcctcctgcaatgcttcct

SEQ ID NO: 5606 - RNA, 21 nt, synthetic construct
  source 1..21: mol_type = other RNA
cttcctgcacagcacgtgcgg

SEQ ID NO: 5607 - RNA, 21 nt, synthetic construct
  source 1..21: mol_type = other RNA
cttcctgggggccctgtggct

SEQ ID NO: 5608 - RNA, 21 nt, synthetic construct
  source 1..21: mol_type = other RNA
cttcctgtccaccgaggcagc

SEQ ID NO: 5609 - RNA, 21 nt, synthetic construct
  source 1..21: mol_type = other RNA
cttccttggggtcaatgctag

SEQ ID NO: 5610 - RNA, 21 nt, synthetic construct
  source 1..21: mol_type = other RNA
cttcgaggagctggaagcgca

SEQ ID NO: 5611 - RNA, 21 nt, synthetic construct
  source 1..21: mol_type = other RNA
cttctcagtcacagccacagc

SEQ ID NO: 5612 - RNA, 21 nt, synthetic construct
  source 1..21: mol_type = other RNA
cttctccatggagcaggccca

SEQ ID NO: 5613 - RNA, 21 nt, synthetic construct
  source 1..21: mol_type = other RNA
cttctccctggacctccgcag

SEQ ID NO: 5614 - RNA, 21 nt, synthetic construct
  source 1..21: mol_type = other RNA
cttctccctgggcccacagcc

SEQ ID NO: 5615 - RNA, 21 nt, synthetic construct
  source 1..21: mol_type = other RNA
cttctctgtcccctgccattg

SEQ ID NO: 5616 - RNA, 21 nt, synthetic construct
  source 1..21: mol_type = other RNA
cttctgcttcctgtccaccga

SEQ ID NO: 5617 - RNA, 21 nt, synthetic construct
  source 1..21: mol_type = other RNA
cttctggaaaaggccggccag

SEQ ID NO: 5618 - RNA, 21 nt, synthetic construct
  source 1..21: mol_type = other RNA
cttcttccttggggtcaatgc

SEQ ID NO: 5619 - RNA, 21 nt, synthetic construct
  source 1..21: mol_type = other RNA
cttcttctcagtcacagccac

SEQ ID NO: 5620 - RNA, 21 nt, synthetic construct
  source 1..21: mol_type = other RNA
cttcttctggaaaaggccggc

SEQ ID NO: 5621 - RNA, 21 nt, synthetic construct
  source 1..21: mol_type = other RNA
cttgaaccgtccgggggatgc

SEQ ID NO: 5622 - RNA, 21 nt, synthetic construct
  source 1..21: mol_type = other RNA
cttgaagagacctgaccgcgt

SEQ ID NO: 5623 - RNA, 21 nt, synthetic construct
  source 1..21: mol_type = other RNA
cttgatttcgccactcagagc

SEQ ID NO: 5624 - RNA, 21 nt, synthetic construct
  source 1..21: mol_type = other RNA
cttgcccagtacatgtgcatc

SEQ ID NO: 5625 - RNA, 21 nt, synthetic construct
  source 1..21: mol_type = other RNA
cttgccctgaccagctttgcc

SEQ ID NO: 5626 - RNA, 21 nt, synthetic construct
  source 1..21: mol_type = other RNA
cttgcgaggtacctgaagcgg

SEQ ID NO: 5627 - RNA, 21 nt, synthetic construct
  source 1..21: mol_type = other RNA
cttgcgcttccagctcctcga

SEQ ID NO: 5628 - RNA, 21 nt, synthetic construct
  source 1..21: mol_type = other RNA
cttgctcaggctctggaccag

SEQ ID NO: 5629 - RNA, 21 nt, synthetic construct
  source 1..21: mol_type = other RNA
cttgctgctgctcctctccag

SEQ ID NO: 5630 - RNA, 21 nt, synthetic construct
  source 1..21: mol_type = other RNA
cttggaggcggcgggccaaga

SEQ ID NO: 5631 - RNA, 21 nt, synthetic construct
  source 1..21: mol_type = other RNA
cttggcagccaacagcacctc

SEQ ID NO: 5632 - RNA, 21 nt, synthetic construct
  source 1..21: mol_type = other RNA
cttggccagctctgccagggc

SEQ ID NO: 5633 - RNA, 21 nt, synthetic construct
  source 1..21: mol_type = other RNA
cttggcccgccgcctccaagg

SEQ ID NO: 5634 - RNA, 21 nt, synthetic construct
  source 1..21: mol_type = other RNA
cttggcgtcctccccaagctc

SEQ ID NO: 5635 - RNA, 21 nt, synthetic construct
  source 1..21: mol_type = other RNA
cttgggccagctgccgttctg

SEQ ID NO: 5636 - RNA, 21 nt, synthetic construct
  source 1..21: mol_type = other RNA
cttggggaagagacatccttg

SEQ ID NO: 5637 - RNA, 21 nt, synthetic construct
  source 1..21: mol_type = other RNA
cttggggaggacgccaagctg

SEQ ID NO: 5638 - RNA, 21 nt, synthetic construct
  source 1..21: mol_type = other RNA
cttggggtcaatgctaggtac

SEQ ID NO: 5639 - RNA, 21 nt, synthetic construct
  source 1..21: mol_type = other RNA
cttggtgctctgtcatccctg

SEQ ID NO: 5640 - RNA, 21 nt, synthetic construct
  source 1..21: mol_type = other RNA
cttgtccttgatttcgccact

SEQ ID NO: 5641 - RNA, 21 nt, synthetic construct
  source 1..21: mol_type = other RNA
cttgtggccggcttccccagt

SEQ ID NO: 5642 - RNA, 21 nt, synthetic construct
  source 1..21: mol_type = other RNA
ctttctggctgggctgatctt

SEQ ID NO: 5643 - RNA, 21 nt, synthetic construct
  source 1..21: mol_type = other RNA
ctttgagagctcagggatgac

SEQ ID NO: 5644 - RNA, 21 nt, synthetic construct
  source 1..21: mol_type = other RNA
ctttgatgtctgcggcccagc

SEQ ID NO: 5645 - RNA, 21 nt, synthetic construct
  source 1..21: mol_type = other RNA
ctttgcagagccggtggagca

SEQ ID NO: 5646 - RNA, 21 nt, synthetic construct
  source 1..21: mol_type = other RNA
ctttgcccagcacagcaatca

SEQ ID NO: 5647 - RNA, 21 nt, synthetic construct
  source 1..21: mol_type = other RNA
ctttggccatcgcccaggtcc

SEQ ID NO: 5648 - RNA, 21 nt, synthetic construct
  source 1..21: mol_type = other RNA
ctttgtcttctctgtcccctg

SEQ ID NO: 5649 - RNA, 21 nt, synthetic construct
  source 1..21: mol_type = other RNA
ctttgtgccgggcagtgtgcc

SEQ ID NO: 5650 - RNA, 21 nt, synthetic construct
  source 1..21: mol_type = other RNA
cttttccagaagaagctgctc

SEQ ID NO: 5651 - RNA, 21 nt, synthetic construct
  source 1..21: mol_type = other RNA
cttttctgggcacccgcctca

SEQ ID NO: 5652 - RNA, 21 nt, synthetic construct
  source 1..21: mol_type = other RNA
gaaaacctcatcggccgccac

SEQ ID NO: 5653 - RNA, 21 nt, synthetic construct
  source 1..21: mol_type = other RNA
gaaaagagaggcggccgggga

SEQ ID NO: 5654 - RNA, 21 nt, synthetic construct
  source 1..21: mol_type = other RNA
gaaaaggccggccagcagccc

SEQ ID NO: 5655 - RNA, 21 nt, synthetic construct
  source 1..21: mol_type = other RNA
gaaacgggtgacacagctgag

SEQ ID NO: 5656 - RNA, 21 nt, synthetic construct
  source 1..21: mol_type = other RNA
gaaagcgtggcacgccctcca

SEQ ID NO: 5657 - RNA, 21 nt, synthetic construct
  source 1..21: mol_type = other RNA
gaaatcaaggacaaggagctc

SEQ ID NO: 5658 - RNA, 21 nt, synthetic construct
  source 1..21: mol_type = other RNA
gaaccgtccgggggatgccta

SEQ ID NO: 5659 - RNA, 21 nt, synthetic construct
  source 1..21: mol_type = other RNA
gaacgcggtcaggtctcttca

SEQ ID NO: 5660 - RNA, 21 nt, synthetic construct
  source 1..21: mol_type = other RNA
gaacggcagctggcccaagga

SEQ ID NO: 5661 - RNA, 21 nt, synthetic construct
  source 1..21: mol_type = other RNA
gaactgctccaccggctctgc

SEQ ID NO: 5662 - RNA, 21 nt, synthetic construct
  source 1..21: mol_type = other RNA
gaactggccaccccggactgg

SEQ ID NO: 5663 - RNA, 21 nt, synthetic construct
  source 1..21: mol_type = other RNA
gaactggtcctcctgtagggt

SEQ ID NO: 5664 - RNA, 21 nt, synthetic construct
  source 1..21: mol_type = other RNA
gaagaagaggccctatgacaa

SEQ ID NO: 5665 - RNA, 21 nt, synthetic construct
  source 1..21: mol_type = other RNA
gaagaagctgctccgaggttg

SEQ ID NO: 5666 - RNA, 21 nt, synthetic construct
  source 1..21: mol_type = other RNA
gaagaagtggccggtcccgga

SEQ ID NO: 5667 - RNA, 21 nt, synthetic construct
  source 1..21: mol_type = other RNA
gaagacaaagtcgtactgggg

SEQ ID NO: 5668 - RNA, 21 nt, synthetic construct
  source 1..21: mol_type = other RNA
gaagagacctgaccgcgttct

SEQ ID NO: 5669 - RNA, 21 nt, synthetic construct
  source 1..21: mol_type = other RNA
gaagagcagatcctgcaggcc

SEQ ID NO: 5670 - RNA, 21 nt, synthetic construct
  source 1..21: mol_type = other RNA
gaagaggccctatgacaactg

SEQ ID NO: 5671 - RNA, 21 nt, synthetic construct
  source 1..21: mol_type = other RNA
gaagatcagcccagccagaaa

SEQ ID NO: 5672 - RNA, 21 nt, synthetic construct
  source 1..21: mol_type = other RNA
gaagcagaaggtgcttgcgag

SEQ ID NO: 5673 - RNA, 21 nt, synthetic construct
  source 1..21: mol_type = other RNA
gaagcattgcaggaggaagct

SEQ ID NO: 5674 - RNA, 21 nt, synthetic construct
  source 1..21: mol_type = other RNA
gaagccatcttgcgcttccag

SEQ ID NO: 5675 - RNA, 21 nt, synthetic construct
  source 1..21: mol_type = other RNA
gaagccggacagctcaaatag

SEQ ID NO: 5676 - RNA, 21 nt, synthetic construct
  source 1..21: mol_type = other RNA
gaagccggccacaagcccagg

SEQ ID NO: 5677 - RNA, 21 nt, synthetic construct
  source 1..21: mol_type = other RNA
gaagccgtctaggatgagcag

SEQ ID NO: 5678 - RNA, 21 nt, synthetic construct
  source 1..21: mol_type = other RNA
gaagcgcaagatggcttcctg

SEQ ID NO: 5679 - RNA, 21 nt, synthetic construct
  source 1..21: mol_type = other RNA
gaagcggctgcagccggggac

SEQ ID NO: 5680 - RNA, 21 nt, synthetic construct
  source 1..21: mol_type = other RNA
gaagctgctccgaggttgcac

SEQ ID NO: 5681 - RNA, 21 nt, synthetic construct
  source 1..21: mol_type = other RNA
gaagctggggaaggccagctc

SEQ ID NO: 5682 - RNA, 21 nt, synthetic construct
  source 1..21: mol_type = other RNA
gaaggccagctcggactctgc

SEQ ID NO: 5683 - RNA, 21 nt, synthetic construct
  source 1..21: mol_type = other RNA
gaaggtgcttgcgaggtacct

SEQ ID NO: 5684 - RNA, 21 nt, synthetic construct
  source 1..21: mol_type = other RNA
gaagtcttggcccgccgcctc

SEQ ID NO: 5685 - RNA, 21 nt, synthetic construct
  source 1..21: mol_type = other RNA
gaagtggccggtcccggagga

SEQ ID NO: 5686 - RNA, 21 nt, synthetic construct
  source 1..21: mol_type = other RNA
gaatttggcagcacgtggtac

SEQ ID NO: 5687 - RNA, 21 nt, synthetic construct
  source 1..21: mol_type = other RNA
gacaaagtcgtactggggaag

SEQ ID NO: 5688 - RNA, 21 nt, synthetic construct
  source 1..21: mol_type = other RNA
gacaactggctggagggcgtg

SEQ ID NO: 5689 - RNA, 21 nt, synthetic construct
  source 1..21: mol_type = other RNA
gacaaggagctcccgcagtac

SEQ ID NO: 5690 - RNA, 21 nt, synthetic construct
  source 1..21: mol_type = other RNA
gacacagctgagtcccacgag

SEQ ID NO: 5691 - RNA, 21 nt, synthetic construct
  source 1..21: mol_type = other RNA
gacacgagtgattgctgtgct

SEQ ID NO: 5692 - RNA, 21 nt, synthetic construct
  source 1..21: mol_type = other RNA
gacacgcccctggcctttgca

SEQ ID NO: 5693 - RNA, 21 nt, synthetic construct
  source 1..21: mol_type = other RNA
gacacgtatggtgccgagccc

SEQ ID NO: 5694 - RNA, 21 nt, synthetic construct
  source 1..21: mol_type = other RNA
gacactgcgggcgcggcagct

SEQ ID NO: 5695 - RNA, 21 nt, synthetic construct
  source 1..21: mol_type = other RNA
gacagagaagacaaagtcgta

SEQ ID NO: 5696 - RNA, 21 nt, synthetic construct
  source 1..21: mol_type = other RNA
gacagagcaccaagacagagc

SEQ ID NO: 5697 - RNA, 21 nt, synthetic construct
  source 1..21: mol_type = other RNA
gacagagccctgacgctcctc

SEQ ID NO: 5698 - RNA, 21 nt, synthetic construct
  source 1..21: mol_type = other RNA
gacagctcaaatagggcgtcg

SEQ ID NO: 5699 - RNA, 21 nt, synthetic construct
  source 1..21: mol_type = other RNA
gacaggaagcagaaggtgctt

SEQ ID NO: 5700 - RNA, 21 nt, synthetic construct
  source 1..21: mol_type = other RNA
gacatagagtcccgtgagcgt

SEQ ID NO: 5701 - RNA, 21 nt, synthetic construct
  source 1..21: mol_type = other RNA
gacatcaaagtaccctacagg

SEQ ID NO: 5702 - RNA, 21 nt, synthetic construct
  source 1..21: mol_type = other RNA
gaccagctttgcccagcacag

SEQ ID NO: 5703 - RNA, 21 nt, synthetic construct
  source 1..21: mol_type = other RNA
gaccagttcccatccgcagac

SEQ ID NO: 5704 - RNA, 21 nt, synthetic construct
  source 1..21: mol_type = other RNA
gaccccaaggaagaagaggcc

SEQ ID NO: 5705 - RNA, 21 nt, synthetic construct
  source 1..21: mol_type = other RNA
gaccgcgttctgctcatccta

SEQ ID NO: 5706 - RNA, 21 nt, synthetic construct
  source 1..21: mol_type = other RNA
gaccggccacttcttctcagt

SEQ ID NO: 5707 - RNA, 21 nt, synthetic construct
  source 1..21: mol_type = other RNA
gacctccgcagcactggcatt

SEQ ID NO: 5708 - RNA, 21 nt, synthetic construct
  source 1..21: mol_type = other RNA
gacctgaccgcgttctgctca

SEQ ID NO: 5709 - RNA, 21 nt, synthetic construct
  source 1..21: mol_type = other RNA
gacctgggcgatggccaaagg

SEQ ID NO: 5710 - RNA, 21 nt, synthetic construct
  source 1..21: mol_type = other RNA
gacgccaagctgccctccacg

SEQ ID NO: 5711 - RNA, 21 nt, synthetic construct
  source 1..21: mol_type = other RNA
gacgccctatttgagctgtcc

SEQ ID NO: 5712 - RNA, 21 nt, synthetic construct
  source 1..21: mol_type = other RNA
gacggcttcgaggagctggaa

SEQ ID NO: 5713 - RNA, 21 nt, synthetic construct
  source 1..21: mol_type = other RNA
gacggttcaagcaatggcagg

SEQ ID NO: 5714 - RNA, 21 nt, synthetic construct
  source 1..21: mol_type = other RNA
gacgtgaggacctgggcgatg

SEQ ID NO: 5715 - RNA, 21 nt, synthetic construct
  source 1..21: mol_type = other RNA
gactaagcctttggccatcgc

SEQ ID NO: 5716 - RNA, 21 nt, synthetic construct
  source 1..21: mol_type = other RNA
gactcagctgtgtcacccgtt

SEQ ID NO: 5717 - RNA, 21 nt, synthetic construct
  source 1..21: mol_type = other RNA
gactctatgtcggcctgctgg

SEQ ID NO: 5718 - RNA, 21 nt, synthetic construct
  source 1..21: mol_type = other RNA
gactgagaagaagtggccggt

SEQ ID NO: 5719 - RNA, 21 nt, synthetic construct
  source 1..21: mol_type = other RNA
gactgggcagaacggcagctg

SEQ ID NO: 5720 - RNA, 21 nt, synthetic construct
  source 1..21: mol_type = other RNA
gacttctccctggacctccgc

SEQ ID NO: 5721 - RNA, 21 nt, synthetic construct
  source 1..21: mol_type = other RNA
gactttgtcttctctgtcccc

SEQ ID NO: 5722 - RNA, 21 nt, synthetic construct
  source 1..21: mol_type = other RNA
gagaagaagtggccggtcccg

SEQ ID NO: 5723 - RNA, 21 nt, synthetic construct
  source 1..21: mol_type = other RNA
gagaagacaaagtcgtactgg

SEQ ID NO: 5724 - RNA, 21 nt, synthetic construct
  source 1..21: mol_type = other RNA
gagaagagcagatcctgcagg

SEQ ID NO: 5725 - RNA, 21 nt, synthetic construct
  source 1..21: mol_type = other RNA
gagaagccggacagctcaaat

SEQ ID NO: 5726 - RNA, 21 nt, synthetic construct
  source 1..21: mol_type = other RNA
gagaagtcttggcccgccgcc

SEQ ID NO: 5727 - RNA, 21 nt, synthetic construct
  source 1..21: mol_type = other RNA
gagacacgagtgattgctgtg

SEQ ID NO: 5728 - RNA, 21 nt, synthetic construct
  source 1..21: mol_type = other RNA
gagacctgaccgcgttctgct

SEQ ID NO: 5729 - RNA, 21 nt, synthetic construct
  source 1..21: mol_type = other RNA
gagagctcagggatgacagag

SEQ ID NO: 5730 - RNA, 21 nt, synthetic construct
  source 1..21: mol_type = other RNA
gagagctggcacactgcccgg

SEQ ID NO: 5731 - RNA, 21 nt, synthetic construct
  source 1..21: mol_type = other RNA
gagaggagcagcagcaagagc

SEQ ID NO: 5732 - RNA, 21 nt, synthetic construct
  source 1..21: mol_type = other RNA
gagcaaggccgacgccctatt

SEQ ID NO: 5733 - RNA, 21 nt, synthetic construct
  source 1..21: mol_type = other RNA
gagcaccaagacagagccctg

SEQ ID NO: 5734 - RNA, 21 nt, synthetic construct
  source 1..21: mol_type = other RNA
gagcagaacgcggtcaggtct

SEQ ID NO: 5735 - RNA, 21 nt, synthetic construct
  source 1..21: mol_type = other RNA
gagcagatcctgcaggccata

SEQ ID NO: 5736 - RNA, 21 nt, synthetic construct
  source 1..21: mol_type = other RNA
gagcagcagcaagagcctgga

SEQ ID NO: 5737 - RNA, 21 nt, synthetic construct
  source 1..21: mol_type = other RNA
gagcagcttcttctggaaaag

SEQ ID NO: 5738 - RNA, 21 nt, synthetic construct
  source 1..21: mol_type = other RNA
gagcaggcccaggcatacgtg

SEQ ID NO: 5739 - RNA, 21 nt, synthetic construct
  source 1..21: mol_type = other RNA
gagcagttctaccgctcactg

SEQ ID NO: 5740 - RNA, 21 nt, synthetic construct
  source 1..21: mol_type = other RNA
gagccagccacagggccccca

SEQ ID NO: 5741 - RNA, 21 nt, synthetic construct
  source 1..21: mol_type = other RNA
gagccctactcgggccatcgg

SEQ ID NO: 5742 - RNA, 21 nt, synthetic construct
  source 1..21: mol_type = other RNA
gagccctgacgctcctccggg

SEQ ID NO: 5743 - RNA, 21 nt, synthetic construct
  source 1..21: mol_type = other RNA
gagccgggcctgggcttgtgg

SEQ ID NO: 5744 - RNA, 21 nt, synthetic construct
  source 1..21: mol_type = other RNA
gagccggtggagcagttctac

SEQ ID NO: 5745 - RNA, 21 nt, synthetic construct
  source 1..21: mol_type = other RNA
gagcctcgtgggactcagctg

SEQ ID NO: 5746 - RNA, 21 nt, synthetic construct
  source 1..21: mol_type = other RNA
gagcctgagcaaggccgacgc

SEQ ID NO: 5747 - RNA, 21 nt, synthetic construct
  source 1..21: mol_type = other RNA
gagcctggagcgggaactggc

SEQ ID NO: 5748 - RNA, 21 nt, synthetic construct
  source 1..21: mol_type = other RNA
gagcgggaactggccaccccg

SEQ ID NO: 5749 - RNA, 21 nt, synthetic construct
  source 1..21: mol_type = other RNA
gagcggtagaactgctccacc

SEQ ID NO: 5750 - RNA, 21 nt, synthetic construct
  source 1..21: mol_type = other RNA
gagcgtcagggctctgtcttg

SEQ ID NO: 5751 - RNA, 21 nt, synthetic construct
  source 1..21: mol_type = other RNA
gagcgtggagggcagcttggc

SEQ ID NO: 5752 - RNA, 21 nt, synthetic construct
  source 1..21: mol_type = other RNA
gagctattgggctggggcagt

SEQ ID NO: 5753 - RNA, 21 nt, synthetic construct
  source 1..21: mol_type = other RNA
gagctcagggatgacagagca

SEQ ID NO: 5754 - RNA, 21 nt, synthetic construct
  source 1..21: mol_type = other RNA
gagctccccggccgcctctct

SEQ ID NO: 5755 - RNA, 21 nt, synthetic construct
  source 1..21: mol_type = other RNA
gagctcccgcagtacctagca

SEQ ID NO: 5756 - RNA, 21 nt, synthetic construct
  source 1..21: mol_type = other RNA
gagctcctgtaccacgtgctg

SEQ ID NO: 5757 - RNA, 21 nt, synthetic construct
  source 1..21: mol_type = other RNA
gagctccttgtccttgatttc

SEQ ID NO: 5758 - RNA, 21 nt, synthetic construct
  source 1..21: mol_type = other RNA
gagctctcaaagtagcgcatc

SEQ ID NO: 5759 - RNA, 21 nt, synthetic construct
  source 1..21: mol_type = other RNA
gagctgctgcactgcgcccac

SEQ ID NO: 5760 - RNA, 21 nt, synthetic construct
  source 1..21: mol_type = other RNA
gagctggaagcgcaagatggc

SEQ ID NO: 5761 - RNA, 21 nt, synthetic construct
  source 1..21: mol_type = other RNA
gagctggcacactgcccggca

SEQ ID NO: 5762 - RNA, 21 nt, synthetic construct
  source 1..21: mol_type = other RNA
gagctggccaagctggcctgg

SEQ ID NO: 5763 - RNA, 21 nt, synthetic construct
  source 1..21: mol_type = other RNA
gagctggccttccccagcttc

SEQ ID NO: 5764 - RNA, 21 nt, synthetic construct
  source 1..21: mol_type = other RNA
gagctgggccgcagacatcaa

SEQ ID NO: 5765 - RNA, 21 nt, synthetic construct
  source 1..21: mol_type = other RNA
gagctgtccggcttctccatg

SEQ ID NO: 5766 - RNA, 21 nt, synthetic construct
  source 1..21: mol_type = other RNA
gagcttggggaggacgccaag

SEQ ID NO: 5767 - RNA, 21 nt, synthetic construct
  source 1..21: mol_type = other RNA
gaggaagctggggaaggccag

SEQ ID NO: 5768 - RNA, 21 nt, synthetic construct
  source 1..21: mol_type = other RNA
gaggaccagttcccatccgca

SEQ ID NO: 5769 - RNA, 21 nt, synthetic construct
  source 1..21: mol_type = other RNA
gaggacctgggcgatggccaa

SEQ ID NO: 5770 - RNA, 21 nt, synthetic construct
  source 1..21: mol_type = other RNA
gaggacgccaagctgccctcc

SEQ ID NO: 5771 - RNA, 21 nt, synthetic construct
  source 1..21: mol_type = other RNA
gaggagcagcagcaagagcct

SEQ ID NO: 5772 - RNA, 21 nt, synthetic construct
  source 1..21: mol_type = other RNA
gaggagcgtcagggctctgtc

SEQ ID NO: 5773 - RNA, 21 nt, synthetic construct
  source 1..21: mol_type = other RNA
gaggagctggaagcgcaagat

SEQ ID NO: 5774 - RNA, 21 nt, synthetic construct
  source 1..21: mol_type = other RNA
gaggaggagggtgcaacctcg

SEQ ID NO: 5775 - RNA, 21 nt, synthetic construct
  source 1..21: mol_type = other RNA
gaggaggctggaatttggcag

SEQ ID NO: 5776 - RNA, 21 nt, synthetic construct
  source 1..21: mol_type = other RNA
gaggagggtgcaacctcggag

SEQ ID NO: 5777 - RNA, 21 nt, synthetic construct
  source 1..21: mol_type = other RNA
gaggccctatgacaactggct

SEQ ID NO: 5778 - RNA, 21 nt, synthetic construct
  source 1..21: mol_type = other RNA
gaggccctgctggagcttggg

SEQ ID NO: 5779 - RNA, 21 nt, synthetic construct
  source 1..21: mol_type = other RNA
gaggccgaggaggctggaatt

SEQ ID NO: 5780 - RNA, 21 nt, synthetic construct
  source 1..21: mol_type = other RNA
gaggcctggctgaggtgctgt

SEQ ID NO: 5781 - RNA, 21 nt, synthetic construct
  source 1..21: mol_type = other RNA
gaggcggcgggccaagacttc

SEQ ID NO: 5782 - RNA, 21 nt, synthetic construct
  source 1..21: mol_type = other RNA
gaggcgggtgcccagaaaaga

SEQ ID NO: 5783 - RNA, 21 nt, synthetic construct
  source 1..21: mol_type = other RNA
gaggcgtgaggcgggtgccca

SEQ ID NO: 5784 - RNA, 21 nt, synthetic construct
  source 1..21: mol_type = other RNA
gaggctccccaatccagaggg

SEQ ID NO: 5785 - RNA, 21 nt, synthetic construct
  source 1..21: mol_type = other RNA
gaggctggaagatcagcccag

SEQ ID NO: 5786 - RNA, 21 nt, synthetic construct
  source 1..21: mol_type = other RNA
gaggctggaatttggcagcac

SEQ ID NO: 5787 - RNA, 21 nt, synthetic construct
  source 1..21: mol_type = other RNA
gagggcagcttggcgtcctcc

SEQ ID NO: 5788 - RNA, 21 nt, synthetic construct
  source 1..21: mol_type = other RNA
gagggcgtgccacgctttctg

SEQ ID NO: 5789 - RNA, 21 nt, synthetic construct
  source 1..21: mol_type = other RNA
gagggctgcacggcccagcag

SEQ ID NO: 5790 - RNA, 21 nt, synthetic construct
  source 1..21: mol_type = other RNA
gaggggcaaatgccagtgctg

SEQ ID NO: 5791 - RNA, 21 nt, synthetic construct
  source 1..21: mol_type = other RNA
gaggggcttggggaagagaca

SEQ ID NO: 5792 - RNA, 21 nt, synthetic construct
  source 1..21: mol_type = other RNA
gagggtgcaacctcggagcag

SEQ ID NO: 5793 - RNA, 21 nt, synthetic construct
  source 1..21: mol_type = other RNA
gaggtacctgaagcggctgca

SEQ ID NO: 5794 - RNA, 21 nt, synthetic construct
  source 1..21: mol_type = other RNA
gaggtccagggagaagtcttg

SEQ ID NO: 5795 - RNA, 21 nt, synthetic construct
  source 1..21: mol_type = other RNA
gaggtgctgttggctgccaag

SEQ ID NO: 5796 - RNA, 21 nt, synthetic construct
  source 1..21: mol_type = other RNA
gaggtggatctggtgcaggcc

SEQ ID NO: 5797 - RNA, 21 nt, synthetic construct
  source 1..21: mol_type = other RNA
gaggttgcaccctcctcctca

SEQ ID NO: 5798 - RNA, 21 nt, synthetic construct
  source 1..21: mol_type = other RNA
gaggttttcagccacatcttg

SEQ ID NO: 5799 - RNA, 21 nt, synthetic construct
  source 1..21: mol_type = other RNA
gagtagggctcccaggcagcg

SEQ ID NO: 5800 - RNA, 21 nt, synthetic construct
  source 1..21: mol_type = other RNA
gagtcccacgaggctccccaa

SEQ ID NO: 5801 - RNA, 21 nt, synthetic construct
  source 1..21: mol_type = other RNA
gagtcccgtgagcgtggaggg

SEQ ID NO: 5802 - RNA, 21 nt, synthetic construct
  source 1..21: mol_type = other RNA
gagtccgagctggccttcccc

SEQ ID NO: 5803 - RNA, 21 nt, synthetic construct
  source 1..21: mol_type = other RNA
gagtgattgctgtgctgggca

SEQ ID NO: 5804 - RNA, 21 nt, synthetic construct
  source 1..21: mol_type = other RNA
gagtggcgaaatcaaggacaa

SEQ ID NO: 5805 - RNA, 21 nt, synthetic construct
  source 1..21: mol_type = other RNA
gagtggctgtgggcccaggga

SEQ ID NO: 5806 - RNA, 21 nt, synthetic construct
  source 1..21: mol_type = other RNA
gatcagcccagccagaaagcg

SEQ ID NO: 5807 - RNA, 21 nt, synthetic construct
  source 1..21: mol_type = other RNA
gatccacctccactaggatgc

SEQ ID NO: 5808 - RNA, 21 nt, synthetic construct
  source 1..21: mol_type = other RNA
gatcctgcaggccataggcat

SEQ ID NO: 5809 - RNA, 21 nt, synthetic construct
  source 1..21: mol_type = other RNA
gatctgctcttctccctgggc

SEQ ID NO: 5810 - RNA, 21 nt, synthetic construct
  source 1..21: mol_type = other RNA
gatctggtgcaggccaggctg

SEQ ID NO: 5811 - RNA, 21 nt, synthetic construct
  source 1..21: mol_type = other RNA
gatcttccagcctcccgcccg

SEQ ID NO: 5812 - RNA, 21 nt, synthetic construct
  source 1..21: mol_type = other RNA
gatgacagagcaccaagacag

SEQ ID NO: 5813 - RNA, 21 nt, synthetic construct
  source 1..21: mol_type = other RNA
gatgagcagaacgcggtcagg

SEQ ID NO: 5814 - RNA, 21 nt, synthetic construct
  source 1..21: mol_type = other RNA
gatgaggttttcagccacatc

SEQ ID NO: 5815 - RNA, 21 nt, synthetic construct
  source 1..21: mol_type = other RNA
gatgcacatgtactgggcaag

SEQ ID NO: 5816 - RNA, 21 nt, synthetic construct
  source 1..21: mol_type = other RNA
gatgccatccgggcctgcggg

SEQ ID NO: 5817 - RNA, 21 nt, synthetic construct
  source 1..21: mol_type = other RNA
gatgcctatggcctgcaggat

SEQ ID NO: 5818 - RNA, 21 nt, synthetic construct
  source 1..21: mol_type = other RNA
gatgcgctactttgagagctc

SEQ ID NO: 5819 - RNA, 21 nt, synthetic construct
  source 1..21: mol_type = other RNA
gatggcatcctagtggaggtg

SEQ ID NO: 5820 - RNA, 21 nt, synthetic construct
  source 1..21: mol_type = other RNA
gatggccaaaggcttagtcca

SEQ ID NO: 5821 - RNA, 21 nt, synthetic construct
  source 1..21: mol_type = other RNA
gatggcccgagtagggctccc

SEQ ID NO: 5822 - RNA, 21 nt, synthetic construct
  source 1..21: mol_type = other RNA
gatggcttcctgcacagcacg

SEQ ID NO: 5823 - RNA, 21 nt, synthetic construct
  source 1..21: mol_type = other RNA
gatgggaactggtcctcctgt

SEQ ID NO: 5824 - RNA, 21 nt, synthetic construct
  source 1..21: mol_type = other RNA
gatgtctcttccccaagcccc

SEQ ID NO: 5825 - RNA, 21 nt, synthetic construct
  source 1..21: mol_type = other RNA
gatgtctgcggcccagctccc

SEQ ID NO: 5826 - RNA, 21 nt, synthetic construct
  source 1..21: mol_type = other RNA
gatgtggctgaaaacctcatc

SEQ ID NO: 5827 - RNA, 21 nt, synthetic construct
  source 1..21: mol_type = other RNA
gattgctgtgctgggcaaagc

SEQ ID NO: 5828 - RNA, 21 nt, synthetic construct
  source 1..21: mol_type = other RNA
gattggggagcctcgtgggac

SEQ ID NO: 5829 - RNA, 21 nt, synthetic construct
  source 1..21: mol_type = other RNA
gatttcgccactcagagccag

SEQ ID NO: 5830 - RNA, 21 nt, synthetic construct
  source 1..21: mol_type = other RNA
gcaaagctggtcagggcaaga

SEQ ID NO: 5831 - RNA, 21 nt, synthetic construct
  source 1..21: mol_type = other RNA
gcaaaggccaggggcgtgtca

SEQ ID NO: 5832 - RNA, 21 nt, synthetic construct
  source 1..21: mol_type = other RNA
gcaaatgccagtgctgcggag

SEQ ID NO: 5833 - RNA, 21 nt, synthetic construct
  source 1..21: mol_type = other RNA
gcaacctcggagcagcttctt

SEQ ID NO: 5834 - RNA, 21 nt, synthetic construct
  source 1..21: mol_type = other RNA
gcaagagcctggagcgggaac

SEQ ID NO: 5835 - RNA, 21 nt, synthetic construct
  source 1..21: mol_type = other RNA
gcaagagctattgggctgggg

SEQ ID NO: 5836 - RNA, 21 nt, synthetic construct
  source 1..21: mol_type = other RNA
gcaagatggcttcctgcacag

SEQ ID NO: 5837 - RNA, 21 nt, synthetic construct
  source 1..21: mol_type = other RNA
gcaagcaccttctgcttcctg

SEQ ID NO: 5838 - RNA, 21 nt, synthetic construct
  source 1..21: mol_type = other RNA
gcaaggccgacgccctatttg

SEQ ID NO: 5839 - RNA, 21 nt, synthetic construct
  source 1..21: mol_type = other RNA
gcaaggccttggaggcggcgg

SEQ ID NO: 5840 - RNA, 21 nt, synthetic construct
  source 1..21: mol_type = other RNA
gcaatcactcgtgtctcacgc

SEQ ID NO: 5841 - RNA, 21 nt, synthetic construct
  source 1..21: mol_type = other RNA
gcaatgcttcctgggggccct

SEQ ID NO: 5842 - RNA, 21 nt, synthetic construct
  source 1..21: mol_type = other RNA
gcaatggcaggggacagagaa

SEQ ID NO: 5843 - RNA, 21 nt, synthetic construct
  source 1..21: mol_type = other RNA
gcacaaagtagggctgtggct

SEQ ID NO: 5844 - RNA, 21 nt, synthetic construct
  source 1..21: mol_type = other RNA
gcacactgcccggcacaaagt

SEQ ID NO: 5845 - RNA, 21 nt, synthetic construct
  source 1..21: mol_type = other RNA
gcacagcaatcactcgtgtct

SEQ ID NO: 5846 - RNA, 21 nt, synthetic construct
  source 1..21: mol_type = other RNA
gcacagcacgtgcggaccggc

SEQ ID NO: 5847 - RNA, 21 nt, synthetic construct
  source 1..21: mol_type = other RNA
gcacatgtactgggcaaggcc

SEQ ID NO: 5848 - RNA, 21 nt, synthetic construct
  source 1..21: mol_type = other RNA
gcaccaagacagagccctgac

SEQ ID NO: 5849 - RNA, 21 nt, synthetic construct
  source 1..21: mol_type = other RNA
gcaccagatccacctccacta

SEQ ID NO: 5850 - RNA, 21 nt, synthetic construct
  source 1..21: mol_type = other RNA
gcaccatacgtgtcctgcagt

SEQ ID NO: 5851 - RNA, 21 nt, synthetic construct
  source 1..21: mol_type = other RNA
gcacccgcctcacgcctcctg

SEQ ID NO: 5852 - RNA, 21 nt, synthetic construct
  source 1..21: mol_type = other RNA
gcaccctcctcctcacagccc

SEQ ID NO: 5853 - RNA, 21 nt, synthetic construct
  source 1..21: mol_type = other RNA
gcacctcagccaggcctcctt

SEQ ID NO: 5854 - RNA, 21 nt, synthetic construct
  source 1..21: mol_type = other RNA
gcaccttctgcttcctgtcca

SEQ ID NO: 5855 - RNA, 21 nt, synthetic construct
  source 1..21: mol_type = other RNA
gcacgccctccagccagttgt

SEQ ID NO: 5856 - RNA, 21 nt, synthetic construct
  source 1..21: mol_type = other RNA
gcacggcccagcaggccgaca

SEQ ID NO: 5857 - RNA, 21 nt, synthetic construct
  source 1..21: mol_type = other RNA
gcacgtgctgtgcaggaagcc

SEQ ID NO: 5858 - RNA, 21 nt, synthetic construct
  source 1..21: mol_type = other RNA
gcacgtggtacaggagctccc

SEQ ID NO: 5859 - RNA, 21 nt, synthetic construct
  source 1..21: mol_type = other RNA
gcactgcgcccacgaggccga

SEQ ID NO: 5860 - RNA, 21 nt, synthetic construct
  source 1..21: mol_type = other RNA
gcactggcatttgcccctctg

SEQ ID NO: 5861 - RNA, 21 nt, synthetic construct
  source 1..21: mol_type = other RNA
gcagaacgcggtcaggtctct

SEQ ID NO: 5862 - RNA, 21 nt, synthetic construct
  source 1..21: mol_type = other RNA
gcagaacggcagctggcccaa

SEQ ID NO: 5863 - RNA, 21 nt, synthetic construct
  source 1..21: mol_type = other RNA
gcagaaggtgcttgcgaggta

SEQ ID NO: 5864 - RNA, 21 nt, synthetic construct
  source 1..21: mol_type = other RNA
gcagacatcaaagtaccctac

SEQ ID NO: 5865 - RNA, 21 nt, synthetic construct
  source 1..21: mol_type = other RNA
gcagacgtgaggacctgggcg

SEQ ID NO: 5866 - RNA, 21 nt, synthetic construct
  source 1..21: mol_type = other RNA
gcagagccggtggagcagttc

SEQ ID NO: 5867 - RNA, 21 nt, synthetic construct
  source 1..21: mol_type = other RNA
gcagagctggccaagctggcc

SEQ ID NO: 5868 - RNA, 21 nt, synthetic construct
  source 1..21: mol_type = other RNA
gcagagtccgagctggccttc

SEQ ID NO: 5869 - RNA, 21 nt, synthetic construct
  source 1..21: mol_type = other RNA
gcagatcctgcaggccatagg

SEQ ID NO: 5870 - RNA, 21 nt, synthetic construct
  source 1..21: mol_type = other RNA
gcagcaagagcctggagcggg

SEQ ID NO: 5871 - RNA, 21 nt, synthetic construct
  source 1..21: mol_type = other RNA
gcagcacgtggtacaggagct

SEQ ID NO: 5872 - RNA, 21 nt, synthetic construct
  source 1..21: mol_type = other RNA
gcagcactggcatttgcccct

SEQ ID NO: 5873 - RNA, 21 nt, synthetic construct
  source 1..21: mol_type = other RNA
gcagcagcaagagcctggagc

SEQ ID NO: 5874 - RNA, 21 nt, synthetic construct
  source 1..21: mol_type = other RNA
gcagcagctccagcagctgcc

SEQ ID NO: 5875 - RNA, 21 nt, synthetic construct
  source 1..21: mol_type = other RNA
gcagccaacagcacctcagcc

SEQ ID NO: 5876 - RNA, 21 nt, synthetic construct
  source 1..21: mol_type = other RNA
gcagccgccgatggcccgagt

SEQ ID NO: 5877 - RNA, 21 nt, synthetic construct
  source 1..21: mol_type = other RNA
gcagccgcttcaggtacctcg

SEQ ID NO: 5878 - RNA, 21 nt, synthetic construct
  source 1..21: mol_type = other RNA
gcagcgggcgggaggctggaa

SEQ ID NO: 5879 - RNA, 21 nt, synthetic construct
  source 1..21: mol_type = other RNA
gcagctccagcagctgccgcg

SEQ ID NO: 5880 - RNA, 21 nt, synthetic construct
  source 1..21: mol_type = other RNA
gcagctgctggagctgctgca

SEQ ID NO: 5881 - RNA, 21 nt, synthetic construct
  source 1..21: mol_type = other RNA
gcagctggcccaaggaggcct

SEQ ID NO: 5882 - RNA, 21 nt, synthetic construct
  source 1..21: mol_type = other RNA
gcagcttcttctggaaaaggc

SEQ ID NO: 5883 - RNA, 21 nt, synthetic construct
  source 1..21: mol_type = other RNA
gcagcttggcgtcctccccaa

SEQ ID NO: 5884 - RNA, 21 nt, synthetic construct
  source 1..21: mol_type = other RNA
gcaggaagccatcttgcgctt

SEQ ID NO: 5885 - RNA, 21 nt, synthetic construct
  source 1..21: mol_type = other RNA
gcaggacacgtatggtgccga

SEQ ID NO: 5886 - RNA, 21 nt, synthetic construct
  source 1..21: mol_type = other RNA
gcaggaggaagctggggaagg

SEQ ID NO: 5887 - RNA, 21 nt, synthetic construct
  source 1..21: mol_type = other RNA
gcaggatctgctcttctccct

SEQ ID NO: 5888 - RNA, 21 nt, synthetic construct
  source 1..21: mol_type = other RNA
gcaggccaggctggagaggag

SEQ ID NO: 5889 - RNA, 21 nt, synthetic construct
  source 1..21: mol_type = other RNA
gcaggccataggcatcccccg

SEQ ID NO: 5890 - RNA, 21 nt, synthetic construct
  source 1..21: mol_type = other RNA
gcaggcccaggcatacgtgat

SEQ ID NO: 5891 - RNA, 21 nt, synthetic construct
  source 1..21: mol_type = other RNA
gcaggcccggatggcatccta

SEQ ID NO: 5892 - RNA, 21 nt, synthetic construct
  source 1..21: mol_type = other RNA
gcaggccgacatagagtcccg

SEQ ID NO: 5893 - RNA, 21 nt, synthetic construct
  source 1..21: mol_type = other RNA
gcagggcctctgagagctggc

SEQ ID NO: 5894 - RNA, 21 nt, synthetic construct
  source 1..21: mol_type = other RNA
gcaggggacagagaagacaaa

SEQ ID NO: 5895 - RNA, 21 nt, synthetic construct
  source 1..21: mol_type = other RNA
gcagtacctagcattgacccc

SEQ ID NO: 5896 - RNA, 21 nt, synthetic construct
  source 1..21: mol_type = other RNA
gcagtgagccgggcctgggct

SEQ ID NO: 5897 - RNA, 21 nt, synthetic construct
  source 1..21: mol_type = other RNA
gcagtgagcggtagaactgct

SEQ ID NO: 5898 - RNA, 21 nt, synthetic construct
  source 1..21: mol_type = other RNA
gcagtgcagcagctccagcag

SEQ ID NO: 5899 - RNA, 21 nt, synthetic construct
  source 1..21: mol_type = other RNA
gcagtgtccccggctgcagcc

SEQ ID NO: 5900 - RNA, 21 nt, synthetic construct
  source 1..21: mol_type = other RNA
gcagtgtgccagctctcagag

SEQ ID NO: 5901 - RNA, 21 nt, synthetic construct
  source 1..21: mol_type = other RNA
gcagttctaccgctcactgca

SEQ ID NO: 5902 - RNA, 21 nt, synthetic construct
  source 1..21: mol_type = other RNA
gcatacgtgatgcgctacttt

SEQ ID NO: 5903 - RNA, 21 nt, synthetic construct
  source 1..21: mol_type = other RNA
gcatcacgtatgcctgggcct

SEQ ID NO: 5904 - RNA, 21 nt, synthetic construct
  source 1..21: mol_type = other RNA
gcatcaggaggcgtgaggcgg

SEQ ID NO: 5905 - RNA, 21 nt, synthetic construct
  source 1..21: mol_type = other RNA
gcatcccccggacggttcaag

SEQ ID NO: 5906 - RNA, 21 nt, synthetic construct
  source 1..21: mol_type = other RNA
gcatcctagtggaggtggatc

SEQ ID NO: 5907 - RNA, 21 nt, synthetic construct
  source 1..21: mol_type = other RNA
gcattgaccccaaggaagaag

SEQ ID NO: 5908 - RNA, 21 nt, synthetic construct
  source 1..21: mol_type = other RNA
gcattgcaggaggaagctggg

SEQ ID NO: 5909 - RNA, 21 nt, synthetic construct
  source 1..21: mol_type = other RNA
gcatttgcccctctggattgg

SEQ ID NO: 5910 - RNA, 21 nt, synthetic construct
  source 1..21: mol_type = other RNA
gccaaaggcttagtccaacac

SEQ ID NO: 5911 - RNA, 21 nt, synthetic construct
  source 1..21: mol_type = other RNA
gccaaattccagcctcctcgg

SEQ ID NO: 5912 - RNA, 21 nt, synthetic construct
  source 1..21: mol_type = other RNA
gccaacagcacctcagccagg

SEQ ID NO: 5913 - RNA, 21 nt, synthetic construct
  source 1..21: mol_type = other RNA
gccaagacttctccctggacc

SEQ ID NO: 5914 - RNA, 21 nt, synthetic construct
  source 1..21: mol_type = other RNA
gccaagctgccctccacgctc

SEQ ID NO: 5915 - RNA, 21 nt, synthetic construct
  source 1..21: mol_type = other RNA
gccaagctggcctgggagctg

SEQ ID NO: 5916 - RNA, 21 nt, synthetic construct
  source 1..21: mol_type = other RNA
gccacaagcccaggcccggct

SEQ ID NO: 5917 - RNA, 21 nt, synthetic construct
  source 1..21: mol_type = other RNA
gccacagccctactttgtgcc

SEQ ID NO: 5918 - RNA, 21 nt, synthetic construct
  source 1..21: mol_type = other RNA
gccacagggcccccaggaagc

SEQ ID NO: 5919 - RNA, 21 nt, synthetic construct
  source 1..21: mol_type = other RNA
gccacatcttgaagagacctg

SEQ ID NO: 5920 - RNA, 21 nt, synthetic construct
  source 1..21: mol_type = other RNA
gccaccccggactgggcagaa

SEQ ID NO: 5921 - RNA, 21 nt, synthetic construct
  source 1..21: mol_type = other RNA
gccacgagtggctgtgggccc

SEQ ID NO: 5922 - RNA, 21 nt, synthetic construct
  source 1..21: mol_type = other RNA
gccacgctttctggctgggct

SEQ ID NO: 5923 - RNA, 21 nt, synthetic construct
  source 1..21: mol_type = other RNA
gccactcagagccagccacag

SEQ ID NO: 5924 - RNA, 21 nt, synthetic construct
  source 1..21: mol_type = other RNA
gccactcgtggcggccgatga

SEQ ID NO: 5925 - RNA, 21 nt, synthetic construct
  source 1..21: mol_type = other RNA
gccacttcttctcagtcacag

SEQ ID NO: 5926 - RNA, 21 nt, synthetic construct
  source 1..21: mol_type = other RNA
gccagaaagcgtggcacgccc

SEQ ID NO: 5927 - RNA, 21 nt, synthetic construct
  source 1..21: mol_type = other RNA
gccagctcggactctgcggcc

SEQ ID NO: 5928 - RNA, 21 nt, synthetic construct
  source 1..21: mol_type = other RNA
gccagctctcagaggccctgc

SEQ ID NO: 5929 - RNA, 21 nt, synthetic construct
  source 1..21: mol_type = other RNA
gccagctgccgttctgcccag

SEQ ID NO: 5930 - RNA, 21 nt, synthetic construct
  source 1..21: mol_type = other RNA
gccagcttggccagctctgcc

SEQ ID NO: 5931 - RNA, 21 nt, synthetic construct
  source 1..21: mol_type = other RNA
gccaggcctccttgggccagc

SEQ ID NO: 5932 - RNA, 21 nt, synthetic construct
  source 1..21: mol_type = other RNA
gccaggctggagaggagcagc

SEQ ID NO: 5933 - RNA, 21 nt, synthetic construct
  source 1..21: mol_type = other RNA
gccaggggcgtgtcagggtgg

SEQ ID NO: 5934 - RNA, 21 nt, synthetic construct
  source 1..21: mol_type = other RNA
gccagtgctgcggaggtccag

SEQ ID NO: 5935 - RNA, 21 nt, synthetic construct
  source 1..21: mol_type = other RNA
gccagttcccgctccaggctc

SEQ ID NO: 5936 - RNA, 21 nt, synthetic construct
  source 1..21: mol_type = other RNA
gccagttgtcatagggcctct

SEQ ID NO: 5937 - RNA, 21 nt, synthetic construct
  source 1..21: mol_type = other RNA
gccataggcatcccccggacg

SEQ ID NO: 5938 - RNA, 21 nt, synthetic construct
  source 1..21: mol_type = other RNA
gccatcgcccaggtcctcacg

SEQ ID NO: 5939 - RNA, 21 nt, synthetic construct
  source 1..21: mol_type = other RNA
gccatcggcggctgcctcggt

SEQ ID NO: 5940 - RNA, 21 nt, synthetic construct
  source 1..21: mol_type = other RNA
gccatcttgcgcttccagctc

SEQ ID NO: 5941 - RNA, 21 nt, synthetic construct
  source 1..21: mol_type = other RNA
gccattgcttgaaccgtccgg

SEQ ID NO: 5942 - RNA, 21 nt, synthetic construct
  source 1..21: mol_type = other RNA
gcccaacacaaggatgtctct

SEQ ID NO: 5943 - RNA, 21 nt, synthetic construct
  source 1..21: mol_type = other RNA
gcccaaggaggcctggctgag

SEQ ID NO: 5944 - RNA, 21 nt, synthetic construct
  source 1..21: mol_type = other RNA
gcccaatagctcttgccctga

SEQ ID NO: 5945 - RNA, 21 nt, synthetic construct
  source 1..21: mol_type = other RNA
gcccacagccactcgtggcgg

SEQ ID NO: 5946 - RNA, 21 nt, synthetic construct
  source 1..21: mol_type = other RNA
gcccacgaggccgaggaggct

SEQ ID NO: 5947 - RNA, 21 nt, synthetic construct
  source 1..21: mol_type = other RNA
gcccagaaaagagaggcggcc

SEQ ID NO: 5948 - RNA, 21 nt, synthetic construct
  source 1..21: mol_type = other RNA
gcccagcacagcaatcactcg

SEQ ID NO: 5949 - RNA, 21 nt, synthetic construct
  source 1..21: mol_type = other RNA
gcccagcaggccgacatagag

SEQ ID NO: 5950 - RNA, 21 nt, synthetic construct
  source 1..21: mol_type = other RNA
gcccagccagaaagcgtggca

SEQ ID NO: 5951 - RNA, 21 nt, synthetic construct
  source 1..21: mol_type = other RNA
gcccagctcccaggccagctt

SEQ ID NO: 5952 - RNA, 21 nt, synthetic construct
  source 1..21: mol_type = other RNA
gcccaggcatacgtgatgcgc

SEQ ID NO: 5953 - RNA, 21 nt, synthetic construct
  source 1..21: mol_type = other RNA
gcccagggagaagagcagatc

SEQ ID NO: 5954 - RNA, 21 nt, synthetic construct
  source 1..21: mol_type = other RNA
gcccaggtcctcacgtctgcg

SEQ ID NO: 5955 - RNA, 21 nt, synthetic construct
  source 1..21: mol_type = other RNA
gcccagtacatgtgcatcagg

SEQ ID NO: 5956 - RNA, 21 nt, synthetic construct
  source 1..21: mol_type = other RNA
gcccagtccggggtggccagt

SEQ ID NO: 5957 - RNA, 21 nt, synthetic construct
  source 1..21: mol_type = other RNA
gccccagcccaatagctcttg

SEQ ID NO: 5958 - RNA, 21 nt, synthetic construct
  source 1..21: mol_type = other RNA
gcccccaggaagcattgcagg

SEQ ID NO: 5959 - RNA, 21 nt, synthetic construct
  source 1..21: mol_type = other RNA
gcccctcaccccacctgaaac

SEQ ID NO: 5960 - RNA, 21 nt, synthetic construct
  source 1..21: mol_type = other RNA
gcccctctggattggggagcc

SEQ ID NO: 5961 - RNA, 21 nt, synthetic construct
  source 1..21: mol_type = other RNA
gcccctggcctttgcagagcc

SEQ ID NO: 5962 - RNA, 21 nt, synthetic construct
  source 1..21: mol_type = other RNA
gcccgagtagggctcccaggc

SEQ ID NO: 5963 - RNA, 21 nt, synthetic construct
  source 1..21: mol_type = other RNA
gcccgcaggcccggatggcat

SEQ ID NO: 5964 - RNA, 21 nt, synthetic construct
  source 1..21: mol_type = other RNA
gcccgccgcctccaaggcctt

SEQ ID NO: 5965 - RNA, 21 nt, synthetic construct
  source 1..21: mol_type = other RNA
gcccgcggtgggtgttggact

SEQ ID NO: 5966 - RNA, 21 nt, synthetic construct
  source 1..21: mol_type = other RNA
gcccgctgcctgggagcccta

SEQ ID NO: 5967 - RNA, 21 nt, synthetic construct
  source 1..21: mol_type = other RNA
gcccggatggcatcctagtgg

SEQ ID NO: 5968 - RNA, 21 nt, synthetic construct
  source 1..21: mol_type = other RNA
gcccggcacaaagtagggctg

SEQ ID NO: 5969 - RNA, 21 nt, synthetic construct
  source 1..21: mol_type = other RNA
gccctactcgggccatcggcg

SEQ ID NO: 5970 - RNA, 21 nt, synthetic construct
  source 1..21: mol_type = other RNA
gccctactttgtgccgggcag

SEQ ID NO: 5971 - RNA, 21 nt, synthetic construct
  source 1..21: mol_type = other RNA
gccctatgacaactggctgga

SEQ ID NO: 5972 - RNA, 21 nt, synthetic construct
  source 1..21: mol_type = other RNA
gccctatttgagctgtccggc

SEQ ID NO: 5973 - RNA, 21 nt, synthetic construct
  source 1..21: mol_type = other RNA
gccctccacgctcacgggact

SEQ ID NO: 5974 - RNA, 21 nt, synthetic construct
  source 1..21: mol_type = other RNA
gccctccagccagttgtcata

SEQ ID NO: 5975 - RNA, 21 nt, synthetic construct
  source 1..21: mol_type = other RNA
gccctgaccagctttgcccag

SEQ ID NO: 5976 - RNA, 21 nt, synthetic construct
  source 1..21: mol_type = other RNA
gccctgacgctcctccgggac

SEQ ID NO: 5977 - RNA, 21 nt, synthetic construct
  source 1..21: mol_type = other RNA
gccctgctggagcttggggag

SEQ ID NO: 5978 - RNA, 21 nt, synthetic construct
  source 1..21: mol_type = other RNA
gccctggcagagctggccaag

SEQ ID NO: 5979 - RNA, 21 nt, synthetic construct
  source 1..21: mol_type = other RNA
gccctgtggctggctctgagt

SEQ ID NO: 5980 - RNA, 21 nt, synthetic construct
  source 1..21: mol_type = other RNA
gccgacatagagtcccgtgag

SEQ ID NO: 5981 - RNA, 21 nt, synthetic construct
  source 1..21: mol_type = other RNA
gccgacgccctatttgagctg

SEQ ID NO: 5982 - RNA, 21 nt, synthetic construct
  source 1..21: mol_type = other RNA
gccgaggaggctggaatttgg

SEQ ID NO: 5983 - RNA, 21 nt, synthetic construct
  source 1..21: mol_type = other RNA
gccgatgaggttttcagccac

SEQ ID NO: 5984 - RNA, 21 nt, synthetic construct
  source 1..21: mol_type = other RNA
gccgatggcccgagtagggct

SEQ ID NO: 5985 - RNA, 21 nt, synthetic construct
  source 1..21: mol_type = other RNA
gccgcagacatcaaagtaccc

SEQ ID NO: 5986 - RNA, 21 nt, synthetic construct
  source 1..21: mol_type = other RNA
gccgcagagtccgagctggcc

SEQ ID NO: 5987 - RNA, 21 nt, synthetic construct
  source 1..21: mol_type = other RNA
gccgccacgagtggctgtggg

SEQ ID NO: 5988 - RNA, 21 nt, synthetic construct
  source 1..21: mol_type = other RNA
gccgccgatggcccgagtagg

SEQ ID NO: 5989 - RNA, 21 nt, synthetic construct
  source 1..21: mol_type = other RNA
gccgccggtgctccttggcag

SEQ ID NO: 5990 - RNA, 21 nt, synthetic construct
  source 1..21: mol_type = other RNA
gccgcctccaaggccttgccc

SEQ ID NO: 5991 - RNA, 21 nt, synthetic construct
  source 1..21: mol_type = other RNA
gccgcctctcttttctgggca

SEQ ID NO: 5992 - RNA, 21 nt, synthetic construct
  source 1..21: mol_type = other RNA
gccgcctggtccagagcctga

SEQ ID NO: 5993 - RNA, 21 nt, synthetic construct
  source 1..21: mol_type = other RNA
gccgcgtgagacacgagtgat

SEQ ID NO: 5994 - RNA, 21 nt, synthetic construct
  source 1..21: mol_type = other RNA
gccgcttcaggtacctcgcaa

SEQ ID NO: 5995 - RNA, 21 nt, synthetic construct
  source 1..21: mol_type = other RNA
gccggacagctcaaatagggc

SEQ ID NO: 5996 - RNA, 21 nt, synthetic construct
  source 1..21: mol_type = other RNA
gccggccttttccagaagaag

SEQ ID NO: 5997 - RNA, 21 nt, synthetic construct
  source 1..21: mol_type = other RNA
gccggcttccccagtacgact

SEQ ID NO: 5998 - RNA, 21 nt, synthetic construct
  source 1..21: mol_type = other RNA
gccgggcagtgtgccagctct

SEQ ID NO: 5999 - RNA, 21 nt, synthetic construct
  source 1..21: mol_type = other RNA
gccgggctgtgaggaggaggg

SEQ ID NO: 6000 - RNA, 21 nt, synthetic construct
  source 1..21: mol_type = other RNA
gccggggagctcctgtaccac

SEQ ID NO: 6001 - RNA, 21 nt, synthetic construct
  source 1..21: mol_type = other RNA
gccggtcccggaggagcgtca

SEQ ID NO: 6002 - RNA, 21 nt, synthetic construct
  source 1..21: mol_type = other RNA
gccggtccgcacgtgctgtgc

SEQ ID NO: 6003 - RNA, 21 nt, synthetic construct
  source 1..21: mol_type = other RNA
gccggtgctccttggcagcca

SEQ ID NO: 6004 - RNA, 21 nt, synthetic construct
  source 1..21: mol_type = other RNA
gccggtggagcagttctaccg

SEQ ID NO: 6005 - RNA, 21 nt, synthetic construct
  source 1..21: mol_type = other RNA
gccgtctaggatgagcagaac

SEQ ID NO: 6006 - RNA, 21 nt, synthetic construct
  source 1..21: mol_type = other RNA
gccgtgcagccctcgacagcc

SEQ ID NO: 6007 - RNA, 21 nt, synthetic construct
  source 1..21: mol_type = other RNA
gccgttctgcccagtccgggg

SEQ ID NO: 6008 - RNA, 21 nt, synthetic construct
  source 1..21: mol_type = other RNA
gcctatggcctgcaggatctg

SEQ ID NO: 6009 - RNA, 21 nt, synthetic construct
  source 1..21: mol_type = other RNA
gcctcacgcctcctgatgcac

SEQ ID NO: 6010 - RNA, 21 nt, synthetic construct
  source 1..21: mol_type = other RNA
gcctccaaggccttgcccagt

SEQ ID NO: 6011 - RNA, 21 nt, synthetic construct
  source 1..21: mol_type = other RNA
gcctcctgatgcacatgtact

SEQ ID NO: 6012 - RNA, 21 nt, synthetic construct
  source 1..21: mol_type = other RNA
gcctccttgggccagctgccg

SEQ ID NO: 6013 - RNA, 21 nt, synthetic construct
  source 1..21: mol_type = other RNA
gcctcggtggacaggaagcag

SEQ ID NO: 6014 - RNA, 21 nt, synthetic construct
  source 1..21: mol_type = other RNA
gcctcgtgggactcagctgtg

SEQ ID NO: 6015 - RNA, 21 nt, synthetic construct
  source 1..21: mol_type = other RNA
gcctcgtgggcgcagtgcagc

SEQ ID NO: 6016 - RNA, 21 nt, synthetic construct
  source 1..21: mol_type = other RNA
gcctctcacatacccccaccc

SEQ ID NO: 6017 - RNA, 21 nt, synthetic construct
  source 1..21: mol_type = other RNA
gcctctcttttctgggcaccc

SEQ ID NO: 6018 - RNA, 21 nt, synthetic construct
  source 1..21: mol_type = other RNA
gcctctgagagctggcacact

SEQ ID NO: 6019 - RNA, 21 nt, synthetic construct
  source 1..21: mol_type = other RNA
gcctcttcttccttggggtca

SEQ ID NO: 6020 - RNA, 21 nt, synthetic construct
  source 1..21: mol_type = other RNA
gcctgagcaaggccgacgccc

SEQ ID NO: 6021 - RNA, 21 nt, synthetic construct
  source 1..21: mol_type = other RNA
gcctgcaccagatccacctcc

SEQ ID NO: 6022 - RNA, 21 nt, synthetic construct
  source 1..21: mol_type = other RNA
gcctgcaggatctgctcttct

SEQ ID NO: 6023 - RNA, 21 nt, synthetic construct
  source 1..21: mol_type = other RNA
gcctgcgggctcggcaccata

SEQ ID NO: 6024 - RNA, 21 nt, synthetic construct
  source 1..21: mol_type = other RNA
gcctgctccatggagaagccg

SEQ ID NO: 6025 - RNA, 21 nt, synthetic construct
  source 1..21: mol_type = other RNA
gcctggagcgggaactggcca

SEQ ID NO: 6026 - RNA, 21 nt, synthetic construct
  source 1..21: mol_type = other RNA
gcctggcctgcaccagatcca

SEQ ID NO: 6027 - RNA, 21 nt, synthetic construct
  source 1..21: mol_type = other RNA
gcctggctgaggtgctgttgg

SEQ ID NO: 6028 - RNA, 21 nt, synthetic construct
  source 1..21: mol_type = other RNA
gcctgggagccctactcgggc

SEQ ID NO: 6029 - RNA, 21 nt, synthetic construct
  source 1..21: mol_type = other RNA
gcctgggagctgggccgcaga

SEQ ID NO: 6030 - RNA, 21 nt, synthetic construct
  source 1..21: mol_type = other RNA
gcctgggcctgctccatggag

SEQ ID NO: 6031 - RNA, 21 nt, synthetic construct
  source 1..21: mol_type = other RNA
gcctgggcttgtggccggctt

SEQ ID NO: 6032 - RNA, 21 nt, synthetic construct
  source 1..21: mol_type = other RNA
gcctggtccagagcctgagca

SEQ ID NO: 6033 - RNA, 21 nt, synthetic construct
  source 1..21: mol_type = other RNA
gccttccccagcttcctcctg

SEQ ID NO: 6034 - RNA, 21 nt, synthetic construct
  source 1..21: mol_type = other RNA
gccttgcccagtacatgtgca

SEQ ID NO: 6035 - RNA, 21 nt, synthetic construct
  source 1..21: mol_type = other RNA
gccttgctcaggctctggacc

SEQ ID NO: 6036 - RNA, 21 nt, synthetic construct
  source 1..21: mol_type = other RNA
gccttggaggcggcgggccaa

SEQ ID NO: 6037 - RNA, 21 nt, synthetic construct
  source 1..21: mol_type = other RNA
gcctttgcagagccggtggag

SEQ ID NO: 6038 - RNA, 21 nt, synthetic construct
  source 1..21: mol_type = other RNA
gcctttggccatcgcccaggt

SEQ ID NO: 6039 - RNA, 21 nt, synthetic construct
  source 1..21: mol_type = other RNA
gccttttccagaagaagctgc

SEQ ID NO: 6040 - RNA, 21 nt, synthetic construct
  source 1..21: mol_type = other RNA
gcgaaatcaaggacaaggagc

SEQ ID NO: 6041 - RNA, 21 nt, synthetic construct
  source 1..21: mol_type = other RNA
gcgaggtacctgaagcggctg

SEQ ID NO: 6042 - RNA, 21 nt, synthetic construct
  source 1..21: mol_type = other RNA
gcgatggccaaaggcttagtc

SEQ ID NO: 6043 - RNA, 21 nt, synthetic construct
  source 1..21: mol_type = other RNA
gcgcaagatggcttcctgcac

SEQ ID NO: 6044 - RNA, 21 nt, synthetic construct
  source 1..21: mol_type = other RNA
gcgcagtgcagcagctccagc

SEQ ID NO: 6045 - RNA, 21 nt, synthetic construct
  source 1..21: mol_type = other RNA
gcgcatcacgtatgcctgggc

SEQ ID NO: 6046 - RNA, 21 nt, synthetic construct
  source 1..21: mol_type = other RNA
gcgcggcagctgctggagctg

SEQ ID NO: 6047 - RNA, 21 nt, synthetic construct
  source 1..21: mol_type = other RNA
gcgctactttgagagctcagg

SEQ ID NO: 6048 - RNA, 21 nt, synthetic construct
  source 1..21: mol_type = other RNA
gcgcttccagctcctcgaagc

SEQ ID NO: 6049 - RNA, 21 nt, synthetic construct
  source 1..21: mol_type = other RNA
gcggaggtccagggagaagtc

SEQ ID NO: 6050 - RNA, 21 nt, synthetic construct
  source 1..21: mol_type = other RNA
gcggatgggaactggtcctcc

SEQ ID NO: 6051 - RNA, 21 nt, synthetic construct
  source 1..21: mol_type = other RNA
gcggcagctgctggagctgct

SEQ ID NO: 6052 - RNA, 21 nt, synthetic construct
  source 1..21: mol_type = other RNA
gcggccgatgaggttttcagc

SEQ ID NO: 6053 - RNA, 21 nt, synthetic construct
  source 1..21: mol_type = other RNA
gcggccgcgtgagacacgagt

SEQ ID NO: 6054 - RNA, 21 nt, synthetic construct
  source 1..21: mol_type = other RNA
gcggccggggagctcctgtac

SEQ ID NO: 6055 - RNA, 21 nt, synthetic construct
  source 1..21: mol_type = other RNA
gcggcgggccaagacttctcc

SEQ ID NO: 6056 - RNA, 21 nt, synthetic construct
  source 1..21: mol_type = other RNA
gcggctgcagccggggacact

SEQ ID NO: 6057 - RNA, 21 nt, synthetic construct
  source 1..21: mol_type = other RNA
gcggctgcctcggtggacagg

SEQ ID NO: 6058 - RNA, 21 nt, synthetic construct
  source 1..21: mol_type = other RNA
gcgggaactggccaccccgga

SEQ ID NO: 6059 - RNA, 21 nt, synthetic construct
  source 1..21: mol_type = other RNA
gcgggagctccttgtccttga

SEQ ID NO: 6060 - RNA, 21 nt, synthetic construct
  source 1..21: mol_type = other RNA
gcgggaggctggaagatcagc

SEQ ID NO: 6061 - RNA, 21 nt, synthetic construct
  source 1..21: mol_type = other RNA
gcgggccaagacttctccctg

SEQ ID NO: 6062 - RNA, 21 nt, synthetic construct
  source 1..21: mol_type = other RNA
gcgggccgcagagtccgagct

SEQ ID NO: 6063 - RNA, 21 nt, synthetic construct
  source 1..21: mol_type = other RNA
gcgggcgggaggctggaagat

SEQ ID NO: 6064 - RNA, 21 nt, synthetic construct
  source 1..21: mol_type = other RNA
gcgggctcggcaccatacgtg

SEQ ID NO: 6065 - RNA, 21 nt, synthetic construct
  source 1..21: mol_type = other RNA
gcgggtgcccagaaaagagag

SEQ ID NO: 6066 - RNA, 21 nt, synthetic construct
  source 1..21: mol_type = other RNA
gcggtagaactgctccaccgg

SEQ ID NO: 6067 - RNA, 21 nt, synthetic construct
  source 1..21: mol_type = other RNA
gcggtcaggtctcttcaagat

SEQ ID NO: 6068 - RNA, 21 nt, synthetic construct
  source 1..21: mol_type = other RNA
gcggtgggtgttggactaagc

SEQ ID NO: 6069 - RNA, 21 nt, synthetic construct
  source 1..21: mol_type = other RNA
gcgtcagggctctgtcttggt

SEQ ID NO: 6070 - RNA, 21 nt, synthetic construct
  source 1..21: mol_type = other RNA
gcgtcctccccaagctccagc

SEQ ID NO: 6071 - RNA, 21 nt, synthetic construct
  source 1..21: mol_type = other RNA
gcgtcggccttgctcaggctc

SEQ ID NO: 6072 - RNA, 21 nt, synthetic construct
  source 1..21: mol_type = other RNA
gcgtgagacacgagtgattgc

SEQ ID NO: 6073 - RNA, 21 nt, synthetic construct
  source 1..21: mol_type = other RNA
gcgtgaggcgggtgcccagaa

SEQ ID NO: 6074 - RNA, 21 nt, synthetic construct
  source 1..21: mol_type = other RNA
gcgtgccacgctttctggctg

SEQ ID NO: 6075 - RNA, 21 nt, synthetic construct
  source 1..21: mol_type = other RNA
gcgtggagggcagcttggcgt

SEQ ID NO: 6076 - RNA, 21 nt, synthetic construct
  source 1..21: mol_type = other RNA
gcgtggcacgccctccagcca

SEQ ID NO: 6077 - RNA, 21 nt, synthetic construct
  source 1..21: mol_type = other RNA
gcgtgtcagggtgggggtatg

SEQ ID NO: 6078 - RNA, 21 nt, synthetic construct
  source 1..21: mol_type = other RNA
gcgttctgctcatcctagacg

SEQ ID NO: 6079 - RNA, 21 nt, synthetic construct
  source 1..21: mol_type = other RNA
gctactttgagagctcaggga

SEQ ID NO: 6080 - RNA, 21 nt, synthetic construct
  source 1..21: mol_type = other RNA
gctaggtactgcgggagctcc

SEQ ID NO: 6081 - RNA, 21 nt, synthetic construct
  source 1..21: mol_type = other RNA
gctattgggctggggcagtga

SEQ ID NO: 6082 - RNA, 21 nt, synthetic construct
  source 1..21: mol_type = other RNA
gctcaaatagggcgtcggcct

SEQ ID NO: 6083 - RNA, 21 nt, synthetic construct
  source 1..21: mol_type = other RNA
gctcacgggactctatgtcgg

SEQ ID NO: 6084 - RNA, 21 nt, synthetic construct
  source 1..21: mol_type = other RNA
gctcactgcaggacacgtatg

SEQ ID NO: 6085 - RNA, 21 nt, synthetic construct
  source 1..21: mol_type = other RNA
gctcactgccccagcccaata

SEQ ID NO: 6086 - RNA, 21 nt, synthetic construct
  source 1..21: mol_type = other RNA
gctcaggctctggaccaggcg

SEQ ID NO: 6087 - RNA, 21 nt, synthetic construct
  source 1..21: mol_type = other RNA
gctcagggatgacagagcacc

SEQ ID NO: 6088 - RNA, 21 nt, synthetic construct
  source 1..21: mol_type = other RNA
gctcatcctagacggcttcga

SEQ ID NO: 6089 - RNA, 21 nt, synthetic construct
  source 1..21: mol_type = other RNA
gctccaccggctctgcaaagg

SEQ ID NO: 6090 - RNA, 21 nt, synthetic construct
  source 1..21: mol_type = other RNA
gctccagcagggcctctgaga

SEQ ID NO: 6091 - RNA, 21 nt, synthetic construct
  source 1..21: mol_type = other RNA
gctccaggctcttgctgctgc

SEQ ID NO: 6092 - RNA, 21 nt, synthetic construct
  source 1..21: mol_type = other RNA
gctccatggagaagccggaca

SEQ ID NO: 6093 - RNA, 21 nt, synthetic construct
  source 1..21: mol_type = other RNA
gctcccaggccagcttggcca

SEQ ID NO: 6094 - RNA, 21 nt, synthetic construct
  source 1..21: mol_type = other RNA
gctccccaatccagaggggca

SEQ ID NO: 6095 - RNA, 21 nt, synthetic construct
  source 1..21: mol_type = other RNA
gctccccggccgcctctcttt

SEQ ID NO: 6096 - RNA, 21 nt, synthetic construct
  source 1..21: mol_type = other RNA
gctcccgcagtacctagcatt

SEQ ID NO: 6097 - RNA, 21 nt, synthetic construct
  source 1..21: mol_type = other RNA
gctccgaggttgcaccctcct

SEQ ID NO: 6098 - RNA, 21 nt, synthetic construct
  source 1..21: mol_type = other RNA
gctcctccgggaccggccact

SEQ ID NO: 6099 - RNA, 21 nt, synthetic construct
  source 1..21: mol_type = other RNA
gctcctcgaagccgtctagga

SEQ ID NO: 6100 - RNA, 21 nt, synthetic construct
  source 1..21: mol_type = other RNA
gctcctctccagcctggcctg

SEQ ID NO: 6101 - RNA, 21 nt, synthetic construct
  source 1..21: mol_type = other RNA
gctcctgtaccacgtgctgcc

SEQ ID NO: 6102 - RNA, 21 nt, synthetic construct
  source 1..21: mol_type = other RNA
gctccttggcagccaacagca

SEQ ID NO: 6103 - RNA, 21 nt, synthetic construct
  source 1..21: mol_type = other RNA
gctccttgtccttgatttcgc

SEQ ID NO: 6104 - RNA, 21 nt, synthetic construct
  source 1..21: mol_type = other RNA
gctcggcaccatacgtgtcct

SEQ ID NO: 6105 - RNA, 21 nt, synthetic construct
  source 1..21: mol_type = other RNA
gctctcaaagtagcgcatcac

SEQ ID NO: 6106 - RNA, 21 nt, synthetic construct
  source 1..21: mol_type = other RNA
gctctcagaggccctgctgga

SEQ ID NO: 6107 - RNA, 21 nt, synthetic construct
  source 1..21: mol_type = other RNA
gctctgagtggcgaaatcaag

SEQ ID NO: 6108 - RNA, 21 nt, synthetic construct
  source 1..21: mol_type = other RNA
gctctgcaaaggccaggggcg

SEQ ID NO: 6109 - RNA, 21 nt, synthetic construct
  source 1..21: mol_type = other RNA
gctctgtcatccctgagctct

SEQ ID NO: 6110 - RNA, 21 nt, synthetic construct
  source 1..21: mol_type = other RNA
gctctgtcttggtgctctgtc

SEQ ID NO: 6111 - RNA, 21 nt, synthetic construct
  source 1..21: mol_type = other RNA
gctcttctccctgggcccaca

SEQ ID NO: 6112 - RNA, 21 nt, synthetic construct
  source 1..21: mol_type = other RNA
gctcttgccctgaccagcttt

SEQ ID NO: 6113 - RNA, 21 nt, synthetic construct
  source 1..21: mol_type = other RNA
gctcttgctgctgctcctctc

SEQ ID NO: 6114 - RNA, 21 nt, synthetic construct
  source 1..21: mol_type = other RNA
gctgaaaacctcatcggccgc

SEQ ID NO: 6115 - RNA, 21 nt, synthetic construct
  source 1..21: mol_type = other RNA
gctgaggtgctgttggctgcc

SEQ ID NO: 6116 - RNA, 21 nt, synthetic construct
  source 1..21: mol_type = other RNA
gctgagtcccacgaggctccc

SEQ ID NO: 6117 - RNA, 21 nt, synthetic construct
  source 1..21: mol_type = other RNA
gctgatcttccagcctcccgc

SEQ ID NO: 6118 - RNA, 21 nt, synthetic construct
  source 1..21: mol_type = other RNA
gctgcactgcgcccacgaggc

SEQ ID NO: 6119 - RNA, 21 nt, synthetic construct
  source 1..21: mol_type = other RNA
gctgcagccgcttcaggtacc

SEQ ID NO: 6120 - RNA, 21 nt, synthetic construct
  source 1..21: mol_type = other RNA
gctgcagccggggacactgcg

SEQ ID NO: 6121 - RNA, 21 nt, synthetic construct
  source 1..21: mol_type = other RNA
gctgccaaattccagcctcct

SEQ ID NO: 6122 - RNA, 21 nt, synthetic construct
  source 1..21: mol_type = other RNA
gctgccaaggagcaccggcgg

SEQ ID NO: 6123 - RNA, 21 nt, synthetic construct
  source 1..21: mol_type = other RNA
gctgccctccacgctcacggg

SEQ ID NO: 6124 - RNA, 21 nt, synthetic construct
  source 1..21: mol_type = other RNA
gctgccgttctgcccagtccg

SEQ ID NO: 6125 - RNA, 21 nt, synthetic construct
  source 1..21: mol_type = other RNA
gctgcctcggtggacaggaag

SEQ ID NO: 6126 - RNA, 21 nt, synthetic construct
  source 1..21: mol_type = other RNA
gctgcctgggagccctactcg

SEQ ID NO: 6127 - RNA, 21 nt, synthetic construct
  source 1..21: mol_type = other RNA
gctgcggaggtccagggagaa

SEQ ID NO: 6128 - RNA, 21 nt, synthetic construct
  source 1..21: mol_type = other RNA
gctgctccgaggttgcaccct

SEQ ID NO: 6129 - RNA, 21 nt, synthetic construct
  source 1..21: mol_type = other RNA
gctgctcctctccagcctggc

SEQ ID NO: 6130 - RNA, 21 nt, synthetic construct
  source 1..21: mol_type = other RNA
gctgctgcactgcgcccacga

SEQ ID NO: 6131 - RNA, 21 nt, synthetic construct
  source 1..21: mol_type = other RNA
gctgctgctcctctccagcct

SEQ ID NO: 6132 - RNA, 21 nt, synthetic construct
  source 1..21: mol_type = other RNA
gctgctggagctgctgcactg

SEQ ID NO: 6133 - RNA, 21 nt, synthetic construct
  source 1..21: mol_type = other RNA
gctgctggccggccttttcca

SEQ ID NO: 6134 - RNA, 21 nt, synthetic construct
  source 1..21: mol_type = other RNA
gctggaagatcagcccagcca

SEQ ID NO: 6135 - RNA, 21 nt, synthetic construct
  source 1..21: mol_type = other RNA
gctggaagcgcaagatggctt

SEQ ID NO: 6136 - RNA, 21 nt, synthetic construct
  source 1..21: mol_type = other RNA
gctggaatttggcagcacgtg

SEQ ID NO: 6137 - RNA, 21 nt, synthetic construct
  source 1..21: mol_type = other RNA
gctggagaggagcagcagcaa

SEQ ID NO: 6138 - RNA, 21 nt, synthetic construct
  source 1..21: mol_type = other RNA
gctggagctgctgcactgcgc

SEQ ID NO: 6139 - RNA, 21 nt, synthetic construct
  source 1..21: mol_type = other RNA
gctggagcttggggaggacgc

SEQ ID NO: 6140 - RNA, 21 nt, synthetic construct
  source 1..21: mol_type = other RNA
gctggagggcgtgccacgctt

SEQ ID NO: 6141 - RNA, 21 nt, synthetic construct
  source 1..21: mol_type = other RNA
gctggcacactgcccggcaca

SEQ ID NO: 6142 - RNA, 21 nt, synthetic construct
  source 1..21: mol_type = other RNA
gctggccaagctggcctggga

SEQ ID NO: 6143 - RNA, 21 nt, synthetic construct
  source 1..21: mol_type = other RNA
gctggcccaaggaggcctggc

SEQ ID NO: 6144 - RNA, 21 nt, synthetic construct
  source 1..21: mol_type = other RNA
gctggccggccttttccagaa

SEQ ID NO: 6145 - RNA, 21 nt, synthetic construct
  source 1..21: mol_type = other RNA
gctggccttccccagcttcct

SEQ ID NO: 6146 - RNA, 21 nt, synthetic construct
  source 1..21: mol_type = other RNA
gctggctctgagtggcgaaat

SEQ ID NO: 6147 - RNA, 21 nt, synthetic construct
  source 1..21: mol_type = other RNA
gctgggcaaagctggtcaggg

SEQ ID NO: 6148 - RNA, 21 nt, synthetic construct
  source 1..21: mol_type = other RNA
gctgggccgcagacatcaaag

SEQ ID NO: 6149 - RNA, 21 nt, synthetic construct
  source 1..21: mol_type = other RNA
gctgggccgtgcagccctcga

SEQ ID NO: 6150 - RNA, 21 nt, synthetic construct
  source 1..21: mol_type = other RNA
gctgggctgatcttccagcct

SEQ ID NO: 6151 - RNA, 21 nt, synthetic construct
  source 1..21: mol_type = other RNA
gctggggaaggccagctcgga

SEQ ID NO: 6152 - RNA, 21 nt, synthetic construct
  source 1..21: mol_type = other RNA
gctggtcagggcaagagctat

SEQ ID NO: 6153 - RNA, 21 nt, synthetic construct
  source 1..21: mol_type = other RNA
gctgtccggcttctccatgga

SEQ ID NO: 6154 - RNA, 21 nt, synthetic construct
  source 1..21: mol_type = other RNA
gctgtcgagggctgcacggcc

SEQ ID NO: 6155 - RNA, 21 nt, synthetic construct
  source 1..21: mol_type = other RNA
gctgtgactgagaagaagtgg

SEQ ID NO: 6156 - RNA, 21 nt, synthetic construct
  source 1..21: mol_type = other RNA
gctgtgaggaggagggtgcaa

SEQ ID NO: 6157 - RNA, 21 nt, synthetic construct
  source 1..21: mol_type = other RNA
gctgtgcaggaagccatcttg

SEQ ID NO: 6158 - RNA, 21 nt, synthetic construct
  source 1..21: mol_type = other RNA
gctgtgctgggcaaagctggt

SEQ ID NO: 6159 - RNA, 21 nt, synthetic construct
  source 1..21: mol_type = other RNA
gctgtggctgtgactgagaag

SEQ ID NO: 6160 - RNA, 21 nt, synthetic construct
  source 1..21: mol_type = other RNA
gctgtgggcccagggagaaga

SEQ ID NO: 6161 - RNA, 21 nt, synthetic construct
  source 1..21: mol_type = other RNA
gctgtgtcacccgtttcaggt

SEQ ID NO: 6162 - RNA, 21 nt, synthetic construct
  source 1..21: mol_type = other RNA
gctgttggctgccaaggagca

SEQ ID NO: 6163 - RNA, 21 nt, synthetic construct
  source 1..21: mol_type = other RNA
gcttagtccaacacccaccgc

SEQ ID NO: 6164 - RNA, 21 nt, synthetic construct
  source 1..21: mol_type = other RNA
gcttcaggtacctcgcaagca

SEQ ID NO: 6165 - RNA, 21 nt, synthetic construct
  source 1..21: mol_type = other RNA
gcttccagctcctcgaagccg

SEQ ID NO: 6166 - RNA, 21 nt, synthetic construct
  source 1..21: mol_type = other RNA
gcttccccagtacgactttgt

SEQ ID NO: 6167 - RNA, 21 nt, synthetic construct
  source 1..21: mol_type = other RNA
gcttcctcctgcaatgcttcc

SEQ ID NO: 6168 - RNA, 21 nt, synthetic construct
  source 1..21: mol_type = other RNA
gcttcctgcacagcacgtgcg

SEQ ID NO: 6169 - RNA, 21 nt, synthetic construct
  source 1..21: mol_type = other RNA
gcttcctgggggccctgtggc

SEQ ID NO: 6170 - RNA, 21 nt, synthetic construct
  source 1..21: mol_type = other RNA
gcttcctgtccaccgaggcag

SEQ ID NO: 6171 - RNA, 21 nt, synthetic construct
  source 1..21: mol_type = other RNA
gcttcgaggagctggaagcgc

SEQ ID NO: 6172 - RNA, 21 nt, synthetic construct
  source 1..21: mol_type = other RNA
gcttctccatggagcaggccc

SEQ ID NO: 6173 - RNA, 21 nt, synthetic construct
  source 1..21: mol_type = other RNA
gcttcttctggaaaaggccgg

SEQ ID NO: 6174 - RNA, 21 nt, synthetic construct
  source 1..21: mol_type = other RNA
gcttgaaccgtccgggggatg

SEQ ID NO: 6175 - RNA, 21 nt, synthetic construct
  source 1..21: mol_type = other RNA
gcttgcgaggtacctgaagcg

SEQ ID NO: 6176 - RNA, 21 nt, synthetic construct
  source 1..21: mol_type = other RNA
gcttggccagctctgccaggg

SEQ ID NO: 6177 - RNA, 21 nt, synthetic construct
  source 1..21: mol_type = other RNA
gcttggcgtcctccccaagct

SEQ ID NO: 6178 - RNA, 21 nt, synthetic construct
  source 1..21: mol_type = other RNA
gcttggggaagagacatcctt

SEQ ID NO: 6179 - RNA, 21 nt, synthetic construct
  source 1..21: mol_type = other RNA
gcttggggaggacgccaagct

SEQ ID NO: 6180 - RNA, 21 nt, synthetic construct
  source 1..21: mol_type = other RNA
gcttgtggccggcttccccag

SEQ ID NO: 6181 - RNA, 21 nt, synthetic construct
  source 1..21: mol_type = other RNA
gctttctggctgggctgatct

SEQ ID NO: 6182 - RNA, 21 nt, synthetic construct
  source 1..21: mol_type = other RNA
gctttgcccagcacagcaatc

SEQ ID NO: 6183 - RNA, 21 nt, synthetic construct
  source 1..21: mol_type = other RNA
ggaaaaggccggccagcagcc

SEQ ID NO: 6184 - RNA, 21 nt, synthetic construct
  source 1..21: mol_type = other RNA
ggaactggccaccccggactg

SEQ ID NO: 6185 - RNA, 21 nt, synthetic construct
  source 1..21: mol_type = other RNA
ggaactggtcctcctgtaggg

SEQ ID NO: 6186 - RNA, 21 nt, synthetic construct
  source 1..21: mol_type = other RNA
ggaagaagaggccctatgaca

SEQ ID NO: 6187 - RNA, 21 nt, synthetic construct
  source 1..21: mol_type = other RNA
ggaagatcagcccagccagaa

SEQ ID NO: 6188 - RNA, 21 nt, synthetic construct
  source 1..21: mol_type = other RNA
ggaagcagaaggtgcttgcga

SEQ ID NO: 6189 - RNA, 21 nt, synthetic construct
  source 1..21: mol_type = other RNA
ggaagcattgcaggaggaagc

SEQ ID NO: 6190 - RNA, 21 nt, synthetic construct
  source 1..21: mol_type = other RNA
ggaagccatcttgcgcttcca

SEQ ID NO: 6191 - RNA, 21 nt, synthetic construct
  source 1..21: mol_type = other RNA
ggaagccggccacaagcccag

SEQ ID NO: 6192 - RNA, 21 nt, synthetic construct
  source 1..21: mol_type = other RNA
ggaagcgcaagatggcttcct

SEQ ID NO: 6193 - RNA, 21 nt, synthetic construct
  source 1..21: mol_type = other RNA
ggaagctggggaaggccagct

SEQ ID NO: 6194 - RNA, 21 nt, synthetic construct
  source 1..21: mol_type = other RNA
ggaaggccagctcggactctg

SEQ ID NO: 6195 - RNA, 21 nt, synthetic construct
  source 1..21: mol_type = other RNA
ggaatttggcagcacgtggta

SEQ ID NO: 6196 - RNA, 21 nt, synthetic construct
  source 1..21: mol_type = other RNA
ggacaaggagctcccgcagta

SEQ ID NO: 6197 - RNA, 21 nt, synthetic construct
  source 1..21: mol_type = other RNA
ggacacgtatggtgccgagcc

SEQ ID NO: 6198 - RNA, 21 nt, synthetic construct
  source 1..21: mol_type = other RNA
ggacagagaagacaaagtcgt

SEQ ID NO: 6199 - RNA, 21 nt, synthetic construct
  source 1..21: mol_type = other RNA
ggacagctcaaatagggcgtc

SEQ ID NO: 6200 - RNA, 21 nt, synthetic construct
  source 1..21: mol_type = other RNA
ggacaggaagcagaaggtgct

SEQ ID NO: 6201 - RNA, 21 nt, synthetic construct
  source 1..21: mol_type = other RNA
ggaccagttcccatccgcaga

SEQ ID NO: 6202 - RNA, 21 nt, synthetic construct
  source 1..21: mol_type = other RNA
ggaccggccacttcttctcag

SEQ ID NO: 6203 - RNA, 21 nt, synthetic construct
  source 1..21: mol_type = other RNA
ggacctccgcagcactggcat

SEQ ID NO: 6204 - RNA, 21 nt, synthetic construct
  source 1..21: mol_type = other RNA
ggacctgggcgatggccaaag

SEQ ID NO: 6205 - RNA, 21 nt, synthetic construct
  source 1..21: mol_type = other RNA
ggacgccaagctgccctccac

SEQ ID NO: 6206 - RNA, 21 nt, synthetic construct
  source 1..21: mol_type = other RNA
ggacggttcaagcaatggcag

SEQ ID NO: 6207 - RNA, 21 nt, synthetic construct
  source 1..21: mol_type = other RNA
ggactaagcctttggccatcg

SEQ ID NO: 6208 - RNA, 21 nt, synthetic construct
  source 1..21: mol_type = other RNA
ggactcagctgtgtcacccgt

SEQ ID NO: 6209 - RNA, 21 nt, synthetic construct
  source 1..21: mol_type = other RNA
ggactctatgtcggcctgctg

SEQ ID NO: 6210 - RNA, 21 nt, synthetic construct
  source 1..21: mol_type = other RNA
ggactgggcagaacggcagct

SEQ ID NO: 6211 - RNA, 21 nt, synthetic construct
  source 1..21: mol_type = other RNA
ggagaagagcagatcctgcag

SEQ ID NO: 6212 - RNA, 21 nt, synthetic construct
  source 1..21: mol_type = other RNA
ggagaagccggacagctcaaa

SEQ ID NO: 6213 - RNA, 21 nt, synthetic construct
  source 1..21: mol_type = other RNA
ggagaagtcttggcccgccgc

SEQ ID NO: 6214 - RNA, 21 nt, synthetic construct
  source 1..21: mol_type = other RNA
ggagaggagcagcagcaagag

SEQ ID NO: 6215 - RNA, 21 nt, synthetic construct
  source 1..21: mol_type = other RNA
ggagcagcagcaagagcctgg

SEQ ID NO: 6216 - RNA, 21 nt, synthetic construct
  source 1..21: mol_type = other RNA
ggagcagcttcttctggaaaa

SEQ ID NO: 6217 - RNA, 21 nt, synthetic construct
  source 1..21: mol_type = other RNA
ggagcaggcccaggcatacgt

SEQ ID NO: 6218 - RNA, 21 nt, synthetic construct
  source 1..21: mol_type = other RNA
ggagcagttctaccgctcact

SEQ ID NO: 6219 - RNA, 21 nt, synthetic construct
  source 1..21: mol_type = other RNA
ggagccctactcgggccatcg

SEQ ID NO: 6220 - RNA, 21 nt, synthetic construct
  source 1..21: mol_type = other RNA
ggagcctcgtgggactcagct

SEQ ID NO: 6221 - RNA, 21 nt, synthetic construct
  source 1..21: mol_type = other RNA
ggagcgggaactggccacccc

SEQ ID NO: 6222 - RNA, 21 nt, synthetic construct
  source 1..21: mol_type = other RNA
ggagcgtcagggctctgtctt

SEQ ID NO: 6223 - RNA, 21 nt, synthetic construct
  source 1..21: mol_type = other RNA
ggagctcccgcagtacctagc

SEQ ID NO: 6224 - RNA, 21 nt, synthetic construct
  source 1..21: mol_type = other RNA
ggagctcctgtaccacgtgct

SEQ ID NO: 6225 - RNA, 21 nt, synthetic construct
  source 1..21: mol_type = other RNA
ggagctccttgtccttgattt

SEQ ID NO: 6226 - RNA, 21 nt, synthetic construct
  source 1..21: mol_type = other RNA
ggagctgctgcactgcgccca

SEQ ID NO: 6227 - RNA, 21 nt, synthetic construct
  source 1..21: mol_type = other RNA
ggagctggaagcgcaagatgg

SEQ ID NO: 6228 - RNA, 21 nt, synthetic construct
  source 1..21: mol_type = other RNA
ggagctgggccgcagacatca

SEQ ID NO: 6229 - RNA, 21 nt, synthetic construct
  source 1..21: mol_type = other RNA
ggagcttggggaggacgccaa

SEQ ID NO: 6230 - RNA, 21 nt, synthetic construct
  source 1..21: mol_type = other RNA
ggaggaagctggggaaggcca

SEQ ID NO: 6231 - RNA, 21 nt, synthetic construct
  source 1..21: mol_type = other RNA
ggaggaccagttcccatccgc

SEQ ID NO: 6232 - RNA, 21 nt, synthetic construct
  source 1..21: mol_type = other RNA
ggaggacgccaagctgccctc

SEQ ID NO: 6233 - RNA, 21 nt, synthetic construct
  source 1..21: mol_type = other RNA
ggaggagcgtcagggctctgt

SEQ ID NO: 6234 - RNA, 21 nt, synthetic construct
  source 1..21: mol_type = other RNA
ggaggagggtgcaacctcgga

SEQ ID NO: 6235 - RNA, 21 nt, synthetic construct
  source 1..21: mol_type = other RNA
ggaggcctggctgaggtgctg

SEQ ID NO: 6236 - RNA, 21 nt, synthetic construct
  source 1..21: mol_type = other RNA
ggaggcggcgggccaagactt

SEQ ID NO: 6237 - RNA, 21 nt, synthetic construct
  source 1..21: mol_type = other RNA
ggaggctggaagatcagccca

SEQ ID NO: 6238 - RNA, 21 nt, synthetic construct
  source 1..21: mol_type = other RNA
ggaggctggaatttggcagca

SEQ ID NO: 6239 - RNA, 21 nt, synthetic construct
  source 1..21: mol_type = other RNA
ggagggcagcttggcgtcctc

SEQ ID NO: 6240 - RNA, 21 nt, synthetic construct
  source 1..21: mol_type = other RNA
ggagggcgtgccacgctttct

SEQ ID NO: 6241 - RNA, 21 nt, synthetic construct
  source 1..21: mol_type = other RNA
ggagggtgcaacctcggagca

SEQ ID NO: 6242 - RNA, 21 nt, synthetic construct
  source 1..21: mol_type = other RNA
ggaggtccagggagaagtctt

SEQ ID NO: 6243 - RNA, 21 nt, synthetic construct
  source 1..21: mol_type = other RNA
ggaggtggatctggtgcaggc

SEQ ID NO: 6244 - RNA, 21 nt, synthetic construct
  source 1..21: mol_type = other RNA
ggatctgctcttctccctggg

SEQ ID NO: 6245 - RNA, 21 nt, synthetic construct
  source 1..21: mol_type = other RNA
ggatctggtgcaggccaggct

SEQ ID NO: 6246 - RNA, 21 nt, synthetic construct
  source 1..21: mol_type = other RNA
ggatgacagagcaccaagaca

SEQ ID NO: 6247 - RNA, 21 nt, synthetic construct
  source 1..21: mol_type = other RNA
ggatgagcagaacgcggtcag

SEQ ID NO: 6248 - RNA, 21 nt, synthetic construct
  source 1..21: mol_type = other RNA
ggatgccatccgggcctgcgg

SEQ ID NO: 6249 - RNA, 21 nt, synthetic construct
  source 1..21: mol_type = other RNA
ggatgcctatggcctgcagga

SEQ ID NO: 6250 - RNA, 21 nt, synthetic construct
  source 1..21: mol_type = other RNA
ggatggcatcctagtggaggt

SEQ ID NO: 6251 - RNA, 21 nt, synthetic construct
  source 1..21: mol_type = other RNA
ggatgggaactggtcctcctg

SEQ ID NO: 6252 - RNA, 21 nt, synthetic construct
  source 1..21: mol_type = other RNA
ggatgtctcttccccaagccc

SEQ ID NO: 6253 - RNA, 21 nt, synthetic construct
  source 1..21: mol_type = other RNA
ggattggggagcctcgtggga

SEQ ID NO: 6254 - RNA, 21 nt, synthetic construct
  source 1..21: mol_type = other RNA
ggcaaagctggtcagggcaag

SEQ ID NO: 6255 - RNA, 21 nt, synthetic construct
  source 1..21: mol_type = other RNA
ggcaaatgccagtgctgcgga

SEQ ID NO: 6256 - RNA, 21 nt, synthetic construct
  source 1..21: mol_type = other RNA
ggcaagagctattgggctggg

SEQ ID NO: 6257 - RNA, 21 nt, synthetic construct
  source 1..21: mol_type = other RNA
ggcaaggccttggaggcggcg

SEQ ID NO: 6258 - RNA, 21 nt, synthetic construct
  source 1..21: mol_type = other RNA
ggcacaaagtagggctgtggc

SEQ ID NO: 6259 - RNA, 21 nt, synthetic construct
  source 1..21: mol_type = other RNA
ggcacactgcccggcacaaag

SEQ ID NO: 6260 - RNA, 21 nt, synthetic construct
  source 1..21: mol_type = other RNA
ggcaccatacgtgtcctgcag

SEQ ID NO: 6261 - RNA, 21 nt, synthetic construct
  source 1..21: mol_type = other RNA
ggcacccgcctcacgcctcct

SEQ ID NO: 6262 - RNA, 21 nt, synthetic construct
  source 1..21: mol_type = other RNA
ggcacgccctccagccagttg

SEQ ID NO: 6263 - RNA, 21 nt, synthetic construct
  source 1..21: mol_type = other RNA
ggcagaacggcagctggccca

SEQ ID NO: 6264 - RNA, 21 nt, synthetic construct
  source 1..21: mol_type = other RNA
ggcagagctggccaagctggc

SEQ ID NO: 6265 - RNA, 21 nt, synthetic construct
  source 1..21: mol_type = other RNA
ggcagcacgtggtacaggagc

SEQ ID NO: 6266 - RNA, 21 nt, synthetic construct
  source 1..21: mol_type = other RNA
ggcagccaacagcacctcagc

SEQ ID NO: 6267 - RNA, 21 nt, synthetic construct
  source 1..21: mol_type = other RNA
ggcagctgctggagctgctgc

SEQ ID NO: 6268 - RNA, 21 nt, synthetic construct
  source 1..21: mol_type = other RNA
ggcagctggcccaaggaggcc

SEQ ID NO: 6269 - RNA, 21 nt, synthetic construct
  source 1..21: mol_type = other RNA
ggcagcttggcgtcctcccca

SEQ ID NO: 6270 - RNA, 21 nt, synthetic construct
  source 1..21: mol_type = other RNA
ggcaggggacagagaagacaa

SEQ ID NO: 6271 - RNA, 21 nt, synthetic construct
  source 1..21: mol_type = other RNA
ggcagtgtgccagctctcaga

SEQ ID NO: 6272 - RNA, 21 nt, synthetic construct
  source 1..21: mol_type = other RNA
ggcatacgtgatgcgctactt

SEQ ID NO: 6273 - RNA, 21 nt, synthetic construct
  source 1..21: mol_type = other RNA
ggcatcccccggacggttcaa

SEQ ID NO: 6274 - RNA, 21 nt, synthetic construct
  source 1..21: mol_type = other RNA
ggcatcctagtggaggtggat

SEQ ID NO: 6275 - RNA, 21 nt, synthetic construct
  source 1..21: mol_type = other RNA
ggcatttgcccctctggattg

SEQ ID NO: 6276 - RNA, 21 nt, synthetic construct
  source 1..21: mol_type = other RNA
ggccaaaggcttagtccaaca

SEQ ID NO: 6277 - RNA, 21 nt, synthetic construct
  source 1..21: mol_type = other RNA
ggccaagacttctccctggac

SEQ ID NO: 6278 - RNA, 21 nt, synthetic construct
  source 1..21: mol_type = other RNA
ggccaagctggcctgggagct

SEQ ID NO: 6279 - RNA, 21 nt, synthetic construct
  source 1..21: mol_type = other RNA
ggccaccccggactgggcaga

SEQ ID NO: 6280 - RNA, 21 nt, synthetic construct
  source 1..21: mol_type = other RNA
ggccacttcttctcagtcaca

SEQ ID NO: 6281 - RNA, 21 nt, synthetic construct
  source 1..21: mol_type = other RNA
ggccagctcggactctgcggc

SEQ ID NO: 6282 - RNA, 21 nt, synthetic construct
  source 1..21: mol_type = other RNA
ggccagctgccgttctgccca

SEQ ID NO: 6283 - RNA, 21 nt, synthetic construct
  source 1..21: mol_type = other RNA
ggccagcttggccagctctgc

SEQ ID NO: 6284 - RNA, 21 nt, synthetic construct
  source 1..21: mol_type = other RNA
ggccaggctggagaggagcag

SEQ ID NO: 6285 - RNA, 21 nt, synthetic construct
  source 1..21: mol_type = other RNA
ggccaggggcgtgtcagggtg

SEQ ID NO: 6286 - RNA, 21 nt, synthetic construct
  source 1..21: mol_type = other RNA
ggccagttcccgctccaggct

SEQ ID NO: 6287 - RNA, 21 nt, synthetic construct
  source 1..21: mol_type = other RNA
ggccataggcatcccccggac

SEQ ID NO: 6288 - RNA, 21 nt, synthetic construct
  source 1..21: mol_type = other RNA
ggccatcgcccaggtcctcac

SEQ ID NO: 6289 - RNA, 21 nt, synthetic construct
  source 1..21: mol_type = other RNA
ggcccaaggaggcctggctga

SEQ ID NO: 6290 - RNA, 21 nt, synthetic construct
  source 1..21: mol_type = other RNA
ggcccacagccactcgtggcg

SEQ ID NO: 6291 - RNA, 21 nt, synthetic construct
  source 1..21: mol_type = other RNA
ggcccagcaggccgacataga

SEQ ID NO: 6292 - RNA, 21 nt, synthetic construct
  source 1..21: mol_type = other RNA
ggcccagctcccaggccagct

SEQ ID NO: 6293 - RNA, 21 nt, synthetic construct
  source 1..21: mol_type = other RNA
ggcccaggcatacgtgatgcg

SEQ ID NO: 6294 - RNA, 21 nt, synthetic construct
  source 1..21: mol_type = other RNA
ggcccagggagaagagcagat

SEQ ID NO: 6295 - RNA, 21 nt, synthetic construct
  source 1..21: mol_type = other RNA
ggcccccaggaagcattgcag

SEQ ID NO: 6296 - RNA, 21 nt, synthetic construct
  source 1..21: mol_type = other RNA
ggcccgagtagggctcccagg

SEQ ID NO: 6297 - RNA, 21 nt, synthetic construct
  source 1..21: mol_type = other RNA
ggcccgcggtgggtgttggac

SEQ ID NO: 6298 - RNA, 21 nt, synthetic construct
  source 1..21: mol_type = other RNA
ggcccggatggcatcctagtg

SEQ ID NO: 6299 - RNA, 21 nt, synthetic construct
  source 1..21: mol_type = other RNA
ggccctatgacaactggctgg

SEQ ID NO: 6300 - RNA, 21 nt, synthetic construct
  source 1..21: mol_type = other RNA
ggccctgctggagcttgggga

SEQ ID NO: 6301 - RNA, 21 nt, synthetic construct
  source 1..21: mol_type = other RNA
ggccctggcagagctggccaa

SEQ ID NO: 6302 - RNA, 21 nt, synthetic construct
  source 1..21: mol_type = other RNA
ggccctgtggctggctctgag

SEQ ID NO: 6303 - RNA, 21 nt, synthetic construct
  source 1..21: mol_type = other RNA
ggccgacatagagtcccgtga

SEQ ID NO: 6304 - RNA, 21 nt, synthetic construct
  source 1..21: mol_type = other RNA
ggccgacgccctatttgagct

SEQ ID NO: 6305 - RNA, 21 nt, synthetic construct
  source 1..21: mol_type = other RNA
ggccgaggaggctggaatttg

SEQ ID NO: 6306 - RNA, 21 nt, synthetic construct
  source 1..21: mol_type = other RNA
ggccgatgaggttttcagcca

SEQ ID NO: 6307 - RNA, 21 nt, synthetic construct
  source 1..21: mol_type = other RNA
ggccgcagacatcaaagtacc

SEQ ID NO: 6308 - RNA, 21 nt, synthetic construct
  source 1..21: mol_type = other RNA
ggccgcagagtccgagctggc

SEQ ID NO: 6309 - RNA, 21 nt, synthetic construct
  source 1..21: mol_type = other RNA
ggccgccacgagtggctgtgg

SEQ ID NO: 6310 - RNA, 21 nt, synthetic construct
  source 1..21: mol_type = other RNA
ggccgccggtgctccttggca

SEQ ID NO: 6311 - RNA, 21 nt, synthetic construct
  source 1..21: mol_type = other RNA
ggccgcctctcttttctgggc

SEQ ID NO: 6312 - RNA, 21 nt, synthetic construct
  source 1..21: mol_type = other RNA
ggccgcctggtccagagcctg

SEQ ID NO: 6313 - RNA, 21 nt, synthetic construct
  source 1..21: mol_type = other RNA
ggccgcgtgagacacgagtga

SEQ ID NO: 6314 - RNA, 21 nt, synthetic construct
  source 1..21: mol_type = other RNA
ggccggccttttccagaagaa

SEQ ID NO: 6315 - RNA, 21 nt, synthetic construct
  source 1..21: mol_type = other RNA
ggccggcttccccagtacgac

SEQ ID NO: 6316 - RNA, 21 nt, synthetic construct
  source 1..21: mol_type = other RNA
ggccgggctgtgaggaggagg

SEQ ID NO: 6317 - RNA, 21 nt, synthetic construct
  source 1..21: mol_type = other RNA
ggccggggagctcctgtacca

SEQ ID NO: 6318 - RNA, 21 nt, synthetic construct
  source 1..21: mol_type = other RNA
ggccgtgcagccctcgacagc

SEQ ID NO: 6319 - RNA, 21 nt, synthetic construct
  source 1..21: mol_type = other RNA
ggcctccttgggccagctgcc

SEQ ID NO: 6320 - RNA, 21 nt, synthetic construct
  source 1..21: mol_type = other RNA
ggcctcgtgggcgcagtgcag

SEQ ID NO: 6321 - RNA, 21 nt, synthetic construct
  source 1..21: mol_type = other RNA
ggcctctgagagctggcacac

SEQ ID NO: 6322 - RNA, 21 nt, synthetic construct
  source 1..21: mol_type = other RNA
ggcctcttcttccttggggtc

SEQ ID NO: 6323 - RNA, 21 nt, synthetic construct
  source 1..21: mol_type = other RNA
ggcctgcaccagatccacctc

SEQ ID NO: 6324 - RNA, 21 nt, synthetic construct
  source 1..21: mol_type = other RNA
ggcctgcaggatctgctcttc

SEQ ID NO: 6325 - RNA, 21 nt, synthetic construct
  source 1..21: mol_type = other RNA
ggcctgcgggctcggcaccat

SEQ ID NO: 6326 - RNA, 21 nt, synthetic construct
  source 1..21: mol_type = other RNA
ggcctgctccatggagaagcc

SEQ ID NO: 6327 - RNA, 21 nt, synthetic construct
  source 1..21: mol_type = other RNA
ggcctggctgaggtgctgttg

SEQ ID NO: 6328 - RNA, 21 nt, synthetic construct
  source 1..21: mol_type = other RNA
ggcctgggcttgtggccggct

SEQ ID NO: 6329 - RNA, 21 nt, synthetic construct
  source 1..21: mol_type = other RNA
ggccttccccagcttcctcct

SEQ ID NO: 6330 - RNA, 21 nt, synthetic construct
  source 1..21: mol_type = other RNA
ggccttgcccagtacatgtgc

SEQ ID NO: 6331 - RNA, 21 nt, synthetic construct
  source 1..21: mol_type = other RNA
ggccttgctcaggctctggac

SEQ ID NO: 6332 - RNA, 21 nt, synthetic construct
  source 1..21: mol_type = other RNA
ggcctttgcagagccggtgga

SEQ ID NO: 6333 - RNA, 21 nt, synthetic construct
  source 1..21: mol_type = other RNA
ggccttttccagaagaagctg

SEQ ID NO: 6334 - RNA, 21 nt, synthetic construct
  source 1..21: mol_type = other RNA
ggcgaaatcaaggacaaggag

SEQ ID NO: 6335 - RNA, 21 nt, synthetic construct
  source 1..21: mol_type = other RNA
ggcgatggccaaaggcttagt

SEQ ID NO: 6336 - RNA, 21 nt, synthetic construct
  source 1..21: mol_type = other RNA
ggcgcagtgcagcagctccag

SEQ ID NO: 6337 - RNA, 21 nt, synthetic construct
  source 1..21: mol_type = other RNA
ggcgcggcagctgctggagct

SEQ ID NO: 6338 - RNA, 21 nt, synthetic construct
  source 1..21: mol_type = other RNA
ggcggccgatgaggttttcag

SEQ ID NO: 6339 - RNA, 21 nt, synthetic construct
  source 1..21: mol_type = other RNA
ggcggccgcgtgagacacgag

SEQ ID NO: 6340 - RNA, 21 nt, synthetic construct
  source 1..21: mol_type = other RNA
ggcggccggggagctcctgta

SEQ ID NO: 6341 - RNA, 21 nt, synthetic construct
  source 1..21: mol_type = other RNA
ggcggcgggccaagacttctc

SEQ ID NO: 6342 - RNA, 21 nt, synthetic construct
  source 1..21: mol_type = other RNA
ggcggctgcctcggtggacag

SEQ ID NO: 6343 - RNA, 21 nt, synthetic construct
  source 1..21: mol_type = other RNA
ggcgggaggctggaagatcag

SEQ ID NO: 6344 - RNA, 21 nt, synthetic construct
  source 1..21: mol_type = other RNA
ggcgggccaagacttctccct

SEQ ID NO: 6345 - RNA, 21 nt, synthetic construct
  source 1..21: mol_type = other RNA
ggcgggtgcccagaaaagaga

SEQ ID NO: 6346 - RNA, 21 nt, synthetic construct
  source 1..21: mol_type = other RNA
ggcgtcctccccaagctccag

SEQ ID NO: 6347 - RNA, 21 nt, synthetic construct
  source 1..21: mol_type = other RNA
ggcgtcggccttgctcaggct

SEQ ID NO: 6348 - RNA, 21 nt, synthetic construct
  source 1..21: mol_type = other RNA
ggcgtgaggcgggtgcccaga

SEQ ID NO: 6349 - RNA, 21 nt, synthetic construct
  source 1..21: mol_type = other RNA
ggcgtgccacgctttctggct

SEQ ID NO: 6350 - RNA, 21 nt, synthetic construct
  source 1..21: mol_type = other RNA
ggcgtgtcagggtgggggtat

SEQ ID NO: 6351 - RNA, 21 nt, synthetic construct
  source 1..21: mol_type = other RNA
ggctcactgccccagcccaat

SEQ ID NO: 6352 - RNA, 21 nt, synthetic construct
  source 1..21: mol_type = other RNA
ggctccccaatccagaggggc

SEQ ID NO: 6353 - RNA, 21 nt, synthetic construct
  source 1..21: mol_type = other RNA
ggctcggcaccatacgtgtcc

SEQ ID NO: 6354 - RNA, 21 nt, synthetic construct
  source 1..21: mol_type = other RNA
ggctctgagtggcgaaatcaa

SEQ ID NO: 6355 - RNA, 21 nt, synthetic construct
  source 1..21: mol_type = other RNA
ggctctgcaaaggccaggggc

SEQ ID NO: 6356 - RNA, 21 nt, synthetic construct
  source 1..21: mol_type = other RNA
ggctctgtcttggtgctctgt

SEQ ID NO: 6357 - RNA, 21 nt, synthetic construct
  source 1..21: mol_type = other RNA
ggctcttgctgctgctcctct

SEQ ID NO: 6358 - RNA, 21 nt, synthetic construct
  source 1..21: mol_type = other RNA
ggctgaaaacctcatcggccg

SEQ ID NO: 6359 - RNA, 21 nt, synthetic construct
  source 1..21: mol_type = other RNA
ggctgaggtgctgttggctgc

SEQ ID NO: 6360 - RNA, 21 nt, synthetic construct
  source 1..21: mol_type = other RNA
ggctgatcttccagcctcccg

SEQ ID NO: 6361 - RNA, 21 nt, synthetic construct
  source 1..21: mol_type = other RNA
ggctgcagccgcttcaggtac

SEQ ID NO: 6362 - RNA, 21 nt, synthetic construct
  source 1..21: mol_type = other RNA
ggctgcagccggggacactgc

SEQ ID NO: 6363 - RNA, 21 nt, synthetic construct
  source 1..21: mol_type = other RNA
ggctgccaaggagcaccggcg

SEQ ID NO: 6364 - RNA, 21 nt, synthetic construct
  source 1..21: mol_type = other RNA
ggctgcctcggtggacaggaa

SEQ ID NO: 6365 - RNA, 21 nt, synthetic construct
  source 1..21: mol_type = other RNA
ggctgctggccggccttttcc

SEQ ID NO: 6366 - RNA, 21 nt, synthetic construct
  source 1..21: mol_type = other RNA
ggctggaagatcagcccagcc

SEQ ID NO: 6367 - RNA, 21 nt, synthetic construct
  source 1..21: mol_type = other RNA
ggctggaatttggcagcacgt

SEQ ID NO: 6368 - RNA, 21 nt, synthetic construct
  source 1..21: mol_type = other RNA
ggctggagaggagcagcagca

SEQ ID NO: 6369 - RNA, 21 nt, synthetic construct
  source 1..21: mol_type = other RNA
ggctggagggcgtgccacgct

SEQ ID NO: 6370 - RNA, 21 nt, synthetic construct
  source 1..21: mol_type = other RNA
ggctggctctgagtggcgaaa

SEQ ID NO: 6371 - RNA, 21 nt, synthetic construct
  source 1..21: mol_type = other RNA
ggctgggctgatcttccagcc

SEQ ID NO: 6372 - RNA, 21 nt, synthetic construct
  source 1..21: mol_type = other RNA
ggctgtcgagggctgcacggc

SEQ ID NO: 6373 - RNA, 21 nt, synthetic construct
  source 1..21: mol_type = other RNA
ggctgtgactgagaagaagtg

SEQ ID NO: 6374 - RNA, 21 nt, synthetic construct
  source 1..21: mol_type = other RNA
ggctgtgaggaggagggtgca

SEQ ID NO: 6375 - RNA, 21 nt, synthetic construct
  source 1..21: mol_type = other RNA
ggctgtggctgtgactgagaa

SEQ ID NO: 6376 - RNA, 21 nt, synthetic construct
  source 1..21: mol_type = other RNA
ggctgtgggcccagggagaag

SEQ ID NO: 6377 - RNA, 21 nt, synthetic construct
  source 1..21: mol_type = other RNA
ggcttagtccaacacccaccg

SEQ ID NO: 6378 - RNA, 21 nt, synthetic construct
  source 1..21: mol_type = other RNA
ggcttccccagtacgactttg

SEQ ID NO: 6379 - RNA, 21 nt, synthetic construct
  source 1..21: mol_type = other RNA
ggcttcctgcacagcacgtgc

SEQ ID NO: 6380 - RNA, 21 nt, synthetic construct
  source 1..21: mol_type = other RNA
ggcttcgaggagctggaagcg

SEQ ID NO: 6381 - RNA, 21 nt, synthetic construct
  source 1..21: mol_type = other RNA
ggcttctccatggagcaggcc

SEQ ID NO: 6382 - RNA, 21 nt, synthetic construct
  source 1..21: mol_type = other RNA
ggcttggggaagagacatcct

SEQ ID NO: 6383 - RNA, 21 nt, synthetic construct
  source 1..21: mol_type = other RNA
ggcttgtggccggcttcccca

SEQ ID NO: 6384 - RNA, 21 nt, synthetic construct
  source 1..21: mol_type = other RNA
gggaactggccaccccggact

SEQ ID NO: 6385 - RNA, 21 nt, synthetic construct
  source 1..21: mol_type = other RNA
gggaactggtcctcctgtagg

SEQ ID NO: 6386 - RNA, 21 nt, synthetic construct
  source 1..21: mol_type = other RNA
gggaagccggccacaagccca

SEQ ID NO: 6387 - RNA, 21 nt, synthetic construct
  source 1..21: mol_type = other RNA
gggaaggccagctcggactct

SEQ ID NO: 6388 - RNA, 21 nt, synthetic construct
  source 1..21: mol_type = other RNA
gggacagagaagacaaagtcg

SEQ ID NO: 6389 - RNA, 21 nt, synthetic construct
  source 1..21: mol_type = other RNA
gggaccggccacttcttctca

SEQ ID NO: 6390 - RNA, 21 nt, synthetic construct
  source 1..21: mol_type = other RNA
gggactcagctgtgtcacccg

SEQ ID NO: 6391 - RNA, 21 nt, synthetic construct
  source 1..21: mol_type = other RNA
gggactctatgtcggcctgct

SEQ ID NO: 6392 - RNA, 21 nt, synthetic construct
  source 1..21: mol_type = other RNA
gggagaagagcagatcctgca

SEQ ID NO: 6393 - RNA, 21 nt, synthetic construct
  source 1..21: mol_type = other RNA
gggagaagtcttggcccgccg

SEQ ID NO: 6394 - RNA, 21 nt, synthetic construct
  source 1..21: mol_type = other RNA
gggagccctactcgggccatc

SEQ ID NO: 6395 - RNA, 21 nt, synthetic construct
  source 1..21: mol_type = other RNA
gggagcctcgtgggactcagc

SEQ ID NO: 6396 - RNA, 21 nt, synthetic construct
  source 1..21: mol_type = other RNA
gggagctcctgtaccacgtgc

SEQ ID NO: 6397 - RNA, 21 nt, synthetic construct
  source 1..21: mol_type = other RNA
gggagctccttgtccttgatt

SEQ ID NO: 6398 - RNA, 21 nt, synthetic construct
  source 1..21: mol_type = other RNA
gggagctgggccgcagacatc

SEQ ID NO: 6399 - RNA, 21 nt, synthetic construct
  source 1..21: mol_type = other RNA
gggaggacgccaagctgccct

SEQ ID NO: 6400 - RNA, 21 nt, synthetic construct
  source 1..21: mol_type = other RNA
gggaggctggaagatcagccc

SEQ ID NO: 6401 - RNA, 21 nt, synthetic construct
  source 1..21: mol_type = other RNA
gggatgacagagcaccaagac

SEQ ID NO: 6402 - RNA, 21 nt, synthetic construct
  source 1..21: mol_type = other RNA
gggatgcctatggcctgcagg

SEQ ID NO: 6403 - RNA, 21 nt, synthetic construct
  source 1..21: mol_type = other RNA
gggcaaagctggtcagggcaa

SEQ ID NO: 6404 - RNA, 21 nt, synthetic construct
  source 1..21: mol_type = other RNA
gggcaaatgccagtgctgcgg

SEQ ID NO: 6405 - RNA, 21 nt, synthetic construct
  source 1..21: mol_type = other RNA
gggcaagagctattgggctgg

SEQ ID NO: 6406 - RNA, 21 nt, synthetic construct
  source 1..21: mol_type = other RNA
gggcaaggccttggaggcggc

SEQ ID NO: 6407 - RNA, 21 nt, synthetic construct
  source 1..21: mol_type = other RNA
gggcagaacggcagctggccc

SEQ ID NO: 6408 - RNA, 21 nt, synthetic construct
  source 1..21: mol_type = other RNA
gggcagcttggcgtcctcccc

SEQ ID NO: 6409 - RNA, 21 nt, synthetic construct
  source 1..21: mol_type = other RNA
gggcagtgtgccagctctcag

SEQ ID NO: 6410 - RNA, 21 nt, synthetic construct
  source 1..21: mol_type = other RNA
gggccaagacttctccctgga

SEQ ID NO: 6411 - RNA, 21 nt, synthetic construct
  source 1..21: mol_type = other RNA
gggccagctgccgttctgccc

SEQ ID NO: 6412 - RNA, 21 nt, synthetic construct
  source 1..21: mol_type = other RNA
gggcccacagccactcgtggc

SEQ ID NO: 6413 - RNA, 21 nt, synthetic construct
  source 1..21: mol_type = other RNA
gggcccagggagaagagcaga

SEQ ID NO: 6414 - RNA, 21 nt, synthetic construct
  source 1..21: mol_type = other RNA
gggcccccaggaagcattgca

SEQ ID NO: 6415 - RNA, 21 nt, synthetic construct
  source 1..21: mol_type = other RNA
gggccctggcagagctggcca

SEQ ID NO: 6416 - RNA, 21 nt, synthetic construct
  source 1..21: mol_type = other RNA
gggccctgtggctggctctga

SEQ ID NO: 6417 - RNA, 21 nt, synthetic construct
  source 1..21: mol_type = other RNA
gggccgcagacatcaaagtac

SEQ ID NO: 6418 - RNA, 21 nt, synthetic construct
  source 1..21: mol_type = other RNA
gggccgcagagtccgagctgg

SEQ ID NO: 6419 - RNA, 21 nt, synthetic construct
  source 1..21: mol_type = other RNA
gggccgcctggtccagagcct

SEQ ID NO: 6420 - RNA, 21 nt, synthetic construct
  source 1..21: mol_type = other RNA
gggccgggctgtgaggaggag

SEQ ID NO: 6421 - RNA, 21 nt, synthetic construct
  source 1..21: mol_type = other RNA
gggccgtgcagccctcgacag

SEQ ID NO: 6422 - RNA, 21 nt, synthetic construct
  source 1..21: mol_type = other RNA
gggcctctgagagctggcaca

SEQ ID NO: 6423 - RNA, 21 nt, synthetic construct
  source 1..21: mol_type = other RNA
gggcctcttcttccttggggt

SEQ ID NO: 6424 - RNA, 21 nt, synthetic construct
  source 1..21: mol_type = other RNA
gggcctgctccatggagaagc

SEQ ID NO: 6425 - RNA, 21 nt, synthetic construct
  source 1..21: mol_type = other RNA
gggcgatggccaaaggcttag

SEQ ID NO: 6426 - RNA, 21 nt, synthetic construct
  source 1..21: mol_type = other RNA
gggcgcagtgcagcagctcca

SEQ ID NO: 6427 - RNA, 21 nt, synthetic construct
  source 1..21: mol_type = other RNA
gggcgggaggctggaagatca

SEQ ID NO: 6428 - RNA, 21 nt, synthetic construct
  source 1..21: mol_type = other RNA
gggcgtcggccttgctcaggc

SEQ ID NO: 6429 - RNA, 21 nt, synthetic construct
  source 1..21: mol_type = other RNA
gggcgtgccacgctttctggc

SEQ ID NO: 6430 - RNA, 21 nt, synthetic construct
  source 1..21: mol_type = other RNA
gggcgtgtcagggtgggggta

SEQ ID NO: 6431 - RNA, 21 nt, synthetic construct
  source 1..21: mol_type = other RNA
gggctcggcaccatacgtgtc

SEQ ID NO: 6432 - RNA, 21 nt, synthetic construct
  source 1..21: mol_type = other RNA
gggctctgtcttggtgctctg

SEQ ID NO: 6433 - RNA, 21 nt, synthetic construct
  source 1..21: mol_type = other RNA
gggctgatcttccagcctccc

SEQ ID NO: 6434 - RNA, 21 nt, synthetic construct
  source 1..21: mol_type = other RNA
gggctgctggccggccttttc

SEQ ID NO: 6435 - RNA, 21 nt, synthetic construct
  source 1..21: mol_type = other RNA
gggctgtcgagggctgcacgg

SEQ ID NO: 6436 - RNA, 21 nt, synthetic construct
  source 1..21: mol_type = other RNA
gggctgtgaggaggagggtgc

SEQ ID NO: 6437 - RNA, 21 nt, synthetic construct
  source 1..21: mol_type = other RNA
gggctgtggctgtgactgaga

SEQ ID NO: 6438 - RNA, 21 nt, synthetic construct
  source 1..21: mol_type = other RNA
gggcttggggaagagacatcc

SEQ ID NO: 6439 - RNA, 21 nt, synthetic construct
  source 1..21: mol_type = other RNA
gggcttgtggccggcttcccc

SEQ ID NO: 6440 - RNA, 21 nt, synthetic construct
  source 1..21: mol_type = other RNA
ggggaagagacatccttgtgt

SEQ ID NO: 6441 - RNA, 21 nt, synthetic construct
  source 1..21: mol_type = other RNA
ggggaagccggccacaagccc

SEQ ID NO: 6442 - RNA, 21 nt, synthetic construct
  source 1..21: mol_type = other RNA
ggggaaggccagctcggactc

SEQ ID NO: 6443 - RNA, 21 nt, synthetic construct
  source 1..21: mol_type = other RNA
ggggacagagaagacaaagtc

SEQ ID NO: 6444 - RNA, 21 nt, synthetic construct
  source 1..21: mol_type = other RNA
ggggagcctcgtgggactcag

SEQ ID NO: 6445 - RNA, 21 nt, synthetic construct
  source 1..21: mol_type = other RNA
ggggagctcctgtaccacgtg

SEQ ID NO: 6446 - RNA, 21 nt, synthetic construct
  source 1..21: mol_type = other RNA
ggggaggacgccaagctgccc

SEQ ID NO: 6447 - RNA, 21 nt, synthetic construct
  source 1..21: mol_type = other RNA
ggggatgcctatggcctgcag

SEQ ID NO: 6448 - RNA, 21 nt, synthetic construct
  source 1..21: mol_type = other RNA
ggggcaaatgccagtgctgcg

SEQ ID NO: 6449 - RNA, 21 nt, synthetic construct
  source 1..21: mol_type = other RNA
ggggccctgtggctggctctg

SEQ ID NO: 6450 - RNA, 21 nt, synthetic construct
  source 1..21: mol_type = other RNA
ggggccgggctgtgaggagga

SEQ ID NO: 6451 - RNA, 21 nt, synthetic construct
  source 1..21: mol_type = other RNA
ggggcgtgtcagggtgggggt

SEQ ID NO: 6452 - RNA, 21 nt, synthetic construct
  source 1..21: mol_type = other RNA
ggggctgctggccggcctttt

SEQ ID NO: 6453 - RNA, 21 nt, synthetic construct
  source 1..21: mol_type = other RNA
ggggctgtcgagggctgcacg

SEQ ID NO: 6454 - RNA, 21 nt, synthetic construct
  source 1..21: mol_type = other RNA
ggggcttggggaagagacatc

SEQ ID NO: 6455 - RNA, 21 nt, synthetic construct
  source 1..21: mol_type = other RNA
gggggatgcctatggcctgca

SEQ ID NO: 6456 - RNA, 21 nt, synthetic construct
  source 1..21: mol_type = other RNA
gggggccctgtggctggctct

SEQ ID NO: 6457 - RNA, 21 nt, synthetic construct
  source 1..21: mol_type = other RNA
gggggctgctggccggccttt

SEQ ID NO: 6458 - RNA, 21 nt, synthetic construct
  source 1..21: mol_type = other RNA
gggggctgtcgagggctgcac

SEQ ID NO: 6459 - RNA, 21 nt, synthetic construct
  source 1..21: mol_type = other RNA
ggggggctgtcgagggctgca

SEQ ID NO: 6460 - RNA, 21 nt, synthetic construct
  source 1..21: mol_type = other RNA
ggggtcaatgctaggtactgc

SEQ ID NO: 6461 - RNA, 21 nt, synthetic construct
  source 1..21: mol_type = other RNA
ggggtgaggggcttggggaag

SEQ ID NO: 6462 - RNA, 21 nt, synthetic construct
  source 1..21: mol_type = other RNA
ggggtggccagttcccgctcc

SEQ ID NO: 6463 - RNA, 21 nt, synthetic construct
  source 1..21: mol_type = other RNA
gggtactttgatgtctgcggc

SEQ ID NO: 6464 - RNA, 21 nt, synthetic construct
  source 1..21: mol_type = other RNA
gggtcaatgctaggtactgcg

SEQ ID NO: 6465 - RNA, 21 nt, synthetic construct
  source 1..21: mol_type = other RNA
gggtgacacagctgagtccca

SEQ ID NO: 6466 - RNA, 21 nt, synthetic construct
  source 1..21: mol_type = other RNA
gggtgaggggcttggggaaga

SEQ ID NO: 6467 - RNA, 21 nt, synthetic construct
  source 1..21: mol_type = other RNA
gggtgcaacctcggagcagct

SEQ ID NO: 6468 - RNA, 21 nt, synthetic construct
  source 1..21: mol_type = other RNA
gggtgcccagaaaagagaggc

SEQ ID NO: 6469 - RNA, 21 nt, synthetic construct
  source 1..21: mol_type = other RNA
gggtggccagttcccgctcca

SEQ ID NO: 6470 - RNA, 21 nt, synthetic construct
  source 1..21: mol_type = other RNA
gggtgttggactaagcctttg

SEQ ID NO: 6471 - RNA, 21 nt, synthetic construct
  source 1..21: mol_type = other RNA
ggtacaggagctccccggccg

SEQ ID NO: 6472 - RNA, 21 nt, synthetic construct
  source 1..21: mol_type = other RNA
ggtacctcgcaagcaccttct

SEQ ID NO: 6473 - RNA, 21 nt, synthetic construct
  source 1..21: mol_type = other RNA
ggtacctgaagcggctgcagc

SEQ ID NO: 6474 - RNA, 21 nt, synthetic construct
  source 1..21: mol_type = other RNA
ggtactgcgggagctccttgt

SEQ ID NO: 6475 - RNA, 21 nt, synthetic construct
  source 1..21: mol_type = other RNA
ggtactttgatgtctgcggcc

SEQ ID NO: 6476 - RNA, 21 nt, synthetic construct
  source 1..21: mol_type = other RNA
ggtagaactgctccaccggct

SEQ ID NO: 6477 - RNA, 21 nt, synthetic construct
  source 1..21: mol_type = other RNA
ggtcaatgctaggtactgcgg

SEQ ID NO: 6478 - RNA, 21 nt, synthetic construct
  source 1..21: mol_type = other RNA
ggtcagggcaagagctattgg

SEQ ID NO: 6479 - RNA, 21 nt, synthetic construct
  source 1..21: mol_type = other RNA
ggtcaggtctcttcaagatgt

SEQ ID NO: 6480 - RNA, 21 nt, synthetic construct
  source 1..21: mol_type = other RNA
ggtccagagcctgagcaaggc

SEQ ID NO: 6481 - RNA, 21 nt, synthetic construct
  source 1..21: mol_type = other RNA
ggtccagggagaagtcttggc

SEQ ID NO: 6482 - RNA, 21 nt, synthetic construct
  source 1..21: mol_type = other RNA
ggtcccggaggagcgtcaggg

SEQ ID NO: 6483 - RNA, 21 nt, synthetic construct
  source 1..21: mol_type = other RNA
ggtccgcacgtgctgtgcagg

SEQ ID NO: 6484 - RNA, 21 nt, synthetic construct
  source 1..21: mol_type = other RNA
ggtcctcacgtctgcggatgg

SEQ ID NO: 6485 - RNA, 21 nt, synthetic construct
  source 1..21: mol_type = other RNA
ggtcctcctgtagggtacttt

SEQ ID NO: 6486 - RNA, 21 nt, synthetic construct
  source 1..21: mol_type = other RNA
ggtctcttcaagatgtggctg

SEQ ID NO: 6487 - RNA, 21 nt, synthetic construct
  source 1..21: mol_type = other RNA
ggtgacacagctgagtcccac

SEQ ID NO: 6488 - RNA, 21 nt, synthetic construct
  source 1..21: mol_type = other RNA
ggtgaggggcttggggaagag

SEQ ID NO: 6489 - RNA, 21 nt, synthetic construct
  source 1..21: mol_type = other RNA
ggtgcaacctcggagcagctt

SEQ ID NO: 6490 - RNA, 21 nt, synthetic construct
  source 1..21: mol_type = other RNA
ggtgcaggccaggctggagag

SEQ ID NO: 6491 - RNA, 21 nt, synthetic construct
  source 1..21: mol_type = other RNA
ggtgcccagaaaagagaggcg

SEQ ID NO: 6492 - RNA, 21 nt, synthetic construct
  source 1..21: mol_type = other RNA
ggtgccggtccgcacgtgctg

SEQ ID NO: 6493 - RNA, 21 nt, synthetic construct
  source 1..21: mol_type = other RNA
ggtgctccttggcagccaaca

SEQ ID NO: 6494 - RNA, 21 nt, synthetic construct
  source 1..21: mol_type = other RNA
ggtgctctgtcatccctgagc

SEQ ID NO: 6495 - RNA, 21 nt, synthetic construct
  source 1..21: mol_type = other RNA
ggtgctgttggctgccaagga

SEQ ID NO: 6496 - RNA, 21 nt, synthetic construct
  source 1..21: mol_type = other RNA
ggtgcttgcgaggtacctgaa

SEQ ID NO: 6497 - RNA, 21 nt, synthetic construct
  source 1..21: mol_type = other RNA
ggtggacaggaagcagaaggt

SEQ ID NO: 6498 - RNA, 21 nt, synthetic construct
  source 1..21: mol_type = other RNA
ggtggagcagttctaccgctc

SEQ ID NO: 6499 - RNA, 21 nt, synthetic construct
  source 1..21: mol_type = other RNA
ggtggatctggtgcaggccag

SEQ ID NO: 6500 - RNA, 21 nt, synthetic construct
  source 1..21: mol_type = other RNA
ggtggccagttcccgctccag

SEQ ID NO: 6501 - RNA, 21 nt, synthetic construct
  source 1..21: mol_type = other RNA
ggtggggtgaggggcttgggg

SEQ ID NO: 6502 - RNA, 21 nt, synthetic construct
  source 1..21: mol_type = other RNA
ggtgggtgttggactaagcct

SEQ ID NO: 6503 - RNA, 21 nt, synthetic construct
  source 1..21: mol_type = other RNA
ggtgttggactaagcctttgg

SEQ ID NO: 6504 - RNA, 21 nt, synthetic construct
  source 1..21: mol_type = other RNA
ggttcaagcaatggcagggga

SEQ ID NO: 6505 - RNA, 21 nt, synthetic construct
  source 1..21: mol_type = other RNA
ggttgcaccctcctcctcaca

SEQ ID NO: 6506 - RNA, 21 nt, synthetic construct
  source 1..21: mol_type = other RNA
ggttttcagccacatcttgaa

SEQ ID NO: 6507 - RNA, 21 nt, synthetic construct
  source 1..21: mol_type = other RNA
gtacaggagctccccggccgc

SEQ ID NO: 6508 - RNA, 21 nt, synthetic construct
  source 1..21: mol_type = other RNA
gtacatgtgcatcaggaggcg

SEQ ID NO: 6509 - RNA, 21 nt, synthetic construct
  source 1..21: mol_type = other RNA
gtaccacgtgctgccaaattc

SEQ ID NO: 6510 - RNA, 21 nt, synthetic construct
  source 1..21: mol_type = other RNA
gtaccctacaggaggaccagt

SEQ ID NO: 6511 - RNA, 21 nt, synthetic construct
  source 1..21: mol_type = other RNA
gtacctagcattgaccccaag

SEQ ID NO: 6512 - RNA, 21 nt, synthetic construct
  source 1..21: mol_type = other RNA
gtacctcgcaagcaccttctg

SEQ ID NO: 6513 - RNA, 21 nt, synthetic construct
  source 1..21: mol_type = other RNA
gtacctgaagcggctgcagcc

SEQ ID NO: 6514 - RNA, 21 nt, synthetic construct
  source 1..21: mol_type = other RNA
gtacgactttgtcttctctgt

SEQ ID NO: 6515 - RNA, 21 nt, synthetic construct
  source 1..21: mol_type = other RNA
gtactgcgggagctccttgtc

SEQ ID NO: 6516 - RNA, 21 nt, synthetic construct
  source 1..21: mol_type = other RNA
gtactgggcaaggccttggag

SEQ ID NO: 6517 - RNA, 21 nt, synthetic construct
  source 1..21: mol_type = other RNA
gtactggggaagccggccaca

SEQ ID NO: 6518 - RNA, 21 nt, synthetic construct
  source 1..21: mol_type = other RNA
gtactttgatgtctgcggccc

SEQ ID NO: 6519 - RNA, 21 nt, synthetic construct
  source 1..21: mol_type = other RNA
gtagaactgctccaccggctc

SEQ ID NO: 6520 - RNA, 21 nt, synthetic construct
  source 1..21: mol_type = other RNA
gtagcgcatcacgtatgcctg

SEQ ID NO: 6521 - RNA, 21 nt, synthetic construct
  source 1..21: mol_type = other RNA
gtagggctcccaggcagcggg

SEQ ID NO: 6522 - RNA, 21 nt, synthetic construct
  source 1..21: mol_type = other RNA
gtagggctgtggctgtgactg

SEQ ID NO: 6523 - RNA, 21 nt, synthetic construct
  source 1..21: mol_type = other RNA
gtagggtactttgatgtctgc

SEQ ID NO: 6524 - RNA, 21 nt, synthetic construct
  source 1..21: mol_type = other RNA
gtatgcctgggcctgctccat

SEQ ID NO: 6525 - RNA, 21 nt, synthetic construct
  source 1..21: mol_type = other RNA
gtatggtgccgagcccgcagg

SEQ ID NO: 6526 - RNA, 21 nt, synthetic construct
  source 1..21: mol_type = other RNA
gtcaatgctaggtactgcggg

SEQ ID NO: 6527 - RNA, 21 nt, synthetic construct
  source 1..21: mol_type = other RNA
gtcacagccacagccctactt

SEQ ID NO: 6528 - RNA, 21 nt, synthetic construct
  source 1..21: mol_type = other RNA
gtcacccgtttcaggtggggt

SEQ ID NO: 6529 - RNA, 21 nt, synthetic construct
  source 1..21: mol_type = other RNA
gtcagggcaagagctattggg

SEQ ID NO: 6530 - RNA, 21 nt, synthetic construct
  source 1..21: mol_type = other RNA
gtcagggctctgtcttggtgc

SEQ ID NO: 6531 - RNA, 21 nt, synthetic construct
  source 1..21: mol_type = other RNA
gtcaggtctcttcaagatgtg

SEQ ID NO: 6532 - RNA, 21 nt, synthetic construct
  source 1..21: mol_type = other RNA
gtcatagggcctcttcttcct

SEQ ID NO: 6533 - RNA, 21 nt, synthetic construct
  source 1..21: mol_type = other RNA
gtcatccctgagctctcaaag

SEQ ID NO: 6534 - RNA, 21 nt, synthetic construct
  source 1..21: mol_type = other RNA
gtccaacacccaccgcgggcc

SEQ ID NO: 6535 - RNA, 21 nt, synthetic construct
  source 1..21: mol_type = other RNA
gtccaccgaggcagccgccga

SEQ ID NO: 6536 - RNA, 21 nt, synthetic construct
  source 1..21: mol_type = other RNA
gtccagagcctgagcaaggcc

SEQ ID NO: 6537 - RNA, 21 nt, synthetic construct
  source 1..21: mol_type = other RNA
gtccagggagaagtcttggcc

SEQ ID NO: 6538 - RNA, 21 nt, synthetic construct
  source 1..21: mol_type = other RNA
gtcccacgaggctccccaatc

SEQ ID NO: 6539 - RNA, 21 nt, synthetic construct
  source 1..21: mol_type = other RNA
gtccccggctgcagccgcttc

SEQ ID NO: 6540 - RNA, 21 nt, synthetic construct
  source 1..21: mol_type = other RNA
gtcccctgccattgcttgaac

SEQ ID NO: 6541 - RNA, 21 nt, synthetic construct
  source 1..21: mol_type = other RNA
gtcccggaggagcgtcagggc

SEQ ID NO: 6542 - RNA, 21 nt, synthetic construct
  source 1..21: mol_type = other RNA
gtcccgtgagcgtggagggca

SEQ ID NO: 6543 - RNA, 21 nt, synthetic construct
  source 1..21: mol_type = other RNA
gtccgagctggccttccccag

SEQ ID NO: 6544 - RNA, 21 nt, synthetic construct
  source 1..21: mol_type = other RNA
gtccgcacgtgctgtgcagga

SEQ ID NO: 6545 - RNA, 21 nt, synthetic construct
  source 1..21: mol_type = other RNA
gtccggcttctccatggagca

SEQ ID NO: 6546 - RNA, 21 nt, synthetic construct
  source 1..21: mol_type = other RNA
gtccgggggatgcctatggcc

SEQ ID NO: 6547 - RNA, 21 nt, synthetic construct
  source 1..21: mol_type = other RNA
gtccggggtggccagttcccg

SEQ ID NO: 6548 - RNA, 21 nt, synthetic construct
  source 1..21: mol_type = other RNA
gtcctcacgtctgcggatggg

SEQ ID NO: 6549 - RNA, 21 nt, synthetic construct
  source 1..21: mol_type = other RNA
gtcctccccaagctccagcag

SEQ ID NO: 6550 - RNA, 21 nt, synthetic construct
  source 1..21: mol_type = other RNA
gtcctcctgtagggtactttg

SEQ ID NO: 6551 - RNA, 21 nt, synthetic construct
  source 1..21: mol_type = other RNA
gtcctgcagtgagcggtagaa

SEQ ID NO: 6552 - RNA, 21 nt, synthetic construct
  source 1..21: mol_type = other RNA
gtccttgatttcgccactcag

SEQ ID NO: 6553 - RNA, 21 nt, synthetic construct
  source 1..21: mol_type = other RNA
gtcgagggctgcacggcccag

SEQ ID NO: 6554 - RNA, 21 nt, synthetic construct
  source 1..21: mol_type = other RNA
gtcggcctgctgggccgtgca

SEQ ID NO: 6555 - RNA, 21 nt, synthetic construct
  source 1..21: mol_type = other RNA
gtcggccttgctcaggctctg

SEQ ID NO: 6556 - RNA, 21 nt, synthetic construct
  source 1..21: mol_type = other RNA
gtcgtactggggaagccggcc

SEQ ID NO: 6557 - RNA, 21 nt, synthetic construct
  source 1..21: mol_type = other RNA
gtctaggatgagcagaacgcg

SEQ ID NO: 6558 - RNA, 21 nt, synthetic construct
  source 1..21: mol_type = other RNA
gtctcttcaagatgtggctga

SEQ ID NO: 6559 - RNA, 21 nt, synthetic construct
  source 1..21: mol_type = other RNA
gtctcttccccaagcccctca

SEQ ID NO: 6560 - RNA, 21 nt, synthetic construct
  source 1..21: mol_type = other RNA
gtctgcggatgggaactggtc

SEQ ID NO: 6561 - RNA, 21 nt, synthetic construct
  source 1..21: mol_type = other RNA
gtctgcggcccagctcccagg

SEQ ID NO: 6562 - RNA, 21 nt, synthetic construct
  source 1..21: mol_type = other RNA
gtcttctctgtcccctgccat

SEQ ID NO: 6563 - RNA, 21 nt, synthetic construct
  source 1..21: mol_type = other RNA
gtcttggcccgccgcctccaa

SEQ ID NO: 6564 - RNA, 21 nt, synthetic construct
  source 1..21: mol_type = other RNA
gtcttggtgctctgtcatccc

SEQ ID NO: 6565 - RNA, 21 nt, synthetic construct
  source 1..21: mol_type = other RNA
gtgacacagctgagtcccacg

SEQ ID NO: 6566 - RNA, 21 nt, synthetic construct
  source 1..21: mol_type = other RNA
gtgactgagaagaagtggccg

SEQ ID NO: 6567 - RNA, 21 nt, synthetic construct
  source 1..21: mol_type = other RNA
gtgagacacgagtgattgctg

SEQ ID NO: 6568 - RNA, 21 nt, synthetic construct
  source 1..21: mol_type = other RNA
gtgagccgggcctgggcttgt

SEQ ID NO: 6569 - RNA, 21 nt, synthetic construct
  source 1..21: mol_type = other RNA
gtgagcggtagaactgctcca

SEQ ID NO: 6570 - RNA, 21 nt, synthetic construct
  source 1..21: mol_type = other RNA
gtgagcgtggagggcagcttg

SEQ ID NO: 6571 - RNA, 21 nt, synthetic construct
  source 1..21: mol_type = other RNA
gtgaggacctgggcgatggcc

SEQ ID NO: 6572 - RNA, 21 nt, synthetic construct
  source 1..21: mol_type = other RNA
gtgaggaggagggtgcaacct

SEQ ID NO: 6573 - RNA, 21 nt, synthetic construct
  source 1..21: mol_type = other RNA
gtgaggcgggtgcccagaaaa

SEQ ID NO: 6574 - RNA, 21 nt, synthetic construct
  source 1..21: mol_type = other RNA
gtgaggggcttggggaagaga

SEQ ID NO: 6575 - RNA, 21 nt, synthetic construct
  source 1..21: mol_type = other RNA
gtgatgcgctactttgagagc

SEQ ID NO: 6576 - RNA, 21 nt, synthetic construct
  source 1..21: mol_type = other RNA
gtgattgctgtgctgggcaaa

SEQ ID NO: 6577 - RNA, 21 nt, synthetic construct
  source 1..21: mol_type = other RNA
gtgcaacctcggagcagcttc

SEQ ID NO: 6578 - RNA, 21 nt, synthetic construct
  source 1..21: mol_type = other RNA
gtgcagcagctccagcagctg

SEQ ID NO: 6579 - RNA, 21 nt, synthetic construct
  source 1..21: mol_type = other RNA
gtgcagccctcgacagccccc

SEQ ID NO: 6580 - RNA, 21 nt, synthetic construct
  source 1..21: mol_type = other RNA
gtgcaggaagccatcttgcgc

SEQ ID NO: 6581 - RNA, 21 nt, synthetic construct
  source 1..21: mol_type = other RNA
gtgcaggccaggctggagagg

SEQ ID NO: 6582 - RNA, 21 nt, synthetic construct
  source 1..21: mol_type = other RNA
gtgcatcaggaggcgtgaggc

SEQ ID NO: 6583 - RNA, 21 nt, synthetic construct
  source 1..21: mol_type = other RNA
gtgccacgctttctggctggg

SEQ ID NO: 6584 - RNA, 21 nt, synthetic construct
  source 1..21: mol_type = other RNA
gtgccagctctcagaggccct

SEQ ID NO: 6585 - RNA, 21 nt, synthetic construct
  source 1..21: mol_type = other RNA
gtgcccagaaaagagaggcgg

SEQ ID NO: 6586 - RNA, 21 nt, synthetic construct
  source 1..21: mol_type = other RNA
gtgccgggcagtgtgccagct

SEQ ID NO: 6587 - RNA, 21 nt, synthetic construct
  source 1..21: mol_type = other RNA
gtgccggtccgcacgtgctgt

SEQ ID NO: 6588 - RNA, 21 nt, synthetic construct
  source 1..21: mol_type = other RNA
gtgctccttggcagccaacag

SEQ ID NO: 6589 - RNA, 21 nt, synthetic construct
  source 1..21: mol_type = other RNA
gtgctctgtcatccctgagct

SEQ ID NO: 6590 - RNA, 21 nt, synthetic construct
  source 1..21: mol_type = other RNA
gtgctgccaaattccagcctc

SEQ ID NO: 6591 - RNA, 21 nt, synthetic construct
  source 1..21: mol_type = other RNA
gtgctgcggaggtccagggag

SEQ ID NO: 6592 - RNA, 21 nt, synthetic construct
  source 1..21: mol_type = other RNA
gtgctgggcaaagctggtcag

SEQ ID NO: 6593 - RNA, 21 nt, synthetic construct
  source 1..21: mol_type = other RNA
gtgctgtgcaggaagccatct

SEQ ID NO: 6594 - RNA, 21 nt, synthetic construct
  source 1..21: mol_type = other RNA
gtgctgttggctgccaaggag

SEQ ID NO: 6595 - RNA, 21 nt, synthetic construct
  source 1..21: mol_type = other RNA
gtgcttgcgaggtacctgaag

SEQ ID NO: 6596 - RNA, 21 nt, synthetic construct
  source 1..21: mol_type = other RNA
gtggacaggaagcagaaggtg

SEQ ID NO: 6597 - RNA, 21 nt, synthetic construct
  source 1..21: mol_type = other RNA
gtggagcagttctaccgctca

SEQ ID NO: 6598 - RNA, 21 nt, synthetic construct
  source 1..21: mol_type = other RNA
gtggagggcagcttggcgtcc

SEQ ID NO: 6599 - RNA, 21 nt, synthetic construct
  source 1..21: mol_type = other RNA
gtggaggtggatctggtgcag

SEQ ID NO: 6600 - RNA, 21 nt, synthetic construct
  source 1..21: mol_type = other RNA
gtggatctggtgcaggccagg

SEQ ID NO: 6601 - RNA, 21 nt, synthetic construct
  source 1..21: mol_type = other RNA
gtggcacgccctccagccagt

SEQ ID NO: 6602 - RNA, 21 nt, synthetic construct
  source 1..21: mol_type = other RNA
gtggccagttcccgctccagg

SEQ ID NO: 6603 - RNA, 21 nt, synthetic construct
  source 1..21: mol_type = other RNA
gtggccggcttccccagtacg

SEQ ID NO: 6604 - RNA, 21 nt, synthetic construct
  source 1..21: mol_type = other RNA
gtggcgaaatcaaggacaagg

SEQ ID NO: 6605 - RNA, 21 nt, synthetic construct
  source 1..21: mol_type = other RNA
gtggcggccgatgaggttttc

SEQ ID NO: 6606 - RNA, 21 nt, synthetic construct
  source 1..21: mol_type = other RNA
gtggctgaaaacctcatcggc

SEQ ID NO: 6607 - RNA, 21 nt, synthetic construct
  source 1..21: mol_type = other RNA
gtggctggctctgagtggcga

SEQ ID NO: 6608 - RNA, 21 nt, synthetic construct
  source 1..21: mol_type = other RNA
gtggctgtgactgagaagaag

SEQ ID NO: 6609 - RNA, 21 nt, synthetic construct
  source 1..21: mol_type = other RNA
gtggctgtgggcccagggaga

SEQ ID NO: 6610 - RNA, 21 nt, synthetic construct
  source 1..21: mol_type = other RNA
gtgggactcagctgtgtcacc

SEQ ID NO: 6611 - RNA, 21 nt, synthetic construct
  source 1..21: mol_type = other RNA
gtgggcccagggagaagagca

SEQ ID NO: 6612 - RNA, 21 nt, synthetic construct
  source 1..21: mol_type = other RNA
gtgggcgcagtgcagcagctc

SEQ ID NO: 6613 - RNA, 21 nt, synthetic construct
  source 1..21: mol_type = other RNA
gtggggtgaggggcttgggga

SEQ ID NO: 6614 - RNA, 21 nt, synthetic construct
  source 1..21: mol_type = other RNA
gtgggtgttggactaagcctt

SEQ ID NO: 6615 - RNA, 21 nt, synthetic construct
  source 1..21: mol_type = other RNA
gtggtacaggagctccccggc

SEQ ID NO: 6616 - RNA, 21 nt, synthetic construct
  source 1..21: mol_type = other RNA
gtgtcacccgtttcaggtggg

SEQ ID NO: 6617 - RNA, 21 nt, synthetic construct
  source 1..21: mol_type = other RNA
gtgtcagggtgggggtatgtg

SEQ ID NO: 6618 - RNA, 21 nt, synthetic construct
  source 1..21: mol_type = other RNA
gtgtccccggctgcagccgct

SEQ ID NO: 6619 - RNA, 21 nt, synthetic construct
  source 1..21: mol_type = other RNA
gtgtcctgcagtgagcggtag

SEQ ID NO: 6620 - RNA, 21 nt, synthetic construct
  source 1..21: mol_type = other RNA
gtgtctcacgcggccgccggt

SEQ ID NO: 6621 - RNA, 21 nt, synthetic construct
  source 1..21: mol_type = other RNA
gtgtgccagctctcagaggcc

SEQ ID NO: 6622 - RNA, 21 nt, synthetic construct
  source 1..21: mol_type = other RNA
gtgttggactaagcctttggc

SEQ ID NO: 6623 - RNA, 21 nt, synthetic construct
  source 1..21: mol_type = other RNA
gttcaagcaatggcaggggac

SEQ ID NO: 6624 - RNA, 21 nt, synthetic construct
  source 1..21: mol_type = other RNA
gttcccatccgcagacgtgag

SEQ ID NO: 6625 - RNA, 21 nt, synthetic construct
  source 1..21: mol_type = other RNA
gttcccgctccaggctcttgc

SEQ ID NO: 6626 - RNA, 21 nt, synthetic construct
  source 1..21: mol_type = other RNA
gttctaccgctcactgcagga

SEQ ID NO: 6627 - RNA, 21 nt, synthetic construct
  source 1..21: mol_type = other RNA
gttctgcccagtccggggtgg

SEQ ID NO: 6628 - RNA, 21 nt, synthetic construct
  source 1..21: mol_type = other RNA
gttctgctcatcctagacggc

SEQ ID NO: 6629 - RNA, 21 nt, synthetic construct
  source 1..21: mol_type = other RNA
gttgcaccctcctcctcacag

SEQ ID NO: 6630 - RNA, 21 nt, synthetic construct
  source 1..21: mol_type = other RNA
gttggactaagcctttggcca

SEQ ID NO: 6631 - RNA, 21 nt, synthetic construct
  source 1..21: mol_type = other RNA
gttggctgccaaggagcaccg

SEQ ID NO: 6632 - RNA, 21 nt, synthetic construct
  source 1..21: mol_type = other RNA
gttgtcatagggcctcttctt

SEQ ID NO: 6633 - RNA, 21 nt, synthetic construct
  source 1..21: mol_type = other RNA
gtttcaggtggggtgaggggc

SEQ ID NO: 6634 - RNA, 21 nt, synthetic construct
  source 1..21: mol_type = other RNA
gttttcagccacatcttgaag

SEQ ID NO: 6635 - RNA, 21 nt, synthetic construct
  source 1..21: mol_type = other RNA
taagcctttggccatcgccca

SEQ ID NO: 6636 - RNA, 21 nt, synthetic construct
  source 1..21: mol_type = other RNA
tacaggagctccccggccgcc

SEQ ID NO: 6637 - RNA, 21 nt, synthetic construct
  source 1..21: mol_type = other RNA
tacaggaggaccagttcccat

SEQ ID NO: 6638 - RNA, 21 nt, synthetic construct
  source 1..21: mol_type = other RNA
tacatgtgcatcaggaggcgt

SEQ ID NO: 6639 - RNA, 21 nt, synthetic construct
  source 1..21: mol_type = other RNA
taccacgtgctgccaaattcc

SEQ ID NO: 6640 - RNA, 21 nt, synthetic construct
  source 1..21: mol_type = other RNA
tacccccaccctgacacgccc

SEQ ID NO: 6641 - RNA, 21 nt, synthetic construct
  source 1..21: mol_type = other RNA
taccctacaggaggaccagtt

SEQ ID NO: 6642 - RNA, 21 nt, synthetic construct
  source 1..21: mol_type = other RNA
taccgctcactgcaggacacg

SEQ ID NO: 6643 - RNA, 21 nt, synthetic construct
  source 1..21: mol_type = other RNA
tacctagcattgaccccaagg

SEQ ID NO: 6644 - RNA, 21 nt, synthetic construct
  source 1..21: mol_type = other RNA
tacctcgcaagcaccttctgc

SEQ ID NO: 6645 - RNA, 21 nt, synthetic construct
  source 1..21: mol_type = other RNA
tacctgaagcggctgcagccg

SEQ ID NO: 6646 - RNA, 21 nt, synthetic construct
  source 1..21: mol_type = other RNA
tacgactttgtcttctctgtc

SEQ ID NO: 6647 - RNA, 21 nt, synthetic construct
  source 1..21: mol_type = other RNA
tacgtgatgcgctactttgag

SEQ ID NO: 6648 - RNA, 21 nt, synthetic construct
  source 1..21: mol_type = other RNA
tacgtgtcctgcagtgagcgg

SEQ ID NO: 6649 - RNA, 21 nt, synthetic construct
  source 1..21: mol_type = other RNA
tactcgggccatcggcggctg

SEQ ID NO: 6650 - RNA, 21 nt, synthetic construct
  source 1..21: mol_type = other RNA
tactgcgggagctccttgtcc

SEQ ID NO: 6651 - RNA, 21 nt, synthetic construct
  source 1..21: mol_type = other RNA
tactgggcaaggccttggagg

SEQ ID NO: 6652 - RNA, 21 nt, synthetic construct
  source 1..21: mol_type = other RNA
tactggggaagccggccacaa

SEQ ID NO: 6653 - RNA, 21 nt, synthetic construct
  source 1..21: mol_type = other RNA
tactttgagagctcagggatg

SEQ ID NO: 6654 - RNA, 21 nt, synthetic construct
  source 1..21: mol_type = other RNA
tactttgatgtctgcggccca

SEQ ID NO: 6655 - RNA, 21 nt, synthetic construct
  source 1..21: mol_type = other RNA
tactttgtgccgggcagtgtg

SEQ ID NO: 6656 - RNA, 21 nt, synthetic construct
  source 1..21: mol_type = other RNA
tagaactgctccaccggctct

SEQ ID NO: 6657 - RNA, 21 nt, synthetic construct
  source 1..21: mol_type = other RNA
tagacggcttcgaggagctgg

SEQ ID NO: 6658 - RNA, 21 nt, synthetic construct
  source 1..21: mol_type = other RNA
tagagtcccgtgagcgtggag

SEQ ID NO: 6659 - RNA, 21 nt, synthetic construct
  source 1..21: mol_type = other RNA
tagcattgaccccaaggaaga

SEQ ID NO: 6660 - RNA, 21 nt, synthetic construct
  source 1..21: mol_type = other RNA
tagcgcatcacgtatgcctgg

SEQ ID NO: 6661 - RNA, 21 nt, synthetic construct
  source 1..21: mol_type = other RNA
tagctcttgccctgaccagct

SEQ ID NO: 6662 - RNA, 21 nt, synthetic construct
  source 1..21: mol_type = other RNA
taggatgagcagaacgcggtc

SEQ ID NO: 6663 - RNA, 21 nt, synthetic construct
  source 1..21: mol_type = other RNA
taggatgccatccgggcctgc

SEQ ID NO: 6664 - RNA, 21 nt, synthetic construct
  source 1..21: mol_type = other RNA
taggcatcccccggacggttc

SEQ ID NO: 6665 - RNA, 21 nt, synthetic construct
  source 1..21: mol_type = other RNA
tagggcctcttcttccttggg

SEQ ID NO: 6666 - RNA, 21 nt, synthetic construct
  source 1..21: mol_type = other RNA
tagggcgtcggccttgctcag

SEQ ID NO: 6667 - RNA, 21 nt, synthetic construct
  source 1..21: mol_type = other RNA
tagggctcccaggcagcgggc

SEQ ID NO: 6668 - RNA, 21 nt, synthetic construct
  source 1..21: mol_type = other RNA
tagggctgtggctgtgactga

SEQ ID NO: 6669 - RNA, 21 nt, synthetic construct
  source 1..21: mol_type = other RNA
tagggtactttgatgtctgcg

SEQ ID NO: 6670 - RNA, 21 nt, synthetic construct
  source 1..21: mol_type = other RNA
taggtactgcgggagctcctt

SEQ ID NO: 6671 - RNA, 21 nt, synthetic construct
  source 1..21: mol_type = other RNA
tagtccaacacccaccgcggg

SEQ ID NO: 6672 - RNA, 21 nt, synthetic construct
  source 1..21: mol_type = other RNA
tagtggaggtggatctggtgc

SEQ ID NO: 6673 - RNA, 21 nt, synthetic construct
  source 1..21: mol_type = other RNA
tatgacaactggctggagggc

SEQ ID NO: 6674 - RNA, 21 nt, synthetic construct
  source 1..21: mol_type = other RNA
tatgcctgggcctgctccatg

SEQ ID NO: 6675 - RNA, 21 nt, synthetic construct
  source 1..21: mol_type = other RNA
tatggcctgcaggatctgctc

SEQ ID NO: 6676 - RNA, 21 nt, synthetic construct
  source 1..21: mol_type = other RNA
tatggtgccgagcccgcaggc

SEQ ID NO: 6677 - RNA, 21 nt, synthetic construct
  source 1..21: mol_type = other RNA
tatgtcggcctgctgggccgt

SEQ ID NO: 6678 - RNA, 21 nt, synthetic construct
  source 1..21: mol_type = other RNA
tattgggctggggcagtgagc

SEQ ID NO: 6679 - RNA, 21 nt, synthetic construct
  source 1..21: mol_type = other RNA
tatttgagctgtccggcttct

SEQ ID NO: 6680 - RNA, 21 nt, synthetic construct
  source 1..21: mol_type = other RNA
tcaaagtaccctacaggagga

SEQ ID NO: 6681 - RNA, 21 nt, synthetic construct
  source 1..21: mol_type = other RNA
tcaaagtagcgcatcacgtat

SEQ ID NO: 6682 - RNA, 21 nt, synthetic construct
  source 1..21: mol_type = other RNA
tcaaatagggcgtcggccttg

SEQ ID NO: 6683 - RNA, 21 nt, synthetic construct
  source 1..21: mol_type = other RNA
tcaagatgtggctgaaaacct

SEQ ID NO: 6684 - RNA, 21 nt, synthetic construct
  source 1..21: mol_type = other RNA
tcaagcaatggcaggggacag

SEQ ID NO: 6685 - RNA, 21 nt, synthetic construct
  source 1..21: mol_type = other RNA
tcaaggacaaggagctcccgc

SEQ ID NO: 6686 - RNA, 21 nt, synthetic construct
  source 1..21: mol_type = other RNA
tcaatgctaggtactgcggga

SEQ ID NO: 6687 - RNA, 21 nt, synthetic construct
  source 1..21: mol_type = other RNA
tcacagccacagccctacttt

SEQ ID NO: 6688 - RNA, 21 nt, synthetic construct
  source 1..21: mol_type = other RNA
tcacatacccccaccctgaca

SEQ ID NO: 6689 - RNA, 21 nt, synthetic construct
  source 1..21: mol_type = other RNA
tcaccccacctgaaacgggtg

SEQ ID NO: 6690 - RNA, 21 nt, synthetic construct
  source 1..21: mol_type = other RNA
tcacccgtttcaggtggggtg

SEQ ID NO: 6691 - RNA, 21 nt, synthetic construct
  source 1..21: mol_type = other RNA
tcacgcctcctgatgcacatg

SEQ ID NO: 6692 - RNA, 21 nt, synthetic construct
  source 1..21: mol_type = other RNA
tcacgggactctatgtcggcc

SEQ ID NO: 6693 - RNA, 21 nt, synthetic construct
  source 1..21: mol_type = other RNA
tcacgtatgcctgggcctgct

SEQ ID NO: 6694 - RNA, 21 nt, synthetic construct
  source 1..21: mol_type = other RNA
tcacgtctgcggatgggaact

SEQ ID NO: 6695 - RNA, 21 nt, synthetic construct
  source 1..21: mol_type = other RNA
tcactcgtgtctcacgcggcc

SEQ ID NO: 6696 - RNA, 21 nt, synthetic construct
  source 1..21: mol_type = other RNA
tcactgcaggacacgtatggt

SEQ ID NO: 6697 - RNA, 21 nt, synthetic construct
  source 1..21: mol_type = other RNA
tcactgccccagcccaatagc

SEQ ID NO: 6698 - RNA, 21 nt, synthetic construct
  source 1..21: mol_type = other RNA
tcagagccagccacagggccc

SEQ ID NO: 6699 - RNA, 21 nt, synthetic construct
  source 1..21: mol_type = other RNA
tcagaggccctgctggagctt

SEQ ID NO: 6700 - RNA, 21 nt, synthetic construct
  source 1..21: mol_type = other RNA
tcagccacatcttgaagagac

SEQ ID NO: 6701 - RNA, 21 nt, synthetic construct
  source 1..21: mol_type = other RNA
tcagccaggcctccttgggcc

SEQ ID NO: 6702 - RNA, 21 nt, synthetic construct
  source 1..21: mol_type = other RNA
tcagcccagccagaaagcgtg

SEQ ID NO: 6703 - RNA, 21 nt, synthetic construct
  source 1..21: mol_type = other RNA
tcagctgtgtcacccgtttca

SEQ ID NO: 6704 - RNA, 21 nt, synthetic construct
  source 1..21: mol_type = other RNA
tcaggaggcgtgaggcgggtg

SEQ ID NO: 6705 - RNA, 21 nt, synthetic construct
  source 1..21: mol_type = other RNA
tcaggctctggaccaggcggc

SEQ ID NO: 6706 - RNA, 21 nt, synthetic construct
  source 1..21: mol_type = other RNA
tcagggatgacagagcaccaa

SEQ ID NO: 6707 - RNA, 21 nt, synthetic construct
  source 1..21: mol_type = other RNA
tcagggcaagagctattgggc

SEQ ID NO: 6708 - RNA, 21 nt, synthetic construct
  source 1..21: mol_type = other RNA
tcagggctctgtcttggtgct

SEQ ID NO: 6709 - RNA, 21 nt, synthetic construct
  source 1..21: mol_type = other RNA
tcaggtacctcgcaagcacct

SEQ ID NO: 6710 - RNA, 21 nt, synthetic construct
  source 1..21: mol_type = other RNA
tcaggtctcttcaagatgtgg

SEQ ID NO: 6711 - RNA, 21 nt, synthetic construct
  source 1..21: mol_type = other RNA
tcaggtggggtgaggggcttg

SEQ ID NO: 6712 - RNA, 21 nt, synthetic construct
  source 1..21: mol_type = other RNA
tcagtcacagccacagcccta

SEQ ID NO: 6713 - RNA, 21 nt, synthetic construct
  source 1..21: mol_type = other RNA
tcatagggcctcttcttcctt

SEQ ID NO: 6714 - RNA, 21 nt, synthetic construct
  source 1..21: mol_type = other RNA
tcatccctgagctctcaaagt

SEQ ID NO: 6715 - RNA, 21 nt, synthetic construct
  source 1..21: mol_type = other RNA
tcatcctagacggcttcgagg

SEQ ID NO: 6716 - RNA, 21 nt, synthetic construct
  source 1..21: mol_type = other RNA
tcatcggccgccacgagtggc

SEQ ID NO: 6717 - RNA, 21 nt, synthetic construct
  source 1..21: mol_type = other RNA
tccaacacccaccgcgggccg

SEQ ID NO: 6718 - RNA, 21 nt, synthetic construct
  source 1..21: mol_type = other RNA
tccaaggccttgcccagtaca

SEQ ID NO: 6719 - RNA, 21 nt, synthetic construct
  source 1..21: mol_type = other RNA
tccaccgaggcagccgccgat

SEQ ID NO: 6720 - RNA, 21 nt, synthetic construct
  source 1..21: mol_type = other RNA
tccaccggctctgcaaaggcc

SEQ ID NO: 6721 - RNA, 21 nt, synthetic construct
  source 1..21: mol_type = other RNA
tccacctccactaggatgcca

SEQ ID NO: 6722 - RNA, 21 nt, synthetic construct
  source 1..21: mol_type = other RNA
tccacgctcacgggactctat

SEQ ID NO: 6723 - RNA, 21 nt, synthetic construct
  source 1..21: mol_type = other RNA
tccactaggatgccatccggg

SEQ ID NO: 6724 - RNA, 21 nt, synthetic construct
  source 1..21: mol_type = other RNA
tccagaagaagctgctccgag

SEQ ID NO: 6725 - RNA, 21 nt, synthetic construct
  source 1..21: mol_type = other RNA
tccagagcctgagcaaggccg

SEQ ID NO: 6726 - RNA, 21 nt, synthetic construct
  source 1..21: mol_type = other RNA
tccagaggggcaaatgccagt

SEQ ID NO: 6727 - RNA, 21 nt, synthetic construct
  source 1..21: mol_type = other RNA
tccagcagggcctctgagagc

SEQ ID NO: 6728 - RNA, 21 nt, synthetic construct
  source 1..21: mol_type = other RNA
tccagccagttgtcatagggc

SEQ ID NO: 6729 - RNA, 21 nt, synthetic construct
  source 1..21: mol_type = other RNA
tccagcctcctcggcctcgtg

SEQ ID NO: 6730 - RNA, 21 nt, synthetic construct
  source 1..21: mol_type = other RNA
tccagcctggcctgcaccaga

SEQ ID NO: 6731 - RNA, 21 nt, synthetic construct
  source 1..21: mol_type = other RNA
tccagctcctcgaagccgtct

SEQ ID NO: 6732 - RNA, 21 nt, synthetic construct
  source 1..21: mol_type = other RNA
tccaggctcttgctgctgctc

SEQ ID NO: 6733 - RNA, 21 nt, synthetic construct
  source 1..21: mol_type = other RNA
tccagggagaagtcttggccc

SEQ ID NO: 6734 - RNA, 21 nt, synthetic construct
  source 1..21: mol_type = other RNA
tccatggagaagccggacagc

SEQ ID NO: 6735 - RNA, 21 nt, synthetic construct
  source 1..21: mol_type = other RNA
tccatggagcaggcccaggca

SEQ ID NO: 6736 - RNA, 21 nt, synthetic construct
  source 1..21: mol_type = other RNA
tcccacgaggctccccaatcc

SEQ ID NO: 6737 - RNA, 21 nt, synthetic construct
  source 1..21: mol_type = other RNA
tcccaggccagcttggccagc

SEQ ID NO: 6738 - RNA, 21 nt, synthetic construct
  source 1..21: mol_type = other RNA
tcccatccgcagacgtgagga

SEQ ID NO: 6739 - RNA, 21 nt, synthetic construct
  source 1..21: mol_type = other RNA
tccccaagcccctcaccccac

SEQ ID NO: 6740 - RNA, 21 nt, synthetic construct
  source 1..21: mol_type = other RNA
tccccaagctccagcagggcc

SEQ ID NO: 6741 - RNA, 21 nt, synthetic construct
  source 1..21: mol_type = other RNA
tccccaatccagaggggcaaa

SEQ ID NO: 6742 - RNA, 21 nt, synthetic construct
  source 1..21: mol_type = other RNA
tccccagcttcctcctgcaat

SEQ ID NO: 6743 - RNA, 21 nt, synthetic construct
  source 1..21: mol_type = other RNA
tccccagtacgactttgtctt

SEQ ID NO: 6744 - RNA, 21 nt, synthetic construct
  source 1..21: mol_type = other RNA
tcccccggacggttcaagcaa

SEQ ID NO: 6745 - RNA, 21 nt, synthetic construct
  source 1..21: mol_type = other RNA
tccccggccgcctctcttttc

SEQ ID NO: 6746 - RNA, 21 nt, synthetic construct
  source 1..21: mol_type = other RNA
tccccggctgcagccgcttca

SEQ ID NO: 6747 - RNA, 21 nt, synthetic construct
  source 1..21: mol_type = other RNA
tcccctgccattgcttgaacc

SEQ ID NO: 6748 - RNA, 21 nt, synthetic construct
  source 1..21: mol_type = other RNA
tcccgcagtacctagcattga

SEQ ID NO: 6749 - RNA, 21 nt, synthetic construct
  source 1..21: mol_type = other RNA
tcccgctccaggctcttgctg

SEQ ID NO: 6750 - RNA, 21 nt, synthetic construct
  source 1..21: mol_type = other RNA
tcccggaggagcgtcagggct

SEQ ID NO: 6751 - RNA, 21 nt, synthetic construct
  source 1..21: mol_type = other RNA
tcccgtgagcgtggagggcag

SEQ ID NO: 6752 - RNA, 21 nt, synthetic construct
  source 1..21: mol_type = other RNA
tccctgagctctcaaagtagc

SEQ ID NO: 6753 - RNA, 21 nt, synthetic construct
  source 1..21: mol_type = other RNA
tccctggacctccgcagcact

SEQ ID NO: 6754 - RNA, 21 nt, synthetic construct
  source 1..21: mol_type = other RNA
tccctgggcccacagccactc

SEQ ID NO: 6755 - RNA, 21 nt, synthetic construct
  source 1..21: mol_type = other RNA
tccgagctggccttccccagc

SEQ ID NO: 6756 - RNA, 21 nt, synthetic construct
  source 1..21: mol_type = other RNA
tccgaggttgcaccctcctcc

SEQ ID NO: 6757 - RNA, 21 nt, synthetic construct
  source 1..21: mol_type = other RNA
tccgcacgtgctgtgcaggaa

SEQ ID NO: 6758 - RNA, 21 nt, synthetic construct
  source 1..21: mol_type = other RNA
tccgcagacgtgaggacctgg

SEQ ID NO: 6759 - RNA, 21 nt, synthetic construct
  source 1..21: mol_type = other RNA
tccgcagcactggcatttgcc

SEQ ID NO: 6760 - RNA, 21 nt, synthetic construct
  source 1..21: mol_type = other RNA
tccggcttctccatggagcag

SEQ ID NO: 6761 - RNA, 21 nt, synthetic construct
  source 1..21: mol_type = other RNA
tccgggaccggccacttcttc

SEQ ID NO: 6762 - RNA, 21 nt, synthetic construct
  source 1..21: mol_type = other RNA
tccgggggatgcctatggcct

SEQ ID NO: 6763 - RNA, 21 nt, synthetic construct
  source 1..21: mol_type = other RNA
tccggggtggccagttcccgc

SEQ ID NO: 6764 - RNA, 21 nt, synthetic construct
  source 1..21: mol_type = other RNA
tcctagacggcttcgaggagc

SEQ ID NO: 6765 - RNA, 21 nt, synthetic construct
  source 1..21: mol_type = other RNA
tcctagtggaggtggatctgg

SEQ ID NO: 6766 - RNA, 21 nt, synthetic construct
  source 1..21: mol_type = other RNA
tcctcacgtctgcggatggga

SEQ ID NO: 6767 - RNA, 21 nt, synthetic construct
  source 1..21: mol_type = other RNA
tcctccccaagctccagcagg

SEQ ID NO: 6768 - RNA, 21 nt, synthetic construct
  source 1..21: mol_type = other RNA
tcctccgggaccggccacttc

SEQ ID NO: 6769 - RNA, 21 nt, synthetic construct
  source 1..21: mol_type = other RNA
tcctcctcacagcccggcccc

SEQ ID NO: 6770 - RNA, 21 nt, synthetic construct
  source 1..21: mol_type = other RNA
tcctcctgcaatgcttcctgg

SEQ ID NO: 6771 - RNA, 21 nt, synthetic construct
  source 1..21: mol_type = other RNA
tcctcctgtagggtactttga

SEQ ID NO: 6772 - RNA, 21 nt, synthetic construct
  source 1..21: mol_type = other RNA
tcctcgaagccgtctaggatg

SEQ ID NO: 6773 - RNA, 21 nt, synthetic construct
  source 1..21: mol_type = other RNA
tcctcggcctcgtgggcgcag

SEQ ID NO: 6774 - RNA, 21 nt, synthetic construct
  source 1..21: mol_type = other RNA
tcctctccagcctggcctgca

SEQ ID NO: 6775 - RNA, 21 nt, synthetic construct
  source 1..21: mol_type = other RNA
tcctgatgcacatgtactggg

SEQ ID NO: 6776 - RNA, 21 nt, synthetic construct
  source 1..21: mol_type = other RNA
tcctgcaatgcttcctggggg

SEQ ID NO: 6777 - RNA, 21 nt, synthetic construct
  source 1..21: mol_type = other RNA
tcctgcacagcacgtgcggac

SEQ ID NO: 6778 - RNA, 21 nt, synthetic construct
  source 1..21: mol_type = other RNA
tcctgcaggccataggcatcc

SEQ ID NO: 6779 - RNA, 21 nt, synthetic construct
  source 1..21: mol_type = other RNA
tcctgcagtgagcggtagaac

SEQ ID NO: 6780 - RNA, 21 nt, synthetic construct
  source 1..21: mol_type = other RNA
tcctgggggccctgtggctgg

SEQ ID NO: 6781 - RNA, 21 nt, synthetic construct
  source 1..21: mol_type = other RNA
tcctgtaccacgtgctgccaa

SEQ ID NO: 6782 - RNA, 21 nt, synthetic construct
  source 1..21: mol_type = other RNA
tcctgtagggtactttgatgt

SEQ ID NO: 6783 - RNA, 21 nt, synthetic construct
  source 1..21: mol_type = other RNA
tcctgtccaccgaggcagccg

SEQ ID NO: 6784 - RNA, 21 nt, synthetic construct
  source 1..21: mol_type = other RNA
tccttgatttcgccactcaga

SEQ ID NO: 6785 - RNA, 21 nt, synthetic construct
  source 1..21: mol_type = other RNA
tccttggcagccaacagcacc

SEQ ID NO: 6786 - RNA, 21 nt, synthetic construct
  source 1..21: mol_type = other RNA
tccttgggccagctgccgttc

SEQ ID NO: 6787 - RNA, 21 nt, synthetic construct
  source 1..21: mol_type = other RNA
tccttggggtcaatgctaggt

SEQ ID NO: 6788 - RNA, 21 nt, synthetic construct
  source 1..21: mol_type = other RNA
tccttgtccttgatttcgcca

SEQ ID NO: 6789 - RNA, 21 nt, synthetic construct
  source 1..21: mol_type = other RNA
tcgaagccgtctaggatgagc

SEQ ID NO: 6790 - RNA, 21 nt, synthetic construct
  source 1..21: mol_type = other RNA
tcgaggagctggaagcgcaag

SEQ ID NO: 6791 - RNA, 21 nt, synthetic construct
  source 1..21: mol_type = other RNA
tcgagggctgcacggcccagc

SEQ ID NO: 6792 - RNA, 21 nt, synthetic construct
  source 1..21: mol_type = other RNA
tcgcaagcaccttctgcttcc

SEQ ID NO: 6793 - RNA, 21 nt, synthetic construct
  source 1..21: mol_type = other RNA
tcgccactcagagccagccac

SEQ ID NO: 6794 - RNA, 21 nt, synthetic construct
  source 1..21: mol_type = other RNA
tcgcccaggtcctcacgtctg

SEQ ID NO: 6795 - RNA, 21 nt, synthetic construct
  source 1..21: mol_type = other RNA
tcggactctgcggcccgcggt

SEQ ID NO: 6796 - RNA, 21 nt, synthetic construct
  source 1..21: mol_type = other RNA
tcggagcagcttcttctggaa

SEQ ID NO: 6797 - RNA, 21 nt, synthetic construct
  source 1..21: mol_type = other RNA
tcggcaccatacgtgtcctgc

SEQ ID NO: 6798 - RNA, 21 nt, synthetic construct
  source 1..21: mol_type = other RNA
tcggccgccacgagtggctgt

SEQ ID NO: 6799 - RNA, 21 nt, synthetic construct
  source 1..21: mol_type = other RNA
tcggcctcgtgggcgcagtgc

SEQ ID NO: 6800 - RNA, 21 nt, synthetic construct
  source 1..21: mol_type = other RNA
tcggcctgctgggccgtgcag

SEQ ID NO: 6801 - RNA, 21 nt, synthetic construct
  source 1..21: mol_type = other RNA
tcggccttgctcaggctctgg

SEQ ID NO: 6802 - RNA, 21 nt, synthetic construct
  source 1..21: mol_type = other RNA
tcggcggctgcctcggtggac

SEQ ID NO: 6803 - RNA, 21 nt, synthetic construct
  source 1..21: mol_type = other RNA
tcgggccatcggcggctgcct

SEQ ID NO: 6804 - RNA, 21 nt, synthetic construct
  source 1..21: mol_type = other RNA
tcggtggacaggaagcagaag

SEQ ID NO: 6805 - RNA, 21 nt, synthetic construct
  source 1..21: mol_type = other RNA
tcgtactggggaagccggcca

SEQ ID NO: 6806 - RNA, 21 nt, synthetic construct
  source 1..21: mol_type = other RNA
tcgtggcggccgatgaggttt

SEQ ID NO: 6807 - RNA, 21 nt, synthetic construct
  source 1..21: mol_type = other RNA
tcgtgggactcagctgtgtca

SEQ ID NO: 6808 - RNA, 21 nt, synthetic construct
  source 1..21: mol_type = other RNA
tcgtgggcgcagtgcagcagc

SEQ ID NO: 6809 - RNA, 21 nt, synthetic construct
  source 1..21: mol_type = other RNA
tcgtgtctcacgcggccgccg

SEQ ID NO: 6810 - RNA, 21 nt, synthetic construct
  source 1..21: mol_type = other RNA
tctaccgctcactgcaggaca

SEQ ID NO: 6811 - RNA, 21 nt, synthetic construct
  source 1..21: mol_type = other RNA
tctaggatgagcagaacgcgg

SEQ ID NO: 6812 - RNA, 21 nt, synthetic construct
  source 1..21: mol_type = other RNA
tctatgtcggcctgctgggcc

SEQ ID NO: 6813 - RNA, 21 nt, synthetic construct
  source 1..21: mol_type = other RNA
tctcaaagtagcgcatcacgt

SEQ ID NO: 6814 - RNA, 21 nt, synthetic construct
  source 1..21: mol_type = other RNA
tctcacatacccccaccctga

SEQ ID NO: 6815 - RNA, 21 nt, synthetic construct
  source 1..21: mol_type = other RNA
tctcacgcggccgccggtgct

SEQ ID NO: 6816 - RNA, 21 nt, synthetic construct
  source 1..21: mol_type = other RNA
tctcagaggccctgctggagc

SEQ ID NO: 6817 - RNA, 21 nt, synthetic construct
  source 1..21: mol_type = other RNA
tctcagtcacagccacagccc

SEQ ID NO: 6818 - RNA, 21 nt, synthetic construct
  source 1..21: mol_type = other RNA
tctccagcctggcctgcacca

SEQ ID NO: 6819 - RNA, 21 nt, synthetic construct
  source 1..21: mol_type = other RNA
tctccatggagcaggcccagg

SEQ ID NO: 6820 - RNA, 21 nt, synthetic construct
  source 1..21: mol_type = other RNA
tctccctggacctccgcagca

SEQ ID NO: 6821 - RNA, 21 nt, synthetic construct
  source 1..21: mol_type = other RNA
tctccctgggcccacagccac

SEQ ID NO: 6822 - RNA, 21 nt, synthetic construct
  source 1..21: mol_type = other RNA
tctctgtcccctgccattgct

SEQ ID NO: 6823 - RNA, 21 nt, synthetic construct
  source 1..21: mol_type = other RNA
tctcttcaagatgtggctgaa

SEQ ID NO: 6824 - RNA, 21 nt, synthetic construct
  source 1..21: mol_type = other RNA
tctcttccccaagcccctcac

SEQ ID NO: 6825 - RNA, 21 nt, synthetic construct
  source 1..21: mol_type = other RNA
tctcttttctgggcacccgcc

SEQ ID NO: 6826 - RNA, 21 nt, synthetic construct
  source 1..21: mol_type = other RNA
tctgagagctggcacactgcc

SEQ ID NO: 6827 - RNA, 21 nt, synthetic construct
  source 1..21: mol_type = other RNA
tctgagtggcgaaatcaagga

SEQ ID NO: 6828 - RNA, 21 nt, synthetic construct
  source 1..21: mol_type = other RNA
tctgcaaaggccaggggcgtg

SEQ ID NO: 6829 - RNA, 21 nt, synthetic construct
  source 1..21: mol_type = other RNA
tctgcccagtccggggtggcc

SEQ ID NO: 6830 - RNA, 21 nt, synthetic construct
  source 1..21: mol_type = other RNA
tctgcggatgggaactggtcc

SEQ ID NO: 6831 - RNA, 21 nt, synthetic construct
  source 1..21: mol_type = other RNA
tctgcggcccagctcccaggc

SEQ ID NO: 6832 - RNA, 21 nt, synthetic construct
  source 1..21: mol_type = other RNA
tctgcggcccgcggtgggtgt

SEQ ID NO: 6833 - RNA, 21 nt, synthetic construct
  source 1..21: mol_type = other RNA
tctgctcatcctagacggctt

SEQ ID NO: 6834 - RNA, 21 nt, synthetic construct
  source 1..21: mol_type = other RNA
tctgctcttctccctgggccc

SEQ ID NO: 6835 - RNA, 21 nt, synthetic construct
  source 1..21: mol_type = other RNA
tctgcttcctgtccaccgagg

SEQ ID NO: 6836 - RNA, 21 nt, synthetic construct
  source 1..21: mol_type = other RNA
tctggaaaaggccggccagca

SEQ ID NO: 6837 - RNA, 21 nt, synthetic construct
  source 1..21: mol_type = other RNA
tctggattggggagcctcgtg

SEQ ID NO: 6838 - RNA, 21 nt, synthetic construct
  source 1..21: mol_type = other RNA
tctggctgggctgatcttcca

SEQ ID NO: 6839 - RNA, 21 nt, synthetic construct
  source 1..21: mol_type = other RNA
tctgggcacccgcctcacgcc

SEQ ID NO: 6840 - RNA, 21 nt, synthetic construct
  source 1..21: mol_type = other RNA
tctggtgcaggccaggctgga

SEQ ID NO: 6841 - RNA, 21 nt, synthetic construct
  source 1..21: mol_type = other RNA
tctgtcatccctgagctctca

SEQ ID NO: 6842 - RNA, 21 nt, synthetic construct
  source 1..21: mol_type = other RNA
tctgtcccctgccattgcttg

SEQ ID NO: 6843 - RNA, 21 nt, synthetic construct
  source 1..21: mol_type = other RNA
tctgtcttggtgctctgtcat

SEQ ID NO: 6844 - RNA, 21 nt, synthetic construct
  source 1..21: mol_type = other RNA
tcttcaagatgtggctgaaaa

SEQ ID NO: 6845 - RNA, 21 nt, synthetic construct
  source 1..21: mol_type = other RNA
tcttccagcctcccgcccgct

SEQ ID NO: 6846 - RNA, 21 nt, synthetic construct
  source 1..21: mol_type = other RNA
tcttccccaagcccctcaccc

SEQ ID NO: 6847 - RNA, 21 nt, synthetic construct
  source 1..21: mol_type = other RNA
tcttccttggggtcaatgcta

SEQ ID NO: 6848 - RNA, 21 nt, synthetic construct
  source 1..21: mol_type = other RNA
tcttctcagtcacagccacag

SEQ ID NO: 6849 - RNA, 21 nt, synthetic construct
  source 1..21: mol_type = other RNA
tcttctccctgggcccacagc

SEQ ID NO: 6850 - RNA, 21 nt, synthetic construct
  source 1..21: mol_type = other RNA
tcttctctgtcccctgccatt

SEQ ID NO: 6851 - RNA, 21 nt, synthetic construct
  source 1..21: mol_type = other RNA
tcttctggaaaaggccggcca

SEQ ID NO: 6852 - RNA, 21 nt, synthetic construct
  source 1..21: mol_type = other RNA
tcttcttccttggggtcaatg

SEQ ID NO: 6853 - RNA, 21 nt, synthetic construct
  source 1..21: mol_type = other RNA
tcttgaagagacctgaccgcg

SEQ ID NO: 6854 - RNA, 21 nt, synthetic construct
  source 1..21: mol_type = other RNA
tcttgccctgaccagctttgc

SEQ ID NO: 6855 - RNA, 21 nt, synthetic construct
  source 1..21: mol_type = other RNA
tcttgcgcttccagctcctcg

SEQ ID NO: 6856 - RNA, 21 nt, synthetic construct
  source 1..21: mol_type = other RNA
tcttgctgctgctcctctcca

SEQ ID NO: 6857 - RNA, 21 nt, synthetic construct
  source 1..21: mol_type = other RNA
tcttggcccgccgcctccaag

SEQ ID NO: 6858 - RNA, 21 nt, synthetic construct
  source 1..21: mol_type = other RNA
tcttggtgctctgtcatccct

SEQ ID NO: 6859 - RNA, 21 nt, synthetic construct
  source 1..21: mol_type = other RNA
tcttttctgggcacccgcctc

SEQ ID NO: 6860 - RNA, 21 nt, synthetic construct
  source 1..21: mol_type = other RNA
tgaaaacctcatcggccgcca

SEQ ID NO: 6861 - RNA, 21 nt, synthetic construct
  source 1..21: mol_type = other RNA
tgaaacgggtgacacagctga

SEQ ID NO: 6862 - RNA, 21 nt, synthetic construct
  source 1..21: mol_type = other RNA
tgaaccgtccgggggatgcct

SEQ ID NO: 6863 - RNA, 21 nt, synthetic construct
  source 1..21: mol_type = other RNA
tgaagagacctgaccgcgttc

SEQ ID NO: 6864 - RNA, 21 nt, synthetic construct
  source 1..21: mol_type = other RNA
tgaagcggctgcagccgggga

SEQ ID NO: 6865 - RNA, 21 nt, synthetic construct
  source 1..21: mol_type = other RNA
tgacaactggctggagggcgt

SEQ ID NO: 6866 - RNA, 21 nt, synthetic construct
  source 1..21: mol_type = other RNA
tgacacagctgagtcccacga

SEQ ID NO: 6867 - RNA, 21 nt, synthetic construct
  source 1..21: mol_type = other RNA
tgacacgcccctggcctttgc

SEQ ID NO: 6868 - RNA, 21 nt, synthetic construct
  source 1..21: mol_type = other RNA
tgacagagcaccaagacagag

SEQ ID NO: 6869 - RNA, 21 nt, synthetic construct
  source 1..21: mol_type = other RNA
tgaccagctttgcccagcaca

SEQ ID NO: 6870 - RNA, 21 nt, synthetic construct
  source 1..21: mol_type = other RNA
tgaccccaaggaagaagaggc

SEQ ID NO: 6871 - RNA, 21 nt, synthetic construct
  source 1..21: mol_type = other RNA
tgaccgcgttctgctcatcct

SEQ ID NO: 6872 - RNA, 21 nt, synthetic construct
  source 1..21: mol_type = other RNA
tgacgctcctccgggaccggc

SEQ ID NO: 6873 - RNA, 21 nt, synthetic construct
  source 1..21: mol_type = other RNA
tgactgagaagaagtggccgg

SEQ ID NO: 6874 - RNA, 21 nt, synthetic construct
  source 1..21: mol_type = other RNA
tgagaagaagtggccggtccc

SEQ ID NO: 6875 - RNA, 21 nt, synthetic construct
  source 1..21: mol_type = other RNA
tgagacacgagtgattgctgt

SEQ ID NO: 6876 - RNA, 21 nt, synthetic construct
  source 1..21: mol_type = other RNA
tgagagctcagggatgacaga

SEQ ID NO: 6877 - RNA, 21 nt, synthetic construct
  source 1..21: mol_type = other RNA
tgagagctggcacactgcccg

SEQ ID NO: 6878 - RNA, 21 nt, synthetic construct
  source 1..21: mol_type = other RNA
tgagcaaggccgacgccctat

SEQ ID NO: 6879 - RNA, 21 nt, synthetic construct
  source 1..21: mol_type = other RNA
tgagcagaacgcggtcaggtc

SEQ ID NO: 6880 - RNA, 21 nt, synthetic construct
  source 1..21: mol_type = other RNA
tgagccgggcctgggcttgtg

SEQ ID NO: 6881 - RNA, 21 nt, synthetic construct
  source 1..21: mol_type = other RNA
tgagcggtagaactgctccac

SEQ ID NO: 6882 - RNA, 21 nt, synthetic construct
  source 1..21: mol_type = other RNA
tgagcgtggagggcagcttgg

SEQ ID NO: 6883 - RNA, 21 nt, synthetic construct
  source 1..21: mol_type = other RNA
tgagctctcaaagtagcgcat

SEQ ID NO: 6884 - RNA, 21 nt, synthetic construct
  source 1..21: mol_type = other RNA
tgagctgtccggcttctccat

SEQ ID NO: 6885 - RNA, 21 nt, synthetic construct
  source 1..21: mol_type = other RNA
tgaggacctgggcgatggcca

SEQ ID NO: 6886 - RNA, 21 nt, synthetic construct
  source 1..21: mol_type = other RNA
tgaggaggagggtgcaacctc

SEQ ID NO: 6887 - RNA, 21 nt, synthetic construct
  source 1..21: mol_type = other RNA
tgaggcgggtgcccagaaaag

SEQ ID NO: 6888 - RNA, 21 nt, synthetic construct
  source 1..21: mol_type = other RNA
tgaggggcttggggaagagac

SEQ ID NO: 6889 - RNA, 21 nt, synthetic construct
  source 1..21: mol_type = other RNA
tgaggtgctgttggctgccaa

SEQ ID NO: 6890 - RNA, 21 nt, synthetic construct
  source 1..21: mol_type = other RNA
tgaggttttcagccacatctt

SEQ ID NO: 6891 - RNA, 21 nt, synthetic construct
  source 1..21: mol_type = other RNA
tgagtcccacgaggctcccca

SEQ ID NO: 6892 - RNA, 21 nt, synthetic construct
  source 1..21: mol_type = other RNA
tgagtggcgaaatcaaggaca

SEQ ID NO: 6893 - RNA, 21 nt, synthetic construct
  source 1..21: mol_type = other RNA
tgatcttccagcctcccgccc

SEQ ID NO: 6894 - RNA, 21 nt, synthetic construct
  source 1..21: mol_type = other RNA
tgatgcacatgtactgggcaa

SEQ ID NO: 6895 - RNA, 21 nt, synthetic construct
  source 1..21: mol_type = other RNA
tgatgcgctactttgagagct

SEQ ID NO: 6896 - RNA, 21 nt, synthetic construct
  source 1..21: mol_type = other RNA
tgatgtctgcggcccagctcc

SEQ ID NO: 6897 - RNA, 21 nt, synthetic construct
  source 1..21: mol_type = other RNA
tgattgctgtgctgggcaaag

SEQ ID NO: 6898 - RNA, 21 nt, synthetic construct
  source 1..21: mol_type = other RNA
tgatttcgccactcagagcca

SEQ ID NO: 6899 - RNA, 21 nt, synthetic construct
  source 1..21: mol_type = other RNA
tgcaaaggccaggggcgtgtc

SEQ ID NO: 6900 - RNA, 21 nt, synthetic construct
  source 1..21: mol_type = other RNA
tgcaacctcggagcagcttct

SEQ ID NO: 6901 - RNA, 21 nt, synthetic construct
  source 1..21: mol_type = other RNA
tgcaatgcttcctgggggccc

SEQ ID NO: 6902 - RNA, 21 nt, synthetic construct
  source 1..21: mol_type = other RNA
tgcacagcacgtgcggaccgg

SEQ ID NO: 6903 - RNA, 21 nt, synthetic construct
  source 1..21: mol_type = other RNA
tgcacatgtactgggcaaggc

SEQ ID NO: 6904 - RNA, 21 nt, synthetic construct
  source 1..21: mol_type = other RNA
tgcaccagatccacctccact

SEQ ID NO: 6905 - RNA, 21 nt, synthetic construct
  source 1..21: mol_type = other RNA
tgcaccctcctcctcacagcc

SEQ ID NO: 6906 - RNA, 21 nt, synthetic construct
  source 1..21: mol_type = other RNA
tgcacggcccagcaggccgac

SEQ ID NO: 6907 - RNA, 21 nt, synthetic construct
  source 1..21: mol_type = other RNA
tgcactgcgcccacgaggccg

SEQ ID NO: 6908 - RNA, 21 nt, synthetic construct
  source 1..21: mol_type = other RNA
tgcagagccggtggagcagtt

SEQ ID NO: 6909 - RNA, 21 nt, synthetic construct
  source 1..21: mol_type = other RNA
tgcagcagctccagcagctgc

SEQ ID NO: 6910 - RNA, 21 nt, synthetic construct
  source 1..21: mol_type = other RNA
tgcagccctcgacagcccccc

SEQ ID NO: 6911 - RNA, 21 nt, synthetic construct
  source 1..21: mol_type = other RNA
tgcagccgcttcaggtacctc

SEQ ID NO: 6912 - RNA, 21 nt, synthetic construct
  source 1..21: mol_type = other RNA
tgcagccggggacactgcggg

SEQ ID NO: 6913 - RNA, 21 nt, synthetic construct
  source 1..21: mol_type = other RNA
tgcaggaagccatcttgcgct

SEQ ID NO: 6914 - RNA, 21 nt, synthetic construct
  source 1..21: mol_type = other RNA
tgcaggacacgtatggtgccg

SEQ ID NO: 6915 - RNA, 21 nt, synthetic construct
  source 1..21: mol_type = other RNA
tgcaggaggaagctggggaag

SEQ ID NO: 6916 - RNA, 21 nt, synthetic construct
  source 1..21: mol_type = other RNA
tgcaggatctgctcttctccc

SEQ ID NO: 6917 - RNA, 21 nt, synthetic construct
  source 1..21: mol_type = other RNA
tgcaggccaggctggagagga

SEQ ID NO: 6918 - RNA, 21 nt, synthetic construct
  source 1..21: mol_type = other RNA
tgcaggccataggcatccccc

SEQ ID NO: 6919 - RNA, 21 nt, synthetic construct
  source 1..21: mol_type = other RNA
tgcagtgagcggtagaactgc

SEQ ID NO: 6920 - RNA, 21 nt, synthetic construct
  source 1..21: mol_type = other RNA
tgcatcaggaggcgtgaggcg

SEQ ID NO: 6921 - RNA, 21 nt, synthetic construct
  source 1..21: mol_type = other RNA
tgccaaattccagcctcctcg

SEQ ID NO: 6922 - RNA, 21 nt, synthetic construct
  source 1..21: mol_type = other RNA
tgccaaggagcaccggcggcc

SEQ ID NO: 6923 - RNA, 21 nt, synthetic construct
  source 1..21: mol_type = other RNA
tgccacgctttctggctgggc

SEQ ID NO: 6924 - RNA, 21 nt, synthetic construct
  source 1..21: mol_type = other RNA
tgccagctctcagaggccctg

SEQ ID NO: 6925 - RNA, 21 nt, synthetic construct
  source 1..21: mol_type = other RNA
tgccagtgctgcggaggtcca

SEQ ID NO: 6926 - RNA, 21 nt, synthetic construct
  source 1..21: mol_type = other RNA
tgccatccgggcctgcgggct

SEQ ID NO: 6927 - RNA, 21 nt, synthetic construct
  source 1..21: mol_type = other RNA
tgccattgcttgaaccgtccg

SEQ ID NO: 6928 - RNA, 21 nt, synthetic construct
  source 1..21: mol_type = other RNA
tgcccaacacaaggatgtctc

SEQ ID NO: 6929 - RNA, 21 nt, synthetic construct
  source 1..21: mol_type = other RNA
tgcccagaaaagagaggcggc

SEQ ID NO: 6930 - RNA, 21 nt, synthetic construct
  source 1..21: mol_type = other RNA
tgcccagcacagcaatcactc

SEQ ID NO: 6931 - RNA, 21 nt, synthetic construct
  source 1..21: mol_type = other RNA
tgcccagtacatgtgcatcag

SEQ ID NO: 6932 - RNA, 21 nt, synthetic construct
  source 1..21: mol_type = other RNA
tgcccagtccggggtggccag

SEQ ID NO: 6933 - RNA, 21 nt, synthetic construct
  source 1..21: mol_type = other RNA
tgccccagcccaatagctctt

SEQ ID NO: 6934 - RNA, 21 nt, synthetic construct
  source 1..21: mol_type = other RNA
tgcccctctggattggggagc

SEQ ID NO: 6935 - RNA, 21 nt, synthetic construct
  source 1..21: mol_type = other RNA
tgcccggcacaaagtagggct

SEQ ID NO: 6936 - RNA, 21 nt, synthetic construct
  source 1..21: mol_type = other RNA
tgccctccacgctcacgggac

SEQ ID NO: 6937 - RNA, 21 nt, synthetic construct
  source 1..21: mol_type = other RNA
tgccctgaccagctttgccca

SEQ ID NO: 6938 - RNA, 21 nt, synthetic construct
  source 1..21: mol_type = other RNA
tgccgggcagtgtgccagctc

SEQ ID NO: 6939 - RNA, 21 nt, synthetic construct
  source 1..21: mol_type = other RNA
tgccggtccgcacgtgctgtg

SEQ ID NO: 6940 - RNA, 21 nt, synthetic construct
  source 1..21: mol_type = other RNA
tgccgttctgcccagtccggg

SEQ ID NO: 6941 - RNA, 21 nt, synthetic construct
  source 1..21: mol_type = other RNA
tgcctatggcctgcaggatct

SEQ ID NO: 6942 - RNA, 21 nt, synthetic construct
  source 1..21: mol_type = other RNA
tgcctcggtggacaggaagca

SEQ ID NO: 6943 - RNA, 21 nt, synthetic construct
  source 1..21: mol_type = other RNA
tgcctctcacatacccccacc

SEQ ID NO: 6944 - RNA, 21 nt, synthetic construct
  source 1..21: mol_type = other RNA
tgcctgggagccctactcggg

SEQ ID NO: 6945 - RNA, 21 nt, synthetic construct
  source 1..21: mol_type = other RNA
tgcctgggcctgctccatgga

SEQ ID NO: 6946 - RNA, 21 nt, synthetic construct
  source 1..21: mol_type = other RNA
tgcgaggtacctgaagcggct

SEQ ID NO: 6947 - RNA, 21 nt, synthetic construct
  source 1..21: mol_type = other RNA
tgcgcccacgaggccgaggag

SEQ ID NO: 6948 - RNA, 21 nt, synthetic construct
  source 1..21: mol_type = other RNA
tgcgctactttgagagctcag

SEQ ID NO: 6949 - RNA, 21 nt, synthetic construct
  source 1..21: mol_type = other RNA
tgcgcttccagctcctcgaag

SEQ ID NO: 6950 - RNA, 21 nt, synthetic construct
  source 1..21: mol_type = other RNA
tgcggaggtccagggagaagt

SEQ ID NO: 6951 - RNA, 21 nt, synthetic construct
  source 1..21: mol_type = other RNA
tgcggatgggaactggtcctc

SEQ ID NO: 6952 - RNA, 21 nt, synthetic construct
  source 1..21: mol_type = other RNA
tgcggcccagctcccaggcca

SEQ ID NO: 6953 - RNA, 21 nt, synthetic construct
  source 1..21: mol_type = other RNA
tgcggcccgcggtgggtgttg

SEQ ID NO: 6954 - RNA, 21 nt, synthetic construct
  source 1..21: mol_type = other RNA
tgcgggagctccttgtccttg

SEQ ID NO: 6955 - RNA, 21 nt, synthetic construct
  source 1..21: mol_type = other RNA
tgcgggctcggcaccatacgt

SEQ ID NO: 6956 - RNA, 21 nt, synthetic construct
  source 1..21: mol_type = other RNA
tgctaggtactgcgggagctc

SEQ ID NO: 6957 - RNA, 21 nt, synthetic construct
  source 1..21: mol_type = other RNA
tgctcaggctctggaccaggc

SEQ ID NO: 6958 - RNA, 21 nt, synthetic construct
  source 1..21: mol_type = other RNA
tgctcatcctagacggcttcg

SEQ ID NO: 6959 - RNA, 21 nt, synthetic construct
  source 1..21: mol_type = other RNA
tgctccaccggctctgcaaag

SEQ ID NO: 6960 - RNA, 21 nt, synthetic construct
  source 1..21: mol_type = other RNA
tgctccatggagaagccggac

SEQ ID NO: 6961 - RNA, 21 nt, synthetic construct
  source 1..21: mol_type = other RNA
tgctccctccgggggctgctg

SEQ ID NO: 6962 - RNA, 21 nt, synthetic construct
  source 1..21: mol_type = other RNA
tgctccgaggttgcaccctcc

SEQ ID NO: 6963 - RNA, 21 nt, synthetic construct
  source 1..21: mol_type = other RNA
tgctcctctccagcctggcct

SEQ ID NO: 6964 - RNA, 21 nt, synthetic construct
  source 1..21: mol_type = other RNA
tgctccttggcagccaacagc

SEQ ID NO: 6965 - RNA, 21 nt, synthetic construct
  source 1..21: mol_type = other RNA
tgctctgtcatccctgagctc

SEQ ID NO: 6966 - RNA, 21 nt, synthetic construct
  source 1..21: mol_type = other RNA
tgctcttctccctgggcccac

SEQ ID NO: 6967 - RNA, 21 nt, synthetic construct
  source 1..21: mol_type = other RNA
tgctgcactgcgcccacgagg

SEQ ID NO: 6968 - RNA, 21 nt, synthetic construct
  source 1..21: mol_type = other RNA
tgctgccaaattccagcctcc

SEQ ID NO: 6969 - RNA, 21 nt, synthetic construct
  source 1..21: mol_type = other RNA
tgctgcggaggtccagggaga

SEQ ID NO: 6970 - RNA, 21 nt, synthetic construct
  source 1..21: mol_type = other RNA
tgctgctcctctccagcctgg

SEQ ID NO: 6971 - RNA, 21 nt, synthetic construct
  source 1..21: mol_type = other RNA
tgctgctgctcctctccagcc

SEQ ID NO: 6972 - RNA, 21 nt, synthetic construct
  source 1..21: mol_type = other RNA
tgctggagctgctgcactgcg

SEQ ID NO: 6973 - RNA, 21 nt, synthetic construct
  source 1..21: mol_type = other RNA
tgctggagcttggggaggacg

SEQ ID NO: 6974 - RNA, 21 nt, synthetic construct
  source 1..21: mol_type = other RNA
tgctggccggccttttccaga

SEQ ID NO: 6975 - RNA, 21 nt, synthetic construct
  source 1..21: mol_type = other RNA
tgctgggcaaagctggtcagg

SEQ ID NO: 6976 - RNA, 21 nt, synthetic construct
  source 1..21: mol_type = other RNA
tgctgggccgtgcagccctcg

SEQ ID NO: 6977 - RNA, 21 nt, synthetic construct
  source 1..21: mol_type = other RNA
tgctgtgcaggaagccatctt

SEQ ID NO: 6978 - RNA, 21 nt, synthetic construct
  source 1..21: mol_type = other RNA
tgctgtgctgggcaaagctgg

SEQ ID NO: 6979 - RNA, 21 nt, synthetic construct
  source 1..21: mol_type = other RNA
tgctgttggctgccaaggagc

SEQ ID NO: 6980 - RNA, 21 nt, synthetic construct
  source 1..21: mol_type = other RNA
tgcttcctgggggccctgtgg

SEQ ID NO: 6981 - RNA, 21 nt, synthetic construct
  source 1..21: mol_type = other RNA
tgcttcctgtccaccgaggca

SEQ ID NO: 6982 - RNA, 21 nt, synthetic construct
  source 1..21: mol_type = other RNA
tgcttgaaccgtccgggggat

SEQ ID NO: 6983 - RNA, 21 nt, synthetic construct
  source 1..21: mol_type = other RNA
tgcttgcgaggtacctgaagc

SEQ ID NO: 6984 - RNA, 21 nt, synthetic construct
  source 1..21: mol_type = other RNA
tggaaaaggccggccagcagc

SEQ ID NO: 6985 - RNA, 21 nt, synthetic construct
  source 1..21: mol_type = other RNA
tggaagatcagcccagccaga

SEQ ID NO: 6986 - RNA, 21 nt, synthetic construct
  source 1..21: mol_type = other RNA
tggaagcgcaagatggcttcc

SEQ ID NO: 6987 - RNA, 21 nt, synthetic construct
  source 1..21: mol_type = other RNA
tggaatttggcagcacgtggt

SEQ ID NO: 6988 - RNA, 21 nt, synthetic construct
  source 1..21: mol_type = other RNA
tggacaggaagcagaaggtgc

SEQ ID NO: 6989 - RNA, 21 nt, synthetic construct
  source 1..21: mol_type = other RNA
tggacctccgcagcactggca

SEQ ID NO: 6990 - RNA, 21 nt, synthetic construct
  source 1..21: mol_type = other RNA
tggactaagcctttggccatc

SEQ ID NO: 6991 - RNA, 21 nt, synthetic construct
  source 1..21: mol_type = other RNA
tggagaagccggacagctcaa

SEQ ID NO: 6992 - RNA, 21 nt, synthetic construct
  source 1..21: mol_type = other RNA
tggagaggagcagcagcaaga

SEQ ID NO: 6993 - RNA, 21 nt, synthetic construct
  source 1..21: mol_type = other RNA
tggagcaggcccaggcatacg

SEQ ID NO: 6994 - RNA, 21 nt, synthetic construct
  source 1..21: mol_type = other RNA
tggagcagttctaccgctcac

SEQ ID NO: 6995 - RNA, 21 nt, synthetic construct
  source 1..21: mol_type = other RNA
tggagcgggaactggccaccc

SEQ ID NO: 6996 - RNA, 21 nt, synthetic construct
  source 1..21: mol_type = other RNA
tggagctgctgcactgcgccc

SEQ ID NO: 6997 - RNA, 21 nt, synthetic construct
  source 1..21: mol_type = other RNA
tggagcttggggaggacgcca

SEQ ID NO: 6998 - RNA, 21 nt, synthetic construct
  source 1..21: mol_type = other RNA
tggaggcggcgggccaagact

SEQ ID NO: 6999 - RNA, 21 nt, synthetic construct
  source 1..21: mol_type = other RNA
tggagggcagcttggcgtcct

SEQ ID NO: 7000 - RNA, 21 nt, synthetic construct
  source 1..21: mol_type = other RNA
tggagggcgtgccacgctttc

SEQ ID NO: 7001 - RNA, 21 nt, synthetic construct
  source 1..21: mol_type = other RNA
tggaggtggatctggtgcagg

SEQ ID NO: 7002 - RNA, 21 nt, synthetic construct
  source 1..21: mol_type = other RNA
tggatctggtgcaggccaggc

SEQ ID NO: 7003 - RNA, 21 nt, synthetic construct
  source 1..21: mol_type = other RNA
tggattggggagcctcgtggg

SEQ ID NO: 7004 - RNA, 21 nt, synthetic construct
  source 1..21: mol_type = other RNA
tggcacactgcccggcacaaa

SEQ ID NO: 7005 - RNA, 21 nt, synthetic construct
  source 1..21: mol_type = other RNA
tggcacgccctccagccagtt

SEQ ID NO: 7006 - RNA, 21 nt, synthetic construct
  source 1..21: mol_type = other RNA
tggcagagctggccaagctgg

SEQ ID NO: 7007 - RNA, 21 nt, synthetic construct
  source 1..21: mol_type = other RNA
tggcagcacgtggtacaggag

SEQ ID NO: 7008 - RNA, 21 nt, synthetic construct
  source 1..21: mol_type = other RNA
tggcagccaacagcacctcag

SEQ ID NO: 7009 - RNA, 21 nt, synthetic construct
  source 1..21: mol_type = other RNA
tggcaggggacagagaagaca

SEQ ID NO: 7010 - RNA, 21 nt, synthetic construct
  source 1..21: mol_type = other RNA
tggcatcctagtggaggtgga

SEQ ID NO: 7011 - RNA, 21 nt, synthetic construct
  source 1..21: mol_type = other RNA
tggcatttgcccctctggatt

SEQ ID NO: 7012 - RNA, 21 nt, synthetic construct
  source 1..21: mol_type = other RNA
tggccaaaggcttagtccaac

SEQ ID NO: 7013 - RNA, 21 nt, synthetic construct
  source 1..21: mol_type = other RNA
tggccaagctggcctgggagc

SEQ ID NO: 7014 - RNA, 21 nt, synthetic construct
  source 1..21: mol_type = other RNA
tggccaccccggactgggcag

SEQ ID NO: 7015 - RNA, 21 nt, synthetic construct
  source 1..21: mol_type = other RNA
tggccagctctgccagggccc

SEQ ID NO: 7016 - RNA, 21 nt, synthetic construct
  source 1..21: mol_type = other RNA
tggccagttcccgctccaggc

SEQ ID NO: 7017 - RNA, 21 nt, synthetic construct
  source 1..21: mol_type = other RNA
tggccatcgcccaggtcctca

SEQ ID NO: 7018 - RNA, 21 nt, synthetic construct
  source 1..21: mol_type = other RNA
tggcccaaggaggcctggctg

SEQ ID NO: 7019 - RNA, 21 nt, synthetic construct
  source 1..21: mol_type = other RNA
tggcccgagtagggctcccag

SEQ ID NO: 7020 - RNA, 21 nt, synthetic construct
  source 1..21: mol_type = other RNA
tggccggccttttccagaaga

SEQ ID NO: 7021 - RNA, 21 nt, synthetic construct
  source 1..21: mol_type = other RNA
tggccggcttccccagtacga

SEQ ID NO: 7022 - RNA, 21 nt, synthetic construct
  source 1..21: mol_type = other RNA
tggccggtcccggaggagcgt

SEQ ID NO: 7023 - RNA, 21 nt, synthetic construct
  source 1..21: mol_type = other RNA
tggcctgcaccagatccacct

SEQ ID NO: 7024 - RNA, 21 nt, synthetic construct
  source 1..21: mol_type = other RNA
tggcctgcaggatctgctctt

SEQ ID NO: 7025 - RNA, 21 nt, synthetic construct
  source 1..21: mol_type = other RNA
tggcctgggagctgggccgca

SEQ ID NO: 7026 - RNA, 21 nt, synthetic construct
  source 1..21: mol_type = other RNA
tggccttccccagcttcctcc

SEQ ID NO: 7027 - RNA, 21 nt, synthetic construct
  source 1..21: mol_type = other RNA
tggcctttgcagagccggtgg

SEQ ID NO: 7028 - RNA, 21 nt, synthetic construct
  source 1..21: mol_type = other RNA
tggcgaaatcaaggacaagga

SEQ ID NO: 7029 - RNA, 21 nt, synthetic construct
  source 1..21: mol_type = other RNA
tggcggccgatgaggttttca

SEQ ID NO: 7030 - RNA, 21 nt, synthetic construct
  source 1..21: mol_type = other RNA
tggcgtcctccccaagctcca

SEQ ID NO: 7031 - RNA, 21 nt, synthetic construct
  source 1..21: mol_type = other RNA
tggctctgagtggcgaaatca

SEQ ID NO: 7032 - RNA, 21 nt, synthetic construct
  source 1..21: mol_type = other RNA
tggctgaaaacctcatcggcc

SEQ ID NO: 7033 - RNA, 21 nt, synthetic construct
  source 1..21: mol_type = other RNA
tggctgaggtgctgttggctg

SEQ ID NO: 7034 - RNA, 21 nt, synthetic construct
  source 1..21: mol_type = other RNA
tggctgccaaggagcaccggc

SEQ ID NO: 7035 - RNA, 21 nt, synthetic construct
  source 1..21: mol_type = other RNA
tggctggagggcgtgccacgc

SEQ ID NO: 7036 - RNA, 21 nt, synthetic construct
  source 1..21: mol_type = other RNA
tggctggctctgagtggcgaa

SEQ ID NO: 7037 - RNA, 21 nt, synthetic construct
  source 1..21: mol_type = other RNA
tggctgggctgatcttccagc

SEQ ID NO: 7038 - RNA, 21 nt, synthetic construct
  source 1..21: mol_type = other RNA
tggctgtgactgagaagaagt

SEQ ID NO: 7039 - RNA, 21 nt, synthetic construct
  source 1..21: mol_type = other RNA
tggctgtgggcccagggagaa

SEQ ID NO: 7040 - RNA, 21 nt, synthetic construct
  source 1..21: mol_type = other RNA
tggcttcctgcacagcacgtg

SEQ ID NO: 7041 - RNA, 21 nt, synthetic construct
  source 1..21: mol_type = other RNA
tgggaactggtcctcctgtag

SEQ ID NO: 7042 - RNA, 21 nt, synthetic construct
  source 1..21: mol_type = other RNA
tgggactcagctgtgtcaccc

SEQ ID NO: 7043 - RNA, 21 nt, synthetic construct
  source 1..21: mol_type = other RNA
tgggagccctactcgggccat

SEQ ID NO: 7044 - RNA, 21 nt, synthetic construct
  source 1..21: mol_type = other RNA
tgggagctgggccgcagacat

SEQ ID NO: 7045 - RNA, 21 nt, synthetic construct
  source 1..21: mol_type = other RNA
tgggcaaagctggtcagggca

SEQ ID NO: 7046 - RNA, 21 nt, synthetic construct
  source 1..21: mol_type = other RNA
tgggcaaggccttggaggcgg

SEQ ID NO: 7047 - RNA, 21 nt, synthetic construct
  source 1..21: mol_type = other RNA
tgggcacccgcctcacgcctc

SEQ ID NO: 7048 - RNA, 21 nt, synthetic construct
  source 1..21: mol_type = other RNA
tgggcagaacggcagctggcc

SEQ ID NO: 7049 - RNA, 21 nt, synthetic construct
  source 1..21: mol_type = other RNA
tgggccagctgccgttctgcc

SEQ ID NO: 7050 - RNA, 21 nt, synthetic construct
  source 1..21: mol_type = other RNA
tgggcccacagccactcgtgg

SEQ ID NO: 7051 - RNA, 21 nt, synthetic construct
  source 1..21: mol_type = other RNA
tgggcccagggagaagagcag

SEQ ID NO: 7052 - RNA, 21 nt, synthetic construct
  source 1..21: mol_type = other RNA
tgggccgcagacatcaaagta

SEQ ID NO: 7053 - RNA, 21 nt, synthetic construct
  source 1..21: mol_type = other RNA
tgggccgtgcagccctcgaca

SEQ ID NO: 7054 - RNA, 21 nt, synthetic construct
  source 1..21: mol_type = other RNA
tgggcctgctccatggagaag

SEQ ID NO: 7055 - RNA, 21 nt, synthetic construct
  source 1..21: mol_type = other RNA
tgggcgatggccaaaggctta

SEQ ID NO: 7056 - RNA, 21 nt, synthetic construct
  source 1..21: mol_type = other RNA
tgggcgcagtgcagcagctcc

SEQ ID NO: 7057 - RNA, 21 nt, synthetic construct
  source 1..21: mol_type = other RNA
tgggctgatcttccagcctcc

SEQ ID NO: 7058 - RNA, 21 nt, synthetic construct
  source 1..21: mol_type = other RNA
tgggctggggcagtgagccgg

SEQ ID NO: 7059 - RNA, 21 nt, synthetic construct
  source 1..21: mol_type = other RNA
tgggcttgtggccggcttccc

SEQ ID NO: 7060 - RNA, 21 nt, synthetic construct
  source 1..21: mol_type = other RNA
tggggaagagacatccttgtg

SEQ ID NO: 7061 - RNA, 21 nt, synthetic construct
  source 1..21: mol_type = other RNA
tggggaagccggccacaagcc

SEQ ID NO: 7062 - RNA, 21 nt, synthetic construct
  source 1..21: mol_type = other RNA
tggggaaggccagctcggact

SEQ ID NO: 7063 - RNA, 21 nt, synthetic construct
  source 1..21: mol_type = other RNA
tggggagcctcgtgggactca

SEQ ID NO: 7064 - RNA, 21 nt, synthetic construct
  source 1..21: mol_type = other RNA
tggggaggacgccaagctgcc

SEQ ID NO: 7065 - RNA, 21 nt, synthetic construct
  source 1..21: mol_type = other RNA
tggggcagtgagccgggcctg

SEQ ID NO: 7066 - RNA, 21 nt, synthetic construct
  source 1..21: mol_type = other RNA
tgggggccctgtggctggctc

SEQ ID NO: 7067 - RNA, 21 nt, synthetic construct
  source 1..21: mol_type = other RNA
tggggtcaatgctaggtactg

SEQ ID NO: 7068 - RNA, 21 nt, synthetic construct
  source 1..21: mol_type = other RNA
tggggtgaggggcttggggaa

SEQ ID NO: 7069 - RNA, 21 nt, synthetic construct
  source 1..21: mol_type = other RNA
tgggtgttggactaagccttt

SEQ ID NO: 7070 - RNA, 21 nt, synthetic construct
  source 1..21: mol_type = other RNA
tggtacaggagctccccggcc

SEQ ID NO: 7071 - RNA, 21 nt, synthetic construct
  source 1..21: mol_type = other RNA
tggtcagggcaagagctattg

SEQ ID NO: 7072 - RNA, 21 nt, synthetic construct
  source 1..21: mol_type = other RNA
tggtccagagcctgagcaagg

SEQ ID NO: 7073 - RNA, 21 nt, synthetic construct
  source 1..21: mol_type = other RNA
tggtcctcctgtagggtactt

SEQ ID NO: 7074 - RNA, 21 nt, synthetic construct
  source 1..21: mol_type = other RNA
tggtgcaggccaggctggaga

SEQ ID NO: 7075 - RNA, 21 nt, synthetic construct
  source 1..21: mol_type = other RNA
tggtgctctgtcatccctgag

SEQ ID NO: 7076 - RNA, 21 nt, synthetic construct
  source 1..21: mol_type = other RNA
tgtaccacgtgctgccaaatt

SEQ ID NO: 7077 - RNA, 21 nt, synthetic construct
  source 1..21: mol_type = other RNA
tgtactgggcaaggccttgga

SEQ ID NO: 7078 - RNA, 21 nt, synthetic construct
  source 1..21: mol_type = other RNA
tgtagggtactttgatgtctg

SEQ ID NO: 7079 - RNA, 21 nt, synthetic construct
  source 1..21: mol_type = other RNA
tgtcacccgtttcaggtgggg

SEQ ID NO: 7080 - RNA, 21 nt, synthetic construct
  source 1..21: mol_type = other RNA
tgtcatagggcctcttcttcc

SEQ ID NO: 7081 - RNA, 21 nt, synthetic construct
  source 1..21: mol_type = other RNA
tgtcatccctgagctctcaaa

SEQ ID NO: 7082 - RNA, 21 nt, synthetic construct
  source 1..21: mol_type = other RNA
tgtccaccgaggcagccgccg

SEQ ID NO: 7083 - RNA, 21 nt, synthetic construct
  source 1..21: mol_type = other RNA
tgtccccggctgcagccgctt

SEQ ID NO: 7084 - RNA, 21 nt, synthetic construct
  source 1..21: mol_type = other RNA
tgtcccctgccattgcttgaa

SEQ ID NO: 7085 - RNA, 21 nt, synthetic construct
  source 1..21: mol_type = other RNA
tgtccggcttctccatggagc

SEQ ID NO: 7086 - RNA, 21 nt, synthetic construct
  source 1..21: mol_type = other RNA
tgtcctgcagtgagcggtaga

SEQ ID NO: 7087 - RNA, 21 nt, synthetic construct
  source 1..21: mol_type = other RNA
tgtccttgatttcgccactca

SEQ ID NO: 7088 - RNA, 21 nt, synthetic construct
  source 1..21: mol_type = other RNA
tgtcgagggctgcacggccca

SEQ ID NO: 7089 - RNA, 21 nt, synthetic construct
  source 1..21: mol_type = other RNA
tgtcggcctgctgggccgtgc

SEQ ID NO: 7090 - RNA, 21 nt, synthetic construct
  source 1..21: mol_type = other RNA
tgtctcacgcggccgccggtg

SEQ ID NO: 7091 - RNA, 21 nt, synthetic construct
  source 1..21: mol_type = other RNA
tgtctcttccccaagcccctc

SEQ ID NO: 7092 - RNA, 21 nt, synthetic construct
  source 1..21: mol_type = other RNA
tgtctgcggcccagctcccag

SEQ ID NO: 7093 - RNA, 21 nt, synthetic construct
  source 1..21: mol_type = other RNA
tgtcttctctgtcccctgcca

SEQ ID NO: 7094 - RNA, 21 nt, synthetic construct
  source 1..21: mol_type = other RNA
tgtcttggtgctctgtcatcc

SEQ ID NO: 7095 - RNA, 21 nt, synthetic construct
  source 1..21: mol_type = other RNA
tgtgactgagaagaagtggcc

SEQ ID NO: 7096 - RNA, 21 nt, synthetic construct
  source 1..21: mol_type = other RNA
tgtgaggaggagggtgcaacc

SEQ ID NO: 7097 - RNA, 21 nt, synthetic construct
  source 1..21: mol_type = other RNA
tgtgcaggaagccatcttgcg

SEQ ID NO: 7098 - RNA, 21 nt, synthetic construct
  source 1..21: mol_type = other RNA
tgtgcatcaggaggcgtgagg

SEQ ID NO: 7099 - RNA, 21 nt, synthetic construct
  source 1..21: mol_type = other RNA
tgtgccagctctcagaggccc

SEQ ID NO: 7100 - RNA, 21 nt, synthetic construct
  source 1..21: mol_type = other RNA
tgtgccgggcagtgtgccagc

SEQ ID NO: 7101 - RNA, 21 nt, synthetic construct
  source 1..21: mol_type = other RNA
tgtgctgggcaaagctggtca

SEQ ID NO: 7102 - RNA, 21 nt, synthetic construct
  source 1..21: mol_type = other RNA
tgtggccggcttccccagtac

SEQ ID NO: 7103 - RNA, 21 nt, synthetic construct
  source 1..21: mol_type = other RNA
tgtggctgaaaacctcatcgg

SEQ ID NO: 7104 - RNA, 21 nt, synthetic construct
  source 1..21: mol_type = other RNA
tgtggctggctctgagtggcg

SEQ ID NO: 7105 - RNA, 21 nt, synthetic construct
  source 1..21: mol_type = other RNA
tgtggctgtgactgagaagaa

SEQ ID NO: 7106 - RNA, 21 nt, synthetic construct
  source 1..21: mol_type = other RNA
tgtgggcccagggagaagagc

SEQ ID NO: 7107 - RNA, 21 nt, synthetic construct
  source 1..21: mol_type = other RNA
tgtgtcacccgtttcaggtgg

SEQ ID NO: 7108 - RNA, 21 nt, synthetic construct
  source 1..21: mol_type = other RNA
tgttggactaagcctttggcc

SEQ ID NO: 7109 - RNA, 21 nt, synthetic construct
  source 1..21: mol_type = other RNA
tgttggctgccaaggagcacc

SEQ ID NO: 7110 - RNA, 21 nt, synthetic construct
  source 1..21: mol_type = other RNA
ttagtccaacacccaccgcgg

SEQ ID NO: 7111 - RNA, 21 nt, synthetic construct
  source 1..21: mol_type = other RNA
ttcaagatgtggctgaaaacc

SEQ ID NO: 7112 - RNA, 21 nt, synthetic construct
  source 1..21: mol_type = other RNA
ttcaagcaatggcaggggaca

SEQ ID NO: 7113 - RNA, 21 nt, synthetic construct
  source 1..21: mol_type = other RNA
ttcagccacatcttgaagaga

SEQ ID NO: 7114 - RNA, 21 nt, synthetic construct
  source 1..21: mol_type = other RNA
ttcaggtacctcgcaagcacc

SEQ ID NO: 7115 - RNA, 21 nt, synthetic construct
  source 1..21: mol_type = other RNA
ttcaggtggggtgaggggctt

SEQ ID NO: 7116 - RNA, 21 nt, synthetic construct
  source 1..21: mol_type = other RNA
ttccagaagaagctgctccga

SEQ ID NO: 7117 - RNA, 21 nt, synthetic construct
  source 1..21: mol_type = other RNA
ttccagcctcccgcccgctgc

SEQ ID NO: 7118 - RNA, 21 nt, synthetic construct
  source 1..21: mol_type = other RNA
ttccagcctcctcggcctcgt

SEQ ID NO: 7119 - RNA, 21 nt, synthetic construct
  source 1..21: mol_type = other RNA
ttccagctcctcgaagccgtc

SEQ ID NO: 7120 - RNA, 21 nt, synthetic construct
  source 1..21: mol_type = other RNA
ttcccatccgcagacgtgagg

SEQ ID NO: 7121 - RNA, 21 nt, synthetic construct
  source 1..21: mol_type = other RNA
ttccccaagcccctcacccca

SEQ ID NO: 7122 - RNA, 21 nt, synthetic construct
  source 1..21: mol_type = other RNA
ttccccagcttcctcctgcaa

SEQ ID NO: 7123 - RNA, 21 nt, synthetic construct
  source 1..21: mol_type = other RNA
ttccccagtacgactttgtct

SEQ ID NO: 7124 - RNA, 21 nt, synthetic construct
  source 1..21: mol_type = other RNA
ttcccgctccaggctcttgct

SEQ ID NO: 7125 - RNA, 21 nt, synthetic construct
  source 1..21: mol_type = other RNA
ttcctcctgcaatgcttcctg

SEQ ID NO: 7126 - RNA, 21 nt, synthetic construct
  source 1..21: mol_type = other RNA
ttcctgcacagcacgtgcgga

SEQ ID NO: 7127 - RNA, 21 nt, synthetic construct
  source 1..21: mol_type = other RNA
ttcctgggggccctgtggctg

SEQ ID NO: 7128 - RNA, 21 nt, synthetic construct
  source 1..21: mol_type = other RNA
ttcctgtccaccgaggcagcc

SEQ ID NO: 7129 - RNA, 21 nt, synthetic construct
  source 1..21: mol_type = other RNA
ttccttggggtcaatgctagg

SEQ ID NO: 7130 - RNA, 21 nt, synthetic construct
  source 1..21: mol_type = other RNA
ttcgaggagctggaagcgcaa

SEQ ID NO: 7131 - RNA, 21 nt, synthetic construct
  source 1..21: mol_type = other RNA
ttcgccactcagagccagcca

SEQ ID NO: 7132 - RNA, 21 nt, synthetic construct
  source 1..21: mol_type = other RNA
ttctaccgctcactgcaggac

SEQ ID NO: 7133 - RNA, 21 nt, synthetic construct
  source 1..21: mol_type = other RNA
ttctcagtcacagccacagcc

SEQ ID NO: 7134 - RNA, 21 nt, synthetic construct
  source 1..21: mol_type = other RNA
ttctccatggagcaggcccag

SEQ ID NO: 7135 - RNA, 21 nt, synthetic construct
  source 1..21: mol_type = other RNA
ttctccctggacctccgcagc

SEQ ID NO: 7136 - RNA, 21 nt, synthetic construct
  source 1..21: mol_type = other RNA
ttctccctgggcccacagcca

SEQ ID NO: 7137 - RNA, 21 nt, synthetic construct
  source 1..21: mol_type = other RNA
ttctctgtcccctgccattgc

SEQ ID NO: 7138 - RNA, 21 nt, synthetic construct
  source 1..21: mol_type = other RNA
ttctgcccagtccggggtggc

SEQ ID NO: 7139 - RNA, 21 nt, synthetic construct
  source 1..21: mol_type = other RNA
ttctgctcatcctagacggct

SEQ ID NO: 7140 - RNA, 21 nt, synthetic construct
  source 1..21: mol_type = other RNA
ttctgcttcctgtccaccgag

SEQ ID NO: 7141 - RNA, 21 nt, synthetic construct
  source 1..21: mol_type = other RNA
ttctggaaaaggccggccagc

SEQ ID NO: 7142 - RNA, 21 nt, synthetic construct
  source 1..21: mol_type = other RNA
ttctggctgggctgatcttcc

SEQ ID NO: 7143 - RNA, 21 nt, synthetic construct
  source 1..21: mol_type = other RNA
ttctgggcacccgcctcacgc

SEQ ID NO: 7144 - RNA, 21 nt, synthetic construct
  source 1..21: mol_type = other RNA
ttcttccttggggtcaatgct

SEQ ID NO: 7145 - RNA, 21 nt, synthetic construct
  source 1..21: mol_type = other RNA
ttcttctcagtcacagccaca

SEQ ID NO: 7146 - RNA, 21 nt, synthetic construct
  source 1..21: mol_type = other RNA
ttcttctggaaaaggccggcc

SEQ ID NO: 7147 - RNA, 21 nt, synthetic construct
  source 1..21: mol_type = other RNA
ttgaaccgtccgggggatgcc

SEQ ID NO: 7148 - RNA, 21 nt, synthetic construct
  source 1..21: mol_type = other RNA
ttgaagagacctgaccgcgtt

SEQ ID NO: 7149 - RNA, 21 nt, synthetic construct
  source 1..21: mol_type = other RNA
ttgaccccaaggaagaagagg

SEQ ID NO: 7150 - RNA, 21 nt, synthetic construct
  source 1..21: mol_type = other RNA
ttgagagctcagggatgacag

SEQ ID NO: 7151 - RNA, 21 nt, synthetic construct
  source 1..21: mol_type = other RNA
ttgagctgtccggcttctcca

SEQ ID NO: 7152 - RNA, 21 nt, synthetic construct
  source 1..21: mol_type = other RNA
ttgatgtctgcggcccagctc

SEQ ID NO: 7153 - RNA, 21 nt, synthetic construct
  source 1..21: mol_type = other RNA
ttgatttcgccactcagagcc

SEQ ID NO: 7154 - RNA, 21 nt, synthetic construct
  source 1..21: mol_type = other RNA
ttgcaccctcctcctcacagc

SEQ ID NO: 7155 - RNA, 21 nt, synthetic construct
  source 1..21: mol_type = other RNA
ttgcagagccggtggagcagt

SEQ ID NO: 7156 - RNA, 21 nt, synthetic construct
  source 1..21: mol_type = other RNA
ttgcaggaggaagctggggaa

SEQ ID NO: 7157 - RNA, 21 nt, synthetic construct
  source 1..21: mol_type = other RNA
ttgcccagcacagcaatcact

SEQ ID NO: 7158 - RNA, 21 nt, synthetic construct
  source 1..21: mol_type = other RNA
ttgcccagtacatgtgcatca

SEQ ID NO: 7159 - RNA, 21 nt, synthetic construct
  source 1..21: mol_type = other RNA
ttgcccctctggattggggag

SEQ ID NO: 7160 - RNA, 21 nt, synthetic construct
  source 1..21: mol_type = other RNA
ttgccctgaccagctttgccc

SEQ ID NO: 7161 - RNA, 21 nt, synthetic construct
  source 1..21: mol_type = other RNA
ttgcgaggtacctgaagcggc

SEQ ID NO: 7162 - RNA, 21 nt, synthetic construct
  source 1..21: mol_type = other RNA
ttgcgcttccagctcctcgaa

SEQ ID NO: 7163 - RNA, 21 nt, synthetic construct
  source 1..21: mol_type = other RNA
ttgctcaggctctggaccagg

SEQ ID NO: 7164 - RNA, 21 nt, synthetic construct
  source 1..21: mol_type = other RNA
ttgctgctgctcctctccagc

SEQ ID NO: 7165 - RNA, 21 nt, synthetic construct
  source 1..21: mol_type = other RNA
ttgctgtgctgggcaaagctg

SEQ ID NO: 7166 - RNA, 21 nt, synthetic construct
  source 1..21: mol_type = other RNA
ttgcttgaaccgtccggggga

SEQ ID NO: 7167 - RNA, 21 nt, synthetic construct
  source 1..21: mol_type = other RNA
ttggactaagcctttggccat

SEQ ID NO: 7168 - RNA, 21 nt, synthetic construct
  source 1..21: mol_type = other RNA
ttggaggcggcgggccaagac

SEQ ID NO: 7169 - RNA, 21 nt, synthetic construct
  source 1..21: mol_type = other RNA
ttggcagcacgtggtacagga

SEQ ID NO: 7170 - RNA, 21 nt, synthetic construct
  source 1..21: mol_type = other RNA
ttggcagccaacagcacctca

SEQ ID NO: 7171 - RNA, 21 nt, synthetic construct
  source 1..21: mol_type = other RNA
ttggccagctctgccagggcc

SEQ ID NO: 7172 - RNA, 21 nt, synthetic construct
  source 1..21: mol_type = other RNA
ttggccatcgcccaggtcctc

SEQ ID NO: 7173 - RNA, 21 nt, synthetic construct
  source 1..21: mol_type = other RNA
ttggcccgccgcctccaaggc

SEQ ID NO: 7174 - RNA, 21 nt, synthetic construct
  source 1..21: mol_type = other RNA
ttggcgtcctccccaagctcc

SEQ ID NO: 7175 - RNA, 21 nt, synthetic construct
  source 1..21: mol_type = other RNA
ttggctgccaaggagcaccgg

SEQ ID NO: 7176 - RNA, 21 nt, synthetic construct
  source 1..21: mol_type = other RNA
ttgggccagctgccgttctgc

SEQ ID NO: 7177 - RNA, 21 nt, synthetic construct
  source 1..21: mol_type = other RNA
ttgggctggggcagtgagccg

SEQ ID NO: 7178 - RNA, 21 nt, synthetic construct
  source 1..21: mol_type = other RNA
ttggggaagagacatccttgt

SEQ ID NO: 7179 - RNA, 21 nt, synthetic construct
  source 1..21: mol_type = other RNA
ttggggagcctcgtgggactc

SEQ ID NO: 7180 - RNA, 21 nt, synthetic construct
  source 1..21: mol_type = other RNA
ttggggaggacgccaagctgc

SEQ ID NO: 7181 - RNA, 21 nt, synthetic construct
  source 1..21: mol_type = other RNA
ttggggtcaatgctaggtact

SEQ ID NO: 7182 - RNA, 21 nt, synthetic construct
  source 1..21: mol_type = other RNA
ttggtgctctgtcatccctga

SEQ ID NO: 7183 - RNA, 21 nt, synthetic construct
  source 1..21: mol_type = other RNA
ttgtcatagggcctcttcttc

SEQ ID NO: 7184 - RNA, 21 nt, synthetic construct
  source 1..21: mol_type = other RNA
ttgtccttgatttcgccactc

SEQ ID NO: 7185 - RNA, 21 nt, synthetic construct
  source 1..21: mol_type = other RNA
ttgtcttctctgtcccctgcc

SEQ ID NO: 7186 - RNA, 21 nt, synthetic construct
  source 1..21: mol_type = other RNA
ttgtgccgggcagtgtgccag

SEQ ID NO: 7187 - RNA, 21 nt, synthetic construct
  source 1..21: mol_type = other RNA
ttgtggccggcttccccagta

SEQ ID NO: 7188 - RNA, 21 nt, synthetic construct
  source 1..21: mol_type = other RNA
tttcagccacatcttgaagag

SEQ ID NO: 7189 - RNA, 21 nt, synthetic construct
  source 1..21: mol_type = other RNA
tttcaggtggggtgaggggct

SEQ ID NO: 7190 - RNA, 21 nt, synthetic construct
  source 1..21: mol_type = other RNA
tttccagaagaagctgctccg

SEQ ID NO: 7191 - RNA, 21 nt, synthetic construct
  source 1..21: mol_type = other RNA
tttcgccactcagagccagcc

SEQ ID NO: 7192 - RNA, 21 nt, synthetic construct
  source 1..21: mol_type = other RNA
tttctggctgggctgatcttc

SEQ ID NO: 7193 - RNA, 21 nt, synthetic construct
  source 1..21: mol_type = other RNA
tttctgggcacccgcctcacg

SEQ ID NO: 7194 - RNA, 21 nt, synthetic construct
  source 1..21: mol_type = other RNA
tttgagagctcagggatgaca

SEQ ID NO: 7195 - RNA, 21 nt, synthetic construct
  source 1..21: mol_type = other RNA
tttgagctgtccggcttctcc

SEQ ID NO: 7196 - RNA, 21 nt, synthetic construct
  source 1..21: mol_type = other RNA
tttgatgtctgcggcccagct

SEQ ID NO: 7197 - RNA, 21 nt, synthetic construct
  source 1..21: mol_type = other RNA
tttgcagagccggtggagcag

SEQ ID NO: 7198 - RNA, 21 nt, synthetic construct
  source 1..21: mol_type = other RNA
tttgcccagcacagcaatcac

SEQ ID NO: 7199 - RNA, 21 nt, synthetic construct
  source 1..21: mol_type = other RNA
tttgcccctctggattgggga

SEQ ID NO: 7200 - RNA, 21 nt, synthetic construct
  source 1..21: mol_type = other RNA
tttggcagcacgtggtacagg

SEQ ID NO: 7201 - RNA, 21 nt, synthetic construct
  source 1..21: mol_type = other RNA
tttggccatcgcccaggtcct

SEQ ID NO: 7202 - RNA, 21 nt, synthetic construct
  source 1..21: mol_type = other RNA
tttgtcttctctgtcccctgc

SEQ ID NO: 7203 - RNA, 21 nt, synthetic construct
  source 1..21: mol_type = other RNA
tttgtgccgggcagtgtgcca

SEQ ID NO: 7204 - RNA, 21 nt, synthetic construct
  source 1..21: mol_type = other RNA
ttttcagccacatcttgaaga

SEQ ID NO: 7205 - RNA, 21 nt, synthetic construct
  source 1..21: mol_type = other RNA
ttttccagaagaagctgctcc

SEQ ID NO: 7206 - RNA, 21 nt, synthetic construct
  source 1..21: mol_type = other RNA
ttttctgggcacccgcctcac

SEQ ID NO: 7207 - RNA, 22 nt, synthetic construct
  source 1..22: mol_type = other RNA
aaaacctcatcggccgccacga

SEQ ID NO: 7208 - RNA, 22 nt, synthetic construct
  source 1..22: mol_type = other RNA
aaaagagaggcggccggggagc

SEQ ID NO: 7209 - RNA, 22 nt, synthetic construct
  source 1..22: mol_type = other RNA
aaaaggccggccagcagccccc

SEQ ID NO: 7210 - RNA, 22 nt, synthetic construct
  source 1..22: mol_type = other RNA
aaacctcatcggccgccacgag

SEQ ID NO: 7211 - RNA, 22 nt, synthetic construct
  source 1..22: mol_type = other RNA
aaacgggtgacacagctgagtc

SEQ ID NO: 7212 - RNA, 22 nt, synthetic construct
  source 1..22: mol_type = other RNA
aaagagaggcggccggggagct

SEQ ID NO: 7213 - RNA, 22 nt, synthetic construct
  source 1..22: mol_type = other RNA
aaagcgtggcacgccctccagc

SEQ ID NO: 7214 - RNA, 22 nt, synthetic construct
  source 1..22: mol_type = other RNA
aaagctggtcagggcaagagct

SEQ ID NO: 7215 - RNA, 22 nt, synthetic construct
  source 1..22: mol_type = other RNA
aaaggccaggggcgtgtcaggg

SEQ ID NO: 7216 - RNA, 22 nt, synthetic construct
  source 1..22: mol_type = other RNA
aaaggccggccagcagcccccg

SEQ ID NO: 7217 - RNA, 22 nt, synthetic construct
  source 1..22: mol_type = other RNA
aaaggcttagtccaacacccac

SEQ ID NO: 7218 - RNA, 22 nt, synthetic construct
  source 1..22: mol_type = other RNA
aaagtaccctacaggaggacca

SEQ ID NO: 7219 - RNA, 22 nt, synthetic construct
  source 1..22: mol_type = other RNA
aaagtagcgcatcacgtatgcc

SEQ ID NO: 7220 - RNA, 22 nt, synthetic construct
  source 1..22: mol_type = other RNA
aaagtagggctgtggctgtgac

SEQ ID NO: 7221 - RNA, 22 nt, synthetic construct
  source 1..22: mol_type = other RNA
aaagtcgtactggggaagccgg

SEQ ID NO: 7222 - RNA, 22 nt, synthetic construct
  source 1..22: mol_type = other RNA
aaatagggcgtcggccttgctc

SEQ ID NO: 7223 - RNA, 22 nt, synthetic construct
  source 1..22: mol_type = other RNA
aaatcaaggacaaggagctccc

SEQ ID NO: 7224 - RNA, 22 nt, synthetic construct
  source 1..22: mol_type = other RNA
aaatgccagtgctgcggaggtc

SEQ ID NO: 7225 - RNA, 22 nt, synthetic construct
  source 1..22: mol_type = other RNA
aaattccagcctcctcggcctc

SEQ ID NO: 7226 - RNA, 22 nt, synthetic construct
  source 1..22: mol_type = other RNA
aacacaaggatgtctcttcccc

SEQ ID NO: 7227 - RNA, 22 nt, synthetic construct
  source 1..22: mol_type = other RNA
aacacccaccgcgggccgcaga

SEQ ID NO: 7228 - RNA, 22 nt, synthetic construct
  source 1..22: mol_type = other RNA
aacagcacctcagccaggcctc

SEQ ID NO: 7229 - RNA, 22 nt, synthetic construct
  source 1..22: mol_type = other RNA
aaccgtccgggggatgcctatg

SEQ ID NO: 7230 - RNA, 22 nt, synthetic construct
  source 1..22: mol_type = other RNA
aacctcatcggccgccacgagt

SEQ ID NO: 7231 - RNA, 22 nt, synthetic construct
  source 1..22: mol_type = other RNA
aacctcggagcagcttcttctg

SEQ ID NO: 7232 - RNA, 22 nt, synthetic construct
  source 1..22: mol_type = other RNA
aacgcggtcaggtctcttcaag

SEQ ID NO: 7233 - RNA, 22 nt, synthetic construct
  source 1..22: mol_type = other RNA
aacggcagctggcccaaggagg

SEQ ID NO: 7234 - RNA, 22 nt, synthetic construct
  source 1..22: mol_type = other RNA
aacgggtgacacagctgagtcc

SEQ ID NO: 7235 - RNA, 22 nt, synthetic construct
  source 1..22: mol_type = other RNA
aactgctccaccggctctgcaa

SEQ ID NO: 7236 - RNA, 22 nt, synthetic construct
  source 1..22: mol_type = other RNA
aactggccaccccggactgggc

SEQ ID NO: 7237 - RNA, 22 nt, synthetic construct
  source 1..22: mol_type = other RNA
aactggctggagggcgtgccac

SEQ ID NO: 7238 - RNA, 22 nt, synthetic construct
  source 1..22: mol_type = other RNA
aactggtcctcctgtagggtac

SEQ ID NO: 7239 - RNA, 22 nt, synthetic construct
  source 1..22: mol_type = other RNA
aagaagaggccctatgacaact

SEQ ID NO: 7240 - RNA, 22 nt, synthetic construct
  source 1..22: mol_type = other RNA
aagaagctgctccgaggttgca

SEQ ID NO: 7241 - RNA, 22 nt, synthetic construct
  source 1..22: mol_type = other RNA
aagaagtggccggtcccggagg

SEQ ID NO: 7242 - RNA, 22 nt, synthetic construct
  source 1..22: mol_type = other RNA
aagacaaagtcgtactggggaa

SEQ ID NO: 7243 - RNA, 22 nt, synthetic construct
  source 1..22: mol_type = other RNA
aagacagagccctgacgctcct

SEQ ID NO: 7244 - RNA, 22 nt, synthetic construct
  source 1..22: mol_type = other RNA
aagacttctccctggacctccg

SEQ ID NO: 7245 - RNA, 22 nt, synthetic construct
  source 1..22: mol_type = other RNA
aagagacctgaccgcgttctgc

SEQ ID NO: 7246 - RNA, 22 nt, synthetic construct
  source 1..22: mol_type = other RNA
aagagaggcggccggggagctc

SEQ ID NO: 7247 - RNA, 22 nt, synthetic construct
  source 1..22: mol_type = other RNA
aagagcagatcctgcaggccat

SEQ ID NO: 7248 - RNA, 22 nt, synthetic construct
  source 1..22: mol_type = other RNA
aagagcctggagcgggaactgg

SEQ ID NO: 7249 - RNA, 22 nt, synthetic construct
  source 1..22: mol_type = other RNA
aagagctattgggctggggcag

SEQ ID NO: 7250 - RNA, 22 nt, synthetic construct
  source 1..22: mol_type = other RNA
aagaggccctatgacaactggc

SEQ ID NO: 7251 - RNA, 22 nt, synthetic construct
  source 1..22: mol_type = other RNA
aagatcagcccagccagaaagc

SEQ ID NO: 7252 - RNA, 22 nt, synthetic construct
  source 1..22: mol_type = other RNA
aagatggcttcctgcacagcac

SEQ ID NO: 7253 - RNA, 22 nt, synthetic construct
  source 1..22: mol_type = other RNA
aagatgtggctgaaaacctcat

SEQ ID NO: 7254 - RNA, 22 nt, synthetic construct
  source 1..22: mol_type = other RNA
aagcaatggcaggggacagaga

SEQ ID NO: 7255 - RNA, 22 nt, synthetic construct
  source 1..22: mol_type = other RNA
aagcaccttctgcttcctgtcc

SEQ ID NO: 7256 - RNA, 22 nt, synthetic construct
  source 1..22: mol_type = other RNA
aagcagaaggtgcttgcgaggt

SEQ ID NO: 7257 - RNA, 22 nt, synthetic construct
  source 1..22: mol_type = other RNA
aagcattgcaggaggaagctgg

SEQ ID NO: 7258 - RNA, 22 nt, synthetic construct
  source 1..22: mol_type = other RNA
aagccatcttgcgcttccagct

SEQ ID NO: 7259 - RNA, 22 nt, synthetic construct
  source 1..22: mol_type = other RNA
aagcccaggcccggctcactgc

SEQ ID NO: 7260 - RNA, 22 nt, synthetic construct
  source 1..22: mol_type = other RNA
aagcccctcaccccacctgaaa

SEQ ID NO: 7261 - RNA, 22 nt, synthetic construct
  source 1..22: mol_type = other RNA
aagccggacagctcaaataggg

SEQ ID NO: 7262 - RNA, 22 nt, synthetic construct
  source 1..22: mol_type = other RNA
aagccggccacaagcccaggcc

SEQ ID NO: 7263 - RNA, 22 nt, synthetic construct
  source 1..22: mol_type = other RNA
aagccgtctaggatgagcagaa

SEQ ID NO: 7264 - RNA, 22 nt, synthetic construct
  source 1..22: mol_type = other RNA
aagcctttggccatcgcccagg

SEQ ID NO: 7265 - RNA, 22 nt, synthetic construct
  source 1..22: mol_type = other RNA
aagcgcaagatggcttcctgca

SEQ ID NO: 7266 - RNA, 22 nt, synthetic construct
  source 1..22: mol_type = other RNA
aagcggctgcagccggggacac

SEQ ID NO: 7267 - RNA, 22 nt, synthetic construct
  source 1..22: mol_type = other RNA
aagcgtggcacgccctccagcc

SEQ ID NO: 7268 - RNA, 22 nt, synthetic construct
  source 1..22: mol_type = other RNA
aagctccagcagggcctctgag

SEQ ID NO: 7269 - RNA, 22 nt, synthetic construct
  source 1..22: mol_type = other RNA
aagctgccctccacgctcacgg

SEQ ID NO: 7270 - RNA, 22 nt, synthetic construct
  source 1..22: mol_type = other RNA
aagctgctccgaggttgcaccc

SEQ ID NO: 7271 - RNA, 22 nt, synthetic construct
  source 1..22: mol_type = other RNA
aagctggcctgggagctgggcc

SEQ ID NO: 7272 - RNA, 22 nt, synthetic construct
  source 1..22: mol_type = other RNA
aagctggggaaggccagctcgg

SEQ ID NO: 7273 - RNA, 22 nt, synthetic construct
  source 1..22: mol_type = other RNA
aagctggtcagggcaagagcta

SEQ ID NO: 7274 - RNA, 22 nt, synthetic construct
  source 1..22: mol_type = other RNA
aaggaagaagaggccctatgac

SEQ ID NO: 7275 - RNA, 22 nt, synthetic construct
  source 1..22: mol_type = other RNA
aaggacaaggagctcccgcagt

SEQ ID NO: 7276 - RNA, 22 nt, synthetic construct
  source 1..22: mol_type = other RNA
aaggagcaccggcggccgcgtg

SEQ ID NO: 7277 - RNA, 22 nt, synthetic construct
  source 1..22: mol_type = other RNA
aaggagctcccgcagtacctag

SEQ ID NO: 7278 - RNA, 22 nt, synthetic construct
  source 1..22: mol_type = other RNA
aaggaggcctggctgaggtgct

SEQ ID NO: 7279 - RNA, 22 nt, synthetic construct
  source 1..22: mol_type = other RNA
aaggatgtctcttccccaagcc

SEQ ID NO: 7280 - RNA, 22 nt, synthetic construct
  source 1..22: mol_type = other RNA
aaggccagctcggactctgcgg

SEQ ID NO: 7281 - RNA, 22 nt, synthetic construct
  source 1..22: mol_type = other RNA
aaggccaggggcgtgtcagggt

SEQ ID NO: 7282 - RNA, 22 nt, synthetic construct
  source 1..22: mol_type = other RNA
aaggccgacgccctatttgagc

SEQ ID NO: 7283 - RNA, 22 nt, synthetic construct
  source 1..22: mol_type = other RNA
aaggccttgcccagtacatgtg

SEQ ID NO: 7284 - RNA, 22 nt, synthetic construct
  source 1..22: mol_type = other RNA
aaggccttggaggcggcgggcc

SEQ ID NO: 7285 - RNA, 22 nt, synthetic construct
  source 1..22: mol_type = other RNA
aaggcttagtccaacacccacc

SEQ ID NO: 7286 - RNA, 22 nt, synthetic construct
  source 1..22: mol_type = other RNA
aaggtgcttgcgaggtacctga

SEQ ID NO: 7287 - RNA, 22 nt, synthetic construct
  source 1..22: mol_type = other RNA
aagtaccctacaggaggaccag

SEQ ID NO: 7288 - RNA, 22 nt, synthetic construct
  source 1..22: mol_type = other RNA
aagtagcgcatcacgtatgcct

SEQ ID NO: 7289 - RNA, 22 nt, synthetic construct
  source 1..22: mol_type = other RNA
aagtagggctgtggctgtgact

SEQ ID NO: 7290 - RNA, 22 nt, synthetic construct
  source 1..22: mol_type = other RNA
aagtcgtactggggaagccggc

SEQ ID NO: 7291 - RNA, 22 nt, synthetic construct
  source 1..22: mol_type = other RNA
aagtcttggcccgccgcctcca

SEQ ID NO: 7292 - RNA, 22 nt, synthetic construct
  source 1..22: mol_type = other RNA
aagtggccggtcccggaggagc

SEQ ID NO: 7293 - RNA, 22 nt, synthetic construct
  source 1..22: mol_type = other RNA
aatagctcttgccctgaccagc

SEQ ID NO: 7294 - RNA, 22 nt, synthetic construct
  source 1..22: mol_type = other RNA
aatagggcgtcggccttgctca

SEQ ID NO: 7295 - RNA, 22 nt, synthetic construct
  source 1..22: mol_type = other RNA
aatcaaggacaaggagctcccg

SEQ ID NO: 7296 - RNA, 22 nt, synthetic construct
  source 1..22: mol_type = other RNA
aatcactcgtgtctcacgcggc

SEQ ID NO: 7297 - RNA, 22 nt, synthetic construct
  source 1..22: mol_type = other RNA
aatccagaggggcaaatgccag

SEQ ID NO: 7298 - RNA, 22 nt, synthetic construct
  source 1..22: mol_type = other RNA
aatgccagtgctgcggaggtcc

SEQ ID NO: 7299 - RNA, 22 nt, synthetic construct
  source 1..22: mol_type = other RNA
aatgcccaacacaaggatgtct

SEQ ID NO: 7300 - RNA, 22 nt, synthetic construct
  source 1..22: mol_type = other RNA
aatgctaggtactgcgggagct

SEQ ID NO: 7301 - RNA, 22 nt, synthetic construct
  source 1..22: mol_type = other RNA
aatgcttcctgggggccctgtg

SEQ ID NO: 7302 - RNA, 22 nt, synthetic construct
  source 1..22: mol_type = other RNA
aatggcaggggacagagaagac

SEQ ID NO: 7303 - RNA, 22 nt, synthetic construct
  source 1..22: mol_type = other RNA
aattccagcctcctcggcctcg

SEQ ID NO: 7304 - RNA, 22 nt, synthetic construct
  source 1..22: mol_type = other RNA
aatttggcagcacgtggtacag

SEQ ID NO: 7305 - RNA, 22 nt, synthetic construct
  source 1..22: mol_type = other RNA
acaaagtagggctgtggctgtg

SEQ ID NO: 7306 - RNA, 22 nt, synthetic construct
  source 1..22: mol_type = other RNA
acaaagtcgtactggggaagcc

SEQ ID NO: 7307 - RNA, 22 nt, synthetic construct
  source 1..22: mol_type = other RNA
acaactggctggagggcgtgcc

SEQ ID NO: 7308 - RNA, 22 nt, synthetic construct
  source 1..22: mol_type = other RNA
acaagcccaggcccggctcact

SEQ ID NO: 7309 - RNA, 22 nt, synthetic construct
  source 1..22: mol_type = other RNA
acaaggagctcccgcagtacct

SEQ ID NO: 7310 - RNA, 22 nt, synthetic construct
  source 1..22: mol_type = other RNA
acaaggatgtctcttccccaag

SEQ ID NO: 7311 - RNA, 22 nt, synthetic construct
  source 1..22: mol_type = other RNA
acacaaggatgtctcttcccca

SEQ ID NO: 7312 - RNA, 22 nt, synthetic construct
  source 1..22: mol_type = other RNA
acacagctgagtcccacgaggc

SEQ ID NO: 7313 - RNA, 22 nt, synthetic construct
  source 1..22: mol_type = other RNA
acacccaccgcgggccgcagag

SEQ ID NO: 7314 - RNA, 22 nt, synthetic construct
  source 1..22: mol_type = other RNA
acacgagtgattgctgtgctgg

SEQ ID NO: 7315 - RNA, 22 nt, synthetic construct
  source 1..22: mol_type = other RNA
acacgcccctggcctttgcaga

SEQ ID NO: 7316 - RNA, 22 nt, synthetic construct
  source 1..22: mol_type = other RNA
acacgtatggtgccgagcccgc

SEQ ID NO: 7317 - RNA, 22 nt, synthetic construct
  source 1..22: mol_type = other RNA
acactgcccggcacaaagtagg

SEQ ID NO: 7318 - RNA, 22 nt, synthetic construct
  source 1..22: mol_type = other RNA
acactgcgggcgcggcagctgc

SEQ ID NO: 7319 - RNA, 22 nt, synthetic construct
  source 1..22: mol_type = other RNA
acagagaagacaaagtcgtact

SEQ ID NO: 7320 - RNA, 22 nt, synthetic construct
  source 1..22: mol_type = other RNA
acagagcaccaagacagagccc

SEQ ID NO: 7321 - RNA, 22 nt, synthetic construct
  source 1..22: mol_type = other RNA
acagagccctgacgctcctccg

SEQ ID NO: 7322 - RNA, 22 nt, synthetic construct
  source 1..22: mol_type = other RNA
acagcaatcactcgtgtctcac

SEQ ID NO: 7323 - RNA, 22 nt, synthetic construct
  source 1..22: mol_type = other RNA
acagcacctcagccaggcctcc

SEQ ID NO: 7324 - RNA, 22 nt, synthetic construct
  source 1..22: mol_type = other RNA
acagcacgtgcggaccggcacc

SEQ ID NO: 7325 - RNA, 22 nt, synthetic construct
  source 1..22: mol_type = other RNA
acagccacagccctactttgtg

SEQ ID NO: 7326 - RNA, 22 nt, synthetic construct
  source 1..22: mol_type = other RNA
acagccactcgtggcggccgat

SEQ ID NO: 7327 - RNA, 22 nt, synthetic construct
  source 1..22: mol_type = other RNA
acagccctactttgtgccgggc

SEQ ID NO: 7328 - RNA, 22 nt, synthetic construct
  source 1..22: mol_type = other RNA
acagctcaaatagggcgtcggc

SEQ ID NO: 7329 - RNA, 22 nt, synthetic construct
  source 1..22: mol_type = other RNA
acagctgagtcccacgaggctc

SEQ ID NO: 7330 - RNA, 22 nt, synthetic construct
  source 1..22: mol_type = other RNA
acaggaagcagaaggtgcttgc

SEQ ID NO: 7331 - RNA, 22 nt, synthetic construct
  source 1..22: mol_type = other RNA
acaggagctccccggccgcctc

SEQ ID NO: 7332 - RNA, 22 nt, synthetic construct
  source 1..22: mol_type = other RNA
acaggaggaccagttcccatcc

SEQ ID NO: 7333 - RNA, 22 nt, synthetic construct
  source 1..22: mol_type = other RNA
acagggcccccaggaagcattg

SEQ ID NO: 7334 - RNA, 22 nt, synthetic construct
  source 1..22: mol_type = other RNA
acatacccccaccctgacacgc

SEQ ID NO: 7335 - RNA, 22 nt, synthetic construct
  source 1..22: mol_type = other RNA
acatagagtcccgtgagcgtgg

SEQ ID NO: 7336 - RNA, 22 nt, synthetic construct
  source 1..22: mol_type = other RNA
acatcaaagtaccctacaggag

SEQ ID NO: 7337 - RNA, 22 nt, synthetic construct
  source 1..22: mol_type = other RNA
acatcttgaagagacctgaccg

SEQ ID NO: 7338 - RNA, 22 nt, synthetic construct
  source 1..22: mol_type = other RNA
acatgtactgggcaaggccttg

SEQ ID NO: 7339 - RNA, 22 nt, synthetic construct
  source 1..22: mol_type = other RNA
acatgtgcatcaggaggcgtga

SEQ ID NO: 7340 - RNA, 22 nt, synthetic construct
  source 1..22: mol_type = other RNA
accaagacagagccctgacgct

SEQ ID NO: 7341 - RNA, 22 nt, synthetic construct
  source 1..22: mol_type = other RNA
accacgtgctgccaaattccag

SEQ ID NO: 7342 - RNA, 22 nt, synthetic construct
  source 1..22: mol_type = other RNA
accagatccacctccactagga

SEQ ID NO: 7343 - RNA, 22 nt, synthetic construct
  source 1..22: mol_type = other RNA
accagctttgcccagcacagca

SEQ ID NO: 7344 - RNA, 22 nt, synthetic construct
  source 1..22: mol_type = other RNA
accagttcccatccgcagacgt

SEQ ID NO: 7345 - RNA, 22 nt, synthetic construct
  source 1..22: mol_type = other RNA
accatacgtgtcctgcagtgag

SEQ ID NO: 7346 - RNA, 22 nt, synthetic construct
  source 1..22: mol_type = other RNA
acccaccgcgggccgcagagtc

SEQ ID NO: 7347 - RNA, 22 nt, synthetic construct
  source 1..22: mol_type = other RNA
accccaaggaagaagaggccct

SEQ ID NO: 7348 - RNA, 22 nt, synthetic construct
  source 1..22: mol_type = other RNA
accccacctgaaacgggtgaca

SEQ ID NO: 7349 - RNA, 22 nt, synthetic construct
  source 1..22: mol_type = other RNA
acccccaccctgacacgcccct

SEQ ID NO: 7350 - RNA, 22 nt, synthetic construct
  source 1..22: mol_type = other RNA
accccggactgggcagaacggc

SEQ ID NO: 7351 - RNA, 22 nt, synthetic construct
  source 1..22: mol_type = other RNA
acccgcctcacgcctcctgatg

SEQ ID NO: 7352 - RNA, 22 nt, synthetic construct
  source 1..22: mol_type = other RNA
acccgtttcaggtggggtgagg

SEQ ID NO: 7353 - RNA, 22 nt, synthetic construct
  source 1..22: mol_type = other RNA
accctacaggaggaccagttcc

SEQ ID NO: 7354 - RNA, 22 nt, synthetic construct
  source 1..22: mol_type = other RNA
accctcctcctcacagcccggc

SEQ ID NO: 7355 - RNA, 22 nt, synthetic construct
  source 1..22: mol_type = other RNA
accctgacacgcccctggcctt

SEQ ID NO: 7356 - RNA, 22 nt, synthetic construct
  source 1..22: mol_type = other RNA
accgaggcagccgccgatggcc

SEQ ID NO: 7357 - RNA, 22 nt, synthetic construct
  source 1..22: mol_type = other RNA
accgcgggccgcagagtccgag

SEQ ID NO: 7358 - RNA, 22 nt, synthetic construct
  source 1..22: mol_type = other RNA
accgcgttctgctcatcctaga

SEQ ID NO: 7359 - RNA, 22 nt, synthetic construct
  source 1..22: mol_type = other RNA
accgctcactgcaggacacgta

SEQ ID NO: 7360 - RNA, 22 nt, synthetic construct
  source 1..22: mol_type = other RNA
accggccacttcttctcagtca

SEQ ID NO: 7361 - RNA, 22 nt, synthetic construct
  source 1..22: mol_type = other RNA
accggcggagccctgctccctc

SEQ ID NO: 7362 - RNA, 22 nt, synthetic construct
  source 1..22: mol_type = other RNA
accggcggccgcgtgagacacg

SEQ ID NO: 7363 - RNA, 22 nt, synthetic construct
  source 1..22: mol_type = other RNA
accggctctgcaaaggccaggg

SEQ ID NO: 7364 - RNA, 22 nt, synthetic construct
  source 1..22: mol_type = other RNA
accgtccgggggatgcctatgg

SEQ ID NO: 7365 - RNA, 22 nt, synthetic construct
  source 1..22: mol_type = other RNA
acctagcattgaccccaaggaa

SEQ ID NO: 7366 - RNA, 22 nt, synthetic construct
  source 1..22: mol_type = other RNA
acctcagccaggcctccttggg

SEQ ID NO: 7367 - RNA, 22 nt, synthetic construct
  source 1..22: mol_type = other RNA
acctcatcggccgccacgagtg

SEQ ID NO: 7368 - RNA, 22 nt, synthetic construct
  source 1..22: mol_type = other RNA
acctccactaggatgccatccg

SEQ ID NO: 7369 - RNA, 22 nt, synthetic construct
  source 1..22: mol_type = other RNA
acctccgcagcactggcatttg

SEQ ID NO: 7370 - RNA, 22 nt, synthetic construct
  source 1..22: mol_type = other RNA
acctcgcaagcaccttctgctt

SEQ ID NO: 7371 - RNA, 22 nt, synthetic construct
  source 1..22: mol_type = other RNA
acctcggagcagcttcttctgg

SEQ ID NO: 7372 - RNA, 22 nt, synthetic construct
  source 1..22: mol_type = other RNA
acctgaaacgggtgacacagct

SEQ ID NO: 7373 - RNA, 22 nt, synthetic construct
  source 1..22: mol_type = other RNA
acctgaagcggctgcagccggg

SEQ ID NO: 7374 - RNA, 22 nt, synthetic construct
  source 1..22: mol_type = other RNA
acctgaccgcgttctgctcatc

SEQ ID NO: 7375 - RNA, 22 nt, synthetic construct
  source 1..22: mol_type = other RNA
acctgggcgatggccaaaggct

SEQ ID NO: 7376 - RNA, 22 nt, synthetic construct
  source 1..22: mol_type = other RNA
accttctgcttcctgtccaccg

SEQ ID NO: 7377 - RNA, 22 nt, synthetic construct
  source 1..22: mol_type = other RNA
acgactttgtcttctctgtccc

SEQ ID NO: 7378 - RNA, 22 nt, synthetic construct
  source 1..22: mol_type = other RNA
acgaggccgaggaggctggaat

SEQ ID NO: 7379 - RNA, 22 nt, synthetic construct
  source 1..22: mol_type = other RNA
acgaggctccccaatccagagg

SEQ ID NO: 7380 - RNA, 22 nt, synthetic construct
  source 1..22: mol_type = other RNA
acgagtgattgctgtgctgggc

SEQ ID NO: 7381 - RNA, 22 nt, synthetic construct
  source 1..22: mol_type = other RNA
acgagtggctgtgggcccaggg

SEQ ID NO: 7382 - RNA, 22 nt, synthetic construct
  source 1..22: mol_type = other RNA
acgccaagctgccctccacgct

SEQ ID NO: 7383 - RNA, 22 nt, synthetic construct
  source 1..22: mol_type = other RNA
acgcccctggcctttgcagagc

SEQ ID NO: 7384 - RNA, 22 nt, synthetic construct
  source 1..22: mol_type = other RNA
acgccctatttgagctgtccgg

SEQ ID NO: 7385 - RNA, 22 nt, synthetic construct
  source 1..22: mol_type = other RNA
acgccctccagccagttgtcat

SEQ ID NO: 7386 - RNA, 22 nt, synthetic construct
  source 1..22: mol_type = other RNA
acgcctcctgatgcacatgtac

SEQ ID NO: 7387 - RNA, 22 nt, synthetic construct
  source 1..22: mol_type = other RNA
acgcggccgccggtgctccttg

SEQ ID NO: 7388 - RNA, 22 nt, synthetic construct
  source 1..22: mol_type = other RNA
acgcggtcaggtctcttcaaga

SEQ ID NO: 7389 - RNA, 22 nt, synthetic construct
  source 1..22: mol_type = other RNA
acgctcacgggactctatgtcg

SEQ ID NO: 7390 - RNA, 22 nt, synthetic construct
  source 1..22: mol_type = other RNA
acgctcctccgggaccggccac

SEQ ID NO: 7391 - RNA, 22 nt, synthetic construct
  source 1..22: mol_type = other RNA
acgctttctggctgggctgatc

SEQ ID NO: 7392 - RNA, 22 nt, synthetic construct
  source 1..22: mol_type = other RNA
acggcagctggcccaaggaggc

SEQ ID NO: 7393 - RNA, 22 nt, synthetic construct
  source 1..22: mol_type = other RNA
acggcccagcaggccgacatag

SEQ ID NO: 7394 - RNA, 22 nt, synthetic construct
  source 1..22: mol_type = other RNA
acggcttcgaggagctggaagc

SEQ ID NO: 7395 - RNA, 22 nt, synthetic construct
  source 1..22: mol_type = other RNA
acgggactctatgtcggcctgc

SEQ ID NO: 7396 - RNA, 22 nt, synthetic construct
  source 1..22: mol_type = other RNA
acgggtgacacagctgagtccc

SEQ ID NO: 7397 - RNA, 22 nt, synthetic construct
  source 1..22: mol_type = other RNA
acggttcaagcaatggcagggg

SEQ ID NO: 7398 - RNA, 22 nt, synthetic construct
  source 1..22: mol_type = other RNA
acgtatgcctgggcctgctcca

SEQ ID NO: 7399 - RNA, 22 nt, synthetic construct
  source 1..22: mol_type = other RNA
acgtatggtgccgagcccgcag

SEQ ID NO: 7400 - RNA, 22 nt, synthetic construct
  source 1..22: mol_type = other RNA
acgtctgcggatgggaactggt

SEQ ID NO: 7401 - RNA, 22 nt, synthetic construct
  source 1..22: mol_type = other RNA
acgtgaggacctgggcgatggc

SEQ ID NO: 7402 - RNA, 22 nt, synthetic construct
  source 1..22: mol_type = other RNA
acgtgatgcgctactttgagag

SEQ ID NO: 7403 - RNA, 22 nt, synthetic construct
  source 1..22: mol_type = other RNA
acgtgctgccaaattccagcct

SEQ ID NO: 7404 - RNA, 22 nt, synthetic construct
  source 1..22: mol_type = other RNA
acgtgctgtgcaggaagccatc

SEQ ID NO: 7405 - RNA, 22 nt, synthetic construct
  source 1..22: mol_type = other RNA
acgtggtacaggagctccccgg

SEQ ID NO: 7406 - RNA, 22 nt, synthetic construct
  source 1..22: mol_type = other RNA
acgtgtcctgcagtgagcggta

SEQ ID NO: 7407 - RNA, 22 nt, synthetic construct
  source 1..22: mol_type = other RNA
actaagcctttggccatcgccc

SEQ ID NO: 7408 - RNA, 22 nt, synthetic construct
  source 1..22: mol_type = other RNA
actaggatgccatccgggcctg

SEQ ID NO: 7409 - RNA, 22 nt, synthetic construct
  source 1..22: mol_type = other RNA
actcagagccagccacagggcc

SEQ ID NO: 7410 - RNA, 22 nt, synthetic construct
  source 1..22: mol_type = other RNA
actcagctgtgtcacccgtttc

SEQ ID NO: 7411 - RNA, 22 nt, synthetic construct
  source 1..22: mol_type = other RNA
actcgggccatcggcggctgcc

SEQ ID NO: 7412 - RNA, 22 nt, synthetic construct
  source 1..22: mol_type = other RNA
actcgtggcggccgatgaggtt

SEQ ID NO: 7413 - RNA, 22 nt, synthetic construct
  source 1..22: mol_type = other RNA
actcgtgtctcacgcggccgcc

SEQ ID NO: 7414 - RNA, 22 nt, synthetic construct
  source 1..22: mol_type = other RNA
actctatgtcggcctgctgggc

SEQ ID NO: 7415 - RNA, 22 nt, synthetic construct
  source 1..22: mol_type = other RNA
actctgcggcccgcggtgggtg

SEQ ID NO: 7416 - RNA, 22 nt, synthetic construct
  source 1..22: mol_type = other RNA
actgagaagaagtggccggtcc

SEQ ID NO: 7417 - RNA, 22 nt, synthetic construct
  source 1..22: mol_type = other RNA
actgcaggacacgtatggtgcc

SEQ ID NO: 7418 - RNA, 22 nt, synthetic construct
  source 1..22: mol_type = other RNA
actgccccagcccaatagctct

SEQ ID NO: 7419 - RNA, 22 nt, synthetic construct
  source 1..22: mol_type = other RNA
actgcccggcacaaagtagggc

SEQ ID NO: 7420 - RNA, 22 nt, synthetic construct
  source 1..22: mol_type = other RNA
actgcgcccacgaggccgagga

SEQ ID NO: 7421 - RNA, 22 nt, synthetic construct
  source 1..22: mol_type = other RNA
actgcgggagctccttgtcctt

SEQ ID NO: 7422 - RNA, 22 nt, synthetic construct
  source 1..22: mol_type = other RNA
actgcgggcgcggcagctgctg

SEQ ID NO: 7423 - RNA, 22 nt, synthetic construct
  source 1..22: mol_type = other RNA
actgctccaccggctctgcaaa

SEQ ID NO: 7424 - RNA, 22 nt, synthetic construct
  source 1..22: mol_type = other RNA
actggcatttgcccctctggat

SEQ ID NO: 7425 - RNA, 22 nt, synthetic construct
  source 1..22: mol_type = other RNA
actggccaccccggactgggca

SEQ ID NO: 7426 - RNA, 22 nt, synthetic construct
  source 1..22: mol_type = other RNA
actggctggagggcgtgccacg

SEQ ID NO: 7427 - RNA, 22 nt, synthetic construct
  source 1..22: mol_type = other RNA
actgggcaaggccttggaggcg

SEQ ID NO: 7428 - RNA, 22 nt, synthetic construct
  source 1..22: mol_type = other RNA
actgggcagaacggcagctggc

SEQ ID NO: 7429 - RNA, 22 nt, synthetic construct
  source 1..22: mol_type = other RNA
actggggaagccggccacaagc

SEQ ID NO: 7430 - RNA, 22 nt, synthetic construct
  source 1..22: mol_type = other RNA
actggtcctcctgtagggtact

SEQ ID NO: 7431 - RNA, 22 nt, synthetic construct
  source 1..22: mol_type = other RNA
acttctccctggacctccgcag

SEQ ID NO: 7432 - RNA, 22 nt, synthetic construct
  source 1..22: mol_type = other RNA
acttcttctcagtcacagccac

SEQ ID NO: 7433 - RNA, 22 nt, synthetic construct
  source 1..22: mol_type = other RNA
actttgagagctcagggatgac

SEQ ID NO: 7434 - RNA, 22 nt, synthetic construct
  source 1..22: mol_type = other RNA
actttgatgtctgcggcccagc

SEQ ID NO: 7435 - RNA, 22 nt, synthetic construct
  source 1..22: mol_type = other RNA
actttgtcttctctgtcccctg

SEQ ID NO: 7436 - RNA, 22 nt, synthetic construct
  source 1..22: mol_type = other RNA
actttgtgccgggcagtgtgcc

SEQ ID NO: 7437 - RNA, 22 nt, synthetic construct
  source 1..22: mol_type = other RNA
agaaaagagaggcggccgggga

SEQ ID NO: 7438 - RNA, 22 nt, synthetic construct
  source 1..22: mol_type = other RNA
agaaagcgtggcacgccctcca

SEQ ID NO: 7439 - RNA, 22 nt, synthetic construct
  source 1..22: mol_type = other RNA
agaacgcggtcaggtctcttca

SEQ ID NO: 7440 - RNA, 22 nt, synthetic construct
  source 1..22: mol_type = other RNA
agaacggcagctggcccaagga

SEQ ID NO: 7441 - RNA, 22 nt, synthetic construct
  source 1..22: mol_type = other RNA
agaactgctccaccggctctgc

SEQ ID NO: 7442 - RNA, 22 nt, synthetic construct
  source 1..22: mol_type = other RNA
agaagaagctgctccgaggttg

SEQ ID NO: 7443 - RNA, 22 nt, synthetic construct
  source 1..22: mol_type = other RNA
agaagaagtggccggtcccgga

SEQ ID NO: 7444 - RNA, 22 nt, synthetic construct
  source 1..22: mol_type = other RNA
agaagacaaagtcgtactgggg

SEQ ID NO: 7445 - RNA, 22 nt, synthetic construct
  source 1..22: mol_type = other RNA
agaagagcagatcctgcaggcc

SEQ ID NO: 7446 - RNA, 22 nt, synthetic construct
  source 1..22: mol_type = other RNA
agaagaggccctatgacaactg

SEQ ID NO: 7447 - RNA, 22 nt, synthetic construct
  source 1..22: mol_type = other RNA
agaagccggacagctcaaatag

SEQ ID NO: 7448 - RNA, 22 nt, synthetic construct
  source 1..22: mol_type = other RNA
agaagctgctccgaggttgcac

SEQ ID NO: 7449 - RNA, 22 nt, synthetic construct
  source 1..22: mol_type = other RNA
agaaggtgcttgcgaggtacct

SEQ ID NO: 7450 - RNA, 22 nt, synthetic construct
  source 1..22: mol_type = other RNA
agaagtcttggcccgccgcctc

SEQ ID NO: 7451 - RNA, 22 nt, synthetic construct
  source 1..22: mol_type = other RNA
agaagtggccggtcccggagga

SEQ ID NO: 7452 - RNA, 22 nt, synthetic construct
  source 1..22: mol_type = other RNA
agacaaagtcgtactggggaag

SEQ ID NO: 7453 - RNA, 22 nt, synthetic construct
  source 1..22: mol_type = other RNA
agacacgagtgattgctgtgct

SEQ ID NO: 7454 - RNA, 22 nt, synthetic construct
  source 1..22: mol_type = other RNA
agacagagccctgacgctcctc

SEQ ID NO: 7455 - RNA, 22 nt, synthetic construct
  source 1..22: mol_type = other RNA
agacatcaaagtaccctacagg

SEQ ID NO: 7456 - RNA, 22 nt, synthetic construct
  source 1..22: mol_type = other RNA
agacctgaccgcgttctgctca

SEQ ID NO: 7457 - RNA, 22 nt, synthetic construct
  source 1..22: mol_type = other RNA
agacggcttcgaggagctggaa

SEQ ID NO: 7458 - RNA, 22 nt, synthetic construct
  source 1..22: mol_type = other RNA
agacgtgaggacctgggcgatg

SEQ ID NO: 7459 - RNA, 22 nt, synthetic construct
  source 1..22: mol_type = other RNA
agacttctccctggacctccgc

SEQ ID NO: 7460 - RNA, 22 nt, synthetic construct
  source 1..22: mol_type = other RNA
agagaagacaaagtcgtactgg

SEQ ID NO: 7461 - RNA, 22 nt, synthetic construct
  source 1..22: mol_type = other RNA
agagacctgaccgcgttctgct

SEQ ID NO: 7462 - RNA, 22 nt, synthetic construct
  source 1..22: mol_type = other RNA
agagaggcggccggggagctcc

SEQ ID NO: 7463 - RNA, 22 nt, synthetic construct
  source 1..22: mol_type = other RNA
agagcaccaagacagagccctg

SEQ ID NO: 7464 - RNA, 22 nt, synthetic construct
  source 1..22: mol_type = other RNA
agagcagatcctgcaggccata

SEQ ID NO: 7465 - RNA, 22 nt, synthetic construct
  source 1..22: mol_type = other RNA
agagccagccacagggccccca

SEQ ID NO: 7466 - RNA, 22 nt, synthetic construct
  source 1..22: mol_type = other RNA
agagccctgacgctcctccggg

SEQ ID NO: 7467 - RNA, 22 nt, synthetic construct
  source 1..22: mol_type = other RNA
agagccggtggagcagttctac

SEQ ID NO: 7468 - RNA, 22 nt, synthetic construct
  source 1..22: mol_type = other RNA
agagcctgagcaaggccgacgc

SEQ ID NO: 7469 - RNA, 22 nt, synthetic construct
  source 1..22: mol_type = other RNA
agagcctggagcgggaactggc

SEQ ID NO: 7470 - RNA, 22 nt, synthetic construct
  source 1..22: mol_type = other RNA
agagctattgggctggggcagt

SEQ ID NO: 7471 - RNA, 22 nt, synthetic construct
  source 1..22: mol_type = other RNA
agagctcagggatgacagagca

SEQ ID NO: 7472 - RNA, 22 nt, synthetic construct
  source 1..22: mol_type = other RNA
agagctggcacactgcccggca

SEQ ID NO: 7473 - RNA, 22 nt, synthetic construct
  source 1..22: mol_type = other RNA
agagctggccaagctggcctgg

SEQ ID NO: 7474 - RNA, 22 nt, synthetic construct
  source 1..22: mol_type = other RNA
agaggagcagcagcaagagcct

SEQ ID NO: 7475 - RNA, 22 nt, synthetic construct
  source 1..22: mol_type = other RNA
agaggccctatgacaactggct

SEQ ID NO: 7476 - RNA, 22 nt, synthetic construct
  source 1..22: mol_type = other RNA
agaggccctgctggagcttggg

SEQ ID NO: 7477 - RNA, 22 nt, synthetic construct
  source 1..22: mol_type = other RNA
agaggcggccggggagctcctg

SEQ ID NO: 7478 - RNA, 22 nt, synthetic construct
  source 1..22: mol_type = other RNA
agaggggcaaatgccagtgctg

SEQ ID NO: 7479 - RNA, 22 nt, synthetic construct
  source 1..22: mol_type = other RNA
agagtcccgtgagcgtggaggg

SEQ ID NO: 7480 - RNA, 22 nt, synthetic construct
  source 1..22: mol_type = other RNA
agagtccgagctggccttcccc

SEQ ID NO: 7481 - RNA, 22 nt, synthetic construct
  source 1..22: mol_type = other RNA
agatcagcccagccagaaagcg

SEQ ID NO: 7482 - RNA, 22 nt, synthetic construct
  source 1..22: mol_type = other RNA
agatccacctccactaggatgc

SEQ ID NO: 7483 - RNA, 22 nt, synthetic construct
  source 1..22: mol_type = other RNA
agatcctgcaggccataggcat

SEQ ID NO: 7484 - RNA, 22 nt, synthetic construct
  source 1..22: mol_type = other RNA
agatggcttcctgcacagcacg

SEQ ID NO: 7485 - RNA, 22 nt, synthetic construct
  source 1..22: mol_type = other RNA
agatgtggctgaaaacctcatc

SEQ ID NO: 7486 - RNA, 22 nt, synthetic construct
  source 1..22: mol_type = other RNA
agcaagagcctggagcgggaac

SEQ ID NO: 7487 - RNA, 22 nt, synthetic construct
  source 1..22: mol_type = other RNA
agcaaggccgacgccctatttg

SEQ ID NO: 7488 - RNA, 22 nt, synthetic construct
  source 1..22: mol_type = other RNA
agcaatcactcgtgtctcacgc

SEQ ID NO: 7489 - RNA, 22 nt, synthetic construct
  source 1..22: mol_type = other RNA
agcaatggcaggggacagagaa

SEQ ID NO: 7490 - RNA, 22 nt, synthetic construct
  source 1..22: mol_type = other RNA
agcacagcaatcactcgtgtct

SEQ ID NO: 7491 - RNA, 22 nt, synthetic construct
  source 1..22: mol_type = other RNA
agcaccaagacagagccctgac

SEQ ID NO: 7492 - RNA, 22 nt, synthetic construct
  source 1..22: mol_type = other RNA
agcaccggcggccgcgtgagac

SEQ ID NO: 7493 - RNA, 22 nt, synthetic construct
  source 1..22: mol_type = other RNA
agcacctcagccaggcctcctt

SEQ ID NO: 7494 - RNA, 22 nt, synthetic construct
  source 1..22: mol_type = other RNA
agcaccttctgcttcctgtcca

SEQ ID NO: 7495 - RNA, 22 nt, synthetic construct
  source 1..22: mol_type = other RNA
agcacgtgcggaccggcaccgg

SEQ ID NO: 7496 - RNA, 22 nt, synthetic construct
  source 1..22: mol_type = other RNA
agcacgtggtacaggagctccc

SEQ ID NO: 7497 - RNA, 22 nt, synthetic construct
  source 1..22: mol_type = other RNA
agcactggcatttgcccctctg

SEQ ID NO: 7498 - RNA, 22 nt, synthetic construct
  source 1..22: mol_type = other RNA
agcagaacgcggtcaggtctct

SEQ ID NO: 7499 - RNA, 22 nt, synthetic construct
  source 1..22: mol_type = other RNA
agcagaaggtgcttgcgaggta

SEQ ID NO: 7500 - RNA, 22 nt, synthetic construct
  source 1..22: mol_type = other RNA
agcagatcctgcaggccatagg

SEQ ID NO: 7501 - RNA, 22 nt, synthetic construct
  source 1..22: mol_type = other RNA
agcagcaagagcctggagcggg

SEQ ID NO: 7502 - RNA, 22 nt, synthetic construct
  source 1..22: mol_type = other RNA
agcagcagcaagagcctggagc

SEQ ID NO: 7503 - RNA, 22 nt, synthetic construct
  source 1..22: mol_type = other RNA
agcagcccccggagggagcagg

SEQ ID NO: 7504 - RNA, 22 nt, synthetic construct
  source 1..22: mol_type = other RNA
agcagctccagcagctgccgcg

SEQ ID NO: 7505 - RNA, 22 nt, synthetic construct
  source 1..22: mol_type = other RNA
agcagctgccgcgcccgcagtg

SEQ ID NO: 7506 - RNA, 22 nt, synthetic construct
  source 1..22: mol_type = other RNA
agcagcttcttctggaaaaggc

SEQ ID NO: 7507 - RNA, 22 nt, synthetic construct
  source 1..22: mol_type = other RNA
agcaggcccaggcatacgtgat

SEQ ID NO: 7508 - RNA, 22 nt, synthetic construct
  source 1..22: mol_type = other RNA
agcaggccgacatagagtcccg

SEQ ID NO: 7509 - RNA, 22 nt, synthetic construct
  source 1..22: mol_type = other RNA
agcagggcctctgagagctggc

SEQ ID NO: 7510 - RNA, 22 nt, synthetic construct
  source 1..22: mol_type = other RNA
agcagttctaccgctcactgca

SEQ ID NO: 7511 - RNA, 22 nt, synthetic construct
  source 1..22: mol_type = other RNA
agcattgaccccaaggaagaag

SEQ ID NO: 7512 - RNA, 22 nt, synthetic construct
  source 1..22: mol_type = other RNA
agcattgcaggaggaagctggg

SEQ ID NO: 7513 - RNA, 22 nt, synthetic construct
  source 1..22: mol_type = other RNA
agccaacagcacctcagccagg

SEQ ID NO: 7514 - RNA, 22 nt, synthetic construct
  source 1..22: mol_type = other RNA
agccacagccctactttgtgcc

SEQ ID NO: 7515 - RNA, 22 nt, synthetic construct
  source 1..22: mol_type = other RNA
agccacagggcccccaggaagc

SEQ ID NO: 7516 - RNA, 22 nt, synthetic construct
  source 1..22: mol_type = other RNA
agccacatcttgaagagacctg

SEQ ID NO: 7517 - RNA, 22 nt, synthetic construct
  source 1..22: mol_type = other RNA
agccactcgtggcggccgatga

SEQ ID NO: 7518 - RNA, 22 nt, synthetic construct
  source 1..22: mol_type = other RNA
agccagaaagcgtggcacgccc

SEQ ID NO: 7519 - RNA, 22 nt, synthetic construct
  source 1..22: mol_type = other RNA
agccagccacagggcccccagg

SEQ ID NO: 7520 - RNA, 22 nt, synthetic construct
  source 1..22: mol_type = other RNA
agccaggcctccttgggccagc

SEQ ID NO: 7521 - RNA, 22 nt, synthetic construct
  source 1..22: mol_type = other RNA
agccagttgtcatagggcctct

SEQ ID NO: 7522 - RNA, 22 nt, synthetic construct
  source 1..22: mol_type = other RNA
agccatcttgcgcttccagctc

SEQ ID NO: 7523 - RNA, 22 nt, synthetic construct
  source 1..22: mol_type = other RNA
agcccaatagctcttgccctga

SEQ ID NO: 7524 - RNA, 22 nt, synthetic construct
  source 1..22: mol_type = other RNA
agcccagccagaaagcgtggca

SEQ ID NO: 7525 - RNA, 22 nt, synthetic construct
  source 1..22: mol_type = other RNA
agcccaggcccggctcactgcc

SEQ ID NO: 7526 - RNA, 22 nt, synthetic construct
  source 1..22: mol_type = other RNA
agcccccggagggagcagggct

SEQ ID NO: 7527 - RNA, 22 nt, synthetic construct
  source 1..22: mol_type = other RNA
agcccctcaccccacctgaaac

SEQ ID NO: 7528 - RNA, 22 nt, synthetic construct
  source 1..22: mol_type = other RNA
agcccgcaggcccggatggcat

SEQ ID NO: 7529 - RNA, 22 nt, synthetic construct
  source 1..22: mol_type = other RNA
agccctactcgggccatcggcg

SEQ ID NO: 7530 - RNA, 22 nt, synthetic construct
  source 1..22: mol_type = other RNA
agccctactttgtgccgggcag

SEQ ID NO: 7531 - RNA, 22 nt, synthetic construct
  source 1..22: mol_type = other RNA
agccctgacgctcctccgggac

SEQ ID NO: 7532 - RNA, 22 nt, synthetic construct
  source 1..22: mol_type = other RNA
agccctgctccctccgggggct

SEQ ID NO: 7533 - RNA, 22 nt, synthetic construct
  source 1..22: mol_type = other RNA
agccgccgatggcccgagtagg

SEQ ID NO: 7534 - RNA, 22 nt, synthetic construct
  source 1..22: mol_type = other RNA
agccgcttcaggtacctcgcaa

SEQ ID NO: 7535 - RNA, 22 nt, synthetic construct
  source 1..22: mol_type = other RNA
agccggacagctcaaatagggc

SEQ ID NO: 7536 - RNA, 22 nt, synthetic construct
  source 1..22: mol_type = other RNA
agccggccacaagcccaggccc

SEQ ID NO: 7537 - RNA, 22 nt, synthetic construct
  source 1..22: mol_type = other RNA
agccgggcctgggcttgtggcc

SEQ ID NO: 7538 - RNA, 22 nt, synthetic construct
  source 1..22: mol_type = other RNA
agccggtggagcagttctaccg

SEQ ID NO: 7539 - RNA, 22 nt, synthetic construct
  source 1..22: mol_type = other RNA
agccgtctaggatgagcagaac

SEQ ID NO: 7540 - RNA, 22 nt, synthetic construct
  source 1..22: mol_type = other RNA
agcctcctcggcctcgtgggcg

SEQ ID NO: 7541 - RNA, 22 nt, synthetic construct
  source 1..22: mol_type = other RNA
agcctcgtgggactcagctgtg

SEQ ID NO: 7542 - RNA, 22 nt, synthetic construct
  source 1..22: mol_type = other RNA
agcctgagcaaggccgacgccc

SEQ ID NO: 7543 - RNA, 22 nt, synthetic construct
  source 1..22: mol_type = other RNA
agcctggagcgggaactggcca

SEQ ID NO: 7544 - RNA, 22 nt, synthetic construct
  source 1..22: mol_type = other RNA
agcctggcctgcaccagatcca

SEQ ID NO: 7545 - RNA, 22 nt, synthetic construct
  source 1..22: mol_type = other RNA
agcctttggccatcgcccaggt

SEQ ID NO: 7546 - RNA, 22 nt, synthetic construct
  source 1..22: mol_type = other RNA
agcgcaagatggcttcctgcac

SEQ ID NO: 7547 - RNA, 22 nt, synthetic construct
  source 1..22: mol_type = other RNA
agcgcatcacgtatgcctgggc

SEQ ID NO: 7548 - RNA, 22 nt, synthetic construct
  source 1..22: mol_type = other RNA
agcggctgcagccggggacact

SEQ ID NO: 7549 - RNA, 22 nt, synthetic construct
  source 1..22: mol_type = other RNA
agcgggaactggccaccccgga

SEQ ID NO: 7550 - RNA, 22 nt, synthetic construct
  source 1..22: mol_type = other RNA
agcgggcgggaggctggaagat

SEQ ID NO: 7551 - RNA, 22 nt, synthetic construct
  source 1..22: mol_type = other RNA
agcggtagaactgctccaccgg

SEQ ID NO: 7552 - RNA, 22 nt, synthetic construct
  source 1..22: mol_type = other RNA
agcgtcagggctctgtcttggt

SEQ ID NO: 7553 - RNA, 22 nt, synthetic construct
  source 1..22: mol_type = other RNA
agcgtggagggcagcttggcgt

SEQ ID NO: 7554 - RNA, 22 nt, synthetic construct
  source 1..22: mol_type = other RNA
agcgtggcacgccctccagcca

SEQ ID NO: 7555 - RNA, 22 nt, synthetic construct
  source 1..22: mol_type = other RNA
agctattgggctggggcagtga

SEQ ID NO: 7556 - RNA, 22 nt, synthetic construct
  source 1..22: mol_type = other RNA
agctcaaatagggcgtcggcct

SEQ ID NO: 7557 - RNA, 22 nt, synthetic construct
  source 1..22: mol_type = other RNA
agctcagggatgacagagcacc

SEQ ID NO: 7558 - RNA, 22 nt, synthetic construct
  source 1..22: mol_type = other RNA
agctccagcagctgccgcgccc

SEQ ID NO: 7559 - RNA, 22 nt, synthetic construct
  source 1..22: mol_type = other RNA
agctccagcagggcctctgaga

SEQ ID NO: 7560 - RNA, 22 nt, synthetic construct
  source 1..22: mol_type = other RNA
agctcccaggccagcttggcca

SEQ ID NO: 7561 - RNA, 22 nt, synthetic construct
  source 1..22: mol_type = other RNA
agctccccggccgcctctcttt

SEQ ID NO: 7562 - RNA, 22 nt, synthetic construct
  source 1..22: mol_type = other RNA
agctcccgcagtacctagcatt

SEQ ID NO: 7563 - RNA, 22 nt, synthetic construct
  source 1..22: mol_type = other RNA
agctcctcgaagccgtctagga

SEQ ID NO: 7564 - RNA, 22 nt, synthetic construct
  source 1..22: mol_type = other RNA
agctcctgtaccacgtgctgcc

SEQ ID NO: 7565 - RNA, 22 nt, synthetic construct
  source 1..22: mol_type = other RNA
agctccttgtccttgatttcgc

SEQ ID NO: 7566 - RNA, 22 nt, synthetic construct
  source 1..22: mol_type = other RNA
agctcggactctgcggcccgcg

SEQ ID NO: 7567 - RNA, 22 nt, synthetic construct
  source 1..22: mol_type = other RNA
agctctcaaagtagcgcatcac

SEQ ID NO: 7568 - RNA, 22 nt, synthetic construct
  source 1..22: mol_type = other RNA
agctctcagaggccctgctgga

SEQ ID NO: 7569 - RNA, 22 nt, synthetic construct
  source 1..22: mol_type = other RNA
agctcttgccctgaccagcttt

SEQ ID NO: 7570 - RNA, 22 nt, synthetic construct
  source 1..22: mol_type = other RNA
agctgagtcccacgaggctccc

SEQ ID NO: 7571 - RNA, 22 nt, synthetic construct
  source 1..22: mol_type = other RNA
agctgccctccacgctcacggg

SEQ ID NO: 7572 - RNA, 22 nt, synthetic construct
  source 1..22: mol_type = other RNA
agctgccgcgcccgcagtgtcc

SEQ ID NO: 7573 - RNA, 22 nt, synthetic construct
  source 1..22: mol_type = other RNA
agctgccgttctgcccagtccg

SEQ ID NO: 7574 - RNA, 22 nt, synthetic construct
  source 1..22: mol_type = other RNA
agctgctccgaggttgcaccct

SEQ ID NO: 7575 - RNA, 22 nt, synthetic construct
  source 1..22: mol_type = other RNA
agctgctgcactgcgcccacga

SEQ ID NO: 7576 - RNA, 22 nt, synthetic construct
  source 1..22: mol_type = other RNA
agctgctggagctgctgcactg

SEQ ID NO: 7577 - RNA, 22 nt, synthetic construct
  source 1..22: mol_type = other RNA
agctggaagcgcaagatggctt

SEQ ID NO: 7578 - RNA, 22 nt, synthetic construct
  source 1..22: mol_type = other RNA
agctggcacactgcccggcaca

SEQ ID NO: 7579 - RNA, 22 nt, synthetic construct
  source 1..22: mol_type = other RNA
agctggccaagctggcctggga

SEQ ID NO: 7580 - RNA, 22 nt, synthetic construct
  source 1..22: mol_type = other RNA
agctggcccaaggaggcctggc

SEQ ID NO: 7581 - RNA, 22 nt, synthetic construct
  source 1..22: mol_type = other RNA
agctggcctgggagctgggccg

SEQ ID NO: 7582 - RNA, 22 nt, synthetic construct
  source 1..22: mol_type = other RNA
agctggccttccccagcttcct

SEQ ID NO: 7583 - RNA, 22 nt, synthetic construct
  source 1..22: mol_type = other RNA
agctgggccgcagacatcaaag

SEQ ID NO: 7584 - RNA, 22 nt, synthetic construct
  source 1..22: mol_type = other RNA
agctggggaaggccagctcgga

SEQ ID NO: 7585 - RNA, 22 nt, synthetic construct
  source 1..22: mol_type = other RNA
agctggtcagggcaagagctat

SEQ ID NO: 7586 - RNA, 22 nt, synthetic construct
  source 1..22: mol_type = other RNA
agctgtccggcttctccatgga

SEQ ID NO: 7587 - RNA, 22 nt, synthetic construct
  source 1..22: mol_type = other RNA
agctgtgtcacccgtttcaggt

SEQ ID NO: 7588 - RNA, 22 nt, synthetic construct
  source 1..22: mol_type = other RNA
agcttcctcctgcaatgcttcc

SEQ ID NO: 7589 - RNA, 22 nt, synthetic construct
  source 1..22: mol_type = other RNA
agcttcttctggaaaaggccgg

SEQ ID NO: 7590 - RNA, 22 nt, synthetic construct
  source 1..22: mol_type = other RNA
agcttggccagctctgccaggg

SEQ ID NO: 7591 - RNA, 22 nt, synthetic construct
  source 1..22: mol_type = other RNA
agcttggcgtcctccccaagct

SEQ ID NO: 7592 - RNA, 22 nt, synthetic construct
  source 1..22: mol_type = other RNA
agcttggggaggacgccaagct

SEQ ID NO: 7593 - RNA, 22 nt, synthetic construct
  source 1..22: mol_type = other RNA
agctttgcccagcacagcaatc

SEQ ID NO: 7594 - RNA, 22 nt, synthetic construct
  source 1..22: mol_type = other RNA
aggaagaagaggccctatgaca

SEQ ID NO: 7595 - RNA, 22 nt, synthetic construct
  source 1..22: mol_type = other RNA
aggaagcagaaggtgcttgcga

SEQ ID NO: 7596 - RNA, 22 nt, synthetic construct
  source 1..22: mol_type = other RNA
aggaagcattgcaggaggaagc

SEQ ID NO: 7597 - RNA, 22 nt, synthetic construct
  source 1..22: mol_type = other RNA
aggaagccatcttgcgcttcca

SEQ ID NO: 7598 - RNA, 22 nt, synthetic construct
  source 1..22: mol_type = other RNA
aggaagctggggaaggccagct

SEQ ID NO: 7599 - RNA, 22 nt, synthetic construct
  source 1..22: mol_type = other RNA
aggacaaggagctcccgcagta

SEQ ID NO: 7600 - RNA, 22 nt, synthetic construct
  source 1..22: mol_type = other RNA
aggacacgtatggtgccgagcc

SEQ ID NO: 7601 - RNA, 22 nt, synthetic construct
  source 1..22: mol_type = other RNA
aggaccagttcccatccgcaga

SEQ ID NO: 7602 - RNA, 22 nt, synthetic construct
  source 1..22: mol_type = other RNA
aggacctgggcgatggccaaag

SEQ ID NO: 7603 - RNA, 22 nt, synthetic construct
  source 1..22: mol_type = other RNA
aggacgccaagctgccctccac

SEQ ID NO: 7604 - RNA, 22 nt, synthetic construct
  source 1..22: mol_type = other RNA
aggagcaccggcggccgcgtga

SEQ ID NO: 7605 - RNA, 22 nt, synthetic construct
  source 1..22: mol_type = other RNA
aggagcagcagcaagagcctgg

SEQ ID NO: 7606 - RNA, 22 nt, synthetic construct
  source 1..22: mol_type = other RNA
aggagcgtcagggctctgtctt

SEQ ID NO: 7607 - RNA, 22 nt, synthetic construct
  source 1..22: mol_type = other RNA
aggagctccccggccgcctctc

SEQ ID NO: 7608 - RNA, 22 nt, synthetic construct
  source 1..22: mol_type = other RNA
aggagctcccgcagtacctagc

SEQ ID NO: 7609 - RNA, 22 nt, synthetic construct
  source 1..22: mol_type = other RNA
aggagctggaagcgcaagatgg

SEQ ID NO: 7610 - RNA, 22 nt, synthetic construct
  source 1..22: mol_type = other RNA
aggaggaagctggggaaggcca

SEQ ID NO: 7611 - RNA, 22 nt, synthetic construct
  source 1..22: mol_type = other RNA
aggaggaccagttcccatccgc

SEQ ID NO: 7612 - RNA, 22 nt, synthetic construct
  source 1..22: mol_type = other RNA
aggaggagggtgcaacctcgga

SEQ ID NO: 7613 - RNA, 22 nt, synthetic construct
  source 1..22: mol_type = other RNA
aggaggcctggctgaggtgctg

SEQ ID NO: 7614 - RNA, 22 nt, synthetic construct
  source 1..22: mol_type = other RNA
aggaggcgtgaggcgggtgccc

SEQ ID NO: 7615 - RNA, 22 nt, synthetic construct
  source 1..22: mol_type = other RNA
aggaggctggaatttggcagca

SEQ ID NO: 7616 - RNA, 22 nt, synthetic construct
  source 1..22: mol_type = other RNA
aggagggtgcaacctcggagca

SEQ ID NO: 7617 - RNA, 22 nt, synthetic construct
  source 1..22: mol_type = other RNA
aggatctgctcttctccctggg

SEQ ID NO: 7618 - RNA, 22 nt, synthetic construct
  source 1..22: mol_type = other RNA
aggatgagcagaacgcggtcag

SEQ ID NO: 7619 - RNA, 22 nt, synthetic construct
  source 1..22: mol_type = other RNA
aggatgccatccgggcctgcgg

SEQ ID NO: 7620 - RNA, 22 nt, synthetic construct
  source 1..22: mol_type = other RNA
aggatgtctcttccccaagccc

SEQ ID NO: 7621 - RNA, 22 nt, synthetic construct
  source 1..22: mol_type = other RNA
aggcagccgccgatggcccgag

SEQ ID NO: 7622 - RNA, 22 nt, synthetic construct
  source 1..22: mol_type = other RNA
aggcagcgggcgggaggctgga

SEQ ID NO: 7623 - RNA, 22 nt, synthetic construct
  source 1..22: mol_type = other RNA
aggcatacgtgatgcgctactt

SEQ ID NO: 7624 - RNA, 22 nt, synthetic construct
  source 1..22: mol_type = other RNA
aggcatcccccggacggttcaa

SEQ ID NO: 7625 - RNA, 22 nt, synthetic construct
  source 1..22: mol_type = other RNA
aggccagctcggactctgcggc

SEQ ID NO: 7626 - RNA, 22 nt, synthetic construct
  source 1..22: mol_type = other RNA
aggccagcttggccagctctgc

SEQ ID NO: 7627 - RNA, 22 nt, synthetic construct
  source 1..22: mol_type = other RNA
aggccaggctggagaggagcag

SEQ ID NO: 7628 - RNA, 22 nt, synthetic construct
  source 1..22: mol_type = other RNA
aggccaggggcgtgtcagggtg

SEQ ID NO: 7629 - RNA, 22 nt, synthetic construct
  source 1..22: mol_type = other RNA
aggccataggcatcccccggac

SEQ ID NO: 7630 - RNA, 22 nt, synthetic construct
  source 1..22: mol_type = other RNA
aggcccaggcatacgtgatgcg

SEQ ID NO: 7631 - RNA, 22 nt, synthetic construct
  source 1..22: mol_type = other RNA
aggcccggatggcatcctagtg

SEQ ID NO: 7632 - RNA, 22 nt, synthetic construct
  source 1..22: mol_type = other RNA
aggcccggctcactgccccagc

SEQ ID NO: 7633 - RNA, 22 nt, synthetic construct
  source 1..22: mol_type = other RNA
aggccctatgacaactggctgg

SEQ ID NO: 7634 - RNA, 22 nt, synthetic construct
  source 1..22: mol_type = other RNA
aggccctgctggagcttgggga

SEQ ID NO: 7635 - RNA, 22 nt, synthetic construct
  source 1..22: mol_type = other RNA
aggccgacatagagtcccgtga

SEQ ID NO: 7636 - RNA, 22 nt, synthetic construct
  source 1..22: mol_type = other RNA
aggccgacgccctatttgagct

SEQ ID NO: 7637 - RNA, 22 nt, synthetic construct
  source 1..22: mol_type = other RNA
aggccgaggaggctggaatttg

SEQ ID NO: 7638 - RNA, 22 nt, synthetic construct
  source 1..22: mol_type = other RNA
aggcctccttgggccagctgcc

SEQ ID NO: 7639 - RNA, 22 nt, synthetic construct
  source 1..22: mol_type = other RNA
aggcctggctgaggtgctgttg

SEQ ID NO: 7640 - RNA, 22 nt, synthetic construct
  source 1..22: mol_type = other RNA
aggccttgcccagtacatgtgc

SEQ ID NO: 7641 - RNA, 22 nt, synthetic construct
  source 1..22: mol_type = other RNA
aggccttggaggcggcgggcca

SEQ ID NO: 7642 - RNA, 22 nt, synthetic construct
  source 1..22: mol_type = other RNA
aggcggccggggagctcctgta

SEQ ID NO: 7643 - RNA, 22 nt, synthetic construct
  source 1..22: mol_type = other RNA
aggcggcgggccaagacttctc

SEQ ID NO: 7644 - RNA, 22 nt, synthetic construct
  source 1..22: mol_type = other RNA
aggcgggtgcccagaaaagaga

SEQ ID NO: 7645 - RNA, 22 nt, synthetic construct
  source 1..22: mol_type = other RNA
aggcgtgaggcgggtgcccaga

SEQ ID NO: 7646 - RNA, 22 nt, synthetic construct
  source 1..22: mol_type = other RNA
aggctccccaatccagaggggc

SEQ ID NO: 7647 - RNA, 22 nt, synthetic construct
  source 1..22: mol_type = other RNA
aggctctggaccaggcggcccc

SEQ ID NO: 7648 - RNA, 22 nt, synthetic construct
  source 1..22: mol_type = other RNA
aggctcttgctgctgctcctct

SEQ ID NO: 7649 - RNA, 22 nt, synthetic construct
  source 1..22: mol_type = other RNA
aggctggaagatcagcccagcc

SEQ ID NO: 7650 - RNA, 22 nt, synthetic construct
  source 1..22: mol_type = other RNA
aggctggaatttggcagcacgt

SEQ ID NO: 7651 - RNA, 22 nt, synthetic construct
  source 1..22: mol_type = other RNA
aggctggagaggagcagcagca

SEQ ID NO: 7652 - RNA, 22 nt, synthetic construct
  source 1..22: mol_type = other RNA
aggcttagtccaacacccaccg

SEQ ID NO: 7653 - RNA, 22 nt, synthetic construct
  source 1..22: mol_type = other RNA
agggagaagagcagatcctgca

SEQ ID NO: 7654 - RNA, 22 nt, synthetic construct
  source 1..22: mol_type = other RNA
agggagaagtcttggcccgccg

SEQ ID NO: 7655 - RNA, 22 nt, synthetic construct
  source 1..22: mol_type = other RNA
agggagcagggctccgccggtg

SEQ ID NO: 7656 - RNA, 22 nt, synthetic construct
  source 1..22: mol_type = other RNA
agggatgacagagcaccaagac

SEQ ID NO: 7657 - RNA, 22 nt, synthetic construct
  source 1..22: mol_type = other RNA
agggcaagagctattgggctgg

SEQ ID NO: 7658 - RNA, 22 nt, synthetic construct
  source 1..22: mol_type = other RNA
agggcagcttggcgtcctcccc

SEQ ID NO: 7659 - RNA, 22 nt, synthetic construct
  source 1..22: mol_type = other RNA
agggcccccaggaagcattgca

SEQ ID NO: 7660 - RNA, 22 nt, synthetic construct
  source 1..22: mol_type = other RNA
agggcctctgagagctggcaca

SEQ ID NO: 7661 - RNA, 22 nt, synthetic construct
  source 1..22: mol_type = other RNA
agggcctcttcttccttggggt

SEQ ID NO: 7662 - RNA, 22 nt, synthetic construct
  source 1..22: mol_type = other RNA
agggcgtcggccttgctcaggc

SEQ ID NO: 7663 - RNA, 22 nt, synthetic construct
  source 1..22: mol_type = other RNA
agggcgtgccacgctttctggc

SEQ ID NO: 7664 - RNA, 22 nt, synthetic construct
  source 1..22: mol_type = other RNA
agggctctgtcttggtgctctg

SEQ ID NO: 7665 - RNA, 22 nt, synthetic construct
  source 1..22: mol_type = other RNA
agggctgcacggcccagcaggc

SEQ ID NO: 7666 - RNA, 22 nt, synthetic construct
  source 1..22: mol_type = other RNA
agggctgtggctgtgactgaga

SEQ ID NO: 7667 - RNA, 22 nt, synthetic construct
  source 1..22: mol_type = other RNA
aggggacagagaagacaaagtc

SEQ ID NO: 7668 - RNA, 22 nt, synthetic construct
  source 1..22: mol_type = other RNA
aggggcaaatgccagtgctgcg

SEQ ID NO: 7669 - RNA, 22 nt, synthetic construct
  source 1..22: mol_type = other RNA
aggggcgtgtcagggtgggggt

SEQ ID NO: 7670 - RNA, 22 nt, synthetic construct
  source 1..22: mol_type = other RNA
aggggcttggggaagagacatc

SEQ ID NO: 7671 - RNA, 22 nt, synthetic construct
  source 1..22: mol_type = other RNA
agggtactttgatgtctgcggc

SEQ ID NO: 7672 - RNA, 22 nt, synthetic construct
  source 1..22: mol_type = other RNA
agggtgcaacctcggagcagct

SEQ ID NO: 7673 - RNA, 22 nt, synthetic construct
  source 1..22: mol_type = other RNA
aggtacctcgcaagcaccttct

SEQ ID NO: 7674 - RNA, 22 nt, synthetic construct
  source 1..22: mol_type = other RNA
aggtacctgaagcggctgcagc

SEQ ID NO: 7675 - RNA, 22 nt, synthetic construct
  source 1..22: mol_type = other RNA
aggtactgcgggagctccttgt

SEQ ID NO: 7676 - RNA, 22 nt, synthetic construct
  source 1..22: mol_type = other RNA
aggtccagggagaagtcttggc

SEQ ID NO: 7677 - RNA, 22 nt, synthetic construct
  source 1..22: mol_type = other RNA
aggtcctcacgtctgcggatgg

SEQ ID NO: 7678 - RNA, 22 nt, synthetic construct
  source 1..22: mol_type = other RNA
aggtctcttcaagatgtggctg

SEQ ID NO: 7679 - RNA, 22 nt, synthetic construct
  source 1..22: mol_type = other RNA
aggtgctgttggctgccaagga

SEQ ID NO: 7680 - RNA, 22 nt, synthetic construct
  source 1..22: mol_type = other RNA
aggtgcttgcgaggtacctgaa

SEQ ID NO: 7681 - RNA, 22 nt, synthetic construct
  source 1..22: mol_type = other RNA
aggtggatctggtgcaggccag

SEQ ID NO: 7682 - RNA, 22 nt, synthetic construct
  source 1..22: mol_type = other RNA
aggtggggtgaggggcttgggg

SEQ ID NO: 7683 - RNA, 22 nt, synthetic construct
  source 1..22: mol_type = other RNA
aggttgcaccctcctcctcaca

SEQ ID NO: 7684 - RNA, 22 nt, synthetic construct
  source 1..22: mol_type = other RNA
aggttttcagccacatcttgaa

SEQ ID NO: 7685 - RNA, 22 nt, synthetic construct
  source 1..22: mol_type = other RNA
agtacatgtgcatcaggaggcg

SEQ ID NO: 7686 - RNA, 22 nt, synthetic construct
  source 1..22: mol_type = other RNA
agtaccctacaggaggaccagt

SEQ ID NO: 7687 - RNA, 22 nt, synthetic construct
  source 1..22: mol_type = other RNA
agtacctagcattgaccccaag

SEQ ID NO: 7688 - RNA, 22 nt, synthetic construct
  source 1..22: mol_type = other RNA
agtacgactttgtcttctctgt

SEQ ID NO: 7689 - RNA, 22 nt, synthetic construct
  source 1..22: mol_type = other RNA
agtagcgcatcacgtatgcctg

SEQ ID NO: 7690 - RNA, 22 nt, synthetic construct
  source 1..22: mol_type = other RNA
agtagggctcccaggcagcggg

SEQ ID NO: 7691 - RNA, 22 nt, synthetic construct
  source 1..22: mol_type = other RNA
agtagggctgtggctgtgactg

SEQ ID NO: 7692 - RNA, 22 nt, synthetic construct
  source 1..22: mol_type = other RNA
agtcacagccacagccctactt

SEQ ID NO: 7693 - RNA, 22 nt, synthetic construct
  source 1..22: mol_type = other RNA
agtccaacacccaccgcgggcc

SEQ ID NO: 7694 - RNA, 22 nt, synthetic construct
  source 1..22: mol_type = other RNA
agtcccacgaggctccccaatc

SEQ ID NO: 7695 - RNA, 22 nt, synthetic construct
  source 1..22: mol_type = other RNA
agtcccgtgagcgtggagggca

SEQ ID NO: 7696 - RNA, 22 nt, synthetic construct
  source 1..22: mol_type = other RNA
agtccgagctggccttccccag

SEQ ID NO: 7697 - RNA, 22 nt, synthetic construct
  source 1..22: mol_type = other RNA
agtccggggtggccagttcccg

SEQ ID NO: 7698 - RNA, 22 nt, synthetic construct
  source 1..22: mol_type = other RNA
agtcgtactggggaagccggcc

SEQ ID NO: 7699 - RNA, 22 nt, synthetic construct
  source 1..22: mol_type = other RNA
agtcttggcccgccgcctccaa

SEQ ID NO: 7700 - RNA, 22 nt, synthetic construct
  source 1..22: mol_type = other RNA
agtgagccgggcctgggcttgt

SEQ ID NO: 7701 - RNA, 22 nt, synthetic construct
  source 1..22: mol_type = other RNA
agtgagcggtagaactgctcca

SEQ ID NO: 7702 - RNA, 22 nt, synthetic construct
  source 1..22: mol_type = other RNA
agtgattgctgtgctgggcaaa

SEQ ID NO: 7703 - RNA, 22 nt, synthetic construct
  source 1..22: mol_type = other RNA
agtgcagcagctccagcagctg

SEQ ID NO: 7704 - RNA, 22 nt, synthetic construct
  source 1..22: mol_type = other RNA
agtgctgcggaggtccagggag

SEQ ID NO: 7705 - RNA, 22 nt, synthetic construct
  source 1..22: mol_type = other RNA
agtggaggtggatctggtgcag

SEQ ID NO: 7706 - RNA, 22 nt, synthetic construct
  source 1..22: mol_type = other RNA
agtggccggtcccggaggagcg

SEQ ID NO: 7707 - RNA, 22 nt, synthetic construct
  source 1..22: mol_type = other RNA
agtggcgaaatcaaggacaagg

SEQ ID NO: 7708 - RNA, 22 nt, synthetic construct
  source 1..22: mol_type = other RNA
agtggctgtgggcccagggaga

SEQ ID NO: 7709 - RNA, 22 nt, synthetic construct
  source 1..22: mol_type = other RNA
agtgtccccggctgcagccgct

SEQ ID NO: 7710 - RNA, 22 nt, synthetic construct
  source 1..22: mol_type = other RNA
agtgtgccagctctcagaggcc

SEQ ID NO: 7711 - RNA, 22 nt, synthetic construct
  source 1..22: mol_type = other RNA
agttcccatccgcagacgtgag

SEQ ID NO: 7712 - RNA, 22 nt, synthetic construct
  source 1..22: mol_type = other RNA
agttcccgctccaggctcttgc

SEQ ID NO: 7713 - RNA, 22 nt, synthetic construct
  source 1..22: mol_type = other RNA
agttctaccgctcactgcagga

SEQ ID NO: 7714 - RNA, 22 nt, synthetic construct
  source 1..22: mol_type = other RNA
agttgtcatagggcctcttctt

SEQ ID NO: 7715 - RNA, 22 nt, synthetic construct
  source 1..22: mol_type = other RNA
atacccccaccctgacacgccc

SEQ ID NO: 7716 - RNA, 22 nt, synthetic construct
  source 1..22: mol_type = other RNA
atacgtgatgcgctactttgag

SEQ ID NO: 7717 - RNA, 22 nt, synthetic construct
  source 1..22: mol_type = other RNA
atacgtgtcctgcagtgagcgg

SEQ ID NO: 7718 - RNA, 22 nt, synthetic construct
  source 1..22: mol_type = other RNA
atagagtcccgtgagcgtggag

SEQ ID NO: 7719 - RNA, 22 nt, synthetic construct
  source 1..22: mol_type = other RNA
atagctcttgccctgaccagct

SEQ ID NO: 7720 - RNA, 22 nt, synthetic construct
  source 1..22: mol_type = other RNA
ataggcatcccccggacggttc

SEQ ID NO: 7721 - RNA, 22 nt, synthetic construct
  source 1..22: mol_type = other RNA
atagggcctcttcttccttggg

SEQ ID NO: 7722 - RNA, 22 nt, synthetic construct
  source 1..22: mol_type = other RNA
atagggcgtcggccttgctcag

SEQ ID NO: 7723 - RNA, 22 nt, synthetic construct
  source 1..22: mol_type = other RNA
atcaaagtaccctacaggagga

SEQ ID NO: 7724 - RNA, 22 nt, synthetic construct
  source 1..22: mol_type = other RNA
atcaaggacaaggagctcccgc

SEQ ID NO: 7725 - RNA, 22 nt, synthetic construct
  source 1..22: mol_type = other RNA
atcacgtatgcctgggcctgct

SEQ ID NO: 7726 - RNA, 22 nt, synthetic construct
  source 1..22: mol_type = other RNA
atcactcgtgtctcacgcggcc

SEQ ID NO: 7727 - RNA, 22 nt, synthetic construct
  source 1..22: mol_type = other RNA
atcagcccagccagaaagcgtg

SEQ ID NO: 7728 - RNA, 22 nt, synthetic construct
  source 1..22: mol_type = other RNA
atcaggaggcgtgaggcgggtg

SEQ ID NO: 7729 - RNA, 22 nt, synthetic construct
  source 1..22: mol_type = other RNA
atccacctccactaggatgcca

SEQ ID NO: 7730 - RNA, 22 nt, synthetic construct
  source 1..22: mol_type = other RNA
atccagaggggcaaatgccagt

SEQ ID NO: 7731 - RNA, 22 nt, synthetic construct
  source 1..22: mol_type = other RNA
atcccccggacggttcaagcaa

SEQ ID NO: 7732 - RNA, 22 nt, synthetic construct
  source 1..22: mol_type = other RNA
atccctgagctctcaaagtagc

SEQ ID NO: 7733 - RNA, 22 nt, synthetic construct
  source 1..22: mol_type = other RNA
atccgcagacgtgaggacctgg

SEQ ID NO: 7734 - RNA, 22 nt, synthetic construct
  source 1..22: mol_type = other RNA
atccgggcctgcgggctcggca

SEQ ID NO: 7735 - RNA, 22 nt, synthetic construct
  source 1..22: mol_type = other RNA
atcctagacggcttcgaggagc

SEQ ID NO: 7736 - RNA, 22 nt, synthetic construct
  source 1..22: mol_type = other RNA
atcctagtggaggtggatctgg

SEQ ID NO: 7737 - RNA, 22 nt, synthetic construct
  source 1..22: mol_type = other RNA
atcctgcaggccataggcatcc

SEQ ID NO: 7738 - RNA, 22 nt, synthetic construct
  source 1..22: mol_type = other RNA
atcgcccaggtcctcacgtctg

SEQ ID NO: 7739 - RNA, 22 nt, synthetic construct
  source 1..22: mol_type = other RNA
atcggccgccacgagtggctgt

SEQ ID NO: 7740 - RNA, 22 nt, synthetic construct
  source 1..22: mol_type = other RNA
atcggcggctgcctcggtggac

SEQ ID NO: 7741 - RNA, 22 nt, synthetic construct
  source 1..22: mol_type = other RNA
atctgctcttctccctgggccc

SEQ ID NO: 7742 - RNA, 22 nt, synthetic construct
  source 1..22: mol_type = other RNA
atctggtgcaggccaggctgga

SEQ ID NO: 7743 - RNA, 22 nt, synthetic construct
  source 1..22: mol_type = other RNA
atcttccagcctcccgcccgct

SEQ ID NO: 7744 - RNA, 22 nt, synthetic construct
  source 1..22: mol_type = other RNA
atcttgaagagacctgaccgcg

SEQ ID NO: 7745 - RNA, 22 nt, synthetic construct
  source 1..22: mol_type = other RNA
atcttgcgcttccagctcctcg

SEQ ID NO: 7746 - RNA, 22 nt, synthetic construct
  source 1..22: mol_type = other RNA
atgacaactggctggagggcgt

SEQ ID NO: 7747 - RNA, 22 nt, synthetic construct
  source 1..22: mol_type = other RNA
atgacagagcaccaagacagag

SEQ ID NO: 7748 - RNA, 22 nt, synthetic construct
  source 1..22: mol_type = other RNA
atgagcagaacgcggtcaggtc

SEQ ID NO: 7749 - RNA, 22 nt, synthetic construct
  source 1..22: mol_type = other RNA
atgaggttttcagccacatctt

SEQ ID NO: 7750 - RNA, 22 nt, synthetic construct
  source 1..22: mol_type = other RNA
atgcacatgtactgggcaaggc

SEQ ID NO: 7751 - RNA, 22 nt, synthetic construct
  source 1..22: mol_type = other RNA
atgccagtgctgcggaggtcca

SEQ ID NO: 7752 - RNA, 22 nt, synthetic construct
  source 1..22: mol_type = other RNA
atgccatccgggcctgcgggct

SEQ ID NO: 7753 - RNA, 22 nt, synthetic construct
  source 1..22: mol_type = other RNA
atgcccaacacaaggatgtctc

SEQ ID NO: 7754 - RNA, 22 nt, synthetic construct
  source 1..22: mol_type = other RNA
atgcctatggcctgcaggatct

SEQ ID NO: 7755 - RNA, 22 nt, synthetic construct
  source 1..22: mol_type = other RNA
atgcctgggcctgctccatgga

SEQ ID NO: 7756 - RNA, 22 nt, synthetic construct
  source 1..22: mol_type = other RNA
atgcgctactttgagagctcag

SEQ ID NO: 7757 - RNA, 22 nt, synthetic construct
  source 1..22: mol_type = other RNA
atgctaggtactgcgggagctc

SEQ ID NO: 7758 - RNA, 22 nt, synthetic construct
  source 1..22: mol_type = other RNA
atgcttcctgggggccctgtgg

SEQ ID NO: 7759 - RNA, 22 nt, synthetic construct
  source 1..22: mol_type = other RNA
atggagaagccggacagctcaa

SEQ ID NO: 7760 - RNA, 22 nt, synthetic construct
  source 1..22: mol_type = other RNA
atggagcaggcccaggcatacg

SEQ ID NO: 7761 - RNA, 22 nt, synthetic construct
  source 1..22: mol_type = other RNA
atggcaggggacagagaagaca

SEQ ID NO: 7762 - RNA, 22 nt, synthetic construct
  source 1..22: mol_type = other RNA
atggcatcctagtggaggtgga

SEQ ID NO: 7763 - RNA, 22 nt, synthetic construct
  source 1..22: mol_type = other RNA
atggccaaaggcttagtccaac

SEQ ID NO: 7764 - RNA, 22 nt, synthetic construct
  source 1..22: mol_type = other RNA
atggcccgagtagggctcccag

SEQ ID NO: 7765 - RNA, 22 nt, synthetic construct
  source 1..22: mol_type = other RNA
atggcctgcaggatctgctctt

SEQ ID NO: 7766 - RNA, 22 nt, synthetic construct
  source 1..22: mol_type = other RNA
atggcttcctgcacagcacgtg

SEQ ID NO: 7767 - RNA, 22 nt, synthetic construct
  source 1..22: mol_type = other RNA
atgggaactggtcctcctgtag

SEQ ID NO: 7768 - RNA, 22 nt, synthetic construct
  source 1..22: mol_type = other RNA
atggtgccgagcccgcaggccc

SEQ ID NO: 7769 - RNA, 22 nt, synthetic construct
  source 1..22: mol_type = other RNA
atgtactgggcaaggccttgga

SEQ ID NO: 7770 - RNA, 22 nt, synthetic construct
  source 1..22: mol_type = other RNA
atgtcggcctgctgggccgtgc

SEQ ID NO: 7771 - RNA, 22 nt, synthetic construct
  source 1..22: mol_type = other RNA
atgtctcttccccaagcccctc

SEQ ID NO: 7772 - RNA, 22 nt, synthetic construct
  source 1..22: mol_type = other RNA
atgtctgcggcccagctcccag

SEQ ID NO: 7773 - RNA, 22 nt, synthetic construct
  source 1..22: mol_type = other RNA
atgtgcatcaggaggcgtgagg

SEQ ID NO: 7774 - RNA, 22 nt, synthetic construct
  source 1..22: mol_type = other RNA
atgtggctgaaaacctcatcgg

SEQ ID NO: 7775 - RNA, 22 nt, synthetic construct
  source 1..22: mol_type = other RNA
attccagcctcctcggcctcgt

SEQ ID NO: 7776 - RNA, 22 nt, synthetic construct
  source 1..22: mol_type = other RNA
attgaccccaaggaagaagagg

SEQ ID NO: 7777 - RNA, 22 nt, synthetic construct
  source 1..22: mol_type = other RNA
attgcaggaggaagctggggaa

SEQ ID NO: 7778 - RNA, 22 nt, synthetic construct
  source 1..22: mol_type = other RNA
attgctgtgctgggcaaagctg

SEQ ID NO: 7779 - RNA, 22 nt, synthetic construct
  source 1..22: mol_type = other RNA
attgcttgaaccgtccggggga

SEQ ID NO: 7780 - RNA, 22 nt, synthetic construct
  source 1..22: mol_type = other RNA
attgggctggggcagtgagccg

SEQ ID NO: 7781 - RNA, 22 nt, synthetic construct
  source 1..22: mol_type = other RNA
attggggagcctcgtgggactc

SEQ ID NO: 7782 - RNA, 22 nt, synthetic construct
  source 1..22: mol_type = other RNA
atttcgccactcagagccagcc

SEQ ID NO: 7783 - RNA, 22 nt, synthetic construct
  source 1..22: mol_type = other RNA
atttgagctgtccggcttctcc

SEQ ID NO: 7784 - RNA, 22 nt, synthetic construct
  source 1..22: mol_type = other RNA
atttgcccctctggattgggga

SEQ ID NO: 7785 - RNA, 22 nt, synthetic construct
  source 1..22: mol_type = other RNA
atttggcagcacgtggtacagg

SEQ ID NO: 7786 - RNA, 22 nt, synthetic construct
  source 1..22: mol_type = other RNA
caaagctggtcagggcaagagc

SEQ ID NO: 7787 - RNA, 22 nt, synthetic construct
  source 1..22: mol_type = other RNA
caaaggccaggggcgtgtcagg

SEQ ID NO: 7788 - RNA, 22 nt, synthetic construct
  source 1..22: mol_type = other RNA
caaaggcttagtccaacaccca

SEQ ID NO: 7789 - RNA, 22 nt, synthetic construct
  source 1..22: mol_type = other RNA
caaagtaccctacaggaggacc

SEQ ID NO: 7790 - RNA, 22 nt, synthetic construct
  source 1..22: mol_type = other RNA
caaagtagcgcatcacgtatgc

SEQ ID NO: 7791 - RNA, 22 nt, synthetic construct
  source 1..22: mol_type = other RNA
caaagtagggctgtggctgtga

SEQ ID NO: 7792 - RNA, 22 nt, synthetic construct
  source 1..22: mol_type = other RNA
caaagtcgtactggggaagccg

SEQ ID NO: 7793 - RNA, 22 nt, synthetic construct
  source 1..22: mol_type = other RNA
caaatagggcgtcggccttgct

SEQ ID NO: 7794 - RNA, 22 nt, synthetic construct
  source 1..22: mol_type = other RNA
caaatgccagtgctgcggaggt

SEQ ID NO: 7795 - RNA, 22 nt, synthetic construct
  source 1..22: mol_type = other RNA
caaattccagcctcctcggcct

SEQ ID NO: 7796 - RNA, 22 nt, synthetic construct
  source 1..22: mol_type = other RNA
caacacaaggatgtctcttccc

SEQ ID NO: 7797 - RNA, 22 nt, synthetic construct
  source 1..22: mol_type = other RNA
caacacccaccgcgggccgcag

SEQ ID NO: 7798 - RNA, 22 nt, synthetic construct
  source 1..22: mol_type = other RNA
caacagcacctcagccaggcct

SEQ ID NO: 7799 - RNA, 22 nt, synthetic construct
  source 1..22: mol_type = other RNA
caacctcggagcagcttcttct

SEQ ID NO: 7800 - RNA, 22 nt, synthetic construct
  source 1..22: mol_type = other RNA
caactggctggagggcgtgcca

SEQ ID NO: 7801 - RNA, 22 nt, synthetic construct
  source 1..22: mol_type = other RNA
caagacagagccctgacgctcc

SEQ ID NO: 7802 - RNA, 22 nt, synthetic construct
  source 1..22: mol_type = other RNA
caagacttctccctggacctcc

SEQ ID NO: 7803 - RNA, 22 nt, synthetic construct
  source 1..22: mol_type = other RNA
caagagcctggagcgggaactg

SEQ ID NO: 7804 - RNA, 22 nt, synthetic construct
  source 1..22: mol_type = other RNA
caagagctattgggctggggca

SEQ ID NO: 7805 - RNA, 22 nt, synthetic construct
  source 1..22: mol_type = other RNA
caagatggcttcctgcacagca

SEQ ID NO: 7806 - RNA, 22 nt, synthetic construct
  source 1..22: mol_type = other RNA
caagatgtggctgaaaacctca

SEQ ID NO: 7807 - RNA, 22 nt, synthetic construct
  source 1..22: mol_type = other RNA
caagcaatggcaggggacagag

SEQ ID NO: 7808 - RNA, 22 nt, synthetic construct
  source 1..22: mol_type = other RNA
caagcaccttctgcttcctgtc

SEQ ID NO: 7809 - RNA, 22 nt, synthetic construct
  source 1..22: mol_type = other RNA
caagcccaggcccggctcactg

SEQ ID NO: 7810 - RNA, 22 nt, synthetic construct
  source 1..22: mol_type = other RNA
caagcccctcaccccacctgaa

SEQ ID NO: 7811 - RNA, 22 nt, synthetic construct
  source 1..22: mol_type = other RNA
caagctccagcagggcctctga

SEQ ID NO: 7812 - RNA, 22 nt, synthetic construct
  source 1..22: mol_type = other RNA
caagctgccctccacgctcacg

SEQ ID NO: 7813 - RNA, 22 nt, synthetic construct
  source 1..22: mol_type = other RNA
caagctggcctgggagctgggc

SEQ ID NO: 7814 - RNA, 22 nt, synthetic construct
  source 1..22: mol_type = other RNA
caaggaagaagaggccctatga

SEQ ID NO: 7815 - RNA, 22 nt, synthetic construct
  source 1..22: mol_type = other RNA
caaggacaaggagctcccgcag

SEQ ID NO: 7816 - RNA, 22 nt, synthetic construct
  source 1..22: mol_type = other RNA
caaggagcaccggcggccgcgt

SEQ ID NO: 7817 - RNA, 22 nt, synthetic construct
  source 1..22: mol_type = other RNA
caaggagctcccgcagtaccta

SEQ ID NO: 7818 - RNA, 22 nt, synthetic construct
  source 1..22: mol_type = other RNA
caaggaggcctggctgaggtgc

SEQ ID NO: 7819 - RNA, 22 nt, synthetic construct
  source 1..22: mol_type = other RNA
caaggatgtctcttccccaagc

SEQ ID NO: 7820 - RNA, 22 nt, synthetic construct
  source 1..22: mol_type = other RNA
caaggccgacgccctatttgag

SEQ ID NO: 7821 - RNA, 22 nt, synthetic construct
  source 1..22: mol_type = other RNA
caaggccttgcccagtacatgt

SEQ ID NO: 7822 - RNA, 22 nt, synthetic construct
  source 1..22: mol_type = other RNA
caaggccttggaggcggcgggc

SEQ ID NO: 7823 - RNA, 22 nt, synthetic construct
  source 1..22: mol_type = other RNA
caatagctcttgccctgaccag

SEQ ID NO: 7824 - RNA, 22 nt, synthetic construct
  source 1..22: mol_type = other RNA
caatcactcgtgtctcacgcgg

SEQ ID NO: 7825 - RNA, 22 nt, synthetic construct
  source 1..22: mol_type = other RNA
caatccagaggggcaaatgcca

SEQ ID NO: 7826 - RNA, 22 nt, synthetic construct
  source 1..22: mol_type = other RNA
caatgctaggtactgcgggagc

SEQ ID NO: 7827 - RNA, 22 nt, synthetic construct
  source 1..22: mol_type = other RNA
caatgcttcctgggggccctgt

SEQ ID NO: 7828 - RNA, 22 nt, synthetic construct
  source 1..22: mol_type = other RNA
caatggcaggggacagagaaga

SEQ ID NO: 7829 - RNA, 22 nt, synthetic construct
  source 1..22: mol_type = other RNA
cacaaagtagggctgtggctgt

SEQ ID NO: 7830 - RNA, 22 nt, synthetic construct
  source 1..22: mol_type = other RNA
cacaagcccaggcccggctcac

SEQ ID NO: 7831 - RNA, 22 nt, synthetic construct
  source 1..22: mol_type = other RNA
cacaaggatgtctcttccccaa

SEQ ID NO: 7832 - RNA, 22 nt, synthetic construct
  source 1..22: mol_type = other RNA
cacactgcccggcacaaagtag

SEQ ID NO: 7833 - RNA, 22 nt, synthetic construct
  source 1..22: mol_type = other RNA
cacagcaatcactcgtgtctca

SEQ ID NO: 7834 - RNA, 22 nt, synthetic construct
  source 1..22: mol_type = other RNA
cacagcacgtgcggaccggcac

SEQ ID NO: 7835 - RNA, 22 nt, synthetic construct
  source 1..22: mol_type = other RNA
cacagccacagccctactttgt

SEQ ID NO: 7836 - RNA, 22 nt, synthetic construct
  source 1..22: mol_type = other RNA
cacagccactcgtggcggccga

SEQ ID NO: 7837 - RNA, 22 nt, synthetic construct
  source 1..22: mol_type = other RNA
cacagccctactttgtgccggg

SEQ ID NO: 7838 - RNA, 22 nt, synthetic construct
  source 1..22: mol_type = other RNA
cacagctgagtcccacgaggct

SEQ ID NO: 7839 - RNA, 22 nt, synthetic construct
  source 1..22: mol_type = other RNA
cacagggcccccaggaagcatt

SEQ ID NO: 7840 - RNA, 22 nt, synthetic construct
  source 1..22: mol_type = other RNA
cacatacccccaccctgacacg

SEQ ID NO: 7841 - RNA, 22 nt, synthetic construct
  source 1..22: mol_type = other RNA
cacatcttgaagagacctgacc

SEQ ID NO: 7842 - RNA, 22 nt, synthetic construct
  source 1..22: mol_type = other RNA
cacatgtactgggcaaggcctt

SEQ ID NO: 7843 - RNA, 22 nt, synthetic construct
  source 1..22: mol_type = other RNA
caccaagacagagccctgacgc

SEQ ID NO: 7844 - RNA, 22 nt, synthetic construct
  source 1..22: mol_type = other RNA
caccagatccacctccactagg

SEQ ID NO: 7845 - RNA, 22 nt, synthetic construct
  source 1..22: mol_type = other RNA
caccatacgtgtcctgcagtga

SEQ ID NO: 7846 - RNA, 22 nt, synthetic construct
  source 1..22: mol_type = other RNA
cacccaccgcgggccgcagagt

SEQ ID NO: 7847 - RNA, 22 nt, synthetic construct
  source 1..22: mol_type = other RNA
caccccacctgaaacgggtgac

SEQ ID NO: 7848 - RNA, 22 nt, synthetic construct
  source 1..22: mol_type = other RNA
caccccggactgggcagaacgg

SEQ ID NO: 7849 - RNA, 22 nt, synthetic construct
  source 1..22: mol_type = other RNA
cacccgcctcacgcctcctgat

SEQ ID NO: 7850 - RNA, 22 nt, synthetic construct
  source 1..22: mol_type = other RNA
cacccgtttcaggtggggtgag

SEQ ID NO: 7851 - RNA, 22 nt, synthetic construct
  source 1..22: mol_type = other RNA
caccctcctcctcacagcccgg

SEQ ID NO: 7852 - RNA, 22 nt, synthetic construct
  source 1..22: mol_type = other RNA
caccctgacacgcccctggcct

SEQ ID NO: 7853 - RNA, 22 nt, synthetic construct
  source 1..22: mol_type = other RNA
caccgaggcagccgccgatggc

SEQ ID NO: 7854 - RNA, 22 nt, synthetic construct
  source 1..22: mol_type = other RNA
caccgcgggccgcagagtccga

SEQ ID NO: 7855 - RNA, 22 nt, synthetic construct
  source 1..22: mol_type = other RNA
caccggcggagccctgctccct

SEQ ID NO: 7856 - RNA, 22 nt, synthetic construct
  source 1..22: mol_type = other RNA
caccggcggccgcgtgagacac

SEQ ID NO: 7857 - RNA, 22 nt, synthetic construct
  source 1..22: mol_type = other RNA
caccggctctgcaaaggccagg

SEQ ID NO: 7858 - RNA, 22 nt, synthetic construct
  source 1..22: mol_type = other RNA
cacctcagccaggcctccttgg

SEQ ID NO: 7859 - RNA, 22 nt, synthetic construct
  source 1..22: mol_type = other RNA
cacctccactaggatgccatcc

SEQ ID NO: 7860 - RNA, 22 nt, synthetic construct
  source 1..22: mol_type = other RNA
cacctgaaacgggtgacacagc

SEQ ID NO: 7861 - RNA, 22 nt, synthetic construct
  source 1..22: mol_type = other RNA
caccttctgcttcctgtccacc

SEQ ID NO: 7862 - RNA, 22 nt, synthetic construct
  source 1..22: mol_type = other RNA
cacgaggccgaggaggctggaa

SEQ ID NO: 7863 - RNA, 22 nt, synthetic construct
  source 1..22: mol_type = other RNA
cacgaggctccccaatccagag

SEQ ID NO: 7864 - RNA, 22 nt, synthetic construct
  source 1..22: mol_type = other RNA
cacgagtgattgctgtgctggg

SEQ ID NO: 7865 - RNA, 22 nt, synthetic construct
  source 1..22: mol_type = other RNA
cacgagtggctgtgggcccagg

SEQ ID NO: 7866 - RNA, 22 nt, synthetic construct
  source 1..22: mol_type = other RNA
cacgcccctggcctttgcagag

SEQ ID NO: 7867 - RNA, 22 nt, synthetic construct
  source 1..22: mol_type = other RNA
cacgccctccagccagttgtca

SEQ ID NO: 7868 - RNA, 22 nt, synthetic construct
  source 1..22: mol_type = other RNA
cacgcctcctgatgcacatgta

SEQ ID NO: 7869 - RNA, 22 nt, synthetic construct
  source 1..22: mol_type = other RNA
cacgcggccgccggtgctcctt

SEQ ID NO: 7870 - RNA, 22 nt, synthetic construct
  source 1..22: mol_type = other RNA
cacgctcacgggactctatgtc

SEQ ID NO: 7871 - RNA, 22 nt, synthetic construct
  source 1..22: mol_type = other RNA
cacgctttctggctgggctgat

SEQ ID NO: 7872 - RNA, 22 nt, synthetic construct
  source 1..22: mol_type = other RNA
cacggcccagcaggccgacata

SEQ ID NO: 7873 - RNA, 22 nt, synthetic construct
  source 1..22: mol_type = other RNA
cacgggactctatgtcggcctg

SEQ ID NO: 7874 - RNA, 22 nt, synthetic construct
  source 1..22: mol_type = other RNA
cacgtatgcctgggcctgctcc

SEQ ID NO: 7875 - RNA, 22 nt, synthetic construct
  source 1..22: mol_type = other RNA
cacgtatggtgccgagcccgca

SEQ ID NO: 7876 - RNA, 22 nt, synthetic construct
  source 1..22: mol_type = other RNA
cacgtctgcggatgggaactgg

SEQ ID NO: 7877 - RNA, 22 nt, synthetic construct
  source 1..22: mol_type = other RNA
cacgtgctgccaaattccagcc

SEQ ID NO: 7878 - RNA, 22 nt, synthetic construct
  source 1..22: mol_type = other RNA
cacgtgctgtgcaggaagccat

SEQ ID NO: 7879 - RNA, 22 nt, synthetic construct
  source 1..22: mol_type = other RNA
cacgtggtacaggagctccccg

SEQ ID NO: 7880 - RNA, 22 nt, synthetic construct
  source 1..22: mol_type = other RNA
cactaggatgccatccgggcct

SEQ ID NO: 7881 - RNA, 22 nt, synthetic construct
  source 1..22: mol_type = other RNA
cactcagagccagccacagggc

SEQ ID NO: 7882 - RNA, 22 nt, synthetic construct
  source 1..22: mol_type = other RNA
cactcgtggcggccgatgaggt

SEQ ID NO: 7883 - RNA, 22 nt, synthetic construct
  source 1..22: mol_type = other RNA
cactcgtgtctcacgcggccgc

SEQ ID NO: 7884 - RNA, 22 nt, synthetic construct
  source 1..22: mol_type = other RNA
cactgcaggacacgtatggtgc

SEQ ID NO: 7885 - RNA, 22 nt, synthetic construct
  source 1..22: mol_type = other RNA
cactgccccagcccaatagctc

SEQ ID NO: 7886 - RNA, 22 nt, synthetic construct
  source 1..22: mol_type = other RNA
cactgcccggcacaaagtaggg

SEQ ID NO: 7887 - RNA, 22 nt, synthetic construct
  source 1..22: mol_type = other RNA
cactgcgcccacgaggccgagg

SEQ ID NO: 7888 - RNA, 22 nt, synthetic construct
  source 1..22: mol_type = other RNA
cactgcgggcgcggcagctgct

SEQ ID NO: 7889 - RNA, 22 nt, synthetic construct
  source 1..22: mol_type = other RNA
cactggcatttgcccctctgga

SEQ ID NO: 7890 - RNA, 22 nt, synthetic construct
  source 1..22: mol_type = other RNA
cacttcttctcagtcacagcca

SEQ ID NO: 7891 - RNA, 22 nt, synthetic construct
  source 1..22: mol_type = other RNA
cagaaaagagaggcggccgggg

SEQ ID NO: 7892 - RNA, 22 nt, synthetic construct
  source 1..22: mol_type = other RNA
cagaaagcgtggcacgccctcc

SEQ ID NO: 7893 - RNA, 22 nt, synthetic construct
  source 1..22: mol_type = other RNA
cagaacgcggtcaggtctcttc

SEQ ID NO: 7894 - RNA, 22 nt, synthetic construct
  source 1..22: mol_type = other RNA
cagaacggcagctggcccaagg

SEQ ID NO: 7895 - RNA, 22 nt, synthetic construct
  source 1..22: mol_type = other RNA
cagaagaagctgctccgaggtt

SEQ ID NO: 7896 - RNA, 22 nt, synthetic construct
  source 1..22: mol_type = other RNA
cagaaggtgcttgcgaggtacc

SEQ ID NO: 7897 - RNA, 22 nt, synthetic construct
  source 1..22: mol_type = other RNA
cagacatcaaagtaccctacag

SEQ ID NO: 7898 - RNA, 22 nt, synthetic construct
  source 1..22: mol_type = other RNA
cagacgtgaggacctgggcgat

SEQ ID NO: 7899 - RNA, 22 nt, synthetic construct
  source 1..22: mol_type = other RNA
cagagaagacaaagtcgtactg

SEQ ID NO: 7900 - RNA, 22 nt, synthetic construct
  source 1..22: mol_type = other RNA
cagagcaccaagacagagccct

SEQ ID NO: 7901 - RNA, 22 nt, synthetic construct
  source 1..22: mol_type = other RNA
cagagccagccacagggccccc

SEQ ID NO: 7902 - RNA, 22 nt, synthetic construct
  source 1..22: mol_type = other RNA
cagagccctgacgctcctccgg

SEQ ID NO: 7903 - RNA, 22 nt, synthetic construct
  source 1..22: mol_type = other RNA
cagagccggtggagcagttcta

SEQ ID NO: 7904 - RNA, 22 nt, synthetic construct
  source 1..22: mol_type = other RNA
cagagcctgagcaaggccgacg

SEQ ID NO: 7905 - RNA, 22 nt, synthetic construct
  source 1..22: mol_type = other RNA
cagagctggccaagctggcctg

SEQ ID NO: 7906 - RNA, 22 nt, synthetic construct
  source 1..22: mol_type = other RNA
cagaggccctgctggagcttgg

SEQ ID NO: 7907 - RNA, 22 nt, synthetic construct
  source 1..22: mol_type = other RNA
cagaggggcaaatgccagtgct

SEQ ID NO: 7908 - RNA, 22 nt, synthetic construct
  source 1..22: mol_type = other RNA
cagagtccgagctggccttccc

SEQ ID NO: 7909 - RNA, 22 nt, synthetic construct
  source 1..22: mol_type = other RNA
cagatccacctccactaggatg

SEQ ID NO: 7910 - RNA, 22 nt, synthetic construct
  source 1..22: mol_type = other RNA
cagatcctgcaggccataggca

SEQ ID NO: 7911 - RNA, 22 nt, synthetic construct
  source 1..22: mol_type = other RNA
cagcaagagcctggagcgggaa

SEQ ID NO: 7912 - RNA, 22 nt, synthetic construct
  source 1..22: mol_type = other RNA
cagcaatcactcgtgtctcacg

SEQ ID NO: 7913 - RNA, 22 nt, synthetic construct
  source 1..22: mol_type = other RNA
cagcacagcaatcactcgtgtc

SEQ ID NO: 7914 - RNA, 22 nt, synthetic construct
  source 1..22: mol_type = other RNA
cagcacctcagccaggcctcct

SEQ ID NO: 7915 - RNA, 22 nt, synthetic construct
  source 1..22: mol_type = other RNA
cagcacgtgcggaccggcaccg

SEQ ID NO: 7916 - RNA, 22 nt, synthetic construct
  source 1..22: mol_type = other RNA
cagcacgtggtacaggagctcc

SEQ ID NO: 7917 - RNA, 22 nt, synthetic construct
  source 1..22: mol_type = other RNA
cagcactggcatttgcccctct

SEQ ID NO: 7918 - RNA, 22 nt, synthetic construct
  source 1..22: mol_type = other RNA
cagcagcaagagcctggagcgg

SEQ ID NO: 7919 - RNA, 22 nt, synthetic construct
  source 1..22: mol_type = other RNA
cagcagcccccggagggagcag

SEQ ID NO: 7920 - RNA, 22 nt, synthetic construct
  source 1..22: mol_type = other RNA
cagcagctccagcagctgccgc

SEQ ID NO: 7921 - RNA, 22 nt, synthetic construct
  source 1..22: mol_type = other RNA
cagcagctgccgcgcccgcagt

SEQ ID NO: 7922 - RNA, 22 nt, synthetic construct
  source 1..22: mol_type = other RNA
cagcaggccgacatagagtccc

SEQ ID NO: 7923 - RNA, 22 nt, synthetic construct
  source 1..22: mol_type = other RNA
cagcagggcctctgagagctgg

SEQ ID NO: 7924 - RNA, 22 nt, synthetic construct
  source 1..22: mol_type = other RNA
cagccaacagcacctcagccag

SEQ ID NO: 7925 - RNA, 22 nt, synthetic construct
  source 1..22: mol_type = other RNA
cagccacagccctactttgtgc

SEQ ID NO: 7926 - RNA, 22 nt, synthetic construct
  source 1..22: mol_type = other RNA
cagccacagggcccccaggaag

SEQ ID NO: 7927 - RNA, 22 nt, synthetic construct
  source 1..22: mol_type = other RNA
cagccacatcttgaagagacct

SEQ ID NO: 7928 - RNA, 22 nt, synthetic construct
  source 1..22: mol_type = other RNA
cagccactcgtggcggccgatg

SEQ ID NO: 7929 - RNA, 22 nt, synthetic construct
  source 1..22: mol_type = other RNA
cagccagaaagcgtggcacgcc

SEQ ID NO: 7930 - RNA, 22 nt, synthetic construct
  source 1..22: mol_type = other RNA
cagccaggcctccttgggccag

SEQ ID NO: 7931 - RNA, 22 nt, synthetic construct
  source 1..22: mol_type = other RNA
cagccagttgtcatagggcctc

SEQ ID NO: 7932 - RNA, 22 nt, synthetic construct
  source 1..22: mol_type = other RNA
cagcccaatagctcttgccctg

SEQ ID NO: 7933 - RNA, 22 nt, synthetic construct
  source 1..22: mol_type = other RNA
cagcccagccagaaagcgtggc

SEQ ID NO: 7934 - RNA, 22 nt, synthetic construct
  source 1..22: mol_type = other RNA
cagccctactttgtgccgggca

SEQ ID NO: 7935 - RNA, 22 nt, synthetic construct
  source 1..22: mol_type = other RNA
cagccgccgatggcccgagtag

SEQ ID NO: 7936 - RNA, 22 nt, synthetic construct
  source 1..22: mol_type = other RNA
cagccgcttcaggtacctcgca

SEQ ID NO: 7937 - RNA, 22 nt, synthetic construct
  source 1..22: mol_type = other RNA
cagcctcctcggcctcgtgggc

SEQ ID NO: 7938 - RNA, 22 nt, synthetic construct
  source 1..22: mol_type = other RNA
cagcctggcctgcaccagatcc

SEQ ID NO: 7939 - RNA, 22 nt, synthetic construct
  source 1..22: mol_type = other RNA
cagcgggcgggaggctggaaga

SEQ ID NO: 7940 - RNA, 22 nt, synthetic construct
  source 1..22: mol_type = other RNA
cagctcaaatagggcgtcggcc

SEQ ID NO: 7941 - RNA, 22 nt, synthetic construct
  source 1..22: mol_type = other RNA
cagctccagcagctgccgcgcc

SEQ ID NO: 7942 - RNA, 22 nt, synthetic construct
  source 1..22: mol_type = other RNA
cagctcccaggccagcttggcc

SEQ ID NO: 7943 - RNA, 22 nt, synthetic construct
  source 1..22: mol_type = other RNA
cagctcctcgaagccgtctagg

SEQ ID NO: 7944 - RNA, 22 nt, synthetic construct
  source 1..22: mol_type = other RNA
cagctcggactctgcggcccgc

SEQ ID NO: 7945 - RNA, 22 nt, synthetic construct
  source 1..22: mol_type = other RNA
cagctctcagaggccctgctgg

SEQ ID NO: 7946 - RNA, 22 nt, synthetic construct
  source 1..22: mol_type = other RNA
cagctgagtcccacgaggctcc

SEQ ID NO: 7947 - RNA, 22 nt, synthetic construct
  source 1..22: mol_type = other RNA
cagctgccgcgcccgcagtgtc

SEQ ID NO: 7948 - RNA, 22 nt, synthetic construct
  source 1..22: mol_type = other RNA
cagctgccgttctgcccagtcc

SEQ ID NO: 7949 - RNA, 22 nt, synthetic construct
  source 1..22: mol_type = other RNA
cagctgctggagctgctgcact

SEQ ID NO: 7950 - RNA, 22 nt, synthetic construct
  source 1..22: mol_type = other RNA
cagctggcccaaggaggcctgg

SEQ ID NO: 7951 - RNA, 22 nt, synthetic construct
  source 1..22: mol_type = other RNA
cagctgtgtcacccgtttcagg

SEQ ID NO: 7952 - RNA, 22 nt, synthetic construct
  source 1..22: mol_type = other RNA
cagcttcctcctgcaatgcttc

SEQ ID NO: 7953 - RNA, 22 nt, synthetic construct
  source 1..22: mol_type = other RNA
cagcttcttctggaaaaggccg

SEQ ID NO: 7954 - RNA, 22 nt, synthetic construct
  source 1..22: mol_type = other RNA
cagcttggccagctctgccagg

SEQ ID NO: 7955 - RNA, 22 nt, synthetic construct
  source 1..22: mol_type = other RNA
cagcttggcgtcctccccaagc

SEQ ID NO: 7956 - RNA, 22 nt, synthetic construct
  source 1..22: mol_type = other RNA
cagctttgcccagcacagcaat

SEQ ID NO: 7957 - RNA, 22 nt, synthetic construct
  source 1..22: mol_type = other RNA
caggaagcagaaggtgcttgcg

SEQ ID NO: 7958 - RNA, 22 nt, synthetic construct
  source 1..22: mol_type = other RNA
caggaagcattgcaggaggaag

SEQ ID NO: 7959 - RNA, 22 nt, synthetic construct
  source 1..22: mol_type = other RNA
caggaagccatcttgcgcttcc

SEQ ID NO: 7960 - RNA, 22 nt, synthetic construct
  source 1..22: mol_type = other RNA
caggacacgtatggtgccgagc

SEQ ID NO: 7961 - RNA, 22 nt, synthetic construct
  source 1..22: mol_type = other RNA
caggagctccccggccgcctct

SEQ ID NO: 7962 - RNA, 22 nt, synthetic construct
  source 1..22: mol_type = other RNA
caggaggaagctggggaaggcc

SEQ ID NO: 7963 - RNA, 22 nt, synthetic construct
  source 1..22: mol_type = other RNA
caggaggaccagttcccatccg

SEQ ID NO: 7964 - RNA, 22 nt, synthetic construct
  source 1..22: mol_type = other RNA
caggaggcgtgaggcgggtgcc

SEQ ID NO: 7965 - RNA, 22 nt, synthetic construct
  source 1..22: mol_type = other RNA
caggatctgctcttctccctgg

SEQ ID NO: 7966 - RNA, 22 nt, synthetic construct
  source 1..22: mol_type = other RNA
caggcatacgtgatgcgctact

SEQ ID NO: 7967 - RNA, 22 nt, synthetic construct
  source 1..22: mol_type = other RNA
caggccagcttggccagctctg

SEQ ID NO: 7968 - RNA, 22 nt, synthetic construct
  source 1..22: mol_type = other RNA
caggccaggctggagaggagca

SEQ ID NO: 7969 - RNA, 22 nt, synthetic construct
  source 1..22: mol_type = other RNA
caggccataggcatcccccgga

SEQ ID NO: 7970 - RNA, 22 nt, synthetic construct
  source 1..22: mol_type = other RNA
caggcccaggcatacgtgatgc

SEQ ID NO: 7971 - RNA, 22 nt, synthetic construct
  source 1..22: mol_type = other RNA
caggcccggatggcatcctagt

SEQ ID NO: 7972 - RNA, 22 nt, synthetic construct
  source 1..22: mol_type = other RNA
caggcccggctcactgccccag

SEQ ID NO: 7973 - RNA, 22 nt, synthetic construct
  source 1..22: mol_type = other RNA
caggccgacatagagtcccgtg

SEQ ID NO: 7974 - RNA, 22 nt, synthetic construct
  source 1..22: mol_type = other RNA
caggcctccttgggccagctgc

SEQ ID NO: 7975 - RNA, 22 nt, synthetic construct
  source 1..22: mol_type = other RNA
caggctctggaccaggcggccc

SEQ ID NO: 7976 - RNA, 22 nt, synthetic construct
  source 1..22: mol_type = other RNA
caggctcttgctgctgctcctc

SEQ ID NO: 7977 - RNA, 22 nt, synthetic construct
  source 1..22: mol_type = other RNA
caggctggagaggagcagcagc

SEQ ID NO: 7978 - RNA, 22 nt, synthetic construct
  source 1..22: mol_type = other RNA
cagggagaagagcagatcctgc

SEQ ID NO: 7979 - RNA, 22 nt, synthetic construct
  source 1..22: mol_type = other RNA
cagggagaagtcttggcccgcc

SEQ ID NO: 7980 - RNA, 22 nt, synthetic construct
  source 1..22: mol_type = other RNA
cagggatgacagagcaccaaga

SEQ ID NO: 7981 - RNA, 22 nt, synthetic construct
  source 1..22: mol_type = other RNA
cagggcaagagctattgggctg

SEQ ID NO: 7982 - RNA, 22 nt, synthetic construct
  source 1..22: mol_type = other RNA
cagggcccccaggaagcattgc

SEQ ID NO: 7983 - RNA, 22 nt, synthetic construct
  source 1..22: mol_type = other RNA
cagggcctctgagagctggcac

SEQ ID NO: 7984 - RNA, 22 nt, synthetic construct
  source 1..22: mol_type = other RNA
cagggctctgtcttggtgctct

SEQ ID NO: 7985 - RNA, 22 nt, synthetic construct
  source 1..22: mol_type = other RNA
caggggacagagaagacaaagt

SEQ ID NO: 7986 - RNA, 22 nt, synthetic construct
  source 1..22: mol_type = other RNA
caggggcgtgtcagggtggggg

SEQ ID NO: 7987 - RNA, 22 nt, synthetic construct
  source 1..22: mol_type = other RNA
caggtacctcgcaagcaccttc

SEQ ID NO: 7988 - RNA, 22 nt, synthetic construct
  source 1..22: mol_type = other RNA
caggtcctcacgtctgcggatg

SEQ ID NO: 7989 - RNA, 22 nt, synthetic construct
  source 1..22: mol_type = other RNA
caggtctcttcaagatgtggct

SEQ ID NO: 7990 - RNA, 22 nt, synthetic construct
  source 1..22: mol_type = other RNA
caggtggggtgaggggcttggg

SEQ ID NO: 7991 - RNA, 22 nt, synthetic construct
  source 1..22: mol_type = other RNA
cagtacatgtgcatcaggaggc

SEQ ID NO: 7992 - RNA, 22 nt, synthetic construct
  source 1..22: mol_type = other RNA
cagtacctagcattgaccccaa

SEQ ID NO: 7993 - RNA, 22 nt, synthetic construct
  source 1..22: mol_type = other RNA
cagtacgactttgtcttctctg

SEQ ID NO: 7994 - RNA, 22 nt, synthetic construct
  source 1..22: mol_type = other RNA
cagtcacagccacagccctact

SEQ ID NO: 7995 - RNA, 22 nt, synthetic construct
  source 1..22: mol_type = other RNA
cagtccggggtggccagttccc

SEQ ID NO: 7996 - RNA, 22 nt, synthetic construct
  source 1..22: mol_type = other RNA
cagtgagccgggcctgggcttg

SEQ ID NO: 7997 - RNA, 22 nt, synthetic construct
  source 1..22: mol_type = other RNA
cagtgagcggtagaactgctcc

SEQ ID NO: 7998 - RNA, 22 nt, synthetic construct
  source 1..22: mol_type = other RNA
cagtgcagcagctccagcagct

SEQ ID NO: 7999 - RNA, 22 nt, synthetic construct
  source 1..22: mol_type = other RNA
cagtgctgcggaggtccaggga

SEQ ID NO: 8000 - RNA, 22 nt, synthetic construct
  source 1..22: mol_type = other RNA
cagtgtccccggctgcagccgc

SEQ ID NO: 8001 - RNA, 22 nt, synthetic construct
  source 1..22: mol_type = other RNA
cagtgtgccagctctcagaggc

SEQ ID NO: 8002 - RNA, 22 nt, synthetic construct
  source 1..22: mol_type = other RNA
cagttcccatccgcagacgtga

SEQ ID NO: 8003 - RNA, 22 nt, synthetic construct
  source 1..22: mol_type = other RNA
cagttcccgctccaggctcttg

SEQ ID NO: 8004 - RNA, 22 nt, synthetic construct
  source 1..22: mol_type = other RNA
cagttctaccgctcactgcagg

SEQ ID NO: 8005 - RNA, 22 nt, synthetic construct
  source 1..22: mol_type = other RNA
cagttgtcatagggcctcttct

SEQ ID NO: 8006 - RNA, 22 nt, synthetic construct
  source 1..22: mol_type = other RNA
catacccccaccctgacacgcc

SEQ ID NO: 8007 - RNA, 22 nt, synthetic construct
  source 1..22: mol_type = other RNA
catacgtgatgcgctactttga

SEQ ID NO: 8008 - RNA, 22 nt, synthetic construct
  source 1..22: mol_type = other RNA
catacgtgtcctgcagtgagcg

SEQ ID NO: 8009 - RNA, 22 nt, synthetic construct
  source 1..22: mol_type = other RNA
catagagtcccgtgagcgtgga

SEQ ID NO: 8010 - RNA, 22 nt, synthetic construct
  source 1..22: mol_type = other RNA
cataggcatcccccggacggtt

SEQ ID NO: 8011 - RNA, 22 nt, synthetic construct
  source 1..22: mol_type = other RNA
catagggcctcttcttccttgg

SEQ ID NO: 8012 - RNA, 22 nt, synthetic construct
  source 1..22: mol_type = other RNA
catcaaagtaccctacaggagg

SEQ ID NO: 8013 - RNA, 22 nt, synthetic construct
  source 1..22: mol_type = other RNA
catcacgtatgcctgggcctgc

SEQ ID NO: 8014 - RNA, 22 nt, synthetic construct
  source 1..22: mol_type = other RNA
catcaggaggcgtgaggcgggt

SEQ ID NO: 8015 - RNA, 22 nt, synthetic construct
  source 1..22: mol_type = other RNA
catcccccggacggttcaagca

SEQ ID NO: 8016 - RNA, 22 nt, synthetic construct
  source 1..22: mol_type = other RNA
catccctgagctctcaaagtag

SEQ ID NO: 8017 - RNA, 22 nt, synthetic construct
  source 1..22: mol_type = other RNA
catccgcagacgtgaggacctg

SEQ ID NO: 8018 - RNA, 22 nt, synthetic construct
  source 1..22: mol_type = other RNA
catcctagacggcttcgaggag

SEQ ID NO: 8019 - RNA, 22 nt, synthetic construct
  source 1..22: mol_type = other RNA
catcctagtggaggtggatctg

SEQ ID NO: 8020 - RNA, 22 nt, synthetic construct
  source 1..22: mol_type = other RNA
catcgcccaggtcctcacgtct

SEQ ID NO: 8021 - RNA, 22 nt, synthetic construct
  source 1..22: mol_type = other RNA
catcggccgccacgagtggctg

SEQ ID NO: 8022 - RNA, 22 nt, synthetic construct
  source 1..22: mol_type = other RNA
catcggcggctgcctcggtgga

SEQ ID NO: 8023 - RNA, 22 nt, synthetic construct
  source 1..22: mol_type = other RNA
catcttgaagagacctgaccgc

SEQ ID NO: 8024 - RNA, 22 nt, synthetic construct
  source 1..22: mol_type = other RNA
catcttgcgcttccagctcctc

SEQ ID NO: 8025 - RNA, 22 nt, synthetic construct
  source 1..22: mol_type = other RNA
catggagaagccggacagctca

SEQ ID NO: 8026 - RNA, 22 nt, synthetic construct
  source 1..22: mol_type = other RNA
catggagcaggcccaggcatac

SEQ ID NO: 8027 - RNA, 22 nt, synthetic construct
  source 1..22: mol_type = other RNA
catgtactgggcaaggccttgg

SEQ ID NO: 8028 - RNA, 22 nt, synthetic construct
  source 1..22: mol_type = other RNA
catgtgcatcaggaggcgtgag

SEQ ID NO: 8029 - RNA, 22 nt, synthetic construct
  source 1..22: mol_type = other RNA
cattgaccccaaggaagaagag

SEQ ID NO: 8030 - RNA, 22 nt, synthetic construct
  source 1..22: mol_type = other RNA
cattgcaggaggaagctgggga

SEQ ID NO: 8031 - RNA, 22 nt, synthetic construct
  source 1..22: mol_type = other RNA
cattgcttgaaccgtccggggg

SEQ ID NO: 8032 - RNA, 22 nt, synthetic construct
  source 1..22: mol_type = other RNA
catttgcccctctggattgggg

SEQ ID NO: 8033 - RNA, 22 nt, synthetic construct
  source 1..22: mol_type = other RNA
ccaaaggcttagtccaacaccc

SEQ ID NO: 8034 - RNA, 22 nt, synthetic construct
  source 1..22: mol_type = other RNA
ccaaattccagcctcctcggcc

SEQ ID NO: 8035 - RNA, 22 nt, synthetic construct
  source 1..22: mol_type = other RNA
ccaacacaaggatgtctcttcc

SEQ ID NO: 8036 - RNA, 22 nt, synthetic construct
  source 1..22: mol_type = other RNA
ccaacacccaccgcgggccgca

SEQ ID NO: 8037 - RNA, 22 nt, synthetic construct
  source 1..22: mol_type = other RNA
ccaacagcacctcagccaggcc

SEQ ID NO: 8038 - RNA, 22 nt, synthetic construct
  source 1..22: mol_type = other RNA
ccaagacagagccctgacgctc

SEQ ID NO: 8039 - RNA, 22 nt, synthetic construct
  source 1..22: mol_type = other RNA
ccaagacttctccctggacctc

SEQ ID NO: 8040 - RNA, 22 nt, synthetic construct
  source 1..22: mol_type = other RNA
ccaagcccctcaccccacctga

SEQ ID NO: 8041 - RNA, 22 nt, synthetic construct
  source 1..22: mol_type = other RNA
ccaagctccagcagggcctctg

SEQ ID NO: 8042 - RNA, 22 nt, synthetic construct
  source 1..22: mol_type = other RNA
ccaagctgccctccacgctcac

SEQ ID NO: 8043 - RNA, 22 nt, synthetic construct
  source 1..22: mol_type = other RNA
ccaagctggcctgggagctggg

SEQ ID NO: 8044 - RNA, 22 nt, synthetic construct
  source 1..22: mol_type = other RNA
ccaaggaagaagaggccctatg

SEQ ID NO: 8045 - RNA, 22 nt, synthetic construct
  source 1..22: mol_type = other RNA
ccaaggaggcctggctgaggtg

SEQ ID NO: 8046 - RNA, 22 nt, synthetic construct
  source 1..22: mol_type = other RNA
ccaaggccttgcccagtacatg

SEQ ID NO: 8047 - RNA, 22 nt, synthetic construct
  source 1..22: mol_type = other RNA
ccaatagctcttgccctgacca

SEQ ID NO: 8048 - RNA, 22 nt, synthetic construct
  source 1..22: mol_type = other RNA
ccaatccagaggggcaaatgcc

SEQ ID NO: 8049 - RNA, 22 nt, synthetic construct
  source 1..22: mol_type = other RNA
ccacaagcccaggcccggctca

SEQ ID NO: 8050 - RNA, 22 nt, synthetic construct
  source 1..22: mol_type = other RNA
ccacagccactcgtggcggccg

SEQ ID NO: 8051 - RNA, 22 nt, synthetic construct
  source 1..22: mol_type = other RNA
ccacagccctactttgtgccgg

SEQ ID NO: 8052 - RNA, 22 nt, synthetic construct
  source 1..22: mol_type = other RNA
ccacagggcccccaggaagcat

SEQ ID NO: 8053 - RNA, 22 nt, synthetic construct
  source 1..22: mol_type = other RNA
ccacatcttgaagagacctgac

SEQ ID NO: 8054 - RNA, 22 nt, synthetic construct
  source 1..22: mol_type = other RNA
ccaccccggactgggcagaacg

SEQ ID NO: 8055 - RNA, 22 nt, synthetic construct
  source 1..22: mol_type = other RNA
ccaccctgacacgcccctggcc

SEQ ID NO: 8056 - RNA, 22 nt, synthetic construct
  source 1..22: mol_type = other RNA
ccaccgaggcagccgccgatgg

SEQ ID NO: 8057 - RNA, 22 nt, synthetic construct
  source 1..22: mol_type = other RNA
ccaccggctctgcaaaggccag

SEQ ID NO: 8058 - RNA, 22 nt, synthetic construct
  source 1..22: mol_type = other RNA
ccacctccactaggatgccatc

SEQ ID NO: 8059 - RNA, 22 nt, synthetic construct
  source 1..22: mol_type = other RNA
ccacctgaaacgggtgacacag

SEQ ID NO: 8060 - RNA, 22 nt, synthetic construct
  source 1..22: mol_type = other RNA
ccacgaggccgaggaggctgga

SEQ ID NO: 8061 - RNA, 22 nt, synthetic construct
  source 1..22: mol_type = other RNA
ccacgaggctccccaatccaga

SEQ ID NO: 8062 - RNA, 22 nt, synthetic construct
  source 1..22: mol_type = other RNA
ccacgagtggctgtgggcccag

SEQ ID NO: 8063 - RNA, 22 nt, synthetic construct
  source 1..22: mol_type = other RNA
ccacgctcacgggactctatgt

SEQ ID NO: 8064 - RNA, 22 nt, synthetic construct
  source 1..22: mol_type = other RNA
ccacgctttctggctgggctga

SEQ ID NO: 8065 - RNA, 22 nt, synthetic construct
  source 1..22: mol_type = other RNA
ccacgtgctgccaaattccagc

SEQ ID NO: 8066 - RNA, 22 nt, synthetic construct
  source 1..22: mol_type = other RNA
ccactaggatgccatccgggcc

SEQ ID NO: 8067 - RNA, 22 nt, synthetic construct
  source 1..22: mol_type = other RNA
ccactcagagccagccacaggg

SEQ ID NO: 8068 - RNA, 22 nt, synthetic construct
  source 1..22: mol_type = other RNA
ccactcgtggcggccgatgagg

SEQ ID NO: 8069 - RNA, 22 nt, synthetic construct
  source 1..22: mol_type = other RNA
ccacttcttctcagtcacagcc

SEQ ID NO: 8070 - RNA, 22 nt, synthetic construct
  source 1..22: mol_type = other RNA
ccagaaaagagaggcggccggg

SEQ ID NO: 8071 - RNA, 22 nt, synthetic construct
  source 1..22: mol_type = other RNA
ccagaaagcgtggcacgccctc

SEQ ID NO: 8072 - RNA, 22 nt, synthetic construct
  source 1..22: mol_type = other RNA
ccagaagaagctgctccgaggt

SEQ ID NO: 8073 - RNA, 22 nt, synthetic construct
  source 1..22: mol_type = other RNA
ccagagcctgagcaaggccgac

SEQ ID NO: 8074 - RNA, 22 nt, synthetic construct
  source 1..22: mol_type = other RNA
ccagaggggcaaatgccagtgc

SEQ ID NO: 8075 - RNA, 22 nt, synthetic construct
  source 1..22: mol_type = other RNA
ccagatccacctccactaggat

SEQ ID NO: 8076 - RNA, 22 nt, synthetic construct
  source 1..22: mol_type = other RNA
ccagcacagcaatcactcgtgt

SEQ ID NO: 8077 - RNA, 22 nt, synthetic construct
  source 1..22: mol_type = other RNA
ccagcagcccccggagggagca

SEQ ID NO: 8078 - RNA, 22 nt, synthetic construct
  source 1..22: mol_type = other RNA
ccagcaggccgacatagagtcc

SEQ ID NO: 8079 - RNA, 22 nt, synthetic construct
  source 1..22: mol_type = other RNA
ccagcagggcctctgagagctg

SEQ ID NO: 8080 - RNA, 22 nt, synthetic construct
  source 1..22: mol_type = other RNA
ccagccacagggcccccaggaa

SEQ ID NO: 8081 - RNA, 22 nt, synthetic construct
  source 1..22: mol_type = other RNA
ccagccagaaagcgtggcacgc

SEQ ID NO: 8082 - RNA, 22 nt, synthetic construct
  source 1..22: mol_type = other RNA
ccagccagttgtcatagggcct

SEQ ID NO: 8083 - RNA, 22 nt, synthetic construct
  source 1..22: mol_type = other RNA
ccagcccaatagctcttgccct

SEQ ID NO: 8084 - RNA, 22 nt, synthetic construct
  source 1..22: mol_type = other RNA
ccagcctcctcggcctcgtggg

SEQ ID NO: 8085 - RNA, 22 nt, synthetic construct
  source 1..22: mol_type = other RNA
ccagcctggcctgcaccagatc

SEQ ID NO: 8086 - RNA, 22 nt, synthetic construct
  source 1..22: mol_type = other RNA
ccagctcccaggccagcttggc

SEQ ID NO: 8087 - RNA, 22 nt, synthetic construct
  source 1..22: mol_type = other RNA
ccagctcctcgaagccgtctag

SEQ ID NO: 8088 - RNA, 22 nt, synthetic construct
  source 1..22: mol_type = other RNA
ccagctcggactctgcggcccg

SEQ ID NO: 8089 - RNA, 22 nt, synthetic construct
  source 1..22: mol_type = other RNA
ccagctctcagaggccctgctg

SEQ ID NO: 8090 - RNA, 22 nt, synthetic construct
  source 1..22: mol_type = other RNA
ccagctgccgttctgcccagtc

SEQ ID NO: 8091 - RNA, 22 nt, synthetic construct
  source 1..22: mol_type = other RNA
ccagcttcctcctgcaatgctt

SEQ ID NO: 8092 - RNA, 22 nt, synthetic construct
  source 1..22: mol_type = other RNA
ccagcttggccagctctgccag

SEQ ID NO: 8093 - RNA, 22 nt, synthetic construct
  source 1..22: mol_type = other RNA
ccagctttgcccagcacagcaa

SEQ ID NO: 8094 - RNA, 22 nt, synthetic construct
  source 1..22: mol_type = other RNA
ccaggaagcattgcaggaggaa

SEQ ID NO: 8095 - RNA, 22 nt, synthetic construct
  source 1..22: mol_type = other RNA
ccaggcatacgtgatgcgctac

SEQ ID NO: 8096 - RNA, 22 nt, synthetic construct
  source 1..22: mol_type = other RNA
ccaggccagcttggccagctct

SEQ ID NO: 8097 - RNA, 22 nt, synthetic construct
  source 1..22: mol_type = other RNA
ccaggcccggctcactgcccca

SEQ ID NO: 8098 - RNA, 22 nt, synthetic construct
  source 1..22: mol_type = other RNA
ccaggcctccttgggccagctg

SEQ ID NO: 8099 - RNA, 22 nt, synthetic construct
  source 1..22: mol_type = other RNA
ccaggctcttgctgctgctcct

SEQ ID NO: 8100 - RNA, 22 nt, synthetic construct
  source 1..22: mol_type = other RNA
ccaggctggagaggagcagcag

SEQ ID NO: 8101 - RNA, 22 nt, synthetic construct
  source 1..22: mol_type = other RNA
ccagggagaagagcagatcctg

SEQ ID NO: 8102 - RNA, 22 nt, synthetic construct
  source 1..22: mol_type = other RNA
ccagggagaagtcttggcccgc

SEQ ID NO: 8103 - RNA, 22 nt, synthetic construct
  source 1..22: mol_type = other RNA
ccaggggcgtgtcagggtgggg

SEQ ID NO: 8104 - RNA, 22 nt, synthetic construct
  source 1..22: mol_type = other RNA
ccaggtcctcacgtctgcggat

SEQ ID NO: 8105 - RNA, 22 nt, synthetic construct
  source 1..22: mol_type = other RNA
ccagtacatgtgcatcaggagg

SEQ ID NO: 8106 - RNA, 22 nt, synthetic construct
  source 1..22: mol_type = other RNA
ccagtacgactttgtcttctct

SEQ ID NO: 8107 - RNA, 22 nt, synthetic construct
  source 1..22: mol_type = other RNA
ccagtccggggtggccagttcc

SEQ ID NO: 8108 - RNA, 22 nt, synthetic construct
  source 1..22: mol_type = other RNA
ccagtgctgcggaggtccaggg

SEQ ID NO: 8109 - RNA, 22 nt, synthetic construct
  source 1..22: mol_type = other RNA
ccagttcccatccgcagacgtg

SEQ ID NO: 8110 - RNA, 22 nt, synthetic construct
  source 1..22: mol_type = other RNA
ccagttcccgctccaggctctt

SEQ ID NO: 8111 - RNA, 22 nt, synthetic construct
  source 1..22: mol_type = other RNA
ccagttgtcatagggcctcttc

SEQ ID NO: 8112 - RNA, 22 nt, synthetic construct
  source 1..22: mol_type = other RNA
ccatacgtgtcctgcagtgagc

SEQ ID NO: 8113 - RNA, 22 nt, synthetic construct
  source 1..22: mol_type = other RNA
ccataggcatcccccggacggt

SEQ ID NO: 8114 - RNA, 22 nt, synthetic construct
  source 1..22: mol_type = other RNA
ccatccgcagacgtgaggacct

SEQ ID NO: 8115 - RNA, 22 nt, synthetic construct
  source 1..22: mol_type = other RNA
ccatcgcccaggtcctcacgtc

SEQ ID NO: 8116 - RNA, 22 nt, synthetic construct
  source 1..22: mol_type = other RNA
ccatcggcggctgcctcggtgg

SEQ ID NO: 8117 - RNA, 22 nt, synthetic construct
  source 1..22: mol_type = other RNA
ccatcttgcgcttccagctcct

SEQ ID NO: 8118 - RNA, 22 nt, synthetic construct
  source 1..22: mol_type = other RNA
ccatggagaagccggacagctc

SEQ ID NO: 8119 - RNA, 22 nt, synthetic construct
  source 1..22: mol_type = other RNA
ccatggagcaggcccaggcata

SEQ ID NO: 8120 - RNA, 22 nt, synthetic construct
  source 1..22: mol_type = other RNA
ccattgcttgaaccgtccgggg

SEQ ID NO: 8121 - RNA, 22 nt, synthetic construct
  source 1..22: mol_type = other RNA
cccaacacaaggatgtctcttc

SEQ ID NO: 8122 - RNA, 22 nt, synthetic construct
  source 1..22: mol_type = other RNA
cccaagcccctcaccccacctg

SEQ ID NO: 8123 - RNA, 22 nt, synthetic construct
  source 1..22: mol_type = other RNA
cccaagctccagcagggcctct

SEQ ID NO: 8124 - RNA, 22 nt, synthetic construct
  source 1..22: mol_type = other RNA
cccaaggaagaagaggccctat

SEQ ID NO: 8125 - RNA, 22 nt, synthetic construct
  source 1..22: mol_type = other RNA
cccaaggaggcctggctgaggt

SEQ ID NO: 8126 - RNA, 22 nt, synthetic construct
  source 1..22: mol_type = other RNA
cccaatagctcttgccctgacc

SEQ ID NO: 8127 - RNA, 22 nt, synthetic construct
  source 1..22: mol_type = other RNA
cccaatccagaggggcaaatgc

SEQ ID NO: 8128 - RNA, 22 nt, synthetic construct
  source 1..22: mol_type = other RNA
cccacagccactcgtggcggcc

SEQ ID NO: 8129 - RNA, 22 nt, synthetic construct
  source 1..22: mol_type = other RNA
cccaccctgacacgcccctggc

SEQ ID NO: 8130 - RNA, 22 nt, synthetic construct
  source 1..22: mol_type = other RNA
cccacctgaaacgggtgacaca

SEQ ID NO: 8131 - RNA, 22 nt, synthetic construct
  source 1..22: mol_type = other RNA
cccacgaggccgaggaggctgg

SEQ ID NO: 8132 - RNA, 22 nt, synthetic construct
  source 1..22: mol_type = other RNA
cccacgaggctccccaatccag

SEQ ID NO: 8133 - RNA, 22 nt, synthetic construct
  source 1..22: mol_type = other RNA
cccagaaaagagaggcggccgg

SEQ ID NO: 8134 - RNA, 22 nt, synthetic construct
  source 1..22: mol_type = other RNA
cccagcacagcaatcactcgtg

SEQ ID NO: 8135 - RNA, 22 nt, synthetic construct
  source 1..22: mol_type = other RNA
cccagcaggccgacatagagtc

SEQ ID NO: 8136 - RNA, 22 nt, synthetic construct
  source 1..22: mol_type = other RNA
cccagccagaaagcgtggcacg

SEQ ID NO: 8137 - RNA, 22 nt, synthetic construct
  source 1..22: mol_type = other RNA
cccagcccaatagctcttgccc

SEQ ID NO: 8138 - RNA, 22 nt, synthetic construct
  source 1..22: mol_type = other RNA
cccagctcccaggccagcttgg

SEQ ID NO: 8139 - RNA, 22 nt, synthetic construct
  source 1..22: mol_type = other RNA
cccagcttcctcctgcaatgct

SEQ ID NO: 8140 - RNA, 22 nt, synthetic construct
  source 1..22: mol_type = other RNA
cccaggaagcattgcaggagga

SEQ ID NO: 8141 - RNA, 22 nt, synthetic construct
  source 1..22: mol_type = other RNA
cccaggcatacgtgatgcgcta

SEQ ID NO: 8142 - RNA, 22 nt, synthetic construct
  source 1..22: mol_type = other RNA
cccaggccagcttggccagctc

SEQ ID NO: 8143 - RNA, 22 nt, synthetic construct
  source 1..22: mol_type = other RNA
cccagggagaagagcagatcct

SEQ ID NO: 8144 - RNA, 22 nt, synthetic construct
  source 1..22: mol_type = other RNA
cccaggtcctcacgtctgcgga

SEQ ID NO: 8145 - RNA, 22 nt, synthetic construct
  source 1..22: mol_type = other RNA
cccagtacatgtgcatcaggag

SEQ ID NO: 8146 - RNA, 22 nt, synthetic construct
  source 1..22: mol_type = other RNA
cccagtacgactttgtcttctc

SEQ ID NO: 8147 - RNA, 22 nt, synthetic construct
  source 1..22: mol_type = other RNA
cccagtccggggtggccagttc

SEQ ID NO: 8148 - RNA, 22 nt, synthetic construct
  source 1..22: mol_type = other RNA
cccatccgcagacgtgaggacc

SEQ ID NO: 8149 - RNA, 22 nt, synthetic construct
  source 1..22: mol_type = other RNA
ccccaagcccctcaccccacct

SEQ ID NO: 8150 - RNA, 22 nt, synthetic construct
  source 1..22: mol_type = other RNA
ccccaagctccagcagggcctc

SEQ ID NO: 8151 - RNA, 22 nt, synthetic construct
  source 1..22: mol_type = other RNA
ccccaaggaagaagaggcccta

SEQ ID NO: 8152 - RNA, 22 nt, synthetic construct
  source 1..22: mol_type = other RNA
ccccaatccagaggggcaaatg

SEQ ID NO: 8153 - RNA, 22 nt, synthetic construct
  source 1..22: mol_type = other RNA
ccccaccctgacacgcccctgg

SEQ ID NO: 8154 - RNA, 22 nt, synthetic construct
  source 1..22: mol_type = other RNA
ccccacctgaaacgggtgacac

SEQ ID NO: 8155 - RNA, 22 nt, synthetic construct
  source 1..22: mol_type = other RNA
ccccagcccaatagctcttgcc

SEQ ID NO: 8156 - RNA, 22 nt, synthetic construct
  source 1..22: mol_type = other RNA
ccccagcttcctcctgcaatgc

SEQ ID NO: 8157 - RNA, 22 nt, synthetic construct
  source 1..22: mol_type = other RNA
ccccaggaagcattgcaggagg

SEQ ID NO: 8158 - RNA, 22 nt, synthetic construct
  source 1..22: mol_type = other RNA
ccccagtacgactttgtcttct

SEQ ID NO: 8159 - RNA, 22 nt, synthetic construct
  source 1..22: mol_type = other RNA
cccccaccctgacacgcccctg

SEQ ID NO: 8160 - RNA, 22 nt, synthetic construct
  source 1..22: mol_type = other RNA
cccccaggaagcattgcaggag

SEQ ID NO: 8161 - RNA, 22 nt, synthetic construct
  source 1..22: mol_type = other RNA
cccccggacggttcaagcaatg

SEQ ID NO: 8162 - RNA, 22 nt, synthetic construct
  source 1..22: mol_type = other RNA
ccccggacggttcaagcaatgg

SEQ ID NO: 8163 - RNA, 22 nt, synthetic construct
  source 1..22: mol_type = other RNA
ccccggactgggcagaacggca

SEQ ID NO: 8164 - RNA, 22 nt, synthetic construct
  source 1..22: mol_type = other RNA
ccccggccgcctctcttttctg

SEQ ID NO: 8165 - RNA, 22 nt, synthetic construct
  source 1..22: mol_type = other RNA
ccccggctgcagccgcttcagg

SEQ ID NO: 8166 - RNA, 22 nt, synthetic construct
  source 1..22: mol_type = other RNA
cccctcaccccacctgaaacgg

SEQ ID NO: 8167 - RNA, 22 nt, synthetic construct
  source 1..22: mol_type = other RNA
cccctctggattggggagcctc

SEQ ID NO: 8168 - RNA, 22 nt, synthetic construct
  source 1..22: mol_type = other RNA
cccctgccattgcttgaaccgt

SEQ ID NO: 8169 - RNA, 22 nt, synthetic construct
  source 1..22: mol_type = other RNA
cccctggcctttgcagagccgg

SEQ ID NO: 8170 - RNA, 22 nt, synthetic construct
  source 1..22: mol_type = other RNA
cccgagtagggctcccaggcag

SEQ ID NO: 8171 - RNA, 22 nt, synthetic construct
  source 1..22: mol_type = other RNA
cccgcaggcccggatggcatcc

SEQ ID NO: 8172 - RNA, 22 nt, synthetic construct
  source 1..22: mol_type = other RNA
cccgcagtacctagcattgacc

SEQ ID NO: 8173 - RNA, 22 nt, synthetic construct
  source 1..22: mol_type = other RNA
cccgcagtgtccccggctgcag

SEQ ID NO: 8174 - RNA, 22 nt, synthetic construct
  source 1..22: mol_type = other RNA
cccgccgcctccaaggccttgc

SEQ ID NO: 8175 - RNA, 22 nt, synthetic construct
  source 1..22: mol_type = other RNA
cccgcctcacgcctcctgatgc

SEQ ID NO: 8176 - RNA, 22 nt, synthetic construct
  source 1..22: mol_type = other RNA
cccgcggtgggtgttggactaa

SEQ ID NO: 8177 - RNA, 22 nt, synthetic construct
  source 1..22: mol_type = other RNA
cccgctccaggctcttgctgct

SEQ ID NO: 8178 - RNA, 22 nt, synthetic construct
  source 1..22: mol_type = other RNA
cccgctgcctgggagccctact

SEQ ID NO: 8179 - RNA, 22 nt, synthetic construct
  source 1..22: mol_type = other RNA
cccggacggttcaagcaatggc

SEQ ID NO: 8180 - RNA, 22 nt, synthetic construct
  source 1..22: mol_type = other RNA
cccggactgggcagaacggcag

SEQ ID NO: 8181 - RNA, 22 nt, synthetic construct
  source 1..22: mol_type = other RNA
cccggaggagcgtcagggctct

SEQ ID NO: 8182 - RNA, 22 nt, synthetic construct
  source 1..22: mol_type = other RNA
cccggatggcatcctagtggag

SEQ ID NO: 8183 - RNA, 22 nt, synthetic construct
  source 1..22: mol_type = other RNA
cccggcacaaagtagggctgtg

SEQ ID NO: 8184 - RNA, 22 nt, synthetic construct
  source 1..22: mol_type = other RNA
cccggccgcctctcttttctgg

SEQ ID NO: 8185 - RNA, 22 nt, synthetic construct
  source 1..22: mol_type = other RNA
cccggctcactgccccagccca

SEQ ID NO: 8186 - RNA, 22 nt, synthetic construct
  source 1..22: mol_type = other RNA
cccggctgcagccgcttcaggt

SEQ ID NO: 8187 - RNA, 22 nt, synthetic construct
  source 1..22: mol_type = other RNA
cccgtgagcgtggagggcagct

SEQ ID NO: 8188 - RNA, 22 nt, synthetic construct
  source 1..22: mol_type = other RNA
cccgtttcaggtggggtgaggg

SEQ ID NO: 8189 - RNA, 22 nt, synthetic construct
  source 1..22: mol_type = other RNA
ccctacaggaggaccagttccc

SEQ ID NO: 8190 - RNA, 22 nt, synthetic construct
  source 1..22: mol_type = other RNA
ccctactcgggccatcggcggc

SEQ ID NO: 8191 - RNA, 22 nt, synthetic construct
  source 1..22: mol_type = other RNA
ccctactttgtgccgggcagtg

SEQ ID NO: 8192 - RNA, 22 nt, synthetic construct
  source 1..22: mol_type = other RNA
ccctatgacaactggctggagg

SEQ ID NO: 8193 - RNA, 22 nt, synthetic construct
  source 1..22: mol_type = other RNA
ccctatttgagctgtccggctt

SEQ ID NO: 8194 - RNA, 22 nt, synthetic construct
  source 1..22: mol_type = other RNA
ccctcaccccacctgaaacggg

SEQ ID NO: 8195 - RNA, 22 nt, synthetic construct
  source 1..22: mol_type = other RNA
ccctccacgctcacgggactct

SEQ ID NO: 8196 - RNA, 22 nt, synthetic construct
  source 1..22: mol_type = other RNA
ccctccagccagttgtcatagg

SEQ ID NO: 8197 - RNA, 22 nt, synthetic construct
  source 1..22: mol_type = other RNA
ccctcctcctcacagcccggcc

SEQ ID NO: 8198 - RNA, 22 nt, synthetic construct
  source 1..22: mol_type = other RNA
ccctctggattggggagcctcg

SEQ ID NO: 8199 - RNA, 22 nt, synthetic construct
  source 1..22: mol_type = other RNA
ccctgacacgcccctggccttt

SEQ ID NO: 8200 - RNA, 22 nt, synthetic construct
  source 1..22: mol_type = other RNA
ccctgaccagctttgcccagca

SEQ ID NO: 8201 - RNA, 22 nt, synthetic construct
  source 1..22: mol_type = other RNA
ccctgacgctcctccgggaccg

SEQ ID NO: 8202 - RNA, 22 nt, synthetic construct
  source 1..22: mol_type = other RNA
ccctgagctctcaaagtagcgc

SEQ ID NO: 8203 - RNA, 22 nt, synthetic construct
  source 1..22: mol_type = other RNA
ccctgccattgcttgaaccgtc

SEQ ID NO: 8204 - RNA, 22 nt, synthetic construct
  source 1..22: mol_type = other RNA
ccctgctggagcttggggagga

SEQ ID NO: 8205 - RNA, 22 nt, synthetic construct
  source 1..22: mol_type = other RNA
ccctggacctccgcagcactgg

SEQ ID NO: 8206 - RNA, 22 nt, synthetic construct
  source 1..22: mol_type = other RNA
ccctggcagagctggccaagct

SEQ ID NO: 8207 - RNA, 22 nt, synthetic construct
  source 1..22: mol_type = other RNA
ccctggcctttgcagagccggt

SEQ ID NO: 8208 - RNA, 22 nt, synthetic construct
  source 1..22: mol_type = other RNA
ccctgggcccacagccactcgt

SEQ ID NO: 8209 - RNA, 22 nt, synthetic construct
  source 1..22: mol_type = other RNA
ccctgtggctggctctgagtgg

SEQ ID NO: 8210 - RNA, 22 nt, synthetic construct
  source 1..22: mol_type = other RNA
ccgacatagagtcccgtgagcg

SEQ ID NO: 8211 - RNA, 22 nt, synthetic construct
  source 1..22: mol_type = other RNA
ccgacgccctatttgagctgtc

SEQ ID NO: 8212 - RNA, 22 nt, synthetic construct
  source 1..22: mol_type = other RNA
ccgagctggccttccccagctt

SEQ ID NO: 8213 - RNA, 22 nt, synthetic construct
  source 1..22: mol_type = other RNA
ccgaggaggctggaatttggca

SEQ ID NO: 8214 - RNA, 22 nt, synthetic construct
  source 1..22: mol_type = other RNA
ccgaggttgcaccctcctcctc

SEQ ID NO: 8215 - RNA, 22 nt, synthetic construct
  source 1..22: mol_type = other RNA
ccgagtagggctcccaggcagc

SEQ ID NO: 8216 - RNA, 22 nt, synthetic construct
  source 1..22: mol_type = other RNA
ccgatgaggttttcagccacat

SEQ ID NO: 8217 - RNA, 22 nt, synthetic construct
  source 1..22: mol_type = other RNA
ccgatggcccgagtagggctcc

SEQ ID NO: 8218 - RNA, 22 nt, synthetic construct
  source 1..22: mol_type = other RNA
ccgcacgtgctgtgcaggaagc

SEQ ID NO: 8219 - RNA, 22 nt, synthetic construct
  source 1..22: mol_type = other RNA
ccgcagacatcaaagtacccta

SEQ ID NO: 8220 - RNA, 22 nt, synthetic construct
  source 1..22: mol_type = other RNA
ccgcagacgtgaggacctgggc

SEQ ID NO: 8221 - RNA, 22 nt, synthetic construct
  source 1..22: mol_type = other RNA
ccgcagagtccgagctggcctt

SEQ ID NO: 8222 - RNA, 22 nt, synthetic construct
  source 1..22: mol_type = other RNA
ccgcagcactggcatttgcccc

SEQ ID NO: 8223 - RNA, 22 nt, synthetic construct
  source 1..22: mol_type = other RNA
ccgcaggcccggatggcatcct

SEQ ID NO: 8224 - RNA, 22 nt, synthetic construct
  source 1..22: mol_type = other RNA
ccgcagtacctagcattgaccc

SEQ ID NO: 8225 - RNA, 22 nt, synthetic construct
  source 1..22: mol_type = other RNA
ccgcagtgtccccggctgcagc

SEQ ID NO: 8226 - RNA, 22 nt, synthetic construct
  source 1..22: mol_type = other RNA
ccgccacgagtggctgtgggcc

SEQ ID NO: 8227 - RNA, 22 nt, synthetic construct
  source 1..22: mol_type = other RNA
ccgccgatggcccgagtagggc

SEQ ID NO: 8228 - RNA, 22 nt, synthetic construct
  source 1..22: mol_type = other RNA
ccgccgcctccaaggccttgcc

SEQ ID NO: 8229 - RNA, 22 nt, synthetic construct
  source 1..22: mol_type = other RNA
ccgccggtgctccttggcagcc

SEQ ID NO: 8230 - RNA, 22 nt, synthetic construct
  source 1..22: mol_type = other RNA
ccgcctcacgcctcctgatgca

SEQ ID NO: 8231 - RNA, 22 nt, synthetic construct
  source 1..22: mol_type = other RNA
ccgcctccaaggccttgcccag

SEQ ID NO: 8232 - RNA, 22 nt, synthetic construct
  source 1..22: mol_type = other RNA
ccgcctctcttttctgggcacc

SEQ ID NO: 8233 - RNA, 22 nt, synthetic construct
  source 1..22: mol_type = other RNA
ccgcctggtccagagcctgagc

SEQ ID NO: 8234 - RNA, 22 nt, synthetic construct
  source 1..22: mol_type = other RNA
ccgcggtgggtgttggactaag

SEQ ID NO: 8235 - RNA, 22 nt, synthetic construct
  source 1..22: mol_type = other RNA
ccgcgtgagacacgagtgattg

SEQ ID NO: 8236 - RNA, 22 nt, synthetic construct
  source 1..22: mol_type = other RNA
ccgcgttctgctcatcctagac

SEQ ID NO: 8237 - RNA, 22 nt, synthetic construct
  source 1..22: mol_type = other RNA
ccgctcactgcaggacacgtat

SEQ ID NO: 8238 - RNA, 22 nt, synthetic construct
  source 1..22: mol_type = other RNA
ccgctccaggctcttgctgctg

SEQ ID NO: 8239 - RNA, 22 nt, synthetic construct
  source 1..22: mol_type = other RNA
ccgctgcctgggagccctactc

SEQ ID NO: 8240 - RNA, 22 nt, synthetic construct
  source 1..22: mol_type = other RNA
ccgcttcaggtacctcgcaagc

SEQ ID NO: 8241 - RNA, 22 nt, synthetic construct
  source 1..22: mol_type = other RNA
ccggacagctcaaatagggcgt

SEQ ID NO: 8242 - RNA, 22 nt, synthetic construct
  source 1..22: mol_type = other RNA
ccggacggttcaagcaatggca

SEQ ID NO: 8243 - RNA, 22 nt, synthetic construct
  source 1..22: mol_type = other RNA
ccggactgggcagaacggcagc

SEQ ID NO: 8244 - RNA, 22 nt, synthetic construct
  source 1..22: mol_type = other RNA
ccggaggagcgtcagggctctg

SEQ ID NO: 8245 - RNA, 22 nt, synthetic construct
  source 1..22: mol_type = other RNA
ccggatggcatcctagtggagg

SEQ ID NO: 8246 - RNA, 22 nt, synthetic construct
  source 1..22: mol_type = other RNA
ccggcacaaagtagggctgtgg

SEQ ID NO: 8247 - RNA, 22 nt, synthetic construct
  source 1..22: mol_type = other RNA
ccggccacttcttctcagtcac

SEQ ID NO: 8248 - RNA, 22 nt, synthetic construct
  source 1..22: mol_type = other RNA
ccggccgcctctcttttctggg

SEQ ID NO: 8249 - RNA, 22 nt, synthetic construct
  source 1..22: mol_type = other RNA
ccggccttttccagaagaagct

SEQ ID NO: 8250 - RNA, 22 nt, synthetic construct
  source 1..22: mol_type = other RNA
ccggcggccgcgtgagacacga

SEQ ID NO: 8251 - RNA, 22 nt, synthetic construct
  source 1..22: mol_type = other RNA
ccggctcactgccccagcccaa

SEQ ID NO: 8252 - RNA, 22 nt, synthetic construct
  source 1..22: mol_type = other RNA
ccggctctgcaaaggccagggg

SEQ ID NO: 8253 - RNA, 22 nt, synthetic construct
  source 1..22: mol_type = other RNA
ccggctgcagccgcttcaggta

SEQ ID NO: 8254 - RNA, 22 nt, synthetic construct
  source 1..22: mol_type = other RNA
ccggcttccccagtacgacttt

SEQ ID NO: 8255 - RNA, 22 nt, synthetic construct
  source 1..22: mol_type = other RNA
ccggcttctccatggagcaggc

SEQ ID NO: 8256 - RNA, 22 nt, synthetic construct
  source 1..22: mol_type = other RNA
ccgggaccggccacttcttctc

SEQ ID NO: 8257 - RNA, 22 nt, synthetic construct
  source 1..22: mol_type = other RNA
ccgggcagtgtgccagctctca

SEQ ID NO: 8258 - RNA, 22 nt, synthetic construct
  source 1..22: mol_type = other RNA
ccgggctgtgaggaggagggtg

SEQ ID NO: 8259 - RNA, 22 nt, synthetic construct
  source 1..22: mol_type = other RNA
ccggggagctcctgtaccacgt

SEQ ID NO: 8260 - RNA, 22 nt, synthetic construct
  source 1..22: mol_type = other RNA
ccgggggatgcctatggcctgc

SEQ ID NO: 8261 - RNA, 22 nt, synthetic construct
  source 1..22: mol_type = other RNA
ccggggtggccagttcccgctc

SEQ ID NO: 8262 - RNA, 22 nt, synthetic construct
  source 1..22: mol_type = other RNA
ccggtcccggaggagcgtcagg

SEQ ID NO: 8263 - RNA, 22 nt, synthetic construct
  source 1..22: mol_type = other RNA
ccggtccgcacgtgctgtgcag

SEQ ID NO: 8264 - RNA, 22 nt, synthetic construct
  source 1..22: mol_type = other RNA
ccggtgccggtccgcacgtgct

SEQ ID NO: 8265 - RNA, 22 nt, synthetic construct
  source 1..22: mol_type = other RNA
ccggtgctccttggcagccaac

SEQ ID NO: 8266 - RNA, 22 nt, synthetic construct
  source 1..22: mol_type = other RNA
ccggtggagcagttctaccgct

SEQ ID NO: 8267 - RNA, 22 nt, synthetic construct
  source 1..22: mol_type = other RNA
ccgtccgggggatgcctatggc

SEQ ID NO: 8268 - RNA, 22 nt, synthetic construct
  source 1..22: mol_type = other RNA
ccgtctaggatgagcagaacgc

SEQ ID NO: 8269 - RNA, 22 nt, synthetic construct
  source 1..22: mol_type = other RNA
ccgtgagcgtggagggcagctt

SEQ ID NO: 8270 - RNA, 22 nt, synthetic construct
  source 1..22: mol_type = other RNA
ccgtgcagccctcgacagcccc

SEQ ID NO: 8271 - RNA, 22 nt, synthetic construct
  source 1..22: mol_type = other RNA
ccgttctgcccagtccggggtg

SEQ ID NO: 8272 - RNA, 22 nt, synthetic construct
  source 1..22: mol_type = other RNA
ccgtttcaggtggggtgagggg

SEQ ID NO: 8273 - RNA, 22 nt, synthetic construct
  source 1..22: mol_type = other RNA
cctacaggaggaccagttccca

SEQ ID NO: 8274 - RNA, 22 nt, synthetic construct
  source 1..22: mol_type = other RNA
cctactcgggccatcggcggct

SEQ ID NO: 8275 - RNA, 22 nt, synthetic construct
  source 1..22: mol_type = other RNA
cctactttgtgccgggcagtgt

SEQ ID NO: 8276 - RNA, 22 nt, synthetic construct
  source 1..22: mol_type = other RNA
cctagacggcttcgaggagctg

SEQ ID NO: 8277 - RNA, 22 nt, synthetic construct
  source 1..22: mol_type = other RNA
cctagcattgaccccaaggaag

SEQ ID NO: 8278 - RNA, 22 nt, synthetic construct
  source 1..22: mol_type = other RNA
cctagtggaggtggatctggtg

SEQ ID NO: 8279 - RNA, 22 nt, synthetic construct
  source 1..22: mol_type = other RNA
cctatgacaactggctggaggg

SEQ ID NO: 8280 - RNA, 22 nt, synthetic construct
  source 1..22: mol_type = other RNA
cctatggcctgcaggatctgct

SEQ ID NO: 8281 - RNA, 22 nt, synthetic construct
  source 1..22: mol_type = other RNA
cctatttgagctgtccggcttc

SEQ ID NO: 8282 - RNA, 22 nt, synthetic construct
  source 1..22: mol_type = other RNA
cctcaccccacctgaaacgggt

SEQ ID NO: 8283 - RNA, 22 nt, synthetic construct
  source 1..22: mol_type = other RNA
cctcacgcctcctgatgcacat

SEQ ID NO: 8284 - RNA, 22 nt, synthetic construct
  source 1..22: mol_type = other RNA
cctcacgtctgcggatgggaac

SEQ ID NO: 8285 - RNA, 22 nt, synthetic construct
  source 1..22: mol_type = other RNA
cctcagccaggcctccttgggc

SEQ ID NO: 8286 - RNA, 22 nt, synthetic construct
  source 1..22: mol_type = other RNA
cctcatcggccgccacgagtgg

SEQ ID NO: 8287 - RNA, 22 nt, synthetic construct
  source 1..22: mol_type = other RNA
cctccaaggccttgcccagtac

SEQ ID NO: 8288 - RNA, 22 nt, synthetic construct
  source 1..22: mol_type = other RNA
cctccacgctcacgggactcta

SEQ ID NO: 8289 - RNA, 22 nt, synthetic construct
  source 1..22: mol_type = other RNA
cctccactaggatgccatccgg

SEQ ID NO: 8290 - RNA, 22 nt, synthetic construct
  source 1..22: mol_type = other RNA
cctccagccagttgtcataggg

SEQ ID NO: 8291 - RNA, 22 nt, synthetic construct
  source 1..22: mol_type = other RNA
cctccccaagctccagcagggc

SEQ ID NO: 8292 - RNA, 22 nt, synthetic construct
  source 1..22: mol_type = other RNA
cctccgcagcactggcatttgc

SEQ ID NO: 8293 - RNA, 22 nt, synthetic construct
  source 1..22: mol_type = other RNA
cctccgggaccggccacttctt

SEQ ID NO: 8294 - RNA, 22 nt, synthetic construct
  source 1..22: mol_type = other RNA
cctcctcctcacagcccggccc

SEQ ID NO: 8295 - RNA, 22 nt, synthetic construct
  source 1..22: mol_type = other RNA
cctcctcggcctcgtgggcgca

SEQ ID NO: 8296 - RNA, 22 nt, synthetic construct
  source 1..22: mol_type = other RNA
cctcctgatgcacatgtactgg

SEQ ID NO: 8297 - RNA, 22 nt, synthetic construct
  source 1..22: mol_type = other RNA
cctcctgcaatgcttcctgggg

SEQ ID NO: 8298 - RNA, 22 nt, synthetic construct
  source 1..22: mol_type = other RNA
cctcctgtagggtactttgatg

SEQ ID NO: 8299 - RNA, 22 nt, synthetic construct
  source 1..22: mol_type = other RNA
cctccttgggccagctgccgtt

SEQ ID NO: 8300 - RNA, 22 nt, synthetic construct
  source 1..22: mol_type = other RNA
cctcgaagccgtctaggatgag

SEQ ID NO: 8301 - RNA, 22 nt, synthetic construct
  source 1..22: mol_type = other RNA
cctcgcaagcaccttctgcttc

SEQ ID NO: 8302 - RNA, 22 nt, synthetic construct
  source 1..22: mol_type = other RNA
cctcggagcagcttcttctgga

SEQ ID NO: 8303 - RNA, 22 nt, synthetic construct
  source 1..22: mol_type = other RNA
cctcggcctcgtgggcgcagtg

SEQ ID NO: 8304 - RNA, 22 nt, synthetic construct
  source 1..22: mol_type = other RNA
cctcggtggacaggaagcagaa

SEQ ID NO: 8305 - RNA, 22 nt, synthetic construct
  source 1..22: mol_type = other RNA
cctcgtgggactcagctgtgtc

SEQ ID NO: 8306 - RNA, 22 nt, synthetic construct
  source 1..22: mol_type = other RNA
cctcgtgggcgcagtgcagcag

SEQ ID NO: 8307 - RNA, 22 nt, synthetic construct
  source 1..22: mol_type = other RNA
cctctcacatacccccaccctg

SEQ ID NO: 8308 - RNA, 22 nt, synthetic construct
  source 1..22: mol_type = other RNA
cctctccagcctggcctgcacc

SEQ ID NO: 8309 - RNA, 22 nt, synthetic construct
  source 1..22: mol_type = other RNA
cctctcttttctgggcacccgc

SEQ ID NO: 8310 - RNA, 22 nt, synthetic construct
  source 1..22: mol_type = other RNA
cctctgagagctggcacactgc

SEQ ID NO: 8311 - RNA, 22 nt, synthetic construct
  source 1..22: mol_type = other RNA
cctctggattggggagcctcgt

SEQ ID NO: 8312 - RNA, 22 nt, synthetic construct
  source 1..22: mol_type = other RNA
cctcttcttccttggggtcaat

SEQ ID NO: 8313 - RNA, 22 nt, synthetic construct
  source 1..22: mol_type = other RNA
cctgaaacgggtgacacagctg

SEQ ID NO: 8314 - RNA, 22 nt, synthetic construct
  source 1..22: mol_type = other RNA
cctgaagcggctgcagccgggg

SEQ ID NO: 8315 - RNA, 22 nt, synthetic construct
  source 1..22: mol_type = other RNA
cctgacacgcccctggcctttg

SEQ ID NO: 8316 - RNA, 22 nt, synthetic construct
  source 1..22: mol_type = other RNA
cctgaccagctttgcccagcac

SEQ ID NO: 8317 - RNA, 22 nt, synthetic construct
  source 1..22: mol_type = other RNA
cctgaccgcgttctgctcatcc

SEQ ID NO: 8318 - RNA, 22 nt, synthetic construct
  source 1..22: mol_type = other RNA
cctgacgctcctccgggaccgg

SEQ ID NO: 8319 - RNA, 22 nt, synthetic construct
  source 1..22: mol_type = other RNA
cctgagcaaggccgacgcccta

SEQ ID NO: 8320 - RNA, 22 nt, synthetic construct
  source 1..22: mol_type = other RNA
cctgagctctcaaagtagcgca

SEQ ID NO: 8321 - RNA, 22 nt, synthetic construct
  source 1..22: mol_type = other RNA
cctgatgcacatgtactgggca

SEQ ID NO: 8322 - RNA, 22 nt, synthetic construct
  source 1..22: mol_type = other RNA
cctgcaatgcttcctgggggcc

SEQ ID NO: 8323 - RNA, 22 nt, synthetic construct
  source 1..22: mol_type = other RNA
cctgcacagcacgtgcggaccg

SEQ ID NO: 8324 - RNA, 22 nt, synthetic construct
  source 1..22: mol_type = other RNA
cctgcaccagatccacctccac

SEQ ID NO: 8325 - RNA, 22 nt, synthetic construct
  source 1..22: mol_type = other RNA
cctgcaggatctgctcttctcc

SEQ ID NO: 8326 - RNA, 22 nt, synthetic construct
  source 1..22: mol_type = other RNA
cctgcaggccataggcatcccc

SEQ ID NO: 8327 - RNA, 22 nt, synthetic construct
  source 1..22: mol_type = other RNA
cctgcagtgagcggtagaactg

SEQ ID NO: 8328 - RNA, 22 nt, synthetic construct
  source 1..22: mol_type = other RNA
cctgccattgcttgaaccgtcc

SEQ ID NO: 8329 - RNA, 22 nt, synthetic construct
  source 1..22: mol_type = other RNA
cctgcgggctcggcaccatacg

SEQ ID NO: 8330 - RNA, 22 nt, synthetic construct
  source 1..22: mol_type = other RNA
cctgctccatggagaagccgga

SEQ ID NO: 8331 - RNA, 22 nt, synthetic construct
  source 1..22: mol_type = other RNA
cctgctccctccgggggctgct

SEQ ID NO: 8332 - RNA, 22 nt, synthetic construct
  source 1..22: mol_type = other RNA
cctgctggagcttggggaggac

SEQ ID NO: 8333 - RNA, 22 nt, synthetic construct
  source 1..22: mol_type = other RNA
cctgctgggccgtgcagccctc

SEQ ID NO: 8334 - RNA, 22 nt, synthetic construct
  source 1..22: mol_type = other RNA
cctggacctccgcagcactggc

SEQ ID NO: 8335 - RNA, 22 nt, synthetic construct
  source 1..22: mol_type = other RNA
cctggagcgggaactggccacc

SEQ ID NO: 8336 - RNA, 22 nt, synthetic construct
  source 1..22: mol_type = other RNA
cctggcagagctggccaagctg

SEQ ID NO: 8337 - RNA, 22 nt, synthetic construct
  source 1..22: mol_type = other RNA
cctggcctgcaccagatccacc

SEQ ID NO: 8338 - RNA, 22 nt, synthetic construct
  source 1..22: mol_type = other RNA
cctggcctttgcagagccggtg

SEQ ID NO: 8339 - RNA, 22 nt, synthetic construct
  source 1..22: mol_type = other RNA
cctggctgaggtgctgttggct

SEQ ID NO: 8340 - RNA, 22 nt, synthetic construct
  source 1..22: mol_type = other RNA
cctgggagccctactcgggcca

SEQ ID NO: 8341 - RNA, 22 nt, synthetic construct
  source 1..22: mol_type = other RNA
cctgggagctgggccgcagaca

SEQ ID NO: 8342 - RNA, 22 nt, synthetic construct
  source 1..22: mol_type = other RNA
cctgggcccacagccactcgtg

SEQ ID NO: 8343 - RNA, 22 nt, synthetic construct
  source 1..22: mol_type = other RNA
cctgggcctgctccatggagaa

SEQ ID NO: 8344 - RNA, 22 nt, synthetic construct
  source 1..22: mol_type = other RNA
cctgggcgatggccaaaggctt

SEQ ID NO: 8345 - RNA, 22 nt, synthetic construct
  source 1..22: mol_type = other RNA
cctgggcttgtggccggcttcc

SEQ ID NO: 8346 - RNA, 22 nt, synthetic construct
  source 1..22: mol_type = other RNA
cctgggggccctgtggctggct

SEQ ID NO: 8347 - RNA, 22 nt, synthetic construct
  source 1..22: mol_type = other RNA
cctggtccagagcctgagcaag

SEQ ID NO: 8348 - RNA, 22 nt, synthetic construct
  source 1..22: mol_type = other RNA
cctgtaccacgtgctgccaaat

SEQ ID NO: 8349 - RNA, 22 nt, synthetic construct
  source 1..22: mol_type = other RNA
cctgtagggtactttgatgtct

SEQ ID NO: 8350 - RNA, 22 nt, synthetic construct
  source 1..22: mol_type = other RNA
cctgtccaccgaggcagccgcc

SEQ ID NO: 8351 - RNA, 22 nt, synthetic construct
  source 1..22: mol_type = other RNA
cctgtggctggctctgagtggc

SEQ ID NO: 8352 - RNA, 22 nt, synthetic construct
  source 1..22: mol_type = other RNA
ccttccccagcttcctcctgca

SEQ ID NO: 8353 - RNA, 22 nt, synthetic construct
  source 1..22: mol_type = other RNA
ccttctgcttcctgtccaccga

SEQ ID NO: 8354 - RNA, 22 nt, synthetic construct
  source 1..22: mol_type = other RNA
ccttgatttcgccactcagagc

SEQ ID NO: 8355 - RNA, 22 nt, synthetic construct
  source 1..22: mol_type = other RNA
ccttgcccagtacatgtgcatc

SEQ ID NO: 8356 - RNA, 22 nt, synthetic construct
  source 1..22: mol_type = other RNA
ccttgctcaggctctggaccag

SEQ ID NO: 8357 - RNA, 22 nt, synthetic construct
  source 1..22: mol_type = other RNA
ccttggaggcggcgggccaaga

SEQ ID NO: 8358 - RNA, 22 nt, synthetic construct
  source 1..22: mol_type = other RNA
ccttggcagccaacagcacctc

SEQ ID NO: 8359 - RNA, 22 nt, synthetic construct
  source 1..22: mol_type = other RNA
ccttgggccagctgccgttctg

SEQ ID NO: 8360 - RNA, 22 nt, synthetic construct
  source 1..22: mol_type = other RNA
ccttggggtcaatgctaggtac

SEQ ID NO: 8361 - RNA, 22 nt, synthetic construct
  source 1..22: mol_type = other RNA
ccttgtccttgatttcgccact

SEQ ID NO: 8362 - RNA, 22 nt, synthetic construct
  source 1..22: mol_type = other RNA
cctttgcagagccggtggagca

SEQ ID NO: 8363 - RNA, 22 nt, synthetic construct
  source 1..22: mol_type = other RNA
cctttggccatcgcccaggtcc

SEQ ID NO: 8364 - RNA, 22 nt, synthetic construct
  source 1..22: mol_type = other RNA
ccttttccagaagaagctgctc

SEQ ID NO: 8365 - RNA, 22 nt, synthetic construct
  source 1..22: mol_type = other RNA
cgaaatcaaggacaaggagctc

SEQ ID NO: 8366 - RNA, 22 nt, synthetic construct
  source 1..22: mol_type = other RNA
cgaagccgtctaggatgagcag

SEQ ID NO: 8367 - RNA, 22 nt, synthetic construct
  source 1..22: mol_type = other RNA
cgacatagagtcccgtgagcgt

SEQ ID NO: 8368 - RNA, 22 nt, synthetic construct
  source 1..22: mol_type = other RNA
cgacgccctatttgagctgtcc

SEQ ID NO: 8369 - RNA, 22 nt, synthetic construct
  source 1..22: mol_type = other RNA
cgactttgtcttctctgtcccc

SEQ ID NO: 8370 - RNA, 22 nt, synthetic construct
  source 1..22: mol_type = other RNA
cgagctggccttccccagcttc

SEQ ID NO: 8371 - RNA, 22 nt, synthetic construct
  source 1..22: mol_type = other RNA
cgaggagctggaagcgcaagat

SEQ ID NO: 8372 - RNA, 22 nt, synthetic construct
  source 1..22: mol_type = other RNA
cgaggaggctggaatttggcag

SEQ ID NO: 8373 - RNA, 22 nt, synthetic construct
  source 1..22: mol_type = other RNA
cgaggccgaggaggctggaatt

SEQ ID NO: 8374 - RNA, 22 nt, synthetic construct
  source 1..22: mol_type = other RNA
cgaggctccccaatccagaggg

SEQ ID NO: 8375 - RNA, 22 nt, synthetic construct
  source 1..22: mol_type = other RNA
cgagggctgcacggcccagcag

SEQ ID NO: 8376 - RNA, 22 nt, synthetic construct
  source 1..22: mol_type = other RNA
cgaggtacctgaagcggctgca

SEQ ID NO: 8377 - RNA, 22 nt, synthetic construct
  source 1..22: mol_type = other RNA
cgaggttgcaccctcctcctca

SEQ ID NO: 8378 - RNA, 22 nt, synthetic construct
  source 1..22: mol_type = other RNA
cgagtagggctcccaggcagcg

SEQ ID NO: 8379 - RNA, 22 nt, synthetic construct
  source 1..22: mol_type = other RNA
cgagtgattgctgtgctgggca

SEQ ID NO: 8380 - RNA, 22 nt, synthetic construct
  source 1..22: mol_type = other RNA
cgagtggctgtgggcccaggga

SEQ ID NO: 8381 - RNA, 22 nt, synthetic construct
  source 1..22: mol_type = other RNA
cgatgaggttttcagccacatc

SEQ ID NO: 8382 - RNA, 22 nt, synthetic construct
  source 1..22: mol_type = other RNA
cgatggccaaaggcttagtcca

SEQ ID NO: 8383 - RNA, 22 nt, synthetic construct
  source 1..22: mol_type = other RNA
cgatggcccgagtagggctccc

SEQ ID NO: 8384 - RNA, 22 nt, synthetic construct
  source 1..22: mol_type = other RNA
cgcaagatggcttcctgcacag

SEQ ID NO: 8385 - RNA, 22 nt, synthetic construct
  source 1..22: mol_type = other RNA
cgcaagcaccttctgcttcctg

SEQ ID NO: 8386 - RNA, 22 nt, synthetic construct
  source 1..22: mol_type = other RNA
cgcacgtgctgtgcaggaagcc

SEQ ID NO: 8387 - RNA, 22 nt, synthetic construct
  source 1..22: mol_type = other RNA
cgcagacatcaaagtaccctac

SEQ ID NO: 8388 - RNA, 22 nt, synthetic construct
  source 1..22: mol_type = other RNA
cgcagacgtgaggacctgggcg

SEQ ID NO: 8389 - RNA, 22 nt, synthetic construct
  source 1..22: mol_type = other RNA
cgcagagtccgagctggccttc

SEQ ID NO: 8390 - RNA, 22 nt, synthetic construct
  source 1..22: mol_type = other RNA
cgcagcactggcatttgcccct

SEQ ID NO: 8391 - RNA, 22 nt, synthetic construct
  source 1..22: mol_type = other RNA
cgcaggcccggatggcatccta

SEQ ID NO: 8392 - RNA, 22 nt, synthetic construct
  source 1..22: mol_type = other RNA
cgcagtacctagcattgacccc

SEQ ID NO: 8393 - RNA, 22 nt, synthetic construct
  source 1..22: mol_type = other RNA
cgcagtgcagcagctccagcag

SEQ ID NO: 8394 - RNA, 22 nt, synthetic construct
  source 1..22: mol_type = other RNA
cgcagtgtccccggctgcagcc

SEQ ID NO: 8395 - RNA, 22 nt, synthetic construct
  source 1..22: mol_type = other RNA
cgcatcacgtatgcctgggcct

SEQ ID NO: 8396 - RNA, 22 nt, synthetic construct
  source 1..22: mol_type = other RNA
cgccaagctgccctccacgctc

SEQ ID NO: 8397 - RNA, 22 nt, synthetic construct
  source 1..22: mol_type = other RNA
cgccacgagtggctgtgggccc

SEQ ID NO: 8398 - RNA, 22 nt, synthetic construct
  source 1..22: mol_type = other RNA
cgccactcagagccagccacag

SEQ ID NO: 8399 - RNA, 22 nt, synthetic construct
  source 1..22: mol_type = other RNA
cgcccacgaggccgaggaggct

SEQ ID NO: 8400 - RNA, 22 nt, synthetic construct
  source 1..22: mol_type = other RNA
cgcccaggtcctcacgtctgcg

SEQ ID NO: 8401 - RNA, 22 nt, synthetic construct
  source 1..22: mol_type = other RNA
cgcccctggcctttgcagagcc

SEQ ID NO: 8402 - RNA, 22 nt, synthetic construct
  source 1..22: mol_type = other RNA
cgcccgctgcctgggagcccta

SEQ ID NO: 8403 - RNA, 22 nt, synthetic construct
  source 1..22: mol_type = other RNA
cgccctatttgagctgtccggc

SEQ ID NO: 8404 - RNA, 22 nt, synthetic construct
  source 1..22: mol_type = other RNA
cgccctccagccagttgtcata

SEQ ID NO: 8405 - RNA, 22 nt, synthetic construct
  source 1..22: mol_type = other RNA
cgccgatggcccgagtagggct

SEQ ID NO: 8406 - RNA, 22 nt, synthetic construct
  source 1..22: mol_type = other RNA
cgccgcctccaaggccttgccc

SEQ ID NO: 8407 - RNA, 22 nt, synthetic construct
  source 1..22: mol_type = other RNA
cgccggtgctccttggcagcca

SEQ ID NO: 8408 - RNA, 22 nt, synthetic construct
  source 1..22: mol_type = other RNA
cgcctcacgcctcctgatgcac

SEQ ID NO: 8409 - RNA, 22 nt, synthetic construct
  source 1..22: mol_type = other RNA
cgcctccaaggccttgcccagt

SEQ ID NO: 8410 - RNA, 22 nt, synthetic construct
  source 1..22: mol_type = other RNA
cgcctcctgatgcacatgtact

SEQ ID NO: 8411 - RNA, 22 nt, synthetic construct
  source 1..22: mol_type = other RNA
cgcctctcttttctgggcaccc

SEQ ID NO: 8412 - RNA, 22 nt, synthetic construct
  source 1..22: mol_type = other RNA
cgcctggtccagagcctgagca

SEQ ID NO: 8413 - RNA, 22 nt, synthetic construct
  source 1..22: mol_type = other RNA
cgcggcagctgctggagctgct

SEQ ID NO: 8414 - RNA, 22 nt, synthetic construct
  source 1..22: mol_type = other RNA
cgcgggccgcagagtccgagct

SEQ ID NO: 8415 - RNA, 22 nt, synthetic construct
  source 1..22: mol_type = other RNA
cgcggtcaggtctcttcaagat

SEQ ID NO: 8416 - RNA, 22 nt, synthetic construct
  source 1..22: mol_type = other RNA
cgcggtgggtgttggactaagc

SEQ ID NO: 8417 - RNA, 22 nt, synthetic construct
  source 1..22: mol_type = other RNA
cgcgtgagacacgagtgattgc

SEQ ID NO: 8418 - RNA, 22 nt, synthetic construct
  source 1..22: mol_type = other RNA
cgcgttctgctcatcctagacg

SEQ ID NO: 8419 - RNA, 22 nt, synthetic construct
  source 1..22: mol_type = other RNA
cgctactttgagagctcaggga

SEQ ID NO: 8420 - RNA, 22 nt, synthetic construct
  source 1..22: mol_type = other RNA
cgctcacgggactctatgtcgg

SEQ ID NO: 8421 - RNA, 22 nt, synthetic construct
  source 1..22: mol_type = other RNA
cgctcactgcaggacacgtatg

SEQ ID NO: 8422 - RNA, 22 nt, synthetic construct
  source 1..22: mol_type = other RNA
cgctccaggctcttgctgctgc

SEQ ID NO: 8423 - RNA, 22 nt, synthetic construct
  source 1..22: mol_type = other RNA
cgctcctccgggaccggccact

SEQ ID NO: 8424 - RNA, 22 nt, synthetic construct
  source 1..22: mol_type = other RNA
cgctgcctgggagccctactcg

SEQ ID NO: 8425 - RNA, 22 nt, synthetic construct
  source 1..22: mol_type = other RNA
cgcttcaggtacctcgcaagca

SEQ ID NO: 8426 - RNA, 22 nt, synthetic construct
  source 1..22: mol_type = other RNA
cgcttccagctcctcgaagccg

SEQ ID NO: 8427 - RNA, 22 nt, synthetic construct
  source 1..22: mol_type = other RNA
cgctttctggctgggctgatct

SEQ ID NO: 8428 - RNA, 22 nt, synthetic construct
  source 1..22: mol_type = other RNA
cggacagctcaaatagggcgtc

SEQ ID NO: 8429 - RNA, 22 nt, synthetic construct
  source 1..22: mol_type = other RNA
cggacggttcaagcaatggcag

SEQ ID NO: 8430 - RNA, 22 nt, synthetic construct
  source 1..22: mol_type = other RNA
cggactgggcagaacggcagct

SEQ ID NO: 8431 - RNA, 22 nt, synthetic construct
  source 1..22: mol_type = other RNA
cggagcagcttcttctggaaaa

SEQ ID NO: 8432 - RNA, 22 nt, synthetic construct
  source 1..22: mol_type = other RNA
cggaggagcgtcagggctctgt

SEQ ID NO: 8433 - RNA, 22 nt, synthetic construct
  source 1..22: mol_type = other RNA
cggaggtccagggagaagtctt

SEQ ID NO: 8434 - RNA, 22 nt, synthetic construct
  source 1..22: mol_type = other RNA
cggatggcatcctagtggaggt

SEQ ID NO: 8435 - RNA, 22 nt, synthetic construct
  source 1..22: mol_type = other RNA
cggatgggaactggtcctcctg

SEQ ID NO: 8436 - RNA, 22 nt, synthetic construct
  source 1..22: mol_type = other RNA
cggcacaaagtagggctgtggc

SEQ ID NO: 8437 - RNA, 22 nt, synthetic construct
  source 1..22: mol_type = other RNA
cggcaccatacgtgtcctgcag

SEQ ID NO: 8438 - RNA, 22 nt, synthetic construct
  source 1..22: mol_type = other RNA
cggcagctgctggagctgctgc

SEQ ID NO: 8439 - RNA, 22 nt, synthetic construct
  source 1..22: mol_type = other RNA
cggcagctggcccaaggaggcc

SEQ ID NO: 8440 - RNA, 22 nt, synthetic construct
  source 1..22: mol_type = other RNA
cggccacttcttctcagtcaca

SEQ ID NO: 8441 - RNA, 22 nt, synthetic construct
  source 1..22: mol_type = other RNA
cggcccagcaggccgacataga

SEQ ID NO: 8442 - RNA, 22 nt, synthetic construct
  source 1..22: mol_type = other RNA
cggcccagctcccaggccagct

SEQ ID NO: 8443 - RNA, 22 nt, synthetic construct
  source 1..22: mol_type = other RNA
cggcccgcggtgggtgttggac

SEQ ID NO: 8444 - RNA, 22 nt, synthetic construct
  source 1..22: mol_type = other RNA
cggccgatgaggttttcagcca

SEQ ID NO: 8445 - RNA, 22 nt, synthetic construct
  source 1..22: mol_type = other RNA
cggccgccacgagtggctgtgg

SEQ ID NO: 8446 - RNA, 22 nt, synthetic construct
  source 1..22: mol_type = other RNA
cggccgccggtgctccttggca

SEQ ID NO: 8447 - RNA, 22 nt, synthetic construct
  source 1..22: mol_type = other RNA
cggccgcctctcttttctgggc

SEQ ID NO: 8448 - RNA, 22 nt, synthetic construct
  source 1..22: mol_type = other RNA
cggccgcgtgagacacgagtga

SEQ ID NO: 8449 - RNA, 22 nt, synthetic construct
  source 1..22: mol_type = other RNA
cggccggggagctcctgtacca

SEQ ID NO: 8450 - RNA, 22 nt, synthetic construct
  source 1..22: mol_type = other RNA
cggcctcgtgggcgcagtgcag

SEQ ID NO: 8451 - RNA, 22 nt, synthetic construct
  source 1..22: mol_type = other RNA
cggccttgctcaggctctggac

SEQ ID NO: 8452 - RNA, 22 nt, synthetic construct
  source 1..22: mol_type = other RNA
cggccttttccagaagaagctg

SEQ ID NO: 8453 - RNA, 22 nt, synthetic construct
  source 1..22: mol_type = other RNA
cggcggccgcgtgagacacgag

SEQ ID NO: 8454 - RNA, 22 nt, synthetic construct
  source 1..22: mol_type = other RNA
cggcggctgcctcggtggacag

SEQ ID NO: 8455 - RNA, 22 nt, synthetic construct
  source 1..22: mol_type = other RNA
cggcgggccaagacttctccct

SEQ ID NO: 8456 - RNA, 22 nt, synthetic construct
  source 1..22: mol_type = other RNA
cggctcactgccccagcccaat

SEQ ID NO: 8457 - RNA, 22 nt, synthetic construct
  source 1..22: mol_type = other RNA
cggctctgcaaaggccaggggc

SEQ ID NO: 8458 - RNA, 22 nt, synthetic construct
  source 1..22: mol_type = other RNA
cggctgcagccgcttcaggtac

SEQ ID NO: 8459 - RNA, 22 nt, synthetic construct
  source 1..22: mol_type = other RNA
cggctgcagccggggacactgc

SEQ ID NO: 8460 - RNA, 22 nt, synthetic construct
  source 1..22: mol_type = other RNA
cggctgcctcggtggacaggaa

SEQ ID NO: 8461 - RNA, 22 nt, synthetic construct
  source 1..22: mol_type = other RNA
cggcttccccagtacgactttg

SEQ ID NO: 8462 - RNA, 22 nt, synthetic construct
  source 1..22: mol_type = other RNA
cggcttcgaggagctggaagcg

SEQ ID NO: 8463 - RNA, 22 nt, synthetic construct
  source 1..22: mol_type = other RNA
cggcttctccatggagcaggcc

SEQ ID NO: 8464 - RNA, 22 nt, synthetic construct
  source 1..22: mol_type = other RNA
cgggaactggccaccccggact

SEQ ID NO: 8465 - RNA, 22 nt, synthetic construct
  source 1..22: mol_type = other RNA
cgggaccggccacttcttctca

SEQ ID NO: 8466 - RNA, 22 nt, synthetic construct
  source 1..22: mol_type = other RNA
cgggactctatgtcggcctgct

SEQ ID NO: 8467 - RNA, 22 nt, synthetic construct
  source 1..22: mol_type = other RNA
cgggagctccttgtccttgatt

SEQ ID NO: 8468 - RNA, 22 nt, synthetic construct
  source 1..22: mol_type = other RNA
cgggaggctggaagatcagccc

SEQ ID NO: 8469 - RNA, 22 nt, synthetic construct
  source 1..22: mol_type = other RNA
cgggcagtgtgccagctctcag

SEQ ID NO: 8470 - RNA, 22 nt, synthetic construct
  source 1..22: mol_type = other RNA
cgggccaagacttctccctgga

SEQ ID NO: 8471 - RNA, 22 nt, synthetic construct
  source 1..22: mol_type = other RNA
cgggccgcagagtccgagctgg

SEQ ID NO: 8472 - RNA, 22 nt, synthetic construct
  source 1..22: mol_type = other RNA
cgggcgggaggctggaagatca

SEQ ID NO: 8473 - RNA, 22 nt, synthetic construct
  source 1..22: mol_type = other RNA
cgggctcggcaccatacgtgtc

SEQ ID NO: 8474 - RNA, 22 nt, synthetic construct
  source 1..22: mol_type = other RNA
cgggctgtgaggaggagggtgc

SEQ ID NO: 8475 - RNA, 22 nt, synthetic construct
  source 1..22: mol_type = other RNA
cggggagctcctgtaccacgtg

SEQ ID NO: 8476 - RNA, 22 nt, synthetic construct
  source 1..22: mol_type = other RNA
cggggccgggctgtgaggagga

SEQ ID NO: 8477 - RNA, 22 nt, synthetic construct
  source 1..22: mol_type = other RNA
cgggggatgcctatggcctgca

SEQ ID NO: 8478 - RNA, 22 nt, synthetic construct
  source 1..22: mol_type = other RNA
cgggggctgctggccggccttt

SEQ ID NO: 8479 - RNA, 22 nt, synthetic construct
  source 1..22: mol_type = other RNA
cggggtggccagttcccgctcc

SEQ ID NO: 8480 - RNA, 22 nt, synthetic construct
  source 1..22: mol_type = other RNA
cgggtgacacagctgagtccca

SEQ ID NO: 8481 - RNA, 22 nt, synthetic construct
  source 1..22: mol_type = other RNA
cgggtgcccagaaaagagaggc

SEQ ID NO: 8482 - RNA, 22 nt, synthetic construct
  source 1..22: mol_type = other RNA
cggtagaactgctccaccggct

SEQ ID NO: 8483 - RNA, 22 nt, synthetic construct
  source 1..22: mol_type = other RNA
cggtcaggtctcttcaagatgt

SEQ ID NO: 8484 - RNA, 22 nt, synthetic construct
  source 1..22: mol_type = other RNA
cggtcccggaggagcgtcaggg

SEQ ID NO: 8485 - RNA, 22 nt, synthetic construct
  source 1..22: mol_type = other RNA
cggtccgcacgtgctgtgcagg

SEQ ID NO: 8486 - RNA, 22 nt, synthetic construct
  source 1..22: mol_type = other RNA
cggtgccggtccgcacgtgctg

SEQ ID NO: 8487 - RNA, 22 nt, synthetic construct
  source 1..22: mol_type = other RNA
cggtgctccttggcagccaaca

SEQ ID NO: 8488 - RNA, 22 nt, synthetic construct
  source 1..22: mol_type = other RNA
cggtggacaggaagcagaaggt

SEQ ID NO: 8489 - RNA, 22 nt, synthetic construct
  source 1..22: mol_type = other RNA
cggtggagcagttctaccgctc

SEQ ID NO: 8490 - RNA, 22 nt, synthetic construct
  source 1..22: mol_type = other RNA
cggtgggtgttggactaagcct

SEQ ID NO: 8491 - RNA, 22 nt, synthetic construct
  source 1..22: mol_type = other RNA
cggttcaagcaatggcagggga

SEQ ID NO: 8492 - RNA, 22 nt, synthetic construct
  source 1..22: mol_type = other RNA
cgtactggggaagccggccaca

SEQ ID NO: 8493 - RNA, 22 nt, synthetic construct
  source 1..22: mol_type = other RNA
cgtatgcctgggcctgctccat

SEQ ID NO: 8494 - RNA, 22 nt, synthetic construct
  source 1..22: mol_type = other RNA
cgtatggtgccgagcccgcagg

SEQ ID NO: 8495 - RNA, 22 nt, synthetic construct
  source 1..22: mol_type = other RNA
cgtcagggctctgtcttggtgc

SEQ ID NO: 8496 - RNA, 22 nt, synthetic construct
  source 1..22: mol_type = other RNA
cgtccgggggatgcctatggcc

SEQ ID NO: 8497 - RNA, 22 nt, synthetic construct
  source 1..22: mol_type = other RNA
cgtcctccccaagctccagcag

SEQ ID NO: 8498 - RNA, 22 nt, synthetic construct
  source 1..22: mol_type = other RNA
cgtcggccttgctcaggctctg

SEQ ID NO: 8499 - RNA, 22 nt, synthetic construct
  source 1..22: mol_type = other RNA
cgtctaggatgagcagaacgcg

SEQ ID NO: 8500 - RNA, 22 nt, synthetic construct
  source 1..22: mol_type = other RNA
cgtctgcggatgggaactggtc

SEQ ID NO: 8501 - RNA, 22 nt, synthetic construct
  source 1..22: mol_type = other RNA
cgtgagacacgagtgattgctg

SEQ ID NO: 8502 - RNA, 22 nt, synthetic construct
  source 1..22: mol_type = other RNA
cgtgagcgtggagggcagcttg

SEQ ID NO: 8503 - RNA, 22 nt, synthetic construct
  source 1..22: mol_type = other RNA
cgtgaggacctgggcgatggcc

SEQ ID NO: 8504 - RNA, 22 nt, synthetic construct
  source 1..22: mol_type = other RNA
cgtgaggcgggtgcccagaaaa

SEQ ID NO: 8505 - RNA, 22 nt, synthetic construct
  source 1..22: mol_type = other RNA
cgtgatgcgctactttgagagc

SEQ ID NO: 8506 - RNA, 22 nt, synthetic construct
  source 1..22: mol_type = other RNA
cgtgcagccctcgacagccccc

SEQ ID NO: 8507 - RNA, 22 nt, synthetic construct
  source 1..22: mol_type = other RNA
cgtgccacgctttctggctggg

SEQ ID NO: 8508 - RNA, 22 nt, synthetic construct
  source 1..22: mol_type = other RNA
cgtgctgccaaattccagcctc

SEQ ID NO: 8509 - RNA, 22 nt, synthetic construct
  source 1..22: mol_type = other RNA
cgtgctgtgcaggaagccatct

SEQ ID NO: 8510 - RNA, 22 nt, synthetic construct
  source 1..22: mol_type = other RNA
cgtggagggcagcttggcgtcc

SEQ ID NO: 8511 - RNA, 22 nt, synthetic construct
  source 1..22: mol_type = other RNA
cgtggcacgccctccagccagt

SEQ ID NO: 8512 - RNA, 22 nt, synthetic construct
  source 1..22: mol_type = other RNA
cgtggcggccgatgaggttttc

SEQ ID NO: 8513 - RNA, 22 nt, synthetic construct
  source 1..22: mol_type = other RNA
cgtgggactcagctgtgtcacc

SEQ ID NO: 8514 - RNA, 22 nt, synthetic construct
  source 1..22: mol_type = other RNA
cgtgggcgcagtgcagcagctc

SEQ ID NO: 8515 - RNA, 22 nt, synthetic construct
  source 1..22: mol_type = other RNA
cgtggtacaggagctccccggc

SEQ ID NO: 8516 - RNA, 22 nt, synthetic construct
  source 1..22: mol_type = other RNA
cgtgtcagggtgggggtatgtg

SEQ ID NO: 8517 - RNA, 22 nt, synthetic construct
  source 1..22: mol_type = other RNA
cgtgtcctgcagtgagcggtag

SEQ ID NO: 8518 - RNA, 22 nt, synthetic construct
  source 1..22: mol_type = other RNA
cgtgtctcacgcggccgccggt

SEQ ID NO: 8519 - RNA, 22 nt, synthetic construct
  source 1..22: mol_type = other RNA
cgttctgcccagtccggggtgg

SEQ ID NO: 8520 - RNA, 22 nt, synthetic construct
  source 1..22: mol_type = other RNA
cgttctgctcatcctagacggc

SEQ ID NO: 8521 - RNA, 22 nt, synthetic construct
  source 1..22: mol_type = other RNA
cgtttcaggtggggtgaggggc

SEQ ID NO: 8522 - RNA, 22 nt, synthetic construct
  source 1..22: mol_type = other RNA
ctaagcctttggccatcgccca

SEQ ID NO: 8523 - RNA, 22 nt, synthetic construct
  source 1..22: mol_type = other RNA
ctacaggaggaccagttcccat

SEQ ID NO: 8524 - RNA, 22 nt, synthetic construct
  source 1..22: mol_type = other RNA
ctaccgctcactgcaggacacg

SEQ ID NO: 8525 - RNA, 22 nt, synthetic construct
  source 1..22: mol_type = other RNA
ctactcgggccatcggcggctg

SEQ ID NO: 8526 - RNA, 22 nt, synthetic construct
  source 1..22: mol_type = other RNA
ctactttgagagctcagggatg

SEQ ID NO: 8527 - RNA, 22 nt, synthetic construct
  source 1..22: mol_type = other RNA
ctactttgtgccgggcagtgtg

SEQ ID NO: 8528 - RNA, 22 nt, synthetic construct
  source 1..22: mol_type = other RNA
ctagacggcttcgaggagctgg

SEQ ID NO: 8529 - RNA, 22 nt, synthetic construct
  source 1..22: mol_type = other RNA
ctagcattgaccccaaggaaga

SEQ ID NO: 8530 - RNA, 22 nt, synthetic construct
  source 1..22: mol_type = other RNA
ctaggatgagcagaacgcggtc

SEQ ID NO: 8531 - RNA, 22 nt, synthetic construct
  source 1..22: mol_type = other RNA
ctaggatgccatccgggcctgc

SEQ ID NO: 8532 - RNA, 22 nt, synthetic construct
  source 1..22: mol_type = other RNA
ctaggtactgcgggagctcctt

SEQ ID NO: 8533 - RNA, 22 nt, synthetic construct
  source 1..22: mol_type = other RNA
ctagtggaggtggatctggtgc

SEQ ID NO: 8534 - RNA, 22 nt, synthetic construct
  source 1..22: mol_type = other RNA
ctatgacaactggctggagggc

SEQ ID NO: 8535 - RNA, 22 nt, synthetic construct
  source 1..22: mol_type = other RNA
ctatggcctgcaggatctgctc

SEQ ID NO: 8536 - RNA, 22 nt, synthetic construct
  source 1..22: mol_type = other RNA
ctatgtcggcctgctgggccgt

SEQ ID NO: 8537 - RNA, 22 nt, synthetic construct
  source 1..22: mol_type = other RNA
ctattgggctggggcagtgagc

SEQ ID NO: 8538 - RNA, 22 nt, synthetic construct
  source 1..22: mol_type = other RNA
ctatttgagctgtccggcttct

SEQ ID NO: 8539 - RNA, 22 nt, synthetic construct
  source 1..22: mol_type = other RNA
ctcaaagtagcgcatcacgtat

SEQ ID NO: 8540 - RNA, 22 nt, synthetic construct
  source 1..22: mol_type = other RNA
ctcaaatagggcgtcggccttg

SEQ ID NO: 8541 - RNA, 22 nt, synthetic construct
  source 1..22: mol_type = other RNA
ctcacatacccccaccctgaca

SEQ ID NO: 8542 - RNA, 22 nt, synthetic construct
  source 1..22: mol_type = other RNA
ctcaccccacctgaaacgggtg

SEQ ID NO: 8543 - RNA, 22 nt, synthetic construct
  source 1..22: mol_type = other RNA
ctcacgcctcctgatgcacatg

SEQ ID NO: 8544 - RNA, 22 nt, synthetic construct
  source 1..22: mol_type = other RNA
ctcacgggactctatgtcggcc

SEQ ID NO: 8545 - RNA, 22 nt, synthetic construct
  source 1..22: mol_type = other RNA
ctcacgtctgcggatgggaact

SEQ ID NO: 8546 - RNA, 22 nt, synthetic construct
  source 1..22: mol_type = other RNA
ctcactgcaggacacgtatggt

SEQ ID NO: 8547 - RNA, 22 nt, synthetic construct
  source 1..22: mol_type = other RNA
ctcactgccccagcccaatagc

SEQ ID NO: 8548 - RNA, 22 nt, synthetic construct
  source 1..22: mol_type = other RNA
ctcagagccagccacagggccc

SEQ ID NO: 8549 - RNA, 22 nt, synthetic construct
  source 1..22: mol_type = other RNA
ctcagaggccctgctggagctt

SEQ ID NO: 8550 - RNA, 22 nt, synthetic construct
  source 1..22: mol_type = other RNA
ctcagccaggcctccttgggcc

SEQ ID NO: 8551 - RNA, 22 nt, synthetic construct
  source 1..22: mol_type = other RNA
ctcagctgtgtcacccgtttca

SEQ ID NO: 8552 - RNA, 22 nt, synthetic construct
  source 1..22: mol_type = other RNA
ctcaggctctggaccaggcggc

SEQ ID NO: 8553 - RNA, 22 nt, synthetic construct
  source 1..22: mol_type = other RNA
ctcagggatgacagagcaccaa

SEQ ID NO: 8554 - RNA, 22 nt, synthetic construct
  source 1..22: mol_type = other RNA
ctcagtcacagccacagcccta

SEQ ID NO: 8555 - RNA, 22 nt, synthetic construct
  source 1..22: mol_type = other RNA
ctcatcctagacggcttcgagg

SEQ ID NO: 8556 - RNA, 22 nt, synthetic construct
  source 1..22: mol_type = other RNA
ctcatcggccgccacgagtggc

SEQ ID NO: 8557 - RNA, 22 nt, synthetic construct
  source 1..22: mol_type = other RNA
ctccaaggccttgcccagtaca

SEQ ID NO: 8558 - RNA, 22 nt, synthetic construct
  source 1..22: mol_type = other RNA
ctccaccggctctgcaaaggcc

SEQ ID NO: 8559 - RNA, 22 nt, synthetic construct
  source 1..22: mol_type = other RNA
ctccacgctcacgggactctat

SEQ ID NO: 8560 - RNA, 22 nt, synthetic construct
  source 1..22: mol_type = other RNA
ctccactaggatgccatccggg

SEQ ID NO: 8561 - RNA, 22 nt, synthetic construct
  source 1..22: mol_type = other RNA
ctccagcagggcctctgagagc

SEQ ID NO: 8562 - RNA, 22 nt, synthetic construct
  source 1..22: mol_type = other RNA
ctccagccagttgtcatagggc

SEQ ID NO: 8563 - RNA, 22 nt, synthetic construct
  source 1..22: mol_type = other RNA
ctccagcctggcctgcaccaga

SEQ ID NO: 8564 - RNA, 22 nt, synthetic construct
  source 1..22: mol_type = other RNA
ctccaggctcttgctgctgctc

SEQ ID NO: 8565 - RNA, 22 nt, synthetic construct
  source 1..22: mol_type = other RNA
ctccatggagaagccggacagc

SEQ ID NO: 8566 - RNA, 22 nt, synthetic construct
  source 1..22: mol_type = other RNA
ctccatggagcaggcccaggca

SEQ ID NO: 8567 - RNA, 22 nt, synthetic construct
  source 1..22: mol_type = other RNA
ctcccaggccagcttggccagc

SEQ ID NO: 8568 - RNA, 22 nt, synthetic construct
  source 1..22: mol_type = other RNA
ctccccaagctccagcagggcc

SEQ ID NO: 8569 - RNA, 22 nt, synthetic construct
  source 1..22: mol_type = other RNA
ctccccaatccagaggggcaaa

SEQ ID NO: 8570 - RNA, 22 nt, synthetic construct
  source 1..22: mol_type = other RNA
ctccccggccgcctctcttttc

SEQ ID NO: 8571 - RNA, 22 nt, synthetic construct
  source 1..22: mol_type = other RNA
ctcccgcagtacctagcattga

SEQ ID NO: 8572 - RNA, 22 nt, synthetic construct
  source 1..22: mol_type = other RNA
ctccctggacctccgcagcact

SEQ ID NO: 8573 - RNA, 22 nt, synthetic construct
  source 1..22: mol_type = other RNA
ctccctgggcccacagccactc

SEQ ID NO: 8574 - RNA, 22 nt, synthetic construct
  source 1..22: mol_type = other RNA
ctccgaggttgcaccctcctcc

SEQ ID NO: 8575 - RNA, 22 nt, synthetic construct
  source 1..22: mol_type = other RNA
ctccgcagcactggcatttgcc

SEQ ID NO: 8576 - RNA, 22 nt, synthetic construct
  source 1..22: mol_type = other RNA
ctccgggaccggccacttcttc

SEQ ID NO: 8577 - RNA, 22 nt, synthetic construct
  source 1..22: mol_type = other RNA
ctcctccgggaccggccacttc

SEQ ID NO: 8578 - RNA, 22 nt, synthetic construct
  source 1..22: mol_type = other RNA
ctcctcctcacagcccggcccc

SEQ ID NO: 8579 - RNA, 22 nt, synthetic construct
  source 1..22: mol_type = other RNA
ctcctcgaagccgtctaggatg

SEQ ID NO: 8580 - RNA, 22 nt, synthetic construct
  source 1..22: mol_type = other RNA
ctcctcggcctcgtgggcgcag

SEQ ID NO: 8581 - RNA, 22 nt, synthetic construct
  source 1..22: mol_type = other RNA
ctcctctccagcctggcctgca

SEQ ID NO: 8582 - RNA, 22 nt, synthetic construct
  source 1..22: mol_type = other RNA
ctcctgatgcacatgtactggg

SEQ ID NO: 8583 - RNA, 22 nt, synthetic construct
  source 1..22: mol_type = other RNA
ctcctgcaatgcttcctggggg

SEQ ID NO: 8584 - RNA, 22 nt, synthetic construct
  source 1..22: mol_type = other RNA
ctcctgtaccacgtgctgccaa

SEQ ID NO: 8585 - RNA, 22 nt, synthetic construct
  source 1..22: mol_type = other RNA
ctcctgtagggtactttgatgt

SEQ ID NO: 8586 - RNA, 22 nt, synthetic construct
  source 1..22: mol_type = other RNA
ctccttggcagccaacagcacc

SEQ ID NO: 8587 - RNA, 22 nt, synthetic construct
  source 1..22: mol_type = other RNA
ctccttgggccagctgccgttc

SEQ ID NO: 8588 - RNA, 22 nt, synthetic construct
  source 1..22: mol_type = other RNA
ctccttgtccttgatttcgcca

SEQ ID NO: 8589 - RNA, 22 nt, synthetic construct
  source 1..22: mol_type = other RNA
ctcgaagccgtctaggatgagc

SEQ ID NO: 8590 - RNA, 22 nt, synthetic construct
  source 1..22: mol_type = other RNA
ctcgcaagcaccttctgcttcc

SEQ ID NO: 8591 - RNA, 22 nt, synthetic construct
  source 1..22: mol_type = other RNA
ctcggactctgcggcccgcggt

SEQ ID NO: 8592 - RNA, 22 nt, synthetic construct
  source 1..22: mol_type = other RNA
ctcggagcagcttcttctggaa

SEQ ID NO: 8593 - RNA, 22 nt, synthetic construct
  source 1..22: mol_type = other RNA
ctcggcaccatacgtgtcctgc

SEQ ID NO: 8594 - RNA, 22 nt, synthetic construct
  source 1..22: mol_type = other RNA
ctcggcctcgtgggcgcagtgc

SEQ ID NO: 8595 - RNA, 22 nt, synthetic construct
  source 1..22: mol_type = other RNA
ctcgggccatcggcggctgcct

SEQ ID NO: 8596 - RNA, 22 nt, synthetic construct
  source 1..22: mol_type = other RNA
ctcggtggacaggaagcagaag

SEQ ID NO: 8597 - RNA, 22 nt, synthetic construct
  source 1..22: mol_type = other RNA
ctcgtggcggccgatgaggttt

SEQ ID NO: 8598 - RNA, 22 nt, synthetic construct
  source 1..22: mol_type = other RNA
ctcgtgggactcagctgtgtca

SEQ ID NO: 8599 - RNA, 22 nt, synthetic construct
  source 1..22: mol_type = other RNA
ctcgtgggcgcagtgcagcagc

SEQ ID NO: 8600 - RNA, 22 nt, synthetic construct
  source 1..22: mol_type = other RNA
ctcgtgtctcacgcggccgccg

SEQ ID NO: 8601 - RNA, 22 nt, synthetic construct
  source 1..22: mol_type = other RNA
ctctatgtcggcctgctgggcc

SEQ ID NO: 8602 - RNA, 22 nt, synthetic construct
  source 1..22: mol_type = other RNA
ctctcaaagtagcgcatcacgt

SEQ ID NO: 8603 - RNA, 22 nt, synthetic construct
  source 1..22: mol_type = other RNA
ctctcacatacccccaccctga

SEQ ID NO: 8604 - RNA, 22 nt, synthetic construct
  source 1..22: mol_type = other RNA
ctctcagaggccctgctggagc

SEQ ID NO: 8605 - RNA, 22 nt, synthetic construct
  source 1..22: mol_type = other RNA
ctctccagcctggcctgcacca

SEQ ID NO: 8606 - RNA, 22 nt, synthetic construct
  source 1..22: mol_type = other RNA
ctctcttttctgggcacccgcc

SEQ ID NO: 8607 - RNA, 22 nt, synthetic construct
  source 1..22: mol_type = other RNA
ctctgagagctggcacactgcc

SEQ ID NO: 8608 - RNA, 22 nt, synthetic construct
  source 1..22: mol_type = other RNA
ctctgagtggcgaaatcaagga

SEQ ID NO: 8609 - RNA, 22 nt, synthetic construct
  source 1..22: mol_type = other RNA
ctctgcaaaggccaggggcgtg

SEQ ID NO: 8610 - RNA, 22 nt, synthetic construct
  source 1..22: mol_type = other RNA
ctctgcggcccgcggtgggtgt

SEQ ID NO: 8611 - RNA, 22 nt, synthetic construct
  source 1..22: mol_type = other RNA
ctctggattggggagcctcgtg

SEQ ID NO: 8612 - RNA, 22 nt, synthetic construct
  source 1..22: mol_type = other RNA
ctctgtcatccctgagctctca

SEQ ID NO: 8613 - RNA, 22 nt, synthetic construct
  source 1..22: mol_type = other RNA
ctctgtcccctgccattgcttg

SEQ ID NO: 8614 - RNA, 22 nt, synthetic construct
  source 1..22: mol_type = other RNA
ctctgtcttggtgctctgtcat

SEQ ID NO: 8615 - RNA, 22 nt, synthetic construct
  source 1..22: mol_type = other RNA
ctcttcaagatgtggctgaaaa

SEQ ID NO: 8616 - RNA, 22 nt, synthetic construct
  source 1..22: mol_type = other RNA
ctcttccccaagcccctcaccc

SEQ ID NO: 8617 - RNA, 22 nt, synthetic construct
  source 1..22: mol_type = other RNA
ctcttctccctgggcccacagc

SEQ ID NO: 8618 - RNA, 22 nt, synthetic construct
  source 1..22: mol_type = other RNA
ctcttcttccttggggtcaatg

SEQ ID NO: 8619 - RNA, 22 nt, synthetic construct
  source 1..22: mol_type = other RNA
ctcttgccctgaccagctttgc

SEQ ID NO: 8620 - RNA, 22 nt, synthetic construct
  source 1..22: mol_type = other RNA
ctcttgctgctgctcctctcca

SEQ ID NO: 8621 - RNA, 22 nt, synthetic construct
  source 1..22: mol_type = other RNA
ctcttttctgggcacccgcctc

SEQ ID NO: 8622 - RNA, 22 nt, synthetic construct
  source 1..22: mol_type = other RNA
ctgaaaacctcatcggccgcca

SEQ ID NO: 8623 - RNA, 22 nt, synthetic construct
  source 1..22: mol_type = other RNA
ctgaaacgggtgacacagctga

SEQ ID NO: 8624 - RNA, 22 nt, synthetic construct
  source 1..22: mol_type = other RNA
ctgaagcggctgcagccgggga

SEQ ID NO: 8625 - RNA, 22 nt, synthetic construct
  source 1..22: mol_type = other RNA
ctgacacgcccctggcctttgc

SEQ ID NO: 8626 - RNA, 22 nt, synthetic construct
  source 1..22: mol_type = other RNA
ctgaccagctttgcccagcaca

SEQ ID NO: 8627 - RNA, 22 nt, synthetic construct
  source 1..22: mol_type = other RNA
ctgaccgcgttctgctcatcct

SEQ ID NO: 8628 - RNA, 22 nt, synthetic construct
  source 1..22: mol_type = other RNA
ctgacgctcctccgggaccggc

SEQ ID NO: 8629 - RNA, 22 nt, synthetic construct
  source 1..22: mol_type = other RNA
ctgagaagaagtggccggtccc

SEQ ID NO: 8630 - RNA, 22 nt, synthetic construct
  source 1..22: mol_type = other RNA
ctgagagctggcacactgcccg

SEQ ID NO: 8631 - RNA, 22 nt, synthetic construct
  source 1..22: mol_type = other RNA
ctgagcaaggccgacgccctat

SEQ ID NO: 8632 - RNA, 22 nt, synthetic construct
  source 1..22: mol_type = other RNA
ctgagctctcaaagtagcgcat

SEQ ID NO: 8633 - RNA, 22 nt, synthetic construct
  source 1..22: mol_type = other RNA
ctgaggtgctgttggctgccaa

SEQ ID NO: 8634 - RNA, 22 nt, synthetic construct
  source 1..22: mol_type = other RNA
ctgagtcccacgaggctcccca

SEQ ID NO: 8635 - RNA, 22 nt, synthetic construct
  source 1..22: mol_type = other RNA
ctgagtggcgaaatcaaggaca

SEQ ID NO: 8636 - RNA, 22 nt, synthetic construct
  source 1..22: mol_type = other RNA
ctgatcttccagcctcccgccc

SEQ ID NO: 8637 - RNA, 22 nt, synthetic construct
  source 1..22: mol_type = other RNA
ctgatgcacatgtactgggcaa

SEQ ID NO: 8638 - RNA, 22 nt, synthetic construct
  source 1..22: mol_type = other RNA
ctgcaaaggccaggggcgtgtc

SEQ ID NO: 8639 - RNA, 22 nt, synthetic construct
  source 1..22: mol_type = other RNA
ctgcaatgcttcctgggggccc

SEQ ID NO: 8640 - RNA, 22 nt, synthetic construct
  source 1..22: mol_type = other RNA
ctgcacagcacgtgcggaccgg

SEQ ID NO: 8641 - RNA, 22 nt, synthetic construct
  source 1..22: mol_type = other RNA
ctgcaccagatccacctccact

SEQ ID NO: 8642 - RNA, 22 nt, synthetic construct
  source 1..22: mol_type = other RNA
ctgcacggcccagcaggccgac

SEQ ID NO: 8643 - RNA, 22 nt, synthetic construct
  source 1..22: mol_type = other RNA
ctgcactgcgcccacgaggccg

SEQ ID NO: 8644 - RNA, 22 nt, synthetic construct
  source 1..22: mol_type = other RNA
ctgcagccgcttcaggtacctc

SEQ ID NO: 8645 - RNA, 22 nt, synthetic construct
  source 1..22: mol_type = other RNA
ctgcagccggggacactgcggg

SEQ ID NO: 8646 - RNA, 22 nt, synthetic construct
  source 1..22: mol_type = other RNA
ctgcaggacacgtatggtgccg

SEQ ID NO: 8647 - RNA, 22 nt, synthetic construct
  source 1..22: mol_type = other RNA
ctgcaggatctgctcttctccc

SEQ ID NO: 8648 - RNA, 22 nt, synthetic construct
  source 1..22: mol_type = other RNA
ctgcaggccataggcatccccc

SEQ ID NO: 8649 - RNA, 22 nt, synthetic construct
  source 1..22: mol_type = other RNA
ctgcagtgagcggtagaactgc

SEQ ID NO: 8650 - RNA, 22 nt, synthetic construct
  source 1..22: mol_type = other RNA
ctgccaaattccagcctcctcg

SEQ ID NO: 8651 - RNA, 22 nt, synthetic construct
  source 1..22: mol_type = other RNA
ctgccaaggagcaccggcggcc

SEQ ID NO: 8652 - RNA, 22 nt, synthetic construct
  source 1..22: mol_type = other RNA
ctgccattgcttgaaccgtccg

SEQ ID NO: 8653 - RNA, 22 nt, synthetic construct
  source 1..22: mol_type = other RNA
ctgcccagtccggggtggccag

SEQ ID NO: 8654 - RNA, 22 nt, synthetic construct
  source 1..22: mol_type = other RNA
ctgccccagcccaatagctctt

SEQ ID NO: 8655 - RNA, 22 nt, synthetic construct
  source 1..22: mol_type = other RNA
ctgcccggcacaaagtagggct

SEQ ID NO: 8656 - RNA, 22 nt, synthetic construct
  source 1..22: mol_type = other RNA
ctgccctccacgctcacgggac

SEQ ID NO: 8657 - RNA, 22 nt, synthetic construct
  source 1..22: mol_type = other RNA
ctgccgttctgcccagtccggg

SEQ ID NO: 8658 - RNA, 22 nt, synthetic construct
  source 1..22: mol_type = other RNA
ctgcctcggtggacaggaagca

SEQ ID NO: 8659 - RNA, 22 nt, synthetic construct
  source 1..22: mol_type = other RNA
ctgcctctcacatacccccacc

SEQ ID NO: 8660 - RNA, 22 nt, synthetic construct
  source 1..22: mol_type = other RNA
ctgcctgggagccctactcggg

SEQ ID NO: 8661 - RNA, 22 nt, synthetic construct
  source 1..22: mol_type = other RNA
ctgcgcccacgaggccgaggag

SEQ ID NO: 8662 - RNA, 22 nt, synthetic construct
  source 1..22: mol_type = other RNA
ctgcggaggtccagggagaagt

SEQ ID NO: 8663 - RNA, 22 nt, synthetic construct
  source 1..22: mol_type = other RNA
ctgcggatgggaactggtcctc

SEQ ID NO: 8664 - RNA, 22 nt, synthetic construct
  source 1..22: mol_type = other RNA
ctgcggcccagctcccaggcca

SEQ ID NO: 8665 - RNA, 22 nt, synthetic construct
  source 1..22: mol_type = other RNA
ctgcggcccgcggtgggtgttg

SEQ ID NO: 8666 - RNA, 22 nt, synthetic construct
  source 1..22: mol_type = other RNA
ctgcgggagctccttgtccttg

SEQ ID NO: 8667 - RNA, 22 nt, synthetic construct
  source 1..22: mol_type = other RNA
ctgcgggctcggcaccatacgt

SEQ ID NO: 8668 - RNA, 22 nt, synthetic construct
  source 1..22: mol_type = other RNA
ctgctcatcctagacggcttcg

SEQ ID NO: 8669 - RNA, 22 nt, synthetic construct
  source 1..22: mol_type = other RNA
ctgctccaccggctctgcaaag

SEQ ID NO: 8670 - RNA, 22 nt, synthetic construct
  source 1..22: mol_type = other RNA
ctgctccatggagaagccggac

SEQ ID NO: 8671 - RNA, 22 nt, synthetic construct
  source 1..22: mol_type = other RNA
ctgctccctccgggggctgctg

SEQ ID NO: 8672 - RNA, 22 nt, synthetic construct
  source 1..22: mol_type = other RNA
ctgctccgaggttgcaccctcc

SEQ ID NO: 8673 - RNA, 22 nt, synthetic construct
  source 1..22: mol_type = other RNA
ctgctcctctccagcctggcct

SEQ ID NO: 8674 - RNA, 22 nt, synthetic construct
  source 1..22: mol_type = other RNA
ctgctcttctccctgggcccac

SEQ ID NO: 8675 - RNA, 22 nt, synthetic construct
  source 1..22: mol_type = other RNA
ctgctgcactgcgcccacgagg

SEQ ID NO: 8676 - RNA, 22 nt, synthetic construct
  source 1..22: mol_type = other RNA
ctgctgctcctctccagcctgg

SEQ ID NO: 8677 - RNA, 22 nt, synthetic construct
  source 1..22: mol_type = other RNA
ctgctggagctgctgcactgcg

SEQ ID NO: 8678 - RNA, 22 nt, synthetic construct
  source 1..22: mol_type = other RNA
ctgctggagcttggggaggacg

SEQ ID NO: 8679 - RNA, 22 nt, synthetic construct
  source 1..22: mol_type = other RNA
ctgctggccggccttttccaga

SEQ ID NO: 8680 - RNA, 22 nt, synthetic construct
  source 1..22: mol_type = other RNA
ctgctgggccgtgcagccctcg

SEQ ID NO: 8681 - RNA, 22 nt, synthetic construct
  source 1..22: mol_type = other RNA
ctgcttcctgtccaccgaggca

SEQ ID NO: 8682 - RNA, 22 nt, synthetic construct
  source 1..22: mol_type = other RNA
ctggaaaaggccggccagcagc

SEQ ID NO: 8683 - RNA, 22 nt, synthetic construct
  source 1..22: mol_type = other RNA
ctggaagatcagcccagccaga

SEQ ID NO: 8684 - RNA, 22 nt, synthetic construct
  source 1..22: mol_type = other RNA
ctggaagcgcaagatggcttcc

SEQ ID NO: 8685 - RNA, 22 nt, synthetic construct
  source 1..22: mol_type = other RNA
ctggaatttggcagcacgtggt

SEQ ID NO: 8686 - RNA, 22 nt, synthetic construct
  source 1..22: mol_type = other RNA
ctggacctccgcagcactggca

SEQ ID NO: 8687 - RNA, 22 nt, synthetic construct
  source 1..22: mol_type = other RNA
ctggagaggagcagcagcaaga

SEQ ID NO: 8688 - RNA, 22 nt, synthetic construct
  source 1..22: mol_type = other RNA
ctggagcgggaactggccaccc

SEQ ID NO: 8689 - RNA, 22 nt, synthetic construct
  source 1..22: mol_type = other RNA
ctggagctgctgcactgcgccc

SEQ ID NO: 8690 - RNA, 22 nt, synthetic construct
  source 1..22: mol_type = other RNA
ctggagcttggggaggacgcca

SEQ ID NO: 8691 - RNA, 22 nt, synthetic construct
  source 1..22: mol_type = other RNA
ctggagggcgtgccacgctttc

SEQ ID NO: 8692 - RNA, 22 nt, synthetic construct
  source 1..22: mol_type = other RNA
ctggattggggagcctcgtggg

SEQ ID NO: 8693 - RNA, 22 nt, synthetic construct
  source 1..22: mol_type = other RNA
ctggcacactgcccggcacaaa

SEQ ID NO: 8694 - RNA, 22 nt, synthetic construct
  source 1..22: mol_type = other RNA
ctggcagagctggccaagctgg

SEQ ID NO: 8695 - RNA, 22 nt, synthetic construct
  source 1..22: mol_type = other RNA
ctggcatttgcccctctggatt

SEQ ID NO: 8696 - RNA, 22 nt, synthetic construct
  source 1..22: mol_type = other RNA
ctggccaagctggcctgggagc

SEQ ID NO: 8697 - RNA, 22 nt, synthetic construct
  source 1..22: mol_type = other RNA
ctggccaccccggactgggcag

SEQ ID NO: 8698 - RNA, 22 nt, synthetic construct
  source 1..22: mol_type = other RNA
ctggcccaaggaggcctggctg

SEQ ID NO: 8699 - RNA, 22 nt, synthetic construct
  source 1..22: mol_type = other RNA
ctggccggccttttccagaaga

SEQ ID NO: 8700 - RNA, 22 nt, synthetic construct
  source 1..22: mol_type = other RNA
ctggcctgcaccagatccacct

SEQ ID NO: 8701 - RNA, 22 nt, synthetic construct
  source 1..22: mol_type = other RNA
ctggcctgggagctgggccgca

SEQ ID NO: 8702 - RNA, 22 nt, synthetic construct
  source 1..22: mol_type = other RNA
ctggccttccccagcttcctcc

SEQ ID NO: 8703 - RNA, 22 nt, synthetic construct
  source 1..22: mol_type = other RNA
ctggcctttgcagagccggtgg

SEQ ID NO: 8704 - RNA, 22 nt, synthetic construct
  source 1..22: mol_type = other RNA
ctggctctgagtggcgaaatca

SEQ ID NO: 8705 - RNA, 22 nt, synthetic construct
  source 1..22: mol_type = other RNA
ctggctgaggtgctgttggctg

SEQ ID NO: 8706 - RNA, 22 nt, synthetic construct
  source 1..22: mol_type = other RNA
ctggctggagggcgtgccacgc

SEQ ID NO: 8707 - RNA, 22 nt, synthetic construct
  source 1..22: mol_type = other RNA
ctggctgggctgatcttccagc

SEQ ID NO: 8708 - RNA, 22 nt, synthetic construct
  source 1..22: mol_type = other RNA
ctgggagccctactcgggccat

SEQ ID NO: 8709 - RNA, 22 nt, synthetic construct
  source 1..22: mol_type = other RNA
ctgggagctgggccgcagacat

SEQ ID NO: 8710 - RNA, 22 nt, synthetic construct
  source 1..22: mol_type = other RNA
ctgggcaaagctggtcagggca

SEQ ID NO: 8711 - RNA, 22 nt, synthetic construct
  source 1..22: mol_type = other RNA
ctgggcaaggccttggaggcgg

SEQ ID NO: 8712 - RNA, 22 nt, synthetic construct
  source 1..22: mol_type = other RNA
ctgggcacccgcctcacgcctc

SEQ ID NO: 8713 - RNA, 22 nt, synthetic construct
  source 1..22: mol_type = other RNA
ctgggcagaacggcagctggcc

SEQ ID NO: 8714 - RNA, 22 nt, synthetic construct
  source 1..22: mol_type = other RNA
ctgggcccacagccactcgtgg

SEQ ID NO: 8715 - RNA, 22 nt, synthetic construct
  source 1..22: mol_type = other RNA
ctgggccgcagacatcaaagta

SEQ ID NO: 8716 - RNA, 22 nt, synthetic construct
  source 1..22: mol_type = other RNA
ctgggccgtgcagccctcgaca

SEQ ID NO: 8717 - RNA, 22 nt, synthetic construct
  source 1..22: mol_type = other RNA
ctgggcctgctccatggagaag

SEQ ID NO: 8718 - RNA, 22 nt, synthetic construct
  source 1..22: mol_type = other RNA
ctgggcgatggccaaaggctta

SEQ ID NO: 8719 - RNA, 22 nt, synthetic construct
  source 1..22: mol_type = other RNA
ctgggctgatcttccagcctcc

SEQ ID NO: 8720 - RNA, 22 nt, synthetic construct
  source 1..22: mol_type = other RNA
ctgggcttgtggccggcttccc

SEQ ID NO: 8721 - RNA, 22 nt, synthetic construct
  source 1..22: mol_type = other RNA
ctggggaagccggccacaagcc

SEQ ID NO: 8722 - RNA, 22 nt, synthetic construct
  source 1..22: mol_type = other RNA
ctggggaaggccagctcggact

SEQ ID NO: 8723 - RNA, 22 nt, synthetic construct
  source 1..22: mol_type = other RNA
ctggggcagtgagccgggcctg

SEQ ID NO: 8724 - RNA, 22 nt, synthetic construct
  source 1..22: mol_type = other RNA
ctgggggccctgtggctggctc

SEQ ID NO: 8725 - RNA, 22 nt, synthetic construct
  source 1..22: mol_type = other RNA
ctggtcagggcaagagctattg

SEQ ID NO: 8726 - RNA, 22 nt, synthetic construct
  source 1..22: mol_type = other RNA
ctggtccagagcctgagcaagg

SEQ ID NO: 8727 - RNA, 22 nt, synthetic construct
  source 1..22: mol_type = other RNA
ctggtcctcctgtagggtactt

SEQ ID NO: 8728 - RNA, 22 nt, synthetic construct
  source 1..22: mol_type = other RNA
ctggtgcaggccaggctggaga

SEQ ID NO: 8729 - RNA, 22 nt, synthetic construct
  source 1..22: mol_type = other RNA
ctgtaccacgtgctgccaaatt

SEQ ID NO: 8730 - RNA, 22 nt, synthetic construct
  source 1..22: mol_type = other RNA
ctgtagggtactttgatgtctg

SEQ ID NO: 8731 - RNA, 22 nt, synthetic construct
  source 1..22: mol_type = other RNA
ctgtcatccctgagctctcaaa

SEQ ID NO: 8732 - RNA, 22 nt, synthetic construct
  source 1..22: mol_type = other RNA
ctgtccaccgaggcagccgccg

SEQ ID NO: 8733 - RNA, 22 nt, synthetic construct
  source 1..22: mol_type = other RNA
ctgtcccctgccattgcttgaa

SEQ ID NO: 8734 - RNA, 22 nt, synthetic construct
  source 1..22: mol_type = other RNA
ctgtccggcttctccatggagc

SEQ ID NO: 8735 - RNA, 22 nt, synthetic construct
  source 1..22: mol_type = other RNA
ctgtcgagggctgcacggccca

SEQ ID NO: 8736 - RNA, 22 nt, synthetic construct
  source 1..22: mol_type = other RNA
ctgtcttggtgctctgtcatcc

SEQ ID NO: 8737 - RNA, 22 nt, synthetic construct
  source 1..22: mol_type = other RNA
ctgtgactgagaagaagtggcc

SEQ ID NO: 8738 - RNA, 22 nt, synthetic construct
  source 1..22: mol_type = other RNA
ctgtgaggaggagggtgcaacc

SEQ ID NO: 8739 - RNA, 22 nt, synthetic construct
  source 1..22: mol_type = other RNA
ctgtgcaggaagccatcttgcg

SEQ ID NO: 8740 - RNA, 22 nt, synthetic construct
  source 1..22: mol_type = other RNA
ctgtgctgggcaaagctggtca

SEQ ID NO: 8741 - RNA, 22 nt, synthetic construct
  source 1..22: mol_type = other RNA
ctgtggctggctctgagtggcg

SEQ ID NO: 8742 - RNA, 22 nt, synthetic construct
  source 1..22: mol_type = other RNA
ctgtggctgtgactgagaagaa

SEQ ID NO: 8743 - RNA, 22 nt, synthetic construct
  source 1..22: mol_type = other RNA
ctgtgggcccagggagaagagc

SEQ ID NO: 8744 - RNA, 22 nt, synthetic construct
  source 1..22: mol_type = other RNA
ctgtgtcacccgtttcaggtgg

SEQ ID NO: 8745 - RNA, 22 nt, synthetic construct
  source 1..22: mol_type = other RNA
ctgttggctgccaaggagcacc

SEQ ID NO: 8746 - RNA, 22 nt, synthetic construct
  source 1..22: mol_type = other RNA
cttagtccaacacccaccgcgg

SEQ ID NO: 8747 - RNA, 22 nt, synthetic construct
  source 1..22: mol_type = other RNA
cttcaagatgtggctgaaaacc

SEQ ID NO: 8748 - RNA, 22 nt, synthetic construct
  source 1..22: mol_type = other RNA
cttcaggtacctcgcaagcacc

SEQ ID NO: 8749 - RNA, 22 nt, synthetic construct
  source 1..22: mol_type = other RNA
cttccagcctcccgcccgctgc

SEQ ID NO: 8750 - RNA, 22 nt, synthetic construct
  source 1..22: mol_type = other RNA
cttccagctcctcgaagccgtc

SEQ ID NO: 8751 - RNA, 22 nt, synthetic construct
  source 1..22: mol_type = other RNA
cttccccaagcccctcacccca

SEQ ID NO: 8752 - RNA, 22 nt, synthetic construct
  source 1..22: mol_type = other RNA
cttccccagcttcctcctgcaa

SEQ ID NO: 8753 - RNA, 22 nt, synthetic construct
  source 1..22: mol_type = other RNA
cttccccagtacgactttgtct

SEQ ID NO: 8754 - RNA, 22 nt, synthetic construct
  source 1..22: mol_type = other RNA
cttcctcctgcaatgcttcctg

SEQ ID NO: 8755 - RNA, 22 nt, synthetic construct
  source 1..22: mol_type = other RNA
cttcctgcacagcacgtgcgga

SEQ ID NO: 8756 - RNA, 22 nt, synthetic construct
  source 1..22: mol_type = other RNA
cttcctgggggccctgtggctg

SEQ ID NO: 8757 - RNA, 22 nt, synthetic construct
  source 1..22: mol_type = other RNA
cttcctgtccaccgaggcagcc

SEQ ID NO: 8758 - RNA, 22 nt, synthetic construct
  source 1..22: mol_type = other RNA
cttccttggggtcaatgctagg

SEQ ID NO: 8759 - RNA, 22 nt, synthetic construct
  source 1..22: mol_type = other RNA
cttcgaggagctggaagcgcaa

SEQ ID NO: 8760 - RNA, 22 nt, synthetic construct
  source 1..22: mol_type = other RNA
cttctcagtcacagccacagcc

SEQ ID NO: 8761 - RNA, 22 nt, synthetic construct
  source 1..22: mol_type = other RNA
cttctccatggagcaggcccag

SEQ ID NO: 8762 - RNA, 22 nt, synthetic construct
  source 1..22: mol_type = other RNA
cttctccctggacctccgcagc

SEQ ID NO: 8763 - RNA, 22 nt, synthetic construct
  source 1..22: mol_type = other RNA
cttctccctgggcccacagcca

SEQ ID NO: 8764 - RNA, 22 nt, synthetic construct
  source 1..22: mol_type = other RNA
cttctctgtcccctgccattgc

SEQ ID NO: 8765 - RNA, 22 nt, synthetic construct
  source 1..22: mol_type = other RNA
cttctgcttcctgtccaccgag

SEQ ID NO: 8766 - RNA, 22 nt, synthetic construct
  source 1..22: mol_type = other RNA
cttctggaaaaggccggccagc

SEQ ID NO: 8767 - RNA, 22 nt, synthetic construct
  source 1..22: mol_type = other RNA
cttcttccttggggtcaatgct

SEQ ID NO: 8768 - RNA, 22 nt, synthetic construct
  source 1..22: mol_type = other RNA
cttcttctcagtcacagccaca

SEQ ID NO: 8769 - RNA, 22 nt, synthetic construct
  source 1..22: mol_type = other RNA
cttcttctggaaaaggccggcc

SEQ ID NO: 8770 - RNA, 22 nt, synthetic construct
  source 1..22: mol_type = other RNA
cttgaaccgtccgggggatgcc

SEQ ID NO: 8771 - RNA, 22 nt, synthetic construct
  source 1..22: mol_type = other RNA
cttgaagagacctgaccgcgtt

SEQ ID NO: 8772 - RNA, 22 nt, synthetic construct
  source 1..22: mol_type = other RNA
cttgatttcgccactcagagcc

SEQ ID NO: 8773 - RNA, 22 nt, synthetic construct
  source 1..22: mol_type = other RNA
cttgcccagtacatgtgcatca

SEQ ID NO: 8774 - RNA, 22 nt, synthetic construct
  source 1..22: mol_type = other RNA
cttgccctgaccagctttgccc

SEQ ID NO: 8775 - RNA, 22 nt, synthetic construct
  source 1..22: mol_type = other RNA
cttgcgaggtacctgaagcggc

SEQ ID NO: 8776 - RNA, 22 nt, synthetic construct
  source 1..22: mol_type = other RNA
cttgcgcttccagctcctcgaa

SEQ ID NO: 8777 - RNA, 22 nt, synthetic construct
  source 1..22: mol_type = other RNA
cttgctcaggctctggaccagg

SEQ ID NO: 8778 - RNA, 22 nt, synthetic construct
  source 1..22: mol_type = other RNA
cttgctgctgctcctctccagc

SEQ ID NO: 8779 - RNA, 22 nt, synthetic construct
  source 1..22: mol_type = other RNA
cttggaggcggcgggccaagac

SEQ ID NO: 8780 - RNA, 22 nt, synthetic construct
  source 1..22: mol_type = other RNA
cttggcagccaacagcacctca

SEQ ID NO: 8781 - RNA, 22 nt, synthetic construct
  source 1..22: mol_type = other RNA
cttggccagctctgccagggcc

SEQ ID NO: 8782 - RNA, 22 nt, synthetic construct
  source 1..22: mol_type = other RNA
cttggcccgccgcctccaaggc

SEQ ID NO: 8783 - RNA, 22 nt, synthetic construct
  source 1..22: mol_type = other RNA
cttggcgtcctccccaagctcc

SEQ ID NO: 8784 - RNA, 22 nt, synthetic construct
  source 1..22: mol_type = other RNA
cttgggccagctgccgttctgc

SEQ ID NO: 8785 - RNA, 22 nt, synthetic construct
  source 1..22: mol_type = other RNA
cttggggaagagacatccttgt

SEQ ID NO: 8786 - RNA, 22 nt, synthetic construct
  source 1..22: mol_type = other RNA
cttggggaggacgccaagctgc

SEQ ID NO: 8787 - RNA, 22 nt, synthetic construct
  source 1..22: mol_type = other RNA
cttggggtcaatgctaggtact

SEQ ID NO: 8788 - RNA, 22 nt, synthetic construct
  source 1..22: mol_type = other RNA
cttggtgctctgtcatccctga

SEQ ID NO: 8789 - RNA, 22 nt, synthetic construct
  source 1..22: mol_type = other RNA
cttgtccttgatttcgccactc

SEQ ID NO: 8790 - RNA, 22 nt, synthetic construct
  source 1..22: mol_type = other RNA
cttgtggccggcttccccagta

SEQ ID NO: 8791 - RNA, 22 nt, synthetic construct
  source 1..22: mol_type = other RNA
ctttctggctgggctgatcttc

SEQ ID NO: 8792 - RNA, 22 nt, synthetic construct
  source 1..22: mol_type = other RNA
ctttgagagctcagggatgaca

SEQ ID NO: 8793 - RNA, 22 nt, synthetic construct
  source 1..22: mol_type = other RNA
ctttgatgtctgcggcccagct

SEQ ID NO: 8794 - RNA, 22 nt, synthetic construct
  source 1..22: mol_type = other RNA
ctttgcagagccggtggagcag

SEQ ID NO: 8795 - RNA, 22 nt, synthetic construct
  source 1..22: mol_type = other RNA
ctttgcccagcacagcaatcac

SEQ ID NO: 8796 - RNA, 22 nt, synthetic construct
  source 1..22: mol_type = other RNA
ctttggccatcgcccaggtcct

SEQ ID NO: 8797 - RNA, 22 nt, synthetic construct
  source 1..22: mol_type = other RNA
ctttgtcttctctgtcccctgc

SEQ ID NO: 8798 - RNA, 22 nt, synthetic construct
  source 1..22: mol_type = other RNA
ctttgtgccgggcagtgtgcca

SEQ ID NO: 8799 - RNA, 22 nt, synthetic construct
  source 1..22: mol_type = other RNA
cttttccagaagaagctgctcc

SEQ ID NO: 8800 - RNA, 22 nt, synthetic construct
  source 1..22: mol_type = other RNA
cttttctgggcacccgcctcac

SEQ ID NO: 8801 - RNA, 22 nt, synthetic construct
  source 1..22: mol_type = other RNA
gaaaacctcatcggccgccacg

SEQ ID NO: 8802 - RNA, 22 nt, synthetic construct
  source 1..22: mol_type = other RNA
gaaaagagaggcggccggggag

SEQ ID NO: 8803 - RNA, 22 nt, synthetic construct
  source 1..22: mol_type = other RNA
gaaaaggccggccagcagcccc

SEQ ID NO: 8804 - RNA, 22 nt, synthetic construct
  source 1..22: mol_type = other RNA
gaaacgggtgacacagctgagt

SEQ ID NO: 8805 - RNA, 22 nt, synthetic construct
  source 1..22: mol_type = other RNA
gaaagcgtggcacgccctccag

SEQ ID NO: 8806 - RNA, 22 nt, synthetic construct
  source 1..22: mol_type = other RNA
gaaatcaaggacaaggagctcc

SEQ ID NO: 8807 - RNA, 22 nt, synthetic construct
  source 1..22: mol_type = other RNA
gaaccgtccgggggatgcctat

SEQ ID NO: 8808 - RNA, 22 nt, synthetic construct
  source 1..22: mol_type = other RNA
gaacgcggtcaggtctcttcaa

SEQ ID NO: 8809 - RNA, 22 nt, synthetic construct
  source 1..22: mol_type = other RNA
gaacggcagctggcccaaggag

SEQ ID NO: 8810 - RNA, 22 nt, synthetic construct
  source 1..22: mol_type = other RNA
gaactgctccaccggctctgca

SEQ ID NO: 8811 - RNA, 22 nt, synthetic construct
  source 1..22: mol_type = other RNA
gaactggccaccccggactggg

SEQ ID NO: 8812 - RNA, 22 nt, synthetic construct
  source 1..22: mol_type = other RNA
gaactggtcctcctgtagggta

SEQ ID NO: 8813 - RNA, 22 nt, synthetic construct
  source 1..22: mol_type = other RNA
gaagaagaggccctatgacaac

SEQ ID NO: 8814 - RNA, 22 nt, synthetic construct
  source 1..22: mol_type = other RNA
gaagaagctgctccgaggttgc

SEQ ID NO: 8815 - RNA, 22 nt, synthetic construct
  source 1..22: mol_type = other RNA
gaagaagtggccggtcccggag

SEQ ID NO: 8816 - RNA, 22 nt, synthetic construct
  source 1..22: mol_type = other RNA
gaagacaaagtcgtactgggga

SEQ ID NO: 8817 - RNA, 22 nt, synthetic construct
  source 1..22: mol_type = other RNA
gaagagacctgaccgcgttctg

SEQ ID NO: 8818 - RNA, 22 nt, synthetic construct
  source 1..22: mol_type = other RNA
gaagagcagatcctgcaggcca

SEQ ID NO: 8819 - RNA, 22 nt, synthetic construct
  source 1..22: mol_type = other RNA
gaagaggccctatgacaactgg

SEQ ID NO: 8820 - RNA, 22 nt, synthetic construct
  source 1..22: mol_type = other RNA
gaagatcagcccagccagaaag

SEQ ID NO: 8821 - RNA, 22 nt, synthetic construct
  source 1..22: mol_type = other RNA
gaagcagaaggtgcttgcgagg

SEQ ID NO: 8822 - RNA, 22 nt, synthetic construct
  source 1..22: mol_type = other RNA
gaagcattgcaggaggaagctg

SEQ ID NO: 8823 - RNA, 22 nt, synthetic construct
  source 1..22: mol_type = other RNA
gaagccatcttgcgcttccagc

SEQ ID NO: 8824 - RNA, 22 nt, synthetic construct
  source 1..22: mol_type = other RNA
gaagccggacagctcaaatagg

SEQ ID NO: 8825 - RNA, 22 nt, synthetic construct
  source 1..22: mol_type = other RNA
gaagccggccacaagcccaggc

SEQ ID NO: 8826 - RNA, 22 nt, synthetic construct
  source 1..22: mol_type = other RNA
gaagccgtctaggatgagcaga

SEQ ID NO: 8827 - RNA, 22 nt, synthetic construct
  source 1..22: mol_type = other RNA
gaagcgcaagatggcttcctgc

SEQ ID NO: 8828 - RNA, 22 nt, synthetic construct
  source 1..22: mol_type = other RNA
gaagcggctgcagccggggaca

SEQ ID NO: 8829 - RNA, 22 nt, synthetic construct
  source 1..22: mol_type = other RNA
gaagctgctccgaggttgcacc

SEQ ID NO: 8830 - RNA, 22 nt, synthetic construct
  source 1..22: mol_type = other RNA
gaagctggggaaggccagctcg

SEQ ID NO: 8831 - RNA, 22 nt, synthetic construct
  source 1..22: mol_type = other RNA
gaaggccagctcggactctgcg

SEQ ID NO: 8832 - RNA, 22 nt, synthetic construct
  source 1..22: mol_type = other RNA
gaaggtgcttgcgaggtacctg

SEQ ID NO: 8833 - RNA, 22 nt, synthetic construct
  source 1..22: mol_type = other RNA
gaagtcttggcccgccgcctcc

SEQ ID NO: 8834 - RNA, 22 nt, synthetic construct
  source 1..22: mol_type = other RNA
gaagtggccggtcccggaggag

SEQ ID NO: 8835 - RNA, 22 nt, synthetic construct
  source 1..22: mol_type = other RNA
gaatttggcagcacgtggtaca

SEQ ID NO: 8836 - RNA, 22 nt, synthetic construct
  source 1..22: mol_type = other RNA
gacaaagtcgtactggggaagc

SEQ ID NO: 8837 - RNA, 22 nt, synthetic construct
  source 1..22: mol_type = other RNA
gacaactggctggagggcgtgc

SEQ ID NO: 8838 - RNA, 22 nt, synthetic construct
  source 1..22: mol_type = other RNA
gacaaggagctcccgcagtacc

SEQ ID NO: 8839 - RNA, 22 nt, synthetic construct
  source 1..22: mol_type = other RNA
gacacagctgagtcccacgagg

SEQ ID NO: 8840 - RNA, 22 nt, synthetic construct
  source 1..22: mol_type = other RNA
gacacgagtgattgctgtgctg

SEQ ID NO: 8841 - RNA, 22 nt, synthetic construct
  source 1..22: mol_type = other RNA
gacacgcccctggcctttgcag

SEQ ID NO: 8842 - RNA, 22 nt, synthetic construct
  source 1..22: mol_type = other RNA
gacacgtatggtgccgagcccg

SEQ ID NO: 8843 - RNA, 22 nt, synthetic construct
  source 1..22: mol_type = other RNA
gacactgcgggcgcggcagctg

SEQ ID NO: 8844 - RNA, 22 nt, synthetic construct
  source 1..22: mol_type = other RNA
gacagagaagacaaagtcgtac

SEQ ID NO: 8845 - RNA, 22 nt, synthetic construct
  source 1..22: mol_type = other RNA
gacagagcaccaagacagagcc

SEQ ID NO: 8846 - RNA, 22 nt, synthetic construct
  source 1..22: mol_type = other RNA
gacagagccctgacgctcctcc

SEQ ID NO: 8847 - RNA, 22 nt, synthetic construct
  source 1..22: mol_type = other RNA
gacagctcaaatagggcgtcgg

SEQ ID NO: 8848 - RNA, 22 nt, synthetic construct
  source 1..22: mol_type = other RNA
gacaggaagcagaaggtgcttg

SEQ ID NO: 8849 - RNA, 22 nt, synthetic construct
  source 1..22: mol_type = other RNA
gacatagagtcccgtgagcgtg

SEQ ID NO: 8850 - RNA, 22 nt, synthetic construct
  source 1..22: mol_type = other RNA
gacatcaaagtaccctacagga

SEQ ID NO: 8851 - RNA, 22 nt, synthetic construct
  source 1..22: mol_type = other RNA
gaccagctttgcccagcacagc

SEQ ID NO: 8852 - RNA, 22 nt, synthetic construct
  source 1..22: mol_type = other RNA
gaccagttcccatccgcagacg

SEQ ID NO: 8853 - RNA, 22 nt, synthetic construct
  source 1..22: mol_type = other RNA
gaccccaaggaagaagaggccc

SEQ ID NO: 8854 - RNA, 22 nt, synthetic construct
  source 1..22: mol_type = other RNA
gaccgcgttctgctcatcctag

SEQ ID NO: 8855 - RNA, 22 nt, synthetic construct
  source 1..22: mol_type = other RNA
gaccggccacttcttctcagtc

SEQ ID NO: 8856 - RNA, 22 nt, synthetic construct
  source 1..22: mol_type = other RNA
gacctccgcagcactggcattt

SEQ ID NO: 8857 - RNA, 22 nt, synthetic construct
  source 1..22: mol_type = other RNA
gacctgaccgcgttctgctcat

SEQ ID NO: 8858 - RNA, 22 nt, synthetic construct
  source 1..22: mol_type = other RNA
gacctgggcgatggccaaaggc

SEQ ID NO: 8859 - RNA, 22 nt, synthetic construct
  source 1..22: mol_type = other RNA
gacgccaagctgccctccacgc

SEQ ID NO: 8860 - RNA, 22 nt, synthetic construct
  source 1..22: mol_type = other RNA
gacgccctatttgagctgtccg

SEQ ID NO: 8861 - RNA, 22 nt, synthetic construct
  source 1..22: mol_type = other RNA
gacgctcctccgggaccggcca

SEQ ID NO: 8862 - RNA, 22 nt, synthetic construct
  source 1..22: mol_type = other RNA
gacggcttcgaggagctggaag

SEQ ID NO: 8863 - RNA, 22 nt, synthetic construct
  source 1..22: mol_type = other RNA
gacggttcaagcaatggcaggg

SEQ ID NO: 8864 - RNA, 22 nt, synthetic construct
  source 1..22: mol_type = other RNA
gacgtgaggacctgggcgatgg

SEQ ID NO: 8865 - RNA, 22 nt, synthetic construct
  source 1..22: mol_type = other RNA
gactaagcctttggccatcgcc

SEQ ID NO: 8866 - RNA, 22 nt, synthetic construct
  source 1..22: mol_type = other RNA
gactcagctgtgtcacccgttt

SEQ ID NO: 8867 - RNA, 22 nt, synthetic construct
  source 1..22: mol_type = other RNA
gactctatgtcggcctgctggg

SEQ ID NO: 8868 - RNA, 22 nt, synthetic construct
  source 1..22: mol_type = other RNA
gactctgcggcccgcggtgggt

SEQ ID NO: 8869 - RNA, 22 nt, synthetic construct
  source 1..22: mol_type = other RNA
gactgagaagaagtggccggtc

SEQ ID NO: 8870 - RNA, 22 nt, synthetic construct
  source 1..22: mol_type = other RNA
gactgggcagaacggcagctgg

SEQ ID NO: 8871 - RNA, 22 nt, synthetic construct
  source 1..22: mol_type = other RNA
gacttctccctggacctccgca

SEQ ID NO: 8872 - RNA, 22 nt, synthetic construct
  source 1..22: mol_type = other RNA
gactttgtcttctctgtcccct

SEQ ID NO: 8873 - RNA, 22 nt, synthetic construct
  source 1..22: mol_type = other RNA
gagaagaagtggccggtcccgg

SEQ ID NO: 8874 - RNA, 22 nt, synthetic construct
  source 1..22: mol_type = other RNA
gagaagacaaagtcgtactggg

SEQ ID NO: 8875 - RNA, 22 nt, synthetic construct
  source 1..22: mol_type = other RNA
gagaagagcagatcctgcaggc

SEQ ID NO: 8876 - RNA, 22 nt, synthetic construct
  source 1..22: mol_type = other RNA
gagaagccggacagctcaaata

SEQ ID NO: 8877 - RNA, 22 nt, synthetic construct
  source 1..22: mol_type = other RNA
gagaagtcttggcccgccgcct

SEQ ID NO: 8878 - RNA, 22 nt, synthetic construct
  source 1..22: mol_type = other RNA
gagacacgagtgattgctgtgc

SEQ ID NO: 8879 - RNA, 22 nt, synthetic construct
  source 1..22: mol_type = other RNA
gagacctgaccgcgttctgctc

SEQ ID NO: 8880 - RNA, 22 nt, synthetic construct
  source 1..22: mol_type = other RNA
gagagctcagggatgacagagc

SEQ ID NO: 8881 - RNA, 22 nt, synthetic construct
  source 1..22: mol_type = other RNA
gagagctggcacactgcccggc

SEQ ID NO: 8882 - RNA, 22 nt, synthetic construct
  source 1..22: mol_type = other RNA
gagaggagcagcagcaagagcc

SEQ ID NO: 8883 - RNA, 22 nt, synthetic construct
  source 1..22: mol_type = other RNA
gagaggcggccggggagctcct

SEQ ID NO: 8884 - RNA, 22 nt, synthetic construct
  source 1..22: mol_type = other RNA
gagcaaggccgacgccctattt

SEQ ID NO: 8885 - RNA, 22 nt, synthetic construct
  source 1..22: mol_type = other RNA
gagcaccaagacagagccctga

SEQ ID NO: 8886 - RNA, 22 nt, synthetic construct
  source 1..22: mol_type = other RNA
gagcaccggcggccgcgtgaga

SEQ ID NO: 8887 - RNA, 22 nt, synthetic construct
  source 1..22: mol_type = other RNA
gagcagaacgcggtcaggtctc

SEQ ID NO: 8888 - RNA, 22 nt, synthetic construct
  source 1..22: mol_type = other RNA
gagcagatcctgcaggccatag

SEQ ID NO: 8889 - RNA, 22 nt, synthetic construct
  source 1..22: mol_type = other RNA
gagcagcagcaagagcctggag

SEQ ID NO: 8890 - RNA, 22 nt, synthetic construct
  source 1..22: mol_type = other RNA
gagcagcttcttctggaaaagg

SEQ ID NO: 8891 - RNA, 22 nt, synthetic construct
  source 1..22: mol_type = other RNA
gagcaggcccaggcatacgtga

SEQ ID NO: 8892 - RNA, 22 nt, synthetic construct
  source 1..22: mol_type = other RNA
gagcagttctaccgctcactgc

SEQ ID NO: 8893 - RNA, 22 nt, synthetic construct
  source 1..22: mol_type = other RNA
gagccagccacagggcccccag

SEQ ID NO: 8894 - RNA, 22 nt, synthetic construct
  source 1..22: mol_type = other RNA
gagcccgcaggcccggatggca

SEQ ID NO: 8895 - RNA, 22 nt, synthetic construct
  source 1..22: mol_type = other RNA
gagccctactcgggccatcggc

SEQ ID NO: 8896 - RNA, 22 nt, synthetic construct
  source 1..22: mol_type = other RNA
gagccctgacgctcctccggga

SEQ ID NO: 8897 - RNA, 22 nt, synthetic construct
  source 1..22: mol_type = other RNA
gagccgggcctgggcttgtggc

SEQ ID NO: 8898 - RNA, 22 nt, synthetic construct
  source 1..22: mol_type = other RNA
gagccggtggagcagttctacc

SEQ ID NO: 8899 - RNA, 22 nt, synthetic construct
  source 1..22: mol_type = other RNA
gagcctcgtgggactcagctgt

SEQ ID NO: 8900 - RNA, 22 nt, synthetic construct
  source 1..22: mol_type = other RNA
gagcctgagcaaggccgacgcc

SEQ ID NO: 8901 - RNA, 22 nt, synthetic construct
  source 1..22: mol_type = other RNA
gagcctggagcgggaactggcc

SEQ ID NO: 8902 - RNA, 22 nt, synthetic construct
  source 1..22: mol_type = other RNA
gagcgggaactggccaccccgg

SEQ ID NO: 8903 - RNA, 22 nt, synthetic construct
  source 1..22: mol_type = other RNA
gagcggtagaactgctccaccg

SEQ ID NO: 8904 - RNA, 22 nt, synthetic construct
  source 1..22: mol_type = other RNA
gagcgtcagggctctgtcttgg

SEQ ID NO: 8905 - RNA, 22 nt, synthetic construct
  source 1..22: mol_type = other RNA
gagcgtggagggcagcttggcg

SEQ ID NO: 8906 - RNA, 22 nt, synthetic construct
  source 1..22: mol_type = other RNA
gagctattgggctggggcagtg

SEQ ID NO: 8907 - RNA, 22 nt, synthetic construct
  source 1..22: mol_type = other RNA
gagctcagggatgacagagcac

SEQ ID NO: 8908 - RNA, 22 nt, synthetic construct
  source 1..22: mol_type = other RNA
gagctccccggccgcctctctt

SEQ ID NO: 8909 - RNA, 22 nt, synthetic construct
  source 1..22: mol_type = other RNA
gagctcccgcagtacctagcat

SEQ ID NO: 8910 - RNA, 22 nt, synthetic construct
  source 1..22: mol_type = other RNA
gagctcctgtaccacgtgctgc

SEQ ID NO: 8911 - RNA, 22 nt, synthetic construct
  source 1..22: mol_type = other RNA
gagctccttgtccttgatttcg

SEQ ID NO: 8912 - RNA, 22 nt, synthetic construct
  source 1..22: mol_type = other RNA
gagctctcaaagtagcgcatca

SEQ ID NO: 8913 - RNA, 22 nt, synthetic construct
  source 1..22: mol_type = other RNA
gagctgctgcactgcgcccacg

SEQ ID NO: 8914 - RNA, 22 nt, synthetic construct
  source 1..22: mol_type = other RNA
gagctggaagcgcaagatggct

SEQ ID NO: 8915 - RNA, 22 nt, synthetic construct
  source 1..22: mol_type = other RNA
gagctggcacactgcccggcac

SEQ ID NO: 8916 - RNA, 22 nt, synthetic construct
  source 1..22: mol_type = other RNA
gagctggccaagctggcctggg

SEQ ID NO: 8917 - RNA, 22 nt, synthetic construct
  source 1..22: mol_type = other RNA
gagctggccttccccagcttcc

SEQ ID NO: 8918 - RNA, 22 nt, synthetic construct
  source 1..22: mol_type = other RNA
gagctgggccgcagacatcaaa

SEQ ID NO: 8919 - RNA, 22 nt, synthetic construct
  source 1..22: mol_type = other RNA
gagctgtccggcttctccatgg

SEQ ID NO: 8920 - RNA, 22 nt, synthetic construct
  source 1..22: mol_type = other RNA
gagcttggggaggacgccaagc

SEQ ID NO: 8921 - RNA, 22 nt, synthetic construct
  source 1..22: mol_type = other RNA
gaggaagctggggaaggccagc

SEQ ID NO: 8922 - RNA, 22 nt, synthetic construct
  source 1..22: mol_type = other RNA
gaggaccagttcccatccgcag

SEQ ID NO: 8923 - RNA, 22 nt, synthetic construct
  source 1..22: mol_type = other RNA
gaggacctgggcgatggccaaa

SEQ ID NO: 8924 - RNA, 22 nt, synthetic construct
  source 1..22: mol_type = other RNA
gaggacgccaagctgccctcca

SEQ ID NO: 8925 - RNA, 22 nt, synthetic construct
  source 1..22: mol_type = other RNA
gaggagcagcagcaagagcctg

SEQ ID NO: 8926 - RNA, 22 nt, synthetic construct
  source 1..22: mol_type = other RNA
gaggagcgtcagggctctgtct

SEQ ID NO: 8927 - RNA, 22 nt, synthetic construct
  source 1..22: mol_type = other RNA
gaggagctggaagcgcaagatg

SEQ ID NO: 8928 - RNA, 22 nt, synthetic construct
  source 1..22: mol_type = other RNA
gaggaggagggtgcaacctcgg

SEQ ID NO: 8929 - RNA, 22 nt, synthetic construct
  source 1..22: mol_type = other RNA
gaggaggctggaatttggcagc

SEQ ID NO: 8930 - RNA, 22 nt, synthetic construct
  source 1..22: mol_type = other RNA
gaggagggtgcaacctcggagc

SEQ ID NO: 8931 - RNA, 22 nt, synthetic construct
  source 1..22: mol_type = other RNA
gaggcagccgccgatggcccga

SEQ ID NO: 8932 - RNA, 22 nt, synthetic construct
  source 1..22: mol_type = other RNA
gaggccctatgacaactggctg

SEQ ID NO: 8933 - RNA, 22 nt, synthetic construct
  source 1..22: mol_type = other RNA
gaggccctgctggagcttgggg

SEQ ID NO: 8934 - RNA, 22 nt, synthetic construct
  source 1..22: mol_type = other RNA
gaggccgaggaggctggaattt

SEQ ID NO: 8935 - RNA, 22 nt, synthetic construct
  source 1..22: mol_type = other RNA
gaggcctggctgaggtgctgtt

SEQ ID NO: 8936 - RNA, 22 nt, synthetic construct
  source 1..22: mol_type = other RNA
gaggcggccggggagctcctgt

SEQ ID NO: 8937 - RNA, 22 nt, synthetic construct
  source 1..22: mol_type = other RNA
gaggcggcgggccaagacttct

SEQ ID NO: 8938 - RNA, 22 nt, synthetic construct
  source 1..22: mol_type = other RNA
gaggcgggtgcccagaaaagag

SEQ ID NO: 8939 - RNA, 22 nt, synthetic construct
  source 1..22: mol_type = other RNA
gaggcgtgaggcgggtgcccag

SEQ ID NO: 8940 - RNA, 22 nt, synthetic construct
  source 1..22: mol_type = other RNA
gaggctccccaatccagagggg

SEQ ID NO: 8941 - RNA, 22 nt, synthetic construct
  source 1..22: mol_type = other RNA
gaggctggaagatcagcccagc

SEQ ID NO: 8942 - RNA, 22 nt, synthetic construct
  source 1..22: mol_type = other RNA
gaggctggaatttggcagcacg

SEQ ID NO: 8943 - RNA, 22 nt, synthetic construct
  source 1..22: mol_type = other RNA
gagggagcagggctccgccggt

SEQ ID NO: 8944 - RNA, 22 nt, synthetic construct
  source 1..22: mol_type = other RNA
gagggcagcttggcgtcctccc

SEQ ID NO: 8945 - RNA, 22 nt, synthetic construct
  source 1..22: mol_type = other RNA
gagggcgtgccacgctttctgg

SEQ ID NO: 8946 - RNA, 22 nt, synthetic construct
  source 1..22: mol_type = other RNA
gagggctgcacggcccagcagg

SEQ ID NO: 8947 - RNA, 22 nt, synthetic construct
  source 1..22: mol_type = other RNA
gaggggcaaatgccagtgctgc

SEQ ID NO: 8948 - RNA, 22 nt, synthetic construct
  source 1..22: mol_type = other RNA
gaggggcttggggaagagacat

SEQ ID NO: 8949 - RNA, 22 nt, synthetic construct
  source 1..22: mol_type = other RNA
gagggtgcaacctcggagcagc

SEQ ID NO: 8950 - RNA, 22 nt, synthetic construct
  source 1..22: mol_type = other RNA
gaggtacctgaagcggctgcag

SEQ ID NO: 8951 - RNA, 22 nt, synthetic construct
  source 1..22: mol_type = other RNA
gaggtccagggagaagtcttgg

SEQ ID NO: 8952 - RNA, 22 nt, synthetic construct
  source 1..22: mol_type = other RNA
gaggtgctgttggctgccaagg

SEQ ID NO: 8953 - RNA, 22 nt, synthetic construct
  source 1..22: mol_type = other RNA
gaggtggatctggtgcaggcca

SEQ ID NO: 8954 - RNA, 22 nt, synthetic construct
  source 1..22: mol_type = other RNA
gaggttgcaccctcctcctcac

SEQ ID NO: 8955 - RNA, 22 nt, synthetic construct
  source 1..22: mol_type = other RNA
gaggttttcagccacatcttga

SEQ ID NO: 8956 - RNA, 22 nt, synthetic construct
  source 1..22: mol_type = other RNA
gagtagggctcccaggcagcgg

SEQ ID NO: 8957 - RNA, 22 nt, synthetic construct
  source 1..22: mol_type = other RNA
gagtcccacgaggctccccaat

SEQ ID NO: 8958 - RNA, 22 nt, synthetic construct
  source 1..22: mol_type = other RNA
gagtcccgtgagcgtggagggc

SEQ ID NO: 8959 - RNA, 22 nt, synthetic construct
  source 1..22: mol_type = other RNA
gagtccgagctggccttcccca

SEQ ID NO: 8960 - RNA, 22 nt, synthetic construct
  source 1..22: mol_type = other RNA
gagtgattgctgtgctgggcaa

SEQ ID NO: 8961 - RNA, 22 nt, synthetic construct
  source 1..22: mol_type = other RNA
gagtggcgaaatcaaggacaag

SEQ ID NO: 8962 - RNA, 22 nt, synthetic construct
  source 1..22: mol_type = other RNA
gagtggctgtgggcccagggag

SEQ ID NO: 8963 - RNA, 22 nt, synthetic construct
  source 1..22: mol_type = other RNA
gatcagcccagccagaaagcgt

SEQ ID NO: 8964 - RNA, 22 nt, synthetic construct
  source 1..22: mol_type = other RNA
gatccacctccactaggatgcc

SEQ ID NO: 8965 - RNA, 22 nt, synthetic construct
  source 1..22: mol_type = other RNA
gatcctgcaggccataggcatc

SEQ ID NO: 8966 - RNA, 22 nt, synthetic construct
  source 1..22: mol_type = other RNA
gatctgctcttctccctgggcc

SEQ ID NO: 8967 - RNA, 22 nt, synthetic construct
  source 1..22: mol_type = other RNA
gatctggtgcaggccaggctgg

SEQ ID NO: 8968 - RNA, 22 nt, synthetic construct
  source 1..22: mol_type = other RNA
gatcttccagcctcccgcccgc

SEQ ID NO: 8969 - RNA, 22 nt, synthetic construct
  source 1..22: mol_type = other RNA
gatgacagagcaccaagacaga

SEQ ID NO: 8970 - RNA, 22 nt, synthetic construct
  source 1..22: mol_type = other RNA
gatgagcagaacgcggtcaggt

SEQ ID NO: 8971 - RNA, 22 nt, synthetic construct
  source 1..22: mol_type = other RNA
gatgaggttttcagccacatct

SEQ ID NO: 8972 - RNA, 22 nt, synthetic construct
  source 1..22: mol_type = other RNA
gatgcacatgtactgggcaagg

SEQ ID NO: 8973 - RNA, 22 nt, synthetic construct
  source 1..22: mol_type = other RNA
gatgccatccgggcctgcgggc

SEQ ID NO: 8974 - RNA, 22 nt, synthetic construct
  source 1..22: mol_type = other RNA
gatgcctatggcctgcaggatc

SEQ ID NO: 8975 - RNA, 22 nt, synthetic construct
  source 1..22: mol_type = other RNA
gatgcgctactttgagagctca

SEQ ID NO: 8976 - RNA, 22 nt, synthetic construct
  source 1..22: mol_type = other RNA
gatggcatcctagtggaggtgg

SEQ ID NO: 8977 - RNA, 22 nt, synthetic construct
  source 1..22: mol_type = other RNA
gatggccaaaggcttagtccaa

SEQ ID NO: 8978 - RNA, 22 nt, synthetic construct
  source 1..22: mol_type = other RNA
gatggcccgagtagggctccca

SEQ ID NO: 8979 - RNA, 22 nt, synthetic construct
  source 1..22: mol_type = other RNA
gatggcttcctgcacagcacgt

SEQ ID NO: 8980 - RNA, 22 nt, synthetic construct
  source 1..22: mol_type = other RNA
gatgggaactggtcctcctgta

SEQ ID NO: 8981 - RNA, 22 nt, synthetic construct
  source 1..22: mol_type = other RNA
gatgtctcttccccaagcccct

SEQ ID NO: 8982 - RNA, 22 nt, synthetic construct
  source 1..22: mol_type = other RNA
gatgtctgcggcccagctccca

SEQ ID NO: 8983 - RNA, 22 nt, synthetic construct
  source 1..22: mol_type = other RNA
gatgtggctgaaaacctcatcg

SEQ ID NO: 8984 - RNA, 22 nt, synthetic construct
  source 1..22: mol_type = other RNA
gattgctgtgctgggcaaagct

SEQ ID NO: 8985 - RNA, 22 nt, synthetic construct
  source 1..22: mol_type = other RNA
gattggggagcctcgtgggact

SEQ ID NO: 8986 - RNA, 22 nt, synthetic construct
  source 1..22: mol_type = other RNA
gatttcgccactcagagccagc

SEQ ID NO: 8987 - RNA, 22 nt, synthetic construct
  source 1..22: mol_type = other RNA
gcaaagctggtcagggcaagag

SEQ ID NO: 8988 - RNA, 22 nt, synthetic construct
  source 1..22: mol_type = other RNA
gcaaaggccaggggcgtgtcag

SEQ ID NO: 8989 - RNA, 22 nt, synthetic construct
  source 1..22: mol_type = other RNA
gcaaatgccagtgctgcggagg

SEQ ID NO: 8990 - RNA, 22 nt, synthetic construct
  source 1..22: mol_type = other RNA
gcaacctcggagcagcttcttc

SEQ ID NO: 8991 - RNA, 22 nt, synthetic construct
  source 1..22: mol_type = other RNA
gcaagagcctggagcgggaact

SEQ ID NO: 8992 - RNA, 22 nt, synthetic construct
  source 1..22: mol_type = other RNA
gcaagagctattgggctggggc

SEQ ID NO: 8993 - RNA, 22 nt, synthetic construct
  source 1..22: mol_type = other RNA
gcaagatggcttcctgcacagc

SEQ ID NO: 8994 - RNA, 22 nt, synthetic construct
  source 1..22: mol_type = other RNA
gcaagcaccttctgcttcctgt

SEQ ID NO: 8995 - RNA, 22 nt, synthetic construct
  source 1..22: mol_type = other RNA
gcaaggccgacgccctatttga

SEQ ID NO: 8996 - RNA, 22 nt, synthetic construct
  source 1..22: mol_type = other RNA
gcaaggccttggaggcggcggg

SEQ ID NO: 8997 - RNA, 22 nt, synthetic construct
  source 1..22: mol_type = other RNA
gcaatcactcgtgtctcacgcg

SEQ ID NO: 8998 - RNA, 22 nt, synthetic construct
  source 1..22: mol_type = other RNA
gcaatgcttcctgggggccctg

SEQ ID NO: 8999 - RNA, 22 nt, synthetic construct
  source 1..22: mol_type = other RNA
gcaatggcaggggacagagaag

SEQ ID NO: 9000 - RNA, 22 nt, synthetic construct
  source 1..22: mol_type = other RNA
gcacaaagtagggctgtggctg

SEQ ID NO: 9001 - RNA, 22 nt, synthetic construct
  source 1..22: mol_type = other RNA
gcacactgcccggcacaaagta

SEQ ID NO: 9002 - RNA, 22 nt, synthetic construct
  source 1..22: mol_type = other RNA
gcacagcaatcactcgtgtctc

SEQ ID NO: 9003 - RNA, 22 nt, synthetic construct
  source 1..22: mol_type = other RNA
gcacagcacgtgcggaccggca

SEQ ID NO: 9004 - RNA, 22 nt, synthetic construct
  source 1..22: mol_type = other RNA
gcacatgtactgggcaaggcct

SEQ ID NO: 9005 - RNA, 22 nt, synthetic construct
  source 1..22: mol_type = other RNA
gcaccaagacagagccctgacg

SEQ ID NO: 9006 - RNA, 22 nt, synthetic construct
  source 1..22: mol_type = other RNA
gcaccagatccacctccactag

SEQ ID NO: 9007 - RNA, 22 nt, synthetic construct
  source 1..22: mol_type = other RNA
gcaccatacgtgtcctgcagtg

SEQ ID NO: 9008 - RNA, 22 nt, synthetic construct
  source 1..22: mol_type = other RNA
gcacccgcctcacgcctcctga

SEQ ID NO: 9009 - RNA, 22 nt, synthetic construct
  source 1..22: mol_type = other RNA
gcaccctcctcctcacagcccg

SEQ ID NO: 9010 - RNA, 22 nt, synthetic construct
  source 1..22: mol_type = other RNA
gcaccggcggccgcgtgagaca

SEQ ID NO: 9011 - RNA, 22 nt, synthetic construct
  source 1..22: mol_type = other RNA
gcacctcagccaggcctccttg

SEQ ID NO: 9012 - RNA, 22 nt, synthetic construct
  source 1..22: mol_type = other RNA
gcaccttctgcttcctgtccac

SEQ ID NO: 9013 - RNA, 22 nt, synthetic construct
  source 1..22: mol_type = other RNA
gcacgccctccagccagttgtc

SEQ ID NO: 9014 - RNA, 22 nt, synthetic construct
  source 1..22: mol_type = other RNA
gcacggcccagcaggccgacat

SEQ ID NO: 9015 - RNA, 22 nt, synthetic construct
  source 1..22: mol_type = other RNA
gcacgtgctgtgcaggaagcca

SEQ ID NO: 9016 - RNA, 22 nt, synthetic construct
  source 1..22: mol_type = other RNA
gcacgtggtacaggagctcccc

SEQ ID NO: 9017 - RNA, 22 nt, synthetic construct
  source 1..22: mol_type = other RNA
gcactgcgcccacgaggccgag

SEQ ID NO: 9018 - RNA, 22 nt, synthetic construct
  source 1..22: mol_type = other RNA
gcactggcatttgcccctctgg

SEQ ID NO: 9019 - RNA, 22 nt, synthetic construct
  source 1..22: mol_type = other RNA
gcagaacgcggtcaggtctctt

SEQ ID NO: 9020 - RNA, 22 nt, synthetic construct
  source 1..22: mol_type = other RNA
gcagaacggcagctggcccaag

SEQ ID NO: 9021 - RNA, 22 nt, synthetic construct
  source 1..22: mol_type = other RNA
gcagaaggtgcttgcgaggtac

SEQ ID NO: 9022 - RNA, 22 nt, synthetic construct
  source 1..22: mol_type = other RNA
gcagacatcaaagtaccctaca

SEQ ID NO: 9023 - RNA, 22 nt, synthetic construct
  source 1..22: mol_type = other RNA
gcagacgtgaggacctgggcga

SEQ ID NO: 9024 - RNA, 22 nt, synthetic construct
  source 1..22: mol_type = other RNA
gcagagccggtggagcagttct

SEQ ID NO: 9025 - RNA, 22 nt, synthetic construct
  source 1..22: mol_type = other RNA
gcagagctggccaagctggcct

SEQ ID NO: 9026 - RNA, 22 nt, synthetic construct
  source 1..22: mol_type = other RNA
gcagagtccgagctggccttcc

SEQ ID NO: 9027 - RNA, 22 nt, synthetic construct
  source 1..22: mol_type = other RNA
gcagatcctgcaggccataggc

SEQ ID NO: 9028 - RNA, 22 nt, synthetic construct
  source 1..22: mol_type = other RNA
gcagcaagagcctggagcggga

SEQ ID NO: 9029 - RNA, 22 nt, synthetic construct
  source 1..22: mol_type = other RNA
gcagcacgtggtacaggagctc

SEQ ID NO: 9030 - RNA, 22 nt, synthetic construct
  source 1..22: mol_type = other RNA
gcagcactggcatttgcccctc

SEQ ID NO: 9031 - RNA, 22 nt, synthetic construct
  source 1..22: mol_type = other RNA
gcagcagcaagagcctggagcg

SEQ ID NO: 9032 - RNA, 22 nt, synthetic construct
  source 1..22: mol_type = other RNA
gcagcagctccagcagctgccg

SEQ ID NO: 9033 - RNA, 22 nt, synthetic construct
  source 1..22: mol_type = other RNA
gcagccaacagcacctcagcca

SEQ ID NO: 9034 - RNA, 22 nt, synthetic construct
  source 1..22: mol_type = other RNA
gcagccgccgatggcccgagta

SEQ ID NO: 9035 - RNA, 22 nt, synthetic construct
  source 1..22: mol_type = other RNA
gcagccgcttcaggtacctcgc

SEQ ID NO: 9036 - RNA, 22 nt, synthetic construct
  source 1..22: mol_type = other RNA
gcagcgggcgggaggctggaag

SEQ ID NO: 9037 - RNA, 22 nt, synthetic construct
  source 1..22: mol_type = other RNA
gcagctccagcagctgccgcgc

SEQ ID NO: 9038 - RNA, 22 nt, synthetic construct
  source 1..22: mol_type = other RNA
gcagctgccgcgcccgcagtgt

SEQ ID NO: 9039 - RNA, 22 nt, synthetic construct
  source 1..22: mol_type = other RNA
gcagctgctggagctgctgcac

SEQ ID NO: 9040 - RNA, 22 nt, synthetic construct
  source 1..22: mol_type = other RNA
gcagctggcccaaggaggcctg

SEQ ID NO: 9041 - RNA, 22 nt, synthetic construct
  source 1..22: mol_type = other RNA
gcagcttcttctggaaaaggcc

SEQ ID NO: 9042 - RNA, 22 nt, synthetic construct
  source 1..22: mol_type = other RNA
gcagcttggcgtcctccccaag

SEQ ID NO: 9043 - RNA, 22 nt, synthetic construct
  source 1..22: mol_type = other RNA
gcaggaagccatcttgcgcttc

SEQ ID NO: 9044 - RNA, 22 nt, synthetic construct
  source 1..22: mol_type = other RNA
gcaggacacgtatggtgccgag

SEQ ID NO: 9045 - RNA, 22 nt, synthetic construct
  source 1..22: mol_type = other RNA
gcaggaggaagctggggaaggc

SEQ ID NO: 9046 - RNA, 22 nt, synthetic construct
  source 1..22: mol_type = other RNA
gcaggatctgctcttctccctg

SEQ ID NO: 9047 - RNA, 22 nt, synthetic construct
  source 1..22: mol_type = other RNA
gcaggccaggctggagaggagc

SEQ ID NO: 9048 - RNA, 22 nt, synthetic construct
  source 1..22: mol_type = other RNA
gcaggccataggcatcccccgg

SEQ ID NO: 9049 - RNA, 22 nt, synthetic construct
  source 1..22: mol_type = other RNA
gcaggcccaggcatacgtgatg

SEQ ID NO: 9050 - RNA, 22 nt, synthetic construct
  source 1..22: mol_type = other RNA
gcaggcccggatggcatcctag

SEQ ID NO: 9051 - RNA, 22 nt, synthetic construct
  source 1..22: mol_type = other RNA
gcaggccgacatagagtcccgt

SEQ ID NO: 9052 - RNA, 22 nt, synthetic construct
  source 1..22: mol_type = other RNA
gcagggcctctgagagctggca

SEQ ID NO: 9053 - RNA, 22 nt, synthetic construct
  source 1..22: mol_type = other RNA
gcaggggacagagaagacaaag

SEQ ID NO: 9054 - RNA, 22 nt, synthetic construct
  source 1..22: mol_type = other RNA
gcagtacctagcattgacccca

SEQ ID NO: 9055 - RNA, 22 nt, synthetic construct
  source 1..22: mol_type = other RNA
gcagtgagccgggcctgggctt

SEQ ID NO: 9056 - RNA, 22 nt, synthetic construct
  source 1..22: mol_type = other RNA
gcagtgagcggtagaactgctc

SEQ ID NO: 9057 - RNA, 22 nt, synthetic construct
  source 1..22: mol_type = other RNA
gcagtgcagcagctccagcagc

SEQ ID NO: 9058 - RNA, 22 nt, synthetic construct
  source 1..22: mol_type = other RNA
gcagtgtccccggctgcagccg

SEQ ID NO: 9059 - RNA, 22 nt, synthetic construct
  source 1..22: mol_type = other RNA
gcagtgtgccagctctcagagg

SEQ ID NO: 9060 - RNA, 22 nt, synthetic construct
  source 1..22: mol_type = other RNA
gcagttctaccgctcactgcag

SEQ ID NO: 9061 - RNA, 22 nt, synthetic construct
  source 1..22: mol_type = other RNA
gcatacgtgatgcgctactttg

SEQ ID NO: 9062 - RNA, 22 nt, synthetic construct
  source 1..22: mol_type = other RNA
gcatcacgtatgcctgggcctg

SEQ ID NO: 9063 - RNA, 22 nt, synthetic construct
  source 1..22: mol_type = other RNA
gcatcaggaggcgtgaggcggg

SEQ ID NO: 9064 - RNA, 22 nt, synthetic construct
  source 1..22: mol_type = other RNA
gcatcccccggacggttcaagc

SEQ ID NO: 9065 - RNA, 22 nt, synthetic construct
  source 1..22: mol_type = other RNA
gcatcctagtggaggtggatct

SEQ ID NO: 9066 - RNA, 22 nt, synthetic construct
  source 1..22: mol_type = other RNA
gcattgaccccaaggaagaaga

SEQ ID NO: 9067 - RNA, 22 nt, synthetic construct
  source 1..22: mol_type = other RNA
gcattgcaggaggaagctgggg

SEQ ID NO: 9068 - RNA, 22 nt, synthetic construct
  source 1..22: mol_type = other RNA
gcatttgcccctctggattggg

SEQ ID NO: 9069 - RNA, 22 nt, synthetic construct
  source 1..22: mol_type = other RNA
gccaaaggcttagtccaacacc

SEQ ID NO: 9070 - RNA, 22 nt, synthetic construct
  source 1..22: mol_type = other RNA
gccaaattccagcctcctcggc

SEQ ID NO: 9071 - RNA, 22 nt, synthetic construct
  source 1..22: mol_type = other RNA
gccaacagcacctcagccaggc

SEQ ID NO: 9072 - RNA, 22 nt, synthetic construct
  source 1..22: mol_type = other RNA
gccaagacttctccctggacct

SEQ ID NO: 9073 - RNA, 22 nt, synthetic construct
  source 1..22: mol_type = other RNA
gccaagctgccctccacgctca

SEQ ID NO: 9074 - RNA, 22 nt, synthetic construct
  source 1..22: mol_type = other RNA
gccaagctggcctgggagctgg

SEQ ID NO: 9075 - RNA, 22 nt, synthetic construct
  source 1..22: mol_type = other RNA
gccacaagcccaggcccggctc

SEQ ID NO: 9076 - RNA, 22 nt, synthetic construct
  source 1..22: mol_type = other RNA
gccacagccctactttgtgccg

SEQ ID NO: 9077 - RNA, 22 nt, synthetic construct
  source 1..22: mol_type = other RNA
gccacagggcccccaggaagca

SEQ ID NO: 9078 - RNA, 22 nt, synthetic construct
  source 1..22: mol_type = other RNA
gccacatcttgaagagacctga

SEQ ID NO: 9079 - RNA, 22 nt, synthetic construct
  source 1..22: mol_type = other RNA
gccaccccggactgggcagaac

SEQ ID NO: 9080 - RNA, 22 nt, synthetic construct
  source 1..22: mol_type = other RNA
gccacgagtggctgtgggccca

SEQ ID NO: 9081 - RNA, 22 nt, synthetic construct
  source 1..22: mol_type = other RNA
gccacgctttctggctgggctg

SEQ ID NO: 9082 - RNA, 22 nt, synthetic construct
  source 1..22: mol_type = other RNA
gccactcagagccagccacagg

SEQ ID NO: 9083 - RNA, 22 nt, synthetic construct
  source 1..22: mol_type = other RNA
gccactcgtggcggccgatgag

SEQ ID NO: 9084 - RNA, 22 nt, synthetic construct
  source 1..22: mol_type = other RNA
gccacttcttctcagtcacagc

SEQ ID NO: 9085 - RNA, 22 nt, synthetic construct
  source 1..22: mol_type = other RNA
gccagaaagcgtggcacgccct

SEQ ID NO: 9086 - RNA, 22 nt, synthetic construct
  source 1..22: mol_type = other RNA
gccagccacagggcccccagga

SEQ ID NO: 9087 - RNA, 22 nt, synthetic construct
  source 1..22: mol_type = other RNA
gccagctcggactctgcggccc

SEQ ID NO: 9088 - RNA, 22 nt, synthetic construct
  source 1..22: mol_type = other RNA
gccagctctcagaggccctgct

SEQ ID NO: 9089 - RNA, 22 nt, synthetic construct
  source 1..22: mol_type = other RNA
gccagctgccgttctgcccagt

SEQ ID NO: 9090 - RNA, 22 nt, synthetic construct
  source 1..22: mol_type = other RNA
gccagcttggccagctctgcca

SEQ ID NO: 9091 - RNA, 22 nt, synthetic construct
  source 1..22: mol_type = other RNA
gccaggcctccttgggccagct

SEQ ID NO: 9092 - RNA, 22 nt, synthetic construct
  source 1..22: mol_type = other RNA
gccaggctggagaggagcagca

SEQ ID NO: 9093 - RNA, 22 nt, synthetic construct
  source 1..22: mol_type = other RNA
gccaggggcgtgtcagggtggg

SEQ ID NO: 9094 - RNA, 22 nt, synthetic construct
  source 1..22: mol_type = other RNA
gccagtgctgcggaggtccagg

SEQ ID NO: 9095 - RNA, 22 nt, synthetic construct
  source 1..22: mol_type = other RNA
gccagttcccgctccaggctct

SEQ ID NO: 9096 - RNA, 22 nt, synthetic construct
  source 1..22: mol_type = other RNA
gccagttgtcatagggcctctt

SEQ ID NO: 9097 - RNA, 22 nt, synthetic construct
  source 1..22: mol_type = other RNA
gccataggcatcccccggacgg

SEQ ID NO: 9098 - RNA, 22 nt, synthetic construct
  source 1..22: mol_type = other RNA
gccatcgcccaggtcctcacgt

SEQ ID NO: 9099 - RNA, 22 nt, synthetic construct
  source 1..22: mol_type = other RNA
gccatcggcggctgcctcggtg

SEQ ID NO: 9100 - RNA, 22 nt, synthetic construct
  source 1..22: mol_type = other RNA
gccatcttgcgcttccagctcc

SEQ ID NO: 9101 - RNA, 22 nt, synthetic construct
  source 1..22: mol_type = other RNA
gccattgcttgaaccgtccggg

SEQ ID NO: 9102 - RNA, 22 nt, synthetic construct
  source 1..22: mol_type = other RNA
gcccaacacaaggatgtctctt

SEQ ID NO: 9103 - RNA, 22 nt, synthetic construct
  source 1..22: mol_type = other RNA
gcccaaggaggcctggctgagg

SEQ ID NO: 9104 - RNA, 22 nt, synthetic construct
  source 1..22: mol_type = other RNA
gcccaatagctcttgccctgac

SEQ ID NO: 9105 - RNA, 22 nt, synthetic construct
  source 1..22: mol_type = other RNA
gcccacagccactcgtggcggc

SEQ ID NO: 9106 - RNA, 22 nt, synthetic construct
  source 1..22: mol_type = other RNA
gcccacgaggccgaggaggctg

SEQ ID NO: 9107 - RNA, 22 nt, synthetic construct
  source 1..22: mol_type = other RNA
gcccagaaaagagaggcggccg

SEQ ID NO: 9108 - RNA, 22 nt, synthetic construct
  source 1..22: mol_type = other RNA
gcccagcacagcaatcactcgt

SEQ ID NO: 9109 - RNA, 22 nt, synthetic construct
  source 1..22: mol_type = other RNA
gcccagcaggccgacatagagt

SEQ ID NO: 9110 - RNA, 22 nt, synthetic construct
  source 1..22: mol_type = other RNA
gcccagccagaaagcgtggcac

SEQ ID NO: 9111 - RNA, 22 nt, synthetic construct
  source 1..22: mol_type = other RNA
gcccagctcccaggccagcttg

SEQ ID NO: 9112 - RNA, 22 nt, synthetic construct
  source 1..22: mol_type = other RNA
gcccaggcatacgtgatgcgct

SEQ ID NO: 9113 - RNA, 22 nt, synthetic construct
  source 1..22: mol_type = other RNA
gcccagggagaagagcagatcc

SEQ ID NO: 9114 - RNA, 22 nt, synthetic construct
  source 1..22: mol_type = other RNA
gcccaggtcctcacgtctgcgg

SEQ ID NO: 9115 - RNA, 22 nt, synthetic construct
  source 1..22: mol_type = other RNA
gcccagtacatgtgcatcagga

SEQ ID NO: 9116 - RNA, 22 nt, synthetic construct
  source 1..22: mol_type = other RNA
gcccagtccggggtggccagtt

SEQ ID NO: 9117 - RNA, 22 nt, synthetic construct
  source 1..22: mol_type = other RNA
gccccagcccaatagctcttgc

SEQ ID NO: 9118 - RNA, 22 nt, synthetic construct
  source 1..22: mol_type = other RNA
gcccccaggaagcattgcagga

SEQ ID NO: 9119 - RNA, 22 nt, synthetic construct
  source 1..22: mol_type = other RNA
gcccctcaccccacctgaaacg

SEQ ID NO: 9120 - RNA, 22 nt, synthetic construct
  source 1..22: mol_type = other RNA
gcccctctggattggggagcct

SEQ ID NO: 9121 - RNA, 22 nt, synthetic construct
  source 1..22: mol_type = other RNA
gcccctggcctttgcagagccg

SEQ ID NO: 9122 - RNA, 22 nt, synthetic construct
  source 1..22: mol_type = other RNA
gcccgagtagggctcccaggca

SEQ ID NO: 9123 - RNA, 22 nt, synthetic construct
  source 1..22: mol_type = other RNA
gcccgcaggcccggatggcatc

SEQ ID NO: 9124 - RNA, 22 nt, synthetic construct
  source 1..22: mol_type = other RNA
gcccgcagtgtccccggctgca

SEQ ID NO: 9125 - RNA, 22 nt, synthetic construct
  source 1..22: mol_type = other RNA
gcccgccgcctccaaggccttg

SEQ ID NO: 9126 - RNA, 22 nt, synthetic construct
  source 1..22: mol_type = other RNA
gcccgcggtgggtgttggacta

SEQ ID NO: 9127 - RNA, 22 nt, synthetic construct
  source 1..22: mol_type = other RNA
gcccgctgcctgggagccctac

SEQ ID NO: 9128 - RNA, 22 nt, synthetic construct
  source 1..22: mol_type = other RNA
gcccggatggcatcctagtgga

SEQ ID NO: 9129 - RNA, 22 nt, synthetic construct
  source 1..22: mol_type = other RNA
gcccggcacaaagtagggctgt

SEQ ID NO: 9130 - RNA, 22 nt, synthetic construct
  source 1..22: mol_type = other RNA
gccctactcgggccatcggcgg

SEQ ID NO: 9131 - RNA, 22 nt, synthetic construct
  source 1..22: mol_type = other RNA
gccctactttgtgccgggcagt

SEQ ID NO: 9132 - RNA, 22 nt, synthetic construct
  source 1..22: mol_type = other RNA
gccctatgacaactggctggag

SEQ ID NO: 9133 - RNA, 22 nt, synthetic construct
  source 1..22: mol_type = other RNA
gccctatttgagctgtccggct

SEQ ID NO: 9134 - RNA, 22 nt, synthetic construct
  source 1..22: mol_type = other RNA
gccctccacgctcacgggactc

SEQ ID NO: 9135 - RNA, 22 nt, synthetic construct
  source 1..22: mol_type = other RNA
gccctccagccagttgtcatag

SEQ ID NO: 9136 - RNA, 22 nt, synthetic construct
  source 1..22: mol_type = other RNA
gccctgaccagctttgcccagc

SEQ ID NO: 9137 - RNA, 22 nt, synthetic construct
  source 1..22: mol_type = other RNA
gccctgacgctcctccgggacc

SEQ ID NO: 9138 - RNA, 22 nt, synthetic construct
  source 1..22: mol_type = other RNA
gccctgctggagcttggggagg

SEQ ID NO: 9139 - RNA, 22 nt, synthetic construct
  source 1..22: mol_type = other RNA
gccctggcagagctggccaagc

SEQ ID NO: 9140 - RNA, 22 nt, synthetic construct
  source 1..22: mol_type = other RNA
gccctgtggctggctctgagtg

SEQ ID NO: 9141 - RNA, 22 nt, synthetic construct
  source 1..22: mol_type = other RNA
gccgacatagagtcccgtgagc

SEQ ID NO: 9142 - RNA, 22 nt, synthetic construct
  source 1..22: mol_type = other RNA
gccgacgccctatttgagctgt

SEQ ID NO: 9143 - RNA, 22 nt, synthetic construct
  source 1..22: mol_type = other RNA
gccgaggaggctggaatttggc

SEQ ID NO: 9144 - RNA, 22 nt, synthetic construct
  source 1..22: mol_type = other RNA
gccgatgaggttttcagccaca

SEQ ID NO: 9145 - RNA, 22 nt, synthetic construct
  source 1..22: mol_type = other RNA
gccgatggcccgagtagggctc

SEQ ID NO: 9146 - RNA, 22 nt, synthetic construct
  source 1..22: mol_type = other RNA
gccgcagacatcaaagtaccct

SEQ ID NO: 9147 - RNA, 22 nt, synthetic construct
  source 1..22: mol_type = other RNA
gccgcagagtccgagctggcct

SEQ ID NO: 9148 - RNA, 22 nt, synthetic construct
  source 1..22: mol_type = other RNA
gccgccacgagtggctgtgggc

SEQ ID NO: 9149 - RNA, 22 nt, synthetic construct
  source 1..22: mol_type = other RNA
gccgccgatggcccgagtaggg

SEQ ID NO: 9150 - RNA, 22 nt, synthetic construct
  source 1..22: mol_type = other RNA
gccgccggtgctccttggcagc

SEQ ID NO: 9151 - RNA, 22 nt, synthetic construct
  source 1..22: mol_type = other RNA
gccgcctccaaggccttgccca

SEQ ID NO: 9152 - RNA, 22 nt, synthetic construct
  source 1..22: mol_type = other RNA
gccgcctctcttttctgggcac

SEQ ID NO: 9153 - RNA, 22 nt, synthetic construct
  source 1..22: mol_type = other RNA
gccgcctggtccagagcctgag

SEQ ID NO: 9154 - RNA, 22 nt, synthetic construct
  source 1..22: mol_type = other RNA
gccgcgtgagacacgagtgatt

SEQ ID NO: 9155 - RNA, 22 nt, synthetic construct
  source 1..22: mol_type = other RNA
gccgcttcaggtacctcgcaag

SEQ ID NO: 9156 - RNA, 22 nt, synthetic construct
  source 1..22: mol_type = other RNA
gccggacagctcaaatagggcg

SEQ ID NO: 9157 - RNA, 22 nt, synthetic construct
  source 1..22: mol_type = other RNA
gccggccttttccagaagaagc

SEQ ID NO: 9158 - RNA, 22 nt, synthetic construct
  source 1..22: mol_type = other RNA
gccggcttccccagtacgactt

SEQ ID NO: 9159 - RNA, 22 nt, synthetic construct
  source 1..22: mol_type = other RNA
gccgggcagtgtgccagctctc

SEQ ID NO: 9160 - RNA, 22 nt, synthetic construct
  source 1..22: mol_type = other RNA
gccgggctgtgaggaggagggt

SEQ ID NO: 9161 - RNA, 22 nt, synthetic construct
  source 1..22: mol_type = other RNA
gccggggagctcctgtaccacg

SEQ ID NO: 9162 - RNA, 22 nt, synthetic construct
  source 1..22: mol_type = other RNA
gccggtcccggaggagcgtcag

SEQ ID NO: 9163 - RNA, 22 nt, synthetic construct
  source 1..22: mol_type = other RNA
gccggtccgcacgtgctgtgca

SEQ ID NO: 9164 - RNA, 22 nt, synthetic construct
  source 1..22: mol_type = other RNA
gccggtgctccttggcagccaa

SEQ ID NO: 9165 - RNA, 22 nt, synthetic construct
  source 1..22: mol_type = other RNA
gccggtggagcagttctaccgc

SEQ ID NO: 9166 - RNA, 22 nt, synthetic construct
  source 1..22: mol_type = other RNA
gccgtctaggatgagcagaacg

SEQ ID NO: 9167 - RNA, 22 nt, synthetic construct
  source 1..22: mol_type = other RNA
gccgtgcagccctcgacagccc

SEQ ID NO: 9168 - RNA, 22 nt, synthetic construct
  source 1..22: mol_type = other RNA
gccgttctgcccagtccggggt

SEQ ID NO: 9169 - RNA, 22 nt, synthetic construct
  source 1..22: mol_type = other RNA
gcctatggcctgcaggatctgc

SEQ ID NO: 9170 - RNA, 22 nt, synthetic construct
  source 1..22: mol_type = other RNA
gcctcacgcctcctgatgcaca

SEQ ID NO: 9171 - RNA, 22 nt, synthetic construct
  source 1..22: mol_type = other RNA
gcctccaaggccttgcccagta

SEQ ID NO: 9172 - RNA, 22 nt, synthetic construct
  source 1..22: mol_type = other RNA
gcctcctgatgcacatgtactg

SEQ ID NO: 9173 - RNA, 22 nt, synthetic construct
  source 1..22: mol_type = other RNA
gcctccttgggccagctgccgt

SEQ ID NO: 9174 - RNA, 22 nt, synthetic construct
  source 1..22: mol_type = other RNA
gcctcggtggacaggaagcaga

SEQ ID NO: 9175 - RNA, 22 nt, synthetic construct
  source 1..22: mol_type = other RNA
gcctcgtgggactcagctgtgt

SEQ ID NO: 9176 - RNA, 22 nt, synthetic construct
  source 1..22: mol_type = other RNA
gcctcgtgggcgcagtgcagca

SEQ ID NO: 9177 - RNA, 22 nt, synthetic construct
  source 1..22: mol_type = other RNA
gcctctcacatacccccaccct

SEQ ID NO: 9178 - RNA, 22 nt, synthetic construct
  source 1..22: mol_type = other RNA
gcctctcttttctgggcacccg

SEQ ID NO: 9179 - RNA, 22 nt, synthetic construct
  source 1..22: mol_type = other RNA
gcctctgagagctggcacactg

SEQ ID NO: 9180 - RNA, 22 nt, synthetic construct
  source 1..22: mol_type = other RNA
gcctcttcttccttggggtcaa

SEQ ID NO: 9181 - RNA, 22 nt, synthetic construct
  source 1..22: mol_type = other RNA
gcctgagcaaggccgacgccct

SEQ ID NO: 9182 - RNA, 22 nt, synthetic construct
  source 1..22: mol_type = other RNA
gcctgcaccagatccacctcca

SEQ ID NO: 9183 - RNA, 22 nt, synthetic construct
  source 1..22: mol_type = other RNA
gcctgcaggatctgctcttctc

SEQ ID NO: 9184 - RNA, 22 nt, synthetic construct
  source 1..22: mol_type = other RNA
gcctgcgggctcggcaccatac

SEQ ID NO: 9185 - RNA, 22 nt, synthetic construct
  source 1..22: mol_type = other RNA
gcctgctccatggagaagccgg

SEQ ID NO: 9186 - RNA, 22 nt, synthetic construct
  source 1..22: mol_type = other RNA
gcctgctgggccgtgcagccct

SEQ ID NO: 9187 - RNA, 22 nt, synthetic construct
  source 1..22: mol_type = other RNA
gcctggagcgggaactggccac

SEQ ID NO: 9188 - RNA, 22 nt, synthetic construct
  source 1..22: mol_type = other RNA
gcctggcctgcaccagatccac

SEQ ID NO: 9189 - RNA, 22 nt, synthetic construct
  source 1..22: mol_type = other RNA
gcctggctgaggtgctgttggc

SEQ ID NO: 9190 - RNA, 22 nt, synthetic construct
  source 1..22: mol_type = other RNA
gcctgggagccctactcgggcc

SEQ ID NO: 9191 - RNA, 22 nt, synthetic construct
  source 1..22: mol_type = other RNA
gcctgggagctgggccgcagac

SEQ ID NO: 9192 - RNA, 22 nt, synthetic construct
  source 1..22: mol_type = other RNA
gcctgggcctgctccatggaga

SEQ ID NO: 9193 - RNA, 22 nt, synthetic construct
  source 1..22: mol_type = other RNA
gcctgggcttgtggccggcttc

SEQ ID NO: 9194 - RNA, 22 nt, synthetic construct
  source 1..22: mol_type = other RNA
gcctggtccagagcctgagcaa

SEQ ID NO: 9195 - RNA, 22 nt, synthetic construct
  source 1..22: mol_type = other RNA
gccttccccagcttcctcctgc

SEQ ID NO: 9196 - RNA, 22 nt, synthetic construct
  source 1..22: mol_type = other RNA
gccttgcccagtacatgtgcat

SEQ ID NO: 9197 - RNA, 22 nt, synthetic construct
  source 1..22: mol_type = other RNA
gccttgctcaggctctggacca

SEQ ID NO: 9198 - RNA, 22 nt, synthetic construct
  source 1..22: mol_type = other RNA
gccttggaggcggcgggccaag

SEQ ID NO: 9199 - RNA, 22 nt, synthetic construct
  source 1..22: mol_type = other RNA
gcctttgcagagccggtggagc

SEQ ID NO: 9200 - RNA, 22 nt, synthetic construct
  source 1..22: mol_type = other RNA
gcctttggccatcgcccaggtc

SEQ ID NO: 9201 - RNA, 22 nt, synthetic construct
  source 1..22: mol_type = other RNA
gccttttccagaagaagctgct

SEQ ID NO: 9202 - RNA, 22 nt, synthetic construct
  source 1..22: mol_type = other RNA
gcgaaatcaaggacaaggagct

SEQ ID NO: 9203 - RNA, 22 nt, synthetic construct
  source 1..22: mol_type = other RNA
gcgaggtacctgaagcggctgc

SEQ ID NO: 9204 - RNA, 22 nt, synthetic construct
  source 1..22: mol_type = other RNA
gcgatggccaaaggcttagtcc

SEQ ID NO: 9205 - RNA, 22 nt, synthetic construct
  source 1..22: mol_type = other RNA
gcgcaagatggcttcctgcaca

SEQ ID NO: 9206 - RNA, 22 nt, synthetic construct
  source 1..22: mol_type = other RNA
gcgcagtgcagcagctccagca

SEQ ID NO: 9207 - RNA, 22 nt, synthetic construct
  source 1..22: mol_type = other RNA
gcgcatcacgtatgcctgggcc

SEQ ID NO: 9208 - RNA, 22 nt, synthetic construct
  source 1..22: mol_type = other RNA
gcgcggcagctgctggagctgc

SEQ ID NO: 9209 - RNA, 22 nt, synthetic construct
  source 1..22: mol_type = other RNA
gcgctactttgagagctcaggg

SEQ ID NO: 9210 - RNA, 22 nt, synthetic construct
  source 1..22: mol_type = other RNA
gcgcttccagctcctcgaagcc

SEQ ID NO: 9211 - RNA, 22 nt, synthetic construct
  source 1..22: mol_type = other RNA
gcggaggtccagggagaagtct

SEQ ID NO: 9212 - RNA, 22 nt, synthetic construct
  source 1..22: mol_type = other RNA
gcggatgggaactggtcctcct

SEQ ID NO: 9213 - RNA, 22 nt, synthetic construct
  source 1..22: mol_type = other RNA
gcggcagctgctggagctgctg

SEQ ID NO: 9214 - RNA, 22 nt, synthetic construct
  source 1..22: mol_type = other RNA
gcggcccgcggtgggtgttgga

SEQ ID NO: 9215 - RNA, 22 nt, synthetic construct
  source 1..22: mol_type = other RNA
gcggccgatgaggttttcagcc

SEQ ID NO: 9216 - RNA, 22 nt, synthetic construct
  source 1..22: mol_type = other RNA
gcggccgcgtgagacacgagtg

SEQ ID NO: 9217 - RNA, 22 nt, synthetic construct
  source 1..22: mol_type = other RNA
gcggccggggagctcctgtacc

SEQ ID NO: 9218 - RNA, 22 nt, synthetic construct
  source 1..22: mol_type = other RNA
gcggcgggccaagacttctccc

SEQ ID NO: 9219 - RNA, 22 nt, synthetic construct
  source 1..22: mol_type = other RNA
gcggctgcagccggggacactg

SEQ ID NO: 9220 - RNA, 22 nt, synthetic construct
  source 1..22: mol_type = other RNA
gcggctgcctcggtggacagga

SEQ ID NO: 9221 - RNA, 22 nt, synthetic construct
  source 1..22: mol_type = other RNA
gcgggaactggccaccccggac

SEQ ID NO: 9222 - RNA, 22 nt, synthetic construct
  source 1..22: mol_type = other RNA
gcgggagctccttgtccttgat

SEQ ID NO: 9223 - RNA, 22 nt, synthetic construct
  source 1..22: mol_type = other RNA
gcgggaggctggaagatcagcc

SEQ ID NO: 9224 - RNA, 22 nt, synthetic construct
  source 1..22: mol_type = other RNA
gcgggccaagacttctccctgg

SEQ ID NO: 9225 - RNA, 22 nt, synthetic construct
  source 1..22: mol_type = other RNA
gcgggccgcagagtccgagctg

SEQ ID NO: 9226 - RNA, 22 nt, synthetic construct
  source 1..22: mol_type = other RNA
gcgggcgggaggctggaagatc

SEQ ID NO: 9227 - RNA, 22 nt, synthetic construct
  source 1..22: mol_type = other RNA
gcgggctcggcaccatacgtgt

SEQ ID NO: 9228 - RNA, 22 nt, synthetic construct
  source 1..22: mol_type = other RNA
gcgggtgcccagaaaagagagg

SEQ ID NO: 9229 - RNA, 22 nt, synthetic construct
  source 1..22: mol_type = other RNA
gcggtagaactgctccaccggc

SEQ ID NO: 9230 - RNA, 22 nt, synthetic construct
  source 1..22: mol_type = other RNA
gcggtcaggtctcttcaagatg

SEQ ID NO: 9231 - RNA, 22 nt, synthetic construct
  source 1..22: mol_type = other RNA
gcggtgggtgttggactaagcc

SEQ ID NO: 9232 - RNA, 22 nt, synthetic construct
  source 1..22: mol_type = other RNA
gcgtcagggctctgtcttggtg

SEQ ID NO: 9233 - RNA, 22 nt, synthetic construct
  source 1..22: mol_type = other RNA
gcgtcctccccaagctccagca

SEQ ID NO: 9234 - RNA, 22 nt, synthetic construct
  source 1..22: mol_type = other RNA
gcgtcggccttgctcaggctct

SEQ ID NO: 9235 - RNA, 22 nt, synthetic construct
  source 1..22: mol_type = other RNA
gcgtgagacacgagtgattgct

SEQ ID NO: 9236 - RNA, 22 nt, synthetic construct
  source 1..22: mol_type = other RNA
gcgtgaggcgggtgcccagaaa

SEQ ID NO: 9237 - RNA, 22 nt, synthetic construct
  source 1..22: mol_type = other RNA
gcgtgccacgctttctggctgg

SEQ ID NO: 9238 - RNA, 22 nt, synthetic construct
  source 1..22: mol_type = other RNA
gcgtggagggcagcttggcgtc

SEQ ID NO: 9239 - RNA, 22 nt, synthetic construct
  source 1..22: mol_type = other RNA
gcgtggcacgccctccagccag

SEQ ID NO: 9240 - RNA, 22 nt, synthetic construct
  source 1..22: mol_type = other RNA
gcgtgtcagggtgggggtatgt

SEQ ID NO: 9241 - RNA, 22 nt, synthetic construct
  source 1..22: mol_type = other RNA
gcgttctgctcatcctagacgg

SEQ ID NO: 9242 - RNA, 22 nt, synthetic construct
  source 1..22: mol_type = other RNA
gctactttgagagctcagggat

SEQ ID NO: 9243 - RNA, 22 nt, synthetic construct
  source 1..22: mol_type = other RNA
gctaggtactgcgggagctcct

SEQ ID NO: 9244 - RNA, 22 nt, synthetic construct
  source 1..22: mol_type = other RNA
gctattgggctggggcagtgag

SEQ ID NO: 9245 - RNA, 22 nt, synthetic construct
  source 1..22: mol_type = other RNA
gctcaaatagggcgtcggcctt

SEQ ID NO: 9246 - RNA, 22 nt, synthetic construct
  source 1..22: mol_type = other RNA
gctcacgggactctatgtcggc

SEQ ID NO: 9247 - RNA, 22 nt, synthetic construct
  source 1..22: mol_type = other RNA
gctcactgcaggacacgtatgg

SEQ ID NO: 9248 - RNA, 22 nt, synthetic construct
  source 1..22: mol_type = other RNA
gctcactgccccagcccaatag

SEQ ID NO: 9249 - RNA, 22 nt, synthetic construct
  source 1..22: mol_type = other RNA
gctcaggctctggaccaggcgg

SEQ ID NO: 9250 - RNA, 22 nt, synthetic construct
  source 1..22: mol_type = other RNA
gctcagggatgacagagcacca

SEQ ID NO: 9251 - RNA, 22 nt, synthetic construct
  source 1..22: mol_type = other RNA
gctcatcctagacggcttcgag

SEQ ID NO: 9252 - RNA, 22 nt, synthetic construct
  source 1..22: mol_type = other RNA
gctccaccggctctgcaaaggc

SEQ ID NO: 9253 - RNA, 22 nt, synthetic construct
  source 1..22: mol_type = other RNA
gctccagcagggcctctgagag

SEQ ID NO: 9254 - RNA, 22 nt, synthetic construct
  source 1..22: mol_type = other RNA
gctccaggctcttgctgctgct

SEQ ID NO: 9255 - RNA, 22 nt, synthetic construct
  source 1..22: mol_type = other RNA
gctccatggagaagccggacag

SEQ ID NO: 9256 - RNA, 22 nt, synthetic construct
  source 1..22: mol_type = other RNA
gctcccaggccagcttggccag

SEQ ID NO: 9257 - RNA, 22 nt, synthetic construct
  source 1..22: mol_type = other RNA
gctccccaatccagaggggcaa

SEQ ID NO: 9258 - RNA, 22 nt, synthetic construct
  source 1..22: mol_type = other RNA
gctccccggccgcctctctttt

SEQ ID NO: 9259 - RNA, 22 nt, synthetic construct
  source 1..22: mol_type = other RNA
gctcccgcagtacctagcattg

SEQ ID NO: 9260 - RNA, 22 nt, synthetic construct
  source 1..22: mol_type = other RNA
gctccgaggttgcaccctcctc

SEQ ID NO: 9261 - RNA, 22 nt, synthetic construct
  source 1..22: mol_type = other RNA
gctcctccgggaccggccactt

SEQ ID NO: 9262 - RNA, 22 nt, synthetic construct
  source 1..22: mol_type = other RNA
gctcctcgaagccgtctaggat

SEQ ID NO: 9263 - RNA, 22 nt, synthetic construct
  source 1..22: mol_type = other RNA
gctcctctccagcctggcctgc

SEQ ID NO: 9264 - RNA, 22 nt, synthetic construct
  source 1..22: mol_type = other RNA
gctcctgtaccacgtgctgcca

SEQ ID NO: 9265 - RNA, 22 nt, synthetic construct
  source 1..22: mol_type = other RNA
gctccttggcagccaacagcac

SEQ ID NO: 9266 - RNA, 22 nt, synthetic construct
  source 1..22: mol_type = other RNA
gctccttgtccttgatttcgcc

SEQ ID NO: 9267 - RNA, 22 nt, synthetic construct
  source 1..22: mol_type = other RNA
gctcggcaccatacgtgtcctg

SEQ ID NO: 9268 - RNA, 22 nt, synthetic construct
  source 1..22: mol_type = other RNA
gctctcaaagtagcgcatcacg

SEQ ID NO: 9269 - RNA, 22 nt, synthetic construct
  source 1..22: mol_type = other RNA
gctctcagaggccctgctggag

SEQ ID NO: 9270 - RNA, 22 nt, synthetic construct
  source 1..22: mol_type = other RNA
gctctgagtggcgaaatcaagg

SEQ ID NO: 9271 - RNA, 22 nt, synthetic construct
  source 1..22: mol_type = other RNA
gctctgcaaaggccaggggcgt

SEQ ID NO: 9272 - RNA, 22 nt, synthetic construct
  source 1..22: mol_type = other RNA
gctctgtcatccctgagctctc

SEQ ID NO: 9273 - RNA, 22 nt, synthetic construct
  source 1..22: mol_type = other RNA
gctctgtcttggtgctctgtca

SEQ ID NO: 9274 - RNA, 22 nt, synthetic construct
  source 1..22: mol_type = other RNA
gctcttctccctgggcccacag

SEQ ID NO: 9275 - RNA, 22 nt, synthetic construct
  source 1..22: mol_type = other RNA
gctcttgccctgaccagctttg

SEQ ID NO: 9276 - RNA, 22 nt, synthetic construct
  source 1..22: mol_type = other RNA
gctcttgctgctgctcctctcc

SEQ ID NO: 9277 - RNA, 22 nt, synthetic construct
  source 1..22: mol_type = other RNA
gctgaaaacctcatcggccgcc

SEQ ID NO: 9278 - RNA, 22 nt, synthetic construct
  source 1..22: mol_type = other RNA
gctgaggtgctgttggctgcca

SEQ ID NO: 9279 - RNA, 22 nt, synthetic construct
  source 1..22: mol_type = other RNA
gctgagtcccacgaggctcccc

SEQ ID NO: 9280 - RNA, 22 nt, synthetic construct
  source 1..22: mol_type = other RNA
gctgatcttccagcctcccgcc

SEQ ID NO: 9281 - RNA, 22 nt, synthetic construct
  source 1..22: mol_type = other RNA
gctgcacggcccagcaggccga

SEQ ID NO: 9282 - RNA, 22 nt, synthetic construct
  source 1..22: mol_type = other RNA
gctgcactgcgcccacgaggcc

SEQ ID NO: 9283 - RNA, 22 nt, synthetic construct
  source 1..22: mol_type = other RNA
gctgcagccgcttcaggtacct

SEQ ID NO: 9284 - RNA, 22 nt, synthetic construct
  source 1..22: mol_type = other RNA
gctgcagccggggacactgcgg

SEQ ID NO: 9285 - RNA, 22 nt, synthetic construct
  source 1..22: mol_type = other RNA
gctgccaaattccagcctcctc

SEQ ID NO: 9286 - RNA, 22 nt, synthetic construct
  source 1..22: mol_type = other RNA
gctgccaaggagcaccggcggc

SEQ ID NO: 9287 - RNA, 22 nt, synthetic construct
  source 1..22: mol_type = other RNA
gctgccctccacgctcacggga

SEQ ID NO: 9288 - RNA, 22 nt, synthetic construct
  source 1..22: mol_type = other RNA
gctgccgttctgcccagtccgg

SEQ ID NO: 9289 - RNA, 22 nt, synthetic construct
  source 1..22: mol_type = other RNA
gctgcctcggtggacaggaagc

SEQ ID NO: 9290 - RNA, 22 nt, synthetic construct
  source 1..22: mol_type = other RNA
gctgcctgggagccctactcgg

SEQ ID NO: 9291 - RNA, 22 nt, synthetic construct
  source 1..22: mol_type = other RNA
gctgcggaggtccagggagaag

SEQ ID NO: 9292 - RNA, 22 nt, synthetic construct
  source 1..22: mol_type = other RNA
gctgctccgaggttgcaccctc

SEQ ID NO: 9293 - RNA, 22 nt, synthetic construct
  source 1..22: mol_type = other RNA
gctgctcctctccagcctggcc

SEQ ID NO: 9294 - RNA, 22 nt, synthetic construct
  source 1..22: mol_type = other RNA
gctgctgcactgcgcccacgag

SEQ ID NO: 9295 - RNA, 22 nt, synthetic construct
  source 1..22: mol_type = other RNA
gctgctgctcctctccagcctg

SEQ ID NO: 9296 - RNA, 22 nt, synthetic construct
  source 1..22: mol_type = other RNA
gctgctggagctgctgcactgc

SEQ ID NO: 9297 - RNA, 22 nt, synthetic construct
  source 1..22: mol_type = other RNA
gctgctggccggccttttccag

SEQ ID NO: 9298 - RNA, 22 nt, synthetic construct
  source 1..22: mol_type = other RNA
gctggaagatcagcccagccag

SEQ ID NO: 9299 - RNA, 22 nt, synthetic construct
  source 1..22: mol_type = other RNA
gctggaagcgcaagatggcttc

SEQ ID NO: 9300 - RNA, 22 nt, synthetic construct
  source 1..22: mol_type = other RNA
gctggaatttggcagcacgtgg

SEQ ID NO: 9301 - RNA, 22 nt, synthetic construct
  source 1..22: mol_type = other RNA
gctggagaggagcagcagcaag

SEQ ID NO: 9302 - RNA, 22 nt, synthetic construct
  source 1..22: mol_type = other RNA
gctggagctgctgcactgcgcc

SEQ ID NO: 9303 - RNA, 22 nt, synthetic construct
  source 1..22: mol_type = other RNA
gctggagcttggggaggacgcc

SEQ ID NO: 9304 - RNA, 22 nt, synthetic construct
  source 1..22: mol_type = other RNA
gctggagggcgtgccacgcttt

SEQ ID NO: 9305 - RNA, 22 nt, synthetic construct
  source 1..22: mol_type = other RNA
gctggcacactgcccggcacaa

SEQ ID NO: 9306 - RNA, 22 nt, synthetic construct
  source 1..22: mol_type = other RNA
gctggccaagctggcctgggag

SEQ ID NO: 9307 - RNA, 22 nt, synthetic construct
  source 1..22: mol_type = other RNA
gctggcccaaggaggcctggct

SEQ ID NO: 9308 - RNA, 22 nt, synthetic construct
  source 1..22: mol_type = other RNA
gctggccggccttttccagaag

SEQ ID NO: 9309 - RNA, 22 nt, synthetic construct
  source 1..22: mol_type = other RNA
gctggccttccccagcttcctc

SEQ ID NO: 9310 - RNA, 22 nt, synthetic construct
  source 1..22: mol_type = other RNA
gctggctctgagtggcgaaatc

SEQ ID NO: 9311 - RNA, 22 nt, synthetic construct
  source 1..22: mol_type = other RNA
gctgggcaaagctggtcagggc

SEQ ID NO: 9312 - RNA, 22 nt, synthetic construct
  source 1..22: mol_type = other RNA
gctgggccgcagacatcaaagt

SEQ ID NO: 9313 - RNA, 22 nt, synthetic construct
  source 1..22: mol_type = other RNA
gctgggccgtgcagccctcgac

SEQ ID NO: 9314 - RNA, 22 nt, synthetic construct
  source 1..22: mol_type = other RNA
gctgggctgatcttccagcctc

SEQ ID NO: 9315 - RNA, 22 nt, synthetic construct
  source 1..22: mol_type = other RNA
gctggggaaggccagctcggac

SEQ ID NO: 9316 - RNA, 22 nt, synthetic construct
  source 1..22: mol_type = other RNA
gctggggcagtgagccgggcct

SEQ ID NO: 9317 - RNA, 22 nt, synthetic construct
  source 1..22: mol_type = other RNA
gctggtcagggcaagagctatt

SEQ ID NO: 9318 - RNA, 22 nt, synthetic construct
  source 1..22: mol_type = other RNA
gctgtccggcttctccatggag

SEQ ID NO: 9319 - RNA, 22 nt, synthetic construct
  source 1..22: mol_type = other RNA
gctgtcgagggctgcacggccc

SEQ ID NO: 9320 - RNA, 22 nt, synthetic construct
  source 1..22: mol_type = other RNA
gctgtgactgagaagaagtggc

SEQ ID NO: 9321 - RNA, 22 nt, synthetic construct
  source 1..22: mol_type = other RNA
gctgtgaggaggagggtgcaac

SEQ ID NO: 9322 - RNA, 22 nt, synthetic construct
  source 1..22: mol_type = other RNA
gctgtgcaggaagccatcttgc

SEQ ID NO: 9323 - RNA, 22 nt, synthetic construct
  source 1..22: mol_type = other RNA
gctgtgctgggcaaagctggtc

SEQ ID NO: 9324 - RNA, 22 nt, synthetic construct
  source 1..22: mol_type = other RNA
gctgtggctgtgactgagaaga

SEQ ID NO: 9325 - RNA, 22 nt, synthetic construct
  source 1..22: mol_type = other RNA
gctgtgggcccagggagaagag

SEQ ID NO: 9326 - RNA, 22 nt, synthetic construct
  source 1..22: mol_type = other RNA
gctgtgtcacccgtttcaggtg

SEQ ID NO: 9327 - RNA, 22 nt, synthetic construct
  source 1..22: mol_type = other RNA
gctgttggctgccaaggagcac

SEQ ID NO: 9328 - RNA, 22 nt, synthetic construct
  source 1..22: mol_type = other RNA
gcttagtccaacacccaccgcg

SEQ ID NO: 9329 - RNA, 22 nt, synthetic construct
  source 1..22: mol_type = other RNA
gcttcaggtacctcgcaagcac

SEQ ID NO: 9330 - RNA, 22 nt, synthetic construct
  source 1..22: mol_type = other RNA
gcttccagctcctcgaagccgt

SEQ ID NO: 9331 - RNA, 22 nt, synthetic construct
  source 1..22: mol_type = other RNA
gcttccccagtacgactttgtc

SEQ ID NO: 9332 - RNA, 22 nt, synthetic construct
  source 1..22: mol_type = other RNA
gcttcctcctgcaatgcttcct

SEQ ID NO: 9333 - RNA, 22 nt, synthetic construct
  source 1..22: mol_type = other RNA
gcttcctgcacagcacgtgcgg

SEQ ID NO: 9334 - RNA, 22 nt, synthetic construct
  source 1..22: mol_type = other RNA
gcttcctgggggccctgtggct

SEQ ID NO: 9335 - RNA, 22 nt, synthetic construct
  source 1..22: mol_type = other RNA
gcttcctgtccaccgaggcagc

SEQ ID NO: 9336 - RNA, 22 nt, synthetic construct
  source 1..22: mol_type = other RNA
gcttcgaggagctggaagcgca

SEQ ID NO: 9337 - RNA, 22 nt, synthetic construct
  source 1..22: mol_type = other RNA
gcttctccatggagcaggccca

SEQ ID NO: 9338 - RNA, 22 nt, synthetic construct
  source 1..22: mol_type = other RNA
gcttcttctggaaaaggccggc

SEQ ID NO: 9339 - RNA, 22 nt, synthetic construct
  source 1..22: mol_type = other RNA
gcttgaaccgtccgggggatgc

SEQ ID NO: 9340 - RNA, 22 nt, synthetic construct
  source 1..22: mol_type = other RNA
gcttgcgaggtacctgaagcgg

SEQ ID NO: 9341 - RNA, 22 nt, synthetic construct
  source 1..22: mol_type = other RNA
gcttggccagctctgccagggc

SEQ ID NO: 9342 - RNA, 22 nt, synthetic construct
  source 1..22: mol_type = other RNA
gcttggcgtcctccccaagctc

SEQ ID NO: 9343 - RNA, 22 nt, synthetic construct
  source 1..22: mol_type = other RNA
gcttggggaagagacatccttg

SEQ ID NO: 9344 - RNA, 22 nt, synthetic construct
  source 1..22: mol_type = other RNA
gcttggggaggacgccaagctg

SEQ ID NO: 9345 - RNA, 22 nt, synthetic construct
  source 1..22: mol_type = other RNA
gcttgtggccggcttccccagt

SEQ ID NO: 9346 - RNA, 22 nt, synthetic construct
  source 1..22: mol_type = other RNA
gctttctggctgggctgatctt

SEQ ID NO: 9347 - RNA, 22 nt, synthetic construct
  source 1..22: mol_type = other RNA
gctttgcccagcacagcaatca

SEQ ID NO: 9348 - RNA, 22 nt, synthetic construct
  source 1..22: mol_type = other RNA
ggaaaaggccggccagcagccc

SEQ ID NO: 9349 - RNA, 22 nt, synthetic construct
  source 1..22: mol_type = other RNA
ggaactggccaccccggactgg

SEQ ID NO: 9350 - RNA, 22 nt, synthetic construct
  source 1..22: mol_type = other RNA
ggaactggtcctcctgtagggt

SEQ ID NO: 9351 - RNA, 22 nt, synthetic construct
  source 1..22: mol_type = other RNA
ggaagaagaggccctatgacaa

SEQ ID NO: 9352 - RNA, 22 nt, synthetic construct
  source 1..22: mol_type = other RNA
ggaagatcagcccagccagaaa

SEQ ID NO: 9353 - RNA, 22 nt, synthetic construct
  source 1..22: mol_type = other RNA
ggaagcagaaggtgcttgcgag

SEQ ID NO: 9354 - RNA, 22 nt, synthetic construct
  source 1..22: mol_type = other RNA
ggaagcattgcaggaggaagct

SEQ ID NO: 9355 - RNA, 22 nt, synthetic construct
  source 1..22: mol_type = other RNA
ggaagccatcttgcgcttccag

SEQ ID NO: 9356 - RNA, 22 nt, synthetic construct
  source 1..22: mol_type = other RNA
ggaagccggccacaagcccagg

SEQ ID NO: 9357 - RNA, 22 nt, synthetic construct
  source 1..22: mol_type = other RNA
ggaagcgcaagatggcttcctg

SEQ ID NO: 9358 - RNA, 22 nt, synthetic construct
  source 1..22: mol_type = other RNA
ggaagctggggaaggccagctc

SEQ ID NO: 9359 - RNA, 22 nt, synthetic construct
  source 1..22: mol_type = other RNA
ggaaggccagctcggactctgc

SEQ ID NO: 9360 - RNA, 22 nt, synthetic construct
  source 1..22: mol_type = other RNA
ggaatttggcagcacgtggtac

SEQ ID NO: 9361 - RNA, 22 nt, synthetic construct
  source 1..22: mol_type = other RNA
ggacaaggagctcccgcagtac

SEQ ID NO: 9362 - RNA, 22 nt, synthetic construct
  source 1..22: mol_type = other RNA
ggacacgtatggtgccgagccc

SEQ ID NO: 9363 - RNA, 22 nt, synthetic construct
  source 1..22: mol_type = other RNA
ggacactgcgggcgcggcagct

SEQ ID NO: 9364 - RNA, 22 nt, synthetic construct
  source 1..22: mol_type = other RNA
ggacagagaagacaaagtcgta

SEQ ID NO: 9365 - RNA, 22 nt, synthetic construct
  source 1..22: mol_type = other RNA
ggacagctcaaatagggcgtcg

SEQ ID NO: 9366 - RNA, 22 nt, synthetic construct
  source 1..22: mol_type = other RNA
ggacaggaagcagaaggtgctt

SEQ ID NO: 9367 - RNA, 22 nt, synthetic construct
  source 1..22: mol_type = other RNA
ggaccagttcccatccgcagac

SEQ ID NO: 9368 - RNA, 22 nt, synthetic construct
  source 1..22: mol_type = other RNA
ggaccggccacttcttctcagt

SEQ ID NO: 9369 - RNA, 22 nt, synthetic construct
  source 1..22: mol_type = other RNA
ggacctccgcagcactggcatt

SEQ ID NO: 9370 - RNA, 22 nt, synthetic construct
  source 1..22: mol_type = other RNA
ggacctgggcgatggccaaagg

SEQ ID NO: 9371 - RNA, 22 nt, synthetic construct
  source 1..22: mol_type = other RNA
ggacgccaagctgccctccacg

SEQ ID NO: 9372 - RNA, 22 nt, synthetic construct
  source 1..22: mol_type = other RNA
ggacggttcaagcaatggcagg

SEQ ID NO: 9373 - RNA, 22 nt, synthetic construct
  source 1..22: mol_type = other RNA
ggactaagcctttggccatcgc

SEQ ID NO: 9374 - RNA, 22 nt, synthetic construct
  source 1..22: mol_type = other RNA
ggactcagctgtgtcacccgtt

SEQ ID NO: 9375 - RNA, 22 nt, synthetic construct
  source 1..22: mol_type = other RNA
ggactctatgtcggcctgctgg

SEQ ID NO: 9376 - RNA, 22 nt, synthetic construct
  source 1..22: mol_type = other RNA
ggactgggcagaacggcagctg

SEQ ID NO: 9377 - RNA, 22 nt, synthetic construct
  source 1..22: mol_type = other RNA
ggagaagagcagatcctgcagg

SEQ ID NO: 9378 - RNA, 22 nt, synthetic construct
  source 1..22: mol_type = other RNA
ggagaagccggacagctcaaat

SEQ ID NO: 9379 - RNA, 22 nt, synthetic construct
  source 1..22: mol_type = other RNA
ggagaagtcttggcccgccgcc

SEQ ID NO: 9380 - RNA, 22 nt, synthetic construct
  source 1..22: mol_type = other RNA
ggagaggagcagcagcaagagc

SEQ ID NO: 9381 - RNA, 22 nt, synthetic construct
  source 1..22: mol_type = other RNA
ggagcagcagcaagagcctgga

SEQ ID NO: 9382 - RNA, 22 nt, synthetic construct
  source 1..22: mol_type = other RNA
ggagcagcttcttctggaaaag

SEQ ID NO: 9383 - RNA, 22 nt, synthetic construct
  source 1..22: mol_type = other RNA
ggagcaggcccaggcatacgtg

SEQ ID NO: 9384 - RNA, 22 nt, synthetic construct
  source 1..22: mol_type = other RNA
ggagcagttctaccgctcactg

SEQ ID NO: 9385 - RNA, 22 nt, synthetic construct
  source 1..22: mol_type = other RNA
ggagccctactcgggccatcgg

SEQ ID NO: 9386 - RNA, 22 nt, synthetic construct
  source 1..22: mol_type = other RNA
ggagcctcgtgggactcagctg

SEQ ID NO: 9387 - RNA, 22 nt, synthetic construct
  source 1..22: mol_type = other RNA
ggagcgggaactggccaccccg

SEQ ID NO: 9388 - RNA, 22 nt, synthetic construct
  source 1..22: mol_type = other RNA
ggagcgtcagggctctgtcttg

SEQ ID NO: 9389 - RNA, 22 nt, synthetic construct
  source 1..22: mol_type = other RNA
ggagctccccggccgcctctct

SEQ ID NO: 9390 - RNA, 22 nt, synthetic construct
  source 1..22: mol_type = other RNA
ggagctcccgcagtacctagca

SEQ ID NO: 9391 - RNA, 22 nt, synthetic construct
  source 1..22: mol_type = other RNA
ggagctcctgtaccacgtgctg

SEQ ID NO: 9392 - RNA, 22 nt, synthetic construct
  source 1..22: mol_type = other RNA
ggagctccttgtccttgatttc

SEQ ID NO: 9393 - RNA, 22 nt, synthetic construct
  source 1..22: mol_type = other RNA
ggagctgctgcactgcgcccac

SEQ ID NO: 9394 - RNA, 22 nt, synthetic construct
  source 1..22: mol_type = other RNA
ggagctggaagcgcaagatggc

SEQ ID NO: 9395 - RNA, 22 nt, synthetic construct
  source 1..22: mol_type = other RNA
ggagctgggccgcagacatcaa

SEQ ID NO: 9396 - RNA, 22 nt, synthetic construct
  source 1..22: mol_type = other RNA
ggagcttggggaggacgccaag

SEQ ID NO: 9397 - RNA, 22 nt, synthetic construct
  source 1..22: mol_type = other RNA
ggaggaagctggggaaggccag

SEQ ID NO: 9398 - RNA, 22 nt, synthetic construct
  source 1..22: mol_type = other RNA
ggaggaccagttcccatccgca

SEQ ID NO: 9399 - RNA, 22 nt, synthetic construct
  source 1..22: mol_type = other RNA
ggaggacgccaagctgccctcc

SEQ ID NO: 9400 - RNA, 22 nt, synthetic construct
  source 1..22: mol_type = other RNA
ggaggagcgtcagggctctgtc

SEQ ID NO: 9401 - RNA, 22 nt, synthetic construct
  source 1..22: mol_type = other RNA
ggaggagggtgcaacctcggag

SEQ ID NO: 9402 - RNA, 22 nt, synthetic construct
  source 1..22: mol_type = other RNA
ggaggcctggctgaggtgctgt

SEQ ID NO: 9403 - RNA, 22 nt, synthetic construct
  source 1..22: mol_type = other RNA
ggaggcggcgggccaagacttc

SEQ ID NO: 9404 - RNA, 22 nt, synthetic construct
  source 1..22: mol_type = other RNA
ggaggcgtgaggcgggtgccca

SEQ ID NO: 9405 - RNA, 22 nt, synthetic construct
  source 1..22: mol_type = other RNA
ggaggctggaagatcagcccag

SEQ ID NO: 9406 - RNA, 22 nt, synthetic construct
  source 1..22: mol_type = other RNA
ggaggctggaatttggcagcac

SEQ ID NO: 9407 - RNA, 22 nt, synthetic construct
  source 1..22: mol_type = other RNA
ggagggcagcttggcgtcctcc

SEQ ID NO: 9408 - RNA, 22 nt, synthetic construct
  source 1..22: mol_type = other RNA
ggagggcgtgccacgctttctg

SEQ ID NO: 9409 - RNA, 22 nt, synthetic construct
  source 1..22: mol_type = other RNA
ggagggtgcaacctcggagcag

SEQ ID NO: 9410 - RNA, 22 nt, synthetic construct
  source 1..22: mol_type = other RNA
ggaggtccagggagaagtcttg

SEQ ID NO: 9411 - RNA, 22 nt, synthetic construct
  source 1..22: mol_type = other RNA
ggaggtggatctggtgcaggcc

SEQ ID NO: 9412 - RNA, 22 nt, synthetic construct
  source 1..22: mol_type = other RNA
ggatctgctcttctccctgggc

SEQ ID NO: 9413 - RNA, 22 nt, synthetic construct
  source 1..22: mol_type = other RNA
ggatctggtgcaggccaggctg

SEQ ID NO: 9414 - RNA, 22 nt, synthetic construct
  source 1..22: mol_type = other RNA
ggatgacagagcaccaagacag

SEQ ID NO: 9415 - RNA, 22 nt, synthetic construct
  source 1..22: mol_type = other RNA
ggatgagcagaacgcggtcagg

SEQ ID NO: 9416 - RNA, 22 nt, synthetic construct
  source 1..22: mol_type = other RNA
ggatgccatccgggcctgcggg

SEQ ID NO: 9417 - RNA, 22 nt, synthetic construct
  source 1..22: mol_type = other RNA
ggatgcctatggcctgcaggat

SEQ ID NO: 9418 - RNA, 22 nt, synthetic construct
  source 1..22: mol_type = other RNA
ggatggcatcctagtggaggtg

SEQ ID NO: 9419 - RNA, 22 nt, synthetic construct
  source 1..22: mol_type = other RNA
ggatgggaactggtcctcctgt

SEQ ID NO: 9420 - RNA, 22 nt, synthetic construct
  source 1..22: mol_type = other RNA
ggatgtctcttccccaagcccc

SEQ ID NO: 9421 - RNA, 22 nt, synthetic construct
  source 1..22: mol_type = other RNA
ggattggggagcctcgtgggac

SEQ ID NO: 9422 - RNA, 22 nt, synthetic construct
  source 1..22: mol_type = other RNA
ggcaaagctggtcagggcaaga

SEQ ID NO: 9423 - RNA, 22 nt, synthetic construct
  source 1..22: mol_type = other RNA
ggcaaatgccagtgctgcggag

SEQ ID NO: 9424 - RNA, 22 nt, synthetic construct
  source 1..22: mol_type = other RNA
ggcaagagctattgggctgggg

SEQ ID NO: 9425 - RNA, 22 nt, synthetic construct
  source 1..22: mol_type = other RNA
ggcaaggccttggaggcggcgg

SEQ ID NO: 9426 - RNA, 22 nt, synthetic construct
  source 1..22: mol_type = other RNA
ggcacaaagtagggctgtggct

SEQ ID NO: 9427 - RNA, 22 nt, synthetic construct
  source 1..22: mol_type = other RNA
ggcacactgcccggcacaaagt

SEQ ID NO: 9428 - RNA, 22 nt, synthetic construct
  source 1..22: mol_type = other RNA
ggcaccatacgtgtcctgcagt

SEQ ID NO: 9429 - RNA, 22 nt, synthetic construct
  source 1..22: mol_type = other RNA
ggcacccgcctcacgcctcctg

SEQ ID NO: 9430 - RNA, 22 nt, synthetic construct
  source 1..22: mol_type = other RNA
ggcacgccctccagccagttgt

SEQ ID NO: 9431 - RNA, 22 nt, synthetic construct
  source 1..22: mol_type = other RNA
ggcagaacggcagctggcccaa

SEQ ID NO: 9432 - RNA, 22 nt, synthetic construct
  source 1..22: mol_type = other RNA
ggcagagctggccaagctggcc

SEQ ID NO: 9433 - RNA, 22 nt, synthetic construct
  source 1..22: mol_type = other RNA
ggcagcacgtggtacaggagct

SEQ ID NO: 9434 - RNA, 22 nt, synthetic construct
  source 1..22: mol_type = other RNA
ggcagccaacagcacctcagcc

SEQ ID NO: 9435 - RNA, 22 nt, synthetic construct
  source 1..22: mol_type = other RNA
ggcagccgccgatggcccgagt

SEQ ID NO: 9436 - RNA, 22 nt, synthetic construct
  source 1..22: mol_type = other RNA
ggcagcgggcgggaggctggaa

SEQ ID NO: 9437 - RNA, 22 nt, synthetic construct
  source 1..22: mol_type = other RNA
ggcagctgctggagctgctgca

SEQ ID NO: 9438 - RNA, 22 nt, synthetic construct
  source 1..22: mol_type = other RNA
ggcagctggcccaaggaggcct

SEQ ID NO: 9439 - RNA, 22 nt, synthetic construct
  source 1..22: mol_type = other RNA
ggcagcttggcgtcctccccaa

SEQ ID NO: 9440 - RNA, 22 nt, synthetic construct
  source 1..22: mol_type = other RNA
ggcaggggacagagaagacaaa

SEQ ID NO: 9441 - RNA, 22 nt, synthetic construct
  source 1..22: mol_type = other RNA
ggcagtgagccgggcctgggct

SEQ ID NO: 9442 - RNA, 22 nt, synthetic construct
  source 1..22: mol_type = other RNA
ggcagtgtgccagctctcagag

SEQ ID NO: 9443 - RNA, 22 nt, synthetic construct
  source 1..22: mol_type = other RNA
ggcatacgtgatgcgctacttt

SEQ ID NO: 9444 - RNA, 22 nt, synthetic construct
  source 1..22: mol_type = other RNA
ggcatcccccggacggttcaag

SEQ ID NO: 9445 - RNA, 22 nt, synthetic construct
  source 1..22: mol_type = other RNA
ggcatcctagtggaggtggatc

SEQ ID NO: 9446 - RNA, 22 nt, synthetic construct
  source 1..22: mol_type = other RNA
ggcatttgcccctctggattgg

SEQ ID NO: 9447 - RNA, 22 nt, synthetic construct
  source 1..22: mol_type = other RNA
ggccaaaggcttagtccaacac

SEQ ID NO: 9448 - RNA, 22 nt, synthetic construct
  source 1..22: mol_type = other RNA
ggccaagacttctccctggacc

SEQ ID NO: 9449 - RNA, 22 nt, synthetic construct
  source 1..22: mol_type = other RNA
ggccaagctggcctgggagctg

SEQ ID NO: 9450 - RNA, 22 nt, synthetic construct
  source 1..22: mol_type = other RNA
ggccacaagcccaggcccggct

SEQ ID NO: 9451 - RNA, 22 nt, synthetic construct
  source 1..22: mol_type = other RNA
ggccaccccggactgggcagaa

SEQ ID NO: 9452 - RNA, 22 nt, synthetic construct
  source 1..22: mol_type = other RNA
ggccacttcttctcagtcacag

SEQ ID NO: 9453 - RNA, 22 nt, synthetic construct
  source 1..22: mol_type = other RNA
ggccagctcggactctgcggcc

SEQ ID NO: 9454 - RNA, 22 nt, synthetic construct
  source 1..22: mol_type = other RNA
ggccagctgccgttctgcccag

SEQ ID NO: 9455 - RNA, 22 nt, synthetic construct
  source 1..22: mol_type = other RNA
ggccagcttggccagctctgcc

SEQ ID NO: 9456 - RNA, 22 nt, synthetic construct
  source 1..22: mol_type = other RNA
ggccaggctggagaggagcagc

SEQ ID NO: 9457 - RNA, 22 nt, synthetic construct
  source 1..22: mol_type = other RNA
ggccaggggcgtgtcagggtgg

SEQ ID NO: 9458 - RNA, 22 nt, synthetic construct
  source 1..22: mol_type = other RNA
ggccagttcccgctccaggctc

SEQ ID NO: 9459 - RNA, 22 nt, synthetic construct
  source 1..22: mol_type = other RNA
ggccataggcatcccccggacg

SEQ ID NO: 9460 - RNA, 22 nt, synthetic construct
  source 1..22: mol_type = other RNA
ggccatcgcccaggtcctcacg

SEQ ID NO: 9461 - RNA, 22 nt, synthetic construct
  source 1..22: mol_type = other RNA
ggccatcggcggctgcctcggt

SEQ ID NO: 9462 - RNA, 22 nt, synthetic construct
  source 1..22: mol_type = other RNA
ggcccaaggaggcctggctgag

SEQ ID NO: 9463 - RNA, 22 nt, synthetic construct
  source 1..22: mol_type = other RNA
ggcccacagccactcgtggcgg

SEQ ID NO: 9464 - RNA, 22 nt, synthetic construct
  source 1..22: mol_type = other RNA
ggcccagcaggccgacatagag

SEQ ID NO: 9465 - RNA, 22 nt, synthetic construct
  source 1..22: mol_type = other RNA
ggcccagctcccaggccagctt

SEQ ID NO: 9466 - RNA, 22 nt, synthetic construct
  source 1..22: mol_type = other RNA
ggcccaggcatacgtgatgcgc

SEQ ID NO: 9467 - RNA, 22 nt, synthetic construct
  source 1..22: mol_type = other RNA
ggcccagggagaagagcagatc

SEQ ID NO: 9468 - RNA, 22 nt, synthetic construct
  source 1..22: mol_type = other RNA
ggcccccaggaagcattgcagg

SEQ ID NO: 9469 - RNA, 22 nt, synthetic construct
  source 1..22: mol_type = other RNA
ggcccgagtagggctcccaggc

SEQ ID NO: 9470 - RNA, 22 nt, synthetic construct
  source 1..22: mol_type = other RNA
ggcccgccgcctccaaggcctt

SEQ ID NO: 9471 - RNA, 22 nt, synthetic construct
  source 1..22: mol_type = other RNA
ggcccgcggtgggtgttggact

SEQ ID NO: 9472 - RNA, 22 nt, synthetic construct
  source 1..22: mol_type = other RNA
ggcccggatggcatcctagtgg

SEQ ID NO: 9473 - RNA, 22 nt, synthetic construct
  source 1..22: mol_type = other RNA
ggccctatgacaactggctgga

SEQ ID NO: 9474 - RNA, 22 nt, synthetic construct
  source 1..22: mol_type = other RNA
ggccctgctggagcttggggag

SEQ ID NO: 9475 - RNA, 22 nt, synthetic construct
  source 1..22: mol_type = other RNA
ggccctggcagagctggccaag

SEQ ID NO: 9476 - RNA, 22 nt, synthetic construct
  source 1..22: mol_type = other RNA
ggccctgtggctggctctgagt

SEQ ID NO: 9477 - RNA, 22 nt, synthetic construct
  source 1..22: mol_type = other RNA
ggccgacatagagtcccgtgag

SEQ ID NO: 9478 - RNA, 22 nt, synthetic construct
  source 1..22: mol_type = other RNA
ggccgacgccctatttgagctg

SEQ ID NO: 9479 - RNA, 22 nt, synthetic construct
  source 1..22: mol_type = other RNA
ggccgaggaggctggaatttgg

SEQ ID NO: 9480 - RNA, 22 nt, synthetic construct
  source 1..22: mol_type = other RNA
ggccgatgaggttttcagccac

SEQ ID NO: 9481 - RNA, 22 nt, synthetic construct
  source 1..22: mol_type = other RNA
ggccgcagacatcaaagtaccc

SEQ ID NO: 9482 - RNA, 22 nt, synthetic construct
  source 1..22: mol_type = other RNA
ggccgcagagtccgagctggcc

SEQ ID NO: 9483 - RNA, 22 nt, synthetic construct
  source 1..22: mol_type = other RNA
ggccgccacgagtggctgtggg

SEQ ID NO: 9484 - RNA, 22 nt, synthetic construct
  source 1..22: mol_type = other RNA
ggccgccggtgctccttggcag

SEQ ID NO: 9485 - RNA, 22 nt, synthetic construct
  source 1..22: mol_type = other RNA
ggccgcctctcttttctgggca

SEQ ID NO: 9486 - RNA, 22 nt, synthetic construct
  source 1..22: mol_type = other RNA
ggccgcctggtccagagcctga

SEQ ID NO: 9487 - RNA, 22 nt, synthetic construct
  source 1..22: mol_type = other RNA
ggccgcgtgagacacgagtgat

SEQ ID NO: 9488 - RNA, 22 nt, synthetic construct
  source 1..22: mol_type = other RNA
ggccggccttttccagaagaag

SEQ ID NO: 9489 - RNA, 22 nt, synthetic construct
  source 1..22: mol_type = other RNA
ggccggcttccccagtacgact

SEQ ID NO: 9490 - RNA, 22 nt, synthetic construct
  source 1..22: mol_type = other RNA
ggccgggctgtgaggaggaggg

SEQ ID NO: 9491 - RNA, 22 nt, synthetic construct
  source 1..22: mol_type = other RNA
ggccggggagctcctgtaccac

SEQ ID NO: 9492 - RNA, 22 nt, synthetic construct
  source 1..22: mol_type = other RNA
ggccggtcccggaggagcgtca

SEQ ID NO: 9493 - RNA, 22 nt, synthetic construct
  source 1..22: mol_type = other RNA
ggccgtgcagccctcgacagcc

SEQ ID NO: 9494 - RNA, 22 nt, synthetic construct
  source 1..22: mol_type = other RNA
ggcctccttgggccagctgccg

SEQ ID NO: 9495 - RNA, 22 nt, synthetic construct
  source 1..22: mol_type = other RNA
ggcctcgtgggcgcagtgcagc

SEQ ID NO: 9496 - RNA, 22 nt, synthetic construct
  source 1..22: mol_type = other RNA
ggcctctgagagctggcacact

SEQ ID NO: 9497 - RNA, 22 nt, synthetic construct
  source 1..22: mol_type = other RNA
ggcctcttcttccttggggtca

SEQ ID NO: 9498 - RNA, 22 nt, synthetic construct
  source 1..22: mol_type = other RNA
ggcctgcaccagatccacctcc

SEQ ID NO: 9499 - RNA, 22 nt, synthetic construct
  source 1..22: mol_type = other RNA
ggcctgcaggatctgctcttct

SEQ ID NO: 9500 - RNA, 22 nt, synthetic construct
  source 1..22: mol_type = other RNA
ggcctgcgggctcggcaccata

SEQ ID NO: 9501 - RNA, 22 nt, synthetic construct
  source 1..22: mol_type = other RNA
ggcctgctccatggagaagccg

SEQ ID NO: 9502 - RNA, 22 nt, synthetic construct
  source 1..22: mol_type = other RNA
ggcctggctgaggtgctgttgg

SEQ ID NO: 9503 - RNA, 22 nt, synthetic construct
  source 1..22: mol_type = other RNA
ggcctgggagctgggccgcaga

SEQ ID NO: 9504 - RNA, 22 nt, synthetic construct
  source 1..22: mol_type = other RNA
ggcctgggcttgtggccggctt

SEQ ID NO: 9505 - RNA, 22 nt, synthetic construct
  source 1..22: mol_type = other RNA
ggccttccccagcttcctcctg

SEQ ID NO: 9506 - RNA, 22 nt, synthetic construct
  source 1..22: mol_type = other RNA
ggccttgcccagtacatgtgca

SEQ ID NO: 9507 - RNA, 22 nt, synthetic construct
  source 1..22: mol_type = other RNA
ggccttgctcaggctctggacc

SEQ ID NO: 9508 - RNA, 22 nt, synthetic construct
  source 1..22: mol_type = other RNA
ggccttggaggcggcgggccaa

SEQ ID NO: 9509 - RNA, 22 nt, synthetic construct
  source 1..22: mol_type = other RNA
ggcctttgcagagccggtggag

SEQ ID NO: 9510 - RNA, 22 nt, synthetic construct
  source 1..22: mol_type = other RNA
ggccttttccagaagaagctgc

SEQ ID NO: 9511 - RNA, 22 nt, synthetic construct
  source 1..22: mol_type = other RNA
ggcgaaatcaaggacaaggagc

SEQ ID NO: 9512 - RNA, 22 nt, synthetic construct
  source 1..22: mol_type = other RNA
ggcgatggccaaaggcttagtc

SEQ ID NO: 9513 - RNA, 22 nt, synthetic construct
  source 1..22: mol_type = other RNA
ggcgcagtgcagcagctccagc

SEQ ID NO: 9514 - RNA, 22 nt, synthetic construct
  source 1..22: mol_type = other RNA
ggcgcggcagctgctggagctg

SEQ ID NO: 9515 - RNA, 22 nt, synthetic construct
  source 1..22: mol_type = other RNA
ggcggccgatgaggttttcagc

SEQ ID NO: 9516 - RNA, 22 nt, synthetic construct
  source 1..22: mol_type = other RNA
ggcggccgcgtgagacacgagt

SEQ ID NO: 9517 - RNA, 22 nt, synthetic construct
  source 1..22: mol_type = other RNA
ggcggccggggagctcctgtac

SEQ ID NO: 9518 - RNA, 22 nt, synthetic construct
  source 1..22: mol_type = other RNA
ggcggcgggccaagacttctcc

SEQ ID NO: 9519 - RNA, 22 nt, synthetic construct
  source 1..22: mol_type = other RNA
ggcggctgcctcggtggacagg

SEQ ID NO: 9520 - RNA, 22 nt, synthetic construct
  source 1..22: mol_type = other RNA
ggcgggaggctggaagatcagc

SEQ ID NO: 9521 - RNA, 22 nt, synthetic construct
  source 1..22: mol_type = other RNA
ggcgggccaagacttctccctg

SEQ ID NO: 9522 - RNA, 22 nt, synthetic construct
  source 1..22: mol_type = other RNA
ggcgggtgcccagaaaagagag

SEQ ID NO: 9523 - RNA, 22 nt, synthetic construct
  source 1..22: mol_type = other RNA
ggcgtcctccccaagctccagc

SEQ ID NO: 9524 - RNA, 22 nt, synthetic construct
  source 1..22: mol_type = other RNA
ggcgtcggccttgctcaggctc

SEQ ID NO: 9525 - RNA, 22 nt, synthetic construct
  source 1..22: mol_type = other RNA
ggcgtgaggcgggtgcccagaa

SEQ ID NO: 9526 - RNA, 22 nt, synthetic construct
  source 1..22: mol_type = other RNA
ggcgtgccacgctttctggctg

SEQ ID NO: 9527 - RNA, 22 nt, synthetic construct
  source 1..22: mol_type = other RNA
ggcgtgtcagggtgggggtatg

SEQ ID NO: 9528 - RNA, 22 nt, synthetic construct
  source 1..22: mol_type = other RNA
ggctcactgccccagcccaata

SEQ ID NO: 9529 - RNA, 22 nt, synthetic construct
  source 1..22: mol_type = other RNA
ggctccccaatccagaggggca

SEQ ID NO: 9530 - RNA, 22 nt, synthetic construct
  source 1..22: mol_type = other RNA
ggctcggcaccatacgtgtcct

SEQ ID NO: 9531 - RNA, 22 nt, synthetic construct
  source 1..22: mol_type = other RNA
ggctctgagtggcgaaatcaag

SEQ ID NO: 9532 - RNA, 22 nt, synthetic construct
  source 1..22: mol_type = other RNA
ggctctgcaaaggccaggggcg

SEQ ID NO: 9533 - RNA, 22 nt, synthetic construct
  source 1..22: mol_type = other RNA
ggctctgtcttggtgctctgtc

SEQ ID NO: 9534 - RNA, 22 nt, synthetic construct
  source 1..22: mol_type = other RNA
ggctcttgctgctgctcctctc

SEQ ID NO: 9535 - RNA, 22 nt, synthetic construct
  source 1..22: mol_type = other RNA
ggctgaaaacctcatcggccgc

SEQ ID NO: 9536 - RNA, 22 nt, synthetic construct
  source 1..22: mol_type = other RNA
ggctgaggtgctgttggctgcc

SEQ ID NO: 9537 - RNA, 22 nt, synthetic construct
  source 1..22: mol_type = other RNA
ggctgatcttccagcctcccgc

SEQ ID NO: 9538 - RNA, 22 nt, synthetic construct
  source 1..22: mol_type = other RNA
ggctgcagccgcttcaggtacc

SEQ ID NO: 9539 - RNA, 22 nt, synthetic construct
  source 1..22: mol_type = other RNA
ggctgcagccggggacactgcg

SEQ ID NO: 9540 - RNA, 22 nt, synthetic construct
  source 1..22: mol_type = other RNA
ggctgccaaggagcaccggcgg

SEQ ID NO: 9541 - RNA, 22 nt, synthetic construct
  source 1..22: mol_type = other RNA
ggctgcctcggtggacaggaag

SEQ ID NO: 9542 - RNA, 22 nt, synthetic construct
  source 1..22: mol_type = other RNA
ggctgctggccggccttttcca

SEQ ID NO: 9543 - RNA, 22 nt, synthetic construct
  source 1..22: mol_type = other RNA
ggctggaagatcagcccagcca

SEQ ID NO: 9544 - RNA, 22 nt, synthetic construct
  source 1..22: mol_type = other RNA
ggctggaatttggcagcacgtg

SEQ ID NO: 9545 - RNA, 22 nt, synthetic construct
  source 1..22: mol_type = other RNA
ggctggagaggagcagcagcaa

SEQ ID NO: 9546 - RNA, 22 nt, synthetic construct
  source 1..22: mol_type = other RNA
ggctggagggcgtgccacgctt

SEQ ID NO: 9547 - RNA, 22 nt, synthetic construct
  source 1..22: mol_type = other RNA
ggctggctctgagtggcgaaat

SEQ ID NO: 9548 - RNA, 22 nt, synthetic construct
  source 1..22: mol_type = other RNA
ggctgggctgatcttccagcct

SEQ ID NO: 9549 - RNA, 22 nt, synthetic construct
  source 1..22: mol_type = other RNA
ggctgtcgagggctgcacggcc

SEQ ID NO: 9550 - RNA, 22 nt, synthetic construct
  source 1..22: mol_type = other RNA
ggctgtgactgagaagaagtgg

SEQ ID NO: 9551 - RNA, 22 nt, synthetic construct
  source 1..22: mol_type = other RNA
ggctgtgaggaggagggtgcaa

SEQ ID NO: 9552 - RNA, 22 nt, synthetic construct
  source 1..22: mol_type = other RNA
ggctgtggctgtgactgagaag

SEQ ID NO: 9553 - RNA, 22 nt, synthetic construct
  source 1..22: mol_type = other RNA
ggctgtgggcccagggagaaga

SEQ ID NO: 9554 - RNA, 22 nt, synthetic construct
  source 1..22: mol_type = other RNA
ggcttagtccaacacccaccgc

SEQ ID NO: 9555 - RNA, 22 nt, synthetic construct
  source 1..22: mol_type = other RNA
ggcttccccagtacgactttgt

SEQ ID NO: 9556 - RNA, 22 nt, synthetic construct
  source 1..22: mol_type = other RNA
ggcttcctgcacagcacgtgcg

SEQ ID NO: 9557 - RNA, 22 nt, synthetic construct
  source 1..22: mol_type = other RNA
ggcttcgaggagctggaagcgc

SEQ ID NO: 9558 - RNA, 22 nt, synthetic construct
  source 1..22: mol_type = other RNA
ggcttctccatggagcaggccc

SEQ ID NO: 9559 - RNA, 22 nt, synthetic construct
  source 1..22: mol_type = other RNA
ggcttggggaagagacatcctt

SEQ ID NO: 9560 - RNA, 22 nt, synthetic construct
  source 1..22: mol_type = other RNA
ggcttgtggccggcttccccag

SEQ ID NO: 9561 - RNA, 22 nt, synthetic construct
  source 1..22: mol_type = other RNA
gggaactggccaccccggactg

SEQ ID NO: 9562 - RNA, 22 nt, synthetic construct
  source 1..22: mol_type = other RNA
gggaactggtcctcctgtaggg

SEQ ID NO: 9563 - RNA, 22 nt, synthetic construct
  source 1..22: mol_type = other RNA
gggaagccggccacaagcccag

SEQ ID NO: 9564 - RNA, 22 nt, synthetic construct
  source 1..22: mol_type = other RNA
gggaaggccagctcggactctg

SEQ ID NO: 9565 - RNA, 22 nt, synthetic construct
  source 1..22: mol_type = other RNA
gggacagagaagacaaagtcgt

SEQ ID NO: 9566 - RNA, 22 nt, synthetic construct
  source 1..22: mol_type = other RNA
gggaccggccacttcttctcag

SEQ ID NO: 9567 - RNA, 22 nt, synthetic construct
  source 1..22: mol_type = other RNA
gggactcagctgtgtcacccgt

SEQ ID NO: 9568 - RNA, 22 nt, synthetic construct
  source 1..22: mol_type = other RNA
gggactctatgtcggcctgctg

SEQ ID NO: 9569 - RNA, 22 nt, synthetic construct
  source 1..22: mol_type = other RNA
gggagaagagcagatcctgcag

SEQ ID NO: 9570 - RNA, 22 nt, synthetic construct
  source 1..22: mol_type = other RNA
gggagaagtcttggcccgccgc

SEQ ID NO: 9571 - RNA, 22 nt, synthetic construct
  source 1..22: mol_type = other RNA
gggagccctactcgggccatcg

SEQ ID NO: 9572 - RNA, 22 nt, synthetic construct
  source 1..22: mol_type = other RNA
gggagcctcgtgggactcagct

SEQ ID NO: 9573 - RNA, 22 nt, synthetic construct
  source 1..22: mol_type = other RNA
gggagctcctgtaccacgtgct

SEQ ID NO: 9574 - RNA, 22 nt, synthetic construct
  source 1..22: mol_type = other RNA
gggagctccttgtccttgattt

SEQ ID NO: 9575 - RNA, 22 nt, synthetic construct
  source 1..22: mol_type = other RNA
gggagctgggccgcagacatca

SEQ ID NO: 9576 - RNA, 22 nt, synthetic construct
  source 1..22: mol_type = other RNA
gggaggacgccaagctgccctc

SEQ ID NO: 9577 - RNA, 22 nt, synthetic construct
  source 1..22: mol_type = other RNA
gggaggctggaagatcagccca

SEQ ID NO: 9578 - RNA, 22 nt, synthetic construct
  source 1..22: mol_type = other RNA
gggatgacagagcaccaagaca

SEQ ID NO: 9579 - RNA, 22 nt, synthetic construct
  source 1..22: mol_type = other RNA
gggatgcctatggcctgcagga

SEQ ID NO: 9580 - RNA, 22 nt, synthetic construct
  source 1..22: mol_type = other RNA
gggcaaagctggtcagggcaag

SEQ ID NO: 9581 - RNA, 22 nt, synthetic construct
  source 1..22: mol_type = other RNA
gggcaaatgccagtgctgcgga

SEQ ID NO: 9582 - RNA, 22 nt, synthetic construct
  source 1..22: mol_type = other RNA
gggcaagagctattgggctggg

SEQ ID NO: 9583 - RNA, 22 nt, synthetic construct
  source 1..22: mol_type = other RNA
gggcaaggccttggaggcggcg

SEQ ID NO: 9584 - RNA, 22 nt, synthetic construct
  source 1..22: mol_type = other RNA
gggcacccgcctcacgcctcct

SEQ ID NO: 9585 - RNA, 22 nt, synthetic construct
  source 1..22: mol_type = other RNA
gggcagaacggcagctggccca

SEQ ID NO: 9586 - RNA, 22 nt, synthetic construct
  source 1..22: mol_type = other RNA
gggcagcttggcgtcctcccca

SEQ ID NO: 9587 - RNA, 22 nt, synthetic construct
  source 1..22: mol_type = other RNA
gggcagtgtgccagctctcaga

SEQ ID NO: 9588 - RNA, 22 nt, synthetic construct
  source 1..22: mol_type = other RNA
gggccaagacttctccctggac

SEQ ID NO: 9589 - RNA, 22 nt, synthetic construct
  source 1..22: mol_type = other RNA
gggccagctgccgttctgccca

SEQ ID NO: 9590 - RNA, 22 nt, synthetic construct
  source 1..22: mol_type = other RNA
gggcccacagccactcgtggcg

SEQ ID NO: 9591 - RNA, 22 nt, synthetic construct
  source 1..22: mol_type = other RNA
gggcccagggagaagagcagat

SEQ ID NO: 9592 - RNA, 22 nt, synthetic construct
  source 1..22: mol_type = other RNA
gggcccccaggaagcattgcag

SEQ ID NO: 9593 - RNA, 22 nt, synthetic construct
  source 1..22: mol_type = other RNA
gggccctggcagagctggccaa

SEQ ID NO: 9594 - RNA, 22 nt, synthetic construct
  source 1..22: mol_type = other RNA
gggccctgtggctggctctgag

SEQ ID NO: 9595 - RNA, 22 nt, synthetic construct
  source 1..22: mol_type = other RNA
gggccgcagacatcaaagtacc

SEQ ID NO: 9596 - RNA, 22 nt, synthetic construct
  source 1..22: mol_type = other RNA
gggccgcagagtccgagctggc

SEQ ID NO: 9597 - RNA, 22 nt, synthetic construct
  source 1..22: mol_type = other RNA
gggccgcctggtccagagcctg

SEQ ID NO: 9598 - RNA, 22 nt, synthetic construct
  source 1..22: mol_type = other RNA
gggccgggctgtgaggaggagg

SEQ ID NO: 9599 - RNA, 22 nt, synthetic construct
  source 1..22: mol_type = other RNA
gggccgtgcagccctcgacagc

SEQ ID NO: 9600 - RNA, 22 nt, synthetic construct
  source 1..22: mol_type = other RNA
gggcctctgagagctggcacac

SEQ ID NO: 9601 - RNA, 22 nt, synthetic construct
  source 1..22: mol_type = other RNA
gggcctcttcttccttggggtc

SEQ ID NO: 9602 - RNA, 22 nt, synthetic construct
  source 1..22: mol_type = other RNA
gggcctgcgggctcggcaccat

SEQ ID NO: 9603 - RNA, 22 nt, synthetic construct
  source 1..22: mol_type = other RNA
gggcctgctccatggagaagcc

SEQ ID NO: 9604 - RNA, 22 nt, synthetic construct
  source 1..22: mol_type = other RNA
gggcctgggcttgtggccggct

SEQ ID NO: 9605 - RNA, 22 nt, synthetic construct
  source 1..22: mol_type = other RNA
gggcgatggccaaaggcttagt

SEQ ID NO: 9606 - RNA, 22 nt, synthetic construct
  source 1..22: mol_type = other RNA
gggcgcagtgcagcagctccag

SEQ ID NO: 9607 - RNA, 22 nt, synthetic construct
  source 1..22: mol_type = other RNA
gggcgcggcagctgctggagct

SEQ ID NO: 9608 - RNA, 22 nt, synthetic construct
  source 1..22: mol_type = other RNA
gggcgggaggctggaagatcag

SEQ ID NO: 9609 - RNA, 22 nt, synthetic construct
  source 1..22: mol_type = other RNA
gggcgtcggccttgctcaggct

SEQ ID NO: 9610 - RNA, 22 nt, synthetic construct
  source 1..22: mol_type = other RNA
gggcgtgccacgctttctggct

SEQ ID NO: 9611 - RNA, 22 nt, synthetic construct
  source 1..22: mol_type = other RNA
gggcgtgtcagggtgggggtat

SEQ ID NO: 9612 - RNA, 22 nt, synthetic construct
  source 1..22: mol_type = other RNA
gggctcggcaccatacgtgtcc

SEQ ID NO: 9613 - RNA, 22 nt, synthetic construct
  source 1..22: mol_type = other RNA
gggctctgtcttggtgctctgt

SEQ ID NO: 9614 - RNA, 22 nt, synthetic construct
  source 1..22: mol_type = other RNA
gggctgatcttccagcctcccg

SEQ ID NO: 9615 - RNA, 22 nt, synthetic construct
  source 1..22: mol_type = other RNA
gggctgctggccggccttttcc

SEQ ID NO: 9616 - RNA, 22 nt, synthetic construct
  source 1..22: mol_type = other RNA
gggctgtcgagggctgcacggc

SEQ ID NO: 9617 - RNA, 22 nt, synthetic construct
  source 1..22: mol_type = other RNA
gggctgtgaggaggagggtgca

SEQ ID NO: 9618 - RNA, 22 nt, synthetic construct
  source 1..22: mol_type = other RNA
gggctgtggctgtgactgagaa

SEQ ID NO: 9619 - RNA, 22 nt, synthetic construct
  source 1..22: mol_type = other RNA
gggcttggggaagagacatcct

SEQ ID NO: 9620 - RNA, 22 nt, synthetic construct
  source 1..22: mol_type = other RNA
gggcttgtggccggcttcccca

SEQ ID NO: 9621 - RNA, 22 nt, synthetic construct
  source 1..22: mol_type = other RNA
ggggaagccggccacaagccca

SEQ ID NO: 9622 - RNA, 22 nt, synthetic construct
  source 1..22: mol_type = other RNA
ggggaaggccagctcggactct

SEQ ID NO: 9623 - RNA, 22 nt, synthetic construct
  source 1..22: mol_type = other RNA
ggggacagagaagacaaagtcg

SEQ ID NO: 9624 - RNA, 22 nt, synthetic construct
  source 1..22: mol_type = other RNA
ggggagcctcgtgggactcagc

SEQ ID NO: 9625 - RNA, 22 nt, synthetic construct
  source 1..22: mol_type = other RNA
ggggagctcctgtaccacgtgc

SEQ ID NO: 9626 - RNA, 22 nt, synthetic construct
  source 1..22: mol_type = other RNA
ggggaggacgccaagctgccct

SEQ ID NO: 9627 - RNA, 22 nt, synthetic construct
  source 1..22: mol_type = other RNA
ggggatgcctatggcctgcagg

SEQ ID NO: 9628 - RNA, 22 nt, synthetic construct
  source 1..22: mol_type = other RNA
ggggcaaatgccagtgctgcgg

SEQ ID NO: 9629 - RNA, 22 nt, synthetic construct
  source 1..22: mol_type = other RNA
ggggccctggcagagctggcca

SEQ ID NO: 9630 - RNA, 22 nt, synthetic construct
  source 1..22: mol_type = other RNA
ggggccctgtggctggctctga

SEQ ID NO: 9631 - RNA, 22 nt, synthetic construct
  source 1..22: mol_type = other RNA
ggggccgcctggtccagagcct

SEQ ID NO: 9632 - RNA, 22 nt, synthetic construct
  source 1..22: mol_type = other RNA
ggggccgggctgtgaggaggag

SEQ ID NO: 9633 - RNA, 22 nt, synthetic construct
  source 1..22: mol_type = other RNA
ggggcgtgtcagggtgggggta

SEQ ID NO: 9634 - RNA, 22 nt, synthetic construct
  source 1..22: mol_type = other RNA
ggggctgctggccggccttttc

SEQ ID NO: 9635 - RNA, 22 nt, synthetic construct
  source 1..22: mol_type = other RNA
ggggctgtcgagggctgcacgg

SEQ ID NO: 9636 - RNA, 22 nt, synthetic construct
  source 1..22: mol_type = other RNA
ggggcttggggaagagacatcc

SEQ ID NO: 9637 - RNA, 22 nt, synthetic construct
  source 1..22: mol_type = other RNA
gggggatgcctatggcctgcag

SEQ ID NO: 9638 - RNA, 22 nt, synthetic construct
  source 1..22: mol_type = other RNA
gggggccctgtggctggctctg

SEQ ID NO: 9639 - RNA, 22 nt, synthetic construct
  source 1..22: mol_type = other RNA
gggggctgctggccggcctttt

SEQ ID NO: 9640 - RNA, 22 nt, synthetic construct
  source 1..22: mol_type = other RNA
gggggctgtcgagggctgcacg

SEQ ID NO: 9641 - RNA, 22 nt, synthetic construct
  source 1..22: mol_type = other RNA
ggggggctgtcgagggctgcac

SEQ ID NO: 9642 - RNA, 22 nt, synthetic construct
  source 1..22: mol_type = other RNA
ggggtcaatgctaggtactgcg

SEQ ID NO: 9643 - RNA, 22 nt, synthetic construct
  source 1..22: mol_type = other RNA
ggggtgaggggcttggggaaga

SEQ ID NO: 9644 - RNA, 22 nt, synthetic construct
  source 1..22: mol_type = other RNA
ggggtggccagttcccgctcca

SEQ ID NO: 9645 - RNA, 22 nt, synthetic construct
  source 1..22: mol_type = other RNA
gggtactttgatgtctgcggcc

SEQ ID NO: 9646 - RNA, 22 nt, synthetic construct
  source 1..22: mol_type = other RNA
gggtcaatgctaggtactgcgg

SEQ ID NO: 9647 - RNA, 22 nt, synthetic construct
  source 1..22: mol_type = other RNA
gggtgacacagctgagtcccac

SEQ ID NO: 9648 - RNA, 22 nt, synthetic construct
  source 1..22: mol_type = other RNA
gggtgaggggcttggggaagag

SEQ ID NO: 9649 - RNA, 22 nt, synthetic construct
  source 1..22: mol_type = other RNA
gggtgcaacctcggagcagctt

SEQ ID NO: 9650 - RNA, 22 nt, synthetic construct
  source 1..22: mol_type = other RNA
gggtgcccagaaaagagaggcg

SEQ ID NO: 9651 - RNA, 22 nt, synthetic construct
  source 1..22: mol_type = other RNA
gggtggccagttcccgctccag

SEQ ID NO: 9652 - RNA, 22 nt, synthetic construct
  source 1..22: mol_type = other RNA
gggtgttggactaagcctttgg

SEQ ID NO: 9653 - RNA, 22 nt, synthetic construct
  source 1..22: mol_type = other RNA
ggtacaggagctccccggccgc

SEQ ID NO: 9654 - RNA, 22 nt, synthetic construct
  source 1..22: mol_type = other RNA
ggtacctcgcaagcaccttctg

SEQ ID NO: 9655 - RNA, 22 nt, synthetic construct
  source 1..22: mol_type = other RNA
ggtacctgaagcggctgcagcc

SEQ ID NO: 9656 - RNA, 22 nt, synthetic construct
  source 1..22: mol_type = other RNA
ggtactgcgggagctccttgtc

SEQ ID NO: 9657 - RNA, 22 nt, synthetic construct
  source 1..22: mol_type = other RNA
ggtactttgatgtctgcggccc

SEQ ID NO: 9658 - RNA, 22 nt, synthetic construct
  source 1..22: mol_type = other RNA
ggtagaactgctccaccggctc

SEQ ID NO: 9659 - RNA, 22 nt, synthetic construct
  source 1..22: mol_type = other RNA
ggtcaatgctaggtactgcggg

SEQ ID NO: 9660 - RNA, 22 nt, synthetic construct
  source 1..22: mol_type = other RNA
ggtcagggcaagagctattggg

SEQ ID NO: 9661 - RNA, 22 nt, synthetic construct
  source 1..22: mol_type = other RNA
ggtcaggtctcttcaagatgtg

SEQ ID NO: 9662 - RNA, 22 nt, synthetic construct
  source 1..22: mol_type = other RNA
ggtccagagcctgagcaaggcc

SEQ ID NO: 9663 - RNA, 22 nt, synthetic construct
  source 1..22: mol_type = other RNA
ggtccagggagaagtcttggcc

SEQ ID NO: 9664 - RNA, 22 nt, synthetic construct
  source 1..22: mol_type = other RNA
ggtcccggaggagcgtcagggc

SEQ ID NO: 9665 - RNA, 22 nt, synthetic construct
  source 1..22: mol_type = other RNA
ggtccgcacgtgctgtgcagga

SEQ ID NO: 9666 - RNA, 22 nt, synthetic construct
  source 1..22: mol_type = other RNA
ggtcctcacgtctgcggatggg

SEQ ID NO: 9667 - RNA, 22 nt, synthetic construct
  source 1..22: mol_type = other RNA
ggtcctcctgtagggtactttg

SEQ ID NO: 9668 - RNA, 22 nt, synthetic construct
  source 1..22: mol_type = other RNA
ggtctcttcaagatgtggctga

SEQ ID NO: 9669 - RNA, 22 nt, synthetic construct
  source 1..22: mol_type = other RNA
ggtgacacagctgagtcccacg

SEQ ID NO: 9670 - RNA, 22 nt, synthetic construct
  source 1..22: mol_type = other RNA
ggtgaggggcttggggaagaga

SEQ ID NO: 9671 - RNA, 22 nt, synthetic construct
  source 1..22: mol_type = other RNA
ggtgcaacctcggagcagcttc

SEQ ID NO: 9672 - RNA, 22 nt, synthetic construct
  source 1..22: mol_type = other RNA
ggtgcaggccaggctggagagg

SEQ ID NO: 9673 - RNA, 22 nt, synthetic construct
  source 1..22: mol_type = other RNA
ggtgcccagaaaagagaggcgg

SEQ ID NO: 9674 - RNA, 22 nt, synthetic construct
  source 1..22: mol_type = other RNA
ggtgccggtccgcacgtgctgt

SEQ ID NO: 9675 - RNA, 22 nt, synthetic construct
  source 1..22: mol_type = other RNA
ggtgctccttggcagccaacag

SEQ ID NO: 9676 - RNA, 22 nt, synthetic construct
  source 1..22: mol_type = other RNA
ggtgctctgtcatccctgagct

SEQ ID NO: 9677 - RNA, 22 nt, synthetic construct
  source 1..22: mol_type = other RNA
ggtgctgttggctgccaaggag

SEQ ID NO: 9678 - RNA, 22 nt, synthetic construct
  source 1..22: mol_type = other RNA
ggtgcttgcgaggtacctgaag

SEQ ID NO: 9679 - RNA, 22 nt, synthetic construct
  source 1..22: mol_type = other RNA
ggtggacaggaagcagaaggtg

SEQ ID NO: 9680 - RNA, 22 nt, synthetic construct
  source 1..22: mol_type = other RNA
ggtggagcagttctaccgctca

SEQ ID NO: 9681 - RNA, 22 nt, synthetic construct
  source 1..22: mol_type = other RNA
ggtggatctggtgcaggccagg

SEQ ID NO: 9682 - RNA, 22 nt, synthetic construct
  source 1..22: mol_type = other RNA
ggtggccagttcccgctccagg

SEQ ID NO: 9683 - RNA, 22 nt, synthetic construct
  source 1..22: mol_type = other RNA
ggtggggtgaggggcttgggga

SEQ ID NO: 9684 - RNA, 22 nt, synthetic construct
  source 1..22: mol_type = other RNA
ggtgggtgttggactaagcctt

SEQ ID NO: 9685 - RNA, 22 nt, synthetic construct
  source 1..22: mol_type = other RNA
ggtgttggactaagcctttggc

SEQ ID NO: 9686 - RNA, 22 nt, synthetic construct
  source 1..22: mol_type = other RNA
ggttcaagcaatggcaggggac

SEQ ID NO: 9687 - RNA, 22 nt, synthetic construct
  source 1..22: mol_type = other RNA
ggttgcaccctcctcctcacag

SEQ ID NO: 9688 - RNA, 22 nt, synthetic construct
  source 1..22: mol_type = other RNA
ggttttcagccacatcttgaag

SEQ ID NO: 9689 - RNA, 22 nt, synthetic construct
  source 1..22: mol_type = other RNA
gtacaggagctccccggccgcc

SEQ ID NO: 9690 - RNA, 22 nt, synthetic construct
  source 1..22: mol_type = other RNA
gtacatgtgcatcaggaggcgt

SEQ ID NO: 9691 - RNA, 22 nt, synthetic construct
  source 1..22: mol_type = other RNA
gtaccacgtgctgccaaattcc

SEQ ID NO: 9692 - RNA, 22 nt, synthetic construct
  source 1..22: mol_type = other RNA
gtaccctacaggaggaccagtt

SEQ ID NO: 9693 - RNA, 22 nt, synthetic construct
  source 1..22: mol_type = other RNA
gtacctagcattgaccccaagg

SEQ ID NO: 9694 - RNA, 22 nt, synthetic construct
  source 1..22: mol_type = other RNA
gtacctcgcaagcaccttctgc

SEQ ID NO: 9695 - RNA, 22 nt, synthetic construct
  source 1..22: mol_type = other RNA
gtacctgaagcggctgcagccg

SEQ ID NO: 9696 - RNA, 22 nt, synthetic construct
  source 1..22: mol_type = other RNA
gtacgactttgtcttctctgtc

SEQ ID NO: 9697 - RNA, 22 nt, synthetic construct
  source 1..22: mol_type = other RNA
gtactgcgggagctccttgtcc

SEQ ID NO: 9698 - RNA, 22 nt, synthetic construct
  source 1..22: mol_type = other RNA
gtactgggcaaggccttggagg

SEQ ID NO: 9699 - RNA, 22 nt, synthetic construct
  source 1..22: mol_type = other RNA
gtactggggaagccggccacaa

SEQ ID NO: 9700 - RNA, 22 nt, synthetic construct
  source 1..22: mol_type = other RNA
gtactttgatgtctgcggccca

SEQ ID NO: 9701 - RNA, 22 nt, synthetic construct
  source 1..22: mol_type = other RNA
gtagaactgctccaccggctct

SEQ ID NO: 9702 - RNA, 22 nt, synthetic construct
  source 1..22: mol_type = other RNA
gtagcgcatcacgtatgcctgg

SEQ ID NO: 9703 - RNA, 22 nt, synthetic construct
  source 1..22: mol_type = other RNA
gtagggctcccaggcagcgggc

SEQ ID NO: 9704 - RNA, 22 nt, synthetic construct
  source 1..22: mol_type = other RNA
gtagggctgtggctgtgactga

SEQ ID NO: 9705 - RNA, 22 nt, synthetic construct
  source 1..22: mol_type = other RNA
gtagggtactttgatgtctgcg

SEQ ID NO: 9706 - RNA, 22 nt, synthetic construct
  source 1..22: mol_type = other RNA
gtatgcctgggcctgctccatg

SEQ ID NO: 9707 - RNA, 22 nt, synthetic construct
  source 1..22: mol_type = other RNA
gtatggtgccgagcccgcaggc

SEQ ID NO: 9708 - RNA, 22 nt, synthetic construct
  source 1..22: mol_type = other RNA
gtcaatgctaggtactgcggga

SEQ ID NO: 9709 - RNA, 22 nt, synthetic construct
  source 1..22: mol_type = other RNA
gtcacagccacagccctacttt

SEQ ID NO: 9710 - RNA, 22 nt, synthetic construct
  source 1..22: mol_type = other RNA
gtcacccgtttcaggtggggtg

SEQ ID NO: 9711 - RNA, 22 nt, synthetic construct
  source 1..22: mol_type = other RNA
gtcagggcaagagctattgggc

SEQ ID NO: 9712 - RNA, 22 nt, synthetic construct
  source 1..22: mol_type = other RNA
gtcagggctctgtcttggtgct

SEQ ID NO: 9713 - RNA, 22 nt, synthetic construct
  source 1..22: mol_type = other RNA
gtcaggtctcttcaagatgtgg

SEQ ID NO: 9714 - RNA, 22 nt, synthetic construct
  source 1..22: mol_type = other RNA
gtcatagggcctcttcttcctt

SEQ ID NO: 9715 - RNA, 22 nt, synthetic construct
  source 1..22: mol_type = other RNA
gtcatccctgagctctcaaagt

SEQ ID NO: 9716 - RNA, 22 nt, synthetic construct
  source 1..22: mol_type = other RNA
gtccaacacccaccgcgggccg

SEQ ID NO: 9717 - RNA, 22 nt, synthetic construct
  source 1..22: mol_type = other RNA
gtccaccgaggcagccgccgat

SEQ ID NO: 9718 - RNA, 22 nt, synthetic construct
  source 1..22: mol_type = other RNA
gtccagagcctgagcaaggccg

SEQ ID NO: 9719 - RNA, 22 nt, synthetic construct
  source 1..22: mol_type = other RNA
gtccagggagaagtcttggccc

SEQ ID NO: 9720 - RNA, 22 nt, synthetic construct
  source 1..22: mol_type = other RNA
gtcccacgaggctccccaatcc

SEQ ID NO: 9721 - RNA, 22 nt, synthetic construct
  source 1..22: mol_type = other RNA
gtccccggctgcagccgcttca

SEQ ID NO: 9722 - RNA, 22 nt, synthetic construct
  source 1..22: mol_type = other RNA
gtcccctgccattgcttgaacc

SEQ ID NO: 9723 - RNA, 22 nt, synthetic construct
  source 1..22: mol_type = other RNA
gtcccggaggagcgtcagggct

SEQ ID NO: 9724 - RNA, 22 nt, synthetic construct
  source 1..22: mol_type = other RNA
gtcccgtgagcgtggagggcag

SEQ ID NO: 9725 - RNA, 22 nt, synthetic construct
  source 1..22: mol_type = other RNA
gtccgagctggccttccccagc

SEQ ID NO: 9726 - RNA, 22 nt, synthetic construct
  source 1..22: mol_type = other RNA
gtccgcacgtgctgtgcaggaa

SEQ ID NO: 9727 - RNA, 22 nt, synthetic construct
  source 1..22: mol_type = other RNA
gtccggcttctccatggagcag

SEQ ID NO: 9728 - RNA, 22 nt, synthetic construct
  source 1..22: mol_type = other RNA
gtccgggggatgcctatggcct

SEQ ID NO: 9729 - RNA, 22 nt, synthetic construct
  source 1..22: mol_type = other RNA
gtccggggtggccagttcccgc

SEQ ID NO: 9730 - RNA, 22 nt, synthetic construct
  source 1..22: mol_type = other RNA
gtcctcacgtctgcggatggga

SEQ ID NO: 9731 - RNA, 22 nt, synthetic construct
  source 1..22: mol_type = other RNA
gtcctccccaagctccagcagg

SEQ ID NO: 9732 - RNA, 22 nt, synthetic construct
  source 1..22: mol_type = other RNA
gtcctcctgtagggtactttga

SEQ ID NO: 9733 - RNA, 22 nt, synthetic construct
  source 1..22: mol_type = other RNA
gtcctgcagtgagcggtagaac

SEQ ID NO: 9734 - RNA, 22 nt, synthetic construct
  source 1..22: mol_type = other RNA
gtccttgatttcgccactcaga

SEQ ID NO: 9735 - RNA, 22 nt, synthetic construct
  source 1..22: mol_type = other RNA
gtcgagggctgcacggcccagc

SEQ ID NO: 9736 - RNA, 22 nt, synthetic construct
  source 1..22: mol_type = other RNA
gtcggcctgctgggccgtgcag

SEQ ID NO: 9737 - RNA, 22 nt, synthetic construct
  source 1..22: mol_type = other RNA
gtcggccttgctcaggctctgg

SEQ ID NO: 9738 - RNA, 22 nt, synthetic construct
  source 1..22: mol_type = other RNA
gtcgtactggggaagccggcca

SEQ ID NO: 9739 - RNA, 22 nt, synthetic construct
  source 1..22: mol_type = other RNA
gtctaggatgagcagaacgcgg

SEQ ID NO: 9740 - RNA, 22 nt, synthetic construct
  source 1..22: mol_type = other RNA
gtctcacgcggccgccggtgct

SEQ ID NO: 9741 - RNA, 22 nt, synthetic construct
  source 1..22: mol_type = other RNA
gtctcttcaagatgtggctgaa

SEQ ID NO: 9742 - RNA, 22 nt, synthetic construct
  source 1..22: mol_type = other RNA
gtctcttccccaagcccctcac

SEQ ID NO: 9743 - RNA, 22 nt, synthetic construct
  source 1..22: mol_type = other RNA
gtctgcggatgggaactggtcc

SEQ ID NO: 9744 - RNA, 22 nt, synthetic construct
  source 1..22: mol_type = other RNA
gtctgcggcccagctcccaggc

SEQ ID NO: 9745 - RNA, 22 nt, synthetic construct
  source 1..22: mol_type = other RNA
gtcttctctgtcccctgccatt

SEQ ID NO: 9746 - RNA, 22 nt, synthetic construct
  source 1..22: mol_type = other RNA
gtcttggcccgccgcctccaag

SEQ ID NO: 9747 - RNA, 22 nt, synthetic construct
  source 1..22: mol_type = other RNA
gtcttggtgctctgtcatccct

SEQ ID NO: 9748 - RNA, 22 nt, synthetic construct
  source 1..22: mol_type = other RNA
gtgacacagctgagtcccacga

SEQ ID NO: 9749 - RNA, 22 nt, synthetic construct
  source 1..22: mol_type = other RNA
gtgactgagaagaagtggccgg

SEQ ID NO: 9750 - RNA, 22 nt, synthetic construct
  source 1..22: mol_type = other RNA
gtgagacacgagtgattgctgt

SEQ ID NO: 9751 - RNA, 22 nt, synthetic construct
  source 1..22: mol_type = other RNA
gtgagccgggcctgggcttgtg

SEQ ID NO: 9752 - RNA, 22 nt, synthetic construct
  source 1..22: mol_type = other RNA
gtgagcggtagaactgctccac

SEQ ID NO: 9753 - RNA, 22 nt, synthetic construct
  source 1..22: mol_type = other RNA
gtgagcgtggagggcagcttgg

SEQ ID NO: 9754 - RNA, 22 nt, synthetic construct
  source 1..22: mol_type = other RNA
gtgaggacctgggcgatggcca

SEQ ID NO: 9755 - RNA, 22 nt, synthetic construct
  source 1..22: mol_type = other RNA
gtgaggaggagggtgcaacctc

SEQ ID NO: 9756 - RNA, 22 nt, synthetic construct
  source 1..22: mol_type = other RNA
gtgaggcgggtgcccagaaaag

SEQ ID NO: 9757 - RNA, 22 nt, synthetic construct
  source 1..22: mol_type = other RNA
gtgaggggcttggggaagagac

SEQ ID NO: 9758 - RNA, 22 nt, synthetic construct
  source 1..22: mol_type = other RNA
gtgatgcgctactttgagagct

SEQ ID NO: 9759 - RNA, 22 nt, synthetic construct
  source 1..22: mol_type = other RNA
gtgattgctgtgctgggcaaag

SEQ ID NO: 9760 - RNA, 22 nt, synthetic construct
  source 1..22: mol_type = other RNA
gtgcaacctcggagcagcttct

SEQ ID NO: 9761 - RNA, 22 nt, synthetic construct
  source 1..22: mol_type = other RNA
gtgcagcagctccagcagctgc

SEQ ID NO: 9762 - RNA, 22 nt, synthetic construct
  source 1..22: mol_type = other RNA
gtgcagccctcgacagcccccc

SEQ ID NO: 9763 - RNA, 22 nt, synthetic construct
  source 1..22: mol_type = other RNA
gtgcaggaagccatcttgcgct

SEQ ID NO: 9764 - RNA, 22 nt, synthetic construct
  source 1..22: mol_type = other RNA
gtgcaggccaggctggagagga

SEQ ID NO: 9765 - RNA, 22 nt, synthetic construct
  source 1..22: mol_type = other RNA
gtgcatcaggaggcgtgaggcg

SEQ ID NO: 9766 - RNA, 22 nt, synthetic construct
  source 1..22: mol_type = other RNA
gtgccacgctttctggctgggc

SEQ ID NO: 9767 - RNA, 22 nt, synthetic construct
  source 1..22: mol_type = other RNA
gtgccagctctcagaggccctg

SEQ ID NO: 9768 - RNA, 22 nt, synthetic construct
  source 1..22: mol_type = other RNA
gtgcccagaaaagagaggcggc

SEQ ID NO: 9769 - RNA, 22 nt, synthetic construct
  source 1..22: mol_type = other RNA
gtgccgggcagtgtgccagctc

SEQ ID NO: 9770 - RNA, 22 nt, synthetic construct
  source 1..22: mol_type = other RNA
gtgccggtccgcacgtgctgtg

SEQ ID NO: 9771 - RNA, 22 nt, synthetic construct
  source 1..22: mol_type = other RNA
gtgctccttggcagccaacagc

SEQ ID NO: 9772 - RNA, 22 nt, synthetic construct
  source 1..22: mol_type = other RNA
gtgctctgtcatccctgagctc

SEQ ID NO: 9773 - RNA, 22 nt, synthetic construct
  source 1..22: mol_type = other RNA
gtgctgccaaattccagcctcc

SEQ ID NO: 9774 - RNA, 22 nt, synthetic construct
  source 1..22: mol_type = other RNA
gtgctgcggaggtccagggaga

SEQ ID NO: 9775 - RNA, 22 nt, synthetic construct
  source 1..22: mol_type = other RNA
gtgctgggcaaagctggtcagg

SEQ ID NO: 9776 - RNA, 22 nt, synthetic construct
  source 1..22: mol_type = other RNA
gtgctgtgcaggaagccatctt

SEQ ID NO: 9777 - RNA, 22 nt, synthetic construct
  source 1..22: mol_type = other RNA
gtgctgttggctgccaaggagc

SEQ ID NO: 9778 - RNA, 22 nt, synthetic construct
  source 1..22: mol_type = other RNA
gtgcttgcgaggtacctgaagc

SEQ ID NO: 9779 - RNA, 22 nt, synthetic construct
  source 1..22: mol_type = other RNA
gtggacaggaagcagaaggtgc

SEQ ID NO: 9780 - RNA, 22 nt, synthetic construct
  source 1..22: mol_type = other RNA
gtggagcagttctaccgctcac

SEQ ID NO: 9781 - RNA, 22 nt, synthetic construct
  source 1..22: mol_type = other RNA
gtggagggcagcttggcgtcct

SEQ ID NO: 9782 - RNA, 22 nt, synthetic construct
  source 1..22: mol_type = other RNA
gtggaggtggatctggtgcagg

SEQ ID NO: 9783 - RNA, 22 nt, synthetic construct
  source 1..22: mol_type = other RNA
gtggatctggtgcaggccaggc

SEQ ID NO: 9784 - RNA, 22 nt, synthetic construct
  source 1..22: mol_type = other RNA
gtggcacgccctccagccagtt

SEQ ID NO: 9785 - RNA, 22 nt, synthetic construct
  source 1..22: mol_type = other RNA
gtggccagttcccgctccaggc

SEQ ID NO: 9786 - RNA, 22 nt, synthetic construct
  source 1..22: mol_type = other RNA
gtggccggcttccccagtacga

SEQ ID NO: 9787 - RNA, 22 nt, synthetic construct
  source 1..22: mol_type = other RNA
gtggccggtcccggaggagcgt

SEQ ID NO: 9788 - RNA, 22 nt, synthetic construct
  source 1..22: mol_type = other RNA
gtggcgaaatcaaggacaagga

SEQ ID NO: 9789 - RNA, 22 nt, synthetic construct
  source 1..22: mol_type = other RNA
gtggcggccgatgaggttttca

SEQ ID NO: 9790 - RNA, 22 nt, synthetic construct
  source 1..22: mol_type = other RNA
gtggctgaaaacctcatcggcc

SEQ ID NO: 9791 - RNA, 22 nt, synthetic construct
  source 1..22: mol_type = other RNA
gtggctggctctgagtggcgaa

SEQ ID NO: 9792 - RNA, 22 nt, synthetic construct
  source 1..22: mol_type = other RNA
gtggctgtgactgagaagaagt

SEQ ID NO: 9793 - RNA, 22 nt, synthetic construct
  source 1..22: mol_type = other RNA
gtggctgtgggcccagggagaa

SEQ ID NO: 9794 - RNA, 22 nt, synthetic construct
  source 1..22: mol_type = other RNA
gtgggactcagctgtgtcaccc

SEQ ID NO: 9795 - RNA, 22 nt, synthetic construct
  source 1..22: mol_type = other RNA
gtgggcccagggagaagagcag

SEQ ID NO: 9796 - RNA, 22 nt, synthetic construct
  source 1..22: mol_type = other RNA
gtgggcgcagtgcagcagctcc

SEQ ID NO: 9797 - RNA, 22 nt, synthetic construct
  source 1..22: mol_type = other RNA
gtggggtgaggggcttggggaa

SEQ ID NO: 9798 - RNA, 22 nt, synthetic construct
  source 1..22: mol_type = other RNA
gtgggtgttggactaagccttt

SEQ ID NO: 9799 - RNA, 22 nt, synthetic construct
  source 1..22: mol_type = other RNA
gtggtacaggagctccccggcc

SEQ ID NO: 9800 - RNA, 22 nt, synthetic construct
  source 1..22: mol_type = other RNA
gtgtcacccgtttcaggtgggg

SEQ ID NO: 9801 - RNA, 22 nt, synthetic construct
  source 1..22: mol_type = other RNA
gtgtccccggctgcagccgctt

SEQ ID NO: 9802 - RNA, 22 nt, synthetic construct
  source 1..22: mol_type = other RNA
gtgtcctgcagtgagcggtaga

SEQ ID NO: 9803 - RNA, 22 nt, synthetic construct
  source 1..22: mol_type = other RNA
gtgtctcacgcggccgccggtg

SEQ ID NO: 9804 - RNA, 22 nt, synthetic construct
  source 1..22: mol_type = other RNA
gtgtgccagctctcagaggccc

SEQ ID NO: 9805 - RNA, 22 nt, synthetic construct
  source 1..22: mol_type = other RNA
gtgttggactaagcctttggcc

SEQ ID NO: 9806 - RNA, 22 nt, synthetic construct
  source 1..22: mol_type = other RNA
gttcaagcaatggcaggggaca

SEQ ID NO: 9807 - RNA, 22 nt, synthetic construct
  source 1..22: mol_type = other RNA
gttcccatccgcagacgtgagg

SEQ ID NO: 9808 - RNA, 22 nt, synthetic construct
  source 1..22: mol_type = other RNA
gttcccgctccaggctcttgct

SEQ ID NO: 9809 - RNA, 22 nt, synthetic construct
  source 1..22: mol_type = other RNA
gttctaccgctcactgcaggac

SEQ ID NO: 9810 - RNA, 22 nt, synthetic construct
  source 1..22: mol_type = other RNA
gttctgcccagtccggggtggc

SEQ ID NO: 9811 - RNA, 22 nt, synthetic construct
  source 1..22: mol_type = other RNA
gttctgctcatcctagacggct

SEQ ID NO: 9812 - RNA, 22 nt, synthetic construct
  source 1..22: mol_type = other RNA
gttgcaccctcctcctcacagc

SEQ ID NO: 9813 - RNA, 22 nt, synthetic construct
  source 1..22: mol_type = other RNA
gttggactaagcctttggccat

SEQ ID NO: 9814 - RNA, 22 nt, synthetic construct
  source 1..22: mol_type = other RNA
gttggctgccaaggagcaccgg

SEQ ID NO: 9815 - RNA, 22 nt, synthetic construct
  source 1..22: mol_type = other RNA
gttgtcatagggcctcttcttc

SEQ ID NO: 9816 - RNA, 22 nt, synthetic construct
  source 1..22: mol_type = other RNA
gtttcaggtggggtgaggggct

SEQ ID NO: 9817 - RNA, 22 nt, synthetic construct
  source 1..22: mol_type = other RNA
gttttcagccacatcttgaaga

SEQ ID NO: 9818 - RNA, 22 nt, synthetic construct
  source 1..22: mol_type = other RNA
taagcctttggccatcgcccag

SEQ ID NO: 9819 - RNA, 22 nt, synthetic construct
  source 1..22: mol_type = other RNA
tacaggagctccccggccgcct

SEQ ID NO: 9820 - RNA, 22 nt, synthetic construct
  source 1..22: mol_type = other RNA
tacaggaggaccagttcccatc

SEQ ID NO: 9821 - RNA, 22 nt, synthetic construct
  source 1..22: mol_type = other RNA
tacatgtgcatcaggaggcgtg

SEQ ID NO: 9822 - RNA, 22 nt, synthetic construct
  source 1..22: mol_type = other RNA
taccacgtgctgccaaattcca

SEQ ID NO: 9823 - RNA, 22 nt, synthetic construct
  source 1..22: mol_type = other RNA
tacccccaccctgacacgcccc

SEQ ID NO: 9824 - RNA, 22 nt, synthetic construct
  source 1..22: mol_type = other RNA
taccctacaggaggaccagttc

SEQ ID NO: 9825 - RNA, 22 nt, synthetic construct
  source 1..22: mol_type = other RNA
taccgctcactgcaggacacgt

SEQ ID NO: 9826 - RNA, 22 nt, synthetic construct
  source 1..22: mol_type = other RNA
tacctagcattgaccccaagga

SEQ ID NO: 9827 - RNA, 22 nt, synthetic construct
  source 1..22: mol_type = other RNA
tacctcgcaagcaccttctgct

SEQ ID NO: 9828 - RNA, 22 nt, synthetic construct
  source 1..22: mol_type = other RNA
tacctgaagcggctgcagccgg

SEQ ID NO: 9829 - RNA, 22 nt, synthetic construct
  source 1..22: mol_type = other RNA
tacgactttgtcttctctgtcc

SEQ ID NO: 9830 - RNA, 22 nt, synthetic construct
  source 1..22: mol_type = other RNA
tacgtgatgcgctactttgaga

SEQ ID NO: 9831 - RNA, 22 nt, synthetic construct
  source 1..22: mol_type = other RNA
tacgtgtcctgcagtgagcggt

SEQ ID NO: 9832 - RNA, 22 nt, synthetic construct
  source 1..22: mol_type = other RNA
tactcgggccatcggcggctgc

SEQ ID NO: 9833 - RNA, 22 nt, synthetic construct
  source 1..22: mol_type = other RNA
tactgcgggagctccttgtcct

SEQ ID NO: 9834 - RNA, 22 nt, synthetic construct
  source 1..22: mol_type = other RNA
tactgggcaaggccttggaggc

SEQ ID NO: 9835 - RNA, 22 nt, synthetic construct
  source 1..22: mol_type = other RNA
tactggggaagccggccacaag

SEQ ID NO: 9836 - RNA, 22 nt, synthetic construct
  source 1..22: mol_type = other RNA
tactttgagagctcagggatga

SEQ ID NO: 9837 - RNA, 22 nt, synthetic construct
  source 1..22: mol_type = other RNA
tactttgatgtctgcggcccag

SEQ ID NO: 9838 - RNA, 22 nt, synthetic construct
  source 1..22: mol_type = other RNA
tactttgtgccgggcagtgtgc

SEQ ID NO: 9839 - RNA, 22 nt, synthetic construct
  source 1..22: mol_type = other RNA
tagaactgctccaccggctctg

SEQ ID NO: 9840 - RNA, 22 nt, synthetic construct
  source 1..22: mol_type = other RNA
tagacggcttcgaggagctgga

SEQ ID NO: 9841 - RNA, 22 nt, synthetic construct
  source 1..22: mol_type = other RNA
tagagtcccgtgagcgtggagg

SEQ ID NO: 9842 - RNA, 22 nt, synthetic construct
  source 1..22: mol_type = other RNA
tagcattgaccccaaggaagaa

SEQ ID NO: 9843 - RNA, 22 nt, synthetic construct
  source 1..22: mol_type = other RNA
tagcgcatcacgtatgcctggg

SEQ ID NO: 9844 - RNA, 22 nt, synthetic construct
  source 1..22: mol_type = other RNA
tagctcttgccctgaccagctt

SEQ ID NO: 9845 - RNA, 22 nt, synthetic construct
  source 1..22: mol_type = other RNA
taggatgagcagaacgcggtca

SEQ ID NO: 9846 - RNA, 22 nt, synthetic construct
  source 1..22: mol_type = other RNA
taggatgccatccgggcctgcg

SEQ ID NO: 9847 - RNA, 22 nt, synthetic construct
  source 1..22: mol_type = other RNA
taggcatcccccggacggttca

SEQ ID NO: 9848 - RNA, 22 nt, synthetic construct
  source 1..22: mol_type = other RNA
tagggcctcttcttccttgggg

SEQ ID NO: 9849 - RNA, 22 nt, synthetic construct
  source 1..22: mol_type = other RNA
tagggcgtcggccttgctcagg

SEQ ID NO: 9850 - RNA, 22 nt, synthetic construct
  source 1..22: mol_type = other RNA
tagggctcccaggcagcgggcg

SEQ ID NO: 9851 - RNA, 22 nt, synthetic construct
  source 1..22: mol_type = other RNA
tagggctgtggctgtgactgag

SEQ ID NO: 9852 - RNA, 22 nt, synthetic construct
  source 1..22: mol_type = other RNA
tagggtactttgatgtctgcgg

SEQ ID NO: 9853 - RNA, 22 nt, synthetic construct
  source 1..22: mol_type = other RNA
taggtactgcgggagctccttg

SEQ ID NO: 9854 - RNA, 22 nt, synthetic construct
  source 1..22: mol_type = other RNA
tagtccaacacccaccgcgggc

SEQ ID NO: 9855 - RNA, 22 nt, synthetic construct
  source 1..22: mol_type = other RNA
tagtggaggtggatctggtgca

SEQ ID NO: 9856 - RNA, 22 nt, synthetic construct
  source 1..22: mol_type = other RNA
tatgacaactggctggagggcg

SEQ ID NO: 9857 - RNA, 22 nt, synthetic construct
  source 1..22: mol_type = other RNA
tatgcctgggcctgctccatgg

SEQ ID NO: 9858 - RNA, 22 nt, synthetic construct
  source 1..22: mol_type = other RNA
tatggcctgcaggatctgctct

SEQ ID NO: 9859 - RNA, 22 nt, synthetic construct
  source 1..22: mol_type = other RNA
tatggtgccgagcccgcaggcc

SEQ ID NO: 9860 - RNA, 22 nt, synthetic construct
  source 1..22: mol_type = other RNA
tatgtcggcctgctgggccgtg

SEQ ID NO: 9861 - RNA, 22 nt, synthetic construct
  source 1..22: mol_type = other RNA
tattgggctggggcagtgagcc

SEQ ID NO: 9862 - RNA, 22 nt, synthetic construct
  source 1..22: mol_type = other RNA
tatttgagctgtccggcttctc

SEQ ID NO: 9863 - RNA, 22 nt, synthetic construct
  source 1..22: mol_type = other RNA
tcaaagtaccctacaggaggac

SEQ ID NO: 9864 - RNA, 22 nt, synthetic construct
  source 1..22: mol_type = other RNA
tcaaagtagcgcatcacgtatg

SEQ ID NO: 9865 - RNA, 22 nt, synthetic construct
  source 1..22: mol_type = other RNA
tcaaatagggcgtcggccttgc

SEQ ID NO: 9866 - RNA, 22 nt, synthetic construct
  source 1..22: mol_type = other RNA
tcaagatgtggctgaaaacctc

SEQ ID NO: 9867 - RNA, 22 nt, synthetic construct
  source 1..22: mol_type = other RNA
tcaagcaatggcaggggacaga

SEQ ID NO: 9868 - RNA, 22 nt, synthetic construct
  source 1..22: mol_type = other RNA
tcaaggacaaggagctcccgca

SEQ ID NO: 9869 - RNA, 22 nt, synthetic construct
  source 1..22: mol_type = other RNA
tcaatgctaggtactgcgggag

SEQ ID NO: 9870 - RNA, 22 nt, synthetic construct
  source 1..22: mol_type = other RNA
tcacagccacagccctactttg

SEQ ID NO: 9871 - RNA, 22 nt, synthetic construct
  source 1..22: mol_type = other RNA
tcacatacccccaccctgacac

SEQ ID NO: 9872 - RNA, 22 nt, synthetic construct
  source 1..22: mol_type = other RNA
tcaccccacctgaaacgggtga

SEQ ID NO: 9873 - RNA, 22 nt, synthetic construct
  source 1..22: mol_type = other RNA
tcacccgtttcaggtggggtga

SEQ ID NO: 9874 - RNA, 22 nt, synthetic construct
  source 1..22: mol_type = other RNA
tcacgcctcctgatgcacatgt

SEQ ID NO: 9875 - RNA, 22 nt, synthetic construct
  source 1..22: mol_type = other RNA
tcacgcggccgccggtgctcct

SEQ ID NO: 9876 - RNA, 22 nt, synthetic construct
  source 1..22: mol_type = other RNA
tcacgggactctatgtcggcct

SEQ ID NO: 9877 - RNA, 22 nt, synthetic construct
  source 1..22: mol_type = other RNA
tcacgtatgcctgggcctgctc

SEQ ID NO: 9878 - RNA, 22 nt, synthetic construct
  source 1..22: mol_type = other RNA
tcacgtctgcggatgggaactg

SEQ ID NO: 9879 - RNA, 22 nt, synthetic construct
  source 1..22: mol_type = other RNA
tcactcgtgtctcacgcggccg

SEQ ID NO: 9880 - RNA, 22 nt, synthetic construct
  source 1..22: mol_type = other RNA
tcactgcaggacacgtatggtg

SEQ ID NO: 9881 - RNA, 22 nt, synthetic construct
  source 1..22: mol_type = other RNA
tcactgccccagcccaatagct

SEQ ID NO: 9882 - RNA, 22 nt, synthetic construct
  source 1..22: mol_type = other RNA
tcagagccagccacagggcccc

SEQ ID NO: 9883 - RNA, 22 nt, synthetic construct
  source 1..22: mol_type = other RNA
tcagaggccctgctggagcttg

SEQ ID NO: 9884 - RNA, 22 nt, synthetic construct
  source 1..22: mol_type = other RNA
tcagccacatcttgaagagacc

SEQ ID NO: 9885 - RNA, 22 nt, synthetic construct
  source 1..22: mol_type = other RNA
tcagccaggcctccttgggcca

SEQ ID NO: 9886 - RNA, 22 nt, synthetic construct
  source 1..22: mol_type = other RNA
tcagcccagccagaaagcgtgg

SEQ ID NO: 9887 - RNA, 22 nt, synthetic construct
  source 1..22: mol_type = other RNA
tcagctgtgtcacccgtttcag

SEQ ID NO: 9888 - RNA, 22 nt, synthetic construct
  source 1..22: mol_type = other RNA
tcaggaggcgtgaggcgggtgc

SEQ ID NO: 9889 - RNA, 22 nt, synthetic construct
  source 1..22: mol_type = other RNA
tcaggctctggaccaggcggcc

SEQ ID NO: 9890 - RNA, 22 nt, synthetic construct
  source 1..22: mol_type = other RNA
tcagggatgacagagcaccaag

SEQ ID NO: 9891 - RNA, 22 nt, synthetic construct
  source 1..22: mol_type = other RNA
tcagggcaagagctattgggct

SEQ ID NO: 9892 - RNA, 22 nt, synthetic construct
  source 1..22: mol_type = other RNA
tcagggctctgtcttggtgctc

SEQ ID NO: 9893 - RNA, 22 nt, synthetic construct
  source 1..22: mol_type = other RNA
tcaggtacctcgcaagcacctt

SEQ ID NO: 9894 - RNA, 22 nt, synthetic construct
  source 1..22: mol_type = other RNA
tcaggtctcttcaagatgtggc

SEQ ID NO: 9895 - RNA, 22 nt, synthetic construct
  source 1..22: mol_type = other RNA
tcaggtggggtgaggggcttgg

SEQ ID NO: 9896 - RNA, 22 nt, synthetic construct
  source 1..22: mol_type = other RNA
tcagtcacagccacagccctac

SEQ ID NO: 9897 - RNA, 22 nt, synthetic construct
  source 1..22: mol_type = other RNA
tcatagggcctcttcttccttg

SEQ ID NO: 9898 - RNA, 22 nt, synthetic construct
  source 1..22: mol_type = other RNA
tcatccctgagctctcaaagta

SEQ ID NO: 9899 - RNA, 22 nt, synthetic construct
  source 1..22: mol_type = other RNA
tcatcctagacggcttcgagga

SEQ ID NO: 9900 - RNA, 22 nt, synthetic construct
  source 1..22: mol_type = other RNA
tcatcggccgccacgagtggct

SEQ ID NO: 9901 - RNA, 22 nt, synthetic construct
  source 1..22: mol_type = other RNA
tccaacacccaccgcgggccgc

SEQ ID NO: 9902 - RNA, 22 nt, synthetic construct
  source 1..22: mol_type = other RNA
tccaaggccttgcccagtacat

SEQ ID NO: 9903 - RNA, 22 nt, synthetic construct
  source 1..22: mol_type = other RNA
tccaccgaggcagccgccgatg

SEQ ID NO: 9904 - RNA, 22 nt, synthetic construct
  source 1..22: mol_type = other RNA
tccaccggctctgcaaaggcca

SEQ ID NO: 9905 - RNA, 22 nt, synthetic construct
  source 1..22: mol_type = other RNA
tccacctccactaggatgccat

SEQ ID NO: 9906 - RNA, 22 nt, synthetic construct
  source 1..22: mol_type = other RNA
tccacgctcacgggactctatg

SEQ ID NO: 9907 - RNA, 22 nt, synthetic construct
  source 1..22: mol_type = other RNA
tccactaggatgccatccgggc

SEQ ID NO: 9908 - RNA, 22 nt, synthetic construct
  source 1..22: mol_type = other RNA
tccagaagaagctgctccgagg

SEQ ID NO: 9909 - RNA, 22 nt, synthetic construct
  source 1..22: mol_type = other RNA
tccagagcctgagcaaggccga

SEQ ID NO: 9910 - RNA, 22 nt, synthetic construct
  source 1..22: mol_type = other RNA
tccagaggggcaaatgccagtg

SEQ ID NO: 9911 - RNA, 22 nt, synthetic construct
  source 1..22: mol_type = other RNA
tccagcagctgccgcgcccgca

SEQ ID NO: 9912 - RNA, 22 nt, synthetic construct
  source 1..22: mol_type = other RNA
tccagcagggcctctgagagct

SEQ ID NO: 9913 - RNA, 22 nt, synthetic construct
  source 1..22: mol_type = other RNA
tccagccagttgtcatagggcc

SEQ ID NO: 9914 - RNA, 22 nt, synthetic construct
  source 1..22: mol_type = other RNA
tccagcctcccgcccgctgcct

SEQ ID NO: 9915 - RNA, 22 nt, synthetic construct
  source 1..22: mol_type = other RNA
tccagcctcctcggcctcgtgg

SEQ ID NO: 9916 - RNA, 22 nt, synthetic construct
  source 1..22: mol_type = other RNA
tccagcctggcctgcaccagat

SEQ ID NO: 9917 - RNA, 22 nt, synthetic construct
  source 1..22: mol_type = other RNA
tccagctcctcgaagccgtcta

SEQ ID NO: 9918 - RNA, 22 nt, synthetic construct
  source 1..22: mol_type = other RNA
tccaggctcttgctgctgctcc

SEQ ID NO: 9919 - RNA, 22 nt, synthetic construct
  source 1..22: mol_type = other RNA
tccagggagaagtcttggcccg

SEQ ID NO: 9920 - RNA, 22 nt, synthetic construct
  source 1..22: mol_type = other RNA
tccatggagaagccggacagct

SEQ ID NO: 9921 - RNA, 22 nt, synthetic construct
  source 1..22: mol_type = other RNA
tccatggagcaggcccaggcat

SEQ ID NO: 9922 - RNA, 22 nt, synthetic construct
  source 1..22: mol_type = other RNA
tcccacgaggctccccaatcca

SEQ ID NO: 9923 - RNA, 22 nt, synthetic construct
  source 1..22: mol_type = other RNA
tcccaggccagcttggccagct

SEQ ID NO: 9924 - RNA, 22 nt, synthetic construct
  source 1..22: mol_type = other RNA
tcccatccgcagacgtgaggac

SEQ ID NO: 9925 - RNA, 22 nt, synthetic construct
  source 1..22: mol_type = other RNA
tccccaagcccctcaccccacc

SEQ ID NO: 9926 - RNA, 22 nt, synthetic construct
  source 1..22: mol_type = other RNA
tccccaagctccagcagggcct

SEQ ID NO: 9927 - RNA, 22 nt, synthetic construct
  source 1..22: mol_type = other RNA
tccccaatccagaggggcaaat

SEQ ID NO: 9928 - RNA, 22 nt, synthetic construct
  source 1..22: mol_type = other RNA
tccccagcttcctcctgcaatg

SEQ ID NO: 9929 - RNA, 22 nt, synthetic construct
  source 1..22: mol_type = other RNA
tccccagtacgactttgtcttc

SEQ ID NO: 9930 - RNA, 22 nt, synthetic construct
  source 1..22: mol_type = other RNA
tcccccggacggttcaagcaat

SEQ ID NO: 9931 - RNA, 22 nt, synthetic construct
  source 1..22: mol_type = other RNA
tccccggccgcctctcttttct

SEQ ID NO: 9932 - RNA, 22 nt, synthetic construct
  source 1..22: mol_type = other RNA
tccccggctgcagccgcttcag

SEQ ID NO: 9933 - RNA, 22 nt, synthetic construct
  source 1..22: mol_type = other RNA
tcccctgccattgcttgaaccg

SEQ ID NO: 9934 - RNA, 22 nt, synthetic construct
  source 1..22: mol_type = other RNA
tcccgcagtacctagcattgac

SEQ ID NO: 9935 - RNA, 22 nt, synthetic construct
  source 1..22: mol_type = other RNA
tcccgctccaggctcttgctgc

SEQ ID NO: 9936 - RNA, 22 nt, synthetic construct
  source 1..22: mol_type = other RNA
tcccggaggagcgtcagggctc

SEQ ID NO: 9937 - RNA, 22 nt, synthetic construct
  source 1..22: mol_type = other RNA
tcccgtgagcgtggagggcagc

SEQ ID NO: 9938 - RNA, 22 nt, synthetic construct
  source 1..22: mol_type = other RNA
tccctgagctctcaaagtagcg

SEQ ID NO: 9939 - RNA, 22 nt, synthetic construct
  source 1..22: mol_type = other RNA
tccctggacctccgcagcactg

SEQ ID NO: 9940 - RNA, 22 nt, synthetic construct
  source 1..22: mol_type = other RNA
tccctgggcccacagccactcg

SEQ ID NO: 9941 - RNA, 22 nt, synthetic construct
  source 1..22: mol_type = other RNA
tccgagctggccttccccagct

SEQ ID NO: 9942 - RNA, 22 nt, synthetic construct
  source 1..22: mol_type = other RNA
tccgaggttgcaccctcctcct

SEQ ID NO: 9943 - RNA, 22 nt, synthetic construct
  source 1..22: mol_type = other RNA
tccgcacgtgctgtgcaggaag

SEQ ID NO: 9944 - RNA, 22 nt, synthetic construct
  source 1..22: mol_type = other RNA
tccgcagacgtgaggacctggg

SEQ ID NO: 9945 - RNA, 22 nt, synthetic construct
  source 1..22: mol_type = other RNA
tccgcagcactggcatttgccc

SEQ ID NO: 9946 - RNA, 22 nt, synthetic construct
  source 1..22: mol_type = other RNA
tccggcttctccatggagcagg

SEQ ID NO: 9947 - RNA, 22 nt, synthetic construct
  source 1..22: mol_type = other RNA
tccgggaccggccacttcttct

SEQ ID NO: 9948 - RNA, 22 nt, synthetic construct
  source 1..22: mol_type = other RNA
tccgggggatgcctatggcctg

SEQ ID NO: 9949 - RNA, 22 nt, synthetic construct
  source 1..22: mol_type = other RNA
tccggggtggccagttcccgct

SEQ ID NO: 9950 - RNA, 22 nt, synthetic construct
  source 1..22: mol_type = other RNA
tcctagacggcttcgaggagct

SEQ ID NO: 9951 - RNA, 22 nt, synthetic construct
  source 1..22: mol_type = other RNA
tcctagtggaggtggatctggt

SEQ ID NO: 9952 - RNA, 22 nt, synthetic construct
  source 1..22: mol_type = other RNA
tcctcacgtctgcggatgggaa

SEQ ID NO: 9953 - RNA, 22 nt, synthetic construct
  source 1..22: mol_type = other RNA
tcctccccaagctccagcaggg

SEQ ID NO: 9954 - RNA, 22 nt, synthetic construct
  source 1..22: mol_type = other RNA
tcctccgggaccggccacttct

SEQ ID NO: 9955 - RNA, 22 nt, synthetic construct
  source 1..22: mol_type = other RNA
tcctcctcacagcccggccccg

SEQ ID NO: 9956 - RNA, 22 nt, synthetic construct
  source 1..22: mol_type = other RNA
tcctcctgcaatgcttcctggg

SEQ ID NO: 9957 - RNA, 22 nt, synthetic construct
  source 1..22: mol_type = other RNA
tcctcctgtagggtactttgat

SEQ ID NO: 9958 - RNA, 22 nt, synthetic construct
  source 1..22: mol_type = other RNA
tcctcgaagccgtctaggatga

SEQ ID NO: 9959 - RNA, 22 nt, synthetic construct
  source 1..22: mol_type = other RNA
tcctcggcctcgtgggcgcagt

SEQ ID NO: 9960 - RNA, 22 nt, synthetic construct
  source 1..22: mol_type = other RNA
tcctctccagcctggcctgcac

SEQ ID NO: 9961 - RNA, 22 nt, synthetic construct
  source 1..22: mol_type = other RNA
tcctgatgcacatgtactgggc

SEQ ID NO: 9962 - RNA, 22 nt, synthetic construct
  source 1..22: mol_type = other RNA
tcctgcaatgcttcctgggggc

SEQ ID NO: 9963 - RNA, 22 nt, synthetic construct
  source 1..22: mol_type = other RNA
tcctgcacagcacgtgcggacc

SEQ ID NO: 9964 - RNA, 22 nt, synthetic construct
  source 1..22: mol_type = other RNA
tcctgcaggccataggcatccc

SEQ ID NO: 9965 - RNA, 22 nt, synthetic construct
  source 1..22: mol_type = other RNA
tcctgcagtgagcggtagaact

SEQ ID NO: 9966 - RNA, 22 nt, synthetic construct
  source 1..22: mol_type = other RNA
tcctgggggccctgtggctggc

SEQ ID NO: 9967 - RNA, 22 nt, synthetic construct
  source 1..22: mol_type = other RNA
tcctgtaccacgtgctgccaaa

SEQ ID NO: 9968 - RNA, 22 nt, synthetic construct
  source 1..22: mol_type = other RNA
tcctgtagggtactttgatgtc

SEQ ID NO: 9969 - RNA, 22 nt, synthetic construct
  source 1..22: mol_type = other RNA
tcctgtccaccgaggcagccgc

SEQ ID NO: 9970 - RNA, 22 nt, synthetic construct
  source 1..22: mol_type = other RNA
tccttgatttcgccactcagag

SEQ ID NO: 9971 - RNA, 22 nt, synthetic construct
  source 1..22: mol_type = other RNA
tccttggcagccaacagcacct

SEQ ID NO: 9972 - RNA, 22 nt, synthetic construct
  source 1..22: mol_type = other RNA
tccttgggccagctgccgttct

SEQ ID NO: 9973 - RNA, 22 nt, synthetic construct
  source 1..22: mol_type = other RNA
tccttggggtcaatgctaggta

SEQ ID NO: 9974 - RNA, 22 nt, synthetic construct
  source 1..22: mol_type = other RNA
tccttgtccttgatttcgccac

SEQ ID NO: 9975 - RNA, 22 nt, synthetic construct
  source 1..22: mol_type = other RNA
tcgaagccgtctaggatgagca

SEQ ID NO: 9976 - RNA, 22 nt, synthetic construct
  source 1..22: mol_type = other RNA
tcgaggagctggaagcgcaaga

SEQ ID NO: 9977 - RNA, 22 nt, synthetic construct
  source 1..22: mol_type = other RNA
tcgagggctgcacggcccagca

SEQ ID NO: 9978 - RNA, 22 nt, synthetic construct
  source 1..22: mol_type = other RNA
tcgcaagcaccttctgcttcct

SEQ ID NO: 9979 - RNA, 22 nt, synthetic construct
  source 1..22: mol_type = other RNA
tcgccactcagagccagccaca

SEQ ID NO: 9980 - RNA, 22 nt, synthetic construct
  source 1..22: mol_type = other RNA
tcgcccaggtcctcacgtctgc

SEQ ID NO: 9981 - RNA, 22 nt, synthetic construct
  source 1..22: mol_type = other RNA
tcggactctgcggcccgcggtg

SEQ ID NO: 9982 - RNA, 22 nt, synthetic construct
  source 1..22: mol_type = other RNA
tcggagcagcttcttctggaaa

SEQ ID NO: 9983 - RNA, 22 nt, synthetic construct
  source 1..22: mol_type = other RNA
tcggcaccatacgtgtcctgca

SEQ ID NO: 9984 - RNA, 22 nt, synthetic construct
  source 1..22: mol_type = other RNA
tcggccgccacgagtggctgtg

SEQ ID NO: 9985 - RNA, 22 nt, synthetic construct
  source 1..22: mol_type = other RNA
tcggcctcgtgggcgcagtgca

SEQ ID NO: 9986 - RNA, 22 nt, synthetic construct
  source 1..22: mol_type = other RNA
tcggcctgctgggccgtgcagc

SEQ ID NO: 9987 - RNA, 22 nt, synthetic construct
  source 1..22: mol_type = other RNA
tcggccttgctcaggctctgga

SEQ ID NO: 9988 - RNA, 22 nt, synthetic construct
  source 1..22: mol_type = other RNA
tcggcggctgcctcggtggaca

SEQ ID NO: 9989 - RNA, 22 nt, synthetic construct
  source 1..22: mol_type = other RNA
tcgggccatcggcggctgcctc

SEQ ID NO: 9990 - RNA, 22 nt, synthetic construct
  source 1..22: mol_type = other RNA
tcggtggacaggaagcagaagg

SEQ ID NO: 9991 - RNA, 22 nt, synthetic construct
  source 1..22: mol_type = other RNA
tcgtactggggaagccggccac

SEQ ID NO: 9992 - RNA, 22 nt, synthetic construct
  source 1..22: mol_type = other RNA
tcgtggcggccgatgaggtttt

SEQ ID NO: 9993 - RNA, 22 nt, synthetic construct
  source 1..22: mol_type = other RNA
tcgtgggactcagctgtgtcac

SEQ ID NO: 9994 - RNA, 22 nt, synthetic construct
  source 1..22: mol_type = other RNA
tcgtgggcgcagtgcagcagct

SEQ ID NO: 9995 - RNA, 22 nt, synthetic construct
  source 1..22: mol_type = other RNA
tcgtgtctcacgcggccgccgg

SEQ ID NO: 9996 - RNA, 22 nt, synthetic construct
  source 1..22: mol_type = other RNA
tctaccgctcactgcaggacac

SEQ ID NO: 9997 - RNA, 22 nt, synthetic construct
  source 1..22: mol_type = other RNA
tctaggatgagcagaacgcggt

SEQ ID NO: 9998 - RNA, 22 nt, synthetic construct
  source 1..22: mol_type = other RNA
tctatgtcggcctgctgggccg

SEQ ID NO: 9999 - RNA, 22 nt, synthetic construct
  source 1..22: mol_type = other RNA
tctcaaagtagcgcatcacgta

SEQ ID NO: 10000 - RNA, 22 nt, synthetic construct
  source 1..22: mol_type = other RNA
tctcacatacccccaccctgac

SEQ ID NO: 10001 - RNA, 22 nt, synthetic construct
  source 1..22: mol_type = other RNA
tctcacgcggccgccggtgctc

SEQ ID NO: 10002 - RNA, 22 nt, synthetic construct
  source 1..22: mol_type = other RNA
tctcagaggccctgctggagct

SEQ ID NO: 10003 - RNA, 22 nt, synthetic construct
  source 1..22: mol_type = other RNA
tctcagtcacagccacagccct

SEQ ID NO: 10004 - RNA, 22 nt, synthetic construct
  source 1..22: mol_type = other RNA
tctccagcctggcctgcaccag

SEQ ID NO: 10005 - RNA, 22 nt, synthetic construct
  source 1..22: mol_type = other RNA
tctccatggagcaggcccaggc

SEQ ID NO: 10006 - RNA, 22 nt, synthetic construct
  source 1..22: mol_type = other RNA
tctccctggacctccgcagcac

SEQ ID NO: 10007 - RNA, 22 nt, synthetic construct
  source 1..22: mol_type = other RNA
tctccctgggcccacagccact

SEQ ID NO: 10008 - RNA, 22 nt, synthetic construct
  source 1..22: mol_type = other RNA
tctctgtcccctgccattgctt

SEQ ID NO: 10009 - RNA, 22 nt, synthetic construct
  source 1..22: mol_type = other RNA
tctcttcaagatgtggctgaaa

SEQ ID NO: 10010 - RNA, 22 nt, synthetic construct
  source 1..22: mol_type = other RNA
tctcttccccaagcccctcacc

SEQ ID NO: 10011 - RNA, 22 nt, synthetic construct
  source 1..22: mol_type = other RNA
tctcttttctgggcacccgcct

SEQ ID NO: 10012 - RNA, 22 nt, synthetic construct
  source 1..22: mol_type = other RNA
tctgagagctggcacactgccc

SEQ ID NO: 10013 - RNA, 22 nt, synthetic construct
  source 1..22: mol_type = other RNA
tctgagtggcgaaatcaaggac

SEQ ID NO: 10014 - RNA, 22 nt, synthetic construct
  source 1..22: mol_type = other RNA
tctgcaaaggccaggggcgtgt

SEQ ID NO: 10015 - RNA, 22 nt, synthetic construct
  source 1..22: mol_type = other RNA
tctgcccagtccggggtggcca

SEQ ID NO: 10016 - RNA, 22 nt, synthetic construct
  source 1..22: mol_type = other RNA
tctgcggatgggaactggtcct

SEQ ID NO: 10017 - RNA, 22 nt, synthetic construct
  source 1..22: mol_type = other RNA
tctgcggcccagctcccaggcc

SEQ ID NO: 10018 - RNA, 22 nt, synthetic construct
  source 1..22: mol_type = other RNA
tctgcggcccgcggtgggtgtt

SEQ ID NO: 10019 - RNA, 22 nt, synthetic construct
  source 1..22: mol_type = other RNA
tctgctcatcctagacggcttc

SEQ ID NO: 10020 - RNA, 22 nt, synthetic construct
  source 1..22: mol_type = other RNA
tctgctcttctccctgggccca

SEQ ID NO: 10021 - RNA, 22 nt, synthetic construct
  source 1..22: mol_type = other RNA
tctgcttcctgtccaccgaggc

SEQ ID NO: 10022 - RNA, 22 nt, synthetic construct
  source 1..22: mol_type = other RNA
tctggaaaaggccggccagcag

SEQ ID NO: 10023 - RNA, 22 nt, synthetic construct
  source 1..22: mol_type = other RNA
tctggattggggagcctcgtgg

SEQ ID NO: 10024 - RNA, 22 nt, synthetic construct
  source 1..22: mol_type = other RNA
tctggctgggctgatcttccag

SEQ ID NO: 10025 - RNA, 22 nt, synthetic construct
  source 1..22: mol_type = other RNA
tctgggcacccgcctcacgcct

SEQ ID NO: 10026 - RNA, 22 nt, synthetic construct
  source 1..22: mol_type = other RNA
tctggtgcaggccaggctggag

SEQ ID NO: 10027 - RNA, 22 nt, synthetic construct
  source 1..22: mol_type = other RNA
tctgtcatccctgagctctcaa

SEQ ID NO: 10028 - RNA, 22 nt, synthetic construct
  source 1..22: mol_type = other RNA
tctgtcccctgccattgcttga

SEQ ID NO: 10029 - RNA, 22 nt, synthetic construct
  source 1..22: mol_type = other RNA
tctgtcttggtgctctgtcatc

SEQ ID NO: 10030 - RNA, 22 nt, synthetic construct
  source 1..22: mol_type = other RNA
tcttcaagatgtggctgaaaac

SEQ ID NO: 10031 - RNA, 22 nt, synthetic construct
  source 1..22: mol_type = other RNA
tcttccagcctcccgcccgctg

SEQ ID NO: 10032 - RNA, 22 nt, synthetic construct
  source 1..22: mol_type = other RNA
tcttccccaagcccctcacccc

SEQ ID NO: 10033 - RNA, 22 nt, synthetic construct
  source 1..22: mol_type = other RNA
tcttccttggggtcaatgctag

SEQ ID NO: 10034 - RNA, 22 nt, synthetic construct
  source 1..22: mol_type = other RNA
tcttctcagtcacagccacagc

SEQ ID NO: 10035 - RNA, 22 nt, synthetic construct
  source 1..22: mol_type = other RNA
tcttctccctgggcccacagcc

SEQ ID NO: 10036 - RNA, 22 nt, synthetic construct
  source 1..22: mol_type = other RNA
tcttctctgtcccctgccattg

SEQ ID NO: 10037 - RNA, 22 nt, synthetic construct
  source 1..22: mol_type = other RNA
tcttctggaaaaggccggccag

SEQ ID NO: 10038 - RNA, 22 nt, synthetic construct
  source 1..22: mol_type = other RNA
tcttcttccttggggtcaatgc

SEQ ID NO: 10039 - RNA, 22 nt, synthetic construct
  source 1..22: mol_type = other RNA
tcttgaagagacctgaccgcgt

SEQ ID NO: 10040 - RNA, 22 nt, synthetic construct
  source 1..22: mol_type = other RNA
tcttgccctgaccagctttgcc

SEQ ID NO: 10041 - RNA, 22 nt, synthetic construct
  source 1..22: mol_type = other RNA
tcttgcgcttccagctcctcga

SEQ ID NO: 10042 - RNA, 22 nt, synthetic construct
  source 1..22: mol_type = other RNA
tcttgctgctgctcctctccag

SEQ ID NO: 10043 - RNA, 22 nt, synthetic construct
  source 1..22: mol_type = other RNA
tcttggcccgccgcctccaagg

SEQ ID NO: 10044 - RNA, 22 nt, synthetic construct
  source 1..22: mol_type = other RNA
tcttggtgctctgtcatccctg

SEQ ID NO: 10045 - RNA, 22 nt, synthetic construct
  source 1..22: mol_type = other RNA
tcttttctgggcacccgcctca

SEQ ID NO: 10046 - RNA, 22 nt, synthetic construct
  source 1..22: mol_type = other RNA
tgaaaacctcatcggccgccac

SEQ ID NO: 10047 - RNA, 22 nt, synthetic construct
  source 1..22: mol_type = other RNA
tgaaacgggtgacacagctgag

SEQ ID NO: 10048 - RNA, 22 nt, synthetic construct
  source 1..22: mol_type = other RNA
tgaaccgtccgggggatgccta

SEQ ID NO: 10049 - RNA, 22 nt, synthetic construct
  source 1..22: mol_type = other RNA
tgaagagacctgaccgcgttct

SEQ ID NO: 10050 - RNA, 22 nt, synthetic construct
  source 1..22: mol_type = other RNA
tgaagcggctgcagccggggac

SEQ ID NO: 10051 - RNA, 22 nt, synthetic construct
  source 1..22: mol_type = other RNA
tgacaactggctggagggcgtg

SEQ ID NO: 10052 - RNA, 22 nt, synthetic construct
  source 1..22: mol_type = other RNA
tgacacagctgagtcccacgag

SEQ ID NO: 10053 - RNA, 22 nt, synthetic construct
  source 1..22: mol_type = other RNA
tgacacgcccctggcctttgca

SEQ ID NO: 10054 - RNA, 22 nt, synthetic construct
  source 1..22: mol_type = other RNA
tgacagagcaccaagacagagc

SEQ ID NO: 10055 - RNA, 22 nt, synthetic construct
  source 1..22: mol_type = other RNA
tgaccagctttgcccagcacag

SEQ ID NO: 10056 - RNA, 22 nt, synthetic construct
  source 1..22: mol_type = other RNA
tgaccccaaggaagaagaggcc

SEQ ID NO: 10057 - RNA, 22 nt, synthetic construct
  source 1..22: mol_type = other RNA
tgaccgcgttctgctcatccta

SEQ ID NO: 10058 - RNA, 22 nt, synthetic construct
  source 1..22: mol_type = other RNA
tgacgctcctccgggaccggcc

SEQ ID NO: 10059 - RNA, 22 nt, synthetic construct
  source 1..22: mol_type = other RNA
tgactgagaagaagtggccggt

SEQ ID NO: 10060 - RNA, 22 nt, synthetic construct
  source 1..22: mol_type = other RNA
tgagaagaagtggccggtcccg

SEQ ID NO: 10061 - RNA, 22 nt, synthetic construct
  source 1..22: mol_type = other RNA
tgagacacgagtgattgctgtg

SEQ ID NO: 10062 - RNA, 22 nt, synthetic construct
  source 1..22: mol_type = other RNA
tgagagctcagggatgacagag

SEQ ID NO: 10063 - RNA, 22 nt, synthetic construct
  source 1..22: mol_type = other RNA
tgagagctggcacactgcccgg

SEQ ID NO: 10064 - RNA, 22 nt, synthetic construct
  source 1..22: mol_type = other RNA
tgagcaaggccgacgccctatt

SEQ ID NO: 10065 - RNA, 22 nt, synthetic construct
  source 1..22: mol_type = other RNA
tgagcagaacgcggtcaggtct

SEQ ID NO: 10066 - RNA, 22 nt, synthetic construct
  source 1..22: mol_type = other RNA
tgagccgggcctgggcttgtgg

SEQ ID NO: 10067 - RNA, 22 nt, synthetic construct
  source 1..22: mol_type = other RNA
tgagcggtagaactgctccacc

SEQ ID NO: 10068 - RNA, 22 nt, synthetic construct
  source 1..22: mol_type = other RNA
tgagcgtggagggcagcttggc

SEQ ID NO: 10069 - RNA, 22 nt, synthetic construct
  source 1..22: mol_type = other RNA
tgagctctcaaagtagcgcatc

SEQ ID NO: 10070 - RNA, 22 nt, synthetic construct
  source 1..22: mol_type = other RNA
tgagctgtccggcttctccatg

SEQ ID NO: 10071 - RNA, 22 nt, synthetic construct
  source 1..22: mol_type = other RNA
tgaggacctgggcgatggccaa

SEQ ID NO: 10072 - RNA, 22 nt, synthetic construct
  source 1..22: mol_type = other RNA
tgaggaggagggtgcaacctcg

SEQ ID NO: 10073 - RNA, 22 nt, synthetic construct
  source 1..22: mol_type = other RNA
tgaggcgggtgcccagaaaaga

SEQ ID NO: 10074 - RNA, 22 nt, synthetic construct
  source 1..22: mol_type = other RNA
tgaggggcttggggaagagaca

SEQ ID NO: 10075 - RNA, 22 nt, synthetic construct
  source 1..22: mol_type = other RNA
tgaggtgctgttggctgccaag

SEQ ID NO: 10076 - RNA, 22 nt, synthetic construct
  source 1..22: mol_type = other RNA
tgaggttttcagccacatcttg

SEQ ID NO: 10077 - RNA, 22 nt, synthetic construct
  source 1..22: mol_type = other RNA
tgagtcccacgaggctccccaa

SEQ ID NO: 10078 - RNA, 22 nt, synthetic construct
  source 1..22: mol_type = other RNA
tgagtggcgaaatcaaggacaa

SEQ ID NO: 10079 - RNA, 22 nt, synthetic construct
  source 1..22: mol_type = other RNA
tgatcttccagcctcccgcccg

SEQ ID NO: 10080 - RNA, 22 nt, synthetic construct
  source 1..22: mol_type = other RNA
tgatgcacatgtactgggcaag

SEQ ID NO: 10081 - RNA, 22 nt, synthetic construct
  source 1..22: mol_type = other RNA
tgatgcgctactttgagagctc

SEQ ID NO: 10082 - RNA, 22 nt, synthetic construct
  source 1..22: mol_type = other RNA
tgatgtctgcggcccagctccc

SEQ ID NO: 10083 - RNA, 22 nt, synthetic construct
  source 1..22: mol_type = other RNA
tgattgctgtgctgggcaaagc

SEQ ID NO: 10084 - RNA, 22 nt, synthetic construct
  source 1..22: mol_type = other RNA
tgatttcgccactcagagccag

SEQ ID NO: 10085 - RNA, 22 nt, synthetic construct
  source 1..22: mol_type = other RNA
tgcaaaggccaggggcgtgtca

SEQ ID NO: 10086 - RNA, 22 nt, synthetic construct
  source 1..22: mol_type = other RNA
tgcaacctcggagcagcttctt

SEQ ID NO: 10087 - RNA, 22 nt, synthetic construct
  source 1..22: mol_type = other RNA
tgcaatgcttcctgggggccct

SEQ ID NO: 10088 - RNA, 22 nt, synthetic construct
  source 1..22: mol_type = other RNA
tgcacagcacgtgcggaccggc

SEQ ID NO: 10089 - RNA, 22 nt, synthetic construct
  source 1..22: mol_type = other RNA
tgcacatgtactgggcaaggcc

SEQ ID NO: 10090 - RNA, 22 nt, synthetic construct
  source 1..22: mol_type = other RNA
tgcaccagatccacctccacta

SEQ ID NO: 10091 - RNA, 22 nt, synthetic construct
  source 1..22: mol_type = other RNA
tgcaccctcctcctcacagccc

SEQ ID NO: 10092 - RNA, 22 nt, synthetic construct
  source 1..22: mol_type = other RNA
tgcacggcccagcaggccgaca

SEQ ID NO: 10093 - RNA, 22 nt, synthetic construct
  source 1..22: mol_type = other RNA
tgcactgcgcccacgaggccga

SEQ ID NO: 10094 - RNA, 22 nt, synthetic construct
  source 1..22: mol_type = other RNA
tgcagagccggtggagcagttc

SEQ ID NO: 10095 - RNA, 22 nt, synthetic construct
  source 1..22: mol_type = other RNA
tgcagcagctccagcagctgcc

SEQ ID NO: 10096 - RNA, 22 nt, synthetic construct
  source 1..22: mol_type = other RNA
tgcagccgcttcaggtacctcg

SEQ ID NO: 10097 - RNA, 22 nt, synthetic construct
  source 1..22: mol_type = other RNA
tgcagccggggacactgcgggc

SEQ ID NO: 10098 - RNA, 22 nt, synthetic construct
  source 1..22: mol_type = other RNA
tgcaggaagccatcttgcgctt

SEQ ID NO: 10099 - RNA, 22 nt, synthetic construct
  source 1..22: mol_type = other RNA
tgcaggacacgtatggtgccga

SEQ ID NO: 10100 - RNA, 22 nt, synthetic construct
  source 1..22: mol_type = other RNA
tgcaggaggaagctggggaagg

SEQ ID NO: 10101 - RNA, 22 nt, synthetic construct
  source 1..22: mol_type = other RNA
tgcaggatctgctcttctccct

SEQ ID NO: 10102 - RNA, 22 nt, synthetic construct
  source 1..22: mol_type = other RNA
tgcaggccaggctggagaggag

SEQ ID NO: 10103 - RNA, 22 nt, synthetic construct
  source 1..22: mol_type = other RNA
tgcaggccataggcatcccccg

SEQ ID NO: 10104 - RNA, 22 nt, synthetic construct
  source 1..22: mol_type = other RNA
tgcagtgagcggtagaactgct

SEQ ID NO: 10105 - RNA, 22 nt, synthetic construct
  source 1..22: mol_type = other RNA
tgcatcaggaggcgtgaggcgg

SEQ ID NO: 10106 - RNA, 22 nt, synthetic construct
  source 1..22: mol_type = other RNA
tgccaaattccagcctcctcgg

SEQ ID NO: 10107 - RNA, 22 nt, synthetic construct
  source 1..22: mol_type = other RNA
tgccaaggagcaccggcggccg

SEQ ID NO: 10108 - RNA, 22 nt, synthetic construct
  source 1..22: mol_type = other RNA
tgccacgctttctggctgggct

SEQ ID NO: 10109 - RNA, 22 nt, synthetic construct
  source 1..22: mol_type = other RNA
tgccagctctcagaggccctgc

SEQ ID NO: 10110 - RNA, 22 nt, synthetic construct
  source 1..22: mol_type = other RNA
tgccagtgctgcggaggtccag

SEQ ID NO: 10111 - RNA, 22 nt, synthetic construct
  source 1..22: mol_type = other RNA
tgccatccgggcctgcgggctc

SEQ ID NO: 10112 - RNA, 22 nt, synthetic construct
  source 1..22: mol_type = other RNA
tgccattgcttgaaccgtccgg

SEQ ID NO: 10113 - RNA, 22 nt, synthetic construct
  source 1..22: mol_type = other RNA
tgcccaacacaaggatgtctct

SEQ ID NO: 10114 - RNA, 22 nt, synthetic construct
  source 1..22: mol_type = other RNA
tgcccagaaaagagaggcggcc

SEQ ID NO: 10115 - RNA, 22 nt, synthetic construct
  source 1..22: mol_type = other RNA
tgcccagcacagcaatcactcg

SEQ ID NO: 10116 - RNA, 22 nt, synthetic construct
  source 1..22: mol_type = other RNA
tgcccagtacatgtgcatcagg

SEQ ID NO: 10117 - RNA, 22 nt, synthetic construct
  source 1..22: mol_type = other RNA
tgcccagtccggggtggccagt

SEQ ID NO: 10118 - RNA, 22 nt, synthetic construct
  source 1..22: mol_type = other RNA
tgccccagcccaatagctcttg

SEQ ID NO: 10119 - RNA, 22 nt, synthetic construct
  source 1..22: mol_type = other RNA
tgcccctctggattggggagcc

SEQ ID NO: 10120 - RNA, 22 nt, synthetic construct
  source 1..22: mol_type = other RNA
tgcccggcacaaagtagggctg

SEQ ID NO: 10121 - RNA, 22 nt, synthetic construct
  source 1..22: mol_type = other RNA
tgccctccacgctcacgggact

SEQ ID NO: 10122 - RNA, 22 nt, synthetic construct
  source 1..22: mol_type = other RNA
tgccctgaccagctttgcccag

SEQ ID NO: 10123 - RNA, 22 nt, synthetic construct
  source 1..22: mol_type = other RNA
tgccgagcccgcaggcccggat

SEQ ID NO: 10124 - RNA, 22 nt, synthetic construct
  source 1..22: mol_type = other RNA
tgccgggcagtgtgccagctct

SEQ ID NO: 10125 - RNA, 22 nt, synthetic construct
  source 1..22: mol_type = other RNA
tgccggtccgcacgtgctgtgc

SEQ ID NO: 10126 - RNA, 22 nt, synthetic construct
  source 1..22: mol_type = other RNA
tgccgttctgcccagtccgggg

SEQ ID NO: 10127 - RNA, 22 nt, synthetic construct
  source 1..22: mol_type = other RNA
tgcctatggcctgcaggatctg

SEQ ID NO: 10128 - RNA, 22 nt, synthetic construct
  source 1..22: mol_type = other RNA
tgcctcggtggacaggaagcag

SEQ ID NO: 10129 - RNA, 22 nt, synthetic construct
  source 1..22: mol_type = other RNA
tgcctctcacatacccccaccc

SEQ ID NO: 10130 - RNA, 22 nt, synthetic construct
  source 1..22: mol_type = other RNA
tgcctgggagccctactcgggc

SEQ ID NO: 10131 - RNA, 22 nt, synthetic construct
  source 1..22: mol_type = other RNA
tgcctgggcctgctccatggag

SEQ ID NO: 10132 - RNA, 22 nt, synthetic construct
  source 1..22: mol_type = other RNA
tgcgaggtacctgaagcggctg

SEQ ID NO: 10133 - RNA, 22 nt, synthetic construct
  source 1..22: mol_type = other RNA
tgcgcccacgaggccgaggagg

SEQ ID NO: 10134 - RNA, 22 nt, synthetic construct
  source 1..22: mol_type = other RNA
tgcgctactttgagagctcagg

SEQ ID NO: 10135 - RNA, 22 nt, synthetic construct
  source 1..22: mol_type = other RNA
tgcgcttccagctcctcgaagc

SEQ ID NO: 10136 - RNA, 22 nt, synthetic construct
  source 1..22: mol_type = other RNA
tgcggaggtccagggagaagtc

SEQ ID NO: 10137 - RNA, 22 nt, synthetic construct
  source 1..22: mol_type = other RNA
tgcggatgggaactggtcctcc

SEQ ID NO: 10138 - RNA, 22 nt, synthetic construct
  source 1..22: mol_type = other RNA
tgcggcccagctcccaggccag

SEQ ID NO: 10139 - RNA, 22 nt, synthetic construct
  source 1..22: mol_type = other RNA
tgcggcccgcggtgggtgttgg

SEQ ID NO: 10140 - RNA, 22 nt, synthetic construct
  source 1..22: mol_type = other RNA
tgcgggagctccttgtccttga

SEQ ID NO: 10141 - RNA, 22 nt, synthetic construct
  source 1..22: mol_type = other RNA
tgcgggcgcggcagctgctgga

SEQ ID NO: 10142 - RNA, 22 nt, synthetic construct
  source 1..22: mol_type = other RNA
tgcgggctcggcaccatacgtg

SEQ ID NO: 10143 - RNA, 22 nt, synthetic construct
  source 1..22: mol_type = other RNA
tgctaggtactgcgggagctcc

SEQ ID NO: 10144 - RNA, 22 nt, synthetic construct
  source 1..22: mol_type = other RNA
tgctcaggctctggaccaggcg

SEQ ID NO: 10145 - RNA, 22 nt, synthetic construct
  source 1..22: mol_type = other RNA
tgctcatcctagacggcttcga

SEQ ID NO: 10146 - RNA, 22 nt, synthetic construct
  source 1..22: mol_type = other RNA
tgctccaccggctctgcaaagg

SEQ ID NO: 10147 - RNA, 22 nt, synthetic construct
  source 1..22: mol_type = other RNA
tgctccatggagaagccggaca

SEQ ID NO: 10148 - RNA, 22 nt, synthetic construct
  source 1..22: mol_type = other RNA
tgctccctccgggggctgctgg

SEQ ID NO: 10149 - RNA, 22 nt, synthetic construct
  source 1..22: mol_type = other RNA
tgctccgaggttgcaccctcct

SEQ ID NO: 10150 - RNA, 22 nt, synthetic construct
  source 1..22: mol_type = other RNA
tgctcctctccagcctggcctg

SEQ ID NO: 10151 - RNA, 22 nt, synthetic construct
  source 1..22: mol_type = other RNA
tgctccttggcagccaacagca

SEQ ID NO: 10152 - RNA, 22 nt, synthetic construct
  source 1..22: mol_type = other RNA
tgctctgtcatccctgagctct

SEQ ID NO: 10153 - RNA, 22 nt, synthetic construct
  source 1..22: mol_type = other RNA
tgctcttctccctgggcccaca

SEQ ID NO: 10154 - RNA, 22 nt, synthetic construct
  source 1..22: mol_type = other RNA
tgctgcactgcgcccacgaggc

SEQ ID NO: 10155 - RNA, 22 nt, synthetic construct
  source 1..22: mol_type = other RNA
tgctgccaaattccagcctcct

SEQ ID NO: 10156 - RNA, 22 nt, synthetic construct
  source 1..22: mol_type = other RNA
tgctgcggaggtccagggagaa

SEQ ID NO: 10157 - RNA, 22 nt, synthetic construct
  source 1..22: mol_type = other RNA
tgctgctcctctccagcctggc

SEQ ID NO: 10158 - RNA, 22 nt, synthetic construct
  source 1..22: mol_type = other RNA
tgctgctgctcctctccagcct

SEQ ID NO: 10159 - RNA, 22 nt, synthetic construct
  source 1..22: mol_type = other RNA
tgctggagctgctgcactgcgc

SEQ ID NO: 10160 - RNA, 22 nt, synthetic construct
  source 1..22: mol_type = other RNA
tgctggagcttggggaggacgc

SEQ ID NO: 10161 - RNA, 22 nt, synthetic construct
  source 1..22: mol_type = other RNA
tgctggccggccttttccagaa

SEQ ID NO: 10162 - RNA, 22 nt, synthetic construct
  source 1..22: mol_type = other RNA
tgctgggcaaagctggtcaggg

SEQ ID NO: 10163 - RNA, 22 nt, synthetic construct
  source 1..22: mol_type = other RNA
tgctgggccgtgcagccctcga

SEQ ID NO: 10164 - RNA, 22 nt, synthetic construct
  source 1..22: mol_type = other RNA
tgctgtgcaggaagccatcttg

SEQ ID NO: 10165 - RNA, 22 nt, synthetic construct
  source 1..22: mol_type = other RNA
tgctgtgctgggcaaagctggt

SEQ ID NO: 10166 - RNA, 22 nt, synthetic construct
  source 1..22: mol_type = other RNA
tgctgttggctgccaaggagca

SEQ ID NO: 10167 - RNA, 22 nt, synthetic construct
  source 1..22: mol_type = other RNA
tgcttcctgggggccctgtggc

SEQ ID NO: 10168 - RNA, 22 nt, synthetic construct
  source 1..22: mol_type = other RNA
tgcttcctgtccaccgaggcag

SEQ ID NO: 10169 - RNA, 22 nt, synthetic construct
  source 1..22: mol_type = other RNA
tgcttgaaccgtccgggggatg

SEQ ID NO: 10170 - RNA, 22 nt, synthetic construct
  source 1..22: mol_type = other RNA
tgcttgcgaggtacctgaagcg

SEQ ID NO: 10171 - RNA, 22 nt, synthetic construct
  source 1..22: mol_type = other RNA
tggaaaaggccggccagcagcc

SEQ ID NO: 10172 - RNA, 22 nt, synthetic construct
  source 1..22: mol_type = other RNA
tggaagatcagcccagccagaa

SEQ ID NO: 10173 - RNA, 22 nt, synthetic construct
  source 1..22: mol_type = other RNA
tggaagcgcaagatggcttcct

SEQ ID NO: 10174 - RNA, 22 nt, synthetic construct
  source 1..22: mol_type = other RNA
tggaatttggcagcacgtggta

SEQ ID NO: 10175 - RNA, 22 nt, synthetic construct
  source 1..22: mol_type = other RNA
tggacaggaagcagaaggtgct

SEQ ID NO: 10176 - RNA, 22 nt, synthetic construct
  source 1..22: mol_type = other RNA
tggacctccgcagcactggcat

SEQ ID NO: 10177 - RNA, 22 nt, synthetic construct
  source 1..22: mol_type = other RNA
tggactaagcctttggccatcg

SEQ ID NO: 10178 - RNA, 22 nt, synthetic construct
  source 1..22: mol_type = other RNA
tggagaagccggacagctcaaa

SEQ ID NO: 10179 - RNA, 22 nt, synthetic construct
  source 1..22: mol_type = other RNA
tggagaggagcagcagcaagag

SEQ ID NO: 10180 - RNA, 22 nt, synthetic construct
  source 1..22: mol_type = other RNA
tggagcaggcccaggcatacgt

SEQ ID NO: 10181 - RNA, 22 nt, synthetic construct
  source 1..22: mol_type = other RNA
tggagcagttctaccgctcact

SEQ ID NO: 10182 - RNA, 22 nt, synthetic construct
  source 1..22: mol_type = other RNA
tggagcgggaactggccacccc

SEQ ID NO: 10183 - RNA, 22 nt, synthetic construct
  source 1..22: mol_type = other RNA
tggagctgctgcactgcgccca

SEQ ID NO: 10184 - RNA, 22 nt, synthetic construct
  source 1..22: mol_type = other RNA
tggagcttggggaggacgccaa

SEQ ID NO: 10185 - RNA, 22 nt, synthetic construct
  source 1..22: mol_type = other RNA
tggaggcggcgggccaagactt

SEQ ID NO: 10186 - RNA, 22 nt, synthetic construct
  source 1..22: mol_type = other RNA
tggagggcagcttggcgtcctc

SEQ ID NO: 10187 - RNA, 22 nt, synthetic construct
  source 1..22: mol_type = other RNA
tggagggcgtgccacgctttct

SEQ ID NO: 10188 - RNA, 22 nt, synthetic construct
  source 1..22: mol_type = other RNA
tggaggtggatctggtgcaggc

SEQ ID NO: 10189 - RNA, 22 nt, synthetic construct
  source 1..22: mol_type = other RNA
tggatctggtgcaggccaggct

SEQ ID NO: 10190 - RNA, 22 nt, synthetic construct
  source 1..22: mol_type = other RNA
tggattggggagcctcgtggga

SEQ ID NO: 10191 - RNA, 22 nt, synthetic construct
  source 1..22: mol_type = other RNA
tggcacactgcccggcacaaag

SEQ ID NO: 10192 - RNA, 22 nt, synthetic construct
  source 1..22: mol_type = other RNA
tggcacgccctccagccagttg

SEQ ID NO: 10193 - RNA, 22 nt, synthetic construct
  source 1..22: mol_type = other RNA
tggcagagctggccaagctggc

SEQ ID NO: 10194 - RNA, 22 nt, synthetic construct
  source 1..22: mol_type = other RNA
tggcagcacgtggtacaggagc

SEQ ID NO: 10195 - RNA, 22 nt, synthetic construct
  source 1..22: mol_type = other RNA
tggcagccaacagcacctcagc

SEQ ID NO: 10196 - RNA, 22 nt, synthetic construct
  source 1..22: mol_type = other RNA
tggcaggggacagagaagacaa

SEQ ID NO: 10197 - RNA, 22 nt, synthetic construct
  source 1..22: mol_type = other RNA
tggcatcctagtggaggtggat

SEQ ID NO: 10198 - RNA, 22 nt, synthetic construct
  source 1..22: mol_type = other RNA
tggcatttgcccctctggattg

SEQ ID NO: 10199 - RNA, 22 nt, synthetic construct
  source 1..22: mol_type = other RNA
tggccaaaggcttagtccaaca

SEQ ID NO: 10200 - RNA, 22 nt, synthetic construct
  source 1..22: mol_type = other RNA
tggccaagctggcctgggagct

SEQ ID NO: 10201 - RNA, 22 nt, synthetic construct
  source 1..22: mol_type = other RNA
tggccaccccggactgggcaga

SEQ ID NO: 10202 - RNA, 22 nt, synthetic construct
  source 1..22: mol_type = other RNA
tggccagctctgccagggcccc

SEQ ID NO: 10203 - RNA, 22 nt, synthetic construct
  source 1..22: mol_type = other RNA
tggccagttcccgctccaggct

SEQ ID NO: 10204 - RNA, 22 nt, synthetic construct
  source 1..22: mol_type = other RNA
tggccatcgcccaggtcctcac

SEQ ID NO: 10205 - RNA, 22 nt, synthetic construct
  source 1..22: mol_type = other RNA
tggcccaaggaggcctggctga

SEQ ID NO: 10206 - RNA, 22 nt, synthetic construct
  source 1..22: mol_type = other RNA
tggcccgagtagggctcccagg

SEQ ID NO: 10207 - RNA, 22 nt, synthetic construct
  source 1..22: mol_type = other RNA
tggcccgccgcctccaaggcct

SEQ ID NO: 10208 - RNA, 22 nt, synthetic construct
  source 1..22: mol_type = other RNA
tggccggccttttccagaagaa

SEQ ID NO: 10209 - RNA, 22 nt, synthetic construct
  source 1..22: mol_type = other RNA
tggccggcttccccagtacgac

SEQ ID NO: 10210 - RNA, 22 nt, synthetic construct
  source 1..22: mol_type = other RNA
tggccggtcccggaggagcgtc

SEQ ID NO: 10211 - RNA, 22 nt, synthetic construct
  source 1..22: mol_type = other RNA
tggcctgcaccagatccacctc

SEQ ID NO: 10212 - RNA, 22 nt, synthetic construct
  source 1..22: mol_type = other RNA
tggcctgcaggatctgctcttc

SEQ ID NO: 10213 - RNA, 22 nt, synthetic construct
  source 1..22: mol_type = other RNA
tggcctgggagctgggccgcag

SEQ ID NO: 10214 - RNA, 22 nt, synthetic construct
  source 1..22: mol_type = other RNA
tggccttccccagcttcctcct

SEQ ID NO: 10215 - RNA, 22 nt, synthetic construct
  source 1..22: mol_type = other RNA
tggcctttgcagagccggtgga

SEQ ID NO: 10216 - RNA, 22 nt, synthetic construct
  source 1..22: mol_type = other RNA
tggcgaaatcaaggacaaggag

SEQ ID NO: 10217 - RNA, 22 nt, synthetic construct
  source 1..22: mol_type = other RNA
tggcggccgatgaggttttcag

SEQ ID NO: 10218 - RNA, 22 nt, synthetic construct
  source 1..22: mol_type = other RNA
tggcgtcctccccaagctccag

SEQ ID NO: 10219 - RNA, 22 nt, synthetic construct
  source 1..22: mol_type = other RNA
tggctctgagtggcgaaatcaa

SEQ ID NO: 10220 - RNA, 22 nt, synthetic construct
  source 1..22: mol_type = other RNA
tggctgaaaacctcatcggccg

SEQ ID NO: 10221 - RNA, 22 nt, synthetic construct
  source 1..22: mol_type = other RNA
tggctgaggtgctgttggctgc

SEQ ID NO: 10222 - RNA, 22 nt, synthetic construct
  source 1..22: mol_type = other RNA
tggctgccaaggagcaccggcg

SEQ ID NO: 10223 - RNA, 22 nt, synthetic construct
  source 1..22: mol_type = other RNA
tggctggagggcgtgccacgct

SEQ ID NO: 10224 - RNA, 22 nt, synthetic construct
  source 1..22: mol_type = other RNA
tggctggctctgagtggcgaaa

SEQ ID NO: 10225 - RNA, 22 nt, synthetic construct
  source 1..22: mol_type = other RNA
tggctgggctgatcttccagcc

SEQ ID NO: 10226 - RNA, 22 nt, synthetic construct
  source 1..22: mol_type = other RNA
tggctgtgactgagaagaagtg

SEQ ID NO: 10227 - RNA, 22 nt, synthetic construct
  source 1..22: mol_type = other RNA
tggctgtgggcccagggagaag

SEQ ID NO: 10228 - RNA, 22 nt, synthetic construct
  source 1..22: mol_type = other RNA
tggcttcctgcacagcacgtgc

SEQ ID NO: 10229 - RNA, 22 nt, synthetic construct
  source 1..22: mol_type = other RNA
tgggaactggtcctcctgtagg

SEQ ID NO: 10230 - RNA, 22 nt, synthetic construct
  source 1..22: mol_type = other RNA
tgggactcagctgtgtcacccg

SEQ ID NO: 10231 - RNA, 22 nt, synthetic construct
  source 1..22: mol_type = other RNA
tgggagccctactcgggccatc

SEQ ID NO: 10232 - RNA, 22 nt, synthetic construct
  source 1..22: mol_type = other RNA
tgggagctgggccgcagacatc

SEQ ID NO: 10233 - RNA, 22 nt, synthetic construct
  source 1..22: mol_type = other RNA
tgggcaaagctggtcagggcaa

SEQ ID NO: 10234 - RNA, 22 nt, synthetic construct
  source 1..22: mol_type = other RNA
tgggcaaggccttggaggcggc

SEQ ID NO: 10235 - RNA, 22 nt, synthetic construct
  source 1..22: mol_type = other RNA
tgggcacccgcctcacgcctcc

SEQ ID NO: 10236 - RNA, 22 nt, synthetic construct
  source 1..22: mol_type = other RNA
tgggcagaacggcagctggccc

SEQ ID NO: 10237 - RNA, 22 nt, synthetic construct
  source 1..22: mol_type = other RNA
tgggccagctgccgttctgccc

SEQ ID NO: 10238 - RNA, 22 nt, synthetic construct
  source 1..22: mol_type = other RNA
tgggcccacagccactcgtggc

SEQ ID NO: 10239 - RNA, 22 nt, synthetic construct
  source 1..22: mol_type = other RNA
tgggcccagggagaagagcaga

SEQ ID NO: 10240 - RNA, 22 nt, synthetic construct
  source 1..22: mol_type = other RNA
tgggccgcagacatcaaagtac

SEQ ID NO: 10241 - RNA, 22 nt, synthetic construct
  source 1..22: mol_type = other RNA
tgggccgtgcagccctcgacag

SEQ ID NO: 10242 - RNA, 22 nt, synthetic construct
  source 1..22: mol_type = other RNA
tgggcctgctccatggagaagc

SEQ ID NO: 10243 - RNA, 22 nt, synthetic construct
  source 1..22: mol_type = other RNA
tgggcgatggccaaaggcttag

SEQ ID NO: 10244 - RNA, 22 nt, synthetic construct
  source 1..22: mol_type = other RNA
tgggcgcagtgcagcagctcca

SEQ ID NO: 10245 - RNA, 22 nt, synthetic construct
  source 1..22: mol_type = other RNA
tgggctgatcttccagcctccc

SEQ ID NO: 10246 - RNA, 22 nt, synthetic construct
  source 1..22: mol_type = other RNA
tgggctggggcagtgagccggg

SEQ ID NO: 10247 - RNA, 22 nt, synthetic construct
  source 1..22: mol_type = other RNA
tgggcttgtggccggcttcccc

SEQ ID NO: 10248 - RNA, 22 nt, synthetic construct
  source 1..22: mol_type = other RNA
tggggaagagacatccttgtgt

SEQ ID NO: 10249 - RNA, 22 nt, synthetic construct
  source 1..22: mol_type = other RNA
tggggaagccggccacaagccc

SEQ ID NO: 10250 - RNA, 22 nt, synthetic construct
  source 1..22: mol_type = other RNA
tggggaaggccagctcggactc

SEQ ID NO: 10251 - RNA, 22 nt, synthetic construct
  source 1..22: mol_type = other RNA
tggggagcctcgtgggactcag

SEQ ID NO: 10252 - RNA, 22 nt, synthetic construct
  source 1..22: mol_type = other RNA
tggggaggacgccaagctgccc

SEQ ID NO: 10253 - RNA, 22 nt, synthetic construct
  source 1..22: mol_type = other RNA
tggggcagtgagccgggcctgg

SEQ ID NO: 10254 - RNA, 22 nt, synthetic construct
  source 1..22: mol_type = other RNA
tgggggccctgtggctggctct

SEQ ID NO: 10255 - RNA, 22 nt, synthetic construct
  source 1..22: mol_type = other RNA
tggggtcaatgctaggtactgc

SEQ ID NO: 10256 - RNA, 22 nt, synthetic construct
  source 1..22: mol_type = other RNA
tggggtgaggggcttggggaag

SEQ ID NO: 10257 - RNA, 22 nt, synthetic construct
  source 1..22: mol_type = other RNA
tgggtgttggactaagcctttg

SEQ ID NO: 10258 - RNA, 22 nt, synthetic construct
  source 1..22: mol_type = other RNA
tggtacaggagctccccggccg

SEQ ID NO: 10259 - RNA, 22 nt, synthetic construct
  source 1..22: mol_type = other RNA
tggtcagggcaagagctattgg

SEQ ID NO: 10260 - RNA, 22 nt, synthetic construct
  source 1..22: mol_type = other RNA
tggtccagagcctgagcaaggc

SEQ ID NO: 10261 - RNA, 22 nt, synthetic construct
  source 1..22: mol_type = other RNA
tggtcctcctgtagggtacttt

SEQ ID NO: 10262 - RNA, 22 nt, synthetic construct
  source 1..22: mol_type = other RNA
tggtgcaggccaggctggagag

SEQ ID NO: 10263 - RNA, 22 nt, synthetic construct
  source 1..22: mol_type = other RNA
tggtgctctgtcatccctgagc

SEQ ID NO: 10264 - RNA, 22 nt, synthetic construct
  source 1..22: mol_type = other RNA
tgtaccacgtgctgccaaattc

SEQ ID NO: 10265 - RNA, 22 nt, synthetic construct
  source 1..22: mol_type = other RNA
tgtactgggcaaggccttggag

SEQ ID NO: 10266 - RNA, 22 nt, synthetic construct
  source 1..22: mol_type = other RNA
tgtagggtactttgatgtctgc

SEQ ID NO: 10267 - RNA, 22 nt, synthetic construct
  source 1..22: mol_type = other RNA
tgtcacccgtttcaggtggggt

SEQ ID NO: 10268 - RNA, 22 nt, synthetic construct
  source 1..22: mol_type = other RNA
tgtcatagggcctcttcttcct

SEQ ID NO: 10269 - RNA, 22 nt, synthetic construct
  source 1..22: mol_type = other RNA
tgtcatccctgagctctcaaag

SEQ ID NO: 10270 - RNA, 22 nt, synthetic construct
  source 1..22: mol_type = other RNA
tgtccaccgaggcagccgccga

SEQ ID NO: 10271 - RNA, 22 nt, synthetic construct
  source 1..22: mol_type = other RNA
tgtccccggctgcagccgcttc

SEQ ID NO: 10272 - RNA, 22 nt, synthetic construct
  source 1..22: mol_type = other RNA
tgtcccctgccattgcttgaac

SEQ ID NO: 10273 - RNA, 22 nt, synthetic construct
  source 1..22: mol_type = other RNA
tgtccggcttctccatggagca

SEQ ID NO: 10274 - RNA, 22 nt, synthetic construct
  source 1..22: mol_type = other RNA
tgtcctgcagtgagcggtagaa

SEQ ID NO: 10275 - RNA, 22 nt, synthetic construct
  source 1..22: mol_type = other RNA
tgtccttgatttcgccactcag

SEQ ID NO: 10276 - RNA, 22 nt, synthetic construct
  source 1..22: mol_type = other RNA
tgtcgagggctgcacggcccag

SEQ ID NO: 10277 - RNA, 22 nt, synthetic construct
  source 1..22: mol_type = other RNA
tgtcggcctgctgggccgtgca

SEQ ID NO: 10278 - RNA, 22 nt, synthetic construct
  source 1..22: mol_type = other RNA
tgtctcacgcggccgccggtgc

SEQ ID NO: 10279 - RNA, 22 nt, synthetic construct
  source 1..22: mol_type = other RNA
tgtctcttccccaagcccctca

SEQ ID NO: 10280 - RNA, 22 nt, synthetic construct
  source 1..22: mol_type = other RNA
tgtctgcggcccagctcccagg

SEQ ID NO: 10281 - RNA, 22 nt, synthetic construct
  source 1..22: mol_type = other RNA
tgtcttctctgtcccctgccat

SEQ ID NO: 10282 - RNA, 22 nt, synthetic construct
  source 1..22: mol_type = other RNA
tgtcttggtgctctgtcatccc

SEQ ID NO: 10283 - RNA, 22 nt, synthetic construct
  source 1..22: mol_type = other RNA
tgtgactgagaagaagtggccg

SEQ ID NO: 10284 - RNA, 22 nt, synthetic construct
  source 1..22: mol_type = other RNA
tgtgaggaggagggtgcaacct

SEQ ID NO: 10285 - RNA, 22 nt, synthetic construct
  source 1..22: mol_type = other RNA
tgtgcaggaagccatcttgcgc

SEQ ID NO: 10286 - RNA, 22 nt, synthetic construct
  source 1..22: mol_type = other RNA
tgtgcatcaggaggcgtgaggc

SEQ ID NO: 10287 - RNA, 22 nt, synthetic construct
  source 1..22: mol_type = other RNA
tgtgccagctctcagaggccct

SEQ ID NO: 10288 - RNA, 22 nt, synthetic construct
  source 1..22: mol_type = other RNA
tgtgccgggcagtgtgccagct

SEQ ID NO: 10289 - RNA, 22 nt, synthetic construct
  source 1..22: mol_type = other RNA
tgtgctgggcaaagctggtcag

SEQ ID NO: 10290 - RNA, 22 nt, synthetic construct
  source 1..22: mol_type = other RNA
tgtggccggcttccccagtacg

SEQ ID NO: 10291 - RNA, 22 nt, synthetic construct
  source 1..22: mol_type = other RNA
tgtggctgaaaacctcatcggc

SEQ ID NO: 10292 - RNA, 22 nt, synthetic construct
  source 1..22: mol_type = other RNA
tgtggctggctctgagtggcga

SEQ ID NO: 10293 - RNA, 22 nt, synthetic construct
  source 1..22: mol_type = other RNA
tgtggctgtgactgagaagaag

SEQ ID NO: 10294 - RNA, 22 nt, synthetic construct
  source 1..22: mol_type = other RNA
tgtgggcccagggagaagagca

SEQ ID NO: 10295 - RNA, 22 nt, synthetic construct
  source 1..22: mol_type = other RNA
tgtgtcacccgtttcaggtggg

SEQ ID NO: 10296 - RNA, 22 nt, synthetic construct
  source 1..22: mol_type = other RNA
tgttggactaagcctttggcca

SEQ ID NO: 10297 - RNA, 22 nt, synthetic construct
  source 1..22: mol_type = other RNA
tgttggctgccaaggagcaccg

SEQ ID NO: 10298 - RNA, 22 nt, synthetic construct
  source 1..22: mol_type = other RNA
ttagtccaacacccaccgcggg

SEQ ID NO: 10299 - RNA, 22 nt, synthetic construct
  source 1..22: mol_type = other RNA
ttcaagatgtggctgaaaacct

SEQ ID NO: 10300 - RNA, 22 nt, synthetic construct
  source 1..22: mol_type = other RNA
ttcaagcaatggcaggggacag

SEQ ID NO: 10301 - RNA, 22 nt, synthetic construct
  source 1..22: mol_type = other RNA
ttcagccacatcttgaagagac

SEQ ID NO: 10302 - RNA, 22 nt, synthetic construct
  source 1..22: mol_type = other RNA
ttcaggtacctcgcaagcacct

SEQ ID NO: 10303 - RNA, 22 nt, synthetic construct
  source 1..22: mol_type = other RNA
ttcaggtggggtgaggggcttg

SEQ ID NO: 10304 - RNA, 22 nt, synthetic construct
  source 1..22: mol_type = other RNA
ttccagaagaagctgctccgag

SEQ ID NO: 10305 - RNA, 22 nt, synthetic construct
  source 1..22: mol_type = other RNA
ttccagcctcccgcccgctgcc

SEQ ID NO: 10306 - RNA, 22 nt, synthetic construct
  source 1..22: mol_type = other RNA
ttccagcctcctcggcctcgtg

SEQ ID NO: 10307 - RNA, 22 nt, synthetic construct
  source 1..22: mol_type = other RNA
ttccagctcctcgaagccgtct

SEQ ID NO: 10308 - RNA, 22 nt, synthetic construct
  source 1..22: mol_type = other RNA
ttcccatccgcagacgtgagga

SEQ ID NO: 10309 - RNA, 22 nt, synthetic construct
  source 1..22: mol_type = other RNA
ttccccaagcccctcaccccac

SEQ ID NO: 10310 - RNA, 22 nt, synthetic construct
  source 1..22: mol_type = other RNA
ttccccagcttcctcctgcaat

SEQ ID NO: 10311 - RNA, 22 nt, synthetic construct
  source 1..22: mol_type = other RNA
ttccccagtacgactttgtctt

SEQ ID NO: 10312 - RNA, 22 nt, synthetic construct
  source 1..22: mol_type = other RNA
ttcccgctccaggctcttgctg

SEQ ID NO: 10313 - RNA, 22 nt, synthetic construct
  source 1..22: mol_type = other RNA
ttcctcctgcaatgcttcctgg

SEQ ID NO: 10314 - RNA, 22 nt, synthetic construct
  source 1..22: mol_type = other RNA
ttcctgcacagcacgtgcggac

SEQ ID NO: 10315 - RNA, 22 nt, synthetic construct
  source 1..22: mol_type = other RNA
ttcctgggggccctgtggctgg

SEQ ID NO: 10316 - RNA, 22 nt, synthetic construct
  source 1..22: mol_type = other RNA
ttcctgtccaccgaggcagccg

SEQ ID NO: 10317 - RNA, 22 nt, synthetic construct
  source 1..22: mol_type = other RNA
ttccttggggtcaatgctaggt

SEQ ID NO: 10318 - RNA, 22 nt, synthetic construct
  source 1..22: mol_type = other RNA
ttcgaggagctggaagcgcaag

SEQ ID NO: 10319 - RNA, 22 nt, synthetic construct
  source 1..22: mol_type = other RNA
ttcgccactcagagccagccac

SEQ ID NO: 10320 - RNA, 22 nt, synthetic construct
  source 1..22: mol_type = other RNA
ttctaccgctcactgcaggaca

SEQ ID NO: 10321 - RNA, 22 nt, synthetic construct
  source 1..22: mol_type = other RNA
ttctcagtcacagccacagccc

SEQ ID NO: 10322 - RNA, 22 nt, synthetic construct
  source 1..22: mol_type = other RNA
ttctccatggagcaggcccagg

SEQ ID NO: 10323 - RNA, 22 nt, synthetic construct
  source 1..22: mol_type = other RNA
ttctccctggacctccgcagca

SEQ ID NO: 10324 - RNA, 22 nt, synthetic construct
  source 1..22: mol_type = other RNA
ttctccctgggcccacagccac

SEQ ID NO: 10325 - RNA, 22 nt, synthetic construct
  source 1..22: mol_type = other RNA
ttctctgtcccctgccattgct

SEQ ID NO: 10326 - RNA, 22 nt, synthetic construct
  source 1..22: mol_type = other RNA
ttctgcccagtccggggtggcc

SEQ ID NO: 10327 - RNA, 22 nt, synthetic construct
  source 1..22: mol_type = other RNA
ttctgctcatcctagacggctt

SEQ ID NO: 10328 - RNA, 22 nt, synthetic construct
  source 1..22: mol_type = other RNA
ttctgcttcctgtccaccgagg

SEQ ID NO: 10329 - RNA, 22 nt, synthetic construct
  source 1..22: mol_type = other RNA
ttctggaaaaggccggccagca

SEQ ID NO: 10330 - RNA, 22 nt, synthetic construct
  source 1..22: mol_type = other RNA
ttctggctgggctgatcttcca

SEQ ID NO: 10331 - RNA, 22 nt, synthetic construct
  source 1..22: mol_type = other RNA
ttctgggcacccgcctcacgcc

SEQ ID NO: 10332 - RNA, 22 nt, synthetic construct
  source 1..22: mol_type = other RNA
ttcttccttggggtcaatgcta

SEQ ID NO: 10333 - RNA, 22 nt, synthetic construct
  source 1..22: mol_type = other RNA
ttcttctcagtcacagccacag

SEQ ID NO: 10334 - RNA, 22 nt, synthetic construct
  source 1..22: mol_type = other RNA
ttcttctggaaaaggccggcca

SEQ ID NO: 10335 - RNA, 22 nt, synthetic construct
  source 1..22: mol_type = other RNA
ttgaaccgtccgggggatgcct

SEQ ID NO: 10336 - RNA, 22 nt, synthetic construct
  source 1..22: mol_type = other RNA
ttgaagagacctgaccgcgttc

SEQ ID NO: 10337 - RNA, 22 nt, synthetic construct
  source 1..22: mol_type = other RNA
ttgaccccaaggaagaagaggc

SEQ ID NO: 10338 - RNA, 22 nt, synthetic construct
  source 1..22: mol_type = other RNA
ttgagagctcagggatgacaga

SEQ ID NO: 10339 - RNA, 22 nt, synthetic construct
  source 1..22: mol_type = other RNA
ttgagctgtccggcttctccat

SEQ ID NO: 10340 - RNA, 22 nt, synthetic construct
  source 1..22: mol_type = other RNA
ttgatgtctgcggcccagctcc

SEQ ID NO: 10341 - RNA, 22 nt, synthetic construct
  source 1..22: mol_type = other RNA
ttgatttcgccactcagagcca

SEQ ID NO: 10342 - RNA, 22 nt, synthetic construct
  source 1..22: mol_type = other RNA
ttgcaccctcctcctcacagcc

SEQ ID NO: 10343 - RNA, 22 nt, synthetic construct
  source 1..22: mol_type = other RNA
ttgcagagccggtggagcagtt

SEQ ID NO: 10344 - RNA, 22 nt, synthetic construct
  source 1..22: mol_type = other RNA
ttgcaggaggaagctggggaag

SEQ ID NO: 10345 - RNA, 22 nt, synthetic construct
  source 1..22: mol_type = other RNA
ttgcccagcacagcaatcactc

SEQ ID NO: 10346 - RNA, 22 nt, synthetic construct
  source 1..22: mol_type = other RNA
ttgcccagtacatgtgcatcag

SEQ ID NO: 10347 - RNA, 22 nt, synthetic construct
  source 1..22: mol_type = other RNA
ttgcccctctggattggggagc

SEQ ID NO: 10348 - RNA, 22 nt, synthetic construct
  source 1..22: mol_type = other RNA
ttgccctgaccagctttgccca

SEQ ID NO: 10349 - RNA, 22 nt, synthetic construct
  source 1..22: mol_type = other RNA
ttgcgaggtacctgaagcggct

SEQ ID NO: 10350 - RNA, 22 nt, synthetic construct
  source 1..22: mol_type = other RNA
ttgcgcttccagctcctcgaag

SEQ ID NO: 10351 - RNA, 22 nt, synthetic construct
  source 1..22: mol_type = other RNA
ttgctcaggctctggaccaggc

SEQ ID NO: 10352 - RNA, 22 nt, synthetic construct
  source 1..22: mol_type = other RNA
ttgctgctgctcctctccagcc

SEQ ID NO: 10353 - RNA, 22 nt, synthetic construct
  source 1..22: mol_type = other RNA
ttgctgtgctgggcaaagctgg

SEQ ID NO: 10354 - RNA, 22 nt, synthetic construct
  source 1..22: mol_type = other RNA
ttgcttgaaccgtccgggggat

SEQ ID NO: 10355 - RNA, 22 nt, synthetic construct
  source 1..22: mol_type = other RNA
ttggactaagcctttggccatc

SEQ ID NO: 10356 - RNA, 22 nt, synthetic construct
  source 1..22: mol_type = other RNA
ttggaggcggcgggccaagact

SEQ ID NO: 10357 - RNA, 22 nt, synthetic construct
  source 1..22: mol_type = other RNA
ttggcagcacgtggtacaggag

SEQ ID NO: 10358 - RNA, 22 nt, synthetic construct
  source 1..22: mol_type = other RNA
ttggcagccaacagcacctcag

SEQ ID NO: 10359 - RNA, 22 nt, synthetic construct
  source 1..22: mol_type = other RNA
ttggccagctctgccagggccc

SEQ ID NO: 10360 - RNA, 22 nt, synthetic construct
  source 1..22: mol_type = other RNA
ttggccatcgcccaggtcctca

SEQ ID NO: 10361 - RNA, 22 nt, synthetic construct
  source 1..22: mol_type = other RNA
ttggcccgccgcctccaaggcc

SEQ ID NO: 10362 - RNA, 22 nt, synthetic construct
  source 1..22: mol_type = other RNA
ttggcgtcctccccaagctcca

SEQ ID NO: 10363 - RNA, 22 nt, synthetic construct
  source 1..22: mol_type = other RNA
ttggctgccaaggagcaccggc

SEQ ID NO: 10364 - RNA, 22 nt, synthetic construct
  source 1..22: mol_type = other RNA
ttgggccagctgccgttctgcc

SEQ ID NO: 10365 - RNA, 22 nt, synthetic construct
  source 1..22: mol_type = other RNA
ttgggctggggcagtgagccgg

SEQ ID NO: 10366 - RNA, 22 nt, synthetic construct
  source 1..22: mol_type = other RNA
ttggggaagagacatccttgtg

SEQ ID NO: 10367 - RNA, 22 nt, synthetic construct
  source 1..22: mol_type = other RNA
ttggggagcctcgtgggactca

SEQ ID NO: 10368 - RNA, 22 nt, synthetic construct
  source 1..22: mol_type = other RNA
ttggggaggacgccaagctgcc

SEQ ID NO: 10369 - RNA, 22 nt, synthetic construct
  source 1..22: mol_type = other RNA
ttggggtcaatgctaggtactg

SEQ ID NO: 10370 - RNA, 22 nt, synthetic construct
  source 1..22: mol_type = other RNA
ttggtgctctgtcatccctgag

SEQ ID NO: 10371 - RNA, 22 nt, synthetic construct
  source 1..22: mol_type = other RNA
ttgtcatagggcctcttcttcc

SEQ ID NO: 10372 - RNA, 22 nt, synthetic construct
  source 1..22: mol_type = other RNA
ttgtccttgatttcgccactca

SEQ ID NO: 10373 - RNA, 22 nt, synthetic construct
  source 1..22: mol_type = other RNA
ttgtcttctctgtcccctgcca

SEQ ID NO: 10374 - RNA, 22 nt, synthetic construct
  source 1..22: mol_type = other RNA
ttgtgccgggcagtgtgccagc

SEQ ID NO: 10375 - RNA, 22 nt, synthetic construct
  source 1..22: mol_type = other RNA
ttgtggccggcttccccagtac

SEQ ID NO: 10376 - RNA, 22 nt, synthetic construct
  source 1..22: mol_type = other RNA
tttcagccacatcttgaagaga

SEQ ID NO: 10377 - RNA, 22 nt, synthetic construct
  source 1..22: mol_type = other RNA
tttcaggtggggtgaggggctt

SEQ ID NO: 10378 - RNA, 22 nt, synthetic construct
  source 1..22: mol_type = other RNA
tttccagaagaagctgctccga

SEQ ID NO: 10379 - RNA, 22 nt, synthetic construct
  source 1..22: mol_type = other RNA
tttcgccactcagagccagcca

SEQ ID NO: 10380 - RNA, 22 nt, synthetic construct
  source 1..22: mol_type = other RNA
tttctggctgggctgatcttcc

SEQ ID NO: 10381 - RNA, 22 nt, synthetic construct
  source 1..22: mol_type = other RNA
tttctgggcacccgcctcacgc

SEQ ID NO: 10382 - RNA, 22 nt, synthetic construct
  source 1..22: mol_type = other RNA
tttgagagctcagggatgacag

SEQ ID NO: 10383 - RNA, 22 nt, synthetic construct
  source 1..22: mol_type = other RNA
tttgagctgtccggcttctcca

SEQ ID NO: 10384 - RNA, 22 nt, synthetic construct
  source 1..22: mol_type = other RNA
tttgatgtctgcggcccagctc

SEQ ID NO: 10385 - RNA, 22 nt, synthetic construct
  source 1..22: mol_type = other RNA
tttgcagagccggtggagcagt

SEQ ID NO: 10386 - RNA, 22 nt, synthetic construct
  source 1..22: mol_type = other RNA
tttgcccagcacagcaatcact

SEQ ID NO: 10387 - RNA, 22 nt, synthetic construct
  source 1..22: mol_type = other RNA
tttgcccctctggattggggag

SEQ ID NO: 10388 - RNA, 22 nt, synthetic construct
  source 1..22: mol_type = other RNA
tttggcagcacgtggtacagga

SEQ ID NO: 10389 - RNA, 22 nt, synthetic construct
  source 1..22: mol_type = other RNA
tttggccatcgcccaggtcctc

SEQ ID NO: 10390 - RNA, 22 nt, synthetic construct
  source 1..22: mol_type = other RNA
tttgtcttctctgtcccctgcc

SEQ ID NO: 10391 - RNA, 22 nt, synthetic construct
  source 1..22: mol_type = other RNA
tttgtgccgggcagtgtgccag

SEQ ID NO: 10392 - RNA, 22 nt, synthetic construct
  source 1..22: mol_type = other RNA
ttttcagccacatcttgaagag

SEQ ID NO: 10393 - RNA, 22 nt, synthetic construct
  source 1..22: mol_type = other RNA
ttttccagaagaagctgctccg

SEQ ID NO: 10394 - RNA, 22 nt, synthetic construct
  source 1..22: mol_type = other RNA
ttttctgggcacccgcctcacg

SEQ ID NO: 10395 - RNA, 20 nt, synthetic construct
  source 1..20: mol_type = other RNA
aaagccaagtccctgaagga

SEQ ID NO: 10396 - RNA, 20 nt, synthetic construct
  source 1..20: mol_type = other RNA
aaagcttgtgcagactcaga

SEQ ID NO: 10397 - RNA, 20 nt, synthetic construct
  source 1..20: mol_type = other RNA
aaaggctcgatggtgaactt

SEQ ID NO: 10398 - RNA, 20 nt, synthetic construct
  source 1..20: mol_type = other RNA
aaccacctcccatccgcctc

SEQ ID NO: 10399 - RNA, 20 nt, synthetic construct
  source 1..20: mol_type = other RNA
aacctgcatggcgtgaacca

SEQ ID NO: 10400 - RNA, 20 nt, synthetic construct
  source 1..20: mol_type = other RNA
aacttctcctctgctgcctg

SEQ ID NO: 10401 - RNA, 20 nt, synthetic construct
  source 1..20: mol_type = other RNA
aagacctgggaaagcttgtg

SEQ ID NO: 10402 - RNA, 20 nt, synthetic construct
  source 1..20: mol_type = other RNA
aagccaagtccctgaaggat

SEQ ID NO: 10403 - RNA, 20 nt, synthetic construct
  source 1..20: mol_type = other RNA
aagctacttcaggcagcaga

SEQ ID NO: 10404 - RNA, 20 nt, synthetic construct
  source 1..20: mol_type = other RNA
aagcttgtgcagactcagag

SEQ ID NO: 10405 - RNA, 20 nt, synthetic construct
  source 1..20: mol_type = other RNA
aagctttcccaggtcttcca

SEQ ID NO: 10406 - RNA, 20 nt, synthetic construct
  source 1..20: mol_type = other RNA
aaggatgtggaagacctggg

SEQ ID NO: 10407 - RNA, 20 nt, synthetic construct
  source 1..20: mol_type = other RNA
aaggcagccctgtggaggga

SEQ ID NO: 10408 - RNA, 20 nt, synthetic construct
  source 1..20: mol_type = other RNA
aaggctcgatggtgaacttc

SEQ ID NO: 10409 - RNA, 20 nt, synthetic construct
  source 1..20: mol_type = other RNA
aagtagcttggtctccccat

SEQ ID NO: 10410 - RNA, 20 nt, synthetic construct
  source 1..20: mol_type = other RNA
aagtccctgaaggatgtgga

SEQ ID NO: 10411 - RNA, 20 nt, synthetic construct
  source 1..20: mol_type = other RNA
aagttcaccatcgagccttt

SEQ ID NO: 10412 - RNA, 20 nt, synthetic construct
  source 1..20: mol_type = other RNA
acaagctttcccaggtcttc

SEQ ID NO: 10413 - RNA, 20 nt, synthetic construct
  source 1..20: mol_type = other RNA
acacggtggcgctgtgggag

SEQ ID NO: 10414 - RNA, 20 nt, synthetic construct
  source 1..20: mol_type = other RNA
acagcgccaccgtgtcgctc

SEQ ID NO: 10415 - RNA, 20 nt, synthetic construct
  source 1..20: mol_type = other RNA
acagggctgccttgagcgac

SEQ ID NO: 10416 - RNA, 20 nt, synthetic construct
  source 1..20: mol_type = other RNA
acatccttcagggacttggc

SEQ ID NO: 10417 - RNA, 20 nt, synthetic construct
  source 1..20: mol_type = other RNA
accaagctacttcaggcagc

SEQ ID NO: 10418 - RNA, 20 nt, synthetic construct
  source 1..20: mol_type = other RNA
accacctcccatccgcctct

SEQ ID NO: 10419 - RNA, 20 nt, synthetic construct
  source 1..20: mol_type = other RNA
accatcgagcctttcaaagc

SEQ ID NO: 10420 - RNA, 20 nt, synthetic construct
  source 1..20: mol_type = other RNA
accgtgcctgggtctgaggc

SEQ ID NO: 10421 - RNA, 20 nt, synthetic construct
  source 1..20: mol_type = other RNA
accgtgtcgctcaaggcagc

SEQ ID NO: 10422 - RNA, 20 nt, synthetic construct
  source 1..20: mol_type = other RNA
acctcccatccgcctctcct

SEQ ID NO: 10423 - RNA, 20 nt, synthetic construct
  source 1..20: mol_type = other RNA
acctctgagtctgcacaagc

SEQ ID NO: 10424 - RNA, 20 nt, synthetic construct
  source 1..20: mol_type = other RNA
acctgcatggcgtgaaccac

SEQ ID NO: 10425 - RNA, 20 nt, synthetic construct
  source 1..20: mol_type = other RNA
acctgggaaagcttgtgcag

SEQ ID NO: 10426 - RNA, 20 nt, synthetic construct
  source 1..20: mol_type = other RNA
acggtggcgctgtgggagtc

SEQ ID NO: 10427 - RNA, 20 nt, synthetic construct
  source 1..20: mol_type = other RNA
actcagaggtgagaggagag

SEQ ID NO: 10428 - RNA, 20 nt, synthetic construct
  source 1..20: mol_type = other RNA
actcccacagcgccaccgtg

SEQ ID NO: 10429 - RNA, 20 nt, synthetic construct
  source 1..20: mol_type = other RNA
acttcaggcagcagaggaga

SEQ ID NO: 10430 - RNA, 20 nt, synthetic construct
  source 1..20: mol_type = other RNA
acttctcctctgctgcctga

SEQ ID NO: 10431 - RNA, 20 nt, synthetic construct
  source 1..20: mol_type = other RNA
acttggctttgaaaggctcg

SEQ ID NO: 10432 - RNA, 20 nt, synthetic construct
  source 1..20: mol_type = other RNA
agaagttcaccatcgagcct

SEQ ID NO: 10433 - RNA, 20 nt, synthetic construct
  source 1..20: mol_type = other RNA
agaccaagctacttcaggca

SEQ ID NO: 10434 - RNA, 20 nt, synthetic construct
  source 1..20: mol_type = other RNA
agacccaggcacggtgacca

SEQ ID NO: 10435 - RNA, 20 nt, synthetic construct
  source 1..20: mol_type = other RNA
agacctgggaaagcttgtgc

SEQ ID NO: 10436 - RNA, 20 nt, synthetic construct
  source 1..20: mol_type = other RNA
agactcagaggtgagaggag

SEQ ID NO: 10437 - RNA, 20 nt, synthetic construct
  source 1..20: mol_type = other RNA
agaggagaagttcaccatcg

SEQ ID NO: 10438 - RNA, 20 nt, synthetic construct
  source 1..20: mol_type = other RNA
agaggagaggcggatgggag

SEQ ID NO: 10439 - RNA, 20 nt, synthetic construct
  source 1..20: mol_type = other RNA
agaggcggatgggaggtggt

SEQ ID NO: 10440 - RNA, 20 nt, synthetic construct
  source 1..20: mol_type = other RNA
agaggtgagaggagaggcgg

SEQ ID NO: 10441 - RNA, 20 nt, synthetic construct
  source 1..20: mol_type = other RNA
agcagaggagaagttcacca

SEQ ID NO: 10442 - RNA, 20 nt, synthetic construct
  source 1..20: mol_type = other RNA
agcagcatggggagaccaag

SEQ ID NO: 10443 - RNA, 20 nt, synthetic construct
  source 1..20: mol_type = other RNA
agcatggggagaccaagcta

SEQ ID NO: 10444 - RNA, 20 nt, synthetic construct
  source 1..20: mol_type = other RNA
agccaagtccctgaaggatg

SEQ ID NO: 10445 - RNA, 20 nt, synthetic construct
  source 1..20: mol_type = other RNA
agccctgtggagggagggcc

SEQ ID NO: 10446 - RNA, 20 nt, synthetic construct
  source 1..20: mol_type = other RNA
agcctggtcaccgtgcctgg

SEQ ID NO: 10447 - RNA, 20 nt, synthetic construct
  source 1..20: mol_type = other RNA
agcctttcaaagccaagtcc

SEQ ID NO: 10448 - RNA, 20 nt, synthetic construct
  source 1..20: mol_type = other RNA
agcgacacggtggcgctgtg

SEQ ID NO: 10449 - RNA, 20 nt, synthetic construct
  source 1..20: mol_type = other RNA
agcgccaccgtgtcgctcaa

SEQ ID NO: 10450 - RNA, 20 nt, synthetic construct
  source 1..20: mol_type = other RNA
agctacttcaggcagcagag

SEQ ID NO: 10451 - RNA, 20 nt, synthetic construct
  source 1..20: mol_type = other RNA
agcttggtctccccatgctg

SEQ ID NO: 10452 - RNA, 20 nt, synthetic construct
  source 1..20: mol_type = other RNA
agcttgtgcagactcagagg

SEQ ID NO: 10453 - RNA, 20 nt, synthetic construct
  source 1..20: mol_type = other RNA
agctttcccaggtcttccac

SEQ ID NO: 10454 - RNA, 20 nt, synthetic construct
  source 1..20: mol_type = other RNA
aggagaagttcaccatcgag

SEQ ID NO: 10455 - RNA, 20 nt, synthetic construct
  source 1..20: mol_type = other RNA
aggagaggcggatgggaggt

SEQ ID NO: 10456 - RNA, 20 nt, synthetic construct
  source 1..20: mol_type = other RNA
aggatgtggaagacctggga

SEQ ID NO: 10457 - RNA, 20 nt, synthetic construct
  source 1..20: mol_type = other RNA
aggcagcagaggagaagttc

SEQ ID NO: 10458 - RNA, 20 nt, synthetic construct
  source 1..20: mol_type = other RNA
aggcagccctgtggagggag

SEQ ID NO: 10459 - RNA, 20 nt, synthetic construct
  source 1..20: mol_type = other RNA
aggccctccctccacagggc

SEQ ID NO: 10460 - RNA, 20 nt, synthetic construct
  source 1..20: mol_type = other RNA
aggcggatgggaggtggttc

SEQ ID NO: 10461 - RNA, 20 nt, synthetic construct
  source 1..20: mol_type = other RNA
aggctcgatggtgaacttct

SEQ ID NO: 10462 - RNA, 20 nt, synthetic construct
  source 1..20: mol_type = other RNA
agggactcccacagcgccac

SEQ ID NO: 10463 - RNA, 20 nt, synthetic construct
  source 1..20: mol_type = other RNA
agggacttggctttgaaagg

SEQ ID NO: 10464 - RNA, 20 nt, synthetic construct
  source 1..20: mol_type = other RNA
agggagggcctcagacccag

SEQ ID NO: 10465 - RNA, 20 nt, synthetic construct
  source 1..20: mol_type = other RNA
agggcctcagacccaggcac

SEQ ID NO: 10466 - RNA, 20 nt, synthetic construct
  source 1..20: mol_type = other RNA
agggctgccttgagcgacac

SEQ ID NO: 10467 - RNA, 20 nt, synthetic construct
  source 1..20: mol_type = other RNA
aggtcttccacatccttcag

SEQ ID NO: 10468 - RNA, 20 nt, synthetic construct
  source 1..20: mol_type = other RNA
aggtgagaggagaggcggat

SEQ ID NO: 10469 - RNA, 20 nt, synthetic construct
  source 1..20: mol_type = other RNA
agtagcttggtctccccatg

SEQ ID NO: 10470 - RNA, 20 nt, synthetic construct
  source 1..20: mol_type = other RNA
agtccctgaaggatgtggaa

SEQ ID NO: 10471 - RNA, 20 nt, synthetic construct
  source 1..20: mol_type = other RNA
agtccctgcagcagcatggg

SEQ ID NO: 10472 - RNA, 20 nt, synthetic construct
  source 1..20: mol_type = other RNA
agtctgcacaagctttccca

SEQ ID NO: 10473 - RNA, 20 nt, synthetic construct
  source 1..20: mol_type = other RNA
agttcaccatcgagcctttc

SEQ ID NO: 10474 - RNA, 20 nt, synthetic construct
  source 1..20: mol_type = other RNA
atccgcctctcctctcacct

SEQ ID NO: 10475 - RNA, 20 nt, synthetic construct
  source 1..20: mol_type = other RNA
atccttcagggacttggctt

SEQ ID NO: 10476 - RNA, 20 nt, synthetic construct
  source 1..20: mol_type = other RNA
atcgagcctttcaaagccaa

SEQ ID NO: 10477 - RNA, 20 nt, synthetic construct
  source 1..20: mol_type = other RNA
atgctgctgcagggactccc

SEQ ID NO: 10478 - RNA, 20 nt, synthetic construct
  source 1..20: mol_type = other RNA
atggcgtgaaccacctccca

SEQ ID NO: 10479 - RNA, 20 nt, synthetic construct
  source 1..20: mol_type = other RNA
atgggaggtggttcacgcca

SEQ ID NO: 10480 - RNA, 20 nt, synthetic construct
  source 1..20: mol_type = other RNA
atggggagaccaagctactt

SEQ ID NO: 10481 - RNA, 20 nt, synthetic construct
  source 1..20: mol_type = other RNA
atggtgaacttctcctctgc

SEQ ID NO: 10482 - RNA, 20 nt, synthetic construct
  source 1..20: mol_type = other RNA
atgtggaagacctgggaaag

SEQ ID NO: 10483 - RNA, 20 nt, synthetic construct
  source 1..20: mol_type = other RNA
caaagccaagtccctgaagg

SEQ ID NO: 10484 - RNA, 20 nt, synthetic construct
  source 1..20: mol_type = other RNA
caacctgcatggcgtgaacc

SEQ ID NO: 10485 - RNA, 20 nt, synthetic construct
  source 1..20: mol_type = other RNA
caagctacttcaggcagcag

SEQ ID NO: 10486 - RNA, 20 nt, synthetic construct
  source 1..20: mol_type = other RNA
caagctttcccaggtcttcc

SEQ ID NO: 10487 - RNA, 20 nt, synthetic construct
  source 1..20: mol_type = other RNA
caaggcagccctgtggaggg

SEQ ID NO: 10488 - RNA, 20 nt, synthetic construct
  source 1..20: mol_type = other RNA
caagtccctgaaggatgtgg

SEQ ID NO: 10489 - RNA, 20 nt, synthetic construct
  source 1..20: mol_type = other RNA
cacaagctttcccaggtctt

SEQ ID NO: 10490 - RNA, 20 nt, synthetic construct
  source 1..20: mol_type = other RNA
cacagcgccaccgtgtcgct

SEQ ID NO: 10491 - RNA, 20 nt, synthetic construct
  source 1..20: mol_type = other RNA
cacagggctgccttgagcga

SEQ ID NO: 10492 - RNA, 20 nt, synthetic construct
  source 1..20: mol_type = other RNA
cacatccttcagggacttgg

SEQ ID NO: 10493 - RNA, 20 nt, synthetic construct
  source 1..20: mol_type = other RNA
caccatcgagcctttcaaag

SEQ ID NO: 10494 - RNA, 20 nt, synthetic construct
  source 1..20: mol_type = other RNA
caccgtgcctgggtctgagg

SEQ ID NO: 10495 - RNA, 20 nt, synthetic construct
  source 1..20: mol_type = other RNA
caccgtgtcgctcaaggcag

SEQ ID NO: 10496 - RNA, 20 nt, synthetic construct
  source 1..20: mol_type = other RNA
cacctcccatccgcctctcc

SEQ ID NO: 10497 - RNA, 20 nt, synthetic construct
  source 1..20: mol_type = other RNA
cacctctgagtctgcacaag

SEQ ID NO: 10498 - RNA, 20 nt, synthetic construct
  source 1..20: mol_type = other RNA
cacggtggcgctgtgggagt

SEQ ID NO: 10499 - RNA, 20 nt, synthetic construct
  source 1..20: mol_type = other RNA
cagacccaggcacggtgacc

SEQ ID NO: 10500 - RNA, 20 nt, synthetic construct
  source 1..20: mol_type = other RNA
cagactcagaggtgagagga

SEQ ID NO: 10501 - RNA, 20 nt, synthetic construct
  source 1..20: mol_type = other RNA
cagaggagaagttcaccatc

SEQ ID NO: 10502 - RNA, 20 nt, synthetic construct
  source 1..20: mol_type = other RNA
cagaggtgagaggagaggcg

SEQ ID NO: 10503 - RNA, 20 nt, synthetic construct
  source 1..20: mol_type = other RNA
cagcagaggagaagttcacc

SEQ ID NO: 10504 - RNA, 20 nt, synthetic construct
  source 1..20: mol_type = other RNA
cagcagcatggggagaccaa

SEQ ID NO: 10505 - RNA, 20 nt, synthetic construct
  source 1..20: mol_type = other RNA
cagcatggggagaccaagct

SEQ ID NO: 10506 - RNA, 20 nt, synthetic construct
  source 1..20: mol_type = other RNA
cagccctgtggagggagggc

SEQ ID NO: 10507 - RNA, 20 nt, synthetic construct
  source 1..20: mol_type = other RNA
cagcgccaccgtgtcgctca

SEQ ID NO: 10508 - RNA, 20 nt, synthetic construct
  source 1..20: mol_type = other RNA
caggcagcagaggagaagtt

SEQ ID NO: 10509 - RNA, 20 nt, synthetic construct
  source 1..20: mol_type = other RNA
cagggactcccacagcgcca

SEQ ID NO: 10510 - RNA, 20 nt, synthetic construct
  source 1..20: mol_type = other RNA
cagggacttggctttgaaag

SEQ ID NO: 10511 - RNA, 20 nt, synthetic construct
  source 1..20: mol_type = other RNA
cagggctgccttgagcgaca

SEQ ID NO: 10512 - RNA, 20 nt, synthetic construct
  source 1..20: mol_type = other RNA
caggtcttccacatccttca

SEQ ID NO: 10513 - RNA, 20 nt, synthetic construct
  source 1..20: mol_type = other RNA
catccgcctctcctctcacc

SEQ ID NO: 10514 - RNA, 20 nt, synthetic construct
  source 1..20: mol_type = other RNA
catccttcagggacttggct

SEQ ID NO: 10515 - RNA, 20 nt, synthetic construct
  source 1..20: mol_type = other RNA
catcgagcctttcaaagcca

SEQ ID NO: 10516 - RNA, 20 nt, synthetic construct
  source 1..20: mol_type = other RNA
catgctgctgcagggactcc

SEQ ID NO: 10517 - RNA, 20 nt, synthetic construct
  source 1..20: mol_type = other RNA
catggcgtgaaccacctccc

SEQ ID NO: 10518 - RNA, 20 nt, synthetic construct
  source 1..20: mol_type = other RNA
catggggagaccaagctact

SEQ ID NO: 10519 - RNA, 20 nt, synthetic construct
  source 1..20: mol_type = other RNA
ccaagctacttcaggcagca

SEQ ID NO: 10520 - RNA, 20 nt, synthetic construct
  source 1..20: mol_type = other RNA
ccaagtccctgaaggatgtg

SEQ ID NO: 10521 - RNA, 20 nt, synthetic construct
  source 1..20: mol_type = other RNA
ccacagcgccaccgtgtcgc

SEQ ID NO: 10522 - RNA, 20 nt, synthetic construct
  source 1..20: mol_type = other RNA
ccacagggctgccttgagcg

SEQ ID NO: 10523 - RNA, 20 nt, synthetic construct
  source 1..20: mol_type = other RNA
ccacatccttcagggacttg

SEQ ID NO: 10524 - RNA, 20 nt, synthetic construct
  source 1..20: mol_type = other RNA
ccaccgtgtcgctcaaggca

SEQ ID NO: 10525 - RNA, 20 nt, synthetic construct
  source 1..20: mol_type = other RNA
ccacctcccatccgcctctc

SEQ ID NO: 10526 - RNA, 20 nt, synthetic construct
  source 1..20: mol_type = other RNA
ccaggtcttccacatccttc

SEQ ID NO: 10527 - RNA, 20 nt, synthetic construct
  source 1..20: mol_type = other RNA
ccatccgcctctcctctcac

SEQ ID NO: 10528 - RNA, 20 nt, synthetic construct
  source 1..20: mol_type = other RNA
ccatcgagcctttcaaagcc

SEQ ID NO: 10529 - RNA, 20 nt, synthetic construct
  source 1..20: mol_type = other RNA
ccatgctgctgcagggactc

SEQ ID NO: 10530 - RNA, 20 nt, synthetic construct
  source 1..20: mol_type = other RNA
cccacagcgccaccgtgtcg

SEQ ID NO: 10531 - RNA, 20 nt, synthetic construct
  source 1..20: mol_type = other RNA
cccaggtcttccacatcctt

SEQ ID NO: 10532 - RNA, 20 nt, synthetic construct
  source 1..20: mol_type = other RNA
cccatccgcctctcctctca

SEQ ID NO: 10533 - RNA, 20 nt, synthetic construct
  source 1..20: mol_type = other RNA
cccatgctgctgcagggact

SEQ ID NO: 10534 - RNA, 20 nt, synthetic construct
  source 1..20: mol_type = other RNA
ccccatgctgctgcagggac

SEQ ID NO: 10535 - RNA, 20 nt, synthetic construct
  source 1..20: mol_type = other RNA
ccctccacagggctgccttg

SEQ ID NO: 10536 - RNA, 20 nt, synthetic construct
  source 1..20: mol_type = other RNA
ccctccctccacagggctgc

SEQ ID NO: 10537 - RNA, 20 nt, synthetic construct
  source 1..20: mol_type = other RNA
ccctgaaggatgtggaagac

SEQ ID NO: 10538 - RNA, 20 nt, synthetic construct
  source 1..20: mol_type = other RNA
ccctgcagcagcatggggag

SEQ ID NO: 10539 - RNA, 20 nt, synthetic construct
  source 1..20: mol_type = other RNA
ccctgtggagggagggcctc

SEQ ID NO: 10540 - RNA, 20 nt, synthetic construct
  source 1..20: mol_type = other RNA
ccgcctctcctctcacctct

SEQ ID NO: 10541 - RNA, 20 nt, synthetic construct
  source 1..20: mol_type = other RNA
ccgtgcctgggtctgaggcc

SEQ ID NO: 10542 - RNA, 20 nt, synthetic construct
  source 1..20: mol_type = other RNA
ccgtgtcgctcaaggcagcc

SEQ ID NO: 10543 - RNA, 20 nt, synthetic construct
  source 1..20: mol_type = other RNA
cctcagacccaggcacggtg

SEQ ID NO: 10544 - RNA, 20 nt, synthetic construct
  source 1..20: mol_type = other RNA
cctccacagggctgccttga

SEQ ID NO: 10545 - RNA, 20 nt, synthetic construct
  source 1..20: mol_type = other RNA
cctcccatccgcctctcctc

SEQ ID NO: 10546 - RNA, 20 nt, synthetic construct
  source 1..20: mol_type = other RNA
cctccctccacagggctgcc

SEQ ID NO: 10547 - RNA, 20 nt, synthetic construct
  source 1..20: mol_type = other RNA
cctctcacctctgagtctgc

SEQ ID NO: 10548 - RNA, 20 nt, synthetic construct
  source 1..20: mol_type = other RNA
cctctcctctcacctctgag

SEQ ID NO: 10549 - RNA, 20 nt, synthetic construct
  source 1..20: mol_type = other RNA
cctctgagtctgcacaagct

SEQ ID NO: 10550 - RNA, 20 nt, synthetic construct
  source 1..20: mol_type = other RNA
cctctgctgcctgaagtagc

SEQ ID NO: 10551 - RNA, 20 nt, synthetic construct
  source 1..20: mol_type = other RNA
cctgaaggatgtggaagacc

SEQ ID NO: 10552 - RNA, 20 nt, synthetic construct
  source 1..20: mol_type = other RNA
cctgaagtagcttggtctcc

SEQ ID NO: 10553 - RNA, 20 nt, synthetic construct
  source 1..20: mol_type = other RNA
cctgcagcagcatggggaga

SEQ ID NO: 10554 - RNA, 20 nt, synthetic construct
  source 1..20: mol_type = other RNA
cctgcatggcgtgaaccacc

SEQ ID NO: 10555 - RNA, 20 nt, synthetic construct
  source 1..20: mol_type = other RNA
cctgggaaagcttgtgcaga

SEQ ID NO: 10556 - RNA, 20 nt, synthetic construct
  source 1..20: mol_type = other RNA
cctgggtctgaggccctccc

SEQ ID NO: 10557 - RNA, 20 nt, synthetic construct
  source 1..20: mol_type = other RNA
cctggtcaccgtgcctgggt

SEQ ID NO: 10558 - RNA, 20 nt, synthetic construct
  source 1..20: mol_type = other RNA
cctgtggagggagggcctca

SEQ ID NO: 10559 - RNA, 20 nt, synthetic construct
  source 1..20: mol_type = other RNA
ccttcagggacttggctttg

SEQ ID NO: 10560 - RNA, 20 nt, synthetic construct
  source 1..20: mol_type = other RNA
ccttgagcgacacggtggcg

SEQ ID NO: 10561 - RNA, 20 nt, synthetic construct
  source 1..20: mol_type = other RNA
cctttcaaagccaagtccct

SEQ ID NO: 10562 - RNA, 20 nt, synthetic construct
  source 1..20: mol_type = other RNA
cgacacggtggcgctgtggg

SEQ ID NO: 10563 - RNA, 20 nt, synthetic construct
  source 1..20: mol_type = other RNA
cgagcctttcaaagccaagt

SEQ ID NO: 10564 - RNA, 20 nt, synthetic construct
  source 1..20: mol_type = other RNA
cgatggtgaacttctcctct

SEQ ID NO: 10565 - RNA, 20 nt, synthetic construct
  source 1..20: mol_type = other RNA
cgccaccgtgtcgctcaagg

SEQ ID NO: 10566 - RNA, 20 nt, synthetic construct
  source 1..20: mol_type = other RNA
cgcctctcctctcacctctg

SEQ ID NO: 10567 - RNA, 20 nt, synthetic construct
  source 1..20: mol_type = other RNA
cgctcaaggcagccctgtgg

SEQ ID NO: 10568 - RNA, 20 nt, synthetic construct
  source 1..20: mol_type = other RNA
cgctgtgggagtccctgcag

SEQ ID NO: 10569 - RNA, 20 nt, synthetic construct
  source 1..20: mol_type = other RNA
cggatgggaggtggttcacg

SEQ ID NO: 10570 - RNA, 20 nt, synthetic construct
  source 1..20: mol_type = other RNA
cggtggcgctgtgggagtcc

SEQ ID NO: 10571 - RNA, 20 nt, synthetic construct
  source 1..20: mol_type = other RNA
cgtgaaccacctcccatccg

SEQ ID NO: 10572 - RNA, 20 nt, synthetic construct
  source 1..20: mol_type = other RNA
cgtgcctgggtctgaggccc

SEQ ID NO: 10573 - RNA, 20 nt, synthetic construct
  source 1..20: mol_type = other RNA
cgtgtcgctcaaggcagccc

SEQ ID NO: 10574 - RNA, 20 nt, synthetic construct
  source 1..20: mol_type = other RNA
ctacttcaggcagcagagga

SEQ ID NO: 10575 - RNA, 20 nt, synthetic construct
  source 1..20: mol_type = other RNA
ctagcctggtcaccgtgcct

SEQ ID NO: 10576 - RNA, 20 nt, synthetic construct
  source 1..20: mol_type = other RNA
ctcaaggcagccctgtggag

SEQ ID NO: 10577 - RNA, 20 nt, synthetic construct
  source 1..20: mol_type = other RNA
ctcacctctgagtctgcaca

SEQ ID NO: 10578 - RNA, 20 nt, synthetic construct
  source 1..20: mol_type = other RNA
ctcagacccaggcacggtga

SEQ ID NO: 10579 - RNA, 20 nt, synthetic construct
  source 1..20: mol_type = other RNA
ctcagaggtgagaggagagg

SEQ ID NO: 10580 - RNA, 20 nt, synthetic construct
  source 1..20: mol_type = other RNA
ctccacagggctgccttgag

SEQ ID NO: 10581 - RNA, 20 nt, synthetic construct
  source 1..20: mol_type = other RNA
ctcccacagcgccaccgtgt

SEQ ID NO: 10582 - RNA, 20 nt, synthetic construct
  source 1..20: mol_type = other RNA
ctcccatccgcctctcctct

SEQ ID NO: 10583 - RNA, 20 nt, synthetic construct
  source 1..20: mol_type = other RNA
ctccccatgctgctgcaggg

SEQ ID NO: 10584 - RNA, 20 nt, synthetic construct
  source 1..20: mol_type = other RNA
ctccctccacagggctgcct

SEQ ID NO: 10585 - RNA, 20 nt, synthetic construct
  source 1..20: mol_type = other RNA
ctcctctcacctctgagtct

SEQ ID NO: 10586 - RNA, 20 nt, synthetic construct
  source 1..20: mol_type = other RNA
ctcctctgctgcctgaagta

SEQ ID NO: 10587 - RNA, 20 nt, synthetic construct
  source 1..20: mol_type = other RNA
ctcgatggtgaacttctcct

SEQ ID NO: 10588 - RNA, 20 nt, synthetic construct
  source 1..20: mol_type = other RNA
ctctcacctctgagtctgca

SEQ ID NO: 10589 - RNA, 20 nt, synthetic construct
  source 1..20: mol_type = other RNA
ctctcctctcacctctgagt

SEQ ID NO: 10590 - RNA, 20 nt, synthetic construct
  source 1..20: mol_type = other RNA
ctctgagtctgcacaagctt

SEQ ID NO: 10591 - RNA, 20 nt, synthetic construct
  source 1..20: mol_type = other RNA
ctctgctgcctgaagtagct

SEQ ID NO: 10592 - RNA, 20 nt, synthetic construct
  source 1..20: mol_type = other RNA
ctgaaggatgtggaagacct

SEQ ID NO: 10593 - RNA, 20 nt, synthetic construct
  source 1..20: mol_type = other RNA
ctgaagtagcttggtctccc

SEQ ID NO: 10594 - RNA, 20 nt, synthetic construct
  source 1..20: mol_type = other RNA
ctgaggccctccctccacag

SEQ ID NO: 10595 - RNA, 20 nt, synthetic construct
  source 1..20: mol_type = other RNA
ctgagtctgcacaagctttc

SEQ ID NO: 10596 - RNA, 20 nt, synthetic construct
  source 1..20: mol_type = other RNA
ctgcacaagctttcccaggt

SEQ ID NO: 10597 - RNA, 20 nt, synthetic construct
  source 1..20: mol_type = other RNA
ctgcagcagcatggggagac

SEQ ID NO: 10598 - RNA, 20 nt, synthetic construct
  source 1..20: mol_type = other RNA
ctgcagggactcccacagcg

SEQ ID NO: 10599 - RNA, 20 nt, synthetic construct
  source 1..20: mol_type = other RNA
ctgcatggcgtgaaccacct

SEQ ID NO: 10600 - RNA, 20 nt, synthetic construct
  source 1..20: mol_type = other RNA
ctgcctgaagtagcttggtc

SEQ ID NO: 10601 - RNA, 20 nt, synthetic construct
  source 1..20: mol_type = other RNA
ctgccttgagcgacacggtg

SEQ ID NO: 10602 - RNA, 20 nt, synthetic construct
  source 1..20: mol_type = other RNA
ctgctgcagggactcccaca

SEQ ID NO: 10603 - RNA, 20 nt, synthetic construct
  source 1..20: mol_type = other RNA
ctgctgcctgaagtagcttg

SEQ ID NO: 10604 - RNA, 20 nt, synthetic construct
  source 1..20: mol_type = other RNA
ctgggaaagcttgtgcagac

SEQ ID NO: 10605 - RNA, 20 nt, synthetic construct
  source 1..20: mol_type = other RNA
ctgggtctgaggccctccct

SEQ ID NO: 10606 - RNA, 20 nt, synthetic construct
  source 1..20: mol_type = other RNA
ctggtcaccgtgcctgggtc

SEQ ID NO: 10607 - RNA, 20 nt, synthetic construct
  source 1..20: mol_type = other RNA
ctgtggagggagggcctcag

SEQ ID NO: 10608 - RNA, 20 nt, synthetic construct
  source 1..20: mol_type = other RNA
ctgtgggagtccctgcagca

SEQ ID NO: 10609 - RNA, 20 nt, synthetic construct
  source 1..20: mol_type = other RNA
cttcaggcagcagaggagaa

SEQ ID NO: 10610 - RNA, 20 nt, synthetic construct
  source 1..20: mol_type = other RNA
cttcagggacttggctttga

SEQ ID NO: 10611 - RNA, 20 nt, synthetic construct
  source 1..20: mol_type = other RNA
cttccacatccttcagggac

SEQ ID NO: 10612 - RNA, 20 nt, synthetic construct
  source 1..20: mol_type = other RNA
cttctcctctgctgcctgaa

SEQ ID NO: 10613 - RNA, 20 nt, synthetic construct
  source 1..20: mol_type = other RNA
cttgagcgacacggtggcgc

SEQ ID NO: 10614 - RNA, 20 nt, synthetic construct
  source 1..20: mol_type = other RNA
cttggctttgaaaggctcga

SEQ ID NO: 10615 - RNA, 20 nt, synthetic construct
  source 1..20: mol_type = other RNA
cttggtctccccatgctgct

SEQ ID NO: 10616 - RNA, 20 nt, synthetic construct
  source 1..20: mol_type = other RNA
cttgtgcagactcagaggtg

SEQ ID NO: 10617 - RNA, 20 nt, synthetic construct
  source 1..20: mol_type = other RNA
ctttcaaagccaagtccctg

SEQ ID NO: 10618 - RNA, 20 nt, synthetic construct
  source 1..20: mol_type = other RNA
ctttcccaggtcttccacat

SEQ ID NO: 10619 - RNA, 20 nt, synthetic construct
  source 1..20: mol_type = other RNA
ctttgaaaggctcgatggtg

SEQ ID NO: 10620 - RNA, 20 nt, synthetic construct
  source 1..20: mol_type = other RNA
gaaagcttgtgcagactcag

SEQ ID NO: 10621 - RNA, 20 nt, synthetic construct
  source 1..20: mol_type = other RNA
gaaaggctcgatggtgaact

SEQ ID NO: 10622 - RNA, 20 nt, synthetic construct
  source 1..20: mol_type = other RNA
gaaccacctcccatccgcct

SEQ ID NO: 10623 - RNA, 20 nt, synthetic construct
  source 1..20: mol_type = other RNA
gaacttctcctctgctgcct

SEQ ID NO: 10624 - RNA, 20 nt, synthetic construct
  source 1..20: mol_type = other RNA
gaagacctgggaaagcttgt

SEQ ID NO: 10625 - RNA, 20 nt, synthetic construct
  source 1..20: mol_type = other RNA
gaaggatgtggaagacctgg

SEQ ID NO: 10626 - RNA, 20 nt, synthetic construct
  source 1..20: mol_type = other RNA
gaagtagcttggtctcccca

SEQ ID NO: 10627 - RNA, 20 nt, synthetic construct
  source 1..20: mol_type = other RNA
gaagttcaccatcgagcctt

SEQ ID NO: 10628 - RNA, 20 nt, synthetic construct
  source 1..20: mol_type = other RNA
gacacggtggcgctgtggga

SEQ ID NO: 10629 - RNA, 20 nt, synthetic construct
  source 1..20: mol_type = other RNA
gaccaagctacttcaggcag

SEQ ID NO: 10630 - RNA, 20 nt, synthetic construct
  source 1..20: mol_type = other RNA
gacctgggaaagcttgtgca

SEQ ID NO: 10631 - RNA, 20 nt, synthetic construct
  source 1..20: mol_type = other RNA
gactcagaggtgagaggaga

SEQ ID NO: 10632 - RNA, 20 nt, synthetic construct
  source 1..20: mol_type = other RNA
gactcccacagcgccaccgt

SEQ ID NO: 10633 - RNA, 20 nt, synthetic construct
  source 1..20: mol_type = other RNA
gacttggctttgaaaggctc

SEQ ID NO: 10634 - RNA, 20 nt, synthetic construct
  source 1..20: mol_type = other RNA
gagaagttcaccatcgagcc

SEQ ID NO: 10635 - RNA, 20 nt, synthetic construct
  source 1..20: mol_type = other RNA
gagaccaagctacttcaggc

SEQ ID NO: 10636 - RNA, 20 nt, synthetic construct
  source 1..20: mol_type = other RNA
gagaggagaggcggatggga

SEQ ID NO: 10637 - RNA, 20 nt, synthetic construct
  source 1..20: mol_type = other RNA
gagaggcggatgggaggtgg

SEQ ID NO: 10638 - RNA, 20 nt, synthetic construct
  source 1..20: mol_type = other RNA
gagcctttcaaagccaagtc

SEQ ID NO: 10639 - RNA, 20 nt, synthetic construct
  source 1..20: mol_type = other RNA
gagcgacacggtggcgctgt

SEQ ID NO: 10640 - RNA, 20 nt, synthetic construct
  source 1..20: mol_type = other RNA
gaggagaagttcaccatcga

SEQ ID NO: 10641 - RNA, 20 nt, synthetic construct
  source 1..20: mol_type = other RNA
gaggagaggcggatgggagg

SEQ ID NO: 10642 - RNA, 20 nt, synthetic construct
  source 1..20: mol_type = other RNA
gaggccctccctccacaggg

SEQ ID NO: 10643 - RNA, 20 nt, synthetic construct
  source 1..20: mol_type = other RNA
gaggcggatgggaggtggtt

SEQ ID NO: 10644 - RNA, 20 nt, synthetic construct
  source 1..20: mol_type = other RNA
gagggagggcctcagaccca

SEQ ID NO: 10645 - RNA, 20 nt, synthetic construct
  source 1..20: mol_type = other RNA
gagggcctcagacccaggca

SEQ ID NO: 10646 - RNA, 20 nt, synthetic construct
  source 1..20: mol_type = other RNA
gaggtgagaggagaggcgga

SEQ ID NO: 10647 - RNA, 20 nt, synthetic construct
  source 1..20: mol_type = other RNA
gagtccctgcagcagcatgg

SEQ ID NO: 10648 - RNA, 20 nt, synthetic construct
  source 1..20: mol_type = other RNA
gagtctgcacaagctttccc

SEQ ID NO: 10649 - RNA, 20 nt, synthetic construct
  source 1..20: mol_type = other RNA
gatgggaggtggttcacgcc

SEQ ID NO: 10650 - RNA, 20 nt, synthetic construct
  source 1..20: mol_type = other RNA
gatggtgaacttctcctctg

SEQ ID NO: 10651 - RNA, 20 nt, synthetic construct
  source 1..20: mol_type = other RNA
gatgtggaagacctgggaaa

SEQ ID NO: 10652 - RNA, 20 nt, synthetic construct
  source 1..20: mol_type = other RNA
gcacaagctttcccaggtct

SEQ ID NO: 10653 - RNA, 20 nt, synthetic construct
  source 1..20: mol_type = other RNA
gcagactcagaggtgagagg

SEQ ID NO: 10654 - RNA, 20 nt, synthetic construct
  source 1..20: mol_type = other RNA
gcagaggagaagttcaccat

SEQ ID NO: 10655 - RNA, 20 nt, synthetic construct
  source 1..20: mol_type = other RNA
gcagcagaggagaagttcac

SEQ ID NO: 10656 - RNA, 20 nt, synthetic construct
  source 1..20: mol_type = other RNA
gcagcagcatggggagacca

SEQ ID NO: 10657 - RNA, 20 nt, synthetic construct
  source 1..20: mol_type = other RNA
gcagcatggggagaccaagc

SEQ ID NO: 10658 - RNA, 20 nt, synthetic construct
  source 1..20: mol_type = other RNA
gcagccctgtggagggaggg

SEQ ID NO: 10659 - RNA, 20 nt, synthetic construct
  source 1..20: mol_type = other RNA
gcagggactcccacagcgcc

SEQ ID NO: 10660 - RNA, 20 nt, synthetic construct
  source 1..20: mol_type = other RNA
gcatggcgtgaaccacctcc

SEQ ID NO: 10661 - RNA, 20 nt, synthetic construct
  source 1..20: mol_type = other RNA
gcatggggagaccaagctac

SEQ ID NO: 10662 - RNA, 20 nt, synthetic construct
  source 1..20: mol_type = other RNA
gccaagtccctgaaggatgt

SEQ ID NO: 10663 - RNA, 20 nt, synthetic construct
  source 1..20: mol_type = other RNA
gccaccgtgtcgctcaaggc

SEQ ID NO: 10664 - RNA, 20 nt, synthetic construct
  source 1..20: mol_type = other RNA
gccctccctccacagggctg

SEQ ID NO: 10665 - RNA, 20 nt, synthetic construct
  source 1..20: mol_type = other RNA
gccctgtggagggagggcct

SEQ ID NO: 10666 - RNA, 20 nt, synthetic construct
  source 1..20: mol_type = other RNA
gcctcagacccaggcacggt

SEQ ID NO: 10667 - RNA, 20 nt, synthetic construct
  source 1..20: mol_type = other RNA
gcctctcctctcacctctga

SEQ ID NO: 10668 - RNA, 20 nt, synthetic construct
  source 1..20: mol_type = other RNA
gcctgaagtagcttggtctc

SEQ ID NO: 10669 - RNA, 20 nt, synthetic construct
  source 1..20: mol_type = other RNA
gcctgggtctgaggccctcc

SEQ ID NO: 10670 - RNA, 20 nt, synthetic construct
  source 1..20: mol_type = other RNA
gcctggtcaccgtgcctggg

SEQ ID NO: 10671 - RNA, 20 nt, synthetic construct
  source 1..20: mol_type = other RNA
gccttgagcgacacggtggc

SEQ ID NO: 10672 - RNA, 20 nt, synthetic construct
  source 1..20: mol_type = other RNA
gcctttcaaagccaagtccc

SEQ ID NO: 10673 - RNA, 20 nt, synthetic construct
  source 1..20: mol_type = other RNA
gcgacacggtggcgctgtgg

SEQ ID NO: 10674 - RNA, 20 nt, synthetic construct
  source 1..20: mol_type = other RNA
gcgccaccgtgtcgctcaag

SEQ ID NO: 10675 - RNA, 20 nt, synthetic construct
  source 1..20: mol_type = other RNA
gcgctgtgggagtccctgca

SEQ ID NO: 10676 - RNA, 20 nt, synthetic construct
  source 1..20: mol_type = other RNA
gcggatgggaggtggttcac

SEQ ID NO: 10677 - RNA, 20 nt, synthetic construct
  source 1..20: mol_type = other RNA
gcgtgaaccacctcccatcc

SEQ ID NO: 10678 - RNA, 20 nt, synthetic construct
  source 1..20: mol_type = other RNA
gctacttcaggcagcagagg

SEQ ID NO: 10679 - RNA, 20 nt, synthetic construct
  source 1..20: mol_type = other RNA
gctcaaggcagccctgtgga

SEQ ID NO: 10680 - RNA, 20 nt, synthetic construct
  source 1..20: mol_type = other RNA
gctcgatggtgaacttctcc

SEQ ID NO: 10681 - RNA, 20 nt, synthetic construct
  source 1..20: mol_type = other RNA
gctgcagggactcccacagc

SEQ ID NO: 10682 - RNA, 20 nt, synthetic construct
  source 1..20: mol_type = other RNA
gctgcctgaagtagcttggt

SEQ ID NO: 10683 - RNA, 20 nt, synthetic construct
  source 1..20: mol_type = other RNA
gctgccttgagcgacacggt

SEQ ID NO: 10684 - RNA, 20 nt, synthetic construct
  source 1..20: mol_type = other RNA
gctgctgcagggactcccac

SEQ ID NO: 10685 - RNA, 20 nt, synthetic construct
  source 1..20: mol_type = other RNA
gctgtgggagtccctgcagc

SEQ ID NO: 10686 - RNA, 20 nt, synthetic construct
  source 1..20: mol_type = other RNA
gcttggtctccccatgctgc

SEQ ID NO: 10687 - RNA, 20 nt, synthetic construct
  source 1..20: mol_type = other RNA
gcttgtgcagactcagaggt

SEQ ID NO: 10688 - RNA, 20 nt, synthetic construct
  source 1..20: mol_type = other RNA
gctttcccaggtcttccaca

SEQ ID NO: 10689 - RNA, 20 nt, synthetic construct
  source 1..20: mol_type = other RNA
gctttgaaaggctcgatggt

SEQ ID NO: 10690 - RNA, 20 nt, synthetic construct
  source 1..20: mol_type = other RNA
ggaaagcttgtgcagactca

SEQ ID NO: 10691 - RNA, 20 nt, synthetic construct
  source 1..20: mol_type = other RNA
ggaagacctgggaaagcttg

SEQ ID NO: 10692 - RNA, 20 nt, synthetic construct
  source 1..20: mol_type = other RNA
ggactcccacagcgccaccg

SEQ ID NO: 10693 - RNA, 20 nt, synthetic construct
  source 1..20: mol_type = other RNA
ggacttggctttgaaaggct

SEQ ID NO: 10694 - RNA, 20 nt, synthetic construct
  source 1..20: mol_type = other RNA
ggagaagttcaccatcgagc

SEQ ID NO: 10695 - RNA, 20 nt, synthetic construct
  source 1..20: mol_type = other RNA
ggagaccaagctacttcagg

SEQ ID NO: 10696 - RNA, 20 nt, synthetic construct
  source 1..20: mol_type = other RNA
ggagaggcggatgggaggtg

SEQ ID NO: 10697 - RNA, 20 nt, synthetic construct
  source 1..20: mol_type = other RNA
ggagggagggcctcagaccc

SEQ ID NO: 10698 - RNA, 20 nt, synthetic construct
  source 1..20: mol_type = other RNA
ggagggcctcagacccaggc

SEQ ID NO: 10699 - RNA, 20 nt, synthetic construct
  source 1..20: mol_type = other RNA
ggagtccctgcagcagcatg

SEQ ID NO: 10700 - RNA, 20 nt, synthetic construct
  source 1..20: mol_type = other RNA
ggatgggaggtggttcacgc

SEQ ID NO: 10701 - RNA, 20 nt, synthetic construct
  source 1..20: mol_type = other RNA
ggatgtggaagacctgggaa

SEQ ID NO: 10702 - RNA, 20 nt, synthetic construct
  source 1..20: mol_type = other RNA
ggcagcagaggagaagttca

SEQ ID NO: 10703 - RNA, 20 nt, synthetic construct
  source 1..20: mol_type = other RNA
ggcagccctgtggagggagg

SEQ ID NO: 10704 - RNA, 20 nt, synthetic construct
  source 1..20: mol_type = other RNA
ggccctccctccacagggct

SEQ ID NO: 10705 - RNA, 20 nt, synthetic construct
  source 1..20: mol_type = other RNA
ggcctcagacccaggcacgg

SEQ ID NO: 10706 - RNA, 20 nt, synthetic construct
  source 1..20: mol_type = other RNA
ggcgctgtgggagtccctgc

SEQ ID NO: 10707 - RNA, 20 nt, synthetic construct
  source 1..20: mol_type = other RNA
ggcggatgggaggtggttca

SEQ ID NO: 10708 - RNA, 20 nt, synthetic construct
  source 1..20: mol_type = other RNA
ggcgtgaaccacctcccatc

SEQ ID NO: 10709 - RNA, 20 nt, synthetic construct
  source 1..20: mol_type = other RNA
ggctcgatggtgaacttctc

SEQ ID NO: 10710 - RNA, 20 nt, synthetic construct
  source 1..20: mol_type = other RNA
ggctgccttgagcgacacgg

SEQ ID NO: 10711 - RNA, 20 nt, synthetic construct
  source 1..20: mol_type = other RNA
ggctttgaaaggctcgatgg

SEQ ID NO: 10712 - RNA, 20 nt, synthetic construct
  source 1..20: mol_type = other RNA
gggaaagcttgtgcagactc

SEQ ID NO: 10713 - RNA, 20 nt, synthetic construct
  source 1..20: mol_type = other RNA
gggactcccacagcgccacc

SEQ ID NO: 10714 - RNA, 20 nt, synthetic construct
  source 1..20: mol_type = other RNA
gggacttggctttgaaaggc

SEQ ID NO: 10715 - RNA, 20 nt, synthetic construct
  source 1..20: mol_type = other RNA
gggagaccaagctacttcag

SEQ ID NO: 10716 - RNA, 20 nt, synthetic construct
  source 1..20: mol_type = other RNA
gggagggcctcagacccagg

SEQ ID NO: 10717 - RNA, 20 nt, synthetic construct
  source 1..20: mol_type = other RNA
gggagtccctgcagcagcat

SEQ ID NO: 10718 - RNA, 20 nt, synthetic construct
  source 1..20: mol_type = other RNA
gggcctcagacccaggcacg

SEQ ID NO: 10719 - RNA, 20 nt, synthetic construct
  source 1..20: mol_type = other RNA
gggctgccttgagcgacacg

SEQ ID NO: 10720 - RNA, 20 nt, synthetic construct
  source 1..20: mol_type = other RNA
ggggagaccaagctacttca

SEQ ID NO: 10721 - RNA, 20 nt, synthetic construct
  source 1..20: mol_type = other RNA
gggtctgaggccctccctcc

SEQ ID NO: 10722 - RNA, 20 nt, synthetic construct
  source 1..20: mol_type = other RNA
ggtcaccgtgcctgggtctg

SEQ ID NO: 10723 - RNA, 20 nt, synthetic construct
  source 1..20: mol_type = other RNA
ggtctccccatgctgctgca

SEQ ID NO: 10724 - RNA, 20 nt, synthetic construct
  source 1..20: mol_type = other RNA
ggtctgaggccctccctcca

SEQ ID NO: 10725 - RNA, 20 nt, synthetic construct
  source 1..20: mol_type = other RNA
ggtcttccacatccttcagg

SEQ ID NO: 10726 - RNA, 20 nt, synthetic construct
  source 1..20: mol_type = other RNA
ggtgaacttctcctctgctg

SEQ ID NO: 10727 - RNA, 20 nt, synthetic construct
  source 1..20: mol_type = other RNA
ggtgagaggagaggcggatg

SEQ ID NO: 10728 - RNA, 20 nt, synthetic construct
  source 1..20: mol_type = other RNA
ggtggcgctgtgggagtccc

SEQ ID NO: 10729 - RNA, 20 nt, synthetic construct
  source 1..20: mol_type = other RNA
gtagcttggtctccccatgc

SEQ ID NO: 10730 - RNA, 20 nt, synthetic construct
  source 1..20: mol_type = other RNA
gtcaccgtgcctgggtctga

SEQ ID NO: 10731 - RNA, 20 nt, synthetic construct
  source 1..20: mol_type = other RNA
gtccctgaaggatgtggaag

SEQ ID NO: 10732 - RNA, 20 nt, synthetic construct
  source 1..20: mol_type = other RNA
gtccctgcagcagcatgggg

SEQ ID NO: 10733 - RNA, 20 nt, synthetic construct
  source 1..20: mol_type = other RNA
gtcgctcaaggcagccctgt

SEQ ID NO: 10734 - RNA, 20 nt, synthetic construct
  source 1..20: mol_type = other RNA
gtctagcctggtcaccgtgc

SEQ ID NO: 10735 - RNA, 20 nt, synthetic construct
  source 1..20: mol_type = other RNA
gtctccccatgctgctgcag

SEQ ID NO: 10736 - RNA, 20 nt, synthetic construct
  source 1..20: mol_type = other RNA
gtctgaggccctccctccac

SEQ ID NO: 10737 - RNA, 20 nt, synthetic construct
  source 1..20: mol_type = other RNA
gtctgcacaagctttcccag

SEQ ID NO: 10738 - RNA, 20 nt, synthetic construct
  source 1..20: mol_type = other RNA
gtcttccacatccttcaggg

SEQ ID NO: 10739 - RNA, 20 nt, synthetic construct
  source 1..20: mol_type = other RNA
gtgaaccacctcccatccgc

SEQ ID NO: 10740 - RNA, 20 nt, synthetic construct
  source 1..20: mol_type = other RNA
gtgaacttctcctctgctgc

SEQ ID NO: 10741 - RNA, 20 nt, synthetic construct
  source 1..20: mol_type = other RNA
gtgagaggagaggcggatgg

SEQ ID NO: 10742 - RNA, 20 nt, synthetic construct
  source 1..20: mol_type = other RNA
gtgcagactcagaggtgaga

SEQ ID NO: 10743 - RNA, 20 nt, synthetic construct
  source 1..20: mol_type = other RNA
gtgcctgggtctgaggccct

SEQ ID NO: 10744 - RNA, 20 nt, synthetic construct
  source 1..20: mol_type = other RNA
gtggaagacctgggaaagct

SEQ ID NO: 10745 - RNA, 20 nt, synthetic construct
  source 1..20: mol_type = other RNA
gtggagggagggcctcagac

SEQ ID NO: 10746 - RNA, 20 nt, synthetic construct
  source 1..20: mol_type = other RNA
gtggcgctgtgggagtccct

SEQ ID NO: 10747 - RNA, 20 nt, synthetic construct
  source 1..20: mol_type = other RNA
gtgggagtccctgcagcagc

SEQ ID NO: 10748 - RNA, 20 nt, synthetic construct
  source 1..20: mol_type = other RNA
gtgtcgctcaaggcagccct

SEQ ID NO: 10749 - RNA, 20 nt, synthetic construct
  source 1..20: mol_type = other RNA
gttcaccatcgagcctttca

SEQ ID NO: 10750 - RNA, 20 nt, synthetic construct
  source 1..20: mol_type = other RNA
tacttcaggcagcagaggag

SEQ ID NO: 10751 - RNA, 20 nt, synthetic construct
  source 1..20: mol_type = other RNA
tagcctggtcaccgtgcctg

SEQ ID NO: 10752 - RNA, 20 nt, synthetic construct
  source 1..20: mol_type = other RNA
tagcttggtctccccatgct

SEQ ID NO: 10753 - RNA, 20 nt, synthetic construct
  source 1..20: mol_type = other RNA
tcaaagccaagtccctgaag

SEQ ID NO: 10754 - RNA, 20 nt, synthetic construct
  source 1..20: mol_type = other RNA
tcaaggcagccctgtggagg

SEQ ID NO: 10755 - RNA, 20 nt, synthetic construct
  source 1..20: mol_type = other RNA
tcaccatcgagcctttcaaa

SEQ ID NO: 10756 - RNA, 20 nt, synthetic construct
  source 1..20: mol_type = other RNA
tcaccgtgcctgggtctgag

SEQ ID NO: 10757 - RNA, 20 nt, synthetic construct
  source 1..20: mol_type = other RNA
tcacctctgagtctgcacaa

SEQ ID NO: 10758 - RNA, 20 nt, synthetic construct
  source 1..20: mol_type = other RNA
tcagacccaggcacggtgac

SEQ ID NO: 10759 - RNA, 20 nt, synthetic construct
  source 1..20: mol_type = other RNA
tcagaggtgagaggagaggc

SEQ ID NO: 10760 - RNA, 20 nt, synthetic construct
  source 1..20: mol_type = other RNA
tcaggcagcagaggagaagt

SEQ ID NO: 10761 - RNA, 20 nt, synthetic construct
  source 1..20: mol_type = other RNA
tcagggacttggctttgaaa

SEQ ID NO: 10762 - RNA, 20 nt, synthetic construct
  source 1..20: mol_type = other RNA
tccacagggctgccttgagc

SEQ ID NO: 10763 - RNA, 20 nt, synthetic construct
  source 1..20: mol_type = other RNA
tccacatccttcagggactt

SEQ ID NO: 10764 - RNA, 20 nt, synthetic construct
  source 1..20: mol_type = other RNA
tcccacagcgccaccgtgtc

SEQ ID NO: 10765 - RNA, 20 nt, synthetic construct
  source 1..20: mol_type = other RNA
tcccaggtcttccacatcct

SEQ ID NO: 10766 - RNA, 20 nt, synthetic construct
  source 1..20: mol_type = other RNA
tcccatccgcctctcctctc

SEQ ID NO: 10767 - RNA, 20 nt, synthetic construct
  source 1..20: mol_type = other RNA
tccccatgctgctgcaggga

SEQ ID NO: 10768 - RNA, 20 nt, synthetic construct
  source 1..20: mol_type = other RNA
tccctccacagggctgcctt

SEQ ID NO: 10769 - RNA, 20 nt, synthetic construct
  source 1..20: mol_type = other RNA
tccctgaaggatgtggaaga

SEQ ID NO: 10770 - RNA, 20 nt, synthetic construct
  source 1..20: mol_type = other RNA
tccctgcagcagcatgggga

SEQ ID NO: 10771 - RNA, 20 nt, synthetic construct
  source 1..20: mol_type = other RNA
tccgcctctcctctcacctc

SEQ ID NO: 10772 - RNA, 20 nt, synthetic construct
  source 1..20: mol_type = other RNA
tcctctcacctctgagtctg

SEQ ID NO: 10773 - RNA, 20 nt, synthetic construct
  source 1..20: mol_type = other RNA
tcctctgctgcctgaagtag

SEQ ID NO: 10774 - RNA, 20 nt, synthetic construct
  source 1..20: mol_type = other RNA
tccttcagggacttggcttt

SEQ ID NO: 10775 - RNA, 20 nt, synthetic construct
  source 1..20: mol_type = other RNA
tcgagcctttcaaagccaag

SEQ ID NO: 10776 - RNA, 20 nt, synthetic construct
  source 1..20: mol_type = other RNA
tcgatggtgaacttctcctc

SEQ ID NO: 10777 - RNA, 20 nt, synthetic construct
  source 1..20: mol_type = other RNA
tcgctcaaggcagccctgtg

SEQ ID NO: 10778 - RNA, 20 nt, synthetic construct
  source 1..20: mol_type = other RNA
tctagcctggtcaccgtgcc

SEQ ID NO: 10779 - RNA, 20 nt, synthetic construct
  source 1..20: mol_type = other RNA
tctcacctctgagtctgcac

SEQ ID NO: 10780 - RNA, 20 nt, synthetic construct
  source 1..20: mol_type = other RNA
tctccccatgctgctgcagg

SEQ ID NO: 10781 - RNA, 20 nt, synthetic construct
  source 1..20: mol_type = other RNA
tctcctctcacctctgagtc

SEQ ID NO: 10782 - RNA, 20 nt, synthetic construct
  source 1..20: mol_type = other RNA
tctcctctgctgcctgaagt

SEQ ID NO: 10783 - RNA, 20 nt, synthetic construct
  source 1..20: mol_type = other RNA
tctgaggccctccctccaca

SEQ ID NO: 10784 - RNA, 20 nt, synthetic construct
  source 1..20: mol_type = other RNA
tctgagtctgcacaagcttt

SEQ ID NO: 10785 - RNA, 20 nt, synthetic construct
  source 1..20: mol_type = other RNA
tctgcacaagctttcccagg

SEQ ID NO: 10786 - RNA, 20 nt, synthetic construct
  source 1..20: mol_type = other RNA
tctgctgcctgaagtagctt

SEQ ID NO: 10787 - RNA, 20 nt, synthetic construct
  source 1..20: mol_type = other RNA
tcttccacatccttcaggga

SEQ ID NO: 10788 - RNA, 20 nt, synthetic construct
  source 1..20: mol_type = other RNA
tgaaaggctcgatggtgaac

SEQ ID NO: 10789 - RNA, 20 nt, synthetic construct
  source 1..20: mol_type = other RNA
tgaaccacctcccatccgcc

SEQ ID NO: 10790 - RNA, 20 nt, synthetic construct
  source 1..20: mol_type = other RNA
tgaacttctcctctgctgcc

SEQ ID NO: 10791 - RNA, 20 nt, synthetic construct
  source 1..20: mol_type = other RNA
tgaaggatgtggaagacctg

SEQ ID NO: 10792 - RNA, 20 nt, synthetic construct
  source 1..20: mol_type = other RNA
tgaagtagcttggtctcccc

SEQ ID NO: 10793 - RNA, 20 nt, synthetic construct
  source 1..20: mol_type = other RNA
tgagaggagaggcggatggg

SEQ ID NO: 10794 - RNA, 20 nt, synthetic construct
  source 1..20: mol_type = other RNA
tgagcgacacggtggcgctg

SEQ ID NO: 10795 - RNA, 20 nt, synthetic construct
  source 1..20: mol_type = other RNA
tgaggccctccctccacagg

SEQ ID NO: 10796 - RNA, 20 nt, synthetic construct
  source 1..20: mol_type = other RNA
tgagtctgcacaagctttcc

SEQ ID NO: 10797 - RNA, 20 nt, synthetic construct
  source 1..20: mol_type = other RNA
tgcacaagctttcccaggtc

SEQ ID NO: 10798 - RNA, 20 nt, synthetic construct
  source 1..20: mol_type = other RNA
tgcagactcagaggtgagag

SEQ ID NO: 10799 - RNA, 20 nt, synthetic construct
  source 1..20: mol_type = other RNA
tgcagcagcatggggagacc

SEQ ID NO: 10800 - RNA, 20 nt, synthetic construct
  source 1..20: mol_type = other RNA
tgcagggactcccacagcgc

SEQ ID NO: 10801 - RNA, 20 nt, synthetic construct
  source 1..20: mol_type = other RNA
tgcatggcgtgaaccacctc

SEQ ID NO: 10802 - RNA, 20 nt, synthetic construct
  source 1..20: mol_type = other RNA
tgcctgaagtagcttggtct

SEQ ID NO: 10803 - RNA, 20 nt, synthetic construct
  source 1..20: mol_type = other RNA
tgcctgggtctgaggccctc

SEQ ID NO: 10804 - RNA, 20 nt, synthetic construct
  source 1..20: mol_type = other RNA
tgccttgagcgacacggtgg

SEQ ID NO: 10805 - RNA, 20 nt, synthetic construct
  source 1..20: mol_type = other RNA
tgctgcagggactcccacag

SEQ ID NO: 10806 - RNA, 20 nt, synthetic construct
  source 1..20: mol_type = other RNA
tgctgcctgaagtagcttgg

SEQ ID NO: 10807 - RNA, 20 nt, synthetic construct
  source 1..20: mol_type = other RNA
tgctgctgcagggactccca

SEQ ID NO: 10808 - RNA, 20 nt, synthetic construct
  source 1..20: mol_type = other RNA
tggaagacctgggaaagctt

SEQ ID NO: 10809 - RNA, 20 nt, synthetic construct
  source 1..20: mol_type = other RNA
tggagggagggcctcagacc

SEQ ID NO: 10810 - RNA, 20 nt, synthetic construct
  source 1..20: mol_type = other RNA
tggcgctgtgggagtccctg

SEQ ID NO: 10811 - RNA, 20 nt, synthetic construct
  source 1..20: mol_type = other RNA
tggcgtgaaccacctcccat

SEQ ID NO: 10812 - RNA, 20 nt, synthetic construct
  source 1..20: mol_type = other RNA
tggctttgaaaggctcgatg

SEQ ID NO: 10813 - RNA, 20 nt, synthetic construct
  source 1..20: mol_type = other RNA
tgggaaagcttgtgcagact

SEQ ID NO: 10814 - RNA, 20 nt, synthetic construct
  source 1..20: mol_type = other RNA
tgggaggtggttcacgccat

SEQ ID NO: 10815 - RNA, 20 nt, synthetic construct
  source 1..20: mol_type = other RNA
tgggagtccctgcagcagca

SEQ ID NO: 10816 - RNA, 20 nt, synthetic construct
  source 1..20: mol_type = other RNA
tggggagaccaagctacttc

SEQ ID NO: 10817 - RNA, 20 nt, synthetic construct
  source 1..20: mol_type = other RNA
tgggtctgaggccctccctc

SEQ ID NO: 10818 - RNA, 20 nt, synthetic construct
  source 1..20: mol_type = other RNA
tggtcaccgtgcctgggtct

SEQ ID NO: 10819 - RNA, 20 nt, synthetic construct
  source 1..20: mol_type = other RNA
tggtctccccatgctgctgc

SEQ ID NO: 10820 - RNA, 20 nt, synthetic construct
  source 1..20: mol_type = other RNA
tggtgaacttctcctctgct

SEQ ID NO: 10821 - RNA, 20 nt, synthetic construct
  source 1..20: mol_type = other RNA
tgtcgctcaaggcagccctg

SEQ ID NO: 10822 - RNA, 20 nt, synthetic construct
  source 1..20: mol_type = other RNA
tgtgcagactcagaggtgag

SEQ ID NO: 10823 - RNA, 20 nt, synthetic construct
  source 1..20: mol_type = other RNA
tgtggaagacctgggaaagc

SEQ ID NO: 10824 - RNA, 20 nt, synthetic construct
  source 1..20: mol_type = other RNA
tgtggagggagggcctcaga

SEQ ID NO: 10825 - RNA, 20 nt, synthetic construct
  source 1..20: mol_type = other RNA
tgtgggagtccctgcagcag

SEQ ID NO: 10826 - RNA, 20 nt, synthetic construct
  source 1..20: mol_type = other RNA
ttcaaagccaagtccctgaa

SEQ ID NO: 10827 - RNA, 20 nt, synthetic construct
  source 1..20: mol_type = other RNA
ttcaccatcgagcctttcaa

SEQ ID NO: 10828 - RNA, 20 nt, synthetic construct
  source 1..20: mol_type = other RNA
ttcaggcagcagaggagaag

SEQ ID NO: 10829 - RNA, 20 nt, synthetic construct
  source 1..20: mol_type = other RNA
ttcagggacttggctttgaa

SEQ ID NO: 10830 - RNA, 20 nt, synthetic construct
  source 1..20: mol_type = other RNA
ttccacatccttcagggact

SEQ ID NO: 10831 - RNA, 20 nt, synthetic construct
  source 1..20: mol_type = other RNA
ttcccaggtcttccacatcc

SEQ ID NO: 10832 - RNA, 20 nt, synthetic construct
  source 1..20: mol_type = other RNA
ttctcctctgctgcctgaag

SEQ ID NO: 10833 - RNA, 20 nt, synthetic construct
  source 1..20: mol_type = other RNA
ttgaaaggctcgatggtgaa

SEQ ID NO: 10834 - RNA, 20 nt, synthetic construct
  source 1..20: mol_type = other RNA
ttgagcgacacggtggcgct

SEQ ID NO: 10835 - RNA, 20 nt, synthetic construct
  source 1..20: mol_type = other RNA
ttggctttgaaaggctcgat

SEQ ID NO: 10836 - RNA, 20 nt, synthetic construct
  source 1..20: mol_type = other RNA
ttggtctccccatgctgctg

SEQ ID NO: 10837 - RNA, 20 nt, synthetic construct
  source 1..20: mol_type = other RNA
ttgtgcagactcagaggtga

SEQ ID NO: 10838 - RNA, 20 nt, synthetic construct
  source 1..20: mol_type = other RNA
tttcaaagccaagtccctga

SEQ ID NO: 10839 - RNA, 20 nt, synthetic construct
  source 1..20: mol_type = other RNA
tttcccaggtcttccacatc

SEQ ID NO: 10840 - RNA, 20 nt, synthetic construct
  source 1..20: mol_type = other RNA
tttgaaaggctcgatggtga

SEQ ID NO: 10841 - RNA, 21 nt, synthetic construct
  source 1..21: mol_type = other RNA
aaagccaagtccctgaaggat

SEQ ID NO: 10842 - RNA, 21 nt, synthetic construct
  source 1..21: mol_type = other RNA
aaagcttgtgcagactcagag

SEQ ID NO: 10843 - RNA, 21 nt, synthetic construct
  source 1..21: mol_type = other RNA
aaaggctcgatggtgaacttc

SEQ ID NO: 10844 - RNA, 21 nt, synthetic construct
  source 1..21: mol_type = other RNA
aaccacctcccatccgcctct

SEQ ID NO: 10845 - RNA, 21 nt, synthetic construct
  source 1..21: mol_type = other RNA
aacctgcatggcgtgaaccac

SEQ ID NO: 10846 - RNA, 21 nt, synthetic construct
  source 1..21: mol_type = other RNA
aacttctcctctgctgcctga

SEQ ID NO: 10847 - RNA, 21 nt, synthetic construct
  source 1..21: mol_type = other RNA
aagacctgggaaagcttgtgc

SEQ ID NO: 10848 - RNA, 21 nt, synthetic construct
  source 1..21: mol_type = other RNA
aagccaagtccctgaaggatg

SEQ ID NO: 10849 - RNA, 21 nt, synthetic construct
  source 1..21: mol_type = other RNA
aagctacttcaggcagcagag

SEQ ID NO: 10850 - RNA, 21 nt, synthetic construct
  source 1..21: mol_type = other RNA
aagcttgtgcagactcagagg

SEQ ID NO: 10851 - RNA, 21 nt, synthetic construct
  source 1..21: mol_type = other RNA
aagctttcccaggtcttccac

SEQ ID NO: 10852 - RNA, 21 nt, synthetic construct
  source 1..21: mol_type = other RNA
aaggatgtggaagacctggga

SEQ ID NO: 10853 - RNA, 21 nt, synthetic construct
  source 1..21: mol_type = other RNA
aaggcagccctgtggagggag

SEQ ID NO: 10854 - RNA, 21 nt, synthetic construct
  source 1..21: mol_type = other RNA
aaggctcgatggtgaacttct

SEQ ID NO: 10855 - RNA, 21 nt, synthetic construct
  source 1..21: mol_type = other RNA
aagtagcttggtctccccatg

SEQ ID NO: 10856 - RNA, 21 nt, synthetic construct
  source 1..21: mol_type = other RNA
aagtccctgaaggatgtggaa

SEQ ID NO: 10857 - RNA, 21 nt, synthetic construct
  source 1..21: mol_type = other RNA
aagttcaccatcgagcctttc

SEQ ID NO: 10858 - RNA, 21 nt, synthetic construct
  source 1..21: mol_type = other RNA
acaagctttcccaggtcttcc

SEQ ID NO: 10859 - RNA, 21 nt, synthetic construct
  source 1..21: mol_type = other RNA
acacggtggcgctgtgggagt

SEQ ID NO: 10860 - RNA, 21 nt, synthetic construct
  source 1..21: mol_type = other RNA
acagcgccaccgtgtcgctca

SEQ ID NO: 10861 - RNA, 21 nt, synthetic construct
  source 1..21: mol_type = other RNA
acagggctgccttgagcgaca

SEQ ID NO: 10862 - RNA, 21 nt, synthetic construct
  source 1..21: mol_type = other RNA
acatccttcagggacttggct

SEQ ID NO: 10863 - RNA, 21 nt, synthetic construct
  source 1..21: mol_type = other RNA
accaagctacttcaggcagca

SEQ ID NO: 10864 - RNA, 21 nt, synthetic construct
  source 1..21: mol_type = other RNA
accacctcccatccgcctctc

SEQ ID NO: 10865 - RNA, 21 nt, synthetic construct
  source 1..21: mol_type = other RNA
accatcgagcctttcaaagcc

SEQ ID NO: 10866 - RNA, 21 nt, synthetic construct
  source 1..21: mol_type = other RNA
accgtgcctgggtctgaggcc

SEQ ID NO: 10867 - RNA, 21 nt, synthetic construct
  source 1..21: mol_type = other RNA
accgtgtcgctcaaggcagcc

SEQ ID NO: 10868 - RNA, 21 nt, synthetic construct
  source 1..21: mol_type = other RNA
acctcccatccgcctctcctc

SEQ ID NO: 10869 - RNA, 21 nt, synthetic construct
  source 1..21: mol_type = other RNA
acctctgagtctgcacaagct

SEQ ID NO: 10870 - RNA, 21 nt, synthetic construct
  source 1..21: mol_type = other RNA
acctgcatggcgtgaaccacc

SEQ ID NO: 10871 - RNA, 21 nt, synthetic construct
  source 1..21: mol_type = other RNA
acctgggaaagcttgtgcaga

SEQ ID NO: 10872 - RNA, 21 nt, synthetic construct
  source 1..21: mol_type = other RNA
acggtggcgctgtgggagtcc

SEQ ID NO: 10873 - RNA, 21 nt, synthetic construct
  source 1..21: mol_type = other RNA
actcagaggtgagaggagagg

SEQ ID NO: 10874 - RNA, 21 nt, synthetic construct
  source 1..21: mol_type = other RNA
actcccacagcgccaccgtgt

SEQ ID NO: 10875 - RNA, 21 nt, synthetic construct
  source 1..21: mol_type = other RNA
acttcaggcagcagaggagaa

SEQ ID NO: 10876 - RNA, 21 nt, synthetic construct
  source 1..21: mol_type = other RNA
acttctcctctgctgcctgaa

SEQ ID NO: 10877 - RNA, 21 nt, synthetic construct
  source 1..21: mol_type = other RNA
acttggctttgaaaggctcga

SEQ ID NO: 10878 - RNA, 21 nt, synthetic construct
  source 1..21: mol_type = other RNA
agaagttcaccatcgagcctt

SEQ ID NO: 10879 - RNA, 21 nt, synthetic construct
  source 1..21: mol_type = other RNA
agaccaagctacttcaggcag

SEQ ID NO: 10880 - RNA, 21 nt, synthetic construct
  source 1..21: mol_type = other RNA
agacctgggaaagcttgtgca

SEQ ID NO: 10881 - RNA, 21 nt, synthetic construct
  source 1..21: mol_type = other RNA
agactcagaggtgagaggaga

SEQ ID NO: 10882 - RNA, 21 nt, synthetic construct
  source 1..21: mol_type = other RNA
agaggagaagttcaccatcga

SEQ ID NO: 10883 - RNA, 21 nt, synthetic construct
  source 1..21: mol_type = other RNA
agaggagaggcggatgggagg

SEQ ID NO: 10884 - RNA, 21 nt, synthetic construct
  source 1..21: mol_type = other RNA
agaggcggatgggaggtggtt

SEQ ID NO: 10885 - RNA, 21 nt, synthetic construct
  source 1..21: mol_type = other RNA
agaggtgagaggagaggcgga

SEQ ID NO: 10886 - RNA, 21 nt, synthetic construct
  source 1..21: mol_type = other RNA
agcagaggagaagttcaccat

SEQ ID NO: 10887 - RNA, 21 nt, synthetic construct
  source 1..21: mol_type = other RNA
agcagcatggggagaccaagc

SEQ ID NO: 10888 - RNA, 21 nt, synthetic construct
  source 1..21: mol_type = other RNA
agcatggggagaccaagctac

SEQ ID NO: 10889 - RNA, 21 nt, synthetic construct
  source 1..21: mol_type = other RNA
agccaagtccctgaaggatgt

SEQ ID NO: 10890 - RNA, 21 nt, synthetic construct
  source 1..21: mol_type = other RNA
agccctgtggagggagggcct

SEQ ID NO: 10891 - RNA, 21 nt, synthetic construct
  source 1..21: mol_type = other RNA
agcctggtcaccgtgcctggg

SEQ ID NO: 10892 - RNA, 21 nt, synthetic construct
  source 1..21: mol_type = other RNA
agcctttcaaagccaagtccc

SEQ ID NO: 10893 - RNA, 21 nt, synthetic construct
  source 1..21: mol_type = other RNA
agcgacacggtggcgctgtgg

SEQ ID NO: 10894 - RNA, 21 nt, synthetic construct
  source 1..21: mol_type = other RNA
agcgccaccgtgtcgctcaag

SEQ ID NO: 10895 - RNA, 21 nt, synthetic construct
  source 1..21: mol_type = other RNA
agctacttcaggcagcagagg

SEQ ID NO: 10896 - RNA, 21 nt, synthetic construct
  source 1..21: mol_type = other RNA
agcttggtctccccatgctgc

SEQ ID NO: 10897 - RNA, 21 nt, synthetic construct
  source 1..21: mol_type = other RNA
agcttgtgcagactcagaggt

SEQ ID NO: 10898 - RNA, 21 nt, synthetic construct
  source 1..21: mol_type = other RNA
agctttcccaggtcttccaca

SEQ ID NO: 10899 - RNA, 21 nt, synthetic construct
  source 1..21: mol_type = other RNA
aggagaagttcaccatcgagc

SEQ ID NO: 10900 - RNA, 21 nt, synthetic construct
  source 1..21: mol_type = other RNA
aggagaggcggatgggaggtg

SEQ ID NO: 10901 - RNA, 21 nt, synthetic construct
  source 1..21: mol_type = other RNA
aggatgtggaagacctgggaa

SEQ ID NO: 10902 - RNA, 21 nt, synthetic construct
  source 1..21: mol_type = other RNA
aggcagcagaggagaagttca

SEQ ID NO: 10903 - RNA, 21 nt, synthetic construct
  source 1..21: mol_type = other RNA
aggcagccctgtggagggagg

SEQ ID NO: 10904 - RNA, 21 nt, synthetic construct
  source 1..21: mol_type = other RNA
aggccctccctccacagggct

SEQ ID NO: 10905 - RNA, 21 nt, synthetic construct
  source 1..21: mol_type = other RNA
aggcggatgggaggtggttca

SEQ ID NO: 10906 - RNA, 21 nt, synthetic construct
  source 1..21: mol_type = other RNA
aggctcgatggtgaacttctc

SEQ ID NO: 10907 - RNA, 21 nt, synthetic construct
  source 1..21: mol_type = other RNA
agggactcccacagcgccacc

SEQ ID NO: 10908 - RNA, 21 nt, synthetic construct
  source 1..21: mol_type = other RNA
agggacttggctttgaaaggc

SEQ ID NO: 10909 - RNA, 21 nt, synthetic construct
  source 1..21: mol_type = other RNA
agggagggcctcagacccagg

SEQ ID NO: 10910 - RNA, 21 nt, synthetic construct
  source 1..21: mol_type = other RNA
agggcctcagacccaggcacg

SEQ ID NO: 10911 - RNA, 21 nt, synthetic construct
  source 1..21: mol_type = other RNA
agggctgccttgagcgacacg

SEQ ID NO: 10912 - RNA, 21 nt, synthetic construct
  source 1..21: mol_type = other RNA
aggtcttccacatccttcagg

SEQ ID NO: 10913 - RNA, 21 nt, synthetic construct
  source 1..21: mol_type = other RNA
aggtgagaggagaggcggatg

SEQ ID NO: 10914 - RNA, 21 nt, synthetic construct
  source 1..21: mol_type = other RNA
agtagcttggtctccccatgc

SEQ ID NO: 10915 - RNA, 21 nt, synthetic construct
  source 1..21: mol_type = other RNA
agtccctgaaggatgtggaag

SEQ ID NO: 10916 - RNA, 21 nt, synthetic construct
  source 1..21: mol_type = other RNA
agtccctgcagcagcatgggg

SEQ ID NO: 10917 - RNA, 21 nt, synthetic construct
  source 1..21: mol_type = other RNA
agtctgcacaagctttcccag

SEQ ID NO: 10918 - RNA, 21 nt, synthetic construct
  source 1..21: mol_type = other RNA
agttcaccatcgagcctttca

SEQ ID NO: 10919 - RNA, 21 nt, synthetic construct
  source 1..21: mol_type = other RNA
atccgcctctcctctcacctc

SEQ ID NO: 10920 - RNA, 21 nt, synthetic construct
  source 1..21: mol_type = other RNA
atccttcagggacttggcttt

SEQ ID NO: 10921 - RNA, 21 nt, synthetic construct
  source 1..21: mol_type = other RNA
atcgagcctttcaaagccaag

SEQ ID NO: 10922 - RNA, 21 nt, synthetic construct
  source 1..21: mol_type = other RNA
atgctgctgcagggactccca

SEQ ID NO: 10923 - RNA, 21 nt, synthetic construct
  source 1..21: mol_type = other RNA
atggcgtgaaccacctcccat

SEQ ID NO: 10924 - RNA, 21 nt, synthetic construct
  source 1..21: mol_type = other RNA
atgggaggtggttcacgccat

SEQ ID NO: 10925 - RNA, 21 nt, synthetic construct
  source 1..21: mol_type = other RNA
atggggagaccaagctacttc

SEQ ID NO: 10926 - RNA, 21 nt, synthetic construct
  source 1..21: mol_type = other RNA
atggtgaacttctcctctgct

SEQ ID NO: 10927 - RNA, 21 nt, synthetic construct
  source 1..21: mol_type = other RNA
atgtggaagacctgggaaagc

SEQ ID NO: 10928 - RNA, 21 nt, synthetic construct
  source 1..21: mol_type = other RNA
caaagccaagtccctgaagga

SEQ ID NO: 10929 - RNA, 21 nt, synthetic construct
  source 1..21: mol_type = other RNA
caacctgcatggcgtgaacca

SEQ ID NO: 10930 - RNA, 21 nt, synthetic construct
  source 1..21: mol_type = other RNA
caagctacttcaggcagcaga

SEQ ID NO: 10931 - RNA, 21 nt, synthetic construct
  source 1..21: mol_type = other RNA
caagctttcccaggtcttcca

SEQ ID NO: 10932 - RNA, 21 nt, synthetic construct
  source 1..21: mol_type = other RNA
caaggcagccctgtggaggga

SEQ ID NO: 10933 - RNA, 21 nt, synthetic construct
  source 1..21: mol_type = other RNA
caagtccctgaaggatgtgga

SEQ ID NO: 10934 - RNA, 21 nt, synthetic construct
  source 1..21: mol_type = other RNA
cacaagctttcccaggtcttc

SEQ ID NO: 10935 - RNA, 21 nt, synthetic construct
  source 1..21: mol_type = other RNA
cacagcgccaccgtgtcgctc

SEQ ID NO: 10936 - RNA, 21 nt, synthetic construct
  source 1..21: mol_type = other RNA
cacagggctgccttgagcgac

SEQ ID NO: 10937 - RNA, 21 nt, synthetic construct
  source 1..21: mol_type = other RNA
cacatccttcagggacttggc

SEQ ID NO: 10938 - RNA, 21 nt, synthetic construct
  source 1..21: mol_type = other RNA
caccatcgagcctttcaaagc

SEQ ID NO: 10939 - RNA, 21 nt, synthetic construct
  source 1..21: mol_type = other RNA
caccgtgcctgggtctgaggc

SEQ ID NO: 10940 - RNA, 21 nt, synthetic construct
  source 1..21: mol_type = other RNA
caccgtgtcgctcaaggcagc

SEQ ID NO: 10941 - RNA, 21 nt, synthetic construct
  source 1..21: mol_type = other RNA
cacctcccatccgcctctcct

SEQ ID NO: 10942 - RNA, 21 nt, synthetic construct
  source 1..21: mol_type = other RNA
cacctctgagtctgcacaagc

SEQ ID NO: 10943 - RNA, 21 nt, synthetic construct
  source 1..21: mol_type = other RNA
cacggtggcgctgtgggagtc

SEQ ID NO: 10944 - RNA, 21 nt, synthetic construct
  source 1..21: mol_type = other RNA
cagacccaggcacggtgacca

SEQ ID NO: 10945 - RNA, 21 nt, synthetic construct
  source 1..21: mol_type = other RNA
cagactcagaggtgagaggag

SEQ ID NO: 10946 - RNA, 21 nt, synthetic construct
  source 1..21: mol_type = other RNA
cagaggagaagttcaccatcg

SEQ ID NO: 10947 - RNA, 21 nt, synthetic construct
  source 1..21: mol_type = other RNA
cagaggtgagaggagaggcgg

SEQ ID NO: 10948 - RNA, 21 nt, synthetic construct
  source 1..21: mol_type = other RNA
cagcagaggagaagttcacca

SEQ ID NO: 10949 - RNA, 21 nt, synthetic construct
  source 1..21: mol_type = other RNA
cagcagcatggggagaccaag

SEQ ID NO: 10950 - RNA, 21 nt, synthetic construct
  source 1..21: mol_type = other RNA
cagcatggggagaccaagcta

SEQ ID NO: 10951 - RNA, 21 nt, synthetic construct
  source 1..21: mol_type = other RNA
cagccctgtggagggagggcc

SEQ ID NO: 10952 - RNA, 21 nt, synthetic construct
  source 1..21: mol_type = other RNA
cagcgccaccgtgtcgctcaa

SEQ ID NO: 10953 - RNA, 21 nt, synthetic construct
  source 1..21: mol_type = other RNA
caggcagcagaggagaagttc

SEQ ID NO: 10954 - RNA, 21 nt, synthetic construct
  source 1..21: mol_type = other RNA
cagggactcccacagcgccac

SEQ ID NO: 10955 - RNA, 21 nt, synthetic construct
  source 1..21: mol_type = other RNA
cagggacttggctttgaaagg

SEQ ID NO: 10956 - RNA, 21 nt, synthetic construct
  source 1..21: mol_type = other RNA
cagggctgccttgagcgacac

SEQ ID NO: 10957 - RNA, 21 nt, synthetic construct
  source 1..21: mol_type = other RNA
caggtcttccacatccttcag

SEQ ID NO: 10958 - RNA, 21 nt, synthetic construct
  source 1..21: mol_type = other RNA
catccgcctctcctctcacct

SEQ ID NO: 10959 - RNA, 21 nt, synthetic construct
  source 1..21: mol_type = other RNA
catccttcagggacttggctt

SEQ ID NO: 10960 - RNA, 21 nt, synthetic construct
  source 1..21: mol_type = other RNA
catcgagcctttcaaagccaa

SEQ ID NO: 10961 - RNA, 21 nt, synthetic construct
  source 1..21: mol_type = other RNA
catgctgctgcagggactccc

SEQ ID NO: 10962 - RNA, 21 nt, synthetic construct
  source 1..21: mol_type = other RNA
catggcgtgaaccacctccca

SEQ ID NO: 10963 - RNA, 21 nt, synthetic construct
  source 1..21: mol_type = other RNA
catggggagaccaagctactt

SEQ ID NO: 10964 - RNA, 21 nt, synthetic construct
  source 1..21: mol_type = other RNA
ccaagctacttcaggcagcag

SEQ ID NO: 10965 - RNA, 21 nt, synthetic construct
  source 1..21: mol_type = other RNA
ccaagtccctgaaggatgtgg

SEQ ID NO: 10966 - RNA, 21 nt, synthetic construct
  source 1..21: mol_type = other RNA
ccacagcgccaccgtgtcgct

SEQ ID NO: 10967 - RNA, 21 nt, synthetic construct
  source 1..21: mol_type = other RNA
ccacagggctgccttgagcga

SEQ ID NO: 10968 - RNA, 21 nt, synthetic construct
  source 1..21: mol_type = other RNA
ccacatccttcagggacttgg

SEQ ID NO: 10969 - RNA, 21 nt, synthetic construct
  source 1..21: mol_type = other RNA
ccaccgtgtcgctcaaggcag

SEQ ID NO: 10970 - RNA, 21 nt, synthetic construct
  source 1..21: mol_type = other RNA
ccacctcccatccgcctctcc

SEQ ID NO: 10971 - RNA, 21 nt, synthetic construct
  source 1..21: mol_type = other RNA
ccaggtcttccacatccttca

SEQ ID NO: 10972 - RNA, 21 nt, synthetic construct
  source 1..21: mol_type = other RNA
ccatccgcctctcctctcacc

SEQ ID NO: 10973 - RNA, 21 nt, synthetic construct
  source 1..21: mol_type = other RNA
ccatcgagcctttcaaagcca

SEQ ID NO: 10974 - RNA, 21 nt, synthetic construct
  source 1..21: mol_type = other RNA
ccatgctgctgcagggactcc

SEQ ID NO: 10975 - RNA, 21 nt, synthetic construct
  source 1..21: mol_type = other RNA
cccacagcgccaccgtgtcgc

SEQ ID NO: 10976 - RNA, 21 nt, synthetic construct
  source 1..21: mol_type = other RNA
cccaggtcttccacatccttc

SEQ ID NO: 10977 - RNA, 21 nt, synthetic construct
  source 1..21: mol_type = other RNA
cccatccgcctctcctctcac

SEQ ID NO: 10978 - RNA, 21 nt, synthetic construct
  source 1..21: mol_type = other RNA
cccatgctgctgcagggactc

SEQ ID NO: 10979 - RNA, 21 nt, synthetic construct
  source 1..21: mol_type = other RNA
ccccatgctgctgcagggact

SEQ ID NO: 10980 - RNA, 21 nt, synthetic construct
  source 1..21: mol_type = other RNA
ccctccacagggctgccttga

SEQ ID NO: 10981 - RNA, 21 nt, synthetic construct
  source 1..21: mol_type = other RNA
ccctccctccacagggctgcc

SEQ ID NO: 10982 - RNA, 21 nt, synthetic construct
  source 1..21: mol_type = other RNA
ccctgaaggatgtggaagacc

SEQ ID NO: 10983 - RNA, 21 nt, synthetic construct
  source 1..21: mol_type = other RNA
ccctgcagcagcatggggaga

SEQ ID NO: 10984 - RNA, 21 nt, synthetic construct
  source 1..21: mol_type = other RNA
ccctgtggagggagggcctca

SEQ ID NO: 10985 - RNA, 21 nt, synthetic construct
  source 1..21: mol_type = other RNA
ccgcctctcctctcacctctg

SEQ ID NO: 10986 - RNA, 21 nt, synthetic construct
  source 1..21: mol_type = other RNA
ccgtgcctgggtctgaggccc

SEQ ID NO: 10987 - RNA, 21 nt, synthetic construct
  source 1..21: mol_type = other RNA
ccgtgtcgctcaaggcagccc

SEQ ID NO: 10988 - RNA, 21 nt, synthetic construct
  source 1..21: mol_type = other RNA
cctcagacccaggcacggtga

SEQ ID NO: 10989 - RNA, 21 nt, synthetic construct
  source 1..21: mol_type = other RNA
cctccacagggctgccttgag

SEQ ID NO: 10990 - RNA, 21 nt, synthetic construct
  source 1..21: mol_type = other RNA
cctcccatccgcctctcctct

SEQ ID NO: 10991 - RNA, 21 nt, synthetic construct
  source 1..21: mol_type = other RNA
cctccctccacagggctgcct

SEQ ID NO: 10992 - RNA, 21 nt, synthetic construct
  source 1..21: mol_type = other RNA
cctctcacctctgagtctgca

SEQ ID NO: 10993 - RNA, 21 nt, synthetic construct
  source 1..21: mol_type = other RNA
cctctcctctcacctctgagt

SEQ ID NO: 10994 - RNA, 21 nt, synthetic construct
  source 1..21: mol_type = other RNA
cctctgagtctgcacaagctt

SEQ ID NO: 10995 - RNA, 21 nt, synthetic construct
  source 1..21: mol_type = other RNA
cctctgctgcctgaagtagct

SEQ ID NO: 10996 - RNA, 21 nt, synthetic construct
  source 1..21: mol_type = other RNA
cctgaaggatgtggaagacct

SEQ ID NO: 10997 - RNA, 21 nt, synthetic construct
  source 1..21: mol_type = other RNA
cctgaagtagcttggtctccc

SEQ ID NO: 10998 - RNA, 21 nt, synthetic construct
  source 1..21: mol_type = other RNA
cctgcagcagcatggggagac

SEQ ID NO: 10999 - RNA, 21 nt, synthetic construct
  source 1..21: mol_type = other RNA
cctgcatggcgtgaaccacct

SEQ ID NO: 11000 - RNA, 21 nt, synthetic construct
  source 1..21: mol_type = other RNA
cctgggaaagcttgtgcagac

SEQ ID NO: 11001 - RNA, 21 nt, synthetic construct
  source 1..21: mol_type = other RNA
cctgggtctgaggccctccct

SEQ ID NO: 11002 - RNA, 21 nt, synthetic construct
  source 1..21: mol_type = other RNA
cctggtcaccgtgcctgggtc

SEQ ID NO: 11003 - RNA, 21 nt, synthetic construct
  source 1..21: mol_type = other RNA
cctgtggagggagggcctcag

SEQ ID NO: 11004 - RNA, 21 nt, synthetic construct
  source 1..21: mol_type = other RNA
ccttcagggacttggctttga

SEQ ID NO: 11005 - RNA, 21 nt, synthetic construct
  source 1..21: mol_type = other RNA
ccttgagcgacacggtggcgc

SEQ ID NO: 11006 - RNA, 21 nt, synthetic construct
  source 1..21: mol_type = other RNA
cctttcaaagccaagtccctg

SEQ ID NO: 11007 - RNA, 21 nt, synthetic construct
  source 1..21: mol_type = other RNA
cgacacggtggcgctgtggga

SEQ ID NO: 11008 - RNA, 21 nt, synthetic construct
  source 1..21: mol_type = other RNA
cgagcctttcaaagccaagtc

SEQ ID NO: 11009 - RNA, 21 nt, synthetic construct
  source 1..21: mol_type = other RNA
cgatggtgaacttctcctctg

SEQ ID NO: 11010 - RNA, 21 nt, synthetic construct
  source 1..21: mol_type = other RNA
cgccaccgtgtcgctcaaggc

SEQ ID NO: 11011 - RNA, 21 nt, synthetic construct
  source 1..21: mol_type = other RNA
cgcctctcctctcacctctga

SEQ ID NO: 11012 - RNA, 21 nt, synthetic construct
  source 1..21: mol_type = other RNA
cgctcaaggcagccctgtgga

SEQ ID NO: 11013 - RNA, 21 nt, synthetic construct
  source 1..21: mol_type = other RNA
cgctgtgggagtccctgcagc

SEQ ID NO: 11014 - RNA, 21 nt, synthetic construct
  source 1..21: mol_type = other RNA
cggatgggaggtggttcacgc

SEQ ID NO: 11015 - RNA, 21 nt, synthetic construct
  source 1..21: mol_type = other RNA
cggtggcgctgtgggagtccc

SEQ ID NO: 11016 - RNA, 21 nt, synthetic construct
  source 1..21: mol_type = other RNA
cgtgaaccacctcccatccgc

SEQ ID NO: 11017 - RNA, 21 nt, synthetic construct
  source 1..21: mol_type = other RNA
cgtgcctgggtctgaggccct

SEQ ID NO: 11018 - RNA, 21 nt, synthetic construct
  source 1..21: mol_type = other RNA
cgtgtcgctcaaggcagccct

SEQ ID NO: 11019 - RNA, 21 nt, synthetic construct
  source 1..21: mol_type = other RNA
ctacttcaggcagcagaggag

SEQ ID NO: 11020 - RNA, 21 nt, synthetic construct
  source 1..21: mol_type = other RNA
ctagcctggtcaccgtgcctg

SEQ ID NO: 11021 - RNA, 21 nt, synthetic construct
  source 1..21: mol_type = other RNA
ctcaaggcagccctgtggagg

SEQ ID NO: 11022 - RNA, 21 nt, synthetic construct
  source 1..21: mol_type = other RNA
ctcacctctgagtctgcacaa

SEQ ID NO: 11023 - RNA, 21 nt, synthetic construct
  source 1..21: mol_type = other RNA
ctcagacccaggcacggtgac

SEQ ID NO: 11024 - RNA, 21 nt, synthetic construct
  source 1..21: mol_type = other RNA
ctcagaggtgagaggagaggc

SEQ ID NO: 11025 - RNA, 21 nt, synthetic construct
  source 1..21: mol_type = other RNA
ctccacagggctgccttgagc

SEQ ID NO: 11026 - RNA, 21 nt, synthetic construct
  source 1..21: mol_type = other RNA
ctcccacagcgccaccgtgtc

SEQ ID NO: 11027 - RNA, 21 nt, synthetic construct
  source 1..21: mol_type = other RNA
ctcccatccgcctctcctctc

SEQ ID NO: 11028 - RNA, 21 nt, synthetic construct
  source 1..21: mol_type = other RNA
ctccccatgctgctgcaggga

SEQ ID NO: 11029 - RNA, 21 nt, synthetic construct
  source 1..21: mol_type = other RNA
ctccctccacagggctgcctt

SEQ ID NO: 11030 - RNA, 21 nt, synthetic construct
  source 1..21: mol_type = other RNA
ctcctctcacctctgagtctg

SEQ ID NO: 11031 - RNA, 21 nt, synthetic construct
  source 1..21: mol_type = other RNA
ctcctctgctgcctgaagtag

SEQ ID NO: 11032 - RNA, 21 nt, synthetic construct
  source 1..21: mol_type = other RNA
ctcgatggtgaacttctcctc

SEQ ID NO: 11033 - RNA, 21 nt, synthetic construct
  source 1..21: mol_type = other RNA
ctctcacctctgagtctgcac

SEQ ID NO: 11034 - RNA, 21 nt, synthetic construct
  source 1..21: mol_type = other RNA
ctctcctctcacctctgagtc

SEQ ID NO: 11035 - RNA, 21 nt, synthetic construct
  source 1..21: mol_type = other RNA
ctctgagtctgcacaagcttt

SEQ ID NO: 11036 - RNA, 21 nt, synthetic construct
  source 1..21: mol_type = other RNA
ctctgctgcctgaagtagctt

SEQ ID NO: 11037 - RNA, 21 nt, synthetic construct
  source 1..21: mol_type = other RNA
ctgaaggatgtggaagacctg

SEQ ID NO: 11038 - RNA, 21 nt, synthetic construct
  source 1..21: mol_type = other RNA
ctgaagtagcttggtctcccc

SEQ ID NO: 11039 - RNA, 21 nt, synthetic construct
  source 1..21: mol_type = other RNA
ctgaggccctccctccacagg

SEQ ID NO: 11040 - RNA, 21 nt, synthetic construct
  source 1..21: mol_type = other RNA
ctgagtctgcacaagctttcc

SEQ ID NO: 11041 - RNA, 21 nt, synthetic construct
  source 1..21: mol_type = other RNA
ctgcacaagctttcccaggtc

SEQ ID NO: 11042 - RNA, 21 nt, synthetic construct
  source 1..21: mol_type = other RNA
ctgcagcagcatggggagacc

SEQ ID NO: 11043 - RNA, 21 nt, synthetic construct
  source 1..21: mol_type = other RNA
ctgcagggactcccacagcgc

SEQ ID NO: 11044 - RNA, 21 nt, synthetic construct
  source 1..21: mol_type = other RNA
ctgcatggcgtgaaccacctc

SEQ ID NO: 11045 - RNA, 21 nt, synthetic construct
  source 1..21: mol_type = other RNA
ctgcctgaagtagcttggtct

SEQ ID NO: 11046 - RNA, 21 nt, synthetic construct
  source 1..21: mol_type = other RNA
ctgccttgagcgacacggtgg

SEQ ID NO: 11047 - RNA, 21 nt, synthetic construct
  source 1..21: mol_type = other RNA
ctgctgcagggactcccacag

SEQ ID NO: 11048 - RNA, 21 nt, synthetic construct
  source 1..21: mol_type = other RNA
ctgctgcctgaagtagcttgg

SEQ ID NO: 11049 - RNA, 21 nt, synthetic construct
  source 1..21: mol_type = other RNA
ctgggaaagcttgtgcagact

SEQ ID NO: 11050 - RNA, 21 nt, synthetic construct
  source 1..21: mol_type = other RNA
ctgggtctgaggccctccctc

SEQ ID NO: 11051 - RNA, 21 nt, synthetic construct
  source 1..21: mol_type = other RNA
ctggtcaccgtgcctgggtct

SEQ ID NO: 11052 - RNA, 21 nt, synthetic construct
  source 1..21: mol_type = other RNA
ctgtggagggagggcctcaga

SEQ ID NO: 11053 - RNA, 21 nt, synthetic construct
  source 1..21: mol_type = other RNA
ctgtgggagtccctgcagcag

SEQ ID NO: 11054 - RNA, 21 nt, synthetic construct
  source 1..21: mol_type = other RNA
cttcaggcagcagaggagaag

SEQ ID NO: 11055 - RNA, 21 nt, synthetic construct
  source 1..21: mol_type = other RNA
cttcagggacttggctttgaa

SEQ ID NO: 11056 - RNA, 21 nt, synthetic construct
  source 1..21: mol_type = other RNA
cttccacatccttcagggact

SEQ ID NO: 11057 - RNA, 21 nt, synthetic construct
  source 1..21: mol_type = other RNA
cttctcctctgctgcctgaag

SEQ ID NO: 11058 - RNA, 21 nt, synthetic construct
  source 1..21: mol_type = other RNA
cttgagcgacacggtggcgct

SEQ ID NO: 11059 - RNA, 21 nt, synthetic construct
  source 1..21: mol_type = other RNA
cttggctttgaaaggctcgat

SEQ ID NO: 11060 - RNA, 21 nt, synthetic construct
  source 1..21: mol_type = other RNA
cttggtctccccatgctgctg

SEQ ID NO: 11061 - RNA, 21 nt, synthetic construct
  source 1..21: mol_type = other RNA
cttgtgcagactcagaggtga

SEQ ID NO: 11062 - RNA, 21 nt, synthetic construct
  source 1..21: mol_type = other RNA
ctttcaaagccaagtccctga

SEQ ID NO: 11063 - RNA, 21 nt, synthetic construct
  source 1..21: mol_type = other RNA
ctttcccaggtcttccacatc

SEQ ID NO: 11064 - RNA, 21 nt, synthetic construct
  source 1..21: mol_type = other RNA
ctttgaaaggctcgatggtga

SEQ ID NO: 11065 - RNA, 21 nt, synthetic construct
  source 1..21: mol_type = other RNA
gaaagcttgtgcagactcaga

SEQ ID NO: 11066 - RNA, 21 nt, synthetic construct
  source 1..21: mol_type = other RNA
gaaaggctcgatggtgaactt

SEQ ID NO: 11067 - RNA, 21 nt, synthetic construct
  source 1..21: mol_type = other RNA
gaaccacctcccatccgcctc

SEQ ID NO: 11068 - RNA, 21 nt, synthetic construct
  source 1..21: mol_type = other RNA
gaacttctcctctgctgcctg

SEQ ID NO: 11069 - RNA, 21 nt, synthetic construct
  source 1..21: mol_type = other RNA
gaagacctgggaaagcttgtg

SEQ ID NO: 11070 - RNA, 21 nt, synthetic construct
  source 1..21: mol_type = other RNA
gaaggatgtggaagacctggg

SEQ ID NO: 11071 - RNA, 21 nt, synthetic construct
  source 1..21: mol_type = other RNA
gaagtagcttggtctccccat

SEQ ID NO: 11072 - RNA, 21 nt, synthetic construct
  source 1..21: mol_type = other RNA
gaagttcaccatcgagccttt

SEQ ID NO: 11073 - RNA, 21 nt, synthetic construct
  source 1..21: mol_type = other RNA
gacacggtggcgctgtgggag

SEQ ID NO: 11074 - RNA, 21 nt, synthetic construct
  source 1..21: mol_type = other RNA
gaccaagctacttcaggcagc

SEQ ID NO: 11075 - RNA, 21 nt, synthetic construct
  source 1..21: mol_type = other RNA
gacctgggaaagcttgtgcag

SEQ ID NO: 11076 - RNA, 21 nt, synthetic construct
  source 1..21: mol_type = other RNA
gactcagaggtgagaggagag

SEQ ID NO: 11077 - RNA, 21 nt, synthetic construct
  source 1..21: mol_type = other RNA
gactcccacagcgccaccgtg

SEQ ID NO: 11078 - RNA, 21 nt, synthetic construct
  source 1..21: mol_type = other RNA
gacttggctttgaaaggctcg

SEQ ID NO: 11079 - RNA, 21 nt, synthetic construct
  source 1..21: mol_type = other RNA
gagaagttcaccatcgagcct

SEQ ID NO: 11080 - RNA, 21 nt, synthetic construct
  source 1..21: mol_type = other RNA
gagaccaagctacttcaggca

SEQ ID NO: 11081 - RNA, 21 nt, synthetic construct
  source 1..21: mol_type = other RNA
gagaggagaggcggatgggag

SEQ ID NO: 11082 - RNA, 21 nt, synthetic construct
  source 1..21: mol_type = other RNA
gagaggcggatgggaggtggt

SEQ ID NO: 11083 - RNA, 21 nt, synthetic construct
  source 1..21: mol_type = other RNA
gagcctttcaaagccaagtcc

SEQ ID NO: 11084 - RNA, 21 nt, synthetic construct
  source 1..21: mol_type = other RNA
gagcgacacggtggcgctgtg

SEQ ID NO: 11085 - RNA, 21 nt, synthetic construct
  source 1..21: mol_type = other RNA
gaggagaagttcaccatcgag

SEQ ID NO: 11086 - RNA, 21 nt, synthetic construct
  source 1..21: mol_type = other RNA
gaggagaggcggatgggaggt

SEQ ID NO: 11087 - RNA, 21 nt, synthetic construct
  source 1..21: mol_type = other RNA
gaggccctccctccacagggc

SEQ ID NO: 11088 - RNA, 21 nt, synthetic construct
  source 1..21: mol_type = other RNA
gaggcggatgggaggtggttc

SEQ ID NO: 11089 - RNA, 21 nt, synthetic construct
  source 1..21: mol_type = other RNA
gagggagggcctcagacccag

SEQ ID NO: 11090 - RNA, 21 nt, synthetic construct
  source 1..21: mol_type = other RNA
gagggcctcagacccaggcac

SEQ ID NO: 11091 - RNA, 21 nt, synthetic construct
  source 1..21: mol_type = other RNA
gaggtgagaggagaggcggat

SEQ ID NO: 11092 - RNA, 21 nt, synthetic construct
  source 1..21: mol_type = other RNA
gagtccctgcagcagcatggg

SEQ ID NO: 11093 - RNA, 21 nt, synthetic construct
  source 1..21: mol_type = other RNA
gagtctgcacaagctttccca

SEQ ID NO: 11094 - RNA, 21 nt, synthetic construct
  source 1..21: mol_type = other RNA
gatgggaggtggttcacgcca

SEQ ID NO: 11095 - RNA, 21 nt, synthetic construct
  source 1..21: mol_type = other RNA
gatggtgaacttctcctctgc

SEQ ID NO: 11096 - RNA, 21 nt, synthetic construct
  source 1..21: mol_type = other RNA
gatgtggaagacctgggaaag

SEQ ID NO: 11097 - RNA, 21 nt, synthetic construct
  source 1..21: mol_type = other RNA
gcacaagctttcccaggtctt

SEQ ID NO: 11098 - RNA, 21 nt, synthetic construct
  source 1..21: mol_type = other RNA
gcagactcagaggtgagagga

SEQ ID NO: 11099 - RNA, 21 nt, synthetic construct
  source 1..21: mol_type = other RNA
gcagaggagaagttcaccatc

SEQ ID NO: 11100 - RNA, 21 nt, synthetic construct
  source 1..21: mol_type = other RNA
gcagcagaggagaagttcacc

SEQ ID NO: 11101 - RNA, 21 nt, synthetic construct
  source 1..21: mol_type = other RNA
gcagcagcatggggagaccaa

SEQ ID NO: 11102 - RNA, 21 nt, synthetic construct
  source 1..21: mol_type = other RNA
gcagcatggggagaccaagct

SEQ ID NO: 11103 - RNA, 21 nt, synthetic construct
  source 1..21: mol_type = other RNA
gcagccctgtggagggagggc

SEQ ID NO: 11104 - RNA, 21 nt, synthetic construct
  source 1..21: mol_type = other RNA
gcagggactcccacagcgcca

SEQ ID NO: 11105 - RNA, 21 nt, synthetic construct
  source 1..21: mol_type = other RNA
gcatggcgtgaaccacctccc

SEQ ID NO: 11106 - RNA, 21 nt, synthetic construct
  source 1..21: mol_type = other RNA
gcatggggagaccaagctact

SEQ ID NO: 11107 - RNA, 21 nt, synthetic construct
  source 1..21: mol_type = other RNA
gccaagtccctgaaggatgtg

SEQ ID NO: 11108 - RNA, 21 nt, synthetic construct
  source 1..21: mol_type = other RNA
gccaccgtgtcgctcaaggca

SEQ ID NO: 11109 - RNA, 21 nt, synthetic construct
  source 1..21: mol_type = other RNA
gccctccctccacagggctgc

SEQ ID NO: 11110 - RNA, 21 nt, synthetic construct
  source 1..21: mol_type = other RNA
gccctgtggagggagggcctc

SEQ ID NO: 11111 - RNA, 21 nt, synthetic construct
  source 1..21: mol_type = other RNA
gcctcagacccaggcacggtg

SEQ ID NO: 11112 - RNA, 21 nt, synthetic construct
  source 1..21: mol_type = other RNA
gcctctcctctcacctctgag

SEQ ID NO: 11113 - RNA, 21 nt, synthetic construct
  source 1..21: mol_type = other RNA
gcctgaagtagcttggtctcc

SEQ ID NO: 11114 - RNA, 21 nt, synthetic construct
  source 1..21: mol_type = other RNA
gcctgggtctgaggccctccc

SEQ ID NO: 11115 - RNA, 21 nt, synthetic construct
  source 1..21: mol_type = other RNA
gcctggtcaccgtgcctgggt

SEQ ID NO: 11116 - RNA, 21 nt, synthetic construct
  source 1..21: mol_type = other RNA
gccttgagcgacacggtggcg

SEQ ID NO: 11117 - RNA, 21 nt, synthetic construct
  source 1..21: mol_type = other RNA
gcctttcaaagccaagtccct

SEQ ID NO: 11118 - RNA, 21 nt, synthetic construct
  source 1..21: mol_type = other RNA
gcgacacggtggcgctgtggg

SEQ ID NO: 11119 - RNA, 21 nt, synthetic construct
  source 1..21: mol_type = other RNA
gcgccaccgtgtcgctcaagg

SEQ ID NO: 11120 - RNA, 21 nt, synthetic construct
  source 1..21: mol_type = other RNA
gcgctgtgggagtccctgcag

SEQ ID NO: 11121 - RNA, 21 nt, synthetic construct
  source 1..21: mol_type = other RNA
gcggatgggaggtggttcacg

SEQ ID NO: 11122 - RNA, 21 nt, synthetic construct
  source 1..21: mol_type = other RNA
gcgtgaaccacctcccatccg

SEQ ID NO: 11123 - RNA, 21 nt, synthetic construct
  source 1..21: mol_type = other RNA
gctacttcaggcagcagagga

SEQ ID NO: 11124 - RNA, 21 nt, synthetic construct
  source 1..21: mol_type = other RNA
gctcaaggcagccctgtggag

SEQ ID NO: 11125 - RNA, 21 nt, synthetic construct
  source 1..21: mol_type = other RNA
gctcgatggtgaacttctcct

SEQ ID NO: 11126 - RNA, 21 nt, synthetic construct
  source 1..21: mol_type = other RNA
gctgcagggactcccacagcg

SEQ ID NO: 11127 - RNA, 21 nt, synthetic construct
  source 1..21: mol_type = other RNA
gctgcctgaagtagcttggtc

SEQ ID NO: 11128 - RNA, 21 nt, synthetic construct
  source 1..21: mol_type = other RNA
gctgccttgagcgacacggtg

SEQ ID NO: 11129 - RNA, 21 nt, synthetic construct
  source 1..21: mol_type = other RNA
gctgctgcagggactcccaca

SEQ ID NO: 11130 - RNA, 21 nt, synthetic construct
  source 1..21: mol_type = other RNA
gctgtgggagtccctgcagca

SEQ ID NO: 11131 - RNA, 21 nt, synthetic construct
  source 1..21: mol_type = other RNA
gcttggtctccccatgctgct

SEQ ID NO: 11132 - RNA, 21 nt, synthetic construct
  source 1..21: mol_type = other RNA
gcttgtgcagactcagaggtg

SEQ ID NO: 11133 - RNA, 21 nt, synthetic construct
  source 1..21: mol_type = other RNA
gctttcccaggtcttccacat

SEQ ID NO: 11134 - RNA, 21 nt, synthetic construct
  source 1..21: mol_type = other RNA
gctttgaaaggctcgatggtg

SEQ ID NO: 11135 - RNA, 21 nt, synthetic construct
  source 1..21: mol_type = other RNA
ggaaagcttgtgcagactcag

SEQ ID NO: 11136 - RNA, 21 nt, synthetic construct
  source 1..21: mol_type = other RNA
ggaagacctgggaaagcttgt

SEQ ID NO: 11137 - RNA, 21 nt, synthetic construct
  source 1..21: mol_type = other RNA
ggactcccacagcgccaccgt

SEQ ID NO: 11138 - RNA, 21 nt, synthetic construct
  source 1..21: mol_type = other RNA
ggacttggctttgaaaggctc

SEQ ID NO: 11139 - RNA, 21 nt, synthetic construct
  source 1..21: mol_type = other RNA
ggagaagttcaccatcgagcc

SEQ ID NO: 11140 - RNA, 21 nt, synthetic construct
  source 1..21: mol_type = other RNA
ggagaccaagctacttcaggc

SEQ ID NO: 11141 - RNA, 21 nt, synthetic construct
  source 1..21: mol_type = other RNA
ggagaggcggatgggaggtgg

SEQ ID NO: 11142 - RNA, 21 nt, synthetic construct
  source 1..21: mol_type = other RNA
ggagggagggcctcagaccca

SEQ ID NO: 11143 - RNA, 21 nt, synthetic construct
  source 1..21: mol_type = other RNA
ggagggcctcagacccaggca

SEQ ID NO: 11144 - RNA, 21 nt, synthetic construct
  source 1..21: mol_type = other RNA
ggagtccctgcagcagcatgg

SEQ ID NO: 11145 - RNA, 21 nt, synthetic construct
  source 1..21: mol_type = other RNA
ggatgggaggtggttcacgcc

SEQ ID NO: 11146 - RNA, 21 nt, synthetic construct
  source 1..21: mol_type = other RNA
ggatgtggaagacctgggaaa

SEQ ID NO: 11147 - RNA, 21 nt, synthetic construct
  source 1..21: mol_type = other RNA
ggcagcagaggagaagttcac

SEQ ID NO: 11148 - RNA, 21 nt, synthetic construct
  source 1..21: mol_type = other RNA
ggcagccctgtggagggaggg

SEQ ID NO: 11149 - RNA, 21 nt, synthetic construct
  source 1..21: mol_type = other RNA
ggccctccctccacagggctg

SEQ ID NO: 11150 - RNA, 21 nt, synthetic construct
  source 1..21: mol_type = other RNA
ggcctcagacccaggcacggt

SEQ ID NO: 11151 - RNA, 21 nt, synthetic construct
  source 1..21: mol_type = other RNA
ggcgctgtgggagtccctgca

SEQ ID NO: 11152 - RNA, 21 nt, synthetic construct
  source 1..21: mol_type = other RNA
ggcggatgggaggtggttcac

SEQ ID NO: 11153 - RNA, 21 nt, synthetic construct
  source 1..21: mol_type = other RNA
ggcgtgaaccacctcccatcc

SEQ ID NO: 11154 - RNA, 21 nt, synthetic construct
  source 1..21: mol_type = other RNA
ggctcgatggtgaacttctcc

SEQ ID NO: 11155 - RNA, 21 nt, synthetic construct
  source 1..21: mol_type = other RNA
ggctgccttgagcgacacggt

SEQ ID NO: 11156 - RNA, 21 nt, synthetic construct
  source 1..21: mol_type = other RNA
ggctttgaaaggctcgatggt

SEQ ID NO: 11157 - RNA, 21 nt, synthetic construct
  source 1..21: mol_type = other RNA
gggaaagcttgtgcagactca

SEQ ID NO: 11158 - RNA, 21 nt, synthetic construct
  source 1..21: mol_type = other RNA
gggactcccacagcgccaccg

SEQ ID NO: 11159 - RNA, 21 nt, synthetic construct
  source 1..21: mol_type = other RNA
gggacttggctttgaaaggct

SEQ ID NO: 11160 - RNA, 21 nt, synthetic construct
  source 1..21: mol_type = other RNA
gggagaccaagctacttcagg

SEQ ID NO: 11161 - RNA, 21 nt, synthetic construct
  source 1..21: mol_type = other RNA
gggagggcctcagacccaggc

SEQ ID NO: 11162 - RNA, 21 nt, synthetic construct
  source 1..21: mol_type = other RNA
gggagtccctgcagcagcatg

SEQ ID NO: 11163 - RNA, 21 nt, synthetic construct
  source 1..21: mol_type = other RNA
gggcctcagacccaggcacgg

SEQ ID NO: 11164 - RNA, 21 nt, synthetic construct
  source 1..21: mol_type = other RNA
gggctgccttgagcgacacgg

SEQ ID NO: 11165 - RNA, 21 nt, synthetic construct
  source 1..21: mol_type = other RNA
ggggagaccaagctacttcag

SEQ ID NO: 11166 - RNA, 21 nt, synthetic construct
  source 1..21: mol_type = other RNA
gggtctgaggccctccctcca

SEQ ID NO: 11167 - RNA, 21 nt, synthetic construct
  source 1..21: mol_type = other RNA
ggtcaccgtgcctgggtctga

SEQ ID NO: 11168 - RNA, 21 nt, synthetic construct
  source 1..21: mol_type = other RNA
ggtctccccatgctgctgcag

SEQ ID NO: 11169 - RNA, 21 nt, synthetic construct
  source 1..21: mol_type = other RNA
ggtctgaggccctccctccac

SEQ ID NO: 11170 - RNA, 21 nt, synthetic construct
  source 1..21: mol_type = other RNA
ggtcttccacatccttcaggg

SEQ ID NO: 11171 - RNA, 21 nt, synthetic construct
  source 1..21: mol_type = other RNA
ggtgaacttctcctctgctgc

SEQ ID NO: 11172 - RNA, 21 nt, synthetic construct
  source 1..21: mol_type = other RNA
ggtgagaggagaggcggatgg

SEQ ID NO: 11173 - RNA, 21 nt, synthetic construct
  source 1..21: mol_type = other RNA
ggtggcgctgtgggagtccct

SEQ ID NO: 11174 - RNA, 21 nt, synthetic construct
  source 1..21: mol_type = other RNA
gtagcttggtctccccatgct

SEQ ID NO: 11175 - RNA, 21 nt, synthetic construct
  source 1..21: mol_type = other RNA
gtcaccgtgcctgggtctgag

SEQ ID NO: 11176 - RNA, 21 nt, synthetic construct
  source 1..21: mol_type = other RNA
gtccctgaaggatgtggaaga

SEQ ID NO: 11177 - RNA, 21 nt, synthetic construct
  source 1..21: mol_type = other RNA
gtccctgcagcagcatgggga

SEQ ID NO: 11178 - RNA, 21 nt, synthetic construct
  source 1..21: mol_type = other RNA
gtcgctcaaggcagccctgtg

SEQ ID NO: 11179 - RNA, 21 nt, synthetic construct
  source 1..21: mol_type = other RNA
gtctagcctggtcaccgtgcc

SEQ ID NO: 11180 - RNA, 21 nt, synthetic construct
  source 1..21: mol_type = other RNA
gtctccccatgctgctgcagg

SEQ ID NO: 11181 - RNA, 21 nt, synthetic construct
  source 1..21: mol_type = other RNA
gtctgaggccctccctccaca

SEQ ID NO: 11182 - RNA, 21 nt, synthetic construct
  source 1..21: mol_type = other RNA
gtctgcacaagctttcccagg

SEQ ID NO: 11183 - RNA, 21 nt, synthetic construct
  source 1..21: mol_type = other RNA
gtcttccacatccttcaggga

SEQ ID NO: 11184 - RNA, 21 nt, synthetic construct
  source 1..21: mol_type = other RNA
gtgaaccacctcccatccgcc

SEQ ID NO: 11185 - RNA, 21 nt, synthetic construct
  source 1..21: mol_type = other RNA
gtgaacttctcctctgctgcc

SEQ ID NO: 11186 - RNA, 21 nt, synthetic construct
  source 1..21: mol_type = other RNA
gtgagaggagaggcggatggg

SEQ ID NO: 11187 - RNA, 21 nt, synthetic construct
  source 1..21: mol_type = other RNA
gtgcagactcagaggtgagag

SEQ ID NO: 11188 - RNA, 21 nt, synthetic construct
  source 1..21: mol_type = other RNA
gtgcctgggtctgaggccctc

SEQ ID NO: 11189 - RNA, 21 nt, synthetic construct
  source 1..21: mol_type = other RNA
gtggaagacctgggaaagctt

SEQ ID NO: 11190 - RNA, 21 nt, synthetic construct
  source 1..21: mol_type = other RNA
gtggagggagggcctcagacc

SEQ ID NO: 11191 - RNA, 21 nt, synthetic construct
  source 1..21: mol_type = other RNA
gtggcgctgtgggagtccctg

SEQ ID NO: 11192 - RNA, 21 nt, synthetic construct
  source 1..21: mol_type = other RNA
gtgggagtccctgcagcagca

SEQ ID NO: 11193 - RNA, 21 nt, synthetic construct
  source 1..21: mol_type = other RNA
gtgtcgctcaaggcagccctg

SEQ ID NO: 11194 - RNA, 21 nt, synthetic construct
  source 1..21: mol_type = other RNA
gttcaccatcgagcctttcaa

SEQ ID NO: 11195 - RNA, 21 nt, synthetic construct
  source 1..21: mol_type = other RNA
tacttcaggcagcagaggaga

SEQ ID NO: 11196 - RNA, 21 nt, synthetic construct
  source 1..21: mol_type = other RNA
tagcctggtcaccgtgcctgg

SEQ ID NO: 11197 - RNA, 21 nt, synthetic construct
  source 1..21: mol_type = other RNA
tagcttggtctccccatgctg

SEQ ID NO: 11198 - RNA, 21 nt, synthetic construct
  source 1..21: mol_type = other RNA
tcaaagccaagtccctgaagg

SEQ ID NO: 11199 - RNA, 21 nt, synthetic construct
  source 1..21: mol_type = other RNA
tcaaggcagccctgtggaggg

SEQ ID NO: 11200 - RNA, 21 nt, synthetic construct
  source 1..21: mol_type = other RNA
tcaccatcgagcctttcaaag

SEQ ID NO: 11201 - RNA, 21 nt, synthetic construct
  source 1..21: mol_type = other RNA
tcaccgtgcctgggtctgagg

SEQ ID NO: 11202 - RNA, 21 nt, synthetic construct
  source 1..21: mol_type = other RNA
tcacctctgagtctgcacaag

SEQ ID NO: 11203 - RNA, 21 nt, synthetic construct
  source 1..21: mol_type = other RNA
tcagacccaggcacggtgacc

SEQ ID NO: 11204 - RNA, 21 nt, synthetic construct
  source 1..21: mol_type = other RNA
tcagaggtgagaggagaggcg

SEQ ID NO: 11205 - RNA, 21 nt, synthetic construct
  source 1..21: mol_type = other RNA
tcaggcagcagaggagaagtt

SEQ ID NO: 11206 - RNA, 21 nt, synthetic construct
  source 1..21: mol_type = other RNA
tcagggacttggctttgaaag

SEQ ID NO: 11207 - RNA, 21 nt, synthetic construct
  source 1..21: mol_type = other RNA
tccacagggctgccttgagcg

SEQ ID NO: 11208 - RNA, 21 nt, synthetic construct
  source 1..21: mol_type = other RNA
tccacatccttcagggacttg

SEQ ID NO: 11209 - RNA, 21 nt, synthetic construct
  source 1..21: mol_type = other RNA
tcccacagcgccaccgtgtcg

SEQ ID NO: 11210 - RNA, 21 nt, synthetic construct
  source 1..21: mol_type = other RNA
tcccaggtcttccacatcctt

SEQ ID NO: 11211 - RNA, 21 nt, synthetic construct
  source 1..21: mol_type = other RNA
tcccatccgcctctcctctca

SEQ ID NO: 11212 - RNA, 21 nt, synthetic construct
  source 1..21: mol_type = other RNA
tccccatgctgctgcagggac

SEQ ID NO: 11213 - RNA, 21 nt, synthetic construct
  source 1..21: mol_type = other RNA
tccctccacagggctgccttg

SEQ ID NO: 11214 - RNA, 21 nt, synthetic construct
  source 1..21: mol_type = other RNA
tccctgaaggatgtggaagac

SEQ ID NO: 11215 - RNA, 21 nt, synthetic construct
  source 1..21: mol_type = other RNA
tccctgcagcagcatggggag

SEQ ID NO: 11216 - RNA, 21 nt, synthetic construct
  source 1..21: mol_type = other RNA
tccgcctctcctctcacctct

SEQ ID NO: 11217 - RNA, 21 nt, synthetic construct
  source 1..21: mol_type = other RNA
tcctctcacctctgagtctgc

SEQ ID NO: 11218 - RNA, 21 nt, synthetic construct
  source 1..21: mol_type = other RNA
tcctctgctgcctgaagtagc

SEQ ID NO: 11219 - RNA, 21 nt, synthetic construct
  source 1..21: mol_type = other RNA
tccttcagggacttggctttg

SEQ ID NO: 11220 - RNA, 21 nt, synthetic construct
  source 1..21: mol_type = other RNA
tcgagcctttcaaagccaagt

SEQ ID NO: 11221 - RNA, 21 nt, synthetic construct
  source 1..21: mol_type = other RNA
tcgatggtgaacttctcctct

SEQ ID NO: 11222 - RNA, 21 nt, synthetic construct
  source 1..21: mol_type = other RNA
tcgctcaaggcagccctgtgg

SEQ ID NO: 11223 - RNA, 21 nt, synthetic construct
  source 1..21: mol_type = other RNA
tctagcctggtcaccgtgcct

SEQ ID NO: 11224 - RNA, 21 nt, synthetic construct
  source 1..21: mol_type = other RNA
tctcacctctgagtctgcaca

SEQ ID NO: 11225 - RNA, 21 nt, synthetic construct
  source 1..21: mol_type = other RNA
tctccccatgctgctgcaggg

SEQ ID NO: 11226 - RNA, 21 nt, synthetic construct
  source 1..21: mol_type = other RNA
tctcctctcacctctgagtct

SEQ ID NO: 11227 - RNA, 21 nt, synthetic construct
  source 1..21: mol_type = other RNA
tctcctctgctgcctgaagta

SEQ ID NO: 11228 - RNA, 21 nt, synthetic construct
  source 1..21: mol_type = other RNA
tctgaggccctccctccacag

SEQ ID NO: 11229 - RNA, 21 nt, synthetic construct
  source 1..21: mol_type = other RNA
tctgagtctgcacaagctttc

SEQ ID NO: 11230 - RNA, 21 nt, synthetic construct
  source 1..21: mol_type = other RNA
tctgcacaagctttcccaggt

SEQ ID NO: 11231 - RNA, 21 nt, synthetic construct
  source 1..21: mol_type = other RNA
tctgctgcctgaagtagcttg

SEQ ID NO: 11232 - RNA, 21 nt, synthetic construct
  source 1..21: mol_type = other RNA
tcttccacatccttcagggac

SEQ ID NO: 11233 - RNA, 21 nt, synthetic construct
  source 1..21: mol_type = other RNA
tgaaaggctcgatggtgaact

SEQ ID NO: 11234 - RNA, 21 nt, synthetic construct
  source 1..21: mol_type = other RNA
tgaaccacctcccatccgcct

SEQ ID NO: 11235 - RNA, 21 nt, synthetic construct
  source 1..21: mol_type = other RNA
tgaacttctcctctgctgcct

SEQ ID NO: 11236 - RNA, 21 nt, synthetic construct
  source 1..21: mol_type = other RNA
tgaaggatgtggaagacctgg

SEQ ID NO: 11237 - RNA, 21 nt, synthetic construct
  source 1..21: mol_type = other RNA
tgaagtagcttggtctcccca

SEQ ID NO: 11238 - RNA, 21 nt, synthetic construct
  source 1..21: mol_type = other RNA
tgagaggagaggcggatggga

SEQ ID NO: 11239 - RNA, 21 nt, synthetic construct
  source 1..21: mol_type = other RNA
tgagcgacacggtggcgctgt

SEQ ID NO: 11240 - RNA, 21 nt, synthetic construct
  source 1..21: mol_type = other RNA
tgaggccctccctccacaggg

SEQ ID NO: 11241 - RNA, 21 nt, synthetic construct
  source 1..21: mol_type = other RNA
tgagtctgcacaagctttccc

SEQ ID NO: 11242 - RNA, 21 nt, synthetic construct
  source 1..21: mol_type = other RNA
tgcacaagctttcccaggtct

SEQ ID NO: 11243 - RNA, 21 nt, synthetic construct
  source 1..21: mol_type = other RNA
tgcagactcagaggtgagagg

SEQ ID NO: 11244 - RNA, 21 nt, synthetic construct
  source 1..21: mol_type = other RNA
tgcagcagcatggggagacca

SEQ ID NO: 11245 - RNA, 21 nt, synthetic construct
  source 1..21: mol_type = other RNA
tgcagggactcccacagcgcc

SEQ ID NO: 11246 - RNA, 21 nt, synthetic construct
  source 1..21: mol_type = other RNA
tgcatggcgtgaaccacctcc

SEQ ID NO: 11247 - RNA, 21 nt, synthetic construct
  source 1..21: mol_type = other RNA
tgcctgaagtagcttggtctc

SEQ ID NO: 11248 - RNA, 21 nt, synthetic construct
  source 1..21: mol_type = other RNA
tgcctgggtctgaggccctcc

SEQ ID NO: 11249 - RNA, 21 nt, synthetic construct
  source 1..21: mol_type = other RNA
tgccttgagcgacacggtggc

SEQ ID NO: 11250 - RNA, 21 nt, synthetic construct
  source 1..21: mol_type = other RNA
tgctgcagggactcccacagc

SEQ ID NO: 11251 - RNA, 21 nt, synthetic construct
  source 1..21: mol_type = other RNA
tgctgcctgaagtagcttggt

SEQ ID NO: 11252 - RNA, 21 nt, synthetic construct
  source 1..21: mol_type = other RNA
tgctgctgcagggactcccac

SEQ ID NO: 11253 - RNA, 21 nt, synthetic construct
  source 1..21: mol_type = other RNA
tggaagacctgggaaagcttg

SEQ ID NO: 11254 - RNA, 21 nt, synthetic construct
  source 1..21: mol_type = other RNA
tggagggagggcctcagaccc

SEQ ID NO: 11255 - RNA, 21 nt, synthetic construct
  source 1..21: mol_type = other RNA
tggcgctgtgggagtccctgc

SEQ ID NO: 11256 - RNA, 21 nt, synthetic construct
  source 1..21: mol_type = other RNA
tggcgtgaaccacctcccatc

SEQ ID NO: 11257 - RNA, 21 nt, synthetic construct
  source 1..21: mol_type = other RNA
tggctttgaaaggctcgatgg

SEQ ID NO: 11258 - RNA, 21 nt, synthetic construct
  source 1..21: mol_type = other RNA
tgggaaagcttgtgcagactc

SEQ ID NO: 11259 - RNA, 21 nt, synthetic construct
  source 1..21: mol_type = other RNA
tgggagtccctgcagcagcat

SEQ ID NO: 11260 - RNA, 21 nt, synthetic construct
  source 1..21: mol_type = other RNA
tggggagaccaagctacttca

SEQ ID NO: 11261 - RNA, 21 nt, synthetic construct
  source 1..21: mol_type = other RNA
tgggtctgaggccctccctcc

SEQ ID NO: 11262 - RNA, 21 nt, synthetic construct
  source 1..21: mol_type = other RNA
tggtcaccgtgcctgggtctg

SEQ ID NO: 11263 - RNA, 21 nt, synthetic construct
  source 1..21: mol_type = other RNA
tggtctccccatgctgctgca

SEQ ID NO: 11264 - RNA, 21 nt, synthetic construct
  source 1..21: mol_type = other RNA
tggtgaacttctcctctgctg

SEQ ID NO: 11265 - RNA, 21 nt, synthetic construct
  source 1..21: mol_type = other RNA
tgtcgctcaaggcagccctgt

SEQ ID NO: 11266 - RNA, 21 nt, synthetic construct
  source 1..21: mol_type = other RNA
tgtgcagactcagaggtgaga

SEQ ID NO: 11267 - RNA, 21 nt, synthetic construct
  source 1..21: mol_type = other RNA
tgtggaagacctgggaaagct

SEQ ID NO: 11268 - RNA, 21 nt, synthetic construct
  source 1..21: mol_type = other RNA
tgtggagggagggcctcagac

SEQ ID NO: 11269 - RNA, 21 nt, synthetic construct
  source 1..21: mol_type = other RNA
tgtgggagtccctgcagcagc

SEQ ID NO: 11270 - RNA, 21 nt, synthetic construct
  source 1..21: mol_type = other RNA
ttcaaagccaagtccctgaag

SEQ ID NO: 11271 - RNA, 21 nt, synthetic construct
  source 1..21: mol_type = other RNA
ttcaccatcgagcctttcaaa

SEQ ID NO: 11272 - RNA, 21 nt, synthetic construct
  source 1..21: mol_type = other RNA
ttcaggcagcagaggagaagt

SEQ ID NO: 11273 - RNA, 21 nt, synthetic construct
  source 1..21: mol_type = other RNA
ttcagggacttggctttgaaa

SEQ ID NO: 11274 - RNA, 21 nt, synthetic construct
  source 1..21: mol_type = other RNA
ttccacatccttcagggactt

SEQ ID NO: 11275 - RNA, 21 nt, synthetic construct
  source 1..21: mol_type = other RNA
ttcccaggtcttccacatcct

SEQ ID NO: 11276 - RNA, 21 nt, synthetic construct
  source 1..21: mol_type = other RNA
ttctcctctgctgcctgaagt

SEQ ID NO: 11277 - RNA, 21 nt, synthetic construct
  source 1..21: mol_type = other RNA
ttgaaaggctcgatggtgaac

SEQ ID NO: 11278 - RNA, 21 nt, synthetic construct
  source 1..21: mol_type = other RNA
ttgagcgacacggtggcgctg

SEQ ID NO: 11279 - RNA, 21 nt, synthetic construct
  source 1..21: mol_type = other RNA
ttggctttgaaaggctcgatg

SEQ ID NO: 11280 - RNA, 21 nt, synthetic construct
  source 1..21: mol_type = other RNA
ttggtctccccatgctgctgc

SEQ ID NO: 11281 - RNA, 21 nt, synthetic construct
  source 1..21: mol_type = other RNA
ttgtgcagactcagaggtgag

SEQ ID NO: 11282 - RNA, 21 nt, synthetic construct
  source 1..21: mol_type = other RNA
tttcaaagccaagtccctgaa

SEQ ID NO: 11283 - RNA, 21 nt, synthetic construct
  source 1..21: mol_type = other RNA
tttcccaggtcttccacatcc

SEQ ID NO: 11284 - RNA, 21 nt, synthetic construct
  source 1..21: mol_type = other RNA
tttgaaaggctcgatggtgaa

SEQ ID NO: 11285 - RNA, 22 nt, synthetic construct
  source 1..22: mol_type = other RNA
aaagccaagtccctgaaggatg

SEQ ID NO: 11286 - RNA, 22 nt, synthetic construct
  source 1..22: mol_type = other RNA
aaagcttgtgcagactcagagg

SEQ ID NO: 11287 - RNA, 22 nt, synthetic construct
  source 1..22: mol_type = other RNA
aaaggctcgatggtgaacttct

SEQ ID NO: 11288 - RNA, 22 nt, synthetic construct
  source 1..22: mol_type = other RNA
aaccacctcccatccgcctctc

SEQ ID NO: 11289 - RNA, 22 nt, synthetic construct
  source 1..22: mol_type = other RNA
aacctgcatggcgtgaaccacc

SEQ ID NO: 11290 - RNA, 22 nt, synthetic construct
  source 1..22: mol_type = other RNA
aacttctcctctgctgcctgaa

SEQ ID NO: 11291 - RNA, 22 nt, synthetic construct
  source 1..22: mol_type = other RNA
aagacctgggaaagcttgtgca

SEQ ID NO: 11292 - RNA, 22 nt, synthetic construct
  source 1..22: mol_type = other RNA
aagccaagtccctgaaggatgt

SEQ ID NO: 11293 - RNA, 22 nt, synthetic construct
  source 1..22: mol_type = other RNA
aagctacttcaggcagcagagg

SEQ ID NO: 11294 - RNA, 22 nt, synthetic construct
  source 1..22: mol_type = other RNA
aagcttgtgcagactcagaggt

SEQ ID NO: 11295 - RNA, 22 nt, synthetic construct
  source 1..22: mol_type = other RNA
aagctttcccaggtcttccaca

SEQ ID NO: 11296 - RNA, 22 nt, synthetic construct
  source 1..22: mol_type = other RNA
aaggatgtggaagacctgggaa

SEQ ID NO: 11297 - RNA, 22 nt, synthetic construct
  source 1..22: mol_type = other RNA
aaggcagccctgtggagggagg

SEQ ID NO: 11298 - RNA, 22 nt, synthetic construct
  source 1..22: mol_type = other RNA
aaggctcgatggtgaacttctc

SEQ ID NO: 11299 - RNA, 22 nt, synthetic construct
  source 1..22: mol_type = other RNA
aagtagcttggtctccccatgc

SEQ ID NO: 11300 - RNA, 22 nt, synthetic construct
  source 1..22: mol_type = other RNA
aagtccctgaaggatgtggaag

SEQ ID NO: 11301 - RNA, 22 nt, synthetic construct
  source 1..22: mol_type = other RNA
aagttcaccatcgagcctttca

SEQ ID NO: 11302 - RNA, 22 nt, synthetic construct
  source 1..22: mol_type = other RNA
acaagctttcccaggtcttcca

SEQ ID NO: 11303 - RNA, 22 nt, synthetic construct
  source 1..22: mol_type = other RNA
acacggtggcgctgtgggagtc

SEQ ID NO: 11304 - RNA, 22 nt, synthetic construct
  source 1..22: mol_type = other RNA
acagcgccaccgtgtcgctcaa

SEQ ID NO: 11305 - RNA, 22 nt, synthetic construct
  source 1..22: mol_type = other RNA
acagggctgccttgagcgacac

SEQ ID NO: 11306 - RNA, 22 nt, synthetic construct
  source 1..22: mol_type = other RNA
acatccttcagggacttggctt

SEQ ID NO: 11307 - RNA, 22 nt, synthetic construct
  source 1..22: mol_type = other RNA
accaagctacttcaggcagcag

SEQ ID NO: 11308 - RNA, 22 nt, synthetic construct
  source 1..22: mol_type = other RNA
accacctcccatccgcctctcc

SEQ ID NO: 11309 - RNA, 22 nt, synthetic construct
  source 1..22: mol_type = other RNA
accatcgagcctttcaaagcca

SEQ ID NO: 11310 - RNA, 22 nt, synthetic construct
  source 1..22: mol_type = other RNA
accgtgcctgggtctgaggccc

SEQ ID NO: 11311 - RNA, 22 nt, synthetic construct
  source 1..22: mol_type = other RNA
accgtgtcgctcaaggcagccc

SEQ ID NO: 11312 - RNA, 22 nt, synthetic construct
  source 1..22: mol_type = other RNA
acctcccatccgcctctcctct

SEQ ID NO: 11313 - RNA, 22 nt, synthetic construct
  source 1..22: mol_type = other RNA
acctctgagtctgcacaagctt

SEQ ID NO: 11314 - RNA, 22 nt, synthetic construct
  source 1..22: mol_type = other RNA
acctgcatggcgtgaaccacct

SEQ ID NO: 11315 - RNA, 22 nt, synthetic construct
  source 1..22: mol_type = other RNA
acctgggaaagcttgtgcagac

SEQ ID NO: 11316 - RNA, 22 nt, synthetic construct
  source 1..22: mol_type = other RNA
acggtggcgctgtgggagtccc

SEQ ID NO: 11317 - RNA, 22 nt, synthetic construct
  source 1..22: mol_type = other RNA
actcagaggtgagaggagaggc

SEQ ID NO: 11318 - RNA, 22 nt, synthetic construct
  source 1..22: mol_type = other RNA
actcccacagcgccaccgtgtc

SEQ ID NO: 11319 - RNA, 22 nt, synthetic construct
  source 1..22: mol_type = other RNA
acttcaggcagcagaggagaag

SEQ ID NO: 11320 - RNA, 22 nt, synthetic construct
  source 1..22: mol_type = other RNA
acttctcctctgctgcctgaag

SEQ ID NO: 11321 - RNA, 22 nt, synthetic construct
  source 1..22: mol_type = other RNA
acttggctttgaaaggctcgat

SEQ ID NO: 11322 - RNA, 22 nt, synthetic construct
  source 1..22: mol_type = other RNA
agaagttcaccatcgagccttt

SEQ ID NO: 11323 - RNA, 22 nt, synthetic construct
  source 1..22: mol_type = other RNA
agaccaagctacttcaggcagc

SEQ ID NO: 11324 - RNA, 22 nt, synthetic construct
  source 1..22: mol_type = other RNA
agacctgggaaagcttgtgcag

SEQ ID NO: 11325 - RNA, 22 nt, synthetic construct
  source 1..22: mol_type = other RNA
agactcagaggtgagaggagag

SEQ ID NO: 11326 - RNA, 22 nt, synthetic construct
  source 1..22: mol_type = other RNA
agaggagaagttcaccatcgag

SEQ ID NO: 11327 - RNA, 22 nt, synthetic construct
  source 1..22: mol_type = other RNA
agaggagaggcggatgggaggt

SEQ ID NO: 11328 - RNA, 22 nt, synthetic construct
  source 1..22: mol_type = other RNA
agaggcggatgggaggtggttc

SEQ ID NO: 11329 - RNA, 22 nt, synthetic construct
  source 1..22: mol_type = other RNA
agaggtgagaggagaggcggat

SEQ ID NO: 11330 - RNA, 22 nt, synthetic construct
  source 1..22: mol_type = other RNA
agcagaggagaagttcaccatc

SEQ ID NO: 11331 - RNA, 22 nt, synthetic construct
  source 1..22: mol_type = other RNA
agcagcatggggagaccaagct

SEQ ID NO: 11332 - RNA, 22 nt, synthetic construct
  source 1..22: mol_type = other RNA
agcatggggagaccaagctact

SEQ ID NO: 11333 - RNA, 22 nt, synthetic construct
  source 1..22: mol_type = other RNA
agccaagtccctgaaggatgtg

SEQ ID NO: 11334 - RNA, 22 nt, synthetic construct
  source 1..22: mol_type = other RNA
agccctgtggagggagggcctc

SEQ ID NO: 11335 - RNA, 22 nt, synthetic construct
  source 1..22: mol_type = other RNA
agcctggtcaccgtgcctgggt

SEQ ID NO: 11336 - RNA, 22 nt, synthetic construct
  source 1..22: mol_type = other RNA
agcctttcaaagccaagtccct

SEQ ID NO: 11337 - RNA, 22 nt, synthetic construct
  source 1..22: mol_type = other RNA
agcgacacggtggcgctgtggg

SEQ ID NO: 11338 - RNA, 22 nt, synthetic construct
  source 1..22: mol_type = other RNA
agcgccaccgtgtcgctcaagg

SEQ ID NO: 11339 - RNA, 22 nt, synthetic construct
  source 1..22: mol_type = other RNA
agctacttcaggcagcagagga

SEQ ID NO: 11340 - RNA, 22 nt, synthetic construct
  source 1..22: mol_type = other RNA
agcttggtctccccatgctgct

SEQ ID NO: 11341 - RNA, 22 nt, synthetic construct
  source 1..22: mol_type = other RNA
agcttgtgcagactcagaggtg

SEQ ID NO: 11342 - RNA, 22 nt, synthetic construct
  source 1..22: mol_type = other RNA
agctttcccaggtcttccacat

SEQ ID NO: 11343 - RNA, 22 nt, synthetic construct
  source 1..22: mol_type = other RNA
aggagaagttcaccatcgagcc

SEQ ID NO: 11344 - RNA, 22 nt, synthetic construct
  source 1..22: mol_type = other RNA
aggagaggcggatgggaggtgg

SEQ ID NO: 11345 - RNA, 22 nt, synthetic construct
  source 1..22: mol_type = other RNA
aggatgtggaagacctgggaaa

SEQ ID NO: 11346 - RNA, 22 nt, synthetic construct
  source 1..22: mol_type = other RNA
aggcagcagaggagaagttcac

SEQ ID NO: 11347 - RNA, 22 nt, synthetic construct
  source 1..22: mol_type = other RNA
aggcagccctgtggagggaggg

SEQ ID NO: 11348 - RNA, 22 nt, synthetic construct
  source 1..22: mol_type = other RNA
aggccctccctccacagggctg

SEQ ID NO: 11349 - RNA, 22 nt, synthetic construct
  source 1..22: mol_type = other RNA
aggcggatgggaggtggttcac

SEQ ID NO: 11350 - RNA, 22 nt, synthetic construct
  source 1..22: mol_type = other RNA
aggctcgatggtgaacttctcc

SEQ ID NO: 11351 - RNA, 22 nt, synthetic construct
  source 1..22: mol_type = other RNA
agggactcccacagcgccaccg

SEQ ID NO: 11352 - RNA, 22 nt, synthetic construct
  source 1..22: mol_type = other RNA
agggacttggctttgaaaggct

SEQ ID NO: 11353 - RNA, 22 nt, synthetic construct
  source 1..22: mol_type = other RNA
agggagggcctcagacccaggc

SEQ ID NO: 11354 - RNA, 22 nt, synthetic construct
  source 1..22: mol_type = other RNA
agggcctcagacccaggcacgg

SEQ ID NO: 11355 - RNA, 22 nt, synthetic construct
  source 1..22: mol_type = other RNA
agggctgccttgagcgacacgg

SEQ ID NO: 11356 - RNA, 22 nt, synthetic construct
  source 1..22: mol_type = other RNA
aggtcttccacatccttcaggg

SEQ ID NO: 11357 - RNA, 22 nt, synthetic construct
  source 1..22: mol_type = other RNA
aggtgagaggagaggcggatgg

SEQ ID NO: 11358 - RNA, 22 nt, synthetic construct
  source 1..22: mol_type = other RNA
agtagcttggtctccccatgct

SEQ ID NO: 11359 - RNA, 22 nt, synthetic construct
  source 1..22: mol_type = other RNA
agtccctgaaggatgtggaaga

SEQ ID NO: 11360 - RNA, 22 nt, synthetic construct
  source 1..22: mol_type = other RNA
agtccctgcagcagcatgggga

SEQ ID NO: 11361 - RNA, 22 nt, synthetic construct
  source 1..22: mol_type = other RNA
agtctgcacaagctttcccagg

SEQ ID NO: 11362 - RNA, 22 nt, synthetic construct
  source 1..22: mol_type = other RNA
agttcaccatcgagcctttcaa

SEQ ID NO: 11363 - RNA, 22 nt, synthetic construct
  source 1..22: mol_type = other RNA
atccgcctctcctctcacctct

SEQ ID NO: 11364 - RNA, 22 nt, synthetic construct
  source 1..22: mol_type = other RNA
atccttcagggacttggctttg

SEQ ID NO: 11365 - RNA, 22 nt, synthetic construct
  source 1..22: mol_type = other RNA
atcgagcctttcaaagccaagt

SEQ ID NO: 11366 - RNA, 22 nt, synthetic construct
  source 1..22: mol_type = other RNA
atgctgctgcagggactcccac

SEQ ID NO: 11367 - RNA, 22 nt, synthetic construct
  source 1..22: mol_type = other RNA
atggcgtgaaccacctcccatc

SEQ ID NO: 11368 - RNA, 22 nt, synthetic construct
  source 1..22: mol_type = other RNA
atggggagaccaagctacttca

SEQ ID NO: 11369 - RNA, 22 nt, synthetic construct
  source 1..22: mol_type = other RNA
atggtgaacttctcctctgctg

SEQ ID NO: 11370 - RNA, 22 nt, synthetic construct
  source 1..22: mol_type = other RNA
atgtggaagacctgggaaagct

SEQ ID NO: 11371 - RNA, 22 nt, synthetic construct
  source 1..22: mol_type = other RNA
caaagccaagtccctgaaggat

SEQ ID NO: 11372 - RNA, 22 nt, synthetic construct
  source 1..22: mol_type = other RNA
caacctgcatggcgtgaaccac

SEQ ID NO: 11373 - RNA, 22 nt, synthetic construct
  source 1..22: mol_type = other RNA
caagctacttcaggcagcagag

SEQ ID NO: 11374 - RNA, 22 nt, synthetic construct
  source 1..22: mol_type = other RNA
caagctttcccaggtcttccac

SEQ ID NO: 11375 - RNA, 22 nt, synthetic construct
  source 1..22: mol_type = other RNA
caaggcagccctgtggagggag

SEQ ID NO: 11376 - RNA, 22 nt, synthetic construct
  source 1..22: mol_type = other RNA
caagtccctgaaggatgtggaa

SEQ ID NO: 11377 - RNA, 22 nt, synthetic construct
  source 1..22: mol_type = other RNA
cacaagctttcccaggtcttcc

SEQ ID NO: 11378 - RNA, 22 nt, synthetic construct
  source 1..22: mol_type = other RNA
cacagcgccaccgtgtcgctca

SEQ ID NO: 11379 - RNA, 22 nt, synthetic construct
  source 1..22: mol_type = other RNA
cacagggctgccttgagcgaca

SEQ ID NO: 11380 - RNA, 22 nt, synthetic construct
  source 1..22: mol_type = other RNA
cacatccttcagggacttggct

SEQ ID NO: 11381 - RNA, 22 nt, synthetic construct
  source 1..22: mol_type = other RNA
caccatcgagcctttcaaagcc

SEQ ID NO: 11382 - RNA, 22 nt, synthetic construct
  source 1..22: mol_type = other RNA
caccgtgcctgggtctgaggcc

SEQ ID NO: 11383 - RNA, 22 nt, synthetic construct
  source 1..22: mol_type = other RNA
caccgtgtcgctcaaggcagcc

SEQ ID NO: 11384 - RNA, 22 nt, synthetic construct
  source 1..22: mol_type = other RNA
cacctcccatccgcctctcctc

SEQ ID NO: 11385 - RNA, 22 nt, synthetic construct
  source 1..22: mol_type = other RNA
cacctctgagtctgcacaagct

SEQ ID NO: 11386 - RNA, 22 nt, synthetic construct
  source 1..22: mol_type = other RNA
cacggtggcgctgtgggagtcc

SEQ ID NO: 11387 - RNA, 22 nt, synthetic construct
  source 1..22: mol_type = other RNA
cagactcagaggtgagaggaga

SEQ ID NO: 11388 - RNA, 22 nt, synthetic construct
  source 1..22: mol_type = other RNA
cagaggagaagttcaccatcga

SEQ ID NO: 11389 - RNA, 22 nt, synthetic construct
  source 1..22: mol_type = other RNA
cagaggtgagaggagaggcgga

SEQ ID NO: 11390 - RNA, 22 nt, synthetic construct
  source 1..22: mol_type = other RNA
cagcagaggagaagttcaccat

SEQ ID NO: 11391 - RNA, 22 nt, synthetic construct
  source 1..22: mol_type = other RNA
cagcagcatggggagaccaagc

SEQ ID NO: 11392 - RNA, 22 nt, synthetic construct
  source 1..22: mol_type = other RNA
cagcatggggagaccaagctac

SEQ ID NO: 11393 - RNA, 22 nt, synthetic construct
  source 1..22: mol_type = other RNA
cagccctgtggagggagggcct

SEQ ID NO: 11394 - RNA, 22 nt, synthetic construct
  source 1..22: mol_type = other RNA
cagcgccaccgtgtcgctcaag

SEQ ID NO: 11395 - RNA, 22 nt, synthetic construct
  source 1..22: mol_type = other RNA
caggcagcagaggagaagttca

SEQ ID NO: 11396 - RNA, 22 nt, synthetic construct
  source 1..22: mol_type = other RNA
cagggactcccacagcgccacc

SEQ ID NO: 11397 - RNA, 22 nt, synthetic construct
  source 1..22: mol_type = other RNA
cagggacttggctttgaaaggc

SEQ ID NO: 11398 - RNA, 22 nt, synthetic construct
  source 1..22: mol_type = other RNA
cagggctgccttgagcgacacg

SEQ ID NO: 11399 - RNA, 22 nt, synthetic construct
  source 1..22: mol_type = other RNA
caggtcttccacatccttcagg

SEQ ID NO: 11400 - RNA, 22 nt, synthetic construct
  source 1..22: mol_type = other RNA
catccgcctctcctctcacctc

SEQ ID NO: 11401 - RNA, 22 nt, synthetic construct
  source 1..22: mol_type = other RNA
catccttcagggacttggcttt

SEQ ID NO: 11402 - RNA, 22 nt, synthetic construct
  source 1..22: mol_type = other RNA
catcgagcctttcaaagccaag

SEQ ID NO: 11403 - RNA, 22 nt, synthetic construct
  source 1..22: mol_type = other RNA
catgctgctgcagggactccca

SEQ ID NO: 11404 - RNA, 22 nt, synthetic construct
  source 1..22: mol_type = other RNA
catggcgtgaaccacctcccat

SEQ ID NO: 11405 - RNA, 22 nt, synthetic construct
  source 1..22: mol_type = other RNA
catggggagaccaagctacttc

SEQ ID NO: 11406 - RNA, 22 nt, synthetic construct
  source 1..22: mol_type = other RNA
ccaagctacttcaggcagcaga

SEQ ID NO: 11407 - RNA, 22 nt, synthetic construct
  source 1..22: mol_type = other RNA
ccaagtccctgaaggatgtgga

SEQ ID NO: 11408 - RNA, 22 nt, synthetic construct
  source 1..22: mol_type = other RNA
ccacagcgccaccgtgtcgctc

SEQ ID NO: 11409 - RNA, 22 nt, synthetic construct
  source 1..22: mol_type = other RNA
ccacagggctgccttgagcgac

SEQ ID NO: 11410 - RNA, 22 nt, synthetic construct
  source 1..22: mol_type = other RNA
ccacatccttcagggacttggc

SEQ ID NO: 11411 - RNA, 22 nt, synthetic construct
  source 1..22: mol_type = other RNA
ccaccgtgtcgctcaaggcagc

SEQ ID NO: 11412 - RNA, 22 nt, synthetic construct
  source 1..22: mol_type = other RNA
ccacctcccatccgcctctcct

SEQ ID NO: 11413 - RNA, 22 nt, synthetic construct
  source 1..22: mol_type = other RNA
ccaggtcttccacatccttcag

SEQ ID NO: 11414 - RNA, 22 nt, synthetic construct
  source 1..22: mol_type = other RNA
ccatccgcctctcctctcacct

SEQ ID NO: 11415 - RNA, 22 nt, synthetic construct
  source 1..22: mol_type = other RNA
ccatcgagcctttcaaagccaa

SEQ ID NO: 11416 - RNA, 22 nt, synthetic construct
  source 1..22: mol_type = other RNA
ccatgctgctgcagggactccc

SEQ ID NO: 11417 - RNA, 22 nt, synthetic construct
  source 1..22: mol_type = other RNA
cccacagcgccaccgtgtcgct

SEQ ID NO: 11418 - RNA, 22 nt, synthetic construct
  source 1..22: mol_type = other RNA
cccaggtcttccacatccttca

SEQ ID NO: 11419 - RNA, 22 nt, synthetic construct
  source 1..22: mol_type = other RNA
cccatccgcctctcctctcacc

SEQ ID NO: 11420 - RNA, 22 nt, synthetic construct
  source 1..22: mol_type = other RNA
cccatgctgctgcagggactcc

SEQ ID NO: 11421 - RNA, 22 nt, synthetic construct
  source 1..22: mol_type = other RNA
ccccatgctgctgcagggactc

SEQ ID NO: 11422 - RNA, 22 nt, synthetic construct
  source 1..22: mol_type = other RNA
ccctccacagggctgccttgag

SEQ ID NO: 11423 - RNA, 22 nt, synthetic construct
  source 1..22: mol_type = other RNA
ccctccctccacagggctgcct

SEQ ID NO: 11424 - RNA, 22 nt, synthetic construct
  source 1..22: mol_type = other RNA
ccctgaaggatgtggaagacct

SEQ ID NO: 11425 - RNA, 22 nt, synthetic construct
  source 1..22: mol_type = other RNA
ccctgcagcagcatggggagac

SEQ ID NO: 11426 - RNA, 22 nt, synthetic construct
  source 1..22: mol_type = other RNA
ccctgtggagggagggcctcag

SEQ ID NO: 11427 - RNA, 22 nt, synthetic construct
  source 1..22: mol_type = other RNA
ccgcctctcctctcacctctga

SEQ ID NO: 11428 - RNA, 22 nt, synthetic construct
  source 1..22: mol_type = other RNA
ccgtgcctgggtctgaggccct

SEQ ID NO: 11429 - RNA, 22 nt, synthetic construct
  source 1..22: mol_type = other RNA
ccgtgtcgctcaaggcagccct

SEQ ID NO: 11430 - RNA, 22 nt, synthetic construct
  source 1..22: mol_type = other RNA
cctcagacccaggcacggtgac

SEQ ID NO: 11431 - RNA, 22 nt, synthetic construct
  source 1..22: mol_type = other RNA
cctccacagggctgccttgagc

SEQ ID NO: 11432 - RNA, 22 nt, synthetic construct
  source 1..22: mol_type = other RNA
cctcccatccgcctctcctctc

SEQ ID NO: 11433 - RNA, 22 nt, synthetic construct
  source 1..22: mol_type = other RNA
cctccctccacagggctgcctt

SEQ ID NO: 11434 - RNA, 22 nt, synthetic construct
  source 1..22: mol_type = other RNA
cctctcacctctgagtctgcac

SEQ ID NO: 11435 - RNA, 22 nt, synthetic construct
  source 1..22: mol_type = other RNA
cctctcctctcacctctgagtc

SEQ ID NO: 11436 - RNA, 22 nt, synthetic construct
  source 1..22: mol_type = other RNA
cctctgagtctgcacaagcttt

SEQ ID NO: 11437 - RNA, 22 nt, synthetic construct
  source 1..22: mol_type = other RNA
cctctgctgcctgaagtagctt

SEQ ID NO: 11438 - RNA, 22 nt, synthetic construct
  source 1..22: mol_type = other RNA
cctgaaggatgtggaagacctg

SEQ ID NO: 11439 - RNA, 22 nt, synthetic construct
  source 1..22: mol_type = other RNA
cctgaagtagcttggtctcccc

SEQ ID NO: 11440 - RNA, 22 nt, synthetic construct
  source 1..22: mol_type = other RNA
cctgcagcagcatggggagacc

SEQ ID NO: 11441 - RNA, 22 nt, synthetic construct
  source 1..22: mol_type = other RNA
cctgcatggcgtgaaccacctc

SEQ ID NO: 11442 - RNA, 22 nt, synthetic construct
  source 1..22: mol_type = other RNA
cctgggaaagcttgtgcagact

SEQ ID NO: 11443 - RNA, 22 nt, synthetic construct
  source 1..22: mol_type = other RNA
cctgggtctgaggccctccctc

SEQ ID NO: 11444 - RNA, 22 nt, synthetic construct
  source 1..22: mol_type = other RNA
cctggtcaccgtgcctgggtct

SEQ ID NO: 11445 - RNA, 22 nt, synthetic construct
  source 1..22: mol_type = other RNA
cctgtggagggagggcctcaga

SEQ ID NO: 11446 - RNA, 22 nt, synthetic construct
  source 1..22: mol_type = other RNA
ccttcagggacttggctttgaa

SEQ ID NO: 11447 - RNA, 22 nt, synthetic construct
  source 1..22: mol_type = other RNA
ccttgagcgacacggtggcgct

SEQ ID NO: 11448 - RNA, 22 nt, synthetic construct
  source 1..22: mol_type = other RNA
cctttcaaagccaagtccctga

SEQ ID NO: 11449 - RNA, 22 nt, synthetic construct
  source 1..22: mol_type = other RNA
cgacacggtggcgctgtgggag

SEQ ID NO: 11450 - RNA, 22 nt, synthetic construct
  source 1..22: mol_type = other RNA
cgagcctttcaaagccaagtcc

SEQ ID NO: 11451 - RNA, 22 nt, synthetic construct
  source 1..22: mol_type = other RNA
cgatggtgaacttctcctctgc

SEQ ID NO: 11452 - RNA, 22 nt, synthetic construct
  source 1..22: mol_type = other RNA
cgccaccgtgtcgctcaaggca

SEQ ID NO: 11453 - RNA, 22 nt, synthetic construct
  source 1..22: mol_type = other RNA
cgcctctcctctcacctctgag

SEQ ID NO: 11454 - RNA, 22 nt, synthetic construct
  source 1..22: mol_type = other RNA
cgctcaaggcagccctgtggag

SEQ ID NO: 11455 - RNA, 22 nt, synthetic construct
  source 1..22: mol_type = other RNA
cgctgtgggagtccctgcagca

SEQ ID NO: 11456 - RNA, 22 nt, synthetic construct
  source 1..22: mol_type = other RNA
cggatgggaggtggttcacgcc

SEQ ID NO: 11457 - RNA, 22 nt, synthetic construct
  source 1..22: mol_type = other RNA
cggtggcgctgtgggagtccct

SEQ ID NO: 11458 - RNA, 22 nt, synthetic construct
  source 1..22: mol_type = other RNA
cgtgaaccacctcccatccgcc

SEQ ID NO: 11459 - RNA, 22 nt, synthetic construct
  source 1..22: mol_type = other RNA
cgtgcctgggtctgaggccctc

SEQ ID NO: 11460 - RNA, 22 nt, synthetic construct
  source 1..22: mol_type = other RNA
cgtgtcgctcaaggcagccctg

SEQ ID NO: 11461 - RNA, 22 nt, synthetic construct
  source 1..22: mol_type = other RNA
ctacttcaggcagcagaggaga

SEQ ID NO: 11462 - RNA, 22 nt, synthetic construct
  source 1..22: mol_type = other RNA
ctagcctggtcaccgtgcctgg

SEQ ID NO: 11463 - RNA, 22 nt, synthetic construct
  source 1..22: mol_type = other RNA
ctcaaggcagccctgtggaggg

SEQ ID NO: 11464 - RNA, 22 nt, synthetic construct
  source 1..22: mol_type = other RNA
ctcacctctgagtctgcacaag

SEQ ID NO: 11465 - RNA, 22 nt, synthetic construct
  source 1..22: mol_type = other RNA
ctcagacccaggcacggtgacc

SEQ ID NO: 11466 - RNA, 22 nt, synthetic construct
  source 1..22: mol_type = other RNA
ctcagaggtgagaggagaggcg

SEQ ID NO: 11467 - RNA, 22 nt, synthetic construct
  source 1..22: mol_type = other RNA
ctccacagggctgccttgagcg

SEQ ID NO: 11468 - RNA, 22 nt, synthetic construct
  source 1..22: mol_type = other RNA
ctcccacagcgccaccgtgtcg

SEQ ID NO: 11469 - RNA, 22 nt, synthetic construct
  source 1..22: mol_type = other RNA
ctcccatccgcctctcctctca

SEQ ID NO: 11470 - RNA, 22 nt, synthetic construct
  source 1..22: mol_type = other RNA
ctccccatgctgctgcagggac

SEQ ID NO: 11471 - RNA, 22 nt, synthetic construct
  source 1..22: mol_type = other RNA
ctccctccacagggctgccttg

SEQ ID NO: 11472 - RNA, 22 nt, synthetic construct
  source 1..22: mol_type = other RNA
ctcctctcacctctgagtctgc

SEQ ID NO: 11473 - RNA, 22 nt, synthetic construct
  source 1..22: mol_type = other RNA
ctcctctgctgcctgaagtagc

SEQ ID NO: 11474 - RNA, 22 nt, synthetic construct
  source 1..22: mol_type = other RNA
ctcgatggtgaacttctcctct

SEQ ID NO: 11475 - RNA, 22 nt, synthetic construct
  source 1..22: mol_type = other RNA
ctctcacctctgagtctgcaca

SEQ ID NO: 11476 - RNA, 22 nt, synthetic construct
  source 1..22: mol_type = other RNA
ctctcctctcacctctgagtct

SEQ ID NO: 11477 - RNA, 22 nt, synthetic construct
  source 1..22: mol_type = other RNA
ctctgagtctgcacaagctttc

SEQ ID NO: 11478 - RNA, 22 nt, synthetic construct
  source 1..22: mol_type = other RNA
ctctgctgcctgaagtagcttg

SEQ ID NO: 11479 - RNA, 22 nt, synthetic construct
  source 1..22: mol_type = other RNA
ctgaaggatgtggaagacctgg

SEQ ID NO: 11480 - RNA, 22 nt, synthetic construct
  source 1..22: mol_type = other RNA
ctgaagtagcttggtctcccca

SEQ ID NO: 11481 - RNA, 22 nt, synthetic construct
  source 1..22: mol_type = other RNA
ctgaggccctccctccacaggg

SEQ ID NO: 11482 - RNA, 22 nt, synthetic construct
  source 1..22: mol_type = other RNA
ctgagtctgcacaagctttccc

SEQ ID NO: 11483 - RNA, 22 nt, synthetic construct
  source 1..22: mol_type = other RNA
ctgcacaagctttcccaggtct

SEQ ID NO: 11484 - RNA, 22 nt, synthetic construct
  source 1..22: mol_type = other RNA
ctgcagcagcatggggagacca

SEQ ID NO: 11485 - RNA, 22 nt, synthetic construct
  source 1..22: mol_type = other RNA
ctgcagggactcccacagcgcc

SEQ ID NO: 11486 - RNA, 22 nt, synthetic construct
  source 1..22: mol_type = other RNA
ctgcatggcgtgaaccacctcc

SEQ ID NO: 11487 - RNA, 22 nt, synthetic construct
  source 1..22: mol_type = other RNA
ctgcctgaagtagcttggtctc

SEQ ID NO: 11488 - RNA, 22 nt, synthetic construct
  source 1..22: mol_type = other RNA
ctgccttgagcgacacggtggc

SEQ ID NO: 11489 - RNA, 22 nt, synthetic construct
  source 1..22: mol_type = other RNA
ctgctgcagggactcccacagc

SEQ ID NO: 11490 - RNA, 22 nt, synthetic construct
  source 1..22: mol_type = other RNA
ctgctgcctgaagtagcttggt

SEQ ID NO: 11491 - RNA, 22 nt, synthetic construct
  source 1..22: mol_type = other RNA
ctgggaaagcttgtgcagactc

SEQ ID NO: 11492 - RNA, 22 nt, synthetic construct
  source 1..22: mol_type = other RNA
ctgggtctgaggccctccctcc

SEQ ID NO: 11493 - RNA, 22 nt, synthetic construct
  source 1..22: mol_type = other RNA
ctggtcaccgtgcctgggtctg

SEQ ID NO: 11494 - RNA, 22 nt, synthetic construct
  source 1..22: mol_type = other RNA
ctgtggagggagggcctcagac

SEQ ID NO: 11495 - RNA, 22 nt, synthetic construct
  source 1..22: mol_type = other RNA
ctgtgggagtccctgcagcagc

SEQ ID NO: 11496 - RNA, 22 nt, synthetic construct
  source 1..22: mol_type = other RNA
cttcaggcagcagaggagaagt

SEQ ID NO: 11497 - RNA, 22 nt, synthetic construct
  source 1..22: mol_type = other RNA
cttcagggacttggctttgaaa

SEQ ID NO: 11498 - RNA, 22 nt, synthetic construct
  source 1..22: mol_type = other RNA
cttccacatccttcagggactt

SEQ ID NO: 11499 - RNA, 22 nt, synthetic construct
  source 1..22: mol_type = other RNA
cttctcctctgctgcctgaagt

SEQ ID NO: 11500 - RNA, 22 nt, synthetic construct
  source 1..22: mol_type = other RNA
cttgagcgacacggtggcgctg

SEQ ID NO: 11501 - RNA, 22 nt, synthetic construct
  source 1..22: mol_type = other RNA
cttggctttgaaaggctcgatg

SEQ ID NO: 11502 - RNA, 22 nt, synthetic construct
  source 1..22: mol_type = other RNA
cttggtctccccatgctgctgc

SEQ ID NO: 11503 - RNA, 22 nt, synthetic construct
  source 1..22: mol_type = other RNA
cttgtgcagactcagaggtgag

SEQ ID NO: 11504 - RNA, 22 nt, synthetic construct
  source 1..22: mol_type = other RNA
ctttcaaagccaagtccctgaa

SEQ ID NO: 11505 - RNA, 22 nt, synthetic construct
  source 1..22: mol_type = other RNA
ctttcccaggtcttccacatcc

SEQ ID NO: 11506 - RNA, 22 nt, synthetic construct
  source 1..22: mol_type = other RNA
ctttgaaaggctcgatggtgaa

SEQ ID NO: 11507 - RNA, 22 nt, synthetic construct
  source 1..22: mol_type = other RNA
gaaagcttgtgcagactcagag

SEQ ID NO: 11508 - RNA, 22 nt, synthetic construct
  source 1..22: mol_type = other RNA
gaaaggctcgatggtgaacttc

SEQ ID NO: 11509 - RNA, 22 nt, synthetic construct
  source 1..22: mol_type = other RNA
gaaccacctcccatccgcctct

SEQ ID NO: 11510 - RNA, 22 nt, synthetic construct
  source 1..22: mol_type = other RNA
gaacttctcctctgctgcctga

SEQ ID NO: 11511 - RNA, 22 nt, synthetic construct
  source 1..22: mol_type = other RNA
gaagacctgggaaagcttgtgc

SEQ ID NO: 11512 - RNA, 22 nt, synthetic construct
  source 1..22: mol_type = other RNA
gaaggatgtggaagacctggga

SEQ ID NO: 11513 - RNA, 22 nt, synthetic construct
  source 1..22: mol_type = other RNA
gaagtagcttggtctccccatg

SEQ ID NO: 11514 - RNA, 22 nt, synthetic construct
  source 1..22: mol_type = other RNA
gaagttcaccatcgagcctttc

SEQ ID NO: 11515 - RNA, 22 nt, synthetic construct
  source 1..22: mol_type = other RNA
gacacggtggcgctgtgggagt

SEQ ID NO: 11516 - RNA, 22 nt, synthetic construct
  source 1..22: mol_type = other RNA
gaccaagctacttcaggcagca

SEQ ID NO: 11517 - RNA, 22 nt, synthetic construct
  source 1..22: mol_type = other RNA
gacctgggaaagcttgtgcaga

SEQ ID NO: 11518 - RNA, 22 nt, synthetic construct
  source 1..22: mol_type = other RNA
gactcagaggtgagaggagagg

SEQ ID NO: 11519 - RNA, 22 nt, synthetic construct
  source 1..22: mol_type = other RNA
gactcccacagcgccaccgtgt

SEQ ID NO: 11520 - RNA, 22 nt, synthetic construct
  source 1..22: mol_type = other RNA
gacttggctttgaaaggctcga

SEQ ID NO: 11521 - RNA, 22 nt, synthetic construct
  source 1..22: mol_type = other RNA
gagaagttcaccatcgagcctt

SEQ ID NO: 11522 - RNA, 22 nt, synthetic construct
  source 1..22: mol_type = other RNA
gagaccaagctacttcaggcag

SEQ ID NO: 11523 - RNA, 22 nt, synthetic construct
  source 1..22: mol_type = other RNA
gagaggagaggcggatgggagg

SEQ ID NO: 11524 - RNA, 22 nt, synthetic construct
  source 1..22: mol_type = other RNA
gagaggcggatgggaggtggtt

SEQ ID NO: 11525 - RNA, 22 nt, synthetic construct
  source 1..22: mol_type = other RNA
gagcctttcaaagccaagtccc

SEQ ID NO: 11526 - RNA, 22 nt, synthetic construct
  source 1..22: mol_type = other RNA
gagcgacacggtggcgctgtgg

SEQ ID NO: 11527 - RNA, 22 nt, synthetic construct
  source 1..22: mol_type = other RNA
gaggagaagttcaccatcgagc

SEQ ID NO: 11528 - RNA, 22 nt, synthetic construct
  source 1..22: mol_type = other RNA
gaggagaggcggatgggaggtg

SEQ ID NO: 11529 - RNA, 22 nt, synthetic construct
  source 1..22: mol_type = other RNA
gaggccctccctccacagggct

SEQ ID NO: 11530 - RNA, 22 nt, synthetic construct
  source 1..22: mol_type = other RNA
gaggcggatgggaggtggttca

SEQ ID NO: 11531 - RNA, 22 nt, synthetic construct
  source 1..22: mol_type = other RNA
gagggagggcctcagacccagg

SEQ ID NO: 11532 - RNA, 22 nt, synthetic construct
  source 1..22: mol_type = other RNA
gagggcctcagacccaggcacg

SEQ ID NO: 11533 - RNA, 22 nt, synthetic construct
  source 1..22: mol_type = other RNA
gaggtgagaggagaggcggatg

SEQ ID NO: 11534 - RNA, 22 nt, synthetic construct
  source 1..22: mol_type = other RNA
gagtccctgcagcagcatgggg

SEQ ID NO: 11535 - RNA, 22 nt, synthetic construct
  source 1..22: mol_type = other RNA
gagtctgcacaagctttcccag

SEQ ID NO: 11536 - RNA, 22 nt, synthetic construct
  source 1..22: mol_type = other RNA
gatgggaggtggttcacgccat

SEQ ID NO: 11537 - RNA, 22 nt, synthetic construct
  source 1..22: mol_type = other RNA
gatggtgaacttctcctctgct

SEQ ID NO: 11538 - RNA, 22 nt, synthetic construct
  source 1..22: mol_type = other RNA
gatgtggaagacctgggaaagc

SEQ ID NO: 11539 - RNA, 22 nt, synthetic construct
  source 1..22: mol_type = other RNA
gcacaagctttcccaggtcttc

SEQ ID NO: 11540 - RNA, 22 nt, synthetic construct
  source 1..22: mol_type = other RNA
gcagactcagaggtgagaggag

SEQ ID NO: 11541 - RNA, 22 nt, synthetic construct
  source 1..22: mol_type = other RNA
gcagaggagaagttcaccatcg

SEQ ID NO: 11542 - RNA, 22 nt, synthetic construct
  source 1..22: mol_type = other RNA
gcagcagaggagaagttcacca

SEQ ID NO: 11543 - RNA, 22 nt, synthetic construct
  source 1..22: mol_type = other RNA
gcagcagcatggggagaccaag

SEQ ID NO: 11544 - RNA, 22 nt, synthetic construct
  source 1..22: mol_type = other RNA
gcagcatggggagaccaagcta

SEQ ID NO: 11545 - RNA, 22 nt, synthetic construct
  source 1..22: mol_type = other RNA
gcagccctgtggagggagggcc

SEQ ID NO: 11546 - RNA, 22 nt, synthetic construct
  source 1..22: mol_type = other RNA
gcagggactcccacagcgccac

SEQ ID NO: 11547 - RNA, 22 nt, synthetic construct
  source 1..22: mol_type = other RNA
gcatggcgtgaaccacctccca

SEQ ID NO: 11548 - RNA, 22 nt, synthetic construct
  source 1..22: mol_type = other RNA
gcatggggagaccaagctactt

SEQ ID NO: 11549 - RNA, 22 nt, synthetic construct
  source 1..22: mol_type = other RNA
gccaagtccctgaaggatgtgg

SEQ ID NO: 11550 - RNA, 22 nt, synthetic construct
  source 1..22: mol_type = other RNA
gccaccgtgtcgctcaaggcag

SEQ ID NO: 11551 - RNA, 22 nt, synthetic construct
  source 1..22: mol_type = other RNA
gccctccctccacagggctgcc

SEQ ID NO: 11552 - RNA, 22 nt, synthetic construct
  source 1..22: mol_type = other RNA
gccctgtggagggagggcctca

SEQ ID NO: 11553 - RNA, 22 nt, synthetic construct
  source 1..22: mol_type = other RNA
gcctcagacccaggcacggtga

SEQ ID NO: 11554 - RNA, 22 nt, synthetic construct
  source 1..22: mol_type = other RNA
gcctctcctctcacctctgagt

SEQ ID NO: 11555 - RNA, 22 nt, synthetic construct
  source 1..22: mol_type = other RNA
gcctgaagtagcttggtctccc

SEQ ID NO: 11556 - RNA, 22 nt, synthetic construct
  source 1..22: mol_type = other RNA
gcctgggtctgaggccctccct

SEQ ID NO: 11557 - RNA, 22 nt, synthetic construct
  source 1..22: mol_type = other RNA
gcctggtcaccgtgcctgggtc

SEQ ID NO: 11558 - RNA, 22 nt, synthetic construct
  source 1..22: mol_type = other RNA
gccttgagcgacacggtggcgc

SEQ ID NO: 11559 - RNA, 22 nt, synthetic construct
  source 1..22: mol_type = other RNA
gcctttcaaagccaagtccctg

SEQ ID NO: 11560 - RNA, 22 nt, synthetic construct
  source 1..22: mol_type = other RNA
gcgacacggtggcgctgtggga

SEQ ID NO: 11561 - RNA, 22 nt, synthetic construct
  source 1..22: mol_type = other RNA
gcgccaccgtgtcgctcaaggc

SEQ ID NO: 11562 - RNA, 22 nt, synthetic construct
  source 1..22: mol_type = other RNA
gcgctgtgggagtccctgcagc

SEQ ID NO: 11563 - RNA, 22 nt, synthetic construct
  source 1..22: mol_type = other RNA
gcggatgggaggtggttcacgc

SEQ ID NO: 11564 - RNA, 22 nt, synthetic construct
  source 1..22: mol_type = other RNA
gcgtgaaccacctcccatccgc

SEQ ID NO: 11565 - RNA, 22 nt, synthetic construct
  source 1..22: mol_type = other RNA
gctacttcaggcagcagaggag

SEQ ID NO: 11566 - RNA, 22 nt, synthetic construct
  source 1..22: mol_type = other RNA
gctcaaggcagccctgtggagg

SEQ ID NO: 11567 - RNA, 22 nt, synthetic construct
  source 1..22: mol_type = other RNA
gctcgatggtgaacttctcctc

SEQ ID NO: 11568 - RNA, 22 nt, synthetic construct
  source 1..22: mol_type = other RNA
gctgcagggactcccacagcgc

SEQ ID NO: 11569 - RNA, 22 nt, synthetic construct
  source 1..22: mol_type = other RNA
gctgcctgaagtagcttggtct

SEQ ID NO: 11570 - RNA, 22 nt, synthetic construct
  source 1..22: mol_type = other RNA
gctgccttgagcgacacggtgg

SEQ ID NO: 11571 - RNA, 22 nt, synthetic construct
  source 1..22: mol_type = other RNA
gctgctgcagggactcccacag

SEQ ID NO: 11572 - RNA, 22 nt, synthetic construct
  source 1..22: mol_type = other RNA
gctgtgggagtccctgcagcag

SEQ ID NO: 11573 - RNA, 22 nt, synthetic construct
  source 1..22: mol_type = other RNA
gcttggtctccccatgctgctg

SEQ ID NO: 11574 - RNA, 22 nt, synthetic construct
  source 1..22: mol_type = other RNA
gcttgtgcagactcagaggtga

SEQ ID NO: 11575 - RNA, 22 nt, synthetic construct
  source 1..22: mol_type = other RNA
gctttcccaggtcttccacatc

SEQ ID NO: 11576 - RNA, 22 nt, synthetic construct
  source 1..22: mol_type = other RNA
gctttgaaaggctcgatggtga

SEQ ID NO: 11577 - RNA, 22 nt, synthetic construct
  source 1..22: mol_type = other RNA
ggaaagcttgtgcagactcaga

SEQ ID NO: 11578 - RNA, 22 nt, synthetic construct
  source 1..22: mol_type = other RNA
ggaagacctgggaaagcttgtg

SEQ ID NO: 11579 - RNA, 22 nt, synthetic construct
  source 1..22: mol_type = other RNA
ggactcccacagcgccaccgtg

SEQ ID NO: 11580 - RNA, 22 nt, synthetic construct
  source 1..22: mol_type = other RNA
ggacttggctttgaaaggctcg

SEQ ID NO: 11581 - RNA, 22 nt, synthetic construct
  source 1..22: mol_type = other RNA
ggagaagttcaccatcgagcct

SEQ ID NO: 11582 - RNA, 22 nt, synthetic construct
  source 1..22: mol_type = other RNA
ggagaccaagctacttcaggca

SEQ ID NO: 11583 - RNA, 22 nt, synthetic construct
  source 1..22: mol_type = other RNA
ggagaggcggatgggaggtggt

SEQ ID NO: 11584 - RNA, 22 nt, synthetic construct
  source 1..22: mol_type = other RNA
ggagggagggcctcagacccag

SEQ ID NO: 11585 - RNA, 22 nt, synthetic construct
  source 1..22: mol_type = other RNA
ggagggcctcagacccaggcac

SEQ ID NO: 11586 - RNA, 22 nt, synthetic construct
  source 1..22: mol_type = other RNA
ggagtccctgcagcagcatggg

SEQ ID NO: 11587 - RNA, 22 nt, synthetic construct
  source 1..22: mol_type = other RNA
ggatgggaggtggttcacgcca

SEQ ID NO: 11588 - RNA, 22 nt, synthetic construct
  source 1..22: mol_type = other RNA
ggatgtggaagacctgggaaag

SEQ ID NO: 11589 - RNA, 22 nt, synthetic construct
  source 1..22: mol_type = other RNA
ggcagcagaggagaagttcacc

SEQ ID NO: 11590 - RNA, 22 nt, synthetic construct
  source 1..22: mol_type = other RNA
ggcagccctgtggagggagggc

SEQ ID NO: 11591 - RNA, 22 nt, synthetic construct
  source 1..22: mol_type = other RNA
ggccctccctccacagggctgc

SEQ ID NO: 11592 - RNA, 22 nt, synthetic construct
  source 1..22: mol_type = other RNA
ggcctcagacccaggcacggtg

SEQ ID NO: 11593 - RNA, 22 nt, synthetic construct
  source 1..22: mol_type = other RNA
ggcgctgtgggagtccctgcag

SEQ ID NO: 11594 - RNA, 22 nt, synthetic construct
  source 1..22: mol_type = other RNA
ggcggatgggaggtggttcacg

SEQ ID NO: 11595 - RNA, 22 nt, synthetic construct
  source 1..22: mol_type = other RNA
ggcgtgaaccacctcccatccg

SEQ ID NO: 11596 - RNA, 22 nt, synthetic construct
  source 1..22: mol_type = other RNA
ggctcgatggtgaacttctcct

SEQ ID NO: 11597 - RNA, 22 nt, synthetic construct
  source 1..22: mol_type = other RNA
ggctgccttgagcgacacggtg

SEQ ID NO: 11598 - RNA, 22 nt, synthetic construct
  source 1..22: mol_type = other RNA
ggctttgaaaggctcgatggtg

SEQ ID NO: 11599 - RNA, 22 nt, synthetic construct
  source 1..22: mol_type = other RNA
gggaaagcttgtgcagactcag

SEQ ID NO: 11600 - RNA, 22 nt, synthetic construct
  source 1..22: mol_type = other RNA
gggactcccacagcgccaccgt

SEQ ID NO: 11601 - RNA, 22 nt, synthetic construct
  source 1..22: mol_type = other RNA
gggacttggctttgaaaggctc

SEQ ID NO: 11602 - RNA, 22 nt, synthetic construct
  source 1..22: mol_type = other RNA
gggagaccaagctacttcaggc

SEQ ID NO: 11603 - RNA, 22 nt, synthetic construct
  source 1..22: mol_type = other RNA
gggagggcctcagacccaggca

SEQ ID NO: 11604 - RNA, 22 nt, synthetic construct
  source 1..22: mol_type = other RNA
gggagtccctgcagcagcatgg

SEQ ID NO: 11605 - RNA, 22 nt, synthetic construct
  source 1..22: mol_type = other RNA
gggcctcagacccaggcacggt

SEQ ID NO: 11606 - RNA, 22 nt, synthetic construct
  source 1..22: mol_type = other RNA
gggctgccttgagcgacacggt

SEQ ID NO: 11607 - RNA, 22 nt, synthetic construct
  source 1..22: mol_type = other RNA
ggggagaccaagctacttcagg

SEQ ID NO: 11608 - RNA, 22 nt, synthetic construct
  source 1..22: mol_type = other RNA
gggtctgaggccctccctccac

SEQ ID NO: 11609 - RNA, 22 nt, synthetic construct
  source 1..22: mol_type = other RNA
ggtcaccgtgcctgggtctgag

SEQ ID NO: 11610 - RNA, 22 nt, synthetic construct
  source 1..22: mol_type = other RNA
ggtctccccatgctgctgcagg

SEQ ID NO: 11611 - RNA, 22 nt, synthetic construct
  source 1..22: mol_type = other RNA
ggtctgaggccctccctccaca

SEQ ID NO: 11612 - RNA, 22 nt, synthetic construct
  source 1..22: mol_type = other RNA
ggtcttccacatccttcaggga

SEQ ID NO: 11613 - RNA, 22 nt, synthetic construct
  source 1..22: mol_type = other RNA
ggtgaacttctcctctgctgcc

SEQ ID NO: 11614 - RNA, 22 nt, synthetic construct
  source 1..22: mol_type = other RNA
ggtgagaggagaggcggatggg

SEQ ID NO: 11615 - RNA, 22 nt, synthetic construct
  source 1..22: mol_type = other RNA
ggtggcgctgtgggagtccctg

SEQ ID NO: 11616 - RNA, 22 nt, synthetic construct
  source 1..22: mol_type = other RNA
gtagcttggtctccccatgctg

SEQ ID NO: 11617 - RNA, 22 nt, synthetic construct
  source 1..22: mol_type = other RNA
gtcaccgtgcctgggtctgagg

SEQ ID NO: 11618 - RNA, 22 nt, synthetic construct
  source 1..22: mol_type = other RNA
gtccctgaaggatgtggaagac

SEQ ID NO: 11619 - RNA, 22 nt, synthetic construct
  source 1..22: mol_type = other RNA
gtccctgcagcagcatggggag

SEQ ID NO: 11620 - RNA, 22 nt, synthetic construct
  source 1..22: mol_type = other RNA
gtcgctcaaggcagccctgtgg

SEQ ID NO: 11621 - RNA, 22 nt, synthetic construct
  source 1..22: mol_type = other RNA
gtctagcctggtcaccgtgcct

SEQ ID NO: 11622 - RNA, 22 nt, synthetic construct
  source 1..22: mol_type = other RNA
gtctccccatgctgctgcaggg

SEQ ID NO: 11623 - RNA, 22 nt, synthetic construct
  source 1..22: mol_type = other RNA
gtctgaggccctccctccacag

SEQ ID NO: 11624 - RNA, 22 nt, synthetic construct
  source 1..22: mol_type = other RNA
gtctgcacaagctttcccaggt

SEQ ID NO: 11625 - RNA, 22 nt, synthetic construct
  source 1..22: mol_type = other RNA
gtcttccacatccttcagggac

SEQ ID NO: 11626 - RNA, 22 nt, synthetic construct
  source 1..22: mol_type = other RNA
gtgaaccacctcccatccgcct

SEQ ID NO: 11627 - RNA, 22 nt, synthetic construct
  source 1..22: mol_type = other RNA
gtgaacttctcctctgctgcct

SEQ ID NO: 11628 - RNA, 22 nt, synthetic construct
  source 1..22: mol_type = other RNA
gtgagaggagaggcggatggga

SEQ ID NO: 11629 - RNA, 22 nt, synthetic construct
  source 1..22: mol_type = other RNA
gtgcagactcagaggtgagagg

SEQ ID NO: 11630 - RNA, 22 nt, synthetic construct
  source 1..22: mol_type = other RNA
gtgcctgggtctgaggccctcc

SEQ ID NO: 11631 - RNA, 22 nt, synthetic construct
  source 1..22: mol_type = other RNA
gtggaagacctgggaaagcttg

SEQ ID NO: 11632 - RNA, 22 nt, synthetic construct
  source 1..22: mol_type = other RNA
gtggagggagggcctcagaccc

SEQ ID NO: 11633 - RNA, 22 nt, synthetic construct
  source 1..22: mol_type = other RNA
gtggcgctgtgggagtccctgc

SEQ ID NO: 11634 - RNA, 22 nt, synthetic construct
  source 1..22: mol_type = other RNA
gtgggagtccctgcagcagcat

SEQ ID NO: 11635 - RNA, 22 nt, synthetic construct
  source 1..22: mol_type = other RNA
gtgtcgctcaaggcagccctgt

SEQ ID NO: 11636 - RNA, 22 nt, synthetic construct
  source 1..22: mol_type = other RNA
gttcaccatcgagcctttcaaa

SEQ ID NO: 11637 - RNA, 22 nt, synthetic construct
  source 1..22: mol_type = other RNA
tacttcaggcagcagaggagaa

SEQ ID NO: 11638 - RNA, 22 nt, synthetic construct
  source 1..22: mol_type = other RNA
tagcctggtcaccgtgcctggg

SEQ ID NO: 11639 - RNA, 22 nt, synthetic construct
  source 1..22: mol_type = other RNA
tagcttggtctccccatgctgc

SEQ ID NO: 11640 - RNA, 22 nt, synthetic construct
  source 1..22: mol_type = other RNA
tcaaagccaagtccctgaagga

SEQ ID NO: 11641 - RNA, 22 nt, synthetic construct
  source 1..22: mol_type = other RNA
tcaaggcagccctgtggaggga

SEQ ID NO: 11642 - RNA, 22 nt, synthetic construct
  source 1..22: mol_type = other RNA
tcaccatcgagcctttcaaagc

SEQ ID NO: 11643 - RNA, 22 nt, synthetic construct
  source 1..22: mol_type = other RNA
tcaccgtgcctgggtctgaggc

SEQ ID NO: 11644 - RNA, 22 nt, synthetic construct
  source 1..22: mol_type = other RNA
tcacctctgagtctgcacaagc

SEQ ID NO: 11645 - RNA, 22 nt, synthetic construct
  source 1..22: mol_type = other RNA
tcagacccaggcacggtgacca

SEQ ID NO: 11646 - RNA, 22 nt, synthetic construct
  source 1..22: mol_type = other RNA
tcagaggtgagaggagaggcgg

SEQ ID NO: 11647 - RNA, 22 nt, synthetic construct
  source 1..22: mol_type = other RNA
tcaggcagcagaggagaagttc

SEQ ID NO: 11648 - RNA, 22 nt, synthetic construct
  source 1..22: mol_type = other RNA
tcagggacttggctttgaaagg

SEQ ID NO: 11649 - RNA, 22 nt, synthetic construct
  source 1..22: mol_type = other RNA
tccacagggctgccttgagcga

SEQ ID NO: 11650 - RNA, 22 nt, synthetic construct
  source 1..22: mol_type = other RNA
tccacatccttcagggacttgg

SEQ ID NO: 11651 - RNA, 22 nt, synthetic construct
  source 1..22: mol_type = other RNA
tcccacagcgccaccgtgtcgc

SEQ ID NO: 11652 - RNA, 22 nt, synthetic construct
  source 1..22: mol_type = other RNA
tcccaggtcttccacatccttc

SEQ ID NO: 11653 - RNA, 22 nt, synthetic construct
  source 1..22: mol_type = other RNA
tcccatccgcctctcctctcac

SEQ ID NO: 11654 - RNA, 22 nt, synthetic construct
  source 1..22: mol_type = other RNA
tccccatgctgctgcagggact

SEQ ID NO: 11655 - RNA, 22 nt, synthetic construct
  source 1..22: mol_type = other RNA
tccctccacagggctgccttga

SEQ ID NO: 11656 - RNA, 22 nt, synthetic construct
  source 1..22: mol_type = other RNA
tccctgaaggatgtggaagacc

SEQ ID NO: 11657 - RNA, 22 nt, synthetic construct
  source 1..22: mol_type = other RNA
tccctgcagcagcatggggaga

SEQ ID NO: 11658 - RNA, 22 nt, synthetic construct
  source 1..22: mol_type = other RNA
tccgcctctcctctcacctctg

SEQ ID NO: 11659 - RNA, 22 nt, synthetic construct
  source 1..22: mol_type = other RNA
tcctctcacctctgagtctgca

SEQ ID NO: 11660 - RNA, 22 nt, synthetic construct
  source 1..22: mol_type = other RNA
tcctctgctgcctgaagtagct

SEQ ID NO: 11661 - RNA, 22 nt, synthetic construct
  source 1..22: mol_type = other RNA
tccttcagggacttggctttga

SEQ ID NO: 11662 - RNA, 22 nt, synthetic construct
  source 1..22: mol_type = other RNA
tcgagcctttcaaagccaagtc

SEQ ID NO: 11663 - RNA, 22 nt, synthetic construct
  source 1..22: mol_type = other RNA
tcgatggtgaacttctcctctg

SEQ ID NO: 11664 - RNA, 22 nt, synthetic construct
  source 1..22: mol_type = other RNA
tcgctcaaggcagccctgtgga

SEQ ID NO: 11665 - RNA, 22 nt, synthetic construct
  source 1..22: mol_type = other RNA
tctagcctggtcaccgtgcctg

SEQ ID NO: 11666 - RNA, 22 nt, synthetic construct
  source 1..22: mol_type = other RNA
tctcacctctgagtctgcacaa

SEQ ID NO: 11667 - RNA, 22 nt, synthetic construct
  source 1..22: mol_type = other RNA
tctccccatgctgctgcaggga

SEQ ID NO: 11668 - RNA, 22 nt, synthetic construct
  source 1..22: mol_type = other RNA
tctcctctcacctctgagtctg

SEQ ID NO: 11669 - RNA, 22 nt, synthetic construct
  source 1..22: mol_type = other RNA
tctcctctgctgcctgaagtag

SEQ ID NO: 11670 - RNA, 22 nt, synthetic construct
  source 1..22: mol_type = other RNA
tctgaggccctccctccacagg

SEQ ID NO: 11671 - RNA, 22 nt, synthetic construct
  source 1..22: mol_type = other RNA
tctgagtctgcacaagctttcc

SEQ ID NO: 11672 - RNA, 22 nt, synthetic construct
  source 1..22: mol_type = other RNA
tctgcacaagctttcccaggtc

SEQ ID NO: 11673 - RNA, 22 nt, synthetic construct
  source 1..22: mol_type = other RNA
tctgctgcctgaagtagcttgg

SEQ ID NO: 11674 - RNA, 22 nt, synthetic construct
  source 1..22: mol_type = other RNA
tcttccacatccttcagggact

SEQ ID NO: 11675 - RNA, 22 nt, synthetic construct
  source 1..22: mol_type = other RNA
tgaaaggctcgatggtgaactt

SEQ ID NO: 11676 - RNA, 22 nt, synthetic construct
  source 1..22: mol_type = other RNA
tgaaccacctcccatccgcctc

SEQ ID NO: 11677 - RNA, 22 nt, synthetic construct
  source 1..22: mol_type = other RNA
tgaacttctcctctgctgcctg

SEQ ID NO: 11678 - RNA, 22 nt, synthetic construct
  source 1..22: mol_type = other RNA
tgaaggatgtggaagacctggg

SEQ ID NO: 11679 - RNA, 22 nt, synthetic construct
  source 1..22: mol_type = other RNA
tgaagtagcttggtctccccat

SEQ ID NO: 11680 - RNA, 22 nt, synthetic construct
  source 1..22: mol_type = other RNA
tgagaggagaggcggatgggag

SEQ ID NO: 11681 - RNA, 22 nt, synthetic construct
  source 1..22: mol_type = other RNA
tgagcgacacggtggcgctgtg

SEQ ID NO: 11682 - RNA, 22 nt, synthetic construct
  source 1..22: mol_type = other RNA
tgaggccctccctccacagggc

SEQ ID NO: 11683 - RNA, 22 nt, synthetic construct
  source 1..22: mol_type = other RNA
tgagtctgcacaagctttccca

SEQ ID NO: 11684 - RNA, 22 nt, synthetic construct
  source 1..22: mol_type = other RNA
tgcacaagctttcccaggtctt

SEQ ID NO: 11685 - RNA, 22 nt, synthetic construct
  source 1..22: mol_type = other RNA
tgcagactcagaggtgagagga

SEQ ID NO: 11686 - RNA, 22 nt, synthetic construct
  source 1..22: mol_type = other RNA
tgcagcagcatggggagaccaa

SEQ ID NO: 11687 - RNA, 22 nt, synthetic construct
  source 1..22: mol_type = other RNA
tgcagggactcccacagcgcca

SEQ ID NO: 11688 - RNA, 22 nt, synthetic construct
  source 1..22: mol_type = other RNA
tgcatggcgtgaaccacctccc

SEQ ID NO: 11689 - RNA, 22 nt, synthetic construct
  source 1..22: mol_type = other RNA
tgcctgaagtagcttggtctcc

SEQ ID NO: 11690 - RNA, 22 nt, synthetic construct
  source 1..22: mol_type = other RNA
tgcctgggtctgaggccctccc

SEQ ID NO: 11691 - RNA, 22 nt, synthetic construct
  source 1..22: mol_type = other RNA
tgccttgagcgacacggtggcg

SEQ ID NO: 11692 - RNA, 22 nt, synthetic construct
  source 1..22: mol_type = other RNA
tgctgcagggactcccacagcg

SEQ ID NO: 11693 - RNA, 22 nt, synthetic construct
  source 1..22: mol_type = other RNA
tgctgcctgaagtagcttggtc

SEQ ID NO: 11694 - RNA, 22 nt, synthetic construct
  source 1..22: mol_type = other RNA
tgctgctgcagggactcccaca

SEQ ID NO: 11695 - RNA, 22 nt, synthetic construct
  source 1..22: mol_type = other RNA
tggaagacctgggaaagcttgt

SEQ ID NO: 11696 - RNA, 22 nt, synthetic construct
  source 1..22: mol_type = other RNA
tggagggagggcctcagaccca

SEQ ID NO: 11697 - RNA, 22 nt, synthetic construct
  source 1..22: mol_type = other RNA
tggcgctgtgggagtccctgca

SEQ ID NO: 11698 - RNA, 22 nt, synthetic construct
  source 1..22: mol_type = other RNA
tggcgtgaaccacctcccatcc

SEQ ID NO: 11699 - RNA, 22 nt, synthetic construct
  source 1..22: mol_type = other RNA
tggctttgaaaggctcgatggt

SEQ ID NO: 11700 - RNA, 22 nt, synthetic construct
  source 1..22: mol_type = other RNA
tgggaaagcttgtgcagactca

SEQ ID NO: 11701 - RNA, 22 nt, synthetic construct
  source 1..22: mol_type = other RNA
tgggagtccctgcagcagcatg

SEQ ID NO: 11702 - RNA, 22 nt, synthetic construct
  source 1..22: mol_type = other RNA
tggggagaccaagctacttcag

SEQ ID NO: 11703 - RNA, 22 nt, synthetic construct
  source 1..22: mol_type = other RNA
tgggtctgaggccctccctcca

SEQ ID NO: 11704 - RNA, 22 nt, synthetic construct
  source 1..22: mol_type = other RNA
tggtcaccgtgcctgggtctga

SEQ ID NO: 11705 - RNA, 22 nt, synthetic construct
  source 1..22: mol_type = other RNA
tggtctccccatgctgctgcag

SEQ ID NO: 11706 - RNA, 22 nt, synthetic construct
  source 1..22: mol_type = other RNA
tggtgaacttctcctctgctgc

SEQ ID NO: 11707 - RNA, 22 nt, synthetic construct
  source 1..22: mol_type = other RNA
tgtcgctcaaggcagccctgtg

SEQ ID NO: 11708 - RNA, 22 nt, synthetic construct
  source 1..22: mol_type = other RNA
tgtgcagactcagaggtgagag

SEQ ID NO: 11709 - RNA, 22 nt, synthetic construct
  source 1..22: mol_type = other RNA
tgtggaagacctgggaaagctt

SEQ ID NO: 11710 - RNA, 22 nt, synthetic construct
  source 1..22: mol_type = other RNA
tgtggagggagggcctcagacc

SEQ ID NO: 11711 - RNA, 22 nt, synthetic construct
  source 1..22: mol_type = other RNA
tgtgggagtccctgcagcagca

SEQ ID NO: 11712 - RNA, 22 nt, synthetic construct
  source 1..22: mol_type = other RNA
ttcaaagccaagtccctgaagg

SEQ ID NO: 11713 - RNA, 22 nt, synthetic construct
  source 1..22: mol_type = other RNA
ttcaccatcgagcctttcaaag

SEQ ID NO: 11714 - RNA, 22 nt, synthetic construct
  source 1..22: mol_type = other RNA
ttcaggcagcagaggagaagtt

SEQ ID NO: 11715 - RNA, 22 nt, synthetic construct
  source 1..22: mol_type = other RNA
ttcagggacttggctttgaaag

SEQ ID NO: 11716 - RNA, 22 nt, synthetic construct
  source 1..22: mol_type = other RNA
ttccacatccttcagggacttg

SEQ ID NO: 11717 - RNA, 22 nt, synthetic construct
  source 1..22: mol_type = other RNA
ttcccaggtcttccacatcctt

SEQ ID NO: 11718 - RNA, 22 nt, synthetic construct
  source 1..22: mol_type = other RNA
ttctcctctgctgcctgaagta

SEQ ID NO: 11719 - RNA, 22 nt, synthetic construct
  source 1..22: mol_type = other RNA
ttgaaaggctcgatggtgaact

SEQ ID NO: 11720 - RNA, 22 nt, synthetic construct
  source 1..22: mol_type = other RNA
ttgagcgacacggtggcgctgt

SEQ ID NO: 11721 - RNA, 22 nt, synthetic construct
  source 1..22: mol_type = other RNA
ttggctttgaaaggctcgatgg

SEQ ID NO: 11722 - RNA, 22 nt, synthetic construct
  source 1..22: mol_type = other RNA
ttggtctccccatgctgctgca

SEQ ID NO: 11723 - RNA, 22 nt, synthetic construct
  source 1..22: mol_type = other RNA
ttgtgcagactcagaggtgaga

SEQ ID NO: 11724 - RNA, 22 nt, synthetic construct
  source 1..22: mol_type = other RNA
tttcaaagccaagtccctgaag

SEQ ID NO: 11725 - RNA, 22 nt, synthetic construct
  source 1..22: mol_type = other RNA
tttcccaggtcttccacatcct

SEQ ID NO: 11726 - RNA, 22 nt, synthetic construct
  source 1..22: mol_type = other RNA
tttgaaaggctcgatggtgaac

SEQ ID NO: 11727 - RNA, 20 nt, synthetic construct
  source 1..20: mol_type = other RNA
aaaccttgcgcagacccaca

SEQ ID NO: 11728 - RNA, 20 nt, synthetic construct
  source 1..20: mol_type = other RNA
aaactccagtttctttaggt

SEQ ID NO: 11729 - RNA, 20 nt, synthetic construct
  source 1..20: mol_type = other RNA
aaactggagtttgcgtaagc

SEQ ID NO: 11730 - RNA, 20 nt, synthetic construct
  source 1..20: mol_type = other RNA
aaagaaactggagtttgcgt

SEQ ID NO: 11731 - RNA, 20 nt, synthetic construct
  source 1..20: mol_type = other RNA
aaaggggtggattgtcttgt

SEQ ID NO: 11732 - RNA, 20 nt, synthetic construct
  source 1..20: mol_type = other RNA
aacagcagggagctccccag

SEQ ID NO: 11733 - RNA, 20 nt, synthetic construct
  source 1..20: mol_type = other RNA
aacaggcaatgttaggggga

SEQ ID NO: 11734 - RNA, 20 nt, synthetic construct
  source 1..20: mol_type = other RNA
aacattgcctgttctctcca

SEQ ID NO: 11735 - RNA, 20 nt, synthetic construct
  source 1..20: mol_type = other RNA
aaccttgcgcagacccacaa

SEQ ID NO: 11736 - RNA, 20 nt, synthetic construct
  source 1..20: mol_type = other RNA
aactccagtttctttaggtc

SEQ ID NO: 11737 - RNA, 20 nt, synthetic construct
  source 1..20: mol_type = other RNA
aactggagtttgcgtaagca

SEQ ID NO: 11738 - RNA, 20 nt, synthetic construct
  source 1..20: mol_type = other RNA
aacttctcgtcctggagaga

SEQ ID NO: 11739 - RNA, 20 nt, synthetic construct
  source 1..20: mol_type = other RNA
aagaaactggagtttgcgta

SEQ ID NO: 11740 - RNA, 20 nt, synthetic construct
  source 1..20: mol_type = other RNA
aagacaatccacccctttgc

SEQ ID NO: 11741 - RNA, 20 nt, synthetic construct
  source 1..20: mol_type = other RNA
aagacacagctggggagctc

SEQ ID NO: 11742 - RNA, 20 nt, synthetic construct
  source 1..20: mol_type = other RNA
aagcaaaggggtggattgtc

SEQ ID NO: 11743 - RNA, 20 nt, synthetic construct
  source 1..20: mol_type = other RNA
aaggggtggattgtcttgtg

SEQ ID NO: 11744 - RNA, 20 nt, synthetic construct
  source 1..20: mol_type = other RNA
aagttcctcggaagacacag

SEQ ID NO: 11745 - RNA, 20 nt, synthetic construct
  source 1..20: mol_type = other RNA
aatccacccctttgcttacg

SEQ ID NO: 11746 - RNA, 20 nt, synthetic construct
  source 1..20: mol_type = other RNA
aatgttagggggagcaggca

SEQ ID NO: 11747 - RNA, 20 nt, synthetic construct
  source 1..20: mol_type = other RNA
acaagacaatccaccccttt

SEQ ID NO: 11748 - RNA, 20 nt, synthetic construct
  source 1..20: mol_type = other RNA
acaatccacccctttgctta

SEQ ID NO: 11749 - RNA, 20 nt, synthetic construct
  source 1..20: mol_type = other RNA
acacagctggggagctccct

SEQ ID NO: 11750 - RNA, 20 nt, synthetic construct
  source 1..20: mol_type = other RNA
acagcagggagctccccagc

SEQ ID NO: 11751 - RNA, 20 nt, synthetic construct
  source 1..20: mol_type = other RNA
acagcagtgcctgctccccc

SEQ ID NO: 11752 - RNA, 20 nt, synthetic construct
  source 1..20: mol_type = other RNA
acagctggggagctccctgc

SEQ ID NO: 11753 - RNA, 20 nt, synthetic construct
  source 1..20: mol_type = other RNA
acaggcaatgttagggggag

SEQ ID NO: 11754 - RNA, 20 nt, synthetic construct
  source 1..20: mol_type = other RNA
acattgcctgttctctccag

SEQ ID NO: 11755 - RNA, 20 nt, synthetic construct
  source 1..20: mol_type = other RNA
acccacaagacaatccaccc

SEQ ID NO: 11756 - RNA, 20 nt, synthetic construct
  source 1..20: mol_type = other RNA
acccctttgcttacgcaaac

SEQ ID NO: 11757 - RNA, 20 nt, synthetic construct
  source 1..20: mol_type = other RNA
acctaaagaaactggagttt

SEQ ID NO: 11758 - RNA, 20 nt, synthetic construct
  source 1..20: mol_type = other RNA
accttgcgcagacccacaag

SEQ ID NO: 11759 - RNA, 20 nt, synthetic construct
  source 1..20: mol_type = other RNA
acgagaagttcctcggaaga

SEQ ID NO: 11760 - RNA, 20 nt, synthetic construct
  source 1..20: mol_type = other RNA
acgcaaactccagtttcttt

SEQ ID NO: 11761 - RNA, 20 nt, synthetic construct
  source 1..20: mol_type = other RNA
actccagtttctttaggtcc

SEQ ID NO: 11762 - RNA, 20 nt, synthetic construct
  source 1..20: mol_type = other RNA
actggagtttgcgtaagcaa

SEQ ID NO: 11763 - RNA, 20 nt, synthetic construct
  source 1..20: mol_type = other RNA
acttctcgtcctggagagaa

SEQ ID NO: 11764 - RNA, 20 nt, synthetic construct
  source 1..20: mol_type = other RNA
agaaactggagtttgcgtaa

SEQ ID NO: 11765 - RNA, 20 nt, synthetic construct
  source 1..20: mol_type = other RNA
agaacaggcaatgttagggg

SEQ ID NO: 11766 - RNA, 20 nt, synthetic construct
  source 1..20: mol_type = other RNA
agaagttcctcggaagacac

SEQ ID NO: 11767 - RNA, 20 nt, synthetic construct
  source 1..20: mol_type = other RNA
agacaatccacccctttgct

SEQ ID NO: 11768 - RNA, 20 nt, synthetic construct
  source 1..20: mol_type = other RNA
agacacagctggggagctcc

SEQ ID NO: 11769 - RNA, 20 nt, synthetic construct
  source 1..20: mol_type = other RNA
agacccacaagacaatccac

SEQ ID NO: 11770 - RNA, 20 nt, synthetic construct
  source 1..20: mol_type = other RNA
agagaacaggcaatgttagg

SEQ ID NO: 11771 - RNA, 20 nt, synthetic construct
  source 1..20: mol_type = other RNA
agcaaaggggtggattgtct

SEQ ID NO: 11772 - RNA, 20 nt, synthetic construct
  source 1..20: mol_type = other RNA
agcagggagctccccagctg

SEQ ID NO: 11773 - RNA, 20 nt, synthetic construct
  source 1..20: mol_type = other RNA
agcagtgcctgctcccccta

SEQ ID NO: 11774 - RNA, 20 nt, synthetic construct
  source 1..20: mol_type = other RNA
agctccccagctgtgtcttc

SEQ ID NO: 11775 - RNA, 20 nt, synthetic construct
  source 1..20: mol_type = other RNA
agctccctgctgttcgggac

SEQ ID NO: 11776 - RNA, 20 nt, synthetic construct
  source 1..20: mol_type = other RNA
agctggggagctccctgctg

SEQ ID NO: 11777 - RNA, 20 nt, synthetic construct
  source 1..20: mol_type = other RNA
agctgtgtcttccgaggaac

SEQ ID NO: 11778 - RNA, 20 nt, synthetic construct
  source 1..20: mol_type = other RNA
aggaacttctcgtcctggag

SEQ ID NO: 11779 - RNA, 20 nt, synthetic construct
  source 1..20: mol_type = other RNA
aggacgagaagttcctcgga

SEQ ID NO: 11780 - RNA, 20 nt, synthetic construct
  source 1..20: mol_type = other RNA
aggcaatgttagggggagca

SEQ ID NO: 11781 - RNA, 20 nt, synthetic construct
  source 1..20: mol_type = other RNA
agggagctccccagctgtgt

SEQ ID NO: 11782 - RNA, 20 nt, synthetic construct
  source 1..20: mol_type = other RNA
aggggtggattgtcttgtgg

SEQ ID NO: 11783 - RNA, 20 nt, synthetic construct
  source 1..20: mol_type = other RNA
aggtcccgaacagcagggag

SEQ ID NO: 11784 - RNA, 20 nt, synthetic construct
  source 1..20: mol_type = other RNA
agtgacagcagtgcctgctc

SEQ ID NO: 11785 - RNA, 20 nt, synthetic construct
  source 1..20: mol_type = other RNA
agtgcctgctccccctaaca

SEQ ID NO: 11786 - RNA, 20 nt, synthetic construct
  source 1..20: mol_type = other RNA
agttcctcggaagacacagc

SEQ ID NO: 11787 - RNA, 20 nt, synthetic construct
  source 1..20: mol_type = other RNA
agtttctttaggtcccgaac

SEQ ID NO: 11788 - RNA, 20 nt, synthetic construct
  source 1..20: mol_type = other RNA
agtttgcgtaagcaaagggg

SEQ ID NO: 11789 - RNA, 20 nt, synthetic construct
  source 1..20: mol_type = other RNA
atccacccctttgcttacgc

SEQ ID NO: 11790 - RNA, 20 nt, synthetic construct
  source 1..20: mol_type = other RNA
atgttagggggagcaggcac

SEQ ID NO: 11791 - RNA, 20 nt, synthetic construct
  source 1..20: mol_type = other RNA
attgcctgttctctccagga

SEQ ID NO: 11792 - RNA, 20 nt, synthetic construct
  source 1..20: mol_type = other RNA
attgtcttgtgggtctgcgc

SEQ ID NO: 11793 - RNA, 20 nt, synthetic construct
  source 1..20: mol_type = other RNA
caaactccagtttctttagg

SEQ ID NO: 11794 - RNA, 20 nt, synthetic construct
  source 1..20: mol_type = other RNA
caaaggggtggattgtcttg

SEQ ID NO: 11795 - RNA, 20 nt, synthetic construct
  source 1..20: mol_type = other RNA
caagacaatccacccctttg

SEQ ID NO: 11796 - RNA, 20 nt, synthetic construct
  source 1..20: mol_type = other RNA
caatccacccctttgcttac

SEQ ID NO: 11797 - RNA, 20 nt, synthetic construct
  source 1..20: mol_type = other RNA
caatgttagggggagcaggc

SEQ ID NO: 11798 - RNA, 20 nt, synthetic construct
  source 1..20: mol_type = other RNA
cacaagacaatccacccctt

SEQ ID NO: 11799 - RNA, 20 nt, synthetic construct
  source 1..20: mol_type = other RNA
cacagctggggagctccctg

SEQ ID NO: 11800 - RNA, 20 nt, synthetic construct
  source 1..20: mol_type = other RNA
cacccctttgcttacgcaaa

SEQ ID NO: 11801 - RNA, 20 nt, synthetic construct
  source 1..20: mol_type = other RNA
cagacccacaagacaatcca

SEQ ID NO: 11802 - RNA, 20 nt, synthetic construct
  source 1..20: mol_type = other RNA
cagcagggagctccccagct

SEQ ID NO: 11803 - RNA, 20 nt, synthetic construct
  source 1..20: mol_type = other RNA
cagcagtgcctgctccccct

SEQ ID NO: 11804 - RNA, 20 nt, synthetic construct
  source 1..20: mol_type = other RNA
cagctggggagctccctgct

SEQ ID NO: 11805 - RNA, 20 nt, synthetic construct
  source 1..20: mol_type = other RNA
cagctgtgtcttccgaggaa

SEQ ID NO: 11806 - RNA, 20 nt, synthetic construct
  source 1..20: mol_type = other RNA
caggacgagaagttcctcgg

SEQ ID NO: 11807 - RNA, 20 nt, synthetic construct
  source 1..20: mol_type = other RNA
caggcaatgttagggggagc

SEQ ID NO: 11808 - RNA, 20 nt, synthetic construct
  source 1..20: mol_type = other RNA
cagggagctccccagctgtg

SEQ ID NO: 11809 - RNA, 20 nt, synthetic construct
  source 1..20: mol_type = other RNA
cagtgcctgctccccctaac

SEQ ID NO: 11810 - RNA, 20 nt, synthetic construct
  source 1..20: mol_type = other RNA
cagtttctttaggtcccgaa

SEQ ID NO: 11811 - RNA, 20 nt, synthetic construct
  source 1..20: mol_type = other RNA
cattgcctgttctctccagg

SEQ ID NO: 11812 - RNA, 20 nt, synthetic construct
  source 1..20: mol_type = other RNA
ccacaagacaatccacccct

SEQ ID NO: 11813 - RNA, 20 nt, synthetic construct
  source 1..20: mol_type = other RNA
ccacccctttgcttacgcaa

SEQ ID NO: 11814 - RNA, 20 nt, synthetic construct
  source 1..20: mol_type = other RNA
ccagctgtgtcttccgagga

SEQ ID NO: 11815 - RNA, 20 nt, synthetic construct
  source 1..20: mol_type = other RNA
ccaggacgagaagttcctcg

SEQ ID NO: 11816 - RNA, 20 nt, synthetic construct
  source 1..20: mol_type = other RNA
ccagtttctttaggtcccga

SEQ ID NO: 11817 - RNA, 20 nt, synthetic construct
  source 1..20: mol_type = other RNA
cccacaagacaatccacccc

SEQ ID NO: 11818 - RNA, 20 nt, synthetic construct
  source 1..20: mol_type = other RNA
cccagctgtgtcttccgagg

SEQ ID NO: 11819 - RNA, 20 nt, synthetic construct
  source 1..20: mol_type = other RNA
ccccagctgtgtcttccgag

SEQ ID NO: 11820 - RNA, 20 nt, synthetic construct
  source 1..20: mol_type = other RNA
ccccctaacattgcctgttc

SEQ ID NO: 11821 - RNA, 20 nt, synthetic construct
  source 1..20: mol_type = other RNA
cccctaacattgcctgttct

SEQ ID NO: 11822 - RNA, 20 nt, synthetic construct
  source 1..20: mol_type = other RNA
cccctttgcttacgcaaact

SEQ ID NO: 11823 - RNA, 20 nt, synthetic construct
  source 1..20: mol_type = other RNA
cccgaacagcagggagctcc

SEQ ID NO: 11824 - RNA, 20 nt, synthetic construct
  source 1..20: mol_type = other RNA
ccctaacattgcctgttctc

SEQ ID NO: 11825 - RNA, 20 nt, synthetic construct
  source 1..20: mol_type = other RNA
ccctgctgttcgggacctaa

SEQ ID NO: 11826 - RNA, 20 nt, synthetic construct
  source 1..20: mol_type = other RNA
ccctttgcttacgcaaactc

SEQ ID NO: 11827 - RNA, 20 nt, synthetic construct
  source 1..20: mol_type = other RNA
ccgaacagcagggagctccc

SEQ ID NO: 11828 - RNA, 20 nt, synthetic construct
  source 1..20: mol_type = other RNA
ccgaggaacttctcgtcctg

SEQ ID NO: 11829 - RNA, 20 nt, synthetic construct
  source 1..20: mol_type = other RNA
cctaaagaaactggagtttg

SEQ ID NO: 11830 - RNA, 20 nt, synthetic construct
  source 1..20: mol_type = other RNA
cctaacattgcctgttctct

SEQ ID NO: 11831 - RNA, 20 nt, synthetic construct
  source 1..20: mol_type = other RNA
cctcggaagacacagctggg

SEQ ID NO: 11832 - RNA, 20 nt, synthetic construct
  source 1..20: mol_type = other RNA
cctgctccccctaacattgc

SEQ ID NO: 11833 - RNA, 20 nt, synthetic construct
  source 1..20: mol_type = other RNA
cctgctgttcgggacctaaa

SEQ ID NO: 11834 - RNA, 20 nt, synthetic construct
  source 1..20: mol_type = other RNA
cctggagagaacaggcaatg

SEQ ID NO: 11835 - RNA, 20 nt, synthetic construct
  source 1..20: mol_type = other RNA
cctgttctctccaggacgag

SEQ ID NO: 11836 - RNA, 20 nt, synthetic construct
  source 1..20: mol_type = other RNA
ccttgcgcagacccacaaga

SEQ ID NO: 11837 - RNA, 20 nt, synthetic construct
  source 1..20: mol_type = other RNA
cctttgcttacgcaaactcc

SEQ ID NO: 11838 - RNA, 20 nt, synthetic construct
  source 1..20: mol_type = other RNA
cgaacagcagggagctcccc

SEQ ID NO: 11839 - RNA, 20 nt, synthetic construct
  source 1..20: mol_type = other RNA
cgagaagttcctcggaagac

SEQ ID NO: 11840 - RNA, 20 nt, synthetic construct
  source 1..20: mol_type = other RNA
cgaggaacttctcgtcctgg

SEQ ID NO: 11841 - RNA, 20 nt, synthetic construct
  source 1..20: mol_type = other RNA
cgcaaactccagtttcttta

SEQ ID NO: 11842 - RNA, 20 nt, synthetic construct
  source 1..20: mol_type = other RNA
cgcagacccacaagacaatc

SEQ ID NO: 11843 - RNA, 20 nt, synthetic construct
  source 1..20: mol_type = other RNA
cggaagacacagctggggag

SEQ ID NO: 11844 - RNA, 20 nt, synthetic construct
  source 1..20: mol_type = other RNA
cgggacctaaagaaactgga

SEQ ID NO: 11845 - RNA, 20 nt, synthetic construct
  source 1..20: mol_type = other RNA
cgtaagcaaaggggtggatt

SEQ ID NO: 11846 - RNA, 20 nt, synthetic construct
  source 1..20: mol_type = other RNA
cgtcctggagagaacaggca

SEQ ID NO: 11847 - RNA, 20 nt, synthetic construct
  source 1..20: mol_type = other RNA
ctaaagaaactggagtttgc

SEQ ID NO: 11848 - RNA, 20 nt, synthetic construct
  source 1..20: mol_type = other RNA
ctaacattgcctgttctctc

SEQ ID NO: 11849 - RNA, 20 nt, synthetic construct
  source 1..20: mol_type = other RNA
ctccaggacgagaagttcct

SEQ ID NO: 11850 - RNA, 20 nt, synthetic construct
  source 1..20: mol_type = other RNA
ctccagtttctttaggtccc

SEQ ID NO: 11851 - RNA, 20 nt, synthetic construct
  source 1..20: mol_type = other RNA
ctccccagctgtgtcttccg

SEQ ID NO: 11852 - RNA, 20 nt, synthetic construct
  source 1..20: mol_type = other RNA
ctccccctaacattgcctgt

SEQ ID NO: 11853 - RNA, 20 nt, synthetic construct
  source 1..20: mol_type = other RNA
ctccctgctgttcgggacct

SEQ ID NO: 11854 - RNA, 20 nt, synthetic construct
  source 1..20: mol_type = other RNA
ctcggaagacacagctgggg

SEQ ID NO: 11855 - RNA, 20 nt, synthetic construct
  source 1..20: mol_type = other RNA
ctcgtcctggagagaacagg

SEQ ID NO: 11856 - RNA, 20 nt, synthetic construct
  source 1..20: mol_type = other RNA
ctctccaggacgagaagttc

SEQ ID NO: 11857 - RNA, 20 nt, synthetic construct
  source 1..20: mol_type = other RNA
ctgctccccctaacattgcc

SEQ ID NO: 11858 - RNA, 20 nt, synthetic construct
  source 1..20: mol_type = other RNA
ctgctgttcgggacctaaag

SEQ ID NO: 11859 - RNA, 20 nt, synthetic construct
  source 1..20: mol_type = other RNA
ctggagagaacaggcaatgt

SEQ ID NO: 11860 - RNA, 20 nt, synthetic construct
  source 1..20: mol_type = other RNA
ctggagtttgcgtaagcaaa

SEQ ID NO: 11861 - RNA, 20 nt, synthetic construct
  source 1..20: mol_type = other RNA
ctggggagctccctgctgtt

SEQ ID NO: 11862 - RNA, 20 nt, synthetic construct
  source 1..20: mol_type = other RNA
ctgtgtcttccgaggaactt

SEQ ID NO: 11863 - RNA, 20 nt, synthetic construct
  source 1..20: mol_type = other RNA
ctgttcgggacctaaagaaa

SEQ ID NO: 11864 - RNA, 20 nt, synthetic construct
  source 1..20: mol_type = other RNA
ctgttctctccaggacgaga

SEQ ID NO: 11865 - RNA, 20 nt, synthetic construct
  source 1..20: mol_type = other RNA
cttacgcaaactccagtttc

SEQ ID NO: 11866 - RNA, 20 nt, synthetic construct
  source 1..20: mol_type = other RNA
cttccgaggaacttctcgtc

SEQ ID NO: 11867 - RNA, 20 nt, synthetic construct
  source 1..20: mol_type = other RNA
cttctcgtcctggagagaac

SEQ ID NO: 11868 - RNA, 20 nt, synthetic construct
  source 1..20: mol_type = other RNA
cttgcgcagacccacaagac

SEQ ID NO: 11869 - RNA, 20 nt, synthetic construct
  source 1..20: mol_type = other RNA
ctttaggtcccgaacagcag

SEQ ID NO: 11870 - RNA, 20 nt, synthetic construct
  source 1..20: mol_type = other RNA
ctttgcttacgcaaactcca

SEQ ID NO: 11871 - RNA, 20 nt, synthetic construct
  source 1..20: mol_type = other RNA
gaaaccttgcgcagacccac

SEQ ID NO: 11872 - RNA, 20 nt, synthetic construct
  source 1..20: mol_type = other RNA
gaaactggagtttgcgtaag

SEQ ID NO: 11873 - RNA, 20 nt, synthetic construct
  source 1..20: mol_type = other RNA
gaacagcagggagctcccca

SEQ ID NO: 11874 - RNA, 20 nt, synthetic construct
  source 1..20: mol_type = other RNA
gaacaggcaatgttaggggg

SEQ ID NO: 11875 - RNA, 20 nt, synthetic construct
  source 1..20: mol_type = other RNA
gaacttctcgtcctggagag

SEQ ID NO: 11876 - RNA, 20 nt, synthetic construct
  source 1..20: mol_type = other RNA
gaagacacagctggggagct

SEQ ID NO: 11877 - RNA, 20 nt, synthetic construct
  source 1..20: mol_type = other RNA
gaagttcctcggaagacaca

SEQ ID NO: 11878 - RNA, 20 nt, synthetic construct
  source 1..20: mol_type = other RNA
gacaatccacccctttgctt

SEQ ID NO: 11879 - RNA, 20 nt, synthetic construct
  source 1..20: mol_type = other RNA
gacacagctggggagctccc

SEQ ID NO: 11880 - RNA, 20 nt, synthetic construct
  source 1..20: mol_type = other RNA
gacagcagtgcctgctcccc

SEQ ID NO: 11881 - RNA, 20 nt, synthetic construct
  source 1..20: mol_type = other RNA
gacccacaagacaatccacc

SEQ ID NO: 11882 - RNA, 20 nt, synthetic construct
  source 1..20: mol_type = other RNA
gacctaaagaaactggagtt

SEQ ID NO: 11883 - RNA, 20 nt, synthetic construct
  source 1..20: mol_type = other RNA
gacgagaagttcctcggaag

SEQ ID NO: 11884 - RNA, 20 nt, synthetic construct
  source 1..20: mol_type = other RNA
gagaacaggcaatgttaggg

SEQ ID NO: 11885 - RNA, 20 nt, synthetic construct
  source 1..20: mol_type = other RNA
gagaagttcctcggaagaca

SEQ ID NO: 11886 - RNA, 20 nt, synthetic construct
  source 1..20: mol_type = other RNA
gagagaacaggcaatgttag

SEQ ID NO: 11887 - RNA, 20 nt, synthetic construct
  source 1..20: mol_type = other RNA
gagctccccagctgtgtctt

SEQ ID NO: 11888 - RNA, 20 nt, synthetic construct
  source 1..20: mol_type = other RNA
gagctccctgctgttcggga

SEQ ID NO: 11889 - RNA, 20 nt, synthetic construct
  source 1..20: mol_type = other RNA
gaggaacttctcgtcctgga

SEQ ID NO: 11890 - RNA, 20 nt, synthetic construct
  source 1..20: mol_type = other RNA
gagtttgcgtaagcaaaggg

SEQ ID NO: 11891 - RNA, 20 nt, synthetic construct
  source 1..20: mol_type = other RNA
gattgtcttgtgggtctgcg

SEQ ID NO: 11892 - RNA, 20 nt, synthetic construct
  source 1..20: mol_type = other RNA
gcaaactccagtttctttag

SEQ ID NO: 11893 - RNA, 20 nt, synthetic construct
  source 1..20: mol_type = other RNA
gcaaaggggtggattgtctt

SEQ ID NO: 11894 - RNA, 20 nt, synthetic construct
  source 1..20: mol_type = other RNA
gcaatgttagggggagcagg

SEQ ID NO: 11895 - RNA, 20 nt, synthetic construct
  source 1..20: mol_type = other RNA
gcagacccacaagacaatcc

SEQ ID NO: 11896 - RNA, 20 nt, synthetic construct
  source 1..20: mol_type = other RNA
gcagggagctccccagctgt

SEQ ID NO: 11897 - RNA, 20 nt, synthetic construct
  source 1..20: mol_type = other RNA
gcagtgcctgctccccctaa

SEQ ID NO: 11898 - RNA, 20 nt, synthetic construct
  source 1..20: mol_type = other RNA
gcctgctccccctaacattg

SEQ ID NO: 11899 - RNA, 20 nt, synthetic construct
  source 1..20: mol_type = other RNA
gcctgttctctccaggacga

SEQ ID NO: 11900 - RNA, 20 nt, synthetic construct
  source 1..20: mol_type = other RNA
gcgcagacccacaagacaat

SEQ ID NO: 11901 - RNA, 20 nt, synthetic construct
  source 1..20: mol_type = other RNA
gcgtaagcaaaggggtggat

SEQ ID NO: 11902 - RNA, 20 nt, synthetic construct
  source 1..20: mol_type = other RNA
gctccccagctgtgtcttcc

SEQ ID NO: 11903 - RNA, 20 nt, synthetic construct
  source 1..20: mol_type = other RNA
gctccccctaacattgcctg

SEQ ID NO: 11904 - RNA, 20 nt, synthetic construct
  source 1..20: mol_type = other RNA
gctccctgctgttcgggacc

SEQ ID NO: 11905 - RNA, 20 nt, synthetic construct
  source 1..20: mol_type = other RNA
gctggggagctccctgctgt

SEQ ID NO: 11906 - RNA, 20 nt, synthetic construct
  source 1..20: mol_type = other RNA
gctgtgtcttccgaggaact

SEQ ID NO: 11907 - RNA, 20 nt, synthetic construct
  source 1..20: mol_type = other RNA
gctgttcgggacctaaagaa

SEQ ID NO: 11908 - RNA, 20 nt, synthetic construct
  source 1..20: mol_type = other RNA
gcttacgcaaactccagttt

SEQ ID NO: 11909 - RNA, 20 nt, synthetic construct
  source 1..20: mol_type = other RNA
ggaaaccttgcgcagaccca

SEQ ID NO: 11910 - RNA, 20 nt, synthetic construct
  source 1..20: mol_type = other RNA
ggaacttctcgtcctggaga

SEQ ID NO: 11911 - RNA, 20 nt, synthetic construct
  source 1..20: mol_type = other RNA
ggaagacacagctggggagc

SEQ ID NO: 11912 - RNA, 20 nt, synthetic construct
  source 1..20: mol_type = other RNA
ggacctaaagaaactggagt

SEQ ID NO: 11913 - RNA, 20 nt, synthetic construct
  source 1..20: mol_type = other RNA
ggacgagaagttcctcggaa

SEQ ID NO: 11914 - RNA, 20 nt, synthetic construct
  source 1..20: mol_type = other RNA
ggagagaacaggcaatgtta

SEQ ID NO: 11915 - RNA, 20 nt, synthetic construct
  source 1..20: mol_type = other RNA
ggagctccccagctgtgtct

SEQ ID NO: 11916 - RNA, 20 nt, synthetic construct
  source 1..20: mol_type = other RNA
ggagctccctgctgttcggg

SEQ ID NO: 11917 - RNA, 20 nt, synthetic construct
  source 1..20: mol_type = other RNA
ggagtttgcgtaagcaaagg

SEQ ID NO: 11918 - RNA, 20 nt, synthetic construct
  source 1..20: mol_type = other RNA
ggattgtcttgtgggtctgc

SEQ ID NO: 11919 - RNA, 20 nt, synthetic construct
  source 1..20: mol_type = other RNA
ggcaatgttagggggagcag

SEQ ID NO: 11920 - RNA, 20 nt, synthetic construct
  source 1..20: mol_type = other RNA
gggacctaaagaaactggag

SEQ ID NO: 11921 - RNA, 20 nt, synthetic construct
  source 1..20: mol_type = other RNA
gggagctccccagctgtgtc

SEQ ID NO: 11922 - RNA, 20 nt, synthetic construct
  source 1..20: mol_type = other RNA
gggagctccctgctgttcgg

SEQ ID NO: 11923 - RNA, 20 nt, synthetic construct
  source 1..20: mol_type = other RNA
ggggagctccctgctgttcg

SEQ ID NO: 11924 - RNA, 20 nt, synthetic construct
  source 1..20: mol_type = other RNA
ggggtggattgtcttgtggg

SEQ ID NO: 11925 - RNA, 20 nt, synthetic construct
  source 1..20: mol_type = other RNA
gggtggattgtcttgtgggt

SEQ ID NO: 11926 - RNA, 20 nt, synthetic construct
  source 1..20: mol_type = other RNA
ggtcccgaacagcagggagc

SEQ ID NO: 11927 - RNA, 20 nt, synthetic construct
  source 1..20: mol_type = other RNA
ggtggattgtcttgtgggtc

SEQ ID NO: 11928 - RNA, 20 nt, synthetic construct
  source 1..20: mol_type = other RNA
gtaagcaaaggggtggattg

SEQ ID NO: 11929 - RNA, 20 nt, synthetic construct
  source 1..20: mol_type = other RNA
gtcccgaacagcagggagct

SEQ ID NO: 11930 - RNA, 20 nt, synthetic construct
  source 1..20: mol_type = other RNA
gtcctggagagaacaggcaa

SEQ ID NO: 11931 - RNA, 20 nt, synthetic construct
  source 1..20: mol_type = other RNA
gtcttccgaggaacttctcg

SEQ ID NO: 11932 - RNA, 20 nt, synthetic construct
  source 1..20: mol_type = other RNA
gtgacagcagtgcctgctcc

SEQ ID NO: 11933 - RNA, 20 nt, synthetic construct
  source 1..20: mol_type = other RNA
gtgcctgctccccctaacat

SEQ ID NO: 11934 - RNA, 20 nt, synthetic construct
  source 1..20: mol_type = other RNA
gtggattgtcttgtgggtct

SEQ ID NO: 11935 - RNA, 20 nt, synthetic construct
  source 1..20: mol_type = other RNA
gtgtcttccgaggaacttct

SEQ ID NO: 11936 - RNA, 20 nt, synthetic construct
  source 1..20: mol_type = other RNA
gttagggggagcaggcactg

SEQ ID NO: 11937 - RNA, 20 nt, synthetic construct
  source 1..20: mol_type = other RNA
gttcctcggaagacacagct

SEQ ID NO: 11938 - RNA, 20 nt, synthetic construct
  source 1..20: mol_type = other RNA
gttcgggacctaaagaaact

SEQ ID NO: 11939 - RNA, 20 nt, synthetic construct
  source 1..20: mol_type = other RNA
gttctctccaggacgagaag

SEQ ID NO: 11940 - RNA, 20 nt, synthetic construct
  source 1..20: mol_type = other RNA
gtttctttaggtcccgaaca

SEQ ID NO: 11941 - RNA, 20 nt, synthetic construct
  source 1..20: mol_type = other RNA
gtttgcgtaagcaaaggggt

SEQ ID NO: 11942 - RNA, 20 nt, synthetic construct
  source 1..20: mol_type = other RNA
taaagaaactggagtttgcg

SEQ ID NO: 11943 - RNA, 20 nt, synthetic construct
  source 1..20: mol_type = other RNA
taacattgcctgttctctcc

SEQ ID NO: 11944 - RNA, 20 nt, synthetic construct
  source 1..20: mol_type = other RNA
taagcaaaggggtggattgt

SEQ ID NO: 11945 - RNA, 20 nt, synthetic construct
  source 1..20: mol_type = other RNA
tacgcaaactccagtttctt

SEQ ID NO: 11946 - RNA, 20 nt, synthetic construct
  source 1..20: mol_type = other RNA
taggtcccgaacagcaggga

SEQ ID NO: 11947 - RNA, 20 nt, synthetic construct
  source 1..20: mol_type = other RNA
tccacccctttgcttacgca

SEQ ID NO: 11948 - RNA, 20 nt, synthetic construct
  source 1..20: mol_type = other RNA
tccaggacgagaagttcctc

SEQ ID NO: 11949 - RNA, 20 nt, synthetic construct
  source 1..20: mol_type = other RNA
tccagtttctttaggtcccg

SEQ ID NO: 11950 - RNA, 20 nt, synthetic construct
  source 1..20: mol_type = other RNA
tccccagctgtgtcttccga

SEQ ID NO: 11951 - RNA, 20 nt, synthetic construct
  source 1..20: mol_type = other RNA
tccccctaacattgcctgtt

SEQ ID NO: 11952 - RNA, 20 nt, synthetic construct
  source 1..20: mol_type = other RNA
tcccgaacagcagggagctc

SEQ ID NO: 11953 - RNA, 20 nt, synthetic construct
  source 1..20: mol_type = other RNA
tccctgctgttcgggaccta

SEQ ID NO: 11954 - RNA, 20 nt, synthetic construct
  source 1..20: mol_type = other RNA
tccgaggaacttctcgtcct

SEQ ID NO: 11955 - RNA, 20 nt, synthetic construct
  source 1..20: mol_type = other RNA
tcctcggaagacacagctgg

SEQ ID NO: 11956 - RNA, 20 nt, synthetic construct
  source 1..20: mol_type = other RNA
tcctggagagaacaggcaat

SEQ ID NO: 11957 - RNA, 20 nt, synthetic construct
  source 1..20: mol_type = other RNA
tcggaagacacagctgggga

SEQ ID NO: 11958 - RNA, 20 nt, synthetic construct
  source 1..20: mol_type = other RNA
tcgggacctaaagaaactgg

SEQ ID NO: 11959 - RNA, 20 nt, synthetic construct
  source 1..20: mol_type = other RNA
tcgtcctggagagaacaggc

SEQ ID NO: 11960 - RNA, 20 nt, synthetic construct
  source 1..20: mol_type = other RNA
tctccaggacgagaagttcc

SEQ ID NO: 11961 - RNA, 20 nt, synthetic construct
  source 1..20: mol_type = other RNA
tctcgtcctggagagaacag

SEQ ID NO: 11962 - RNA, 20 nt, synthetic construct
  source 1..20: mol_type = other RNA
tctctccaggacgagaagtt

SEQ ID NO: 11963 - RNA, 20 nt, synthetic construct
  source 1..20: mol_type = other RNA
tcttccgaggaacttctcgt

SEQ ID NO: 11964 - RNA, 20 nt, synthetic construct
  source 1..20: mol_type = other RNA
tctttaggtcccgaacagca

SEQ ID NO: 11965 - RNA, 20 nt, synthetic construct
  source 1..20: mol_type = other RNA
tgacagcagtgcctgctccc

SEQ ID NO: 11966 - RNA, 20 nt, synthetic construct
  source 1..20: mol_type = other RNA
tgcctgctccccctaacatt

SEQ ID NO: 11967 - RNA, 20 nt, synthetic construct
  source 1..20: mol_type = other RNA
tgcctgttctctccaggacg

SEQ ID NO: 11968 - RNA, 20 nt, synthetic construct
  source 1..20: mol_type = other RNA
tgcgcagacccacaagacaa

SEQ ID NO: 11969 - RNA, 20 nt, synthetic construct
  source 1..20: mol_type = other RNA
tgcgtaagcaaaggggtgga

SEQ ID NO: 11970 - RNA, 20 nt, synthetic construct
  source 1..20: mol_type = other RNA
tgctccccctaacattgcct

SEQ ID NO: 11971 - RNA, 20 nt, synthetic construct
  source 1..20: mol_type = other RNA
tgctgttcgggacctaaaga

SEQ ID NO: 11972 - RNA, 20 nt, synthetic construct
  source 1..20: mol_type = other RNA
tgcttacgcaaactccagtt

SEQ ID NO: 11973 - RNA, 20 nt, synthetic construct
  source 1..20: mol_type = other RNA
tggagagaacaggcaatgtt

SEQ ID NO: 11974 - RNA, 20 nt, synthetic construct
  source 1..20: mol_type = other RNA
tggagtttgcgtaagcaaag

SEQ ID NO: 11975 - RNA, 20 nt, synthetic construct
  source 1..20: mol_type = other RNA
tggattgtcttgtgggtctg

SEQ ID NO: 11976 - RNA, 20 nt, synthetic construct
  source 1..20: mol_type = other RNA
tggggagctccctgctgttc

SEQ ID NO: 11977 - RNA, 20 nt, synthetic construct
  source 1..20: mol_type = other RNA
tgtcttccgaggaacttctc

SEQ ID NO: 11978 - RNA, 20 nt, synthetic construct
  source 1..20: mol_type = other RNA
tgtgtcttccgaggaacttc

SEQ ID NO: 11979 - RNA, 20 nt, synthetic construct
  source 1..20: mol_type = other RNA
tgttagggggagcaggcact

SEQ ID NO: 11980 - RNA, 20 nt, synthetic construct
  source 1..20: mol_type = other RNA
tgttcgggacctaaagaaac

SEQ ID NO: 11981 - RNA, 20 nt, synthetic construct
  source 1..20: mol_type = other RNA
tgttctctccaggacgagaa

SEQ ID NO: 11982 - RNA, 20 nt, synthetic construct
  source 1..20: mol_type = other RNA
ttacgcaaactccagtttct

SEQ ID NO: 11983 - RNA, 20 nt, synthetic construct
  source 1..20: mol_type = other RNA
ttaggtcccgaacagcaggg

SEQ ID NO: 11984 - RNA, 20 nt, synthetic construct
  source 1..20: mol_type = other RNA
ttccgaggaacttctcgtcc

SEQ ID NO: 11985 - RNA, 20 nt, synthetic construct
  source 1..20: mol_type = other RNA
ttcctcggaagacacagctg

SEQ ID NO: 11986 - RNA, 20 nt, synthetic construct
  source 1..20: mol_type = other RNA
ttcgggacctaaagaaactg

SEQ ID NO: 11987 - RNA, 20 nt, synthetic construct
  source 1..20: mol_type = other RNA
ttctcgtcctggagagaaca

SEQ ID NO: 11988 - RNA, 20 nt, synthetic construct
  source 1..20: mol_type = other RNA
ttctctccaggacgagaagt

SEQ ID NO: 11989 - RNA, 20 nt, synthetic construct
  source 1..20: mol_type = other RNA
ttctttaggtcccgaacagc

SEQ ID NO: 11990 - RNA, 20 nt, synthetic construct
  source 1..20: mol_type = other RNA
ttgcctgttctctccaggac

SEQ ID NO: 11991 - RNA, 20 nt, synthetic construct
  source 1..20: mol_type = other RNA
ttgcgcagacccacaagaca

SEQ ID NO: 11992 - RNA, 20 nt, synthetic construct
  source 1..20: mol_type = other RNA
ttgcgtaagcaaaggggtgg

SEQ ID NO: 11993 - RNA, 20 nt, synthetic construct
  source 1..20: mol_type = other RNA
ttgcttacgcaaactccagt

SEQ ID NO: 11994 - RNA, 20 nt, synthetic construct
  source 1..20: mol_type = other RNA
ttgtcttgtgggtctgcgca

SEQ ID NO: 11995 - RNA, 20 nt, synthetic construct
  source 1..20: mol_type = other RNA
tttaggtcccgaacagcagg

SEQ ID NO: 11996 - RNA, 20 nt, synthetic construct
  source 1..20: mol_type = other RNA
tttctttaggtcccgaacag

SEQ ID NO: 11997 - RNA, 20 nt, synthetic construct
  source 1..20: mol_type = other RNA
tttgcgtaagcaaaggggtg

SEQ ID NO: 11998 - RNA, 20 nt, synthetic construct
  source 1..20: mol_type = other RNA
tttgcttacgcaaactccag

SEQ ID NO: 11999 - RNA, 21 nt, synthetic construct
  source 1..21: mol_type = other RNA
aaaccttgcgcagacccacaa

SEQ ID NO: 12000 - RNA, 21 nt, synthetic construct
  source 1..21: mol_type = other RNA
aaactccagtttctttaggtc

SEQ ID NO: 12001 - RNA, 21 nt, synthetic construct
  source 1..21: mol_type = other RNA
aaactggagtttgcgtaagca

SEQ ID NO: 12002 - RNA, 21 nt, synthetic construct
  source 1..21: mol_type = other RNA
aaagaaactggagtttgcgta

SEQ ID NO: 12003 - RNA, 21 nt, synthetic construct
  source 1..21: mol_type = other RNA
aaaggggtggattgtcttgtg

SEQ ID NO: 12004 - RNA, 21 nt, synthetic construct
  source 1..21: mol_type = other RNA
aacagcagggagctccccagc

SEQ ID NO: 12005 - RNA, 21 nt, synthetic construct
  source 1..21: mol_type = other RNA
aacaggcaatgttagggggag

SEQ ID NO: 12006 - RNA, 21 nt, synthetic construct
  source 1..21: mol_type = other RNA
aacattgcctgttctctccag

SEQ ID NO: 12007 - RNA, 21 nt, synthetic construct
  source 1..21: mol_type = other RNA
aaccttgcgcagacccacaag

SEQ ID NO: 12008 - RNA, 21 nt, synthetic construct
  source 1..21: mol_type = other RNA
aactccagtttctttaggtcc

SEQ ID NO: 12009 - RNA, 21 nt, synthetic construct
  source 1..21: mol_type = other RNA
aactggagtttgcgtaagcaa

SEQ ID NO: 12010 - RNA, 21 nt, synthetic construct
  source 1..21: mol_type = other RNA
aacttctcgtcctggagagaa

SEQ ID NO: 12011 - RNA, 21 nt, synthetic construct
  source 1..21: mol_type = other RNA
aagaaactggagtttgcgtaa

SEQ ID NO: 12012 - RNA, 21 nt, synthetic construct
  source 1..21: mol_type = other RNA
aagacaatccacccctttgct

SEQ ID NO: 12013 - RNA, 21 nt, synthetic construct
  source 1..21: mol_type = other RNA
aagacacagctggggagctcc

SEQ ID NO: 12014 - RNA, 21 nt, synthetic construct
  source 1..21: mol_type = other RNA
aagcaaaggggtggattgtct

SEQ ID NO: 12015 - RNA, 21 nt, synthetic construct
  source 1..21: mol_type = other RNA
aaggggtggattgtcttgtgg

SEQ ID NO: 12016 - RNA, 21 nt, synthetic construct
  source 1..21: mol_type = other RNA
aagttcctcggaagacacagc

SEQ ID NO: 12017 - RNA, 21 nt, synthetic construct
  source 1..21: mol_type = other RNA
aatccacccctttgcttacgc

SEQ ID NO: 12018 - RNA, 21 nt, synthetic construct
  source 1..21: mol_type = other RNA
aatgttagggggagcaggcac

SEQ ID NO: 12019 - RNA, 21 nt, synthetic construct
  source 1..21: mol_type = other RNA
acaagacaatccacccctttg

SEQ ID NO: 12020 - RNA, 21 nt, synthetic construct
  source 1..21: mol_type = other RNA
acaatccacccctttgcttac

SEQ ID NO: 12021 - RNA, 21 nt, synthetic construct
  source 1..21: mol_type = other RNA
acacagctggggagctccctg

SEQ ID NO: 12022 - RNA, 21 nt, synthetic construct
  source 1..21: mol_type = other RNA
acagcagggagctccccagct

SEQ ID NO: 12023 - RNA, 21 nt, synthetic construct
  source 1..21: mol_type = other RNA
acagcagtgcctgctccccct

SEQ ID NO: 12024 - RNA, 21 nt, synthetic construct
  source 1..21: mol_type = other RNA
acagctggggagctccctgct

SEQ ID NO: 12025 - RNA, 21 nt, synthetic construct
  source 1..21: mol_type = other RNA
acaggcaatgttagggggagc

SEQ ID NO: 12026 - RNA, 21 nt, synthetic construct
  source 1..21: mol_type = other RNA
acattgcctgttctctccagg

SEQ ID NO: 12027 - RNA, 21 nt, synthetic construct
  source 1..21: mol_type = other RNA
acccacaagacaatccacccc

SEQ ID NO: 12028 - RNA, 21 nt, synthetic construct
  source 1..21: mol_type = other RNA
acccctttgcttacgcaaact

SEQ ID NO: 12029 - RNA, 21 nt, synthetic construct
  source 1..21: mol_type = other RNA
acctaaagaaactggagtttg

SEQ ID NO: 12030 - RNA, 21 nt, synthetic construct
  source 1..21: mol_type = other RNA
accttgcgcagacccacaaga

SEQ ID NO: 12031 - RNA, 21 nt, synthetic construct
  source 1..21: mol_type = other RNA
acgagaagttcctcggaagac

SEQ ID NO: 12032 - RNA, 21 nt, synthetic construct
  source 1..21: mol_type = other RNA
acgcaaactccagtttcttta

SEQ ID NO: 12033 - RNA, 21 nt, synthetic construct
  source 1..21: mol_type = other RNA
actccagtttctttaggtccc

SEQ ID NO: 12034 - RNA, 21 nt, synthetic construct
  source 1..21: mol_type = other RNA
actggagtttgcgtaagcaaa

SEQ ID NO: 12035 - RNA, 21 nt, synthetic construct
  source 1..21: mol_type = other RNA
acttctcgtcctggagagaac

SEQ ID NO: 12036 - RNA, 21 nt, synthetic construct
  source 1..21: mol_type = other RNA
agaaactggagtttgcgtaag

SEQ ID NO: 12037 - RNA, 21 nt, synthetic construct
  source 1..21: mol_type = other RNA
agaacaggcaatgttaggggg

SEQ ID NO: 12038 - RNA, 21 nt, synthetic construct
  source 1..21: mol_type = other RNA
agaagttcctcggaagacaca

SEQ ID NO: 12039 - RNA, 21 nt, synthetic construct
  source 1..21: mol_type = other RNA
agacaatccacccctttgctt

SEQ ID NO: 12040 - RNA, 21 nt, synthetic construct
  source 1..21: mol_type = other RNA
agacacagctggggagctccc

SEQ ID NO: 12041 - RNA, 21 nt, synthetic construct
  source 1..21: mol_type = other RNA
agacccacaagacaatccacc

SEQ ID NO: 12042 - RNA, 21 nt, synthetic construct
  source 1..21: mol_type = other RNA
agagaacaggcaatgttaggg

SEQ ID NO: 12043 - RNA, 21 nt, synthetic construct
  source 1..21: mol_type = other RNA
agcaaaggggtggattgtctt

SEQ ID NO: 12044 - RNA, 21 nt, synthetic construct
  source 1..21: mol_type = other RNA
agcagggagctccccagctgt

SEQ ID NO: 12045 - RNA, 21 nt, synthetic construct
  source 1..21: mol_type = other RNA
agcagtgcctgctccccctaa

SEQ ID NO: 12046 - RNA, 21 nt, synthetic construct
  source 1..21: mol_type = other RNA
agctccccagctgtgtcttcc

SEQ ID NO: 12047 - RNA, 21 nt, synthetic construct
  source 1..21: mol_type = other RNA
agctccctgctgttcgggacc

SEQ ID NO: 12048 - RNA, 21 nt, synthetic construct
  source 1..21: mol_type = other RNA
agctggggagctccctgctgt

SEQ ID NO: 12049 - RNA, 21 nt, synthetic construct
  source 1..21: mol_type = other RNA
agctgtgtcttccgaggaact

SEQ ID NO: 12050 - RNA, 21 nt, synthetic construct
  source 1..21: mol_type = other RNA
aggaacttctcgtcctggaga

SEQ ID NO: 12051 - RNA, 21 nt, synthetic construct
  source 1..21: mol_type = other RNA
aggacgagaagttcctcggaa

SEQ ID NO: 12052 - RNA, 21 nt, synthetic construct
  source 1..21: mol_type = other RNA
aggcaatgttagggggagcag

SEQ ID NO: 12053 - RNA, 21 nt, synthetic construct
  source 1..21: mol_type = other RNA
agggagctccccagctgtgtc

SEQ ID NO: 12054 - RNA, 21 nt, synthetic construct
  source 1..21: mol_type = other RNA
aggggtggattgtcttgtggg

SEQ ID NO: 12055 - RNA, 21 nt, synthetic construct
  source 1..21: mol_type = other RNA
aggtcccgaacagcagggagc

SEQ ID NO: 12056 - RNA, 21 nt, synthetic construct
  source 1..21: mol_type = other RNA
agtgacagcagtgcctgctcc

SEQ ID NO: 12057 - RNA, 21 nt, synthetic construct
  source 1..21: mol_type = other RNA
agtgcctgctccccctaacat

SEQ ID NO: 12058 - RNA, 21 nt, synthetic construct
  source 1..21: mol_type = other RNA
agttcctcggaagacacagct

SEQ ID NO: 12059 - RNA, 21 nt, synthetic construct
  source 1..21: mol_type = other RNA
agtttctttaggtcccgaaca

SEQ ID NO: 12060 - RNA, 21 nt, synthetic construct
  source 1..21: mol_type = other RNA
agtttgcgtaagcaaaggggt

SEQ ID NO: 12061 - RNA, 21 nt, synthetic construct
  source 1..21: mol_type = other RNA
atccacccctttgcttacgca

SEQ ID NO: 12062 - RNA, 21 nt, synthetic construct
  source 1..21: mol_type = other RNA
atgttagggggagcaggcact

SEQ ID NO: 12063 - RNA, 21 nt, synthetic construct
  source 1..21: mol_type = other RNA
attgcctgttctctccaggac

SEQ ID NO: 12064 - RNA, 21 nt, synthetic construct
  source 1..21: mol_type = other RNA
attgtcttgtgggtctgcgca

SEQ ID NO: 12065 - RNA, 21 nt, synthetic construct
  source 1..21: mol_type = other RNA
caaactccagtttctttaggt

SEQ ID NO: 12066 - RNA, 21 nt, synthetic construct
  source 1..21: mol_type = other RNA
caaaggggtggattgtcttgt

SEQ ID NO: 12067 - RNA, 21 nt, synthetic construct
  source 1..21: mol_type = other RNA
caagacaatccacccctttgc

SEQ ID NO: 12068 - RNA, 21 nt, synthetic construct
  source 1..21: mol_type = other RNA
caatccacccctttgcttacg

SEQ ID NO: 12069 - RNA, 21 nt, synthetic construct
  source 1..21: mol_type = other RNA
caatgttagggggagcaggca

SEQ ID NO: 12070 - RNA, 21 nt, synthetic construct
  source 1..21: mol_type = other RNA
cacaagacaatccaccccttt

SEQ ID NO: 12071 - RNA, 21 nt, synthetic construct
  source 1..21: mol_type = other RNA
cacagctggggagctccctgc

SEQ ID NO: 12072 - RNA, 21 nt, synthetic construct
  source 1..21: mol_type = other RNA
cacccctttgcttacgcaaac

SEQ ID NO: 12073 - RNA, 21 nt, synthetic construct
  source 1..21: mol_type = other RNA
cagacccacaagacaatccac

SEQ ID NO: 12074 - RNA, 21 nt, synthetic construct
  source 1..21: mol_type = other RNA
cagcagggagctccccagctg

SEQ ID NO: 12075 - RNA, 21 nt, synthetic construct
  source 1..21: mol_type = other RNA
cagcagtgcctgctcccccta

SEQ ID NO: 12076 - RNA, 21 nt, synthetic construct
  source 1..21: mol_type = other RNA
cagctggggagctccctgctg

SEQ ID NO: 12077 - RNA, 21 nt, synthetic construct
  source 1..21: mol_type = other RNA
cagctgtgtcttccgaggaac

SEQ ID NO: 12078 - RNA, 21 nt, synthetic construct
  source 1..21: mol_type = other RNA
caggacgagaagttcctcgga

SEQ ID NO: 12079 - RNA, 21 nt, synthetic construct
  source 1..21: mol_type = other RNA
caggcaatgttagggggagca

SEQ ID NO: 12080 - RNA, 21 nt, synthetic construct
  source 1..21: mol_type = other RNA
cagggagctccccagctgtgt

SEQ ID NO: 12081 - RNA, 21 nt, synthetic construct
  source 1..21: mol_type = other RNA
cagtgcctgctccccctaaca

SEQ ID NO: 12082 - RNA, 21 nt, synthetic construct
  source 1..21: mol_type = other RNA
cagtttctttaggtcccgaac

SEQ ID NO: 12083 - RNA, 21 nt, synthetic construct
  source 1..21: mol_type = other RNA
cattgcctgttctctccagga

SEQ ID NO: 12084 - RNA, 21 nt, synthetic construct
  source 1..21: mol_type = other RNA
ccacaagacaatccacccctt

SEQ ID NO: 12085 - RNA, 21 nt, synthetic construct
  source 1..21: mol_type = other RNA
ccacccctttgcttacgcaaa

SEQ ID NO: 12086 - RNA, 21 nt, synthetic construct
  source 1..21: mol_type = other RNA
ccagctgtgtcttccgaggaa

SEQ ID NO: 12087 - RNA, 21 nt, synthetic construct
  source 1..21: mol_type = other RNA
ccaggacgagaagttcctcgg

SEQ ID NO: 12088 - RNA, 21 nt, synthetic construct
  source 1..21: mol_type = other RNA
ccagtttctttaggtcccgaa

SEQ ID NO: 12089 - RNA, 21 nt, synthetic construct
  source 1..21: mol_type = other RNA
cccacaagacaatccacccct

SEQ ID NO: 12090 - RNA, 21 nt, synthetic construct
  source 1..21: mol_type = other RNA
cccagctgtgtcttccgagga

SEQ ID NO: 12091 - RNA, 21 nt, synthetic construct
  source 1..21: mol_type = other RNA
ccccagctgtgtcttccgagg

SEQ ID NO: 12092 - RNA, 21 nt, synthetic construct
  source 1..21: mol_type = other RNA
ccccctaacattgcctgttct

SEQ ID NO: 12093 - RNA, 21 nt, synthetic construct
  source 1..21: mol_type = other RNA
cccctaacattgcctgttctc

SEQ ID NO: 12094 - RNA, 21 nt, synthetic construct
  source 1..21: mol_type = other RNA
cccctttgcttacgcaaactc

SEQ ID NO: 12095 - RNA, 21 nt, synthetic construct
  source 1..21: mol_type = other RNA
cccgaacagcagggagctccc

SEQ ID NO: 12096 - RNA, 21 nt, synthetic construct
  source 1..21: mol_type = other RNA
ccctaacattgcctgttctct

SEQ ID NO: 12097 - RNA, 21 nt, synthetic construct
  source 1..21: mol_type = other RNA
ccctgctgttcgggacctaaa

SEQ ID NO: 12098 - RNA, 21 nt, synthetic construct
  source 1..21: mol_type = other RNA
ccctttgcttacgcaaactcc

SEQ ID NO: 12099 - RNA, 21 nt, synthetic construct
  source 1..21: mol_type = other RNA
ccgaacagcagggagctcccc

SEQ ID NO: 12100 - RNA, 21 nt, synthetic construct
  source 1..21: mol_type = other RNA
ccgaggaacttctcgtcctgg

SEQ ID NO: 12101 - RNA, 21 nt, synthetic construct
  source 1..21: mol_type = other RNA
cctaaagaaactggagtttgc

SEQ ID NO: 12102 - RNA, 21 nt, synthetic construct
  source 1..21: mol_type = other RNA
cctaacattgcctgttctctc

SEQ ID NO: 12103 - RNA, 21 nt, synthetic construct
  source 1..21: mol_type = other RNA
cctcggaagacacagctgggg

SEQ ID NO: 12104 - RNA, 21 nt, synthetic construct
  source 1..21: mol_type = other RNA
cctgctccccctaacattgcc

SEQ ID NO: 12105 - RNA, 21 nt, synthetic construct
  source 1..21: mol_type = other RNA
cctgctgttcgggacctaaag

SEQ ID NO: 12106 - RNA, 21 nt, synthetic construct
  source 1..21: mol_type = other RNA
cctggagagaacaggcaatgt

SEQ ID NO: 12107 - RNA, 21 nt, synthetic construct
  source 1..21: mol_type = other RNA
cctgttctctccaggacgaga

SEQ ID NO: 12108 - RNA, 21 nt, synthetic construct
  source 1..21: mol_type = other RNA
ccttgcgcagacccacaagac

SEQ ID NO: 12109 - RNA, 21 nt, synthetic construct
  source 1..21: mol_type = other RNA
cctttgcttacgcaaactcca

SEQ ID NO: 12110 - RNA, 21 nt, synthetic construct
  source 1..21: mol_type = other RNA
cgaacagcagggagctcccca

SEQ ID NO: 12111 - RNA, 21 nt, synthetic construct
  source 1..21: mol_type = other RNA
cgagaagttcctcggaagaca

SEQ ID NO: 12112 - RNA, 21 nt, synthetic construct
  source 1..21: mol_type = other RNA
cgaggaacttctcgtcctgga

SEQ ID NO: 12113 - RNA, 21 nt, synthetic construct
  source 1..21: mol_type = other RNA
cgcaaactccagtttctttag

SEQ ID NO: 12114 - RNA, 21 nt, synthetic construct
  source 1..21: mol_type = other RNA
cgcagacccacaagacaatcc

SEQ ID NO: 12115 - RNA, 21 nt, synthetic construct
  source 1..21: mol_type = other RNA
cggaagacacagctggggagc

SEQ ID NO: 12116 - RNA, 21 nt, synthetic construct
  source 1..21: mol_type = other RNA
cgggacctaaagaaactggag

SEQ ID NO: 12117 - RNA, 21 nt, synthetic construct
  source 1..21: mol_type = other RNA
cgtaagcaaaggggtggattg

SEQ ID NO: 12118 - RNA, 21 nt, synthetic construct
  source 1..21: mol_type = other RNA
cgtcctggagagaacaggcaa

SEQ ID NO: 12119 - RNA, 21 nt, synthetic construct
  source 1..21: mol_type = other RNA
ctaaagaaactggagtttgcg

SEQ ID NO: 12120 - RNA, 21 nt, synthetic construct
  source 1..21: mol_type = other RNA
ctaacattgcctgttctctcc

SEQ ID NO: 12121 - RNA, 21 nt, synthetic construct
  source 1..21: mol_type = other RNA
ctccaggacgagaagttcctc

SEQ ID NO: 12122 - RNA, 21 nt, synthetic construct
  source 1..21: mol_type = other RNA
ctccagtttctttaggtcccg

SEQ ID NO: 12123 - RNA, 21 nt, synthetic construct
  source 1..21: mol_type = other RNA
ctccccagctgtgtcttccga

SEQ ID NO: 12124 - RNA, 21 nt, synthetic construct
  source 1..21: mol_type = other RNA
ctccccctaacattgcctgtt

SEQ ID NO: 12125 - RNA, 21 nt, synthetic construct
  source 1..21: mol_type = other RNA
ctccctgctgttcgggaccta

SEQ ID NO: 12126 - RNA, 21 nt, synthetic construct
  source 1..21: mol_type = other RNA
ctcggaagacacagctgggga

SEQ ID NO: 12127 - RNA, 21 nt, synthetic construct
  source 1..21: mol_type = other RNA
ctcgtcctggagagaacaggc

SEQ ID NO: 12128 - RNA, 21 nt, synthetic construct
  source 1..21: mol_type = other RNA
ctctccaggacgagaagttcc

SEQ ID NO: 12129 - RNA, 21 nt, synthetic construct
  source 1..21: mol_type = other RNA
ctgctccccctaacattgcct

SEQ ID NO: 12130 - RNA, 21 nt, synthetic construct
  source 1..21: mol_type = other RNA
ctgctgttcgggacctaaaga

SEQ ID NO: 12131 - RNA, 21 nt, synthetic construct
  source 1..21: mol_type = other RNA
ctggagagaacaggcaatgtt

SEQ ID NO: 12132 - RNA, 21 nt, synthetic construct
  source 1..21: mol_type = other RNA
ctggagtttgcgtaagcaaag

SEQ ID NO: 12133 - RNA, 21 nt, synthetic construct
  source 1..21: mol_type = other RNA
ctggggagctccctgctgttc

SEQ ID NO: 12134 - RNA, 21 nt, synthetic construct
  source 1..21: mol_type = other RNA
ctgtgtcttccgaggaacttc

SEQ ID NO: 12135 - RNA, 21 nt, synthetic construct
  source 1..21: mol_type = other RNA
ctgttcgggacctaaagaaac

SEQ ID NO: 12136 - RNA, 21 nt, synthetic construct
  source 1..21: mol_type = other RNA
ctgttctctccaggacgagaa

SEQ ID NO: 12137 - RNA, 21 nt, synthetic construct
  source 1..21: mol_type = other RNA
cttacgcaaactccagtttct

SEQ ID NO: 12138 - RNA, 21 nt, synthetic construct
  source 1..21: mol_type = other RNA
cttccgaggaacttctcgtcc

SEQ ID NO: 12139 - RNA, 21 nt, synthetic construct
  source 1..21: mol_type = other RNA
cttctcgtcctggagagaaca

SEQ ID NO: 12140 - RNA, 21 nt, synthetic construct
  source 1..21: mol_type = other RNA
cttgcgcagacccacaagaca

SEQ ID NO: 12141 - RNA, 21 nt, synthetic construct
  source 1..21: mol_type = other RNA
ctttaggtcccgaacagcagg

SEQ ID NO: 12142 - RNA, 21 nt, synthetic construct
  source 1..21: mol_type = other RNA
ctttgcttacgcaaactccag

SEQ ID NO: 12143 - RNA, 21 nt, synthetic construct
  source 1..21: mol_type = other RNA
gaaaccttgcgcagacccaca

SEQ ID NO: 12144 - RNA, 21 nt, synthetic construct
  source 1..21: mol_type = other RNA
gaaactggagtttgcgtaagc

SEQ ID NO: 12145 - RNA, 21 nt, synthetic construct
  source 1..21: mol_type = other RNA
gaacagcagggagctccccag

SEQ ID NO: 12146 - RNA, 21 nt, synthetic construct
  source 1..21: mol_type = other RNA
gaacaggcaatgttaggggga

SEQ ID NO: 12147 - RNA, 21 nt, synthetic construct
  source 1..21: mol_type = other RNA
gaacttctcgtcctggagaga

SEQ ID NO: 12148 - RNA, 21 nt, synthetic construct
  source 1..21: mol_type = other RNA
gaagacacagctggggagctc

SEQ ID NO: 12149 - RNA, 21 nt, synthetic construct
  source 1..21: mol_type = other RNA
gaagttcctcggaagacacag

SEQ ID NO: 12150 - RNA, 21 nt, synthetic construct
  source 1..21: mol_type = other RNA
gacaatccacccctttgctta

SEQ ID NO: 12151 - RNA, 21 nt, synthetic construct
  source 1..21: mol_type = other RNA
gacacagctggggagctccct

SEQ ID NO: 12152 - RNA, 21 nt, synthetic construct
  source 1..21: mol_type = other RNA
gacagcagtgcctgctccccc

SEQ ID NO: 12153 - RNA, 21 nt, synthetic construct
  source 1..21: mol_type = other RNA
gacccacaagacaatccaccc

SEQ ID NO: 12154 - RNA, 21 nt, synthetic construct
  source 1..21: mol_type = other RNA
gacctaaagaaactggagttt

SEQ ID NO: 12155 - RNA, 21 nt, synthetic construct
  source 1..21: mol_type = other RNA
gacgagaagttcctcggaaga

SEQ ID NO: 12156 - RNA, 21 nt, synthetic construct
  source 1..21: mol_type = other RNA
gagaacaggcaatgttagggg

SEQ ID NO: 12157 - RNA, 21 nt, synthetic construct
  source 1..21: mol_type = other RNA
gagaagttcctcggaagacac

SEQ ID NO: 12158 - RNA, 21 nt, synthetic construct
  source 1..21: mol_type = other RNA
gagagaacaggcaatgttagg

SEQ ID NO: 12159 - RNA, 21 nt, synthetic construct
  source 1..21: mol_type = other RNA
gagctccccagctgtgtcttc

SEQ ID NO: 12160 - RNA, 21 nt, synthetic construct
  source 1..21: mol_type = other RNA
gagctccctgctgttcgggac

SEQ ID NO: 12161 - RNA, 21 nt, synthetic construct
  source 1..21: mol_type = other RNA
gaggaacttctcgtcctggag

SEQ ID NO: 12162 - RNA, 21 nt, synthetic construct
  source 1..21: mol_type = other RNA
gagtttgcgtaagcaaagggg

SEQ ID NO: 12163 - RNA, 21 nt, synthetic construct
  source 1..21: mol_type = other RNA
gattgtcttgtgggtctgcgc

SEQ ID NO: 12164 - RNA, 21 nt, synthetic construct
  source 1..21: mol_type = other RNA
gcaaactccagtttctttagg

SEQ ID NO: 12165 - RNA, 21 nt, synthetic construct
  source 1..21: mol_type = other RNA
gcaaaggggtggattgtcttg

SEQ ID NO: 12166 - RNA, 21 nt, synthetic construct
  source 1..21: mol_type = other RNA
gcaatgttagggggagcaggc

SEQ ID NO: 12167 - RNA, 21 nt, synthetic construct
  source 1..21: mol_type = other RNA
gcagacccacaagacaatcca

SEQ ID NO: 12168 - RNA, 21 nt, synthetic construct
  source 1..21: mol_type = other RNA
gcagggagctccccagctgtg

SEQ ID NO: 12169 - RNA, 21 nt, synthetic construct
  source 1..21: mol_type = other RNA
gcagtgcctgctccccctaac

SEQ ID NO: 12170 - RNA, 21 nt, synthetic construct
  source 1..21: mol_type = other RNA
gcctgctccccctaacattgc

SEQ ID NO: 12171 - RNA, 21 nt, synthetic construct
  source 1..21: mol_type = other RNA
gcctgttctctccaggacgag

SEQ ID NO: 12172 - RNA, 21 nt, synthetic construct
  source 1..21: mol_type = other RNA
gcgcagacccacaagacaatc

SEQ ID NO: 12173 - RNA, 21 nt, synthetic construct
  source 1..21: mol_type = other RNA
gcgtaagcaaaggggtggatt

SEQ ID NO: 12174 - RNA, 21 nt, synthetic construct
  source 1..21: mol_type = other RNA
gctccccagctgtgtcttccg

SEQ ID NO: 12175 - RNA, 21 nt, synthetic construct
  source 1..21: mol_type = other RNA
gctccccctaacattgcctgt

SEQ ID NO: 12176 - RNA, 21 nt, synthetic construct
  source 1..21: mol_type = other RNA
gctccctgctgttcgggacct

SEQ ID NO: 12177 - RNA, 21 nt, synthetic construct
  source 1..21: mol_type = other RNA
gctggggagctccctgctgtt

SEQ ID NO: 12178 - RNA, 21 nt, synthetic construct
  source 1..21: mol_type = other RNA
gctgtgtcttccgaggaactt

SEQ ID NO: 12179 - RNA, 21 nt, synthetic construct
  source 1..21: mol_type = other RNA
gctgttcgggacctaaagaaa

SEQ ID NO: 12180 - RNA, 21 nt, synthetic construct
  source 1..21: mol_type = other RNA
gcttacgcaaactccagtttc

SEQ ID NO: 12181 - RNA, 21 nt, synthetic construct
  source 1..21: mol_type = other RNA
ggaaaccttgcgcagacccac

SEQ ID NO: 12182 - RNA, 21 nt, synthetic construct
  source 1..21: mol_type = other RNA
ggaacttctcgtcctggagag

SEQ ID NO: 12183 - RNA, 21 nt, synthetic construct
  source 1..21: mol_type = other RNA
ggaagacacagctggggagct

SEQ ID NO: 12184 - RNA, 21 nt, synthetic construct
  source 1..21: mol_type = other RNA
ggacctaaagaaactggagtt

SEQ ID NO: 12185 - RNA, 21 nt, synthetic construct
  source 1..21: mol_type = other RNA
ggacgagaagttcctcggaag

SEQ ID NO: 12186 - RNA, 21 nt, synthetic construct
  source 1..21: mol_type = other RNA
ggagagaacaggcaatgttag

SEQ ID NO: 12187 - RNA, 21 nt, synthetic construct
  source 1..21: mol_type = other RNA
ggagctccccagctgtgtctt

SEQ ID NO: 12188 - RNA, 21 nt, synthetic construct
  source 1..21: mol_type = other RNA
ggagctccctgctgttcggga

SEQ ID NO: 12189 - RNA, 21 nt, synthetic construct
  source 1..21: mol_type = other RNA
ggagtttgcgtaagcaaaggg

SEQ ID NO: 12190 - RNA, 21 nt, synthetic construct
  source 1..21: mol_type = other RNA
ggattgtcttgtgggtctgcg

SEQ ID NO: 12191 - RNA, 21 nt, synthetic construct
  source 1..21: mol_type = other RNA
ggcaatgttagggggagcagg

SEQ ID NO: 12192 - RNA, 21 nt, synthetic construct
  source 1..21: mol_type = other RNA
gggacctaaagaaactggagt

SEQ ID NO: 12193 - RNA, 21 nt, synthetic construct
  source 1..21: mol_type = other RNA
gggagctccccagctgtgtct

SEQ ID NO: 12194 - RNA, 21 nt, synthetic construct
  source 1..21: mol_type = other RNA
gggagctccctgctgttcggg

SEQ ID NO: 12195 - RNA, 21 nt, synthetic construct
  source 1..21: mol_type = other RNA
ggggagctccctgctgttcgg

SEQ ID NO: 12196 - RNA, 21 nt, synthetic construct
  source 1..21: mol_type = other RNA
ggggtggattgtcttgtgggt

SEQ ID NO: 12197 - RNA, 21 nt, synthetic construct
  source 1..21: mol_type = other RNA
gggtggattgtcttgtgggtc

SEQ ID NO: 12198 - RNA, 21 nt, synthetic construct
  source 1..21: mol_type = other RNA
ggtcccgaacagcagggagct

SEQ ID NO: 12199 - RNA, 21 nt, synthetic construct
  source 1..21: mol_type = other RNA
ggtggattgtcttgtgggtct

SEQ ID NO: 12200 - RNA, 21 nt, synthetic construct
  source 1..21: mol_type = other RNA
gtaagcaaaggggtggattgt

SEQ ID NO: 12201 - RNA, 21 nt, synthetic construct
  source 1..21: mol_type = other RNA
gtcccgaacagcagggagctc

SEQ ID NO: 12202 - RNA, 21 nt, synthetic construct
  source 1..21: mol_type = other RNA
gtcctggagagaacaggcaat

SEQ ID NO: 12203 - RNA, 21 nt, synthetic construct
  source 1..21: mol_type = other RNA
gtcttccgaggaacttctcgt

SEQ ID NO: 12204 - RNA, 21 nt, synthetic construct
  source 1..21: mol_type = other RNA
gtgacagcagtgcctgctccc

SEQ ID NO: 12205 - RNA, 21 nt, synthetic construct
  source 1..21: mol_type = other RNA
gtgcctgctccccctaacatt

SEQ ID NO: 12206 - RNA, 21 nt, synthetic construct
  source 1..21: mol_type = other RNA
gtggattgtcttgtgggtctg

SEQ ID NO: 12207 - RNA, 21 nt, synthetic construct
  source 1..21: mol_type = other RNA
gtgtcttccgaggaacttctc

SEQ ID NO: 12208 - RNA, 21 nt, synthetic construct
  source 1..21: mol_type = other RNA
gttcctcggaagacacagctg

SEQ ID NO: 12209 - RNA, 21 nt, synthetic construct
  source 1..21: mol_type = other RNA
gttcgggacctaaagaaactg

SEQ ID NO: 12210 - RNA, 21 nt, synthetic construct
  source 1..21: mol_type = other RNA
gttctctccaggacgagaagt

SEQ ID NO: 12211 - RNA, 21 nt, synthetic construct
  source 1..21: mol_type = other RNA
gtttctttaggtcccgaacag

SEQ ID NO: 12212 - RNA, 21 nt, synthetic construct
  source 1..21: mol_type = other RNA
gtttgcgtaagcaaaggggtg

SEQ ID NO: 12213 - RNA, 21 nt, synthetic construct
  source 1..21: mol_type = other RNA
taaagaaactggagtttgcgt

SEQ ID NO: 12214 - RNA, 21 nt, synthetic construct
  source 1..21: mol_type = other RNA
taacattgcctgttctctcca

SEQ ID NO: 12215 - RNA, 21 nt, synthetic construct
  source 1..21: mol_type = other RNA
taagcaaaggggtggattgtc

SEQ ID NO: 12216 - RNA, 21 nt, synthetic construct
  source 1..21: mol_type = other RNA
tacgcaaactccagtttcttt

SEQ ID NO: 12217 - RNA, 21 nt, synthetic construct
  source 1..21: mol_type = other RNA
taggtcccgaacagcagggag

SEQ ID NO: 12218 - RNA, 21 nt, synthetic construct
  source 1..21: mol_type = other RNA
tccacccctttgcttacgcaa

SEQ ID NO: 12219 - RNA, 21 nt, synthetic construct
  source 1..21: mol_type = other RNA
tccaggacgagaagttcctcg

SEQ ID NO: 12220 - RNA, 21 nt, synthetic construct
  source 1..21: mol_type = other RNA
tccagtttctttaggtcccga

SEQ ID NO: 12221 - RNA, 21 nt, synthetic construct
  source 1..21: mol_type = other RNA
tccccagctgtgtcttccgag

SEQ ID NO: 12222 - RNA, 21 nt, synthetic construct
  source 1..21: mol_type = other RNA
tccccctaacattgcctgttc

SEQ ID NO: 12223 - RNA, 21 nt, synthetic construct
  source 1..21: mol_type = other RNA
tcccgaacagcagggagctcc

SEQ ID NO: 12224 - RNA, 21 nt, synthetic construct
  source 1..21: mol_type = other RNA
tccctgctgttcgggacctaa

SEQ ID NO: 12225 - RNA, 21 nt, synthetic construct
  source 1..21: mol_type = other RNA
tccgaggaacttctcgtcctg

SEQ ID NO: 12226 - RNA, 21 nt, synthetic construct
  source 1..21: mol_type = other RNA
tcctcggaagacacagctggg

SEQ ID NO: 12227 - RNA, 21 nt, synthetic construct
  source 1..21: mol_type = other RNA
tcctggagagaacaggcaatg

SEQ ID NO: 12228 - RNA, 21 nt, synthetic construct
  source 1..21: mol_type = other RNA
tcggaagacacagctggggag

SEQ ID NO: 12229 - RNA, 21 nt, synthetic construct
  source 1..21: mol_type = other RNA
tcgggacctaaagaaactgga

SEQ ID NO: 12230 - RNA, 21 nt, synthetic construct
  source 1..21: mol_type = other RNA
tcgtcctggagagaacaggca

SEQ ID NO: 12231 - RNA, 21 nt, synthetic construct
  source 1..21: mol_type = other RNA
tctccaggacgagaagttcct

SEQ ID NO: 12232 - RNA, 21 nt, synthetic construct
  source 1..21: mol_type = other RNA
tctcgtcctggagagaacagg

SEQ ID NO: 12233 - RNA, 21 nt, synthetic construct
  source 1..21: mol_type = other RNA
tctctccaggacgagaagttc

SEQ ID NO: 12234 - RNA, 21 nt, synthetic construct
  source 1..21: mol_type = other RNA
tcttccgaggaacttctcgtc

SEQ ID NO: 12235 - RNA, 21 nt, synthetic construct
  source 1..21: mol_type = other RNA
tctttaggtcccgaacagcag

SEQ ID NO: 12236 - RNA, 21 nt, synthetic construct
  source 1..21: mol_type = other RNA
tgacagcagtgcctgctcccc

SEQ ID NO: 12237 - RNA, 21 nt, synthetic construct
  source 1..21: mol_type = other RNA
tgcctgctccccctaacattg

SEQ ID NO: 12238 - RNA, 21 nt, synthetic construct
  source 1..21: mol_type = other RNA
tgcctgttctctccaggacga

SEQ ID NO: 12239 - RNA, 21 nt, synthetic construct
  source 1..21: mol_type = other RNA
tgcgcagacccacaagacaat

SEQ ID NO: 12240 - RNA, 21 nt, synthetic construct
  source 1..21: mol_type = other RNA
tgcgtaagcaaaggggtggat

SEQ ID NO: 12241 - RNA, 21 nt, synthetic construct
  source 1..21: mol_type = other RNA
tgctccccctaacattgcctg

SEQ ID NO: 12242 - RNA, 21 nt, synthetic construct
  source 1..21: mol_type = other RNA
tgctgttcgggacctaaagaa

SEQ ID NO: 12243 - RNA, 21 nt, synthetic construct
  source 1..21: mol_type = other RNA
tgcttacgcaaactccagttt

SEQ ID NO: 12244 - RNA, 21 nt, synthetic construct
  source 1..21: mol_type = other RNA
tggagagaacaggcaatgtta

SEQ ID NO: 12245 - RNA, 21 nt, synthetic construct
  source 1..21: mol_type = other RNA
tggagtttgcgtaagcaaagg

SEQ ID NO: 12246 - RNA, 21 nt, synthetic construct
  source 1..21: mol_type = other RNA
tggattgtcttgtgggtctgc

SEQ ID NO: 12247 - RNA, 21 nt, synthetic construct
  source 1..21: mol_type = other RNA
tggggagctccctgctgttcg

SEQ ID NO: 12248 - RNA, 21 nt, synthetic construct
  source 1..21: mol_type = other RNA
tgtcttccgaggaacttctcg

SEQ ID NO: 12249 - RNA, 21 nt, synthetic construct
  source 1..21: mol_type = other RNA
tgtgtcttccgaggaacttct

SEQ ID NO: 12250 - RNA, 21 nt, synthetic construct
  source 1..21: mol_type = other RNA
tgttagggggagcaggcactg

SEQ ID NO: 12251 - RNA, 21 nt, synthetic construct
  source 1..21: mol_type = other RNA
tgttcgggacctaaagaaact

SEQ ID NO: 12252 - RNA, 21 nt, synthetic construct
  source 1..21: mol_type = other RNA
tgttctctccaggacgagaag

SEQ ID NO: 12253 - RNA, 21 nt, synthetic construct
  source 1..21: mol_type = other RNA
ttacgcaaactccagtttctt

SEQ ID NO: 12254 - RNA, 21 nt, synthetic construct
  source 1..21: mol_type = other RNA
ttaggtcccgaacagcaggga

SEQ ID NO: 12255 - RNA, 21 nt, synthetic construct
  source 1..21: mol_type = other RNA
ttccgaggaacttctcgtcct

SEQ ID NO: 12256 - RNA, 21 nt, synthetic construct
  source 1..21: mol_type = other RNA
ttcctcggaagacacagctgg

SEQ ID NO: 12257 - RNA, 21 nt, synthetic construct
  source 1..21: mol_type = other RNA
ttcgggacctaaagaaactgg

SEQ ID NO: 12258 - RNA, 21 nt, synthetic construct
  source 1..21: mol_type = other RNA
ttctcgtcctggagagaacag

SEQ ID NO: 12259 - RNA, 21 nt, synthetic construct
  source 1..21: mol_type = other RNA
ttctctccaggacgagaagtt

SEQ ID NO: 12260 - RNA, 21 nt, synthetic construct
  source 1..21: mol_type = other RNA
ttctttaggtcccgaacagca

SEQ ID NO: 12261 - RNA, 21 nt, synthetic construct
  source 1..21: mol_type = other RNA
ttgcctgttctctccaggacg

SEQ ID NO: 12262 - RNA, 21 nt, synthetic construct
  source 1..21: mol_type = other RNA
ttgcgcagacccacaagacaa

SEQ ID NO: 12263 - RNA, 21 nt, synthetic construct
  source 1..21: mol_type = other RNA
ttgcgtaagcaaaggggtgga

SEQ ID NO: 12264 - RNA, 21 nt, synthetic construct
  source 1..21: mol_type = other RNA
ttgcttacgcaaactccagtt

SEQ ID NO: 12265 - RNA, 21 nt, synthetic construct
  source 1..21: mol_type = other RNA
tttaggtcccgaacagcaggg

SEQ ID NO: 12266 - RNA, 21 nt, synthetic construct
  source 1..21: mol_type = other RNA
tttctttaggtcccgaacagc

SEQ ID NO: 12267 - RNA, 21 nt, synthetic construct
  source 1..21: mol_type = other RNA
tttgcgtaagcaaaggggtgg

SEQ ID NO: 12268 - RNA, 21 nt, synthetic construct
  source 1..21: mol_type = other RNA
tttgcttacgcaaactccagt

SEQ ID NO: 12269 - RNA, 22 nt, synthetic construct
  source 1..22: mol_type = other RNA
aaaccttgcgcagacccacaag

SEQ ID NO: 12270 - RNA, 22 nt, synthetic construct
  source 1..22: mol_type = other RNA
aaactccagtttctttaggtcc

SEQ ID NO: 12271 - RNA, 22 nt, synthetic construct
  source 1..22: mol_type = other RNA
aaactggagtttgcgtaagcaa

SEQ ID NO: 12272 - RNA, 22 nt, synthetic construct
  source 1..22: mol_type = other RNA
aaagaaactggagtttgcgtaa

SEQ ID NO: 12273 - RNA, 22 nt, synthetic construct
  source 1..22: mol_type = other RNA
aaaggggtggattgtcttgtgg

SEQ ID NO: 12274 - RNA, 22 nt, synthetic construct
  source 1..22: mol_type = other RNA
aacagcagggagctccccagct

SEQ ID NO: 12275 - RNA, 22 nt, synthetic construct
  source 1..22: mol_type = other RNA
aacaggcaatgttagggggagc

SEQ ID NO: 12276 - RNA, 22 nt, synthetic construct
  source 1..22: mol_type = other RNA
aacattgcctgttctctccagg

SEQ ID NO: 12277 - RNA, 22 nt, synthetic construct
  source 1..22: mol_type = other RNA
aaccttgcgcagacccacaaga

SEQ ID NO: 12278 - RNA, 22 nt, synthetic construct
  source 1..22: mol_type = other RNA
aactccagtttctttaggtccc

SEQ ID NO: 12279 - RNA, 22 nt, synthetic construct
  source 1..22: mol_type = other RNA
aactggagtttgcgtaagcaaa

SEQ ID NO: 12280 - RNA, 22 nt, synthetic construct
  source 1..22: mol_type = other RNA
aacttctcgtcctggagagaac

SEQ ID NO: 12281 - RNA, 22 nt, synthetic construct
  source 1..22: mol_type = other RNA
aagaaactggagtttgcgtaag

SEQ ID NO: 12282 - RNA, 22 nt, synthetic construct
  source 1..22: mol_type = other RNA
aagacaatccacccctttgctt

SEQ ID NO: 12283 - RNA, 22 nt, synthetic construct
  source 1..22: mol_type = other RNA
aagacacagctggggagctccc

SEQ ID NO: 12284 - RNA, 22 nt, synthetic construct
  source 1..22: mol_type = other RNA
aagcaaaggggtggattgtctt

SEQ ID NO: 12285 - RNA, 22 nt, synthetic construct
  source 1..22: mol_type = other RNA
aaggggtggattgtcttgtggg

SEQ ID NO: 12286 - RNA, 22 nt, synthetic construct
  source 1..22: mol_type = other RNA
aagttcctcggaagacacagct

SEQ ID NO: 12287 - RNA, 22 nt, synthetic construct
  source 1..22: mol_type = other RNA
aatccacccctttgcttacgca

SEQ ID NO: 12288 - RNA, 22 nt, synthetic construct
  source 1..22: mol_type = other RNA
aatgttagggggagcaggcact

SEQ ID NO: 12289 - RNA, 22 nt, synthetic construct
  source 1..22: mol_type = other RNA
acaagacaatccacccctttgc

SEQ ID NO: 12290 - RNA, 22 nt, synthetic construct
  source 1..22: mol_type = other RNA
acaatccacccctttgcttacg

SEQ ID NO: 12291 - RNA, 22 nt, synthetic construct
  source 1..22: mol_type = other RNA
acacagctggggagctccctgc

SEQ ID NO: 12292 - RNA, 22 nt, synthetic construct
  source 1..22: mol_type = other RNA
acagcagggagctccccagctg

SEQ ID NO: 12293 - RNA, 22 nt, synthetic construct
  source 1..22: mol_type = other RNA
acagcagtgcctgctcccccta

SEQ ID NO: 12294 - RNA, 22 nt, synthetic construct
  source 1..22: mol_type = other RNA
acagctggggagctccctgctg

SEQ ID NO: 12295 - RNA, 22 nt, synthetic construct
  source 1..22: mol_type = other RNA
acaggcaatgttagggggagca

SEQ ID NO: 12296 - RNA, 22 nt, synthetic construct
  source 1..22: mol_type = other RNA
acattgcctgttctctccagga

SEQ ID NO: 12297 - RNA, 22 nt, synthetic construct
  source 1..22: mol_type = other RNA
acccacaagacaatccacccct

SEQ ID NO: 12298 - RNA, 22 nt, synthetic construct
  source 1..22: mol_type = other RNA
acccctttgcttacgcaaactc

SEQ ID NO: 12299 - RNA, 22 nt, synthetic construct
  source 1..22: mol_type = other RNA
acctaaagaaactggagtttgc

SEQ ID NO: 12300 - RNA, 22 nt, synthetic construct
  source 1..22: mol_type = other RNA
accttgcgcagacccacaagac

SEQ ID NO: 12301 - RNA, 22 nt, synthetic construct
  source 1..22: mol_type = other RNA
acgagaagttcctcggaagaca

SEQ ID NO: 12302 - RNA, 22 nt, synthetic construct
  source 1..22: mol_type = other RNA
acgcaaactccagtttctttag

SEQ ID NO: 12303 - RNA, 22 nt, synthetic construct
  source 1..22: mol_type = other RNA
actccagtttctttaggtcccg

SEQ ID NO: 12304 - RNA, 22 nt, synthetic construct
  source 1..22: mol_type = other RNA
actggagtttgcgtaagcaaag

SEQ ID NO: 12305 - RNA, 22 nt, synthetic construct
  source 1..22: mol_type = other RNA
acttctcgtcctggagagaaca

SEQ ID NO: 12306 - RNA, 22 nt, synthetic construct
  source 1..22: mol_type = other RNA
agaaactggagtttgcgtaagc

SEQ ID NO: 12307 - RNA, 22 nt, synthetic construct
  source 1..22: mol_type = other RNA
agaacaggcaatgttaggggga

SEQ ID NO: 12308 - RNA, 22 nt, synthetic construct
  source 1..22: mol_type = other RNA
agaagttcctcggaagacacag

SEQ ID NO: 12309 - RNA, 22 nt, synthetic construct
  source 1..22: mol_type = other RNA
agacaatccacccctttgctta

SEQ ID NO: 12310 - RNA, 22 nt, synthetic construct
  source 1..22: mol_type = other RNA
agacacagctggggagctccct

SEQ ID NO: 12311 - RNA, 22 nt, synthetic construct
  source 1..22: mol_type = other RNA
agacccacaagacaatccaccc

SEQ ID NO: 12312 - RNA, 22 nt, synthetic construct
  source 1..22: mol_type = other RNA
agagaacaggcaatgttagggg

SEQ ID NO: 12313 - RNA, 22 nt, synthetic construct
  source 1..22: mol_type = other RNA
agcaaaggggtggattgtcttg

SEQ ID NO: 12314 - RNA, 22 nt, synthetic construct
  source 1..22: mol_type = other RNA
agcagggagctccccagctgtg

SEQ ID NO: 12315 - RNA, 22 nt, synthetic construct
  source 1..22: mol_type = other RNA
agcagtgcctgctccccctaac

SEQ ID NO: 12316 - RNA, 22 nt, synthetic construct
  source 1..22: mol_type = other RNA
agctccccagctgtgtcttccg

SEQ ID NO: 12317 - RNA, 22 nt, synthetic construct
  source 1..22: mol_type = other RNA
agctccctgctgttcgggacct

SEQ ID NO: 12318 - RNA, 22 nt, synthetic construct
  source 1..22: mol_type = other RNA
agctggggagctccctgctgtt

SEQ ID NO: 12319 - RNA, 22 nt, synthetic construct
  source 1..22: mol_type = other RNA
agctgtgtcttccgaggaactt

SEQ ID NO: 12320 - RNA, 22 nt, synthetic construct
  source 1..22: mol_type = other RNA
aggaacttctcgtcctggagag

SEQ ID NO: 12321 - RNA, 22 nt, synthetic construct
  source 1..22: mol_type = other RNA
aggacgagaagttcctcggaag

SEQ ID NO: 12322 - RNA, 22 nt, synthetic construct
  source 1..22: mol_type = other RNA
aggcaatgttagggggagcagg

SEQ ID NO: 12323 - RNA, 22 nt, synthetic construct
  source 1..22: mol_type = other RNA
agggagctccccagctgtgtct

SEQ ID NO: 12324 - RNA, 22 nt, synthetic construct
  source 1..22: mol_type = other RNA
aggggtggattgtcttgtgggt

SEQ ID NO: 12325 - RNA, 22 nt, synthetic construct
  source 1..22: mol_type = other RNA
aggtcccgaacagcagggagct

SEQ ID NO: 12326 - RNA, 22 nt, synthetic construct
  source 1..22: mol_type = other RNA
agtgacagcagtgcctgctccc

SEQ ID NO: 12327 - RNA, 22 nt, synthetic construct
  source 1..22: mol_type = other RNA
agtgcctgctccccctaacatt

SEQ ID NO: 12328 - RNA, 22 nt, synthetic construct
  source 1..22: mol_type = other RNA
agttcctcggaagacacagctg

SEQ ID NO: 12329 - RNA, 22 nt, synthetic construct
  source 1..22: mol_type = other RNA
agtttctttaggtcccgaacag

SEQ ID NO: 12330 - RNA, 22 nt, synthetic construct
  source 1..22: mol_type = other RNA
agtttgcgtaagcaaaggggtg

SEQ ID NO: 12331 - RNA, 22 nt, synthetic construct
  source 1..22: mol_type = other RNA
atccacccctttgcttacgcaa

SEQ ID NO: 12332 - RNA, 22 nt, synthetic construct
  source 1..22: mol_type = other RNA
atgttagggggagcaggcactg

SEQ ID NO: 12333 - RNA, 22 nt, synthetic construct
  source 1..22: mol_type = other RNA
attgcctgttctctccaggacg

SEQ ID NO: 12334 - RNA, 22 nt, synthetic construct
  source 1..22: mol_type = other RNA
caaactccagtttctttaggtc

SEQ ID NO: 12335 - RNA, 22 nt, synthetic construct
  source 1..22: mol_type = other RNA
caaaggggtggattgtcttgtg

SEQ ID NO: 12336 - RNA, 22 nt, synthetic construct
  source 1..22: mol_type = other RNA
caagacaatccacccctttgct

SEQ ID NO: 12337 - RNA, 22 nt, synthetic construct
  source 1..22: mol_type = other RNA
caatccacccctttgcttacgc

SEQ ID NO: 12338 - RNA, 22 nt, synthetic construct
  source 1..22: mol_type = other RNA
caatgttagggggagcaggcac

SEQ ID NO: 12339 - RNA, 22 nt, synthetic construct
  source 1..22: mol_type = other RNA
cacaagacaatccacccctttg

SEQ ID NO: 12340 - RNA, 22 nt, synthetic construct
  source 1..22: mol_type = other RNA
cacagctggggagctccctgct

SEQ ID NO: 12341 - RNA, 22 nt, synthetic construct
  source 1..22: mol_type = other RNA
cacccctttgcttacgcaaact

SEQ ID NO: 12342 - RNA, 22 nt, synthetic construct
  source 1..22: mol_type = other RNA
cagacccacaagacaatccacc

SEQ ID NO: 12343 - RNA, 22 nt, synthetic construct
  source 1..22: mol_type = other RNA
cagcagggagctccccagctgt

SEQ ID NO: 12344 - RNA, 22 nt, synthetic construct
  source 1..22: mol_type = other RNA
cagcagtgcctgctccccctaa

SEQ ID NO: 12345 - RNA, 22 nt, synthetic construct
  source 1..22: mol_type = other RNA
cagctggggagctccctgctgt

SEQ ID NO: 12346 - RNA, 22 nt, synthetic construct
  source 1..22: mol_type = other RNA
cagctgtgtcttccgaggaact

SEQ ID NO: 12347 - RNA, 22 nt, synthetic construct
  source 1..22: mol_type = other RNA
caggacgagaagttcctcggaa

SEQ ID NO: 12348 - RNA, 22 nt, synthetic construct
  source 1..22: mol_type = other RNA
caggcaatgttagggggagcag

SEQ ID NO: 12349 - RNA, 22 nt, synthetic construct
  source 1..22: mol_type = other RNA
cagggagctccccagctgtgtc

SEQ ID NO: 12350 - RNA, 22 nt, synthetic construct
  source 1..22: mol_type = other RNA
cagtgcctgctccccctaacat

SEQ ID NO: 12351 - RNA, 22 nt, synthetic construct
  source 1..22: mol_type = other RNA
cagtttctttaggtcccgaaca

SEQ ID NO: 12352 - RNA, 22 nt, synthetic construct
  source 1..22: mol_type = other RNA
cattgcctgttctctccaggac

SEQ ID NO: 12353 - RNA, 22 nt, synthetic construct
  source 1..22: mol_type = other RNA
ccacaagacaatccaccccttt

SEQ ID NO: 12354 - RNA, 22 nt, synthetic construct
  source 1..22: mol_type = other RNA
ccacccctttgcttacgcaaac

SEQ ID NO: 12355 - RNA, 22 nt, synthetic construct
  source 1..22: mol_type = other RNA
ccagctgtgtcttccgaggaac

SEQ ID NO: 12356 - RNA, 22 nt, synthetic construct
  source 1..22: mol_type = other RNA
ccaggacgagaagttcctcgga

SEQ ID NO: 12357 - RNA, 22 nt, synthetic construct
  source 1..22: mol_type = other RNA
ccagtttctttaggtcccgaac

SEQ ID NO: 12358 - RNA, 22 nt, synthetic construct
  source 1..22: mol_type = other RNA
cccacaagacaatccacccctt

SEQ ID NO: 12359 - RNA, 22 nt, synthetic construct
  source 1..22: mol_type = other RNA
cccagctgtgtcttccgaggaa

SEQ ID NO: 12360 - RNA, 22 nt, synthetic construct
  source 1..22: mol_type = other RNA
ccccagctgtgtcttccgagga

SEQ ID NO: 12361 - RNA, 22 nt, synthetic construct
  source 1..22: mol_type = other RNA
ccccctaacattgcctgttctc

SEQ ID NO: 12362 - RNA, 22 nt, synthetic construct
  source 1..22: mol_type = other RNA
cccctaacattgcctgttctct

SEQ ID NO: 12363 - RNA, 22 nt, synthetic construct
  source 1..22: mol_type = other RNA
cccctttgcttacgcaaactcc

SEQ ID NO: 12364 - RNA, 22 nt, synthetic construct
  source 1..22: mol_type = other RNA
cccgaacagcagggagctcccc

SEQ ID NO: 12365 - RNA, 22 nt, synthetic construct
  source 1..22: mol_type = other RNA
ccctaacattgcctgttctctc

SEQ ID NO: 12366 - RNA, 22 nt, synthetic construct
  source 1..22: mol_type = other RNA
ccctgctgttcgggacctaaag

SEQ ID NO: 12367 - RNA, 22 nt, synthetic construct
  source 1..22: mol_type = other RNA
ccctttgcttacgcaaactcca

SEQ ID NO: 12368 - RNA, 22 nt, synthetic construct
  source 1..22: mol_type = other RNA
ccgaacagcagggagctcccca

SEQ ID NO: 12369 - RNA, 22 nt, synthetic construct
  source 1..22: mol_type = other RNA
ccgaggaacttctcgtcctgga

SEQ ID NO: 12370 - RNA, 22 nt, synthetic construct
  source 1..22: mol_type = other RNA
cctaaagaaactggagtttgcg

SEQ ID NO: 12371 - RNA, 22 nt, synthetic construct
  source 1..22: mol_type = other RNA
cctaacattgcctgttctctcc

SEQ ID NO: 12372 - RNA, 22 nt, synthetic construct
  source 1..22: mol_type = other RNA
cctcggaagacacagctgggga

SEQ ID NO: 12373 - RNA, 22 nt, synthetic construct
  source 1..22: mol_type = other RNA
cctgctccccctaacattgcct

SEQ ID NO: 12374 - RNA, 22 nt, synthetic construct
  source 1..22: mol_type = other RNA
cctgctgttcgggacctaaaga

SEQ ID NO: 12375 - RNA, 22 nt, synthetic construct
  source 1..22: mol_type = other RNA
cctggagagaacaggcaatgtt

SEQ ID NO: 12376 - RNA, 22 nt, synthetic construct
  source 1..22: mol_type = other RNA
cctgttctctccaggacgagaa

SEQ ID NO: 12377 - RNA, 22 nt, synthetic construct
  source 1..22: mol_type = other RNA
ccttgcgcagacccacaagaca

SEQ ID NO: 12378 - RNA, 22 nt, synthetic construct
  source 1..22: mol_type = other RNA
cctttgcttacgcaaactccag

SEQ ID NO: 12379 - RNA, 22 nt, synthetic construct
  source 1..22: mol_type = other RNA
cgaacagcagggagctccccag

SEQ ID NO: 12380 - RNA, 22 nt, synthetic construct
  source 1..22: mol_type = other RNA
cgagaagttcctcggaagacac

SEQ ID NO: 12381 - RNA, 22 nt, synthetic construct
  source 1..22: mol_type = other RNA
cgaggaacttctcgtcctggag

SEQ ID NO: 12382 - RNA, 22 nt, synthetic construct
  source 1..22: mol_type = other RNA
cgcaaactccagtttctttagg

SEQ ID NO: 12383 - RNA, 22 nt, synthetic construct
  source 1..22: mol_type = other RNA
cgcagacccacaagacaatcca

SEQ ID NO: 12384 - RNA, 22 nt, synthetic construct
  source 1..22: mol_type = other RNA
cggaagacacagctggggagct

SEQ ID NO: 12385 - RNA, 22 nt, synthetic construct
  source 1..22: mol_type = other RNA
cgggacctaaagaaactggagt

SEQ ID NO: 12386 - RNA, 22 nt, synthetic construct
  source 1..22: mol_type = other RNA
cgtaagcaaaggggtggattgt

SEQ ID NO: 12387 - RNA, 22 nt, synthetic construct
  source 1..22: mol_type = other RNA
cgtcctggagagaacaggcaat

SEQ ID NO: 12388 - RNA, 22 nt, synthetic construct
  source 1..22: mol_type = other RNA
ctaaagaaactggagtttgcgt

SEQ ID NO: 12389 - RNA, 22 nt, synthetic construct
  source 1..22: mol_type = other RNA
ctaacattgcctgttctctcca

SEQ ID NO: 12390 - RNA, 22 nt, synthetic construct
  source 1..22: mol_type = other RNA
ctccaggacgagaagttcctcg

SEQ ID NO: 12391 - RNA, 22 nt, synthetic construct
  source 1..22: mol_type = other RNA
ctccagtttctttaggtcccga

SEQ ID NO: 12392 - RNA, 22 nt, synthetic construct
  source 1..22: mol_type = other RNA
ctccccagctgtgtcttccgag

SEQ ID NO: 12393 - RNA, 22 nt, synthetic construct
  source 1..22: mol_type = other RNA
ctccccctaacattgcctgttc

SEQ ID NO: 12394 - RNA, 22 nt, synthetic construct
  source 1..22: mol_type = other RNA
ctccctgctgttcgggacctaa

SEQ ID NO: 12395 - RNA, 22 nt, synthetic construct
  source 1..22: mol_type = other RNA
ctcggaagacacagctggggag

SEQ ID NO: 12396 - RNA, 22 nt, synthetic construct
  source 1..22: mol_type = other RNA
ctcgtcctggagagaacaggca

SEQ ID NO: 12397 - RNA, 22 nt, synthetic construct
  source 1..22: mol_type = other RNA
ctctccaggacgagaagttcct

SEQ ID NO: 12398 - RNA, 22 nt, synthetic construct
  source 1..22: mol_type = other RNA
ctgctccccctaacattgcctg

SEQ ID NO: 12399 - RNA, 22 nt, synthetic construct
  source 1..22: mol_type = other RNA
ctgctgttcgggacctaaagaa

SEQ ID NO: 12400 - RNA, 22 nt, synthetic construct
  source 1..22: mol_type = other RNA
ctggagagaacaggcaatgtta

SEQ ID NO: 12401 - RNA, 22 nt, synthetic construct
  source 1..22: mol_type = other RNA
ctggagtttgcgtaagcaaagg

SEQ ID NO: 12402 - RNA, 22 nt, synthetic construct
  source 1..22: mol_type = other RNA
ctggggagctccctgctgttcg

SEQ ID NO: 12403 - RNA, 22 nt, synthetic construct
  source 1..22: mol_type = other RNA
ctgtgtcttccgaggaacttct

SEQ ID NO: 12404 - RNA, 22 nt, synthetic construct
  source 1..22: mol_type = other RNA
ctgttcgggacctaaagaaact

SEQ ID NO: 12405 - RNA, 22 nt, synthetic construct
  source 1..22: mol_type = other RNA
ctgttctctccaggacgagaag

SEQ ID NO: 12406 - RNA, 22 nt, synthetic construct
  source 1..22: mol_type = other RNA
cttacgcaaactccagtttctt

SEQ ID NO: 12407 - RNA, 22 nt, synthetic construct
  source 1..22: mol_type = other RNA
cttccgaggaacttctcgtcct

SEQ ID NO: 12408 - RNA, 22 nt, synthetic construct
  source 1..22: mol_type = other RNA
cttctcgtcctggagagaacag

SEQ ID NO: 12409 - RNA, 22 nt, synthetic construct
  source 1..22: mol_type = other RNA
cttgcgcagacccacaagacaa

SEQ ID NO: 12410 - RNA, 22 nt, synthetic construct
  source 1..22: mol_type = other RNA
ctttaggtcccgaacagcaggg

SEQ ID NO: 12411 - RNA, 22 nt, synthetic construct
  source 1..22: mol_type = other RNA
ctttgcttacgcaaactccagt

SEQ ID NO: 12412 - RNA, 22 nt, synthetic construct
  source 1..22: mol_type = other RNA
gaaaccttgcgcagacccacaa

SEQ ID NO: 12413 - RNA, 22 nt, synthetic construct
  source 1..22: mol_type = other RNA
gaaactggagtttgcgtaagca

SEQ ID NO: 12414 - RNA, 22 nt, synthetic construct
  source 1..22: mol_type = other RNA
gaacagcagggagctccccagc

SEQ ID NO: 12415 - RNA, 22 nt, synthetic construct
  source 1..22: mol_type = other RNA
gaacaggcaatgttagggggag

SEQ ID NO: 12416 - RNA, 22 nt, synthetic construct
  source 1..22: mol_type = other RNA
gaacttctcgtcctggagagaa

SEQ ID NO: 12417 - RNA, 22 nt, synthetic construct
  source 1..22: mol_type = other RNA
gaagacacagctggggagctcc

SEQ ID NO: 12418 - RNA, 22 nt, synthetic construct
  source 1..22: mol_type = other RNA
gaagttcctcggaagacacagc

SEQ ID NO: 12419 - RNA, 22 nt, synthetic construct
  source 1..22: mol_type = other RNA
gacaatccacccctttgcttac

SEQ ID NO: 12420 - RNA, 22 nt, synthetic construct
  source 1..22: mol_type = other RNA
gacacagctggggagctccctg

SEQ ID NO: 12421 - RNA, 22 nt, synthetic construct
  source 1..22: mol_type = other RNA
gacagcagtgcctgctccccct

SEQ ID NO: 12422 - RNA, 22 nt, synthetic construct
  source 1..22: mol_type = other RNA
gacccacaagacaatccacccc

SEQ ID NO: 12423 - RNA, 22 nt, synthetic construct
  source 1..22: mol_type = other RNA
gacctaaagaaactggagtttg

SEQ ID NO: 12424 - RNA, 22 nt, synthetic construct
  source 1..22: mol_type = other RNA
gacgagaagttcctcggaagac

SEQ ID NO: 12425 - RNA, 22 nt, synthetic construct
  source 1..22: mol_type = other RNA
gagaacaggcaatgttaggggg

SEQ ID NO: 12426 - RNA, 22 nt, synthetic construct
  source 1..22: mol_type = other RNA
gagaagttcctcggaagacaca

SEQ ID NO: 12427 - RNA, 22 nt, synthetic construct
  source 1..22: mol_type = other RNA
gagagaacaggcaatgttaggg

SEQ ID NO: 12428 - RNA, 22 nt, synthetic construct
  source 1..22: mol_type = other RNA
gagctccccagctgtgtcttcc

SEQ ID NO: 12429 - RNA, 22 nt, synthetic construct
  source 1..22: mol_type = other RNA
gagctccctgctgttcgggacc

SEQ ID NO: 12430 - RNA, 22 nt, synthetic construct
  source 1..22: mol_type = other RNA
gaggaacttctcgtcctggaga

SEQ ID NO: 12431 - RNA, 22 nt, synthetic construct
  source 1..22: mol_type = other RNA
gagtttgcgtaagcaaaggggt

SEQ ID NO: 12432 - RNA, 22 nt, synthetic construct
  source 1..22: mol_type = other RNA
gattgtcttgtgggtctgcgca

SEQ ID NO: 12433 - RNA, 22 nt, synthetic construct
  source 1..22: mol_type = other RNA
gcaaactccagtttctttaggt

SEQ ID NO: 12434 - RNA, 22 nt, synthetic construct
  source 1..22: mol_type = other RNA
gcaaaggggtggattgtcttgt

SEQ ID NO: 12435 - RNA, 22 nt, synthetic construct
  source 1..22: mol_type = other RNA
gcaatgttagggggagcaggca

SEQ ID NO: 12436 - RNA, 22 nt, synthetic construct
  source 1..22: mol_type = other RNA
gcagacccacaagacaatccac

SEQ ID NO: 12437 - RNA, 22 nt, synthetic construct
  source 1..22: mol_type = other RNA
gcagggagctccccagctgtgt

SEQ ID NO: 12438 - RNA, 22 nt, synthetic construct
  source 1..22: mol_type = other RNA
gcagtgcctgctccccctaaca

SEQ ID NO: 12439 - RNA, 22 nt, synthetic construct
  source 1..22: mol_type = other RNA
gcctgctccccctaacattgcc

SEQ ID NO: 12440 - RNA, 22 nt, synthetic construct
  source 1..22: mol_type = other RNA
gcctgttctctccaggacgaga

SEQ ID NO: 12441 - RNA, 22 nt, synthetic construct
  source 1..22: mol_type = other RNA
gcgcagacccacaagacaatcc

SEQ ID NO: 12442 - RNA, 22 nt, synthetic construct
  source 1..22: mol_type = other RNA
gcgtaagcaaaggggtggattg

SEQ ID NO: 12443 - RNA, 22 nt, synthetic construct
  source 1..22: mol_type = other RNA
gctccccagctgtgtcttccga

SEQ ID NO: 12444 - RNA, 22 nt, synthetic construct
  source 1..22: mol_type = other RNA
gctccccctaacattgcctgtt

SEQ ID NO: 12445 - RNA, 22 nt, synthetic construct
  source 1..22: mol_type = other RNA
gctccctgctgttcgggaccta

SEQ ID NO: 12446 - RNA, 22 nt, synthetic construct
  source 1..22: mol_type = other RNA
gctggggagctccctgctgttc

SEQ ID NO: 12447 - RNA, 22 nt, synthetic construct
  source 1..22: mol_type = other RNA
gctgtgtcttccgaggaacttc

SEQ ID NO: 12448 - RNA, 22 nt, synthetic construct
  source 1..22: mol_type = other RNA
gctgttcgggacctaaagaaac

SEQ ID NO: 12449 - RNA, 22 nt, synthetic construct
  source 1..22: mol_type = other RNA
gcttacgcaaactccagtttct

SEQ ID NO: 12450 - RNA, 22 nt, synthetic construct
  source 1..22: mol_type = other RNA
ggaaaccttgcgcagacccaca

SEQ ID NO: 12451 - RNA, 22 nt, synthetic construct
  source 1..22: mol_type = other RNA
ggaacttctcgtcctggagaga

SEQ ID NO: 12452 - RNA, 22 nt, synthetic construct
  source 1..22: mol_type = other RNA
ggaagacacagctggggagctc

SEQ ID NO: 12453 - RNA, 22 nt, synthetic construct
  source 1..22: mol_type = other RNA
ggacctaaagaaactggagttt

SEQ ID NO: 12454 - RNA, 22 nt, synthetic construct
  source 1..22: mol_type = other RNA
ggacgagaagttcctcggaaga

SEQ ID NO: 12455 - RNA, 22 nt, synthetic construct
  source 1..22: mol_type = other RNA
ggagagaacaggcaatgttagg

SEQ ID NO: 12456 - RNA, 22 nt, synthetic construct
  source 1..22: mol_type = other RNA
ggagctccccagctgtgtcttc

SEQ ID NO: 12457 - RNA, 22 nt, synthetic construct
  source 1..22: mol_type = other RNA
ggagctccctgctgttcgggac

SEQ ID NO: 12458 - RNA, 22 nt, synthetic construct
  source 1..22: mol_type = other RNA
ggagtttgcgtaagcaaagggg

SEQ ID NO: 12459 - RNA, 22 nt, synthetic construct
  source 1..22: mol_type = other RNA
ggattgtcttgtgggtctgcgc

SEQ ID NO: 12460 - RNA, 22 nt, synthetic construct
  source 1..22: mol_type = other RNA
ggcaatgttagggggagcaggc

SEQ ID NO: 12461 - RNA, 22 nt, synthetic construct
  source 1..22: mol_type = other RNA
gggacctaaagaaactggagtt

SEQ ID NO: 12462 - RNA, 22 nt, synthetic construct
  source 1..22: mol_type = other RNA
gggagctccccagctgtgtctt

SEQ ID NO: 12463 - RNA, 22 nt, synthetic construct
  source 1..22: mol_type = other RNA
gggagctccctgctgttcggga

SEQ ID NO: 12464 - RNA, 22 nt, synthetic construct
  source 1..22: mol_type = other RNA
ggggagctccctgctgttcggg

SEQ ID NO: 12465 - RNA, 22 nt, synthetic construct
  source 1..22: mol_type = other RNA
ggggtggattgtcttgtgggtc

SEQ ID NO: 12466 - RNA, 22 nt, synthetic construct
  source 1..22: mol_type = other RNA
gggtggattgtcttgtgggtct

SEQ ID NO: 12467 - RNA, 22 nt, synthetic construct
  source 1..22: mol_type = other RNA
ggtcccgaacagcagggagctc

SEQ ID NO: 12468 - RNA, 22 nt, synthetic construct
  source 1..22: mol_type = other RNA
ggtggattgtcttgtgggtctg

SEQ ID NO: 12469 - RNA, 22 nt, synthetic construct
  source 1..22: mol_type = other RNA
gtaagcaaaggggtggattgtc

SEQ ID NO: 12470 - RNA, 22 nt, synthetic construct
  source 1..22: mol_type = other RNA
gtcccgaacagcagggagctcc

SEQ ID NO: 12471 - RNA, 22 nt, synthetic construct
  source 1..22: mol_type = other RNA
gtcctggagagaacaggcaatg

SEQ ID NO: 12472 - RNA, 22 nt, synthetic construct
  source 1..22: mol_type = other RNA
gtcttccgaggaacttctcgtc

SEQ ID NO: 12473 - RNA, 22 nt, synthetic construct
  source 1..22: mol_type = other RNA
gtgacagcagtgcctgctcccc

SEQ ID NO: 12474 - RNA, 22 nt, synthetic construct
  source 1..22: mol_type = other RNA
gtgcctgctccccctaacattg

SEQ ID NO: 12475 - RNA, 22 nt, synthetic construct
  source 1..22: mol_type = other RNA
gtggattgtcttgtgggtctgc

SEQ ID NO: 12476 - RNA, 22 nt, synthetic construct
  source 1..22: mol_type = other RNA
gtgtcttccgaggaacttctcg

SEQ ID NO: 12477 - RNA, 22 nt, synthetic construct
  source 1..22: mol_type = other RNA
gttcctcggaagacacagctgg

SEQ ID NO: 12478 - RNA, 22 nt, synthetic construct
  source 1..22: mol_type = other RNA
gttcgggacctaaagaaactgg

SEQ ID NO: 12479 - RNA, 22 nt, synthetic construct
  source 1..22: mol_type = other RNA
gttctctccaggacgagaagtt

SEQ ID NO: 12480 - RNA, 22 nt, synthetic construct
  source 1..22: mol_type = other RNA
gtttctttaggtcccgaacagc

SEQ ID NO: 12481 - RNA, 22 nt, synthetic construct
  source 1..22: mol_type = other RNA
gtttgcgtaagcaaaggggtgg

SEQ ID NO: 12482 - RNA, 22 nt, synthetic construct
  source 1..22: mol_type = other RNA
taaagaaactggagtttgcgta

SEQ ID NO: 12483 - RNA, 22 nt, synthetic construct
  source 1..22: mol_type = other RNA
taacattgcctgttctctccag

SEQ ID NO: 12484 - RNA, 22 nt, synthetic construct
  source 1..22: mol_type = other RNA
taagcaaaggggtggattgtct

SEQ ID NO: 12485 - RNA, 22 nt, synthetic construct
  source 1..22: mol_type = other RNA
tacgcaaactccagtttcttta

SEQ ID NO: 12486 - RNA, 22 nt, synthetic construct
  source 1..22: mol_type = other RNA
taggtcccgaacagcagggagc

SEQ ID NO: 12487 - RNA, 22 nt, synthetic construct
  source 1..22: mol_type = other RNA
tccacccctttgcttacgcaaa

SEQ ID NO: 12488 - RNA, 22 nt, synthetic construct
  source 1..22: mol_type = other RNA
tccaggacgagaagttcctcgg

SEQ ID NO: 12489 - RNA, 22 nt, synthetic construct
  source 1..22: mol_type = other RNA
tccagtttctttaggtcccgaa

SEQ ID NO: 12490 - RNA, 22 nt, synthetic construct
  source 1..22: mol_type = other RNA
tccccagctgtgtcttccgagg

SEQ ID NO: 12491 - RNA, 22 nt, synthetic construct
  source 1..22: mol_type = other RNA
tccccctaacattgcctgttct

SEQ ID NO: 12492 - RNA, 22 nt, synthetic construct
  source 1..22: mol_type = other RNA
tcccgaacagcagggagctccc

SEQ ID NO: 12493 - RNA, 22 nt, synthetic construct
  source 1..22: mol_type = other RNA
tccctgctgttcgggacctaaa

SEQ ID NO: 12494 - RNA, 22 nt, synthetic construct
  source 1..22: mol_type = other RNA
tccgaggaacttctcgtcctgg

SEQ ID NO: 12495 - RNA, 22 nt, synthetic construct
  source 1..22: mol_type = other RNA
tcctcggaagacacagctgggg

SEQ ID NO: 12496 - RNA, 22 nt, synthetic construct
  source 1..22: mol_type = other RNA
tcctggagagaacaggcaatgt

SEQ ID NO: 12497 - RNA, 22 nt, synthetic construct
  source 1..22: mol_type = other RNA
tcggaagacacagctggggagc

SEQ ID NO: 12498 - RNA, 22 nt, synthetic construct
  source 1..22: mol_type = other RNA
tcgggacctaaagaaactggag

SEQ ID NO: 12499 - RNA, 22 nt, synthetic construct
  source 1..22: mol_type = other RNA
tcgtcctggagagaacaggcaa

SEQ ID NO: 12500 - RNA, 22 nt, synthetic construct
  source 1..22: mol_type = other RNA
tctccaggacgagaagttcctc

SEQ ID NO: 12501 - RNA, 22 nt, synthetic construct
  source 1..22: mol_type = other RNA
tctcgtcctggagagaacaggc

SEQ ID NO: 12502 - RNA, 22 nt, synthetic construct
  source 1..22: mol_type = other RNA
tctctccaggacgagaagttcc

SEQ ID NO: 12503 - RNA, 22 nt, synthetic construct
  source 1..22: mol_type = other RNA
tcttccgaggaacttctcgtcc

SEQ ID NO: 12504 - RNA, 22 nt, synthetic construct
  source 1..22: mol_type = other RNA
tctttaggtcccgaacagcagg

SEQ ID NO: 12505 - RNA, 22 nt, synthetic construct
  source 1..22: mol_type = other RNA
tgacagcagtgcctgctccccc

SEQ ID NO: 12506 - RNA, 22 nt, synthetic construct
  source 1..22: mol_type = other RNA
tgcctgctccccctaacattgc

SEQ ID NO: 12507 - RNA, 22 nt, synthetic construct
  source 1..22: mol_type = other RNA
tgcctgttctctccaggacgag

SEQ ID NO: 12508 - RNA, 22 nt, synthetic construct
  source 1..22: mol_type = other RNA
tgcgcagacccacaagacaatc

SEQ ID NO: 12509 - RNA, 22 nt, synthetic construct
  source 1..22: mol_type = other RNA
tgcgtaagcaaaggggtggatt

SEQ ID NO: 12510 - RNA, 22 nt, synthetic construct
  source 1..22: mol_type = other RNA
tgctccccctaacattgcctgt

SEQ ID NO: 12511 - RNA, 22 nt, synthetic construct
  source 1..22: mol_type = other RNA
tgctgttcgggacctaaagaaa

SEQ ID NO: 12512 - RNA, 22 nt, synthetic construct
  source 1..22: mol_type = other RNA
tgcttacgcaaactccagtttc

SEQ ID NO: 12513 - RNA, 22 nt, synthetic construct
  source 1..22: mol_type = other RNA
tggagagaacaggcaatgttag

SEQ ID NO: 12514 - RNA, 22 nt, synthetic construct
  source 1..22: mol_type = other RNA
tggagtttgcgtaagcaaaggg

SEQ ID NO: 12515 - RNA, 22 nt, synthetic construct
  source 1..22: mol_type = other RNA
tggattgtcttgtgggtctgcg

SEQ ID NO: 12516 - RNA, 22 nt, synthetic construct
  source 1..22: mol_type = other RNA
tggggagctccctgctgttcgg

SEQ ID NO: 12517 - RNA, 22 nt, synthetic construct
  source 1..22: mol_type = other RNA
tgtcttccgaggaacttctcgt

SEQ ID NO: 12518 - RNA, 22 nt, synthetic construct
  source 1..22: mol_type = other RNA
tgtgtcttccgaggaacttctc

SEQ ID NO: 12519 - RNA, 22 nt, synthetic construct
  source 1..22: mol_type = other RNA
tgttcgggacctaaagaaactg

SEQ ID NO: 12520 - RNA, 22 nt, synthetic construct
  source 1..22: mol_type = other RNA
tgttctctccaggacgagaagt

SEQ ID NO: 12521 - RNA, 22 nt, synthetic construct
  source 1..22: mol_type = other RNA
ttacgcaaactccagtttcttt

SEQ ID NO: 12522 - RNA, 22 nt, synthetic construct
  source 1..22: mol_type = other RNA
ttaggtcccgaacagcagggag

SEQ ID NO: 12523 - RNA, 22 nt, synthetic construct
  source 1..22: mol_type = other RNA
ttccgaggaacttctcgtcctg

SEQ ID NO: 12524 - RNA, 22 nt, synthetic construct
  source 1..22: mol_type = other RNA
ttcctcggaagacacagctggg

SEQ ID NO: 12525 - RNA, 22 nt, synthetic construct
  source 1..22: mol_type = other RNA
ttcgggacctaaagaaactgga

SEQ ID NO: 12526 - RNA, 22 nt, synthetic construct
  source 1..22: mol_type = other RNA
ttctcgtcctggagagaacagg

SEQ ID NO: 12527 - RNA, 22 nt, synthetic construct
  source 1..22: mol_type = other RNA
ttctctccaggacgagaagttc

SEQ ID NO: 12528 - RNA, 22 nt, synthetic construct
  source 1..22: mol_type = other RNA
ttctttaggtcccgaacagcag

SEQ ID NO: 12529 - RNA, 22 nt, synthetic construct
  source 1..22: mol_type = other RNA
ttgcctgttctctccaggacga

SEQ ID NO: 12530 - RNA, 22 nt, synthetic construct
  source 1..22: mol_type = other RNA
ttgcgcagacccacaagacaat

SEQ ID NO: 12531 - RNA, 22 nt, synthetic construct
  source 1..22: mol_type = other RNA
ttgcgtaagcaaaggggtggat

SEQ ID NO: 12532 - RNA, 22 nt, synthetic construct
  source 1..22: mol_type = other RNA
ttgcttacgcaaactccagttt

SEQ ID NO: 12533 - RNA, 22 nt, synthetic construct
  source 1..22: mol_type = other RNA
tttaggtcccgaacagcaggga

SEQ ID NO: 12534 - RNA, 22 nt, synthetic construct
  source 1..22: mol_type = other RNA
tttctttaggtcccgaacagca

SEQ ID NO: 12535 - RNA, 22 nt, synthetic construct
  source 1..22: mol_type = other RNA
tttgcgtaagcaaaggggtgga

SEQ ID NO: 12536 - RNA, 22 nt, synthetic construct
  source 1..22: mol_type = other RNA
tttgcttacgcaaactccagtt

SEQ ID NO: 12537 - RNA, 20 nt, synthetic construct
  source 1..20: mol_type = other RNA
aaaaggccgtgaggatccgc

SEQ ID NO: 12538 - RNA, 20 nt, synthetic construct
  source 1..20: mol_type = other RNA
aaactggtgcggatcctcac

SEQ ID NO: 12539 - RNA, 20 nt, synthetic construct
  source 1..20: mol_type = other RNA
aaagagcaagggtaagacct

SEQ ID NO: 12540 - RNA, 20 nt, synthetic construct
  source 1..20: mol_type = other RNA
aaagcctgggggcctgagac

SEQ ID NO: 12541 - RNA, 20 nt, synthetic construct
  source 1..20: mol_type = other RNA
aaaggccgtgaggatccgca

SEQ ID NO: 12542 - RNA, 20 nt, synthetic construct
  source 1..20: mol_type = other RNA
aactggtgcggatcctcacg

SEQ ID NO: 12543 - RNA, 20 nt, synthetic construct
  source 1..20: mol_type = other RNA
aagagcaagggtaagacctc

SEQ ID NO: 12544 - RNA, 20 nt, synthetic construct
  source 1..20: mol_type = other RNA
aagcctgggggcctgagaca

SEQ ID NO: 12545 - RNA, 20 nt, synthetic construct
  source 1..20: mol_type = other RNA
aaggccgtgaggatccgcac

SEQ ID NO: 12546 - RNA, 20 nt, synthetic construct
  source 1..20: mol_type = other RNA
aaggggtcccagagtctata

SEQ ID NO: 12547 - RNA, 20 nt, synthetic construct
  source 1..20: mol_type = other RNA
aagggtaagacctccagtca

SEQ ID NO: 12548 - RNA, 20 nt, synthetic construct
  source 1..20: mol_type = other RNA
acagggcccagcctaggagg

SEQ ID NO: 12549 - RNA, 20 nt, synthetic construct
  source 1..20: mol_type = other RNA
accagtttggggaaagcctg

SEQ ID NO: 12550 - RNA, 20 nt, synthetic construct
  source 1..20: mol_type = other RNA
acccagatgttgagaggaag

SEQ ID NO: 12551 - RNA, 20 nt, synthetic construct
  source 1..20: mol_type = other RNA
acccttgctctttgcctcct

SEQ ID NO: 12552 - RNA, 20 nt, synthetic construct
  source 1..20: mol_type = other RNA
acggccttttcctccctgca

SEQ ID NO: 12553 - RNA, 20 nt, synthetic construct
  source 1..20: mol_type = other RNA
actcactccagatgctgcag

SEQ ID NO: 12554 - RNA, 20 nt, synthetic construct
  source 1..20: mol_type = other RNA
actccagatgctgcagggag

SEQ ID NO: 12555 - RNA, 20 nt, synthetic construct
  source 1..20: mol_type = other RNA
actctgggaccccttcctct

SEQ ID NO: 12556 - RNA, 20 nt, synthetic construct
  source 1..20: mol_type = other RNA
actggaggtcttacccttgc

SEQ ID NO: 12557 - RNA, 20 nt, synthetic construct
  source 1..20: mol_type = other RNA
actggtgcggatcctcacgg

SEQ ID NO: 12558 - RNA, 20 nt, synthetic construct
  source 1..20: mol_type = other RNA
actgtgactggaggtcttac

SEQ ID NO: 12559 - RNA, 20 nt, synthetic construct
  source 1..20: mol_type = other RNA
agacagggcccagcctagga

SEQ ID NO: 12560 - RNA, 20 nt, synthetic construct
  source 1..20: mol_type = other RNA
agactctgggaccccttcct

SEQ ID NO: 12561 - RNA, 20 nt, synthetic construct
  source 1..20: mol_type = other RNA
agagcaagggtaagacctcc

SEQ ID NO: 12562 - RNA, 20 nt, synthetic construct
  source 1..20: mol_type = other RNA
agaggaaggggtcccagagt

SEQ ID NO: 12563 - RNA, 20 nt, synthetic construct
  source 1..20: mol_type = other RNA
agagtctatactcactccag

SEQ ID NO: 12564 - RNA, 20 nt, synthetic construct
  source 1..20: mol_type = other RNA
agatgctgcagggaggaaaa

SEQ ID NO: 12565 - RNA, 20 nt, synthetic construct
  source 1..20: mol_type = other RNA
agatgttgagaggaaggggt

SEQ ID NO: 12566 - RNA, 20 nt, synthetic construct
  source 1..20: mol_type = other RNA
agcaagggtaagacctccag

SEQ ID NO: 12567 - RNA, 20 nt, synthetic construct
  source 1..20: mol_type = other RNA
agcatctggagtgagtatag

SEQ ID NO: 12568 - RNA, 20 nt, synthetic construct
  source 1..20: mol_type = other RNA
agcctaggaggcaaagagca

SEQ ID NO: 12569 - RNA, 20 nt, synthetic construct
  source 1..20: mol_type = other RNA
agcctgggggcctgagacag

SEQ ID NO: 12570 - RNA, 20 nt, synthetic construct
  source 1..20: mol_type = other RNA
aggaaaaggccgtgaggatc

SEQ ID NO: 12571 - RNA, 20 nt, synthetic construct
  source 1..20: mol_type = other RNA
aggaaggggtcccagagtct

SEQ ID NO: 12572 - RNA, 20 nt, synthetic construct
  source 1..20: mol_type = other RNA
aggaggcaaagagcaagggt

SEQ ID NO: 12573 - RNA, 20 nt, synthetic construct
  source 1..20: mol_type = other RNA
aggatccgcaccagtttggg

SEQ ID NO: 12574 - RNA, 20 nt, synthetic construct
  source 1..20: mol_type = other RNA
aggcaaagagcaagggtaag

SEQ ID NO: 12575 - RNA, 20 nt, synthetic construct
  source 1..20: mol_type = other RNA
aggcccccaggctttcccca

SEQ ID NO: 12576 - RNA, 20 nt, synthetic construct
  source 1..20: mol_type = other RNA
aggccgtgaggatccgcacc

SEQ ID NO: 12577 - RNA, 20 nt, synthetic construct
  source 1..20: mol_type = other RNA
aggctgggccctgtctcagg

SEQ ID NO: 12578 - RNA, 20 nt, synthetic construct
  source 1..20: mol_type = other RNA
aggctttccccaaactggtg

SEQ ID NO: 12579 - RNA, 20 nt, synthetic construct
  source 1..20: mol_type = other RNA
agggaggaaaaggccgtgag

SEQ ID NO: 12580 - RNA, 20 nt, synthetic construct
  source 1..20: mol_type = other RNA
agggcccagcctaggaggca

SEQ ID NO: 12581 - RNA, 20 nt, synthetic construct
  source 1..20: mol_type = other RNA
aggggtcccagagtctatac

SEQ ID NO: 12582 - RNA, 20 nt, synthetic construct
  source 1..20: mol_type = other RNA
agggtaagacctccagtcac

SEQ ID NO: 12583 - RNA, 20 nt, synthetic construct
  source 1..20: mol_type = other RNA
aggtcttacccttgctcttt

SEQ ID NO: 12584 - RNA, 20 nt, synthetic construct
  source 1..20: mol_type = other RNA
agtatagactctgggacccc

SEQ ID NO: 12585 - RNA, 20 nt, synthetic construct
  source 1..20: mol_type = other RNA
agtctatactcactccagat

SEQ ID NO: 12586 - RNA, 20 nt, synthetic construct
  source 1..20: mol_type = other RNA
agtgagtatagactctggga

SEQ ID NO: 12587 - RNA, 20 nt, synthetic construct
  source 1..20: mol_type = other RNA
agtttggggaaagcctgggg

SEQ ID NO: 12588 - RNA, 20 nt, synthetic construct
  source 1..20: mol_type = other RNA
atactcactccagatgctgc

SEQ ID NO: 12589 - RNA, 20 nt, synthetic construct
  source 1..20: mol_type = other RNA
atagactctgggaccccttc

SEQ ID NO: 12590 - RNA, 20 nt, synthetic construct
  source 1..20: mol_type = other RNA
atccgcaccagtttggggaa

SEQ ID NO: 12591 - RNA, 20 nt, synthetic construct
  source 1..20: mol_type = other RNA
atcctcacggccttttcctc

SEQ ID NO: 12592 - RNA, 20 nt, synthetic construct
  source 1..20: mol_type = other RNA
atctggagtgagtatagact

SEQ ID NO: 12593 - RNA, 20 nt, synthetic construct
  source 1..20: mol_type = other RNA
atgctgcagggaggaaaagg

SEQ ID NO: 12594 - RNA, 20 nt, synthetic construct
  source 1..20: mol_type = other RNA
atgttgagaggaaggggtcc

SEQ ID NO: 12595 - RNA, 20 nt, synthetic construct
  source 1..20: mol_type = other RNA
caaactggtgcggatcctca

SEQ ID NO: 12596 - RNA, 20 nt, synthetic construct
  source 1..20: mol_type = other RNA
caaagagcaagggtaagacc

SEQ ID NO: 12597 - RNA, 20 nt, synthetic construct
  source 1..20: mol_type = other RNA
caagggtaagacctccagtc

SEQ ID NO: 12598 - RNA, 20 nt, synthetic construct
  source 1..20: mol_type = other RNA
caccagtttggggaaagcct

SEQ ID NO: 12599 - RNA, 20 nt, synthetic construct
  source 1..20: mol_type = other RNA
cacccagatgttgagaggaa

SEQ ID NO: 12600 - RNA, 20 nt, synthetic construct
  source 1..20: mol_type = other RNA
cacggccttttcctccctgc

SEQ ID NO: 12601 - RNA, 20 nt, synthetic construct
  source 1..20: mol_type = other RNA
cactccagatgctgcaggga

SEQ ID NO: 12602 - RNA, 20 nt, synthetic construct
  source 1..20: mol_type = other RNA
cagagtctatactcactcca

SEQ ID NO: 12603 - RNA, 20 nt, synthetic construct
  source 1..20: mol_type = other RNA
cagatgctgcagggaggaaa

SEQ ID NO: 12604 - RNA, 20 nt, synthetic construct
  source 1..20: mol_type = other RNA
cagatgttgagaggaagggg

SEQ ID NO: 12605 - RNA, 20 nt, synthetic construct
  source 1..20: mol_type = other RNA
cagcatctggagtgagtata

SEQ ID NO: 12606 - RNA, 20 nt, synthetic construct
  source 1..20: mol_type = other RNA
cagcctaggaggcaaagagc

SEQ ID NO: 12607 - RNA, 20 nt, synthetic construct
  source 1..20: mol_type = other RNA
caggcccccaggctttcccc

SEQ ID NO: 12608 - RNA, 20 nt, synthetic construct
  source 1..20: mol_type = other RNA
caggctttccccaaactggt

SEQ ID NO: 12609 - RNA, 20 nt, synthetic construct
  source 1..20: mol_type = other RNA
cagggaggaaaaggccgtga

SEQ ID NO: 12610 - RNA, 20 nt, synthetic construct
  source 1..20: mol_type = other RNA
cagggcccagcctaggaggc

SEQ ID NO: 12611 - RNA, 20 nt, synthetic construct
  source 1..20: mol_type = other RNA
cagtttggggaaagcctggg

SEQ ID NO: 12612 - RNA, 20 nt, synthetic construct
  source 1..20: mol_type = other RNA
catctggagtgagtatagac

SEQ ID NO: 12613 - RNA, 20 nt, synthetic construct
  source 1..20: mol_type = other RNA
ccaaactggtgcggatcctc

SEQ ID NO: 12614 - RNA, 20 nt, synthetic construct
  source 1..20: mol_type = other RNA
ccagagtctatactcactcc

SEQ ID NO: 12615 - RNA, 20 nt, synthetic construct
  source 1..20: mol_type = other RNA
ccagatgctgcagggaggaa

SEQ ID NO: 12616 - RNA, 20 nt, synthetic construct
  source 1..20: mol_type = other RNA
ccagatgttgagaggaaggg

SEQ ID NO: 12617 - RNA, 20 nt, synthetic construct
  source 1..20: mol_type = other RNA
ccagcctaggaggcaaagag

SEQ ID NO: 12618 - RNA, 20 nt, synthetic construct
  source 1..20: mol_type = other RNA
ccaggctttccccaaactgg

SEQ ID NO: 12619 - RNA, 20 nt, synthetic construct
  source 1..20: mol_type = other RNA
ccagtttggggaaagcctgg

SEQ ID NO: 12620 - RNA, 20 nt, synthetic construct
  source 1..20: mol_type = other RNA
cccaaactggtgcggatcct

SEQ ID NO: 12621 - RNA, 20 nt, synthetic construct
  source 1..20: mol_type = other RNA
cccagagtctatactcactc

SEQ ID NO: 12622 - RNA, 20 nt, synthetic construct
  source 1..20: mol_type = other RNA
cccagatgttgagaggaagg

SEQ ID NO: 12623 - RNA, 20 nt, synthetic construct
  source 1..20: mol_type = other RNA
cccagcctaggaggcaaaga

SEQ ID NO: 12624 - RNA, 20 nt, synthetic construct
  source 1..20: mol_type = other RNA
cccaggctttccccaaactg

SEQ ID NO: 12625 - RNA, 20 nt, synthetic construct
  source 1..20: mol_type = other RNA
ccccaaactggtgcggatcc

SEQ ID NO: 12626 - RNA, 20 nt, synthetic construct
  source 1..20: mol_type = other RNA
ccccaggctttccccaaact

SEQ ID NO: 12627 - RNA, 20 nt, synthetic construct
  source 1..20: mol_type = other RNA
cccccaggctttccccaaac

SEQ ID NO: 12628 - RNA, 20 nt, synthetic construct
  source 1..20: mol_type = other RNA
ccctgcagcatctggagtga

SEQ ID NO: 12629 - RNA, 20 nt, synthetic construct
  source 1..20: mol_type = other RNA
ccctgtctcaggcccccagg

SEQ ID NO: 12630 - RNA, 20 nt, synthetic construct
  source 1..20: mol_type = other RNA
cccttgctctttgcctccta

SEQ ID NO: 12631 - RNA, 20 nt, synthetic construct
  source 1..20: mol_type = other RNA
ccgcaccagtttggggaaag

SEQ ID NO: 12632 - RNA, 20 nt, synthetic construct
  source 1..20: mol_type = other RNA
ccgtgaggatccgcaccagt

SEQ ID NO: 12633 - RNA, 20 nt, synthetic construct
  source 1..20: mol_type = other RNA
cctaggaggcaaagagcaag

SEQ ID NO: 12634 - RNA, 20 nt, synthetic construct
  source 1..20: mol_type = other RNA
cctaggctgggccctgtctc

SEQ ID NO: 12635 - RNA, 20 nt, synthetic construct
  source 1..20: mol_type = other RNA
cctcacggccttttcctccc

SEQ ID NO: 12636 - RNA, 20 nt, synthetic construct
  source 1..20: mol_type = other RNA
cctccctgcagcatctggag

SEQ ID NO: 12637 - RNA, 20 nt, synthetic construct
  source 1..20: mol_type = other RNA
cctcctaggctgggccctgt

SEQ ID NO: 12638 - RNA, 20 nt, synthetic construct
  source 1..20: mol_type = other RNA
cctgagacagggcccagcct

SEQ ID NO: 12639 - RNA, 20 nt, synthetic construct
  source 1..20: mol_type = other RNA
cctgcagcatctggagtgag

SEQ ID NO: 12640 - RNA, 20 nt, synthetic construct
  source 1..20: mol_type = other RNA
cctgggggcctgagacaggg

SEQ ID NO: 12641 - RNA, 20 nt, synthetic construct
  source 1..20: mol_type = other RNA
cctgtctcaggcccccaggc

SEQ ID NO: 12642 - RNA, 20 nt, synthetic construct
  source 1..20: mol_type = other RNA
ccttgctctttgcctcctag

SEQ ID NO: 12643 - RNA, 20 nt, synthetic construct
  source 1..20: mol_type = other RNA
ccttttcctccctgcagcat

SEQ ID NO: 12644 - RNA, 20 nt, synthetic construct
  source 1..20: mol_type = other RNA
cgcaccagtttggggaaagc

SEQ ID NO: 12645 - RNA, 20 nt, synthetic construct
  source 1..20: mol_type = other RNA
cggatcctcacggccttttc

SEQ ID NO: 12646 - RNA, 20 nt, synthetic construct
  source 1..20: mol_type = other RNA
cggccttttcctccctgcag

SEQ ID NO: 12647 - RNA, 20 nt, synthetic construct
  source 1..20: mol_type = other RNA
cgtgaggatccgcaccagtt

SEQ ID NO: 12648 - RNA, 20 nt, synthetic construct
  source 1..20: mol_type = other RNA
ctaggaggcaaagagcaagg

SEQ ID NO: 12649 - RNA, 20 nt, synthetic construct
  source 1..20: mol_type = other RNA
ctaggctgggccctgtctca

SEQ ID NO: 12650 - RNA, 20 nt, synthetic construct
  source 1..20: mol_type = other RNA
ctatactcactccagatgct

SEQ ID NO: 12651 - RNA, 20 nt, synthetic construct
  source 1..20: mol_type = other RNA
ctcacggccttttcctccct

SEQ ID NO: 12652 - RNA, 20 nt, synthetic construct
  source 1..20: mol_type = other RNA
ctcactccagatgctgcagg

SEQ ID NO: 12653 - RNA, 20 nt, synthetic construct
  source 1..20: mol_type = other RNA
ctcaggcccccaggctttcc

SEQ ID NO: 12654 - RNA, 20 nt, synthetic construct
  source 1..20: mol_type = other RNA
ctccagatgctgcagggagg

SEQ ID NO: 12655 - RNA, 20 nt, synthetic construct
  source 1..20: mol_type = other RNA
ctccctgcagcatctggagt

SEQ ID NO: 12656 - RNA, 20 nt, synthetic construct
  source 1..20: mol_type = other RNA
ctcctaggctgggccctgtc

SEQ ID NO: 12657 - RNA, 20 nt, synthetic construct
  source 1..20: mol_type = other RNA
ctctgggaccccttcctctc

SEQ ID NO: 12658 - RNA, 20 nt, synthetic construct
  source 1..20: mol_type = other RNA
ctctttgcctcctaggctgg

SEQ ID NO: 12659 - RNA, 20 nt, synthetic construct
  source 1..20: mol_type = other RNA
ctgagacagggcccagccta

SEQ ID NO: 12660 - RNA, 20 nt, synthetic construct
  source 1..20: mol_type = other RNA
ctgcagcatctggagtgagt

SEQ ID NO: 12661 - RNA, 20 nt, synthetic construct
  source 1..20: mol_type = other RNA
ctgcagggaggaaaaggccg

SEQ ID NO: 12662 - RNA, 20 nt, synthetic construct
  source 1..20: mol_type = other RNA
ctggaggtcttacccttgct

SEQ ID NO: 12663 - RNA, 20 nt, synthetic construct
  source 1..20: mol_type = other RNA
ctggagtgagtatagactct

SEQ ID NO: 12664 - RNA, 20 nt, synthetic construct
  source 1..20: mol_type = other RNA
ctgggaccccttcctctcaa

SEQ ID NO: 12665 - RNA, 20 nt, synthetic construct
  source 1..20: mol_type = other RNA
ctgggccctgtctcaggccc

SEQ ID NO: 12666 - RNA, 20 nt, synthetic construct
  source 1..20: mol_type = other RNA
ctgggggcctgagacagggc

SEQ ID NO: 12667 - RNA, 20 nt, synthetic construct
  source 1..20: mol_type = other RNA
ctggtgcggatcctcacggc

SEQ ID NO: 12668 - RNA, 20 nt, synthetic construct
  source 1..20: mol_type = other RNA
ctgtctcaggcccccaggct

SEQ ID NO: 12669 - RNA, 20 nt, synthetic construct
  source 1..20: mol_type = other RNA
ctgtgactggaggtcttacc

SEQ ID NO: 12670 - RNA, 20 nt, synthetic construct
  source 1..20: mol_type = other RNA
ctgtgactgtgactggaggt

SEQ ID NO: 12671 - RNA, 20 nt, synthetic construct
  source 1..20: mol_type = other RNA
cttacccttgctctttgcct

SEQ ID NO: 12672 - RNA, 20 nt, synthetic construct
  source 1..20: mol_type = other RNA
cttgctctttgcctcctagg

SEQ ID NO: 12673 - RNA, 20 nt, synthetic construct
  source 1..20: mol_type = other RNA
ctttccccaaactggtgcgg

SEQ ID NO: 12674 - RNA, 20 nt, synthetic construct
  source 1..20: mol_type = other RNA
ctttgcctcctaggctgggc

SEQ ID NO: 12675 - RNA, 20 nt, synthetic construct
  source 1..20: mol_type = other RNA
cttttcctccctgcagcatc

SEQ ID NO: 12676 - RNA, 20 nt, synthetic construct
  source 1..20: mol_type = other RNA
gaaaaggccgtgaggatccg

SEQ ID NO: 12677 - RNA, 20 nt, synthetic construct
  source 1..20: mol_type = other RNA
gaaagcctgggggcctgaga

SEQ ID NO: 12678 - RNA, 20 nt, synthetic construct
  source 1..20: mol_type = other RNA
gaaggggtcccagagtctat

SEQ ID NO: 12679 - RNA, 20 nt, synthetic construct
  source 1..20: mol_type = other RNA
gacagggcccagcctaggag

SEQ ID NO: 12680 - RNA, 20 nt, synthetic construct
  source 1..20: mol_type = other RNA
gaccccttcctctcaacatc

SEQ ID NO: 12681 - RNA, 20 nt, synthetic construct
  source 1..20: mol_type = other RNA
gactctgggaccccttcctc

SEQ ID NO: 12682 - RNA, 20 nt, synthetic construct
  source 1..20: mol_type = other RNA
gactggaggtcttacccttg

SEQ ID NO: 12683 - RNA, 20 nt, synthetic construct
  source 1..20: mol_type = other RNA
gactgtgactggaggtctta

SEQ ID NO: 12684 - RNA, 20 nt, synthetic construct
  source 1..20: mol_type = other RNA
gagacagggcccagcctagg

SEQ ID NO: 12685 - RNA, 20 nt, synthetic construct
  source 1..20: mol_type = other RNA
gagaggaaggggtcccagag

SEQ ID NO: 12686 - RNA, 20 nt, synthetic construct
  source 1..20: mol_type = other RNA
gagcaagggtaagacctcca

SEQ ID NO: 12687 - RNA, 20 nt, synthetic construct
  source 1..20: mol_type = other RNA
gaggaaaaggccgtgaggat

SEQ ID NO: 12688 - RNA, 20 nt, synthetic construct
  source 1..20: mol_type = other RNA
gaggaaggggtcccagagtc

SEQ ID NO: 12689 - RNA, 20 nt, synthetic construct
  source 1..20: mol_type = other RNA
gaggatccgcaccagtttgg

SEQ ID NO: 12690 - RNA, 20 nt, synthetic construct
  source 1..20: mol_type = other RNA
gaggcaaagagcaagggtaa

SEQ ID NO: 12691 - RNA, 20 nt, synthetic construct
  source 1..20: mol_type = other RNA
gaggtcttacccttgctctt

SEQ ID NO: 12692 - RNA, 20 nt, synthetic construct
  source 1..20: mol_type = other RNA
gagtatagactctgggaccc

SEQ ID NO: 12693 - RNA, 20 nt, synthetic construct
  source 1..20: mol_type = other RNA
gagtctatactcactccaga

SEQ ID NO: 12694 - RNA, 20 nt, synthetic construct
  source 1..20: mol_type = other RNA
gagtgagtatagactctggg

SEQ ID NO: 12695 - RNA, 20 nt, synthetic construct
  source 1..20: mol_type = other RNA
gatccgcaccagtttgggga

SEQ ID NO: 12696 - RNA, 20 nt, synthetic construct
  source 1..20: mol_type = other RNA
gatcctcacggccttttcct

SEQ ID NO: 12697 - RNA, 20 nt, synthetic construct
  source 1..20: mol_type = other RNA
gatgctgcagggaggaaaag

SEQ ID NO: 12698 - RNA, 20 nt, synthetic construct
  source 1..20: mol_type = other RNA
gatgttgagaggaaggggtc

SEQ ID NO: 12699 - RNA, 20 nt, synthetic construct
  source 1..20: mol_type = other RNA
gcaaagagcaagggtaagac

SEQ ID NO: 12700 - RNA, 20 nt, synthetic construct
  source 1..20: mol_type = other RNA
gcaagggtaagacctccagt

SEQ ID NO: 12701 - RNA, 20 nt, synthetic construct
  source 1..20: mol_type = other RNA
gcaccagtttggggaaagcc

SEQ ID NO: 12702 - RNA, 20 nt, synthetic construct
  source 1..20: mol_type = other RNA
gcacccagatgttgagagga

SEQ ID NO: 12703 - RNA, 20 nt, synthetic construct
  source 1..20: mol_type = other RNA
gcagcatctggagtgagtat

SEQ ID NO: 12704 - RNA, 20 nt, synthetic construct
  source 1..20: mol_type = other RNA
gcagggaggaaaaggccgtg

SEQ ID NO: 12705 - RNA, 20 nt, synthetic construct
  source 1..20: mol_type = other RNA
gcatctggagtgagtataga

SEQ ID NO: 12706 - RNA, 20 nt, synthetic construct
  source 1..20: mol_type = other RNA
gcccagcctaggaggcaaag

SEQ ID NO: 12707 - RNA, 20 nt, synthetic construct
  source 1..20: mol_type = other RNA
gcccccaggctttccccaaa

SEQ ID NO: 12708 - RNA, 20 nt, synthetic construct
  source 1..20: mol_type = other RNA
gccctgtctcaggcccccag

SEQ ID NO: 12709 - RNA, 20 nt, synthetic construct
  source 1..20: mol_type = other RNA
gccgtgaggatccgcaccag

SEQ ID NO: 12710 - RNA, 20 nt, synthetic construct
  source 1..20: mol_type = other RNA
gcctaggaggcaaagagcaa

SEQ ID NO: 12711 - RNA, 20 nt, synthetic construct
  source 1..20: mol_type = other RNA
gcctcctaggctgggccctg

SEQ ID NO: 12712 - RNA, 20 nt, synthetic construct
  source 1..20: mol_type = other RNA
gcctgagacagggcccagcc

SEQ ID NO: 12713 - RNA, 20 nt, synthetic construct
  source 1..20: mol_type = other RNA
gcctgggggcctgagacagg

SEQ ID NO: 12714 - RNA, 20 nt, synthetic construct
  source 1..20: mol_type = other RNA
gccttttcctccctgcagca

SEQ ID NO: 12715 - RNA, 20 nt, synthetic construct
  source 1..20: mol_type = other RNA
gcggatcctcacggcctttt

SEQ ID NO: 12716 - RNA, 20 nt, synthetic construct
  source 1..20: mol_type = other RNA
gctctttgcctcctaggctg

SEQ ID NO: 12717 - RNA, 20 nt, synthetic construct
  source 1..20: mol_type = other RNA
gctgcagggaggaaaaggcc

SEQ ID NO: 12718 - RNA, 20 nt, synthetic construct
  source 1..20: mol_type = other RNA
gctgggccctgtctcaggcc

SEQ ID NO: 12719 - RNA, 20 nt, synthetic construct
  source 1..20: mol_type = other RNA
gctgtgactgtgactggagg

SEQ ID NO: 12720 - RNA, 20 nt, synthetic construct
  source 1..20: mol_type = other RNA
gctttccccaaactggtgcg

SEQ ID NO: 12721 - RNA, 20 nt, synthetic construct
  source 1..20: mol_type = other RNA
ggaaaaggccgtgaggatcc

SEQ ID NO: 12722 - RNA, 20 nt, synthetic construct
  source 1..20: mol_type = other RNA
ggaaagcctgggggcctgag

SEQ ID NO: 12723 - RNA, 20 nt, synthetic construct
  source 1..20: mol_type = other RNA
ggaaggggtcccagagtcta

SEQ ID NO: 12724 - RNA, 20 nt, synthetic construct
  source 1..20: mol_type = other RNA
ggaccccttcctctcaacat

SEQ ID NO: 12725 - RNA, 20 nt, synthetic construct
  source 1..20: mol_type = other RNA
ggaggaaaaggccgtgagga

SEQ ID NO: 12726 - RNA, 20 nt, synthetic construct
  source 1..20: mol_type = other RNA
ggaggcaaagagcaagggta

SEQ ID NO: 12727 - RNA, 20 nt, synthetic construct
  source 1..20: mol_type = other RNA
ggaggtcttacccttgctct

SEQ ID NO: 12728 - RNA, 20 nt, synthetic construct
  source 1..20: mol_type = other RNA
ggagtgagtatagactctgg

SEQ ID NO: 12729 - RNA, 20 nt, synthetic construct
  source 1..20: mol_type = other RNA
ggatccgcaccagtttgggg

SEQ ID NO: 12730 - RNA, 20 nt, synthetic construct
  source 1..20: mol_type = other RNA
ggatcctcacggccttttcc

SEQ ID NO: 12731 - RNA, 20 nt, synthetic construct
  source 1..20: mol_type = other RNA
ggcaaagagcaagggtaaga

SEQ ID NO: 12732 - RNA, 20 nt, synthetic construct
  source 1..20: mol_type = other RNA
ggcccagcctaggaggcaaa

SEQ ID NO: 12733 - RNA, 20 nt, synthetic construct
  source 1..20: mol_type = other RNA
ggcccccaggctttccccaa

SEQ ID NO: 12734 - RNA, 20 nt, synthetic construct
  source 1..20: mol_type = other RNA
ggccctgtctcaggccccca

SEQ ID NO: 12735 - RNA, 20 nt, synthetic construct
  source 1..20: mol_type = other RNA
ggccgtgaggatccgcacca

SEQ ID NO: 12736 - RNA, 20 nt, synthetic construct
  source 1..20: mol_type = other RNA
ggcctgagacagggcccagc

SEQ ID NO: 12737 - RNA, 20 nt, synthetic construct
  source 1..20: mol_type = other RNA
ggccttttcctccctgcagc

SEQ ID NO: 12738 - RNA, 20 nt, synthetic construct
  source 1..20: mol_type = other RNA
ggctgggccctgtctcaggc

SEQ ID NO: 12739 - RNA, 20 nt, synthetic construct
  source 1..20: mol_type = other RNA
ggctttccccaaactggtgc

SEQ ID NO: 12740 - RNA, 20 nt, synthetic construct
  source 1..20: mol_type = other RNA
gggaaagcctgggggcctga

SEQ ID NO: 12741 - RNA, 20 nt, synthetic construct
  source 1..20: mol_type = other RNA
gggaccccttcctctcaaca

SEQ ID NO: 12742 - RNA, 20 nt, synthetic construct
  source 1..20: mol_type = other RNA
gggaggaaaaggccgtgagg

SEQ ID NO: 12743 - RNA, 20 nt, synthetic construct
  source 1..20: mol_type = other RNA
gggcccagcctaggaggcaa

SEQ ID NO: 12744 - RNA, 20 nt, synthetic construct
  source 1..20: mol_type = other RNA
gggccctgtctcaggccccc

SEQ ID NO: 12745 - RNA, 20 nt, synthetic construct
  source 1..20: mol_type = other RNA
gggcctgagacagggcccag

SEQ ID NO: 12746 - RNA, 20 nt, synthetic construct
  source 1..20: mol_type = other RNA
ggggaaagcctgggggcctg

SEQ ID NO: 12747 - RNA, 20 nt, synthetic construct
  source 1..20: mol_type = other RNA
ggggcctgagacagggccca

SEQ ID NO: 12748 - RNA, 20 nt, synthetic construct
  source 1..20: mol_type = other RNA
gggggcctgagacagggccc

SEQ ID NO: 12749 - RNA, 20 nt, synthetic construct
  source 1..20: mol_type = other RNA
ggggtcccagagtctatact

SEQ ID NO: 12750 - RNA, 20 nt, synthetic construct
  source 1..20: mol_type = other RNA
gggtaagacctccagtcaca

SEQ ID NO: 12751 - RNA, 20 nt, synthetic construct
  source 1..20: mol_type = other RNA
gggtcccagagtctatactc

SEQ ID NO: 12752 - RNA, 20 nt, synthetic construct
  source 1..20: mol_type = other RNA
ggtcccagagtctatactca

SEQ ID NO: 12753 - RNA, 20 nt, synthetic construct
  source 1..20: mol_type = other RNA
ggtcttacccttgctctttg

SEQ ID NO: 12754 - RNA, 20 nt, synthetic construct
  source 1..20: mol_type = other RNA
ggtgcggatcctcacggcct

SEQ ID NO: 12755 - RNA, 20 nt, synthetic construct
  source 1..20: mol_type = other RNA
gtatagactctgggacccct

SEQ ID NO: 12756 - RNA, 20 nt, synthetic construct
  source 1..20: mol_type = other RNA
gtcccagagtctatactcac

SEQ ID NO: 12757 - RNA, 20 nt, synthetic construct
  source 1..20: mol_type = other RNA
gtctatactcactccagatg

SEQ ID NO: 12758 - RNA, 20 nt, synthetic construct
  source 1..20: mol_type = other RNA
gtctcaggcccccaggcttt

SEQ ID NO: 12759 - RNA, 20 nt, synthetic construct
  source 1..20: mol_type = other RNA
gtcttacccttgctctttgc

SEQ ID NO: 12760 - RNA, 20 nt, synthetic construct
  source 1..20: mol_type = other RNA
gtgactggaggtcttaccct

SEQ ID NO: 12761 - RNA, 20 nt, synthetic construct
  source 1..20: mol_type = other RNA
gtgactgtgactggaggtct

SEQ ID NO: 12762 - RNA, 20 nt, synthetic construct
  source 1..20: mol_type = other RNA
gtgaggatccgcaccagttt

SEQ ID NO: 12763 - RNA, 20 nt, synthetic construct
  source 1..20: mol_type = other RNA
gtgagtatagactctgggac

SEQ ID NO: 12764 - RNA, 20 nt, synthetic construct
  source 1..20: mol_type = other RNA
gtgcggatcctcacggcctt

SEQ ID NO: 12765 - RNA, 20 nt, synthetic construct
  source 1..20: mol_type = other RNA
gttgagaggaaggggtccca

SEQ ID NO: 12766 - RNA, 20 nt, synthetic construct
  source 1..20: mol_type = other RNA
gtttggggaaagcctggggg

SEQ ID NO: 12767 - RNA, 20 nt, synthetic construct
  source 1..20: mol_type = other RNA
tacccttgctctttgcctcc

SEQ ID NO: 12768 - RNA, 20 nt, synthetic construct
  source 1..20: mol_type = other RNA
tactcactccagatgctgca

SEQ ID NO: 12769 - RNA, 20 nt, synthetic construct
  source 1..20: mol_type = other RNA
tagactctgggaccccttcc

SEQ ID NO: 12770 - RNA, 20 nt, synthetic construct
  source 1..20: mol_type = other RNA
taggaggcaaagagcaaggg

SEQ ID NO: 12771 - RNA, 20 nt, synthetic construct
  source 1..20: mol_type = other RNA
taggctgggccctgtctcag

SEQ ID NO: 12772 - RNA, 20 nt, synthetic construct
  source 1..20: mol_type = other RNA
tatactcactccagatgctg

SEQ ID NO: 12773 - RNA, 20 nt, synthetic construct
  source 1..20: mol_type = other RNA
tatagactctgggacccctt

SEQ ID NO: 12774 - RNA, 20 nt, synthetic construct
  source 1..20: mol_type = other RNA
tcacggccttttcctccctg

SEQ ID NO: 12775 - RNA, 20 nt, synthetic construct
  source 1..20: mol_type = other RNA
tcactccagatgctgcaggg

SEQ ID NO: 12776 - RNA, 20 nt, synthetic construct
  source 1..20: mol_type = other RNA
tcaggcccccaggctttccc

SEQ ID NO: 12777 - RNA, 20 nt, synthetic construct
  source 1..20: mol_type = other RNA
tccagatgctgcagggagga

SEQ ID NO: 12778 - RNA, 20 nt, synthetic construct
  source 1..20: mol_type = other RNA
tcccagagtctatactcact

SEQ ID NO: 12779 - RNA, 20 nt, synthetic construct
  source 1..20: mol_type = other RNA
tccccaaactggtgcggatc

SEQ ID NO: 12780 - RNA, 20 nt, synthetic construct
  source 1..20: mol_type = other RNA
tccctgcagcatctggagtg

SEQ ID NO: 12781 - RNA, 20 nt, synthetic construct
  source 1..20: mol_type = other RNA
tccgcaccagtttggggaaa

SEQ ID NO: 12782 - RNA, 20 nt, synthetic construct
  source 1..20: mol_type = other RNA
tcctaggctgggccctgtct

SEQ ID NO: 12783 - RNA, 20 nt, synthetic construct
  source 1..20: mol_type = other RNA
tcctcacggccttttcctcc

SEQ ID NO: 12784 - RNA, 20 nt, synthetic construct
  source 1..20: mol_type = other RNA
tcctccctgcagcatctgga

SEQ ID NO: 12785 - RNA, 20 nt, synthetic construct
  source 1..20: mol_type = other RNA
tctatactcactccagatgc

SEQ ID NO: 12786 - RNA, 20 nt, synthetic construct
  source 1..20: mol_type = other RNA
tctcaggcccccaggctttc

SEQ ID NO: 12787 - RNA, 20 nt, synthetic construct
  source 1..20: mol_type = other RNA
tctggagtgagtatagactc

SEQ ID NO: 12788 - RNA, 20 nt, synthetic construct
  source 1..20: mol_type = other RNA
tctgggaccccttcctctca

SEQ ID NO: 12789 - RNA, 20 nt, synthetic construct
  source 1..20: mol_type = other RNA
tcttacccttgctctttgcc

SEQ ID NO: 12790 - RNA, 20 nt, synthetic construct
  source 1..20: mol_type = other RNA
tctttgcctcctaggctggg

SEQ ID NO: 12791 - RNA, 20 nt, synthetic construct
  source 1..20: mol_type = other RNA
tgactggaggtcttaccctt

SEQ ID NO: 12792 - RNA, 20 nt, synthetic construct
  source 1..20: mol_type = other RNA
tgactgtgactggaggtctt

SEQ ID NO: 12793 - RNA, 20 nt, synthetic construct
  source 1..20: mol_type = other RNA
tgagacagggcccagcctag

SEQ ID NO: 12794 - RNA, 20 nt, synthetic construct
  source 1..20: mol_type = other RNA
tgagaggaaggggtcccaga

SEQ ID NO: 12795 - RNA, 20 nt, synthetic construct
  source 1..20: mol_type = other RNA
tgaggatccgcaccagtttg

SEQ ID NO: 12796 - RNA, 20 nt, synthetic construct
  source 1..20: mol_type = other RNA
tgagtatagactctgggacc

SEQ ID NO: 12797 - RNA, 20 nt, synthetic construct
  source 1..20: mol_type = other RNA
tgcacccagatgttgagagg

SEQ ID NO: 12798 - RNA, 20 nt, synthetic construct
  source 1..20: mol_type = other RNA
tgcagcatctggagtgagta

SEQ ID NO: 12799 - RNA, 20 nt, synthetic construct
  source 1..20: mol_type = other RNA
tgcagggaggaaaaggccgt

SEQ ID NO: 12800 - RNA, 20 nt, synthetic construct
  source 1..20: mol_type = other RNA
tgcctcctaggctgggccct

SEQ ID NO: 12801 - RNA, 20 nt, synthetic construct
  source 1..20: mol_type = other RNA
tgcggatcctcacggccttt

SEQ ID NO: 12802 - RNA, 20 nt, synthetic construct
  source 1..20: mol_type = other RNA
tgctctttgcctcctaggct

SEQ ID NO: 12803 - RNA, 20 nt, synthetic construct
  source 1..20: mol_type = other RNA
tgctgcagggaggaaaaggc

SEQ ID NO: 12804 - RNA, 20 nt, synthetic construct
  source 1..20: mol_type = other RNA
tggaggtcttacccttgctc

SEQ ID NO: 12805 - RNA, 20 nt, synthetic construct
  source 1..20: mol_type = other RNA
tggagtgagtatagactctg

SEQ ID NO: 12806 - RNA, 20 nt, synthetic construct
  source 1..20: mol_type = other RNA
tgggaccccttcctctcaac

SEQ ID NO: 12807 - RNA, 20 nt, synthetic construct
  source 1..20: mol_type = other RNA
tgggccctgtctcaggcccc

SEQ ID NO: 12808 - RNA, 20 nt, synthetic construct
  source 1..20: mol_type = other RNA
tggggaaagcctgggggcct

SEQ ID NO: 12809 - RNA, 20 nt, synthetic construct
  source 1..20: mol_type = other RNA
tgggggcctgagacagggcc

SEQ ID NO: 12810 - RNA, 20 nt, synthetic construct
  source 1..20: mol_type = other RNA
tggtgcggatcctcacggcc

SEQ ID NO: 12811 - RNA, 20 nt, synthetic construct
  source 1..20: mol_type = other RNA
tgtctcaggcccccaggctt

SEQ ID NO: 12812 - RNA, 20 nt, synthetic construct
  source 1..20: mol_type = other RNA
tgtgactggaggtcttaccc

SEQ ID NO: 12813 - RNA, 20 nt, synthetic construct
  source 1..20: mol_type = other RNA
tgtgactgtgactggaggtc

SEQ ID NO: 12814 - RNA, 20 nt, synthetic construct
  source 1..20: mol_type = other RNA
tgttgagaggaaggggtccc

SEQ ID NO: 12815 - RNA, 20 nt, synthetic construct
  source 1..20: mol_type = other RNA
ttacccttgctctttgcctc

SEQ ID NO: 12816 - RNA, 20 nt, synthetic construct
  source 1..20: mol_type = other RNA
ttccccaaactggtgcggat

SEQ ID NO: 12817 - RNA, 20 nt, synthetic construct
  source 1..20: mol_type = other RNA
ttcctccctgcagcatctgg

SEQ ID NO: 12818 - RNA, 20 nt, synthetic construct
  source 1..20: mol_type = other RNA
ttgagaggaaggggtcccag

SEQ ID NO: 12819 - RNA, 20 nt, synthetic construct
  source 1..20: mol_type = other RNA
ttgcctcctaggctgggccc

SEQ ID NO: 12820 - RNA, 20 nt, synthetic construct
  source 1..20: mol_type = other RNA
ttgctctttgcctcctaggc

SEQ ID NO: 12821 - RNA, 20 nt, synthetic construct
  source 1..20: mol_type = other RNA
ttggggaaagcctgggggcc

SEQ ID NO: 12822 - RNA, 20 nt, synthetic construct
  source 1..20: mol_type = other RNA
tttccccaaactggtgcgga

SEQ ID NO: 12823 - RNA, 20 nt, synthetic construct
  source 1..20: mol_type = other RNA
tttcctccctgcagcatctg

SEQ ID NO: 12824 - RNA, 20 nt, synthetic construct
  source 1..20: mol_type = other RNA
tttgcctcctaggctgggcc

SEQ ID NO: 12825 - RNA, 20 nt, synthetic construct
  source 1..20: mol_type = other RNA
tttggggaaagcctgggggc

SEQ ID NO: 12826 - RNA, 20 nt, synthetic construct
  source 1..20: mol_type = other RNA
ttttcctccctgcagcatct

SEQ ID NO: 12827 - RNA, 21 nt, synthetic construct
  source 1..21: mol_type = other RNA
aaaaggccgtgaggatccgca

SEQ ID NO: 12828 - RNA, 21 nt, synthetic construct
  source 1..21: mol_type = other RNA
aaactggtgcggatcctcacg

SEQ ID NO: 12829 - RNA, 21 nt, synthetic construct
  source 1..21: mol_type = other RNA
aaagagcaagggtaagacctc

SEQ ID NO: 12830 - RNA, 21 nt, synthetic construct
  source 1..21: mol_type = other RNA
aaagcctgggggcctgagaca

SEQ ID NO: 12831 - RNA, 21 nt, synthetic construct
  source 1..21: mol_type = other RNA
aaaggccgtgaggatccgcac

SEQ ID NO: 12832 - RNA, 21 nt, synthetic construct
  source 1..21: mol_type = other RNA
aactggtgcggatcctcacgg

SEQ ID NO: 12833 - RNA, 21 nt, synthetic construct
  source 1..21: mol_type = other RNA
aagagcaagggtaagacctcc

SEQ ID NO: 12834 - RNA, 21 nt, synthetic construct
  source 1..21: mol_type = other RNA
aagcctgggggcctgagacag

SEQ ID NO: 12835 - RNA, 21 nt, synthetic construct
  source 1..21: mol_type = other RNA
aaggccgtgaggatccgcacc

SEQ ID NO: 12836 - RNA, 21 nt, synthetic construct
  source 1..21: mol_type = other RNA
aaggggtcccagagtctatac

SEQ ID NO: 12837 - RNA, 21 nt, synthetic construct
  source 1..21: mol_type = other RNA
aagggtaagacctccagtcac

SEQ ID NO: 12838 - RNA, 21 nt, synthetic construct
  source 1..21: mol_type = other RNA
acagggcccagcctaggaggc

SEQ ID NO: 12839 - RNA, 21 nt, synthetic construct
  source 1..21: mol_type = other RNA
accagtttggggaaagcctgg

SEQ ID NO: 12840 - RNA, 21 nt, synthetic construct
  source 1..21: mol_type = other RNA
acccagatgttgagaggaagg

SEQ ID NO: 12841 - RNA, 21 nt, synthetic construct
  source 1..21: mol_type = other RNA
acccttgctctttgcctccta

SEQ ID NO: 12842 - RNA, 21 nt, synthetic construct
  source 1..21: mol_type = other RNA
acggccttttcctccctgcag

SEQ ID NO: 12843 - RNA, 21 nt, synthetic construct
  source 1..21: mol_type = other RNA
actcactccagatgctgcagg

SEQ ID NO: 12844 - RNA, 21 nt, synthetic construct
  source 1..21: mol_type = other RNA
actccagatgctgcagggagg

SEQ ID NO: 12845 - RNA, 21 nt, synthetic construct
  source 1..21: mol_type = other RNA
actctgggaccccttcctctc

SEQ ID NO: 12846 - RNA, 21 nt, synthetic construct
  source 1..21: mol_type = other RNA
actggaggtcttacccttgct

SEQ ID NO: 12847 - RNA, 21 nt, synthetic construct
  source 1..21: mol_type = other RNA
actggtgcggatcctcacggc

SEQ ID NO: 12848 - RNA, 21 nt, synthetic construct
  source 1..21: mol_type = other RNA
actgtgactggaggtcttacc

SEQ ID NO: 12849 - RNA, 21 nt, synthetic construct
  source 1..21: mol_type = other RNA
agacagggcccagcctaggag

SEQ ID NO: 12850 - RNA, 21 nt, synthetic construct
  source 1..21: mol_type = other RNA
agactctgggaccccttcctc

SEQ ID NO: 12851 - RNA, 21 nt, synthetic construct
  source 1..21: mol_type = other RNA
agagcaagggtaagacctcca

SEQ ID NO: 12852 - RNA, 21 nt, synthetic construct
  source 1..21: mol_type = other RNA
agaggaaggggtcccagagtc

SEQ ID NO: 12853 - RNA, 21 nt, synthetic construct
  source 1..21: mol_type = other RNA
agagtctatactcactccaga

SEQ ID NO: 12854 - RNA, 21 nt, synthetic construct
  source 1..21: mol_type = other RNA
agatgctgcagggaggaaaag

SEQ ID NO: 12855 - RNA, 21 nt, synthetic construct
  source 1..21: mol_type = other RNA
agatgttgagaggaaggggtc

SEQ ID NO: 12856 - RNA, 21 nt, synthetic construct
  source 1..21: mol_type = other RNA
agcaagggtaagacctccagt

SEQ ID NO: 12857 - RNA, 21 nt, synthetic construct
  source 1..21: mol_type = other RNA
agcatctggagtgagtataga

SEQ ID NO: 12858 - RNA, 21 nt, synthetic construct
  source 1..21: mol_type = other RNA
agcctaggaggcaaagagcaa

SEQ ID NO: 12859 - RNA, 21 nt, synthetic construct
  source 1..21: mol_type = other RNA
agcctgggggcctgagacagg

SEQ ID NO: 12860 - RNA, 21 nt, synthetic construct
  source 1..21: mol_type = other RNA
aggaaaaggccgtgaggatcc

SEQ ID NO: 12861 - RNA, 21 nt, synthetic construct
  source 1..21: mol_type = other RNA
aggaaggggtcccagagtcta

SEQ ID NO: 12862 - RNA, 21 nt, synthetic construct
  source 1..21: mol_type = other RNA
aggaggcaaagagcaagggta

SEQ ID NO: 12863 - RNA, 21 nt, synthetic construct
  source 1..21: mol_type = other RNA
aggatccgcaccagtttgggg

SEQ ID NO: 12864 - RNA, 21 nt, synthetic construct
  source 1..21: mol_type = other RNA
aggcaaagagcaagggtaaga

SEQ ID NO: 12865 - RNA, 21 nt, synthetic construct
  source 1..21: mol_type = other RNA
aggcccccaggctttccccaa

SEQ ID NO: 12866 - RNA, 21 nt, synthetic construct
  source 1..21: mol_type = other RNA
aggccgtgaggatccgcacca

SEQ ID NO: 12867 - RNA, 21 nt, synthetic construct
  source 1..21: mol_type = other RNA
aggctgggccctgtctcaggc

SEQ ID NO: 12868 - RNA, 21 nt, synthetic construct
  source 1..21: mol_type = other RNA
aggctttccccaaactggtgc

SEQ ID NO: 12869 - RNA, 21 nt, synthetic construct
  source 1..21: mol_type = other RNA
agggaggaaaaggccgtgagg

SEQ ID NO: 12870 - RNA, 21 nt, synthetic construct
  source 1..21: mol_type = other RNA
agggcccagcctaggaggcaa

SEQ ID NO: 12871 - RNA, 21 nt, synthetic construct
  source 1..21: mol_type = other RNA
aggggtcccagagtctatact

SEQ ID NO: 12872 - RNA, 21 nt, synthetic construct
  source 1..21: mol_type = other RNA
agggtaagacctccagtcaca

SEQ ID NO: 12873 - RNA, 21 nt, synthetic construct
  source 1..21: mol_type = other RNA
aggtcttacccttgctctttg

SEQ ID NO: 12874 - RNA, 21 nt, synthetic construct
  source 1..21: mol_type = other RNA
agtatagactctgggacccct

SEQ ID NO: 12875 - RNA, 21 nt, synthetic construct
  source 1..21: mol_type = other RNA
agtctatactcactccagatg

SEQ ID NO: 12876 - RNA, 21 nt, synthetic construct
  source 1..21: mol_type = other RNA
agtgagtatagactctgggac

SEQ ID NO: 12877 - RNA, 21 nt, synthetic construct
  source 1..21: mol_type = other RNA
agtttggggaaagcctggggg

SEQ ID NO: 12878 - RNA, 21 nt, synthetic construct
  source 1..21: mol_type = other RNA
atactcactccagatgctgca

SEQ ID NO: 12879 - RNA, 21 nt, synthetic construct
  source 1..21: mol_type = other RNA
atagactctgggaccccttcc

SEQ ID NO: 12880 - RNA, 21 nt, synthetic construct
  source 1..21: mol_type = other RNA
atccgcaccagtttggggaaa

SEQ ID NO: 12881 - RNA, 21 nt, synthetic construct
  source 1..21: mol_type = other RNA
atcctcacggccttttcctcc

SEQ ID NO: 12882 - RNA, 21 nt, synthetic construct
  source 1..21: mol_type = other RNA
atctggagtgagtatagactc

SEQ ID NO: 12883 - RNA, 21 nt, synthetic construct
  source 1..21: mol_type = other RNA
atgctgcagggaggaaaaggc

SEQ ID NO: 12884 - RNA, 21 nt, synthetic construct
  source 1..21: mol_type = other RNA
atgttgagaggaaggggtccc

SEQ ID NO: 12885 - RNA, 21 nt, synthetic construct
  source 1..21: mol_type = other RNA
caaactggtgcggatcctcac

SEQ ID NO: 12886 - RNA, 21 nt, synthetic construct
  source 1..21: mol_type = other RNA
caaagagcaagggtaagacct

SEQ ID NO: 12887 - RNA, 21 nt, synthetic construct
  source 1..21: mol_type = other RNA
caagggtaagacctccagtca

SEQ ID NO: 12888 - RNA, 21 nt, synthetic construct
  source 1..21: mol_type = other RNA
caccagtttggggaaagcctg

SEQ ID NO: 12889 - RNA, 21 nt, synthetic construct
  source 1..21: mol_type = other RNA
cacccagatgttgagaggaag

SEQ ID NO: 12890 - RNA, 21 nt, synthetic construct
  source 1..21: mol_type = other RNA
cacggccttttcctccctgca

SEQ ID NO: 12891 - RNA, 21 nt, synthetic construct
  source 1..21: mol_type = other RNA
cactccagatgctgcagggag

SEQ ID NO: 12892 - RNA, 21 nt, synthetic construct
  source 1..21: mol_type = other RNA
cagagtctatactcactccag

SEQ ID NO: 12893 - RNA, 21 nt, synthetic construct
  source 1..21: mol_type = other RNA
cagatgctgcagggaggaaaa

SEQ ID NO: 12894 - RNA, 21 nt, synthetic construct
  source 1..21: mol_type = other RNA
cagatgttgagaggaaggggt

SEQ ID NO: 12895 - RNA, 21 nt, synthetic construct
  source 1..21: mol_type = other RNA
cagcatctggagtgagtatag

SEQ ID NO: 12896 - RNA, 21 nt, synthetic construct
  source 1..21: mol_type = other RNA
cagcctaggaggcaaagagca

SEQ ID NO: 12897 - RNA, 21 nt, synthetic construct
  source 1..21: mol_type = other RNA
caggcccccaggctttcccca

SEQ ID NO: 12898 - RNA, 21 nt, synthetic construct
  source 1..21: mol_type = other RNA
caggctttccccaaactggtg

SEQ ID NO: 12899 - RNA, 21 nt, synthetic construct
  source 1..21: mol_type = other RNA
cagggaggaaaaggccgtgag

SEQ ID NO: 12900 - RNA, 21 nt, synthetic construct
  source 1..21: mol_type = other RNA
cagggcccagcctaggaggca

SEQ ID NO: 12901 - RNA, 21 nt, synthetic construct
  source 1..21: mol_type = other RNA
cagtttggggaaagcctgggg

SEQ ID NO: 12902 - RNA, 21 nt, synthetic construct
  source 1..21: mol_type = other RNA
catctggagtgagtatagact

SEQ ID NO: 12903 - RNA, 21 nt, synthetic construct
  source 1..21: mol_type = other RNA
ccaaactggtgcggatcctca

SEQ ID NO: 12904 - RNA, 21 nt, synthetic construct
  source 1..21: mol_type = other RNA
ccagagtctatactcactcca

SEQ ID NO: 12905 - RNA, 21 nt, synthetic construct
  source 1..21: mol_type = other RNA
ccagatgctgcagggaggaaa

SEQ ID NO: 12906 - RNA, 21 nt, synthetic construct
  source 1..21: mol_type = other RNA
ccagatgttgagaggaagggg

SEQ ID NO: 12907 - RNA, 21 nt, synthetic construct
  source 1..21: mol_type = other RNA
ccagcctaggaggcaaagagc

SEQ ID NO: 12908 - RNA, 21 nt, synthetic construct
  source 1..21: mol_type = other RNA
ccaggctttccccaaactggt

SEQ ID NO: 12909 - RNA, 21 nt, synthetic construct
  source 1..21: mol_type = other RNA
ccagtttggggaaagcctggg

SEQ ID NO: 12910 - RNA, 21 nt, synthetic construct
  source 1..21: mol_type = other RNA
cccaaactggtgcggatcctc

SEQ ID NO: 12911 - RNA, 21 nt, synthetic construct
  source 1..21: mol_type = other RNA
cccagagtctatactcactcc

SEQ ID NO: 12912 - RNA, 21 nt, synthetic construct
  source 1..21: mol_type = other RNA
cccagatgttgagaggaaggg

SEQ ID NO: 12913 - RNA, 21 nt, synthetic construct
  source 1..21: mol_type = other RNA
cccagcctaggaggcaaagag

SEQ ID NO: 12914 - RNA, 21 nt, synthetic construct
  source 1..21: mol_type = other RNA
cccaggctttccccaaactgg

SEQ ID NO: 12915 - RNA, 21 nt, synthetic construct
  source 1..21: mol_type = other RNA
ccccaaactggtgcggatcct

SEQ ID NO: 12916 - RNA, 21 nt, synthetic construct
  source 1..21: mol_type = other RNA
ccccaggctttccccaaactg

SEQ ID NO: 12917 - RNA, 21 nt, synthetic construct
  source 1..21: mol_type = other RNA
cccccaggctttccccaaact

SEQ ID NO: 12918 - RNA, 21 nt, synthetic construct
  source 1..21: mol_type = other RNA
ccctgcagcatctggagtgag

SEQ ID NO: 12919 - RNA, 21 nt, synthetic construct
  source 1..21: mol_type = other RNA
ccctgtctcaggcccccaggc

SEQ ID NO: 12920 - RNA, 21 nt, synthetic construct
  source 1..21: mol_type = other RNA
cccttgctctttgcctcctag

SEQ ID NO: 12921 - RNA, 21 nt, synthetic construct
  source 1..21: mol_type = other RNA
ccgcaccagtttggggaaagc

SEQ ID NO: 12922 - RNA, 21 nt, synthetic construct
  source 1..21: mol_type = other RNA
ccgtgaggatccgcaccagtt

SEQ ID NO: 12923 - RNA, 21 nt, synthetic construct
  source 1..21: mol_type = other RNA
cctaggaggcaaagagcaagg

SEQ ID NO: 12924 - RNA, 21 nt, synthetic construct
  source 1..21: mol_type = other RNA
cctaggctgggccctgtctca

SEQ ID NO: 12925 - RNA, 21 nt, synthetic construct
  source 1..21: mol_type = other RNA
cctcacggccttttcctccct

SEQ ID NO: 12926 - RNA, 21 nt, synthetic construct
  source 1..21: mol_type = other RNA
cctccctgcagcatctggagt

SEQ ID NO: 12927 - RNA, 21 nt, synthetic construct
  source 1..21: mol_type = other RNA
cctcctaggctgggccctgtc

SEQ ID NO: 12928 - RNA, 21 nt, synthetic construct
  source 1..21: mol_type = other RNA
cctgagacagggcccagccta

SEQ ID NO: 12929 - RNA, 21 nt, synthetic construct
  source 1..21: mol_type = other RNA
cctgcagcatctggagtgagt

SEQ ID NO: 12930 - RNA, 21 nt, synthetic construct
  source 1..21: mol_type = other RNA
cctgggggcctgagacagggc

SEQ ID NO: 12931 - RNA, 21 nt, synthetic construct
  source 1..21: mol_type = other RNA
cctgtctcaggcccccaggct

SEQ ID NO: 12932 - RNA, 21 nt, synthetic construct
  source 1..21: mol_type = other RNA
ccttgctctttgcctcctagg

SEQ ID NO: 12933 - RNA, 21 nt, synthetic construct
  source 1..21: mol_type = other RNA
ccttttcctccctgcagcatc

SEQ ID NO: 12934 - RNA, 21 nt, synthetic construct
  source 1..21: mol_type = other RNA
cgcaccagtttggggaaagcc

SEQ ID NO: 12935 - RNA, 21 nt, synthetic construct
  source 1..21: mol_type = other RNA
cggatcctcacggccttttcc

SEQ ID NO: 12936 - RNA, 21 nt, synthetic construct
  source 1..21: mol_type = other RNA
cggccttttcctccctgcagc

SEQ ID NO: 12937 - RNA, 21 nt, synthetic construct
  source 1..21: mol_type = other RNA
cgtgaggatccgcaccagttt

SEQ ID NO: 12938 - RNA, 21 nt, synthetic construct
  source 1..21: mol_type = other RNA
ctaggaggcaaagagcaaggg

SEQ ID NO: 12939 - RNA, 21 nt, synthetic construct
  source 1..21: mol_type = other RNA
ctaggctgggccctgtctcag

SEQ ID NO: 12940 - RNA, 21 nt, synthetic construct
  source 1..21: mol_type = other RNA
ctatactcactccagatgctg

SEQ ID NO: 12941 - RNA, 21 nt, synthetic construct
  source 1..21: mol_type = other RNA
ctcacggccttttcctccctg

SEQ ID NO: 12942 - RNA, 21 nt, synthetic construct
  source 1..21: mol_type = other RNA
ctcactccagatgctgcaggg

SEQ ID NO: 12943 - RNA, 21 nt, synthetic construct
  source 1..21: mol_type = other RNA
ctcaggcccccaggctttccc

SEQ ID NO: 12944 - RNA, 21 nt, synthetic construct
  source 1..21: mol_type = other RNA
ctccagatgctgcagggagga

SEQ ID NO: 12945 - RNA, 21 nt, synthetic construct
  source 1..21: mol_type = other RNA
ctccctgcagcatctggagtg

SEQ ID NO: 12946 - RNA, 21 nt, synthetic construct
  source 1..21: mol_type = other RNA
ctcctaggctgggccctgtct

SEQ ID NO: 12947 - RNA, 21 nt, synthetic construct
  source 1..21: mol_type = other RNA
ctctgggaccccttcctctca

SEQ ID NO: 12948 - RNA, 21 nt, synthetic construct
  source 1..21: mol_type = other RNA
ctctttgcctcctaggctggg

SEQ ID NO: 12949 - RNA, 21 nt, synthetic construct
  source 1..21: mol_type = other RNA
ctgagacagggcccagcctag

SEQ ID NO: 12950 - RNA, 21 nt, synthetic construct
  source 1..21: mol_type = other RNA
ctgcagcatctggagtgagta

SEQ ID NO: 12951 - RNA, 21 nt, synthetic construct
  source 1..21: mol_type = other RNA
ctgcagggaggaaaaggccgt

SEQ ID NO: 12952 - RNA, 21 nt, synthetic construct
  source 1..21: mol_type = other RNA
ctggaggtcttacccttgctc

SEQ ID NO: 12953 - RNA, 21 nt, synthetic construct
  source 1..21: mol_type = other RNA
ctggagtgagtatagactctg

SEQ ID NO: 12954 - RNA, 21 nt, synthetic construct
  source 1..21: mol_type = other RNA
ctgggaccccttcctctcaac

SEQ ID NO: 12955 - RNA, 21 nt, synthetic construct
  source 1..21: mol_type = other RNA
ctgggccctgtctcaggcccc

SEQ ID NO: 12956 - RNA, 21 nt, synthetic construct
  source 1..21: mol_type = other RNA
ctgggggcctgagacagggcc

SEQ ID NO: 12957 - RNA, 21 nt, synthetic construct
  source 1..21: mol_type = other RNA
ctggtgcggatcctcacggcc

SEQ ID NO: 12958 - RNA, 21 nt, synthetic construct
  source 1..21: mol_type = other RNA
ctgtctcaggcccccaggctt

SEQ ID NO: 12959 - RNA, 21 nt, synthetic construct
  source 1..21: mol_type = other RNA
ctgtgactggaggtcttaccc

SEQ ID NO: 12960 - RNA, 21 nt, synthetic construct
  source 1..21: mol_type = other RNA
ctgtgactgtgactggaggtc

SEQ ID NO: 12961 - RNA, 21 nt, synthetic construct
  source 1..21: mol_type = other RNA
cttacccttgctctttgcctc

SEQ ID NO: 12962 - RNA, 21 nt, synthetic construct
  source 1..21: mol_type = other RNA
cttgctctttgcctcctaggc

SEQ ID NO: 12963 - RNA, 21 nt, synthetic construct
  source 1..21: mol_type = other RNA
ctttccccaaactggtgcgga

SEQ ID NO: 12964 - RNA, 21 nt, synthetic construct
  source 1..21: mol_type = other RNA
ctttgcctcctaggctgggcc

SEQ ID NO: 12965 - RNA, 21 nt, synthetic construct
  source 1..21: mol_type = other RNA
cttttcctccctgcagcatct

SEQ ID NO: 12966 - RNA, 21 nt, synthetic construct
  source 1..21: mol_type = other RNA
gaaaaggccgtgaggatccgc

SEQ ID NO: 12967 - RNA, 21 nt, synthetic construct
  source 1..21: mol_type = other RNA
gaaagcctgggggcctgagac

SEQ ID NO: 12968 - RNA, 21 nt, synthetic construct
  source 1..21: mol_type = other RNA
gaaggggtcccagagtctata

SEQ ID NO: 12969 - RNA, 21 nt, synthetic construct
  source 1..21: mol_type = other RNA
gacagggcccagcctaggagg

SEQ ID NO: 12970 - RNA, 21 nt, synthetic construct
  source 1..21: mol_type = other RNA
gactctgggaccccttcctct

SEQ ID NO: 12971 - RNA, 21 nt, synthetic construct
  source 1..21: mol_type = other RNA
gactggaggtcttacccttgc

SEQ ID NO: 12972 - RNA, 21 nt, synthetic construct
  source 1..21: mol_type = other RNA
gactgtgactggaggtcttac

SEQ ID NO: 12973 - RNA, 21 nt, synthetic construct
  source 1..21: mol_type = other RNA
gagacagggcccagcctagga

SEQ ID NO: 12974 - RNA, 21 nt, synthetic construct
  source 1..21: mol_type = other RNA
gagaggaaggggtcccagagt

SEQ ID NO: 12975 - RNA, 21 nt, synthetic construct
  source 1..21: mol_type = other RNA
gagcaagggtaagacctccag

SEQ ID NO: 12976 - RNA, 21 nt, synthetic construct
  source 1..21: mol_type = other RNA
gaggaaaaggccgtgaggatc

SEQ ID NO: 12977 - RNA, 21 nt, synthetic construct
  source 1..21: mol_type = other RNA
gaggaaggggtcccagagtct

SEQ ID NO: 12978 - RNA, 21 nt, synthetic construct
  source 1..21: mol_type = other RNA
gaggatccgcaccagtttggg

SEQ ID NO: 12979 - RNA, 21 nt, synthetic construct
  source 1..21: mol_type = other RNA
gaggcaaagagcaagggtaag

SEQ ID NO: 12980 - RNA, 21 nt, synthetic construct
  source 1..21: mol_type = other RNA
gaggtcttacccttgctcttt

SEQ ID NO: 12981 - RNA, 21 nt, synthetic construct
  source 1..21: mol_type = other RNA
gagtatagactctgggacccc

SEQ ID NO: 12982 - RNA, 21 nt, synthetic construct
  source 1..21: mol_type = other RNA
gagtctatactcactccagat

SEQ ID NO: 12983 - RNA, 21 nt, synthetic construct
  source 1..21: mol_type = other RNA
gagtgagtatagactctggga

SEQ ID NO: 12984 - RNA, 21 nt, synthetic construct
  source 1..21: mol_type = other RNA
gatccgcaccagtttggggaa

SEQ ID NO: 12985 - RNA, 21 nt, synthetic construct
  source 1..21: mol_type = other RNA
gatcctcacggccttttcctc

SEQ ID NO: 12986 - RNA, 21 nt, synthetic construct
  source 1..21: mol_type = other RNA
gatgctgcagggaggaaaagg

SEQ ID NO: 12987 - RNA, 21 nt, synthetic construct
  source 1..21: mol_type = other RNA
gatgttgagaggaaggggtcc

SEQ ID NO: 12988 - RNA, 21 nt, synthetic construct
  source 1..21: mol_type = other RNA
gcaaagagcaagggtaagacc

SEQ ID NO: 12989 - RNA, 21 nt, synthetic construct
  source 1..21: mol_type = other RNA
gcaagggtaagacctccagtc

SEQ ID NO: 12990 - RNA, 21 nt, synthetic construct
  source 1..21: mol_type = other RNA
gcaccagtttggggaaagcct

SEQ ID NO: 12991 - RNA, 21 nt, synthetic construct
  source 1..21: mol_type = other RNA
gcacccagatgttgagaggaa

SEQ ID NO: 12992 - RNA, 21 nt, synthetic construct
  source 1..21: mol_type = other RNA
gcagcatctggagtgagtata

SEQ ID NO: 12993 - RNA, 21 nt, synthetic construct
  source 1..21: mol_type = other RNA
gcagggaggaaaaggccgtga

SEQ ID NO: 12994 - RNA, 21 nt, synthetic construct
  source 1..21: mol_type = other RNA
gcatctggagtgagtatagac

SEQ ID NO: 12995 - RNA, 21 nt, synthetic construct
  source 1..21: mol_type = other RNA
gcccagcctaggaggcaaaga

SEQ ID NO: 12996 - RNA, 21 nt, synthetic construct
  source 1..21: mol_type = other RNA
gcccccaggctttccccaaac

SEQ ID NO: 12997 - RNA, 21 nt, synthetic construct
  source 1..21: mol_type = other RNA
gccctgtctcaggcccccagg

SEQ ID NO: 12998 - RNA, 21 nt, synthetic construct
  source 1..21: mol_type = other RNA
gccgtgaggatccgcaccagt

SEQ ID NO: 12999 - RNA, 21 nt, synthetic construct
  source 1..21: mol_type = other RNA
gcctaggaggcaaagagcaag

SEQ ID NO: 13000 - RNA, 21 nt, synthetic construct
  source 1..21: mol_type = other RNA
gcctcctaggctgggccctgt

SEQ ID NO: 13001 - RNA, 21 nt, synthetic construct
  source 1..21: mol_type = other RNA
gcctgagacagggcccagcct

SEQ ID NO: 13002 - RNA, 21 nt, synthetic construct
  source 1..21: mol_type = other RNA
gcctgggggcctgagacaggg

SEQ ID NO: 13003 - RNA, 21 nt, synthetic construct
  source 1..21: mol_type = other RNA
gccttttcctccctgcagcat

SEQ ID NO: 13004 - RNA, 21 nt, synthetic construct
  source 1..21: mol_type = other RNA
gcggatcctcacggccttttc

SEQ ID NO: 13005 - RNA, 21 nt, synthetic construct
  source 1..21: mol_type = other RNA
gctctttgcctcctaggctgg

SEQ ID NO: 13006 - RNA, 21 nt, synthetic construct
  source 1..21: mol_type = other RNA
gctgcagggaggaaaaggccg

SEQ ID NO: 13007 - RNA, 21 nt, synthetic construct
  source 1..21: mol_type = other RNA
gctgggccctgtctcaggccc

SEQ ID NO: 13008 - RNA, 21 nt, synthetic construct
  source 1..21: mol_type = other RNA
gctgtgactgtgactggaggt

SEQ ID NO: 13009 - RNA, 21 nt, synthetic construct
  source 1..21: mol_type = other RNA
gctttccccaaactggtgcgg

SEQ ID NO: 13010 - RNA, 21 nt, synthetic construct
  source 1..21: mol_type = other RNA
ggaaaaggccgtgaggatccg

SEQ ID NO: 13011 - RNA, 21 nt, synthetic construct
  source 1..21: mol_type = other RNA
ggaaagcctgggggcctgaga

SEQ ID NO: 13012 - RNA, 21 nt, synthetic construct
  source 1..21: mol_type = other RNA
ggaaggggtcccagagtctat

SEQ ID NO: 13013 - RNA, 21 nt, synthetic construct
  source 1..21: mol_type = other RNA
ggaccccttcctctcaacatc

SEQ ID NO: 13014 - RNA, 21 nt, synthetic construct
  source 1..21: mol_type = other RNA
ggaggaaaaggccgtgaggat

SEQ ID NO: 13015 - RNA, 21 nt, synthetic construct
  source 1..21: mol_type = other RNA
ggaggcaaagagcaagggtaa

SEQ ID NO: 13016 - RNA, 21 nt, synthetic construct
  source 1..21: mol_type = other RNA
ggaggtcttacccttgctctt

SEQ ID NO: 13017 - RNA, 21 nt, synthetic construct
  source 1..21: mol_type = other RNA
ggagtgagtatagactctggg

SEQ ID NO: 13018 - RNA, 21 nt, synthetic construct
  source 1..21: mol_type = other RNA
ggatccgcaccagtttgggga

SEQ ID NO: 13019 - RNA, 21 nt, synthetic construct
  source 1..21: mol_type = other RNA
ggatcctcacggccttttcct

SEQ ID NO: 13020 - RNA, 21 nt, synthetic construct
  source 1..21: mol_type = other RNA
ggcaaagagcaagggtaagac

SEQ ID NO: 13021 - RNA, 21 nt, synthetic construct
  source 1..21: mol_type = other RNA
ggcccagcctaggaggcaaag

SEQ ID NO: 13022 - RNA, 21 nt, synthetic construct
  source 1..21: mol_type = other RNA
ggcccccaggctttccccaaa

SEQ ID NO: 13023 - RNA, 21 nt, synthetic construct
  source 1..21: mol_type = other RNA
ggccctgtctcaggcccccag

SEQ ID NO: 13024 - RNA, 21 nt, synthetic construct
  source 1..21: mol_type = other RNA
ggccgtgaggatccgcaccag

SEQ ID NO: 13025 - RNA, 21 nt, synthetic construct
  source 1..21: mol_type = other RNA
ggcctgagacagggcccagcc

SEQ ID NO: 13026 - RNA, 21 nt, synthetic construct
  source 1..21: mol_type = other RNA
ggccttttcctccctgcagca

SEQ ID NO: 13027 - RNA, 21 nt, synthetic construct
  source 1..21: mol_type = other RNA
ggctgggccctgtctcaggcc

SEQ ID NO: 13028 - RNA, 21 nt, synthetic construct
  source 1..21: mol_type = other RNA
ggctttccccaaactggtgcg

SEQ ID NO: 13029 - RNA, 21 nt, synthetic construct
  source 1..21: mol_type = other RNA
gggaaagcctgggggcctgag

SEQ ID NO: 13030 - RNA, 21 nt, synthetic construct
  source 1..21: mol_type = other RNA
gggaccccttcctctcaacat

SEQ ID NO: 13031 - RNA, 21 nt, synthetic construct
  source 1..21: mol_type = other RNA
gggaggaaaaggccgtgagga

SEQ ID NO: 13032 - RNA, 21 nt, synthetic construct
  source 1..21: mol_type = other RNA
gggcccagcctaggaggcaaa

SEQ ID NO: 13033 - RNA, 21 nt, synthetic construct
  source 1..21: mol_type = other RNA
gggccctgtctcaggccccca

SEQ ID NO: 13034 - RNA, 21 nt, synthetic construct
  source 1..21: mol_type = other RNA
gggcctgagacagggcccagc

SEQ ID NO: 13035 - RNA, 21 nt, synthetic construct
  source 1..21: mol_type = other RNA
ggggaaagcctgggggcctga

SEQ ID NO: 13036 - RNA, 21 nt, synthetic construct
  source 1..21: mol_type = other RNA
ggggcctgagacagggcccag

SEQ ID NO: 13037 - RNA, 21 nt, synthetic construct
  source 1..21: mol_type = other RNA
gggggcctgagacagggccca

SEQ ID NO: 13038 - RNA, 21 nt, synthetic construct
  source 1..21: mol_type = other RNA
ggggtcccagagtctatactc

SEQ ID NO: 13039 - RNA, 21 nt, synthetic construct
  source 1..21: mol_type = other RNA
gggtcccagagtctatactca

SEQ ID NO: 13040 - RNA, 21 nt, synthetic construct
  source 1..21: mol_type = other RNA
ggtcccagagtctatactcac

SEQ ID NO: 13041 - RNA, 21 nt, synthetic construct
  source 1..21: mol_type = other RNA
ggtcttacccttgctctttgc

SEQ ID NO: 13042 - RNA, 21 nt, synthetic construct
  source 1..21: mol_type = other RNA
ggtgcggatcctcacggcctt

SEQ ID NO: 13043 - RNA, 21 nt, synthetic construct
  source 1..21: mol_type = other RNA
gtatagactctgggacccctt

SEQ ID NO: 13044 - RNA, 21 nt, synthetic construct
  source 1..21: mol_type = other RNA
gtcccagagtctatactcact

SEQ ID NO: 13045 - RNA, 21 nt, synthetic construct
  source 1..21: mol_type = other RNA
gtctatactcactccagatgc

SEQ ID NO: 13046 - RNA, 21 nt, synthetic construct
  source 1..21: mol_type = other RNA
gtctcaggcccccaggctttc

SEQ ID NO: 13047 - RNA, 21 nt, synthetic construct
  source 1..21: mol_type = other RNA
gtcttacccttgctctttgcc

SEQ ID NO: 13048 - RNA, 21 nt, synthetic construct
  source 1..21: mol_type = other RNA
gtgactggaggtcttaccctt

SEQ ID NO: 13049 - RNA, 21 nt, synthetic construct
  source 1..21: mol_type = other RNA
gtgactgtgactggaggtctt

SEQ ID NO: 13050 - RNA, 21 nt, synthetic construct
  source 1..21: mol_type = other RNA
gtgaggatccgcaccagtttg

SEQ ID NO: 13051 - RNA, 21 nt, synthetic construct
  source 1..21: mol_type = other RNA
gtgagtatagactctgggacc

SEQ ID NO: 13052 - RNA, 21 nt, synthetic construct
  source 1..21: mol_type = other RNA
gtgcggatcctcacggccttt

SEQ ID NO: 13053 - RNA, 21 nt, synthetic construct
  source 1..21: mol_type = other RNA
gttgagaggaaggggtcccag

SEQ ID NO: 13054 - RNA, 21 nt, synthetic construct
  source 1..21: mol_type = other RNA
gtttggggaaagcctgggggc

SEQ ID NO: 13055 - RNA, 21 nt, synthetic construct
  source 1..21: mol_type = other RNA
tacccttgctctttgcctcct

SEQ ID NO: 13056 - RNA, 21 nt, synthetic construct
  source 1..21: mol_type = other RNA
tactcactccagatgctgcag

SEQ ID NO: 13057 - RNA, 21 nt, synthetic construct
  source 1..21: mol_type = other RNA
tagactctgggaccccttcct

SEQ ID NO: 13058 - RNA, 21 nt, synthetic construct
  source 1..21: mol_type = other RNA
taggaggcaaagagcaagggt

SEQ ID NO: 13059 - RNA, 21 nt, synthetic construct
  source 1..21: mol_type = other RNA
taggctgggccctgtctcagg

SEQ ID NO: 13060 - RNA, 21 nt, synthetic construct
  source 1..21: mol_type = other RNA
tatactcactccagatgctgc

SEQ ID NO: 13061 - RNA, 21 nt, synthetic construct
  source 1..21: mol_type = other RNA
tatagactctgggaccccttc

SEQ ID NO: 13062 - RNA, 21 nt, synthetic construct
  source 1..21: mol_type = other RNA
tcacggccttttcctccctgc

SEQ ID NO: 13063 - RNA, 21 nt, synthetic construct
  source 1..21: mol_type = other RNA
tcactccagatgctgcaggga

SEQ ID NO: 13064 - RNA, 21 nt, synthetic construct
  source 1..21: mol_type = other RNA
tcaggcccccaggctttcccc

SEQ ID NO: 13065 - RNA, 21 nt, synthetic construct
  source 1..21: mol_type = other RNA
tccagatgctgcagggaggaa

SEQ ID NO: 13066 - RNA, 21 nt, synthetic construct
  source 1..21: mol_type = other RNA
tcccagagtctatactcactc

SEQ ID NO: 13067 - RNA, 21 nt, synthetic construct
  source 1..21: mol_type = other RNA
tccccaaactggtgcggatcc

SEQ ID NO: 13068 - RNA, 21 nt, synthetic construct
  source 1..21: mol_type = other RNA
tccctgcagcatctggagtga

SEQ ID NO: 13069 - RNA, 21 nt, synthetic construct
  source 1..21: mol_type = other RNA
tccgcaccagtttggggaaag

SEQ ID NO: 13070 - RNA, 21 nt, synthetic construct
  source 1..21: mol_type = other RNA
tcctaggctgggccctgtctc

SEQ ID NO: 13071 - RNA, 21 nt, synthetic construct
  source 1..21: mol_type = other RNA
tcctcacggccttttcctccc

SEQ ID NO: 13072 - RNA, 21 nt, synthetic construct
  source 1..21: mol_type = other RNA
tcctccctgcagcatctggag

SEQ ID NO: 13073 - RNA, 21 nt, synthetic construct
  source 1..21: mol_type = other RNA
tctatactcactccagatgct

SEQ ID NO: 13074 - RNA, 21 nt, synthetic construct
  source 1..21: mol_type = other RNA
tctcaggcccccaggctttcc

SEQ ID NO: 13075 - RNA, 21 nt, synthetic construct
  source 1..21: mol_type = other RNA
tctggagtgagtatagactct

SEQ ID NO: 13076 - RNA, 21 nt, synthetic construct
  source 1..21: mol_type = other RNA
tctgggaccccttcctctcaa

SEQ ID NO: 13077 - RNA, 21 nt, synthetic construct
  source 1..21: mol_type = other RNA
tcttacccttgctctttgcct

SEQ ID NO: 13078 - RNA, 21 nt, synthetic construct
  source 1..21: mol_type = other RNA
tctttgcctcctaggctgggc

SEQ ID NO: 13079 - RNA, 21 nt, synthetic construct
  source 1..21: mol_type = other RNA
tgactggaggtcttacccttg

SEQ ID NO: 13080 - RNA, 21 nt, synthetic construct
  source 1..21: mol_type = other RNA
tgactgtgactggaggtctta

SEQ ID NO: 13081 - RNA, 21 nt, synthetic construct
  source 1..21: mol_type = other RNA
tgagacagggcccagcctagg

SEQ ID NO: 13082 - RNA, 21 nt, synthetic construct
  source 1..21: mol_type = other RNA
tgagaggaaggggtcccagag

SEQ ID NO: 13083 - RNA, 21 nt, synthetic construct
  source 1..21: mol_type = other RNA
tgaggatccgcaccagtttgg

SEQ ID NO: 13084 - RNA, 21 nt, synthetic construct
  source 1..21: mol_type = other RNA
tgagtatagactctgggaccc

SEQ ID NO: 13085 - RNA, 21 nt, synthetic construct
  source 1..21: mol_type = other RNA
tgcacccagatgttgagagga

SEQ ID NO: 13086 - RNA, 21 nt, synthetic construct
  source 1..21: mol_type = other RNA
tgcagcatctggagtgagtat

SEQ ID NO: 13087 - RNA, 21 nt, synthetic construct
  source 1..21: mol_type = other RNA
tgcagggaggaaaaggccgtg

SEQ ID NO: 13088 - RNA, 21 nt, synthetic construct
  source 1..21: mol_type = other RNA
tgcctcctaggctgggccctg

SEQ ID NO: 13089 - RNA, 21 nt, synthetic construct
  source 1..21: mol_type = other RNA
tgcggatcctcacggcctttt

SEQ ID NO: 13090 - RNA, 21 nt, synthetic construct
  source 1..21: mol_type = other RNA
tgctctttgcctcctaggctg

SEQ ID NO: 13091 - RNA, 21 nt, synthetic construct
  source 1..21: mol_type = other RNA
tgctgcagggaggaaaaggcc

SEQ ID NO: 13092 - RNA, 21 nt, synthetic construct
  source 1..21: mol_type = other RNA
tggaggtcttacccttgctct

SEQ ID NO: 13093 - RNA, 21 nt, synthetic construct
  source 1..21: mol_type = other RNA
tggagtgagtatagactctgg

SEQ ID NO: 13094 - RNA, 21 nt, synthetic construct
  source 1..21: mol_type = other RNA
tgggaccccttcctctcaaca

SEQ ID NO: 13095 - RNA, 21 nt, synthetic construct
  source 1..21: mol_type = other RNA
tgggccctgtctcaggccccc

SEQ ID NO: 13096 - RNA, 21 nt, synthetic construct
  source 1..21: mol_type = other RNA
tggggaaagcctgggggcctg

SEQ ID NO: 13097 - RNA, 21 nt, synthetic construct
  source 1..21: mol_type = other RNA
tgggggcctgagacagggccc

SEQ ID NO: 13098 - RNA, 21 nt, synthetic construct
  source 1..21: mol_type = other RNA
tggtgcggatcctcacggcct

SEQ ID NO: 13099 - RNA, 21 nt, synthetic construct
  source 1..21: mol_type = other RNA
tgtctcaggcccccaggcttt

SEQ ID NO: 13100 - RNA, 21 nt, synthetic construct
  source 1..21: mol_type = other RNA
tgtgactggaggtcttaccct

SEQ ID NO: 13101 - RNA, 21 nt, synthetic construct
  source 1..21: mol_type = other RNA
tgtgactgtgactggaggtct

SEQ ID NO: 13102 - RNA, 21 nt, synthetic construct
  source 1..21: mol_type = other RNA
tgttgagaggaaggggtccca

SEQ ID NO: 13103 - RNA, 21 nt, synthetic construct
  source 1..21: mol_type = other RNA
ttacccttgctctttgcctcc

SEQ ID NO: 13104 - RNA, 21 nt, synthetic construct
  source 1..21: mol_type = other RNA
ttccccaaactggtgcggatc

SEQ ID NO: 13105 - RNA, 21 nt, synthetic construct
  source 1..21: mol_type = other RNA
ttcctccctgcagcatctgga

SEQ ID NO: 13106 - RNA, 21 nt, synthetic construct
  source 1..21: mol_type = other RNA
ttgagaggaaggggtcccaga

SEQ ID NO: 13107 - RNA, 21 nt, synthetic construct
  source 1..21: mol_type = other RNA
ttgcctcctaggctgggccct

SEQ ID NO: 13108 - RNA, 21 nt, synthetic construct
  source 1..21: mol_type = other RNA
ttgctctttgcctcctaggct

SEQ ID NO: 13109 - RNA, 21 nt, synthetic construct
  source 1..21: mol_type = other RNA
ttggggaaagcctgggggcct

SEQ ID NO: 13110 - RNA, 21 nt, synthetic construct
  source 1..21: mol_type = other RNA
tttccccaaactggtgcggat

SEQ ID NO: 13111 - RNA, 21 nt, synthetic construct
  source 1..21: mol_type = other RNA
tttcctccctgcagcatctgg

SEQ ID NO: 13112 - RNA, 21 nt, synthetic construct
  source 1..21: mol_type = other RNA
tttgcctcctaggctgggccc

SEQ ID NO: 13113 - RNA, 21 nt, synthetic construct
  source 1..21: mol_type = other RNA
tttggggaaagcctgggggcc

SEQ ID NO: 13114 - RNA, 21 nt, synthetic construct
  source 1..21: mol_type = other RNA
ttttcctccctgcagcatctg

SEQ ID NO: 13115 - RNA, 22 nt, synthetic construct
  source 1..22: mol_type = other RNA
aaaaggccgtgaggatccgcac

SEQ ID NO: 13116 - RNA, 22 nt, synthetic construct
  source 1..22: mol_type = other RNA
aaactggtgcggatcctcacgg

SEQ ID NO: 13117 - RNA, 22 nt, synthetic construct
  source 1..22: mol_type = other RNA
aaagagcaagggtaagacctcc

SEQ ID NO: 13118 - RNA, 22 nt, synthetic construct
  source 1..22: mol_type = other RNA
aaagcctgggggcctgagacag

SEQ ID NO: 13119 - RNA, 22 nt, synthetic construct
  source 1..22: mol_type = other RNA
aaaggccgtgaggatccgcacc

SEQ ID NO: 13120 - RNA, 22 nt, synthetic construct
  source 1..22: mol_type = other RNA
aactggtgcggatcctcacggc

SEQ ID NO: 13121 - RNA, 22 nt, synthetic construct
  source 1..22: mol_type = other RNA
aagagcaagggtaagacctcca

SEQ ID NO: 13122 - RNA, 22 nt, synthetic construct
  source 1..22: mol_type = other RNA
aagcctgggggcctgagacagg

SEQ ID NO: 13123 - RNA, 22 nt, synthetic construct
  source 1..22: mol_type = other RNA
aaggccgtgaggatccgcacca

SEQ ID NO: 13124 - RNA, 22 nt, synthetic construct
  source 1..22: mol_type = other RNA
aaggggtcccagagtctatact

SEQ ID NO: 13125 - RNA, 22 nt, synthetic construct
  source 1..22: mol_type = other RNA
aagggtaagacctccagtcaca

SEQ ID NO: 13126 - RNA, 22 nt, synthetic construct
  source 1..22: mol_type = other RNA
acagggcccagcctaggaggca

SEQ ID NO: 13127 - RNA, 22 nt, synthetic construct
  source 1..22: mol_type = other RNA
accagtttggggaaagcctggg

SEQ ID NO: 13128 - RNA, 22 nt, synthetic construct
  source 1..22: mol_type = other RNA
acccagatgttgagaggaaggg

SEQ ID NO: 13129 - RNA, 22 nt, synthetic construct
  source 1..22: mol_type = other RNA
acccttgctctttgcctcctag

SEQ ID NO: 13130 - RNA, 22 nt, synthetic construct
  source 1..22: mol_type = other RNA
acggccttttcctccctgcagc

SEQ ID NO: 13131 - RNA, 22 nt, synthetic construct
  source 1..22: mol_type = other RNA
actcactccagatgctgcaggg

SEQ ID NO: 13132 - RNA, 22 nt, synthetic construct
  source 1..22: mol_type = other RNA
actccagatgctgcagggagga

SEQ ID NO: 13133 - RNA, 22 nt, synthetic construct
  source 1..22: mol_type = other RNA
actctgggaccccttcctctca

SEQ ID NO: 13134 - RNA, 22 nt, synthetic construct
  source 1..22: mol_type = other RNA
actggaggtcttacccttgctc

SEQ ID NO: 13135 - RNA, 22 nt, synthetic construct
  source 1..22: mol_type = other RNA
actggtgcggatcctcacggcc

SEQ ID NO: 13136 - RNA, 22 nt, synthetic construct
  source 1..22: mol_type = other RNA
actgtgactggaggtcttaccc

SEQ ID NO: 13137 - RNA, 22 nt, synthetic construct
  source 1..22: mol_type = other RNA
agacagggcccagcctaggagg

SEQ ID NO: 13138 - RNA, 22 nt, synthetic construct
  source 1..22: mol_type = other RNA
agactctgggaccccttcctct

SEQ ID NO: 13139 - RNA, 22 nt, synthetic construct
  source 1..22: mol_type = other RNA
agagcaagggtaagacctccag

SEQ ID NO: 13140 - RNA, 22 nt, synthetic construct
  source 1..22: mol_type = other RNA
agaggaaggggtcccagagtct

SEQ ID NO: 13141 - RNA, 22 nt, synthetic construct
  source 1..22: mol_type = other RNA
agagtctatactcactccagat

SEQ ID NO: 13142 - RNA, 22 nt, synthetic construct
  source 1..22: mol_type = other RNA
agatgctgcagggaggaaaagg

SEQ ID NO: 13143 - RNA, 22 nt, synthetic construct
  source 1..22: mol_type = other RNA
agatgttgagaggaaggggtcc

SEQ ID NO: 13144 - RNA, 22 nt, synthetic construct
  source 1..22: mol_type = other RNA
agcaagggtaagacctccagtc

SEQ ID NO: 13145 - RNA, 22 nt, synthetic construct
  source 1..22: mol_type = other RNA
agcatctggagtgagtatagac

SEQ ID NO: 13146 - RNA, 22 nt, synthetic construct
  source 1..22: mol_type = other RNA
agcctaggaggcaaagagcaag

SEQ ID NO: 13147 - RNA, 22 nt, synthetic construct
  source 1..22: mol_type = other RNA
agcctgggggcctgagacaggg

SEQ ID NO: 13148 - RNA, 22 nt, synthetic construct
  source 1..22: mol_type = other RNA
aggaaaaggccgtgaggatccg

SEQ ID NO: 13149 - RNA, 22 nt, synthetic construct
  source 1..22: mol_type = other RNA
aggaaggggtcccagagtctat

SEQ ID NO: 13150 - RNA, 22 nt, synthetic construct
  source 1..22: mol_type = other RNA
aggaggcaaagagcaagggtaa

SEQ ID NO: 13151 - RNA, 22 nt, synthetic construct
  source 1..22: mol_type = other RNA
aggatccgcaccagtttgggga

SEQ ID NO: 13152 - RNA, 22 nt, synthetic construct
  source 1..22: mol_type = other RNA
aggcaaagagcaagggtaagac

SEQ ID NO: 13153 - RNA, 22 nt, synthetic construct
  source 1..22: mol_type = other RNA
aggcccccaggctttccccaaa

SEQ ID NO: 13154 - RNA, 22 nt, synthetic construct
  source 1..22: mol_type = other RNA
aggccgtgaggatccgcaccag

SEQ ID NO: 13155 - RNA, 22 nt, synthetic construct
  source 1..22: mol_type = other RNA
aggctgggccctgtctcaggcc

SEQ ID NO: 13156 - RNA, 22 nt, synthetic construct
  source 1..22: mol_type = other RNA
aggctttccccaaactggtgcg

SEQ ID NO: 13157 - RNA, 22 nt, synthetic construct
  source 1..22: mol_type = other RNA
agggaggaaaaggccgtgagga

SEQ ID NO: 13158 - RNA, 22 nt, synthetic construct
  source 1..22: mol_type = other RNA
agggcccagcctaggaggcaaa

SEQ ID NO: 13159 - RNA, 22 nt, synthetic construct
  source 1..22: mol_type = other RNA
aggggtcccagagtctatactc

SEQ ID NO: 13160 - RNA, 22 nt, synthetic construct
  source 1..22: mol_type = other RNA
aggtcttacccttgctctttgc

SEQ ID NO: 13161 - RNA, 22 nt, synthetic construct
  source 1..22: mol_type = other RNA
agtatagactctgggacccctt

SEQ ID NO: 13162 - RNA, 22 nt, synthetic construct
  source 1..22: mol_type = other RNA
agtctatactcactccagatgc

SEQ ID NO: 13163 - RNA, 22 nt, synthetic construct
  source 1..22: mol_type = other RNA
agtgagtatagactctgggacc

SEQ ID NO: 13164 - RNA, 22 nt, synthetic construct
  source 1..22: mol_type = other RNA
agtttggggaaagcctgggggc

SEQ ID NO: 13165 - RNA, 22 nt, synthetic construct
  source 1..22: mol_type = other RNA
atactcactccagatgctgcag

SEQ ID NO: 13166 - RNA, 22 nt, synthetic construct
  source 1..22: mol_type = other RNA
atagactctgggaccccttcct

SEQ ID NO: 13167 - RNA, 22 nt, synthetic construct
  source 1..22: mol_type = other RNA
atccgcaccagtttggggaaag

SEQ ID NO: 13168 - RNA, 22 nt, synthetic construct
  source 1..22: mol_type = other RNA
atcctcacggccttttcctccc

SEQ ID NO: 13169 - RNA, 22 nt, synthetic construct
  source 1..22: mol_type = other RNA
atctggagtgagtatagactct

SEQ ID NO: 13170 - RNA, 22 nt, synthetic construct
  source 1..22: mol_type = other RNA
atgctgcagggaggaaaaggcc

SEQ ID NO: 13171 - RNA, 22 nt, synthetic construct
  source 1..22: mol_type = other RNA
atgttgagaggaaggggtccca

SEQ ID NO: 13172 - RNA, 22 nt, synthetic construct
  source 1..22: mol_type = other RNA
caaactggtgcggatcctcacg

SEQ ID NO: 13173 - RNA, 22 nt, synthetic construct
  source 1..22: mol_type = other RNA
caaagagcaagggtaagacctc

SEQ ID NO: 13174 - RNA, 22 nt, synthetic construct
  source 1..22: mol_type = other RNA
caagggtaagacctccagtcac

SEQ ID NO: 13175 - RNA, 22 nt, synthetic construct
  source 1..22: mol_type = other RNA
caccagtttggggaaagcctgg

SEQ ID NO: 13176 - RNA, 22 nt, synthetic construct
  source 1..22: mol_type = other RNA
cacccagatgttgagaggaagg

SEQ ID NO: 13177 - RNA, 22 nt, synthetic construct
  source 1..22: mol_type = other RNA
cacggccttttcctccctgcag

SEQ ID NO: 13178 - RNA, 22 nt, synthetic construct
  source 1..22: mol_type = other RNA
cactccagatgctgcagggagg

SEQ ID NO: 13179 - RNA, 22 nt, synthetic construct
  source 1..22: mol_type = other RNA
cagagtctatactcactccaga

SEQ ID NO: 13180 - RNA, 22 nt, synthetic construct
  source 1..22: mol_type = other RNA
cagatgctgcagggaggaaaag

SEQ ID NO: 13181 - RNA, 22 nt, synthetic construct
  source 1..22: mol_type = other RNA
cagatgttgagaggaaggggtc

SEQ ID NO: 13182 - RNA, 22 nt, synthetic construct
  source 1..22: mol_type = other RNA
cagcatctggagtgagtataga

SEQ ID NO: 13183 - RNA, 22 nt, synthetic construct
  source 1..22: mol_type = other RNA
cagcctaggaggcaaagagcaa

SEQ ID NO: 13184 - RNA, 22 nt, synthetic construct
  source 1..22: mol_type = other RNA
caggcccccaggctttccccaa

SEQ ID NO: 13185 - RNA, 22 nt, synthetic construct
  source 1..22: mol_type = other RNA
caggctttccccaaactggtgc

SEQ ID NO: 13186 - RNA, 22 nt, synthetic construct
  source 1..22: mol_type = other RNA
cagggaggaaaaggccgtgagg

SEQ ID NO: 13187 - RNA, 22 nt, synthetic construct
  source 1..22: mol_type = other RNA
cagggcccagcctaggaggcaa

SEQ ID NO: 13188 - RNA, 22 nt, synthetic construct
  source 1..22: mol_type = other RNA
cagtttggggaaagcctggggg

SEQ ID NO: 13189 - RNA, 22 nt, synthetic construct
  source 1..22: mol_type = other RNA
catctggagtgagtatagactc

SEQ ID NO: 13190 - RNA, 22 nt, synthetic construct
  source 1..22: mol_type = other RNA
ccaaactggtgcggatcctcac

SEQ ID NO: 13191 - RNA, 22 nt, synthetic construct
  source 1..22: mol_type = other RNA
ccagagtctatactcactccag

SEQ ID NO: 13192 - RNA, 22 nt, synthetic construct
  source 1..22: mol_type = other RNA
ccagatgctgcagggaggaaaa

SEQ ID NO: 13193 - RNA, 22 nt, synthetic construct
  source 1..22: mol_type = other RNA
ccagatgttgagaggaaggggt

SEQ ID NO: 13194 - RNA, 22 nt, synthetic construct
  source 1..22: mol_type = other RNA
ccagcctaggaggcaaagagca

SEQ ID NO: 13195 - RNA, 22 nt, synthetic construct
  source 1..22: mol_type = other RNA
ccaggctttccccaaactggtg

SEQ ID NO: 13196 - RNA, 22 nt, synthetic construct
  source 1..22: mol_type = other RNA
ccagtttggggaaagcctgggg

SEQ ID NO: 13197 - RNA, 22 nt, synthetic construct
  source 1..22: mol_type = other RNA
cccaaactggtgcggatcctca

SEQ ID NO: 13198 - RNA, 22 nt, synthetic construct
  source 1..22: mol_type = other RNA
cccagagtctatactcactcca

SEQ ID NO: 13199 - RNA, 22 nt, synthetic construct
  source 1..22: mol_type = other RNA
cccagatgttgagaggaagggg

SEQ ID NO: 13200 - RNA, 22 nt, synthetic construct
  source 1..22: mol_type = other RNA
cccagcctaggaggcaaagagc

SEQ ID NO: 13201 - RNA, 22 nt, synthetic construct
  source 1..22: mol_type = other RNA
cccaggctttccccaaactggt

SEQ ID NO: 13202 - RNA, 22 nt, synthetic construct
  source 1..22: mol_type = other RNA
ccccaaactggtgcggatcctc

SEQ ID NO: 13203 - RNA, 22 nt, synthetic construct
  source 1..22: mol_type = other RNA
ccccaggctttccccaaactgg

SEQ ID NO: 13204 - RNA, 22 nt, synthetic construct
  source 1..22: mol_type = other RNA
cccccaggctttccccaaactg

SEQ ID NO: 13205 - RNA, 22 nt, synthetic construct
  source 1..22: mol_type = other RNA
ccctgcagcatctggagtgagt

SEQ ID NO: 13206 - RNA, 22 nt, synthetic construct
  source 1..22: mol_type = other RNA
ccctgtctcaggcccccaggct

SEQ ID NO: 13207 - RNA, 22 nt, synthetic construct
  source 1..22: mol_type = other RNA
cccttgctctttgcctcctagg

SEQ ID NO: 13208 - RNA, 22 nt, synthetic construct
  source 1..22: mol_type = other RNA
ccgcaccagtttggggaaagcc

SEQ ID NO: 13209 - RNA, 22 nt, synthetic construct
  source 1..22: mol_type = other RNA
ccgtgaggatccgcaccagttt

SEQ ID NO: 13210 - RNA, 22 nt, synthetic construct
  source 1..22: mol_type = other RNA
cctaggaggcaaagagcaaggg

SEQ ID NO: 13211 - RNA, 22 nt, synthetic construct
  source 1..22: mol_type = other RNA
cctaggctgggccctgtctcag

SEQ ID NO: 13212 - RNA, 22 nt, synthetic construct
  source 1..22: mol_type = other RNA
cctcacggccttttcctccctg

SEQ ID NO: 13213 - RNA, 22 nt, synthetic construct
  source 1..22: mol_type = other RNA
cctccctgcagcatctggagtg

SEQ ID NO: 13214 - RNA, 22 nt, synthetic construct
  source 1..22: mol_type = other RNA
cctcctaggctgggccctgtct

SEQ ID NO: 13215 - RNA, 22 nt, synthetic construct
  source 1..22: mol_type = other RNA
cctgagacagggcccagcctag

SEQ ID NO: 13216 - RNA, 22 nt, synthetic construct
  source 1..22: mol_type = other RNA
cctgcagcatctggagtgagta

SEQ ID NO: 13217 - RNA, 22 nt, synthetic construct
  source 1..22: mol_type = other RNA
cctgggggcctgagacagggcc

SEQ ID NO: 13218 - RNA, 22 nt, synthetic construct
  source 1..22: mol_type = other RNA
cctgtctcaggcccccaggctt

SEQ ID NO: 13219 - RNA, 22 nt, synthetic construct
  source 1..22: mol_type = other RNA
ccttgctctttgcctcctaggc

SEQ ID NO: 13220 - RNA, 22 nt, synthetic construct
  source 1..22: mol_type = other RNA
ccttttcctccctgcagcatct

SEQ ID NO: 13221 - RNA, 22 nt, synthetic construct
  source 1..22: mol_type = other RNA
cgcaccagtttggggaaagcct

SEQ ID NO: 13222 - RNA, 22 nt, synthetic construct
  source 1..22: mol_type = other RNA
cggatcctcacggccttttcct

SEQ ID NO: 13223 - RNA, 22 nt, synthetic construct
  source 1..22: mol_type = other RNA
cggccttttcctccctgcagca

SEQ ID NO: 13224 - RNA, 22 nt, synthetic construct
  source 1..22: mol_type = other RNA
cgtgaggatccgcaccagtttg

SEQ ID NO: 13225 - RNA, 22 nt, synthetic construct
  source 1..22: mol_type = other RNA
ctaggaggcaaagagcaagggt

SEQ ID NO: 13226 - RNA, 22 nt, synthetic construct
  source 1..22: mol_type = other RNA
ctaggctgggccctgtctcagg

SEQ ID NO: 13227 - RNA, 22 nt, synthetic construct
  source 1..22: mol_type = other RNA
ctatactcactccagatgctgc

SEQ ID NO: 13228 - RNA, 22 nt, synthetic construct
  source 1..22: mol_type = other RNA
ctcacggccttttcctccctgc

SEQ ID NO: 13229 - RNA, 22 nt, synthetic construct
  source 1..22: mol_type = other RNA
ctcactccagatgctgcaggga

SEQ ID NO: 13230 - RNA, 22 nt, synthetic construct
  source 1..22: mol_type = other RNA
ctcaggcccccaggctttcccc

SEQ ID NO: 13231 - RNA, 22 nt, synthetic construct
  source 1..22: mol_type = other RNA
ctccagatgctgcagggaggaa

SEQ ID NO: 13232 - RNA, 22 nt, synthetic construct
  source 1..22: mol_type = other RNA
ctccctgcagcatctggagtga

SEQ ID NO: 13233 - RNA, 22 nt, synthetic construct
  source 1..22: mol_type = other RNA
ctcctaggctgggccctgtctc

SEQ ID NO: 13234 - RNA, 22 nt, synthetic construct
  source 1..22: mol_type = other RNA
ctctgggaccccttcctctcaa

SEQ ID NO: 13235 - RNA, 22 nt, synthetic construct
  source 1..22: mol_type = other RNA
ctctttgcctcctaggctgggc

SEQ ID NO: 13236 - RNA, 22 nt, synthetic construct
  source 1..22: mol_type = other RNA
ctgagacagggcccagcctagg

SEQ ID NO: 13237 - RNA, 22 nt, synthetic construct
  source 1..22: mol_type = other RNA
ctgcagcatctggagtgagtat

SEQ ID NO: 13238 - RNA, 22 nt, synthetic construct
  source 1..22: mol_type = other RNA
ctgcagggaggaaaaggccgtg

SEQ ID NO: 13239 - RNA, 22 nt, synthetic construct
  source 1..22: mol_type = other RNA
ctggaggtcttacccttgctct

SEQ ID NO: 13240 - RNA, 22 nt, synthetic construct
  source 1..22: mol_type = other RNA
ctggagtgagtatagactctgg

SEQ ID NO: 13241 - RNA, 22 nt, synthetic construct
  source 1..22: mol_type = other RNA
ctgggaccccttcctctcaaca

SEQ ID NO: 13242 - RNA, 22 nt, synthetic construct
  source 1..22: mol_type = other RNA
ctgggccctgtctcaggccccc

SEQ ID NO: 13243 - RNA, 22 nt, synthetic construct
  source 1..22: mol_type = other RNA
ctgggggcctgagacagggccc

SEQ ID NO: 13244 - RNA, 22 nt, synthetic construct
  source 1..22: mol_type = other RNA
ctggtgcggatcctcacggcct

SEQ ID NO: 13245 - RNA, 22 nt, synthetic construct
  source 1..22: mol_type = other RNA
ctgtctcaggcccccaggcttt

SEQ ID NO: 13246 - RNA, 22 nt, synthetic construct
  source 1..22: mol_type = other RNA
ctgtgactggaggtcttaccct

SEQ ID NO: 13247 - RNA, 22 nt, synthetic construct
  source 1..22: mol_type = other RNA
ctgtgactgtgactggaggtct

SEQ ID NO: 13248 - RNA, 22 nt, synthetic construct
  source 1..22: mol_type = other RNA
cttacccttgctctttgcctcc

SEQ ID NO: 13249 - RNA, 22 nt, synthetic construct
  source 1..22: mol_type = other RNA
cttgctctttgcctcctaggct

SEQ ID NO: 13250 - RNA, 22 nt, synthetic construct
  source 1..22: mol_type = other RNA
ctttccccaaactggtgcggat

SEQ ID NO: 13251 - RNA, 22 nt, synthetic construct
  source 1..22: mol_type = other RNA
ctttgcctcctaggctgggccc

SEQ ID NO: 13252 - RNA, 22 nt, synthetic construct
  source 1..22: mol_type = other RNA
cttttcctccctgcagcatctg

SEQ ID NO: 13253 - RNA, 22 nt, synthetic construct
  source 1..22: mol_type = other RNA
gaaaaggccgtgaggatccgca

SEQ ID NO: 13254 - RNA, 22 nt, synthetic construct
  source 1..22: mol_type = other RNA
gaaagcctgggggcctgagaca

SEQ ID NO: 13255 - RNA, 22 nt, synthetic construct
  source 1..22: mol_type = other RNA
gaaggggtcccagagtctatac

SEQ ID NO: 13256 - RNA, 22 nt, synthetic construct
  source 1..22: mol_type = other RNA
gacagggcccagcctaggaggc

SEQ ID NO: 13257 - RNA, 22 nt, synthetic construct
  source 1..22: mol_type = other RNA
gactctgggaccccttcctctc

SEQ ID NO: 13258 - RNA, 22 nt, synthetic construct
  source 1..22: mol_type = other RNA
gactggaggtcttacccttgct

SEQ ID NO: 13259 - RNA, 22 nt, synthetic construct
  source 1..22: mol_type = other RNA
gactgtgactggaggtcttacc

SEQ ID NO: 13260 - RNA, 22 nt, synthetic construct
  source 1..22: mol_type = other RNA
gagacagggcccagcctaggag

SEQ ID NO: 13261 - RNA, 22 nt, synthetic construct
  source 1..22: mol_type = other RNA
gagaggaaggggtcccagagtc

SEQ ID NO: 13262 - RNA, 22 nt, synthetic construct
  source 1..22: mol_type = other RNA
gagcaagggtaagacctccagt

SEQ ID NO: 13263 - RNA, 22 nt, synthetic construct
  source 1..22: mol_type = other RNA
gaggaaaaggccgtgaggatcc

SEQ ID NO: 13264 - RNA, 22 nt, synthetic construct
  source 1..22: mol_type = other RNA
gaggaaggggtcccagagtcta

SEQ ID NO: 13265 - RNA, 22 nt, synthetic construct
  source 1..22: mol_type = other RNA
gaggatccgcaccagtttgggg

SEQ ID NO: 13266 - RNA, 22 nt, synthetic construct
  source 1..22: mol_type = other RNA
gaggcaaagagcaagggtaaga

SEQ ID NO: 13267 - RNA, 22 nt, synthetic construct
  source 1..22: mol_type = other RNA
gaggtcttacccttgctctttg

SEQ ID NO: 13268 - RNA, 22 nt, synthetic construct
  source 1..22: mol_type = other RNA
gagtatagactctgggacccct

SEQ ID NO: 13269 - RNA, 22 nt, synthetic construct
  source 1..22: mol_type = other RNA
gagtctatactcactccagatg

SEQ ID NO: 13270 - RNA, 22 nt, synthetic construct
  source 1..22: mol_type = other RNA
gagtgagtatagactctgggac

SEQ ID NO: 13271 - RNA, 22 nt, synthetic construct
  source 1..22: mol_type = other RNA
gatccgcaccagtttggggaaa

SEQ ID NO: 13272 - RNA, 22 nt, synthetic construct
  source 1..22: mol_type = other RNA
gatcctcacggccttttcctcc

SEQ ID NO: 13273 - RNA, 22 nt, synthetic construct
  source 1..22: mol_type = other RNA
gatgctgcagggaggaaaaggc

SEQ ID NO: 13274 - RNA, 22 nt, synthetic construct
  source 1..22: mol_type = other RNA
gatgttgagaggaaggggtccc

SEQ ID NO: 13275 - RNA, 22 nt, synthetic construct
  source 1..22: mol_type = other RNA
gcaaagagcaagggtaagacct

SEQ ID NO: 13276 - RNA, 22 nt, synthetic construct
  source 1..22: mol_type = other RNA
gcaagggtaagacctccagtca

SEQ ID NO: 13277 - RNA, 22 nt, synthetic construct
  source 1..22: mol_type = other RNA
gcaccagtttggggaaagcctg

SEQ ID NO: 13278 - RNA, 22 nt, synthetic construct
  source 1..22: mol_type = other RNA
gcacccagatgttgagaggaag

SEQ ID NO: 13279 - RNA, 22 nt, synthetic construct
  source 1..22: mol_type = other RNA
gcagcatctggagtgagtatag

SEQ ID NO: 13280 - RNA, 22 nt, synthetic construct
  source 1..22: mol_type = other RNA
gcagggaggaaaaggccgtgag

SEQ ID NO: 13281 - RNA, 22 nt, synthetic construct
  source 1..22: mol_type = other RNA
gcatctggagtgagtatagact

SEQ ID NO: 13282 - RNA, 22 nt, synthetic construct
  source 1..22: mol_type = other RNA
gcccagcctaggaggcaaagag

SEQ ID NO: 13283 - RNA, 22 nt, synthetic construct
  source 1..22: mol_type = other RNA
gcccccaggctttccccaaact

SEQ ID NO: 13284 - RNA, 22 nt, synthetic construct
  source 1..22: mol_type = other RNA
gccctgtctcaggcccccaggc

SEQ ID NO: 13285 - RNA, 22 nt, synthetic construct
  source 1..22: mol_type = other RNA
gccgtgaggatccgcaccagtt

SEQ ID NO: 13286 - RNA, 22 nt, synthetic construct
  source 1..22: mol_type = other RNA
gcctaggaggcaaagagcaagg

SEQ ID NO: 13287 - RNA, 22 nt, synthetic construct
  source 1..22: mol_type = other RNA
gcctcctaggctgggccctgtc

SEQ ID NO: 13288 - RNA, 22 nt, synthetic construct
  source 1..22: mol_type = other RNA
gcctgagacagggcccagccta

SEQ ID NO: 13289 - RNA, 22 nt, synthetic construct
  source 1..22: mol_type = other RNA
gcctgggggcctgagacagggc

SEQ ID NO: 13290 - RNA, 22 nt, synthetic construct
  source 1..22: mol_type = other RNA
gccttttcctccctgcagcatc

SEQ ID NO: 13291 - RNA, 22 nt, synthetic construct
  source 1..22: mol_type = other RNA
gcggatcctcacggccttttcc

SEQ ID NO: 13292 - RNA, 22 nt, synthetic construct
  source 1..22: mol_type = other RNA
gctctttgcctcctaggctggg

SEQ ID NO: 13293 - RNA, 22 nt, synthetic construct
  source 1..22: mol_type = other RNA
gctgcagggaggaaaaggccgt

SEQ ID NO: 13294 - RNA, 22 nt, synthetic construct
  source 1..22: mol_type = other RNA
gctgggccctgtctcaggcccc

SEQ ID NO: 13295 - RNA, 22 nt, synthetic construct
  source 1..22: mol_type = other RNA
gctgtgactgtgactggaggtc

SEQ ID NO: 13296 - RNA, 22 nt, synthetic construct
  source 1..22: mol_type = other RNA
gctttccccaaactggtgcgga

SEQ ID NO: 13297 - RNA, 22 nt, synthetic construct
  source 1..22: mol_type = other RNA
ggaaaaggccgtgaggatccgc

SEQ ID NO: 13298 - RNA, 22 nt, synthetic construct
  source 1..22: mol_type = other RNA
ggaaagcctgggggcctgagac

SEQ ID NO: 13299 - RNA, 22 nt, synthetic construct
  source 1..22: mol_type = other RNA
ggaaggggtcccagagtctata

SEQ ID NO: 13300 - RNA, 22 nt, synthetic construct
  source 1..22: mol_type = other RNA
ggaggaaaaggccgtgaggatc

SEQ ID NO: 13301 - RNA, 22 nt, synthetic construct
  source 1..22: mol_type = other RNA
ggaggcaaagagcaagggtaag

SEQ ID NO: 13302 - RNA, 22 nt, synthetic construct
  source 1..22: mol_type = other RNA
ggaggtcttacccttgctcttt

SEQ ID NO: 13303 - RNA, 22 nt, synthetic construct
  source 1..22: mol_type = other RNA
ggagtgagtatagactctggga

SEQ ID NO: 13304 - RNA, 22 nt, synthetic construct
  source 1..22: mol_type = other RNA
ggatccgcaccagtttggggaa

SEQ ID NO: 13305 - RNA, 22 nt, synthetic construct
  source 1..22: mol_type = other RNA
ggatcctcacggccttttcctc

SEQ ID NO: 13306 - RNA, 22 nt, synthetic construct
  source 1..22: mol_type = other RNA
ggcaaagagcaagggtaagacc

SEQ ID NO: 13307 - RNA, 22 nt, synthetic construct
  source 1..22: mol_type = other RNA
ggcccagcctaggaggcaaaga

SEQ ID NO: 13308 - RNA, 22 nt, synthetic construct
  source 1..22: mol_type = other RNA
ggcccccaggctttccccaaac

SEQ ID NO: 13309 - RNA, 22 nt, synthetic construct
  source 1..22: mol_type = other RNA
ggccctgtctcaggcccccagg

SEQ ID NO: 13310 - RNA, 22 nt, synthetic construct
  source 1..22: mol_type = other RNA
ggccgtgaggatccgcaccagt

SEQ ID NO: 13311 - RNA, 22 nt, synthetic construct
  source 1..22: mol_type = other RNA
ggcctgagacagggcccagcct

SEQ ID NO: 13312 - RNA, 22 nt, synthetic construct
  source 1..22: mol_type = other RNA
ggccttttcctccctgcagcat

SEQ ID NO: 13313 - RNA, 22 nt, synthetic construct
  source 1..22: mol_type = other RNA
ggctgggccctgtctcaggccc

SEQ ID NO: 13314 - RNA, 22 nt, synthetic construct
  source 1..22: mol_type = other RNA
ggctttccccaaactggtgcgg

SEQ ID NO: 13315 - RNA, 22 nt, synthetic construct
  source 1..22: mol_type = other RNA
gggaaagcctgggggcctgaga

SEQ ID NO: 13316 - RNA, 22 nt, synthetic construct
  source 1..22: mol_type = other RNA
gggaccccttcctctcaacatc

SEQ ID NO: 13317 - RNA, 22 nt, synthetic construct
  source 1..22: mol_type = other RNA
gggaggaaaaggccgtgaggat

SEQ ID NO: 13318 - RNA, 22 nt, synthetic construct
  source 1..22: mol_type = other RNA
gggcccagcctaggaggcaaag

SEQ ID NO: 13319 - RNA, 22 nt, synthetic construct
  source 1..22: mol_type = other RNA
gggccctgtctcaggcccccag

SEQ ID NO: 13320 - RNA, 22 nt, synthetic construct
  source 1..22: mol_type = other RNA
gggcctgagacagggcccagcc

SEQ ID NO: 13321 - RNA, 22 nt, synthetic construct
  source 1..22: mol_type = other RNA
ggggaaagcctgggggcctgag

SEQ ID NO: 13322 - RNA, 22 nt, synthetic construct
  source 1..22: mol_type = other RNA
ggggcctgagacagggcccagc

SEQ ID NO: 13323 - RNA, 22 nt, synthetic construct
  source 1..22: mol_type = other RNA
gggggcctgagacagggcccag

SEQ ID NO: 13324 - RNA, 22 nt, synthetic construct
  source 1..22: mol_type = other RNA
ggggtcccagagtctatactca

SEQ ID NO: 13325 - RNA, 22 nt, synthetic construct
  source 1..22: mol_type = other RNA
gggtcccagagtctatactcac

SEQ ID NO: 13326 - RNA, 22 nt, synthetic construct
  source 1..22: mol_type = other RNA
ggtcccagagtctatactcact

SEQ ID NO: 13327 - RNA, 22 nt, synthetic construct
  source 1..22: mol_type = other RNA
ggtcttacccttgctctttgcc

SEQ ID NO: 13328 - RNA, 22 nt, synthetic construct
  source 1..22: mol_type = other RNA
ggtgcggatcctcacggccttt

SEQ ID NO: 13329 - RNA, 22 nt, synthetic construct
  source 1..22: mol_type = other RNA
gtatagactctgggaccccttc

SEQ ID NO: 13330 - RNA, 22 nt, synthetic construct
  source 1..22: mol_type = other RNA
gtcccagagtctatactcactc

SEQ ID NO: 13331 - RNA, 22 nt, synthetic construct
  source 1..22: mol_type = other RNA
gtctatactcactccagatgct

SEQ ID NO: 13332 - RNA, 22 nt, synthetic construct
  source 1..22: mol_type = other RNA
gtctcaggcccccaggctttcc

SEQ ID NO: 13333 - RNA, 22 nt, synthetic construct
  source 1..22: mol_type = other RNA
gtcttacccttgctctttgcct

SEQ ID NO: 13334 - RNA, 22 nt, synthetic construct
  source 1..22: mol_type = other RNA
gtgactggaggtcttacccttg

SEQ ID NO: 13335 - RNA, 22 nt, synthetic construct
  source 1..22: mol_type = other RNA
gtgactgtgactggaggtctta

SEQ ID NO: 13336 - RNA, 22 nt, synthetic construct
  source 1..22: mol_type = other RNA
gtgaggatccgcaccagtttgg

SEQ ID NO: 13337 - RNA, 22 nt, synthetic construct
  source 1..22: mol_type = other RNA
gtgagtatagactctgggaccc

SEQ ID NO: 13338 - RNA, 22 nt, synthetic construct
  source 1..22: mol_type = other RNA
gtgcggatcctcacggcctttt

SEQ ID NO: 13339 - RNA, 22 nt, synthetic construct
  source 1..22: mol_type = other RNA
gttgagaggaaggggtcccaga

SEQ ID NO: 13340 - RNA, 22 nt, synthetic construct
  source 1..22: mol_type = other RNA
gtttggggaaagcctgggggcc

SEQ ID NO: 13341 - RNA, 22 nt, synthetic construct
  source 1..22: mol_type = other RNA
tacccttgctctttgcctccta

SEQ ID NO: 13342 - RNA, 22 nt, synthetic construct
  source 1..22: mol_type = other RNA
tactcactccagatgctgcagg

SEQ ID NO: 13343 - RNA, 22 nt, synthetic construct
  source 1..22: mol_type = other RNA
tagactctgggaccccttcctc

SEQ ID NO: 13344 - RNA, 22 nt, synthetic construct
  source 1..22: mol_type = other RNA
taggaggcaaagagcaagggta

SEQ ID NO: 13345 - RNA, 22 nt, synthetic construct
  source 1..22: mol_type = other RNA
taggctgggccctgtctcaggc

SEQ ID NO: 13346 - RNA, 22 nt, synthetic construct
  source 1..22: mol_type = other RNA
tatactcactccagatgctgca

SEQ ID NO: 13347 - RNA, 22 nt, synthetic construct
  source 1..22: mol_type = other RNA
tatagactctgggaccccttcc

SEQ ID NO: 13348 - RNA, 22 nt, synthetic construct
  source 1..22: mol_type = other RNA
tcacggccttttcctccctgca

SEQ ID NO: 13349 - RNA, 22 nt, synthetic construct
  source 1..22: mol_type = other RNA
tcactccagatgctgcagggag

SEQ ID NO: 13350 - RNA, 22 nt, synthetic construct
  source 1..22: mol_type = other RNA
tcaggcccccaggctttcccca

SEQ ID NO: 13351 - RNA, 22 nt, synthetic construct
  source 1..22: mol_type = other RNA
tccagatgctgcagggaggaaa

SEQ ID NO: 13352 - RNA, 22 nt, synthetic construct
  source 1..22: mol_type = other RNA
tcccagagtctatactcactcc

SEQ ID NO: 13353 - RNA, 22 nt, synthetic construct
  source 1..22: mol_type = other RNA
tccccaaactggtgcggatcct

SEQ ID NO: 13354 - RNA, 22 nt, synthetic construct
  source 1..22: mol_type = other RNA
tccctgcagcatctggagtgag

SEQ ID NO: 13355 - RNA, 22 nt, synthetic construct
  source 1..22: mol_type = other RNA
tccgcaccagtttggggaaagc

SEQ ID NO: 13356 - RNA, 22 nt, synthetic construct
  source 1..22: mol_type = other RNA
tcctaggctgggccctgtctca

SEQ ID NO: 13357 - RNA, 22 nt, synthetic construct
  source 1..22: mol_type = other RNA
tcctcacggccttttcctccct

SEQ ID NO: 13358 - RNA, 22 nt, synthetic construct
  source 1..22: mol_type = other RNA
tcctccctgcagcatctggagt

SEQ ID NO: 13359 - RNA, 22 nt, synthetic construct
  source 1..22: mol_type = other RNA
tctatactcactccagatgctg

SEQ ID NO: 13360 - RNA, 22 nt, synthetic construct
  source 1..22: mol_type = other RNA
tctcaggcccccaggctttccc

SEQ ID NO: 13361 - RNA, 22 nt, synthetic construct
  source 1..22: mol_type = other RNA
tctggagtgagtatagactctg

SEQ ID NO: 13362 - RNA, 22 nt, synthetic construct
  source 1..22: mol_type = other RNA
tctgggaccccttcctctcaac

SEQ ID NO: 13363 - RNA, 22 nt, synthetic construct
  source 1..22: mol_type = other RNA
tcttacccttgctctttgcctc

SEQ ID NO: 13364 - RNA, 22 nt, synthetic construct
  source 1..22: mol_type = other RNA
tctttgcctcctaggctgggcc

SEQ ID NO: 13365 - RNA, 22 nt, synthetic construct
  source 1..22: mol_type = other RNA
tgactggaggtcttacccttgc

SEQ ID NO: 13366 - RNA, 22 nt, synthetic construct
  source 1..22: mol_type = other RNA
tgactgtgactggaggtcttac

SEQ ID NO: 13367 - RNA, 22 nt, synthetic construct
  source 1..22: mol_type = other RNA
tgagacagggcccagcctagga

SEQ ID NO: 13368 - RNA, 22 nt, synthetic construct
  source 1..22: mol_type = other RNA
tgagaggaaggggtcccagagt

SEQ ID NO: 13369 - RNA, 22 nt, synthetic construct
  source 1..22: mol_type = other RNA
tgaggatccgcaccagtttggg

SEQ ID NO: 13370 - RNA, 22 nt, synthetic construct
  source 1..22: mol_type = other RNA
tgagtatagactctgggacccc

SEQ ID NO: 13371 - RNA, 22 nt, synthetic construct
  source 1..22: mol_type = other RNA
tgcacccagatgttgagaggaa

SEQ ID NO: 13372 - RNA, 22 nt, synthetic construct
  source 1..22: mol_type = other RNA
tgcagcatctggagtgagtata

SEQ ID NO: 13373 - RNA, 22 nt, synthetic construct
  source 1..22: mol_type = other RNA
tgcagggaggaaaaggccgtga

SEQ ID NO: 13374 - RNA, 22 nt, synthetic construct
  source 1..22: mol_type = other RNA
tgcctcctaggctgggccctgt

SEQ ID NO: 13375 - RNA, 22 nt, synthetic construct
  source 1..22: mol_type = other RNA
tgcggatcctcacggccttttc

SEQ ID NO: 13376 - RNA, 22 nt, synthetic construct
  source 1..22: mol_type = other RNA
tgctctttgcctcctaggctgg

SEQ ID NO: 13377 - RNA, 22 nt, synthetic construct
  source 1..22: mol_type = other RNA
tgctgcagggaggaaaaggccg

SEQ ID NO: 13378 - RNA, 22 nt, synthetic construct
  source 1..22: mol_type = other RNA
tggaggtcttacccttgctctt

SEQ ID NO: 13379 - RNA, 22 nt, synthetic construct
  source 1..22: mol_type = other RNA
tggagtgagtatagactctggg

SEQ ID NO: 13380 - RNA, 22 nt, synthetic construct
  source 1..22: mol_type = other RNA
tgggaccccttcctctcaacat

SEQ ID NO: 13381 - RNA, 22 nt, synthetic construct
  source 1..22: mol_type = other RNA
tgggccctgtctcaggccccca

SEQ ID NO: 13382 - RNA, 22 nt, synthetic construct
  source 1..22: mol_type = other RNA
tggggaaagcctgggggcctga

SEQ ID NO: 13383 - RNA, 22 nt, synthetic construct
  source 1..22: mol_type = other RNA
tgggggcctgagacagggccca

SEQ ID NO: 13384 - RNA, 22 nt, synthetic construct
  source 1..22: mol_type = other RNA
tggtgcggatcctcacggcctt

SEQ ID NO: 13385 - RNA, 22 nt, synthetic construct
  source 1..22: mol_type = other RNA
tgtctcaggcccccaggctttc

SEQ ID NO: 13386 - RNA, 22 nt, synthetic construct
  source 1..22: mol_type = other RNA
tgtgactggaggtcttaccctt

SEQ ID NO: 13387 - RNA, 22 nt, synthetic construct
  source 1..22: mol_type = other RNA
tgtgactgtgactggaggtctt

SEQ ID NO: 13388 - RNA, 22 nt, synthetic construct
  source 1..22: mol_type = other RNA
tgttgagaggaaggggtcccag

SEQ ID NO: 13389 - RNA, 22 nt, synthetic construct
  source 1..22: mol_type = other RNA
ttacccttgctctttgcctcct

SEQ ID NO: 13390 - RNA, 22 nt, synthetic construct
  source 1..22: mol_type = other RNA
ttccccaaactggtgcggatcc

SEQ ID NO: 13391 - RNA, 22 nt, synthetic construct
  source 1..22: mol_type = other RNA
ttcctccctgcagcatctggag

SEQ ID NO: 13392 - RNA, 22 nt, synthetic construct
  source 1..22: mol_type = other RNA
ttgagaggaaggggtcccagag

SEQ ID NO: 13393 - RNA, 22 nt, synthetic construct
  source 1..22: mol_type = other RNA
ttgcctcctaggctgggccctg

SEQ ID NO: 13394 - RNA, 22 nt, synthetic construct
  source 1..22: mol_type = other RNA
ttgctctttgcctcctaggctg

SEQ ID NO: 13395 - RNA, 22 nt, synthetic construct
  source 1..22: mol_type = other RNA
ttggggaaagcctgggggcctg

SEQ ID NO: 13396 - RNA, 22 nt, synthetic construct
  source 1..22: mol_type = other RNA
tttccccaaactggtgcggatc

SEQ ID NO: 13397 - RNA, 22 nt, synthetic construct
  source 1..22: mol_type = other RNA
tttcctccctgcagcatctgga

SEQ ID NO: 13398 - RNA, 22 nt, synthetic construct
  source 1..22: mol_type = other RNA
tttgcctcctaggctgggccct

SEQ ID NO: 13399 - RNA, 22 nt, synthetic construct
  source 1..22: mol_type = other RNA
tttggggaaagcctgggggcct

SEQ ID NO: 13400 - RNA, 22 nt, synthetic construct
  source 1..22: mol_type = other RNA
ttttcctccctgcagcatctgg

SEQ ID NO: 13401 - RNA, 20 nt, synthetic construct
  source 1..20: mol_type = other RNA
aaaccctcaagtgagtgagc

SEQ ID NO: 13402 - RNA, 20 nt, synthetic construct
  source 1..20: mol_type = other RNA
aacaagatcggggacgaggg

SEQ ID NO: 13403 - RNA, 20 nt, synthetic construct
  source 1..20: mol_type = other RNA
aaccctcaagtgagtgagct

SEQ ID NO: 13404 - RNA, 20 nt, synthetic construct
  source 1..20: mol_type = other RNA
aagatcggggacgagggtgt

SEQ ID NO: 13405 - RNA, 20 nt, synthetic construct
  source 1..20: mol_type = other RNA
aaggacttcagctgggggaa

SEQ ID NO: 13406 - RNA, 20 nt, synthetic construct
  source 1..20: mol_type = other RNA
aagggcaggcccagctcact

SEQ ID NO: 13407 - RNA, 20 nt, synthetic construct
  source 1..20: mol_type = other RNA
aaggtggctgagagctgcga

SEQ ID NO: 13408 - RNA, 20 nt, synthetic construct
  source 1..20: mol_type = other RNA
aagtccttggaaaccctcaa

SEQ ID NO: 13409 - RNA, 20 nt, synthetic construct
  source 1..20: mol_type = other RNA
aagtgagtgagctgggcctg

SEQ ID NO: 13410 - RNA, 20 nt, synthetic construct
  source 1..20: mol_type = other RNA
aatcagatgggggccatcag

SEQ ID NO: 13411 - RNA, 20 nt, synthetic construct
  source 1..20: mol_type = other RNA
acaagatcggggacgagggt

SEQ ID NO: 13412 - RNA, 20 nt, synthetic construct
  source 1..20: mol_type = other RNA
acaccctcgtccccgatctt

SEQ ID NO: 13413 - RNA, 20 nt, synthetic construct
  source 1..20: mol_type = other RNA
accctcaagtgagtgagctg

SEQ ID NO: 13414 - RNA, 20 nt, synthetic construct
  source 1..20: mol_type = other RNA
accctcgtccccgatcttgt

SEQ ID NO: 13415 - RNA, 20 nt, synthetic construct
  source 1..20: mol_type = other RNA
acctgcagcctggatgcgct

SEQ ID NO: 13416 - RNA, 20 nt, synthetic construct
  source 1..20: mol_type = other RNA
accttcccccagctgaagtc

SEQ ID NO: 13417 - RNA, 20 nt, synthetic construct
  source 1..20: mol_type = other RNA
acgagggtgtctcgcagctc

SEQ ID NO: 13418 - RNA, 20 nt, synthetic construct
  source 1..20: mol_type = other RNA
acgctagctgatggccccca

SEQ ID NO: 13419 - RNA, 20 nt, synthetic construct
  source 1..20: mol_type = other RNA
actcacttgagggtttccaa

SEQ ID NO: 13420 - RNA, 20 nt, synthetic construct
  source 1..20: mol_type = other RNA
actcagcgcatccaggctgc

SEQ ID NO: 13421 - RNA, 20 nt, synthetic construct
  source 1..20: mol_type = other RNA
acttcagctgggggaaggtg

SEQ ID NO: 13422 - RNA, 20 nt, synthetic construct
  source 1..20: mol_type = other RNA
acttgagggtttccaaggac

SEQ ID NO: 13423 - RNA, 20 nt, synthetic construct
  source 1..20: mol_type = other RNA
agaacaagatcggggacgag

SEQ ID NO: 13424 - RNA, 20 nt, synthetic construct
  source 1..20: mol_type = other RNA
agacaccctcgtccccgatc

SEQ ID NO: 13425 - RNA, 20 nt, synthetic construct
  source 1..20: mol_type = other RNA
agagctgcgagacaccctcg

SEQ ID NO: 13426 - RNA, 20 nt, synthetic construct
  source 1..20: mol_type = other RNA
agatcggggacgagggtgtc

SEQ ID NO: 13427 - RNA, 20 nt, synthetic construct
  source 1..20: mol_type = other RNA
agatgggggccatcagctag

SEQ ID NO: 13428 - RNA, 20 nt, synthetic construct
  source 1..20: mol_type = other RNA
agcaggaagggcaggcccag

SEQ ID NO: 13429 - RNA, 20 nt, synthetic construct
  source 1..20: mol_type = other RNA
agccaccttcccccagctga

SEQ ID NO: 13430 - RNA, 20 nt, synthetic construct
  source 1..20: mol_type = other RNA
agcctggatgcgctgagtga

SEQ ID NO: 13431 - RNA, 20 nt, synthetic construct
  source 1..20: mol_type = other RNA
agcgcatccaggctgcaggt

SEQ ID NO: 13432 - RNA, 20 nt, synthetic construct
  source 1..20: mol_type = other RNA
agctcactcacttgagggtt

SEQ ID NO: 13433 - RNA, 20 nt, synthetic construct
  source 1..20: mol_type = other RNA
agctctcagccaccttcccc

SEQ ID NO: 13434 - RNA, 20 nt, synthetic construct
  source 1..20: mol_type = other RNA
agctgaagtccttggaaacc

SEQ ID NO: 13435 - RNA, 20 nt, synthetic construct
  source 1..20: mol_type = other RNA
agctgatggcccccatctga

SEQ ID NO: 13436 - RNA, 20 nt, synthetic construct
  source 1..20: mol_type = other RNA
agctgcgagacaccctcgtc

SEQ ID NO: 13437 - RNA, 20 nt, synthetic construct
  source 1..20: mol_type = other RNA
agctgggcctgcccttcctg

SEQ ID NO: 13438 - RNA, 20 nt, synthetic construct
  source 1..20: mol_type = other RNA
agctgggggaaggtggctga

SEQ ID NO: 13439 - RNA, 20 nt, synthetic construct
  source 1..20: mol_type = other RNA
aggaagggcaggcccagctc

SEQ ID NO: 13440 - RNA, 20 nt, synthetic construct
  source 1..20: mol_type = other RNA
aggacgctagctgatggccc

SEQ ID NO: 13441 - RNA, 20 nt, synthetic construct
  source 1..20: mol_type = other RNA
aggacttcagctgggggaag

SEQ ID NO: 13442 - RNA, 20 nt, synthetic construct
  source 1..20: mol_type = other RNA
aggcccagctcactcacttg

SEQ ID NO: 13443 - RNA, 20 nt, synthetic construct
  source 1..20: mol_type = other RNA
aggctgcaggtggaatcaga

SEQ ID NO: 13444 - RNA, 20 nt, synthetic construct
  source 1..20: mol_type = other RNA
agggcaggcccagctcactc

SEQ ID NO: 13445 - RNA, 20 nt, synthetic construct
  source 1..20: mol_type = other RNA
agggtgtctcgcagctctca

SEQ ID NO: 13446 - RNA, 20 nt, synthetic construct
  source 1..20: mol_type = other RNA
agggtttccaaggacttcag

SEQ ID NO: 13447 - RNA, 20 nt, synthetic construct
  source 1..20: mol_type = other RNA
aggtggaatcagatgggggc

SEQ ID NO: 13448 - RNA, 20 nt, synthetic construct
  source 1..20: mol_type = other RNA
aggtggctgagagctgcgag

SEQ ID NO: 13449 - RNA, 20 nt, synthetic construct
  source 1..20: mol_type = other RNA
agtccttggaaaccctcaag

SEQ ID NO: 13450 - RNA, 20 nt, synthetic construct
  source 1..20: mol_type = other RNA
agtgagaacaagatcgggga

SEQ ID NO: 13451 - RNA, 20 nt, synthetic construct
  source 1..20: mol_type = other RNA
agtgagctgggcctgccctt

SEQ ID NO: 13452 - RNA, 20 nt, synthetic construct
  source 1..20: mol_type = other RNA
agtgagtgagctgggcctgc

SEQ ID NO: 13453 - RNA, 20 nt, synthetic construct
  source 1..20: mol_type = other RNA
atcagatgggggccatcagc

SEQ ID NO: 13454 - RNA, 20 nt, synthetic construct
  source 1..20: mol_type = other RNA
atccaggctgcaggtggaat

SEQ ID NO: 13455 - RNA, 20 nt, synthetic construct
  source 1..20: mol_type = other RNA
atcggggacgagggtgtctc

SEQ ID NO: 13456 - RNA, 20 nt, synthetic construct
  source 1..20: mol_type = other RNA
atctgattccacctgcagcc

SEQ ID NO: 13457 - RNA, 20 nt, synthetic construct
  source 1..20: mol_type = other RNA
atcttgttctcactcagcgc

SEQ ID NO: 13458 - RNA, 20 nt, synthetic construct
  source 1..20: mol_type = other RNA
atgcgctgagtgagaacaag

SEQ ID NO: 13459 - RNA, 20 nt, synthetic construct
  source 1..20: mol_type = other RNA
atggcccccatctgattcca

SEQ ID NO: 13460 - RNA, 20 nt, synthetic construct
  source 1..20: mol_type = other RNA
atgggggccatcagctagcg

SEQ ID NO: 13461 - RNA, 20 nt, synthetic construct
  source 1..20: mol_type = other RNA
attcagcaggaagggcaggc

SEQ ID NO: 13462 - RNA, 20 nt, synthetic construct
  source 1..20: mol_type = other RNA
attccacctgcagcctggat

SEQ ID NO: 13463 - RNA, 20 nt, synthetic construct
  source 1..20: mol_type = other RNA
caagatcggggacgagggtg

SEQ ID NO: 13464 - RNA, 20 nt, synthetic construct
  source 1..20: mol_type = other RNA
caaggacttcagctggggga

SEQ ID NO: 13465 - RNA, 20 nt, synthetic construct
  source 1..20: mol_type = other RNA
caagtgagtgagctgggcct

SEQ ID NO: 13466 - RNA, 20 nt, synthetic construct
  source 1..20: mol_type = other RNA
caccctcgtccccgatcttg

SEQ ID NO: 13467 - RNA, 20 nt, synthetic construct
  source 1..20: mol_type = other RNA
cacctgcagcctggatgcgc

SEQ ID NO: 13468 - RNA, 20 nt, synthetic construct
  source 1..20: mol_type = other RNA
caccttcccccagctgaagt

SEQ ID NO: 13469 - RNA, 20 nt, synthetic construct
  source 1..20: mol_type = other RNA
cactcacttgagggtttcca

SEQ ID NO: 13470 - RNA, 20 nt, synthetic construct
  source 1..20: mol_type = other RNA
cactcagcgcatccaggctg

SEQ ID NO: 13471 - RNA, 20 nt, synthetic construct
  source 1..20: mol_type = other RNA
cacttgagggtttccaagga

SEQ ID NO: 13472 - RNA, 20 nt, synthetic construct
  source 1..20: mol_type = other RNA
cagatgggggccatcagcta

SEQ ID NO: 13473 - RNA, 20 nt, synthetic construct
  source 1..20: mol_type = other RNA
cagcaggaagggcaggccca

SEQ ID NO: 13474 - RNA, 20 nt, synthetic construct
  source 1..20: mol_type = other RNA
cagccaccttcccccagctg

SEQ ID NO: 13475 - RNA, 20 nt, synthetic construct
  source 1..20: mol_type = other RNA
cagcctggatgcgctgagtg

SEQ ID NO: 13476 - RNA, 20 nt, synthetic construct
  source 1..20: mol_type = other RNA
cagcgcatccaggctgcagg

SEQ ID NO: 13477 - RNA, 20 nt, synthetic construct
  source 1..20: mol_type = other RNA
cagctcactcacttgagggt

SEQ ID NO: 13478 - RNA, 20 nt, synthetic construct
  source 1..20: mol_type = other RNA
cagctctcagccaccttccc

SEQ ID NO: 13479 - RNA, 20 nt, synthetic construct
  source 1..20: mol_type = other RNA
cagctgaagtccttggaaac

SEQ ID NO: 13480 - RNA, 20 nt, synthetic construct
  source 1..20: mol_type = other RNA
cagctgggggaaggtggctg

SEQ ID NO: 13481 - RNA, 20 nt, synthetic construct
  source 1..20: mol_type = other RNA
caggaagggcaggcccagct

SEQ ID NO: 13482 - RNA, 20 nt, synthetic construct
  source 1..20: mol_type = other RNA
caggacgctagctgatggcc

SEQ ID NO: 13483 - RNA, 20 nt, synthetic construct
  source 1..20: mol_type = other RNA
caggcccagctcactcactt

SEQ ID NO: 13484 - RNA, 20 nt, synthetic construct
  source 1..20: mol_type = other RNA
caggctgcaggtggaatcag

SEQ ID NO: 13485 - RNA, 20 nt, synthetic construct
  source 1..20: mol_type = other RNA
caggtggaatcagatggggg

SEQ ID NO: 13486 - RNA, 20 nt, synthetic construct
  source 1..20: mol_type = other RNA
catccaggctgcaggtggaa

SEQ ID NO: 13487 - RNA, 20 nt, synthetic construct
  source 1..20: mol_type = other RNA
catctgattccacctgcagc

SEQ ID NO: 13488 - RNA, 20 nt, synthetic construct
  source 1..20: mol_type = other RNA
ccaaggacttcagctggggg

SEQ ID NO: 13489 - RNA, 20 nt, synthetic construct
  source 1..20: mol_type = other RNA
ccacctgcagcctggatgcg

SEQ ID NO: 13490 - RNA, 20 nt, synthetic construct
  source 1..20: mol_type = other RNA
ccaccttcccccagctgaag

SEQ ID NO: 13491 - RNA, 20 nt, synthetic construct
  source 1..20: mol_type = other RNA
ccagctcactcacttgaggg

SEQ ID NO: 13492 - RNA, 20 nt, synthetic construct
  source 1..20: mol_type = other RNA
ccagctgaagtccttggaaa

SEQ ID NO: 13493 - RNA, 20 nt, synthetic construct
  source 1..20: mol_type = other RNA
ccaggacgctagctgatggc

SEQ ID NO: 13494 - RNA, 20 nt, synthetic construct
  source 1..20: mol_type = other RNA
ccaggctgcaggtggaatca

SEQ ID NO: 13495 - RNA, 20 nt, synthetic construct
  source 1..20: mol_type = other RNA
ccatctgattccacctgcag

SEQ ID NO: 13496 - RNA, 20 nt, synthetic construct
  source 1..20: mol_type = other RNA
cccagctcactcacttgagg

SEQ ID NO: 13497 - RNA, 20 nt, synthetic construct
  source 1..20: mol_type = other RNA
cccagctgaagtccttggaa

SEQ ID NO: 13498 - RNA, 20 nt, synthetic construct
  source 1..20: mol_type = other RNA
cccaggacgctagctgatgg

SEQ ID NO: 13499 - RNA, 20 nt, synthetic construct
  source 1..20: mol_type = other RNA
cccatctgattccacctgca

SEQ ID NO: 13500 - RNA, 20 nt, synthetic construct
  source 1..20: mol_type = other RNA
ccccagctgaagtccttgga

SEQ ID NO: 13501 - RNA, 20 nt, synthetic construct
  source 1..20: mol_type = other RNA
ccccaggacgctagctgatg

SEQ ID NO: 13502 - RNA, 20 nt, synthetic construct
  source 1..20: mol_type = other RNA
ccccatctgattccacctgc

SEQ ID NO: 13503 - RNA, 20 nt, synthetic construct
  source 1..20: mol_type = other RNA
cccccagctgaagtccttgg

SEQ ID NO: 13504 - RNA, 20 nt, synthetic construct
  source 1..20: mol_type = other RNA
cccccatctgattccacctg

SEQ ID NO: 13505 - RNA, 20 nt, synthetic construct
  source 1..20: mol_type = other RNA
ccccgatcttgttctcactc

SEQ ID NO: 13506 - RNA, 20 nt, synthetic construct
  source 1..20: mol_type = other RNA
cccgatcttgttctcactca

SEQ ID NO: 13507 - RNA, 20 nt, synthetic construct
  source 1..20: mol_type = other RNA
cccgattcagcaggaagggc

SEQ ID NO: 13508 - RNA, 20 nt, synthetic construct
  source 1..20: mol_type = other RNA
ccctcaagtgagtgagctgg

SEQ ID NO: 13509 - RNA, 20 nt, synthetic construct
  source 1..20: mol_type = other RNA
ccctcgtccccgatcttgtt

SEQ ID NO: 13510 - RNA, 20 nt, synthetic construct
  source 1..20: mol_type = other RNA
ccgatcttgttctcactcag

SEQ ID NO: 13511 - RNA, 20 nt, synthetic construct
  source 1..20: mol_type = other RNA
ccgattcagcaggaagggca

SEQ ID NO: 13512 - RNA, 20 nt, synthetic construct
  source 1..20: mol_type = other RNA
cctcaagtgagtgagctggg

SEQ ID NO: 13513 - RNA, 20 nt, synthetic construct
  source 1..20: mol_type = other RNA
cctcgtccccgatcttgttc

SEQ ID NO: 13514 - RNA, 20 nt, synthetic construct
  source 1..20: mol_type = other RNA
cctgcagcctggatgcgctg

SEQ ID NO: 13515 - RNA, 20 nt, synthetic construct
  source 1..20: mol_type = other RNA
cctgcccttcctgctgaatc

SEQ ID NO: 13516 - RNA, 20 nt, synthetic construct
  source 1..20: mol_type = other RNA
cctggatgcgctgagtgaga

SEQ ID NO: 13517 - RNA, 20 nt, synthetic construct
  source 1..20: mol_type = other RNA
ccttcccccagctgaagtcc

SEQ ID NO: 13518 - RNA, 20 nt, synthetic construct
  source 1..20: mol_type = other RNA
ccttggaaaccctcaagtga

SEQ ID NO: 13519 - RNA, 20 nt, synthetic construct
  source 1..20: mol_type = other RNA
cgagacaccctcgtccccga

SEQ ID NO: 13520 - RNA, 20 nt, synthetic construct
  source 1..20: mol_type = other RNA
cgagggtgtctcgcagctct

SEQ ID NO: 13521 - RNA, 20 nt, synthetic construct
  source 1..20: mol_type = other RNA
cgatcttgttctcactcagc

SEQ ID NO: 13522 - RNA, 20 nt, synthetic construct
  source 1..20: mol_type = other RNA
cgattcagcaggaagggcag

SEQ ID NO: 13523 - RNA, 20 nt, synthetic construct
  source 1..20: mol_type = other RNA
cgcagctctcagccaccttc

SEQ ID NO: 13524 - RNA, 20 nt, synthetic construct
  source 1..20: mol_type = other RNA
cgcatccaggctgcaggtgg

SEQ ID NO: 13525 - RNA, 20 nt, synthetic construct
  source 1..20: mol_type = other RNA
cgctagctgatggcccccat

SEQ ID NO: 13526 - RNA, 20 nt, synthetic construct
  source 1..20: mol_type = other RNA
cgctgagtgagaacaagatc

SEQ ID NO: 13527 - RNA, 20 nt, synthetic construct
  source 1..20: mol_type = other RNA
cggggacgagggtgtctcgc

SEQ ID NO: 13528 - RNA, 20 nt, synthetic construct
  source 1..20: mol_type = other RNA
cgtccccgatcttgttctca

SEQ ID NO: 13529 - RNA, 20 nt, synthetic construct
  source 1..20: mol_type = other RNA
ctagctgatggcccccatct

SEQ ID NO: 13530 - RNA, 20 nt, synthetic construct
  source 1..20: mol_type = other RNA
ctcaagtgagtgagctgggc

SEQ ID NO: 13531 - RNA, 20 nt, synthetic construct
  source 1..20: mol_type = other RNA
ctcactcacttgagggtttc

SEQ ID NO: 13532 - RNA, 20 nt, synthetic construct
  source 1..20: mol_type = other RNA
ctcactcagcgcatccaggc

SEQ ID NO: 13533 - RNA, 20 nt, synthetic construct
  source 1..20: mol_type = other RNA
ctcacttgagggtttccaag

SEQ ID NO: 13534 - RNA, 20 nt, synthetic construct
  source 1..20: mol_type = other RNA
ctcagccaccttcccccagc

SEQ ID NO: 13535 - RNA, 20 nt, synthetic construct
  source 1..20: mol_type = other RNA
ctcagcgcatccaggctgca

SEQ ID NO: 13536 - RNA, 20 nt, synthetic construct
  source 1..20: mol_type = other RNA
ctcgcagctctcagccacct

SEQ ID NO: 13537 - RNA, 20 nt, synthetic construct
  source 1..20: mol_type = other RNA
ctcgtccccgatcttgttct

SEQ ID NO: 13538 - RNA, 20 nt, synthetic construct
  source 1..20: mol_type = other RNA
ctctcagccaccttccccca

SEQ ID NO: 13539 - RNA, 20 nt, synthetic construct
  source 1..20: mol_type = other RNA
ctgaagtccttggaaaccct

SEQ ID NO: 13540 - RNA, 20 nt, synthetic construct
  source 1..20: mol_type = other RNA
ctgagagctgcgagacaccc

SEQ ID NO: 13541 - RNA, 20 nt, synthetic construct
  source 1..20: mol_type = other RNA
ctgagtgagaacaagatcgg

SEQ ID NO: 13542 - RNA, 20 nt, synthetic construct
  source 1..20: mol_type = other RNA
ctgatggcccccatctgatt

SEQ ID NO: 13543 - RNA, 20 nt, synthetic construct
  source 1..20: mol_type = other RNA
ctgattccacctgcagcctg

SEQ ID NO: 13544 - RNA, 20 nt, synthetic construct
  source 1..20: mol_type = other RNA
ctgcagcctggatgcgctga

SEQ ID NO: 13545 - RNA, 20 nt, synthetic construct
  source 1..20: mol_type = other RNA
ctgcaggtggaatcagatgg

SEQ ID NO: 13546 - RNA, 20 nt, synthetic construct
  source 1..20: mol_type = other RNA
ctgcccttcctgctgaatcg

SEQ ID NO: 13547 - RNA, 20 nt, synthetic construct
  source 1..20: mol_type = other RNA
ctgcgagacaccctcgtccc

SEQ ID NO: 13548 - RNA, 20 nt, synthetic construct
  source 1..20: mol_type = other RNA
ctggatgcgctgagtgagaa

SEQ ID NO: 13549 - RNA, 20 nt, synthetic construct
  source 1..20: mol_type = other RNA
ctgggcctgcccttcctgct

SEQ ID NO: 13550 - RNA, 20 nt, synthetic construct
  source 1..20: mol_type = other RNA
ctgggggaaggtggctgaga

SEQ ID NO: 13551 - RNA, 20 nt, synthetic construct
  source 1..20: mol_type = other RNA
cttcagctgggggaaggtgg

SEQ ID NO: 13552 - RNA, 20 nt, synthetic construct
  source 1..20: mol_type = other RNA
cttcccccagctgaagtcct

SEQ ID NO: 13553 - RNA, 20 nt, synthetic construct
  source 1..20: mol_type = other RNA
cttgagggtttccaaggact

SEQ ID NO: 13554 - RNA, 20 nt, synthetic construct
  source 1..20: mol_type = other RNA
cttggaaaccctcaagtgag

SEQ ID NO: 13555 - RNA, 20 nt, synthetic construct
  source 1..20: mol_type = other RNA
cttgttctcactcagcgcat

SEQ ID NO: 13556 - RNA, 20 nt, synthetic construct
  source 1..20: mol_type = other RNA
gaaaccctcaagtgagtgag

SEQ ID NO: 13557 - RNA, 20 nt, synthetic construct
  source 1..20: mol_type = other RNA
gaacaagatcggggacgagg

SEQ ID NO: 13558 - RNA, 20 nt, synthetic construct
  source 1..20: mol_type = other RNA
gaagggcaggcccagctcac

SEQ ID NO: 13559 - RNA, 20 nt, synthetic construct
  source 1..20: mol_type = other RNA
gaaggtggctgagagctgcg

SEQ ID NO: 13560 - RNA, 20 nt, synthetic construct
  source 1..20: mol_type = other RNA
gaagtccttggaaaccctca

SEQ ID NO: 13561 - RNA, 20 nt, synthetic construct
  source 1..20: mol_type = other RNA
gaatcagatgggggccatca

SEQ ID NO: 13562 - RNA, 20 nt, synthetic construct
  source 1..20: mol_type = other RNA
gacaccctcgtccccgatct

SEQ ID NO: 13563 - RNA, 20 nt, synthetic construct
  source 1..20: mol_type = other RNA
gacgagggtgtctcgcagct

SEQ ID NO: 13564 - RNA, 20 nt, synthetic construct
  source 1..20: mol_type = other RNA
gacgctagctgatggccccc

SEQ ID NO: 13565 - RNA, 20 nt, synthetic construct
  source 1..20: mol_type = other RNA
gacttcagctgggggaaggt

SEQ ID NO: 13566 - RNA, 20 nt, synthetic construct
  source 1..20: mol_type = other RNA
gagaacaagatcggggacga

SEQ ID NO: 13567 - RNA, 20 nt, synthetic construct
  source 1..20: mol_type = other RNA
gagacaccctcgtccccgat

SEQ ID NO: 13568 - RNA, 20 nt, synthetic construct
  source 1..20: mol_type = other RNA
gagagctgcgagacaccctc

SEQ ID NO: 13569 - RNA, 20 nt, synthetic construct
  source 1..20: mol_type = other RNA
gagctgcgagacaccctcgt

SEQ ID NO: 13570 - RNA, 20 nt, synthetic construct
  source 1..20: mol_type = other RNA
gagctgggcctgcccttcct

SEQ ID NO: 13571 - RNA, 20 nt, synthetic construct
  source 1..20: mol_type = other RNA
gagggtgtctcgcagctctc

SEQ ID NO: 13572 - RNA, 20 nt, synthetic construct
  source 1..20: mol_type = other RNA
gagggtttccaaggacttca

SEQ ID NO: 13573 - RNA, 20 nt, synthetic construct
  source 1..20: mol_type = other RNA
gagtgagaacaagatcgggg

SEQ ID NO: 13574 - RNA, 20 nt, synthetic construct
  source 1..20: mol_type = other RNA
gagtgagctgggcctgccct

SEQ ID NO: 13575 - RNA, 20 nt, synthetic construct
  source 1..20: mol_type = other RNA
gatcggggacgagggtgtct

SEQ ID NO: 13576 - RNA, 20 nt, synthetic construct
  source 1..20: mol_type = other RNA
gatcttgttctcactcagcg

SEQ ID NO: 13577 - RNA, 20 nt, synthetic construct
  source 1..20: mol_type = other RNA
gatgcgctgagtgagaacaa

SEQ ID NO: 13578 - RNA, 20 nt, synthetic construct
  source 1..20: mol_type = other RNA
gatggcccccatctgattcc

SEQ ID NO: 13579 - RNA, 20 nt, synthetic construct
  source 1..20: mol_type = other RNA
gatgggggccatcagctagc

SEQ ID NO: 13580 - RNA, 20 nt, synthetic construct
  source 1..20: mol_type = other RNA
gattcagcaggaagggcagg

SEQ ID NO: 13581 - RNA, 20 nt, synthetic construct
  source 1..20: mol_type = other RNA
gattccacctgcagcctgga

SEQ ID NO: 13582 - RNA, 20 nt, synthetic construct
  source 1..20: mol_type = other RNA
gcagcctggatgcgctgagt

SEQ ID NO: 13583 - RNA, 20 nt, synthetic construct
  source 1..20: mol_type = other RNA
gcagctctcagccaccttcc

SEQ ID NO: 13584 - RNA, 20 nt, synthetic construct
  source 1..20: mol_type = other RNA
gcaggaagggcaggcccagc

SEQ ID NO: 13585 - RNA, 20 nt, synthetic construct
  source 1..20: mol_type = other RNA
gcaggcccagctcactcact

SEQ ID NO: 13586 - RNA, 20 nt, synthetic construct
  source 1..20: mol_type = other RNA
gcaggtggaatcagatgggg

SEQ ID NO: 13587 - RNA, 20 nt, synthetic construct
  source 1..20: mol_type = other RNA
gcatccaggctgcaggtgga

SEQ ID NO: 13588 - RNA, 20 nt, synthetic construct
  source 1..20: mol_type = other RNA
gccaccttcccccagctgaa

SEQ ID NO: 13589 - RNA, 20 nt, synthetic construct
  source 1..20: mol_type = other RNA
gcccagctcactcacttgag

SEQ ID NO: 13590 - RNA, 20 nt, synthetic construct
  source 1..20: mol_type = other RNA
gccccaggacgctagctgat

SEQ ID NO: 13591 - RNA, 20 nt, synthetic construct
  source 1..20: mol_type = other RNA
gcccccatctgattccacct

SEQ ID NO: 13592 - RNA, 20 nt, synthetic construct
  source 1..20: mol_type = other RNA
gcccgattcagcaggaaggg

SEQ ID NO: 13593 - RNA, 20 nt, synthetic construct
  source 1..20: mol_type = other RNA
gcccttcctgctgaatcggg

SEQ ID NO: 13594 - RNA, 20 nt, synthetic construct
  source 1..20: mol_type = other RNA
gcctgcccttcctgctgaat

SEQ ID NO: 13595 - RNA, 20 nt, synthetic construct
  source 1..20: mol_type = other RNA
gcctggatgcgctgagtgag

SEQ ID NO: 13596 - RNA, 20 nt, synthetic construct
  source 1..20: mol_type = other RNA
gcgagacaccctcgtccccg

SEQ ID NO: 13597 - RNA, 20 nt, synthetic construct
  source 1..20: mol_type = other RNA
gcgcatccaggctgcaggtg

SEQ ID NO: 13598 - RNA, 20 nt, synthetic construct
  source 1..20: mol_type = other RNA
gcgctgagtgagaacaagat

SEQ ID NO: 13599 - RNA, 20 nt, synthetic construct
  source 1..20: mol_type = other RNA
gctagctgatggcccccatc

SEQ ID NO: 13600 - RNA, 20 nt, synthetic construct
  source 1..20: mol_type = other RNA
gctcactcacttgagggttt

SEQ ID NO: 13601 - RNA, 20 nt, synthetic construct
  source 1..20: mol_type = other RNA
gctctcagccaccttccccc

SEQ ID NO: 13602 - RNA, 20 nt, synthetic construct
  source 1..20: mol_type = other RNA
gctgaagtccttggaaaccc

SEQ ID NO: 13603 - RNA, 20 nt, synthetic construct
  source 1..20: mol_type = other RNA
gctgagagctgcgagacacc

SEQ ID NO: 13604 - RNA, 20 nt, synthetic construct
  source 1..20: mol_type = other RNA
gctgagtgagaacaagatcg

SEQ ID NO: 13605 - RNA, 20 nt, synthetic construct
  source 1..20: mol_type = other RNA
gctgatggcccccatctgat

SEQ ID NO: 13606 - RNA, 20 nt, synthetic construct
  source 1..20: mol_type = other RNA
gctgcaggtggaatcagatg

SEQ ID NO: 13607 - RNA, 20 nt, synthetic construct
  source 1..20: mol_type = other RNA
gctgcgagacaccctcgtcc

SEQ ID NO: 13608 - RNA, 20 nt, synthetic construct
  source 1..20: mol_type = other RNA
gctgggcctgcccttcctgc

SEQ ID NO: 13609 - RNA, 20 nt, synthetic construct
  source 1..20: mol_type = other RNA
gctgggggaaggtggctgag

SEQ ID NO: 13610 - RNA, 20 nt, synthetic construct
  source 1..20: mol_type = other RNA
ggaaaccctcaagtgagtga

SEQ ID NO: 13611 - RNA, 20 nt, synthetic construct
  source 1..20: mol_type = other RNA
ggaagggcaggcccagctca

SEQ ID NO: 13612 - RNA, 20 nt, synthetic construct
  source 1..20: mol_type = other RNA
ggaaggtggctgagagctgc

SEQ ID NO: 13613 - RNA, 20 nt, synthetic construct
  source 1..20: mol_type = other RNA
ggaatcagatgggggccatc

SEQ ID NO: 13614 - RNA, 20 nt, synthetic construct
  source 1..20: mol_type = other RNA
ggacgagggtgtctcgcagc

SEQ ID NO: 13615 - RNA, 20 nt, synthetic construct
  source 1..20: mol_type = other RNA
ggacgctagctgatggcccc

SEQ ID NO: 13616 - RNA, 20 nt, synthetic construct
  source 1..20: mol_type = other RNA
ggacttcagctgggggaagg

SEQ ID NO: 13617 - RNA, 20 nt, synthetic construct
  source 1..20: mol_type = other RNA
ggatgcgctgagtgagaaca

SEQ ID NO: 13618 - RNA, 20 nt, synthetic construct
  source 1..20: mol_type = other RNA
ggcaggcccagctcactcac

SEQ ID NO: 13619 - RNA, 20 nt, synthetic construct
  source 1..20: mol_type = other RNA
ggcccagctcactcacttga

SEQ ID NO: 13620 - RNA, 20 nt, synthetic construct
  source 1..20: mol_type = other RNA
ggccccaggacgctagctga

SEQ ID NO: 13621 - RNA, 20 nt, synthetic construct
  source 1..20: mol_type = other RNA
ggcccccatctgattccacc

SEQ ID NO: 13622 - RNA, 20 nt, synthetic construct
  source 1..20: mol_type = other RNA
ggcccgattcagcaggaagg

SEQ ID NO: 13623 - RNA, 20 nt, synthetic construct
  source 1..20: mol_type = other RNA
ggcctgcccttcctgctgaa

SEQ ID NO: 13624 - RNA, 20 nt, synthetic construct
  source 1..20: mol_type = other RNA
ggctgagagctgcgagacac

SEQ ID NO: 13625 - RNA, 20 nt, synthetic construct
  source 1..20: mol_type = other RNA
ggctgcaggtggaatcagat

SEQ ID NO: 13626 - RNA, 20 nt, synthetic construct
  source 1..20: mol_type = other RNA
gggaaggtggctgagagctg

SEQ ID NO: 13627 - RNA, 20 nt, synthetic construct
  source 1..20: mol_type = other RNA
gggacgagggtgtctcgcag

SEQ ID NO: 13628 - RNA, 20 nt, synthetic construct
  source 1..20: mol_type = other RNA
gggcaggcccagctcactca

SEQ ID NO: 13629 - RNA, 20 nt, synthetic construct
  source 1..20: mol_type = other RNA
gggcccgattcagcaggaag

SEQ ID NO: 13630 - RNA, 20 nt, synthetic construct
  source 1..20: mol_type = other RNA
gggcctgcccttcctgctga

SEQ ID NO: 13631 - RNA, 20 nt, synthetic construct
  source 1..20: mol_type = other RNA
ggggaaggtggctgagagct

SEQ ID NO: 13632 - RNA, 20 nt, synthetic construct
  source 1..20: mol_type = other RNA
ggggacgagggtgtctcgca

SEQ ID NO: 13633 - RNA, 20 nt, synthetic construct
  source 1..20: mol_type = other RNA
ggggcccgattcagcaggaa

SEQ ID NO: 13634 - RNA, 20 nt, synthetic construct
  source 1..20: mol_type = other RNA
gggggaaggtggctgagagc

SEQ ID NO: 13635 - RNA, 20 nt, synthetic construct
  source 1..20: mol_type = other RNA
gggggccatcagctagcgtc

SEQ ID NO: 13636 - RNA, 20 nt, synthetic construct
  source 1..20: mol_type = other RNA
gggggcccgattcagcagga

SEQ ID NO: 13637 - RNA, 20 nt, synthetic construct
  source 1..20: mol_type = other RNA
gggtgtctcgcagctctcag

SEQ ID NO: 13638 - RNA, 20 nt, synthetic construct
  source 1..20: mol_type = other RNA
gggtttccaaggacttcagc

SEQ ID NO: 13639 - RNA, 20 nt, synthetic construct
  source 1..20: mol_type = other RNA
ggtggaatcagatgggggcc

SEQ ID NO: 13640 - RNA, 20 nt, synthetic construct
  source 1..20: mol_type = other RNA
ggtggctgagagctgcgaga

SEQ ID NO: 13641 - RNA, 20 nt, synthetic construct
  source 1..20: mol_type = other RNA
ggtgtctcgcagctctcagc

SEQ ID NO: 13642 - RNA, 20 nt, synthetic construct
  source 1..20: mol_type = other RNA
ggtttccaaggacttcagct

SEQ ID NO: 13643 - RNA, 20 nt, synthetic construct
  source 1..20: mol_type = other RNA
gtccccgatcttgttctcac

SEQ ID NO: 13644 - RNA, 20 nt, synthetic construct
  source 1..20: mol_type = other RNA
gtccttggaaaccctcaagt

SEQ ID NO: 13645 - RNA, 20 nt, synthetic construct
  source 1..20: mol_type = other RNA
gtctcgcagctctcagccac

SEQ ID NO: 13646 - RNA, 20 nt, synthetic construct
  source 1..20: mol_type = other RNA
gtgagaacaagatcggggac

SEQ ID NO: 13647 - RNA, 20 nt, synthetic construct
  source 1..20: mol_type = other RNA
gtgagctgggcctgcccttc

SEQ ID NO: 13648 - RNA, 20 nt, synthetic construct
  source 1..20: mol_type = other RNA
gtgagtgagctgggcctgcc

SEQ ID NO: 13649 - RNA, 20 nt, synthetic construct
  source 1..20: mol_type = other RNA
gtggaatcagatgggggcca

SEQ ID NO: 13650 - RNA, 20 nt, synthetic construct
  source 1..20: mol_type = other RNA
gtggctgagagctgcgagac

SEQ ID NO: 13651 - RNA, 20 nt, synthetic construct
  source 1..20: mol_type = other RNA
gtgtctcgcagctctcagcc

SEQ ID NO: 13652 - RNA, 20 nt, synthetic construct
  source 1..20: mol_type = other RNA
gttctcactcagcgcatcca

SEQ ID NO: 13653 - RNA, 20 nt, synthetic construct
  source 1..20: mol_type = other RNA
gtttccaaggacttcagctg

SEQ ID NO: 13654 - RNA, 20 nt, synthetic construct
  source 1..20: mol_type = other RNA
tagctgatggcccccatctg

SEQ ID NO: 13655 - RNA, 20 nt, synthetic construct
  source 1..20: mol_type = other RNA
tcaagtgagtgagctgggcc

SEQ ID NO: 13656 - RNA, 20 nt, synthetic construct
  source 1..20: mol_type = other RNA
tcactcacttgagggtttcc

SEQ ID NO: 13657 - RNA, 20 nt, synthetic construct
  source 1..20: mol_type = other RNA
tcactcagcgcatccaggct

SEQ ID NO: 13658 - RNA, 20 nt, synthetic construct
  source 1..20: mol_type = other RNA
tcacttgagggtttccaagg

SEQ ID NO: 13659 - RNA, 20 nt, synthetic construct
  source 1..20: mol_type = other RNA
tcagatgggggccatcagct

SEQ ID NO: 13660 - RNA, 20 nt, synthetic construct
  source 1..20: mol_type = other RNA
tcagcaggaagggcaggccc

SEQ ID NO: 13661 - RNA, 20 nt, synthetic construct
  source 1..20: mol_type = other RNA
tcagccaccttcccccagct

SEQ ID NO: 13662 - RNA, 20 nt, synthetic construct
  source 1..20: mol_type = other RNA
tcagcgcatccaggctgcag

SEQ ID NO: 13663 - RNA, 20 nt, synthetic construct
  source 1..20: mol_type = other RNA
tcagctgggggaaggtggct

SEQ ID NO: 13664 - RNA, 20 nt, synthetic construct
  source 1..20: mol_type = other RNA
tccaaggacttcagctgggg

SEQ ID NO: 13665 - RNA, 20 nt, synthetic construct
  source 1..20: mol_type = other RNA
tccacctgcagcctggatgc

SEQ ID NO: 13666 - RNA, 20 nt, synthetic construct
  source 1..20: mol_type = other RNA
tccaggctgcaggtggaatc

SEQ ID NO: 13667 - RNA, 20 nt, synthetic construct
  source 1..20: mol_type = other RNA
tcccccagctgaagtccttg

SEQ ID NO: 13668 - RNA, 20 nt, synthetic construct
  source 1..20: mol_type = other RNA
tccccgatcttgttctcact

SEQ ID NO: 13669 - RNA, 20 nt, synthetic construct
  source 1..20: mol_type = other RNA
tccttggaaaccctcaagtg

SEQ ID NO: 13670 - RNA, 20 nt, synthetic construct
  source 1..20: mol_type = other RNA
tcgcagctctcagccacctt

SEQ ID NO: 13671 - RNA, 20 nt, synthetic construct
  source 1..20: mol_type = other RNA
tcggggacgagggtgtctcg

SEQ ID NO: 13672 - RNA, 20 nt, synthetic construct
  source 1..20: mol_type = other RNA
tcgtccccgatcttgttctc

SEQ ID NO: 13673 - RNA, 20 nt, synthetic construct
  source 1..20: mol_type = other RNA
tctcactcagcgcatccagg

SEQ ID NO: 13674 - RNA, 20 nt, synthetic construct
  source 1..20: mol_type = other RNA
tctcagccaccttcccccag

SEQ ID NO: 13675 - RNA, 20 nt, synthetic construct
  source 1..20: mol_type = other RNA
tctcgcagctctcagccacc

SEQ ID NO: 13676 - RNA, 20 nt, synthetic construct
  source 1..20: mol_type = other RNA
tctgattccacctgcagcct

SEQ ID NO: 13677 - RNA, 20 nt, synthetic construct
  source 1..20: mol_type = other RNA
tcttgttctcactcagcgca

SEQ ID NO: 13678 - RNA, 20 nt, synthetic construct
  source 1..20: mol_type = other RNA
tgaagtccttggaaaccctc

SEQ ID NO: 13679 - RNA, 20 nt, synthetic construct
  source 1..20: mol_type = other RNA
tgagaacaagatcggggacg

SEQ ID NO: 13680 - RNA, 20 nt, synthetic construct
  source 1..20: mol_type = other RNA
tgagagctgcgagacaccct

SEQ ID NO: 13681 - RNA, 20 nt, synthetic construct
  source 1..20: mol_type = other RNA
tgagctgggcctgcccttcc

SEQ ID NO: 13682 - RNA, 20 nt, synthetic construct
  source 1..20: mol_type = other RNA
tgagggtttccaaggacttc

SEQ ID NO: 13683 - RNA, 20 nt, synthetic construct
  source 1..20: mol_type = other RNA
tgagtgagaacaagatcggg

SEQ ID NO: 13684 - RNA, 20 nt, synthetic construct
  source 1..20: mol_type = other RNA
tgagtgagctgggcctgccc

SEQ ID NO: 13685 - RNA, 20 nt, synthetic construct
  source 1..20: mol_type = other RNA
tgatggcccccatctgattc

SEQ ID NO: 13686 - RNA, 20 nt, synthetic construct
  source 1..20: mol_type = other RNA
tgattccacctgcagcctgg

SEQ ID NO: 13687 - RNA, 20 nt, synthetic construct
  source 1..20: mol_type = other RNA
tgcagcctggatgcgctgag

SEQ ID NO: 13688 - RNA, 20 nt, synthetic construct
  source 1..20: mol_type = other RNA
tgcaggtggaatcagatggg

SEQ ID NO: 13689 - RNA, 20 nt, synthetic construct
  source 1..20: mol_type = other RNA
tgcccttcctgctgaatcgg

SEQ ID NO: 13690 - RNA, 20 nt, synthetic construct
  source 1..20: mol_type = other RNA
tgcgagacaccctcgtcccc

SEQ ID NO: 13691 - RNA, 20 nt, synthetic construct
  source 1..20: mol_type = other RNA
tgcgctgagtgagaacaaga

SEQ ID NO: 13692 - RNA, 20 nt, synthetic construct
  source 1..20: mol_type = other RNA
tggaaaccctcaagtgagtg

SEQ ID NO: 13693 - RNA, 20 nt, synthetic construct
  source 1..20: mol_type = other RNA
tggaatcagatgggggccat

SEQ ID NO: 13694 - RNA, 20 nt, synthetic construct
  source 1..20: mol_type = other RNA
tggatgcgctgagtgagaac

SEQ ID NO: 13695 - RNA, 20 nt, synthetic construct
  source 1..20: mol_type = other RNA
tggcccccatctgattccac

SEQ ID NO: 13696 - RNA, 20 nt, synthetic construct
  source 1..20: mol_type = other RNA
tggctgagagctgcgagaca

SEQ ID NO: 13697 - RNA, 20 nt, synthetic construct
  source 1..20: mol_type = other RNA
tgggcctgcccttcctgctg

SEQ ID NO: 13698 - RNA, 20 nt, synthetic construct
  source 1..20: mol_type = other RNA
tgggggaaggtggctgagag

SEQ ID NO: 13699 - RNA, 20 nt, synthetic construct
  source 1..20: mol_type = other RNA
tgggggccatcagctagcgt

SEQ ID NO: 13700 - RNA, 20 nt, synthetic construct
  source 1..20: mol_type = other RNA
tgggggcccgattcagcagg

SEQ ID NO: 13701 - RNA, 20 nt, synthetic construct
  source 1..20: mol_type = other RNA
tgtctcgcagctctcagcca

SEQ ID NO: 13702 - RNA, 20 nt, synthetic construct
  source 1..20: mol_type = other RNA
tgttctcactcagcgcatcc

SEQ ID NO: 13703 - RNA, 20 nt, synthetic construct
  source 1..20: mol_type = other RNA
ttcagcaggaagggcaggcc

SEQ ID NO: 13704 - RNA, 20 nt, synthetic construct
  source 1..20: mol_type = other RNA
ttcagctgggggaaggtggc

SEQ ID NO: 13705 - RNA, 20 nt, synthetic construct
  source 1..20: mol_type = other RNA
ttccaaggacttcagctggg

SEQ ID NO: 13706 - RNA, 20 nt, synthetic construct
  source 1..20: mol_type = other RNA
ttccacctgcagcctggatg

SEQ ID NO: 13707 - RNA, 20 nt, synthetic construct
  source 1..20: mol_type = other RNA
ttcccccagctgaagtcctt

SEQ ID NO: 13708 - RNA, 20 nt, synthetic construct
  source 1..20: mol_type = other RNA
ttctcactcagcgcatccag

SEQ ID NO: 13709 - RNA, 20 nt, synthetic construct
  source 1..20: mol_type = other RNA
ttgagggtttccaaggactt

SEQ ID NO: 13710 - RNA, 20 nt, synthetic construct
  source 1..20: mol_type = other RNA
ttggaaaccctcaagtgagt

SEQ ID NO: 13711 - RNA, 20 nt, synthetic construct
  source 1..20: mol_type = other RNA
ttgggggcccgattcagcag

SEQ ID NO: 13712 - RNA, 20 nt, synthetic construct
  source 1..20: mol_type = other RNA
ttgttctcactcagcgcatc

SEQ ID NO: 13713 - RNA, 20 nt, synthetic construct
  source 1..20: mol_type = other RNA
tttccaaggacttcagctgg

SEQ ID NO: 13714 - RNA, 20 nt, synthetic construct
  source 1..20: mol_type = other RNA
tttgggggcccgattcagca

SEQ ID NO: 13715 - RNA, 21 nt, synthetic construct
  source 1..21: mol_type = other RNA
aaaccctcaagtgagtgagct

SEQ ID NO: 13716 - RNA, 21 nt, synthetic construct
  source 1..21: mol_type = other RNA
aacaagatcggggacgagggt

SEQ ID NO: 13717 - RNA, 21 nt, synthetic construct
  source 1..21: mol_type = other RNA
aaccctcaagtgagtgagctg

SEQ ID NO: 13718 - RNA, 21 nt, synthetic construct
  source 1..21: mol_type = other RNA
aagatcggggacgagggtgtc

SEQ ID NO: 13719 - RNA, 21 nt, synthetic construct
  source 1..21: mol_type = other RNA
aaggacttcagctgggggaag

SEQ ID NO: 13720 - RNA, 21 nt, synthetic construct
  source 1..21: mol_type = other RNA
aagggcaggcccagctcactc

SEQ ID NO: 13721 - RNA, 21 nt, synthetic construct
  source 1..21: mol_type = other RNA
aaggtggctgagagctgcgag

SEQ ID NO: 13722 - RNA, 21 nt, synthetic construct
  source 1..21: mol_type = other RNA
aagtccttggaaaccctcaag

SEQ ID NO: 13723 - RNA, 21 nt, synthetic construct
  source 1..21: mol_type = other RNA
aagtgagtgagctgggcctgc

SEQ ID NO: 13724 - RNA, 21 nt, synthetic construct
  source 1..21: mol_type = other RNA
aatcagatgggggccatcagc

SEQ ID NO: 13725 - RNA, 21 nt, synthetic construct
  source 1..21: mol_type = other RNA
acaagatcggggacgagggtg

SEQ ID NO: 13726 - RNA, 21 nt, synthetic construct
  source 1..21: mol_type = other RNA
acaccctcgtccccgatcttg

SEQ ID NO: 13727 - RNA, 21 nt, synthetic construct
  source 1..21: mol_type = other RNA
accctcaagtgagtgagctgg

SEQ ID NO: 13728 - RNA, 21 nt, synthetic construct
  source 1..21: mol_type = other RNA
accctcgtccccgatcttgtt

SEQ ID NO: 13729 - RNA, 21 nt, synthetic construct
  source 1..21: mol_type = other RNA
acctgcagcctggatgcgctg

SEQ ID NO: 13730 - RNA, 21 nt, synthetic construct
  source 1..21: mol_type = other RNA
accttcccccagctgaagtcc

SEQ ID NO: 13731 - RNA, 21 nt, synthetic construct
  source 1..21: mol_type = other RNA
acgagggtgtctcgcagctct

SEQ ID NO: 13732 - RNA, 21 nt, synthetic construct
  source 1..21: mol_type = other RNA
acgctagctgatggcccccat

SEQ ID NO: 13733 - RNA, 21 nt, synthetic construct
  source 1..21: mol_type = other RNA
actcacttgagggtttccaag

SEQ ID NO: 13734 - RNA, 21 nt, synthetic construct
  source 1..21: mol_type = other RNA
actcagcgcatccaggctgca

SEQ ID NO: 13735 - RNA, 21 nt, synthetic construct
  source 1..21: mol_type = other RNA
acttcagctgggggaaggtgg

SEQ ID NO: 13736 - RNA, 21 nt, synthetic construct
  source 1..21: mol_type = other RNA
acttgagggtttccaaggact

SEQ ID NO: 13737 - RNA, 21 nt, synthetic construct
  source 1..21: mol_type = other RNA
agaacaagatcggggacgagg

SEQ ID NO: 13738 - RNA, 21 nt, synthetic construct
  source 1..21: mol_type = other RNA
agacaccctcgtccccgatct

SEQ ID NO: 13739 - RNA, 21 nt, synthetic construct
  source 1..21: mol_type = other RNA
agagctgcgagacaccctcgt

SEQ ID NO: 13740 - RNA, 21 nt, synthetic construct
  source 1..21: mol_type = other RNA
agatcggggacgagggtgtct

SEQ ID NO: 13741 - RNA, 21 nt, synthetic construct
  source 1..21: mol_type = other RNA
agatgggggccatcagctagc

SEQ ID NO: 13742 - RNA, 21 nt, synthetic construct
  source 1..21: mol_type = other RNA
agcaggaagggcaggcccagc

SEQ ID NO: 13743 - RNA, 21 nt, synthetic construct
  source 1..21: mol_type = other RNA
agccaccttcccccagctgaa

SEQ ID NO: 13744 - RNA, 21 nt, synthetic construct
  source 1..21: mol_type = other RNA
agcctggatgcgctgagtgag

SEQ ID NO: 13745 - RNA, 21 nt, synthetic construct
  source 1..21: mol_type = other RNA
agcgcatccaggctgcaggtg

SEQ ID NO: 13746 - RNA, 21 nt, synthetic construct
  source 1..21: mol_type = other RNA
agctcactcacttgagggttt

SEQ ID NO: 13747 - RNA, 21 nt, synthetic construct
  source 1..21: mol_type = other RNA
agctctcagccaccttccccc

SEQ ID NO: 13748 - RNA, 21 nt, synthetic construct
  source 1..21: mol_type = other RNA
agctgaagtccttggaaaccc

SEQ ID NO: 13749 - RNA, 21 nt, synthetic construct
  source 1..21: mol_type = other RNA
agctgatggcccccatctgat

SEQ ID NO: 13750 - RNA, 21 nt, synthetic construct
  source 1..21: mol_type = other RNA
agctgcgagacaccctcgtcc

SEQ ID NO: 13751 - RNA, 21 nt, synthetic construct
  source 1..21: mol_type = other RNA
agctgggcctgcccttcctgc

SEQ ID NO: 13752 - RNA, 21 nt, synthetic construct
  source 1..21: mol_type = other RNA
agctgggggaaggtggctgag

SEQ ID NO: 13753 - RNA, 21 nt, synthetic construct
  source 1..21: mol_type = other RNA
aggaagggcaggcccagctca

SEQ ID NO: 13754 - RNA, 21 nt, synthetic construct
  source 1..21: mol_type = other RNA
aggacgctagctgatggcccc

SEQ ID NO: 13755 - RNA, 21 nt, synthetic construct
  source 1..21: mol_type = other RNA
aggacttcagctgggggaagg

SEQ ID NO: 13756 - RNA, 21 nt, synthetic construct
  source 1..21: mol_type = other RNA
aggcccagctcactcacttga

SEQ ID NO: 13757 - RNA, 21 nt, synthetic construct
  source 1..21: mol_type = other RNA
aggctgcaggtggaatcagat

SEQ ID NO: 13758 - RNA, 21 nt, synthetic construct
  source 1..21: mol_type = other RNA
agggcaggcccagctcactca

SEQ ID NO: 13759 - RNA, 21 nt, synthetic construct
  source 1..21: mol_type = other RNA
agggtgtctcgcagctctcag

SEQ ID NO: 13760 - RNA, 21 nt, synthetic construct
  source 1..21: mol_type = other RNA
agggtttccaaggacttcagc

SEQ ID NO: 13761 - RNA, 21 nt, synthetic construct
  source 1..21: mol_type = other RNA
aggtggaatcagatgggggcc

SEQ ID NO: 13762 - RNA, 21 nt, synthetic construct
  source 1..21: mol_type = other RNA
aggtggctgagagctgcgaga

SEQ ID NO: 13763 - RNA, 21 nt, synthetic construct
  source 1..21: mol_type = other RNA
agtccttggaaaccctcaagt

SEQ ID NO: 13764 - RNA, 21 nt, synthetic construct
  source 1..21: mol_type = other RNA
agtgagaacaagatcggggac

SEQ ID NO: 13765 - RNA, 21 nt, synthetic construct
  source 1..21: mol_type = other RNA
agtgagctgggcctgcccttc

SEQ ID NO: 13766 - RNA, 21 nt, synthetic construct
  source 1..21: mol_type = other RNA
agtgagtgagctgggcctgcc

SEQ ID NO: 13767 - RNA, 21 nt, synthetic construct
  source 1..21: mol_type = other RNA
atcagatgggggccatcagct

SEQ ID NO: 13768 - RNA, 21 nt, synthetic construct
  source 1..21: mol_type = other RNA
atccaggctgcaggtggaatc

SEQ ID NO: 13769 - RNA, 21 nt, synthetic construct
  source 1..21: mol_type = other RNA
atcggggacgagggtgtctcg

SEQ ID NO: 13770 - RNA, 21 nt, synthetic construct
  source 1..21: mol_type = other RNA
atctgattccacctgcagcct

SEQ ID NO: 13771 - RNA, 21 nt, synthetic construct
  source 1..21: mol_type = other RNA
atcttgttctcactcagcgca

SEQ ID NO: 13772 - RNA, 21 nt, synthetic construct
  source 1..21: mol_type = other RNA
atgcgctgagtgagaacaaga

SEQ ID NO: 13773 - RNA, 21 nt, synthetic construct
  source 1..21: mol_type = other RNA
atggcccccatctgattccac

SEQ ID NO: 13774 - RNA, 21 nt, synthetic construct
  source 1..21: mol_type = other RNA
atgggggccatcagctagcgt

SEQ ID NO: 13775 - RNA, 21 nt, synthetic construct
  source 1..21: mol_type = other RNA
attcagcaggaagggcaggcc

SEQ ID NO: 13776 - RNA, 21 nt, synthetic construct
  source 1..21: mol_type = other RNA
attccacctgcagcctggatg

SEQ ID NO: 13777 - RNA, 21 nt, synthetic construct
  source 1..21: mol_type = other RNA
caagatcggggacgagggtgt

SEQ ID NO: 13778 - RNA, 21 nt, synthetic construct
  source 1..21: mol_type = other RNA
caaggacttcagctgggggaa

SEQ ID NO: 13779 - RNA, 21 nt, synthetic construct
  source 1..21: mol_type = other RNA
caagtgagtgagctgggcctg

SEQ ID NO: 13780 - RNA, 21 nt, synthetic construct
  source 1..21: mol_type = other RNA
caccctcgtccccgatcttgt

SEQ ID NO: 13781 - RNA, 21 nt, synthetic construct
  source 1..21: mol_type = other RNA
cacctgcagcctggatgcgct

SEQ ID NO: 13782 - RNA, 21 nt, synthetic construct
  source 1..21: mol_type = other RNA
caccttcccccagctgaagtc

SEQ ID NO: 13783 - RNA, 21 nt, synthetic construct
  source 1..21: mol_type = other RNA
cactcacttgagggtttccaa

SEQ ID NO: 13784 - RNA, 21 nt, synthetic construct
  source 1..21: mol_type = other RNA
cactcagcgcatccaggctgc

SEQ ID NO: 13785 - RNA, 21 nt, synthetic construct
  source 1..21: mol_type = other RNA
cacttgagggtttccaaggac

SEQ ID NO: 13786 - RNA, 21 nt, synthetic construct
  source 1..21: mol_type = other RNA
cagatgggggccatcagctag

SEQ ID NO: 13787 - RNA, 21 nt, synthetic construct
  source 1..21: mol_type = other RNA
cagcaggaagggcaggcccag

SEQ ID NO: 13788 - RNA, 21 nt, synthetic construct
  source 1..21: mol_type = other RNA
cagccaccttcccccagctga

SEQ ID NO: 13789 - RNA, 21 nt, synthetic construct
  source 1..21: mol_type = other RNA
cagcctggatgcgctgagtga

SEQ ID NO: 13790 - RNA, 21 nt, synthetic construct
  source 1..21: mol_type = other RNA
cagcgcatccaggctgcaggt

SEQ ID NO: 13791 - RNA, 21 nt, synthetic construct
  source 1..21: mol_type = other RNA
cagctcactcacttgagggtt

SEQ ID NO: 13792 - RNA, 21 nt, synthetic construct
  source 1..21: mol_type = other RNA
cagctctcagccaccttcccc

SEQ ID NO: 13793 - RNA, 21 nt, synthetic construct
  source 1..21: mol_type = other RNA
cagctgaagtccttggaaacc

SEQ ID NO: 13794 - RNA, 21 nt, synthetic construct
  source 1..21: mol_type = other RNA
cagctgggggaaggtggctga

SEQ ID NO: 13795 - RNA, 21 nt, synthetic construct
  source 1..21: mol_type = other RNA
caggaagggcaggcccagctc

SEQ ID NO: 13796 - RNA, 21 nt, synthetic construct
  source 1..21: mol_type = other RNA
caggacgctagctgatggccc

SEQ ID NO: 13797 - RNA, 21 nt, synthetic construct
  source 1..21: mol_type = other RNA
caggcccagctcactcacttg

SEQ ID NO: 13798 - RNA, 21 nt, synthetic construct
  source 1..21: mol_type = other RNA
caggctgcaggtggaatcaga

SEQ ID NO: 13799 - RNA, 21 nt, synthetic construct
  source 1..21: mol_type = other RNA
caggtggaatcagatgggggc

SEQ ID NO: 13800 - RNA, 21 nt, synthetic construct
  source 1..21: mol_type = other RNA
catccaggctgcaggtggaat

SEQ ID NO: 13801 - RNA, 21 nt, synthetic construct
  source 1..21: mol_type = other RNA
catctgattccacctgcagcc

SEQ ID NO: 13802 - RNA, 21 nt, synthetic construct
  source 1..21: mol_type = other RNA
ccaaggacttcagctggggga

SEQ ID NO: 13803 - RNA, 21 nt, synthetic construct
  source 1..21: mol_type = other RNA
ccacctgcagcctggatgcgc

SEQ ID NO: 13804 - RNA, 21 nt, synthetic construct
  source 1..21: mol_type = other RNA
ccaccttcccccagctgaagt

SEQ ID NO: 13805 - RNA, 21 nt, synthetic construct
  source 1..21: mol_type = other RNA
ccagctcactcacttgagggt

SEQ ID NO: 13806 - RNA, 21 nt, synthetic construct
  source 1..21: mol_type = other RNA
ccagctgaagtccttggaaac

SEQ ID NO: 13807 - RNA, 21 nt, synthetic construct
  source 1..21: mol_type = other RNA
ccaggacgctagctgatggcc

SEQ ID NO: 13808 - RNA, 21 nt, synthetic construct
  source 1..21: mol_type = other RNA
ccaggctgcaggtggaatcag

SEQ ID NO: 13809 - RNA, 21 nt, synthetic construct
  source 1..21: mol_type = other RNA
ccatctgattccacctgcagc

SEQ ID NO: 13810 - RNA, 21 nt, synthetic construct
  source 1..21: mol_type = other RNA
cccagctcactcacttgaggg

SEQ ID NO: 13811 - RNA, 21 nt, synthetic construct
  source 1..21: mol_type = other RNA
cccagctgaagtccttggaaa

SEQ ID NO: 13812 - RNA, 21 nt, synthetic construct
  source 1..21: mol_type = other RNA
cccaggacgctagctgatggc

SEQ ID NO: 13813 - RNA, 21 nt, synthetic construct
  source 1..21: mol_type = other RNA
cccatctgattccacctgcag

SEQ ID NO: 13814 - RNA, 21 nt, synthetic construct
  source 1..21: mol_type = other RNA
ccccagctgaagtccttggaa

SEQ ID NO: 13815 - RNA, 21 nt, synthetic construct
  source 1..21: mol_type = other RNA
ccccaggacgctagctgatgg

SEQ ID NO: 13816 - RNA, 21 nt, synthetic construct
  source 1..21: mol_type = other RNA
ccccatctgattccacctgca

SEQ ID NO: 13817 - RNA, 21 nt, synthetic construct
  source 1..21: mol_type = other RNA
cccccagctgaagtccttgga

SEQ ID NO: 13818 - RNA, 21 nt, synthetic construct
  source 1..21: mol_type = other RNA
cccccatctgattccacctgc

SEQ ID NO: 13819 - RNA, 21 nt, synthetic construct
  source 1..21: mol_type = other RNA
ccccgatcttgttctcactca

SEQ ID NO: 13820 - RNA, 21 nt, synthetic construct
  source 1..21: mol_type = other RNA
cccgatcttgttctcactcag

SEQ ID NO: 13821 - RNA, 21 nt, synthetic construct
  source 1..21: mol_type = other RNA
cccgattcagcaggaagggca

SEQ ID NO: 13822 - RNA, 21 nt, synthetic construct
  source 1..21: mol_type = other RNA
ccctcaagtgagtgagctggg

SEQ ID NO: 13823 - RNA, 21 nt, synthetic construct
  source 1..21: mol_type = other RNA
ccctcgtccccgatcttgttc

SEQ ID NO: 13824 - RNA, 21 nt, synthetic construct
  source 1..21: mol_type = other RNA
ccgatcttgttctcactcagc

SEQ ID NO: 13825 - RNA, 21 nt, synthetic construct
  source 1..21: mol_type = other RNA
ccgattcagcaggaagggcag

SEQ ID NO: 13826 - RNA, 21 nt, synthetic construct
  source 1..21: mol_type = other RNA
cctcaagtgagtgagctgggc

SEQ ID NO: 13827 - RNA, 21 nt, synthetic construct
  source 1..21: mol_type = other RNA
cctcgtccccgatcttgttct

SEQ ID NO: 13828 - RNA, 21 nt, synthetic construct
  source 1..21: mol_type = other RNA
cctgcagcctggatgcgctga

SEQ ID NO: 13829 - RNA, 21 nt, synthetic construct
  source 1..21: mol_type = other RNA
cctgcccttcctgctgaatcg

SEQ ID NO: 13830 - RNA, 21 nt, synthetic construct
  source 1..21: mol_type = other RNA
cctggatgcgctgagtgagaa

SEQ ID NO: 13831 - RNA, 21 nt, synthetic construct
  source 1..21: mol_type = other RNA
ccttcccccagctgaagtcct

SEQ ID NO: 13832 - RNA, 21 nt, synthetic construct
  source 1..21: mol_type = other RNA
ccttggaaaccctcaagtgag

SEQ ID NO: 13833 - RNA, 21 nt, synthetic construct
  source 1..21: mol_type = other RNA
cgagacaccctcgtccccgat

SEQ ID NO: 13834 - RNA, 21 nt, synthetic construct
  source 1..21: mol_type = other RNA
cgagggtgtctcgcagctctc

SEQ ID NO: 13835 - RNA, 21 nt, synthetic construct
  source 1..21: mol_type = other RNA
cgatcttgttctcactcagcg

SEQ ID NO: 13836 - RNA, 21 nt, synthetic construct
  source 1..21: mol_type = other RNA
cgattcagcaggaagggcagg

SEQ ID NO: 13837 - RNA, 21 nt, synthetic construct
  source 1..21: mol_type = other RNA
cgcagctctcagccaccttcc

SEQ ID NO: 13838 - RNA, 21 nt, synthetic construct
  source 1..21: mol_type = other RNA
cgcatccaggctgcaggtgga

SEQ ID NO: 13839 - RNA, 21 nt, synthetic construct
  source 1..21: mol_type = other RNA
cgctagctgatggcccccatc

SEQ ID NO: 13840 - RNA, 21 nt, synthetic construct
  source 1..21: mol_type = other RNA
cgctgagtgagaacaagatcg

SEQ ID NO: 13841 - RNA, 21 nt, synthetic construct
  source 1..21: mol_type = other RNA
cggggacgagggtgtctcgca

SEQ ID NO: 13842 - RNA, 21 nt, synthetic construct
  source 1..21: mol_type = other RNA
cgtccccgatcttgttctcac

SEQ ID NO: 13843 - RNA, 21 nt, synthetic construct
  source 1..21: mol_type = other RNA
ctagctgatggcccccatctg

SEQ ID NO: 13844 - RNA, 21 nt, synthetic construct
  source 1..21: mol_type = other RNA
ctcaagtgagtgagctgggcc

SEQ ID NO: 13845 - RNA, 21 nt, synthetic construct
  source 1..21: mol_type = other RNA
ctcactcacttgagggtttcc

SEQ ID NO: 13846 - RNA, 21 nt, synthetic construct
  source 1..21: mol_type = other RNA
ctcactcagcgcatccaggct

SEQ ID NO: 13847 - RNA, 21 nt, synthetic construct
  source 1..21: mol_type = other RNA
ctcacttgagggtttccaagg

SEQ ID NO: 13848 - RNA, 21 nt, synthetic construct
  source 1..21: mol_type = other RNA
ctcagccaccttcccccagct

SEQ ID NO: 13849 - RNA, 21 nt, synthetic construct
  source 1..21: mol_type = other RNA
ctcagcgcatccaggctgcag

SEQ ID NO: 13850 - RNA, 21 nt, synthetic construct
  source 1..21: mol_type = other RNA
ctcgcagctctcagccacctt

SEQ ID NO: 13851 - RNA, 21 nt, synthetic construct
  source 1..21: mol_type = other RNA
ctcgtccccgatcttgttctc

SEQ ID NO: 13852 - RNA, 21 nt, synthetic construct
  source 1..21: mol_type = other RNA
ctctcagccaccttcccccag

SEQ ID NO: 13853 - RNA, 21 nt, synthetic construct
  source 1..21: mol_type = other RNA
ctgaagtccttggaaaccctc

SEQ ID NO: 13854 - RNA, 21 nt, synthetic construct
  source 1..21: mol_type = other RNA
ctgagagctgcgagacaccct

SEQ ID NO: 13855 - RNA, 21 nt, synthetic construct
  source 1..21: mol_type = other RNA
ctgagtgagaacaagatcggg

SEQ ID NO: 13856 - RNA, 21 nt, synthetic construct
  source 1..21: mol_type = other RNA
ctgatggcccccatctgattc

SEQ ID NO: 13857 - RNA, 21 nt, synthetic construct
  source 1..21: mol_type = other RNA
ctgattccacctgcagcctgg

SEQ ID NO: 13858 - RNA, 21 nt, synthetic construct
  source 1..21: mol_type = other RNA
ctgcagcctggatgcgctgag

SEQ ID NO: 13859 - RNA, 21 nt, synthetic construct
  source 1..21: mol_type = other RNA
ctgcaggtggaatcagatggg

SEQ ID NO: 13860 - RNA, 21 nt, synthetic construct
  source 1..21: mol_type = other RNA
ctgcccttcctgctgaatcgg

SEQ ID NO: 13861 - RNA, 21 nt, synthetic construct
  source 1..21: mol_type = other RNA
ctgcgagacaccctcgtcccc

SEQ ID NO: 13862 - RNA, 21 nt, synthetic construct
  source 1..21: mol_type = other RNA
ctggatgcgctgagtgagaac

SEQ ID NO: 13863 - RNA, 21 nt, synthetic construct
  source 1..21: mol_type = other RNA
ctgggcctgcccttcctgctg

SEQ ID NO: 13864 - RNA, 21 nt, synthetic construct
  source 1..21: mol_type = other RNA
ctgggggaaggtggctgagag

SEQ ID NO: 13865 - RNA, 21 nt, synthetic construct
  source 1..21: mol_type = other RNA
cttcagctgggggaaggtggc

SEQ ID NO: 13866 - RNA, 21 nt, synthetic construct
  source 1..21: mol_type = other RNA
cttcccccagctgaagtcctt

SEQ ID NO: 13867 - RNA, 21 nt, synthetic construct
  source 1..21: mol_type = other RNA
cttgagggtttccaaggactt

SEQ ID NO: 13868 - RNA, 21 nt, synthetic construct
  source 1..21: mol_type = other RNA
cttggaaaccctcaagtgagt

SEQ ID NO: 13869 - RNA, 21 nt, synthetic construct
  source 1..21: mol_type = other RNA
cttgttctcactcagcgcatc

SEQ ID NO: 13870 - RNA, 21 nt, synthetic construct
  source 1..21: mol_type = other RNA
gaaaccctcaagtgagtgagc

SEQ ID NO: 13871 - RNA, 21 nt, synthetic construct
  source 1..21: mol_type = other RNA
gaacaagatcggggacgaggg

SEQ ID NO: 13872 - RNA, 21 nt, synthetic construct
  source 1..21: mol_type = other RNA
gaagggcaggcccagctcact

SEQ ID NO: 13873 - RNA, 21 nt, synthetic construct
  source 1..21: mol_type = other RNA
gaaggtggctgagagctgcga

SEQ ID NO: 13874 - RNA, 21 nt, synthetic construct
  source 1..21: mol_type = other RNA
gaagtccttggaaaccctcaa

SEQ ID NO: 13875 - RNA, 21 nt, synthetic construct
  source 1..21: mol_type = other RNA
gaatcagatgggggccatcag

SEQ ID NO: 13876 - RNA, 21 nt, synthetic construct
  source 1..21: mol_type = other RNA
gacaccctcgtccccgatctt

SEQ ID NO: 13877 - RNA, 21 nt, synthetic construct
  source 1..21: mol_type = other RNA
gacgagggtgtctcgcagctc

SEQ ID NO: 13878 - RNA, 21 nt, synthetic construct
  source 1..21: mol_type = other RNA
gacgctagctgatggccccca

SEQ ID NO: 13879 - RNA, 21 nt, synthetic construct
  source 1..21: mol_type = other RNA
gacttcagctgggggaaggtg

SEQ ID NO: 13880 - RNA, 21 nt, synthetic construct
  source 1..21: mol_type = other RNA
gagaacaagatcggggacgag

SEQ ID NO: 13881 - RNA, 21 nt, synthetic construct
  source 1..21: mol_type = other RNA
gagacaccctcgtccccgatc

SEQ ID NO: 13882 - RNA, 21 nt, synthetic construct
  source 1..21: mol_type = other RNA
gagagctgcgagacaccctcg

SEQ ID NO: 13883 - RNA, 21 nt, synthetic construct
  source 1..21: mol_type = other RNA
gagctgcgagacaccctcgtc

SEQ ID NO: 13884 - RNA, 21 nt, synthetic construct
  source 1..21: mol_type = other RNA
gagctgggcctgcccttcctg

SEQ ID NO: 13885 - RNA, 21 nt, synthetic construct
  source 1..21: mol_type = other RNA
gagggtgtctcgcagctctca

SEQ ID NO: 13886 - RNA, 21 nt, synthetic construct
  source 1..21: mol_type = other RNA
gagggtttccaaggacttcag

SEQ ID NO: 13887 - RNA, 21 nt, synthetic construct
  source 1..21: mol_type = other RNA
gagtgagaacaagatcgggga

SEQ ID NO: 13888 - RNA, 21 nt, synthetic construct
  source 1..21: mol_type = other RNA
gagtgagctgggcctgccctt

SEQ ID NO: 13889 - RNA, 21 nt, synthetic construct
  source 1..21: mol_type = other RNA
gatcggggacgagggtgtctc

SEQ ID NO: 13890 - RNA, 21 nt, synthetic construct
  source 1..21: mol_type = other RNA
gatcttgttctcactcagcgc

SEQ ID NO: 13891 - RNA, 21 nt, synthetic construct
  source 1..21: mol_type = other RNA
gatgcgctgagtgagaacaag

SEQ ID NO: 13892 - RNA, 21 nt, synthetic construct
  source 1..21: mol_type = other RNA
gatggcccccatctgattcca

SEQ ID NO: 13893 - RNA, 21 nt, synthetic construct
  source 1..21: mol_type = other RNA
gatgggggccatcagctagcg

SEQ ID NO: 13894 - RNA, 21 nt, synthetic construct
  source 1..21: mol_type = other RNA
gattcagcaggaagggcaggc

SEQ ID NO: 13895 - RNA, 21 nt, synthetic construct
  source 1..21: mol_type = other RNA
gattccacctgcagcctggat

SEQ ID NO: 13896 - RNA, 21 nt, synthetic construct
  source 1..21: mol_type = other RNA
gcagcctggatgcgctgagtg

SEQ ID NO: 13897 - RNA, 21 nt, synthetic construct
  source 1..21: mol_type = other RNA
gcagctctcagccaccttccc

SEQ ID NO: 13898 - RNA, 21 nt, synthetic construct
  source 1..21: mol_type = other RNA
gcaggaagggcaggcccagct

SEQ ID NO: 13899 - RNA, 21 nt, synthetic construct
  source 1..21: mol_type = other RNA
gcaggcccagctcactcactt

SEQ ID NO: 13900 - RNA, 21 nt, synthetic construct
  source 1..21: mol_type = other RNA
gcaggtggaatcagatggggg

SEQ ID NO: 13901 - RNA, 21 nt, synthetic construct
  source 1..21: mol_type = other RNA
gcatccaggctgcaggtggaa

SEQ ID NO: 13902 - RNA, 21 nt, synthetic construct
  source 1..21: mol_type = other RNA
gccaccttcccccagctgaag

SEQ ID NO: 13903 - RNA, 21 nt, synthetic construct
  source 1..21: mol_type = other RNA
gcccagctcactcacttgagg

SEQ ID NO: 13904 - RNA, 21 nt, synthetic construct
  source 1..21: mol_type = other RNA
gccccaggacgctagctgatg

SEQ ID NO: 13905 - RNA, 21 nt, synthetic construct
  source 1..21: mol_type = other RNA
gcccccatctgattccacctg

SEQ ID NO: 13906 - RNA, 21 nt, synthetic construct
  source 1..21: mol_type = other RNA
gcccgattcagcaggaagggc

SEQ ID NO: 13907 - RNA, 21 nt, synthetic construct
  source 1..21: mol_type = other RNA
gcctgcccttcctgctgaatc

SEQ ID NO: 13908 - RNA, 21 nt, synthetic construct
  source 1..21: mol_type = other RNA
gcctggatgcgctgagtgaga

SEQ ID NO: 13909 - RNA, 21 nt, synthetic construct
  source 1..21: mol_type = other RNA
gcgagacaccctcgtccccga

SEQ ID NO: 13910 - RNA, 21 nt, synthetic construct
  source 1..21: mol_type = other RNA
gcgcatccaggctgcaggtgg

SEQ ID NO: 13911 - RNA, 21 nt, synthetic construct
  source 1..21: mol_type = other RNA
gcgctgagtgagaacaagatc

SEQ ID NO: 13912 - RNA, 21 nt, synthetic construct
  source 1..21: mol_type = other RNA
gctagctgatggcccccatct

SEQ ID NO: 13913 - RNA, 21 nt, synthetic construct
  source 1..21: mol_type = other RNA
gctcactcacttgagggtttc

SEQ ID NO: 13914 - RNA, 21 nt, synthetic construct
  source 1..21: mol_type = other RNA
gctctcagccaccttccccca

SEQ ID NO: 13915 - RNA, 21 nt, synthetic construct
  source 1..21: mol_type = other RNA
gctgaagtccttggaaaccct

SEQ ID NO: 13916 - RNA, 21 nt, synthetic construct
  source 1..21: mol_type = other RNA
gctgagagctgcgagacaccc

SEQ ID NO: 13917 - RNA, 21 nt, synthetic construct
  source 1..21: mol_type = other RNA
gctgagtgagaacaagatcgg

SEQ ID NO: 13918 - RNA, 21 nt, synthetic construct
  source 1..21: mol_type = other RNA
gctgatggcccccatctgatt

SEQ ID NO: 13919 - RNA, 21 nt, synthetic construct
  source 1..21: mol_type = other RNA
gctgcaggtggaatcagatgg

SEQ ID NO: 13920 - RNA, 21 nt, synthetic construct
  source 1..21: mol_type = other RNA
gctgcgagacaccctcgtccc

SEQ ID NO: 13921 - RNA, 21 nt, synthetic construct
  source 1..21: mol_type = other RNA
gctgggcctgcccttcctgct

SEQ ID NO: 13922 - RNA, 21 nt, synthetic construct
  source 1..21: mol_type = other RNA
gctgggggaaggtggctgaga

SEQ ID NO: 13923 - RNA, 21 nt, synthetic construct
  source 1..21: mol_type = other RNA
ggaaaccctcaagtgagtgag

SEQ ID NO: 13924 - RNA, 21 nt, synthetic construct
  source 1..21: mol_type = other RNA
ggaagggcaggcccagctcac

SEQ ID NO: 13925 - RNA, 21 nt, synthetic construct
  source 1..21: mol_type = other RNA
ggaaggtggctgagagctgcg

SEQ ID NO: 13926 - RNA, 21 nt, synthetic construct
  source 1..21: mol_type = other RNA
ggaatcagatgggggccatca

SEQ ID NO: 13927 - RNA, 21 nt, synthetic construct
  source 1..21: mol_type = other RNA
ggacgagggtgtctcgcagct

SEQ ID NO: 13928 - RNA, 21 nt, synthetic construct
  source 1..21: mol_type = other RNA
ggacgctagctgatggccccc

SEQ ID NO: 13929 - RNA, 21 nt, synthetic construct
  source 1..21: mol_type = other RNA
ggacttcagctgggggaaggt

SEQ ID NO: 13930 - RNA, 21 nt, synthetic construct
  source 1..21: mol_type = other RNA
ggatgcgctgagtgagaacaa

SEQ ID NO: 13931 - RNA, 21 nt, synthetic construct
  source 1..21: mol_type = other RNA
ggcaggcccagctcactcact

SEQ ID NO: 13932 - RNA, 21 nt, synthetic construct
  source 1..21: mol_type = other RNA
ggcccagctcactcacttgag

SEQ ID NO: 13933 - RNA, 21 nt, synthetic construct
  source 1..21: mol_type = other RNA
ggccccaggacgctagctgat

SEQ ID NO: 13934 - RNA, 21 nt, synthetic construct
  source 1..21: mol_type = other RNA
ggcccccatctgattccacct

SEQ ID NO: 13935 - RNA, 21 nt, synthetic construct
  source 1..21: mol_type = other RNA
ggcccgattcagcaggaaggg

SEQ ID NO: 13936 - RNA, 21 nt, synthetic construct
  source 1..21: mol_type = other RNA
ggcctgcccttcctgctgaat

SEQ ID NO: 13937 - RNA, 21 nt, synthetic construct
  source 1..21: mol_type = other RNA
ggctgagagctgcgagacacc

SEQ ID NO: 13938 - RNA, 21 nt, synthetic construct
  source 1..21: mol_type = other RNA
ggctgcaggtggaatcagatg

SEQ ID NO: 13939 - RNA, 21 nt, synthetic construct
  source 1..21: mol_type = other RNA
gggaaggtggctgagagctgc

SEQ ID NO: 13940 - RNA, 21 nt, synthetic construct
  source 1..21: mol_type = other RNA
gggacgagggtgtctcgcagc

SEQ ID NO: 13941 - RNA, 21 nt, synthetic construct
  source 1..21: mol_type = other RNA
gggcaggcccagctcactcac

SEQ ID NO: 13942 - RNA, 21 nt, synthetic construct
  source 1..21: mol_type = other RNA
gggcccgattcagcaggaagg

SEQ ID NO: 13943 - RNA, 21 nt, synthetic construct
  source 1..21: mol_type = other RNA
gggcctgcccttcctgctgaa

SEQ ID NO: 13944 - RNA, 21 nt, synthetic construct
  source 1..21: mol_type = other RNA
ggggaaggtggctgagagctg

SEQ ID NO: 13945 - RNA, 21 nt, synthetic construct
  source 1..21: mol_type = other RNA
ggggacgagggtgtctcgcag

SEQ ID NO: 13946 - RNA, 21 nt, synthetic construct
  source 1..21: mol_type = other RNA
ggggcccgattcagcaggaag

SEQ ID NO: 13947 - RNA, 21 nt, synthetic construct
  source 1..21: mol_type = other RNA
gggggaaggtggctgagagct

SEQ ID NO: 13948 - RNA, 21 nt, synthetic construct
  source 1..21: mol_type = other RNA
gggggcccgattcagcaggaa

SEQ ID NO: 13949 - RNA, 21 nt, synthetic construct
  source 1..21: mol_type = other RNA
gggtgtctcgcagctctcagc

SEQ ID NO: 13950 - RNA, 21 nt, synthetic construct
  source 1..21: mol_type = other RNA
gggtttccaaggacttcagct

SEQ ID NO: 13951 - RNA, 21 nt, synthetic construct
  source 1..21: mol_type = other RNA
ggtggaatcagatgggggcca

SEQ ID NO: 13952 - RNA, 21 nt, synthetic construct
  source 1..21: mol_type = other RNA
ggtggctgagagctgcgagac

SEQ ID NO: 13953 - RNA, 21 nt, synthetic construct
  source 1..21: mol_type = other RNA
ggtgtctcgcagctctcagcc

SEQ ID NO: 13954 - RNA, 21 nt, synthetic construct
  source 1..21: mol_type = other RNA
ggtttccaaggacttcagctg

SEQ ID NO: 13955 - RNA, 21 nt, synthetic construct
  source 1..21: mol_type = other RNA
gtccccgatcttgttctcact

SEQ ID NO: 13956 - RNA, 21 nt, synthetic construct
  source 1..21: mol_type = other RNA
gtccttggaaaccctcaagtg

SEQ ID NO: 13957 - RNA, 21 nt, synthetic construct
  source 1..21: mol_type = other RNA
gtctcgcagctctcagccacc

SEQ ID NO: 13958 - RNA, 21 nt, synthetic construct
  source 1..21: mol_type = other RNA
gtgagaacaagatcggggacg

SEQ ID NO: 13959 - RNA, 21 nt, synthetic construct
  source 1..21: mol_type = other RNA
gtgagctgggcctgcccttcc

SEQ ID NO: 13960 - RNA, 21 nt, synthetic construct
  source 1..21: mol_type = other RNA
gtgagtgagctgggcctgccc

SEQ ID NO: 13961 - RNA, 21 nt, synthetic construct
  source 1..21: mol_type = other RNA
gtggaatcagatgggggccat

SEQ ID NO: 13962 - RNA, 21 nt, synthetic construct
  source 1..21: mol_type = other RNA
gtggctgagagctgcgagaca

SEQ ID NO: 13963 - RNA, 21 nt, synthetic construct
  source 1..21: mol_type = other RNA
gtgtctcgcagctctcagcca

SEQ ID NO: 13964 - RNA, 21 nt, synthetic construct
  source 1..21: mol_type = other RNA
gttctcactcagcgcatccag

SEQ ID NO: 13965 - RNA, 21 nt, synthetic construct
  source 1..21: mol_type = other RNA
gtttccaaggacttcagctgg

SEQ ID NO: 13966 - RNA, 21 nt, synthetic construct
  source 1..21: mol_type = other RNA
tagctgatggcccccatctga

SEQ ID NO: 13967 - RNA, 21 nt, synthetic construct
  source 1..21: mol_type = other RNA
tcaagtgagtgagctgggcct

SEQ ID NO: 13968 - RNA, 21 nt, synthetic construct
  source 1..21: mol_type = other RNA
tcactcacttgagggtttcca

SEQ ID NO: 13969 - RNA, 21 nt, synthetic construct
  source 1..21: mol_type = other RNA
tcactcagcgcatccaggctg

SEQ ID NO: 13970 - RNA, 21 nt, synthetic construct
  source 1..21: mol_type = other RNA
tcacttgagggtttccaagga

SEQ ID NO: 13971 - RNA, 21 nt, synthetic construct
  source 1..21: mol_type = other RNA
tcagatgggggccatcagcta

SEQ ID NO: 13972 - RNA, 21 nt, synthetic construct
  source 1..21: mol_type = other RNA
tcagcaggaagggcaggccca

SEQ ID NO: 13973 - RNA, 21 nt, synthetic construct
  source 1..21: mol_type = other RNA
tcagccaccttcccccagctg

SEQ ID NO: 13974 - RNA, 21 nt, synthetic construct
  source 1..21: mol_type = other RNA
tcagcgcatccaggctgcagg

SEQ ID NO: 13975 - RNA, 21 nt, synthetic construct
  source 1..21: mol_type = other RNA
tcagctgggggaaggtggctg

SEQ ID NO: 13976 - RNA, 21 nt, synthetic construct
  source 1..21: mol_type = other RNA
tccaaggacttcagctggggg

SEQ ID NO: 13977 - RNA, 21 nt, synthetic construct
  source 1..21: mol_type = other RNA
tccacctgcagcctggatgcg

SEQ ID NO: 13978 - RNA, 21 nt, synthetic construct
  source 1..21: mol_type = other RNA
tccaggctgcaggtggaatca

SEQ ID NO: 13979 - RNA, 21 nt, synthetic construct
  source 1..21: mol_type = other RNA
tcccccagctgaagtccttgg

SEQ ID NO: 13980 - RNA, 21 nt, synthetic construct
  source 1..21: mol_type = other RNA
tccccgatcttgttctcactc

SEQ ID NO: 13981 - RNA, 21 nt, synthetic construct
  source 1..21: mol_type = other RNA
tccttggaaaccctcaagtga

SEQ ID NO: 13982 - RNA, 21 nt, synthetic construct
  source 1..21: mol_type = other RNA
tcgcagctctcagccaccttc

SEQ ID NO: 13983 - RNA, 21 nt, synthetic construct
  source 1..21: mol_type = other RNA
tcggggacgagggtgtctcgc

SEQ ID NO: 13984 - RNA, 21 nt, synthetic construct
  source 1..21: mol_type = other RNA
tcgtccccgatcttgttctca

SEQ ID NO: 13985 - RNA, 21 nt, synthetic construct
  source 1..21: mol_type = other RNA
tctcactcagcgcatccaggc

SEQ ID NO: 13986 - RNA, 21 nt, synthetic construct
  source 1..21: mol_type = other RNA
tctcagccaccttcccccagc

SEQ ID NO: 13987 - RNA, 21 nt, synthetic construct
  source 1..21: mol_type = other RNA
tctcgcagctctcagccacct

SEQ ID NO: 13988 - RNA, 21 nt, synthetic construct
  source 1..21: mol_type = other RNA
tctgattccacctgcagcctg

SEQ ID NO: 13989 - RNA, 21 nt, synthetic construct
  source 1..21: mol_type = other RNA
tcttgttctcactcagcgcat

SEQ ID NO: 13990 - RNA, 21 nt, synthetic construct
  source 1..21: mol_type = other RNA
tgaagtccttggaaaccctca

SEQ ID NO: 13991 - RNA, 21 nt, synthetic construct
  source 1..21: mol_type = other RNA
tgagaacaagatcggggacga

SEQ ID NO: 13992 - RNA, 21 nt, synthetic construct
  source 1..21: mol_type = other RNA
tgagagctgcgagacaccctc

SEQ ID NO: 13993 - RNA, 21 nt, synthetic construct
  source 1..21: mol_type = other RNA
tgagctgggcctgcccttcct

SEQ ID NO: 13994 - RNA, 21 nt, synthetic construct
  source 1..21: mol_type = other RNA
tgagggtttccaaggacttca

SEQ ID NO: 13995 - RNA, 21 nt, synthetic construct
  source 1..21: mol_type = other RNA
tgagtgagaacaagatcgggg

SEQ ID NO: 13996 - RNA, 21 nt, synthetic construct
  source 1..21: mol_type = other RNA
tgagtgagctgggcctgccct

SEQ ID NO: 13997 - RNA, 21 nt, synthetic construct
  source 1..21: mol_type = other RNA
tgatggcccccatctgattcc

SEQ ID NO: 13998 - RNA, 21 nt, synthetic construct
  source 1..21: mol_type = other RNA
tgattccacctgcagcctgga

SEQ ID NO: 13999 - RNA, 21 nt, synthetic construct
  source 1..21: mol_type = other RNA
tgcagcctggatgcgctgagt

SEQ ID NO: 14000 - RNA, 21 nt, synthetic construct
  source 1..21: mol_type = other RNA
tgcaggtggaatcagatgggg

SEQ ID NO: 14001 - RNA, 21 nt, synthetic construct
  source 1..21: mol_type = other RNA
tgcccttcctgctgaatcggg

SEQ ID NO: 14002 - RNA, 21 nt, synthetic construct
  source 1..21: mol_type = other RNA
tgcgagacaccctcgtccccg

SEQ ID NO: 14003 - RNA, 21 nt, synthetic construct
  source 1..21: mol_type = other RNA
tgcgctgagtgagaacaagat

SEQ ID NO: 14004 - RNA, 21 nt, synthetic construct
  source 1..21: mol_type = other RNA
tggaaaccctcaagtgagtga

SEQ ID NO: 14005 - RNA, 21 nt, synthetic construct
  source 1..21: mol_type = other RNA
tggaatcagatgggggccatc

SEQ ID NO: 14006 - RNA, 21 nt, synthetic construct
  source 1..21: mol_type = other RNA
tggatgcgctgagtgagaaca

SEQ ID NO: 14007 - RNA, 21 nt, synthetic construct
  source 1..21: mol_type = other RNA
tggcccccatctgattccacc

SEQ ID NO: 14008 - RNA, 21 nt, synthetic construct
  source 1..21: mol_type = other RNA
tggctgagagctgcgagacac

SEQ ID NO: 14009 - RNA, 21 nt, synthetic construct
  source 1..21: mol_type = other RNA
tgggcctgcccttcctgctga

SEQ ID NO: 14010 - RNA, 21 nt, synthetic construct
  source 1..21: mol_type = other RNA
tgggggaaggtggctgagagc

SEQ ID NO: 14011 - RNA, 21 nt, synthetic construct
  source 1..21: mol_type = other RNA
tgggggccatcagctagcgtc

SEQ ID NO: 14012 - RNA, 21 nt, synthetic construct
  source 1..21: mol_type = other RNA
tgggggcccgattcagcagga

SEQ ID NO: 14013 - RNA, 21 nt, synthetic construct
  source 1..21: mol_type = other RNA
tgtctcgcagctctcagccac

SEQ ID NO: 14014 - RNA, 21 nt, synthetic construct
  source 1..21: mol_type = other RNA
tgttctcactcagcgcatcca

SEQ ID NO: 14015 - RNA, 21 nt, synthetic construct
  source 1..21: mol_type = other RNA
ttcagcaggaagggcaggccc

SEQ ID NO: 14016 - RNA, 21 nt, synthetic construct
  source 1..21: mol_type = other RNA
ttcagctgggggaaggtggct

SEQ ID NO: 14017 - RNA, 21 nt, synthetic construct
  source 1..21: mol_type = other RNA
ttccaaggacttcagctgggg

SEQ ID NO: 14018 - RNA, 21 nt, synthetic construct
  source 1..21: mol_type = other RNA
ttccacctgcagcctggatgc

SEQ ID NO: 14019 - RNA, 21 nt, synthetic construct
  source 1..21: mol_type = other RNA
ttcccccagctgaagtccttg

SEQ ID NO: 14020 - RNA, 21 nt, synthetic construct
  source 1..21: mol_type = other RNA
ttctcactcagcgcatccagg

SEQ ID NO: 14021 - RNA, 21 nt, synthetic construct
  source 1..21: mol_type = other RNA
ttgagggtttccaaggacttc

SEQ ID NO: 14022 - RNA, 21 nt, synthetic construct
  source 1..21: mol_type = other RNA
ttggaaaccctcaagtgagtg

SEQ ID NO: 14023 - RNA, 21 nt, synthetic construct
  source 1..21: mol_type = other RNA
ttgggggcccgattcagcagg

SEQ ID NO: 14024 - RNA, 21 nt, synthetic construct
  source 1..21: mol_type = other RNA
ttgttctcactcagcgcatcc

SEQ ID NO: 14025 - RNA, 21 nt, synthetic construct
  source 1..21: mol_type = other RNA
tttccaaggacttcagctggg

SEQ ID NO: 14026 - RNA, 21 nt, synthetic construct
  source 1..21: mol_type = other RNA
tttgggggcccgattcagcag

SEQ ID NO: 14027 - RNA, 22 nt, synthetic construct
  source 1..22: mol_type = other RNA
aaaccctcaagtgagtgagctg

SEQ ID NO: 14028 - RNA, 22 nt, synthetic construct
  source 1..22: mol_type = other RNA
aacaagatcggggacgagggtg

SEQ ID NO: 14029 - RNA, 22 nt, synthetic construct
  source 1..22: mol_type = other RNA
aaccctcaagtgagtgagctgg

SEQ ID NO: 14030 - RNA, 22 nt, synthetic construct
  source 1..22: mol_type = other RNA
aagatcggggacgagggtgtct

SEQ ID NO: 14031 - RNA, 22 nt, synthetic construct
  source 1..22: mol_type = other RNA
aaggacttcagctgggggaagg

SEQ ID NO: 14032 - RNA, 22 nt, synthetic construct
  source 1..22: mol_type = other RNA
aagggcaggcccagctcactca

SEQ ID NO: 14033 - RNA, 22 nt, synthetic construct
  source 1..22: mol_type = other RNA
aaggtggctgagagctgcgaga

SEQ ID NO: 14034 - RNA, 22 nt, synthetic construct
  source 1..22: mol_type = other RNA
aagtccttggaaaccctcaagt

SEQ ID NO: 14035 - RNA, 22 nt, synthetic construct
  source 1..22: mol_type = other RNA
aagtgagtgagctgggcctgcc

SEQ ID NO: 14036 - RNA, 22 nt, synthetic construct
  source 1..22: mol_type = other RNA
aatcagatgggggccatcagct

SEQ ID NO: 14037 - RNA, 22 nt, synthetic construct
  source 1..22: mol_type = other RNA
acaagatcggggacgagggtgt

SEQ ID NO: 14038 - RNA, 22 nt, synthetic construct
  source 1..22: mol_type = other RNA
acaccctcgtccccgatcttgt

SEQ ID NO: 14039 - RNA, 22 nt, synthetic construct
  source 1..22: mol_type = other RNA
accctcaagtgagtgagctggg

SEQ ID NO: 14040 - RNA, 22 nt, synthetic construct
  source 1..22: mol_type = other RNA
accctcgtccccgatcttgttc

SEQ ID NO: 14041 - RNA, 22 nt, synthetic construct
  source 1..22: mol_type = other RNA
acctgcagcctggatgcgctga

SEQ ID NO: 14042 - RNA, 22 nt, synthetic construct
  source 1..22: mol_type = other RNA
accttcccccagctgaagtcct

SEQ ID NO: 14043 - RNA, 22 nt, synthetic construct
  source 1..22: mol_type = other RNA
acgagggtgtctcgcagctctc

SEQ ID NO: 14044 - RNA, 22 nt, synthetic construct
  source 1..22: mol_type = other RNA
acgctagctgatggcccccatc

SEQ ID NO: 14045 - RNA, 22 nt, synthetic construct
  source 1..22: mol_type = other RNA
actcacttgagggtttccaagg

SEQ ID NO: 14046 - RNA, 22 nt, synthetic construct
  source 1..22: mol_type = other RNA
actcagcgcatccaggctgcag

SEQ ID NO: 14047 - RNA, 22 nt, synthetic construct
  source 1..22: mol_type = other RNA
acttcagctgggggaaggtggc

SEQ ID NO: 14048 - RNA, 22 nt, synthetic construct
  source 1..22: mol_type = other RNA
acttgagggtttccaaggactt

SEQ ID NO: 14049 - RNA, 22 nt, synthetic construct
  source 1..22: mol_type = other RNA
agaacaagatcggggacgaggg

SEQ ID NO: 14050 - RNA, 22 nt, synthetic construct
  source 1..22: mol_type = other RNA
agacaccctcgtccccgatctt

SEQ ID NO: 14051 - RNA, 22 nt, synthetic construct
  source 1..22: mol_type = other RNA
agagctgcgagacaccctcgtc

SEQ ID NO: 14052 - RNA, 22 nt, synthetic construct
  source 1..22: mol_type = other RNA
agatcggggacgagggtgtctc

SEQ ID NO: 14053 - RNA, 22 nt, synthetic construct
  source 1..22: mol_type = other RNA
agatgggggccatcagctagcg

SEQ ID NO: 14054 - RNA, 22 nt, synthetic construct
  source 1..22: mol_type = other RNA
agcaggaagggcaggcccagct

SEQ ID NO: 14055 - RNA, 22 nt, synthetic construct
  source 1..22: mol_type = other RNA
agccaccttcccccagctgaag

SEQ ID NO: 14056 - RNA, 22 nt, synthetic construct
  source 1..22: mol_type = other RNA
agcctggatgcgctgagtgaga

SEQ ID NO: 14057 - RNA, 22 nt, synthetic construct
  source 1..22: mol_type = other RNA
agcgcatccaggctgcaggtgg

SEQ ID NO: 14058 - RNA, 22 nt, synthetic construct
  source 1..22: mol_type = other RNA
agctcactcacttgagggtttc

SEQ ID NO: 14059 - RNA, 22 nt, synthetic construct
  source 1..22: mol_type = other RNA
agctctcagccaccttccccca

SEQ ID NO: 14060 - RNA, 22 nt, synthetic construct
  source 1..22: mol_type = other RNA
agctgaagtccttggaaaccct

SEQ ID NO: 14061 - RNA, 22 nt, synthetic construct
  source 1..22: mol_type = other RNA
agctgatggcccccatctgatt

SEQ ID NO: 14062 - RNA, 22 nt, synthetic construct
  source 1..22: mol_type = other RNA
agctgcgagacaccctcgtccc

SEQ ID NO: 14063 - RNA, 22 nt, synthetic construct
  source 1..22: mol_type = other RNA
agctgggcctgcccttcctgct

SEQ ID NO: 14064 - RNA, 22 nt, synthetic construct
  source 1..22: mol_type = other RNA
agctgggggaaggtggctgaga

SEQ ID NO: 14065 - RNA, 22 nt, synthetic construct
  source 1..22: mol_type = other RNA
aggaagggcaggcccagctcac

SEQ ID NO: 14066 - RNA, 22 nt, synthetic construct
  source 1..22: mol_type = other RNA
aggacgctagctgatggccccc

SEQ ID NO: 14067 - RNA, 22 nt, synthetic construct
  source 1..22: mol_type = other RNA
aggacttcagctgggggaaggt

SEQ ID NO: 14068 - RNA, 22 nt, synthetic construct
  source 1..22: mol_type = other RNA
aggcccagctcactcacttgag

SEQ ID NO: 14069 - RNA, 22 nt, synthetic construct
  source 1..22: mol_type = other RNA
aggctgcaggtggaatcagatg

SEQ ID NO: 14070 - RNA, 22 nt, synthetic construct
  source 1..22: mol_type = other RNA
agggcaggcccagctcactcac

SEQ ID NO: 14071 - RNA, 22 nt, synthetic construct
  source 1..22: mol_type = other RNA
agggtgtctcgcagctctcagc

SEQ ID NO: 14072 - RNA, 22 nt, synthetic construct
  source 1..22: mol_type = other RNA
agggtttccaaggacttcagct

SEQ ID NO: 14073 - RNA, 22 nt, synthetic construct
  source 1..22: mol_type = other RNA
aggtggaatcagatgggggcca

SEQ ID NO: 14074 - RNA, 22 nt, synthetic construct
  source 1..22: mol_type = other RNA
aggtggctgagagctgcgagac

SEQ ID NO: 14075 - RNA, 22 nt, synthetic construct
  source 1..22: mol_type = other RNA
agtccttggaaaccctcaagtg

SEQ ID NO: 14076 - RNA, 22 nt, synthetic construct
  source 1..22: mol_type = other RNA
agtgagaacaagatcggggacg

SEQ ID NO: 14077 - RNA, 22 nt, synthetic construct
  source 1..22: mol_type = other RNA
agtgagctgggcctgcccttcc

SEQ ID NO: 14078 - RNA, 22 nt, synthetic construct
  source 1..22: mol_type = other RNA
agtgagtgagctgggcctgccc

SEQ ID NO: 14079 - RNA, 22 nt, synthetic construct
  source 1..22: mol_type = other RNA
atcagatgggggccatcagcta

SEQ ID NO: 14080 - RNA, 22 nt, synthetic construct
  source 1..22: mol_type = other RNA
atccaggctgcaggtggaatca

SEQ ID NO: 14081 - RNA, 22 nt, synthetic construct
  source 1..22: mol_type = other RNA
atcggggacgagggtgtctcgc

SEQ ID NO: 14082 - RNA, 22 nt, synthetic construct
  source 1..22: mol_type = other RNA
atctgattccacctgcagcctg

SEQ ID NO: 14083 - RNA, 22 nt, synthetic construct
  source 1..22: mol_type = other RNA
atcttgttctcactcagcgcat

SEQ ID NO: 14084 - RNA, 22 nt, synthetic construct
  source 1..22: mol_type = other RNA
atgcgctgagtgagaacaagat

SEQ ID NO: 14085 - RNA, 22 nt, synthetic construct
  source 1..22: mol_type = other RNA
atggcccccatctgattccacc

SEQ ID NO: 14086 - RNA, 22 nt, synthetic construct
  source 1..22: mol_type = other RNA
atgggggccatcagctagcgtc

SEQ ID NO: 14087 - RNA, 22 nt, synthetic construct
  source 1..22: mol_type = other RNA
attcagcaggaagggcaggccc

SEQ ID NO: 14088 - RNA, 22 nt, synthetic construct
  source 1..22: mol_type = other RNA
attccacctgcagcctggatgc

SEQ ID NO: 14089 - RNA, 22 nt, synthetic construct
  source 1..22: mol_type = other RNA
caagatcggggacgagggtgtc

SEQ ID NO: 14090 - RNA, 22 nt, synthetic construct
  source 1..22: mol_type = other RNA
caaggacttcagctgggggaag

SEQ ID NO: 14091 - RNA, 22 nt, synthetic construct
  source 1..22: mol_type = other RNA
caagtgagtgagctgggcctgc

SEQ ID NO: 14092 - RNA, 22 nt, synthetic construct
  source 1..22: mol_type = other RNA
caccctcgtccccgatcttgtt

SEQ ID NO: 14093 - RNA, 22 nt, synthetic construct
  source 1..22: mol_type = other RNA
cacctgcagcctggatgcgctg

SEQ ID NO: 14094 - RNA, 22 nt, synthetic construct
  source 1..22: mol_type = other RNA
caccttcccccagctgaagtcc

SEQ ID NO: 14095 - RNA, 22 nt, synthetic construct
  source 1..22: mol_type = other RNA
cactcacttgagggtttccaag

SEQ ID NO: 14096 - RNA, 22 nt, synthetic construct
  source 1..22: mol_type = other RNA
cactcagcgcatccaggctgca

SEQ ID NO: 14097 - RNA, 22 nt, synthetic construct
  source 1..22: mol_type = other RNA
cacttgagggtttccaaggact

SEQ ID NO: 14098 - RNA, 22 nt, synthetic construct
  source 1..22: mol_type = other RNA
cagatgggggccatcagctagc

SEQ ID NO: 14099 - RNA, 22 nt, synthetic construct
  source 1..22: mol_type = other RNA
cagcaggaagggcaggcccagc

SEQ ID NO: 14100 - RNA, 22 nt, synthetic construct
  source 1..22: mol_type = other RNA
cagccaccttcccccagctgaa

SEQ ID NO: 14101 - RNA, 22 nt, synthetic construct
  source 1..22: mol_type = other RNA
cagcctggatgcgctgagtgag

SEQ ID NO: 14102 - RNA, 22 nt, synthetic construct
  source 1..22: mol_type = other RNA
cagcgcatccaggctgcaggtg

SEQ ID NO: 14103 - RNA, 22 nt, synthetic construct
  source 1..22: mol_type = other RNA
cagctcactcacttgagggttt

SEQ ID NO: 14104 - RNA, 22 nt, synthetic construct
  source 1..22: mol_type = other RNA
cagctctcagccaccttccccc

SEQ ID NO: 14105 - RNA, 22 nt, synthetic construct
  source 1..22: mol_type = other RNA
cagctgaagtccttggaaaccc

SEQ ID NO: 14106 - RNA, 22 nt, synthetic construct
  source 1..22: mol_type = other RNA
cagctgggggaaggtggctgag

SEQ ID NO: 14107 - RNA, 22 nt, synthetic construct
  source 1..22: mol_type = other RNA
caggaagggcaggcccagctca

SEQ ID NO: 14108 - RNA, 22 nt, synthetic construct
  source 1..22: mol_type = other RNA
caggacgctagctgatggcccc

SEQ ID NO: 14109 - RNA, 22 nt, synthetic construct
  source 1..22: mol_type = other RNA
caggcccagctcactcacttga

SEQ ID NO: 14110 - RNA, 22 nt, synthetic construct
  source 1..22: mol_type = other RNA
caggctgcaggtggaatcagat

SEQ ID NO: 14111 - RNA, 22 nt, synthetic construct
  source 1..22: mol_type = other RNA
caggtggaatcagatgggggcc

SEQ ID NO: 14112 - RNA, 22 nt, synthetic construct
  source 1..22: mol_type = other RNA
catccaggctgcaggtggaatc

SEQ ID NO: 14113 - RNA, 22 nt, synthetic construct
  source 1..22: mol_type = other RNA
catctgattccacctgcagcct

SEQ ID NO: 14114 - RNA, 22 nt, synthetic construct
  source 1..22: mol_type = other RNA
ccaaggacttcagctgggggaa

SEQ ID NO: 14115 - RNA, 22 nt, synthetic construct
  source 1..22: mol_type = other RNA
ccacctgcagcctggatgcgct

SEQ ID NO: 14116 - RNA, 22 nt, synthetic construct
  source 1..22: mol_type = other RNA
ccaccttcccccagctgaagtc

SEQ ID NO: 14117 - RNA, 22 nt, synthetic construct
  source 1..22: mol_type = other RNA
ccagctcactcacttgagggtt

SEQ ID NO: 14118 - RNA, 22 nt, synthetic construct
  source 1..22: mol_type = other RNA
ccagctgaagtccttggaaacc

SEQ ID NO: 14119 - RNA, 22 nt, synthetic construct
  source 1..22: mol_type = other RNA
ccaggacgctagctgatggccc

SEQ ID NO: 14120 - RNA, 22 nt, synthetic construct
  source 1..22: mol_type = other RNA
ccaggctgcaggtggaatcaga

SEQ ID NO: 14121 - RNA, 22 nt, synthetic construct
  source 1..22: mol_type = other RNA
ccatctgattccacctgcagcc

SEQ ID NO: 14122 - RNA, 22 nt, synthetic construct
  source 1..22: mol_type = other RNA
cccagctcactcacttgagggt

SEQ ID NO: 14123 - RNA, 22 nt, synthetic construct
  source 1..22: mol_type = other RNA
cccagctgaagtccttggaaac

SEQ ID NO: 14124 - RNA, 22 nt, synthetic construct
  source 1..22: mol_type = other RNA
cccaggacgctagctgatggcc

SEQ ID NO: 14125 - RNA, 22 nt, synthetic construct
  source 1..22: mol_type = other RNA
cccatctgattccacctgcagc

SEQ ID NO: 14126 - RNA, 22 nt, synthetic construct
  source 1..22: mol_type = other RNA
ccccagctgaagtccttggaaa

SEQ ID NO: 14127 - RNA, 22 nt, synthetic construct
  source 1..22: mol_type = other RNA
ccccaggacgctagctgatggc

SEQ ID NO: 14128 - RNA, 22 nt, synthetic construct
  source 1..22: mol_type = other RNA
ccccatctgattccacctgcag

SEQ ID NO: 14129 - RNA, 22 nt, synthetic construct
  source 1..22: mol_type = other RNA
cccccagctgaagtccttggaa

SEQ ID NO: 14130 - RNA, 22 nt, synthetic construct
  source 1..22: mol_type = other RNA
cccccatctgattccacctgca

SEQ ID NO: 14131 - RNA, 22 nt, synthetic construct
  source 1..22: mol_type = other RNA
ccccgatcttgttctcactcag

SEQ ID NO: 14132 - RNA, 22 nt, synthetic construct
  source 1..22: mol_type = other RNA
cccgatcttgttctcactcagc

SEQ ID NO: 14133 - RNA, 22 nt, synthetic construct
  source 1..22: mol_type = other RNA
cccgattcagcaggaagggcag

SEQ ID NO: 14134 - RNA, 22 nt, synthetic construct
  source 1..22: mol_type = other RNA
ccctcaagtgagtgagctgggc

SEQ ID NO: 14135 - RNA, 22 nt, synthetic construct
  source 1..22: mol_type = other RNA
ccctcgtccccgatcttgttct

SEQ ID NO: 14136 - RNA, 22 nt, synthetic construct
  source 1..22: mol_type = other RNA
ccgatcttgttctcactcagcg

SEQ ID NO: 14137 - RNA, 22 nt, synthetic construct
  source 1..22: mol_type = other RNA
ccgattcagcaggaagggcagg

SEQ ID NO: 14138 - RNA, 22 nt, synthetic construct
  source 1..22: mol_type = other RNA
cctcaagtgagtgagctgggcc

SEQ ID NO: 14139 - RNA, 22 nt, synthetic construct
  source 1..22: mol_type = other RNA
cctcgtccccgatcttgttctc

SEQ ID NO: 14140 - RNA, 22 nt, synthetic construct
  source 1..22: mol_type = other RNA
cctgcagcctggatgcgctgag

SEQ ID NO: 14141 - RNA, 22 nt, synthetic construct
  source 1..22: mol_type = other RNA
cctgcccttcctgctgaatcgg

SEQ ID NO: 14142 - RNA, 22 nt, synthetic construct
  source 1..22: mol_type = other RNA
cctggatgcgctgagtgagaac

SEQ ID NO: 14143 - RNA, 22 nt, synthetic construct
  source 1..22: mol_type = other RNA
ccttcccccagctgaagtcctt

SEQ ID NO: 14144 - RNA, 22 nt, synthetic construct
  source 1..22: mol_type = other RNA
ccttggaaaccctcaagtgagt

SEQ ID NO: 14145 - RNA, 22 nt, synthetic construct
  source 1..22: mol_type = other RNA
cgagacaccctcgtccccgatc

SEQ ID NO: 14146 - RNA, 22 nt, synthetic construct
  source 1..22: mol_type = other RNA
cgagggtgtctcgcagctctca

SEQ ID NO: 14147 - RNA, 22 nt, synthetic construct
  source 1..22: mol_type = other RNA
cgatcttgttctcactcagcgc

SEQ ID NO: 14148 - RNA, 22 nt, synthetic construct
  source 1..22: mol_type = other RNA
cgattcagcaggaagggcaggc

SEQ ID NO: 14149 - RNA, 22 nt, synthetic construct
  source 1..22: mol_type = other RNA
cgcagctctcagccaccttccc

SEQ ID NO: 14150 - RNA, 22 nt, synthetic construct
  source 1..22: mol_type = other RNA
cgcatccaggctgcaggtggaa

SEQ ID NO: 14151 - RNA, 22 nt, synthetic construct
  source 1..22: mol_type = other RNA
cgctagctgatggcccccatct

SEQ ID NO: 14152 - RNA, 22 nt, synthetic construct
  source 1..22: mol_type = other RNA
cgctgagtgagaacaagatcgg

SEQ ID NO: 14153 - RNA, 22 nt, synthetic construct
  source 1..22: mol_type = other RNA
cggggacgagggtgtctcgcag

SEQ ID NO: 14154 - RNA, 22 nt, synthetic construct
  source 1..22: mol_type = other RNA
cgtccccgatcttgttctcact

SEQ ID NO: 14155 - RNA, 22 nt, synthetic construct
  source 1..22: mol_type = other RNA
ctagctgatggcccccatctga

SEQ ID NO: 14156 - RNA, 22 nt, synthetic construct
  source 1..22: mol_type = other RNA
ctcaagtgagtgagctgggcct

SEQ ID NO: 14157 - RNA, 22 nt, synthetic construct
  source 1..22: mol_type = other RNA
ctcactcacttgagggtttcca

SEQ ID NO: 14158 - RNA, 22 nt, synthetic construct
  source 1..22: mol_type = other RNA
ctcactcagcgcatccaggctg

SEQ ID NO: 14159 - RNA, 22 nt, synthetic construct
  source 1..22: mol_type = other RNA
ctcacttgagggtttccaagga

SEQ ID NO: 14160 - RNA, 22 nt, synthetic construct
  source 1..22: mol_type = other RNA
ctcagccaccttcccccagctg

SEQ ID NO: 14161 - RNA, 22 nt, synthetic construct
  source 1..22: mol_type = other RNA
ctcagcgcatccaggctgcagg

SEQ ID NO: 14162 - RNA, 22 nt, synthetic construct
  source 1..22: mol_type = other RNA
ctcgcagctctcagccaccttc

SEQ ID NO: 14163 - RNA, 22 nt, synthetic construct
  source 1..22: mol_type = other RNA
ctcgtccccgatcttgttctca

SEQ ID NO: 14164 - RNA, 22 nt, synthetic construct
  source 1..22: mol_type = other RNA
ctctcagccaccttcccccagc

SEQ ID NO: 14165 - RNA, 22 nt, synthetic construct
  source 1..22: mol_type = other RNA
ctgaagtccttggaaaccctca

SEQ ID NO: 14166 - RNA, 22 nt, synthetic construct
  source 1..22: mol_type = other RNA
ctgagagctgcgagacaccctc

SEQ ID NO: 14167 - RNA, 22 nt, synthetic construct
  source 1..22: mol_type = other RNA
ctgagtgagaacaagatcgggg

SEQ ID NO: 14168 - RNA, 22 nt, synthetic construct
  source 1..22: mol_type = other RNA
ctgatggcccccatctgattcc

SEQ ID NO: 14169 - RNA, 22 nt, synthetic construct
  source 1..22: mol_type = other RNA
ctgattccacctgcagcctgga

SEQ ID NO: 14170 - RNA, 22 nt, synthetic construct
  source 1..22: mol_type = other RNA
ctgcagcctggatgcgctgagt

SEQ ID NO: 14171 - RNA, 22 nt, synthetic construct
  source 1..22: mol_type = other RNA
ctgcaggtggaatcagatgggg

SEQ ID NO: 14172 - RNA, 22 nt, synthetic construct
  source 1..22: mol_type = other RNA
ctgcccttcctgctgaatcggg

SEQ ID NO: 14173 - RNA, 22 nt, synthetic construct
  source 1..22: mol_type = other RNA
ctgcgagacaccctcgtccccg

SEQ ID NO: 14174 - RNA, 22 nt, synthetic construct
  source 1..22: mol_type = other RNA
ctggatgcgctgagtgagaaca

SEQ ID NO: 14175 - RNA, 22 nt, synthetic construct
  source 1..22: mol_type = other RNA
ctgggcctgcccttcctgctga

SEQ ID NO: 14176 - RNA, 22 nt, synthetic construct
  source 1..22: mol_type = other RNA
ctgggggaaggtggctgagagc

SEQ ID NO: 14177 - RNA, 22 nt, synthetic construct
  source 1..22: mol_type = other RNA
cttcagctgggggaaggtggct

SEQ ID NO: 14178 - RNA, 22 nt, synthetic construct
  source 1..22: mol_type = other RNA
cttcccccagctgaagtccttg

SEQ ID NO: 14179 - RNA, 22 nt, synthetic construct
  source 1..22: mol_type = other RNA
cttgagggtttccaaggacttc

SEQ ID NO: 14180 - RNA, 22 nt, synthetic construct
  source 1..22: mol_type = other RNA
cttggaaaccctcaagtgagtg

SEQ ID NO: 14181 - RNA, 22 nt, synthetic construct
  source 1..22: mol_type = other RNA
cttgttctcactcagcgcatcc

SEQ ID NO: 14182 - RNA, 22 nt, synthetic construct
  source 1..22: mol_type = other RNA
gaaaccctcaagtgagtgagct

SEQ ID NO: 14183 - RNA, 22 nt, synthetic construct
  source 1..22: mol_type = other RNA
gaacaagatcggggacgagggt

SEQ ID NO: 14184 - RNA, 22 nt, synthetic construct
  source 1..22: mol_type = other RNA
gaagggcaggcccagctcactc

SEQ ID NO: 14185 - RNA, 22 nt, synthetic construct
  source 1..22: mol_type = other RNA
gaaggtggctgagagctgcgag

SEQ ID NO: 14186 - RNA, 22 nt, synthetic construct
  source 1..22: mol_type = other RNA
gaagtccttggaaaccctcaag

SEQ ID NO: 14187 - RNA, 22 nt, synthetic construct
  source 1..22: mol_type = other RNA
gaatcagatgggggccatcagc

SEQ ID NO: 14188 - RNA, 22 nt, synthetic construct
  source 1..22: mol_type = other RNA
gacaccctcgtccccgatcttg

SEQ ID NO: 14189 - RNA, 22 nt, synthetic construct
  source 1..22: mol_type = other RNA
gacgagggtgtctcgcagctct

SEQ ID NO: 14190 - RNA, 22 nt, synthetic construct
  source 1..22: mol_type = other RNA
gacgctagctgatggcccccat

SEQ ID NO: 14191 - RNA, 22 nt, synthetic construct
  source 1..22: mol_type = other RNA
gacttcagctgggggaaggtgg

SEQ ID NO: 14192 - RNA, 22 nt, synthetic construct
  source 1..22: mol_type = other RNA
gagaacaagatcggggacgagg

SEQ ID NO: 14193 - RNA, 22 nt, synthetic construct
  source 1..22: mol_type = other RNA
gagacaccctcgtccccgatct

SEQ ID NO: 14194 - RNA, 22 nt, synthetic construct
  source 1..22: mol_type = other RNA
gagagctgcgagacaccctcgt

SEQ ID NO: 14195 - RNA, 22 nt, synthetic construct
  source 1..22: mol_type = other RNA
gagctgcgagacaccctcgtcc

SEQ ID NO: 14196 - RNA, 22 nt, synthetic construct
  source 1..22: mol_type = other RNA
gagctgggcctgcccttcctgc

SEQ ID NO: 14197 - RNA, 22 nt, synthetic construct
  source 1..22: mol_type = other RNA
gagggtgtctcgcagctctcag

SEQ ID NO: 14198 - RNA, 22 nt, synthetic construct
  source 1..22: mol_type = other RNA
gagggtttccaaggacttcagc

SEQ ID NO: 14199 - RNA, 22 nt, synthetic construct
  source 1..22: mol_type = other RNA
gagtgagaacaagatcggggac

SEQ ID NO: 14200 - RNA, 22 nt, synthetic construct
  source 1..22: mol_type = other RNA
gagtgagctgggcctgcccttc

SEQ ID NO: 14201 - RNA, 22 nt, synthetic construct
  source 1..22: mol_type = other RNA
gatcggggacgagggtgtctcg

SEQ ID NO: 14202 - RNA, 22 nt, synthetic construct
  source 1..22: mol_type = other RNA
gatcttgttctcactcagcgca

SEQ ID NO: 14203 - RNA, 22 nt, synthetic construct
  source 1..22: mol_type = other RNA
gatgcgctgagtgagaacaaga

SEQ ID NO: 14204 - RNA, 22 nt, synthetic construct
  source 1..22: mol_type = other RNA
gatggcccccatctgattccac

SEQ ID NO: 14205 - RNA, 22 nt, synthetic construct
  source 1..22: mol_type = other RNA
gatgggggccatcagctagcgt

SEQ ID NO: 14206 - RNA, 22 nt, synthetic construct
  source 1..22: mol_type = other RNA
gattcagcaggaagggcaggcc

SEQ ID NO: 14207 - RNA, 22 nt, synthetic construct
  source 1..22: mol_type = other RNA
gattccacctgcagcctggatg

SEQ ID NO: 14208 - RNA, 22 nt, synthetic construct
  source 1..22: mol_type = other RNA
gcagcctggatgcgctgagtga

SEQ ID NO: 14209 - RNA, 22 nt, synthetic construct
  source 1..22: mol_type = other RNA
gcagctctcagccaccttcccc

SEQ ID NO: 14210 - RNA, 22 nt, synthetic construct
  source 1..22: mol_type = other RNA
gcaggaagggcaggcccagctc

SEQ ID NO: 14211 - RNA, 22 nt, synthetic construct
  source 1..22: mol_type = other RNA
gcaggcccagctcactcacttg

SEQ ID NO: 14212 - RNA, 22 nt, synthetic construct
  source 1..22: mol_type = other RNA
gcaggtggaatcagatgggggc

SEQ ID NO: 14213 - RNA, 22 nt, synthetic construct
  source 1..22: mol_type = other RNA
gcatccaggctgcaggtggaat

SEQ ID NO: 14214 - RNA, 22 nt, synthetic construct
  source 1..22: mol_type = other RNA
gccaccttcccccagctgaagt

SEQ ID NO: 14215 - RNA, 22 nt, synthetic construct
  source 1..22: mol_type = other RNA
gcccagctcactcacttgaggg

SEQ ID NO: 14216 - RNA, 22 nt, synthetic construct
  source 1..22: mol_type = other RNA
gccccaggacgctagctgatgg

SEQ ID NO: 14217 - RNA, 22 nt, synthetic construct
  source 1..22: mol_type = other RNA
gcccccatctgattccacctgc

SEQ ID NO: 14218 - RNA, 22 nt, synthetic construct
  source 1..22: mol_type = other RNA
gcccgattcagcaggaagggca

SEQ ID NO: 14219 - RNA, 22 nt, synthetic construct
  source 1..22: mol_type = other RNA
gcctgcccttcctgctgaatcg

SEQ ID NO: 14220 - RNA, 22 nt, synthetic construct
  source 1..22: mol_type = other RNA
gcctggatgcgctgagtgagaa

SEQ ID NO: 14221 - RNA, 22 nt, synthetic construct
  source 1..22: mol_type = other RNA
gcgagacaccctcgtccccgat

SEQ ID NO: 14222 - RNA, 22 nt, synthetic construct
  source 1..22: mol_type = other RNA
gcgcatccaggctgcaggtgga

SEQ ID NO: 14223 - RNA, 22 nt, synthetic construct
  source 1..22: mol_type = other RNA
gcgctgagtgagaacaagatcg

SEQ ID NO: 14224 - RNA, 22 nt, synthetic construct
  source 1..22: mol_type = other RNA
gctagctgatggcccccatctg

SEQ ID NO: 14225 - RNA, 22 nt, synthetic construct
  source 1..22: mol_type = other RNA
gctcactcacttgagggtttcc

SEQ ID NO: 14226 - RNA, 22 nt, synthetic construct
  source 1..22: mol_type = other RNA
gctctcagccaccttcccccag

SEQ ID NO: 14227 - RNA, 22 nt, synthetic construct
  source 1..22: mol_type = other RNA
gctgaagtccttggaaaccctc

SEQ ID NO: 14228 - RNA, 22 nt, synthetic construct
  source 1..22: mol_type = other RNA
gctgagagctgcgagacaccct

SEQ ID NO: 14229 - RNA, 22 nt, synthetic construct
  source 1..22: mol_type = other RNA
gctgagtgagaacaagatcggg

SEQ ID NO: 14230 - RNA, 22 nt, synthetic construct
  source 1..22: mol_type = other RNA
gctgatggcccccatctgattc

SEQ ID NO: 14231 - RNA, 22 nt, synthetic construct
  source 1..22: mol_type = other RNA
gctgcaggtggaatcagatggg

SEQ ID NO: 14232 - RNA, 22 nt, synthetic construct
  source 1..22: mol_type = other RNA
gctgcgagacaccctcgtcccc

SEQ ID NO: 14233 - RNA, 22 nt, synthetic construct
  source 1..22: mol_type = other RNA
gctgggcctgcccttcctgctg

SEQ ID NO: 14234 - RNA, 22 nt, synthetic construct
  source 1..22: mol_type = other RNA
gctgggggaaggtggctgagag

SEQ ID NO: 14235 - RNA, 22 nt, synthetic construct
  source 1..22: mol_type = other RNA
ggaaaccctcaagtgagtgagc

SEQ ID NO: 14236 - RNA, 22 nt, synthetic construct
  source 1..22: mol_type = other RNA
ggaagggcaggcccagctcact

SEQ ID NO: 14237 - RNA, 22 nt, synthetic construct
  source 1..22: mol_type = other RNA
ggaaggtggctgagagctgcga

SEQ ID NO: 14238 - RNA, 22 nt, synthetic construct
  source 1..22: mol_type = other RNA
ggaatcagatgggggccatcag

SEQ ID NO: 14239 - RNA, 22 nt, synthetic construct
  source 1..22: mol_type = other RNA
ggacgagggtgtctcgcagctc

SEQ ID NO: 14240 - RNA, 22 nt, synthetic construct
  source 1..22: mol_type = other RNA
ggacgctagctgatggccccca

SEQ ID NO: 14241 - RNA, 22 nt, synthetic construct
  source 1..22: mol_type = other RNA
ggacttcagctgggggaaggtg

SEQ ID NO: 14242 - RNA, 22 nt, synthetic construct
  source 1..22: mol_type = other RNA
ggatgcgctgagtgagaacaag

SEQ ID NO: 14243 - RNA, 22 nt, synthetic construct
  source 1..22: mol_type = other RNA
ggcaggcccagctcactcactt

SEQ ID NO: 14244 - RNA, 22 nt, synthetic construct
  source 1..22: mol_type = other RNA
ggcccagctcactcacttgagg

SEQ ID NO: 14245 - RNA, 22 nt, synthetic construct
  source 1..22: mol_type = other RNA
ggccccaggacgctagctgatg

SEQ ID NO: 14246 - RNA, 22 nt, synthetic construct
  source 1..22: mol_type = other RNA
ggcccccatctgattccacctg

SEQ ID NO: 14247 - RNA, 22 nt, synthetic construct
  source 1..22: mol_type = other RNA
ggcccgattcagcaggaagggc

SEQ ID NO: 14248 - RNA, 22 nt, synthetic construct
  source 1..22: mol_type = other RNA
ggcctgcccttcctgctgaatc

SEQ ID NO: 14249 - RNA, 22 nt, synthetic construct
  source 1..22: mol_type = other RNA
ggctgagagctgcgagacaccc

SEQ ID NO: 14250 - RNA, 22 nt, synthetic construct
  source 1..22: mol_type = other RNA
ggctgcaggtggaatcagatgg

SEQ ID NO: 14251 - RNA, 22 nt, synthetic construct
  source 1..22: mol_type = other RNA
gggaaggtggctgagagctgcg

SEQ ID NO: 14252 - RNA, 22 nt, synthetic construct
  source 1..22: mol_type = other RNA
gggacgagggtgtctcgcagct

SEQ ID NO: 14253 - RNA, 22 nt, synthetic construct
  source 1..22: mol_type = other RNA
gggcaggcccagctcactcact

SEQ ID NO: 14254 - RNA, 22 nt, synthetic construct
  source 1..22: mol_type = other RNA
gggcccgattcagcaggaaggg

SEQ ID NO: 14255 - RNA, 22 nt, synthetic construct
  source 1..22: mol_type = other RNA
gggcctgcccttcctgctgaat

SEQ ID NO: 14256 - RNA, 22 nt, synthetic construct
  source 1..22: mol_type = other RNA
ggggaaggtggctgagagctgc

SEQ ID NO: 14257 - RNA, 22 nt, synthetic construct
  source 1..22: mol_type = other RNA
ggggacgagggtgtctcgcagc

SEQ ID NO: 14258 - RNA, 22 nt, synthetic construct
  source 1..22: mol_type = other RNA
ggggcccgattcagcaggaagg

SEQ ID NO: 14259 - RNA, 22 nt, synthetic construct
  source 1..22: mol_type = other RNA
gggggaaggtggctgagagctg

SEQ ID NO: 14260 - RNA, 22 nt, synthetic construct
  source 1..22: mol_type = other RNA
gggggcccgattcagcaggaag

SEQ ID NO: 14261 - RNA, 22 nt, synthetic construct
  source 1..22: mol_type = other RNA
gggtgtctcgcagctctcagcc

SEQ ID NO: 14262 - RNA, 22 nt, synthetic construct
  source 1..22: mol_type = other RNA
gggtttccaaggacttcagctg

SEQ ID NO: 14263 - RNA, 22 nt, synthetic construct
  source 1..22: mol_type = other RNA
ggtggaatcagatgggggccat

SEQ ID NO: 14264 - RNA, 22 nt, synthetic construct
  source 1..22: mol_type = other RNA
ggtggctgagagctgcgagaca

SEQ ID NO: 14265 - RNA, 22 nt, synthetic construct
  source 1..22: mol_type = other RNA
ggtgtctcgcagctctcagcca

SEQ ID NO: 14266 - RNA, 22 nt, synthetic construct
  source 1..22: mol_type = other RNA
ggtttccaaggacttcagctgg

SEQ ID NO: 14267 - RNA, 22 nt, synthetic construct
  source 1..22: mol_type = other RNA
gtccccgatcttgttctcactc

SEQ ID NO: 14268 - RNA, 22 nt, synthetic construct
  source 1..22: mol_type = other RNA
gtccttggaaaccctcaagtga

SEQ ID NO: 14269 - RNA, 22 nt, synthetic construct
  source 1..22: mol_type = other RNA
gtctcgcagctctcagccacct

SEQ ID NO: 14270 - RNA, 22 nt, synthetic construct
  source 1..22: mol_type = other RNA
gtgagaacaagatcggggacga

SEQ ID NO: 14271 - RNA, 22 nt, synthetic construct
  source 1..22: mol_type = other RNA
gtgagctgggcctgcccttcct

SEQ ID NO: 14272 - RNA, 22 nt, synthetic construct
  source 1..22: mol_type = other RNA
gtgagtgagctgggcctgccct

SEQ ID NO: 14273 - RNA, 22 nt, synthetic construct
  source 1..22: mol_type = other RNA
gtggaatcagatgggggccatc

SEQ ID NO: 14274 - RNA, 22 nt, synthetic construct
  source 1..22: mol_type = other RNA
gtggctgagagctgcgagacac

SEQ ID NO: 14275 - RNA, 22 nt, synthetic construct
  source 1..22: mol_type = other RNA
gtgtctcgcagctctcagccac

SEQ ID NO: 14276 - RNA, 22 nt, synthetic construct
  source 1..22: mol_type = other RNA
gttctcactcagcgcatccagg

SEQ ID NO: 14277 - RNA, 22 nt, synthetic construct
  source 1..22: mol_type = other RNA
gtttccaaggacttcagctggg

SEQ ID NO: 14278 - RNA, 22 nt, synthetic construct
  source 1..22: mol_type = other RNA
tagctgatggcccccatctgat

SEQ ID NO: 14279 - RNA, 22 nt, synthetic construct
  source 1..22: mol_type = other RNA
tcaagtgagtgagctgggcctg

SEQ ID NO: 14280 - RNA, 22 nt, synthetic construct
  source 1..22: mol_type = other RNA
tcactcacttgagggtttccaa

SEQ ID NO: 14281 - RNA, 22 nt, synthetic construct
  source 1..22: mol_type = other RNA
tcactcagcgcatccaggctgc

SEQ ID NO: 14282 - RNA, 22 nt, synthetic construct
  source 1..22: mol_type = other RNA
tcacttgagggtttccaaggac

SEQ ID NO: 14283 - RNA, 22 nt, synthetic construct
  source 1..22: mol_type = other RNA
tcagatgggggccatcagctag

SEQ ID NO: 14284 - RNA, 22 nt, synthetic construct
  source 1..22: mol_type = other RNA
tcagcaggaagggcaggcccag

SEQ ID NO: 14285 - RNA, 22 nt, synthetic construct
  source 1..22: mol_type = other RNA
tcagccaccttcccccagctga

SEQ ID NO: 14286 - RNA, 22 nt, synthetic construct
  source 1..22: mol_type = other RNA
tcagcgcatccaggctgcaggt

SEQ ID NO: 14287 - RNA, 22 nt, synthetic construct
  source 1..22: mol_type = other RNA
tcagctgggggaaggtggctga

SEQ ID NO: 14288 - RNA, 22 nt, synthetic construct
  source 1..22: mol_type = other RNA
tccaaggacttcagctggggga

SEQ ID NO: 14289 - RNA, 22 nt, synthetic construct
  source 1..22: mol_type = other RNA
tccacctgcagcctggatgcgc

SEQ ID NO: 14290 - RNA, 22 nt, synthetic construct
  source 1..22: mol_type = other RNA
tccaggctgcaggtggaatcag

SEQ ID NO: 14291 - RNA, 22 nt, synthetic construct
  source 1..22: mol_type = other RNA
tcccccagctgaagtccttgga

SEQ ID NO: 14292 - RNA, 22 nt, synthetic construct
  source 1..22: mol_type = other RNA
tccccgatcttgttctcactca

SEQ ID NO: 14293 - RNA, 22 nt, synthetic construct
  source 1..22: mol_type = other RNA
tccttggaaaccctcaagtgag

SEQ ID NO: 14294 - RNA, 22 nt, synthetic construct
  source 1..22: mol_type = other RNA
tcgcagctctcagccaccttcc

SEQ ID NO: 14295 - RNA, 22 nt, synthetic construct
  source 1..22: mol_type = other RNA
tcggggacgagggtgtctcgca

SEQ ID NO: 14296 - RNA, 22 nt, synthetic construct
  source 1..22: mol_type = other RNA
tcgtccccgatcttgttctcac

SEQ ID NO: 14297 - RNA, 22 nt, synthetic construct
  source 1..22: mol_type = other RNA
tctcactcagcgcatccaggct

SEQ ID NO: 14298 - RNA, 22 nt, synthetic construct
  source 1..22: mol_type = other RNA
tctcagccaccttcccccagct

SEQ ID NO: 14299 - RNA, 22 nt, synthetic construct
  source 1..22: mol_type = other RNA
tctcgcagctctcagccacctt

SEQ ID NO: 14300 - RNA, 22 nt, synthetic construct
  source 1..22: mol_type = other RNA
tctgattccacctgcagcctgg

SEQ ID NO: 14301 - RNA, 22 nt, synthetic construct
  source 1..22: mol_type = other RNA
tcttgttctcactcagcgcatc

SEQ ID NO: 14302 - RNA, 22 nt, synthetic construct
  source 1..22: mol_type = other RNA
tgaagtccttggaaaccctcaa

SEQ ID NO: 14303 - RNA, 22 nt, synthetic construct
  source 1..22: mol_type = other RNA
tgagaacaagatcggggacgag

SEQ ID NO: 14304 - RNA, 22 nt, synthetic construct
  source 1..22: mol_type = other RNA
tgagagctgcgagacaccctcg

SEQ ID NO: 14305 - RNA, 22 nt, synthetic construct
  source 1..22: mol_type = other RNA
tgagctgggcctgcccttcctg

SEQ ID NO: 14306 - RNA, 22 nt, synthetic construct
  source 1..22: mol_type = other RNA
tgagggtttccaaggacttcag

SEQ ID NO: 14307 - RNA, 22 nt, synthetic construct
  source 1..22: mol_type = other RNA
tgagtgagaacaagatcgggga

SEQ ID NO: 14308 - RNA, 22 nt, synthetic construct
  source 1..22: mol_type = other RNA
tgagtgagctgggcctgccctt

SEQ ID NO: 14309 - RNA, 22 nt, synthetic construct
  source 1..22: mol_type = other RNA
tgatggcccccatctgattcca

SEQ ID NO: 14310 - RNA, 22 nt, synthetic construct
  source 1..22: mol_type = other RNA
tgattccacctgcagcctggat

SEQ ID NO: 14311 - RNA, 22 nt, synthetic construct
  source 1..22: mol_type = other RNA
tgcagcctggatgcgctgagtg

SEQ ID NO: 14312 - RNA, 22 nt, synthetic construct
  source 1..22: mol_type = other RNA
tgcaggtggaatcagatggggg

SEQ ID NO: 14313 - RNA, 22 nt, synthetic construct
  source 1..22: mol_type = other RNA
tgcgagacaccctcgtccccga

SEQ ID NO: 14314 - RNA, 22 nt, synthetic construct
  source 1..22: mol_type = other RNA
tgcgctgagtgagaacaagatc

SEQ ID NO: 14315 - RNA, 22 nt, synthetic construct
  source 1..22: mol_type = other RNA
tggaaaccctcaagtgagtgag

SEQ ID NO: 14316 - RNA, 22 nt, synthetic construct
  source 1..22: mol_type = other RNA
tggaatcagatgggggccatca

SEQ ID NO: 14317 - RNA, 22 nt, synthetic construct
  source 1..22: mol_type = other RNA
tggatgcgctgagtgagaacaa

SEQ ID NO: 14318 - RNA, 22 nt, synthetic construct
  source 1..22: mol_type = other RNA
tggcccccatctgattccacct

SEQ ID NO: 14319 - RNA, 22 nt, synthetic construct
  source 1..22: mol_type = other RNA
tggctgagagctgcgagacacc

SEQ ID NO: 14320 - RNA, 22 nt, synthetic construct
  source 1..22: mol_type = other RNA
tgggcctgcccttcctgctgaa

SEQ ID NO: 14321 - RNA, 22 nt, synthetic construct
  source 1..22: mol_type = other RNA
tgggggaaggtggctgagagct

SEQ ID NO: 14322 - RNA, 22 nt, synthetic construct
  source 1..22: mol_type = other RNA
tgggggcccgattcagcaggaa

SEQ ID NO: 14323 - RNA, 22 nt, synthetic construct
  source 1..22: mol_type = other RNA
tgtctcgcagctctcagccacc

SEQ ID NO: 14324 - RNA, 22 nt, synthetic construct
  source 1..22: mol_type = other RNA
tgttctcactcagcgcatccag

SEQ ID NO: 14325 - RNA, 22 nt, synthetic construct
  source 1..22: mol_type = other RNA
ttcagcaggaagggcaggccca

SEQ ID NO: 14326 - RNA, 22 nt, synthetic construct
  source 1..22: mol_type = other RNA
ttcagctgggggaaggtggctg

SEQ ID NO: 14327 - RNA, 22 nt, synthetic construct
  source 1..22: mol_type = other RNA
ttccaaggacttcagctggggg

SEQ ID NO: 14328 - RNA, 22 nt, synthetic construct
  source 1..22: mol_type = other RNA
ttccacctgcagcctggatgcg

SEQ ID NO: 14329 - RNA, 22 nt, synthetic construct
  source 1..22: mol_type = other RNA
ttcccccagctgaagtccttgg

SEQ ID NO: 14330 - RNA, 22 nt, synthetic construct
  source 1..22: mol_type = other RNA
ttctcactcagcgcatccaggc

SEQ ID NO: 14331 - RNA, 22 nt, synthetic construct
  source 1..22: mol_type = other RNA
ttgagggtttccaaggacttca

SEQ ID NO: 14332 - RNA, 22 nt, synthetic construct
  source 1..22: mol_type = other RNA
ttggaaaccctcaagtgagtga

SEQ ID NO: 14333 - RNA, 22 nt, synthetic construct
  source 1..22: mol_type = other RNA
ttgggggcccgattcagcagga

SEQ ID NO: 14334 - RNA, 22 nt, synthetic construct
  source 1..22: mol_type = other RNA
ttgttctcactcagcgcatcca

SEQ ID NO: 14335 - RNA, 22 nt, synthetic construct
  source 1..22: mol_type = other RNA
tttccaaggacttcagctgggg

SEQ ID NO: 14336 - RNA, 22 nt, synthetic construct
  source 1..22: mol_type = other RNA
tttgggggcccgattcagcagg

SEQ ID NO: 14337 - RNA, 20 nt, synthetic construct
  source 1..20: mol_type = other RNA
aaactcgccgaggccctgcc

SEQ ID NO: 14338 - RNA, 20 nt, synthetic construct
  source 1..20: mol_type = other RNA
aacaacatcactgacctggg

SEQ ID NO: 14339 - RNA, 20 nt, synthetic construct
  source 1..20: mol_type = other RNA
aacatcactgacctgggtgc

SEQ ID NO: 14340 - RNA, 20 nt, synthetic construct
  source 1..20: mol_type = other RNA
aactcgccgaggccctgcct

SEQ ID NO: 14341 - RNA, 20 nt, synthetic construct
  source 1..20: mol_type = other RNA
aaggcagggcctcggcgagt

SEQ ID NO: 14342 - RNA, 20 nt, synthetic construct
  source 1..20: mol_type = other RNA
aaggtgagtggggccccgga

SEQ ID NO: 14343 - RNA, 20 nt, synthetic construct
  source 1..20: mol_type = other RNA
aagtttggtcctgagccctc

SEQ ID NO: 14344 - RNA, 20 nt, synthetic construct
  source 1..20: mol_type = other RNA
acaaactcgccgaggccctg

SEQ ID NO: 14345 - RNA, 20 nt, synthetic construct
  source 1..20: mol_type = other RNA
acaacatcactgacctgggt

SEQ ID NO: 14346 - RNA, 20 nt, synthetic construct
  source 1..20: mol_type = other RNA
acacagtgagggggagggct

SEQ ID NO: 14347 - RNA, 20 nt, synthetic construct
  source 1..20: mol_type = other RNA
acagactgcggggacacagt

SEQ ID NO: 14348 - RNA, 20 nt, synthetic construct
  source 1..20: mol_type = other RNA
acagtgagggggagggctca

SEQ ID NO: 14349 - RNA, 20 nt, synthetic construct
  source 1..20: mol_type = other RNA
acatcactgacctgggtgcc

SEQ ID NO: 14350 - RNA, 20 nt, synthetic construct
  source 1..20: mol_type = other RNA
acccaggtcagtgatgttgt

SEQ ID NO: 14351 - RNA, 20 nt, synthetic construct
  source 1..20: mol_type = other RNA
accggtatccggggccccac

SEQ ID NO: 14352 - RNA, 20 nt, synthetic construct
  source 1..20: mol_type = other RNA
acctgaccggtatccggggc

SEQ ID NO: 14353 - RNA, 20 nt, synthetic construct
  source 1..20: mol_type = other RNA
acctgggtgcctacaaactc

SEQ ID NO: 14354 - RNA, 20 nt, synthetic construct
  source 1..20: mol_type = other RNA
accttagcctgagcagggat

SEQ ID NO: 14355 - RNA, 20 nt, synthetic construct
  source 1..20: mol_type = other RNA
actcaccttagcctgagcag

SEQ ID NO: 14356 - RNA, 20 nt, synthetic construct
  source 1..20: mol_type = other RNA
actcgccgaggccctgcctt

SEQ ID NO: 14357 - RNA, 20 nt, synthetic construct
  source 1..20: mol_type = other RNA
actgacctgggtgcctacaa

SEQ ID NO: 14358 - RNA, 20 nt, synthetic construct
  source 1..20: mol_type = other RNA
actgcggggacacagtgagg

SEQ ID NO: 14359 - RNA, 20 nt, synthetic construct
  source 1..20: mol_type = other RNA
actgtgtccccgcagtctgt

SEQ ID NO: 14360 - RNA, 20 nt, synthetic construct
  source 1..20: mol_type = other RNA
agaacaacatcactgacctg

SEQ ID NO: 14361 - RNA, 20 nt, synthetic construct
  source 1..20: mol_type = other RNA
agactgcggggacacagtga

SEQ ID NO: 14362 - RNA, 20 nt, synthetic construct
  source 1..20: mol_type = other RNA
agcacctgaccggtatccgg

SEQ ID NO: 14363 - RNA, 20 nt, synthetic construct
  source 1..20: mol_type = other RNA
agcagggatgcagcgagcga

SEQ ID NO: 14364 - RNA, 20 nt, synthetic construct
  source 1..20: mol_type = other RNA
agccccccagctcagcacct

SEQ ID NO: 14365 - RNA, 20 nt, synthetic construct
  source 1..20: mol_type = other RNA
agccctccccctcactgtgt

SEQ ID NO: 14366 - RNA, 20 nt, synthetic construct
  source 1..20: mol_type = other RNA
agcctgagcagggatgcagc

SEQ ID NO: 14367 - RNA, 20 nt, synthetic construct
  source 1..20: mol_type = other RNA
agcgaaggcagggcctcggc

SEQ ID NO: 14368 - RNA, 20 nt, synthetic construct
  source 1..20: mol_type = other RNA
agcgagcgaaggcagggcct

SEQ ID NO: 14369 - RNA, 20 nt, synthetic construct
  source 1..20: mol_type = other RNA
agctcagcacctgaccggta

SEQ ID NO: 14370 - RNA, 20 nt, synthetic construct
  source 1..20: mol_type = other RNA
aggcacccaggtcagtgatg

SEQ ID NO: 14371 - RNA, 20 nt, synthetic construct
  source 1..20: mol_type = other RNA
aggcagggcctcggcgagtt

SEQ ID NO: 14372 - RNA, 20 nt, synthetic construct
  source 1..20: mol_type = other RNA
aggccctgccttcgctcgct

SEQ ID NO: 14373 - RNA, 20 nt, synthetic construct
  source 1..20: mol_type = other RNA
aggctaaggtgagtggggcc

SEQ ID NO: 14374 - RNA, 20 nt, synthetic construct
  source 1..20: mol_type = other RNA
agggatgcagcgagcgaagg

SEQ ID NO: 14375 - RNA, 20 nt, synthetic construct
  source 1..20: mol_type = other RNA
agggcctcggcgagtttgta

SEQ ID NO: 14376 - RNA, 20 nt, synthetic construct
  source 1..20: mol_type = other RNA
agggggagggctcaggacca

SEQ ID NO: 14377 - RNA, 20 nt, synthetic construct
  source 1..20: mol_type = other RNA
aggtcagtgatgttgttctg

SEQ ID NO: 14378 - RNA, 20 nt, synthetic construct
  source 1..20: mol_type = other RNA
aggtgagtggggccccggat

SEQ ID NO: 14379 - RNA, 20 nt, synthetic construct
  source 1..20: mol_type = other RNA
agtctgtcccagaacaacat

SEQ ID NO: 14380 - RNA, 20 nt, synthetic construct
  source 1..20: mol_type = other RNA
agtgagggggagggctcagg

SEQ ID NO: 14381 - RNA, 20 nt, synthetic construct
  source 1..20: mol_type = other RNA
agtgatgttgttctgggaca

SEQ ID NO: 14382 - RNA, 20 nt, synthetic construct
  source 1..20: mol_type = other RNA
agtggggccccggataccgg

SEQ ID NO: 14383 - RNA, 20 nt, synthetic construct
  source 1..20: mol_type = other RNA
agtttggtcctgagccctcc

SEQ ID NO: 14384 - RNA, 20 nt, synthetic construct
  source 1..20: mol_type = other RNA
agtttgtaggcacccaggtc

SEQ ID NO: 14385 - RNA, 20 nt, synthetic construct
  source 1..20: mol_type = other RNA
ataccggtcaggtgctgagc

SEQ ID NO: 14386 - RNA, 20 nt, synthetic construct
  source 1..20: mol_type = other RNA
atcactgacctgggtgccta

SEQ ID NO: 14387 - RNA, 20 nt, synthetic construct
  source 1..20: mol_type = other RNA
atccctgctcaggctaaggt

SEQ ID NO: 14388 - RNA, 20 nt, synthetic construct
  source 1..20: mol_type = other RNA
atccggggccccactcacct

SEQ ID NO: 14389 - RNA, 20 nt, synthetic construct
  source 1..20: mol_type = other RNA
atgcaagtttggtcctgagc

SEQ ID NO: 14390 - RNA, 20 nt, synthetic construct
  source 1..20: mol_type = other RNA
atgcagcgagcgaaggcagg

SEQ ID NO: 14391 - RNA, 20 nt, synthetic construct
  source 1..20: mol_type = other RNA
atgttgttctgggacagact

SEQ ID NO: 14392 - RNA, 20 nt, synthetic construct
  source 1..20: mol_type = other RNA
caaactcgccgaggccctgc

SEQ ID NO: 14393 - RNA, 20 nt, synthetic construct
  source 1..20: mol_type = other RNA
caacatcactgacctgggtg

SEQ ID NO: 14394 - RNA, 20 nt, synthetic construct
  source 1..20: mol_type = other RNA
caagtttggtcctgagccct

SEQ ID NO: 14395 - RNA, 20 nt, synthetic construct
  source 1..20: mol_type = other RNA
cacagtgagggggagggctc

SEQ ID NO: 14396 - RNA, 20 nt, synthetic construct
  source 1..20: mol_type = other RNA
cacccaggtcagtgatgttg

SEQ ID NO: 14397 - RNA, 20 nt, synthetic construct
  source 1..20: mol_type = other RNA
cacctgaccggtatccgggg

SEQ ID NO: 14398 - RNA, 20 nt, synthetic construct
  source 1..20: mol_type = other RNA
caccttagcctgagcaggga

SEQ ID NO: 14399 - RNA, 20 nt, synthetic construct
  source 1..20: mol_type = other RNA
cactcaccttagcctgagca

SEQ ID NO: 14400 - RNA, 20 nt, synthetic construct
  source 1..20: mol_type = other RNA
cactgacctgggtgcctaca

SEQ ID NO: 14401 - RNA, 20 nt, synthetic construct
  source 1..20: mol_type = other RNA
cactgtgtccccgcagtctg

SEQ ID NO: 14402 - RNA, 20 nt, synthetic construct
  source 1..20: mol_type = other RNA
cagaacaacatcactgacct

SEQ ID NO: 14403 - RNA, 20 nt, synthetic construct
  source 1..20: mol_type = other RNA
cagactgcggggacacagtg

SEQ ID NO: 14404 - RNA, 20 nt, synthetic construct
  source 1..20: mol_type = other RNA
cagcacctgaccggtatccg

SEQ ID NO: 14405 - RNA, 20 nt, synthetic construct
  source 1..20: mol_type = other RNA
cagcgagcgaaggcagggcc

SEQ ID NO: 14406 - RNA, 20 nt, synthetic construct
  source 1..20: mol_type = other RNA
cagctcagcacctgaccggt

SEQ ID NO: 14407 - RNA, 20 nt, synthetic construct
  source 1..20: mol_type = other RNA
caggctaaggtgagtggggc

SEQ ID NO: 14408 - RNA, 20 nt, synthetic construct
  source 1..20: mol_type = other RNA
cagggatgcagcgagcgaag

SEQ ID NO: 14409 - RNA, 20 nt, synthetic construct
  source 1..20: mol_type = other RNA
cagggcctcggcgagtttgt

SEQ ID NO: 14410 - RNA, 20 nt, synthetic construct
  source 1..20: mol_type = other RNA
caggtcagtgatgttgttct

SEQ ID NO: 14411 - RNA, 20 nt, synthetic construct
  source 1..20: mol_type = other RNA
cagtctgtcccagaacaaca

SEQ ID NO: 14412 - RNA, 20 nt, synthetic construct
  source 1..20: mol_type = other RNA
cagtgagggggagggctcag

SEQ ID NO: 14413 - RNA, 20 nt, synthetic construct
  source 1..20: mol_type = other RNA
cagtgatgttgttctgggac

SEQ ID NO: 14414 - RNA, 20 nt, synthetic construct
  source 1..20: mol_type = other RNA
catcactgacctgggtgcct

SEQ ID NO: 14415 - RNA, 20 nt, synthetic construct
  source 1..20: mol_type = other RNA
catccctgctcaggctaagg

SEQ ID NO: 14416 - RNA, 20 nt, synthetic construct
  source 1..20: mol_type = other RNA
catgcaagtttggtcctgag

SEQ ID NO: 14417 - RNA, 20 nt, synthetic construct
  source 1..20: mol_type = other RNA
ccactcaccttagcctgagc

SEQ ID NO: 14418 - RNA, 20 nt, synthetic construct
  source 1..20: mol_type = other RNA
ccagaacaacatcactgacc

SEQ ID NO: 14419 - RNA, 20 nt, synthetic construct
  source 1..20: mol_type = other RNA
ccagctcagcacctgaccgg

SEQ ID NO: 14420 - RNA, 20 nt, synthetic construct
  source 1..20: mol_type = other RNA
ccaggtcagtgatgttgttc

SEQ ID NO: 14421 - RNA, 20 nt, synthetic construct
  source 1..20: mol_type = other RNA
cccactcaccttagcctgag

SEQ ID NO: 14422 - RNA, 20 nt, synthetic construct
  source 1..20: mol_type = other RNA
cccagaacaacatcactgac

SEQ ID NO: 14423 - RNA, 20 nt, synthetic construct
  source 1..20: mol_type = other RNA
cccagctcagcacctgaccg

SEQ ID NO: 14424 - RNA, 20 nt, synthetic construct
  source 1..20: mol_type = other RNA
cccaggtcagtgatgttgtt

SEQ ID NO: 14425 - RNA, 20 nt, synthetic construct
  source 1..20: mol_type = other RNA
ccccactcaccttagcctga

SEQ ID NO: 14426 - RNA, 20 nt, synthetic construct
  source 1..20: mol_type = other RNA
ccccagctcagcacctgacc

SEQ ID NO: 14427 - RNA, 20 nt, synthetic construct
  source 1..20: mol_type = other RNA
cccccagctcagcacctgac

SEQ ID NO: 14428 - RNA, 20 nt, synthetic construct
  source 1..20: mol_type = other RNA
ccccccagctcagcacctga

SEQ ID NO: 14429 - RNA, 20 nt, synthetic construct
  source 1..20: mol_type = other RNA
ccccctcactgtgtccccgc

SEQ ID NO: 14430 - RNA, 20 nt, synthetic construct
  source 1..20: mol_type = other RNA
ccccgcagtctgtcccagaa

SEQ ID NO: 14431 - RNA, 20 nt, synthetic construct
  source 1..20: mol_type = other RNA
ccccggataccggtcaggtg

SEQ ID NO: 14432 - RNA, 20 nt, synthetic construct
  source 1..20: mol_type = other RNA
cccctcactgtgtccccgca

SEQ ID NO: 14433 - RNA, 20 nt, synthetic construct
  source 1..20: mol_type = other RNA
cccgcagtctgtcccagaac

SEQ ID NO: 14434 - RNA, 20 nt, synthetic construct
  source 1..20: mol_type = other RNA
cccggataccggtcaggtgc

SEQ ID NO: 14435 - RNA, 20 nt, synthetic construct
  source 1..20: mol_type = other RNA
ccctcactgtgtccccgcag

SEQ ID NO: 14436 - RNA, 20 nt, synthetic construct
  source 1..20: mol_type = other RNA
ccctccccctcactgtgtcc

SEQ ID NO: 14437 - RNA, 20 nt, synthetic construct
  source 1..20: mol_type = other RNA
ccctgccttcgctcgctgca

SEQ ID NO: 14438 - RNA, 20 nt, synthetic construct
  source 1..20: mol_type = other RNA
ccctgctcaggctaaggtga

SEQ ID NO: 14439 - RNA, 20 nt, synthetic construct
  source 1..20: mol_type = other RNA
ccgaggccctgccttcgctc

SEQ ID NO: 14440 - RNA, 20 nt, synthetic construct
  source 1..20: mol_type = other RNA
ccgcagtctgtcccagaaca

SEQ ID NO: 14441 - RNA, 20 nt, synthetic construct
  source 1..20: mol_type = other RNA
ccggataccggtcaggtgct

SEQ ID NO: 14442 - RNA, 20 nt, synthetic construct
  source 1..20: mol_type = other RNA
ccggggccccactcacctta

SEQ ID NO: 14443 - RNA, 20 nt, synthetic construct
  source 1..20: mol_type = other RNA
ccggtatccggggccccact

SEQ ID NO: 14444 - RNA, 20 nt, synthetic construct
  source 1..20: mol_type = other RNA
cctacaaactcgccgaggcc

SEQ ID NO: 14445 - RNA, 20 nt, synthetic construct
  source 1..20: mol_type = other RNA
cctcactgtgtccccgcagt

SEQ ID NO: 14446 - RNA, 20 nt, synthetic construct
  source 1..20: mol_type = other RNA
cctccccctcactgtgtccc

SEQ ID NO: 14447 - RNA, 20 nt, synthetic construct
  source 1..20: mol_type = other RNA
cctcggcgagtttgtaggca

SEQ ID NO: 14448 - RNA, 20 nt, synthetic construct
  source 1..20: mol_type = other RNA
cctgaccggtatccggggcc

SEQ ID NO: 14449 - RNA, 20 nt, synthetic construct
  source 1..20: mol_type = other RNA
cctgagcagggatgcagcga

SEQ ID NO: 14450 - RNA, 20 nt, synthetic construct
  source 1..20: mol_type = other RNA
cctgagccctccccctcact

SEQ ID NO: 14451 - RNA, 20 nt, synthetic construct
  source 1..20: mol_type = other RNA
cctgccttcgctcgctgcat

SEQ ID NO: 14452 - RNA, 20 nt, synthetic construct
  source 1..20: mol_type = other RNA
cctgctcaggctaaggtgag

SEQ ID NO: 14453 - RNA, 20 nt, synthetic construct
  source 1..20: mol_type = other RNA
cctgggtgcctacaaactcg

SEQ ID NO: 14454 - RNA, 20 nt, synthetic construct
  source 1..20: mol_type = other RNA
ccttagcctgagcagggatg

SEQ ID NO: 14455 - RNA, 20 nt, synthetic construct
  source 1..20: mol_type = other RNA
ccttcgctcgctgcatccct

SEQ ID NO: 14456 - RNA, 20 nt, synthetic construct
  source 1..20: mol_type = other RNA
cgaaggcagggcctcggcga

SEQ ID NO: 14457 - RNA, 20 nt, synthetic construct
  source 1..20: mol_type = other RNA
cgagcgaaggcagggcctcg

SEQ ID NO: 14458 - RNA, 20 nt, synthetic construct
  source 1..20: mol_type = other RNA
cgaggccctgccttcgctcg

SEQ ID NO: 14459 - RNA, 20 nt, synthetic construct
  source 1..20: mol_type = other RNA
cgagtttgtaggcacccagg

SEQ ID NO: 14460 - RNA, 20 nt, synthetic construct
  source 1..20: mol_type = other RNA
cgcagtctgtcccagaacaa

SEQ ID NO: 14461 - RNA, 20 nt, synthetic construct
  source 1..20: mol_type = other RNA
cgccgaggccctgccttcgc

SEQ ID NO: 14462 - RNA, 20 nt, synthetic construct
  source 1..20: mol_type = other RNA
cgctcgctgcatccctgctc

SEQ ID NO: 14463 - RNA, 20 nt, synthetic construct
  source 1..20: mol_type = other RNA
cgctgcatccctgctcaggc

SEQ ID NO: 14464 - RNA, 20 nt, synthetic construct
  source 1..20: mol_type = other RNA
cggataccggtcaggtgctg

SEQ ID NO: 14465 - RNA, 20 nt, synthetic construct
  source 1..20: mol_type = other RNA
cggcgagtttgtaggcaccc

SEQ ID NO: 14466 - RNA, 20 nt, synthetic construct
  source 1..20: mol_type = other RNA
cggggacacagtgaggggga

SEQ ID NO: 14467 - RNA, 20 nt, synthetic construct
  source 1..20: mol_type = other RNA
cggggccccactcaccttag

SEQ ID NO: 14468 - RNA, 20 nt, synthetic construct
  source 1..20: mol_type = other RNA
cggtatccggggccccactc

SEQ ID NO: 14469 - RNA, 20 nt, synthetic construct
  source 1..20: mol_type = other RNA
ctaaggtgagtggggccccg

SEQ ID NO: 14470 - RNA, 20 nt, synthetic construct
  source 1..20: mol_type = other RNA
ctacaaactcgccgaggccc

SEQ ID NO: 14471 - RNA, 20 nt, synthetic construct
  source 1..20: mol_type = other RNA
ctcaccttagcctgagcagg

SEQ ID NO: 14472 - RNA, 20 nt, synthetic construct
  source 1..20: mol_type = other RNA
ctcactgtgtccccgcagtc

SEQ ID NO: 14473 - RNA, 20 nt, synthetic construct
  source 1..20: mol_type = other RNA
ctcagcacctgaccggtatc

SEQ ID NO: 14474 - RNA, 20 nt, synthetic construct
  source 1..20: mol_type = other RNA
ctcaggctaaggtgagtggg

SEQ ID NO: 14475 - RNA, 20 nt, synthetic construct
  source 1..20: mol_type = other RNA
ctccccctcactgtgtcccc

SEQ ID NO: 14476 - RNA, 20 nt, synthetic construct
  source 1..20: mol_type = other RNA
ctcgccgaggccctgccttc

SEQ ID NO: 14477 - RNA, 20 nt, synthetic construct
  source 1..20: mol_type = other RNA
ctcgctgcatccctgctcag

SEQ ID NO: 14478 - RNA, 20 nt, synthetic construct
  source 1..20: mol_type = other RNA
ctcggcgagtttgtaggcac

SEQ ID NO: 14479 - RNA, 20 nt, synthetic construct
  source 1..20: mol_type = other RNA
ctgaccggtatccggggccc

SEQ ID NO: 14480 - RNA, 20 nt, synthetic construct
  source 1..20: mol_type = other RNA
ctgacctgggtgcctacaaa

SEQ ID NO: 14481 - RNA, 20 nt, synthetic construct
  source 1..20: mol_type = other RNA
ctgagcagggatgcagcgag

SEQ ID NO: 14482 - RNA, 20 nt, synthetic construct
  source 1..20: mol_type = other RNA
ctgagccctccccctcactg

SEQ ID NO: 14483 - RNA, 20 nt, synthetic construct
  source 1..20: mol_type = other RNA
ctgcatccctgctcaggcta

SEQ ID NO: 14484 - RNA, 20 nt, synthetic construct
  source 1..20: mol_type = other RNA
ctgccttcgctcgctgcatc

SEQ ID NO: 14485 - RNA, 20 nt, synthetic construct
  source 1..20: mol_type = other RNA
ctgcggggacacagtgaggg

SEQ ID NO: 14486 - RNA, 20 nt, synthetic construct
  source 1..20: mol_type = other RNA
ctgctcaggctaaggtgagt

SEQ ID NO: 14487 - RNA, 20 nt, synthetic construct
  source 1..20: mol_type = other RNA
ctgggacagactgcggggac

SEQ ID NO: 14488 - RNA, 20 nt, synthetic construct
  source 1..20: mol_type = other RNA
ctgggtgcctacaaactcgc

SEQ ID NO: 14489 - RNA, 20 nt, synthetic construct
  source 1..20: mol_type = other RNA
ctgtcccagaacaacatcac

SEQ ID NO: 14490 - RNA, 20 nt, synthetic construct
  source 1..20: mol_type = other RNA
ctgtgtccccgcagtctgtc

SEQ ID NO: 14491 - RNA, 20 nt, synthetic construct
  source 1..20: mol_type = other RNA
cttagcctgagcagggatgc

SEQ ID NO: 14492 - RNA, 20 nt, synthetic construct
  source 1..20: mol_type = other RNA
cttcgctcgctgcatccctg

SEQ ID NO: 14493 - RNA, 20 nt, synthetic construct
  source 1..20: mol_type = other RNA
gaacaacatcactgacctgg

SEQ ID NO: 14494 - RNA, 20 nt, synthetic construct
  source 1..20: mol_type = other RNA
gaaggcagggcctcggcgag

SEQ ID NO: 14495 - RNA, 20 nt, synthetic construct
  source 1..20: mol_type = other RNA
gacacagtgagggggagggc

SEQ ID NO: 14496 - RNA, 20 nt, synthetic construct
  source 1..20: mol_type = other RNA
gacagactgcggggacacag

SEQ ID NO: 14497 - RNA, 20 nt, synthetic construct
  source 1..20: mol_type = other RNA
gaccggtatccggggcccca

SEQ ID NO: 14498 - RNA, 20 nt, synthetic construct
  source 1..20: mol_type = other RNA
gacctgggtgcctacaaact

SEQ ID NO: 14499 - RNA, 20 nt, synthetic construct
  source 1..20: mol_type = other RNA
gactgcggggacacagtgag

SEQ ID NO: 14500 - RNA, 20 nt, synthetic construct
  source 1..20: mol_type = other RNA
gagcagggatgcagcgagcg

SEQ ID NO: 14501 - RNA, 20 nt, synthetic construct
  source 1..20: mol_type = other RNA
gagccctccccctcactgtg

SEQ ID NO: 14502 - RNA, 20 nt, synthetic construct
  source 1..20: mol_type = other RNA
gagcgaaggcagggcctcgg

SEQ ID NO: 14503 - RNA, 20 nt, synthetic construct
  source 1..20: mol_type = other RNA
gaggccctgccttcgctcgc

SEQ ID NO: 14504 - RNA, 20 nt, synthetic construct
  source 1..20: mol_type = other RNA
gagggggagggctcaggacc

SEQ ID NO: 14505 - RNA, 20 nt, synthetic construct
  source 1..20: mol_type = other RNA
gagtggggccccggataccg

SEQ ID NO: 14506 - RNA, 20 nt, synthetic construct
  source 1..20: mol_type = other RNA
gagtttgtaggcacccaggt

SEQ ID NO: 14507 - RNA, 20 nt, synthetic construct
  source 1..20: mol_type = other RNA
gataccggtcaggtgctgag

SEQ ID NO: 14508 - RNA, 20 nt, synthetic construct
  source 1..20: mol_type = other RNA
gatgcagcgagcgaaggcag

SEQ ID NO: 14509 - RNA, 20 nt, synthetic construct
  source 1..20: mol_type = other RNA
gatgttgttctgggacagac

SEQ ID NO: 14510 - RNA, 20 nt, synthetic construct
  source 1..20: mol_type = other RNA
gcaagtttggtcctgagccc

SEQ ID NO: 14511 - RNA, 20 nt, synthetic construct
  source 1..20: mol_type = other RNA
gcacccaggtcagtgatgtt

SEQ ID NO: 14512 - RNA, 20 nt, synthetic construct
  source 1..20: mol_type = other RNA
gcacctgaccggtatccggg

SEQ ID NO: 14513 - RNA, 20 nt, synthetic construct
  source 1..20: mol_type = other RNA
gcagcgagcgaaggcagggc

SEQ ID NO: 14514 - RNA, 20 nt, synthetic construct
  source 1..20: mol_type = other RNA
gcagggatgcagcgagcgaa

SEQ ID NO: 14515 - RNA, 20 nt, synthetic construct
  source 1..20: mol_type = other RNA
gcagggcctcggcgagtttg

SEQ ID NO: 14516 - RNA, 20 nt, synthetic construct
  source 1..20: mol_type = other RNA
gcagtctgtcccagaacaac

SEQ ID NO: 14517 - RNA, 20 nt, synthetic construct
  source 1..20: mol_type = other RNA
gcatccctgctcaggctaag

SEQ ID NO: 14518 - RNA, 20 nt, synthetic construct
  source 1..20: mol_type = other RNA
gccccactcaccttagcctg

SEQ ID NO: 14519 - RNA, 20 nt, synthetic construct
  source 1..20: mol_type = other RNA
gccccccagctcagcacctg

SEQ ID NO: 14520 - RNA, 20 nt, synthetic construct
  source 1..20: mol_type = other RNA
gccccggataccggtcaggt

SEQ ID NO: 14521 - RNA, 20 nt, synthetic construct
  source 1..20: mol_type = other RNA
gccctccccctcactgtgtc

SEQ ID NO: 14522 - RNA, 20 nt, synthetic construct
  source 1..20: mol_type = other RNA
gccctgccttcgctcgctgc

SEQ ID NO: 14523 - RNA, 20 nt, synthetic construct
  source 1..20: mol_type = other RNA
gccgaggccctgccttcgct

SEQ ID NO: 14524 - RNA, 20 nt, synthetic construct
  source 1..20: mol_type = other RNA
gcctacaaactcgccgaggc

SEQ ID NO: 14525 - RNA, 20 nt, synthetic construct
  source 1..20: mol_type = other RNA
gcctcggcgagtttgtaggc

SEQ ID NO: 14526 - RNA, 20 nt, synthetic construct
  source 1..20: mol_type = other RNA
gcctgagcagggatgcagcg

SEQ ID NO: 14527 - RNA, 20 nt, synthetic construct
  source 1..20: mol_type = other RNA
gccttcgctcgctgcatccc

SEQ ID NO: 14528 - RNA, 20 nt, synthetic construct
  source 1..20: mol_type = other RNA
gcgaaggcagggcctcggcg

SEQ ID NO: 14529 - RNA, 20 nt, synthetic construct
  source 1..20: mol_type = other RNA
gcgagcgaaggcagggcctc

SEQ ID NO: 14530 - RNA, 20 nt, synthetic construct
  source 1..20: mol_type = other RNA
gcgagtttgtaggcacccag

SEQ ID NO: 14531 - RNA, 20 nt, synthetic construct
  source 1..20: mol_type = other RNA
gcggggacacagtgaggggg

SEQ ID NO: 14532 - RNA, 20 nt, synthetic construct
  source 1..20: mol_type = other RNA
gctaaggtgagtggggcccc

SEQ ID NO: 14533 - RNA, 20 nt, synthetic construct
  source 1..20: mol_type = other RNA
gctcagcacctgaccggtat

SEQ ID NO: 14534 - RNA, 20 nt, synthetic construct
  source 1..20: mol_type = other RNA
gctcaggctaaggtgagtgg

SEQ ID NO: 14535 - RNA, 20 nt, synthetic construct
  source 1..20: mol_type = other RNA
gctcgctgcatccctgctca

SEQ ID NO: 14536 - RNA, 20 nt, synthetic construct
  source 1..20: mol_type = other RNA
gctgcatccctgctcaggct

SEQ ID NO: 14537 - RNA, 20 nt, synthetic construct
  source 1..20: mol_type = other RNA
ggacacagtgagggggaggg

SEQ ID NO: 14538 - RNA, 20 nt, synthetic construct
  source 1..20: mol_type = other RNA
ggacagactgcggggacaca

SEQ ID NO: 14539 - RNA, 20 nt, synthetic construct
  source 1..20: mol_type = other RNA
ggataccggtcaggtgctga

SEQ ID NO: 14540 - RNA, 20 nt, synthetic construct
  source 1..20: mol_type = other RNA
ggatgcagcgagcgaaggca

SEQ ID NO: 14541 - RNA, 20 nt, synthetic construct
  source 1..20: mol_type = other RNA
ggcacccaggtcagtgatgt

SEQ ID NO: 14542 - RNA, 20 nt, synthetic construct
  source 1..20: mol_type = other RNA
ggcagggcctcggcgagttt

SEQ ID NO: 14543 - RNA, 20 nt, synthetic construct
  source 1..20: mol_type = other RNA
ggccccactcaccttagcct

SEQ ID NO: 14544 - RNA, 20 nt, synthetic construct
  source 1..20: mol_type = other RNA
ggccccggataccggtcagg

SEQ ID NO: 14545 - RNA, 20 nt, synthetic construct
  source 1..20: mol_type = other RNA
ggccctgccttcgctcgctg

SEQ ID NO: 14546 - RNA, 20 nt, synthetic construct
  source 1..20: mol_type = other RNA
ggcctcggcgagtttgtagg

SEQ ID NO: 14547 - RNA, 20 nt, synthetic construct
  source 1..20: mol_type = other RNA
ggcgagtttgtaggcaccca

SEQ ID NO: 14548 - RNA, 20 nt, synthetic construct
  source 1..20: mol_type = other RNA
ggctaaggtgagtggggccc

SEQ ID NO: 14549 - RNA, 20 nt, synthetic construct
  source 1..20: mol_type = other RNA
gggacacagtgagggggagg

SEQ ID NO: 14550 - RNA, 20 nt, synthetic construct
  source 1..20: mol_type = other RNA
gggacagactgcggggacac

SEQ ID NO: 14551 - RNA, 20 nt, synthetic construct
  source 1..20: mol_type = other RNA
gggatgcagcgagcgaaggc

SEQ ID NO: 14552 - RNA, 20 nt, synthetic construct
  source 1..20: mol_type = other RNA
gggccccactcaccttagcc

SEQ ID NO: 14553 - RNA, 20 nt, synthetic construct
  source 1..20: mol_type = other RNA
gggccccggataccggtcag

SEQ ID NO: 14554 - RNA, 20 nt, synthetic construct
  source 1..20: mol_type = other RNA
gggcctcggcgagtttgtag

SEQ ID NO: 14555 - RNA, 20 nt, synthetic construct
  source 1..20: mol_type = other RNA
ggggacacagtgagggggag

SEQ ID NO: 14556 - RNA, 20 nt, synthetic construct
  source 1..20: mol_type = other RNA
ggggagggctcaggaccaaa

SEQ ID NO: 14557 - RNA, 20 nt, synthetic construct
  source 1..20: mol_type = other RNA
ggggccccactcaccttagc

SEQ ID NO: 14558 - RNA, 20 nt, synthetic construct
  source 1..20: mol_type = other RNA
ggggccccggataccggtca

SEQ ID NO: 14559 - RNA, 20 nt, synthetic construct
  source 1..20: mol_type = other RNA
gggggagggctcaggaccaa

SEQ ID NO: 14560 - RNA, 20 nt, synthetic construct
  source 1..20: mol_type = other RNA
gggtgcctacaaactcgccg

SEQ ID NO: 14561 - RNA, 20 nt, synthetic construct
  source 1..20: mol_type = other RNA
ggtatccggggccccactca

SEQ ID NO: 14562 - RNA, 20 nt, synthetic construct
  source 1..20: mol_type = other RNA
ggtcagtgatgttgttctgg

SEQ ID NO: 14563 - RNA, 20 nt, synthetic construct
  source 1..20: mol_type = other RNA
ggtcctgagccctccccctc

SEQ ID NO: 14564 - RNA, 20 nt, synthetic construct
  source 1..20: mol_type = other RNA
ggtgagtggggccccggata

SEQ ID NO: 14565 - RNA, 20 nt, synthetic construct
  source 1..20: mol_type = other RNA
ggtgcctacaaactcgccga

SEQ ID NO: 14566 - RNA, 20 nt, synthetic construct
  source 1..20: mol_type = other RNA
gtaggcacccaggtcagtga

SEQ ID NO: 14567 - RNA, 20 nt, synthetic construct
  source 1..20: mol_type = other RNA
gtatccggggccccactcac

SEQ ID NO: 14568 - RNA, 20 nt, synthetic construct
  source 1..20: mol_type = other RNA
gtcagtgatgttgttctggg

SEQ ID NO: 14569 - RNA, 20 nt, synthetic construct
  source 1..20: mol_type = other RNA
gtcccagaacaacatcactg

SEQ ID NO: 14570 - RNA, 20 nt, synthetic construct
  source 1..20: mol_type = other RNA
gtccccgcagtctgtcccag

SEQ ID NO: 14571 - RNA, 20 nt, synthetic construct
  source 1..20: mol_type = other RNA
gtcctgagccctccccctca

SEQ ID NO: 14572 - RNA, 20 nt, synthetic construct
  source 1..20: mol_type = other RNA
gtctgtcccagaacaacatc

SEQ ID NO: 14573 - RNA, 20 nt, synthetic construct
  source 1..20: mol_type = other RNA
gtgagggggagggctcagga

SEQ ID NO: 14574 - RNA, 20 nt, synthetic construct
  source 1..20: mol_type = other RNA
gtgagtggggccccggatac

SEQ ID NO: 14575 - RNA, 20 nt, synthetic construct
  source 1..20: mol_type = other RNA
gtgatgttgttctgggacag

SEQ ID NO: 14576 - RNA, 20 nt, synthetic construct
  source 1..20: mol_type = other RNA
gtgcctacaaactcgccgag

SEQ ID NO: 14577 - RNA, 20 nt, synthetic construct
  source 1..20: mol_type = other RNA
gtggggccccggataccggt

SEQ ID NO: 14578 - RNA, 20 nt, synthetic construct
  source 1..20: mol_type = other RNA
gtgtccccgcagtctgtccc

SEQ ID NO: 14579 - RNA, 20 nt, synthetic construct
  source 1..20: mol_type = other RNA
gttctgggacagactgcggg

SEQ ID NO: 14580 - RNA, 20 nt, synthetic construct
  source 1..20: mol_type = other RNA
gttgttctgggacagactgc

SEQ ID NO: 14581 - RNA, 20 nt, synthetic construct
  source 1..20: mol_type = other RNA
gtttggtcctgagccctccc

SEQ ID NO: 14582 - RNA, 20 nt, synthetic construct
  source 1..20: mol_type = other RNA
gtttgtaggcacccaggtca

SEQ ID NO: 14583 - RNA, 20 nt, synthetic construct
  source 1..20: mol_type = other RNA
taaggtgagtggggccccgg

SEQ ID NO: 14584 - RNA, 20 nt, synthetic construct
  source 1..20: mol_type = other RNA
tacaaactcgccgaggccct

SEQ ID NO: 14585 - RNA, 20 nt, synthetic construct
  source 1..20: mol_type = other RNA
taccggtcaggtgctgagct

SEQ ID NO: 14586 - RNA, 20 nt, synthetic construct
  source 1..20: mol_type = other RNA
tagcctgagcagggatgcag

SEQ ID NO: 14587 - RNA, 20 nt, synthetic construct
  source 1..20: mol_type = other RNA
taggcacccaggtcagtgat

SEQ ID NO: 14588 - RNA, 20 nt, synthetic construct
  source 1..20: mol_type = other RNA
tatccggggccccactcacc

SEQ ID NO: 14589 - RNA, 20 nt, synthetic construct
  source 1..20: mol_type = other RNA
tcaccttagcctgagcaggg

SEQ ID NO: 14590 - RNA, 20 nt, synthetic construct
  source 1..20: mol_type = other RNA
tcactgacctgggtgcctac

SEQ ID NO: 14591 - RNA, 20 nt, synthetic construct
  source 1..20: mol_type = other RNA
tcactgtgtccccgcagtct

SEQ ID NO: 14592 - RNA, 20 nt, synthetic construct
  source 1..20: mol_type = other RNA
tcagcacctgaccggtatcc

SEQ ID NO: 14593 - RNA, 20 nt, synthetic construct
  source 1..20: mol_type = other RNA
tcaggctaaggtgagtgggg

SEQ ID NO: 14594 - RNA, 20 nt, synthetic construct
  source 1..20: mol_type = other RNA
tcagtgatgttgttctggga

SEQ ID NO: 14595 - RNA, 20 nt, synthetic construct
  source 1..20: mol_type = other RNA
tcccagaacaacatcactga

SEQ ID NO: 14596 - RNA, 20 nt, synthetic construct
  source 1..20: mol_type = other RNA
tccccctcactgtgtccccg

SEQ ID NO: 14597 - RNA, 20 nt, synthetic construct
  source 1..20: mol_type = other RNA
tccccgcagtctgtcccaga

SEQ ID NO: 14598 - RNA, 20 nt, synthetic construct
  source 1..20: mol_type = other RNA
tccctgctcaggctaaggtg

SEQ ID NO: 14599 - RNA, 20 nt, synthetic construct
  source 1..20: mol_type = other RNA
tccggggccccactcacctt

SEQ ID NO: 14600 - RNA, 20 nt, synthetic construct
  source 1..20: mol_type = other RNA
tcctgagccctccccctcac

SEQ ID NO: 14601 - RNA, 20 nt, synthetic construct
  source 1..20: mol_type = other RNA
tcgccgaggccctgccttcg

SEQ ID NO: 14602 - RNA, 20 nt, synthetic construct
  source 1..20: mol_type = other RNA
tcgctcgctgcatccctgct

SEQ ID NO: 14603 - RNA, 20 nt, synthetic construct
  source 1..20: mol_type = other RNA
tcgctgcatccctgctcagg

SEQ ID NO: 14604 - RNA, 20 nt, synthetic construct
  source 1..20: mol_type = other RNA
tcggcgagtttgtaggcacc

SEQ ID NO: 14605 - RNA, 20 nt, synthetic construct
  source 1..20: mol_type = other RNA
tctgggacagactgcgggga

SEQ ID NO: 14606 - RNA, 20 nt, synthetic construct
  source 1..20: mol_type = other RNA
tctgtcccagaacaacatca

SEQ ID NO: 14607 - RNA, 20 nt, synthetic construct
  source 1..20: mol_type = other RNA
tgaccggtatccggggcccc

SEQ ID NO: 14608 - RNA, 20 nt, synthetic construct
  source 1..20: mol_type = other RNA
tgacctgggtgcctacaaac

SEQ ID NO: 14609 - RNA, 20 nt, synthetic construct
  source 1..20: mol_type = other RNA
tgagcagggatgcagcgagc

SEQ ID NO: 14610 - RNA, 20 nt, synthetic construct
  source 1..20: mol_type = other RNA
tgagccctccccctcactgt

SEQ ID NO: 14611 - RNA, 20 nt, synthetic construct
  source 1..20: mol_type = other RNA
tgagggggagggctcaggac

SEQ ID NO: 14612 - RNA, 20 nt, synthetic construct
  source 1..20: mol_type = other RNA
tgagtggggccccggatacc

SEQ ID NO: 14613 - RNA, 20 nt, synthetic construct
  source 1..20: mol_type = other RNA
tgatgttgttctgggacaga

SEQ ID NO: 14614 - RNA, 20 nt, synthetic construct
  source 1..20: mol_type = other RNA
tgcaagtttggtcctgagcc

SEQ ID NO: 14615 - RNA, 20 nt, synthetic construct
  source 1..20: mol_type = other RNA
tgcagcgagcgaaggcaggg

SEQ ID NO: 14616 - RNA, 20 nt, synthetic construct
  source 1..20: mol_type = other RNA
tgcatccctgctcaggctaa

SEQ ID NO: 14617 - RNA, 20 nt, synthetic construct
  source 1..20: mol_type = other RNA
tgcctacaaactcgccgagg

SEQ ID NO: 14618 - RNA, 20 nt, synthetic construct
  source 1..20: mol_type = other RNA
tgccttcgctcgctgcatcc

SEQ ID NO: 14619 - RNA, 20 nt, synthetic construct
  source 1..20: mol_type = other RNA
tgcggggacacagtgagggg

SEQ ID NO: 14620 - RNA, 20 nt, synthetic construct
  source 1..20: mol_type = other RNA
tgctcaggctaaggtgagtg

SEQ ID NO: 14621 - RNA, 20 nt, synthetic construct
  source 1..20: mol_type = other RNA
tgggacagactgcggggaca

SEQ ID NO: 14622 - RNA, 20 nt, synthetic construct
  source 1..20: mol_type = other RNA
tggggccccggataccggtc

SEQ ID NO: 14623 - RNA, 20 nt, synthetic construct
  source 1..20: mol_type = other RNA
tgggtgcctacaaactcgcc

SEQ ID NO: 14624 - RNA, 20 nt, synthetic construct
  source 1..20: mol_type = other RNA
tggtcctgagccctccccct

SEQ ID NO: 14625 - RNA, 20 nt, synthetic construct
  source 1..20: mol_type = other RNA
tgtaggcacccaggtcagtg

SEQ ID NO: 14626 - RNA, 20 nt, synthetic construct
  source 1..20: mol_type = other RNA
tgtcccagaacaacatcact

SEQ ID NO: 14627 - RNA, 20 nt, synthetic construct
  source 1..20: mol_type = other RNA
tgtccccgcagtctgtccca

SEQ ID NO: 14628 - RNA, 20 nt, synthetic construct
  source 1..20: mol_type = other RNA
tgtgtccccgcagtctgtcc

SEQ ID NO: 14629 - RNA, 20 nt, synthetic construct
  source 1..20: mol_type = other RNA
tgttctgggacagactgcgg

SEQ ID NO: 14630 - RNA, 20 nt, synthetic construct
  source 1..20: mol_type = other RNA
tgttgttctgggacagactg

SEQ ID NO: 14631 - RNA, 20 nt, synthetic construct
  source 1..20: mol_type = other RNA
ttagcctgagcagggatgca

SEQ ID NO: 14632 - RNA, 20 nt, synthetic construct
  source 1..20: mol_type = other RNA
ttcgctcgctgcatccctgc

SEQ ID NO: 14633 - RNA, 20 nt, synthetic construct
  source 1..20: mol_type = other RNA
ttctgggacagactgcgggg

SEQ ID NO: 14634 - RNA, 20 nt, synthetic construct
  source 1..20: mol_type = other RNA
ttggtcctgagccctccccc

SEQ ID NO: 14635 - RNA, 20 nt, synthetic construct
  source 1..20: mol_type = other RNA
ttgtaggcacccaggtcagt

SEQ ID NO: 14636 - RNA, 20 nt, synthetic construct
  source 1..20: mol_type = other RNA
ttgttctgggacagactgcg

SEQ ID NO: 14637 - RNA, 20 nt, synthetic construct
  source 1..20: mol_type = other RNA
tttggtcctgagccctcccc

SEQ ID NO: 14638 - RNA, 20 nt, synthetic construct
  source 1..20: mol_type = other RNA
tttgtaggcacccaggtcag

SEQ ID NO: 14639 - RNA, 21 nt, synthetic construct
  source 1..21: mol_type = other RNA
aaactcgccgaggccctgcct

SEQ ID NO: 14640 - RNA, 21 nt, synthetic construct
  source 1..21: mol_type = other RNA
aacaacatcactgacctgggt

SEQ ID NO: 14641 - RNA, 21 nt, synthetic construct
  source 1..21: mol_type = other RNA
aacatcactgacctgggtgcc

SEQ ID NO: 14642 - RNA, 21 nt, synthetic construct
  source 1..21: mol_type = other RNA
aactcgccgaggccctgcctt

SEQ ID NO: 14643 - RNA, 21 nt, synthetic construct
  source 1..21: mol_type = other RNA
aaggcagggcctcggcgagtt

SEQ ID NO: 14644 - RNA, 21 nt, synthetic construct
  source 1..21: mol_type = other RNA
aaggtgagtggggccccggat

SEQ ID NO: 14645 - RNA, 21 nt, synthetic construct
  source 1..21: mol_type = other RNA
aagtttggtcctgagccctcc

SEQ ID NO: 14646 - RNA, 21 nt, synthetic construct
  source 1..21: mol_type = other RNA
acaaactcgccgaggccctgc

SEQ ID NO: 14647 - RNA, 21 nt, synthetic construct
  source 1..21: mol_type = other RNA
acaacatcactgacctgggtg

SEQ ID NO: 14648 - RNA, 21 nt, synthetic construct
  source 1..21: mol_type = other RNA
acacagtgagggggagggctc

SEQ ID NO: 14649 - RNA, 21 nt, synthetic construct
  source 1..21: mol_type = other RNA
acagactgcggggacacagtg

SEQ ID NO: 14650 - RNA, 21 nt, synthetic construct
  source 1..21: mol_type = other RNA
acagtgagggggagggctcag

SEQ ID NO: 14651 - RNA, 21 nt, synthetic construct
  source 1..21: mol_type = other RNA
acatcactgacctgggtgcct

SEQ ID NO: 14652 - RNA, 21 nt, synthetic construct
  source 1..21: mol_type = other RNA
acccaggtcagtgatgttgtt

SEQ ID NO: 14653 - RNA, 21 nt, synthetic construct
  source 1..21: mol_type = other RNA
accggtatccggggccccact

SEQ ID NO: 14654 - RNA, 21 nt, synthetic construct
  source 1..21: mol_type = other RNA
acctgaccggtatccggggcc

SEQ ID NO: 14655 - RNA, 21 nt, synthetic construct
  source 1..21: mol_type = other RNA
acctgggtgcctacaaactcg

SEQ ID NO: 14656 - RNA, 21 nt, synthetic construct
  source 1..21: mol_type = other RNA
accttagcctgagcagggatg

SEQ ID NO: 14657 - RNA, 21 nt, synthetic construct
  source 1..21: mol_type = other RNA
actcaccttagcctgagcagg

SEQ ID NO: 14658 - RNA, 21 nt, synthetic construct
  source 1..21: mol_type = other RNA
actcgccgaggccctgccttc

SEQ ID NO: 14659 - RNA, 21 nt, synthetic construct
  source 1..21: mol_type = other RNA
actgacctgggtgcctacaaa

SEQ ID NO: 14660 - RNA, 21 nt, synthetic construct
  source 1..21: mol_type = other RNA
actgcggggacacagtgaggg

SEQ ID NO: 14661 - RNA, 21 nt, synthetic construct
  source 1..21: mol_type = other RNA
actgtgtccccgcagtctgtc

SEQ ID NO: 14662 - RNA, 21 nt, synthetic construct
  source 1..21: mol_type = other RNA
agaacaacatcactgacctgg

SEQ ID NO: 14663 - RNA, 21 nt, synthetic construct
  source 1..21: mol_type = other RNA
agactgcggggacacagtgag

SEQ ID NO: 14664 - RNA, 21 nt, synthetic construct
  source 1..21: mol_type = other RNA
agcacctgaccggtatccggg

SEQ ID NO: 14665 - RNA, 21 nt, synthetic construct
  source 1..21: mol_type = other RNA
agcagggatgcagcgagcgaa

SEQ ID NO: 14666 - RNA, 21 nt, synthetic construct
  source 1..21: mol_type = other RNA
agccccccagctcagcacctg

SEQ ID NO: 14667 - RNA, 21 nt, synthetic construct
  source 1..21: mol_type = other RNA
agccctccccctcactgtgtc

SEQ ID NO: 14668 - RNA, 21 nt, synthetic construct
  source 1..21: mol_type = other RNA
agcctgagcagggatgcagcg

SEQ ID NO: 14669 - RNA, 21 nt, synthetic construct
  source 1..21: mol_type = other RNA
agcgaaggcagggcctcggcg

SEQ ID NO: 14670 - RNA, 21 nt, synthetic construct
  source 1..21: mol_type = other RNA
agcgagcgaaggcagggcctc

SEQ ID NO: 14671 - RNA, 21 nt, synthetic construct
  source 1..21: mol_type = other RNA
agctcagcacctgaccggtat

SEQ ID NO: 14672 - RNA, 21 nt, synthetic construct
  source 1..21: mol_type = other RNA
aggcacccaggtcagtgatgt

SEQ ID NO: 14673 - RNA, 21 nt, synthetic construct
  source 1..21: mol_type = other RNA
aggcagggcctcggcgagttt

SEQ ID NO: 14674 - RNA, 21 nt, synthetic construct
  source 1..21: mol_type = other RNA
aggccctgccttcgctcgctg

SEQ ID NO: 14675 - RNA, 21 nt, synthetic construct
  source 1..21: mol_type = other RNA
aggctaaggtgagtggggccc

SEQ ID NO: 14676 - RNA, 21 nt, synthetic construct
  source 1..21: mol_type = other RNA
agggatgcagcgagcgaaggc

SEQ ID NO: 14677 - RNA, 21 nt, synthetic construct
  source 1..21: mol_type = other RNA
agggcctcggcgagtttgtag

SEQ ID NO: 14678 - RNA, 21 nt, synthetic construct
  source 1..21: mol_type = other RNA
agggggagggctcaggaccaa

SEQ ID NO: 14679 - RNA, 21 nt, synthetic construct
  source 1..21: mol_type = other RNA
aggtcagtgatgttgttctgg

SEQ ID NO: 14680 - RNA, 21 nt, synthetic construct
  source 1..21: mol_type = other RNA
aggtgagtggggccccggata

SEQ ID NO: 14681 - RNA, 21 nt, synthetic construct
  source 1..21: mol_type = other RNA
agtctgtcccagaacaacatc

SEQ ID NO: 14682 - RNA, 21 nt, synthetic construct
  source 1..21: mol_type = other RNA
agtgagggggagggctcagga

SEQ ID NO: 14683 - RNA, 21 nt, synthetic construct
  source 1..21: mol_type = other RNA
agtgatgttgttctgggacag

SEQ ID NO: 14684 - RNA, 21 nt, synthetic construct
  source 1..21: mol_type = other RNA
agtggggccccggataccggt

SEQ ID NO: 14685 - RNA, 21 nt, synthetic construct
  source 1..21: mol_type = other RNA
agtttggtcctgagccctccc

SEQ ID NO: 14686 - RNA, 21 nt, synthetic construct
  source 1..21: mol_type = other RNA
agtttgtaggcacccaggtca

SEQ ID NO: 14687 - RNA, 21 nt, synthetic construct
  source 1..21: mol_type = other RNA
ataccggtcaggtgctgagct

SEQ ID NO: 14688 - RNA, 21 nt, synthetic construct
  source 1..21: mol_type = other RNA
atcactgacctgggtgcctac

SEQ ID NO: 14689 - RNA, 21 nt, synthetic construct
  source 1..21: mol_type = other RNA
atccctgctcaggctaaggtg

SEQ ID NO: 14690 - RNA, 21 nt, synthetic construct
  source 1..21: mol_type = other RNA
atccggggccccactcacctt

SEQ ID NO: 14691 - RNA, 21 nt, synthetic construct
  source 1..21: mol_type = other RNA
atgcaagtttggtcctgagcc

SEQ ID NO: 14692 - RNA, 21 nt, synthetic construct
  source 1..21: mol_type = other RNA
atgcagcgagcgaaggcaggg

SEQ ID NO: 14693 - RNA, 21 nt, synthetic construct
  source 1..21: mol_type = other RNA
atgttgttctgggacagactg

SEQ ID NO: 14694 - RNA, 21 nt, synthetic construct
  source 1..21: mol_type = other RNA
caaactcgccgaggccctgcc

SEQ ID NO: 14695 - RNA, 21 nt, synthetic construct
  source 1..21: mol_type = other RNA
caacatcactgacctgggtgc

SEQ ID NO: 14696 - RNA, 21 nt, synthetic construct
  source 1..21: mol_type = other RNA
caagtttggtcctgagccctc

SEQ ID NO: 14697 - RNA, 21 nt, synthetic construct
  source 1..21: mol_type = other RNA
cacagtgagggggagggctca

SEQ ID NO: 14698 - RNA, 21 nt, synthetic construct
  source 1..21: mol_type = other RNA
cacccaggtcagtgatgttgt

SEQ ID NO: 14699 - RNA, 21 nt, synthetic construct
  source 1..21: mol_type = other RNA
cacctgaccggtatccggggc

SEQ ID NO: 14700 - RNA, 21 nt, synthetic construct
  source 1..21: mol_type = other RNA
caccttagcctgagcagggat

SEQ ID NO: 14701 - RNA, 21 nt, synthetic construct
  source 1..21: mol_type = other RNA
cactcaccttagcctgagcag

SEQ ID NO: 14702 - RNA, 21 nt, synthetic construct
  source 1..21: mol_type = other RNA
cactgacctgggtgcctacaa

SEQ ID NO: 14703 - RNA, 21 nt, synthetic construct
  source 1..21: mol_type = other RNA
cactgtgtccccgcagtctgt

SEQ ID NO: 14704 - RNA, 21 nt, synthetic construct
  source 1..21: mol_type = other RNA
cagaacaacatcactgacctg

SEQ ID NO: 14705 - RNA, 21 nt, synthetic construct
  source 1..21: mol_type = other RNA
cagactgcggggacacagtga

SEQ ID NO: 14706 - RNA, 21 nt, synthetic construct
  source 1..21: mol_type = other RNA
cagcacctgaccggtatccgg

SEQ ID NO: 14707 - RNA, 21 nt, synthetic construct
  source 1..21: mol_type = other RNA
cagcgagcgaaggcagggcct

SEQ ID NO: 14708 - RNA, 21 nt, synthetic construct
  source 1..21: mol_type = other RNA
cagctcagcacctgaccggta

SEQ ID NO: 14709 - RNA, 21 nt, synthetic construct
  source 1..21: mol_type = other RNA
caggctaaggtgagtggggcc

SEQ ID NO: 14710 - RNA, 21 nt, synthetic construct
  source 1..21: mol_type = other RNA
cagggatgcagcgagcgaagg

SEQ ID NO: 14711 - RNA, 21 nt, synthetic construct
  source 1..21: mol_type = other RNA
cagggcctcggcgagtttgta

SEQ ID NO: 14712 - RNA, 21 nt, synthetic construct
  source 1..21: mol_type = other RNA
caggtcagtgatgttgttctg

SEQ ID NO: 14713 - RNA, 21 nt, synthetic construct
  source 1..21: mol_type = other RNA
cagtctgtcccagaacaacat

SEQ ID NO: 14714 - RNA, 21 nt, synthetic construct
  source 1..21: mol_type = other RNA
cagtgagggggagggctcagg

SEQ ID NO: 14715 - RNA, 21 nt, synthetic construct
  source 1..21: mol_type = other RNA
cagtgatgttgttctgggaca

SEQ ID NO: 14716 - RNA, 21 nt, synthetic construct
  source 1..21: mol_type = other RNA
catcactgacctgggtgccta

SEQ ID NO: 14717 - RNA, 21 nt, synthetic construct
  source 1..21: mol_type = other RNA
catccctgctcaggctaaggt

SEQ ID NO: 14718 - RNA, 21 nt, synthetic construct
  source 1..21: mol_type = other RNA
catgcaagtttggtcctgagc

SEQ ID NO: 14719 - RNA, 21 nt, synthetic construct
  source 1..21: mol_type = other RNA
ccactcaccttagcctgagca

SEQ ID NO: 14720 - RNA, 21 nt, synthetic construct
  source 1..21: mol_type = other RNA
ccagaacaacatcactgacct

SEQ ID NO: 14721 - RNA, 21 nt, synthetic construct
  source 1..21: mol_type = other RNA
ccagctcagcacctgaccggt

SEQ ID NO: 14722 - RNA, 21 nt, synthetic construct
  source 1..21: mol_type = other RNA
ccaggtcagtgatgttgttct

SEQ ID NO: 14723 - RNA, 21 nt, synthetic construct
  source 1..21: mol_type = other RNA
cccactcaccttagcctgagc

SEQ ID NO: 14724 - RNA, 21 nt, synthetic construct
  source 1..21: mol_type = other RNA
cccagaacaacatcactgacc

SEQ ID NO: 14725 - RNA, 21 nt, synthetic construct
  source 1..21: mol_type = other RNA
cccagctcagcacctgaccgg

SEQ ID NO: 14726 - RNA, 21 nt, synthetic construct
  source 1..21: mol_type = other RNA
cccaggtcagtgatgttgttc

SEQ ID NO: 14727 - RNA, 21 nt, synthetic construct
  source 1..21: mol_type = other RNA
ccccactcaccttagcctgag

SEQ ID NO: 14728 - RNA, 21 nt, synthetic construct
  source 1..21: mol_type = other RNA
ccccagctcagcacctgaccg

SEQ ID NO: 14729 - RNA, 21 nt, synthetic construct
  source 1..21: mol_type = other RNA
cccccagctcagcacctgacc

SEQ ID NO: 14730 - RNA, 21 nt, synthetic construct
  source 1..21: mol_type = other RNA
ccccccagctcagcacctgac

SEQ ID NO: 14731 - RNA, 21 nt, synthetic construct
  source 1..21: mol_type = other RNA
ccccctcactgtgtccccgca

SEQ ID NO: 14732 - RNA, 21 nt, synthetic construct
  source 1..21: mol_type = other RNA
ccccgcagtctgtcccagaac

SEQ ID NO: 14733 - RNA, 21 nt, synthetic construct
  source 1..21: mol_type = other RNA
ccccggataccggtcaggtgc

SEQ ID NO: 14734 - RNA, 21 nt, synthetic construct
  source 1..21: mol_type = other RNA
cccctcactgtgtccccgcag

SEQ ID NO: 14735 - RNA, 21 nt, synthetic construct
  source 1..21: mol_type = other RNA
cccgcagtctgtcccagaaca

SEQ ID NO: 14736 - RNA, 21 nt, synthetic construct
  source 1..21: mol_type = other RNA
cccggataccggtcaggtgct

SEQ ID NO: 14737 - RNA, 21 nt, synthetic construct
  source 1..21: mol_type = other RNA
ccctcactgtgtccccgcagt

SEQ ID NO: 14738 - RNA, 21 nt, synthetic construct
  source 1..21: mol_type = other RNA
ccctccccctcactgtgtccc

SEQ ID NO: 14739 - RNA, 21 nt, synthetic construct
  source 1..21: mol_type = other RNA
ccctgccttcgctcgctgcat

SEQ ID NO: 14740 - RNA, 21 nt, synthetic construct
  source 1..21: mol_type = other RNA
ccctgctcaggctaaggtgag

SEQ ID NO: 14741 - RNA, 21 nt, synthetic construct
  source 1..21: mol_type = other RNA
ccgaggccctgccttcgctcg

SEQ ID NO: 14742 - RNA, 21 nt, synthetic construct
  source 1..21: mol_type = other RNA
ccgcagtctgtcccagaacaa

SEQ ID NO: 14743 - RNA, 21 nt, synthetic construct
  source 1..21: mol_type = other RNA
ccggataccggtcaggtgctg

SEQ ID NO: 14744 - RNA, 21 nt, synthetic construct
  source 1..21: mol_type = other RNA
ccggggccccactcaccttag

SEQ ID NO: 14745 - RNA, 21 nt, synthetic construct
  source 1..21: mol_type = other RNA
ccggtatccggggccccactc

SEQ ID NO: 14746 - RNA, 21 nt, synthetic construct
  source 1..21: mol_type = other RNA
cctacaaactcgccgaggccc

SEQ ID NO: 14747 - RNA, 21 nt, synthetic construct
  source 1..21: mol_type = other RNA
cctcactgtgtccccgcagtc

SEQ ID NO: 14748 - RNA, 21 nt, synthetic construct
  source 1..21: mol_type = other RNA
cctccccctcactgtgtcccc

SEQ ID NO: 14749 - RNA, 21 nt, synthetic construct
  source 1..21: mol_type = other RNA
cctcggcgagtttgtaggcac

SEQ ID NO: 14750 - RNA, 21 nt, synthetic construct
  source 1..21: mol_type = other RNA
cctgaccggtatccggggccc

SEQ ID NO: 14751 - RNA, 21 nt, synthetic construct
  source 1..21: mol_type = other RNA
cctgagcagggatgcagcgag

SEQ ID NO: 14752 - RNA, 21 nt, synthetic construct
  source 1..21: mol_type = other RNA
cctgagccctccccctcactg

SEQ ID NO: 14753 - RNA, 21 nt, synthetic construct
  source 1..21: mol_type = other RNA
cctgccttcgctcgctgcatc

SEQ ID NO: 14754 - RNA, 21 nt, synthetic construct
  source 1..21: mol_type = other RNA
cctgctcaggctaaggtgagt

SEQ ID NO: 14755 - RNA, 21 nt, synthetic construct
  source 1..21: mol_type = other RNA
cctgggtgcctacaaactcgc

SEQ ID NO: 14756 - RNA, 21 nt, synthetic construct
  source 1..21: mol_type = other RNA
ccttagcctgagcagggatgc

SEQ ID NO: 14757 - RNA, 21 nt, synthetic construct
  source 1..21: mol_type = other RNA
ccttcgctcgctgcatccctg

SEQ ID NO: 14758 - RNA, 21 nt, synthetic construct
  source 1..21: mol_type = other RNA
cgaaggcagggcctcggcgag

SEQ ID NO: 14759 - RNA, 21 nt, synthetic construct
  source 1..21: mol_type = other RNA
cgagcgaaggcagggcctcgg

SEQ ID NO: 14760 - RNA, 21 nt, synthetic construct
  source 1..21: mol_type = other RNA
cgaggccctgccttcgctcgc

SEQ ID NO: 14761 - RNA, 21 nt, synthetic construct
  source 1..21: mol_type = other RNA
cgagtttgtaggcacccaggt

SEQ ID NO: 14762 - RNA, 21 nt, synthetic construct
  source 1..21: mol_type = other RNA
cgcagtctgtcccagaacaac

SEQ ID NO: 14763 - RNA, 21 nt, synthetic construct
  source 1..21: mol_type = other RNA
cgccgaggccctgccttcgct

SEQ ID NO: 14764 - RNA, 21 nt, synthetic construct
  source 1..21: mol_type = other RNA
cgctcgctgcatccctgctca

SEQ ID NO: 14765 - RNA, 21 nt, synthetic construct
  source 1..21: mol_type = other RNA
cgctgcatccctgctcaggct

SEQ ID NO: 14766 - RNA, 21 nt, synthetic construct
  source 1..21: mol_type = other RNA
cggataccggtcaggtgctga

SEQ ID NO: 14767 - RNA, 21 nt, synthetic construct
  source 1..21: mol_type = other RNA
cggcgagtttgtaggcaccca

SEQ ID NO: 14768 - RNA, 21 nt, synthetic construct
  source 1..21: mol_type = other RNA
cggggacacagtgagggggag

SEQ ID NO: 14769 - RNA, 21 nt, synthetic construct
  source 1..21: mol_type = other RNA
cggggccccactcaccttagc

SEQ ID NO: 14770 - RNA, 21 nt, synthetic construct
  source 1..21: mol_type = other RNA
cggtatccggggccccactca

SEQ ID NO: 14771 - RNA, 21 nt, synthetic construct
  source 1..21: mol_type = other RNA
ctaaggtgagtggggccccgg

SEQ ID NO: 14772 - RNA, 21 nt, synthetic construct
  source 1..21: mol_type = other RNA
ctacaaactcgccgaggccct

SEQ ID NO: 14773 - RNA, 21 nt, synthetic construct
  source 1..21: mol_type = other RNA
ctcaccttagcctgagcaggg

SEQ ID NO: 14774 - RNA, 21 nt, synthetic construct
  source 1..21: mol_type = other RNA
ctcactgtgtccccgcagtct

SEQ ID NO: 14775 - RNA, 21 nt, synthetic construct
  source 1..21: mol_type = other RNA
ctcagcacctgaccggtatcc

SEQ ID NO: 14776 - RNA, 21 nt, synthetic construct
  source 1..21: mol_type = other RNA
ctcaggctaaggtgagtgggg

SEQ ID NO: 14777 - RNA, 21 nt, synthetic construct
  source 1..21: mol_type = other RNA
ctccccctcactgtgtccccg

SEQ ID NO: 14778 - RNA, 21 nt, synthetic construct
  source 1..21: mol_type = other RNA
ctcgccgaggccctgccttcg

SEQ ID NO: 14779 - RNA, 21 nt, synthetic construct
  source 1..21: mol_type = other RNA
ctcgctgcatccctgctcagg

SEQ ID NO: 14780 - RNA, 21 nt, synthetic construct
  source 1..21: mol_type = other RNA
ctcggcgagtttgtaggcacc

SEQ ID NO: 14781 - RNA, 21 nt, synthetic construct
  source 1..21: mol_type = other RNA
ctgaccggtatccggggcccc

SEQ ID NO: 14782 - RNA, 21 nt, synthetic construct
  source 1..21: mol_type = other RNA
ctgacctgggtgcctacaaac

SEQ ID NO: 14783 - RNA, 21 nt, synthetic construct
  source 1..21: mol_type = other RNA
ctgagcagggatgcagcgagc

SEQ ID NO: 14784 - RNA, 21 nt, synthetic construct
  source 1..21: mol_type = other RNA
ctgagccctccccctcactgt

SEQ ID NO: 14785 - RNA, 21 nt, synthetic construct
  source 1..21: mol_type = other RNA
ctgcatccctgctcaggctaa

SEQ ID NO: 14786 - RNA, 21 nt, synthetic construct
  source 1..21: mol_type = other RNA
ctgccttcgctcgctgcatcc

SEQ ID NO: 14787 - RNA, 21 nt, synthetic construct
  source 1..21: mol_type = other RNA
ctgcggggacacagtgagggg

SEQ ID NO: 14788 - RNA, 21 nt, synthetic construct
  source 1..21: mol_type = other RNA
ctgctcaggctaaggtgagtg

SEQ ID NO: 14789 - RNA, 21 nt, synthetic construct
  source 1..21: mol_type = other RNA
ctgggacagactgcggggaca

SEQ ID NO: 14790 - RNA, 21 nt, synthetic construct
  source 1..21: mol_type = other RNA
ctgggtgcctacaaactcgcc

SEQ ID NO: 14791 - RNA, 21 nt, synthetic construct
  source 1..21: mol_type = other RNA
ctgtcccagaacaacatcact

SEQ ID NO: 14792 - RNA, 21 nt, synthetic construct
  source 1..21: mol_type = other RNA
ctgtgtccccgcagtctgtcc

SEQ ID NO: 14793 - RNA, 21 nt, synthetic construct
  source 1..21: mol_type = other RNA
cttagcctgagcagggatgca

SEQ ID NO: 14794 - RNA, 21 nt, synthetic construct
  source 1..21: mol_type = other RNA
cttcgctcgctgcatccctgc

SEQ ID NO: 14795 - RNA, 21 nt, synthetic construct
  source 1..21: mol_type = other RNA
gaacaacatcactgacctggg

SEQ ID NO: 14796 - RNA, 21 nt, synthetic construct
  source 1..21: mol_type = other RNA
gaaggcagggcctcggcgagt

SEQ ID NO: 14797 - RNA, 21 nt, synthetic construct
  source 1..21: mol_type = other RNA
gacacagtgagggggagggct

SEQ ID NO: 14798 - RNA, 21 nt, synthetic construct
  source 1..21: mol_type = other RNA
gacagactgcggggacacagt

SEQ ID NO: 14799 - RNA, 21 nt, synthetic construct
  source 1..21: mol_type = other RNA
gaccggtatccggggccccac

SEQ ID NO: 14800 - RNA, 21 nt, synthetic construct
  source 1..21: mol_type = other RNA
gacctgggtgcctacaaactc

SEQ ID NO: 14801 - RNA, 21 nt, synthetic construct
  source 1..21: mol_type = other RNA
gactgcggggacacagtgagg

SEQ ID NO: 14802 - RNA, 21 nt, synthetic construct
  source 1..21: mol_type = other RNA
gagcagggatgcagcgagcga

SEQ ID NO: 14803 - RNA, 21 nt, synthetic construct
  source 1..21: mol_type = other RNA
gagccctccccctcactgtgt

SEQ ID NO: 14804 - RNA, 21 nt, synthetic construct
  source 1..21: mol_type = other RNA
gagcgaaggcagggcctcggc

SEQ ID NO: 14805 - RNA, 21 nt, synthetic construct
  source 1..21: mol_type = other RNA
gaggccctgccttcgctcgct

SEQ ID NO: 14806 - RNA, 21 nt, synthetic construct
  source 1..21: mol_type = other RNA
gagggggagggctcaggacca

SEQ ID NO: 14807 - RNA, 21 nt, synthetic construct
  source 1..21: mol_type = other RNA
gagtggggccccggataccgg

SEQ ID NO: 14808 - RNA, 21 nt, synthetic construct
  source 1..21: mol_type = other RNA
gagtttgtaggcacccaggtc

SEQ ID NO: 14809 - RNA, 21 nt, synthetic construct
  source 1..21: mol_type = other RNA
gataccggtcaggtgctgagc

SEQ ID NO: 14810 - RNA, 21 nt, synthetic construct
  source 1..21: mol_type = other RNA
gatgcagcgagcgaaggcagg

SEQ ID NO: 14811 - RNA, 21 nt, synthetic construct
  source 1..21: mol_type = other RNA
gatgttgttctgggacagact

SEQ ID NO: 14812 - RNA, 21 nt, synthetic construct
  source 1..21: mol_type = other RNA
gcaagtttggtcctgagccct

SEQ ID NO: 14813 - RNA, 21 nt, synthetic construct
  source 1..21: mol_type = other RNA
gcacccaggtcagtgatgttg

SEQ ID NO: 14814 - RNA, 21 nt, synthetic construct
  source 1..21: mol_type = other RNA
gcacctgaccggtatccgggg

SEQ ID NO: 14815 - RNA, 21 nt, synthetic construct
  source 1..21: mol_type = other RNA
gcagcgagcgaaggcagggcc

SEQ ID NO: 14816 - RNA, 21 nt, synthetic construct
  source 1..21: mol_type = other RNA
gcagggatgcagcgagcgaag

SEQ ID NO: 14817 - RNA, 21 nt, synthetic construct
  source 1..21: mol_type = other RNA
gcagggcctcggcgagtttgt

SEQ ID NO: 14818 - RNA, 21 nt, synthetic construct
  source 1..21: mol_type = other RNA
gcagtctgtcccagaacaaca

SEQ ID NO: 14819 - RNA, 21 nt, synthetic construct
  source 1..21: mol_type = other RNA
gcatccctgctcaggctaagg

SEQ ID NO: 14820 - RNA, 21 nt, synthetic construct
  source 1..21: mol_type = other RNA
gccccactcaccttagcctga

SEQ ID NO: 14821 - RNA, 21 nt, synthetic construct
  source 1..21: mol_type = other RNA
gccccccagctcagcacctga

SEQ ID NO: 14822 - RNA, 21 nt, synthetic construct
  source 1..21: mol_type = other RNA
gccccggataccggtcaggtg

SEQ ID NO: 14823 - RNA, 21 nt, synthetic construct
  source 1..21: mol_type = other RNA
gccctccccctcactgtgtcc

SEQ ID NO: 14824 - RNA, 21 nt, synthetic construct
  source 1..21: mol_type = other RNA
gccctgccttcgctcgctgca

SEQ ID NO: 14825 - RNA, 21 nt, synthetic construct
  source 1..21: mol_type = other RNA
gccgaggccctgccttcgctc

SEQ ID NO: 14826 - RNA, 21 nt, synthetic construct
  source 1..21: mol_type = other RNA
gcctacaaactcgccgaggcc

SEQ ID NO: 14827 - RNA, 21 nt, synthetic construct
  source 1..21: mol_type = other RNA
gcctcggcgagtttgtaggca

SEQ ID NO: 14828 - RNA, 21 nt, synthetic construct
  source 1..21: mol_type = other RNA
gcctgagcagggatgcagcga

SEQ ID NO: 14829 - RNA, 21 nt, synthetic construct
  source 1..21: mol_type = other RNA
gccttcgctcgctgcatccct

SEQ ID NO: 14830 - RNA, 21 nt, synthetic construct
  source 1..21: mol_type = other RNA
gcgaaggcagggcctcggcga

SEQ ID NO: 14831 - RNA, 21 nt, synthetic construct
  source 1..21: mol_type = other RNA
gcgagcgaaggcagggcctcg

SEQ ID NO: 14832 - RNA, 21 nt, synthetic construct
  source 1..21: mol_type = other RNA
gcgagtttgtaggcacccagg

SEQ ID NO: 14833 - RNA, 21 nt, synthetic construct
  source 1..21: mol_type = other RNA
gcggggacacagtgaggggga

SEQ ID NO: 14834 - RNA, 21 nt, synthetic construct
  source 1..21: mol_type = other RNA
gctaaggtgagtggggccccg

SEQ ID NO: 14835 - RNA, 21 nt, synthetic construct
  source 1..21: mol_type = other RNA
gctcagcacctgaccggtatc

SEQ ID NO: 14836 - RNA, 21 nt, synthetic construct
  source 1..21: mol_type = other RNA
gctcaggctaaggtgagtggg

SEQ ID NO: 14837 - RNA, 21 nt, synthetic construct
  source 1..21: mol_type = other RNA
gctcgctgcatccctgctcag

SEQ ID NO: 14838 - RNA, 21 nt, synthetic construct
  source 1..21: mol_type = other RNA
gctgcatccctgctcaggcta

SEQ ID NO: 14839 - RNA, 21 nt, synthetic construct
  source 1..21: mol_type = other RNA
ggacacagtgagggggagggc

SEQ ID NO: 14840 - RNA, 21 nt, synthetic construct
  source 1..21: mol_type = other RNA
ggacagactgcggggacacag

SEQ ID NO: 14841 - RNA, 21 nt, synthetic construct
  source 1..21: mol_type = other RNA
ggataccggtcaggtgctgag

SEQ ID NO: 14842 - RNA, 21 nt, synthetic construct
  source 1..21: mol_type = other RNA
ggatgcagcgagcgaaggcag

SEQ ID NO: 14843 - RNA, 21 nt, synthetic construct
  source 1..21: mol_type = other RNA
ggcacccaggtcagtgatgtt

SEQ ID NO: 14844 - RNA, 21 nt, synthetic construct
  source 1..21: mol_type = other RNA
ggcagggcctcggcgagtttg

SEQ ID NO: 14845 - RNA, 21 nt, synthetic construct
  source 1..21: mol_type = other RNA
ggccccactcaccttagcctg

SEQ ID NO: 14846 - RNA, 21 nt, synthetic construct
  source 1..21: mol_type = other RNA
ggccccggataccggtcaggt

SEQ ID NO: 14847 - RNA, 21 nt, synthetic construct
  source 1..21: mol_type = other RNA
ggccctgccttcgctcgctgc

SEQ ID NO: 14848 - RNA, 21 nt, synthetic construct
  source 1..21: mol_type = other RNA
ggcctcggcgagtttgtaggc

SEQ ID NO: 14849 - RNA, 21 nt, synthetic construct
  source 1..21: mol_type = other RNA
ggcgagtttgtaggcacccag

SEQ ID NO: 14850 - RNA, 21 nt, synthetic construct
  source 1..21: mol_type = other RNA
ggctaaggtgagtggggcccc

SEQ ID NO: 14851 - RNA, 21 nt, synthetic construct
  source 1..21: mol_type = other RNA
gggacacagtgagggggaggg

SEQ ID NO: 14852 - RNA, 21 nt, synthetic construct
  source 1..21: mol_type = other RNA
gggacagactgcggggacaca

SEQ ID NO: 14853 - RNA, 21 nt, synthetic construct
  source 1..21: mol_type = other RNA
gggatgcagcgagcgaaggca

SEQ ID NO: 14854 - RNA, 21 nt, synthetic construct
  source 1..21: mol_type = other RNA
gggccccactcaccttagcct

SEQ ID NO: 14855 - RNA, 21 nt, synthetic construct
  source 1..21: mol_type = other RNA
gggccccggataccggtcagg

SEQ ID NO: 14856 - RNA, 21 nt, synthetic construct
  source 1..21: mol_type = other RNA
gggcctcggcgagtttgtagg

SEQ ID NO: 14857 - RNA, 21 nt, synthetic construct
  source 1..21: mol_type = other RNA
ggggacacagtgagggggagg

SEQ ID NO: 14858 - RNA, 21 nt, synthetic construct
  source 1..21: mol_type = other RNA
ggggccccactcaccttagcc

SEQ ID NO: 14859 - RNA, 21 nt, synthetic construct
  source 1..21: mol_type = other RNA
ggggccccggataccggtcag

SEQ ID NO: 14860 - RNA, 21 nt, synthetic construct
  source 1..21: mol_type = other RNA
gggggagggctcaggaccaaa

SEQ ID NO: 14861 - RNA, 21 nt, synthetic construct
  source 1..21: mol_type = other RNA
gggtgcctacaaactcgccga

SEQ ID NO: 14862 - RNA, 21 nt, synthetic construct
  source 1..21: mol_type = other RNA
ggtatccggggccccactcac

SEQ ID NO: 14863 - RNA, 21 nt, synthetic construct
  source 1..21: mol_type = other RNA
ggtcagtgatgttgttctggg

SEQ ID NO: 14864 - RNA, 21 nt, synthetic construct
  source 1..21: mol_type = other RNA
ggtcctgagccctccccctca

SEQ ID NO: 14865 - RNA, 21 nt, synthetic construct
  source 1..21: mol_type = other RNA
ggtgagtggggccccggatac

SEQ ID NO: 14866 - RNA, 21 nt, synthetic construct
  source 1..21: mol_type = other RNA
ggtgcctacaaactcgccgag

SEQ ID NO: 14867 - RNA, 21 nt, synthetic construct
  source 1..21: mol_type = other RNA
gtaggcacccaggtcagtgat

SEQ ID NO: 14868 - RNA, 21 nt, synthetic construct
  source 1..21: mol_type = other RNA
gtatccggggccccactcacc

SEQ ID NO: 14869 - RNA, 21 nt, synthetic construct
  source 1..21: mol_type = other RNA
gtcagtgatgttgttctggga

SEQ ID NO: 14870 - RNA, 21 nt, synthetic construct
  source 1..21: mol_type = other RNA
gtcccagaacaacatcactga

SEQ ID NO: 14871 - RNA, 21 nt, synthetic construct
  source 1..21: mol_type = other RNA
gtccccgcagtctgtcccaga

SEQ ID NO: 14872 - RNA, 21 nt, synthetic construct
  source 1..21: mol_type = other RNA
gtcctgagccctccccctcac

SEQ ID NO: 14873 - RNA, 21 nt, synthetic construct
  source 1..21: mol_type = other RNA
gtctgtcccagaacaacatca

SEQ ID NO: 14874 - RNA, 21 nt, synthetic construct
  source 1..21: mol_type = other RNA
gtgagggggagggctcaggac

SEQ ID NO: 14875 - RNA, 21 nt, synthetic construct
  source 1..21: mol_type = other RNA
gtgagtggggccccggatacc

SEQ ID NO: 14876 - RNA, 21 nt, synthetic construct
  source 1..21: mol_type = other RNA
gtgatgttgttctgggacaga

SEQ ID NO: 14877 - RNA, 21 nt, synthetic construct
  source 1..21: mol_type = other RNA
gtgcctacaaactcgccgagg

SEQ ID NO: 14878 - RNA, 21 nt, synthetic construct
  source 1..21: mol_type = other RNA
gtggggccccggataccggtc

SEQ ID NO: 14879 - RNA, 21 nt, synthetic construct
  source 1..21: mol_type = other RNA
gtgtccccgcagtctgtccca

SEQ ID NO: 14880 - RNA, 21 nt, synthetic construct
  source 1..21: mol_type = other RNA
gttctgggacagactgcgggg

SEQ ID NO: 14881 - RNA, 21 nt, synthetic construct
  source 1..21: mol_type = other RNA
gttgttctgggacagactgcg

SEQ ID NO: 14882 - RNA, 21 nt, synthetic construct
  source 1..21: mol_type = other RNA
gtttggtcctgagccctcccc

SEQ ID NO: 14883 - RNA, 21 nt, synthetic construct
  source 1..21: mol_type = other RNA
gtttgtaggcacccaggtcag

SEQ ID NO: 14884 - RNA, 21 nt, synthetic construct
  source 1..21: mol_type = other RNA
taaggtgagtggggccccgga

SEQ ID NO: 14885 - RNA, 21 nt, synthetic construct
  source 1..21: mol_type = other RNA
tacaaactcgccgaggccctg

SEQ ID NO: 14886 - RNA, 21 nt, synthetic construct
  source 1..21: mol_type = other RNA
tagcctgagcagggatgcagc

SEQ ID NO: 14887 - RNA, 21 nt, synthetic construct
  source 1..21: mol_type = other RNA
taggcacccaggtcagtgatg

SEQ ID NO: 14888 - RNA, 21 nt, synthetic construct
  source 1..21: mol_type = other RNA
tatccggggccccactcacct

SEQ ID NO: 14889 - RNA, 21 nt, synthetic construct
  source 1..21: mol_type = other RNA
tcaccttagcctgagcaggga

SEQ ID NO: 14890 - RNA, 21 nt, synthetic construct
  source 1..21: mol_type = other RNA
tcactgacctgggtgcctaca

SEQ ID NO: 14891 - RNA, 21 nt, synthetic construct
  source 1..21: mol_type = other RNA
tcactgtgtccccgcagtctg

SEQ ID NO: 14892 - RNA, 21 nt, synthetic construct
  source 1..21: mol_type = other RNA
tcagcacctgaccggtatccg

SEQ ID NO: 14893 - RNA, 21 nt, synthetic construct
  source 1..21: mol_type = other RNA
tcaggctaaggtgagtggggc

SEQ ID NO: 14894 - RNA, 21 nt, synthetic construct
  source 1..21: mol_type = other RNA
tcagtgatgttgttctgggac

SEQ ID NO: 14895 - RNA, 21 nt, synthetic construct
  source 1..21: mol_type = other RNA
tcccagaacaacatcactgac

SEQ ID NO: 14896 - RNA, 21 nt, synthetic construct
  source 1..21: mol_type = other RNA
tccccctcactgtgtccccgc

SEQ ID NO: 14897 - RNA, 21 nt, synthetic construct
  source 1..21: mol_type = other RNA
tccccgcagtctgtcccagaa

SEQ ID NO: 14898 - RNA, 21 nt, synthetic construct
  source 1..21: mol_type = other RNA
tccctgctcaggctaaggtga

SEQ ID NO: 14899 - RNA, 21 nt, synthetic construct
  source 1..21: mol_type = other RNA
tccggggccccactcacctta

SEQ ID NO: 14900 - RNA, 21 nt, synthetic construct
  source 1..21: mol_type = other RNA
tcctgagccctccccctcact

SEQ ID NO: 14901 - RNA, 21 nt, synthetic construct
  source 1..21: mol_type = other RNA
tcgccgaggccctgccttcgc

SEQ ID NO: 14902 - RNA, 21 nt, synthetic construct
  source 1..21: mol_type = other RNA
tcgctcgctgcatccctgctc

SEQ ID NO: 14903 - RNA, 21 nt, synthetic construct
  source 1..21: mol_type = other RNA
tcgctgcatccctgctcaggc

SEQ ID NO: 14904 - RNA, 21 nt, synthetic construct
  source 1..21: mol_type = other RNA
tcggcgagtttgtaggcaccc

SEQ ID NO: 14905 - RNA, 21 nt, synthetic construct
  source 1..21: mol_type = other RNA
tctgggacagactgcggggac

SEQ ID NO: 14906 - RNA, 21 nt, synthetic construct
  source 1..21: mol_type = other RNA
tctgtcccagaacaacatcac

SEQ ID NO: 14907 - RNA, 21 nt, synthetic construct
  source 1..21: mol_type = other RNA
tgaccggtatccggggcccca

SEQ ID NO: 14908 - RNA, 21 nt, synthetic construct
  source 1..21: mol_type = other RNA
tgacctgggtgcctacaaact

SEQ ID NO: 14909 - RNA, 21 nt, synthetic construct
  source 1..21: mol_type = other RNA
tgagcagggatgcagcgagcg

SEQ ID NO: 14910 - RNA, 21 nt, synthetic construct
  source 1..21: mol_type = other RNA
tgagccctccccctcactgtg

SEQ ID NO: 14911 - RNA, 21 nt, synthetic construct
  source 1..21: mol_type = other RNA
tgagggggagggctcaggacc

SEQ ID NO: 14912 - RNA, 21 nt, synthetic construct
  source 1..21: mol_type = other RNA
tgagtggggccccggataccg

SEQ ID NO: 14913 - RNA, 21 nt, synthetic construct
  source 1..21: mol_type = other RNA
tgatgttgttctgggacagac

SEQ ID NO: 14914 - RNA, 21 nt, synthetic construct
  source 1..21: mol_type = other RNA
tgcaagtttggtcctgagccc

SEQ ID NO: 14915 - RNA, 21 nt, synthetic construct
  source 1..21: mol_type = other RNA
tgcagcgagcgaaggcagggc

SEQ ID NO: 14916 - RNA, 21 nt, synthetic construct
  source 1..21: mol_type = other RNA
tgcatccctgctcaggctaag

SEQ ID NO: 14917 - RNA, 21 nt, synthetic construct
  source 1..21: mol_type = other RNA
tgcctacaaactcgccgaggc

SEQ ID NO: 14918 - RNA, 21 nt, synthetic construct
  source 1..21: mol_type = other RNA
tgccttcgctcgctgcatccc

SEQ ID NO: 14919 - RNA, 21 nt, synthetic construct
  source 1..21: mol_type = other RNA
tgcggggacacagtgaggggg

SEQ ID NO: 14920 - RNA, 21 nt, synthetic construct
  source 1..21: mol_type = other RNA
tgctcaggctaaggtgagtgg

SEQ ID NO: 14921 - RNA, 21 nt, synthetic construct
  source 1..21: mol_type = other RNA
tgggacagactgcggggacac

SEQ ID NO: 14922 - RNA, 21 nt, synthetic construct
  source 1..21: mol_type = other RNA
tggggccccggataccggtca

SEQ ID NO: 14923 - RNA, 21 nt, synthetic construct
  source 1..21: mol_type = other RNA
tgggtgcctacaaactcgccg

SEQ ID NO: 14924 - RNA, 21 nt, synthetic construct
  source 1..21: mol_type = other RNA
tggtcctgagccctccccctc

SEQ ID NO: 14925 - RNA, 21 nt, synthetic construct
  source 1..21: mol_type = other RNA
tgtaggcacccaggtcagtga

SEQ ID NO: 14926 - RNA, 21 nt, synthetic construct
  source 1..21: mol_type = other RNA
tgtcccagaacaacatcactg

SEQ ID NO: 14927 - RNA, 21 nt, synthetic construct
  source 1..21: mol_type = other RNA
tgtccccgcagtctgtcccag

SEQ ID NO: 14928 - RNA, 21 nt, synthetic construct
  source 1..21: mol_type = other RNA
tgtgtccccgcagtctgtccc

SEQ ID NO: 14929 - RNA, 21 nt, synthetic construct
  source 1..21: mol_type = other RNA
tgttctgggacagactgcggg

SEQ ID NO: 14930 - RNA, 21 nt, synthetic construct
  source 1..21: mol_type = other RNA
tgttgttctgggacagactgc

SEQ ID NO: 14931 - RNA, 21 nt, synthetic construct
  source 1..21: mol_type = other RNA
ttagcctgagcagggatgcag

SEQ ID NO: 14932 - RNA, 21 nt, synthetic construct
  source 1..21: mol_type = other RNA
ttcgctcgctgcatccctgct

SEQ ID NO: 14933 - RNA, 21 nt, synthetic construct
  source 1..21: mol_type = other RNA
ttctgggacagactgcgggga

SEQ ID NO: 14934 - RNA, 21 nt, synthetic construct
  source 1..21: mol_type = other RNA
ttggtcctgagccctccccct

SEQ ID NO: 14935 - RNA, 21 nt, synthetic construct
  source 1..21: mol_type = other RNA
ttgtaggcacccaggtcagtg

SEQ ID NO: 14936 - RNA, 21 nt, synthetic construct
  source 1..21: mol_type = other RNA
ttgttctgggacagactgcgg

SEQ ID NO: 14937 - RNA, 21 nt, synthetic construct
  source 1..21: mol_type = other RNA
tttggtcctgagccctccccc

SEQ ID NO: 14938 - RNA, 21 nt, synthetic construct
  source 1..21: mol_type = other RNA
tttgtaggcacccaggtcagt

SEQ ID NO: 14939 - RNA, 22 nt, synthetic construct
  source 1..22: mol_type = other RNA
aaactcgccgaggccctgcctt

SEQ ID NO: 14940 - RNA, 22 nt, synthetic construct
  source 1..22: mol_type = other RNA
aacaacatcactgacctgggtg

SEQ ID NO: 14941 - RNA, 22 nt, synthetic construct
  source 1..22: mol_type = other RNA
aacatcactgacctgggtgcct

SEQ ID NO: 14942 - RNA, 22 nt, synthetic construct
  source 1..22: mol_type = other RNA
aactcgccgaggccctgccttc

SEQ ID NO: 14943 - RNA, 22 nt, synthetic construct
  source 1..22: mol_type = other RNA
aaggcagggcctcggcgagttt

SEQ ID NO: 14944 - RNA, 22 nt, synthetic construct
  source 1..22: mol_type = other RNA
aaggtgagtggggccccggata

SEQ ID NO: 14945 - RNA, 22 nt, synthetic construct
  source 1..22: mol_type = other RNA
aagtttggtcctgagccctccc

SEQ ID NO: 14946 - RNA, 22 nt, synthetic construct
  source 1..22: mol_type = other RNA
acaaactcgccgaggccctgcc

SEQ ID NO: 14947 - RNA, 22 nt, synthetic construct
  source 1..22: mol_type = other RNA
acaacatcactgacctgggtgc

SEQ ID NO: 14948 - RNA, 22 nt, synthetic construct
  source 1..22: mol_type = other RNA
acacagtgagggggagggctca

SEQ ID NO: 14949 - RNA, 22 nt, synthetic construct
  source 1..22: mol_type = other RNA
acagactgcggggacacagtga

SEQ ID NO: 14950 - RNA, 22 nt, synthetic construct
  source 1..22: mol_type = other RNA
acagtgagggggagggctcagg

SEQ ID NO: 14951 - RNA, 22 nt, synthetic construct
  source 1..22: mol_type = other RNA
acatcactgacctgggtgccta

SEQ ID NO: 14952 - RNA, 22 nt, synthetic construct
  source 1..22: mol_type = other RNA
acccaggtcagtgatgttgttc

SEQ ID NO: 14953 - RNA, 22 nt, synthetic construct
  source 1..22: mol_type = other RNA
accggtatccggggccccactc

SEQ ID NO: 14954 - RNA, 22 nt, synthetic construct
  source 1..22: mol_type = other RNA
acctgaccggtatccggggccc

SEQ ID NO: 14955 - RNA, 22 nt, synthetic construct
  source 1..22: mol_type = other RNA
acctgggtgcctacaaactcgc

SEQ ID NO: 14956 - RNA, 22 nt, synthetic construct
  source 1..22: mol_type = other RNA
accttagcctgagcagggatgc

SEQ ID NO: 14957 - RNA, 22 nt, synthetic construct
  source 1..22: mol_type = other RNA
actcaccttagcctgagcaggg

SEQ ID NO: 14958 - RNA, 22 nt, synthetic construct
  source 1..22: mol_type = other RNA
actcgccgaggccctgccttcg

SEQ ID NO: 14959 - RNA, 22 nt, synthetic construct
  source 1..22: mol_type = other RNA
actgacctgggtgcctacaaac

SEQ ID NO: 14960 - RNA, 22 nt, synthetic construct
  source 1..22: mol_type = other RNA
actgcggggacacagtgagggg

SEQ ID NO: 14961 - RNA, 22 nt, synthetic construct
  source 1..22: mol_type = other RNA
actgtgtccccgcagtctgtcc

SEQ ID NO: 14962 - RNA, 22 nt, synthetic construct
  source 1..22: mol_type = other RNA
agaacaacatcactgacctggg

SEQ ID NO: 14963 - RNA, 22 nt, synthetic construct
  source 1..22: mol_type = other RNA
agactgcggggacacagtgagg

SEQ ID NO: 14964 - RNA, 22 nt, synthetic construct
  source 1..22: mol_type = other RNA
agcacctgaccggtatccgggg

SEQ ID NO: 14965 - RNA, 22 nt, synthetic construct
  source 1..22: mol_type = other RNA
agcagggatgcagcgagcgaag

SEQ ID NO: 14966 - RNA, 22 nt, synthetic construct
  source 1..22: mol_type = other RNA
agccccccagctcagcacctga

SEQ ID NO: 14967 - RNA, 22 nt, synthetic construct
  source 1..22: mol_type = other RNA
agccctccccctcactgtgtcc

SEQ ID NO: 14968 - RNA, 22 nt, synthetic construct
  source 1..22: mol_type = other RNA
agcctgagcagggatgcagcga

SEQ ID NO: 14969 - RNA, 22 nt, synthetic construct
  source 1..22: mol_type = other RNA
agcgaaggcagggcctcggcga

SEQ ID NO: 14970 - RNA, 22 nt, synthetic construct
  source 1..22: mol_type = other RNA
agcgagcgaaggcagggcctcg

SEQ ID NO: 14971 - RNA, 22 nt, synthetic construct
  source 1..22: mol_type = other RNA
agctcagcacctgaccggtatc

SEQ ID NO: 14972 - RNA, 22 nt, synthetic construct
  source 1..22: mol_type = other RNA
aggcacccaggtcagtgatgtt

SEQ ID NO: 14973 - RNA, 22 nt, synthetic construct
  source 1..22: mol_type = other RNA
aggcagggcctcggcgagtttg

SEQ ID NO: 14974 - RNA, 22 nt, synthetic construct
  source 1..22: mol_type = other RNA
aggccctgccttcgctcgctgc

SEQ ID NO: 14975 - RNA, 22 nt, synthetic construct
  source 1..22: mol_type = other RNA
aggctaaggtgagtggggcccc

SEQ ID NO: 14976 - RNA, 22 nt, synthetic construct
  source 1..22: mol_type = other RNA
agggatgcagcgagcgaaggca

SEQ ID NO: 14977 - RNA, 22 nt, synthetic construct
  source 1..22: mol_type = other RNA
agggcctcggcgagtttgtagg

SEQ ID NO: 14978 - RNA, 22 nt, synthetic construct
  source 1..22: mol_type = other RNA
agggggagggctcaggaccaaa

SEQ ID NO: 14979 - RNA, 22 nt, synthetic construct
  source 1..22: mol_type = other RNA
aggtcagtgatgttgttctggg

SEQ ID NO: 14980 - RNA, 22 nt, synthetic construct
  source 1..22: mol_type = other RNA
aggtgagtggggccccggatac

SEQ ID NO: 14981 - RNA, 22 nt, synthetic construct
  source 1..22: mol_type = other RNA
agtctgtcccagaacaacatca

SEQ ID NO: 14982 - RNA, 22 nt, synthetic construct
  source 1..22: mol_type = other RNA
agtgagggggagggctcaggac

SEQ ID NO: 14983 - RNA, 22 nt, synthetic construct
  source 1..22: mol_type = other RNA
agtgatgttgttctgggacaga

SEQ ID NO: 14984 - RNA, 22 nt, synthetic construct
  source 1..22: mol_type = other RNA
agtggggccccggataccggtc

SEQ ID NO: 14985 - RNA, 22 nt, synthetic construct
  source 1..22: mol_type = other RNA
agtttggtcctgagccctcccc

SEQ ID NO: 14986 - RNA, 22 nt, synthetic construct
  source 1..22: mol_type = other RNA
agtttgtaggcacccaggtcag

SEQ ID NO: 14987 - RNA, 22 nt, synthetic construct
  source 1..22: mol_type = other RNA
atcactgacctgggtgcctaca

SEQ ID NO: 14988 - RNA, 22 nt, synthetic construct
  source 1..22: mol_type = other RNA
atccctgctcaggctaaggtga

SEQ ID NO: 14989 - RNA, 22 nt, synthetic construct
  source 1..22: mol_type = other RNA
atccggggccccactcacctta

SEQ ID NO: 14990 - RNA, 22 nt, synthetic construct
  source 1..22: mol_type = other RNA
atgcaagtttggtcctgagccc

SEQ ID NO: 14991 - RNA, 22 nt, synthetic construct
  source 1..22: mol_type = other RNA
atgcagcgagcgaaggcagggc

SEQ ID NO: 14992 - RNA, 22 nt, synthetic construct
  source 1..22: mol_type = other RNA
atgttgttctgggacagactgc

SEQ ID NO: 14993 - RNA, 22 nt, synthetic construct
  source 1..22: mol_type = other RNA
caaactcgccgaggccctgcct

SEQ ID NO: 14994 - RNA, 22 nt, synthetic construct
  source 1..22: mol_type = other RNA
caacatcactgacctgggtgcc

SEQ ID NO: 14995 - RNA, 22 nt, synthetic construct
  source 1..22: mol_type = other RNA
caagtttggtcctgagccctcc

SEQ ID NO: 14996 - RNA, 22 nt, synthetic construct
  source 1..22: mol_type = other RNA
cacagtgagggggagggctcag

SEQ ID NO: 14997 - RNA, 22 nt, synthetic construct
  source 1..22: mol_type = other RNA
cacccaggtcagtgatgttgtt

SEQ ID NO: 14998 - RNA, 22 nt, synthetic construct
  source 1..22: mol_type = other RNA
cacctgaccggtatccggggcc

SEQ ID NO: 14999 - RNA, 22 nt, synthetic construct
  source 1..22: mol_type = other RNA
caccttagcctgagcagggatg

SEQ ID NO: 15000 - RNA, 22 nt, synthetic construct
  source 1..22: mol_type = other RNA
cactcaccttagcctgagcagg

SEQ ID NO: 15001 - RNA, 22 nt, synthetic construct
  source 1..22: mol_type = other RNA
cactgacctgggtgcctacaaa

SEQ ID NO: 15002 - RNA, 22 nt, synthetic construct
  source 1..22: mol_type = other RNA
cactgtgtccccgcagtctgtc

SEQ ID NO: 15003 - RNA, 22 nt, synthetic construct
  source 1..22: mol_type = other RNA
cagaacaacatcactgacctgg

SEQ ID NO: 15004 - RNA, 22 nt, synthetic construct
  source 1..22: mol_type = other RNA
cagactgcggggacacagtgag

SEQ ID NO: 15005 - RNA, 22 nt, synthetic construct
  source 1..22: mol_type = other RNA
cagcacctgaccggtatccggg

SEQ ID NO: 15006 - RNA, 22 nt, synthetic construct
  source 1..22: mol_type = other RNA
cagcgagcgaaggcagggcctc

SEQ ID NO: 15007 - RNA, 22 nt, synthetic construct
  source 1..22: mol_type = other RNA
cagctcagcacctgaccggtat

SEQ ID NO: 15008 - RNA, 22 nt, synthetic construct
  source 1..22: mol_type = other RNA
caggctaaggtgagtggggccc

SEQ ID NO: 15009 - RNA, 22 nt, synthetic construct
  source 1..22: mol_type = other RNA
cagggatgcagcgagcgaaggc

SEQ ID NO: 15010 - RNA, 22 nt, synthetic construct
  source 1..22: mol_type = other RNA
cagggcctcggcgagtttgtag

SEQ ID NO: 15011 - RNA, 22 nt, synthetic construct
  source 1..22: mol_type = other RNA
caggtcagtgatgttgttctgg

SEQ ID NO: 15012 - RNA, 22 nt, synthetic construct
  source 1..22: mol_type = other RNA
cagtctgtcccagaacaacatc

SEQ ID NO: 15013 - RNA, 22 nt, synthetic construct
  source 1..22: mol_type = other RNA
cagtgagggggagggctcagga

SEQ ID NO: 15014 - RNA, 22 nt, synthetic construct
  source 1..22: mol_type = other RNA
cagtgatgttgttctgggacag

SEQ ID NO: 15015 - RNA, 22 nt, synthetic construct
  source 1..22: mol_type = other RNA
catcactgacctgggtgcctac

SEQ ID NO: 15016 - RNA, 22 nt, synthetic construct
  source 1..22: mol_type = other RNA
catccctgctcaggctaaggtg

SEQ ID NO: 15017 - RNA, 22 nt, synthetic construct
  source 1..22: mol_type = other RNA
catgcaagtttggtcctgagcc

SEQ ID NO: 15018 - RNA, 22 nt, synthetic construct
  source 1..22: mol_type = other RNA
ccactcaccttagcctgagcag

SEQ ID NO: 15019 - RNA, 22 nt, synthetic construct
  source 1..22: mol_type = other RNA
ccagaacaacatcactgacctg

SEQ ID NO: 15020 - RNA, 22 nt, synthetic construct
  source 1..22: mol_type = other RNA
ccagctcagcacctgaccggta

SEQ ID NO: 15021 - RNA, 22 nt, synthetic construct
  source 1..22: mol_type = other RNA
ccaggtcagtgatgttgttctg

SEQ ID NO: 15022 - RNA, 22 nt, synthetic construct
  source 1..22: mol_type = other RNA
cccactcaccttagcctgagca

SEQ ID NO: 15023 - RNA, 22 nt, synthetic construct
  source 1..22: mol_type = other RNA
cccagaacaacatcactgacct

SEQ ID NO: 15024 - RNA, 22 nt, synthetic construct
  source 1..22: mol_type = other RNA
cccagctcagcacctgaccggt

SEQ ID NO: 15025 - RNA, 22 nt, synthetic construct
  source 1..22: mol_type = other RNA
cccaggtcagtgatgttgttct

SEQ ID NO: 15026 - RNA, 22 nt, synthetic construct
  source 1..22: mol_type = other RNA
ccccactcaccttagcctgagc

SEQ ID NO: 15027 - RNA, 22 nt, synthetic construct
  source 1..22: mol_type = other RNA
ccccagctcagcacctgaccgg

SEQ ID NO: 15028 - RNA, 22 nt, synthetic construct
  source 1..22: mol_type = other RNA
cccccagctcagcacctgaccg

SEQ ID NO: 15029 - RNA, 22 nt, synthetic construct
  source 1..22: mol_type = other RNA
ccccccagctcagcacctgacc

SEQ ID NO: 15030 - RNA, 22 nt, synthetic construct
  source 1..22: mol_type = other RNA
ccccctcactgtgtccccgcag

SEQ ID NO: 15031 - RNA, 22 nt, synthetic construct
  source 1..22: mol_type = other RNA
ccccgcagtctgtcccagaaca

SEQ ID NO: 15032 - RNA, 22 nt, synthetic construct
  source 1..22: mol_type = other RNA
ccccggataccggtcaggtgct

SEQ ID NO: 15033 - RNA, 22 nt, synthetic construct
  source 1..22: mol_type = other RNA
cccctcactgtgtccccgcagt

SEQ ID NO: 15034 - RNA, 22 nt, synthetic construct
  source 1..22: mol_type = other RNA
cccgcagtctgtcccagaacaa

SEQ ID NO: 15035 - RNA, 22 nt, synthetic construct
  source 1..22: mol_type = other RNA
cccggataccggtcaggtgctg

SEQ ID NO: 15036 - RNA, 22 nt, synthetic construct
  source 1..22: mol_type = other RNA
ccctcactgtgtccccgcagtc

SEQ ID NO: 15037 - RNA, 22 nt, synthetic construct
  source 1..22: mol_type = other RNA
ccctccccctcactgtgtcccc

SEQ ID NO: 15038 - RNA, 22 nt, synthetic construct
  source 1..22: mol_type = other RNA
ccctgccttcgctcgctgcatc

SEQ ID NO: 15039 - RNA, 22 nt, synthetic construct
  source 1..22: mol_type = other RNA
ccctgctcaggctaaggtgagt

SEQ ID NO: 15040 - RNA, 22 nt, synthetic construct
  source 1..22: mol_type = other RNA
ccgaggccctgccttcgctcgc

SEQ ID NO: 15041 - RNA, 22 nt, synthetic construct
  source 1..22: mol_type = other RNA
ccgcagtctgtcccagaacaac

SEQ ID NO: 15042 - RNA, 22 nt, synthetic construct
  source 1..22: mol_type = other RNA
ccggataccggtcaggtgctga

SEQ ID NO: 15043 - RNA, 22 nt, synthetic construct
  source 1..22: mol_type = other RNA
ccggggccccactcaccttagc

SEQ ID NO: 15044 - RNA, 22 nt, synthetic construct
  source 1..22: mol_type = other RNA
ccggtatccggggccccactca

SEQ ID NO: 15045 - RNA, 22 nt, synthetic construct
  source 1..22: mol_type = other RNA
cctacaaactcgccgaggccct

SEQ ID NO: 15046 - RNA, 22 nt, synthetic construct
  source 1..22: mol_type = other RNA
cctcactgtgtccccgcagtct

SEQ ID NO: 15047 - RNA, 22 nt, synthetic construct
  source 1..22: mol_type = other RNA
cctccccctcactgtgtccccg

SEQ ID NO: 15048 - RNA, 22 nt, synthetic construct
  source 1..22: mol_type = other RNA
cctcggcgagtttgtaggcacc

SEQ ID NO: 15049 - RNA, 22 nt, synthetic construct
  source 1..22: mol_type = other RNA
cctgaccggtatccggggcccc

SEQ ID NO: 15050 - RNA, 22 nt, synthetic construct
  source 1..22: mol_type = other RNA
cctgagcagggatgcagcgagc

SEQ ID NO: 15051 - RNA, 22 nt, synthetic construct
  source 1..22: mol_type = other RNA
cctgagccctccccctcactgt

SEQ ID NO: 15052 - RNA, 22 nt, synthetic construct
  source 1..22: mol_type = other RNA
cctgccttcgctcgctgcatcc

SEQ ID NO: 15053 - RNA, 22 nt, synthetic construct
  source 1..22: mol_type = other RNA
cctgctcaggctaaggtgagtg

SEQ ID NO: 15054 - RNA, 22 nt, synthetic construct
  source 1..22: mol_type = other RNA
cctgggtgcctacaaactcgcc

SEQ ID NO: 15055 - RNA, 22 nt, synthetic construct
  source 1..22: mol_type = other RNA
ccttagcctgagcagggatgca

SEQ ID NO: 15056 - RNA, 22 nt, synthetic construct
  source 1..22: mol_type = other RNA
ccttcgctcgctgcatccctgc

SEQ ID NO: 15057 - RNA, 22 nt, synthetic construct
  source 1..22: mol_type = other RNA
cgaaggcagggcctcggcgagt

SEQ ID NO: 15058 - RNA, 22 nt, synthetic construct
  source 1..22: mol_type = other RNA
cgagcgaaggcagggcctcggc

SEQ ID NO: 15059 - RNA, 22 nt, synthetic construct
  source 1..22: mol_type = other RNA
cgaggccctgccttcgctcgct

SEQ ID NO: 15060 - RNA, 22 nt, synthetic construct
  source 1..22: mol_type = other RNA
cgagtttgtaggcacccaggtc

SEQ ID NO: 15061 - RNA, 22 nt, synthetic construct
  source 1..22: mol_type = other RNA
cgcagtctgtcccagaacaaca

SEQ ID NO: 15062 - RNA, 22 nt, synthetic construct
  source 1..22: mol_type = other RNA
cgccgaggccctgccttcgctc

SEQ ID NO: 15063 - RNA, 22 nt, synthetic construct
  source 1..22: mol_type = other RNA
cgctcgctgcatccctgctcag

SEQ ID NO: 15064 - RNA, 22 nt, synthetic construct
  source 1..22: mol_type = other RNA
cgctgcatccctgctcaggcta

SEQ ID NO: 15065 - RNA, 22 nt, synthetic construct
  source 1..22: mol_type = other RNA
cggataccggtcaggtgctgag

SEQ ID NO: 15066 - RNA, 22 nt, synthetic construct
  source 1..22: mol_type = other RNA
cggcgagtttgtaggcacccag

SEQ ID NO: 15067 - RNA, 22 nt, synthetic construct
  source 1..22: mol_type = other RNA
cggggacacagtgagggggagg

SEQ ID NO: 15068 - RNA, 22 nt, synthetic construct
  source 1..22: mol_type = other RNA
cggggccccactcaccttagcc

SEQ ID NO: 15069 - RNA, 22 nt, synthetic construct
  source 1..22: mol_type = other RNA
cggtatccggggccccactcac

SEQ ID NO: 15070 - RNA, 22 nt, synthetic construct
  source 1..22: mol_type = other RNA
ctaaggtgagtggggccccgga

SEQ ID NO: 15071 - RNA, 22 nt, synthetic construct
  source 1..22: mol_type = other RNA
ctacaaactcgccgaggccctg

SEQ ID NO: 15072 - RNA, 22 nt, synthetic construct
  source 1..22: mol_type = other RNA
ctcaccttagcctgagcaggga

SEQ ID NO: 15073 - RNA, 22 nt, synthetic construct
  source 1..22: mol_type = other RNA
ctcactgtgtccccgcagtctg

SEQ ID NO: 15074 - RNA, 22 nt, synthetic construct
  source 1..22: mol_type = other RNA
ctcagcacctgaccggtatccg

SEQ ID NO: 15075 - RNA, 22 nt, synthetic construct
  source 1..22: mol_type = other RNA
ctcaggctaaggtgagtggggc

SEQ ID NO: 15076 - RNA, 22 nt, synthetic construct
  source 1..22: mol_type = other RNA
ctccccctcactgtgtccccgc

SEQ ID NO: 15077 - RNA, 22 nt, synthetic construct
  source 1..22: mol_type = other RNA
ctcgccgaggccctgccttcgc

SEQ ID NO: 15078 - RNA, 22 nt, synthetic construct
  source 1..22: mol_type = other RNA
ctcgctgcatccctgctcaggc

SEQ ID NO: 15079 - RNA, 22 nt, synthetic construct
  source 1..22: mol_type = other RNA
ctcggcgagtttgtaggcaccc

SEQ ID NO: 15080 - RNA, 22 nt, synthetic construct
  source 1..22: mol_type = other RNA
ctgaccggtatccggggcccca

SEQ ID NO: 15081 - RNA, 22 nt, synthetic construct
  source 1..22: mol_type = other RNA
ctgacctgggtgcctacaaact

SEQ ID NO: 15082 - RNA, 22 nt, synthetic construct
  source 1..22: mol_type = other RNA
ctgagcagggatgcagcgagcg

SEQ ID NO: 15083 - RNA, 22 nt, synthetic construct
  source 1..22: mol_type = other RNA
ctgagccctccccctcactgtg

SEQ ID NO: 15084 - RNA, 22 nt, synthetic construct
  source 1..22: mol_type = other RNA
ctgcatccctgctcaggctaag

SEQ ID NO: 15085 - RNA, 22 nt, synthetic construct
  source 1..22: mol_type = other RNA
ctgccttcgctcgctgcatccc

SEQ ID NO: 15086 - RNA, 22 nt, synthetic construct
  source 1..22: mol_type = other RNA
ctgcggggacacagtgaggggg

SEQ ID NO: 15087 - RNA, 22 nt, synthetic construct
  source 1..22: mol_type = other RNA
ctgctcaggctaaggtgagtgg

SEQ ID NO: 15088 - RNA, 22 nt, synthetic construct
  source 1..22: mol_type = other RNA
ctgggacagactgcggggacac

SEQ ID NO: 15089 - RNA, 22 nt, synthetic construct
  source 1..22: mol_type = other RNA
ctgggtgcctacaaactcgccg

SEQ ID NO: 15090 - RNA, 22 nt, synthetic construct
  source 1..22: mol_type = other RNA
ctgtcccagaacaacatcactg

SEQ ID NO: 15091 - RNA, 22 nt, synthetic construct
  source 1..22: mol_type = other RNA
ctgtgtccccgcagtctgtccc

SEQ ID NO: 15092 - RNA, 22 nt, synthetic construct
  source 1..22: mol_type = other RNA
cttagcctgagcagggatgcag

SEQ ID NO: 15093 - RNA, 22 nt, synthetic construct
  source 1..22: mol_type = other RNA
cttcgctcgctgcatccctgct

SEQ ID NO: 15094 - RNA, 22 nt, synthetic construct
  source 1..22: mol_type = other RNA
gaacaacatcactgacctgggt

SEQ ID NO: 15095 - RNA, 22 nt, synthetic construct
  source 1..22: mol_type = other RNA
gaaggcagggcctcggcgagtt

SEQ ID NO: 15096 - RNA, 22 nt, synthetic construct
  source 1..22: mol_type = other RNA
gacacagtgagggggagggctc

SEQ ID NO: 15097 - RNA, 22 nt, synthetic construct
  source 1..22: mol_type = other RNA
gacagactgcggggacacagtg

SEQ ID NO: 15098 - RNA, 22 nt, synthetic construct
  source 1..22: mol_type = other RNA
gaccggtatccggggccccact

SEQ ID NO: 15099 - RNA, 22 nt, synthetic construct
  source 1..22: mol_type = other RNA
gacctgggtgcctacaaactcg

SEQ ID NO: 15100 - RNA, 22 nt, synthetic construct
  source 1..22: mol_type = other RNA
gactgcggggacacagtgaggg

SEQ ID NO: 15101 - RNA, 22 nt, synthetic construct
  source 1..22: mol_type = other RNA
gagcagggatgcagcgagcgaa

SEQ ID NO: 15102 - RNA, 22 nt, synthetic construct
  source 1..22: mol_type = other RNA
gagccctccccctcactgtgtc

SEQ ID NO: 15103 - RNA, 22 nt, synthetic construct
  source 1..22: mol_type = other RNA
gagcgaaggcagggcctcggcg

SEQ ID NO: 15104 - RNA, 22 nt, synthetic construct
  source 1..22: mol_type = other RNA
gaggccctgccttcgctcgctg

SEQ ID NO: 15105 - RNA, 22 nt, synthetic construct
  source 1..22: mol_type = other RNA
gagggggagggctcaggaccaa

SEQ ID NO: 15106 - RNA, 22 nt, synthetic construct
  source 1..22: mol_type = other RNA
gagtggggccccggataccggt

SEQ ID NO: 15107 - RNA, 22 nt, synthetic construct
  source 1..22: mol_type = other RNA
gagtttgtaggcacccaggtca

SEQ ID NO: 15108 - RNA, 22 nt, synthetic construct
  source 1..22: mol_type = other RNA
gataccggtcaggtgctgagct

SEQ ID NO: 15109 - RNA, 22 nt, synthetic construct
  source 1..22: mol_type = other RNA
gatgcagcgagcgaaggcaggg

SEQ ID NO: 15110 - RNA, 22 nt, synthetic construct
  source 1..22: mol_type = other RNA
gatgttgttctgggacagactg

SEQ ID NO: 15111 - RNA, 22 nt, synthetic construct
  source 1..22: mol_type = other RNA
gcaagtttggtcctgagccctc

SEQ ID NO: 15112 - RNA, 22 nt, synthetic construct
  source 1..22: mol_type = other RNA
gcacccaggtcagtgatgttgt

SEQ ID NO: 15113 - RNA, 22 nt, synthetic construct
  source 1..22: mol_type = other RNA
gcacctgaccggtatccggggc

SEQ ID NO: 15114 - RNA, 22 nt, synthetic construct
  source 1..22: mol_type = other RNA
gcagcgagcgaaggcagggcct

SEQ ID NO: 15115 - RNA, 22 nt, synthetic construct
  source 1..22: mol_type = other RNA
gcagggatgcagcgagcgaagg

SEQ ID NO: 15116 - RNA, 22 nt, synthetic construct
  source 1..22: mol_type = other RNA
gcagggcctcggcgagtttgta

SEQ ID NO: 15117 - RNA, 22 nt, synthetic construct
  source 1..22: mol_type = other RNA
gcagtctgtcccagaacaacat

SEQ ID NO: 15118 - RNA, 22 nt, synthetic construct
  source 1..22: mol_type = other RNA
gcatccctgctcaggctaaggt

SEQ ID NO: 15119 - RNA, 22 nt, synthetic construct
  source 1..22: mol_type = other RNA
gccccactcaccttagcctgag

SEQ ID NO: 15120 - RNA, 22 nt, synthetic construct
  source 1..22: mol_type = other RNA
gccccccagctcagcacctgac

SEQ ID NO: 15121 - RNA, 22 nt, synthetic construct
  source 1..22: mol_type = other RNA
gccccggataccggtcaggtgc

SEQ ID NO: 15122 - RNA, 22 nt, synthetic construct
  source 1..22: mol_type = other RNA
gccctccccctcactgtgtccc

SEQ ID NO: 15123 - RNA, 22 nt, synthetic construct
  source 1..22: mol_type = other RNA
gccctgccttcgctcgctgcat

SEQ ID NO: 15124 - RNA, 22 nt, synthetic construct
  source 1..22: mol_type = other RNA
gccgaggccctgccttcgctcg

SEQ ID NO: 15125 - RNA, 22 nt, synthetic construct
  source 1..22: mol_type = other RNA
gcctacaaactcgccgaggccc

SEQ ID NO: 15126 - RNA, 22 nt, synthetic construct
  source 1..22: mol_type = other RNA
gcctcggcgagtttgtaggcac

SEQ ID NO: 15127 - RNA, 22 nt, synthetic construct
  source 1..22: mol_type = other RNA
gcctgagcagggatgcagcgag

SEQ ID NO: 15128 - RNA, 22 nt, synthetic construct
  source 1..22: mol_type = other RNA
gccttcgctcgctgcatccctg

SEQ ID NO: 15129 - RNA, 22 nt, synthetic construct
  source 1..22: mol_type = other RNA
gcgaaggcagggcctcggcgag

SEQ ID NO: 15130 - RNA, 22 nt, synthetic construct
  source 1..22: mol_type = other RNA
gcgagcgaaggcagggcctcgg

SEQ ID NO: 15131 - RNA, 22 nt, synthetic construct
  source 1..22: mol_type = other RNA
gcgagtttgtaggcacccaggt

SEQ ID NO: 15132 - RNA, 22 nt, synthetic construct
  source 1..22: mol_type = other RNA
gcggggacacagtgagggggag

SEQ ID NO: 15133 - RNA, 22 nt, synthetic construct
  source 1..22: mol_type = other RNA
gctaaggtgagtggggccccgg

SEQ ID NO: 15134 - RNA, 22 nt, synthetic construct
  source 1..22: mol_type = other RNA
gctcagcacctgaccggtatcc

SEQ ID NO: 15135 - RNA, 22 nt, synthetic construct
  source 1..22: mol_type = other RNA
gctcaggctaaggtgagtgggg

SEQ ID NO: 15136 - RNA, 22 nt, synthetic construct
  source 1..22: mol_type = other RNA
gctcgctgcatccctgctcagg

SEQ ID NO: 15137 - RNA, 22 nt, synthetic construct
  source 1..22: mol_type = other RNA
gctgcatccctgctcaggctaa

SEQ ID NO: 15138 - RNA, 22 nt, synthetic construct
  source 1..22: mol_type = other RNA
ggacacagtgagggggagggct

SEQ ID NO: 15139 - RNA, 22 nt, synthetic construct
  source 1..22: mol_type = other RNA
ggacagactgcggggacacagt

SEQ ID NO: 15140 - RNA, 22 nt, synthetic construct
  source 1..22: mol_type = other RNA
ggataccggtcaggtgctgagc

SEQ ID NO: 15141 - RNA, 22 nt, synthetic construct
  source 1..22: mol_type = other RNA
ggatgcagcgagcgaaggcagg

SEQ ID NO: 15142 - RNA, 22 nt, synthetic construct
  source 1..22: mol_type = other RNA
ggcacccaggtcagtgatgttg

SEQ ID NO: 15143 - RNA, 22 nt, synthetic construct
  source 1..22: mol_type = other RNA
ggcagggcctcggcgagtttgt

SEQ ID NO: 15144 - RNA, 22 nt, synthetic construct
  source 1..22: mol_type = other RNA
ggccccactcaccttagcctga

SEQ ID NO: 15145 - RNA, 22 nt, synthetic construct
  source 1..22: mol_type = other RNA
ggccccggataccggtcaggtg

SEQ ID NO: 15146 - RNA, 22 nt, synthetic construct
  source 1..22: mol_type = other RNA
ggccctgccttcgctcgctgca

SEQ ID NO: 15147 - RNA, 22 nt, synthetic construct
  source 1..22: mol_type = other RNA
ggcctcggcgagtttgtaggca

SEQ ID NO: 15148 - RNA, 22 nt, synthetic construct
  source 1..22: mol_type = other RNA
ggcgagtttgtaggcacccagg

SEQ ID NO: 15149 - RNA, 22 nt, synthetic construct
  source 1..22: mol_type = other RNA
ggctaaggtgagtggggccccg

SEQ ID NO: 15150 - RNA, 22 nt, synthetic construct
  source 1..22: mol_type = other RNA
gggacacagtgagggggagggc

SEQ ID NO: 15151 - RNA, 22 nt, synthetic construct
  source 1..22: mol_type = other RNA
gggacagactgcggggacacag

SEQ ID NO: 15152 - RNA, 22 nt, synthetic construct
  source 1..22: mol_type = other RNA
gggatgcagcgagcgaaggcag

SEQ ID NO: 15153 - RNA, 22 nt, synthetic construct
  source 1..22: mol_type = other RNA
gggccccactcaccttagcctg

SEQ ID NO: 15154 - RNA, 22 nt, synthetic construct
  source 1..22: mol_type = other RNA
gggccccggataccggtcaggt

SEQ ID NO: 15155 - RNA, 22 nt, synthetic construct
  source 1..22: mol_type = other RNA
gggcctcggcgagtttgtaggc

SEQ ID NO: 15156 - RNA, 22 nt, synthetic construct
  source 1..22: mol_type = other RNA
ggggacacagtgagggggaggg

SEQ ID NO: 15157 - RNA, 22 nt, synthetic construct
  source 1..22: mol_type = other RNA
ggggccccactcaccttagcct

SEQ ID NO: 15158 - RNA, 22 nt, synthetic construct
  source 1..22: mol_type = other RNA
ggggccccggataccggtcagg

SEQ ID NO: 15159 - RNA, 22 nt, synthetic construct
  source 1..22: mol_type = other RNA
gggtgcctacaaactcgccgag

SEQ ID NO: 15160 - RNA, 22 nt, synthetic construct
  source 1..22: mol_type = other RNA
ggtatccggggccccactcacc

SEQ ID NO: 15161 - RNA, 22 nt, synthetic construct
  source 1..22: mol_type = other RNA
ggtcagtgatgttgttctggga

SEQ ID NO: 15162 - RNA, 22 nt, synthetic construct
  source 1..22: mol_type = other RNA
ggtcctgagccctccccctcac

SEQ ID NO: 15163 - RNA, 22 nt, synthetic construct
  source 1..22: mol_type = other RNA
ggtgagtggggccccggatacc

SEQ ID NO: 15164 - RNA, 22 nt, synthetic construct
  source 1..22: mol_type = other RNA
ggtgcctacaaactcgccgagg

SEQ ID NO: 15165 - RNA, 22 nt, synthetic construct
  source 1..22: mol_type = other RNA
gtaggcacccaggtcagtgatg

SEQ ID NO: 15166 - RNA, 22 nt, synthetic construct
  source 1..22: mol_type = other RNA
gtatccggggccccactcacct

SEQ ID NO: 15167 - RNA, 22 nt, synthetic construct
  source 1..22: mol_type = other RNA
gtcagtgatgttgttctgggac

SEQ ID NO: 15168 - RNA, 22 nt, synthetic construct
  source 1..22: mol_type = other RNA
gtcccagaacaacatcactgac

SEQ ID NO: 15169 - RNA, 22 nt, synthetic construct
  source 1..22: mol_type = other RNA
gtccccgcagtctgtcccagaa

SEQ ID NO: 15170 - RNA, 22 nt, synthetic construct
  source 1..22: mol_type = other RNA
gtcctgagccctccccctcact

SEQ ID NO: 15171 - RNA, 22 nt, synthetic construct
  source 1..22: mol_type = other RNA
gtctgtcccagaacaacatcac

SEQ ID NO: 15172 - RNA, 22 nt, synthetic construct
  source 1..22: mol_type = other RNA
gtgagggggagggctcaggacc

SEQ ID NO: 15173 - RNA, 22 nt, synthetic construct
  source 1..22: mol_type = other RNA
gtgagtggggccccggataccg

SEQ ID NO: 15174 - RNA, 22 nt, synthetic construct
  source 1..22: mol_type = other RNA
gtgatgttgttctgggacagac

SEQ ID NO: 15175 - RNA, 22 nt, synthetic construct
  source 1..22: mol_type = other RNA
gtgcctacaaactcgccgaggc

SEQ ID NO: 15176 - RNA, 22 nt, synthetic construct
  source 1..22: mol_type = other RNA
gtggggccccggataccggtca

SEQ ID NO: 15177 - RNA, 22 nt, synthetic construct
  source 1..22: mol_type = other RNA
gtgtccccgcagtctgtcccag

SEQ ID NO: 15178 - RNA, 22 nt, synthetic construct
  source 1..22: mol_type = other RNA
gttctgggacagactgcgggga

SEQ ID NO: 15179 - RNA, 22 nt, synthetic construct
  source 1..22: mol_type = other RNA
gttgttctgggacagactgcgg

SEQ ID NO: 15180 - RNA, 22 nt, synthetic construct
  source 1..22: mol_type = other RNA
gtttggtcctgagccctccccc

SEQ ID NO: 15181 - RNA, 22 nt, synthetic construct
  source 1..22: mol_type = other RNA
gtttgtaggcacccaggtcagt

SEQ ID NO: 15182 - RNA, 22 nt, synthetic construct
  source 1..22: mol_type = other RNA
taaggtgagtggggccccggat

SEQ ID NO: 15183 - RNA, 22 nt, synthetic construct
  source 1..22: mol_type = other RNA
tacaaactcgccgaggccctgc

SEQ ID NO: 15184 - RNA, 22 nt, synthetic construct
  source 1..22: mol_type = other RNA
tagcctgagcagggatgcagcg

SEQ ID NO: 15185 - RNA, 22 nt, synthetic construct
  source 1..22: mol_type = other RNA
taggcacccaggtcagtgatgt

SEQ ID NO: 15186 - RNA, 22 nt, synthetic construct
  source 1..22: mol_type = other RNA
tatccggggccccactcacctt

SEQ ID NO: 15187 - RNA, 22 nt, synthetic construct
  source 1..22: mol_type = other RNA
tcaccttagcctgagcagggat

SEQ ID NO: 15188 - RNA, 22 nt, synthetic construct
  source 1..22: mol_type = other RNA
tcactgacctgggtgcctacaa

SEQ ID NO: 15189 - RNA, 22 nt, synthetic construct
  source 1..22: mol_type = other RNA
tcactgtgtccccgcagtctgt

SEQ ID NO: 15190 - RNA, 22 nt, synthetic construct
  source 1..22: mol_type = other RNA
tcagcacctgaccggtatccgg

SEQ ID NO: 15191 - RNA, 22 nt, synthetic construct
  source 1..22: mol_type = other RNA
tcaggctaaggtgagtggggcc

SEQ ID NO: 15192 - RNA, 22 nt, synthetic construct
  source 1..22: mol_type = other RNA
tcagtgatgttgttctgggaca

SEQ ID NO: 15193 - RNA, 22 nt, synthetic construct
  source 1..22: mol_type = other RNA
tcccagaacaacatcactgacc

SEQ ID NO: 15194 - RNA, 22 nt, synthetic construct
  source 1..22: mol_type = other RNA
tccccctcactgtgtccccgca

SEQ ID NO: 15195 - RNA, 22 nt, synthetic construct
  source 1..22: mol_type = other RNA
tccccgcagtctgtcccagaac

SEQ ID NO: 15196 - RNA, 22 nt, synthetic construct
  source 1..22: mol_type = other RNA
tccctgctcaggctaaggtgag

SEQ ID NO: 15197 - RNA, 22 nt, synthetic construct
  source 1..22: mol_type = other RNA
tccggggccccactcaccttag

SEQ ID NO: 15198 - RNA, 22 nt, synthetic construct
  source 1..22: mol_type = other RNA
tcctgagccctccccctcactg

SEQ ID NO: 15199 - RNA, 22 nt, synthetic construct
  source 1..22: mol_type = other RNA
tcgccgaggccctgccttcgct

SEQ ID NO: 15200 - RNA, 22 nt, synthetic construct
  source 1..22: mol_type = other RNA
tcgctcgctgcatccctgctca

SEQ ID NO: 15201 - RNA, 22 nt, synthetic construct
  source 1..22: mol_type = other RNA
tcgctgcatccctgctcaggct

SEQ ID NO: 15202 - RNA, 22 nt, synthetic construct
  source 1..22: mol_type = other RNA
tcggcgagtttgtaggcaccca

SEQ ID NO: 15203 - RNA, 22 nt, synthetic construct
  source 1..22: mol_type = other RNA
tctgggacagactgcggggaca

SEQ ID NO: 15204 - RNA, 22 nt, synthetic construct
  source 1..22: mol_type = other RNA
tctgtcccagaacaacatcact

SEQ ID NO: 15205 - RNA, 22 nt, synthetic construct
  source 1..22: mol_type = other RNA
tgaccggtatccggggccccac

SEQ ID NO: 15206 - RNA, 22 nt, synthetic construct
  source 1..22: mol_type = other RNA
tgacctgggtgcctacaaactc

SEQ ID NO: 15207 - RNA, 22 nt, synthetic construct
  source 1..22: mol_type = other RNA
tgagcagggatgcagcgagcga

SEQ ID NO: 15208 - RNA, 22 nt, synthetic construct
  source 1..22: mol_type = other RNA
tgagccctccccctcactgtgt

SEQ ID NO: 15209 - RNA, 22 nt, synthetic construct
  source 1..22: mol_type = other RNA
tgagggggagggctcaggacca

SEQ ID NO: 15210 - RNA, 22 nt, synthetic construct
  source 1..22: mol_type = other RNA
tgagtggggccccggataccgg

SEQ ID NO: 15211 - RNA, 22 nt, synthetic construct
  source 1..22: mol_type = other RNA
tgatgttgttctgggacagact

SEQ ID NO: 15212 - RNA, 22 nt, synthetic construct
  source 1..22: mol_type = other RNA
tgcaagtttggtcctgagccct

SEQ ID NO: 15213 - RNA, 22 nt, synthetic construct
  source 1..22: mol_type = other RNA
tgcagcgagcgaaggcagggcc

SEQ ID NO: 15214 - RNA, 22 nt, synthetic construct
  source 1..22: mol_type = other RNA
tgcatccctgctcaggctaagg

SEQ ID NO: 15215 - RNA, 22 nt, synthetic construct
  source 1..22: mol_type = other RNA
tgcctacaaactcgccgaggcc

SEQ ID NO: 15216 - RNA, 22 nt, synthetic construct
  source 1..22: mol_type = other RNA
tgccttcgctcgctgcatccct

SEQ ID NO: 15217 - RNA, 22 nt, synthetic construct
  source 1..22: mol_type = other RNA
tgcggggacacagtgaggggga

SEQ ID NO: 15218 - RNA, 22 nt, synthetic construct
  source 1..22: mol_type = other RNA
tgctcaggctaaggtgagtggg

SEQ ID NO: 15219 - RNA, 22 nt, synthetic construct
  source 1..22: mol_type = other RNA
tgggacagactgcggggacaca

SEQ ID NO: 15220 - RNA, 22 nt, synthetic construct
  source 1..22: mol_type = other RNA
tggggccccggataccggtcag

SEQ ID NO: 15221 - RNA, 22 nt, synthetic construct
  source 1..22: mol_type = other RNA
tgggtgcctacaaactcgccga

SEQ ID NO: 15222 - RNA, 22 nt, synthetic construct
  source 1..22: mol_type = other RNA
tggtcctgagccctccccctca

SEQ ID NO: 15223 - RNA, 22 nt, synthetic construct
  source 1..22: mol_type = other RNA
tgtaggcacccaggtcagtgat

SEQ ID NO: 15224 - RNA, 22 nt, synthetic construct
  source 1..22: mol_type = other RNA
tgtcccagaacaacatcactga

SEQ ID NO: 15225 - RNA, 22 nt, synthetic construct
  source 1..22: mol_type = other RNA
tgtccccgcagtctgtcccaga

SEQ ID NO: 15226 - RNA, 22 nt, synthetic construct
  source 1..22: mol_type = other RNA
tgtgtccccgcagtctgtccca

SEQ ID NO: 15227 - RNA, 22 nt, synthetic construct
  source 1..22: mol_type = other RNA
tgttctgggacagactgcgggg

SEQ ID NO: 15228 - RNA, 22 nt, synthetic construct
  source 1..22: mol_type = other RNA
tgttgttctgggacagactgcg

SEQ ID NO: 15229 - RNA, 22 nt, synthetic construct
  source 1..22: mol_type = other RNA
ttagcctgagcagggatgcagc

SEQ ID NO: 15230 - RNA, 22 nt, synthetic construct
  source 1..22: mol_type = other RNA
ttcgctcgctgcatccctgctc

SEQ ID NO: 15231 - RNA, 22 nt, synthetic construct
  source 1..22: mol_type = other RNA
ttctgggacagactgcggggac

SEQ ID NO: 15232 - RNA, 22 nt, synthetic construct
  source 1..22: mol_type = other RNA
ttggtcctgagccctccccctc

SEQ ID NO: 15233 - RNA, 22 nt, synthetic construct
  source 1..22: mol_type = other RNA
ttgtaggcacccaggtcagtga

SEQ ID NO: 15234 - RNA, 22 nt, synthetic construct
  source 1..22: mol_type = other RNA
ttgttctgggacagactgcggg

SEQ ID NO: 15235 - RNA, 22 nt, synthetic construct
  source 1..22: mol_type = other RNA
tttggtcctgagccctccccct

SEQ ID NO: 15236 - RNA, 22 nt, synthetic construct
  source 1..22: mol_type = other RNA
tttgtaggcacccaggtcagtg

SEQ ID NO: 15237 - RNA, 20 nt, synthetic construct
  source 1..20: mol_type = other RNA
aaacagaggccagggggagg

SEQ ID NO: 15238 - RNA, 20 nt, synthetic construct
  source 1..20: mol_type = other RNA
aacagaggccagggggaggg

SEQ ID NO: 15239 - RNA, 20 nt, synthetic construct
  source 1..20: mol_type = other RNA
aactgcatctgcgacgtggg

SEQ ID NO: 15240 - RNA, 20 nt, synthetic construct
  source 1..20: mol_type = other RNA
aagcacacgagccaagctct

SEQ ID NO: 15241 - RNA, 20 nt, synthetic construct
  source 1..20: mol_type = other RNA
aagctctcggctcccacgtc

SEQ ID NO: 15242 - RNA, 20 nt, synthetic construct
  source 1..20: mol_type = other RNA
aagctgtcggaaacagaggc

SEQ ID NO: 15243 - RNA, 20 nt, synthetic construct
  source 1..20: mol_type = other RNA
aataactgcatctgcgacgt

SEQ ID NO: 15244 - RNA, 20 nt, synthetic construct
  source 1..20: mol_type = other RNA
aatccctccccctggcctct

SEQ ID NO: 15245 - RNA, 20 nt, synthetic construct
  source 1..20: mol_type = other RNA
acaagctgtcggaaacagag

SEQ ID NO: 15246 - RNA, 20 nt, synthetic construct
  source 1..20: mol_type = other RNA
acaataactgcatctgcgac

SEQ ID NO: 15247 - RNA, 20 nt, synthetic construct
  source 1..20: mol_type = other RNA
acaccatgtccggaagcaca

SEQ ID NO: 15248 - RNA, 20 nt, synthetic construct
  source 1..20: mol_type = other RNA
acacgagccaagctctcggc

SEQ ID NO: 15249 - RNA, 20 nt, synthetic construct
  source 1..20: mol_type = other RNA
acactcactccatcacccgg

SEQ ID NO: 15250 - RNA, 20 nt, synthetic construct
  source 1..20: mol_type = other RNA
acagaggccagggggaggga

SEQ ID NO: 15251 - RNA, 20 nt, synthetic construct
  source 1..20: mol_type = other RNA
acagcttgtacaataactgc

SEQ ID NO: 15252 - RNA, 20 nt, synthetic construct
  source 1..20: mol_type = other RNA
acaggcctccaatccctccc

SEQ ID NO: 15253 - RNA, 20 nt, synthetic construct
  source 1..20: mol_type = other RNA
acatggtgtccctccgggtg

SEQ ID NO: 15254 - RNA, 20 nt, synthetic construct
  source 1..20: mol_type = other RNA
accatgtccggaagcacacg

SEQ ID NO: 15255 - RNA, 20 nt, synthetic construct
  source 1..20: mol_type = other RNA
acccaccgcccagactccca

SEQ ID NO: 15256 - RNA, 20 nt, synthetic construct
  source 1..20: mol_type = other RNA
accccgggctgagccaccca

SEQ ID NO: 15257 - RNA, 20 nt, synthetic construct
  source 1..20: mol_type = other RNA
acccggagggacaccatgtc

SEQ ID NO: 15258 - RNA, 20 nt, synthetic construct
  source 1..20: mol_type = other RNA
accgcccagactcccacact

SEQ ID NO: 15259 - RNA, 20 nt, synthetic construct
  source 1..20: mol_type = other RNA
acgagccaagctctcggctc

SEQ ID NO: 15260 - RNA, 20 nt, synthetic construct
  source 1..20: mol_type = other RNA
acgtcgcagatgcagttatt

SEQ ID NO: 15261 - RNA, 20 nt, synthetic construct
  source 1..20: mol_type = other RNA
acgtgggagccgagagcttg

SEQ ID NO: 15262 - RNA, 20 nt, synthetic construct
  source 1..20: mol_type = other RNA
actcactccatcacccggag

SEQ ID NO: 15263 - RNA, 20 nt, synthetic construct
  source 1..20: mol_type = other RNA
actccatcacccggagggac

SEQ ID NO: 15264 - RNA, 20 nt, synthetic construct
  source 1..20: mol_type = other RNA
actcccacactcactccatc

SEQ ID NO: 15265 - RNA, 20 nt, synthetic construct
  source 1..20: mol_type = other RNA
actgcatctgcgacgtggga

SEQ ID NO: 15266 - RNA, 20 nt, synthetic construct
  source 1..20: mol_type = other RNA
agactcccacactcactcca

SEQ ID NO: 15267 - RNA, 20 nt, synthetic construct
  source 1..20: mol_type = other RNA
agagcttggctcgtgtgctt

SEQ ID NO: 15268 - RNA, 20 nt, synthetic construct
  source 1..20: mol_type = other RNA
agaggccagggggagggatt

SEQ ID NO: 15269 - RNA, 20 nt, synthetic construct
  source 1..20: mol_type = other RNA
agatgcagttattgtacaag

SEQ ID NO: 15270 - RNA, 20 nt, synthetic construct
  source 1..20: mol_type = other RNA
agcacacgagccaagctctc

SEQ ID NO: 15271 - RNA, 20 nt, synthetic construct
  source 1..20: mol_type = other RNA
agccaagctctcggctccca

SEQ ID NO: 15272 - RNA, 20 nt, synthetic construct
  source 1..20: mol_type = other RNA
agccacccaccgcccagact

SEQ ID NO: 15273 - RNA, 20 nt, synthetic construct
  source 1..20: mol_type = other RNA
agccgagagcttggctcgtg

SEQ ID NO: 15274 - RNA, 20 nt, synthetic construct
  source 1..20: mol_type = other RNA
agctctcggctcccacgtcg

SEQ ID NO: 15275 - RNA, 20 nt, synthetic construct
  source 1..20: mol_type = other RNA
agctgtcggaaacagaggcc

SEQ ID NO: 15276 - RNA, 20 nt, synthetic construct
  source 1..20: mol_type = other RNA
agcttggctcgtgtgcttcc

SEQ ID NO: 15277 - RNA, 20 nt, synthetic construct
  source 1..20: mol_type = other RNA
agcttgtacaataactgcat

SEQ ID NO: 15278 - RNA, 20 nt, synthetic construct
  source 1..20: mol_type = other RNA
aggccagggggagggattgg

SEQ ID NO: 15279 - RNA, 20 nt, synthetic construct
  source 1..20: mol_type = other RNA
aggcctccaatccctccccc

SEQ ID NO: 15280 - RNA, 20 nt, synthetic construct
  source 1..20: mol_type = other RNA
agggacaccatgtccggaag

SEQ ID NO: 15281 - RNA, 20 nt, synthetic construct
  source 1..20: mol_type = other RNA
agggggagggattggaggcc

SEQ ID NO: 15282 - RNA, 20 nt, synthetic construct
  source 1..20: mol_type = other RNA
agtctgggcggtgggtggct

SEQ ID NO: 15283 - RNA, 20 nt, synthetic construct
  source 1..20: mol_type = other RNA
agtgagtgtgggagtctggg

SEQ ID NO: 15284 - RNA, 20 nt, synthetic construct
  source 1..20: mol_type = other RNA
agtgtgggagtctgggcggt

SEQ ID NO: 15285 - RNA, 20 nt, synthetic construct
  source 1..20: mol_type = other RNA
agttattgtacaagctgtcg

SEQ ID NO: 15286 - RNA, 20 nt, synthetic construct
  source 1..20: mol_type = other RNA
ataactgcatctgcgacgtg

SEQ ID NO: 15287 - RNA, 20 nt, synthetic construct
  source 1..20: mol_type = other RNA
atcacccggagggacaccat

SEQ ID NO: 15288 - RNA, 20 nt, synthetic construct
  source 1..20: mol_type = other RNA
atccctccccctggcctctg

SEQ ID NO: 15289 - RNA, 20 nt, synthetic construct
  source 1..20: mol_type = other RNA
atctgcgacgtgggagccga

SEQ ID NO: 15290 - RNA, 20 nt, synthetic construct
  source 1..20: mol_type = other RNA
atgcacaggcctccaatccc

SEQ ID NO: 15291 - RNA, 20 nt, synthetic construct
  source 1..20: mol_type = other RNA
atgcagttattgtacaagct

SEQ ID NO: 15292 - RNA, 20 nt, synthetic construct
  source 1..20: mol_type = other RNA
atggagtgagtgtgggagtc

SEQ ID NO: 15293 - RNA, 20 nt, synthetic construct
  source 1..20: mol_type = other RNA
atggtgtccctccgggtgat

SEQ ID NO: 15294 - RNA, 20 nt, synthetic construct
  source 1..20: mol_type = other RNA
atgtccggaagcacacgagc

SEQ ID NO: 15295 - RNA, 20 nt, synthetic construct
  source 1..20: mol_type = other RNA
attgtacaagctgtcggaaa

SEQ ID NO: 15296 - RNA, 20 nt, synthetic construct
  source 1..20: mol_type = other RNA
caagctctcggctcccacgt

SEQ ID NO: 15297 - RNA, 20 nt, synthetic construct
  source 1..20: mol_type = other RNA
caagctgtcggaaacagagg

SEQ ID NO: 15298 - RNA, 20 nt, synthetic construct
  source 1..20: mol_type = other RNA
caataactgcatctgcgacg

SEQ ID NO: 15299 - RNA, 20 nt, synthetic construct
  source 1..20: mol_type = other RNA
caatccctccccctggcctc

SEQ ID NO: 15300 - RNA, 20 nt, synthetic construct
  source 1..20: mol_type = other RNA
cacacgagccaagctctcgg

SEQ ID NO: 15301 - RNA, 20 nt, synthetic construct
  source 1..20: mol_type = other RNA
cacactcactccatcacccg

SEQ ID NO: 15302 - RNA, 20 nt, synthetic construct
  source 1..20: mol_type = other RNA
cacaggcctccaatccctcc

SEQ ID NO: 15303 - RNA, 20 nt, synthetic construct
  source 1..20: mol_type = other RNA
caccatgtccggaagcacac

SEQ ID NO: 15304 - RNA, 20 nt, synthetic construct
  source 1..20: mol_type = other RNA
cacccaccgcccagactccc

SEQ ID NO: 15305 - RNA, 20 nt, synthetic construct
  source 1..20: mol_type = other RNA
caccccgggctgagccaccc

SEQ ID NO: 15306 - RNA, 20 nt, synthetic construct
  source 1..20: mol_type = other RNA
cacccggagggacaccatgt

SEQ ID NO: 15307 - RNA, 20 nt, synthetic construct
  source 1..20: mol_type = other RNA
caccgcccagactcccacac

SEQ ID NO: 15308 - RNA, 20 nt, synthetic construct
  source 1..20: mol_type = other RNA
cacgagccaagctctcggct

SEQ ID NO: 15309 - RNA, 20 nt, synthetic construct
  source 1..20: mol_type = other RNA
cacgtcgcagatgcagttat

SEQ ID NO: 15310 - RNA, 20 nt, synthetic construct
  source 1..20: mol_type = other RNA
cactcactccatcacccgga

SEQ ID NO: 15311 - RNA, 20 nt, synthetic construct
  source 1..20: mol_type = other RNA
cactccatcacccggaggga

SEQ ID NO: 15312 - RNA, 20 nt, synthetic construct
  source 1..20: mol_type = other RNA
cagactcccacactcactcc

SEQ ID NO: 15313 - RNA, 20 nt, synthetic construct
  source 1..20: mol_type = other RNA
cagaggccagggggagggat

SEQ ID NO: 15314 - RNA, 20 nt, synthetic construct
  source 1..20: mol_type = other RNA
cagatgcagttattgtacaa

SEQ ID NO: 15315 - RNA, 20 nt, synthetic construct
  source 1..20: mol_type = other RNA
cagcttgtacaataactgca

SEQ ID NO: 15316 - RNA, 20 nt, synthetic construct
  source 1..20: mol_type = other RNA
caggcctccaatccctcccc

SEQ ID NO: 15317 - RNA, 20 nt, synthetic construct
  source 1..20: mol_type = other RNA
cagggggagggattggaggc

SEQ ID NO: 15318 - RNA, 20 nt, synthetic construct
  source 1..20: mol_type = other RNA
cagttattgtacaagctgtc

SEQ ID NO: 15319 - RNA, 20 nt, synthetic construct
  source 1..20: mol_type = other RNA
catcacccggagggacacca

SEQ ID NO: 15320 - RNA, 20 nt, synthetic construct
  source 1..20: mol_type = other RNA
catctgcgacgtgggagccg

SEQ ID NO: 15321 - RNA, 20 nt, synthetic construct
  source 1..20: mol_type = other RNA
catgcacaggcctccaatcc

SEQ ID NO: 15322 - RNA, 20 nt, synthetic construct
  source 1..20: mol_type = other RNA
catggtgtccctccgggtga

SEQ ID NO: 15323 - RNA, 20 nt, synthetic construct
  source 1..20: mol_type = other RNA
catgtccggaagcacacgag

SEQ ID NO: 15324 - RNA, 20 nt, synthetic construct
  source 1..20: mol_type = other RNA
ccaagctctcggctcccacg

SEQ ID NO: 15325 - RNA, 20 nt, synthetic construct
  source 1..20: mol_type = other RNA
ccaatccctccccctggcct

SEQ ID NO: 15326 - RNA, 20 nt, synthetic construct
  source 1..20: mol_type = other RNA
ccacactcactccatcaccc

SEQ ID NO: 15327 - RNA, 20 nt, synthetic construct
  source 1..20: mol_type = other RNA
ccacccaccgcccagactcc

SEQ ID NO: 15328 - RNA, 20 nt, synthetic construct
  source 1..20: mol_type = other RNA
ccaccccgggctgagccacc

SEQ ID NO: 15329 - RNA, 20 nt, synthetic construct
  source 1..20: mol_type = other RNA
ccaccgcccagactcccaca

SEQ ID NO: 15330 - RNA, 20 nt, synthetic construct
  source 1..20: mol_type = other RNA
ccacgtcgcagatgcagtta

SEQ ID NO: 15331 - RNA, 20 nt, synthetic construct
  source 1..20: mol_type = other RNA
ccagactcccacactcactc

SEQ ID NO: 15332 - RNA, 20 nt, synthetic construct
  source 1..20: mol_type = other RNA
ccagggggagggattggagg

SEQ ID NO: 15333 - RNA, 20 nt, synthetic construct
  source 1..20: mol_type = other RNA
ccatcacccggagggacacc

SEQ ID NO: 15334 - RNA, 20 nt, synthetic construct
  source 1..20: mol_type = other RNA
ccatgtccggaagcacacga

SEQ ID NO: 15335 - RNA, 20 nt, synthetic construct
  source 1..20: mol_type = other RNA
cccacactcactccatcacc

SEQ ID NO: 15336 - RNA, 20 nt, synthetic construct
  source 1..20: mol_type = other RNA
cccaccccgggctgagccac

SEQ ID NO: 15337 - RNA, 20 nt, synthetic construct
  source 1..20: mol_type = other RNA
cccaccgcccagactcccac

SEQ ID NO: 15338 - RNA, 20 nt, synthetic construct
  source 1..20: mol_type = other RNA
cccacgtcgcagatgcagtt

SEQ ID NO: 15339 - RNA, 20 nt, synthetic construct
  source 1..20: mol_type = other RNA
cccagactcccacactcact

SEQ ID NO: 15340 - RNA, 20 nt, synthetic construct
  source 1..20: mol_type = other RNA
ccccctggcctctgtttccg

SEQ ID NO: 15341 - RNA, 20 nt, synthetic construct
  source 1..20: mol_type = other RNA
ccccgggctgagccacccac

SEQ ID NO: 15342 - RNA, 20 nt, synthetic construct
  source 1..20: mol_type = other RNA
cccctggcctctgtttccga

SEQ ID NO: 15343 - RNA, 20 nt, synthetic construct
  source 1..20: mol_type = other RNA
cccggagggacaccatgtcc

SEQ ID NO: 15344 - RNA, 20 nt, synthetic construct
  source 1..20: mol_type = other RNA
cccgggctgagccacccacc

SEQ ID NO: 15345 - RNA, 20 nt, synthetic construct
  source 1..20: mol_type = other RNA
ccctccccctggcctctgtt

SEQ ID NO: 15346 - RNA, 20 nt, synthetic construct
  source 1..20: mol_type = other RNA
ccctccgggtgatggagtga

SEQ ID NO: 15347 - RNA, 20 nt, synthetic construct
  source 1..20: mol_type = other RNA
ccctggcctctgtttccgac

SEQ ID NO: 15348 - RNA, 20 nt, synthetic construct
  source 1..20: mol_type = other RNA
ccgacagcttgtacaataac

SEQ ID NO: 15349 - RNA, 20 nt, synthetic construct
  source 1..20: mol_type = other RNA
ccgagagcttggctcgtgtg

SEQ ID NO: 15350 - RNA, 20 nt, synthetic construct
  source 1..20: mol_type = other RNA
ccgcccagactcccacactc

SEQ ID NO: 15351 - RNA, 20 nt, synthetic construct
  source 1..20: mol_type = other RNA
ccggaagcacacgagccaag

SEQ ID NO: 15352 - RNA, 20 nt, synthetic construct
  source 1..20: mol_type = other RNA
ccggacatggtgtccctccg

SEQ ID NO: 15353 - RNA, 20 nt, synthetic construct
  source 1..20: mol_type = other RNA
ccggagggacaccatgtccg

SEQ ID NO: 15354 - RNA, 20 nt, synthetic construct
  source 1..20: mol_type = other RNA
ccgggctgagccacccaccg

SEQ ID NO: 15355 - RNA, 20 nt, synthetic construct
  source 1..20: mol_type = other RNA
ccgggtgatggagtgagtgt

SEQ ID NO: 15356 - RNA, 20 nt, synthetic construct
  source 1..20: mol_type = other RNA
cctccaatccctccccctgg

SEQ ID NO: 15357 - RNA, 20 nt, synthetic construct
  source 1..20: mol_type = other RNA
cctccccctggcctctgttt

SEQ ID NO: 15358 - RNA, 20 nt, synthetic construct
  source 1..20: mol_type = other RNA
cctccgggtgatggagtgag

SEQ ID NO: 15359 - RNA, 20 nt, synthetic construct
  source 1..20: mol_type = other RNA
cctctgtttccgacagcttg

SEQ ID NO: 15360 - RNA, 20 nt, synthetic construct
  source 1..20: mol_type = other RNA
cctggcctctgtttccgaca

SEQ ID NO: 15361 - RNA, 20 nt, synthetic construct
  source 1..20: mol_type = other RNA
cgacagcttgtacaataact

SEQ ID NO: 15362 - RNA, 20 nt, synthetic construct
  source 1..20: mol_type = other RNA
cgacgtgggagccgagagct

SEQ ID NO: 15363 - RNA, 20 nt, synthetic construct
  source 1..20: mol_type = other RNA
cgagagcttggctcgtgtgc

SEQ ID NO: 15364 - RNA, 20 nt, synthetic construct
  source 1..20: mol_type = other RNA
cgagccaagctctcggctcc

SEQ ID NO: 15365 - RNA, 20 nt, synthetic construct
  source 1..20: mol_type = other RNA
cgcagatgcagttattgtac

SEQ ID NO: 15366 - RNA, 20 nt, synthetic construct
  source 1..20: mol_type = other RNA
cgcccagactcccacactca

SEQ ID NO: 15367 - RNA, 20 nt, synthetic construct
  source 1..20: mol_type = other RNA
cggaaacagaggccaggggg

SEQ ID NO: 15368 - RNA, 20 nt, synthetic construct
  source 1..20: mol_type = other RNA
cggaagcacacgagccaagc

SEQ ID NO: 15369 - RNA, 20 nt, synthetic construct
  source 1..20: mol_type = other RNA
cggacatggtgtccctccgg

SEQ ID NO: 15370 - RNA, 20 nt, synthetic construct
  source 1..20: mol_type = other RNA
cggagggacaccatgtccgg

SEQ ID NO: 15371 - RNA, 20 nt, synthetic construct
  source 1..20: mol_type = other RNA
cggctcccacgtcgcagatg

SEQ ID NO: 15372 - RNA, 20 nt, synthetic construct
  source 1..20: mol_type = other RNA
cgggctgagccacccaccgc

SEQ ID NO: 15373 - RNA, 20 nt, synthetic construct
  source 1..20: mol_type = other RNA
cgggtgatggagtgagtgtg

SEQ ID NO: 15374 - RNA, 20 nt, synthetic construct
  source 1..20: mol_type = other RNA
cgtcgcagatgcagttattg

SEQ ID NO: 15375 - RNA, 20 nt, synthetic construct
  source 1..20: mol_type = other RNA
cgtgggagccgagagcttgg

SEQ ID NO: 15376 - RNA, 20 nt, synthetic construct
  source 1..20: mol_type = other RNA
cgtgtgcttccggacatggt

SEQ ID NO: 15377 - RNA, 20 nt, synthetic construct
  source 1..20: mol_type = other RNA
ctcactccatcacccggagg

SEQ ID NO: 15378 - RNA, 20 nt, synthetic construct
  source 1..20: mol_type = other RNA
ctccaatccctccccctggc

SEQ ID NO: 15379 - RNA, 20 nt, synthetic construct
  source 1..20: mol_type = other RNA
ctccatcacccggagggaca

SEQ ID NO: 15380 - RNA, 20 nt, synthetic construct
  source 1..20: mol_type = other RNA
ctcccacactcactccatca

SEQ ID NO: 15381 - RNA, 20 nt, synthetic construct
  source 1..20: mol_type = other RNA
ctcccacgtcgcagatgcag

SEQ ID NO: 15382 - RNA, 20 nt, synthetic construct
  source 1..20: mol_type = other RNA
ctccccctggcctctgtttc

SEQ ID NO: 15383 - RNA, 20 nt, synthetic construct
  source 1..20: mol_type = other RNA
ctccgggtgatggagtgagt

SEQ ID NO: 15384 - RNA, 20 nt, synthetic construct
  source 1..20: mol_type = other RNA
ctcggctcccacgtcgcaga

SEQ ID NO: 15385 - RNA, 20 nt, synthetic construct
  source 1..20: mol_type = other RNA
ctcgtgtgcttccggacatg

SEQ ID NO: 15386 - RNA, 20 nt, synthetic construct
  source 1..20: mol_type = other RNA
ctctcggctcccacgtcgca

SEQ ID NO: 15387 - RNA, 20 nt, synthetic construct
  source 1..20: mol_type = other RNA
ctctgtttccgacagcttgt

SEQ ID NO: 15388 - RNA, 20 nt, synthetic construct
  source 1..20: mol_type = other RNA
ctgagccacccaccgcccag

SEQ ID NO: 15389 - RNA, 20 nt, synthetic construct
  source 1..20: mol_type = other RNA
ctgcatctgcgacgtgggag

SEQ ID NO: 15390 - RNA, 20 nt, synthetic construct
  source 1..20: mol_type = other RNA
ctgcgacgtgggagccgaga

SEQ ID NO: 15391 - RNA, 20 nt, synthetic construct
  source 1..20: mol_type = other RNA
ctggcctctgtttccgacag

SEQ ID NO: 15392 - RNA, 20 nt, synthetic construct
  source 1..20: mol_type = other RNA
ctgggcggtgggtggctcag

SEQ ID NO: 15393 - RNA, 20 nt, synthetic construct
  source 1..20: mol_type = other RNA
ctgtcggaaacagaggccag

SEQ ID NO: 15394 - RNA, 20 nt, synthetic construct
  source 1..20: mol_type = other RNA
ctgtttccgacagcttgtac

SEQ ID NO: 15395 - RNA, 20 nt, synthetic construct
  source 1..20: mol_type = other RNA
cttccggacatggtgtccct

SEQ ID NO: 15396 - RNA, 20 nt, synthetic construct
  source 1..20: mol_type = other RNA
cttggctcgtgtgcttccgg

SEQ ID NO: 15397 - RNA, 20 nt, synthetic construct
  source 1..20: mol_type = other RNA
cttgtacaataactgcatct

SEQ ID NO: 15398 - RNA, 20 nt, synthetic construct
  source 1..20: mol_type = other RNA
gaaacagaggccagggggag

SEQ ID NO: 15399 - RNA, 20 nt, synthetic construct
  source 1..20: mol_type = other RNA
gaagcacacgagccaagctc

SEQ ID NO: 15400 - RNA, 20 nt, synthetic construct
  source 1..20: mol_type = other RNA
gacaccatgtccggaagcac

SEQ ID NO: 15401 - RNA, 20 nt, synthetic construct
  source 1..20: mol_type = other RNA
gacagcttgtacaataactg

SEQ ID NO: 15402 - RNA, 20 nt, synthetic construct
  source 1..20: mol_type = other RNA
gacatggtgtccctccgggt

SEQ ID NO: 15403 - RNA, 20 nt, synthetic construct
  source 1..20: mol_type = other RNA
gacgtgggagccgagagctt

SEQ ID NO: 15404 - RNA, 20 nt, synthetic construct
  source 1..20: mol_type = other RNA
gactcccacactcactccat

SEQ ID NO: 15405 - RNA, 20 nt, synthetic construct
  source 1..20: mol_type = other RNA
gagagcttggctcgtgtgct

SEQ ID NO: 15406 - RNA, 20 nt, synthetic construct
  source 1..20: mol_type = other RNA
gagccaagctctcggctccc

SEQ ID NO: 15407 - RNA, 20 nt, synthetic construct
  source 1..20: mol_type = other RNA
gagccacccaccgcccagac

SEQ ID NO: 15408 - RNA, 20 nt, synthetic construct
  source 1..20: mol_type = other RNA
gagccgagagcttggctcgt

SEQ ID NO: 15409 - RNA, 20 nt, synthetic construct
  source 1..20: mol_type = other RNA
gagcttggctcgtgtgcttc

SEQ ID NO: 15410 - RNA, 20 nt, synthetic construct
  source 1..20: mol_type = other RNA
gaggccagggggagggattg

SEQ ID NO: 15411 - RNA, 20 nt, synthetic construct
  source 1..20: mol_type = other RNA
gagggacaccatgtccggaa

SEQ ID NO: 15412 - RNA, 20 nt, synthetic construct
  source 1..20: mol_type = other RNA
gagtctgggcggtgggtggc

SEQ ID NO: 15413 - RNA, 20 nt, synthetic construct
  source 1..20: mol_type = other RNA
gagtgagtgtgggagtctgg

SEQ ID NO: 15414 - RNA, 20 nt, synthetic construct
  source 1..20: mol_type = other RNA
gagtgtgggagtctgggcgg

SEQ ID NO: 15415 - RNA, 20 nt, synthetic construct
  source 1..20: mol_type = other RNA
gatgcagttattgtacaagc

SEQ ID NO: 15416 - RNA, 20 nt, synthetic construct
  source 1..20: mol_type = other RNA
gatggagtgagtgtgggagt

SEQ ID NO: 15417 - RNA, 20 nt, synthetic construct
  source 1..20: mol_type = other RNA
gcacacgagccaagctctcg

SEQ ID NO: 15418 - RNA, 20 nt, synthetic construct
  source 1..20: mol_type = other RNA
gcacaggcctccaatccctc

SEQ ID NO: 15419 - RNA, 20 nt, synthetic construct
  source 1..20: mol_type = other RNA
gcagatgcagttattgtaca

SEQ ID NO: 15420 - RNA, 20 nt, synthetic construct
  source 1..20: mol_type = other RNA
gcagttattgtacaagctgt

SEQ ID NO: 15421 - RNA, 20 nt, synthetic construct
  source 1..20: mol_type = other RNA
gcatctgcgacgtgggagcc

SEQ ID NO: 15422 - RNA, 20 nt, synthetic construct
  source 1..20: mol_type = other RNA
gccaagctctcggctcccac

SEQ ID NO: 15423 - RNA, 20 nt, synthetic construct
  source 1..20: mol_type = other RNA
gccacccaccgcccagactc

SEQ ID NO: 15424 - RNA, 20 nt, synthetic construct
  source 1..20: mol_type = other RNA
gccagggggagggattggag

SEQ ID NO: 15425 - RNA, 20 nt, synthetic construct
  source 1..20: mol_type = other RNA
gcccagactcccacactcac

SEQ ID NO: 15426 - RNA, 20 nt, synthetic construct
  source 1..20: mol_type = other RNA
gccgagagcttggctcgtgt

SEQ ID NO: 15427 - RNA, 20 nt, synthetic construct
  source 1..20: mol_type = other RNA
gcctccaatccctccccctg

SEQ ID NO: 15428 - RNA, 20 nt, synthetic construct
  source 1..20: mol_type = other RNA
gcctctgtttccgacagctt

SEQ ID NO: 15429 - RNA, 20 nt, synthetic construct
  source 1..20: mol_type = other RNA
gcgacgtgggagccgagagc

SEQ ID NO: 15430 - RNA, 20 nt, synthetic construct
  source 1..20: mol_type = other RNA
gctcccacgtcgcagatgca

SEQ ID NO: 15431 - RNA, 20 nt, synthetic construct
  source 1..20: mol_type = other RNA
gctcgtgtgcttccggacat

SEQ ID NO: 15432 - RNA, 20 nt, synthetic construct
  source 1..20: mol_type = other RNA
gctctcggctcccacgtcgc

SEQ ID NO: 15433 - RNA, 20 nt, synthetic construct
  source 1..20: mol_type = other RNA
gctgagccacccaccgccca

SEQ ID NO: 15434 - RNA, 20 nt, synthetic construct
  source 1..20: mol_type = other RNA
gctgtcggaaacagaggcca

SEQ ID NO: 15435 - RNA, 20 nt, synthetic construct
  source 1..20: mol_type = other RNA
gcttccggacatggtgtccc

SEQ ID NO: 15436 - RNA, 20 nt, synthetic construct
  source 1..20: mol_type = other RNA
gcttggctcgtgtgcttccg

SEQ ID NO: 15437 - RNA, 20 nt, synthetic construct
  source 1..20: mol_type = other RNA
gcttgtacaataactgcatc

SEQ ID NO: 15438 - RNA, 20 nt, synthetic construct
  source 1..20: mol_type = other RNA
ggaaacagaggccaggggga

SEQ ID NO: 15439 - RNA, 20 nt, synthetic construct
  source 1..20: mol_type = other RNA
ggaagcacacgagccaagct

SEQ ID NO: 15440 - RNA, 20 nt, synthetic construct
  source 1..20: mol_type = other RNA
ggacaccatgtccggaagca

SEQ ID NO: 15441 - RNA, 20 nt, synthetic construct
  source 1..20: mol_type = other RNA
ggacatggtgtccctccggg

SEQ ID NO: 15442 - RNA, 20 nt, synthetic construct
  source 1..20: mol_type = other RNA
ggagccgagagcttggctcg

SEQ ID NO: 15443 - RNA, 20 nt, synthetic construct
  source 1..20: mol_type = other RNA
ggagggacaccatgtccgga

SEQ ID NO: 15444 - RNA, 20 nt, synthetic construct
  source 1..20: mol_type = other RNA
ggagtctgggcggtgggtgg

SEQ ID NO: 15445 - RNA, 20 nt, synthetic construct
  source 1..20: mol_type = other RNA
ggagtgagtgtgggagtctg

SEQ ID NO: 15446 - RNA, 20 nt, synthetic construct
  source 1..20: mol_type = other RNA
ggccagggggagggattgga

SEQ ID NO: 15447 - RNA, 20 nt, synthetic construct
  source 1..20: mol_type = other RNA
ggcctccaatccctccccct

SEQ ID NO: 15448 - RNA, 20 nt, synthetic construct
  source 1..20: mol_type = other RNA
ggcctctgtttccgacagct

SEQ ID NO: 15449 - RNA, 20 nt, synthetic construct
  source 1..20: mol_type = other RNA
ggcggtgggtggctcagccc

SEQ ID NO: 15450 - RNA, 20 nt, synthetic construct
  source 1..20: mol_type = other RNA
ggctcccacgtcgcagatgc

SEQ ID NO: 15451 - RNA, 20 nt, synthetic construct
  source 1..20: mol_type = other RNA
ggctcgtgtgcttccggaca

SEQ ID NO: 15452 - RNA, 20 nt, synthetic construct
  source 1..20: mol_type = other RNA
ggctgagccacccaccgccc

SEQ ID NO: 15453 - RNA, 20 nt, synthetic construct
  source 1..20: mol_type = other RNA
gggacaccatgtccggaagc

SEQ ID NO: 15454 - RNA, 20 nt, synthetic construct
  source 1..20: mol_type = other RNA
gggagccgagagcttggctc

SEQ ID NO: 15455 - RNA, 20 nt, synthetic construct
  source 1..20: mol_type = other RNA
gggagtctgggcggtgggtg

SEQ ID NO: 15456 - RNA, 20 nt, synthetic construct
  source 1..20: mol_type = other RNA
gggcggtgggtggctcagcc

SEQ ID NO: 15457 - RNA, 20 nt, synthetic construct
  source 1..20: mol_type = other RNA
gggctgagccacccaccgcc

SEQ ID NO: 15458 - RNA, 20 nt, synthetic construct
  source 1..20: mol_type = other RNA
gggtgatggagtgagtgtgg

SEQ ID NO: 15459 - RNA, 20 nt, synthetic construct
  source 1..20: mol_type = other RNA
ggtgatggagtgagtgtggg

SEQ ID NO: 15460 - RNA, 20 nt, synthetic construct
  source 1..20: mol_type = other RNA
ggtgtccctccgggtgatgg

SEQ ID NO: 15461 - RNA, 20 nt, synthetic construct
  source 1..20: mol_type = other RNA
gtacaagctgtcggaaacag

SEQ ID NO: 15462 - RNA, 20 nt, synthetic construct
  source 1..20: mol_type = other RNA
gtacaataactgcatctgcg

SEQ ID NO: 15463 - RNA, 20 nt, synthetic construct
  source 1..20: mol_type = other RNA
gtccctccgggtgatggagt

SEQ ID NO: 15464 - RNA, 20 nt, synthetic construct
  source 1..20: mol_type = other RNA
gtccggaagcacacgagcca

SEQ ID NO: 15465 - RNA, 20 nt, synthetic construct
  source 1..20: mol_type = other RNA
gtcgcagatgcagttattgt

SEQ ID NO: 15466 - RNA, 20 nt, synthetic construct
  source 1..20: mol_type = other RNA
gtcggaaacagaggccaggg

SEQ ID NO: 15467 - RNA, 20 nt, synthetic construct
  source 1..20: mol_type = other RNA
gtctgggcggtgggtggctc

SEQ ID NO: 15468 - RNA, 20 nt, synthetic construct
  source 1..20: mol_type = other RNA
gtgagtgtgggagtctgggc

SEQ ID NO: 15469 - RNA, 20 nt, synthetic construct
  source 1..20: mol_type = other RNA
gtgatggagtgagtgtggga

SEQ ID NO: 15470 - RNA, 20 nt, synthetic construct
  source 1..20: mol_type = other RNA
gtgcttccggacatggtgtc

SEQ ID NO: 15471 - RNA, 20 nt, synthetic construct
  source 1..20: mol_type = other RNA
gtgggagccgagagcttggc

SEQ ID NO: 15472 - RNA, 20 nt, synthetic construct
  source 1..20: mol_type = other RNA
gtgggagtctgggcggtggg

SEQ ID NO: 15473 - RNA, 20 nt, synthetic construct
  source 1..20: mol_type = other RNA
gtgtccctccgggtgatgga

SEQ ID NO: 15474 - RNA, 20 nt, synthetic construct
  source 1..20: mol_type = other RNA
gtgtgcttccggacatggtg

SEQ ID NO: 15475 - RNA, 20 nt, synthetic construct
  source 1..20: mol_type = other RNA
gtgtgggagtctgggcggtg

SEQ ID NO: 15476 - RNA, 20 nt, synthetic construct
  source 1..20: mol_type = other RNA
gttattgtacaagctgtcgg

SEQ ID NO: 15477 - RNA, 20 nt, synthetic construct
  source 1..20: mol_type = other RNA
gtttccgacagcttgtacaa

SEQ ID NO: 15478 - RNA, 20 nt, synthetic construct
  source 1..20: mol_type = other RNA
taactgcatctgcgacgtgg

SEQ ID NO: 15479 - RNA, 20 nt, synthetic construct
  source 1..20: mol_type = other RNA
tacaagctgtcggaaacaga

SEQ ID NO: 15480 - RNA, 20 nt, synthetic construct
  source 1..20: mol_type = other RNA
tacaataactgcatctgcga

SEQ ID NO: 15481 - RNA, 20 nt, synthetic construct
  source 1..20: mol_type = other RNA
tattgtacaagctgtcggaa

SEQ ID NO: 15482 - RNA, 20 nt, synthetic construct
  source 1..20: mol_type = other RNA
tcacccggagggacaccatg

SEQ ID NO: 15483 - RNA, 20 nt, synthetic construct
  source 1..20: mol_type = other RNA
tcactccatcacccggaggg

SEQ ID NO: 15484 - RNA, 20 nt, synthetic construct
  source 1..20: mol_type = other RNA
tccaatccctccccctggcc

SEQ ID NO: 15485 - RNA, 20 nt, synthetic construct
  source 1..20: mol_type = other RNA
tccatcacccggagggacac

SEQ ID NO: 15486 - RNA, 20 nt, synthetic construct
  source 1..20: mol_type = other RNA
tcccacactcactccatcac

SEQ ID NO: 15487 - RNA, 20 nt, synthetic construct
  source 1..20: mol_type = other RNA
tcccacgtcgcagatgcagt

SEQ ID NO: 15488 - RNA, 20 nt, synthetic construct
  source 1..20: mol_type = other RNA
tccccctggcctctgtttcc

SEQ ID NO: 15489 - RNA, 20 nt, synthetic construct
  source 1..20: mol_type = other RNA
tccctccccctggcctctgt

SEQ ID NO: 15490 - RNA, 20 nt, synthetic construct
  source 1..20: mol_type = other RNA
tccctccgggtgatggagtg

SEQ ID NO: 15491 - RNA, 20 nt, synthetic construct
  source 1..20: mol_type = other RNA
tccgacagcttgtacaataa

SEQ ID NO: 15492 - RNA, 20 nt, synthetic construct
  source 1..20: mol_type = other RNA
tccggaagcacacgagccaa

SEQ ID NO: 15493 - RNA, 20 nt, synthetic construct
  source 1..20: mol_type = other RNA
tccggacatggtgtccctcc

SEQ ID NO: 15494 - RNA, 20 nt, synthetic construct
  source 1..20: mol_type = other RNA
tccgggtgatggagtgagtg

SEQ ID NO: 15495 - RNA, 20 nt, synthetic construct
  source 1..20: mol_type = other RNA
tcgcagatgcagttattgta

SEQ ID NO: 15496 - RNA, 20 nt, synthetic construct
  source 1..20: mol_type = other RNA
tcggaaacagaggccagggg

SEQ ID NO: 15497 - RNA, 20 nt, synthetic construct
  source 1..20: mol_type = other RNA
tcggctcccacgtcgcagat

SEQ ID NO: 15498 - RNA, 20 nt, synthetic construct
  source 1..20: mol_type = other RNA
tcgtgtgcttccggacatgg

SEQ ID NO: 15499 - RNA, 20 nt, synthetic construct
  source 1..20: mol_type = other RNA
tctcggctcccacgtcgcag

SEQ ID NO: 15500 - RNA, 20 nt, synthetic construct
  source 1..20: mol_type = other RNA
tctgcgacgtgggagccgag

SEQ ID NO: 15501 - RNA, 20 nt, synthetic construct
  source 1..20: mol_type = other RNA
tctgggcggtgggtggctca

SEQ ID NO: 15502 - RNA, 20 nt, synthetic construct
  source 1..20: mol_type = other RNA
tctgtttccgacagcttgta

SEQ ID NO: 15503 - RNA, 20 nt, synthetic construct
  source 1..20: mol_type = other RNA
tgagccacccaccgcccaga

SEQ ID NO: 15504 - RNA, 20 nt, synthetic construct
  source 1..20: mol_type = other RNA
tgagtgtgggagtctgggcg

SEQ ID NO: 15505 - RNA, 20 nt, synthetic construct
  source 1..20: mol_type = other RNA
tgatggagtgagtgtgggag

SEQ ID NO: 15506 - RNA, 20 nt, synthetic construct
  source 1..20: mol_type = other RNA
tgcacaggcctccaatccct

SEQ ID NO: 15507 - RNA, 20 nt, synthetic construct
  source 1..20: mol_type = other RNA
tgcagttattgtacaagctg

SEQ ID NO: 15508 - RNA, 20 nt, synthetic construct
  source 1..20: mol_type = other RNA
tgcatctgcgacgtgggagc

SEQ ID NO: 15509 - RNA, 20 nt, synthetic construct
  source 1..20: mol_type = other RNA
tgcgacgtgggagccgagag

SEQ ID NO: 15510 - RNA, 20 nt, synthetic construct
  source 1..20: mol_type = other RNA
tgcttccggacatggtgtcc

SEQ ID NO: 15511 - RNA, 20 nt, synthetic construct
  source 1..20: mol_type = other RNA
tggagtgagtgtgggagtct

SEQ ID NO: 15512 - RNA, 20 nt, synthetic construct
  source 1..20: mol_type = other RNA
tggcctctgtttccgacagc

SEQ ID NO: 15513 - RNA, 20 nt, synthetic construct
  source 1..20: mol_type = other RNA
tggctcgtgtgcttccggac

SEQ ID NO: 15514 - RNA, 20 nt, synthetic construct
  source 1..20: mol_type = other RNA
tgggagccgagagcttggct

SEQ ID NO: 15515 - RNA, 20 nt, synthetic construct
  source 1..20: mol_type = other RNA
tgggagtctgggcggtgggt

SEQ ID NO: 15516 - RNA, 20 nt, synthetic construct
  source 1..20: mol_type = other RNA
tgggcggtgggtggctcagc

SEQ ID NO: 15517 - RNA, 20 nt, synthetic construct
  source 1..20: mol_type = other RNA
tggtgtccctccgggtgatg

SEQ ID NO: 15518 - RNA, 20 nt, synthetic construct
  source 1..20: mol_type = other RNA
tgtacaagctgtcggaaaca

SEQ ID NO: 15519 - RNA, 20 nt, synthetic construct
  source 1..20: mol_type = other RNA
tgtacaataactgcatctgc

SEQ ID NO: 15520 - RNA, 20 nt, synthetic construct
  source 1..20: mol_type = other RNA
tgtccctccgggtgatggag

SEQ ID NO: 15521 - RNA, 20 nt, synthetic construct
  source 1..20: mol_type = other RNA
tgtccggaagcacacgagcc

SEQ ID NO: 15522 - RNA, 20 nt, synthetic construct
  source 1..20: mol_type = other RNA
tgtcggaaacagaggccagg

SEQ ID NO: 15523 - RNA, 20 nt, synthetic construct
  source 1..20: mol_type = other RNA
tgtgcttccggacatggtgt

SEQ ID NO: 15524 - RNA, 20 nt, synthetic construct
  source 1..20: mol_type = other RNA
tgtgggagtctgggcggtgg

SEQ ID NO: 15525 - RNA, 20 nt, synthetic construct
  source 1..20: mol_type = other RNA
tgtttccgacagcttgtaca

SEQ ID NO: 15526 - RNA, 20 nt, synthetic construct
  source 1..20: mol_type = other RNA
ttattgtacaagctgtcgga

SEQ ID NO: 15527 - RNA, 20 nt, synthetic construct
  source 1..20: mol_type = other RNA
ttccgacagcttgtacaata

SEQ ID NO: 15528 - RNA, 20 nt, synthetic construct
  source 1..20: mol_type = other RNA
ttccggacatggtgtccctc

SEQ ID NO: 15529 - RNA, 20 nt, synthetic construct
  source 1..20: mol_type = other RNA
ttggctcgtgtgcttccgga

SEQ ID NO: 15530 - RNA, 20 nt, synthetic construct
  source 1..20: mol_type = other RNA
ttgtacaagctgtcggaaac

SEQ ID NO: 15531 - RNA, 20 nt, synthetic construct
  source 1..20: mol_type = other RNA
ttgtacaataactgcatctg

SEQ ID NO: 15532 - RNA, 20 nt, synthetic construct
  source 1..20: mol_type = other RNA
tttccgacagcttgtacaat

SEQ ID NO: 15533 - RNA, 21 nt, synthetic construct
  source 1..21: mol_type = other RNA
aaacagaggccagggggaggg

SEQ ID NO: 15534 - RNA, 21 nt, synthetic construct
  source 1..21: mol_type = other RNA
aacagaggccagggggaggga

SEQ ID NO: 15535 - RNA, 21 nt, synthetic construct
  source 1..21: mol_type = other RNA
aactgcatctgcgacgtggga

SEQ ID NO: 15536 - RNA, 21 nt, synthetic construct
  source 1..21: mol_type = other RNA
aagcacacgagccaagctctc

SEQ ID NO: 15537 - RNA, 21 nt, synthetic construct
  source 1..21: mol_type = other RNA
aagctctcggctcccacgtcg

SEQ ID NO: 15538 - RNA, 21 nt, synthetic construct
  source 1..21: mol_type = other RNA
aagctgtcggaaacagaggcc

SEQ ID NO: 15539 - RNA, 21 nt, synthetic construct
  source 1..21: mol_type = other RNA
aataactgcatctgcgacgtg

SEQ ID NO: 15540 - RNA, 21 nt, synthetic construct
  source 1..21: mol_type = other RNA
aatccctccccctggcctctg

SEQ ID NO: 15541 - RNA, 21 nt, synthetic construct
  source 1..21: mol_type = other RNA
acaagctgtcggaaacagagg

SEQ ID NO: 15542 - RNA, 21 nt, synthetic construct
  source 1..21: mol_type = other RNA
acaataactgcatctgcgacg

SEQ ID NO: 15543 - RNA, 21 nt, synthetic construct
  source 1..21: mol_type = other RNA
acaccatgtccggaagcacac

SEQ ID NO: 15544 - RNA, 21 nt, synthetic construct
  source 1..21: mol_type = other RNA
acacgagccaagctctcggct

SEQ ID NO: 15545 - RNA, 21 nt, synthetic construct
  source 1..21: mol_type = other RNA
acactcactccatcacccgga

SEQ ID NO: 15546 - RNA, 21 nt, synthetic construct
  source 1..21: mol_type = other RNA
acagaggccagggggagggat

SEQ ID NO: 15547 - RNA, 21 nt, synthetic construct
  source 1..21: mol_type = other RNA
acagcttgtacaataactgca

SEQ ID NO: 15548 - RNA, 21 nt, synthetic construct
  source 1..21: mol_type = other RNA
acaggcctccaatccctcccc

SEQ ID NO: 15549 - RNA, 21 nt, synthetic construct
  source 1..21: mol_type = other RNA
acatggtgtccctccgggtga

SEQ ID NO: 15550 - RNA, 21 nt, synthetic construct
  source 1..21: mol_type = other RNA
accatgtccggaagcacacga

SEQ ID NO: 15551 - RNA, 21 nt, synthetic construct
  source 1..21: mol_type = other RNA
acccaccgcccagactcccac

SEQ ID NO: 15552 - RNA, 21 nt, synthetic construct
  source 1..21: mol_type = other RNA
accccgggctgagccacccac

SEQ ID NO: 15553 - RNA, 21 nt, synthetic construct
  source 1..21: mol_type = other RNA
acccggagggacaccatgtcc

SEQ ID NO: 15554 - RNA, 21 nt, synthetic construct
  source 1..21: mol_type = other RNA
accgcccagactcccacactc

SEQ ID NO: 15555 - RNA, 21 nt, synthetic construct
  source 1..21: mol_type = other RNA
acgagccaagctctcggctcc

SEQ ID NO: 15556 - RNA, 21 nt, synthetic construct
  source 1..21: mol_type = other RNA
acgtcgcagatgcagttattg

SEQ ID NO: 15557 - RNA, 21 nt, synthetic construct
  source 1..21: mol_type = other RNA
acgtgggagccgagagcttgg

SEQ ID NO: 15558 - RNA, 21 nt, synthetic construct
  source 1..21: mol_type = other RNA
actcactccatcacccggagg

SEQ ID NO: 15559 - RNA, 21 nt, synthetic construct
  source 1..21: mol_type = other RNA
actccatcacccggagggaca

SEQ ID NO: 15560 - RNA, 21 nt, synthetic construct
  source 1..21: mol_type = other RNA
actcccacactcactccatca

SEQ ID NO: 15561 - RNA, 21 nt, synthetic construct
  source 1..21: mol_type = other RNA
actgcatctgcgacgtgggag

SEQ ID NO: 15562 - RNA, 21 nt, synthetic construct
  source 1..21: mol_type = other RNA
agactcccacactcactccat

SEQ ID NO: 15563 - RNA, 21 nt, synthetic construct
  source 1..21: mol_type = other RNA
agagcttggctcgtgtgcttc

SEQ ID NO: 15564 - RNA, 21 nt, synthetic construct
  source 1..21: mol_type = other RNA
agaggccagggggagggattg

SEQ ID NO: 15565 - RNA, 21 nt, synthetic construct
  source 1..21: mol_type = other RNA
agatgcagttattgtacaagc

SEQ ID NO: 15566 - RNA, 21 nt, synthetic construct
  source 1..21: mol_type = other RNA
agcacacgagccaagctctcg

SEQ ID NO: 15567 - RNA, 21 nt, synthetic construct
  source 1..21: mol_type = other RNA
agccaagctctcggctcccac

SEQ ID NO: 15568 - RNA, 21 nt, synthetic construct
  source 1..21: mol_type = other RNA
agccacccaccgcccagactc

SEQ ID NO: 15569 - RNA, 21 nt, synthetic construct
  source 1..21: mol_type = other RNA
agccgagagcttggctcgtgt

SEQ ID NO: 15570 - RNA, 21 nt, synthetic construct
  source 1..21: mol_type = other RNA
agctctcggctcccacgtcgc

SEQ ID NO: 15571 - RNA, 21 nt, synthetic construct
  source 1..21: mol_type = other RNA
agctgtcggaaacagaggcca

SEQ ID NO: 15572 - RNA, 21 nt, synthetic construct
  source 1..21: mol_type = other RNA
agcttggctcgtgtgcttccg

SEQ ID NO: 15573 - RNA, 21 nt, synthetic construct
  source 1..21: mol_type = other RNA
agcttgtacaataactgcatc

SEQ ID NO: 15574 - RNA, 21 nt, synthetic construct
  source 1..21: mol_type = other RNA
aggccagggggagggattgga

SEQ ID NO: 15575 - RNA, 21 nt, synthetic construct
  source 1..21: mol_type = other RNA
aggcctccaatccctccccct

SEQ ID NO: 15576 - RNA, 21 nt, synthetic construct
  source 1..21: mol_type = other RNA
agggacaccatgtccggaagc

SEQ ID NO: 15577 - RNA, 21 nt, synthetic construct
  source 1..21: mol_type = other RNA
agtctgggcggtgggtggctc

SEQ ID NO: 15578 - RNA, 21 nt, synthetic construct
  source 1..21: mol_type = other RNA
agtgagtgtgggagtctgggc

SEQ ID NO: 15579 - RNA, 21 nt, synthetic construct
  source 1..21: mol_type = other RNA
agtgtgggagtctgggcggtg

SEQ ID NO: 15580 - RNA, 21 nt, synthetic construct
  source 1..21: mol_type = other RNA
agttattgtacaagctgtcgg

SEQ ID NO: 15581 - RNA, 21 nt, synthetic construct
  source 1..21: mol_type = other RNA
ataactgcatctgcgacgtgg

SEQ ID NO: 15582 - RNA, 21 nt, synthetic construct
  source 1..21: mol_type = other RNA
atcacccggagggacaccatg

SEQ ID NO: 15583 - RNA, 21 nt, synthetic construct
  source 1..21: mol_type = other RNA
atccctccccctggcctctgt

SEQ ID NO: 15584 - RNA, 21 nt, synthetic construct
  source 1..21: mol_type = other RNA
atctgcgacgtgggagccgag

SEQ ID NO: 15585 - RNA, 21 nt, synthetic construct
  source 1..21: mol_type = other RNA
atgcacaggcctccaatccct

SEQ ID NO: 15586 - RNA, 21 nt, synthetic construct
  source 1..21: mol_type = other RNA
atgcagttattgtacaagctg

SEQ ID NO: 15587 - RNA, 21 nt, synthetic construct
  source 1..21: mol_type = other RNA
atggagtgagtgtgggagtct

SEQ ID NO: 15588 - RNA, 21 nt, synthetic construct
  source 1..21: mol_type = other RNA
atggtgtccctccgggtgatg

SEQ ID NO: 15589 - RNA, 21 nt, synthetic construct
  source 1..21: mol_type = other RNA
atgtccggaagcacacgagcc

SEQ ID NO: 15590 - RNA, 21 nt, synthetic construct
  source 1..21: mol_type = other RNA
attgtacaagctgtcggaaac

SEQ ID NO: 15591 - RNA, 21 nt, synthetic construct
  source 1..21: mol_type = other RNA
caagctctcggctcccacgtc

SEQ ID NO: 15592 - RNA, 21 nt, synthetic construct
  source 1..21: mol_type = other RNA
caagctgtcggaaacagaggc

SEQ ID NO: 15593 - RNA, 21 nt, synthetic construct
  source 1..21: mol_type = other RNA
caataactgcatctgcgacgt

SEQ ID NO: 15594 - RNA, 21 nt, synthetic construct
  source 1..21: mol_type = other RNA
caatccctccccctggcctct

SEQ ID NO: 15595 - RNA, 21 nt, synthetic construct
  source 1..21: mol_type = other RNA
cacacgagccaagctctcggc

SEQ ID NO: 15596 - RNA, 21 nt, synthetic construct
  source 1..21: mol_type = other RNA
cacactcactccatcacccgg

SEQ ID NO: 15597 - RNA, 21 nt, synthetic construct
  source 1..21: mol_type = other RNA
cacaggcctccaatccctccc

SEQ ID NO: 15598 - RNA, 21 nt, synthetic construct
  source 1..21: mol_type = other RNA
caccatgtccggaagcacacg

SEQ ID NO: 15599 - RNA, 21 nt, synthetic construct
  source 1..21: mol_type = other RNA
cacccaccgcccagactccca

SEQ ID NO: 15600 - RNA, 21 nt, synthetic construct
  source 1..21: mol_type = other RNA
caccccgggctgagccaccca

SEQ ID NO: 15601 - RNA, 21 nt, synthetic construct
  source 1..21: mol_type = other RNA
cacccggagggacaccatgtc

SEQ ID NO: 15602 - RNA, 21 nt, synthetic construct
  source 1..21: mol_type = other RNA
caccgcccagactcccacact

SEQ ID NO: 15603 - RNA, 21 nt, synthetic construct
  source 1..21: mol_type = other RNA
cacgagccaagctctcggctc

SEQ ID NO: 15604 - RNA, 21 nt, synthetic construct
  source 1..21: mol_type = other RNA
cacgtcgcagatgcagttatt

SEQ ID NO: 15605 - RNA, 21 nt, synthetic construct
  source 1..21: mol_type = other RNA
cactcactccatcacccggag

SEQ ID NO: 15606 - RNA, 21 nt, synthetic construct
  source 1..21: mol_type = other RNA
cactccatcacccggagggac

SEQ ID NO: 15607 - RNA, 21 nt, synthetic construct
  source 1..21: mol_type = other RNA
cagactcccacactcactcca

SEQ ID NO: 15608 - RNA, 21 nt, synthetic construct
  source 1..21: mol_type = other RNA
cagaggccagggggagggatt

SEQ ID NO: 15609 - RNA, 21 nt, synthetic construct
  source 1..21: mol_type = other RNA
cagatgcagttattgtacaag

SEQ ID NO: 15610 - RNA, 21 nt, synthetic construct
  source 1..21: mol_type = other RNA
cagcttgtacaataactgcat

SEQ ID NO: 15611 - RNA, 21 nt, synthetic construct
  source 1..21: mol_type = other RNA
caggcctccaatccctccccc

SEQ ID NO: 15612 - RNA, 21 nt, synthetic construct
  source 1..21: mol_type = other RNA
cagggggagggattggaggcc

SEQ ID NO: 15613 - RNA, 21 nt, synthetic construct
  source 1..21: mol_type = other RNA
cagttattgtacaagctgtcg

SEQ ID NO: 15614 - RNA, 21 nt, synthetic construct
  source 1..21: mol_type = other RNA
catcacccggagggacaccat

SEQ ID NO: 15615 - RNA, 21 nt, synthetic construct
  source 1..21: mol_type = other RNA
catctgcgacgtgggagccga

SEQ ID NO: 15616 - RNA, 21 nt, synthetic construct
  source 1..21: mol_type = other RNA
catgcacaggcctccaatccc

SEQ ID NO: 15617 - RNA, 21 nt, synthetic construct
  source 1..21: mol_type = other RNA
catggtgtccctccgggtgat

SEQ ID NO: 15618 - RNA, 21 nt, synthetic construct
  source 1..21: mol_type = other RNA
catgtccggaagcacacgagc

SEQ ID NO: 15619 - RNA, 21 nt, synthetic construct
  source 1..21: mol_type = other RNA
ccaagctctcggctcccacgt

SEQ ID NO: 15620 - RNA, 21 nt, synthetic construct
  source 1..21: mol_type = other RNA
ccaatccctccccctggcctc

SEQ ID NO: 15621 - RNA, 21 nt, synthetic construct
  source 1..21: mol_type = other RNA
ccacactcactccatcacccg

SEQ ID NO: 15622 - RNA, 21 nt, synthetic construct
  source 1..21: mol_type = other RNA
ccacccaccgcccagactccc

SEQ ID NO: 15623 - RNA, 21 nt, synthetic construct
  source 1..21: mol_type = other RNA
ccaccgcccagactcccacac

SEQ ID NO: 15624 - RNA, 21 nt, synthetic construct
  source 1..21: mol_type = other RNA
ccacgtcgcagatgcagttat

SEQ ID NO: 15625 - RNA, 21 nt, synthetic construct
  source 1..21: mol_type = other RNA
ccagactcccacactcactcc

SEQ ID NO: 15626 - RNA, 21 nt, synthetic construct
  source 1..21: mol_type = other RNA
ccagggggagggattggaggc

SEQ ID NO: 15627 - RNA, 21 nt, synthetic construct
  source 1..21: mol_type = other RNA
ccatcacccggagggacacca

SEQ ID NO: 15628 - RNA, 21 nt, synthetic construct
  source 1..21: mol_type = other RNA
ccatgtccggaagcacacgag

SEQ ID NO: 15629 - RNA, 21 nt, synthetic construct
  source 1..21: mol_type = other RNA
cccacactcactccatcaccc

SEQ ID NO: 15630 - RNA, 21 nt, synthetic construct
  source 1..21: mol_type = other RNA
cccaccgcccagactcccaca

SEQ ID NO: 15631 - RNA, 21 nt, synthetic construct
  source 1..21: mol_type = other RNA
cccacgtcgcagatgcagtta

SEQ ID NO: 15632 - RNA, 21 nt, synthetic construct
  source 1..21: mol_type = other RNA
cccagactcccacactcactc

SEQ ID NO: 15633 - RNA, 21 nt, synthetic construct
  source 1..21: mol_type = other RNA
ccccctggcctctgtttccga

SEQ ID NO: 15634 - RNA, 21 nt, synthetic construct
  source 1..21: mol_type = other RNA
cccctggcctctgtttccgac

SEQ ID NO: 15635 - RNA, 21 nt, synthetic construct
  source 1..21: mol_type = other RNA
cccggagggacaccatgtccg

SEQ ID NO: 15636 - RNA, 21 nt, synthetic construct
  source 1..21: mol_type = other RNA
ccctccccctggcctctgttt

SEQ ID NO: 15637 - RNA, 21 nt, synthetic construct
  source 1..21: mol_type = other RNA
ccctccgggtgatggagtgag

SEQ ID NO: 15638 - RNA, 21 nt, synthetic construct
  source 1..21: mol_type = other RNA
ccctggcctctgtttccgaca

SEQ ID NO: 15639 - RNA, 21 nt, synthetic construct
  source 1..21: mol_type = other RNA
ccgacagcttgtacaataact

SEQ ID NO: 15640 - RNA, 21 nt, synthetic construct
  source 1..21: mol_type = other RNA
ccgagagcttggctcgtgtgc

SEQ ID NO: 15641 - RNA, 21 nt, synthetic construct
  source 1..21: mol_type = other RNA
ccgcccagactcccacactca

SEQ ID NO: 15642 - RNA, 21 nt, synthetic construct
  source 1..21: mol_type = other RNA
ccggaagcacacgagccaagc

SEQ ID NO: 15643 - RNA, 21 nt, synthetic construct
  source 1..21: mol_type = other RNA
ccggacatggtgtccctccgg

SEQ ID NO: 15644 - RNA, 21 nt, synthetic construct
  source 1..21: mol_type = other RNA
ccggagggacaccatgtccgg

SEQ ID NO: 15645 - RNA, 21 nt, synthetic construct
  source 1..21: mol_type = other RNA
ccgggtgatggagtgagtgtg

SEQ ID NO: 15646 - RNA, 21 nt, synthetic construct
  source 1..21: mol_type = other RNA
cctccaatccctccccctggc

SEQ ID NO: 15647 - RNA, 21 nt, synthetic construct
  source 1..21: mol_type = other RNA
cctccccctggcctctgtttc

SEQ ID NO: 15648 - RNA, 21 nt, synthetic construct
  source 1..21: mol_type = other RNA
cctccgggtgatggagtgagt

SEQ ID NO: 15649 - RNA, 21 nt, synthetic construct
  source 1..21: mol_type = other RNA
cctctgtttccgacagcttgt

SEQ ID NO: 15650 - RNA, 21 nt, synthetic construct
  source 1..21: mol_type = other RNA
cctggcctctgtttccgacag

SEQ ID NO: 15651 - RNA, 21 nt, synthetic construct
  source 1..21: mol_type = other RNA
cgacagcttgtacaataactg

SEQ ID NO: 15652 - RNA, 21 nt, synthetic construct
  source 1..21: mol_type = other RNA
cgacgtgggagccgagagctt

SEQ ID NO: 15653 - RNA, 21 nt, synthetic construct
  source 1..21: mol_type = other RNA
cgagagcttggctcgtgtgct

SEQ ID NO: 15654 - RNA, 21 nt, synthetic construct
  source 1..21: mol_type = other RNA
cgagccaagctctcggctccc

SEQ ID NO: 15655 - RNA, 21 nt, synthetic construct
  source 1..21: mol_type = other RNA
cgcagatgcagttattgtaca

SEQ ID NO: 15656 - RNA, 21 nt, synthetic construct
  source 1..21: mol_type = other RNA
cgcccagactcccacactcac

SEQ ID NO: 15657 - RNA, 21 nt, synthetic construct
  source 1..21: mol_type = other RNA
cggaaacagaggccaggggga

SEQ ID NO: 15658 - RNA, 21 nt, synthetic construct
  source 1..21: mol_type = other RNA
cggaagcacacgagccaagct

SEQ ID NO: 15659 - RNA, 21 nt, synthetic construct
  source 1..21: mol_type = other RNA
cggacatggtgtccctccggg

SEQ ID NO: 15660 - RNA, 21 nt, synthetic construct
  source 1..21: mol_type = other RNA
cggagggacaccatgtccgga

SEQ ID NO: 15661 - RNA, 21 nt, synthetic construct
  source 1..21: mol_type = other RNA
cggctcccacgtcgcagatgc

SEQ ID NO: 15662 - RNA, 21 nt, synthetic construct
  source 1..21: mol_type = other RNA
cgggtgatggagtgagtgtgg

SEQ ID NO: 15663 - RNA, 21 nt, synthetic construct
  source 1..21: mol_type = other RNA
cgtcgcagatgcagttattgt

SEQ ID NO: 15664 - RNA, 21 nt, synthetic construct
  source 1..21: mol_type = other RNA
cgtgggagccgagagcttggc

SEQ ID NO: 15665 - RNA, 21 nt, synthetic construct
  source 1..21: mol_type = other RNA
cgtgtgcttccggacatggtg

SEQ ID NO: 15666 - RNA, 21 nt, synthetic construct
  source 1..21: mol_type = other RNA
ctcactccatcacccggaggg

SEQ ID NO: 15667 - RNA, 21 nt, synthetic construct
  source 1..21: mol_type = other RNA
ctccaatccctccccctggcc

SEQ ID NO: 15668 - RNA, 21 nt, synthetic construct
  source 1..21: mol_type = other RNA
ctccatcacccggagggacac

SEQ ID NO: 15669 - RNA, 21 nt, synthetic construct
  source 1..21: mol_type = other RNA
ctcccacactcactccatcac

SEQ ID NO: 15670 - RNA, 21 nt, synthetic construct
  source 1..21: mol_type = other RNA
ctcccacgtcgcagatgcagt

SEQ ID NO: 15671 - RNA, 21 nt, synthetic construct
  source 1..21: mol_type = other RNA
ctccccctggcctctgtttcc

SEQ ID NO: 15672 - RNA, 21 nt, synthetic construct
  source 1..21: mol_type = other RNA
ctccgggtgatggagtgagtg

SEQ ID NO: 15673 - RNA, 21 nt, synthetic construct
  source 1..21: mol_type = other RNA
ctcggctcccacgtcgcagat

SEQ ID NO: 15674 - RNA, 21 nt, synthetic construct
  source 1..21: mol_type = other RNA
ctcgtgtgcttccggacatgg

SEQ ID NO: 15675 - RNA, 21 nt, synthetic construct
  source 1..21: mol_type = other RNA
ctctcggctcccacgtcgcag

SEQ ID NO: 15676 - RNA, 21 nt, synthetic construct
  source 1..21: mol_type = other RNA
ctctgtttccgacagcttgta

SEQ ID NO: 15677 - RNA, 21 nt, synthetic construct
  source 1..21: mol_type = other RNA
ctgagccacccaccgcccaga

SEQ ID NO: 15678 - RNA, 21 nt, synthetic construct
  source 1..21: mol_type = other RNA
ctgcatctgcgacgtgggagc

SEQ ID NO: 15679 - RNA, 21 nt, synthetic construct
  source 1..21: mol_type = other RNA
ctgcgacgtgggagccgagag

SEQ ID NO: 15680 - RNA, 21 nt, synthetic construct
  source 1..21: mol_type = other RNA
ctggcctctgtttccgacagc

SEQ ID NO: 15681 - RNA, 21 nt, synthetic construct
  source 1..21: mol_type = other RNA
ctgggcggtgggtggctcagc

SEQ ID NO: 15682 - RNA, 21 nt, synthetic construct
  source 1..21: mol_type = other RNA
ctgtcggaaacagaggccagg

SEQ ID NO: 15683 - RNA, 21 nt, synthetic construct
  source 1..21: mol_type = other RNA
ctgtttccgacagcttgtaca

SEQ ID NO: 15684 - RNA, 21 nt, synthetic construct
  source 1..21: mol_type = other RNA
cttccggacatggtgtccctc

SEQ ID NO: 15685 - RNA, 21 nt, synthetic construct
  source 1..21: mol_type = other RNA
cttggctcgtgtgcttccgga

SEQ ID NO: 15686 - RNA, 21 nt, synthetic construct
  source 1..21: mol_type = other RNA
cttgtacaataactgcatctg

SEQ ID NO: 15687 - RNA, 21 nt, synthetic construct
  source 1..21: mol_type = other RNA
gaaacagaggccagggggagg

SEQ ID NO: 15688 - RNA, 21 nt, synthetic construct
  source 1..21: mol_type = other RNA
gaagcacacgagccaagctct

SEQ ID NO: 15689 - RNA, 21 nt, synthetic construct
  source 1..21: mol_type = other RNA
gacaccatgtccggaagcaca

SEQ ID NO: 15690 - RNA, 21 nt, synthetic construct
  source 1..21: mol_type = other RNA
gacagcttgtacaataactgc

SEQ ID NO: 15691 - RNA, 21 nt, synthetic construct
  source 1..21: mol_type = other RNA
gacatggtgtccctccgggtg

SEQ ID NO: 15692 - RNA, 21 nt, synthetic construct
  source 1..21: mol_type = other RNA
gacgtgggagccgagagcttg

SEQ ID NO: 15693 - RNA, 21 nt, synthetic construct
  source 1..21: mol_type = other RNA
gactcccacactcactccatc

SEQ ID NO: 15694 - RNA, 21 nt, synthetic construct
  source 1..21: mol_type = other RNA
gagagcttggctcgtgtgctt

SEQ ID NO: 15695 - RNA, 21 nt, synthetic construct
  source 1..21: mol_type = other RNA
gagccaagctctcggctccca

SEQ ID NO: 15696 - RNA, 21 nt, synthetic construct
  source 1..21: mol_type = other RNA
gagccacccaccgcccagact

SEQ ID NO: 15697 - RNA, 21 nt, synthetic construct
  source 1..21: mol_type = other RNA
gagccgagagcttggctcgtg

SEQ ID NO: 15698 - RNA, 21 nt, synthetic construct
  source 1..21: mol_type = other RNA
gagcttggctcgtgtgcttcc

SEQ ID NO: 15699 - RNA, 21 nt, synthetic construct
  source 1..21: mol_type = other RNA
gaggccagggggagggattgg

SEQ ID NO: 15700 - RNA, 21 nt, synthetic construct
  source 1..21: mol_type = other RNA
gagggacaccatgtccggaag

SEQ ID NO: 15701 - RNA, 21 nt, synthetic construct
  source 1..21: mol_type = other RNA
gagtctgggcggtgggtggct

SEQ ID NO: 15702 - RNA, 21 nt, synthetic construct
  source 1..21: mol_type = other RNA
gagtgagtgtgggagtctggg

SEQ ID NO: 15703 - RNA, 21 nt, synthetic construct
  source 1..21: mol_type = other RNA
gagtgtgggagtctgggcggt

SEQ ID NO: 15704 - RNA, 21 nt, synthetic construct
  source 1..21: mol_type = other RNA
gatgcagttattgtacaagct

SEQ ID NO: 15705 - RNA, 21 nt, synthetic construct
  source 1..21: mol_type = other RNA
gatggagtgagtgtgggagtc

SEQ ID NO: 15706 - RNA, 21 nt, synthetic construct
  source 1..21: mol_type = other RNA
gcacacgagccaagctctcgg

SEQ ID NO: 15707 - RNA, 21 nt, synthetic construct
  source 1..21: mol_type = other RNA
gcacaggcctccaatccctcc

SEQ ID NO: 15708 - RNA, 21 nt, synthetic construct
  source 1..21: mol_type = other RNA
gcagatgcagttattgtacaa

SEQ ID NO: 15709 - RNA, 21 nt, synthetic construct
  source 1..21: mol_type = other RNA
gcagttattgtacaagctgtc

SEQ ID NO: 15710 - RNA, 21 nt, synthetic construct
  source 1..21: mol_type = other RNA
gcatctgcgacgtgggagccg

SEQ ID NO: 15711 - RNA, 21 nt, synthetic construct
  source 1..21: mol_type = other RNA
gccaagctctcggctcccacg

SEQ ID NO: 15712 - RNA, 21 nt, synthetic construct
  source 1..21: mol_type = other RNA
gccacccaccgcccagactcc

SEQ ID NO: 15713 - RNA, 21 nt, synthetic construct
  source 1..21: mol_type = other RNA
gccagggggagggattggagg

SEQ ID NO: 15714 - RNA, 21 nt, synthetic construct
  source 1..21: mol_type = other RNA
gcccagactcccacactcact

SEQ ID NO: 15715 - RNA, 21 nt, synthetic construct
  source 1..21: mol_type = other RNA
gccgagagcttggctcgtgtg

SEQ ID NO: 15716 - RNA, 21 nt, synthetic construct
  source 1..21: mol_type = other RNA
gcctccaatccctccccctgg

SEQ ID NO: 15717 - RNA, 21 nt, synthetic construct
  source 1..21: mol_type = other RNA
gcctctgtttccgacagcttg

SEQ ID NO: 15718 - RNA, 21 nt, synthetic construct
  source 1..21: mol_type = other RNA
gcgacgtgggagccgagagct

SEQ ID NO: 15719 - RNA, 21 nt, synthetic construct
  source 1..21: mol_type = other RNA
gctcccacgtcgcagatgcag

SEQ ID NO: 15720 - RNA, 21 nt, synthetic construct
  source 1..21: mol_type = other RNA
gctcgtgtgcttccggacatg

SEQ ID NO: 15721 - RNA, 21 nt, synthetic construct
  source 1..21: mol_type = other RNA
gctctcggctcccacgtcgca

SEQ ID NO: 15722 - RNA, 21 nt, synthetic construct
  source 1..21: mol_type = other RNA
gctgagccacccaccgcccag

SEQ ID NO: 15723 - RNA, 21 nt, synthetic construct
  source 1..21: mol_type = other RNA
gctgtcggaaacagaggccag

SEQ ID NO: 15724 - RNA, 21 nt, synthetic construct
  source 1..21: mol_type = other RNA
gcttccggacatggtgtccct

SEQ ID NO: 15725 - RNA, 21 nt, synthetic construct
  source 1..21: mol_type = other RNA
gcttggctcgtgtgcttccgg

SEQ ID NO: 15726 - RNA, 21 nt, synthetic construct
  source 1..21: mol_type = other RNA
gcttgtacaataactgcatct

SEQ ID NO: 15727 - RNA, 21 nt, synthetic construct
  source 1..21: mol_type = other RNA
ggaaacagaggccagggggag

SEQ ID NO: 15728 - RNA, 21 nt, synthetic construct
  source 1..21: mol_type = other RNA
ggaagcacacgagccaagctc

SEQ ID NO: 15729 - RNA, 21 nt, synthetic construct
  source 1..21: mol_type = other RNA
ggacaccatgtccggaagcac

SEQ ID NO: 15730 - RNA, 21 nt, synthetic construct
  source 1..21: mol_type = other RNA
ggacatggtgtccctccgggt

SEQ ID NO: 15731 - RNA, 21 nt, synthetic construct
  source 1..21: mol_type = other RNA
ggagccgagagcttggctcgt

SEQ ID NO: 15732 - RNA, 21 nt, synthetic construct
  source 1..21: mol_type = other RNA
ggagggacaccatgtccggaa

SEQ ID NO: 15733 - RNA, 21 nt, synthetic construct
  source 1..21: mol_type = other RNA
ggagtctgggcggtgggtggc

SEQ ID NO: 15734 - RNA, 21 nt, synthetic construct
  source 1..21: mol_type = other RNA
ggagtgagtgtgggagtctgg

SEQ ID NO: 15735 - RNA, 21 nt, synthetic construct
  source 1..21: mol_type = other RNA
ggccagggggagggattggag

SEQ ID NO: 15736 - RNA, 21 nt, synthetic construct
  source 1..21: mol_type = other RNA
ggcctccaatccctccccctg

SEQ ID NO: 15737 - RNA, 21 nt, synthetic construct
  source 1..21: mol_type = other RNA
ggcctctgtttccgacagctt

SEQ ID NO: 15738 - RNA, 21 nt, synthetic construct
  source 1..21: mol_type = other RNA
ggctcccacgtcgcagatgca

SEQ ID NO: 15739 - RNA, 21 nt, synthetic construct
  source 1..21: mol_type = other RNA
ggctcgtgtgcttccggacat

SEQ ID NO: 15740 - RNA, 21 nt, synthetic construct
  source 1..21: mol_type = other RNA
ggctgagccacccaccgccca

SEQ ID NO: 15741 - RNA, 21 nt, synthetic construct
  source 1..21: mol_type = other RNA
gggacaccatgtccggaagca

SEQ ID NO: 15742 - RNA, 21 nt, synthetic construct
  source 1..21: mol_type = other RNA
gggagccgagagcttggctcg

SEQ ID NO: 15743 - RNA, 21 nt, synthetic construct
  source 1..21: mol_type = other RNA
gggagtctgggcggtgggtgg

SEQ ID NO: 15744 - RNA, 21 nt, synthetic construct
  source 1..21: mol_type = other RNA
gggtgatggagtgagtgtggg

SEQ ID NO: 15745 - RNA, 21 nt, synthetic construct
  source 1..21: mol_type = other RNA
ggtgatggagtgagtgtggga

SEQ ID NO: 15746 - RNA, 21 nt, synthetic construct
  source 1..21: mol_type = other RNA
ggtgtccctccgggtgatgga

SEQ ID NO: 15747 - RNA, 21 nt, synthetic construct
  source 1..21: mol_type = other RNA
gtacaagctgtcggaaacaga

SEQ ID NO: 15748 - RNA, 21 nt, synthetic construct
  source 1..21: mol_type = other RNA
gtacaataactgcatctgcga

SEQ ID NO: 15749 - RNA, 21 nt, synthetic construct
  source 1..21: mol_type = other RNA
gtccctccgggtgatggagtg

SEQ ID NO: 15750 - RNA, 21 nt, synthetic construct
  source 1..21: mol_type = other RNA
gtccggaagcacacgagccaa

SEQ ID NO: 15751 - RNA, 21 nt, synthetic construct
  source 1..21: mol_type = other RNA
gtcgcagatgcagttattgta

SEQ ID NO: 15752 - RNA, 21 nt, synthetic construct
  source 1..21: mol_type = other RNA
gtcggaaacagaggccagggg

SEQ ID NO: 15753 - RNA, 21 nt, synthetic construct
  source 1..21: mol_type = other RNA
gtctgggcggtgggtggctca

SEQ ID NO: 15754 - RNA, 21 nt, synthetic construct
  source 1..21: mol_type = other RNA
gtgagtgtgggagtctgggcg

SEQ ID NO: 15755 - RNA, 21 nt, synthetic construct
  source 1..21: mol_type = other RNA
gtgatggagtgagtgtgggag

SEQ ID NO: 15756 - RNA, 21 nt, synthetic construct
  source 1..21: mol_type = other RNA
gtgcttccggacatggtgtcc

SEQ ID NO: 15757 - RNA, 21 nt, synthetic construct
  source 1..21: mol_type = other RNA
gtgggagccgagagcttggct

SEQ ID NO: 15758 - RNA, 21 nt, synthetic construct
  source 1..21: mol_type = other RNA
gtgggagtctgggcggtgggt

SEQ ID NO: 15759 - RNA, 21 nt, synthetic construct
  source 1..21: mol_type = other RNA
gtgtccctccgggtgatggag

SEQ ID NO: 15760 - RNA, 21 nt, synthetic construct
  source 1..21: mol_type = other RNA
gtgtgcttccggacatggtgt

SEQ ID NO: 15761 - RNA, 21 nt, synthetic construct
  source 1..21: mol_type = other RNA
gtgtgggagtctgggcggtgg

SEQ ID NO: 15762 - RNA, 21 nt, synthetic construct
  source 1..21: mol_type = other RNA
gttattgtacaagctgtcgga

SEQ ID NO: 15763 - RNA, 21 nt, synthetic construct
  source 1..21: mol_type = other RNA
gtttccgacagcttgtacaat

SEQ ID NO: 15764 - RNA, 21 nt, synthetic construct
  source 1..21: mol_type = other RNA
taactgcatctgcgacgtggg

SEQ ID NO: 15765 - RNA, 21 nt, synthetic construct
  source 1..21: mol_type = other RNA
tacaagctgtcggaaacagag

SEQ ID NO: 15766 - RNA, 21 nt, synthetic construct
  source 1..21: mol_type = other RNA
tacaataactgcatctgcgac

SEQ ID NO: 15767 - RNA, 21 nt, synthetic construct
  source 1..21: mol_type = other RNA
tattgtacaagctgtcggaaa

SEQ ID NO: 15768 - RNA, 21 nt, synthetic construct
  source 1..21: mol_type = other RNA
tcacccggagggacaccatgt

SEQ ID NO: 15769 - RNA, 21 nt, synthetic construct
  source 1..21: mol_type = other RNA
tcactccatcacccggaggga

SEQ ID NO: 15770 - RNA, 21 nt, synthetic construct
  source 1..21: mol_type = other RNA
tccaatccctccccctggcct

SEQ ID NO: 15771 - RNA, 21 nt, synthetic construct
  source 1..21: mol_type = other RNA
tccatcacccggagggacacc

SEQ ID NO: 15772 - RNA, 21 nt, synthetic construct
  source 1..21: mol_type = other RNA
tcccacactcactccatcacc

SEQ ID NO: 15773 - RNA, 21 nt, synthetic construct
  source 1..21: mol_type = other RNA
tcccacgtcgcagatgcagtt

SEQ ID NO: 15774 - RNA, 21 nt, synthetic construct
  source 1..21: mol_type = other RNA
tccccctggcctctgtttccg

SEQ ID NO: 15775 - RNA, 21 nt, synthetic construct
  source 1..21: mol_type = other RNA
tccctccccctggcctctgtt

SEQ ID NO: 15776 - RNA, 21 nt, synthetic construct
  source 1..21: mol_type = other RNA
tccctccgggtgatggagtga

SEQ ID NO: 15777 - RNA, 21 nt, synthetic construct
  source 1..21: mol_type = other RNA
tccgacagcttgtacaataac

SEQ ID NO: 15778 - RNA, 21 nt, synthetic construct
  source 1..21: mol_type = other RNA
tccggaagcacacgagccaag

SEQ ID NO: 15779 - RNA, 21 nt, synthetic construct
  source 1..21: mol_type = other RNA
tccggacatggtgtccctccg

SEQ ID NO: 15780 - RNA, 21 nt, synthetic construct
  source 1..21: mol_type = other RNA
tccgggtgatggagtgagtgt

SEQ ID NO: 15781 - RNA, 21 nt, synthetic construct
  source 1..21: mol_type = other RNA
tcgcagatgcagttattgtac

SEQ ID NO: 15782 - RNA, 21 nt, synthetic construct
  source 1..21: mol_type = other RNA
tcggaaacagaggccaggggg

SEQ ID NO: 15783 - RNA, 21 nt, synthetic construct
  source 1..21: mol_type = other RNA
tcggctcccacgtcgcagatg

SEQ ID NO: 15784 - RNA, 21 nt, synthetic construct
  source 1..21: mol_type = other RNA
tcgtgtgcttccggacatggt

SEQ ID NO: 15785 - RNA, 21 nt, synthetic construct
  source 1..21: mol_type = other RNA
tctcggctcccacgtcgcaga

SEQ ID NO: 15786 - RNA, 21 nt, synthetic construct
  source 1..21: mol_type = other RNA
tctgcgacgtgggagccgaga

SEQ ID NO: 15787 - RNA, 21 nt, synthetic construct
  source 1..21: mol_type = other RNA
tctgggcggtgggtggctcag

SEQ ID NO: 15788 - RNA, 21 nt, synthetic construct
  source 1..21: mol_type = other RNA
tctgtttccgacagcttgtac

SEQ ID NO: 15789 - RNA, 21 nt, synthetic construct
  source 1..21: mol_type = other RNA
tgagccacccaccgcccagac

SEQ ID NO: 15790 - RNA, 21 nt, synthetic construct
  source 1..21: mol_type = other RNA
tgagtgtgggagtctgggcgg

SEQ ID NO: 15791 - RNA, 21 nt, synthetic construct
  source 1..21: mol_type = other RNA
tgatggagtgagtgtgggagt

SEQ ID NO: 15792 - RNA, 21 nt, synthetic construct
  source 1..21: mol_type = other RNA
tgcacaggcctccaatccctc

SEQ ID NO: 15793 - RNA, 21 nt, synthetic construct
  source 1..21: mol_type = other RNA
tgcagttattgtacaagctgt

SEQ ID NO: 15794 - RNA, 21 nt, synthetic construct
  source 1..21: mol_type = other RNA
tgcatctgcgacgtgggagcc

SEQ ID NO: 15795 - RNA, 21 nt, synthetic construct
  source 1..21: mol_type = other RNA
tgcgacgtgggagccgagagc

SEQ ID NO: 15796 - RNA, 21 nt, synthetic construct
  source 1..21: mol_type = other RNA
tgcttccggacatggtgtccc

SEQ ID NO: 15797 - RNA, 21 nt, synthetic construct
  source 1..21: mol_type = other RNA
tggagtgagtgtgggagtctg

SEQ ID NO: 15798 - RNA, 21 nt, synthetic construct
  source 1..21: mol_type = other RNA
tggcctctgtttccgacagct

SEQ ID NO: 15799 - RNA, 21 nt, synthetic construct
  source 1..21: mol_type = other RNA
tggctcgtgtgcttccggaca

SEQ ID NO: 15800 - RNA, 21 nt, synthetic construct
  source 1..21: mol_type = other RNA
tgggagccgagagcttggctc

SEQ ID NO: 15801 - RNA, 21 nt, synthetic construct
  source 1..21: mol_type = other RNA
tgggagtctgggcggtgggtg

SEQ ID NO: 15802 - RNA, 21 nt, synthetic construct
  source 1..21: mol_type = other RNA
tgggcggtgggtggctcagcc

SEQ ID NO: 15803 - RNA, 21 nt, synthetic construct
  source 1..21: mol_type = other RNA
tggtgtccctccgggtgatgg

SEQ ID NO: 15804 - RNA, 21 nt, synthetic construct
  source 1..21: mol_type = other RNA
tgtacaagctgtcggaaacag

SEQ ID NO: 15805 - RNA, 21 nt, synthetic construct
  source 1..21: mol_type = other RNA
tgtacaataactgcatctgcg

SEQ ID NO: 15806 - RNA, 21 nt, synthetic construct
  source 1..21: mol_type = other RNA
tgtccctccgggtgatggagt

SEQ ID NO: 15807 - RNA, 21 nt, synthetic construct
  source 1..21: mol_type = other RNA
tgtccggaagcacacgagcca

SEQ ID NO: 15808 - RNA, 21 nt, synthetic construct
  source 1..21: mol_type = other RNA
tgtcggaaacagaggccaggg

SEQ ID NO: 15809 - RNA, 21 nt, synthetic construct
  source 1..21: mol_type = other RNA
tgtgcttccggacatggtgtc

SEQ ID NO: 15810 - RNA, 21 nt, synthetic construct
  source 1..21: mol_type = other RNA
tgtgggagtctgggcggtggg

SEQ ID NO: 15811 - RNA, 21 nt, synthetic construct
  source 1..21: mol_type = other RNA
tgtttccgacagcttgtacaa

SEQ ID NO: 15812 - RNA, 21 nt, synthetic construct
  source 1..21: mol_type = other RNA
ttattgtacaagctgtcggaa

SEQ ID NO: 15813 - RNA, 21 nt, synthetic construct
  source 1..21: mol_type = other RNA
ttccgacagcttgtacaataa

SEQ ID NO: 15814 - RNA, 21 nt, synthetic construct
  source 1..21: mol_type = other RNA
ttccggacatggtgtccctcc

SEQ ID NO: 15815 - RNA, 21 nt, synthetic construct
  source 1..21: mol_type = other RNA
ttggctcgtgtgcttccggac

SEQ ID NO: 15816 - RNA, 21 nt, synthetic construct
  source 1..21: mol_type = other RNA
ttgtacaagctgtcggaaaca

SEQ ID NO: 15817 - RNA, 21 nt, synthetic construct
  source 1..21: mol_type = other RNA
ttgtacaataactgcatctgc

SEQ ID NO: 15818 - RNA, 21 nt, synthetic construct
  source 1..21: mol_type = other RNA
tttccgacagcttgtacaata

SEQ ID NO: 15819 - RNA, 22 nt, synthetic construct
  source 1..22: mol_type = other RNA
aaacagaggccagggggaggga

SEQ ID NO: 15820 - RNA, 22 nt, synthetic construct
  source 1..22: mol_type = other RNA
aacagaggccagggggagggat

SEQ ID NO: 15821 - RNA, 22 nt, synthetic construct
  source 1..22: mol_type = other RNA
aactgcatctgcgacgtgggag

SEQ ID NO: 15822 - RNA, 22 nt, synthetic construct
  source 1..22: mol_type = other RNA
aagcacacgagccaagctctcg

SEQ ID NO: 15823 - RNA, 22 nt, synthetic construct
  source 1..22: mol_type = other RNA
aagctctcggctcccacgtcgc

SEQ ID NO: 15824 - RNA, 22 nt, synthetic construct
  source 1..22: mol_type = other RNA
aagctgtcggaaacagaggcca

SEQ ID NO: 15825 - RNA, 22 nt, synthetic construct
  source 1..22: mol_type = other RNA
aataactgcatctgcgacgtgg

SEQ ID NO: 15826 - RNA, 22 nt, synthetic construct
  source 1..22: mol_type = other RNA
aatccctccccctggcctctgt

SEQ ID NO: 15827 - RNA, 22 nt, synthetic construct
  source 1..22: mol_type = other RNA
acaagctgtcggaaacagaggc

SEQ ID NO: 15828 - RNA, 22 nt, synthetic construct
  source 1..22: mol_type = other RNA
acaataactgcatctgcgacgt

SEQ ID NO: 15829 - RNA, 22 nt, synthetic construct
  source 1..22: mol_type = other RNA
acaccatgtccggaagcacacg

SEQ ID NO: 15830 - RNA, 22 nt, synthetic construct
  source 1..22: mol_type = other RNA
acacgagccaagctctcggctc

SEQ ID NO: 15831 - RNA, 22 nt, synthetic construct
  source 1..22: mol_type = other RNA
acactcactccatcacccggag

SEQ ID NO: 15832 - RNA, 22 nt, synthetic construct
  source 1..22: mol_type = other RNA
acagaggccagggggagggatt

SEQ ID NO: 15833 - RNA, 22 nt, synthetic construct
  source 1..22: mol_type = other RNA
acagcttgtacaataactgcat

SEQ ID NO: 15834 - RNA, 22 nt, synthetic construct
  source 1..22: mol_type = other RNA
acaggcctccaatccctccccc

SEQ ID NO: 15835 - RNA, 22 nt, synthetic construct
  source 1..22: mol_type = other RNA
acatggtgtccctccgggtgat

SEQ ID NO: 15836 - RNA, 22 nt, synthetic construct
  source 1..22: mol_type = other RNA
accatgtccggaagcacacgag

SEQ ID NO: 15837 - RNA, 22 nt, synthetic construct
  source 1..22: mol_type = other RNA
acccaccgcccagactcccaca

SEQ ID NO: 15838 - RNA, 22 nt, synthetic construct
  source 1..22: mol_type = other RNA
accccgggctgagccacccacc

SEQ ID NO: 15839 - RNA, 22 nt, synthetic construct
  source 1..22: mol_type = other RNA
acccggagggacaccatgtccg

SEQ ID NO: 15840 - RNA, 22 nt, synthetic construct
  source 1..22: mol_type = other RNA
accgcccagactcccacactca

SEQ ID NO: 15841 - RNA, 22 nt, synthetic construct
  source 1..22: mol_type = other RNA
acgagccaagctctcggctccc

SEQ ID NO: 15842 - RNA, 22 nt, synthetic construct
  source 1..22: mol_type = other RNA
acgtcgcagatgcagttattgt

SEQ ID NO: 15843 - RNA, 22 nt, synthetic construct
  source 1..22: mol_type = other RNA
acgtgggagccgagagcttggc

SEQ ID NO: 15844 - RNA, 22 nt, synthetic construct
  source 1..22: mol_type = other RNA
actcactccatcacccggaggg

SEQ ID NO: 15845 - RNA, 22 nt, synthetic construct
  source 1..22: mol_type = other RNA
actccatcacccggagggacac

SEQ ID NO: 15846 - RNA, 22 nt, synthetic construct
  source 1..22: mol_type = other RNA
actcccacactcactccatcac

SEQ ID NO: 15847 - RNA, 22 nt, synthetic construct
  source 1..22: mol_type = other RNA
actgcatctgcgacgtgggagc

SEQ ID NO: 15848 - RNA, 22 nt, synthetic construct
  source 1..22: mol_type = other RNA
agactcccacactcactccatc

SEQ ID NO: 15849 - RNA, 22 nt, synthetic construct
  source 1..22: mol_type = other RNA
agagcttggctcgtgtgcttcc

SEQ ID NO: 15850 - RNA, 22 nt, synthetic construct
  source 1..22: mol_type = other RNA
agaggccagggggagggattgg

SEQ ID NO: 15851 - RNA, 22 nt, synthetic construct
  source 1..22: mol_type = other RNA
agatgcagttattgtacaagct

SEQ ID NO: 15852 - RNA, 22 nt, synthetic construct
  source 1..22: mol_type = other RNA
agcacacgagccaagctctcgg

SEQ ID NO: 15853 - RNA, 22 nt, synthetic construct
  source 1..22: mol_type = other RNA
agccaagctctcggctcccacg

SEQ ID NO: 15854 - RNA, 22 nt, synthetic construct
  source 1..22: mol_type = other RNA
agccacccaccgcccagactcc

SEQ ID NO: 15855 - RNA, 22 nt, synthetic construct
  source 1..22: mol_type = other RNA
agccgagagcttggctcgtgtg

SEQ ID NO: 15856 - RNA, 22 nt, synthetic construct
  source 1..22: mol_type = other RNA
agctctcggctcccacgtcgca

SEQ ID NO: 15857 - RNA, 22 nt, synthetic construct
  source 1..22: mol_type = other RNA
agctgtcggaaacagaggccag

SEQ ID NO: 15858 - RNA, 22 nt, synthetic construct
  source 1..22: mol_type = other RNA
agcttggctcgtgtgcttccgg

SEQ ID NO: 15859 - RNA, 22 nt, synthetic construct
  source 1..22: mol_type = other RNA
agcttgtacaataactgcatct

SEQ ID NO: 15860 - RNA, 22 nt, synthetic construct
  source 1..22: mol_type = other RNA
aggccagggggagggattggag

SEQ ID NO: 15861 - RNA, 22 nt, synthetic construct
  source 1..22: mol_type = other RNA
aggcctccaatccctccccctg

SEQ ID NO: 15862 - RNA, 22 nt, synthetic construct
  source 1..22: mol_type = other RNA
agggacaccatgtccggaagca

SEQ ID NO: 15863 - RNA, 22 nt, synthetic construct
  source 1..22: mol_type = other RNA
agtctgggcggtgggtggctca

SEQ ID NO: 15864 - RNA, 22 nt, synthetic construct
  source 1..22: mol_type = other RNA
agtgagtgtgggagtctgggcg

SEQ ID NO: 15865 - RNA, 22 nt, synthetic construct
  source 1..22: mol_type = other RNA
agtgtgggagtctgggcggtgg

SEQ ID NO: 15866 - RNA, 22 nt, synthetic construct
  source 1..22: mol_type = other RNA
agttattgtacaagctgtcgga

SEQ ID NO: 15867 - RNA, 22 nt, synthetic construct
  source 1..22: mol_type = other RNA
ataactgcatctgcgacgtggg

SEQ ID NO: 15868 - RNA, 22 nt, synthetic construct
  source 1..22: mol_type = other RNA
atcacccggagggacaccatgt

SEQ ID NO: 15869 - RNA, 22 nt, synthetic construct
  source 1..22: mol_type = other RNA
atccctccccctggcctctgtt

SEQ ID NO: 15870 - RNA, 22 nt, synthetic construct
  source 1..22: mol_type = other RNA
atctgcgacgtgggagccgaga

SEQ ID NO: 15871 - RNA, 22 nt, synthetic construct
  source 1..22: mol_type = other RNA
atgcacaggcctccaatccctc

SEQ ID NO: 15872 - RNA, 22 nt, synthetic construct
  source 1..22: mol_type = other RNA
atgcagttattgtacaagctgt

SEQ ID NO: 15873 - RNA, 22 nt, synthetic construct
  source 1..22: mol_type = other RNA
atggagtgagtgtgggagtctg

SEQ ID NO: 15874 - RNA, 22 nt, synthetic construct
  source 1..22: mol_type = other RNA
atggtgtccctccgggtgatgg

SEQ ID NO: 15875 - RNA, 22 nt, synthetic construct
  source 1..22: mol_type = other RNA
atgtccggaagcacacgagcca

SEQ ID NO: 15876 - RNA, 22 nt, synthetic construct
  source 1..22: mol_type = other RNA
attgtacaagctgtcggaaaca

SEQ ID NO: 15877 - RNA, 22 nt, synthetic construct
  source 1..22: mol_type = other RNA
caagctctcggctcccacgtcg

SEQ ID NO: 15878 - RNA, 22 nt, synthetic construct
  source 1..22: mol_type = other RNA
caagctgtcggaaacagaggcc

SEQ ID NO: 15879 - RNA, 22 nt, synthetic construct
  source 1..22: mol_type = other RNA
caataactgcatctgcgacgtg

SEQ ID NO: 15880 - RNA, 22 nt, synthetic construct
  source 1..22: mol_type = other RNA
caatccctccccctggcctctg

SEQ ID NO: 15881 - RNA, 22 nt, synthetic construct
  source 1..22: mol_type = other RNA
cacacgagccaagctctcggct

SEQ ID NO: 15882 - RNA, 22 nt, synthetic construct
  source 1..22: mol_type = other RNA
cacactcactccatcacccgga

SEQ ID NO: 15883 - RNA, 22 nt, synthetic construct
  source 1..22: mol_type = other RNA
cacaggcctccaatccctcccc

SEQ ID NO: 15884 - RNA, 22 nt, synthetic construct
  source 1..22: mol_type = other RNA
caccatgtccggaagcacacga

SEQ ID NO: 15885 - RNA, 22 nt, synthetic construct
  source 1..22: mol_type = other RNA
cacccaccgcccagactcccac

SEQ ID NO: 15886 - RNA, 22 nt, synthetic construct
  source 1..22: mol_type = other RNA
caccccgggctgagccacccac

SEQ ID NO: 15887 - RNA, 22 nt, synthetic construct
  source 1..22: mol_type = other RNA
cacccggagggacaccatgtcc

SEQ ID NO: 15888 - RNA, 22 nt, synthetic construct
  source 1..22: mol_type = other RNA
caccgcccagactcccacactc

SEQ ID NO: 15889 - RNA, 22 nt, synthetic construct
  source 1..22: mol_type = other RNA
cacgagccaagctctcggctcc

SEQ ID NO: 15890 - RNA, 22 nt, synthetic construct
  source 1..22: mol_type = other RNA
cacgtcgcagatgcagttattg

SEQ ID NO: 15891 - RNA, 22 nt, synthetic construct
  source 1..22: mol_type = other RNA
cactcactccatcacccggagg

SEQ ID NO: 15892 - RNA, 22 nt, synthetic construct
  source 1..22: mol_type = other RNA
cactccatcacccggagggaca

SEQ ID NO: 15893 - RNA, 22 nt, synthetic construct
  source 1..22: mol_type = other RNA
cagactcccacactcactccat

SEQ ID NO: 15894 - RNA, 22 nt, synthetic construct
  source 1..22: mol_type = other RNA
cagaggccagggggagggattg

SEQ ID NO: 15895 - RNA, 22 nt, synthetic construct
  source 1..22: mol_type = other RNA
cagatgcagttattgtacaagc

SEQ ID NO: 15896 - RNA, 22 nt, synthetic construct
  source 1..22: mol_type = other RNA
cagcttgtacaataactgcatc

SEQ ID NO: 15897 - RNA, 22 nt, synthetic construct
  source 1..22: mol_type = other RNA
caggcctccaatccctccccct

SEQ ID NO: 15898 - RNA, 22 nt, synthetic construct
  source 1..22: mol_type = other RNA
cagttattgtacaagctgtcgg

SEQ ID NO: 15899 - RNA, 22 nt, synthetic construct
  source 1..22: mol_type = other RNA
catcacccggagggacaccatg

SEQ ID NO: 15900 - RNA, 22 nt, synthetic construct
  source 1..22: mol_type = other RNA
catctgcgacgtgggagccgag

SEQ ID NO: 15901 - RNA, 22 nt, synthetic construct
  source 1..22: mol_type = other RNA
catgcacaggcctccaatccct

SEQ ID NO: 15902 - RNA, 22 nt, synthetic construct
  source 1..22: mol_type = other RNA
catggtgtccctccgggtgatg

SEQ ID NO: 15903 - RNA, 22 nt, synthetic construct
  source 1..22: mol_type = other RNA
catgtccggaagcacacgagcc

SEQ ID NO: 15904 - RNA, 22 nt, synthetic construct
  source 1..22: mol_type = other RNA
ccaagctctcggctcccacgtc

SEQ ID NO: 15905 - RNA, 22 nt, synthetic construct
  source 1..22: mol_type = other RNA
ccaatccctccccctggcctct

SEQ ID NO: 15906 - RNA, 22 nt, synthetic construct
  source 1..22: mol_type = other RNA
ccacactcactccatcacccgg

SEQ ID NO: 15907 - RNA, 22 nt, synthetic construct
  source 1..22: mol_type = other RNA
ccacccaccgcccagactccca

SEQ ID NO: 15908 - RNA, 22 nt, synthetic construct
  source 1..22: mol_type = other RNA
ccaccccgggctgagccaccca

SEQ ID NO: 15909 - RNA, 22 nt, synthetic construct
  source 1..22: mol_type = other RNA
ccaccgcccagactcccacact

SEQ ID NO: 15910 - RNA, 22 nt, synthetic construct
  source 1..22: mol_type = other RNA
ccacgtcgcagatgcagttatt

SEQ ID NO: 15911 - RNA, 22 nt, synthetic construct
  source 1..22: mol_type = other RNA
ccagactcccacactcactcca

SEQ ID NO: 15912 - RNA, 22 nt, synthetic construct
  source 1..22: mol_type = other RNA
ccagggggagggattggaggcc

SEQ ID NO: 15913 - RNA, 22 nt, synthetic construct
  source 1..22: mol_type = other RNA
ccatcacccggagggacaccat

SEQ ID NO: 15914 - RNA, 22 nt, synthetic construct
  source 1..22: mol_type = other RNA
ccatgtccggaagcacacgagc

SEQ ID NO: 15915 - RNA, 22 nt, synthetic construct
  source 1..22: mol_type = other RNA
cccacactcactccatcacccg

SEQ ID NO: 15916 - RNA, 22 nt, synthetic construct
  source 1..22: mol_type = other RNA
cccaccgcccagactcccacac

SEQ ID NO: 15917 - RNA, 22 nt, synthetic construct
  source 1..22: mol_type = other RNA
cccacgtcgcagatgcagttat

SEQ ID NO: 15918 - RNA, 22 nt, synthetic construct
  source 1..22: mol_type = other RNA
cccagactcccacactcactcc

SEQ ID NO: 15919 - RNA, 22 nt, synthetic construct
  source 1..22: mol_type = other RNA
ccccctggcctctgtttccgac

SEQ ID NO: 15920 - RNA, 22 nt, synthetic construct
  source 1..22: mol_type = other RNA
cccctggcctctgtttccgaca

SEQ ID NO: 15921 - RNA, 22 nt, synthetic construct
  source 1..22: mol_type = other RNA
cccggagggacaccatgtccgg

SEQ ID NO: 15922 - RNA, 22 nt, synthetic construct
  source 1..22: mol_type = other RNA
ccctccccctggcctctgtttc

SEQ ID NO: 15923 - RNA, 22 nt, synthetic construct
  source 1..22: mol_type = other RNA
ccctccgggtgatggagtgagt

SEQ ID NO: 15924 - RNA, 22 nt, synthetic construct
  source 1..22: mol_type = other RNA
ccctggcctctgtttccgacag

SEQ ID NO: 15925 - RNA, 22 nt, synthetic construct
  source 1..22: mol_type = other RNA
ccgacagcttgtacaataactg

SEQ ID NO: 15926 - RNA, 22 nt, synthetic construct
  source 1..22: mol_type = other RNA
ccgagagcttggctcgtgtgct

SEQ ID NO: 15927 - RNA, 22 nt, synthetic construct
  source 1..22: mol_type = other RNA
ccgcccagactcccacactcac

SEQ ID NO: 15928 - RNA, 22 nt, synthetic construct
  source 1..22: mol_type = other RNA
ccggaagcacacgagccaagct

SEQ ID NO: 15929 - RNA, 22 nt, synthetic construct
  source 1..22: mol_type = other RNA
ccggacatggtgtccctccggg

SEQ ID NO: 15930 - RNA, 22 nt, synthetic construct
  source 1..22: mol_type = other RNA
ccggagggacaccatgtccgga

SEQ ID NO: 15931 - RNA, 22 nt, synthetic construct
  source 1..22: mol_type = other RNA
ccgggtgatggagtgagtgtgg

SEQ ID NO: 15932 - RNA, 22 nt, synthetic construct
  source 1..22: mol_type = other RNA
cctccaatccctccccctggcc

SEQ ID NO: 15933 - RNA, 22 nt, synthetic construct
  source 1..22: mol_type = other RNA
cctccccctggcctctgtttcc

SEQ ID NO: 15934 - RNA, 22 nt, synthetic construct
  source 1..22: mol_type = other RNA
cctccgggtgatggagtgagtg

SEQ ID NO: 15935 - RNA, 22 nt, synthetic construct
  source 1..22: mol_type = other RNA
cctctgtttccgacagcttgta

SEQ ID NO: 15936 - RNA, 22 nt, synthetic construct
  source 1..22: mol_type = other RNA
cctggcctctgtttccgacagc

SEQ ID NO: 15937 - RNA, 22 nt, synthetic construct
  source 1..22: mol_type = other RNA
cgacagcttgtacaataactgc

SEQ ID NO: 15938 - RNA, 22 nt, synthetic construct
  source 1..22: mol_type = other RNA
cgacgtgggagccgagagcttg

SEQ ID NO: 15939 - RNA, 22 nt, synthetic construct
  source 1..22: mol_type = other RNA
cgagagcttggctcgtgtgctt

SEQ ID NO: 15940 - RNA, 22 nt, synthetic construct
  source 1..22: mol_type = other RNA
cgagccaagctctcggctccca

SEQ ID NO: 15941 - RNA, 22 nt, synthetic construct
  source 1..22: mol_type = other RNA
cgcagatgcagttattgtacaa

SEQ ID NO: 15942 - RNA, 22 nt, synthetic construct
  source 1..22: mol_type = other RNA
cgcccagactcccacactcact

SEQ ID NO: 15943 - RNA, 22 nt, synthetic construct
  source 1..22: mol_type = other RNA
cggaaacagaggccagggggag

SEQ ID NO: 15944 - RNA, 22 nt, synthetic construct
  source 1..22: mol_type = other RNA
cggaagcacacgagccaagctc

SEQ ID NO: 15945 - RNA, 22 nt, synthetic construct
  source 1..22: mol_type = other RNA
cggacatggtgtccctccgggt

SEQ ID NO: 15946 - RNA, 22 nt, synthetic construct
  source 1..22: mol_type = other RNA
cggagggacaccatgtccggaa

SEQ ID NO: 15947 - RNA, 22 nt, synthetic construct
  source 1..22: mol_type = other RNA
cggctcccacgtcgcagatgca

SEQ ID NO: 15948 - RNA, 22 nt, synthetic construct
  source 1..22: mol_type = other RNA
cgggtgatggagtgagtgtggg

SEQ ID NO: 15949 - RNA, 22 nt, synthetic construct
  source 1..22: mol_type = other RNA
cgtcgcagatgcagttattgta

SEQ ID NO: 15950 - RNA, 22 nt, synthetic construct
  source 1..22: mol_type = other RNA
cgtgggagccgagagcttggct

SEQ ID NO: 15951 - RNA, 22 nt, synthetic construct
  source 1..22: mol_type = other RNA
cgtgtgcttccggacatggtgt

SEQ ID NO: 15952 - RNA, 22 nt, synthetic construct
  source 1..22: mol_type = other RNA
ctcactccatcacccggaggga

SEQ ID NO: 15953 - RNA, 22 nt, synthetic construct
  source 1..22: mol_type = other RNA
ctccaatccctccccctggcct

SEQ ID NO: 15954 - RNA, 22 nt, synthetic construct
  source 1..22: mol_type = other RNA
ctccatcacccggagggacacc

SEQ ID NO: 15955 - RNA, 22 nt, synthetic construct
  source 1..22: mol_type = other RNA
ctcccacactcactccatcacc

SEQ ID NO: 15956 - RNA, 22 nt, synthetic construct
  source 1..22: mol_type = other RNA
ctcccacgtcgcagatgcagtt

SEQ ID NO: 15957 - RNA, 22 nt, synthetic construct
  source 1..22: mol_type = other RNA
ctccccctggcctctgtttccg

SEQ ID NO: 15958 - RNA, 22 nt, synthetic construct
  source 1..22: mol_type = other RNA
ctccgggtgatggagtgagtgt

SEQ ID NO: 15959 - RNA, 22 nt, synthetic construct
  source 1..22: mol_type = other RNA
ctcggctcccacgtcgcagatg

SEQ ID NO: 15960 - RNA, 22 nt, synthetic construct
  source 1..22: mol_type = other RNA
ctcgtgtgcttccggacatggt

SEQ ID NO: 15961 - RNA, 22 nt, synthetic construct
  source 1..22: mol_type = other RNA
ctctcggctcccacgtcgcaga

SEQ ID NO: 15962 - RNA, 22 nt, synthetic construct
  source 1..22: mol_type = other RNA
ctctgtttccgacagcttgtac

SEQ ID NO: 15963 - RNA, 22 nt, synthetic construct
  source 1..22: mol_type = other RNA
ctgagccacccaccgcccagac

SEQ ID NO: 15964 - RNA, 22 nt, synthetic construct
  source 1..22: mol_type = other RNA
ctgcatctgcgacgtgggagcc

SEQ ID NO: 15965 - RNA, 22 nt, synthetic construct
  source 1..22: mol_type = other RNA
ctgcgacgtgggagccgagagc

SEQ ID NO: 15966 - RNA, 22 nt, synthetic construct
  source 1..22: mol_type = other RNA
ctggcctctgtttccgacagct

SEQ ID NO: 15967 - RNA, 22 nt, synthetic construct
  source 1..22: mol_type = other RNA
ctgggcggtgggtggctcagcc

SEQ ID NO: 15968 - RNA, 22 nt, synthetic construct
  source 1..22: mol_type = other RNA
ctgtcggaaacagaggccaggg

SEQ ID NO: 15969 - RNA, 22 nt, synthetic construct
  source 1..22: mol_type = other RNA
ctgtttccgacagcttgtacaa

SEQ ID NO: 15970 - RNA, 22 nt, synthetic construct
  source 1..22: mol_type = other RNA
cttccggacatggtgtccctcc

SEQ ID NO: 15971 - RNA, 22 nt, synthetic construct
  source 1..22: mol_type = other RNA
cttggctcgtgtgcttccggac

SEQ ID NO: 15972 - RNA, 22 nt, synthetic construct
  source 1..22: mol_type = other RNA
cttgtacaataactgcatctgc

SEQ ID NO: 15973 - RNA, 22 nt, synthetic construct
  source 1..22: mol_type = other RNA
gaaacagaggccagggggaggg

SEQ ID NO: 15974 - RNA, 22 nt, synthetic construct
  source 1..22: mol_type = other RNA
gaagcacacgagccaagctctc

SEQ ID NO: 15975 - RNA, 22 nt, synthetic construct
  source 1..22: mol_type = other RNA
gacaccatgtccggaagcacac

SEQ ID NO: 15976 - RNA, 22 nt, synthetic construct
  source 1..22: mol_type = other RNA
gacagcttgtacaataactgca

SEQ ID NO: 15977 - RNA, 22 nt, synthetic construct
  source 1..22: mol_type = other RNA
gacatggtgtccctccgggtga

SEQ ID NO: 15978 - RNA, 22 nt, synthetic construct
  source 1..22: mol_type = other RNA
gacgtgggagccgagagcttgg

SEQ ID NO: 15979 - RNA, 22 nt, synthetic construct
  source 1..22: mol_type = other RNA
gactcccacactcactccatca

SEQ ID NO: 15980 - RNA, 22 nt, synthetic construct
  source 1..22: mol_type = other RNA
gagagcttggctcgtgtgcttc

SEQ ID NO: 15981 - RNA, 22 nt, synthetic construct
  source 1..22: mol_type = other RNA
gagccaagctctcggctcccac

SEQ ID NO: 15982 - RNA, 22 nt, synthetic construct
  source 1..22: mol_type = other RNA
gagccacccaccgcccagactc

SEQ ID NO: 15983 - RNA, 22 nt, synthetic construct
  source 1..22: mol_type = other RNA
gagccgagagcttggctcgtgt

SEQ ID NO: 15984 - RNA, 22 nt, synthetic construct
  source 1..22: mol_type = other RNA
gagcttggctcgtgtgcttccg

SEQ ID NO: 15985 - RNA, 22 nt, synthetic construct
  source 1..22: mol_type = other RNA
gaggccagggggagggattgga

SEQ ID NO: 15986 - RNA, 22 nt, synthetic construct
  source 1..22: mol_type = other RNA
gagggacaccatgtccggaagc

SEQ ID NO: 15987 - RNA, 22 nt, synthetic construct
  source 1..22: mol_type = other RNA
gagtctgggcggtgggtggctc

SEQ ID NO: 15988 - RNA, 22 nt, synthetic construct
  source 1..22: mol_type = other RNA
gagtgagtgtgggagtctgggc

SEQ ID NO: 15989 - RNA, 22 nt, synthetic construct
  source 1..22: mol_type = other RNA
gagtgtgggagtctgggcggtg

SEQ ID NO: 15990 - RNA, 22 nt, synthetic construct
  source 1..22: mol_type = other RNA
gatgcagttattgtacaagctg

SEQ ID NO: 15991 - RNA, 22 nt, synthetic construct
  source 1..22: mol_type = other RNA
gatggagtgagtgtgggagtct

SEQ ID NO: 15992 - RNA, 22 nt, synthetic construct
  source 1..22: mol_type = other RNA
gcacacgagccaagctctcggc

SEQ ID NO: 15993 - RNA, 22 nt, synthetic construct
  source 1..22: mol_type = other RNA
gcacaggcctccaatccctccc

SEQ ID NO: 15994 - RNA, 22 nt, synthetic construct
  source 1..22: mol_type = other RNA
gcagatgcagttattgtacaag

SEQ ID NO: 15995 - RNA, 22 nt, synthetic construct
  source 1..22: mol_type = other RNA
gcagttattgtacaagctgtcg

SEQ ID NO: 15996 - RNA, 22 nt, synthetic construct
  source 1..22: mol_type = other RNA
gcatctgcgacgtgggagccga

SEQ ID NO: 15997 - RNA, 22 nt, synthetic construct
  source 1..22: mol_type = other RNA
gccaagctctcggctcccacgt

SEQ ID NO: 15998 - RNA, 22 nt, synthetic construct
  source 1..22: mol_type = other RNA
gccacccaccgcccagactccc

SEQ ID NO: 15999 - RNA, 22 nt, synthetic construct
  source 1..22: mol_type = other RNA
gccagggggagggattggaggc

SEQ ID NO: 16000 - RNA, 22 nt, synthetic construct
  source 1..22: mol_type = other RNA
gcccagactcccacactcactc

SEQ ID NO: 16001 - RNA, 22 nt, synthetic construct
  source 1..22: mol_type = other RNA
gccgagagcttggctcgtgtgc

SEQ ID NO: 16002 - RNA, 22 nt, synthetic construct
  source 1..22: mol_type = other RNA
gcctccaatccctccccctggc

SEQ ID NO: 16003 - RNA, 22 nt, synthetic construct
  source 1..22: mol_type = other RNA
gcctctgtttccgacagcttgt

SEQ ID NO: 16004 - RNA, 22 nt, synthetic construct
  source 1..22: mol_type = other RNA
gcgacgtgggagccgagagctt

SEQ ID NO: 16005 - RNA, 22 nt, synthetic construct
  source 1..22: mol_type = other RNA
gctcccacgtcgcagatgcagt

SEQ ID NO: 16006 - RNA, 22 nt, synthetic construct
  source 1..22: mol_type = other RNA
gctcgtgtgcttccggacatgg

SEQ ID NO: 16007 - RNA, 22 nt, synthetic construct
  source 1..22: mol_type = other RNA
gctctcggctcccacgtcgcag

SEQ ID NO: 16008 - RNA, 22 nt, synthetic construct
  source 1..22: mol_type = other RNA
gctgagccacccaccgcccaga

SEQ ID NO: 16009 - RNA, 22 nt, synthetic construct
  source 1..22: mol_type = other RNA
gctgtcggaaacagaggccagg

SEQ ID NO: 16010 - RNA, 22 nt, synthetic construct
  source 1..22: mol_type = other RNA
gcttccggacatggtgtccctc

SEQ ID NO: 16011 - RNA, 22 nt, synthetic construct
  source 1..22: mol_type = other RNA
gcttggctcgtgtgcttccgga

SEQ ID NO: 16012 - RNA, 22 nt, synthetic construct
  source 1..22: mol_type = other RNA
gcttgtacaataactgcatctg

SEQ ID NO: 16013 - RNA, 22 nt, synthetic construct
  source 1..22: mol_type = other RNA
ggaaacagaggccagggggagg

SEQ ID NO: 16014 - RNA, 22 nt, synthetic construct
  source 1..22: mol_type = other RNA
ggaagcacacgagccaagctct

SEQ ID NO: 16015 - RNA, 22 nt, synthetic construct
  source 1..22: mol_type = other RNA
ggacaccatgtccggaagcaca

SEQ ID NO: 16016 - RNA, 22 nt, synthetic construct
  source 1..22: mol_type = other RNA
ggacatggtgtccctccgggtg

SEQ ID NO: 16017 - RNA, 22 nt, synthetic construct
  source 1..22: mol_type = other RNA
ggagccgagagcttggctcgtg

SEQ ID NO: 16018 - RNA, 22 nt, synthetic construct
  source 1..22: mol_type = other RNA
ggagggacaccatgtccggaag

SEQ ID NO: 16019 - RNA, 22 nt, synthetic construct
  source 1..22: mol_type = other RNA
ggagtctgggcggtgggtggct

SEQ ID NO: 16020 - RNA, 22 nt, synthetic construct
  source 1..22: mol_type = other RNA
ggagtgagtgtgggagtctggg

SEQ ID NO: 16021 - RNA, 22 nt, synthetic construct
  source 1..22: mol_type = other RNA
ggccagggggagggattggagg

SEQ ID NO: 16022 - RNA, 22 nt, synthetic construct
  source 1..22: mol_type = other RNA
ggcctccaatccctccccctgg

SEQ ID NO: 16023 - RNA, 22 nt, synthetic construct
  source 1..22: mol_type = other RNA
ggcctctgtttccgacagcttg

SEQ ID NO: 16024 - RNA, 22 nt, synthetic construct
  source 1..22: mol_type = other RNA
ggctcccacgtcgcagatgcag

SEQ ID NO: 16025 - RNA, 22 nt, synthetic construct
  source 1..22: mol_type = other RNA
ggctcgtgtgcttccggacatg

SEQ ID NO: 16026 - RNA, 22 nt, synthetic construct
  source 1..22: mol_type = other RNA
ggctgagccacccaccgcccag

SEQ ID NO: 16027 - RNA, 22 nt, synthetic construct
  source 1..22: mol_type = other RNA
gggacaccatgtccggaagcac

SEQ ID NO: 16028 - RNA, 22 nt, synthetic construct
  source 1..22: mol_type = other RNA
gggagccgagagcttggctcgt

SEQ ID NO: 16029 - RNA, 22 nt, synthetic construct
  source 1..22: mol_type = other RNA
gggagtctgggcggtgggtggc

SEQ ID NO: 16030 - RNA, 22 nt, synthetic construct
  source 1..22: mol_type = other RNA
gggctgagccacccaccgccca

SEQ ID NO: 16031 - RNA, 22 nt, synthetic construct
  source 1..22: mol_type = other RNA
gggtgatggagtgagtgtggga

SEQ ID NO: 16032 - RNA, 22 nt, synthetic construct
  source 1..22: mol_type = other RNA
ggtgatggagtgagtgtgggag

SEQ ID NO: 16033 - RNA, 22 nt, synthetic construct
  source 1..22: mol_type = other RNA
ggtgtccctccgggtgatggag

SEQ ID NO: 16034 - RNA, 22 nt, synthetic construct
  source 1..22: mol_type = other RNA
gtacaagctgtcggaaacagag

SEQ ID NO: 16035 - RNA, 22 nt, synthetic construct
  source 1..22: mol_type = other RNA
gtacaataactgcatctgcgac

SEQ ID NO: 16036 - RNA, 22 nt, synthetic construct
  source 1..22: mol_type = other RNA
gtccctccgggtgatggagtga

SEQ ID NO: 16037 - RNA, 22 nt, synthetic construct
  source 1..22: mol_type = other RNA
gtccggaagcacacgagccaag

SEQ ID NO: 16038 - RNA, 22 nt, synthetic construct
  source 1..22: mol_type = other RNA
gtcgcagatgcagttattgtac

SEQ ID NO: 16039 - RNA, 22 nt, synthetic construct
  source 1..22: mol_type = other RNA
gtcggaaacagaggccaggggg

SEQ ID NO: 16040 - RNA, 22 nt, synthetic construct
  source 1..22: mol_type = other RNA
gtctgggcggtgggtggctcag

SEQ ID NO: 16041 - RNA, 22 nt, synthetic construct
  source 1..22: mol_type = other RNA
gtgagtgtgggagtctgggcgg

SEQ ID NO: 16042 - RNA, 22 nt, synthetic construct
  source 1..22: mol_type = other RNA
gtgatggagtgagtgtgggagt

SEQ ID NO: 16043 - RNA, 22 nt, synthetic construct
  source 1..22: mol_type = other RNA
gtgcttccggacatggtgtccc

SEQ ID NO: 16044 - RNA, 22 nt, synthetic construct
  source 1..22: mol_type = other RNA
gtgggagccgagagcttggctc

SEQ ID NO: 16045 - RNA, 22 nt, synthetic construct
  source 1..22: mol_type = other RNA
gtgggagtctgggcggtgggtg

SEQ ID NO: 16046 - RNA, 22 nt, synthetic construct
  source 1..22: mol_type = other RNA
gtgtccctccgggtgatggagt

SEQ ID NO: 16047 - RNA, 22 nt, synthetic construct
  source 1..22: mol_type = other RNA
gtgtgcttccggacatggtgtc

SEQ ID NO: 16048 - RNA, 22 nt, synthetic construct
  source 1..22: mol_type = other RNA
gtgtgggagtctgggcggtggg

SEQ ID NO: 16049 - RNA, 22 nt, synthetic construct
  source 1..22: mol_type = other RNA
gttattgtacaagctgtcggaa

SEQ ID NO: 16050 - RNA, 22 nt, synthetic construct
  source 1..22: mol_type = other RNA
gtttccgacagcttgtacaata

SEQ ID NO: 16051 - RNA, 22 nt, synthetic construct
  source 1..22: mol_type = other RNA
taactgcatctgcgacgtggga

SEQ ID NO: 16052 - RNA, 22 nt, synthetic construct
  source 1..22: mol_type = other RNA
tacaagctgtcggaaacagagg

SEQ ID NO: 16053 - RNA, 22 nt, synthetic construct
  source 1..22: mol_type = other RNA
tacaataactgcatctgcgacg

SEQ ID NO: 16054 - RNA, 22 nt, synthetic construct
  source 1..22: mol_type = other RNA
tattgtacaagctgtcggaaac

SEQ ID NO: 16055 - RNA, 22 nt, synthetic construct
  source 1..22: mol_type = other RNA
tcacccggagggacaccatgtc

SEQ ID NO: 16056 - RNA, 22 nt, synthetic construct
  source 1..22: mol_type = other RNA
tcactccatcacccggagggac

SEQ ID NO: 16057 - RNA, 22 nt, synthetic construct
  source 1..22: mol_type = other RNA
tccaatccctccccctggcctc

SEQ ID NO: 16058 - RNA, 22 nt, synthetic construct
  source 1..22: mol_type = other RNA
tccatcacccggagggacacca

SEQ ID NO: 16059 - RNA, 22 nt, synthetic construct
  source 1..22: mol_type = other RNA
tcccacactcactccatcaccc

SEQ ID NO: 16060 - RNA, 22 nt, synthetic construct
  source 1..22: mol_type = other RNA
tcccacgtcgcagatgcagtta

SEQ ID NO: 16061 - RNA, 22 nt, synthetic construct
  source 1..22: mol_type = other RNA
tccccctggcctctgtttccga

SEQ ID NO: 16062 - RNA, 22 nt, synthetic construct
  source 1..22: mol_type = other RNA
tccctccccctggcctctgttt

SEQ ID NO: 16063 - RNA, 22 nt, synthetic construct
  source 1..22: mol_type = other RNA
tccctccgggtgatggagtgag

SEQ ID NO: 16064 - RNA, 22 nt, synthetic construct
  source 1..22: mol_type = other RNA
tccgacagcttgtacaataact

SEQ ID NO: 16065 - RNA, 22 nt, synthetic construct
  source 1..22: mol_type = other RNA
tccggaagcacacgagccaagc

SEQ ID NO: 16066 - RNA, 22 nt, synthetic construct
  source 1..22: mol_type = other RNA
tccggacatggtgtccctccgg

SEQ ID NO: 16067 - RNA, 22 nt, synthetic construct
  source 1..22: mol_type = other RNA
tccgggtgatggagtgagtgtg

SEQ ID NO: 16068 - RNA, 22 nt, synthetic construct
  source 1..22: mol_type = other RNA
tcgcagatgcagttattgtaca

SEQ ID NO: 16069 - RNA, 22 nt, synthetic construct
  source 1..22: mol_type = other RNA
tcggaaacagaggccaggggga

SEQ ID NO: 16070 - RNA, 22 nt, synthetic construct
  source 1..22: mol_type = other RNA
tcggctcccacgtcgcagatgc

SEQ ID NO: 16071 - RNA, 22 nt, synthetic construct
  source 1..22: mol_type = other RNA
tcgtgtgcttccggacatggtg

SEQ ID NO: 16072 - RNA, 22 nt, synthetic construct
  source 1..22: mol_type = other RNA
tctcggctcccacgtcgcagat

SEQ ID NO: 16073 - RNA, 22 nt, synthetic construct
  source 1..22: mol_type = other RNA
tctgcgacgtgggagccgagag

SEQ ID NO: 16074 - RNA, 22 nt, synthetic construct
  source 1..22: mol_type = other RNA
tctgggcggtgggtggctcagc

SEQ ID NO: 16075 - RNA, 22 nt, synthetic construct
  source 1..22: mol_type = other RNA
tctgtttccgacagcttgtaca

SEQ ID NO: 16076 - RNA, 22 nt, synthetic construct
  source 1..22: mol_type = other RNA
tgagccacccaccgcccagact

SEQ ID NO: 16077 - RNA, 22 nt, synthetic construct
  source 1..22: mol_type = other RNA
tgagtgtgggagtctgggcggt

SEQ ID NO: 16078 - RNA, 22 nt, synthetic construct
  source 1..22: mol_type = other RNA
tgatggagtgagtgtgggagtc

SEQ ID NO: 16079 - RNA, 22 nt, synthetic construct
  source 1..22: mol_type = other RNA
tgcacaggcctccaatccctcc

SEQ ID NO: 16080 - RNA, 22 nt, synthetic construct
  source 1..22: mol_type = other RNA
tgcagttattgtacaagctgtc

SEQ ID NO: 16081 - RNA, 22 nt, synthetic construct
  source 1..22: mol_type = other RNA
tgcatctgcgacgtgggagccg

SEQ ID NO: 16082 - RNA, 22 nt, synthetic construct
  source 1..22: mol_type = other RNA
tgcgacgtgggagccgagagct

SEQ ID NO: 16083 - RNA, 22 nt, synthetic construct
  source 1..22: mol_type = other RNA
tgcttccggacatggtgtccct

SEQ ID NO: 16084 - RNA, 22 nt, synthetic construct
  source 1..22: mol_type = other RNA
tggagtgagtgtgggagtctgg

SEQ ID NO: 16085 - RNA, 22 nt, synthetic construct
  source 1..22: mol_type = other RNA
tggcctctgtttccgacagctt

SEQ ID NO: 16086 - RNA, 22 nt, synthetic construct
  source 1..22: mol_type = other RNA
tggctcgtgtgcttccggacat

SEQ ID NO: 16087 - RNA, 22 nt, synthetic construct
  source 1..22: mol_type = other RNA
tgggagccgagagcttggctcg

SEQ ID NO: 16088 - RNA, 22 nt, synthetic construct
  source 1..22: mol_type = other RNA
tgggagtctgggcggtgggtgg

SEQ ID NO: 16089 - RNA, 22 nt, synthetic construct
  source 1..22: mol_type = other RNA
tgggcggtgggtggctcagccc

SEQ ID NO: 16090 - RNA, 22 nt, synthetic construct
  source 1..22: mol_type = other RNA
tggtgtccctccgggtgatgga

SEQ ID NO: 16091 - RNA, 22 nt, synthetic construct
  source 1..22: mol_type = other RNA
tgtacaagctgtcggaaacaga

SEQ ID NO: 16092 - RNA, 22 nt, synthetic construct
  source 1..22: mol_type = other RNA
tgtacaataactgcatctgcga

SEQ ID NO: 16093 - RNA, 22 nt, synthetic construct
  source 1..22: mol_type = other RNA
tgtccctccgggtgatggagtg

SEQ ID NO: 16094 - RNA, 22 nt, synthetic construct
  source 1..22: mol_type = other RNA
tgtccggaagcacacgagccaa

SEQ ID NO: 16095 - RNA, 22 nt, synthetic construct
  source 1..22: mol_type = other RNA
tgtcggaaacagaggccagggg

SEQ ID NO: 16096 - RNA, 22 nt, synthetic construct
  source 1..22: mol_type = other RNA
tgtgcttccggacatggtgtcc

SEQ ID NO: 16097 - RNA, 22 nt, synthetic construct
  source 1..22: mol_type = other RNA
tgtgggagtctgggcggtgggt

SEQ ID NO: 16098 - RNA, 22 nt, synthetic construct
  source 1..22: mol_type = other RNA
tgtttccgacagcttgtacaat

SEQ ID NO: 16099 - RNA, 22 nt, synthetic construct
  source 1..22: mol_type = other RNA
ttattgtacaagctgtcggaaa

SEQ ID NO: 16100 - RNA, 22 nt, synthetic construct
  source 1..22: mol_type = other RNA
ttccgacagcttgtacaataac

SEQ ID NO: 16101 - RNA, 22 nt, synthetic construct
  source 1..22: mol_type = other RNA
ttccggacatggtgtccctccg

SEQ ID NO: 16102 - RNA, 22 nt, synthetic construct
  source 1..22: mol_type = other RNA
ttggctcgtgtgcttccggaca

SEQ ID NO: 16103 - RNA, 22 nt, synthetic construct
  source 1..22: mol_type = other RNA
ttgtacaagctgtcggaaacag

SEQ ID NO: 16104 - RNA, 22 nt, synthetic construct
  source 1..22: mol_type = other RNA
ttgtacaataactgcatctgcg

SEQ ID NO: 16105 - RNA, 22 nt, synthetic construct
  source 1..22: mol_type = other RNA
tttccgacagcttgtacaataa

SEQ ID NO: 16106 - RNA, 20 nt, synthetic construct
  source 1..20: mol_type = other RNA
aaactcaccttggggcctgg

SEQ ID NO: 16107 - RNA, 20 nt, synthetic construct
  source 1..20: mol_type = other RNA
aacaagttcacggctgccgg

SEQ ID NO: 16108 - RNA, 20 nt, synthetic construct
  source 1..20: mol_type = other RNA
aaccctggtgggtggagaac

SEQ ID NO: 16109 - RNA, 20 nt, synthetic construct
  source 1..20: mol_type = other RNA
aactcaccttggggcctggc

SEQ ID NO: 16110 - RNA, 20 nt, synthetic construct
  source 1..20: mol_type = other RNA
aacttgttgtactggacgct

SEQ ID NO: 16111 - RNA, 20 nt, synthetic construct
  source 1..20: mol_type = other RNA
aagagaaactcaccttgggg

SEQ ID NO: 16112 - RNA, 20 nt, synthetic construct
  source 1..20: mol_type = other RNA
aaggctggcagcgagctgct

SEQ ID NO: 16113 - RNA, 20 nt, synthetic construct
  source 1..20: mol_type = other RNA
aagggccaggccccaaggtg

SEQ ID NO: 16114 - RNA, 20 nt, synthetic construct
  source 1..20: mol_type = other RNA
aaggtgagtttctcttgcca

SEQ ID NO: 16115 - RNA, 20 nt, synthetic construct
  source 1..20: mol_type = other RNA
aagtccaggcaaccctggtg

SEQ ID NO: 16116 - RNA, 20 nt, synthetic construct
  source 1..20: mol_type = other RNA
aagttcacggctgccggggc

SEQ ID NO: 16117 - RNA, 20 nt, synthetic construct
  source 1..20: mol_type = other RNA
acaacaagttcacggctgcc

SEQ ID NO: 16118 - RNA, 20 nt, synthetic construct
  source 1..20: mol_type = other RNA
acaagttcacggctgccggg

SEQ ID NO: 16119 - RNA, 20 nt, synthetic construct
  source 1..20: mol_type = other RNA
acacctccgaaggctggcag

SEQ ID NO: 16120 - RNA, 20 nt, synthetic construct
  source 1..20: mol_type = other RNA
acatgaggacacctccgaag

SEQ ID NO: 16121 - RNA, 20 nt, synthetic construct
  source 1..20: mol_type = other RNA
accagggttgcctggactta

SEQ ID NO: 16122 - RNA, 20 nt, synthetic construct
  source 1..20: mol_type = other RNA
acccaccagggttgcctgga

SEQ ID NO: 16123 - RNA, 20 nt, synthetic construct
  source 1..20: mol_type = other RNA
accctggtgggtggagaaca

SEQ ID NO: 16124 - RNA, 20 nt, synthetic construct
  source 1..20: mol_type = other RNA
acctccgaaggctggcagcg

SEQ ID NO: 16125 - RNA, 20 nt, synthetic construct
  source 1..20: mol_type = other RNA
accttggggcctggcccttg

SEQ ID NO: 16126 - RNA, 20 nt, synthetic construct
  source 1..20: mol_type = other RNA
acgccagcgtctccacatga

SEQ ID NO: 16127 - RNA, 20 nt, synthetic construct
  source 1..20: mol_type = other RNA
acgctggcaagagaaactca

SEQ ID NO: 16128 - RNA, 20 nt, synthetic construct
  source 1..20: mol_type = other RNA
acgctggcgtaagtccaggc

SEQ ID NO: 16129 - RNA, 20 nt, synthetic construct
  source 1..20: mol_type = other RNA
acggctgccggggcccagca

SEQ ID NO: 16130 - RNA, 20 nt, synthetic construct
  source 1..20: mol_type = other RNA
actcaccttggggcctggcc

SEQ ID NO: 16131 - RNA, 20 nt, synthetic construct
  source 1..20: mol_type = other RNA
actggacgctggcaagagaa

SEQ ID NO: 16132 - RNA, 20 nt, synthetic construct
  source 1..20: mol_type = other RNA
acttacgccagcgtctccac

SEQ ID NO: 16133 - RNA, 20 nt, synthetic construct
  source 1..20: mol_type = other RNA
acttgttgtactggacgctg

SEQ ID NO: 16134 - RNA, 20 nt, synthetic construct
  source 1..20: mol_type = other RNA
agaaactcaccttggggcct

SEQ ID NO: 16135 - RNA, 20 nt, synthetic construct
  source 1..20: mol_type = other RNA
agacgctggcgtaagtccag

SEQ ID NO: 16136 - RNA, 20 nt, synthetic construct
  source 1..20: mol_type = other RNA
agagaaactcaccttggggc

SEQ ID NO: 16137 - RNA, 20 nt, synthetic construct
  source 1..20: mol_type = other RNA
agcagctcgctgccagcctt

SEQ ID NO: 16138 - RNA, 20 nt, synthetic construct
  source 1..20: mol_type = other RNA
agccgtgaacttgttgtact

SEQ ID NO: 16139 - RNA, 20 nt, synthetic construct
  source 1..20: mol_type = other RNA
agccttcggaggtgtcctca

SEQ ID NO: 16140 - RNA, 20 nt, synthetic construct
  source 1..20: mol_type = other RNA
agcgagctgctgggccccgg

SEQ ID NO: 16141 - RNA, 20 nt, synthetic construct
  source 1..20: mol_type = other RNA
agcgtccagtacaacaagtt

SEQ ID NO: 16142 - RNA, 20 nt, synthetic construct
  source 1..20: mol_type = other RNA
agcgtctccacatgaggaca

SEQ ID NO: 16143 - RNA, 20 nt, synthetic construct
  source 1..20: mol_type = other RNA
agctcgctgccagccttcgg

SEQ ID NO: 16144 - RNA, 20 nt, synthetic construct
  source 1..20: mol_type = other RNA
agctgctgggccccggcagc

SEQ ID NO: 16145 - RNA, 20 nt, synthetic construct
  source 1..20: mol_type = other RNA
aggacacctccgaaggctgg

SEQ ID NO: 16146 - RNA, 20 nt, synthetic construct
  source 1..20: mol_type = other RNA
aggcaaccctggtgggtgga

SEQ ID NO: 16147 - RNA, 20 nt, synthetic construct
  source 1..20: mol_type = other RNA
aggccccaaggtgagtttct

SEQ ID NO: 16148 - RNA, 20 nt, synthetic construct
  source 1..20: mol_type = other RNA
aggctggcagcgagctgctg

SEQ ID NO: 16149 - RNA, 20 nt, synthetic construct
  source 1..20: mol_type = other RNA
agggccaggccccaaggtga

SEQ ID NO: 16150 - RNA, 20 nt, synthetic construct
  source 1..20: mol_type = other RNA
agggttgcctggacttacgc

SEQ ID NO: 16151 - RNA, 20 nt, synthetic construct
  source 1..20: mol_type = other RNA
aggtgagtttctcttgccag

SEQ ID NO: 16152 - RNA, 20 nt, synthetic construct
  source 1..20: mol_type = other RNA
aggtgtcctcatgtggagac

SEQ ID NO: 16153 - RNA, 20 nt, synthetic construct
  source 1..20: mol_type = other RNA
agtacaacaagttcacggct

SEQ ID NO: 16154 - RNA, 20 nt, synthetic construct
  source 1..20: mol_type = other RNA
agtccaggcaaccctggtgg

SEQ ID NO: 16155 - RNA, 20 nt, synthetic construct
  source 1..20: mol_type = other RNA
agtcccaagggccaggcccc

SEQ ID NO: 16156 - RNA, 20 nt, synthetic construct
  source 1..20: mol_type = other RNA
agtgagttgttctccaccca

SEQ ID NO: 16157 - RNA, 20 nt, synthetic construct
  source 1..20: mol_type = other RNA
agttcacggctgccggggcc

SEQ ID NO: 16158 - RNA, 20 nt, synthetic construct
  source 1..20: mol_type = other RNA
agttgttctccacccaccag

SEQ ID NO: 16159 - RNA, 20 nt, synthetic construct
  source 1..20: mol_type = other RNA
agtttctcttgccagcgtcc

SEQ ID NO: 16160 - RNA, 20 nt, synthetic construct
  source 1..20: mol_type = other RNA
atgaggacacctccgaaggc

SEQ ID NO: 16161 - RNA, 20 nt, synthetic construct
  source 1..20: mol_type = other RNA
atgtggagacgctggcgtaa

SEQ ID NO: 16162 - RNA, 20 nt, synthetic construct
  source 1..20: mol_type = other RNA
caacaagttcacggctgccg

SEQ ID NO: 16163 - RNA, 20 nt, synthetic construct
  source 1..20: mol_type = other RNA
caaccctggtgggtggagaa

SEQ ID NO: 16164 - RNA, 20 nt, synthetic construct
  source 1..20: mol_type = other RNA
caagagaaactcaccttggg

SEQ ID NO: 16165 - RNA, 20 nt, synthetic construct
  source 1..20: mol_type = other RNA
caagggccaggccccaaggt

SEQ ID NO: 16166 - RNA, 20 nt, synthetic construct
  source 1..20: mol_type = other RNA
caaggtgagtttctcttgcc

SEQ ID NO: 16167 - RNA, 20 nt, synthetic construct
  source 1..20: mol_type = other RNA
caagttcacggctgccgggg

SEQ ID NO: 16168 - RNA, 20 nt, synthetic construct
  source 1..20: mol_type = other RNA
cacatgaggacacctccgaa

SEQ ID NO: 16169 - RNA, 20 nt, synthetic construct
  source 1..20: mol_type = other RNA
caccagggttgcctggactt

SEQ ID NO: 16170 - RNA, 20 nt, synthetic construct
  source 1..20: mol_type = other RNA
cacccaccagggttgcctgg

SEQ ID NO: 16171 - RNA, 20 nt, synthetic construct
  source 1..20: mol_type = other RNA
cacctccgaaggctggcagc

SEQ ID NO: 16172 - RNA, 20 nt, synthetic construct
  source 1..20: mol_type = other RNA
caccttggggcctggccctt

SEQ ID NO: 16173 - RNA, 20 nt, synthetic construct
  source 1..20: mol_type = other RNA
cagcagctcgctgccagcct

SEQ ID NO: 16174 - RNA, 20 nt, synthetic construct
  source 1..20: mol_type = other RNA
cagccgtgaacttgttgtac

SEQ ID NO: 16175 - RNA, 20 nt, synthetic construct
  source 1..20: mol_type = other RNA
cagccttcggaggtgtcctc

SEQ ID NO: 16176 - RNA, 20 nt, synthetic construct
  source 1..20: mol_type = other RNA
cagcgagctgctgggccccg

SEQ ID NO: 16177 - RNA, 20 nt, synthetic construct
  source 1..20: mol_type = other RNA
cagcgtccagtacaacaagt

SEQ ID NO: 16178 - RNA, 20 nt, synthetic construct
  source 1..20: mol_type = other RNA
cagcgtctccacatgaggac

SEQ ID NO: 16179 - RNA, 20 nt, synthetic construct
  source 1..20: mol_type = other RNA
cagctcgctgccagccttcg

SEQ ID NO: 16180 - RNA, 20 nt, synthetic construct
  source 1..20: mol_type = other RNA
caggcaaccctggtgggtgg

SEQ ID NO: 16181 - RNA, 20 nt, synthetic construct
  source 1..20: mol_type = other RNA
caggccccaaggtgagtttc

SEQ ID NO: 16182 - RNA, 20 nt, synthetic construct
  source 1..20: mol_type = other RNA
cagggttgcctggacttacg

SEQ ID NO: 16183 - RNA, 20 nt, synthetic construct
  source 1..20: mol_type = other RNA
cagtacaacaagttcacggc

SEQ ID NO: 16184 - RNA, 20 nt, synthetic construct
  source 1..20: mol_type = other RNA
catgaggacacctccgaagg

SEQ ID NO: 16185 - RNA, 20 nt, synthetic construct
  source 1..20: mol_type = other RNA
catgtggagacgctggcgta

SEQ ID NO: 16186 - RNA, 20 nt, synthetic construct
  source 1..20: mol_type = other RNA
ccaagggccaggccccaagg

SEQ ID NO: 16187 - RNA, 20 nt, synthetic construct
  source 1..20: mol_type = other RNA
ccaaggtgagtttctcttgc

SEQ ID NO: 16188 - RNA, 20 nt, synthetic construct
  source 1..20: mol_type = other RNA
ccacatgaggacacctccga

SEQ ID NO: 16189 - RNA, 20 nt, synthetic construct
  source 1..20: mol_type = other RNA
ccaccagggttgcctggact

SEQ ID NO: 16190 - RNA, 20 nt, synthetic construct
  source 1..20: mol_type = other RNA
ccacccaccagggttgcctg

SEQ ID NO: 16191 - RNA, 20 nt, synthetic construct
  source 1..20: mol_type = other RNA
ccagcagctcgctgccagcc

SEQ ID NO: 16192 - RNA, 20 nt, synthetic construct
  source 1..20: mol_type = other RNA
ccagccttcggaggtgtcct

SEQ ID NO: 16193 - RNA, 20 nt, synthetic construct
  source 1..20: mol_type = other RNA
ccagcgtccagtacaacaag

SEQ ID NO: 16194 - RNA, 20 nt, synthetic construct
  source 1..20: mol_type = other RNA
ccagcgtctccacatgagga

SEQ ID NO: 16195 - RNA, 20 nt, synthetic construct
  source 1..20: mol_type = other RNA
ccaggcaaccctggtgggtg

SEQ ID NO: 16196 - RNA, 20 nt, synthetic construct
  source 1..20: mol_type = other RNA
ccaggccccaaggtgagttt

SEQ ID NO: 16197 - RNA, 20 nt, synthetic construct
  source 1..20: mol_type = other RNA
ccagggttgcctggacttac

SEQ ID NO: 16198 - RNA, 20 nt, synthetic construct
  source 1..20: mol_type = other RNA
ccagtacaacaagttcacgg

SEQ ID NO: 16199 - RNA, 20 nt, synthetic construct
  source 1..20: mol_type = other RNA
cccaagggccaggccccaag

SEQ ID NO: 16200 - RNA, 20 nt, synthetic construct
  source 1..20: mol_type = other RNA
cccaaggtgagtttctcttg

SEQ ID NO: 16201 - RNA, 20 nt, synthetic construct
  source 1..20: mol_type = other RNA
cccaccagggttgcctggac

SEQ ID NO: 16202 - RNA, 20 nt, synthetic construct
  source 1..20: mol_type = other RNA
cccagcagctcgctgccagc

SEQ ID NO: 16203 - RNA, 20 nt, synthetic construct
  source 1..20: mol_type = other RNA
ccccaaggtgagtttctctt

SEQ ID NO: 16204 - RNA, 20 nt, synthetic construct
  source 1..20: mol_type = other RNA
ccccggcagccgtgaacttg

SEQ ID NO: 16205 - RNA, 20 nt, synthetic construct
  source 1..20: mol_type = other RNA
cccggcagccgtgaacttgt

SEQ ID NO: 16206 - RNA, 20 nt, synthetic construct
  source 1..20: mol_type = other RNA
ccctggtgggtggagaacaa

SEQ ID NO: 16207 - RNA, 20 nt, synthetic construct
  source 1..20: mol_type = other RNA
ccgaaggctggcagcgagct

SEQ ID NO: 16208 - RNA, 20 nt, synthetic construct
  source 1..20: mol_type = other RNA
ccggcagccgtgaacttgtt

SEQ ID NO: 16209 - RNA, 20 nt, synthetic construct
  source 1..20: mol_type = other RNA
ccggggcccagcagctcgct

SEQ ID NO: 16210 - RNA, 20 nt, synthetic construct
  source 1..20: mol_type = other RNA
ccgtgaacttgttgtactgg

SEQ ID NO: 16211 - RNA, 20 nt, synthetic construct
  source 1..20: mol_type = other RNA
cctcatgtggagacgctggc

SEQ ID NO: 16212 - RNA, 20 nt, synthetic construct
  source 1..20: mol_type = other RNA
cctccgaaggctggcagcga

SEQ ID NO: 16213 - RNA, 20 nt, synthetic construct
  source 1..20: mol_type = other RNA
cctggacttacgccagcgtc

SEQ ID NO: 16214 - RNA, 20 nt, synthetic construct
  source 1..20: mol_type = other RNA
cctggtgggtggagaacaac

SEQ ID NO: 16215 - RNA, 20 nt, synthetic construct
  source 1..20: mol_type = other RNA
ccttcggaggtgtcctcatg

SEQ ID NO: 16216 - RNA, 20 nt, synthetic construct
  source 1..20: mol_type = other RNA
ccttggggcctggcccttgg

SEQ ID NO: 16217 - RNA, 20 nt, synthetic construct
  source 1..20: mol_type = other RNA
cgaaggctggcagcgagctg

SEQ ID NO: 16218 - RNA, 20 nt, synthetic construct
  source 1..20: mol_type = other RNA
cgagctgctgggccccggca

SEQ ID NO: 16219 - RNA, 20 nt, synthetic construct
  source 1..20: mol_type = other RNA
cgccagcgtctccacatgag

SEQ ID NO: 16220 - RNA, 20 nt, synthetic construct
  source 1..20: mol_type = other RNA
cgctgccagccttcggaggt

SEQ ID NO: 16221 - RNA, 20 nt, synthetic construct
  source 1..20: mol_type = other RNA
cgctggcaagagaaactcac

SEQ ID NO: 16222 - RNA, 20 nt, synthetic construct
  source 1..20: mol_type = other RNA
cgctggcgtaagtccaggca

SEQ ID NO: 16223 - RNA, 20 nt, synthetic construct
  source 1..20: mol_type = other RNA
cggaggtgtcctcatgtgga

SEQ ID NO: 16224 - RNA, 20 nt, synthetic construct
  source 1..20: mol_type = other RNA
cggcagccgtgaacttgttg

SEQ ID NO: 16225 - RNA, 20 nt, synthetic construct
  source 1..20: mol_type = other RNA
cggggcccagcagctcgctg

SEQ ID NO: 16226 - RNA, 20 nt, synthetic construct
  source 1..20: mol_type = other RNA
cgtaagtccaggcaaccctg

SEQ ID NO: 16227 - RNA, 20 nt, synthetic construct
  source 1..20: mol_type = other RNA
cgtccagtacaacaagttca

SEQ ID NO: 16228 - RNA, 20 nt, synthetic construct
  source 1..20: mol_type = other RNA
cgtctccacatgaggacacc

SEQ ID NO: 16229 - RNA, 20 nt, synthetic construct
  source 1..20: mol_type = other RNA
cgtgaacttgttgtactgga

SEQ ID NO: 16230 - RNA, 20 nt, synthetic construct
  source 1..20: mol_type = other RNA
ctcaccttggggcctggccc

SEQ ID NO: 16231 - RNA, 20 nt, synthetic construct
  source 1..20: mol_type = other RNA
ctcatgtggagacgctggcg

SEQ ID NO: 16232 - RNA, 20 nt, synthetic construct
  source 1..20: mol_type = other RNA
ctccacatgaggacacctcc

SEQ ID NO: 16233 - RNA, 20 nt, synthetic construct
  source 1..20: mol_type = other RNA
ctccacccaccagggttgcc

SEQ ID NO: 16234 - RNA, 20 nt, synthetic construct
  source 1..20: mol_type = other RNA
ctccgaaggctggcagcgag

SEQ ID NO: 16235 - RNA, 20 nt, synthetic construct
  source 1..20: mol_type = other RNA
ctcgctgccagccttcggag

SEQ ID NO: 16236 - RNA, 20 nt, synthetic construct
  source 1..20: mol_type = other RNA
ctcttgccagcgtccagtac

SEQ ID NO: 16237 - RNA, 20 nt, synthetic construct
  source 1..20: mol_type = other RNA
ctgccagccttcggaggtgt

SEQ ID NO: 16238 - RNA, 20 nt, synthetic construct
  source 1..20: mol_type = other RNA
ctgccggggcccagcagctc

SEQ ID NO: 16239 - RNA, 20 nt, synthetic construct
  source 1..20: mol_type = other RNA
ctggacgctggcaagagaaa

SEQ ID NO: 16240 - RNA, 20 nt, synthetic construct
  source 1..20: mol_type = other RNA
ctggacttacgccagcgtct

SEQ ID NO: 16241 - RNA, 20 nt, synthetic construct
  source 1..20: mol_type = other RNA
ctggcaagagaaactcacct

SEQ ID NO: 16242 - RNA, 20 nt, synthetic construct
  source 1..20: mol_type = other RNA
ctggcagcgagctgctgggc

SEQ ID NO: 16243 - RNA, 20 nt, synthetic construct
  source 1..20: mol_type = other RNA
ctggcgtaagtccaggcaac

SEQ ID NO: 16244 - RNA, 20 nt, synthetic construct
  source 1..20: mol_type = other RNA
ctgggccccggcagccgtga

SEQ ID NO: 16245 - RNA, 20 nt, synthetic construct
  source 1..20: mol_type = other RNA
ctggtgggtggagaacaact

SEQ ID NO: 16246 - RNA, 20 nt, synthetic construct
  source 1..20: mol_type = other RNA
cttacgccagcgtctccaca

SEQ ID NO: 16247 - RNA, 20 nt, synthetic construct
  source 1..20: mol_type = other RNA
cttcggaggtgtcctcatgt

SEQ ID NO: 16248 - RNA, 20 nt, synthetic construct
  source 1..20: mol_type = other RNA
cttgccagcgtccagtacaa

SEQ ID NO: 16249 - RNA, 20 nt, synthetic construct
  source 1..20: mol_type = other RNA
cttggggcctggcccttggg

SEQ ID NO: 16250 - RNA, 20 nt, synthetic construct
  source 1..20: mol_type = other RNA
cttgttgtactggacgctgg

SEQ ID NO: 16251 - RNA, 20 nt, synthetic construct
  source 1..20: mol_type = other RNA
gaaactcaccttggggcctg

SEQ ID NO: 16252 - RNA, 20 nt, synthetic construct
  source 1..20: mol_type = other RNA
gaacttgttgtactggacgc

SEQ ID NO: 16253 - RNA, 20 nt, synthetic construct
  source 1..20: mol_type = other RNA
gaaggctggcagcgagctgc

SEQ ID NO: 16254 - RNA, 20 nt, synthetic construct
  source 1..20: mol_type = other RNA
gacacctccgaaggctggca

SEQ ID NO: 16255 - RNA, 20 nt, synthetic construct
  source 1..20: mol_type = other RNA
gacgctggcaagagaaactc

SEQ ID NO: 16256 - RNA, 20 nt, synthetic construct
  source 1..20: mol_type = other RNA
gacgctggcgtaagtccagg

SEQ ID NO: 16257 - RNA, 20 nt, synthetic construct
  source 1..20: mol_type = other RNA
gacttacgccagcgtctcca

SEQ ID NO: 16258 - RNA, 20 nt, synthetic construct
  source 1..20: mol_type = other RNA
gagaaactcaccttggggcc

SEQ ID NO: 16259 - RNA, 20 nt, synthetic construct
  source 1..20: mol_type = other RNA
gagacgctggcgtaagtcca

SEQ ID NO: 16260 - RNA, 20 nt, synthetic construct
  source 1..20: mol_type = other RNA
gagctgctgggccccggcag

SEQ ID NO: 16261 - RNA, 20 nt, synthetic construct
  source 1..20: mol_type = other RNA
gaggacacctccgaaggctg

SEQ ID NO: 16262 - RNA, 20 nt, synthetic construct
  source 1..20: mol_type = other RNA
gaggtgtcctcatgtggaga

SEQ ID NO: 16263 - RNA, 20 nt, synthetic construct
  source 1..20: mol_type = other RNA
gagtcccaagggccaggccc

SEQ ID NO: 16264 - RNA, 20 nt, synthetic construct
  source 1..20: mol_type = other RNA
gagtgagttgttctccaccc

SEQ ID NO: 16265 - RNA, 20 nt, synthetic construct
  source 1..20: mol_type = other RNA
gagttgttctccacccacca

SEQ ID NO: 16266 - RNA, 20 nt, synthetic construct
  source 1..20: mol_type = other RNA
gagtttctcttgccagcgtc

SEQ ID NO: 16267 - RNA, 20 nt, synthetic construct
  source 1..20: mol_type = other RNA
gcaaccctggtgggtggaga

SEQ ID NO: 16268 - RNA, 20 nt, synthetic construct
  source 1..20: mol_type = other RNA
gcaagagaaactcaccttgg

SEQ ID NO: 16269 - RNA, 20 nt, synthetic construct
  source 1..20: mol_type = other RNA
gcagccgtgaacttgttgta

SEQ ID NO: 16270 - RNA, 20 nt, synthetic construct
  source 1..20: mol_type = other RNA
gcagcgagctgctgggcccc

SEQ ID NO: 16271 - RNA, 20 nt, synthetic construct
  source 1..20: mol_type = other RNA
gcagctcgctgccagccttc

SEQ ID NO: 16272 - RNA, 20 nt, synthetic construct
  source 1..20: mol_type = other RNA
gccagccttcggaggtgtcc

SEQ ID NO: 16273 - RNA, 20 nt, synthetic construct
  source 1..20: mol_type = other RNA
gccagcgtccagtacaacaa

SEQ ID NO: 16274 - RNA, 20 nt, synthetic construct
  source 1..20: mol_type = other RNA
gccagcgtctccacatgagg

SEQ ID NO: 16275 - RNA, 20 nt, synthetic construct
  source 1..20: mol_type = other RNA
gccaggccccaaggtgagtt

SEQ ID NO: 16276 - RNA, 20 nt, synthetic construct
  source 1..20: mol_type = other RNA
gcccagcagctcgctgccag

SEQ ID NO: 16277 - RNA, 20 nt, synthetic construct
  source 1..20: mol_type = other RNA
gccccaaggtgagtttctct

SEQ ID NO: 16278 - RNA, 20 nt, synthetic construct
  source 1..20: mol_type = other RNA
gccccggcagccgtgaactt

SEQ ID NO: 16279 - RNA, 20 nt, synthetic construct
  source 1..20: mol_type = other RNA
gccgtgaacttgttgtactg

SEQ ID NO: 16280 - RNA, 20 nt, synthetic construct
  source 1..20: mol_type = other RNA
gcctggacttacgccagcgt

SEQ ID NO: 16281 - RNA, 20 nt, synthetic construct
  source 1..20: mol_type = other RNA
gccttcggaggtgtcctcat

SEQ ID NO: 16282 - RNA, 20 nt, synthetic construct
  source 1..20: mol_type = other RNA
gcgtaagtccaggcaaccct

SEQ ID NO: 16283 - RNA, 20 nt, synthetic construct
  source 1..20: mol_type = other RNA
gcgtccagtacaacaagttc

SEQ ID NO: 16284 - RNA, 20 nt, synthetic construct
  source 1..20: mol_type = other RNA
gcgtctccacatgaggacac

SEQ ID NO: 16285 - RNA, 20 nt, synthetic construct
  source 1..20: mol_type = other RNA
gctcgctgccagccttcgga

SEQ ID NO: 16286 - RNA, 20 nt, synthetic construct
  source 1..20: mol_type = other RNA
gctgccagccttcggaggtg

SEQ ID NO: 16287 - RNA, 20 nt, synthetic construct
  source 1..20: mol_type = other RNA
gctgccggggcccagcagct

SEQ ID NO: 16288 - RNA, 20 nt, synthetic construct
  source 1..20: mol_type = other RNA
gctggcaagagaaactcacc

SEQ ID NO: 16289 - RNA, 20 nt, synthetic construct
  source 1..20: mol_type = other RNA
gctggcagcgagctgctggg

SEQ ID NO: 16290 - RNA, 20 nt, synthetic construct
  source 1..20: mol_type = other RNA
gctggcgtaagtccaggcaa

SEQ ID NO: 16291 - RNA, 20 nt, synthetic construct
  source 1..20: mol_type = other RNA
ggacacctccgaaggctggc

SEQ ID NO: 16292 - RNA, 20 nt, synthetic construct
  source 1..20: mol_type = other RNA
ggacgctggcaagagaaact

SEQ ID NO: 16293 - RNA, 20 nt, synthetic construct
  source 1..20: mol_type = other RNA
ggacttacgccagcgtctcc

SEQ ID NO: 16294 - RNA, 20 nt, synthetic construct
  source 1..20: mol_type = other RNA
ggagacgctggcgtaagtcc

SEQ ID NO: 16295 - RNA, 20 nt, synthetic construct
  source 1..20: mol_type = other RNA
ggaggtgtcctcatgtggag

SEQ ID NO: 16296 - RNA, 20 nt, synthetic construct
  source 1..20: mol_type = other RNA
ggagtcccaagggccaggcc

SEQ ID NO: 16297 - RNA, 20 nt, synthetic construct
  source 1..20: mol_type = other RNA
ggagtgagttgttctccacc

SEQ ID NO: 16298 - RNA, 20 nt, synthetic construct
  source 1..20: mol_type = other RNA
ggcaaccctggtgggtggag

SEQ ID NO: 16299 - RNA, 20 nt, synthetic construct
  source 1..20: mol_type = other RNA
ggcaagagaaactcaccttg

SEQ ID NO: 16300 - RNA, 20 nt, synthetic construct
  source 1..20: mol_type = other RNA
ggcagccgtgaacttgttgt

SEQ ID NO: 16301 - RNA, 20 nt, synthetic construct
  source 1..20: mol_type = other RNA
ggcagcgagctgctgggccc

SEQ ID NO: 16302 - RNA, 20 nt, synthetic construct
  source 1..20: mol_type = other RNA
ggccaggccccaaggtgagt

SEQ ID NO: 16303 - RNA, 20 nt, synthetic construct
  source 1..20: mol_type = other RNA
ggcccagcagctcgctgcca

SEQ ID NO: 16304 - RNA, 20 nt, synthetic construct
  source 1..20: mol_type = other RNA
ggccccaaggtgagtttctc

SEQ ID NO: 16305 - RNA, 20 nt, synthetic construct
  source 1..20: mol_type = other RNA
ggccccggcagccgtgaact

SEQ ID NO: 16306 - RNA, 20 nt, synthetic construct
  source 1..20: mol_type = other RNA
ggcgtaagtccaggcaaccc

SEQ ID NO: 16307 - RNA, 20 nt, synthetic construct
  source 1..20: mol_type = other RNA
ggctggcagcgagctgctgg

SEQ ID NO: 16308 - RNA, 20 nt, synthetic construct
  source 1..20: mol_type = other RNA
gggagtcccaagggccaggc

SEQ ID NO: 16309 - RNA, 20 nt, synthetic construct
  source 1..20: mol_type = other RNA
gggagtgagttgttctccac

SEQ ID NO: 16310 - RNA, 20 nt, synthetic construct
  source 1..20: mol_type = other RNA
gggccaggccccaaggtgag

SEQ ID NO: 16311 - RNA, 20 nt, synthetic construct
  source 1..20: mol_type = other RNA
gggcccagcagctcgctgcc

SEQ ID NO: 16312 - RNA, 20 nt, synthetic construct
  source 1..20: mol_type = other RNA
gggccccggcagccgtgaac

SEQ ID NO: 16313 - RNA, 20 nt, synthetic construct
  source 1..20: mol_type = other RNA
ggggagtcccaagggccagg

SEQ ID NO: 16314 - RNA, 20 nt, synthetic construct
  source 1..20: mol_type = other RNA
ggggagtgagttgttctcca

SEQ ID NO: 16315 - RNA, 20 nt, synthetic construct
  source 1..20: mol_type = other RNA
ggggcccagcagctcgctgc

SEQ ID NO: 16316 - RNA, 20 nt, synthetic construct
  source 1..20: mol_type = other RNA
gggttgcctggacttacgcc

SEQ ID NO: 16317 - RNA, 20 nt, synthetic construct
  source 1..20: mol_type = other RNA
ggtgagtttctcttgccagc

SEQ ID NO: 16318 - RNA, 20 nt, synthetic construct
  source 1..20: mol_type = other RNA
ggtgtcctcatgtggagacg

SEQ ID NO: 16319 - RNA, 20 nt, synthetic construct
  source 1..20: mol_type = other RNA
ggttgcctggacttacgcca

SEQ ID NO: 16320 - RNA, 20 nt, synthetic construct
  source 1..20: mol_type = other RNA
gtaagtccaggcaaccctgg

SEQ ID NO: 16321 - RNA, 20 nt, synthetic construct
  source 1..20: mol_type = other RNA
gtacaacaagttcacggctg

SEQ ID NO: 16322 - RNA, 20 nt, synthetic construct
  source 1..20: mol_type = other RNA
gtactggacgctggcaagag

SEQ ID NO: 16323 - RNA, 20 nt, synthetic construct
  source 1..20: mol_type = other RNA
gtccaggcaaccctggtggg

SEQ ID NO: 16324 - RNA, 20 nt, synthetic construct
  source 1..20: mol_type = other RNA
gtccagtacaacaagttcac

SEQ ID NO: 16325 - RNA, 20 nt, synthetic construct
  source 1..20: mol_type = other RNA
gtcccaagggccaggcccca

SEQ ID NO: 16326 - RNA, 20 nt, synthetic construct
  source 1..20: mol_type = other RNA
gtcctcatgtggagacgctg

SEQ ID NO: 16327 - RNA, 20 nt, synthetic construct
  source 1..20: mol_type = other RNA
gtctccacatgaggacacct

SEQ ID NO: 16328 - RNA, 20 nt, synthetic construct
  source 1..20: mol_type = other RNA
gtgaacttgttgtactggac

SEQ ID NO: 16329 - RNA, 20 nt, synthetic construct
  source 1..20: mol_type = other RNA
gtgagttgttctccacccac

SEQ ID NO: 16330 - RNA, 20 nt, synthetic construct
  source 1..20: mol_type = other RNA
gtgagtttctcttgccagcg

SEQ ID NO: 16331 - RNA, 20 nt, synthetic construct
  source 1..20: mol_type = other RNA
gtggagacgctggcgtaagt

SEQ ID NO: 16332 - RNA, 20 nt, synthetic construct
  source 1..20: mol_type = other RNA
gtgtcctcatgtggagacgc

SEQ ID NO: 16333 - RNA, 20 nt, synthetic construct
  source 1..20: mol_type = other RNA
gttcacggctgccggggccc

SEQ ID NO: 16334 - RNA, 20 nt, synthetic construct
  source 1..20: mol_type = other RNA
gttctccacccaccagggtt

SEQ ID NO: 16335 - RNA, 20 nt, synthetic construct
  source 1..20: mol_type = other RNA
gttgcctggacttacgccag

SEQ ID NO: 16336 - RNA, 20 nt, synthetic construct
  source 1..20: mol_type = other RNA
gttgtactggacgctggcaa

SEQ ID NO: 16337 - RNA, 20 nt, synthetic construct
  source 1..20: mol_type = other RNA
gttgttctccacccaccagg

SEQ ID NO: 16338 - RNA, 20 nt, synthetic construct
  source 1..20: mol_type = other RNA
gtttctcttgccagcgtcca

SEQ ID NO: 16339 - RNA, 20 nt, synthetic construct
  source 1..20: mol_type = other RNA
taagtccaggcaaccctggt

SEQ ID NO: 16340 - RNA, 20 nt, synthetic construct
  source 1..20: mol_type = other RNA
tacaacaagttcacggctgc

SEQ ID NO: 16341 - RNA, 20 nt, synthetic construct
  source 1..20: mol_type = other RNA
tacgccagcgtctccacatg

SEQ ID NO: 16342 - RNA, 20 nt, synthetic construct
  source 1..20: mol_type = other RNA
tactggacgctggcaagaga

SEQ ID NO: 16343 - RNA, 20 nt, synthetic construct
  source 1..20: mol_type = other RNA
tcaccttggggcctggccct

SEQ ID NO: 16344 - RNA, 20 nt, synthetic construct
  source 1..20: mol_type = other RNA
tcacggctgccggggcccag

SEQ ID NO: 16345 - RNA, 20 nt, synthetic construct
  source 1..20: mol_type = other RNA
tcatgtggagacgctggcgt

SEQ ID NO: 16346 - RNA, 20 nt, synthetic construct
  source 1..20: mol_type = other RNA
tccacatgaggacacctccg

SEQ ID NO: 16347 - RNA, 20 nt, synthetic construct
  source 1..20: mol_type = other RNA
tccacccaccagggttgcct

SEQ ID NO: 16348 - RNA, 20 nt, synthetic construct
  source 1..20: mol_type = other RNA
tccaggcaaccctggtgggt

SEQ ID NO: 16349 - RNA, 20 nt, synthetic construct
  source 1..20: mol_type = other RNA
tccagtacaacaagttcacg

SEQ ID NO: 16350 - RNA, 20 nt, synthetic construct
  source 1..20: mol_type = other RNA
tcccaagggccaggccccaa

SEQ ID NO: 16351 - RNA, 20 nt, synthetic construct
  source 1..20: mol_type = other RNA
tccgaaggctggcagcgagc

SEQ ID NO: 16352 - RNA, 20 nt, synthetic construct
  source 1..20: mol_type = other RNA
tcctcatgtggagacgctgg

SEQ ID NO: 16353 - RNA, 20 nt, synthetic construct
  source 1..20: mol_type = other RNA
tcgctgccagccttcggagg

SEQ ID NO: 16354 - RNA, 20 nt, synthetic construct
  source 1..20: mol_type = other RNA
tcggaggtgtcctcatgtgg

SEQ ID NO: 16355 - RNA, 20 nt, synthetic construct
  source 1..20: mol_type = other RNA
tctccacatgaggacacctc

SEQ ID NO: 16356 - RNA, 20 nt, synthetic construct
  source 1..20: mol_type = other RNA
tctccacccaccagggttgc

SEQ ID NO: 16357 - RNA, 20 nt, synthetic construct
  source 1..20: mol_type = other RNA
tctcttgccagcgtccagta

SEQ ID NO: 16358 - RNA, 20 nt, synthetic construct
  source 1..20: mol_type = other RNA
tcttgccagcgtccagtaca

SEQ ID NO: 16359 - RNA, 20 nt, synthetic construct
  source 1..20: mol_type = other RNA
tgaacttgttgtactggacg

SEQ ID NO: 16360 - RNA, 20 nt, synthetic construct
  source 1..20: mol_type = other RNA
tgaggacacctccgaaggct

SEQ ID NO: 16361 - RNA, 20 nt, synthetic construct
  source 1..20: mol_type = other RNA
tgagttgttctccacccacc

SEQ ID NO: 16362 - RNA, 20 nt, synthetic construct
  source 1..20: mol_type = other RNA
tgagtttctcttgccagcgt

SEQ ID NO: 16363 - RNA, 20 nt, synthetic construct
  source 1..20: mol_type = other RNA
tgccagccttcggaggtgtc

SEQ ID NO: 16364 - RNA, 20 nt, synthetic construct
  source 1..20: mol_type = other RNA
tgccagcgtccagtacaaca

SEQ ID NO: 16365 - RNA, 20 nt, synthetic construct
  source 1..20: mol_type = other RNA
tgccggggcccagcagctcg

SEQ ID NO: 16366 - RNA, 20 nt, synthetic construct
  source 1..20: mol_type = other RNA
tgcctggacttacgccagcg

SEQ ID NO: 16367 - RNA, 20 nt, synthetic construct
  source 1..20: mol_type = other RNA
tgctgggccccggcagccgt

SEQ ID NO: 16368 - RNA, 20 nt, synthetic construct
  source 1..20: mol_type = other RNA
tggacgctggcaagagaaac

SEQ ID NO: 16369 - RNA, 20 nt, synthetic construct
  source 1..20: mol_type = other RNA
tggacttacgccagcgtctc

SEQ ID NO: 16370 - RNA, 20 nt, synthetic construct
  source 1..20: mol_type = other RNA
tggagacgctggcgtaagtc

SEQ ID NO: 16371 - RNA, 20 nt, synthetic construct
  source 1..20: mol_type = other RNA
tggcaagagaaactcacctt

SEQ ID NO: 16372 - RNA, 20 nt, synthetic construct
  source 1..20: mol_type = other RNA
tggcagcgagctgctgggcc

SEQ ID NO: 16373 - RNA, 20 nt, synthetic construct
  source 1..20: mol_type = other RNA
tggcgtaagtccaggcaacc

SEQ ID NO: 16374 - RNA, 20 nt, synthetic construct
  source 1..20: mol_type = other RNA
tgggccccggcagccgtgaa

SEQ ID NO: 16375 - RNA, 20 nt, synthetic construct
  source 1..20: mol_type = other RNA
tggggagtcccaagggccag

SEQ ID NO: 16376 - RNA, 20 nt, synthetic construct
  source 1..20: mol_type = other RNA
tggggagtgagttgttctcc

SEQ ID NO: 16377 - RNA, 20 nt, synthetic construct
  source 1..20: mol_type = other RNA
tggtgggtggagaacaactc

SEQ ID NO: 16378 - RNA, 20 nt, synthetic construct
  source 1..20: mol_type = other RNA
tgtactggacgctggcaaga

SEQ ID NO: 16379 - RNA, 20 nt, synthetic construct
  source 1..20: mol_type = other RNA
tgtcctcatgtggagacgct

SEQ ID NO: 16380 - RNA, 20 nt, synthetic construct
  source 1..20: mol_type = other RNA
tgtggagacgctggcgtaag

SEQ ID NO: 16381 - RNA, 20 nt, synthetic construct
  source 1..20: mol_type = other RNA
tgttctccacccaccagggt

SEQ ID NO: 16382 - RNA, 20 nt, synthetic construct
  source 1..20: mol_type = other RNA
tgttgtactggacgctggca

SEQ ID NO: 16383 - RNA, 20 nt, synthetic construct
  source 1..20: mol_type = other RNA
ttacgccagcgtctccacat

SEQ ID NO: 16384 - RNA, 20 nt, synthetic construct
  source 1..20: mol_type = other RNA
ttcacggctgccggggccca

SEQ ID NO: 16385 - RNA, 20 nt, synthetic construct
  source 1..20: mol_type = other RNA
ttcggaggtgtcctcatgtg

SEQ ID NO: 16386 - RNA, 20 nt, synthetic construct
  source 1..20: mol_type = other RNA
ttctccacccaccagggttg

SEQ ID NO: 16387 - RNA, 20 nt, synthetic construct
  source 1..20: mol_type = other RNA
ttctcttgccagcgtccagt

SEQ ID NO: 16388 - RNA, 20 nt, synthetic construct
  source 1..20: mol_type = other RNA
ttgccagcgtccagtacaac

SEQ ID NO: 16389 - RNA, 20 nt, synthetic construct
  source 1..20: mol_type = other RNA
ttgcctggacttacgccagc

SEQ ID NO: 16390 - RNA, 20 nt, synthetic construct
  source 1..20: mol_type = other RNA
ttgtactggacgctggcaag

SEQ ID NO: 16391 - RNA, 20 nt, synthetic construct
  source 1..20: mol_type = other RNA
ttgttctccacccaccaggg

SEQ ID NO: 16392 - RNA, 20 nt, synthetic construct
  source 1..20: mol_type = other RNA
ttgttgtactggacgctggc

SEQ ID NO: 16393 - RNA, 20 nt, synthetic construct
  source 1..20: mol_type = other RNA
tttctcttgccagcgtccag

SEQ ID NO: 16394 - RNA, 21 nt, synthetic construct
  source 1..21: mol_type = other RNA
aaactcaccttggggcctggc

SEQ ID NO: 16395 - RNA, 21 nt, synthetic construct
  source 1..21: mol_type = other RNA
aacaagttcacggctgccggg

SEQ ID NO: 16396 - RNA, 21 nt, synthetic construct
  source 1..21: mol_type = other RNA
aaccctggtgggtggagaaca

SEQ ID NO: 16397 - RNA, 21 nt, synthetic construct
  source 1..21: mol_type = other RNA
aactcaccttggggcctggcc

SEQ ID NO: 16398 - RNA, 21 nt, synthetic construct
  source 1..21: mol_type = other RNA
aacttgttgtactggacgctg

SEQ ID NO: 16399 - RNA, 21 nt, synthetic construct
  source 1..21: mol_type = other RNA
aagagaaactcaccttggggc

SEQ ID NO: 16400 - RNA, 21 nt, synthetic construct
  source 1..21: mol_type = other RNA
aaggctggcagcgagctgctg

SEQ ID NO: 16401 - RNA, 21 nt, synthetic construct
  source 1..21: mol_type = other RNA
aagggccaggccccaaggtga

SEQ ID NO: 16402 - RNA, 21 nt, synthetic construct
  source 1..21: mol_type = other RNA
aaggtgagtttctcttgccag

SEQ ID NO: 16403 - RNA, 21 nt, synthetic construct
  source 1..21: mol_type = other RNA
aagtccaggcaaccctggtgg

SEQ ID NO: 16404 - RNA, 21 nt, synthetic construct
  source 1..21: mol_type = other RNA
aagttcacggctgccggggcc

SEQ ID NO: 16405 - RNA, 21 nt, synthetic construct
  source 1..21: mol_type = other RNA
acaacaagttcacggctgccg

SEQ ID NO: 16406 - RNA, 21 nt, synthetic construct
  source 1..21: mol_type = other RNA
acaagttcacggctgccgggg

SEQ ID NO: 16407 - RNA, 21 nt, synthetic construct
  source 1..21: mol_type = other RNA
acacctccgaaggctggcagc

SEQ ID NO: 16408 - RNA, 21 nt, synthetic construct
  source 1..21: mol_type = other RNA
acatgaggacacctccgaagg

SEQ ID NO: 16409 - RNA, 21 nt, synthetic construct
  source 1..21: mol_type = other RNA
accagggttgcctggacttac

SEQ ID NO: 16410 - RNA, 21 nt, synthetic construct
  source 1..21: mol_type = other RNA
acccaccagggttgcctggac

SEQ ID NO: 16411 - RNA, 21 nt, synthetic construct
  source 1..21: mol_type = other RNA
accctggtgggtggagaacaa

SEQ ID NO: 16412 - RNA, 21 nt, synthetic construct
  source 1..21: mol_type = other RNA
acctccgaaggctggcagcga

SEQ ID NO: 16413 - RNA, 21 nt, synthetic construct
  source 1..21: mol_type = other RNA
accttggggcctggcccttgg

SEQ ID NO: 16414 - RNA, 21 nt, synthetic construct
  source 1..21: mol_type = other RNA
acgccagcgtctccacatgag

SEQ ID NO: 16415 - RNA, 21 nt, synthetic construct
  source 1..21: mol_type = other RNA
acgctggcaagagaaactcac

SEQ ID NO: 16416 - RNA, 21 nt, synthetic construct
  source 1..21: mol_type = other RNA
acgctggcgtaagtccaggca

SEQ ID NO: 16417 - RNA, 21 nt, synthetic construct
  source 1..21: mol_type = other RNA
actcaccttggggcctggccc

SEQ ID NO: 16418 - RNA, 21 nt, synthetic construct
  source 1..21: mol_type = other RNA
actggacgctggcaagagaaa

SEQ ID NO: 16419 - RNA, 21 nt, synthetic construct
  source 1..21: mol_type = other RNA
acttacgccagcgtctccaca

SEQ ID NO: 16420 - RNA, 21 nt, synthetic construct
  source 1..21: mol_type = other RNA
acttgttgtactggacgctgg

SEQ ID NO: 16421 - RNA, 21 nt, synthetic construct
  source 1..21: mol_type = other RNA
agaaactcaccttggggcctg

SEQ ID NO: 16422 - RNA, 21 nt, synthetic construct
  source 1..21: mol_type = other RNA
agacgctggcgtaagtccagg

SEQ ID NO: 16423 - RNA, 21 nt, synthetic construct
  source 1..21: mol_type = other RNA
agagaaactcaccttggggcc

SEQ ID NO: 16424 - RNA, 21 nt, synthetic construct
  source 1..21: mol_type = other RNA
agcagctcgctgccagccttc

SEQ ID NO: 16425 - RNA, 21 nt, synthetic construct
  source 1..21: mol_type = other RNA
agccgtgaacttgttgtactg

SEQ ID NO: 16426 - RNA, 21 nt, synthetic construct
  source 1..21: mol_type = other RNA
agccttcggaggtgtcctcat

SEQ ID NO: 16427 - RNA, 21 nt, synthetic construct
  source 1..21: mol_type = other RNA
agcgtccagtacaacaagttc

SEQ ID NO: 16428 - RNA, 21 nt, synthetic construct
  source 1..21: mol_type = other RNA
agcgtctccacatgaggacac

SEQ ID NO: 16429 - RNA, 21 nt, synthetic construct
  source 1..21: mol_type = other RNA
agctcgctgccagccttcgga

SEQ ID NO: 16430 - RNA, 21 nt, synthetic construct
  source 1..21: mol_type = other RNA
aggacacctccgaaggctggc

SEQ ID NO: 16431 - RNA, 21 nt, synthetic construct
  source 1..21: mol_type = other RNA
aggcaaccctggtgggtggag

SEQ ID NO: 16432 - RNA, 21 nt, synthetic construct
  source 1..21: mol_type = other RNA
aggccccaaggtgagtttctc

SEQ ID NO: 16433 - RNA, 21 nt, synthetic construct
  source 1..21: mol_type = other RNA
aggctggcagcgagctgctgg

SEQ ID NO: 16434 - RNA, 21 nt, synthetic construct
  source 1..21: mol_type = other RNA
agggccaggccccaaggtgag

SEQ ID NO: 16435 - RNA, 21 nt, synthetic construct
  source 1..21: mol_type = other RNA
agggttgcctggacttacgcc

SEQ ID NO: 16436 - RNA, 21 nt, synthetic construct
  source 1..21: mol_type = other RNA
aggtgagtttctcttgccagc

SEQ ID NO: 16437 - RNA, 21 nt, synthetic construct
  source 1..21: mol_type = other RNA
aggtgtcctcatgtggagacg

SEQ ID NO: 16438 - RNA, 21 nt, synthetic construct
  source 1..21: mol_type = other RNA
agtacaacaagttcacggctg

SEQ ID NO: 16439 - RNA, 21 nt, synthetic construct
  source 1..21: mol_type = other RNA
agtccaggcaaccctggtggg

SEQ ID NO: 16440 - RNA, 21 nt, synthetic construct
  source 1..21: mol_type = other RNA
agtcccaagggccaggcccca

SEQ ID NO: 16441 - RNA, 21 nt, synthetic construct
  source 1..21: mol_type = other RNA
agtgagttgttctccacccac

SEQ ID NO: 16442 - RNA, 21 nt, synthetic construct
  source 1..21: mol_type = other RNA
agttcacggctgccggggccc

SEQ ID NO: 16443 - RNA, 21 nt, synthetic construct
  source 1..21: mol_type = other RNA
agttgttctccacccaccagg

SEQ ID NO: 16444 - RNA, 21 nt, synthetic construct
  source 1..21: mol_type = other RNA
agtttctcttgccagcgtcca

SEQ ID NO: 16445 - RNA, 21 nt, synthetic construct
  source 1..21: mol_type = other RNA
atgaggacacctccgaaggct

SEQ ID NO: 16446 - RNA, 21 nt, synthetic construct
  source 1..21: mol_type = other RNA
atgtggagacgctggcgtaag

SEQ ID NO: 16447 - RNA, 21 nt, synthetic construct
  source 1..21: mol_type = other RNA
caacaagttcacggctgccgg

SEQ ID NO: 16448 - RNA, 21 nt, synthetic construct
  source 1..21: mol_type = other RNA
caaccctggtgggtggagaac

SEQ ID NO: 16449 - RNA, 21 nt, synthetic construct
  source 1..21: mol_type = other RNA
caagagaaactcaccttgggg

SEQ ID NO: 16450 - RNA, 21 nt, synthetic construct
  source 1..21: mol_type = other RNA
caagggccaggccccaaggtg

SEQ ID NO: 16451 - RNA, 21 nt, synthetic construct
  source 1..21: mol_type = other RNA
caaggtgagtttctcttgcca

SEQ ID NO: 16452 - RNA, 21 nt, synthetic construct
  source 1..21: mol_type = other RNA
caagttcacggctgccggggc

SEQ ID NO: 16453 - RNA, 21 nt, synthetic construct
  source 1..21: mol_type = other RNA
cacatgaggacacctccgaag

SEQ ID NO: 16454 - RNA, 21 nt, synthetic construct
  source 1..21: mol_type = other RNA
caccagggttgcctggactta

SEQ ID NO: 16455 - RNA, 21 nt, synthetic construct
  source 1..21: mol_type = other RNA
cacccaccagggttgcctgga

SEQ ID NO: 16456 - RNA, 21 nt, synthetic construct
  source 1..21: mol_type = other RNA
cacctccgaaggctggcagcg

SEQ ID NO: 16457 - RNA, 21 nt, synthetic construct
  source 1..21: mol_type = other RNA
caccttggggcctggcccttg

SEQ ID NO: 16458 - RNA, 21 nt, synthetic construct
  source 1..21: mol_type = other RNA
cagcagctcgctgccagcctt

SEQ ID NO: 16459 - RNA, 21 nt, synthetic construct
  source 1..21: mol_type = other RNA
cagccgtgaacttgttgtact

SEQ ID NO: 16460 - RNA, 21 nt, synthetic construct
  source 1..21: mol_type = other RNA
cagccttcggaggtgtcctca

SEQ ID NO: 16461 - RNA, 21 nt, synthetic construct
  source 1..21: mol_type = other RNA
cagcgtccagtacaacaagtt

SEQ ID NO: 16462 - RNA, 21 nt, synthetic construct
  source 1..21: mol_type = other RNA
cagcgtctccacatgaggaca

SEQ ID NO: 16463 - RNA, 21 nt, synthetic construct
  source 1..21: mol_type = other RNA
cagctcgctgccagccttcgg

SEQ ID NO: 16464 - RNA, 21 nt, synthetic construct
  source 1..21: mol_type = other RNA
caggcaaccctggtgggtgga

SEQ ID NO: 16465 - RNA, 21 nt, synthetic construct
  source 1..21: mol_type = other RNA
caggccccaaggtgagtttct

SEQ ID NO: 16466 - RNA, 21 nt, synthetic construct
  source 1..21: mol_type = other RNA
cagggttgcctggacttacgc

SEQ ID NO: 16467 - RNA, 21 nt, synthetic construct
  source 1..21: mol_type = other RNA
cagtacaacaagttcacggct

SEQ ID NO: 16468 - RNA, 21 nt, synthetic construct
  source 1..21: mol_type = other RNA
catgaggacacctccgaaggc

SEQ ID NO: 16469 - RNA, 21 nt, synthetic construct
  source 1..21: mol_type = other RNA
catgtggagacgctggcgtaa

SEQ ID NO: 16470 - RNA, 21 nt, synthetic construct
  source 1..21: mol_type = other RNA
ccaagggccaggccccaaggt

SEQ ID NO: 16471 - RNA, 21 nt, synthetic construct
  source 1..21: mol_type = other RNA
ccaaggtgagtttctcttgcc

SEQ ID NO: 16472 - RNA, 21 nt, synthetic construct
  source 1..21: mol_type = other RNA
ccacatgaggacacctccgaa

SEQ ID NO: 16473 - RNA, 21 nt, synthetic construct
  source 1..21: mol_type = other RNA
ccaccagggttgcctggactt

SEQ ID NO: 16474 - RNA, 21 nt, synthetic construct
  source 1..21: mol_type = other RNA
ccacccaccagggttgcctgg

SEQ ID NO: 16475 - RNA, 21 nt, synthetic construct
  source 1..21: mol_type = other RNA
ccagcagctcgctgccagcct

SEQ ID NO: 16476 - RNA, 21 nt, synthetic construct
  source 1..21: mol_type = other RNA
ccagccttcggaggtgtcctc

SEQ ID NO: 16477 - RNA, 21 nt, synthetic construct
  source 1..21: mol_type = other RNA
ccagcgtccagtacaacaagt

SEQ ID NO: 16478 - RNA, 21 nt, synthetic construct
  source 1..21: mol_type = other RNA
ccagcgtctccacatgaggac

SEQ ID NO: 16479 - RNA, 21 nt, synthetic construct
  source 1..21: mol_type = other RNA
ccaggcaaccctggtgggtgg

SEQ ID NO: 16480 - RNA, 21 nt, synthetic construct
  source 1..21: mol_type = other RNA
ccaggccccaaggtgagtttc

SEQ ID NO: 16481 - RNA, 21 nt, synthetic construct
  source 1..21: mol_type = other RNA
ccagggttgcctggacttacg

SEQ ID NO: 16482 - RNA, 21 nt, synthetic construct
  source 1..21: mol_type = other RNA
ccagtacaacaagttcacggc

SEQ ID NO: 16483 - RNA, 21 nt, synthetic construct
  source 1..21: mol_type = other RNA
cccaagggccaggccccaagg

SEQ ID NO: 16484 - RNA, 21 nt, synthetic construct
  source 1..21: mol_type = other RNA
cccaaggtgagtttctcttgc

SEQ ID NO: 16485 - RNA, 21 nt, synthetic construct
  source 1..21: mol_type = other RNA
cccaccagggttgcctggact

SEQ ID NO: 16486 - RNA, 21 nt, synthetic construct
  source 1..21: mol_type = other RNA
cccagcagctcgctgccagcc

SEQ ID NO: 16487 - RNA, 21 nt, synthetic construct
  source 1..21: mol_type = other RNA
ccccaaggtgagtttctcttg

SEQ ID NO: 16488 - RNA, 21 nt, synthetic construct
  source 1..21: mol_type = other RNA
ccccggcagccgtgaacttgt

SEQ ID NO: 16489 - RNA, 21 nt, synthetic construct
  source 1..21: mol_type = other RNA
cccggcagccgtgaacttgtt

SEQ ID NO: 16490 - RNA, 21 nt, synthetic construct
  source 1..21: mol_type = other RNA
ccctggtgggtggagaacaac

SEQ ID NO: 16491 - RNA, 21 nt, synthetic construct
  source 1..21: mol_type = other RNA
ccgaaggctggcagcgagctg

SEQ ID NO: 16492 - RNA, 21 nt, synthetic construct
  source 1..21: mol_type = other RNA
ccggcagccgtgaacttgttg

SEQ ID NO: 16493 - RNA, 21 nt, synthetic construct
  source 1..21: mol_type = other RNA
ccgtgaacttgttgtactgga

SEQ ID NO: 16494 - RNA, 21 nt, synthetic construct
  source 1..21: mol_type = other RNA
cctcatgtggagacgctggcg

SEQ ID NO: 16495 - RNA, 21 nt, synthetic construct
  source 1..21: mol_type = other RNA
cctccgaaggctggcagcgag

SEQ ID NO: 16496 - RNA, 21 nt, synthetic construct
  source 1..21: mol_type = other RNA
cctggacttacgccagcgtct

SEQ ID NO: 16497 - RNA, 21 nt, synthetic construct
  source 1..21: mol_type = other RNA
cctggtgggtggagaacaact

SEQ ID NO: 16498 - RNA, 21 nt, synthetic construct
  source 1..21: mol_type = other RNA
ccttcggaggtgtcctcatgt

SEQ ID NO: 16499 - RNA, 21 nt, synthetic construct
  source 1..21: mol_type = other RNA
ccttggggcctggcccttggg

SEQ ID NO: 16500 - RNA, 21 nt, synthetic construct
  source 1..21: mol_type = other RNA
cgaaggctggcagcgagctgc

SEQ ID NO: 16501 - RNA, 21 nt, synthetic construct
  source 1..21: mol_type = other RNA
cgccagcgtctccacatgagg

SEQ ID NO: 16502 - RNA, 21 nt, synthetic construct
  source 1..21: mol_type = other RNA
cgctgccagccttcggaggtg

SEQ ID NO: 16503 - RNA, 21 nt, synthetic construct
  source 1..21: mol_type = other RNA
cgctggcaagagaaactcacc

SEQ ID NO: 16504 - RNA, 21 nt, synthetic construct
  source 1..21: mol_type = other RNA
cgctggcgtaagtccaggcaa

SEQ ID NO: 16505 - RNA, 21 nt, synthetic construct
  source 1..21: mol_type = other RNA
cggaggtgtcctcatgtggag

SEQ ID NO: 16506 - RNA, 21 nt, synthetic construct
  source 1..21: mol_type = other RNA
cggcagccgtgaacttgttgt

SEQ ID NO: 16507 - RNA, 21 nt, synthetic construct
  source 1..21: mol_type = other RNA
cgtaagtccaggcaaccctgg

SEQ ID NO: 16508 - RNA, 21 nt, synthetic construct
  source 1..21: mol_type = other RNA
cgtccagtacaacaagttcac

SEQ ID NO: 16509 - RNA, 21 nt, synthetic construct
  source 1..21: mol_type = other RNA
cgtctccacatgaggacacct

SEQ ID NO: 16510 - RNA, 21 nt, synthetic construct
  source 1..21: mol_type = other RNA
cgtgaacttgttgtactggac

SEQ ID NO: 16511 - RNA, 21 nt, synthetic construct
  source 1..21: mol_type = other RNA
ctcaccttggggcctggccct

SEQ ID NO: 16512 - RNA, 21 nt, synthetic construct
  source 1..21: mol_type = other RNA
ctcatgtggagacgctggcgt

SEQ ID NO: 16513 - RNA, 21 nt, synthetic construct
  source 1..21: mol_type = other RNA
ctccacatgaggacacctccg

SEQ ID NO: 16514 - RNA, 21 nt, synthetic construct
  source 1..21: mol_type = other RNA
ctccacccaccagggttgcct

SEQ ID NO: 16515 - RNA, 21 nt, synthetic construct
  source 1..21: mol_type = other RNA
ctccgaaggctggcagcgagc

SEQ ID NO: 16516 - RNA, 21 nt, synthetic construct
  source 1..21: mol_type = other RNA
ctcgctgccagccttcggagg

SEQ ID NO: 16517 - RNA, 21 nt, synthetic construct
  source 1..21: mol_type = other RNA
ctcttgccagcgtccagtaca

SEQ ID NO: 16518 - RNA, 21 nt, synthetic construct
  source 1..21: mol_type = other RNA
ctgccagccttcggaggtgtc

SEQ ID NO: 16519 - RNA, 21 nt, synthetic construct
  source 1..21: mol_type = other RNA
ctggacgctggcaagagaaac

SEQ ID NO: 16520 - RNA, 21 nt, synthetic construct
  source 1..21: mol_type = other RNA
ctggacttacgccagcgtctc

SEQ ID NO: 16521 - RNA, 21 nt, synthetic construct
  source 1..21: mol_type = other RNA
ctggcaagagaaactcacctt

SEQ ID NO: 16522 - RNA, 21 nt, synthetic construct
  source 1..21: mol_type = other RNA
ctggcagcgagctgctgggcc

SEQ ID NO: 16523 - RNA, 21 nt, synthetic construct
  source 1..21: mol_type = other RNA
ctggcgtaagtccaggcaacc

SEQ ID NO: 16524 - RNA, 21 nt, synthetic construct
  source 1..21: mol_type = other RNA
ctgggccccggcagccgtgaa

SEQ ID NO: 16525 - RNA, 21 nt, synthetic construct
  source 1..21: mol_type = other RNA
ctggtgggtggagaacaactc

SEQ ID NO: 16526 - RNA, 21 nt, synthetic construct
  source 1..21: mol_type = other RNA
cttacgccagcgtctccacat

SEQ ID NO: 16527 - RNA, 21 nt, synthetic construct
  source 1..21: mol_type = other RNA
cttcggaggtgtcctcatgtg

SEQ ID NO: 16528 - RNA, 21 nt, synthetic construct
  source 1..21: mol_type = other RNA
cttgccagcgtccagtacaac

SEQ ID NO: 16529 - RNA, 21 nt, synthetic construct
  source 1..21: mol_type = other RNA
cttgttgtactggacgctggc

SEQ ID NO: 16530 - RNA, 21 nt, synthetic construct
  source 1..21: mol_type = other RNA
gaaactcaccttggggcctgg

SEQ ID NO: 16531 - RNA, 21 nt, synthetic construct
  source 1..21: mol_type = other RNA
gaacttgttgtactggacgct

SEQ ID NO: 16532 - RNA, 21 nt, synthetic construct
  source 1..21: mol_type = other RNA
gaaggctggcagcgagctgct

SEQ ID NO: 16533 - RNA, 21 nt, synthetic construct
  source 1..21: mol_type = other RNA
gacacctccgaaggctggcag

SEQ ID NO: 16534 - RNA, 21 nt, synthetic construct
  source 1..21: mol_type = other RNA
gacgctggcaagagaaactca

SEQ ID NO: 16535 - RNA, 21 nt, synthetic construct
  source 1..21: mol_type = other RNA
gacgctggcgtaagtccaggc

SEQ ID NO: 16536 - RNA, 21 nt, synthetic construct
  source 1..21: mol_type = other RNA
gacttacgccagcgtctccac

SEQ ID NO: 16537 - RNA, 21 nt, synthetic construct
  source 1..21: mol_type = other RNA
gagaaactcaccttggggcct

SEQ ID NO: 16538 - RNA, 21 nt, synthetic construct
  source 1..21: mol_type = other RNA
gagacgctggcgtaagtccag

SEQ ID NO: 16539 - RNA, 21 nt, synthetic construct
  source 1..21: mol_type = other RNA
gaggacacctccgaaggctgg

SEQ ID NO: 16540 - RNA, 21 nt, synthetic construct
  source 1..21: mol_type = other RNA
gaggtgtcctcatgtggagac

SEQ ID NO: 16541 - RNA, 21 nt, synthetic construct
  source 1..21: mol_type = other RNA
gagtcccaagggccaggcccc

SEQ ID NO: 16542 - RNA, 21 nt, synthetic construct
  source 1..21: mol_type = other RNA
gagtgagttgttctccaccca

SEQ ID NO: 16543 - RNA, 21 nt, synthetic construct
  source 1..21: mol_type = other RNA
gagttgttctccacccaccag

SEQ ID NO: 16544 - RNA, 21 nt, synthetic construct
  source 1..21: mol_type = other RNA
gagtttctcttgccagcgtcc

SEQ ID NO: 16545 - RNA, 21 nt, synthetic construct
  source 1..21: mol_type = other RNA
gcaaccctggtgggtggagaa

SEQ ID NO: 16546 - RNA, 21 nt, synthetic construct
  source 1..21: mol_type = other RNA
gcaagagaaactcaccttggg

SEQ ID NO: 16547 - RNA, 21 nt, synthetic construct
  source 1..21: mol_type = other RNA
gcagccgtgaacttgttgtac

SEQ ID NO: 16548 - RNA, 21 nt, synthetic construct
  source 1..21: mol_type = other RNA
gcagctcgctgccagccttcg

SEQ ID NO: 16549 - RNA, 21 nt, synthetic construct
  source 1..21: mol_type = other RNA
gccagccttcggaggtgtcct

SEQ ID NO: 16550 - RNA, 21 nt, synthetic construct
  source 1..21: mol_type = other RNA
gccagcgtccagtacaacaag

SEQ ID NO: 16551 - RNA, 21 nt, synthetic construct
  source 1..21: mol_type = other RNA
gccagcgtctccacatgagga

SEQ ID NO: 16552 - RNA, 21 nt, synthetic construct
  source 1..21: mol_type = other RNA
gccaggccccaaggtgagttt

SEQ ID NO: 16553 - RNA, 21 nt, synthetic construct
  source 1..21: mol_type = other RNA
gcccagcagctcgctgccagc

SEQ ID NO: 16554 - RNA, 21 nt, synthetic construct
  source 1..21: mol_type = other RNA
gccccaaggtgagtttctctt

SEQ ID NO: 16555 - RNA, 21 nt, synthetic construct
  source 1..21: mol_type = other RNA
gccccggcagccgtgaacttg

SEQ ID NO: 16556 - RNA, 21 nt, synthetic construct
  source 1..21: mol_type = other RNA
gccgtgaacttgttgtactgg

SEQ ID NO: 16557 - RNA, 21 nt, synthetic construct
  source 1..21: mol_type = other RNA
gcctggacttacgccagcgtc

SEQ ID NO: 16558 - RNA, 21 nt, synthetic construct
  source 1..21: mol_type = other RNA
gccttcggaggtgtcctcatg

SEQ ID NO: 16559 - RNA, 21 nt, synthetic construct
  source 1..21: mol_type = other RNA
gcgtaagtccaggcaaccctg

SEQ ID NO: 16560 - RNA, 21 nt, synthetic construct
  source 1..21: mol_type = other RNA
gcgtccagtacaacaagttca

SEQ ID NO: 16561 - RNA, 21 nt, synthetic construct
  source 1..21: mol_type = other RNA
gcgtctccacatgaggacacc

SEQ ID NO: 16562 - RNA, 21 nt, synthetic construct
  source 1..21: mol_type = other RNA
gctcgctgccagccttcggag

SEQ ID NO: 16563 - RNA, 21 nt, synthetic construct
  source 1..21: mol_type = other RNA
gctgccagccttcggaggtgt

SEQ ID NO: 16564 - RNA, 21 nt, synthetic construct
  source 1..21: mol_type = other RNA
gctggcaagagaaactcacct

SEQ ID NO: 16565 - RNA, 21 nt, synthetic construct
  source 1..21: mol_type = other RNA
gctggcagcgagctgctgggc

SEQ ID NO: 16566 - RNA, 21 nt, synthetic construct
  source 1..21: mol_type = other RNA
gctggcgtaagtccaggcaac

SEQ ID NO: 16567 - RNA, 21 nt, synthetic construct
  source 1..21: mol_type = other RNA
ggacacctccgaaggctggca

SEQ ID NO: 16568 - RNA, 21 nt, synthetic construct
  source 1..21: mol_type = other RNA
ggacgctggcaagagaaactc

SEQ ID NO: 16569 - RNA, 21 nt, synthetic construct
  source 1..21: mol_type = other RNA
ggacttacgccagcgtctcca

SEQ ID NO: 16570 - RNA, 21 nt, synthetic construct
  source 1..21: mol_type = other RNA
ggagacgctggcgtaagtcca

SEQ ID NO: 16571 - RNA, 21 nt, synthetic construct
  source 1..21: mol_type = other RNA
ggaggtgtcctcatgtggaga

SEQ ID NO: 16572 - RNA, 21 nt, synthetic construct
  source 1..21: mol_type = other RNA
ggagtcccaagggccaggccc

SEQ ID NO: 16573 - RNA, 21 nt, synthetic construct
  source 1..21: mol_type = other RNA
ggagtgagttgttctccaccc

SEQ ID NO: 16574 - RNA, 21 nt, synthetic construct
  source 1..21: mol_type = other RNA
ggcaaccctggtgggtggaga

SEQ ID NO: 16575 - RNA, 21 nt, synthetic construct
  source 1..21: mol_type = other RNA
ggcaagagaaactcaccttgg

SEQ ID NO: 16576 - RNA, 21 nt, synthetic construct
  source 1..21: mol_type = other RNA
ggcagccgtgaacttgttgta

SEQ ID NO: 16577 - RNA, 21 nt, synthetic construct
  source 1..21: mol_type = other RNA
ggccaggccccaaggtgagtt

SEQ ID NO: 16578 - RNA, 21 nt, synthetic construct
  source 1..21: mol_type = other RNA
ggcccagcagctcgctgccag

SEQ ID NO: 16579 - RNA, 21 nt, synthetic construct
  source 1..21: mol_type = other RNA
ggccccaaggtgagtttctct

SEQ ID NO: 16580 - RNA, 21 nt, synthetic construct
  source 1..21: mol_type = other RNA
ggccccggcagccgtgaactt

SEQ ID NO: 16581 - RNA, 21 nt, synthetic construct
  source 1..21: mol_type = other RNA
ggcgtaagtccaggcaaccct

SEQ ID NO: 16582 - RNA, 21 nt, synthetic construct
  source 1..21: mol_type = other RNA
ggctggcagcgagctgctggg

SEQ ID NO: 16583 - RNA, 21 nt, synthetic construct
  source 1..21: mol_type = other RNA
gggagtcccaagggccaggcc

SEQ ID NO: 16584 - RNA, 21 nt, synthetic construct
  source 1..21: mol_type = other RNA
gggagtgagttgttctccacc

SEQ ID NO: 16585 - RNA, 21 nt, synthetic construct
  source 1..21: mol_type = other RNA
gggccaggccccaaggtgagt

SEQ ID NO: 16586 - RNA, 21 nt, synthetic construct
  source 1..21: mol_type = other RNA
gggcccagcagctcgctgcca

SEQ ID NO: 16587 - RNA, 21 nt, synthetic construct
  source 1..21: mol_type = other RNA
gggccccggcagccgtgaact

SEQ ID NO: 16588 - RNA, 21 nt, synthetic construct
  source 1..21: mol_type = other RNA
ggggagtcccaagggccaggc

SEQ ID NO: 16589 - RNA, 21 nt, synthetic construct
  source 1..21: mol_type = other RNA
ggggagtgagttgttctccac

SEQ ID NO: 16590 - RNA, 21 nt, synthetic construct
  source 1..21: mol_type = other RNA
gggttgcctggacttacgcca

SEQ ID NO: 16591 - RNA, 21 nt, synthetic construct
  source 1..21: mol_type = other RNA
ggtgagtttctcttgccagcg

SEQ ID NO: 16592 - RNA, 21 nt, synthetic construct
  source 1..21: mol_type = other RNA
ggtgtcctcatgtggagacgc

SEQ ID NO: 16593 - RNA, 21 nt, synthetic construct
  source 1..21: mol_type = other RNA
ggttgcctggacttacgccag

SEQ ID NO: 16594 - RNA, 21 nt, synthetic construct
  source 1..21: mol_type = other RNA
gtaagtccaggcaaccctggt

SEQ ID NO: 16595 - RNA, 21 nt, synthetic construct
  source 1..21: mol_type = other RNA
gtacaacaagttcacggctgc

SEQ ID NO: 16596 - RNA, 21 nt, synthetic construct
  source 1..21: mol_type = other RNA
gtactggacgctggcaagaga

SEQ ID NO: 16597 - RNA, 21 nt, synthetic construct
  source 1..21: mol_type = other RNA
gtccaggcaaccctggtgggt

SEQ ID NO: 16598 - RNA, 21 nt, synthetic construct
  source 1..21: mol_type = other RNA
gtccagtacaacaagttcacg

SEQ ID NO: 16599 - RNA, 21 nt, synthetic construct
  source 1..21: mol_type = other RNA
gtcccaagggccaggccccaa

SEQ ID NO: 16600 - RNA, 21 nt, synthetic construct
  source 1..21: mol_type = other RNA
gtcctcatgtggagacgctgg

SEQ ID NO: 16601 - RNA, 21 nt, synthetic construct
  source 1..21: mol_type = other RNA
gtctccacatgaggacacctc

SEQ ID NO: 16602 - RNA, 21 nt, synthetic construct
  source 1..21: mol_type = other RNA
gtgaacttgttgtactggacg

SEQ ID NO: 16603 - RNA, 21 nt, synthetic construct
  source 1..21: mol_type = other RNA
gtgagttgttctccacccacc

SEQ ID NO: 16604 - RNA, 21 nt, synthetic construct
  source 1..21: mol_type = other RNA
gtgagtttctcttgccagcgt

SEQ ID NO: 16605 - RNA, 21 nt, synthetic construct
  source 1..21: mol_type = other RNA
gtggagacgctggcgtaagtc

SEQ ID NO: 16606 - RNA, 21 nt, synthetic construct
  source 1..21: mol_type = other RNA
gtgtcctcatgtggagacgct

SEQ ID NO: 16607 - RNA, 21 nt, synthetic construct
  source 1..21: mol_type = other RNA
gttcacggctgccggggccca

SEQ ID NO: 16608 - RNA, 21 nt, synthetic construct
  source 1..21: mol_type = other RNA
gttctccacccaccagggttg

SEQ ID NO: 16609 - RNA, 21 nt, synthetic construct
  source 1..21: mol_type = other RNA
gttgcctggacttacgccagc

SEQ ID NO: 16610 - RNA, 21 nt, synthetic construct
  source 1..21: mol_type = other RNA
gttgtactggacgctggcaag

SEQ ID NO: 16611 - RNA, 21 nt, synthetic construct
  source 1..21: mol_type = other RNA
gttgttctccacccaccaggg

SEQ ID NO: 16612 - RNA, 21 nt, synthetic construct
  source 1..21: mol_type = other RNA
gtttctcttgccagcgtccag

SEQ ID NO: 16613 - RNA, 21 nt, synthetic construct
  source 1..21: mol_type = other RNA
taagtccaggcaaccctggtg

SEQ ID NO: 16614 - RNA, 21 nt, synthetic construct
  source 1..21: mol_type = other RNA
tacaacaagttcacggctgcc

SEQ ID NO: 16615 - RNA, 21 nt, synthetic construct
  source 1..21: mol_type = other RNA
tacgccagcgtctccacatga

SEQ ID NO: 16616 - RNA, 21 nt, synthetic construct
  source 1..21: mol_type = other RNA
tactggacgctggcaagagaa

SEQ ID NO: 16617 - RNA, 21 nt, synthetic construct
  source 1..21: mol_type = other RNA
tcaccttggggcctggccctt

SEQ ID NO: 16618 - RNA, 21 nt, synthetic construct
  source 1..21: mol_type = other RNA
tcatgtggagacgctggcgta

SEQ ID NO: 16619 - RNA, 21 nt, synthetic construct
  source 1..21: mol_type = other RNA
tccacatgaggacacctccga

SEQ ID NO: 16620 - RNA, 21 nt, synthetic construct
  source 1..21: mol_type = other RNA
tccacccaccagggttgcctg

SEQ ID NO: 16621 - RNA, 21 nt, synthetic construct
  source 1..21: mol_type = other RNA
tccaggcaaccctggtgggtg

SEQ ID NO: 16622 - RNA, 21 nt, synthetic construct
  source 1..21: mol_type = other RNA
tccagtacaacaagttcacgg

SEQ ID NO: 16623 - RNA, 21 nt, synthetic construct
  source 1..21: mol_type = other RNA
tcccaagggccaggccccaag

SEQ ID NO: 16624 - RNA, 21 nt, synthetic construct
  source 1..21: mol_type = other RNA
tccgaaggctggcagcgagct

SEQ ID NO: 16625 - RNA, 21 nt, synthetic construct
  source 1..21: mol_type = other RNA
tcctcatgtggagacgctggc

SEQ ID NO: 16626 - RNA, 21 nt, synthetic construct
  source 1..21: mol_type = other RNA
tcgctgccagccttcggaggt

SEQ ID NO: 16627 - RNA, 21 nt, synthetic construct
  source 1..21: mol_type = other RNA
tcggaggtgtcctcatgtgga

SEQ ID NO: 16628 - RNA, 21 nt, synthetic construct
  source 1..21: mol_type = other RNA
tctccacatgaggacacctcc

SEQ ID NO: 16629 - RNA, 21 nt, synthetic construct
  source 1..21: mol_type = other RNA
tctccacccaccagggttgcc

SEQ ID NO: 16630 - RNA, 21 nt, synthetic construct
  source 1..21: mol_type = other RNA
tctcttgccagcgtccagtac

SEQ ID NO: 16631 - RNA, 21 nt, synthetic construct
  source 1..21: mol_type = other RNA
tcttgccagcgtccagtacaa

SEQ ID NO: 16632 - RNA, 21 nt, synthetic construct
  source 1..21: mol_type = other RNA
tgaacttgttgtactggacgc

SEQ ID NO: 16633 - RNA, 21 nt, synthetic construct
  source 1..21: mol_type = other RNA
tgaggacacctccgaaggctg

SEQ ID NO: 16634 - RNA, 21 nt, synthetic construct
  source 1..21: mol_type = other RNA
tgagttgttctccacccacca

SEQ ID NO: 16635 - RNA, 21 nt, synthetic construct
  source 1..21: mol_type = other RNA
tgagtttctcttgccagcgtc

SEQ ID NO: 16636 - RNA, 21 nt, synthetic construct
  source 1..21: mol_type = other RNA
tgccagccttcggaggtgtcc

SEQ ID NO: 16637 - RNA, 21 nt, synthetic construct
  source 1..21: mol_type = other RNA
tgccagcgtccagtacaacaa

SEQ ID NO: 16638 - RNA, 21 nt, synthetic construct
  source 1..21: mol_type = other RNA
tgcctggacttacgccagcgt

SEQ ID NO: 16639 - RNA, 21 nt, synthetic construct
  source 1..21: mol_type = other RNA
tggacgctggcaagagaaact

SEQ ID NO: 16640 - RNA, 21 nt, synthetic construct
  source 1..21: mol_type = other RNA
tggacttacgccagcgtctcc

SEQ ID NO: 16641 - RNA, 21 nt, synthetic construct
  source 1..21: mol_type = other RNA
tggagacgctggcgtaagtcc

SEQ ID NO: 16642 - RNA, 21 nt, synthetic construct
  source 1..21: mol_type = other RNA
tggcaagagaaactcaccttg

SEQ ID NO: 16643 - RNA, 21 nt, synthetic construct
  source 1..21: mol_type = other RNA
tggcagcgagctgctgggccc

SEQ ID NO: 16644 - RNA, 21 nt, synthetic construct
  source 1..21: mol_type = other RNA
tggcgtaagtccaggcaaccc

SEQ ID NO: 16645 - RNA, 21 nt, synthetic construct
  source 1..21: mol_type = other RNA
tgggccccggcagccgtgaac

SEQ ID NO: 16646 - RNA, 21 nt, synthetic construct
  source 1..21: mol_type = other RNA
tggggagtcccaagggccagg

SEQ ID NO: 16647 - RNA, 21 nt, synthetic construct
  source 1..21: mol_type = other RNA
tggggagtgagttgttctcca

SEQ ID NO: 16648 - RNA, 21 nt, synthetic construct
  source 1..21: mol_type = other RNA
tgtactggacgctggcaagag

SEQ ID NO: 16649 - RNA, 21 nt, synthetic construct
  source 1..21: mol_type = other RNA
tgtcctcatgtggagacgctg

SEQ ID NO: 16650 - RNA, 21 nt, synthetic construct
  source 1..21: mol_type = other RNA
tgtggagacgctggcgtaagt

SEQ ID NO: 16651 - RNA, 21 nt, synthetic construct
  source 1..21: mol_type = other RNA
tgttctccacccaccagggtt

SEQ ID NO: 16652 - RNA, 21 nt, synthetic construct
  source 1..21: mol_type = other RNA
tgttgtactggacgctggcaa

SEQ ID NO: 16653 - RNA, 21 nt, synthetic construct
  source 1..21: mol_type = other RNA
ttacgccagcgtctccacatg

SEQ ID NO: 16654 - RNA, 21 nt, synthetic construct
  source 1..21: mol_type = other RNA
ttcacggctgccggggcccag

SEQ ID NO: 16655 - RNA, 21 nt, synthetic construct
  source 1..21: mol_type = other RNA
ttcggaggtgtcctcatgtgg

SEQ ID NO: 16656 - RNA, 21 nt, synthetic construct
  source 1..21: mol_type = other RNA
ttctccacccaccagggttgc

SEQ ID NO: 16657 - RNA, 21 nt, synthetic construct
  source 1..21: mol_type = other RNA
ttctcttgccagcgtccagta

SEQ ID NO: 16658 - RNA, 21 nt, synthetic construct
  source 1..21: mol_type = other RNA
ttgccagcgtccagtacaaca

SEQ ID NO: 16659 - RNA, 21 nt, synthetic construct
  source 1..21: mol_type = other RNA
ttgcctggacttacgccagcg

SEQ ID NO: 16660 - RNA, 21 nt, synthetic construct
  source 1..21: mol_type = other RNA
ttgtactggacgctggcaaga

SEQ ID NO: 16661 - RNA, 21 nt, synthetic construct
  source 1..21: mol_type = other RNA
ttgttctccacccaccagggt

SEQ ID NO: 16662 - RNA, 21 nt, synthetic construct
  source 1..21: mol_type = other RNA
ttgttgtactggacgctggca

SEQ ID NO: 16663 - RNA, 21 nt, synthetic construct
  source 1..21: mol_type = other RNA
tttctcttgccagcgtccagt

SEQ ID NO: 16664 - RNA, 22 nt, synthetic construct
  source 1..22: mol_type = other RNA
aaactcaccttggggcctggcc

SEQ ID NO: 16665 - RNA, 22 nt, synthetic construct
  source 1..22: mol_type = other RNA
aacaagttcacggctgccgggg

SEQ ID NO: 16666 - RNA, 22 nt, synthetic construct
  source 1..22: mol_type = other RNA
aaccctggtgggtggagaacaa

SEQ ID NO: 16667 - RNA, 22 nt, synthetic construct
  source 1..22: mol_type = other RNA
aactcaccttggggcctggccc

SEQ ID NO: 16668 - RNA, 22 nt, synthetic construct
  source 1..22: mol_type = other RNA
aacttgttgtactggacgctgg

SEQ ID NO: 16669 - RNA, 22 nt, synthetic construct
  source 1..22: mol_type = other RNA
aagagaaactcaccttggggcc

SEQ ID NO: 16670 - RNA, 22 nt, synthetic construct
  source 1..22: mol_type = other RNA
aaggctggcagcgagctgctgg

SEQ ID NO: 16671 - RNA, 22 nt, synthetic construct
  source 1..22: mol_type = other RNA
aagggccaggccccaaggtgag

SEQ ID NO: 16672 - RNA, 22 nt, synthetic construct
  source 1..22: mol_type = other RNA
aaggtgagtttctcttgccagc

SEQ ID NO: 16673 - RNA, 22 nt, synthetic construct
  source 1..22: mol_type = other RNA
aagtccaggcaaccctggtggg

SEQ ID NO: 16674 - RNA, 22 nt, synthetic construct
  source 1..22: mol_type = other RNA
aagttcacggctgccggggccc

SEQ ID NO: 16675 - RNA, 22 nt, synthetic construct
  source 1..22: mol_type = other RNA
acaacaagttcacggctgccgg

SEQ ID NO: 16676 - RNA, 22 nt, synthetic construct
  source 1..22: mol_type = other RNA
acaagttcacggctgccggggc

SEQ ID NO: 16677 - RNA, 22 nt, synthetic construct
  source 1..22: mol_type = other RNA
acacctccgaaggctggcagcg

SEQ ID NO: 16678 - RNA, 22 nt, synthetic construct
  source 1..22: mol_type = other RNA
acatgaggacacctccgaaggc

SEQ ID NO: 16679 - RNA, 22 nt, synthetic construct
  source 1..22: mol_type = other RNA
accagggttgcctggacttacg

SEQ ID NO: 16680 - RNA, 22 nt, synthetic construct
  source 1..22: mol_type = other RNA
acccaccagggttgcctggact

SEQ ID NO: 16681 - RNA, 22 nt, synthetic construct
  source 1..22: mol_type = other RNA
accctggtgggtggagaacaac

SEQ ID NO: 16682 - RNA, 22 nt, synthetic construct
  source 1..22: mol_type = other RNA
acctccgaaggctggcagcgag

SEQ ID NO: 16683 - RNA, 22 nt, synthetic construct
  source 1..22: mol_type = other RNA
accttggggcctggcccttggg

SEQ ID NO: 16684 - RNA, 22 nt, synthetic construct
  source 1..22: mol_type = other RNA
acgccagcgtctccacatgagg

SEQ ID NO: 16685 - RNA, 22 nt, synthetic construct
  source 1..22: mol_type = other RNA
acgctggcaagagaaactcacc

SEQ ID NO: 16686 - RNA, 22 nt, synthetic construct
  source 1..22: mol_type = other RNA
acgctggcgtaagtccaggcaa

SEQ ID NO: 16687 - RNA, 22 nt, synthetic construct
  source 1..22: mol_type = other RNA
actcaccttggggcctggccct

SEQ ID NO: 16688 - RNA, 22 nt, synthetic construct
  source 1..22: mol_type = other RNA
actggacgctggcaagagaaac

SEQ ID NO: 16689 - RNA, 22 nt, synthetic construct
  source 1..22: mol_type = other RNA
acttacgccagcgtctccacat

SEQ ID NO: 16690 - RNA, 22 nt, synthetic construct
  source 1..22: mol_type = other RNA
acttgttgtactggacgctggc

SEQ ID NO: 16691 - RNA, 22 nt, synthetic construct
  source 1..22: mol_type = other RNA
agaaactcaccttggggcctgg

SEQ ID NO: 16692 - RNA, 22 nt, synthetic construct
  source 1..22: mol_type = other RNA
agacgctggcgtaagtccaggc

SEQ ID NO: 16693 - RNA, 22 nt, synthetic construct
  source 1..22: mol_type = other RNA
agagaaactcaccttggggcct

SEQ ID NO: 16694 - RNA, 22 nt, synthetic construct
  source 1..22: mol_type = other RNA
agcagctcgctgccagccttcg

SEQ ID NO: 16695 - RNA, 22 nt, synthetic construct
  source 1..22: mol_type = other RNA
agccgtgaacttgttgtactgg

SEQ ID NO: 16696 - RNA, 22 nt, synthetic construct
  source 1..22: mol_type = other RNA
agccttcggaggtgtcctcatg

SEQ ID NO: 16697 - RNA, 22 nt, synthetic construct
  source 1..22: mol_type = other RNA
agcgagctgctgggccccggca

SEQ ID NO: 16698 - RNA, 22 nt, synthetic construct
  source 1..22: mol_type = other RNA
agcgtccagtacaacaagttca

SEQ ID NO: 16699 - RNA, 22 nt, synthetic construct
  source 1..22: mol_type = other RNA
agcgtctccacatgaggacacc

SEQ ID NO: 16700 - RNA, 22 nt, synthetic construct
  source 1..22: mol_type = other RNA
agctcgctgccagccttcggag

SEQ ID NO: 16701 - RNA, 22 nt, synthetic construct
  source 1..22: mol_type = other RNA
aggacacctccgaaggctggca

SEQ ID NO: 16702 - RNA, 22 nt, synthetic construct
  source 1..22: mol_type = other RNA
aggcaaccctggtgggtggaga

SEQ ID NO: 16703 - RNA, 22 nt, synthetic construct
  source 1..22: mol_type = other RNA
aggccccaaggtgagtttctct

SEQ ID NO: 16704 - RNA, 22 nt, synthetic construct
  source 1..22: mol_type = other RNA
aggctggcagcgagctgctggg

SEQ ID NO: 16705 - RNA, 22 nt, synthetic construct
  source 1..22: mol_type = other RNA
agggccaggccccaaggtgagt

SEQ ID NO: 16706 - RNA, 22 nt, synthetic construct
  source 1..22: mol_type = other RNA
agggttgcctggacttacgcca

SEQ ID NO: 16707 - RNA, 22 nt, synthetic construct
  source 1..22: mol_type = other RNA
aggtgagtttctcttgccagcg

SEQ ID NO: 16708 - RNA, 22 nt, synthetic construct
  source 1..22: mol_type = other RNA
aggtgtcctcatgtggagacgc

SEQ ID NO: 16709 - RNA, 22 nt, synthetic construct
  source 1..22: mol_type = other RNA
agtacaacaagttcacggctgc

SEQ ID NO: 16710 - RNA, 22 nt, synthetic construct
  source 1..22: mol_type = other RNA
agtccaggcaaccctggtgggt

SEQ ID NO: 16711 - RNA, 22 nt, synthetic construct
  source 1..22: mol_type = other RNA
agtcccaagggccaggccccaa

SEQ ID NO: 16712 - RNA, 22 nt, synthetic construct
  source 1..22: mol_type = other RNA
agtgagttgttctccacccacc

SEQ ID NO: 16713 - RNA, 22 nt, synthetic construct
  source 1..22: mol_type = other RNA
agttcacggctgccggggccca

SEQ ID NO: 16714 - RNA, 22 nt, synthetic construct
  source 1..22: mol_type = other RNA
agttgttctccacccaccaggg

SEQ ID NO: 16715 - RNA, 22 nt, synthetic construct
  source 1..22: mol_type = other RNA
agtttctcttgccagcgtccag

SEQ ID NO: 16716 - RNA, 22 nt, synthetic construct
  source 1..22: mol_type = other RNA
atgaggacacctccgaaggctg

SEQ ID NO: 16717 - RNA, 22 nt, synthetic construct
  source 1..22: mol_type = other RNA
atgtggagacgctggcgtaagt

SEQ ID NO: 16718 - RNA, 22 nt, synthetic construct
  source 1..22: mol_type = other RNA
caacaagttcacggctgccggg

SEQ ID NO: 16719 - RNA, 22 nt, synthetic construct
  source 1..22: mol_type = other RNA
caaccctggtgggtggagaaca

SEQ ID NO: 16720 - RNA, 22 nt, synthetic construct
  source 1..22: mol_type = other RNA
caagagaaactcaccttggggc

SEQ ID NO: 16721 - RNA, 22 nt, synthetic construct
  source 1..22: mol_type = other RNA
caagggccaggccccaaggtga

SEQ ID NO: 16722 - RNA, 22 nt, synthetic construct
  source 1..22: mol_type = other RNA
caaggtgagtttctcttgccag

SEQ ID NO: 16723 - RNA, 22 nt, synthetic construct
  source 1..22: mol_type = other RNA
caagttcacggctgccggggcc

SEQ ID NO: 16724 - RNA, 22 nt, synthetic construct
  source 1..22: mol_type = other RNA
cacatgaggacacctccgaagg

SEQ ID NO: 16725 - RNA, 22 nt, synthetic construct
  source 1..22: mol_type = other RNA
caccagggttgcctggacttac

SEQ ID NO: 16726 - RNA, 22 nt, synthetic construct
  source 1..22: mol_type = other RNA
cacccaccagggttgcctggac

SEQ ID NO: 16727 - RNA, 22 nt, synthetic construct
  source 1..22: mol_type = other RNA
cacctccgaaggctggcagcga

SEQ ID NO: 16728 - RNA, 22 nt, synthetic construct
  source 1..22: mol_type = other RNA
caccttggggcctggcccttgg

SEQ ID NO: 16729 - RNA, 22 nt, synthetic construct
  source 1..22: mol_type = other RNA
cagcagctcgctgccagccttc

SEQ ID NO: 16730 - RNA, 22 nt, synthetic construct
  source 1..22: mol_type = other RNA
cagccgtgaacttgttgtactg

SEQ ID NO: 16731 - RNA, 22 nt, synthetic construct
  source 1..22: mol_type = other RNA
cagccttcggaggtgtcctcat

SEQ ID NO: 16732 - RNA, 22 nt, synthetic construct
  source 1..22: mol_type = other RNA
cagcgtccagtacaacaagttc

SEQ ID NO: 16733 - RNA, 22 nt, synthetic construct
  source 1..22: mol_type = other RNA
cagcgtctccacatgaggacac

SEQ ID NO: 16734 - RNA, 22 nt, synthetic construct
  source 1..22: mol_type = other RNA
cagctcgctgccagccttcgga

SEQ ID NO: 16735 - RNA, 22 nt, synthetic construct
  source 1..22: mol_type = other RNA
caggcaaccctggtgggtggag

SEQ ID NO: 16736 - RNA, 22 nt, synthetic construct
  source 1..22: mol_type = other RNA
caggccccaaggtgagtttctc

SEQ ID NO: 16737 - RNA, 22 nt, synthetic construct
  source 1..22: mol_type = other RNA
cagggttgcctggacttacgcc

SEQ ID NO: 16738 - RNA, 22 nt, synthetic construct
  source 1..22: mol_type = other RNA
cagtacaacaagttcacggctg

SEQ ID NO: 16739 - RNA, 22 nt, synthetic construct
  source 1..22: mol_type = other RNA
catgaggacacctccgaaggct

SEQ ID NO: 16740 - RNA, 22 nt, synthetic construct
  source 1..22: mol_type = other RNA
catgtggagacgctggcgtaag

SEQ ID NO: 16741 - RNA, 22 nt, synthetic construct
  source 1..22: mol_type = other RNA
ccaagggccaggccccaaggtg

SEQ ID NO: 16742 - RNA, 22 nt, synthetic construct
  source 1..22: mol_type = other RNA
ccaaggtgagtttctcttgcca

SEQ ID NO: 16743 - RNA, 22 nt, synthetic construct
  source 1..22: mol_type = other RNA
ccacatgaggacacctccgaag

SEQ ID NO: 16744 - RNA, 22 nt, synthetic construct
  source 1..22: mol_type = other RNA
ccaccagggttgcctggactta

SEQ ID NO: 16745 - RNA, 22 nt, synthetic construct
  source 1..22: mol_type = other RNA
ccacccaccagggttgcctgga

SEQ ID NO: 16746 - RNA, 22 nt, synthetic construct
  source 1..22: mol_type = other RNA
ccagcagctcgctgccagcctt

SEQ ID NO: 16747 - RNA, 22 nt, synthetic construct
  source 1..22: mol_type = other RNA
ccagccttcggaggtgtcctca

SEQ ID NO: 16748 - RNA, 22 nt, synthetic construct
  source 1..22: mol_type = other RNA
ccagcgtccagtacaacaagtt

SEQ ID NO: 16749 - RNA, 22 nt, synthetic construct
  source 1..22: mol_type = other RNA
ccagcgtctccacatgaggaca

SEQ ID NO: 16750 - RNA, 22 nt, synthetic construct
  source 1..22: mol_type = other RNA
ccaggcaaccctggtgggtgga

SEQ ID NO: 16751 - RNA, 22 nt, synthetic construct
  source 1..22: mol_type = other RNA
ccaggccccaaggtgagtttct

SEQ ID NO: 16752 - RNA, 22 nt, synthetic construct
  source 1..22: mol_type = other RNA
ccagggttgcctggacttacgc

SEQ ID NO: 16753 - RNA, 22 nt, synthetic construct
  source 1..22: mol_type = other RNA
ccagtacaacaagttcacggct

SEQ ID NO: 16754 - RNA, 22 nt, synthetic construct
  source 1..22: mol_type = other RNA
cccaagggccaggccccaaggt

SEQ ID NO: 16755 - RNA, 22 nt, synthetic construct
  source 1..22: mol_type = other RNA
cccaaggtgagtttctcttgcc

SEQ ID NO: 16756 - RNA, 22 nt, synthetic construct
  source 1..22: mol_type = other RNA
cccaccagggttgcctggactt

SEQ ID NO: 16757 - RNA, 22 nt, synthetic construct
  source 1..22: mol_type = other RNA
cccagcagctcgctgccagcct

SEQ ID NO: 16758 - RNA, 22 nt, synthetic construct
  source 1..22: mol_type = other RNA
ccccaaggtgagtttctcttgc

SEQ ID NO: 16759 - RNA, 22 nt, synthetic construct
  source 1..22: mol_type = other RNA
ccccggcagccgtgaacttgtt

SEQ ID NO: 16760 - RNA, 22 nt, synthetic construct
  source 1..22: mol_type = other RNA
cccggcagccgtgaacttgttg

SEQ ID NO: 16761 - RNA, 22 nt, synthetic construct
  source 1..22: mol_type = other RNA
ccctggtgggtggagaacaact

SEQ ID NO: 16762 - RNA, 22 nt, synthetic construct
  source 1..22: mol_type = other RNA
ccgaaggctggcagcgagctgc

SEQ ID NO: 16763 - RNA, 22 nt, synthetic construct
  source 1..22: mol_type = other RNA
ccggcagccgtgaacttgttgt

SEQ ID NO: 16764 - RNA, 22 nt, synthetic construct
  source 1..22: mol_type = other RNA
ccgtgaacttgttgtactggac

SEQ ID NO: 16765 - RNA, 22 nt, synthetic construct
  source 1..22: mol_type = other RNA
cctcatgtggagacgctggcgt

SEQ ID NO: 16766 - RNA, 22 nt, synthetic construct
  source 1..22: mol_type = other RNA
cctccgaaggctggcagcgagc

SEQ ID NO: 16767 - RNA, 22 nt, synthetic construct
  source 1..22: mol_type = other RNA
cctggacttacgccagcgtctc

SEQ ID NO: 16768 - RNA, 22 nt, synthetic construct
  source 1..22: mol_type = other RNA
cctggtgggtggagaacaactc

SEQ ID NO: 16769 - RNA, 22 nt, synthetic construct
  source 1..22: mol_type = other RNA
ccttcggaggtgtcctcatgtg

SEQ ID NO: 16770 - RNA, 22 nt, synthetic construct
  source 1..22: mol_type = other RNA
cgaaggctggcagcgagctgct

SEQ ID NO: 16771 - RNA, 22 nt, synthetic construct
  source 1..22: mol_type = other RNA
cgccagcgtctccacatgagga

SEQ ID NO: 16772 - RNA, 22 nt, synthetic construct
  source 1..22: mol_type = other RNA
cgctgccagccttcggaggtgt

SEQ ID NO: 16773 - RNA, 22 nt, synthetic construct
  source 1..22: mol_type = other RNA
cgctggcaagagaaactcacct

SEQ ID NO: 16774 - RNA, 22 nt, synthetic construct
  source 1..22: mol_type = other RNA
cgctggcgtaagtccaggcaac

SEQ ID NO: 16775 - RNA, 22 nt, synthetic construct
  source 1..22: mol_type = other RNA
cggaggtgtcctcatgtggaga

SEQ ID NO: 16776 - RNA, 22 nt, synthetic construct
  source 1..22: mol_type = other RNA
cggcagccgtgaacttgttgta

SEQ ID NO: 16777 - RNA, 22 nt, synthetic construct
  source 1..22: mol_type = other RNA
cgtaagtccaggcaaccctggt

SEQ ID NO: 16778 - RNA, 22 nt, synthetic construct
  source 1..22: mol_type = other RNA
cgtccagtacaacaagttcacg

SEQ ID NO: 16779 - RNA, 22 nt, synthetic construct
  source 1..22: mol_type = other RNA
cgtctccacatgaggacacctc

SEQ ID NO: 16780 - RNA, 22 nt, synthetic construct
  source 1..22: mol_type = other RNA
cgtgaacttgttgtactggacg

SEQ ID NO: 16781 - RNA, 22 nt, synthetic construct
  source 1..22: mol_type = other RNA
ctcaccttggggcctggccctt

SEQ ID NO: 16782 - RNA, 22 nt, synthetic construct
  source 1..22: mol_type = other RNA
ctcatgtggagacgctggcgta

SEQ ID NO: 16783 - RNA, 22 nt, synthetic construct
  source 1..22: mol_type = other RNA
ctccacatgaggacacctccga

SEQ ID NO: 16784 - RNA, 22 nt, synthetic construct
  source 1..22: mol_type = other RNA
ctccacccaccagggttgcctg

SEQ ID NO: 16785 - RNA, 22 nt, synthetic construct
  source 1..22: mol_type = other RNA
ctccgaaggctggcagcgagct

SEQ ID NO: 16786 - RNA, 22 nt, synthetic construct
  source 1..22: mol_type = other RNA
ctcgctgccagccttcggaggt

SEQ ID NO: 16787 - RNA, 22 nt, synthetic construct
  source 1..22: mol_type = other RNA
ctcttgccagcgtccagtacaa

SEQ ID NO: 16788 - RNA, 22 nt, synthetic construct
  source 1..22: mol_type = other RNA
ctgccagccttcggaggtgtcc

SEQ ID NO: 16789 - RNA, 22 nt, synthetic construct
  source 1..22: mol_type = other RNA
ctggacgctggcaagagaaact

SEQ ID NO: 16790 - RNA, 22 nt, synthetic construct
  source 1..22: mol_type = other RNA
ctggacttacgccagcgtctcc

SEQ ID NO: 16791 - RNA, 22 nt, synthetic construct
  source 1..22: mol_type = other RNA
ctggcaagagaaactcaccttg

SEQ ID NO: 16792 - RNA, 22 nt, synthetic construct
  source 1..22: mol_type = other RNA
ctggcagcgagctgctgggccc

SEQ ID NO: 16793 - RNA, 22 nt, synthetic construct
  source 1..22: mol_type = other RNA
ctggcgtaagtccaggcaaccc

SEQ ID NO: 16794 - RNA, 22 nt, synthetic construct
  source 1..22: mol_type = other RNA
ctgggccccggcagccgtgaac

SEQ ID NO: 16795 - RNA, 22 nt, synthetic construct
  source 1..22: mol_type = other RNA
cttacgccagcgtctccacatg

SEQ ID NO: 16796 - RNA, 22 nt, synthetic construct
  source 1..22: mol_type = other RNA
cttcggaggtgtcctcatgtgg

SEQ ID NO: 16797 - RNA, 22 nt, synthetic construct
  source 1..22: mol_type = other RNA
cttgccagcgtccagtacaaca

SEQ ID NO: 16798 - RNA, 22 nt, synthetic construct
  source 1..22: mol_type = other RNA
cttgttgtactggacgctggca

SEQ ID NO: 16799 - RNA, 22 nt, synthetic construct
  source 1..22: mol_type = other RNA
gaaactcaccttggggcctggc

SEQ ID NO: 16800 - RNA, 22 nt, synthetic construct
  source 1..22: mol_type = other RNA
gaacttgttgtactggacgctg

SEQ ID NO: 16801 - RNA, 22 nt, synthetic construct
  source 1..22: mol_type = other RNA
gaaggctggcagcgagctgctg

SEQ ID NO: 16802 - RNA, 22 nt, synthetic construct
  source 1..22: mol_type = other RNA
gacacctccgaaggctggcagc

SEQ ID NO: 16803 - RNA, 22 nt, synthetic construct
  source 1..22: mol_type = other RNA
gacgctggcaagagaaactcac

SEQ ID NO: 16804 - RNA, 22 nt, synthetic construct
  source 1..22: mol_type = other RNA
gacgctggcgtaagtccaggca

SEQ ID NO: 16805 - RNA, 22 nt, synthetic construct
  source 1..22: mol_type = other RNA
gacttacgccagcgtctccaca

SEQ ID NO: 16806 - RNA, 22 nt, synthetic construct
  source 1..22: mol_type = other RNA
gagaaactcaccttggggcctg

SEQ ID NO: 16807 - RNA, 22 nt, synthetic construct
  source 1..22: mol_type = other RNA
gagacgctggcgtaagtccagg

SEQ ID NO: 16808 - RNA, 22 nt, synthetic construct
  source 1..22: mol_type = other RNA
gaggacacctccgaaggctggc

SEQ ID NO: 16809 - RNA, 22 nt, synthetic construct
  source 1..22: mol_type = other RNA
gaggtgtcctcatgtggagacg

SEQ ID NO: 16810 - RNA, 22 nt, synthetic construct
  source 1..22: mol_type = other RNA
gagtcccaagggccaggcccca

SEQ ID NO: 16811 - RNA, 22 nt, synthetic construct
  source 1..22: mol_type = other RNA
gagtgagttgttctccacccac

SEQ ID NO: 16812 - RNA, 22 nt, synthetic construct
  source 1..22: mol_type = other RNA
gagttgttctccacccaccagg

SEQ ID NO: 16813 - RNA, 22 nt, synthetic construct
  source 1..22: mol_type = other RNA
gagtttctcttgccagcgtcca

SEQ ID NO: 16814 - RNA, 22 nt, synthetic construct
  source 1..22: mol_type = other RNA
gcaaccctggtgggtggagaac

SEQ ID NO: 16815 - RNA, 22 nt, synthetic construct
  source 1..22: mol_type = other RNA
gcaagagaaactcaccttgggg

SEQ ID NO: 16816 - RNA, 22 nt, synthetic construct
  source 1..22: mol_type = other RNA
gcagccgtgaacttgttgtact

SEQ ID NO: 16817 - RNA, 22 nt, synthetic construct
  source 1..22: mol_type = other RNA
gcagctcgctgccagccttcgg

SEQ ID NO: 16818 - RNA, 22 nt, synthetic construct
  source 1..22: mol_type = other RNA
gccagccttcggaggtgtcctc

SEQ ID NO: 16819 - RNA, 22 nt, synthetic construct
  source 1..22: mol_type = other RNA
gccagcgtccagtacaacaagt

SEQ ID NO: 16820 - RNA, 22 nt, synthetic construct
  source 1..22: mol_type = other RNA
gccagcgtctccacatgaggac

SEQ ID NO: 16821 - RNA, 22 nt, synthetic construct
  source 1..22: mol_type = other RNA
gccaggccccaaggtgagtttc

SEQ ID NO: 16822 - RNA, 22 nt, synthetic construct
  source 1..22: mol_type = other RNA
gcccagcagctcgctgccagcc

SEQ ID NO: 16823 - RNA, 22 nt, synthetic construct
  source 1..22: mol_type = other RNA
gccccaaggtgagtttctcttg

SEQ ID NO: 16824 - RNA, 22 nt, synthetic construct
  source 1..22: mol_type = other RNA
gccccggcagccgtgaacttgt

SEQ ID NO: 16825 - RNA, 22 nt, synthetic construct
  source 1..22: mol_type = other RNA
gccgtgaacttgttgtactgga

SEQ ID NO: 16826 - RNA, 22 nt, synthetic construct
  source 1..22: mol_type = other RNA
gcctggacttacgccagcgtct

SEQ ID NO: 16827 - RNA, 22 nt, synthetic construct
  source 1..22: mol_type = other RNA
gccttcggaggtgtcctcatgt

SEQ ID NO: 16828 - RNA, 22 nt, synthetic construct
  source 1..22: mol_type = other RNA
gcgtaagtccaggcaaccctgg

SEQ ID NO: 16829 - RNA, 22 nt, synthetic construct
  source 1..22: mol_type = other RNA
gcgtccagtacaacaagttcac

SEQ ID NO: 16830 - RNA, 22 nt, synthetic construct
  source 1..22: mol_type = other RNA
gcgtctccacatgaggacacct

SEQ ID NO: 16831 - RNA, 22 nt, synthetic construct
  source 1..22: mol_type = other RNA
gctcgctgccagccttcggagg

SEQ ID NO: 16832 - RNA, 22 nt, synthetic construct
  source 1..22: mol_type = other RNA
gctgccagccttcggaggtgtc

SEQ ID NO: 16833 - RNA, 22 nt, synthetic construct
  source 1..22: mol_type = other RNA
gctggcaagagaaactcacctt

SEQ ID NO: 16834 - RNA, 22 nt, synthetic construct
  source 1..22: mol_type = other RNA
gctggcagcgagctgctgggcc

SEQ ID NO: 16835 - RNA, 22 nt, synthetic construct
  source 1..22: mol_type = other RNA
gctggcgtaagtccaggcaacc

SEQ ID NO: 16836 - RNA, 22 nt, synthetic construct
  source 1..22: mol_type = other RNA
gctgggccccggcagccgtgaa

SEQ ID NO: 16837 - RNA, 22 nt, synthetic construct
  source 1..22: mol_type = other RNA
ggacacctccgaaggctggcag

SEQ ID NO: 16838 - RNA, 22 nt, synthetic construct
  source 1..22: mol_type = other RNA
ggacgctggcaagagaaactca

SEQ ID NO: 16839 - RNA, 22 nt, synthetic construct
  source 1..22: mol_type = other RNA
ggacttacgccagcgtctccac

SEQ ID NO: 16840 - RNA, 22 nt, synthetic construct
  source 1..22: mol_type = other RNA
ggagacgctggcgtaagtccag

SEQ ID NO: 16841 - RNA, 22 nt, synthetic construct
  source 1..22: mol_type = other RNA
ggaggtgtcctcatgtggagac

SEQ ID NO: 16842 - RNA, 22 nt, synthetic construct
  source 1..22: mol_type = other RNA
ggagtcccaagggccaggcccc

SEQ ID NO: 16843 - RNA, 22 nt, synthetic construct
  source 1..22: mol_type = other RNA
ggagtgagttgttctccaccca

SEQ ID NO: 16844 - RNA, 22 nt, synthetic construct
  source 1..22: mol_type = other RNA
ggcaaccctggtgggtggagaa

SEQ ID NO: 16845 - RNA, 22 nt, synthetic construct
  source 1..22: mol_type = other RNA
ggcaagagaaactcaccttggg

SEQ ID NO: 16846 - RNA, 22 nt, synthetic construct
  source 1..22: mol_type = other RNA
ggcagccgtgaacttgttgtac

SEQ ID NO: 16847 - RNA, 22 nt, synthetic construct
  source 1..22: mol_type = other RNA
ggccaggccccaaggtgagttt

SEQ ID NO: 16848 - RNA, 22 nt, synthetic construct
  source 1..22: mol_type = other RNA
ggcccagcagctcgctgccagc

SEQ ID NO: 16849 - RNA, 22 nt, synthetic construct
  source 1..22: mol_type = other RNA
ggccccaaggtgagtttctctt

SEQ ID NO: 16850 - RNA, 22 nt, synthetic construct
  source 1..22: mol_type = other RNA
ggccccggcagccgtgaacttg

SEQ ID NO: 16851 - RNA, 22 nt, synthetic construct
  source 1..22: mol_type = other RNA
ggcgtaagtccaggcaaccctg

SEQ ID NO: 16852 - RNA, 22 nt, synthetic construct
  source 1..22: mol_type = other RNA
ggctggcagcgagctgctgggc

SEQ ID NO: 16853 - RNA, 22 nt, synthetic construct
  source 1..22: mol_type = other RNA
gggagtcccaagggccaggccc

SEQ ID NO: 16854 - RNA, 22 nt, synthetic construct
  source 1..22: mol_type = other RNA
gggagtgagttgttctccaccc

SEQ ID NO: 16855 - RNA, 22 nt, synthetic construct
  source 1..22: mol_type = other RNA
gggccaggccccaaggtgagtt

SEQ ID NO: 16856 - RNA, 22 nt, synthetic construct
  source 1..22: mol_type = other RNA
gggcccagcagctcgctgccag

SEQ ID NO: 16857 - RNA, 22 nt, synthetic construct
  source 1..22: mol_type = other RNA
gggccccggcagccgtgaactt

SEQ ID NO: 16858 - RNA, 22 nt, synthetic construct
  source 1..22: mol_type = other RNA
ggggagtcccaagggccaggcc

SEQ ID NO: 16859 - RNA, 22 nt, synthetic construct
  source 1..22: mol_type = other RNA
ggggagtgagttgttctccacc

SEQ ID NO: 16860 - RNA, 22 nt, synthetic construct
  source 1..22: mol_type = other RNA
ggggcccagcagctcgctgcca

SEQ ID NO: 16861 - RNA, 22 nt, synthetic construct
  source 1..22: mol_type = other RNA
gggttgcctggacttacgccag

SEQ ID NO: 16862 - RNA, 22 nt, synthetic construct
  source 1..22: mol_type = other RNA
ggtgagtttctcttgccagcgt

SEQ ID NO: 16863 - RNA, 22 nt, synthetic construct
  source 1..22: mol_type = other RNA
ggtgtcctcatgtggagacgct

SEQ ID NO: 16864 - RNA, 22 nt, synthetic construct
  source 1..22: mol_type = other RNA
ggttgcctggacttacgccagc

SEQ ID NO: 16865 - RNA, 22 nt, synthetic construct
  source 1..22: mol_type = other RNA
gtaagtccaggcaaccctggtg

SEQ ID NO: 16866 - RNA, 22 nt, synthetic construct
  source 1..22: mol_type = other RNA
gtacaacaagttcacggctgcc

SEQ ID NO: 16867 - RNA, 22 nt, synthetic construct
  source 1..22: mol_type = other RNA
gtactggacgctggcaagagaa

SEQ ID NO: 16868 - RNA, 22 nt, synthetic construct
  source 1..22: mol_type = other RNA
gtccaggcaaccctggtgggtg

SEQ ID NO: 16869 - RNA, 22 nt, synthetic construct
  source 1..22: mol_type = other RNA
gtccagtacaacaagttcacgg

SEQ ID NO: 16870 - RNA, 22 nt, synthetic construct
  source 1..22: mol_type = other RNA
gtcccaagggccaggccccaag

SEQ ID NO: 16871 - RNA, 22 nt, synthetic construct
  source 1..22: mol_type = other RNA
gtcctcatgtggagacgctggc

SEQ ID NO: 16872 - RNA, 22 nt, synthetic construct
  source 1..22: mol_type = other RNA
gtctccacatgaggacacctcc

SEQ ID NO: 16873 - RNA, 22 nt, synthetic construct
  source 1..22: mol_type = other RNA
gtgaacttgttgtactggacgc

SEQ ID NO: 16874 - RNA, 22 nt, synthetic construct
  source 1..22: mol_type = other RNA
gtgagttgttctccacccacca

SEQ ID NO: 16875 - RNA, 22 nt, synthetic construct
  source 1..22: mol_type = other RNA
gtgagtttctcttgccagcgtc

SEQ ID NO: 16876 - RNA, 22 nt, synthetic construct
  source 1..22: mol_type = other RNA
gtggagacgctggcgtaagtcc

SEQ ID NO: 16877 - RNA, 22 nt, synthetic construct
  source 1..22: mol_type = other RNA
gtgtcctcatgtggagacgctg

SEQ ID NO: 16878 - RNA, 22 nt, synthetic construct
  source 1..22: mol_type = other RNA
gttcacggctgccggggcccag

SEQ ID NO: 16879 - RNA, 22 nt, synthetic construct
  source 1..22: mol_type = other RNA
gttctccacccaccagggttgc

SEQ ID NO: 16880 - RNA, 22 nt, synthetic construct
  source 1..22: mol_type = other RNA
gttgcctggacttacgccagcg

SEQ ID NO: 16881 - RNA, 22 nt, synthetic construct
  source 1..22: mol_type = other RNA
gttgtactggacgctggcaaga

SEQ ID NO: 16882 - RNA, 22 nt, synthetic construct
  source 1..22: mol_type = other RNA
gttgttctccacccaccagggt

SEQ ID NO: 16883 - RNA, 22 nt, synthetic construct
  source 1..22: mol_type = other RNA
gtttctcttgccagcgtccagt

SEQ ID NO: 16884 - RNA, 22 nt, synthetic construct
  source 1..22: mol_type = other RNA
taagtccaggcaaccctggtgg

SEQ ID NO: 16885 - RNA, 22 nt, synthetic construct
  source 1..22: mol_type = other RNA
tacaacaagttcacggctgccg

SEQ ID NO: 16886 - RNA, 22 nt, synthetic construct
  source 1..22: mol_type = other RNA
tacgccagcgtctccacatgag

SEQ ID NO: 16887 - RNA, 22 nt, synthetic construct
  source 1..22: mol_type = other RNA
tactggacgctggcaagagaaa

SEQ ID NO: 16888 - RNA, 22 nt, synthetic construct
  source 1..22: mol_type = other RNA
tcaccttggggcctggcccttg

SEQ ID NO: 16889 - RNA, 22 nt, synthetic construct
  source 1..22: mol_type = other RNA
tcacggctgccggggcccagca

SEQ ID NO: 16890 - RNA, 22 nt, synthetic construct
  source 1..22: mol_type = other RNA
tcatgtggagacgctggcgtaa

SEQ ID NO: 16891 - RNA, 22 nt, synthetic construct
  source 1..22: mol_type = other RNA
tccacatgaggacacctccgaa

SEQ ID NO: 16892 - RNA, 22 nt, synthetic construct
  source 1..22: mol_type = other RNA
tccacccaccagggttgcctgg

SEQ ID NO: 16893 - RNA, 22 nt, synthetic construct
  source 1..22: mol_type = other RNA
tccaggcaaccctggtgggtgg

SEQ ID NO: 16894 - RNA, 22 nt, synthetic construct
  source 1..22: mol_type = other RNA
tccagtacaacaagttcacggc

SEQ ID NO: 16895 - RNA, 22 nt, synthetic construct
  source 1..22: mol_type = other RNA
tcccaagggccaggccccaagg

SEQ ID NO: 16896 - RNA, 22 nt, synthetic construct
  source 1..22: mol_type = other RNA
tccgaaggctggcagcgagctg

SEQ ID NO: 16897 - RNA, 22 nt, synthetic construct
  source 1..22: mol_type = other RNA
tcctcatgtggagacgctggcg

SEQ ID NO: 16898 - RNA, 22 nt, synthetic construct
  source 1..22: mol_type = other RNA
tcgctgccagccttcggaggtg

SEQ ID NO: 16899 - RNA, 22 nt, synthetic construct
  source 1..22: mol_type = other RNA
tcggaggtgtcctcatgtggag

SEQ ID NO: 16900 - RNA, 22 nt, synthetic construct
  source 1..22: mol_type = other RNA
tctccacatgaggacacctccg

SEQ ID NO: 16901 - RNA, 22 nt, synthetic construct
  source 1..22: mol_type = other RNA
tctccacccaccagggttgcct

SEQ ID NO: 16902 - RNA, 22 nt, synthetic construct
  source 1..22: mol_type = other RNA
tctcttgccagcgtccagtaca

SEQ ID NO: 16903 - RNA, 22 nt, synthetic construct
  source 1..22: mol_type = other RNA
tcttgccagcgtccagtacaac

SEQ ID NO: 16904 - RNA, 22 nt, synthetic construct
  source 1..22: mol_type = other RNA
tgaacttgttgtactggacgct

SEQ ID NO: 16905 - RNA, 22 nt, synthetic construct
  source 1..22: mol_type = other RNA
tgaggacacctccgaaggctgg

SEQ ID NO: 16906 - RNA, 22 nt, synthetic construct
  source 1..22: mol_type = other RNA
tgagttgttctccacccaccag

SEQ ID NO: 16907 - RNA, 22 nt, synthetic construct
  source 1..22: mol_type = other RNA
tgagtttctcttgccagcgtcc

SEQ ID NO: 16908 - RNA, 22 nt, synthetic construct
  source 1..22: mol_type = other RNA
tgccagccttcggaggtgtcct

SEQ ID NO: 16909 - RNA, 22 nt, synthetic construct
  source 1..22: mol_type = other RNA
tgccagcgtccagtacaacaag

SEQ ID NO: 16910 - RNA, 22 nt, synthetic construct
  source 1..22: mol_type = other RNA
tgccggggcccagcagctcgct

SEQ ID NO: 16911 - RNA, 22 nt, synthetic construct
  source 1..22: mol_type = other RNA
tgcctggacttacgccagcgtc

SEQ ID NO: 16912 - RNA, 22 nt, synthetic construct
  source 1..22: mol_type = other RNA
tgctgggccccggcagccgtga

SEQ ID NO: 16913 - RNA, 22 nt, synthetic construct
  source 1..22: mol_type = other RNA
tggacgctggcaagagaaactc

SEQ ID NO: 16914 - RNA, 22 nt, synthetic construct
  source 1..22: mol_type = other RNA
tggacttacgccagcgtctcca

SEQ ID NO: 16915 - RNA, 22 nt, synthetic construct
  source 1..22: mol_type = other RNA
tggagacgctggcgtaagtcca

SEQ ID NO: 16916 - RNA, 22 nt, synthetic construct
  source 1..22: mol_type = other RNA
tggcaagagaaactcaccttgg

SEQ ID NO: 16917 - RNA, 22 nt, synthetic construct
  source 1..22: mol_type = other RNA
tggcagcgagctgctgggcccc

SEQ ID NO: 16918 - RNA, 22 nt, synthetic construct
  source 1..22: mol_type = other RNA
tggcgtaagtccaggcaaccct

SEQ ID NO: 16919 - RNA, 22 nt, synthetic construct
  source 1..22: mol_type = other RNA
tgggccccggcagccgtgaact

SEQ ID NO: 16920 - RNA, 22 nt, synthetic construct
  source 1..22: mol_type = other RNA
tggggagtcccaagggccaggc

SEQ ID NO: 16921 - RNA, 22 nt, synthetic construct
  source 1..22: mol_type = other RNA
tggggagtgagttgttctccac

SEQ ID NO: 16922 - RNA, 22 nt, synthetic construct
  source 1..22: mol_type = other RNA
tgtactggacgctggcaagaga

SEQ ID NO: 16923 - RNA, 22 nt, synthetic construct
  source 1..22: mol_type = other RNA
tgtcctcatgtggagacgctgg

SEQ ID NO: 16924 - RNA, 22 nt, synthetic construct
  source 1..22: mol_type = other RNA
tgtggagacgctggcgtaagtc

SEQ ID NO: 16925 - RNA, 22 nt, synthetic construct
  source 1..22: mol_type = other RNA
tgttctccacccaccagggttg

SEQ ID NO: 16926 - RNA, 22 nt, synthetic construct
  source 1..22: mol_type = other RNA
tgttgtactggacgctggcaag

SEQ ID NO: 16927 - RNA, 22 nt, synthetic construct
  source 1..22: mol_type = other RNA
ttacgccagcgtctccacatga

SEQ ID NO: 16928 - RNA, 22 nt, synthetic construct
  source 1..22: mol_type = other RNA
ttcacggctgccggggcccagc

SEQ ID NO: 16929 - RNA, 22 nt, synthetic construct
  source 1..22: mol_type = other RNA
ttcggaggtgtcctcatgtgga

SEQ ID NO: 16930 - RNA, 22 nt, synthetic construct
  source 1..22: mol_type = other RNA
ttctccacccaccagggttgcc

SEQ ID NO: 16931 - RNA, 22 nt, synthetic construct
  source 1..22: mol_type = other RNA
ttctcttgccagcgtccagtac

SEQ ID NO: 16932 - RNA, 22 nt, synthetic construct
  source 1..22: mol_type = other RNA
ttgccagcgtccagtacaacaa

SEQ ID NO: 16933 - RNA, 22 nt, synthetic construct
  source 1..22: mol_type = other RNA
ttgcctggacttacgccagcgt

SEQ ID NO: 16934 - RNA, 22 nt, synthetic construct
  source 1..22: mol_type = other RNA
ttgtactggacgctggcaagag

SEQ ID NO: 16935 - RNA, 22 nt, synthetic construct
  source 1..22: mol_type = other RNA
ttgttctccacccaccagggtt

SEQ ID NO: 16936 - RNA, 22 nt, synthetic construct
  source 1..22: mol_type = other RNA
ttgttgtactggacgctggcaa

SEQ ID NO: 16937 - RNA, 22 nt, synthetic construct
  source 1..22: mol_type = other RNA
tttctcttgccagcgtccagta

SEQ ID NO: 16938 - RNA, 20 nt, synthetic construct
  source 1..20: mol_type = other RNA
aacaacaggattcacggatc

SEQ ID NO: 16939 - RNA, 20 nt, synthetic construct
  source 1..20: mol_type = other RNA
aacacctgcaacaacaggat

SEQ ID NO: 16940 - RNA, 20 nt, synthetic construct
  source 1..20: mol_type = other RNA
aacaggattcacggatcagc

SEQ ID NO: 16941 - RNA, 20 nt, synthetic construct
  source 1..20: mol_type = other RNA
aaccagggtgggcttgggag

SEQ ID NO: 16942 - RNA, 20 nt, synthetic construct
  source 1..20: mol_type = other RNA
aacccactgcggctctcccc

SEQ ID NO: 16943 - RNA, 20 nt, synthetic construct
  source 1..20: mol_type = other RNA
aacctggctctgagtcccat

SEQ ID NO: 16944 - RNA, 20 nt, synthetic construct
  source 1..20: mol_type = other RNA
aagcccaccctggttaccct

SEQ ID NO: 16945 - RNA, 20 nt, synthetic construct
  source 1..20: mol_type = other RNA
aaggggggatgggactcaga

SEQ ID NO: 16946 - RNA, 20 nt, synthetic construct
  source 1..20: mol_type = other RNA
aatcctgttgttgcaggtgt

SEQ ID NO: 16947 - RNA, 20 nt, synthetic construct
  source 1..20: mol_type = other RNA
aatgggatggtgggcgtcca

SEQ ID NO: 16948 - RNA, 20 nt, synthetic construct
  source 1..20: mol_type = other RNA
acaacaggattcacggatca

SEQ ID NO: 16949 - RNA, 20 nt, synthetic construct
  source 1..20: mol_type = other RNA
acacctgcaacaacaggatt

SEQ ID NO: 16950 - RNA, 20 nt, synthetic construct
  source 1..20: mol_type = other RNA
acactgaatgggatggtggg

SEQ ID NO: 16951 - RNA, 20 nt, synthetic construct
  source 1..20: mol_type = other RNA
acagctgggatcatctcagg

SEQ ID NO: 16952 - RNA, 20 nt, synthetic construct
  source 1..20: mol_type = other RNA
acaggattcacggatcagcc

SEQ ID NO: 16953 - RNA, 20 nt, synthetic construct
  source 1..20: mol_type = other RNA
acagggtaaccagggtgggc

SEQ ID NO: 16954 - RNA, 20 nt, synthetic construct
  source 1..20: mol_type = other RNA
acatcctgcaaggggggatg

SEQ ID NO: 16955 - RNA, 20 nt, synthetic construct
  source 1..20: mol_type = other RNA
accagggtgggcttgggagg

SEQ ID NO: 16956 - RNA, 20 nt, synthetic construct
  source 1..20: mol_type = other RNA
accatcccattcagtgtcca

SEQ ID NO: 16957 - RNA, 20 nt, synthetic construct
  source 1..20: mol_type = other RNA
acccactgcggctctcccct

SEQ ID NO: 16958 - RNA, 20 nt, synthetic construct
  source 1..20: mol_type = other RNA
accctggttaccctgtccag

SEQ ID NO: 16959 - RNA, 20 nt, synthetic construct
  source 1..20: mol_type = other RNA
accctgtccagagcacagct

SEQ ID NO: 16960 - RNA, 20 nt, synthetic construct
  source 1..20: mol_type = other RNA
acctgcaacaacaggattca

SEQ ID NO: 16961 - RNA, 20 nt, synthetic construct
  source 1..20: mol_type = other RNA
acctggctctgagtcccatc

SEQ ID NO: 16962 - RNA, 20 nt, synthetic construct
  source 1..20: mol_type = other RNA
acgcccaccatcccattcag

SEQ ID NO: 16963 - RNA, 20 nt, synthetic construct
  source 1..20: mol_type = other RNA
acggatcagcctgagatgat

SEQ ID NO: 16964 - RNA, 20 nt, synthetic construct
  source 1..20: mol_type = other RNA
actcagagccaggttagagg

SEQ ID NO: 16965 - RNA, 20 nt, synthetic construct
  source 1..20: mol_type = other RNA
actgaatgggatggtgggcg

SEQ ID NO: 16966 - RNA, 20 nt, synthetic construct
  source 1..20: mol_type = other RNA
actgcggctctcccctccca

SEQ ID NO: 16967 - RNA, 20 nt, synthetic construct
  source 1..20: mol_type = other RNA
agagcacagctgggatcatc

SEQ ID NO: 16968 - RNA, 20 nt, synthetic construct
  source 1..20: mol_type = other RNA
agatgatcccagctgtgctc

SEQ ID NO: 16969 - RNA, 20 nt, synthetic construct
  source 1..20: mol_type = other RNA
agcacagctgggatcatctc

SEQ ID NO: 16970 - RNA, 20 nt, synthetic construct
  source 1..20: mol_type = other RNA
agcccaccctggttaccctg

SEQ ID NO: 16971 - RNA, 20 nt, synthetic construct
  source 1..20: mol_type = other RNA
agcctgagatgatcccagct

SEQ ID NO: 16972 - RNA, 20 nt, synthetic construct
  source 1..20: mol_type = other RNA
agctgggatcatctcaggct

SEQ ID NO: 16973 - RNA, 20 nt, synthetic construct
  source 1..20: mol_type = other RNA
agctgtgctctggacagggt

SEQ ID NO: 16974 - RNA, 20 nt, synthetic construct
  source 1..20: mol_type = other RNA
aggaacacctgcaacaacag

SEQ ID NO: 16975 - RNA, 20 nt, synthetic construct
  source 1..20: mol_type = other RNA
aggatgtggacgcccaccat

SEQ ID NO: 16976 - RNA, 20 nt, synthetic construct
  source 1..20: mol_type = other RNA
aggattcacggatcagcctg

SEQ ID NO: 16977 - RNA, 20 nt, synthetic construct
  source 1..20: mol_type = other RNA
aggctgatccgtgaatcctg

SEQ ID NO: 16978 - RNA, 20 nt, synthetic construct
  source 1..20: mol_type = other RNA
aggggggatgggactcagag

SEQ ID NO: 16979 - RNA, 20 nt, synthetic construct
  source 1..20: mol_type = other RNA
agggtaaccagggtgggctt

SEQ ID NO: 16980 - RNA, 20 nt, synthetic construct
  source 1..20: mol_type = other RNA
agggtgggcttgggagggga

SEQ ID NO: 16981 - RNA, 20 nt, synthetic construct
  source 1..20: mol_type = other RNA
aggtgttcctggacactgaa

SEQ ID NO: 16982 - RNA, 20 nt, synthetic construct
  source 1..20: mol_type = other RNA
agtcccatccccccttgcag

SEQ ID NO: 16983 - RNA, 20 nt, synthetic construct
  source 1..20: mol_type = other RNA
agtgtccaggaacacctgca

SEQ ID NO: 16984 - RNA, 20 nt, synthetic construct
  source 1..20: mol_type = other RNA
atcagcctgagatgatccca

SEQ ID NO: 16985 - RNA, 20 nt, synthetic construct
  source 1..20: mol_type = other RNA
atcatctcaggctgatccgt

SEQ ID NO: 16986 - RNA, 20 nt, synthetic construct
  source 1..20: mol_type = other RNA
atcccagctgtgctctggac

SEQ ID NO: 16987 - RNA, 20 nt, synthetic construct
  source 1..20: mol_type = other RNA
atcccattcagtgtccagga

SEQ ID NO: 16988 - RNA, 20 nt, synthetic construct
  source 1..20: mol_type = other RNA
atccccccttgcaggatgtg

SEQ ID NO: 16989 - RNA, 20 nt, synthetic construct
  source 1..20: mol_type = other RNA
atccgtgaatcctgttgttg

SEQ ID NO: 16990 - RNA, 20 nt, synthetic construct
  source 1..20: mol_type = other RNA
atcctgcaaggggggatggg

SEQ ID NO: 16991 - RNA, 20 nt, synthetic construct
  source 1..20: mol_type = other RNA
atcctgttgttgcaggtgtt

SEQ ID NO: 16992 - RNA, 20 nt, synthetic construct
  source 1..20: mol_type = other RNA
atctcaggctgatccgtgaa

SEQ ID NO: 16993 - RNA, 20 nt, synthetic construct
  source 1..20: mol_type = other RNA
atgatcccagctgtgctctg

SEQ ID NO: 16994 - RNA, 20 nt, synthetic construct
  source 1..20: mol_type = other RNA
atgggactcagagccaggtt

SEQ ID NO: 16995 - RNA, 20 nt, synthetic construct
  source 1..20: mol_type = other RNA
atgggatggtgggcgtccac

SEQ ID NO: 16996 - RNA, 20 nt, synthetic construct
  source 1..20: mol_type = other RNA
atggtgggcgtccacatcct

SEQ ID NO: 16997 - RNA, 20 nt, synthetic construct
  source 1..20: mol_type = other RNA
atgtggacgcccaccatccc

SEQ ID NO: 16998 - RNA, 20 nt, synthetic construct
  source 1..20: mol_type = other RNA
attcacggatcagcctgaga

SEQ ID NO: 16999 - RNA, 20 nt, synthetic construct
  source 1..20: mol_type = other RNA
attcagtgtccaggaacacc

SEQ ID NO: 17000 - RNA, 20 nt, synthetic construct
  source 1..20: mol_type = other RNA
caacaacaggattcacggat

SEQ ID NO: 17001 - RNA, 20 nt, synthetic construct
  source 1..20: mol_type = other RNA
caacaggattcacggatcag

SEQ ID NO: 17002 - RNA, 20 nt, synthetic construct
  source 1..20: mol_type = other RNA
caacccactgcggctctccc

SEQ ID NO: 17003 - RNA, 20 nt, synthetic construct
  source 1..20: mol_type = other RNA
caagcccaccctggttaccc

SEQ ID NO: 17004 - RNA, 20 nt, synthetic construct
  source 1..20: mol_type = other RNA
caaggggggatgggactcag

SEQ ID NO: 17005 - RNA, 20 nt, synthetic construct
  source 1..20: mol_type = other RNA
cacagctgggatcatctcag

SEQ ID NO: 17006 - RNA, 20 nt, synthetic construct
  source 1..20: mol_type = other RNA
cacatcctgcaaggggggat

SEQ ID NO: 17007 - RNA, 20 nt, synthetic construct
  source 1..20: mol_type = other RNA
caccatcccattcagtgtcc

SEQ ID NO: 17008 - RNA, 20 nt, synthetic construct
  source 1..20: mol_type = other RNA
caccctggttaccctgtcca

SEQ ID NO: 17009 - RNA, 20 nt, synthetic construct
  source 1..20: mol_type = other RNA
cacctgcaacaacaggattc

SEQ ID NO: 17010 - RNA, 20 nt, synthetic construct
  source 1..20: mol_type = other RNA
cacggatcagcctgagatga

SEQ ID NO: 17011 - RNA, 20 nt, synthetic construct
  source 1..20: mol_type = other RNA
cactgaatgggatggtgggc

SEQ ID NO: 17012 - RNA, 20 nt, synthetic construct
  source 1..20: mol_type = other RNA
cactgcggctctcccctccc

SEQ ID NO: 17013 - RNA, 20 nt, synthetic construct
  source 1..20: mol_type = other RNA
cagagcacagctgggatcat

SEQ ID NO: 17014 - RNA, 20 nt, synthetic construct
  source 1..20: mol_type = other RNA
cagcctgagatgatcccagc

SEQ ID NO: 17015 - RNA, 20 nt, synthetic construct
  source 1..20: mol_type = other RNA
cagctgggatcatctcaggc

SEQ ID NO: 17016 - RNA, 20 nt, synthetic construct
  source 1..20: mol_type = other RNA
cagctgtgctctggacaggg

SEQ ID NO: 17017 - RNA, 20 nt, synthetic construct
  source 1..20: mol_type = other RNA
caggaacacctgcaacaaca

SEQ ID NO: 17018 - RNA, 20 nt, synthetic construct
  source 1..20: mol_type = other RNA
caggatgtggacgcccacca

SEQ ID NO: 17019 - RNA, 20 nt, synthetic construct
  source 1..20: mol_type = other RNA
caggattcacggatcagcct

SEQ ID NO: 17020 - RNA, 20 nt, synthetic construct
  source 1..20: mol_type = other RNA
caggctgatccgtgaatcct

SEQ ID NO: 17021 - RNA, 20 nt, synthetic construct
  source 1..20: mol_type = other RNA
cagggtaaccagggtgggct

SEQ ID NO: 17022 - RNA, 20 nt, synthetic construct
  source 1..20: mol_type = other RNA
cagggtgggcttgggagggg

SEQ ID NO: 17023 - RNA, 20 nt, synthetic construct
  source 1..20: mol_type = other RNA
caggtgttcctggacactga

SEQ ID NO: 17024 - RNA, 20 nt, synthetic construct
  source 1..20: mol_type = other RNA
cagtgtccaggaacacctgc

SEQ ID NO: 17025 - RNA, 20 nt, synthetic construct
  source 1..20: mol_type = other RNA
catcccattcagtgtccagg

SEQ ID NO: 17026 - RNA, 20 nt, synthetic construct
  source 1..20: mol_type = other RNA
catccccccttgcaggatgt

SEQ ID NO: 17027 - RNA, 20 nt, synthetic construct
  source 1..20: mol_type = other RNA
catcctgcaaggggggatgg

SEQ ID NO: 17028 - RNA, 20 nt, synthetic construct
  source 1..20: mol_type = other RNA
catctcaggctgatccgtga

SEQ ID NO: 17029 - RNA, 20 nt, synthetic construct
  source 1..20: mol_type = other RNA
cattcagtgtccaggaacac

SEQ ID NO: 17030 - RNA, 20 nt, synthetic construct
  source 1..20: mol_type = other RNA
ccaacccactgcggctctcc

SEQ ID NO: 17031 - RNA, 20 nt, synthetic construct
  source 1..20: mol_type = other RNA
ccaagcccaccctggttacc

SEQ ID NO: 17032 - RNA, 20 nt, synthetic construct
  source 1..20: mol_type = other RNA
ccacatcctgcaagggggga

SEQ ID NO: 17033 - RNA, 20 nt, synthetic construct
  source 1..20: mol_type = other RNA
ccaccatcccattcagtgtc

SEQ ID NO: 17034 - RNA, 20 nt, synthetic construct
  source 1..20: mol_type = other RNA
ccaccctggttaccctgtcc

SEQ ID NO: 17035 - RNA, 20 nt, synthetic construct
  source 1..20: mol_type = other RNA
ccactgcggctctcccctcc

SEQ ID NO: 17036 - RNA, 20 nt, synthetic construct
  source 1..20: mol_type = other RNA
ccagagcacagctgggatca

SEQ ID NO: 17037 - RNA, 20 nt, synthetic construct
  source 1..20: mol_type = other RNA
ccagctgtgctctggacagg

SEQ ID NO: 17038 - RNA, 20 nt, synthetic construct
  source 1..20: mol_type = other RNA
ccaggaacacctgcaacaac

SEQ ID NO: 17039 - RNA, 20 nt, synthetic construct
  source 1..20: mol_type = other RNA
ccagggtgggcttgggaggg

SEQ ID NO: 17040 - RNA, 20 nt, synthetic construct
  source 1..20: mol_type = other RNA
ccatcccattcagtgtccag

SEQ ID NO: 17041 - RNA, 20 nt, synthetic construct
  source 1..20: mol_type = other RNA
ccatccccccttgcaggatg

SEQ ID NO: 17042 - RNA, 20 nt, synthetic construct
  source 1..20: mol_type = other RNA
ccattcagtgtccaggaaca

SEQ ID NO: 17043 - RNA, 20 nt, synthetic construct
  source 1..20: mol_type = other RNA
cccaacccactgcggctctc

SEQ ID NO: 17044 - RNA, 20 nt, synthetic construct
  source 1..20: mol_type = other RNA
cccaagcccaccctggttac

SEQ ID NO: 17045 - RNA, 20 nt, synthetic construct
  source 1..20: mol_type = other RNA
cccaccatcccattcagtgt

SEQ ID NO: 17046 - RNA, 20 nt, synthetic construct
  source 1..20: mol_type = other RNA
cccaccctggttaccctgtc

SEQ ID NO: 17047 - RNA, 20 nt, synthetic construct
  source 1..20: mol_type = other RNA
cccactgcggctctcccctc

SEQ ID NO: 17048 - RNA, 20 nt, synthetic construct
  source 1..20: mol_type = other RNA
cccagctgtgctctggacag

SEQ ID NO: 17049 - RNA, 20 nt, synthetic construct
  source 1..20: mol_type = other RNA
cccatccccccttgcaggat

SEQ ID NO: 17050 - RNA, 20 nt, synthetic construct
  source 1..20: mol_type = other RNA
cccattcagtgtccaggaac

SEQ ID NO: 17051 - RNA, 20 nt, synthetic construct
  source 1..20: mol_type = other RNA
ccccaacccactgcggctct

SEQ ID NO: 17052 - RNA, 20 nt, synthetic construct
  source 1..20: mol_type = other RNA
ccccccttgcaggatgtgga

SEQ ID NO: 17053 - RNA, 20 nt, synthetic construct
  source 1..20: mol_type = other RNA
cccccttgcaggatgtggac

SEQ ID NO: 17054 - RNA, 20 nt, synthetic construct
  source 1..20: mol_type = other RNA
cccctcccaagcccaccctg

SEQ ID NO: 17055 - RNA, 20 nt, synthetic construct
  source 1..20: mol_type = other RNA
ccccttgcaggatgtggacg

SEQ ID NO: 17056 - RNA, 20 nt, synthetic construct
  source 1..20: mol_type = other RNA
ccctcccaagcccaccctgg

SEQ ID NO: 17057 - RNA, 20 nt, synthetic construct
  source 1..20: mol_type = other RNA
ccctctctcctctaacctgg

SEQ ID NO: 17058 - RNA, 20 nt, synthetic construct
  source 1..20: mol_type = other RNA
ccctggttaccctgtccaga

SEQ ID NO: 17059 - RNA, 20 nt, synthetic construct
  source 1..20: mol_type = other RNA
ccctgtccagagcacagctg

SEQ ID NO: 17060 - RNA, 20 nt, synthetic construct
  source 1..20: mol_type = other RNA
cccttgcaggatgtggacgc

SEQ ID NO: 17061 - RNA, 20 nt, synthetic construct
  source 1..20: mol_type = other RNA
ccgtgaatcctgttgttgca

SEQ ID NO: 17062 - RNA, 20 nt, synthetic construct
  source 1..20: mol_type = other RNA
cctcccaagcccaccctggt

SEQ ID NO: 17063 - RNA, 20 nt, synthetic construct
  source 1..20: mol_type = other RNA
cctctaacctggctctgagt

SEQ ID NO: 17064 - RNA, 20 nt, synthetic construct
  source 1..20: mol_type = other RNA
cctctctcctctaacctggc

SEQ ID NO: 17065 - RNA, 20 nt, synthetic construct
  source 1..20: mol_type = other RNA
cctgagatgatcccagctgt

SEQ ID NO: 17066 - RNA, 20 nt, synthetic construct
  source 1..20: mol_type = other RNA
cctgcaacaacaggattcac

SEQ ID NO: 17067 - RNA, 20 nt, synthetic construct
  source 1..20: mol_type = other RNA
cctgcaaggggggatgggac

SEQ ID NO: 17068 - RNA, 20 nt, synthetic construct
  source 1..20: mol_type = other RNA
cctggacactgaatgggatg

SEQ ID NO: 17069 - RNA, 20 nt, synthetic construct
  source 1..20: mol_type = other RNA
cctggctctgagtcccatcc

SEQ ID NO: 17070 - RNA, 20 nt, synthetic construct
  source 1..20: mol_type = other RNA
cctggttaccctgtccagag

SEQ ID NO: 17071 - RNA, 20 nt, synthetic construct
  source 1..20: mol_type = other RNA
cctgtccagagcacagctgg

SEQ ID NO: 17072 - RNA, 20 nt, synthetic construct
  source 1..20: mol_type = other RNA
cctgttgttgcaggtgttcc

SEQ ID NO: 17073 - RNA, 20 nt, synthetic construct
  source 1..20: mol_type = other RNA
ccttgcaggatgtggacgcc

SEQ ID NO: 17074 - RNA, 20 nt, synthetic construct
  source 1..20: mol_type = other RNA
cgcccaccatcccattcagt

SEQ ID NO: 17075 - RNA, 20 nt, synthetic construct
  source 1..20: mol_type = other RNA
cggatcagcctgagatgatc

SEQ ID NO: 17076 - RNA, 20 nt, synthetic construct
  source 1..20: mol_type = other RNA
cggctctcccctcccaagcc

SEQ ID NO: 17077 - RNA, 20 nt, synthetic construct
  source 1..20: mol_type = other RNA
cgtccacatcctgcaagggg

SEQ ID NO: 17078 - RNA, 20 nt, synthetic construct
  source 1..20: mol_type = other RNA
cgtgaatcctgttgttgcag

SEQ ID NO: 17079 - RNA, 20 nt, synthetic construct
  source 1..20: mol_type = other RNA
ctaacctggctctgagtccc

SEQ ID NO: 17080 - RNA, 20 nt, synthetic construct
  source 1..20: mol_type = other RNA
ctcagagccaggttagagga

SEQ ID NO: 17081 - RNA, 20 nt, synthetic construct
  source 1..20: mol_type = other RNA
ctcaggctgatccgtgaatc

SEQ ID NO: 17082 - RNA, 20 nt, synthetic construct
  source 1..20: mol_type = other RNA
ctcccaagcccaccctggtt

SEQ ID NO: 17083 - RNA, 20 nt, synthetic construct
  source 1..20: mol_type = other RNA
ctcccctcccaagcccaccc

SEQ ID NO: 17084 - RNA, 20 nt, synthetic construct
  source 1..20: mol_type = other RNA
ctcctctaacctggctctga

SEQ ID NO: 17085 - RNA, 20 nt, synthetic construct
  source 1..20: mol_type = other RNA
ctctaacctggctctgagtc

SEQ ID NO: 17086 - RNA, 20 nt, synthetic construct
  source 1..20: mol_type = other RNA
ctctcccctcccaagcccac

SEQ ID NO: 17087 - RNA, 20 nt, synthetic construct
  source 1..20: mol_type = other RNA
ctctcctctaacctggctct

SEQ ID NO: 17088 - RNA, 20 nt, synthetic construct
  source 1..20: mol_type = other RNA
ctctctcctctaacctggct

SEQ ID NO: 17089 - RNA, 20 nt, synthetic construct
  source 1..20: mol_type = other RNA
ctctgagtcccatcccccct

SEQ ID NO: 17090 - RNA, 20 nt, synthetic construct
  source 1..20: mol_type = other RNA
ctctggacagggtaaccagg

SEQ ID NO: 17091 - RNA, 20 nt, synthetic construct
  source 1..20: mol_type = other RNA
ctgaatgggatggtgggcgt

SEQ ID NO: 17092 - RNA, 20 nt, synthetic construct
  source 1..20: mol_type = other RNA
ctgagatgatcccagctgtg

SEQ ID NO: 17093 - RNA, 20 nt, synthetic construct
  source 1..20: mol_type = other RNA
ctgagtcccatccccccttg

SEQ ID NO: 17094 - RNA, 20 nt, synthetic construct
  source 1..20: mol_type = other RNA
ctgatccgtgaatcctgttg

SEQ ID NO: 17095 - RNA, 20 nt, synthetic construct
  source 1..20: mol_type = other RNA
ctgcaacaacaggattcacg

SEQ ID NO: 17096 - RNA, 20 nt, synthetic construct
  source 1..20: mol_type = other RNA
ctgcaaggggggatgggact

SEQ ID NO: 17097 - RNA, 20 nt, synthetic construct
  source 1..20: mol_type = other RNA
ctgcggctctcccctcccaa

SEQ ID NO: 17098 - RNA, 20 nt, synthetic construct
  source 1..20: mol_type = other RNA
ctggacactgaatgggatgg

SEQ ID NO: 17099 - RNA, 20 nt, synthetic construct
  source 1..20: mol_type = other RNA
ctggacagggtaaccagggt

SEQ ID NO: 17100 - RNA, 20 nt, synthetic construct
  source 1..20: mol_type = other RNA
ctggctctgagtcccatccc

SEQ ID NO: 17101 - RNA, 20 nt, synthetic construct
  source 1..20: mol_type = other RNA
ctgggatcatctcaggctga

SEQ ID NO: 17102 - RNA, 20 nt, synthetic construct
  source 1..20: mol_type = other RNA
ctggttaccctgtccagagc

SEQ ID NO: 17103 - RNA, 20 nt, synthetic construct
  source 1..20: mol_type = other RNA
ctgtccagagcacagctggg

SEQ ID NO: 17104 - RNA, 20 nt, synthetic construct
  source 1..20: mol_type = other RNA
ctgtgctctggacagggtaa

SEQ ID NO: 17105 - RNA, 20 nt, synthetic construct
  source 1..20: mol_type = other RNA
ctgttgttgcaggtgttcct

SEQ ID NO: 17106 - RNA, 20 nt, synthetic construct
  source 1..20: mol_type = other RNA
cttgcaggatgtggacgccc

SEQ ID NO: 17107 - RNA, 20 nt, synthetic construct
  source 1..20: mol_type = other RNA
cttgggaggggagagccgca

SEQ ID NO: 17108 - RNA, 20 nt, synthetic construct
  source 1..20: mol_type = other RNA
gaacacctgcaacaacagga

SEQ ID NO: 17109 - RNA, 20 nt, synthetic construct
  source 1..20: mol_type = other RNA
gaatcctgttgttgcaggtg

SEQ ID NO: 17110 - RNA, 20 nt, synthetic construct
  source 1..20: mol_type = other RNA
gaatgggatggtgggcgtcc

SEQ ID NO: 17111 - RNA, 20 nt, synthetic construct
  source 1..20: mol_type = other RNA
gacactgaatgggatggtgg

SEQ ID NO: 17112 - RNA, 20 nt, synthetic construct
  source 1..20: mol_type = other RNA
gacagggtaaccagggtggg

SEQ ID NO: 17113 - RNA, 20 nt, synthetic construct
  source 1..20: mol_type = other RNA
gacgcccaccatcccattca

SEQ ID NO: 17114 - RNA, 20 nt, synthetic construct
  source 1..20: mol_type = other RNA
gactcagagccaggttagag

SEQ ID NO: 17115 - RNA, 20 nt, synthetic construct
  source 1..20: mol_type = other RNA
gagatgatcccagctgtgct

SEQ ID NO: 17116 - RNA, 20 nt, synthetic construct
  source 1..20: mol_type = other RNA
gagcacagctgggatcatct

SEQ ID NO: 17117 - RNA, 20 nt, synthetic construct
  source 1..20: mol_type = other RNA
gagtcccatccccccttgca

SEQ ID NO: 17118 - RNA, 20 nt, synthetic construct
  source 1..20: mol_type = other RNA
gatcagcctgagatgatccc

SEQ ID NO: 17119 - RNA, 20 nt, synthetic construct
  source 1..20: mol_type = other RNA
gatcatctcaggctgatccg

SEQ ID NO: 17120 - RNA, 20 nt, synthetic construct
  source 1..20: mol_type = other RNA
gatcccagctgtgctctgga

SEQ ID NO: 17121 - RNA, 20 nt, synthetic construct
  source 1..20: mol_type = other RNA
gatccgtgaatcctgttgtt

SEQ ID NO: 17122 - RNA, 20 nt, synthetic construct
  source 1..20: mol_type = other RNA
gatgatcccagctgtgctct

SEQ ID NO: 17123 - RNA, 20 nt, synthetic construct
  source 1..20: mol_type = other RNA
gatgggactcagagccaggt

SEQ ID NO: 17124 - RNA, 20 nt, synthetic construct
  source 1..20: mol_type = other RNA
gatggtgggcgtccacatcc

SEQ ID NO: 17125 - RNA, 20 nt, synthetic construct
  source 1..20: mol_type = other RNA
gatgtggacgcccaccatcc

SEQ ID NO: 17126 - RNA, 20 nt, synthetic construct
  source 1..20: mol_type = other RNA
gattcacggatcagcctgag

SEQ ID NO: 17127 - RNA, 20 nt, synthetic construct
  source 1..20: mol_type = other RNA
gcaacaacaggattcacgga

SEQ ID NO: 17128 - RNA, 20 nt, synthetic construct
  source 1..20: mol_type = other RNA
gcaaggggggatgggactca

SEQ ID NO: 17129 - RNA, 20 nt, synthetic construct
  source 1..20: mol_type = other RNA
gcacagctgggatcatctca

SEQ ID NO: 17130 - RNA, 20 nt, synthetic construct
  source 1..20: mol_type = other RNA
gcaggatgtggacgcccacc

SEQ ID NO: 17131 - RNA, 20 nt, synthetic construct
  source 1..20: mol_type = other RNA
gcaggtgttcctggacactg

SEQ ID NO: 17132 - RNA, 20 nt, synthetic construct
  source 1..20: mol_type = other RNA
gcccaccatcccattcagtg

SEQ ID NO: 17133 - RNA, 20 nt, synthetic construct
  source 1..20: mol_type = other RNA
gcccaccctggttaccctgt

SEQ ID NO: 17134 - RNA, 20 nt, synthetic construct
  source 1..20: mol_type = other RNA
gccctctctcctctaacctg

SEQ ID NO: 17135 - RNA, 20 nt, synthetic construct
  source 1..20: mol_type = other RNA
gcctgagatgatcccagctg

SEQ ID NO: 17136 - RNA, 20 nt, synthetic construct
  source 1..20: mol_type = other RNA
gcggctctcccctcccaagc

SEQ ID NO: 17137 - RNA, 20 nt, synthetic construct
  source 1..20: mol_type = other RNA
gcgtccacatcctgcaaggg

SEQ ID NO: 17138 - RNA, 20 nt, synthetic construct
  source 1..20: mol_type = other RNA
gctctcccctcccaagccca

SEQ ID NO: 17139 - RNA, 20 nt, synthetic construct
  source 1..20: mol_type = other RNA
gctctgagtcccatcccccc

SEQ ID NO: 17140 - RNA, 20 nt, synthetic construct
  source 1..20: mol_type = other RNA
gctctggacagggtaaccag

SEQ ID NO: 17141 - RNA, 20 nt, synthetic construct
  source 1..20: mol_type = other RNA
gctgatccgtgaatcctgtt

SEQ ID NO: 17142 - RNA, 20 nt, synthetic construct
  source 1..20: mol_type = other RNA
gctgggatcatctcaggctg

SEQ ID NO: 17143 - RNA, 20 nt, synthetic construct
  source 1..20: mol_type = other RNA
gctgtgctctggacagggta

SEQ ID NO: 17144 - RNA, 20 nt, synthetic construct
  source 1..20: mol_type = other RNA
gcttgggaggggagagccgc

SEQ ID NO: 17145 - RNA, 20 nt, synthetic construct
  source 1..20: mol_type = other RNA
ggaacacctgcaacaacagg

SEQ ID NO: 17146 - RNA, 20 nt, synthetic construct
  source 1..20: mol_type = other RNA
ggacactgaatgggatggtg

SEQ ID NO: 17147 - RNA, 20 nt, synthetic construct
  source 1..20: mol_type = other RNA
ggacagggtaaccagggtgg

SEQ ID NO: 17148 - RNA, 20 nt, synthetic construct
  source 1..20: mol_type = other RNA
ggacgcccaccatcccattc

SEQ ID NO: 17149 - RNA, 20 nt, synthetic construct
  source 1..20: mol_type = other RNA
ggactcagagccaggttaga

SEQ ID NO: 17150 - RNA, 20 nt, synthetic construct
  source 1..20: mol_type = other RNA
ggatcagcctgagatgatcc

SEQ ID NO: 17151 - RNA, 20 nt, synthetic construct
  source 1..20: mol_type = other RNA
ggatcatctcaggctgatcc

SEQ ID NO: 17152 - RNA, 20 nt, synthetic construct
  source 1..20: mol_type = other RNA
ggatgggactcagagccagg

SEQ ID NO: 17153 - RNA, 20 nt, synthetic construct
  source 1..20: mol_type = other RNA
ggatggtgggcgtccacatc

SEQ ID NO: 17154 - RNA, 20 nt, synthetic construct
  source 1..20: mol_type = other RNA
ggatgtggacgcccaccatc

SEQ ID NO: 17155 - RNA, 20 nt, synthetic construct
  source 1..20: mol_type = other RNA
ggattcacggatcagcctga

SEQ ID NO: 17156 - RNA, 20 nt, synthetic construct
  source 1..20: mol_type = other RNA
ggcgtccacatcctgcaagg

SEQ ID NO: 17157 - RNA, 20 nt, synthetic construct
  source 1..20: mol_type = other RNA
ggctctcccctcccaagccc

SEQ ID NO: 17158 - RNA, 20 nt, synthetic construct
  source 1..20: mol_type = other RNA
ggctctgagtcccatccccc

SEQ ID NO: 17159 - RNA, 20 nt, synthetic construct
  source 1..20: mol_type = other RNA
ggctgatccgtgaatcctgt

SEQ ID NO: 17160 - RNA, 20 nt, synthetic construct
  source 1..20: mol_type = other RNA
ggcttgggaggggagagccg

SEQ ID NO: 17161 - RNA, 20 nt, synthetic construct
  source 1..20: mol_type = other RNA
gggactcagagccaggttag

SEQ ID NO: 17162 - RNA, 20 nt, synthetic construct
  source 1..20: mol_type = other RNA
gggaggggagagccgcagtg

SEQ ID NO: 17163 - RNA, 20 nt, synthetic construct
  source 1..20: mol_type = other RNA
gggatcatctcaggctgatc

SEQ ID NO: 17164 - RNA, 20 nt, synthetic construct
  source 1..20: mol_type = other RNA
gggatgggactcagagccag

SEQ ID NO: 17165 - RNA, 20 nt, synthetic construct
  source 1..20: mol_type = other RNA
gggatggtgggcgtccacat

SEQ ID NO: 17166 - RNA, 20 nt, synthetic construct
  source 1..20: mol_type = other RNA
gggcgtccacatcctgcaag

SEQ ID NO: 17167 - RNA, 20 nt, synthetic construct
  source 1..20: mol_type = other RNA
gggcttgggaggggagagcc

SEQ ID NO: 17168 - RNA, 20 nt, synthetic construct
  source 1..20: mol_type = other RNA
ggggatgggactcagagcca

SEQ ID NO: 17169 - RNA, 20 nt, synthetic construct
  source 1..20: mol_type = other RNA
gggggatgggactcagagcc

SEQ ID NO: 17170 - RNA, 20 nt, synthetic construct
  source 1..20: mol_type = other RNA
ggggggatgggactcagagc

SEQ ID NO: 17171 - RNA, 20 nt, synthetic construct
  source 1..20: mol_type = other RNA
gggtaaccagggtgggcttg

SEQ ID NO: 17172 - RNA, 20 nt, synthetic construct
  source 1..20: mol_type = other RNA
gggtgggcttgggaggggag

SEQ ID NO: 17173 - RNA, 20 nt, synthetic construct
  source 1..20: mol_type = other RNA
ggtaaccagggtgggcttgg

SEQ ID NO: 17174 - RNA, 20 nt, synthetic construct
  source 1..20: mol_type = other RNA
ggtgggcgtccacatcctgc

SEQ ID NO: 17175 - RNA, 20 nt, synthetic construct
  source 1..20: mol_type = other RNA
ggtgggcttgggaggggaga

SEQ ID NO: 17176 - RNA, 20 nt, synthetic construct
  source 1..20: mol_type = other RNA
ggtgttcctggacactgaat

SEQ ID NO: 17177 - RNA, 20 nt, synthetic construct
  source 1..20: mol_type = other RNA
ggttaccctgtccagagcac

SEQ ID NO: 17178 - RNA, 20 nt, synthetic construct
  source 1..20: mol_type = other RNA
gtaaccagggtgggcttggg

SEQ ID NO: 17179 - RNA, 20 nt, synthetic construct
  source 1..20: mol_type = other RNA
gtccacatcctgcaaggggg

SEQ ID NO: 17180 - RNA, 20 nt, synthetic construct
  source 1..20: mol_type = other RNA
gtccagagcacagctgggat

SEQ ID NO: 17181 - RNA, 20 nt, synthetic construct
  source 1..20: mol_type = other RNA
gtccaggaacacctgcaaca

SEQ ID NO: 17182 - RNA, 20 nt, synthetic construct
  source 1..20: mol_type = other RNA
gtcccatccccccttgcagg

SEQ ID NO: 17183 - RNA, 20 nt, synthetic construct
  source 1..20: mol_type = other RNA
gtgaatcctgttgttgcagg

SEQ ID NO: 17184 - RNA, 20 nt, synthetic construct
  source 1..20: mol_type = other RNA
gtgctctggacagggtaacc

SEQ ID NO: 17185 - RNA, 20 nt, synthetic construct
  source 1..20: mol_type = other RNA
gtggacgcccaccatcccat

SEQ ID NO: 17186 - RNA, 20 nt, synthetic construct
  source 1..20: mol_type = other RNA
gtgggcgtccacatcctgca

SEQ ID NO: 17187 - RNA, 20 nt, synthetic construct
  source 1..20: mol_type = other RNA
gtgggcttgggaggggagag

SEQ ID NO: 17188 - RNA, 20 nt, synthetic construct
  source 1..20: mol_type = other RNA
gtgtccaggaacacctgcaa

SEQ ID NO: 17189 - RNA, 20 nt, synthetic construct
  source 1..20: mol_type = other RNA
gtgttcctggacactgaatg

SEQ ID NO: 17190 - RNA, 20 nt, synthetic construct
  source 1..20: mol_type = other RNA
gttaccctgtccagagcaca

SEQ ID NO: 17191 - RNA, 20 nt, synthetic construct
  source 1..20: mol_type = other RNA
gttcctggacactgaatggg

SEQ ID NO: 17192 - RNA, 20 nt, synthetic construct
  source 1..20: mol_type = other RNA
gttgcaggtgttcctggaca

SEQ ID NO: 17193 - RNA, 20 nt, synthetic construct
  source 1..20: mol_type = other RNA
gttgttgcaggtgttcctgg

SEQ ID NO: 17194 - RNA, 20 nt, synthetic construct
  source 1..20: mol_type = other RNA
taaccagggtgggcttggga

SEQ ID NO: 17195 - RNA, 20 nt, synthetic construct
  source 1..20: mol_type = other RNA
taacctggctctgagtccca

SEQ ID NO: 17196 - RNA, 20 nt, synthetic construct
  source 1..20: mol_type = other RNA
taccctgtccagagcacagc

SEQ ID NO: 17197 - RNA, 20 nt, synthetic construct
  source 1..20: mol_type = other RNA
tcacggatcagcctgagatg

SEQ ID NO: 17198 - RNA, 20 nt, synthetic construct
  source 1..20: mol_type = other RNA
tcagcctgagatgatcccag

SEQ ID NO: 17199 - RNA, 20 nt, synthetic construct
  source 1..20: mol_type = other RNA
tcaggctgatccgtgaatcc

SEQ ID NO: 17200 - RNA, 20 nt, synthetic construct
  source 1..20: mol_type = other RNA
tcagtgtccaggaacacctg

SEQ ID NO: 17201 - RNA, 20 nt, synthetic construct
  source 1..20: mol_type = other RNA
tcatctcaggctgatccgtg

SEQ ID NO: 17202 - RNA, 20 nt, synthetic construct
  source 1..20: mol_type = other RNA
tccacatcctgcaagggggg

SEQ ID NO: 17203 - RNA, 20 nt, synthetic construct
  source 1..20: mol_type = other RNA
tccagagcacagctgggatc

SEQ ID NO: 17204 - RNA, 20 nt, synthetic construct
  source 1..20: mol_type = other RNA
tccaggaacacctgcaacaa

SEQ ID NO: 17205 - RNA, 20 nt, synthetic construct
  source 1..20: mol_type = other RNA
tcccaagcccaccctggtta

SEQ ID NO: 17206 - RNA, 20 nt, synthetic construct
  source 1..20: mol_type = other RNA
tcccagctgtgctctggaca

SEQ ID NO: 17207 - RNA, 20 nt, synthetic construct
  source 1..20: mol_type = other RNA
tcccatccccccttgcagga

SEQ ID NO: 17208 - RNA, 20 nt, synthetic construct
  source 1..20: mol_type = other RNA
tcccattcagtgtccaggaa

SEQ ID NO: 17209 - RNA, 20 nt, synthetic construct
  source 1..20: mol_type = other RNA
tccccccttgcaggatgtgg

SEQ ID NO: 17210 - RNA, 20 nt, synthetic construct
  source 1..20: mol_type = other RNA
tcccctcccaagcccaccct

SEQ ID NO: 17211 - RNA, 20 nt, synthetic construct
  source 1..20: mol_type = other RNA
tccgtgaatcctgttgttgc

SEQ ID NO: 17212 - RNA, 20 nt, synthetic construct
  source 1..20: mol_type = other RNA
tcctctaacctggctctgag

SEQ ID NO: 17213 - RNA, 20 nt, synthetic construct
  source 1..20: mol_type = other RNA
tcctgcaaggggggatggga

SEQ ID NO: 17214 - RNA, 20 nt, synthetic construct
  source 1..20: mol_type = other RNA
tcctggacactgaatgggat

SEQ ID NO: 17215 - RNA, 20 nt, synthetic construct
  source 1..20: mol_type = other RNA
tcctgttgttgcaggtgttc

SEQ ID NO: 17216 - RNA, 20 nt, synthetic construct
  source 1..20: mol_type = other RNA
tctaacctggctctgagtcc

SEQ ID NO: 17217 - RNA, 20 nt, synthetic construct
  source 1..20: mol_type = other RNA
tctcaggctgatccgtgaat

SEQ ID NO: 17218 - RNA, 20 nt, synthetic construct
  source 1..20: mol_type = other RNA
tctcccctcccaagcccacc

SEQ ID NO: 17219 - RNA, 20 nt, synthetic construct
  source 1..20: mol_type = other RNA
tctcctctaacctggctctg

SEQ ID NO: 17220 - RNA, 20 nt, synthetic construct
  source 1..20: mol_type = other RNA
tctctcctctaacctggctc

SEQ ID NO: 17221 - RNA, 20 nt, synthetic construct
  source 1..20: mol_type = other RNA
tctgagtcccatcccccctt

SEQ ID NO: 17222 - RNA, 20 nt, synthetic construct
  source 1..20: mol_type = other RNA
tctggacagggtaaccaggg

SEQ ID NO: 17223 - RNA, 20 nt, synthetic construct
  source 1..20: mol_type = other RNA
tgaatcctgttgttgcaggt

SEQ ID NO: 17224 - RNA, 20 nt, synthetic construct
  source 1..20: mol_type = other RNA
tgaatgggatggtgggcgtc

SEQ ID NO: 17225 - RNA, 20 nt, synthetic construct
  source 1..20: mol_type = other RNA
tgagatgatcccagctgtgc

SEQ ID NO: 17226 - RNA, 20 nt, synthetic construct
  source 1..20: mol_type = other RNA
tgagtcccatccccccttgc

SEQ ID NO: 17227 - RNA, 20 nt, synthetic construct
  source 1..20: mol_type = other RNA
tgatcccagctgtgctctgg

SEQ ID NO: 17228 - RNA, 20 nt, synthetic construct
  source 1..20: mol_type = other RNA
tgatccgtgaatcctgttgt

SEQ ID NO: 17229 - RNA, 20 nt, synthetic construct
  source 1..20: mol_type = other RNA
tgcaacaacaggattcacgg

SEQ ID NO: 17230 - RNA, 20 nt, synthetic construct
  source 1..20: mol_type = other RNA
tgcaaggggggatgggactc

SEQ ID NO: 17231 - RNA, 20 nt, synthetic construct
  source 1..20: mol_type = other RNA
tgcaggatgtggacgcccac

SEQ ID NO: 17232 - RNA, 20 nt, synthetic construct
  source 1..20: mol_type = other RNA
tgcaggtgttcctggacact

SEQ ID NO: 17233 - RNA, 20 nt, synthetic construct
  source 1..20: mol_type = other RNA
tgcggctctcccctcccaag

SEQ ID NO: 17234 - RNA, 20 nt, synthetic construct
  source 1..20: mol_type = other RNA
tgctctggacagggtaacca

SEQ ID NO: 17235 - RNA, 20 nt, synthetic construct
  source 1..20: mol_type = other RNA
tggacactgaatgggatggt

SEQ ID NO: 17236 - RNA, 20 nt, synthetic construct
  source 1..20: mol_type = other RNA
tggacagggtaaccagggtg

SEQ ID NO: 17237 - RNA, 20 nt, synthetic construct
  source 1..20: mol_type = other RNA
tggacgcccaccatcccatt

SEQ ID NO: 17238 - RNA, 20 nt, synthetic construct
  source 1..20: mol_type = other RNA
tggctctgagtcccatcccc

SEQ ID NO: 17239 - RNA, 20 nt, synthetic construct
  source 1..20: mol_type = other RNA
tgggactcagagccaggtta

SEQ ID NO: 17240 - RNA, 20 nt, synthetic construct
  source 1..20: mol_type = other RNA
tgggaggggagagccgcagt

SEQ ID NO: 17241 - RNA, 20 nt, synthetic construct
  source 1..20: mol_type = other RNA
tgggatcatctcaggctgat

SEQ ID NO: 17242 - RNA, 20 nt, synthetic construct
  source 1..20: mol_type = other RNA
tgggatggtgggcgtccaca

SEQ ID NO: 17243 - RNA, 20 nt, synthetic construct
  source 1..20: mol_type = other RNA
tgggcgtccacatcctgcaa

SEQ ID NO: 17244 - RNA, 20 nt, synthetic construct
  source 1..20: mol_type = other RNA
tgggcttgggaggggagagc

SEQ ID NO: 17245 - RNA, 20 nt, synthetic construct
  source 1..20: mol_type = other RNA
tggtgggcgtccacatcctg

SEQ ID NO: 17246 - RNA, 20 nt, synthetic construct
  source 1..20: mol_type = other RNA
tggttaccctgtccagagca

SEQ ID NO: 17247 - RNA, 20 nt, synthetic construct
  source 1..20: mol_type = other RNA
tgtccagagcacagctggga

SEQ ID NO: 17248 - RNA, 20 nt, synthetic construct
  source 1..20: mol_type = other RNA
tgtccaggaacacctgcaac

SEQ ID NO: 17249 - RNA, 20 nt, synthetic construct
  source 1..20: mol_type = other RNA
tgtgctctggacagggtaac

SEQ ID NO: 17250 - RNA, 20 nt, synthetic construct
  source 1..20: mol_type = other RNA
tgtggacgcccaccatccca

SEQ ID NO: 17251 - RNA, 20 nt, synthetic construct
  source 1..20: mol_type = other RNA
tgttcctggacactgaatgg

SEQ ID NO: 17252 - RNA, 20 nt, synthetic construct
  source 1..20: mol_type = other RNA
tgttgcaggtgttcctggac

SEQ ID NO: 17253 - RNA, 20 nt, synthetic construct
  source 1..20: mol_type = other RNA
tgttgttgcaggtgttcctg

SEQ ID NO: 17254 - RNA, 20 nt, synthetic construct
  source 1..20: mol_type = other RNA
ttaccctgtccagagcacag

SEQ ID NO: 17255 - RNA, 20 nt, synthetic construct
  source 1..20: mol_type = other RNA
ttcacggatcagcctgagat

SEQ ID NO: 17256 - RNA, 20 nt, synthetic construct
  source 1..20: mol_type = other RNA
ttcagtgtccaggaacacct

SEQ ID NO: 17257 - RNA, 20 nt, synthetic construct
  source 1..20: mol_type = other RNA
ttcctggacactgaatggga

SEQ ID NO: 17258 - RNA, 20 nt, synthetic construct
  source 1..20: mol_type = other RNA
ttgcaggatgtggacgccca

SEQ ID NO: 17259 - RNA, 20 nt, synthetic construct
  source 1..20: mol_type = other RNA
ttgcaggtgttcctggacac

SEQ ID NO: 17260 - RNA, 20 nt, synthetic construct
  source 1..20: mol_type = other RNA
ttgggaggggagagccgcag

SEQ ID NO: 17261 - RNA, 20 nt, synthetic construct
  source 1..20: mol_type = other RNA
ttgttgcaggtgttcctgga

SEQ ID NO: 17262 - RNA, 21 nt, synthetic construct
  source 1..21: mol_type = other RNA
aacaacaggattcacggatca

SEQ ID NO: 17263 - RNA, 21 nt, synthetic construct
  source 1..21: mol_type = other RNA
aacacctgcaacaacaggatt

SEQ ID NO: 17264 - RNA, 21 nt, synthetic construct
  source 1..21: mol_type = other RNA
aacaggattcacggatcagcc

SEQ ID NO: 17265 - RNA, 21 nt, synthetic construct
  source 1..21: mol_type = other RNA
aaccagggtgggcttgggagg

SEQ ID NO: 17266 - RNA, 21 nt, synthetic construct
  source 1..21: mol_type = other RNA
aacccactgcggctctcccct

SEQ ID NO: 17267 - RNA, 21 nt, synthetic construct
  source 1..21: mol_type = other RNA
aacctggctctgagtcccatc

SEQ ID NO: 17268 - RNA, 21 nt, synthetic construct
  source 1..21: mol_type = other RNA
aagcccaccctggttaccctg

SEQ ID NO: 17269 - RNA, 21 nt, synthetic construct
  source 1..21: mol_type = other RNA
aaggggggatgggactcagag

SEQ ID NO: 17270 - RNA, 21 nt, synthetic construct
  source 1..21: mol_type = other RNA
aatcctgttgttgcaggtgtt

SEQ ID NO: 17271 - RNA, 21 nt, synthetic construct
  source 1..21: mol_type = other RNA
aatgggatggtgggcgtccac

SEQ ID NO: 17272 - RNA, 21 nt, synthetic construct
  source 1..21: mol_type = other RNA
acaacaggattcacggatcag

SEQ ID NO: 17273 - RNA, 21 nt, synthetic construct
  source 1..21: mol_type = other RNA
acacctgcaacaacaggattc

SEQ ID NO: 17274 - RNA, 21 nt, synthetic construct
  source 1..21: mol_type = other RNA
acactgaatgggatggtgggc

SEQ ID NO: 17275 - RNA, 21 nt, synthetic construct
  source 1..21: mol_type = other RNA
acagctgggatcatctcaggc

SEQ ID NO: 17276 - RNA, 21 nt, synthetic construct
  source 1..21: mol_type = other RNA
acaggattcacggatcagcct

SEQ ID NO: 17277 - RNA, 21 nt, synthetic construct
  source 1..21: mol_type = other RNA
acagggtaaccagggtgggct

SEQ ID NO: 17278 - RNA, 21 nt, synthetic construct
  source 1..21: mol_type = other RNA
acatcctgcaaggggggatgg

SEQ ID NO: 17279 - RNA, 21 nt, synthetic construct
  source 1..21: mol_type = other RNA
accagggtgggcttgggaggg

SEQ ID NO: 17280 - RNA, 21 nt, synthetic construct
  source 1..21: mol_type = other RNA
accatcccattcagtgtccag

SEQ ID NO: 17281 - RNA, 21 nt, synthetic construct
  source 1..21: mol_type = other RNA
acccactgcggctctcccctc

SEQ ID NO: 17282 - RNA, 21 nt, synthetic construct
  source 1..21: mol_type = other RNA
accctggttaccctgtccaga

SEQ ID NO: 17283 - RNA, 21 nt, synthetic construct
  source 1..21: mol_type = other RNA
accctgtccagagcacagctg

SEQ ID NO: 17284 - RNA, 21 nt, synthetic construct
  source 1..21: mol_type = other RNA
acctgcaacaacaggattcac

SEQ ID NO: 17285 - RNA, 21 nt, synthetic construct
  source 1..21: mol_type = other RNA
acctggctctgagtcccatcc

SEQ ID NO: 17286 - RNA, 21 nt, synthetic construct
  source 1..21: mol_type = other RNA
acgcccaccatcccattcagt

SEQ ID NO: 17287 - RNA, 21 nt, synthetic construct
  source 1..21: mol_type = other RNA
acggatcagcctgagatgatc

SEQ ID NO: 17288 - RNA, 21 nt, synthetic construct
  source 1..21: mol_type = other RNA
actcagagccaggttagagga

SEQ ID NO: 17289 - RNA, 21 nt, synthetic construct
  source 1..21: mol_type = other RNA
actgaatgggatggtgggcgt

SEQ ID NO: 17290 - RNA, 21 nt, synthetic construct
  source 1..21: mol_type = other RNA
actgcggctctcccctcccaa

SEQ ID NO: 17291 - RNA, 21 nt, synthetic construct
  source 1..21: mol_type = other RNA
agagcacagctgggatcatct

SEQ ID NO: 17292 - RNA, 21 nt, synthetic construct
  source 1..21: mol_type = other RNA
agatgatcccagctgtgctct

SEQ ID NO: 17293 - RNA, 21 nt, synthetic construct
  source 1..21: mol_type = other RNA
agcacagctgggatcatctca

SEQ ID NO: 17294 - RNA, 21 nt, synthetic construct
  source 1..21: mol_type = other RNA
agcccaccctggttaccctgt

SEQ ID NO: 17295 - RNA, 21 nt, synthetic construct
  source 1..21: mol_type = other RNA
agcctgagatgatcccagctg

SEQ ID NO: 17296 - RNA, 21 nt, synthetic construct
  source 1..21: mol_type = other RNA
agctgggatcatctcaggctg

SEQ ID NO: 17297 - RNA, 21 nt, synthetic construct
  source 1..21: mol_type = other RNA
agctgtgctctggacagggta

SEQ ID NO: 17298 - RNA, 21 nt, synthetic construct
  source 1..21: mol_type = other RNA
aggaacacctgcaacaacagg

SEQ ID NO: 17299 - RNA, 21 nt, synthetic construct
  source 1..21: mol_type = other RNA
aggatgtggacgcccaccatc

SEQ ID NO: 17300 - RNA, 21 nt, synthetic construct
  source 1..21: mol_type = other RNA
aggattcacggatcagcctga

SEQ ID NO: 17301 - RNA, 21 nt, synthetic construct
  source 1..21: mol_type = other RNA
aggctgatccgtgaatcctgt

SEQ ID NO: 17302 - RNA, 21 nt, synthetic construct
  source 1..21: mol_type = other RNA
aggggggatgggactcagagc

SEQ ID NO: 17303 - RNA, 21 nt, synthetic construct
  source 1..21: mol_type = other RNA
agggtaaccagggtgggcttg

SEQ ID NO: 17304 - RNA, 21 nt, synthetic construct
  source 1..21: mol_type = other RNA
agggtgggcttgggaggggag

SEQ ID NO: 17305 - RNA, 21 nt, synthetic construct
  source 1..21: mol_type = other RNA
aggtgttcctggacactgaat

SEQ ID NO: 17306 - RNA, 21 nt, synthetic construct
  source 1..21: mol_type = other RNA
agtcccatccccccttgcagg

SEQ ID NO: 17307 - RNA, 21 nt, synthetic construct
  source 1..21: mol_type = other RNA
agtgtccaggaacacctgcaa

SEQ ID NO: 17308 - RNA, 21 nt, synthetic construct
  source 1..21: mol_type = other RNA
atcagcctgagatgatcccag

SEQ ID NO: 17309 - RNA, 21 nt, synthetic construct
  source 1..21: mol_type = other RNA
atcatctcaggctgatccgtg

SEQ ID NO: 17310 - RNA, 21 nt, synthetic construct
  source 1..21: mol_type = other RNA
atcccagctgtgctctggaca

SEQ ID NO: 17311 - RNA, 21 nt, synthetic construct
  source 1..21: mol_type = other RNA
atcccattcagtgtccaggaa

SEQ ID NO: 17312 - RNA, 21 nt, synthetic construct
  source 1..21: mol_type = other RNA
atccccccttgcaggatgtgg

SEQ ID NO: 17313 - RNA, 21 nt, synthetic construct
  source 1..21: mol_type = other RNA
atccgtgaatcctgttgttgc

SEQ ID NO: 17314 - RNA, 21 nt, synthetic construct
  source 1..21: mol_type = other RNA
atcctgcaaggggggatggga

SEQ ID NO: 17315 - RNA, 21 nt, synthetic construct
  source 1..21: mol_type = other RNA
atcctgttgttgcaggtgttc

SEQ ID NO: 17316 - RNA, 21 nt, synthetic construct
  source 1..21: mol_type = other RNA
atctcaggctgatccgtgaat

SEQ ID NO: 17317 - RNA, 21 nt, synthetic construct
  source 1..21: mol_type = other RNA
atgatcccagctgtgctctgg

SEQ ID NO: 17318 - RNA, 21 nt, synthetic construct
  source 1..21: mol_type = other RNA
atgggactcagagccaggtta

SEQ ID NO: 17319 - RNA, 21 nt, synthetic construct
  source 1..21: mol_type = other RNA
atgggatggtgggcgtccaca

SEQ ID NO: 17320 - RNA, 21 nt, synthetic construct
  source 1..21: mol_type = other RNA
atggtgggcgtccacatcctg

SEQ ID NO: 17321 - RNA, 21 nt, synthetic construct
  source 1..21: mol_type = other RNA
atgtggacgcccaccatccca

SEQ ID NO: 17322 - RNA, 21 nt, synthetic construct
  source 1..21: mol_type = other RNA
attcacggatcagcctgagat

SEQ ID NO: 17323 - RNA, 21 nt, synthetic construct
  source 1..21: mol_type = other RNA
attcagtgtccaggaacacct

SEQ ID NO: 17324 - RNA, 21 nt, synthetic construct
  source 1..21: mol_type = other RNA
caacaacaggattcacggatc

SEQ ID NO: 17325 - RNA, 21 nt, synthetic construct
  source 1..21: mol_type = other RNA
caacaggattcacggatcagc

SEQ ID NO: 17326 - RNA, 21 nt, synthetic construct
  source 1..21: mol_type = other RNA
caacccactgcggctctcccc

SEQ ID NO: 17327 - RNA, 21 nt, synthetic construct
  source 1..21: mol_type = other RNA
caagcccaccctggttaccct

SEQ ID NO: 17328 - RNA, 21 nt, synthetic construct
  source 1..21: mol_type = other RNA
caaggggggatgggactcaga

SEQ ID NO: 17329 - RNA, 21 nt, synthetic construct
  source 1..21: mol_type = other RNA
cacagctgggatcatctcagg

SEQ ID NO: 17330 - RNA, 21 nt, synthetic construct
  source 1..21: mol_type = other RNA
cacatcctgcaaggggggatg

SEQ ID NO: 17331 - RNA, 21 nt, synthetic construct
  source 1..21: mol_type = other RNA
caccatcccattcagtgtcca

SEQ ID NO: 17332 - RNA, 21 nt, synthetic construct
  source 1..21: mol_type = other RNA
caccctggttaccctgtccag

SEQ ID NO: 17333 - RNA, 21 nt, synthetic construct
  source 1..21: mol_type = other RNA
cacctgcaacaacaggattca

SEQ ID NO: 17334 - RNA, 21 nt, synthetic construct
  source 1..21: mol_type = other RNA
cacggatcagcctgagatgat

SEQ ID NO: 17335 - RNA, 21 nt, synthetic construct
  source 1..21: mol_type = other RNA
cactgaatgggatggtgggcg

SEQ ID NO: 17336 - RNA, 21 nt, synthetic construct
  source 1..21: mol_type = other RNA
cactgcggctctcccctccca

SEQ ID NO: 17337 - RNA, 21 nt, synthetic construct
  source 1..21: mol_type = other RNA
cagagcacagctgggatcatc

SEQ ID NO: 17338 - RNA, 21 nt, synthetic construct
  source 1..21: mol_type = other RNA
cagcctgagatgatcccagct

SEQ ID NO: 17339 - RNA, 21 nt, synthetic construct
  source 1..21: mol_type = other RNA
cagctgggatcatctcaggct

SEQ ID NO: 17340 - RNA, 21 nt, synthetic construct
  source 1..21: mol_type = other RNA
cagctgtgctctggacagggt

SEQ ID NO: 17341 - RNA, 21 nt, synthetic construct
  source 1..21: mol_type = other RNA
caggaacacctgcaacaacag

SEQ ID NO: 17342 - RNA, 21 nt, synthetic construct
  source 1..21: mol_type = other RNA
caggatgtggacgcccaccat

SEQ ID NO: 17343 - RNA, 21 nt, synthetic construct
  source 1..21: mol_type = other RNA
caggattcacggatcagcctg

SEQ ID NO: 17344 - RNA, 21 nt, synthetic construct
  source 1..21: mol_type = other RNA
caggctgatccgtgaatcctg

SEQ ID NO: 17345 - RNA, 21 nt, synthetic construct
  source 1..21: mol_type = other RNA
cagggtaaccagggtgggctt

SEQ ID NO: 17346 - RNA, 21 nt, synthetic construct
  source 1..21: mol_type = other RNA
cagggtgggcttgggagggga

SEQ ID NO: 17347 - RNA, 21 nt, synthetic construct
  source 1..21: mol_type = other RNA
caggtgttcctggacactgaa

SEQ ID NO: 17348 - RNA, 21 nt, synthetic construct
  source 1..21: mol_type = other RNA
cagtgtccaggaacacctgca

SEQ ID NO: 17349 - RNA, 21 nt, synthetic construct
  source 1..21: mol_type = other RNA
catcccattcagtgtccagga

SEQ ID NO: 17350 - RNA, 21 nt, synthetic construct
  source 1..21: mol_type = other RNA
catccccccttgcaggatgtg

SEQ ID NO: 17351 - RNA, 21 nt, synthetic construct
  source 1..21: mol_type = other RNA
catcctgcaaggggggatggg

SEQ ID NO: 17352 - RNA, 21 nt, synthetic construct
  source 1..21: mol_type = other RNA
catctcaggctgatccgtgaa

SEQ ID NO: 17353 - RNA, 21 nt, synthetic construct
  source 1..21: mol_type = other RNA
cattcagtgtccaggaacacc

SEQ ID NO: 17354 - RNA, 21 nt, synthetic construct
  source 1..21: mol_type = other RNA
ccaacccactgcggctctccc

SEQ ID NO: 17355 - RNA, 21 nt, synthetic construct
  source 1..21: mol_type = other RNA
ccaagcccaccctggttaccc

SEQ ID NO: 17356 - RNA, 21 nt, synthetic construct
  source 1..21: mol_type = other RNA
ccacatcctgcaaggggggat

SEQ ID NO: 17357 - RNA, 21 nt, synthetic construct
  source 1..21: mol_type = other RNA
ccaccatcccattcagtgtcc

SEQ ID NO: 17358 - RNA, 21 nt, synthetic construct
  source 1..21: mol_type = other RNA
ccaccctggttaccctgtcca

SEQ ID NO: 17359 - RNA, 21 nt, synthetic construct
  source 1..21: mol_type = other RNA
ccactgcggctctcccctccc

SEQ ID NO: 17360 - RNA, 21 nt, synthetic construct
  source 1..21: mol_type = other RNA
ccagagcacagctgggatcat

SEQ ID NO: 17361 - RNA, 21 nt, synthetic construct
  source 1..21: mol_type = other RNA
ccagctgtgctctggacaggg

SEQ ID NO: 17362 - RNA, 21 nt, synthetic construct
  source 1..21: mol_type = other RNA
ccaggaacacctgcaacaaca

SEQ ID NO: 17363 - RNA, 21 nt, synthetic construct
  source 1..21: mol_type = other RNA
ccagggtgggcttgggagggg

SEQ ID NO: 17364 - RNA, 21 nt, synthetic construct
  source 1..21: mol_type = other RNA
ccatcccattcagtgtccagg

SEQ ID NO: 17365 - RNA, 21 nt, synthetic construct
  source 1..21: mol_type = other RNA
ccatccccccttgcaggatgt

SEQ ID NO: 17366 - RNA, 21 nt, synthetic construct
  source 1..21: mol_type = other RNA
ccattcagtgtccaggaacac

SEQ ID NO: 17367 - RNA, 21 nt, synthetic construct
  source 1..21: mol_type = other RNA
cccaacccactgcggctctcc

SEQ ID NO: 17368 - RNA, 21 nt, synthetic construct
  source 1..21: mol_type = other RNA
cccaagcccaccctggttacc

SEQ ID NO: 17369 - RNA, 21 nt, synthetic construct
  source 1..21: mol_type = other RNA
cccaccatcccattcagtgtc

SEQ ID NO: 17370 - RNA, 21 nt, synthetic construct
  source 1..21: mol_type = other RNA
cccaccctggttaccctgtcc

SEQ ID NO: 17371 - RNA, 21 nt, synthetic construct
  source 1..21: mol_type = other RNA
cccactgcggctctcccctcc

SEQ ID NO: 17372 - RNA, 21 nt, synthetic construct
  source 1..21: mol_type = other RNA
cccagctgtgctctggacagg

SEQ ID NO: 17373 - RNA, 21 nt, synthetic construct
  source 1..21: mol_type = other RNA
cccatccccccttgcaggatg

SEQ ID NO: 17374 - RNA, 21 nt, synthetic construct
  source 1..21: mol_type = other RNA
cccattcagtgtccaggaaca

SEQ ID NO: 17375 - RNA, 21 nt, synthetic construct
  source 1..21: mol_type = other RNA
ccccaacccactgcggctctc

SEQ ID NO: 17376 - RNA, 21 nt, synthetic construct
  source 1..21: mol_type = other RNA
ccccccttgcaggatgtggac

SEQ ID NO: 17377 - RNA, 21 nt, synthetic construct
  source 1..21: mol_type = other RNA
cccccttgcaggatgtggacg

SEQ ID NO: 17378 - RNA, 21 nt, synthetic construct
  source 1..21: mol_type = other RNA
cccctcccaagcccaccctgg

SEQ ID NO: 17379 - RNA, 21 nt, synthetic construct
  source 1..21: mol_type = other RNA
ccccttgcaggatgtggacgc

SEQ ID NO: 17380 - RNA, 21 nt, synthetic construct
  source 1..21: mol_type = other RNA
ccctcccaagcccaccctggt

SEQ ID NO: 17381 - RNA, 21 nt, synthetic construct
  source 1..21: mol_type = other RNA
ccctctctcctctaacctggc

SEQ ID NO: 17382 - RNA, 21 nt, synthetic construct
  source 1..21: mol_type = other RNA
ccctggttaccctgtccagag

SEQ ID NO: 17383 - RNA, 21 nt, synthetic construct
  source 1..21: mol_type = other RNA
ccctgtccagagcacagctgg

SEQ ID NO: 17384 - RNA, 21 nt, synthetic construct
  source 1..21: mol_type = other RNA
cccttgcaggatgtggacgcc

SEQ ID NO: 17385 - RNA, 21 nt, synthetic construct
  source 1..21: mol_type = other RNA
ccgtgaatcctgttgttgcag

SEQ ID NO: 17386 - RNA, 21 nt, synthetic construct
  source 1..21: mol_type = other RNA
cctcccaagcccaccctggtt

SEQ ID NO: 17387 - RNA, 21 nt, synthetic construct
  source 1..21: mol_type = other RNA
cctctaacctggctctgagtc

SEQ ID NO: 17388 - RNA, 21 nt, synthetic construct
  source 1..21: mol_type = other RNA
cctctctcctctaacctggct

SEQ ID NO: 17389 - RNA, 21 nt, synthetic construct
  source 1..21: mol_type = other RNA
cctgagatgatcccagctgtg

SEQ ID NO: 17390 - RNA, 21 nt, synthetic construct
  source 1..21: mol_type = other RNA
cctgcaacaacaggattcacg

SEQ ID NO: 17391 - RNA, 21 nt, synthetic construct
  source 1..21: mol_type = other RNA
cctgcaaggggggatgggact

SEQ ID NO: 17392 - RNA, 21 nt, synthetic construct
  source 1..21: mol_type = other RNA
cctggacactgaatgggatgg

SEQ ID NO: 17393 - RNA, 21 nt, synthetic construct
  source 1..21: mol_type = other RNA
cctggctctgagtcccatccc

SEQ ID NO: 17394 - RNA, 21 nt, synthetic construct
  source 1..21: mol_type = other RNA
cctggttaccctgtccagagc

SEQ ID NO: 17395 - RNA, 21 nt, synthetic construct
  source 1..21: mol_type = other RNA
cctgtccagagcacagctggg

SEQ ID NO: 17396 - RNA, 21 nt, synthetic construct
  source 1..21: mol_type = other RNA
cctgttgttgcaggtgttcct

SEQ ID NO: 17397 - RNA, 21 nt, synthetic construct
  source 1..21: mol_type = other RNA
ccttgcaggatgtggacgccc

SEQ ID NO: 17398 - RNA, 21 nt, synthetic construct
  source 1..21: mol_type = other RNA
cgcccaccatcccattcagtg

SEQ ID NO: 17399 - RNA, 21 nt, synthetic construct
  source 1..21: mol_type = other RNA
cggatcagcctgagatgatcc

SEQ ID NO: 17400 - RNA, 21 nt, synthetic construct
  source 1..21: mol_type = other RNA
cggctctcccctcccaagccc

SEQ ID NO: 17401 - RNA, 21 nt, synthetic construct
  source 1..21: mol_type = other RNA
cgtccacatcctgcaaggggg

SEQ ID NO: 17402 - RNA, 21 nt, synthetic construct
  source 1..21: mol_type = other RNA
cgtgaatcctgttgttgcagg

SEQ ID NO: 17403 - RNA, 21 nt, synthetic construct
  source 1..21: mol_type = other RNA
ctaacctggctctgagtccca

SEQ ID NO: 17404 - RNA, 21 nt, synthetic construct
  source 1..21: mol_type = other RNA
ctcaggctgatccgtgaatcc

SEQ ID NO: 17405 - RNA, 21 nt, synthetic construct
  source 1..21: mol_type = other RNA
ctcccaagcccaccctggtta

SEQ ID NO: 17406 - RNA, 21 nt, synthetic construct
  source 1..21: mol_type = other RNA
ctcccctcccaagcccaccct

SEQ ID NO: 17407 - RNA, 21 nt, synthetic construct
  source 1..21: mol_type = other RNA
ctcctctaacctggctctgag

SEQ ID NO: 17408 - RNA, 21 nt, synthetic construct
  source 1..21: mol_type = other RNA
ctctaacctggctctgagtcc

SEQ ID NO: 17409 - RNA, 21 nt, synthetic construct
  source 1..21: mol_type = other RNA
ctctcccctcccaagcccacc

SEQ ID NO: 17410 - RNA, 21 nt, synthetic construct
  source 1..21: mol_type = other RNA
ctctcctctaacctggctctg

SEQ ID NO: 17411 - RNA, 21 nt, synthetic construct
  source 1..21: mol_type = other RNA
ctctctcctctaacctggctc

SEQ ID NO: 17412 - RNA, 21 nt, synthetic construct
  source 1..21: mol_type = other RNA
ctctgagtcccatcccccctt

SEQ ID NO: 17413 - RNA, 21 nt, synthetic construct
  source 1..21: mol_type = other RNA
ctctggacagggtaaccaggg

SEQ ID NO: 17414 - RNA, 21 nt, synthetic construct
  source 1..21: mol_type = other RNA
ctgaatgggatggtgggcgtc

SEQ ID NO: 17415 - RNA, 21 nt, synthetic construct
  source 1..21: mol_type = other RNA
ctgagatgatcccagctgtgc

SEQ ID NO: 17416 - RNA, 21 nt, synthetic construct
  source 1..21: mol_type = other RNA
ctgagtcccatccccccttgc

SEQ ID NO: 17417 - RNA, 21 nt, synthetic construct
  source 1..21: mol_type = other RNA
ctgatccgtgaatcctgttgt

SEQ ID NO: 17418 - RNA, 21 nt, synthetic construct
  source 1..21: mol_type = other RNA
ctgcaacaacaggattcacgg

SEQ ID NO: 17419 - RNA, 21 nt, synthetic construct
  source 1..21: mol_type = other RNA
ctgcaaggggggatgggactc

SEQ ID NO: 17420 - RNA, 21 nt, synthetic construct
  source 1..21: mol_type = other RNA
ctgcggctctcccctcccaag

SEQ ID NO: 17421 - RNA, 21 nt, synthetic construct
  source 1..21: mol_type = other RNA
ctggacactgaatgggatggt

SEQ ID NO: 17422 - RNA, 21 nt, synthetic construct
  source 1..21: mol_type = other RNA
ctggacagggtaaccagggtg

SEQ ID NO: 17423 - RNA, 21 nt, synthetic construct
  source 1..21: mol_type = other RNA
ctggctctgagtcccatcccc

SEQ ID NO: 17424 - RNA, 21 nt, synthetic construct
  source 1..21: mol_type = other RNA
ctgggatcatctcaggctgat

SEQ ID NO: 17425 - RNA, 21 nt, synthetic construct
  source 1..21: mol_type = other RNA
ctggttaccctgtccagagca

SEQ ID NO: 17426 - RNA, 21 nt, synthetic construct
  source 1..21: mol_type = other RNA
ctgtccagagcacagctggga

SEQ ID NO: 17427 - RNA, 21 nt, synthetic construct
  source 1..21: mol_type = other RNA
ctgtgctctggacagggtaac

SEQ ID NO: 17428 - RNA, 21 nt, synthetic construct
  source 1..21: mol_type = other RNA
ctgttgttgcaggtgttcctg

SEQ ID NO: 17429 - RNA, 21 nt, synthetic construct
  source 1..21: mol_type = other RNA
cttgcaggatgtggacgccca

SEQ ID NO: 17430 - RNA, 21 nt, synthetic construct
  source 1..21: mol_type = other RNA
cttgggaggggagagccgcag

SEQ ID NO: 17431 - RNA, 21 nt, synthetic construct
  source 1..21: mol_type = other RNA
gaacacctgcaacaacaggat

SEQ ID NO: 17432 - RNA, 21 nt, synthetic construct
  source 1..21: mol_type = other RNA
gaatcctgttgttgcaggtgt

SEQ ID NO: 17433 - RNA, 21 nt, synthetic construct
  source 1..21: mol_type = other RNA
gaatgggatggtgggcgtcca

SEQ ID NO: 17434 - RNA, 21 nt, synthetic construct
  source 1..21: mol_type = other RNA
gacactgaatgggatggtggg

SEQ ID NO: 17435 - RNA, 21 nt, synthetic construct
  source 1..21: mol_type = other RNA
gacagggtaaccagggtgggc

SEQ ID NO: 17436 - RNA, 21 nt, synthetic construct
  source 1..21: mol_type = other RNA
gacgcccaccatcccattcag

SEQ ID NO: 17437 - RNA, 21 nt, synthetic construct
  source 1..21: mol_type = other RNA
gactcagagccaggttagagg

SEQ ID NO: 17438 - RNA, 21 nt, synthetic construct
  source 1..21: mol_type = other RNA
gagatgatcccagctgtgctc

SEQ ID NO: 17439 - RNA, 21 nt, synthetic construct
  source 1..21: mol_type = other RNA
gagcacagctgggatcatctc

SEQ ID NO: 17440 - RNA, 21 nt, synthetic construct
  source 1..21: mol_type = other RNA
gagtcccatccccccttgcag

SEQ ID NO: 17441 - RNA, 21 nt, synthetic construct
  source 1..21: mol_type = other RNA
gatcagcctgagatgatccca

SEQ ID NO: 17442 - RNA, 21 nt, synthetic construct
  source 1..21: mol_type = other RNA
gatcatctcaggctgatccgt

SEQ ID NO: 17443 - RNA, 21 nt, synthetic construct
  source 1..21: mol_type = other RNA
gatcccagctgtgctctggac

SEQ ID NO: 17444 - RNA, 21 nt, synthetic construct
  source 1..21: mol_type = other RNA
gatccgtgaatcctgttgttg

SEQ ID NO: 17445 - RNA, 21 nt, synthetic construct
  source 1..21: mol_type = other RNA
gatgatcccagctgtgctctg

SEQ ID NO: 17446 - RNA, 21 nt, synthetic construct
  source 1..21: mol_type = other RNA
gatgggactcagagccaggtt

SEQ ID NO: 17447 - RNA, 21 nt, synthetic construct
  source 1..21: mol_type = other RNA
gatggtgggcgtccacatcct

SEQ ID NO: 17448 - RNA, 21 nt, synthetic construct
  source 1..21: mol_type = other RNA
gatgtggacgcccaccatccc

SEQ ID NO: 17449 - RNA, 21 nt, synthetic construct
  source 1..21: mol_type = other RNA
gattcacggatcagcctgaga

SEQ ID NO: 17450 - RNA, 21 nt, synthetic construct
  source 1..21: mol_type = other RNA
gcaacaacaggattcacggat

SEQ ID NO: 17451 - RNA, 21 nt, synthetic construct
  source 1..21: mol_type = other RNA
gcaaggggggatgggactcag

SEQ ID NO: 17452 - RNA, 21 nt, synthetic construct
  source 1..21: mol_type = other RNA
gcacagctgggatcatctcag

SEQ ID NO: 17453 - RNA, 21 nt, synthetic construct
  source 1..21: mol_type = other RNA
gcaggatgtggacgcccacca

SEQ ID NO: 17454 - RNA, 21 nt, synthetic construct
  source 1..21: mol_type = other RNA
gcaggtgttcctggacactga

SEQ ID NO: 17455 - RNA, 21 nt, synthetic construct
  source 1..21: mol_type = other RNA
gcccaccatcccattcagtgt

SEQ ID NO: 17456 - RNA, 21 nt, synthetic construct
  source 1..21: mol_type = other RNA
gcccaccctggttaccctgtc

SEQ ID NO: 17457 - RNA, 21 nt, synthetic construct
  source 1..21: mol_type = other RNA
gccctctctcctctaacctgg

SEQ ID NO: 17458 - RNA, 21 nt, synthetic construct
  source 1..21: mol_type = other RNA
gcctgagatgatcccagctgt

SEQ ID NO: 17459 - RNA, 21 nt, synthetic construct
  source 1..21: mol_type = other RNA
gcggctctcccctcccaagcc

SEQ ID NO: 17460 - RNA, 21 nt, synthetic construct
  source 1..21: mol_type = other RNA
gcgtccacatcctgcaagggg

SEQ ID NO: 17461 - RNA, 21 nt, synthetic construct
  source 1..21: mol_type = other RNA
gctctcccctcccaagcccac

SEQ ID NO: 17462 - RNA, 21 nt, synthetic construct
  source 1..21: mol_type = other RNA
gctctgagtcccatcccccct

SEQ ID NO: 17463 - RNA, 21 nt, synthetic construct
  source 1..21: mol_type = other RNA
gctctggacagggtaaccagg

SEQ ID NO: 17464 - RNA, 21 nt, synthetic construct
  source 1..21: mol_type = other RNA
gctgatccgtgaatcctgttg

SEQ ID NO: 17465 - RNA, 21 nt, synthetic construct
  source 1..21: mol_type = other RNA
gctgggatcatctcaggctga

SEQ ID NO: 17466 - RNA, 21 nt, synthetic construct
  source 1..21: mol_type = other RNA
gctgtgctctggacagggtaa

SEQ ID NO: 17467 - RNA, 21 nt, synthetic construct
  source 1..21: mol_type = other RNA
gcttgggaggggagagccgca

SEQ ID NO: 17468 - RNA, 21 nt, synthetic construct
  source 1..21: mol_type = other RNA
ggaacacctgcaacaacagga

SEQ ID NO: 17469 - RNA, 21 nt, synthetic construct
  source 1..21: mol_type = other RNA
ggacactgaatgggatggtgg

SEQ ID NO: 17470 - RNA, 21 nt, synthetic construct
  source 1..21: mol_type = other RNA
ggacagggtaaccagggtggg

SEQ ID NO: 17471 - RNA, 21 nt, synthetic construct
  source 1..21: mol_type = other RNA
ggacgcccaccatcccattca

SEQ ID NO: 17472 - RNA, 21 nt, synthetic construct
  source 1..21: mol_type = other RNA
ggactcagagccaggttagag

SEQ ID NO: 17473 - RNA, 21 nt, synthetic construct
  source 1..21: mol_type = other RNA
ggatcagcctgagatgatccc

SEQ ID NO: 17474 - RNA, 21 nt, synthetic construct
  source 1..21: mol_type = other RNA
ggatcatctcaggctgatccg

SEQ ID NO: 17475 - RNA, 21 nt, synthetic construct
  source 1..21: mol_type = other RNA
ggatgggactcagagccaggt

SEQ ID NO: 17476 - RNA, 21 nt, synthetic construct
  source 1..21: mol_type = other RNA
ggatggtgggcgtccacatcc

SEQ ID NO: 17477 - RNA, 21 nt, synthetic construct
  source 1..21: mol_type = other RNA
ggatgtggacgcccaccatcc

SEQ ID NO: 17478 - RNA, 21 nt, synthetic construct
  source 1..21: mol_type = other RNA
ggattcacggatcagcctgag

SEQ ID NO: 17479 - RNA, 21 nt, synthetic construct
  source 1..21: mol_type = other RNA
ggcgtccacatcctgcaaggg

SEQ ID NO: 17480 - RNA, 21 nt, synthetic construct
  source 1..21: mol_type = other RNA
ggctctcccctcccaagccca

SEQ ID NO: 17481 - RNA, 21 nt, synthetic construct
  source 1..21: mol_type = other RNA
ggctctgagtcccatcccccc

SEQ ID NO: 17482 - RNA, 21 nt, synthetic construct
  source 1..21: mol_type = other RNA
ggctgatccgtgaatcctgtt

SEQ ID NO: 17483 - RNA, 21 nt, synthetic construct
  source 1..21: mol_type = other RNA
ggcttgggaggggagagccgc

SEQ ID NO: 17484 - RNA, 21 nt, synthetic construct
  source 1..21: mol_type = other RNA
gggactcagagccaggttaga

SEQ ID NO: 17485 - RNA, 21 nt, synthetic construct
  source 1..21: mol_type = other RNA
gggatcatctcaggctgatcc

SEQ ID NO: 17486 - RNA, 21 nt, synthetic construct
  source 1..21: mol_type = other RNA
gggatgggactcagagccagg

SEQ ID NO: 17487 - RNA, 21 nt, synthetic construct
  source 1..21: mol_type = other RNA
gggatggtgggcgtccacatc

SEQ ID NO: 17488 - RNA, 21 nt, synthetic construct
  source 1..21: mol_type = other RNA
gggcgtccacatcctgcaagg

SEQ ID NO: 17489 - RNA, 21 nt, synthetic construct
  source 1..21: mol_type = other RNA
gggcttgggaggggagagccg

SEQ ID NO: 17490 - RNA, 21 nt, synthetic construct
  source 1..21: mol_type = other RNA
ggggatgggactcagagccag

SEQ ID NO: 17491 - RNA, 21 nt, synthetic construct
  source 1..21: mol_type = other RNA
gggggatgggactcagagcca

SEQ ID NO: 17492 - RNA, 21 nt, synthetic construct
  source 1..21: mol_type = other RNA
ggggggatgggactcagagcc

SEQ ID NO: 17493 - RNA, 21 nt, synthetic construct
  source 1..21: mol_type = other RNA
gggtaaccagggtgggcttgg

SEQ ID NO: 17494 - RNA, 21 nt, synthetic construct
  source 1..21: mol_type = other RNA
gggtgggcttgggaggggaga

SEQ ID NO: 17495 - RNA, 21 nt, synthetic construct
  source 1..21: mol_type = other RNA
ggtaaccagggtgggcttggg

SEQ ID NO: 17496 - RNA, 21 nt, synthetic construct
  source 1..21: mol_type = other RNA
ggtgggcgtccacatcctgca

SEQ ID NO: 17497 - RNA, 21 nt, synthetic construct
  source 1..21: mol_type = other RNA
ggtgggcttgggaggggagag

SEQ ID NO: 17498 - RNA, 21 nt, synthetic construct
  source 1..21: mol_type = other RNA
ggtgttcctggacactgaatg

SEQ ID NO: 17499 - RNA, 21 nt, synthetic construct
  source 1..21: mol_type = other RNA
ggttaccctgtccagagcaca

SEQ ID NO: 17500 - RNA, 21 nt, synthetic construct
  source 1..21: mol_type = other RNA
gtaaccagggtgggcttggga

SEQ ID NO: 17501 - RNA, 21 nt, synthetic construct
  source 1..21: mol_type = other RNA
gtccacatcctgcaagggggg

SEQ ID NO: 17502 - RNA, 21 nt, synthetic construct
  source 1..21: mol_type = other RNA
gtccagagcacagctgggatc

SEQ ID NO: 17503 - RNA, 21 nt, synthetic construct
  source 1..21: mol_type = other RNA
gtccaggaacacctgcaacaa

SEQ ID NO: 17504 - RNA, 21 nt, synthetic construct
  source 1..21: mol_type = other RNA
gtcccatccccccttgcagga

SEQ ID NO: 17505 - RNA, 21 nt, synthetic construct
  source 1..21: mol_type = other RNA
gtgaatcctgttgttgcaggt

SEQ ID NO: 17506 - RNA, 21 nt, synthetic construct
  source 1..21: mol_type = other RNA
gtgctctggacagggtaacca

SEQ ID NO: 17507 - RNA, 21 nt, synthetic construct
  source 1..21: mol_type = other RNA
gtggacgcccaccatcccatt

SEQ ID NO: 17508 - RNA, 21 nt, synthetic construct
  source 1..21: mol_type = other RNA
gtgggcgtccacatcctgcaa

SEQ ID NO: 17509 - RNA, 21 nt, synthetic construct
  source 1..21: mol_type = other RNA
gtgggcttgggaggggagagc

SEQ ID NO: 17510 - RNA, 21 nt, synthetic construct
  source 1..21: mol_type = other RNA
gtgtccaggaacacctgcaac

SEQ ID NO: 17511 - RNA, 21 nt, synthetic construct
  source 1..21: mol_type = other RNA
gtgttcctggacactgaatgg

SEQ ID NO: 17512 - RNA, 21 nt, synthetic construct
  source 1..21: mol_type = other RNA
gttaccctgtccagagcacag

SEQ ID NO: 17513 - RNA, 21 nt, synthetic construct
  source 1..21: mol_type = other RNA
gttcctggacactgaatggga

SEQ ID NO: 17514 - RNA, 21 nt, synthetic construct
  source 1..21: mol_type = other RNA
gttgcaggtgttcctggacac

SEQ ID NO: 17515 - RNA, 21 nt, synthetic construct
  source 1..21: mol_type = other RNA
gttgttgcaggtgttcctgga

SEQ ID NO: 17516 - RNA, 21 nt, synthetic construct
  source 1..21: mol_type = other RNA
taaccagggtgggcttgggag

SEQ ID NO: 17517 - RNA, 21 nt, synthetic construct
  source 1..21: mol_type = other RNA
taacctggctctgagtcccat

SEQ ID NO: 17518 - RNA, 21 nt, synthetic construct
  source 1..21: mol_type = other RNA
taccctgtccagagcacagct

SEQ ID NO: 17519 - RNA, 21 nt, synthetic construct
  source 1..21: mol_type = other RNA
tcacggatcagcctgagatga

SEQ ID NO: 17520 - RNA, 21 nt, synthetic construct
  source 1..21: mol_type = other RNA
tcagcctgagatgatcccagc

SEQ ID NO: 17521 - RNA, 21 nt, synthetic construct
  source 1..21: mol_type = other RNA
tcaggctgatccgtgaatcct

SEQ ID NO: 17522 - RNA, 21 nt, synthetic construct
  source 1..21: mol_type = other RNA
tcagtgtccaggaacacctgc

SEQ ID NO: 17523 - RNA, 21 nt, synthetic construct
  source 1..21: mol_type = other RNA
tcatctcaggctgatccgtga

SEQ ID NO: 17524 - RNA, 21 nt, synthetic construct
  source 1..21: mol_type = other RNA
tccacatcctgcaagggggga

SEQ ID NO: 17525 - RNA, 21 nt, synthetic construct
  source 1..21: mol_type = other RNA
tccagagcacagctgggatca

SEQ ID NO: 17526 - RNA, 21 nt, synthetic construct
  source 1..21: mol_type = other RNA
tccaggaacacctgcaacaac

SEQ ID NO: 17527 - RNA, 21 nt, synthetic construct
  source 1..21: mol_type = other RNA
tcccaagcccaccctggttac

SEQ ID NO: 17528 - RNA, 21 nt, synthetic construct
  source 1..21: mol_type = other RNA
tcccagctgtgctctggacag

SEQ ID NO: 17529 - RNA, 21 nt, synthetic construct
  source 1..21: mol_type = other RNA
tcccatccccccttgcaggat

SEQ ID NO: 17530 - RNA, 21 nt, synthetic construct
  source 1..21: mol_type = other RNA
tcccattcagtgtccaggaac

SEQ ID NO: 17531 - RNA, 21 nt, synthetic construct
  source 1..21: mol_type = other RNA
tccccccttgcaggatgtgga

SEQ ID NO: 17532 - RNA, 21 nt, synthetic construct
  source 1..21: mol_type = other RNA
tcccctcccaagcccaccctg

SEQ ID NO: 17533 - RNA, 21 nt, synthetic construct
  source 1..21: mol_type = other RNA
tccgtgaatcctgttgttgca

SEQ ID NO: 17534 - RNA, 21 nt, synthetic construct
  source 1..21: mol_type = other RNA
tcctctaacctggctctgagt

SEQ ID NO: 17535 - RNA, 21 nt, synthetic construct
  source 1..21: mol_type = other RNA
tcctgcaaggggggatgggac

SEQ ID NO: 17536 - RNA, 21 nt, synthetic construct
  source 1..21: mol_type = other RNA
tcctggacactgaatgggatg

SEQ ID NO: 17537 - RNA, 21 nt, synthetic construct
  source 1..21: mol_type = other RNA
tcctgttgttgcaggtgttcc

SEQ ID NO: 17538 - RNA, 21 nt, synthetic construct
  source 1..21: mol_type = other RNA
tctaacctggctctgagtccc

SEQ ID NO: 17539 - RNA, 21 nt, synthetic construct
  source 1..21: mol_type = other RNA
tctcaggctgatccgtgaatc

SEQ ID NO: 17540 - RNA, 21 nt, synthetic construct
  source 1..21: mol_type = other RNA
tctcccctcccaagcccaccc

SEQ ID NO: 17541 - RNA, 21 nt, synthetic construct
  source 1..21: mol_type = other RNA
tctcctctaacctggctctga

SEQ ID NO: 17542 - RNA, 21 nt, synthetic construct
  source 1..21: mol_type = other RNA
tctctcctctaacctggctct

SEQ ID NO: 17543 - RNA, 21 nt, synthetic construct
  source 1..21: mol_type = other RNA
tctgagtcccatccccccttg

SEQ ID NO: 17544 - RNA, 21 nt, synthetic construct
  source 1..21: mol_type = other RNA
tctggacagggtaaccagggt

SEQ ID NO: 17545 - RNA, 21 nt, synthetic construct
  source 1..21: mol_type = other RNA
tgaatcctgttgttgcaggtg

SEQ ID NO: 17546 - RNA, 21 nt, synthetic construct
  source 1..21: mol_type = other RNA
tgaatgggatggtgggcgtcc

SEQ ID NO: 17547 - RNA, 21 nt, synthetic construct
  source 1..21: mol_type = other RNA
tgagatgatcccagctgtgct

SEQ ID NO: 17548 - RNA, 21 nt, synthetic construct
  source 1..21: mol_type = other RNA
tgagtcccatccccccttgca

SEQ ID NO: 17549 - RNA, 21 nt, synthetic construct
  source 1..21: mol_type = other RNA
tgatcccagctgtgctctgga

SEQ ID NO: 17550 - RNA, 21 nt, synthetic construct
  source 1..21: mol_type = other RNA
tgatccgtgaatcctgttgtt

SEQ ID NO: 17551 - RNA, 21 nt, synthetic construct
  source 1..21: mol_type = other RNA
tgcaacaacaggattcacgga

SEQ ID NO: 17552 - RNA, 21 nt, synthetic construct
  source 1..21: mol_type = other RNA
tgcaaggggggatgggactca

SEQ ID NO: 17553 - RNA, 21 nt, synthetic construct
  source 1..21: mol_type = other RNA
tgcaggatgtggacgcccacc

SEQ ID NO: 17554 - RNA, 21 nt, synthetic construct
  source 1..21: mol_type = other RNA
tgcaggtgttcctggacactg

SEQ ID NO: 17555 - RNA, 21 nt, synthetic construct
  source 1..21: mol_type = other RNA
tgcggctctcccctcccaagc

SEQ ID NO: 17556 - RNA, 21 nt, synthetic construct
  source 1..21: mol_type = other RNA
tgctctggacagggtaaccag

SEQ ID NO: 17557 - RNA, 21 nt, synthetic construct
  source 1..21: mol_type = other RNA
tggacactgaatgggatggtg

SEQ ID NO: 17558 - RNA, 21 nt, synthetic construct
  source 1..21: mol_type = other RNA
tggacagggtaaccagggtgg

SEQ ID NO: 17559 - RNA, 21 nt, synthetic construct
  source 1..21: mol_type = other RNA
tggacgcccaccatcccattc

SEQ ID NO: 17560 - RNA, 21 nt, synthetic construct
  source 1..21: mol_type = other RNA
tggctctgagtcccatccccc

SEQ ID NO: 17561 - RNA, 21 nt, synthetic construct
  source 1..21: mol_type = other RNA
tgggactcagagccaggttag

SEQ ID NO: 17562 - RNA, 21 nt, synthetic construct
  source 1..21: mol_type = other RNA
tgggaggggagagccgcagtg

SEQ ID NO: 17563 - RNA, 21 nt, synthetic construct
  source 1..21: mol_type = other RNA
tgggatcatctcaggctgatc

SEQ ID NO: 17564 - RNA, 21 nt, synthetic construct
  source 1..21: mol_type = other RNA
tgggatggtgggcgtccacat

SEQ ID NO: 17565 - RNA, 21 nt, synthetic construct
  source 1..21: mol_type = other RNA
tgggcgtccacatcctgcaag

SEQ ID NO: 17566 - RNA, 21 nt, synthetic construct
  source 1..21: mol_type = other RNA
tgggcttgggaggggagagcc

SEQ ID NO: 17567 - RNA, 21 nt, synthetic construct
  source 1..21: mol_type = other RNA
tggtgggcgtccacatcctgc

SEQ ID NO: 17568 - RNA, 21 nt, synthetic construct
  source 1..21: mol_type = other RNA
tggttaccctgtccagagcac

SEQ ID NO: 17569 - RNA, 21 nt, synthetic construct
  source 1..21: mol_type = other RNA
tgtccagagcacagctgggat

SEQ ID NO: 17570 - RNA, 21 nt, synthetic construct
  source 1..21: mol_type = other RNA
tgtccaggaacacctgcaaca

SEQ ID NO: 17571 - RNA, 21 nt, synthetic construct
  source 1..21: mol_type = other RNA
tgtgctctggacagggtaacc

SEQ ID NO: 17572 - RNA, 21 nt, synthetic construct
  source 1..21: mol_type = other RNA
tgtggacgcccaccatcccat

SEQ ID NO: 17573 - RNA, 21 nt, synthetic construct
  source 1..21: mol_type = other RNA
tgttcctggacactgaatggg

SEQ ID NO: 17574 - RNA, 21 nt, synthetic construct
  source 1..21: mol_type = other RNA
tgttgcaggtgttcctggaca

SEQ ID NO: 17575 - RNA, 21 nt, synthetic construct
  source 1..21: mol_type = other RNA
tgttgttgcaggtgttcctgg

SEQ ID NO: 17576 - RNA, 21 nt, synthetic construct
  source 1..21: mol_type = other RNA
ttaccctgtccagagcacagc

SEQ ID NO: 17577 - RNA, 21 nt, synthetic construct
  source 1..21: mol_type = other RNA
ttcacggatcagcctgagatg

SEQ ID NO: 17578 - RNA, 21 nt, synthetic construct
  source 1..21: mol_type = other RNA
ttcagtgtccaggaacacctg

SEQ ID NO: 17579 - RNA, 21 nt, synthetic construct
  source 1..21: mol_type = other RNA
ttcctggacactgaatgggat

SEQ ID NO: 17580 - RNA, 21 nt, synthetic construct
  source 1..21: mol_type = other RNA
ttgcaggatgtggacgcccac

SEQ ID NO: 17581 - RNA, 21 nt, synthetic construct
  source 1..21: mol_type = other RNA
ttgcaggtgttcctggacact

SEQ ID NO: 17582 - RNA, 21 nt, synthetic construct
  source 1..21: mol_type = other RNA
ttgggaggggagagccgcagt

SEQ ID NO: 17583 - RNA, 21 nt, synthetic construct
  source 1..21: mol_type = other RNA
ttgttgcaggtgttcctggac

SEQ ID NO: 17584 - RNA, 22 nt, synthetic construct
  source 1..22: mol_type = other RNA
aacaacaggattcacggatcag

SEQ ID NO: 17585 - RNA, 22 nt, synthetic construct
  source 1..22: mol_type = other RNA
aacacctgcaacaacaggattc

SEQ ID NO: 17586 - RNA, 22 nt, synthetic construct
  source 1..22: mol_type = other RNA
aacaggattcacggatcagcct

SEQ ID NO: 17587 - RNA, 22 nt, synthetic construct
  source 1..22: mol_type = other RNA
aaccagggtgggcttgggaggg

SEQ ID NO: 17588 - RNA, 22 nt, synthetic construct
  source 1..22: mol_type = other RNA
aacccactgcggctctcccctc

SEQ ID NO: 17589 - RNA, 22 nt, synthetic construct
  source 1..22: mol_type = other RNA
aacctggctctgagtcccatcc

SEQ ID NO: 17590 - RNA, 22 nt, synthetic construct
  source 1..22: mol_type = other RNA
aagcccaccctggttaccctgt

SEQ ID NO: 17591 - RNA, 22 nt, synthetic construct
  source 1..22: mol_type = other RNA
aaggggggatgggactcagagc

SEQ ID NO: 17592 - RNA, 22 nt, synthetic construct
  source 1..22: mol_type = other RNA
aatcctgttgttgcaggtgttc

SEQ ID NO: 17593 - RNA, 22 nt, synthetic construct
  source 1..22: mol_type = other RNA
aatgggatggtgggcgtccaca

SEQ ID NO: 17594 - RNA, 22 nt, synthetic construct
  source 1..22: mol_type = other RNA
acaacaggattcacggatcagc

SEQ ID NO: 17595 - RNA, 22 nt, synthetic construct
  source 1..22: mol_type = other RNA
acacctgcaacaacaggattca

SEQ ID NO: 17596 - RNA, 22 nt, synthetic construct
  source 1..22: mol_type = other RNA
acactgaatgggatggtgggcg

SEQ ID NO: 17597 - RNA, 22 nt, synthetic construct
  source 1..22: mol_type = other RNA
acagctgggatcatctcaggct

SEQ ID NO: 17598 - RNA, 22 nt, synthetic construct
  source 1..22: mol_type = other RNA
acaggattcacggatcagcctg

SEQ ID NO: 17599 - RNA, 22 nt, synthetic construct
  source 1..22: mol_type = other RNA
acagggtaaccagggtgggctt

SEQ ID NO: 17600 - RNA, 22 nt, synthetic construct
  source 1..22: mol_type = other RNA
acatcctgcaaggggggatggg

SEQ ID NO: 17601 - RNA, 22 nt, synthetic construct
  source 1..22: mol_type = other RNA
accagggtgggcttgggagggg

SEQ ID NO: 17602 - RNA, 22 nt, synthetic construct
  source 1..22: mol_type = other RNA
accatcccattcagtgtccagg

SEQ ID NO: 17603 - RNA, 22 nt, synthetic construct
  source 1..22: mol_type = other RNA
acccactgcggctctcccctcc

SEQ ID NO: 17604 - RNA, 22 nt, synthetic construct
  source 1..22: mol_type = other RNA
accctggttaccctgtccagag

SEQ ID NO: 17605 - RNA, 22 nt, synthetic construct
  source 1..22: mol_type = other RNA
accctgtccagagcacagctgg

SEQ ID NO: 17606 - RNA, 22 nt, synthetic construct
  source 1..22: mol_type = other RNA
acctgcaacaacaggattcacg

SEQ ID NO: 17607 - RNA, 22 nt, synthetic construct
  source 1..22: mol_type = other RNA
acctggctctgagtcccatccc

SEQ ID NO: 17608 - RNA, 22 nt, synthetic construct
  source 1..22: mol_type = other RNA
acgcccaccatcccattcagtg

SEQ ID NO: 17609 - RNA, 22 nt, synthetic construct
  source 1..22: mol_type = other RNA
acggatcagcctgagatgatcc

SEQ ID NO: 17610 - RNA, 22 nt, synthetic construct
  source 1..22: mol_type = other RNA
actgaatgggatggtgggcgtc

SEQ ID NO: 17611 - RNA, 22 nt, synthetic construct
  source 1..22: mol_type = other RNA
actgcggctctcccctcccaag

SEQ ID NO: 17612 - RNA, 22 nt, synthetic construct
  source 1..22: mol_type = other RNA
agagcacagctgggatcatctc

SEQ ID NO: 17613 - RNA, 22 nt, synthetic construct
  source 1..22: mol_type = other RNA
agatgatcccagctgtgctctg

SEQ ID NO: 17614 - RNA, 22 nt, synthetic construct
  source 1..22: mol_type = other RNA
agcacagctgggatcatctcag

SEQ ID NO: 17615 - RNA, 22 nt, synthetic construct
  source 1..22: mol_type = other RNA
agcccaccctggttaccctgtc

SEQ ID NO: 17616 - RNA, 22 nt, synthetic construct
  source 1..22: mol_type = other RNA
agcctgagatgatcccagctgt

SEQ ID NO: 17617 - RNA, 22 nt, synthetic construct
  source 1..22: mol_type = other RNA
agctgggatcatctcaggctga

SEQ ID NO: 17618 - RNA, 22 nt, synthetic construct
  source 1..22: mol_type = other RNA
agctgtgctctggacagggtaa

SEQ ID NO: 17619 - RNA, 22 nt, synthetic construct
  source 1..22: mol_type = other RNA
aggaacacctgcaacaacagga

SEQ ID NO: 17620 - RNA, 22 nt, synthetic construct
  source 1..22: mol_type = other RNA
aggatgtggacgcccaccatcc

SEQ ID NO: 17621 - RNA, 22 nt, synthetic construct
  source 1..22: mol_type = other RNA
aggattcacggatcagcctgag

SEQ ID NO: 17622 - RNA, 22 nt, synthetic construct
  source 1..22: mol_type = other RNA
aggctgatccgtgaatcctgtt

SEQ ID NO: 17623 - RNA, 22 nt, synthetic construct
  source 1..22: mol_type = other RNA
aggggggatgggactcagagcc

SEQ ID NO: 17624 - RNA, 22 nt, synthetic construct
  source 1..22: mol_type = other RNA
agggtaaccagggtgggcttgg

SEQ ID NO: 17625 - RNA, 22 nt, synthetic construct
  source 1..22: mol_type = other RNA
agggtgggcttgggaggggaga

SEQ ID NO: 17626 - RNA, 22 nt, synthetic construct
  source 1..22: mol_type = other RNA
aggtgttcctggacactgaatg

SEQ ID NO: 17627 - RNA, 22 nt, synthetic construct
  source 1..22: mol_type = other RNA
agtcccatccccccttgcagga

SEQ ID NO: 17628 - RNA, 22 nt, synthetic construct
  source 1..22: mol_type = other RNA
agtgtccaggaacacctgcaac

SEQ ID NO: 17629 - RNA, 22 nt, synthetic construct
  source 1..22: mol_type = other RNA
atcagcctgagatgatcccagc

SEQ ID NO: 17630 - RNA, 22 nt, synthetic construct
  source 1..22: mol_type = other RNA
atcatctcaggctgatccgtga

SEQ ID NO: 17631 - RNA, 22 nt, synthetic construct
  source 1..22: mol_type = other RNA
atcccagctgtgctctggacag

SEQ ID NO: 17632 - RNA, 22 nt, synthetic construct
  source 1..22: mol_type = other RNA
atcccattcagtgtccaggaac

SEQ ID NO: 17633 - RNA, 22 nt, synthetic construct
  source 1..22: mol_type = other RNA
atccccccttgcaggatgtgga

SEQ ID NO: 17634 - RNA, 22 nt, synthetic construct
  source 1..22: mol_type = other RNA
atccgtgaatcctgttgttgca

SEQ ID NO: 17635 - RNA, 22 nt, synthetic construct
  source 1..22: mol_type = other RNA
atcctgcaaggggggatgggac

SEQ ID NO: 17636 - RNA, 22 nt, synthetic construct
  source 1..22: mol_type = other RNA
atcctgttgttgcaggtgttcc

SEQ ID NO: 17637 - RNA, 22 nt, synthetic construct
  source 1..22: mol_type = other RNA
atctcaggctgatccgtgaatc

SEQ ID NO: 17638 - RNA, 22 nt, synthetic construct
  source 1..22: mol_type = other RNA
atgatcccagctgtgctctgga

SEQ ID NO: 17639 - RNA, 22 nt, synthetic construct
  source 1..22: mol_type = other RNA
atgggactcagagccaggttag

SEQ ID NO: 17640 - RNA, 22 nt, synthetic construct
  source 1..22: mol_type = other RNA
atgggatggtgggcgtccacat

SEQ ID NO: 17641 - RNA, 22 nt, synthetic construct
  source 1..22: mol_type = other RNA
atggtgggcgtccacatcctgc

SEQ ID NO: 17642 - RNA, 22 nt, synthetic construct
  source 1..22: mol_type = other RNA
atgtggacgcccaccatcccat

SEQ ID NO: 17643 - RNA, 22 nt, synthetic construct
  source 1..22: mol_type = other RNA
attcacggatcagcctgagatg

SEQ ID NO: 17644 - RNA, 22 nt, synthetic construct
  source 1..22: mol_type = other RNA
attcagtgtccaggaacacctg

SEQ ID NO: 17645 - RNA, 22 nt, synthetic construct
  source 1..22: mol_type = other RNA
caacaacaggattcacggatca

SEQ ID NO: 17646 - RNA, 22 nt, synthetic construct
  source 1..22: mol_type = other RNA
caacaggattcacggatcagcc

SEQ ID NO: 17647 - RNA, 22 nt, synthetic construct
  source 1..22: mol_type = other RNA
caacccactgcggctctcccct

SEQ ID NO: 17648 - RNA, 22 nt, synthetic construct
  source 1..22: mol_type = other RNA
caagcccaccctggttaccctg

SEQ ID NO: 17649 - RNA, 22 nt, synthetic construct
  source 1..22: mol_type = other RNA
caaggggggatgggactcagag

SEQ ID NO: 17650 - RNA, 22 nt, synthetic construct
  source 1..22: mol_type = other RNA
cacagctgggatcatctcaggc

SEQ ID NO: 17651 - RNA, 22 nt, synthetic construct
  source 1..22: mol_type = other RNA
cacatcctgcaaggggggatgg

SEQ ID NO: 17652 - RNA, 22 nt, synthetic construct
  source 1..22: mol_type = other RNA
caccatcccattcagtgtccag

SEQ ID NO: 17653 - RNA, 22 nt, synthetic construct
  source 1..22: mol_type = other RNA
caccctggttaccctgtccaga

SEQ ID NO: 17654 - RNA, 22 nt, synthetic construct
  source 1..22: mol_type = other RNA
cacctgcaacaacaggattcac

SEQ ID NO: 17655 - RNA, 22 nt, synthetic construct
  source 1..22: mol_type = other RNA
cacggatcagcctgagatgatc

SEQ ID NO: 17656 - RNA, 22 nt, synthetic construct
  source 1..22: mol_type = other RNA
cactgaatgggatggtgggcgt

SEQ ID NO: 17657 - RNA, 22 nt, synthetic construct
  source 1..22: mol_type = other RNA
cactgcggctctcccctcccaa

SEQ ID NO: 17658 - RNA, 22 nt, synthetic construct
  source 1..22: mol_type = other RNA
cagagcacagctgggatcatct

SEQ ID NO: 17659 - RNA, 22 nt, synthetic construct
  source 1..22: mol_type = other RNA
cagcctgagatgatcccagctg

SEQ ID NO: 17660 - RNA, 22 nt, synthetic construct
  source 1..22: mol_type = other RNA
cagctgggatcatctcaggctg

SEQ ID NO: 17661 - RNA, 22 nt, synthetic construct
  source 1..22: mol_type = other RNA
cagctgtgctctggacagggta

SEQ ID NO: 17662 - RNA, 22 nt, synthetic construct
  source 1..22: mol_type = other RNA
caggaacacctgcaacaacagg

SEQ ID NO: 17663 - RNA, 22 nt, synthetic construct
  source 1..22: mol_type = other RNA
caggatgtggacgcccaccatc

SEQ ID NO: 17664 - RNA, 22 nt, synthetic construct
  source 1..22: mol_type = other RNA
caggattcacggatcagcctga

SEQ ID NO: 17665 - RNA, 22 nt, synthetic construct
  source 1..22: mol_type = other RNA
caggctgatccgtgaatcctgt

SEQ ID NO: 17666 - RNA, 22 nt, synthetic construct
  source 1..22: mol_type = other RNA
cagggtaaccagggtgggcttg

SEQ ID NO: 17667 - RNA, 22 nt, synthetic construct
  source 1..22: mol_type = other RNA
cagggtgggcttgggaggggag

SEQ ID NO: 17668 - RNA, 22 nt, synthetic construct
  source 1..22: mol_type = other RNA
caggtgttcctggacactgaat

SEQ ID NO: 17669 - RNA, 22 nt, synthetic construct
  source 1..22: mol_type = other RNA
cagtgtccaggaacacctgcaa

SEQ ID NO: 17670 - RNA, 22 nt, synthetic construct
  source 1..22: mol_type = other RNA
catcccattcagtgtccaggaa

SEQ ID NO: 17671 - RNA, 22 nt, synthetic construct
  source 1..22: mol_type = other RNA
catccccccttgcaggatgtgg

SEQ ID NO: 17672 - RNA, 22 nt, synthetic construct
  source 1..22: mol_type = other RNA
catcctgcaaggggggatggga

SEQ ID NO: 17673 - RNA, 22 nt, synthetic construct
  source 1..22: mol_type = other RNA
catctcaggctgatccgtgaat

SEQ ID NO: 17674 - RNA, 22 nt, synthetic construct
  source 1..22: mol_type = other RNA
cattcagtgtccaggaacacct

SEQ ID NO: 17675 - RNA, 22 nt, synthetic construct
  source 1..22: mol_type = other RNA
ccaacccactgcggctctcccc

SEQ ID NO: 17676 - RNA, 22 nt, synthetic construct
  source 1..22: mol_type = other RNA
ccaagcccaccctggttaccct

SEQ ID NO: 17677 - RNA, 22 nt, synthetic construct
  source 1..22: mol_type = other RNA
ccacatcctgcaaggggggatg

SEQ ID NO: 17678 - RNA, 22 nt, synthetic construct
  source 1..22: mol_type = other RNA
ccaccatcccattcagtgtcca

SEQ ID NO: 17679 - RNA, 22 nt, synthetic construct
  source 1..22: mol_type = other RNA
ccaccctggttaccctgtccag

SEQ ID NO: 17680 - RNA, 22 nt, synthetic construct
  source 1..22: mol_type = other RNA
ccactgcggctctcccctccca

SEQ ID NO: 17681 - RNA, 22 nt, synthetic construct
  source 1..22: mol_type = other RNA
ccagagcacagctgggatcatc

SEQ ID NO: 17682 - RNA, 22 nt, synthetic construct
  source 1..22: mol_type = other RNA
ccagctgtgctctggacagggt

SEQ ID NO: 17683 - RNA, 22 nt, synthetic construct
  source 1..22: mol_type = other RNA
ccaggaacacctgcaacaacag

SEQ ID NO: 17684 - RNA, 22 nt, synthetic construct
  source 1..22: mol_type = other RNA
ccagggtgggcttgggagggga

SEQ ID NO: 17685 - RNA, 22 nt, synthetic construct
  source 1..22: mol_type = other RNA
ccatcccattcagtgtccagga

SEQ ID NO: 17686 - RNA, 22 nt, synthetic construct
  source 1..22: mol_type = other RNA
ccatccccccttgcaggatgtg

SEQ ID NO: 17687 - RNA, 22 nt, synthetic construct
  source 1..22: mol_type = other RNA
ccattcagtgtccaggaacacc

SEQ ID NO: 17688 - RNA, 22 nt, synthetic construct
  source 1..22: mol_type = other RNA
cccaacccactgcggctctccc

SEQ ID NO: 17689 - RNA, 22 nt, synthetic construct
  source 1..22: mol_type = other RNA
cccaagcccaccctggttaccc

SEQ ID NO: 17690 - RNA, 22 nt, synthetic construct
  source 1..22: mol_type = other RNA
cccaccatcccattcagtgtcc

SEQ ID NO: 17691 - RNA, 22 nt, synthetic construct
  source 1..22: mol_type = other RNA
cccaccctggttaccctgtcca

SEQ ID NO: 17692 - RNA, 22 nt, synthetic construct
  source 1..22: mol_type = other RNA
cccactgcggctctcccctccc

SEQ ID NO: 17693 - RNA, 22 nt, synthetic construct
  source 1..22: mol_type = other RNA
cccagctgtgctctggacaggg

SEQ ID NO: 17694 - RNA, 22 nt, synthetic construct
  source 1..22: mol_type = other RNA
cccatccccccttgcaggatgt

SEQ ID NO: 17695 - RNA, 22 nt, synthetic construct
  source 1..22: mol_type = other RNA
cccattcagtgtccaggaacac

SEQ ID NO: 17696 - RNA, 22 nt, synthetic construct
  source 1..22: mol_type = other RNA
ccccaacccactgcggctctcc

SEQ ID NO: 17697 - RNA, 22 nt, synthetic construct
  source 1..22: mol_type = other RNA
ccccccttgcaggatgtggacg

SEQ ID NO: 17698 - RNA, 22 nt, synthetic construct
  source 1..22: mol_type = other RNA
cccccttgcaggatgtggacgc

SEQ ID NO: 17699 - RNA, 22 nt, synthetic construct
  source 1..22: mol_type = other RNA
cccctcccaagcccaccctggt

SEQ ID NO: 17700 - RNA, 22 nt, synthetic construct
  source 1..22: mol_type = other RNA
ccccttgcaggatgtggacgcc

SEQ ID NO: 17701 - RNA, 22 nt, synthetic construct
  source 1..22: mol_type = other RNA
ccctcccaagcccaccctggtt

SEQ ID NO: 17702 - RNA, 22 nt, synthetic construct
  source 1..22: mol_type = other RNA
ccctctctcctctaacctggct

SEQ ID NO: 17703 - RNA, 22 nt, synthetic construct
  source 1..22: mol_type = other RNA
ccctggttaccctgtccagagc

SEQ ID NO: 17704 - RNA, 22 nt, synthetic construct
  source 1..22: mol_type = other RNA
ccctgtccagagcacagctggg

SEQ ID NO: 17705 - RNA, 22 nt, synthetic construct
  source 1..22: mol_type = other RNA
cccttgcaggatgtggacgccc

SEQ ID NO: 17706 - RNA, 22 nt, synthetic construct
  source 1..22: mol_type = other RNA
ccgtgaatcctgttgttgcagg

SEQ ID NO: 17707 - RNA, 22 nt, synthetic construct
  source 1..22: mol_type = other RNA
cctcccaagcccaccctggtta

SEQ ID NO: 17708 - RNA, 22 nt, synthetic construct
  source 1..22: mol_type = other RNA
cctctaacctggctctgagtcc

SEQ ID NO: 17709 - RNA, 22 nt, synthetic construct
  source 1..22: mol_type = other RNA
cctctctcctctaacctggctc

SEQ ID NO: 17710 - RNA, 22 nt, synthetic construct
  source 1..22: mol_type = other RNA
cctgagatgatcccagctgtgc

SEQ ID NO: 17711 - RNA, 22 nt, synthetic construct
  source 1..22: mol_type = other RNA
cctgcaacaacaggattcacgg

SEQ ID NO: 17712 - RNA, 22 nt, synthetic construct
  source 1..22: mol_type = other RNA
cctgcaaggggggatgggactc

SEQ ID NO: 17713 - RNA, 22 nt, synthetic construct
  source 1..22: mol_type = other RNA
cctggacactgaatgggatggt

SEQ ID NO: 17714 - RNA, 22 nt, synthetic construct
  source 1..22: mol_type = other RNA
cctggctctgagtcccatcccc

SEQ ID NO: 17715 - RNA, 22 nt, synthetic construct
  source 1..22: mol_type = other RNA
cctggttaccctgtccagagca

SEQ ID NO: 17716 - RNA, 22 nt, synthetic construct
  source 1..22: mol_type = other RNA
cctgtccagagcacagctggga

SEQ ID NO: 17717 - RNA, 22 nt, synthetic construct
  source 1..22: mol_type = other RNA
cctgttgttgcaggtgttcctg

SEQ ID NO: 17718 - RNA, 22 nt, synthetic construct
  source 1..22: mol_type = other RNA
ccttgcaggatgtggacgccca

SEQ ID NO: 17719 - RNA, 22 nt, synthetic construct
  source 1..22: mol_type = other RNA
cgcccaccatcccattcagtgt

SEQ ID NO: 17720 - RNA, 22 nt, synthetic construct
  source 1..22: mol_type = other RNA
cggatcagcctgagatgatccc

SEQ ID NO: 17721 - RNA, 22 nt, synthetic construct
  source 1..22: mol_type = other RNA
cggctctcccctcccaagccca

SEQ ID NO: 17722 - RNA, 22 nt, synthetic construct
  source 1..22: mol_type = other RNA
cgtccacatcctgcaagggggg

SEQ ID NO: 17723 - RNA, 22 nt, synthetic construct
  source 1..22: mol_type = other RNA
cgtgaatcctgttgttgcaggt

SEQ ID NO: 17724 - RNA, 22 nt, synthetic construct
  source 1..22: mol_type = other RNA
ctaacctggctctgagtcccat

SEQ ID NO: 17725 - RNA, 22 nt, synthetic construct
  source 1..22: mol_type = other RNA
ctcaggctgatccgtgaatcct

SEQ ID NO: 17726 - RNA, 22 nt, synthetic construct
  source 1..22: mol_type = other RNA
ctcccaagcccaccctggttac

SEQ ID NO: 17727 - RNA, 22 nt, synthetic construct
  source 1..22: mol_type = other RNA
ctcccctcccaagcccaccctg

SEQ ID NO: 17728 - RNA, 22 nt, synthetic construct
  source 1..22: mol_type = other RNA
ctcctctaacctggctctgagt

SEQ ID NO: 17729 - RNA, 22 nt, synthetic construct
  source 1..22: mol_type = other RNA
ctctaacctggctctgagtccc

SEQ ID NO: 17730 - RNA, 22 nt, synthetic construct
  source 1..22: mol_type = other RNA
ctctcccctcccaagcccaccc

SEQ ID NO: 17731 - RNA, 22 nt, synthetic construct
  source 1..22: mol_type = other RNA
ctctcctctaacctggctctga

SEQ ID NO: 17732 - RNA, 22 nt, synthetic construct
  source 1..22: mol_type = other RNA
ctctctcctctaacctggctct

SEQ ID NO: 17733 - RNA, 22 nt, synthetic construct
  source 1..22: mol_type = other RNA
ctctgagtcccatccccccttg

SEQ ID NO: 17734 - RNA, 22 nt, synthetic construct
  source 1..22: mol_type = other RNA
ctctggacagggtaaccagggt

SEQ ID NO: 17735 - RNA, 22 nt, synthetic construct
  source 1..22: mol_type = other RNA
ctgaatgggatggtgggcgtcc

SEQ ID NO: 17736 - RNA, 22 nt, synthetic construct
  source 1..22: mol_type = other RNA
ctgagatgatcccagctgtgct

SEQ ID NO: 17737 - RNA, 22 nt, synthetic construct
  source 1..22: mol_type = other RNA
ctgagtcccatccccccttgca

SEQ ID NO: 17738 - RNA, 22 nt, synthetic construct
  source 1..22: mol_type = other RNA
ctgatccgtgaatcctgttgtt

SEQ ID NO: 17739 - RNA, 22 nt, synthetic construct
  source 1..22: mol_type = other RNA
ctgcaacaacaggattcacgga

SEQ ID NO: 17740 - RNA, 22 nt, synthetic construct
  source 1..22: mol_type = other RNA
ctgcaaggggggatgggactca

SEQ ID NO: 17741 - RNA, 22 nt, synthetic construct
  source 1..22: mol_type = other RNA
ctgcggctctcccctcccaagc

SEQ ID NO: 17742 - RNA, 22 nt, synthetic construct
  source 1..22: mol_type = other RNA
ctggacactgaatgggatggtg

SEQ ID NO: 17743 - RNA, 22 nt, synthetic construct
  source 1..22: mol_type = other RNA
ctggacagggtaaccagggtgg

SEQ ID NO: 17744 - RNA, 22 nt, synthetic construct
  source 1..22: mol_type = other RNA
ctggctctgagtcccatccccc

SEQ ID NO: 17745 - RNA, 22 nt, synthetic construct
  source 1..22: mol_type = other RNA
ctgggatcatctcaggctgatc

SEQ ID NO: 17746 - RNA, 22 nt, synthetic construct
  source 1..22: mol_type = other RNA
ctggttaccctgtccagagcac

SEQ ID NO: 17747 - RNA, 22 nt, synthetic construct
  source 1..22: mol_type = other RNA
ctgtccagagcacagctgggat

SEQ ID NO: 17748 - RNA, 22 nt, synthetic construct
  source 1..22: mol_type = other RNA
ctgtgctctggacagggtaacc

SEQ ID NO: 17749 - RNA, 22 nt, synthetic construct
  source 1..22: mol_type = other RNA
ctgttgttgcaggtgttcctgg

SEQ ID NO: 17750 - RNA, 22 nt, synthetic construct
  source 1..22: mol_type = other RNA
cttgcaggatgtggacgcccac

SEQ ID NO: 17751 - RNA, 22 nt, synthetic construct
  source 1..22: mol_type = other RNA
cttgggaggggagagccgcagt

SEQ ID NO: 17752 - RNA, 22 nt, synthetic construct
  source 1..22: mol_type = other RNA
gaacacctgcaacaacaggatt

SEQ ID NO: 17753 - RNA, 22 nt, synthetic construct
  source 1..22: mol_type = other RNA
gaatcctgttgttgcaggtgtt

SEQ ID NO: 17754 - RNA, 22 nt, synthetic construct
  source 1..22: mol_type = other RNA
gaatgggatggtgggcgtccac

SEQ ID NO: 17755 - RNA, 22 nt, synthetic construct
  source 1..22: mol_type = other RNA
gacactgaatgggatggtgggc

SEQ ID NO: 17756 - RNA, 22 nt, synthetic construct
  source 1..22: mol_type = other RNA
gacagggtaaccagggtgggct

SEQ ID NO: 17757 - RNA, 22 nt, synthetic construct
  source 1..22: mol_type = other RNA
gacgcccaccatcccattcagt

SEQ ID NO: 17758 - RNA, 22 nt, synthetic construct
  source 1..22: mol_type = other RNA
gactcagagccaggttagagga

SEQ ID NO: 17759 - RNA, 22 nt, synthetic construct
  source 1..22: mol_type = other RNA
gagatgatcccagctgtgctct

SEQ ID NO: 17760 - RNA, 22 nt, synthetic construct
  source 1..22: mol_type = other RNA
gagcacagctgggatcatctca

SEQ ID NO: 17761 - RNA, 22 nt, synthetic construct
  source 1..22: mol_type = other RNA
gagtcccatccccccttgcagg

SEQ ID NO: 17762 - RNA, 22 nt, synthetic construct
  source 1..22: mol_type = other RNA
gatcagcctgagatgatcccag

SEQ ID NO: 17763 - RNA, 22 nt, synthetic construct
  source 1..22: mol_type = other RNA
gatcatctcaggctgatccgtg

SEQ ID NO: 17764 - RNA, 22 nt, synthetic construct
  source 1..22: mol_type = other RNA
gatcccagctgtgctctggaca

SEQ ID NO: 17765 - RNA, 22 nt, synthetic construct
  source 1..22: mol_type = other RNA
gatccgtgaatcctgttgttgc

SEQ ID NO: 17766 - RNA, 22 nt, synthetic construct
  source 1..22: mol_type = other RNA
gatgatcccagctgtgctctgg

SEQ ID NO: 17767 - RNA, 22 nt, synthetic construct
  source 1..22: mol_type = other RNA
gatgggactcagagccaggtta

SEQ ID NO: 17768 - RNA, 22 nt, synthetic construct
  source 1..22: mol_type = other RNA
gatggtgggcgtccacatcctg

SEQ ID NO: 17769 - RNA, 22 nt, synthetic construct
  source 1..22: mol_type = other RNA
gatgtggacgcccaccatccca

SEQ ID NO: 17770 - RNA, 22 nt, synthetic construct
  source 1..22: mol_type = other RNA
gattcacggatcagcctgagat

SEQ ID NO: 17771 - RNA, 22 nt, synthetic construct
  source 1..22: mol_type = other RNA
gcaacaacaggattcacggatc

SEQ ID NO: 17772 - RNA, 22 nt, synthetic construct
  source 1..22: mol_type = other RNA
gcaaggggggatgggactcaga

SEQ ID NO: 17773 - RNA, 22 nt, synthetic construct
  source 1..22: mol_type = other RNA
gcacagctgggatcatctcagg

SEQ ID NO: 17774 - RNA, 22 nt, synthetic construct
  source 1..22: mol_type = other RNA
gcaggatgtggacgcccaccat

SEQ ID NO: 17775 - RNA, 22 nt, synthetic construct
  source 1..22: mol_type = other RNA
gcaggtgttcctggacactgaa

SEQ ID NO: 17776 - RNA, 22 nt, synthetic construct
  source 1..22: mol_type = other RNA
gcccaccatcccattcagtgtc

SEQ ID NO: 17777 - RNA, 22 nt, synthetic construct
  source 1..22: mol_type = other RNA
gcccaccctggttaccctgtcc

SEQ ID NO: 17778 - RNA, 22 nt, synthetic construct
  source 1..22: mol_type = other RNA
gccctctctcctctaacctggc

SEQ ID NO: 17779 - RNA, 22 nt, synthetic construct
  source 1..22: mol_type = other RNA
gcctgagatgatcccagctgtg

SEQ ID NO: 17780 - RNA, 22 nt, synthetic construct
  source 1..22: mol_type = other RNA
gcggctctcccctcccaagccc

SEQ ID NO: 17781 - RNA, 22 nt, synthetic construct
  source 1..22: mol_type = other RNA
gcgtccacatcctgcaaggggg

SEQ ID NO: 17782 - RNA, 22 nt, synthetic construct
  source 1..22: mol_type = other RNA
gctctcccctcccaagcccacc

SEQ ID NO: 17783 - RNA, 22 nt, synthetic construct
  source 1..22: mol_type = other RNA
gctctgagtcccatcccccctt

SEQ ID NO: 17784 - RNA, 22 nt, synthetic construct
  source 1..22: mol_type = other RNA
gctctggacagggtaaccaggg

SEQ ID NO: 17785 - RNA, 22 nt, synthetic construct
  source 1..22: mol_type = other RNA
gctgatccgtgaatcctgttgt

SEQ ID NO: 17786 - RNA, 22 nt, synthetic construct
  source 1..22: mol_type = other RNA
gctgggatcatctcaggctgat

SEQ ID NO: 17787 - RNA, 22 nt, synthetic construct
  source 1..22: mol_type = other RNA
gctgtgctctggacagggtaac

SEQ ID NO: 17788 - RNA, 22 nt, synthetic construct
  source 1..22: mol_type = other RNA
gcttgggaggggagagccgcag

SEQ ID NO: 17789 - RNA, 22 nt, synthetic construct
  source 1..22: mol_type = other RNA
ggaacacctgcaacaacaggat

SEQ ID NO: 17790 - RNA, 22 nt, synthetic construct
  source 1..22: mol_type = other RNA
ggacactgaatgggatggtggg

SEQ ID NO: 17791 - RNA, 22 nt, synthetic construct
  source 1..22: mol_type = other RNA
ggacagggtaaccagggtgggc

SEQ ID NO: 17792 - RNA, 22 nt, synthetic construct
  source 1..22: mol_type = other RNA
ggacgcccaccatcccattcag

SEQ ID NO: 17793 - RNA, 22 nt, synthetic construct
  source 1..22: mol_type = other RNA
ggactcagagccaggttagagg

SEQ ID NO: 17794 - RNA, 22 nt, synthetic construct
  source 1..22: mol_type = other RNA
ggatcagcctgagatgatccca

SEQ ID NO: 17795 - RNA, 22 nt, synthetic construct
  source 1..22: mol_type = other RNA
ggatcatctcaggctgatccgt

SEQ ID NO: 17796 - RNA, 22 nt, synthetic construct
  source 1..22: mol_type = other RNA
ggatgggactcagagccaggtt

SEQ ID NO: 17797 - RNA, 22 nt, synthetic construct
  source 1..22: mol_type = other RNA
ggatggtgggcgtccacatcct

SEQ ID NO: 17798 - RNA, 22 nt, synthetic construct
  source 1..22: mol_type = other RNA
ggatgtggacgcccaccatccc

SEQ ID NO: 17799 - RNA, 22 nt, synthetic construct
  source 1..22: mol_type = other RNA
ggattcacggatcagcctgaga

SEQ ID NO: 17800 - RNA, 22 nt, synthetic construct
  source 1..22: mol_type = other RNA
ggcgtccacatcctgcaagggg

SEQ ID NO: 17801 - RNA, 22 nt, synthetic construct
  source 1..22: mol_type = other RNA
ggctctcccctcccaagcccac

SEQ ID NO: 17802 - RNA, 22 nt, synthetic construct
  source 1..22: mol_type = other RNA
ggctctgagtcccatcccccct

SEQ ID NO: 17803 - RNA, 22 nt, synthetic construct
  source 1..22: mol_type = other RNA
ggctgatccgtgaatcctgttg

SEQ ID NO: 17804 - RNA, 22 nt, synthetic construct
  source 1..22: mol_type = other RNA
ggcttgggaggggagagccgca

SEQ ID NO: 17805 - RNA, 22 nt, synthetic construct
  source 1..22: mol_type = other RNA
gggactcagagccaggttagag

SEQ ID NO: 17806 - RNA, 22 nt, synthetic construct
  source 1..22: mol_type = other RNA
gggatcatctcaggctgatccg

SEQ ID NO: 17807 - RNA, 22 nt, synthetic construct
  source 1..22: mol_type = other RNA
gggatgggactcagagccaggt

SEQ ID NO: 17808 - RNA, 22 nt, synthetic construct
  source 1..22: mol_type = other RNA
gggatggtgggcgtccacatcc

SEQ ID NO: 17809 - RNA, 22 nt, synthetic construct
  source 1..22: mol_type = other RNA
gggcgtccacatcctgcaaggg

SEQ ID NO: 17810 - RNA, 22 nt, synthetic construct
  source 1..22: mol_type = other RNA
gggcttgggaggggagagccgc

SEQ ID NO: 17811 - RNA, 22 nt, synthetic construct
  source 1..22: mol_type = other RNA
ggggatgggactcagagccagg

SEQ ID NO: 17812 - RNA, 22 nt, synthetic construct
  source 1..22: mol_type = other RNA
gggggatgggactcagagccag

SEQ ID NO: 17813 - RNA, 22 nt, synthetic construct
  source 1..22: mol_type = other RNA
ggggggatgggactcagagcca

SEQ ID NO: 17814 - RNA, 22 nt, synthetic construct
  source 1..22: mol_type = other RNA
gggtaaccagggtgggcttggg

SEQ ID NO: 17815 - RNA, 22 nt, synthetic construct
  source 1..22: mol_type = other RNA
gggtgggcttgggaggggagag

SEQ ID NO: 17816 - RNA, 22 nt, synthetic construct
  source 1..22: mol_type = other RNA
ggtaaccagggtgggcttggga

SEQ ID NO: 17817 - RNA, 22 nt, synthetic construct
  source 1..22: mol_type = other RNA
ggtgggcgtccacatcctgcaa

SEQ ID NO: 17818 - RNA, 22 nt, synthetic construct
  source 1..22: mol_type = other RNA
ggtgggcttgggaggggagagc

SEQ ID NO: 17819 - RNA, 22 nt, synthetic construct
  source 1..22: mol_type = other RNA
ggtgttcctggacactgaatgg

SEQ ID NO: 17820 - RNA, 22 nt, synthetic construct
  source 1..22: mol_type = other RNA
ggttaccctgtccagagcacag

SEQ ID NO: 17821 - RNA, 22 nt, synthetic construct
  source 1..22: mol_type = other RNA
gtaaccagggtgggcttgggag

SEQ ID NO: 17822 - RNA, 22 nt, synthetic construct
  source 1..22: mol_type = other RNA
gtccacatcctgcaagggggga

SEQ ID NO: 17823 - RNA, 22 nt, synthetic construct
  source 1..22: mol_type = other RNA
gtccagagcacagctgggatca

SEQ ID NO: 17824 - RNA, 22 nt, synthetic construct
  source 1..22: mol_type = other RNA
gtccaggaacacctgcaacaac

SEQ ID NO: 17825 - RNA, 22 nt, synthetic construct
  source 1..22: mol_type = other RNA
gtcccatccccccttgcaggat

SEQ ID NO: 17826 - RNA, 22 nt, synthetic construct
  source 1..22: mol_type = other RNA
gtgaatcctgttgttgcaggtg

SEQ ID NO: 17827 - RNA, 22 nt, synthetic construct
  source 1..22: mol_type = other RNA
gtgctctggacagggtaaccag

SEQ ID NO: 17828 - RNA, 22 nt, synthetic construct
  source 1..22: mol_type = other RNA
gtggacgcccaccatcccattc

SEQ ID NO: 17829 - RNA, 22 nt, synthetic construct
  source 1..22: mol_type = other RNA
gtgggcgtccacatcctgcaag

SEQ ID NO: 17830 - RNA, 22 nt, synthetic construct
  source 1..22: mol_type = other RNA
gtgggcttgggaggggagagcc

SEQ ID NO: 17831 - RNA, 22 nt, synthetic construct
  source 1..22: mol_type = other RNA
gtgtccaggaacacctgcaaca

SEQ ID NO: 17832 - RNA, 22 nt, synthetic construct
  source 1..22: mol_type = other RNA
gtgttcctggacactgaatggg

SEQ ID NO: 17833 - RNA, 22 nt, synthetic construct
  source 1..22: mol_type = other RNA
gttaccctgtccagagcacagc

SEQ ID NO: 17834 - RNA, 22 nt, synthetic construct
  source 1..22: mol_type = other RNA
gttcctggacactgaatgggat

SEQ ID NO: 17835 - RNA, 22 nt, synthetic construct
  source 1..22: mol_type = other RNA
gttgcaggtgttcctggacact

SEQ ID NO: 17836 - RNA, 22 nt, synthetic construct
  source 1..22: mol_type = other RNA
gttgttgcaggtgttcctggac

SEQ ID NO: 17837 - RNA, 22 nt, synthetic construct
  source 1..22: mol_type = other RNA
taaccagggtgggcttgggagg

SEQ ID NO: 17838 - RNA, 22 nt, synthetic construct
  source 1..22: mol_type = other RNA
taacctggctctgagtcccatc

SEQ ID NO: 17839 - RNA, 22 nt, synthetic construct
  source 1..22: mol_type = other RNA
taccctgtccagagcacagctg

SEQ ID NO: 17840 - RNA, 22 nt, synthetic construct
  source 1..22: mol_type = other RNA
tcacggatcagcctgagatgat

SEQ ID NO: 17841 - RNA, 22 nt, synthetic construct
  source 1..22: mol_type = other RNA
tcagcctgagatgatcccagct

SEQ ID NO: 17842 - RNA, 22 nt, synthetic construct
  source 1..22: mol_type = other RNA
tcaggctgatccgtgaatcctg

SEQ ID NO: 17843 - RNA, 22 nt, synthetic construct
  source 1..22: mol_type = other RNA
tcagtgtccaggaacacctgca

SEQ ID NO: 17844 - RNA, 22 nt, synthetic construct
  source 1..22: mol_type = other RNA
tcatctcaggctgatccgtgaa

SEQ ID NO: 17845 - RNA, 22 nt, synthetic construct
  source 1..22: mol_type = other RNA
tccacatcctgcaaggggggat

SEQ ID NO: 17846 - RNA, 22 nt, synthetic construct
  source 1..22: mol_type = other RNA
tccagagcacagctgggatcat

SEQ ID NO: 17847 - RNA, 22 nt, synthetic construct
  source 1..22: mol_type = other RNA
tccaggaacacctgcaacaaca

SEQ ID NO: 17848 - RNA, 22 nt, synthetic construct
  source 1..22: mol_type = other RNA
tcccaagcccaccctggttacc

SEQ ID NO: 17849 - RNA, 22 nt, synthetic construct
  source 1..22: mol_type = other RNA
tcccagctgtgctctggacagg

SEQ ID NO: 17850 - RNA, 22 nt, synthetic construct
  source 1..22: mol_type = other RNA
tcccatccccccttgcaggatg

SEQ ID NO: 17851 - RNA, 22 nt, synthetic construct
  source 1..22: mol_type = other RNA
tcccattcagtgtccaggaaca

SEQ ID NO: 17852 - RNA, 22 nt, synthetic construct
  source 1..22: mol_type = other RNA
tccccccttgcaggatgtggac

SEQ ID NO: 17853 - RNA, 22 nt, synthetic construct
  source 1..22: mol_type = other RNA
tcccctcccaagcccaccctgg

SEQ ID NO: 17854 - RNA, 22 nt, synthetic construct
  source 1..22: mol_type = other RNA
tccgtgaatcctgttgttgcag

SEQ ID NO: 17855 - RNA, 22 nt, synthetic construct
  source 1..22: mol_type = other RNA
tcctctaacctggctctgagtc

SEQ ID NO: 17856 - RNA, 22 nt, synthetic construct
  source 1..22: mol_type = other RNA
tcctgcaaggggggatgggact

SEQ ID NO: 17857 - RNA, 22 nt, synthetic construct
  source 1..22: mol_type = other RNA
tcctggacactgaatgggatgg

SEQ ID NO: 17858 - RNA, 22 nt, synthetic construct
  source 1..22: mol_type = other RNA
tcctgttgttgcaggtgttcct

SEQ ID NO: 17859 - RNA, 22 nt, synthetic construct
  source 1..22: mol_type = other RNA
tctaacctggctctgagtccca

SEQ ID NO: 17860 - RNA, 22 nt, synthetic construct
  source 1..22: mol_type = other RNA
tctcaggctgatccgtgaatcc

SEQ ID NO: 17861 - RNA, 22 nt, synthetic construct
  source 1..22: mol_type = other RNA
tctcccctcccaagcccaccct

SEQ ID NO: 17862 - RNA, 22 nt, synthetic construct
  source 1..22: mol_type = other RNA
tctcctctaacctggctctgag

SEQ ID NO: 17863 - RNA, 22 nt, synthetic construct
  source 1..22: mol_type = other RNA
tctctcctctaacctggctctg

SEQ ID NO: 17864 - RNA, 22 nt, synthetic construct
  source 1..22: mol_type = other RNA
tctgagtcccatccccccttgc

SEQ ID NO: 17865 - RNA, 22 nt, synthetic construct
  source 1..22: mol_type = other RNA
tctggacagggtaaccagggtg

SEQ ID NO: 17866 - RNA, 22 nt, synthetic construct
  source 1..22: mol_type = other RNA
tgaatcctgttgttgcaggtgt

SEQ ID NO: 17867 - RNA, 22 nt, synthetic construct
  source 1..22: mol_type = other RNA
tgaatgggatggtgggcgtcca

SEQ ID NO: 17868 - RNA, 22 nt, synthetic construct
  source 1..22: mol_type = other RNA
tgagatgatcccagctgtgctc

SEQ ID NO: 17869 - RNA, 22 nt, synthetic construct
  source 1..22: mol_type = other RNA
tgagtcccatccccccttgcag

SEQ ID NO: 17870 - RNA, 22 nt, synthetic construct
  source 1..22: mol_type = other RNA
tgatcccagctgtgctctggac

SEQ ID NO: 17871 - RNA, 22 nt, synthetic construct
  source 1..22: mol_type = other RNA
tgatccgtgaatcctgttgttg

SEQ ID NO: 17872 - RNA, 22 nt, synthetic construct
  source 1..22: mol_type = other RNA
tgcaacaacaggattcacggat

SEQ ID NO: 17873 - RNA, 22 nt, synthetic construct
  source 1..22: mol_type = other RNA
tgcaaggggggatgggactcag

SEQ ID NO: 17874 - RNA, 22 nt, synthetic construct
  source 1..22: mol_type = other RNA
tgcaggatgtggacgcccacca

SEQ ID NO: 17875 - RNA, 22 nt, synthetic construct
  source 1..22: mol_type = other RNA
tgcaggtgttcctggacactga

SEQ ID NO: 17876 - RNA, 22 nt, synthetic construct
  source 1..22: mol_type = other RNA
tgcggctctcccctcccaagcc

SEQ ID NO: 17877 - RNA, 22 nt, synthetic construct
  source 1..22: mol_type = other RNA
tgctctggacagggtaaccagg

SEQ ID NO: 17878 - RNA, 22 nt, synthetic construct
  source 1..22: mol_type = other RNA
tggacactgaatgggatggtgg

SEQ ID NO: 17879 - RNA, 22 nt, synthetic construct
  source 1..22: mol_type = other RNA
tggacagggtaaccagggtggg

SEQ ID NO: 17880 - RNA, 22 nt, synthetic construct
  source 1..22: mol_type = other RNA
tggacgcccaccatcccattca

SEQ ID NO: 17881 - RNA, 22 nt, synthetic construct
  source 1..22: mol_type = other RNA
tggctctgagtcccatcccccc

SEQ ID NO: 17882 - RNA, 22 nt, synthetic construct
  source 1..22: mol_type = other RNA
tgggactcagagccaggttaga

SEQ ID NO: 17883 - RNA, 22 nt, synthetic construct
  source 1..22: mol_type = other RNA
tgggatcatctcaggctgatcc

SEQ ID NO: 17884 - RNA, 22 nt, synthetic construct
  source 1..22: mol_type = other RNA
tgggatggtgggcgtccacatc

SEQ ID NO: 17885 - RNA, 22 nt, synthetic construct
  source 1..22: mol_type = other RNA
tgggcgtccacatcctgcaagg

SEQ ID NO: 17886 - RNA, 22 nt, synthetic construct
  source 1..22: mol_type = other RNA
tgggcttgggaggggagagccg

SEQ ID NO: 17887 - RNA, 22 nt, synthetic construct
  source 1..22: mol_type = other RNA
tggtgggcgtccacatcctgca

SEQ ID NO: 17888 - RNA, 22 nt, synthetic construct
  source 1..22: mol_type = other RNA
tggttaccctgtccagagcaca

SEQ ID NO: 17889 - RNA, 22 nt, synthetic construct
  source 1..22: mol_type = other RNA
tgtccagagcacagctgggatc

SEQ ID NO: 17890 - RNA, 22 nt, synthetic construct
  source 1..22: mol_type = other RNA
tgtccaggaacacctgcaacaa

SEQ ID NO: 17891 - RNA, 22 nt, synthetic construct
  source 1..22: mol_type = other RNA
tgtgctctggacagggtaacca

SEQ ID NO: 17892 - RNA, 22 nt, synthetic construct
  source 1..22: mol_type = other RNA
tgtggacgcccaccatcccatt

SEQ ID NO: 17893 - RNA, 22 nt, synthetic construct
  source 1..22: mol_type = other RNA
tgttcctggacactgaatggga

SEQ ID NO: 17894 - RNA, 22 nt, synthetic construct
  source 1..22: mol_type = other RNA
tgttgcaggtgttcctggacac

SEQ ID NO: 17895 - RNA, 22 nt, synthetic construct
  source 1..22: mol_type = other RNA
tgttgttgcaggtgttcctgga

SEQ ID NO: 17896 - RNA, 22 nt, synthetic construct
  source 1..22: mol_type = other RNA
ttaccctgtccagagcacagct

SEQ ID NO: 17897 - RNA, 22 nt, synthetic construct
  source 1..22: mol_type = other RNA
ttcacggatcagcctgagatga

SEQ ID NO: 17898 - RNA, 22 nt, synthetic construct
  source 1..22: mol_type = other RNA
ttcagtgtccaggaacacctgc

SEQ ID NO: 17899 - RNA, 22 nt, synthetic construct
  source 1..22: mol_type = other RNA
ttcctggacactgaatgggatg

SEQ ID NO: 17900 - RNA, 22 nt, synthetic construct
  source 1..22: mol_type = other RNA
ttgcaggatgtggacgcccacc

SEQ ID NO: 17901 - RNA, 22 nt, synthetic construct
  source 1..22: mol_type = other RNA
ttgcaggtgttcctggacactg

SEQ ID NO: 17902 - RNA, 22 nt, synthetic construct
  source 1..22: mol_type = other RNA
ttgggaggggagagccgcagtg

SEQ ID NO: 17903 - RNA, 22 nt, synthetic construct
  source 1..22: mol_type = other RNA
ttgttgcaggtgttcctggaca

SEQ ID NO: 17904 - RNA, 20 nt, synthetic construct
  source 1..20: mol_type = other RNA
aaaaaggccgggaaagcatc

SEQ ID NO: 17905 - RNA, 20 nt, synthetic construct
  source 1..20: mol_type = other RNA
aaaaggccgggaaagcatct

SEQ ID NO: 17906 - RNA, 20 nt, synthetic construct
  source 1..20: mol_type = other RNA
aaagcatcttaatttagcgt

SEQ ID NO: 17907 - RNA, 20 nt, synthetic construct
  source 1..20: mol_type = other RNA
aaaggccgggaaagcatctt

SEQ ID NO: 17908 - RNA, 20 nt, synthetic construct
  source 1..20: mol_type = other RNA
aaattaagatgctttcccgg

SEQ ID NO: 17909 - RNA, 20 nt, synthetic construct
  source 1..20: mol_type = other RNA
aaccagtcaccagttgggag

SEQ ID NO: 17910 - RNA, 20 nt, synthetic construct
  source 1..20: mol_type = other RNA
aacgcattgtgtaggaatcc

SEQ ID NO: 17911 - RNA, 20 nt, synthetic construct
  source 1..20: mol_type = other RNA
aactggtgactggttagtga

SEQ ID NO: 17912 - RNA, 20 nt, synthetic construct
  source 1..20: mol_type = other RNA
aagatgctttcccggccttt

SEQ ID NO: 17913 - RNA, 20 nt, synthetic construct
  source 1..20: mol_type = other RNA
aagcacacagcctcatcact

SEQ ID NO: 17914 - RNA, 20 nt, synthetic construct
  source 1..20: mol_type = other RNA
aagcatcttaatttagcgtg

SEQ ID NO: 17915 - RNA, 20 nt, synthetic construct
  source 1..20: mol_type = other RNA
aagctgagggcacgaggagg

SEQ ID NO: 17916 - RNA, 20 nt, synthetic construct
  source 1..20: mol_type = other RNA
aaggatgccttcggatgccc

SEQ ID NO: 17917 - RNA, 20 nt, synthetic construct
  source 1..20: mol_type = other RNA
aaggcatccttggggaagct

SEQ ID NO: 17918 - RNA, 20 nt, synthetic construct
  source 1..20: mol_type = other RNA
aaggccgggaaagcatctta

SEQ ID NO: 17919 - RNA, 20 nt, synthetic construct
  source 1..20: mol_type = other RNA
aaggtaaaaaggccgggaaa

SEQ ID NO: 17920 - RNA, 20 nt, synthetic construct
  source 1..20: mol_type = other RNA
aatcccagccaggcagcagc

SEQ ID NO: 17921 - RNA, 20 nt, synthetic construct
  source 1..20: mol_type = other RNA
aatgcgttgcctggctccac

SEQ ID NO: 17922 - RNA, 20 nt, synthetic construct
  source 1..20: mol_type = other RNA
aattaagatgctttcccggc

SEQ ID NO: 17923 - RNA, 20 nt, synthetic construct
  source 1..20: mol_type = other RNA
acaatgcgttgcctggctcc

SEQ ID NO: 17924 - RNA, 20 nt, synthetic construct
  source 1..20: mol_type = other RNA
acacaatgcgttgcctggct

SEQ ID NO: 17925 - RNA, 20 nt, synthetic construct
  source 1..20: mol_type = other RNA
acacagcctcatcactagcc

SEQ ID NO: 17926 - RNA, 20 nt, synthetic construct
  source 1..20: mol_type = other RNA
acagcctcatcactagcctc

SEQ ID NO: 17927 - RNA, 20 nt, synthetic construct
  source 1..20: mol_type = other RNA
acaggtaggacccagcaggg

SEQ ID NO: 17928 - RNA, 20 nt, synthetic construct
  source 1..20: mol_type = other RNA
accagtcaccagttgggagc

SEQ ID NO: 17929 - RNA, 20 nt, synthetic construct
  source 1..20: mol_type = other RNA
accagttgggagcccgccaa

SEQ ID NO: 17930 - RNA, 20 nt, synthetic construct
  source 1..20: mol_type = other RNA
acccagcagggcgtggagcc

SEQ ID NO: 17931 - RNA, 20 nt, synthetic construct
  source 1..20: mol_type = other RNA
acctgtcagagccccaaggt

SEQ ID NO: 17932 - RNA, 20 nt, synthetic construct
  source 1..20: mol_type = other RNA
accttggggctctgacaggt

SEQ ID NO: 17933 - RNA, 20 nt, synthetic construct
  source 1..20: mol_type = other RNA
acgaggaggggctgccagac

SEQ ID NO: 17934 - RNA, 20 nt, synthetic construct
  source 1..20: mol_type = other RNA
acgcattgtgtaggaatccc

SEQ ID NO: 17935 - RNA, 20 nt, synthetic construct
  source 1..20: mol_type = other RNA
acgccctgctgggtcctacc

SEQ ID NO: 17936 - RNA, 20 nt, synthetic construct
  source 1..20: mol_type = other RNA
acgctaaattaagatgcttt

SEQ ID NO: 17937 - RNA, 20 nt, synthetic construct
  source 1..20: mol_type = other RNA
actaaccagtcaccagttgg

SEQ ID NO: 17938 - RNA, 20 nt, synthetic construct
  source 1..20: mol_type = other RNA
actagcctcatcactaacca

SEQ ID NO: 17939 - RNA, 20 nt, synthetic construct
  source 1..20: mol_type = other RNA
actccgggagctgctgcctg

SEQ ID NO: 17940 - RNA, 20 nt, synthetic construct
  source 1..20: mol_type = other RNA
actgcacgctaaattaagat

SEQ ID NO: 17941 - RNA, 20 nt, synthetic construct
  source 1..20: mol_type = other RNA
actggtgactggttagtgat

SEQ ID NO: 17942 - RNA, 20 nt, synthetic construct
  source 1..20: mol_type = other RNA
actggttagtgatgaggcta

SEQ ID NO: 17943 - RNA, 20 nt, synthetic construct
  source 1..20: mol_type = other RNA
agaagcacacagcctcatca

SEQ ID NO: 17944 - RNA, 20 nt, synthetic construct
  source 1..20: mol_type = other RNA
agactccgggagctgctgcc

SEQ ID NO: 17945 - RNA, 20 nt, synthetic construct
  source 1..20: mol_type = other RNA
agactgcacgctaaattaag

SEQ ID NO: 17946 - RNA, 20 nt, synthetic construct
  source 1..20: mol_type = other RNA
agagccccaaggtaaaaagg

SEQ ID NO: 17947 - RNA, 20 nt, synthetic construct
  source 1..20: mol_type = other RNA
agatgctttcccggcctttt

SEQ ID NO: 17948 - RNA, 20 nt, synthetic construct
  source 1..20: mol_type = other RNA
agcacacagcctcatcacta

SEQ ID NO: 17949 - RNA, 20 nt, synthetic construct
  source 1..20: mol_type = other RNA
agcagctcccggagtctggc

SEQ ID NO: 17950 - RNA, 20 nt, synthetic construct
  source 1..20: mol_type = other RNA
agcagggcgtggagccaggc

SEQ ID NO: 17951 - RNA, 20 nt, synthetic construct
  source 1..20: mol_type = other RNA
agcatcttaatttagcgtgc

SEQ ID NO: 17952 - RNA, 20 nt, synthetic construct
  source 1..20: mol_type = other RNA
agccaggcaacgcattgtgt

SEQ ID NO: 17953 - RNA, 20 nt, synthetic construct
  source 1..20: mol_type = other RNA
agccaggcagcagctcccgg

SEQ ID NO: 17954 - RNA, 20 nt, synthetic construct
  source 1..20: mol_type = other RNA
agccccaaggtaaaaaggcc

SEQ ID NO: 17955 - RNA, 20 nt, synthetic construct
  source 1..20: mol_type = other RNA
agcccctcctcgtgccctca

SEQ ID NO: 17956 - RNA, 20 nt, synthetic construct
  source 1..20: mol_type = other RNA
agcccgccaagctaagccaa

SEQ ID NO: 17957 - RNA, 20 nt, synthetic construct
  source 1..20: mol_type = other RNA
agcctcatcactaaccagtc

SEQ ID NO: 17958 - RNA, 20 nt, synthetic construct
  source 1..20: mol_type = other RNA
agcctcatcactagcctcat

SEQ ID NO: 17959 - RNA, 20 nt, synthetic construct
  source 1..20: mol_type = other RNA
agctcagaagcacacagcct

SEQ ID NO: 17960 - RNA, 20 nt, synthetic construct
  source 1..20: mol_type = other RNA
agctcccggagtctggcagc

SEQ ID NO: 17961 - RNA, 20 nt, synthetic construct
  source 1..20: mol_type = other RNA
agctgagggcacgaggaggg

SEQ ID NO: 17962 - RNA, 20 nt, synthetic construct
  source 1..20: mol_type = other RNA
agctgctgcctggctgggat

SEQ ID NO: 17963 - RNA, 20 nt, synthetic construct
  source 1..20: mol_type = other RNA
agctgggcatccgaaggcat

SEQ ID NO: 17964 - RNA, 20 nt, synthetic construct
  source 1..20: mol_type = other RNA
agcttccccaaggatgcctt

SEQ ID NO: 17965 - RNA, 20 nt, synthetic construct
  source 1..20: mol_type = other RNA
agcttggcgggctcccaact

SEQ ID NO: 17966 - RNA, 20 nt, synthetic construct
  source 1..20: mol_type = other RNA
aggaatcccagccaggcagc

SEQ ID NO: 17967 - RNA, 20 nt, synthetic construct
  source 1..20: mol_type = other RNA
aggacccagcagggcgtgga

SEQ ID NO: 17968 - RNA, 20 nt, synthetic construct
  source 1..20: mol_type = other RNA
aggaggggctgccagactcc

SEQ ID NO: 17969 - RNA, 20 nt, synthetic construct
  source 1..20: mol_type = other RNA
aggatgccttcggatgccca

SEQ ID NO: 17970 - RNA, 20 nt, synthetic construct
  source 1..20: mol_type = other RNA
aggcaacgcattgtgtagga

SEQ ID NO: 17971 - RNA, 20 nt, synthetic construct
  source 1..20: mol_type = other RNA
aggcagcagctcccggagtc

SEQ ID NO: 17972 - RNA, 20 nt, synthetic construct
  source 1..20: mol_type = other RNA
aggcatccttggggaagctg

SEQ ID NO: 17973 - RNA, 20 nt, synthetic construct
  source 1..20: mol_type = other RNA
aggccgggaaagcatcttaa

SEQ ID NO: 17974 - RNA, 20 nt, synthetic construct
  source 1..20: mol_type = other RNA
aggctagtgatgaggctgtg

SEQ ID NO: 17975 - RNA, 20 nt, synthetic construct
  source 1..20: mol_type = other RNA
aggctgtgtgcttctgagct

SEQ ID NO: 17976 - RNA, 20 nt, synthetic construct
  source 1..20: mol_type = other RNA
agggcacgaggaggggctgc

SEQ ID NO: 17977 - RNA, 20 nt, synthetic construct
  source 1..20: mol_type = other RNA
agggcgtggagccaggcaac

SEQ ID NO: 17978 - RNA, 20 nt, synthetic construct
  source 1..20: mol_type = other RNA
aggggctgccagactccggg

SEQ ID NO: 17979 - RNA, 20 nt, synthetic construct
  source 1..20: mol_type = other RNA
aggtaaaaaggccgggaaag

SEQ ID NO: 17980 - RNA, 20 nt, synthetic construct
  source 1..20: mol_type = other RNA
aggtaggacccagcagggcg

SEQ ID NO: 17981 - RNA, 20 nt, synthetic construct
  source 1..20: mol_type = other RNA
agtcaccagttgggagcccg

SEQ ID NO: 17982 - RNA, 20 nt, synthetic construct
  source 1..20: mol_type = other RNA
agtctggcagcccctcctcg

SEQ ID NO: 17983 - RNA, 20 nt, synthetic construct
  source 1..20: mol_type = other RNA
agtgatgaggctagtgatga

SEQ ID NO: 17984 - RNA, 20 nt, synthetic construct
  source 1..20: mol_type = other RNA
agtgatgaggctgtgtgctt

SEQ ID NO: 17985 - RNA, 20 nt, synthetic construct
  source 1..20: mol_type = other RNA
agttgggagcccgccaagct

SEQ ID NO: 17986 - RNA, 20 nt, synthetic construct
  source 1..20: mol_type = other RNA
atcactaaccagtcaccagt

SEQ ID NO: 17987 - RNA, 20 nt, synthetic construct
  source 1..20: mol_type = other RNA
atcactagcctcatcactaa

SEQ ID NO: 17988 - RNA, 20 nt, synthetic construct
  source 1..20: mol_type = other RNA
atcccagccaggcagcagct

SEQ ID NO: 17989 - RNA, 20 nt, synthetic construct
  source 1..20: mol_type = other RNA
atccgaaggcatccttgggg

SEQ ID NO: 17990 - RNA, 20 nt, synthetic construct
  source 1..20: mol_type = other RNA
atccttggggaagctgaggg

SEQ ID NO: 17991 - RNA, 20 nt, synthetic construct
  source 1..20: mol_type = other RNA
atgaggctagtgatgaggct

SEQ ID NO: 17992 - RNA, 20 nt, synthetic construct
  source 1..20: mol_type = other RNA
atgaggctgtgtgcttctga

SEQ ID NO: 17993 - RNA, 20 nt, synthetic construct
  source 1..20: mol_type = other RNA
atgcccagctcagaagcaca

SEQ ID NO: 17994 - RNA, 20 nt, synthetic construct
  source 1..20: mol_type = other RNA
atgccttcggatgcccagct

SEQ ID NO: 17995 - RNA, 20 nt, synthetic construct
  source 1..20: mol_type = other RNA
atgcgttgcctggctccacg

SEQ ID NO: 17996 - RNA, 20 nt, synthetic construct
  source 1..20: mol_type = other RNA
atgctttcccggccttttta

SEQ ID NO: 17997 - RNA, 20 nt, synthetic construct
  source 1..20: mol_type = other RNA
atgttggcttagcttggcgg

SEQ ID NO: 17998 - RNA, 20 nt, synthetic construct
  source 1..20: mol_type = other RNA
attaagatgctttcccggcc

SEQ ID NO: 17999 - RNA, 20 nt, synthetic construct
  source 1..20: mol_type = other RNA
attcctacacaatgcgttgc

SEQ ID NO: 18000 - RNA, 20 nt, synthetic construct
  source 1..20: mol_type = other RNA
attgtgtaggaatcccagcc

SEQ ID NO: 18001 - RNA, 20 nt, synthetic construct
  source 1..20: mol_type = other RNA
caacgcattgtgtaggaatc

SEQ ID NO: 18002 - RNA, 20 nt, synthetic construct
  source 1..20: mol_type = other RNA
caactggtgactggttagtg

SEQ ID NO: 18003 - RNA, 20 nt, synthetic construct
  source 1..20: mol_type = other RNA
caaggatgccttcggatgcc

SEQ ID NO: 18004 - RNA, 20 nt, synthetic construct
  source 1..20: mol_type = other RNA
caaggtaaaaaggccgggaa

SEQ ID NO: 18005 - RNA, 20 nt, synthetic construct
  source 1..20: mol_type = other RNA
caatgcgttgcctggctcca

SEQ ID NO: 18006 - RNA, 20 nt, synthetic construct
  source 1..20: mol_type = other RNA
cacaatgcgttgcctggctc

SEQ ID NO: 18007 - RNA, 20 nt, synthetic construct
  source 1..20: mol_type = other RNA
cacacagcctcatcactagc

SEQ ID NO: 18008 - RNA, 20 nt, synthetic construct
  source 1..20: mol_type = other RNA
cacagcctcatcactagcct

SEQ ID NO: 18009 - RNA, 20 nt, synthetic construct
  source 1..20: mol_type = other RNA
caccagttgggagcccgcca

SEQ ID NO: 18010 - RNA, 20 nt, synthetic construct
  source 1..20: mol_type = other RNA
cacgaggaggggctgccaga

SEQ ID NO: 18011 - RNA, 20 nt, synthetic construct
  source 1..20: mol_type = other RNA
cacgccctgctgggtcctac

SEQ ID NO: 18012 - RNA, 20 nt, synthetic construct
  source 1..20: mol_type = other RNA
cacgctaaattaagatgctt

SEQ ID NO: 18013 - RNA, 20 nt, synthetic construct
  source 1..20: mol_type = other RNA
cactaaccagtcaccagttg

SEQ ID NO: 18014 - RNA, 20 nt, synthetic construct
  source 1..20: mol_type = other RNA
cactagcctcatcactaacc

SEQ ID NO: 18015 - RNA, 20 nt, synthetic construct
  source 1..20: mol_type = other RNA
cagaagcacacagcctcatc

SEQ ID NO: 18016 - RNA, 20 nt, synthetic construct
  source 1..20: mol_type = other RNA
cagactccgggagctgctgc

SEQ ID NO: 18017 - RNA, 20 nt, synthetic construct
  source 1..20: mol_type = other RNA
cagagccccaaggtaaaaag

SEQ ID NO: 18018 - RNA, 20 nt, synthetic construct
  source 1..20: mol_type = other RNA
cagcagctcccggagtctgg

SEQ ID NO: 18019 - RNA, 20 nt, synthetic construct
  source 1..20: mol_type = other RNA
cagcagggcgtggagccagg

SEQ ID NO: 18020 - RNA, 20 nt, synthetic construct
  source 1..20: mol_type = other RNA
cagccaggcagcagctcccg

SEQ ID NO: 18021 - RNA, 20 nt, synthetic construct
  source 1..20: mol_type = other RNA
cagcccctcctcgtgccctc

SEQ ID NO: 18022 - RNA, 20 nt, synthetic construct
  source 1..20: mol_type = other RNA
cagcctcatcactagcctca

SEQ ID NO: 18023 - RNA, 20 nt, synthetic construct
  source 1..20: mol_type = other RNA
cagctcagaagcacacagcc

SEQ ID NO: 18024 - RNA, 20 nt, synthetic construct
  source 1..20: mol_type = other RNA
cagctcccggagtctggcag

SEQ ID NO: 18025 - RNA, 20 nt, synthetic construct
  source 1..20: mol_type = other RNA
cagcttccccaaggatgcct

SEQ ID NO: 18026 - RNA, 20 nt, synthetic construct
  source 1..20: mol_type = other RNA
caggcaacgcattgtgtagg

SEQ ID NO: 18027 - RNA, 20 nt, synthetic construct
  source 1..20: mol_type = other RNA
caggcagcagctcccggagt

SEQ ID NO: 18028 - RNA, 20 nt, synthetic construct
  source 1..20: mol_type = other RNA
cagggcgtggagccaggcaa

SEQ ID NO: 18029 - RNA, 20 nt, synthetic construct
  source 1..20: mol_type = other RNA
caggtaggacccagcagggc

SEQ ID NO: 18030 - RNA, 20 nt, synthetic construct
  source 1..20: mol_type = other RNA
cagtcaccagttgggagccc

SEQ ID NO: 18031 - RNA, 20 nt, synthetic construct
  source 1..20: mol_type = other RNA
cagttgggagcccgccaagc

SEQ ID NO: 18032 - RNA, 20 nt, synthetic construct
  source 1..20: mol_type = other RNA
catcactaaccagtcaccag

SEQ ID NO: 18033 - RNA, 20 nt, synthetic construct
  source 1..20: mol_type = other RNA
catcactagcctcatcacta

SEQ ID NO: 18034 - RNA, 20 nt, synthetic construct
  source 1..20: mol_type = other RNA
catccgaaggcatccttggg

SEQ ID NO: 18035 - RNA, 20 nt, synthetic construct
  source 1..20: mol_type = other RNA
catccttggggaagctgagg

SEQ ID NO: 18036 - RNA, 20 nt, synthetic construct
  source 1..20: mol_type = other RNA
catgttggcttagcttggcg

SEQ ID NO: 18037 - RNA, 20 nt, synthetic construct
  source 1..20: mol_type = other RNA
cattgtgtaggaatcccagc

SEQ ID NO: 18038 - RNA, 20 nt, synthetic construct
  source 1..20: mol_type = other RNA
ccaactggtgactggttagt

SEQ ID NO: 18039 - RNA, 20 nt, synthetic construct
  source 1..20: mol_type = other RNA
ccaaggatgccttcggatgc

SEQ ID NO: 18040 - RNA, 20 nt, synthetic construct
  source 1..20: mol_type = other RNA
ccaaggtaaaaaggccggga

SEQ ID NO: 18041 - RNA, 20 nt, synthetic construct
  source 1..20: mol_type = other RNA
ccacgccctgctgggtccta

SEQ ID NO: 18042 - RNA, 20 nt, synthetic construct
  source 1..20: mol_type = other RNA
ccagactccgggagctgctg

SEQ ID NO: 18043 - RNA, 20 nt, synthetic construct
  source 1..20: mol_type = other RNA
ccagcagggcgtggagccag

SEQ ID NO: 18044 - RNA, 20 nt, synthetic construct
  source 1..20: mol_type = other RNA
ccagccaggcagcagctccc

SEQ ID NO: 18045 - RNA, 20 nt, synthetic construct
  source 1..20: mol_type = other RNA
ccagctcagaagcacacagc

SEQ ID NO: 18046 - RNA, 20 nt, synthetic construct
  source 1..20: mol_type = other RNA
ccaggcaacgcattgtgtag

SEQ ID NO: 18047 - RNA, 20 nt, synthetic construct
  source 1..20: mol_type = other RNA
ccaggcagcagctcccggag

SEQ ID NO: 18048 - RNA, 20 nt, synthetic construct
  source 1..20: mol_type = other RNA
ccagtcaccagttgggagcc

SEQ ID NO: 18049 - RNA, 20 nt, synthetic construct
  source 1..20: mol_type = other RNA
ccagttgggagcccgccaag

SEQ ID NO: 18050 - RNA, 20 nt, synthetic construct
  source 1..20: mol_type = other RNA
cccaactggtgactggttag

SEQ ID NO: 18051 - RNA, 20 nt, synthetic construct
  source 1..20: mol_type = other RNA
cccaaggatgccttcggatg

SEQ ID NO: 18052 - RNA, 20 nt, synthetic construct
  source 1..20: mol_type = other RNA
cccaaggtaaaaaggccggg

SEQ ID NO: 18053 - RNA, 20 nt, synthetic construct
  source 1..20: mol_type = other RNA
cccagcagggcgtggagcca

SEQ ID NO: 18054 - RNA, 20 nt, synthetic construct
  source 1..20: mol_type = other RNA
cccagccaggcagcagctcc

SEQ ID NO: 18055 - RNA, 20 nt, synthetic construct
  source 1..20: mol_type = other RNA
cccagctcagaagcacacag

SEQ ID NO: 18056 - RNA, 20 nt, synthetic construct
  source 1..20: mol_type = other RNA
ccccaaggatgccttcggat

SEQ ID NO: 18057 - RNA, 20 nt, synthetic construct
  source 1..20: mol_type = other RNA
ccccaaggtaaaaaggccgg

SEQ ID NO: 18058 - RNA, 20 nt, synthetic construct
  source 1..20: mol_type = other RNA
cccctcctcgtgccctcagc

SEQ ID NO: 18059 - RNA, 20 nt, synthetic construct
  source 1..20: mol_type = other RNA
cccggagtctggcagcccct

SEQ ID NO: 18060 - RNA, 20 nt, synthetic construct
  source 1..20: mol_type = other RNA
cccggcctttttaccttggg

SEQ ID NO: 18061 - RNA, 20 nt, synthetic construct
  source 1..20: mol_type = other RNA
ccctcagcttccccaaggat

SEQ ID NO: 18062 - RNA, 20 nt, synthetic construct
  source 1..20: mol_type = other RNA
ccctcctcgtgccctcagct

SEQ ID NO: 18063 - RNA, 20 nt, synthetic construct
  source 1..20: mol_type = other RNA
ccctgctgggtcctacctgt

SEQ ID NO: 18064 - RNA, 20 nt, synthetic construct
  source 1..20: mol_type = other RNA
ccgaaggcatccttggggaa

SEQ ID NO: 18065 - RNA, 20 nt, synthetic construct
  source 1..20: mol_type = other RNA
ccggagtctggcagcccctc

SEQ ID NO: 18066 - RNA, 20 nt, synthetic construct
  source 1..20: mol_type = other RNA
ccggcctttttaccttgggg

SEQ ID NO: 18067 - RNA, 20 nt, synthetic construct
  source 1..20: mol_type = other RNA
ccgggaaagcatcttaattt

SEQ ID NO: 18068 - RNA, 20 nt, synthetic construct
  source 1..20: mol_type = other RNA
ccgggagctgctgcctggct

SEQ ID NO: 18069 - RNA, 20 nt, synthetic construct
  source 1..20: mol_type = other RNA
cctacacaatgcgttgcctg

SEQ ID NO: 18070 - RNA, 20 nt, synthetic construct
  source 1..20: mol_type = other RNA
cctacctgtcagagccccaa

SEQ ID NO: 18071 - RNA, 20 nt, synthetic construct
  source 1..20: mol_type = other RNA
cctcagcttccccaaggatg

SEQ ID NO: 18072 - RNA, 20 nt, synthetic construct
  source 1..20: mol_type = other RNA
cctcatcactaaccagtcac

SEQ ID NO: 18073 - RNA, 20 nt, synthetic construct
  source 1..20: mol_type = other RNA
cctcatcactagcctcatca

SEQ ID NO: 18074 - RNA, 20 nt, synthetic construct
  source 1..20: mol_type = other RNA
cctcctcgtgccctcagctt

SEQ ID NO: 18075 - RNA, 20 nt, synthetic construct
  source 1..20: mol_type = other RNA
cctcgtgccctcagcttccc

SEQ ID NO: 18076 - RNA, 20 nt, synthetic construct
  source 1..20: mol_type = other RNA
cctgctgggtcctacctgtc

SEQ ID NO: 18077 - RNA, 20 nt, synthetic construct
  source 1..20: mol_type = other RNA
cctggctccacgccctgctg

SEQ ID NO: 18078 - RNA, 20 nt, synthetic construct
  source 1..20: mol_type = other RNA
cctggctgggattcctacac

SEQ ID NO: 18079 - RNA, 20 nt, synthetic construct
  source 1..20: mol_type = other RNA
cctgtcagagccccaaggta

SEQ ID NO: 18080 - RNA, 20 nt, synthetic construct
  source 1..20: mol_type = other RNA
ccttcggatgcccagctcag

SEQ ID NO: 18081 - RNA, 20 nt, synthetic construct
  source 1..20: mol_type = other RNA
ccttggggaagctgagggca

SEQ ID NO: 18082 - RNA, 20 nt, synthetic construct
  source 1..20: mol_type = other RNA
ccttggggctctgacaggta

SEQ ID NO: 18083 - RNA, 20 nt, synthetic construct
  source 1..20: mol_type = other RNA
cctttttaccttggggctct

SEQ ID NO: 18084 - RNA, 20 nt, synthetic construct
  source 1..20: mol_type = other RNA
cgaaggcatccttggggaag

SEQ ID NO: 18085 - RNA, 20 nt, synthetic construct
  source 1..20: mol_type = other RNA
cgaggaggggctgccagact

SEQ ID NO: 18086 - RNA, 20 nt, synthetic construct
  source 1..20: mol_type = other RNA
cgcattgtgtaggaatccca

SEQ ID NO: 18087 - RNA, 20 nt, synthetic construct
  source 1..20: mol_type = other RNA
cgccctgctgggtcctacct

SEQ ID NO: 18088 - RNA, 20 nt, synthetic construct
  source 1..20: mol_type = other RNA
cgctaaattaagatgctttc

SEQ ID NO: 18089 - RNA, 20 nt, synthetic construct
  source 1..20: mol_type = other RNA
cggagtctggcagcccctcc

SEQ ID NO: 18090 - RNA, 20 nt, synthetic construct
  source 1..20: mol_type = other RNA
cggatgcccagctcagaagc

SEQ ID NO: 18091 - RNA, 20 nt, synthetic construct
  source 1..20: mol_type = other RNA
cggcctttttaccttggggc

SEQ ID NO: 18092 - RNA, 20 nt, synthetic construct
  source 1..20: mol_type = other RNA
cgggaaagcatcttaattta

SEQ ID NO: 18093 - RNA, 20 nt, synthetic construct
  source 1..20: mol_type = other RNA
cgggagctgctgcctggctg

SEQ ID NO: 18094 - RNA, 20 nt, synthetic construct
  source 1..20: mol_type = other RNA
cgggctcccaactggtgact

SEQ ID NO: 18095 - RNA, 20 nt, synthetic construct
  source 1..20: mol_type = other RNA
cgtgccctcagcttccccaa

SEQ ID NO: 18096 - RNA, 20 nt, synthetic construct
  source 1..20: mol_type = other RNA
cgtggagccaggcaacgcat

SEQ ID NO: 18097 - RNA, 20 nt, synthetic construct
  source 1..20: mol_type = other RNA
cgttgcctggctccacgccc

SEQ ID NO: 18098 - RNA, 20 nt, synthetic construct
  source 1..20: mol_type = other RNA
ctaaattaagatgctttccc

SEQ ID NO: 18099 - RNA, 20 nt, synthetic construct
  source 1..20: mol_type = other RNA
ctaaccagtcaccagttggg

SEQ ID NO: 18100 - RNA, 20 nt, synthetic construct
  source 1..20: mol_type = other RNA
ctacacaatgcgttgcctgg

SEQ ID NO: 18101 - RNA, 20 nt, synthetic construct
  source 1..20: mol_type = other RNA
ctacctgtcagagccccaag

SEQ ID NO: 18102 - RNA, 20 nt, synthetic construct
  source 1..20: mol_type = other RNA
ctagcctcatcactaaccag

SEQ ID NO: 18103 - RNA, 20 nt, synthetic construct
  source 1..20: mol_type = other RNA
ctagtgatgaggctgtgtgc

SEQ ID NO: 18104 - RNA, 20 nt, synthetic construct
  source 1..20: mol_type = other RNA
ctcagaagcacacagcctca

SEQ ID NO: 18105 - RNA, 20 nt, synthetic construct
  source 1..20: mol_type = other RNA
ctcagcttccccaaggatgc

SEQ ID NO: 18106 - RNA, 20 nt, synthetic construct
  source 1..20: mol_type = other RNA
ctcatcactaaccagtcacc

SEQ ID NO: 18107 - RNA, 20 nt, synthetic construct
  source 1..20: mol_type = other RNA
ctcatcactagcctcatcac

SEQ ID NO: 18108 - RNA, 20 nt, synthetic construct
  source 1..20: mol_type = other RNA
ctccacgccctgctgggtcc

SEQ ID NO: 18109 - RNA, 20 nt, synthetic construct
  source 1..20: mol_type = other RNA
ctcccaactggtgactggtt

SEQ ID NO: 18110 - RNA, 20 nt, synthetic construct
  source 1..20: mol_type = other RNA
ctcccggagtctggcagccc

SEQ ID NO: 18111 - RNA, 20 nt, synthetic construct
  source 1..20: mol_type = other RNA
ctccgggagctgctgcctgg

SEQ ID NO: 18112 - RNA, 20 nt, synthetic construct
  source 1..20: mol_type = other RNA
ctcctcgtgccctcagcttc

SEQ ID NO: 18113 - RNA, 20 nt, synthetic construct
  source 1..20: mol_type = other RNA
ctcgtgccctcagcttcccc

SEQ ID NO: 18114 - RNA, 20 nt, synthetic construct
  source 1..20: mol_type = other RNA
ctctgacaggtaggacccag

SEQ ID NO: 18115 - RNA, 20 nt, synthetic construct
  source 1..20: mol_type = other RNA
ctgacaggtaggacccagca

SEQ ID NO: 18116 - RNA, 20 nt, synthetic construct
  source 1..20: mol_type = other RNA
ctgagactgcacgctaaatt

SEQ ID NO: 18117 - RNA, 20 nt, synthetic construct
  source 1..20: mol_type = other RNA
ctgagctgggcatccgaagg

SEQ ID NO: 18118 - RNA, 20 nt, synthetic construct
  source 1..20: mol_type = other RNA
ctgagggcacgaggaggggc

SEQ ID NO: 18119 - RNA, 20 nt, synthetic construct
  source 1..20: mol_type = other RNA
ctgcacgctaaattaagatg

SEQ ID NO: 18120 - RNA, 20 nt, synthetic construct
  source 1..20: mol_type = other RNA
ctgccagactccgggagctg

SEQ ID NO: 18121 - RNA, 20 nt, synthetic construct
  source 1..20: mol_type = other RNA
ctgcctggctgggattccta

SEQ ID NO: 18122 - RNA, 20 nt, synthetic construct
  source 1..20: mol_type = other RNA
ctgctgcctggctgggattc

SEQ ID NO: 18123 - RNA, 20 nt, synthetic construct
  source 1..20: mol_type = other RNA
ctgctgggtcctacctgtca

SEQ ID NO: 18124 - RNA, 20 nt, synthetic construct
  source 1..20: mol_type = other RNA
ctggcagcccctcctcgtgc

SEQ ID NO: 18125 - RNA, 20 nt, synthetic construct
  source 1..20: mol_type = other RNA
ctggctccacgccctgctgg

SEQ ID NO: 18126 - RNA, 20 nt, synthetic construct
  source 1..20: mol_type = other RNA
ctggctgggattcctacaca

SEQ ID NO: 18127 - RNA, 20 nt, synthetic construct
  source 1..20: mol_type = other RNA
ctgggattcctacacaatgc

SEQ ID NO: 18128 - RNA, 20 nt, synthetic construct
  source 1..20: mol_type = other RNA
ctgggcatccgaaggcatcc

SEQ ID NO: 18129 - RNA, 20 nt, synthetic construct
  source 1..20: mol_type = other RNA
ctgggtcctacctgtcagag

SEQ ID NO: 18130 - RNA, 20 nt, synthetic construct
  source 1..20: mol_type = other RNA
ctggtgactggttagtgatg

SEQ ID NO: 18131 - RNA, 20 nt, synthetic construct
  source 1..20: mol_type = other RNA
ctggttagtgatgaggctag

SEQ ID NO: 18132 - RNA, 20 nt, synthetic construct
  source 1..20: mol_type = other RNA
ctgtcagagccccaaggtaa

SEQ ID NO: 18133 - RNA, 20 nt, synthetic construct
  source 1..20: mol_type = other RNA
ctgtgtgcttctgagctggg

SEQ ID NO: 18134 - RNA, 20 nt, synthetic construct
  source 1..20: mol_type = other RNA
cttagcttggcgggctccca

SEQ ID NO: 18135 - RNA, 20 nt, synthetic construct
  source 1..20: mol_type = other RNA
cttccccaaggatgccttcg

SEQ ID NO: 18136 - RNA, 20 nt, synthetic construct
  source 1..20: mol_type = other RNA
cttcggatgcccagctcaga

SEQ ID NO: 18137 - RNA, 20 nt, synthetic construct
  source 1..20: mol_type = other RNA
cttctgagctgggcatccga

SEQ ID NO: 18138 - RNA, 20 nt, synthetic construct
  source 1..20: mol_type = other RNA
cttggcgggctcccaactgg

SEQ ID NO: 18139 - RNA, 20 nt, synthetic construct
  source 1..20: mol_type = other RNA
cttggggaagctgagggcac

SEQ ID NO: 18140 - RNA, 20 nt, synthetic construct
  source 1..20: mol_type = other RNA
cttggggctctgacaggtag

SEQ ID NO: 18141 - RNA, 20 nt, synthetic construct
  source 1..20: mol_type = other RNA
ctttcccggcctttttacct

SEQ ID NO: 18142 - RNA, 20 nt, synthetic construct
  source 1..20: mol_type = other RNA
ctttttaccttggggctctg

SEQ ID NO: 18143 - RNA, 20 nt, synthetic construct
  source 1..20: mol_type = other RNA
gaaagcatcttaatttagcg

SEQ ID NO: 18144 - RNA, 20 nt, synthetic construct
  source 1..20: mol_type = other RNA
gaagcacacagcctcatcac

SEQ ID NO: 18145 - RNA, 20 nt, synthetic construct
  source 1..20: mol_type = other RNA
gaagctgagggcacgaggag

SEQ ID NO: 18146 - RNA, 20 nt, synthetic construct
  source 1..20: mol_type = other RNA
gaaggcatccttggggaagc

SEQ ID NO: 18147 - RNA, 20 nt, synthetic construct
  source 1..20: mol_type = other RNA
gaatcccagccaggcagcag

SEQ ID NO: 18148 - RNA, 20 nt, synthetic construct
  source 1..20: mol_type = other RNA
gacaggtaggacccagcagg

SEQ ID NO: 18149 - RNA, 20 nt, synthetic construct
  source 1..20: mol_type = other RNA
gacccagcagggcgtggagc

SEQ ID NO: 18150 - RNA, 20 nt, synthetic construct
  source 1..20: mol_type = other RNA
gactccgggagctgctgcct

SEQ ID NO: 18151 - RNA, 20 nt, synthetic construct
  source 1..20: mol_type = other RNA
gactgcacgctaaattaaga

SEQ ID NO: 18152 - RNA, 20 nt, synthetic construct
  source 1..20: mol_type = other RNA
gactggttagtgatgaggct

SEQ ID NO: 18153 - RNA, 20 nt, synthetic construct
  source 1..20: mol_type = other RNA
gagactgcacgctaaattaa

SEQ ID NO: 18154 - RNA, 20 nt, synthetic construct
  source 1..20: mol_type = other RNA
gagccaggcaacgcattgtg

SEQ ID NO: 18155 - RNA, 20 nt, synthetic construct
  source 1..20: mol_type = other RNA
gagccccaaggtaaaaaggc

SEQ ID NO: 18156 - RNA, 20 nt, synthetic construct
  source 1..20: mol_type = other RNA
gagcccgccaagctaagcca

SEQ ID NO: 18157 - RNA, 20 nt, synthetic construct
  source 1..20: mol_type = other RNA
gagctgctgcctggctggga

SEQ ID NO: 18158 - RNA, 20 nt, synthetic construct
  source 1..20: mol_type = other RNA
gagctgggcatccgaaggca

SEQ ID NO: 18159 - RNA, 20 nt, synthetic construct
  source 1..20: mol_type = other RNA
gaggaggggctgccagactc

SEQ ID NO: 18160 - RNA, 20 nt, synthetic construct
  source 1..20: mol_type = other RNA
gaggctagtgatgaggctgt

SEQ ID NO: 18161 - RNA, 20 nt, synthetic construct
  source 1..20: mol_type = other RNA
gaggctgtgtgcttctgagc

SEQ ID NO: 18162 - RNA, 20 nt, synthetic construct
  source 1..20: mol_type = other RNA
gagggcacgaggaggggctg

SEQ ID NO: 18163 - RNA, 20 nt, synthetic construct
  source 1..20: mol_type = other RNA
gaggggctgccagactccgg

SEQ ID NO: 18164 - RNA, 20 nt, synthetic construct
  source 1..20: mol_type = other RNA
gagtctggcagcccctcctc

SEQ ID NO: 18165 - RNA, 20 nt, synthetic construct
  source 1..20: mol_type = other RNA
gatgaggctagtgatgaggc

SEQ ID NO: 18166 - RNA, 20 nt, synthetic construct
  source 1..20: mol_type = other RNA
gatgaggctgtgtgcttctg

SEQ ID NO: 18167 - RNA, 20 nt, synthetic construct
  source 1..20: mol_type = other RNA
gatgcccagctcagaagcac

SEQ ID NO: 18168 - RNA, 20 nt, synthetic construct
  source 1..20: mol_type = other RNA
gatgccttcggatgcccagc

SEQ ID NO: 18169 - RNA, 20 nt, synthetic construct
  source 1..20: mol_type = other RNA
gatgctttcccggccttttt

SEQ ID NO: 18170 - RNA, 20 nt, synthetic construct
  source 1..20: mol_type = other RNA
gattcctacacaatgcgttg

SEQ ID NO: 18171 - RNA, 20 nt, synthetic construct
  source 1..20: mol_type = other RNA
gcaacgcattgtgtaggaat

SEQ ID NO: 18172 - RNA, 20 nt, synthetic construct
  source 1..20: mol_type = other RNA
gcacacagcctcatcactag

SEQ ID NO: 18173 - RNA, 20 nt, synthetic construct
  source 1..20: mol_type = other RNA
gcacgaggaggggctgccag

SEQ ID NO: 18174 - RNA, 20 nt, synthetic construct
  source 1..20: mol_type = other RNA
gcacgctaaattaagatgct

SEQ ID NO: 18175 - RNA, 20 nt, synthetic construct
  source 1..20: mol_type = other RNA
gcagcagctcccggagtctg

SEQ ID NO: 18176 - RNA, 20 nt, synthetic construct
  source 1..20: mol_type = other RNA
gcagcccctcctcgtgccct

SEQ ID NO: 18177 - RNA, 20 nt, synthetic construct
  source 1..20: mol_type = other RNA
gcagctcccggagtctggca

SEQ ID NO: 18178 - RNA, 20 nt, synthetic construct
  source 1..20: mol_type = other RNA
gcagggcgtggagccaggca

SEQ ID NO: 18179 - RNA, 20 nt, synthetic construct
  source 1..20: mol_type = other RNA
gcatccgaaggcatccttgg

SEQ ID NO: 18180 - RNA, 20 nt, synthetic construct
  source 1..20: mol_type = other RNA
gcatccttggggaagctgag

SEQ ID NO: 18181 - RNA, 20 nt, synthetic construct
  source 1..20: mol_type = other RNA
gcatcttaatttagcgtgca

SEQ ID NO: 18182 - RNA, 20 nt, synthetic construct
  source 1..20: mol_type = other RNA
gcatgttggcttagcttggc

SEQ ID NO: 18183 - RNA, 20 nt, synthetic construct
  source 1..20: mol_type = other RNA
gcattgtgtaggaatcccag

SEQ ID NO: 18184 - RNA, 20 nt, synthetic construct
  source 1..20: mol_type = other RNA
gccagactccgggagctgct

SEQ ID NO: 18185 - RNA, 20 nt, synthetic construct
  source 1..20: mol_type = other RNA
gccaggcaacgcattgtgta

SEQ ID NO: 18186 - RNA, 20 nt, synthetic construct
  source 1..20: mol_type = other RNA
gccaggcagcagctcccgga

SEQ ID NO: 18187 - RNA, 20 nt, synthetic construct
  source 1..20: mol_type = other RNA
gcccagctcagaagcacaca

SEQ ID NO: 18188 - RNA, 20 nt, synthetic construct
  source 1..20: mol_type = other RNA
gccccaaggtaaaaaggccg

SEQ ID NO: 18189 - RNA, 20 nt, synthetic construct
  source 1..20: mol_type = other RNA
gcccctcctcgtgccctcag

SEQ ID NO: 18190 - RNA, 20 nt, synthetic construct
  source 1..20: mol_type = other RNA
gccctcagcttccccaagga

SEQ ID NO: 18191 - RNA, 20 nt, synthetic construct
  source 1..20: mol_type = other RNA
gccctgctgggtcctacctg

SEQ ID NO: 18192 - RNA, 20 nt, synthetic construct
  source 1..20: mol_type = other RNA
gccgggaaagcatcttaatt

SEQ ID NO: 18193 - RNA, 20 nt, synthetic construct
  source 1..20: mol_type = other RNA
gcctcatcactaaccagtca

SEQ ID NO: 18194 - RNA, 20 nt, synthetic construct
  source 1..20: mol_type = other RNA
gcctcatcactagcctcatc

SEQ ID NO: 18195 - RNA, 20 nt, synthetic construct
  source 1..20: mol_type = other RNA
gcctggctccacgccctgct

SEQ ID NO: 18196 - RNA, 20 nt, synthetic construct
  source 1..20: mol_type = other RNA
gcctggctgggattcctaca

SEQ ID NO: 18197 - RNA, 20 nt, synthetic construct
  source 1..20: mol_type = other RNA
gccttcggatgcccagctca

SEQ ID NO: 18198 - RNA, 20 nt, synthetic construct
  source 1..20: mol_type = other RNA
gcctttttaccttggggctc

SEQ ID NO: 18199 - RNA, 20 nt, synthetic construct
  source 1..20: mol_type = other RNA
gcgggctcccaactggtgac

SEQ ID NO: 18200 - RNA, 20 nt, synthetic construct
  source 1..20: mol_type = other RNA
gcgtggagccaggcaacgca

SEQ ID NO: 18201 - RNA, 20 nt, synthetic construct
  source 1..20: mol_type = other RNA
gcgttgcctggctccacgcc

SEQ ID NO: 18202 - RNA, 20 nt, synthetic construct
  source 1..20: mol_type = other RNA
gctaaattaagatgctttcc

SEQ ID NO: 18203 - RNA, 20 nt, synthetic construct
  source 1..20: mol_type = other RNA
gctagtgatgaggctgtgtg

SEQ ID NO: 18204 - RNA, 20 nt, synthetic construct
  source 1..20: mol_type = other RNA
gctcagaagcacacagcctc

SEQ ID NO: 18205 - RNA, 20 nt, synthetic construct
  source 1..20: mol_type = other RNA
gctccacgccctgctgggtc

SEQ ID NO: 18206 - RNA, 20 nt, synthetic construct
  source 1..20: mol_type = other RNA
gctcccaactggtgactggt

SEQ ID NO: 18207 - RNA, 20 nt, synthetic construct
  source 1..20: mol_type = other RNA
gctcccggagtctggcagcc

SEQ ID NO: 18208 - RNA, 20 nt, synthetic construct
  source 1..20: mol_type = other RNA
gctctgacaggtaggaccca

SEQ ID NO: 18209 - RNA, 20 nt, synthetic construct
  source 1..20: mol_type = other RNA
gctgagactgcacgctaaat

SEQ ID NO: 18210 - RNA, 20 nt, synthetic construct
  source 1..20: mol_type = other RNA
gctgagggcacgaggagggg

SEQ ID NO: 18211 - RNA, 20 nt, synthetic construct
  source 1..20: mol_type = other RNA
gctgccagactccgggagct

SEQ ID NO: 18212 - RNA, 20 nt, synthetic construct
  source 1..20: mol_type = other RNA
gctgcctggctgggattcct

SEQ ID NO: 18213 - RNA, 20 nt, synthetic construct
  source 1..20: mol_type = other RNA
gctgctgcctggctgggatt

SEQ ID NO: 18214 - RNA, 20 nt, synthetic construct
  source 1..20: mol_type = other RNA
gctgggattcctacacaatg

SEQ ID NO: 18215 - RNA, 20 nt, synthetic construct
  source 1..20: mol_type = other RNA
gctgggcatccgaaggcatc

SEQ ID NO: 18216 - RNA, 20 nt, synthetic construct
  source 1..20: mol_type = other RNA
gctgggtcctacctgtcaga

SEQ ID NO: 18217 - RNA, 20 nt, synthetic construct
  source 1..20: mol_type = other RNA
gctgtgtgcttctgagctgg

SEQ ID NO: 18218 - RNA, 20 nt, synthetic construct
  source 1..20: mol_type = other RNA
gcttagcttggcgggctccc

SEQ ID NO: 18219 - RNA, 20 nt, synthetic construct
  source 1..20: mol_type = other RNA
gcttccccaaggatgccttc

SEQ ID NO: 18220 - RNA, 20 nt, synthetic construct
  source 1..20: mol_type = other RNA
gcttctgagctgggcatccg

SEQ ID NO: 18221 - RNA, 20 nt, synthetic construct
  source 1..20: mol_type = other RNA
gcttggcgggctcccaactg

SEQ ID NO: 18222 - RNA, 20 nt, synthetic construct
  source 1..20: mol_type = other RNA
gctttcccggcctttttacc

SEQ ID NO: 18223 - RNA, 20 nt, synthetic construct
  source 1..20: mol_type = other RNA
ggaaagcatcttaatttagc

SEQ ID NO: 18224 - RNA, 20 nt, synthetic construct
  source 1..20: mol_type = other RNA
ggaagctgagggcacgagga

SEQ ID NO: 18225 - RNA, 20 nt, synthetic construct
  source 1..20: mol_type = other RNA
ggaatcccagccaggcagca

SEQ ID NO: 18226 - RNA, 20 nt, synthetic construct
  source 1..20: mol_type = other RNA
ggacccagcagggcgtggag

SEQ ID NO: 18227 - RNA, 20 nt, synthetic construct
  source 1..20: mol_type = other RNA
ggagccaggcaacgcattgt

SEQ ID NO: 18228 - RNA, 20 nt, synthetic construct
  source 1..20: mol_type = other RNA
ggagcccgccaagctaagcc

SEQ ID NO: 18229 - RNA, 20 nt, synthetic construct
  source 1..20: mol_type = other RNA
ggagctgctgcctggctggg

SEQ ID NO: 18230 - RNA, 20 nt, synthetic construct
  source 1..20: mol_type = other RNA
ggaggggctgccagactccg

SEQ ID NO: 18231 - RNA, 20 nt, synthetic construct
  source 1..20: mol_type = other RNA
ggagtctggcagcccctcct

SEQ ID NO: 18232 - RNA, 20 nt, synthetic construct
  source 1..20: mol_type = other RNA
ggatgcccagctcagaagca

SEQ ID NO: 18233 - RNA, 20 nt, synthetic construct
  source 1..20: mol_type = other RNA
ggatgccttcggatgcccag

SEQ ID NO: 18234 - RNA, 20 nt, synthetic construct
  source 1..20: mol_type = other RNA
ggattcctacacaatgcgtt

SEQ ID NO: 18235 - RNA, 20 nt, synthetic construct
  source 1..20: mol_type = other RNA
ggcaacgcattgtgtaggaa

SEQ ID NO: 18236 - RNA, 20 nt, synthetic construct
  source 1..20: mol_type = other RNA
ggcacgaggaggggctgcca

SEQ ID NO: 18237 - RNA, 20 nt, synthetic construct
  source 1..20: mol_type = other RNA
ggcagcagctcccggagtct

SEQ ID NO: 18238 - RNA, 20 nt, synthetic construct
  source 1..20: mol_type = other RNA
ggcagcccctcctcgtgccc

SEQ ID NO: 18239 - RNA, 20 nt, synthetic construct
  source 1..20: mol_type = other RNA
ggcatccgaaggcatccttg

SEQ ID NO: 18240 - RNA, 20 nt, synthetic construct
  source 1..20: mol_type = other RNA
ggcatccttggggaagctga

SEQ ID NO: 18241 - RNA, 20 nt, synthetic construct
  source 1..20: mol_type = other RNA
ggccgggaaagcatcttaat

SEQ ID NO: 18242 - RNA, 20 nt, synthetic construct
  source 1..20: mol_type = other RNA
ggcctttttaccttggggct

SEQ ID NO: 18243 - RNA, 20 nt, synthetic construct
  source 1..20: mol_type = other RNA
ggcgggctcccaactggtga

SEQ ID NO: 18244 - RNA, 20 nt, synthetic construct
  source 1..20: mol_type = other RNA
ggcgtggagccaggcaacgc

SEQ ID NO: 18245 - RNA, 20 nt, synthetic construct
  source 1..20: mol_type = other RNA
ggctagtgatgaggctgtgt

SEQ ID NO: 18246 - RNA, 20 nt, synthetic construct
  source 1..20: mol_type = other RNA
ggctccacgccctgctgggt

SEQ ID NO: 18247 - RNA, 20 nt, synthetic construct
  source 1..20: mol_type = other RNA
ggctcccaactggtgactgg

SEQ ID NO: 18248 - RNA, 20 nt, synthetic construct
  source 1..20: mol_type = other RNA
ggctctgacaggtaggaccc

SEQ ID NO: 18249 - RNA, 20 nt, synthetic construct
  source 1..20: mol_type = other RNA
ggctgccagactccgggagc

SEQ ID NO: 18250 - RNA, 20 nt, synthetic construct
  source 1..20: mol_type = other RNA
ggctgggattcctacacaat

SEQ ID NO: 18251 - RNA, 20 nt, synthetic construct
  source 1..20: mol_type = other RNA
ggctgtgtgcttctgagctg

SEQ ID NO: 18252 - RNA, 20 nt, synthetic construct
  source 1..20: mol_type = other RNA
ggcttagcttggcgggctcc

SEQ ID NO: 18253 - RNA, 20 nt, synthetic construct
  source 1..20: mol_type = other RNA
gggaaagcatcttaatttag

SEQ ID NO: 18254 - RNA, 20 nt, synthetic construct
  source 1..20: mol_type = other RNA
gggaagctgagggcacgagg

SEQ ID NO: 18255 - RNA, 20 nt, synthetic construct
  source 1..20: mol_type = other RNA
gggagcccgccaagctaagc

SEQ ID NO: 18256 - RNA, 20 nt, synthetic construct
  source 1..20: mol_type = other RNA
gggagctgctgcctggctgg

SEQ ID NO: 18257 - RNA, 20 nt, synthetic construct
  source 1..20: mol_type = other RNA
gggattcctacacaatgcgt

SEQ ID NO: 18258 - RNA, 20 nt, synthetic construct
  source 1..20: mol_type = other RNA
gggcacgaggaggggctgcc

SEQ ID NO: 18259 - RNA, 20 nt, synthetic construct
  source 1..20: mol_type = other RNA
gggcatccgaaggcatcctt

SEQ ID NO: 18260 - RNA, 20 nt, synthetic construct
  source 1..20: mol_type = other RNA
gggcgtggagccaggcaacg

SEQ ID NO: 18261 - RNA, 20 nt, synthetic construct
  source 1..20: mol_type = other RNA
gggctcccaactggtgactg

SEQ ID NO: 18262 - RNA, 20 nt, synthetic construct
  source 1..20: mol_type = other RNA
gggctctgacaggtaggacc

SEQ ID NO: 18263 - RNA, 20 nt, synthetic construct
  source 1..20: mol_type = other RNA
gggctgccagactccgggag

SEQ ID NO: 18264 - RNA, 20 nt, synthetic construct
  source 1..20: mol_type = other RNA
ggggaagctgagggcacgag

SEQ ID NO: 18265 - RNA, 20 nt, synthetic construct
  source 1..20: mol_type = other RNA
ggggctctgacaggtaggac

SEQ ID NO: 18266 - RNA, 20 nt, synthetic construct
  source 1..20: mol_type = other RNA
ggggctgccagactccggga

SEQ ID NO: 18267 - RNA, 20 nt, synthetic construct
  source 1..20: mol_type = other RNA
gggtcctacctgtcagagcc

SEQ ID NO: 18268 - RNA, 20 nt, synthetic construct
  source 1..20: mol_type = other RNA
ggtaaaaaggccgggaaagc

SEQ ID NO: 18269 - RNA, 20 nt, synthetic construct
  source 1..20: mol_type = other RNA
ggtaggacccagcagggcgt

SEQ ID NO: 18270 - RNA, 20 nt, synthetic construct
  source 1..20: mol_type = other RNA
ggtcctacctgtcagagccc

SEQ ID NO: 18271 - RNA, 20 nt, synthetic construct
  source 1..20: mol_type = other RNA
ggtgactggttagtgatgag

SEQ ID NO: 18272 - RNA, 20 nt, synthetic construct
  source 1..20: mol_type = other RNA
ggttagtgatgaggctagtg

SEQ ID NO: 18273 - RNA, 20 nt, synthetic construct
  source 1..20: mol_type = other RNA
gtaaaaaggccgggaaagca

SEQ ID NO: 18274 - RNA, 20 nt, synthetic construct
  source 1..20: mol_type = other RNA
gtaggaatcccagccaggca

SEQ ID NO: 18275 - RNA, 20 nt, synthetic construct
  source 1..20: mol_type = other RNA
gtaggacccagcagggcgtg

SEQ ID NO: 18276 - RNA, 20 nt, synthetic construct
  source 1..20: mol_type = other RNA
gtcaccagttgggagcccgc

SEQ ID NO: 18277 - RNA, 20 nt, synthetic construct
  source 1..20: mol_type = other RNA
gtcagagccccaaggtaaaa

SEQ ID NO: 18278 - RNA, 20 nt, synthetic construct
  source 1..20: mol_type = other RNA
gtcctacctgtcagagcccc

SEQ ID NO: 18279 - RNA, 20 nt, synthetic construct
  source 1..20: mol_type = other RNA
gtctggcagcccctcctcgt

SEQ ID NO: 18280 - RNA, 20 nt, synthetic construct
  source 1..20: mol_type = other RNA
gtgactggttagtgatgagg

SEQ ID NO: 18281 - RNA, 20 nt, synthetic construct
  source 1..20: mol_type = other RNA
gtgatgaggctagtgatgag

SEQ ID NO: 18282 - RNA, 20 nt, synthetic construct
  source 1..20: mol_type = other RNA
gtgatgaggctgtgtgcttc

SEQ ID NO: 18283 - RNA, 20 nt, synthetic construct
  source 1..20: mol_type = other RNA
gtgccctcagcttccccaag

SEQ ID NO: 18284 - RNA, 20 nt, synthetic construct
  source 1..20: mol_type = other RNA
gtgcttctgagctgggcatc

SEQ ID NO: 18285 - RNA, 20 nt, synthetic construct
  source 1..20: mol_type = other RNA
gtggagccaggcaacgcatt

SEQ ID NO: 18286 - RNA, 20 nt, synthetic construct
  source 1..20: mol_type = other RNA
gtgtaggaatcccagccagg

SEQ ID NO: 18287 - RNA, 20 nt, synthetic construct
  source 1..20: mol_type = other RNA
gtgtgcttctgagctgggca

SEQ ID NO: 18288 - RNA, 20 nt, synthetic construct
  source 1..20: mol_type = other RNA
gttagtgatgaggctagtga

SEQ ID NO: 18289 - RNA, 20 nt, synthetic construct
  source 1..20: mol_type = other RNA
gttgcctggctccacgccct

SEQ ID NO: 18290 - RNA, 20 nt, synthetic construct
  source 1..20: mol_type = other RNA
gttggcttagcttggcgggc

SEQ ID NO: 18291 - RNA, 20 nt, synthetic construct
  source 1..20: mol_type = other RNA
gttgggagcccgccaagcta

SEQ ID NO: 18292 - RNA, 20 nt, synthetic construct
  source 1..20: mol_type = other RNA
taaaaaggccgggaaagcat

SEQ ID NO: 18293 - RNA, 20 nt, synthetic construct
  source 1..20: mol_type = other RNA
taaattaagatgctttcccg

SEQ ID NO: 18294 - RNA, 20 nt, synthetic construct
  source 1..20: mol_type = other RNA
taaccagtcaccagttggga

SEQ ID NO: 18295 - RNA, 20 nt, synthetic construct
  source 1..20: mol_type = other RNA
taagatgctttcccggcctt

SEQ ID NO: 18296 - RNA, 20 nt, synthetic construct
  source 1..20: mol_type = other RNA
tacacaatgcgttgcctggc

SEQ ID NO: 18297 - RNA, 20 nt, synthetic construct
  source 1..20: mol_type = other RNA
tacctgtcagagccccaagg

SEQ ID NO: 18298 - RNA, 20 nt, synthetic construct
  source 1..20: mol_type = other RNA
taccttggggctctgacagg

SEQ ID NO: 18299 - RNA, 20 nt, synthetic construct
  source 1..20: mol_type = other RNA
tagcctcatcactaaccagt

SEQ ID NO: 18300 - RNA, 20 nt, synthetic construct
  source 1..20: mol_type = other RNA
tagcttggcgggctcccaac

SEQ ID NO: 18301 - RNA, 20 nt, synthetic construct
  source 1..20: mol_type = other RNA
taggaatcccagccaggcag

SEQ ID NO: 18302 - RNA, 20 nt, synthetic construct
  source 1..20: mol_type = other RNA
taggacccagcagggcgtgg

SEQ ID NO: 18303 - RNA, 20 nt, synthetic construct
  source 1..20: mol_type = other RNA
tagtgatgaggctagtgatg

SEQ ID NO: 18304 - RNA, 20 nt, synthetic construct
  source 1..20: mol_type = other RNA
tagtgatgaggctgtgtgct

SEQ ID NO: 18305 - RNA, 20 nt, synthetic construct
  source 1..20: mol_type = other RNA
tcaccagttgggagcccgcc

SEQ ID NO: 18306 - RNA, 20 nt, synthetic construct
  source 1..20: mol_type = other RNA
tcactaaccagtcaccagtt

SEQ ID NO: 18307 - RNA, 20 nt, synthetic construct
  source 1..20: mol_type = other RNA
tcactagcctcatcactaac

SEQ ID NO: 18308 - RNA, 20 nt, synthetic construct
  source 1..20: mol_type = other RNA
tcagaagcacacagcctcat

SEQ ID NO: 18309 - RNA, 20 nt, synthetic construct
  source 1..20: mol_type = other RNA
tcagagccccaaggtaaaaa

SEQ ID NO: 18310 - RNA, 20 nt, synthetic construct
  source 1..20: mol_type = other RNA
tcagcttccccaaggatgcc

SEQ ID NO: 18311 - RNA, 20 nt, synthetic construct
  source 1..20: mol_type = other RNA
tcatcactaaccagtcacca

SEQ ID NO: 18312 - RNA, 20 nt, synthetic construct
  source 1..20: mol_type = other RNA
tcatcactagcctcatcact

SEQ ID NO: 18313 - RNA, 20 nt, synthetic construct
  source 1..20: mol_type = other RNA
tccacgccctgctgggtcct

SEQ ID NO: 18314 - RNA, 20 nt, synthetic construct
  source 1..20: mol_type = other RNA
tcccaactggtgactggtta

SEQ ID NO: 18315 - RNA, 20 nt, synthetic construct
  source 1..20: mol_type = other RNA
tcccagccaggcagcagctc

SEQ ID NO: 18316 - RNA, 20 nt, synthetic construct
  source 1..20: mol_type = other RNA
tccccaaggatgccttcgga

SEQ ID NO: 18317 - RNA, 20 nt, synthetic construct
  source 1..20: mol_type = other RNA
tcccggagtctggcagcccc

SEQ ID NO: 18318 - RNA, 20 nt, synthetic construct
  source 1..20: mol_type = other RNA
tcccggcctttttaccttgg

SEQ ID NO: 18319 - RNA, 20 nt, synthetic construct
  source 1..20: mol_type = other RNA
tccgaaggcatccttgggga

SEQ ID NO: 18320 - RNA, 20 nt, synthetic construct
  source 1..20: mol_type = other RNA
tccgggagctgctgcctggc

SEQ ID NO: 18321 - RNA, 20 nt, synthetic construct
  source 1..20: mol_type = other RNA
tcctacacaatgcgttgcct

SEQ ID NO: 18322 - RNA, 20 nt, synthetic construct
  source 1..20: mol_type = other RNA
tcctacctgtcagagcccca

SEQ ID NO: 18323 - RNA, 20 nt, synthetic construct
  source 1..20: mol_type = other RNA
tcctcgtgccctcagcttcc

SEQ ID NO: 18324 - RNA, 20 nt, synthetic construct
  source 1..20: mol_type = other RNA
tccttggggaagctgagggc

SEQ ID NO: 18325 - RNA, 20 nt, synthetic construct
  source 1..20: mol_type = other RNA
tcggatgcccagctcagaag

SEQ ID NO: 18326 - RNA, 20 nt, synthetic construct
  source 1..20: mol_type = other RNA
tcgtgccctcagcttcccca

SEQ ID NO: 18327 - RNA, 20 nt, synthetic construct
  source 1..20: mol_type = other RNA
tctgacaggtaggacccagc

SEQ ID NO: 18328 - RNA, 20 nt, synthetic construct
  source 1..20: mol_type = other RNA
tctgagctgggcatccgaag

SEQ ID NO: 18329 - RNA, 20 nt, synthetic construct
  source 1..20: mol_type = other RNA
tctggcagcccctcctcgtg

SEQ ID NO: 18330 - RNA, 20 nt, synthetic construct
  source 1..20: mol_type = other RNA
tgacaggtaggacccagcag

SEQ ID NO: 18331 - RNA, 20 nt, synthetic construct
  source 1..20: mol_type = other RNA
tgactggttagtgatgaggc

SEQ ID NO: 18332 - RNA, 20 nt, synthetic construct
  source 1..20: mol_type = other RNA
tgagactgcacgctaaatta

SEQ ID NO: 18333 - RNA, 20 nt, synthetic construct
  source 1..20: mol_type = other RNA
tgagctgggcatccgaaggc

SEQ ID NO: 18334 - RNA, 20 nt, synthetic construct
  source 1..20: mol_type = other RNA
tgaggctagtgatgaggctg

SEQ ID NO: 18335 - RNA, 20 nt, synthetic construct
  source 1..20: mol_type = other RNA
tgaggctgtgtgcttctgag

SEQ ID NO: 18336 - RNA, 20 nt, synthetic construct
  source 1..20: mol_type = other RNA
tgagggcacgaggaggggct

SEQ ID NO: 18337 - RNA, 20 nt, synthetic construct
  source 1..20: mol_type = other RNA
tgatgaggctagtgatgagg

SEQ ID NO: 18338 - RNA, 20 nt, synthetic construct
  source 1..20: mol_type = other RNA
tgatgaggctgtgtgcttct

SEQ ID NO: 18339 - RNA, 20 nt, synthetic construct
  source 1..20: mol_type = other RNA
tgcacgctaaattaagatgc

SEQ ID NO: 18340 - RNA, 20 nt, synthetic construct
  source 1..20: mol_type = other RNA
tgcatgttggcttagcttgg

SEQ ID NO: 18341 - RNA, 20 nt, synthetic construct
  source 1..20: mol_type = other RNA
tgccagactccgggagctgc

SEQ ID NO: 18342 - RNA, 20 nt, synthetic construct
  source 1..20: mol_type = other RNA
tgcccagctcagaagcacac

SEQ ID NO: 18343 - RNA, 20 nt, synthetic construct
  source 1..20: mol_type = other RNA
tgccctcagcttccccaagg

SEQ ID NO: 18344 - RNA, 20 nt, synthetic construct
  source 1..20: mol_type = other RNA
tgcctggctccacgccctgc

SEQ ID NO: 18345 - RNA, 20 nt, synthetic construct
  source 1..20: mol_type = other RNA
tgcctggctgggattcctac

SEQ ID NO: 18346 - RNA, 20 nt, synthetic construct
  source 1..20: mol_type = other RNA
tgccttcggatgcccagctc

SEQ ID NO: 18347 - RNA, 20 nt, synthetic construct
  source 1..20: mol_type = other RNA
tgcgttgcctggctccacgc

SEQ ID NO: 18348 - RNA, 20 nt, synthetic construct
  source 1..20: mol_type = other RNA
tgctgcctggctgggattcc

SEQ ID NO: 18349 - RNA, 20 nt, synthetic construct
  source 1..20: mol_type = other RNA
tgctgggtcctacctgtcag

SEQ ID NO: 18350 - RNA, 20 nt, synthetic construct
  source 1..20: mol_type = other RNA
tgcttctgagctgggcatcc

SEQ ID NO: 18351 - RNA, 20 nt, synthetic construct
  source 1..20: mol_type = other RNA
tgctttcccggcctttttac

SEQ ID NO: 18352 - RNA, 20 nt, synthetic construct
  source 1..20: mol_type = other RNA
tggagccaggcaacgcattg

SEQ ID NO: 18353 - RNA, 20 nt, synthetic construct
  source 1..20: mol_type = other RNA
tggcagcccctcctcgtgcc

SEQ ID NO: 18354 - RNA, 20 nt, synthetic construct
  source 1..20: mol_type = other RNA
tggcgggctcccaactggtg

SEQ ID NO: 18355 - RNA, 20 nt, synthetic construct
  source 1..20: mol_type = other RNA
tggctccacgccctgctggg

SEQ ID NO: 18356 - RNA, 20 nt, synthetic construct
  source 1..20: mol_type = other RNA
tggctgggattcctacacaa

SEQ ID NO: 18357 - RNA, 20 nt, synthetic construct
  source 1..20: mol_type = other RNA
tggcttagcttggcgggctc

SEQ ID NO: 18358 - RNA, 20 nt, synthetic construct
  source 1..20: mol_type = other RNA
tgggagcccgccaagctaag

SEQ ID NO: 18359 - RNA, 20 nt, synthetic construct
  source 1..20: mol_type = other RNA
tgggattcctacacaatgcg

SEQ ID NO: 18360 - RNA, 20 nt, synthetic construct
  source 1..20: mol_type = other RNA
tgggcatccgaaggcatcct

SEQ ID NO: 18361 - RNA, 20 nt, synthetic construct
  source 1..20: mol_type = other RNA
tggggaagctgagggcacga

SEQ ID NO: 18362 - RNA, 20 nt, synthetic construct
  source 1..20: mol_type = other RNA
tggggctctgacaggtagga

SEQ ID NO: 18363 - RNA, 20 nt, synthetic construct
  source 1..20: mol_type = other RNA
tgggtcctacctgtcagagc

SEQ ID NO: 18364 - RNA, 20 nt, synthetic construct
  source 1..20: mol_type = other RNA
tggtgactggttagtgatga

SEQ ID NO: 18365 - RNA, 20 nt, synthetic construct
  source 1..20: mol_type = other RNA
tggttagtgatgaggctagt

SEQ ID NO: 18366 - RNA, 20 nt, synthetic construct
  source 1..20: mol_type = other RNA
tgtaggaatcccagccaggc

SEQ ID NO: 18367 - RNA, 20 nt, synthetic construct
  source 1..20: mol_type = other RNA
tgtcagagccccaaggtaaa

SEQ ID NO: 18368 - RNA, 20 nt, synthetic construct
  source 1..20: mol_type = other RNA
tgtgcttctgagctgggcat

SEQ ID NO: 18369 - RNA, 20 nt, synthetic construct
  source 1..20: mol_type = other RNA
tgtgtaggaatcccagccag

SEQ ID NO: 18370 - RNA, 20 nt, synthetic construct
  source 1..20: mol_type = other RNA
tgtgtgcttctgagctgggc

SEQ ID NO: 18371 - RNA, 20 nt, synthetic construct
  source 1..20: mol_type = other RNA
tgttggcttagcttggcggg

SEQ ID NO: 18372 - RNA, 20 nt, synthetic construct
  source 1..20: mol_type = other RNA
ttaagatgctttcccggcct

SEQ ID NO: 18373 - RNA, 20 nt, synthetic construct
  source 1..20: mol_type = other RNA
ttaccttggggctctgacag

SEQ ID NO: 18374 - RNA, 20 nt, synthetic construct
  source 1..20: mol_type = other RNA
ttagcttggcgggctcccaa

SEQ ID NO: 18375 - RNA, 20 nt, synthetic construct
  source 1..20: mol_type = other RNA
ttagtgatgaggctagtgat

SEQ ID NO: 18376 - RNA, 20 nt, synthetic construct
  source 1..20: mol_type = other RNA
ttccccaaggatgccttcgg

SEQ ID NO: 18377 - RNA, 20 nt, synthetic construct
  source 1..20: mol_type = other RNA
ttcccggcctttttaccttg

SEQ ID NO: 18378 - RNA, 20 nt, synthetic construct
  source 1..20: mol_type = other RNA
ttcctacacaatgcgttgcc

SEQ ID NO: 18379 - RNA, 20 nt, synthetic construct
  source 1..20: mol_type = other RNA
ttcggatgcccagctcagaa

SEQ ID NO: 18380 - RNA, 20 nt, synthetic construct
  source 1..20: mol_type = other RNA
ttctgagctgggcatccgaa

SEQ ID NO: 18381 - RNA, 20 nt, synthetic construct
  source 1..20: mol_type = other RNA
ttgcatgttggcttagcttg

SEQ ID NO: 18382 - RNA, 20 nt, synthetic construct
  source 1..20: mol_type = other RNA
ttgcctggctccacgccctg

SEQ ID NO: 18383 - RNA, 20 nt, synthetic construct
  source 1..20: mol_type = other RNA
ttggcgggctcccaactggt

SEQ ID NO: 18384 - RNA, 20 nt, synthetic construct
  source 1..20: mol_type = other RNA
ttggcttagcttggcgggct

SEQ ID NO: 18385 - RNA, 20 nt, synthetic construct
  source 1..20: mol_type = other RNA
ttgggagcccgccaagctaa

SEQ ID NO: 18386 - RNA, 20 nt, synthetic construct
  source 1..20: mol_type = other RNA
ttggggaagctgagggcacg

SEQ ID NO: 18387 - RNA, 20 nt, synthetic construct
  source 1..20: mol_type = other RNA
ttggggctctgacaggtagg

SEQ ID NO: 18388 - RNA, 20 nt, synthetic construct
  source 1..20: mol_type = other RNA
ttgtgtaggaatcccagcca

SEQ ID NO: 18389 - RNA, 20 nt, synthetic construct
  source 1..20: mol_type = other RNA
tttaccttggggctctgaca

SEQ ID NO: 18390 - RNA, 20 nt, synthetic construct
  source 1..20: mol_type = other RNA
tttcccggcctttttacctt

SEQ ID NO: 18391 - RNA, 20 nt, synthetic construct
  source 1..20: mol_type = other RNA
tttgcatgttggcttagctt

SEQ ID NO: 18392 - RNA, 20 nt, synthetic construct
  source 1..20: mol_type = other RNA
ttttaccttggggctctgac

SEQ ID NO: 18393 - RNA, 20 nt, synthetic construct
  source 1..20: mol_type = other RNA
tttttaccttggggctctga

SEQ ID NO: 18394 - RNA, 21 nt, synthetic construct
  source 1..21: mol_type = other RNA
aaaaaggccgggaaagcatct

SEQ ID NO: 18395 - RNA, 21 nt, synthetic construct
  source 1..21: mol_type = other RNA
aaaaggccgggaaagcatctt

SEQ ID NO: 18396 - RNA, 21 nt, synthetic construct
  source 1..21: mol_type = other RNA
aaagcatcttaatttagcgtg

SEQ ID NO: 18397 - RNA, 21 nt, synthetic construct
  source 1..21: mol_type = other RNA
aaaggccgggaaagcatctta

SEQ ID NO: 18398 - RNA, 21 nt, synthetic construct
  source 1..21: mol_type = other RNA
aaattaagatgctttcccggc

SEQ ID NO: 18399 - RNA, 21 nt, synthetic construct
  source 1..21: mol_type = other RNA
aaccagtcaccagttgggagc

SEQ ID NO: 18400 - RNA, 21 nt, synthetic construct
  source 1..21: mol_type = other RNA
aacgcattgtgtaggaatccc

SEQ ID NO: 18401 - RNA, 21 nt, synthetic construct
  source 1..21: mol_type = other RNA
aactggtgactggttagtgat

SEQ ID NO: 18402 - RNA, 21 nt, synthetic construct
  source 1..21: mol_type = other RNA
aagatgctttcccggcctttt

SEQ ID NO: 18403 - RNA, 21 nt, synthetic construct
  source 1..21: mol_type = other RNA
aagcacacagcctcatcacta

SEQ ID NO: 18404 - RNA, 21 nt, synthetic construct
  source 1..21: mol_type = other RNA
aagcatcttaatttagcgtgc

SEQ ID NO: 18405 - RNA, 21 nt, synthetic construct
  source 1..21: mol_type = other RNA
aagctgagggcacgaggaggg

SEQ ID NO: 18406 - RNA, 21 nt, synthetic construct
  source 1..21: mol_type = other RNA
aaggatgccttcggatgccca

SEQ ID NO: 18407 - RNA, 21 nt, synthetic construct
  source 1..21: mol_type = other RNA
aaggcatccttggggaagctg

SEQ ID NO: 18408 - RNA, 21 nt, synthetic construct
  source 1..21: mol_type = other RNA
aaggccgggaaagcatcttaa

SEQ ID NO: 18409 - RNA, 21 nt, synthetic construct
  source 1..21: mol_type = other RNA
aaggtaaaaaggccgggaaag

SEQ ID NO: 18410 - RNA, 21 nt, synthetic construct
  source 1..21: mol_type = other RNA
aatcccagccaggcagcagct

SEQ ID NO: 18411 - RNA, 21 nt, synthetic construct
  source 1..21: mol_type = other RNA
aatgcgttgcctggctccacg

SEQ ID NO: 18412 - RNA, 21 nt, synthetic construct
  source 1..21: mol_type = other RNA
aattaagatgctttcccggcc

SEQ ID NO: 18413 - RNA, 21 nt, synthetic construct
  source 1..21: mol_type = other RNA
acaatgcgttgcctggctcca

SEQ ID NO: 18414 - RNA, 21 nt, synthetic construct
  source 1..21: mol_type = other RNA
acacaatgcgttgcctggctc

SEQ ID NO: 18415 - RNA, 21 nt, synthetic construct
  source 1..21: mol_type = other RNA
acacagcctcatcactagcct

SEQ ID NO: 18416 - RNA, 21 nt, synthetic construct
  source 1..21: mol_type = other RNA
acagcctcatcactagcctca

SEQ ID NO: 18417 - RNA, 21 nt, synthetic construct
  source 1..21: mol_type = other RNA
acaggtaggacccagcagggc

SEQ ID NO: 18418 - RNA, 21 nt, synthetic construct
  source 1..21: mol_type = other RNA
accagtcaccagttgggagcc

SEQ ID NO: 18419 - RNA, 21 nt, synthetic construct
  source 1..21: mol_type = other RNA
accagttgggagcccgccaag

SEQ ID NO: 18420 - RNA, 21 nt, synthetic construct
  source 1..21: mol_type = other RNA
acccagcagggcgtggagcca

SEQ ID NO: 18421 - RNA, 21 nt, synthetic construct
  source 1..21: mol_type = other RNA
acctgtcagagccccaaggta

SEQ ID NO: 18422 - RNA, 21 nt, synthetic construct
  source 1..21: mol_type = other RNA
accttggggctctgacaggta

SEQ ID NO: 18423 - RNA, 21 nt, synthetic construct
  source 1..21: mol_type = other RNA
acgaggaggggctgccagact

SEQ ID NO: 18424 - RNA, 21 nt, synthetic construct
  source 1..21: mol_type = other RNA
acgcattgtgtaggaatccca

SEQ ID NO: 18425 - RNA, 21 nt, synthetic construct
  source 1..21: mol_type = other RNA
acgccctgctgggtcctacct

SEQ ID NO: 18426 - RNA, 21 nt, synthetic construct
  source 1..21: mol_type = other RNA
acgctaaattaagatgctttc

SEQ ID NO: 18427 - RNA, 21 nt, synthetic construct
  source 1..21: mol_type = other RNA
actaaccagtcaccagttggg

SEQ ID NO: 18428 - RNA, 21 nt, synthetic construct
  source 1..21: mol_type = other RNA
actagcctcatcactaaccag

SEQ ID NO: 18429 - RNA, 21 nt, synthetic construct
  source 1..21: mol_type = other RNA
actccgggagctgctgcctgg

SEQ ID NO: 18430 - RNA, 21 nt, synthetic construct
  source 1..21: mol_type = other RNA
actgcacgctaaattaagatg

SEQ ID NO: 18431 - RNA, 21 nt, synthetic construct
  source 1..21: mol_type = other RNA
actggtgactggttagtgatg

SEQ ID NO: 18432 - RNA, 21 nt, synthetic construct
  source 1..21: mol_type = other RNA
actggttagtgatgaggctag

SEQ ID NO: 18433 - RNA, 21 nt, synthetic construct
  source 1..21: mol_type = other RNA
agaagcacacagcctcatcac

SEQ ID NO: 18434 - RNA, 21 nt, synthetic construct
  source 1..21: mol_type = other RNA
agactccgggagctgctgcct

SEQ ID NO: 18435 - RNA, 21 nt, synthetic construct
  source 1..21: mol_type = other RNA
agactgcacgctaaattaaga

SEQ ID NO: 18436 - RNA, 21 nt, synthetic construct
  source 1..21: mol_type = other RNA
agagccccaaggtaaaaaggc

SEQ ID NO: 18437 - RNA, 21 nt, synthetic construct
  source 1..21: mol_type = other RNA
agatgctttcccggccttttt

SEQ ID NO: 18438 - RNA, 21 nt, synthetic construct
  source 1..21: mol_type = other RNA
agcacacagcctcatcactag

SEQ ID NO: 18439 - RNA, 21 nt, synthetic construct
  source 1..21: mol_type = other RNA
agcagctcccggagtctggca

SEQ ID NO: 18440 - RNA, 21 nt, synthetic construct
  source 1..21: mol_type = other RNA
agcagggcgtggagccaggca

SEQ ID NO: 18441 - RNA, 21 nt, synthetic construct
  source 1..21: mol_type = other RNA
agcatcttaatttagcgtgca

SEQ ID NO: 18442 - RNA, 21 nt, synthetic construct
  source 1..21: mol_type = other RNA
agccaggcaacgcattgtgta

SEQ ID NO: 18443 - RNA, 21 nt, synthetic construct
  source 1..21: mol_type = other RNA
agccaggcagcagctcccgga

SEQ ID NO: 18444 - RNA, 21 nt, synthetic construct
  source 1..21: mol_type = other RNA
agccccaaggtaaaaaggccg

SEQ ID NO: 18445 - RNA, 21 nt, synthetic construct
  source 1..21: mol_type = other RNA
agcccctcctcgtgccctcag

SEQ ID NO: 18446 - RNA, 21 nt, synthetic construct
  source 1..21: mol_type = other RNA
agcctcatcactaaccagtca

SEQ ID NO: 18447 - RNA, 21 nt, synthetic construct
  source 1..21: mol_type = other RNA
agcctcatcactagcctcatc

SEQ ID NO: 18448 - RNA, 21 nt, synthetic construct
  source 1..21: mol_type = other RNA
agctcagaagcacacagcctc

SEQ ID NO: 18449 - RNA, 21 nt, synthetic construct
  source 1..21: mol_type = other RNA
agctcccggagtctggcagcc

SEQ ID NO: 18450 - RNA, 21 nt, synthetic construct
  source 1..21: mol_type = other RNA
agctgagggcacgaggagggg

SEQ ID NO: 18451 - RNA, 21 nt, synthetic construct
  source 1..21: mol_type = other RNA
agctgctgcctggctgggatt

SEQ ID NO: 18452 - RNA, 21 nt, synthetic construct
  source 1..21: mol_type = other RNA
agctgggcatccgaaggcatc

SEQ ID NO: 18453 - RNA, 21 nt, synthetic construct
  source 1..21: mol_type = other RNA
agcttccccaaggatgccttc

SEQ ID NO: 18454 - RNA, 21 nt, synthetic construct
  source 1..21: mol_type = other RNA
agcttggcgggctcccaactg

SEQ ID NO: 18455 - RNA, 21 nt, synthetic construct
  source 1..21: mol_type = other RNA
aggaatcccagccaggcagca

SEQ ID NO: 18456 - RNA, 21 nt, synthetic construct
  source 1..21: mol_type = other RNA
aggacccagcagggcgtggag

SEQ ID NO: 18457 - RNA, 21 nt, synthetic construct
  source 1..21: mol_type = other RNA
aggaggggctgccagactccg

SEQ ID NO: 18458 - RNA, 21 nt, synthetic construct
  source 1..21: mol_type = other RNA
aggatgccttcggatgcccag

SEQ ID NO: 18459 - RNA, 21 nt, synthetic construct
  source 1..21: mol_type = other RNA
aggcaacgcattgtgtaggaa

SEQ ID NO: 18460 - RNA, 21 nt, synthetic construct
  source 1..21: mol_type = other RNA
aggcagcagctcccggagtct

SEQ ID NO: 18461 - RNA, 21 nt, synthetic construct
  source 1..21: mol_type = other RNA
aggcatccttggggaagctga

SEQ ID NO: 18462 - RNA, 21 nt, synthetic construct
  source 1..21: mol_type = other RNA
aggccgggaaagcatcttaat

SEQ ID NO: 18463 - RNA, 21 nt, synthetic construct
  source 1..21: mol_type = other RNA
aggctagtgatgaggctgtgt

SEQ ID NO: 18464 - RNA, 21 nt, synthetic construct
  source 1..21: mol_type = other RNA
aggctgtgtgcttctgagctg

SEQ ID NO: 18465 - RNA, 21 nt, synthetic construct
  source 1..21: mol_type = other RNA
agggcacgaggaggggctgcc

SEQ ID NO: 18466 - RNA, 21 nt, synthetic construct
  source 1..21: mol_type = other RNA
agggcgtggagccaggcaacg

SEQ ID NO: 18467 - RNA, 21 nt, synthetic construct
  source 1..21: mol_type = other RNA
aggggctgccagactccggga

SEQ ID NO: 18468 - RNA, 21 nt, synthetic construct
  source 1..21: mol_type = other RNA
aggtaaaaaggccgggaaagc

SEQ ID NO: 18469 - RNA, 21 nt, synthetic construct
  source 1..21: mol_type = other RNA
aggtaggacccagcagggcgt

SEQ ID NO: 18470 - RNA, 21 nt, synthetic construct
  source 1..21: mol_type = other RNA
agtcaccagttgggagcccgc

SEQ ID NO: 18471 - RNA, 21 nt, synthetic construct
  source 1..21: mol_type = other RNA
agtctggcagcccctcctcgt

SEQ ID NO: 18472 - RNA, 21 nt, synthetic construct
  source 1..21: mol_type = other RNA
agtgatgaggctagtgatgag

SEQ ID NO: 18473 - RNA, 21 nt, synthetic construct
  source 1..21: mol_type = other RNA
agtgatgaggctgtgtgcttc

SEQ ID NO: 18474 - RNA, 21 nt, synthetic construct
  source 1..21: mol_type = other RNA
agttgggagcccgccaagcta

SEQ ID NO: 18475 - RNA, 21 nt, synthetic construct
  source 1..21: mol_type = other RNA
atcactaaccagtcaccagtt

SEQ ID NO: 18476 - RNA, 21 nt, synthetic construct
  source 1..21: mol_type = other RNA
atcactagcctcatcactaac

SEQ ID NO: 18477 - RNA, 21 nt, synthetic construct
  source 1..21: mol_type = other RNA
atcccagccaggcagcagctc

SEQ ID NO: 18478 - RNA, 21 nt, synthetic construct
  source 1..21: mol_type = other RNA
atccgaaggcatccttgggga

SEQ ID NO: 18479 - RNA, 21 nt, synthetic construct
  source 1..21: mol_type = other RNA
atccttggggaagctgagggc

SEQ ID NO: 18480 - RNA, 21 nt, synthetic construct
  source 1..21: mol_type = other RNA
atgaggctagtgatgaggctg

SEQ ID NO: 18481 - RNA, 21 nt, synthetic construct
  source 1..21: mol_type = other RNA
atgaggctgtgtgcttctgag

SEQ ID NO: 18482 - RNA, 21 nt, synthetic construct
  source 1..21: mol_type = other RNA
atgcccagctcagaagcacac

SEQ ID NO: 18483 - RNA, 21 nt, synthetic construct
  source 1..21: mol_type = other RNA
atgccttcggatgcccagctc

SEQ ID NO: 18484 - RNA, 21 nt, synthetic construct
  source 1..21: mol_type = other RNA
atgcgttgcctggctccacgc

SEQ ID NO: 18485 - RNA, 21 nt, synthetic construct
  source 1..21: mol_type = other RNA
atgctttcccggcctttttac

SEQ ID NO: 18486 - RNA, 21 nt, synthetic construct
  source 1..21: mol_type = other RNA
atgttggcttagcttggcggg

SEQ ID NO: 18487 - RNA, 21 nt, synthetic construct
  source 1..21: mol_type = other RNA
attaagatgctttcccggcct

SEQ ID NO: 18488 - RNA, 21 nt, synthetic construct
  source 1..21: mol_type = other RNA
attcctacacaatgcgttgcc

SEQ ID NO: 18489 - RNA, 21 nt, synthetic construct
  source 1..21: mol_type = other RNA
attgtgtaggaatcccagcca

SEQ ID NO: 18490 - RNA, 21 nt, synthetic construct
  source 1..21: mol_type = other RNA
caacgcattgtgtaggaatcc

SEQ ID NO: 18491 - RNA, 21 nt, synthetic construct
  source 1..21: mol_type = other RNA
caactggtgactggttagtga

SEQ ID NO: 18492 - RNA, 21 nt, synthetic construct
  source 1..21: mol_type = other RNA
caaggatgccttcggatgccc

SEQ ID NO: 18493 - RNA, 21 nt, synthetic construct
  source 1..21: mol_type = other RNA
caaggtaaaaaggccgggaaa

SEQ ID NO: 18494 - RNA, 21 nt, synthetic construct
  source 1..21: mol_type = other RNA
caatgcgttgcctggctccac

SEQ ID NO: 18495 - RNA, 21 nt, synthetic construct
  source 1..21: mol_type = other RNA
cacaatgcgttgcctggctcc

SEQ ID NO: 18496 - RNA, 21 nt, synthetic construct
  source 1..21: mol_type = other RNA
cacacagcctcatcactagcc

SEQ ID NO: 18497 - RNA, 21 nt, synthetic construct
  source 1..21: mol_type = other RNA
cacagcctcatcactagcctc

SEQ ID NO: 18498 - RNA, 21 nt, synthetic construct
  source 1..21: mol_type = other RNA
caccagttgggagcccgccaa

SEQ ID NO: 18499 - RNA, 21 nt, synthetic construct
  source 1..21: mol_type = other RNA
cacgaggaggggctgccagac

SEQ ID NO: 18500 - RNA, 21 nt, synthetic construct
  source 1..21: mol_type = other RNA
cacgccctgctgggtcctacc

SEQ ID NO: 18501 - RNA, 21 nt, synthetic construct
  source 1..21: mol_type = other RNA
cacgctaaattaagatgcttt

SEQ ID NO: 18502 - RNA, 21 nt, synthetic construct
  source 1..21: mol_type = other RNA
cactaaccagtcaccagttgg

SEQ ID NO: 18503 - RNA, 21 nt, synthetic construct
  source 1..21: mol_type = other RNA
cactagcctcatcactaacca

SEQ ID NO: 18504 - RNA, 21 nt, synthetic construct
  source 1..21: mol_type = other RNA
cagaagcacacagcctcatca

SEQ ID NO: 18505 - RNA, 21 nt, synthetic construct
  source 1..21: mol_type = other RNA
cagactccgggagctgctgcc

SEQ ID NO: 18506 - RNA, 21 nt, synthetic construct
  source 1..21: mol_type = other RNA
cagagccccaaggtaaaaagg

SEQ ID NO: 18507 - RNA, 21 nt, synthetic construct
  source 1..21: mol_type = other RNA
cagcagctcccggagtctggc

SEQ ID NO: 18508 - RNA, 21 nt, synthetic construct
  source 1..21: mol_type = other RNA
cagcagggcgtggagccaggc

SEQ ID NO: 18509 - RNA, 21 nt, synthetic construct
  source 1..21: mol_type = other RNA
cagccaggcagcagctcccgg

SEQ ID NO: 18510 - RNA, 21 nt, synthetic construct
  source 1..21: mol_type = other RNA
cagcccctcctcgtgccctca

SEQ ID NO: 18511 - RNA, 21 nt, synthetic construct
  source 1..21: mol_type = other RNA
cagcctcatcactagcctcat

SEQ ID NO: 18512 - RNA, 21 nt, synthetic construct
  source 1..21: mol_type = other RNA
cagctcagaagcacacagcct

SEQ ID NO: 18513 - RNA, 21 nt, synthetic construct
  source 1..21: mol_type = other RNA
cagctcccggagtctggcagc

SEQ ID NO: 18514 - RNA, 21 nt, synthetic construct
  source 1..21: mol_type = other RNA
cagcttccccaaggatgcctt

SEQ ID NO: 18515 - RNA, 21 nt, synthetic construct
  source 1..21: mol_type = other RNA
caggcaacgcattgtgtagga

SEQ ID NO: 18516 - RNA, 21 nt, synthetic construct
  source 1..21: mol_type = other RNA
caggcagcagctcccggagtc

SEQ ID NO: 18517 - RNA, 21 nt, synthetic construct
  source 1..21: mol_type = other RNA
cagggcgtggagccaggcaac

SEQ ID NO: 18518 - RNA, 21 nt, synthetic construct
  source 1..21: mol_type = other RNA
caggtaggacccagcagggcg

SEQ ID NO: 18519 - RNA, 21 nt, synthetic construct
  source 1..21: mol_type = other RNA
cagtcaccagttgggagcccg

SEQ ID NO: 18520 - RNA, 21 nt, synthetic construct
  source 1..21: mol_type = other RNA
cagttgggagcccgccaagct

SEQ ID NO: 18521 - RNA, 21 nt, synthetic construct
  source 1..21: mol_type = other RNA
catcactaaccagtcaccagt

SEQ ID NO: 18522 - RNA, 21 nt, synthetic construct
  source 1..21: mol_type = other RNA
catcactagcctcatcactaa

SEQ ID NO: 18523 - RNA, 21 nt, synthetic construct
  source 1..21: mol_type = other RNA
catccgaaggcatccttgggg

SEQ ID NO: 18524 - RNA, 21 nt, synthetic construct
  source 1..21: mol_type = other RNA
catccttggggaagctgaggg

SEQ ID NO: 18525 - RNA, 21 nt, synthetic construct
  source 1..21: mol_type = other RNA
catgttggcttagcttggcgg

SEQ ID NO: 18526 - RNA, 21 nt, synthetic construct
  source 1..21: mol_type = other RNA
cattgtgtaggaatcccagcc

SEQ ID NO: 18527 - RNA, 21 nt, synthetic construct
  source 1..21: mol_type = other RNA
ccaactggtgactggttagtg

SEQ ID NO: 18528 - RNA, 21 nt, synthetic construct
  source 1..21: mol_type = other RNA
ccaaggatgccttcggatgcc

SEQ ID NO: 18529 - RNA, 21 nt, synthetic construct
  source 1..21: mol_type = other RNA
ccaaggtaaaaaggccgggaa

SEQ ID NO: 18530 - RNA, 21 nt, synthetic construct
  source 1..21: mol_type = other RNA
ccacgccctgctgggtcctac

SEQ ID NO: 18531 - RNA, 21 nt, synthetic construct
  source 1..21: mol_type = other RNA
ccagactccgggagctgctgc

SEQ ID NO: 18532 - RNA, 21 nt, synthetic construct
  source 1..21: mol_type = other RNA
ccagcagggcgtggagccagg

SEQ ID NO: 18533 - RNA, 21 nt, synthetic construct
  source 1..21: mol_type = other RNA
ccagccaggcagcagctcccg

SEQ ID NO: 18534 - RNA, 21 nt, synthetic construct
  source 1..21: mol_type = other RNA
ccagctcagaagcacacagcc

SEQ ID NO: 18535 - RNA, 21 nt, synthetic construct
  source 1..21: mol_type = other RNA
ccaggcaacgcattgtgtagg

SEQ ID NO: 18536 - RNA, 21 nt, synthetic construct
  source 1..21: mol_type = other RNA
ccaggcagcagctcccggagt

SEQ ID NO: 18537 - RNA, 21 nt, synthetic construct
  source 1..21: mol_type = other RNA
ccagtcaccagttgggagccc

SEQ ID NO: 18538 - RNA, 21 nt, synthetic construct
  source 1..21: mol_type = other RNA
ccagttgggagcccgccaagc

SEQ ID NO: 18539 - RNA, 21 nt, synthetic construct
  source 1..21: mol_type = other RNA
cccaactggtgactggttagt

SEQ ID NO: 18540 - RNA, 21 nt, synthetic construct
  source 1..21: mol_type = other RNA
cccaaggatgccttcggatgc

SEQ ID NO: 18541 - RNA, 21 nt, synthetic construct
  source 1..21: mol_type = other RNA
cccaaggtaaaaaggccggga

SEQ ID NO: 18542 - RNA, 21 nt, synthetic construct
  source 1..21: mol_type = other RNA
cccagcagggcgtggagccag

SEQ ID NO: 18543 - RNA, 21 nt, synthetic construct
  source 1..21: mol_type = other RNA
cccagccaggcagcagctccc

SEQ ID NO: 18544 - RNA, 21 nt, synthetic construct
  source 1..21: mol_type = other RNA
cccagctcagaagcacacagc

SEQ ID NO: 18545 - RNA, 21 nt, synthetic construct
  source 1..21: mol_type = other RNA
ccccaaggatgccttcggatg

SEQ ID NO: 18546 - RNA, 21 nt, synthetic construct
  source 1..21: mol_type = other RNA
ccccaaggtaaaaaggccggg

SEQ ID NO: 18547 - RNA, 21 nt, synthetic construct
  source 1..21: mol_type = other RNA
cccctcctcgtgccctcagct

SEQ ID NO: 18548 - RNA, 21 nt, synthetic construct
  source 1..21: mol_type = other RNA
cccggagtctggcagcccctc

SEQ ID NO: 18549 - RNA, 21 nt, synthetic construct
  source 1..21: mol_type = other RNA
cccggcctttttaccttgggg

SEQ ID NO: 18550 - RNA, 21 nt, synthetic construct
  source 1..21: mol_type = other RNA
ccctcagcttccccaaggatg

SEQ ID NO: 18551 - RNA, 21 nt, synthetic construct
  source 1..21: mol_type = other RNA
ccctcctcgtgccctcagctt

SEQ ID NO: 18552 - RNA, 21 nt, synthetic construct
  source 1..21: mol_type = other RNA
ccctgctgggtcctacctgtc

SEQ ID NO: 18553 - RNA, 21 nt, synthetic construct
  source 1..21: mol_type = other RNA
ccgaaggcatccttggggaag

SEQ ID NO: 18554 - RNA, 21 nt, synthetic construct
  source 1..21: mol_type = other RNA
ccggagtctggcagcccctcc

SEQ ID NO: 18555 - RNA, 21 nt, synthetic construct
  source 1..21: mol_type = other RNA
ccggcctttttaccttggggc

SEQ ID NO: 18556 - RNA, 21 nt, synthetic construct
  source 1..21: mol_type = other RNA
ccgggaaagcatcttaattta

SEQ ID NO: 18557 - RNA, 21 nt, synthetic construct
  source 1..21: mol_type = other RNA
ccgggagctgctgcctggctg

SEQ ID NO: 18558 - RNA, 21 nt, synthetic construct
  source 1..21: mol_type = other RNA
cctacacaatgcgttgcctgg

SEQ ID NO: 18559 - RNA, 21 nt, synthetic construct
  source 1..21: mol_type = other RNA
cctacctgtcagagccccaag

SEQ ID NO: 18560 - RNA, 21 nt, synthetic construct
  source 1..21: mol_type = other RNA
cctcagcttccccaaggatgc

SEQ ID NO: 18561 - RNA, 21 nt, synthetic construct
  source 1..21: mol_type = other RNA
cctcatcactaaccagtcacc

SEQ ID NO: 18562 - RNA, 21 nt, synthetic construct
  source 1..21: mol_type = other RNA
cctcatcactagcctcatcac

SEQ ID NO: 18563 - RNA, 21 nt, synthetic construct
  source 1..21: mol_type = other RNA
cctcctcgtgccctcagcttc

SEQ ID NO: 18564 - RNA, 21 nt, synthetic construct
  source 1..21: mol_type = other RNA
cctcgtgccctcagcttcccc

SEQ ID NO: 18565 - RNA, 21 nt, synthetic construct
  source 1..21: mol_type = other RNA
cctgctgggtcctacctgtca

SEQ ID NO: 18566 - RNA, 21 nt, synthetic construct
  source 1..21: mol_type = other RNA
cctggctccacgccctgctgg

SEQ ID NO: 18567 - RNA, 21 nt, synthetic construct
  source 1..21: mol_type = other RNA
cctggctgggattcctacaca

SEQ ID NO: 18568 - RNA, 21 nt, synthetic construct
  source 1..21: mol_type = other RNA
cctgtcagagccccaaggtaa

SEQ ID NO: 18569 - RNA, 21 nt, synthetic construct
  source 1..21: mol_type = other RNA
ccttcggatgcccagctcaga

SEQ ID NO: 18570 - RNA, 21 nt, synthetic construct
  source 1..21: mol_type = other RNA
ccttggggaagctgagggcac

SEQ ID NO: 18571 - RNA, 21 nt, synthetic construct
  source 1..21: mol_type = other RNA
ccttggggctctgacaggtag

SEQ ID NO: 18572 - RNA, 21 nt, synthetic construct
  source 1..21: mol_type = other RNA
cctttttaccttggggctctg

SEQ ID NO: 18573 - RNA, 21 nt, synthetic construct
  source 1..21: mol_type = other RNA
cgaaggcatccttggggaagc

SEQ ID NO: 18574 - RNA, 21 nt, synthetic construct
  source 1..21: mol_type = other RNA
cgaggaggggctgccagactc

SEQ ID NO: 18575 - RNA, 21 nt, synthetic construct
  source 1..21: mol_type = other RNA
cgcattgtgtaggaatcccag

SEQ ID NO: 18576 - RNA, 21 nt, synthetic construct
  source 1..21: mol_type = other RNA
cgccctgctgggtcctacctg

SEQ ID NO: 18577 - RNA, 21 nt, synthetic construct
  source 1..21: mol_type = other RNA
cgctaaattaagatgctttcc

SEQ ID NO: 18578 - RNA, 21 nt, synthetic construct
  source 1..21: mol_type = other RNA
cggagtctggcagcccctcct

SEQ ID NO: 18579 - RNA, 21 nt, synthetic construct
  source 1..21: mol_type = other RNA
cggatgcccagctcagaagca

SEQ ID NO: 18580 - RNA, 21 nt, synthetic construct
  source 1..21: mol_type = other RNA
cggcctttttaccttggggct

SEQ ID NO: 18581 - RNA, 21 nt, synthetic construct
  source 1..21: mol_type = other RNA
cgggaaagcatcttaatttag

SEQ ID NO: 18582 - RNA, 21 nt, synthetic construct
  source 1..21: mol_type = other RNA
cgggagctgctgcctggctgg

SEQ ID NO: 18583 - RNA, 21 nt, synthetic construct
  source 1..21: mol_type = other RNA
cgggctcccaactggtgactg

SEQ ID NO: 18584 - RNA, 21 nt, synthetic construct
  source 1..21: mol_type = other RNA
cgtgccctcagcttccccaag

SEQ ID NO: 18585 - RNA, 21 nt, synthetic construct
  source 1..21: mol_type = other RNA
cgtggagccaggcaacgcatt

SEQ ID NO: 18586 - RNA, 21 nt, synthetic construct
  source 1..21: mol_type = other RNA
cgttgcctggctccacgccct

SEQ ID NO: 18587 - RNA, 21 nt, synthetic construct
  source 1..21: mol_type = other RNA
ctaaattaagatgctttcccg

SEQ ID NO: 18588 - RNA, 21 nt, synthetic construct
  source 1..21: mol_type = other RNA
ctaaccagtcaccagttggga

SEQ ID NO: 18589 - RNA, 21 nt, synthetic construct
  source 1..21: mol_type = other RNA
ctacacaatgcgttgcctggc

SEQ ID NO: 18590 - RNA, 21 nt, synthetic construct
  source 1..21: mol_type = other RNA
ctacctgtcagagccccaagg

SEQ ID NO: 18591 - RNA, 21 nt, synthetic construct
  source 1..21: mol_type = other RNA
ctagcctcatcactaaccagt

SEQ ID NO: 18592 - RNA, 21 nt, synthetic construct
  source 1..21: mol_type = other RNA
ctagtgatgaggctgtgtgct

SEQ ID NO: 18593 - RNA, 21 nt, synthetic construct
  source 1..21: mol_type = other RNA
ctcagaagcacacagcctcat

SEQ ID NO: 18594 - RNA, 21 nt, synthetic construct
  source 1..21: mol_type = other RNA
ctcagcttccccaaggatgcc

SEQ ID NO: 18595 - RNA, 21 nt, synthetic construct
  source 1..21: mol_type = other RNA
ctcatcactaaccagtcacca

SEQ ID NO: 18596 - RNA, 21 nt, synthetic construct
  source 1..21: mol_type = other RNA
ctcatcactagcctcatcact

SEQ ID NO: 18597 - RNA, 21 nt, synthetic construct
  source 1..21: mol_type = other RNA
ctccacgccctgctgggtcct

SEQ ID NO: 18598 - RNA, 21 nt, synthetic construct
  source 1..21: mol_type = other RNA
ctcccaactggtgactggtta

SEQ ID NO: 18599 - RNA, 21 nt, synthetic construct
  source 1..21: mol_type = other RNA
ctcccggagtctggcagcccc

SEQ ID NO: 18600 - RNA, 21 nt, synthetic construct
  source 1..21: mol_type = other RNA
ctccgggagctgctgcctggc

SEQ ID NO: 18601 - RNA, 21 nt, synthetic construct
  source 1..21: mol_type = other RNA
ctcctcgtgccctcagcttcc

SEQ ID NO: 18602 - RNA, 21 nt, synthetic construct
  source 1..21: mol_type = other RNA
ctcgtgccctcagcttcccca

SEQ ID NO: 18603 - RNA, 21 nt, synthetic construct
  source 1..21: mol_type = other RNA
ctctgacaggtaggacccagc

SEQ ID NO: 18604 - RNA, 21 nt, synthetic construct
  source 1..21: mol_type = other RNA
ctgacaggtaggacccagcag

SEQ ID NO: 18605 - RNA, 21 nt, synthetic construct
  source 1..21: mol_type = other RNA
ctgagactgcacgctaaatta

SEQ ID NO: 18606 - RNA, 21 nt, synthetic construct
  source 1..21: mol_type = other RNA
ctgagctgggcatccgaaggc

SEQ ID NO: 18607 - RNA, 21 nt, synthetic construct
  source 1..21: mol_type = other RNA
ctgagggcacgaggaggggct

SEQ ID NO: 18608 - RNA, 21 nt, synthetic construct
  source 1..21: mol_type = other RNA
ctgcacgctaaattaagatgc

SEQ ID NO: 18609 - RNA, 21 nt, synthetic construct
  source 1..21: mol_type = other RNA
ctgccagactccgggagctgc

SEQ ID NO: 18610 - RNA, 21 nt, synthetic construct
  source 1..21: mol_type = other RNA
ctgcctggctgggattcctac

SEQ ID NO: 18611 - RNA, 21 nt, synthetic construct
  source 1..21: mol_type = other RNA
ctgctgcctggctgggattcc

SEQ ID NO: 18612 - RNA, 21 nt, synthetic construct
  source 1..21: mol_type = other RNA
ctgctgggtcctacctgtcag

SEQ ID NO: 18613 - RNA, 21 nt, synthetic construct
  source 1..21: mol_type = other RNA
ctggcagcccctcctcgtgcc

SEQ ID NO: 18614 - RNA, 21 nt, synthetic construct
  source 1..21: mol_type = other RNA
ctggctccacgccctgctggg

SEQ ID NO: 18615 - RNA, 21 nt, synthetic construct
  source 1..21: mol_type = other RNA
ctggctgggattcctacacaa

SEQ ID NO: 18616 - RNA, 21 nt, synthetic construct
  source 1..21: mol_type = other RNA
ctgggattcctacacaatgcg

SEQ ID NO: 18617 - RNA, 21 nt, synthetic construct
  source 1..21: mol_type = other RNA
ctgggcatccgaaggcatcct

SEQ ID NO: 18618 - RNA, 21 nt, synthetic construct
  source 1..21: mol_type = other RNA
ctgggtcctacctgtcagagc

SEQ ID NO: 18619 - RNA, 21 nt, synthetic construct
  source 1..21: mol_type = other RNA
ctggtgactggttagtgatga

SEQ ID NO: 18620 - RNA, 21 nt, synthetic construct
  source 1..21: mol_type = other RNA
ctggttagtgatgaggctagt

SEQ ID NO: 18621 - RNA, 21 nt, synthetic construct
  source 1..21: mol_type = other RNA
ctgtcagagccccaaggtaaa

SEQ ID NO: 18622 - RNA, 21 nt, synthetic construct
  source 1..21: mol_type = other RNA
ctgtgtgcttctgagctgggc

SEQ ID NO: 18623 - RNA, 21 nt, synthetic construct
  source 1..21: mol_type = other RNA
cttagcttggcgggctcccaa

SEQ ID NO: 18624 - RNA, 21 nt, synthetic construct
  source 1..21: mol_type = other RNA
cttccccaaggatgccttcgg

SEQ ID NO: 18625 - RNA, 21 nt, synthetic construct
  source 1..21: mol_type = other RNA
cttcggatgcccagctcagaa

SEQ ID NO: 18626 - RNA, 21 nt, synthetic construct
  source 1..21: mol_type = other RNA
cttctgagctgggcatccgaa

SEQ ID NO: 18627 - RNA, 21 nt, synthetic construct
  source 1..21: mol_type = other RNA
cttggcgggctcccaactggt

SEQ ID NO: 18628 - RNA, 21 nt, synthetic construct
  source 1..21: mol_type = other RNA
cttggggaagctgagggcacg

SEQ ID NO: 18629 - RNA, 21 nt, synthetic construct
  source 1..21: mol_type = other RNA
cttggggctctgacaggtagg

SEQ ID NO: 18630 - RNA, 21 nt, synthetic construct
  source 1..21: mol_type = other RNA
ctttcccggcctttttacctt

SEQ ID NO: 18631 - RNA, 21 nt, synthetic construct
  source 1..21: mol_type = other RNA
ctttttaccttggggctctga

SEQ ID NO: 18632 - RNA, 21 nt, synthetic construct
  source 1..21: mol_type = other RNA
gaaagcatcttaatttagcgt

SEQ ID NO: 18633 - RNA, 21 nt, synthetic construct
  source 1..21: mol_type = other RNA
gaagcacacagcctcatcact

SEQ ID NO: 18634 - RNA, 21 nt, synthetic construct
  source 1..21: mol_type = other RNA
gaagctgagggcacgaggagg

SEQ ID NO: 18635 - RNA, 21 nt, synthetic construct
  source 1..21: mol_type = other RNA
gaaggcatccttggggaagct

SEQ ID NO: 18636 - RNA, 21 nt, synthetic construct
  source 1..21: mol_type = other RNA
gaatcccagccaggcagcagc

SEQ ID NO: 18637 - RNA, 21 nt, synthetic construct
  source 1..21: mol_type = other RNA
gacaggtaggacccagcaggg

SEQ ID NO: 18638 - RNA, 21 nt, synthetic construct
  source 1..21: mol_type = other RNA
gacccagcagggcgtggagcc

SEQ ID NO: 18639 - RNA, 21 nt, synthetic construct
  source 1..21: mol_type = other RNA
gactccgggagctgctgcctg

SEQ ID NO: 18640 - RNA, 21 nt, synthetic construct
  source 1..21: mol_type = other RNA
gactgcacgctaaattaagat

SEQ ID NO: 18641 - RNA, 21 nt, synthetic construct
  source 1..21: mol_type = other RNA
gactggttagtgatgaggcta

SEQ ID NO: 18642 - RNA, 21 nt, synthetic construct
  source 1..21: mol_type = other RNA
gagactgcacgctaaattaag

SEQ ID NO: 18643 - RNA, 21 nt, synthetic construct
  source 1..21: mol_type = other RNA
gagccaggcaacgcattgtgt

SEQ ID NO: 18644 - RNA, 21 nt, synthetic construct
  source 1..21: mol_type = other RNA
gagccccaaggtaaaaaggcc

SEQ ID NO: 18645 - RNA, 21 nt, synthetic construct
  source 1..21: mol_type = other RNA
gagcccgccaagctaagccaa

SEQ ID NO: 18646 - RNA, 21 nt, synthetic construct
  source 1..21: mol_type = other RNA
gagctgctgcctggctgggat

SEQ ID NO: 18647 - RNA, 21 nt, synthetic construct
  source 1..21: mol_type = other RNA
gagctgggcatccgaaggcat

SEQ ID NO: 18648 - RNA, 21 nt, synthetic construct
  source 1..21: mol_type = other RNA
gaggaggggctgccagactcc

SEQ ID NO: 18649 - RNA, 21 nt, synthetic construct
  source 1..21: mol_type = other RNA
gaggctagtgatgaggctgtg

SEQ ID NO: 18650 - RNA, 21 nt, synthetic construct
  source 1..21: mol_type = other RNA
gaggctgtgtgcttctgagct

SEQ ID NO: 18651 - RNA, 21 nt, synthetic construct
  source 1..21: mol_type = other RNA
gagggcacgaggaggggctgc

SEQ ID NO: 18652 - RNA, 21 nt, synthetic construct
  source 1..21: mol_type = other RNA
gaggggctgccagactccggg

SEQ ID NO: 18653 - RNA, 21 nt, synthetic construct
  source 1..21: mol_type = other RNA
gagtctggcagcccctcctcg

SEQ ID NO: 18654 - RNA, 21 nt, synthetic construct
  source 1..21: mol_type = other RNA
gatgaggctagtgatgaggct

SEQ ID NO: 18655 - RNA, 21 nt, synthetic construct
  source 1..21: mol_type = other RNA
gatgaggctgtgtgcttctga

SEQ ID NO: 18656 - RNA, 21 nt, synthetic construct
  source 1..21: mol_type = other RNA
gatgcccagctcagaagcaca

SEQ ID NO: 18657 - RNA, 21 nt, synthetic construct
  source 1..21: mol_type = other RNA
gatgccttcggatgcccagct

SEQ ID NO: 18658 - RNA, 21 nt, synthetic construct
  source 1..21: mol_type = other RNA
gatgctttcccggccttttta

SEQ ID NO: 18659 - RNA, 21 nt, synthetic construct
  source 1..21: mol_type = other RNA
gattcctacacaatgcgttgc

SEQ ID NO: 18660 - RNA, 21 nt, synthetic construct
  source 1..21: mol_type = other RNA
gcaacgcattgtgtaggaatc

SEQ ID NO: 18661 - RNA, 21 nt, synthetic construct
  source 1..21: mol_type = other RNA
gcacacagcctcatcactagc

SEQ ID NO: 18662 - RNA, 21 nt, synthetic construct
  source 1..21: mol_type = other RNA
gcacgaggaggggctgccaga

SEQ ID NO: 18663 - RNA, 21 nt, synthetic construct
  source 1..21: mol_type = other RNA
gcacgctaaattaagatgctt

SEQ ID NO: 18664 - RNA, 21 nt, synthetic construct
  source 1..21: mol_type = other RNA
gcagcagctcccggagtctgg

SEQ ID NO: 18665 - RNA, 21 nt, synthetic construct
  source 1..21: mol_type = other RNA
gcagcccctcctcgtgccctc

SEQ ID NO: 18666 - RNA, 21 nt, synthetic construct
  source 1..21: mol_type = other RNA
gcagctcccggagtctggcag

SEQ ID NO: 18667 - RNA, 21 nt, synthetic construct
  source 1..21: mol_type = other RNA
gcagggcgtggagccaggcaa

SEQ ID NO: 18668 - RNA, 21 nt, synthetic construct
  source 1..21: mol_type = other RNA
gcatccgaaggcatccttggg

SEQ ID NO: 18669 - RNA, 21 nt, synthetic construct
  source 1..21: mol_type = other RNA
gcatccttggggaagctgagg

SEQ ID NO: 18670 - RNA, 21 nt, synthetic construct
  source 1..21: mol_type = other RNA
gcatgttggcttagcttggcg

SEQ ID NO: 18671 - RNA, 21 nt, synthetic construct
  source 1..21: mol_type = other RNA
gcattgtgtaggaatcccagc

SEQ ID NO: 18672 - RNA, 21 nt, synthetic construct
  source 1..21: mol_type = other RNA
gccagactccgggagctgctg

SEQ ID NO: 18673 - RNA, 21 nt, synthetic construct
  source 1..21: mol_type = other RNA
gccaggcaacgcattgtgtag

SEQ ID NO: 18674 - RNA, 21 nt, synthetic construct
  source 1..21: mol_type = other RNA
gccaggcagcagctcccggag

SEQ ID NO: 18675 - RNA, 21 nt, synthetic construct
  source 1..21: mol_type = other RNA
gcccagctcagaagcacacag

SEQ ID NO: 18676 - RNA, 21 nt, synthetic construct
  source 1..21: mol_type = other RNA
gccccaaggtaaaaaggccgg

SEQ ID NO: 18677 - RNA, 21 nt, synthetic construct
  source 1..21: mol_type = other RNA
gcccctcctcgtgccctcagc

SEQ ID NO: 18678 - RNA, 21 nt, synthetic construct
  source 1..21: mol_type = other RNA
gccctcagcttccccaaggat

SEQ ID NO: 18679 - RNA, 21 nt, synthetic construct
  source 1..21: mol_type = other RNA
gccctgctgggtcctacctgt

SEQ ID NO: 18680 - RNA, 21 nt, synthetic construct
  source 1..21: mol_type = other RNA
gccgggaaagcatcttaattt

SEQ ID NO: 18681 - RNA, 21 nt, synthetic construct
  source 1..21: mol_type = other RNA
gcctcatcactaaccagtcac

SEQ ID NO: 18682 - RNA, 21 nt, synthetic construct
  source 1..21: mol_type = other RNA
gcctcatcactagcctcatca

SEQ ID NO: 18683 - RNA, 21 nt, synthetic construct
  source 1..21: mol_type = other RNA
gcctggctccacgccctgctg

SEQ ID NO: 18684 - RNA, 21 nt, synthetic construct
  source 1..21: mol_type = other RNA
gcctggctgggattcctacac

SEQ ID NO: 18685 - RNA, 21 nt, synthetic construct
  source 1..21: mol_type = other RNA
gccttcggatgcccagctcag

SEQ ID NO: 18686 - RNA, 21 nt, synthetic construct
  source 1..21: mol_type = other RNA
gcctttttaccttggggctct

SEQ ID NO: 18687 - RNA, 21 nt, synthetic construct
  source 1..21: mol_type = other RNA
gcgggctcccaactggtgact

SEQ ID NO: 18688 - RNA, 21 nt, synthetic construct
  source 1..21: mol_type = other RNA
gcgtggagccaggcaacgcat

SEQ ID NO: 18689 - RNA, 21 nt, synthetic construct
  source 1..21: mol_type = other RNA
gcgttgcctggctccacgccc

SEQ ID NO: 18690 - RNA, 21 nt, synthetic construct
  source 1..21: mol_type = other RNA
gctaaattaagatgctttccc

SEQ ID NO: 18691 - RNA, 21 nt, synthetic construct
  source 1..21: mol_type = other RNA
gctagtgatgaggctgtgtgc

SEQ ID NO: 18692 - RNA, 21 nt, synthetic construct
  source 1..21: mol_type = other RNA
gctcagaagcacacagcctca

SEQ ID NO: 18693 - RNA, 21 nt, synthetic construct
  source 1..21: mol_type = other RNA
gctccacgccctgctgggtcc

SEQ ID NO: 18694 - RNA, 21 nt, synthetic construct
  source 1..21: mol_type = other RNA
gctcccaactggtgactggtt

SEQ ID NO: 18695 - RNA, 21 nt, synthetic construct
  source 1..21: mol_type = other RNA
gctcccggagtctggcagccc

SEQ ID NO: 18696 - RNA, 21 nt, synthetic construct
  source 1..21: mol_type = other RNA
gctctgacaggtaggacccag

SEQ ID NO: 18697 - RNA, 21 nt, synthetic construct
  source 1..21: mol_type = other RNA
gctgagactgcacgctaaatt

SEQ ID NO: 18698 - RNA, 21 nt, synthetic construct
  source 1..21: mol_type = other RNA
gctgagggcacgaggaggggc

SEQ ID NO: 18699 - RNA, 21 nt, synthetic construct
  source 1..21: mol_type = other RNA
gctgccagactccgggagctg

SEQ ID NO: 18700 - RNA, 21 nt, synthetic construct
  source 1..21: mol_type = other RNA
gctgcctggctgggattccta

SEQ ID NO: 18701 - RNA, 21 nt, synthetic construct
  source 1..21: mol_type = other RNA
gctgctgcctggctgggattc

SEQ ID NO: 18702 - RNA, 21 nt, synthetic construct
  source 1..21: mol_type = other RNA
gctgggattcctacacaatgc

SEQ ID NO: 18703 - RNA, 21 nt, synthetic construct
  source 1..21: mol_type = other RNA
gctgggcatccgaaggcatcc

SEQ ID NO: 18704 - RNA, 21 nt, synthetic construct
  source 1..21: mol_type = other RNA
gctgggtcctacctgtcagag

SEQ ID NO: 18705 - RNA, 21 nt, synthetic construct
  source 1..21: mol_type = other RNA
gctgtgtgcttctgagctggg

SEQ ID NO: 18706 - RNA, 21 nt, synthetic construct
  source 1..21: mol_type = other RNA
gcttagcttggcgggctccca

SEQ ID NO: 18707 - RNA, 21 nt, synthetic construct
  source 1..21: mol_type = other RNA
gcttccccaaggatgccttcg

SEQ ID NO: 18708 - RNA, 21 nt, synthetic construct
  source 1..21: mol_type = other RNA
gcttctgagctgggcatccga

SEQ ID NO: 18709 - RNA, 21 nt, synthetic construct
  source 1..21: mol_type = other RNA
gcttggcgggctcccaactgg

SEQ ID NO: 18710 - RNA, 21 nt, synthetic construct
  source 1..21: mol_type = other RNA
gctttcccggcctttttacct

SEQ ID NO: 18711 - RNA, 21 nt, synthetic construct
  source 1..21: mol_type = other RNA
ggaaagcatcttaatttagcg

SEQ ID NO: 18712 - RNA, 21 nt, synthetic construct
  source 1..21: mol_type = other RNA
ggaagctgagggcacgaggag

SEQ ID NO: 18713 - RNA, 21 nt, synthetic construct
  source 1..21: mol_type = other RNA
ggaatcccagccaggcagcag

SEQ ID NO: 18714 - RNA, 21 nt, synthetic construct
  source 1..21: mol_type = other RNA
ggacccagcagggcgtggagc

SEQ ID NO: 18715 - RNA, 21 nt, synthetic construct
  source 1..21: mol_type = other RNA
ggagccaggcaacgcattgtg

SEQ ID NO: 18716 - RNA, 21 nt, synthetic construct
  source 1..21: mol_type = other RNA
ggagcccgccaagctaagcca

SEQ ID NO: 18717 - RNA, 21 nt, synthetic construct
  source 1..21: mol_type = other RNA
ggagctgctgcctggctggga

SEQ ID NO: 18718 - RNA, 21 nt, synthetic construct
  source 1..21: mol_type = other RNA
ggaggggctgccagactccgg

SEQ ID NO: 18719 - RNA, 21 nt, synthetic construct
  source 1..21: mol_type = other RNA
ggagtctggcagcccctcctc

SEQ ID NO: 18720 - RNA, 21 nt, synthetic construct
  source 1..21: mol_type = other RNA
ggatgcccagctcagaagcac

SEQ ID NO: 18721 - RNA, 21 nt, synthetic construct
  source 1..21: mol_type = other RNA
ggatgccttcggatgcccagc

SEQ ID NO: 18722 - RNA, 21 nt, synthetic construct
  source 1..21: mol_type = other RNA
ggattcctacacaatgcgttg

SEQ ID NO: 18723 - RNA, 21 nt, synthetic construct
  source 1..21: mol_type = other RNA
ggcaacgcattgtgtaggaat

SEQ ID NO: 18724 - RNA, 21 nt, synthetic construct
  source 1..21: mol_type = other RNA
ggcacgaggaggggctgccag

SEQ ID NO: 18725 - RNA, 21 nt, synthetic construct
  source 1..21: mol_type = other RNA
ggcagcagctcccggagtctg

SEQ ID NO: 18726 - RNA, 21 nt, synthetic construct
  source 1..21: mol_type = other RNA
ggcagcccctcctcgtgccct

SEQ ID NO: 18727 - RNA, 21 nt, synthetic construct
  source 1..21: mol_type = other RNA
ggcatccgaaggcatccttgg

SEQ ID NO: 18728 - RNA, 21 nt, synthetic construct
  source 1..21: mol_type = other RNA
ggcatccttggggaagctgag

SEQ ID NO: 18729 - RNA, 21 nt, synthetic construct
  source 1..21: mol_type = other RNA
ggccgggaaagcatcttaatt

SEQ ID NO: 18730 - RNA, 21 nt, synthetic construct
  source 1..21: mol_type = other RNA
ggcctttttaccttggggctc

SEQ ID NO: 18731 - RNA, 21 nt, synthetic construct
  source 1..21: mol_type = other RNA
ggcgggctcccaactggtgac

SEQ ID NO: 18732 - RNA, 21 nt, synthetic construct
  source 1..21: mol_type = other RNA
ggcgtggagccaggcaacgca

SEQ ID NO: 18733 - RNA, 21 nt, synthetic construct
  source 1..21: mol_type = other RNA
ggctagtgatgaggctgtgtg

SEQ ID NO: 18734 - RNA, 21 nt, synthetic construct
  source 1..21: mol_type = other RNA
ggctccacgccctgctgggtc

SEQ ID NO: 18735 - RNA, 21 nt, synthetic construct
  source 1..21: mol_type = other RNA
ggctcccaactggtgactggt

SEQ ID NO: 18736 - RNA, 21 nt, synthetic construct
  source 1..21: mol_type = other RNA
ggctctgacaggtaggaccca

SEQ ID NO: 18737 - RNA, 21 nt, synthetic construct
  source 1..21: mol_type = other RNA
ggctgccagactccgggagct

SEQ ID NO: 18738 - RNA, 21 nt, synthetic construct
  source 1..21: mol_type = other RNA
ggctgggattcctacacaatg

SEQ ID NO: 18739 - RNA, 21 nt, synthetic construct
  source 1..21: mol_type = other RNA
ggctgtgtgcttctgagctgg

SEQ ID NO: 18740 - RNA, 21 nt, synthetic construct
  source 1..21: mol_type = other RNA
ggcttagcttggcgggctccc

SEQ ID NO: 18741 - RNA, 21 nt, synthetic construct
  source 1..21: mol_type = other RNA
gggaaagcatcttaatttagc

SEQ ID NO: 18742 - RNA, 21 nt, synthetic construct
  source 1..21: mol_type = other RNA
gggaagctgagggcacgagga

SEQ ID NO: 18743 - RNA, 21 nt, synthetic construct
  source 1..21: mol_type = other RNA
gggagcccgccaagctaagcc

SEQ ID NO: 18744 - RNA, 21 nt, synthetic construct
  source 1..21: mol_type = other RNA
gggagctgctgcctggctggg

SEQ ID NO: 18745 - RNA, 21 nt, synthetic construct
  source 1..21: mol_type = other RNA
gggattcctacacaatgcgtt

SEQ ID NO: 18746 - RNA, 21 nt, synthetic construct
  source 1..21: mol_type = other RNA
gggcacgaggaggggctgcca

SEQ ID NO: 18747 - RNA, 21 nt, synthetic construct
  source 1..21: mol_type = other RNA
gggcatccgaaggcatccttg

SEQ ID NO: 18748 - RNA, 21 nt, synthetic construct
  source 1..21: mol_type = other RNA
gggcgtggagccaggcaacgc

SEQ ID NO: 18749 - RNA, 21 nt, synthetic construct
  source 1..21: mol_type = other RNA
gggctcccaactggtgactgg

SEQ ID NO: 18750 - RNA, 21 nt, synthetic construct
  source 1..21: mol_type = other RNA
gggctctgacaggtaggaccc

SEQ ID NO: 18751 - RNA, 21 nt, synthetic construct
  source 1..21: mol_type = other RNA
gggctgccagactccgggagc

SEQ ID NO: 18752 - RNA, 21 nt, synthetic construct
  source 1..21: mol_type = other RNA
ggggaagctgagggcacgagg

SEQ ID NO: 18753 - RNA, 21 nt, synthetic construct
  source 1..21: mol_type = other RNA
ggggctctgacaggtaggacc

SEQ ID NO: 18754 - RNA, 21 nt, synthetic construct
  source 1..21: mol_type = other RNA
ggggctgccagactccgggag

SEQ ID NO: 18755 - RNA, 21 nt, synthetic construct
  source 1..21: mol_type = other RNA
gggtcctacctgtcagagccc

SEQ ID NO: 18756 - RNA, 21 nt, synthetic construct
  source 1..21: mol_type = other RNA
ggtaaaaaggccgggaaagca

SEQ ID NO: 18757 - RNA, 21 nt, synthetic construct
  source 1..21: mol_type = other RNA
ggtaggacccagcagggcgtg

SEQ ID NO: 18758 - RNA, 21 nt, synthetic construct
  source 1..21: mol_type = other RNA
ggtcctacctgtcagagcccc

SEQ ID NO: 18759 - RNA, 21 nt, synthetic construct
  source 1..21: mol_type = other RNA
ggtgactggttagtgatgagg

SEQ ID NO: 18760 - RNA, 21 nt, synthetic construct
  source 1..21: mol_type = other RNA
ggttagtgatgaggctagtga

SEQ ID NO: 18761 - RNA, 21 nt, synthetic construct
  source 1..21: mol_type = other RNA
gtaaaaaggccgggaaagcat

SEQ ID NO: 18762 - RNA, 21 nt, synthetic construct
  source 1..21: mol_type = other RNA
gtaggaatcccagccaggcag

SEQ ID NO: 18763 - RNA, 21 nt, synthetic construct
  source 1..21: mol_type = other RNA
gtaggacccagcagggcgtgg

SEQ ID NO: 18764 - RNA, 21 nt, synthetic construct
  source 1..21: mol_type = other RNA
gtcaccagttgggagcccgcc

SEQ ID NO: 18765 - RNA, 21 nt, synthetic construct
  source 1..21: mol_type = other RNA
gtcagagccccaaggtaaaaa

SEQ ID NO: 18766 - RNA, 21 nt, synthetic construct
  source 1..21: mol_type = other RNA
gtcctacctgtcagagcccca

SEQ ID NO: 18767 - RNA, 21 nt, synthetic construct
  source 1..21: mol_type = other RNA
gtctggcagcccctcctcgtg

SEQ ID NO: 18768 - RNA, 21 nt, synthetic construct
  source 1..21: mol_type = other RNA
gtgactggttagtgatgaggc

SEQ ID NO: 18769 - RNA, 21 nt, synthetic construct
  source 1..21: mol_type = other RNA
gtgatgaggctagtgatgagg

SEQ ID NO: 18770 - RNA, 21 nt, synthetic construct
  source 1..21: mol_type = other RNA
gtgatgaggctgtgtgcttct

SEQ ID NO: 18771 - RNA, 21 nt, synthetic construct
  source 1..21: mol_type = other RNA
gtgccctcagcttccccaagg

SEQ ID NO: 18772 - RNA, 21 nt, synthetic construct
  source 1..21: mol_type = other RNA
gtgcttctgagctgggcatcc

SEQ ID NO: 18773 - RNA, 21 nt, synthetic construct
  source 1..21: mol_type = other RNA
gtggagccaggcaacgcattg

SEQ ID NO: 18774 - RNA, 21 nt, synthetic construct
  source 1..21: mol_type = other RNA
gtgtaggaatcccagccaggc

SEQ ID NO: 18775 - RNA, 21 nt, synthetic construct
  source 1..21: mol_type = other RNA
gtgtgcttctgagctgggcat

SEQ ID NO: 18776 - RNA, 21 nt, synthetic construct
  source 1..21: mol_type = other RNA
gttagtgatgaggctagtgat

SEQ ID NO: 18777 - RNA, 21 nt, synthetic construct
  source 1..21: mol_type = other RNA
gttgcctggctccacgccctg

SEQ ID NO: 18778 - RNA, 21 nt, synthetic construct
  source 1..21: mol_type = other RNA
gttggcttagcttggcgggct

SEQ ID NO: 18779 - RNA, 21 nt, synthetic construct
  source 1..21: mol_type = other RNA
gttgggagcccgccaagctaa

SEQ ID NO: 18780 - RNA, 21 nt, synthetic construct
  source 1..21: mol_type = other RNA
taaaaaggccgggaaagcatc

SEQ ID NO: 18781 - RNA, 21 nt, synthetic construct
  source 1..21: mol_type = other RNA
taaattaagatgctttcccgg

SEQ ID NO: 18782 - RNA, 21 nt, synthetic construct
  source 1..21: mol_type = other RNA
taaccagtcaccagttgggag

SEQ ID NO: 18783 - RNA, 21 nt, synthetic construct
  source 1..21: mol_type = other RNA
taagatgctttcccggccttt

SEQ ID NO: 18784 - RNA, 21 nt, synthetic construct
  source 1..21: mol_type = other RNA
tacacaatgcgttgcctggct

SEQ ID NO: 18785 - RNA, 21 nt, synthetic construct
  source 1..21: mol_type = other RNA
tacctgtcagagccccaaggt

SEQ ID NO: 18786 - RNA, 21 nt, synthetic construct
  source 1..21: mol_type = other RNA
taccttggggctctgacaggt

SEQ ID NO: 18787 - RNA, 21 nt, synthetic construct
  source 1..21: mol_type = other RNA
tagcctcatcactaaccagtc

SEQ ID NO: 18788 - RNA, 21 nt, synthetic construct
  source 1..21: mol_type = other RNA
tagcttggcgggctcccaact

SEQ ID NO: 18789 - RNA, 21 nt, synthetic construct
  source 1..21: mol_type = other RNA
taggaatcccagccaggcagc

SEQ ID NO: 18790 - RNA, 21 nt, synthetic construct
  source 1..21: mol_type = other RNA
taggacccagcagggcgtgga

SEQ ID NO: 18791 - RNA, 21 nt, synthetic construct
  source 1..21: mol_type = other RNA
tagtgatgaggctagtgatga

SEQ ID NO: 18792 - RNA, 21 nt, synthetic construct
  source 1..21: mol_type = other RNA
tagtgatgaggctgtgtgctt

SEQ ID NO: 18793 - RNA, 21 nt, synthetic construct
  source 1..21: mol_type = other RNA
tcaccagttgggagcccgcca

SEQ ID NO: 18794 - RNA, 21 nt, synthetic construct
  source 1..21: mol_type = other RNA
tcactaaccagtcaccagttg

SEQ ID NO: 18795 - RNA, 21 nt, synthetic construct
  source 1..21: mol_type = other RNA
tcactagcctcatcactaacc

SEQ ID NO: 18796 - RNA, 21 nt, synthetic construct
  source 1..21: mol_type = other RNA
tcagaagcacacagcctcatc

SEQ ID NO: 18797 - RNA, 21 nt, synthetic construct
  source 1..21: mol_type = other RNA
tcagagccccaaggtaaaaag

SEQ ID NO: 18798 - RNA, 21 nt, synthetic construct
  source 1..21: mol_type = other RNA
tcagcttccccaaggatgcct

SEQ ID NO: 18799 - RNA, 21 nt, synthetic construct
  source 1..21: mol_type = other RNA
tcatcactaaccagtcaccag

SEQ ID NO: 18800 - RNA, 21 nt, synthetic construct
  source 1..21: mol_type = other RNA
tcatcactagcctcatcacta

SEQ ID NO: 18801 - RNA, 21 nt, synthetic construct
  source 1..21: mol_type = other RNA
tccacgccctgctgggtccta

SEQ ID NO: 18802 - RNA, 21 nt, synthetic construct
  source 1..21: mol_type = other RNA
tcccaactggtgactggttag

SEQ ID NO: 18803 - RNA, 21 nt, synthetic construct
  source 1..21: mol_type = other RNA
tcccagccaggcagcagctcc

SEQ ID NO: 18804 - RNA, 21 nt, synthetic construct
  source 1..21: mol_type = other RNA
tccccaaggatgccttcggat

SEQ ID NO: 18805 - RNA, 21 nt, synthetic construct
  source 1..21: mol_type = other RNA
tcccggagtctggcagcccct

SEQ ID NO: 18806 - RNA, 21 nt, synthetic construct
  source 1..21: mol_type = other RNA
tcccggcctttttaccttggg

SEQ ID NO: 18807 - RNA, 21 nt, synthetic construct
  source 1..21: mol_type = other RNA
tccgaaggcatccttggggaa

SEQ ID NO: 18808 - RNA, 21 nt, synthetic construct
  source 1..21: mol_type = other RNA
tccgggagctgctgcctggct

SEQ ID NO: 18809 - RNA, 21 nt, synthetic construct
  source 1..21: mol_type = other RNA
tcctacacaatgcgttgcctg

SEQ ID NO: 18810 - RNA, 21 nt, synthetic construct
  source 1..21: mol_type = other RNA
tcctacctgtcagagccccaa

SEQ ID NO: 18811 - RNA, 21 nt, synthetic construct
  source 1..21: mol_type = other RNA
tcctcgtgccctcagcttccc

SEQ ID NO: 18812 - RNA, 21 nt, synthetic construct
  source 1..21: mol_type = other RNA
tccttggggaagctgagggca

SEQ ID NO: 18813 - RNA, 21 nt, synthetic construct
  source 1..21: mol_type = other RNA
tcggatgcccagctcagaagc

SEQ ID NO: 18814 - RNA, 21 nt, synthetic construct
  source 1..21: mol_type = other RNA
tcgtgccctcagcttccccaa

SEQ ID NO: 18815 - RNA, 21 nt, synthetic construct
  source 1..21: mol_type = other RNA
tctgacaggtaggacccagca

SEQ ID NO: 18816 - RNA, 21 nt, synthetic construct
  source 1..21: mol_type = other RNA
tctgagctgggcatccgaagg

SEQ ID NO: 18817 - RNA, 21 nt, synthetic construct
  source 1..21: mol_type = other RNA
tctggcagcccctcctcgtgc

SEQ ID NO: 18818 - RNA, 21 nt, synthetic construct
  source 1..21: mol_type = other RNA
tgacaggtaggacccagcagg

SEQ ID NO: 18819 - RNA, 21 nt, synthetic construct
  source 1..21: mol_type = other RNA
tgactggttagtgatgaggct

SEQ ID NO: 18820 - RNA, 21 nt, synthetic construct
  source 1..21: mol_type = other RNA
tgagactgcacgctaaattaa

SEQ ID NO: 18821 - RNA, 21 nt, synthetic construct
  source 1..21: mol_type = other RNA
tgagctgggcatccgaaggca

SEQ ID NO: 18822 - RNA, 21 nt, synthetic construct
  source 1..21: mol_type = other RNA
tgaggctagtgatgaggctgt

SEQ ID NO: 18823 - RNA, 21 nt, synthetic construct
  source 1..21: mol_type = other RNA
tgaggctgtgtgcttctgagc

SEQ ID NO: 18824 - RNA, 21 nt, synthetic construct
  source 1..21: mol_type = other RNA
tgagggcacgaggaggggctg

SEQ ID NO: 18825 - RNA, 21 nt, synthetic construct
  source 1..21: mol_type = other RNA
tgatgaggctagtgatgaggc

SEQ ID NO: 18826 - RNA, 21 nt, synthetic construct
  source 1..21: mol_type = other RNA
tgatgaggctgtgtgcttctg

SEQ ID NO: 18827 - RNA, 21 nt, synthetic construct
  source 1..21: mol_type = other RNA
tgcacgctaaattaagatgct

SEQ ID NO: 18828 - RNA, 21 nt, synthetic construct
  source 1..21: mol_type = other RNA
tgcatgttggcttagcttggc

SEQ ID NO: 18829 - RNA, 21 nt, synthetic construct
  source 1..21: mol_type = other RNA
tgccagactccgggagctgct

SEQ ID NO: 18830 - RNA, 21 nt, synthetic construct
  source 1..21: mol_type = other RNA
tgcccagctcagaagcacaca

SEQ ID NO: 18831 - RNA, 21 nt, synthetic construct
  source 1..21: mol_type = other RNA
tgccctcagcttccccaagga

SEQ ID NO: 18832 - RNA, 21 nt, synthetic construct
  source 1..21: mol_type = other RNA
tgcctggctccacgccctgct

SEQ ID NO: 18833 - RNA, 21 nt, synthetic construct
  source 1..21: mol_type = other RNA
tgcctggctgggattcctaca

SEQ ID NO: 18834 - RNA, 21 nt, synthetic construct
  source 1..21: mol_type = other RNA
tgccttcggatgcccagctca

SEQ ID NO: 18835 - RNA, 21 nt, synthetic construct
  source 1..21: mol_type = other RNA
tgcgttgcctggctccacgcc

SEQ ID NO: 18836 - RNA, 21 nt, synthetic construct
  source 1..21: mol_type = other RNA
tgctgcctggctgggattcct

SEQ ID NO: 18837 - RNA, 21 nt, synthetic construct
  source 1..21: mol_type = other RNA
tgctgggtcctacctgtcaga

SEQ ID NO: 18838 - RNA, 21 nt, synthetic construct
  source 1..21: mol_type = other RNA
tgcttctgagctgggcatccg

SEQ ID NO: 18839 - RNA, 21 nt, synthetic construct
  source 1..21: mol_type = other RNA
tgctttcccggcctttttacc

SEQ ID NO: 18840 - RNA, 21 nt, synthetic construct
  source 1..21: mol_type = other RNA
tggagccaggcaacgcattgt

SEQ ID NO: 18841 - RNA, 21 nt, synthetic construct
  source 1..21: mol_type = other RNA
tggcagcccctcctcgtgccc

SEQ ID NO: 18842 - RNA, 21 nt, synthetic construct
  source 1..21: mol_type = other RNA
tggcgggctcccaactggtga

SEQ ID NO: 18843 - RNA, 21 nt, synthetic construct
  source 1..21: mol_type = other RNA
tggctccacgccctgctgggt

SEQ ID NO: 18844 - RNA, 21 nt, synthetic construct
  source 1..21: mol_type = other RNA
tggctgggattcctacacaat

SEQ ID NO: 18845 - RNA, 21 nt, synthetic construct
  source 1..21: mol_type = other RNA
tggcttagcttggcgggctcc

SEQ ID NO: 18846 - RNA, 21 nt, synthetic construct
  source 1..21: mol_type = other RNA
tgggagcccgccaagctaagc

SEQ ID NO: 18847 - RNA, 21 nt, synthetic construct
  source 1..21: mol_type = other RNA
tgggattcctacacaatgcgt

SEQ ID NO: 18848 - RNA, 21 nt, synthetic construct
  source 1..21: mol_type = other RNA
tgggcatccgaaggcatcctt

SEQ ID NO: 18849 - RNA, 21 nt, synthetic construct
  source 1..21: mol_type = other RNA
tggggaagctgagggcacgag

SEQ ID NO: 18850 - RNA, 21 nt, synthetic construct
  source 1..21: mol_type = other RNA
tggggctctgacaggtaggac

SEQ ID NO: 18851 - RNA, 21 nt, synthetic construct
  source 1..21: mol_type = other RNA
tgggtcctacctgtcagagcc

SEQ ID NO: 18852 - RNA, 21 nt, synthetic construct
  source 1..21: mol_type = other RNA
tggtgactggttagtgatgag

SEQ ID NO: 18853 - RNA, 21 nt, synthetic construct
  source 1..21: mol_type = other RNA
tggttagtgatgaggctagtg

SEQ ID NO: 18854 - RNA, 21 nt, synthetic construct
  source 1..21: mol_type = other RNA
tgtaggaatcccagccaggca

SEQ ID NO: 18855 - RNA, 21 nt, synthetic construct
  source 1..21: mol_type = other RNA
tgtcagagccccaaggtaaaa

SEQ ID NO: 18856 - RNA, 21 nt, synthetic construct
  source 1..21: mol_type = other RNA
tgtgcttctgagctgggcatc

SEQ ID NO: 18857 - RNA, 21 nt, synthetic construct
  source 1..21: mol_type = other RNA
tgtgtaggaatcccagccagg

SEQ ID NO: 18858 - RNA, 21 nt, synthetic construct
  source 1..21: mol_type = other RNA
tgtgtgcttctgagctgggca

SEQ ID NO: 18859 - RNA, 21 nt, synthetic construct
  source 1..21: mol_type = other RNA
tgttggcttagcttggcgggc

SEQ ID NO: 18860 - RNA, 21 nt, synthetic construct
  source 1..21: mol_type = other RNA
ttaagatgctttcccggcctt

SEQ ID NO: 18861 - RNA, 21 nt, synthetic construct
  source 1..21: mol_type = other RNA
ttaccttggggctctgacagg

SEQ ID NO: 18862 - RNA, 21 nt, synthetic construct
  source 1..21: mol_type = other RNA
ttagcttggcgggctcccaac

SEQ ID NO: 18863 - RNA, 21 nt, synthetic construct
  source 1..21: mol_type = other RNA
ttagtgatgaggctagtgatg

SEQ ID NO: 18864 - RNA, 21 nt, synthetic construct
  source 1..21: mol_type = other RNA
ttccccaaggatgccttcgga

SEQ ID NO: 18865 - RNA, 21 nt, synthetic construct
  source 1..21: mol_type = other RNA
ttcccggcctttttaccttgg

SEQ ID NO: 18866 - RNA, 21 nt, synthetic construct
  source 1..21: mol_type = other RNA
ttcctacacaatgcgttgcct

SEQ ID NO: 18867 - RNA, 21 nt, synthetic construct
  source 1..21: mol_type = other RNA
ttcggatgcccagctcagaag

SEQ ID NO: 18868 - RNA, 21 nt, synthetic construct
  source 1..21: mol_type = other RNA
ttctgagctgggcatccgaag

SEQ ID NO: 18869 - RNA, 21 nt, synthetic construct
  source 1..21: mol_type = other RNA
ttgcatgttggcttagcttgg

SEQ ID NO: 18870 - RNA, 21 nt, synthetic construct
  source 1..21: mol_type = other RNA
ttgcctggctccacgccctgc

SEQ ID NO: 18871 - RNA, 21 nt, synthetic construct
  source 1..21: mol_type = other RNA
ttggcgggctcccaactggtg

SEQ ID NO: 18872 - RNA, 21 nt, synthetic construct
  source 1..21: mol_type = other RNA
ttggcttagcttggcgggctc

SEQ ID NO: 18873 - RNA, 21 nt, synthetic construct
  source 1..21: mol_type = other RNA
ttgggagcccgccaagctaag

SEQ ID NO: 18874 - RNA, 21 nt, synthetic construct
  source 1..21: mol_type = other RNA
ttggggaagctgagggcacga

SEQ ID NO: 18875 - RNA, 21 nt, synthetic construct
  source 1..21: mol_type = other RNA
ttggggctctgacaggtagga

SEQ ID NO: 18876 - RNA, 21 nt, synthetic construct
  source 1..21: mol_type = other RNA
ttgtgtaggaatcccagccag

SEQ ID NO: 18877 - RNA, 21 nt, synthetic construct
  source 1..21: mol_type = other RNA
tttaccttggggctctgacag

SEQ ID NO: 18878 - RNA, 21 nt, synthetic construct
  source 1..21: mol_type = other RNA
tttcccggcctttttaccttg

SEQ ID NO: 18879 - RNA, 21 nt, synthetic construct
  source 1..21: mol_type = other RNA
tttgcatgttggcttagcttg

SEQ ID NO: 18880 - RNA, 21 nt, synthetic construct
  source 1..21: mol_type = other RNA
ttttaccttggggctctgaca

SEQ ID NO: 18881 - RNA, 21 nt, synthetic construct
  source 1..21: mol_type = other RNA
tttttaccttggggctctgac

SEQ ID NO: 18882 - RNA, 22 nt, synthetic construct
  source 1..22: mol_type = other RNA
aaaaaggccgggaaagcatctt

SEQ ID NO: 18883 - RNA, 22 nt, synthetic construct
  source 1..22: mol_type = other RNA
aaaaggccgggaaagcatctta

SEQ ID NO: 18884 - RNA, 22 nt, synthetic construct
  source 1..22: mol_type = other RNA
aaagcatcttaatttagcgtgc

SEQ ID NO: 18885 - RNA, 22 nt, synthetic construct
  source 1..22: mol_type = other RNA
aaaggccgggaaagcatcttaa

SEQ ID NO: 18886 - RNA, 22 nt, synthetic construct
  source 1..22: mol_type = other RNA
aaattaagatgctttcccggcc

SEQ ID NO: 18887 - RNA, 22 nt, synthetic construct
  source 1..22: mol_type = other RNA
aaccagtcaccagttgggagcc

SEQ ID NO: 18888 - RNA, 22 nt, synthetic construct
  source 1..22: mol_type = other RNA
aacgcattgtgtaggaatccca

SEQ ID NO: 18889 - RNA, 22 nt, synthetic construct
  source 1..22: mol_type = other RNA
aactggtgactggttagtgatg

SEQ ID NO: 18890 - RNA, 22 nt, synthetic construct
  source 1..22: mol_type = other RNA
aagatgctttcccggccttttt

SEQ ID NO: 18891 - RNA, 22 nt, synthetic construct
  source 1..22: mol_type = other RNA
aagcacacagcctcatcactag

SEQ ID NO: 18892 - RNA, 22 nt, synthetic construct
  source 1..22: mol_type = other RNA
aagcatcttaatttagcgtgca

SEQ ID NO: 18893 - RNA, 22 nt, synthetic construct
  source 1..22: mol_type = other RNA
aagctgagggcacgaggagggg

SEQ ID NO: 18894 - RNA, 22 nt, synthetic construct
  source 1..22: mol_type = other RNA
aaggatgccttcggatgcccag

SEQ ID NO: 18895 - RNA, 22 nt, synthetic construct
  source 1..22: mol_type = other RNA
aaggcatccttggggaagctga

SEQ ID NO: 18896 - RNA, 22 nt, synthetic construct
  source 1..22: mol_type = other RNA
aaggccgggaaagcatcttaat

SEQ ID NO: 18897 - RNA, 22 nt, synthetic construct
  source 1..22: mol_type = other RNA
aaggtaaaaaggccgggaaagc

SEQ ID NO: 18898 - RNA, 22 nt, synthetic construct
  source 1..22: mol_type = other RNA
aatcccagccaggcagcagctc

SEQ ID NO: 18899 - RNA, 22 nt, synthetic construct
  source 1..22: mol_type = other RNA
aatgcgttgcctggctccacgc

SEQ ID NO: 18900 - RNA, 22 nt, synthetic construct
  source 1..22: mol_type = other RNA
aattaagatgctttcccggcct

SEQ ID NO: 18901 - RNA, 22 nt, synthetic construct
  source 1..22: mol_type = other RNA
acaatgcgttgcctggctccac

SEQ ID NO: 18902 - RNA, 22 nt, synthetic construct
  source 1..22: mol_type = other RNA
acacaatgcgttgcctggctcc

SEQ ID NO: 18903 - RNA, 22 nt, synthetic construct
  source 1..22: mol_type = other RNA
acacagcctcatcactagcctc

SEQ ID NO: 18904 - RNA, 22 nt, synthetic construct
  source 1..22: mol_type = other RNA
acagcctcatcactagcctcat

SEQ ID NO: 18905 - RNA, 22 nt, synthetic construct
  source 1..22: mol_type = other RNA
acaggtaggacccagcagggcg

SEQ ID NO: 18906 - RNA, 22 nt, synthetic construct
  source 1..22: mol_type = other RNA
accagtcaccagttgggagccc

SEQ ID NO: 18907 - RNA, 22 nt, synthetic construct
  source 1..22: mol_type = other RNA
accagttgggagcccgccaagc

SEQ ID NO: 18908 - RNA, 22 nt, synthetic construct
  source 1..22: mol_type = other RNA
acccagcagggcgtggagccag

SEQ ID NO: 18909 - RNA, 22 nt, synthetic construct
  source 1..22: mol_type = other RNA
acctgtcagagccccaaggtaa

SEQ ID NO: 18910 - RNA, 22 nt, synthetic construct
  source 1..22: mol_type = other RNA
accttggggctctgacaggtag

SEQ ID NO: 18911 - RNA, 22 nt, synthetic construct
  source 1..22: mol_type = other RNA
acgaggaggggctgccagactc

SEQ ID NO: 18912 - RNA, 22 nt, synthetic construct
  source 1..22: mol_type = other RNA
acgcattgtgtaggaatcccag

SEQ ID NO: 18913 - RNA, 22 nt, synthetic construct
  source 1..22: mol_type = other RNA
acgccctgctgggtcctacctg

SEQ ID NO: 18914 - RNA, 22 nt, synthetic construct
  source 1..22: mol_type = other RNA
acgctaaattaagatgctttcc

SEQ ID NO: 18915 - RNA, 22 nt, synthetic construct
  source 1..22: mol_type = other RNA
actaaccagtcaccagttggga

SEQ ID NO: 18916 - RNA, 22 nt, synthetic construct
  source 1..22: mol_type = other RNA
actagcctcatcactaaccagt

SEQ ID NO: 18917 - RNA, 22 nt, synthetic construct
  source 1..22: mol_type = other RNA
actccgggagctgctgcctggc

SEQ ID NO: 18918 - RNA, 22 nt, synthetic construct
  source 1..22: mol_type = other RNA
actgcacgctaaattaagatgc

SEQ ID NO: 18919 - RNA, 22 nt, synthetic construct
  source 1..22: mol_type = other RNA
actggtgactggttagtgatga

SEQ ID NO: 18920 - RNA, 22 nt, synthetic construct
  source 1..22: mol_type = other RNA
actggttagtgatgaggctagt

SEQ ID NO: 18921 - RNA, 22 nt, synthetic construct
  source 1..22: mol_type = other RNA
agaagcacacagcctcatcact

SEQ ID NO: 18922 - RNA, 22 nt, synthetic construct
  source 1..22: mol_type = other RNA
agactccgggagctgctgcctg

SEQ ID NO: 18923 - RNA, 22 nt, synthetic construct
  source 1..22: mol_type = other RNA
agactgcacgctaaattaagat

SEQ ID NO: 18924 - RNA, 22 nt, synthetic construct
  source 1..22: mol_type = other RNA
agagccccaaggtaaaaaggcc

SEQ ID NO: 18925 - RNA, 22 nt, synthetic construct
  source 1..22: mol_type = other RNA
agatgctttcccggccttttta

SEQ ID NO: 18926 - RNA, 22 nt, synthetic construct
  source 1..22: mol_type = other RNA
agcacacagcctcatcactagc

SEQ ID NO: 18927 - RNA, 22 nt, synthetic construct
  source 1..22: mol_type = other RNA
agcagctcccggagtctggcag

SEQ ID NO: 18928 - RNA, 22 nt, synthetic construct
  source 1..22: mol_type = other RNA
agcagggcgtggagccaggcaa

SEQ ID NO: 18929 - RNA, 22 nt, synthetic construct
  source 1..22: mol_type = other RNA
agccaggcaacgcattgtgtag

SEQ ID NO: 18930 - RNA, 22 nt, synthetic construct
  source 1..22: mol_type = other RNA
agccaggcagcagctcccggag

SEQ ID NO: 18931 - RNA, 22 nt, synthetic construct
  source 1..22: mol_type = other RNA
agccccaaggtaaaaaggccgg

SEQ ID NO: 18932 - RNA, 22 nt, synthetic construct
  source 1..22: mol_type = other RNA
agcccctcctcgtgccctcagc

SEQ ID NO: 18933 - RNA, 22 nt, synthetic construct
  source 1..22: mol_type = other RNA
agcctcatcactaaccagtcac

SEQ ID NO: 18934 - RNA, 22 nt, synthetic construct
  source 1..22: mol_type = other RNA
agcctcatcactagcctcatca

SEQ ID NO: 18935 - RNA, 22 nt, synthetic construct
  source 1..22: mol_type = other RNA
agctcagaagcacacagcctca

SEQ ID NO: 18936 - RNA, 22 nt, synthetic construct
  source 1..22: mol_type = other RNA
agctcccggagtctggcagccc

SEQ ID NO: 18937 - RNA, 22 nt, synthetic construct
  source 1..22: mol_type = other RNA
agctgagggcacgaggaggggc

SEQ ID NO: 18938 - RNA, 22 nt, synthetic construct
  source 1..22: mol_type = other RNA
agctgctgcctggctgggattc

SEQ ID NO: 18939 - RNA, 22 nt, synthetic construct
  source 1..22: mol_type = other RNA
agctgggcatccgaaggcatcc

SEQ ID NO: 18940 - RNA, 22 nt, synthetic construct
  source 1..22: mol_type = other RNA
agcttccccaaggatgccttcg

SEQ ID NO: 18941 - RNA, 22 nt, synthetic construct
  source 1..22: mol_type = other RNA
agcttggcgggctcccaactgg

SEQ ID NO: 18942 - RNA, 22 nt, synthetic construct
  source 1..22: mol_type = other RNA
aggaatcccagccaggcagcag

SEQ ID NO: 18943 - RNA, 22 nt, synthetic construct
  source 1..22: mol_type = other RNA
aggacccagcagggcgtggagc

SEQ ID NO: 18944 - RNA, 22 nt, synthetic construct
  source 1..22: mol_type = other RNA
aggaggggctgccagactccgg

SEQ ID NO: 18945 - RNA, 22 nt, synthetic construct
  source 1..22: mol_type = other RNA
aggatgccttcggatgcccagc

SEQ ID NO: 18946 - RNA, 22 nt, synthetic construct
  source 1..22: mol_type = other RNA
aggcaacgcattgtgtaggaat

SEQ ID NO: 18947 - RNA, 22 nt, synthetic construct
  source 1..22: mol_type = other RNA
aggcagcagctcccggagtctg

SEQ ID NO: 18948 - RNA, 22 nt, synthetic construct
  source 1..22: mol_type = other RNA
aggcatccttggggaagctgag

SEQ ID NO: 18949 - RNA, 22 nt, synthetic construct
  source 1..22: mol_type = other RNA
aggccgggaaagcatcttaatt

SEQ ID NO: 18950 - RNA, 22 nt, synthetic construct
  source 1..22: mol_type = other RNA
aggctagtgatgaggctgtgtg

SEQ ID NO: 18951 - RNA, 22 nt, synthetic construct
  source 1..22: mol_type = other RNA
aggctgtgtgcttctgagctgg

SEQ ID NO: 18952 - RNA, 22 nt, synthetic construct
  source 1..22: mol_type = other RNA
agggcacgaggaggggctgcca

SEQ ID NO: 18953 - RNA, 22 nt, synthetic construct
  source 1..22: mol_type = other RNA
agggcgtggagccaggcaacgc

SEQ ID NO: 18954 - RNA, 22 nt, synthetic construct
  source 1..22: mol_type = other RNA
aggggctgccagactccgggag

SEQ ID NO: 18955 - RNA, 22 nt, synthetic construct
  source 1..22: mol_type = other RNA
aggtaaaaaggccgggaaagca

SEQ ID NO: 18956 - RNA, 22 nt, synthetic construct
  source 1..22: mol_type = other RNA
aggtaggacccagcagggcgtg

SEQ ID NO: 18957 - RNA, 22 nt, synthetic construct
  source 1..22: mol_type = other RNA
agtcaccagttgggagcccgcc

SEQ ID NO: 18958 - RNA, 22 nt, synthetic construct
  source 1..22: mol_type = other RNA
agtctggcagcccctcctcgtg

SEQ ID NO: 18959 - RNA, 22 nt, synthetic construct
  source 1..22: mol_type = other RNA
agtgatgaggctagtgatgagg

SEQ ID NO: 18960 - RNA, 22 nt, synthetic construct
  source 1..22: mol_type = other RNA
agtgatgaggctgtgtgcttct

SEQ ID NO: 18961 - RNA, 22 nt, synthetic construct
  source 1..22: mol_type = other RNA
agttgggagcccgccaagctaa

SEQ ID NO: 18962 - RNA, 22 nt, synthetic construct
  source 1..22: mol_type = other RNA
atcactaaccagtcaccagttg

SEQ ID NO: 18963 - RNA, 22 nt, synthetic construct
  source 1..22: mol_type = other RNA
atcactagcctcatcactaacc

SEQ ID NO: 18964 - RNA, 22 nt, synthetic construct
  source 1..22: mol_type = other RNA
atcccagccaggcagcagctcc

SEQ ID NO: 18965 - RNA, 22 nt, synthetic construct
  source 1..22: mol_type = other RNA
atccgaaggcatccttggggaa

SEQ ID NO: 18966 - RNA, 22 nt, synthetic construct
  source 1..22: mol_type = other RNA
atccttggggaagctgagggca

SEQ ID NO: 18967 - RNA, 22 nt, synthetic construct
  source 1..22: mol_type = other RNA
atgaggctagtgatgaggctgt

SEQ ID NO: 18968 - RNA, 22 nt, synthetic construct
  source 1..22: mol_type = other RNA
atgaggctgtgtgcttctgagc

SEQ ID NO: 18969 - RNA, 22 nt, synthetic construct
  source 1..22: mol_type = other RNA
atgcccagctcagaagcacaca

SEQ ID NO: 18970 - RNA, 22 nt, synthetic construct
  source 1..22: mol_type = other RNA
atgccttcggatgcccagctca

SEQ ID NO: 18971 - RNA, 22 nt, synthetic construct
  source 1..22: mol_type = other RNA
atgcgttgcctggctccacgcc

SEQ ID NO: 18972 - RNA, 22 nt, synthetic construct
  source 1..22: mol_type = other RNA
atgctttcccggcctttttacc

SEQ ID NO: 18973 - RNA, 22 nt, synthetic construct
  source 1..22: mol_type = other RNA
atgttggcttagcttggcgggc

SEQ ID NO: 18974 - RNA, 22 nt, synthetic construct
  source 1..22: mol_type = other RNA
attaagatgctttcccggcctt

SEQ ID NO: 18975 - RNA, 22 nt, synthetic construct
  source 1..22: mol_type = other RNA
attcctacacaatgcgttgcct

SEQ ID NO: 18976 - RNA, 22 nt, synthetic construct
  source 1..22: mol_type = other RNA
attgtgtaggaatcccagccag

SEQ ID NO: 18977 - RNA, 22 nt, synthetic construct
  source 1..22: mol_type = other RNA
caacgcattgtgtaggaatccc

SEQ ID NO: 18978 - RNA, 22 nt, synthetic construct
  source 1..22: mol_type = other RNA
caactggtgactggttagtgat

SEQ ID NO: 18979 - RNA, 22 nt, synthetic construct
  source 1..22: mol_type = other RNA
caaggatgccttcggatgccca

SEQ ID NO: 18980 - RNA, 22 nt, synthetic construct
  source 1..22: mol_type = other RNA
caaggtaaaaaggccgggaaag

SEQ ID NO: 18981 - RNA, 22 nt, synthetic construct
  source 1..22: mol_type = other RNA
caatgcgttgcctggctccacg

SEQ ID NO: 18982 - RNA, 22 nt, synthetic construct
  source 1..22: mol_type = other RNA
cacaatgcgttgcctggctcca

SEQ ID NO: 18983 - RNA, 22 nt, synthetic construct
  source 1..22: mol_type = other RNA
cacacagcctcatcactagcct

SEQ ID NO: 18984 - RNA, 22 nt, synthetic construct
  source 1..22: mol_type = other RNA
cacagcctcatcactagcctca

SEQ ID NO: 18985 - RNA, 22 nt, synthetic construct
  source 1..22: mol_type = other RNA
caccagttgggagcccgccaag

SEQ ID NO: 18986 - RNA, 22 nt, synthetic construct
  source 1..22: mol_type = other RNA
cacgaggaggggctgccagact

SEQ ID NO: 18987 - RNA, 22 nt, synthetic construct
  source 1..22: mol_type = other RNA
cacgccctgctgggtcctacct

SEQ ID NO: 18988 - RNA, 22 nt, synthetic construct
  source 1..22: mol_type = other RNA
cacgctaaattaagatgctttc

SEQ ID NO: 18989 - RNA, 22 nt, synthetic construct
  source 1..22: mol_type = other RNA
cactaaccagtcaccagttggg

SEQ ID NO: 18990 - RNA, 22 nt, synthetic construct
  source 1..22: mol_type = other RNA
cactagcctcatcactaaccag

SEQ ID NO: 18991 - RNA, 22 nt, synthetic construct
  source 1..22: mol_type = other RNA
cagaagcacacagcctcatcac

SEQ ID NO: 18992 - RNA, 22 nt, synthetic construct
  source 1..22: mol_type = other RNA
cagactccgggagctgctgcct

SEQ ID NO: 18993 - RNA, 22 nt, synthetic construct
  source 1..22: mol_type = other RNA
cagagccccaaggtaaaaaggc

SEQ ID NO: 18994 - RNA, 22 nt, synthetic construct
  source 1..22: mol_type = other RNA
cagcagctcccggagtctggca

SEQ ID NO: 18995 - RNA, 22 nt, synthetic construct
  source 1..22: mol_type = other RNA
cagcagggcgtggagccaggca

SEQ ID NO: 18996 - RNA, 22 nt, synthetic construct
  source 1..22: mol_type = other RNA
cagccaggcagcagctcccgga

SEQ ID NO: 18997 - RNA, 22 nt, synthetic construct
  source 1..22: mol_type = other RNA
cagcccctcctcgtgccctcag

SEQ ID NO: 18998 - RNA, 22 nt, synthetic construct
  source 1..22: mol_type = other RNA
cagcctcatcactagcctcatc

SEQ ID NO: 18999 - RNA, 22 nt, synthetic construct
  source 1..22: mol_type = other RNA
cagctcagaagcacacagcctc

SEQ ID NO: 19000 - RNA, 22 nt, synthetic construct
  source 1..22: mol_type = other RNA
cagctcccggagtctggcagcc

SEQ ID NO: 19001 - RNA, 22 nt, synthetic construct
  source 1..22: mol_type = other RNA
cagcttccccaaggatgccttc

SEQ ID NO: 19002 - RNA, 22 nt, synthetic construct
  source 1..22: mol_type = other RNA
caggcaacgcattgtgtaggaa

SEQ ID NO: 19003 - RNA, 22 nt, synthetic construct
  source 1..22: mol_type = other RNA
caggcagcagctcccggagtct

SEQ ID NO: 19004 - RNA, 22 nt, synthetic construct
  source 1..22: mol_type = other RNA
cagggcgtggagccaggcaacg

SEQ ID NO: 19005 - RNA, 22 nt, synthetic construct
  source 1..22: mol_type = other RNA
caggtaggacccagcagggcgt

SEQ ID NO: 19006 - RNA, 22 nt, synthetic construct
  source 1..22: mol_type = other RNA
cagtcaccagttgggagcccgc

SEQ ID NO: 19007 - RNA, 22 nt, synthetic construct
  source 1..22: mol_type = other RNA
cagttgggagcccgccaagcta

SEQ ID NO: 19008 - RNA, 22 nt, synthetic construct
  source 1..22: mol_type = other RNA
catcactaaccagtcaccagtt

SEQ ID NO: 19009 - RNA, 22 nt, synthetic construct
  source 1..22: mol_type = other RNA
catcactagcctcatcactaac

SEQ ID NO: 19010 - RNA, 22 nt, synthetic construct
  source 1..22: mol_type = other RNA
catccgaaggcatccttgggga

SEQ ID NO: 19011 - RNA, 22 nt, synthetic construct
  source 1..22: mol_type = other RNA
catccttggggaagctgagggc

SEQ ID NO: 19012 - RNA, 22 nt, synthetic construct
  source 1..22: mol_type = other RNA
catgttggcttagcttggcggg

SEQ ID NO: 19013 - RNA, 22 nt, synthetic construct
  source 1..22: mol_type = other RNA
cattgtgtaggaatcccagcca

SEQ ID NO: 19014 - RNA, 22 nt, synthetic construct
  source 1..22: mol_type = other RNA
ccaactggtgactggttagtga

SEQ ID NO: 19015 - RNA, 22 nt, synthetic construct
  source 1..22: mol_type = other RNA
ccaaggatgccttcggatgccc

SEQ ID NO: 19016 - RNA, 22 nt, synthetic construct
  source 1..22: mol_type = other RNA
ccaaggtaaaaaggccgggaaa

SEQ ID NO: 19017 - RNA, 22 nt, synthetic construct
  source 1..22: mol_type = other RNA
ccacgccctgctgggtcctacc

SEQ ID NO: 19018 - RNA, 22 nt, synthetic construct
  source 1..22: mol_type = other RNA
ccagactccgggagctgctgcc

SEQ ID NO: 19019 - RNA, 22 nt, synthetic construct
  source 1..22: mol_type = other RNA
ccagcagggcgtggagccaggc

SEQ ID NO: 19020 - RNA, 22 nt, synthetic construct
  source 1..22: mol_type = other RNA
ccagccaggcagcagctcccgg

SEQ ID NO: 19021 - RNA, 22 nt, synthetic construct
  source 1..22: mol_type = other RNA
ccagctcagaagcacacagcct

SEQ ID NO: 19022 - RNA, 22 nt, synthetic construct
  source 1..22: mol_type = other RNA
ccaggcaacgcattgtgtagga

SEQ ID NO: 19023 - RNA, 22 nt, synthetic construct
  source 1..22: mol_type = other RNA
ccaggcagcagctcccggagtc

SEQ ID NO: 19024 - RNA, 22 nt, synthetic construct
  source 1..22: mol_type = other RNA
ccagtcaccagttgggagcccg

SEQ ID NO: 19025 - RNA, 22 nt, synthetic construct
  source 1..22: mol_type = other RNA
ccagttgggagcccgccaagct

SEQ ID NO: 19026 - RNA, 22 nt, synthetic construct
  source 1..22: mol_type = other RNA
cccaactggtgactggttagtg

SEQ ID NO: 19027 - RNA, 22 nt, synthetic construct
  source 1..22: mol_type = other RNA
cccaaggatgccttcggatgcc

SEQ ID NO: 19028 - RNA, 22 nt, synthetic construct
  source 1..22: mol_type = other RNA
cccaaggtaaaaaggccgggaa

SEQ ID NO: 19029 - RNA, 22 nt, synthetic construct
  source 1..22: mol_type = other RNA
cccagcagggcgtggagccagg

SEQ ID NO: 19030 - RNA, 22 nt, synthetic construct
  source 1..22: mol_type = other RNA
cccagccaggcagcagctcccg

SEQ ID NO: 19031 - RNA, 22 nt, synthetic construct
  source 1..22: mol_type = other RNA
cccagctcagaagcacacagcc

SEQ ID NO: 19032 - RNA, 22 nt, synthetic construct
  source 1..22: mol_type = other RNA
ccccaaggatgccttcggatgc

SEQ ID NO: 19033 - RNA, 22 nt, synthetic construct
  source 1..22: mol_type = other RNA
ccccaaggtaaaaaggccggga

SEQ ID NO: 19034 - RNA, 22 nt, synthetic construct
  source 1..22: mol_type = other RNA
cccctcctcgtgccctcagctt

SEQ ID NO: 19035 - RNA, 22 nt, synthetic construct
  source 1..22: mol_type = other RNA
cccggagtctggcagcccctcc

SEQ ID NO: 19036 - RNA, 22 nt, synthetic construct
  source 1..22: mol_type = other RNA
cccggcctttttaccttggggc

SEQ ID NO: 19037 - RNA, 22 nt, synthetic construct
  source 1..22: mol_type = other RNA
ccctcagcttccccaaggatgc

SEQ ID NO: 19038 - RNA, 22 nt, synthetic construct
  source 1..22: mol_type = other RNA
ccctcctcgtgccctcagcttc

SEQ ID NO: 19039 - RNA, 22 nt, synthetic construct
  source 1..22: mol_type = other RNA
ccctgctgggtcctacctgtca

SEQ ID NO: 19040 - RNA, 22 nt, synthetic construct
  source 1..22: mol_type = other RNA
ccgaaggcatccttggggaagc

SEQ ID NO: 19041 - RNA, 22 nt, synthetic construct
  source 1..22: mol_type = other RNA
ccggagtctggcagcccctcct

SEQ ID NO: 19042 - RNA, 22 nt, synthetic construct
  source 1..22: mol_type = other RNA
ccggcctttttaccttggggct

SEQ ID NO: 19043 - RNA, 22 nt, synthetic construct
  source 1..22: mol_type = other RNA
ccgggaaagcatcttaatttag

SEQ ID NO: 19044 - RNA, 22 nt, synthetic construct
  source 1..22: mol_type = other RNA
ccgggagctgctgcctggctgg

SEQ ID NO: 19045 - RNA, 22 nt, synthetic construct
  source 1..22: mol_type = other RNA
cctacacaatgcgttgcctggc

SEQ ID NO: 19046 - RNA, 22 nt, synthetic construct
  source 1..22: mol_type = other RNA
cctacctgtcagagccccaagg

SEQ ID NO: 19047 - RNA, 22 nt, synthetic construct
  source 1..22: mol_type = other RNA
cctcagcttccccaaggatgcc

SEQ ID NO: 19048 - RNA, 22 nt, synthetic construct
  source 1..22: mol_type = other RNA
cctcatcactaaccagtcacca

SEQ ID NO: 19049 - RNA, 22 nt, synthetic construct
  source 1..22: mol_type = other RNA
cctcatcactagcctcatcact

SEQ ID NO: 19050 - RNA, 22 nt, synthetic construct
  source 1..22: mol_type = other RNA
cctcctcgtgccctcagcttcc

SEQ ID NO: 19051 - RNA, 22 nt, synthetic construct
  source 1..22: mol_type = other RNA
cctcgtgccctcagcttcccca

SEQ ID NO: 19052 - RNA, 22 nt, synthetic construct
  source 1..22: mol_type = other RNA
cctgctgggtcctacctgtcag

SEQ ID NO: 19053 - RNA, 22 nt, synthetic construct
  source 1..22: mol_type = other RNA
cctggctccacgccctgctggg

SEQ ID NO: 19054 - RNA, 22 nt, synthetic construct
  source 1..22: mol_type = other RNA
cctggctgggattcctacacaa

SEQ ID NO: 19055 - RNA, 22 nt, synthetic construct
  source 1..22: mol_type = other RNA
cctgtcagagccccaaggtaaa

SEQ ID NO: 19056 - RNA, 22 nt, synthetic construct
  source 1..22: mol_type = other RNA
ccttcggatgcccagctcagaa

SEQ ID NO: 19057 - RNA, 22 nt, synthetic construct
  source 1..22: mol_type = other RNA
ccttggggaagctgagggcacg

SEQ ID NO: 19058 - RNA, 22 nt, synthetic construct
  source 1..22: mol_type = other RNA
ccttggggctctgacaggtagg

SEQ ID NO: 19059 - RNA, 22 nt, synthetic construct
  source 1..22: mol_type = other RNA
cctttttaccttggggctctga

SEQ ID NO: 19060 - RNA, 22 nt, synthetic construct
  source 1..22: mol_type = other RNA
cgaaggcatccttggggaagct

SEQ ID NO: 19061 - RNA, 22 nt, synthetic construct
  source 1..22: mol_type = other RNA
cgaggaggggctgccagactcc

SEQ ID NO: 19062 - RNA, 22 nt, synthetic construct
  source 1..22: mol_type = other RNA
cgcattgtgtaggaatcccagc

SEQ ID NO: 19063 - RNA, 22 nt, synthetic construct
  source 1..22: mol_type = other RNA
cgccctgctgggtcctacctgt

SEQ ID NO: 19064 - RNA, 22 nt, synthetic construct
  source 1..22: mol_type = other RNA
cgctaaattaagatgctttccc

SEQ ID NO: 19065 - RNA, 22 nt, synthetic construct
  source 1..22: mol_type = other RNA
cggagtctggcagcccctcctc

SEQ ID NO: 19066 - RNA, 22 nt, synthetic construct
  source 1..22: mol_type = other RNA
cggatgcccagctcagaagcac

SEQ ID NO: 19067 - RNA, 22 nt, synthetic construct
  source 1..22: mol_type = other RNA
cggcctttttaccttggggctc

SEQ ID NO: 19068 - RNA, 22 nt, synthetic construct
  source 1..22: mol_type = other RNA
cgggaaagcatcttaatttagc

SEQ ID NO: 19069 - RNA, 22 nt, synthetic construct
  source 1..22: mol_type = other RNA
cgggagctgctgcctggctggg

SEQ ID NO: 19070 - RNA, 22 nt, synthetic construct
  source 1..22: mol_type = other RNA
cgggctcccaactggtgactgg

SEQ ID NO: 19071 - RNA, 22 nt, synthetic construct
  source 1..22: mol_type = other RNA
cgtgccctcagcttccccaagg

SEQ ID NO: 19072 - RNA, 22 nt, synthetic construct
  source 1..22: mol_type = other RNA
cgtggagccaggcaacgcattg

SEQ ID NO: 19073 - RNA, 22 nt, synthetic construct
  source 1..22: mol_type = other RNA
cgttgcctggctccacgccctg

SEQ ID NO: 19074 - RNA, 22 nt, synthetic construct
  source 1..22: mol_type = other RNA
ctaaattaagatgctttcccgg

SEQ ID NO: 19075 - RNA, 22 nt, synthetic construct
  source 1..22: mol_type = other RNA
ctaaccagtcaccagttgggag

SEQ ID NO: 19076 - RNA, 22 nt, synthetic construct
  source 1..22: mol_type = other RNA
ctacacaatgcgttgcctggct

SEQ ID NO: 19077 - RNA, 22 nt, synthetic construct
  source 1..22: mol_type = other RNA
ctacctgtcagagccccaaggt

SEQ ID NO: 19078 - RNA, 22 nt, synthetic construct
  source 1..22: mol_type = other RNA
ctagcctcatcactaaccagtc

SEQ ID NO: 19079 - RNA, 22 nt, synthetic construct
  source 1..22: mol_type = other RNA
ctagtgatgaggctgtgtgctt

SEQ ID NO: 19080 - RNA, 22 nt, synthetic construct
  source 1..22: mol_type = other RNA
ctcagaagcacacagcctcatc

SEQ ID NO: 19081 - RNA, 22 nt, synthetic construct
  source 1..22: mol_type = other RNA
ctcagcttccccaaggatgcct

SEQ ID NO: 19082 - RNA, 22 nt, synthetic construct
  source 1..22: mol_type = other RNA
ctcatcactaaccagtcaccag

SEQ ID NO: 19083 - RNA, 22 nt, synthetic construct
  source 1..22: mol_type = other RNA
ctcatcactagcctcatcacta

SEQ ID NO: 19084 - RNA, 22 nt, synthetic construct
  source 1..22: mol_type = other RNA
ctccacgccctgctgggtccta

SEQ ID NO: 19085 - RNA, 22 nt, synthetic construct
  source 1..22: mol_type = other RNA
ctcccaactggtgactggttag

SEQ ID NO: 19086 - RNA, 22 nt, synthetic construct
  source 1..22: mol_type = other RNA
ctcccggagtctggcagcccct

SEQ ID NO: 19087 - RNA, 22 nt, synthetic construct
  source 1..22: mol_type = other RNA
ctccgggagctgctgcctggct

SEQ ID NO: 19088 - RNA, 22 nt, synthetic construct
  source 1..22: mol_type = other RNA
ctcctcgtgccctcagcttccc

SEQ ID NO: 19089 - RNA, 22 nt, synthetic construct
  source 1..22: mol_type = other RNA
ctcgtgccctcagcttccccaa

SEQ ID NO: 19090 - RNA, 22 nt, synthetic construct
  source 1..22: mol_type = other RNA
ctctgacaggtaggacccagca

SEQ ID NO: 19091 - RNA, 22 nt, synthetic construct
  source 1..22: mol_type = other RNA
ctgacaggtaggacccagcagg

SEQ ID NO: 19092 - RNA, 22 nt, synthetic construct
  source 1..22: mol_type = other RNA
ctgagactgcacgctaaattaa

SEQ ID NO: 19093 - RNA, 22 nt, synthetic construct
  source 1..22: mol_type = other RNA
ctgagctgggcatccgaaggca

SEQ ID NO: 19094 - RNA, 22 nt, synthetic construct
  source 1..22: mol_type = other RNA
ctgagggcacgaggaggggctg

SEQ ID NO: 19095 - RNA, 22 nt, synthetic construct
  source 1..22: mol_type = other RNA
ctgcacgctaaattaagatgct

SEQ ID NO: 19096 - RNA, 22 nt, synthetic construct
  source 1..22: mol_type = other RNA
ctgccagactccgggagctgct

SEQ ID NO: 19097 - RNA, 22 nt, synthetic construct
  source 1..22: mol_type = other RNA
ctgcctggctgggattcctaca

SEQ ID NO: 19098 - RNA, 22 nt, synthetic construct
  source 1..22: mol_type = other RNA
ctgctgcctggctgggattcct

SEQ ID NO: 19099 - RNA, 22 nt, synthetic construct
  source 1..22: mol_type = other RNA
ctgctgggtcctacctgtcaga

SEQ ID NO: 19100 - RNA, 22 nt, synthetic construct
  source 1..22: mol_type = other RNA
ctggcagcccctcctcgtgccc

SEQ ID NO: 19101 - RNA, 22 nt, synthetic construct
  source 1..22: mol_type = other RNA
ctggctccacgccctgctgggt

SEQ ID NO: 19102 - RNA, 22 nt, synthetic construct
  source 1..22: mol_type = other RNA
ctggctgggattcctacacaat

SEQ ID NO: 19103 - RNA, 22 nt, synthetic construct
  source 1..22: mol_type = other RNA
ctgggattcctacacaatgcgt

SEQ ID NO: 19104 - RNA, 22 nt, synthetic construct
  source 1..22: mol_type = other RNA
ctgggcatccgaaggcatcctt

SEQ ID NO: 19105 - RNA, 22 nt, synthetic construct
  source 1..22: mol_type = other RNA
ctgggtcctacctgtcagagcc

SEQ ID NO: 19106 - RNA, 22 nt, synthetic construct
  source 1..22: mol_type = other RNA
ctggtgactggttagtgatgag

SEQ ID NO: 19107 - RNA, 22 nt, synthetic construct
  source 1..22: mol_type = other RNA
ctggttagtgatgaggctagtg

SEQ ID NO: 19108 - RNA, 22 nt, synthetic construct
  source 1..22: mol_type = other RNA
ctgtcagagccccaaggtaaaa

SEQ ID NO: 19109 - RNA, 22 nt, synthetic construct
  source 1..22: mol_type = other RNA
ctgtgtgcttctgagctgggca

SEQ ID NO: 19110 - RNA, 22 nt, synthetic construct
  source 1..22: mol_type = other RNA
cttagcttggcgggctcccaac

SEQ ID NO: 19111 - RNA, 22 nt, synthetic construct
  source 1..22: mol_type = other RNA
cttccccaaggatgccttcgga

SEQ ID NO: 19112 - RNA, 22 nt, synthetic construct
  source 1..22: mol_type = other RNA
cttcggatgcccagctcagaag

SEQ ID NO: 19113 - RNA, 22 nt, synthetic construct
  source 1..22: mol_type = other RNA
cttctgagctgggcatccgaag

SEQ ID NO: 19114 - RNA, 22 nt, synthetic construct
  source 1..22: mol_type = other RNA
cttggcgggctcccaactggtg

SEQ ID NO: 19115 - RNA, 22 nt, synthetic construct
  source 1..22: mol_type = other RNA
cttggggaagctgagggcacga

SEQ ID NO: 19116 - RNA, 22 nt, synthetic construct
  source 1..22: mol_type = other RNA
cttggggctctgacaggtagga

SEQ ID NO: 19117 - RNA, 22 nt, synthetic construct
  source 1..22: mol_type = other RNA
ctttcccggcctttttaccttg

SEQ ID NO: 19118 - RNA, 22 nt, synthetic construct
  source 1..22: mol_type = other RNA
ctttttaccttggggctctgac

SEQ ID NO: 19119 - RNA, 22 nt, synthetic construct
  source 1..22: mol_type = other RNA
gaaagcatcttaatttagcgtg

SEQ ID NO: 19120 - RNA, 22 nt, synthetic construct
  source 1..22: mol_type = other RNA
gaagcacacagcctcatcacta

SEQ ID NO: 19121 - RNA, 22 nt, synthetic construct
  source 1..22: mol_type = other RNA
gaagctgagggcacgaggaggg

SEQ ID NO: 19122 - RNA, 22 nt, synthetic construct
  source 1..22: mol_type = other RNA
gaaggcatccttggggaagctg

SEQ ID NO: 19123 - RNA, 22 nt, synthetic construct
  source 1..22: mol_type = other RNA
gaatcccagccaggcagcagct

SEQ ID NO: 19124 - RNA, 22 nt, synthetic construct
  source 1..22: mol_type = other RNA
gacaggtaggacccagcagggc

SEQ ID NO: 19125 - RNA, 22 nt, synthetic construct
  source 1..22: mol_type = other RNA
gacccagcagggcgtggagcca

SEQ ID NO: 19126 - RNA, 22 nt, synthetic construct
  source 1..22: mol_type = other RNA
gactccgggagctgctgcctgg

SEQ ID NO: 19127 - RNA, 22 nt, synthetic construct
  source 1..22: mol_type = other RNA
gactgcacgctaaattaagatg

SEQ ID NO: 19128 - RNA, 22 nt, synthetic construct
  source 1..22: mol_type = other RNA
gactggttagtgatgaggctag

SEQ ID NO: 19129 - RNA, 22 nt, synthetic construct
  source 1..22: mol_type = other RNA
gagactgcacgctaaattaaga

SEQ ID NO: 19130 - RNA, 22 nt, synthetic construct
  source 1..22: mol_type = other RNA
gagccaggcaacgcattgtgta

SEQ ID NO: 19131 - RNA, 22 nt, synthetic construct
  source 1..22: mol_type = other RNA
gagccccaaggtaaaaaggccg

SEQ ID NO: 19132 - RNA, 22 nt, synthetic construct
  source 1..22: mol_type = other RNA
gagctgctgcctggctgggatt

SEQ ID NO: 19133 - RNA, 22 nt, synthetic construct
  source 1..22: mol_type = other RNA
gagctgggcatccgaaggcatc

SEQ ID NO: 19134 - RNA, 22 nt, synthetic construct
  source 1..22: mol_type = other RNA
gaggaggggctgccagactccg

SEQ ID NO: 19135 - RNA, 22 nt, synthetic construct
  source 1..22: mol_type = other RNA
gaggctagtgatgaggctgtgt

SEQ ID NO: 19136 - RNA, 22 nt, synthetic construct
  source 1..22: mol_type = other RNA
gaggctgtgtgcttctgagctg

SEQ ID NO: 19137 - RNA, 22 nt, synthetic construct
  source 1..22: mol_type = other RNA
gagggcacgaggaggggctgcc

SEQ ID NO: 19138 - RNA, 22 nt, synthetic construct
  source 1..22: mol_type = other RNA
gaggggctgccagactccggga

SEQ ID NO: 19139 - RNA, 22 nt, synthetic construct
  source 1..22: mol_type = other RNA
gagtctggcagcccctcctcgt

SEQ ID NO: 19140 - RNA, 22 nt, synthetic construct
  source 1..22: mol_type = other RNA
gatgaggctagtgatgaggctg

SEQ ID NO: 19141 - RNA, 22 nt, synthetic construct
  source 1..22: mol_type = other RNA
gatgaggctgtgtgcttctgag

SEQ ID NO: 19142 - RNA, 22 nt, synthetic construct
  source 1..22: mol_type = other RNA
gatgcccagctcagaagcacac

SEQ ID NO: 19143 - RNA, 22 nt, synthetic construct
  source 1..22: mol_type = other RNA
gatgccttcggatgcccagctc

SEQ ID NO: 19144 - RNA, 22 nt, synthetic construct
  source 1..22: mol_type = other RNA
gatgctttcccggcctttttac

SEQ ID NO: 19145 - RNA, 22 nt, synthetic construct
  source 1..22: mol_type = other RNA
gattcctacacaatgcgttgcc

SEQ ID NO: 19146 - RNA, 22 nt, synthetic construct
  source 1..22: mol_type = other RNA
gcaacgcattgtgtaggaatcc

SEQ ID NO: 19147 - RNA, 22 nt, synthetic construct
  source 1..22: mol_type = other RNA
gcacacagcctcatcactagcc

SEQ ID NO: 19148 - RNA, 22 nt, synthetic construct
  source 1..22: mol_type = other RNA
gcacgaggaggggctgccagac

SEQ ID NO: 19149 - RNA, 22 nt, synthetic construct
  source 1..22: mol_type = other RNA
gcacgctaaattaagatgcttt

SEQ ID NO: 19150 - RNA, 22 nt, synthetic construct
  source 1..22: mol_type = other RNA
gcagcagctcccggagtctggc

SEQ ID NO: 19151 - RNA, 22 nt, synthetic construct
  source 1..22: mol_type = other RNA
gcagcccctcctcgtgccctca

SEQ ID NO: 19152 - RNA, 22 nt, synthetic construct
  source 1..22: mol_type = other RNA
gcagctcccggagtctggcagc

SEQ ID NO: 19153 - RNA, 22 nt, synthetic construct
  source 1..22: mol_type = other RNA
gcagggcgtggagccaggcaac

SEQ ID NO: 19154 - RNA, 22 nt, synthetic construct
  source 1..22: mol_type = other RNA
gcatccgaaggcatccttgggg

SEQ ID NO: 19155 - RNA, 22 nt, synthetic construct
  source 1..22: mol_type = other RNA
gcatccttggggaagctgaggg

SEQ ID NO: 19156 - RNA, 22 nt, synthetic construct
  source 1..22: mol_type = other RNA
gcatgttggcttagcttggcgg

SEQ ID NO: 19157 - RNA, 22 nt, synthetic construct
  source 1..22: mol_type = other RNA
gcattgtgtaggaatcccagcc

SEQ ID NO: 19158 - RNA, 22 nt, synthetic construct
  source 1..22: mol_type = other RNA
gccagactccgggagctgctgc

SEQ ID NO: 19159 - RNA, 22 nt, synthetic construct
  source 1..22: mol_type = other RNA
gccaggcaacgcattgtgtagg

SEQ ID NO: 19160 - RNA, 22 nt, synthetic construct
  source 1..22: mol_type = other RNA
gccaggcagcagctcccggagt

SEQ ID NO: 19161 - RNA, 22 nt, synthetic construct
  source 1..22: mol_type = other RNA
gcccagctcagaagcacacagc

SEQ ID NO: 19162 - RNA, 22 nt, synthetic construct
  source 1..22: mol_type = other RNA
gccccaaggtaaaaaggccggg

SEQ ID NO: 19163 - RNA, 22 nt, synthetic construct
  source 1..22: mol_type = other RNA
gcccctcctcgtgccctcagct

SEQ ID NO: 19164 - RNA, 22 nt, synthetic construct
  source 1..22: mol_type = other RNA
gccctcagcttccccaaggatg

SEQ ID NO: 19165 - RNA, 22 nt, synthetic construct
  source 1..22: mol_type = other RNA
gccctgctgggtcctacctgtc

SEQ ID NO: 19166 - RNA, 22 nt, synthetic construct
  source 1..22: mol_type = other RNA
gccgggaaagcatcttaattta

SEQ ID NO: 19167 - RNA, 22 nt, synthetic construct
  source 1..22: mol_type = other RNA
gcctcatcactaaccagtcacc

SEQ ID NO: 19168 - RNA, 22 nt, synthetic construct
  source 1..22: mol_type = other RNA
gcctcatcactagcctcatcac

SEQ ID NO: 19169 - RNA, 22 nt, synthetic construct
  source 1..22: mol_type = other RNA
gcctggctccacgccctgctgg

SEQ ID NO: 19170 - RNA, 22 nt, synthetic construct
  source 1..22: mol_type = other RNA
gcctggctgggattcctacaca

SEQ ID NO: 19171 - RNA, 22 nt, synthetic construct
  source 1..22: mol_type = other RNA
gccttcggatgcccagctcaga

SEQ ID NO: 19172 - RNA, 22 nt, synthetic construct
  source 1..22: mol_type = other RNA
gcctttttaccttggggctctg

SEQ ID NO: 19173 - RNA, 22 nt, synthetic construct
  source 1..22: mol_type = other RNA
gcgggctcccaactggtgactg

SEQ ID NO: 19174 - RNA, 22 nt, synthetic construct
  source 1..22: mol_type = other RNA
gcgtggagccaggcaacgcatt

SEQ ID NO: 19175 - RNA, 22 nt, synthetic construct
  source 1..22: mol_type = other RNA
gcgttgcctggctccacgccct

SEQ ID NO: 19176 - RNA, 22 nt, synthetic construct
  source 1..22: mol_type = other RNA
gctaaattaagatgctttcccg

SEQ ID NO: 19177 - RNA, 22 nt, synthetic construct
  source 1..22: mol_type = other RNA
gctagtgatgaggctgtgtgct

SEQ ID NO: 19178 - RNA, 22 nt, synthetic construct
  source 1..22: mol_type = other RNA
gctcagaagcacacagcctcat

SEQ ID NO: 19179 - RNA, 22 nt, synthetic construct
  source 1..22: mol_type = other RNA
gctccacgccctgctgggtcct

SEQ ID NO: 19180 - RNA, 22 nt, synthetic construct
  source 1..22: mol_type = other RNA
gctcccaactggtgactggtta

SEQ ID NO: 19181 - RNA, 22 nt, synthetic construct
  source 1..22: mol_type = other RNA
gctcccggagtctggcagcccc

SEQ ID NO: 19182 - RNA, 22 nt, synthetic construct
  source 1..22: mol_type = other RNA
gctctgacaggtaggacccagc

SEQ ID NO: 19183 - RNA, 22 nt, synthetic construct
  source 1..22: mol_type = other RNA
gctgagactgcacgctaaatta

SEQ ID NO: 19184 - RNA, 22 nt, synthetic construct
  source 1..22: mol_type = other RNA
gctgagggcacgaggaggggct

SEQ ID NO: 19185 - RNA, 22 nt, synthetic construct
  source 1..22: mol_type = other RNA
gctgccagactccgggagctgc

SEQ ID NO: 19186 - RNA, 22 nt, synthetic construct
  source 1..22: mol_type = other RNA
gctgcctggctgggattcctac

SEQ ID NO: 19187 - RNA, 22 nt, synthetic construct
  source 1..22: mol_type = other RNA
gctgctgcctggctgggattcc

SEQ ID NO: 19188 - RNA, 22 nt, synthetic construct
  source 1..22: mol_type = other RNA
gctgggattcctacacaatgcg

SEQ ID NO: 19189 - RNA, 22 nt, synthetic construct
  source 1..22: mol_type = other RNA
gctgggcatccgaaggcatcct

SEQ ID NO: 19190 - RNA, 22 nt, synthetic construct
  source 1..22: mol_type = other RNA
gctgggtcctacctgtcagagc

SEQ ID NO: 19191 - RNA, 22 nt, synthetic construct
  source 1..22: mol_type = other RNA
gctgtgtgcttctgagctgggc

SEQ ID NO: 19192 - RNA, 22 nt, synthetic construct
  source 1..22: mol_type = other RNA
gcttagcttggcgggctcccaa

SEQ ID NO: 19193 - RNA, 22 nt, synthetic construct
  source 1..22: mol_type = other RNA
gcttccccaaggatgccttcgg

SEQ ID NO: 19194 - RNA, 22 nt, synthetic construct
  source 1..22: mol_type = other RNA
gcttctgagctgggcatccgaa

SEQ ID NO: 19195 - RNA, 22 nt, synthetic construct
  source 1..22: mol_type = other RNA
gcttggcgggctcccaactggt

SEQ ID NO: 19196 - RNA, 22 nt, synthetic construct
  source 1..22: mol_type = other RNA
gctttcccggcctttttacctt

SEQ ID NO: 19197 - RNA, 22 nt, synthetic construct
  source 1..22: mol_type = other RNA
ggaaagcatcttaatttagcgt

SEQ ID NO: 19198 - RNA, 22 nt, synthetic construct
  source 1..22: mol_type = other RNA
ggaagctgagggcacgaggagg

SEQ ID NO: 19199 - RNA, 22 nt, synthetic construct
  source 1..22: mol_type = other RNA
ggaatcccagccaggcagcagc

SEQ ID NO: 19200 - RNA, 22 nt, synthetic construct
  source 1..22: mol_type = other RNA
ggacccagcagggcgtggagcc

SEQ ID NO: 19201 - RNA, 22 nt, synthetic construct
  source 1..22: mol_type = other RNA
ggagccaggcaacgcattgtgt

SEQ ID NO: 19202 - RNA, 22 nt, synthetic construct
  source 1..22: mol_type = other RNA
ggagcccgccaagctaagccaa

SEQ ID NO: 19203 - RNA, 22 nt, synthetic construct
  source 1..22: mol_type = other RNA
ggagctgctgcctggctgggat

SEQ ID NO: 19204 - RNA, 22 nt, synthetic construct
  source 1..22: mol_type = other RNA
ggaggggctgccagactccggg

SEQ ID NO: 19205 - RNA, 22 nt, synthetic construct
  source 1..22: mol_type = other RNA
ggagtctggcagcccctcctcg

SEQ ID NO: 19206 - RNA, 22 nt, synthetic construct
  source 1..22: mol_type = other RNA
ggatgcccagctcagaagcaca

SEQ ID NO: 19207 - RNA, 22 nt, synthetic construct
  source 1..22: mol_type = other RNA
ggatgccttcggatgcccagct

SEQ ID NO: 19208 - RNA, 22 nt, synthetic construct
  source 1..22: mol_type = other RNA
ggattcctacacaatgcgttgc

SEQ ID NO: 19209 - RNA, 22 nt, synthetic construct
  source 1..22: mol_type = other RNA
ggcaacgcattgtgtaggaatc

SEQ ID NO: 19210 - RNA, 22 nt, synthetic construct
  source 1..22: mol_type = other RNA
ggcacgaggaggggctgccaga

SEQ ID NO: 19211 - RNA, 22 nt, synthetic construct
  source 1..22: mol_type = other RNA
ggcagcagctcccggagtctgg

SEQ ID NO: 19212 - RNA, 22 nt, synthetic construct
  source 1..22: mol_type = other RNA
ggcagcccctcctcgtgccctc

SEQ ID NO: 19213 - RNA, 22 nt, synthetic construct
  source 1..22: mol_type = other RNA
ggcatccgaaggcatccttggg

SEQ ID NO: 19214 - RNA, 22 nt, synthetic construct
  source 1..22: mol_type = other RNA
ggcatccttggggaagctgagg

SEQ ID NO: 19215 - RNA, 22 nt, synthetic construct
  source 1..22: mol_type = other RNA
ggccgggaaagcatcttaattt

SEQ ID NO: 19216 - RNA, 22 nt, synthetic construct
  source 1..22: mol_type = other RNA
ggcctttttaccttggggctct

SEQ ID NO: 19217 - RNA, 22 nt, synthetic construct
  source 1..22: mol_type = other RNA
ggcgggctcccaactggtgact

SEQ ID NO: 19218 - RNA, 22 nt, synthetic construct
  source 1..22: mol_type = other RNA
ggcgtggagccaggcaacgcat

SEQ ID NO: 19219 - RNA, 22 nt, synthetic construct
  source 1..22: mol_type = other RNA
ggctagtgatgaggctgtgtgc

SEQ ID NO: 19220 - RNA, 22 nt, synthetic construct
  source 1..22: mol_type = other RNA
ggctccacgccctgctgggtcc

SEQ ID NO: 19221 - RNA, 22 nt, synthetic construct
  source 1..22: mol_type = other RNA
ggctcccaactggtgactggtt

SEQ ID NO: 19222 - RNA, 22 nt, synthetic construct
  source 1..22: mol_type = other RNA
ggctctgacaggtaggacccag

SEQ ID NO: 19223 - RNA, 22 nt, synthetic construct
  source 1..22: mol_type = other RNA
ggctgccagactccgggagctg

SEQ ID NO: 19224 - RNA, 22 nt, synthetic construct
  source 1..22: mol_type = other RNA
ggctgggattcctacacaatgc

SEQ ID NO: 19225 - RNA, 22 nt, synthetic construct
  source 1..22: mol_type = other RNA
ggctgtgtgcttctgagctggg

SEQ ID NO: 19226 - RNA, 22 nt, synthetic construct
  source 1..22: mol_type = other RNA
ggcttagcttggcgggctccca

SEQ ID NO: 19227 - RNA, 22 nt, synthetic construct
  source 1..22: mol_type = other RNA
gggaaagcatcttaatttagcg

SEQ ID NO: 19228 - RNA, 22 nt, synthetic construct
  source 1..22: mol_type = other RNA
gggaagctgagggcacgaggag

SEQ ID NO: 19229 - RNA, 22 nt, synthetic construct
  source 1..22: mol_type = other RNA
gggagcccgccaagctaagcca

SEQ ID NO: 19230 - RNA, 22 nt, synthetic construct
  source 1..22: mol_type = other RNA
gggagctgctgcctggctggga

SEQ ID NO: 19231 - RNA, 22 nt, synthetic construct
  source 1..22: mol_type = other RNA
gggattcctacacaatgcgttg

SEQ ID NO: 19232 - RNA, 22 nt, synthetic construct
  source 1..22: mol_type = other RNA
gggcacgaggaggggctgccag

SEQ ID NO: 19233 - RNA, 22 nt, synthetic construct
  source 1..22: mol_type = other RNA
gggcatccgaaggcatccttgg

SEQ ID NO: 19234 - RNA, 22 nt, synthetic construct
  source 1..22: mol_type = other RNA
gggcgtggagccaggcaacgca

SEQ ID NO: 19235 - RNA, 22 nt, synthetic construct
  source 1..22: mol_type = other RNA
gggctcccaactggtgactggt

SEQ ID NO: 19236 - RNA, 22 nt, synthetic construct
  source 1..22: mol_type = other RNA
gggctctgacaggtaggaccca

SEQ ID NO: 19237 - RNA, 22 nt, synthetic construct
  source 1..22: mol_type = other RNA
gggctgccagactccgggagct

SEQ ID NO: 19238 - RNA, 22 nt, synthetic construct
  source 1..22: mol_type = other RNA
ggggaagctgagggcacgagga

SEQ ID NO: 19239 - RNA, 22 nt, synthetic construct
  source 1..22: mol_type = other RNA
ggggctctgacaggtaggaccc

SEQ ID NO: 19240 - RNA, 22 nt, synthetic construct
  source 1..22: mol_type = other RNA
ggggctgccagactccgggagc

SEQ ID NO: 19241 - RNA, 22 nt, synthetic construct
  source 1..22: mol_type = other RNA
gggtcctacctgtcagagcccc

SEQ ID NO: 19242 - RNA, 22 nt, synthetic construct
  source 1..22: mol_type = other RNA
ggtaaaaaggccgggaaagcat

SEQ ID NO: 19243 - RNA, 22 nt, synthetic construct
  source 1..22: mol_type = other RNA
ggtaggacccagcagggcgtgg

SEQ ID NO: 19244 - RNA, 22 nt, synthetic construct
  source 1..22: mol_type = other RNA
ggtcctacctgtcagagcccca

SEQ ID NO: 19245 - RNA, 22 nt, synthetic construct
  source 1..22: mol_type = other RNA
ggtgactggttagtgatgaggc

SEQ ID NO: 19246 - RNA, 22 nt, synthetic construct
  source 1..22: mol_type = other RNA
ggttagtgatgaggctagtgat

SEQ ID NO: 19247 - RNA, 22 nt, synthetic construct
  source 1..22: mol_type = other RNA
gtaaaaaggccgggaaagcatc

SEQ ID NO: 19248 - RNA, 22 nt, synthetic construct
  source 1..22: mol_type = other RNA
gtaggaatcccagccaggcagc

SEQ ID NO: 19249 - RNA, 22 nt, synthetic construct
  source 1..22: mol_type = other RNA
gtaggacccagcagggcgtgga

SEQ ID NO: 19250 - RNA, 22 nt, synthetic construct
  source 1..22: mol_type = other RNA
gtcaccagttgggagcccgcca

SEQ ID NO: 19251 - RNA, 22 nt, synthetic construct
  source 1..22: mol_type = other RNA
gtcagagccccaaggtaaaaag

SEQ ID NO: 19252 - RNA, 22 nt, synthetic construct
  source 1..22: mol_type = other RNA
gtcctacctgtcagagccccaa

SEQ ID NO: 19253 - RNA, 22 nt, synthetic construct
  source 1..22: mol_type = other RNA
gtctggcagcccctcctcgtgc

SEQ ID NO: 19254 - RNA, 22 nt, synthetic construct
  source 1..22: mol_type = other RNA
gtgactggttagtgatgaggct

SEQ ID NO: 19255 - RNA, 22 nt, synthetic construct
  source 1..22: mol_type = other RNA
gtgatgaggctagtgatgaggc

SEQ ID NO: 19256 - RNA, 22 nt, synthetic construct
  source 1..22: mol_type = other RNA
gtgatgaggctgtgtgcttctg

SEQ ID NO: 19257 - RNA, 22 nt, synthetic construct
  source 1..22: mol_type = other RNA
gtgccctcagcttccccaagga

SEQ ID NO: 19258 - RNA, 22 nt, synthetic construct
  source 1..22: mol_type = other RNA
gtgcttctgagctgggcatccg

SEQ ID NO: 19259 - RNA, 22 nt, synthetic construct
  source 1..22: mol_type = other RNA
gtggagccaggcaacgcattgt

SEQ ID NO: 19260 - RNA, 22 nt, synthetic construct
  source 1..22: mol_type = other RNA
gtgtaggaatcccagccaggca

SEQ ID NO: 19261 - RNA, 22 nt, synthetic construct
  source 1..22: mol_type = other RNA
gtgtgcttctgagctgggcatc

SEQ ID NO: 19262 - RNA, 22 nt, synthetic construct
  source 1..22: mol_type = other RNA
gttagtgatgaggctagtgatg

SEQ ID NO: 19263 - RNA, 22 nt, synthetic construct
  source 1..22: mol_type = other RNA
gttgcctggctccacgccctgc

SEQ ID NO: 19264 - RNA, 22 nt, synthetic construct
  source 1..22: mol_type = other RNA
gttggcttagcttggcgggctc

SEQ ID NO: 19265 - RNA, 22 nt, synthetic construct
  source 1..22: mol_type = other RNA
gttgggagcccgccaagctaag

SEQ ID NO: 19266 - RNA, 22 nt, synthetic construct
  source 1..22: mol_type = other RNA
taaaaaggccgggaaagcatct

SEQ ID NO: 19267 - RNA, 22 nt, synthetic construct
  source 1..22: mol_type = other RNA
taaattaagatgctttcccggc

SEQ ID NO: 19268 - RNA, 22 nt, synthetic construct
  source 1..22: mol_type = other RNA
taaccagtcaccagttgggagc

SEQ ID NO: 19269 - RNA, 22 nt, synthetic construct
  source 1..22: mol_type = other RNA
taagatgctttcccggcctttt

SEQ ID NO: 19270 - RNA, 22 nt, synthetic construct
  source 1..22: mol_type = other RNA
tacacaatgcgttgcctggctc

SEQ ID NO: 19271 - RNA, 22 nt, synthetic construct
  source 1..22: mol_type = other RNA
tacctgtcagagccccaaggta

SEQ ID NO: 19272 - RNA, 22 nt, synthetic construct
  source 1..22: mol_type = other RNA
taccttggggctctgacaggta

SEQ ID NO: 19273 - RNA, 22 nt, synthetic construct
  source 1..22: mol_type = other RNA
tagcctcatcactaaccagtca

SEQ ID NO: 19274 - RNA, 22 nt, synthetic construct
  source 1..22: mol_type = other RNA
tagcttggcgggctcccaactg

SEQ ID NO: 19275 - RNA, 22 nt, synthetic construct
  source 1..22: mol_type = other RNA
taggaatcccagccaggcagca

SEQ ID NO: 19276 - RNA, 22 nt, synthetic construct
  source 1..22: mol_type = other RNA
taggacccagcagggcgtggag

SEQ ID NO: 19277 - RNA, 22 nt, synthetic construct
  source 1..22: mol_type = other RNA
tagtgatgaggctagtgatgag

SEQ ID NO: 19278 - RNA, 22 nt, synthetic construct
  source 1..22: mol_type = other RNA
tagtgatgaggctgtgtgcttc

SEQ ID NO: 19279 - RNA, 22 nt, synthetic construct
  source 1..22: mol_type = other RNA
tcaccagttgggagcccgccaa

SEQ ID NO: 19280 - RNA, 22 nt, synthetic construct
  source 1..22: mol_type = other RNA
tcactaaccagtcaccagttgg

SEQ ID NO: 19281 - RNA, 22 nt, synthetic construct
  source 1..22: mol_type = other RNA
tcactagcctcatcactaacca

SEQ ID NO: 19282 - RNA, 22 nt, synthetic construct
  source 1..22: mol_type = other RNA
tcagaagcacacagcctcatca

SEQ ID NO: 19283 - RNA, 22 nt, synthetic construct
  source 1..22: mol_type = other RNA
tcagagccccaaggtaaaaagg

SEQ ID NO: 19284 - RNA, 22 nt, synthetic construct
  source 1..22: mol_type = other RNA
tcagcttccccaaggatgcctt

SEQ ID NO: 19285 - RNA, 22 nt, synthetic construct
  source 1..22: mol_type = other RNA
tcatcactaaccagtcaccagt

SEQ ID NO: 19286 - RNA, 22 nt, synthetic construct
  source 1..22: mol_type = other RNA
tcatcactagcctcatcactaa

SEQ ID NO: 19287 - RNA, 22 nt, synthetic construct
  source 1..22: mol_type = other RNA
tccacgccctgctgggtcctac

SEQ ID NO: 19288 - RNA, 22 nt, synthetic construct
  source 1..22: mol_type = other RNA
tcccaactggtgactggttagt

SEQ ID NO: 19289 - RNA, 22 nt, synthetic construct
  source 1..22: mol_type = other RNA
tcccagccaggcagcagctccc

SEQ ID NO: 19290 - RNA, 22 nt, synthetic construct
  source 1..22: mol_type = other RNA
tccccaaggatgccttcggatg

SEQ ID NO: 19291 - RNA, 22 nt, synthetic construct
  source 1..22: mol_type = other RNA
tcccggagtctggcagcccctc

SEQ ID NO: 19292 - RNA, 22 nt, synthetic construct
  source 1..22: mol_type = other RNA
tcccggcctttttaccttgggg

SEQ ID NO: 19293 - RNA, 22 nt, synthetic construct
  source 1..22: mol_type = other RNA
tccgaaggcatccttggggaag

SEQ ID NO: 19294 - RNA, 22 nt, synthetic construct
  source 1..22: mol_type = other RNA
tccgggagctgctgcctggctg

SEQ ID NO: 19295 - RNA, 22 nt, synthetic construct
  source 1..22: mol_type = other RNA
tcctacacaatgcgttgcctgg

SEQ ID NO: 19296 - RNA, 22 nt, synthetic construct
  source 1..22: mol_type = other RNA
tcctacctgtcagagccccaag

SEQ ID NO: 19297 - RNA, 22 nt, synthetic construct
  source 1..22: mol_type = other RNA
tcctcgtgccctcagcttcccc

SEQ ID NO: 19298 - RNA, 22 nt, synthetic construct
  source 1..22: mol_type = other RNA
tccttggggaagctgagggcac

SEQ ID NO: 19299 - RNA, 22 nt, synthetic construct
  source 1..22: mol_type = other RNA
tcggatgcccagctcagaagca

SEQ ID NO: 19300 - RNA, 22 nt, synthetic construct
  source 1..22: mol_type = other RNA
tcgtgccctcagcttccccaag

SEQ ID NO: 19301 - RNA, 22 nt, synthetic construct
  source 1..22: mol_type = other RNA
tctgacaggtaggacccagcag

SEQ ID NO: 19302 - RNA, 22 nt, synthetic construct
  source 1..22: mol_type = other RNA
tctgagctgggcatccgaaggc

SEQ ID NO: 19303 - RNA, 22 nt, synthetic construct
  source 1..22: mol_type = other RNA
tctggcagcccctcctcgtgcc

SEQ ID NO: 19304 - RNA, 22 nt, synthetic construct
  source 1..22: mol_type = other RNA
tgacaggtaggacccagcaggg

SEQ ID NO: 19305 - RNA, 22 nt, synthetic construct
  source 1..22: mol_type = other RNA
tgactggttagtgatgaggcta

SEQ ID NO: 19306 - RNA, 22 nt, synthetic construct
  source 1..22: mol_type = other RNA
tgagactgcacgctaaattaag

SEQ ID NO: 19307 - RNA, 22 nt, synthetic construct
  source 1..22: mol_type = other RNA
tgagctgggcatccgaaggcat

SEQ ID NO: 19308 - RNA, 22 nt, synthetic construct
  source 1..22: mol_type = other RNA
tgaggctagtgatgaggctgtg

SEQ ID NO: 19309 - RNA, 22 nt, synthetic construct
  source 1..22: mol_type = other RNA
tgaggctgtgtgcttctgagct

SEQ ID NO: 19310 - RNA, 22 nt, synthetic construct
  source 1..22: mol_type = other RNA
tgagggcacgaggaggggctgc

SEQ ID NO: 19311 - RNA, 22 nt, synthetic construct
  source 1..22: mol_type = other RNA
tgatgaggctagtgatgaggct

SEQ ID NO: 19312 - RNA, 22 nt, synthetic construct
  source 1..22: mol_type = other RNA
tgatgaggctgtgtgcttctga

SEQ ID NO: 19313 - RNA, 22 nt, synthetic construct
  source 1..22: mol_type = other RNA
tgcacgctaaattaagatgctt

SEQ ID NO: 19314 - RNA, 22 nt, synthetic construct
  source 1..22: mol_type = other RNA
tgcatgttggcttagcttggcg

SEQ ID NO: 19315 - RNA, 22 nt, synthetic construct
  source 1..22: mol_type = other RNA
tgccagactccgggagctgctg

SEQ ID NO: 19316 - RNA, 22 nt, synthetic construct
  source 1..22: mol_type = other RNA
tgcccagctcagaagcacacag

SEQ ID NO: 19317 - RNA, 22 nt, synthetic construct
  source 1..22: mol_type = other RNA
tgccctcagcttccccaaggat

SEQ ID NO: 19318 - RNA, 22 nt, synthetic construct
  source 1..22: mol_type = other RNA
tgcctggctccacgccctgctg

SEQ ID NO: 19319 - RNA, 22 nt, synthetic construct
  source 1..22: mol_type = other RNA
tgcctggctgggattcctacac

SEQ ID NO: 19320 - RNA, 22 nt, synthetic construct
  source 1..22: mol_type = other RNA
tgccttcggatgcccagctcag

SEQ ID NO: 19321 - RNA, 22 nt, synthetic construct
  source 1..22: mol_type = other RNA
tgcgttgcctggctccacgccc

SEQ ID NO: 19322 - RNA, 22 nt, synthetic construct
  source 1..22: mol_type = other RNA
tgctgcctggctgggattccta

SEQ ID NO: 19323 - RNA, 22 nt, synthetic construct
  source 1..22: mol_type = other RNA
tgctgggtcctacctgtcagag

SEQ ID NO: 19324 - RNA, 22 nt, synthetic construct
  source 1..22: mol_type = other RNA
tgcttctgagctgggcatccga

SEQ ID NO: 19325 - RNA, 22 nt, synthetic construct
  source 1..22: mol_type = other RNA
tgctttcccggcctttttacct

SEQ ID NO: 19326 - RNA, 22 nt, synthetic construct
  source 1..22: mol_type = other RNA
tggagccaggcaacgcattgtg

SEQ ID NO: 19327 - RNA, 22 nt, synthetic construct
  source 1..22: mol_type = other RNA
tggcagcccctcctcgtgccct

SEQ ID NO: 19328 - RNA, 22 nt, synthetic construct
  source 1..22: mol_type = other RNA
tggcgggctcccaactggtgac

SEQ ID NO: 19329 - RNA, 22 nt, synthetic construct
  source 1..22: mol_type = other RNA
tggctccacgccctgctgggtc

SEQ ID NO: 19330 - RNA, 22 nt, synthetic construct
  source 1..22: mol_type = other RNA
tggctgggattcctacacaatg

SEQ ID NO: 19331 - RNA, 22 nt, synthetic construct
  source 1..22: mol_type = other RNA
tggcttagcttggcgggctccc

SEQ ID NO: 19332 - RNA, 22 nt, synthetic construct
  source 1..22: mol_type = other RNA
tgggagcccgccaagctaagcc

SEQ ID NO: 19333 - RNA, 22 nt, synthetic construct
  source 1..22: mol_type = other RNA
tgggattcctacacaatgcgtt

SEQ ID NO: 19334 - RNA, 22 nt, synthetic construct
  source 1..22: mol_type = other RNA
tgggcatccgaaggcatccttg

SEQ ID NO: 19335 - RNA, 22 nt, synthetic construct
  source 1..22: mol_type = other RNA
tggggaagctgagggcacgagg

SEQ ID NO: 19336 - RNA, 22 nt, synthetic construct
  source 1..22: mol_type = other RNA
tggggctctgacaggtaggacc

SEQ ID NO: 19337 - RNA, 22 nt, synthetic construct
  source 1..22: mol_type = other RNA
tgggtcctacctgtcagagccc

SEQ ID NO: 19338 - RNA, 22 nt, synthetic construct
  source 1..22: mol_type = other RNA
tggtgactggttagtgatgagg

SEQ ID NO: 19339 - RNA, 22 nt, synthetic construct
  source 1..22: mol_type = other RNA
tggttagtgatgaggctagtga

SEQ ID NO: 19340 - RNA, 22 nt, synthetic construct
  source 1..22: mol_type = other RNA
tgtaggaatcccagccaggcag

SEQ ID NO: 19341 - RNA, 22 nt, synthetic construct
  source 1..22: mol_type = other RNA
tgtcagagccccaaggtaaaaa

SEQ ID NO: 19342 - RNA, 22 nt, synthetic construct
  source 1..22: mol_type = other RNA
tgtgcttctgagctgggcatcc

SEQ ID NO: 19343 - RNA, 22 nt, synthetic construct
  source 1..22: mol_type = other RNA
tgtgtaggaatcccagccaggc

SEQ ID NO: 19344 - RNA, 22 nt, synthetic construct
  source 1..22: mol_type = other RNA
tgtgtgcttctgagctgggcat

SEQ ID NO: 19345 - RNA, 22 nt, synthetic construct
  source 1..22: mol_type = other RNA
tgttggcttagcttggcgggct

SEQ ID NO: 19346 - RNA, 22 nt, synthetic construct
  source 1..22: mol_type = other RNA
ttaagatgctttcccggccttt

SEQ ID NO: 19347 - RNA, 22 nt, synthetic construct
  source 1..22: mol_type = other RNA
ttaccttggggctctgacaggt

SEQ ID NO: 19348 - RNA, 22 nt, synthetic construct
  source 1..22: mol_type = other RNA
ttagcttggcgggctcccaact

SEQ ID NO: 19349 - RNA, 22 nt, synthetic construct
  source 1..22: mol_type = other RNA
ttagtgatgaggctagtgatga

SEQ ID NO: 19350 - RNA, 22 nt, synthetic construct
  source 1..22: mol_type = other RNA
ttccccaaggatgccttcggat

SEQ ID NO: 19351 - RNA, 22 nt, synthetic construct
  source 1..22: mol_type = other RNA
ttcccggcctttttaccttggg

SEQ ID NO: 19352 - RNA, 22 nt, synthetic construct
  source 1..22: mol_type = other RNA
ttcctacacaatgcgttgcctg

SEQ ID NO: 19353 - RNA, 22 nt, synthetic construct
  source 1..22: mol_type = other RNA
ttcggatgcccagctcagaagc

SEQ ID NO: 19354 - RNA, 22 nt, synthetic construct
  source 1..22: mol_type = other RNA
ttctgagctgggcatccgaagg

SEQ ID NO: 19355 - RNA, 22 nt, synthetic construct
  source 1..22: mol_type = other RNA
ttgcatgttggcttagcttggc

SEQ ID NO: 19356 - RNA, 22 nt, synthetic construct
  source 1..22: mol_type = other RNA
ttgcctggctccacgccctgct

SEQ ID NO: 19357 - RNA, 22 nt, synthetic construct
  source 1..22: mol_type = other RNA
ttggcgggctcccaactggtga

SEQ ID NO: 19358 - RNA, 22 nt, synthetic construct
  source 1..22: mol_type = other RNA
ttggcttagcttggcgggctcc

SEQ ID NO: 19359 - RNA, 22 nt, synthetic construct
  source 1..22: mol_type = other RNA
ttgggagcccgccaagctaagc

SEQ ID NO: 19360 - RNA, 22 nt, synthetic construct
  source 1..22: mol_type = other RNA
ttggggaagctgagggcacgag

SEQ ID NO: 19361 - RNA, 22 nt, synthetic construct
  source 1..22: mol_type = other RNA
ttggggctctgacaggtaggac

SEQ ID NO: 19362 - RNA, 22 nt, synthetic construct
  source 1..22: mol_type = other RNA
ttgtgtaggaatcccagccagg

SEQ ID NO: 19363 - RNA, 22 nt, synthetic construct
  source 1..22: mol_type = other RNA
tttaccttggggctctgacagg

SEQ ID NO: 19364 - RNA, 22 nt, synthetic construct
  source 1..22: mol_type = other RNA
tttcccggcctttttaccttgg

SEQ ID NO: 19365 - RNA, 22 nt, synthetic construct
  source 1..22: mol_type = other RNA
tttgcatgttggcttagcttgg

SEQ ID NO: 19366 - RNA, 22 nt, synthetic construct
  source 1..22: mol_type = other RNA
ttttaccttggggctctgacag

SEQ ID NO: 19367 - RNA, 22 nt, synthetic construct
  source 1..22: mol_type = other RNA
tttttaccttggggctctgaca

SEQ ID NO: 19368 - RNA, 20 nt, synthetic construct
  source 1..20: mol_type = other RNA
aaaaaatagcgaggtgttgt

SEQ ID NO: 19369 - RNA, 20 nt, synthetic construct
  source 1..20: mol_type = other RNA
aaaaaatgtctgtcactaaa

SEQ ID NO: 19370 - RNA, 20 nt, synthetic construct
  source 1..20: mol_type = other RNA
aaaaaattgtcccagtagtg

SEQ ID NO: 19371 - RNA, 20 nt, synthetic construct
  source 1..20: mol_type = other RNA
aaaaacactaactgccaaag

SEQ ID NO: 19372 - RNA, 20 nt, synthetic construct
  source 1..20: mol_type = other RNA
aaaaactgaaaagcaaattg

SEQ ID NO: 19373 - RNA, 20 nt, synthetic construct
  source 1..20: mol_type = other RNA
aaaaagagattaacaactgt

SEQ ID NO: 19374 - RNA, 20 nt, synthetic construct
  source 1..20: mol_type = other RNA
aaaaaggggagagttgaggt

SEQ ID NO: 19375 - RNA, 20 nt, synthetic construct
  source 1..20: mol_type = other RNA
aaaaagtagttttacagatg

SEQ ID NO: 19376 - RNA, 20 nt, synthetic construct
  source 1..20: mol_type = other RNA
aaaaatagcgaggtgttgtg

SEQ ID NO: 19377 - RNA, 20 nt, synthetic construct
  source 1..20: mol_type = other RNA
aaaaatgtctgtcactaaag

SEQ ID NO: 19378 - RNA, 20 nt, synthetic construct
  source 1..20: mol_type = other RNA
aaaaattgtcccagtagtgt

SEQ ID NO: 19379 - RNA, 20 nt, synthetic construct
  source 1..20: mol_type = other RNA
aaaacaccagccttgtactc

SEQ ID NO: 19380 - RNA, 20 nt, synthetic construct
  source 1..20: mol_type = other RNA
aaaacactaactgccaaagt

SEQ ID NO: 19381 - RNA, 20 nt, synthetic construct
  source 1..20: mol_type = other RNA
aaaacagggataatagtagc

SEQ ID NO: 19382 - RNA, 20 nt, synthetic construct
  source 1..20: mol_type = other RNA
aaaactagtgcatttcatct

SEQ ID NO: 19383 - RNA, 20 nt, synthetic construct
  source 1..20: mol_type = other RNA
aaaactgaaaagcaaattgc

SEQ ID NO: 19384 - RNA, 20 nt, synthetic construct
  source 1..20: mol_type = other RNA
aaaagagattaacaactgtc

SEQ ID NO: 19385 - RNA, 20 nt, synthetic construct
  source 1..20: mol_type = other RNA
aaaagcaaattgcttgctca

SEQ ID NO: 19386 - RNA, 20 nt, synthetic construct
  source 1..20: mol_type = other RNA
aaaagctgatctgggattgc

SEQ ID NO: 19387 - RNA, 20 nt, synthetic construct
  source 1..20: mol_type = other RNA
aaaaggggagagttgaggtc

SEQ ID NO: 19388 - RNA, 20 nt, synthetic construct
  source 1..20: mol_type = other RNA
aaaagtagttttacagatga

SEQ ID NO: 19389 - RNA, 20 nt, synthetic construct
  source 1..20: mol_type = other RNA
aaaagttaatgactttggca

SEQ ID NO: 19390 - RNA, 20 nt, synthetic construct
  source 1..20: mol_type = other RNA
aaaatagcgaggtgttgtgg

SEQ ID NO: 19391 - RNA, 20 nt, synthetic construct
  source 1..20: mol_type = other RNA
aaaatatgtccaactgcaaa

SEQ ID NO: 19392 - RNA, 20 nt, synthetic construct
  source 1..20: mol_type = other RNA
aaaatcatcatcgcttggca

SEQ ID NO: 19393 - RNA, 20 nt, synthetic construct
  source 1..20: mol_type = other RNA
aaaatgggttcattatgcac

SEQ ID NO: 19394 - RNA, 20 nt, synthetic construct
  source 1..20: mol_type = other RNA
aaaatgtctgtcactaaaga

SEQ ID NO: 19395 - RNA, 20 nt, synthetic construct
  source 1..20: mol_type = other RNA
aaaattgtcccagtagtgtc

SEQ ID NO: 19396 - RNA, 20 nt, synthetic construct
  source 1..20: mol_type = other RNA
aaaattgttacttacatgct

SEQ ID NO: 19397 - RNA, 20 nt, synthetic construct
  source 1..20: mol_type = other RNA
aaacaccagccttgtactct

SEQ ID NO: 19398 - RNA, 20 nt, synthetic construct
  source 1..20: mol_type = other RNA
aaacactaactgccaaagtc

SEQ ID NO: 19399 - RNA, 20 nt, synthetic construct
  source 1..20: mol_type = other RNA
aaacagggataatagtagca

SEQ ID NO: 19400 - RNA, 20 nt, synthetic construct
  source 1..20: mol_type = other RNA
aaacataagatataccagca

SEQ ID NO: 19401 - RNA, 20 nt, synthetic construct
  source 1..20: mol_type = other RNA
aaaccaaaatatgtccaact

SEQ ID NO: 19402 - RNA, 20 nt, synthetic construct
  source 1..20: mol_type = other RNA
aaaccgaggcttaggagatg

SEQ ID NO: 19403 - RNA, 20 nt, synthetic construct
  source 1..20: mol_type = other RNA
aaactagtgcatttcatctt

SEQ ID NO: 19404 - RNA, 20 nt, synthetic construct
  source 1..20: mol_type = other RNA
aaactgaaaagcaaattgct

SEQ ID NO: 19405 - RNA, 20 nt, synthetic construct
  source 1..20: mol_type = other RNA
aaactgaactttctcctcta

SEQ ID NO: 19406 - RNA, 20 nt, synthetic construct
  source 1..20: mol_type = other RNA
aaactgcaaattataaaggg

SEQ ID NO: 19407 - RNA, 20 nt, synthetic construct
  source 1..20: mol_type = other RNA
aaactgtctctcaatttggg

SEQ ID NO: 19408 - RNA, 20 nt, synthetic construct
  source 1..20: mol_type = other RNA
aaagaatacaggccaaggcc

SEQ ID NO: 19409 - RNA, 20 nt, synthetic construct
  source 1..20: mol_type = other RNA
aaagacagactgaagagctg

SEQ ID NO: 19410 - RNA, 20 nt, synthetic construct
  source 1..20: mol_type = other RNA
aaagagaaaatcatcatcgc

SEQ ID NO: 19411 - RNA, 20 nt, synthetic construct
  source 1..20: mol_type = other RNA
aaagagattaacaactgtcg

SEQ ID NO: 19412 - RNA, 20 nt, synthetic construct
  source 1..20: mol_type = other RNA
aaagcaaattgcttgctcac

SEQ ID NO: 19413 - RNA, 20 nt, synthetic construct
  source 1..20: mol_type = other RNA
aaagcatgtaagtaacaatt

SEQ ID NO: 19414 - RNA, 20 nt, synthetic construct
  source 1..20: mol_type = other RNA
aaagccagctaaagtcacag

SEQ ID NO: 19415 - RNA, 20 nt, synthetic construct
  source 1..20: mol_type = other RNA
aaagctgatctgggattgca

SEQ ID NO: 19416 - RNA, 20 nt, synthetic construct
  source 1..20: mol_type = other RNA
aaagggaataatagtaactt

SEQ ID NO: 19417 - RNA, 20 nt, synthetic construct
  source 1..20: mol_type = other RNA
aaaggggacagatggcatgt

SEQ ID NO: 19418 - RNA, 20 nt, synthetic construct
  source 1..20: mol_type = other RNA
aaaggggagagttgaggtcc

SEQ ID NO: 19419 - RNA, 20 nt, synthetic construct
  source 1..20: mol_type = other RNA
aaaggtgcataatgaaccca

SEQ ID NO: 19420 - RNA, 20 nt, synthetic construct
  source 1..20: mol_type = other RNA
aaagtagttttacagatgaa

SEQ ID NO: 19421 - RNA, 20 nt, synthetic construct
  source 1..20: mol_type = other RNA
aaagtcacagggccttggcc

SEQ ID NO: 19422 - RNA, 20 nt, synthetic construct
  source 1..20: mol_type = other RNA
aaagtcattaacttttggcc

SEQ ID NO: 19423 - RNA, 20 nt, synthetic construct
  source 1..20: mol_type = other RNA
aaagttaacatcgccagaaa

SEQ ID NO: 19424 - RNA, 20 nt, synthetic construct
  source 1..20: mol_type = other RNA
aaagttaatgactttggcag

SEQ ID NO: 19425 - RNA, 20 nt, synthetic construct
  source 1..20: mol_type = other RNA
aaagttcagtttggtgctgg

SEQ ID NO: 19426 - RNA, 20 nt, synthetic construct
  source 1..20: mol_type = other RNA
aaagttgtagatgagattgg

SEQ ID NO: 19427 - RNA, 20 nt, synthetic construct
  source 1..20: mol_type = other RNA
aaataatcataaggattgac

SEQ ID NO: 19428 - RNA, 20 nt, synthetic construct
  source 1..20: mol_type = other RNA
aaataccaaagccagctaaa

SEQ ID NO: 19429 - RNA, 20 nt, synthetic construct
  source 1..20: mol_type = other RNA
aaatagcgaggtgttgtggt

SEQ ID NO: 19430 - RNA, 20 nt, synthetic construct
  source 1..20: mol_type = other RNA
aaatatgtccaactgcaaag

SEQ ID NO: 19431 - RNA, 20 nt, synthetic construct
  source 1..20: mol_type = other RNA
aaatcatcatcgcttggcat

SEQ ID NO: 19432 - RNA, 20 nt, synthetic construct
  source 1..20: mol_type = other RNA
aaatcccagctccaccaaca

SEQ ID NO: 19433 - RNA, 20 nt, synthetic construct
  source 1..20: mol_type = other RNA
aaatgcactagttttagtgc

SEQ ID NO: 19434 - RNA, 20 nt, synthetic construct
  source 1..20: mol_type = other RNA
aaatgggttcattatgcacc

SEQ ID NO: 19435 - RNA, 20 nt, synthetic construct
  source 1..20: mol_type = other RNA
aaatgtctgtcactaaagag

SEQ ID NO: 19436 - RNA, 20 nt, synthetic construct
  source 1..20: mol_type = other RNA
aaattgagagacagtttaca

SEQ ID NO: 19437 - RNA, 20 nt, synthetic construct
  source 1..20: mol_type = other RNA
aaattgcttgctcactatat

SEQ ID NO: 19438 - RNA, 20 nt, synthetic construct
  source 1..20: mol_type = other RNA
aaattgtcccagtagtgtcc

SEQ ID NO: 19439 - RNA, 20 nt, synthetic construct
  source 1..20: mol_type = other RNA
aaattgttacttacatgctt

SEQ ID NO: 19440 - RNA, 20 nt, synthetic construct
  source 1..20: mol_type = other RNA
aaatttgcataaccacagta

SEQ ID NO: 19441 - RNA, 20 nt, synthetic construct
  source 1..20: mol_type = other RNA
aaatttgtccttgttctaag

SEQ ID NO: 19442 - RNA, 20 nt, synthetic construct
  source 1..20: mol_type = other RNA
aaattttatagaggctgagg

SEQ ID NO: 19443 - RNA, 20 nt, synthetic construct
  source 1..20: mol_type = other RNA
aacaaagaatacaggccaag

SEQ ID NO: 19444 - RNA, 20 nt, synthetic construct
  source 1..20: mol_type = other RNA
aacaactgtcgggtgataaa

SEQ ID NO: 19445 - RNA, 20 nt, synthetic construct
  source 1..20: mol_type = other RNA
aacaaggaatcacatatagt

SEQ ID NO: 19446 - RNA, 20 nt, synthetic construct
  source 1..20: mol_type = other RNA
aacaaggacaaatttgcata

SEQ ID NO: 19447 - RNA, 20 nt, synthetic construct
  source 1..20: mol_type = other RNA
aacaataaaaaggggagagt

SEQ ID NO: 19448 - RNA, 20 nt, synthetic construct
  source 1..20: mol_type = other RNA
aacaattttagagggtatac

SEQ ID NO: 19449 - RNA, 20 nt, synthetic construct
  source 1..20: mol_type = other RNA
aacaccagccttgtactctg

SEQ ID NO: 19450 - RNA, 20 nt, synthetic construct
  source 1..20: mol_type = other RNA
aacacctcagacttcatctc

SEQ ID NO: 19451 - RNA, 20 nt, synthetic construct
  source 1..20: mol_type = other RNA
aacactaactgccaaagtca

SEQ ID NO: 19452 - RNA, 20 nt, synthetic construct
  source 1..20: mol_type = other RNA
aacagggataatagtagcac

SEQ ID NO: 19453 - RNA, 20 nt, synthetic construct
  source 1..20: mol_type = other RNA
aacataagatataccagcac

SEQ ID NO: 19454 - RNA, 20 nt, synthetic construct
  source 1..20: mol_type = other RNA
aacatcgccagaaaggggac

SEQ ID NO: 19455 - RNA, 20 nt, synthetic construct
  source 1..20: mol_type = other RNA
aaccaaaatatgtccaactg

SEQ ID NO: 19456 - RNA, 20 nt, synthetic construct
  source 1..20: mol_type = other RNA
aaccacagtagggttgtcaa

SEQ ID NO: 19457 - RNA, 20 nt, synthetic construct
  source 1..20: mol_type = other RNA
aacccattttcaaatgctta

SEQ ID NO: 19458 - RNA, 20 nt, synthetic construct
  source 1..20: mol_type = other RNA
aaccctactgtggttatgca

SEQ ID NO: 19459 - RNA, 20 nt, synthetic construct
  source 1..20: mol_type = other RNA
aaccgaggcttaggagatga

SEQ ID NO: 19460 - RNA, 20 nt, synthetic construct
  source 1..20: mol_type = other RNA
aactagtgcatttcatctta

SEQ ID NO: 19461 - RNA, 20 nt, synthetic construct
  source 1..20: mol_type = other RNA
aactcactgcagccttgaac

SEQ ID NO: 19462 - RNA, 20 nt, synthetic construct
  source 1..20: mol_type = other RNA
aactctcccctttttattgt

SEQ ID NO: 19463 - RNA, 20 nt, synthetic construct
  source 1..20: mol_type = other RNA
aactgaaaagcaaattgctt

SEQ ID NO: 19464 - RNA, 20 nt, synthetic construct
  source 1..20: mol_type = other RNA
aactgaactttctcctctaa

SEQ ID NO: 19465 - RNA, 20 nt, synthetic construct
  source 1..20: mol_type = other RNA
aactgatcaaagttaacatc

SEQ ID NO: 19466 - RNA, 20 nt, synthetic construct
  source 1..20: mol_type = other RNA
aactgcaaagcatgtaagta

SEQ ID NO: 19467 - RNA, 20 nt, synthetic construct
  source 1..20: mol_type = other RNA
aactgcaaattataaaggga

SEQ ID NO: 19468 - RNA, 20 nt, synthetic construct
  source 1..20: mol_type = other RNA
aactgccaaagtcattaact

SEQ ID NO: 19469 - RNA, 20 nt, synthetic construct
  source 1..20: mol_type = other RNA
aactgggactatgggcgtgt

SEQ ID NO: 19470 - RNA, 20 nt, synthetic construct
  source 1..20: mol_type = other RNA
aactgtcgggtgataaacat

SEQ ID NO: 19471 - RNA, 20 nt, synthetic construct
  source 1..20: mol_type = other RNA
aactgtctctcaatttgggt

SEQ ID NO: 19472 - RNA, 20 nt, synthetic construct
  source 1..20: mol_type = other RNA
aacttgacagtggagagacc

SEQ ID NO: 19473 - RNA, 20 nt, synthetic construct
  source 1..20: mol_type = other RNA
aactttctcctctaaataat

SEQ ID NO: 19474 - RNA, 20 nt, synthetic construct
  source 1..20: mol_type = other RNA
aactttgatcagttggtgaa

SEQ ID NO: 19475 - RNA, 20 nt, synthetic construct
  source 1..20: mol_type = other RNA
aacttttggccaaataccaa

SEQ ID NO: 19476 - RNA, 20 nt, synthetic construct
  source 1..20: mol_type = other RNA
aagaaggctcgagattaatg

SEQ ID NO: 19477 - RNA, 20 nt, synthetic construct
  source 1..20: mol_type = other RNA
aagaatacaggccaaggccc

SEQ ID NO: 19478 - RNA, 20 nt, synthetic construct
  source 1..20: mol_type = other RNA
aagaatgcctcatctgaatc

SEQ ID NO: 19479 - RNA, 20 nt, synthetic construct
  source 1..20: mol_type = other RNA
aagacacacactcacttctg

SEQ ID NO: 19480 - RNA, 20 nt, synthetic construct
  source 1..20: mol_type = other RNA
aagacagactgaagagctga

SEQ ID NO: 19481 - RNA, 20 nt, synthetic construct
  source 1..20: mol_type = other RNA
aagagaaaatcatcatcgct

SEQ ID NO: 19482 - RNA, 20 nt, synthetic construct
  source 1..20: mol_type = other RNA
aagagagaaagacagactga

SEQ ID NO: 19483 - RNA, 20 nt, synthetic construct
  source 1..20: mol_type = other RNA
aagagattaacaactgtcgg

SEQ ID NO: 19484 - RNA, 20 nt, synthetic construct
  source 1..20: mol_type = other RNA
aagagctgatccagactgaa

SEQ ID NO: 19485 - RNA, 20 nt, synthetic construct
  source 1..20: mol_type = other RNA
aagatataccagcaccaaac

SEQ ID NO: 19486 - RNA, 20 nt, synthetic construct
  source 1..20: mol_type = other RNA
aagatgaaatgcactagttt

SEQ ID NO: 19487 - RNA, 20 nt, synthetic construct
  source 1..20: mol_type = other RNA
aagatgcaatcccagatcag

SEQ ID NO: 19488 - RNA, 20 nt, synthetic construct
  source 1..20: mol_type = other RNA
aagatgcactgaagacacac

SEQ ID NO: 19489 - RNA, 20 nt, synthetic construct
  source 1..20: mol_type = other RNA
aagcaaattgcttgctcact

SEQ ID NO: 19490 - RNA, 20 nt, synthetic construct
  source 1..20: mol_type = other RNA
aagcaatttgcttttcagtt

SEQ ID NO: 19491 - RNA, 20 nt, synthetic construct
  source 1..20: mol_type = other RNA
aagcactaaaactagtgcat

SEQ ID NO: 19492 - RNA, 20 nt, synthetic construct
  source 1..20: mol_type = other RNA
aagcagagtacaaggctggt

SEQ ID NO: 19493 - RNA, 20 nt, synthetic construct
  source 1..20: mol_type = other RNA
aagcatgtaagtaacaattt

SEQ ID NO: 19494 - RNA, 20 nt, synthetic construct
  source 1..20: mol_type = other RNA
aagcatttgaaaatgggttc

SEQ ID NO: 19495 - RNA, 20 nt, synthetic construct
  source 1..20: mol_type = other RNA
aagccagctaaagtcacagg

SEQ ID NO: 19496 - RNA, 20 nt, synthetic construct
  source 1..20: mol_type = other RNA
aagcccttaggcaggtgcta

SEQ ID NO: 19497 - RNA, 20 nt, synthetic construct
  source 1..20: mol_type = other RNA
aagcctcggtttccttctct

SEQ ID NO: 19498 - RNA, 20 nt, synthetic construct
  source 1..20: mol_type = other RNA
aagcgatgatgattttctct

SEQ ID NO: 19499 - RNA, 20 nt, synthetic construct
  source 1..20: mol_type = other RNA
aagctgatctgggattgcat

SEQ ID NO: 19500 - RNA, 20 nt, synthetic construct
  source 1..20: mol_type = other RNA
aaggaaaccgaggcttagga

SEQ ID NO: 19501 - RNA, 20 nt, synthetic construct
  source 1..20: mol_type = other RNA
aaggaatcacatatagtgag

SEQ ID NO: 19502 - RNA, 20 nt, synthetic construct
  source 1..20: mol_type = other RNA
aaggacaaatttgcataacc

SEQ ID NO: 19503 - RNA, 20 nt, synthetic construct
  source 1..20: mol_type = other RNA
aaggatcacttgagtttgaa

SEQ ID NO: 19504 - RNA, 20 nt, synthetic construct
  source 1..20: mol_type = other RNA
aaggattgaccaaaaactga

SEQ ID NO: 19505 - RNA, 20 nt, synthetic construct
  source 1..20: mol_type = other RNA
aaggccctgtgactttagct

SEQ ID NO: 19506 - RNA, 20 nt, synthetic construct
  source 1..20: mol_type = other RNA
aaggctcgagattaatgcaa

SEQ ID NO: 19507 - RNA, 20 nt, synthetic construct
  source 1..20: mol_type = other RNA
aaggctgcagtgagttatta

SEQ ID NO: 19508 - RNA, 20 nt, synthetic construct
  source 1..20: mol_type = other RNA
aaggctggtgttttgtaaac

SEQ ID NO: 19509 - RNA, 20 nt, synthetic construct
  source 1..20: mol_type = other RNA
aagggaataatagtaacttg

SEQ ID NO: 19510 - RNA, 20 nt, synthetic construct
  source 1..20: mol_type = other RNA
aagggacactactgggacaa

SEQ ID NO: 19511 - RNA, 20 nt, synthetic construct
  source 1..20: mol_type = other RNA
aaggggacagatggcatgtg

SEQ ID NO: 19512 - RNA, 20 nt, synthetic construct
  source 1..20: mol_type = other RNA
aaggggagagttgaggtcca

SEQ ID NO: 19513 - RNA, 20 nt, synthetic construct
  source 1..20: mol_type = other RNA
aaggtgcataatgaacccat

SEQ ID NO: 19514 - RNA, 20 nt, synthetic construct
  source 1..20: mol_type = other RNA
aaggtggtgtctgccaggtc

SEQ ID NO: 19515 - RNA, 20 nt, synthetic construct
  source 1..20: mol_type = other RNA
aagtaacaaggaatcacata

SEQ ID NO: 19516 - RNA, 20 nt, synthetic construct
  source 1..20: mol_type = other RNA
aagtaacaattttagagggt

SEQ ID NO: 19517 - RNA, 20 nt, synthetic construct
  source 1..20: mol_type = other RNA
aagtagttttacagatgaag

SEQ ID NO: 19518 - RNA, 20 nt, synthetic construct
  source 1..20: mol_type = other RNA
aagtcacagggccttggcct

SEQ ID NO: 19519 - RNA, 20 nt, synthetic construct
  source 1..20: mol_type = other RNA
aagtcattaacttttggcca

SEQ ID NO: 19520 - RNA, 20 nt, synthetic construct
  source 1..20: mol_type = other RNA
aagtctgaggtgttggtgga

SEQ ID NO: 19521 - RNA, 20 nt, synthetic construct
  source 1..20: mol_type = other RNA
aagtgagtgtgtgtcttcag

SEQ ID NO: 19522 - RNA, 20 nt, synthetic construct
  source 1..20: mol_type = other RNA
aagtgatccttccacctcag

SEQ ID NO: 19523 - RNA, 20 nt, synthetic construct
  source 1..20: mol_type = other RNA
aagttaacatcgccagaaag

SEQ ID NO: 19524 - RNA, 20 nt, synthetic construct
  source 1..20: mol_type = other RNA
aagttaatgactttggcagt

SEQ ID NO: 19525 - RNA, 20 nt, synthetic construct
  source 1..20: mol_type = other RNA
aagttactattattcccttt

SEQ ID NO: 19526 - RNA, 20 nt, synthetic construct
  source 1..20: mol_type = other RNA
aagttcagtttggtgctggt

SEQ ID NO: 19527 - RNA, 20 nt, synthetic construct
  source 1..20: mol_type = other RNA
aagttgtagatgagattggt

SEQ ID NO: 19528 - RNA, 20 nt, synthetic construct
  source 1..20: mol_type = other RNA
aataaaaaggggagagttga

SEQ ID NO: 19529 - RNA, 20 nt, synthetic construct
  source 1..20: mol_type = other RNA
aataaagttgtagatgagat

SEQ ID NO: 19530 - RNA, 20 nt, synthetic construct
  source 1..20: mol_type = other RNA
aataactcactgcagccttg

SEQ ID NO: 19531 - RNA, 20 nt, synthetic construct
  source 1..20: mol_type = other RNA
aataatagtaacttgacagt

SEQ ID NO: 19532 - RNA, 20 nt, synthetic construct
  source 1..20: mol_type = other RNA
aataatcataaggattgacc

SEQ ID NO: 19533 - RNA, 20 nt, synthetic construct
  source 1..20: mol_type = other RNA
aatacaggccaaggccctgt

SEQ ID NO: 19534 - RNA, 20 nt, synthetic construct
  source 1..20: mol_type = other RNA
aataccaaagccagctaaag

SEQ ID NO: 19535 - RNA, 20 nt, synthetic construct
  source 1..20: mol_type = other RNA
aatactgaattatttaggag

SEQ ID NO: 19536 - RNA, 20 nt, synthetic construct
  source 1..20: mol_type = other RNA
aatagcgaggtgttgtggta

SEQ ID NO: 19537 - RNA, 20 nt, synthetic construct
  source 1..20: mol_type = other RNA
aatagtaacttgacagtgga

SEQ ID NO: 19538 - RNA, 20 nt, synthetic construct
  source 1..20: mol_type = other RNA
aatagtagcacctgcctaag

SEQ ID NO: 19539 - RNA, 20 nt, synthetic construct
  source 1..20: mol_type = other RNA
aatatgtcaatgtcacaaga

SEQ ID NO: 19540 - RNA, 20 nt, synthetic construct
  source 1..20: mol_type = other RNA
aatatgtccaactgcaaagc

SEQ ID NO: 19541 - RNA, 20 nt, synthetic construct
  source 1..20: mol_type = other RNA
aatattcctgccaagaatgc

SEQ ID NO: 19542 - RNA, 20 nt, synthetic construct
  source 1..20: mol_type = other RNA
aatattgcagaagtgagtgt

SEQ ID NO: 19543 - RNA, 20 nt, synthetic construct
  source 1..20: mol_type = other RNA
aatcacatatagtgagcaag

SEQ ID NO: 19544 - RNA, 20 nt, synthetic construct
  source 1..20: mol_type = other RNA
aatcagcaaatctaatattg

SEQ ID NO: 19545 - RNA, 20 nt, synthetic construct
  source 1..20: mol_type = other RNA
aatcataaggattgaccaaa

SEQ ID NO: 19546 - RNA, 20 nt, synthetic construct
  source 1..20: mol_type = other RNA
aatcatcatcgcttggcatg

SEQ ID NO: 19547 - RNA, 20 nt, synthetic construct
  source 1..20: mol_type = other RNA
aatcccagatcagcttttgc

SEQ ID NO: 19548 - RNA, 20 nt, synthetic construct
  source 1..20: mol_type = other RNA
aatcccagctccaccaacac

SEQ ID NO: 19549 - RNA, 20 nt, synthetic construct
  source 1..20: mol_type = other RNA
aatcctatgaccaatctcat

SEQ ID NO: 19550 - RNA, 20 nt, synthetic construct
  source 1..20: mol_type = other RNA
aatcctcctgcctgagcctt

SEQ ID NO: 19551 - RNA, 20 nt, synthetic construct
  source 1..20: mol_type = other RNA
aatctaatctcgagtataac

SEQ ID NO: 19552 - RNA, 20 nt, synthetic construct
  source 1..20: mol_type = other RNA
aatctcatctacaactttat

SEQ ID NO: 19553 - RNA, 20 nt, synthetic construct
  source 1..20: mol_type = other RNA
aatctcgagccttcttcagt

SEQ ID NO: 19554 - RNA, 20 nt, synthetic construct
  source 1..20: mol_type = other RNA
aatctcgagtataaccatca

SEQ ID NO: 19555 - RNA, 20 nt, synthetic construct
  source 1..20: mol_type = other RNA
aatgaacccattttcaaatg

SEQ ID NO: 19556 - RNA, 20 nt, synthetic construct
  source 1..20: mol_type = other RNA
aatgactttggcagttagtg

SEQ ID NO: 19557 - RNA, 20 nt, synthetic construct
  source 1..20: mol_type = other RNA
aatgcaaaagctgatctggg

SEQ ID NO: 19558 - RNA, 20 nt, synthetic construct
  source 1..20: mol_type = other RNA
aatgcactagttttagtgct

SEQ ID NO: 19559 - RNA, 20 nt, synthetic construct
  source 1..20: mol_type = other RNA
aatgcctcatctgaatctaa

SEQ ID NO: 19560 - RNA, 20 nt, synthetic construct
  source 1..20: mol_type = other RNA
aatgggttcattatgcacct

SEQ ID NO: 19561 - RNA, 20 nt, synthetic construct
  source 1..20: mol_type = other RNA
aatgtcacaagagagaaaga

SEQ ID NO: 19562 - RNA, 20 nt, synthetic construct
  source 1..20: mol_type = other RNA
aatgtctgtcactaaagaga

SEQ ID NO: 19563 - RNA, 20 nt, synthetic construct
  source 1..20: mol_type = other RNA
aattatttaggagtaaaggt

SEQ ID NO: 19564 - RNA, 20 nt, synthetic construct
  source 1..20: mol_type = other RNA
aattgagagacagtttacaa

SEQ ID NO: 19565 - RNA, 20 nt, synthetic construct
  source 1..20: mol_type = other RNA
aattgcttgctcactatatg

SEQ ID NO: 19566 - RNA, 20 nt, synthetic construct
  source 1..20: mol_type = other RNA
aattgtcccagtagtgtccc

SEQ ID NO: 19567 - RNA, 20 nt, synthetic construct
  source 1..20: mol_type = other RNA
aattgttacttacatgcttt

SEQ ID NO: 19568 - RNA, 20 nt, synthetic construct
  source 1..20: mol_type = other RNA
aatttgcagtttaagatgaa

SEQ ID NO: 19569 - RNA, 20 nt, synthetic construct
  source 1..20: mol_type = other RNA
aatttgcataaccacagtag

SEQ ID NO: 19570 - RNA, 20 nt, synthetic construct
  source 1..20: mol_type = other RNA
aatttgcttttcagtttttg

SEQ ID NO: 19571 - RNA, 20 nt, synthetic construct
  source 1..20: mol_type = other RNA
aatttgggtttgtctgatgg

SEQ ID NO: 19572 - RNA, 20 nt, synthetic construct
  source 1..20: mol_type = other RNA
aatttgtccttgttctaagg

SEQ ID NO: 19573 - RNA, 20 nt, synthetic construct
  source 1..20: mol_type = other RNA
aattttagagggtatacgga

SEQ ID NO: 19574 - RNA, 20 nt, synthetic construct
  source 1..20: mol_type = other RNA
aattttatagaggctgaggt

SEQ ID NO: 19575 - RNA, 20 nt, synthetic construct
  source 1..20: mol_type = other RNA
acaaaacaccagccttgtac

SEQ ID NO: 19576 - RNA, 20 nt, synthetic construct
  source 1..20: mol_type = other RNA
acaaacccaaattgagagac

SEQ ID NO: 19577 - RNA, 20 nt, synthetic construct
  source 1..20: mol_type = other RNA
acaaagaatacaggccaagg

SEQ ID NO: 19578 - RNA, 20 nt, synthetic construct
  source 1..20: mol_type = other RNA
acaaatttgcataaccacag

SEQ ID NO: 19579 - RNA, 20 nt, synthetic construct
  source 1..20: mol_type = other RNA
acaacacctcgctatttttt

SEQ ID NO: 19580 - RNA, 20 nt, synthetic construct
  source 1..20: mol_type = other RNA
acaaccctactgtggttatg

SEQ ID NO: 19581 - RNA, 20 nt, synthetic construct
  source 1..20: mol_type = other RNA
acaactgtcgggtgataaac

SEQ ID NO: 19582 - RNA, 20 nt, synthetic construct
  source 1..20: mol_type = other RNA
acaagagagaaagacagact

SEQ ID NO: 19583 - RNA, 20 nt, synthetic construct
  source 1..20: mol_type = other RNA
acaagcccttaggcaggtgc

SEQ ID NO: 19584 - RNA, 20 nt, synthetic construct
  source 1..20: mol_type = other RNA
acaaggaatcacatatagtg

SEQ ID NO: 19585 - RNA, 20 nt, synthetic construct
  source 1..20: mol_type = other RNA
acaaggacaaatttgcataa

SEQ ID NO: 19586 - RNA, 20 nt, synthetic construct
  source 1..20: mol_type = other RNA
acaaggctggtgttttgtaa

SEQ ID NO: 19587 - RNA, 20 nt, synthetic construct
  source 1..20: mol_type = other RNA
acaataaaaaggggagagtt

SEQ ID NO: 19588 - RNA, 20 nt, synthetic construct
  source 1..20: mol_type = other RNA
acaatcctatgaccaatctc

SEQ ID NO: 19589 - RNA, 20 nt, synthetic construct
  source 1..20: mol_type = other RNA
acaattttagagggtatacg

SEQ ID NO: 19590 - RNA, 20 nt, synthetic construct
  source 1..20: mol_type = other RNA
acacacactcacttctgcaa

SEQ ID NO: 19591 - RNA, 20 nt, synthetic construct
  source 1..20: mol_type = other RNA
acacactcacttctgcaata

SEQ ID NO: 19592 - RNA, 20 nt, synthetic construct
  source 1..20: mol_type = other RNA
acaccaccttcaccaactga

SEQ ID NO: 19593 - RNA, 20 nt, synthetic construct
  source 1..20: mol_type = other RNA
acaccagccttgtactctgc

SEQ ID NO: 19594 - RNA, 20 nt, synthetic construct
  source 1..20: mol_type = other RNA
acacctcagacttcatctcc

SEQ ID NO: 19595 - RNA, 20 nt, synthetic construct
  source 1..20: mol_type = other RNA
acacgcccatagtcccagtt

SEQ ID NO: 19596 - RNA, 20 nt, synthetic construct
  source 1..20: mol_type = other RNA
acactaactgccaaagtcat

SEQ ID NO: 19597 - RNA, 20 nt, synthetic construct
  source 1..20: mol_type = other RNA
acactactgggacaattttt

SEQ ID NO: 19598 - RNA, 20 nt, synthetic construct
  source 1..20: mol_type = other RNA
acactatacaatcctatgac

SEQ ID NO: 19599 - RNA, 20 nt, synthetic construct
  source 1..20: mol_type = other RNA
acactcacttctgcaatatt

SEQ ID NO: 19600 - RNA, 20 nt, synthetic construct
  source 1..20: mol_type = other RNA
acagactgaagagctgatcc

SEQ ID NO: 19601 - RNA, 20 nt, synthetic construct
  source 1..20: mol_type = other RNA
acagagaaggaaaccgaggc

SEQ ID NO: 19602 - RNA, 20 nt, synthetic construct
  source 1..20: mol_type = other RNA
acagatgaagcactaaaact

SEQ ID NO: 19603 - RNA, 20 nt, synthetic construct
  source 1..20: mol_type = other RNA
acagatggcatgtgcctctc

SEQ ID NO: 19604 - RNA, 20 nt, synthetic construct
  source 1..20: mol_type = other RNA
acaggccaaggccctgtgac

SEQ ID NO: 19605 - RNA, 20 nt, synthetic construct
  source 1..20: mol_type = other RNA
acagggataatagtagcacc

SEQ ID NO: 19606 - RNA, 20 nt, synthetic construct
  source 1..20: mol_type = other RNA
acagggccttggcctgtatt

SEQ ID NO: 19607 - RNA, 20 nt, synthetic construct
  source 1..20: mol_type = other RNA
acagtagggttgtcaaaatc

SEQ ID NO: 19608 - RNA, 20 nt, synthetic construct
  source 1..20: mol_type = other RNA
acagtggagagacctggcag

SEQ ID NO: 19609 - RNA, 20 nt, synthetic construct
  source 1..20: mol_type = other RNA
acagttgttaatctcttttt

SEQ ID NO: 19610 - RNA, 20 nt, synthetic construct
  source 1..20: mol_type = other RNA
acagtttacaaaacaccagc

SEQ ID NO: 19611 - RNA, 20 nt, synthetic construct
  source 1..20: mol_type = other RNA
acataagatataccagcacc

SEQ ID NO: 19612 - RNA, 20 nt, synthetic construct
  source 1..20: mol_type = other RNA
acatatagtgagcaagcaat

SEQ ID NO: 19613 - RNA, 20 nt, synthetic construct
  source 1..20: mol_type = other RNA
acatattaagcagagtacaa

SEQ ID NO: 19614 - RNA, 20 nt, synthetic construct
  source 1..20: mol_type = other RNA
acatattttggtttaaatcc

SEQ ID NO: 19615 - RNA, 20 nt, synthetic construct
  source 1..20: mol_type = other RNA
acatcgccagaaaggggaca

SEQ ID NO: 19616 - RNA, 20 nt, synthetic construct
  source 1..20: mol_type = other RNA
acatgccatctgtccccttt

SEQ ID NO: 19617 - RNA, 20 nt, synthetic construct
  source 1..20: mol_type = other RNA
acatgctttgcagttggaca

SEQ ID NO: 19618 - RNA, 20 nt, synthetic construct
  source 1..20: mol_type = other RNA
acattgacatattaagcaga

SEQ ID NO: 19619 - RNA, 20 nt, synthetic construct
  source 1..20: mol_type = other RNA
accaaaaactgaaaagcaaa

SEQ ID NO: 19620 - RNA, 20 nt, synthetic construct
  source 1..20: mol_type = other RNA
accaaaatatgtccaactgc

SEQ ID NO: 19621 - RNA, 20 nt, synthetic construct
  source 1..20: mol_type = other RNA
accaaactgaactttctcct

SEQ ID NO: 19622 - RNA, 20 nt, synthetic construct
  source 1..20: mol_type = other RNA
accaaagccagctaaagtca

SEQ ID NO: 19623 - RNA, 20 nt, synthetic construct
  source 1..20: mol_type = other RNA
accaacacctcagacttcat

SEQ ID NO: 19624 - RNA, 20 nt, synthetic construct
  source 1..20: mol_type = other RNA
accaactgatcaaagttaac

SEQ ID NO: 19625 - RNA, 20 nt, synthetic construct
  source 1..20: mol_type = other RNA
accaatctcatctacaactt

SEQ ID NO: 19626 - RNA, 20 nt, synthetic construct
  source 1..20: mol_type = other RNA
accacaacacctcgctattt

SEQ ID NO: 19627 - RNA, 20 nt, synthetic construct
  source 1..20: mol_type = other RNA
accacagtagggttgtcaaa

SEQ ID NO: 19628 - RNA, 20 nt, synthetic construct
  source 1..20: mol_type = other RNA
accaccttcaccaactgatc

SEQ ID NO: 19629 - RNA, 20 nt, synthetic construct
  source 1..20: mol_type = other RNA
accagcaccaaactgaactt

SEQ ID NO: 19630 - RNA, 20 nt, synthetic construct
  source 1..20: mol_type = other RNA
accagccttgtactctgctt

SEQ ID NO: 19631 - RNA, 20 nt, synthetic construct
  source 1..20: mol_type = other RNA
acccaaattgagagacagtt

SEQ ID NO: 19632 - RNA, 20 nt, synthetic construct
  source 1..20: mol_type = other RNA
acccattttcaaatgcttat

SEQ ID NO: 19633 - RNA, 20 nt, synthetic construct
  source 1..20: mol_type = other RNA
acccgacagttgttaatctc

SEQ ID NO: 19634 - RNA, 20 nt, synthetic construct
  source 1..20: mol_type = other RNA
accctaagtaacaaggaatc

SEQ ID NO: 19635 - RNA, 20 nt, synthetic construct
  source 1..20: mol_type = other RNA
accctactgtggttatgcaa

SEQ ID NO: 19636 - RNA, 20 nt, synthetic construct
  source 1..20: mol_type = other RNA
accctctaaaattgttactt

SEQ ID NO: 19637 - RNA, 20 nt, synthetic construct
  source 1..20: mol_type = other RNA
accctgtctcaaaacgaaaa

SEQ ID NO: 19638 - RNA, 20 nt, synthetic construct
  source 1..20: mol_type = other RNA
accgaggcttaggagatgaa

SEQ ID NO: 19639 - RNA, 20 nt, synthetic construct
  source 1..20: mol_type = other RNA
acctcaactctccccttttt

SEQ ID NO: 19640 - RNA, 20 nt, synthetic construct
  source 1..20: mol_type = other RNA
acctcagacttcatctccta

SEQ ID NO: 19641 - RNA, 20 nt, synthetic construct
  source 1..20: mol_type = other RNA
acctcagcctctataaaatt

SEQ ID NO: 19642 - RNA, 20 nt, synthetic construct
  source 1..20: mol_type = other RNA
acctccgtataccctctaaa

SEQ ID NO: 19643 - RNA, 20 nt, synthetic construct
  source 1..20: mol_type = other RNA
acctggcagacaccaccttc

SEQ ID NO: 19644 - RNA, 20 nt, synthetic construct
  source 1..20: mol_type = other RNA
accttcaccaactgatcaaa

SEQ ID NO: 19645 - RNA, 20 nt, synthetic construct
  source 1..20: mol_type = other RNA
acctttactcctaaataatt

SEQ ID NO: 19646 - RNA, 20 nt, synthetic construct
  source 1..20: mol_type = other RNA
acgcccatagtcccagttac

SEQ ID NO: 19647 - RNA, 20 nt, synthetic construct
  source 1..20: mol_type = other RNA
acggaggtgaccctaagtaa

SEQ ID NO: 19648 - RNA, 20 nt, synthetic construct
  source 1..20: mol_type = other RNA
actaaaactagtgcatttca

SEQ ID NO: 19649 - RNA, 20 nt, synthetic construct
  source 1..20: mol_type = other RNA
actaaagagaaaatcatcat

SEQ ID NO: 19650 - RNA, 20 nt, synthetic construct
  source 1..20: mol_type = other RNA
actaactgccaaagtcatta

SEQ ID NO: 19651 - RNA, 20 nt, synthetic construct
  source 1..20: mol_type = other RNA
actagtgcatttcatcttaa

SEQ ID NO: 19652 - RNA, 20 nt, synthetic construct
  source 1..20: mol_type = other RNA
actagttttagtgcttcatc

SEQ ID NO: 19653 - RNA, 20 nt, synthetic construct
  source 1..20: mol_type = other RNA
actatacaatcctatgacca

SEQ ID NO: 19654 - RNA, 20 nt, synthetic construct
  source 1..20: mol_type = other RNA
actatatgtgattccttgtt

SEQ ID NO: 19655 - RNA, 20 nt, synthetic construct
  source 1..20: mol_type = other RNA
actatgggcgtgtaccacaa

SEQ ID NO: 19656 - RNA, 20 nt, synthetic construct
  source 1..20: mol_type = other RNA
actattatccctgttttaca

SEQ ID NO: 19657 - RNA, 20 nt, synthetic construct
  source 1..20: mol_type = other RNA
actcactgcagccttgaact

SEQ ID NO: 19658 - RNA, 20 nt, synthetic construct
  source 1..20: mol_type = other RNA
actcacttctgcaatattcc

SEQ ID NO: 19659 - RNA, 20 nt, synthetic construct
  source 1..20: mol_type = other RNA
actcctaaataattcagtat

SEQ ID NO: 19660 - RNA, 20 nt, synthetic construct
  source 1..20: mol_type = other RNA
actcgagattagattcagat

SEQ ID NO: 19661 - RNA, 20 nt, synthetic construct
  source 1..20: mol_type = other RNA
actctcccctttttattgtt

SEQ ID NO: 19662 - RNA, 20 nt, synthetic construct
  source 1..20: mol_type = other RNA
actctgcttaatatgtcaat

SEQ ID NO: 19663 - RNA, 20 nt, synthetic construct
  source 1..20: mol_type = other RNA
actgaaaagcaaattgcttg

SEQ ID NO: 19664 - RNA, 20 nt, synthetic construct
  source 1..20: mol_type = other RNA
actgaactttctcctctaaa

SEQ ID NO: 19665 - RNA, 20 nt, synthetic construct
  source 1..20: mol_type = other RNA
actgaagaaggctcgagatt

SEQ ID NO: 19666 - RNA, 20 nt, synthetic construct
  source 1..20: mol_type = other RNA
actgaagacacacactcact

SEQ ID NO: 19667 - RNA, 20 nt, synthetic construct
  source 1..20: mol_type = other RNA
actgaagagctgatccagac

SEQ ID NO: 19668 - RNA, 20 nt, synthetic construct
  source 1..20: mol_type = other RNA
actgaattatttaggagtaa

SEQ ID NO: 19669 - RNA, 20 nt, synthetic construct
  source 1..20: mol_type = other RNA
actgagcgagaccctgtctc

SEQ ID NO: 19670 - RNA, 20 nt, synthetic construct
  source 1..20: mol_type = other RNA
actgatcaaagttaacatcg

SEQ ID NO: 19671 - RNA, 20 nt, synthetic construct
  source 1..20: mol_type = other RNA
actgcaaagcatgtaagtaa

SEQ ID NO: 19672 - RNA, 20 nt, synthetic construct
  source 1..20: mol_type = other RNA
actgcaaattataaagggaa

SEQ ID NO: 19673 - RNA, 20 nt, synthetic construct
  source 1..20: mol_type = other RNA
actgccaaagtcattaactt

SEQ ID NO: 19674 - RNA, 20 nt, synthetic construct
  source 1..20: mol_type = other RNA
actgggactatgggcgtgta

SEQ ID NO: 19675 - RNA, 20 nt, synthetic construct
  source 1..20: mol_type = other RNA
actgtcaagttactattatt

SEQ ID NO: 19676 - RNA, 20 nt, synthetic construct
  source 1..20: mol_type = other RNA
actgtcgggtgataaacata

SEQ ID NO: 19677 - RNA, 20 nt, synthetic construct
  source 1..20: mol_type = other RNA
actgtctctcaatttgggtt

SEQ ID NO: 19678 - RNA, 20 nt, synthetic construct
  source 1..20: mol_type = other RNA
actgtggttatgcaaatttg

SEQ ID NO: 19679 - RNA, 20 nt, synthetic construct
  source 1..20: mol_type = other RNA
acttacatgctttgcagttg

SEQ ID NO: 19680 - RNA, 20 nt, synthetic construct
  source 1..20: mol_type = other RNA
acttagggtcacctccgtat

SEQ ID NO: 19681 - RNA, 20 nt, synthetic construct
  source 1..20: mol_type = other RNA
acttcatctcctaagcctcg

SEQ ID NO: 19682 - RNA, 20 nt, synthetic construct
  source 1..20: mol_type = other RNA
acttctgcaatattcctgcc

SEQ ID NO: 19683 - RNA, 20 nt, synthetic construct
  source 1..20: mol_type = other RNA
acttgacagtggagagacct

SEQ ID NO: 19684 - RNA, 20 nt, synthetic construct
  source 1..20: mol_type = other RNA
acttgagtttgaaaccagcc

SEQ ID NO: 19685 - RNA, 20 nt, synthetic construct
  source 1..20: mol_type = other RNA
actttagctggctttggtat

SEQ ID NO: 19686 - RNA, 20 nt, synthetic construct
  source 1..20: mol_type = other RNA
actttctcctctaaataatc

SEQ ID NO: 19687 - RNA, 20 nt, synthetic construct
  source 1..20: mol_type = other RNA
actttgatcagttggtgaag

SEQ ID NO: 19688 - RNA, 20 nt, synthetic construct
  source 1..20: mol_type = other RNA
actttggcagttagtgtttt

SEQ ID NO: 19689 - RNA, 20 nt, synthetic construct
  source 1..20: mol_type = other RNA
acttttggccaaataccaaa

SEQ ID NO: 19690 - RNA, 20 nt, synthetic construct
  source 1..20: mol_type = other RNA
agaaaatcatcatcgcttgg

SEQ ID NO: 19691 - RNA, 20 nt, synthetic construct
  source 1..20: mol_type = other RNA
agaaagacagactgaagagc

SEQ ID NO: 19692 - RNA, 20 nt, synthetic construct
  source 1..20: mol_type = other RNA
agaaaggggacagatggcat

SEQ ID NO: 19693 - RNA, 20 nt, synthetic construct
  source 1..20: mol_type = other RNA
agaaagttcagtttggtgct

SEQ ID NO: 19694 - RNA, 20 nt, synthetic construct
  source 1..20: mol_type = other RNA
agaacaaggacaaatttgca

SEQ ID NO: 19695 - RNA, 20 nt, synthetic construct
  source 1..20: mol_type = other RNA
agaaggaaaccgaggcttag

SEQ ID NO: 19696 - RNA, 20 nt, synthetic construct
  source 1..20: mol_type = other RNA
agaaggctcgagattaatgc

SEQ ID NO: 19697 - RNA, 20 nt, synthetic construct
  source 1..20: mol_type = other RNA
agaagtgagtgtgtgtcttc

SEQ ID NO: 19698 - RNA, 20 nt, synthetic construct
  source 1..20: mol_type = other RNA
agaatacaggccaaggccct

SEQ ID NO: 19699 - RNA, 20 nt, synthetic construct
  source 1..20: mol_type = other RNA
agaatgcctcatctgaatct

SEQ ID NO: 19700 - RNA, 20 nt, synthetic construct
  source 1..20: mol_type = other RNA
agacaaacccaaattgagag

SEQ ID NO: 19701 - RNA, 20 nt, synthetic construct
  source 1..20: mol_type = other RNA
agacacacactcacttctgc

SEQ ID NO: 19702 - RNA, 20 nt, synthetic construct
  source 1..20: mol_type = other RNA
agacaccaccttcaccaact

SEQ ID NO: 19703 - RNA, 20 nt, synthetic construct
  source 1..20: mol_type = other RNA
agacagactgaagagctgat

SEQ ID NO: 19704 - RNA, 20 nt, synthetic construct
  source 1..20: mol_type = other RNA
agacagtttacaaaacacca

SEQ ID NO: 19705 - RNA, 20 nt, synthetic construct
  source 1..20: mol_type = other RNA
agaccccgtctctacaaaaa

SEQ ID NO: 19706 - RNA, 20 nt, synthetic construct
  source 1..20: mol_type = other RNA
agacctggcagacaccacct

SEQ ID NO: 19707 - RNA, 20 nt, synthetic construct
  source 1..20: mol_type = other RNA
agactgaagaaggctcgaga

SEQ ID NO: 19708 - RNA, 20 nt, synthetic construct
  source 1..20: mol_type = other RNA
agactgaagagctgatccag

SEQ ID NO: 19709 - RNA, 20 nt, synthetic construct
  source 1..20: mol_type = other RNA
agacttcatctcctaagcct

SEQ ID NO: 19710 - RNA, 20 nt, synthetic construct
  source 1..20: mol_type = other RNA
agagaaaatcatcatcgctt

SEQ ID NO: 19711 - RNA, 20 nt, synthetic construct
  source 1..20: mol_type = other RNA
agagaaagacagactgaaga

SEQ ID NO: 19712 - RNA, 20 nt, synthetic construct
  source 1..20: mol_type = other RNA
agagaaggaaaccgaggctt

SEQ ID NO: 19713 - RNA, 20 nt, synthetic construct
  source 1..20: mol_type = other RNA
agagacagtttacaaaacac

SEQ ID NO: 19714 - RNA, 20 nt, synthetic construct
  source 1..20: mol_type = other RNA
agagacctggcagacaccac

SEQ ID NO: 19715 - RNA, 20 nt, synthetic construct
  source 1..20: mol_type = other RNA
agagagaaagacagactgaa

SEQ ID NO: 19716 - RNA, 20 nt, synthetic construct
  source 1..20: mol_type = other RNA
agagattaacaactgtcggg

SEQ ID NO: 19717 - RNA, 20 nt, synthetic construct
  source 1..20: mol_type = other RNA
agagctgatccagactgaag

SEQ ID NO: 19718 - RNA, 20 nt, synthetic construct
  source 1..20: mol_type = other RNA
agaggagaaagttcagtttg

SEQ ID NO: 19719 - RNA, 20 nt, synthetic construct
  source 1..20: mol_type = other RNA
agaggcacatgccatctgtc

SEQ ID NO: 19720 - RNA, 20 nt, synthetic construct
  source 1..20: mol_type = other RNA
agagggtatacggaggtgac

SEQ ID NO: 19721 - RNA, 20 nt, synthetic construct
  source 1..20: mol_type = other RNA
agagtacaaggctggtgttt

SEQ ID NO: 19722 - RNA, 20 nt, synthetic construct
  source 1..20: mol_type = other RNA
agagttgaggtccaagatgc

SEQ ID NO: 19723 - RNA, 20 nt, synthetic construct
  source 1..20: mol_type = other RNA
agatataccagcaccaaact

SEQ ID NO: 19724 - RNA, 20 nt, synthetic construct
  source 1..20: mol_type = other RNA
agatcagcttttgcattaat

SEQ ID NO: 19725 - RNA, 20 nt, synthetic construct
  source 1..20: mol_type = other RNA
agatgaaatgcactagtttt

SEQ ID NO: 19726 - RNA, 20 nt, synthetic construct
  source 1..20: mol_type = other RNA
agatgaagcactaaaactag

SEQ ID NO: 19727 - RNA, 20 nt, synthetic construct
  source 1..20: mol_type = other RNA
agatgaagtctgaggtgttg

SEQ ID NO: 19728 - RNA, 20 nt, synthetic construct
  source 1..20: mol_type = other RNA
agatgagattggtcatagga

SEQ ID NO: 19729 - RNA, 20 nt, synthetic construct
  source 1..20: mol_type = other RNA
agatgaggcattcttggcag

SEQ ID NO: 19730 - RNA, 20 nt, synthetic construct
  source 1..20: mol_type = other RNA
agatgcaatcccagatcagc

SEQ ID NO: 19731 - RNA, 20 nt, synthetic construct
  source 1..20: mol_type = other RNA
agatgcactgaagacacaca

SEQ ID NO: 19732 - RNA, 20 nt, synthetic construct
  source 1..20: mol_type = other RNA
agatggcatgtgcctctcga

SEQ ID NO: 19733 - RNA, 20 nt, synthetic construct
  source 1..20: mol_type = other RNA
agattaacaactgtcgggtg

SEQ ID NO: 19734 - RNA, 20 nt, synthetic construct
  source 1..20: mol_type = other RNA
agattaatgcaaaagctgat

SEQ ID NO: 19735 - RNA, 20 nt, synthetic construct
  source 1..20: mol_type = other RNA
agattagattcagatgaggc

SEQ ID NO: 19736 - RNA, 20 nt, synthetic construct
  source 1..20: mol_type = other RNA
agattcagatgaggcattct

SEQ ID NO: 19737 - RNA, 20 nt, synthetic construct
  source 1..20: mol_type = other RNA
agattggtcataggattgta

SEQ ID NO: 19738 - RNA, 20 nt, synthetic construct
  source 1..20: mol_type = other RNA
agatttgctgattttgacaa

SEQ ID NO: 19739 - RNA, 20 nt, synthetic construct
  source 1..20: mol_type = other RNA
agcaaatctaatattgatac

SEQ ID NO: 19740 - RNA, 20 nt, synthetic construct
  source 1..20: mol_type = other RNA
agcaaattgcttgctcacta

SEQ ID NO: 19741 - RNA, 20 nt, synthetic construct
  source 1..20: mol_type = other RNA
agcaagcaatttgcttttca

SEQ ID NO: 19742 - RNA, 20 nt, synthetic construct
  source 1..20: mol_type = other RNA
agcaatttgcttttcagttt

SEQ ID NO: 19743 - RNA, 20 nt, synthetic construct
  source 1..20: mol_type = other RNA
agcaccaaactgaactttct

SEQ ID NO: 19744 - RNA, 20 nt, synthetic construct
  source 1..20: mol_type = other RNA
agcactaaaactagtgcatt

SEQ ID NO: 19745 - RNA, 20 nt, synthetic construct
  source 1..20: mol_type = other RNA
agcagagtacaaggctggtg

SEQ ID NO: 19746 - RNA, 20 nt, synthetic construct
  source 1..20: mol_type = other RNA
agcatgtaagtaacaatttt

SEQ ID NO: 19747 - RNA, 20 nt, synthetic construct
  source 1..20: mol_type = other RNA
agcatttgaaaatgggttca

SEQ ID NO: 19748 - RNA, 20 nt, synthetic construct
  source 1..20: mol_type = other RNA
agccagctaaagtcacaggg

SEQ ID NO: 19749 - RNA, 20 nt, synthetic construct
  source 1..20: mol_type = other RNA
agcccttaggcaggtgctac

SEQ ID NO: 19750 - RNA, 20 nt, synthetic construct
  source 1..20: mol_type = other RNA
agcctcggtttccttctctg

SEQ ID NO: 19751 - RNA, 20 nt, synthetic construct
  source 1..20: mol_type = other RNA
agcctctataaaatttgaat

SEQ ID NO: 19752 - RNA, 20 nt, synthetic construct
  source 1..20: mol_type = other RNA
agccttcttcagtctggatc

SEQ ID NO: 19753 - RNA, 20 nt, synthetic construct
  source 1..20: mol_type = other RNA
agccttgtactctgcttaat

SEQ ID NO: 19754 - RNA, 20 nt, synthetic construct
  source 1..20: mol_type = other RNA
agcgaggtgttgtggtacac

SEQ ID NO: 19755 - RNA, 20 nt, synthetic construct
  source 1..20: mol_type = other RNA
agcgatgatgattttctctt

SEQ ID NO: 19756 - RNA, 20 nt, synthetic construct
  source 1..20: mol_type = other RNA
agctaaagtcacagggcctt

SEQ ID NO: 19757 - RNA, 20 nt, synthetic construct
  source 1..20: mol_type = other RNA
agctccaccaacacctcaga

SEQ ID NO: 19758 - RNA, 20 nt, synthetic construct
  source 1..20: mol_type = other RNA
agctcttcagtctgtctttc

SEQ ID NO: 19759 - RNA, 20 nt, synthetic construct
  source 1..20: mol_type = other RNA
agctgatccagactgaagaa

SEQ ID NO: 19760 - RNA, 20 nt, synthetic construct
  source 1..20: mol_type = other RNA
agctgatctgggattgcatc

SEQ ID NO: 19761 - RNA, 20 nt, synthetic construct
  source 1..20: mol_type = other RNA
agctggctttggtatttggc

SEQ ID NO: 19762 - RNA, 20 nt, synthetic construct
  source 1..20: mol_type = other RNA
agctgggatttaaaccaaaa

SEQ ID NO: 19763 - RNA, 20 nt, synthetic construct
  source 1..20: mol_type = other RNA
agcttttgcattaatctcga

SEQ ID NO: 19764 - RNA, 20 nt, synthetic construct
  source 1..20: mol_type = other RNA
aggaaaccgaggcttaggag

SEQ ID NO: 19765 - RNA, 20 nt, synthetic construct
  source 1..20: mol_type = other RNA
aggaatattgcagaagtgag

SEQ ID NO: 19766 - RNA, 20 nt, synthetic construct
  source 1..20: mol_type = other RNA
aggaatcacatatagtgagc

SEQ ID NO: 19767 - RNA, 20 nt, synthetic construct
  source 1..20: mol_type = other RNA
aggacaaatttgcataacca

SEQ ID NO: 19768 - RNA, 20 nt, synthetic construct
  source 1..20: mol_type = other RNA
aggagaaagttcagtttggt

SEQ ID NO: 19769 - RNA, 20 nt, synthetic construct
  source 1..20: mol_type = other RNA
aggagatgaagtctgaggtg

SEQ ID NO: 19770 - RNA, 20 nt, synthetic construct
  source 1..20: mol_type = other RNA
aggagtaaaggtgcataatg

SEQ ID NO: 19771 - RNA, 20 nt, synthetic construct
  source 1..20: mol_type = other RNA
aggatcacttgagtttgaaa

SEQ ID NO: 19772 - RNA, 20 nt, synthetic construct
  source 1..20: mol_type = other RNA
aggattgaccaaaaactgaa

SEQ ID NO: 19773 - RNA, 20 nt, synthetic construct
  source 1..20: mol_type = other RNA
aggattgtatagtgtatcaa

SEQ ID NO: 19774 - RNA, 20 nt, synthetic construct
  source 1..20: mol_type = other RNA
aggcacatgccatctgtccc

SEQ ID NO: 19775 - RNA, 20 nt, synthetic construct
  source 1..20: mol_type = other RNA
aggcaggtgctactattatc

SEQ ID NO: 19776 - RNA, 20 nt, synthetic construct
  source 1..20: mol_type = other RNA
aggcattcttggcaggaata

SEQ ID NO: 19777 - RNA, 20 nt, synthetic construct
  source 1..20: mol_type = other RNA
aggccaaggccctgtgactt

SEQ ID NO: 19778 - RNA, 20 nt, synthetic construct
  source 1..20: mol_type = other RNA
aggccctgtgactttagctg

SEQ ID NO: 19779 - RNA, 20 nt, synthetic construct
  source 1..20: mol_type = other RNA
aggctcgagattaatgcaaa

SEQ ID NO: 19780 - RNA, 20 nt, synthetic construct
  source 1..20: mol_type = other RNA
aggctgcagtgagttattat

SEQ ID NO: 19781 - RNA, 20 nt, synthetic construct
  source 1..20: mol_type = other RNA
aggctggagtgcagtggtgg

SEQ ID NO: 19782 - RNA, 20 nt, synthetic construct
  source 1..20: mol_type = other RNA
aggctggtgttttgtaaact

SEQ ID NO: 19783 - RNA, 20 nt, synthetic construct
  source 1..20: mol_type = other RNA
aggctggtttcaaactcaag

SEQ ID NO: 19784 - RNA, 20 nt, synthetic construct
  source 1..20: mol_type = other RNA
aggcttaggagatgaagtct

SEQ ID NO: 19785 - RNA, 20 nt, synthetic construct
  source 1..20: mol_type = other RNA
agggaataatagtaacttga

SEQ ID NO: 19786 - RNA, 20 nt, synthetic construct
  source 1..20: mol_type = other RNA
agggacactactgggacaat

SEQ ID NO: 19787 - RNA, 20 nt, synthetic construct
  source 1..20: mol_type = other RNA
agggataatagtagcacctg

SEQ ID NO: 19788 - RNA, 20 nt, synthetic construct
  source 1..20: mol_type = other RNA
agggccttggcctgtattct

SEQ ID NO: 19789 - RNA, 20 nt, synthetic construct
  source 1..20: mol_type = other RNA
aggggacagatggcatgtgc

SEQ ID NO: 19790 - RNA, 20 nt, synthetic construct
  source 1..20: mol_type = other RNA
aggggagagttgaggtccaa

SEQ ID NO: 19791 - RNA, 20 nt, synthetic construct
  source 1..20: mol_type = other RNA
agggtatacggaggtgaccc

SEQ ID NO: 19792 - RNA, 20 nt, synthetic construct
  source 1..20: mol_type = other RNA
agggtcacctccgtataccc

SEQ ID NO: 19793 - RNA, 20 nt, synthetic construct
  source 1..20: mol_type = other RNA
agggttgtcaaaatcagcaa

SEQ ID NO: 19794 - RNA, 20 nt, synthetic construct
  source 1..20: mol_type = other RNA
aggtccaagatgcaatccca

SEQ ID NO: 19795 - RNA, 20 nt, synthetic construct
  source 1..20: mol_type = other RNA
aggtctctccactgtcaagt

SEQ ID NO: 19796 - RNA, 20 nt, synthetic construct
  source 1..20: mol_type = other RNA
aggtgaccctaagtaacaag

SEQ ID NO: 19797 - RNA, 20 nt, synthetic construct
  source 1..20: mol_type = other RNA
aggtgcataatgaacccatt

SEQ ID NO: 19798 - RNA, 20 nt, synthetic construct
  source 1..20: mol_type = other RNA
aggtgctactattatccctg

SEQ ID NO: 19799 - RNA, 20 nt, synthetic construct
  source 1..20: mol_type = other RNA
aggtggaaggatcacttgag

SEQ ID NO: 19800 - RNA, 20 nt, synthetic construct
  source 1..20: mol_type = other RNA
aggtggtgtctgccaggtct

SEQ ID NO: 19801 - RNA, 20 nt, synthetic construct
  source 1..20: mol_type = other RNA
aggtgttggtggagctggga

SEQ ID NO: 19802 - RNA, 20 nt, synthetic construct
  source 1..20: mol_type = other RNA
aggtgttgtggtacacgccc

SEQ ID NO: 19803 - RNA, 20 nt, synthetic construct
  source 1..20: mol_type = other RNA
agtaaaggtgcataatgaac

SEQ ID NO: 19804 - RNA, 20 nt, synthetic construct
  source 1..20: mol_type = other RNA
agtaacaaggaatcacatat

SEQ ID NO: 19805 - RNA, 20 nt, synthetic construct
  source 1..20: mol_type = other RNA
agtaacaattttagagggta

SEQ ID NO: 19806 - RNA, 20 nt, synthetic construct
  source 1..20: mol_type = other RNA
agtaactgggactatgggcg

SEQ ID NO: 19807 - RNA, 20 nt, synthetic construct
  source 1..20: mol_type = other RNA
agtaacttgacagtggagag

SEQ ID NO: 19808 - RNA, 20 nt, synthetic construct
  source 1..20: mol_type = other RNA
agtacaaggctggtgttttg

SEQ ID NO: 19809 - RNA, 20 nt, synthetic construct
  source 1..20: mol_type = other RNA
agtagcacctgcctaagggc

SEQ ID NO: 19810 - RNA, 20 nt, synthetic construct
  source 1..20: mol_type = other RNA
agtagggttgtcaaaatcag

SEQ ID NO: 19811 - RNA, 20 nt, synthetic construct
  source 1..20: mol_type = other RNA
agtagtgtcccttaacaata

SEQ ID NO: 19812 - RNA, 20 nt, synthetic construct
  source 1..20: mol_type = other RNA
agtagttttacagatgaagc

SEQ ID NO: 19813 - RNA, 20 nt, synthetic construct
  source 1..20: mol_type = other RNA
agtataaccatcagacaaac

SEQ ID NO: 19814 - RNA, 20 nt, synthetic construct
  source 1..20: mol_type = other RNA
agtatttatttccttagaac

SEQ ID NO: 19815 - RNA, 20 nt, synthetic construct
  source 1..20: mol_type = other RNA
agtcacagggccttggcctg

SEQ ID NO: 19816 - RNA, 20 nt, synthetic construct
  source 1..20: mol_type = other RNA
agtcattaacttttggccaa

SEQ ID NO: 19817 - RNA, 20 nt, synthetic construct
  source 1..20: mol_type = other RNA
agtcccagttactcggaagg

SEQ ID NO: 19818 - RNA, 20 nt, synthetic construct
  source 1..20: mol_type = other RNA
agtccgggagttcaaggctg

SEQ ID NO: 19819 - RNA, 20 nt, synthetic construct
  source 1..20: mol_type = other RNA
agtctgaggtgttggtggag

SEQ ID NO: 19820 - RNA, 20 nt, synthetic construct
  source 1..20: mol_type = other RNA
agtctggatcagctcttcag

SEQ ID NO: 19821 - RNA, 20 nt, synthetic construct
  source 1..20: mol_type = other RNA
agtctgtctttctctcttgt

SEQ ID NO: 19822 - RNA, 20 nt, synthetic construct
  source 1..20: mol_type = other RNA
agtgacagacattttttaaa

SEQ ID NO: 19823 - RNA, 20 nt, synthetic construct
  source 1..20: mol_type = other RNA
agtgagaccccgtctctaca

SEQ ID NO: 19824 - RNA, 20 nt, synthetic construct
  source 1..20: mol_type = other RNA
agtgagcaagcaatttgctt

SEQ ID NO: 19825 - RNA, 20 nt, synthetic construct
  source 1..20: mol_type = other RNA
agtgagtgtgtgtcttcagt

SEQ ID NO: 19826 - RNA, 20 nt, synthetic construct
  source 1..20: mol_type = other RNA
agtgagttattattccacca

SEQ ID NO: 19827 - RNA, 20 nt, synthetic construct
  source 1..20: mol_type = other RNA
agtgatccttccacctcagc

SEQ ID NO: 19828 - RNA, 20 nt, synthetic construct
  source 1..20: mol_type = other RNA
agtgcagtggtggaataata

SEQ ID NO: 19829 - RNA, 20 nt, synthetic construct
  source 1..20: mol_type = other RNA
agtgcatcttatcgagaggc

SEQ ID NO: 19830 - RNA, 20 nt, synthetic construct
  source 1..20: mol_type = other RNA
agtgcatttcatcttaaact

SEQ ID NO: 19831 - RNA, 20 nt, synthetic construct
  source 1..20: mol_type = other RNA
agtgcttcatctgtaaaact

SEQ ID NO: 19832 - RNA, 20 nt, synthetic construct
  source 1..20: mol_type = other RNA
agtggagagacctggcagac

SEQ ID NO: 19833 - RNA, 20 nt, synthetic construct
  source 1..20: mol_type = other RNA
agtggtggaataataactca

SEQ ID NO: 19834 - RNA, 20 nt, synthetic construct
  source 1..20: mol_type = other RNA
agtgtcccttaacaataaaa

SEQ ID NO: 19835 - RNA, 20 nt, synthetic construct
  source 1..20: mol_type = other RNA
agtgtgtgtcttcagtgcat

SEQ ID NO: 19836 - RNA, 20 nt, synthetic construct
  source 1..20: mol_type = other RNA
agtgtttttatccatgccaa

SEQ ID NO: 19837 - RNA, 20 nt, synthetic construct
  source 1..20: mol_type = other RNA
agttaacatcgccagaaagg

SEQ ID NO: 19838 - RNA, 20 nt, synthetic construct
  source 1..20: mol_type = other RNA
agttaatgactttggcagtt

SEQ ID NO: 19839 - RNA, 20 nt, synthetic construct
  source 1..20: mol_type = other RNA
agttactattattcccttta

SEQ ID NO: 19840 - RNA, 20 nt, synthetic construct
  source 1..20: mol_type = other RNA
agttactcggaaggctcagg

SEQ ID NO: 19841 - RNA, 20 nt, synthetic construct
  source 1..20: mol_type = other RNA
agttagtgtttttatccatg

SEQ ID NO: 19842 - RNA, 20 nt, synthetic construct
  source 1..20: mol_type = other RNA
agttattattccaccactgc

SEQ ID NO: 19843 - RNA, 20 nt, synthetic construct
  source 1..20: mol_type = other RNA
agttcaaggctgcagtgagt

SEQ ID NO: 19844 - RNA, 20 nt, synthetic construct
  source 1..20: mol_type = other RNA
agttcagtttggtgctggta

SEQ ID NO: 19845 - RNA, 20 nt, synthetic construct
  source 1..20: mol_type = other RNA
agttgaggtccaagatgcaa

SEQ ID NO: 19846 - RNA, 20 nt, synthetic construct
  source 1..20: mol_type = other RNA
agttggacatattttggttt

SEQ ID NO: 19847 - RNA, 20 nt, synthetic construct
  source 1..20: mol_type = other RNA
agttggtgaaggtggtgtct

SEQ ID NO: 19848 - RNA, 20 nt, synthetic construct
  source 1..20: mol_type = other RNA
agttgtagatgagattggtc

SEQ ID NO: 19849 - RNA, 20 nt, synthetic construct
  source 1..20: mol_type = other RNA
agtttaagatgaaatgcact

SEQ ID NO: 19850 - RNA, 20 nt, synthetic construct
  source 1..20: mol_type = other RNA
agtttacaaaacaccagcct

SEQ ID NO: 19851 - RNA, 20 nt, synthetic construct
  source 1..20: mol_type = other RNA
agtttggtgctggtatatct

SEQ ID NO: 19852 - RNA, 20 nt, synthetic construct
  source 1..20: mol_type = other RNA
agttttacagatgaagcact

SEQ ID NO: 19853 - RNA, 20 nt, synthetic construct
  source 1..20: mol_type = other RNA
agttttagtgcttcatctgt

SEQ ID NO: 19854 - RNA, 20 nt, synthetic construct
  source 1..20: mol_type = other RNA
agtttttggtcaatccttat

SEQ ID NO: 19855 - RNA, 20 nt, synthetic construct
  source 1..20: mol_type = other RNA
ataaaaacactaactgccaa

SEQ ID NO: 19856 - RNA, 20 nt, synthetic construct
  source 1..20: mol_type = other RNA
ataaaaaggggagagttgag

SEQ ID NO: 19857 - RNA, 20 nt, synthetic construct
  source 1..20: mol_type = other RNA
ataaacataagatataccag

SEQ ID NO: 19858 - RNA, 20 nt, synthetic construct
  source 1..20: mol_type = other RNA
ataaagggaataatagtaac

SEQ ID NO: 19859 - RNA, 20 nt, synthetic construct
  source 1..20: mol_type = other RNA
ataaagttgtagatgagatt

SEQ ID NO: 19860 - RNA, 20 nt, synthetic construct
  source 1..20: mol_type = other RNA
ataaccacagtagggttgtc

SEQ ID NO: 19861 - RNA, 20 nt, synthetic construct
  source 1..20: mol_type = other RNA
ataaccatcagacaaaccca

SEQ ID NO: 19862 - RNA, 20 nt, synthetic construct
  source 1..20: mol_type = other RNA
ataagatataccagcaccaa

SEQ ID NO: 19863 - RNA, 20 nt, synthetic construct
  source 1..20: mol_type = other RNA
ataagatgcactgaagacac

SEQ ID NO: 19864 - RNA, 20 nt, synthetic construct
  source 1..20: mol_type = other RNA
ataagcatttgaaaatgggt

SEQ ID NO: 19865 - RNA, 20 nt, synthetic construct
  source 1..20: mol_type = other RNA
ataaggattgaccaaaaact

SEQ ID NO: 19866 - RNA, 20 nt, synthetic construct
  source 1..20: mol_type = other RNA
ataatagtaacttgacagtg

SEQ ID NO: 19867 - RNA, 20 nt, synthetic construct
  source 1..20: mol_type = other RNA
ataatagtagcacctgccta

SEQ ID NO: 19868 - RNA, 20 nt, synthetic construct
  source 1..20: mol_type = other RNA
ataatcataaggattgacca

SEQ ID NO: 19869 - RNA, 20 nt, synthetic construct
  source 1..20: mol_type = other RNA
ataatgaacccattttcaaa

SEQ ID NO: 19870 - RNA, 20 nt, synthetic construct
  source 1..20: mol_type = other RNA
ataatttgcagtttaagatg

SEQ ID NO: 19871 - RNA, 20 nt, synthetic construct
  source 1..20: mol_type = other RNA
atacaatcctatgaccaatc

SEQ ID NO: 19872 - RNA, 20 nt, synthetic construct
  source 1..20: mol_type = other RNA
atacactatacaatcctatg

SEQ ID NO: 19873 - RNA, 20 nt, synthetic construct
  source 1..20: mol_type = other RNA
atacaggccaaggccctgtg

SEQ ID NO: 19874 - RNA, 20 nt, synthetic construct
  source 1..20: mol_type = other RNA
ataccaaagccagctaaagt

SEQ ID NO: 19875 - RNA, 20 nt, synthetic construct
  source 1..20: mol_type = other RNA
ataccagcaccaaactgaac

SEQ ID NO: 19876 - RNA, 20 nt, synthetic construct
  source 1..20: mol_type = other RNA
ataccctctaaaattgttac

SEQ ID NO: 19877 - RNA, 20 nt, synthetic construct
  source 1..20: mol_type = other RNA
atacggaggtgaccctaagt

SEQ ID NO: 19878 - RNA, 20 nt, synthetic construct
  source 1..20: mol_type = other RNA
atactcgagattagattcag

SEQ ID NO: 19879 - RNA, 20 nt, synthetic construct
  source 1..20: mol_type = other RNA
atactgaattatttaggagt

SEQ ID NO: 19880 - RNA, 20 nt, synthetic construct
  source 1..20: mol_type = other RNA
atagaggctgaggtggaagg

SEQ ID NO: 19881 - RNA, 20 nt, synthetic construct
  source 1..20: mol_type = other RNA
atagcgaggtgttgtggtac

SEQ ID NO: 19882 - RNA, 20 nt, synthetic construct
  source 1..20: mol_type = other RNA
ataggattgtatagtgtatc

SEQ ID NO: 19883 - RNA, 20 nt, synthetic construct
  source 1..20: mol_type = other RNA
atagtaacttgacagtggag

SEQ ID NO: 19884 - RNA, 20 nt, synthetic construct
  source 1..20: mol_type = other RNA
atagtagcacctgcctaagg

SEQ ID NO: 19885 - RNA, 20 nt, synthetic construct
  source 1..20: mol_type = other RNA
atagtcccagttactcggaa

SEQ ID NO: 19886 - RNA, 20 nt, synthetic construct
  source 1..20: mol_type = other RNA
atagtgagcaagcaatttgc

SEQ ID NO: 19887 - RNA, 20 nt, synthetic construct
  source 1..20: mol_type = other RNA
atataccagcaccaaactga

SEQ ID NO: 19888 - RNA, 20 nt, synthetic construct
  source 1..20: mol_type = other RNA
atatagtgagcaagcaattt

SEQ ID NO: 19889 - RNA, 20 nt, synthetic construct
  source 1..20: mol_type = other RNA
atatcttatgtttatcaccc

SEQ ID NO: 19890 - RNA, 20 nt, synthetic construct
  source 1..20: mol_type = other RNA
atatgtcaatgtcacaagag

SEQ ID NO: 19891 - RNA, 20 nt, synthetic construct
  source 1..20: mol_type = other RNA
atatgtccaactgcaaagca

SEQ ID NO: 19892 - RNA, 20 nt, synthetic construct
  source 1..20: mol_type = other RNA
atatgtgattccttgttact

SEQ ID NO: 19893 - RNA, 20 nt, synthetic construct
  source 1..20: mol_type = other RNA
atattaagcagagtacaagg

SEQ ID NO: 19894 - RNA, 20 nt, synthetic construct
  source 1..20: mol_type = other RNA
atattcctgccaagaatgcc

SEQ ID NO: 19895 - RNA, 20 nt, synthetic construct
  source 1..20: mol_type = other RNA
atattgcagaagtgagtgtg

SEQ ID NO: 19896 - RNA, 20 nt, synthetic construct
  source 1..20: mol_type = other RNA
atattttggtttaaatccca

SEQ ID NO: 19897 - RNA, 20 nt, synthetic construct
  source 1..20: mol_type = other RNA
atcaaagttaacatcgccag

SEQ ID NO: 19898 - RNA, 20 nt, synthetic construct
  source 1..20: mol_type = other RNA
atcaatattagatttgctga

SEQ ID NO: 19899 - RNA, 20 nt, synthetic construct
  source 1..20: mol_type = other RNA
atcacatatagtgagcaagc

SEQ ID NO: 19900 - RNA, 20 nt, synthetic construct
  source 1..20: mol_type = other RNA
atcacccgacagttgttaat

SEQ ID NO: 19901 - RNA, 20 nt, synthetic construct
  source 1..20: mol_type = other RNA
atcacttgagtttgaaacca

SEQ ID NO: 19902 - RNA, 20 nt, synthetic construct
  source 1..20: mol_type = other RNA
atcagacaaacccaaattga

SEQ ID NO: 19903 - RNA, 20 nt, synthetic construct
  source 1..20: mol_type = other RNA
atcagcaaatctaatattga

SEQ ID NO: 19904 - RNA, 20 nt, synthetic construct
  source 1..20: mol_type = other RNA
atcagctcttcagtctgtct

SEQ ID NO: 19905 - RNA, 20 nt, synthetic construct
  source 1..20: mol_type = other RNA
atcagcttttgcattaatct

SEQ ID NO: 19906 - RNA, 20 nt, synthetic construct
  source 1..20: mol_type = other RNA
atcagttggtgaaggtggtg

SEQ ID NO: 19907 - RNA, 20 nt, synthetic construct
  source 1..20: mol_type = other RNA
atcataaggattgaccaaaa

SEQ ID NO: 19908 - RNA, 20 nt, synthetic construct
  source 1..20: mol_type = other RNA
atcatcatcgcttggcatgg

SEQ ID NO: 19909 - RNA, 20 nt, synthetic construct
  source 1..20: mol_type = other RNA
atcatcgcttggcatggata

SEQ ID NO: 19910 - RNA, 20 nt, synthetic construct
  source 1..20: mol_type = other RNA
atccagactgaagaaggctc

SEQ ID NO: 19911 - RNA, 20 nt, synthetic construct
  source 1..20: mol_type = other RNA
atccatgccaagcgatgatg

SEQ ID NO: 19912 - RNA, 20 nt, synthetic construct
  source 1..20: mol_type = other RNA
atcccagatcagcttttgca

SEQ ID NO: 19913 - RNA, 20 nt, synthetic construct
  source 1..20: mol_type = other RNA
atcccagctccaccaacacc

SEQ ID NO: 19914 - RNA, 20 nt, synthetic construct
  source 1..20: mol_type = other RNA
atccctgttttacagagaag

SEQ ID NO: 19915 - RNA, 20 nt, synthetic construct
  source 1..20: mol_type = other RNA
atcctatgaccaatctcatc

SEQ ID NO: 19916 - RNA, 20 nt, synthetic construct
  source 1..20: mol_type = other RNA
atcctcctgcctgagccttc

SEQ ID NO: 19917 - RNA, 20 nt, synthetic construct
  source 1..20: mol_type = other RNA
atccttatgattatttagag

SEQ ID NO: 19918 - RNA, 20 nt, synthetic construct
  source 1..20: mol_type = other RNA
atccttccacctcagcctct

SEQ ID NO: 19919 - RNA, 20 nt, synthetic construct
  source 1..20: mol_type = other RNA
atcgagaggcacatgccatc

SEQ ID NO: 19920 - RNA, 20 nt, synthetic construct
  source 1..20: mol_type = other RNA
atcgccagaaaggggacaga

SEQ ID NO: 19921 - RNA, 20 nt, synthetic construct
  source 1..20: mol_type = other RNA
atcgcttggcatggataaaa

SEQ ID NO: 19922 - RNA, 20 nt, synthetic construct
  source 1..20: mol_type = other RNA
atctaatctcgagtataacc

SEQ ID NO: 19923 - RNA, 20 nt, synthetic construct
  source 1..20: mol_type = other RNA
atctcatctacaactttatt

SEQ ID NO: 19924 - RNA, 20 nt, synthetic construct
  source 1..20: mol_type = other RNA
atctcctaagcctcggtttc

SEQ ID NO: 19925 - RNA, 20 nt, synthetic construct
  source 1..20: mol_type = other RNA
atctcgagccttcttcagtc

SEQ ID NO: 19926 - RNA, 20 nt, synthetic construct
  source 1..20: mol_type = other RNA
atctcgagtataaccatcag

SEQ ID NO: 19927 - RNA, 20 nt, synthetic construct
  source 1..20: mol_type = other RNA
atctgaatctaatctcgagt

SEQ ID NO: 19928 - RNA, 20 nt, synthetic construct
  source 1..20: mol_type = other RNA
atctgggattgcatcttgga

SEQ ID NO: 19929 - RNA, 20 nt, synthetic construct
  source 1..20: mol_type = other RNA
atctgtcccctttctggcga

SEQ ID NO: 19930 - RNA, 20 nt, synthetic construct
  source 1..20: mol_type = other RNA
atcttatcgagaggcacatg

SEQ ID NO: 19931 - RNA, 20 nt, synthetic construct
  source 1..20: mol_type = other RNA
atcttatgtttatcacccga

SEQ ID NO: 19932 - RNA, 20 nt, synthetic construct
  source 1..20: mol_type = other RNA
atcttggacctcaactctcc

SEQ ID NO: 19933 - RNA, 20 nt, synthetic construct
  source 1..20: mol_type = other RNA
atgaaatgcactagttttag

SEQ ID NO: 19934 - RNA, 20 nt, synthetic construct
  source 1..20: mol_type = other RNA
atgaacccattttcaaatgc

SEQ ID NO: 19935 - RNA, 20 nt, synthetic construct
  source 1..20: mol_type = other RNA
atgaagcactaaaactagtg

SEQ ID NO: 19936 - RNA, 20 nt, synthetic construct
  source 1..20: mol_type = other RNA
atgaagtctgaggtgttggt

SEQ ID NO: 19937 - RNA, 20 nt, synthetic construct
  source 1..20: mol_type = other RNA
atgaccaatctcatctacaa

SEQ ID NO: 19938 - RNA, 20 nt, synthetic construct
  source 1..20: mol_type = other RNA
atgactttggcagttagtgt

SEQ ID NO: 19939 - RNA, 20 nt, synthetic construct
  source 1..20: mol_type = other RNA
atgagattggtcataggatt

SEQ ID NO: 19940 - RNA, 20 nt, synthetic construct
  source 1..20: mol_type = other RNA
atgaggcattcttggcagga

SEQ ID NO: 19941 - RNA, 20 nt, synthetic construct
  source 1..20: mol_type = other RNA
atgatgattttctctttagt

SEQ ID NO: 19942 - RNA, 20 nt, synthetic construct
  source 1..20: mol_type = other RNA
atgattatttagaggagaaa

SEQ ID NO: 19943 - RNA, 20 nt, synthetic construct
  source 1..20: mol_type = other RNA
atgattttctctttagtgac

SEQ ID NO: 19944 - RNA, 20 nt, synthetic construct
  source 1..20: mol_type = other RNA
atgcaaaagctgatctggga

SEQ ID NO: 19945 - RNA, 20 nt, synthetic construct
  source 1..20: mol_type = other RNA
atgcaaatttgtccttgttc

SEQ ID NO: 19946 - RNA, 20 nt, synthetic construct
  source 1..20: mol_type = other RNA
atgcaatcccagatcagctt

SEQ ID NO: 19947 - RNA, 20 nt, synthetic construct
  source 1..20: mol_type = other RNA
atgcacctttactcctaaat

SEQ ID NO: 19948 - RNA, 20 nt, synthetic construct
  source 1..20: mol_type = other RNA
atgcactagttttagtgctt

SEQ ID NO: 19949 - RNA, 20 nt, synthetic construct
  source 1..20: mol_type = other RNA
atgcactgaagacacacact

SEQ ID NO: 19950 - RNA, 20 nt, synthetic construct
  source 1..20: mol_type = other RNA
atgccaagcgatgatgattt

SEQ ID NO: 19951 - RNA, 20 nt, synthetic construct
  source 1..20: mol_type = other RNA
atgccatctgtcccctttct

SEQ ID NO: 19952 - RNA, 20 nt, synthetic construct
  source 1..20: mol_type = other RNA
atgcctcatctgaatctaat

SEQ ID NO: 19953 - RNA, 20 nt, synthetic construct
  source 1..20: mol_type = other RNA
atgctttgcagttggacata

SEQ ID NO: 19954 - RNA, 20 nt, synthetic construct
  source 1..20: mol_type = other RNA
atggataaaaacactaactg

SEQ ID NO: 19955 - RNA, 20 nt, synthetic construct
  source 1..20: mol_type = other RNA
atggcatgtgcctctcgata

SEQ ID NO: 19956 - RNA, 20 nt, synthetic construct
  source 1..20: mol_type = other RNA
atgggcgtgtaccacaacac

SEQ ID NO: 19957 - RNA, 20 nt, synthetic construct
  source 1..20: mol_type = other RNA
atgggttcattatgcacctt

SEQ ID NO: 19958 - RNA, 20 nt, synthetic construct
  source 1..20: mol_type = other RNA
atggttatactcgagattag

SEQ ID NO: 19959 - RNA, 20 nt, synthetic construct
  source 1..20: mol_type = other RNA
atgtcaatgtcacaagagag

SEQ ID NO: 19960 - RNA, 20 nt, synthetic construct
  source 1..20: mol_type = other RNA
atgtcacaagagagaaagac

SEQ ID NO: 19961 - RNA, 20 nt, synthetic construct
  source 1..20: mol_type = other RNA
atgtccaactgcaaagcatg

SEQ ID NO: 19962 - RNA, 20 nt, synthetic construct
  source 1..20: mol_type = other RNA
atgtctgtcactaaagagaa

SEQ ID NO: 19963 - RNA, 20 nt, synthetic construct
  source 1..20: mol_type = other RNA
atgtgattccttgttactta

SEQ ID NO: 19964 - RNA, 20 nt, synthetic construct
  source 1..20: mol_type = other RNA
atgtgcctctcgataagatg

SEQ ID NO: 19965 - RNA, 20 nt, synthetic construct
  source 1..20: mol_type = other RNA
atgttaactttgatcagttg

SEQ ID NO: 19966 - RNA, 20 nt, synthetic construct
  source 1..20: mol_type = other RNA
atgtttatcacccgacagtt

SEQ ID NO: 19967 - RNA, 20 nt, synthetic construct
  source 1..20: mol_type = other RNA
attaacaactgtcgggtgat

SEQ ID NO: 19968 - RNA, 20 nt, synthetic construct
  source 1..20: mol_type = other RNA
attaacttttggccaaatac

SEQ ID NO: 19969 - RNA, 20 nt, synthetic construct
  source 1..20: mol_type = other RNA
attaagcagagtacaaggct

SEQ ID NO: 19970 - RNA, 20 nt, synthetic construct
  source 1..20: mol_type = other RNA
attaatctcgagccttcttc

SEQ ID NO: 19971 - RNA, 20 nt, synthetic construct
  source 1..20: mol_type = other RNA
attaatgcaaaagctgatct

SEQ ID NO: 19972 - RNA, 20 nt, synthetic construct
  source 1..20: mol_type = other RNA
attagattcagatgaggcat

SEQ ID NO: 19973 - RNA, 20 nt, synthetic construct
  source 1..20: mol_type = other RNA
attagatttgctgattttga

SEQ ID NO: 19974 - RNA, 20 nt, synthetic construct
  source 1..20: mol_type = other RNA
attatccctgttttacagag

SEQ ID NO: 19975 - RNA, 20 nt, synthetic construct
  source 1..20: mol_type = other RNA
attatgcacctttactccta

SEQ ID NO: 19976 - RNA, 20 nt, synthetic construct
  source 1..20: mol_type = other RNA
attatttagaggagaaagtt

SEQ ID NO: 19977 - RNA, 20 nt, synthetic construct
  source 1..20: mol_type = other RNA
attatttaggagtaaaggtg

SEQ ID NO: 19978 - RNA, 20 nt, synthetic construct
  source 1..20: mol_type = other RNA
attcaaattttatagaggct

SEQ ID NO: 19979 - RNA, 20 nt, synthetic construct
  source 1..20: mol_type = other RNA
attcagatgaggcattcttg

SEQ ID NO: 19980 - RNA, 20 nt, synthetic construct
  source 1..20: mol_type = other RNA
attccctttataatttgcag

SEQ ID NO: 19981 - RNA, 20 nt, synthetic construct
  source 1..20: mol_type = other RNA
attcctgccaagaatgcctc

SEQ ID NO: 19982 - RNA, 20 nt, synthetic construct
  source 1..20: mol_type = other RNA
attccttgttacttagggtc

SEQ ID NO: 19983 - RNA, 20 nt, synthetic construct
  source 1..20: mol_type = other RNA
attcttggcaggaatattgc

SEQ ID NO: 19984 - RNA, 20 nt, synthetic construct
  source 1..20: mol_type = other RNA
attgacatattaagcagagt

SEQ ID NO: 19985 - RNA, 20 nt, synthetic construct
  source 1..20: mol_type = other RNA
attgaccaaaaactgaaaag

SEQ ID NO: 19986 - RNA, 20 nt, synthetic construct
  source 1..20: mol_type = other RNA
attgagagacagtttacaaa

SEQ ID NO: 19987 - RNA, 20 nt, synthetic construct
  source 1..20: mol_type = other RNA
attgatacactatacaatcc

SEQ ID NO: 19988 - RNA, 20 nt, synthetic construct
  source 1..20: mol_type = other RNA
attgcagaagtgagtgtgtg

SEQ ID NO: 19989 - RNA, 20 nt, synthetic construct
  source 1..20: mol_type = other RNA
attgcatcttggacctcaac

SEQ ID NO: 19990 - RNA, 20 nt, synthetic construct
  source 1..20: mol_type = other RNA
attgcttgctcactatatgt

SEQ ID NO: 19991 - RNA, 20 nt, synthetic construct
  source 1..20: mol_type = other RNA
attggtcataggattgtata

SEQ ID NO: 19992 - RNA, 20 nt, synthetic construct
  source 1..20: mol_type = other RNA
attgtcccagtagtgtccct

SEQ ID NO: 19993 - RNA, 20 nt, synthetic construct
  source 1..20: mol_type = other RNA
attgttaagggacactactg

SEQ ID NO: 19994 - RNA, 20 nt, synthetic construct
  source 1..20: mol_type = other RNA
attgttacttacatgctttg

SEQ ID NO: 19995 - RNA, 20 nt, synthetic construct
  source 1..20: mol_type = other RNA
atttaaaccaaaatatgtcc

SEQ ID NO: 19996 - RNA, 20 nt, synthetic construct
  source 1..20: mol_type = other RNA
atttagaggagaaagttcag

SEQ ID NO: 19997 - RNA, 20 nt, synthetic construct
  source 1..20: mol_type = other RNA
atttaggagtaaaggtgcat

SEQ ID NO: 19998 - RNA, 20 nt, synthetic construct
  source 1..20: mol_type = other RNA
atttatttccttagaacaag

SEQ ID NO: 19999 - RNA, 20 nt, synthetic construct
  source 1..20: mol_type = other RNA
atttcatcttaaactgcaaa

SEQ ID NO: 20000 - RNA, 20 nt, synthetic construct
  source 1..20: mol_type = other RNA
atttccttagaacaaggaca

SEQ ID NO: 20001 - RNA, 20 nt, synthetic construct
  source 1..20: mol_type = other RNA
atttgaaaatgggttcatta

SEQ ID NO: 20002 - RNA, 20 nt, synthetic construct
  source 1..20: mol_type = other RNA
atttgcagtttaagatgaaa

SEQ ID NO: 20003 - RNA, 20 nt, synthetic construct
  source 1..20: mol_type = other RNA
atttgcataaccacagtagg

SEQ ID NO: 20004 - RNA, 20 nt, synthetic construct
  source 1..20: mol_type = other RNA
atttgctgattttgacaacc

SEQ ID NO: 20005 - RNA, 20 nt, synthetic construct
  source 1..20: mol_type = other RNA
atttgcttttcagtttttgg

SEQ ID NO: 20006 - RNA, 20 nt, synthetic construct
  source 1..20: mol_type = other RNA
atttggccaaaagttaatga

SEQ ID NO: 20007 - RNA, 20 nt, synthetic construct
  source 1..20: mol_type = other RNA
atttgggtttgtctgatggt

SEQ ID NO: 20008 - RNA, 20 nt, synthetic construct
  source 1..20: mol_type = other RNA
atttgtccttgttctaagga

SEQ ID NO: 20009 - RNA, 20 nt, synthetic construct
  source 1..20: mol_type = other RNA
attttagagggtatacggag

SEQ ID NO: 20010 - RNA, 20 nt, synthetic construct
  source 1..20: mol_type = other RNA
attttatagaggctgaggtg

SEQ ID NO: 20011 - RNA, 20 nt, synthetic construct
  source 1..20: mol_type = other RNA
attttctctttagtgacaga

SEQ ID NO: 20012 - RNA, 20 nt, synthetic construct
  source 1..20: mol_type = other RNA
attttgacaaccctactgtg

SEQ ID NO: 20013 - RNA, 20 nt, synthetic construct
  source 1..20: mol_type = other RNA
attttggtttaaatcccagc

SEQ ID NO: 20014 - RNA, 20 nt, synthetic construct
  source 1..20: mol_type = other RNA
caaaaactgaaaagcaaatt

SEQ ID NO: 20015 - RNA, 20 nt, synthetic construct
  source 1..20: mol_type = other RNA
caaaacaccagccttgtact

SEQ ID NO: 20016 - RNA, 20 nt, synthetic construct
  source 1..20: mol_type = other RNA
caaaagctgatctgggattg

SEQ ID NO: 20017 - RNA, 20 nt, synthetic construct
  source 1..20: mol_type = other RNA
caaaagttaatgactttggc

SEQ ID NO: 20018 - RNA, 20 nt, synthetic construct
  source 1..20: mol_type = other RNA
caaaatatgtccaactgcaa

SEQ ID NO: 20019 - RNA, 20 nt, synthetic construct
  source 1..20: mol_type = other RNA
caaaatcagcaaatctaata

SEQ ID NO: 20020 - RNA, 20 nt, synthetic construct
  source 1..20: mol_type = other RNA
caaacccaaattgagagaca

SEQ ID NO: 20021 - RNA, 20 nt, synthetic construct
  source 1..20: mol_type = other RNA
caaactgaactttctcctct

SEQ ID NO: 20022 - RNA, 20 nt, synthetic construct
  source 1..20: mol_type = other RNA
caaagaatacaggccaaggc

SEQ ID NO: 20023 - RNA, 20 nt, synthetic construct
  source 1..20: mol_type = other RNA
caaagcatgtaagtaacaat

SEQ ID NO: 20024 - RNA, 20 nt, synthetic construct
  source 1..20: mol_type = other RNA
caaagccagctaaagtcaca

SEQ ID NO: 20025 - RNA, 20 nt, synthetic construct
  source 1..20: mol_type = other RNA
caaagtcattaacttttggc

SEQ ID NO: 20026 - RNA, 20 nt, synthetic construct
  source 1..20: mol_type = other RNA
caaagttaacatcgccagaa

SEQ ID NO: 20027 - RNA, 20 nt, synthetic construct
  source 1..20: mol_type = other RNA
caaataccaaagccagctaa

SEQ ID NO: 20028 - RNA, 20 nt, synthetic construct
  source 1..20: mol_type = other RNA
caaatctaatattgatacac

SEQ ID NO: 20029 - RNA, 20 nt, synthetic construct
  source 1..20: mol_type = other RNA
caaattgagagacagtttac

SEQ ID NO: 20030 - RNA, 20 nt, synthetic construct
  source 1..20: mol_type = other RNA
caaattgcttgctcactata

SEQ ID NO: 20031 - RNA, 20 nt, synthetic construct
  source 1..20: mol_type = other RNA
caaatttgcataaccacagt

SEQ ID NO: 20032 - RNA, 20 nt, synthetic construct
  source 1..20: mol_type = other RNA
caaatttgtccttgttctaa

SEQ ID NO: 20033 - RNA, 20 nt, synthetic construct
  source 1..20: mol_type = other RNA
caaattttatagaggctgag

SEQ ID NO: 20034 - RNA, 20 nt, synthetic construct
  source 1..20: mol_type = other RNA
caacacctcagacttcatct

SEQ ID NO: 20035 - RNA, 20 nt, synthetic construct
  source 1..20: mol_type = other RNA
caaccctactgtggttatgc

SEQ ID NO: 20036 - RNA, 20 nt, synthetic construct
  source 1..20: mol_type = other RNA
caactctcccctttttattg

SEQ ID NO: 20037 - RNA, 20 nt, synthetic construct
  source 1..20: mol_type = other RNA
caactgatcaaagttaacat

SEQ ID NO: 20038 - RNA, 20 nt, synthetic construct
  source 1..20: mol_type = other RNA
caactgcaaagcatgtaagt

SEQ ID NO: 20039 - RNA, 20 nt, synthetic construct
  source 1..20: mol_type = other RNA
caactgtcgggtgataaaca

SEQ ID NO: 20040 - RNA, 20 nt, synthetic construct
  source 1..20: mol_type = other RNA
caagaatgcctcatctgaat

SEQ ID NO: 20041 - RNA, 20 nt, synthetic construct
  source 1..20: mol_type = other RNA
caagagagaaagacagactg

SEQ ID NO: 20042 - RNA, 20 nt, synthetic construct
  source 1..20: mol_type = other RNA
caagatgcaatcccagatca

SEQ ID NO: 20043 - RNA, 20 nt, synthetic construct
  source 1..20: mol_type = other RNA
caagcaatttgcttttcagt

SEQ ID NO: 20044 - RNA, 20 nt, synthetic construct
  source 1..20: mol_type = other RNA
caagcccttaggcaggtgct

SEQ ID NO: 20045 - RNA, 20 nt, synthetic construct
  source 1..20: mol_type = other RNA
caagcgatgatgattttctc

SEQ ID NO: 20046 - RNA, 20 nt, synthetic construct
  source 1..20: mol_type = other RNA
caaggaatcacatatagtga

SEQ ID NO: 20047 - RNA, 20 nt, synthetic construct
  source 1..20: mol_type = other RNA
caaggacaaatttgcataac

SEQ ID NO: 20048 - RNA, 20 nt, synthetic construct
  source 1..20: mol_type = other RNA
caaggccctgtgactttagc

SEQ ID NO: 20049 - RNA, 20 nt, synthetic construct
  source 1..20: mol_type = other RNA
caaggctgcagtgagttatt

SEQ ID NO: 20050 - RNA, 20 nt, synthetic construct
  source 1..20: mol_type = other RNA
caaggctggtgttttgtaaa

SEQ ID NO: 20051 - RNA, 20 nt, synthetic construct
  source 1..20: mol_type = other RNA
caagtgatccttccacctca

SEQ ID NO: 20052 - RNA, 20 nt, synthetic construct
  source 1..20: mol_type = other RNA
caagttactattattccctt

SEQ ID NO: 20053 - RNA, 20 nt, synthetic construct
  source 1..20: mol_type = other RNA
caataaaaaggggagagttg

SEQ ID NO: 20054 - RNA, 20 nt, synthetic construct
  source 1..20: mol_type = other RNA
caatattagatttgctgatt

SEQ ID NO: 20055 - RNA, 20 nt, synthetic construct
  source 1..20: mol_type = other RNA
caatattcctgccaagaatg

SEQ ID NO: 20056 - RNA, 20 nt, synthetic construct
  source 1..20: mol_type = other RNA
caatcccagatcagcttttg

SEQ ID NO: 20057 - RNA, 20 nt, synthetic construct
  source 1..20: mol_type = other RNA
caatcctatgaccaatctca

SEQ ID NO: 20058 - RNA, 20 nt, synthetic construct
  source 1..20: mol_type = other RNA
caatcctcctgcctgagcct

SEQ ID NO: 20059 - RNA, 20 nt, synthetic construct
  source 1..20: mol_type = other RNA
caatccttatgattatttag

SEQ ID NO: 20060 - RNA, 20 nt, synthetic construct
  source 1..20: mol_type = other RNA
caatctcatctacaacttta

SEQ ID NO: 20061 - RNA, 20 nt, synthetic construct
  source 1..20: mol_type = other RNA
caatgtcacaagagagaaag

SEQ ID NO: 20062 - RNA, 20 nt, synthetic construct
  source 1..20: mol_type = other RNA
caatttgcttttcagttttt

SEQ ID NO: 20063 - RNA, 20 nt, synthetic construct
  source 1..20: mol_type = other RNA
caatttgggtttgtctgatg

SEQ ID NO: 20064 - RNA, 20 nt, synthetic construct
  source 1..20: mol_type = other RNA
caattttagagggtatacgg

SEQ ID NO: 20065 - RNA, 20 nt, synthetic construct
  source 1..20: mol_type = other RNA
cacaacacctcgctattttt

SEQ ID NO: 20066 - RNA, 20 nt, synthetic construct
  source 1..20: mol_type = other RNA
cacaagagagaaagacagac

SEQ ID NO: 20067 - RNA, 20 nt, synthetic construct
  source 1..20: mol_type = other RNA
cacaagcccttaggcaggtg

SEQ ID NO: 20068 - RNA, 20 nt, synthetic construct
  source 1..20: mol_type = other RNA
cacacactcacttctgcaat

SEQ ID NO: 20069 - RNA, 20 nt, synthetic construct
  source 1..20: mol_type = other RNA
cacactcacttctgcaatat

SEQ ID NO: 20070 - RNA, 20 nt, synthetic construct
  source 1..20: mol_type = other RNA
cacagggccttggcctgtat

SEQ ID NO: 20071 - RNA, 20 nt, synthetic construct
  source 1..20: mol_type = other RNA
cacagtagggttgtcaaaat

SEQ ID NO: 20072 - RNA, 20 nt, synthetic construct
  source 1..20: mol_type = other RNA
cacatatagtgagcaagcaa

SEQ ID NO: 20073 - RNA, 20 nt, synthetic construct
  source 1..20: mol_type = other RNA
cacatgccatctgtcccctt

SEQ ID NO: 20074 - RNA, 20 nt, synthetic construct
  source 1..20: mol_type = other RNA
caccaaactgaactttctcc

SEQ ID NO: 20075 - RNA, 20 nt, synthetic construct
  source 1..20: mol_type = other RNA
caccaacacctcagacttca

SEQ ID NO: 20076 - RNA, 20 nt, synthetic construct
  source 1..20: mol_type = other RNA
caccaactgatcaaagttaa

SEQ ID NO: 20077 - RNA, 20 nt, synthetic construct
  source 1..20: mol_type = other RNA
caccaccttcaccaactgat

SEQ ID NO: 20078 - RNA, 20 nt, synthetic construct
  source 1..20: mol_type = other RNA
caccagccttgtactctgct

SEQ ID NO: 20079 - RNA, 20 nt, synthetic construct
  source 1..20: mol_type = other RNA
cacccgacagttgttaatct

SEQ ID NO: 20080 - RNA, 20 nt, synthetic construct
  source 1..20: mol_type = other RNA
cacctcagacttcatctcct

SEQ ID NO: 20081 - RNA, 20 nt, synthetic construct
  source 1..20: mol_type = other RNA
cacctcagcctctataaaat

SEQ ID NO: 20082 - RNA, 20 nt, synthetic construct
  source 1..20: mol_type = other RNA
cacctccgtataccctctaa

SEQ ID NO: 20083 - RNA, 20 nt, synthetic construct
  source 1..20: mol_type = other RNA
caccttcaccaactgatcaa

SEQ ID NO: 20084 - RNA, 20 nt, synthetic construct
  source 1..20: mol_type = other RNA
cacctttactcctaaataat

SEQ ID NO: 20085 - RNA, 20 nt, synthetic construct
  source 1..20: mol_type = other RNA
cacgcccatagtcccagtta

SEQ ID NO: 20086 - RNA, 20 nt, synthetic construct
  source 1..20: mol_type = other RNA
cactaaaactagtgcatttc

SEQ ID NO: 20087 - RNA, 20 nt, synthetic construct
  source 1..20: mol_type = other RNA
cactaaagagaaaatcatca

SEQ ID NO: 20088 - RNA, 20 nt, synthetic construct
  source 1..20: mol_type = other RNA
cactaactgccaaagtcatt

SEQ ID NO: 20089 - RNA, 20 nt, synthetic construct
  source 1..20: mol_type = other RNA
cactactgggacaatttttt

SEQ ID NO: 20090 - RNA, 20 nt, synthetic construct
  source 1..20: mol_type = other RNA
cactagttttagtgcttcat

SEQ ID NO: 20091 - RNA, 20 nt, synthetic construct
  source 1..20: mol_type = other RNA
cactatacaatcctatgacc

SEQ ID NO: 20092 - RNA, 20 nt, synthetic construct
  source 1..20: mol_type = other RNA
cactatatgtgattccttgt

SEQ ID NO: 20093 - RNA, 20 nt, synthetic construct
  source 1..20: mol_type = other RNA
cactcacttctgcaatattc

SEQ ID NO: 20094 - RNA, 20 nt, synthetic construct
  source 1..20: mol_type = other RNA
cactgaagacacacactcac

SEQ ID NO: 20095 - RNA, 20 nt, synthetic construct
  source 1..20: mol_type = other RNA
cactgtcaagttactattat

SEQ ID NO: 20096 - RNA, 20 nt, synthetic construct
  source 1..20: mol_type = other RNA
cacttctgcaatattcctgc

SEQ ID NO: 20097 - RNA, 20 nt, synthetic construct
  source 1..20: mol_type = other RNA
cacttgagtttgaaaccagc

SEQ ID NO: 20098 - RNA, 20 nt, synthetic construct
  source 1..20: mol_type = other RNA
cagaaaggggacagatggca

SEQ ID NO: 20099 - RNA, 20 nt, synthetic construct
  source 1..20: mol_type = other RNA
cagaagtgagtgtgtgtctt

SEQ ID NO: 20100 - RNA, 20 nt, synthetic construct
  source 1..20: mol_type = other RNA
cagacaaacccaaattgaga

SEQ ID NO: 20101 - RNA, 20 nt, synthetic construct
  source 1..20: mol_type = other RNA
cagacaccaccttcaccaac

SEQ ID NO: 20102 - RNA, 20 nt, synthetic construct
  source 1..20: mol_type = other RNA
cagactgaagaaggctcgag

SEQ ID NO: 20103 - RNA, 20 nt, synthetic construct
  source 1..20: mol_type = other RNA
cagactgaagagctgatcca

SEQ ID NO: 20104 - RNA, 20 nt, synthetic construct
  source 1..20: mol_type = other RNA
cagacttcatctcctaagcc

SEQ ID NO: 20105 - RNA, 20 nt, synthetic construct
  source 1..20: mol_type = other RNA
cagagaaggaaaccgaggct

SEQ ID NO: 20106 - RNA, 20 nt, synthetic construct
  source 1..20: mol_type = other RNA
cagagtacaaggctggtgtt

SEQ ID NO: 20107 - RNA, 20 nt, synthetic construct
  source 1..20: mol_type = other RNA
cagatcagcttttgcattaa

SEQ ID NO: 20108 - RNA, 20 nt, synthetic construct
  source 1..20: mol_type = other RNA
cagatgaagcactaaaacta

SEQ ID NO: 20109 - RNA, 20 nt, synthetic construct
  source 1..20: mol_type = other RNA
cagatgaggcattcttggca

SEQ ID NO: 20110 - RNA, 20 nt, synthetic construct
  source 1..20: mol_type = other RNA
cagatggcatgtgcctctcg

SEQ ID NO: 20111 - RNA, 20 nt, synthetic construct
  source 1..20: mol_type = other RNA
cagcaaatctaatattgata

SEQ ID NO: 20112 - RNA, 20 nt, synthetic construct
  source 1..20: mol_type = other RNA
cagcaccaaactgaactttc

SEQ ID NO: 20113 - RNA, 20 nt, synthetic construct
  source 1..20: mol_type = other RNA
cagcctctataaaatttgaa

SEQ ID NO: 20114 - RNA, 20 nt, synthetic construct
  source 1..20: mol_type = other RNA
cagccttgtactctgcttaa

SEQ ID NO: 20115 - RNA, 20 nt, synthetic construct
  source 1..20: mol_type = other RNA
cagctaaagtcacagggcct

SEQ ID NO: 20116 - RNA, 20 nt, synthetic construct
  source 1..20: mol_type = other RNA
cagctccaccaacacctcag

SEQ ID NO: 20117 - RNA, 20 nt, synthetic construct
  source 1..20: mol_type = other RNA
cagctcttcagtctgtcttt

SEQ ID NO: 20118 - RNA, 20 nt, synthetic construct
  source 1..20: mol_type = other RNA
cagcttttgcattaatctcg

SEQ ID NO: 20119 - RNA, 20 nt, synthetic construct
  source 1..20: mol_type = other RNA
caggaatattgcagaagtga

SEQ ID NO: 20120 - RNA, 20 nt, synthetic construct
  source 1..20: mol_type = other RNA
caggcaggaggattgcttga

SEQ ID NO: 20121 - RNA, 20 nt, synthetic construct
  source 1..20: mol_type = other RNA
caggccaaggccctgtgact

SEQ ID NO: 20122 - RNA, 20 nt, synthetic construct
  source 1..20: mol_type = other RNA
caggctggagtgcagtggtg

SEQ ID NO: 20123 - RNA, 20 nt, synthetic construct
  source 1..20: mol_type = other RNA
caggctggtttcaaactcaa

SEQ ID NO: 20124 - RNA, 20 nt, synthetic construct
  source 1..20: mol_type = other RNA
cagggataatagtagcacct

SEQ ID NO: 20125 - RNA, 20 nt, synthetic construct
  source 1..20: mol_type = other RNA
cagggccttggcctgtattc

SEQ ID NO: 20126 - RNA, 20 nt, synthetic construct
  source 1..20: mol_type = other RNA
caggtctctccactgtcaag

SEQ ID NO: 20127 - RNA, 20 nt, synthetic construct
  source 1..20: mol_type = other RNA
caggtgctactattatccct

SEQ ID NO: 20128 - RNA, 20 nt, synthetic construct
  source 1..20: mol_type = other RNA
cagtagggttgtcaaaatca

SEQ ID NO: 20129 - RNA, 20 nt, synthetic construct
  source 1..20: mol_type = other RNA
cagtagtgtcccttaacaat

SEQ ID NO: 20130 - RNA, 20 nt, synthetic construct
  source 1..20: mol_type = other RNA
cagtatttatttccttagaa

SEQ ID NO: 20131 - RNA, 20 nt, synthetic construct
  source 1..20: mol_type = other RNA
cagtctggatcagctcttca

SEQ ID NO: 20132 - RNA, 20 nt, synthetic construct
  source 1..20: mol_type = other RNA
cagtctgtctttctctcttg

SEQ ID NO: 20133 - RNA, 20 nt, synthetic construct
  source 1..20: mol_type = other RNA
cagtgagttattattccacc

SEQ ID NO: 20134 - RNA, 20 nt, synthetic construct
  source 1..20: mol_type = other RNA
cagtgcatcttatcgagagg

SEQ ID NO: 20135 - RNA, 20 nt, synthetic construct
  source 1..20: mol_type = other RNA
cagtggagagacctggcaga

SEQ ID NO: 20136 - RNA, 20 nt, synthetic construct
  source 1..20: mol_type = other RNA
cagtggtggaataataactc

SEQ ID NO: 20137 - RNA, 20 nt, synthetic construct
  source 1..20: mol_type = other RNA
cagttactcggaaggctcag

SEQ ID NO: 20138 - RNA, 20 nt, synthetic construct
  source 1..20: mol_type = other RNA
cagttagtgtttttatccat

SEQ ID NO: 20139 - RNA, 20 nt, synthetic construct
  source 1..20: mol_type = other RNA
cagttggacatattttggtt

SEQ ID NO: 20140 - RNA, 20 nt, synthetic construct
  source 1..20: mol_type = other RNA
cagttggtgaaggtggtgtc

SEQ ID NO: 20141 - RNA, 20 nt, synthetic construct
  source 1..20: mol_type = other RNA
cagttgttaatctcttttta

SEQ ID NO: 20142 - RNA, 20 nt, synthetic construct
  source 1..20: mol_type = other RNA
cagtttaagatgaaatgcac

SEQ ID NO: 20143 - RNA, 20 nt, synthetic construct
  source 1..20: mol_type = other RNA
cagtttacaaaacaccagcc

SEQ ID NO: 20144 - RNA, 20 nt, synthetic construct
  source 1..20: mol_type = other RNA
cagtttggtgctggtatatc

SEQ ID NO: 20145 - RNA, 20 nt, synthetic construct
  source 1..20: mol_type = other RNA
cagtttttggtcaatcctta

SEQ ID NO: 20146 - RNA, 20 nt, synthetic construct
  source 1..20: mol_type = other RNA
cataaccacagtagggttgt

SEQ ID NO: 20147 - RNA, 20 nt, synthetic construct
  source 1..20: mol_type = other RNA
cataagatataccagcacca

SEQ ID NO: 20148 - RNA, 20 nt, synthetic construct
  source 1..20: mol_type = other RNA
cataagcatttgaaaatggg

SEQ ID NO: 20149 - RNA, 20 nt, synthetic construct
  source 1..20: mol_type = other RNA
cataaggattgaccaaaaac

SEQ ID NO: 20150 - RNA, 20 nt, synthetic construct
  source 1..20: mol_type = other RNA
cataatgaacccattttcaa

SEQ ID NO: 20151 - RNA, 20 nt, synthetic construct
  source 1..20: mol_type = other RNA
cataggattgtatagtgtat

SEQ ID NO: 20152 - RNA, 20 nt, synthetic construct
  source 1..20: mol_type = other RNA
catagtcccagttactcgga

SEQ ID NO: 20153 - RNA, 20 nt, synthetic construct
  source 1..20: mol_type = other RNA
catatagtgagcaagcaatt

SEQ ID NO: 20154 - RNA, 20 nt, synthetic construct
  source 1..20: mol_type = other RNA
catattaagcagagtacaag

SEQ ID NO: 20155 - RNA, 20 nt, synthetic construct
  source 1..20: mol_type = other RNA
catattttggtttaaatccc

SEQ ID NO: 20156 - RNA, 20 nt, synthetic construct
  source 1..20: mol_type = other RNA
catcagacaaacccaaattg

SEQ ID NO: 20157 - RNA, 20 nt, synthetic construct
  source 1..20: mol_type = other RNA
catcatcgcttggcatggat

SEQ ID NO: 20158 - RNA, 20 nt, synthetic construct
  source 1..20: mol_type = other RNA
catcgccagaaaggggacag

SEQ ID NO: 20159 - RNA, 20 nt, synthetic construct
  source 1..20: mol_type = other RNA
catcgcttggcatggataaa

SEQ ID NO: 20160 - RNA, 20 nt, synthetic construct
  source 1..20: mol_type = other RNA
catctacaactttattcaaa

SEQ ID NO: 20161 - RNA, 20 nt, synthetic construct
  source 1..20: mol_type = other RNA
catctcctaagcctcggttt

SEQ ID NO: 20162 - RNA, 20 nt, synthetic construct
  source 1..20: mol_type = other RNA
catctgaatctaatctcgag

SEQ ID NO: 20163 - RNA, 20 nt, synthetic construct
  source 1..20: mol_type = other RNA
catctgtaaaactacttttt

SEQ ID NO: 20164 - RNA, 20 nt, synthetic construct
  source 1..20: mol_type = other RNA
catctgtcccctttctggcg

SEQ ID NO: 20165 - RNA, 20 nt, synthetic construct
  source 1..20: mol_type = other RNA
catcttaaactgcaaattat

SEQ ID NO: 20166 - RNA, 20 nt, synthetic construct
  source 1..20: mol_type = other RNA
catcttatcgagaggcacat

SEQ ID NO: 20167 - RNA, 20 nt, synthetic construct
  source 1..20: mol_type = other RNA
catcttggacctcaactctc

SEQ ID NO: 20168 - RNA, 20 nt, synthetic construct
  source 1..20: mol_type = other RNA
catgccaagcgatgatgatt

SEQ ID NO: 20169 - RNA, 20 nt, synthetic construct
  source 1..20: mol_type = other RNA
catgccatctgtcccctttc

SEQ ID NO: 20170 - RNA, 20 nt, synthetic construct
  source 1..20: mol_type = other RNA
catgctttgcagttggacat

SEQ ID NO: 20171 - RNA, 20 nt, synthetic construct
  source 1..20: mol_type = other RNA
catggataaaaacactaact

SEQ ID NO: 20172 - RNA, 20 nt, synthetic construct
  source 1..20: mol_type = other RNA
catgtaagtaacaattttag

SEQ ID NO: 20173 - RNA, 20 nt, synthetic construct
  source 1..20: mol_type = other RNA
catgtgcctctcgataagat

SEQ ID NO: 20174 - RNA, 20 nt, synthetic construct
  source 1..20: mol_type = other RNA
cattaacttttggccaaata

SEQ ID NO: 20175 - RNA, 20 nt, synthetic construct
  source 1..20: mol_type = other RNA
cattaatctcgagccttctt

SEQ ID NO: 20176 - RNA, 20 nt, synthetic construct
  source 1..20: mol_type = other RNA
cattatgcacctttactcct

SEQ ID NO: 20177 - RNA, 20 nt, synthetic construct
  source 1..20: mol_type = other RNA
cattcttggcaggaatattg

SEQ ID NO: 20178 - RNA, 20 nt, synthetic construct
  source 1..20: mol_type = other RNA
cattgacatattaagcagag

SEQ ID NO: 20179 - RNA, 20 nt, synthetic construct
  source 1..20: mol_type = other RNA
catttcatcttaaactgcaa

SEQ ID NO: 20180 - RNA, 20 nt, synthetic construct
  source 1..20: mol_type = other RNA
catttgaaaatgggttcatt

SEQ ID NO: 20181 - RNA, 20 nt, synthetic construct
  source 1..20: mol_type = other RNA
cattttcaaatgcttatgaa

SEQ ID NO: 20182 - RNA, 20 nt, synthetic construct
  source 1..20: mol_type = other RNA
ccaaaaactgaaaagcaaat

SEQ ID NO: 20183 - RNA, 20 nt, synthetic construct
  source 1..20: mol_type = other RNA
ccaaaagttaatgactttgg

SEQ ID NO: 20184 - RNA, 20 nt, synthetic construct
  source 1..20: mol_type = other RNA
ccaaaatatgtccaactgca

SEQ ID NO: 20185 - RNA, 20 nt, synthetic construct
  source 1..20: mol_type = other RNA
ccaaactgaactttctcctc

SEQ ID NO: 20186 - RNA, 20 nt, synthetic construct
  source 1..20: mol_type = other RNA
ccaaagccagctaaagtcac

SEQ ID NO: 20187 - RNA, 20 nt, synthetic construct
  source 1..20: mol_type = other RNA
ccaaagtcattaacttttgg

SEQ ID NO: 20188 - RNA, 20 nt, synthetic construct
  source 1..20: mol_type = other RNA
ccaaataccaaagccagcta

SEQ ID NO: 20189 - RNA, 20 nt, synthetic construct
  source 1..20: mol_type = other RNA
ccaaattgagagacagttta

SEQ ID NO: 20190 - RNA, 20 nt, synthetic construct
  source 1..20: mol_type = other RNA
ccaacacctcagacttcatc

SEQ ID NO: 20191 - RNA, 20 nt, synthetic construct
  source 1..20: mol_type = other RNA
ccaactgatcaaagttaaca

SEQ ID NO: 20192 - RNA, 20 nt, synthetic construct
  source 1..20: mol_type = other RNA
ccaactgcaaagcatgtaag

SEQ ID NO: 20193 - RNA, 20 nt, synthetic construct
  source 1..20: mol_type = other RNA
ccaagaatgcctcatctgaa

SEQ ID NO: 20194 - RNA, 20 nt, synthetic construct
  source 1..20: mol_type = other RNA
ccaagatgcaatcccagatc

SEQ ID NO: 20195 - RNA, 20 nt, synthetic construct
  source 1..20: mol_type = other RNA
ccaagcgatgatgattttct

SEQ ID NO: 20196 - RNA, 20 nt, synthetic construct
  source 1..20: mol_type = other RNA
ccaaggccctgtgactttag

SEQ ID NO: 20197 - RNA, 20 nt, synthetic construct
  source 1..20: mol_type = other RNA
ccaatctcatctacaacttt

SEQ ID NO: 20198 - RNA, 20 nt, synthetic construct
  source 1..20: mol_type = other RNA
ccacaacacctcgctatttt

SEQ ID NO: 20199 - RNA, 20 nt, synthetic construct
  source 1..20: mol_type = other RNA
ccacagtagggttgtcaaaa

SEQ ID NO: 20200 - RNA, 20 nt, synthetic construct
  source 1..20: mol_type = other RNA
ccaccaacacctcagacttc

SEQ ID NO: 20201 - RNA, 20 nt, synthetic construct
  source 1..20: mol_type = other RNA
ccacctcagcctctataaaa

SEQ ID NO: 20202 - RNA, 20 nt, synthetic construct
  source 1..20: mol_type = other RNA
ccaccttcaccaactgatca

SEQ ID NO: 20203 - RNA, 20 nt, synthetic construct
  source 1..20: mol_type = other RNA
ccactgtcaagttactatta

SEQ ID NO: 20204 - RNA, 20 nt, synthetic construct
  source 1..20: mol_type = other RNA
ccagaaaggggacagatggc

SEQ ID NO: 20205 - RNA, 20 nt, synthetic construct
  source 1..20: mol_type = other RNA
ccagactgaagaaggctcga

SEQ ID NO: 20206 - RNA, 20 nt, synthetic construct
  source 1..20: mol_type = other RNA
ccagatcagcttttgcatta

SEQ ID NO: 20207 - RNA, 20 nt, synthetic construct
  source 1..20: mol_type = other RNA
ccagcaccaaactgaacttt

SEQ ID NO: 20208 - RNA, 20 nt, synthetic construct
  source 1..20: mol_type = other RNA
ccagccttgtactctgctta

SEQ ID NO: 20209 - RNA, 20 nt, synthetic construct
  source 1..20: mol_type = other RNA
ccagctaaagtcacagggcc

SEQ ID NO: 20210 - RNA, 20 nt, synthetic construct
  source 1..20: mol_type = other RNA
ccagctccaccaacacctca

SEQ ID NO: 20211 - RNA, 20 nt, synthetic construct
  source 1..20: mol_type = other RNA
ccaggtctctccactgtcaa

SEQ ID NO: 20212 - RNA, 20 nt, synthetic construct
  source 1..20: mol_type = other RNA
ccagtagtgtcccttaacaa

SEQ ID NO: 20213 - RNA, 20 nt, synthetic construct
  source 1..20: mol_type = other RNA
ccagttactcggaaggctca

SEQ ID NO: 20214 - RNA, 20 nt, synthetic construct
  source 1..20: mol_type = other RNA
ccatagtcccagttactcgg

SEQ ID NO: 20215 - RNA, 20 nt, synthetic construct
  source 1..20: mol_type = other RNA
ccatctgtcccctttctggc

SEQ ID NO: 20216 - RNA, 20 nt, synthetic construct
  source 1..20: mol_type = other RNA
ccatgccaagcgatgatgat

SEQ ID NO: 20217 - RNA, 20 nt, synthetic construct
  source 1..20: mol_type = other RNA
ccattttcaaatgcttatga

SEQ ID NO: 20218 - RNA, 20 nt, synthetic construct
  source 1..20: mol_type = other RNA
cccaaattgagagacagttt

SEQ ID NO: 20219 - RNA, 20 nt, synthetic construct
  source 1..20: mol_type = other RNA
cccagatcagcttttgcatt

SEQ ID NO: 20220 - RNA, 20 nt, synthetic construct
  source 1..20: mol_type = other RNA
cccagctccaccaacacctc

SEQ ID NO: 20221 - RNA, 20 nt, synthetic construct
  source 1..20: mol_type = other RNA
cccaggctggtttcaaactc

SEQ ID NO: 20222 - RNA, 20 nt, synthetic construct
  source 1..20: mol_type = other RNA
cccagtagtgtcccttaaca

SEQ ID NO: 20223 - RNA, 20 nt, synthetic construct
  source 1..20: mol_type = other RNA
cccagttactcggaaggctc

SEQ ID NO: 20224 - RNA, 20 nt, synthetic construct
  source 1..20: mol_type = other RNA
cccatagtcccagttactcg

SEQ ID NO: 20225 - RNA, 20 nt, synthetic construct
  source 1..20: mol_type = other RNA
cccattttcaaatgcttatg

SEQ ID NO: 20226 - RNA, 20 nt, synthetic construct
  source 1..20: mol_type = other RNA
cccctttctggcgatgttaa

SEQ ID NO: 20227 - RNA, 20 nt, synthetic construct
  source 1..20: mol_type = other RNA
cccctttttattgttaaggg

SEQ ID NO: 20228 - RNA, 20 nt, synthetic construct
  source 1..20: mol_type = other RNA
cccgacagttgttaatctct

SEQ ID NO: 20229 - RNA, 20 nt, synthetic construct
  source 1..20: mol_type = other RNA
cccggactcaagcaatcctc

SEQ ID NO: 20230 - RNA, 20 nt, synthetic construct
  source 1..20: mol_type = other RNA
ccctaagtaacaaggaatca

SEQ ID NO: 20231 - RNA, 20 nt, synthetic construct
  source 1..20: mol_type = other RNA
ccctactgtggttatgcaaa

SEQ ID NO: 20232 - RNA, 20 nt, synthetic construct
  source 1..20: mol_type = other RNA
ccctctaaaattgttactta

SEQ ID NO: 20233 - RNA, 20 nt, synthetic construct
  source 1..20: mol_type = other RNA
ccctgtctcaaaacgaaaaa

SEQ ID NO: 20234 - RNA, 20 nt, synthetic construct
  source 1..20: mol_type = other RNA
ccctgtgactttagctggct

SEQ ID NO: 20235 - RNA, 20 nt, synthetic construct
  source 1..20: mol_type = other RNA
ccctgttttacagagaagga

SEQ ID NO: 20236 - RNA, 20 nt, synthetic construct
  source 1..20: mol_type = other RNA
cccttaacaataaaaagggg

SEQ ID NO: 20237 - RNA, 20 nt, synthetic construct
  source 1..20: mol_type = other RNA
cccttaggcaggtgctacta

SEQ ID NO: 20238 - RNA, 20 nt, synthetic construct
  source 1..20: mol_type = other RNA
ccctttataatttgcagttt

SEQ ID NO: 20239 - RNA, 20 nt, synthetic construct
  source 1..20: mol_type = other RNA
ccctttctggcgatgttaac

SEQ ID NO: 20240 - RNA, 20 nt, synthetic construct
  source 1..20: mol_type = other RNA
ccctttttattgttaaggga

SEQ ID NO: 20241 - RNA, 20 nt, synthetic construct
  source 1..20: mol_type = other RNA
ccgacagttgttaatctctt

SEQ ID NO: 20242 - RNA, 20 nt, synthetic construct
  source 1..20: mol_type = other RNA
ccgaggcttaggagatgaag

SEQ ID NO: 20243 - RNA, 20 nt, synthetic construct
  source 1..20: mol_type = other RNA
ccgagtaactgggactatgg

SEQ ID NO: 20244 - RNA, 20 nt, synthetic construct
  source 1..20: mol_type = other RNA
ccggactcaagcaatcctcc

SEQ ID NO: 20245 - RNA, 20 nt, synthetic construct
  source 1..20: mol_type = other RNA
ccgtataccctctaaaattg

SEQ ID NO: 20246 - RNA, 20 nt, synthetic construct
  source 1..20: mol_type = other RNA
ccgtctctacaaaaagtagg

SEQ ID NO: 20247 - RNA, 20 nt, synthetic construct
  source 1..20: mol_type = other RNA
cctaagcctcggtttccttc

SEQ ID NO: 20248 - RNA, 20 nt, synthetic construct
  source 1..20: mol_type = other RNA
cctaagtaacaaggaatcac

SEQ ID NO: 20249 - RNA, 20 nt, synthetic construct
  source 1..20: mol_type = other RNA
cctactgtggttatgcaaat

SEQ ID NO: 20250 - RNA, 20 nt, synthetic construct
  source 1..20: mol_type = other RNA
cctactttttgtagagacgg

SEQ ID NO: 20251 - RNA, 20 nt, synthetic construct
  source 1..20: mol_type = other RNA
cctatgaccaatctcatcta

SEQ ID NO: 20252 - RNA, 20 nt, synthetic construct
  source 1..20: mol_type = other RNA
cctcaactctccccttttta

SEQ ID NO: 20253 - RNA, 20 nt, synthetic construct
  source 1..20: mol_type = other RNA
cctcagacttcatctcctaa

SEQ ID NO: 20254 - RNA, 20 nt, synthetic construct
  source 1..20: mol_type = other RNA
cctcagcctctataaaattt

SEQ ID NO: 20255 - RNA, 20 nt, synthetic construct
  source 1..20: mol_type = other RNA
cctcatctgaatctaatctc

SEQ ID NO: 20256 - RNA, 20 nt, synthetic construct
  source 1..20: mol_type = other RNA
cctccgtataccctctaaaa

SEQ ID NO: 20257 - RNA, 20 nt, synthetic construct
  source 1..20: mol_type = other RNA
cctcctgcctgagccttccg

SEQ ID NO: 20258 - RNA, 20 nt, synthetic construct
  source 1..20: mol_type = other RNA
cctcggtttccttctctgta

SEQ ID NO: 20259 - RNA, 20 nt, synthetic construct
  source 1..20: mol_type = other RNA
cctctaaaattgttacttac

SEQ ID NO: 20260 - RNA, 20 nt, synthetic construct
  source 1..20: mol_type = other RNA
cctctaaataatcataagga

SEQ ID NO: 20261 - RNA, 20 nt, synthetic construct
  source 1..20: mol_type = other RNA
cctctcgataagatgcactg

SEQ ID NO: 20262 - RNA, 20 nt, synthetic construct
  source 1..20: mol_type = other RNA
cctgagccttccgagtaact

SEQ ID NO: 20263 - RNA, 20 nt, synthetic construct
  source 1..20: mol_type = other RNA
cctgccaagaatgcctcatc

SEQ ID NO: 20264 - RNA, 20 nt, synthetic construct
  source 1..20: mol_type = other RNA
cctgcctgagccttccgagt

SEQ ID NO: 20265 - RNA, 20 nt, synthetic construct
  source 1..20: mol_type = other RNA
cctggcagacaccaccttca

SEQ ID NO: 20266 - RNA, 20 nt, synthetic construct
  source 1..20: mol_type = other RNA
cctgtattctttgttaaaaa

SEQ ID NO: 20267 - RNA, 20 nt, synthetic construct
  source 1..20: mol_type = other RNA
cctgtctcaaaacgaaaaaa

SEQ ID NO: 20268 - RNA, 20 nt, synthetic construct
  source 1..20: mol_type = other RNA
cctgtgactttagctggctt

SEQ ID NO: 20269 - RNA, 20 nt, synthetic construct
  source 1..20: mol_type = other RNA
cctgttttacagagaaggaa

SEQ ID NO: 20270 - RNA, 20 nt, synthetic construct
  source 1..20: mol_type = other RNA
ccttaacaataaaaagggga

SEQ ID NO: 20271 - RNA, 20 nt, synthetic construct
  source 1..20: mol_type = other RNA
ccttagaacaaggacaaatt

SEQ ID NO: 20272 - RNA, 20 nt, synthetic construct
  source 1..20: mol_type = other RNA
ccttaggcaggtgctactat

SEQ ID NO: 20273 - RNA, 20 nt, synthetic construct
  source 1..20: mol_type = other RNA
ccttatgattatttagagga

SEQ ID NO: 20274 - RNA, 20 nt, synthetic construct
  source 1..20: mol_type = other RNA
ccttcaccaactgatcaaag

SEQ ID NO: 20275 - RNA, 20 nt, synthetic construct
  source 1..20: mol_type = other RNA
ccttccacctcagcctctat

SEQ ID NO: 20276 - RNA, 20 nt, synthetic construct
  source 1..20: mol_type = other RNA
ccttccgagtaactgggact

SEQ ID NO: 20277 - RNA, 20 nt, synthetic construct
  source 1..20: mol_type = other RNA
ccttctctgtaaaacaggga

SEQ ID NO: 20278 - RNA, 20 nt, synthetic construct
  source 1..20: mol_type = other RNA
ccttcttcagtctggatcag

SEQ ID NO: 20279 - RNA, 20 nt, synthetic construct
  source 1..20: mol_type = other RNA
ccttggcctgtattctttgt

SEQ ID NO: 20280 - RNA, 20 nt, synthetic construct
  source 1..20: mol_type = other RNA
ccttgtactctgcttaatat

SEQ ID NO: 20281 - RNA, 20 nt, synthetic construct
  source 1..20: mol_type = other RNA
ccttgttacttagggtcacc

SEQ ID NO: 20282 - RNA, 20 nt, synthetic construct
  source 1..20: mol_type = other RNA
ccttgttctaaggaaataaa

SEQ ID NO: 20283 - RNA, 20 nt, synthetic construct
  source 1..20: mol_type = other RNA
cctttactcctaaataattc

SEQ ID NO: 20284 - RNA, 20 nt, synthetic construct
  source 1..20: mol_type = other RNA
cctttataatttgcagttta

SEQ ID NO: 20285 - RNA, 20 nt, synthetic construct
  source 1..20: mol_type = other RNA
cctttctggcgatgttaact

SEQ ID NO: 20286 - RNA, 20 nt, synthetic construct
  source 1..20: mol_type = other RNA
cctttttattgttaagggac

SEQ ID NO: 20287 - RNA, 20 nt, synthetic construct
  source 1..20: mol_type = other RNA
cgacagttgttaatctcttt

SEQ ID NO: 20288 - RNA, 20 nt, synthetic construct
  source 1..20: mol_type = other RNA
cgagaggcacatgccatctg

SEQ ID NO: 20289 - RNA, 20 nt, synthetic construct
  source 1..20: mol_type = other RNA
cgagattaatgcaaaagctg

SEQ ID NO: 20290 - RNA, 20 nt, synthetic construct
  source 1..20: mol_type = other RNA
cgagattagattcagatgag

SEQ ID NO: 20291 - RNA, 20 nt, synthetic construct
  source 1..20: mol_type = other RNA
cgagccttcttcagtctgga

SEQ ID NO: 20292 - RNA, 20 nt, synthetic construct
  source 1..20: mol_type = other RNA
cgaggcttaggagatgaagt

SEQ ID NO: 20293 - RNA, 20 nt, synthetic construct
  source 1..20: mol_type = other RNA
cgaggtgttgtggtacacgc

SEQ ID NO: 20294 - RNA, 20 nt, synthetic construct
  source 1..20: mol_type = other RNA
cgagtaactgggactatggg

SEQ ID NO: 20295 - RNA, 20 nt, synthetic construct
  source 1..20: mol_type = other RNA
cgagtataaccatcagacaa

SEQ ID NO: 20296 - RNA, 20 nt, synthetic construct
  source 1..20: mol_type = other RNA
cgataagatgcactgaagac

SEQ ID NO: 20297 - RNA, 20 nt, synthetic construct
  source 1..20: mol_type = other RNA
cgatgatgattttctcttta

SEQ ID NO: 20298 - RNA, 20 nt, synthetic construct
  source 1..20: mol_type = other RNA
cgatgttaactttgatcagt

SEQ ID NO: 20299 - RNA, 20 nt, synthetic construct
  source 1..20: mol_type = other RNA
cgccagaaaggggacagatg

SEQ ID NO: 20300 - RNA, 20 nt, synthetic construct
  source 1..20: mol_type = other RNA
cgcccatagtcccagttact

SEQ ID NO: 20301 - RNA, 20 nt, synthetic construct
  source 1..20: mol_type = other RNA
cgcttggcatggataaaaac

SEQ ID NO: 20302 - RNA, 20 nt, synthetic construct
  source 1..20: mol_type = other RNA
cggactcaagcaatcctcct

SEQ ID NO: 20303 - RNA, 20 nt, synthetic construct
  source 1..20: mol_type = other RNA
cggaggtgaccctaagtaac

SEQ ID NO: 20304 - RNA, 20 nt, synthetic construct
  source 1..20: mol_type = other RNA
cgggagttcaaggctgcagt

SEQ ID NO: 20305 - RNA, 20 nt, synthetic construct
  source 1..20: mol_type = other RNA
cgggtgataaacataagata

SEQ ID NO: 20306 - RNA, 20 nt, synthetic construct
  source 1..20: mol_type = other RNA
cggtttccttctctgtaaaa

SEQ ID NO: 20307 - RNA, 20 nt, synthetic construct
  source 1..20: mol_type = other RNA
cgtataccctctaaaattgt

SEQ ID NO: 20308 - RNA, 20 nt, synthetic construct
  source 1..20: mol_type = other RNA
cgtctctacaaaaagtagga

SEQ ID NO: 20309 - RNA, 20 nt, synthetic construct
  source 1..20: mol_type = other RNA
cgtgtaccacaacacctcgc

SEQ ID NO: 20310 - RNA, 20 nt, synthetic construct
  source 1..20: mol_type = other RNA
cgttttgagacagggtctcg

SEQ ID NO: 20311 - RNA, 20 nt, synthetic construct
  source 1..20: mol_type = other RNA
ctaaaactagtgcatttcat

SEQ ID NO: 20312 - RNA, 20 nt, synthetic construct
  source 1..20: mol_type = other RNA
ctaaaattgttacttacatg

SEQ ID NO: 20313 - RNA, 20 nt, synthetic construct
  source 1..20: mol_type = other RNA
ctaaagagaaaatcatcatc

SEQ ID NO: 20314 - RNA, 20 nt, synthetic construct
  source 1..20: mol_type = other RNA
ctaaagtcacagggccttgg

SEQ ID NO: 20315 - RNA, 20 nt, synthetic construct
  source 1..20: mol_type = other RNA
ctaaataatcataaggattg

SEQ ID NO: 20316 - RNA, 20 nt, synthetic construct
  source 1..20: mol_type = other RNA
ctaactgccaaagtcattaa

SEQ ID NO: 20317 - RNA, 20 nt, synthetic construct
  source 1..20: mol_type = other RNA
ctaagcctcggtttccttct

SEQ ID NO: 20318 - RNA, 20 nt, synthetic construct
  source 1..20: mol_type = other RNA
ctaaggaaataaatactgaa

SEQ ID NO: 20319 - RNA, 20 nt, synthetic construct
  source 1..20: mol_type = other RNA
ctaagtaacaaggaatcaca

SEQ ID NO: 20320 - RNA, 20 nt, synthetic construct
  source 1..20: mol_type = other RNA
ctaatattgatacactatac

SEQ ID NO: 20321 - RNA, 20 nt, synthetic construct
  source 1..20: mol_type = other RNA
ctaatctcgagtataaccat

SEQ ID NO: 20322 - RNA, 20 nt, synthetic construct
  source 1..20: mol_type = other RNA
ctacaaaaagtaggaaaaaa

SEQ ID NO: 20323 - RNA, 20 nt, synthetic construct
  source 1..20: mol_type = other RNA
ctactattatccctgtttta

SEQ ID NO: 20324 - RNA, 20 nt, synthetic construct
  source 1..20: mol_type = other RNA
ctactgtggttatgcaaatt

SEQ ID NO: 20325 - RNA, 20 nt, synthetic construct
  source 1..20: mol_type = other RNA
ctactttttgtagagacggg

SEQ ID NO: 20326 - RNA, 20 nt, synthetic construct
  source 1..20: mol_type = other RNA
ctagtgcatttcatcttaaa

SEQ ID NO: 20327 - RNA, 20 nt, synthetic construct
  source 1..20: mol_type = other RNA
ctagttttagtgcttcatct

SEQ ID NO: 20328 - RNA, 20 nt, synthetic construct
  source 1..20: mol_type = other RNA
ctatacaatcctatgaccaa

SEQ ID NO: 20329 - RNA, 20 nt, synthetic construct
  source 1..20: mol_type = other RNA
ctatatgtgattccttgtta

SEQ ID NO: 20330 - RNA, 20 nt, synthetic construct
  source 1..20: mol_type = other RNA
ctatgaccaatctcatctac

SEQ ID NO: 20331 - RNA, 20 nt, synthetic construct
  source 1..20: mol_type = other RNA
ctatgggcgtgtaccacaac

SEQ ID NO: 20332 - RNA, 20 nt, synthetic construct
  source 1..20: mol_type = other RNA
ctattatccctgttttacag

SEQ ID NO: 20333 - RNA, 20 nt, synthetic construct
  source 1..20: mol_type = other RNA
ctcaactctcccctttttat

SEQ ID NO: 20334 - RNA, 20 nt, synthetic construct
  source 1..20: mol_type = other RNA
ctcaatttgggtttgtctga

SEQ ID NO: 20335 - RNA, 20 nt, synthetic construct
  source 1..20: mol_type = other RNA
ctcactatatgtgattcctt

SEQ ID NO: 20336 - RNA, 20 nt, synthetic construct
  source 1..20: mol_type = other RNA
ctcacttctgcaatattcct

SEQ ID NO: 20337 - RNA, 20 nt, synthetic construct
  source 1..20: mol_type = other RNA
ctcagacttcatctcctaag

SEQ ID NO: 20338 - RNA, 20 nt, synthetic construct
  source 1..20: mol_type = other RNA
ctcagcctctataaaatttg

SEQ ID NO: 20339 - RNA, 20 nt, synthetic construct
  source 1..20: mol_type = other RNA
ctcaggcaggaggattgctt

SEQ ID NO: 20340 - RNA, 20 nt, synthetic construct
  source 1..20: mol_type = other RNA
ctcatctacaactttattca

SEQ ID NO: 20341 - RNA, 20 nt, synthetic construct
  source 1..20: mol_type = other RNA
ctcatctgaatctaatctcg

SEQ ID NO: 20342 - RNA, 20 nt, synthetic construct
  source 1..20: mol_type = other RNA
ctccaccaacacctcagact

SEQ ID NO: 20343 - RNA, 20 nt, synthetic construct
  source 1..20: mol_type = other RNA
ctccactgtcaagttactat

SEQ ID NO: 20344 - RNA, 20 nt, synthetic construct
  source 1..20: mol_type = other RNA
ctcccctttttattgttaag

SEQ ID NO: 20345 - RNA, 20 nt, synthetic construct
  source 1..20: mol_type = other RNA
ctccgtataccctctaaaat

SEQ ID NO: 20346 - RNA, 20 nt, synthetic construct
  source 1..20: mol_type = other RNA
ctcctaaataattcagtatt

SEQ ID NO: 20347 - RNA, 20 nt, synthetic construct
  source 1..20: mol_type = other RNA
ctcctaagcctcggtttcct

SEQ ID NO: 20348 - RNA, 20 nt, synthetic construct
  source 1..20: mol_type = other RNA
ctcctctaaataatcataag

SEQ ID NO: 20349 - RNA, 20 nt, synthetic construct
  source 1..20: mol_type = other RNA
ctcctgcctgagccttccga

SEQ ID NO: 20350 - RNA, 20 nt, synthetic construct
  source 1..20: mol_type = other RNA
ctcgagattaatgcaaaagc

SEQ ID NO: 20351 - RNA, 20 nt, synthetic construct
  source 1..20: mol_type = other RNA
ctcgagattagattcagatg

SEQ ID NO: 20352 - RNA, 20 nt, synthetic construct
  source 1..20: mol_type = other RNA
ctcgagccttcttcagtctg

SEQ ID NO: 20353 - RNA, 20 nt, synthetic construct
  source 1..20: mol_type = other RNA
ctcgagtataaccatcagac

SEQ ID NO: 20354 - RNA, 20 nt, synthetic construct
  source 1..20: mol_type = other RNA
ctcgataagatgcactgaag

SEQ ID NO: 20355 - RNA, 20 nt, synthetic construct
  source 1..20: mol_type = other RNA
ctcggtttccttctctgtaa

SEQ ID NO: 20356 - RNA, 20 nt, synthetic construct
  source 1..20: mol_type = other RNA
ctctaaaattgttacttaca

SEQ ID NO: 20357 - RNA, 20 nt, synthetic construct
  source 1..20: mol_type = other RNA
ctctaaataatcataaggat

SEQ ID NO: 20358 - RNA, 20 nt, synthetic construct
  source 1..20: mol_type = other RNA
ctctacaaaaagtaggaaaa

SEQ ID NO: 20359 - RNA, 20 nt, synthetic construct
  source 1..20: mol_type = other RNA
ctctcaatttgggtttgtct

SEQ ID NO: 20360 - RNA, 20 nt, synthetic construct
  source 1..20: mol_type = other RNA
ctctccactgtcaagttact

SEQ ID NO: 20361 - RNA, 20 nt, synthetic construct
  source 1..20: mol_type = other RNA
ctctcccctttttattgtta

SEQ ID NO: 20362 - RNA, 20 nt, synthetic construct
  source 1..20: mol_type = other RNA
ctctcgataagatgcactga

SEQ ID NO: 20363 - RNA, 20 nt, synthetic construct
  source 1..20: mol_type = other RNA
ctctcttgtgacattgacat

SEQ ID NO: 20364 - RNA, 20 nt, synthetic construct
  source 1..20: mol_type = other RNA
ctctgcttaatatgtcaatg

SEQ ID NO: 20365 - RNA, 20 nt, synthetic construct
  source 1..20: mol_type = other RNA
ctctgtaaaacagggataat

SEQ ID NO: 20366 - RNA, 20 nt, synthetic construct
  source 1..20: mol_type = other RNA
ctcttcagtctgtctttctc

SEQ ID NO: 20367 - RNA, 20 nt, synthetic construct
  source 1..20: mol_type = other RNA
ctcttgtgacattgacatat

SEQ ID NO: 20368 - RNA, 20 nt, synthetic construct
  source 1..20: mol_type = other RNA
ctctttagtgacagacattt

SEQ ID NO: 20369 - RNA, 20 nt, synthetic construct
  source 1..20: mol_type = other RNA
ctctttttaacaaagaatac

SEQ ID NO: 20370 - RNA, 20 nt, synthetic construct
  source 1..20: mol_type = other RNA
ctgaaaagcaaattgcttgc

SEQ ID NO: 20371 - RNA, 20 nt, synthetic construct
  source 1..20: mol_type = other RNA
ctgaactttctcctctaaat

SEQ ID NO: 20372 - RNA, 20 nt, synthetic construct
  source 1..20: mol_type = other RNA
ctgaagaaggctcgagatta

SEQ ID NO: 20373 - RNA, 20 nt, synthetic construct
  source 1..20: mol_type = other RNA
ctgaagacacacactcactt

SEQ ID NO: 20374 - RNA, 20 nt, synthetic construct
  source 1..20: mol_type = other RNA
ctgaagagctgatccagact

SEQ ID NO: 20375 - RNA, 20 nt, synthetic construct
  source 1..20: mol_type = other RNA
ctgaatctaatctcgagtat

SEQ ID NO: 20376 - RNA, 20 nt, synthetic construct
  source 1..20: mol_type = other RNA
ctgaattatttaggagtaaa

SEQ ID NO: 20377 - RNA, 20 nt, synthetic construct
  source 1..20: mol_type = other RNA
ctgagccttccgagtaactg

SEQ ID NO: 20378 - RNA, 20 nt, synthetic construct
  source 1..20: mol_type = other RNA
ctgagcgagaccctgtctca

SEQ ID NO: 20379 - RNA, 20 nt, synthetic construct
  source 1..20: mol_type = other RNA
ctgaggtggaaggatcactt

SEQ ID NO: 20380 - RNA, 20 nt, synthetic construct
  source 1..20: mol_type = other RNA
ctgaggtgttggtggagctg

SEQ ID NO: 20381 - RNA, 20 nt, synthetic construct
  source 1..20: mol_type = other RNA
ctgatcaaagttaacatcgc

SEQ ID NO: 20382 - RNA, 20 nt, synthetic construct
  source 1..20: mol_type = other RNA
ctgatccagactgaagaagg

SEQ ID NO: 20383 - RNA, 20 nt, synthetic construct
  source 1..20: mol_type = other RNA
ctgatctgggattgcatctt

SEQ ID NO: 20384 - RNA, 20 nt, synthetic construct
  source 1..20: mol_type = other RNA
ctgatggttatactcgagat

SEQ ID NO: 20385 - RNA, 20 nt, synthetic construct
  source 1..20: mol_type = other RNA
ctgattttgacaaccctact

SEQ ID NO: 20386 - RNA, 20 nt, synthetic construct
  source 1..20: mol_type = other RNA
ctgcaaagcatgtaagtaac

SEQ ID NO: 20387 - RNA, 20 nt, synthetic construct
  source 1..20: mol_type = other RNA
ctgcaaattataaagggaat

SEQ ID NO: 20388 - RNA, 20 nt, synthetic construct
  source 1..20: mol_type = other RNA
ctgcaatattcctgccaaga

SEQ ID NO: 20389 - RNA, 20 nt, synthetic construct
  source 1..20: mol_type = other RNA
ctgcagtgagttattattcc

SEQ ID NO: 20390 - RNA, 20 nt, synthetic construct
  source 1..20: mol_type = other RNA
ctgccaaagtcattaacttt

SEQ ID NO: 20391 - RNA, 20 nt, synthetic construct
  source 1..20: mol_type = other RNA
ctgccaagaatgcctcatct

SEQ ID NO: 20392 - RNA, 20 nt, synthetic construct
  source 1..20: mol_type = other RNA
ctgccaggtctctccactgt

SEQ ID NO: 20393 - RNA, 20 nt, synthetic construct
  source 1..20: mol_type = other RNA
ctgcctgagccttccgagta

SEQ ID NO: 20394 - RNA, 20 nt, synthetic construct
  source 1..20: mol_type = other RNA
ctgcttaatatgtcaatgtc

SEQ ID NO: 20395 - RNA, 20 nt, synthetic construct
  source 1..20: mol_type = other RNA
ctggagtgcagtggtggaat

SEQ ID NO: 20396 - RNA, 20 nt, synthetic construct
  source 1..20: mol_type = other RNA
ctggatcagctcttcagtct

SEQ ID NO: 20397 - RNA, 20 nt, synthetic construct
  source 1..20: mol_type = other RNA
ctggcagacaccaccttcac

SEQ ID NO: 20398 - RNA, 20 nt, synthetic construct
  source 1..20: mol_type = other RNA
ctggcgatgttaactttgat

SEQ ID NO: 20399 - RNA, 20 nt, synthetic construct
  source 1..20: mol_type = other RNA
ctggctttggtatttggcca

SEQ ID NO: 20400 - RNA, 20 nt, synthetic construct
  source 1..20: mol_type = other RNA
ctgggactatgggcgtgtac

SEQ ID NO: 20401 - RNA, 20 nt, synthetic construct
  source 1..20: mol_type = other RNA
ctgggattgcatcttggacc

SEQ ID NO: 20402 - RNA, 20 nt, synthetic construct
  source 1..20: mol_type = other RNA
ctgggatttaaaccaaaata

SEQ ID NO: 20403 - RNA, 20 nt, synthetic construct
  source 1..20: mol_type = other RNA
ctggtatatcttatgtttat

SEQ ID NO: 20404 - RNA, 20 nt, synthetic construct
  source 1..20: mol_type = other RNA
ctggtgttttgtaaactgtc

SEQ ID NO: 20405 - RNA, 20 nt, synthetic construct
  source 1..20: mol_type = other RNA
ctggtttcaaactcaagtga

SEQ ID NO: 20406 - RNA, 20 nt, synthetic construct
  source 1..20: mol_type = other RNA
ctgtaaaacagggataatag

SEQ ID NO: 20407 - RNA, 20 nt, synthetic construct
  source 1..20: mol_type = other RNA
ctgtattctttgttaaaaag

SEQ ID NO: 20408 - RNA, 20 nt, synthetic construct
  source 1..20: mol_type = other RNA
ctgtcaagttactattattc

SEQ ID NO: 20409 - RNA, 20 nt, synthetic construct
  source 1..20: mol_type = other RNA
ctgtcactaaagagaaaatc

SEQ ID NO: 20410 - RNA, 20 nt, synthetic construct
  source 1..20: mol_type = other RNA
ctgtcccctttctggcgatg

SEQ ID NO: 20411 - RNA, 20 nt, synthetic construct
  source 1..20: mol_type = other RNA
ctgtcgggtgataaacataa

SEQ ID NO: 20412 - RNA, 20 nt, synthetic construct
  source 1..20: mol_type = other RNA
ctgtctctcaatttgggttt

SEQ ID NO: 20413 - RNA, 20 nt, synthetic construct
  source 1..20: mol_type = other RNA
ctgtctttctctcttgtgac

SEQ ID NO: 20414 - RNA, 20 nt, synthetic construct
  source 1..20: mol_type = other RNA
ctgtgactttagctggcttt

SEQ ID NO: 20415 - RNA, 20 nt, synthetic construct
  source 1..20: mol_type = other RNA
ctgtggttatgcaaatttgt

SEQ ID NO: 20416 - RNA, 20 nt, synthetic construct
  source 1..20: mol_type = other RNA
ctgttttacagagaaggaaa

SEQ ID NO: 20417 - RNA, 20 nt, synthetic construct
  source 1..20: mol_type = other RNA
cttaacaataaaaaggggag

SEQ ID NO: 20418 - RNA, 20 nt, synthetic construct
  source 1..20: mol_type = other RNA
cttaatatgtcaatgtcaca

SEQ ID NO: 20419 - RNA, 20 nt, synthetic construct
  source 1..20: mol_type = other RNA
cttacatgctttgcagttgg

SEQ ID NO: 20420 - RNA, 20 nt, synthetic construct
  source 1..20: mol_type = other RNA
cttagaacaaggacaaattt

SEQ ID NO: 20421 - RNA, 20 nt, synthetic construct
  source 1..20: mol_type = other RNA
cttaggagatgaagtctgag

SEQ ID NO: 20422 - RNA, 20 nt, synthetic construct
  source 1..20: mol_type = other RNA
cttaggcaggtgctactatt

SEQ ID NO: 20423 - RNA, 20 nt, synthetic construct
  source 1..20: mol_type = other RNA
cttagggtcacctccgtata

SEQ ID NO: 20424 - RNA, 20 nt, synthetic construct
  source 1..20: mol_type = other RNA
cttatcgagaggcacatgcc

SEQ ID NO: 20425 - RNA, 20 nt, synthetic construct
  source 1..20: mol_type = other RNA
cttatgattatttagaggag

SEQ ID NO: 20426 - RNA, 20 nt, synthetic construct
  source 1..20: mol_type = other RNA
cttatgtttatcacccgaca

SEQ ID NO: 20427 - RNA, 20 nt, synthetic construct
  source 1..20: mol_type = other RNA
cttcaccaactgatcaaagt

SEQ ID NO: 20428 - RNA, 20 nt, synthetic construct
  source 1..20: mol_type = other RNA
cttcagtctggatcagctct

SEQ ID NO: 20429 - RNA, 20 nt, synthetic construct
  source 1..20: mol_type = other RNA
cttcagtctgtctttctctc

SEQ ID NO: 20430 - RNA, 20 nt, synthetic construct
  source 1..20: mol_type = other RNA
cttcagtgcatcttatcgag

SEQ ID NO: 20431 - RNA, 20 nt, synthetic construct
  source 1..20: mol_type = other RNA
cttcatctcctaagcctcgg

SEQ ID NO: 20432 - RNA, 20 nt, synthetic construct
  source 1..20: mol_type = other RNA
cttcatctgtaaaactactt

SEQ ID NO: 20433 - RNA, 20 nt, synthetic construct
  source 1..20: mol_type = other RNA
cttccacctcagcctctata

SEQ ID NO: 20434 - RNA, 20 nt, synthetic construct
  source 1..20: mol_type = other RNA
cttccgagtaactgggacta

SEQ ID NO: 20435 - RNA, 20 nt, synthetic construct
  source 1..20: mol_type = other RNA
cttctctgtaaaacagggat

SEQ ID NO: 20436 - RNA, 20 nt, synthetic construct
  source 1..20: mol_type = other RNA
cttctgcaatattcctgcca

SEQ ID NO: 20437 - RNA, 20 nt, synthetic construct
  source 1..20: mol_type = other RNA
cttcttcagtctggatcagc

SEQ ID NO: 20438 - RNA, 20 nt, synthetic construct
  source 1..20: mol_type = other RNA
cttgacagtggagagacctg

SEQ ID NO: 20439 - RNA, 20 nt, synthetic construct
  source 1..20: mol_type = other RNA
cttgctcactatatgtgatt

SEQ ID NO: 20440 - RNA, 20 nt, synthetic construct
  source 1..20: mol_type = other RNA
cttggacctcaactctcccc

SEQ ID NO: 20441 - RNA, 20 nt, synthetic construct
  source 1..20: mol_type = other RNA
cttggcaggaatattgcaga

SEQ ID NO: 20442 - RNA, 20 nt, synthetic construct
  source 1..20: mol_type = other RNA
cttggcatggataaaaacac

SEQ ID NO: 20443 - RNA, 20 nt, synthetic construct
  source 1..20: mol_type = other RNA
cttggcctgtattctttgtt

SEQ ID NO: 20444 - RNA, 20 nt, synthetic construct
  source 1..20: mol_type = other RNA
cttgtactctgcttaatatg

SEQ ID NO: 20445 - RNA, 20 nt, synthetic construct
  source 1..20: mol_type = other RNA
cttgtgacattgacatatta

SEQ ID NO: 20446 - RNA, 20 nt, synthetic construct
  source 1..20: mol_type = other RNA
cttgttacttagggtcacct

SEQ ID NO: 20447 - RNA, 20 nt, synthetic construct
  source 1..20: mol_type = other RNA
cttgttctaaggaaataaat

SEQ ID NO: 20448 - RNA, 20 nt, synthetic construct
  source 1..20: mol_type = other RNA
ctttactcctaaataattca

SEQ ID NO: 20449 - RNA, 20 nt, synthetic construct
  source 1..20: mol_type = other RNA
ctttagctggctttggtatt

SEQ ID NO: 20450 - RNA, 20 nt, synthetic construct
  source 1..20: mol_type = other RNA
ctttagtgacagacattttt

SEQ ID NO: 20451 - RNA, 20 nt, synthetic construct
  source 1..20: mol_type = other RNA
ctttctcctctaaataatca

SEQ ID NO: 20452 - RNA, 20 nt, synthetic construct
  source 1..20: mol_type = other RNA
ctttctctcttgtgacattg

SEQ ID NO: 20453 - RNA, 20 nt, synthetic construct
  source 1..20: mol_type = other RNA
ctttctggcgatgttaactt

SEQ ID NO: 20454 - RNA, 20 nt, synthetic construct
  source 1..20: mol_type = other RNA
ctttgatcagttggtgaagg

SEQ ID NO: 20455 - RNA, 20 nt, synthetic construct
  source 1..20: mol_type = other RNA
ctttgcagttggacatattt

SEQ ID NO: 20456 - RNA, 20 nt, synthetic construct
  source 1..20: mol_type = other RNA
ctttggcagttagtgttttt

SEQ ID NO: 20457 - RNA, 20 nt, synthetic construct
  source 1..20: mol_type = other RNA
ctttggtatttggccaaaag

SEQ ID NO: 20458 - RNA, 20 nt, synthetic construct
  source 1..20: mol_type = other RNA
cttttcagtttttggtcaat

SEQ ID NO: 20459 - RNA, 20 nt, synthetic construct
  source 1..20: mol_type = other RNA
cttttgcattaatctcgagc

SEQ ID NO: 20460 - RNA, 20 nt, synthetic construct
  source 1..20: mol_type = other RNA
cttttggccaaataccaaag

SEQ ID NO: 20461 - RNA, 20 nt, synthetic construct
  source 1..20: mol_type = other RNA
ctttttaacaaagaatacag

SEQ ID NO: 20462 - RNA, 20 nt, synthetic construct
  source 1..20: mol_type = other RNA
ctttttattgttaagggaca

SEQ ID NO: 20463 - RNA, 20 nt, synthetic construct
  source 1..20: mol_type = other RNA
gaaaagcaaattgcttgctc

SEQ ID NO: 20464 - RNA, 20 nt, synthetic construct
  source 1..20: mol_type = other RNA
gaaaatcatcatcgcttggc

SEQ ID NO: 20465 - RNA, 20 nt, synthetic construct
  source 1..20: mol_type = other RNA
gaaaatgggttcattatgca

SEQ ID NO: 20466 - RNA, 20 nt, synthetic construct
  source 1..20: mol_type = other RNA
gaaaccgaggcttaggagat

SEQ ID NO: 20467 - RNA, 20 nt, synthetic construct
  source 1..20: mol_type = other RNA
gaaagacagactgaagagct

SEQ ID NO: 20468 - RNA, 20 nt, synthetic construct
  source 1..20: mol_type = other RNA
gaaaggggacagatggcatg

SEQ ID NO: 20469 - RNA, 20 nt, synthetic construct
  source 1..20: mol_type = other RNA
gaaagttcagtttggtgctg

SEQ ID NO: 20470 - RNA, 20 nt, synthetic construct
  source 1..20: mol_type = other RNA
gaaatgcactagttttagtg

SEQ ID NO: 20471 - RNA, 20 nt, synthetic construct
  source 1..20: mol_type = other RNA
gaacaaggacaaatttgcat

SEQ ID NO: 20472 - RNA, 20 nt, synthetic construct
  source 1..20: mol_type = other RNA
gaacccattttcaaatgctt

SEQ ID NO: 20473 - RNA, 20 nt, synthetic construct
  source 1..20: mol_type = other RNA
gaactttctcctctaaataa

SEQ ID NO: 20474 - RNA, 20 nt, synthetic construct
  source 1..20: mol_type = other RNA
gaagaaggctcgagattaat

SEQ ID NO: 20475 - RNA, 20 nt, synthetic construct
  source 1..20: mol_type = other RNA
gaagacacacactcacttct

SEQ ID NO: 20476 - RNA, 20 nt, synthetic construct
  source 1..20: mol_type = other RNA
gaagagctgatccagactga

SEQ ID NO: 20477 - RNA, 20 nt, synthetic construct
  source 1..20: mol_type = other RNA
gaagcactaaaactagtgca

SEQ ID NO: 20478 - RNA, 20 nt, synthetic construct
  source 1..20: mol_type = other RNA
gaaggaaaccgaggcttagg

SEQ ID NO: 20479 - RNA, 20 nt, synthetic construct
  source 1..20: mol_type = other RNA
gaaggatcacttgagtttga

SEQ ID NO: 20480 - RNA, 20 nt, synthetic construct
  source 1..20: mol_type = other RNA
gaaggctcgagattaatgca

SEQ ID NO: 20481 - RNA, 20 nt, synthetic construct
  source 1..20: mol_type = other RNA
gaaggtggtgtctgccaggt

SEQ ID NO: 20482 - RNA, 20 nt, synthetic construct
  source 1..20: mol_type = other RNA
gaagtctgaggtgttggtgg

SEQ ID NO: 20483 - RNA, 20 nt, synthetic construct
  source 1..20: mol_type = other RNA
gaagtgagtgtgtgtcttca

SEQ ID NO: 20484 - RNA, 20 nt, synthetic construct
  source 1..20: mol_type = other RNA
gaataaagttgtagatgaga

SEQ ID NO: 20485 - RNA, 20 nt, synthetic construct
  source 1..20: mol_type = other RNA
gaataataactcactgcagc

SEQ ID NO: 20486 - RNA, 20 nt, synthetic construct
  source 1..20: mol_type = other RNA
gaataatagtaacttgacag

SEQ ID NO: 20487 - RNA, 20 nt, synthetic construct
  source 1..20: mol_type = other RNA
gaatacaggccaaggccctg

SEQ ID NO: 20488 - RNA, 20 nt, synthetic construct
  source 1..20: mol_type = other RNA
gaatattgcagaagtgagtg

SEQ ID NO: 20489 - RNA, 20 nt, synthetic construct
  source 1..20: mol_type = other RNA
gaatcacatatagtgagcaa

SEQ ID NO: 20490 - RNA, 20 nt, synthetic construct
  source 1..20: mol_type = other RNA
gaatctaatctcgagtataa

SEQ ID NO: 20491 - RNA, 20 nt, synthetic construct
  source 1..20: mol_type = other RNA
gaatgcctcatctgaatcta

SEQ ID NO: 20492 - RNA, 20 nt, synthetic construct
  source 1..20: mol_type = other RNA
gaattatttaggagtaaagg

SEQ ID NO: 20493 - RNA, 20 nt, synthetic construct
  source 1..20: mol_type = other RNA
gacaaacccaaattgagaga

SEQ ID NO: 20494 - RNA, 20 nt, synthetic construct
  source 1..20: mol_type = other RNA
gacaaatttgcataaccaca

SEQ ID NO: 20495 - RNA, 20 nt, synthetic construct
  source 1..20: mol_type = other RNA
gacaaccctactgtggttat

SEQ ID NO: 20496 - RNA, 20 nt, synthetic construct
  source 1..20: mol_type = other RNA
gacacacactcacttctgca

SEQ ID NO: 20497 - RNA, 20 nt, synthetic construct
  source 1..20: mol_type = other RNA
gacaccaccttcaccaactg

SEQ ID NO: 20498 - RNA, 20 nt, synthetic construct
  source 1..20: mol_type = other RNA
gacactactgggacaatttt

SEQ ID NO: 20499 - RNA, 20 nt, synthetic construct
  source 1..20: mol_type = other RNA
gacagactgaagagctgatc

SEQ ID NO: 20500 - RNA, 20 nt, synthetic construct
  source 1..20: mol_type = other RNA
gacagatggcatgtgcctct

SEQ ID NO: 20501 - RNA, 20 nt, synthetic construct
  source 1..20: mol_type = other RNA
gacagtggagagacctggca

SEQ ID NO: 20502 - RNA, 20 nt, synthetic construct
  source 1..20: mol_type = other RNA
gacagttgttaatctctttt

SEQ ID NO: 20503 - RNA, 20 nt, synthetic construct
  source 1..20: mol_type = other RNA
gacagtttacaaaacaccag

SEQ ID NO: 20504 - RNA, 20 nt, synthetic construct
  source 1..20: mol_type = other RNA
gacatattaagcagagtaca

SEQ ID NO: 20505 - RNA, 20 nt, synthetic construct
  source 1..20: mol_type = other RNA
gacatattttggtttaaatc

SEQ ID NO: 20506 - RNA, 20 nt, synthetic construct
  source 1..20: mol_type = other RNA
gacattgacatattaagcag

SEQ ID NO: 20507 - RNA, 20 nt, synthetic construct
  source 1..20: mol_type = other RNA
gaccaaaaactgaaaagcaa

SEQ ID NO: 20508 - RNA, 20 nt, synthetic construct
  source 1..20: mol_type = other RNA
gaccaatctcatctacaact

SEQ ID NO: 20509 - RNA, 20 nt, synthetic construct
  source 1..20: mol_type = other RNA
gaccccgtctctacaaaaag

SEQ ID NO: 20510 - RNA, 20 nt, synthetic construct
  source 1..20: mol_type = other RNA
gaccctaagtaacaaggaat

SEQ ID NO: 20511 - RNA, 20 nt, synthetic construct
  source 1..20: mol_type = other RNA
gacctcaactctcccctttt

SEQ ID NO: 20512 - RNA, 20 nt, synthetic construct
  source 1..20: mol_type = other RNA
gacctggcagacaccacctt

SEQ ID NO: 20513 - RNA, 20 nt, synthetic construct
  source 1..20: mol_type = other RNA
gactatgggcgtgtaccaca

SEQ ID NO: 20514 - RNA, 20 nt, synthetic construct
  source 1..20: mol_type = other RNA
gactgaagaaggctcgagat

SEQ ID NO: 20515 - RNA, 20 nt, synthetic construct
  source 1..20: mol_type = other RNA
gactgaagagctgatccaga

SEQ ID NO: 20516 - RNA, 20 nt, synthetic construct
  source 1..20: mol_type = other RNA
gactgagcgagaccctgtct

SEQ ID NO: 20517 - RNA, 20 nt, synthetic construct
  source 1..20: mol_type = other RNA
gacttcatctcctaagcctc

SEQ ID NO: 20518 - RNA, 20 nt, synthetic construct
  source 1..20: mol_type = other RNA
gactttagctggctttggta

SEQ ID NO: 20519 - RNA, 20 nt, synthetic construct
  source 1..20: mol_type = other RNA
gactttggcagttagtgttt

SEQ ID NO: 20520 - RNA, 20 nt, synthetic construct
  source 1..20: mol_type = other RNA
gagaaaatcatcatcgcttg

SEQ ID NO: 20521 - RNA, 20 nt, synthetic construct
  source 1..20: mol_type = other RNA
gagaaagacagactgaagag

SEQ ID NO: 20522 - RNA, 20 nt, synthetic construct
  source 1..20: mol_type = other RNA
gagaaagttcagtttggtgc

SEQ ID NO: 20523 - RNA, 20 nt, synthetic construct
  source 1..20: mol_type = other RNA
gagaaggaaaccgaggctta

SEQ ID NO: 20524 - RNA, 20 nt, synthetic construct
  source 1..20: mol_type = other RNA
gagacagtttacaaaacacc

SEQ ID NO: 20525 - RNA, 20 nt, synthetic construct
  source 1..20: mol_type = other RNA
gagaccccgtctctacaaaa

SEQ ID NO: 20526 - RNA, 20 nt, synthetic construct
  source 1..20: mol_type = other RNA
gagacctggcagacaccacc

SEQ ID NO: 20527 - RNA, 20 nt, synthetic construct
  source 1..20: mol_type = other RNA
gagagaaagacagactgaag

SEQ ID NO: 20528 - RNA, 20 nt, synthetic construct
  source 1..20: mol_type = other RNA
gagagacagtttacaaaaca

SEQ ID NO: 20529 - RNA, 20 nt, synthetic construct
  source 1..20: mol_type = other RNA
gagagacctggcagacacca

SEQ ID NO: 20530 - RNA, 20 nt, synthetic construct
  source 1..20: mol_type = other RNA
gagaggcacatgccatctgt

SEQ ID NO: 20531 - RNA, 20 nt, synthetic construct
  source 1..20: mol_type = other RNA
gagagttgaggtccaagatg

SEQ ID NO: 20532 - RNA, 20 nt, synthetic construct
  source 1..20: mol_type = other RNA
gagatgaagtctgaggtgtt

SEQ ID NO: 20533 - RNA, 20 nt, synthetic construct
  source 1..20: mol_type = other RNA
gagattaacaactgtcgggt

SEQ ID NO: 20534 - RNA, 20 nt, synthetic construct
  source 1..20: mol_type = other RNA
gagattaatgcaaaagctga

SEQ ID NO: 20535 - RNA, 20 nt, synthetic construct
  source 1..20: mol_type = other RNA
gagattagattcagatgagg

SEQ ID NO: 20536 - RNA, 20 nt, synthetic construct
  source 1..20: mol_type = other RNA
gagattggtcataggattgt

SEQ ID NO: 20537 - RNA, 20 nt, synthetic construct
  source 1..20: mol_type = other RNA
gagcaagcaatttgcttttc

SEQ ID NO: 20538 - RNA, 20 nt, synthetic construct
  source 1..20: mol_type = other RNA
gagccttccgagtaactggg

SEQ ID NO: 20539 - RNA, 20 nt, synthetic construct
  source 1..20: mol_type = other RNA
gagccttcttcagtctggat

SEQ ID NO: 20540 - RNA, 20 nt, synthetic construct
  source 1..20: mol_type = other RNA
gagctgatccagactgaaga

SEQ ID NO: 20541 - RNA, 20 nt, synthetic construct
  source 1..20: mol_type = other RNA
gagctgggatttaaaccaaa

SEQ ID NO: 20542 - RNA, 20 nt, synthetic construct
  source 1..20: mol_type = other RNA
gaggagaaagttcagtttgg

SEQ ID NO: 20543 - RNA, 20 nt, synthetic construct
  source 1..20: mol_type = other RNA
gaggcacatgccatctgtcc

SEQ ID NO: 20544 - RNA, 20 nt, synthetic construct
  source 1..20: mol_type = other RNA
gaggcattcttggcaggaat

SEQ ID NO: 20545 - RNA, 20 nt, synthetic construct
  source 1..20: mol_type = other RNA
gaggcttaggagatgaagtc

SEQ ID NO: 20546 - RNA, 20 nt, synthetic construct
  source 1..20: mol_type = other RNA
gagggtatacggaggtgacc

SEQ ID NO: 20547 - RNA, 20 nt, synthetic construct
  source 1..20: mol_type = other RNA
gaggtccaagatgcaatccc

SEQ ID NO: 20548 - RNA, 20 nt, synthetic construct
  source 1..20: mol_type = other RNA
gaggtgaccctaagtaacaa

SEQ ID NO: 20549 - RNA, 20 nt, synthetic construct
  source 1..20: mol_type = other RNA
gaggtggaaggatcacttga

SEQ ID NO: 20550 - RNA, 20 nt, synthetic construct
  source 1..20: mol_type = other RNA
gaggtgttggtggagctggg

SEQ ID NO: 20551 - RNA, 20 nt, synthetic construct
  source 1..20: mol_type = other RNA
gaggtgttgtggtacacgcc

SEQ ID NO: 20552 - RNA, 20 nt, synthetic construct
  source 1..20: mol_type = other RNA
gagtaaaggtgcataatgaa

SEQ ID NO: 20553 - RNA, 20 nt, synthetic construct
  source 1..20: mol_type = other RNA
gagtaactgggactatgggc

SEQ ID NO: 20554 - RNA, 20 nt, synthetic construct
  source 1..20: mol_type = other RNA
gagtacaaggctggtgtttt

SEQ ID NO: 20555 - RNA, 20 nt, synthetic construct
  source 1..20: mol_type = other RNA
gagtataaccatcagacaaa

SEQ ID NO: 20556 - RNA, 20 nt, synthetic construct
  source 1..20: mol_type = other RNA
gagtgcagtggtggaataat

SEQ ID NO: 20557 - RNA, 20 nt, synthetic construct
  source 1..20: mol_type = other RNA
gagtgtgtgtcttcagtgca

SEQ ID NO: 20558 - RNA, 20 nt, synthetic construct
  source 1..20: mol_type = other RNA
gagttattattccaccactg

SEQ ID NO: 20559 - RNA, 20 nt, synthetic construct
  source 1..20: mol_type = other RNA
gagttgaggtccaagatgca

SEQ ID NO: 20560 - RNA, 20 nt, synthetic construct
  source 1..20: mol_type = other RNA
gataaaaacactaactgcca

SEQ ID NO: 20561 - RNA, 20 nt, synthetic construct
  source 1..20: mol_type = other RNA
gataaacataagatatacca

SEQ ID NO: 20562 - RNA, 20 nt, synthetic construct
  source 1..20: mol_type = other RNA
gataagatgcactgaagaca

SEQ ID NO: 20563 - RNA, 20 nt, synthetic construct
  source 1..20: mol_type = other RNA
gataatagtagcacctgcct

SEQ ID NO: 20564 - RNA, 20 nt, synthetic construct
  source 1..20: mol_type = other RNA
gatacactatacaatcctat

SEQ ID NO: 20565 - RNA, 20 nt, synthetic construct
  source 1..20: mol_type = other RNA
gatataccagcaccaaactg

SEQ ID NO: 20566 - RNA, 20 nt, synthetic construct
  source 1..20: mol_type = other RNA
gatcaaagttaacatcgcca

SEQ ID NO: 20567 - RNA, 20 nt, synthetic construct
  source 1..20: mol_type = other RNA
gatcacttgagtttgaaacc

SEQ ID NO: 20568 - RNA, 20 nt, synthetic construct
  source 1..20: mol_type = other RNA
gatcagctcttcagtctgtc

SEQ ID NO: 20569 - RNA, 20 nt, synthetic construct
  source 1..20: mol_type = other RNA
gatcagcttttgcattaatc

SEQ ID NO: 20570 - RNA, 20 nt, synthetic construct
  source 1..20: mol_type = other RNA
gatcagttggtgaaggtggt

SEQ ID NO: 20571 - RNA, 20 nt, synthetic construct
  source 1..20: mol_type = other RNA
gatccagactgaagaaggct

SEQ ID NO: 20572 - RNA, 20 nt, synthetic construct
  source 1..20: mol_type = other RNA
gatccttccacctcagcctc

SEQ ID NO: 20573 - RNA, 20 nt, synthetic construct
  source 1..20: mol_type = other RNA
gatctgggattgcatcttgg

SEQ ID NO: 20574 - RNA, 20 nt, synthetic construct
  source 1..20: mol_type = other RNA
gatgaaatgcactagtttta

SEQ ID NO: 20575 - RNA, 20 nt, synthetic construct
  source 1..20: mol_type = other RNA
gatgaagcactaaaactagt

SEQ ID NO: 20576 - RNA, 20 nt, synthetic construct
  source 1..20: mol_type = other RNA
gatgaagtctgaggtgttgg

SEQ ID NO: 20577 - RNA, 20 nt, synthetic construct
  source 1..20: mol_type = other RNA
gatgagattggtcataggat

SEQ ID NO: 20578 - RNA, 20 nt, synthetic construct
  source 1..20: mol_type = other RNA
gatgaggcattcttggcagg

SEQ ID NO: 20579 - RNA, 20 nt, synthetic construct
  source 1..20: mol_type = other RNA
gatgatgattttctctttag

SEQ ID NO: 20580 - RNA, 20 nt, synthetic construct
  source 1..20: mol_type = other RNA
gatgattttctctttagtga

SEQ ID NO: 20581 - RNA, 20 nt, synthetic construct
  source 1..20: mol_type = other RNA
gatgcaatcccagatcagct

SEQ ID NO: 20582 - RNA, 20 nt, synthetic construct
  source 1..20: mol_type = other RNA
gatgcactgaagacacacac

SEQ ID NO: 20583 - RNA, 20 nt, synthetic construct
  source 1..20: mol_type = other RNA
gatggcatgtgcctctcgat

SEQ ID NO: 20584 - RNA, 20 nt, synthetic construct
  source 1..20: mol_type = other RNA
gatggttatactcgagatta

SEQ ID NO: 20585 - RNA, 20 nt, synthetic construct
  source 1..20: mol_type = other RNA
gatgttaactttgatcagtt

SEQ ID NO: 20586 - RNA, 20 nt, synthetic construct
  source 1..20: mol_type = other RNA
gattaacaactgtcgggtga

SEQ ID NO: 20587 - RNA, 20 nt, synthetic construct
  source 1..20: mol_type = other RNA
gattaatgcaaaagctgatc

SEQ ID NO: 20588 - RNA, 20 nt, synthetic construct
  source 1..20: mol_type = other RNA
gattagattcagatgaggca

SEQ ID NO: 20589 - RNA, 20 nt, synthetic construct
  source 1..20: mol_type = other RNA
gattatttagaggagaaagt

SEQ ID NO: 20590 - RNA, 20 nt, synthetic construct
  source 1..20: mol_type = other RNA
gattcagatgaggcattctt

SEQ ID NO: 20591 - RNA, 20 nt, synthetic construct
  source 1..20: mol_type = other RNA
gattccttgttacttagggt

SEQ ID NO: 20592 - RNA, 20 nt, synthetic construct
  source 1..20: mol_type = other RNA
gattgaccaaaaactgaaaa

SEQ ID NO: 20593 - RNA, 20 nt, synthetic construct
  source 1..20: mol_type = other RNA
gattgcatcttggacctcaa

SEQ ID NO: 20594 - RNA, 20 nt, synthetic construct
  source 1..20: mol_type = other RNA
gattggtcataggattgtat

SEQ ID NO: 20595 - RNA, 20 nt, synthetic construct
  source 1..20: mol_type = other RNA
gattgtatagtgtatcaata

SEQ ID NO: 20596 - RNA, 20 nt, synthetic construct
  source 1..20: mol_type = other RNA
gatttaaaccaaaatatgtc

SEQ ID NO: 20597 - RNA, 20 nt, synthetic construct
  source 1..20: mol_type = other RNA
gatttgctgattttgacaac

SEQ ID NO: 20598 - RNA, 20 nt, synthetic construct
  source 1..20: mol_type = other RNA
gattttctctttagtgacag

SEQ ID NO: 20599 - RNA, 20 nt, synthetic construct
  source 1..20: mol_type = other RNA
gattttgacaaccctactgt

SEQ ID NO: 20600 - RNA, 20 nt, synthetic construct
  source 1..20: mol_type = other RNA
gcaaaagctgatctgggatt

SEQ ID NO: 20601 - RNA, 20 nt, synthetic construct
  source 1..20: mol_type = other RNA
gcaaagcatgtaagtaacaa

SEQ ID NO: 20602 - RNA, 20 nt, synthetic construct
  source 1..20: mol_type = other RNA
gcaaatctaatattgataca

SEQ ID NO: 20603 - RNA, 20 nt, synthetic construct
  source 1..20: mol_type = other RNA
gcaaattataaagggaataa

SEQ ID NO: 20604 - RNA, 20 nt, synthetic construct
  source 1..20: mol_type = other RNA
gcaaattgcttgctcactat

SEQ ID NO: 20605 - RNA, 20 nt, synthetic construct
  source 1..20: mol_type = other RNA
gcaaatttgtccttgttcta

SEQ ID NO: 20606 - RNA, 20 nt, synthetic construct
  source 1..20: mol_type = other RNA
gcaagcaatttgcttttcag

SEQ ID NO: 20607 - RNA, 20 nt, synthetic construct
  source 1..20: mol_type = other RNA
gcaatattcctgccaagaat

SEQ ID NO: 20608 - RNA, 20 nt, synthetic construct
  source 1..20: mol_type = other RNA
gcaatcccagatcagctttt

SEQ ID NO: 20609 - RNA, 20 nt, synthetic construct
  source 1..20: mol_type = other RNA
gcaatttgcttttcagtttt

SEQ ID NO: 20610 - RNA, 20 nt, synthetic construct
  source 1..20: mol_type = other RNA
gcacaagcccttaggcaggt

SEQ ID NO: 20611 - RNA, 20 nt, synthetic construct
  source 1..20: mol_type = other RNA
gcacatgccatctgtcccct

SEQ ID NO: 20612 - RNA, 20 nt, synthetic construct
  source 1..20: mol_type = other RNA
gcaccaaactgaactttctc

SEQ ID NO: 20613 - RNA, 20 nt, synthetic construct
  source 1..20: mol_type = other RNA
gcacctttactcctaaataa

SEQ ID NO: 20614 - RNA, 20 nt, synthetic construct
  source 1..20: mol_type = other RNA
gcactaaaactagtgcattt

SEQ ID NO: 20615 - RNA, 20 nt, synthetic construct
  source 1..20: mol_type = other RNA
gcactagttttagtgcttca

SEQ ID NO: 20616 - RNA, 20 nt, synthetic construct
  source 1..20: mol_type = other RNA
gcactgaagacacacactca

SEQ ID NO: 20617 - RNA, 20 nt, synthetic construct
  source 1..20: mol_type = other RNA
gcagaagtgagtgtgtgtct

SEQ ID NO: 20618 - RNA, 20 nt, synthetic construct
  source 1..20: mol_type = other RNA
gcagacaccaccttcaccaa

SEQ ID NO: 20619 - RNA, 20 nt, synthetic construct
  source 1..20: mol_type = other RNA
gcagagtacaaggctggtgt

SEQ ID NO: 20620 - RNA, 20 nt, synthetic construct
  source 1..20: mol_type = other RNA
gcaggaatattgcagaagtg

SEQ ID NO: 20621 - RNA, 20 nt, synthetic construct
  source 1..20: mol_type = other RNA
gcaggtgctactattatccc

SEQ ID NO: 20622 - RNA, 20 nt, synthetic construct
  source 1..20: mol_type = other RNA
gcagtgagttattattccac

SEQ ID NO: 20623 - RNA, 20 nt, synthetic construct
  source 1..20: mol_type = other RNA
gcagtggtggaataataact

SEQ ID NO: 20624 - RNA, 20 nt, synthetic construct
  source 1..20: mol_type = other RNA
gcagttagtgtttttatcca

SEQ ID NO: 20625 - RNA, 20 nt, synthetic construct
  source 1..20: mol_type = other RNA
gcagttggacatattttggt

SEQ ID NO: 20626 - RNA, 20 nt, synthetic construct
  source 1..20: mol_type = other RNA
gcagtttaagatgaaatgca

SEQ ID NO: 20627 - RNA, 20 nt, synthetic construct
  source 1..20: mol_type = other RNA
gcataaccacagtagggttg

SEQ ID NO: 20628 - RNA, 20 nt, synthetic construct
  source 1..20: mol_type = other RNA
gcataatgaacccattttca

SEQ ID NO: 20629 - RNA, 20 nt, synthetic construct
  source 1..20: mol_type = other RNA
gcatcttatcgagaggcaca

SEQ ID NO: 20630 - RNA, 20 nt, synthetic construct
  source 1..20: mol_type = other RNA
gcatcttggacctcaactct

SEQ ID NO: 20631 - RNA, 20 nt, synthetic construct
  source 1..20: mol_type = other RNA
gcatggataaaaacactaac

SEQ ID NO: 20632 - RNA, 20 nt, synthetic construct
  source 1..20: mol_type = other RNA
gcatgtaagtaacaatttta

SEQ ID NO: 20633 - RNA, 20 nt, synthetic construct
  source 1..20: mol_type = other RNA
gcatgtgcctctcgataaga

SEQ ID NO: 20634 - RNA, 20 nt, synthetic construct
  source 1..20: mol_type = other RNA
gcattaatctcgagccttct

SEQ ID NO: 20635 - RNA, 20 nt, synthetic construct
  source 1..20: mol_type = other RNA
gcattcttggcaggaatatt

SEQ ID NO: 20636 - RNA, 20 nt, synthetic construct
  source 1..20: mol_type = other RNA
gcatttcatcttaaactgca

SEQ ID NO: 20637 - RNA, 20 nt, synthetic construct
  source 1..20: mol_type = other RNA
gcatttgaaaatgggttcat

SEQ ID NO: 20638 - RNA, 20 nt, synthetic construct
  source 1..20: mol_type = other RNA
gccaaaagttaatgactttg

SEQ ID NO: 20639 - RNA, 20 nt, synthetic construct
  source 1..20: mol_type = other RNA
gccaaagtcattaacttttg

SEQ ID NO: 20640 - RNA, 20 nt, synthetic construct
  source 1..20: mol_type = other RNA
gccaaataccaaagccagct

SEQ ID NO: 20641 - RNA, 20 nt, synthetic construct
  source 1..20: mol_type = other RNA
gccaagaatgcctcatctga

SEQ ID NO: 20642 - RNA, 20 nt, synthetic construct
  source 1..20: mol_type = other RNA
gccaagcgatgatgattttc

SEQ ID NO: 20643 - RNA, 20 nt, synthetic construct
  source 1..20: mol_type = other RNA
gccaaggccctgtgacttta

SEQ ID NO: 20644 - RNA, 20 nt, synthetic construct
  source 1..20: mol_type = other RNA
gccagaaaggggacagatgg

SEQ ID NO: 20645 - RNA, 20 nt, synthetic construct
  source 1..20: mol_type = other RNA
gccagctaaagtcacagggc

SEQ ID NO: 20646 - RNA, 20 nt, synthetic construct
  source 1..20: mol_type = other RNA
gccaggtctctccactgtca

SEQ ID NO: 20647 - RNA, 20 nt, synthetic construct
  source 1..20: mol_type = other RNA
gccatctgtcccctttctgg

SEQ ID NO: 20648 - RNA, 20 nt, synthetic construct
  source 1..20: mol_type = other RNA
gcccaggctggtttcaaact

SEQ ID NO: 20649 - RNA, 20 nt, synthetic construct
  source 1..20: mol_type = other RNA
gccctgtgactttagctggc

SEQ ID NO: 20650 - RNA, 20 nt, synthetic construct
  source 1..20: mol_type = other RNA
gcccttaggcaggtgctact

SEQ ID NO: 20651 - RNA, 20 nt, synthetic construct
  source 1..20: mol_type = other RNA
gcctcatctgaatctaatct

SEQ ID NO: 20652 - RNA, 20 nt, synthetic construct
  source 1..20: mol_type = other RNA
gcctcggtttccttctctgt

SEQ ID NO: 20653 - RNA, 20 nt, synthetic construct
  source 1..20: mol_type = other RNA
gcctctataaaatttgaata

SEQ ID NO: 20654 - RNA, 20 nt, synthetic construct
  source 1..20: mol_type = other RNA
gcctctcgataagatgcact

SEQ ID NO: 20655 - RNA, 20 nt, synthetic construct
  source 1..20: mol_type = other RNA
gcctgagccttccgagtaac

SEQ ID NO: 20656 - RNA, 20 nt, synthetic construct
  source 1..20: mol_type = other RNA
gcctgtattctttgttaaaa

SEQ ID NO: 20657 - RNA, 20 nt, synthetic construct
  source 1..20: mol_type = other RNA
gccttccgagtaactgggac

SEQ ID NO: 20658 - RNA, 20 nt, synthetic construct
  source 1..20: mol_type = other RNA
gccttcttcagtctggatca

SEQ ID NO: 20659 - RNA, 20 nt, synthetic construct
  source 1..20: mol_type = other RNA
gccttggcctgtattctttg

SEQ ID NO: 20660 - RNA, 20 nt, synthetic construct
  source 1..20: mol_type = other RNA
gccttgtactctgcttaata

SEQ ID NO: 20661 - RNA, 20 nt, synthetic construct
  source 1..20: mol_type = other RNA
gcgaggtgttgtggtacacg

SEQ ID NO: 20662 - RNA, 20 nt, synthetic construct
  source 1..20: mol_type = other RNA
gcgatgatgattttctcttt

SEQ ID NO: 20663 - RNA, 20 nt, synthetic construct
  source 1..20: mol_type = other RNA
gcgatgttaactttgatcag

SEQ ID NO: 20664 - RNA, 20 nt, synthetic construct
  source 1..20: mol_type = other RNA
gcgtgtaccacaacacctcg

SEQ ID NO: 20665 - RNA, 20 nt, synthetic construct
  source 1..20: mol_type = other RNA
gctaaagtcacagggccttg

SEQ ID NO: 20666 - RNA, 20 nt, synthetic construct
  source 1..20: mol_type = other RNA
gctactattatccctgtttt

SEQ ID NO: 20667 - RNA, 20 nt, synthetic construct
  source 1..20: mol_type = other RNA
gctcactatatgtgattcct

SEQ ID NO: 20668 - RNA, 20 nt, synthetic construct
  source 1..20: mol_type = other RNA
gctcaggcaggaggattgct

SEQ ID NO: 20669 - RNA, 20 nt, synthetic construct
  source 1..20: mol_type = other RNA
gctccaccaacacctcagac

SEQ ID NO: 20670 - RNA, 20 nt, synthetic construct
  source 1..20: mol_type = other RNA
gctcgagattaatgcaaaag

SEQ ID NO: 20671 - RNA, 20 nt, synthetic construct
  source 1..20: mol_type = other RNA
gctcttcagtctgtctttct

SEQ ID NO: 20672 - RNA, 20 nt, synthetic construct
  source 1..20: mol_type = other RNA
gctgatccagactgaagaag

SEQ ID NO: 20673 - RNA, 20 nt, synthetic construct
  source 1..20: mol_type = other RNA
gctgatctgggattgcatct

SEQ ID NO: 20674 - RNA, 20 nt, synthetic construct
  source 1..20: mol_type = other RNA
gctgattttgacaaccctac

SEQ ID NO: 20675 - RNA, 20 nt, synthetic construct
  source 1..20: mol_type = other RNA
gctgcagtgagttattattc

SEQ ID NO: 20676 - RNA, 20 nt, synthetic construct
  source 1..20: mol_type = other RNA
gctggagtgcagtggtggaa

SEQ ID NO: 20677 - RNA, 20 nt, synthetic construct
  source 1..20: mol_type = other RNA
gctggctttggtatttggcc

SEQ ID NO: 20678 - RNA, 20 nt, synthetic construct
  source 1..20: mol_type = other RNA
gctgggatttaaaccaaaat

SEQ ID NO: 20679 - RNA, 20 nt, synthetic construct
  source 1..20: mol_type = other RNA
gctggtatatcttatgttta

SEQ ID NO: 20680 - RNA, 20 nt, synthetic construct
  source 1..20: mol_type = other RNA
gctggtgttttgtaaactgt

SEQ ID NO: 20681 - RNA, 20 nt, synthetic construct
  source 1..20: mol_type = other RNA
gctggtttcaaactcaagtg

SEQ ID NO: 20682 - RNA, 20 nt, synthetic construct
  source 1..20: mol_type = other RNA
gcttaatatgtcaatgtcac

SEQ ID NO: 20683 - RNA, 20 nt, synthetic construct
  source 1..20: mol_type = other RNA
gcttaggagatgaagtctga

SEQ ID NO: 20684 - RNA, 20 nt, synthetic construct
  source 1..20: mol_type = other RNA
gcttcatctgtaaaactact

SEQ ID NO: 20685 - RNA, 20 nt, synthetic construct
  source 1..20: mol_type = other RNA
gcttgctcactatatgtgat

SEQ ID NO: 20686 - RNA, 20 nt, synthetic construct
  source 1..20: mol_type = other RNA
gcttggcatggataaaaaca

SEQ ID NO: 20687 - RNA, 20 nt, synthetic construct
  source 1..20: mol_type = other RNA
gctttgcagttggacatatt

SEQ ID NO: 20688 - RNA, 20 nt, synthetic construct
  source 1..20: mol_type = other RNA
gctttggtatttggccaaaa

SEQ ID NO: 20689 - RNA, 20 nt, synthetic construct
  source 1..20: mol_type = other RNA
gcttttcagtttttggtcaa

SEQ ID NO: 20690 - RNA, 20 nt, synthetic construct
  source 1..20: mol_type = other RNA
gcttttgcattaatctcgag

SEQ ID NO: 20691 - RNA, 20 nt, synthetic construct
  source 1..20: mol_type = other RNA
ggaaaccgaggcttaggaga

SEQ ID NO: 20692 - RNA, 20 nt, synthetic construct
  source 1..20: mol_type = other RNA
ggaaggatcacttgagtttg

SEQ ID NO: 20693 - RNA, 20 nt, synthetic construct
  source 1..20: mol_type = other RNA
ggaataataactcactgcag

SEQ ID NO: 20694 - RNA, 20 nt, synthetic construct
  source 1..20: mol_type = other RNA
ggaataatagtaacttgaca

SEQ ID NO: 20695 - RNA, 20 nt, synthetic construct
  source 1..20: mol_type = other RNA
ggaatattgcagaagtgagt

SEQ ID NO: 20696 - RNA, 20 nt, synthetic construct
  source 1..20: mol_type = other RNA
ggaatcacatatagtgagca

SEQ ID NO: 20697 - RNA, 20 nt, synthetic construct
  source 1..20: mol_type = other RNA
ggacaaatttgcataaccac

SEQ ID NO: 20698 - RNA, 20 nt, synthetic construct
  source 1..20: mol_type = other RNA
ggacactactgggacaattt

SEQ ID NO: 20699 - RNA, 20 nt, synthetic construct
  source 1..20: mol_type = other RNA
ggacagatggcatgtgcctc

SEQ ID NO: 20700 - RNA, 20 nt, synthetic construct
  source 1..20: mol_type = other RNA
ggacatattttggtttaaat

SEQ ID NO: 20701 - RNA, 20 nt, synthetic construct
  source 1..20: mol_type = other RNA
ggacctcaactctccccttt

SEQ ID NO: 20702 - RNA, 20 nt, synthetic construct
  source 1..20: mol_type = other RNA
ggactatgggcgtgtaccac

SEQ ID NO: 20703 - RNA, 20 nt, synthetic construct
  source 1..20: mol_type = other RNA
ggagaaagttcagtttggtg

SEQ ID NO: 20704 - RNA, 20 nt, synthetic construct
  source 1..20: mol_type = other RNA
ggagagacctggcagacacc

SEQ ID NO: 20705 - RNA, 20 nt, synthetic construct
  source 1..20: mol_type = other RNA
ggagagttgaggtccaagat

SEQ ID NO: 20706 - RNA, 20 nt, synthetic construct
  source 1..20: mol_type = other RNA
ggagatgaagtctgaggtgt

SEQ ID NO: 20707 - RNA, 20 nt, synthetic construct
  source 1..20: mol_type = other RNA
ggagctgggatttaaaccaa

SEQ ID NO: 20708 - RNA, 20 nt, synthetic construct
  source 1..20: mol_type = other RNA
ggaggtgaccctaagtaaca

SEQ ID NO: 20709 - RNA, 20 nt, synthetic construct
  source 1..20: mol_type = other RNA
ggagtaaaggtgcataatga

SEQ ID NO: 20710 - RNA, 20 nt, synthetic construct
  source 1..20: mol_type = other RNA
ggagtgcagtggtggaataa

SEQ ID NO: 20711 - RNA, 20 nt, synthetic construct
  source 1..20: mol_type = other RNA
ggataaaaacactaactgcc

SEQ ID NO: 20712 - RNA, 20 nt, synthetic construct
  source 1..20: mol_type = other RNA
ggataatagtagcacctgcc

SEQ ID NO: 20713 - RNA, 20 nt, synthetic construct
  source 1..20: mol_type = other RNA
ggatcagctcttcagtctgt

SEQ ID NO: 20714 - RNA, 20 nt, synthetic construct
  source 1..20: mol_type = other RNA
ggattgaccaaaaactgaaa

SEQ ID NO: 20715 - RNA, 20 nt, synthetic construct
  source 1..20: mol_type = other RNA
ggattgcatcttggacctca

SEQ ID NO: 20716 - RNA, 20 nt, synthetic construct
  source 1..20: mol_type = other RNA
ggattgtatagtgtatcaat

SEQ ID NO: 20717 - RNA, 20 nt, synthetic construct
  source 1..20: mol_type = other RNA
ggatttaaaccaaaatatgt

SEQ ID NO: 20718 - RNA, 20 nt, synthetic construct
  source 1..20: mol_type = other RNA
ggcacatgccatctgtcccc

SEQ ID NO: 20719 - RNA, 20 nt, synthetic construct
  source 1..20: mol_type = other RNA
ggcagacaccaccttcacca

SEQ ID NO: 20720 - RNA, 20 nt, synthetic construct
  source 1..20: mol_type = other RNA
ggcaggaatattgcagaagt

SEQ ID NO: 20721 - RNA, 20 nt, synthetic construct
  source 1..20: mol_type = other RNA
ggcaggtgctactattatcc

SEQ ID NO: 20722 - RNA, 20 nt, synthetic construct
  source 1..20: mol_type = other RNA
ggcagttagtgtttttatcc

SEQ ID NO: 20723 - RNA, 20 nt, synthetic construct
  source 1..20: mol_type = other RNA
ggcatggataaaaacactaa

SEQ ID NO: 20724 - RNA, 20 nt, synthetic construct
  source 1..20: mol_type = other RNA
ggcatgtgcctctcgataag

SEQ ID NO: 20725 - RNA, 20 nt, synthetic construct
  source 1..20: mol_type = other RNA
ggcattcttggcaggaatat

SEQ ID NO: 20726 - RNA, 20 nt, synthetic construct
  source 1..20: mol_type = other RNA
ggccaaaagttaatgacttt

SEQ ID NO: 20727 - RNA, 20 nt, synthetic construct
  source 1..20: mol_type = other RNA
ggccaaataccaaagccagc

SEQ ID NO: 20728 - RNA, 20 nt, synthetic construct
  source 1..20: mol_type = other RNA
ggccaaggccctgtgacttt

SEQ ID NO: 20729 - RNA, 20 nt, synthetic construct
  source 1..20: mol_type = other RNA
ggccctgtgactttagctgg

SEQ ID NO: 20730 - RNA, 20 nt, synthetic construct
  source 1..20: mol_type = other RNA
ggcctgtattctttgttaaa

SEQ ID NO: 20731 - RNA, 20 nt, synthetic construct
  source 1..20: mol_type = other RNA
ggccttggcctgtattcttt

SEQ ID NO: 20732 - RNA, 20 nt, synthetic construct
  source 1..20: mol_type = other RNA
ggcgatgttaactttgatca

SEQ ID NO: 20733 - RNA, 20 nt, synthetic construct
  source 1..20: mol_type = other RNA
ggcgtgtaccacaacacctc

SEQ ID NO: 20734 - RNA, 20 nt, synthetic construct
  source 1..20: mol_type = other RNA
ggctcgagattaatgcaaaa

SEQ ID NO: 20735 - RNA, 20 nt, synthetic construct
  source 1..20: mol_type = other RNA
ggctgcagtgagttattatt

SEQ ID NO: 20736 - RNA, 20 nt, synthetic construct
  source 1..20: mol_type = other RNA
ggctggagtgcagtggtgga

SEQ ID NO: 20737 - RNA, 20 nt, synthetic construct
  source 1..20: mol_type = other RNA
ggctggtgttttgtaaactg

SEQ ID NO: 20738 - RNA, 20 nt, synthetic construct
  source 1..20: mol_type = other RNA
ggctggtttcaaactcaagt

SEQ ID NO: 20739 - RNA, 20 nt, synthetic construct
  source 1..20: mol_type = other RNA
ggcttaggagatgaagtctg

SEQ ID NO: 20740 - RNA, 20 nt, synthetic construct
  source 1..20: mol_type = other RNA
ggctttggtatttggccaaa

SEQ ID NO: 20741 - RNA, 20 nt, synthetic construct
  source 1..20: mol_type = other RNA
gggaataatagtaacttgac

SEQ ID NO: 20742 - RNA, 20 nt, synthetic construct
  source 1..20: mol_type = other RNA
gggacactactgggacaatt

SEQ ID NO: 20743 - RNA, 20 nt, synthetic construct
  source 1..20: mol_type = other RNA
gggacagatggcatgtgcct

SEQ ID NO: 20744 - RNA, 20 nt, synthetic construct
  source 1..20: mol_type = other RNA
gggactatgggcgtgtacca

SEQ ID NO: 20745 - RNA, 20 nt, synthetic construct
  source 1..20: mol_type = other RNA
gggagagttgaggtccaaga

SEQ ID NO: 20746 - RNA, 20 nt, synthetic construct
  source 1..20: mol_type = other RNA
gggagttcaaggctgcagtg

SEQ ID NO: 20747 - RNA, 20 nt, synthetic construct
  source 1..20: mol_type = other RNA
gggataatagtagcacctgc

SEQ ID NO: 20748 - RNA, 20 nt, synthetic construct
  source 1..20: mol_type = other RNA
gggattgcatcttggacctc

SEQ ID NO: 20749 - RNA, 20 nt, synthetic construct
  source 1..20: mol_type = other RNA
gggatttaaaccaaaatatg

SEQ ID NO: 20750 - RNA, 20 nt, synthetic construct
  source 1..20: mol_type = other RNA
gggccttggcctgtattctt

SEQ ID NO: 20751 - RNA, 20 nt, synthetic construct
  source 1..20: mol_type = other RNA
gggcgtgtaccacaacacct

SEQ ID NO: 20752 - RNA, 20 nt, synthetic construct
  source 1..20: mol_type = other RNA
ggggacagatggcatgtgcc

SEQ ID NO: 20753 - RNA, 20 nt, synthetic construct
  source 1..20: mol_type = other RNA
ggggagagttgaggtccaag

SEQ ID NO: 20754 - RNA, 20 nt, synthetic construct
  source 1..20: mol_type = other RNA
gggtatacggaggtgaccct

SEQ ID NO: 20755 - RNA, 20 nt, synthetic construct
  source 1..20: mol_type = other RNA
gggtcacctccgtataccct

SEQ ID NO: 20756 - RNA, 20 nt, synthetic construct
  source 1..20: mol_type = other RNA
gggtgataaacataagatat

SEQ ID NO: 20757 - RNA, 20 nt, synthetic construct
  source 1..20: mol_type = other RNA
gggttcattatgcaccttta

SEQ ID NO: 20758 - RNA, 20 nt, synthetic construct
  source 1..20: mol_type = other RNA
gggttgtcaaaatcagcaaa

SEQ ID NO: 20759 - RNA, 20 nt, synthetic construct
  source 1..20: mol_type = other RNA
gggtttgtctgatggttata

SEQ ID NO: 20760 - RNA, 20 nt, synthetic construct
  source 1..20: mol_type = other RNA
ggtacacgcccatagtccca

SEQ ID NO: 20761 - RNA, 20 nt, synthetic construct
  source 1..20: mol_type = other RNA
ggtatacggaggtgacccta

SEQ ID NO: 20762 - RNA, 20 nt, synthetic construct
  source 1..20: mol_type = other RNA
ggtatatcttatgtttatca

SEQ ID NO: 20763 - RNA, 20 nt, synthetic construct
  source 1..20: mol_type = other RNA
ggtatttggccaaaagttaa

SEQ ID NO: 20764 - RNA, 20 nt, synthetic construct
  source 1..20: mol_type = other RNA
ggtcaatccttatgattatt

SEQ ID NO: 20765 - RNA, 20 nt, synthetic construct
  source 1..20: mol_type = other RNA
ggtcacctccgtataccctc

SEQ ID NO: 20766 - RNA, 20 nt, synthetic construct
  source 1..20: mol_type = other RNA
ggtcataggattgtatagtg

SEQ ID NO: 20767 - RNA, 20 nt, synthetic construct
  source 1..20: mol_type = other RNA
ggtccaagatgcaatcccag

SEQ ID NO: 20768 - RNA, 20 nt, synthetic construct
  source 1..20: mol_type = other RNA
ggtctctccactgtcaagtt

SEQ ID NO: 20769 - RNA, 20 nt, synthetic construct
  source 1..20: mol_type = other RNA
ggtgaaggtggtgtctgcca

SEQ ID NO: 20770 - RNA, 20 nt, synthetic construct
  source 1..20: mol_type = other RNA
ggtgaccctaagtaacaagg

SEQ ID NO: 20771 - RNA, 20 nt, synthetic construct
  source 1..20: mol_type = other RNA
ggtgataaacataagatata

SEQ ID NO: 20772 - RNA, 20 nt, synthetic construct
  source 1..20: mol_type = other RNA
ggtgcataatgaacccattt

SEQ ID NO: 20773 - RNA, 20 nt, synthetic construct
  source 1..20: mol_type = other RNA
ggtgctactattatccctgt

SEQ ID NO: 20774 - RNA, 20 nt, synthetic construct
  source 1..20: mol_type = other RNA
ggtgctggtatatcttatgt

SEQ ID NO: 20775 - RNA, 20 nt, synthetic construct
  source 1..20: mol_type = other RNA
ggtggaaggatcacttgagt

SEQ ID NO: 20776 - RNA, 20 nt, synthetic construct
  source 1..20: mol_type = other RNA
ggtggaataataactcactg

SEQ ID NO: 20777 - RNA, 20 nt, synthetic construct
  source 1..20: mol_type = other RNA
ggtggagctgggatttaaac

SEQ ID NO: 20778 - RNA, 20 nt, synthetic construct
  source 1..20: mol_type = other RNA
ggtggtgtctgccaggtctc

SEQ ID NO: 20779 - RNA, 20 nt, synthetic construct
  source 1..20: mol_type = other RNA
ggtgtctgccaggtctctcc

SEQ ID NO: 20780 - RNA, 20 nt, synthetic construct
  source 1..20: mol_type = other RNA
ggtgttggtggagctgggat

SEQ ID NO: 20781 - RNA, 20 nt, synthetic construct
  source 1..20: mol_type = other RNA
ggtgttgtggtacacgccca

SEQ ID NO: 20782 - RNA, 20 nt, synthetic construct
  source 1..20: mol_type = other RNA
ggtgttttgtaaactgtctc

SEQ ID NO: 20783 - RNA, 20 nt, synthetic construct
  source 1..20: mol_type = other RNA
ggttatactcgagattagat

SEQ ID NO: 20784 - RNA, 20 nt, synthetic construct
  source 1..20: mol_type = other RNA
ggttatgcaaatttgtcctt

SEQ ID NO: 20785 - RNA, 20 nt, synthetic construct
  source 1..20: mol_type = other RNA
ggttcattatgcacctttac

SEQ ID NO: 20786 - RNA, 20 nt, synthetic construct
  source 1..20: mol_type = other RNA
ggttgtcaaaatcagcaaat

SEQ ID NO: 20787 - RNA, 20 nt, synthetic construct
  source 1..20: mol_type = other RNA
ggtttaaatcccagctccac

SEQ ID NO: 20788 - RNA, 20 nt, synthetic construct
  source 1..20: mol_type = other RNA
ggtttcaaactcaagtgatc

SEQ ID NO: 20789 - RNA, 20 nt, synthetic construct
  source 1..20: mol_type = other RNA
ggtttccttctctgtaaaac

SEQ ID NO: 20790 - RNA, 20 nt, synthetic construct
  source 1..20: mol_type = other RNA
ggtttgtctgatggttatac

SEQ ID NO: 20791 - RNA, 20 nt, synthetic construct
  source 1..20: mol_type = other RNA
gtaaaacagggataatagta

SEQ ID NO: 20792 - RNA, 20 nt, synthetic construct
  source 1..20: mol_type = other RNA
gtaaactgtctctcaatttg

SEQ ID NO: 20793 - RNA, 20 nt, synthetic construct
  source 1..20: mol_type = other RNA
gtaaaggtgcataatgaacc

SEQ ID NO: 20794 - RNA, 20 nt, synthetic construct
  source 1..20: mol_type = other RNA
gtaacaaggaatcacatata

SEQ ID NO: 20795 - RNA, 20 nt, synthetic construct
  source 1..20: mol_type = other RNA
gtaacaattttagagggtat

SEQ ID NO: 20796 - RNA, 20 nt, synthetic construct
  source 1..20: mol_type = other RNA
gtaactgggactatgggcgt

SEQ ID NO: 20797 - RNA, 20 nt, synthetic construct
  source 1..20: mol_type = other RNA
gtaacttgacagtggagaga

SEQ ID NO: 20798 - RNA, 20 nt, synthetic construct
  source 1..20: mol_type = other RNA
gtaagtaacaattttagagg

SEQ ID NO: 20799 - RNA, 20 nt, synthetic construct
  source 1..20: mol_type = other RNA
gtaattttcataagcatttg

SEQ ID NO: 20800 - RNA, 20 nt, synthetic construct
  source 1..20: mol_type = other RNA
gtacaaggctggtgttttgt

SEQ ID NO: 20801 - RNA, 20 nt, synthetic construct
  source 1..20: mol_type = other RNA
gtacacgcccatagtcccag

SEQ ID NO: 20802 - RNA, 20 nt, synthetic construct
  source 1..20: mol_type = other RNA
gtaccacaacacctcgctat

SEQ ID NO: 20803 - RNA, 20 nt, synthetic construct
  source 1..20: mol_type = other RNA
gtactctgcttaatatgtca

SEQ ID NO: 20804 - RNA, 20 nt, synthetic construct
  source 1..20: mol_type = other RNA
gtagatgagattggtcatag

SEQ ID NO: 20805 - RNA, 20 nt, synthetic construct
  source 1..20: mol_type = other RNA
gtagggttgtcaaaatcagc

SEQ ID NO: 20806 - RNA, 20 nt, synthetic construct
  source 1..20: mol_type = other RNA
gtagtgtcccttaacaataa

SEQ ID NO: 20807 - RNA, 20 nt, synthetic construct
  source 1..20: mol_type = other RNA
gtagttttacagatgaagca

SEQ ID NO: 20808 - RNA, 20 nt, synthetic construct
  source 1..20: mol_type = other RNA
gtataaccatcagacaaacc

SEQ ID NO: 20809 - RNA, 20 nt, synthetic construct
  source 1..20: mol_type = other RNA
gtataccctctaaaattgtt

SEQ ID NO: 20810 - RNA, 20 nt, synthetic construct
  source 1..20: mol_type = other RNA
gtatacggaggtgaccctaa

SEQ ID NO: 20811 - RNA, 20 nt, synthetic construct
  source 1..20: mol_type = other RNA
gtatagtgtatcaatattag

SEQ ID NO: 20812 - RNA, 20 nt, synthetic construct
  source 1..20: mol_type = other RNA
gtatatcttatgtttatcac

SEQ ID NO: 20813 - RNA, 20 nt, synthetic construct
  source 1..20: mol_type = other RNA
gtatcaatattagatttgct

SEQ ID NO: 20814 - RNA, 20 nt, synthetic construct
  source 1..20: mol_type = other RNA
gtattctttgttaaaaagag

SEQ ID NO: 20815 - RNA, 20 nt, synthetic construct
  source 1..20: mol_type = other RNA
gtatttatttccttagaaca

SEQ ID NO: 20816 - RNA, 20 nt, synthetic construct
  source 1..20: mol_type = other RNA
gtatttggccaaaagttaat

SEQ ID NO: 20817 - RNA, 20 nt, synthetic construct
  source 1..20: mol_type = other RNA
gtcaaaatcagcaaatctaa

SEQ ID NO: 20818 - RNA, 20 nt, synthetic construct
  source 1..20: mol_type = other RNA
gtcaagttactattattccc

SEQ ID NO: 20819 - RNA, 20 nt, synthetic construct
  source 1..20: mol_type = other RNA
gtcaatccttatgattattt

SEQ ID NO: 20820 - RNA, 20 nt, synthetic construct
  source 1..20: mol_type = other RNA
gtcaatgtcacaagagagaa

SEQ ID NO: 20821 - RNA, 20 nt, synthetic construct
  source 1..20: mol_type = other RNA
gtcacaagagagaaagacag

SEQ ID NO: 20822 - RNA, 20 nt, synthetic construct
  source 1..20: mol_type = other RNA
gtcacagggccttggcctgt

SEQ ID NO: 20823 - RNA, 20 nt, synthetic construct
  source 1..20: mol_type = other RNA
gtcacctccgtataccctct

SEQ ID NO: 20824 - RNA, 20 nt, synthetic construct
  source 1..20: mol_type = other RNA
gtcactaaagagaaaatcat

SEQ ID NO: 20825 - RNA, 20 nt, synthetic construct
  source 1..20: mol_type = other RNA
gtcataggattgtatagtgt

SEQ ID NO: 20826 - RNA, 20 nt, synthetic construct
  source 1..20: mol_type = other RNA
gtcattaacttttggccaaa

SEQ ID NO: 20827 - RNA, 20 nt, synthetic construct
  source 1..20: mol_type = other RNA
gtccaactgcaaagcatgta

SEQ ID NO: 20828 - RNA, 20 nt, synthetic construct
  source 1..20: mol_type = other RNA
gtccaagatgcaatcccaga

SEQ ID NO: 20829 - RNA, 20 nt, synthetic construct
  source 1..20: mol_type = other RNA
gtcccagtagtgtcccttaa

SEQ ID NO: 20830 - RNA, 20 nt, synthetic construct
  source 1..20: mol_type = other RNA
gtcccagttactcggaaggc

SEQ ID NO: 20831 - RNA, 20 nt, synthetic construct
  source 1..20: mol_type = other RNA
gtcccctttctggcgatgtt

SEQ ID NO: 20832 - RNA, 20 nt, synthetic construct
  source 1..20: mol_type = other RNA
gtcccttaacaataaaaagg

SEQ ID NO: 20833 - RNA, 20 nt, synthetic construct
  source 1..20: mol_type = other RNA
gtccgggagttcaaggctgc

SEQ ID NO: 20834 - RNA, 20 nt, synthetic construct
  source 1..20: mol_type = other RNA
gtccttgttctaaggaaata

SEQ ID NO: 20835 - RNA, 20 nt, synthetic construct
  source 1..20: mol_type = other RNA
gtcgggtgataaacataaga

SEQ ID NO: 20836 - RNA, 20 nt, synthetic construct
  source 1..20: mol_type = other RNA
gtctctacaaaaagtaggaa

SEQ ID NO: 20837 - RNA, 20 nt, synthetic construct
  source 1..20: mol_type = other RNA
gtctctccactgtcaagtta

SEQ ID NO: 20838 - RNA, 20 nt, synthetic construct
  source 1..20: mol_type = other RNA
gtctgaggtgttggtggagc

SEQ ID NO: 20839 - RNA, 20 nt, synthetic construct
  source 1..20: mol_type = other RNA
gtctgatggttatactcgag

SEQ ID NO: 20840 - RNA, 20 nt, synthetic construct
  source 1..20: mol_type = other RNA
gtctgccaggtctctccact

SEQ ID NO: 20841 - RNA, 20 nt, synthetic construct
  source 1..20: mol_type = other RNA
gtctggatcagctcttcagt

SEQ ID NO: 20842 - RNA, 20 nt, synthetic construct
  source 1..20: mol_type = other RNA
gtctgtcactaaagagaaaa

SEQ ID NO: 20843 - RNA, 20 nt, synthetic construct
  source 1..20: mol_type = other RNA
gtctgtctttctctcttgtg

SEQ ID NO: 20844 - RNA, 20 nt, synthetic construct
  source 1..20: mol_type = other RNA
gtcttcagtgcatcttatcg

SEQ ID NO: 20845 - RNA, 20 nt, synthetic construct
  source 1..20: mol_type = other RNA
gtctttctctcttgtgacat

SEQ ID NO: 20846 - RNA, 20 nt, synthetic construct
  source 1..20: mol_type = other RNA
gtgaaggtggtgtctgccag

SEQ ID NO: 20847 - RNA, 20 nt, synthetic construct
  source 1..20: mol_type = other RNA
gtgacagacattttttaaaa

SEQ ID NO: 20848 - RNA, 20 nt, synthetic construct
  source 1..20: mol_type = other RNA
gtgacattgacatattaagc

SEQ ID NO: 20849 - RNA, 20 nt, synthetic construct
  source 1..20: mol_type = other RNA
gtgaccctaagtaacaagga

SEQ ID NO: 20850 - RNA, 20 nt, synthetic construct
  source 1..20: mol_type = other RNA
gtgactttagctggctttgg

SEQ ID NO: 20851 - RNA, 20 nt, synthetic construct
  source 1..20: mol_type = other RNA
gtgagaccccgtctctacaa

SEQ ID NO: 20852 - RNA, 20 nt, synthetic construct
  source 1..20: mol_type = other RNA
gtgagcaagcaatttgcttt

SEQ ID NO: 20853 - RNA, 20 nt, synthetic construct
  source 1..20: mol_type = other RNA
gtgagtgtgtgtcttcagtg

SEQ ID NO: 20854 - RNA, 20 nt, synthetic construct
  source 1..20: mol_type = other RNA
gtgagttattattccaccac

SEQ ID NO: 20855 - RNA, 20 nt, synthetic construct
  source 1..20: mol_type = other RNA
gtgataaacataagatatac

SEQ ID NO: 20856 - RNA, 20 nt, synthetic construct
  source 1..20: mol_type = other RNA
gtgatccttccacctcagcc

SEQ ID NO: 20857 - RNA, 20 nt, synthetic construct
  source 1..20: mol_type = other RNA
gtgattccttgttacttagg

SEQ ID NO: 20858 - RNA, 20 nt, synthetic construct
  source 1..20: mol_type = other RNA
gtgcagtggtggaataataa

SEQ ID NO: 20859 - RNA, 20 nt, synthetic construct
  source 1..20: mol_type = other RNA
gtgcataatgaacccatttt

SEQ ID NO: 20860 - RNA, 20 nt, synthetic construct
  source 1..20: mol_type = other RNA
gtgcatcttatcgagaggca

SEQ ID NO: 20861 - RNA, 20 nt, synthetic construct
  source 1..20: mol_type = other RNA
gtgcatttcatcttaaactg

SEQ ID NO: 20862 - RNA, 20 nt, synthetic construct
  source 1..20: mol_type = other RNA
gtgcctctcgataagatgca

SEQ ID NO: 20863 - RNA, 20 nt, synthetic construct
  source 1..20: mol_type = other RNA
gtgctactattatccctgtt

SEQ ID NO: 20864 - RNA, 20 nt, synthetic construct
  source 1..20: mol_type = other RNA
gtgctggtatatcttatgtt

SEQ ID NO: 20865 - RNA, 20 nt, synthetic construct
  source 1..20: mol_type = other RNA
gtgcttcatctgtaaaacta

SEQ ID NO: 20866 - RNA, 20 nt, synthetic construct
  source 1..20: mol_type = other RNA
gtggaaggatcacttgagtt

SEQ ID NO: 20867 - RNA, 20 nt, synthetic construct
  source 1..20: mol_type = other RNA
gtggaataataactcactgc

SEQ ID NO: 20868 - RNA, 20 nt, synthetic construct
  source 1..20: mol_type = other RNA
gtggagagacctggcagaca

SEQ ID NO: 20869 - RNA, 20 nt, synthetic construct
  source 1..20: mol_type = other RNA
gtggagctgggatttaaacc

SEQ ID NO: 20870 - RNA, 20 nt, synthetic construct
  source 1..20: mol_type = other RNA
gtggtacacgcccatagtcc

SEQ ID NO: 20871 - RNA, 20 nt, synthetic construct
  source 1..20: mol_type = other RNA
gtggtggaataataactcac

SEQ ID NO: 20872 - RNA, 20 nt, synthetic construct
  source 1..20: mol_type = other RNA
gtggtgtctgccaggtctct

SEQ ID NO: 20873 - RNA, 20 nt, synthetic construct
  source 1..20: mol_type = other RNA
gtggttatgcaaatttgtcc

SEQ ID NO: 20874 - RNA, 20 nt, synthetic construct
  source 1..20: mol_type = other RNA
gtgtaattttcataagcatt

SEQ ID NO: 20875 - RNA, 20 nt, synthetic construct
  source 1..20: mol_type = other RNA
gtgtaccacaacacctcgct

SEQ ID NO: 20876 - RNA, 20 nt, synthetic construct
  source 1..20: mol_type = other RNA
gtgtatcaatattagatttg

SEQ ID NO: 20877 - RNA, 20 nt, synthetic construct
  source 1..20: mol_type = other RNA
gtgtcccttaacaataaaaa

SEQ ID NO: 20878 - RNA, 20 nt, synthetic construct
  source 1..20: mol_type = other RNA
gtgtctgccaggtctctcca

SEQ ID NO: 20879 - RNA, 20 nt, synthetic construct
  source 1..20: mol_type = other RNA
gtgtcttcagtgcatcttat

SEQ ID NO: 20880 - RNA, 20 nt, synthetic construct
  source 1..20: mol_type = other RNA
gtgtgtcttcagtgcatctt

SEQ ID NO: 20881 - RNA, 20 nt, synthetic construct
  source 1..20: mol_type = other RNA
gtgtgtgtcttcagtgcatc

SEQ ID NO: 20882 - RNA, 20 nt, synthetic construct
  source 1..20: mol_type = other RNA
gtgttggtggagctgggatt

SEQ ID NO: 20883 - RNA, 20 nt, synthetic construct
  source 1..20: mol_type = other RNA
gtgttgtggtacacgcccat

SEQ ID NO: 20884 - RNA, 20 nt, synthetic construct
  source 1..20: mol_type = other RNA
gtgttttgtaaactgtctct

SEQ ID NO: 20885 - RNA, 20 nt, synthetic construct
  source 1..20: mol_type = other RNA
gtgtttttatccatgccaag

SEQ ID NO: 20886 - RNA, 20 nt, synthetic construct
  source 1..20: mol_type = other RNA
gttaaaaagagattaacaac

SEQ ID NO: 20887 - RNA, 20 nt, synthetic construct
  source 1..20: mol_type = other RNA
gttaacatcgccagaaaggg

SEQ ID NO: 20888 - RNA, 20 nt, synthetic construct
  source 1..20: mol_type = other RNA
gttaactttgatcagttggt

SEQ ID NO: 20889 - RNA, 20 nt, synthetic construct
  source 1..20: mol_type = other RNA
gttaagggacactactggga

SEQ ID NO: 20890 - RNA, 20 nt, synthetic construct
  source 1..20: mol_type = other RNA
gttaatgactttggcagtta

SEQ ID NO: 20891 - RNA, 20 nt, synthetic construct
  source 1..20: mol_type = other RNA
gttactattattccctttat

SEQ ID NO: 20892 - RNA, 20 nt, synthetic construct
  source 1..20: mol_type = other RNA
gttactcggaaggctcaggc

SEQ ID NO: 20893 - RNA, 20 nt, synthetic construct
  source 1..20: mol_type = other RNA
gttacttacatgctttgcag

SEQ ID NO: 20894 - RNA, 20 nt, synthetic construct
  source 1..20: mol_type = other RNA
gttacttagggtcacctccg

SEQ ID NO: 20895 - RNA, 20 nt, synthetic construct
  source 1..20: mol_type = other RNA
gttagtgtttttatccatgc

SEQ ID NO: 20896 - RNA, 20 nt, synthetic construct
  source 1..20: mol_type = other RNA
gttatactcgagattagatt

SEQ ID NO: 20897 - RNA, 20 nt, synthetic construct
  source 1..20: mol_type = other RNA
gttatgcaaatttgtccttg

SEQ ID NO: 20898 - RNA, 20 nt, synthetic construct
  source 1..20: mol_type = other RNA
gttattattccaccactgca

SEQ ID NO: 20899 - RNA, 20 nt, synthetic construct
  source 1..20: mol_type = other RNA
gttcaaggctgcagtgagtt

SEQ ID NO: 20900 - RNA, 20 nt, synthetic construct
  source 1..20: mol_type = other RNA
gttcagtttggtgctggtat

SEQ ID NO: 20901 - RNA, 20 nt, synthetic construct
  source 1..20: mol_type = other RNA
gttcattatgcacctttact

SEQ ID NO: 20902 - RNA, 20 nt, synthetic construct
  source 1..20: mol_type = other RNA
gttctaaggaaataaatact

SEQ ID NO: 20903 - RNA, 20 nt, synthetic construct
  source 1..20: mol_type = other RNA
gttgaggtccaagatgcaat

SEQ ID NO: 20904 - RNA, 20 nt, synthetic construct
  source 1..20: mol_type = other RNA
gttgcccaggctggtttcaa

SEQ ID NO: 20905 - RNA, 20 nt, synthetic construct
  source 1..20: mol_type = other RNA
gttggacatattttggttta

SEQ ID NO: 20906 - RNA, 20 nt, synthetic construct
  source 1..20: mol_type = other RNA
gttggtgaaggtggtgtctg

SEQ ID NO: 20907 - RNA, 20 nt, synthetic construct
  source 1..20: mol_type = other RNA
gttggtggagctgggattta

SEQ ID NO: 20908 - RNA, 20 nt, synthetic construct
  source 1..20: mol_type = other RNA
gttgtagatgagattggtca

SEQ ID NO: 20909 - RNA, 20 nt, synthetic construct
  source 1..20: mol_type = other RNA
gttgtcaaaatcagcaaatc

SEQ ID NO: 20910 - RNA, 20 nt, synthetic construct
  source 1..20: mol_type = other RNA
gttgtggtacacgcccatag

SEQ ID NO: 20911 - RNA, 20 nt, synthetic construct
  source 1..20: mol_type = other RNA
gttgttaatctctttttaac

SEQ ID NO: 20912 - RNA, 20 nt, synthetic construct
  source 1..20: mol_type = other RNA
gtttaaatcccagctccacc

SEQ ID NO: 20913 - RNA, 20 nt, synthetic construct
  source 1..20: mol_type = other RNA
gtttaagatgaaatgcacta

SEQ ID NO: 20914 - RNA, 20 nt, synthetic construct
  source 1..20: mol_type = other RNA
gtttacaaaacaccagcctt

SEQ ID NO: 20915 - RNA, 20 nt, synthetic construct
  source 1..20: mol_type = other RNA
gtttatcacccgacagttgt

SEQ ID NO: 20916 - RNA, 20 nt, synthetic construct
  source 1..20: mol_type = other RNA
gtttcaaactcaagtgatcc

SEQ ID NO: 20917 - RNA, 20 nt, synthetic construct
  source 1..20: mol_type = other RNA
gtttccttctctgtaaaaca

SEQ ID NO: 20918 - RNA, 20 nt, synthetic construct
  source 1..20: mol_type = other RNA
gtttggtgctggtatatctt

SEQ ID NO: 20919 - RNA, 20 nt, synthetic construct
  source 1..20: mol_type = other RNA
gtttgtctgatggttatact

SEQ ID NO: 20920 - RNA, 20 nt, synthetic construct
  source 1..20: mol_type = other RNA
gttttacagagaaggaaacc

SEQ ID NO: 20921 - RNA, 20 nt, synthetic construct
  source 1..20: mol_type = other RNA
gttttacagatgaagcacta

SEQ ID NO: 20922 - RNA, 20 nt, synthetic construct
  source 1..20: mol_type = other RNA
gttttagtgcttcatctgta

SEQ ID NO: 20923 - RNA, 20 nt, synthetic construct
  source 1..20: mol_type = other RNA
gttttgtaaactgtctctca

SEQ ID NO: 20924 - RNA, 20 nt, synthetic construct
  source 1..20: mol_type = other RNA
gtttttatccatgccaagcg

SEQ ID NO: 20925 - RNA, 20 nt, synthetic construct
  source 1..20: mol_type = other RNA
gtttttggtcaatccttatg

SEQ ID NO: 20926 - RNA, 20 nt, synthetic construct
  source 1..20: mol_type = other RNA
taaaaaatgtctgtcactaa

SEQ ID NO: 20927 - RNA, 20 nt, synthetic construct
  source 1..20: mol_type = other RNA
taaaaacactaactgccaaa

SEQ ID NO: 20928 - RNA, 20 nt, synthetic construct
  source 1..20: mol_type = other RNA
taaaaagagattaacaactg

SEQ ID NO: 20929 - RNA, 20 nt, synthetic construct
  source 1..20: mol_type = other RNA
taaaaaggggagagttgagg

SEQ ID NO: 20930 - RNA, 20 nt, synthetic construct
  source 1..20: mol_type = other RNA
taaaacagggataatagtag

SEQ ID NO: 20931 - RNA, 20 nt, synthetic construct
  source 1..20: mol_type = other RNA
taaaactagtgcatttcatc

SEQ ID NO: 20932 - RNA, 20 nt, synthetic construct
  source 1..20: mol_type = other RNA
taaaattgttacttacatgc

SEQ ID NO: 20933 - RNA, 20 nt, synthetic construct
  source 1..20: mol_type = other RNA
taaacataagatataccagc

SEQ ID NO: 20934 - RNA, 20 nt, synthetic construct
  source 1..20: mol_type = other RNA
taaaccaaaatatgtccaac

SEQ ID NO: 20935 - RNA, 20 nt, synthetic construct
  source 1..20: mol_type = other RNA
taaactgcaaattataaagg

SEQ ID NO: 20936 - RNA, 20 nt, synthetic construct
  source 1..20: mol_type = other RNA
taaactgtctctcaatttgg

SEQ ID NO: 20937 - RNA, 20 nt, synthetic construct
  source 1..20: mol_type = other RNA
taaagagaaaatcatcatcg

SEQ ID NO: 20938 - RNA, 20 nt, synthetic construct
  source 1..20: mol_type = other RNA
taaagggaataatagtaact

SEQ ID NO: 20939 - RNA, 20 nt, synthetic construct
  source 1..20: mol_type = other RNA
taaaggtgcataatgaaccc

SEQ ID NO: 20940 - RNA, 20 nt, synthetic construct
  source 1..20: mol_type = other RNA
taaagtcacagggccttggc

SEQ ID NO: 20941 - RNA, 20 nt, synthetic construct
  source 1..20: mol_type = other RNA
taaagttgtagatgagattg

SEQ ID NO: 20942 - RNA, 20 nt, synthetic construct
  source 1..20: mol_type = other RNA
taaatcccagctccaccaac

SEQ ID NO: 20943 - RNA, 20 nt, synthetic construct
  source 1..20: mol_type = other RNA
taacaaagaatacaggccaa

SEQ ID NO: 20944 - RNA, 20 nt, synthetic construct
  source 1..20: mol_type = other RNA
taacaactgtcgggtgataa

SEQ ID NO: 20945 - RNA, 20 nt, synthetic construct
  source 1..20: mol_type = other RNA
taacaaggaatcacatatag

SEQ ID NO: 20946 - RNA, 20 nt, synthetic construct
  source 1..20: mol_type = other RNA
taacaataaaaaggggagag

SEQ ID NO: 20947 - RNA, 20 nt, synthetic construct
  source 1..20: mol_type = other RNA
taacaattttagagggtata

SEQ ID NO: 20948 - RNA, 20 nt, synthetic construct
  source 1..20: mol_type = other RNA
taacatcgccagaaagggga

SEQ ID NO: 20949 - RNA, 20 nt, synthetic construct
  source 1..20: mol_type = other RNA
taaccacagtagggttgtca

SEQ ID NO: 20950 - RNA, 20 nt, synthetic construct
  source 1..20: mol_type = other RNA
taaccatcagacaaacccaa

SEQ ID NO: 20951 - RNA, 20 nt, synthetic construct
  source 1..20: mol_type = other RNA
taactcactgcagccttgaa

SEQ ID NO: 20952 - RNA, 20 nt, synthetic construct
  source 1..20: mol_type = other RNA
taactgccaaagtcattaac

SEQ ID NO: 20953 - RNA, 20 nt, synthetic construct
  source 1..20: mol_type = other RNA
taactgggactatgggcgtg

SEQ ID NO: 20954 - RNA, 20 nt, synthetic construct
  source 1..20: mol_type = other RNA
taacttgacagtggagagac

SEQ ID NO: 20955 - RNA, 20 nt, synthetic construct
  source 1..20: mol_type = other RNA
taactttgatcagttggtga

SEQ ID NO: 20956 - RNA, 20 nt, synthetic construct
  source 1..20: mol_type = other RNA
taacttttggccaaatacca

SEQ ID NO: 20957 - RNA, 20 nt, synthetic construct
  source 1..20: mol_type = other RNA
taagatataccagcaccaaa

SEQ ID NO: 20958 - RNA, 20 nt, synthetic construct
  source 1..20: mol_type = other RNA
taagatgaaatgcactagtt

SEQ ID NO: 20959 - RNA, 20 nt, synthetic construct
  source 1..20: mol_type = other RNA
taagatgcactgaagacaca

SEQ ID NO: 20960 - RNA, 20 nt, synthetic construct
  source 1..20: mol_type = other RNA
taagcagagtacaaggctgg

SEQ ID NO: 20961 - RNA, 20 nt, synthetic construct
  source 1..20: mol_type = other RNA
taagcatttgaaaatgggtt

SEQ ID NO: 20962 - RNA, 20 nt, synthetic construct
  source 1..20: mol_type = other RNA
taagcctcggtttccttctc

SEQ ID NO: 20963 - RNA, 20 nt, synthetic construct
  source 1..20: mol_type = other RNA
taaggattgaccaaaaactg

SEQ ID NO: 20964 - RNA, 20 nt, synthetic construct
  source 1..20: mol_type = other RNA
taagggacactactgggaca

SEQ ID NO: 20965 - RNA, 20 nt, synthetic construct
  source 1..20: mol_type = other RNA
taagtaacaaggaatcacat

SEQ ID NO: 20966 - RNA, 20 nt, synthetic construct
  source 1..20: mol_type = other RNA
taagtaacaattttagaggg

SEQ ID NO: 20967 - RNA, 20 nt, synthetic construct
  source 1..20: mol_type = other RNA
taataactcactgcagcctt

SEQ ID NO: 20968 - RNA, 20 nt, synthetic construct
  source 1..20: mol_type = other RNA
taatagtaacttgacagtgg

SEQ ID NO: 20969 - RNA, 20 nt, synthetic construct
  source 1..20: mol_type = other RNA
taatagtagcacctgcctaa

SEQ ID NO: 20970 - RNA, 20 nt, synthetic construct
  source 1..20: mol_type = other RNA
taatatgtcaatgtcacaag

SEQ ID NO: 20971 - RNA, 20 nt, synthetic construct
  source 1..20: mol_type = other RNA
taatcataaggattgaccaa

SEQ ID NO: 20972 - RNA, 20 nt, synthetic construct
  source 1..20: mol_type = other RNA
taatctcgagccttcttcag

SEQ ID NO: 20973 - RNA, 20 nt, synthetic construct
  source 1..20: mol_type = other RNA
taatctcgagtataaccatc

SEQ ID NO: 20974 - RNA, 20 nt, synthetic construct
  source 1..20: mol_type = other RNA
taatgaacccattttcaaat

SEQ ID NO: 20975 - RNA, 20 nt, synthetic construct
  source 1..20: mol_type = other RNA
taatgactttggcagttagt

SEQ ID NO: 20976 - RNA, 20 nt, synthetic construct
  source 1..20: mol_type = other RNA
taatgcaaaagctgatctgg

SEQ ID NO: 20977 - RNA, 20 nt, synthetic construct
  source 1..20: mol_type = other RNA
taatttgcagtttaagatga

SEQ ID NO: 20978 - RNA, 20 nt, synthetic construct
  source 1..20: mol_type = other RNA
tacaaaacaccagccttgta

SEQ ID NO: 20979 - RNA, 20 nt, synthetic construct
  source 1..20: mol_type = other RNA
tacaaggctggtgttttgta

SEQ ID NO: 20980 - RNA, 20 nt, synthetic construct
  source 1..20: mol_type = other RNA
tacaatcctatgaccaatct

SEQ ID NO: 20981 - RNA, 20 nt, synthetic construct
  source 1..20: mol_type = other RNA
tacacgcccatagtcccagt

SEQ ID NO: 20982 - RNA, 20 nt, synthetic construct
  source 1..20: mol_type = other RNA
tacactatacaatcctatga

SEQ ID NO: 20983 - RNA, 20 nt, synthetic construct
  source 1..20: mol_type = other RNA
tacagagaaggaaaccgagg

SEQ ID NO: 20984 - RNA, 20 nt, synthetic construct
  source 1..20: mol_type = other RNA
tacagatgaagcactaaaac

SEQ ID NO: 20985 - RNA, 20 nt, synthetic construct
  source 1..20: mol_type = other RNA
tacaggccaaggccctgtga

SEQ ID NO: 20986 - RNA, 20 nt, synthetic construct
  source 1..20: mol_type = other RNA
tacatgctttgcagttggac

SEQ ID NO: 20987 - RNA, 20 nt, synthetic construct
  source 1..20: mol_type = other RNA
taccaaagccagctaaagtc

SEQ ID NO: 20988 - RNA, 20 nt, synthetic construct
  source 1..20: mol_type = other RNA
taccacaacacctcgctatt

SEQ ID NO: 20989 - RNA, 20 nt, synthetic construct
  source 1..20: mol_type = other RNA
taccagcaccaaactgaact

SEQ ID NO: 20990 - RNA, 20 nt, synthetic construct
  source 1..20: mol_type = other RNA
taccctctaaaattgttact

SEQ ID NO: 20991 - RNA, 20 nt, synthetic construct
  source 1..20: mol_type = other RNA
tacggaggtgaccctaagta

SEQ ID NO: 20992 - RNA, 20 nt, synthetic construct
  source 1..20: mol_type = other RNA
tactattatccctgttttac

SEQ ID NO: 20993 - RNA, 20 nt, synthetic construct
  source 1..20: mol_type = other RNA
tactcctaaataattcagta

SEQ ID NO: 20994 - RNA, 20 nt, synthetic construct
  source 1..20: mol_type = other RNA
tactcgagattagattcaga

SEQ ID NO: 20995 - RNA, 20 nt, synthetic construct
  source 1..20: mol_type = other RNA
tactcggaaggctcaggcag

SEQ ID NO: 20996 - RNA, 20 nt, synthetic construct
  source 1..20: mol_type = other RNA
tactctgcttaatatgtcaa

SEQ ID NO: 20997 - RNA, 20 nt, synthetic construct
  source 1..20: mol_type = other RNA
tactgaattatttaggagta

SEQ ID NO: 20998 - RNA, 20 nt, synthetic construct
  source 1..20: mol_type = other RNA
tactgtggttatgcaaattt

SEQ ID NO: 20999 - RNA, 20 nt, synthetic construct
  source 1..20: mol_type = other RNA
tacttacatgctttgcagtt

SEQ ID NO: 21000 - RNA, 20 nt, synthetic construct
  source 1..20: mol_type = other RNA
tacttagggtcacctccgta

SEQ ID NO: 21001 - RNA, 20 nt, synthetic construct
  source 1..20: mol_type = other RNA
tagaacaaggacaaatttgc

SEQ ID NO: 21002 - RNA, 20 nt, synthetic construct
  source 1..20: mol_type = other RNA
tagaggagaaagttcagttt

SEQ ID NO: 21003 - RNA, 20 nt, synthetic construct
  source 1..20: mol_type = other RNA
tagaggctgaggtggaagga

SEQ ID NO: 21004 - RNA, 20 nt, synthetic construct
  source 1..20: mol_type = other RNA
tagagggtatacggaggtga

SEQ ID NO: 21005 - RNA, 20 nt, synthetic construct
  source 1..20: mol_type = other RNA
tagatgagattggtcatagg

SEQ ID NO: 21006 - RNA, 20 nt, synthetic construct
  source 1..20: mol_type = other RNA
tagattcagatgaggcattc

SEQ ID NO: 21007 - RNA, 20 nt, synthetic construct
  source 1..20: mol_type = other RNA
tagatttgctgattttgaca

SEQ ID NO: 21008 - RNA, 20 nt, synthetic construct
  source 1..20: mol_type = other RNA
tagcgaggtgttgtggtaca

SEQ ID NO: 21009 - RNA, 20 nt, synthetic construct
  source 1..20: mol_type = other RNA
tagctggctttggtatttgg

SEQ ID NO: 21010 - RNA, 20 nt, synthetic construct
  source 1..20: mol_type = other RNA
taggagatgaagtctgaggt

SEQ ID NO: 21011 - RNA, 20 nt, synthetic construct
  source 1..20: mol_type = other RNA
taggagtaaaggtgcataat

SEQ ID NO: 21012 - RNA, 20 nt, synthetic construct
  source 1..20: mol_type = other RNA
taggattgtatagtgtatca

SEQ ID NO: 21013 - RNA, 20 nt, synthetic construct
  source 1..20: mol_type = other RNA
taggcaggtgctactattat

SEQ ID NO: 21014 - RNA, 20 nt, synthetic construct
  source 1..20: mol_type = other RNA
tagggtcacctccgtatacc

SEQ ID NO: 21015 - RNA, 20 nt, synthetic construct
  source 1..20: mol_type = other RNA
tagggttgtcaaaatcagca

SEQ ID NO: 21016 - RNA, 20 nt, synthetic construct
  source 1..20: mol_type = other RNA
tagtaacttgacagtggaga

SEQ ID NO: 21017 - RNA, 20 nt, synthetic construct
  source 1..20: mol_type = other RNA
tagtagcacctgcctaaggg

SEQ ID NO: 21018 - RNA, 20 nt, synthetic construct
  source 1..20: mol_type = other RNA
tagtcccagttactcggaag

SEQ ID NO: 21019 - RNA, 20 nt, synthetic construct
  source 1..20: mol_type = other RNA
tagtgacagacattttttaa

SEQ ID NO: 21020 - RNA, 20 nt, synthetic construct
  source 1..20: mol_type = other RNA
tagtgagcaagcaatttgct

SEQ ID NO: 21021 - RNA, 20 nt, synthetic construct
  source 1..20: mol_type = other RNA
tagtgcatttcatcttaaac

SEQ ID NO: 21022 - RNA, 20 nt, synthetic construct
  source 1..20: mol_type = other RNA
tagtgcttcatctgtaaaac

SEQ ID NO: 21023 - RNA, 20 nt, synthetic construct
  source 1..20: mol_type = other RNA
tagtgtcccttaacaataaa

SEQ ID NO: 21024 - RNA, 20 nt, synthetic construct
  source 1..20: mol_type = other RNA
tagtgtttttatccatgcca

SEQ ID NO: 21025 - RNA, 20 nt, synthetic construct
  source 1..20: mol_type = other RNA
tagttttacagatgaagcac

SEQ ID NO: 21026 - RNA, 20 nt, synthetic construct
  source 1..20: mol_type = other RNA
tagttttagtgcttcatctg

SEQ ID NO: 21027 - RNA, 20 nt, synthetic construct
  source 1..20: mol_type = other RNA
tataaccatcagacaaaccc

SEQ ID NO: 21028 - RNA, 20 nt, synthetic construct
  source 1..20: mol_type = other RNA
tatacaatcctatgaccaat

SEQ ID NO: 21029 - RNA, 20 nt, synthetic construct
  source 1..20: mol_type = other RNA
tataccagcaccaaactgaa

SEQ ID NO: 21030 - RNA, 20 nt, synthetic construct
  source 1..20: mol_type = other RNA
tataccctctaaaattgtta

SEQ ID NO: 21031 - RNA, 20 nt, synthetic construct
  source 1..20: mol_type = other RNA
tatacggaggtgaccctaag

SEQ ID NO: 21032 - RNA, 20 nt, synthetic construct
  source 1..20: mol_type = other RNA
tatactcgagattagattca

SEQ ID NO: 21033 - RNA, 20 nt, synthetic construct
  source 1..20: mol_type = other RNA
tatagaggctgaggtggaag

SEQ ID NO: 21034 - RNA, 20 nt, synthetic construct
  source 1..20: mol_type = other RNA
tatagtgagcaagcaatttg

SEQ ID NO: 21035 - RNA, 20 nt, synthetic construct
  source 1..20: mol_type = other RNA
tatatcttatgtttatcacc

SEQ ID NO: 21036 - RNA, 20 nt, synthetic construct
  source 1..20: mol_type = other RNA
tatatgtgattccttgttac

SEQ ID NO: 21037 - RNA, 20 nt, synthetic construct
  source 1..20: mol_type = other RNA
tatcaatattagatttgctg

SEQ ID NO: 21038 - RNA, 20 nt, synthetic construct
  source 1..20: mol_type = other RNA
tatcacccgacagttgttaa

SEQ ID NO: 21039 - RNA, 20 nt, synthetic construct
  source 1..20: mol_type = other RNA
tatccatgccaagcgatgat

SEQ ID NO: 21040 - RNA, 20 nt, synthetic construct
  source 1..20: mol_type = other RNA
tatccctgttttacagagaa

SEQ ID NO: 21041 - RNA, 20 nt, synthetic construct
  source 1..20: mol_type = other RNA
tatcgagaggcacatgccat

SEQ ID NO: 21042 - RNA, 20 nt, synthetic construct
  source 1..20: mol_type = other RNA
tatcttatgtttatcacccg

SEQ ID NO: 21043 - RNA, 20 nt, synthetic construct
  source 1..20: mol_type = other RNA
tatgaccaatctcatctaca

SEQ ID NO: 21044 - RNA, 20 nt, synthetic construct
  source 1..20: mol_type = other RNA
tatgattatttagaggagaa

SEQ ID NO: 21045 - RNA, 20 nt, synthetic construct
  source 1..20: mol_type = other RNA
tatgcaaatttgtccttgtt

SEQ ID NO: 21046 - RNA, 20 nt, synthetic construct
  source 1..20: mol_type = other RNA
tatgcacctttactcctaaa

SEQ ID NO: 21047 - RNA, 20 nt, synthetic construct
  source 1..20: mol_type = other RNA
tatgggcgtgtaccacaaca

SEQ ID NO: 21048 - RNA, 20 nt, synthetic construct
  source 1..20: mol_type = other RNA
tatgtcaatgtcacaagaga

SEQ ID NO: 21049 - RNA, 20 nt, synthetic construct
  source 1..20: mol_type = other RNA
tatgtccaactgcaaagcat

SEQ ID NO: 21050 - RNA, 20 nt, synthetic construct
  source 1..20: mol_type = other RNA
tatgtgattccttgttactt

SEQ ID NO: 21051 - RNA, 20 nt, synthetic construct
  source 1..20: mol_type = other RNA
tatgtttatcacccgacagt

SEQ ID NO: 21052 - RNA, 20 nt, synthetic construct
  source 1..20: mol_type = other RNA
tattaagcagagtacaaggc

SEQ ID NO: 21053 - RNA, 20 nt, synthetic construct
  source 1..20: mol_type = other RNA
tattagatttgctgattttg

SEQ ID NO: 21054 - RNA, 20 nt, synthetic construct
  source 1..20: mol_type = other RNA
tattatccctgttttacaga

SEQ ID NO: 21055 - RNA, 20 nt, synthetic construct
  source 1..20: mol_type = other RNA
tattattccaccactgcact

SEQ ID NO: 21056 - RNA, 20 nt, synthetic construct
  source 1..20: mol_type = other RNA
tattcaaattttatagaggc

SEQ ID NO: 21057 - RNA, 20 nt, synthetic construct
  source 1..20: mol_type = other RNA
tattccctttataatttgca

SEQ ID NO: 21058 - RNA, 20 nt, synthetic construct
  source 1..20: mol_type = other RNA
tattcctgccaagaatgcct

SEQ ID NO: 21059 - RNA, 20 nt, synthetic construct
  source 1..20: mol_type = other RNA
tattgatacactatacaatc

SEQ ID NO: 21060 - RNA, 20 nt, synthetic construct
  source 1..20: mol_type = other RNA
tattgcagaagtgagtgtgt

SEQ ID NO: 21061 - RNA, 20 nt, synthetic construct
  source 1..20: mol_type = other RNA
tattgttaagggacactact

SEQ ID NO: 21062 - RNA, 20 nt, synthetic construct
  source 1..20: mol_type = other RNA
tatttagaggagaaagttca

SEQ ID NO: 21063 - RNA, 20 nt, synthetic construct
  source 1..20: mol_type = other RNA
tatttaggagtaaaggtgca

SEQ ID NO: 21064 - RNA, 20 nt, synthetic construct
  source 1..20: mol_type = other RNA
tatttccttagaacaaggac

SEQ ID NO: 21065 - RNA, 20 nt, synthetic construct
  source 1..20: mol_type = other RNA
tatttggccaaaagttaatg

SEQ ID NO: 21066 - RNA, 20 nt, synthetic construct
  source 1..20: mol_type = other RNA
tattttggtttaaatcccag

SEQ ID NO: 21067 - RNA, 20 nt, synthetic construct
  source 1..20: mol_type = other RNA
tcaaaatcagcaaatctaat

SEQ ID NO: 21068 - RNA, 20 nt, synthetic construct
  source 1..20: mol_type = other RNA
tcaaactcaagtgatccttc

SEQ ID NO: 21069 - RNA, 20 nt, synthetic construct
  source 1..20: mol_type = other RNA
tcaaagttaacatcgccaga

SEQ ID NO: 21070 - RNA, 20 nt, synthetic construct
  source 1..20: mol_type = other RNA
tcaaattttatagaggctga

SEQ ID NO: 21071 - RNA, 20 nt, synthetic construct
  source 1..20: mol_type = other RNA
tcaactctcccctttttatt

SEQ ID NO: 21072 - RNA, 20 nt, synthetic construct
  source 1..20: mol_type = other RNA
tcaaggctgcagtgagttat

SEQ ID NO: 21073 - RNA, 20 nt, synthetic construct
  source 1..20: mol_type = other RNA
tcaagtgatccttccacctc

SEQ ID NO: 21074 - RNA, 20 nt, synthetic construct
  source 1..20: mol_type = other RNA
tcaagttactattattccct

SEQ ID NO: 21075 - RNA, 20 nt, synthetic construct
  source 1..20: mol_type = other RNA
tcaatattagatttgctgat

SEQ ID NO: 21076 - RNA, 20 nt, synthetic construct
  source 1..20: mol_type = other RNA
tcaatgtcacaagagagaaa

SEQ ID NO: 21077 - RNA, 20 nt, synthetic construct
  source 1..20: mol_type = other RNA
tcaatttgggtttgtctgat

SEQ ID NO: 21078 - RNA, 20 nt, synthetic construct
  source 1..20: mol_type = other RNA
tcacaagagagaaagacaga

SEQ ID NO: 21079 - RNA, 20 nt, synthetic construct
  source 1..20: mol_type = other RNA
tcacagggccttggcctgta

SEQ ID NO: 21080 - RNA, 20 nt, synthetic construct
  source 1..20: mol_type = other RNA
tcacatatagtgagcaagca

SEQ ID NO: 21081 - RNA, 20 nt, synthetic construct
  source 1..20: mol_type = other RNA
tcaccaactgatcaaagtta

SEQ ID NO: 21082 - RNA, 20 nt, synthetic construct
  source 1..20: mol_type = other RNA
tcacccgacagttgttaatc

SEQ ID NO: 21083 - RNA, 20 nt, synthetic construct
  source 1..20: mol_type = other RNA
tcacctccgtataccctcta

SEQ ID NO: 21084 - RNA, 20 nt, synthetic construct
  source 1..20: mol_type = other RNA
tcactaaagagaaaatcatc

SEQ ID NO: 21085 - RNA, 20 nt, synthetic construct
  source 1..20: mol_type = other RNA
tcactatatgtgattccttg

SEQ ID NO: 21086 - RNA, 20 nt, synthetic construct
  source 1..20: mol_type = other RNA
tcacttctgcaatattcctg

SEQ ID NO: 21087 - RNA, 20 nt, synthetic construct
  source 1..20: mol_type = other RNA
tcacttgagtttgaaaccag

SEQ ID NO: 21088 - RNA, 20 nt, synthetic construct
  source 1..20: mol_type = other RNA
tcagacaaacccaaattgag

SEQ ID NO: 21089 - RNA, 20 nt, synthetic construct
  source 1..20: mol_type = other RNA
tcagacttcatctcctaagc

SEQ ID NO: 21090 - RNA, 20 nt, synthetic construct
  source 1..20: mol_type = other RNA
tcagatgaggcattcttggc

SEQ ID NO: 21091 - RNA, 20 nt, synthetic construct
  source 1..20: mol_type = other RNA
tcagcaaatctaatattgat

SEQ ID NO: 21092 - RNA, 20 nt, synthetic construct
  source 1..20: mol_type = other RNA
tcagcctctataaaatttga

SEQ ID NO: 21093 - RNA, 20 nt, synthetic construct
  source 1..20: mol_type = other RNA
tcagctcttcagtctgtctt

SEQ ID NO: 21094 - RNA, 20 nt, synthetic construct
  source 1..20: mol_type = other RNA
tcagcttttgcattaatctc

SEQ ID NO: 21095 - RNA, 20 nt, synthetic construct
  source 1..20: mol_type = other RNA
tcaggcaggaggattgcttg

SEQ ID NO: 21096 - RNA, 20 nt, synthetic construct
  source 1..20: mol_type = other RNA
tcagtatttatttccttaga

SEQ ID NO: 21097 - RNA, 20 nt, synthetic construct
  source 1..20: mol_type = other RNA
tcagtctggatcagctcttc

SEQ ID NO: 21098 - RNA, 20 nt, synthetic construct
  source 1..20: mol_type = other RNA
tcagtctgtctttctctctt

SEQ ID NO: 21099 - RNA, 20 nt, synthetic construct
  source 1..20: mol_type = other RNA
tcagtgcatcttatcgagag

SEQ ID NO: 21100 - RNA, 20 nt, synthetic construct
  source 1..20: mol_type = other RNA
tcagttggtgaaggtggtgt

SEQ ID NO: 21101 - RNA, 20 nt, synthetic construct
  source 1..20: mol_type = other RNA
tcagtttggtgctggtatat

SEQ ID NO: 21102 - RNA, 20 nt, synthetic construct
  source 1..20: mol_type = other RNA
tcagtttttggtcaatcctt

SEQ ID NO: 21103 - RNA, 20 nt, synthetic construct
  source 1..20: mol_type = other RNA
tcataagcatttgaaaatgg

SEQ ID NO: 21104 - RNA, 20 nt, synthetic construct
  source 1..20: mol_type = other RNA
tcataaggattgaccaaaaa

SEQ ID NO: 21105 - RNA, 20 nt, synthetic construct
  source 1..20: mol_type = other RNA
tcataggattgtatagtgta

SEQ ID NO: 21106 - RNA, 20 nt, synthetic construct
  source 1..20: mol_type = other RNA
tcatcatcgcttggcatgga

SEQ ID NO: 21107 - RNA, 20 nt, synthetic construct
  source 1..20: mol_type = other RNA
tcatcgcttggcatggataa

SEQ ID NO: 21108 - RNA, 20 nt, synthetic construct
  source 1..20: mol_type = other RNA
tcatctacaactttattcaa

SEQ ID NO: 21109 - RNA, 20 nt, synthetic construct
  source 1..20: mol_type = other RNA
tcatctcctaagcctcggtt

SEQ ID NO: 21110 - RNA, 20 nt, synthetic construct
  source 1..20: mol_type = other RNA
tcatctgaatctaatctcga

SEQ ID NO: 21111 - RNA, 20 nt, synthetic construct
  source 1..20: mol_type = other RNA
tcatctgtaaaactactttt

SEQ ID NO: 21112 - RNA, 20 nt, synthetic construct
  source 1..20: mol_type = other RNA
tcatcttaaactgcaaatta

SEQ ID NO: 21113 - RNA, 20 nt, synthetic construct
  source 1..20: mol_type = other RNA
tcattaacttttggccaaat

SEQ ID NO: 21114 - RNA, 20 nt, synthetic construct
  source 1..20: mol_type = other RNA
tcattatgcacctttactcc

SEQ ID NO: 21115 - RNA, 20 nt, synthetic construct
  source 1..20: mol_type = other RNA
tccaactgcaaagcatgtaa

SEQ ID NO: 21116 - RNA, 20 nt, synthetic construct
  source 1..20: mol_type = other RNA
tccaagatgcaatcccagat

SEQ ID NO: 21117 - RNA, 20 nt, synthetic construct
  source 1..20: mol_type = other RNA
tccaccaacacctcagactt

SEQ ID NO: 21118 - RNA, 20 nt, synthetic construct
  source 1..20: mol_type = other RNA
tccacctcagcctctataaa

SEQ ID NO: 21119 - RNA, 20 nt, synthetic construct
  source 1..20: mol_type = other RNA
tccactgtcaagttactatt

SEQ ID NO: 21120 - RNA, 20 nt, synthetic construct
  source 1..20: mol_type = other RNA
tccagactgaagaaggctcg

SEQ ID NO: 21121 - RNA, 20 nt, synthetic construct
  source 1..20: mol_type = other RNA
tccatgccaagcgatgatga

SEQ ID NO: 21122 - RNA, 20 nt, synthetic construct
  source 1..20: mol_type = other RNA
tcccagatcagcttttgcat

SEQ ID NO: 21123 - RNA, 20 nt, synthetic construct
  source 1..20: mol_type = other RNA
tcccagctccaccaacacct

SEQ ID NO: 21124 - RNA, 20 nt, synthetic construct
  source 1..20: mol_type = other RNA
tcccagtagtgtcccttaac

SEQ ID NO: 21125 - RNA, 20 nt, synthetic construct
  source 1..20: mol_type = other RNA
tcccagttactcggaaggct

SEQ ID NO: 21126 - RNA, 20 nt, synthetic construct
  source 1..20: mol_type = other RNA
tcccctttctggcgatgtta

SEQ ID NO: 21127 - RNA, 20 nt, synthetic construct
  source 1..20: mol_type = other RNA
tcccctttttattgttaagg

SEQ ID NO: 21128 - RNA, 20 nt, synthetic construct
  source 1..20: mol_type = other RNA
tcccggactcaagcaatcct

SEQ ID NO: 21129 - RNA, 20 nt, synthetic construct
  source 1..20: mol_type = other RNA
tccctgttttacagagaagg

SEQ ID NO: 21130 - RNA, 20 nt, synthetic construct
  source 1..20: mol_type = other RNA
tcccttaacaataaaaaggg

SEQ ID NO: 21131 - RNA, 20 nt, synthetic construct
  source 1..20: mol_type = other RNA
tccctttataatttgcagtt

SEQ ID NO: 21132 - RNA, 20 nt, synthetic construct
  source 1..20: mol_type = other RNA
tccgagtaactgggactatg

SEQ ID NO: 21133 - RNA, 20 nt, synthetic construct
  source 1..20: mol_type = other RNA
tccgggagttcaaggctgca

SEQ ID NO: 21134 - RNA, 20 nt, synthetic construct
  source 1..20: mol_type = other RNA
tccgtataccctctaaaatt

SEQ ID NO: 21135 - RNA, 20 nt, synthetic construct
  source 1..20: mol_type = other RNA
tcctaagcctcggtttcctt

SEQ ID NO: 21136 - RNA, 20 nt, synthetic construct
  source 1..20: mol_type = other RNA
tcctactttttgtagagacg

SEQ ID NO: 21137 - RNA, 20 nt, synthetic construct
  source 1..20: mol_type = other RNA
tcctatgaccaatctcatct

SEQ ID NO: 21138 - RNA, 20 nt, synthetic construct
  source 1..20: mol_type = other RNA
tcctcctgcctgagccttcc

SEQ ID NO: 21139 - RNA, 20 nt, synthetic construct
  source 1..20: mol_type = other RNA
tcctctaaataatcataagg

SEQ ID NO: 21140 - RNA, 20 nt, synthetic construct
  source 1..20: mol_type = other RNA
tcctgccaagaatgcctcat

SEQ ID NO: 21141 - RNA, 20 nt, synthetic construct
  source 1..20: mol_type = other RNA
tcctgcctgagccttccgag

SEQ ID NO: 21142 - RNA, 20 nt, synthetic construct
  source 1..20: mol_type = other RNA
tccttagaacaaggacaaat

SEQ ID NO: 21143 - RNA, 20 nt, synthetic construct
  source 1..20: mol_type = other RNA
tccttatgattatttagagg

SEQ ID NO: 21144 - RNA, 20 nt, synthetic construct
  source 1..20: mol_type = other RNA
tccttccacctcagcctcta

SEQ ID NO: 21145 - RNA, 20 nt, synthetic construct
  source 1..20: mol_type = other RNA
tccttctctgtaaaacaggg

SEQ ID NO: 21146 - RNA, 20 nt, synthetic construct
  source 1..20: mol_type = other RNA
tccttgttacttagggtcac

SEQ ID NO: 21147 - RNA, 20 nt, synthetic construct
  source 1..20: mol_type = other RNA
tccttgttctaaggaaataa

SEQ ID NO: 21148 - RNA, 20 nt, synthetic construct
  source 1..20: mol_type = other RNA
tcgagaggcacatgccatct

SEQ ID NO: 21149 - RNA, 20 nt, synthetic construct
  source 1..20: mol_type = other RNA
tcgagattaatgcaaaagct

SEQ ID NO: 21150 - RNA, 20 nt, synthetic construct
  source 1..20: mol_type = other RNA
tcgagattagattcagatga

SEQ ID NO: 21151 - RNA, 20 nt, synthetic construct
  source 1..20: mol_type = other RNA
tcgagccttcttcagtctgg

SEQ ID NO: 21152 - RNA, 20 nt, synthetic construct
  source 1..20: mol_type = other RNA
tcgagtataaccatcagaca

SEQ ID NO: 21153 - RNA, 20 nt, synthetic construct
  source 1..20: mol_type = other RNA
tcgataagatgcactgaaga

SEQ ID NO: 21154 - RNA, 20 nt, synthetic construct
  source 1..20: mol_type = other RNA
tcgccagaaaggggacagat

SEQ ID NO: 21155 - RNA, 20 nt, synthetic construct
  source 1..20: mol_type = other RNA
tcgcttggcatggataaaaa

SEQ ID NO: 21156 - RNA, 20 nt, synthetic construct
  source 1..20: mol_type = other RNA
tcgggtgataaacataagat

SEQ ID NO: 21157 - RNA, 20 nt, synthetic construct
  source 1..20: mol_type = other RNA
tcggtttccttctctgtaaa

SEQ ID NO: 21158 - RNA, 20 nt, synthetic construct
  source 1..20: mol_type = other RNA
tcgttttgagacagggtctc

SEQ ID NO: 21159 - RNA, 20 nt, synthetic construct
  source 1..20: mol_type = other RNA
tctaaggaaataaatactga

SEQ ID NO: 21160 - RNA, 20 nt, synthetic construct
  source 1..20: mol_type = other RNA
tctaatctcgagtataacca

SEQ ID NO: 21161 - RNA, 20 nt, synthetic construct
  source 1..20: mol_type = other RNA
tctacaaaaagtaggaaaaa

SEQ ID NO: 21162 - RNA, 20 nt, synthetic construct
  source 1..20: mol_type = other RNA
tctcaatttgggtttgtctg

SEQ ID NO: 21163 - RNA, 20 nt, synthetic construct
  source 1..20: mol_type = other RNA
tctcatctacaactttattc

SEQ ID NO: 21164 - RNA, 20 nt, synthetic construct
  source 1..20: mol_type = other RNA
tctccactgtcaagttacta

SEQ ID NO: 21165 - RNA, 20 nt, synthetic construct
  source 1..20: mol_type = other RNA
tctcccctttttattgttaa

SEQ ID NO: 21166 - RNA, 20 nt, synthetic construct
  source 1..20: mol_type = other RNA
tctcctaagcctcggtttcc

SEQ ID NO: 21167 - RNA, 20 nt, synthetic construct
  source 1..20: mol_type = other RNA
tctcctctaaataatcataa

SEQ ID NO: 21168 - RNA, 20 nt, synthetic construct
  source 1..20: mol_type = other RNA
tctcgagccttcttcagtct

SEQ ID NO: 21169 - RNA, 20 nt, synthetic construct
  source 1..20: mol_type = other RNA
tctcgagtataaccatcaga

SEQ ID NO: 21170 - RNA, 20 nt, synthetic construct
  source 1..20: mol_type = other RNA
tctcgataagatgcactgaa

SEQ ID NO: 21171 - RNA, 20 nt, synthetic construct
  source 1..20: mol_type = other RNA
tctctacaaaaagtaggaaa

SEQ ID NO: 21172 - RNA, 20 nt, synthetic construct
  source 1..20: mol_type = other RNA
tctctccactgtcaagttac

SEQ ID NO: 21173 - RNA, 20 nt, synthetic construct
  source 1..20: mol_type = other RNA
tctctcttgtgacattgaca

SEQ ID NO: 21174 - RNA, 20 nt, synthetic construct
  source 1..20: mol_type = other RNA
tctctgtaaaacagggataa

SEQ ID NO: 21175 - RNA, 20 nt, synthetic construct
  source 1..20: mol_type = other RNA
tctcttgtgacattgacata

SEQ ID NO: 21176 - RNA, 20 nt, synthetic construct
  source 1..20: mol_type = other RNA
tctctttagtgacagacatt

SEQ ID NO: 21177 - RNA, 20 nt, synthetic construct
  source 1..20: mol_type = other RNA
tctgaatctaatctcgagta

SEQ ID NO: 21178 - RNA, 20 nt, synthetic construct
  source 1..20: mol_type = other RNA
tctgaggtgttggtggagct

SEQ ID NO: 21179 - RNA, 20 nt, synthetic construct
  source 1..20: mol_type = other RNA
tctgatggttatactcgaga

SEQ ID NO: 21180 - RNA, 20 nt, synthetic construct
  source 1..20: mol_type = other RNA
tctgcaatattcctgccaag

SEQ ID NO: 21181 - RNA, 20 nt, synthetic construct
  source 1..20: mol_type = other RNA
tctgccaggtctctccactg

SEQ ID NO: 21182 - RNA, 20 nt, synthetic construct
  source 1..20: mol_type = other RNA
tctgcttaatatgtcaatgt

SEQ ID NO: 21183 - RNA, 20 nt, synthetic construct
  source 1..20: mol_type = other RNA
tctggatcagctcttcagtc

SEQ ID NO: 21184 - RNA, 20 nt, synthetic construct
  source 1..20: mol_type = other RNA
tctggcgatgttaactttga

SEQ ID NO: 21185 - RNA, 20 nt, synthetic construct
  source 1..20: mol_type = other RNA
tctgggattgcatcttggac

SEQ ID NO: 21186 - RNA, 20 nt, synthetic construct
  source 1..20: mol_type = other RNA
tctgtaaaacagggataata

SEQ ID NO: 21187 - RNA, 20 nt, synthetic construct
  source 1..20: mol_type = other RNA
tctgtcactaaagagaaaat

SEQ ID NO: 21188 - RNA, 20 nt, synthetic construct
  source 1..20: mol_type = other RNA
tctgtcccctttctggcgat

SEQ ID NO: 21189 - RNA, 20 nt, synthetic construct
  source 1..20: mol_type = other RNA
tctgtctttctctcttgtga

SEQ ID NO: 21190 - RNA, 20 nt, synthetic construct
  source 1..20: mol_type = other RNA
tcttatcgagaggcacatgc

SEQ ID NO: 21191 - RNA, 20 nt, synthetic construct
  source 1..20: mol_type = other RNA
tcttatgtttatcacccgac

SEQ ID NO: 21192 - RNA, 20 nt, synthetic construct
  source 1..20: mol_type = other RNA
tcttcagtctggatcagctc

SEQ ID NO: 21193 - RNA, 20 nt, synthetic construct
  source 1..20: mol_type = other RNA
tcttcagtctgtctttctct

SEQ ID NO: 21194 - RNA, 20 nt, synthetic construct
  source 1..20: mol_type = other RNA
tcttcagtgcatcttatcga

SEQ ID NO: 21195 - RNA, 20 nt, synthetic construct
  source 1..20: mol_type = other RNA
tcttggacctcaactctccc

SEQ ID NO: 21196 - RNA, 20 nt, synthetic construct
  source 1..20: mol_type = other RNA
tcttggcaggaatattgcag

SEQ ID NO: 21197 - RNA, 20 nt, synthetic construct
  source 1..20: mol_type = other RNA
tcttgtgacattgacatatt

SEQ ID NO: 21198 - RNA, 20 nt, synthetic construct
  source 1..20: mol_type = other RNA
tctttagtgacagacatttt

SEQ ID NO: 21199 - RNA, 20 nt, synthetic construct
  source 1..20: mol_type = other RNA
tctttctctcttgtgacatt

SEQ ID NO: 21200 - RNA, 20 nt, synthetic construct
  source 1..20: mol_type = other RNA
tgaaaagcaaattgcttgct

SEQ ID NO: 21201 - RNA, 20 nt, synthetic construct
  source 1..20: mol_type = other RNA
tgaaaatgggttcattatgc

SEQ ID NO: 21202 - RNA, 20 nt, synthetic construct
  source 1..20: mol_type = other RNA
tgaaatgcactagttttagt

SEQ ID NO: 21203 - RNA, 20 nt, synthetic construct
  source 1..20: mol_type = other RNA
tgaacccattttcaaatgct

SEQ ID NO: 21204 - RNA, 20 nt, synthetic construct
  source 1..20: mol_type = other RNA
tgaactttctcctctaaata

SEQ ID NO: 21205 - RNA, 20 nt, synthetic construct
  source 1..20: mol_type = other RNA
tgaagaaggctcgagattaa

SEQ ID NO: 21206 - RNA, 20 nt, synthetic construct
  source 1..20: mol_type = other RNA
tgaagacacacactcacttc

SEQ ID NO: 21207 - RNA, 20 nt, synthetic construct
  source 1..20: mol_type = other RNA
tgaagagctgatccagactg

SEQ ID NO: 21208 - RNA, 20 nt, synthetic construct
  source 1..20: mol_type = other RNA
tgaagcactaaaactagtgc

SEQ ID NO: 21209 - RNA, 20 nt, synthetic construct
  source 1..20: mol_type = other RNA
tgaaggtggtgtctgccagg

SEQ ID NO: 21210 - RNA, 20 nt, synthetic construct
  source 1..20: mol_type = other RNA
tgaagtctgaggtgttggtg

SEQ ID NO: 21211 - RNA, 20 nt, synthetic construct
  source 1..20: mol_type = other RNA
tgaataaagttgtagatgag

SEQ ID NO: 21212 - RNA, 20 nt, synthetic construct
  source 1..20: mol_type = other RNA
tgaatctaatctcgagtata

SEQ ID NO: 21213 - RNA, 20 nt, synthetic construct
  source 1..20: mol_type = other RNA
tgaattatttaggagtaaag

SEQ ID NO: 21214 - RNA, 20 nt, synthetic construct
  source 1..20: mol_type = other RNA
tgacaaccctactgtggtta

SEQ ID NO: 21215 - RNA, 20 nt, synthetic construct
  source 1..20: mol_type = other RNA
tgacagtggagagacctggc

SEQ ID NO: 21216 - RNA, 20 nt, synthetic construct
  source 1..20: mol_type = other RNA
tgacatattaagcagagtac

SEQ ID NO: 21217 - RNA, 20 nt, synthetic construct
  source 1..20: mol_type = other RNA
tgacattgacatattaagca

SEQ ID NO: 21218 - RNA, 20 nt, synthetic construct
  source 1..20: mol_type = other RNA
tgaccaaaaactgaaaagca

SEQ ID NO: 21219 - RNA, 20 nt, synthetic construct
  source 1..20: mol_type = other RNA
tgaccaatctcatctacaac

SEQ ID NO: 21220 - RNA, 20 nt, synthetic construct
  source 1..20: mol_type = other RNA
tgaccctaagtaacaaggaa

SEQ ID NO: 21221 - RNA, 20 nt, synthetic construct
  source 1..20: mol_type = other RNA
tgactgagcgagaccctgtc

SEQ ID NO: 21222 - RNA, 20 nt, synthetic construct
  source 1..20: mol_type = other RNA
tgactttagctggctttggt

SEQ ID NO: 21223 - RNA, 20 nt, synthetic construct
  source 1..20: mol_type = other RNA
tgactttggcagttagtgtt

SEQ ID NO: 21224 - RNA, 20 nt, synthetic construct
  source 1..20: mol_type = other RNA
tgagaccccgtctctacaaa

SEQ ID NO: 21225 - RNA, 20 nt, synthetic construct
  source 1..20: mol_type = other RNA
tgagagacagtttacaaaac

SEQ ID NO: 21226 - RNA, 20 nt, synthetic construct
  source 1..20: mol_type = other RNA
tgagattggtcataggattg

SEQ ID NO: 21227 - RNA, 20 nt, synthetic construct
  source 1..20: mol_type = other RNA
tgagcaagcaatttgctttt

SEQ ID NO: 21228 - RNA, 20 nt, synthetic construct
  source 1..20: mol_type = other RNA
tgagccttccgagtaactgg

SEQ ID NO: 21229 - RNA, 20 nt, synthetic construct
  source 1..20: mol_type = other RNA
tgagcgagaccctgtctcaa

SEQ ID NO: 21230 - RNA, 20 nt, synthetic construct
  source 1..20: mol_type = other RNA
tgaggcattcttggcaggaa

SEQ ID NO: 21231 - RNA, 20 nt, synthetic construct
  source 1..20: mol_type = other RNA
tgaggtccaagatgcaatcc

SEQ ID NO: 21232 - RNA, 20 nt, synthetic construct
  source 1..20: mol_type = other RNA
tgaggtggaaggatcacttg

SEQ ID NO: 21233 - RNA, 20 nt, synthetic construct
  source 1..20: mol_type = other RNA
tgaggtgttggtggagctgg

SEQ ID NO: 21234 - RNA, 20 nt, synthetic construct
  source 1..20: mol_type = other RNA
tgagtgtgtgtcttcagtgc

SEQ ID NO: 21235 - RNA, 20 nt, synthetic construct
  source 1..20: mol_type = other RNA
tgagttattattccaccact

SEQ ID NO: 21236 - RNA, 20 nt, synthetic construct
  source 1..20: mol_type = other RNA
tgataaacataagatatacc

SEQ ID NO: 21237 - RNA, 20 nt, synthetic construct
  source 1..20: mol_type = other RNA
tgatacactatacaatccta

SEQ ID NO: 21238 - RNA, 20 nt, synthetic construct
  source 1..20: mol_type = other RNA
tgatcaaagttaacatcgcc

SEQ ID NO: 21239 - RNA, 20 nt, synthetic construct
  source 1..20: mol_type = other RNA
tgatcagttggtgaaggtgg

SEQ ID NO: 21240 - RNA, 20 nt, synthetic construct
  source 1..20: mol_type = other RNA
tgatccagactgaagaaggc

SEQ ID NO: 21241 - RNA, 20 nt, synthetic construct
  source 1..20: mol_type = other RNA
tgatccttccacctcagcct

SEQ ID NO: 21242 - RNA, 20 nt, synthetic construct
  source 1..20: mol_type = other RNA
tgatctgggattgcatcttg

SEQ ID NO: 21243 - RNA, 20 nt, synthetic construct
  source 1..20: mol_type = other RNA
tgatgattttctctttagtg

SEQ ID NO: 21244 - RNA, 20 nt, synthetic construct
  source 1..20: mol_type = other RNA
tgatggttatactcgagatt

SEQ ID NO: 21245 - RNA, 20 nt, synthetic construct
  source 1..20: mol_type = other RNA
tgattatttagaggagaaag

SEQ ID NO: 21246 - RNA, 20 nt, synthetic construct
  source 1..20: mol_type = other RNA
tgattccttgttacttaggg

SEQ ID NO: 21247 - RNA, 20 nt, synthetic construct
  source 1..20: mol_type = other RNA
tgattttctctttagtgaca

SEQ ID NO: 21248 - RNA, 20 nt, synthetic construct
  source 1..20: mol_type = other RNA
tgattttgacaaccctactg

SEQ ID NO: 21249 - RNA, 20 nt, synthetic construct
  source 1..20: mol_type = other RNA
tgcaaaagctgatctgggat

SEQ ID NO: 21250 - RNA, 20 nt, synthetic construct
  source 1..20: mol_type = other RNA
tgcaaagcatgtaagtaaca

SEQ ID NO: 21251 - RNA, 20 nt, synthetic construct
  source 1..20: mol_type = other RNA
tgcaaattataaagggaata

SEQ ID NO: 21252 - RNA, 20 nt, synthetic construct
  source 1..20: mol_type = other RNA
tgcaaatttgtccttgttct

SEQ ID NO: 21253 - RNA, 20 nt, synthetic construct
  source 1..20: mol_type = other RNA
tgcaatattcctgccaagaa

SEQ ID NO: 21254 - RNA, 20 nt, synthetic construct
  source 1..20: mol_type = other RNA
tgcaatcccagatcagcttt

SEQ ID NO: 21255 - RNA, 20 nt, synthetic construct
  source 1..20: mol_type = other RNA
tgcacaagcccttaggcagg

SEQ ID NO: 21256 - RNA, 20 nt, synthetic construct
  source 1..20: mol_type = other RNA
tgcacctttactcctaaata

SEQ ID NO: 21257 - RNA, 20 nt, synthetic construct
  source 1..20: mol_type = other RNA
tgcactagttttagtgcttc

SEQ ID NO: 21258 - RNA, 20 nt, synthetic construct
  source 1..20: mol_type = other RNA
tgcactgaagacacacactc

SEQ ID NO: 21259 - RNA, 20 nt, synthetic construct
  source 1..20: mol_type = other RNA
tgcagaagtgagtgtgtgtc

SEQ ID NO: 21260 - RNA, 20 nt, synthetic construct
  source 1..20: mol_type = other RNA
tgcagtgagttattattcca

SEQ ID NO: 21261 - RNA, 20 nt, synthetic construct
  source 1..20: mol_type = other RNA
tgcagtggtggaataataac

SEQ ID NO: 21262 - RNA, 20 nt, synthetic construct
  source 1..20: mol_type = other RNA
tgcagttggacatattttgg

SEQ ID NO: 21263 - RNA, 20 nt, synthetic construct
  source 1..20: mol_type = other RNA
tgcagtttaagatgaaatgc

SEQ ID NO: 21264 - RNA, 20 nt, synthetic construct
  source 1..20: mol_type = other RNA
tgcataaccacagtagggtt

SEQ ID NO: 21265 - RNA, 20 nt, synthetic construct
  source 1..20: mol_type = other RNA
tgcataatgaacccattttc

SEQ ID NO: 21266 - RNA, 20 nt, synthetic construct
  source 1..20: mol_type = other RNA
tgcatcttatcgagaggcac

SEQ ID NO: 21267 - RNA, 20 nt, synthetic construct
  source 1..20: mol_type = other RNA
tgcatcttggacctcaactc

SEQ ID NO: 21268 - RNA, 20 nt, synthetic construct
  source 1..20: mol_type = other RNA
tgcattaatctcgagccttc

SEQ ID NO: 21269 - RNA, 20 nt, synthetic construct
  source 1..20: mol_type = other RNA
tgcatttcatcttaaactgc

SEQ ID NO: 21270 - RNA, 20 nt, synthetic construct
  source 1..20: mol_type = other RNA
tgccaaagtcattaactttt

SEQ ID NO: 21271 - RNA, 20 nt, synthetic construct
  source 1..20: mol_type = other RNA
tgccaagaatgcctcatctg

SEQ ID NO: 21272 - RNA, 20 nt, synthetic construct
  source 1..20: mol_type = other RNA
tgccaagcgatgatgatttt

SEQ ID NO: 21273 - RNA, 20 nt, synthetic construct
  source 1..20: mol_type = other RNA
tgccaggtctctccactgtc

SEQ ID NO: 21274 - RNA, 20 nt, synthetic construct
  source 1..20: mol_type = other RNA
tgccatctgtcccctttctg

SEQ ID NO: 21275 - RNA, 20 nt, synthetic construct
  source 1..20: mol_type = other RNA
tgcccaggctggtttcaaac

SEQ ID NO: 21276 - RNA, 20 nt, synthetic construct
  source 1..20: mol_type = other RNA
tgcctcatctgaatctaatc

SEQ ID NO: 21277 - RNA, 20 nt, synthetic construct
  source 1..20: mol_type = other RNA
tgcctctcgataagatgcac

SEQ ID NO: 21278 - RNA, 20 nt, synthetic construct
  source 1..20: mol_type = other RNA
tgcctgagccttccgagtaa

SEQ ID NO: 21279 - RNA, 20 nt, synthetic construct
  source 1..20: mol_type = other RNA
tgctactattatccctgttt

SEQ ID NO: 21280 - RNA, 20 nt, synthetic construct
  source 1..20: mol_type = other RNA
tgctcactatatgtgattcc

SEQ ID NO: 21281 - RNA, 20 nt, synthetic construct
  source 1..20: mol_type = other RNA
tgctgattttgacaacccta

SEQ ID NO: 21282 - RNA, 20 nt, synthetic construct
  source 1..20: mol_type = other RNA
tgctggtatatcttatgttt

SEQ ID NO: 21283 - RNA, 20 nt, synthetic construct
  source 1..20: mol_type = other RNA
tgcttaatatgtcaatgtca

SEQ ID NO: 21284 - RNA, 20 nt, synthetic construct
  source 1..20: mol_type = other RNA
tgcttcatctgtaaaactac

SEQ ID NO: 21285 - RNA, 20 nt, synthetic construct
  source 1..20: mol_type = other RNA
tgcttgctcactatatgtga

SEQ ID NO: 21286 - RNA, 20 nt, synthetic construct
  source 1..20: mol_type = other RNA
tgctttgcagttggacatat

SEQ ID NO: 21287 - RNA, 20 nt, synthetic construct
  source 1..20: mol_type = other RNA
tgcttttcagtttttggtca

SEQ ID NO: 21288 - RNA, 20 nt, synthetic construct
  source 1..20: mol_type = other RNA
tggaaggatcacttgagttt

SEQ ID NO: 21289 - RNA, 20 nt, synthetic construct
  source 1..20: mol_type = other RNA
tggaataataactcactgca

SEQ ID NO: 21290 - RNA, 20 nt, synthetic construct
  source 1..20: mol_type = other RNA
tggacatattttggtttaaa

SEQ ID NO: 21291 - RNA, 20 nt, synthetic construct
  source 1..20: mol_type = other RNA
tggacctcaactctcccctt

SEQ ID NO: 21292 - RNA, 20 nt, synthetic construct
  source 1..20: mol_type = other RNA
tggagagacctggcagacac

SEQ ID NO: 21293 - RNA, 20 nt, synthetic construct
  source 1..20: mol_type = other RNA
tggagctgggatttaaacca

SEQ ID NO: 21294 - RNA, 20 nt, synthetic construct
  source 1..20: mol_type = other RNA
tggagtgcagtggtggaata

SEQ ID NO: 21295 - RNA, 20 nt, synthetic construct
  source 1..20: mol_type = other RNA
tggataaaaacactaactgc

SEQ ID NO: 21296 - RNA, 20 nt, synthetic construct
  source 1..20: mol_type = other RNA
tggatcagctcttcagtctg

SEQ ID NO: 21297 - RNA, 20 nt, synthetic construct
  source 1..20: mol_type = other RNA
tggcagacaccaccttcacc

SEQ ID NO: 21298 - RNA, 20 nt, synthetic construct
  source 1..20: mol_type = other RNA
tggcaggaatattgcagaag

SEQ ID NO: 21299 - RNA, 20 nt, synthetic construct
  source 1..20: mol_type = other RNA
tggcagttagtgtttttatc

SEQ ID NO: 21300 - RNA, 20 nt, synthetic construct
  source 1..20: mol_type = other RNA
tggcatggataaaaacacta

SEQ ID NO: 21301 - RNA, 20 nt, synthetic construct
  source 1..20: mol_type = other RNA
tggcatgtgcctctcgataa

SEQ ID NO: 21302 - RNA, 20 nt, synthetic construct
  source 1..20: mol_type = other RNA
tggccaaaagttaatgactt

SEQ ID NO: 21303 - RNA, 20 nt, synthetic construct
  source 1..20: mol_type = other RNA
tggccaaataccaaagccag

SEQ ID NO: 21304 - RNA, 20 nt, synthetic construct
  source 1..20: mol_type = other RNA
tggcctgtattctttgttaa

SEQ ID NO: 21305 - RNA, 20 nt, synthetic construct
  source 1..20: mol_type = other RNA
tggcgatgttaactttgatc

SEQ ID NO: 21306 - RNA, 20 nt, synthetic construct
  source 1..20: mol_type = other RNA
tggctttggtatttggccaa

SEQ ID NO: 21307 - RNA, 20 nt, synthetic construct
  source 1..20: mol_type = other RNA
tgggactatgggcgtgtacc

SEQ ID NO: 21308 - RNA, 20 nt, synthetic construct
  source 1..20: mol_type = other RNA
tgggattgcatcttggacct

SEQ ID NO: 21309 - RNA, 20 nt, synthetic construct
  source 1..20: mol_type = other RNA
tgggatttaaaccaaaatat

SEQ ID NO: 21310 - RNA, 20 nt, synthetic construct
  source 1..20: mol_type = other RNA
tgggcgtgtaccacaacacc

SEQ ID NO: 21311 - RNA, 20 nt, synthetic construct
  source 1..20: mol_type = other RNA
tgggttcattatgcaccttt

SEQ ID NO: 21312 - RNA, 20 nt, synthetic construct
  source 1..20: mol_type = other RNA
tgggtttgtctgatggttat

SEQ ID NO: 21313 - RNA, 20 nt, synthetic construct
  source 1..20: mol_type = other RNA
tggtacacgcccatagtccc

SEQ ID NO: 21314 - RNA, 20 nt, synthetic construct
  source 1..20: mol_type = other RNA
tggtatatcttatgtttatc

SEQ ID NO: 21315 - RNA, 20 nt, synthetic construct
  source 1..20: mol_type = other RNA
tggtatttggccaaaagtta

SEQ ID NO: 21316 - RNA, 20 nt, synthetic construct
  source 1..20: mol_type = other RNA
tggtcaatccttatgattat

SEQ ID NO: 21317 - RNA, 20 nt, synthetic construct
  source 1..20: mol_type = other RNA
tggtcataggattgtatagt

SEQ ID NO: 21318 - RNA, 20 nt, synthetic construct
  source 1..20: mol_type = other RNA
tggtgaaggtggtgtctgcc

SEQ ID NO: 21319 - RNA, 20 nt, synthetic construct
  source 1..20: mol_type = other RNA
tggtgctggtatatcttatg

SEQ ID NO: 21320 - RNA, 20 nt, synthetic construct
  source 1..20: mol_type = other RNA
tggtggaataataactcact

SEQ ID NO: 21321 - RNA, 20 nt, synthetic construct
  source 1..20: mol_type = other RNA
tggtggagctgggatttaaa

SEQ ID NO: 21322 - RNA, 20 nt, synthetic construct
  source 1..20: mol_type = other RNA
tggtgtctgccaggtctctc

SEQ ID NO: 21323 - RNA, 20 nt, synthetic construct
  source 1..20: mol_type = other RNA
tggtgttttgtaaactgtct

SEQ ID NO: 21324 - RNA, 20 nt, synthetic construct
  source 1..20: mol_type = other RNA
tggttatactcgagattaga

SEQ ID NO: 21325 - RNA, 20 nt, synthetic construct
  source 1..20: mol_type = other RNA
tggttatgcaaatttgtcct

SEQ ID NO: 21326 - RNA, 20 nt, synthetic construct
  source 1..20: mol_type = other RNA
tggtttaaatcccagctcca

SEQ ID NO: 21327 - RNA, 20 nt, synthetic construct
  source 1..20: mol_type = other RNA
tggtttcaaactcaagtgat

SEQ ID NO: 21328 - RNA, 20 nt, synthetic construct
  source 1..20: mol_type = other RNA
tgtaaaacagggataatagt

SEQ ID NO: 21329 - RNA, 20 nt, synthetic construct
  source 1..20: mol_type = other RNA
tgtaaactgtctctcaattt

SEQ ID NO: 21330 - RNA, 20 nt, synthetic construct
  source 1..20: mol_type = other RNA
tgtaagtaacaattttagag

SEQ ID NO: 21331 - RNA, 20 nt, synthetic construct
  source 1..20: mol_type = other RNA
tgtaccacaacacctcgcta

SEQ ID NO: 21332 - RNA, 20 nt, synthetic construct
  source 1..20: mol_type = other RNA
tgtactctgcttaatatgtc

SEQ ID NO: 21333 - RNA, 20 nt, synthetic construct
  source 1..20: mol_type = other RNA
tgtagatgagattggtcata

SEQ ID NO: 21334 - RNA, 20 nt, synthetic construct
  source 1..20: mol_type = other RNA
tgtatcaatattagatttgc

SEQ ID NO: 21335 - RNA, 20 nt, synthetic construct
  source 1..20: mol_type = other RNA
tgtcaaaatcagcaaatcta

SEQ ID NO: 21336 - RNA, 20 nt, synthetic construct
  source 1..20: mol_type = other RNA
tgtcaagttactattattcc

SEQ ID NO: 21337 - RNA, 20 nt, synthetic construct
  source 1..20: mol_type = other RNA
tgtcaatgtcacaagagaga

SEQ ID NO: 21338 - RNA, 20 nt, synthetic construct
  source 1..20: mol_type = other RNA
tgtcacaagagagaaagaca

SEQ ID NO: 21339 - RNA, 20 nt, synthetic construct
  source 1..20: mol_type = other RNA
tgtcactaaagagaaaatca

SEQ ID NO: 21340 - RNA, 20 nt, synthetic construct
  source 1..20: mol_type = other RNA
tgtccaactgcaaagcatgt

SEQ ID NO: 21341 - RNA, 20 nt, synthetic construct
  source 1..20: mol_type = other RNA
tgtcccagtagtgtccctta

SEQ ID NO: 21342 - RNA, 20 nt, synthetic construct
  source 1..20: mol_type = other RNA
tgtcccctttctggcgatgt

SEQ ID NO: 21343 - RNA, 20 nt, synthetic construct
  source 1..20: mol_type = other RNA
tgtcccttaacaataaaaag

SEQ ID NO: 21344 - RNA, 20 nt, synthetic construct
  source 1..20: mol_type = other RNA
tgtccttgttctaaggaaat

SEQ ID NO: 21345 - RNA, 20 nt, synthetic construct
  source 1..20: mol_type = other RNA
tgtcgggtgataaacataag

SEQ ID NO: 21346 - RNA, 20 nt, synthetic construct
  source 1..20: mol_type = other RNA
tgtctgatggttatactcga

SEQ ID NO: 21347 - RNA, 20 nt, synthetic construct
  source 1..20: mol_type = other RNA
tgtctgccaggtctctccac

SEQ ID NO: 21348 - RNA, 20 nt, synthetic construct
  source 1..20: mol_type = other RNA
tgtctgtcactaaagagaaa

SEQ ID NO: 21349 - RNA, 20 nt, synthetic construct
  source 1..20: mol_type = other RNA
tgtcttcagtgcatcttatc

SEQ ID NO: 21350 - RNA, 20 nt, synthetic construct
  source 1..20: mol_type = other RNA
tgtctttctctcttgtgaca

SEQ ID NO: 21351 - RNA, 20 nt, synthetic construct
  source 1..20: mol_type = other RNA
tgtgacattgacatattaag

SEQ ID NO: 21352 - RNA, 20 nt, synthetic construct
  source 1..20: mol_type = other RNA
tgtgactttagctggctttg

SEQ ID NO: 21353 - RNA, 20 nt, synthetic construct
  source 1..20: mol_type = other RNA
tgtgattccttgttacttag

SEQ ID NO: 21354 - RNA, 20 nt, synthetic construct
  source 1..20: mol_type = other RNA
tgtgcctctcgataagatgc

SEQ ID NO: 21355 - RNA, 20 nt, synthetic construct
  source 1..20: mol_type = other RNA
tgtggtacacgcccatagtc

SEQ ID NO: 21356 - RNA, 20 nt, synthetic construct
  source 1..20: mol_type = other RNA
tgtggttatgcaaatttgtc

SEQ ID NO: 21357 - RNA, 20 nt, synthetic construct
  source 1..20: mol_type = other RNA
tgtgtaattttcataagcat

SEQ ID NO: 21358 - RNA, 20 nt, synthetic construct
  source 1..20: mol_type = other RNA
tgtgtcttcagtgcatctta

SEQ ID NO: 21359 - RNA, 20 nt, synthetic construct
  source 1..20: mol_type = other RNA
tgtgtgtcttcagtgcatct

SEQ ID NO: 21360 - RNA, 20 nt, synthetic construct
  source 1..20: mol_type = other RNA
tgttaactttgatcagttgg

SEQ ID NO: 21361 - RNA, 20 nt, synthetic construct
  source 1..20: mol_type = other RNA
tgttaagggacactactggg

SEQ ID NO: 21362 - RNA, 20 nt, synthetic construct
  source 1..20: mol_type = other RNA
tgttacttacatgctttgca

SEQ ID NO: 21363 - RNA, 20 nt, synthetic construct
  source 1..20: mol_type = other RNA
tgttacttagggtcacctcc

SEQ ID NO: 21364 - RNA, 20 nt, synthetic construct
  source 1..20: mol_type = other RNA
tgttctaaggaaataaatac

SEQ ID NO: 21365 - RNA, 20 nt, synthetic construct
  source 1..20: mol_type = other RNA
tgttggtggagctgggattt

SEQ ID NO: 21366 - RNA, 20 nt, synthetic construct
  source 1..20: mol_type = other RNA
tgttgtggtacacgcccata

SEQ ID NO: 21367 - RNA, 20 nt, synthetic construct
  source 1..20: mol_type = other RNA
tgtttatcacccgacagttg

SEQ ID NO: 21368 - RNA, 20 nt, synthetic construct
  source 1..20: mol_type = other RNA
tgttttacagagaaggaaac

SEQ ID NO: 21369 - RNA, 20 nt, synthetic construct
  source 1..20: mol_type = other RNA
tgttttgtaaactgtctctc

SEQ ID NO: 21370 - RNA, 20 nt, synthetic construct
  source 1..20: mol_type = other RNA
tgtttttatccatgccaagc

SEQ ID NO: 21371 - RNA, 20 nt, synthetic construct
  source 1..20: mol_type = other RNA
ttaaaaaatgtctgtcacta

SEQ ID NO: 21372 - RNA, 20 nt, synthetic construct
  source 1..20: mol_type = other RNA
ttaaaccaaaatatgtccaa

SEQ ID NO: 21373 - RNA, 20 nt, synthetic construct
  source 1..20: mol_type = other RNA
ttaaatcccagctccaccaa

SEQ ID NO: 21374 - RNA, 20 nt, synthetic construct
  source 1..20: mol_type = other RNA
ttaacaaagaatacaggcca

SEQ ID NO: 21375 - RNA, 20 nt, synthetic construct
  source 1..20: mol_type = other RNA
ttaacaactgtcgggtgata

SEQ ID NO: 21376 - RNA, 20 nt, synthetic construct
  source 1..20: mol_type = other RNA
ttaacaataaaaaggggaga

SEQ ID NO: 21377 - RNA, 20 nt, synthetic construct
  source 1..20: mol_type = other RNA
ttaacatcgccagaaagggg

SEQ ID NO: 21378 - RNA, 20 nt, synthetic construct
  source 1..20: mol_type = other RNA
ttaactttgatcagttggtg

SEQ ID NO: 21379 - RNA, 20 nt, synthetic construct
  source 1..20: mol_type = other RNA
ttaacttttggccaaatacc

SEQ ID NO: 21380 - RNA, 20 nt, synthetic construct
  source 1..20: mol_type = other RNA
ttaagatgaaatgcactagt

SEQ ID NO: 21381 - RNA, 20 nt, synthetic construct
  source 1..20: mol_type = other RNA
ttaagcagagtacaaggctg

SEQ ID NO: 21382 - RNA, 20 nt, synthetic construct
  source 1..20: mol_type = other RNA
ttaagggacactactgggac

SEQ ID NO: 21383 - RNA, 20 nt, synthetic construct
  source 1..20: mol_type = other RNA
ttaatatgtcaatgtcacaa

SEQ ID NO: 21384 - RNA, 20 nt, synthetic construct
  source 1..20: mol_type = other RNA
ttaatctcgagccttcttca

SEQ ID NO: 21385 - RNA, 20 nt, synthetic construct
  source 1..20: mol_type = other RNA
ttaatgactttggcagttag

SEQ ID NO: 21386 - RNA, 20 nt, synthetic construct
  source 1..20: mol_type = other RNA
ttaatgcaaaagctgatctg

SEQ ID NO: 21387 - RNA, 20 nt, synthetic construct
  source 1..20: mol_type = other RNA
ttacaaaacaccagccttgt

SEQ ID NO: 21388 - RNA, 20 nt, synthetic construct
  source 1..20: mol_type = other RNA
ttacagagaaggaaaccgag

SEQ ID NO: 21389 - RNA, 20 nt, synthetic construct
  source 1..20: mol_type = other RNA
ttacagatgaagcactaaaa

SEQ ID NO: 21390 - RNA, 20 nt, synthetic construct
  source 1..20: mol_type = other RNA
ttacatgctttgcagttgga

SEQ ID NO: 21391 - RNA, 20 nt, synthetic construct
  source 1..20: mol_type = other RNA
ttactcctaaataattcagt

SEQ ID NO: 21392 - RNA, 20 nt, synthetic construct
  source 1..20: mol_type = other RNA
ttactcggaaggctcaggca

SEQ ID NO: 21393 - RNA, 20 nt, synthetic construct
  source 1..20: mol_type = other RNA
ttacttacatgctttgcagt

SEQ ID NO: 21394 - RNA, 20 nt, synthetic construct
  source 1..20: mol_type = other RNA
ttacttagggtcacctccgt

SEQ ID NO: 21395 - RNA, 20 nt, synthetic construct
  source 1..20: mol_type = other RNA
ttagaacaaggacaaatttg

SEQ ID NO: 21396 - RNA, 20 nt, synthetic construct
  source 1..20: mol_type = other RNA
ttagaggagaaagttcagtt

SEQ ID NO: 21397 - RNA, 20 nt, synthetic construct
  source 1..20: mol_type = other RNA
ttagagggtatacggaggtg

SEQ ID NO: 21398 - RNA, 20 nt, synthetic construct
  source 1..20: mol_type = other RNA
ttagattcagatgaggcatt

SEQ ID NO: 21399 - RNA, 20 nt, synthetic construct
  source 1..20: mol_type = other RNA
ttagatttgctgattttgac

SEQ ID NO: 21400 - RNA, 20 nt, synthetic construct
  source 1..20: mol_type = other RNA
ttagctggctttggtatttg

SEQ ID NO: 21401 - RNA, 20 nt, synthetic construct
  source 1..20: mol_type = other RNA
ttaggagatgaagtctgagg

SEQ ID NO: 21402 - RNA, 20 nt, synthetic construct
  source 1..20: mol_type = other RNA
ttaggagtaaaggtgcataa

SEQ ID NO: 21403 - RNA, 20 nt, synthetic construct
  source 1..20: mol_type = other RNA
ttaggcaggtgctactatta

SEQ ID NO: 21404 - RNA, 20 nt, synthetic construct
  source 1..20: mol_type = other RNA
ttagggtcacctccgtatac

SEQ ID NO: 21405 - RNA, 20 nt, synthetic construct
  source 1..20: mol_type = other RNA
ttagtgacagacatttttta

SEQ ID NO: 21406 - RNA, 20 nt, synthetic construct
  source 1..20: mol_type = other RNA
ttagtgcttcatctgtaaaa

SEQ ID NO: 21407 - RNA, 20 nt, synthetic construct
  source 1..20: mol_type = other RNA
ttagtgtttttatccatgcc

SEQ ID NO: 21408 - RNA, 20 nt, synthetic construct
  source 1..20: mol_type = other RNA
ttatactcgagattagattc

SEQ ID NO: 21409 - RNA, 20 nt, synthetic construct
  source 1..20: mol_type = other RNA
ttatagaggctgaggtggaa

SEQ ID NO: 21410 - RNA, 20 nt, synthetic construct
  source 1..20: mol_type = other RNA
ttatcacccgacagttgtta

SEQ ID NO: 21411 - RNA, 20 nt, synthetic construct
  source 1..20: mol_type = other RNA
ttatccatgccaagcgatga

SEQ ID NO: 21412 - RNA, 20 nt, synthetic construct
  source 1..20: mol_type = other RNA
ttatccctgttttacagaga

SEQ ID NO: 21413 - RNA, 20 nt, synthetic construct
  source 1..20: mol_type = other RNA
ttatcgagaggcacatgcca

SEQ ID NO: 21414 - RNA, 20 nt, synthetic construct
  source 1..20: mol_type = other RNA
ttatgattatttagaggaga

SEQ ID NO: 21415 - RNA, 20 nt, synthetic construct
  source 1..20: mol_type = other RNA
ttatgcaaatttgtccttgt

SEQ ID NO: 21416 - RNA, 20 nt, synthetic construct
  source 1..20: mol_type = other RNA
ttatgcacctttactcctaa

SEQ ID NO: 21417 - RNA, 20 nt, synthetic construct
  source 1..20: mol_type = other RNA
ttatgtttatcacccgacag

SEQ ID NO: 21418 - RNA, 20 nt, synthetic construct
  source 1..20: mol_type = other RNA
ttattattccaccactgcac

SEQ ID NO: 21419 - RNA, 20 nt, synthetic construct
  source 1..20: mol_type = other RNA
ttattccctttataatttgc

SEQ ID NO: 21420 - RNA, 20 nt, synthetic construct
  source 1..20: mol_type = other RNA
ttattgttaagggacactac

SEQ ID NO: 21421 - RNA, 20 nt, synthetic construct
  source 1..20: mol_type = other RNA
ttatttagaggagaaagttc

SEQ ID NO: 21422 - RNA, 20 nt, synthetic construct
  source 1..20: mol_type = other RNA
ttatttaggagtaaaggtgc

SEQ ID NO: 21423 - RNA, 20 nt, synthetic construct
  source 1..20: mol_type = other RNA
ttatttccttagaacaagga

SEQ ID NO: 21424 - RNA, 20 nt, synthetic construct
  source 1..20: mol_type = other RNA
ttcaaactcaagtgatcctt

SEQ ID NO: 21425 - RNA, 20 nt, synthetic construct
  source 1..20: mol_type = other RNA
ttcaaattttatagaggctg

SEQ ID NO: 21426 - RNA, 20 nt, synthetic construct
  source 1..20: mol_type = other RNA
ttcaaggctgcagtgagtta

SEQ ID NO: 21427 - RNA, 20 nt, synthetic construct
  source 1..20: mol_type = other RNA
ttcaccaactgatcaaagtt

SEQ ID NO: 21428 - RNA, 20 nt, synthetic construct
  source 1..20: mol_type = other RNA
ttcagatgaggcattcttgg

SEQ ID NO: 21429 - RNA, 20 nt, synthetic construct
  source 1..20: mol_type = other RNA
ttcagtatttatttccttag

SEQ ID NO: 21430 - RNA, 20 nt, synthetic construct
  source 1..20: mol_type = other RNA
ttcagtctggatcagctctt

SEQ ID NO: 21431 - RNA, 20 nt, synthetic construct
  source 1..20: mol_type = other RNA
ttcagtctgtctttctctct

SEQ ID NO: 21432 - RNA, 20 nt, synthetic construct
  source 1..20: mol_type = other RNA
ttcagtgcatcttatcgaga

SEQ ID NO: 21433 - RNA, 20 nt, synthetic construct
  source 1..20: mol_type = other RNA
ttcagtttggtgctggtata

SEQ ID NO: 21434 - RNA, 20 nt, synthetic construct
  source 1..20: mol_type = other RNA
ttcagtttttggtcaatcct

SEQ ID NO: 21435 - RNA, 20 nt, synthetic construct
  source 1..20: mol_type = other RNA
ttcataagcatttgaaaatg

SEQ ID NO: 21436 - RNA, 20 nt, synthetic construct
  source 1..20: mol_type = other RNA
ttcatctcctaagcctcggt

SEQ ID NO: 21437 - RNA, 20 nt, synthetic construct
  source 1..20: mol_type = other RNA
ttcatctgtaaaactacttt

SEQ ID NO: 21438 - RNA, 20 nt, synthetic construct
  source 1..20: mol_type = other RNA
ttcatcttaaactgcaaatt

SEQ ID NO: 21439 - RNA, 20 nt, synthetic construct
  source 1..20: mol_type = other RNA
ttcattatgcacctttactc

SEQ ID NO: 21440 - RNA, 20 nt, synthetic construct
  source 1..20: mol_type = other RNA
ttccacctcagcctctataa

SEQ ID NO: 21441 - RNA, 20 nt, synthetic construct
  source 1..20: mol_type = other RNA
ttccctttataatttgcagt

SEQ ID NO: 21442 - RNA, 20 nt, synthetic construct
  source 1..20: mol_type = other RNA
ttccgagtaactgggactat

SEQ ID NO: 21443 - RNA, 20 nt, synthetic construct
  source 1..20: mol_type = other RNA
ttcctactttttgtagagac

SEQ ID NO: 21444 - RNA, 20 nt, synthetic construct
  source 1..20: mol_type = other RNA
ttcctgccaagaatgcctca

SEQ ID NO: 21445 - RNA, 20 nt, synthetic construct
  source 1..20: mol_type = other RNA
ttccttagaacaaggacaaa

SEQ ID NO: 21446 - RNA, 20 nt, synthetic construct
  source 1..20: mol_type = other RNA
ttccttctctgtaaaacagg

SEQ ID NO: 21447 - RNA, 20 nt, synthetic construct
  source 1..20: mol_type = other RNA
ttccttgttacttagggtca

SEQ ID NO: 21448 - RNA, 20 nt, synthetic construct
  source 1..20: mol_type = other RNA
ttcgttttgagacagggtct

SEQ ID NO: 21449 - RNA, 20 nt, synthetic construct
  source 1..20: mol_type = other RNA
ttctaaggaaataaatactg

SEQ ID NO: 21450 - RNA, 20 nt, synthetic construct
  source 1..20: mol_type = other RNA
ttctcctctaaataatcata

SEQ ID NO: 21451 - RNA, 20 nt, synthetic construct
  source 1..20: mol_type = other RNA
ttctctcttgtgacattgac

SEQ ID NO: 21452 - RNA, 20 nt, synthetic construct
  source 1..20: mol_type = other RNA
ttctctgtaaaacagggata

SEQ ID NO: 21453 - RNA, 20 nt, synthetic construct
  source 1..20: mol_type = other RNA
ttctctttagtgacagacat

SEQ ID NO: 21454 - RNA, 20 nt, synthetic construct
  source 1..20: mol_type = other RNA
ttctgcaatattcctgccaa

SEQ ID NO: 21455 - RNA, 20 nt, synthetic construct
  source 1..20: mol_type = other RNA
ttctggcgatgttaactttg

SEQ ID NO: 21456 - RNA, 20 nt, synthetic construct
  source 1..20: mol_type = other RNA
ttcttcagtctggatcagct

SEQ ID NO: 21457 - RNA, 20 nt, synthetic construct
  source 1..20: mol_type = other RNA
ttcttggcaggaatattgca

SEQ ID NO: 21458 - RNA, 20 nt, synthetic construct
  source 1..20: mol_type = other RNA
ttgaaaatgggttcattatg

SEQ ID NO: 21459 - RNA, 20 nt, synthetic construct
  source 1..20: mol_type = other RNA
ttgaataaagttgtagatga

SEQ ID NO: 21460 - RNA, 20 nt, synthetic construct
  source 1..20: mol_type = other RNA
ttgacaaccctactgtggtt

SEQ ID NO: 21461 - RNA, 20 nt, synthetic construct
  source 1..20: mol_type = other RNA
ttgacagtggagagacctgg

SEQ ID NO: 21462 - RNA, 20 nt, synthetic construct
  source 1..20: mol_type = other RNA
ttgacatattaagcagagta

SEQ ID NO: 21463 - RNA, 20 nt, synthetic construct
  source 1..20: mol_type = other RNA
ttgaccaaaaactgaaaagc

SEQ ID NO: 21464 - RNA, 20 nt, synthetic construct
  source 1..20: mol_type = other RNA
ttgagagacagtttacaaaa

SEQ ID NO: 21465 - RNA, 20 nt, synthetic construct
  source 1..20: mol_type = other RNA
ttgaggtccaagatgcaatc

SEQ ID NO: 21466 - RNA, 20 nt, synthetic construct
  source 1..20: mol_type = other RNA
ttgatacactatacaatcct

SEQ ID NO: 21467 - RNA, 20 nt, synthetic construct
  source 1..20: mol_type = other RNA
ttgatcagttggtgaaggtg

SEQ ID NO: 21468 - RNA, 20 nt, synthetic construct
  source 1..20: mol_type = other RNA
ttgcacaagcccttaggcag

SEQ ID NO: 21469 - RNA, 20 nt, synthetic construct
  source 1..20: mol_type = other RNA
ttgcagaagtgagtgtgtgt

SEQ ID NO: 21470 - RNA, 20 nt, synthetic construct
  source 1..20: mol_type = other RNA
ttgcagttggacatattttg

SEQ ID NO: 21471 - RNA, 20 nt, synthetic construct
  source 1..20: mol_type = other RNA
ttgcagtttaagatgaaatg

SEQ ID NO: 21472 - RNA, 20 nt, synthetic construct
  source 1..20: mol_type = other RNA
ttgcataaccacagtagggt

SEQ ID NO: 21473 - RNA, 20 nt, synthetic construct
  source 1..20: mol_type = other RNA
ttgcatcttggacctcaact

SEQ ID NO: 21474 - RNA, 20 nt, synthetic construct
  source 1..20: mol_type = other RNA
ttgcattaatctcgagcctt

SEQ ID NO: 21475 - RNA, 20 nt, synthetic construct
  source 1..20: mol_type = other RNA
ttgcccaggctggtttcaaa

SEQ ID NO: 21476 - RNA, 20 nt, synthetic construct
  source 1..20: mol_type = other RNA
ttgctcactatatgtgattc

SEQ ID NO: 21477 - RNA, 20 nt, synthetic construct
  source 1..20: mol_type = other RNA
ttgctgattttgacaaccct

SEQ ID NO: 21478 - RNA, 20 nt, synthetic construct
  source 1..20: mol_type = other RNA
ttgcttgctcactatatgtg

SEQ ID NO: 21479 - RNA, 20 nt, synthetic construct
  source 1..20: mol_type = other RNA
ttgcttttcagtttttggtc

SEQ ID NO: 21480 - RNA, 20 nt, synthetic construct
  source 1..20: mol_type = other RNA
ttggacatattttggtttaa

SEQ ID NO: 21481 - RNA, 20 nt, synthetic construct
  source 1..20: mol_type = other RNA
ttggacctcaactctcccct

SEQ ID NO: 21482 - RNA, 20 nt, synthetic construct
  source 1..20: mol_type = other RNA
ttggcaggaatattgcagaa

SEQ ID NO: 21483 - RNA, 20 nt, synthetic construct
  source 1..20: mol_type = other RNA
ttggcagttagtgtttttat

SEQ ID NO: 21484 - RNA, 20 nt, synthetic construct
  source 1..20: mol_type = other RNA
ttggcatggataaaaacact

SEQ ID NO: 21485 - RNA, 20 nt, synthetic construct
  source 1..20: mol_type = other RNA
ttggccaaaagttaatgact

SEQ ID NO: 21486 - RNA, 20 nt, synthetic construct
  source 1..20: mol_type = other RNA
ttggccaaataccaaagcca

SEQ ID NO: 21487 - RNA, 20 nt, synthetic construct
  source 1..20: mol_type = other RNA
ttggcctgtattctttgtta

SEQ ID NO: 21488 - RNA, 20 nt, synthetic construct
  source 1..20: mol_type = other RNA
ttgggtttgtctgatggtta

SEQ ID NO: 21489 - RNA, 20 nt, synthetic construct
  source 1..20: mol_type = other RNA
ttggtatttggccaaaagtt

SEQ ID NO: 21490 - RNA, 20 nt, synthetic construct
  source 1..20: mol_type = other RNA
ttggtcaatccttatgatta

SEQ ID NO: 21491 - RNA, 20 nt, synthetic construct
  source 1..20: mol_type = other RNA
ttggtcataggattgtatag

SEQ ID NO: 21492 - RNA, 20 nt, synthetic construct
  source 1..20: mol_type = other RNA
ttggtgaaggtggtgtctgc

SEQ ID NO: 21493 - RNA, 20 nt, synthetic construct
  source 1..20: mol_type = other RNA
ttggtgctggtatatcttat

SEQ ID NO: 21494 - RNA, 20 nt, synthetic construct
  source 1..20: mol_type = other RNA
ttggtggagctgggatttaa

SEQ ID NO: 21495 - RNA, 20 nt, synthetic construct
  source 1..20: mol_type = other RNA
ttggtttaaatcccagctcc

SEQ ID NO: 21496 - RNA, 20 nt, synthetic construct
  source 1..20: mol_type = other RNA
ttgtaaactgtctctcaatt

SEQ ID NO: 21497 - RNA, 20 nt, synthetic construct
  source 1..20: mol_type = other RNA
ttgtactctgcttaatatgt

SEQ ID NO: 21498 - RNA, 20 nt, synthetic construct
  source 1..20: mol_type = other RNA
ttgtagatgagattggtcat

SEQ ID NO: 21499 - RNA, 20 nt, synthetic construct
  source 1..20: mol_type = other RNA
ttgtcaaaatcagcaaatct

SEQ ID NO: 21500 - RNA, 20 nt, synthetic construct
  source 1..20: mol_type = other RNA
ttgtcccagtagtgtccctt

SEQ ID NO: 21501 - RNA, 20 nt, synthetic construct
  source 1..20: mol_type = other RNA
ttgtccttgttctaaggaaa

SEQ ID NO: 21502 - RNA, 20 nt, synthetic construct
  source 1..20: mol_type = other RNA
ttgtctgatggttatactcg

SEQ ID NO: 21503 - RNA, 20 nt, synthetic construct
  source 1..20: mol_type = other RNA
ttgtgacattgacatattaa

SEQ ID NO: 21504 - RNA, 20 nt, synthetic construct
  source 1..20: mol_type = other RNA
ttgtggtacacgcccatagt

SEQ ID NO: 21505 - RNA, 20 nt, synthetic construct
  source 1..20: mol_type = other RNA
ttgttaagggacactactgg

SEQ ID NO: 21506 - RNA, 20 nt, synthetic construct
  source 1..20: mol_type = other RNA
ttgttacttacatgctttgc

SEQ ID NO: 21507 - RNA, 20 nt, synthetic construct
  source 1..20: mol_type = other RNA
ttgttacttagggtcacctc

SEQ ID NO: 21508 - RNA, 20 nt, synthetic construct
  source 1..20: mol_type = other RNA
tttaaaaaatgtctgtcact

SEQ ID NO: 21509 - RNA, 20 nt, synthetic construct
  source 1..20: mol_type = other RNA
tttaaaccaaaatatgtcca

SEQ ID NO: 21510 - RNA, 20 nt, synthetic construct
  source 1..20: mol_type = other RNA
tttaaatcccagctccacca

SEQ ID NO: 21511 - RNA, 20 nt, synthetic construct
  source 1..20: mol_type = other RNA
tttaacaaagaatacaggcc

SEQ ID NO: 21512 - RNA, 20 nt, synthetic construct
  source 1..20: mol_type = other RNA
tttaagatgaaatgcactag

SEQ ID NO: 21513 - RNA, 20 nt, synthetic construct
  source 1..20: mol_type = other RNA
tttacaaaacaccagccttg

SEQ ID NO: 21514 - RNA, 20 nt, synthetic construct
  source 1..20: mol_type = other RNA
tttacagagaaggaaaccga

SEQ ID NO: 21515 - RNA, 20 nt, synthetic construct
  source 1..20: mol_type = other RNA
tttacagatgaagcactaaa

SEQ ID NO: 21516 - RNA, 20 nt, synthetic construct
  source 1..20: mol_type = other RNA
tttactcctaaataattcag

SEQ ID NO: 21517 - RNA, 20 nt, synthetic construct
  source 1..20: mol_type = other RNA
tttagaggagaaagttcagt

SEQ ID NO: 21518 - RNA, 20 nt, synthetic construct
  source 1..20: mol_type = other RNA
tttagagggtatacggaggt

SEQ ID NO: 21519 - RNA, 20 nt, synthetic construct
  source 1..20: mol_type = other RNA
tttagctggctttggtattt

SEQ ID NO: 21520 - RNA, 20 nt, synthetic construct
  source 1..20: mol_type = other RNA
tttaggagtaaaggtgcata

SEQ ID NO: 21521 - RNA, 20 nt, synthetic construct
  source 1..20: mol_type = other RNA
tttagtgacagacatttttt

SEQ ID NO: 21522 - RNA, 20 nt, synthetic construct
  source 1..20: mol_type = other RNA
tttagtgcttcatctgtaaa

SEQ ID NO: 21523 - RNA, 20 nt, synthetic construct
  source 1..20: mol_type = other RNA
tttatagaggctgaggtgga

SEQ ID NO: 21524 - RNA, 20 nt, synthetic construct
  source 1..20: mol_type = other RNA
tttatcacccgacagttgtt

SEQ ID NO: 21525 - RNA, 20 nt, synthetic construct
  source 1..20: mol_type = other RNA
tttatccatgccaagcgatg

SEQ ID NO: 21526 - RNA, 20 nt, synthetic construct
  source 1..20: mol_type = other RNA
tttattgttaagggacacta

SEQ ID NO: 21527 - RNA, 20 nt, synthetic construct
  source 1..20: mol_type = other RNA
tttatttccttagaacaagg

SEQ ID NO: 21528 - RNA, 20 nt, synthetic construct
  source 1..20: mol_type = other RNA
tttcaaactcaagtgatcct

SEQ ID NO: 21529 - RNA, 20 nt, synthetic construct
  source 1..20: mol_type = other RNA
tttcagtttttggtcaatcc

SEQ ID NO: 21530 - RNA, 20 nt, synthetic construct
  source 1..20: mol_type = other RNA
tttcatcttaaactgcaaat

SEQ ID NO: 21531 - RNA, 20 nt, synthetic construct
  source 1..20: mol_type = other RNA
tttcctactttttgtagaga

SEQ ID NO: 21532 - RNA, 20 nt, synthetic construct
  source 1..20: mol_type = other RNA
tttccttagaacaaggacaa

SEQ ID NO: 21533 - RNA, 20 nt, synthetic construct
  source 1..20: mol_type = other RNA
tttccttctctgtaaaacag

SEQ ID NO: 21534 - RNA, 20 nt, synthetic construct
  source 1..20: mol_type = other RNA
tttcgttttgagacagggtc

SEQ ID NO: 21535 - RNA, 20 nt, synthetic construct
  source 1..20: mol_type = other RNA
tttctcctctaaataatcat

SEQ ID NO: 21536 - RNA, 20 nt, synthetic construct
  source 1..20: mol_type = other RNA
tttctctcttgtgacattga

SEQ ID NO: 21537 - RNA, 20 nt, synthetic construct
  source 1..20: mol_type = other RNA
tttctctttagtgacagaca

SEQ ID NO: 21538 - RNA, 20 nt, synthetic construct
  source 1..20: mol_type = other RNA
tttctggcgatgttaacttt

SEQ ID NO: 21539 - RNA, 20 nt, synthetic construct
  source 1..20: mol_type = other RNA
tttgaaaatgggttcattat

SEQ ID NO: 21540 - RNA, 20 nt, synthetic construct
  source 1..20: mol_type = other RNA
tttgaataaagttgtagatg

SEQ ID NO: 21541 - RNA, 20 nt, synthetic construct
  source 1..20: mol_type = other RNA
tttgacaaccctactgtggt

SEQ ID NO: 21542 - RNA, 20 nt, synthetic construct
  source 1..20: mol_type = other RNA
tttgatcagttggtgaaggt

SEQ ID NO: 21543 - RNA, 20 nt, synthetic construct
  source 1..20: mol_type = other RNA
tttgcagttggacatatttt

SEQ ID NO: 21544 - RNA, 20 nt, synthetic construct
  source 1..20: mol_type = other RNA
tttgcagtttaagatgaaat

SEQ ID NO: 21545 - RNA, 20 nt, synthetic construct
  source 1..20: mol_type = other RNA
tttgcataaccacagtaggg

SEQ ID NO: 21546 - RNA, 20 nt, synthetic construct
  source 1..20: mol_type = other RNA
tttgcattaatctcgagcct

SEQ ID NO: 21547 - RNA, 20 nt, synthetic construct
  source 1..20: mol_type = other RNA
tttgctgattttgacaaccc

SEQ ID NO: 21548 - RNA, 20 nt, synthetic construct
  source 1..20: mol_type = other RNA
tttgcttttcagtttttggt

SEQ ID NO: 21549 - RNA, 20 nt, synthetic construct
  source 1..20: mol_type = other RNA
tttggcagttagtgttttta

SEQ ID NO: 21550 - RNA, 20 nt, synthetic construct
  source 1..20: mol_type = other RNA
tttggccaaaagttaatgac

SEQ ID NO: 21551 - RNA, 20 nt, synthetic construct
  source 1..20: mol_type = other RNA
tttggccaaataccaaagcc

SEQ ID NO: 21552 - RNA, 20 nt, synthetic construct
  source 1..20: mol_type = other RNA
tttgggtttgtctgatggtt

SEQ ID NO: 21553 - RNA, 20 nt, synthetic construct
  source 1..20: mol_type = other RNA
tttggtatttggccaaaagt

SEQ ID NO: 21554 - RNA, 20 nt, synthetic construct
  source 1..20: mol_type = other RNA
tttggtcaatccttatgatt

SEQ ID NO: 21555 - RNA, 20 nt, synthetic construct
  source 1..20: mol_type = other RNA
tttggtgctggtatatctta

SEQ ID NO: 21556 - RNA, 20 nt, synthetic construct
  source 1..20: mol_type = other RNA
tttggtttaaatcccagctc

SEQ ID NO: 21557 - RNA, 20 nt, synthetic construct
  source 1..20: mol_type = other RNA
tttgtccttgttctaaggaa

SEQ ID NO: 21558 - RNA, 20 nt, synthetic construct
  source 1..20: mol_type = other RNA
tttgtctgatggttatactc

SEQ ID NO: 21559 - RNA, 20 nt, synthetic construct
  source 1..20: mol_type = other RNA
ttttaaaaaatgtctgtcac

SEQ ID NO: 21560 - RNA, 20 nt, synthetic construct
  source 1..20: mol_type = other RNA
ttttaacaaagaatacaggc

SEQ ID NO: 21561 - RNA, 20 nt, synthetic construct
  source 1..20: mol_type = other RNA
ttttacagagaaggaaaccg

SEQ ID NO: 21562 - RNA, 20 nt, synthetic construct
  source 1..20: mol_type = other RNA
ttttacagatgaagcactaa

SEQ ID NO: 21563 - RNA, 20 nt, synthetic construct
  source 1..20: mol_type = other RNA
ttttagagggtatacggagg

SEQ ID NO: 21564 - RNA, 20 nt, synthetic construct
  source 1..20: mol_type = other RNA
ttttagtgcttcatctgtaa

SEQ ID NO: 21565 - RNA, 20 nt, synthetic construct
  source 1..20: mol_type = other RNA
ttttatagaggctgaggtgg

SEQ ID NO: 21566 - RNA, 20 nt, synthetic construct
  source 1..20: mol_type = other RNA
ttttatccatgccaagcgat

SEQ ID NO: 21567 - RNA, 20 nt, synthetic construct
  source 1..20: mol_type = other RNA
ttttattgttaagggacact

SEQ ID NO: 21568 - RNA, 20 nt, synthetic construct
  source 1..20: mol_type = other RNA
ttttcagtttttggtcaatc

SEQ ID NO: 21569 - RNA, 20 nt, synthetic construct
  source 1..20: mol_type = other RNA
ttttcctactttttgtagag

SEQ ID NO: 21570 - RNA, 20 nt, synthetic construct
  source 1..20: mol_type = other RNA
ttttcgttttgagacagggt

SEQ ID NO: 21571 - RNA, 20 nt, synthetic construct
  source 1..20: mol_type = other RNA
ttttctctttagtgacagac

SEQ ID NO: 21572 - RNA, 20 nt, synthetic construct
  source 1..20: mol_type = other RNA
ttttgacaaccctactgtgg

SEQ ID NO: 21573 - RNA, 20 nt, synthetic construct
  source 1..20: mol_type = other RNA
ttttgcattaatctcgagcc

SEQ ID NO: 21574 - RNA, 20 nt, synthetic construct
  source 1..20: mol_type = other RNA
ttttggccaaataccaaagc

SEQ ID NO: 21575 - RNA, 20 nt, synthetic construct
  source 1..20: mol_type = other RNA
ttttggtcaatccttatgat

SEQ ID NO: 21576 - RNA, 20 nt, synthetic construct
  source 1..20: mol_type = other RNA
ttttggtttaaatcccagct

SEQ ID NO: 21577 - RNA, 20 nt, synthetic construct
  source 1..20: mol_type = other RNA
tttttaacaaagaatacagg

SEQ ID NO: 21578 - RNA, 20 nt, synthetic construct
  source 1..20: mol_type = other RNA
tttttatccatgccaagcga

SEQ ID NO: 21579 - RNA, 20 nt, synthetic construct
  source 1..20: mol_type = other RNA
tttttattgttaagggacac

SEQ ID NO: 21580 - RNA, 20 nt, synthetic construct
  source 1..20: mol_type = other RNA
tttttggtcaatccttatga

SEQ ID NO: 21581 - RNA, 21 nt, synthetic construct
  source 1..21: mol_type = other RNA
aaaaaatagcgaggtgttgtg

SEQ ID NO: 21582 - RNA, 21 nt, synthetic construct
  source 1..21: mol_type = other RNA
aaaaaatgtctgtcactaaag

SEQ ID NO: 21583 - RNA, 21 nt, synthetic construct
  source 1..21: mol_type = other RNA
aaaaaattgtcccagtagtgt

SEQ ID NO: 21584 - RNA, 21 nt, synthetic construct
  source 1..21: mol_type = other RNA
aaaaacactaactgccaaagt

SEQ ID NO: 21585 - RNA, 21 nt, synthetic construct
  source 1..21: mol_type = other RNA
aaaaactgaaaagcaaattgc

SEQ ID NO: 21586 - RNA, 21 nt, synthetic construct
  source 1..21: mol_type = other RNA
aaaaagagattaacaactgtc

SEQ ID NO: 21587 - RNA, 21 nt, synthetic construct
  source 1..21: mol_type = other RNA
aaaaaggggagagttgaggtc

SEQ ID NO: 21588 - RNA, 21 nt, synthetic construct
  source 1..21: mol_type = other RNA
aaaaatagcgaggtgttgtgg

SEQ ID NO: 21589 - RNA, 21 nt, synthetic construct
  source 1..21: mol_type = other RNA
aaaaatgtctgtcactaaaga

SEQ ID NO: 21590 - RNA, 21 nt, synthetic construct
  source 1..21: mol_type = other RNA
aaaaattgtcccagtagtgtc

SEQ ID NO: 21591 - RNA, 21 nt, synthetic construct
  source 1..21: mol_type = other RNA
aaaacaccagccttgtactct

SEQ ID NO: 21592 - RNA, 21 nt, synthetic construct
  source 1..21: mol_type = other RNA
aaaacactaactgccaaagtc

SEQ ID NO: 21593 - RNA, 21 nt, synthetic construct
  source 1..21: mol_type = other RNA
aaaacagggataatagtagca

SEQ ID NO: 21594 - RNA, 21 nt, synthetic construct
  source 1..21: mol_type = other RNA
aaaactagtgcatttcatctt

SEQ ID NO: 21595 - RNA, 21 nt, synthetic construct
  source 1..21: mol_type = other RNA
aaaactgaaaagcaaattgct

SEQ ID NO: 21596 - RNA, 21 nt, synthetic construct
  source 1..21: mol_type = other RNA
aaaagagattaacaactgtcg

SEQ ID NO: 21597 - RNA, 21 nt, synthetic construct
  source 1..21: mol_type = other RNA
aaaagcaaattgcttgctcac

SEQ ID NO: 21598 - RNA, 21 nt, synthetic construct
  source 1..21: mol_type = other RNA
aaaagctgatctgggattgca

SEQ ID NO: 21599 - RNA, 21 nt, synthetic construct
  source 1..21: mol_type = other RNA
aaaaggggagagttgaggtcc

SEQ ID NO: 21600 - RNA, 21 nt, synthetic construct
  source 1..21: mol_type = other RNA
aaaagttaatgactttggcag

SEQ ID NO: 21601 - RNA, 21 nt, synthetic construct
  source 1..21: mol_type = other RNA
aaaatagcgaggtgttgtggt

SEQ ID NO: 21602 - RNA, 21 nt, synthetic construct
  source 1..21: mol_type = other RNA
aaaatatgtccaactgcaaag

SEQ ID NO: 21603 - RNA, 21 nt, synthetic construct
  source 1..21: mol_type = other RNA
aaaatcatcatcgcttggcat

SEQ ID NO: 21604 - RNA, 21 nt, synthetic construct
  source 1..21: mol_type = other RNA
aaaatgggttcattatgcacc

SEQ ID NO: 21605 - RNA, 21 nt, synthetic construct
  source 1..21: mol_type = other RNA
aaaatgtctgtcactaaagag

SEQ ID NO: 21606 - RNA, 21 nt, synthetic construct
  source 1..21: mol_type = other RNA
aaaattgtcccagtagtgtcc

SEQ ID NO: 21607 - RNA, 21 nt, synthetic construct
  source 1..21: mol_type = other RNA
aaacaccagccttgtactctg

SEQ ID NO: 21608 - RNA, 21 nt, synthetic construct
  source 1..21: mol_type = other RNA
aaacactaactgccaaagtca

SEQ ID NO: 21609 - RNA, 21 nt, synthetic construct
  source 1..21: mol_type = other RNA
aaacagggataatagtagcac

SEQ ID NO: 21610 - RNA, 21 nt, synthetic construct
  source 1..21: mol_type = other RNA
aaacataagatataccagcac

SEQ ID NO: 21611 - RNA, 21 nt, synthetic construct
  source 1..21: mol_type = other RNA
aaaccaaaatatgtccaactg

SEQ ID NO: 21612 - RNA, 21 nt, synthetic construct
  source 1..21: mol_type = other RNA
aaaccgaggcttaggagatga

SEQ ID NO: 21613 - RNA, 21 nt, synthetic construct
  source 1..21: mol_type = other RNA
aaactagtgcatttcatctta

SEQ ID NO: 21614 - RNA, 21 nt, synthetic construct
  source 1..21: mol_type = other RNA
aaactgaaaagcaaattgctt

SEQ ID NO: 21615 - RNA, 21 nt, synthetic construct
  source 1..21: mol_type = other RNA
aaactgaactttctcctctaa

SEQ ID NO: 21616 - RNA, 21 nt, synthetic construct
  source 1..21: mol_type = other RNA
aaactgcaaattataaaggga

SEQ ID NO: 21617 - RNA, 21 nt, synthetic construct
  source 1..21: mol_type = other RNA
aaactgtctctcaatttgggt

SEQ ID NO: 21618 - RNA, 21 nt, synthetic construct
  source 1..21: mol_type = other RNA
aaagaatacaggccaaggccc

SEQ ID NO: 21619 - RNA, 21 nt, synthetic construct
  source 1..21: mol_type = other RNA
aaagacagactgaagagctga

SEQ ID NO: 21620 - RNA, 21 nt, synthetic construct
  source 1..21: mol_type = other RNA
aaagagaaaatcatcatcgct

SEQ ID NO: 21621 - RNA, 21 nt, synthetic construct
  source 1..21: mol_type = other RNA
aaagagattaacaactgtcgg

SEQ ID NO: 21622 - RNA, 21 nt, synthetic construct
  source 1..21: mol_type = other RNA
aaagcaaattgcttgctcact

SEQ ID NO: 21623 - RNA, 21 nt, synthetic construct
  source 1..21: mol_type = other RNA
aaagccagctaaagtcacagg

SEQ ID NO: 21624 - RNA, 21 nt, synthetic construct
  source 1..21: mol_type = other RNA
aaagctgatctgggattgcat

SEQ ID NO: 21625 - RNA, 21 nt, synthetic construct
  source 1..21: mol_type = other RNA
aaagggaataatagtaacttg

SEQ ID NO: 21626 - RNA, 21 nt, synthetic construct
  source 1..21: mol_type = other RNA
aaaggggacagatggcatgtg

SEQ ID NO: 21627 - RNA, 21 nt, synthetic construct
  source 1..21: mol_type = other RNA
aaaggggagagttgaggtcca

SEQ ID NO: 21628 - RNA, 21 nt, synthetic construct
  source 1..21: mol_type = other RNA
aaaggtgcataatgaacccat

SEQ ID NO: 21629 - RNA, 21 nt, synthetic construct
  source 1..21: mol_type = other RNA
aaagtagttttacagatgaag

SEQ ID NO: 21630 - RNA, 21 nt, synthetic construct
  source 1..21: mol_type = other RNA
aaagtcacagggccttggcct

SEQ ID NO: 21631 - RNA, 21 nt, synthetic construct
  source 1..21: mol_type = other RNA
aaagtcattaacttttggcca

SEQ ID NO: 21632 - RNA, 21 nt, synthetic construct
  source 1..21: mol_type = other RNA
aaagttaacatcgccagaaag

SEQ ID NO: 21633 - RNA, 21 nt, synthetic construct
  source 1..21: mol_type = other RNA
aaagttaatgactttggcagt

SEQ ID NO: 21634 - RNA, 21 nt, synthetic construct
  source 1..21: mol_type = other RNA
aaagttcagtttggtgctggt

SEQ ID NO: 21635 - RNA, 21 nt, synthetic construct
  source 1..21: mol_type = other RNA
aaagttgtagatgagattggt

SEQ ID NO: 21636 - RNA, 21 nt, synthetic construct
  source 1..21: mol_type = other RNA
aaataatcataaggattgacc

SEQ ID NO: 21637 - RNA, 21 nt, synthetic construct
  source 1..21: mol_type = other RNA
aaataccaaagccagctaaag

SEQ ID NO: 21638 - RNA, 21 nt, synthetic construct
  source 1..21: mol_type = other RNA
aaatagcgaggtgttgtggta

SEQ ID NO: 21639 - RNA, 21 nt, synthetic construct
  source 1..21: mol_type = other RNA
aaatatgtccaactgcaaagc

SEQ ID NO: 21640 - RNA, 21 nt, synthetic construct
  source 1..21: mol_type = other RNA
aaatcatcatcgcttggcatg

SEQ ID NO: 21641 - RNA, 21 nt, synthetic construct
  source 1..21: mol_type = other RNA
aaatcccagctccaccaacac

SEQ ID NO: 21642 - RNA, 21 nt, synthetic construct
  source 1..21: mol_type = other RNA
aaatgcactagttttagtgct

SEQ ID NO: 21643 - RNA, 21 nt, synthetic construct
  source 1..21: mol_type = other RNA
aaatgggttcattatgcacct

SEQ ID NO: 21644 - RNA, 21 nt, synthetic construct
  source 1..21: mol_type = other RNA
aaatgtctgtcactaaagaga

SEQ ID NO: 21645 - RNA, 21 nt, synthetic construct
  source 1..21: mol_type = other RNA
aaattgagagacagtttacaa

SEQ ID NO: 21646 - RNA, 21 nt, synthetic construct
  source 1..21: mol_type = other RNA
aaattgcttgctcactatatg

SEQ ID NO: 21647 - RNA, 21 nt, synthetic construct
  source 1..21: mol_type = other RNA
aaattgtcccagtagtgtccc

SEQ ID NO: 21648 - RNA, 21 nt, synthetic construct
  source 1..21: mol_type = other RNA
aaatttgcataaccacagtag

SEQ ID NO: 21649 - RNA, 21 nt, synthetic construct
  source 1..21: mol_type = other RNA
aaatttgtccttgttctaagg

SEQ ID NO: 21650 - RNA, 21 nt, synthetic construct
  source 1..21: mol_type = other RNA
aaattttatagaggctgaggt

SEQ ID NO: 21651 - RNA, 21 nt, synthetic construct
  source 1..21: mol_type = other RNA
aacaaagaatacaggccaagg

SEQ ID NO: 21652 - RNA, 21 nt, synthetic construct
  source 1..21: mol_type = other RNA
aacaactgtcgggtgataaac

SEQ ID NO: 21653 - RNA, 21 nt, synthetic construct
  source 1..21: mol_type = other RNA
aacaaggaatcacatatagtg

SEQ ID NO: 21654 - RNA, 21 nt, synthetic construct
  source 1..21: mol_type = other RNA
aacaaggacaaatttgcataa

SEQ ID NO: 21655 - RNA, 21 nt, synthetic construct
  source 1..21: mol_type = other RNA
aacaataaaaaggggagagtt

SEQ ID NO: 21656 - RNA, 21 nt, synthetic construct
  source 1..21: mol_type = other RNA
aacaattttagagggtatacg

SEQ ID NO: 21657 - RNA, 21 nt, synthetic construct
  source 1..21: mol_type = other RNA
aacaccagccttgtactctgc

SEQ ID NO: 21658 - RNA, 21 nt, synthetic construct
  source 1..21: mol_type = other RNA
aacacctcagacttcatctcc

SEQ ID NO: 21659 - RNA, 21 nt, synthetic construct
  source 1..21: mol_type = other RNA
aacactaactgccaaagtcat

SEQ ID NO: 21660 - RNA, 21 nt, synthetic construct
  source 1..21: mol_type = other RNA
aacagggataatagtagcacc

SEQ ID NO: 21661 - RNA, 21 nt, synthetic construct
  source 1..21: mol_type = other RNA
aacataagatataccagcacc

SEQ ID NO: 21662 - RNA, 21 nt, synthetic construct
  source 1..21: mol_type = other RNA
aacatcgccagaaaggggaca

SEQ ID NO: 21663 - RNA, 21 nt, synthetic construct
  source 1..21: mol_type = other RNA
aaccaaaatatgtccaactgc

SEQ ID NO: 21664 - RNA, 21 nt, synthetic construct
  source 1..21: mol_type = other RNA
aaccacagtagggttgtcaaa

SEQ ID NO: 21665 - RNA, 21 nt, synthetic construct
  source 1..21: mol_type = other RNA
aacccaaattgagagacagtt

SEQ ID NO: 21666 - RNA, 21 nt, synthetic construct
  source 1..21: mol_type = other RNA
aacccattttcaaatgcttat

SEQ ID NO: 21667 - RNA, 21 nt, synthetic construct
  source 1..21: mol_type = other RNA
aaccctactgtggttatgcaa

SEQ ID NO: 21668 - RNA, 21 nt, synthetic construct
  source 1..21: mol_type = other RNA
aaccgaggcttaggagatgaa

SEQ ID NO: 21669 - RNA, 21 nt, synthetic construct
  source 1..21: mol_type = other RNA
aactagtgcatttcatcttaa

SEQ ID NO: 21670 - RNA, 21 nt, synthetic construct
  source 1..21: mol_type = other RNA
aactcactgcagccttgaact

SEQ ID NO: 21671 - RNA, 21 nt, synthetic construct
  source 1..21: mol_type = other RNA
aactctcccctttttattgtt

SEQ ID NO: 21672 - RNA, 21 nt, synthetic construct
  source 1..21: mol_type = other RNA
aactgaaaagcaaattgcttg

SEQ ID NO: 21673 - RNA, 21 nt, synthetic construct
  source 1..21: mol_type = other RNA
aactgaactttctcctctaaa

SEQ ID NO: 21674 - RNA, 21 nt, synthetic construct
  source 1..21: mol_type = other RNA
aactgatcaaagttaacatcg

SEQ ID NO: 21675 - RNA, 21 nt, synthetic construct
  source 1..21: mol_type = other RNA
aactgcaaagcatgtaagtaa

SEQ ID NO: 21676 - RNA, 21 nt, synthetic construct
  source 1..21: mol_type = other RNA
aactgcaaattataaagggaa

SEQ ID NO: 21677 - RNA, 21 nt, synthetic construct
  source 1..21: mol_type = other RNA
aactgccaaagtcattaactt

SEQ ID NO: 21678 - RNA, 21 nt, synthetic construct
  source 1..21: mol_type = other RNA
aactgggactatgggcgtgta

SEQ ID NO: 21679 - RNA, 21 nt, synthetic construct
  source 1..21: mol_type = other RNA
aactgtcgggtgataaacata

SEQ ID NO: 21680 - RNA, 21 nt, synthetic construct
  source 1..21: mol_type = other RNA
aactgtctctcaatttgggtt

SEQ ID NO: 21681 - RNA, 21 nt, synthetic construct
  source 1..21: mol_type = other RNA
aacttgacagtggagagacct

SEQ ID NO: 21682 - RNA, 21 nt, synthetic construct
  source 1..21: mol_type = other RNA
aactttctcctctaaataatc

SEQ ID NO: 21683 - RNA, 21 nt, synthetic construct
  source 1..21: mol_type = other RNA
aactttgatcagttggtgaag

SEQ ID NO: 21684 - RNA, 21 nt, synthetic construct
  source 1..21: mol_type = other RNA
aacttttggccaaataccaaa

SEQ ID NO: 21685 - RNA, 21 nt, synthetic construct
  source 1..21: mol_type = other RNA
aagaaggctcgagattaatgc

SEQ ID NO: 21686 - RNA, 21 nt, synthetic construct
  source 1..21: mol_type = other RNA
aagaatacaggccaaggccct

SEQ ID NO: 21687 - RNA, 21 nt, synthetic construct
  source 1..21: mol_type = other RNA
aagaatgcctcatctgaatct

SEQ ID NO: 21688 - RNA, 21 nt, synthetic construct
  source 1..21: mol_type = other RNA
aagacacacactcacttctgc

SEQ ID NO: 21689 - RNA, 21 nt, synthetic construct
  source 1..21: mol_type = other RNA
aagacagactgaagagctgat

SEQ ID NO: 21690 - RNA, 21 nt, synthetic construct
  source 1..21: mol_type = other RNA
aagagaaaatcatcatcgctt

SEQ ID NO: 21691 - RNA, 21 nt, synthetic construct
  source 1..21: mol_type = other RNA
aagagagaaagacagactgaa

SEQ ID NO: 21692 - RNA, 21 nt, synthetic construct
  source 1..21: mol_type = other RNA
aagagattaacaactgtcggg

SEQ ID NO: 21693 - RNA, 21 nt, synthetic construct
  source 1..21: mol_type = other RNA
aagagctgatccagactgaag

SEQ ID NO: 21694 - RNA, 21 nt, synthetic construct
  source 1..21: mol_type = other RNA
aagatataccagcaccaaact

SEQ ID NO: 21695 - RNA, 21 nt, synthetic construct
  source 1..21: mol_type = other RNA
aagatgaaatgcactagtttt

SEQ ID NO: 21696 - RNA, 21 nt, synthetic construct
  source 1..21: mol_type = other RNA
aagatgcaatcccagatcagc

SEQ ID NO: 21697 - RNA, 21 nt, synthetic construct
  source 1..21: mol_type = other RNA
aagatgcactgaagacacaca

SEQ ID NO: 21698 - RNA, 21 nt, synthetic construct
  source 1..21: mol_type = other RNA
aagcaaattgcttgctcacta

SEQ ID NO: 21699 - RNA, 21 nt, synthetic construct
  source 1..21: mol_type = other RNA
aagcaatttgcttttcagttt

SEQ ID NO: 21700 - RNA, 21 nt, synthetic construct
  source 1..21: mol_type = other RNA
aagcactaaaactagtgcatt

SEQ ID NO: 21701 - RNA, 21 nt, synthetic construct
  source 1..21: mol_type = other RNA
aagcagagtacaaggctggtg

SEQ ID NO: 21702 - RNA, 21 nt, synthetic construct
  source 1..21: mol_type = other RNA
aagcatttgaaaatgggttca

SEQ ID NO: 21703 - RNA, 21 nt, synthetic construct
  source 1..21: mol_type = other RNA
aagccagctaaagtcacaggg

SEQ ID NO: 21704 - RNA, 21 nt, synthetic construct
  source 1..21: mol_type = other RNA
aagcccttaggcaggtgctac

SEQ ID NO: 21705 - RNA, 21 nt, synthetic construct
  source 1..21: mol_type = other RNA
aagcctcggtttccttctctg

SEQ ID NO: 21706 - RNA, 21 nt, synthetic construct
  source 1..21: mol_type = other RNA
aagcgatgatgattttctctt

SEQ ID NO: 21707 - RNA, 21 nt, synthetic construct
  source 1..21: mol_type = other RNA
aagctgatctgggattgcatc

SEQ ID NO: 21708 - RNA, 21 nt, synthetic construct
  source 1..21: mol_type = other RNA
aaggaaaccgaggcttaggag

SEQ ID NO: 21709 - RNA, 21 nt, synthetic construct
  source 1..21: mol_type = other RNA
aaggaatcacatatagtgagc

SEQ ID NO: 21710 - RNA, 21 nt, synthetic construct
  source 1..21: mol_type = other RNA
aaggacaaatttgcataacca

SEQ ID NO: 21711 - RNA, 21 nt, synthetic construct
  source 1..21: mol_type = other RNA
aaggatcacttgagtttgaaa

SEQ ID NO: 21712 - RNA, 21 nt, synthetic construct
  source 1..21: mol_type = other RNA
aaggattgaccaaaaactgaa

SEQ ID NO: 21713 - RNA, 21 nt, synthetic construct
  source 1..21: mol_type = other RNA
aaggccctgtgactttagctg

SEQ ID NO: 21714 - RNA, 21 nt, synthetic construct
  source 1..21: mol_type = other RNA
aaggctcgagattaatgcaaa

SEQ ID NO: 21715 - RNA, 21 nt, synthetic construct
  source 1..21: mol_type = other RNA
aaggctgcagtgagttattat

SEQ ID NO: 21716 - RNA, 21 nt, synthetic construct
  source 1..21: mol_type = other RNA
aaggctggtgttttgtaaact

SEQ ID NO: 21717 - RNA, 21 nt, synthetic construct
  source 1..21: mol_type = other RNA
aagggaataatagtaacttga

SEQ ID NO: 21718 - RNA, 21 nt, synthetic construct
  source 1..21: mol_type = other RNA
aagggacactactgggacaat

SEQ ID NO: 21719 - RNA, 21 nt, synthetic construct
  source 1..21: mol_type = other RNA
aaggggacagatggcatgtgc

SEQ ID NO: 21720 - RNA, 21 nt, synthetic construct
  source 1..21: mol_type = other RNA
aaggggagagttgaggtccaa

SEQ ID NO: 21721 - RNA, 21 nt, synthetic construct
  source 1..21: mol_type = other RNA
aaggtgcataatgaacccatt

SEQ ID NO: 21722 - RNA, 21 nt, synthetic construct
  source 1..21: mol_type = other RNA
aaggtggtgtctgccaggtct

SEQ ID NO: 21723 - RNA, 21 nt, synthetic construct
  source 1..21: mol_type = other RNA
aagtaacaaggaatcacatat

SEQ ID NO: 21724 - RNA, 21 nt, synthetic construct
  source 1..21: mol_type = other RNA
aagtaacaattttagagggta

SEQ ID NO: 21725 - RNA, 21 nt, synthetic construct
  source 1..21: mol_type = other RNA
aagtagttttacagatgaagc

SEQ ID NO: 21726 - RNA, 21 nt, synthetic construct
  source 1..21: mol_type = other RNA
aagtcacagggccttggcctg

SEQ ID NO: 21727 - RNA, 21 nt, synthetic construct
  source 1..21: mol_type = other RNA
aagtcattaacttttggccaa

SEQ ID NO: 21728 - RNA, 21 nt, synthetic construct
  source 1..21: mol_type = other RNA
aagtctgaggtgttggtggag

SEQ ID NO: 21729 - RNA, 21 nt, synthetic construct
  source 1..21: mol_type = other RNA
aagtgagtgtgtgtcttcagt

SEQ ID NO: 21730 - RNA, 21 nt, synthetic construct
  source 1..21: mol_type = other RNA
aagtgatccttccacctcagc

SEQ ID NO: 21731 - RNA, 21 nt, synthetic construct
  source 1..21: mol_type = other RNA
aagttaacatcgccagaaagg

SEQ ID NO: 21732 - RNA, 21 nt, synthetic construct
  source 1..21: mol_type = other RNA
aagttaatgactttggcagtt

SEQ ID NO: 21733 - RNA, 21 nt, synthetic construct
  source 1..21: mol_type = other RNA
aagttcagtttggtgctggta

SEQ ID NO: 21734 - RNA, 21 nt, synthetic construct
  source 1..21: mol_type = other RNA
aagttgtagatgagattggtc

SEQ ID NO: 21735 - RNA, 21 nt, synthetic construct
  source 1..21: mol_type = other RNA
aataaaaaggggagagttgag

SEQ ID NO: 21736 - RNA, 21 nt, synthetic construct
  source 1..21: mol_type = other RNA
aataactcactgcagccttga

SEQ ID NO: 21737 - RNA, 21 nt, synthetic construct
  source 1..21: mol_type = other RNA
aataataactcactgcagcct

SEQ ID NO: 21738 - RNA, 21 nt, synthetic construct
  source 1..21: mol_type = other RNA
aataatagtaacttgacagtg

SEQ ID NO: 21739 - RNA, 21 nt, synthetic construct
  source 1..21: mol_type = other RNA
aataatcataaggattgacca

SEQ ID NO: 21740 - RNA, 21 nt, synthetic construct
  source 1..21: mol_type = other RNA
aatacaggccaaggccctgtg

SEQ ID NO: 21741 - RNA, 21 nt, synthetic construct
  source 1..21: mol_type = other RNA
aataccaaagccagctaaagt

SEQ ID NO: 21742 - RNA, 21 nt, synthetic construct
  source 1..21: mol_type = other RNA
aatagcgaggtgttgtggtac

SEQ ID NO: 21743 - RNA, 21 nt, synthetic construct
  source 1..21: mol_type = other RNA
aatagtaacttgacagtggag

SEQ ID NO: 21744 - RNA, 21 nt, synthetic construct
  source 1..21: mol_type = other RNA
aatagtagcacctgcctaagg

SEQ ID NO: 21745 - RNA, 21 nt, synthetic construct
  source 1..21: mol_type = other RNA
aatatgtcaatgtcacaagag

SEQ ID NO: 21746 - RNA, 21 nt, synthetic construct
  source 1..21: mol_type = other RNA
aatatgtccaactgcaaagca

SEQ ID NO: 21747 - RNA, 21 nt, synthetic construct
  source 1..21: mol_type = other RNA
aatattcctgccaagaatgcc

SEQ ID NO: 21748 - RNA, 21 nt, synthetic construct
  source 1..21: mol_type = other RNA
aatattgcagaagtgagtgtg

SEQ ID NO: 21749 - RNA, 21 nt, synthetic construct
  source 1..21: mol_type = other RNA
aatcacatatagtgagcaagc

SEQ ID NO: 21750 - RNA, 21 nt, synthetic construct
  source 1..21: mol_type = other RNA
aatcataaggattgaccaaaa

SEQ ID NO: 21751 - RNA, 21 nt, synthetic construct
  source 1..21: mol_type = other RNA
aatcatcatcgcttggcatgg

SEQ ID NO: 21752 - RNA, 21 nt, synthetic construct
  source 1..21: mol_type = other RNA
aatcccagatcagcttttgca

SEQ ID NO: 21753 - RNA, 21 nt, synthetic construct
  source 1..21: mol_type = other RNA
aatcccagctccaccaacacc

SEQ ID NO: 21754 - RNA, 21 nt, synthetic construct
  source 1..21: mol_type = other RNA
aatcctatgaccaatctcatc

SEQ ID NO: 21755 - RNA, 21 nt, synthetic construct
  source 1..21: mol_type = other RNA
aatcctcctgcctgagccttc

SEQ ID NO: 21756 - RNA, 21 nt, synthetic construct
  source 1..21: mol_type = other RNA
aatctaatctcgagtataacc

SEQ ID NO: 21757 - RNA, 21 nt, synthetic construct
  source 1..21: mol_type = other RNA
aatctcgagccttcttcagtc

SEQ ID NO: 21758 - RNA, 21 nt, synthetic construct
  source 1..21: mol_type = other RNA
aatctcgagtataaccatcag

SEQ ID NO: 21759 - RNA, 21 nt, synthetic construct
  source 1..21: mol_type = other RNA
aatgaacccattttcaaatgc

SEQ ID NO: 21760 - RNA, 21 nt, synthetic construct
  source 1..21: mol_type = other RNA
aatgactttggcagttagtgt

SEQ ID NO: 21761 - RNA, 21 nt, synthetic construct
  source 1..21: mol_type = other RNA
aatgcaaaagctgatctggga

SEQ ID NO: 21762 - RNA, 21 nt, synthetic construct
  source 1..21: mol_type = other RNA
aatgcactagttttagtgctt

SEQ ID NO: 21763 - RNA, 21 nt, synthetic construct
  source 1..21: mol_type = other RNA
aatgcctcatctgaatctaat

SEQ ID NO: 21764 - RNA, 21 nt, synthetic construct
  source 1..21: mol_type = other RNA
aatgggttcattatgcacctt

SEQ ID NO: 21765 - RNA, 21 nt, synthetic construct
  source 1..21: mol_type = other RNA
aatgtcacaagagagaaagac

SEQ ID NO: 21766 - RNA, 21 nt, synthetic construct
  source 1..21: mol_type = other RNA
aatgtctgtcactaaagagaa

SEQ ID NO: 21767 - RNA, 21 nt, synthetic construct
  source 1..21: mol_type = other RNA
aattatttaggagtaaaggtg

SEQ ID NO: 21768 - RNA, 21 nt, synthetic construct
  source 1..21: mol_type = other RNA
aattgagagacagtttacaaa

SEQ ID NO: 21769 - RNA, 21 nt, synthetic construct
  source 1..21: mol_type = other RNA
aattgcttgctcactatatgt

SEQ ID NO: 21770 - RNA, 21 nt, synthetic construct
  source 1..21: mol_type = other RNA
aattgtcccagtagtgtccct

SEQ ID NO: 21771 - RNA, 21 nt, synthetic construct
  source 1..21: mol_type = other RNA
aattgttacttacatgctttg

SEQ ID NO: 21772 - RNA, 21 nt, synthetic construct
  source 1..21: mol_type = other RNA
aatttgcataaccacagtagg

SEQ ID NO: 21773 - RNA, 21 nt, synthetic construct
  source 1..21: mol_type = other RNA
aatttgcttttcagtttttgg

SEQ ID NO: 21774 - RNA, 21 nt, synthetic construct
  source 1..21: mol_type = other RNA
aatttgggtttgtctgatggt

SEQ ID NO: 21775 - RNA, 21 nt, synthetic construct
  source 1..21: mol_type = other RNA
aatttgtccttgttctaagga

SEQ ID NO: 21776 - RNA, 21 nt, synthetic construct
  source 1..21: mol_type = other RNA
aattttagagggtatacggag

SEQ ID NO: 21777 - RNA, 21 nt, synthetic construct
  source 1..21: mol_type = other RNA
aattttatagaggctgaggtg

SEQ ID NO: 21778 - RNA, 21 nt, synthetic construct
  source 1..21: mol_type = other RNA
acaaaacaccagccttgtact

SEQ ID NO: 21779 - RNA, 21 nt, synthetic construct
  source 1..21: mol_type = other RNA
acaaacccaaattgagagaca

SEQ ID NO: 21780 - RNA, 21 nt, synthetic construct
  source 1..21: mol_type = other RNA
acaaagaatacaggccaaggc

SEQ ID NO: 21781 - RNA, 21 nt, synthetic construct
  source 1..21: mol_type = other RNA
acaaatttgcataaccacagt

SEQ ID NO: 21782 - RNA, 21 nt, synthetic construct
  source 1..21: mol_type = other RNA
acaaccctactgtggttatgc

SEQ ID NO: 21783 - RNA, 21 nt, synthetic construct
  source 1..21: mol_type = other RNA
acaactgtcgggtgataaaca

SEQ ID NO: 21784 - RNA, 21 nt, synthetic construct
  source 1..21: mol_type = other RNA
acaagagagaaagacagactg

SEQ ID NO: 21785 - RNA, 21 nt, synthetic construct
  source 1..21: mol_type = other RNA
acaagcccttaggcaggtgct

SEQ ID NO: 21786 - RNA, 21 nt, synthetic construct
  source 1..21: mol_type = other RNA
acaaggaatcacatatagtga

SEQ ID NO: 21787 - RNA, 21 nt, synthetic construct
  source 1..21: mol_type = other RNA
acaaggacaaatttgcataac

SEQ ID NO: 21788 - RNA, 21 nt, synthetic construct
  source 1..21: mol_type = other RNA
acaaggctggtgttttgtaaa

SEQ ID NO: 21789 - RNA, 21 nt, synthetic construct
  source 1..21: mol_type = other RNA
acaataaaaaggggagagttg

SEQ ID NO: 21790 - RNA, 21 nt, synthetic construct
  source 1..21: mol_type = other RNA
acaatcctatgaccaatctca

SEQ ID NO: 21791 - RNA, 21 nt, synthetic construct
  source 1..21: mol_type = other RNA
acaattttagagggtatacgg

SEQ ID NO: 21792 - RNA, 21 nt, synthetic construct
  source 1..21: mol_type = other RNA
acacacactcacttctgcaat

SEQ ID NO: 21793 - RNA, 21 nt, synthetic construct
  source 1..21: mol_type = other RNA
acacactcacttctgcaatat

SEQ ID NO: 21794 - RNA, 21 nt, synthetic construct
  source 1..21: mol_type = other RNA
acaccaccttcaccaactgat

SEQ ID NO: 21795 - RNA, 21 nt, synthetic construct
  source 1..21: mol_type = other RNA
acaccagccttgtactctgct

SEQ ID NO: 21796 - RNA, 21 nt, synthetic construct
  source 1..21: mol_type = other RNA
acacctcagacttcatctcct

SEQ ID NO: 21797 - RNA, 21 nt, synthetic construct
  source 1..21: mol_type = other RNA
acacgcccatagtcccagtta

SEQ ID NO: 21798 - RNA, 21 nt, synthetic construct
  source 1..21: mol_type = other RNA
acactaactgccaaagtcatt

SEQ ID NO: 21799 - RNA, 21 nt, synthetic construct
  source 1..21: mol_type = other RNA
acactactgggacaatttttt

SEQ ID NO: 21800 - RNA, 21 nt, synthetic construct
  source 1..21: mol_type = other RNA
acactatacaatcctatgacc

SEQ ID NO: 21801 - RNA, 21 nt, synthetic construct
  source 1..21: mol_type = other RNA
acactcacttctgcaatattc

SEQ ID NO: 21802 - RNA, 21 nt, synthetic construct
  source 1..21: mol_type = other RNA
acagactgaagagctgatcca

SEQ ID NO: 21803 - RNA, 21 nt, synthetic construct
  source 1..21: mol_type = other RNA
acagagaaggaaaccgaggct

SEQ ID NO: 21804 - RNA, 21 nt, synthetic construct
  source 1..21: mol_type = other RNA
acagatgaagcactaaaacta

SEQ ID NO: 21805 - RNA, 21 nt, synthetic construct
  source 1..21: mol_type = other RNA
acagatggcatgtgcctctcg

SEQ ID NO: 21806 - RNA, 21 nt, synthetic construct
  source 1..21: mol_type = other RNA
acaggccaaggccctgtgact

SEQ ID NO: 21807 - RNA, 21 nt, synthetic construct
  source 1..21: mol_type = other RNA
acagggataatagtagcacct

SEQ ID NO: 21808 - RNA, 21 nt, synthetic construct
  source 1..21: mol_type = other RNA
acagggccttggcctgtattc

SEQ ID NO: 21809 - RNA, 21 nt, synthetic construct
  source 1..21: mol_type = other RNA
acagtagggttgtcaaaatca

SEQ ID NO: 21810 - RNA, 21 nt, synthetic construct
  source 1..21: mol_type = other RNA
acagtggagagacctggcaga

SEQ ID NO: 21811 - RNA, 21 nt, synthetic construct
  source 1..21: mol_type = other RNA
acagtttacaaaacaccagcc

SEQ ID NO: 21812 - RNA, 21 nt, synthetic construct
  source 1..21: mol_type = other RNA
acataagatataccagcacca

SEQ ID NO: 21813 - RNA, 21 nt, synthetic construct
  source 1..21: mol_type = other RNA
acatatagtgagcaagcaatt

SEQ ID NO: 21814 - RNA, 21 nt, synthetic construct
  source 1..21: mol_type = other RNA
acatattaagcagagtacaag

SEQ ID NO: 21815 - RNA, 21 nt, synthetic construct
  source 1..21: mol_type = other RNA
acatattttggtttaaatccc

SEQ ID NO: 21816 - RNA, 21 nt, synthetic construct
  source 1..21: mol_type = other RNA
acatcgccagaaaggggacag

SEQ ID NO: 21817 - RNA, 21 nt, synthetic construct
  source 1..21: mol_type = other RNA
acatgccatctgtcccctttc

SEQ ID NO: 21818 - RNA, 21 nt, synthetic construct
  source 1..21: mol_type = other RNA
acatgctttgcagttggacat

SEQ ID NO: 21819 - RNA, 21 nt, synthetic construct
  source 1..21: mol_type = other RNA
acattgacatattaagcagag

SEQ ID NO: 21820 - RNA, 21 nt, synthetic construct
  source 1..21: mol_type = other RNA
accaaaaactgaaaagcaaat

SEQ ID NO: 21821 - RNA, 21 nt, synthetic construct
  source 1..21: mol_type = other RNA
accaaaatatgtccaactgca

SEQ ID NO: 21822 - RNA, 21 nt, synthetic construct
  source 1..21: mol_type = other RNA
accaaactgaactttctcctc

SEQ ID NO: 21823 - RNA, 21 nt, synthetic construct
  source 1..21: mol_type = other RNA
accaaagccagctaaagtcac

SEQ ID NO: 21824 - RNA, 21 nt, synthetic construct
  source 1..21: mol_type = other RNA
accaacacctcagacttcatc

SEQ ID NO: 21825 - RNA, 21 nt, synthetic construct
  source 1..21: mol_type = other RNA
accaactgatcaaagttaaca

SEQ ID NO: 21826 - RNA, 21 nt, synthetic construct
  source 1..21: mol_type = other RNA
accaatctcatctacaacttt

SEQ ID NO: 21827 - RNA, 21 nt, synthetic construct
  source 1..21: mol_type = other RNA
accacaacacctcgctatttt

SEQ ID NO: 21828 - RNA, 21 nt, synthetic construct
  source 1..21: mol_type = other RNA
accacagtagggttgtcaaaa

SEQ ID NO: 21829 - RNA, 21 nt, synthetic construct
  source 1..21: mol_type = other RNA
accaccttcaccaactgatca

SEQ ID NO: 21830 - RNA, 21 nt, synthetic construct
  source 1..21: mol_type = other RNA
accagcaccaaactgaacttt

SEQ ID NO: 21831 - RNA, 21 nt, synthetic construct
  source 1..21: mol_type = other RNA
accagccttgtactctgctta

SEQ ID NO: 21832 - RNA, 21 nt, synthetic construct
  source 1..21: mol_type = other RNA
acccaaattgagagacagttt

SEQ ID NO: 21833 - RNA, 21 nt, synthetic construct
  source 1..21: mol_type = other RNA
acccattttcaaatgcttatg

SEQ ID NO: 21834 - RNA, 21 nt, synthetic construct
  source 1..21: mol_type = other RNA
acccgacagttgttaatctct

SEQ ID NO: 21835 - RNA, 21 nt, synthetic construct
  source 1..21: mol_type = other RNA
accctaagtaacaaggaatca

SEQ ID NO: 21836 - RNA, 21 nt, synthetic construct
  source 1..21: mol_type = other RNA
accctactgtggttatgcaaa

SEQ ID NO: 21837 - RNA, 21 nt, synthetic construct
  source 1..21: mol_type = other RNA
accctctaaaattgttactta

SEQ ID NO: 21838 - RNA, 21 nt, synthetic construct
  source 1..21: mol_type = other RNA
accctgtctcaaaacgaaaaa

SEQ ID NO: 21839 - RNA, 21 nt, synthetic construct
  source 1..21: mol_type = other RNA
accgaggcttaggagatgaag

SEQ ID NO: 21840 - RNA, 21 nt, synthetic construct
  source 1..21: mol_type = other RNA
acctcaactctccccttttta

SEQ ID NO: 21841 - RNA, 21 nt, synthetic construct
  source 1..21: mol_type = other RNA
acctcagacttcatctcctaa

SEQ ID NO: 21842 - RNA, 21 nt, synthetic construct
  source 1..21: mol_type = other RNA
acctcagcctctataaaattt

SEQ ID NO: 21843 - RNA, 21 nt, synthetic construct
  source 1..21: mol_type = other RNA
acctccgtataccctctaaaa

SEQ ID NO: 21844 - RNA, 21 nt, synthetic construct
  source 1..21: mol_type = other RNA
acctggcagacaccaccttca

SEQ ID NO: 21845 - RNA, 21 nt, synthetic construct
  source 1..21: mol_type = other RNA
accttcaccaactgatcaaag

SEQ ID NO: 21846 - RNA, 21 nt, synthetic construct
  source 1..21: mol_type = other RNA
acctttactcctaaataattc

SEQ ID NO: 21847 - RNA, 21 nt, synthetic construct
  source 1..21: mol_type = other RNA
acgcccatagtcccagttact

SEQ ID NO: 21848 - RNA, 21 nt, synthetic construct
  source 1..21: mol_type = other RNA
acggaggtgaccctaagtaac

SEQ ID NO: 21849 - RNA, 21 nt, synthetic construct
  source 1..21: mol_type = other RNA
actaaaactagtgcatttcat

SEQ ID NO: 21850 - RNA, 21 nt, synthetic construct
  source 1..21: mol_type = other RNA
actaaagagaaaatcatcatc

SEQ ID NO: 21851 - RNA, 21 nt, synthetic construct
  source 1..21: mol_type = other RNA
actaactgccaaagtcattaa

SEQ ID NO: 21852 - RNA, 21 nt, synthetic construct
  source 1..21: mol_type = other RNA
actagtgcatttcatcttaaa

SEQ ID NO: 21853 - RNA, 21 nt, synthetic construct
  source 1..21: mol_type = other RNA
actagttttagtgcttcatct

SEQ ID NO: 21854 - RNA, 21 nt, synthetic construct
  source 1..21: mol_type = other RNA
actatacaatcctatgaccaa

SEQ ID NO: 21855 - RNA, 21 nt, synthetic construct
  source 1..21: mol_type = other RNA
actatatgtgattccttgtta

SEQ ID NO: 21856 - RNA, 21 nt, synthetic construct
  source 1..21: mol_type = other RNA
actatgggcgtgtaccacaac

SEQ ID NO: 21857 - RNA, 21 nt, synthetic construct
  source 1..21: mol_type = other RNA
actattatccctgttttacag

SEQ ID NO: 21858 - RNA, 21 nt, synthetic construct
  source 1..21: mol_type = other RNA
actcactgcagccttgaactc

SEQ ID NO: 21859 - RNA, 21 nt, synthetic construct
  source 1..21: mol_type = other RNA
actcacttctgcaatattcct

SEQ ID NO: 21860 - RNA, 21 nt, synthetic construct
  source 1..21: mol_type = other RNA
actcgagattagattcagatg

SEQ ID NO: 21861 - RNA, 21 nt, synthetic construct
  source 1..21: mol_type = other RNA
actctcccctttttattgtta

SEQ ID NO: 21862 - RNA, 21 nt, synthetic construct
  source 1..21: mol_type = other RNA
actctgcttaatatgtcaatg

SEQ ID NO: 21863 - RNA, 21 nt, synthetic construct
  source 1..21: mol_type = other RNA
actgaaaagcaaattgcttgc

SEQ ID NO: 21864 - RNA, 21 nt, synthetic construct
  source 1..21: mol_type = other RNA
actgaactttctcctctaaat

SEQ ID NO: 21865 - RNA, 21 nt, synthetic construct
  source 1..21: mol_type = other RNA
actgaagaaggctcgagatta

SEQ ID NO: 21866 - RNA, 21 nt, synthetic construct
  source 1..21: mol_type = other RNA
actgaagacacacactcactt

SEQ ID NO: 21867 - RNA, 21 nt, synthetic construct
  source 1..21: mol_type = other RNA
actgaagagctgatccagact

SEQ ID NO: 21868 - RNA, 21 nt, synthetic construct
  source 1..21: mol_type = other RNA
actgagcgagaccctgtctca

SEQ ID NO: 21869 - RNA, 21 nt, synthetic construct
  source 1..21: mol_type = other RNA
actgatcaaagttaacatcgc

SEQ ID NO: 21870 - RNA, 21 nt, synthetic construct
  source 1..21: mol_type = other RNA
actgcaaagcatgtaagtaac

SEQ ID NO: 21871 - RNA, 21 nt, synthetic construct
  source 1..21: mol_type = other RNA
actgcaaattataaagggaat

SEQ ID NO: 21872 - RNA, 21 nt, synthetic construct
  source 1..21: mol_type = other RNA
actgccaaagtcattaacttt

SEQ ID NO: 21873 - RNA, 21 nt, synthetic construct
  source 1..21: mol_type = other RNA
actgggactatgggcgtgtac

SEQ ID NO: 21874 - RNA, 21 nt, synthetic construct
  source 1..21: mol_type = other RNA
actgtcaagttactattattc

SEQ ID NO: 21875 - RNA, 21 nt, synthetic construct
  source 1..21: mol_type = other RNA
actgtcgggtgataaacataa

SEQ ID NO: 21876 - RNA, 21 nt, synthetic construct
  source 1..21: mol_type = other RNA
actgtctctcaatttgggttt

SEQ ID NO: 21877 - RNA, 21 nt, synthetic construct
  source 1..21: mol_type = other RNA
actgtggttatgcaaatttgt

SEQ ID NO: 21878 - RNA, 21 nt, synthetic construct
  source 1..21: mol_type = other RNA
acttacatgctttgcagttgg

SEQ ID NO: 21879 - RNA, 21 nt, synthetic construct
  source 1..21: mol_type = other RNA
acttagggtcacctccgtata

SEQ ID NO: 21880 - RNA, 21 nt, synthetic construct
  source 1..21: mol_type = other RNA
acttcatctcctaagcctcgg

SEQ ID NO: 21881 - RNA, 21 nt, synthetic construct
  source 1..21: mol_type = other RNA
acttctgcaatattcctgcca

SEQ ID NO: 21882 - RNA, 21 nt, synthetic construct
  source 1..21: mol_type = other RNA
acttgacagtggagagacctg

SEQ ID NO: 21883 - RNA, 21 nt, synthetic construct
  source 1..21: mol_type = other RNA
acttgagtttgaaaccagcct

SEQ ID NO: 21884 - RNA, 21 nt, synthetic construct
  source 1..21: mol_type = other RNA
actttagctggctttggtatt

SEQ ID NO: 21885 - RNA, 21 nt, synthetic construct
  source 1..21: mol_type = other RNA
actttctcctctaaataatca

SEQ ID NO: 21886 - RNA, 21 nt, synthetic construct
  source 1..21: mol_type = other RNA
actttgatcagttggtgaagg

SEQ ID NO: 21887 - RNA, 21 nt, synthetic construct
  source 1..21: mol_type = other RNA
actttggcagttagtgttttt

SEQ ID NO: 21888 - RNA, 21 nt, synthetic construct
  source 1..21: mol_type = other RNA
acttttggccaaataccaaag

SEQ ID NO: 21889 - RNA, 21 nt, synthetic construct
  source 1..21: mol_type = other RNA
agaaaatcatcatcgcttggc

SEQ ID NO: 21890 - RNA, 21 nt, synthetic construct
  source 1..21: mol_type = other RNA
agaaagacagactgaagagct

SEQ ID NO: 21891 - RNA, 21 nt, synthetic construct
  source 1..21: mol_type = other RNA
agaaaggggacagatggcatg

SEQ ID NO: 21892 - RNA, 21 nt, synthetic construct
  source 1..21: mol_type = other RNA
agaaagttcagtttggtgctg

SEQ ID NO: 21893 - RNA, 21 nt, synthetic construct
  source 1..21: mol_type = other RNA
agaacaaggacaaatttgcat

SEQ ID NO: 21894 - RNA, 21 nt, synthetic construct
  source 1..21: mol_type = other RNA
agaaggaaaccgaggcttagg

SEQ ID NO: 21895 - RNA, 21 nt, synthetic construct
  source 1..21: mol_type = other RNA
agaaggctcgagattaatgca

SEQ ID NO: 21896 - RNA, 21 nt, synthetic construct
  source 1..21: mol_type = other RNA
agaagtgagtgtgtgtcttca

SEQ ID NO: 21897 - RNA, 21 nt, synthetic construct
  source 1..21: mol_type = other RNA
agaatacaggccaaggccctg

SEQ ID NO: 21898 - RNA, 21 nt, synthetic construct
  source 1..21: mol_type = other RNA
agaatgcctcatctgaatcta

SEQ ID NO: 21899 - RNA, 21 nt, synthetic construct
  source 1..21: mol_type = other RNA
agacaaacccaaattgagaga

SEQ ID NO: 21900 - RNA, 21 nt, synthetic construct
  source 1..21: mol_type = other RNA
agacacacactcacttctgca

SEQ ID NO: 21901 - RNA, 21 nt, synthetic construct
  source 1..21: mol_type = other RNA
agacaccaccttcaccaactg

SEQ ID NO: 21902 - RNA, 21 nt, synthetic construct
  source 1..21: mol_type = other RNA
agacagactgaagagctgatc

SEQ ID NO: 21903 - RNA, 21 nt, synthetic construct
  source 1..21: mol_type = other RNA
agacagtttacaaaacaccag

SEQ ID NO: 21904 - RNA, 21 nt, synthetic construct
  source 1..21: mol_type = other RNA
agaccccgtctctacaaaaag

SEQ ID NO: 21905 - RNA, 21 nt, synthetic construct
  source 1..21: mol_type = other RNA
agacctggcagacaccacctt

SEQ ID NO: 21906 - RNA, 21 nt, synthetic construct
  source 1..21: mol_type = other RNA
agactgaagaaggctcgagat

SEQ ID NO: 21907 - RNA, 21 nt, synthetic construct
  source 1..21: mol_type = other RNA
agactgaagagctgatccaga

SEQ ID NO: 21908 - RNA, 21 nt, synthetic construct
  source 1..21: mol_type = other RNA
agacttcatctcctaagcctc

SEQ ID NO: 21909 - RNA, 21 nt, synthetic construct
  source 1..21: mol_type = other RNA
agagaaaatcatcatcgcttg

SEQ ID NO: 21910 - RNA, 21 nt, synthetic construct
  source 1..21: mol_type = other RNA
agagaaagacagactgaagag

SEQ ID NO: 21911 - RNA, 21 nt, synthetic construct
  source 1..21: mol_type = other RNA
agagaaggaaaccgaggctta

SEQ ID NO: 21912 - RNA, 21 nt, synthetic construct
  source 1..21: mol_type = other RNA
agagacagtttacaaaacacc

SEQ ID NO: 21913 - RNA, 21 nt, synthetic construct
  source 1..21: mol_type = other RNA
agagacctggcagacaccacc

SEQ ID NO: 21914 - RNA, 21 nt, synthetic construct
  source 1..21: mol_type = other RNA
agagagaaagacagactgaag

SEQ ID NO: 21915 - RNA, 21 nt, synthetic construct
  source 1..21: mol_type = other RNA
agagattaacaactgtcgggt

SEQ ID NO: 21916 - RNA, 21 nt, synthetic construct
  source 1..21: mol_type = other RNA
agagctgatccagactgaaga

SEQ ID NO: 21917 - RNA, 21 nt, synthetic construct
  source 1..21: mol_type = other RNA
agaggagaaagttcagtttgg

SEQ ID NO: 21918 - RNA, 21 nt, synthetic construct
  source 1..21: mol_type = other RNA
agaggcacatgccatctgtcc

SEQ ID NO: 21919 - RNA, 21 nt, synthetic construct
  source 1..21: mol_type = other RNA
agagggtatacggaggtgacc

SEQ ID NO: 21920 - RNA, 21 nt, synthetic construct
  source 1..21: mol_type = other RNA
agagtacaaggctggtgtttt

SEQ ID NO: 21921 - RNA, 21 nt, synthetic construct
  source 1..21: mol_type = other RNA
agagttgaggtccaagatgca

SEQ ID NO: 21922 - RNA, 21 nt, synthetic construct
  source 1..21: mol_type = other RNA
agatataccagcaccaaactg

SEQ ID NO: 21923 - RNA, 21 nt, synthetic construct
  source 1..21: mol_type = other RNA
agatcagcttttgcattaatc

SEQ ID NO: 21924 - RNA, 21 nt, synthetic construct
  source 1..21: mol_type = other RNA
agatgaaatgcactagtttta

SEQ ID NO: 21925 - RNA, 21 nt, synthetic construct
  source 1..21: mol_type = other RNA
agatgaagcactaaaactagt

SEQ ID NO: 21926 - RNA, 21 nt, synthetic construct
  source 1..21: mol_type = other RNA
agatgaagtctgaggtgttgg

SEQ ID NO: 21927 - RNA, 21 nt, synthetic construct
  source 1..21: mol_type = other RNA
agatgagattggtcataggat

SEQ ID NO: 21928 - RNA, 21 nt, synthetic construct
  source 1..21: mol_type = other RNA
agatgaggcattcttggcagg

SEQ ID NO: 21929 - RNA, 21 nt, synthetic construct
  source 1..21: mol_type = other RNA
agatgcaatcccagatcagct

SEQ ID NO: 21930 - RNA, 21 nt, synthetic construct
  source 1..21: mol_type = other RNA
agatgcactgaagacacacac

SEQ ID NO: 21931 - RNA, 21 nt, synthetic construct
  source 1..21: mol_type = other RNA
agatggcatgtgcctctcgat

SEQ ID NO: 21932 - RNA, 21 nt, synthetic construct
  source 1..21: mol_type = other RNA
agattaacaactgtcgggtga

SEQ ID NO: 21933 - RNA, 21 nt, synthetic construct
  source 1..21: mol_type = other RNA
agattaatgcaaaagctgatc

SEQ ID NO: 21934 - RNA, 21 nt, synthetic construct
  source 1..21: mol_type = other RNA
agattagattcagatgaggca

SEQ ID NO: 21935 - RNA, 21 nt, synthetic construct
  source 1..21: mol_type = other RNA
agattcagatgaggcattctt

SEQ ID NO: 21936 - RNA, 21 nt, synthetic construct
  source 1..21: mol_type = other RNA
agattggtcataggattgtat

SEQ ID NO: 21937 - RNA, 21 nt, synthetic construct
  source 1..21: mol_type = other RNA
agatttgctgattttgacaac

SEQ ID NO: 21938 - RNA, 21 nt, synthetic construct
  source 1..21: mol_type = other RNA
agcaaattgcttgctcactat

SEQ ID NO: 21939 - RNA, 21 nt, synthetic construct
  source 1..21: mol_type = other RNA
agcaagcaatttgcttttcag

SEQ ID NO: 21940 - RNA, 21 nt, synthetic construct
  source 1..21: mol_type = other RNA
agcaatttgcttttcagtttt

SEQ ID NO: 21941 - RNA, 21 nt, synthetic construct
  source 1..21: mol_type = other RNA
agcaccaaactgaactttctc

SEQ ID NO: 21942 - RNA, 21 nt, synthetic construct
  source 1..21: mol_type = other RNA
agcactaaaactagtgcattt

SEQ ID NO: 21943 - RNA, 21 nt, synthetic construct
  source 1..21: mol_type = other RNA
agcagagtacaaggctggtgt

SEQ ID NO: 21944 - RNA, 21 nt, synthetic construct
  source 1..21: mol_type = other RNA
agcatttgaaaatgggttcat

SEQ ID NO: 21945 - RNA, 21 nt, synthetic construct
  source 1..21: mol_type = other RNA
agccagctaaagtcacagggc

SEQ ID NO: 21946 - RNA, 21 nt, synthetic construct
  source 1..21: mol_type = other RNA
agcccttaggcaggtgctact

SEQ ID NO: 21947 - RNA, 21 nt, synthetic construct
  source 1..21: mol_type = other RNA
agcctcggtttccttctctgt

SEQ ID NO: 21948 - RNA, 21 nt, synthetic construct
  source 1..21: mol_type = other RNA
agccttccgagtaactgggac

SEQ ID NO: 21949 - RNA, 21 nt, synthetic construct
  source 1..21: mol_type = other RNA
agccttcttcagtctggatca

SEQ ID NO: 21950 - RNA, 21 nt, synthetic construct
  source 1..21: mol_type = other RNA
agccttgtactctgcttaata

SEQ ID NO: 21951 - RNA, 21 nt, synthetic construct
  source 1..21: mol_type = other RNA
agcgaggtgttgtggtacacg

SEQ ID NO: 21952 - RNA, 21 nt, synthetic construct
  source 1..21: mol_type = other RNA
agcgatgatgattttctcttt

SEQ ID NO: 21953 - RNA, 21 nt, synthetic construct
  source 1..21: mol_type = other RNA
agctaaagtcacagggccttg

SEQ ID NO: 21954 - RNA, 21 nt, synthetic construct
  source 1..21: mol_type = other RNA
agctccaccaacacctcagac

SEQ ID NO: 21955 - RNA, 21 nt, synthetic construct
  source 1..21: mol_type = other RNA
agctcttcagtctgtctttct

SEQ ID NO: 21956 - RNA, 21 nt, synthetic construct
  source 1..21: mol_type = other RNA
agctgatccagactgaagaag

SEQ ID NO: 21957 - RNA, 21 nt, synthetic construct
  source 1..21: mol_type = other RNA
agctgatctgggattgcatct

SEQ ID NO: 21958 - RNA, 21 nt, synthetic construct
  source 1..21: mol_type = other RNA
agctggctttggtatttggcc

SEQ ID NO: 21959 - RNA, 21 nt, synthetic construct
  source 1..21: mol_type = other RNA
agctgggatttaaaccaaaat

SEQ ID NO: 21960 - RNA, 21 nt, synthetic construct
  source 1..21: mol_type = other RNA
agcttttgcattaatctcgag

SEQ ID NO: 21961 - RNA, 21 nt, synthetic construct
  source 1..21: mol_type = other RNA
aggaaaccgaggcttaggaga

SEQ ID NO: 21962 - RNA, 21 nt, synthetic construct
  source 1..21: mol_type = other RNA
aggaatattgcagaagtgagt

SEQ ID NO: 21963 - RNA, 21 nt, synthetic construct
  source 1..21: mol_type = other RNA
aggaatcacatatagtgagca

SEQ ID NO: 21964 - RNA, 21 nt, synthetic construct
  source 1..21: mol_type = other RNA
aggacaaatttgcataaccac

SEQ ID NO: 21965 - RNA, 21 nt, synthetic construct
  source 1..21: mol_type = other RNA
aggagaaagttcagtttggtg

SEQ ID NO: 21966 - RNA, 21 nt, synthetic construct
  source 1..21: mol_type = other RNA
aggagatgaagtctgaggtgt

SEQ ID NO: 21967 - RNA, 21 nt, synthetic construct
  source 1..21: mol_type = other RNA
aggagtaaaggtgcataatga

SEQ ID NO: 21968 - RNA, 21 nt, synthetic construct
  source 1..21: mol_type = other RNA
aggatcacttgagtttgaaac

SEQ ID NO: 21969 - RNA, 21 nt, synthetic construct
  source 1..21: mol_type = other RNA
aggattgaccaaaaactgaaa

SEQ ID NO: 21970 - RNA, 21 nt, synthetic construct
  source 1..21: mol_type = other RNA
aggattgtatagtgtatcaat

SEQ ID NO: 21971 - RNA, 21 nt, synthetic construct
  source 1..21: mol_type = other RNA
aggcacatgccatctgtcccc

SEQ ID NO: 21972 - RNA, 21 nt, synthetic construct
  source 1..21: mol_type = other RNA
aggcaggtgctactattatcc

SEQ ID NO: 21973 - RNA, 21 nt, synthetic construct
  source 1..21: mol_type = other RNA
aggcattcttggcaggaatat

SEQ ID NO: 21974 - RNA, 21 nt, synthetic construct
  source 1..21: mol_type = other RNA
aggccaaggccctgtgacttt

SEQ ID NO: 21975 - RNA, 21 nt, synthetic construct
  source 1..21: mol_type = other RNA
aggccctgtgactttagctgg

SEQ ID NO: 21976 - RNA, 21 nt, synthetic construct
  source 1..21: mol_type = other RNA
aggctcgagattaatgcaaaa

SEQ ID NO: 21977 - RNA, 21 nt, synthetic construct
  source 1..21: mol_type = other RNA
aggctgcagtgagttattatt

SEQ ID NO: 21978 - RNA, 21 nt, synthetic construct
  source 1..21: mol_type = other RNA
aggctggagtgcagtggtgga

SEQ ID NO: 21979 - RNA, 21 nt, synthetic construct
  source 1..21: mol_type = other RNA
aggctggtgttttgtaaactg

SEQ ID NO: 21980 - RNA, 21 nt, synthetic construct
  source 1..21: mol_type = other RNA
aggctggtttcaaactcaagt

SEQ ID NO: 21981 - RNA, 21 nt, synthetic construct
  source 1..21: mol_type = other RNA
aggcttaggagatgaagtctg

SEQ ID NO: 21982 - RNA, 21 nt, synthetic construct
  source 1..21: mol_type = other RNA
agggaataatagtaacttgac

SEQ ID NO: 21983 - RNA, 21 nt, synthetic construct
  source 1..21: mol_type = other RNA
agggacactactgggacaatt

SEQ ID NO: 21984 - RNA, 21 nt, synthetic construct
  source 1..21: mol_type = other RNA
agggataatagtagcacctgc

SEQ ID NO: 21985 - RNA, 21 nt, synthetic construct
  source 1..21: mol_type = other RNA
agggccttggcctgtattctt

SEQ ID NO: 21986 - RNA, 21 nt, synthetic construct
  source 1..21: mol_type = other RNA
aggggacagatggcatgtgcc

SEQ ID NO: 21987 - RNA, 21 nt, synthetic construct
  source 1..21: mol_type = other RNA
aggggagagttgaggtccaag

SEQ ID NO: 21988 - RNA, 21 nt, synthetic construct
  source 1..21: mol_type = other RNA
agggtatacggaggtgaccct

SEQ ID NO: 21989 - RNA, 21 nt, synthetic construct
  source 1..21: mol_type = other RNA
agggtcacctccgtataccct

SEQ ID NO: 21990 - RNA, 21 nt, synthetic construct
  source 1..21: mol_type = other RNA
agggttgtcaaaatcagcaaa

SEQ ID NO: 21991 - RNA, 21 nt, synthetic construct
  source 1..21: mol_type = other RNA
aggtccaagatgcaatcccag

SEQ ID NO: 21992 - RNA, 21 nt, synthetic construct
  source 1..21: mol_type = other RNA
aggtctctccactgtcaagtt

SEQ ID NO: 21993 - RNA, 21 nt, synthetic construct
  source 1..21: mol_type = other RNA
aggtgaccctaagtaacaagg

SEQ ID NO: 21994 - RNA, 21 nt, synthetic construct
  source 1..21: mol_type = other RNA
aggtgcataatgaacccattt

SEQ ID NO: 21995 - RNA, 21 nt, synthetic construct
  source 1..21: mol_type = other RNA
aggtgctactattatccctgt

SEQ ID NO: 21996 - RNA, 21 nt, synthetic construct
  source 1..21: mol_type = other RNA
aggtggaaggatcacttgagt

SEQ ID NO: 21997 - RNA, 21 nt, synthetic construct
  source 1..21: mol_type = other RNA
aggtggtgtctgccaggtctc

SEQ ID NO: 21998 - RNA, 21 nt, synthetic construct
  source 1..21: mol_type = other RNA
aggtgttggtggagctgggat

SEQ ID NO: 21999 - RNA, 21 nt, synthetic construct
  source 1..21: mol_type = other RNA
aggtgttgtggtacacgccca

SEQ ID NO: 22000 - RNA, 21 nt, synthetic construct
  source 1..21: mol_type = other RNA
agtaaaggtgcataatgaacc

SEQ ID NO: 22001 - RNA, 21 nt, synthetic construct
  source 1..21: mol_type = other RNA
agtaacaaggaatcacatata

SEQ ID NO: 22002 - RNA, 21 nt, synthetic construct
  source 1..21: mol_type = other RNA
agtaacaattttagagggtat

SEQ ID NO: 22003 - RNA, 21 nt, synthetic construct
  source 1..21: mol_type = other RNA
agtaactgggactatgggcgt

SEQ ID NO: 22004 - RNA, 21 nt, synthetic construct
  source 1..21: mol_type = other RNA
agtaacttgacagtggagaga

SEQ ID NO: 22005 - RNA, 21 nt, synthetic construct
  source 1..21: mol_type = other RNA
agtacaaggctggtgttttgt

SEQ ID NO: 22006 - RNA, 21 nt, synthetic construct
  source 1..21: mol_type = other RNA
agtagggttgtcaaaatcagc

SEQ ID NO: 22007 - RNA, 21 nt, synthetic construct
  source 1..21: mol_type = other RNA
agtagtgtcccttaacaataa

SEQ ID NO: 22008 - RNA, 21 nt, synthetic construct
  source 1..21: mol_type = other RNA
agtagttttacagatgaagca

SEQ ID NO: 22009 - RNA, 21 nt, synthetic construct
  source 1..21: mol_type = other RNA
agtataaccatcagacaaacc

SEQ ID NO: 22010 - RNA, 21 nt, synthetic construct
  source 1..21: mol_type = other RNA
agtcacagggccttggcctgt

SEQ ID NO: 22011 - RNA, 21 nt, synthetic construct
  source 1..21: mol_type = other RNA
agtcattaacttttggccaaa

SEQ ID NO: 22012 - RNA, 21 nt, synthetic construct
  source 1..21: mol_type = other RNA
agtcccagttactcggaaggc

SEQ ID NO: 22013 - RNA, 21 nt, synthetic construct
  source 1..21: mol_type = other RNA
agtccgggagttcaaggctgc

SEQ ID NO: 22014 - RNA, 21 nt, synthetic construct
  source 1..21: mol_type = other RNA
agtctgaggtgttggtggagc

SEQ ID NO: 22015 - RNA, 21 nt, synthetic construct
  source 1..21: mol_type = other RNA
agtctggatcagctcttcagt

SEQ ID NO: 22016 - RNA, 21 nt, synthetic construct
  source 1..21: mol_type = other RNA
agtctgtctttctctcttgtg

SEQ ID NO: 22017 - RNA, 21 nt, synthetic construct
  source 1..21: mol_type = other RNA
agtgagaccccgtctctacaa

SEQ ID NO: 22018 - RNA, 21 nt, synthetic construct
  source 1..21: mol_type = other RNA
agtgagcaagcaatttgcttt

SEQ ID NO: 22019 - RNA, 21 nt, synthetic construct
  source 1..21: mol_type = other RNA
agtgagtgtgtgtcttcagtg

SEQ ID NO: 22020 - RNA, 21 nt, synthetic construct
  source 1..21: mol_type = other RNA
agtgagttattattccaccac

SEQ ID NO: 22021 - RNA, 21 nt, synthetic construct
  source 1..21: mol_type = other RNA
agtgatccttccacctcagcc

SEQ ID NO: 22022 - RNA, 21 nt, synthetic construct
  source 1..21: mol_type = other RNA
agtgcagtggtggaataataa

SEQ ID NO: 22023 - RNA, 21 nt, synthetic construct
  source 1..21: mol_type = other RNA
agtgcatcttatcgagaggca

SEQ ID NO: 22024 - RNA, 21 nt, synthetic construct
  source 1..21: mol_type = other RNA
agtgcatttcatcttaaactg

SEQ ID NO: 22025 - RNA, 21 nt, synthetic construct
  source 1..21: mol_type = other RNA
agtgcttcatctgtaaaacta

SEQ ID NO: 22026 - RNA, 21 nt, synthetic construct
  source 1..21: mol_type = other RNA
agtggagagacctggcagaca

SEQ ID NO: 22027 - RNA, 21 nt, synthetic construct
  source 1..21: mol_type = other RNA
agtggtggaataataactcac

SEQ ID NO: 22028 - RNA, 21 nt, synthetic construct
  source 1..21: mol_type = other RNA
agtgtcccttaacaataaaaa

SEQ ID NO: 22029 - RNA, 21 nt, synthetic construct
  source 1..21: mol_type = other RNA
agtgtgtgtcttcagtgcatc

SEQ ID NO: 22030 - RNA, 21 nt, synthetic construct
  source 1..21: mol_type = other RNA
agtgtttttatccatgccaag

SEQ ID NO: 22031 - RNA, 21 nt, synthetic construct
  source 1..21: mol_type = other RNA
agttaacatcgccagaaaggg

SEQ ID NO: 22032 - RNA, 21 nt, synthetic construct
  source 1..21: mol_type = other RNA
agttaatgactttggcagtta

SEQ ID NO: 22033 - RNA, 21 nt, synthetic construct
  source 1..21: mol_type = other RNA
agttactcggaaggctcaggc

SEQ ID NO: 22034 - RNA, 21 nt, synthetic construct
  source 1..21: mol_type = other RNA
agttagtgtttttatccatgc

SEQ ID NO: 22035 - RNA, 21 nt, synthetic construct
  source 1..21: mol_type = other RNA
agttattattccaccactgca

SEQ ID NO: 22036 - RNA, 21 nt, synthetic construct
  source 1..21: mol_type = other RNA
agttcaaggctgcagtgagtt

SEQ ID NO: 22037 - RNA, 21 nt, synthetic construct
  source 1..21: mol_type = other RNA
agttcagtttggtgctggtat

SEQ ID NO: 22038 - RNA, 21 nt, synthetic construct
  source 1..21: mol_type = other RNA
agttgaggtccaagatgcaat

SEQ ID NO: 22039 - RNA, 21 nt, synthetic construct
  source 1..21: mol_type = other RNA
agttggacatattttggttta

SEQ ID NO: 22040 - RNA, 21 nt, synthetic construct
  source 1..21: mol_type = other RNA
agttggtgaaggtggtgtctg

SEQ ID NO: 22041 - RNA, 21 nt, synthetic construct
  source 1..21: mol_type = other RNA
agttgtagatgagattggtca

SEQ ID NO: 22042 - RNA, 21 nt, synthetic construct
  source 1..21: mol_type = other RNA
agtttaagatgaaatgcacta

SEQ ID NO: 22043 - RNA, 21 nt, synthetic construct
  source 1..21: mol_type = other RNA
agtttacaaaacaccagcctt

SEQ ID NO: 22044 - RNA, 21 nt, synthetic construct
  source 1..21: mol_type = other RNA
agtttggtgctggtatatctt

SEQ ID NO: 22045 - RNA, 21 nt, synthetic construct
  source 1..21: mol_type = other RNA
agttttacagatgaagcacta

SEQ ID NO: 22046 - RNA, 21 nt, synthetic construct
  source 1..21: mol_type = other RNA
agttttagtgcttcatctgta

SEQ ID NO: 22047 - RNA, 21 nt, synthetic construct
  source 1..21: mol_type = other RNA
agtttttggtcaatccttatg

SEQ ID NO: 22048 - RNA, 21 nt, synthetic construct
  source 1..21: mol_type = other RNA
ataaaaacactaactgccaaa

SEQ ID NO: 22049 - RNA, 21 nt, synthetic construct
  source 1..21: mol_type = other RNA
ataaaaaggggagagttgagg

SEQ ID NO: 22050 - RNA, 21 nt, synthetic construct
  source 1..21: mol_type = other RNA
ataaacataagatataccagc

SEQ ID NO: 22051 - RNA, 21 nt, synthetic construct
  source 1..21: mol_type = other RNA
ataaagttgtagatgagattg

SEQ ID NO: 22052 - RNA, 21 nt, synthetic construct
  source 1..21: mol_type = other RNA
ataaccacagtagggttgtca

SEQ ID NO: 22053 - RNA, 21 nt, synthetic construct
  source 1..21: mol_type = other RNA
ataaccatcagacaaacccaa

SEQ ID NO: 22054 - RNA, 21 nt, synthetic construct
  source 1..21: mol_type = other RNA
ataactcactgcagccttgaa

SEQ ID NO: 22055 - RNA, 21 nt, synthetic construct
  source 1..21: mol_type = other RNA
ataagatataccagcaccaaa

SEQ ID NO: 22056 - RNA, 21 nt, synthetic construct
  source 1..21: mol_type = other RNA
ataagatgcactgaagacaca

SEQ ID NO: 22057 - RNA, 21 nt, synthetic construct
  source 1..21: mol_type = other RNA
ataagcatttgaaaatgggtt

SEQ ID NO: 22058 - RNA, 21 nt, synthetic construct
  source 1..21: mol_type = other RNA
ataaggattgaccaaaaactg

SEQ ID NO: 22059 - RNA, 21 nt, synthetic construct
  source 1..21: mol_type = other RNA
ataataactcactgcagcctt

SEQ ID NO: 22060 - RNA, 21 nt, synthetic construct
  source 1..21: mol_type = other RNA
ataatagtaacttgacagtgg

SEQ ID NO: 22061 - RNA, 21 nt, synthetic construct
  source 1..21: mol_type = other RNA
ataatagtagcacctgcctaa

SEQ ID NO: 22062 - RNA, 21 nt, synthetic construct
  source 1..21: mol_type = other RNA
ataatcataaggattgaccaa

SEQ ID NO: 22063 - RNA, 21 nt, synthetic construct
  source 1..21: mol_type = other RNA
atacaatcctatgaccaatct

SEQ ID NO: 22064 - RNA, 21 nt, synthetic construct
  source 1..21: mol_type = other RNA
atacactatacaatcctatga

SEQ ID NO: 22065 - RNA, 21 nt, synthetic construct
  source 1..21: mol_type = other RNA
atacaggccaaggccctgtga

SEQ ID NO: 22066 - RNA, 21 nt, synthetic construct
  source 1..21: mol_type = other RNA
ataccaaagccagctaaagtc

SEQ ID NO: 22067 - RNA, 21 nt, synthetic construct
  source 1..21: mol_type = other RNA
ataccagcaccaaactgaact

SEQ ID NO: 22068 - RNA, 21 nt, synthetic construct
  source 1..21: mol_type = other RNA
ataccctctaaaattgttact

SEQ ID NO: 22069 - RNA, 21 nt, synthetic construct
  source 1..21: mol_type = other RNA
atacggaggtgaccctaagta

SEQ ID NO: 22070 - RNA, 21 nt, synthetic construct
  source 1..21: mol_type = other RNA
atactcgagattagattcaga

SEQ ID NO: 22071 - RNA, 21 nt, synthetic construct
  source 1..21: mol_type = other RNA
atagaggctgaggtggaagga

SEQ ID NO: 22072 - RNA, 21 nt, synthetic construct
  source 1..21: mol_type = other RNA
atagcgaggtgttgtggtaca

SEQ ID NO: 22073 - RNA, 21 nt, synthetic construct
  source 1..21: mol_type = other RNA
ataggattgtatagtgtatca

SEQ ID NO: 22074 - RNA, 21 nt, synthetic construct
  source 1..21: mol_type = other RNA
atagtaacttgacagtggaga

SEQ ID NO: 22075 - RNA, 21 nt, synthetic construct
  source 1..21: mol_type = other RNA
atagtagcacctgcctaaggg

SEQ ID NO: 22076 - RNA, 21 nt, synthetic construct
  source 1..21: mol_type = other RNA
atagtcccagttactcggaag

SEQ ID NO: 22077 - RNA, 21 nt, synthetic construct
  source 1..21: mol_type = other RNA
atagtgagcaagcaatttgct

SEQ ID NO: 22078 - RNA, 21 nt, synthetic construct
  source 1..21: mol_type = other RNA
atataccagcaccaaactgaa

SEQ ID NO: 22079 - RNA, 21 nt, synthetic construct
  source 1..21: mol_type = other RNA
atatagtgagcaagcaatttg

SEQ ID NO: 22080 - RNA, 21 nt, synthetic construct
  source 1..21: mol_type = other RNA
atatcttatgtttatcacccg

SEQ ID NO: 22081 - RNA, 21 nt, synthetic construct
  source 1..21: mol_type = other RNA
atatgtcaatgtcacaagaga

SEQ ID NO: 22082 - RNA, 21 nt, synthetic construct
  source 1..21: mol_type = other RNA
atatgtccaactgcaaagcat

SEQ ID NO: 22083 - RNA, 21 nt, synthetic construct
  source 1..21: mol_type = other RNA
atatgtgattccttgttactt

SEQ ID NO: 22084 - RNA, 21 nt, synthetic construct
  source 1..21: mol_type = other RNA
atattaagcagagtacaaggc

SEQ ID NO: 22085 - RNA, 21 nt, synthetic construct
  source 1..21: mol_type = other RNA
atattcctgccaagaatgcct

SEQ ID NO: 22086 - RNA, 21 nt, synthetic construct
  source 1..21: mol_type = other RNA
atattgcagaagtgagtgtgt

SEQ ID NO: 22087 - RNA, 21 nt, synthetic construct
  source 1..21: mol_type = other RNA
atattttggtttaaatcccag

SEQ ID NO: 22088 - RNA, 21 nt, synthetic construct
  source 1..21: mol_type = other RNA
atcaaagttaacatcgccaga

SEQ ID NO: 22089 - RNA, 21 nt, synthetic construct
  source 1..21: mol_type = other RNA
atcacatatagtgagcaagca

SEQ ID NO: 22090 - RNA, 21 nt, synthetic construct
  source 1..21: mol_type = other RNA
atcacccgacagttgttaatc

SEQ ID NO: 22091 - RNA, 21 nt, synthetic construct
  source 1..21: mol_type = other RNA
atcacttgagtttgaaaccag

SEQ ID NO: 22092 - RNA, 21 nt, synthetic construct
  source 1..21: mol_type = other RNA
atcagacaaacccaaattgag

SEQ ID NO: 22093 - RNA, 21 nt, synthetic construct
  source 1..21: mol_type = other RNA
atcagctcttcagtctgtctt

SEQ ID NO: 22094 - RNA, 21 nt, synthetic construct
  source 1..21: mol_type = other RNA
atcagcttttgcattaatctc

SEQ ID NO: 22095 - RNA, 21 nt, synthetic construct
  source 1..21: mol_type = other RNA
atcagttggtgaaggtggtgt

SEQ ID NO: 22096 - RNA, 21 nt, synthetic construct
  source 1..21: mol_type = other RNA
atcataaggattgaccaaaaa

SEQ ID NO: 22097 - RNA, 21 nt, synthetic construct
  source 1..21: mol_type = other RNA
atcatcatcgcttggcatgga

SEQ ID NO: 22098 - RNA, 21 nt, synthetic construct
  source 1..21: mol_type = other RNA
atcatcgcttggcatggataa

SEQ ID NO: 22099 - RNA, 21 nt, synthetic construct
  source 1..21: mol_type = other RNA
atccagactgaagaaggctcg

SEQ ID NO: 22100 - RNA, 21 nt, synthetic construct
  source 1..21: mol_type = other RNA
atccatgccaagcgatgatga

SEQ ID NO: 22101 - RNA, 21 nt, synthetic construct
  source 1..21: mol_type = other RNA
atcccagatcagcttttgcat

SEQ ID NO: 22102 - RNA, 21 nt, synthetic construct
  source 1..21: mol_type = other RNA
atcccagctccaccaacacct

SEQ ID NO: 22103 - RNA, 21 nt, synthetic construct
  source 1..21: mol_type = other RNA
atccctgttttacagagaagg

SEQ ID NO: 22104 - RNA, 21 nt, synthetic construct
  source 1..21: mol_type = other RNA
atcctatgaccaatctcatct

SEQ ID NO: 22105 - RNA, 21 nt, synthetic construct
  source 1..21: mol_type = other RNA
atcctcctgcctgagccttcc

SEQ ID NO: 22106 - RNA, 21 nt, synthetic construct
  source 1..21: mol_type = other RNA
atccttatgattatttagagg

SEQ ID NO: 22107 - RNA, 21 nt, synthetic construct
  source 1..21: mol_type = other RNA
atccttccacctcagcctcta

SEQ ID NO: 22108 - RNA, 21 nt, synthetic construct
  source 1..21: mol_type = other RNA
atcgagaggcacatgccatct

SEQ ID NO: 22109 - RNA, 21 nt, synthetic construct
  source 1..21: mol_type = other RNA
atcgccagaaaggggacagat

SEQ ID NO: 22110 - RNA, 21 nt, synthetic construct
  source 1..21: mol_type = other RNA
atcgcttggcatggataaaaa

SEQ ID NO: 22111 - RNA, 21 nt, synthetic construct
  source 1..21: mol_type = other RNA
atctaatctcgagtataacca

SEQ ID NO: 22112 - RNA, 21 nt, synthetic construct
  source 1..21: mol_type = other RNA
atctcatctacaactttattc

SEQ ID NO: 22113 - RNA, 21 nt, synthetic construct
  source 1..21: mol_type = other RNA
atctcctaagcctcggtttcc

SEQ ID NO: 22114 - RNA, 21 nt, synthetic construct
  source 1..21: mol_type = other RNA
atctcgagccttcttcagtct

SEQ ID NO: 22115 - RNA, 21 nt, synthetic construct
  source 1..21: mol_type = other RNA
atctcgagtataaccatcaga

SEQ ID NO: 22116 - RNA, 21 nt, synthetic construct
  source 1..21: mol_type = other RNA
atctgaatctaatctcgagta

SEQ ID NO: 22117 - RNA, 21 nt, synthetic construct
  source 1..21: mol_type = other RNA
atctgggattgcatcttggac

SEQ ID NO: 22118 - RNA, 21 nt, synthetic construct
  source 1..21: mol_type = other RNA
atctgtcccctttctggcgat

SEQ ID NO: 22119 - RNA, 21 nt, synthetic construct
  source 1..21: mol_type = other RNA
atcttatcgagaggcacatgc

SEQ ID NO: 22120 - RNA, 21 nt, synthetic construct
  source 1..21: mol_type = other RNA
atcttatgtttatcacccgac

SEQ ID NO: 22121 - RNA, 21 nt, synthetic construct
  source 1..21: mol_type = other RNA
atcttggacctcaactctccc

SEQ ID NO: 22122 - RNA, 21 nt, synthetic construct
  source 1..21: mol_type = other RNA
atgaaatgcactagttttagt

SEQ ID NO: 22123 - RNA, 21 nt, synthetic construct
  source 1..21: mol_type = other RNA
atgaacccattttcaaatgct

SEQ ID NO: 22124 - RNA, 21 nt, synthetic construct
  source 1..21: mol_type = other RNA
atgaagcactaaaactagtgc

SEQ ID NO: 22125 - RNA, 21 nt, synthetic construct
  source 1..21: mol_type = other RNA
atgaagtctgaggtgttggtg

SEQ ID NO: 22126 - RNA, 21 nt, synthetic construct
  source 1..21: mol_type = other RNA
atgaccaatctcatctacaac

SEQ ID NO: 22127 - RNA, 21 nt, synthetic construct
  source 1..21: mol_type = other RNA
atgactttggcagttagtgtt

SEQ ID NO: 22128 - RNA, 21 nt, synthetic construct
  source 1..21: mol_type = other RNA
atgagattggtcataggattg

SEQ ID NO: 22129 - RNA, 21 nt, synthetic construct
  source 1..21: mol_type = other RNA
atgaggcattcttggcaggaa

SEQ ID NO: 22130 - RNA, 21 nt, synthetic construct
  source 1..21: mol_type = other RNA
atgatgattttctctttagtg

SEQ ID NO: 22131 - RNA, 21 nt, synthetic construct
  source 1..21: mol_type = other RNA
atgattatttagaggagaaag

SEQ ID NO: 22132 - RNA, 21 nt, synthetic construct
  source 1..21: mol_type = other RNA
atgattttctctttagtgaca

SEQ ID NO: 22133 - RNA, 21 nt, synthetic construct
  source 1..21: mol_type = other RNA
atgcaaaagctgatctgggat

SEQ ID NO: 22134 - RNA, 21 nt, synthetic construct
  source 1..21: mol_type = other RNA
atgcaaatttgtccttgttct

SEQ ID NO: 22135 - RNA, 21 nt, synthetic construct
  source 1..21: mol_type = other RNA
atgcaatcccagatcagcttt

SEQ ID NO: 22136 - RNA, 21 nt, synthetic construct
  source 1..21: mol_type = other RNA
atgcacctttactcctaaata

SEQ ID NO: 22137 - RNA, 21 nt, synthetic construct
  source 1..21: mol_type = other RNA
atgcactagttttagtgcttc

SEQ ID NO: 22138 - RNA, 21 nt, synthetic construct
  source 1..21: mol_type = other RNA
atgcactgaagacacacactc

SEQ ID NO: 22139 - RNA, 21 nt, synthetic construct
  source 1..21: mol_type = other RNA
atgccaagcgatgatgatttt

SEQ ID NO: 22140 - RNA, 21 nt, synthetic construct
  source 1..21: mol_type = other RNA
atgccatctgtcccctttctg

SEQ ID NO: 22141 - RNA, 21 nt, synthetic construct
  source 1..21: mol_type = other RNA
atgcctcatctgaatctaatc

SEQ ID NO: 22142 - RNA, 21 nt, synthetic construct
  source 1..21: mol_type = other RNA
atgctttgcagttggacatat

SEQ ID NO: 22143 - RNA, 21 nt, synthetic construct
  source 1..21: mol_type = other RNA
atggataaaaacactaactgc

SEQ ID NO: 22144 - RNA, 21 nt, synthetic construct
  source 1..21: mol_type = other RNA
atggcatgtgcctctcgataa

SEQ ID NO: 22145 - RNA, 21 nt, synthetic construct
  source 1..21: mol_type = other RNA
atgggcgtgtaccacaacacc

SEQ ID NO: 22146 - RNA, 21 nt, synthetic construct
  source 1..21: mol_type = other RNA
atgggttcattatgcaccttt

SEQ ID NO: 22147 - RNA, 21 nt, synthetic construct
  source 1..21: mol_type = other RNA
atggttatactcgagattaga

SEQ ID NO: 22148 - RNA, 21 nt, synthetic construct
  source 1..21: mol_type = other RNA
atgtcaatgtcacaagagaga

SEQ ID NO: 22149 - RNA, 21 nt, synthetic construct
  source 1..21: mol_type = other RNA
atgtcacaagagagaaagaca

SEQ ID NO: 22150 - RNA, 21 nt, synthetic construct
  source 1..21: mol_type = other RNA
atgtccaactgcaaagcatgt

SEQ ID NO: 22151 - RNA, 21 nt, synthetic construct
  source 1..21: mol_type = other RNA
atgtctgtcactaaagagaaa

SEQ ID NO: 22152 - RNA, 21 nt, synthetic construct
  source 1..21: mol_type = other RNA
atgtgattccttgttacttag

SEQ ID NO: 22153 - RNA, 21 nt, synthetic construct
  source 1..21: mol_type = other RNA
atgtgcctctcgataagatgc

SEQ ID NO: 22154 - RNA, 21 nt, synthetic construct
  source 1..21: mol_type = other RNA
atgttaactttgatcagttgg

SEQ ID NO: 22155 - RNA, 21 nt, synthetic construct
  source 1..21: mol_type = other RNA
atgtttatcacccgacagttg

SEQ ID NO: 22156 - RNA, 21 nt, synthetic construct
  source 1..21: mol_type = other RNA
attaacaactgtcgggtgata

SEQ ID NO: 22157 - RNA, 21 nt, synthetic construct
  source 1..21: mol_type = other RNA
attaacttttggccaaatacc

SEQ ID NO: 22158 - RNA, 21 nt, synthetic construct
  source 1..21: mol_type = other RNA
attaagcagagtacaaggctg

SEQ ID NO: 22159 - RNA, 21 nt, synthetic construct
  source 1..21: mol_type = other RNA
attaatctcgagccttcttca

SEQ ID NO: 22160 - RNA, 21 nt, synthetic construct
  source 1..21: mol_type = other RNA
attaatgcaaaagctgatctg

SEQ ID NO: 22161 - RNA, 21 nt, synthetic construct
  source 1..21: mol_type = other RNA
attagattcagatgaggcatt

SEQ ID NO: 22162 - RNA, 21 nt, synthetic construct
  source 1..21: mol_type = other RNA
attagatttgctgattttgac

SEQ ID NO: 22163 - RNA, 21 nt, synthetic construct
  source 1..21: mol_type = other RNA
attatccctgttttacagaga

SEQ ID NO: 22164 - RNA, 21 nt, synthetic construct
  source 1..21: mol_type = other RNA
attatgcacctttactcctaa

SEQ ID NO: 22165 - RNA, 21 nt, synthetic construct
  source 1..21: mol_type = other RNA
attatttagaggagaaagttc

SEQ ID NO: 22166 - RNA, 21 nt, synthetic construct
  source 1..21: mol_type = other RNA
attatttaggagtaaaggtgc

SEQ ID NO: 22167 - RNA, 21 nt, synthetic construct
  source 1..21: mol_type = other RNA
attcaaattttatagaggctg

SEQ ID NO: 22168 - RNA, 21 nt, synthetic construct
  source 1..21: mol_type = other RNA
attcagatgaggcattcttgg

SEQ ID NO: 22169 - RNA, 21 nt, synthetic construct
  source 1..21: mol_type = other RNA
attccctttataatttgcagt

SEQ ID NO: 22170 - RNA, 21 nt, synthetic construct
  source 1..21: mol_type = other RNA
attcctgccaagaatgcctca

SEQ ID NO: 22171 - RNA, 21 nt, synthetic construct
  source 1..21: mol_type = other RNA
attccttgttacttagggtca

SEQ ID NO: 22172 - RNA, 21 nt, synthetic construct
  source 1..21: mol_type = other RNA
attcttggcaggaatattgca

SEQ ID NO: 22173 - RNA, 21 nt, synthetic construct
  source 1..21: mol_type = other RNA
attgacatattaagcagagta

SEQ ID NO: 22174 - RNA, 21 nt, synthetic construct
  source 1..21: mol_type = other RNA
attgaccaaaaactgaaaagc

SEQ ID NO: 22175 - RNA, 21 nt, synthetic construct
  source 1..21: mol_type = other RNA
attgagagacagtttacaaaa

SEQ ID NO: 22176 - RNA, 21 nt, synthetic construct
  source 1..21: mol_type = other RNA
attgatacactatacaatcct

SEQ ID NO: 22177 - RNA, 21 nt, synthetic construct
  source 1..21: mol_type = other RNA
attgcagaagtgagtgtgtgt

SEQ ID NO: 22178 - RNA, 21 nt, synthetic construct
  source 1..21: mol_type = other RNA
attgcatcttggacctcaact

SEQ ID NO: 22179 - RNA, 21 nt, synthetic construct
  source 1..21: mol_type = other RNA
attgcttgctcactatatgtg

SEQ ID NO: 22180 - RNA, 21 nt, synthetic construct
  source 1..21: mol_type = other RNA
attggtcataggattgtatag

SEQ ID NO: 22181 - RNA, 21 nt, synthetic construct
  source 1..21: mol_type = other RNA
attgtcccagtagtgtccctt

SEQ ID NO: 22182 - RNA, 21 nt, synthetic construct
  source 1..21: mol_type = other RNA
attgttaagggacactactgg

SEQ ID NO: 22183 - RNA, 21 nt, synthetic construct
  source 1..21: mol_type = other RNA
attgttacttacatgctttgc

SEQ ID NO: 22184 - RNA, 21 nt, synthetic construct
  source 1..21: mol_type = other RNA
atttagaggagaaagttcagt

SEQ ID NO: 22185 - RNA, 21 nt, synthetic construct
  source 1..21: mol_type = other RNA
atttaggagtaaaggtgcata

SEQ ID NO: 22186 - RNA, 21 nt, synthetic construct
  source 1..21: mol_type = other RNA
atttatttccttagaacaagg

SEQ ID NO: 22187 - RNA, 21 nt, synthetic construct
  source 1..21: mol_type = other RNA
atttccttagaacaaggacaa

SEQ ID NO: 22188 - RNA, 21 nt, synthetic construct
  source 1..21: mol_type = other RNA
atttgcataaccacagtaggg

SEQ ID NO: 22189 - RNA, 21 nt, synthetic construct
  source 1..21: mol_type = other RNA
atttgctgattttgacaaccc

SEQ ID NO: 22190 - RNA, 21 nt, synthetic construct
  source 1..21: mol_type = other RNA
atttgcttttcagtttttggt

SEQ ID NO: 22191 - RNA, 21 nt, synthetic construct
  source 1..21: mol_type = other RNA
atttggccaaaagttaatgac

SEQ ID NO: 22192 - RNA, 21 nt, synthetic construct
  source 1..21: mol_type = other RNA
atttgggtttgtctgatggtt

SEQ ID NO: 22193 - RNA, 21 nt, synthetic construct
  source 1..21: mol_type = other RNA
atttgtccttgttctaaggaa

SEQ ID NO: 22194 - RNA, 21 nt, synthetic construct
  source 1..21: mol_type = other RNA
attttagagggtatacggagg

SEQ ID NO: 22195 - RNA, 21 nt, synthetic construct
  source 1..21: mol_type = other RNA
attttatagaggctgaggtgg

SEQ ID NO: 22196 - RNA, 21 nt, synthetic construct
  source 1..21: mol_type = other RNA
attttctctttagtgacagac

SEQ ID NO: 22197 - RNA, 21 nt, synthetic construct
  source 1..21: mol_type = other RNA
attttgacaaccctactgtgg

SEQ ID NO: 22198 - RNA, 21 nt, synthetic construct
  source 1..21: mol_type = other RNA
attttggtttaaatcccagct

SEQ ID NO: 22199 - RNA, 21 nt, synthetic construct
  source 1..21: mol_type = other RNA
caaaaactgaaaagcaaattg

SEQ ID NO: 22200 - RNA, 21 nt, synthetic construct
  source 1..21: mol_type = other RNA
caaaacaccagccttgtactc

SEQ ID NO: 22201 - RNA, 21 nt, synthetic construct
  source 1..21: mol_type = other RNA
caaaagctgatctgggattgc

SEQ ID NO: 22202 - RNA, 21 nt, synthetic construct
  source 1..21: mol_type = other RNA
caaaagttaatgactttggca

SEQ ID NO: 22203 - RNA, 21 nt, synthetic construct
  source 1..21: mol_type = other RNA
caaaatatgtccaactgcaaa

SEQ ID NO: 22204 - RNA, 21 nt, synthetic construct
  source 1..21: mol_type = other RNA
caaacccaaattgagagacag

SEQ ID NO: 22205 - RNA, 21 nt, synthetic construct
  source 1..21: mol_type = other RNA
caaactgaactttctcctcta

SEQ ID NO: 22206 - RNA, 21 nt, synthetic construct
  source 1..21: mol_type = other RNA
caaagaatacaggccaaggcc

SEQ ID NO: 22207 - RNA, 21 nt, synthetic construct
  source 1..21: mol_type = other RNA
caaagcatgtaagtaacaatt

SEQ ID NO: 22208 - RNA, 21 nt, synthetic construct
  source 1..21: mol_type = other RNA
caaagccagctaaagtcacag

SEQ ID NO: 22209 - RNA, 21 nt, synthetic construct
  source 1..21: mol_type = other RNA
caaagtcattaacttttggcc

SEQ ID NO: 22210 - RNA, 21 nt, synthetic construct
  source 1..21: mol_type = other RNA
caaagttaacatcgccagaaa

SEQ ID NO: 22211 - RNA, 21 nt, synthetic construct
  source 1..21: mol_type = other RNA
caaataccaaagccagctaaa

SEQ ID NO: 22212 - RNA, 21 nt, synthetic construct
  source 1..21: mol_type = other RNA
caaattgagagacagtttaca

SEQ ID NO: 22213 - RNA, 21 nt, synthetic construct
  source 1..21: mol_type = other RNA
caaattgcttgctcactatat

SEQ ID NO: 22214 - RNA, 21 nt, synthetic construct
  source 1..21: mol_type = other RNA
caaatttgcataaccacagta

SEQ ID NO: 22215 - RNA, 21 nt, synthetic construct
  source 1..21: mol_type = other RNA
caaatttgtccttgttctaag

SEQ ID NO: 22216 - RNA, 21 nt, synthetic construct
  source 1..21: mol_type = other RNA
caaattttatagaggctgagg

SEQ ID NO: 22217 - RNA, 21 nt, synthetic construct
  source 1..21: mol_type = other RNA
caacacctcagacttcatctc

SEQ ID NO: 22218 - RNA, 21 nt, synthetic construct
  source 1..21: mol_type = other RNA
caaccctactgtggttatgca

SEQ ID NO: 22219 - RNA, 21 nt, synthetic construct
  source 1..21: mol_type = other RNA
caactctcccctttttattgt

SEQ ID NO: 22220 - RNA, 21 nt, synthetic construct
  source 1..21: mol_type = other RNA
caactgatcaaagttaacatc

SEQ ID NO: 22221 - RNA, 21 nt, synthetic construct
  source 1..21: mol_type = other RNA
caactgcaaagcatgtaagta

SEQ ID NO: 22222 - RNA, 21 nt, synthetic construct
  source 1..21: mol_type = other RNA
caactgtcgggtgataaacat

SEQ ID NO: 22223 - RNA, 21 nt, synthetic construct
  source 1..21: mol_type = other RNA
caagaatgcctcatctgaatc

SEQ ID NO: 22224 - RNA, 21 nt, synthetic construct
  source 1..21: mol_type = other RNA
caagagagaaagacagactga

SEQ ID NO: 22225 - RNA, 21 nt, synthetic construct
  source 1..21: mol_type = other RNA
caagatgcaatcccagatcag

SEQ ID NO: 22226 - RNA, 21 nt, synthetic construct
  source 1..21: mol_type = other RNA
caagcaatttgcttttcagtt

SEQ ID NO: 22227 - RNA, 21 nt, synthetic construct
  source 1..21: mol_type = other RNA
caagcccttaggcaggtgcta

SEQ ID NO: 22228 - RNA, 21 nt, synthetic construct
  source 1..21: mol_type = other RNA
caagcgatgatgattttctct

SEQ ID NO: 22229 - RNA, 21 nt, synthetic construct
  source 1..21: mol_type = other RNA
caaggaatcacatatagtgag

SEQ ID NO: 22230 - RNA, 21 nt, synthetic construct
  source 1..21: mol_type = other RNA
caaggacaaatttgcataacc

SEQ ID NO: 22231 - RNA, 21 nt, synthetic construct
  source 1..21: mol_type = other RNA
caaggccctgtgactttagct

SEQ ID NO: 22232 - RNA, 21 nt, synthetic construct
  source 1..21: mol_type = other RNA
caaggctgcagtgagttatta

SEQ ID NO: 22233 - RNA, 21 nt, synthetic construct
  source 1..21: mol_type = other RNA
caaggctggtgttttgtaaac

SEQ ID NO: 22234 - RNA, 21 nt, synthetic construct
  source 1..21: mol_type = other RNA
caagtgatccttccacctcag

SEQ ID NO: 22235 - RNA, 21 nt, synthetic construct
  source 1..21: mol_type = other RNA
caagttactattattcccttt

SEQ ID NO: 22236 - RNA, 21 nt, synthetic construct
  source 1..21: mol_type = other RNA
caataaaaaggggagagttga

SEQ ID NO: 22237 - RNA, 21 nt, synthetic construct
  source 1..21: mol_type = other RNA
caatattcctgccaagaatgc

SEQ ID NO: 22238 - RNA, 21 nt, synthetic construct
  source 1..21: mol_type = other RNA
caatcccagatcagcttttgc

SEQ ID NO: 22239 - RNA, 21 nt, synthetic construct
  source 1..21: mol_type = other RNA
caatcctatgaccaatctcat

SEQ ID NO: 22240 - RNA, 21 nt, synthetic construct
  source 1..21: mol_type = other RNA
caatcctcctgcctgagcctt

SEQ ID NO: 22241 - RNA, 21 nt, synthetic construct
  source 1..21: mol_type = other RNA
caatctcatctacaactttat

SEQ ID NO: 22242 - RNA, 21 nt, synthetic construct
  source 1..21: mol_type = other RNA
caatgtcacaagagagaaaga

SEQ ID NO: 22243 - RNA, 21 nt, synthetic construct
  source 1..21: mol_type = other RNA
caatttgcttttcagtttttg

SEQ ID NO: 22244 - RNA, 21 nt, synthetic construct
  source 1..21: mol_type = other RNA
caatttgggtttgtctgatgg

SEQ ID NO: 22245 - RNA, 21 nt, synthetic construct
  source 1..21: mol_type = other RNA
caattttagagggtatacgga

SEQ ID NO: 22246 - RNA, 21 nt, synthetic construct
  source 1..21: mol_type = other RNA
cacaacacctcgctatttttt

SEQ ID NO: 22247 - RNA, 21 nt, synthetic construct
  source 1..21: mol_type = other RNA
cacaagagagaaagacagact

SEQ ID NO: 22248 - RNA, 21 nt, synthetic construct
  source 1..21: mol_type = other RNA
cacaagcccttaggcaggtgc

SEQ ID NO: 22249 - RNA, 21 nt, synthetic construct
  source 1..21: mol_type = other RNA
cacacactcacttctgcaata

SEQ ID NO: 22250 - RNA, 21 nt, synthetic construct
  source 1..21: mol_type = other RNA
cacactcacttctgcaatatt

SEQ ID NO: 22251 - RNA, 21 nt, synthetic construct
  source 1..21: mol_type = other RNA
cacagggccttggcctgtatt

SEQ ID NO: 22252 - RNA, 21 nt, synthetic construct
  source 1..21: mol_type = other RNA
cacagtagggttgtcaaaatc

SEQ ID NO: 22253 - RNA, 21 nt, synthetic construct
  source 1..21: mol_type = other RNA
cacatatagtgagcaagcaat

SEQ ID NO: 22254 - RNA, 21 nt, synthetic construct
  source 1..21: mol_type = other RNA
cacatgccatctgtccccttt

SEQ ID NO: 22255 - RNA, 21 nt, synthetic construct
  source 1..21: mol_type = other RNA
caccaaactgaactttctcct

SEQ ID NO: 22256 - RNA, 21 nt, synthetic construct
  source 1..21: mol_type = other RNA
caccaacacctcagacttcat

SEQ ID NO: 22257 - RNA, 21 nt, synthetic construct
  source 1..21: mol_type = other RNA
caccaactgatcaaagttaac

SEQ ID NO: 22258 - RNA, 21 nt, synthetic construct
  source 1..21: mol_type = other RNA
caccaccttcaccaactgatc

SEQ ID NO: 22259 - RNA, 21 nt, synthetic construct
  source 1..21: mol_type = other RNA
caccagccttgtactctgctt

SEQ ID NO: 22260 - RNA, 21 nt, synthetic construct
  source 1..21: mol_type = other RNA
cacccgacagttgttaatctc

SEQ ID NO: 22261 - RNA, 21 nt, synthetic construct
  source 1..21: mol_type = other RNA
cacctcagacttcatctccta

SEQ ID NO: 22262 - RNA, 21 nt, synthetic construct
  source 1..21: mol_type = other RNA
cacctcagcctctataaaatt

SEQ ID NO: 22263 - RNA, 21 nt, synthetic construct
  source 1..21: mol_type = other RNA
cacctccgtataccctctaaa

SEQ ID NO: 22264 - RNA, 21 nt, synthetic construct
  source 1..21: mol_type = other RNA
caccttcaccaactgatcaaa

SEQ ID NO: 22265 - RNA, 21 nt, synthetic construct
  source 1..21: mol_type = other RNA
cacctttactcctaaataatt

SEQ ID NO: 22266 - RNA, 21 nt, synthetic construct
  source 1..21: mol_type = other RNA
cacgcccatagtcccagttac

SEQ ID NO: 22267 - RNA, 21 nt, synthetic construct
  source 1..21: mol_type = other RNA
cactaaaactagtgcatttca

SEQ ID NO: 22268 - RNA, 21 nt, synthetic construct
  source 1..21: mol_type = other RNA
cactaaagagaaaatcatcat

SEQ ID NO: 22269 - RNA, 21 nt, synthetic construct
  source 1..21: mol_type = other RNA
cactaactgccaaagtcatta

SEQ ID NO: 22270 - RNA, 21 nt, synthetic construct
  source 1..21: mol_type = other RNA
cactagttttagtgcttcatc

SEQ ID NO: 22271 - RNA, 21 nt, synthetic construct
  source 1..21: mol_type = other RNA
cactatacaatcctatgacca

SEQ ID NO: 22272 - RNA, 21 nt, synthetic construct
  source 1..21: mol_type = other RNA
cactatatgtgattccttgtt

SEQ ID NO: 22273 - RNA, 21 nt, synthetic construct
  source 1..21: mol_type = other RNA
cactcacttctgcaatattcc

SEQ ID NO: 22274 - RNA, 21 nt, synthetic construct
  source 1..21: mol_type = other RNA
cactgaagacacacactcact

SEQ ID NO: 22275 - RNA, 21 nt, synthetic construct
  source 1..21: mol_type = other RNA
cactgtcaagttactattatt

SEQ ID NO: 22276 - RNA, 21 nt, synthetic construct
  source 1..21: mol_type = other RNA
cacttctgcaatattcctgcc

SEQ ID NO: 22277 - RNA, 21 nt, synthetic construct
  source 1..21: mol_type = other RNA
cacttgagtttgaaaccagcc

SEQ ID NO: 22278 - RNA, 21 nt, synthetic construct
  source 1..21: mol_type = other RNA
cagaaaggggacagatggcat

SEQ ID NO: 22279 - RNA, 21 nt, synthetic construct
  source 1..21: mol_type = other RNA
cagaagtgagtgtgtgtcttc

SEQ ID NO: 22280 - RNA, 21 nt, synthetic construct
  source 1..21: mol_type = other RNA
cagacaaacccaaattgagag

SEQ ID NO: 22281 - RNA, 21 nt, synthetic construct
  source 1..21: mol_type = other RNA
cagacaccaccttcaccaact

SEQ ID NO: 22282 - RNA, 21 nt, synthetic construct
  source 1..21: mol_type = other RNA
cagactgaagaaggctcgaga

SEQ ID NO: 22283 - RNA, 21 nt, synthetic construct
  source 1..21: mol_type = other RNA
cagactgaagagctgatccag

SEQ ID NO: 22284 - RNA, 21 nt, synthetic construct
  source 1..21: mol_type = other RNA
cagacttcatctcctaagcct

SEQ ID NO: 22285 - RNA, 21 nt, synthetic construct
  source 1..21: mol_type = other RNA
cagagaaggaaaccgaggctt

SEQ ID NO: 22286 - RNA, 21 nt, synthetic construct
  source 1..21: mol_type = other RNA
cagagtacaaggctggtgttt

SEQ ID NO: 22287 - RNA, 21 nt, synthetic construct
  source 1..21: mol_type = other RNA
cagatcagcttttgcattaat

SEQ ID NO: 22288 - RNA, 21 nt, synthetic construct
  source 1..21: mol_type = other RNA
cagatgaagcactaaaactag

SEQ ID NO: 22289 - RNA, 21 nt, synthetic construct
  source 1..21: mol_type = other RNA
cagatgaggcattcttggcag

SEQ ID NO: 22290 - RNA, 21 nt, synthetic construct
  source 1..21: mol_type = other RNA
cagatggcatgtgcctctcga

SEQ ID NO: 22291 - RNA, 21 nt, synthetic construct
  source 1..21: mol_type = other RNA
cagcaaatctaatattgatac

SEQ ID NO: 22292 - RNA, 21 nt, synthetic construct
  source 1..21: mol_type = other RNA
cagcaccaaactgaactttct

SEQ ID NO: 22293 - RNA, 21 nt, synthetic construct
  source 1..21: mol_type = other RNA
cagcctctataaaatttgaat

SEQ ID NO: 22294 - RNA, 21 nt, synthetic construct
  source 1..21: mol_type = other RNA
cagccttgtactctgcttaat

SEQ ID NO: 22295 - RNA, 21 nt, synthetic construct
  source 1..21: mol_type = other RNA
cagctaaagtcacagggcctt

SEQ ID NO: 22296 - RNA, 21 nt, synthetic construct
  source 1..21: mol_type = other RNA
cagctccaccaacacctcaga

SEQ ID NO: 22297 - RNA, 21 nt, synthetic construct
  source 1..21: mol_type = other RNA
cagctcttcagtctgtctttc

SEQ ID NO: 22298 - RNA, 21 nt, synthetic construct
  source 1..21: mol_type = other RNA
cagcttttgcattaatctcga

SEQ ID NO: 22299 - RNA, 21 nt, synthetic construct
  source 1..21: mol_type = other RNA
caggaatattgcagaagtgag

SEQ ID NO: 22300 - RNA, 21 nt, synthetic construct
  source 1..21: mol_type = other RNA
caggcaggaggattgcttgag

SEQ ID NO: 22301 - RNA, 21 nt, synthetic construct
  source 1..21: mol_type = other RNA
caggccaaggccctgtgactt

SEQ ID NO: 22302 - RNA, 21 nt, synthetic construct
  source 1..21: mol_type = other RNA
caggctggagtgcagtggtgg

SEQ ID NO: 22303 - RNA, 21 nt, synthetic construct
  source 1..21: mol_type = other RNA
caggctggtttcaaactcaag

SEQ ID NO: 22304 - RNA, 21 nt, synthetic construct
  source 1..21: mol_type = other RNA
cagggataatagtagcacctg

SEQ ID NO: 22305 - RNA, 21 nt, synthetic construct
  source 1..21: mol_type = other RNA
cagggccttggcctgtattct

SEQ ID NO: 22306 - RNA, 21 nt, synthetic construct
  source 1..21: mol_type = other RNA
caggtctctccactgtcaagt

SEQ ID NO: 22307 - RNA, 21 nt, synthetic construct
  source 1..21: mol_type = other RNA
caggtgctactattatccctg

SEQ ID NO: 22308 - RNA, 21 nt, synthetic construct
  source 1..21: mol_type = other RNA
cagtagggttgtcaaaatcag

SEQ ID NO: 22309 - RNA, 21 nt, synthetic construct
  source 1..21: mol_type = other RNA
cagtagtgtcccttaacaata

SEQ ID NO: 22310 - RNA, 21 nt, synthetic construct
  source 1..21: mol_type = other RNA
cagtatttatttccttagaac

SEQ ID NO: 22311 - RNA, 21 nt, synthetic construct
  source 1..21: mol_type = other RNA
cagtctggatcagctcttcag

SEQ ID NO: 22312 - RNA, 21 nt, synthetic construct
  source 1..21: mol_type = other RNA
cagtctgtctttctctcttgt

SEQ ID NO: 22313 - RNA, 21 nt, synthetic construct
  source 1..21: mol_type = other RNA
cagtgagttattattccacca

SEQ ID NO: 22314 - RNA, 21 nt, synthetic construct
  source 1..21: mol_type = other RNA
cagtgcatcttatcgagaggc

SEQ ID NO: 22315 - RNA, 21 nt, synthetic construct
  source 1..21: mol_type = other RNA
cagtggagagacctggcagac

SEQ ID NO: 22316 - RNA, 21 nt, synthetic construct
  source 1..21: mol_type = other RNA
cagtggtggaataataactca

SEQ ID NO: 22317 - RNA, 21 nt, synthetic construct
  source 1..21: mol_type = other RNA
cagttactcggaaggctcagg

SEQ ID NO: 22318 - RNA, 21 nt, synthetic construct
  source 1..21: mol_type = other RNA
cagttagtgtttttatccatg

SEQ ID NO: 22319 - RNA, 21 nt, synthetic construct
  source 1..21: mol_type = other RNA
cagttggacatattttggttt

SEQ ID NO: 22320 - RNA, 21 nt, synthetic construct
  source 1..21: mol_type = other RNA
cagttggtgaaggtggtgtct

SEQ ID NO: 22321 - RNA, 21 nt, synthetic construct
  source 1..21: mol_type = other RNA
cagtttaagatgaaatgcact

SEQ ID NO: 22322 - RNA, 21 nt, synthetic construct
  source 1..21: mol_type = other RNA
cagtttacaaaacaccagcct

SEQ ID NO: 22323 - RNA, 21 nt, synthetic construct
  source 1..21: mol_type = other RNA
cagtttggtgctggtatatct

SEQ ID NO: 22324 - RNA, 21 nt, synthetic construct
  source 1..21: mol_type = other RNA
cagtttttggtcaatccttat

SEQ ID NO: 22325 - RNA, 21 nt, synthetic construct
  source 1..21: mol_type = other RNA
cataaccacagtagggttgtc

SEQ ID NO: 22326 - RNA, 21 nt, synthetic construct
  source 1..21: mol_type = other RNA
cataagatataccagcaccaa

SEQ ID NO: 22327 - RNA, 21 nt, synthetic construct
  source 1..21: mol_type = other RNA
cataagcatttgaaaatgggt

SEQ ID NO: 22328 - RNA, 21 nt, synthetic construct
  source 1..21: mol_type = other RNA
cataaggattgaccaaaaact

SEQ ID NO: 22329 - RNA, 21 nt, synthetic construct
  source 1..21: mol_type = other RNA
cataatgaacccattttcaaa

SEQ ID NO: 22330 - RNA, 21 nt, synthetic construct
  source 1..21: mol_type = other RNA
cataggattgtatagtgtatc

SEQ ID NO: 22331 - RNA, 21 nt, synthetic construct
  source 1..21: mol_type = other RNA
catagtcccagttactcggaa

SEQ ID NO: 22332 - RNA, 21 nt, synthetic construct
  source 1..21: mol_type = other RNA
catatagtgagcaagcaattt

SEQ ID NO: 22333 - RNA, 21 nt, synthetic construct
  source 1..21: mol_type = other RNA
catattaagcagagtacaagg

SEQ ID NO: 22334 - RNA, 21 nt, synthetic construct
  source 1..21: mol_type = other RNA
catattttggtttaaatccca

SEQ ID NO: 22335 - RNA, 21 nt, synthetic construct
  source 1..21: mol_type = other RNA
catcagacaaacccaaattga

SEQ ID NO: 22336 - RNA, 21 nt, synthetic construct
  source 1..21: mol_type = other RNA
catcatcgcttggcatggata

SEQ ID NO: 22337 - RNA, 21 nt, synthetic construct
  source 1..21: mol_type = other RNA
catcgccagaaaggggacaga

SEQ ID NO: 22338 - RNA, 21 nt, synthetic construct
  source 1..21: mol_type = other RNA
catcgcttggcatggataaaa

SEQ ID NO: 22339 - RNA, 21 nt, synthetic construct
  source 1..21: mol_type = other RNA
catctcctaagcctcggtttc

SEQ ID NO: 22340 - RNA, 21 nt, synthetic construct
  source 1..21: mol_type = other RNA
catctgaatctaatctcgagt

SEQ ID NO: 22341 - RNA, 21 nt, synthetic construct
  source 1..21: mol_type = other RNA
catctgtcccctttctggcga

SEQ ID NO: 22342 - RNA, 21 nt, synthetic construct
  source 1..21: mol_type = other RNA
catcttatcgagaggcacatg

SEQ ID NO: 22343 - RNA, 21 nt, synthetic construct
  source 1..21: mol_type = other RNA
catcttggacctcaactctcc

SEQ ID NO: 22344 - RNA, 21 nt, synthetic construct
  source 1..21: mol_type = other RNA
catgccaagcgatgatgattt

SEQ ID NO: 22345 - RNA, 21 nt, synthetic construct
  source 1..21: mol_type = other RNA
catgccatctgtcccctttct

SEQ ID NO: 22346 - RNA, 21 nt, synthetic construct
  source 1..21: mol_type = other RNA
catgctttgcagttggacata

SEQ ID NO: 22347 - RNA, 21 nt, synthetic construct
  source 1..21: mol_type = other RNA
catggataaaaacactaactg

SEQ ID NO: 22348 - RNA, 21 nt, synthetic construct
  source 1..21: mol_type = other RNA
catgtgcctctcgataagatg

SEQ ID NO: 22349 - RNA, 21 nt, synthetic construct
  source 1..21: mol_type = other RNA
cattaacttttggccaaatac

SEQ ID NO: 22350 - RNA, 21 nt, synthetic construct
  source 1..21: mol_type = other RNA
cattaatctcgagccttcttc

SEQ ID NO: 22351 - RNA, 21 nt, synthetic construct
  source 1..21: mol_type = other RNA
cattatgcacctttactccta

SEQ ID NO: 22352 - RNA, 21 nt, synthetic construct
  source 1..21: mol_type = other RNA
cattcttggcaggaatattgc

SEQ ID NO: 22353 - RNA, 21 nt, synthetic construct
  source 1..21: mol_type = other RNA
cattgacatattaagcagagt

SEQ ID NO: 22354 - RNA, 21 nt, synthetic construct
  source 1..21: mol_type = other RNA
catttcatcttaaactgcaaa

SEQ ID NO: 22355 - RNA, 21 nt, synthetic construct
  source 1..21: mol_type = other RNA
catttgaaaatgggttcatta

SEQ ID NO: 22356 - RNA, 21 nt, synthetic construct
  source 1..21: mol_type = other RNA
ccaaaaactgaaaagcaaatt

SEQ ID NO: 22357 - RNA, 21 nt, synthetic construct
  source 1..21: mol_type = other RNA
ccaaaagttaatgactttggc

SEQ ID NO: 22358 - RNA, 21 nt, synthetic construct
  source 1..21: mol_type = other RNA
ccaaaatatgtccaactgcaa

SEQ ID NO: 22359 - RNA, 21 nt, synthetic construct
  source 1..21: mol_type = other RNA
ccaaactgaactttctcctct

SEQ ID NO: 22360 - RNA, 21 nt, synthetic construct
  source 1..21: mol_type = other RNA
ccaaagccagctaaagtcaca

SEQ ID NO: 22361 - RNA, 21 nt, synthetic construct
  source 1..21: mol_type = other RNA
ccaaagtcattaacttttggc

SEQ ID NO: 22362 - RNA, 21 nt, synthetic construct
  source 1..21: mol_type = other RNA
ccaaataccaaagccagctaa

SEQ ID NO: 22363 - RNA, 21 nt, synthetic construct
  source 1..21: mol_type = other RNA
ccaaattgagagacagtttac

SEQ ID NO: 22364 - RNA, 21 nt, synthetic construct
  source 1..21: mol_type = other RNA
ccaacacctcagacttcatct

SEQ ID NO: 22365 - RNA, 21 nt, synthetic construct
  source 1..21: mol_type = other RNA
ccaactgatcaaagttaacat

SEQ ID NO: 22366 - RNA, 21 nt, synthetic construct
  source 1..21: mol_type = other RNA
ccaactgcaaagcatgtaagt

SEQ ID NO: 22367 - RNA, 21 nt, synthetic construct
  source 1..21: mol_type = other RNA
ccaagaatgcctcatctgaat

SEQ ID NO: 22368 - RNA, 21 nt, synthetic construct
  source 1..21: mol_type = other RNA
ccaagatgcaatcccagatca

SEQ ID NO: 22369 - RNA, 21 nt, synthetic construct
  source 1..21: mol_type = other RNA
ccaagcgatgatgattttctc

SEQ ID NO: 22370 - RNA, 21 nt, synthetic construct
  source 1..21: mol_type = other RNA
ccaaggccctgtgactttagc

SEQ ID NO: 22371 - RNA, 21 nt, synthetic construct
  source 1..21: mol_type = other RNA
ccaatctcatctacaacttta

SEQ ID NO: 22372 - RNA, 21 nt, synthetic construct
  source 1..21: mol_type = other RNA
ccacaacacctcgctattttt

SEQ ID NO: 22373 - RNA, 21 nt, synthetic construct
  source 1..21: mol_type = other RNA
ccacagtagggttgtcaaaat

SEQ ID NO: 22374 - RNA, 21 nt, synthetic construct
  source 1..21: mol_type = other RNA
ccaccaacacctcagacttca

SEQ ID NO: 22375 - RNA, 21 nt, synthetic construct
  source 1..21: mol_type = other RNA
ccacctcagcctctataaaat

SEQ ID NO: 22376 - RNA, 21 nt, synthetic construct
  source 1..21: mol_type = other RNA
ccaccttcaccaactgatcaa

SEQ ID NO: 22377 - RNA, 21 nt, synthetic construct
  source 1..21: mol_type = other RNA
ccactgtcaagttactattat

SEQ ID NO: 22378 - RNA, 21 nt, synthetic construct
  source 1..21: mol_type = other RNA
ccagaaaggggacagatggca

SEQ ID NO: 22379 - RNA, 21 nt, synthetic construct
  source 1..21: mol_type = other RNA
ccagactgaagaaggctcgag

SEQ ID NO: 22380 - RNA, 21 nt, synthetic construct
  source 1..21: mol_type = other RNA
ccagatcagcttttgcattaa

SEQ ID NO: 22381 - RNA, 21 nt, synthetic construct
  source 1..21: mol_type = other RNA
ccagcaccaaactgaactttc

SEQ ID NO: 22382 - RNA, 21 nt, synthetic construct
  source 1..21: mol_type = other RNA
ccagccttgtactctgcttaa

SEQ ID NO: 22383 - RNA, 21 nt, synthetic construct
  source 1..21: mol_type = other RNA
ccagctaaagtcacagggcct

SEQ ID NO: 22384 - RNA, 21 nt, synthetic construct
  source 1..21: mol_type = other RNA
ccagctccaccaacacctcag

SEQ ID NO: 22385 - RNA, 21 nt, synthetic construct
  source 1..21: mol_type = other RNA
ccaggctggagtgcagtggtg

SEQ ID NO: 22386 - RNA, 21 nt, synthetic construct
  source 1..21: mol_type = other RNA
ccaggctggtttcaaactcaa

SEQ ID NO: 22387 - RNA, 21 nt, synthetic construct
  source 1..21: mol_type = other RNA
ccaggtctctccactgtcaag

SEQ ID NO: 22388 - RNA, 21 nt, synthetic construct
  source 1..21: mol_type = other RNA
ccagtagtgtcccttaacaat

SEQ ID NO: 22389 - RNA, 21 nt, synthetic construct
  source 1..21: mol_type = other RNA
ccagttactcggaaggctcag

SEQ ID NO: 22390 - RNA, 21 nt, synthetic construct
  source 1..21: mol_type = other RNA
ccatagtcccagttactcgga

SEQ ID NO: 22391 - RNA, 21 nt, synthetic construct
  source 1..21: mol_type = other RNA
ccatcagacaaacccaaattg

SEQ ID NO: 22392 - RNA, 21 nt, synthetic construct
  source 1..21: mol_type = other RNA
ccatctgtcccctttctggcg

SEQ ID NO: 22393 - RNA, 21 nt, synthetic construct
  source 1..21: mol_type = other RNA
ccatgccaagcgatgatgatt

SEQ ID NO: 22394 - RNA, 21 nt, synthetic construct
  source 1..21: mol_type = other RNA
ccattttcaaatgcttatgaa

SEQ ID NO: 22395 - RNA, 21 nt, synthetic construct
  source 1..21: mol_type = other RNA
cccaaattgagagacagttta

SEQ ID NO: 22396 - RNA, 21 nt, synthetic construct
  source 1..21: mol_type = other RNA
cccagatcagcttttgcatta

SEQ ID NO: 22397 - RNA, 21 nt, synthetic construct
  source 1..21: mol_type = other RNA
cccagctccaccaacacctca

SEQ ID NO: 22398 - RNA, 21 nt, synthetic construct
  source 1..21: mol_type = other RNA
cccaggctggtttcaaactca

SEQ ID NO: 22399 - RNA, 21 nt, synthetic construct
  source 1..21: mol_type = other RNA
cccagtagtgtcccttaacaa

SEQ ID NO: 22400 - RNA, 21 nt, synthetic construct
  source 1..21: mol_type = other RNA
cccagttactcggaaggctca

SEQ ID NO: 22401 - RNA, 21 nt, synthetic construct
  source 1..21: mol_type = other RNA
cccatagtcccagttactcgg

SEQ ID NO: 22402 - RNA, 21 nt, synthetic construct
  source 1..21: mol_type = other RNA
cccattttcaaatgcttatga

SEQ ID NO: 22403 - RNA, 21 nt, synthetic construct
  source 1..21: mol_type = other RNA
cccctttctggcgatgttaac

SEQ ID NO: 22404 - RNA, 21 nt, synthetic construct
  source 1..21: mol_type = other RNA
cccctttttattgttaaggga

SEQ ID NO: 22405 - RNA, 21 nt, synthetic construct
  source 1..21: mol_type = other RNA
cccgacagttgttaatctctt

SEQ ID NO: 22406 - RNA, 21 nt, synthetic construct
  source 1..21: mol_type = other RNA
cccggactcaagcaatcctcc

SEQ ID NO: 22407 - RNA, 21 nt, synthetic construct
  source 1..21: mol_type = other RNA
cccgtctctacaaaaagtagg

SEQ ID NO: 22408 - RNA, 21 nt, synthetic construct
  source 1..21: mol_type = other RNA
ccctaagtaacaaggaatcac

SEQ ID NO: 22409 - RNA, 21 nt, synthetic construct
  source 1..21: mol_type = other RNA
ccctactgtggttatgcaaat

SEQ ID NO: 22410 - RNA, 21 nt, synthetic construct
  source 1..21: mol_type = other RNA
ccctctaaaattgttacttac

SEQ ID NO: 22411 - RNA, 21 nt, synthetic construct
  source 1..21: mol_type = other RNA
ccctgtctcaaaacgaaaaaa

SEQ ID NO: 22412 - RNA, 21 nt, synthetic construct
  source 1..21: mol_type = other RNA
ccctgtgactttagctggctt

SEQ ID NO: 22413 - RNA, 21 nt, synthetic construct
  source 1..21: mol_type = other RNA
ccctgttttacagagaaggaa

SEQ ID NO: 22414 - RNA, 21 nt, synthetic construct
  source 1..21: mol_type = other RNA
cccttaacaataaaaagggga

SEQ ID NO: 22415 - RNA, 21 nt, synthetic construct
  source 1..21: mol_type = other RNA
cccttaggcaggtgctactat

SEQ ID NO: 22416 - RNA, 21 nt, synthetic construct
  source 1..21: mol_type = other RNA
ccctttataatttgcagttta

SEQ ID NO: 22417 - RNA, 21 nt, synthetic construct
  source 1..21: mol_type = other RNA
ccctttctggcgatgttaact

SEQ ID NO: 22418 - RNA, 21 nt, synthetic construct
  source 1..21: mol_type = other RNA
ccctttttattgttaagggac

SEQ ID NO: 22419 - RNA, 21 nt, synthetic construct
  source 1..21: mol_type = other RNA
ccgacagttgttaatctcttt

SEQ ID NO: 22420 - RNA, 21 nt, synthetic construct
  source 1..21: mol_type = other RNA
ccgaggcttaggagatgaagt

SEQ ID NO: 22421 - RNA, 21 nt, synthetic construct
  source 1..21: mol_type = other RNA
ccgagtaactgggactatggg

SEQ ID NO: 22422 - RNA, 21 nt, synthetic construct
  source 1..21: mol_type = other RNA
ccggactcaagcaatcctcct

SEQ ID NO: 22423 - RNA, 21 nt, synthetic construct
  source 1..21: mol_type = other RNA
ccgggagttcaaggctgcagt

SEQ ID NO: 22424 - RNA, 21 nt, synthetic construct
  source 1..21: mol_type = other RNA
ccgtataccctctaaaattgt

SEQ ID NO: 22425 - RNA, 21 nt, synthetic construct
  source 1..21: mol_type = other RNA
ccgtctctacaaaaagtagga

SEQ ID NO: 22426 - RNA, 21 nt, synthetic construct
  source 1..21: mol_type = other RNA
cctaagcctcggtttccttct

SEQ ID NO: 22427 - RNA, 21 nt, synthetic construct
  source 1..21: mol_type = other RNA
cctaagtaacaaggaatcaca

SEQ ID NO: 22428 - RNA, 21 nt, synthetic construct
  source 1..21: mol_type = other RNA
cctactgtggttatgcaaatt

SEQ ID NO: 22429 - RNA, 21 nt, synthetic construct
  source 1..21: mol_type = other RNA
cctactttttgtagagacggg

SEQ ID NO: 22430 - RNA, 21 nt, synthetic construct
  source 1..21: mol_type = other RNA
cctatgaccaatctcatctac

SEQ ID NO: 22431 - RNA, 21 nt, synthetic construct
  source 1..21: mol_type = other RNA
cctcaactctcccctttttat

SEQ ID NO: 22432 - RNA, 21 nt, synthetic construct
  source 1..21: mol_type = other RNA
cctcagacttcatctcctaag

SEQ ID NO: 22433 - RNA, 21 nt, synthetic construct
  source 1..21: mol_type = other RNA
cctcagcctctataaaatttg

SEQ ID NO: 22434 - RNA, 21 nt, synthetic construct
  source 1..21: mol_type = other RNA
cctcatctgaatctaatctcg

SEQ ID NO: 22435 - RNA, 21 nt, synthetic construct
  source 1..21: mol_type = other RNA
cctccgtataccctctaaaat

SEQ ID NO: 22436 - RNA, 21 nt, synthetic construct
  source 1..21: mol_type = other RNA
cctcctgcctgagccttccga

SEQ ID NO: 22437 - RNA, 21 nt, synthetic construct
  source 1..21: mol_type = other RNA
cctcggtttccttctctgtaa

SEQ ID NO: 22438 - RNA, 21 nt, synthetic construct
  source 1..21: mol_type = other RNA
cctctaaaattgttacttaca

SEQ ID NO: 22439 - RNA, 21 nt, synthetic construct
  source 1..21: mol_type = other RNA
cctctaaataatcataaggat

SEQ ID NO: 22440 - RNA, 21 nt, synthetic construct
  source 1..21: mol_type = other RNA
cctctcgataagatgcactga

SEQ ID NO: 22441 - RNA, 21 nt, synthetic construct
  source 1..21: mol_type = other RNA
cctgagccttccgagtaactg

SEQ ID NO: 22442 - RNA, 21 nt, synthetic construct
  source 1..21: mol_type = other RNA
cctgccaagaatgcctcatct

SEQ ID NO: 22443 - RNA, 21 nt, synthetic construct
  source 1..21: mol_type = other RNA
cctgcctgagccttccgagta

SEQ ID NO: 22444 - RNA, 21 nt, synthetic construct
  source 1..21: mol_type = other RNA
cctggcagacaccaccttcac

SEQ ID NO: 22445 - RNA, 21 nt, synthetic construct
  source 1..21: mol_type = other RNA
cctgtattctttgttaaaaag

SEQ ID NO: 22446 - RNA, 21 nt, synthetic construct
  source 1..21: mol_type = other RNA
cctgtgactttagctggcttt

SEQ ID NO: 22447 - RNA, 21 nt, synthetic construct
  source 1..21: mol_type = other RNA
cctgttttacagagaaggaaa

SEQ ID NO: 22448 - RNA, 21 nt, synthetic construct
  source 1..21: mol_type = other RNA
ccttaacaataaaaaggggag

SEQ ID NO: 22449 - RNA, 21 nt, synthetic construct
  source 1..21: mol_type = other RNA
ccttagaacaaggacaaattt

SEQ ID NO: 22450 - RNA, 21 nt, synthetic construct
  source 1..21: mol_type = other RNA
ccttaggcaggtgctactatt

SEQ ID NO: 22451 - RNA, 21 nt, synthetic construct
  source 1..21: mol_type = other RNA
ccttatgattatttagaggag

SEQ ID NO: 22452 - RNA, 21 nt, synthetic construct
  source 1..21: mol_type = other RNA
ccttcaccaactgatcaaagt

SEQ ID NO: 22453 - RNA, 21 nt, synthetic construct
  source 1..21: mol_type = other RNA
ccttccacctcagcctctata

SEQ ID NO: 22454 - RNA, 21 nt, synthetic construct
  source 1..21: mol_type = other RNA
ccttccgagtaactgggacta

SEQ ID NO: 22455 - RNA, 21 nt, synthetic construct
  source 1..21: mol_type = other RNA
ccttctctgtaaaacagggat

SEQ ID NO: 22456 - RNA, 21 nt, synthetic construct
  source 1..21: mol_type = other RNA
ccttcttcagtctggatcagc

SEQ ID NO: 22457 - RNA, 21 nt, synthetic construct
  source 1..21: mol_type = other RNA
ccttggcctgtattctttgtt

SEQ ID NO: 22458 - RNA, 21 nt, synthetic construct
  source 1..21: mol_type = other RNA
ccttgtactctgcttaatatg

SEQ ID NO: 22459 - RNA, 21 nt, synthetic construct
  source 1..21: mol_type = other RNA
ccttgttacttagggtcacct

SEQ ID NO: 22460 - RNA, 21 nt, synthetic construct
  source 1..21: mol_type = other RNA
ccttgttctaaggaaataaat

SEQ ID NO: 22461 - RNA, 21 nt, synthetic construct
  source 1..21: mol_type = other RNA
cctttactcctaaataattca

SEQ ID NO: 22462 - RNA, 21 nt, synthetic construct
  source 1..21: mol_type = other RNA
cctttctggcgatgttaactt

SEQ ID NO: 22463 - RNA, 21 nt, synthetic construct
  source 1..21: mol_type = other RNA
cctttttattgttaagggaca

SEQ ID NO: 22464 - RNA, 21 nt, synthetic construct
  source 1..21: mol_type = other RNA
cgacagttgttaatctctttt

SEQ ID NO: 22465 - RNA, 21 nt, synthetic construct
  source 1..21: mol_type = other RNA
cgagaggcacatgccatctgt

SEQ ID NO: 22466 - RNA, 21 nt, synthetic construct
  source 1..21: mol_type = other RNA
cgagattaatgcaaaagctga

SEQ ID NO: 22467 - RNA, 21 nt, synthetic construct
  source 1..21: mol_type = other RNA
cgagattagattcagatgagg

SEQ ID NO: 22468 - RNA, 21 nt, synthetic construct
  source 1..21: mol_type = other RNA
cgagccttcttcagtctggat

SEQ ID NO: 22469 - RNA, 21 nt, synthetic construct
  source 1..21: mol_type = other RNA
cgaggcttaggagatgaagtc

SEQ ID NO: 22470 - RNA, 21 nt, synthetic construct
  source 1..21: mol_type = other RNA
cgaggtgttgtggtacacgcc

SEQ ID NO: 22471 - RNA, 21 nt, synthetic construct
  source 1..21: mol_type = other RNA
cgagtaactgggactatgggc

SEQ ID NO: 22472 - RNA, 21 nt, synthetic construct
  source 1..21: mol_type = other RNA
cgagtataaccatcagacaaa

SEQ ID NO: 22473 - RNA, 21 nt, synthetic construct
  source 1..21: mol_type = other RNA
cgataagatgcactgaagaca

SEQ ID NO: 22474 - RNA, 21 nt, synthetic construct
  source 1..21: mol_type = other RNA
cgatgatgattttctctttag

SEQ ID NO: 22475 - RNA, 21 nt, synthetic construct
  source 1..21: mol_type = other RNA
cgatgttaactttgatcagtt

SEQ ID NO: 22476 - RNA, 21 nt, synthetic construct
  source 1..21: mol_type = other RNA
cgccagaaaggggacagatgg

SEQ ID NO: 22477 - RNA, 21 nt, synthetic construct
  source 1..21: mol_type = other RNA
cgcccatagtcccagttactc

SEQ ID NO: 22478 - RNA, 21 nt, synthetic construct
  source 1..21: mol_type = other RNA
cgcttggcatggataaaaaca

SEQ ID NO: 22479 - RNA, 21 nt, synthetic construct
  source 1..21: mol_type = other RNA
cggactcaagcaatcctcctg

SEQ ID NO: 22480 - RNA, 21 nt, synthetic construct
  source 1..21: mol_type = other RNA
cggaggtgaccctaagtaaca

SEQ ID NO: 22481 - RNA, 21 nt, synthetic construct
  source 1..21: mol_type = other RNA
cgggagttcaaggctgcagtg

SEQ ID NO: 22482 - RNA, 21 nt, synthetic construct
  source 1..21: mol_type = other RNA
cgggtgataaacataagatat

SEQ ID NO: 22483 - RNA, 21 nt, synthetic construct
  source 1..21: mol_type = other RNA
cggtttccttctctgtaaaac

SEQ ID NO: 22484 - RNA, 21 nt, synthetic construct
  source 1..21: mol_type = other RNA
cgtataccctctaaaattgtt

SEQ ID NO: 22485 - RNA, 21 nt, synthetic construct
  source 1..21: mol_type = other RNA
cgtctctacaaaaagtaggaa

SEQ ID NO: 22486 - RNA, 21 nt, synthetic construct
  source 1..21: mol_type = other RNA
cgtgtaccacaacacctcgct

SEQ ID NO: 22487 - RNA, 21 nt, synthetic construct
  source 1..21: mol_type = other RNA
cgttttgagacagggtctcgc

SEQ ID NO: 22488 - RNA, 21 nt, synthetic construct
  source 1..21: mol_type = other RNA
ctaaaactagtgcatttcatc

SEQ ID NO: 22489 - RNA, 21 nt, synthetic construct
  source 1..21: mol_type = other RNA
ctaaaattgttacttacatgc

SEQ ID NO: 22490 - RNA, 21 nt, synthetic construct
  source 1..21: mol_type = other RNA
ctaaagagaaaatcatcatcg

SEQ ID NO: 22491 - RNA, 21 nt, synthetic construct
  source 1..21: mol_type = other RNA
ctaaagtcacagggccttggc

SEQ ID NO: 22492 - RNA, 21 nt, synthetic construct
  source 1..21: mol_type = other RNA
ctaactgccaaagtcattaac

SEQ ID NO: 22493 - RNA, 21 nt, synthetic construct
  source 1..21: mol_type = other RNA
ctaagcctcggtttccttctc

SEQ ID NO: 22494 - RNA, 21 nt, synthetic construct
  source 1..21: mol_type = other RNA
ctaagtaacaaggaatcacat

SEQ ID NO: 22495 - RNA, 21 nt, synthetic construct
  source 1..21: mol_type = other RNA
ctaatctcgagtataaccatc

SEQ ID NO: 22496 - RNA, 21 nt, synthetic construct
  source 1..21: mol_type = other RNA
ctactattatccctgttttac

SEQ ID NO: 22497 - RNA, 21 nt, synthetic construct
  source 1..21: mol_type = other RNA
ctactgtggttatgcaaattt

SEQ ID NO: 22498 - RNA, 21 nt, synthetic construct
  source 1..21: mol_type = other RNA
ctactttttgtagagacgggg

SEQ ID NO: 22499 - RNA, 21 nt, synthetic construct
  source 1..21: mol_type = other RNA
ctagtgcatttcatcttaaac

SEQ ID NO: 22500 - RNA, 21 nt, synthetic construct
  source 1..21: mol_type = other RNA
ctagttttagtgcttcatctg

SEQ ID NO: 22501 - RNA, 21 nt, synthetic construct
  source 1..21: mol_type = other RNA
ctatacaatcctatgaccaat

SEQ ID NO: 22502 - RNA, 21 nt, synthetic construct
  source 1..21: mol_type = other RNA
ctatatgtgattccttgttac

SEQ ID NO: 22503 - RNA, 21 nt, synthetic construct
  source 1..21: mol_type = other RNA
ctatgaccaatctcatctaca

SEQ ID NO: 22504 - RNA, 21 nt, synthetic construct
  source 1..21: mol_type = other RNA
ctatgggcgtgtaccacaaca

SEQ ID NO: 22505 - RNA, 21 nt, synthetic construct
  source 1..21: mol_type = other RNA
ctattatccctgttttacaga

SEQ ID NO: 22506 - RNA, 21 nt, synthetic construct
  source 1..21: mol_type = other RNA
ctcaactctcccctttttatt

SEQ ID NO: 22507 - RNA, 21 nt, synthetic construct
  source 1..21: mol_type = other RNA
ctcaagtgatccttccacctc

SEQ ID NO: 22508 - RNA, 21 nt, synthetic construct
  source 1..21: mol_type = other RNA
ctcaatttgggtttgtctgat

SEQ ID NO: 22509 - RNA, 21 nt, synthetic construct
  source 1..21: mol_type = other RNA
ctcactatatgtgattccttg

SEQ ID NO: 22510 - RNA, 21 nt, synthetic construct
  source 1..21: mol_type = other RNA
ctcacttctgcaatattcctg

SEQ ID NO: 22511 - RNA, 21 nt, synthetic construct
  source 1..21: mol_type = other RNA
ctcagacttcatctcctaagc

SEQ ID NO: 22512 - RNA, 21 nt, synthetic construct
  source 1..21: mol_type = other RNA
ctcagcctctataaaatttga

SEQ ID NO: 22513 - RNA, 21 nt, synthetic construct
  source 1..21: mol_type = other RNA
ctcaggcaggaggattgcttg

SEQ ID NO: 22514 - RNA, 21 nt, synthetic construct
  source 1..21: mol_type = other RNA
ctcatctacaactttattcaa

SEQ ID NO: 22515 - RNA, 21 nt, synthetic construct
  source 1..21: mol_type = other RNA
ctcatctgaatctaatctcga

SEQ ID NO: 22516 - RNA, 21 nt, synthetic construct
  source 1..21: mol_type = other RNA
ctccaccaacacctcagactt

SEQ ID NO: 22517 - RNA, 21 nt, synthetic construct
  source 1..21: mol_type = other RNA
ctccactgtcaagttactatt

SEQ ID NO: 22518 - RNA, 21 nt, synthetic construct
  source 1..21: mol_type = other RNA
ctcccctttttattgttaagg

SEQ ID NO: 22519 - RNA, 21 nt, synthetic construct
  source 1..21: mol_type = other RNA
ctcccggactcaagcaatcct

SEQ ID NO: 22520 - RNA, 21 nt, synthetic construct
  source 1..21: mol_type = other RNA
ctccgtataccctctaaaatt

SEQ ID NO: 22521 - RNA, 21 nt, synthetic construct
  source 1..21: mol_type = other RNA
ctcctaagcctcggtttcctt

SEQ ID NO: 22522 - RNA, 21 nt, synthetic construct
  source 1..21: mol_type = other RNA
ctcctctaaataatcataagg

SEQ ID NO: 22523 - RNA, 21 nt, synthetic construct
  source 1..21: mol_type = other RNA
ctcctgcctgagccttccgag

SEQ ID NO: 22524 - RNA, 21 nt, synthetic construct
  source 1..21: mol_type = other RNA
ctcgagattaatgcaaaagct

SEQ ID NO: 22525 - RNA, 21 nt, synthetic construct
  source 1..21: mol_type = other RNA
ctcgagattagattcagatga

SEQ ID NO: 22526 - RNA, 21 nt, synthetic construct
  source 1..21: mol_type = other RNA
ctcgagccttcttcagtctgg

SEQ ID NO: 22527 - RNA, 21 nt, synthetic construct
  source 1..21: mol_type = other RNA
ctcgagtataaccatcagaca

SEQ ID NO: 22528 - RNA, 21 nt, synthetic construct
  source 1..21: mol_type = other RNA
ctcgataagatgcactgaaga

SEQ ID NO: 22529 - RNA, 21 nt, synthetic construct
  source 1..21: mol_type = other RNA
ctcggtttccttctctgtaaa

SEQ ID NO: 22530 - RNA, 21 nt, synthetic construct
  source 1..21: mol_type = other RNA
ctctacaaaaagtaggaaaaa

SEQ ID NO: 22531 - RNA, 21 nt, synthetic construct
  source 1..21: mol_type = other RNA
ctctcaatttgggtttgtctg

SEQ ID NO: 22532 - RNA, 21 nt, synthetic construct
  source 1..21: mol_type = other RNA
ctctccactgtcaagttacta

SEQ ID NO: 22533 - RNA, 21 nt, synthetic construct
  source 1..21: mol_type = other RNA
ctctcccctttttattgttaa

SEQ ID NO: 22534 - RNA, 21 nt, synthetic construct
  source 1..21: mol_type = other RNA
ctctcgataagatgcactgaa

SEQ ID NO: 22535 - RNA, 21 nt, synthetic construct
  source 1..21: mol_type = other RNA
ctctcttgtgacattgacata

SEQ ID NO: 22536 - RNA, 21 nt, synthetic construct
  source 1..21: mol_type = other RNA
ctctgcttaatatgtcaatgt

SEQ ID NO: 22537 - RNA, 21 nt, synthetic construct
  source 1..21: mol_type = other RNA
ctctgtaaaacagggataata

SEQ ID NO: 22538 - RNA, 21 nt, synthetic construct
  source 1..21: mol_type = other RNA
ctcttcagtctgtctttctct

SEQ ID NO: 22539 - RNA, 21 nt, synthetic construct
  source 1..21: mol_type = other RNA
ctcttgtgacattgacatatt

SEQ ID NO: 22540 - RNA, 21 nt, synthetic construct
  source 1..21: mol_type = other RNA
ctctttagtgacagacatttt

SEQ ID NO: 22541 - RNA, 21 nt, synthetic construct
  source 1..21: mol_type = other RNA
ctgaaaagcaaattgcttgct

SEQ ID NO: 22542 - RNA, 21 nt, synthetic construct
  source 1..21: mol_type = other RNA
ctgaactttctcctctaaata

SEQ ID NO: 22543 - RNA, 21 nt, synthetic construct
  source 1..21: mol_type = other RNA
ctgaagaaggctcgagattaa

SEQ ID NO: 22544 - RNA, 21 nt, synthetic construct
  source 1..21: mol_type = other RNA
ctgaagacacacactcacttc

SEQ ID NO: 22545 - RNA, 21 nt, synthetic construct
  source 1..21: mol_type = other RNA
ctgaagagctgatccagactg

SEQ ID NO: 22546 - RNA, 21 nt, synthetic construct
  source 1..21: mol_type = other RNA
ctgaatctaatctcgagtata

SEQ ID NO: 22547 - RNA, 21 nt, synthetic construct
  source 1..21: mol_type = other RNA
ctgaattatttaggagtaaag

SEQ ID NO: 22548 - RNA, 21 nt, synthetic construct
  source 1..21: mol_type = other RNA
ctgagccttccgagtaactgg

SEQ ID NO: 22549 - RNA, 21 nt, synthetic construct
  source 1..21: mol_type = other RNA
ctgagcgagaccctgtctcaa

SEQ ID NO: 22550 - RNA, 21 nt, synthetic construct
  source 1..21: mol_type = other RNA
ctgaggtggaaggatcacttg

SEQ ID NO: 22551 - RNA, 21 nt, synthetic construct
  source 1..21: mol_type = other RNA
ctgaggtgttggtggagctgg

SEQ ID NO: 22552 - RNA, 21 nt, synthetic construct
  source 1..21: mol_type = other RNA
ctgatcaaagttaacatcgcc

SEQ ID NO: 22553 - RNA, 21 nt, synthetic construct
  source 1..21: mol_type = other RNA
ctgatccagactgaagaaggc

SEQ ID NO: 22554 - RNA, 21 nt, synthetic construct
  source 1..21: mol_type = other RNA
ctgatctgggattgcatcttg

SEQ ID NO: 22555 - RNA, 21 nt, synthetic construct
  source 1..21: mol_type = other RNA
ctgatggttatactcgagatt

SEQ ID NO: 22556 - RNA, 21 nt, synthetic construct
  source 1..21: mol_type = other RNA
ctgattttgacaaccctactg

SEQ ID NO: 22557 - RNA, 21 nt, synthetic construct
  source 1..21: mol_type = other RNA
ctgcaaagcatgtaagtaaca

SEQ ID NO: 22558 - RNA, 21 nt, synthetic construct
  source 1..21: mol_type = other RNA
ctgcaaattataaagggaata

SEQ ID NO: 22559 - RNA, 21 nt, synthetic construct
  source 1..21: mol_type = other RNA
ctgcaatattcctgccaagaa

SEQ ID NO: 22560 - RNA, 21 nt, synthetic construct
  source 1..21: mol_type = other RNA
ctgcagtgagttattattcca

SEQ ID NO: 22561 - RNA, 21 nt, synthetic construct
  source 1..21: mol_type = other RNA
ctgccaaagtcattaactttt

SEQ ID NO: 22562 - RNA, 21 nt, synthetic construct
  source 1..21: mol_type = other RNA
ctgccaagaatgcctcatctg

SEQ ID NO: 22563 - RNA, 21 nt, synthetic construct
  source 1..21: mol_type = other RNA
ctgccaggtctctccactgtc

SEQ ID NO: 22564 - RNA, 21 nt, synthetic construct
  source 1..21: mol_type = other RNA
ctgcctgagccttccgagtaa

SEQ ID NO: 22565 - RNA, 21 nt, synthetic construct
  source 1..21: mol_type = other RNA
ctgcttaatatgtcaatgtca

SEQ ID NO: 22566 - RNA, 21 nt, synthetic construct
  source 1..21: mol_type = other RNA
ctggagtgcagtggtggaata

SEQ ID NO: 22567 - RNA, 21 nt, synthetic construct
  source 1..21: mol_type = other RNA
ctggatcagctcttcagtctg

SEQ ID NO: 22568 - RNA, 21 nt, synthetic construct
  source 1..21: mol_type = other RNA
ctggcagacaccaccttcacc

SEQ ID NO: 22569 - RNA, 21 nt, synthetic construct
  source 1..21: mol_type = other RNA
ctggcgatgttaactttgatc

SEQ ID NO: 22570 - RNA, 21 nt, synthetic construct
  source 1..21: mol_type = other RNA
ctggctttggtatttggccaa

SEQ ID NO: 22571 - RNA, 21 nt, synthetic construct
  source 1..21: mol_type = other RNA
ctgggactatgggcgtgtacc

SEQ ID NO: 22572 - RNA, 21 nt, synthetic construct
  source 1..21: mol_type = other RNA
ctgggattgcatcttggacct

SEQ ID NO: 22573 - RNA, 21 nt, synthetic construct
  source 1..21: mol_type = other RNA
ctgggatttaaaccaaaatat

SEQ ID NO: 22574 - RNA, 21 nt, synthetic construct
  source 1..21: mol_type = other RNA
ctggtatatcttatgtttatc

SEQ ID NO: 22575 - RNA, 21 nt, synthetic construct
  source 1..21: mol_type = other RNA
ctggtgttttgtaaactgtct

SEQ ID NO: 22576 - RNA, 21 nt, synthetic construct
  source 1..21: mol_type = other RNA
ctggtttcaaactcaagtgat

SEQ ID NO: 22577 - RNA, 21 nt, synthetic construct
  source 1..21: mol_type = other RNA
ctgtaaaacagggataatagt

SEQ ID NO: 22578 - RNA, 21 nt, synthetic construct
  source 1..21: mol_type = other RNA
ctgtcaagttactattattcc

SEQ ID NO: 22579 - RNA, 21 nt, synthetic construct
  source 1..21: mol_type = other RNA
ctgtcactaaagagaaaatca

SEQ ID NO: 22580 - RNA, 21 nt, synthetic construct
  source 1..21: mol_type = other RNA
ctgtcccctttctggcgatgt

SEQ ID NO: 22581 - RNA, 21 nt, synthetic construct
  source 1..21: mol_type = other RNA
ctgtcgggtgataaacataag

SEQ ID NO: 22582 - RNA, 21 nt, synthetic construct
  source 1..21: mol_type = other RNA
ctgtctctcaatttgggtttg

SEQ ID NO: 22583 - RNA, 21 nt, synthetic construct
  source 1..21: mol_type = other RNA
ctgtctttctctcttgtgaca

SEQ ID NO: 22584 - RNA, 21 nt, synthetic construct
  source 1..21: mol_type = other RNA
ctgtgactttagctggctttg

SEQ ID NO: 22585 - RNA, 21 nt, synthetic construct
  source 1..21: mol_type = other RNA
ctgtggttatgcaaatttgtc

SEQ ID NO: 22586 - RNA, 21 nt, synthetic construct
  source 1..21: mol_type = other RNA
ctgttttacagagaaggaaac

SEQ ID NO: 22587 - RNA, 21 nt, synthetic construct
  source 1..21: mol_type = other RNA
cttaacaataaaaaggggaga

SEQ ID NO: 22588 - RNA, 21 nt, synthetic construct
  source 1..21: mol_type = other RNA
cttaatatgtcaatgtcacaa

SEQ ID NO: 22589 - RNA, 21 nt, synthetic construct
  source 1..21: mol_type = other RNA
cttacatgctttgcagttgga

SEQ ID NO: 22590 - RNA, 21 nt, synthetic construct
  source 1..21: mol_type = other RNA
cttagaacaaggacaaatttg

SEQ ID NO: 22591 - RNA, 21 nt, synthetic construct
  source 1..21: mol_type = other RNA
cttaggagatgaagtctgagg

SEQ ID NO: 22592 - RNA, 21 nt, synthetic construct
  source 1..21: mol_type = other RNA
cttaggcaggtgctactatta

SEQ ID NO: 22593 - RNA, 21 nt, synthetic construct
  source 1..21: mol_type = other RNA
cttagggtcacctccgtatac

SEQ ID NO: 22594 - RNA, 21 nt, synthetic construct
  source 1..21: mol_type = other RNA
cttatcgagaggcacatgcca

SEQ ID NO: 22595 - RNA, 21 nt, synthetic construct
  source 1..21: mol_type = other RNA
cttatgattatttagaggaga

SEQ ID NO: 22596 - RNA, 21 nt, synthetic construct
  source 1..21: mol_type = other RNA
cttatgtttatcacccgacag

SEQ ID NO: 22597 - RNA, 21 nt, synthetic construct
  source 1..21: mol_type = other RNA
cttcaccaactgatcaaagtt

SEQ ID NO: 22598 - RNA, 21 nt, synthetic construct
  source 1..21: mol_type = other RNA
cttcagtctggatcagctctt

SEQ ID NO: 22599 - RNA, 21 nt, synthetic construct
  source 1..21: mol_type = other RNA
cttcagtctgtctttctctct

SEQ ID NO: 22600 - RNA, 21 nt, synthetic construct
  source 1..21: mol_type = other RNA
cttcagtgcatcttatcgaga

SEQ ID NO: 22601 - RNA, 21 nt, synthetic construct
  source 1..21: mol_type = other RNA
cttcatctcctaagcctcggt

SEQ ID NO: 22602 - RNA, 21 nt, synthetic construct
  source 1..21: mol_type = other RNA
cttcatctgtaaaactacttt

SEQ ID NO: 22603 - RNA, 21 nt, synthetic construct
  source 1..21: mol_type = other RNA
cttccacctcagcctctataa

SEQ ID NO: 22604 - RNA, 21 nt, synthetic construct
  source 1..21: mol_type = other RNA
cttccgagtaactgggactat

SEQ ID NO: 22605 - RNA, 21 nt, synthetic construct
  source 1..21: mol_type = other RNA
cttctctgtaaaacagggata

SEQ ID NO: 22606 - RNA, 21 nt, synthetic construct
  source 1..21: mol_type = other RNA
cttctgcaatattcctgccaa

SEQ ID NO: 22607 - RNA, 21 nt, synthetic construct
  source 1..21: mol_type = other RNA
cttcttcagtctggatcagct

SEQ ID NO: 22608 - RNA, 21 nt, synthetic construct
  source 1..21: mol_type = other RNA
cttgacagtggagagacctgg

SEQ ID NO: 22609 - RNA, 21 nt, synthetic construct
  source 1..21: mol_type = other RNA
cttgctcactatatgtgattc

SEQ ID NO: 22610 - RNA, 21 nt, synthetic construct
  source 1..21: mol_type = other RNA
cttggacctcaactctcccct

SEQ ID NO: 22611 - RNA, 21 nt, synthetic construct
  source 1..21: mol_type = other RNA
cttggcaggaatattgcagaa

SEQ ID NO: 22612 - RNA, 21 nt, synthetic construct
  source 1..21: mol_type = other RNA
cttggcatggataaaaacact

SEQ ID NO: 22613 - RNA, 21 nt, synthetic construct
  source 1..21: mol_type = other RNA
cttggcctgtattctttgtta

SEQ ID NO: 22614 - RNA, 21 nt, synthetic construct
  source 1..21: mol_type = other RNA
cttgtactctgcttaatatgt

SEQ ID NO: 22615 - RNA, 21 nt, synthetic construct
  source 1..21: mol_type = other RNA
cttgtgacattgacatattaa

SEQ ID NO: 22616 - RNA, 21 nt, synthetic construct
  source 1..21: mol_type = other RNA
cttgttacttagggtcacctc

SEQ ID NO: 22617 - RNA, 21 nt, synthetic construct
  source 1..21: mol_type = other RNA
ctttactcctaaataattcag

SEQ ID NO: 22618 - RNA, 21 nt, synthetic construct
  source 1..21: mol_type = other RNA
ctttagctggctttggtattt

SEQ ID NO: 22619 - RNA, 21 nt, synthetic construct
  source 1..21: mol_type = other RNA
ctttagtgacagacatttttt

SEQ ID NO: 22620 - RNA, 21 nt, synthetic construct
  source 1..21: mol_type = other RNA
ctttctcctctaaataatcat

SEQ ID NO: 22621 - RNA, 21 nt, synthetic construct
  source 1..21: mol_type = other RNA
ctttctctcttgtgacattga

SEQ ID NO: 22622 - RNA, 21 nt, synthetic construct
  source 1..21: mol_type = other RNA
ctttctggcgatgttaacttt

SEQ ID NO: 22623 - RNA, 21 nt, synthetic construct
  source 1..21: mol_type = other RNA
ctttgatcagttggtgaaggt

SEQ ID NO: 22624 - RNA, 21 nt, synthetic construct
  source 1..21: mol_type = other RNA
ctttgcagttggacatatttt

SEQ ID NO: 22625 - RNA, 21 nt, synthetic construct
  source 1..21: mol_type = other RNA
ctttggcagttagtgttttta

SEQ ID NO: 22626 - RNA, 21 nt, synthetic construct
  source 1..21: mol_type = other RNA
ctttggtatttggccaaaagt

SEQ ID NO: 22627 - RNA, 21 nt, synthetic construct
  source 1..21: mol_type = other RNA
cttttcagtttttggtcaatc

SEQ ID NO: 22628 - RNA, 21 nt, synthetic construct
  source 1..21: mol_type = other RNA
cttttgcattaatctcgagcc

SEQ ID NO: 22629 - RNA, 21 nt, synthetic construct
  source 1..21: mol_type = other RNA
cttttggccaaataccaaagc

SEQ ID NO: 22630 - RNA, 21 nt, synthetic construct
  source 1..21: mol_type = other RNA
ctttttaacaaagaatacagg

SEQ ID NO: 22631 - RNA, 21 nt, synthetic construct
  source 1..21: mol_type = other RNA
ctttttattgttaagggacac

SEQ ID NO: 22632 - RNA, 21 nt, synthetic construct
  source 1..21: mol_type = other RNA
gaaaagcaaattgcttgctca

SEQ ID NO: 22633 - RNA, 21 nt, synthetic construct
  source 1..21: mol_type = other RNA
gaaaatcatcatcgcttggca

SEQ ID NO: 22634 - RNA, 21 nt, synthetic construct
  source 1..21: mol_type = other RNA
gaaaatgggttcattatgcac

SEQ ID NO: 22635 - RNA, 21 nt, synthetic construct
  source 1..21: mol_type = other RNA
gaaaccgaggcttaggagatg

SEQ ID NO: 22636 - RNA, 21 nt, synthetic construct
  source 1..21: mol_type = other RNA
gaaagacagactgaagagctg

SEQ ID NO: 22637 - RNA, 21 nt, synthetic construct
  source 1..21: mol_type = other RNA
gaaaggggacagatggcatgt

SEQ ID NO: 22638 - RNA, 21 nt, synthetic construct
  source 1..21: mol_type = other RNA
gaaagttcagtttggtgctgg

SEQ ID NO: 22639 - RNA, 21 nt, synthetic construct
  source 1..21: mol_type = other RNA
gaaatgcactagttttagtgc

SEQ ID NO: 22640 - RNA, 21 nt, synthetic construct
  source 1..21: mol_type = other RNA
gaacaaggacaaatttgcata

SEQ ID NO: 22641 - RNA, 21 nt, synthetic construct
  source 1..21: mol_type = other RNA
gaacccattttcaaatgctta

SEQ ID NO: 22642 - RNA, 21 nt, synthetic construct
  source 1..21: mol_type = other RNA
gaactttctcctctaaataat

SEQ ID NO: 22643 - RNA, 21 nt, synthetic construct
  source 1..21: mol_type = other RNA
gaagaaggctcgagattaatg

SEQ ID NO: 22644 - RNA, 21 nt, synthetic construct
  source 1..21: mol_type = other RNA
gaagacacacactcacttctg

SEQ ID NO: 22645 - RNA, 21 nt, synthetic construct
  source 1..21: mol_type = other RNA
gaagagctgatccagactgaa

SEQ ID NO: 22646 - RNA, 21 nt, synthetic construct
  source 1..21: mol_type = other RNA
gaagcactaaaactagtgcat

SEQ ID NO: 22647 - RNA, 21 nt, synthetic construct
  source 1..21: mol_type = other RNA
gaaggaaaccgaggcttagga

SEQ ID NO: 22648 - RNA, 21 nt, synthetic construct
  source 1..21: mol_type = other RNA
gaaggatcacttgagtttgaa

SEQ ID NO: 22649 - RNA, 21 nt, synthetic construct
  source 1..21: mol_type = other RNA
gaaggctcgagattaatgcaa

SEQ ID NO: 22650 - RNA, 21 nt, synthetic construct
  source 1..21: mol_type = other RNA
gaaggtggtgtctgccaggtc

SEQ ID NO: 22651 - RNA, 21 nt, synthetic construct
  source 1..21: mol_type = other RNA
gaagtctgaggtgttggtgga

SEQ ID NO: 22652 - RNA, 21 nt, synthetic construct
  source 1..21: mol_type = other RNA
gaagtgagtgtgtgtcttcag

SEQ ID NO: 22653 - RNA, 21 nt, synthetic construct
  source 1..21: mol_type = other RNA
gaataaagttgtagatgagat

SEQ ID NO: 22654 - RNA, 21 nt, synthetic construct
  source 1..21: mol_type = other RNA
gaataataactcactgcagcc

SEQ ID NO: 22655 - RNA, 21 nt, synthetic construct
  source 1..21: mol_type = other RNA
gaataatagtaacttgacagt

SEQ ID NO: 22656 - RNA, 21 nt, synthetic construct
  source 1..21: mol_type = other RNA
gaatacaggccaaggccctgt

SEQ ID NO: 22657 - RNA, 21 nt, synthetic construct
  source 1..21: mol_type = other RNA
gaatattgcagaagtgagtgt

SEQ ID NO: 22658 - RNA, 21 nt, synthetic construct
  source 1..21: mol_type = other RNA
gaatcacatatagtgagcaag

SEQ ID NO: 22659 - RNA, 21 nt, synthetic construct
  source 1..21: mol_type = other RNA
gaatctaatctcgagtataac

SEQ ID NO: 22660 - RNA, 21 nt, synthetic construct
  source 1..21: mol_type = other RNA
gaatgcctcatctgaatctaa

SEQ ID NO: 22661 - RNA, 21 nt, synthetic construct
  source 1..21: mol_type = other RNA
gaattatttaggagtaaaggt

SEQ ID NO: 22662 - RNA, 21 nt, synthetic construct
  source 1..21: mol_type = other RNA
gacaaacccaaattgagagac

SEQ ID NO: 22663 - RNA, 21 nt, synthetic construct
  source 1..21: mol_type = other RNA
gacaaatttgcataaccacag

SEQ ID NO: 22664 - RNA, 21 nt, synthetic construct
  source 1..21: mol_type = other RNA
gacaaccctactgtggttatg

SEQ ID NO: 22665 - RNA, 21 nt, synthetic construct
  source 1..21: mol_type = other RNA
gacacacactcacttctgcaa

SEQ ID NO: 22666 - RNA, 21 nt, synthetic construct
  source 1..21: mol_type = other RNA
gacaccaccttcaccaactga

SEQ ID NO: 22667 - RNA, 21 nt, synthetic construct
  source 1..21: mol_type = other RNA
gacactactgggacaattttt

SEQ ID NO: 22668 - RNA, 21 nt, synthetic construct
  source 1..21: mol_type = other RNA
gacagactgaagagctgatcc

SEQ ID NO: 22669 - RNA, 21 nt, synthetic construct
  source 1..21: mol_type = other RNA
gacagatggcatgtgcctctc

SEQ ID NO: 22670 - RNA, 21 nt, synthetic construct
  source 1..21: mol_type = other RNA
gacagtggagagacctggcag

SEQ ID NO: 22671 - RNA, 21 nt, synthetic construct
  source 1..21: mol_type = other RNA
gacagttgttaatctcttttt

SEQ ID NO: 22672 - RNA, 21 nt, synthetic construct
  source 1..21: mol_type = other RNA
gacagtttacaaaacaccagc

SEQ ID NO: 22673 - RNA, 21 nt, synthetic construct
  source 1..21: mol_type = other RNA
gacatattaagcagagtacaa

SEQ ID NO: 22674 - RNA, 21 nt, synthetic construct
  source 1..21: mol_type = other RNA
gacatattttggtttaaatcc

SEQ ID NO: 22675 - RNA, 21 nt, synthetic construct
  source 1..21: mol_type = other RNA
gacattgacatattaagcaga

SEQ ID NO: 22676 - RNA, 21 nt, synthetic construct
  source 1..21: mol_type = other RNA
gaccaaaaactgaaaagcaaa

SEQ ID NO: 22677 - RNA, 21 nt, synthetic construct
  source 1..21: mol_type = other RNA
gaccaatctcatctacaactt

SEQ ID NO: 22678 - RNA, 21 nt, synthetic construct
  source 1..21: mol_type = other RNA
gaccccgtctctacaaaaagt

SEQ ID NO: 22679 - RNA, 21 nt, synthetic construct
  source 1..21: mol_type = other RNA
gaccctaagtaacaaggaatc

SEQ ID NO: 22680 - RNA, 21 nt, synthetic construct
  source 1..21: mol_type = other RNA
gaccctgtctcaaaacgaaaa

SEQ ID NO: 22681 - RNA, 21 nt, synthetic construct
  source 1..21: mol_type = other RNA
gacctcaactctccccttttt

SEQ ID NO: 22682 - RNA, 21 nt, synthetic construct
  source 1..21: mol_type = other RNA
gacctggcagacaccaccttc

SEQ ID NO: 22683 - RNA, 21 nt, synthetic construct
  source 1..21: mol_type = other RNA
gactatgggcgtgtaccacaa

SEQ ID NO: 22684 - RNA, 21 nt, synthetic construct
  source 1..21: mol_type = other RNA
gactgaagaaggctcgagatt

SEQ ID NO: 22685 - RNA, 21 nt, synthetic construct
  source 1..21: mol_type = other RNA
gactgaagagctgatccagac

SEQ ID NO: 22686 - RNA, 21 nt, synthetic construct
  source 1..21: mol_type = other RNA
gactgagcgagaccctgtctc

SEQ ID NO: 22687 - RNA, 21 nt, synthetic construct
  source 1..21: mol_type = other RNA
gacttcatctcctaagcctcg

SEQ ID NO: 22688 - RNA, 21 nt, synthetic construct
  source 1..21: mol_type = other RNA
gactttagctggctttggtat

SEQ ID NO: 22689 - RNA, 21 nt, synthetic construct
  source 1..21: mol_type = other RNA
gactttggcagttagtgtttt

SEQ ID NO: 22690 - RNA, 21 nt, synthetic construct
  source 1..21: mol_type = other RNA
gagaaaatcatcatcgcttgg

SEQ ID NO: 22691 - RNA, 21 nt, synthetic construct
  source 1..21: mol_type = other RNA
gagaaagacagactgaagagc

SEQ ID NO: 22692 - RNA, 21 nt, synthetic construct
  source 1..21: mol_type = other RNA
gagaaagttcagtttggtgct

SEQ ID NO: 22693 - RNA, 21 nt, synthetic construct
  source 1..21: mol_type = other RNA
gagaaggaaaccgaggcttag

SEQ ID NO: 22694 - RNA, 21 nt, synthetic construct
  source 1..21: mol_type = other RNA
gagacagtttacaaaacacca

SEQ ID NO: 22695 - RNA, 21 nt, synthetic construct
  source 1..21: mol_type = other RNA
gagaccccgtctctacaaaaa

SEQ ID NO: 22696 - RNA, 21 nt, synthetic construct
  source 1..21: mol_type = other RNA
gagacctggcagacaccacct

SEQ ID NO: 22697 - RNA, 21 nt, synthetic construct
  source 1..21: mol_type = other RNA
gagagaaagacagactgaaga

SEQ ID NO: 22698 - RNA, 21 nt, synthetic construct
  source 1..21: mol_type = other RNA
gagagacagtttacaaaacac

SEQ ID NO: 22699 - RNA, 21 nt, synthetic construct
  source 1..21: mol_type = other RNA
gagagacctggcagacaccac

SEQ ID NO: 22700 - RNA, 21 nt, synthetic construct
  source 1..21: mol_type = other RNA
gagaggcacatgccatctgtc

SEQ ID NO: 22701 - RNA, 21 nt, synthetic construct
  source 1..21: mol_type = other RNA
gagagttgaggtccaagatgc

SEQ ID NO: 22702 - RNA, 21 nt, synthetic construct
  source 1..21: mol_type = other RNA
gagatgaagtctgaggtgttg

SEQ ID NO: 22703 - RNA, 21 nt, synthetic construct
  source 1..21: mol_type = other RNA
gagattaacaactgtcgggtg

SEQ ID NO: 22704 - RNA, 21 nt, synthetic construct
  source 1..21: mol_type = other RNA
gagattaatgcaaaagctgat

SEQ ID NO: 22705 - RNA, 21 nt, synthetic construct
  source 1..21: mol_type = other RNA
gagattagattcagatgaggc

SEQ ID NO: 22706 - RNA, 21 nt, synthetic construct
  source 1..21: mol_type = other RNA
gagattggtcataggattgta

SEQ ID NO: 22707 - RNA, 21 nt, synthetic construct
  source 1..21: mol_type = other RNA
gagcaagcaatttgcttttca

SEQ ID NO: 22708 - RNA, 21 nt, synthetic construct
  source 1..21: mol_type = other RNA
gagccttccgagtaactggga

SEQ ID NO: 22709 - RNA, 21 nt, synthetic construct
  source 1..21: mol_type = other RNA
gagccttcttcagtctggatc

SEQ ID NO: 22710 - RNA, 21 nt, synthetic construct
  source 1..21: mol_type = other RNA
gagctgatccagactgaagaa

SEQ ID NO: 22711 - RNA, 21 nt, synthetic construct
  source 1..21: mol_type = other RNA
gagctgggatttaaaccaaaa

SEQ ID NO: 22712 - RNA, 21 nt, synthetic construct
  source 1..21: mol_type = other RNA
gaggagaaagttcagtttggt

SEQ ID NO: 22713 - RNA, 21 nt, synthetic construct
  source 1..21: mol_type = other RNA
gaggcacatgccatctgtccc

SEQ ID NO: 22714 - RNA, 21 nt, synthetic construct
  source 1..21: mol_type = other RNA
gaggcattcttggcaggaata

SEQ ID NO: 22715 - RNA, 21 nt, synthetic construct
  source 1..21: mol_type = other RNA
gaggcttaggagatgaagtct

SEQ ID NO: 22716 - RNA, 21 nt, synthetic construct
  source 1..21: mol_type = other RNA
gagggtatacggaggtgaccc

SEQ ID NO: 22717 - RNA, 21 nt, synthetic construct
  source 1..21: mol_type = other RNA
gaggtccaagatgcaatccca

SEQ ID NO: 22718 - RNA, 21 nt, synthetic construct
  source 1..21: mol_type = other RNA
gaggtgaccctaagtaacaag

SEQ ID NO: 22719 - RNA, 21 nt, synthetic construct
  source 1..21: mol_type = other RNA
gaggtggaaggatcacttgag

SEQ ID NO: 22720 - RNA, 21 nt, synthetic construct
  source 1..21: mol_type = other RNA
gaggtgttggtggagctggga

SEQ ID NO: 22721 - RNA, 21 nt, synthetic construct
  source 1..21: mol_type = other RNA
gaggtgttgtggtacacgccc

SEQ ID NO: 22722 - RNA, 21 nt, synthetic construct
  source 1..21: mol_type = other RNA
gagtaaaggtgcataatgaac

SEQ ID NO: 22723 - RNA, 21 nt, synthetic construct
  source 1..21: mol_type = other RNA
gagtaactgggactatgggcg

SEQ ID NO: 22724 - RNA, 21 nt, synthetic construct
  source 1..21: mol_type = other RNA
gagtacaaggctggtgttttg

SEQ ID NO: 22725 - RNA, 21 nt, synthetic construct
  source 1..21: mol_type = other RNA
gagtataaccatcagacaaac

SEQ ID NO: 22726 - RNA, 21 nt, synthetic construct
  source 1..21: mol_type = other RNA
gagtccgggagttcaaggctg

SEQ ID NO: 22727 - RNA, 21 nt, synthetic construct
  source 1..21: mol_type = other RNA
gagtgcagtggtggaataata

SEQ ID NO: 22728 - RNA, 21 nt, synthetic construct
  source 1..21: mol_type = other RNA
gagtgtgtgtcttcagtgcat

SEQ ID NO: 22729 - RNA, 21 nt, synthetic construct
  source 1..21: mol_type = other RNA
gagttattattccaccactgc

SEQ ID NO: 22730 - RNA, 21 nt, synthetic construct
  source 1..21: mol_type = other RNA
gagttcaaggctgcagtgagt

SEQ ID NO: 22731 - RNA, 21 nt, synthetic construct
  source 1..21: mol_type = other RNA
gagttgaggtccaagatgcaa

SEQ ID NO: 22732 - RNA, 21 nt, synthetic construct
  source 1..21: mol_type = other RNA
gataaaaacactaactgccaa

SEQ ID NO: 22733 - RNA, 21 nt, synthetic construct
  source 1..21: mol_type = other RNA
gataaacataagatataccag

SEQ ID NO: 22734 - RNA, 21 nt, synthetic construct
  source 1..21: mol_type = other RNA
gataagatgcactgaagacac

SEQ ID NO: 22735 - RNA, 21 nt, synthetic construct
  source 1..21: mol_type = other RNA
gataatagtagcacctgccta

SEQ ID NO: 22736 - RNA, 21 nt, synthetic construct
  source 1..21: mol_type = other RNA
gatacactatacaatcctatg

SEQ ID NO: 22737 - RNA, 21 nt, synthetic construct
  source 1..21: mol_type = other RNA
gatataccagcaccaaactga

SEQ ID NO: 22738 - RNA, 21 nt, synthetic construct
  source 1..21: mol_type = other RNA
gatcaaagttaacatcgccag

SEQ ID NO: 22739 - RNA, 21 nt, synthetic construct
  source 1..21: mol_type = other RNA
gatcacttgagtttgaaacca

SEQ ID NO: 22740 - RNA, 21 nt, synthetic construct
  source 1..21: mol_type = other RNA
gatcagctcttcagtctgtct

SEQ ID NO: 22741 - RNA, 21 nt, synthetic construct
  source 1..21: mol_type = other RNA
gatcagcttttgcattaatct

SEQ ID NO: 22742 - RNA, 21 nt, synthetic construct
  source 1..21: mol_type = other RNA
gatcagttggtgaaggtggtg

SEQ ID NO: 22743 - RNA, 21 nt, synthetic construct
  source 1..21: mol_type = other RNA
gatccagactgaagaaggctc

SEQ ID NO: 22744 - RNA, 21 nt, synthetic construct
  source 1..21: mol_type = other RNA
gatccttccacctcagcctct

SEQ ID NO: 22745 - RNA, 21 nt, synthetic construct
  source 1..21: mol_type = other RNA
gatctgggattgcatcttgga

SEQ ID NO: 22746 - RNA, 21 nt, synthetic construct
  source 1..21: mol_type = other RNA
gatgaaatgcactagttttag

SEQ ID NO: 22747 - RNA, 21 nt, synthetic construct
  source 1..21: mol_type = other RNA
gatgaagcactaaaactagtg

SEQ ID NO: 22748 - RNA, 21 nt, synthetic construct
  source 1..21: mol_type = other RNA
gatgaagtctgaggtgttggt

SEQ ID NO: 22749 - RNA, 21 nt, synthetic construct
  source 1..21: mol_type = other RNA
gatgagattggtcataggatt

SEQ ID NO: 22750 - RNA, 21 nt, synthetic construct
  source 1..21: mol_type = other RNA
gatgaggcattcttggcagga

SEQ ID NO: 22751 - RNA, 21 nt, synthetic construct
  source 1..21: mol_type = other RNA
gatgatgattttctctttagt

SEQ ID NO: 22752 - RNA, 21 nt, synthetic construct
  source 1..21: mol_type = other RNA
gatgattttctctttagtgac

SEQ ID NO: 22753 - RNA, 21 nt, synthetic construct
  source 1..21: mol_type = other RNA
gatgcaatcccagatcagctt

SEQ ID NO: 22754 - RNA, 21 nt, synthetic construct
  source 1..21: mol_type = other RNA
gatgcactgaagacacacact

SEQ ID NO: 22755 - RNA, 21 nt, synthetic construct
  source 1..21: mol_type = other RNA
gatggcatgtgcctctcgata

SEQ ID NO: 22756 - RNA, 21 nt, synthetic construct
  source 1..21: mol_type = other RNA
gatggttatactcgagattag

SEQ ID NO: 22757 - RNA, 21 nt, synthetic construct
  source 1..21: mol_type = other RNA
gatgttaactttgatcagttg

SEQ ID NO: 22758 - RNA, 21 nt, synthetic construct
  source 1..21: mol_type = other RNA
gattaacaactgtcgggtgat

SEQ ID NO: 22759 - RNA, 21 nt, synthetic construct
  source 1..21: mol_type = other RNA
gattaatgcaaaagctgatct

SEQ ID NO: 22760 - RNA, 21 nt, synthetic construct
  source 1..21: mol_type = other RNA
gattagattcagatgaggcat

SEQ ID NO: 22761 - RNA, 21 nt, synthetic construct
  source 1..21: mol_type = other RNA
gattatttagaggagaaagtt

SEQ ID NO: 22762 - RNA, 21 nt, synthetic construct
  source 1..21: mol_type = other RNA
gattcagatgaggcattcttg

SEQ ID NO: 22763 - RNA, 21 nt, synthetic construct
  source 1..21: mol_type = other RNA
gattccttgttacttagggtc

SEQ ID NO: 22764 - RNA, 21 nt, synthetic construct
  source 1..21: mol_type = other RNA
gattgaccaaaaactgaaaag

SEQ ID NO: 22765 - RNA, 21 nt, synthetic construct
  source 1..21: mol_type = other RNA
gattgcatcttggacctcaac

SEQ ID NO: 22766 - RNA, 21 nt, synthetic construct
  source 1..21: mol_type = other RNA
gattggtcataggattgtata

SEQ ID NO: 22767 - RNA, 21 nt, synthetic construct
  source 1..21: mol_type = other RNA
gatttaaaccaaaatatgtcc

SEQ ID NO: 22768 - RNA, 21 nt, synthetic construct
  source 1..21: mol_type = other RNA
gatttgctgattttgacaacc

SEQ ID NO: 22769 - RNA, 21 nt, synthetic construct
  source 1..21: mol_type = other RNA
gattttctctttagtgacaga

SEQ ID NO: 22770 - RNA, 21 nt, synthetic construct
  source 1..21: mol_type = other RNA
gattttgacaaccctactgtg

SEQ ID NO: 22771 - RNA, 21 nt, synthetic construct
  source 1..21: mol_type = other RNA
gcaaaagctgatctgggattg

SEQ ID NO: 22772 - RNA, 21 nt, synthetic construct
  source 1..21: mol_type = other RNA
gcaaagcatgtaagtaacaat

SEQ ID NO: 22773 - RNA, 21 nt, synthetic construct
  source 1..21: mol_type = other RNA
gcaaatctaatattgatacac

SEQ ID NO: 22774 - RNA, 21 nt, synthetic construct
  source 1..21: mol_type = other RNA
gcaaattgcttgctcactata

SEQ ID NO: 22775 - RNA, 21 nt, synthetic construct
  source 1..21: mol_type = other RNA
gcaaatttgtccttgttctaa

SEQ ID NO: 22776 - RNA, 21 nt, synthetic construct
  source 1..21: mol_type = other RNA
gcaagcaatttgcttttcagt

SEQ ID NO: 22777 - RNA, 21 nt, synthetic construct
  source 1..21: mol_type = other RNA
gcaatattcctgccaagaatg

SEQ ID NO: 22778 - RNA, 21 nt, synthetic construct
  source 1..21: mol_type = other RNA
gcaatcccagatcagcttttg

SEQ ID NO: 22779 - RNA, 21 nt, synthetic construct
  source 1..21: mol_type = other RNA
gcaatcctcctgcctgagcct

SEQ ID NO: 22780 - RNA, 21 nt, synthetic construct
  source 1..21: mol_type = other RNA
gcaatttgcttttcagttttt

SEQ ID NO: 22781 - RNA, 21 nt, synthetic construct
  source 1..21: mol_type = other RNA
gcacaagcccttaggcaggtg

SEQ ID NO: 22782 - RNA, 21 nt, synthetic construct
  source 1..21: mol_type = other RNA
gcacatgccatctgtcccctt

SEQ ID NO: 22783 - RNA, 21 nt, synthetic construct
  source 1..21: mol_type = other RNA
gcaccaaactgaactttctcc

SEQ ID NO: 22784 - RNA, 21 nt, synthetic construct
  source 1..21: mol_type = other RNA
gcacctttactcctaaataat

SEQ ID NO: 22785 - RNA, 21 nt, synthetic construct
  source 1..21: mol_type = other RNA
gcactaaaactagtgcatttc

SEQ ID NO: 22786 - RNA, 21 nt, synthetic construct
  source 1..21: mol_type = other RNA
gcactagttttagtgcttcat

SEQ ID NO: 22787 - RNA, 21 nt, synthetic construct
  source 1..21: mol_type = other RNA
gcactgaagacacacactcac

SEQ ID NO: 22788 - RNA, 21 nt, synthetic construct
  source 1..21: mol_type = other RNA
gcagaagtgagtgtgtgtctt

SEQ ID NO: 22789 - RNA, 21 nt, synthetic construct
  source 1..21: mol_type = other RNA
gcagacaccaccttcaccaac

SEQ ID NO: 22790 - RNA, 21 nt, synthetic construct
  source 1..21: mol_type = other RNA
gcagagtacaaggctggtgtt

SEQ ID NO: 22791 - RNA, 21 nt, synthetic construct
  source 1..21: mol_type = other RNA
gcaggaatattgcagaagtga

SEQ ID NO: 22792 - RNA, 21 nt, synthetic construct
  source 1..21: mol_type = other RNA
gcaggtgctactattatccct

SEQ ID NO: 22793 - RNA, 21 nt, synthetic construct
  source 1..21: mol_type = other RNA
gcagtgagttattattccacc

SEQ ID NO: 22794 - RNA, 21 nt, synthetic construct
  source 1..21: mol_type = other RNA
gcagtggtggaataataactc

SEQ ID NO: 22795 - RNA, 21 nt, synthetic construct
  source 1..21: mol_type = other RNA
gcagttagtgtttttatccat

SEQ ID NO: 22796 - RNA, 21 nt, synthetic construct
  source 1..21: mol_type = other RNA
gcagttggacatattttggtt

SEQ ID NO: 22797 - RNA, 21 nt, synthetic construct
  source 1..21: mol_type = other RNA
gcagtttaagatgaaatgcac

SEQ ID NO: 22798 - RNA, 21 nt, synthetic construct
  source 1..21: mol_type = other RNA
gcataaccacagtagggttgt

SEQ ID NO: 22799 - RNA, 21 nt, synthetic construct
  source 1..21: mol_type = other RNA
gcataatgaacccattttcaa

SEQ ID NO: 22800 - RNA, 21 nt, synthetic construct
  source 1..21: mol_type = other RNA
gcatcttatcgagaggcacat

SEQ ID NO: 22801 - RNA, 21 nt, synthetic construct
  source 1..21: mol_type = other RNA
gcatcttggacctcaactctc

SEQ ID NO: 22802 - RNA, 21 nt, synthetic construct
  source 1..21: mol_type = other RNA
gcatggataaaaacactaact

SEQ ID NO: 22803 - RNA, 21 nt, synthetic construct
  source 1..21: mol_type = other RNA
gcatgtaagtaacaattttag

SEQ ID NO: 22804 - RNA, 21 nt, synthetic construct
  source 1..21: mol_type = other RNA
gcatgtgcctctcgataagat

SEQ ID NO: 22805 - RNA, 21 nt, synthetic construct
  source 1..21: mol_type = other RNA
gcattaatctcgagccttctt

SEQ ID NO: 22806 - RNA, 21 nt, synthetic construct
  source 1..21: mol_type = other RNA
gcattcttggcaggaatattg

SEQ ID NO: 22807 - RNA, 21 nt, synthetic construct
  source 1..21: mol_type = other RNA
gcatttcatcttaaactgcaa

SEQ ID NO: 22808 - RNA, 21 nt, synthetic construct
  source 1..21: mol_type = other RNA
gcatttgaaaatgggttcatt

SEQ ID NO: 22809 - RNA, 21 nt, synthetic construct
  source 1..21: mol_type = other RNA
gccaaaagttaatgactttgg

SEQ ID NO: 22810 - RNA, 21 nt, synthetic construct
  source 1..21: mol_type = other RNA
gccaaagtcattaacttttgg

SEQ ID NO: 22811 - RNA, 21 nt, synthetic construct
  source 1..21: mol_type = other RNA
gccaaataccaaagccagcta

SEQ ID NO: 22812 - RNA, 21 nt, synthetic construct
  source 1..21: mol_type = other RNA
gccaagaatgcctcatctgaa

SEQ ID NO: 22813 - RNA, 21 nt, synthetic construct
  source 1..21: mol_type = other RNA
gccaagcgatgatgattttct

SEQ ID NO: 22814 - RNA, 21 nt, synthetic construct
  source 1..21: mol_type = other RNA
gccaaggccctgtgactttag

SEQ ID NO: 22815 - RNA, 21 nt, synthetic construct
  source 1..21: mol_type = other RNA
gccagaaaggggacagatggc

SEQ ID NO: 22816 - RNA, 21 nt, synthetic construct
  source 1..21: mol_type = other RNA
gccagctaaagtcacagggcc

SEQ ID NO: 22817 - RNA, 21 nt, synthetic construct
  source 1..21: mol_type = other RNA
gccaggtctctccactgtcaa

SEQ ID NO: 22818 - RNA, 21 nt, synthetic construct
  source 1..21: mol_type = other RNA
gccatctgtcccctttctggc

SEQ ID NO: 22819 - RNA, 21 nt, synthetic construct
  source 1..21: mol_type = other RNA
gcccaggctggtttcaaactc

SEQ ID NO: 22820 - RNA, 21 nt, synthetic construct
  source 1..21: mol_type = other RNA
gcccatagtcccagttactcg

SEQ ID NO: 22821 - RNA, 21 nt, synthetic construct
  source 1..21: mol_type = other RNA
gccctgtgactttagctggct

SEQ ID NO: 22822 - RNA, 21 nt, synthetic construct
  source 1..21: mol_type = other RNA
gcccttaggcaggtgctacta

SEQ ID NO: 22823 - RNA, 21 nt, synthetic construct
  source 1..21: mol_type = other RNA
gcctcatctgaatctaatctc

SEQ ID NO: 22824 - RNA, 21 nt, synthetic construct
  source 1..21: mol_type = other RNA
gcctcggtttccttctctgta

SEQ ID NO: 22825 - RNA, 21 nt, synthetic construct
  source 1..21: mol_type = other RNA
gcctctcgataagatgcactg

SEQ ID NO: 22826 - RNA, 21 nt, synthetic construct
  source 1..21: mol_type = other RNA
gcctgagccttccgagtaact

SEQ ID NO: 22827 - RNA, 21 nt, synthetic construct
  source 1..21: mol_type = other RNA
gcctgtattctttgttaaaaa

SEQ ID NO: 22828 - RNA, 21 nt, synthetic construct
  source 1..21: mol_type = other RNA
gccttccgagtaactgggact

SEQ ID NO: 22829 - RNA, 21 nt, synthetic construct
  source 1..21: mol_type = other RNA
gccttcttcagtctggatcag

SEQ ID NO: 22830 - RNA, 21 nt, synthetic construct
  source 1..21: mol_type = other RNA
gccttggcctgtattctttgt

SEQ ID NO: 22831 - RNA, 21 nt, synthetic construct
  source 1..21: mol_type = other RNA
gccttgtactctgcttaatat

SEQ ID NO: 22832 - RNA, 21 nt, synthetic construct
  source 1..21: mol_type = other RNA
gcgaggtgttgtggtacacgc

SEQ ID NO: 22833 - RNA, 21 nt, synthetic construct
  source 1..21: mol_type = other RNA
gcgatgatgattttctcttta

SEQ ID NO: 22834 - RNA, 21 nt, synthetic construct
  source 1..21: mol_type = other RNA
gcgatgttaactttgatcagt

SEQ ID NO: 22835 - RNA, 21 nt, synthetic construct
  source 1..21: mol_type = other RNA
gcgtgtaccacaacacctcgc

SEQ ID NO: 22836 - RNA, 21 nt, synthetic construct
  source 1..21: mol_type = other RNA
gctaaagtcacagggccttgg

SEQ ID NO: 22837 - RNA, 21 nt, synthetic construct
  source 1..21: mol_type = other RNA
gctactattatccctgtttta

SEQ ID NO: 22838 - RNA, 21 nt, synthetic construct
  source 1..21: mol_type = other RNA
gctcactatatgtgattcctt

SEQ ID NO: 22839 - RNA, 21 nt, synthetic construct
  source 1..21: mol_type = other RNA
gctcaggcaggaggattgctt

SEQ ID NO: 22840 - RNA, 21 nt, synthetic construct
  source 1..21: mol_type = other RNA
gctccaccaacacctcagact

SEQ ID NO: 22841 - RNA, 21 nt, synthetic construct
  source 1..21: mol_type = other RNA
gctcgagattaatgcaaaagc

SEQ ID NO: 22842 - RNA, 21 nt, synthetic construct
  source 1..21: mol_type = other RNA
gctcttcagtctgtctttctc

SEQ ID NO: 22843 - RNA, 21 nt, synthetic construct
  source 1..21: mol_type = other RNA
gctgaggtggaaggatcactt

SEQ ID NO: 22844 - RNA, 21 nt, synthetic construct
  source 1..21: mol_type = other RNA
gctgatccagactgaagaagg

SEQ ID NO: 22845 - RNA, 21 nt, synthetic construct
  source 1..21: mol_type = other RNA
gctgatctgggattgcatctt

SEQ ID NO: 22846 - RNA, 21 nt, synthetic construct
  source 1..21: mol_type = other RNA
gctgattttgacaaccctact

SEQ ID NO: 22847 - RNA, 21 nt, synthetic construct
  source 1..21: mol_type = other RNA
gctgcagtgagttattattcc

SEQ ID NO: 22848 - RNA, 21 nt, synthetic construct
  source 1..21: mol_type = other RNA
gctggagtgcagtggtggaat

SEQ ID NO: 22849 - RNA, 21 nt, synthetic construct
  source 1..21: mol_type = other RNA
gctggctttggtatttggcca

SEQ ID NO: 22850 - RNA, 21 nt, synthetic construct
  source 1..21: mol_type = other RNA
gctgggatttaaaccaaaata

SEQ ID NO: 22851 - RNA, 21 nt, synthetic construct
  source 1..21: mol_type = other RNA
gctggtatatcttatgtttat

SEQ ID NO: 22852 - RNA, 21 nt, synthetic construct
  source 1..21: mol_type = other RNA
gctggtgttttgtaaactgtc

SEQ ID NO: 22853 - RNA, 21 nt, synthetic construct
  source 1..21: mol_type = other RNA
gctggtttcaaactcaagtga

SEQ ID NO: 22854 - RNA, 21 nt, synthetic construct
  source 1..21: mol_type = other RNA
gcttaatatgtcaatgtcaca

SEQ ID NO: 22855 - RNA, 21 nt, synthetic construct
  source 1..21: mol_type = other RNA
gcttaggagatgaagtctgag

SEQ ID NO: 22856 - RNA, 21 nt, synthetic construct
  source 1..21: mol_type = other RNA
gcttcatctgtaaaactactt

SEQ ID NO: 22857 - RNA, 21 nt, synthetic construct
  source 1..21: mol_type = other RNA
gcttgctcactatatgtgatt

SEQ ID NO: 22858 - RNA, 21 nt, synthetic construct
  source 1..21: mol_type = other RNA
gcttggcatggataaaaacac

SEQ ID NO: 22859 - RNA, 21 nt, synthetic construct
  source 1..21: mol_type = other RNA
gctttgcagttggacatattt

SEQ ID NO: 22860 - RNA, 21 nt, synthetic construct
  source 1..21: mol_type = other RNA
gctttggtatttggccaaaag

SEQ ID NO: 22861 - RNA, 21 nt, synthetic construct
  source 1..21: mol_type = other RNA
gcttttcagtttttggtcaat

SEQ ID NO: 22862 - RNA, 21 nt, synthetic construct
  source 1..21: mol_type = other RNA
gcttttgcattaatctcgagc

SEQ ID NO: 22863 - RNA, 21 nt, synthetic construct
  source 1..21: mol_type = other RNA
ggaaaccgaggcttaggagat

SEQ ID NO: 22864 - RNA, 21 nt, synthetic construct
  source 1..21: mol_type = other RNA
ggaaggatcacttgagtttga

SEQ ID NO: 22865 - RNA, 21 nt, synthetic construct
  source 1..21: mol_type = other RNA
ggaataataactcactgcagc

SEQ ID NO: 22866 - RNA, 21 nt, synthetic construct
  source 1..21: mol_type = other RNA
ggaataatagtaacttgacag

SEQ ID NO: 22867 - RNA, 21 nt, synthetic construct
  source 1..21: mol_type = other RNA
ggaatattgcagaagtgagtg

SEQ ID NO: 22868 - RNA, 21 nt, synthetic construct
  source 1..21: mol_type = other RNA
ggaatcacatatagtgagcaa

SEQ ID NO: 22869 - RNA, 21 nt, synthetic construct
  source 1..21: mol_type = other RNA
ggacaaatttgcataaccaca

SEQ ID NO: 22870 - RNA, 21 nt, synthetic construct
  source 1..21: mol_type = other RNA
ggacactactgggacaatttt

SEQ ID NO: 22871 - RNA, 21 nt, synthetic construct
  source 1..21: mol_type = other RNA
ggacagatggcatgtgcctct

SEQ ID NO: 22872 - RNA, 21 nt, synthetic construct
  source 1..21: mol_type = other RNA
ggacatattttggtttaaatc

SEQ ID NO: 22873 - RNA, 21 nt, synthetic construct
  source 1..21: mol_type = other RNA
ggacctcaactctcccctttt

SEQ ID NO: 22874 - RNA, 21 nt, synthetic construct
  source 1..21: mol_type = other RNA
ggactatgggcgtgtaccaca

SEQ ID NO: 22875 - RNA, 21 nt, synthetic construct
  source 1..21: mol_type = other RNA
ggagaaagttcagtttggtgc

SEQ ID NO: 22876 - RNA, 21 nt, synthetic construct
  source 1..21: mol_type = other RNA
ggagagacctggcagacacca

SEQ ID NO: 22877 - RNA, 21 nt, synthetic construct
  source 1..21: mol_type = other RNA
ggagagttgaggtccaagatg

SEQ ID NO: 22878 - RNA, 21 nt, synthetic construct
  source 1..21: mol_type = other RNA
ggagatgaagtctgaggtgtt

SEQ ID NO: 22879 - RNA, 21 nt, synthetic construct
  source 1..21: mol_type = other RNA
ggagctgggatttaaaccaaa

SEQ ID NO: 22880 - RNA, 21 nt, synthetic construct
  source 1..21: mol_type = other RNA
ggaggtgaccctaagtaacaa

SEQ ID NO: 22881 - RNA, 21 nt, synthetic construct
  source 1..21: mol_type = other RNA
ggagtaaaggtgcataatgaa

SEQ ID NO: 22882 - RNA, 21 nt, synthetic construct
  source 1..21: mol_type = other RNA
ggagtgcagtggtggaataat

SEQ ID NO: 22883 - RNA, 21 nt, synthetic construct
  source 1..21: mol_type = other RNA
ggagttcaaggctgcagtgag

SEQ ID NO: 22884 - RNA, 21 nt, synthetic construct
  source 1..21: mol_type = other RNA
ggataaaaacactaactgcca

SEQ ID NO: 22885 - RNA, 21 nt, synthetic construct
  source 1..21: mol_type = other RNA
ggataatagtagcacctgcct

SEQ ID NO: 22886 - RNA, 21 nt, synthetic construct
  source 1..21: mol_type = other RNA
ggatcacttgagtttgaaacc

SEQ ID NO: 22887 - RNA, 21 nt, synthetic construct
  source 1..21: mol_type = other RNA
ggatcagctcttcagtctgtc

SEQ ID NO: 22888 - RNA, 21 nt, synthetic construct
  source 1..21: mol_type = other RNA
ggattgaccaaaaactgaaaa

SEQ ID NO: 22889 - RNA, 21 nt, synthetic construct
  source 1..21: mol_type = other RNA
ggattgcatcttggacctcaa

SEQ ID NO: 22890 - RNA, 21 nt, synthetic construct
  source 1..21: mol_type = other RNA
ggattgtatagtgtatcaata

SEQ ID NO: 22891 - RNA, 21 nt, synthetic construct
  source 1..21: mol_type = other RNA
ggatttaaaccaaaatatgtc

SEQ ID NO: 22892 - RNA, 21 nt, synthetic construct
  source 1..21: mol_type = other RNA
ggcacatgccatctgtcccct

SEQ ID NO: 22893 - RNA, 21 nt, synthetic construct
  source 1..21: mol_type = other RNA
ggcagacaccaccttcaccaa

SEQ ID NO: 22894 - RNA, 21 nt, synthetic construct
  source 1..21: mol_type = other RNA
ggcaggaatattgcagaagtg

SEQ ID NO: 22895 - RNA, 21 nt, synthetic construct
  source 1..21: mol_type = other RNA
ggcaggtgctactattatccc

SEQ ID NO: 22896 - RNA, 21 nt, synthetic construct
  source 1..21: mol_type = other RNA
ggcagttagtgtttttatcca

SEQ ID NO: 22897 - RNA, 21 nt, synthetic construct
  source 1..21: mol_type = other RNA
ggcatggataaaaacactaac

SEQ ID NO: 22898 - RNA, 21 nt, synthetic construct
  source 1..21: mol_type = other RNA
ggcatgtgcctctcgataaga

SEQ ID NO: 22899 - RNA, 21 nt, synthetic construct
  source 1..21: mol_type = other RNA
ggcattcttggcaggaatatt

SEQ ID NO: 22900 - RNA, 21 nt, synthetic construct
  source 1..21: mol_type = other RNA
ggccaaaagttaatgactttg

SEQ ID NO: 22901 - RNA, 21 nt, synthetic construct
  source 1..21: mol_type = other RNA
ggccaaataccaaagccagct

SEQ ID NO: 22902 - RNA, 21 nt, synthetic construct
  source 1..21: mol_type = other RNA
ggccaaggccctgtgacttta

SEQ ID NO: 22903 - RNA, 21 nt, synthetic construct
  source 1..21: mol_type = other RNA
ggccctgtgactttagctggc

SEQ ID NO: 22904 - RNA, 21 nt, synthetic construct
  source 1..21: mol_type = other RNA
ggcctgtattctttgttaaaa

SEQ ID NO: 22905 - RNA, 21 nt, synthetic construct
  source 1..21: mol_type = other RNA
ggccttggcctgtattctttg

SEQ ID NO: 22906 - RNA, 21 nt, synthetic construct
  source 1..21: mol_type = other RNA
ggcgatgttaactttgatcag

SEQ ID NO: 22907 - RNA, 21 nt, synthetic construct
  source 1..21: mol_type = other RNA
ggcgtgtaccacaacacctcg

SEQ ID NO: 22908 - RNA, 21 nt, synthetic construct
  source 1..21: mol_type = other RNA
ggctcaggcaggaggattgct

SEQ ID NO: 22909 - RNA, 21 nt, synthetic construct
  source 1..21: mol_type = other RNA
ggctcgagattaatgcaaaag

SEQ ID NO: 22910 - RNA, 21 nt, synthetic construct
  source 1..21: mol_type = other RNA
ggctgcagtgagttattattc

SEQ ID NO: 22911 - RNA, 21 nt, synthetic construct
  source 1..21: mol_type = other RNA
ggctggagtgcagtggtggaa

SEQ ID NO: 22912 - RNA, 21 nt, synthetic construct
  source 1..21: mol_type = other RNA
ggctggtgttttgtaaactgt

SEQ ID NO: 22913 - RNA, 21 nt, synthetic construct
  source 1..21: mol_type = other RNA
ggctggtttcaaactcaagtg

SEQ ID NO: 22914 - RNA, 21 nt, synthetic construct
  source 1..21: mol_type = other RNA
ggcttaggagatgaagtctga

SEQ ID NO: 22915 - RNA, 21 nt, synthetic construct
  source 1..21: mol_type = other RNA
ggctttggtatttggccaaaa

SEQ ID NO: 22916 - RNA, 21 nt, synthetic construct
  source 1..21: mol_type = other RNA
gggaataatagtaacttgaca

SEQ ID NO: 22917 - RNA, 21 nt, synthetic construct
  source 1..21: mol_type = other RNA
gggacactactgggacaattt

SEQ ID NO: 22918 - RNA, 21 nt, synthetic construct
  source 1..21: mol_type = other RNA
gggacagatggcatgtgcctc

SEQ ID NO: 22919 - RNA, 21 nt, synthetic construct
  source 1..21: mol_type = other RNA
gggactatgggcgtgtaccac

SEQ ID NO: 22920 - RNA, 21 nt, synthetic construct
  source 1..21: mol_type = other RNA
gggagagttgaggtccaagat

SEQ ID NO: 22921 - RNA, 21 nt, synthetic construct
  source 1..21: mol_type = other RNA
gggagttcaaggctgcagtga

SEQ ID NO: 22922 - RNA, 21 nt, synthetic construct
  source 1..21: mol_type = other RNA
gggataatagtagcacctgcc

SEQ ID NO: 22923 - RNA, 21 nt, synthetic construct
  source 1..21: mol_type = other RNA
gggattgcatcttggacctca

SEQ ID NO: 22924 - RNA, 21 nt, synthetic construct
  source 1..21: mol_type = other RNA
gggatttaaaccaaaatatgt

SEQ ID NO: 22925 - RNA, 21 nt, synthetic construct
  source 1..21: mol_type = other RNA
gggccttggcctgtattcttt

SEQ ID NO: 22926 - RNA, 21 nt, synthetic construct
  source 1..21: mol_type = other RNA
gggcgtgtaccacaacacctc

SEQ ID NO: 22927 - RNA, 21 nt, synthetic construct
  source 1..21: mol_type = other RNA
ggggacagatggcatgtgcct

SEQ ID NO: 22928 - RNA, 21 nt, synthetic construct
  source 1..21: mol_type = other RNA
ggggagagttgaggtccaaga

SEQ ID NO: 22929 - RNA, 21 nt, synthetic construct
  source 1..21: mol_type = other RNA
gggtatacggaggtgacccta

SEQ ID NO: 22930 - RNA, 21 nt, synthetic construct
  source 1..21: mol_type = other RNA
gggtcacctccgtataccctc

SEQ ID NO: 22931 - RNA, 21 nt, synthetic construct
  source 1..21: mol_type = other RNA
gggtgataaacataagatata

SEQ ID NO: 22932 - RNA, 21 nt, synthetic construct
  source 1..21: mol_type = other RNA
gggttcattatgcacctttac

SEQ ID NO: 22933 - RNA, 21 nt, synthetic construct
  source 1..21: mol_type = other RNA
gggttgtcaaaatcagcaaat

SEQ ID NO: 22934 - RNA, 21 nt, synthetic construct
  source 1..21: mol_type = other RNA
gggtttgtctgatggttatac

SEQ ID NO: 22935 - RNA, 21 nt, synthetic construct
  source 1..21: mol_type = other RNA
ggtacacgcccatagtcccag

SEQ ID NO: 22936 - RNA, 21 nt, synthetic construct
  source 1..21: mol_type = other RNA
ggtatacggaggtgaccctaa

SEQ ID NO: 22937 - RNA, 21 nt, synthetic construct
  source 1..21: mol_type = other RNA
ggtatatcttatgtttatcac

SEQ ID NO: 22938 - RNA, 21 nt, synthetic construct
  source 1..21: mol_type = other RNA
ggtatttggccaaaagttaat

SEQ ID NO: 22939 - RNA, 21 nt, synthetic construct
  source 1..21: mol_type = other RNA
ggtcaatccttatgattattt

SEQ ID NO: 22940 - RNA, 21 nt, synthetic construct
  source 1..21: mol_type = other RNA
ggtcacctccgtataccctct

SEQ ID NO: 22941 - RNA, 21 nt, synthetic construct
  source 1..21: mol_type = other RNA
ggtcataggattgtatagtgt

SEQ ID NO: 22942 - RNA, 21 nt, synthetic construct
  source 1..21: mol_type = other RNA
ggtccaagatgcaatcccaga

SEQ ID NO: 22943 - RNA, 21 nt, synthetic construct
  source 1..21: mol_type = other RNA
ggtctctccactgtcaagtta

SEQ ID NO: 22944 - RNA, 21 nt, synthetic construct
  source 1..21: mol_type = other RNA
ggtgaaggtggtgtctgccag

SEQ ID NO: 22945 - RNA, 21 nt, synthetic construct
  source 1..21: mol_type = other RNA
ggtgaccctaagtaacaagga

SEQ ID NO: 22946 - RNA, 21 nt, synthetic construct
  source 1..21: mol_type = other RNA
ggtgataaacataagatatac

SEQ ID NO: 22947 - RNA, 21 nt, synthetic construct
  source 1..21: mol_type = other RNA
ggtgcataatgaacccatttt

SEQ ID NO: 22948 - RNA, 21 nt, synthetic construct
  source 1..21: mol_type = other RNA
ggtgctactattatccctgtt

SEQ ID NO: 22949 - RNA, 21 nt, synthetic construct
  source 1..21: mol_type = other RNA
ggtgctggtatatcttatgtt

SEQ ID NO: 22950 - RNA, 21 nt, synthetic construct
  source 1..21: mol_type = other RNA
ggtggaaggatcacttgagtt

SEQ ID NO: 22951 - RNA, 21 nt, synthetic construct
  source 1..21: mol_type = other RNA
ggtggaataataactcactgc

SEQ ID NO: 22952 - RNA, 21 nt, synthetic construct
  source 1..21: mol_type = other RNA
ggtggagctgggatttaaacc

SEQ ID NO: 22953 - RNA, 21 nt, synthetic construct
  source 1..21: mol_type = other RNA
ggtggtgtctgccaggtctct

SEQ ID NO: 22954 - RNA, 21 nt, synthetic construct
  source 1..21: mol_type = other RNA
ggtgtctgccaggtctctcca

SEQ ID NO: 22955 - RNA, 21 nt, synthetic construct
  source 1..21: mol_type = other RNA
ggtgttggtggagctgggatt

SEQ ID NO: 22956 - RNA, 21 nt, synthetic construct
  source 1..21: mol_type = other RNA
ggtgttgtggtacacgcccat

SEQ ID NO: 22957 - RNA, 21 nt, synthetic construct
  source 1..21: mol_type = other RNA
ggtgttttgtaaactgtctct

SEQ ID NO: 22958 - RNA, 21 nt, synthetic construct
  source 1..21: mol_type = other RNA
ggttatactcgagattagatt

SEQ ID NO: 22959 - RNA, 21 nt, synthetic construct
  source 1..21: mol_type = other RNA
ggttatgcaaatttgtccttg

SEQ ID NO: 22960 - RNA, 21 nt, synthetic construct
  source 1..21: mol_type = other RNA
ggttcattatgcacctttact

SEQ ID NO: 22961 - RNA, 21 nt, synthetic construct
  source 1..21: mol_type = other RNA
ggttgtcaaaatcagcaaatc

SEQ ID NO: 22962 - RNA, 21 nt, synthetic construct
  source 1..21: mol_type = other RNA
ggtttaaatcccagctccacc

SEQ ID NO: 22963 - RNA, 21 nt, synthetic construct
  source 1..21: mol_type = other RNA
ggtttcaaactcaagtgatcc

SEQ ID NO: 22964 - RNA, 21 nt, synthetic construct
  source 1..21: mol_type = other RNA
ggtttccttctctgtaaaaca

SEQ ID NO: 22965 - RNA, 21 nt, synthetic construct
  source 1..21: mol_type = other RNA
ggtttgtctgatggttatact

SEQ ID NO: 22966 - RNA, 21 nt, synthetic construct
  source 1..21: mol_type = other RNA
gtaaaacagggataatagtag

SEQ ID NO: 22967 - RNA, 21 nt, synthetic construct
  source 1..21: mol_type = other RNA
gtaaactgtctctcaatttgg

SEQ ID NO: 22968 - RNA, 21 nt, synthetic construct
  source 1..21: mol_type = other RNA
gtaaaggtgcataatgaaccc

SEQ ID NO: 22969 - RNA, 21 nt, synthetic construct
  source 1..21: mol_type = other RNA
gtaacaaggaatcacatatag

SEQ ID NO: 22970 - RNA, 21 nt, synthetic construct
  source 1..21: mol_type = other RNA
gtaacaattttagagggtata

SEQ ID NO: 22971 - RNA, 21 nt, synthetic construct
  source 1..21: mol_type = other RNA
gtaactgggactatgggcgtg

SEQ ID NO: 22972 - RNA, 21 nt, synthetic construct
  source 1..21: mol_type = other RNA
gtaacttgacagtggagagac

SEQ ID NO: 22973 - RNA, 21 nt, synthetic construct
  source 1..21: mol_type = other RNA
gtaagtaacaattttagaggg

SEQ ID NO: 22974 - RNA, 21 nt, synthetic construct
  source 1..21: mol_type = other RNA
gtacaaggctggtgttttgta

SEQ ID NO: 22975 - RNA, 21 nt, synthetic construct
  source 1..21: mol_type = other RNA
gtacacgcccatagtcccagt

SEQ ID NO: 22976 - RNA, 21 nt, synthetic construct
  source 1..21: mol_type = other RNA
gtaccacaacacctcgctatt

SEQ ID NO: 22977 - RNA, 21 nt, synthetic construct
  source 1..21: mol_type = other RNA
gtactctgcttaatatgtcaa

SEQ ID NO: 22978 - RNA, 21 nt, synthetic construct
  source 1..21: mol_type = other RNA
gtagatgagattggtcatagg

SEQ ID NO: 22979 - RNA, 21 nt, synthetic construct
  source 1..21: mol_type = other RNA
gtagggttgtcaaaatcagca

SEQ ID NO: 22980 - RNA, 21 nt, synthetic construct
  source 1..21: mol_type = other RNA
gtagtgtcccttaacaataaa

SEQ ID NO: 22981 - RNA, 21 nt, synthetic construct
  source 1..21: mol_type = other RNA
gtagttttacagatgaagcac

SEQ ID NO: 22982 - RNA, 21 nt, synthetic construct
  source 1..21: mol_type = other RNA
gtataaccatcagacaaaccc

SEQ ID NO: 22983 - RNA, 21 nt, synthetic construct
  source 1..21: mol_type = other RNA
gtataccctctaaaattgtta

SEQ ID NO: 22984 - RNA, 21 nt, synthetic construct
  source 1..21: mol_type = other RNA
gtatacggaggtgaccctaag

SEQ ID NO: 22985 - RNA, 21 nt, synthetic construct
  source 1..21: mol_type = other RNA
gtatatcttatgtttatcacc

SEQ ID NO: 22986 - RNA, 21 nt, synthetic construct
  source 1..21: mol_type = other RNA
gtatcaatattagatttgctg

SEQ ID NO: 22987 - RNA, 21 nt, synthetic construct
  source 1..21: mol_type = other RNA
gtatttggccaaaagttaatg

SEQ ID NO: 22988 - RNA, 21 nt, synthetic construct
  source 1..21: mol_type = other RNA
gtcaaaatcagcaaatctaat

SEQ ID NO: 22989 - RNA, 21 nt, synthetic construct
  source 1..21: mol_type = other RNA
gtcaagttactattattccct

SEQ ID NO: 22990 - RNA, 21 nt, synthetic construct
  source 1..21: mol_type = other RNA
gtcaatgtcacaagagagaaa

SEQ ID NO: 22991 - RNA, 21 nt, synthetic construct
  source 1..21: mol_type = other RNA
gtcacaagagagaaagacaga

SEQ ID NO: 22992 - RNA, 21 nt, synthetic construct
  source 1..21: mol_type = other RNA
gtcacagggccttggcctgta

SEQ ID NO: 22993 - RNA, 21 nt, synthetic construct
  source 1..21: mol_type = other RNA
gtcacctccgtataccctcta

SEQ ID NO: 22994 - RNA, 21 nt, synthetic construct
  source 1..21: mol_type = other RNA
gtcactaaagagaaaatcatc

SEQ ID NO: 22995 - RNA, 21 nt, synthetic construct
  source 1..21: mol_type = other RNA
gtcataggattgtatagtgta

SEQ ID NO: 22996 - RNA, 21 nt, synthetic construct
  source 1..21: mol_type = other RNA
gtcattaacttttggccaaat

SEQ ID NO: 22997 - RNA, 21 nt, synthetic construct
  source 1..21: mol_type = other RNA
gtccaactgcaaagcatgtaa

SEQ ID NO: 22998 - RNA, 21 nt, synthetic construct
  source 1..21: mol_type = other RNA
gtccaagatgcaatcccagat

SEQ ID NO: 22999 - RNA, 21 nt, synthetic construct
  source 1..21: mol_type = other RNA
gtcccagtagtgtcccttaac

SEQ ID NO: 23000 - RNA, 21 nt, synthetic construct
  source 1..21: mol_type = other RNA
gtcccagttactcggaaggct

SEQ ID NO: 23001 - RNA, 21 nt, synthetic construct
  source 1..21: mol_type = other RNA
gtcccctttctggcgatgtta

SEQ ID NO: 23002 - RNA, 21 nt, synthetic construct
  source 1..21: mol_type = other RNA
gtcccttaacaataaaaaggg

SEQ ID NO: 23003 - RNA, 21 nt, synthetic construct
  source 1..21: mol_type = other RNA
gtccgggagttcaaggctgca

SEQ ID NO: 23004 - RNA, 21 nt, synthetic construct
  source 1..21: mol_type = other RNA
gtccttgttctaaggaaataa

SEQ ID NO: 23005 - RNA, 21 nt, synthetic construct
  source 1..21: mol_type = other RNA
gtcgggtgataaacataagat

SEQ ID NO: 23006 - RNA, 21 nt, synthetic construct
  source 1..21: mol_type = other RNA
gtctctacaaaaagtaggaaa

SEQ ID NO: 23007 - RNA, 21 nt, synthetic construct
  source 1..21: mol_type = other RNA
gtctctccactgtcaagttac

SEQ ID NO: 23008 - RNA, 21 nt, synthetic construct
  source 1..21: mol_type = other RNA
gtctgaggtgttggtggagct

SEQ ID NO: 23009 - RNA, 21 nt, synthetic construct
  source 1..21: mol_type = other RNA
gtctgatggttatactcgaga

SEQ ID NO: 23010 - RNA, 21 nt, synthetic construct
  source 1..21: mol_type = other RNA
gtctgccaggtctctccactg

SEQ ID NO: 23011 - RNA, 21 nt, synthetic construct
  source 1..21: mol_type = other RNA
gtctggatcagctcttcagtc

SEQ ID NO: 23012 - RNA, 21 nt, synthetic construct
  source 1..21: mol_type = other RNA
gtctgtcactaaagagaaaat

SEQ ID NO: 23013 - RNA, 21 nt, synthetic construct
  source 1..21: mol_type = other RNA
gtctgtctttctctcttgtga

SEQ ID NO: 23014 - RNA, 21 nt, synthetic construct
  source 1..21: mol_type = other RNA
gtcttcagtgcatcttatcga

SEQ ID NO: 23015 - RNA, 21 nt, synthetic construct
  source 1..21: mol_type = other RNA
gtctttctctcttgtgacatt

SEQ ID NO: 23016 - RNA, 21 nt, synthetic construct
  source 1..21: mol_type = other RNA
gtgaaggtggtgtctgccagg

SEQ ID NO: 23017 - RNA, 21 nt, synthetic construct
  source 1..21: mol_type = other RNA
gtgacattgacatattaagca

SEQ ID NO: 23018 - RNA, 21 nt, synthetic construct
  source 1..21: mol_type = other RNA
gtgaccctaagtaacaaggaa

SEQ ID NO: 23019 - RNA, 21 nt, synthetic construct
  source 1..21: mol_type = other RNA
gtgactgagcgagaccctgtc

SEQ ID NO: 23020 - RNA, 21 nt, synthetic construct
  source 1..21: mol_type = other RNA
gtgactttagctggctttggt

SEQ ID NO: 23021 - RNA, 21 nt, synthetic construct
  source 1..21: mol_type = other RNA
gtgagaccccgtctctacaaa

SEQ ID NO: 23022 - RNA, 21 nt, synthetic construct
  source 1..21: mol_type = other RNA
gtgagcaagcaatttgctttt

SEQ ID NO: 23023 - RNA, 21 nt, synthetic construct
  source 1..21: mol_type = other RNA
gtgagtgtgtgtcttcagtgc

SEQ ID NO: 23024 - RNA, 21 nt, synthetic construct
  source 1..21: mol_type = other RNA
gtgagttattattccaccact

SEQ ID NO: 23025 - RNA, 21 nt, synthetic construct
  source 1..21: mol_type = other RNA
gtgataaacataagatatacc

SEQ ID NO: 23026 - RNA, 21 nt, synthetic construct
  source 1..21: mol_type = other RNA
gtgatccttccacctcagcct

SEQ ID NO: 23027 - RNA, 21 nt, synthetic construct
  source 1..21: mol_type = other RNA
gtgattccttgttacttaggg

SEQ ID NO: 23028 - RNA, 21 nt, synthetic construct
  source 1..21: mol_type = other RNA
gtgcagtggtggaataataac

SEQ ID NO: 23029 - RNA, 21 nt, synthetic construct
  source 1..21: mol_type = other RNA
gtgcataatgaacccattttc

SEQ ID NO: 23030 - RNA, 21 nt, synthetic construct
  source 1..21: mol_type = other RNA
gtgcatcttatcgagaggcac

SEQ ID NO: 23031 - RNA, 21 nt, synthetic construct
  source 1..21: mol_type = other RNA
gtgcatttcatcttaaactgc

SEQ ID NO: 23032 - RNA, 21 nt, synthetic construct
  source 1..21: mol_type = other RNA
gtgcctctcgataagatgcac

SEQ ID NO: 23033 - RNA, 21 nt, synthetic construct
  source 1..21: mol_type = other RNA
gtgctactattatccctgttt

SEQ ID NO: 23034 - RNA, 21 nt, synthetic construct
  source 1..21: mol_type = other RNA
gtgctggtatatcttatgttt

SEQ ID NO: 23035 - RNA, 21 nt, synthetic construct
  source 1..21: mol_type = other RNA
gtgcttcatctgtaaaactac

SEQ ID NO: 23036 - RNA, 21 nt, synthetic construct
  source 1..21: mol_type = other RNA
gtggaaggatcacttgagttt

SEQ ID NO: 23037 - RNA, 21 nt, synthetic construct
  source 1..21: mol_type = other RNA
gtggaataataactcactgca

SEQ ID NO: 23038 - RNA, 21 nt, synthetic construct
  source 1..21: mol_type = other RNA
gtggagagacctggcagacac

SEQ ID NO: 23039 - RNA, 21 nt, synthetic construct
  source 1..21: mol_type = other RNA
gtggagctgggatttaaacca

SEQ ID NO: 23040 - RNA, 21 nt, synthetic construct
  source 1..21: mol_type = other RNA
gtggtacacgcccatagtccc

SEQ ID NO: 23041 - RNA, 21 nt, synthetic construct
  source 1..21: mol_type = other RNA
gtggtggaataataactcact

SEQ ID NO: 23042 - RNA, 21 nt, synthetic construct
  source 1..21: mol_type = other RNA
gtggtgtctgccaggtctctc

SEQ ID NO: 23043 - RNA, 21 nt, synthetic construct
  source 1..21: mol_type = other RNA
gtggttatgcaaatttgtcct

SEQ ID NO: 23044 - RNA, 21 nt, synthetic construct
  source 1..21: mol_type = other RNA
gtgtaccacaacacctcgcta

SEQ ID NO: 23045 - RNA, 21 nt, synthetic construct
  source 1..21: mol_type = other RNA
gtgtatcaatattagatttgc

SEQ ID NO: 23046 - RNA, 21 nt, synthetic construct
  source 1..21: mol_type = other RNA
gtgtcccttaacaataaaaag

SEQ ID NO: 23047 - RNA, 21 nt, synthetic construct
  source 1..21: mol_type = other RNA
gtgtctgccaggtctctccac

SEQ ID NO: 23048 - RNA, 21 nt, synthetic construct
  source 1..21: mol_type = other RNA
gtgtcttcagtgcatcttatc

SEQ ID NO: 23049 - RNA, 21 nt, synthetic construct
  source 1..21: mol_type = other RNA
gtgtgtcttcagtgcatctta

SEQ ID NO: 23050 - RNA, 21 nt, synthetic construct
  source 1..21: mol_type = other RNA
gtgtgtgtcttcagtgcatct

SEQ ID NO: 23051 - RNA, 21 nt, synthetic construct
  source 1..21: mol_type = other RNA
gtgttggtggagctgggattt

SEQ ID NO: 23052 - RNA, 21 nt, synthetic construct
  source 1..21: mol_type = other RNA
gtgttgtggtacacgcccata

SEQ ID NO: 23053 - RNA, 21 nt, synthetic construct
  source 1..21: mol_type = other RNA
gtgttttgtaaactgtctctc

SEQ ID NO: 23054 - RNA, 21 nt, synthetic construct
  source 1..21: mol_type = other RNA
gtgtttttatccatgccaagc

SEQ ID NO: 23055 - RNA, 21 nt, synthetic construct
  source 1..21: mol_type = other RNA
gttaacatcgccagaaagggg

SEQ ID NO: 23056 - RNA, 21 nt, synthetic construct
  source 1..21: mol_type = other RNA
gttaactttgatcagttggtg

SEQ ID NO: 23057 - RNA, 21 nt, synthetic construct
  source 1..21: mol_type = other RNA
gttaagggacactactgggac

SEQ ID NO: 23058 - RNA, 21 nt, synthetic construct
  source 1..21: mol_type = other RNA
gttaatgactttggcagttag

SEQ ID NO: 23059 - RNA, 21 nt, synthetic construct
  source 1..21: mol_type = other RNA
gttactcggaaggctcaggca

SEQ ID NO: 23060 - RNA, 21 nt, synthetic construct
  source 1..21: mol_type = other RNA
gttacttacatgctttgcagt

SEQ ID NO: 23061 - RNA, 21 nt, synthetic construct
  source 1..21: mol_type = other RNA
gttacttagggtcacctccgt

SEQ ID NO: 23062 - RNA, 21 nt, synthetic construct
  source 1..21: mol_type = other RNA
gttagtgtttttatccatgcc

SEQ ID NO: 23063 - RNA, 21 nt, synthetic construct
  source 1..21: mol_type = other RNA
gttatactcgagattagattc

SEQ ID NO: 23064 - RNA, 21 nt, synthetic construct
  source 1..21: mol_type = other RNA
gttatgcaaatttgtccttgt

SEQ ID NO: 23065 - RNA, 21 nt, synthetic construct
  source 1..21: mol_type = other RNA
gttattattccaccactgcac

SEQ ID NO: 23066 - RNA, 21 nt, synthetic construct
  source 1..21: mol_type = other RNA
gttcaaggctgcagtgagtta

SEQ ID NO: 23067 - RNA, 21 nt, synthetic construct
  source 1..21: mol_type = other RNA
gttcagtttggtgctggtata

SEQ ID NO: 23068 - RNA, 21 nt, synthetic construct
  source 1..21: mol_type = other RNA
gttcattatgcacctttactc

SEQ ID NO: 23069 - RNA, 21 nt, synthetic construct
  source 1..21: mol_type = other RNA
gttctaaggaaataaatactg

SEQ ID NO: 23070 - RNA, 21 nt, synthetic construct
  source 1..21: mol_type = other RNA
gttgaggtccaagatgcaatc

SEQ ID NO: 23071 - RNA, 21 nt, synthetic construct
  source 1..21: mol_type = other RNA
gttgcccaggctggtttcaaa

SEQ ID NO: 23072 - RNA, 21 nt, synthetic construct
  source 1..21: mol_type = other RNA
gttggacatattttggtttaa

SEQ ID NO: 23073 - RNA, 21 nt, synthetic construct
  source 1..21: mol_type = other RNA
gttggtgaaggtggtgtctgc

SEQ ID NO: 23074 - RNA, 21 nt, synthetic construct
  source 1..21: mol_type = other RNA
gttggtggagctgggatttaa

SEQ ID NO: 23075 - RNA, 21 nt, synthetic construct
  source 1..21: mol_type = other RNA
gttgtagatgagattggtcat

SEQ ID NO: 23076 - RNA, 21 nt, synthetic construct
  source 1..21: mol_type = other RNA
gttgtcaaaatcagcaaatct

SEQ ID NO: 23077 - RNA, 21 nt, synthetic construct
  source 1..21: mol_type = other RNA
gttgtggtacacgcccatagt

SEQ ID NO: 23078 - RNA, 21 nt, synthetic construct
  source 1..21: mol_type = other RNA
gtttaaatcccagctccacca

SEQ ID NO: 23079 - RNA, 21 nt, synthetic construct
  source 1..21: mol_type = other RNA
gtttaagatgaaatgcactag

SEQ ID NO: 23080 - RNA, 21 nt, synthetic construct
  source 1..21: mol_type = other RNA
gtttacaaaacaccagccttg

SEQ ID NO: 23081 - RNA, 21 nt, synthetic construct
  source 1..21: mol_type = other RNA
gtttatcacccgacagttgtt

SEQ ID NO: 23082 - RNA, 21 nt, synthetic construct
  source 1..21: mol_type = other RNA
gtttcaaactcaagtgatcct

SEQ ID NO: 23083 - RNA, 21 nt, synthetic construct
  source 1..21: mol_type = other RNA
gtttccttctctgtaaaacag

SEQ ID NO: 23084 - RNA, 21 nt, synthetic construct
  source 1..21: mol_type = other RNA
gtttggtgctggtatatctta

SEQ ID NO: 23085 - RNA, 21 nt, synthetic construct
  source 1..21: mol_type = other RNA
gtttgtctgatggttatactc

SEQ ID NO: 23086 - RNA, 21 nt, synthetic construct
  source 1..21: mol_type = other RNA
gttttacagagaaggaaaccg

SEQ ID NO: 23087 - RNA, 21 nt, synthetic construct
  source 1..21: mol_type = other RNA
gttttacagatgaagcactaa

SEQ ID NO: 23088 - RNA, 21 nt, synthetic construct
  source 1..21: mol_type = other RNA
gttttagtgcttcatctgtaa

SEQ ID NO: 23089 - RNA, 21 nt, synthetic construct
  source 1..21: mol_type = other RNA
gttttgtaaactgtctctcaa

SEQ ID NO: 23090 - RNA, 21 nt, synthetic construct
  source 1..21: mol_type = other RNA
gtttttatccatgccaagcga

SEQ ID NO: 23091 - RNA, 21 nt, synthetic construct
  source 1..21: mol_type = other RNA
gtttttggtcaatccttatga

SEQ ID NO: 23092 - RNA, 21 nt, synthetic construct
  source 1..21: mol_type = other RNA
taaaaacactaactgccaaag

SEQ ID NO: 23093 - RNA, 21 nt, synthetic construct
  source 1..21: mol_type = other RNA
taaaaaggggagagttgaggt

SEQ ID NO: 23094 - RNA, 21 nt, synthetic construct
  source 1..21: mol_type = other RNA
taaaacagggataatagtagc

SEQ ID NO: 23095 - RNA, 21 nt, synthetic construct
  source 1..21: mol_type = other RNA
taaaactagtgcatttcatct

SEQ ID NO: 23096 - RNA, 21 nt, synthetic construct
  source 1..21: mol_type = other RNA
taaacataagatataccagca

SEQ ID NO: 23097 - RNA, 21 nt, synthetic construct
  source 1..21: mol_type = other RNA
taaaccaaaatatgtccaact

SEQ ID NO: 23098 - RNA, 21 nt, synthetic construct
  source 1..21: mol_type = other RNA
taaactgcaaattataaaggg

SEQ ID NO: 23099 - RNA, 21 nt, synthetic construct
  source 1..21: mol_type = other RNA
taaactgtctctcaatttggg

SEQ ID NO: 23100 - RNA, 21 nt, synthetic construct
  source 1..21: mol_type = other RNA
taaagagaaaatcatcatcgc

SEQ ID NO: 23101 - RNA, 21 nt, synthetic construct
  source 1..21: mol_type = other RNA
taaaggtgcataatgaaccca

SEQ ID NO: 23102 - RNA, 21 nt, synthetic construct
  source 1..21: mol_type = other RNA
taaagtcacagggccttggcc

SEQ ID NO: 23103 - RNA, 21 nt, synthetic construct
  source 1..21: mol_type = other RNA
taaagttgtagatgagattgg

SEQ ID NO: 23104 - RNA, 21 nt, synthetic construct
  source 1..21: mol_type = other RNA
taaatcccagctccaccaaca

SEQ ID NO: 23105 - RNA, 21 nt, synthetic construct
  source 1..21: mol_type = other RNA
taacaaagaatacaggccaag

SEQ ID NO: 23106 - RNA, 21 nt, synthetic construct
  source 1..21: mol_type = other RNA
taacaactgtcgggtgataaa

SEQ ID NO: 23107 - RNA, 21 nt, synthetic construct
  source 1..21: mol_type = other RNA
taacaaggaatcacatatagt

SEQ ID NO: 23108 - RNA, 21 nt, synthetic construct
  source 1..21: mol_type = other RNA
taacaataaaaaggggagagt

SEQ ID NO: 23109 - RNA, 21 nt, synthetic construct
  source 1..21: mol_type = other RNA
taacaattttagagggtatac

SEQ ID NO: 23110 - RNA, 21 nt, synthetic construct
  source 1..21: mol_type = other RNA
taacatcgccagaaaggggac

SEQ ID NO: 23111 - RNA, 21 nt, synthetic construct
  source 1..21: mol_type = other RNA
taaccacagtagggttgtcaa

SEQ ID NO: 23112 - RNA, 21 nt, synthetic construct
  source 1..21: mol_type = other RNA
taaccatcagacaaacccaaa

SEQ ID NO: 23113 - RNA, 21 nt, synthetic construct
  source 1..21: mol_type = other RNA
taactcactgcagccttgaac

SEQ ID NO: 23114 - RNA, 21 nt, synthetic construct
  source 1..21: mol_type = other RNA
taactgccaaagtcattaact

SEQ ID NO: 23115 - RNA, 21 nt, synthetic construct
  source 1..21: mol_type = other RNA
taactgggactatgggcgtgt

SEQ ID NO: 23116 - RNA, 21 nt, synthetic construct
  source 1..21: mol_type = other RNA
taacttgacagtggagagacc

SEQ ID NO: 23117 - RNA, 21 nt, synthetic construct
  source 1..21: mol_type = other RNA
taactttgatcagttggtgaa

SEQ ID NO: 23118 - RNA, 21 nt, synthetic construct
  source 1..21: mol_type = other RNA
taacttttggccaaataccaa

SEQ ID NO: 23119 - RNA, 21 nt, synthetic construct
  source 1..21: mol_type = other RNA
taagatataccagcaccaaac

SEQ ID NO: 23120 - RNA, 21 nt, synthetic construct
  source 1..21: mol_type = other RNA
taagatgaaatgcactagttt

SEQ ID NO: 23121 - RNA, 21 nt, synthetic construct
  source 1..21: mol_type = other RNA
taagatgcactgaagacacac

SEQ ID NO: 23122 - RNA, 21 nt, synthetic construct
  source 1..21: mol_type = other RNA
taagcagagtacaaggctggt

SEQ ID NO: 23123 - RNA, 21 nt, synthetic construct
  source 1..21: mol_type = other RNA
taagcatttgaaaatgggttc

SEQ ID NO: 23124 - RNA, 21 nt, synthetic construct
  source 1..21: mol_type = other RNA
taagcctcggtttccttctct

SEQ ID NO: 23125 - RNA, 21 nt, synthetic construct
  source 1..21: mol_type = other RNA
taaggattgaccaaaaactga

SEQ ID NO: 23126 - RNA, 21 nt, synthetic construct
  source 1..21: mol_type = other RNA
taagggacactactgggacaa

SEQ ID NO: 23127 - RNA, 21 nt, synthetic construct
  source 1..21: mol_type = other RNA
taagtaacaaggaatcacata

SEQ ID NO: 23128 - RNA, 21 nt, synthetic construct
  source 1..21: mol_type = other RNA
taagtaacaattttagagggt

SEQ ID NO: 23129 - RNA, 21 nt, synthetic construct
  source 1..21: mol_type = other RNA
taataactcactgcagccttg

SEQ ID NO: 23130 - RNA, 21 nt, synthetic construct
  source 1..21: mol_type = other RNA
taatagtaacttgacagtgga

SEQ ID NO: 23131 - RNA, 21 nt, synthetic construct
  source 1..21: mol_type = other RNA
taatagtagcacctgcctaag

SEQ ID NO: 23132 - RNA, 21 nt, synthetic construct
  source 1..21: mol_type = other RNA
taatatgtcaatgtcacaaga

SEQ ID NO: 23133 - RNA, 21 nt, synthetic construct
  source 1..21: mol_type = other RNA
taatcataaggattgaccaaa

SEQ ID NO: 23134 - RNA, 21 nt, synthetic construct
  source 1..21: mol_type = other RNA
taatctcgagccttcttcagt

SEQ ID NO: 23135 - RNA, 21 nt, synthetic construct
  source 1..21: mol_type = other RNA
taatctcgagtataaccatca

SEQ ID NO: 23136 - RNA, 21 nt, synthetic construct
  source 1..21: mol_type = other RNA
taatgaacccattttcaaatg

SEQ ID NO: 23137 - RNA, 21 nt, synthetic construct
  source 1..21: mol_type = other RNA
taatgactttggcagttagtg

SEQ ID NO: 23138 - RNA, 21 nt, synthetic construct
  source 1..21: mol_type = other RNA
taatgcaaaagctgatctggg

SEQ ID NO: 23139 - RNA, 21 nt, synthetic construct
  source 1..21: mol_type = other RNA
tacaaaacaccagccttgtac

SEQ ID NO: 23140 - RNA, 21 nt, synthetic construct
  source 1..21: mol_type = other RNA
tacaaggctggtgttttgtaa

SEQ ID NO: 23141 - RNA, 21 nt, synthetic construct
  source 1..21: mol_type = other RNA
tacaatcctatgaccaatctc

SEQ ID NO: 23142 - RNA, 21 nt, synthetic construct
  source 1..21: mol_type = other RNA
tacacgcccatagtcccagtt

SEQ ID NO: 23143 - RNA, 21 nt, synthetic construct
  source 1..21: mol_type = other RNA
tacactatacaatcctatgac

SEQ ID NO: 23144 - RNA, 21 nt, synthetic construct
  source 1..21: mol_type = other RNA
tacagagaaggaaaccgaggc

SEQ ID NO: 23145 - RNA, 21 nt, synthetic construct
  source 1..21: mol_type = other RNA
tacagatgaagcactaaaact

SEQ ID NO: 23146 - RNA, 21 nt, synthetic construct
  source 1..21: mol_type = other RNA
tacaggccaaggccctgtgac

SEQ ID NO: 23147 - RNA, 21 nt, synthetic construct
  source 1..21: mol_type = other RNA
tacatgctttgcagttggaca

SEQ ID NO: 23148 - RNA, 21 nt, synthetic construct
  source 1..21: mol_type = other RNA
taccaaagccagctaaagtca

SEQ ID NO: 23149 - RNA, 21 nt, synthetic construct
  source 1..21: mol_type = other RNA
taccacaacacctcgctattt

SEQ ID NO: 23150 - RNA, 21 nt, synthetic construct
  source 1..21: mol_type = other RNA
taccagcaccaaactgaactt

SEQ ID NO: 23151 - RNA, 21 nt, synthetic construct
  source 1..21: mol_type = other RNA
taccctctaaaattgttactt

SEQ ID NO: 23152 - RNA, 21 nt, synthetic construct
  source 1..21: mol_type = other RNA
tacggaggtgaccctaagtaa

SEQ ID NO: 23153 - RNA, 21 nt, synthetic construct
  source 1..21: mol_type = other RNA
tactattatccctgttttaca

SEQ ID NO: 23154 - RNA, 21 nt, synthetic construct
  source 1..21: mol_type = other RNA
tactcgagattagattcagat

SEQ ID NO: 23155 - RNA, 21 nt, synthetic construct
  source 1..21: mol_type = other RNA
tactcggaaggctcaggcagg

SEQ ID NO: 23156 - RNA, 21 nt, synthetic construct
  source 1..21: mol_type = other RNA
tactctgcttaatatgtcaat

SEQ ID NO: 23157 - RNA, 21 nt, synthetic construct
  source 1..21: mol_type = other RNA
tactgtggttatgcaaatttg

SEQ ID NO: 23158 - RNA, 21 nt, synthetic construct
  source 1..21: mol_type = other RNA
tacttacatgctttgcagttg

SEQ ID NO: 23159 - RNA, 21 nt, synthetic construct
  source 1..21: mol_type = other RNA
tacttagggtcacctccgtat

SEQ ID NO: 23160 - RNA, 21 nt, synthetic construct
  source 1..21: mol_type = other RNA
tagaacaaggacaaatttgca

SEQ ID NO: 23161 - RNA, 21 nt, synthetic construct
  source 1..21: mol_type = other RNA
tagaggagaaagttcagtttg

SEQ ID NO: 23162 - RNA, 21 nt, synthetic construct
  source 1..21: mol_type = other RNA
tagaggctgaggtggaaggat

SEQ ID NO: 23163 - RNA, 21 nt, synthetic construct
  source 1..21: mol_type = other RNA
tagagggtatacggaggtgac

SEQ ID NO: 23164 - RNA, 21 nt, synthetic construct
  source 1..21: mol_type = other RNA
tagatgagattggtcatagga

SEQ ID NO: 23165 - RNA, 21 nt, synthetic construct
  source 1..21: mol_type = other RNA
tagattcagatgaggcattct

SEQ ID NO: 23166 - RNA, 21 nt, synthetic construct
  source 1..21: mol_type = other RNA
tagatttgctgattttgacaa

SEQ ID NO: 23167 - RNA, 21 nt, synthetic construct
  source 1..21: mol_type = other RNA
tagcgaggtgttgtggtacac

SEQ ID NO: 23168 - RNA, 21 nt, synthetic construct
  source 1..21: mol_type = other RNA
tagctggctttggtatttggc

SEQ ID NO: 23169 - RNA, 21 nt, synthetic construct
  source 1..21: mol_type = other RNA
taggagatgaagtctgaggtg

SEQ ID NO: 23170 - RNA, 21 nt, synthetic construct
  source 1..21: mol_type = other RNA
taggagtaaaggtgcataatg

SEQ ID NO: 23171 - RNA, 21 nt, synthetic construct
  source 1..21: mol_type = other RNA
taggattgtatagtgtatcaa

SEQ ID NO: 23172 - RNA, 21 nt, synthetic construct
  source 1..21: mol_type = other RNA
taggcaggtgctactattatc

SEQ ID NO: 23173 - RNA, 21 nt, synthetic construct
  source 1..21: mol_type = other RNA
tagggtcacctccgtataccc

SEQ ID NO: 23174 - RNA, 21 nt, synthetic construct
  source 1..21: mol_type = other RNA
tagggttgtcaaaatcagcaa

SEQ ID NO: 23175 - RNA, 21 nt, synthetic construct
  source 1..21: mol_type = other RNA
tagtaacttgacagtggagag

SEQ ID NO: 23176 - RNA, 21 nt, synthetic construct
  source 1..21: mol_type = other RNA
tagtagcacctgcctaagggc

SEQ ID NO: 23177 - RNA, 21 nt, synthetic construct
  source 1..21: mol_type = other RNA
tagtcccagttactcggaagg

SEQ ID NO: 23178 - RNA, 21 nt, synthetic construct
  source 1..21: mol_type = other RNA
tagtgagaccccgtctctaca

SEQ ID NO: 23179 - RNA, 21 nt, synthetic construct
  source 1..21: mol_type = other RNA
tagtgagcaagcaatttgctt

SEQ ID NO: 23180 - RNA, 21 nt, synthetic construct
  source 1..21: mol_type = other RNA
tagtgcatttcatcttaaact

SEQ ID NO: 23181 - RNA, 21 nt, synthetic construct
  source 1..21: mol_type = other RNA
tagtgcttcatctgtaaaact

SEQ ID NO: 23182 - RNA, 21 nt, synthetic construct
  source 1..21: mol_type = other RNA
tagtgtcccttaacaataaaa

SEQ ID NO: 23183 - RNA, 21 nt, synthetic construct
  source 1..21: mol_type = other RNA
tagtgtttttatccatgccaa

SEQ ID NO: 23184 - RNA, 21 nt, synthetic construct
  source 1..21: mol_type = other RNA
tagttttacagatgaagcact

SEQ ID NO: 23185 - RNA, 21 nt, synthetic construct
  source 1..21: mol_type = other RNA
tagttttagtgcttcatctgt

SEQ ID NO: 23186 - RNA, 21 nt, synthetic construct
  source 1..21: mol_type = other RNA
tataaccatcagacaaaccca

SEQ ID NO: 23187 - RNA, 21 nt, synthetic construct
  source 1..21: mol_type = other RNA
tatacaatcctatgaccaatc

SEQ ID NO: 23188 - RNA, 21 nt, synthetic construct
  source 1..21: mol_type = other RNA
tataccagcaccaaactgaac

SEQ ID NO: 23189 - RNA, 21 nt, synthetic construct
  source 1..21: mol_type = other RNA
tataccctctaaaattgttac

SEQ ID NO: 23190 - RNA, 21 nt, synthetic construct
  source 1..21: mol_type = other RNA
tatacggaggtgaccctaagt

SEQ ID NO: 23191 - RNA, 21 nt, synthetic construct
  source 1..21: mol_type = other RNA
tatactcgagattagattcag

SEQ ID NO: 23192 - RNA, 21 nt, synthetic construct
  source 1..21: mol_type = other RNA
tatagaggctgaggtggaagg

SEQ ID NO: 23193 - RNA, 21 nt, synthetic construct
  source 1..21: mol_type = other RNA
tatagtgagcaagcaatttgc

SEQ ID NO: 23194 - RNA, 21 nt, synthetic construct
  source 1..21: mol_type = other RNA
tatatcttatgtttatcaccc

SEQ ID NO: 23195 - RNA, 21 nt, synthetic construct
  source 1..21: mol_type = other RNA
tatatgtgattccttgttact

SEQ ID NO: 23196 - RNA, 21 nt, synthetic construct
  source 1..21: mol_type = other RNA
tatcacccgacagttgttaat

SEQ ID NO: 23197 - RNA, 21 nt, synthetic construct
  source 1..21: mol_type = other RNA
tatccatgccaagcgatgatg

SEQ ID NO: 23198 - RNA, 21 nt, synthetic construct
  source 1..21: mol_type = other RNA
tatccctgttttacagagaag

SEQ ID NO: 23199 - RNA, 21 nt, synthetic construct
  source 1..21: mol_type = other RNA
tatcgagaggcacatgccatc

SEQ ID NO: 23200 - RNA, 21 nt, synthetic construct
  source 1..21: mol_type = other RNA
tatcttatgtttatcacccga

SEQ ID NO: 23201 - RNA, 21 nt, synthetic construct
  source 1..21: mol_type = other RNA
tatgaccaatctcatctacaa

SEQ ID NO: 23202 - RNA, 21 nt, synthetic construct
  source 1..21: mol_type = other RNA
tatgcaaatttgtccttgttc

SEQ ID NO: 23203 - RNA, 21 nt, synthetic construct
  source 1..21: mol_type = other RNA
tatgcacctttactcctaaat

SEQ ID NO: 23204 - RNA, 21 nt, synthetic construct
  source 1..21: mol_type = other RNA
tatgggcgtgtaccacaacac

SEQ ID NO: 23205 - RNA, 21 nt, synthetic construct
  source 1..21: mol_type = other RNA
tatgtcaatgtcacaagagag

SEQ ID NO: 23206 - RNA, 21 nt, synthetic construct
  source 1..21: mol_type = other RNA
tatgtccaactgcaaagcatg

SEQ ID NO: 23207 - RNA, 21 nt, synthetic construct
  source 1..21: mol_type = other RNA
tatgtgattccttgttactta

SEQ ID NO: 23208 - RNA, 21 nt, synthetic construct
  source 1..21: mol_type = other RNA
tatgtttatcacccgacagtt

SEQ ID NO: 23209 - RNA, 21 nt, synthetic construct
  source 1..21: mol_type = other RNA
tattaagcagagtacaaggct

SEQ ID NO: 23210 - RNA, 21 nt, synthetic construct
  source 1..21: mol_type = other RNA
tattatccctgttttacagag

SEQ ID NO: 23211 - RNA, 21 nt, synthetic construct
  source 1..21: mol_type = other RNA
tattattccaccactgcactc

SEQ ID NO: 23212 - RNA, 21 nt, synthetic construct
  source 1..21: mol_type = other RNA
tattccctttataatttgcag

SEQ ID NO: 23213 - RNA, 21 nt, synthetic construct
  source 1..21: mol_type = other RNA
tattcctgccaagaatgcctc

SEQ ID NO: 23214 - RNA, 21 nt, synthetic construct
  source 1..21: mol_type = other RNA
tattgatacactatacaatcc

SEQ ID NO: 23215 - RNA, 21 nt, synthetic construct
  source 1..21: mol_type = other RNA
tattgcagaagtgagtgtgtg

SEQ ID NO: 23216 - RNA, 21 nt, synthetic construct
  source 1..21: mol_type = other RNA
tattgttaagggacactactg

SEQ ID NO: 23217 - RNA, 21 nt, synthetic construct
  source 1..21: mol_type = other RNA
tatttagaggagaaagttcag

SEQ ID NO: 23218 - RNA, 21 nt, synthetic construct
  source 1..21: mol_type = other RNA
tatttaggagtaaaggtgcat

SEQ ID NO: 23219 - RNA, 21 nt, synthetic construct
  source 1..21: mol_type = other RNA
tatttccttagaacaaggaca

SEQ ID NO: 23220 - RNA, 21 nt, synthetic construct
  source 1..21: mol_type = other RNA
tatttggccaaaagttaatga

SEQ ID NO: 23221 - RNA, 21 nt, synthetic construct
  source 1..21: mol_type = other RNA
tattttggtttaaatcccagc

SEQ ID NO: 23222 - RNA, 21 nt, synthetic construct
  source 1..21: mol_type = other RNA
tcaaactcaagtgatccttcc

SEQ ID NO: 23223 - RNA, 21 nt, synthetic construct
  source 1..21: mol_type = other RNA
tcaaagttaacatcgccagaa

SEQ ID NO: 23224 - RNA, 21 nt, synthetic construct
  source 1..21: mol_type = other RNA
tcaaattttatagaggctgag

SEQ ID NO: 23225 - RNA, 21 nt, synthetic construct
  source 1..21: mol_type = other RNA
tcaactctcccctttttattg

SEQ ID NO: 23226 - RNA, 21 nt, synthetic construct
  source 1..21: mol_type = other RNA
tcaaggctgcagtgagttatt

SEQ ID NO: 23227 - RNA, 21 nt, synthetic construct
  source 1..21: mol_type = other RNA
tcaagtgatccttccacctca

SEQ ID NO: 23228 - RNA, 21 nt, synthetic construct
  source 1..21: mol_type = other RNA
tcaagttactattattccctt

SEQ ID NO: 23229 - RNA, 21 nt, synthetic construct
  source 1..21: mol_type = other RNA
tcaatgtcacaagagagaaag

SEQ ID NO: 23230 - RNA, 21 nt, synthetic construct
  source 1..21: mol_type = other RNA
tcaatttgggtttgtctgatg

SEQ ID NO: 23231 - RNA, 21 nt, synthetic construct
  source 1..21: mol_type = other RNA
tcacaagagagaaagacagac

SEQ ID NO: 23232 - RNA, 21 nt, synthetic construct
  source 1..21: mol_type = other RNA
tcacagggccttggcctgtat

SEQ ID NO: 23233 - RNA, 21 nt, synthetic construct
  source 1..21: mol_type = other RNA
tcacatatagtgagcaagcaa

SEQ ID NO: 23234 - RNA, 21 nt, synthetic construct
  source 1..21: mol_type = other RNA
tcaccaactgatcaaagttaa

SEQ ID NO: 23235 - RNA, 21 nt, synthetic construct
  source 1..21: mol_type = other RNA
tcacccgacagttgttaatct

SEQ ID NO: 23236 - RNA, 21 nt, synthetic construct
  source 1..21: mol_type = other RNA
tcacctccgtataccctctaa

SEQ ID NO: 23237 - RNA, 21 nt, synthetic construct
  source 1..21: mol_type = other RNA
tcactaaagagaaaatcatca

SEQ ID NO: 23238 - RNA, 21 nt, synthetic construct
  source 1..21: mol_type = other RNA
tcactatatgtgattccttgt

SEQ ID NO: 23239 - RNA, 21 nt, synthetic construct
  source 1..21: mol_type = other RNA
tcacttctgcaatattcctgc

SEQ ID NO: 23240 - RNA, 21 nt, synthetic construct
  source 1..21: mol_type = other RNA
tcacttgagtttgaaaccagc

SEQ ID NO: 23241 - RNA, 21 nt, synthetic construct
  source 1..21: mol_type = other RNA
tcagacaaacccaaattgaga

SEQ ID NO: 23242 - RNA, 21 nt, synthetic construct
  source 1..21: mol_type = other RNA
tcagacttcatctcctaagcc

SEQ ID NO: 23243 - RNA, 21 nt, synthetic construct
  source 1..21: mol_type = other RNA
tcagatgaggcattcttggca

SEQ ID NO: 23244 - RNA, 21 nt, synthetic construct
  source 1..21: mol_type = other RNA
tcagcctctataaaatttgaa

SEQ ID NO: 23245 - RNA, 21 nt, synthetic construct
  source 1..21: mol_type = other RNA
tcagctcttcagtctgtcttt

SEQ ID NO: 23246 - RNA, 21 nt, synthetic construct
  source 1..21: mol_type = other RNA
tcagcttttgcattaatctcg

SEQ ID NO: 23247 - RNA, 21 nt, synthetic construct
  source 1..21: mol_type = other RNA
tcaggcaggaggattgcttga

SEQ ID NO: 23248 - RNA, 21 nt, synthetic construct
  source 1..21: mol_type = other RNA
tcagtctggatcagctcttca

SEQ ID NO: 23249 - RNA, 21 nt, synthetic construct
  source 1..21: mol_type = other RNA
tcagtctgtctttctctcttg

SEQ ID NO: 23250 - RNA, 21 nt, synthetic construct
  source 1..21: mol_type = other RNA
tcagtgcatcttatcgagagg

SEQ ID NO: 23251 - RNA, 21 nt, synthetic construct
  source 1..21: mol_type = other RNA
tcagttggtgaaggtggtgtc

SEQ ID NO: 23252 - RNA, 21 nt, synthetic construct
  source 1..21: mol_type = other RNA
tcagtttggtgctggtatatc

SEQ ID NO: 23253 - RNA, 21 nt, synthetic construct
  source 1..21: mol_type = other RNA
tcagtttttggtcaatcctta

SEQ ID NO: 23254 - RNA, 21 nt, synthetic construct
  source 1..21: mol_type = other RNA
tcataagcatttgaaaatggg

SEQ ID NO: 23255 - RNA, 21 nt, synthetic construct
  source 1..21: mol_type = other RNA
tcataaggattgaccaaaaac

SEQ ID NO: 23256 - RNA, 21 nt, synthetic construct
  source 1..21: mol_type = other RNA
tcataggattgtatagtgtat

SEQ ID NO: 23257 - RNA, 21 nt, synthetic construct
  source 1..21: mol_type = other RNA
tcatcatcgcttggcatggat

SEQ ID NO: 23258 - RNA, 21 nt, synthetic construct
  source 1..21: mol_type = other RNA
tcatcgcttggcatggataaa

SEQ ID NO: 23259 - RNA, 21 nt, synthetic construct
  source 1..21: mol_type = other RNA
tcatctcctaagcctcggttt

SEQ ID NO: 23260 - RNA, 21 nt, synthetic construct
  source 1..21: mol_type = other RNA
tcatctgaatctaatctcgag

SEQ ID NO: 23261 - RNA, 21 nt, synthetic construct
  source 1..21: mol_type = other RNA
tcattaacttttggccaaata

SEQ ID NO: 23262 - RNA, 21 nt, synthetic construct
  source 1..21: mol_type = other RNA
tcattatgcacctttactcct

SEQ ID NO: 23263 - RNA, 21 nt, synthetic construct
  source 1..21: mol_type = other RNA
tccaactgcaaagcatgtaag

SEQ ID NO: 23264 - RNA, 21 nt, synthetic construct
  source 1..21: mol_type = other RNA
tccaagatgcaatcccagatc

SEQ ID NO: 23265 - RNA, 21 nt, synthetic construct
  source 1..21: mol_type = other RNA
tccaccaacacctcagacttc

SEQ ID NO: 23266 - RNA, 21 nt, synthetic construct
  source 1..21: mol_type = other RNA
tccacctcagcctctataaaa

SEQ ID NO: 23267 - RNA, 21 nt, synthetic construct
  source 1..21: mol_type = other RNA
tccactgtcaagttactatta

SEQ ID NO: 23268 - RNA, 21 nt, synthetic construct
  source 1..21: mol_type = other RNA
tccagactgaagaaggctcga

SEQ ID NO: 23269 - RNA, 21 nt, synthetic construct
  source 1..21: mol_type = other RNA
tccatgccaagcgatgatgat

SEQ ID NO: 23270 - RNA, 21 nt, synthetic construct
  source 1..21: mol_type = other RNA
tcccagatcagcttttgcatt

SEQ ID NO: 23271 - RNA, 21 nt, synthetic construct
  source 1..21: mol_type = other RNA
tcccagctccaccaacacctc

SEQ ID NO: 23272 - RNA, 21 nt, synthetic construct
  source 1..21: mol_type = other RNA
tcccagtagtgtcccttaaca

SEQ ID NO: 23273 - RNA, 21 nt, synthetic construct
  source 1..21: mol_type = other RNA
tcccagttactcggaaggctc

SEQ ID NO: 23274 - RNA, 21 nt, synthetic construct
  source 1..21: mol_type = other RNA
tcccctttctggcgatgttaa

SEQ ID NO: 23275 - RNA, 21 nt, synthetic construct
  source 1..21: mol_type = other RNA
tcccctttttattgttaaggg

SEQ ID NO: 23276 - RNA, 21 nt, synthetic construct
  source 1..21: mol_type = other RNA
tcccggactcaagcaatcctc

SEQ ID NO: 23277 - RNA, 21 nt, synthetic construct
  source 1..21: mol_type = other RNA
tccctgttttacagagaagga

SEQ ID NO: 23278 - RNA, 21 nt, synthetic construct
  source 1..21: mol_type = other RNA
tcccttaacaataaaaagggg

SEQ ID NO: 23279 - RNA, 21 nt, synthetic construct
  source 1..21: mol_type = other RNA
tccctttataatttgcagttt

SEQ ID NO: 23280 - RNA, 21 nt, synthetic construct
  source 1..21: mol_type = other RNA
tccgagtaactgggactatgg

SEQ ID NO: 23281 - RNA, 21 nt, synthetic construct
  source 1..21: mol_type = other RNA
tccgggagttcaaggctgcag

SEQ ID NO: 23282 - RNA, 21 nt, synthetic construct
  source 1..21: mol_type = other RNA
tccgtataccctctaaaattg

SEQ ID NO: 23283 - RNA, 21 nt, synthetic construct
  source 1..21: mol_type = other RNA
tcctaagcctcggtttccttc

SEQ ID NO: 23284 - RNA, 21 nt, synthetic construct
  source 1..21: mol_type = other RNA
tcctactttttgtagagacgg

SEQ ID NO: 23285 - RNA, 21 nt, synthetic construct
  source 1..21: mol_type = other RNA
tcctatgaccaatctcatcta

SEQ ID NO: 23286 - RNA, 21 nt, synthetic construct
  source 1..21: mol_type = other RNA
tcctcctgcctgagccttccg

SEQ ID NO: 23287 - RNA, 21 nt, synthetic construct
  source 1..21: mol_type = other RNA
tcctctaaataatcataagga

SEQ ID NO: 23288 - RNA, 21 nt, synthetic construct
  source 1..21: mol_type = other RNA
tcctgccaagaatgcctcatc

SEQ ID NO: 23289 - RNA, 21 nt, synthetic construct
  source 1..21: mol_type = other RNA
tcctgcctgagccttccgagt

SEQ ID NO: 23290 - RNA, 21 nt, synthetic construct
  source 1..21: mol_type = other RNA
tccttagaacaaggacaaatt

SEQ ID NO: 23291 - RNA, 21 nt, synthetic construct
  source 1..21: mol_type = other RNA
tccttatgattatttagagga

SEQ ID NO: 23292 - RNA, 21 nt, synthetic construct
  source 1..21: mol_type = other RNA
tccttccacctcagcctctat

SEQ ID NO: 23293 - RNA, 21 nt, synthetic construct
  source 1..21: mol_type = other RNA
tccttctctgtaaaacaggga

SEQ ID NO: 23294 - RNA, 21 nt, synthetic construct
  source 1..21: mol_type = other RNA
tccttgttacttagggtcacc

SEQ ID NO: 23295 - RNA, 21 nt, synthetic construct
  source 1..21: mol_type = other RNA
tccttgttctaaggaaataaa

SEQ ID NO: 23296 - RNA, 21 nt, synthetic construct
  source 1..21: mol_type = other RNA
tcgagaggcacatgccatctg

SEQ ID NO: 23297 - RNA, 21 nt, synthetic construct
  source 1..21: mol_type = other RNA
tcgagattaatgcaaaagctg

SEQ ID NO: 23298 - RNA, 21 nt, synthetic construct
  source 1..21: mol_type = other RNA
tcgagattagattcagatgag

SEQ ID NO: 23299 - RNA, 21 nt, synthetic construct
  source 1..21: mol_type = other RNA
tcgagccttcttcagtctgga

SEQ ID NO: 23300 - RNA, 21 nt, synthetic construct
  source 1..21: mol_type = other RNA
tcgagtataaccatcagacaa

SEQ ID NO: 23301 - RNA, 21 nt, synthetic construct
  source 1..21: mol_type = other RNA
tcgataagatgcactgaagac

SEQ ID NO: 23302 - RNA, 21 nt, synthetic construct
  source 1..21: mol_type = other RNA
tcgccagaaaggggacagatg

SEQ ID NO: 23303 - RNA, 21 nt, synthetic construct
  source 1..21: mol_type = other RNA
tcgcttggcatggataaaaac

SEQ ID NO: 23304 - RNA, 21 nt, synthetic construct
  source 1..21: mol_type = other RNA
tcgggtgataaacataagata

SEQ ID NO: 23305 - RNA, 21 nt, synthetic construct
  source 1..21: mol_type = other RNA
tcggtttccttctctgtaaaa

SEQ ID NO: 23306 - RNA, 21 nt, synthetic construct
  source 1..21: mol_type = other RNA
tcgttttgagacagggtctcg

SEQ ID NO: 23307 - RNA, 21 nt, synthetic construct
  source 1..21: mol_type = other RNA
tctaatctcgagtataaccat

SEQ ID NO: 23308 - RNA, 21 nt, synthetic construct
  source 1..21: mol_type = other RNA
tctcaatttgggtttgtctga

SEQ ID NO: 23309 - RNA, 21 nt, synthetic construct
  source 1..21: mol_type = other RNA
tctcatctacaactttattca

SEQ ID NO: 23310 - RNA, 21 nt, synthetic construct
  source 1..21: mol_type = other RNA
tctccactgtcaagttactat

SEQ ID NO: 23311 - RNA, 21 nt, synthetic construct
  source 1..21: mol_type = other RNA
tctcccctttttattgttaag

SEQ ID NO: 23312 - RNA, 21 nt, synthetic construct
  source 1..21: mol_type = other RNA
tctcctaagcctcggtttcct

SEQ ID NO: 23313 - RNA, 21 nt, synthetic construct
  source 1..21: mol_type = other RNA
tctcctctaaataatcataag

SEQ ID NO: 23314 - RNA, 21 nt, synthetic construct
  source 1..21: mol_type = other RNA
tctcgagccttcttcagtctg

SEQ ID NO: 23315 - RNA, 21 nt, synthetic construct
  source 1..21: mol_type = other RNA
tctcgagtataaccatcagac

SEQ ID NO: 23316 - RNA, 21 nt, synthetic construct
  source 1..21: mol_type = other RNA
tctcgataagatgcactgaag

SEQ ID NO: 23317 - RNA, 21 nt, synthetic construct
  source 1..21: mol_type = other RNA
tctctacaaaaagtaggaaaa

SEQ ID NO: 23318 - RNA, 21 nt, synthetic construct
  source 1..21: mol_type = other RNA
tctctcaatttgggtttgtct

SEQ ID NO: 23319 - RNA, 21 nt, synthetic construct
  source 1..21: mol_type = other RNA
tctctccactgtcaagttact

SEQ ID NO: 23320 - RNA, 21 nt, synthetic construct
  source 1..21: mol_type = other RNA
tctctcttgtgacattgacat

SEQ ID NO: 23321 - RNA, 21 nt, synthetic construct
  source 1..21: mol_type = other RNA
tctctgtaaaacagggataat

SEQ ID NO: 23322 - RNA, 21 nt, synthetic construct
  source 1..21: mol_type = other RNA
tctcttgtgacattgacatat

SEQ ID NO: 23323 - RNA, 21 nt, synthetic construct
  source 1..21: mol_type = other RNA
tctctttagtgacagacattt

SEQ ID NO: 23324 - RNA, 21 nt, synthetic construct
  source 1..21: mol_type = other RNA
tctgaatctaatctcgagtat

SEQ ID NO: 23325 - RNA, 21 nt, synthetic construct
  source 1..21: mol_type = other RNA
tctgaggtgttggtggagctg

SEQ ID NO: 23326 - RNA, 21 nt, synthetic construct
  source 1..21: mol_type = other RNA
tctgatggttatactcgagat

SEQ ID NO: 23327 - RNA, 21 nt, synthetic construct
  source 1..21: mol_type = other RNA
tctgcaatattcctgccaaga

SEQ ID NO: 23328 - RNA, 21 nt, synthetic construct
  source 1..21: mol_type = other RNA
tctgccaggtctctccactgt

SEQ ID NO: 23329 - RNA, 21 nt, synthetic construct
  source 1..21: mol_type = other RNA
tctgcttaatatgtcaatgtc

SEQ ID NO: 23330 - RNA, 21 nt, synthetic construct
  source 1..21: mol_type = other RNA
tctggatcagctcttcagtct

SEQ ID NO: 23331 - RNA, 21 nt, synthetic construct
  source 1..21: mol_type = other RNA
tctggcgatgttaactttgat

SEQ ID NO: 23332 - RNA, 21 nt, synthetic construct
  source 1..21: mol_type = other RNA
tctgggattgcatcttggacc

SEQ ID NO: 23333 - RNA, 21 nt, synthetic construct
  source 1..21: mol_type = other RNA
tctgtaaaacagggataatag

SEQ ID NO: 23334 - RNA, 21 nt, synthetic construct
  source 1..21: mol_type = other RNA
tctgtcactaaagagaaaatc

SEQ ID NO: 23335 - RNA, 21 nt, synthetic construct
  source 1..21: mol_type = other RNA
tctgtcccctttctggcgatg

SEQ ID NO: 23336 - RNA, 21 nt, synthetic construct
  source 1..21: mol_type = other RNA
tctgtctttctctcttgtgac

SEQ ID NO: 23337 - RNA, 21 nt, synthetic construct
  source 1..21: mol_type = other RNA
tcttatcgagaggcacatgcc

SEQ ID NO: 23338 - RNA, 21 nt, synthetic construct
  source 1..21: mol_type = other RNA
tcttatgtttatcacccgaca

SEQ ID NO: 23339 - RNA, 21 nt, synthetic construct
  source 1..21: mol_type = other RNA
tcttcagtctggatcagctct

SEQ ID NO: 23340 - RNA, 21 nt, synthetic construct
  source 1..21: mol_type = other RNA
tcttcagtctgtctttctctc

SEQ ID NO: 23341 - RNA, 21 nt, synthetic construct
  source 1..21: mol_type = other RNA
tcttcagtgcatcttatcgag

SEQ ID NO: 23342 - RNA, 21 nt, synthetic construct
  source 1..21: mol_type = other RNA
tcttggacctcaactctcccc

SEQ ID NO: 23343 - RNA, 21 nt, synthetic construct
  source 1..21: mol_type = other RNA
tcttggcaggaatattgcaga

SEQ ID NO: 23344 - RNA, 21 nt, synthetic construct
  source 1..21: mol_type = other RNA
tcttgtgacattgacatatta

SEQ ID NO: 23345 - RNA, 21 nt, synthetic construct
  source 1..21: mol_type = other RNA
tctttagtgacagacattttt

SEQ ID NO: 23346 - RNA, 21 nt, synthetic construct
  source 1..21: mol_type = other RNA
tctttctctcttgtgacattg

SEQ ID NO: 23347 - RNA, 21 nt, synthetic construct
  source 1..21: mol_type = other RNA
tgaaaagcaaattgcttgctc

SEQ ID NO: 23348 - RNA, 21 nt, synthetic construct
  source 1..21: mol_type = other RNA
tgaaaatgggttcattatgca

SEQ ID NO: 23349 - RNA, 21 nt, synthetic construct
  source 1..21: mol_type = other RNA
tgaaatgcactagttttagtg

SEQ ID NO: 23350 - RNA, 21 nt, synthetic construct
  source 1..21: mol_type = other RNA
tgaacccattttcaaatgctt

SEQ ID NO: 23351 - RNA, 21 nt, synthetic construct
  source 1..21: mol_type = other RNA
tgaactttctcctctaaataa

SEQ ID NO: 23352 - RNA, 21 nt, synthetic construct
  source 1..21: mol_type = other RNA
tgaagaaggctcgagattaat

SEQ ID NO: 23353 - RNA, 21 nt, synthetic construct
  source 1..21: mol_type = other RNA
tgaagacacacactcacttct

SEQ ID NO: 23354 - RNA, 21 nt, synthetic construct
  source 1..21: mol_type = other RNA
tgaagagctgatccagactga

SEQ ID NO: 23355 - RNA, 21 nt, synthetic construct
  source 1..21: mol_type = other RNA
tgaagcactaaaactagtgca

SEQ ID NO: 23356 - RNA, 21 nt, synthetic construct
  source 1..21: mol_type = other RNA
tgaaggtggtgtctgccaggt

SEQ ID NO: 23357 - RNA, 21 nt, synthetic construct
  source 1..21: mol_type = other RNA
tgaagtctgaggtgttggtgg

SEQ ID NO: 23358 - RNA, 21 nt, synthetic construct
  source 1..21: mol_type = other RNA
tgaataaagttgtagatgaga

SEQ ID NO: 23359 - RNA, 21 nt, synthetic construct
  source 1..21: mol_type = other RNA
tgaatctaatctcgagtataa

SEQ ID NO: 23360 - RNA, 21 nt, synthetic construct
  source 1..21: mol_type = other RNA
tgaattatttaggagtaaagg

SEQ ID NO: 23361 - RNA, 21 nt, synthetic construct
  source 1..21: mol_type = other RNA
tgacaaccctactgtggttat

SEQ ID NO: 23362 - RNA, 21 nt, synthetic construct
  source 1..21: mol_type = other RNA
tgacagtggagagacctggca

SEQ ID NO: 23363 - RNA, 21 nt, synthetic construct
  source 1..21: mol_type = other RNA
tgacatattaagcagagtaca

SEQ ID NO: 23364 - RNA, 21 nt, synthetic construct
  source 1..21: mol_type = other RNA
tgacattgacatattaagcag

SEQ ID NO: 23365 - RNA, 21 nt, synthetic construct
  source 1..21: mol_type = other RNA
tgaccaaaaactgaaaagcaa

SEQ ID NO: 23366 - RNA, 21 nt, synthetic construct
  source 1..21: mol_type = other RNA
tgaccaatctcatctacaact

SEQ ID NO: 23367 - RNA, 21 nt, synthetic construct
  source 1..21: mol_type = other RNA
tgaccctaagtaacaaggaat

SEQ ID NO: 23368 - RNA, 21 nt, synthetic construct
  source 1..21: mol_type = other RNA
tgactgagcgagaccctgtct

SEQ ID NO: 23369 - RNA, 21 nt, synthetic construct
  source 1..21: mol_type = other RNA
tgactttagctggctttggta

SEQ ID NO: 23370 - RNA, 21 nt, synthetic construct
  source 1..21: mol_type = other RNA
tgactttggcagttagtgttt

SEQ ID NO: 23371 - RNA, 21 nt, synthetic construct
  source 1..21: mol_type = other RNA
tgagaccccgtctctacaaaa

SEQ ID NO: 23372 - RNA, 21 nt, synthetic construct
  source 1..21: mol_type = other RNA
tgagagacagtttacaaaaca

SEQ ID NO: 23373 - RNA, 21 nt, synthetic construct
  source 1..21: mol_type = other RNA
tgagattggtcataggattgt

SEQ ID NO: 23374 - RNA, 21 nt, synthetic construct
  source 1..21: mol_type = other RNA
tgagcaagcaatttgcttttc

SEQ ID NO: 23375 - RNA, 21 nt, synthetic construct
  source 1..21: mol_type = other RNA
tgagccttccgagtaactggg

SEQ ID NO: 23376 - RNA, 21 nt, synthetic construct
  source 1..21: mol_type = other RNA
tgagcgagaccctgtctcaaa

SEQ ID NO: 23377 - RNA, 21 nt, synthetic construct
  source 1..21: mol_type = other RNA
tgaggcattcttggcaggaat

SEQ ID NO: 23378 - RNA, 21 nt, synthetic construct
  source 1..21: mol_type = other RNA
tgaggtccaagatgcaatccc

SEQ ID NO: 23379 - RNA, 21 nt, synthetic construct
  source 1..21: mol_type = other RNA
tgaggtggaaggatcacttga

SEQ ID NO: 23380 - RNA, 21 nt, synthetic construct
  source 1..21: mol_type = other RNA
tgaggtgttggtggagctggg

SEQ ID NO: 23381 - RNA, 21 nt, synthetic construct
  source 1..21: mol_type = other RNA
tgagtgtgtgtcttcagtgca

SEQ ID NO: 23382 - RNA, 21 nt, synthetic construct
  source 1..21: mol_type = other RNA
tgagttattattccaccactg

SEQ ID NO: 23383 - RNA, 21 nt, synthetic construct
  source 1..21: mol_type = other RNA
tgatacactatacaatcctat

SEQ ID NO: 23384 - RNA, 21 nt, synthetic construct
  source 1..21: mol_type = other RNA
tgatcaaagttaacatcgcca

SEQ ID NO: 23385 - RNA, 21 nt, synthetic construct
  source 1..21: mol_type = other RNA
tgatcagttggtgaaggtggt

SEQ ID NO: 23386 - RNA, 21 nt, synthetic construct
  source 1..21: mol_type = other RNA
tgatccagactgaagaaggct

SEQ ID NO: 23387 - RNA, 21 nt, synthetic construct
  source 1..21: mol_type = other RNA
tgatccttccacctcagcctc

SEQ ID NO: 23388 - RNA, 21 nt, synthetic construct
  source 1..21: mol_type = other RNA
tgatctgggattgcatcttgg

SEQ ID NO: 23389 - RNA, 21 nt, synthetic construct
  source 1..21: mol_type = other RNA
tgatgattttctctttagtga

SEQ ID NO: 23390 - RNA, 21 nt, synthetic construct
  source 1..21: mol_type = other RNA
tgatggttatactcgagatta

SEQ ID NO: 23391 - RNA, 21 nt, synthetic construct
  source 1..21: mol_type = other RNA
tgattatttagaggagaaagt

SEQ ID NO: 23392 - RNA, 21 nt, synthetic construct
  source 1..21: mol_type = other RNA
tgattccttgttacttagggt

SEQ ID NO: 23393 - RNA, 21 nt, synthetic construct
  source 1..21: mol_type = other RNA
tgattttctctttagtgacag

SEQ ID NO: 23394 - RNA, 21 nt, synthetic construct
  source 1..21: mol_type = other RNA
tgattttgacaaccctactgt

SEQ ID NO: 23395 - RNA, 21 nt, synthetic construct
  source 1..21: mol_type = other RNA
tgcaaaagctgatctgggatt

SEQ ID NO: 23396 - RNA, 21 nt, synthetic construct
  source 1..21: mol_type = other RNA
tgcaaagcatgtaagtaacaa

SEQ ID NO: 23397 - RNA, 21 nt, synthetic construct
  source 1..21: mol_type = other RNA
tgcaaatttgtccttgttcta

SEQ ID NO: 23398 - RNA, 21 nt, synthetic construct
  source 1..21: mol_type = other RNA
tgcaatattcctgccaagaat

SEQ ID NO: 23399 - RNA, 21 nt, synthetic construct
  source 1..21: mol_type = other RNA
tgcaatcccagatcagctttt

SEQ ID NO: 23400 - RNA, 21 nt, synthetic construct
  source 1..21: mol_type = other RNA
tgcacaagcccttaggcaggt

SEQ ID NO: 23401 - RNA, 21 nt, synthetic construct
  source 1..21: mol_type = other RNA
tgcacctttactcctaaataa

SEQ ID NO: 23402 - RNA, 21 nt, synthetic construct
  source 1..21: mol_type = other RNA
tgcactagttttagtgcttca

SEQ ID NO: 23403 - RNA, 21 nt, synthetic construct
  source 1..21: mol_type = other RNA
tgcactgaagacacacactca

SEQ ID NO: 23404 - RNA, 21 nt, synthetic construct
  source 1..21: mol_type = other RNA
tgcagaagtgagtgtgtgtct

SEQ ID NO: 23405 - RNA, 21 nt, synthetic construct
  source 1..21: mol_type = other RNA
tgcagtgagttattattccac

SEQ ID NO: 23406 - RNA, 21 nt, synthetic construct
  source 1..21: mol_type = other RNA
tgcagtggtggaataataact

SEQ ID NO: 23407 - RNA, 21 nt, synthetic construct
  source 1..21: mol_type = other RNA
tgcagttggacatattttggt

SEQ ID NO: 23408 - RNA, 21 nt, synthetic construct
  source 1..21: mol_type = other RNA
tgcagtttaagatgaaatgca

SEQ ID NO: 23409 - RNA, 21 nt, synthetic construct
  source 1..21: mol_type = other RNA
tgcataaccacagtagggttg

SEQ ID NO: 23410 - RNA, 21 nt, synthetic construct
  source 1..21: mol_type = other RNA
tgcataatgaacccattttca

SEQ ID NO: 23411 - RNA, 21 nt, synthetic construct
  source 1..21: mol_type = other RNA
tgcatcttatcgagaggcaca

SEQ ID NO: 23412 - RNA, 21 nt, synthetic construct
  source 1..21: mol_type = other RNA
tgcatcttggacctcaactct

SEQ ID NO: 23413 - RNA, 21 nt, synthetic construct
  source 1..21: mol_type = other RNA
tgcattaatctcgagccttct

SEQ ID NO: 23414 - RNA, 21 nt, synthetic construct
  source 1..21: mol_type = other RNA
tgcatttcatcttaaactgca

SEQ ID NO: 23415 - RNA, 21 nt, synthetic construct
  source 1..21: mol_type = other RNA
tgccaaagtcattaacttttg

SEQ ID NO: 23416 - RNA, 21 nt, synthetic construct
  source 1..21: mol_type = other RNA
tgccaagaatgcctcatctga

SEQ ID NO: 23417 - RNA, 21 nt, synthetic construct
  source 1..21: mol_type = other RNA
tgccaagcgatgatgattttc

SEQ ID NO: 23418 - RNA, 21 nt, synthetic construct
  source 1..21: mol_type = other RNA
tgccaggtctctccactgtca

SEQ ID NO: 23419 - RNA, 21 nt, synthetic construct
  source 1..21: mol_type = other RNA
tgccatctgtcccctttctgg

SEQ ID NO: 23420 - RNA, 21 nt, synthetic construct
  source 1..21: mol_type = other RNA
tgcccaggctggtttcaaact

SEQ ID NO: 23421 - RNA, 21 nt, synthetic construct
  source 1..21: mol_type = other RNA
tgcctcatctgaatctaatct

SEQ ID NO: 23422 - RNA, 21 nt, synthetic construct
  source 1..21: mol_type = other RNA
tgcctctcgataagatgcact

SEQ ID NO: 23423 - RNA, 21 nt, synthetic construct
  source 1..21: mol_type = other RNA
tgcctgagccttccgagtaac

SEQ ID NO: 23424 - RNA, 21 nt, synthetic construct
  source 1..21: mol_type = other RNA
tgctactattatccctgtttt

SEQ ID NO: 23425 - RNA, 21 nt, synthetic construct
  source 1..21: mol_type = other RNA
tgctcactatatgtgattcct

SEQ ID NO: 23426 - RNA, 21 nt, synthetic construct
  source 1..21: mol_type = other RNA
tgctgattttgacaaccctac

SEQ ID NO: 23427 - RNA, 21 nt, synthetic construct
  source 1..21: mol_type = other RNA
tgctggtatatcttatgttta

SEQ ID NO: 23428 - RNA, 21 nt, synthetic construct
  source 1..21: mol_type = other RNA
tgcttaatatgtcaatgtcac

SEQ ID NO: 23429 - RNA, 21 nt, synthetic construct
  source 1..21: mol_type = other RNA
tgcttcatctgtaaaactact

SEQ ID NO: 23430 - RNA, 21 nt, synthetic construct
  source 1..21: mol_type = other RNA
tgcttgctcactatatgtgat

SEQ ID NO: 23431 - RNA, 21 nt, synthetic construct
  source 1..21: mol_type = other RNA
tgctttgcagttggacatatt

SEQ ID NO: 23432 - RNA, 21 nt, synthetic construct
  source 1..21: mol_type = other RNA
tgcttttcagtttttggtcaa

SEQ ID NO: 23433 - RNA, 21 nt, synthetic construct
  source 1..21: mol_type = other RNA
tggaaggatcacttgagtttg

SEQ ID NO: 23434 - RNA, 21 nt, synthetic construct
  source 1..21: mol_type = other RNA
tggaataataactcactgcag

SEQ ID NO: 23435 - RNA, 21 nt, synthetic construct
  source 1..21: mol_type = other RNA
tggacctcaactctccccttt

SEQ ID NO: 23436 - RNA, 21 nt, synthetic construct
  source 1..21: mol_type = other RNA
tggagagacctggcagacacc

SEQ ID NO: 23437 - RNA, 21 nt, synthetic construct
  source 1..21: mol_type = other RNA
tggagctgggatttaaaccaa

SEQ ID NO: 23438 - RNA, 21 nt, synthetic construct
  source 1..21: mol_type = other RNA
tggagtgcagtggtggaataa

SEQ ID NO: 23439 - RNA, 21 nt, synthetic construct
  source 1..21: mol_type = other RNA
tggataaaaacactaactgcc

SEQ ID NO: 23440 - RNA, 21 nt, synthetic construct
  source 1..21: mol_type = other RNA
tggatcagctcttcagtctgt

SEQ ID NO: 23441 - RNA, 21 nt, synthetic construct
  source 1..21: mol_type = other RNA
tggcagacaccaccttcacca

SEQ ID NO: 23442 - RNA, 21 nt, synthetic construct
  source 1..21: mol_type = other RNA
tggcaggaatattgcagaagt

SEQ ID NO: 23443 - RNA, 21 nt, synthetic construct
  source 1..21: mol_type = other RNA
tggcagttagtgtttttatcc

SEQ ID NO: 23444 - RNA, 21 nt, synthetic construct
  source 1..21: mol_type = other RNA
tggcatggataaaaacactaa

SEQ ID NO: 23445 - RNA, 21 nt, synthetic construct
  source 1..21: mol_type = other RNA
tggcatgtgcctctcgataag

SEQ ID NO: 23446 - RNA, 21 nt, synthetic construct
  source 1..21: mol_type = other RNA
tggccaaaagttaatgacttt

SEQ ID NO: 23447 - RNA, 21 nt, synthetic construct
  source 1..21: mol_type = other RNA
tggccaaataccaaagccagc

SEQ ID NO: 23448 - RNA, 21 nt, synthetic construct
  source 1..21: mol_type = other RNA
tggcctgtattctttgttaaa

SEQ ID NO: 23449 - RNA, 21 nt, synthetic construct
  source 1..21: mol_type = other RNA
tggcgatgttaactttgatca

SEQ ID NO: 23450 - RNA, 21 nt, synthetic construct
  source 1..21: mol_type = other RNA
tggctttggtatttggccaaa

SEQ ID NO: 23451 - RNA, 21 nt, synthetic construct
  source 1..21: mol_type = other RNA
tgggactatgggcgtgtacca

SEQ ID NO: 23452 - RNA, 21 nt, synthetic construct
  source 1..21: mol_type = other RNA
tgggattgcatcttggacctc

SEQ ID NO: 23453 - RNA, 21 nt, synthetic construct
  source 1..21: mol_type = other RNA
tgggatttaaaccaaaatatg

SEQ ID NO: 23454 - RNA, 21 nt, synthetic construct
  source 1..21: mol_type = other RNA
tgggcgtgtaccacaacacct

SEQ ID NO: 23455 - RNA, 21 nt, synthetic construct
  source 1..21: mol_type = other RNA
tgggttcattatgcaccttta

SEQ ID NO: 23456 - RNA, 21 nt, synthetic construct
  source 1..21: mol_type = other RNA
tgggtttgtctgatggttata

SEQ ID NO: 23457 - RNA, 21 nt, synthetic construct
  source 1..21: mol_type = other RNA
tggtacacgcccatagtccca

SEQ ID NO: 23458 - RNA, 21 nt, synthetic construct
  source 1..21: mol_type = other RNA
tggtatttggccaaaagttaa

SEQ ID NO: 23459 - RNA, 21 nt, synthetic construct
  source 1..21: mol_type = other RNA
tggtcaatccttatgattatt

SEQ ID NO: 23460 - RNA, 21 nt, synthetic construct
  source 1..21: mol_type = other RNA
tggtcataggattgtatagtg

SEQ ID NO: 23461 - RNA, 21 nt, synthetic construct
  source 1..21: mol_type = other RNA
tggtgaaggtggtgtctgcca

SEQ ID NO: 23462 - RNA, 21 nt, synthetic construct
  source 1..21: mol_type = other RNA
tggtgctggtatatcttatgt

SEQ ID NO: 23463 - RNA, 21 nt, synthetic construct
  source 1..21: mol_type = other RNA
tggtggaataataactcactg

SEQ ID NO: 23464 - RNA, 21 nt, synthetic construct
  source 1..21: mol_type = other RNA
tggtggagctgggatttaaac

SEQ ID NO: 23465 - RNA, 21 nt, synthetic construct
  source 1..21: mol_type = other RNA
tggtgtctgccaggtctctcc

SEQ ID NO: 23466 - RNA, 21 nt, synthetic construct
  source 1..21: mol_type = other RNA
tggtgttttgtaaactgtctc

SEQ ID NO: 23467 - RNA, 21 nt, synthetic construct
  source 1..21: mol_type = other RNA
tggttatactcgagattagat

SEQ ID NO: 23468 - RNA, 21 nt, synthetic construct
  source 1..21: mol_type = other RNA
tggttatgcaaatttgtcctt

SEQ ID NO: 23469 - RNA, 21 nt, synthetic construct
  source 1..21: mol_type = other RNA
tggtttaaatcccagctccac

SEQ ID NO: 23470 - RNA, 21 nt, synthetic construct
  source 1..21: mol_type = other RNA
tggtttcaaactcaagtgatc

SEQ ID NO: 23471 - RNA, 21 nt, synthetic construct
  source 1..21: mol_type = other RNA
tgtaaaacagggataatagta

SEQ ID NO: 23472 - RNA, 21 nt, synthetic construct
  source 1..21: mol_type = other RNA
tgtaaactgtctctcaatttg

SEQ ID NO: 23473 - RNA, 21 nt, synthetic construct
  source 1..21: mol_type = other RNA
tgtaagtaacaattttagagg

SEQ ID NO: 23474 - RNA, 21 nt, synthetic construct
  source 1..21: mol_type = other RNA
tgtaccacaacacctcgctat

SEQ ID NO: 23475 - RNA, 21 nt, synthetic construct
  source 1..21: mol_type = other RNA
tgtactctgcttaatatgtca

SEQ ID NO: 23476 - RNA, 21 nt, synthetic construct
  source 1..21: mol_type = other RNA
tgtagatgagattggtcatag

SEQ ID NO: 23477 - RNA, 21 nt, synthetic construct
  source 1..21: mol_type = other RNA
tgtcaaaatcagcaaatctaa

SEQ ID NO: 23478 - RNA, 21 nt, synthetic construct
  source 1..21: mol_type = other RNA
tgtcaagttactattattccc

SEQ ID NO: 23479 - RNA, 21 nt, synthetic construct
  source 1..21: mol_type = other RNA
tgtcaatgtcacaagagagaa

SEQ ID NO: 23480 - RNA, 21 nt, synthetic construct
  source 1..21: mol_type = other RNA
tgtcacaagagagaaagacag

SEQ ID NO: 23481 - RNA, 21 nt, synthetic construct
  source 1..21: mol_type = other RNA
tgtcactaaagagaaaatcat

SEQ ID NO: 23482 - RNA, 21 nt, synthetic construct
  source 1..21: mol_type = other RNA
tgtccaactgcaaagcatgta

SEQ ID NO: 23483 - RNA, 21 nt, synthetic construct
  source 1..21: mol_type = other RNA
tgtcccagtagtgtcccttaa

SEQ ID NO: 23484 - RNA, 21 nt, synthetic construct
  source 1..21: mol_type = other RNA
tgtcccctttctggcgatgtt

SEQ ID NO: 23485 - RNA, 21 nt, synthetic construct
  source 1..21: mol_type = other RNA
tgtcccttaacaataaaaagg

SEQ ID NO: 23486 - RNA, 21 nt, synthetic construct
  source 1..21: mol_type = other RNA
tgtccttgttctaaggaaata

SEQ ID NO: 23487 - RNA, 21 nt, synthetic construct
  source 1..21: mol_type = other RNA
tgtcgggtgataaacataaga

SEQ ID NO: 23488 - RNA, 21 nt, synthetic construct
  source 1..21: mol_type = other RNA
tgtctgatggttatactcgag

SEQ ID NO: 23489 - RNA, 21 nt, synthetic construct
  source 1..21: mol_type = other RNA
tgtctgccaggtctctccact

SEQ ID NO: 23490 - RNA, 21 nt, synthetic construct
  source 1..21: mol_type = other RNA
tgtctgtcactaaagagaaaa

SEQ ID NO: 23491 - RNA, 21 nt, synthetic construct
  source 1..21: mol_type = other RNA
tgtcttcagtgcatcttatcg

SEQ ID NO: 23492 - RNA, 21 nt, synthetic construct
  source 1..21: mol_type = other RNA
tgtctttctctcttgtgacat

SEQ ID NO: 23493 - RNA, 21 nt, synthetic construct
  source 1..21: mol_type = other RNA
tgtgacattgacatattaagc

SEQ ID NO: 23494 - RNA, 21 nt, synthetic construct
  source 1..21: mol_type = other RNA
tgtgactttagctggctttgg

SEQ ID NO: 23495 - RNA, 21 nt, synthetic construct
  source 1..21: mol_type = other RNA
tgtgattccttgttacttagg

SEQ ID NO: 23496 - RNA, 21 nt, synthetic construct
  source 1..21: mol_type = other RNA
tgtgcctctcgataagatgca

SEQ ID NO: 23497 - RNA, 21 nt, synthetic construct
  source 1..21: mol_type = other RNA
tgtggtacacgcccatagtcc

SEQ ID NO: 23498 - RNA, 21 nt, synthetic construct
  source 1..21: mol_type = other RNA
tgtggttatgcaaatttgtcc

SEQ ID NO: 23499 - RNA, 21 nt, synthetic construct
  source 1..21: mol_type = other RNA
tgtgtcttcagtgcatcttat

SEQ ID NO: 23500 - RNA, 21 nt, synthetic construct
  source 1..21: mol_type = other RNA
tgtgtgtcttcagtgcatctt

SEQ ID NO: 23501 - RNA, 21 nt, synthetic construct
  source 1..21: mol_type = other RNA
tgttaactttgatcagttggt

SEQ ID NO: 23502 - RNA, 21 nt, synthetic construct
  source 1..21: mol_type = other RNA
tgttaagggacactactggga

SEQ ID NO: 23503 - RNA, 21 nt, synthetic construct
  source 1..21: mol_type = other RNA
tgttacttacatgctttgcag

SEQ ID NO: 23504 - RNA, 21 nt, synthetic construct
  source 1..21: mol_type = other RNA
tgttacttagggtcacctccg

SEQ ID NO: 23505 - RNA, 21 nt, synthetic construct
  source 1..21: mol_type = other RNA
tgttgcccaggctggtttcaa

SEQ ID NO: 23506 - RNA, 21 nt, synthetic construct
  source 1..21: mol_type = other RNA
tgttggtggagctgggattta

SEQ ID NO: 23507 - RNA, 21 nt, synthetic construct
  source 1..21: mol_type = other RNA
tgttgtggtacacgcccatag

SEQ ID NO: 23508 - RNA, 21 nt, synthetic construct
  source 1..21: mol_type = other RNA
tgtttatcacccgacagttgt

SEQ ID NO: 23509 - RNA, 21 nt, synthetic construct
  source 1..21: mol_type = other RNA
tgttttacagagaaggaaacc

SEQ ID NO: 23510 - RNA, 21 nt, synthetic construct
  source 1..21: mol_type = other RNA
tgttttgtaaactgtctctca

SEQ ID NO: 23511 - RNA, 21 nt, synthetic construct
  source 1..21: mol_type = other RNA
tgtttttatccatgccaagcg

SEQ ID NO: 23512 - RNA, 21 nt, synthetic construct
  source 1..21: mol_type = other RNA
ttaaaccaaaatatgtccaac

SEQ ID NO: 23513 - RNA, 21 nt, synthetic construct
  source 1..21: mol_type = other RNA
ttaaatcccagctccaccaac

SEQ ID NO: 23514 - RNA, 21 nt, synthetic construct
  source 1..21: mol_type = other RNA
ttaacaaagaatacaggccaa

SEQ ID NO: 23515 - RNA, 21 nt, synthetic construct
  source 1..21: mol_type = other RNA
ttaacaactgtcgggtgataa

SEQ ID NO: 23516 - RNA, 21 nt, synthetic construct
  source 1..21: mol_type = other RNA
ttaacaataaaaaggggagag

SEQ ID NO: 23517 - RNA, 21 nt, synthetic construct
  source 1..21: mol_type = other RNA
ttaacatcgccagaaagggga

SEQ ID NO: 23518 - RNA, 21 nt, synthetic construct
  source 1..21: mol_type = other RNA
ttaactttgatcagttggtga

SEQ ID NO: 23519 - RNA, 21 nt, synthetic construct
  source 1..21: mol_type = other RNA
ttaacttttggccaaatacca

SEQ ID NO: 23520 - RNA, 21 nt, synthetic construct
  source 1..21: mol_type = other RNA
ttaagatgaaatgcactagtt

SEQ ID NO: 23521 - RNA, 21 nt, synthetic construct
  source 1..21: mol_type = other RNA
ttaagcagagtacaaggctgg

SEQ ID NO: 23522 - RNA, 21 nt, synthetic construct
  source 1..21: mol_type = other RNA
ttaagggacactactgggaca

SEQ ID NO: 23523 - RNA, 21 nt, synthetic construct
  source 1..21: mol_type = other RNA
ttaatatgtcaatgtcacaag

SEQ ID NO: 23524 - RNA, 21 nt, synthetic construct
  source 1..21: mol_type = other RNA
ttaatctcgagccttcttcag

SEQ ID NO: 23525 - RNA, 21 nt, synthetic construct
  source 1..21: mol_type = other RNA
ttaatgactttggcagttagt

SEQ ID NO: 23526 - RNA, 21 nt, synthetic construct
  source 1..21: mol_type = other RNA
ttaatgcaaaagctgatctgg

SEQ ID NO: 23527 - RNA, 21 nt, synthetic construct
  source 1..21: mol_type = other RNA
ttacaaaacaccagccttgta

SEQ ID NO: 23528 - RNA, 21 nt, synthetic construct
  source 1..21: mol_type = other RNA
ttacagagaaggaaaccgagg

SEQ ID NO: 23529 - RNA, 21 nt, synthetic construct
  source 1..21: mol_type = other RNA
ttacagatgaagcactaaaac

SEQ ID NO: 23530 - RNA, 21 nt, synthetic construct
  source 1..21: mol_type = other RNA
ttacatgctttgcagttggac

SEQ ID NO: 23531 - RNA, 21 nt, synthetic construct
  source 1..21: mol_type = other RNA
ttactcggaaggctcaggcag

SEQ ID NO: 23532 - RNA, 21 nt, synthetic construct
  source 1..21: mol_type = other RNA
ttacttacatgctttgcagtt

SEQ ID NO: 23533 - RNA, 21 nt, synthetic construct
  source 1..21: mol_type = other RNA
ttacttagggtcacctccgta

SEQ ID NO: 23534 - RNA, 21 nt, synthetic construct
  source 1..21: mol_type = other RNA
ttagaacaaggacaaatttgc

SEQ ID NO: 23535 - RNA, 21 nt, synthetic construct
  source 1..21: mol_type = other RNA
ttagaggagaaagttcagttt

SEQ ID NO: 23536 - RNA, 21 nt, synthetic construct
  source 1..21: mol_type = other RNA
ttagagggtatacggaggtga

SEQ ID NO: 23537 - RNA, 21 nt, synthetic construct
  source 1..21: mol_type = other RNA
ttagattcagatgaggcattc

SEQ ID NO: 23538 - RNA, 21 nt, synthetic construct
  source 1..21: mol_type = other RNA
ttagatttgctgattttgaca

SEQ ID NO: 23539 - RNA, 21 nt, synthetic construct
  source 1..21: mol_type = other RNA
ttagctggctttggtatttgg

SEQ ID NO: 23540 - RNA, 21 nt, synthetic construct
  source 1..21: mol_type = other RNA
ttaggagatgaagtctgaggt

SEQ ID NO: 23541 - RNA, 21 nt, synthetic construct
  source 1..21: mol_type = other RNA
ttaggagtaaaggtgcataat

SEQ ID NO: 23542 - RNA, 21 nt, synthetic construct
  source 1..21: mol_type = other RNA
ttaggcaggtgctactattat

SEQ ID NO: 23543 - RNA, 21 nt, synthetic construct
  source 1..21: mol_type = other RNA
ttagggtcacctccgtatacc

SEQ ID NO: 23544 - RNA, 21 nt, synthetic construct
  source 1..21: mol_type = other RNA
ttagtgcttcatctgtaaaac

SEQ ID NO: 23545 - RNA, 21 nt, synthetic construct
  source 1..21: mol_type = other RNA
ttagtgtttttatccatgcca

SEQ ID NO: 23546 - RNA, 21 nt, synthetic construct
  source 1..21: mol_type = other RNA
ttatactcgagattagattca

SEQ ID NO: 23547 - RNA, 21 nt, synthetic construct
  source 1..21: mol_type = other RNA
ttatagaggctgaggtggaag

SEQ ID NO: 23548 - RNA, 21 nt, synthetic construct
  source 1..21: mol_type = other RNA
ttatcacccgacagttgttaa

SEQ ID NO: 23549 - RNA, 21 nt, synthetic construct
  source 1..21: mol_type = other RNA
ttatccatgccaagcgatgat

SEQ ID NO: 23550 - RNA, 21 nt, synthetic construct
  source 1..21: mol_type = other RNA
ttatccctgttttacagagaa

SEQ ID NO: 23551 - RNA, 21 nt, synthetic construct
  source 1..21: mol_type = other RNA
ttatcgagaggcacatgccat

SEQ ID NO: 23552 - RNA, 21 nt, synthetic construct
  source 1..21: mol_type = other RNA
ttatgcaaatttgtccttgtt

SEQ ID NO: 23553 - RNA, 21 nt, synthetic construct
  source 1..21: mol_type = other RNA
ttatgcacctttactcctaaa

SEQ ID NO: 23554 - RNA, 21 nt, synthetic construct
  source 1..21: mol_type = other RNA
ttatgtttatcacccgacagt

SEQ ID NO: 23555 - RNA, 21 nt, synthetic construct
  source 1..21: mol_type = other RNA
ttattattccaccactgcact

SEQ ID NO: 23556 - RNA, 21 nt, synthetic construct
  source 1..21: mol_type = other RNA
ttattgttaagggacactact

SEQ ID NO: 23557 - RNA, 21 nt, synthetic construct
  source 1..21: mol_type = other RNA
ttatttagaggagaaagttca

SEQ ID NO: 23558 - RNA, 21 nt, synthetic construct
  source 1..21: mol_type = other RNA
ttatttaggagtaaaggtgca

SEQ ID NO: 23559 - RNA, 21 nt, synthetic construct
  source 1..21: mol_type = other RNA
ttatttccttagaacaaggac

SEQ ID NO: 23560 - RNA, 21 nt, synthetic construct
  source 1..21: mol_type = other RNA
ttcaaactcaagtgatccttc

SEQ ID NO: 23561 - RNA, 21 nt, synthetic construct
  source 1..21: mol_type = other RNA
ttcaaattttatagaggctga

SEQ ID NO: 23562 - RNA, 21 nt, synthetic construct
  source 1..21: mol_type = other RNA
ttcaaggctgcagtgagttat

SEQ ID NO: 23563 - RNA, 21 nt, synthetic construct
  source 1..21: mol_type = other RNA
ttcaccaactgatcaaagtta

SEQ ID NO: 23564 - RNA, 21 nt, synthetic construct
  source 1..21: mol_type = other RNA
ttcagatgaggcattcttggc

SEQ ID NO: 23565 - RNA, 21 nt, synthetic construct
  source 1..21: mol_type = other RNA
ttcagtctggatcagctcttc

SEQ ID NO: 23566 - RNA, 21 nt, synthetic construct
  source 1..21: mol_type = other RNA
ttcagtctgtctttctctctt

SEQ ID NO: 23567 - RNA, 21 nt, synthetic construct
  source 1..21: mol_type = other RNA
ttcagtgcatcttatcgagag

SEQ ID NO: 23568 - RNA, 21 nt, synthetic construct
  source 1..21: mol_type = other RNA
ttcagtttggtgctggtatat

SEQ ID NO: 23569 - RNA, 21 nt, synthetic construct
  source 1..21: mol_type = other RNA
ttcagtttttggtcaatcctt

SEQ ID NO: 23570 - RNA, 21 nt, synthetic construct
  source 1..21: mol_type = other RNA
ttcataagcatttgaaaatgg

SEQ ID NO: 23571 - RNA, 21 nt, synthetic construct
  source 1..21: mol_type = other RNA
ttcatctcctaagcctcggtt

SEQ ID NO: 23572 - RNA, 21 nt, synthetic construct
  source 1..21: mol_type = other RNA
ttcattatgcacctttactcc

SEQ ID NO: 23573 - RNA, 21 nt, synthetic construct
  source 1..21: mol_type = other RNA
ttccacctcagcctctataaa

SEQ ID NO: 23574 - RNA, 21 nt, synthetic construct
  source 1..21: mol_type = other RNA
ttccctttataatttgcagtt

SEQ ID NO: 23575 - RNA, 21 nt, synthetic construct
  source 1..21: mol_type = other RNA
ttccgagtaactgggactatg

SEQ ID NO: 23576 - RNA, 21 nt, synthetic construct
  source 1..21: mol_type = other RNA
ttcctactttttgtagagacg

SEQ ID NO: 23577 - RNA, 21 nt, synthetic construct
  source 1..21: mol_type = other RNA
ttcctgccaagaatgcctcat

SEQ ID NO: 23578 - RNA, 21 nt, synthetic construct
  source 1..21: mol_type = other RNA
ttccttagaacaaggacaaat

SEQ ID NO: 23579 - RNA, 21 nt, synthetic construct
  source 1..21: mol_type = other RNA
ttccttctctgtaaaacaggg

SEQ ID NO: 23580 - RNA, 21 nt, synthetic construct
  source 1..21: mol_type = other RNA
ttccttgttacttagggtcac

SEQ ID NO: 23581 - RNA, 21 nt, synthetic construct
  source 1..21: mol_type = other RNA
ttcgttttgagacagggtctc

SEQ ID NO: 23582 - RNA, 21 nt, synthetic construct
  source 1..21: mol_type = other RNA
ttctctcttgtgacattgaca

SEQ ID NO: 23583 - RNA, 21 nt, synthetic construct
  source 1..21: mol_type = other RNA
ttctctgtaaaacagggataa

SEQ ID NO: 23584 - RNA, 21 nt, synthetic construct
  source 1..21: mol_type = other RNA
ttctctttagtgacagacatt

SEQ ID NO: 23585 - RNA, 21 nt, synthetic construct
  source 1..21: mol_type = other RNA
ttctgcaatattcctgccaag

SEQ ID NO: 23586 - RNA, 21 nt, synthetic construct
  source 1..21: mol_type = other RNA
ttctggcgatgttaactttga

SEQ ID NO: 23587 - RNA, 21 nt, synthetic construct
  source 1..21: mol_type = other RNA
ttcttcagtctggatcagctc

SEQ ID NO: 23588 - RNA, 21 nt, synthetic construct
  source 1..21: mol_type = other RNA
ttcttggcaggaatattgcag

SEQ ID NO: 23589 - RNA, 21 nt, synthetic construct
  source 1..21: mol_type = other RNA
ttgaaaatgggttcattatgc

SEQ ID NO: 23590 - RNA, 21 nt, synthetic construct
  source 1..21: mol_type = other RNA
ttgaataaagttgtagatgag

SEQ ID NO: 23591 - RNA, 21 nt, synthetic construct
  source 1..21: mol_type = other RNA
ttgacaaccctactgtggtta

SEQ ID NO: 23592 - RNA, 21 nt, synthetic construct
  source 1..21: mol_type = other RNA
ttgacagtggagagacctggc

SEQ ID NO: 23593 - RNA, 21 nt, synthetic construct
  source 1..21: mol_type = other RNA
ttgacatattaagcagagtac

SEQ ID NO: 23594 - RNA, 21 nt, synthetic construct
  source 1..21: mol_type = other RNA
ttgaccaaaaactgaaaagca

SEQ ID NO: 23595 - RNA, 21 nt, synthetic construct
  source 1..21: mol_type = other RNA
ttgagagacagtttacaaaac

SEQ ID NO: 23596 - RNA, 21 nt, synthetic construct
  source 1..21: mol_type = other RNA
ttgaggtccaagatgcaatcc

SEQ ID NO: 23597 - RNA, 21 nt, synthetic construct
  source 1..21: mol_type = other RNA
ttgatacactatacaatccta

SEQ ID NO: 23598 - RNA, 21 nt, synthetic construct
  source 1..21: mol_type = other RNA
ttgatcagttggtgaaggtgg

SEQ ID NO: 23599 - RNA, 21 nt, synthetic construct
  source 1..21: mol_type = other RNA
ttgcacaagcccttaggcagg

SEQ ID NO: 23600 - RNA, 21 nt, synthetic construct
  source 1..21: mol_type = other RNA
ttgcagaagtgagtgtgtgtc

SEQ ID NO: 23601 - RNA, 21 nt, synthetic construct
  source 1..21: mol_type = other RNA
ttgcagttggacatattttgg

SEQ ID NO: 23602 - RNA, 21 nt, synthetic construct
  source 1..21: mol_type = other RNA
ttgcagtttaagatgaaatgc

SEQ ID NO: 23603 - RNA, 21 nt, synthetic construct
  source 1..21: mol_type = other RNA
ttgcataaccacagtagggtt

SEQ ID NO: 23604 - RNA, 21 nt, synthetic construct
  source 1..21: mol_type = other RNA
ttgcatcttggacctcaactc

SEQ ID NO: 23605 - RNA, 21 nt, synthetic construct
  source 1..21: mol_type = other RNA
ttgcattaatctcgagccttc

SEQ ID NO: 23606 - RNA, 21 nt, synthetic construct
  source 1..21: mol_type = other RNA
ttgcccaggctggtttcaaac

SEQ ID NO: 23607 - RNA, 21 nt, synthetic construct
  source 1..21: mol_type = other RNA
ttgctcactatatgtgattcc

SEQ ID NO: 23608 - RNA, 21 nt, synthetic construct
  source 1..21: mol_type = other RNA
ttgctgattttgacaacccta

SEQ ID NO: 23609 - RNA, 21 nt, synthetic construct
  source 1..21: mol_type = other RNA
ttgcttgctcactatatgtga

SEQ ID NO: 23610 - RNA, 21 nt, synthetic construct
  source 1..21: mol_type = other RNA
ttgcttttcagtttttggtca

SEQ ID NO: 23611 - RNA, 21 nt, synthetic construct
  source 1..21: mol_type = other RNA
ttggacctcaactctcccctt

SEQ ID NO: 23612 - RNA, 21 nt, synthetic construct
  source 1..21: mol_type = other RNA
ttggcaggaatattgcagaag

SEQ ID NO: 23613 - RNA, 21 nt, synthetic construct
  source 1..21: mol_type = other RNA
ttggcagttagtgtttttatc

SEQ ID NO: 23614 - RNA, 21 nt, synthetic construct
  source 1..21: mol_type = other RNA
ttggcatggataaaaacacta

SEQ ID NO: 23615 - RNA, 21 nt, synthetic construct
  source 1..21: mol_type = other RNA
ttggccaaaagttaatgactt

SEQ ID NO: 23616 - RNA, 21 nt, synthetic construct
  source 1..21: mol_type = other RNA
ttggccaaataccaaagccag

SEQ ID NO: 23617 - RNA, 21 nt, synthetic construct
  source 1..21: mol_type = other RNA
ttggcctgtattctttgttaa

SEQ ID NO: 23618 - RNA, 21 nt, synthetic construct
  source 1..21: mol_type = other RNA
ttgggtttgtctgatggttat

SEQ ID NO: 23619 - RNA, 21 nt, synthetic construct
  source 1..21: mol_type = other RNA
ttggtatttggccaaaagtta

SEQ ID NO: 23620 - RNA, 21 nt, synthetic construct
  source 1..21: mol_type = other RNA
ttggtcaatccttatgattat

SEQ ID NO: 23621 - RNA, 21 nt, synthetic construct
  source 1..21: mol_type = other RNA
ttggtcataggattgtatagt

SEQ ID NO: 23622 - RNA, 21 nt, synthetic construct
  source 1..21: mol_type = other RNA
ttggtgaaggtggtgtctgcc

SEQ ID NO: 23623 - RNA, 21 nt, synthetic construct
  source 1..21: mol_type = other RNA
ttggtgctggtatatcttatg

SEQ ID NO: 23624 - RNA, 21 nt, synthetic construct
  source 1..21: mol_type = other RNA
ttggtggagctgggatttaaa

SEQ ID NO: 23625 - RNA, 21 nt, synthetic construct
  source 1..21: mol_type = other RNA
ttggtttaaatcccagctcca

SEQ ID NO: 23626 - RNA, 21 nt, synthetic construct
  source 1..21: mol_type = other RNA
ttgtaaactgtctctcaattt

SEQ ID NO: 23627 - RNA, 21 nt, synthetic construct
  source 1..21: mol_type = other RNA
ttgtactctgcttaatatgtc

SEQ ID NO: 23628 - RNA, 21 nt, synthetic construct
  source 1..21: mol_type = other RNA
ttgtagatgagattggtcata

SEQ ID NO: 23629 - RNA, 21 nt, synthetic construct
  source 1..21: mol_type = other RNA
ttgtcaaaatcagcaaatcta

SEQ ID NO: 23630 - RNA, 21 nt, synthetic construct
  source 1..21: mol_type = other RNA
ttgtcccagtagtgtccctta

SEQ ID NO: 23631 - RNA, 21 nt, synthetic construct
  source 1..21: mol_type = other RNA
ttgtccttgttctaaggaaat

SEQ ID NO: 23632 - RNA, 21 nt, synthetic construct
  source 1..21: mol_type = other RNA
ttgtctgatggttatactcga

SEQ ID NO: 23633 - RNA, 21 nt, synthetic construct
  source 1..21: mol_type = other RNA
ttgtgacattgacatattaag

SEQ ID NO: 23634 - RNA, 21 nt, synthetic construct
  source 1..21: mol_type = other RNA
ttgtggtacacgcccatagtc

SEQ ID NO: 23635 - RNA, 21 nt, synthetic construct
  source 1..21: mol_type = other RNA
ttgttaagggacactactggg

SEQ ID NO: 23636 - RNA, 21 nt, synthetic construct
  source 1..21: mol_type = other RNA
ttgttacttacatgctttgca

SEQ ID NO: 23637 - RNA, 21 nt, synthetic construct
  source 1..21: mol_type = other RNA
ttgttacttagggtcacctcc

SEQ ID NO: 23638 - RNA, 21 nt, synthetic construct
  source 1..21: mol_type = other RNA
tttaaatcccagctccaccaa

SEQ ID NO: 23639 - RNA, 21 nt, synthetic construct
  source 1..21: mol_type = other RNA
tttaacaaagaatacaggcca

SEQ ID NO: 23640 - RNA, 21 nt, synthetic construct
  source 1..21: mol_type = other RNA
tttaagatgaaatgcactagt

SEQ ID NO: 23641 - RNA, 21 nt, synthetic construct
  source 1..21: mol_type = other RNA
tttacaaaacaccagccttgt

SEQ ID NO: 23642 - RNA, 21 nt, synthetic construct
  source 1..21: mol_type = other RNA
tttacagagaaggaaaccgag

SEQ ID NO: 23643 - RNA, 21 nt, synthetic construct
  source 1..21: mol_type = other RNA
tttacagatgaagcactaaaa

SEQ ID NO: 23644 - RNA, 21 nt, synthetic construct
  source 1..21: mol_type = other RNA
tttagaggagaaagttcagtt

SEQ ID NO: 23645 - RNA, 21 nt, synthetic construct
  source 1..21: mol_type = other RNA
tttagagggtatacggaggtg

SEQ ID NO: 23646 - RNA, 21 nt, synthetic construct
  source 1..21: mol_type = other RNA
tttagctggctttggtatttg

SEQ ID NO: 23647 - RNA, 21 nt, synthetic construct
  source 1..21: mol_type = other RNA
tttaggagtaaaggtgcataa

SEQ ID NO: 23648 - RNA, 21 nt, synthetic construct
  source 1..21: mol_type = other RNA
tttagtgcttcatctgtaaaa

SEQ ID NO: 23649 - RNA, 21 nt, synthetic construct
  source 1..21: mol_type = other RNA
tttatagaggctgaggtggaa

SEQ ID NO: 23650 - RNA, 21 nt, synthetic construct
  source 1..21: mol_type = other RNA
tttatcacccgacagttgtta

SEQ ID NO: 23651 - RNA, 21 nt, synthetic construct
  source 1..21: mol_type = other RNA
tttatccatgccaagcgatga

SEQ ID NO: 23652 - RNA, 21 nt, synthetic construct
  source 1..21: mol_type = other RNA
tttattgttaagggacactac

SEQ ID NO: 23653 - RNA, 21 nt, synthetic construct
  source 1..21: mol_type = other RNA
tttatttccttagaacaagga

SEQ ID NO: 23654 - RNA, 21 nt, synthetic construct
  source 1..21: mol_type = other RNA
tttcaaactcaagtgatcctt

SEQ ID NO: 23655 - RNA, 21 nt, synthetic construct
  source 1..21: mol_type = other RNA
tttcagtttttggtcaatcct

SEQ ID NO: 23656 - RNA, 21 nt, synthetic construct
  source 1..21: mol_type = other RNA
tttcctactttttgtagagac

SEQ ID NO: 23657 - RNA, 21 nt, synthetic construct
  source 1..21: mol_type = other RNA
tttccttagaacaaggacaaa

SEQ ID NO: 23658 - RNA, 21 nt, synthetic construct
  source 1..21: mol_type = other RNA
tttccttctctgtaaaacagg

SEQ ID NO: 23659 - RNA, 21 nt, synthetic construct
  source 1..21: mol_type = other RNA
tttcgttttgagacagggtct

SEQ ID NO: 23660 - RNA, 21 nt, synthetic construct
  source 1..21: mol_type = other RNA
tttctctcttgtgacattgac

SEQ ID NO: 23661 - RNA, 21 nt, synthetic construct
  source 1..21: mol_type = other RNA
tttctctttagtgacagacat

SEQ ID NO: 23662 - RNA, 21 nt, synthetic construct
  source 1..21: mol_type = other RNA
tttctggcgatgttaactttg

SEQ ID NO: 23663 - RNA, 21 nt, synthetic construct
  source 1..21: mol_type = other RNA
tttgaaaatgggttcattatg

SEQ ID NO: 23664 - RNA, 21 nt, synthetic construct
  source 1..21: mol_type = other RNA
tttgacaaccctactgtggtt

SEQ ID NO: 23665 - RNA, 21 nt, synthetic construct
  source 1..21: mol_type = other RNA
tttgatcagttggtgaaggtg

SEQ ID NO: 23666 - RNA, 21 nt, synthetic construct
  source 1..21: mol_type = other RNA
tttgcagttggacatattttg

SEQ ID NO: 23667 - RNA, 21 nt, synthetic construct
  source 1..21: mol_type = other RNA
tttgcagtttaagatgaaatg

SEQ ID NO: 23668 - RNA, 21 nt, synthetic construct
  source 1..21: mol_type = other RNA
tttgcataaccacagtagggt

SEQ ID NO: 23669 - RNA, 21 nt, synthetic construct
  source 1..21: mol_type = other RNA
tttgcattaatctcgagcctt

SEQ ID NO: 23670 - RNA, 21 nt, synthetic construct
  source 1..21: mol_type = other RNA
tttgctgattttgacaaccct

SEQ ID NO: 23671 - RNA, 21 nt, synthetic construct
  source 1..21: mol_type = other RNA
tttgcttttcagtttttggtc

SEQ ID NO: 23672 - RNA, 21 nt, synthetic construct
  source 1..21: mol_type = other RNA
tttggcagttagtgtttttat

SEQ ID NO: 23673 - RNA, 21 nt, synthetic construct
  source 1..21: mol_type = other RNA
tttggccaaaagttaatgact

SEQ ID NO: 23674 - RNA, 21 nt, synthetic construct
  source 1..21: mol_type = other RNA
tttggccaaataccaaagcca

SEQ ID NO: 23675 - RNA, 21 nt, synthetic construct
  source 1..21: mol_type = other RNA
tttgggtttgtctgatggtta

SEQ ID NO: 23676 - RNA, 21 nt, synthetic construct
  source 1..21: mol_type = other RNA
tttggtatttggccaaaagtt

SEQ ID NO: 23677 - RNA, 21 nt, synthetic construct
  source 1..21: mol_type = other RNA
tttggtcaatccttatgatta

SEQ ID NO: 23678 - RNA, 21 nt, synthetic construct
  source 1..21: mol_type = other RNA
tttggtgctggtatatcttat

SEQ ID NO: 23679 - RNA, 21 nt, synthetic construct
  source 1..21: mol_type = other RNA
tttggtttaaatcccagctcc

SEQ ID NO: 23680 - RNA, 21 nt, synthetic construct
  source 1..21: mol_type = other RNA
tttgtaaactgtctctcaatt

SEQ ID NO: 23681 - RNA, 21 nt, synthetic construct
  source 1..21: mol_type = other RNA
tttgtccttgttctaaggaaa

SEQ ID NO: 23682 - RNA, 21 nt, synthetic construct
  source 1..21: mol_type = other RNA
tttgtctgatggttatactcg

SEQ ID NO: 23683 - RNA, 21 nt, synthetic construct
  source 1..21: mol_type = other RNA
ttttaacaaagaatacaggcc

SEQ ID NO: 23684 - RNA, 21 nt, synthetic construct
  source 1..21: mol_type = other RNA
ttttacagagaaggaaaccga

SEQ ID NO: 23685 - RNA, 21 nt, synthetic construct
  source 1..21: mol_type = other RNA
ttttacagatgaagcactaaa

SEQ ID NO: 23686 - RNA, 21 nt, synthetic construct
  source 1..21: mol_type = other RNA
ttttagagggtatacggaggt

SEQ ID NO: 23687 - RNA, 21 nt, synthetic construct
  source 1..21: mol_type = other RNA
ttttagtgcttcatctgtaaa

SEQ ID NO: 23688 - RNA, 21 nt, synthetic construct
  source 1..21: mol_type = other RNA
ttttatagaggctgaggtgga

SEQ ID NO: 23689 - RNA, 21 nt, synthetic construct
  source 1..21: mol_type = other RNA
ttttatccatgccaagcgatg

SEQ ID NO: 23690 - RNA, 21 nt, synthetic construct
  source 1..21: mol_type = other RNA
ttttattgttaagggacacta

SEQ ID NO: 23691 - RNA, 21 nt, synthetic construct
  source 1..21: mol_type = other RNA
ttttcagtttttggtcaatcc

SEQ ID NO: 23692 - RNA, 21 nt, synthetic construct
  source 1..21: mol_type = other RNA
ttttcctactttttgtagaga

SEQ ID NO: 23693 - RNA, 21 nt, synthetic construct
  source 1..21: mol_type = other RNA
ttttcgttttgagacagggtc

SEQ ID NO: 23694 - RNA, 21 nt, synthetic construct
  source 1..21: mol_type = other RNA
ttttctctttagtgacagaca

SEQ ID NO: 23695 - RNA, 21 nt, synthetic construct
  source 1..21: mol_type = other RNA
ttttgacaaccctactgtggt

SEQ ID NO: 23696 - RNA, 21 nt, synthetic construct
  source 1..21: mol_type = other RNA
ttttgcattaatctcgagcct

SEQ ID NO: 23697 - RNA, 21 nt, synthetic construct
  source 1..21: mol_type = other RNA
ttttggccaaataccaaagcc

SEQ ID NO: 23698 - RNA, 21 nt, synthetic construct
  source 1..21: mol_type = other RNA
ttttggtcaatccttatgatt

SEQ ID NO: 23699 - RNA, 21 nt, synthetic construct
  source 1..21: mol_type = other RNA
ttttggtttaaatcccagctc

SEQ ID NO: 23700 - RNA, 21 nt, synthetic construct
  source 1..21: mol_type = other RNA
tttttaacaaagaatacaggc

SEQ ID NO: 23701 - RNA, 21 nt, synthetic construct
  source 1..21: mol_type = other RNA
tttttatccatgccaagcgat

SEQ ID NO: 23702 - RNA, 21 nt, synthetic construct
  source 1..21: mol_type = other RNA
tttttattgttaagggacact

SEQ ID NO: 23703 - RNA, 21 nt, synthetic construct
  source 1..21: mol_type = other RNA
tttttcctactttttgtagag

SEQ ID NO: 23704 - RNA, 21 nt, synthetic construct
  source 1..21: mol_type = other RNA
tttttcgttttgagacagggt

SEQ ID NO: 23705 - RNA, 21 nt, synthetic construct
  source 1..21: mol_type = other RNA
tttttggtcaatccttatgat

SEQ ID NO: 23706 - RNA, 22 nt, synthetic construct
  source 1..22: mol_type = other RNA
aaaaaatagcgaggtgttgtgg

SEQ ID NO: 23707 - RNA, 22 nt, synthetic construct
  source 1..22: mol_type = other RNA
aaaaaatgtctgtcactaaaga

SEQ ID NO: 23708 - RNA, 22 nt, synthetic construct
  source 1..22: mol_type = other RNA
aaaaaattgtcccagtagtgtc

SEQ ID NO: 23709 - RNA, 22 nt, synthetic construct
  source 1..22: mol_type = other RNA
aaaaacactaactgccaaagtc

SEQ ID NO: 23710 - RNA, 22 nt, synthetic construct
  source 1..22: mol_type = other RNA
aaaaactgaaaagcaaattgct

SEQ ID NO: 23711 - RNA, 22 nt, synthetic construct
  source 1..22: mol_type = other RNA
aaaaagagattaacaactgtcg

SEQ ID NO: 23712 - RNA, 22 nt, synthetic construct
  source 1..22: mol_type = other RNA
aaaaaggggagagttgaggtcc

SEQ ID NO: 23713 - RNA, 22 nt, synthetic construct
  source 1..22: mol_type = other RNA
aaaaatagcgaggtgttgtggt

SEQ ID NO: 23714 - RNA, 22 nt, synthetic construct
  source 1..22: mol_type = other RNA
aaaaatgtctgtcactaaagag

SEQ ID NO: 23715 - RNA, 22 nt, synthetic construct
  source 1..22: mol_type = other RNA
aaaaattgtcccagtagtgtcc

SEQ ID NO: 23716 - RNA, 22 nt, synthetic construct
  source 1..22: mol_type = other RNA
aaaacaccagccttgtactctg

SEQ ID NO: 23717 - RNA, 22 nt, synthetic construct
  source 1..22: mol_type = other RNA
aaaacactaactgccaaagtca

SEQ ID NO: 23718 - RNA, 22 nt, synthetic construct
  source 1..22: mol_type = other RNA
aaaacagggataatagtagcac

SEQ ID NO: 23719 - RNA, 22 nt, synthetic construct
  source 1..22: mol_type = other RNA
aaaactagtgcatttcatctta

SEQ ID NO: 23720 - RNA, 22 nt, synthetic construct
  source 1..22: mol_type = other RNA
aaaactgaaaagcaaattgctt

SEQ ID NO: 23721 - RNA, 22 nt, synthetic construct
  source 1..22: mol_type = other RNA
aaaagagattaacaactgtcgg

SEQ ID NO: 23722 - RNA, 22 nt, synthetic construct
  source 1..22: mol_type = other RNA
aaaagcaaattgcttgctcact

SEQ ID NO: 23723 - RNA, 22 nt, synthetic construct
  source 1..22: mol_type = other RNA
aaaagctgatctgggattgcat

SEQ ID NO: 23724 - RNA, 22 nt, synthetic construct
  source 1..22: mol_type = other RNA
aaaaggggagagttgaggtcca

SEQ ID NO: 23725 - RNA, 22 nt, synthetic construct
  source 1..22: mol_type = other RNA
aaaagtagttttacagatgaag

SEQ ID NO: 23726 - RNA, 22 nt, synthetic construct
  source 1..22: mol_type = other RNA
aaaagttaatgactttggcagt

SEQ ID NO: 23727 - RNA, 22 nt, synthetic construct
  source 1..22: mol_type = other RNA
aaaatagcgaggtgttgtggta

SEQ ID NO: 23728 - RNA, 22 nt, synthetic construct
  source 1..22: mol_type = other RNA
aaaatatgtccaactgcaaagc

SEQ ID NO: 23729 - RNA, 22 nt, synthetic construct
  source 1..22: mol_type = other RNA
aaaatcatcatcgcttggcatg

SEQ ID NO: 23730 - RNA, 22 nt, synthetic construct
  source 1..22: mol_type = other RNA
aaaatgggttcattatgcacct

SEQ ID NO: 23731 - RNA, 22 nt, synthetic construct
  source 1..22: mol_type = other RNA
aaaatgtctgtcactaaagaga

SEQ ID NO: 23732 - RNA, 22 nt, synthetic construct
  source 1..22: mol_type = other RNA
aaaattgtcccagtagtgtccc

SEQ ID NO: 23733 - RNA, 22 nt, synthetic construct
  source 1..22: mol_type = other RNA
aaacaccagccttgtactctgc

SEQ ID NO: 23734 - RNA, 22 nt, synthetic construct
  source 1..22: mol_type = other RNA
aaacactaactgccaaagtcat

SEQ ID NO: 23735 - RNA, 22 nt, synthetic construct
  source 1..22: mol_type = other RNA
aaacagggataatagtagcacc

SEQ ID NO: 23736 - RNA, 22 nt, synthetic construct
  source 1..22: mol_type = other RNA
aaacataagatataccagcacc

SEQ ID NO: 23737 - RNA, 22 nt, synthetic construct
  source 1..22: mol_type = other RNA
aaaccaaaatatgtccaactgc

SEQ ID NO: 23738 - RNA, 22 nt, synthetic construct
  source 1..22: mol_type = other RNA
aaacccaaattgagagacagtt

SEQ ID NO: 23739 - RNA, 22 nt, synthetic construct
  source 1..22: mol_type = other RNA
aaaccgaggcttaggagatgaa

SEQ ID NO: 23740 - RNA, 22 nt, synthetic construct
  source 1..22: mol_type = other RNA
aaactagtgcatttcatcttaa

SEQ ID NO: 23741 - RNA, 22 nt, synthetic construct
  source 1..22: mol_type = other RNA
aaactgaaaagcaaattgcttg

SEQ ID NO: 23742 - RNA, 22 nt, synthetic construct
  source 1..22: mol_type = other RNA
aaactgaactttctcctctaaa

SEQ ID NO: 23743 - RNA, 22 nt, synthetic construct
  source 1..22: mol_type = other RNA
aaactgcaaattataaagggaa

SEQ ID NO: 23744 - RNA, 22 nt, synthetic construct
  source 1..22: mol_type = other RNA
aaactgtctctcaatttgggtt

SEQ ID NO: 23745 - RNA, 22 nt, synthetic construct
  source 1..22: mol_type = other RNA
aaagaatacaggccaaggccct

SEQ ID NO: 23746 - RNA, 22 nt, synthetic construct
  source 1..22: mol_type = other RNA
aaagacagactgaagagctgat

SEQ ID NO: 23747 - RNA, 22 nt, synthetic construct
  source 1..22: mol_type = other RNA
aaagagaaaatcatcatcgctt

SEQ ID NO: 23748 - RNA, 22 nt, synthetic construct
  source 1..22: mol_type = other RNA
aaagagattaacaactgtcggg

SEQ ID NO: 23749 - RNA, 22 nt, synthetic construct
  source 1..22: mol_type = other RNA
aaagcaaattgcttgctcacta

SEQ ID NO: 23750 - RNA, 22 nt, synthetic construct
  source 1..22: mol_type = other RNA
aaagccagctaaagtcacaggg

SEQ ID NO: 23751 - RNA, 22 nt, synthetic construct
  source 1..22: mol_type = other RNA
aaagctgatctgggattgcatc

SEQ ID NO: 23752 - RNA, 22 nt, synthetic construct
  source 1..22: mol_type = other RNA
aaagggaataatagtaacttga

SEQ ID NO: 23753 - RNA, 22 nt, synthetic construct
  source 1..22: mol_type = other RNA
aaaggggacagatggcatgtgc

SEQ ID NO: 23754 - RNA, 22 nt, synthetic construct
  source 1..22: mol_type = other RNA
aaaggggagagttgaggtccaa

SEQ ID NO: 23755 - RNA, 22 nt, synthetic construct
  source 1..22: mol_type = other RNA
aaaggtgcataatgaacccatt

SEQ ID NO: 23756 - RNA, 22 nt, synthetic construct
  source 1..22: mol_type = other RNA
aaagtagttttacagatgaagc

SEQ ID NO: 23757 - RNA, 22 nt, synthetic construct
  source 1..22: mol_type = other RNA
aaagtcacagggccttggcctg

SEQ ID NO: 23758 - RNA, 22 nt, synthetic construct
  source 1..22: mol_type = other RNA
aaagtcattaacttttggccaa

SEQ ID NO: 23759 - RNA, 22 nt, synthetic construct
  source 1..22: mol_type = other RNA
aaagttaacatcgccagaaagg

SEQ ID NO: 23760 - RNA, 22 nt, synthetic construct
  source 1..22: mol_type = other RNA
aaagttaatgactttggcagtt

SEQ ID NO: 23761 - RNA, 22 nt, synthetic construct
  source 1..22: mol_type = other RNA
aaagttcagtttggtgctggta

SEQ ID NO: 23762 - RNA, 22 nt, synthetic construct
  source 1..22: mol_type = other RNA
aaagttgtagatgagattggtc

SEQ ID NO: 23763 - RNA, 22 nt, synthetic construct
  source 1..22: mol_type = other RNA
aaataatcataaggattgacca

SEQ ID NO: 23764 - RNA, 22 nt, synthetic construct
  source 1..22: mol_type = other RNA
aaataccaaagccagctaaagt

SEQ ID NO: 23765 - RNA, 22 nt, synthetic construct
  source 1..22: mol_type = other RNA
aaatagcgaggtgttgtggtac

SEQ ID NO: 23766 - RNA, 22 nt, synthetic construct
  source 1..22: mol_type = other RNA
aaatatgtccaactgcaaagca

SEQ ID NO: 23767 - RNA, 22 nt, synthetic construct
  source 1..22: mol_type = other RNA
aaatcatcatcgcttggcatgg

SEQ ID NO: 23768 - RNA, 22 nt, synthetic construct
  source 1..22: mol_type = other RNA
aaatcccagctccaccaacacc

SEQ ID NO: 23769 - RNA, 22 nt, synthetic construct
  source 1..22: mol_type = other RNA
aaatgcactagttttagtgctt

SEQ ID NO: 23770 - RNA, 22 nt, synthetic construct
  source 1..22: mol_type = other RNA
aaatgggttcattatgcacctt

SEQ ID NO: 23771 - RNA, 22 nt, synthetic construct
  source 1..22: mol_type = other RNA
aaatgtctgtcactaaagagaa

SEQ ID NO: 23772 - RNA, 22 nt, synthetic construct
  source 1..22: mol_type = other RNA
aaattgagagacagtttacaaa

SEQ ID NO: 23773 - RNA, 22 nt, synthetic construct
  source 1..22: mol_type = other RNA
aaattgcttgctcactatatgt

SEQ ID NO: 23774 - RNA, 22 nt, synthetic construct
  source 1..22: mol_type = other RNA
aaattgtcccagtagtgtccct

SEQ ID NO: 23775 - RNA, 22 nt, synthetic construct
  source 1..22: mol_type = other RNA
aaattgttacttacatgctttg

SEQ ID NO: 23776 - RNA, 22 nt, synthetic construct
  source 1..22: mol_type = other RNA
aaatttgcataaccacagtagg

SEQ ID NO: 23777 - RNA, 22 nt, synthetic construct
  source 1..22: mol_type = other RNA
aaatttgtccttgttctaagga

SEQ ID NO: 23778 - RNA, 22 nt, synthetic construct
  source 1..22: mol_type = other RNA
aaattttatagaggctgaggtg

SEQ ID NO: 23779 - RNA, 22 nt, synthetic construct
  source 1..22: mol_type = other RNA
aacaaagaatacaggccaaggc

SEQ ID NO: 23780 - RNA, 22 nt, synthetic construct
  source 1..22: mol_type = other RNA
aacaactgtcgggtgataaaca

SEQ ID NO: 23781 - RNA, 22 nt, synthetic construct
  source 1..22: mol_type = other RNA
aacaaggaatcacatatagtga

SEQ ID NO: 23782 - RNA, 22 nt, synthetic construct
  source 1..22: mol_type = other RNA
aacaaggacaaatttgcataac

SEQ ID NO: 23783 - RNA, 22 nt, synthetic construct
  source 1..22: mol_type = other RNA
aacaataaaaaggggagagttg

SEQ ID NO: 23784 - RNA, 22 nt, synthetic construct
  source 1..22: mol_type = other RNA
aacaattttagagggtatacgg

SEQ ID NO: 23785 - RNA, 22 nt, synthetic construct
  source 1..22: mol_type = other RNA
aacaccagccttgtactctgct

SEQ ID NO: 23786 - RNA, 22 nt, synthetic construct
  source 1..22: mol_type = other RNA
aacacctcagacttcatctcct

SEQ ID NO: 23787 - RNA, 22 nt, synthetic construct
  source 1..22: mol_type = other RNA
aacactaactgccaaagtcatt

SEQ ID NO: 23788 - RNA, 22 nt, synthetic construct
  source 1..22: mol_type = other RNA
aacagggataatagtagcacct

SEQ ID NO: 23789 - RNA, 22 nt, synthetic construct
  source 1..22: mol_type = other RNA
aacataagatataccagcacca

SEQ ID NO: 23790 - RNA, 22 nt, synthetic construct
  source 1..22: mol_type = other RNA
aacatcgccagaaaggggacag

SEQ ID NO: 23791 - RNA, 22 nt, synthetic construct
  source 1..22: mol_type = other RNA
aaccaaaatatgtccaactgca

SEQ ID NO: 23792 - RNA, 22 nt, synthetic construct
  source 1..22: mol_type = other RNA
aaccacagtagggttgtcaaaa

SEQ ID NO: 23793 - RNA, 22 nt, synthetic construct
  source 1..22: mol_type = other RNA
aacccaaattgagagacagttt

SEQ ID NO: 23794 - RNA, 22 nt, synthetic construct
  source 1..22: mol_type = other RNA
aacccattttcaaatgcttatg

SEQ ID NO: 23795 - RNA, 22 nt, synthetic construct
  source 1..22: mol_type = other RNA
aaccctactgtggttatgcaaa

SEQ ID NO: 23796 - RNA, 22 nt, synthetic construct
  source 1..22: mol_type = other RNA
aaccgaggcttaggagatgaag

SEQ ID NO: 23797 - RNA, 22 nt, synthetic construct
  source 1..22: mol_type = other RNA
aactagtgcatttcatcttaaa

SEQ ID NO: 23798 - RNA, 22 nt, synthetic construct
  source 1..22: mol_type = other RNA
aactcactgcagccttgaactc

SEQ ID NO: 23799 - RNA, 22 nt, synthetic construct
  source 1..22: mol_type = other RNA
aactctcccctttttattgtta

SEQ ID NO: 23800 - RNA, 22 nt, synthetic construct
  source 1..22: mol_type = other RNA
aactgaaaagcaaattgcttgc

SEQ ID NO: 23801 - RNA, 22 nt, synthetic construct
  source 1..22: mol_type = other RNA
aactgaactttctcctctaaat

SEQ ID NO: 23802 - RNA, 22 nt, synthetic construct
  source 1..22: mol_type = other RNA
aactgatcaaagttaacatcgc

SEQ ID NO: 23803 - RNA, 22 nt, synthetic construct
  source 1..22: mol_type = other RNA
aactgcaaagcatgtaagtaac

SEQ ID NO: 23804 - RNA, 22 nt, synthetic construct
  source 1..22: mol_type = other RNA
aactgcaaattataaagggaat

SEQ ID NO: 23805 - RNA, 22 nt, synthetic construct
  source 1..22: mol_type = other RNA
aactgccaaagtcattaacttt

SEQ ID NO: 23806 - RNA, 22 nt, synthetic construct
  source 1..22: mol_type = other RNA
aactgggactatgggcgtgtac

SEQ ID NO: 23807 - RNA, 22 nt, synthetic construct
  source 1..22: mol_type = other RNA
aactgtcgggtgataaacataa

SEQ ID NO: 23808 - RNA, 22 nt, synthetic construct
  source 1..22: mol_type = other RNA
aactgtctctcaatttgggttt

SEQ ID NO: 23809 - RNA, 22 nt, synthetic construct
  source 1..22: mol_type = other RNA
aacttgacagtggagagacctg

SEQ ID NO: 23810 - RNA, 22 nt, synthetic construct
  source 1..22: mol_type = other RNA
aactttctcctctaaataatca

SEQ ID NO: 23811 - RNA, 22 nt, synthetic construct
  source 1..22: mol_type = other RNA
aactttgatcagttggtgaagg

SEQ ID NO: 23812 - RNA, 22 nt, synthetic construct
  source 1..22: mol_type = other RNA
aacttttggccaaataccaaag

SEQ ID NO: 23813 - RNA, 22 nt, synthetic construct
  source 1..22: mol_type = other RNA
aagaaggctcgagattaatgca

SEQ ID NO: 23814 - RNA, 22 nt, synthetic construct
  source 1..22: mol_type = other RNA
aagaatacaggccaaggccctg

SEQ ID NO: 23815 - RNA, 22 nt, synthetic construct
  source 1..22: mol_type = other RNA
aagaatgcctcatctgaatcta

SEQ ID NO: 23816 - RNA, 22 nt, synthetic construct
  source 1..22: mol_type = other RNA
aagacacacactcacttctgca

SEQ ID NO: 23817 - RNA, 22 nt, synthetic construct
  source 1..22: mol_type = other RNA
aagacagactgaagagctgatc

SEQ ID NO: 23818 - RNA, 22 nt, synthetic construct
  source 1..22: mol_type = other RNA
aagagaaaatcatcatcgcttg

SEQ ID NO: 23819 - RNA, 22 nt, synthetic construct
  source 1..22: mol_type = other RNA
aagagagaaagacagactgaag

SEQ ID NO: 23820 - RNA, 22 nt, synthetic construct
  source 1..22: mol_type = other RNA
aagagattaacaactgtcgggt

SEQ ID NO: 23821 - RNA, 22 nt, synthetic construct
  source 1..22: mol_type = other RNA
aagagctgatccagactgaaga

SEQ ID NO: 23822 - RNA, 22 nt, synthetic construct
  source 1..22: mol_type = other RNA
aagatataccagcaccaaactg

SEQ ID NO: 23823 - RNA, 22 nt, synthetic construct
  source 1..22: mol_type = other RNA
aagatgaaatgcactagtttta

SEQ ID NO: 23824 - RNA, 22 nt, synthetic construct
  source 1..22: mol_type = other RNA
aagatgcaatcccagatcagct

SEQ ID NO: 23825 - RNA, 22 nt, synthetic construct
  source 1..22: mol_type = other RNA
aagatgcactgaagacacacac

SEQ ID NO: 23826 - RNA, 22 nt, synthetic construct
  source 1..22: mol_type = other RNA
aagcaaattgcttgctcactat

SEQ ID NO: 23827 - RNA, 22 nt, synthetic construct
  source 1..22: mol_type = other RNA
aagcaatttgcttttcagtttt

SEQ ID NO: 23828 - RNA, 22 nt, synthetic construct
  source 1..22: mol_type = other RNA
aagcactaaaactagtgcattt

SEQ ID NO: 23829 - RNA, 22 nt, synthetic construct
  source 1..22: mol_type = other RNA
aagcagagtacaaggctggtgt

SEQ ID NO: 23830 - RNA, 22 nt, synthetic construct
  source 1..22: mol_type = other RNA
aagcatttgaaaatgggttcat

SEQ ID NO: 23831 - RNA, 22 nt, synthetic construct
  source 1..22: mol_type = other RNA
aagccagctaaagtcacagggc

SEQ ID NO: 23832 - RNA, 22 nt, synthetic construct
  source 1..22: mol_type = other RNA
aagcccttaggcaggtgctact

SEQ ID NO: 23833 - RNA, 22 nt, synthetic construct
  source 1..22: mol_type = other RNA
aagcctcggtttccttctctgt

SEQ ID NO: 23834 - RNA, 22 nt, synthetic construct
  source 1..22: mol_type = other RNA
aagcgatgatgattttctcttt

SEQ ID NO: 23835 - RNA, 22 nt, synthetic construct
  source 1..22: mol_type = other RNA
aagctgatctgggattgcatct

SEQ ID NO: 23836 - RNA, 22 nt, synthetic construct
  source 1..22: mol_type = other RNA
aaggaaaccgaggcttaggaga

SEQ ID NO: 23837 - RNA, 22 nt, synthetic construct
  source 1..22: mol_type = other RNA
aaggaatcacatatagtgagca

SEQ ID NO: 23838 - RNA, 22 nt, synthetic construct
  source 1..22: mol_type = other RNA
aaggacaaatttgcataaccac

SEQ ID NO: 23839 - RNA, 22 nt, synthetic construct
  source 1..22: mol_type = other RNA
aaggatcacttgagtttgaaac

SEQ ID NO: 23840 - RNA, 22 nt, synthetic construct
  source 1..22: mol_type = other RNA
aaggattgaccaaaaactgaaa

SEQ ID NO: 23841 - RNA, 22 nt, synthetic construct
  source 1..22: mol_type = other RNA
aaggccctgtgactttagctgg

SEQ ID NO: 23842 - RNA, 22 nt, synthetic construct
  source 1..22: mol_type = other RNA
aaggctcgagattaatgcaaaa

SEQ ID NO: 23843 - RNA, 22 nt, synthetic construct
  source 1..22: mol_type = other RNA
aaggctgcagtgagttattatt

SEQ ID NO: 23844 - RNA, 22 nt, synthetic construct
  source 1..22: mol_type = other RNA
aaggctggtgttttgtaaactg

SEQ ID NO: 23845 - RNA, 22 nt, synthetic construct
  source 1..22: mol_type = other RNA
aagggaataatagtaacttgac

SEQ ID NO: 23846 - RNA, 22 nt, synthetic construct
  source 1..22: mol_type = other RNA
aagggacactactgggacaatt

SEQ ID NO: 23847 - RNA, 22 nt, synthetic construct
  source 1..22: mol_type = other RNA
aaggggacagatggcatgtgcc

SEQ ID NO: 23848 - RNA, 22 nt, synthetic construct
  source 1..22: mol_type = other RNA
aaggggagagttgaggtccaag

SEQ ID NO: 23849 - RNA, 22 nt, synthetic construct
  source 1..22: mol_type = other RNA
aaggtgcataatgaacccattt

SEQ ID NO: 23850 - RNA, 22 nt, synthetic construct
  source 1..22: mol_type = other RNA
aaggtggtgtctgccaggtctc

SEQ ID NO: 23851 - RNA, 22 nt, synthetic construct
  source 1..22: mol_type = other RNA
aagtaacaaggaatcacatata

SEQ ID NO: 23852 - RNA, 22 nt, synthetic construct
  source 1..22: mol_type = other RNA
aagtaacaattttagagggtat

SEQ ID NO: 23853 - RNA, 22 nt, synthetic construct
  source 1..22: mol_type = other RNA
aagtagttttacagatgaagca

SEQ ID NO: 23854 - RNA, 22 nt, synthetic construct
  source 1..22: mol_type = other RNA
aagtcacagggccttggcctgt

SEQ ID NO: 23855 - RNA, 22 nt, synthetic construct
  source 1..22: mol_type = other RNA
aagtcattaacttttggccaaa

SEQ ID NO: 23856 - RNA, 22 nt, synthetic construct
  source 1..22: mol_type = other RNA
aagtctgaggtgttggtggagc

SEQ ID NO: 23857 - RNA, 22 nt, synthetic construct
  source 1..22: mol_type = other RNA
aagtgagtgtgtgtcttcagtg

SEQ ID NO: 23858 - RNA, 22 nt, synthetic construct
  source 1..22: mol_type = other RNA
aagtgatccttccacctcagcc

SEQ ID NO: 23859 - RNA, 22 nt, synthetic construct
  source 1..22: mol_type = other RNA
aagttaacatcgccagaaaggg

SEQ ID NO: 23860 - RNA, 22 nt, synthetic construct
  source 1..22: mol_type = other RNA
aagttaatgactttggcagtta

SEQ ID NO: 23861 - RNA, 22 nt, synthetic construct
  source 1..22: mol_type = other RNA
aagttcagtttggtgctggtat

SEQ ID NO: 23862 - RNA, 22 nt, synthetic construct
  source 1..22: mol_type = other RNA
aagttgtagatgagattggtca

SEQ ID NO: 23863 - RNA, 22 nt, synthetic construct
  source 1..22: mol_type = other RNA
aataaaaaggggagagttgagg

SEQ ID NO: 23864 - RNA, 22 nt, synthetic construct
  source 1..22: mol_type = other RNA
aataaagttgtagatgagattg

SEQ ID NO: 23865 - RNA, 22 nt, synthetic construct
  source 1..22: mol_type = other RNA
aataactcactgcagccttgaa

SEQ ID NO: 23866 - RNA, 22 nt, synthetic construct
  source 1..22: mol_type = other RNA
aataataactcactgcagcctt

SEQ ID NO: 23867 - RNA, 22 nt, synthetic construct
  source 1..22: mol_type = other RNA
aataatagtaacttgacagtgg

SEQ ID NO: 23868 - RNA, 22 nt, synthetic construct
  source 1..22: mol_type = other RNA
aataatcataaggattgaccaa

SEQ ID NO: 23869 - RNA, 22 nt, synthetic construct
  source 1..22: mol_type = other RNA
aatacaggccaaggccctgtga

SEQ ID NO: 23870 - RNA, 22 nt, synthetic construct
  source 1..22: mol_type = other RNA
aataccaaagccagctaaagtc

SEQ ID NO: 23871 - RNA, 22 nt, synthetic construct
  source 1..22: mol_type = other RNA
aatagcgaggtgttgtggtaca

SEQ ID NO: 23872 - RNA, 22 nt, synthetic construct
  source 1..22: mol_type = other RNA
aatagtaacttgacagtggaga

SEQ ID NO: 23873 - RNA, 22 nt, synthetic construct
  source 1..22: mol_type = other RNA
aatagtagcacctgcctaaggg

SEQ ID NO: 23874 - RNA, 22 nt, synthetic construct
  source 1..22: mol_type = other RNA
aatatgtcaatgtcacaagaga

SEQ ID NO: 23875 - RNA, 22 nt, synthetic construct
  source 1..22: mol_type = other RNA
aatatgtccaactgcaaagcat

SEQ ID NO: 23876 - RNA, 22 nt, synthetic construct
  source 1..22: mol_type = other RNA
aatattcctgccaagaatgcct

SEQ ID NO: 23877 - RNA, 22 nt, synthetic construct
  source 1..22: mol_type = other RNA
aatattgcagaagtgagtgtgt

SEQ ID NO: 23878 - RNA, 22 nt, synthetic construct
  source 1..22: mol_type = other RNA
aatcacatatagtgagcaagca

SEQ ID NO: 23879 - RNA, 22 nt, synthetic construct
  source 1..22: mol_type = other RNA
aatcataaggattgaccaaaaa

SEQ ID NO: 23880 - RNA, 22 nt, synthetic construct
  source 1..22: mol_type = other RNA
aatcatcatcgcttggcatgga

SEQ ID NO: 23881 - RNA, 22 nt, synthetic construct
  source 1..22: mol_type = other RNA
aatcccagatcagcttttgcat

SEQ ID NO: 23882 - RNA, 22 nt, synthetic construct
  source 1..22: mol_type = other RNA
aatcccagctccaccaacacct

SEQ ID NO: 23883 - RNA, 22 nt, synthetic construct
  source 1..22: mol_type = other RNA
aatcctatgaccaatctcatct

SEQ ID NO: 23884 - RNA, 22 nt, synthetic construct
  source 1..22: mol_type = other RNA
aatcctcctgcctgagccttcc

SEQ ID NO: 23885 - RNA, 22 nt, synthetic construct
  source 1..22: mol_type = other RNA
aatccttatgattatttagagg

SEQ ID NO: 23886 - RNA, 22 nt, synthetic construct
  source 1..22: mol_type = other RNA
aatctaatctcgagtataacca

SEQ ID NO: 23887 - RNA, 22 nt, synthetic construct
  source 1..22: mol_type = other RNA
aatctcatctacaactttattc

SEQ ID NO: 23888 - RNA, 22 nt, synthetic construct
  source 1..22: mol_type = other RNA
aatctcgagccttcttcagtct

SEQ ID NO: 23889 - RNA, 22 nt, synthetic construct
  source 1..22: mol_type = other RNA
aatctcgagtataaccatcaga

SEQ ID NO: 23890 - RNA, 22 nt, synthetic construct
  source 1..22: mol_type = other RNA
aatgaacccattttcaaatgct

SEQ ID NO: 23891 - RNA, 22 nt, synthetic construct
  source 1..22: mol_type = other RNA
aatgactttggcagttagtgtt

SEQ ID NO: 23892 - RNA, 22 nt, synthetic construct
  source 1..22: mol_type = other RNA
aatgcaaaagctgatctgggat

SEQ ID NO: 23893 - RNA, 22 nt, synthetic construct
  source 1..22: mol_type = other RNA
aatgcactagttttagtgcttc

SEQ ID NO: 23894 - RNA, 22 nt, synthetic construct
  source 1..22: mol_type = other RNA
aatgcctcatctgaatctaatc

SEQ ID NO: 23895 - RNA, 22 nt, synthetic construct
  source 1..22: mol_type = other RNA
aatgggttcattatgcaccttt

SEQ ID NO: 23896 - RNA, 22 nt, synthetic construct
  source 1..22: mol_type = other RNA
aatgtcacaagagagaaagaca

SEQ ID NO: 23897 - RNA, 22 nt, synthetic construct
  source 1..22: mol_type = other RNA
aatgtctgtcactaaagagaaa

SEQ ID NO: 23898 - RNA, 22 nt, synthetic construct
  source 1..22: mol_type = other RNA
aattatttaggagtaaaggtgc

SEQ ID NO: 23899 - RNA, 22 nt, synthetic construct
  source 1..22: mol_type = other RNA
aattgagagacagtttacaaaa

SEQ ID NO: 23900 - RNA, 22 nt, synthetic construct
  source 1..22: mol_type = other RNA
aattgcttgctcactatatgtg

SEQ ID NO: 23901 - RNA, 22 nt, synthetic construct
  source 1..22: mol_type = other RNA
aattgtcccagtagtgtccctt

SEQ ID NO: 23902 - RNA, 22 nt, synthetic construct
  source 1..22: mol_type = other RNA
aattgttacttacatgctttgc

SEQ ID NO: 23903 - RNA, 22 nt, synthetic construct
  source 1..22: mol_type = other RNA
aatttgcataaccacagtaggg

SEQ ID NO: 23904 - RNA, 22 nt, synthetic construct
  source 1..22: mol_type = other RNA
aatttgcttttcagtttttggt

SEQ ID NO: 23905 - RNA, 22 nt, synthetic construct
  source 1..22: mol_type = other RNA
aatttgggtttgtctgatggtt

SEQ ID NO: 23906 - RNA, 22 nt, synthetic construct
  source 1..22: mol_type = other RNA
aatttgtccttgttctaaggaa

SEQ ID NO: 23907 - RNA, 22 nt, synthetic construct
  source 1..22: mol_type = other RNA
aattttagagggtatacggagg

SEQ ID NO: 23908 - RNA, 22 nt, synthetic construct
  source 1..22: mol_type = other RNA
aattttatagaggctgaggtgg

SEQ ID NO: 23909 - RNA, 22 nt, synthetic construct
  source 1..22: mol_type = other RNA
acaaaacaccagccttgtactc

SEQ ID NO: 23910 - RNA, 22 nt, synthetic construct
  source 1..22: mol_type = other RNA
acaaacccaaattgagagacag

SEQ ID NO: 23911 - RNA, 22 nt, synthetic construct
  source 1..22: mol_type = other RNA
acaaagaatacaggccaaggcc

SEQ ID NO: 23912 - RNA, 22 nt, synthetic construct
  source 1..22: mol_type = other RNA
acaaatttgcataaccacagta

SEQ ID NO: 23913 - RNA, 22 nt, synthetic construct
  source 1..22: mol_type = other RNA
acaaccctactgtggttatgca

SEQ ID NO: 23914 - RNA, 22 nt, synthetic construct
  source 1..22: mol_type = other RNA
acaactgtcgggtgataaacat

SEQ ID NO: 23915 - RNA, 22 nt, synthetic construct
  source 1..22: mol_type = other RNA
acaagagagaaagacagactga

SEQ ID NO: 23916 - RNA, 22 nt, synthetic construct
  source 1..22: mol_type = other RNA
acaagcccttaggcaggtgcta

SEQ ID NO: 23917 - RNA, 22 nt, synthetic construct
  source 1..22: mol_type = other RNA
acaaggaatcacatatagtgag

SEQ ID NO: 23918 - RNA, 22 nt, synthetic construct
  source 1..22: mol_type = other RNA
acaaggacaaatttgcataacc

SEQ ID NO: 23919 - RNA, 22 nt, synthetic construct
  source 1..22: mol_type = other RNA
acaaggctggtgttttgtaaac

SEQ ID NO: 23920 - RNA, 22 nt, synthetic construct
  source 1..22: mol_type = other RNA
acaataaaaaggggagagttga

SEQ ID NO: 23921 - RNA, 22 nt, synthetic construct
  source 1..22: mol_type = other RNA
acaatcctatgaccaatctcat

SEQ ID NO: 23922 - RNA, 22 nt, synthetic construct
  source 1..22: mol_type = other RNA
acaattttagagggtatacgga

SEQ ID NO: 23923 - RNA, 22 nt, synthetic construct
  source 1..22: mol_type = other RNA
acacacactcacttctgcaata

SEQ ID NO: 23924 - RNA, 22 nt, synthetic construct
  source 1..22: mol_type = other RNA
acacactcacttctgcaatatt

SEQ ID NO: 23925 - RNA, 22 nt, synthetic construct
  source 1..22: mol_type = other RNA
acaccaccttcaccaactgatc

SEQ ID NO: 23926 - RNA, 22 nt, synthetic construct
  source 1..22: mol_type = other RNA
acaccagccttgtactctgctt

SEQ ID NO: 23927 - RNA, 22 nt, synthetic construct
  source 1..22: mol_type = other RNA
acacctcagacttcatctccta

SEQ ID NO: 23928 - RNA, 22 nt, synthetic construct
  source 1..22: mol_type = other RNA
acacgcccatagtcccagttac

SEQ ID NO: 23929 - RNA, 22 nt, synthetic construct
  source 1..22: mol_type = other RNA
acactaactgccaaagtcatta

SEQ ID NO: 23930 - RNA, 22 nt, synthetic construct
  source 1..22: mol_type = other RNA
acactatacaatcctatgacca

SEQ ID NO: 23931 - RNA, 22 nt, synthetic construct
  source 1..22: mol_type = other RNA
acactcacttctgcaatattcc

SEQ ID NO: 23932 - RNA, 22 nt, synthetic construct
  source 1..22: mol_type = other RNA
acagactgaagagctgatccag

SEQ ID NO: 23933 - RNA, 22 nt, synthetic construct
  source 1..22: mol_type = other RNA
acagagaaggaaaccgaggctt

SEQ ID NO: 23934 - RNA, 22 nt, synthetic construct
  source 1..22: mol_type = other RNA
acagatgaagcactaaaactag

SEQ ID NO: 23935 - RNA, 22 nt, synthetic construct
  source 1..22: mol_type = other RNA
acagatggcatgtgcctctcga

SEQ ID NO: 23936 - RNA, 22 nt, synthetic construct
  source 1..22: mol_type = other RNA
acaggccaaggccctgtgactt

SEQ ID NO: 23937 - RNA, 22 nt, synthetic construct
  source 1..22: mol_type = other RNA
acagggataatagtagcacctg

SEQ ID NO: 23938 - RNA, 22 nt, synthetic construct
  source 1..22: mol_type = other RNA
acagggccttggcctgtattct

SEQ ID NO: 23939 - RNA, 22 nt, synthetic construct
  source 1..22: mol_type = other RNA
acagtagggttgtcaaaatcag

SEQ ID NO: 23940 - RNA, 22 nt, synthetic construct
  source 1..22: mol_type = other RNA
acagtggagagacctggcagac

SEQ ID NO: 23941 - RNA, 22 nt, synthetic construct
  source 1..22: mol_type = other RNA
acagtttacaaaacaccagcct

SEQ ID NO: 23942 - RNA, 22 nt, synthetic construct
  source 1..22: mol_type = other RNA
acataagatataccagcaccaa

SEQ ID NO: 23943 - RNA, 22 nt, synthetic construct
  source 1..22: mol_type = other RNA
acatatagtgagcaagcaattt

SEQ ID NO: 23944 - RNA, 22 nt, synthetic construct
  source 1..22: mol_type = other RNA
acatattaagcagagtacaagg

SEQ ID NO: 23945 - RNA, 22 nt, synthetic construct
  source 1..22: mol_type = other RNA
acatattttggtttaaatccca

SEQ ID NO: 23946 - RNA, 22 nt, synthetic construct
  source 1..22: mol_type = other RNA
acatcgccagaaaggggacaga

SEQ ID NO: 23947 - RNA, 22 nt, synthetic construct
  source 1..22: mol_type = other RNA
acatgccatctgtcccctttct

SEQ ID NO: 23948 - RNA, 22 nt, synthetic construct
  source 1..22: mol_type = other RNA
acatgctttgcagttggacata

SEQ ID NO: 23949 - RNA, 22 nt, synthetic construct
  source 1..22: mol_type = other RNA
acattgacatattaagcagagt

SEQ ID NO: 23950 - RNA, 22 nt, synthetic construct
  source 1..22: mol_type = other RNA
accaaaaactgaaaagcaaatt

SEQ ID NO: 23951 - RNA, 22 nt, synthetic construct
  source 1..22: mol_type = other RNA
accaaaatatgtccaactgcaa

SEQ ID NO: 23952 - RNA, 22 nt, synthetic construct
  source 1..22: mol_type = other RNA
accaaactgaactttctcctct

SEQ ID NO: 23953 - RNA, 22 nt, synthetic construct
  source 1..22: mol_type = other RNA
accaaagccagctaaagtcaca

SEQ ID NO: 23954 - RNA, 22 nt, synthetic construct
  source 1..22: mol_type = other RNA
accaacacctcagacttcatct

SEQ ID NO: 23955 - RNA, 22 nt, synthetic construct
  source 1..22: mol_type = other RNA
accaactgatcaaagttaacat

SEQ ID NO: 23956 - RNA, 22 nt, synthetic construct
  source 1..22: mol_type = other RNA
accaatctcatctacaacttta

SEQ ID NO: 23957 - RNA, 22 nt, synthetic construct
  source 1..22: mol_type = other RNA
accacaacacctcgctattttt

SEQ ID NO: 23958 - RNA, 22 nt, synthetic construct
  source 1..22: mol_type = other RNA
accacagtagggttgtcaaaat

SEQ ID NO: 23959 - RNA, 22 nt, synthetic construct
  source 1..22: mol_type = other RNA
accaccttcaccaactgatcaa

SEQ ID NO: 23960 - RNA, 22 nt, synthetic construct
  source 1..22: mol_type = other RNA
accagcaccaaactgaactttc

SEQ ID NO: 23961 - RNA, 22 nt, synthetic construct
  source 1..22: mol_type = other RNA
accagccttgtactctgcttaa

SEQ ID NO: 23962 - RNA, 22 nt, synthetic construct
  source 1..22: mol_type = other RNA
accatcagacaaacccaaattg

SEQ ID NO: 23963 - RNA, 22 nt, synthetic construct
  source 1..22: mol_type = other RNA
acccaaattgagagacagttta

SEQ ID NO: 23964 - RNA, 22 nt, synthetic construct
  source 1..22: mol_type = other RNA
acccattttcaaatgcttatga

SEQ ID NO: 23965 - RNA, 22 nt, synthetic construct
  source 1..22: mol_type = other RNA
acccgacagttgttaatctctt

SEQ ID NO: 23966 - RNA, 22 nt, synthetic construct
  source 1..22: mol_type = other RNA
accctaagtaacaaggaatcac

SEQ ID NO: 23967 - RNA, 22 nt, synthetic construct
  source 1..22: mol_type = other RNA
accctactgtggttatgcaaat

SEQ ID NO: 23968 - RNA, 22 nt, synthetic construct
  source 1..22: mol_type = other RNA
accctctaaaattgttacttac

SEQ ID NO: 23969 - RNA, 22 nt, synthetic construct
  source 1..22: mol_type = other RNA
accctgtctcaaaacgaaaaaa

SEQ ID NO: 23970 - RNA, 22 nt, synthetic construct
  source 1..22: mol_type = other RNA
accgaggcttaggagatgaagt

SEQ ID NO: 23971 - RNA, 22 nt, synthetic construct
  source 1..22: mol_type = other RNA
acctcaactctcccctttttat

SEQ ID NO: 23972 - RNA, 22 nt, synthetic construct
  source 1..22: mol_type = other RNA
acctcagacttcatctcctaag

SEQ ID NO: 23973 - RNA, 22 nt, synthetic construct
  source 1..22: mol_type = other RNA
acctcagcctctataaaatttg

SEQ ID NO: 23974 - RNA, 22 nt, synthetic construct
  source 1..22: mol_type = other RNA
acctccgtataccctctaaaat

SEQ ID NO: 23975 - RNA, 22 nt, synthetic construct
  source 1..22: mol_type = other RNA
acctggcagacaccaccttcac

SEQ ID NO: 23976 - RNA, 22 nt, synthetic construct
  source 1..22: mol_type = other RNA
accttcaccaactgatcaaagt

SEQ ID NO: 23977 - RNA, 22 nt, synthetic construct
  source 1..22: mol_type = other RNA
acctttactcctaaataattca

SEQ ID NO: 23978 - RNA, 22 nt, synthetic construct
  source 1..22: mol_type = other RNA
acgcccatagtcccagttactc

SEQ ID NO: 23979 - RNA, 22 nt, synthetic construct
  source 1..22: mol_type = other RNA
acggaggtgaccctaagtaaca

SEQ ID NO: 23980 - RNA, 22 nt, synthetic construct
  source 1..22: mol_type = other RNA
actaaaactagtgcatttcatc

SEQ ID NO: 23981 - RNA, 22 nt, synthetic construct
  source 1..22: mol_type = other RNA
actaaagagaaaatcatcatcg

SEQ ID NO: 23982 - RNA, 22 nt, synthetic construct
  source 1..22: mol_type = other RNA
actaactgccaaagtcattaac

SEQ ID NO: 23983 - RNA, 22 nt, synthetic construct
  source 1..22: mol_type = other RNA
actagtgcatttcatcttaaac

SEQ ID NO: 23984 - RNA, 22 nt, synthetic construct
  source 1..22: mol_type = other RNA
actagttttagtgcttcatctg

SEQ ID NO: 23985 - RNA, 22 nt, synthetic construct
  source 1..22: mol_type = other RNA
actatacaatcctatgaccaat

SEQ ID NO: 23986 - RNA, 22 nt, synthetic construct
  source 1..22: mol_type = other RNA
actatatgtgattccttgttac

SEQ ID NO: 23987 - RNA, 22 nt, synthetic construct
  source 1..22: mol_type = other RNA
actatgggcgtgtaccacaaca

SEQ ID NO: 23988 - RNA, 22 nt, synthetic construct
  source 1..22: mol_type = other RNA
actattatccctgttttacaga

SEQ ID NO: 23989 - RNA, 22 nt, synthetic construct
  source 1..22: mol_type = other RNA
actcaagcaatcctcctgcctg

SEQ ID NO: 23990 - RNA, 22 nt, synthetic construct
  source 1..22: mol_type = other RNA
actcaagtgatccttccacctc

SEQ ID NO: 23991 - RNA, 22 nt, synthetic construct
  source 1..22: mol_type = other RNA
actcactgcagccttgaactcc

SEQ ID NO: 23992 - RNA, 22 nt, synthetic construct
  source 1..22: mol_type = other RNA
actcacttctgcaatattcctg

SEQ ID NO: 23993 - RNA, 22 nt, synthetic construct
  source 1..22: mol_type = other RNA
actcccggactcaagcaatcct

SEQ ID NO: 23994 - RNA, 22 nt, synthetic construct
  source 1..22: mol_type = other RNA
actcgagattagattcagatga

SEQ ID NO: 23995 - RNA, 22 nt, synthetic construct
  source 1..22: mol_type = other RNA
actctcccctttttattgttaa

SEQ ID NO: 23996 - RNA, 22 nt, synthetic construct
  source 1..22: mol_type = other RNA
actctgcttaatatgtcaatgt

SEQ ID NO: 23997 - RNA, 22 nt, synthetic construct
  source 1..22: mol_type = other RNA
actgaaaagcaaattgcttgct

SEQ ID NO: 23998 - RNA, 22 nt, synthetic construct
  source 1..22: mol_type = other RNA
actgaactttctcctctaaata

SEQ ID NO: 23999 - RNA, 22 nt, synthetic construct
  source 1..22: mol_type = other RNA
actgaagaaggctcgagattaa

SEQ ID NO: 24000 - RNA, 22 nt, synthetic construct
  source 1..22: mol_type = other RNA
actgaagacacacactcacttc

SEQ ID NO: 24001 - RNA, 22 nt, synthetic construct
  source 1..22: mol_type = other RNA
actgaagagctgatccagactg

SEQ ID NO: 24002 - RNA, 22 nt, synthetic construct
  source 1..22: mol_type = other RNA
actgaattatttaggagtaaag

SEQ ID NO: 24003 - RNA, 22 nt, synthetic construct
  source 1..22: mol_type = other RNA
actgagcgagaccctgtctcaa

SEQ ID NO: 24004 - RNA, 22 nt, synthetic construct
  source 1..22: mol_type = other RNA
actgatcaaagttaacatcgcc

SEQ ID NO: 24005 - RNA, 22 nt, synthetic construct
  source 1..22: mol_type = other RNA
actgcaaagcatgtaagtaaca

SEQ ID NO: 24006 - RNA, 22 nt, synthetic construct
  source 1..22: mol_type = other RNA
actgcaaattataaagggaata

SEQ ID NO: 24007 - RNA, 22 nt, synthetic construct
  source 1..22: mol_type = other RNA
actgccaaagtcattaactttt

SEQ ID NO: 24008 - RNA, 22 nt, synthetic construct
  source 1..22: mol_type = other RNA
actgggactatgggcgtgtacc

SEQ ID NO: 24009 - RNA, 22 nt, synthetic construct
  source 1..22: mol_type = other RNA
actgtcaagttactattattcc

SEQ ID NO: 24010 - RNA, 22 nt, synthetic construct
  source 1..22: mol_type = other RNA
actgtcgggtgataaacataag

SEQ ID NO: 24011 - RNA, 22 nt, synthetic construct
  source 1..22: mol_type = other RNA
actgtctctcaatttgggtttg

SEQ ID NO: 24012 - RNA, 22 nt, synthetic construct
  source 1..22: mol_type = other RNA
actgtggttatgcaaatttgtc

SEQ ID NO: 24013 - RNA, 22 nt, synthetic construct
  source 1..22: mol_type = other RNA
acttacatgctttgcagttgga

SEQ ID NO: 24014 - RNA, 22 nt, synthetic construct
  source 1..22: mol_type = other RNA
acttagggtcacctccgtatac

SEQ ID NO: 24015 - RNA, 22 nt, synthetic construct
  source 1..22: mol_type = other RNA
acttcatctcctaagcctcggt

SEQ ID NO: 24016 - RNA, 22 nt, synthetic construct
  source 1..22: mol_type = other RNA
acttctgcaatattcctgccaa

SEQ ID NO: 24017 - RNA, 22 nt, synthetic construct
  source 1..22: mol_type = other RNA
acttgacagtggagagacctgg

SEQ ID NO: 24018 - RNA, 22 nt, synthetic construct
  source 1..22: mol_type = other RNA
acttgagtttgaaaccagcctg

SEQ ID NO: 24019 - RNA, 22 nt, synthetic construct
  source 1..22: mol_type = other RNA
actttagctggctttggtattt

SEQ ID NO: 24020 - RNA, 22 nt, synthetic construct
  source 1..22: mol_type = other RNA
actttctcctctaaataatcat

SEQ ID NO: 24021 - RNA, 22 nt, synthetic construct
  source 1..22: mol_type = other RNA
actttgatcagttggtgaaggt

SEQ ID NO: 24022 - RNA, 22 nt, synthetic construct
  source 1..22: mol_type = other RNA
actttggcagttagtgttttta

SEQ ID NO: 24023 - RNA, 22 nt, synthetic construct
  source 1..22: mol_type = other RNA
acttttggccaaataccaaagc

SEQ ID NO: 24024 - RNA, 22 nt, synthetic construct
  source 1..22: mol_type = other RNA
agaaaatcatcatcgcttggca

SEQ ID NO: 24025 - RNA, 22 nt, synthetic construct
  source 1..22: mol_type = other RNA
agaaagacagactgaagagctg

SEQ ID NO: 24026 - RNA, 22 nt, synthetic construct
  source 1..22: mol_type = other RNA
agaaaggggacagatggcatgt

SEQ ID NO: 24027 - RNA, 22 nt, synthetic construct
  source 1..22: mol_type = other RNA
agaaagttcagtttggtgctgg

SEQ ID NO: 24028 - RNA, 22 nt, synthetic construct
  source 1..22: mol_type = other RNA
agaacaaggacaaatttgcata

SEQ ID NO: 24029 - RNA, 22 nt, synthetic construct
  source 1..22: mol_type = other RNA
agaaggaaaccgaggcttagga

SEQ ID NO: 24030 - RNA, 22 nt, synthetic construct
  source 1..22: mol_type = other RNA
agaaggctcgagattaatgcaa

SEQ ID NO: 24031 - RNA, 22 nt, synthetic construct
  source 1..22: mol_type = other RNA
agaagtgagtgtgtgtcttcag

SEQ ID NO: 24032 - RNA, 22 nt, synthetic construct
  source 1..22: mol_type = other RNA
agaatacaggccaaggccctgt

SEQ ID NO: 24033 - RNA, 22 nt, synthetic construct
  source 1..22: mol_type = other RNA
agaatgcctcatctgaatctaa

SEQ ID NO: 24034 - RNA, 22 nt, synthetic construct
  source 1..22: mol_type = other RNA
agacaaacccaaattgagagac

SEQ ID NO: 24035 - RNA, 22 nt, synthetic construct
  source 1..22: mol_type = other RNA
agacacacactcacttctgcaa

SEQ ID NO: 24036 - RNA, 22 nt, synthetic construct
  source 1..22: mol_type = other RNA
agacaccaccttcaccaactga

SEQ ID NO: 24037 - RNA, 22 nt, synthetic construct
  source 1..22: mol_type = other RNA
agacagactgaagagctgatcc

SEQ ID NO: 24038 - RNA, 22 nt, synthetic construct
  source 1..22: mol_type = other RNA
agacagtttacaaaacaccagc

SEQ ID NO: 24039 - RNA, 22 nt, synthetic construct
  source 1..22: mol_type = other RNA
agaccccgtctctacaaaaagt

SEQ ID NO: 24040 - RNA, 22 nt, synthetic construct
  source 1..22: mol_type = other RNA
agaccctgtctcaaaacgaaaa

SEQ ID NO: 24041 - RNA, 22 nt, synthetic construct
  source 1..22: mol_type = other RNA
agacctggcagacaccaccttc

SEQ ID NO: 24042 - RNA, 22 nt, synthetic construct
  source 1..22: mol_type = other RNA
agactgaagaaggctcgagatt

SEQ ID NO: 24043 - RNA, 22 nt, synthetic construct
  source 1..22: mol_type = other RNA
agactgaagagctgatccagac

SEQ ID NO: 24044 - RNA, 22 nt, synthetic construct
  source 1..22: mol_type = other RNA
agacttcatctcctaagcctcg

SEQ ID NO: 24045 - RNA, 22 nt, synthetic construct
  source 1..22: mol_type = other RNA
agagaaaatcatcatcgcttgg

SEQ ID NO: 24046 - RNA, 22 nt, synthetic construct
  source 1..22: mol_type = other RNA
agagaaagacagactgaagagc

SEQ ID NO: 24047 - RNA, 22 nt, synthetic construct
  source 1..22: mol_type = other RNA
agagaaggaaaccgaggcttag

SEQ ID NO: 24048 - RNA, 22 nt, synthetic construct
  source 1..22: mol_type = other RNA
agagacagtttacaaaacacca

SEQ ID NO: 24049 - RNA, 22 nt, synthetic construct
  source 1..22: mol_type = other RNA
agagacctggcagacaccacct

SEQ ID NO: 24050 - RNA, 22 nt, synthetic construct
  source 1..22: mol_type = other RNA
agagagaaagacagactgaaga

SEQ ID NO: 24051 - RNA, 22 nt, synthetic construct
  source 1..22: mol_type = other RNA
agagattaacaactgtcgggtg

SEQ ID NO: 24052 - RNA, 22 nt, synthetic construct
  source 1..22: mol_type = other RNA
agagctgatccagactgaagaa

SEQ ID NO: 24053 - RNA, 22 nt, synthetic construct
  source 1..22: mol_type = other RNA
agaggagaaagttcagtttggt

SEQ ID NO: 24054 - RNA, 22 nt, synthetic construct
  source 1..22: mol_type = other RNA
agaggcacatgccatctgtccc

SEQ ID NO: 24055 - RNA, 22 nt, synthetic construct
  source 1..22: mol_type = other RNA
agagggtatacggaggtgaccc

SEQ ID NO: 24056 - RNA, 22 nt, synthetic construct
  source 1..22: mol_type = other RNA
agagtacaaggctggtgttttg

SEQ ID NO: 24057 - RNA, 22 nt, synthetic construct
  source 1..22: mol_type = other RNA
agagttgaggtccaagatgcaa

SEQ ID NO: 24058 - RNA, 22 nt, synthetic construct
  source 1..22: mol_type = other RNA
agatataccagcaccaaactga

SEQ ID NO: 24059 - RNA, 22 nt, synthetic construct
  source 1..22: mol_type = other RNA
agatcagcttttgcattaatct

SEQ ID NO: 24060 - RNA, 22 nt, synthetic construct
  source 1..22: mol_type = other RNA
agatgaaatgcactagttttag

SEQ ID NO: 24061 - RNA, 22 nt, synthetic construct
  source 1..22: mol_type = other RNA
agatgaagcactaaaactagtg

SEQ ID NO: 24062 - RNA, 22 nt, synthetic construct
  source 1..22: mol_type = other RNA
agatgaagtctgaggtgttggt

SEQ ID NO: 24063 - RNA, 22 nt, synthetic construct
  source 1..22: mol_type = other RNA
agatgagattggtcataggatt

SEQ ID NO: 24064 - RNA, 22 nt, synthetic construct
  source 1..22: mol_type = other RNA
agatgaggcattcttggcagga

SEQ ID NO: 24065 - RNA, 22 nt, synthetic construct
  source 1..22: mol_type = other RNA
agatgcaatcccagatcagctt

SEQ ID NO: 24066 - RNA, 22 nt, synthetic construct
  source 1..22: mol_type = other RNA
agatgcactgaagacacacact

SEQ ID NO: 24067 - RNA, 22 nt, synthetic construct
  source 1..22: mol_type = other RNA
agatggcatgtgcctctcgata

SEQ ID NO: 24068 - RNA, 22 nt, synthetic construct
  source 1..22: mol_type = other RNA
agattaacaactgtcgggtgat

SEQ ID NO: 24069 - RNA, 22 nt, synthetic construct
  source 1..22: mol_type = other RNA
agattaatgcaaaagctgatct

SEQ ID NO: 24070 - RNA, 22 nt, synthetic construct
  source 1..22: mol_type = other RNA
agattagattcagatgaggcat

SEQ ID NO: 24071 - RNA, 22 nt, synthetic construct
  source 1..22: mol_type = other RNA
agattcagatgaggcattcttg

SEQ ID NO: 24072 - RNA, 22 nt, synthetic construct
  source 1..22: mol_type = other RNA
agattggtcataggattgtata

SEQ ID NO: 24073 - RNA, 22 nt, synthetic construct
  source 1..22: mol_type = other RNA
agatttgctgattttgacaacc

SEQ ID NO: 24074 - RNA, 22 nt, synthetic construct
  source 1..22: mol_type = other RNA
agcaaatctaatattgatacac

SEQ ID NO: 24075 - RNA, 22 nt, synthetic construct
  source 1..22: mol_type = other RNA
agcaaattgcttgctcactata

SEQ ID NO: 24076 - RNA, 22 nt, synthetic construct
  source 1..22: mol_type = other RNA
agcaagcaatttgcttttcagt

SEQ ID NO: 24077 - RNA, 22 nt, synthetic construct
  source 1..22: mol_type = other RNA
agcaatcctcctgcctgagcct

SEQ ID NO: 24078 - RNA, 22 nt, synthetic construct
  source 1..22: mol_type = other RNA
agcaatttgcttttcagttttt

SEQ ID NO: 24079 - RNA, 22 nt, synthetic construct
  source 1..22: mol_type = other RNA
agcaccaaactgaactttctcc

SEQ ID NO: 24080 - RNA, 22 nt, synthetic construct
  source 1..22: mol_type = other RNA
agcactaaaactagtgcatttc

SEQ ID NO: 24081 - RNA, 22 nt, synthetic construct
  source 1..22: mol_type = other RNA
agcagagtacaaggctggtgtt

SEQ ID NO: 24082 - RNA, 22 nt, synthetic construct
  source 1..22: mol_type = other RNA
agcatgtaagtaacaattttag

SEQ ID NO: 24083 - RNA, 22 nt, synthetic construct
  source 1..22: mol_type = other RNA
agcatttgaaaatgggttcatt

SEQ ID NO: 24084 - RNA, 22 nt, synthetic construct
  source 1..22: mol_type = other RNA
agccagctaaagtcacagggcc

SEQ ID NO: 24085 - RNA, 22 nt, synthetic construct
  source 1..22: mol_type = other RNA
agcccttaggcaggtgctacta

SEQ ID NO: 24086 - RNA, 22 nt, synthetic construct
  source 1..22: mol_type = other RNA
agcctcggtttccttctctgta

SEQ ID NO: 24087 - RNA, 22 nt, synthetic construct
  source 1..22: mol_type = other RNA
agccttccgagtaactgggact

SEQ ID NO: 24088 - RNA, 22 nt, synthetic construct
  source 1..22: mol_type = other RNA
agccttcttcagtctggatcag

SEQ ID NO: 24089 - RNA, 22 nt, synthetic construct
  source 1..22: mol_type = other RNA
agccttgtactctgcttaatat

SEQ ID NO: 24090 - RNA, 22 nt, synthetic construct
  source 1..22: mol_type = other RNA
agcgaggtgttgtggtacacgc

SEQ ID NO: 24091 - RNA, 22 nt, synthetic construct
  source 1..22: mol_type = other RNA
agcgatgatgattttctcttta

SEQ ID NO: 24092 - RNA, 22 nt, synthetic construct
  source 1..22: mol_type = other RNA
agctaaagtcacagggccttgg

SEQ ID NO: 24093 - RNA, 22 nt, synthetic construct
  source 1..22: mol_type = other RNA
agctccaccaacacctcagact

SEQ ID NO: 24094 - RNA, 22 nt, synthetic construct
  source 1..22: mol_type = other RNA
agctcttcagtctgtctttctc

SEQ ID NO: 24095 - RNA, 22 nt, synthetic construct
  source 1..22: mol_type = other RNA
agctgatccagactgaagaagg

SEQ ID NO: 24096 - RNA, 22 nt, synthetic construct
  source 1..22: mol_type = other RNA
agctgatctgggattgcatctt

SEQ ID NO: 24097 - RNA, 22 nt, synthetic construct
  source 1..22: mol_type = other RNA
agctggctttggtatttggcca

SEQ ID NO: 24098 - RNA, 22 nt, synthetic construct
  source 1..22: mol_type = other RNA
agctgggatttaaaccaaaata

SEQ ID NO: 24099 - RNA, 22 nt, synthetic construct
  source 1..22: mol_type = other RNA
agcttttgcattaatctcgagc

SEQ ID NO: 24100 - RNA, 22 nt, synthetic construct
  source 1..22: mol_type = other RNA
aggaaaccgaggcttaggagat

SEQ ID NO: 24101 - RNA, 22 nt, synthetic construct
  source 1..22: mol_type = other RNA
aggaatattgcagaagtgagtg

SEQ ID NO: 24102 - RNA, 22 nt, synthetic construct
  source 1..22: mol_type = other RNA
aggaatcacatatagtgagcaa

SEQ ID NO: 24103 - RNA, 22 nt, synthetic construct
  source 1..22: mol_type = other RNA
aggacaaatttgcataaccaca

SEQ ID NO: 24104 - RNA, 22 nt, synthetic construct
  source 1..22: mol_type = other RNA
aggagaaagttcagtttggtgc

SEQ ID NO: 24105 - RNA, 22 nt, synthetic construct
  source 1..22: mol_type = other RNA
aggagatgaagtctgaggtgtt

SEQ ID NO: 24106 - RNA, 22 nt, synthetic construct
  source 1..22: mol_type = other RNA
aggagtaaaggtgcataatgaa

SEQ ID NO: 24107 - RNA, 22 nt, synthetic construct
  source 1..22: mol_type = other RNA
aggatcacttgagtttgaaacc

SEQ ID NO: 24108 - RNA, 22 nt, synthetic construct
  source 1..22: mol_type = other RNA
aggattgaccaaaaactgaaaa

SEQ ID NO: 24109 - RNA, 22 nt, synthetic construct
  source 1..22: mol_type = other RNA
aggattgtatagtgtatcaata

SEQ ID NO: 24110 - RNA, 22 nt, synthetic construct
  source 1..22: mol_type = other RNA
aggcacatgccatctgtcccct

SEQ ID NO: 24111 - RNA, 22 nt, synthetic construct
  source 1..22: mol_type = other RNA
aggcaggtgctactattatccc

SEQ ID NO: 24112 - RNA, 22 nt, synthetic construct
  source 1..22: mol_type = other RNA
aggcattcttggcaggaatatt

SEQ ID NO: 24113 - RNA, 22 nt, synthetic construct
  source 1..22: mol_type = other RNA
aggccaaggccctgtgacttta

SEQ ID NO: 24114 - RNA, 22 nt, synthetic construct
  source 1..22: mol_type = other RNA
aggccctgtgactttagctggc

SEQ ID NO: 24115 - RNA, 22 nt, synthetic construct
  source 1..22: mol_type = other RNA
aggctcaggcaggaggattgct

SEQ ID NO: 24116 - RNA, 22 nt, synthetic construct
  source 1..22: mol_type = other RNA
aggctcgagattaatgcaaaag

SEQ ID NO: 24117 - RNA, 22 nt, synthetic construct
  source 1..22: mol_type = other RNA
aggctgcagtgagttattattc

SEQ ID NO: 24118 - RNA, 22 nt, synthetic construct
  source 1..22: mol_type = other RNA
aggctggagtgcagtggtggaa

SEQ ID NO: 24119 - RNA, 22 nt, synthetic construct
  source 1..22: mol_type = other RNA
aggctggtgttttgtaaactgt

SEQ ID NO: 24120 - RNA, 22 nt, synthetic construct
  source 1..22: mol_type = other RNA
aggctggtttcaaactcaagtg

SEQ ID NO: 24121 - RNA, 22 nt, synthetic construct
  source 1..22: mol_type = other RNA
aggcttaggagatgaagtctga

SEQ ID NO: 24122 - RNA, 22 nt, synthetic construct
  source 1..22: mol_type = other RNA
agggaataatagtaacttgaca

SEQ ID NO: 24123 - RNA, 22 nt, synthetic construct
  source 1..22: mol_type = other RNA
agggacactactgggacaattt

SEQ ID NO: 24124 - RNA, 22 nt, synthetic construct
  source 1..22: mol_type = other RNA
agggataatagtagcacctgcc

SEQ ID NO: 24125 - RNA, 22 nt, synthetic construct
  source 1..22: mol_type = other RNA
agggccttggcctgtattcttt

SEQ ID NO: 24126 - RNA, 22 nt, synthetic construct
  source 1..22: mol_type = other RNA
aggggacagatggcatgtgcct

SEQ ID NO: 24127 - RNA, 22 nt, synthetic construct
  source 1..22: mol_type = other RNA
aggggagagttgaggtccaaga

SEQ ID NO: 24128 - RNA, 22 nt, synthetic construct
  source 1..22: mol_type = other RNA
agggtatacggaggtgacccta

SEQ ID NO: 24129 - RNA, 22 nt, synthetic construct
  source 1..22: mol_type = other RNA
agggtcacctccgtataccctc

SEQ ID NO: 24130 - RNA, 22 nt, synthetic construct
  source 1..22: mol_type = other RNA
agggttgtcaaaatcagcaaat

SEQ ID NO: 24131 - RNA, 22 nt, synthetic construct
  source 1..22: mol_type = other RNA
aggtccaagatgcaatcccaga

SEQ ID NO: 24132 - RNA, 22 nt, synthetic construct
  source 1..22: mol_type = other RNA
aggtctctccactgtcaagtta

SEQ ID NO: 24133 - RNA, 22 nt, synthetic construct
  source 1..22: mol_type = other RNA
aggtgaccctaagtaacaagga

SEQ ID NO: 24134 - RNA, 22 nt, synthetic construct
  source 1..22: mol_type = other RNA
aggtgcataatgaacccatttt

SEQ ID NO: 24135 - RNA, 22 nt, synthetic construct
  source 1..22: mol_type = other RNA
aggtgctactattatccctgtt

SEQ ID NO: 24136 - RNA, 22 nt, synthetic construct
  source 1..22: mol_type = other RNA
aggtggaaggatcacttgagtt

SEQ ID NO: 24137 - RNA, 22 nt, synthetic construct
  source 1..22: mol_type = other RNA
aggtggtgtctgccaggtctct

SEQ ID NO: 24138 - RNA, 22 nt, synthetic construct
  source 1..22: mol_type = other RNA
aggtgttggtggagctgggatt

SEQ ID NO: 24139 - RNA, 22 nt, synthetic construct
  source 1..22: mol_type = other RNA
aggtgttgtggtacacgcccat

SEQ ID NO: 24140 - RNA, 22 nt, synthetic construct
  source 1..22: mol_type = other RNA
agtaaaggtgcataatgaaccc

SEQ ID NO: 24141 - RNA, 22 nt, synthetic construct
  source 1..22: mol_type = other RNA
agtaacaaggaatcacatatag

SEQ ID NO: 24142 - RNA, 22 nt, synthetic construct
  source 1..22: mol_type = other RNA
agtaacaattttagagggtata

SEQ ID NO: 24143 - RNA, 22 nt, synthetic construct
  source 1..22: mol_type = other RNA
agtaactgggactatgggcgtg

SEQ ID NO: 24144 - RNA, 22 nt, synthetic construct
  source 1..22: mol_type = other RNA
agtaacttgacagtggagagac

SEQ ID NO: 24145 - RNA, 22 nt, synthetic construct
  source 1..22: mol_type = other RNA
agtacaaggctggtgttttgta

SEQ ID NO: 24146 - RNA, 22 nt, synthetic construct
  source 1..22: mol_type = other RNA
agtagggttgtcaaaatcagca

SEQ ID NO: 24147 - RNA, 22 nt, synthetic construct
  source 1..22: mol_type = other RNA
agtagtgtcccttaacaataaa

SEQ ID NO: 24148 - RNA, 22 nt, synthetic construct
  source 1..22: mol_type = other RNA
agtagttttacagatgaagcac

SEQ ID NO: 24149 - RNA, 22 nt, synthetic construct
  source 1..22: mol_type = other RNA
agtataaccatcagacaaaccc

SEQ ID NO: 24150 - RNA, 22 nt, synthetic construct
  source 1..22: mol_type = other RNA
agtcacagggccttggcctgta

SEQ ID NO: 24151 - RNA, 22 nt, synthetic construct
  source 1..22: mol_type = other RNA
agtcattaacttttggccaaat

SEQ ID NO: 24152 - RNA, 22 nt, synthetic construct
  source 1..22: mol_type = other RNA
agtcccagttactcggaaggct

SEQ ID NO: 24153 - RNA, 22 nt, synthetic construct
  source 1..22: mol_type = other RNA
agtccgggagttcaaggctgca

SEQ ID NO: 24154 - RNA, 22 nt, synthetic construct
  source 1..22: mol_type = other RNA
agtctgaggtgttggtggagct

SEQ ID NO: 24155 - RNA, 22 nt, synthetic construct
  source 1..22: mol_type = other RNA
agtctggatcagctcttcagtc

SEQ ID NO: 24156 - RNA, 22 nt, synthetic construct
  source 1..22: mol_type = other RNA
agtctgtctttctctcttgtga

SEQ ID NO: 24157 - RNA, 22 nt, synthetic construct
  source 1..22: mol_type = other RNA
agtgagaccccgtctctacaaa

SEQ ID NO: 24158 - RNA, 22 nt, synthetic construct
  source 1..22: mol_type = other RNA
agtgagcaagcaatttgctttt

SEQ ID NO: 24159 - RNA, 22 nt, synthetic construct
  source 1..22: mol_type = other RNA
agtgagtgtgtgtcttcagtgc

SEQ ID NO: 24160 - RNA, 22 nt, synthetic construct
  source 1..22: mol_type = other RNA
agtgagttattattccaccact

SEQ ID NO: 24161 - RNA, 22 nt, synthetic construct
  source 1..22: mol_type = other RNA
agtgatccttccacctcagcct

SEQ ID NO: 24162 - RNA, 22 nt, synthetic construct
  source 1..22: mol_type = other RNA
agtgcagtggtggaataataac

SEQ ID NO: 24163 - RNA, 22 nt, synthetic construct
  source 1..22: mol_type = other RNA
agtgcatcttatcgagaggcac

SEQ ID NO: 24164 - RNA, 22 nt, synthetic construct
  source 1..22: mol_type = other RNA
agtgcatttcatcttaaactgc

SEQ ID NO: 24165 - RNA, 22 nt, synthetic construct
  source 1..22: mol_type = other RNA
agtgcttcatctgtaaaactac

SEQ ID NO: 24166 - RNA, 22 nt, synthetic construct
  source 1..22: mol_type = other RNA
agtggagagacctggcagacac

SEQ ID NO: 24167 - RNA, 22 nt, synthetic construct
  source 1..22: mol_type = other RNA
agtggtggaataataactcact

SEQ ID NO: 24168 - RNA, 22 nt, synthetic construct
  source 1..22: mol_type = other RNA
agtgtatcaatattagatttgc

SEQ ID NO: 24169 - RNA, 22 nt, synthetic construct
  source 1..22: mol_type = other RNA
agtgtcccttaacaataaaaag

SEQ ID NO: 24170 - RNA, 22 nt, synthetic construct
  source 1..22: mol_type = other RNA
agtgtgtgtcttcagtgcatct

SEQ ID NO: 24171 - RNA, 22 nt, synthetic construct
  source 1..22: mol_type = other RNA
agtgtttttatccatgccaagc

SEQ ID NO: 24172 - RNA, 22 nt, synthetic construct
  source 1..22: mol_type = other RNA
agttaacatcgccagaaagggg

SEQ ID NO: 24173 - RNA, 22 nt, synthetic construct
  source 1..22: mol_type = other RNA
agttaatgactttggcagttag

SEQ ID NO: 24174 - RNA, 22 nt, synthetic construct
  source 1..22: mol_type = other RNA
agttactcggaaggctcaggca

SEQ ID NO: 24175 - RNA, 22 nt, synthetic construct
  source 1..22: mol_type = other RNA
agttagtgtttttatccatgcc

SEQ ID NO: 24176 - RNA, 22 nt, synthetic construct
  source 1..22: mol_type = other RNA
agttattattccaccactgcac

SEQ ID NO: 24177 - RNA, 22 nt, synthetic construct
  source 1..22: mol_type = other RNA
agttcaaggctgcagtgagtta

SEQ ID NO: 24178 - RNA, 22 nt, synthetic construct
  source 1..22: mol_type = other RNA
agttcagtttggtgctggtata

SEQ ID NO: 24179 - RNA, 22 nt, synthetic construct
  source 1..22: mol_type = other RNA
agttgaggtccaagatgcaatc

SEQ ID NO: 24180 - RNA, 22 nt, synthetic construct
  source 1..22: mol_type = other RNA
agttggacatattttggtttaa

SEQ ID NO: 24181 - RNA, 22 nt, synthetic construct
  source 1..22: mol_type = other RNA
agttggtgaaggtggtgtctgc

SEQ ID NO: 24182 - RNA, 22 nt, synthetic construct
  source 1..22: mol_type = other RNA
agttgtagatgagattggtcat

SEQ ID NO: 24183 - RNA, 22 nt, synthetic construct
  source 1..22: mol_type = other RNA
agtttaagatgaaatgcactag

SEQ ID NO: 24184 - RNA, 22 nt, synthetic construct
  source 1..22: mol_type = other RNA
agtttacaaaacaccagccttg

SEQ ID NO: 24185 - RNA, 22 nt, synthetic construct
  source 1..22: mol_type = other RNA
agtttggtgctggtatatctta

SEQ ID NO: 24186 - RNA, 22 nt, synthetic construct
  source 1..22: mol_type = other RNA
agttttacagatgaagcactaa

SEQ ID NO: 24187 - RNA, 22 nt, synthetic construct
  source 1..22: mol_type = other RNA
agttttagtgcttcatctgtaa

SEQ ID NO: 24188 - RNA, 22 nt, synthetic construct
  source 1..22: mol_type = other RNA
agtttttggtcaatccttatga

SEQ ID NO: 24189 - RNA, 22 nt, synthetic construct
  source 1..22: mol_type = other RNA
ataaaaacactaactgccaaag

SEQ ID NO: 24190 - RNA, 22 nt, synthetic construct
  source 1..22: mol_type = other RNA
ataaaaaggggagagttgaggt

SEQ ID NO: 24191 - RNA, 22 nt, synthetic construct
  source 1..22: mol_type = other RNA
ataaacataagatataccagca

SEQ ID NO: 24192 - RNA, 22 nt, synthetic construct
  source 1..22: mol_type = other RNA
ataaagttgtagatgagattgg

SEQ ID NO: 24193 - RNA, 22 nt, synthetic construct
  source 1..22: mol_type = other RNA
ataaccacagtagggttgtcaa

SEQ ID NO: 24194 - RNA, 22 nt, synthetic construct
  source 1..22: mol_type = other RNA
ataaccatcagacaaacccaaa

SEQ ID NO: 24195 - RNA, 22 nt, synthetic construct
  source 1..22: mol_type = other RNA
ataactcactgcagccttgaac

SEQ ID NO: 24196 - RNA, 22 nt, synthetic construct
  source 1..22: mol_type = other RNA
ataagatataccagcaccaaac

SEQ ID NO: 24197 - RNA, 22 nt, synthetic construct
  source 1..22: mol_type = other RNA
ataagatgcactgaagacacac

SEQ ID NO: 24198 - RNA, 22 nt, synthetic construct
  source 1..22: mol_type = other RNA
ataagcatttgaaaatgggttc

SEQ ID NO: 24199 - RNA, 22 nt, synthetic construct
  source 1..22: mol_type = other RNA
ataaggattgaccaaaaactga

SEQ ID NO: 24200 - RNA, 22 nt, synthetic construct
  source 1..22: mol_type = other RNA
ataataactcactgcagccttg

SEQ ID NO: 24201 - RNA, 22 nt, synthetic construct
  source 1..22: mol_type = other RNA
ataatagtaacttgacagtgga

SEQ ID NO: 24202 - RNA, 22 nt, synthetic construct
  source 1..22: mol_type = other RNA
ataatagtagcacctgcctaag

SEQ ID NO: 24203 - RNA, 22 nt, synthetic construct
  source 1..22: mol_type = other RNA
ataatcataaggattgaccaaa

SEQ ID NO: 24204 - RNA, 22 nt, synthetic construct
  source 1..22: mol_type = other RNA
ataatgaacccattttcaaatg

SEQ ID NO: 24205 - RNA, 22 nt, synthetic construct
  source 1..22: mol_type = other RNA
atacaatcctatgaccaatctc

SEQ ID NO: 24206 - RNA, 22 nt, synthetic construct
  source 1..22: mol_type = other RNA
atacactatacaatcctatgac

SEQ ID NO: 24207 - RNA, 22 nt, synthetic construct
  source 1..22: mol_type = other RNA
atacaggccaaggccctgtgac

SEQ ID NO: 24208 - RNA, 22 nt, synthetic construct
  source 1..22: mol_type = other RNA
ataccaaagccagctaaagtca

SEQ ID NO: 24209 - RNA, 22 nt, synthetic construct
  source 1..22: mol_type = other RNA
ataccagcaccaaactgaactt

SEQ ID NO: 24210 - RNA, 22 nt, synthetic construct
  source 1..22: mol_type = other RNA
ataccctctaaaattgttactt

SEQ ID NO: 24211 - RNA, 22 nt, synthetic construct
  source 1..22: mol_type = other RNA
atacggaggtgaccctaagtaa

SEQ ID NO: 24212 - RNA, 22 nt, synthetic construct
  source 1..22: mol_type = other RNA
atactcgagattagattcagat

SEQ ID NO: 24213 - RNA, 22 nt, synthetic construct
  source 1..22: mol_type = other RNA
atagaggctgaggtggaaggat

SEQ ID NO: 24214 - RNA, 22 nt, synthetic construct
  source 1..22: mol_type = other RNA
atagcgaggtgttgtggtacac

SEQ ID NO: 24215 - RNA, 22 nt, synthetic construct
  source 1..22: mol_type = other RNA
ataggattgtatagtgtatcaa

SEQ ID NO: 24216 - RNA, 22 nt, synthetic construct
  source 1..22: mol_type = other RNA
atagtaacttgacagtggagag

SEQ ID NO: 24217 - RNA, 22 nt, synthetic construct
  source 1..22: mol_type = other RNA
atagtagcacctgcctaagggc

SEQ ID NO: 24218 - RNA, 22 nt, synthetic construct
  source 1..22: mol_type = other RNA
atagtcccagttactcggaagg

SEQ ID NO: 24219 - RNA, 22 nt, synthetic construct
  source 1..22: mol_type = other RNA
atagtgagaccccgtctctaca

SEQ ID NO: 24220 - RNA, 22 nt, synthetic construct
  source 1..22: mol_type = other RNA
atagtgagcaagcaatttgctt

SEQ ID NO: 24221 - RNA, 22 nt, synthetic construct
  source 1..22: mol_type = other RNA
atataccagcaccaaactgaac

SEQ ID NO: 24222 - RNA, 22 nt, synthetic construct
  source 1..22: mol_type = other RNA
atatagtgagcaagcaatttgc

SEQ ID NO: 24223 - RNA, 22 nt, synthetic construct
  source 1..22: mol_type = other RNA
atatcttatgtttatcacccga

SEQ ID NO: 24224 - RNA, 22 nt, synthetic construct
  source 1..22: mol_type = other RNA
atatgtcaatgtcacaagagag

SEQ ID NO: 24225 - RNA, 22 nt, synthetic construct
  source 1..22: mol_type = other RNA
atatgtccaactgcaaagcatg

SEQ ID NO: 24226 - RNA, 22 nt, synthetic construct
  source 1..22: mol_type = other RNA
atatgtgattccttgttactta

SEQ ID NO: 24227 - RNA, 22 nt, synthetic construct
  source 1..22: mol_type = other RNA
atattaagcagagtacaaggct

SEQ ID NO: 24228 - RNA, 22 nt, synthetic construct
  source 1..22: mol_type = other RNA
atattcctgccaagaatgcctc

SEQ ID NO: 24229 - RNA, 22 nt, synthetic construct
  source 1..22: mol_type = other RNA
atattgatacactatacaatcc

SEQ ID NO: 24230 - RNA, 22 nt, synthetic construct
  source 1..22: mol_type = other RNA
atattgcagaagtgagtgtgtg

SEQ ID NO: 24231 - RNA, 22 nt, synthetic construct
  source 1..22: mol_type = other RNA
atattttggtttaaatcccagc

SEQ ID NO: 24232 - RNA, 22 nt, synthetic construct
  source 1..22: mol_type = other RNA
atcaaagttaacatcgccagaa

SEQ ID NO: 24233 - RNA, 22 nt, synthetic construct
  source 1..22: mol_type = other RNA
atcacatatagtgagcaagcaa

SEQ ID NO: 24234 - RNA, 22 nt, synthetic construct
  source 1..22: mol_type = other RNA
atcacccgacagttgttaatct

SEQ ID NO: 24235 - RNA, 22 nt, synthetic construct
  source 1..22: mol_type = other RNA
atcacttgagtttgaaaccagc

SEQ ID NO: 24236 - RNA, 22 nt, synthetic construct
  source 1..22: mol_type = other RNA
atcagacaaacccaaattgaga

SEQ ID NO: 24237 - RNA, 22 nt, synthetic construct
  source 1..22: mol_type = other RNA
atcagctcttcagtctgtcttt

SEQ ID NO: 24238 - RNA, 22 nt, synthetic construct
  source 1..22: mol_type = other RNA
atcagcttttgcattaatctcg

SEQ ID NO: 24239 - RNA, 22 nt, synthetic construct
  source 1..22: mol_type = other RNA
atcagttggtgaaggtggtgtc

SEQ ID NO: 24240 - RNA, 22 nt, synthetic construct
  source 1..22: mol_type = other RNA
atcataaggattgaccaaaaac

SEQ ID NO: 24241 - RNA, 22 nt, synthetic construct
  source 1..22: mol_type = other RNA
atcatcatcgcttggcatggat

SEQ ID NO: 24242 - RNA, 22 nt, synthetic construct
  source 1..22: mol_type = other RNA
atcatcgcttggcatggataaa

SEQ ID NO: 24243 - RNA, 22 nt, synthetic construct
  source 1..22: mol_type = other RNA
atccagactgaagaaggctcga

SEQ ID NO: 24244 - RNA, 22 nt, synthetic construct
  source 1..22: mol_type = other RNA
atccatgccaagcgatgatgat

SEQ ID NO: 24245 - RNA, 22 nt, synthetic construct
  source 1..22: mol_type = other RNA
atcccagatcagcttttgcatt

SEQ ID NO: 24246 - RNA, 22 nt, synthetic construct
  source 1..22: mol_type = other RNA
atcccagctccaccaacacctc

SEQ ID NO: 24247 - RNA, 22 nt, synthetic construct
  source 1..22: mol_type = other RNA
atccctgttttacagagaagga

SEQ ID NO: 24248 - RNA, 22 nt, synthetic construct
  source 1..22: mol_type = other RNA
atcctatgaccaatctcatcta

SEQ ID NO: 24249 - RNA, 22 nt, synthetic construct
  source 1..22: mol_type = other RNA
atcctcctgcctgagccttccg

SEQ ID NO: 24250 - RNA, 22 nt, synthetic construct
  source 1..22: mol_type = other RNA
atccttatgattatttagagga

SEQ ID NO: 24251 - RNA, 22 nt, synthetic construct
  source 1..22: mol_type = other RNA
atccttccacctcagcctctat

SEQ ID NO: 24252 - RNA, 22 nt, synthetic construct
  source 1..22: mol_type = other RNA
atcgagaggcacatgccatctg

SEQ ID NO: 24253 - RNA, 22 nt, synthetic construct
  source 1..22: mol_type = other RNA
atcgccagaaaggggacagatg

SEQ ID NO: 24254 - RNA, 22 nt, synthetic construct
  source 1..22: mol_type = other RNA
atcgcttggcatggataaaaac

SEQ ID NO: 24255 - RNA, 22 nt, synthetic construct
  source 1..22: mol_type = other RNA
atctaatctcgagtataaccat

SEQ ID NO: 24256 - RNA, 22 nt, synthetic construct
  source 1..22: mol_type = other RNA
atctcatctacaactttattca

SEQ ID NO: 24257 - RNA, 22 nt, synthetic construct
  source 1..22: mol_type = other RNA
atctcctaagcctcggtttcct

SEQ ID NO: 24258 - RNA, 22 nt, synthetic construct
  source 1..22: mol_type = other RNA
atctcgagccttcttcagtctg

SEQ ID NO: 24259 - RNA, 22 nt, synthetic construct
  source 1..22: mol_type = other RNA
atctcgagtataaccatcagac

SEQ ID NO: 24260 - RNA, 22 nt, synthetic construct
  source 1..22: mol_type = other RNA
atctgaatctaatctcgagtat

SEQ ID NO: 24261 - RNA, 22 nt, synthetic construct
  source 1..22: mol_type = other RNA
atctgggattgcatcttggacc

SEQ ID NO: 24262 - RNA, 22 nt, synthetic construct
  source 1..22: mol_type = other RNA
atctgtcccctttctggcgatg

SEQ ID NO: 24263 - RNA, 22 nt, synthetic construct
  source 1..22: mol_type = other RNA
atcttatcgagaggcacatgcc

SEQ ID NO: 24264 - RNA, 22 nt, synthetic construct
  source 1..22: mol_type = other RNA
atcttatgtttatcacccgaca

SEQ ID NO: 24265 - RNA, 22 nt, synthetic construct
  source 1..22: mol_type = other RNA
atcttggacctcaactctcccc

SEQ ID NO: 24266 - RNA, 22 nt, synthetic construct
  source 1..22: mol_type = other RNA
atgaaatgcactagttttagtg

SEQ ID NO: 24267 - RNA, 22 nt, synthetic construct
  source 1..22: mol_type = other RNA
atgaacccattttcaaatgctt

SEQ ID NO: 24268 - RNA, 22 nt, synthetic construct
  source 1..22: mol_type = other RNA
atgaagcactaaaactagtgca

SEQ ID NO: 24269 - RNA, 22 nt, synthetic construct
  source 1..22: mol_type = other RNA
atgaagtctgaggtgttggtgg

SEQ ID NO: 24270 - RNA, 22 nt, synthetic construct
  source 1..22: mol_type = other RNA
atgaccaatctcatctacaact

SEQ ID NO: 24271 - RNA, 22 nt, synthetic construct
  source 1..22: mol_type = other RNA
atgactttggcagttagtgttt

SEQ ID NO: 24272 - RNA, 22 nt, synthetic construct
  source 1..22: mol_type = other RNA
atgagattggtcataggattgt

SEQ ID NO: 24273 - RNA, 22 nt, synthetic construct
  source 1..22: mol_type = other RNA
atgaggcattcttggcaggaat

SEQ ID NO: 24274 - RNA, 22 nt, synthetic construct
  source 1..22: mol_type = other RNA
atgatgattttctctttagtga

SEQ ID NO: 24275 - RNA, 22 nt, synthetic construct
  source 1..22: mol_type = other RNA
atgattatttagaggagaaagt

SEQ ID NO: 24276 - RNA, 22 nt, synthetic construct
  source 1..22: mol_type = other RNA
atgattttctctttagtgacag

SEQ ID NO: 24277 - RNA, 22 nt, synthetic construct
  source 1..22: mol_type = other RNA
atgcaaaagctgatctgggatt

SEQ ID NO: 24278 - RNA, 22 nt, synthetic construct
  source 1..22: mol_type = other RNA
atgcaaatttgtccttgttcta

SEQ ID NO: 24279 - RNA, 22 nt, synthetic construct
  source 1..22: mol_type = other RNA
atgcaatcccagatcagctttt

SEQ ID NO: 24280 - RNA, 22 nt, synthetic construct
  source 1..22: mol_type = other RNA
atgcacctttactcctaaataa

SEQ ID NO: 24281 - RNA, 22 nt, synthetic construct
  source 1..22: mol_type = other RNA
atgcactagttttagtgcttca

SEQ ID NO: 24282 - RNA, 22 nt, synthetic construct
  source 1..22: mol_type = other RNA
atgcactgaagacacacactca

SEQ ID NO: 24283 - RNA, 22 nt, synthetic construct
  source 1..22: mol_type = other RNA
atgccaagcgatgatgattttc

SEQ ID NO: 24284 - RNA, 22 nt, synthetic construct
  source 1..22: mol_type = other RNA
atgccatctgtcccctttctgg

SEQ ID NO: 24285 - RNA, 22 nt, synthetic construct
  source 1..22: mol_type = other RNA
atgcctcatctgaatctaatct

SEQ ID NO: 24286 - RNA, 22 nt, synthetic construct
  source 1..22: mol_type = other RNA
atgctttgcagttggacatatt

SEQ ID NO: 24287 - RNA, 22 nt, synthetic construct
  source 1..22: mol_type = other RNA
atggataaaaacactaactgcc

SEQ ID NO: 24288 - RNA, 22 nt, synthetic construct
  source 1..22: mol_type = other RNA
atggcatgtgcctctcgataag

SEQ ID NO: 24289 - RNA, 22 nt, synthetic construct
  source 1..22: mol_type = other RNA
atgggcgtgtaccacaacacct

SEQ ID NO: 24290 - RNA, 22 nt, synthetic construct
  source 1..22: mol_type = other RNA
atgggttcattatgcaccttta

SEQ ID NO: 24291 - RNA, 22 nt, synthetic construct
  source 1..22: mol_type = other RNA
atggttatactcgagattagat

SEQ ID NO: 24292 - RNA, 22 nt, synthetic construct
  source 1..22: mol_type = other RNA
atgtaagtaacaattttagagg

SEQ ID NO: 24293 - RNA, 22 nt, synthetic construct
  source 1..22: mol_type = other RNA
atgtcaatgtcacaagagagaa

SEQ ID NO: 24294 - RNA, 22 nt, synthetic construct
  source 1..22: mol_type = other RNA
atgtcacaagagagaaagacag

SEQ ID NO: 24295 - RNA, 22 nt, synthetic construct
  source 1..22: mol_type = other RNA
atgtccaactgcaaagcatgta

SEQ ID NO: 24296 - RNA, 22 nt, synthetic construct
  source 1..22: mol_type = other RNA
atgtctgtcactaaagagaaaa

SEQ ID NO: 24297 - RNA, 22 nt, synthetic construct
  source 1..22: mol_type = other RNA
atgtgattccttgttacttagg

SEQ ID NO: 24298 - RNA, 22 nt, synthetic construct
  source 1..22: mol_type = other RNA
atgtgcctctcgataagatgca

SEQ ID NO: 24299 - RNA, 22 nt, synthetic construct
  source 1..22: mol_type = other RNA
atgttaactttgatcagttggt

SEQ ID NO: 24300 - RNA, 22 nt, synthetic construct
  source 1..22: mol_type = other RNA
atgttgcccaggctggtttcaa

SEQ ID NO: 24301 - RNA, 22 nt, synthetic construct
  source 1..22: mol_type = other RNA
atgtttatcacccgacagttgt

SEQ ID NO: 24302 - RNA, 22 nt, synthetic construct
  source 1..22: mol_type = other RNA
attaacaactgtcgggtgataa

SEQ ID NO: 24303 - RNA, 22 nt, synthetic construct
  source 1..22: mol_type = other RNA
attaacttttggccaaatacca

SEQ ID NO: 24304 - RNA, 22 nt, synthetic construct
  source 1..22: mol_type = other RNA
attaagcagagtacaaggctgg

SEQ ID NO: 24305 - RNA, 22 nt, synthetic construct
  source 1..22: mol_type = other RNA
attaatctcgagccttcttcag

SEQ ID NO: 24306 - RNA, 22 nt, synthetic construct
  source 1..22: mol_type = other RNA
attaatgcaaaagctgatctgg

SEQ ID NO: 24307 - RNA, 22 nt, synthetic construct
  source 1..22: mol_type = other RNA
attagattcagatgaggcattc

SEQ ID NO: 24308 - RNA, 22 nt, synthetic construct
  source 1..22: mol_type = other RNA
attagatttgctgattttgaca

SEQ ID NO: 24309 - RNA, 22 nt, synthetic construct
  source 1..22: mol_type = other RNA
attatccctgttttacagagaa

SEQ ID NO: 24310 - RNA, 22 nt, synthetic construct
  source 1..22: mol_type = other RNA
attatgcacctttactcctaaa

SEQ ID NO: 24311 - RNA, 22 nt, synthetic construct
  source 1..22: mol_type = other RNA
attatttagaggagaaagttca

SEQ ID NO: 24312 - RNA, 22 nt, synthetic construct
  source 1..22: mol_type = other RNA
attatttaggagtaaaggtgca

SEQ ID NO: 24313 - RNA, 22 nt, synthetic construct
  source 1..22: mol_type = other RNA
attcaaattttatagaggctga

SEQ ID NO: 24314 - RNA, 22 nt, synthetic construct
  source 1..22: mol_type = other RNA
attcagatgaggcattcttggc

SEQ ID NO: 24315 - RNA, 22 nt, synthetic construct
  source 1..22: mol_type = other RNA
attccctttataatttgcagtt

SEQ ID NO: 24316 - RNA, 22 nt, synthetic construct
  source 1..22: mol_type = other RNA
attcctgccaagaatgcctcat

SEQ ID NO: 24317 - RNA, 22 nt, synthetic construct
  source 1..22: mol_type = other RNA
attccttgttacttagggtcac

SEQ ID NO: 24318 - RNA, 22 nt, synthetic construct
  source 1..22: mol_type = other RNA
attcttggcaggaatattgcag

SEQ ID NO: 24319 - RNA, 22 nt, synthetic construct
  source 1..22: mol_type = other RNA
attgacatattaagcagagtac

SEQ ID NO: 24320 - RNA, 22 nt, synthetic construct
  source 1..22: mol_type = other RNA
attgaccaaaaactgaaaagca

SEQ ID NO: 24321 - RNA, 22 nt, synthetic construct
  source 1..22: mol_type = other RNA
attgagagacagtttacaaaac

SEQ ID NO: 24322 - RNA, 22 nt, synthetic construct
  source 1..22: mol_type = other RNA
attgatacactatacaatccta

SEQ ID NO: 24323 - RNA, 22 nt, synthetic construct
  source 1..22: mol_type = other RNA
attgcagaagtgagtgtgtgtc

SEQ ID NO: 24324 - RNA, 22 nt, synthetic construct
  source 1..22: mol_type = other RNA
attgcatcttggacctcaactc

SEQ ID NO: 24325 - RNA, 22 nt, synthetic construct
  source 1..22: mol_type = other RNA
attgcttgctcactatatgtga

SEQ ID NO: 24326 - RNA, 22 nt, synthetic construct
  source 1..22: mol_type = other RNA
attggtcataggattgtatagt

SEQ ID NO: 24327 - RNA, 22 nt, synthetic construct
  source 1..22: mol_type = other RNA
attgtcccagtagtgtccctta

SEQ ID NO: 24328 - RNA, 22 nt, synthetic construct
  source 1..22: mol_type = other RNA
attgttaagggacactactggg

SEQ ID NO: 24329 - RNA, 22 nt, synthetic construct
  source 1..22: mol_type = other RNA
attgttacttacatgctttgca

SEQ ID NO: 24330 - RNA, 22 nt, synthetic construct
  source 1..22: mol_type = other RNA
atttagaggagaaagttcagtt

SEQ ID NO: 24331 - RNA, 22 nt, synthetic construct
  source 1..22: mol_type = other RNA
atttaggagtaaaggtgcataa

SEQ ID NO: 24332 - RNA, 22 nt, synthetic construct
  source 1..22: mol_type = other RNA
atttatttccttagaacaagga

SEQ ID NO: 24333 - RNA, 22 nt, synthetic construct
  source 1..22: mol_type = other RNA
atttccttagaacaaggacaaa

SEQ ID NO: 24334 - RNA, 22 nt, synthetic construct
  source 1..22: mol_type = other RNA
atttgaaaatgggttcattatg

SEQ ID NO: 24335 - RNA, 22 nt, synthetic construct
  source 1..22: mol_type = other RNA
atttgcagtttaagatgaaatg

SEQ ID NO: 24336 - RNA, 22 nt, synthetic construct
  source 1..22: mol_type = other RNA
atttgcataaccacagtagggt

SEQ ID NO: 24337 - RNA, 22 nt, synthetic construct
  source 1..22: mol_type = other RNA
atttgctgattttgacaaccct

SEQ ID NO: 24338 - RNA, 22 nt, synthetic construct
  source 1..22: mol_type = other RNA
atttgcttttcagtttttggtc

SEQ ID NO: 24339 - RNA, 22 nt, synthetic construct
  source 1..22: mol_type = other RNA
atttggccaaaagttaatgact

SEQ ID NO: 24340 - RNA, 22 nt, synthetic construct
  source 1..22: mol_type = other RNA
atttgggtttgtctgatggtta

SEQ ID NO: 24341 - RNA, 22 nt, synthetic construct
  source 1..22: mol_type = other RNA
atttgtccttgttctaaggaaa

SEQ ID NO: 24342 - RNA, 22 nt, synthetic construct
  source 1..22: mol_type = other RNA
attttagagggtatacggaggt

SEQ ID NO: 24343 - RNA, 22 nt, synthetic construct
  source 1..22: mol_type = other RNA
attttatagaggctgaggtgga

SEQ ID NO: 24344 - RNA, 22 nt, synthetic construct
  source 1..22: mol_type = other RNA
attttctctttagtgacagaca

SEQ ID NO: 24345 - RNA, 22 nt, synthetic construct
  source 1..22: mol_type = other RNA
attttgacaaccctactgtggt

SEQ ID NO: 24346 - RNA, 22 nt, synthetic construct
  source 1..22: mol_type = other RNA
attttggtttaaatcccagctc

SEQ ID NO: 24347 - RNA, 22 nt, synthetic construct
  source 1..22: mol_type = other RNA
caaaaactgaaaagcaaattgc

SEQ ID NO: 24348 - RNA, 22 nt, synthetic construct
  source 1..22: mol_type = other RNA
caaaacaccagccttgtactct

SEQ ID NO: 24349 - RNA, 22 nt, synthetic construct
  source 1..22: mol_type = other RNA
caaaagctgatctgggattgca

SEQ ID NO: 24350 - RNA, 22 nt, synthetic construct
  source 1..22: mol_type = other RNA
caaaagttaatgactttggcag

SEQ ID NO: 24351 - RNA, 22 nt, synthetic construct
  source 1..22: mol_type = other RNA
caaaatatgtccaactgcaaag

SEQ ID NO: 24352 - RNA, 22 nt, synthetic construct
  source 1..22: mol_type = other RNA
caaacccaaattgagagacagt

SEQ ID NO: 24353 - RNA, 22 nt, synthetic construct
  source 1..22: mol_type = other RNA
caaactgaactttctcctctaa

SEQ ID NO: 24354 - RNA, 22 nt, synthetic construct
  source 1..22: mol_type = other RNA
caaagaatacaggccaaggccc

SEQ ID NO: 24355 - RNA, 22 nt, synthetic construct
  source 1..22: mol_type = other RNA
caaagcatgtaagtaacaattt

SEQ ID NO: 24356 - RNA, 22 nt, synthetic construct
  source 1..22: mol_type = other RNA
caaagccagctaaagtcacagg

SEQ ID NO: 24357 - RNA, 22 nt, synthetic construct
  source 1..22: mol_type = other RNA
caaagtcattaacttttggcca

SEQ ID NO: 24358 - RNA, 22 nt, synthetic construct
  source 1..22: mol_type = other RNA
caaagttaacatcgccagaaag

SEQ ID NO: 24359 - RNA, 22 nt, synthetic construct
  source 1..22: mol_type = other RNA
caaataccaaagccagctaaag

SEQ ID NO: 24360 - RNA, 22 nt, synthetic construct
  source 1..22: mol_type = other RNA
caaattgagagacagtttacaa

SEQ ID NO: 24361 - RNA, 22 nt, synthetic construct
  source 1..22: mol_type = other RNA
caaattgcttgctcactatatg

SEQ ID NO: 24362 - RNA, 22 nt, synthetic construct
  source 1..22: mol_type = other RNA
caaatttgcataaccacagtag

SEQ ID NO: 24363 - RNA, 22 nt, synthetic construct
  source 1..22: mol_type = other RNA
caaatttgtccttgttctaagg

SEQ ID NO: 24364 - RNA, 22 nt, synthetic construct
  source 1..22: mol_type = other RNA
caaattttatagaggctgaggt

SEQ ID NO: 24365 - RNA, 22 nt, synthetic construct
  source 1..22: mol_type = other RNA
caacacctcagacttcatctcc

SEQ ID NO: 24366 - RNA, 22 nt, synthetic construct
  source 1..22: mol_type = other RNA
caaccctactgtggttatgcaa

SEQ ID NO: 24367 - RNA, 22 nt, synthetic construct
  source 1..22: mol_type = other RNA
caactctcccctttttattgtt

SEQ ID NO: 24368 - RNA, 22 nt, synthetic construct
  source 1..22: mol_type = other RNA
caactgatcaaagttaacatcg

SEQ ID NO: 24369 - RNA, 22 nt, synthetic construct
  source 1..22: mol_type = other RNA
caactgcaaagcatgtaagtaa

SEQ ID NO: 24370 - RNA, 22 nt, synthetic construct
  source 1..22: mol_type = other RNA
caactgtcgggtgataaacata

SEQ ID NO: 24371 - RNA, 22 nt, synthetic construct
  source 1..22: mol_type = other RNA
caagaatgcctcatctgaatct

SEQ ID NO: 24372 - RNA, 22 nt, synthetic construct
  source 1..22: mol_type = other RNA
caagagagaaagacagactgaa

SEQ ID NO: 24373 - RNA, 22 nt, synthetic construct
  source 1..22: mol_type = other RNA
caagatgcaatcccagatcagc

SEQ ID NO: 24374 - RNA, 22 nt, synthetic construct
  source 1..22: mol_type = other RNA
caagcaatttgcttttcagttt

SEQ ID NO: 24375 - RNA, 22 nt, synthetic construct
  source 1..22: mol_type = other RNA
caagcccttaggcaggtgctac

SEQ ID NO: 24376 - RNA, 22 nt, synthetic construct
  source 1..22: mol_type = other RNA
caagcgatgatgattttctctt

SEQ ID NO: 24377 - RNA, 22 nt, synthetic construct
  source 1..22: mol_type = other RNA
caaggaatcacatatagtgagc

SEQ ID NO: 24378 - RNA, 22 nt, synthetic construct
  source 1..22: mol_type = other RNA
caaggacaaatttgcataacca

SEQ ID NO: 24379 - RNA, 22 nt, synthetic construct
  source 1..22: mol_type = other RNA
caaggccctgtgactttagctg

SEQ ID NO: 24380 - RNA, 22 nt, synthetic construct
  source 1..22: mol_type = other RNA
caaggctgcagtgagttattat

SEQ ID NO: 24381 - RNA, 22 nt, synthetic construct
  source 1..22: mol_type = other RNA
caaggctggtgttttgtaaact

SEQ ID NO: 24382 - RNA, 22 nt, synthetic construct
  source 1..22: mol_type = other RNA
caagtgatccttccacctcagc

SEQ ID NO: 24383 - RNA, 22 nt, synthetic construct
  source 1..22: mol_type = other RNA
caagttactattattcccttta

SEQ ID NO: 24384 - RNA, 22 nt, synthetic construct
  source 1..22: mol_type = other RNA
caataaaaaggggagagttgag

SEQ ID NO: 24385 - RNA, 22 nt, synthetic construct
  source 1..22: mol_type = other RNA
caatattcctgccaagaatgcc

SEQ ID NO: 24386 - RNA, 22 nt, synthetic construct
  source 1..22: mol_type = other RNA
caatcccagatcagcttttgca

SEQ ID NO: 24387 - RNA, 22 nt, synthetic construct
  source 1..22: mol_type = other RNA
caatcctatgaccaatctcatc

SEQ ID NO: 24388 - RNA, 22 nt, synthetic construct
  source 1..22: mol_type = other RNA
caatcctcctgcctgagccttc

SEQ ID NO: 24389 - RNA, 22 nt, synthetic construct
  source 1..22: mol_type = other RNA
caatccttatgattatttagag

SEQ ID NO: 24390 - RNA, 22 nt, synthetic construct
  source 1..22: mol_type = other RNA
caatctcatctacaactttatt

SEQ ID NO: 24391 - RNA, 22 nt, synthetic construct
  source 1..22: mol_type = other RNA
caatgtcacaagagagaaagac

SEQ ID NO: 24392 - RNA, 22 nt, synthetic construct
  source 1..22: mol_type = other RNA
caatttgcttttcagtttttgg

SEQ ID NO: 24393 - RNA, 22 nt, synthetic construct
  source 1..22: mol_type = other RNA
caatttgggtttgtctgatggt

SEQ ID NO: 24394 - RNA, 22 nt, synthetic construct
  source 1..22: mol_type = other RNA
caattttagagggtatacggag

SEQ ID NO: 24395 - RNA, 22 nt, synthetic construct
  source 1..22: mol_type = other RNA
cacaagagagaaagacagactg

SEQ ID NO: 24396 - RNA, 22 nt, synthetic construct
  source 1..22: mol_type = other RNA
cacaagcccttaggcaggtgct

SEQ ID NO: 24397 - RNA, 22 nt, synthetic construct
  source 1..22: mol_type = other RNA
cacacactcacttctgcaatat

SEQ ID NO: 24398 - RNA, 22 nt, synthetic construct
  source 1..22: mol_type = other RNA
cacactcacttctgcaatattc

SEQ ID NO: 24399 - RNA, 22 nt, synthetic construct
  source 1..22: mol_type = other RNA
cacagggccttggcctgtattc

SEQ ID NO: 24400 - RNA, 22 nt, synthetic construct
  source 1..22: mol_type = other RNA
cacagtagggttgtcaaaatca

SEQ ID NO: 24401 - RNA, 22 nt, synthetic construct
  source 1..22: mol_type = other RNA
cacatatagtgagcaagcaatt

SEQ ID NO: 24402 - RNA, 22 nt, synthetic construct
  source 1..22: mol_type = other RNA
cacatgccatctgtcccctttc

SEQ ID NO: 24403 - RNA, 22 nt, synthetic construct
  source 1..22: mol_type = other RNA
caccaaactgaactttctcctc

SEQ ID NO: 24404 - RNA, 22 nt, synthetic construct
  source 1..22: mol_type = other RNA
caccaacacctcagacttcatc

SEQ ID NO: 24405 - RNA, 22 nt, synthetic construct
  source 1..22: mol_type = other RNA
caccaactgatcaaagttaaca

SEQ ID NO: 24406 - RNA, 22 nt, synthetic construct
  source 1..22: mol_type = other RNA
caccaccttcaccaactgatca

SEQ ID NO: 24407 - RNA, 22 nt, synthetic construct
  source 1..22: mol_type = other RNA
caccagccttgtactctgctta

SEQ ID NO: 24408 - RNA, 22 nt, synthetic construct
  source 1..22: mol_type = other RNA
cacccgacagttgttaatctct

SEQ ID NO: 24409 - RNA, 22 nt, synthetic construct
  source 1..22: mol_type = other RNA
cacctcagacttcatctcctaa

SEQ ID NO: 24410 - RNA, 22 nt, synthetic construct
  source 1..22: mol_type = other RNA
cacctcagcctctataaaattt

SEQ ID NO: 24411 - RNA, 22 nt, synthetic construct
  source 1..22: mol_type = other RNA
cacctccgtataccctctaaaa

SEQ ID NO: 24412 - RNA, 22 nt, synthetic construct
  source 1..22: mol_type = other RNA
caccttcaccaactgatcaaag

SEQ ID NO: 24413 - RNA, 22 nt, synthetic construct
  source 1..22: mol_type = other RNA
cacctttactcctaaataattc

SEQ ID NO: 24414 - RNA, 22 nt, synthetic construct
  source 1..22: mol_type = other RNA
cacgcccatagtcccagttact

SEQ ID NO: 24415 - RNA, 22 nt, synthetic construct
  source 1..22: mol_type = other RNA
cactaaaactagtgcatttcat

SEQ ID NO: 24416 - RNA, 22 nt, synthetic construct
  source 1..22: mol_type = other RNA
cactaaagagaaaatcatcatc

SEQ ID NO: 24417 - RNA, 22 nt, synthetic construct
  source 1..22: mol_type = other RNA
cactaactgccaaagtcattaa

SEQ ID NO: 24418 - RNA, 22 nt, synthetic construct
  source 1..22: mol_type = other RNA
cactagttttagtgcttcatct

SEQ ID NO: 24419 - RNA, 22 nt, synthetic construct
  source 1..22: mol_type = other RNA
cactatacaatcctatgaccaa

SEQ ID NO: 24420 - RNA, 22 nt, synthetic construct
  source 1..22: mol_type = other RNA
cactatatgtgattccttgtta

SEQ ID NO: 24421 - RNA, 22 nt, synthetic construct
  source 1..22: mol_type = other RNA
cactcacttctgcaatattcct

SEQ ID NO: 24422 - RNA, 22 nt, synthetic construct
  source 1..22: mol_type = other RNA
cactgaagacacacactcactt

SEQ ID NO: 24423 - RNA, 22 nt, synthetic construct
  source 1..22: mol_type = other RNA
cactgtcaagttactattattc

SEQ ID NO: 24424 - RNA, 22 nt, synthetic construct
  source 1..22: mol_type = other RNA
cacttctgcaatattcctgcca

SEQ ID NO: 24425 - RNA, 22 nt, synthetic construct
  source 1..22: mol_type = other RNA
cacttgagtttgaaaccagcct

SEQ ID NO: 24426 - RNA, 22 nt, synthetic construct
  source 1..22: mol_type = other RNA
cagaaaggggacagatggcatg

SEQ ID NO: 24427 - RNA, 22 nt, synthetic construct
  source 1..22: mol_type = other RNA
cagaagtgagtgtgtgtcttca

SEQ ID NO: 24428 - RNA, 22 nt, synthetic construct
  source 1..22: mol_type = other RNA
cagacaaacccaaattgagaga

SEQ ID NO: 24429 - RNA, 22 nt, synthetic construct
  source 1..22: mol_type = other RNA
cagacaccaccttcaccaactg

SEQ ID NO: 24430 - RNA, 22 nt, synthetic construct
  source 1..22: mol_type = other RNA
cagactgaagaaggctcgagat

SEQ ID NO: 24431 - RNA, 22 nt, synthetic construct
  source 1..22: mol_type = other RNA
cagactgaagagctgatccaga

SEQ ID NO: 24432 - RNA, 22 nt, synthetic construct
  source 1..22: mol_type = other RNA
cagacttcatctcctaagcctc

SEQ ID NO: 24433 - RNA, 22 nt, synthetic construct
  source 1..22: mol_type = other RNA
cagagaaggaaaccgaggctta

SEQ ID NO: 24434 - RNA, 22 nt, synthetic construct
  source 1..22: mol_type = other RNA
cagagtacaaggctggtgtttt

SEQ ID NO: 24435 - RNA, 22 nt, synthetic construct
  source 1..22: mol_type = other RNA
cagatcagcttttgcattaatc

SEQ ID NO: 24436 - RNA, 22 nt, synthetic construct
  source 1..22: mol_type = other RNA
cagatgaagcactaaaactagt

SEQ ID NO: 24437 - RNA, 22 nt, synthetic construct
  source 1..22: mol_type = other RNA
cagatgaggcattcttggcagg

SEQ ID NO: 24438 - RNA, 22 nt, synthetic construct
  source 1..22: mol_type = other RNA
cagatggcatgtgcctctcgat

SEQ ID NO: 24439 - RNA, 22 nt, synthetic construct
  source 1..22: mol_type = other RNA
cagcaaatctaatattgataca

SEQ ID NO: 24440 - RNA, 22 nt, synthetic construct
  source 1..22: mol_type = other RNA
cagcaccaaactgaactttctc

SEQ ID NO: 24441 - RNA, 22 nt, synthetic construct
  source 1..22: mol_type = other RNA
cagcctctataaaatttgaata

SEQ ID NO: 24442 - RNA, 22 nt, synthetic construct
  source 1..22: mol_type = other RNA
cagccttgtactctgcttaata

SEQ ID NO: 24443 - RNA, 22 nt, synthetic construct
  source 1..22: mol_type = other RNA
cagctaaagtcacagggccttg

SEQ ID NO: 24444 - RNA, 22 nt, synthetic construct
  source 1..22: mol_type = other RNA
cagctccaccaacacctcagac

SEQ ID NO: 24445 - RNA, 22 nt, synthetic construct
  source 1..22: mol_type = other RNA
cagctcttcagtctgtctttct

SEQ ID NO: 24446 - RNA, 22 nt, synthetic construct
  source 1..22: mol_type = other RNA
cagcttttgcattaatctcgag

SEQ ID NO: 24447 - RNA, 22 nt, synthetic construct
  source 1..22: mol_type = other RNA
caggaatattgcagaagtgagt

SEQ ID NO: 24448 - RNA, 22 nt, synthetic construct
  source 1..22: mol_type = other RNA
caggcaggaggattgcttgagt

SEQ ID NO: 24449 - RNA, 22 nt, synthetic construct
  source 1..22: mol_type = other RNA
caggccaaggccctgtgacttt

SEQ ID NO: 24450 - RNA, 22 nt, synthetic construct
  source 1..22: mol_type = other RNA
caggctggagtgcagtggtgga

SEQ ID NO: 24451 - RNA, 22 nt, synthetic construct
  source 1..22: mol_type = other RNA
caggctggtttcaaactcaagt

SEQ ID NO: 24452 - RNA, 22 nt, synthetic construct
  source 1..22: mol_type = other RNA
cagggataatagtagcacctgc

SEQ ID NO: 24453 - RNA, 22 nt, synthetic construct
  source 1..22: mol_type = other RNA
cagggccttggcctgtattctt

SEQ ID NO: 24454 - RNA, 22 nt, synthetic construct
  source 1..22: mol_type = other RNA
caggtctctccactgtcaagtt

SEQ ID NO: 24455 - RNA, 22 nt, synthetic construct
  source 1..22: mol_type = other RNA
caggtgctactattatccctgt

SEQ ID NO: 24456 - RNA, 22 nt, synthetic construct
  source 1..22: mol_type = other RNA
cagtagggttgtcaaaatcagc

SEQ ID NO: 24457 - RNA, 22 nt, synthetic construct
  source 1..22: mol_type = other RNA
cagtagtgtcccttaacaataa

SEQ ID NO: 24458 - RNA, 22 nt, synthetic construct
  source 1..22: mol_type = other RNA
cagtatttatttccttagaaca

SEQ ID NO: 24459 - RNA, 22 nt, synthetic construct
  source 1..22: mol_type = other RNA
cagtctggatcagctcttcagt

SEQ ID NO: 24460 - RNA, 22 nt, synthetic construct
  source 1..22: mol_type = other RNA
cagtctgtctttctctcttgtg

SEQ ID NO: 24461 - RNA, 22 nt, synthetic construct
  source 1..22: mol_type = other RNA
cagtgagttattattccaccac

SEQ ID NO: 24462 - RNA, 22 nt, synthetic construct
  source 1..22: mol_type = other RNA
cagtgcatcttatcgagaggca

SEQ ID NO: 24463 - RNA, 22 nt, synthetic construct
  source 1..22: mol_type = other RNA
cagtggagagacctggcagaca

SEQ ID NO: 24464 - RNA, 22 nt, synthetic construct
  source 1..22: mol_type = other RNA
cagtggtggaataataactcac

SEQ ID NO: 24465 - RNA, 22 nt, synthetic construct
  source 1..22: mol_type = other RNA
cagttactcggaaggctcaggc

SEQ ID NO: 24466 - RNA, 22 nt, synthetic construct
  source 1..22: mol_type = other RNA
cagttagtgtttttatccatgc

SEQ ID NO: 24467 - RNA, 22 nt, synthetic construct
  source 1..22: mol_type = other RNA
cagttggacatattttggttta

SEQ ID NO: 24468 - RNA, 22 nt, synthetic construct
  source 1..22: mol_type = other RNA
cagttggtgaaggtggtgtctg

SEQ ID NO: 24469 - RNA, 22 nt, synthetic construct
  source 1..22: mol_type = other RNA
cagttgttaatctctttttaac

SEQ ID NO: 24470 - RNA, 22 nt, synthetic construct
  source 1..22: mol_type = other RNA
cagtttaagatgaaatgcacta

SEQ ID NO: 24471 - RNA, 22 nt, synthetic construct
  source 1..22: mol_type = other RNA
cagtttacaaaacaccagcctt

SEQ ID NO: 24472 - RNA, 22 nt, synthetic construct
  source 1..22: mol_type = other RNA
cagtttggtgctggtatatctt

SEQ ID NO: 24473 - RNA, 22 nt, synthetic construct
  source 1..22: mol_type = other RNA
cagtttttggtcaatccttatg

SEQ ID NO: 24474 - RNA, 22 nt, synthetic construct
  source 1..22: mol_type = other RNA
cataaccacagtagggttgtca

SEQ ID NO: 24475 - RNA, 22 nt, synthetic construct
  source 1..22: mol_type = other RNA
cataagatataccagcaccaaa

SEQ ID NO: 24476 - RNA, 22 nt, synthetic construct
  source 1..22: mol_type = other RNA
cataagcatttgaaaatgggtt

SEQ ID NO: 24477 - RNA, 22 nt, synthetic construct
  source 1..22: mol_type = other RNA
cataaggattgaccaaaaactg

SEQ ID NO: 24478 - RNA, 22 nt, synthetic construct
  source 1..22: mol_type = other RNA
cataatgaacccattttcaaat

SEQ ID NO: 24479 - RNA, 22 nt, synthetic construct
  source 1..22: mol_type = other RNA
cataggattgtatagtgtatca

SEQ ID NO: 24480 - RNA, 22 nt, synthetic construct
  source 1..22: mol_type = other RNA
catagtcccagttactcggaag

SEQ ID NO: 24481 - RNA, 22 nt, synthetic construct
  source 1..22: mol_type = other RNA
catatagtgagcaagcaatttg

SEQ ID NO: 24482 - RNA, 22 nt, synthetic construct
  source 1..22: mol_type = other RNA
catattaagcagagtacaaggc

SEQ ID NO: 24483 - RNA, 22 nt, synthetic construct
  source 1..22: mol_type = other RNA
catattttggtttaaatcccag

SEQ ID NO: 24484 - RNA, 22 nt, synthetic construct
  source 1..22: mol_type = other RNA
catcagacaaacccaaattgag

SEQ ID NO: 24485 - RNA, 22 nt, synthetic construct
  source 1..22: mol_type = other RNA
catcatcgcttggcatggataa

SEQ ID NO: 24486 - RNA, 22 nt, synthetic construct
  source 1..22: mol_type = other RNA
catcgccagaaaggggacagat

SEQ ID NO: 24487 - RNA, 22 nt, synthetic construct
  source 1..22: mol_type = other RNA
catcgcttggcatggataaaaa

SEQ ID NO: 24488 - RNA, 22 nt, synthetic construct
  source 1..22: mol_type = other RNA
catctcctaagcctcggtttcc

SEQ ID NO: 24489 - RNA, 22 nt, synthetic construct
  source 1..22: mol_type = other RNA
catctgaatctaatctcgagta

SEQ ID NO: 24490 - RNA, 22 nt, synthetic construct
  source 1..22: mol_type = other RNA
catctgtcccctttctggcgat

SEQ ID NO: 24491 - RNA, 22 nt, synthetic construct
  source 1..22: mol_type = other RNA
catcttatcgagaggcacatgc

SEQ ID NO: 24492 - RNA, 22 nt, synthetic construct
  source 1..22: mol_type = other RNA
catcttggacctcaactctccc

SEQ ID NO: 24493 - RNA, 22 nt, synthetic construct
  source 1..22: mol_type = other RNA
catgccaagcgatgatgatttt

SEQ ID NO: 24494 - RNA, 22 nt, synthetic construct
  source 1..22: mol_type = other RNA
catgccatctgtcccctttctg

SEQ ID NO: 24495 - RNA, 22 nt, synthetic construct
  source 1..22: mol_type = other RNA
catgctttgcagttggacatat

SEQ ID NO: 24496 - RNA, 22 nt, synthetic construct
  source 1..22: mol_type = other RNA
catggataaaaacactaactgc

SEQ ID NO: 24497 - RNA, 22 nt, synthetic construct
  source 1..22: mol_type = other RNA
catgtaagtaacaattttagag

SEQ ID NO: 24498 - RNA, 22 nt, synthetic construct
  source 1..22: mol_type = other RNA
catgtgcctctcgataagatgc

SEQ ID NO: 24499 - RNA, 22 nt, synthetic construct
  source 1..22: mol_type = other RNA
cattaacttttggccaaatacc

SEQ ID NO: 24500 - RNA, 22 nt, synthetic construct
  source 1..22: mol_type = other RNA
cattaatctcgagccttcttca

SEQ ID NO: 24501 - RNA, 22 nt, synthetic construct
  source 1..22: mol_type = other RNA
cattatgcacctttactcctaa

SEQ ID NO: 24502 - RNA, 22 nt, synthetic construct
  source 1..22: mol_type = other RNA
cattcttggcaggaatattgca

SEQ ID NO: 24503 - RNA, 22 nt, synthetic construct
  source 1..22: mol_type = other RNA
cattgacatattaagcagagta

SEQ ID NO: 24504 - RNA, 22 nt, synthetic construct
  source 1..22: mol_type = other RNA
catttcatcttaaactgcaaat

SEQ ID NO: 24505 - RNA, 22 nt, synthetic construct
  source 1..22: mol_type = other RNA
catttgaaaatgggttcattat

SEQ ID NO: 24506 - RNA, 22 nt, synthetic construct
  source 1..22: mol_type = other RNA
ccaaaaactgaaaagcaaattg

SEQ ID NO: 24507 - RNA, 22 nt, synthetic construct
  source 1..22: mol_type = other RNA
ccaaaagttaatgactttggca

SEQ ID NO: 24508 - RNA, 22 nt, synthetic construct
  source 1..22: mol_type = other RNA
ccaaaatatgtccaactgcaaa

SEQ ID NO: 24509 - RNA, 22 nt, synthetic construct
  source 1..22: mol_type = other RNA
ccaaactgaactttctcctcta

SEQ ID NO: 24510 - RNA, 22 nt, synthetic construct
  source 1..22: mol_type = other RNA
ccaaagccagctaaagtcacag

SEQ ID NO: 24511 - RNA, 22 nt, synthetic construct
  source 1..22: mol_type = other RNA
ccaaagtcattaacttttggcc

SEQ ID NO: 24512 - RNA, 22 nt, synthetic construct
  source 1..22: mol_type = other RNA
ccaaataccaaagccagctaaa

SEQ ID NO: 24513 - RNA, 22 nt, synthetic construct
  source 1..22: mol_type = other RNA
ccaaattgagagacagtttaca

SEQ ID NO: 24514 - RNA, 22 nt, synthetic construct
  source 1..22: mol_type = other RNA
ccaacacctcagacttcatctc

SEQ ID NO: 24515 - RNA, 22 nt, synthetic construct
  source 1..22: mol_type = other RNA
ccaactgatcaaagttaacatc

SEQ ID NO: 24516 - RNA, 22 nt, synthetic construct
  source 1..22: mol_type = other RNA
ccaactgcaaagcatgtaagta

SEQ ID NO: 24517 - RNA, 22 nt, synthetic construct
  source 1..22: mol_type = other RNA
ccaagaatgcctcatctgaatc

SEQ ID NO: 24518 - RNA, 22 nt, synthetic construct
  source 1..22: mol_type = other RNA
ccaagatgcaatcccagatcag

SEQ ID NO: 24519 - RNA, 22 nt, synthetic construct
  source 1..22: mol_type = other RNA
ccaagcgatgatgattttctct

SEQ ID NO: 24520 - RNA, 22 nt, synthetic construct
  source 1..22: mol_type = other RNA
ccaaggccctgtgactttagct

SEQ ID NO: 24521 - RNA, 22 nt, synthetic construct
  source 1..22: mol_type = other RNA
ccaatctcatctacaactttat

SEQ ID NO: 24522 - RNA, 22 nt, synthetic construct
  source 1..22: mol_type = other RNA
ccacaacacctcgctatttttt

SEQ ID NO: 24523 - RNA, 22 nt, synthetic construct
  source 1..22: mol_type = other RNA
ccacagtagggttgtcaaaatc

SEQ ID NO: 24524 - RNA, 22 nt, synthetic construct
  source 1..22: mol_type = other RNA
ccaccaacacctcagacttcat

SEQ ID NO: 24525 - RNA, 22 nt, synthetic construct
  source 1..22: mol_type = other RNA
ccacctcagcctctataaaatt

SEQ ID NO: 24526 - RNA, 22 nt, synthetic construct
  source 1..22: mol_type = other RNA
ccaccttcaccaactgatcaaa

SEQ ID NO: 24527 - RNA, 22 nt, synthetic construct
  source 1..22: mol_type = other RNA
ccactgtcaagttactattatt

SEQ ID NO: 24528 - RNA, 22 nt, synthetic construct
  source 1..22: mol_type = other RNA
ccagaaaggggacagatggcat

SEQ ID NO: 24529 - RNA, 22 nt, synthetic construct
  source 1..22: mol_type = other RNA
ccagactgaagaaggctcgaga

SEQ ID NO: 24530 - RNA, 22 nt, synthetic construct
  source 1..22: mol_type = other RNA
ccagatcagcttttgcattaat

SEQ ID NO: 24531 - RNA, 22 nt, synthetic construct
  source 1..22: mol_type = other RNA
ccagcaccaaactgaactttct

SEQ ID NO: 24532 - RNA, 22 nt, synthetic construct
  source 1..22: mol_type = other RNA
ccagccttgtactctgcttaat

SEQ ID NO: 24533 - RNA, 22 nt, synthetic construct
  source 1..22: mol_type = other RNA
ccagctaaagtcacagggcctt

SEQ ID NO: 24534 - RNA, 22 nt, synthetic construct
  source 1..22: mol_type = other RNA
ccagctccaccaacacctcaga

SEQ ID NO: 24535 - RNA, 22 nt, synthetic construct
  source 1..22: mol_type = other RNA
ccaggctggagtgcagtggtgg

SEQ ID NO: 24536 - RNA, 22 nt, synthetic construct
  source 1..22: mol_type = other RNA
ccaggctggtttcaaactcaag

SEQ ID NO: 24537 - RNA, 22 nt, synthetic construct
  source 1..22: mol_type = other RNA
ccaggtctctccactgtcaagt

SEQ ID NO: 24538 - RNA, 22 nt, synthetic construct
  source 1..22: mol_type = other RNA
ccagtagtgtcccttaacaata

SEQ ID NO: 24539 - RNA, 22 nt, synthetic construct
  source 1..22: mol_type = other RNA
ccagttactcggaaggctcagg

SEQ ID NO: 24540 - RNA, 22 nt, synthetic construct
  source 1..22: mol_type = other RNA
ccatagtcccagttactcggaa

SEQ ID NO: 24541 - RNA, 22 nt, synthetic construct
  source 1..22: mol_type = other RNA
ccatcagacaaacccaaattga

SEQ ID NO: 24542 - RNA, 22 nt, synthetic construct
  source 1..22: mol_type = other RNA
ccatctgtcccctttctggcga

SEQ ID NO: 24543 - RNA, 22 nt, synthetic construct
  source 1..22: mol_type = other RNA
ccatgccaagcgatgatgattt

SEQ ID NO: 24544 - RNA, 22 nt, synthetic construct
  source 1..22: mol_type = other RNA
ccattttcaaatgcttatgaaa

SEQ ID NO: 24545 - RNA, 22 nt, synthetic construct
  source 1..22: mol_type = other RNA
cccaaattgagagacagtttac

SEQ ID NO: 24546 - RNA, 22 nt, synthetic construct
  source 1..22: mol_type = other RNA
cccagatcagcttttgcattaa

SEQ ID NO: 24547 - RNA, 22 nt, synthetic construct
  source 1..22: mol_type = other RNA
cccagctccaccaacacctcag

SEQ ID NO: 24548 - RNA, 22 nt, synthetic construct
  source 1..22: mol_type = other RNA
cccaggctggagtgcagtggtg

SEQ ID NO: 24549 - RNA, 22 nt, synthetic construct
  source 1..22: mol_type = other RNA
cccaggctggtttcaaactcaa

SEQ ID NO: 24550 - RNA, 22 nt, synthetic construct
  source 1..22: mol_type = other RNA
cccagtagtgtcccttaacaat

SEQ ID NO: 24551 - RNA, 22 nt, synthetic construct
  source 1..22: mol_type = other RNA
cccagttactcggaaggctcag

SEQ ID NO: 24552 - RNA, 22 nt, synthetic construct
  source 1..22: mol_type = other RNA
cccatagtcccagttactcgga

SEQ ID NO: 24553 - RNA, 22 nt, synthetic construct
  source 1..22: mol_type = other RNA
cccattttcaaatgcttatgaa

SEQ ID NO: 24554 - RNA, 22 nt, synthetic construct
  source 1..22: mol_type = other RNA
ccccgtctctacaaaaagtagg

SEQ ID NO: 24555 - RNA, 22 nt, synthetic construct
  source 1..22: mol_type = other RNA
cccctttctggcgatgttaact

SEQ ID NO: 24556 - RNA, 22 nt, synthetic construct
  source 1..22: mol_type = other RNA
cccctttttattgttaagggac

SEQ ID NO: 24557 - RNA, 22 nt, synthetic construct
  source 1..22: mol_type = other RNA
cccgacagttgttaatctcttt

SEQ ID NO: 24558 - RNA, 22 nt, synthetic construct
  source 1..22: mol_type = other RNA
cccggactcaagcaatcctcct

SEQ ID NO: 24559 - RNA, 22 nt, synthetic construct
  source 1..22: mol_type = other RNA
cccgtctctacaaaaagtagga

SEQ ID NO: 24560 - RNA, 22 nt, synthetic construct
  source 1..22: mol_type = other RNA
ccctaagtaacaaggaatcaca

SEQ ID NO: 24561 - RNA, 22 nt, synthetic construct
  source 1..22: mol_type = other RNA
ccctactgtggttatgcaaatt

SEQ ID NO: 24562 - RNA, 22 nt, synthetic construct
  source 1..22: mol_type = other RNA
ccctctaaaattgttacttaca

SEQ ID NO: 24563 - RNA, 22 nt, synthetic construct
  source 1..22: mol_type = other RNA
ccctgtgactttagctggcttt

SEQ ID NO: 24564 - RNA, 22 nt, synthetic construct
  source 1..22: mol_type = other RNA
ccctgttttacagagaaggaaa

SEQ ID NO: 24565 - RNA, 22 nt, synthetic construct
  source 1..22: mol_type = other RNA
cccttaacaataaaaaggggag

SEQ ID NO: 24566 - RNA, 22 nt, synthetic construct
  source 1..22: mol_type = other RNA
cccttaggcaggtgctactatt

SEQ ID NO: 24567 - RNA, 22 nt, synthetic construct
  source 1..22: mol_type = other RNA
ccctttataatttgcagtttaa

SEQ ID NO: 24568 - RNA, 22 nt, synthetic construct
  source 1..22: mol_type = other RNA
ccctttctggcgatgttaactt

SEQ ID NO: 24569 - RNA, 22 nt, synthetic construct
  source 1..22: mol_type = other RNA
ccctttttattgttaagggaca

SEQ ID NO: 24570 - RNA, 22 nt, synthetic construct
  source 1..22: mol_type = other RNA
ccgacagttgttaatctctttt

SEQ ID NO: 24571 - RNA, 22 nt, synthetic construct
  source 1..22: mol_type = other RNA
ccgaggcttaggagatgaagtc

SEQ ID NO: 24572 - RNA, 22 nt, synthetic construct
  source 1..22: mol_type = other RNA
ccgagtaactgggactatgggc

SEQ ID NO: 24573 - RNA, 22 nt, synthetic construct
  source 1..22: mol_type = other RNA
ccggactcaagcaatcctcctg

SEQ ID NO: 24574 - RNA, 22 nt, synthetic construct
  source 1..22: mol_type = other RNA
ccgggagttcaaggctgcagtg

SEQ ID NO: 24575 - RNA, 22 nt, synthetic construct
  source 1..22: mol_type = other RNA
ccgtataccctctaaaattgtt

SEQ ID NO: 24576 - RNA, 22 nt, synthetic construct
  source 1..22: mol_type = other RNA
ccgtctctacaaaaagtaggaa

SEQ ID NO: 24577 - RNA, 22 nt, synthetic construct
  source 1..22: mol_type = other RNA
cctaagcctcggtttccttctc

SEQ ID NO: 24578 - RNA, 22 nt, synthetic construct
  source 1..22: mol_type = other RNA
cctaagtaacaaggaatcacat

SEQ ID NO: 24579 - RNA, 22 nt, synthetic construct
  source 1..22: mol_type = other RNA
cctactgtggttatgcaaattt

SEQ ID NO: 24580 - RNA, 22 nt, synthetic construct
  source 1..22: mol_type = other RNA
cctactttttgtagagacgggg

SEQ ID NO: 24581 - RNA, 22 nt, synthetic construct
  source 1..22: mol_type = other RNA
cctatgaccaatctcatctaca

SEQ ID NO: 24582 - RNA, 22 nt, synthetic construct
  source 1..22: mol_type = other RNA
cctcaactctcccctttttatt

SEQ ID NO: 24583 - RNA, 22 nt, synthetic construct
  source 1..22: mol_type = other RNA
cctcagacttcatctcctaagc

SEQ ID NO: 24584 - RNA, 22 nt, synthetic construct
  source 1..22: mol_type = other RNA
cctcagcctctataaaatttga

SEQ ID NO: 24585 - RNA, 22 nt, synthetic construct
  source 1..22: mol_type = other RNA
cctcatctgaatctaatctcga

SEQ ID NO: 24586 - RNA, 22 nt, synthetic construct
  source 1..22: mol_type = other RNA
cctccgtataccctctaaaatt

SEQ ID NO: 24587 - RNA, 22 nt, synthetic construct
  source 1..22: mol_type = other RNA
cctcctgcctgagccttccgag

SEQ ID NO: 24588 - RNA, 22 nt, synthetic construct
  source 1..22: mol_type = other RNA
cctcggtttccttctctgtaaa

SEQ ID NO: 24589 - RNA, 22 nt, synthetic construct
  source 1..22: mol_type = other RNA
cctctaaaattgttacttacat

SEQ ID NO: 24590 - RNA, 22 nt, synthetic construct
  source 1..22: mol_type = other RNA
cctctaaataatcataaggatt

SEQ ID NO: 24591 - RNA, 22 nt, synthetic construct
  source 1..22: mol_type = other RNA
cctctcgataagatgcactgaa

SEQ ID NO: 24592 - RNA, 22 nt, synthetic construct
  source 1..22: mol_type = other RNA
cctgagccttccgagtaactgg

SEQ ID NO: 24593 - RNA, 22 nt, synthetic construct
  source 1..22: mol_type = other RNA
cctgccaagaatgcctcatctg

SEQ ID NO: 24594 - RNA, 22 nt, synthetic construct
  source 1..22: mol_type = other RNA
cctgcctgagccttccgagtaa

SEQ ID NO: 24595 - RNA, 22 nt, synthetic construct
  source 1..22: mol_type = other RNA
cctggcagacaccaccttcacc

SEQ ID NO: 24596 - RNA, 22 nt, synthetic construct
  source 1..22: mol_type = other RNA
cctgtattctttgttaaaaaga

SEQ ID NO: 24597 - RNA, 22 nt, synthetic construct
  source 1..22: mol_type = other RNA
cctgtgactttagctggctttg

SEQ ID NO: 24598 - RNA, 22 nt, synthetic construct
  source 1..22: mol_type = other RNA
cctgttttacagagaaggaaac

SEQ ID NO: 24599 - RNA, 22 nt, synthetic construct
  source 1..22: mol_type = other RNA
ccttaacaataaaaaggggaga

SEQ ID NO: 24600 - RNA, 22 nt, synthetic construct
  source 1..22: mol_type = other RNA
ccttagaacaaggacaaatttg

SEQ ID NO: 24601 - RNA, 22 nt, synthetic construct
  source 1..22: mol_type = other RNA
ccttaggcaggtgctactatta

SEQ ID NO: 24602 - RNA, 22 nt, synthetic construct
  source 1..22: mol_type = other RNA
ccttatgattatttagaggaga

SEQ ID NO: 24603 - RNA, 22 nt, synthetic construct
  source 1..22: mol_type = other RNA
ccttcaccaactgatcaaagtt

SEQ ID NO: 24604 - RNA, 22 nt, synthetic construct
  source 1..22: mol_type = other RNA
ccttccacctcagcctctataa

SEQ ID NO: 24605 - RNA, 22 nt, synthetic construct
  source 1..22: mol_type = other RNA
ccttccgagtaactgggactat

SEQ ID NO: 24606 - RNA, 22 nt, synthetic construct
  source 1..22: mol_type = other RNA
ccttctctgtaaaacagggata

SEQ ID NO: 24607 - RNA, 22 nt, synthetic construct
  source 1..22: mol_type = other RNA
ccttcttcagtctggatcagct

SEQ ID NO: 24608 - RNA, 22 nt, synthetic construct
  source 1..22: mol_type = other RNA
ccttggcctgtattctttgtta

SEQ ID NO: 24609 - RNA, 22 nt, synthetic construct
  source 1..22: mol_type = other RNA
ccttgtactctgcttaatatgt

SEQ ID NO: 24610 - RNA, 22 nt, synthetic construct
  source 1..22: mol_type = other RNA
ccttgttacttagggtcacctc

SEQ ID NO: 24611 - RNA, 22 nt, synthetic construct
  source 1..22: mol_type = other RNA
ccttgttctaaggaaataaata

SEQ ID NO: 24612 - RNA, 22 nt, synthetic construct
  source 1..22: mol_type = other RNA
cctttactcctaaataattcag

SEQ ID NO: 24613 - RNA, 22 nt, synthetic construct
  source 1..22: mol_type = other RNA
cctttataatttgcagtttaag

SEQ ID NO: 24614 - RNA, 22 nt, synthetic construct
  source 1..22: mol_type = other RNA
cctttctggcgatgttaacttt

SEQ ID NO: 24615 - RNA, 22 nt, synthetic construct
  source 1..22: mol_type = other RNA
cctttttattgttaagggacac

SEQ ID NO: 24616 - RNA, 22 nt, synthetic construct
  source 1..22: mol_type = other RNA
cgacagttgttaatctcttttt

SEQ ID NO: 24617 - RNA, 22 nt, synthetic construct
  source 1..22: mol_type = other RNA
cgagaggcacatgccatctgtc

SEQ ID NO: 24618 - RNA, 22 nt, synthetic construct
  source 1..22: mol_type = other RNA
cgagattaatgcaaaagctgat

SEQ ID NO: 24619 - RNA, 22 nt, synthetic construct
  source 1..22: mol_type = other RNA
cgagattagattcagatgaggc

SEQ ID NO: 24620 - RNA, 22 nt, synthetic construct
  source 1..22: mol_type = other RNA
cgagccttcttcagtctggatc

SEQ ID NO: 24621 - RNA, 22 nt, synthetic construct
  source 1..22: mol_type = other RNA
cgaggcttaggagatgaagtct

SEQ ID NO: 24622 - RNA, 22 nt, synthetic construct
  source 1..22: mol_type = other RNA
cgaggtgttgtggtacacgccc

SEQ ID NO: 24623 - RNA, 22 nt, synthetic construct
  source 1..22: mol_type = other RNA
cgagtaactgggactatgggcg

SEQ ID NO: 24624 - RNA, 22 nt, synthetic construct
  source 1..22: mol_type = other RNA
cgagtataaccatcagacaaac

SEQ ID NO: 24625 - RNA, 22 nt, synthetic construct
  source 1..22: mol_type = other RNA
cgataagatgcactgaagacac

SEQ ID NO: 24626 - RNA, 22 nt, synthetic construct
  source 1..22: mol_type = other RNA
cgatgatgattttctctttagt

SEQ ID NO: 24627 - RNA, 22 nt, synthetic construct
  source 1..22: mol_type = other RNA
cgatgttaactttgatcagttg

SEQ ID NO: 24628 - RNA, 22 nt, synthetic construct
  source 1..22: mol_type = other RNA
cgccagaaaggggacagatggc

SEQ ID NO: 24629 - RNA, 22 nt, synthetic construct
  source 1..22: mol_type = other RNA
cgcccatagtcccagttactcg

SEQ ID NO: 24630 - RNA, 22 nt, synthetic construct
  source 1..22: mol_type = other RNA
cgcttggcatggataaaaacac

SEQ ID NO: 24631 - RNA, 22 nt, synthetic construct
  source 1..22: mol_type = other RNA
cggactcaagcaatcctcctgc

SEQ ID NO: 24632 - RNA, 22 nt, synthetic construct
  source 1..22: mol_type = other RNA
cggaggtgaccctaagtaacaa

SEQ ID NO: 24633 - RNA, 22 nt, synthetic construct
  source 1..22: mol_type = other RNA
cgggagttcaaggctgcagtga

SEQ ID NO: 24634 - RNA, 22 nt, synthetic construct
  source 1..22: mol_type = other RNA
cgggtgataaacataagatata

SEQ ID NO: 24635 - RNA, 22 nt, synthetic construct
  source 1..22: mol_type = other RNA
cggtttccttctctgtaaaaca

SEQ ID NO: 24636 - RNA, 22 nt, synthetic construct
  source 1..22: mol_type = other RNA
cgtataccctctaaaattgtta

SEQ ID NO: 24637 - RNA, 22 nt, synthetic construct
  source 1..22: mol_type = other RNA
cgtctctacaaaaagtaggaaa

SEQ ID NO: 24638 - RNA, 22 nt, synthetic construct
  source 1..22: mol_type = other RNA
cgtgtaccacaacacctcgcta

SEQ ID NO: 24639 - RNA, 22 nt, synthetic construct
  source 1..22: mol_type = other RNA
cgttttgagacagggtctcgct

SEQ ID NO: 24640 - RNA, 22 nt, synthetic construct
  source 1..22: mol_type = other RNA
ctaaaactagtgcatttcatct

SEQ ID NO: 24641 - RNA, 22 nt, synthetic construct
  source 1..22: mol_type = other RNA
ctaaaattgttacttacatgct

SEQ ID NO: 24642 - RNA, 22 nt, synthetic construct
  source 1..22: mol_type = other RNA
ctaaagagaaaatcatcatcgc

SEQ ID NO: 24643 - RNA, 22 nt, synthetic construct
  source 1..22: mol_type = other RNA
ctaaagtcacagggccttggcc

SEQ ID NO: 24644 - RNA, 22 nt, synthetic construct
  source 1..22: mol_type = other RNA
ctaaataatcataaggattgac

SEQ ID NO: 24645 - RNA, 22 nt, synthetic construct
  source 1..22: mol_type = other RNA
ctaactgccaaagtcattaact

SEQ ID NO: 24646 - RNA, 22 nt, synthetic construct
  source 1..22: mol_type = other RNA
ctaagcctcggtttccttctct

SEQ ID NO: 24647 - RNA, 22 nt, synthetic construct
  source 1..22: mol_type = other RNA
ctaagtaacaaggaatcacata

SEQ ID NO: 24648 - RNA, 22 nt, synthetic construct
  source 1..22: mol_type = other RNA
ctaatctcgagtataaccatca

SEQ ID NO: 24649 - RNA, 22 nt, synthetic construct
  source 1..22: mol_type = other RNA
ctactattatccctgttttaca

SEQ ID NO: 24650 - RNA, 22 nt, synthetic construct
  source 1..22: mol_type = other RNA
ctactgtggttatgcaaatttg

SEQ ID NO: 24651 - RNA, 22 nt, synthetic construct
  source 1..22: mol_type = other RNA
ctactttttgtagagacggggt

SEQ ID NO: 24652 - RNA, 22 nt, synthetic construct
  source 1..22: mol_type = other RNA
ctagtgcatttcatcttaaact

SEQ ID NO: 24653 - RNA, 22 nt, synthetic construct
  source 1..22: mol_type = other RNA
ctagttttagtgcttcatctgt

SEQ ID NO: 24654 - RNA, 22 nt, synthetic construct
  source 1..22: mol_type = other RNA
ctatacaatcctatgaccaatc

SEQ ID NO: 24655 - RNA, 22 nt, synthetic construct
  source 1..22: mol_type = other RNA
ctatatgtgattccttgttact

SEQ ID NO: 24656 - RNA, 22 nt, synthetic construct
  source 1..22: mol_type = other RNA
ctatgaccaatctcatctacaa

SEQ ID NO: 24657 - RNA, 22 nt, synthetic construct
  source 1..22: mol_type = other RNA
ctatgggcgtgtaccacaacac

SEQ ID NO: 24658 - RNA, 22 nt, synthetic construct
  source 1..22: mol_type = other RNA
ctattatccctgttttacagag

SEQ ID NO: 24659 - RNA, 22 nt, synthetic construct
  source 1..22: mol_type = other RNA
ctcaactctcccctttttattg

SEQ ID NO: 24660 - RNA, 22 nt, synthetic construct
  source 1..22: mol_type = other RNA
ctcaagtgatccttccacctca

SEQ ID NO: 24661 - RNA, 22 nt, synthetic construct
  source 1..22: mol_type = other RNA
ctcaatttgggtttgtctgatg

SEQ ID NO: 24662 - RNA, 22 nt, synthetic construct
  source 1..22: mol_type = other RNA
ctcactatatgtgattccttgt

SEQ ID NO: 24663 - RNA, 22 nt, synthetic construct
  source 1..22: mol_type = other RNA
ctcacttctgcaatattcctgc

SEQ ID NO: 24664 - RNA, 22 nt, synthetic construct
  source 1..22: mol_type = other RNA
ctcagacttcatctcctaagcc

SEQ ID NO: 24665 - RNA, 22 nt, synthetic construct
  source 1..22: mol_type = other RNA
ctcagcctctataaaatttgaa

SEQ ID NO: 24666 - RNA, 22 nt, synthetic construct
  source 1..22: mol_type = other RNA
ctcaggcaggaggattgcttga

SEQ ID NO: 24667 - RNA, 22 nt, synthetic construct
  source 1..22: mol_type = other RNA
ctcatctacaactttattcaaa

SEQ ID NO: 24668 - RNA, 22 nt, synthetic construct
  source 1..22: mol_type = other RNA
ctcatctgaatctaatctcgag

SEQ ID NO: 24669 - RNA, 22 nt, synthetic construct
  source 1..22: mol_type = other RNA
ctccaccaacacctcagacttc

SEQ ID NO: 24670 - RNA, 22 nt, synthetic construct
  source 1..22: mol_type = other RNA
ctccactgtcaagttactatta

SEQ ID NO: 24671 - RNA, 22 nt, synthetic construct
  source 1..22: mol_type = other RNA
ctcccctttttattgttaaggg

SEQ ID NO: 24672 - RNA, 22 nt, synthetic construct
  source 1..22: mol_type = other RNA
ctcccggactcaagcaatcctc

SEQ ID NO: 24673 - RNA, 22 nt, synthetic construct
  source 1..22: mol_type = other RNA
ctccgtataccctctaaaattg

SEQ ID NO: 24674 - RNA, 22 nt, synthetic construct
  source 1..22: mol_type = other RNA
ctcctaagcctcggtttccttc

SEQ ID NO: 24675 - RNA, 22 nt, synthetic construct
  source 1..22: mol_type = other RNA
ctcctctaaataatcataagga

SEQ ID NO: 24676 - RNA, 22 nt, synthetic construct
  source 1..22: mol_type = other RNA
ctcctgcctgagccttccgagt

SEQ ID NO: 24677 - RNA, 22 nt, synthetic construct
  source 1..22: mol_type = other RNA
ctcgagattaatgcaaaagctg

SEQ ID NO: 24678 - RNA, 22 nt, synthetic construct
  source 1..22: mol_type = other RNA
ctcgagattagattcagatgag

SEQ ID NO: 24679 - RNA, 22 nt, synthetic construct
  source 1..22: mol_type = other RNA
ctcgagccttcttcagtctgga

SEQ ID NO: 24680 - RNA, 22 nt, synthetic construct
  source 1..22: mol_type = other RNA
ctcgagtataaccatcagacaa

SEQ ID NO: 24681 - RNA, 22 nt, synthetic construct
  source 1..22: mol_type = other RNA
ctcgataagatgcactgaagac

SEQ ID NO: 24682 - RNA, 22 nt, synthetic construct
  source 1..22: mol_type = other RNA
ctcggtttccttctctgtaaaa

SEQ ID NO: 24683 - RNA, 22 nt, synthetic construct
  source 1..22: mol_type = other RNA
ctctaaaattgttacttacatg

SEQ ID NO: 24684 - RNA, 22 nt, synthetic construct
  source 1..22: mol_type = other RNA
ctctaaataatcataaggattg

SEQ ID NO: 24685 - RNA, 22 nt, synthetic construct
  source 1..22: mol_type = other RNA
ctctacaaaaagtaggaaaaaa

SEQ ID NO: 24686 - RNA, 22 nt, synthetic construct
  source 1..22: mol_type = other RNA
ctctcaatttgggtttgtctga

SEQ ID NO: 24687 - RNA, 22 nt, synthetic construct
  source 1..22: mol_type = other RNA
ctctccactgtcaagttactat

SEQ ID NO: 24688 - RNA, 22 nt, synthetic construct
  source 1..22: mol_type = other RNA
ctctcccctttttattgttaag

SEQ ID NO: 24689 - RNA, 22 nt, synthetic construct
  source 1..22: mol_type = other RNA
ctctcgataagatgcactgaag

SEQ ID NO: 24690 - RNA, 22 nt, synthetic construct
  source 1..22: mol_type = other RNA
ctctcttgtgacattgacatat

SEQ ID NO: 24691 - RNA, 22 nt, synthetic construct
  source 1..22: mol_type = other RNA
ctctgcttaatatgtcaatgtc

SEQ ID NO: 24692 - RNA, 22 nt, synthetic construct
  source 1..22: mol_type = other RNA
ctctgtaaaacagggataatag

SEQ ID NO: 24693 - RNA, 22 nt, synthetic construct
  source 1..22: mol_type = other RNA
ctcttcagtctgtctttctctc

SEQ ID NO: 24694 - RNA, 22 nt, synthetic construct
  source 1..22: mol_type = other RNA
ctcttgtgacattgacatatta

SEQ ID NO: 24695 - RNA, 22 nt, synthetic construct
  source 1..22: mol_type = other RNA
ctctttagtgacagacattttt

SEQ ID NO: 24696 - RNA, 22 nt, synthetic construct
  source 1..22: mol_type = other RNA
ctctttttaacaaagaatacag

SEQ ID NO: 24697 - RNA, 22 nt, synthetic construct
  source 1..22: mol_type = other RNA
ctgaaaagcaaattgcttgctc

SEQ ID NO: 24698 - RNA, 22 nt, synthetic construct
  source 1..22: mol_type = other RNA
ctgaactttctcctctaaataa

SEQ ID NO: 24699 - RNA, 22 nt, synthetic construct
  source 1..22: mol_type = other RNA
ctgaagaaggctcgagattaat

SEQ ID NO: 24700 - RNA, 22 nt, synthetic construct
  source 1..22: mol_type = other RNA
ctgaagacacacactcacttct

SEQ ID NO: 24701 - RNA, 22 nt, synthetic construct
  source 1..22: mol_type = other RNA
ctgaagagctgatccagactga

SEQ ID NO: 24702 - RNA, 22 nt, synthetic construct
  source 1..22: mol_type = other RNA
ctgaatctaatctcgagtataa

SEQ ID NO: 24703 - RNA, 22 nt, synthetic construct
  source 1..22: mol_type = other RNA
ctgaattatttaggagtaaagg

SEQ ID NO: 24704 - RNA, 22 nt, synthetic construct
  source 1..22: mol_type = other RNA
ctgagccttccgagtaactggg

SEQ ID NO: 24705 - RNA, 22 nt, synthetic construct
  source 1..22: mol_type = other RNA
ctgagcgagaccctgtctcaaa

SEQ ID NO: 24706 - RNA, 22 nt, synthetic construct
  source 1..22: mol_type = other RNA
ctgaggtggaaggatcacttga

SEQ ID NO: 24707 - RNA, 22 nt, synthetic construct
  source 1..22: mol_type = other RNA
ctgaggtgttggtggagctggg

SEQ ID NO: 24708 - RNA, 22 nt, synthetic construct
  source 1..22: mol_type = other RNA
ctgatcaaagttaacatcgcca

SEQ ID NO: 24709 - RNA, 22 nt, synthetic construct
  source 1..22: mol_type = other RNA
ctgatccagactgaagaaggct

SEQ ID NO: 24710 - RNA, 22 nt, synthetic construct
  source 1..22: mol_type = other RNA
ctgatctgggattgcatcttgg

SEQ ID NO: 24711 - RNA, 22 nt, synthetic construct
  source 1..22: mol_type = other RNA
ctgatggttatactcgagatta

SEQ ID NO: 24712 - RNA, 22 nt, synthetic construct
  source 1..22: mol_type = other RNA
ctgattttgacaaccctactgt

SEQ ID NO: 24713 - RNA, 22 nt, synthetic construct
  source 1..22: mol_type = other RNA
ctgcaaagcatgtaagtaacaa

SEQ ID NO: 24714 - RNA, 22 nt, synthetic construct
  source 1..22: mol_type = other RNA
ctgcaaattataaagggaataa

SEQ ID NO: 24715 - RNA, 22 nt, synthetic construct
  source 1..22: mol_type = other RNA
ctgcaatattcctgccaagaat

SEQ ID NO: 24716 - RNA, 22 nt, synthetic construct
  source 1..22: mol_type = other RNA
ctgcagtgagttattattccac

SEQ ID NO: 24717 - RNA, 22 nt, synthetic construct
  source 1..22: mol_type = other RNA
ctgccaaagtcattaacttttg

SEQ ID NO: 24718 - RNA, 22 nt, synthetic construct
  source 1..22: mol_type = other RNA
ctgccaagaatgcctcatctga

SEQ ID NO: 24719 - RNA, 22 nt, synthetic construct
  source 1..22: mol_type = other RNA
ctgccaggtctctccactgtca

SEQ ID NO: 24720 - RNA, 22 nt, synthetic construct
  source 1..22: mol_type = other RNA
ctgcctgagccttccgagtaac

SEQ ID NO: 24721 - RNA, 22 nt, synthetic construct
  source 1..22: mol_type = other RNA
ctgcttaatatgtcaatgtcac

SEQ ID NO: 24722 - RNA, 22 nt, synthetic construct
  source 1..22: mol_type = other RNA
ctggagtgcagtggtggaataa

SEQ ID NO: 24723 - RNA, 22 nt, synthetic construct
  source 1..22: mol_type = other RNA
ctggatcagctcttcagtctgt

SEQ ID NO: 24724 - RNA, 22 nt, synthetic construct
  source 1..22: mol_type = other RNA
ctggcagacaccaccttcacca

SEQ ID NO: 24725 - RNA, 22 nt, synthetic construct
  source 1..22: mol_type = other RNA
ctggcgatgttaactttgatca

SEQ ID NO: 24726 - RNA, 22 nt, synthetic construct
  source 1..22: mol_type = other RNA
ctggctttggtatttggccaaa

SEQ ID NO: 24727 - RNA, 22 nt, synthetic construct
  source 1..22: mol_type = other RNA
ctgggactatgggcgtgtacca

SEQ ID NO: 24728 - RNA, 22 nt, synthetic construct
  source 1..22: mol_type = other RNA
ctgggattgcatcttggacctc

SEQ ID NO: 24729 - RNA, 22 nt, synthetic construct
  source 1..22: mol_type = other RNA
ctgggatttaaaccaaaatatg

SEQ ID NO: 24730 - RNA, 22 nt, synthetic construct
  source 1..22: mol_type = other RNA
ctggtatatcttatgtttatca

SEQ ID NO: 24731 - RNA, 22 nt, synthetic construct
  source 1..22: mol_type = other RNA
ctggtgttttgtaaactgtctc

SEQ ID NO: 24732 - RNA, 22 nt, synthetic construct
  source 1..22: mol_type = other RNA
ctggtttcaaactcaagtgatc

SEQ ID NO: 24733 - RNA, 22 nt, synthetic construct
  source 1..22: mol_type = other RNA
ctgtaaaacagggataatagta

SEQ ID NO: 24734 - RNA, 22 nt, synthetic construct
  source 1..22: mol_type = other RNA
ctgtattctttgttaaaaagag

SEQ ID NO: 24735 - RNA, 22 nt, synthetic construct
  source 1..22: mol_type = other RNA
ctgtcaagttactattattccc

SEQ ID NO: 24736 - RNA, 22 nt, synthetic construct
  source 1..22: mol_type = other RNA
ctgtcactaaagagaaaatcat

SEQ ID NO: 24737 - RNA, 22 nt, synthetic construct
  source 1..22: mol_type = other RNA
ctgtcccctttctggcgatgtt

SEQ ID NO: 24738 - RNA, 22 nt, synthetic construct
  source 1..22: mol_type = other RNA
ctgtcgggtgataaacataaga

SEQ ID NO: 24739 - RNA, 22 nt, synthetic construct
  source 1..22: mol_type = other RNA
ctgtctctcaatttgggtttgt

SEQ ID NO: 24740 - RNA, 22 nt, synthetic construct
  source 1..22: mol_type = other RNA
ctgtctttctctcttgtgacat

SEQ ID NO: 24741 - RNA, 22 nt, synthetic construct
  source 1..22: mol_type = other RNA
ctgtgactttagctggctttgg

SEQ ID NO: 24742 - RNA, 22 nt, synthetic construct
  source 1..22: mol_type = other RNA
ctgtggttatgcaaatttgtcc

SEQ ID NO: 24743 - RNA, 22 nt, synthetic construct
  source 1..22: mol_type = other RNA
ctgttttacagagaaggaaacc

SEQ ID NO: 24744 - RNA, 22 nt, synthetic construct
  source 1..22: mol_type = other RNA
cttaaactgcaaattataaagg

SEQ ID NO: 24745 - RNA, 22 nt, synthetic construct
  source 1..22: mol_type = other RNA
cttaacaataaaaaggggagag

SEQ ID NO: 24746 - RNA, 22 nt, synthetic construct
  source 1..22: mol_type = other RNA
cttaatatgtcaatgtcacaag

SEQ ID NO: 24747 - RNA, 22 nt, synthetic construct
  source 1..22: mol_type = other RNA
cttacatgctttgcagttggac

SEQ ID NO: 24748 - RNA, 22 nt, synthetic construct
  source 1..22: mol_type = other RNA
cttagaacaaggacaaatttgc

SEQ ID NO: 24749 - RNA, 22 nt, synthetic construct
  source 1..22: mol_type = other RNA
cttaggagatgaagtctgaggt

SEQ ID NO: 24750 - RNA, 22 nt, synthetic construct
  source 1..22: mol_type = other RNA
cttaggcaggtgctactattat

SEQ ID NO: 24751 - RNA, 22 nt, synthetic construct
  source 1..22: mol_type = other RNA
cttagggtcacctccgtatacc

SEQ ID NO: 24752 - RNA, 22 nt, synthetic construct
  source 1..22: mol_type = other RNA
cttatcgagaggcacatgccat

SEQ ID NO: 24753 - RNA, 22 nt, synthetic construct
  source 1..22: mol_type = other RNA
cttatgattatttagaggagaa

SEQ ID NO: 24754 - RNA, 22 nt, synthetic construct
  source 1..22: mol_type = other RNA
cttatgtttatcacccgacagt

SEQ ID NO: 24755 - RNA, 22 nt, synthetic construct
  source 1..22: mol_type = other RNA
cttcaccaactgatcaaagtta

SEQ ID NO: 24756 - RNA, 22 nt, synthetic construct
  source 1..22: mol_type = other RNA
cttcagtctggatcagctcttc

SEQ ID NO: 24757 - RNA, 22 nt, synthetic construct
  source 1..22: mol_type = other RNA
cttcagtctgtctttctctctt

SEQ ID NO: 24758 - RNA, 22 nt, synthetic construct
  source 1..22: mol_type = other RNA
cttcagtgcatcttatcgagag

SEQ ID NO: 24759 - RNA, 22 nt, synthetic construct
  source 1..22: mol_type = other RNA
cttcatctcctaagcctcggtt

SEQ ID NO: 24760 - RNA, 22 nt, synthetic construct
  source 1..22: mol_type = other RNA
cttcatctgtaaaactactttt

SEQ ID NO: 24761 - RNA, 22 nt, synthetic construct
  source 1..22: mol_type = other RNA
cttccacctcagcctctataaa

SEQ ID NO: 24762 - RNA, 22 nt, synthetic construct
  source 1..22: mol_type = other RNA
cttccgagtaactgggactatg

SEQ ID NO: 24763 - RNA, 22 nt, synthetic construct
  source 1..22: mol_type = other RNA
cttctctgtaaaacagggataa

SEQ ID NO: 24764 - RNA, 22 nt, synthetic construct
  source 1..22: mol_type = other RNA
cttctgcaatattcctgccaag

SEQ ID NO: 24765 - RNA, 22 nt, synthetic construct
  source 1..22: mol_type = other RNA
cttcttcagtctggatcagctc

SEQ ID NO: 24766 - RNA, 22 nt, synthetic construct
  source 1..22: mol_type = other RNA
cttgacagtggagagacctggc

SEQ ID NO: 24767 - RNA, 22 nt, synthetic construct
  source 1..22: mol_type = other RNA
cttgagtttgaaaccagcctgg

SEQ ID NO: 24768 - RNA, 22 nt, synthetic construct
  source 1..22: mol_type = other RNA
cttgctcactatatgtgattcc

SEQ ID NO: 24769 - RNA, 22 nt, synthetic construct
  source 1..22: mol_type = other RNA
cttggacctcaactctcccctt

SEQ ID NO: 24770 - RNA, 22 nt, synthetic construct
  source 1..22: mol_type = other RNA
cttggcaggaatattgcagaag

SEQ ID NO: 24771 - RNA, 22 nt, synthetic construct
  source 1..22: mol_type = other RNA
cttggcatggataaaaacacta

SEQ ID NO: 24772 - RNA, 22 nt, synthetic construct
  source 1..22: mol_type = other RNA
cttggcctgtattctttgttaa

SEQ ID NO: 24773 - RNA, 22 nt, synthetic construct
  source 1..22: mol_type = other RNA
cttgtactctgcttaatatgtc

SEQ ID NO: 24774 - RNA, 22 nt, synthetic construct
  source 1..22: mol_type = other RNA
cttgtgacattgacatattaag

SEQ ID NO: 24775 - RNA, 22 nt, synthetic construct
  source 1..22: mol_type = other RNA
cttgttacttagggtcacctcc

SEQ ID NO: 24776 - RNA, 22 nt, synthetic construct
  source 1..22: mol_type = other RNA
cttgttctaaggaaataaatac

SEQ ID NO: 24777 - RNA, 22 nt, synthetic construct
  source 1..22: mol_type = other RNA
ctttactcctaaataattcagt

SEQ ID NO: 24778 - RNA, 22 nt, synthetic construct
  source 1..22: mol_type = other RNA
ctttagctggctttggtatttg

SEQ ID NO: 24779 - RNA, 22 nt, synthetic construct
  source 1..22: mol_type = other RNA
ctttagtgacagacatttttta

SEQ ID NO: 24780 - RNA, 22 nt, synthetic construct
  source 1..22: mol_type = other RNA
ctttctcctctaaataatcata

SEQ ID NO: 24781 - RNA, 22 nt, synthetic construct
  source 1..22: mol_type = other RNA
ctttctctcttgtgacattgac

SEQ ID NO: 24782 - RNA, 22 nt, synthetic construct
  source 1..22: mol_type = other RNA
ctttctggcgatgttaactttg

SEQ ID NO: 24783 - RNA, 22 nt, synthetic construct
  source 1..22: mol_type = other RNA
ctttgatcagttggtgaaggtg

SEQ ID NO: 24784 - RNA, 22 nt, synthetic construct
  source 1..22: mol_type = other RNA
ctttgcagttggacatattttg

SEQ ID NO: 24785 - RNA, 22 nt, synthetic construct
  source 1..22: mol_type = other RNA
ctttggcagttagtgtttttat

SEQ ID NO: 24786 - RNA, 22 nt, synthetic construct
  source 1..22: mol_type = other RNA
ctttggtatttggccaaaagtt

SEQ ID NO: 24787 - RNA, 22 nt, synthetic construct
  source 1..22: mol_type = other RNA
cttttcagtttttggtcaatcc

SEQ ID NO: 24788 - RNA, 22 nt, synthetic construct
  source 1..22: mol_type = other RNA
cttttgcattaatctcgagcct

SEQ ID NO: 24789 - RNA, 22 nt, synthetic construct
  source 1..22: mol_type = other RNA
cttttggccaaataccaaagcc

SEQ ID NO: 24790 - RNA, 22 nt, synthetic construct
  source 1..22: mol_type = other RNA
ctttttaacaaagaatacaggc

SEQ ID NO: 24791 - RNA, 22 nt, synthetic construct
  source 1..22: mol_type = other RNA
ctttttattgttaagggacact

SEQ ID NO: 24792 - RNA, 22 nt, synthetic construct
  source 1..22: mol_type = other RNA
gaaaagcaaattgcttgctcac

SEQ ID NO: 24793 - RNA, 22 nt, synthetic construct
  source 1..22: mol_type = other RNA
gaaaatcatcatcgcttggcat

SEQ ID NO: 24794 - RNA, 22 nt, synthetic construct
  source 1..22: mol_type = other RNA
gaaaatgggttcattatgcacc

SEQ ID NO: 24795 - RNA, 22 nt, synthetic construct
  source 1..22: mol_type = other RNA
gaaaccgaggcttaggagatga

SEQ ID NO: 24796 - RNA, 22 nt, synthetic construct
  source 1..22: mol_type = other RNA
gaaagacagactgaagagctga

SEQ ID NO: 24797 - RNA, 22 nt, synthetic construct
  source 1..22: mol_type = other RNA
gaaaggggacagatggcatgtg

SEQ ID NO: 24798 - RNA, 22 nt, synthetic construct
  source 1..22: mol_type = other RNA
gaaagttcagtttggtgctggt

SEQ ID NO: 24799 - RNA, 22 nt, synthetic construct
  source 1..22: mol_type = other RNA
gaaatgcactagttttagtgct

SEQ ID NO: 24800 - RNA, 22 nt, synthetic construct
  source 1..22: mol_type = other RNA
gaacaaggacaaatttgcataa

SEQ ID NO: 24801 - RNA, 22 nt, synthetic construct
  source 1..22: mol_type = other RNA
gaacccattttcaaatgcttat

SEQ ID NO: 24802 - RNA, 22 nt, synthetic construct
  source 1..22: mol_type = other RNA
gaactttctcctctaaataatc

SEQ ID NO: 24803 - RNA, 22 nt, synthetic construct
  source 1..22: mol_type = other RNA
gaagaaggctcgagattaatgc

SEQ ID NO: 24804 - RNA, 22 nt, synthetic construct
  source 1..22: mol_type = other RNA
gaagacacacactcacttctgc

SEQ ID NO: 24805 - RNA, 22 nt, synthetic construct
  source 1..22: mol_type = other RNA
gaagagctgatccagactgaag

SEQ ID NO: 24806 - RNA, 22 nt, synthetic construct
  source 1..22: mol_type = other RNA
gaagcactaaaactagtgcatt

SEQ ID NO: 24807 - RNA, 22 nt, synthetic construct
  source 1..22: mol_type = other RNA
gaaggaaaccgaggcttaggag

SEQ ID NO: 24808 - RNA, 22 nt, synthetic construct
  source 1..22: mol_type = other RNA
gaaggatcacttgagtttgaaa

SEQ ID NO: 24809 - RNA, 22 nt, synthetic construct
  source 1..22: mol_type = other RNA
gaaggctcgagattaatgcaaa

SEQ ID NO: 24810 - RNA, 22 nt, synthetic construct
  source 1..22: mol_type = other RNA
gaaggtggtgtctgccaggtct

SEQ ID NO: 24811 - RNA, 22 nt, synthetic construct
  source 1..22: mol_type = other RNA
gaagtctgaggtgttggtggag

SEQ ID NO: 24812 - RNA, 22 nt, synthetic construct
  source 1..22: mol_type = other RNA
gaagtgagtgtgtgtcttcagt

SEQ ID NO: 24813 - RNA, 22 nt, synthetic construct
  source 1..22: mol_type = other RNA
gaataaagttgtagatgagatt

SEQ ID NO: 24814 - RNA, 22 nt, synthetic construct
  source 1..22: mol_type = other RNA
gaataataactcactgcagcct

SEQ ID NO: 24815 - RNA, 22 nt, synthetic construct
  source 1..22: mol_type = other RNA
gaataatagtaacttgacagtg

SEQ ID NO: 24816 - RNA, 22 nt, synthetic construct
  source 1..22: mol_type = other RNA
gaatacaggccaaggccctgtg

SEQ ID NO: 24817 - RNA, 22 nt, synthetic construct
  source 1..22: mol_type = other RNA
gaatattgcagaagtgagtgtg

SEQ ID NO: 24818 - RNA, 22 nt, synthetic construct
  source 1..22: mol_type = other RNA
gaatcacatatagtgagcaagc

SEQ ID NO: 24819 - RNA, 22 nt, synthetic construct
  source 1..22: mol_type = other RNA
gaatctaatctcgagtataacc

SEQ ID NO: 24820 - RNA, 22 nt, synthetic construct
  source 1..22: mol_type = other RNA
gaatgcctcatctgaatctaat

SEQ ID NO: 24821 - RNA, 22 nt, synthetic construct
  source 1..22: mol_type = other RNA
gaattatttaggagtaaaggtg

SEQ ID NO: 24822 - RNA, 22 nt, synthetic construct
  source 1..22: mol_type = other RNA
gacaaacccaaattgagagaca

SEQ ID NO: 24823 - RNA, 22 nt, synthetic construct
  source 1..22: mol_type = other RNA
gacaaatttgcataaccacagt

SEQ ID NO: 24824 - RNA, 22 nt, synthetic construct
  source 1..22: mol_type = other RNA
gacaaccctactgtggttatgc

SEQ ID NO: 24825 - RNA, 22 nt, synthetic construct
  source 1..22: mol_type = other RNA
gacacacactcacttctgcaat

SEQ ID NO: 24826 - RNA, 22 nt, synthetic construct
  source 1..22: mol_type = other RNA
gacaccaccttcaccaactgat

SEQ ID NO: 24827 - RNA, 22 nt, synthetic construct
  source 1..22: mol_type = other RNA
gacactactgggacaatttttt

SEQ ID NO: 24828 - RNA, 22 nt, synthetic construct
  source 1..22: mol_type = other RNA
gacagactgaagagctgatcca

SEQ ID NO: 24829 - RNA, 22 nt, synthetic construct
  source 1..22: mol_type = other RNA
gacagatggcatgtgcctctcg

SEQ ID NO: 24830 - RNA, 22 nt, synthetic construct
  source 1..22: mol_type = other RNA
gacagtggagagacctggcaga

SEQ ID NO: 24831 - RNA, 22 nt, synthetic construct
  source 1..22: mol_type = other RNA
gacagttgttaatctcttttta

SEQ ID NO: 24832 - RNA, 22 nt, synthetic construct
  source 1..22: mol_type = other RNA
gacagtttacaaaacaccagcc

SEQ ID NO: 24833 - RNA, 22 nt, synthetic construct
  source 1..22: mol_type = other RNA
gacatattaagcagagtacaag

SEQ ID NO: 24834 - RNA, 22 nt, synthetic construct
  source 1..22: mol_type = other RNA
gacatattttggtttaaatccc

SEQ ID NO: 24835 - RNA, 22 nt, synthetic construct
  source 1..22: mol_type = other RNA
gacattgacatattaagcagag

SEQ ID NO: 24836 - RNA, 22 nt, synthetic construct
  source 1..22: mol_type = other RNA
gaccaaaaactgaaaagcaaat

SEQ ID NO: 24837 - RNA, 22 nt, synthetic construct
  source 1..22: mol_type = other RNA
gaccaatctcatctacaacttt

SEQ ID NO: 24838 - RNA, 22 nt, synthetic construct
  source 1..22: mol_type = other RNA
gaccccgtctctacaaaaagta

SEQ ID NO: 24839 - RNA, 22 nt, synthetic construct
  source 1..22: mol_type = other RNA
gaccctaagtaacaaggaatca

SEQ ID NO: 24840 - RNA, 22 nt, synthetic construct
  source 1..22: mol_type = other RNA
gaccctgtctcaaaacgaaaaa

SEQ ID NO: 24841 - RNA, 22 nt, synthetic construct
  source 1..22: mol_type = other RNA
gacctcaactctccccttttta

SEQ ID NO: 24842 - RNA, 22 nt, synthetic construct
  source 1..22: mol_type = other RNA
gacctggcagacaccaccttca

SEQ ID NO: 24843 - RNA, 22 nt, synthetic construct
  source 1..22: mol_type = other RNA
gactatgggcgtgtaccacaac

SEQ ID NO: 24844 - RNA, 22 nt, synthetic construct
  source 1..22: mol_type = other RNA
gactgaagaaggctcgagatta

SEQ ID NO: 24845 - RNA, 22 nt, synthetic construct
  source 1..22: mol_type = other RNA
gactgaagagctgatccagact

SEQ ID NO: 24846 - RNA, 22 nt, synthetic construct
  source 1..22: mol_type = other RNA
gactgagcgagaccctgtctca

SEQ ID NO: 24847 - RNA, 22 nt, synthetic construct
  source 1..22: mol_type = other RNA
gacttcatctcctaagcctcgg

SEQ ID NO: 24848 - RNA, 22 nt, synthetic construct
  source 1..22: mol_type = other RNA
gactttagctggctttggtatt

SEQ ID NO: 24849 - RNA, 22 nt, synthetic construct
  source 1..22: mol_type = other RNA
gactttggcagttagtgttttt

SEQ ID NO: 24850 - RNA, 22 nt, synthetic construct
  source 1..22: mol_type = other RNA
gagaaaatcatcatcgcttggc

SEQ ID NO: 24851 - RNA, 22 nt, synthetic construct
  source 1..22: mol_type = other RNA
gagaaagacagactgaagagct

SEQ ID NO: 24852 - RNA, 22 nt, synthetic construct
  source 1..22: mol_type = other RNA
gagaaagttcagtttggtgctg

SEQ ID NO: 24853 - RNA, 22 nt, synthetic construct
  source 1..22: mol_type = other RNA
gagaaggaaaccgaggcttagg

SEQ ID NO: 24854 - RNA, 22 nt, synthetic construct
  source 1..22: mol_type = other RNA
gagacagtttacaaaacaccag

SEQ ID NO: 24855 - RNA, 22 nt, synthetic construct
  source 1..22: mol_type = other RNA
gagaccccgtctctacaaaaag

SEQ ID NO: 24856 - RNA, 22 nt, synthetic construct
  source 1..22: mol_type = other RNA
gagacctggcagacaccacctt

SEQ ID NO: 24857 - RNA, 22 nt, synthetic construct
  source 1..22: mol_type = other RNA
gagagaaagacagactgaagag

SEQ ID NO: 24858 - RNA, 22 nt, synthetic construct
  source 1..22: mol_type = other RNA
gagagacagtttacaaaacacc

SEQ ID NO: 24859 - RNA, 22 nt, synthetic construct
  source 1..22: mol_type = other RNA
gagagacctggcagacaccacc

SEQ ID NO: 24860 - RNA, 22 nt, synthetic construct
  source 1..22: mol_type = other RNA
gagaggcacatgccatctgtcc

SEQ ID NO: 24861 - RNA, 22 nt, synthetic construct
  source 1..22: mol_type = other RNA
gagagttgaggtccaagatgca

SEQ ID NO: 24862 - RNA, 22 nt, synthetic construct
  source 1..22: mol_type = other RNA
gagatgaagtctgaggtgttgg

SEQ ID NO: 24863 - RNA, 22 nt, synthetic construct
  source 1..22: mol_type = other RNA
gagattaacaactgtcgggtga

SEQ ID NO: 24864 - RNA, 22 nt, synthetic construct
  source 1..22: mol_type = other RNA
gagattaatgcaaaagctgatc

SEQ ID NO: 24865 - RNA, 22 nt, synthetic construct
  source 1..22: mol_type = other RNA
gagattagattcagatgaggca

SEQ ID NO: 24866 - RNA, 22 nt, synthetic construct
  source 1..22: mol_type = other RNA
gagattggtcataggattgtat

SEQ ID NO: 24867 - RNA, 22 nt, synthetic construct
  source 1..22: mol_type = other RNA
gagcaagcaatttgcttttcag

SEQ ID NO: 24868 - RNA, 22 nt, synthetic construct
  source 1..22: mol_type = other RNA
gagccttccgagtaactgggac

SEQ ID NO: 24869 - RNA, 22 nt, synthetic construct
  source 1..22: mol_type = other RNA
gagccttcttcagtctggatca

SEQ ID NO: 24870 - RNA, 22 nt, synthetic construct
  source 1..22: mol_type = other RNA
gagctgatccagactgaagaag

SEQ ID NO: 24871 - RNA, 22 nt, synthetic construct
  source 1..22: mol_type = other RNA
gagctgggatttaaaccaaaat

SEQ ID NO: 24872 - RNA, 22 nt, synthetic construct
  source 1..22: mol_type = other RNA
gaggagaaagttcagtttggtg

SEQ ID NO: 24873 - RNA, 22 nt, synthetic construct
  source 1..22: mol_type = other RNA
gaggcacatgccatctgtcccc

SEQ ID NO: 24874 - RNA, 22 nt, synthetic construct
  source 1..22: mol_type = other RNA
gaggcattcttggcaggaatat

SEQ ID NO: 24875 - RNA, 22 nt, synthetic construct
  source 1..22: mol_type = other RNA
gaggcttaggagatgaagtctg

SEQ ID NO: 24876 - RNA, 22 nt, synthetic construct
  source 1..22: mol_type = other RNA
gagggtatacggaggtgaccct

SEQ ID NO: 24877 - RNA, 22 nt, synthetic construct
  source 1..22: mol_type = other RNA
gaggtccaagatgcaatcccag

SEQ ID NO: 24878 - RNA, 22 nt, synthetic construct
  source 1..22: mol_type = other RNA
gaggtgaccctaagtaacaagg

SEQ ID NO: 24879 - RNA, 22 nt, synthetic construct
  source 1..22: mol_type = other RNA
gaggtggaaggatcacttgagt

SEQ ID NO: 24880 - RNA, 22 nt, synthetic construct
  source 1..22: mol_type = other RNA
gaggtgttggtggagctgggat

SEQ ID NO: 24881 - RNA, 22 nt, synthetic construct
  source 1..22: mol_type = other RNA
gaggtgttgtggtacacgccca

SEQ ID NO: 24882 - RNA, 22 nt, synthetic construct
  source 1..22: mol_type = other RNA
gagtaaaggtgcataatgaacc

SEQ ID NO: 24883 - RNA, 22 nt, synthetic construct
  source 1..22: mol_type = other RNA
gagtaactgggactatgggcgt

SEQ ID NO: 24884 - RNA, 22 nt, synthetic construct
  source 1..22: mol_type = other RNA
gagtacaaggctggtgttttgt

SEQ ID NO: 24885 - RNA, 22 nt, synthetic construct
  source 1..22: mol_type = other RNA
gagtataaccatcagacaaacc

SEQ ID NO: 24886 - RNA, 22 nt, synthetic construct
  source 1..22: mol_type = other RNA
gagtccgggagttcaaggctgc

SEQ ID NO: 24887 - RNA, 22 nt, synthetic construct
  source 1..22: mol_type = other RNA
gagtgcagtggtggaataataa

SEQ ID NO: 24888 - RNA, 22 nt, synthetic construct
  source 1..22: mol_type = other RNA
gagtgtgtgtcttcagtgcatc

SEQ ID NO: 24889 - RNA, 22 nt, synthetic construct
  source 1..22: mol_type = other RNA
gagttattattccaccactgca

SEQ ID NO: 24890 - RNA, 22 nt, synthetic construct
  source 1..22: mol_type = other RNA
gagttcaaggctgcagtgagtt

SEQ ID NO: 24891 - RNA, 22 nt, synthetic construct
  source 1..22: mol_type = other RNA
gagttgaggtccaagatgcaat

SEQ ID NO: 24892 - RNA, 22 nt, synthetic construct
  source 1..22: mol_type = other RNA
gataaaaacactaactgccaaa

SEQ ID NO: 24893 - RNA, 22 nt, synthetic construct
  source 1..22: mol_type = other RNA
gataaacataagatataccagc

SEQ ID NO: 24894 - RNA, 22 nt, synthetic construct
  source 1..22: mol_type = other RNA
gataagatgcactgaagacaca

SEQ ID NO: 24895 - RNA, 22 nt, synthetic construct
  source 1..22: mol_type = other RNA
gataatagtagcacctgcctaa

SEQ ID NO: 24896 - RNA, 22 nt, synthetic construct
  source 1..22: mol_type = other RNA
gatacactatacaatcctatga

SEQ ID NO: 24897 - RNA, 22 nt, synthetic construct
  source 1..22: mol_type = other RNA
gatataccagcaccaaactgaa

SEQ ID NO: 24898 - RNA, 22 nt, synthetic construct
  source 1..22: mol_type = other RNA
gatcaaagttaacatcgccaga

SEQ ID NO: 24899 - RNA, 22 nt, synthetic construct
  source 1..22: mol_type = other RNA
gatcacttgagtttgaaaccag

SEQ ID NO: 24900 - RNA, 22 nt, synthetic construct
  source 1..22: mol_type = other RNA
gatcagctcttcagtctgtctt

SEQ ID NO: 24901 - RNA, 22 nt, synthetic construct
  source 1..22: mol_type = other RNA
gatcagcttttgcattaatctc

SEQ ID NO: 24902 - RNA, 22 nt, synthetic construct
  source 1..22: mol_type = other RNA
gatcagttggtgaaggtggtgt

SEQ ID NO: 24903 - RNA, 22 nt, synthetic construct
  source 1..22: mol_type = other RNA
gatccagactgaagaaggctcg

SEQ ID NO: 24904 - RNA, 22 nt, synthetic construct
  source 1..22: mol_type = other RNA
gatccttccacctcagcctcta

SEQ ID NO: 24905 - RNA, 22 nt, synthetic construct
  source 1..22: mol_type = other RNA
gatctgggattgcatcttggac

SEQ ID NO: 24906 - RNA, 22 nt, synthetic construct
  source 1..22: mol_type = other RNA
gatgaaatgcactagttttagt

SEQ ID NO: 24907 - RNA, 22 nt, synthetic construct
  source 1..22: mol_type = other RNA
gatgaagcactaaaactagtgc

SEQ ID NO: 24908 - RNA, 22 nt, synthetic construct
  source 1..22: mol_type = other RNA
gatgaagtctgaggtgttggtg

SEQ ID NO: 24909 - RNA, 22 nt, synthetic construct
  source 1..22: mol_type = other RNA
gatgagattggtcataggattg

SEQ ID NO: 24910 - RNA, 22 nt, synthetic construct
  source 1..22: mol_type = other RNA
gatgaggcattcttggcaggaa

SEQ ID NO: 24911 - RNA, 22 nt, synthetic construct
  source 1..22: mol_type = other RNA
gatgatgattttctctttagtg

SEQ ID NO: 24912 - RNA, 22 nt, synthetic construct
  source 1..22: mol_type = other RNA
gatgattttctctttagtgaca

SEQ ID NO: 24913 - RNA, 22 nt, synthetic construct
  source 1..22: mol_type = other RNA
gatgcaatcccagatcagcttt

SEQ ID NO: 24914 - RNA, 22 nt, synthetic construct
  source 1..22: mol_type = other RNA
gatgcactgaagacacacactc

SEQ ID NO: 24915 - RNA, 22 nt, synthetic construct
  source 1..22: mol_type = other RNA
gatggcatgtgcctctcgataa

SEQ ID NO: 24916 - RNA, 22 nt, synthetic construct
  source 1..22: mol_type = other RNA
gatggttatactcgagattaga

SEQ ID NO: 24917 - RNA, 22 nt, synthetic construct
  source 1..22: mol_type = other RNA
gatgttaactttgatcagttgg

SEQ ID NO: 24918 - RNA, 22 nt, synthetic construct
  source 1..22: mol_type = other RNA
gattaacaactgtcgggtgata

SEQ ID NO: 24919 - RNA, 22 nt, synthetic construct
  source 1..22: mol_type = other RNA
gattaatgcaaaagctgatctg

SEQ ID NO: 24920 - RNA, 22 nt, synthetic construct
  source 1..22: mol_type = other RNA
gattagattcagatgaggcatt

SEQ ID NO: 24921 - RNA, 22 nt, synthetic construct
  source 1..22: mol_type = other RNA
gattatttagaggagaaagttc

SEQ ID NO: 24922 - RNA, 22 nt, synthetic construct
  source 1..22: mol_type = other RNA
gattcagatgaggcattcttgg

SEQ ID NO: 24923 - RNA, 22 nt, synthetic construct
  source 1..22: mol_type = other RNA
gattccttgttacttagggtca

SEQ ID NO: 24924 - RNA, 22 nt, synthetic construct
  source 1..22: mol_type = other RNA
gattgaccaaaaactgaaaagc

SEQ ID NO: 24925 - RNA, 22 nt, synthetic construct
  source 1..22: mol_type = other RNA
gattgcatcttggacctcaact

SEQ ID NO: 24926 - RNA, 22 nt, synthetic construct
  source 1..22: mol_type = other RNA
gattggtcataggattgtatag

SEQ ID NO: 24927 - RNA, 22 nt, synthetic construct
  source 1..22: mol_type = other RNA
gatttaaaccaaaatatgtcca

SEQ ID NO: 24928 - RNA, 22 nt, synthetic construct
  source 1..22: mol_type = other RNA
gatttgctgattttgacaaccc

SEQ ID NO: 24929 - RNA, 22 nt, synthetic construct
  source 1..22: mol_type = other RNA
gattttctctttagtgacagac

SEQ ID NO: 24930 - RNA, 22 nt, synthetic construct
  source 1..22: mol_type = other RNA
gattttgacaaccctactgtgg

SEQ ID NO: 24931 - RNA, 22 nt, synthetic construct
  source 1..22: mol_type = other RNA
gcaaaagctgatctgggattgc

SEQ ID NO: 24932 - RNA, 22 nt, synthetic construct
  source 1..22: mol_type = other RNA
gcaaagcatgtaagtaacaatt

SEQ ID NO: 24933 - RNA, 22 nt, synthetic construct
  source 1..22: mol_type = other RNA
gcaaatctaatattgatacact

SEQ ID NO: 24934 - RNA, 22 nt, synthetic construct
  source 1..22: mol_type = other RNA
gcaaattgcttgctcactatat

SEQ ID NO: 24935 - RNA, 22 nt, synthetic construct
  source 1..22: mol_type = other RNA
gcaaatttgtccttgttctaag

SEQ ID NO: 24936 - RNA, 22 nt, synthetic construct
  source 1..22: mol_type = other RNA
gcaagcaatttgcttttcagtt

SEQ ID NO: 24937 - RNA, 22 nt, synthetic construct
  source 1..22: mol_type = other RNA
gcaatattcctgccaagaatgc

SEQ ID NO: 24938 - RNA, 22 nt, synthetic construct
  source 1..22: mol_type = other RNA
gcaatcccagatcagcttttgc

SEQ ID NO: 24939 - RNA, 22 nt, synthetic construct
  source 1..22: mol_type = other RNA
gcaatcctcctgcctgagcctt

SEQ ID NO: 24940 - RNA, 22 nt, synthetic construct
  source 1..22: mol_type = other RNA
gcaatttgcttttcagtttttg

SEQ ID NO: 24941 - RNA, 22 nt, synthetic construct
  source 1..22: mol_type = other RNA
gcacaagcccttaggcaggtgc

SEQ ID NO: 24942 - RNA, 22 nt, synthetic construct
  source 1..22: mol_type = other RNA
gcacatgccatctgtccccttt

SEQ ID NO: 24943 - RNA, 22 nt, synthetic construct
  source 1..22: mol_type = other RNA
gcaccaaactgaactttctcct

SEQ ID NO: 24944 - RNA, 22 nt, synthetic construct
  source 1..22: mol_type = other RNA
gcacctttactcctaaataatt

SEQ ID NO: 24945 - RNA, 22 nt, synthetic construct
  source 1..22: mol_type = other RNA
gcactaaaactagtgcatttca

SEQ ID NO: 24946 - RNA, 22 nt, synthetic construct
  source 1..22: mol_type = other RNA
gcactagttttagtgcttcatc

SEQ ID NO: 24947 - RNA, 22 nt, synthetic construct
  source 1..22: mol_type = other RNA
gcactgaagacacacactcact

SEQ ID NO: 24948 - RNA, 22 nt, synthetic construct
  source 1..22: mol_type = other RNA
gcagaagtgagtgtgtgtcttc

SEQ ID NO: 24949 - RNA, 22 nt, synthetic construct
  source 1..22: mol_type = other RNA
gcagacaccaccttcaccaact

SEQ ID NO: 24950 - RNA, 22 nt, synthetic construct
  source 1..22: mol_type = other RNA
gcagagtacaaggctggtgttt

SEQ ID NO: 24951 - RNA, 22 nt, synthetic construct
  source 1..22: mol_type = other RNA
gcaggaatattgcagaagtgag

SEQ ID NO: 24952 - RNA, 22 nt, synthetic construct
  source 1..22: mol_type = other RNA
gcaggtgctactattatccctg

SEQ ID NO: 24953 - RNA, 22 nt, synthetic construct
  source 1..22: mol_type = other RNA
gcagtgagttattattccacca

SEQ ID NO: 24954 - RNA, 22 nt, synthetic construct
  source 1..22: mol_type = other RNA
gcagtggtggaataataactca

SEQ ID NO: 24955 - RNA, 22 nt, synthetic construct
  source 1..22: mol_type = other RNA
gcagttagtgtttttatccatg

SEQ ID NO: 24956 - RNA, 22 nt, synthetic construct
  source 1..22: mol_type = other RNA
gcagttggacatattttggttt

SEQ ID NO: 24957 - RNA, 22 nt, synthetic construct
  source 1..22: mol_type = other RNA
gcagtttaagatgaaatgcact

SEQ ID NO: 24958 - RNA, 22 nt, synthetic construct
  source 1..22: mol_type = other RNA
gcataaccacagtagggttgtc

SEQ ID NO: 24959 - RNA, 22 nt, synthetic construct
  source 1..22: mol_type = other RNA
gcataatgaacccattttcaaa

SEQ ID NO: 24960 - RNA, 22 nt, synthetic construct
  source 1..22: mol_type = other RNA
gcatcttatcgagaggcacatg

SEQ ID NO: 24961 - RNA, 22 nt, synthetic construct
  source 1..22: mol_type = other RNA
gcatcttggacctcaactctcc

SEQ ID NO: 24962 - RNA, 22 nt, synthetic construct
  source 1..22: mol_type = other RNA
gcatggataaaaacactaactg

SEQ ID NO: 24963 - RNA, 22 nt, synthetic construct
  source 1..22: mol_type = other RNA
gcatgtaagtaacaattttaga

SEQ ID NO: 24964 - RNA, 22 nt, synthetic construct
  source 1..22: mol_type = other RNA
gcatgtgcctctcgataagatg

SEQ ID NO: 24965 - RNA, 22 nt, synthetic construct
  source 1..22: mol_type = other RNA
gcattaatctcgagccttcttc

SEQ ID NO: 24966 - RNA, 22 nt, synthetic construct
  source 1..22: mol_type = other RNA
gcattcttggcaggaatattgc

SEQ ID NO: 24967 - RNA, 22 nt, synthetic construct
  source 1..22: mol_type = other RNA
gcatttcatcttaaactgcaaa

SEQ ID NO: 24968 - RNA, 22 nt, synthetic construct
  source 1..22: mol_type = other RNA
gcatttgaaaatgggttcatta

SEQ ID NO: 24969 - RNA, 22 nt, synthetic construct
  source 1..22: mol_type = other RNA
gccaaaagttaatgactttggc

SEQ ID NO: 24970 - RNA, 22 nt, synthetic construct
  source 1..22: mol_type = other RNA
gccaaagtcattaacttttggc

SEQ ID NO: 24971 - RNA, 22 nt, synthetic construct
  source 1..22: mol_type = other RNA
gccaaataccaaagccagctaa

SEQ ID NO: 24972 - RNA, 22 nt, synthetic construct
  source 1..22: mol_type = other RNA
gccaagaatgcctcatctgaat

SEQ ID NO: 24973 - RNA, 22 nt, synthetic construct
  source 1..22: mol_type = other RNA
gccaagcgatgatgattttctc

SEQ ID NO: 24974 - RNA, 22 nt, synthetic construct
  source 1..22: mol_type = other RNA
gccaaggccctgtgactttagc

SEQ ID NO: 24975 - RNA, 22 nt, synthetic construct
  source 1..22: mol_type = other RNA
gccagaaaggggacagatggca

SEQ ID NO: 24976 - RNA, 22 nt, synthetic construct
  source 1..22: mol_type = other RNA
gccagctaaagtcacagggcct

SEQ ID NO: 24977 - RNA, 22 nt, synthetic construct
  source 1..22: mol_type = other RNA
gccaggtctctccactgtcaag

SEQ ID NO: 24978 - RNA, 22 nt, synthetic construct
  source 1..22: mol_type = other RNA
gccatctgtcccctttctggcg

SEQ ID NO: 24979 - RNA, 22 nt, synthetic construct
  source 1..22: mol_type = other RNA
gcccaggctggtttcaaactca

SEQ ID NO: 24980 - RNA, 22 nt, synthetic construct
  source 1..22: mol_type = other RNA
gcccatagtcccagttactcgg

SEQ ID NO: 24981 - RNA, 22 nt, synthetic construct
  source 1..22: mol_type = other RNA
gccctgtgactttagctggctt

SEQ ID NO: 24982 - RNA, 22 nt, synthetic construct
  source 1..22: mol_type = other RNA
gcccttaggcaggtgctactat

SEQ ID NO: 24983 - RNA, 22 nt, synthetic construct
  source 1..22: mol_type = other RNA
gcctcatctgaatctaatctcg

SEQ ID NO: 24984 - RNA, 22 nt, synthetic construct
  source 1..22: mol_type = other RNA
gcctcggtttccttctctgtaa

SEQ ID NO: 24985 - RNA, 22 nt, synthetic construct
  source 1..22: mol_type = other RNA
gcctctcgataagatgcactga

SEQ ID NO: 24986 - RNA, 22 nt, synthetic construct
  source 1..22: mol_type = other RNA
gcctgagccttccgagtaactg

SEQ ID NO: 24987 - RNA, 22 nt, synthetic construct
  source 1..22: mol_type = other RNA
gcctgtattctttgttaaaaag

SEQ ID NO: 24988 - RNA, 22 nt, synthetic construct
  source 1..22: mol_type = other RNA
gccttccgagtaactgggacta

SEQ ID NO: 24989 - RNA, 22 nt, synthetic construct
  source 1..22: mol_type = other RNA
gccttcttcagtctggatcagc

SEQ ID NO: 24990 - RNA, 22 nt, synthetic construct
  source 1..22: mol_type = other RNA
gccttggcctgtattctttgtt

SEQ ID NO: 24991 - RNA, 22 nt, synthetic construct
  source 1..22: mol_type = other RNA
gccttgtactctgcttaatatg

SEQ ID NO: 24992 - RNA, 22 nt, synthetic construct
  source 1..22: mol_type = other RNA
gcgaggtgttgtggtacacgcc

SEQ ID NO: 24993 - RNA, 22 nt, synthetic construct
  source 1..22: mol_type = other RNA
gcgatgatgattttctctttag

SEQ ID NO: 24994 - RNA, 22 nt, synthetic construct
  source 1..22: mol_type = other RNA
gcgatgttaactttgatcagtt

SEQ ID NO: 24995 - RNA, 22 nt, synthetic construct
  source 1..22: mol_type = other RNA
gcgtgtaccacaacacctcgct

SEQ ID NO: 24996 - RNA, 22 nt, synthetic construct
  source 1..22: mol_type = other RNA
gctaaagtcacagggccttggc

SEQ ID NO: 24997 - RNA, 22 nt, synthetic construct
  source 1..22: mol_type = other RNA
gctactattatccctgttttac

SEQ ID NO: 24998 - RNA, 22 nt, synthetic construct
  source 1..22: mol_type = other RNA
gctcactatatgtgattccttg

SEQ ID NO: 24999 - RNA, 22 nt, synthetic construct
  source 1..22: mol_type = other RNA
gctcaggcaggaggattgcttg

SEQ ID NO: 25000 - RNA, 22 nt, synthetic construct
  source 1..22: mol_type = other RNA
gctccaccaacacctcagactt

SEQ ID NO: 25001 - RNA, 22 nt, synthetic construct
  source 1..22: mol_type = other RNA
gctcgagattaatgcaaaagct

SEQ ID NO: 25002 - RNA, 22 nt, synthetic construct
  source 1..22: mol_type = other RNA
gctcttcagtctgtctttctct

SEQ ID NO: 25003 - RNA, 22 nt, synthetic construct
  source 1..22: mol_type = other RNA
gctgaggtggaaggatcacttg

SEQ ID NO: 25004 - RNA, 22 nt, synthetic construct
  source 1..22: mol_type = other RNA
gctgatccagactgaagaaggc

SEQ ID NO: 25005 - RNA, 22 nt, synthetic construct
  source 1..22: mol_type = other RNA
gctgatctgggattgcatcttg

SEQ ID NO: 25006 - RNA, 22 nt, synthetic construct
  source 1..22: mol_type = other RNA
gctgattttgacaaccctactg

SEQ ID NO: 25007 - RNA, 22 nt, synthetic construct
  source 1..22: mol_type = other RNA
gctgcagtgagttattattcca

SEQ ID NO: 25008 - RNA, 22 nt, synthetic construct
  source 1..22: mol_type = other RNA
gctggagtgcagtggtggaata

SEQ ID NO: 25009 - RNA, 22 nt, synthetic construct
  source 1..22: mol_type = other RNA
gctggctttggtatttggccaa

SEQ ID NO: 25010 - RNA, 22 nt, synthetic construct
  source 1..22: mol_type = other RNA
gctgggatttaaaccaaaatat

SEQ ID NO: 25011 - RNA, 22 nt, synthetic construct
  source 1..22: mol_type = other RNA
gctggtatatcttatgtttatc

SEQ ID NO: 25012 - RNA, 22 nt, synthetic construct
  source 1..22: mol_type = other RNA
gctggtgttttgtaaactgtct

SEQ ID NO: 25013 - RNA, 22 nt, synthetic construct
  source 1..22: mol_type = other RNA
gctggtttcaaactcaagtgat

SEQ ID NO: 25014 - RNA, 22 nt, synthetic construct
  source 1..22: mol_type = other RNA
gcttaatatgtcaatgtcacaa

SEQ ID NO: 25015 - RNA, 22 nt, synthetic construct
  source 1..22: mol_type = other RNA
gcttaggagatgaagtctgagg

SEQ ID NO: 25016 - RNA, 22 nt, synthetic construct
  source 1..22: mol_type = other RNA
gcttcatctgtaaaactacttt

SEQ ID NO: 25017 - RNA, 22 nt, synthetic construct
  source 1..22: mol_type = other RNA
gcttgctcactatatgtgattc

SEQ ID NO: 25018 - RNA, 22 nt, synthetic construct
  source 1..22: mol_type = other RNA
gcttggcatggataaaaacact

SEQ ID NO: 25019 - RNA, 22 nt, synthetic construct
  source 1..22: mol_type = other RNA
gctttgcagttggacatatttt

SEQ ID NO: 25020 - RNA, 22 nt, synthetic construct
  source 1..22: mol_type = other RNA
gctttggtatttggccaaaagt

SEQ ID NO: 25021 - RNA, 22 nt, synthetic construct
  source 1..22: mol_type = other RNA
gcttttcagtttttggtcaatc

SEQ ID NO: 25022 - RNA, 22 nt, synthetic construct
  source 1..22: mol_type = other RNA
gcttttgcattaatctcgagcc

SEQ ID NO: 25023 - RNA, 22 nt, synthetic construct
  source 1..22: mol_type = other RNA
ggaaaccgaggcttaggagatg

SEQ ID NO: 25024 - RNA, 22 nt, synthetic construct
  source 1..22: mol_type = other RNA
ggaaggatcacttgagtttgaa

SEQ ID NO: 25025 - RNA, 22 nt, synthetic construct
  source 1..22: mol_type = other RNA
ggaaggctcaggcaggaggatt

SEQ ID NO: 25026 - RNA, 22 nt, synthetic construct
  source 1..22: mol_type = other RNA
ggaataataactcactgcagcc

SEQ ID NO: 25027 - RNA, 22 nt, synthetic construct
  source 1..22: mol_type = other RNA
ggaataatagtaacttgacagt

SEQ ID NO: 25028 - RNA, 22 nt, synthetic construct
  source 1..22: mol_type = other RNA
ggaatattgcagaagtgagtgt

SEQ ID NO: 25029 - RNA, 22 nt, synthetic construct
  source 1..22: mol_type = other RNA
ggaatcacatatagtgagcaag

SEQ ID NO: 25030 - RNA, 22 nt, synthetic construct
  source 1..22: mol_type = other RNA
ggacaaatttgcataaccacag

SEQ ID NO: 25031 - RNA, 22 nt, synthetic construct
  source 1..22: mol_type = other RNA
ggacactactgggacaattttt

SEQ ID NO: 25032 - RNA, 22 nt, synthetic construct
  source 1..22: mol_type = other RNA
ggacagatggcatgtgcctctc

SEQ ID NO: 25033 - RNA, 22 nt, synthetic construct
  source 1..22: mol_type = other RNA
ggacatattttggtttaaatcc

SEQ ID NO: 25034 - RNA, 22 nt, synthetic construct
  source 1..22: mol_type = other RNA
ggacctcaactctccccttttt

SEQ ID NO: 25035 - RNA, 22 nt, synthetic construct
  source 1..22: mol_type = other RNA
ggactatgggcgtgtaccacaa

SEQ ID NO: 25036 - RNA, 22 nt, synthetic construct
  source 1..22: mol_type = other RNA
ggagaaagttcagtttggtgct

SEQ ID NO: 25037 - RNA, 22 nt, synthetic construct
  source 1..22: mol_type = other RNA
ggagagacctggcagacaccac

SEQ ID NO: 25038 - RNA, 22 nt, synthetic construct
  source 1..22: mol_type = other RNA
ggagagttgaggtccaagatgc

SEQ ID NO: 25039 - RNA, 22 nt, synthetic construct
  source 1..22: mol_type = other RNA
ggagatgaagtctgaggtgttg

SEQ ID NO: 25040 - RNA, 22 nt, synthetic construct
  source 1..22: mol_type = other RNA
ggagctgggatttaaaccaaaa

SEQ ID NO: 25041 - RNA, 22 nt, synthetic construct
  source 1..22: mol_type = other RNA
ggaggtgaccctaagtaacaag

SEQ ID NO: 25042 - RNA, 22 nt, synthetic construct
  source 1..22: mol_type = other RNA
ggagtaaaggtgcataatgaac

SEQ ID NO: 25043 - RNA, 22 nt, synthetic construct
  source 1..22: mol_type = other RNA
ggagtgcagtggtggaataata

SEQ ID NO: 25044 - RNA, 22 nt, synthetic construct
  source 1..22: mol_type = other RNA
ggagttcaaggctgcagtgagt

SEQ ID NO: 25045 - RNA, 22 nt, synthetic construct
  source 1..22: mol_type = other RNA
ggataaaaacactaactgccaa

SEQ ID NO: 25046 - RNA, 22 nt, synthetic construct
  source 1..22: mol_type = other RNA
ggataatagtagcacctgccta

SEQ ID NO: 25047 - RNA, 22 nt, synthetic construct
  source 1..22: mol_type = other RNA
ggatcacttgagtttgaaacca

SEQ ID NO: 25048 - RNA, 22 nt, synthetic construct
  source 1..22: mol_type = other RNA
ggatcagctcttcagtctgtct

SEQ ID NO: 25049 - RNA, 22 nt, synthetic construct
  source 1..22: mol_type = other RNA
ggattgaccaaaaactgaaaag

SEQ ID NO: 25050 - RNA, 22 nt, synthetic construct
  source 1..22: mol_type = other RNA
ggattgcatcttggacctcaac

SEQ ID NO: 25051 - RNA, 22 nt, synthetic construct
  source 1..22: mol_type = other RNA
ggattgtatagtgtatcaatat

SEQ ID NO: 25052 - RNA, 22 nt, synthetic construct
  source 1..22: mol_type = other RNA
ggatttaaaccaaaatatgtcc

SEQ ID NO: 25053 - RNA, 22 nt, synthetic construct
  source 1..22: mol_type = other RNA
ggcacatgccatctgtcccctt

SEQ ID NO: 25054 - RNA, 22 nt, synthetic construct
  source 1..22: mol_type = other RNA
ggcagacaccaccttcaccaac

SEQ ID NO: 25055 - RNA, 22 nt, synthetic construct
  source 1..22: mol_type = other RNA
ggcaggaatattgcagaagtga

SEQ ID NO: 25056 - RNA, 22 nt, synthetic construct
  source 1..22: mol_type = other RNA
ggcaggtgctactattatccct

SEQ ID NO: 25057 - RNA, 22 nt, synthetic construct
  source 1..22: mol_type = other RNA
ggcagttagtgtttttatccat

SEQ ID NO: 25058 - RNA, 22 nt, synthetic construct
  source 1..22: mol_type = other RNA
ggcatggataaaaacactaact

SEQ ID NO: 25059 - RNA, 22 nt, synthetic construct
  source 1..22: mol_type = other RNA
ggcatgtgcctctcgataagat

SEQ ID NO: 25060 - RNA, 22 nt, synthetic construct
  source 1..22: mol_type = other RNA
ggcattcttggcaggaatattg

SEQ ID NO: 25061 - RNA, 22 nt, synthetic construct
  source 1..22: mol_type = other RNA
ggccaaaagttaatgactttgg

SEQ ID NO: 25062 - RNA, 22 nt, synthetic construct
  source 1..22: mol_type = other RNA
ggccaaataccaaagccagcta

SEQ ID NO: 25063 - RNA, 22 nt, synthetic construct
  source 1..22: mol_type = other RNA
ggccaaggccctgtgactttag

SEQ ID NO: 25064 - RNA, 22 nt, synthetic construct
  source 1..22: mol_type = other RNA
ggccctgtgactttagctggct

SEQ ID NO: 25065 - RNA, 22 nt, synthetic construct
  source 1..22: mol_type = other RNA
ggcctgtattctttgttaaaaa

SEQ ID NO: 25066 - RNA, 22 nt, synthetic construct
  source 1..22: mol_type = other RNA
ggccttggcctgtattctttgt

SEQ ID NO: 25067 - RNA, 22 nt, synthetic construct
  source 1..22: mol_type = other RNA
ggcgatgttaactttgatcagt

SEQ ID NO: 25068 - RNA, 22 nt, synthetic construct
  source 1..22: mol_type = other RNA
ggcgtgtaccacaacacctcgc

SEQ ID NO: 25069 - RNA, 22 nt, synthetic construct
  source 1..22: mol_type = other RNA
ggctcaggcaggaggattgctt

SEQ ID NO: 25070 - RNA, 22 nt, synthetic construct
  source 1..22: mol_type = other RNA
ggctcgagattaatgcaaaagc

SEQ ID NO: 25071 - RNA, 22 nt, synthetic construct
  source 1..22: mol_type = other RNA
ggctgaggtggaaggatcactt

SEQ ID NO: 25072 - RNA, 22 nt, synthetic construct
  source 1..22: mol_type = other RNA
ggctgcagtgagttattattcc

SEQ ID NO: 25073 - RNA, 22 nt, synthetic construct
  source 1..22: mol_type = other RNA
ggctggagtgcagtggtggaat

SEQ ID NO: 25074 - RNA, 22 nt, synthetic construct
  source 1..22: mol_type = other RNA
ggctggtgttttgtaaactgtc

SEQ ID NO: 25075 - RNA, 22 nt, synthetic construct
  source 1..22: mol_type = other RNA
ggctggtttcaaactcaagtga

SEQ ID NO: 25076 - RNA, 22 nt, synthetic construct
  source 1..22: mol_type = other RNA
ggcttaggagatgaagtctgag

SEQ ID NO: 25077 - RNA, 22 nt, synthetic construct
  source 1..22: mol_type = other RNA
ggctttggtatttggccaaaag

SEQ ID NO: 25078 - RNA, 22 nt, synthetic construct
  source 1..22: mol_type = other RNA
gggaataatagtaacttgacag

SEQ ID NO: 25079 - RNA, 22 nt, synthetic construct
  source 1..22: mol_type = other RNA
gggacactactgggacaatttt

SEQ ID NO: 25080 - RNA, 22 nt, synthetic construct
  source 1..22: mol_type = other RNA
gggacagatggcatgtgcctct

SEQ ID NO: 25081 - RNA, 22 nt, synthetic construct
  source 1..22: mol_type = other RNA
gggactatgggcgtgtaccaca

SEQ ID NO: 25082 - RNA, 22 nt, synthetic construct
  source 1..22: mol_type = other RNA
gggagagttgaggtccaagatg

SEQ ID NO: 25083 - RNA, 22 nt, synthetic construct
  source 1..22: mol_type = other RNA
gggagttcaaggctgcagtgag

SEQ ID NO: 25084 - RNA, 22 nt, synthetic construct
  source 1..22: mol_type = other RNA
gggataatagtagcacctgcct

SEQ ID NO: 25085 - RNA, 22 nt, synthetic construct
  source 1..22: mol_type = other RNA
gggattgcatcttggacctcaa

SEQ ID NO: 25086 - RNA, 22 nt, synthetic construct
  source 1..22: mol_type = other RNA
gggatttaaaccaaaatatgtc

SEQ ID NO: 25087 - RNA, 22 nt, synthetic construct
  source 1..22: mol_type = other RNA
gggccttggcctgtattctttg

SEQ ID NO: 25088 - RNA, 22 nt, synthetic construct
  source 1..22: mol_type = other RNA
gggcgtgtaccacaacacctcg

SEQ ID NO: 25089 - RNA, 22 nt, synthetic construct
  source 1..22: mol_type = other RNA
ggggacagatggcatgtgcctc

SEQ ID NO: 25090 - RNA, 22 nt, synthetic construct
  source 1..22: mol_type = other RNA
ggggagagttgaggtccaagat

SEQ ID NO: 25091 - RNA, 22 nt, synthetic construct
  source 1..22: mol_type = other RNA
gggtatacggaggtgaccctaa

SEQ ID NO: 25092 - RNA, 22 nt, synthetic construct
  source 1..22: mol_type = other RNA
gggtcacctccgtataccctct

SEQ ID NO: 25093 - RNA, 22 nt, synthetic construct
  source 1..22: mol_type = other RNA
gggtgataaacataagatatac

SEQ ID NO: 25094 - RNA, 22 nt, synthetic construct
  source 1..22: mol_type = other RNA
gggttcattatgcacctttact

SEQ ID NO: 25095 - RNA, 22 nt, synthetic construct
  source 1..22: mol_type = other RNA
gggttgtcaaaatcagcaaatc

SEQ ID NO: 25096 - RNA, 22 nt, synthetic construct
  source 1..22: mol_type = other RNA
gggtttgtctgatggttatact

SEQ ID NO: 25097 - RNA, 22 nt, synthetic construct
  source 1..22: mol_type = other RNA
ggtacacgcccatagtcccagt

SEQ ID NO: 25098 - RNA, 22 nt, synthetic construct
  source 1..22: mol_type = other RNA
ggtatacggaggtgaccctaag

SEQ ID NO: 25099 - RNA, 22 nt, synthetic construct
  source 1..22: mol_type = other RNA
ggtatatcttatgtttatcacc

SEQ ID NO: 25100 - RNA, 22 nt, synthetic construct
  source 1..22: mol_type = other RNA
ggtatttggccaaaagttaatg

SEQ ID NO: 25101 - RNA, 22 nt, synthetic construct
  source 1..22: mol_type = other RNA
ggtcaatccttatgattattta

SEQ ID NO: 25102 - RNA, 22 nt, synthetic construct
  source 1..22: mol_type = other RNA
ggtcacctccgtataccctcta

SEQ ID NO: 25103 - RNA, 22 nt, synthetic construct
  source 1..22: mol_type = other RNA
ggtcataggattgtatagtgta

SEQ ID NO: 25104 - RNA, 22 nt, synthetic construct
  source 1..22: mol_type = other RNA
ggtccaagatgcaatcccagat

SEQ ID NO: 25105 - RNA, 22 nt, synthetic construct
  source 1..22: mol_type = other RNA
ggtctctccactgtcaagttac

SEQ ID NO: 25106 - RNA, 22 nt, synthetic construct
  source 1..22: mol_type = other RNA
ggtgaaggtggtgtctgccagg

SEQ ID NO: 25107 - RNA, 22 nt, synthetic construct
  source 1..22: mol_type = other RNA
ggtgaccctaagtaacaaggaa

SEQ ID NO: 25108 - RNA, 22 nt, synthetic construct
  source 1..22: mol_type = other RNA
ggtgactgagcgagaccctgtc

SEQ ID NO: 25109 - RNA, 22 nt, synthetic construct
  source 1..22: mol_type = other RNA
ggtgataaacataagatatacc

SEQ ID NO: 25110 - RNA, 22 nt, synthetic construct
  source 1..22: mol_type = other RNA
ggtgcataatgaacccattttc

SEQ ID NO: 25111 - RNA, 22 nt, synthetic construct
  source 1..22: mol_type = other RNA
ggtgctactattatccctgttt

SEQ ID NO: 25112 - RNA, 22 nt, synthetic construct
  source 1..22: mol_type = other RNA
ggtgctggtatatcttatgttt

SEQ ID NO: 25113 - RNA, 22 nt, synthetic construct
  source 1..22: mol_type = other RNA
ggtggaaggatcacttgagttt

SEQ ID NO: 25114 - RNA, 22 nt, synthetic construct
  source 1..22: mol_type = other RNA
ggtggaataataactcactgca

SEQ ID NO: 25115 - RNA, 22 nt, synthetic construct
  source 1..22: mol_type = other RNA
ggtggagctgggatttaaacca

SEQ ID NO: 25116 - RNA, 22 nt, synthetic construct
  source 1..22: mol_type = other RNA
ggtggtgtctgccaggtctctc

SEQ ID NO: 25117 - RNA, 22 nt, synthetic construct
  source 1..22: mol_type = other RNA
ggtgtctgccaggtctctccac

SEQ ID NO: 25118 - RNA, 22 nt, synthetic construct
  source 1..22: mol_type = other RNA
ggtgttggtggagctgggattt

SEQ ID NO: 25119 - RNA, 22 nt, synthetic construct
  source 1..22: mol_type = other RNA
ggtgttgtggtacacgcccata

SEQ ID NO: 25120 - RNA, 22 nt, synthetic construct
  source 1..22: mol_type = other RNA
ggtgttttgtaaactgtctctc

SEQ ID NO: 25121 - RNA, 22 nt, synthetic construct
  source 1..22: mol_type = other RNA
ggttatactcgagattagattc

SEQ ID NO: 25122 - RNA, 22 nt, synthetic construct
  source 1..22: mol_type = other RNA
ggttatgcaaatttgtccttgt

SEQ ID NO: 25123 - RNA, 22 nt, synthetic construct
  source 1..22: mol_type = other RNA
ggttcattatgcacctttactc

SEQ ID NO: 25124 - RNA, 22 nt, synthetic construct
  source 1..22: mol_type = other RNA
ggttgtcaaaatcagcaaatct

SEQ ID NO: 25125 - RNA, 22 nt, synthetic construct
  source 1..22: mol_type = other RNA
ggtttaaatcccagctccacca

SEQ ID NO: 25126 - RNA, 22 nt, synthetic construct
  source 1..22: mol_type = other RNA
ggtttcaaactcaagtgatcct

SEQ ID NO: 25127 - RNA, 22 nt, synthetic construct
  source 1..22: mol_type = other RNA
ggtttccttctctgtaaaacag

SEQ ID NO: 25128 - RNA, 22 nt, synthetic construct
  source 1..22: mol_type = other RNA
ggtttgtctgatggttatactc

SEQ ID NO: 25129 - RNA, 22 nt, synthetic construct
  source 1..22: mol_type = other RNA
gtaaaacagggataatagtagc

SEQ ID NO: 25130 - RNA, 22 nt, synthetic construct
  source 1..22: mol_type = other RNA
gtaaactgtctctcaatttggg

SEQ ID NO: 25131 - RNA, 22 nt, synthetic construct
  source 1..22: mol_type = other RNA
gtaaaggtgcataatgaaccca

SEQ ID NO: 25132 - RNA, 22 nt, synthetic construct
  source 1..22: mol_type = other RNA
gtaacaaggaatcacatatagt

SEQ ID NO: 25133 - RNA, 22 nt, synthetic construct
  source 1..22: mol_type = other RNA
gtaacaattttagagggtatac

SEQ ID NO: 25134 - RNA, 22 nt, synthetic construct
  source 1..22: mol_type = other RNA
gtaactgggactatgggcgtgt

SEQ ID NO: 25135 - RNA, 22 nt, synthetic construct
  source 1..22: mol_type = other RNA
gtaacttgacagtggagagacc

SEQ ID NO: 25136 - RNA, 22 nt, synthetic construct
  source 1..22: mol_type = other RNA
gtaagtaacaattttagagggt

SEQ ID NO: 25137 - RNA, 22 nt, synthetic construct
  source 1..22: mol_type = other RNA
gtacaaggctggtgttttgtaa

SEQ ID NO: 25138 - RNA, 22 nt, synthetic construct
  source 1..22: mol_type = other RNA
gtacacgcccatagtcccagtt

SEQ ID NO: 25139 - RNA, 22 nt, synthetic construct
  source 1..22: mol_type = other RNA
gtaccacaacacctcgctattt

SEQ ID NO: 25140 - RNA, 22 nt, synthetic construct
  source 1..22: mol_type = other RNA
gtactctgcttaatatgtcaat

SEQ ID NO: 25141 - RNA, 22 nt, synthetic construct
  source 1..22: mol_type = other RNA
gtagatgagattggtcatagga

SEQ ID NO: 25142 - RNA, 22 nt, synthetic construct
  source 1..22: mol_type = other RNA
gtagggttgtcaaaatcagcaa

SEQ ID NO: 25143 - RNA, 22 nt, synthetic construct
  source 1..22: mol_type = other RNA
gtagtgtcccttaacaataaaa

SEQ ID NO: 25144 - RNA, 22 nt, synthetic construct
  source 1..22: mol_type = other RNA
gtagttttacagatgaagcact

SEQ ID NO: 25145 - RNA, 22 nt, synthetic construct
  source 1..22: mol_type = other RNA
gtataaccatcagacaaaccca

SEQ ID NO: 25146 - RNA, 22 nt, synthetic construct
  source 1..22: mol_type = other RNA
gtataccctctaaaattgttac

SEQ ID NO: 25147 - RNA, 22 nt, synthetic construct
  source 1..22: mol_type = other RNA
gtatacggaggtgaccctaagt

SEQ ID NO: 25148 - RNA, 22 nt, synthetic construct
  source 1..22: mol_type = other RNA
gtatatcttatgtttatcaccc

SEQ ID NO: 25149 - RNA, 22 nt, synthetic construct
  source 1..22: mol_type = other RNA
gtatcaatattagatttgctga

SEQ ID NO: 25150 - RNA, 22 nt, synthetic construct
  source 1..22: mol_type = other RNA
gtatttatttccttagaacaag

SEQ ID NO: 25151 - RNA, 22 nt, synthetic construct
  source 1..22: mol_type = other RNA
gtatttggccaaaagttaatga

SEQ ID NO: 25152 - RNA, 22 nt, synthetic construct
  source 1..22: mol_type = other RNA
gtcaaaatcagcaaatctaata

SEQ ID NO: 25153 - RNA, 22 nt, synthetic construct
  source 1..22: mol_type = other RNA
gtcaagttactattattccctt

SEQ ID NO: 25154 - RNA, 22 nt, synthetic construct
  source 1..22: mol_type = other RNA
gtcaatccttatgattatttag

SEQ ID NO: 25155 - RNA, 22 nt, synthetic construct
  source 1..22: mol_type = other RNA
gtcaatgtcacaagagagaaag

SEQ ID NO: 25156 - RNA, 22 nt, synthetic construct
  source 1..22: mol_type = other RNA
gtcacaagagagaaagacagac

SEQ ID NO: 25157 - RNA, 22 nt, synthetic construct
  source 1..22: mol_type = other RNA
gtcacagggccttggcctgtat

SEQ ID NO: 25158 - RNA, 22 nt, synthetic construct
  source 1..22: mol_type = other RNA
gtcacctccgtataccctctaa

SEQ ID NO: 25159 - RNA, 22 nt, synthetic construct
  source 1..22: mol_type = other RNA
gtcactaaagagaaaatcatca

SEQ ID NO: 25160 - RNA, 22 nt, synthetic construct
  source 1..22: mol_type = other RNA
gtcataggattgtatagtgtat

SEQ ID NO: 25161 - RNA, 22 nt, synthetic construct
  source 1..22: mol_type = other RNA
gtcattaacttttggccaaata

SEQ ID NO: 25162 - RNA, 22 nt, synthetic construct
  source 1..22: mol_type = other RNA
gtccaactgcaaagcatgtaag

SEQ ID NO: 25163 - RNA, 22 nt, synthetic construct
  source 1..22: mol_type = other RNA
gtccaagatgcaatcccagatc

SEQ ID NO: 25164 - RNA, 22 nt, synthetic construct
  source 1..22: mol_type = other RNA
gtcccagtagtgtcccttaaca

SEQ ID NO: 25165 - RNA, 22 nt, synthetic construct
  source 1..22: mol_type = other RNA
gtcccagttactcggaaggctc

SEQ ID NO: 25166 - RNA, 22 nt, synthetic construct
  source 1..22: mol_type = other RNA
gtcccctttctggcgatgttaa

SEQ ID NO: 25167 - RNA, 22 nt, synthetic construct
  source 1..22: mol_type = other RNA
gtcccttaacaataaaaagggg

SEQ ID NO: 25168 - RNA, 22 nt, synthetic construct
  source 1..22: mol_type = other RNA
gtccgggagttcaaggctgcag

SEQ ID NO: 25169 - RNA, 22 nt, synthetic construct
  source 1..22: mol_type = other RNA
gtccttgttctaaggaaataaa

SEQ ID NO: 25170 - RNA, 22 nt, synthetic construct
  source 1..22: mol_type = other RNA
gtcgggtgataaacataagata

SEQ ID NO: 25171 - RNA, 22 nt, synthetic construct
  source 1..22: mol_type = other RNA
gtctctacaaaaagtaggaaaa

SEQ ID NO: 25172 - RNA, 22 nt, synthetic construct
  source 1..22: mol_type = other RNA
gtctctcaatttgggtttgtct

SEQ ID NO: 25173 - RNA, 22 nt, synthetic construct
  source 1..22: mol_type = other RNA
gtctctccactgtcaagttact

SEQ ID NO: 25174 - RNA, 22 nt, synthetic construct
  source 1..22: mol_type = other RNA
gtctgaggtgttggtggagctg

SEQ ID NO: 25175 - RNA, 22 nt, synthetic construct
  source 1..22: mol_type = other RNA
gtctgatggttatactcgagat

SEQ ID NO: 25176 - RNA, 22 nt, synthetic construct
  source 1..22: mol_type = other RNA
gtctgccaggtctctccactgt

SEQ ID NO: 25177 - RNA, 22 nt, synthetic construct
  source 1..22: mol_type = other RNA
gtctggatcagctcttcagtct

SEQ ID NO: 25178 - RNA, 22 nt, synthetic construct
  source 1..22: mol_type = other RNA
gtctgtcactaaagagaaaatc

SEQ ID NO: 25179 - RNA, 22 nt, synthetic construct
  source 1..22: mol_type = other RNA
gtctgtctttctctcttgtgac

SEQ ID NO: 25180 - RNA, 22 nt, synthetic construct
  source 1..22: mol_type = other RNA
gtcttcagtgcatcttatcgag

SEQ ID NO: 25181 - RNA, 22 nt, synthetic construct
  source 1..22: mol_type = other RNA
gtctttctctcttgtgacattg

SEQ ID NO: 25182 - RNA, 22 nt, synthetic construct
  source 1..22: mol_type = other RNA
gtgaaggtggtgtctgccaggt

SEQ ID NO: 25183 - RNA, 22 nt, synthetic construct
  source 1..22: mol_type = other RNA
gtgacattgacatattaagcag

SEQ ID NO: 25184 - RNA, 22 nt, synthetic construct
  source 1..22: mol_type = other RNA
gtgaccctaagtaacaaggaat

SEQ ID NO: 25185 - RNA, 22 nt, synthetic construct
  source 1..22: mol_type = other RNA
gtgactgagcgagaccctgtct

SEQ ID NO: 25186 - RNA, 22 nt, synthetic construct
  source 1..22: mol_type = other RNA
gtgactttagctggctttggta

SEQ ID NO: 25187 - RNA, 22 nt, synthetic construct
  source 1..22: mol_type = other RNA
gtgagaccccgtctctacaaaa

SEQ ID NO: 25188 - RNA, 22 nt, synthetic construct
  source 1..22: mol_type = other RNA
gtgagcaagcaatttgcttttc

SEQ ID NO: 25189 - RNA, 22 nt, synthetic construct
  source 1..22: mol_type = other RNA
gtgagtgtgtgtcttcagtgca

SEQ ID NO: 25190 - RNA, 22 nt, synthetic construct
  source 1..22: mol_type = other RNA
gtgagttattattccaccactg

SEQ ID NO: 25191 - RNA, 22 nt, synthetic construct
  source 1..22: mol_type = other RNA
gtgataaacataagatatacca

SEQ ID NO: 25192 - RNA, 22 nt, synthetic construct
  source 1..22: mol_type = other RNA
gtgatccttccacctcagcctc

SEQ ID NO: 25193 - RNA, 22 nt, synthetic construct
  source 1..22: mol_type = other RNA
gtgattccttgttacttagggt

SEQ ID NO: 25194 - RNA, 22 nt, synthetic construct
  source 1..22: mol_type = other RNA
gtgcagtggtggaataataact

SEQ ID NO: 25195 - RNA, 22 nt, synthetic construct
  source 1..22: mol_type = other RNA
gtgcataatgaacccattttca

SEQ ID NO: 25196 - RNA, 22 nt, synthetic construct
  source 1..22: mol_type = other RNA
gtgcatcttatcgagaggcaca

SEQ ID NO: 25197 - RNA, 22 nt, synthetic construct
  source 1..22: mol_type = other RNA
gtgcatttcatcttaaactgca

SEQ ID NO: 25198 - RNA, 22 nt, synthetic construct
  source 1..22: mol_type = other RNA
gtgcctctcgataagatgcact

SEQ ID NO: 25199 - RNA, 22 nt, synthetic construct
  source 1..22: mol_type = other RNA
gtgctactattatccctgtttt

SEQ ID NO: 25200 - RNA, 22 nt, synthetic construct
  source 1..22: mol_type = other RNA
gtgctggtatatcttatgttta

SEQ ID NO: 25201 - RNA, 22 nt, synthetic construct
  source 1..22: mol_type = other RNA
gtgcttcatctgtaaaactact

SEQ ID NO: 25202 - RNA, 22 nt, synthetic construct
  source 1..22: mol_type = other RNA
gtggaaggatcacttgagtttg

SEQ ID NO: 25203 - RNA, 22 nt, synthetic construct
  source 1..22: mol_type = other RNA
gtggaataataactcactgcag

SEQ ID NO: 25204 - RNA, 22 nt, synthetic construct
  source 1..22: mol_type = other RNA
gtggagagacctggcagacacc

SEQ ID NO: 25205 - RNA, 22 nt, synthetic construct
  source 1..22: mol_type = other RNA
gtggagctgggatttaaaccaa

SEQ ID NO: 25206 - RNA, 22 nt, synthetic construct
  source 1..22: mol_type = other RNA
gtggtacacgcccatagtccca

SEQ ID NO: 25207 - RNA, 22 nt, synthetic construct
  source 1..22: mol_type = other RNA
gtggtggaataataactcactg

SEQ ID NO: 25208 - RNA, 22 nt, synthetic construct
  source 1..22: mol_type = other RNA
gtggtgtctgccaggtctctcc

SEQ ID NO: 25209 - RNA, 22 nt, synthetic construct
  source 1..22: mol_type = other RNA
gtggttatgcaaatttgtcctt

SEQ ID NO: 25210 - RNA, 22 nt, synthetic construct
  source 1..22: mol_type = other RNA
gtgtaattttcataagcatttg

SEQ ID NO: 25211 - RNA, 22 nt, synthetic construct
  source 1..22: mol_type = other RNA
gtgtaccacaacacctcgctat

SEQ ID NO: 25212 - RNA, 22 nt, synthetic construct
  source 1..22: mol_type = other RNA
gtgtatcaatattagatttgct

SEQ ID NO: 25213 - RNA, 22 nt, synthetic construct
  source 1..22: mol_type = other RNA
gtgtcccttaacaataaaaagg

SEQ ID NO: 25214 - RNA, 22 nt, synthetic construct
  source 1..22: mol_type = other RNA
gtgtctgccaggtctctccact

SEQ ID NO: 25215 - RNA, 22 nt, synthetic construct
  source 1..22: mol_type = other RNA
gtgtcttcagtgcatcttatcg

SEQ ID NO: 25216 - RNA, 22 nt, synthetic construct
  source 1..22: mol_type = other RNA
gtgtgtcttcagtgcatcttat

SEQ ID NO: 25217 - RNA, 22 nt, synthetic construct
  source 1..22: mol_type = other RNA
gtgtgtgtcttcagtgcatctt

SEQ ID NO: 25218 - RNA, 22 nt, synthetic construct
  source 1..22: mol_type = other RNA
gtgttggtggagctgggattta

SEQ ID NO: 25219 - RNA, 22 nt, synthetic construct
  source 1..22: mol_type = other RNA
gtgttgtggtacacgcccatag

SEQ ID NO: 25220 - RNA, 22 nt, synthetic construct
  source 1..22: mol_type = other RNA
gtgttttgtaaactgtctctca

SEQ ID NO: 25221 - RNA, 22 nt, synthetic construct
  source 1..22: mol_type = other RNA
gtgtttttatccatgccaagcg

SEQ ID NO: 25222 - RNA, 22 nt, synthetic construct
  source 1..22: mol_type = other RNA
gttaaaaagagattaacaactg

SEQ ID NO: 25223 - RNA, 22 nt, synthetic construct
  source 1..22: mol_type = other RNA
gttaacatcgccagaaagggga

SEQ ID NO: 25224 - RNA, 22 nt, synthetic construct
  source 1..22: mol_type = other RNA
gttaactttgatcagttggtga

SEQ ID NO: 25225 - RNA, 22 nt, synthetic construct
  source 1..22: mol_type = other RNA
gttaagggacactactgggaca

SEQ ID NO: 25226 - RNA, 22 nt, synthetic construct
  source 1..22: mol_type = other RNA
gttaatgactttggcagttagt

SEQ ID NO: 25227 - RNA, 22 nt, synthetic construct
  source 1..22: mol_type = other RNA
gttactcggaaggctcaggcag

SEQ ID NO: 25228 - RNA, 22 nt, synthetic construct
  source 1..22: mol_type = other RNA
gttacttacatgctttgcagtt

SEQ ID NO: 25229 - RNA, 22 nt, synthetic construct
  source 1..22: mol_type = other RNA
gttacttagggtcacctccgta

SEQ ID NO: 25230 - RNA, 22 nt, synthetic construct
  source 1..22: mol_type = other RNA
gttagtgtttttatccatgcca

SEQ ID NO: 25231 - RNA, 22 nt, synthetic construct
  source 1..22: mol_type = other RNA
gttatactcgagattagattca

SEQ ID NO: 25232 - RNA, 22 nt, synthetic construct
  source 1..22: mol_type = other RNA
gttatgcaaatttgtccttgtt

SEQ ID NO: 25233 - RNA, 22 nt, synthetic construct
  source 1..22: mol_type = other RNA
gttattattccaccactgcact

SEQ ID NO: 25234 - RNA, 22 nt, synthetic construct
  source 1..22: mol_type = other RNA
gttcaaggctgcagtgagttat

SEQ ID NO: 25235 - RNA, 22 nt, synthetic construct
  source 1..22: mol_type = other RNA
gttcagtttggtgctggtatat

SEQ ID NO: 25236 - RNA, 22 nt, synthetic construct
  source 1..22: mol_type = other RNA
gttcattatgcacctttactcc

SEQ ID NO: 25237 - RNA, 22 nt, synthetic construct
  source 1..22: mol_type = other RNA
gttctaaggaaataaatactga

SEQ ID NO: 25238 - RNA, 22 nt, synthetic construct
  source 1..22: mol_type = other RNA
gttgaggtccaagatgcaatcc

SEQ ID NO: 25239 - RNA, 22 nt, synthetic construct
  source 1..22: mol_type = other RNA
gttgcccaggctggtttcaaac

SEQ ID NO: 25240 - RNA, 22 nt, synthetic construct
  source 1..22: mol_type = other RNA
gttggacatattttggtttaaa

SEQ ID NO: 25241 - RNA, 22 nt, synthetic construct
  source 1..22: mol_type = other RNA
gttggtgaaggtggtgtctgcc

SEQ ID NO: 25242 - RNA, 22 nt, synthetic construct
  source 1..22: mol_type = other RNA
gttggtggagctgggatttaaa

SEQ ID NO: 25243 - RNA, 22 nt, synthetic construct
  source 1..22: mol_type = other RNA
gttgtagatgagattggtcata

SEQ ID NO: 25244 - RNA, 22 nt, synthetic construct
  source 1..22: mol_type = other RNA
gttgtcaaaatcagcaaatcta

SEQ ID NO: 25245 - RNA, 22 nt, synthetic construct
  source 1..22: mol_type = other RNA
gttgtggtacacgcccatagtc

SEQ ID NO: 25246 - RNA, 22 nt, synthetic construct
  source 1..22: mol_type = other RNA
gtttaaatcccagctccaccaa

SEQ ID NO: 25247 - RNA, 22 nt, synthetic construct
  source 1..22: mol_type = other RNA
gtttaagatgaaatgcactagt

SEQ ID NO: 25248 - RNA, 22 nt, synthetic construct
  source 1..22: mol_type = other RNA
gtttacaaaacaccagccttgt

SEQ ID NO: 25249 - RNA, 22 nt, synthetic construct
  source 1..22: mol_type = other RNA
gtttatcacccgacagttgtta

SEQ ID NO: 25250 - RNA, 22 nt, synthetic construct
  source 1..22: mol_type = other RNA
gtttcaaactcaagtgatcctt

SEQ ID NO: 25251 - RNA, 22 nt, synthetic construct
  source 1..22: mol_type = other RNA
gtttccttctctgtaaaacagg

SEQ ID NO: 25252 - RNA, 22 nt, synthetic construct
  source 1..22: mol_type = other RNA
gtttggtgctggtatatcttat

SEQ ID NO: 25253 - RNA, 22 nt, synthetic construct
  source 1..22: mol_type = other RNA
gtttgtctgatggttatactcg

SEQ ID NO: 25254 - RNA, 22 nt, synthetic construct
  source 1..22: mol_type = other RNA
gttttacagagaaggaaaccga

SEQ ID NO: 25255 - RNA, 22 nt, synthetic construct
  source 1..22: mol_type = other RNA
gttttacagatgaagcactaaa

SEQ ID NO: 25256 - RNA, 22 nt, synthetic construct
  source 1..22: mol_type = other RNA
gttttagtgcttcatctgtaaa

SEQ ID NO: 25257 - RNA, 22 nt, synthetic construct
  source 1..22: mol_type = other RNA
gttttgtaaactgtctctcaat

SEQ ID NO: 25258 - RNA, 22 nt, synthetic construct
  source 1..22: mol_type = other RNA
gtttttatccatgccaagcgat

SEQ ID NO: 25259 - RNA, 22 nt, synthetic construct
  source 1..22: mol_type = other RNA
gtttttggtcaatccttatgat

SEQ ID NO: 25260 - RNA, 22 nt, synthetic construct
  source 1..22: mol_type = other RNA
taaaaaatgtctgtcactaaag

SEQ ID NO: 25261 - RNA, 22 nt, synthetic construct
  source 1..22: mol_type = other RNA
taaaaacactaactgccaaagt

SEQ ID NO: 25262 - RNA, 22 nt, synthetic construct
  source 1..22: mol_type = other RNA
taaaaagagattaacaactgtc

SEQ ID NO: 25263 - RNA, 22 nt, synthetic construct
  source 1..22: mol_type = other RNA
taaaaaggggagagttgaggtc

SEQ ID NO: 25264 - RNA, 22 nt, synthetic construct
  source 1..22: mol_type = other RNA
taaaacagggataatagtagca

SEQ ID NO: 25265 - RNA, 22 nt, synthetic construct
  source 1..22: mol_type = other RNA
taaaactagtgcatttcatctt

SEQ ID NO: 25266 - RNA, 22 nt, synthetic construct
  source 1..22: mol_type = other RNA
taaacataagatataccagcac

SEQ ID NO: 25267 - RNA, 22 nt, synthetic construct
  source 1..22: mol_type = other RNA
taaaccaaaatatgtccaactg

SEQ ID NO: 25268 - RNA, 22 nt, synthetic construct
  source 1..22: mol_type = other RNA
taaactgcaaattataaaggga

SEQ ID NO: 25269 - RNA, 22 nt, synthetic construct
  source 1..22: mol_type = other RNA
taaactgtctctcaatttgggt

SEQ ID NO: 25270 - RNA, 22 nt, synthetic construct
  source 1..22: mol_type = other RNA
taaagagaaaatcatcatcgct

SEQ ID NO: 25271 - RNA, 22 nt, synthetic construct
  source 1..22: mol_type = other RNA
taaagggaataatagtaacttg

SEQ ID NO: 25272 - RNA, 22 nt, synthetic construct
  source 1..22: mol_type = other RNA
taaaggtgcataatgaacccat

SEQ ID NO: 25273 - RNA, 22 nt, synthetic construct
  source 1..22: mol_type = other RNA
taaagtcacagggccttggcct

SEQ ID NO: 25274 - RNA, 22 nt, synthetic construct
  source 1..22: mol_type = other RNA
taaagttgtagatgagattggt

SEQ ID NO: 25275 - RNA, 22 nt, synthetic construct
  source 1..22: mol_type = other RNA
taaataatcataaggattgacc

SEQ ID NO: 25276 - RNA, 22 nt, synthetic construct
  source 1..22: mol_type = other RNA
taaatcccagctccaccaacac

SEQ ID NO: 25277 - RNA, 22 nt, synthetic construct
  source 1..22: mol_type = other RNA
taacaaagaatacaggccaagg

SEQ ID NO: 25278 - RNA, 22 nt, synthetic construct
  source 1..22: mol_type = other RNA
taacaactgtcgggtgataaac

SEQ ID NO: 25279 - RNA, 22 nt, synthetic construct
  source 1..22: mol_type = other RNA
taacaaggaatcacatatagtg

SEQ ID NO: 25280 - RNA, 22 nt, synthetic construct
  source 1..22: mol_type = other RNA
taacaataaaaaggggagagtt

SEQ ID NO: 25281 - RNA, 22 nt, synthetic construct
  source 1..22: mol_type = other RNA
taacaattttagagggtatacg

SEQ ID NO: 25282 - RNA, 22 nt, synthetic construct
  source 1..22: mol_type = other RNA
taacatcgccagaaaggggaca

SEQ ID NO: 25283 - RNA, 22 nt, synthetic construct
  source 1..22: mol_type = other RNA
taaccacagtagggttgtcaaa

SEQ ID NO: 25284 - RNA, 22 nt, synthetic construct
  source 1..22: mol_type = other RNA
taaccatcagacaaacccaaat

SEQ ID NO: 25285 - RNA, 22 nt, synthetic construct
  source 1..22: mol_type = other RNA
taactcactgcagccttgaact

SEQ ID NO: 25286 - RNA, 22 nt, synthetic construct
  source 1..22: mol_type = other RNA
taactgccaaagtcattaactt

SEQ ID NO: 25287 - RNA, 22 nt, synthetic construct
  source 1..22: mol_type = other RNA
taactgggactatgggcgtgta

SEQ ID NO: 25288 - RNA, 22 nt, synthetic construct
  source 1..22: mol_type = other RNA
taacttgacagtggagagacct

SEQ ID NO: 25289 - RNA, 22 nt, synthetic construct
  source 1..22: mol_type = other RNA
taactttgatcagttggtgaag

SEQ ID NO: 25290 - RNA, 22 nt, synthetic construct
  source 1..22: mol_type = other RNA
taacttttggccaaataccaaa

SEQ ID NO: 25291 - RNA, 22 nt, synthetic construct
  source 1..22: mol_type = other RNA
taagatataccagcaccaaact

SEQ ID NO: 25292 - RNA, 22 nt, synthetic construct
  source 1..22: mol_type = other RNA
taagatgaaatgcactagtttt

SEQ ID NO: 25293 - RNA, 22 nt, synthetic construct
  source 1..22: mol_type = other RNA
taagatgcactgaagacacaca

SEQ ID NO: 25294 - RNA, 22 nt, synthetic construct
  source 1..22: mol_type = other RNA
taagcagagtacaaggctggtg

SEQ ID NO: 25295 - RNA, 22 nt, synthetic construct
  source 1..22: mol_type = other RNA
taagcatttgaaaatgggttca

SEQ ID NO: 25296 - RNA, 22 nt, synthetic construct
  source 1..22: mol_type = other RNA
taagcctcggtttccttctctg

SEQ ID NO: 25297 - RNA, 22 nt, synthetic construct
  source 1..22: mol_type = other RNA
taaggattgaccaaaaactgaa

SEQ ID NO: 25298 - RNA, 22 nt, synthetic construct
  source 1..22: mol_type = other RNA
taagggacactactgggacaat

SEQ ID NO: 25299 - RNA, 22 nt, synthetic construct
  source 1..22: mol_type = other RNA
taagtaacaaggaatcacatat

SEQ ID NO: 25300 - RNA, 22 nt, synthetic construct
  source 1..22: mol_type = other RNA
taagtaacaattttagagggta

SEQ ID NO: 25301 - RNA, 22 nt, synthetic construct
  source 1..22: mol_type = other RNA
taataactcactgcagccttga

SEQ ID NO: 25302 - RNA, 22 nt, synthetic construct
  source 1..22: mol_type = other RNA
taatagtaacttgacagtggag

SEQ ID NO: 25303 - RNA, 22 nt, synthetic construct
  source 1..22: mol_type = other RNA
taatagtagcacctgcctaagg

SEQ ID NO: 25304 - RNA, 22 nt, synthetic construct
  source 1..22: mol_type = other RNA
taatatgtcaatgtcacaagag

SEQ ID NO: 25305 - RNA, 22 nt, synthetic construct
  source 1..22: mol_type = other RNA
taatcataaggattgaccaaaa

SEQ ID NO: 25306 - RNA, 22 nt, synthetic construct
  source 1..22: mol_type = other RNA
taatctcgagccttcttcagtc

SEQ ID NO: 25307 - RNA, 22 nt, synthetic construct
  source 1..22: mol_type = other RNA
taatctcgagtataaccatcag

SEQ ID NO: 25308 - RNA, 22 nt, synthetic construct
  source 1..22: mol_type = other RNA
taatgaacccattttcaaatgc

SEQ ID NO: 25309 - RNA, 22 nt, synthetic construct
  source 1..22: mol_type = other RNA
taatgactttggcagttagtgt

SEQ ID NO: 25310 - RNA, 22 nt, synthetic construct
  source 1..22: mol_type = other RNA
taatgcaaaagctgatctggga

SEQ ID NO: 25311 - RNA, 22 nt, synthetic construct
  source 1..22: mol_type = other RNA
tacaaaacaccagccttgtact

SEQ ID NO: 25312 - RNA, 22 nt, synthetic construct
  source 1..22: mol_type = other RNA
tacaaggctggtgttttgtaaa

SEQ ID NO: 25313 - RNA, 22 nt, synthetic construct
  source 1..22: mol_type = other RNA
tacaatcctatgaccaatctca

SEQ ID NO: 25314 - RNA, 22 nt, synthetic construct
  source 1..22: mol_type = other RNA
tacacgcccatagtcccagtta

SEQ ID NO: 25315 - RNA, 22 nt, synthetic construct
  source 1..22: mol_type = other RNA
tacactatacaatcctatgacc

SEQ ID NO: 25316 - RNA, 22 nt, synthetic construct
  source 1..22: mol_type = other RNA
tacagagaaggaaaccgaggct

SEQ ID NO: 25317 - RNA, 22 nt, synthetic construct
  source 1..22: mol_type = other RNA
tacagatgaagcactaaaacta

SEQ ID NO: 25318 - RNA, 22 nt, synthetic construct
  source 1..22: mol_type = other RNA
tacaggccaaggccctgtgact

SEQ ID NO: 25319 - RNA, 22 nt, synthetic construct
  source 1..22: mol_type = other RNA
tacatgctttgcagttggacat

SEQ ID NO: 25320 - RNA, 22 nt, synthetic construct
  source 1..22: mol_type = other RNA
taccaaagccagctaaagtcac

SEQ ID NO: 25321 - RNA, 22 nt, synthetic construct
  source 1..22: mol_type = other RNA
taccacaacacctcgctatttt

SEQ ID NO: 25322 - RNA, 22 nt, synthetic construct
  source 1..22: mol_type = other RNA
taccagcaccaaactgaacttt

SEQ ID NO: 25323 - RNA, 22 nt, synthetic construct
  source 1..22: mol_type = other RNA
taccctctaaaattgttactta

SEQ ID NO: 25324 - RNA, 22 nt, synthetic construct
  source 1..22: mol_type = other RNA
tacggaggtgaccctaagtaac

SEQ ID NO: 25325 - RNA, 22 nt, synthetic construct
  source 1..22: mol_type = other RNA
tactattatccctgttttacag

SEQ ID NO: 25326 - RNA, 22 nt, synthetic construct
  source 1..22: mol_type = other RNA
tactcgagattagattcagatg

SEQ ID NO: 25327 - RNA, 22 nt, synthetic construct
  source 1..22: mol_type = other RNA
tactcggaaggctcaggcagga

SEQ ID NO: 25328 - RNA, 22 nt, synthetic construct
  source 1..22: mol_type = other RNA
tactctgcttaatatgtcaatg

SEQ ID NO: 25329 - RNA, 22 nt, synthetic construct
  source 1..22: mol_type = other RNA
tactgtggttatgcaaatttgt

SEQ ID NO: 25330 - RNA, 22 nt, synthetic construct
  source 1..22: mol_type = other RNA
tacttacatgctttgcagttgg

SEQ ID NO: 25331 - RNA, 22 nt, synthetic construct
  source 1..22: mol_type = other RNA
tacttagggtcacctccgtata

SEQ ID NO: 25332 - RNA, 22 nt, synthetic construct
  source 1..22: mol_type = other RNA
tagaacaaggacaaatttgcat

SEQ ID NO: 25333 - RNA, 22 nt, synthetic construct
  source 1..22: mol_type = other RNA
tagaggagaaagttcagtttgg

SEQ ID NO: 25334 - RNA, 22 nt, synthetic construct
  source 1..22: mol_type = other RNA
tagaggctgaggtggaaggatc

SEQ ID NO: 25335 - RNA, 22 nt, synthetic construct
  source 1..22: mol_type = other RNA
tagagggtatacggaggtgacc

SEQ ID NO: 25336 - RNA, 22 nt, synthetic construct
  source 1..22: mol_type = other RNA
tagatgagattggtcataggat

SEQ ID NO: 25337 - RNA, 22 nt, synthetic construct
  source 1..22: mol_type = other RNA
tagattcagatgaggcattctt

SEQ ID NO: 25338 - RNA, 22 nt, synthetic construct
  source 1..22: mol_type = other RNA
tagatttgctgattttgacaac

SEQ ID NO: 25339 - RNA, 22 nt, synthetic construct
  source 1..22: mol_type = other RNA
tagcgaggtgttgtggtacacg

SEQ ID NO: 25340 - RNA, 22 nt, synthetic construct
  source 1..22: mol_type = other RNA
tagctggctttggtatttggcc

SEQ ID NO: 25341 - RNA, 22 nt, synthetic construct
  source 1..22: mol_type = other RNA
taggagatgaagtctgaggtgt

SEQ ID NO: 25342 - RNA, 22 nt, synthetic construct
  source 1..22: mol_type = other RNA
taggagtaaaggtgcataatga

SEQ ID NO: 25343 - RNA, 22 nt, synthetic construct
  source 1..22: mol_type = other RNA
taggattgtatagtgtatcaat

SEQ ID NO: 25344 - RNA, 22 nt, synthetic construct
  source 1..22: mol_type = other RNA
taggcaggtgctactattatcc

SEQ ID NO: 25345 - RNA, 22 nt, synthetic construct
  source 1..22: mol_type = other RNA
tagggtcacctccgtataccct

SEQ ID NO: 25346 - RNA, 22 nt, synthetic construct
  source 1..22: mol_type = other RNA
tagggttgtcaaaatcagcaaa

SEQ ID NO: 25347 - RNA, 22 nt, synthetic construct
  source 1..22: mol_type = other RNA
tagtaacttgacagtggagaga

SEQ ID NO: 25348 - RNA, 22 nt, synthetic construct
  source 1..22: mol_type = other RNA
tagtcccagttactcggaaggc

SEQ ID NO: 25349 - RNA, 22 nt, synthetic construct
  source 1..22: mol_type = other RNA
tagtgagaccccgtctctacaa

SEQ ID NO: 25350 - RNA, 22 nt, synthetic construct
  source 1..22: mol_type = other RNA
tagtgagcaagcaatttgcttt

SEQ ID NO: 25351 - RNA, 22 nt, synthetic construct
  source 1..22: mol_type = other RNA
tagtgcatttcatcttaaactg

SEQ ID NO: 25352 - RNA, 22 nt, synthetic construct
  source 1..22: mol_type = other RNA
tagtgcttcatctgtaaaacta

SEQ ID NO: 25353 - RNA, 22 nt, synthetic construct
  source 1..22: mol_type = other RNA
tagtgtcccttaacaataaaaa

SEQ ID NO: 25354 - RNA, 22 nt, synthetic construct
  source 1..22: mol_type = other RNA
tagtgtttttatccatgccaag

SEQ ID NO: 25355 - RNA, 22 nt, synthetic construct
  source 1..22: mol_type = other RNA
tagttttacagatgaagcacta

SEQ ID NO: 25356 - RNA, 22 nt, synthetic construct
  source 1..22: mol_type = other RNA
tagttttagtgcttcatctgta

SEQ ID NO: 25357 - RNA, 22 nt, synthetic construct
  source 1..22: mol_type = other RNA
tataaccatcagacaaacccaa

SEQ ID NO: 25358 - RNA, 22 nt, synthetic construct
  source 1..22: mol_type = other RNA
tatacaatcctatgaccaatct

SEQ ID NO: 25359 - RNA, 22 nt, synthetic construct
  source 1..22: mol_type = other RNA
tataccagcaccaaactgaact

SEQ ID NO: 25360 - RNA, 22 nt, synthetic construct
  source 1..22: mol_type = other RNA
tataccctctaaaattgttact

SEQ ID NO: 25361 - RNA, 22 nt, synthetic construct
  source 1..22: mol_type = other RNA
tatacggaggtgaccctaagta

SEQ ID NO: 25362 - RNA, 22 nt, synthetic construct
  source 1..22: mol_type = other RNA
tatactcgagattagattcaga

SEQ ID NO: 25363 - RNA, 22 nt, synthetic construct
  source 1..22: mol_type = other RNA
tatagaggctgaggtggaagga

SEQ ID NO: 25364 - RNA, 22 nt, synthetic construct
  source 1..22: mol_type = other RNA
tatagtgagcaagcaatttgct

SEQ ID NO: 25365 - RNA, 22 nt, synthetic construct
  source 1..22: mol_type = other RNA
tatatcttatgtttatcacccg

SEQ ID NO: 25366 - RNA, 22 nt, synthetic construct
  source 1..22: mol_type = other RNA
tatatgtgattccttgttactt

SEQ ID NO: 25367 - RNA, 22 nt, synthetic construct
  source 1..22: mol_type = other RNA
tatcacccgacagttgttaatc

SEQ ID NO: 25368 - RNA, 22 nt, synthetic construct
  source 1..22: mol_type = other RNA
tatccatgccaagcgatgatga

SEQ ID NO: 25369 - RNA, 22 nt, synthetic construct
  source 1..22: mol_type = other RNA
tatccctgttttacagagaagg

SEQ ID NO: 25370 - RNA, 22 nt, synthetic construct
  source 1..22: mol_type = other RNA
tatcgagaggcacatgccatct

SEQ ID NO: 25371 - RNA, 22 nt, synthetic construct
  source 1..22: mol_type = other RNA
tatcttatgtttatcacccgac

SEQ ID NO: 25372 - RNA, 22 nt, synthetic construct
  source 1..22: mol_type = other RNA
tatgaccaatctcatctacaac

SEQ ID NO: 25373 - RNA, 22 nt, synthetic construct
  source 1..22: mol_type = other RNA
tatgattatttagaggagaaag

SEQ ID NO: 25374 - RNA, 22 nt, synthetic construct
  source 1..22: mol_type = other RNA
tatgcaaatttgtccttgttct

SEQ ID NO: 25375 - RNA, 22 nt, synthetic construct
  source 1..22: mol_type = other RNA
tatgcacctttactcctaaata

SEQ ID NO: 25376 - RNA, 22 nt, synthetic construct
  source 1..22: mol_type = other RNA
tatgggcgtgtaccacaacacc

SEQ ID NO: 25377 - RNA, 22 nt, synthetic construct
  source 1..22: mol_type = other RNA
tatgtcaatgtcacaagagaga

SEQ ID NO: 25378 - RNA, 22 nt, synthetic construct
  source 1..22: mol_type = other RNA
tatgtccaactgcaaagcatgt

SEQ ID NO: 25379 - RNA, 22 nt, synthetic construct
  source 1..22: mol_type = other RNA
tatgtgattccttgttacttag

SEQ ID NO: 25380 - RNA, 22 nt, synthetic construct
  source 1..22: mol_type = other RNA
tatgttgcccaggctggtttca

SEQ ID NO: 25381 - RNA, 22 nt, synthetic construct
  source 1..22: mol_type = other RNA
tatgtttatcacccgacagttg

SEQ ID NO: 25382 - RNA, 22 nt, synthetic construct
  source 1..22: mol_type = other RNA
tattaagcagagtacaaggctg

SEQ ID NO: 25383 - RNA, 22 nt, synthetic construct
  source 1..22: mol_type = other RNA
tattagatttgctgattttgac

SEQ ID NO: 25384 - RNA, 22 nt, synthetic construct
  source 1..22: mol_type = other RNA
tattatccctgttttacagaga

SEQ ID NO: 25385 - RNA, 22 nt, synthetic construct
  source 1..22: mol_type = other RNA
tattattccaccactgcactcc

SEQ ID NO: 25386 - RNA, 22 nt, synthetic construct
  source 1..22: mol_type = other RNA
tattcaaattttatagaggctg

SEQ ID NO: 25387 - RNA, 22 nt, synthetic construct
  source 1..22: mol_type = other RNA
tattccctttataatttgcagt

SEQ ID NO: 25388 - RNA, 22 nt, synthetic construct
  source 1..22: mol_type = other RNA
tattcctgccaagaatgcctca

SEQ ID NO: 25389 - RNA, 22 nt, synthetic construct
  source 1..22: mol_type = other RNA
tattgatacactatacaatcct

SEQ ID NO: 25390 - RNA, 22 nt, synthetic construct
  source 1..22: mol_type = other RNA
tattgcagaagtgagtgtgtgt

SEQ ID NO: 25391 - RNA, 22 nt, synthetic construct
  source 1..22: mol_type = other RNA
tattgttaagggacactactgg

SEQ ID NO: 25392 - RNA, 22 nt, synthetic construct
  source 1..22: mol_type = other RNA
tatttagaggagaaagttcagt

SEQ ID NO: 25393 - RNA, 22 nt, synthetic construct
  source 1..22: mol_type = other RNA
tatttaggagtaaaggtgcata

SEQ ID NO: 25394 - RNA, 22 nt, synthetic construct
  source 1..22: mol_type = other RNA
tatttatttccttagaacaagg

SEQ ID NO: 25395 - RNA, 22 nt, synthetic construct
  source 1..22: mol_type = other RNA
tatttccttagaacaaggacaa

SEQ ID NO: 25396 - RNA, 22 nt, synthetic construct
  source 1..22: mol_type = other RNA
tatttggccaaaagttaatgac

SEQ ID NO: 25397 - RNA, 22 nt, synthetic construct
  source 1..22: mol_type = other RNA
tattttggtttaaatcccagct

SEQ ID NO: 25398 - RNA, 22 nt, synthetic construct
  source 1..22: mol_type = other RNA
tcaaactcaagtgatccttcca

SEQ ID NO: 25399 - RNA, 22 nt, synthetic construct
  source 1..22: mol_type = other RNA
tcaaagttaacatcgccagaaa

SEQ ID NO: 25400 - RNA, 22 nt, synthetic construct
  source 1..22: mol_type = other RNA
tcaaattttatagaggctgagg

SEQ ID NO: 25401 - RNA, 22 nt, synthetic construct
  source 1..22: mol_type = other RNA
tcaactctcccctttttattgt

SEQ ID NO: 25402 - RNA, 22 nt, synthetic construct
  source 1..22: mol_type = other RNA
tcaaggctgcagtgagttatta

SEQ ID NO: 25403 - RNA, 22 nt, synthetic construct
  source 1..22: mol_type = other RNA
tcaagtgatccttccacctcag

SEQ ID NO: 25404 - RNA, 22 nt, synthetic construct
  source 1..22: mol_type = other RNA
tcaagttactattattcccttt

SEQ ID NO: 25405 - RNA, 22 nt, synthetic construct
  source 1..22: mol_type = other RNA
tcaatgtcacaagagagaaaga

SEQ ID NO: 25406 - RNA, 22 nt, synthetic construct
  source 1..22: mol_type = other RNA
tcaatttgggtttgtctgatgg

SEQ ID NO: 25407 - RNA, 22 nt, synthetic construct
  source 1..22: mol_type = other RNA
tcacaagagagaaagacagact

SEQ ID NO: 25408 - RNA, 22 nt, synthetic construct
  source 1..22: mol_type = other RNA
tcacagggccttggcctgtatt

SEQ ID NO: 25409 - RNA, 22 nt, synthetic construct
  source 1..22: mol_type = other RNA
tcacatatagtgagcaagcaat

SEQ ID NO: 25410 - RNA, 22 nt, synthetic construct
  source 1..22: mol_type = other RNA
tcaccaactgatcaaagttaac

SEQ ID NO: 25411 - RNA, 22 nt, synthetic construct
  source 1..22: mol_type = other RNA
tcacccgacagttgttaatctc

SEQ ID NO: 25412 - RNA, 22 nt, synthetic construct
  source 1..22: mol_type = other RNA
tcacctccgtataccctctaaa

SEQ ID NO: 25413 - RNA, 22 nt, synthetic construct
  source 1..22: mol_type = other RNA
tcactaaagagaaaatcatcat

SEQ ID NO: 25414 - RNA, 22 nt, synthetic construct
  source 1..22: mol_type = other RNA
tcactatatgtgattccttgtt

SEQ ID NO: 25415 - RNA, 22 nt, synthetic construct
  source 1..22: mol_type = other RNA
tcacttctgcaatattcctgcc

SEQ ID NO: 25416 - RNA, 22 nt, synthetic construct
  source 1..22: mol_type = other RNA
tcacttgagtttgaaaccagcc

SEQ ID NO: 25417 - RNA, 22 nt, synthetic construct
  source 1..22: mol_type = other RNA
tcagacaaacccaaattgagag

SEQ ID NO: 25418 - RNA, 22 nt, synthetic construct
  source 1..22: mol_type = other RNA
tcagacttcatctcctaagcct

SEQ ID NO: 25419 - RNA, 22 nt, synthetic construct
  source 1..22: mol_type = other RNA
tcagatgaggcattcttggcag

SEQ ID NO: 25420 - RNA, 22 nt, synthetic construct
  source 1..22: mol_type = other RNA
tcagcaaatctaatattgatac

SEQ ID NO: 25421 - RNA, 22 nt, synthetic construct
  source 1..22: mol_type = other RNA
tcagcctctataaaatttgaat

SEQ ID NO: 25422 - RNA, 22 nt, synthetic construct
  source 1..22: mol_type = other RNA
tcagctcttcagtctgtctttc

SEQ ID NO: 25423 - RNA, 22 nt, synthetic construct
  source 1..22: mol_type = other RNA
tcagcttttgcattaatctcga

SEQ ID NO: 25424 - RNA, 22 nt, synthetic construct
  source 1..22: mol_type = other RNA
tcaggcaggaggattgcttgag

SEQ ID NO: 25425 - RNA, 22 nt, synthetic construct
  source 1..22: mol_type = other RNA
tcagtatttatttccttagaac

SEQ ID NO: 25426 - RNA, 22 nt, synthetic construct
  source 1..22: mol_type = other RNA
tcagtctggatcagctcttcag

SEQ ID NO: 25427 - RNA, 22 nt, synthetic construct
  source 1..22: mol_type = other RNA
tcagtctgtctttctctcttgt

SEQ ID NO: 25428 - RNA, 22 nt, synthetic construct
  source 1..22: mol_type = other RNA
tcagtgcatcttatcgagaggc

SEQ ID NO: 25429 - RNA, 22 nt, synthetic construct
  source 1..22: mol_type = other RNA
tcagttggtgaaggtggtgtct

SEQ ID NO: 25430 - RNA, 22 nt, synthetic construct
  source 1..22: mol_type = other RNA
tcagtttggtgctggtatatct

SEQ ID NO: 25431 - RNA, 22 nt, synthetic construct
  source 1..22: mol_type = other RNA
tcagtttttggtcaatccttat

SEQ ID NO: 25432 - RNA, 22 nt, synthetic construct
  source 1..22: mol_type = other RNA
tcataagcatttgaaaatgggt

SEQ ID NO: 25433 - RNA, 22 nt, synthetic construct
  source 1..22: mol_type = other RNA
tcataaggattgaccaaaaact

SEQ ID NO: 25434 - RNA, 22 nt, synthetic construct
  source 1..22: mol_type = other RNA
tcataggattgtatagtgtatc

SEQ ID NO: 25435 - RNA, 22 nt, synthetic construct
  source 1..22: mol_type = other RNA
tcatcatcgcttggcatggata

SEQ ID NO: 25436 - RNA, 22 nt, synthetic construct
  source 1..22: mol_type = other RNA
tcatcgcttggcatggataaaa

SEQ ID NO: 25437 - RNA, 22 nt, synthetic construct
  source 1..22: mol_type = other RNA
tcatctcctaagcctcggtttc

SEQ ID NO: 25438 - RNA, 22 nt, synthetic construct
  source 1..22: mol_type = other RNA
tcatctgaatctaatctcgagt

SEQ ID NO: 25439 - RNA, 22 nt, synthetic construct
  source 1..22: mol_type = other RNA
tcattaacttttggccaaatac

SEQ ID NO: 25440 - RNA, 22 nt, synthetic construct
  source 1..22: mol_type = other RNA
tcattatgcacctttactccta

SEQ ID NO: 25441 - RNA, 22 nt, synthetic construct
  source 1..22: mol_type = other RNA
tccaactgcaaagcatgtaagt

SEQ ID NO: 25442 - RNA, 22 nt, synthetic construct
  source 1..22: mol_type = other RNA
tccaagatgcaatcccagatca

SEQ ID NO: 25443 - RNA, 22 nt, synthetic construct
  source 1..22: mol_type = other RNA
tccaccaacacctcagacttca

SEQ ID NO: 25444 - RNA, 22 nt, synthetic construct
  source 1..22: mol_type = other RNA
tccacctcagcctctataaaat

SEQ ID NO: 25445 - RNA, 22 nt, synthetic construct
  source 1..22: mol_type = other RNA
tccactgtcaagttactattat

SEQ ID NO: 25446 - RNA, 22 nt, synthetic construct
  source 1..22: mol_type = other RNA
tccagactgaagaaggctcgag

SEQ ID NO: 25447 - RNA, 22 nt, synthetic construct
  source 1..22: mol_type = other RNA
tccatgccaagcgatgatgatt

SEQ ID NO: 25448 - RNA, 22 nt, synthetic construct
  source 1..22: mol_type = other RNA
tcccagatcagcttttgcatta

SEQ ID NO: 25449 - RNA, 22 nt, synthetic construct
  source 1..22: mol_type = other RNA
tcccagctccaccaacacctca

SEQ ID NO: 25450 - RNA, 22 nt, synthetic construct
  source 1..22: mol_type = other RNA
tcccagtagtgtcccttaacaa

SEQ ID NO: 25451 - RNA, 22 nt, synthetic construct
  source 1..22: mol_type = other RNA
tcccagttactcggaaggctca

SEQ ID NO: 25452 - RNA, 22 nt, synthetic construct
  source 1..22: mol_type = other RNA
tcccctttctggcgatgttaac

SEQ ID NO: 25453 - RNA, 22 nt, synthetic construct
  source 1..22: mol_type = other RNA
tcccctttttattgttaaggga

SEQ ID NO: 25454 - RNA, 22 nt, synthetic construct
  source 1..22: mol_type = other RNA
tcccggactcaagcaatcctcc

SEQ ID NO: 25455 - RNA, 22 nt, synthetic construct
  source 1..22: mol_type = other RNA
tccctgttttacagagaaggaa

SEQ ID NO: 25456 - RNA, 22 nt, synthetic construct
  source 1..22: mol_type = other RNA
tcccttaacaataaaaagggga

SEQ ID NO: 25457 - RNA, 22 nt, synthetic construct
  source 1..22: mol_type = other RNA
tccctttataatttgcagttta

SEQ ID NO: 25458 - RNA, 22 nt, synthetic construct
  source 1..22: mol_type = other RNA
tccgagtaactgggactatggg

SEQ ID NO: 25459 - RNA, 22 nt, synthetic construct
  source 1..22: mol_type = other RNA
tccgggagttcaaggctgcagt

SEQ ID NO: 25460 - RNA, 22 nt, synthetic construct
  source 1..22: mol_type = other RNA
tccgtataccctctaaaattgt

SEQ ID NO: 25461 - RNA, 22 nt, synthetic construct
  source 1..22: mol_type = other RNA
tcctaagcctcggtttccttct

SEQ ID NO: 25462 - RNA, 22 nt, synthetic construct
  source 1..22: mol_type = other RNA
tcctactttttgtagagacggg

SEQ ID NO: 25463 - RNA, 22 nt, synthetic construct
  source 1..22: mol_type = other RNA
tcctatgaccaatctcatctac

SEQ ID NO: 25464 - RNA, 22 nt, synthetic construct
  source 1..22: mol_type = other RNA
tcctcctgcctgagccttccga

SEQ ID NO: 25465 - RNA, 22 nt, synthetic construct
  source 1..22: mol_type = other RNA
tcctctaaataatcataaggat

SEQ ID NO: 25466 - RNA, 22 nt, synthetic construct
  source 1..22: mol_type = other RNA
tcctgccaagaatgcctcatct

SEQ ID NO: 25467 - RNA, 22 nt, synthetic construct
  source 1..22: mol_type = other RNA
tcctgcctgagccttccgagta

SEQ ID NO: 25468 - RNA, 22 nt, synthetic construct
  source 1..22: mol_type = other RNA
tccttagaacaaggacaaattt

SEQ ID NO: 25469 - RNA, 22 nt, synthetic construct
  source 1..22: mol_type = other RNA
tccttatgattatttagaggag

SEQ ID NO: 25470 - RNA, 22 nt, synthetic construct
  source 1..22: mol_type = other RNA
tccttccacctcagcctctata

SEQ ID NO: 25471 - RNA, 22 nt, synthetic construct
  source 1..22: mol_type = other RNA
tccttctctgtaaaacagggat

SEQ ID NO: 25472 - RNA, 22 nt, synthetic construct
  source 1..22: mol_type = other RNA
tccttgttacttagggtcacct

SEQ ID NO: 25473 - RNA, 22 nt, synthetic construct
  source 1..22: mol_type = other RNA
tccttgttctaaggaaataaat

SEQ ID NO: 25474 - RNA, 22 nt, synthetic construct
  source 1..22: mol_type = other RNA
tcgagaggcacatgccatctgt

SEQ ID NO: 25475 - RNA, 22 nt, synthetic construct
  source 1..22: mol_type = other RNA
tcgagattaatgcaaaagctga

SEQ ID NO: 25476 - RNA, 22 nt, synthetic construct
  source 1..22: mol_type = other RNA
tcgagattagattcagatgagg

SEQ ID NO: 25477 - RNA, 22 nt, synthetic construct
  source 1..22: mol_type = other RNA
tcgagccttcttcagtctggat

SEQ ID NO: 25478 - RNA, 22 nt, synthetic construct
  source 1..22: mol_type = other RNA
tcgagtataaccatcagacaaa

SEQ ID NO: 25479 - RNA, 22 nt, synthetic construct
  source 1..22: mol_type = other RNA
tcgataagatgcactgaagaca

SEQ ID NO: 25480 - RNA, 22 nt, synthetic construct
  source 1..22: mol_type = other RNA
tcgccagaaaggggacagatgg

SEQ ID NO: 25481 - RNA, 22 nt, synthetic construct
  source 1..22: mol_type = other RNA
tcgcttggcatggataaaaaca

SEQ ID NO: 25482 - RNA, 22 nt, synthetic construct
  source 1..22: mol_type = other RNA
tcgggtgataaacataagatat

SEQ ID NO: 25483 - RNA, 22 nt, synthetic construct
  source 1..22: mol_type = other RNA
tcggtttccttctctgtaaaac

SEQ ID NO: 25484 - RNA, 22 nt, synthetic construct
  source 1..22: mol_type = other RNA
tcgttttgagacagggtctcgc

SEQ ID NO: 25485 - RNA, 22 nt, synthetic construct
  source 1..22: mol_type = other RNA
tctaaaattgttacttacatgc

SEQ ID NO: 25486 - RNA, 22 nt, synthetic construct
  source 1..22: mol_type = other RNA
tctaatctcgagtataaccatc

SEQ ID NO: 25487 - RNA, 22 nt, synthetic construct
  source 1..22: mol_type = other RNA
tctcaatttgggtttgtctgat

SEQ ID NO: 25488 - RNA, 22 nt, synthetic construct
  source 1..22: mol_type = other RNA
tctcatctacaactttattcaa

SEQ ID NO: 25489 - RNA, 22 nt, synthetic construct
  source 1..22: mol_type = other RNA
tctccactgtcaagttactatt

SEQ ID NO: 25490 - RNA, 22 nt, synthetic construct
  source 1..22: mol_type = other RNA
tctcccctttttattgttaagg

SEQ ID NO: 25491 - RNA, 22 nt, synthetic construct
  source 1..22: mol_type = other RNA
tctcctaagcctcggtttcctt

SEQ ID NO: 25492 - RNA, 22 nt, synthetic construct
  source 1..22: mol_type = other RNA
tctcctctaaataatcataagg

SEQ ID NO: 25493 - RNA, 22 nt, synthetic construct
  source 1..22: mol_type = other RNA
tctcgagccttcttcagtctgg

SEQ ID NO: 25494 - RNA, 22 nt, synthetic construct
  source 1..22: mol_type = other RNA
tctcgagtataaccatcagaca

SEQ ID NO: 25495 - RNA, 22 nt, synthetic construct
  source 1..22: mol_type = other RNA
tctcgataagatgcactgaaga

SEQ ID NO: 25496 - RNA, 22 nt, synthetic construct
  source 1..22: mol_type = other RNA
tctctacaaaaagtaggaaaaa

SEQ ID NO: 25497 - RNA, 22 nt, synthetic construct
  source 1..22: mol_type = other RNA
tctctcaatttgggtttgtctg

SEQ ID NO: 25498 - RNA, 22 nt, synthetic construct
  source 1..22: mol_type = other RNA
tctctccactgtcaagttacta

SEQ ID NO: 25499 - RNA, 22 nt, synthetic construct
  source 1..22: mol_type = other RNA
tctctcttgtgacattgacata

SEQ ID NO: 25500 - RNA, 22 nt, synthetic construct
  source 1..22: mol_type = other RNA
tctctgtaaaacagggataata

SEQ ID NO: 25501 - RNA, 22 nt, synthetic construct
  source 1..22: mol_type = other RNA
tctcttgtgacattgacatatt

SEQ ID NO: 25502 - RNA, 22 nt, synthetic construct
  source 1..22: mol_type = other RNA
tctctttagtgacagacatttt

SEQ ID NO: 25503 - RNA, 22 nt, synthetic construct
  source 1..22: mol_type = other RNA
tctgaatctaatctcgagtata

SEQ ID NO: 25504 - RNA, 22 nt, synthetic construct
  source 1..22: mol_type = other RNA
tctgaggtgttggtggagctgg

SEQ ID NO: 25505 - RNA, 22 nt, synthetic construct
  source 1..22: mol_type = other RNA
tctgatggttatactcgagatt

SEQ ID NO: 25506 - RNA, 22 nt, synthetic construct
  source 1..22: mol_type = other RNA
tctgcaatattcctgccaagaa

SEQ ID NO: 25507 - RNA, 22 nt, synthetic construct
  source 1..22: mol_type = other RNA
tctgccaggtctctccactgtc

SEQ ID NO: 25508 - RNA, 22 nt, synthetic construct
  source 1..22: mol_type = other RNA
tctgcttaatatgtcaatgtca

SEQ ID NO: 25509 - RNA, 22 nt, synthetic construct
  source 1..22: mol_type = other RNA
tctggatcagctcttcagtctg

SEQ ID NO: 25510 - RNA, 22 nt, synthetic construct
  source 1..22: mol_type = other RNA
tctggcgatgttaactttgatc

SEQ ID NO: 25511 - RNA, 22 nt, synthetic construct
  source 1..22: mol_type = other RNA
tctgggattgcatcttggacct

SEQ ID NO: 25512 - RNA, 22 nt, synthetic construct
  source 1..22: mol_type = other RNA
tctgtaaaacagggataatagt

SEQ ID NO: 25513 - RNA, 22 nt, synthetic construct
  source 1..22: mol_type = other RNA
tctgtcactaaagagaaaatca

SEQ ID NO: 25514 - RNA, 22 nt, synthetic construct
  source 1..22: mol_type = other RNA
tctgtcccctttctggcgatgt

SEQ ID NO: 25515 - RNA, 22 nt, synthetic construct
  source 1..22: mol_type = other RNA
tctgtctttctctcttgtgaca

SEQ ID NO: 25516 - RNA, 22 nt, synthetic construct
  source 1..22: mol_type = other RNA
tcttatcgagaggcacatgcca

SEQ ID NO: 25517 - RNA, 22 nt, synthetic construct
  source 1..22: mol_type = other RNA
tcttatgtttatcacccgacag

SEQ ID NO: 25518 - RNA, 22 nt, synthetic construct
  source 1..22: mol_type = other RNA
tcttcagtctggatcagctctt

SEQ ID NO: 25519 - RNA, 22 nt, synthetic construct
  source 1..22: mol_type = other RNA
tcttcagtctgtctttctctct

SEQ ID NO: 25520 - RNA, 22 nt, synthetic construct
  source 1..22: mol_type = other RNA
tcttcagtgcatcttatcgaga

SEQ ID NO: 25521 - RNA, 22 nt, synthetic construct
  source 1..22: mol_type = other RNA
tcttggacctcaactctcccct

SEQ ID NO: 25522 - RNA, 22 nt, synthetic construct
  source 1..22: mol_type = other RNA
tcttggcaggaatattgcagaa

SEQ ID NO: 25523 - RNA, 22 nt, synthetic construct
  source 1..22: mol_type = other RNA
tcttgtgacattgacatattaa

SEQ ID NO: 25524 - RNA, 22 nt, synthetic construct
  source 1..22: mol_type = other RNA
tctttagtgacagacatttttt

SEQ ID NO: 25525 - RNA, 22 nt, synthetic construct
  source 1..22: mol_type = other RNA
tctttctctcttgtgacattga

SEQ ID NO: 25526 - RNA, 22 nt, synthetic construct
  source 1..22: mol_type = other RNA
tctttttaacaaagaatacagg

SEQ ID NO: 25527 - RNA, 22 nt, synthetic construct
  source 1..22: mol_type = other RNA
tgaaaagcaaattgcttgctca

SEQ ID NO: 25528 - RNA, 22 nt, synthetic construct
  source 1..22: mol_type = other RNA
tgaaaatgggttcattatgcac

SEQ ID NO: 25529 - RNA, 22 nt, synthetic construct
  source 1..22: mol_type = other RNA
tgaaatgcactagttttagtgc

SEQ ID NO: 25530 - RNA, 22 nt, synthetic construct
  source 1..22: mol_type = other RNA
tgaacccattttcaaatgctta

SEQ ID NO: 25531 - RNA, 22 nt, synthetic construct
  source 1..22: mol_type = other RNA
tgaactttctcctctaaataat

SEQ ID NO: 25532 - RNA, 22 nt, synthetic construct
  source 1..22: mol_type = other RNA
tgaagaaggctcgagattaatg

SEQ ID NO: 25533 - RNA, 22 nt, synthetic construct
  source 1..22: mol_type = other RNA
tgaagacacacactcacttctg

SEQ ID NO: 25534 - RNA, 22 nt, synthetic construct
  source 1..22: mol_type = other RNA
tgaagagctgatccagactgaa

SEQ ID NO: 25535 - RNA, 22 nt, synthetic construct
  source 1..22: mol_type = other RNA
tgaagcactaaaactagtgcat

SEQ ID NO: 25536 - RNA, 22 nt, synthetic construct
  source 1..22: mol_type = other RNA
tgaaggtggtgtctgccaggtc

SEQ ID NO: 25537 - RNA, 22 nt, synthetic construct
  source 1..22: mol_type = other RNA
tgaagtctgaggtgttggtgga

SEQ ID NO: 25538 - RNA, 22 nt, synthetic construct
  source 1..22: mol_type = other RNA
tgaataaagttgtagatgagat

SEQ ID NO: 25539 - RNA, 22 nt, synthetic construct
  source 1..22: mol_type = other RNA
tgaatctaatctcgagtataac

SEQ ID NO: 25540 - RNA, 22 nt, synthetic construct
  source 1..22: mol_type = other RNA
tgaattatttaggagtaaaggt

SEQ ID NO: 25541 - RNA, 22 nt, synthetic construct
  source 1..22: mol_type = other RNA
tgacaaccctactgtggttatg

SEQ ID NO: 25542 - RNA, 22 nt, synthetic construct
  source 1..22: mol_type = other RNA
tgacagtggagagacctggcag

SEQ ID NO: 25543 - RNA, 22 nt, synthetic construct
  source 1..22: mol_type = other RNA
tgacatattaagcagagtacaa

SEQ ID NO: 25544 - RNA, 22 nt, synthetic construct
  source 1..22: mol_type = other RNA
tgacattgacatattaagcaga

SEQ ID NO: 25545 - RNA, 22 nt, synthetic construct
  source 1..22: mol_type = other RNA
tgaccaaaaactgaaaagcaaa

SEQ ID NO: 25546 - RNA, 22 nt, synthetic construct
  source 1..22: mol_type = other RNA
tgaccaatctcatctacaactt

SEQ ID NO: 25547 - RNA, 22 nt, synthetic construct
  source 1..22: mol_type = other RNA
tgaccctaagtaacaaggaatc

SEQ ID NO: 25548 - RNA, 22 nt, synthetic construct
  source 1..22: mol_type = other RNA
tgactgagcgagaccctgtctc

SEQ ID NO: 25549 - RNA, 22 nt, synthetic construct
  source 1..22: mol_type = other RNA
tgactttagctggctttggtat

SEQ ID NO: 25550 - RNA, 22 nt, synthetic construct
  source 1..22: mol_type = other RNA
tgactttggcagttagtgtttt

SEQ ID NO: 25551 - RNA, 22 nt, synthetic construct
  source 1..22: mol_type = other RNA
tgagaccccgtctctacaaaaa

SEQ ID NO: 25552 - RNA, 22 nt, synthetic construct
  source 1..22: mol_type = other RNA
tgagagacagtttacaaaacac

SEQ ID NO: 25553 - RNA, 22 nt, synthetic construct
  source 1..22: mol_type = other RNA
tgagattggtcataggattgta

SEQ ID NO: 25554 - RNA, 22 nt, synthetic construct
  source 1..22: mol_type = other RNA
tgagcaagcaatttgcttttca

SEQ ID NO: 25555 - RNA, 22 nt, synthetic construct
  source 1..22: mol_type = other RNA
tgagccttccgagtaactggga

SEQ ID NO: 25556 - RNA, 22 nt, synthetic construct
  source 1..22: mol_type = other RNA
tgagcgagaccctgtctcaaaa

SEQ ID NO: 25557 - RNA, 22 nt, synthetic construct
  source 1..22: mol_type = other RNA
tgaggcattcttggcaggaata

SEQ ID NO: 25558 - RNA, 22 nt, synthetic construct
  source 1..22: mol_type = other RNA
tgaggtccaagatgcaatccca

SEQ ID NO: 25559 - RNA, 22 nt, synthetic construct
  source 1..22: mol_type = other RNA
tgaggtggaaggatcacttgag

SEQ ID NO: 25560 - RNA, 22 nt, synthetic construct
  source 1..22: mol_type = other RNA
tgaggtgttggtggagctggga

SEQ ID NO: 25561 - RNA, 22 nt, synthetic construct
  source 1..22: mol_type = other RNA
tgagtccgggagttcaaggctg

SEQ ID NO: 25562 - RNA, 22 nt, synthetic construct
  source 1..22: mol_type = other RNA
tgagtgtgtgtcttcagtgcat

SEQ ID NO: 25563 - RNA, 22 nt, synthetic construct
  source 1..22: mol_type = other RNA
tgagttattattccaccactgc

SEQ ID NO: 25564 - RNA, 22 nt, synthetic construct
  source 1..22: mol_type = other RNA
tgataaacataagatataccag

SEQ ID NO: 25565 - RNA, 22 nt, synthetic construct
  source 1..22: mol_type = other RNA
tgatacactatacaatcctatg

SEQ ID NO: 25566 - RNA, 22 nt, synthetic construct
  source 1..22: mol_type = other RNA
tgatcaaagttaacatcgccag

SEQ ID NO: 25567 - RNA, 22 nt, synthetic construct
  source 1..22: mol_type = other RNA
tgatcagttggtgaaggtggtg

SEQ ID NO: 25568 - RNA, 22 nt, synthetic construct
  source 1..22: mol_type = other RNA
tgatccagactgaagaaggctc

SEQ ID NO: 25569 - RNA, 22 nt, synthetic construct
  source 1..22: mol_type = other RNA
tgatccttccacctcagcctct

SEQ ID NO: 25570 - RNA, 22 nt, synthetic construct
  source 1..22: mol_type = other RNA
tgatctgggattgcatcttgga

SEQ ID NO: 25571 - RNA, 22 nt, synthetic construct
  source 1..22: mol_type = other RNA
tgatgattttctctttagtgac

SEQ ID NO: 25572 - RNA, 22 nt, synthetic construct
  source 1..22: mol_type = other RNA
tgatggttatactcgagattag

SEQ ID NO: 25573 - RNA, 22 nt, synthetic construct
  source 1..22: mol_type = other RNA
tgattatttagaggagaaagtt

SEQ ID NO: 25574 - RNA, 22 nt, synthetic construct
  source 1..22: mol_type = other RNA
tgattccttgttacttagggtc

SEQ ID NO: 25575 - RNA, 22 nt, synthetic construct
  source 1..22: mol_type = other RNA
tgattttctctttagtgacaga

SEQ ID NO: 25576 - RNA, 22 nt, synthetic construct
  source 1..22: mol_type = other RNA
tgattttgacaaccctactgtg

SEQ ID NO: 25577 - RNA, 22 nt, synthetic construct
  source 1..22: mol_type = other RNA
tgcaaaagctgatctgggattg

SEQ ID NO: 25578 - RNA, 22 nt, synthetic construct
  source 1..22: mol_type = other RNA
tgcaaagcatgtaagtaacaat

SEQ ID NO: 25579 - RNA, 22 nt, synthetic construct
  source 1..22: mol_type = other RNA
tgcaaatttgtccttgttctaa

SEQ ID NO: 25580 - RNA, 22 nt, synthetic construct
  source 1..22: mol_type = other RNA
tgcaatattcctgccaagaatg

SEQ ID NO: 25581 - RNA, 22 nt, synthetic construct
  source 1..22: mol_type = other RNA
tgcaatcccagatcagcttttg

SEQ ID NO: 25582 - RNA, 22 nt, synthetic construct
  source 1..22: mol_type = other RNA
tgcacaagcccttaggcaggtg

SEQ ID NO: 25583 - RNA, 22 nt, synthetic construct
  source 1..22: mol_type = other RNA
tgcacctttactcctaaataat

SEQ ID NO: 25584 - RNA, 22 nt, synthetic construct
  source 1..22: mol_type = other RNA
tgcactagttttagtgcttcat

SEQ ID NO: 25585 - RNA, 22 nt, synthetic construct
  source 1..22: mol_type = other RNA
tgcactgaagacacacactcac

SEQ ID NO: 25586 - RNA, 22 nt, synthetic construct
  source 1..22: mol_type = other RNA
tgcagaagtgagtgtgtgtctt

SEQ ID NO: 25587 - RNA, 22 nt, synthetic construct
  source 1..22: mol_type = other RNA
tgcagtgagttattattccacc

SEQ ID NO: 25588 - RNA, 22 nt, synthetic construct
  source 1..22: mol_type = other RNA
tgcagtggtggaataataactc

SEQ ID NO: 25589 - RNA, 22 nt, synthetic construct
  source 1..22: mol_type = other RNA
tgcagttggacatattttggtt

SEQ ID NO: 25590 - RNA, 22 nt, synthetic construct
  source 1..22: mol_type = other RNA
tgcagtttaagatgaaatgcac

SEQ ID NO: 25591 - RNA, 22 nt, synthetic construct
  source 1..22: mol_type = other RNA
tgcataaccacagtagggttgt

SEQ ID NO: 25592 - RNA, 22 nt, synthetic construct
  source 1..22: mol_type = other RNA
tgcataatgaacccattttcaa

SEQ ID NO: 25593 - RNA, 22 nt, synthetic construct
  source 1..22: mol_type = other RNA
tgcatcttatcgagaggcacat

SEQ ID NO: 25594 - RNA, 22 nt, synthetic construct
  source 1..22: mol_type = other RNA
tgcatcttggacctcaactctc

SEQ ID NO: 25595 - RNA, 22 nt, synthetic construct
  source 1..22: mol_type = other RNA
tgcattaatctcgagccttctt

SEQ ID NO: 25596 - RNA, 22 nt, synthetic construct
  source 1..22: mol_type = other RNA
tgcatttcatcttaaactgcaa

SEQ ID NO: 25597 - RNA, 22 nt, synthetic construct
  source 1..22: mol_type = other RNA
tgccaaagtcattaacttttgg

SEQ ID NO: 25598 - RNA, 22 nt, synthetic construct
  source 1..22: mol_type = other RNA
tgccaagaatgcctcatctgaa

SEQ ID NO: 25599 - RNA, 22 nt, synthetic construct
  source 1..22: mol_type = other RNA
tgccaagcgatgatgattttct

SEQ ID NO: 25600 - RNA, 22 nt, synthetic construct
  source 1..22: mol_type = other RNA
tgccaggtctctccactgtcaa

SEQ ID NO: 25601 - RNA, 22 nt, synthetic construct
  source 1..22: mol_type = other RNA
tgccatctgtcccctttctggc

SEQ ID NO: 25602 - RNA, 22 nt, synthetic construct
  source 1..22: mol_type = other RNA
tgcccaggctggtttcaaactc

SEQ ID NO: 25603 - RNA, 22 nt, synthetic construct
  source 1..22: mol_type = other RNA
tgcctcatctgaatctaatctc

SEQ ID NO: 25604 - RNA, 22 nt, synthetic construct
  source 1..22: mol_type = other RNA
tgcctctcgataagatgcactg

SEQ ID NO: 25605 - RNA, 22 nt, synthetic construct
  source 1..22: mol_type = other RNA
tgcctgagccttccgagtaact

SEQ ID NO: 25606 - RNA, 22 nt, synthetic construct
  source 1..22: mol_type = other RNA
tgctactattatccctgtttta

SEQ ID NO: 25607 - RNA, 22 nt, synthetic construct
  source 1..22: mol_type = other RNA
tgctcactatatgtgattcctt

SEQ ID NO: 25608 - RNA, 22 nt, synthetic construct
  source 1..22: mol_type = other RNA
tgctgattttgacaaccctact

SEQ ID NO: 25609 - RNA, 22 nt, synthetic construct
  source 1..22: mol_type = other RNA
tgctggtatatcttatgtttat

SEQ ID NO: 25610 - RNA, 22 nt, synthetic construct
  source 1..22: mol_type = other RNA
tgcttaatatgtcaatgtcaca

SEQ ID NO: 25611 - RNA, 22 nt, synthetic construct
  source 1..22: mol_type = other RNA
tgcttcatctgtaaaactactt

SEQ ID NO: 25612 - RNA, 22 nt, synthetic construct
  source 1..22: mol_type = other RNA
tgcttgctcactatatgtgatt

SEQ ID NO: 25613 - RNA, 22 nt, synthetic construct
  source 1..22: mol_type = other RNA
tgctttgcagttggacatattt

SEQ ID NO: 25614 - RNA, 22 nt, synthetic construct
  source 1..22: mol_type = other RNA
tgcttttcagtttttggtcaat

SEQ ID NO: 25615 - RNA, 22 nt, synthetic construct
  source 1..22: mol_type = other RNA
tggaaggatcacttgagtttga

SEQ ID NO: 25616 - RNA, 22 nt, synthetic construct
  source 1..22: mol_type = other RNA
tggaataataactcactgcagc

SEQ ID NO: 25617 - RNA, 22 nt, synthetic construct
  source 1..22: mol_type = other RNA
tggacatattttggtttaaatc

SEQ ID NO: 25618 - RNA, 22 nt, synthetic construct
  source 1..22: mol_type = other RNA
tggacctcaactctcccctttt

SEQ ID NO: 25619 - RNA, 22 nt, synthetic construct
  source 1..22: mol_type = other RNA
tggagagacctggcagacacca

SEQ ID NO: 25620 - RNA, 22 nt, synthetic construct
  source 1..22: mol_type = other RNA
tggagctgggatttaaaccaaa

SEQ ID NO: 25621 - RNA, 22 nt, synthetic construct
  source 1..22: mol_type = other RNA
tggagtgcagtggtggaataat

SEQ ID NO: 25622 - RNA, 22 nt, synthetic construct
  source 1..22: mol_type = other RNA
tggataaaaacactaactgcca

SEQ ID NO: 25623 - RNA, 22 nt, synthetic construct
  source 1..22: mol_type = other RNA
tggatcagctcttcagtctgtc

SEQ ID NO: 25624 - RNA, 22 nt, synthetic construct
  source 1..22: mol_type = other RNA
tggcagacaccaccttcaccaa

SEQ ID NO: 25625 - RNA, 22 nt, synthetic construct
  source 1..22: mol_type = other RNA
tggcaggaatattgcagaagtg

SEQ ID NO: 25626 - RNA, 22 nt, synthetic construct
  source 1..22: mol_type = other RNA
tggcagttagtgtttttatcca

SEQ ID NO: 25627 - RNA, 22 nt, synthetic construct
  source 1..22: mol_type = other RNA
tggcatggataaaaacactaac

SEQ ID NO: 25628 - RNA, 22 nt, synthetic construct
  source 1..22: mol_type = other RNA
tggcatgtgcctctcgataaga

SEQ ID NO: 25629 - RNA, 22 nt, synthetic construct
  source 1..22: mol_type = other RNA
tggccaaaagttaatgactttg

SEQ ID NO: 25630 - RNA, 22 nt, synthetic construct
  source 1..22: mol_type = other RNA
tggccaaataccaaagccagct

SEQ ID NO: 25631 - RNA, 22 nt, synthetic construct
  source 1..22: mol_type = other RNA
tggcctgtattctttgttaaaa

SEQ ID NO: 25632 - RNA, 22 nt, synthetic construct
  source 1..22: mol_type = other RNA
tggcgatgttaactttgatcag

SEQ ID NO: 25633 - RNA, 22 nt, synthetic construct
  source 1..22: mol_type = other RNA
tggctttggtatttggccaaaa

SEQ ID NO: 25634 - RNA, 22 nt, synthetic construct
  source 1..22: mol_type = other RNA
tgggactatgggcgtgtaccac

SEQ ID NO: 25635 - RNA, 22 nt, synthetic construct
  source 1..22: mol_type = other RNA
tgggattgcatcttggacctca

SEQ ID NO: 25636 - RNA, 22 nt, synthetic construct
  source 1..22: mol_type = other RNA
tgggatttaaaccaaaatatgt

SEQ ID NO: 25637 - RNA, 22 nt, synthetic construct
  source 1..22: mol_type = other RNA
tgggcgtgtaccacaacacctc

SEQ ID NO: 25638 - RNA, 22 nt, synthetic construct
  source 1..22: mol_type = other RNA
tgggttcattatgcacctttac

SEQ ID NO: 25639 - RNA, 22 nt, synthetic construct
  source 1..22: mol_type = other RNA
tgggtttgtctgatggttatac

SEQ ID NO: 25640 - RNA, 22 nt, synthetic construct
  source 1..22: mol_type = other RNA
tggtacacgcccatagtcccag

SEQ ID NO: 25641 - RNA, 22 nt, synthetic construct
  source 1..22: mol_type = other RNA
tggtatatcttatgtttatcac

SEQ ID NO: 25642 - RNA, 22 nt, synthetic construct
  source 1..22: mol_type = other RNA
tggtatttggccaaaagttaat

SEQ ID NO: 25643 - RNA, 22 nt, synthetic construct
  source 1..22: mol_type = other RNA
tggtcaatccttatgattattt

SEQ ID NO: 25644 - RNA, 22 nt, synthetic construct
  source 1..22: mol_type = other RNA
tggtcataggattgtatagtgt

SEQ ID NO: 25645 - RNA, 22 nt, synthetic construct
  source 1..22: mol_type = other RNA
tggtgaaggtggtgtctgccag

SEQ ID NO: 25646 - RNA, 22 nt, synthetic construct
  source 1..22: mol_type = other RNA
tggtgctggtatatcttatgtt

SEQ ID NO: 25647 - RNA, 22 nt, synthetic construct
  source 1..22: mol_type = other RNA
tggtggaataataactcactgc

SEQ ID NO: 25648 - RNA, 22 nt, synthetic construct
  source 1..22: mol_type = other RNA
tggtggagctgggatttaaacc

SEQ ID NO: 25649 - RNA, 22 nt, synthetic construct
  source 1..22: mol_type = other RNA
tggtgtctgccaggtctctcca

SEQ ID NO: 25650 - RNA, 22 nt, synthetic construct
  source 1..22: mol_type = other RNA
tggtgttttgtaaactgtctct

SEQ ID NO: 25651 - RNA, 22 nt, synthetic construct
  source 1..22: mol_type = other RNA
tggttatactcgagattagatt

SEQ ID NO: 25652 - RNA, 22 nt, synthetic construct
  source 1..22: mol_type = other RNA
tggttatgcaaatttgtccttg

SEQ ID NO: 25653 - RNA, 22 nt, synthetic construct
  source 1..22: mol_type = other RNA
tggtttaaatcccagctccacc

SEQ ID NO: 25654 - RNA, 22 nt, synthetic construct
  source 1..22: mol_type = other RNA
tggtttcaaactcaagtgatcc

SEQ ID NO: 25655 - RNA, 22 nt, synthetic construct
  source 1..22: mol_type = other RNA
tgtaaaacagggataatagtag

SEQ ID NO: 25656 - RNA, 22 nt, synthetic construct
  source 1..22: mol_type = other RNA
tgtaaactgtctctcaatttgg

SEQ ID NO: 25657 - RNA, 22 nt, synthetic construct
  source 1..22: mol_type = other RNA
tgtaagtaacaattttagaggg

SEQ ID NO: 25658 - RNA, 22 nt, synthetic construct
  source 1..22: mol_type = other RNA
tgtaccacaacacctcgctatt

SEQ ID NO: 25659 - RNA, 22 nt, synthetic construct
  source 1..22: mol_type = other RNA
tgtactctgcttaatatgtcaa

SEQ ID NO: 25660 - RNA, 22 nt, synthetic construct
  source 1..22: mol_type = other RNA
tgtagatgagattggtcatagg

SEQ ID NO: 25661 - RNA, 22 nt, synthetic construct
  source 1..22: mol_type = other RNA
tgtatcaatattagatttgctg

SEQ ID NO: 25662 - RNA, 22 nt, synthetic construct
  source 1..22: mol_type = other RNA
tgtcaaaatcagcaaatctaat

SEQ ID NO: 25663 - RNA, 22 nt, synthetic construct
  source 1..22: mol_type = other RNA
tgtcaagttactattattccct

SEQ ID NO: 25664 - RNA, 22 nt, synthetic construct
  source 1..22: mol_type = other RNA
tgtcaatgtcacaagagagaaa

SEQ ID NO: 25665 - RNA, 22 nt, synthetic construct
  source 1..22: mol_type = other RNA
tgtcacaagagagaaagacaga

SEQ ID NO: 25666 - RNA, 22 nt, synthetic construct
  source 1..22: mol_type = other RNA
tgtcactaaagagaaaatcatc

SEQ ID NO: 25667 - RNA, 22 nt, synthetic construct
  source 1..22: mol_type = other RNA
tgtccaactgcaaagcatgtaa

SEQ ID NO: 25668 - RNA, 22 nt, synthetic construct
  source 1..22: mol_type = other RNA
tgtcccagtagtgtcccttaac

SEQ ID NO: 25669 - RNA, 22 nt, synthetic construct
  source 1..22: mol_type = other RNA
tgtcccctttctggcgatgtta

SEQ ID NO: 25670 - RNA, 22 nt, synthetic construct
  source 1..22: mol_type = other RNA
tgtcccttaacaataaaaaggg

SEQ ID NO: 25671 - RNA, 22 nt, synthetic construct
  source 1..22: mol_type = other RNA
tgtccttgttctaaggaaataa

SEQ ID NO: 25672 - RNA, 22 nt, synthetic construct
  source 1..22: mol_type = other RNA
tgtcgggtgataaacataagat

SEQ ID NO: 25673 - RNA, 22 nt, synthetic construct
  source 1..22: mol_type = other RNA
tgtctgatggttatactcgaga

SEQ ID NO: 25674 - RNA, 22 nt, synthetic construct
  source 1..22: mol_type = other RNA
tgtctgccaggtctctccactg

SEQ ID NO: 25675 - RNA, 22 nt, synthetic construct
  source 1..22: mol_type = other RNA
tgtctgtcactaaagagaaaat

SEQ ID NO: 25676 - RNA, 22 nt, synthetic construct
  source 1..22: mol_type = other RNA
tgtcttcagtgcatcttatcga

SEQ ID NO: 25677 - RNA, 22 nt, synthetic construct
  source 1..22: mol_type = other RNA
tgtctttctctcttgtgacatt

SEQ ID NO: 25678 - RNA, 22 nt, synthetic construct
  source 1..22: mol_type = other RNA
tgtgacattgacatattaagca

SEQ ID NO: 25679 - RNA, 22 nt, synthetic construct
  source 1..22: mol_type = other RNA
tgtgactttagctggctttggt

SEQ ID NO: 25680 - RNA, 22 nt, synthetic construct
  source 1..22: mol_type = other RNA
tgtgattccttgttacttaggg

SEQ ID NO: 25681 - RNA, 22 nt, synthetic construct
  source 1..22: mol_type = other RNA
tgtgcctctcgataagatgcac

SEQ ID NO: 25682 - RNA, 22 nt, synthetic construct
  source 1..22: mol_type = other RNA
tgtggtacacgcccatagtccc

SEQ ID NO: 25683 - RNA, 22 nt, synthetic construct
  source 1..22: mol_type = other RNA
tgtggttatgcaaatttgtcct

SEQ ID NO: 25684 - RNA, 22 nt, synthetic construct
  source 1..22: mol_type = other RNA
tgtgtcttcagtgcatcttatc

SEQ ID NO: 25685 - RNA, 22 nt, synthetic construct
  source 1..22: mol_type = other RNA
tgtgtgtcttcagtgcatctta

SEQ ID NO: 25686 - RNA, 22 nt, synthetic construct
  source 1..22: mol_type = other RNA
tgttaactttgatcagttggtg

SEQ ID NO: 25687 - RNA, 22 nt, synthetic construct
  source 1..22: mol_type = other RNA
tgttaagggacactactgggac

SEQ ID NO: 25688 - RNA, 22 nt, synthetic construct
  source 1..22: mol_type = other RNA
tgttacttacatgctttgcagt

SEQ ID NO: 25689 - RNA, 22 nt, synthetic construct
  source 1..22: mol_type = other RNA
tgttacttagggtcacctccgt

SEQ ID NO: 25690 - RNA, 22 nt, synthetic construct
  source 1..22: mol_type = other RNA
tgttctaaggaaataaatactg

SEQ ID NO: 25691 - RNA, 22 nt, synthetic construct
  source 1..22: mol_type = other RNA
tgttgcccaggctggtttcaaa

SEQ ID NO: 25692 - RNA, 22 nt, synthetic construct
  source 1..22: mol_type = other RNA
tgttggtggagctgggatttaa

SEQ ID NO: 25693 - RNA, 22 nt, synthetic construct
  source 1..22: mol_type = other RNA
tgttgtggtacacgcccatagt

SEQ ID NO: 25694 - RNA, 22 nt, synthetic construct
  source 1..22: mol_type = other RNA
tgtttatcacccgacagttgtt

SEQ ID NO: 25695 - RNA, 22 nt, synthetic construct
  source 1..22: mol_type = other RNA
tgttttacagagaaggaaaccg

SEQ ID NO: 25696 - RNA, 22 nt, synthetic construct
  source 1..22: mol_type = other RNA
tgttttgtaaactgtctctcaa

SEQ ID NO: 25697 - RNA, 22 nt, synthetic construct
  source 1..22: mol_type = other RNA
tgtttttatccatgccaagcga

SEQ ID NO: 25698 - RNA, 22 nt, synthetic construct
  source 1..22: mol_type = other RNA
ttaaaccaaaatatgtccaact

SEQ ID NO: 25699 - RNA, 22 nt, synthetic construct
  source 1..22: mol_type = other RNA
ttaaactgcaaattataaaggg

SEQ ID NO: 25700 - RNA, 22 nt, synthetic construct
  source 1..22: mol_type = other RNA
ttaaatcccagctccaccaaca

SEQ ID NO: 25701 - RNA, 22 nt, synthetic construct
  source 1..22: mol_type = other RNA
ttaacaaagaatacaggccaag

SEQ ID NO: 25702 - RNA, 22 nt, synthetic construct
  source 1..22: mol_type = other RNA
ttaacaactgtcgggtgataaa

SEQ ID NO: 25703 - RNA, 22 nt, synthetic construct
  source 1..22: mol_type = other RNA
ttaacaataaaaaggggagagt

SEQ ID NO: 25704 - RNA, 22 nt, synthetic construct
  source 1..22: mol_type = other RNA
ttaacatcgccagaaaggggac

SEQ ID NO: 25705 - RNA, 22 nt, synthetic construct
  source 1..22: mol_type = other RNA
ttaactttgatcagttggtgaa

SEQ ID NO: 25706 - RNA, 22 nt, synthetic construct
  source 1..22: mol_type = other RNA
ttaacttttggccaaataccaa

SEQ ID NO: 25707 - RNA, 22 nt, synthetic construct
  source 1..22: mol_type = other RNA
ttaagatgaaatgcactagttt

SEQ ID NO: 25708 - RNA, 22 nt, synthetic construct
  source 1..22: mol_type = other RNA
ttaagcagagtacaaggctggt

SEQ ID NO: 25709 - RNA, 22 nt, synthetic construct
  source 1..22: mol_type = other RNA
ttaagggacactactgggacaa

SEQ ID NO: 25710 - RNA, 22 nt, synthetic construct
  source 1..22: mol_type = other RNA
ttaatatgtcaatgtcacaaga

SEQ ID NO: 25711 - RNA, 22 nt, synthetic construct
  source 1..22: mol_type = other RNA
ttaatctcgagccttcttcagt

SEQ ID NO: 25712 - RNA, 22 nt, synthetic construct
  source 1..22: mol_type = other RNA
ttaatgactttggcagttagtg

SEQ ID NO: 25713 - RNA, 22 nt, synthetic construct
  source 1..22: mol_type = other RNA
ttaatgcaaaagctgatctggg

SEQ ID NO: 25714 - RNA, 22 nt, synthetic construct
  source 1..22: mol_type = other RNA
ttacaaaacaccagccttgtac

SEQ ID NO: 25715 - RNA, 22 nt, synthetic construct
  source 1..22: mol_type = other RNA
ttacagagaaggaaaccgaggc

SEQ ID NO: 25716 - RNA, 22 nt, synthetic construct
  source 1..22: mol_type = other RNA
ttacagatgaagcactaaaact

SEQ ID NO: 25717 - RNA, 22 nt, synthetic construct
  source 1..22: mol_type = other RNA
ttacatgctttgcagttggaca

SEQ ID NO: 25718 - RNA, 22 nt, synthetic construct
  source 1..22: mol_type = other RNA
ttactcggaaggctcaggcagg

SEQ ID NO: 25719 - RNA, 22 nt, synthetic construct
  source 1..22: mol_type = other RNA
ttacttacatgctttgcagttg

SEQ ID NO: 25720 - RNA, 22 nt, synthetic construct
  source 1..22: mol_type = other RNA
ttacttagggtcacctccgtat

SEQ ID NO: 25721 - RNA, 22 nt, synthetic construct
  source 1..22: mol_type = other RNA
ttagaacaaggacaaatttgca

SEQ ID NO: 25722 - RNA, 22 nt, synthetic construct
  source 1..22: mol_type = other RNA
ttagaggagaaagttcagtttg

SEQ ID NO: 25723 - RNA, 22 nt, synthetic construct
  source 1..22: mol_type = other RNA
ttagagggtatacggaggtgac

SEQ ID NO: 25724 - RNA, 22 nt, synthetic construct
  source 1..22: mol_type = other RNA
ttagattcagatgaggcattct

SEQ ID NO: 25725 - RNA, 22 nt, synthetic construct
  source 1..22: mol_type = other RNA
ttagatttgctgattttgacaa

SEQ ID NO: 25726 - RNA, 22 nt, synthetic construct
  source 1..22: mol_type = other RNA
ttagctggctttggtatttggc

SEQ ID NO: 25727 - RNA, 22 nt, synthetic construct
  source 1..22: mol_type = other RNA
ttaggagatgaagtctgaggtg

SEQ ID NO: 25728 - RNA, 22 nt, synthetic construct
  source 1..22: mol_type = other RNA
ttaggagtaaaggtgcataatg

SEQ ID NO: 25729 - RNA, 22 nt, synthetic construct
  source 1..22: mol_type = other RNA
ttaggcaggtgctactattatc

SEQ ID NO: 25730 - RNA, 22 nt, synthetic construct
  source 1..22: mol_type = other RNA
ttagggtcacctccgtataccc

SEQ ID NO: 25731 - RNA, 22 nt, synthetic construct
  source 1..22: mol_type = other RNA
ttagtgcttcatctgtaaaact

SEQ ID NO: 25732 - RNA, 22 nt, synthetic construct
  source 1..22: mol_type = other RNA
ttagtgtttttatccatgccaa

SEQ ID NO: 25733 - RNA, 22 nt, synthetic construct
  source 1..22: mol_type = other RNA
ttatactcgagattagattcag

SEQ ID NO: 25734 - RNA, 22 nt, synthetic construct
  source 1..22: mol_type = other RNA
ttatagaggctgaggtggaagg

SEQ ID NO: 25735 - RNA, 22 nt, synthetic construct
  source 1..22: mol_type = other RNA
ttatcacccgacagttgttaat

SEQ ID NO: 25736 - RNA, 22 nt, synthetic construct
  source 1..22: mol_type = other RNA
ttatccatgccaagcgatgatg

SEQ ID NO: 25737 - RNA, 22 nt, synthetic construct
  source 1..22: mol_type = other RNA
ttatccctgttttacagagaag

SEQ ID NO: 25738 - RNA, 22 nt, synthetic construct
  source 1..22: mol_type = other RNA
ttatcgagaggcacatgccatc

SEQ ID NO: 25739 - RNA, 22 nt, synthetic construct
  source 1..22: mol_type = other RNA
ttatgcaaatttgtccttgttc

SEQ ID NO: 25740 - RNA, 22 nt, synthetic construct
  source 1..22: mol_type = other RNA
ttatgcacctttactcctaaat

SEQ ID NO: 25741 - RNA, 22 nt, synthetic construct
  source 1..22: mol_type = other RNA
ttatgtttatcacccgacagtt

SEQ ID NO: 25742 - RNA, 22 nt, synthetic construct
  source 1..22: mol_type = other RNA
ttattattccaccactgcactc

SEQ ID NO: 25743 - RNA, 22 nt, synthetic construct
  source 1..22: mol_type = other RNA
ttattccctttataatttgcag

SEQ ID NO: 25744 - RNA, 22 nt, synthetic construct
  source 1..22: mol_type = other RNA
ttattgttaagggacactactg

SEQ ID NO: 25745 - RNA, 22 nt, synthetic construct
  source 1..22: mol_type = other RNA
ttatttagaggagaaagttcag

SEQ ID NO: 25746 - RNA, 22 nt, synthetic construct
  source 1..22: mol_type = other RNA
ttatttaggagtaaaggtgcat

SEQ ID NO: 25747 - RNA, 22 nt, synthetic construct
  source 1..22: mol_type = other RNA
ttatttccttagaacaaggaca

SEQ ID NO: 25748 - RNA, 22 nt, synthetic construct
  source 1..22: mol_type = other RNA
ttcaaactcaagtgatccttcc

SEQ ID NO: 25749 - RNA, 22 nt, synthetic construct
  source 1..22: mol_type = other RNA
ttcaaattttatagaggctgag

SEQ ID NO: 25750 - RNA, 22 nt, synthetic construct
  source 1..22: mol_type = other RNA
ttcaaggctgcagtgagttatt

SEQ ID NO: 25751 - RNA, 22 nt, synthetic construct
  source 1..22: mol_type = other RNA
ttcaccaactgatcaaagttaa

SEQ ID NO: 25752 - RNA, 22 nt, synthetic construct
  source 1..22: mol_type = other RNA
ttcagatgaggcattcttggca

SEQ ID NO: 25753 - RNA, 22 nt, synthetic construct
  source 1..22: mol_type = other RNA
ttcagtctggatcagctcttca

SEQ ID NO: 25754 - RNA, 22 nt, synthetic construct
  source 1..22: mol_type = other RNA
ttcagtctgtctttctctcttg

SEQ ID NO: 25755 - RNA, 22 nt, synthetic construct
  source 1..22: mol_type = other RNA
ttcagtgcatcttatcgagagg

SEQ ID NO: 25756 - RNA, 22 nt, synthetic construct
  source 1..22: mol_type = other RNA
ttcagtttggtgctggtatatc

SEQ ID NO: 25757 - RNA, 22 nt, synthetic construct
  source 1..22: mol_type = other RNA
ttcagtttttggtcaatcctta

SEQ ID NO: 25758 - RNA, 22 nt, synthetic construct
  source 1..22: mol_type = other RNA
ttcataagcatttgaaaatggg

SEQ ID NO: 25759 - RNA, 22 nt, synthetic construct
  source 1..22: mol_type = other RNA
ttcatctcctaagcctcggttt

SEQ ID NO: 25760 - RNA, 22 nt, synthetic construct
  source 1..22: mol_type = other RNA
ttcattatgcacctttactcct

SEQ ID NO: 25761 - RNA, 22 nt, synthetic construct
  source 1..22: mol_type = other RNA
ttccacctcagcctctataaaa

SEQ ID NO: 25762 - RNA, 22 nt, synthetic construct
  source 1..22: mol_type = other RNA
ttccctttataatttgcagttt

SEQ ID NO: 25763 - RNA, 22 nt, synthetic construct
  source 1..22: mol_type = other RNA
ttccgagtaactgggactatgg

SEQ ID NO: 25764 - RNA, 22 nt, synthetic construct
  source 1..22: mol_type = other RNA
ttcctactttttgtagagacgg

SEQ ID NO: 25765 - RNA, 22 nt, synthetic construct
  source 1..22: mol_type = other RNA
ttcctgccaagaatgcctcatc

SEQ ID NO: 25766 - RNA, 22 nt, synthetic construct
  source 1..22: mol_type = other RNA
ttccttagaacaaggacaaatt

SEQ ID NO: 25767 - RNA, 22 nt, synthetic construct
  source 1..22: mol_type = other RNA
ttccttctctgtaaaacaggga

SEQ ID NO: 25768 - RNA, 22 nt, synthetic construct
  source 1..22: mol_type = other RNA
ttccttgttacttagggtcacc

SEQ ID NO: 25769 - RNA, 22 nt, synthetic construct
  source 1..22: mol_type = other RNA
ttcgttttgagacagggtctcg

SEQ ID NO: 25770 - RNA, 22 nt, synthetic construct
  source 1..22: mol_type = other RNA
ttctcctctaaataatcataag

SEQ ID NO: 25771 - RNA, 22 nt, synthetic construct
  source 1..22: mol_type = other RNA
ttctctcttgtgacattgacat

SEQ ID NO: 25772 - RNA, 22 nt, synthetic construct
  source 1..22: mol_type = other RNA
ttctctgtaaaacagggataat

SEQ ID NO: 25773 - RNA, 22 nt, synthetic construct
  source 1..22: mol_type = other RNA
ttctctttagtgacagacattt

SEQ ID NO: 25774 - RNA, 22 nt, synthetic construct
  source 1..22: mol_type = other RNA
ttctgcaatattcctgccaaga

SEQ ID NO: 25775 - RNA, 22 nt, synthetic construct
  source 1..22: mol_type = other RNA
ttctggcgatgttaactttgat

SEQ ID NO: 25776 - RNA, 22 nt, synthetic construct
  source 1..22: mol_type = other RNA
ttcttcagtctggatcagctct

SEQ ID NO: 25777 - RNA, 22 nt, synthetic construct
  source 1..22: mol_type = other RNA
ttcttggcaggaatattgcaga

SEQ ID NO: 25778 - RNA, 22 nt, synthetic construct
  source 1..22: mol_type = other RNA
ttgaaaatgggttcattatgca

SEQ ID NO: 25779 - RNA, 22 nt, synthetic construct
  source 1..22: mol_type = other RNA
ttgaataaagttgtagatgaga

SEQ ID NO: 25780 - RNA, 22 nt, synthetic construct
  source 1..22: mol_type = other RNA
ttgacaaccctactgtggttat

SEQ ID NO: 25781 - RNA, 22 nt, synthetic construct
  source 1..22: mol_type = other RNA
ttgacagtggagagacctggca

SEQ ID NO: 25782 - RNA, 22 nt, synthetic construct
  source 1..22: mol_type = other RNA
ttgacatattaagcagagtaca

SEQ ID NO: 25783 - RNA, 22 nt, synthetic construct
  source 1..22: mol_type = other RNA
ttgaccaaaaactgaaaagcaa

SEQ ID NO: 25784 - RNA, 22 nt, synthetic construct
  source 1..22: mol_type = other RNA
ttgagagacagtttacaaaaca

SEQ ID NO: 25785 - RNA, 22 nt, synthetic construct
  source 1..22: mol_type = other RNA
ttgaggtccaagatgcaatccc

SEQ ID NO: 25786 - RNA, 22 nt, synthetic construct
  source 1..22: mol_type = other RNA
ttgatacactatacaatcctat

SEQ ID NO: 25787 - RNA, 22 nt, synthetic construct
  source 1..22: mol_type = other RNA
ttgatcagttggtgaaggtggt

SEQ ID NO: 25788 - RNA, 22 nt, synthetic construct
  source 1..22: mol_type = other RNA
ttgcacaagcccttaggcaggt

SEQ ID NO: 25789 - RNA, 22 nt, synthetic construct
  source 1..22: mol_type = other RNA
ttgcagaagtgagtgtgtgtct

SEQ ID NO: 25790 - RNA, 22 nt, synthetic construct
  source 1..22: mol_type = other RNA
ttgcagttggacatattttggt

SEQ ID NO: 25791 - RNA, 22 nt, synthetic construct
  source 1..22: mol_type = other RNA
ttgcagtttaagatgaaatgca

SEQ ID NO: 25792 - RNA, 22 nt, synthetic construct
  source 1..22: mol_type = other RNA
ttgcataaccacagtagggttg

SEQ ID NO: 25793 - RNA, 22 nt, synthetic construct
  source 1..22: mol_type = other RNA
ttgcatcttggacctcaactct

SEQ ID NO: 25794 - RNA, 22 nt, synthetic construct
  source 1..22: mol_type = other RNA
ttgcattaatctcgagccttct

SEQ ID NO: 25795 - RNA, 22 nt, synthetic construct
  source 1..22: mol_type = other RNA
ttgcccaggctggtttcaaact

SEQ ID NO: 25796 - RNA, 22 nt, synthetic construct
  source 1..22: mol_type = other RNA
ttgctcactatatgtgattcct

SEQ ID NO: 25797 - RNA, 22 nt, synthetic construct
  source 1..22: mol_type = other RNA
ttgctgattttgacaaccctac

SEQ ID NO: 25798 - RNA, 22 nt, synthetic construct
  source 1..22: mol_type = other RNA
ttgcttgctcactatatgtgat

SEQ ID NO: 25799 - RNA, 22 nt, synthetic construct
  source 1..22: mol_type = other RNA
ttgcttttcagtttttggtcaa

SEQ ID NO: 25800 - RNA, 22 nt, synthetic construct
  source 1..22: mol_type = other RNA
ttggacctcaactctccccttt

SEQ ID NO: 25801 - RNA, 22 nt, synthetic construct
  source 1..22: mol_type = other RNA
ttggcaggaatattgcagaagt

SEQ ID NO: 25802 - RNA, 22 nt, synthetic construct
  source 1..22: mol_type = other RNA
ttggcagttagtgtttttatcc

SEQ ID NO: 25803 - RNA, 22 nt, synthetic construct
  source 1..22: mol_type = other RNA
ttggcatggataaaaacactaa

SEQ ID NO: 25804 - RNA, 22 nt, synthetic construct
  source 1..22: mol_type = other RNA
ttggccaaaagttaatgacttt

SEQ ID NO: 25805 - RNA, 22 nt, synthetic construct
  source 1..22: mol_type = other RNA
ttggccaaataccaaagccagc

SEQ ID NO: 25806 - RNA, 22 nt, synthetic construct
  source 1..22: mol_type = other RNA
ttggcctgtattctttgttaaa

SEQ ID NO: 25807 - RNA, 22 nt, synthetic construct
  source 1..22: mol_type = other RNA
ttgggtttgtctgatggttata

SEQ ID NO: 25808 - RNA, 22 nt, synthetic construct
  source 1..22: mol_type = other RNA
ttggtatttggccaaaagttaa

SEQ ID NO: 25809 - RNA, 22 nt, synthetic construct
  source 1..22: mol_type = other RNA
ttggtcaatccttatgattatt

SEQ ID NO: 25810 - RNA, 22 nt, synthetic construct
  source 1..22: mol_type = other RNA
ttggtcataggattgtatagtg

SEQ ID NO: 25811 - RNA, 22 nt, synthetic construct
  source 1..22: mol_type = other RNA
ttggtgaaggtggtgtctgcca

SEQ ID NO: 25812 - RNA, 22 nt, synthetic construct
  source 1..22: mol_type = other RNA
ttggtgctggtatatcttatgt

SEQ ID NO: 25813 - RNA, 22 nt, synthetic construct
  source 1..22: mol_type = other RNA
ttggtggagctgggatttaaac

SEQ ID NO: 25814 - RNA, 22 nt, synthetic construct
  source 1..22: mol_type = other RNA
ttggtttaaatcccagctccac

SEQ ID NO: 25815 - RNA, 22 nt, synthetic construct
  source 1..22: mol_type = other RNA
ttgtaaactgtctctcaatttg

SEQ ID NO: 25816 - RNA, 22 nt, synthetic construct
  source 1..22: mol_type = other RNA
ttgtactctgcttaatatgtca

SEQ ID NO: 25817 - RNA, 22 nt, synthetic construct
  source 1..22: mol_type = other RNA
ttgtagatgagattggtcatag

SEQ ID NO: 25818 - RNA, 22 nt, synthetic construct
  source 1..22: mol_type = other RNA
ttgtcaaaatcagcaaatctaa

SEQ ID NO: 25819 - RNA, 22 nt, synthetic construct
  source 1..22: mol_type = other RNA
ttgtcccagtagtgtcccttaa

SEQ ID NO: 25820 - RNA, 22 nt, synthetic construct
  source 1..22: mol_type = other RNA
ttgtccttgttctaaggaaata

SEQ ID NO: 25821 - RNA, 22 nt, synthetic construct
  source 1..22: mol_type = other RNA
ttgtctgatggttatactcgag

SEQ ID NO: 25822 - RNA, 22 nt, synthetic construct
  source 1..22: mol_type = other RNA
ttgtgacattgacatattaagc

SEQ ID NO: 25823 - RNA, 22 nt, synthetic construct
  source 1..22: mol_type = other RNA
ttgtggtacacgcccatagtcc

SEQ ID NO: 25824 - RNA, 22 nt, synthetic construct
  source 1..22: mol_type = other RNA
ttgttaagggacactactggga

SEQ ID NO: 25825 - RNA, 22 nt, synthetic construct
  source 1..22: mol_type = other RNA
ttgttacttacatgctttgcag

SEQ ID NO: 25826 - RNA, 22 nt, synthetic construct
  source 1..22: mol_type = other RNA
ttgttacttagggtcacctccg

SEQ ID NO: 25827 - RNA, 22 nt, synthetic construct
  source 1..22: mol_type = other RNA
tttaaaccaaaatatgtccaac

SEQ ID NO: 25828 - RNA, 22 nt, synthetic construct
  source 1..22: mol_type = other RNA
tttaaatcccagctccaccaac

SEQ ID NO: 25829 - RNA, 22 nt, synthetic construct
  source 1..22: mol_type = other RNA
tttaacaaagaatacaggccaa

SEQ ID NO: 25830 - RNA, 22 nt, synthetic construct
  source 1..22: mol_type = other RNA
tttaagatgaaatgcactagtt

SEQ ID NO: 25831 - RNA, 22 nt, synthetic construct
  source 1..22: mol_type = other RNA
tttacaaaacaccagccttgta

SEQ ID NO: 25832 - RNA, 22 nt, synthetic construct
  source 1..22: mol_type = other RNA
tttacagagaaggaaaccgagg

SEQ ID NO: 25833 - RNA, 22 nt, synthetic construct
  source 1..22: mol_type = other RNA
tttacagatgaagcactaaaac

SEQ ID NO: 25834 - RNA, 22 nt, synthetic construct
  source 1..22: mol_type = other RNA
tttagaggagaaagttcagttt

SEQ ID NO: 25835 - RNA, 22 nt, synthetic construct
  source 1..22: mol_type = other RNA
tttagagggtatacggaggtga

SEQ ID NO: 25836 - RNA, 22 nt, synthetic construct
  source 1..22: mol_type = other RNA
tttagctggctttggtatttgg

SEQ ID NO: 25837 - RNA, 22 nt, synthetic construct
  source 1..22: mol_type = other RNA
tttaggagtaaaggtgcataat

SEQ ID NO: 25838 - RNA, 22 nt, synthetic construct
  source 1..22: mol_type = other RNA
tttagtgcttcatctgtaaaac

SEQ ID NO: 25839 - RNA, 22 nt, synthetic construct
  source 1..22: mol_type = other RNA
tttatagaggctgaggtggaag

SEQ ID NO: 25840 - RNA, 22 nt, synthetic construct
  source 1..22: mol_type = other RNA
tttatcacccgacagttgttaa

SEQ ID NO: 25841 - RNA, 22 nt, synthetic construct
  source 1..22: mol_type = other RNA
tttatccatgccaagcgatgat

SEQ ID NO: 25842 - RNA, 22 nt, synthetic construct
  source 1..22: mol_type = other RNA
tttattgttaagggacactact

SEQ ID NO: 25843 - RNA, 22 nt, synthetic construct
  source 1..22: mol_type = other RNA
tttatttccttagaacaaggac

SEQ ID NO: 25844 - RNA, 22 nt, synthetic construct
  source 1..22: mol_type = other RNA
tttcaaactcaagtgatccttc

SEQ ID NO: 25845 - RNA, 22 nt, synthetic construct
  source 1..22: mol_type = other RNA
tttcagtttttggtcaatcctt

SEQ ID NO: 25846 - RNA, 22 nt, synthetic construct
  source 1..22: mol_type = other RNA
tttcataagcatttgaaaatgg

SEQ ID NO: 25847 - RNA, 22 nt, synthetic construct
  source 1..22: mol_type = other RNA
tttcctactttttgtagagacg

SEQ ID NO: 25848 - RNA, 22 nt, synthetic construct
  source 1..22: mol_type = other RNA
tttccttagaacaaggacaaat

SEQ ID NO: 25849 - RNA, 22 nt, synthetic construct
  source 1..22: mol_type = other RNA
tttccttctctgtaaaacaggg

SEQ ID NO: 25850 - RNA, 22 nt, synthetic construct
  source 1..22: mol_type = other RNA
tttcgttttgagacagggtctc

SEQ ID NO: 25851 - RNA, 22 nt, synthetic construct
  source 1..22: mol_type = other RNA
tttctctcttgtgacattgaca

SEQ ID NO: 25852 - RNA, 22 nt, synthetic construct
  source 1..22: mol_type = other RNA
tttctctttagtgacagacatt

SEQ ID NO: 25853 - RNA, 22 nt, synthetic construct
  source 1..22: mol_type = other RNA
tttctggcgatgttaactttga

SEQ ID NO: 25854 - RNA, 22 nt, synthetic construct
  source 1..22: mol_type = other RNA
tttgaaaatgggttcattatgc

SEQ ID NO: 25855 - RNA, 22 nt, synthetic construct
  source 1..22: mol_type = other RNA
tttgaataaagttgtagatgag

SEQ ID NO: 25856 - RNA, 22 nt, synthetic construct
  source 1..22: mol_type = other RNA
tttgacaaccctactgtggtta

SEQ ID NO: 25857 - RNA, 22 nt, synthetic construct
  source 1..22: mol_type = other RNA
tttgatcagttggtgaaggtgg

SEQ ID NO: 25858 - RNA, 22 nt, synthetic construct
  source 1..22: mol_type = other RNA
tttgcagttggacatattttgg

SEQ ID NO: 25859 - RNA, 22 nt, synthetic construct
  source 1..22: mol_type = other RNA
tttgcagtttaagatgaaatgc

SEQ ID NO: 25860 - RNA, 22 nt, synthetic construct
  source 1..22: mol_type = other RNA
tttgcataaccacagtagggtt

SEQ ID NO: 25861 - RNA, 22 nt, synthetic construct
  source 1..22: mol_type = other RNA
tttgcattaatctcgagccttc

SEQ ID NO: 25862 - RNA, 22 nt, synthetic construct
  source 1..22: mol_type = other RNA
tttgctgattttgacaacccta

SEQ ID NO: 25863 - RNA, 22 nt, synthetic construct
  source 1..22: mol_type = other RNA
tttgcttttcagtttttggtca

SEQ ID NO: 25864 - RNA, 22 nt, synthetic construct
  source 1..22: mol_type = other RNA
tttggcagttagtgtttttatc

SEQ ID NO: 25865 - RNA, 22 nt, synthetic construct
  source 1..22: mol_type = other RNA
tttggccaaaagttaatgactt

SEQ ID NO: 25866 - RNA, 22 nt, synthetic construct
  source 1..22: mol_type = other RNA
tttggccaaataccaaagccag

SEQ ID NO: 25867 - RNA, 22 nt, synthetic construct
  source 1..22: mol_type = other RNA
tttgggtttgtctgatggttat

SEQ ID NO: 25868 - RNA, 22 nt, synthetic construct
  source 1..22: mol_type = other RNA
tttggtatttggccaaaagtta

SEQ ID NO: 25869 - RNA, 22 nt, synthetic construct
  source 1..22: mol_type = other RNA
tttggtcaatccttatgattat

SEQ ID NO: 25870 - RNA, 22 nt, synthetic construct
  source 1..22: mol_type = other RNA
tttggtgctggtatatcttatg

SEQ ID NO: 25871 - RNA, 22 nt, synthetic construct
  source 1..22: mol_type = other RNA
tttggtttaaatcccagctcca

SEQ ID NO: 25872 - RNA, 22 nt, synthetic construct
  source 1..22: mol_type = other RNA
tttgtaaactgtctctcaattt

SEQ ID NO: 25873 - RNA, 22 nt, synthetic construct
  source 1..22: mol_type = other RNA
tttgtccttgttctaaggaaat

SEQ ID NO: 25874 - RNA, 22 nt, synthetic construct
  source 1..22: mol_type = other RNA
tttgtctgatggttatactcga

SEQ ID NO: 25875 - RNA, 22 nt, synthetic construct
  source 1..22: mol_type = other RNA
ttttaacaaagaatacaggcca

SEQ ID NO: 25876 - RNA, 22 nt, synthetic construct
  source 1..22: mol_type = other RNA
ttttacagagaaggaaaccgag

SEQ ID NO: 25877 - RNA, 22 nt, synthetic construct
  source 1..22: mol_type = other RNA
ttttacagatgaagcactaaaa

SEQ ID NO: 25878 - RNA, 22 nt, synthetic construct
  source 1..22: mol_type = other RNA
ttttagagggtatacggaggtg

SEQ ID NO: 25879 - RNA, 22 nt, synthetic construct
  source 1..22: mol_type = other RNA
ttttagtgcttcatctgtaaaa

SEQ ID NO: 25880 - RNA, 22 nt, synthetic construct
  source 1..22: mol_type = other RNA
ttttatagaggctgaggtggaa

SEQ ID NO: 25881 - RNA, 22 nt, synthetic construct
  source 1..22: mol_type = other RNA
ttttatccatgccaagcgatga

SEQ ID NO: 25882 - RNA, 22 nt, synthetic construct
  source 1..22: mol_type = other RNA
ttttattgttaagggacactac

SEQ ID NO: 25883 - RNA, 22 nt, synthetic construct
  source 1..22: mol_type = other RNA
ttttcagtttttggtcaatcct

SEQ ID NO: 25884 - RNA, 22 nt, synthetic construct
  source 1..22: mol_type = other RNA
ttttcctactttttgtagagac

SEQ ID NO: 25885 - RNA, 22 nt, synthetic construct
  source 1..22: mol_type = other RNA
ttttcgttttgagacagggtct

SEQ ID NO: 25886 - RNA, 22 nt, synthetic construct
  source 1..22: mol_type = other RNA
ttttctctttagtgacagacat

SEQ ID NO: 25887 - RNA, 22 nt, synthetic construct
  source 1..22: mol_type = other RNA
ttttgacaaccctactgtggtt

SEQ ID NO: 25888 - RNA, 22 nt, synthetic construct
  source 1..22: mol_type = other RNA
ttttgcattaatctcgagcctt

SEQ ID NO: 25889 - RNA, 22 nt, synthetic construct
  source 1..22: mol_type = other RNA
ttttggccaaataccaaagcca

SEQ ID NO: 25890 - RNA, 22 nt, synthetic construct
  source 1..22: mol_type = other RNA
ttttggtcaatccttatgatta

SEQ ID NO: 25891 - RNA, 22 nt, synthetic construct
  source 1..22: mol_type = other RNA
ttttggtttaaatcccagctcc

SEQ ID NO: 25892 - RNA, 22 nt, synthetic construct
  source 1..22: mol_type = other RNA
ttttgtaaactgtctctcaatt

SEQ ID NO: 25893 - RNA, 22 nt, synthetic construct
  source 1..22: mol_type = other RNA
tttttaacaaagaatacaggcc

SEQ ID NO: 25894 - RNA, 22 nt, synthetic construct
  source 1..22: mol_type = other RNA
tttttatccatgccaagcgatg

SEQ ID NO: 25895 - RNA, 22 nt, synthetic construct
  source 1..22: mol_type = other RNA
tttttattgttaagggacacta

SEQ ID NO: 25896 - RNA, 22 nt, synthetic construct
  source 1..22: mol_type = other RNA
tttttcctactttttgtagaga

SEQ ID NO: 25897 - RNA, 22 nt, synthetic construct
  source 1..22: mol_type = other RNA
tttttcgttttgagacagggtc

SEQ ID NO: 25898 - RNA, 22 nt, synthetic construct
  source 1..22: mol_type = other RNA
tttttggtcaatccttatgatt

SEQ ID NO: 25899 - RNA, 22 nt, synthetic construct
  source 1..22: mol_type = other RNA
ttttttcctactttttgtagag

SEQ ID NO: 25900 - RNA, 22 nt, synthetic construct
  source 1..22: mol_type = other RNA
ttttttcgttttgagacagggt

SEQ ID NO: 25901 - RNA, 20 nt, synthetic construct
  source 1..20: mol_type = other RNA
aacaccctgtgaggtgactg

SEQ ID NO: 25902 - RNA, 20 nt, synthetic construct
  source 1..20: mol_type = other RNA
aacagcgatgctgaccccct

SEQ ID NO: 25903 - RNA, 20 nt, synthetic construct
  source 1..20: mol_type = other RNA
aactccatggtggcacactg

SEQ ID NO: 25904 - RNA, 20 nt, synthetic construct
  source 1..20: mol_type = other RNA
aagaagagattgagctctac

SEQ ID NO: 25905 - RNA, 20 nt, synthetic construct
  source 1..20: mol_type = other RNA
aagaagctccaggtagccac

SEQ ID NO: 25906 - RNA, 20 nt, synthetic construct
  source 1..20: mol_type = other RNA
aagacaatgctcagtcacct

SEQ ID NO: 25907 - RNA, 20 nt, synthetic construct
  source 1..20: mol_type = other RNA
aagagaccagagggaggagg

SEQ ID NO: 25908 - RNA, 20 nt, synthetic construct
  source 1..20: mol_type = other RNA
aagagattgagctctactca

SEQ ID NO: 25909 - RNA, 20 nt, synthetic construct
  source 1..20: mol_type = other RNA
aagctccaggtagccacctt

SEQ ID NO: 25910 - RNA, 20 nt, synthetic construct
  source 1..20: mol_type = other RNA
aaggtggctacctggagctt

SEQ ID NO: 25911 - RNA, 20 nt, synthetic construct
  source 1..20: mol_type = other RNA
aagtggtagaggcacagggg

SEQ ID NO: 25912 - RNA, 20 nt, synthetic construct
  source 1..20: mol_type = other RNA
aatctcttcttctccagcca

SEQ ID NO: 25913 - RNA, 20 nt, synthetic construct
  source 1..20: mol_type = other RNA
aatgctcagtcacctcacag

SEQ ID NO: 25914 - RNA, 20 nt, synthetic construct
  source 1..20: mol_type = other RNA
acaatgctcagtcacctcac

SEQ ID NO: 25915 - RNA, 20 nt, synthetic construct
  source 1..20: mol_type = other RNA
acaccctgtgaggtgactga

SEQ ID NO: 25916 - RNA, 20 nt, synthetic construct
  source 1..20: mol_type = other RNA
acactgtgagctgcctggga

SEQ ID NO: 25917 - RNA, 20 nt, synthetic construct
  source 1..20: mol_type = other RNA
acagcgatgctgaccccctg

SEQ ID NO: 25918 - RNA, 20 nt, synthetic construct
  source 1..20: mol_type = other RNA
acagggggtcagcatcgctg

SEQ ID NO: 25919 - RNA, 20 nt, synthetic construct
  source 1..20: mol_type = other RNA
acagtgtgccaccatggagt

SEQ ID NO: 25920 - RNA, 20 nt, synthetic construct
  source 1..20: mol_type = other RNA
accacttctatgaccagatg

SEQ ID NO: 25921 - RNA, 20 nt, synthetic construct
  source 1..20: mol_type = other RNA
accagagggaggagggccca

SEQ ID NO: 25922 - RNA, 20 nt, synthetic construct
  source 1..20: mol_type = other RNA
accagatggacctggctgga

SEQ ID NO: 25923 - RNA, 20 nt, synthetic construct
  source 1..20: mol_type = other RNA
accatggagttggggcccct

SEQ ID NO: 25924 - RNA, 20 nt, synthetic construct
  source 1..20: mol_type = other RNA
accccctgtgcctctaccac

SEQ ID NO: 25925 - RNA, 20 nt, synthetic construct
  source 1..20: mol_type = other RNA
accctgtgaggtgactgagc

SEQ ID NO: 25926 - RNA, 20 nt, synthetic construct
  source 1..20: mol_type = other RNA
accggaagagaccagaggga

SEQ ID NO: 25927 - RNA, 20 nt, synthetic construct
  source 1..20: mol_type = other RNA
acctgagtagagctcaatct

SEQ ID NO: 25928 - RNA, 20 nt, synthetic construct
  source 1..20: mol_type = other RNA
acctggagcttcttaacagc

SEQ ID NO: 25929 - RNA, 20 nt, synthetic construct
  source 1..20: mol_type = other RNA
acctggctggagaagaagag

SEQ ID NO: 25930 - RNA, 20 nt, synthetic construct
  source 1..20: mol_type = other RNA
accttctaggggccccaact

SEQ ID NO: 25931 - RNA, 20 nt, synthetic construct
  source 1..20: mol_type = other RNA
actcaggtgggccctcctcc

SEQ ID NO: 25932 - RNA, 20 nt, synthetic construct
  source 1..20: mol_type = other RNA
actccatggtggcacactgt

SEQ ID NO: 25933 - RNA, 20 nt, synthetic construct
  source 1..20: mol_type = other RNA
actgagcattgtcttccctc

SEQ ID NO: 25934 - RNA, 20 nt, synthetic construct
  source 1..20: mol_type = other RNA
actgtgagctgcctgggagg

SEQ ID NO: 25935 - RNA, 20 nt, synthetic construct
  source 1..20: mol_type = other RNA
acttctatgaccagatggac

SEQ ID NO: 25936 - RNA, 20 nt, synthetic construct
  source 1..20: mol_type = other RNA
agaagaagagattgagctct

SEQ ID NO: 25937 - RNA, 20 nt, synthetic construct
  source 1..20: mol_type = other RNA
agaagagattgagctctact

SEQ ID NO: 25938 - RNA, 20 nt, synthetic construct
  source 1..20: mol_type = other RNA
agaagctccaggtagccacc

SEQ ID NO: 25939 - RNA, 20 nt, synthetic construct
  source 1..20: mol_type = other RNA
agaaggtggctacctggagc

SEQ ID NO: 25940 - RNA, 20 nt, synthetic construct
  source 1..20: mol_type = other RNA
agaagtggtagaggcacagg

SEQ ID NO: 25941 - RNA, 20 nt, synthetic construct
  source 1..20: mol_type = other RNA
agacaatgctcagtcacctc

SEQ ID NO: 25942 - RNA, 20 nt, synthetic construct
  source 1..20: mol_type = other RNA
agaccagagggaggagggcc

SEQ ID NO: 25943 - RNA, 20 nt, synthetic construct
  source 1..20: mol_type = other RNA
agagaccagagggaggaggg

SEQ ID NO: 25944 - RNA, 20 nt, synthetic construct
  source 1..20: mol_type = other RNA
agagattgagctctactcag

SEQ ID NO: 25945 - RNA, 20 nt, synthetic construct
  source 1..20: mol_type = other RNA
agagctcaatctcttcttct

SEQ ID NO: 25946 - RNA, 20 nt, synthetic construct
  source 1..20: mol_type = other RNA
agaggcacagggggtcagca

SEQ ID NO: 25947 - RNA, 20 nt, synthetic construct
  source 1..20: mol_type = other RNA
agagggaggagggcccacct

SEQ ID NO: 25948 - RNA, 20 nt, synthetic construct
  source 1..20: mol_type = other RNA
agatggacctggctggagaa

SEQ ID NO: 25949 - RNA, 20 nt, synthetic construct
  source 1..20: mol_type = other RNA
agattgagctctactcaggt

SEQ ID NO: 25950 - RNA, 20 nt, synthetic construct
  source 1..20: mol_type = other RNA
agcatcgctgttaagaagct

SEQ ID NO: 25951 - RNA, 20 nt, synthetic construct
  source 1..20: mol_type = other RNA
agcattgtcttccctcccag

SEQ ID NO: 25952 - RNA, 20 nt, synthetic construct
  source 1..20: mol_type = other RNA
agccaccttctaggggcccc

SEQ ID NO: 25953 - RNA, 20 nt, synthetic construct
  source 1..20: mol_type = other RNA
agccaggtccatctggtcat

SEQ ID NO: 25954 - RNA, 20 nt, synthetic construct
  source 1..20: mol_type = other RNA
agcgatgctgaccccctgtg

SEQ ID NO: 25955 - RNA, 20 nt, synthetic construct
  source 1..20: mol_type = other RNA
agctcaatctcttcttctcc

SEQ ID NO: 25956 - RNA, 20 nt, synthetic construct
  source 1..20: mol_type = other RNA
agctcacagtgtgccaccat

SEQ ID NO: 25957 - RNA, 20 nt, synthetic construct
  source 1..20: mol_type = other RNA
agctccaggtagccaccttc

SEQ ID NO: 25958 - RNA, 20 nt, synthetic construct
  source 1..20: mol_type = other RNA
agctctactcaggtgggccc

SEQ ID NO: 25959 - RNA, 20 nt, synthetic construct
  source 1..20: mol_type = other RNA
agctgcctgggagggaagac

SEQ ID NO: 25960 - RNA, 20 nt, synthetic construct
  source 1..20: mol_type = other RNA
agcttcttaacagcgatgct

SEQ ID NO: 25961 - RNA, 20 nt, synthetic construct
  source 1..20: mol_type = other RNA
aggagggcccacctgagtag

SEQ ID NO: 25962 - RNA, 20 nt, synthetic construct
  source 1..20: mol_type = other RNA
aggcacagggggtcagcatc

SEQ ID NO: 25963 - RNA, 20 nt, synthetic construct
  source 1..20: mol_type = other RNA
aggcagctcacagtgtgcca

SEQ ID NO: 25964 - RNA, 20 nt, synthetic construct
  source 1..20: mol_type = other RNA
agggaagacaatgctcagtc

SEQ ID NO: 25965 - RNA, 20 nt, synthetic construct
  source 1..20: mol_type = other RNA
agggaggagggcccacctga

SEQ ID NO: 25966 - RNA, 20 nt, synthetic construct
  source 1..20: mol_type = other RNA
agggcccacctgagtagagc

SEQ ID NO: 25967 - RNA, 20 nt, synthetic construct
  source 1..20: mol_type = other RNA
aggggccccaactccatggt

SEQ ID NO: 25968 - RNA, 20 nt, synthetic construct
  source 1..20: mol_type = other RNA
agggggtcagcatcgctgtt

SEQ ID NO: 25969 - RNA, 20 nt, synthetic construct
  source 1..20: mol_type = other RNA
aggggtgggggataccggaa

SEQ ID NO: 25970 - RNA, 20 nt, synthetic construct
  source 1..20: mol_type = other RNA
aggtagccaccttctagggg

SEQ ID NO: 25971 - RNA, 20 nt, synthetic construct
  source 1..20: mol_type = other RNA
aggtccatctggtcatagaa

SEQ ID NO: 25972 - RNA, 20 nt, synthetic construct
  source 1..20: mol_type = other RNA
aggtgactgagcattgtctt

SEQ ID NO: 25973 - RNA, 20 nt, synthetic construct
  source 1..20: mol_type = other RNA
aggtggctacctggagcttc

SEQ ID NO: 25974 - RNA, 20 nt, synthetic construct
  source 1..20: mol_type = other RNA
aggtgggccctcctccctct

SEQ ID NO: 25975 - RNA, 20 nt, synthetic construct
  source 1..20: mol_type = other RNA
agtagagctcaatctcttct

SEQ ID NO: 25976 - RNA, 20 nt, synthetic construct
  source 1..20: mol_type = other RNA
agtggtagaggcacaggggg

SEQ ID NO: 25977 - RNA, 20 nt, synthetic construct
  source 1..20: mol_type = other RNA
agtgtgccaccatggagttg

SEQ ID NO: 25978 - RNA, 20 nt, synthetic construct
  source 1..20: mol_type = other RNA
agttggggcccctagaaggt

SEQ ID NO: 25979 - RNA, 20 nt, synthetic construct
  source 1..20: mol_type = other RNA
ataccggaagagaccagagg

SEQ ID NO: 25980 - RNA, 20 nt, synthetic construct
  source 1..20: mol_type = other RNA
atagaagtggtagaggcaca

SEQ ID NO: 25981 - RNA, 20 nt, synthetic construct
  source 1..20: mol_type = other RNA
atcgctgttaagaagctcca

SEQ ID NO: 25982 - RNA, 20 nt, synthetic construct
  source 1..20: mol_type = other RNA
atctcttcttctccagccag

SEQ ID NO: 25983 - RNA, 20 nt, synthetic construct
  source 1..20: mol_type = other RNA
atctggtcatagaagtggta

SEQ ID NO: 25984 - RNA, 20 nt, synthetic construct
  source 1..20: mol_type = other RNA
atgaccagatggacctggct

SEQ ID NO: 25985 - RNA, 20 nt, synthetic construct
  source 1..20: mol_type = other RNA
atgctcagtcacctcacagg

SEQ ID NO: 25986 - RNA, 20 nt, synthetic construct
  source 1..20: mol_type = other RNA
atgctgaccccctgtgcctc

SEQ ID NO: 25987 - RNA, 20 nt, synthetic construct
  source 1..20: mol_type = other RNA
atggacctggctggagaaga

SEQ ID NO: 25988 - RNA, 20 nt, synthetic construct
  source 1..20: mol_type = other RNA
atggagttggggcccctaga

SEQ ID NO: 25989 - RNA, 20 nt, synthetic construct
  source 1..20: mol_type = other RNA
atggtggcacactgtgagct

SEQ ID NO: 25990 - RNA, 20 nt, synthetic construct
  source 1..20: mol_type = other RNA
attgagctctactcaggtgg

SEQ ID NO: 25991 - RNA, 20 nt, synthetic construct
  source 1..20: mol_type = other RNA
attgtcttccctcccaggca

SEQ ID NO: 25992 - RNA, 20 nt, synthetic construct
  source 1..20: mol_type = other RNA
caacaccctgtgaggtgact

SEQ ID NO: 25993 - RNA, 20 nt, synthetic construct
  source 1..20: mol_type = other RNA
caactccatggtggcacact

SEQ ID NO: 25994 - RNA, 20 nt, synthetic construct
  source 1..20: mol_type = other RNA
caatctcttcttctccagcc

SEQ ID NO: 25995 - RNA, 20 nt, synthetic construct
  source 1..20: mol_type = other RNA
caatgctcagtcacctcaca

SEQ ID NO: 25996 - RNA, 20 nt, synthetic construct
  source 1..20: mol_type = other RNA
cacactgtgagctgcctggg

SEQ ID NO: 25997 - RNA, 20 nt, synthetic construct
  source 1..20: mol_type = other RNA
cacagggggtcagcatcgct

SEQ ID NO: 25998 - RNA, 20 nt, synthetic construct
  source 1..20: mol_type = other RNA
cacagtgtgccaccatggag

SEQ ID NO: 25999 - RNA, 20 nt, synthetic construct
  source 1..20: mol_type = other RNA
caccatggagttggggcccc

SEQ ID NO: 26000 - RNA, 20 nt, synthetic construct
  source 1..20: mol_type = other RNA
caccctgtgaggtgactgag

SEQ ID NO: 26001 - RNA, 20 nt, synthetic construct
  source 1..20: mol_type = other RNA
cacctgagtagagctcaatc

SEQ ID NO: 26002 - RNA, 20 nt, synthetic construct
  source 1..20: mol_type = other RNA
caccttctaggggccccaac

SEQ ID NO: 26003 - RNA, 20 nt, synthetic construct
  source 1..20: mol_type = other RNA
cactgtgagctgcctgggag

SEQ ID NO: 26004 - RNA, 20 nt, synthetic construct
  source 1..20: mol_type = other RNA
cacttctatgaccagatgga

SEQ ID NO: 26005 - RNA, 20 nt, synthetic construct
  source 1..20: mol_type = other RNA
cagagggaggagggcccacc

SEQ ID NO: 26006 - RNA, 20 nt, synthetic construct
  source 1..20: mol_type = other RNA
cagatggacctggctggaga

SEQ ID NO: 26007 - RNA, 20 nt, synthetic construct
  source 1..20: mol_type = other RNA
cagcatcgctgttaagaagc

SEQ ID NO: 26008 - RNA, 20 nt, synthetic construct
  source 1..20: mol_type = other RNA
cagccaggtccatctggtca

SEQ ID NO: 26009 - RNA, 20 nt, synthetic construct
  source 1..20: mol_type = other RNA
cagcgatgctgaccccctgt

SEQ ID NO: 26010 - RNA, 20 nt, synthetic construct
  source 1..20: mol_type = other RNA
cagctcacagtgtgccacca

SEQ ID NO: 26011 - RNA, 20 nt, synthetic construct
  source 1..20: mol_type = other RNA
caggcagctcacagtgtgcc

SEQ ID NO: 26012 - RNA, 20 nt, synthetic construct
  source 1..20: mol_type = other RNA
cagggggtcagcatcgctgt

SEQ ID NO: 26013 - RNA, 20 nt, synthetic construct
  source 1..20: mol_type = other RNA
caggtagccaccttctaggg

SEQ ID NO: 26014 - RNA, 20 nt, synthetic construct
  source 1..20: mol_type = other RNA
caggtccatctggtcataga

SEQ ID NO: 26015 - RNA, 20 nt, synthetic construct
  source 1..20: mol_type = other RNA
caggtgggccctcctccctc

SEQ ID NO: 26016 - RNA, 20 nt, synthetic construct
  source 1..20: mol_type = other RNA
cagtgtgccaccatggagtt

SEQ ID NO: 26017 - RNA, 20 nt, synthetic construct
  source 1..20: mol_type = other RNA
catagaagtggtagaggcac

SEQ ID NO: 26018 - RNA, 20 nt, synthetic construct
  source 1..20: mol_type = other RNA
catcgctgttaagaagctcc

SEQ ID NO: 26019 - RNA, 20 nt, synthetic construct
  source 1..20: mol_type = other RNA
catctggtcatagaagtggt

SEQ ID NO: 26020 - RNA, 20 nt, synthetic construct
  source 1..20: mol_type = other RNA
catggagttggggcccctag

SEQ ID NO: 26021 - RNA, 20 nt, synthetic construct
  source 1..20: mol_type = other RNA
catggtggcacactgtgagc

SEQ ID NO: 26022 - RNA, 20 nt, synthetic construct
  source 1..20: mol_type = other RNA
cattgtcttccctcccaggc

SEQ ID NO: 26023 - RNA, 20 nt, synthetic construct
  source 1..20: mol_type = other RNA
ccaacaccctgtgaggtgac

SEQ ID NO: 26024 - RNA, 20 nt, synthetic construct
  source 1..20: mol_type = other RNA
ccaactccatggtggcacac

SEQ ID NO: 26025 - RNA, 20 nt, synthetic construct
  source 1..20: mol_type = other RNA
ccaccatggagttggggccc

SEQ ID NO: 26026 - RNA, 20 nt, synthetic construct
  source 1..20: mol_type = other RNA
ccacctgagtagagctcaat

SEQ ID NO: 26027 - RNA, 20 nt, synthetic construct
  source 1..20: mol_type = other RNA
ccaccttctaggggccccaa

SEQ ID NO: 26028 - RNA, 20 nt, synthetic construct
  source 1..20: mol_type = other RNA
ccacttctatgaccagatgg

SEQ ID NO: 26029 - RNA, 20 nt, synthetic construct
  source 1..20: mol_type = other RNA
ccagagggaggagggcccac

SEQ ID NO: 26030 - RNA, 20 nt, synthetic construct
  source 1..20: mol_type = other RNA
ccagatggacctggctggag

SEQ ID NO: 26031 - RNA, 20 nt, synthetic construct
  source 1..20: mol_type = other RNA
ccagccaggtccatctggtc

SEQ ID NO: 26032 - RNA, 20 nt, synthetic construct
  source 1..20: mol_type = other RNA
ccaggcagctcacagtgtgc

SEQ ID NO: 26033 - RNA, 20 nt, synthetic construct
  source 1..20: mol_type = other RNA
ccaggtagccaccttctagg

SEQ ID NO: 26034 - RNA, 20 nt, synthetic construct
  source 1..20: mol_type = other RNA
ccaggtccatctggtcatag

SEQ ID NO: 26035 - RNA, 20 nt, synthetic construct
  source 1..20: mol_type = other RNA
ccatctggtcatagaagtgg

SEQ ID NO: 26036 - RNA, 20 nt, synthetic construct
  source 1..20: mol_type = other RNA
ccatggagttggggccccta

SEQ ID NO: 26037 - RNA, 20 nt, synthetic construct
  source 1..20: mol_type = other RNA
ccatggtggcacactgtgag

SEQ ID NO: 26038 - RNA, 20 nt, synthetic construct
  source 1..20: mol_type = other RNA
cccaactccatggtggcaca

SEQ ID NO: 26039 - RNA, 20 nt, synthetic construct
  source 1..20: mol_type = other RNA
cccacctgagtagagctcaa

SEQ ID NO: 26040 - RNA, 20 nt, synthetic construct
  source 1..20: mol_type = other RNA
cccaggcagctcacagtgtg

SEQ ID NO: 26041 - RNA, 20 nt, synthetic construct
  source 1..20: mol_type = other RNA
ccccaactccatggtggcac

SEQ ID NO: 26042 - RNA, 20 nt, synthetic construct
  source 1..20: mol_type = other RNA
ccccctgtgcctctaccact

SEQ ID NO: 26043 - RNA, 20 nt, synthetic construct
  source 1..20: mol_type = other RNA
cccctagaaggtggctacct

SEQ ID NO: 26044 - RNA, 20 nt, synthetic construct
  source 1..20: mol_type = other RNA
cccctgtgcctctaccactt

SEQ ID NO: 26045 - RNA, 20 nt, synthetic construct
  source 1..20: mol_type = other RNA
ccctagaaggtggctacctg

SEQ ID NO: 26046 - RNA, 20 nt, synthetic construct
  source 1..20: mol_type = other RNA
ccctcccaggcagctcacag

SEQ ID NO: 26047 - RNA, 20 nt, synthetic construct
  source 1..20: mol_type = other RNA
ccctcctccctctggtctct

SEQ ID NO: 26048 - RNA, 20 nt, synthetic construct
  source 1..20: mol_type = other RNA
ccctctggtctcttccggta

SEQ ID NO: 26049 - RNA, 20 nt, synthetic construct
  source 1..20: mol_type = other RNA
ccctgtgaggtgactgagca

SEQ ID NO: 26050 - RNA, 20 nt, synthetic construct
  source 1..20: mol_type = other RNA
ccctgtgcctctaccacttc

SEQ ID NO: 26051 - RNA, 20 nt, synthetic construct
  source 1..20: mol_type = other RNA
ccggaagagaccagagggag

SEQ ID NO: 26052 - RNA, 20 nt, synthetic construct
  source 1..20: mol_type = other RNA
cctagaaggtggctacctgg

SEQ ID NO: 26053 - RNA, 20 nt, synthetic construct
  source 1..20: mol_type = other RNA
cctcccaggcagctcacagt

SEQ ID NO: 26054 - RNA, 20 nt, synthetic construct
  source 1..20: mol_type = other RNA
cctccctctggtctcttccg

SEQ ID NO: 26055 - RNA, 20 nt, synthetic construct
  source 1..20: mol_type = other RNA
cctcctccctctggtctctt

SEQ ID NO: 26056 - RNA, 20 nt, synthetic construct
  source 1..20: mol_type = other RNA
cctctaccacttctatgacc

SEQ ID NO: 26057 - RNA, 20 nt, synthetic construct
  source 1..20: mol_type = other RNA
cctctggtctcttccggtat

SEQ ID NO: 26058 - RNA, 20 nt, synthetic construct
  source 1..20: mol_type = other RNA
cctgagtagagctcaatctc

SEQ ID NO: 26059 - RNA, 20 nt, synthetic construct
  source 1..20: mol_type = other RNA
cctggagcttcttaacagcg

SEQ ID NO: 26060 - RNA, 20 nt, synthetic construct
  source 1..20: mol_type = other RNA
cctggctggagaagaagaga

SEQ ID NO: 26061 - RNA, 20 nt, synthetic construct
  source 1..20: mol_type = other RNA
cctgggagggaagacaatgc

SEQ ID NO: 26062 - RNA, 20 nt, synthetic construct
  source 1..20: mol_type = other RNA
cctgtgaggtgactgagcat

SEQ ID NO: 26063 - RNA, 20 nt, synthetic construct
  source 1..20: mol_type = other RNA
cctgtgcctctaccacttct

SEQ ID NO: 26064 - RNA, 20 nt, synthetic construct
  source 1..20: mol_type = other RNA
ccttctaggggccccaactc

SEQ ID NO: 26065 - RNA, 20 nt, synthetic construct
  source 1..20: mol_type = other RNA
cgatgctgaccccctgtgcc

SEQ ID NO: 26066 - RNA, 20 nt, synthetic construct
  source 1..20: mol_type = other RNA
cgctgttaagaagctccagg

SEQ ID NO: 26067 - RNA, 20 nt, synthetic construct
  source 1..20: mol_type = other RNA
cggaagagaccagagggagg

SEQ ID NO: 26068 - RNA, 20 nt, synthetic construct
  source 1..20: mol_type = other RNA
ctaccacttctatgaccaga

SEQ ID NO: 26069 - RNA, 20 nt, synthetic construct
  source 1..20: mol_type = other RNA
ctacctggagcttcttaaca

SEQ ID NO: 26070 - RNA, 20 nt, synthetic construct
  source 1..20: mol_type = other RNA
ctactcaggtgggccctcct

SEQ ID NO: 26071 - RNA, 20 nt, synthetic construct
  source 1..20: mol_type = other RNA
ctagaaggtggctacctgga

SEQ ID NO: 26072 - RNA, 20 nt, synthetic construct
  source 1..20: mol_type = other RNA
ctaggggccccaactccatg

SEQ ID NO: 26073 - RNA, 20 nt, synthetic construct
  source 1..20: mol_type = other RNA
ctatgaccagatggacctgg

SEQ ID NO: 26074 - RNA, 20 nt, synthetic construct
  source 1..20: mol_type = other RNA
ctcaatctcttcttctccag

SEQ ID NO: 26075 - RNA, 20 nt, synthetic construct
  source 1..20: mol_type = other RNA
ctcacagtgtgccaccatgg

SEQ ID NO: 26076 - RNA, 20 nt, synthetic construct
  source 1..20: mol_type = other RNA
ctcaggtgggccctcctccc

SEQ ID NO: 26077 - RNA, 20 nt, synthetic construct
  source 1..20: mol_type = other RNA
ctcagtcacctcacagggtg

SEQ ID NO: 26078 - RNA, 20 nt, synthetic construct
  source 1..20: mol_type = other RNA
ctccagccaggtccatctgg

SEQ ID NO: 26079 - RNA, 20 nt, synthetic construct
  source 1..20: mol_type = other RNA
ctccaggtagccaccttcta

SEQ ID NO: 26080 - RNA, 20 nt, synthetic construct
  source 1..20: mol_type = other RNA
ctccatggtggcacactgtg

SEQ ID NO: 26081 - RNA, 20 nt, synthetic construct
  source 1..20: mol_type = other RNA
ctcccaggcagctcacagtg

SEQ ID NO: 26082 - RNA, 20 nt, synthetic construct
  source 1..20: mol_type = other RNA
ctccctctggtctcttccgg

SEQ ID NO: 26083 - RNA, 20 nt, synthetic construct
  source 1..20: mol_type = other RNA
ctcctccctctggtctcttc

SEQ ID NO: 26084 - RNA, 20 nt, synthetic construct
  source 1..20: mol_type = other RNA
ctctaccacttctatgacca

SEQ ID NO: 26085 - RNA, 20 nt, synthetic construct
  source 1..20: mol_type = other RNA
ctctactcaggtgggccctc

SEQ ID NO: 26086 - RNA, 20 nt, synthetic construct
  source 1..20: mol_type = other RNA
ctctggtctcttccggtatc

SEQ ID NO: 26087 - RNA, 20 nt, synthetic construct
  source 1..20: mol_type = other RNA
ctcttcttctccagccaggt

SEQ ID NO: 26088 - RNA, 20 nt, synthetic construct
  source 1..20: mol_type = other RNA
ctgaccccctgtgcctctac

SEQ ID NO: 26089 - RNA, 20 nt, synthetic construct
  source 1..20: mol_type = other RNA
ctgagcattgtcttccctcc

SEQ ID NO: 26090 - RNA, 20 nt, synthetic construct
  source 1..20: mol_type = other RNA
ctgagtagagctcaatctct

SEQ ID NO: 26091 - RNA, 20 nt, synthetic construct
  source 1..20: mol_type = other RNA
ctgcctgggagggaagacaa

SEQ ID NO: 26092 - RNA, 20 nt, synthetic construct
  source 1..20: mol_type = other RNA
ctggagaagaagagattgag

SEQ ID NO: 26093 - RNA, 20 nt, synthetic construct
  source 1..20: mol_type = other RNA
ctggagcttcttaacagcga

SEQ ID NO: 26094 - RNA, 20 nt, synthetic construct
  source 1..20: mol_type = other RNA
ctggctggagaagaagagat

SEQ ID NO: 26095 - RNA, 20 nt, synthetic construct
  source 1..20: mol_type = other RNA
ctgggagggaagacaatgct

SEQ ID NO: 26096 - RNA, 20 nt, synthetic construct
  source 1..20: mol_type = other RNA
ctggtcatagaagtggtaga

SEQ ID NO: 26097 - RNA, 20 nt, synthetic construct
  source 1..20: mol_type = other RNA
ctggtctcttccggtatccc

SEQ ID NO: 26098 - RNA, 20 nt, synthetic construct
  source 1..20: mol_type = other RNA
ctgtgagctgcctgggaggg

SEQ ID NO: 26099 - RNA, 20 nt, synthetic construct
  source 1..20: mol_type = other RNA
ctgtgaggtgactgagcatt

SEQ ID NO: 26100 - RNA, 20 nt, synthetic construct
  source 1..20: mol_type = other RNA
ctgtgcctctaccacttcta

SEQ ID NO: 26101 - RNA, 20 nt, synthetic construct
  source 1..20: mol_type = other RNA
ctgttaagaagctccaggta

SEQ ID NO: 26102 - RNA, 20 nt, synthetic construct
  source 1..20: mol_type = other RNA
cttaacagcgatgctgaccc

SEQ ID NO: 26103 - RNA, 20 nt, synthetic construct
  source 1..20: mol_type = other RNA
cttccctcccaggcagctca

SEQ ID NO: 26104 - RNA, 20 nt, synthetic construct
  source 1..20: mol_type = other RNA
cttctaggggccccaactcc

SEQ ID NO: 26105 - RNA, 20 nt, synthetic construct
  source 1..20: mol_type = other RNA
cttctatgaccagatggacc

SEQ ID NO: 26106 - RNA, 20 nt, synthetic construct
  source 1..20: mol_type = other RNA
cttctccagccaggtccatc

SEQ ID NO: 26107 - RNA, 20 nt, synthetic construct
  source 1..20: mol_type = other RNA
cttcttaacagcgatgctga

SEQ ID NO: 26108 - RNA, 20 nt, synthetic construct
  source 1..20: mol_type = other RNA
cttcttctccagccaggtcc

SEQ ID NO: 26109 - RNA, 20 nt, synthetic construct
  source 1..20: mol_type = other RNA
ctttccaacaccctgtgagg

SEQ ID NO: 26110 - RNA, 20 nt, synthetic construct
  source 1..20: mol_type = other RNA
gaagaagagattgagctcta

SEQ ID NO: 26111 - RNA, 20 nt, synthetic construct
  source 1..20: mol_type = other RNA
gaagacaatgctcagtcacc

SEQ ID NO: 26112 - RNA, 20 nt, synthetic construct
  source 1..20: mol_type = other RNA
gaagagaccagagggaggag

SEQ ID NO: 26113 - RNA, 20 nt, synthetic construct
  source 1..20: mol_type = other RNA
gaagagattgagctctactc

SEQ ID NO: 26114 - RNA, 20 nt, synthetic construct
  source 1..20: mol_type = other RNA
gaagctccaggtagccacct

SEQ ID NO: 26115 - RNA, 20 nt, synthetic construct
  source 1..20: mol_type = other RNA
gaaggtggctacctggagct

SEQ ID NO: 26116 - RNA, 20 nt, synthetic construct
  source 1..20: mol_type = other RNA
gaagtggtagaggcacaggg

SEQ ID NO: 26117 - RNA, 20 nt, synthetic construct
  source 1..20: mol_type = other RNA
gacaatgctcagtcacctca

SEQ ID NO: 26118 - RNA, 20 nt, synthetic construct
  source 1..20: mol_type = other RNA
gaccagagggaggagggccc

SEQ ID NO: 26119 - RNA, 20 nt, synthetic construct
  source 1..20: mol_type = other RNA
gaccagatggacctggctgg

SEQ ID NO: 26120 - RNA, 20 nt, synthetic construct
  source 1..20: mol_type = other RNA
gaccccctgtgcctctacca

SEQ ID NO: 26121 - RNA, 20 nt, synthetic construct
  source 1..20: mol_type = other RNA
gacctggctggagaagaaga

SEQ ID NO: 26122 - RNA, 20 nt, synthetic construct
  source 1..20: mol_type = other RNA
gactgagcattgtcttccct

SEQ ID NO: 26123 - RNA, 20 nt, synthetic construct
  source 1..20: mol_type = other RNA
gagaagaagagattgagctc

SEQ ID NO: 26124 - RNA, 20 nt, synthetic construct
  source 1..20: mol_type = other RNA
gagaccagagggaggagggc

SEQ ID NO: 26125 - RNA, 20 nt, synthetic construct
  source 1..20: mol_type = other RNA
gagattgagctctactcagg

SEQ ID NO: 26126 - RNA, 20 nt, synthetic construct
  source 1..20: mol_type = other RNA
gagcattgtcttccctccca

SEQ ID NO: 26127 - RNA, 20 nt, synthetic construct
  source 1..20: mol_type = other RNA
gagctcaatctcttcttctc

SEQ ID NO: 26128 - RNA, 20 nt, synthetic construct
  source 1..20: mol_type = other RNA
gagctctactcaggtgggcc

SEQ ID NO: 26129 - RNA, 20 nt, synthetic construct
  source 1..20: mol_type = other RNA
gagctgcctgggagggaaga

SEQ ID NO: 26130 - RNA, 20 nt, synthetic construct
  source 1..20: mol_type = other RNA
gagcttcttaacagcgatgc

SEQ ID NO: 26131 - RNA, 20 nt, synthetic construct
  source 1..20: mol_type = other RNA
gaggagggcccacctgagta

SEQ ID NO: 26132 - RNA, 20 nt, synthetic construct
  source 1..20: mol_type = other RNA
gaggcacagggggtcagcat

SEQ ID NO: 26133 - RNA, 20 nt, synthetic construct
  source 1..20: mol_type = other RNA
gagggaagacaatgctcagt

SEQ ID NO: 26134 - RNA, 20 nt, synthetic construct
  source 1..20: mol_type = other RNA
gagggaggagggcccacctg

SEQ ID NO: 26135 - RNA, 20 nt, synthetic construct
  source 1..20: mol_type = other RNA
gagggcccacctgagtagag

SEQ ID NO: 26136 - RNA, 20 nt, synthetic construct
  source 1..20: mol_type = other RNA
gaggggtgggggataccgga

SEQ ID NO: 26137 - RNA, 20 nt, synthetic construct
  source 1..20: mol_type = other RNA
gaggtgactgagcattgtct

SEQ ID NO: 26138 - RNA, 20 nt, synthetic construct
  source 1..20: mol_type = other RNA
gagtagagctcaatctcttc

SEQ ID NO: 26139 - RNA, 20 nt, synthetic construct
  source 1..20: mol_type = other RNA
gagttggggcccctagaagg

SEQ ID NO: 26140 - RNA, 20 nt, synthetic construct
  source 1..20: mol_type = other RNA
gataccggaagagaccagag

SEQ ID NO: 26141 - RNA, 20 nt, synthetic construct
  source 1..20: mol_type = other RNA
gatgctgaccccctgtgcct

SEQ ID NO: 26142 - RNA, 20 nt, synthetic construct
  source 1..20: mol_type = other RNA
gatggacctggctggagaag

SEQ ID NO: 26143 - RNA, 20 nt, synthetic construct
  source 1..20: mol_type = other RNA
gattgagctctactcaggtg

SEQ ID NO: 26144 - RNA, 20 nt, synthetic construct
  source 1..20: mol_type = other RNA
gcacactgtgagctgcctgg

SEQ ID NO: 26145 - RNA, 20 nt, synthetic construct
  source 1..20: mol_type = other RNA
gcacagggggtcagcatcgc

SEQ ID NO: 26146 - RNA, 20 nt, synthetic construct
  source 1..20: mol_type = other RNA
gcagctcacagtgtgccacc

SEQ ID NO: 26147 - RNA, 20 nt, synthetic construct
  source 1..20: mol_type = other RNA
gcatcgctgttaagaagctc

SEQ ID NO: 26148 - RNA, 20 nt, synthetic construct
  source 1..20: mol_type = other RNA
gcattgtcttccctcccagg

SEQ ID NO: 26149 - RNA, 20 nt, synthetic construct
  source 1..20: mol_type = other RNA
gccaccatggagttggggcc

SEQ ID NO: 26150 - RNA, 20 nt, synthetic construct
  source 1..20: mol_type = other RNA
gccaccttctaggggcccca

SEQ ID NO: 26151 - RNA, 20 nt, synthetic construct
  source 1..20: mol_type = other RNA
gccaggtccatctggtcata

SEQ ID NO: 26152 - RNA, 20 nt, synthetic construct
  source 1..20: mol_type = other RNA
gcccacctgagtagagctca

SEQ ID NO: 26153 - RNA, 20 nt, synthetic construct
  source 1..20: mol_type = other RNA
gccccaactccatggtggca

SEQ ID NO: 26154 - RNA, 20 nt, synthetic construct
  source 1..20: mol_type = other RNA
gcccctagaaggtggctacc

SEQ ID NO: 26155 - RNA, 20 nt, synthetic construct
  source 1..20: mol_type = other RNA
gccctcctccctctggtctc

SEQ ID NO: 26156 - RNA, 20 nt, synthetic construct
  source 1..20: mol_type = other RNA
gcctctaccacttctatgac

SEQ ID NO: 26157 - RNA, 20 nt, synthetic construct
  source 1..20: mol_type = other RNA
gcctgggagggaagacaatg

SEQ ID NO: 26158 - RNA, 20 nt, synthetic construct
  source 1..20: mol_type = other RNA
gcgatgctgaccccctgtgc

SEQ ID NO: 26159 - RNA, 20 nt, synthetic construct
  source 1..20: mol_type = other RNA
gctacctggagcttcttaac

SEQ ID NO: 26160 - RNA, 20 nt, synthetic construct
  source 1..20: mol_type = other RNA
gctcaatctcttcttctcca

SEQ ID NO: 26161 - RNA, 20 nt, synthetic construct
  source 1..20: mol_type = other RNA
gctcacagtgtgccaccatg

SEQ ID NO: 26162 - RNA, 20 nt, synthetic construct
  source 1..20: mol_type = other RNA
gctcagtcacctcacagggt

SEQ ID NO: 26163 - RNA, 20 nt, synthetic construct
  source 1..20: mol_type = other RNA
gctccaggtagccaccttct

SEQ ID NO: 26164 - RNA, 20 nt, synthetic construct
  source 1..20: mol_type = other RNA
gctctactcaggtgggccct

SEQ ID NO: 26165 - RNA, 20 nt, synthetic construct
  source 1..20: mol_type = other RNA
gctgaccccctgtgcctcta

SEQ ID NO: 26166 - RNA, 20 nt, synthetic construct
  source 1..20: mol_type = other RNA
gctgcctgggagggaagaca

SEQ ID NO: 26167 - RNA, 20 nt, synthetic construct
  source 1..20: mol_type = other RNA
gctggagaagaagagattga

SEQ ID NO: 26168 - RNA, 20 nt, synthetic construct
  source 1..20: mol_type = other RNA
gctgttaagaagctccaggt

SEQ ID NO: 26169 - RNA, 20 nt, synthetic construct
  source 1..20: mol_type = other RNA
gcttcttaacagcgatgctg

SEQ ID NO: 26170 - RNA, 20 nt, synthetic construct
  source 1..20: mol_type = other RNA
ggaagacaatgctcagtcac

SEQ ID NO: 26171 - RNA, 20 nt, synthetic construct
  source 1..20: mol_type = other RNA
ggaagagaccagagggagga

SEQ ID NO: 26172 - RNA, 20 nt, synthetic construct
  source 1..20: mol_type = other RNA
ggacctggctggagaagaag

SEQ ID NO: 26173 - RNA, 20 nt, synthetic construct
  source 1..20: mol_type = other RNA
ggagaagaagagattgagct

SEQ ID NO: 26174 - RNA, 20 nt, synthetic construct
  source 1..20: mol_type = other RNA
ggagcttcttaacagcgatg

SEQ ID NO: 26175 - RNA, 20 nt, synthetic construct
  source 1..20: mol_type = other RNA
ggaggagggcccacctgagt

SEQ ID NO: 26176 - RNA, 20 nt, synthetic construct
  source 1..20: mol_type = other RNA
ggagggaagacaatgctcag

SEQ ID NO: 26177 - RNA, 20 nt, synthetic construct
  source 1..20: mol_type = other RNA
ggagggcccacctgagtaga

SEQ ID NO: 26178 - RNA, 20 nt, synthetic construct
  source 1..20: mol_type = other RNA
ggagttggggcccctagaag

SEQ ID NO: 26179 - RNA, 20 nt, synthetic construct
  source 1..20: mol_type = other RNA
ggataccggaagagaccaga

SEQ ID NO: 26180 - RNA, 20 nt, synthetic construct
  source 1..20: mol_type = other RNA
ggcacactgtgagctgcctg

SEQ ID NO: 26181 - RNA, 20 nt, synthetic construct
  source 1..20: mol_type = other RNA
ggcacagggggtcagcatcg

SEQ ID NO: 26182 - RNA, 20 nt, synthetic construct
  source 1..20: mol_type = other RNA
ggcagctcacagtgtgccac

SEQ ID NO: 26183 - RNA, 20 nt, synthetic construct
  source 1..20: mol_type = other RNA
ggcccacctgagtagagctc

SEQ ID NO: 26184 - RNA, 20 nt, synthetic construct
  source 1..20: mol_type = other RNA
ggccccaactccatggtggc

SEQ ID NO: 26185 - RNA, 20 nt, synthetic construct
  source 1..20: mol_type = other RNA
ggcccctagaaggtggctac

SEQ ID NO: 26186 - RNA, 20 nt, synthetic construct
  source 1..20: mol_type = other RNA
ggccctcctccctctggtct

SEQ ID NO: 26187 - RNA, 20 nt, synthetic construct
  source 1..20: mol_type = other RNA
ggctacctggagcttcttaa

SEQ ID NO: 26188 - RNA, 20 nt, synthetic construct
  source 1..20: mol_type = other RNA
ggctggagaagaagagattg

SEQ ID NO: 26189 - RNA, 20 nt, synthetic construct
  source 1..20: mol_type = other RNA
gggaagacaatgctcagtca

SEQ ID NO: 26190 - RNA, 20 nt, synthetic construct
  source 1..20: mol_type = other RNA
gggaggagggcccacctgag

SEQ ID NO: 26191 - RNA, 20 nt, synthetic construct
  source 1..20: mol_type = other RNA
gggagggaagacaatgctca

SEQ ID NO: 26192 - RNA, 20 nt, synthetic construct
  source 1..20: mol_type = other RNA
gggataccggaagagaccag

SEQ ID NO: 26193 - RNA, 20 nt, synthetic construct
  source 1..20: mol_type = other RNA
gggcccacctgagtagagct

SEQ ID NO: 26194 - RNA, 20 nt, synthetic construct
  source 1..20: mol_type = other RNA
gggccccaactccatggtgg

SEQ ID NO: 26195 - RNA, 20 nt, synthetic construct
  source 1..20: mol_type = other RNA
gggcccctagaaggtggcta

SEQ ID NO: 26196 - RNA, 20 nt, synthetic construct
  source 1..20: mol_type = other RNA
gggccctcctccctctggtc

SEQ ID NO: 26197 - RNA, 20 nt, synthetic construct
  source 1..20: mol_type = other RNA
ggggataccggaagagacca

SEQ ID NO: 26198 - RNA, 20 nt, synthetic construct
  source 1..20: mol_type = other RNA
ggggccccaactccatggtg

SEQ ID NO: 26199 - RNA, 20 nt, synthetic construct
  source 1..20: mol_type = other RNA
ggggcccctagaaggtggct

SEQ ID NO: 26200 - RNA, 20 nt, synthetic construct
  source 1..20: mol_type = other RNA
gggggataccggaagagacc

SEQ ID NO: 26201 - RNA, 20 nt, synthetic construct
  source 1..20: mol_type = other RNA
gggggtcagcatcgctgtta

SEQ ID NO: 26202 - RNA, 20 nt, synthetic construct
  source 1..20: mol_type = other RNA
ggggtcagcatcgctgttaa

SEQ ID NO: 26203 - RNA, 20 nt, synthetic construct
  source 1..20: mol_type = other RNA
ggggtgggggataccggaag

SEQ ID NO: 26204 - RNA, 20 nt, synthetic construct
  source 1..20: mol_type = other RNA
gggtcagcatcgctgttaag

SEQ ID NO: 26205 - RNA, 20 nt, synthetic construct
  source 1..20: mol_type = other RNA
gggtgggggataccggaaga

SEQ ID NO: 26206 - RNA, 20 nt, synthetic construct
  source 1..20: mol_type = other RNA
ggtagaggcacagggggtca

SEQ ID NO: 26207 - RNA, 20 nt, synthetic construct
  source 1..20: mol_type = other RNA
ggtagccaccttctaggggc

SEQ ID NO: 26208 - RNA, 20 nt, synthetic construct
  source 1..20: mol_type = other RNA
ggtcagcatcgctgttaaga

SEQ ID NO: 26209 - RNA, 20 nt, synthetic construct
  source 1..20: mol_type = other RNA
ggtcatagaagtggtagagg

SEQ ID NO: 26210 - RNA, 20 nt, synthetic construct
  source 1..20: mol_type = other RNA
ggtccatctggtcatagaag

SEQ ID NO: 26211 - RNA, 20 nt, synthetic construct
  source 1..20: mol_type = other RNA
ggtgactgagcattgtcttc

SEQ ID NO: 26212 - RNA, 20 nt, synthetic construct
  source 1..20: mol_type = other RNA
ggtggcacactgtgagctgc

SEQ ID NO: 26213 - RNA, 20 nt, synthetic construct
  source 1..20: mol_type = other RNA
ggtggctacctggagcttct

SEQ ID NO: 26214 - RNA, 20 nt, synthetic construct
  source 1..20: mol_type = other RNA
ggtgggccctcctccctctg

SEQ ID NO: 26215 - RNA, 20 nt, synthetic construct
  source 1..20: mol_type = other RNA
ggtgggggataccggaagag

SEQ ID NO: 26216 - RNA, 20 nt, synthetic construct
  source 1..20: mol_type = other RNA
gtagagctcaatctcttctt

SEQ ID NO: 26217 - RNA, 20 nt, synthetic construct
  source 1..20: mol_type = other RNA
gtagaggcacagggggtcag

SEQ ID NO: 26218 - RNA, 20 nt, synthetic construct
  source 1..20: mol_type = other RNA
gtagccaccttctaggggcc

SEQ ID NO: 26219 - RNA, 20 nt, synthetic construct
  source 1..20: mol_type = other RNA
gtcagcatcgctgttaagaa

SEQ ID NO: 26220 - RNA, 20 nt, synthetic construct
  source 1..20: mol_type = other RNA
gtcatagaagtggtagaggc

SEQ ID NO: 26221 - RNA, 20 nt, synthetic construct
  source 1..20: mol_type = other RNA
gtccatctggtcatagaagt

SEQ ID NO: 26222 - RNA, 20 nt, synthetic construct
  source 1..20: mol_type = other RNA
gtcttccctcccaggcagct

SEQ ID NO: 26223 - RNA, 20 nt, synthetic construct
  source 1..20: mol_type = other RNA
gtgactgagcattgtcttcc

SEQ ID NO: 26224 - RNA, 20 nt, synthetic construct
  source 1..20: mol_type = other RNA
gtgagctgcctgggagggaa

SEQ ID NO: 26225 - RNA, 20 nt, synthetic construct
  source 1..20: mol_type = other RNA
gtgaggtgactgagcattgt

SEQ ID NO: 26226 - RNA, 20 nt, synthetic construct
  source 1..20: mol_type = other RNA
gtgccaccatggagttgggg

SEQ ID NO: 26227 - RNA, 20 nt, synthetic construct
  source 1..20: mol_type = other RNA
gtgcctctaccacttctatg

SEQ ID NO: 26228 - RNA, 20 nt, synthetic construct
  source 1..20: mol_type = other RNA
gtggcacactgtgagctgcc

SEQ ID NO: 26229 - RNA, 20 nt, synthetic construct
  source 1..20: mol_type = other RNA
gtggctacctggagcttctt

SEQ ID NO: 26230 - RNA, 20 nt, synthetic construct
  source 1..20: mol_type = other RNA
gtgggccctcctccctctgg

SEQ ID NO: 26231 - RNA, 20 nt, synthetic construct
  source 1..20: mol_type = other RNA
gtgggggataccggaagaga

SEQ ID NO: 26232 - RNA, 20 nt, synthetic construct
  source 1..20: mol_type = other RNA
gtggtagaggcacagggggt

SEQ ID NO: 26233 - RNA, 20 nt, synthetic construct
  source 1..20: mol_type = other RNA
gtgtgccaccatggagttgg

SEQ ID NO: 26234 - RNA, 20 nt, synthetic construct
  source 1..20: mol_type = other RNA
gttaagaagctccaggtagc

SEQ ID NO: 26235 - RNA, 20 nt, synthetic construct
  source 1..20: mol_type = other RNA
gttggggcccctagaaggtg

SEQ ID NO: 26236 - RNA, 20 nt, synthetic construct
  source 1..20: mol_type = other RNA
taacagcgatgctgaccccc

SEQ ID NO: 26237 - RNA, 20 nt, synthetic construct
  source 1..20: mol_type = other RNA
taagaagctccaggtagcca

SEQ ID NO: 26238 - RNA, 20 nt, synthetic construct
  source 1..20: mol_type = other RNA
taccacttctatgaccagat

SEQ ID NO: 26239 - RNA, 20 nt, synthetic construct
  source 1..20: mol_type = other RNA
taccggaagagaccagaggg

SEQ ID NO: 26240 - RNA, 20 nt, synthetic construct
  source 1..20: mol_type = other RNA
tacctggagcttcttaacag

SEQ ID NO: 26241 - RNA, 20 nt, synthetic construct
  source 1..20: mol_type = other RNA
tactcaggtgggccctcctc

SEQ ID NO: 26242 - RNA, 20 nt, synthetic construct
  source 1..20: mol_type = other RNA
tagaaggtggctacctggag

SEQ ID NO: 26243 - RNA, 20 nt, synthetic construct
  source 1..20: mol_type = other RNA
tagaagtggtagaggcacag

SEQ ID NO: 26244 - RNA, 20 nt, synthetic construct
  source 1..20: mol_type = other RNA
tagagctcaatctcttcttc

SEQ ID NO: 26245 - RNA, 20 nt, synthetic construct
  source 1..20: mol_type = other RNA
tagaggcacagggggtcagc

SEQ ID NO: 26246 - RNA, 20 nt, synthetic construct
  source 1..20: mol_type = other RNA
tagccaccttctaggggccc

SEQ ID NO: 26247 - RNA, 20 nt, synthetic construct
  source 1..20: mol_type = other RNA
taggggccccaactccatgg

SEQ ID NO: 26248 - RNA, 20 nt, synthetic construct
  source 1..20: mol_type = other RNA
tatgaccagatggacctggc

SEQ ID NO: 26249 - RNA, 20 nt, synthetic construct
  source 1..20: mol_type = other RNA
tcaatctcttcttctccagc

SEQ ID NO: 26250 - RNA, 20 nt, synthetic construct
  source 1..20: mol_type = other RNA
tcacagtgtgccaccatgga

SEQ ID NO: 26251 - RNA, 20 nt, synthetic construct
  source 1..20: mol_type = other RNA
tcagcatcgctgttaagaag

SEQ ID NO: 26252 - RNA, 20 nt, synthetic construct
  source 1..20: mol_type = other RNA
tcaggtgggccctcctccct

SEQ ID NO: 26253 - RNA, 20 nt, synthetic construct
  source 1..20: mol_type = other RNA
tcatagaagtggtagaggca

SEQ ID NO: 26254 - RNA, 20 nt, synthetic construct
  source 1..20: mol_type = other RNA
tccaacaccctgtgaggtga

SEQ ID NO: 26255 - RNA, 20 nt, synthetic construct
  source 1..20: mol_type = other RNA
tccagccaggtccatctggt

SEQ ID NO: 26256 - RNA, 20 nt, synthetic construct
  source 1..20: mol_type = other RNA
tccaggtagccaccttctag

SEQ ID NO: 26257 - RNA, 20 nt, synthetic construct
  source 1..20: mol_type = other RNA
tccatctggtcatagaagtg

SEQ ID NO: 26258 - RNA, 20 nt, synthetic construct
  source 1..20: mol_type = other RNA
tccatggtggcacactgtga

SEQ ID NO: 26259 - RNA, 20 nt, synthetic construct
  source 1..20: mol_type = other RNA
tcccaggcagctcacagtgt

SEQ ID NO: 26260 - RNA, 20 nt, synthetic construct
  source 1..20: mol_type = other RNA
tccctcccaggcagctcaca

SEQ ID NO: 26261 - RNA, 20 nt, synthetic construct
  source 1..20: mol_type = other RNA
tccctctggtctcttccggt

SEQ ID NO: 26262 - RNA, 20 nt, synthetic construct
  source 1..20: mol_type = other RNA
tcctccctctggtctcttcc

SEQ ID NO: 26263 - RNA, 20 nt, synthetic construct
  source 1..20: mol_type = other RNA
tcgctgttaagaagctccag

SEQ ID NO: 26264 - RNA, 20 nt, synthetic construct
  source 1..20: mol_type = other RNA
tctaccacttctatgaccag

SEQ ID NO: 26265 - RNA, 20 nt, synthetic construct
  source 1..20: mol_type = other RNA
tctactcaggtgggccctcc

SEQ ID NO: 26266 - RNA, 20 nt, synthetic construct
  source 1..20: mol_type = other RNA
tctaggggccccaactccat

SEQ ID NO: 26267 - RNA, 20 nt, synthetic construct
  source 1..20: mol_type = other RNA
tctatgaccagatggacctg

SEQ ID NO: 26268 - RNA, 20 nt, synthetic construct
  source 1..20: mol_type = other RNA
tctccagccaggtccatctg

SEQ ID NO: 26269 - RNA, 20 nt, synthetic construct
  source 1..20: mol_type = other RNA
tctcttcttctccagccagg

SEQ ID NO: 26270 - RNA, 20 nt, synthetic construct
  source 1..20: mol_type = other RNA
tctggtcatagaagtggtag

SEQ ID NO: 26271 - RNA, 20 nt, synthetic construct
  source 1..20: mol_type = other RNA
tctggtctcttccggtatcc

SEQ ID NO: 26272 - RNA, 20 nt, synthetic construct
  source 1..20: mol_type = other RNA
tcttaacagcgatgctgacc

SEQ ID NO: 26273 - RNA, 20 nt, synthetic construct
  source 1..20: mol_type = other RNA
tcttccctcccaggcagctc

SEQ ID NO: 26274 - RNA, 20 nt, synthetic construct
  source 1..20: mol_type = other RNA
tcttctccagccaggtccat

SEQ ID NO: 26275 - RNA, 20 nt, synthetic construct
  source 1..20: mol_type = other RNA
tcttcttctccagccaggtc

SEQ ID NO: 26276 - RNA, 20 nt, synthetic construct
  source 1..20: mol_type = other RNA
tgaccagatggacctggctg

SEQ ID NO: 26277 - RNA, 20 nt, synthetic construct
  source 1..20: mol_type = other RNA
tgaccccctgtgcctctacc

SEQ ID NO: 26278 - RNA, 20 nt, synthetic construct
  source 1..20: mol_type = other RNA
tgactgagcattgtcttccc

SEQ ID NO: 26279 - RNA, 20 nt, synthetic construct
  source 1..20: mol_type = other RNA
tgagcattgtcttccctccc

SEQ ID NO: 26280 - RNA, 20 nt, synthetic construct
  source 1..20: mol_type = other RNA
tgagctctactcaggtgggc

SEQ ID NO: 26281 - RNA, 20 nt, synthetic construct
  source 1..20: mol_type = other RNA
tgagctgcctgggagggaag

SEQ ID NO: 26282 - RNA, 20 nt, synthetic construct
  source 1..20: mol_type = other RNA
tgaggtgactgagcattgtc

SEQ ID NO: 26283 - RNA, 20 nt, synthetic construct
  source 1..20: mol_type = other RNA
tgagtagagctcaatctctt

SEQ ID NO: 26284 - RNA, 20 nt, synthetic construct
  source 1..20: mol_type = other RNA
tgccaccatggagttggggc

SEQ ID NO: 26285 - RNA, 20 nt, synthetic construct
  source 1..20: mol_type = other RNA
tgcctctaccacttctatga

SEQ ID NO: 26286 - RNA, 20 nt, synthetic construct
  source 1..20: mol_type = other RNA
tgcctgggagggaagacaat

SEQ ID NO: 26287 - RNA, 20 nt, synthetic construct
  source 1..20: mol_type = other RNA
tgctcagtcacctcacaggg

SEQ ID NO: 26288 - RNA, 20 nt, synthetic construct
  source 1..20: mol_type = other RNA
tgctgaccccctgtgcctct

SEQ ID NO: 26289 - RNA, 20 nt, synthetic construct
  source 1..20: mol_type = other RNA
tggacctggctggagaagaa

SEQ ID NO: 26290 - RNA, 20 nt, synthetic construct
  source 1..20: mol_type = other RNA
tggagaagaagagattgagc

SEQ ID NO: 26291 - RNA, 20 nt, synthetic construct
  source 1..20: mol_type = other RNA
tggagcttcttaacagcgat

SEQ ID NO: 26292 - RNA, 20 nt, synthetic construct
  source 1..20: mol_type = other RNA
tggagttggggcccctagaa

SEQ ID NO: 26293 - RNA, 20 nt, synthetic construct
  source 1..20: mol_type = other RNA
tggcacactgtgagctgcct

SEQ ID NO: 26294 - RNA, 20 nt, synthetic construct
  source 1..20: mol_type = other RNA
tggctacctggagcttctta

SEQ ID NO: 26295 - RNA, 20 nt, synthetic construct
  source 1..20: mol_type = other RNA
tggctggagaagaagagatt

SEQ ID NO: 26296 - RNA, 20 nt, synthetic construct
  source 1..20: mol_type = other RNA
tgggagggaagacaatgctc

SEQ ID NO: 26297 - RNA, 20 nt, synthetic construct
  source 1..20: mol_type = other RNA
tgggccctcctccctctggt

SEQ ID NO: 26298 - RNA, 20 nt, synthetic construct
  source 1..20: mol_type = other RNA
tggggcccctagaaggtggc

SEQ ID NO: 26299 - RNA, 20 nt, synthetic construct
  source 1..20: mol_type = other RNA
tgggggataccggaagagac

SEQ ID NO: 26300 - RNA, 20 nt, synthetic construct
  source 1..20: mol_type = other RNA
tggtagaggcacagggggtc

SEQ ID NO: 26301 - RNA, 20 nt, synthetic construct
  source 1..20: mol_type = other RNA
tggtcatagaagtggtagag

SEQ ID NO: 26302 - RNA, 20 nt, synthetic construct
  source 1..20: mol_type = other RNA
tggtctcttccggtatcccc

SEQ ID NO: 26303 - RNA, 20 nt, synthetic construct
  source 1..20: mol_type = other RNA
tggtggcacactgtgagctg

SEQ ID NO: 26304 - RNA, 20 nt, synthetic construct
  source 1..20: mol_type = other RNA
tgtcttccctcccaggcagc

SEQ ID NO: 26305 - RNA, 20 nt, synthetic construct
  source 1..20: mol_type = other RNA
tgtgagctgcctgggaggga

SEQ ID NO: 26306 - RNA, 20 nt, synthetic construct
  source 1..20: mol_type = other RNA
tgtgaggtgactgagcattg

SEQ ID NO: 26307 - RNA, 20 nt, synthetic construct
  source 1..20: mol_type = other RNA
tgtgccaccatggagttggg

SEQ ID NO: 26308 - RNA, 20 nt, synthetic construct
  source 1..20: mol_type = other RNA
tgtgcctctaccacttctat

SEQ ID NO: 26309 - RNA, 20 nt, synthetic construct
  source 1..20: mol_type = other RNA
tgttaagaagctccaggtag

SEQ ID NO: 26310 - RNA, 20 nt, synthetic construct
  source 1..20: mol_type = other RNA
ttaacagcgatgctgacccc

SEQ ID NO: 26311 - RNA, 20 nt, synthetic construct
  source 1..20: mol_type = other RNA
ttaagaagctccaggtagcc

SEQ ID NO: 26312 - RNA, 20 nt, synthetic construct
  source 1..20: mol_type = other RNA
ttccaacaccctgtgaggtg

SEQ ID NO: 26313 - RNA, 20 nt, synthetic construct
  source 1..20: mol_type = other RNA
ttccctcccaggcagctcac

SEQ ID NO: 26314 - RNA, 20 nt, synthetic construct
  source 1..20: mol_type = other RNA
ttctaggggccccaactcca

SEQ ID NO: 26315 - RNA, 20 nt, synthetic construct
  source 1..20: mol_type = other RNA
ttctatgaccagatggacct

SEQ ID NO: 26316 - RNA, 20 nt, synthetic construct
  source 1..20: mol_type = other RNA
ttctccagccaggtccatct

SEQ ID NO: 26317 - RNA, 20 nt, synthetic construct
  source 1..20: mol_type = other RNA
ttcttaacagcgatgctgac

SEQ ID NO: 26318 - RNA, 20 nt, synthetic construct
  source 1..20: mol_type = other RNA
ttcttctccagccaggtcca

SEQ ID NO: 26319 - RNA, 20 nt, synthetic construct
  source 1..20: mol_type = other RNA
ttgagctctactcaggtggg

SEQ ID NO: 26320 - RNA, 20 nt, synthetic construct
  source 1..20: mol_type = other RNA
ttggggcccctagaaggtgg

SEQ ID NO: 26321 - RNA, 20 nt, synthetic construct
  source 1..20: mol_type = other RNA
ttgtcttccctcccaggcag

SEQ ID NO: 26322 - RNA, 20 nt, synthetic construct
  source 1..20: mol_type = other RNA
tttccaacaccctgtgaggt

SEQ ID NO: 26323 - RNA, 21 nt, synthetic construct
  source 1..21: mol_type = other RNA
aacaccctgtgaggtgactga

SEQ ID NO: 26324 - RNA, 21 nt, synthetic construct
  source 1..21: mol_type = other RNA
aacagcgatgctgaccccctg

SEQ ID NO: 26325 - RNA, 21 nt, synthetic construct
  source 1..21: mol_type = other RNA
aactccatggtggcacactgt

SEQ ID NO: 26326 - RNA, 21 nt, synthetic construct
  source 1..21: mol_type = other RNA
aagaagagattgagctctact

SEQ ID NO: 26327 - RNA, 21 nt, synthetic construct
  source 1..21: mol_type = other RNA
aagaagctccaggtagccacc

SEQ ID NO: 26328 - RNA, 21 nt, synthetic construct
  source 1..21: mol_type = other RNA
aagacaatgctcagtcacctc

SEQ ID NO: 26329 - RNA, 21 nt, synthetic construct
  source 1..21: mol_type = other RNA
aagagaccagagggaggaggg

SEQ ID NO: 26330 - RNA, 21 nt, synthetic construct
  source 1..21: mol_type = other RNA
aagagattgagctctactcag

SEQ ID NO: 26331 - RNA, 21 nt, synthetic construct
  source 1..21: mol_type = other RNA
aagctccaggtagccaccttc

SEQ ID NO: 26332 - RNA, 21 nt, synthetic construct
  source 1..21: mol_type = other RNA
aaggtggctacctggagcttc

SEQ ID NO: 26333 - RNA, 21 nt, synthetic construct
  source 1..21: mol_type = other RNA
aagtggtagaggcacaggggg

SEQ ID NO: 26334 - RNA, 21 nt, synthetic construct
  source 1..21: mol_type = other RNA
aatctcttcttctccagccag

SEQ ID NO: 26335 - RNA, 21 nt, synthetic construct
  source 1..21: mol_type = other RNA
aatgctcagtcacctcacagg

SEQ ID NO: 26336 - RNA, 21 nt, synthetic construct
  source 1..21: mol_type = other RNA
acaatgctcagtcacctcaca

SEQ ID NO: 26337 - RNA, 21 nt, synthetic construct
  source 1..21: mol_type = other RNA
acaccctgtgaggtgactgag

SEQ ID NO: 26338 - RNA, 21 nt, synthetic construct
  source 1..21: mol_type = other RNA
acactgtgagctgcctgggag

SEQ ID NO: 26339 - RNA, 21 nt, synthetic construct
  source 1..21: mol_type = other RNA
acagcgatgctgaccccctgt

SEQ ID NO: 26340 - RNA, 21 nt, synthetic construct
  source 1..21: mol_type = other RNA
acagggggtcagcatcgctgt

SEQ ID NO: 26341 - RNA, 21 nt, synthetic construct
  source 1..21: mol_type = other RNA
acagtgtgccaccatggagtt

SEQ ID NO: 26342 - RNA, 21 nt, synthetic construct
  source 1..21: mol_type = other RNA
accacttctatgaccagatgg

SEQ ID NO: 26343 - RNA, 21 nt, synthetic construct
  source 1..21: mol_type = other RNA
accagagggaggagggcccac

SEQ ID NO: 26344 - RNA, 21 nt, synthetic construct
  source 1..21: mol_type = other RNA
accagatggacctggctggag

SEQ ID NO: 26345 - RNA, 21 nt, synthetic construct
  source 1..21: mol_type = other RNA
accatggagttggggccccta

SEQ ID NO: 26346 - RNA, 21 nt, synthetic construct
  source 1..21: mol_type = other RNA
accccctgtgcctctaccact

SEQ ID NO: 26347 - RNA, 21 nt, synthetic construct
  source 1..21: mol_type = other RNA
accctgtgaggtgactgagca

SEQ ID NO: 26348 - RNA, 21 nt, synthetic construct
  source 1..21: mol_type = other RNA
accggaagagaccagagggag

SEQ ID NO: 26349 - RNA, 21 nt, synthetic construct
  source 1..21: mol_type = other RNA
acctgagtagagctcaatctc

SEQ ID NO: 26350 - RNA, 21 nt, synthetic construct
  source 1..21: mol_type = other RNA
acctggagcttcttaacagcg

SEQ ID NO: 26351 - RNA, 21 nt, synthetic construct
  source 1..21: mol_type = other RNA
acctggctggagaagaagaga

SEQ ID NO: 26352 - RNA, 21 nt, synthetic construct
  source 1..21: mol_type = other RNA
accttctaggggccccaactc

SEQ ID NO: 26353 - RNA, 21 nt, synthetic construct
  source 1..21: mol_type = other RNA
actcaggtgggccctcctccc

SEQ ID NO: 26354 - RNA, 21 nt, synthetic construct
  source 1..21: mol_type = other RNA
actccatggtggcacactgtg

SEQ ID NO: 26355 - RNA, 21 nt, synthetic construct
  source 1..21: mol_type = other RNA
actgagcattgtcttccctcc

SEQ ID NO: 26356 - RNA, 21 nt, synthetic construct
  source 1..21: mol_type = other RNA
actgtgagctgcctgggaggg

SEQ ID NO: 26357 - RNA, 21 nt, synthetic construct
  source 1..21: mol_type = other RNA
acttctatgaccagatggacc

SEQ ID NO: 26358 - RNA, 21 nt, synthetic construct
  source 1..21: mol_type = other RNA
agaagaagagattgagctcta

SEQ ID NO: 26359 - RNA, 21 nt, synthetic construct
  source 1..21: mol_type = other RNA
agaagagattgagctctactc

SEQ ID NO: 26360 - RNA, 21 nt, synthetic construct
  source 1..21: mol_type = other RNA
agaagctccaggtagccacct

SEQ ID NO: 26361 - RNA, 21 nt, synthetic construct
  source 1..21: mol_type = other RNA
agaaggtggctacctggagct

SEQ ID NO: 26362 - RNA, 21 nt, synthetic construct
  source 1..21: mol_type = other RNA
agaagtggtagaggcacaggg

SEQ ID NO: 26363 - RNA, 21 nt, synthetic construct
  source 1..21: mol_type = other RNA
agacaatgctcagtcacctca

SEQ ID NO: 26364 - RNA, 21 nt, synthetic construct
  source 1..21: mol_type = other RNA
agaccagagggaggagggccc

SEQ ID NO: 26365 - RNA, 21 nt, synthetic construct
  source 1..21: mol_type = other RNA
agagaccagagggaggagggc

SEQ ID NO: 26366 - RNA, 21 nt, synthetic construct
  source 1..21: mol_type = other RNA
agagattgagctctactcagg

SEQ ID NO: 26367 - RNA, 21 nt, synthetic construct
  source 1..21: mol_type = other RNA
agagctcaatctcttcttctc

SEQ ID NO: 26368 - RNA, 21 nt, synthetic construct
  source 1..21: mol_type = other RNA
agaggcacagggggtcagcat

SEQ ID NO: 26369 - RNA, 21 nt, synthetic construct
  source 1..21: mol_type = other RNA
agagggaggagggcccacctg

SEQ ID NO: 26370 - RNA, 21 nt, synthetic construct
  source 1..21: mol_type = other RNA
agatggacctggctggagaag

SEQ ID NO: 26371 - RNA, 21 nt, synthetic construct
  source 1..21: mol_type = other RNA
agattgagctctactcaggtg

SEQ ID NO: 26372 - RNA, 21 nt, synthetic construct
  source 1..21: mol_type = other RNA
agcatcgctgttaagaagctc

SEQ ID NO: 26373 - RNA, 21 nt, synthetic construct
  source 1..21: mol_type = other RNA
agcattgtcttccctcccagg

SEQ ID NO: 26374 - RNA, 21 nt, synthetic construct
  source 1..21: mol_type = other RNA
agccaccttctaggggcccca

SEQ ID NO: 26375 - RNA, 21 nt, synthetic construct
  source 1..21: mol_type = other RNA
agccaggtccatctggtcata

SEQ ID NO: 26376 - RNA, 21 nt, synthetic construct
  source 1..21: mol_type = other RNA
agcgatgctgaccccctgtgc

SEQ ID NO: 26377 - RNA, 21 nt, synthetic construct
  source 1..21: mol_type = other RNA
agctcaatctcttcttctcca

SEQ ID NO: 26378 - RNA, 21 nt, synthetic construct
  source 1..21: mol_type = other RNA
agctcacagtgtgccaccatg

SEQ ID NO: 26379 - RNA, 21 nt, synthetic construct
  source 1..21: mol_type = other RNA
agctccaggtagccaccttct

SEQ ID NO: 26380 - RNA, 21 nt, synthetic construct
  source 1..21: mol_type = other RNA
agctctactcaggtgggccct

SEQ ID NO: 26381 - RNA, 21 nt, synthetic construct
  source 1..21: mol_type = other RNA
agctgcctgggagggaagaca

SEQ ID NO: 26382 - RNA, 21 nt, synthetic construct
  source 1..21: mol_type = other RNA
agcttcttaacagcgatgctg

SEQ ID NO: 26383 - RNA, 21 nt, synthetic construct
  source 1..21: mol_type = other RNA
aggagggcccacctgagtaga

SEQ ID NO: 26384 - RNA, 21 nt, synthetic construct
  source 1..21: mol_type = other RNA
aggcacagggggtcagcatcg

SEQ ID NO: 26385 - RNA, 21 nt, synthetic construct
  source 1..21: mol_type = other RNA
aggcagctcacagtgtgccac

SEQ ID NO: 26386 - RNA, 21 nt, synthetic construct
  source 1..21: mol_type = other RNA
agggaagacaatgctcagtca

SEQ ID NO: 26387 - RNA, 21 nt, synthetic construct
  source 1..21: mol_type = other RNA
agggaggagggcccacctgag

SEQ ID NO: 26388 - RNA, 21 nt, synthetic construct
  source 1..21: mol_type = other RNA
agggcccacctgagtagagct

SEQ ID NO: 26389 - RNA, 21 nt, synthetic construct
  source 1..21: mol_type = other RNA
aggggccccaactccatggtg

SEQ ID NO: 26390 - RNA, 21 nt, synthetic construct
  source 1..21: mol_type = other RNA
agggggtcagcatcgctgtta

SEQ ID NO: 26391 - RNA, 21 nt, synthetic construct
  source 1..21: mol_type = other RNA
aggggtgggggataccggaag

SEQ ID NO: 26392 - RNA, 21 nt, synthetic construct
  source 1..21: mol_type = other RNA
aggtagccaccttctaggggc

SEQ ID NO: 26393 - RNA, 21 nt, synthetic construct
  source 1..21: mol_type = other RNA
aggtccatctggtcatagaag

SEQ ID NO: 26394 - RNA, 21 nt, synthetic construct
  source 1..21: mol_type = other RNA
aggtgactgagcattgtcttc

SEQ ID NO: 26395 - RNA, 21 nt, synthetic construct
  source 1..21: mol_type = other RNA
aggtggctacctggagcttct

SEQ ID NO: 26396 - RNA, 21 nt, synthetic construct
  source 1..21: mol_type = other RNA
aggtgggccctcctccctctg

SEQ ID NO: 26397 - RNA, 21 nt, synthetic construct
  source 1..21: mol_type = other RNA
agtagagctcaatctcttctt

SEQ ID NO: 26398 - RNA, 21 nt, synthetic construct
  source 1..21: mol_type = other RNA
agtggtagaggcacagggggt

SEQ ID NO: 26399 - RNA, 21 nt, synthetic construct
  source 1..21: mol_type = other RNA
agtgtgccaccatggagttgg

SEQ ID NO: 26400 - RNA, 21 nt, synthetic construct
  source 1..21: mol_type = other RNA
agttggggcccctagaaggtg

SEQ ID NO: 26401 - RNA, 21 nt, synthetic construct
  source 1..21: mol_type = other RNA
ataccggaagagaccagaggg

SEQ ID NO: 26402 - RNA, 21 nt, synthetic construct
  source 1..21: mol_type = other RNA
atagaagtggtagaggcacag

SEQ ID NO: 26403 - RNA, 21 nt, synthetic construct
  source 1..21: mol_type = other RNA
atcgctgttaagaagctccag

SEQ ID NO: 26404 - RNA, 21 nt, synthetic construct
  source 1..21: mol_type = other RNA
atctcttcttctccagccagg

SEQ ID NO: 26405 - RNA, 21 nt, synthetic construct
  source 1..21: mol_type = other RNA
atctggtcatagaagtggtag

SEQ ID NO: 26406 - RNA, 21 nt, synthetic construct
  source 1..21: mol_type = other RNA
atgaccagatggacctggctg

SEQ ID NO: 26407 - RNA, 21 nt, synthetic construct
  source 1..21: mol_type = other RNA
atgctcagtcacctcacaggg

SEQ ID NO: 26408 - RNA, 21 nt, synthetic construct
  source 1..21: mol_type = other RNA
atgctgaccccctgtgcctct

SEQ ID NO: 26409 - RNA, 21 nt, synthetic construct
  source 1..21: mol_type = other RNA
atggacctggctggagaagaa

SEQ ID NO: 26410 - RNA, 21 nt, synthetic construct
  source 1..21: mol_type = other RNA
atggagttggggcccctagaa

SEQ ID NO: 26411 - RNA, 21 nt, synthetic construct
  source 1..21: mol_type = other RNA
atggtggcacactgtgagctg

SEQ ID NO: 26412 - RNA, 21 nt, synthetic construct
  source 1..21: mol_type = other RNA
attgagctctactcaggtggg

SEQ ID NO: 26413 - RNA, 21 nt, synthetic construct
  source 1..21: mol_type = other RNA
attgtcttccctcccaggcag

SEQ ID NO: 26414 - RNA, 21 nt, synthetic construct
  source 1..21: mol_type = other RNA
caacaccctgtgaggtgactg

SEQ ID NO: 26415 - RNA, 21 nt, synthetic construct
  source 1..21: mol_type = other RNA
caactccatggtggcacactg

SEQ ID NO: 26416 - RNA, 21 nt, synthetic construct
  source 1..21: mol_type = other RNA
caatctcttcttctccagcca

SEQ ID NO: 26417 - RNA, 21 nt, synthetic construct
  source 1..21: mol_type = other RNA
caatgctcagtcacctcacag

SEQ ID NO: 26418 - RNA, 21 nt, synthetic construct
  source 1..21: mol_type = other RNA
cacactgtgagctgcctggga

SEQ ID NO: 26419 - RNA, 21 nt, synthetic construct
  source 1..21: mol_type = other RNA
cacagggggtcagcatcgctg

SEQ ID NO: 26420 - RNA, 21 nt, synthetic construct
  source 1..21: mol_type = other RNA
cacagtgtgccaccatggagt

SEQ ID NO: 26421 - RNA, 21 nt, synthetic construct
  source 1..21: mol_type = other RNA
caccatggagttggggcccct

SEQ ID NO: 26422 - RNA, 21 nt, synthetic construct
  source 1..21: mol_type = other RNA
caccctgtgaggtgactgagc

SEQ ID NO: 26423 - RNA, 21 nt, synthetic construct
  source 1..21: mol_type = other RNA
cacctgagtagagctcaatct

SEQ ID NO: 26424 - RNA, 21 nt, synthetic construct
  source 1..21: mol_type = other RNA
caccttctaggggccccaact

SEQ ID NO: 26425 - RNA, 21 nt, synthetic construct
  source 1..21: mol_type = other RNA
cactgtgagctgcctgggagg

SEQ ID NO: 26426 - RNA, 21 nt, synthetic construct
  source 1..21: mol_type = other RNA
cacttctatgaccagatggac

SEQ ID NO: 26427 - RNA, 21 nt, synthetic construct
  source 1..21: mol_type = other RNA
cagagggaggagggcccacct

SEQ ID NO: 26428 - RNA, 21 nt, synthetic construct
  source 1..21: mol_type = other RNA
cagatggacctggctggagaa

SEQ ID NO: 26429 - RNA, 21 nt, synthetic construct
  source 1..21: mol_type = other RNA
cagcatcgctgttaagaagct

SEQ ID NO: 26430 - RNA, 21 nt, synthetic construct
  source 1..21: mol_type = other RNA
cagccaggtccatctggtcat

SEQ ID NO: 26431 - RNA, 21 nt, synthetic construct
  source 1..21: mol_type = other RNA
cagcgatgctgaccccctgtg

SEQ ID NO: 26432 - RNA, 21 nt, synthetic construct
  source 1..21: mol_type = other RNA
cagctcacagtgtgccaccat

SEQ ID NO: 26433 - RNA, 21 nt, synthetic construct
  source 1..21: mol_type = other RNA
caggcagctcacagtgtgcca

SEQ ID NO: 26434 - RNA, 21 nt, synthetic construct
  source 1..21: mol_type = other RNA
cagggggtcagcatcgctgtt

SEQ ID NO: 26435 - RNA, 21 nt, synthetic construct
  source 1..21: mol_type = other RNA
caggtagccaccttctagggg

SEQ ID NO: 26436 - RNA, 21 nt, synthetic construct
  source 1..21: mol_type = other RNA
caggtccatctggtcatagaa

SEQ ID NO: 26437 - RNA, 21 nt, synthetic construct
  source 1..21: mol_type = other RNA
caggtgggccctcctccctct

SEQ ID NO: 26438 - RNA, 21 nt, synthetic construct
  source 1..21: mol_type = other RNA
cagtgtgccaccatggagttg

SEQ ID NO: 26439 - RNA, 21 nt, synthetic construct
  source 1..21: mol_type = other RNA
catagaagtggtagaggcaca

SEQ ID NO: 26440 - RNA, 21 nt, synthetic construct
  source 1..21: mol_type = other RNA
catcgctgttaagaagctcca

SEQ ID NO: 26441 - RNA, 21 nt, synthetic construct
  source 1..21: mol_type = other RNA
catctggtcatagaagtggta

SEQ ID NO: 26442 - RNA, 21 nt, synthetic construct
  source 1..21: mol_type = other RNA
catggagttggggcccctaga

SEQ ID NO: 26443 - RNA, 21 nt, synthetic construct
  source 1..21: mol_type = other RNA
catggtggcacactgtgagct

SEQ ID NO: 26444 - RNA, 21 nt, synthetic construct
  source 1..21: mol_type = other RNA
cattgtcttccctcccaggca

SEQ ID NO: 26445 - RNA, 21 nt, synthetic construct
  source 1..21: mol_type = other RNA
ccaacaccctgtgaggtgact

SEQ ID NO: 26446 - RNA, 21 nt, synthetic construct
  source 1..21: mol_type = other RNA
ccaactccatggtggcacact

SEQ ID NO: 26447 - RNA, 21 nt, synthetic construct
  source 1..21: mol_type = other RNA
ccaccatggagttggggcccc

SEQ ID NO: 26448 - RNA, 21 nt, synthetic construct
  source 1..21: mol_type = other RNA
ccacctgagtagagctcaatc

SEQ ID NO: 26449 - RNA, 21 nt, synthetic construct
  source 1..21: mol_type = other RNA
ccaccttctaggggccccaac

SEQ ID NO: 26450 - RNA, 21 nt, synthetic construct
  source 1..21: mol_type = other RNA
ccacttctatgaccagatgga

SEQ ID NO: 26451 - RNA, 21 nt, synthetic construct
  source 1..21: mol_type = other RNA
ccagagggaggagggcccacc

SEQ ID NO: 26452 - RNA, 21 nt, synthetic construct
  source 1..21: mol_type = other RNA
ccagatggacctggctggaga

SEQ ID NO: 26453 - RNA, 21 nt, synthetic construct
  source 1..21: mol_type = other RNA
ccagccaggtccatctggtca

SEQ ID NO: 26454 - RNA, 21 nt, synthetic construct
  source 1..21: mol_type = other RNA
ccaggcagctcacagtgtgcc

SEQ ID NO: 26455 - RNA, 21 nt, synthetic construct
  source 1..21: mol_type = other RNA
ccaggtagccaccttctaggg

SEQ ID NO: 26456 - RNA, 21 nt, synthetic construct
  source 1..21: mol_type = other RNA
ccaggtccatctggtcataga

SEQ ID NO: 26457 - RNA, 21 nt, synthetic construct
  source 1..21: mol_type = other RNA
ccatctggtcatagaagtggt

SEQ ID NO: 26458 - RNA, 21 nt, synthetic construct
  source 1..21: mol_type = other RNA
ccatggagttggggcccctag

SEQ ID NO: 26459 - RNA, 21 nt, synthetic construct
  source 1..21: mol_type = other RNA
ccatggtggcacactgtgagc

SEQ ID NO: 26460 - RNA, 21 nt, synthetic construct
  source 1..21: mol_type = other RNA
cccaactccatggtggcacac

SEQ ID NO: 26461 - RNA, 21 nt, synthetic construct
  source 1..21: mol_type = other RNA
cccacctgagtagagctcaat

SEQ ID NO: 26462 - RNA, 21 nt, synthetic construct
  source 1..21: mol_type = other RNA
cccaggcagctcacagtgtgc

SEQ ID NO: 26463 - RNA, 21 nt, synthetic construct
  source 1..21: mol_type = other RNA
ccccaactccatggtggcaca

SEQ ID NO: 26464 - RNA, 21 nt, synthetic construct
  source 1..21: mol_type = other RNA
ccccctgtgcctctaccactt

SEQ ID NO: 26465 - RNA, 21 nt, synthetic construct
  source 1..21: mol_type = other RNA
cccctagaaggtggctacctg

SEQ ID NO: 26466 - RNA, 21 nt, synthetic construct
  source 1..21: mol_type = other RNA
cccctgtgcctctaccacttc

SEQ ID NO: 26467 - RNA, 21 nt, synthetic construct
  source 1..21: mol_type = other RNA
ccctagaaggtggctacctgg

SEQ ID NO: 26468 - RNA, 21 nt, synthetic construct
  source 1..21: mol_type = other RNA
ccctcccaggcagctcacagt

SEQ ID NO: 26469 - RNA, 21 nt, synthetic construct
  source 1..21: mol_type = other RNA
ccctcctccctctggtctctt

SEQ ID NO: 26470 - RNA, 21 nt, synthetic construct
  source 1..21: mol_type = other RNA
ccctctggtctcttccggtat

SEQ ID NO: 26471 - RNA, 21 nt, synthetic construct
  source 1..21: mol_type = other RNA
ccctgtgaggtgactgagcat

SEQ ID NO: 26472 - RNA, 21 nt, synthetic construct
  source 1..21: mol_type = other RNA
ccctgtgcctctaccacttct

SEQ ID NO: 26473 - RNA, 21 nt, synthetic construct
  source 1..21: mol_type = other RNA
ccggaagagaccagagggagg

SEQ ID NO: 26474 - RNA, 21 nt, synthetic construct
  source 1..21: mol_type = other RNA
cctagaaggtggctacctgga

SEQ ID NO: 26475 - RNA, 21 nt, synthetic construct
  source 1..21: mol_type = other RNA
cctcccaggcagctcacagtg

SEQ ID NO: 26476 - RNA, 21 nt, synthetic construct
  source 1..21: mol_type = other RNA
cctccctctggtctcttccgg

SEQ ID NO: 26477 - RNA, 21 nt, synthetic construct
  source 1..21: mol_type = other RNA
cctcctccctctggtctcttc

SEQ ID NO: 26478 - RNA, 21 nt, synthetic construct
  source 1..21: mol_type = other RNA
cctctaccacttctatgacca

SEQ ID NO: 26479 - RNA, 21 nt, synthetic construct
  source 1..21: mol_type = other RNA
cctctggtctcttccggtatc

SEQ ID NO: 26480 - RNA, 21 nt, synthetic construct
  source 1..21: mol_type = other RNA
cctgagtagagctcaatctct

SEQ ID NO: 26481 - RNA, 21 nt, synthetic construct
  source 1..21: mol_type = other RNA
cctggagcttcttaacagcga

SEQ ID NO: 26482 - RNA, 21 nt, synthetic construct
  source 1..21: mol_type = other RNA
cctggctggagaagaagagat

SEQ ID NO: 26483 - RNA, 21 nt, synthetic construct
  source 1..21: mol_type = other RNA
cctgggagggaagacaatgct

SEQ ID NO: 26484 - RNA, 21 nt, synthetic construct
  source 1..21: mol_type = other RNA
cctgtgaggtgactgagcatt

SEQ ID NO: 26485 - RNA, 21 nt, synthetic construct
  source 1..21: mol_type = other RNA
cctgtgcctctaccacttcta

SEQ ID NO: 26486 - RNA, 21 nt, synthetic construct
  source 1..21: mol_type = other RNA
ccttctaggggccccaactcc

SEQ ID NO: 26487 - RNA, 21 nt, synthetic construct
  source 1..21: mol_type = other RNA
cgatgctgaccccctgtgcct

SEQ ID NO: 26488 - RNA, 21 nt, synthetic construct
  source 1..21: mol_type = other RNA
cgctgttaagaagctccaggt

SEQ ID NO: 26489 - RNA, 21 nt, synthetic construct
  source 1..21: mol_type = other RNA
cggaagagaccagagggagga

SEQ ID NO: 26490 - RNA, 21 nt, synthetic construct
  source 1..21: mol_type = other RNA
ctaccacttctatgaccagat

SEQ ID NO: 26491 - RNA, 21 nt, synthetic construct
  source 1..21: mol_type = other RNA
ctacctggagcttcttaacag

SEQ ID NO: 26492 - RNA, 21 nt, synthetic construct
  source 1..21: mol_type = other RNA
ctactcaggtgggccctcctc

SEQ ID NO: 26493 - RNA, 21 nt, synthetic construct
  source 1..21: mol_type = other RNA
ctagaaggtggctacctggag

SEQ ID NO: 26494 - RNA, 21 nt, synthetic construct
  source 1..21: mol_type = other RNA
ctaggggccccaactccatgg

SEQ ID NO: 26495 - RNA, 21 nt, synthetic construct
  source 1..21: mol_type = other RNA
ctatgaccagatggacctggc

SEQ ID NO: 26496 - RNA, 21 nt, synthetic construct
  source 1..21: mol_type = other RNA
ctcaatctcttcttctccagc

SEQ ID NO: 26497 - RNA, 21 nt, synthetic construct
  source 1..21: mol_type = other RNA
ctcacagtgtgccaccatgga

SEQ ID NO: 26498 - RNA, 21 nt, synthetic construct
  source 1..21: mol_type = other RNA
ctcaggtgggccctcctccct

SEQ ID NO: 26499 - RNA, 21 nt, synthetic construct
  source 1..21: mol_type = other RNA
ctccagccaggtccatctggt

SEQ ID NO: 26500 - RNA, 21 nt, synthetic construct
  source 1..21: mol_type = other RNA
ctccaggtagccaccttctag

SEQ ID NO: 26501 - RNA, 21 nt, synthetic construct
  source 1..21: mol_type = other RNA
ctccatggtggcacactgtga

SEQ ID NO: 26502 - RNA, 21 nt, synthetic construct
  source 1..21: mol_type = other RNA
ctcccaggcagctcacagtgt

SEQ ID NO: 26503 - RNA, 21 nt, synthetic construct
  source 1..21: mol_type = other RNA
ctccctctggtctcttccggt

SEQ ID NO: 26504 - RNA, 21 nt, synthetic construct
  source 1..21: mol_type = other RNA
ctcctccctctggtctcttcc

SEQ ID NO: 26505 - RNA, 21 nt, synthetic construct
  source 1..21: mol_type = other RNA
ctctaccacttctatgaccag

SEQ ID NO: 26506 - RNA, 21 nt, synthetic construct
  source 1..21: mol_type = other RNA
ctctactcaggtgggccctcc

SEQ ID NO: 26507 - RNA, 21 nt, synthetic construct
  source 1..21: mol_type = other RNA
ctctggtctcttccggtatcc

SEQ ID NO: 26508 - RNA, 21 nt, synthetic construct
  source 1..21: mol_type = other RNA
ctcttcttctccagccaggtc

SEQ ID NO: 26509 - RNA, 21 nt, synthetic construct
  source 1..21: mol_type = other RNA
ctgaccccctgtgcctctacc

SEQ ID NO: 26510 - RNA, 21 nt, synthetic construct
  source 1..21: mol_type = other RNA
ctgagcattgtcttccctccc

SEQ ID NO: 26511 - RNA, 21 nt, synthetic construct
  source 1..21: mol_type = other RNA
ctgagtagagctcaatctctt

SEQ ID NO: 26512 - RNA, 21 nt, synthetic construct
  source 1..21: mol_type = other RNA
ctgcctgggagggaagacaat

SEQ ID NO: 26513 - RNA, 21 nt, synthetic construct
  source 1..21: mol_type = other RNA
ctggagaagaagagattgagc

SEQ ID NO: 26514 - RNA, 21 nt, synthetic construct
  source 1..21: mol_type = other RNA
ctggagcttcttaacagcgat

SEQ ID NO: 26515 - RNA, 21 nt, synthetic construct
  source 1..21: mol_type = other RNA
ctggctggagaagaagagatt

SEQ ID NO: 26516 - RNA, 21 nt, synthetic construct
  source 1..21: mol_type = other RNA
ctgggagggaagacaatgctc

SEQ ID NO: 26517 - RNA, 21 nt, synthetic construct
  source 1..21: mol_type = other RNA
ctggtcatagaagtggtagag

SEQ ID NO: 26518 - RNA, 21 nt, synthetic construct
  source 1..21: mol_type = other RNA
ctggtctcttccggtatcccc

SEQ ID NO: 26519 - RNA, 21 nt, synthetic construct
  source 1..21: mol_type = other RNA
ctgtgagctgcctgggaggga

SEQ ID NO: 26520 - RNA, 21 nt, synthetic construct
  source 1..21: mol_type = other RNA
ctgtgaggtgactgagcattg

SEQ ID NO: 26521 - RNA, 21 nt, synthetic construct
  source 1..21: mol_type = other RNA
ctgtgcctctaccacttctat

SEQ ID NO: 26522 - RNA, 21 nt, synthetic construct
  source 1..21: mol_type = other RNA
ctgttaagaagctccaggtag

SEQ ID NO: 26523 - RNA, 21 nt, synthetic construct
  source 1..21: mol_type = other RNA
cttaacagcgatgctgacccc

SEQ ID NO: 26524 - RNA, 21 nt, synthetic construct
  source 1..21: mol_type = other RNA
cttccctcccaggcagctcac

SEQ ID NO: 26525 - RNA, 21 nt, synthetic construct
  source 1..21: mol_type = other RNA
cttctaggggccccaactcca

SEQ ID NO: 26526 - RNA, 21 nt, synthetic construct
  source 1..21: mol_type = other RNA
cttctatgaccagatggacct

SEQ ID NO: 26527 - RNA, 21 nt, synthetic construct
  source 1..21: mol_type = other RNA
cttctccagccaggtccatct

SEQ ID NO: 26528 - RNA, 21 nt, synthetic construct
  source 1..21: mol_type = other RNA
cttcttaacagcgatgctgac

SEQ ID NO: 26529 - RNA, 21 nt, synthetic construct
  source 1..21: mol_type = other RNA
cttcttctccagccaggtcca

SEQ ID NO: 26530 - RNA, 21 nt, synthetic construct
  source 1..21: mol_type = other RNA
ctttccaacaccctgtgaggt

SEQ ID NO: 26531 - RNA, 21 nt, synthetic construct
  source 1..21: mol_type = other RNA
gaagaagagattgagctctac

SEQ ID NO: 26532 - RNA, 21 nt, synthetic construct
  source 1..21: mol_type = other RNA
gaagacaatgctcagtcacct

SEQ ID NO: 26533 - RNA, 21 nt, synthetic construct
  source 1..21: mol_type = other RNA
gaagagaccagagggaggagg

SEQ ID NO: 26534 - RNA, 21 nt, synthetic construct
  source 1..21: mol_type = other RNA
gaagagattgagctctactca

SEQ ID NO: 26535 - RNA, 21 nt, synthetic construct
  source 1..21: mol_type = other RNA
gaagctccaggtagccacctt

SEQ ID NO: 26536 - RNA, 21 nt, synthetic construct
  source 1..21: mol_type = other RNA
gaaggtggctacctggagctt

SEQ ID NO: 26537 - RNA, 21 nt, synthetic construct
  source 1..21: mol_type = other RNA
gaagtggtagaggcacagggg

SEQ ID NO: 26538 - RNA, 21 nt, synthetic construct
  source 1..21: mol_type = other RNA
gacaatgctcagtcacctcac

SEQ ID NO: 26539 - RNA, 21 nt, synthetic construct
  source 1..21: mol_type = other RNA
gaccagagggaggagggccca

SEQ ID NO: 26540 - RNA, 21 nt, synthetic construct
  source 1..21: mol_type = other RNA
gaccagatggacctggctgga

SEQ ID NO: 26541 - RNA, 21 nt, synthetic construct
  source 1..21: mol_type = other RNA
gaccccctgtgcctctaccac

SEQ ID NO: 26542 - RNA, 21 nt, synthetic construct
  source 1..21: mol_type = other RNA
gacctggctggagaagaagag

SEQ ID NO: 26543 - RNA, 21 nt, synthetic construct
  source 1..21: mol_type = other RNA
gactgagcattgtcttccctc

SEQ ID NO: 26544 - RNA, 21 nt, synthetic construct
  source 1..21: mol_type = other RNA
gagaagaagagattgagctct

SEQ ID NO: 26545 - RNA, 21 nt, synthetic construct
  source 1..21: mol_type = other RNA
gagaccagagggaggagggcc

SEQ ID NO: 26546 - RNA, 21 nt, synthetic construct
  source 1..21: mol_type = other RNA
gagattgagctctactcaggt

SEQ ID NO: 26547 - RNA, 21 nt, synthetic construct
  source 1..21: mol_type = other RNA
gagcattgtcttccctcccag

SEQ ID NO: 26548 - RNA, 21 nt, synthetic construct
  source 1..21: mol_type = other RNA
gagctcaatctcttcttctcc

SEQ ID NO: 26549 - RNA, 21 nt, synthetic construct
  source 1..21: mol_type = other RNA
gagctctactcaggtgggccc

SEQ ID NO: 26550 - RNA, 21 nt, synthetic construct
  source 1..21: mol_type = other RNA
gagctgcctgggagggaagac

SEQ ID NO: 26551 - RNA, 21 nt, synthetic construct
  source 1..21: mol_type = other RNA
gagcttcttaacagcgatgct

SEQ ID NO: 26552 - RNA, 21 nt, synthetic construct
  source 1..21: mol_type = other RNA
gaggagggcccacctgagtag

SEQ ID NO: 26553 - RNA, 21 nt, synthetic construct
  source 1..21: mol_type = other RNA
gaggcacagggggtcagcatc

SEQ ID NO: 26554 - RNA, 21 nt, synthetic construct
  source 1..21: mol_type = other RNA
gagggaagacaatgctcagtc

SEQ ID NO: 26555 - RNA, 21 nt, synthetic construct
  source 1..21: mol_type = other RNA
gagggaggagggcccacctga

SEQ ID NO: 26556 - RNA, 21 nt, synthetic construct
  source 1..21: mol_type = other RNA
gagggcccacctgagtagagc

SEQ ID NO: 26557 - RNA, 21 nt, synthetic construct
  source 1..21: mol_type = other RNA
gaggggtgggggataccggaa

SEQ ID NO: 26558 - RNA, 21 nt, synthetic construct
  source 1..21: mol_type = other RNA
gaggtgactgagcattgtctt

SEQ ID NO: 26559 - RNA, 21 nt, synthetic construct
  source 1..21: mol_type = other RNA
gagtagagctcaatctcttct

SEQ ID NO: 26560 - RNA, 21 nt, synthetic construct
  source 1..21: mol_type = other RNA
gagttggggcccctagaaggt

SEQ ID NO: 26561 - RNA, 21 nt, synthetic construct
  source 1..21: mol_type = other RNA
gataccggaagagaccagagg

SEQ ID NO: 26562 - RNA, 21 nt, synthetic construct
  source 1..21: mol_type = other RNA
gatgctgaccccctgtgcctc

SEQ ID NO: 26563 - RNA, 21 nt, synthetic construct
  source 1..21: mol_type = other RNA
gatggacctggctggagaaga

SEQ ID NO: 26564 - RNA, 21 nt, synthetic construct
  source 1..21: mol_type = other RNA
gattgagctctactcaggtgg

SEQ ID NO: 26565 - RNA, 21 nt, synthetic construct
  source 1..21: mol_type = other RNA
gcacactgtgagctgcctggg

SEQ ID NO: 26566 - RNA, 21 nt, synthetic construct
  source 1..21: mol_type = other RNA
gcacagggggtcagcatcgct

SEQ ID NO: 26567 - RNA, 21 nt, synthetic construct
  source 1..21: mol_type = other RNA
gcagctcacagtgtgccacca

SEQ ID NO: 26568 - RNA, 21 nt, synthetic construct
  source 1..21: mol_type = other RNA
gcatcgctgttaagaagctcc

SEQ ID NO: 26569 - RNA, 21 nt, synthetic construct
  source 1..21: mol_type = other RNA
gcattgtcttccctcccaggc

SEQ ID NO: 26570 - RNA, 21 nt, synthetic construct
  source 1..21: mol_type = other RNA
gccaccatggagttggggccc

SEQ ID NO: 26571 - RNA, 21 nt, synthetic construct
  source 1..21: mol_type = other RNA
gccaccttctaggggccccaa

SEQ ID NO: 26572 - RNA, 21 nt, synthetic construct
  source 1..21: mol_type = other RNA
gccaggtccatctggtcatag

SEQ ID NO: 26573 - RNA, 21 nt, synthetic construct
  source 1..21: mol_type = other RNA
gcccacctgagtagagctcaa

SEQ ID NO: 26574 - RNA, 21 nt, synthetic construct
  source 1..21: mol_type = other RNA
gccccaactccatggtggcac

SEQ ID NO: 26575 - RNA, 21 nt, synthetic construct
  source 1..21: mol_type = other RNA
gcccctagaaggtggctacct

SEQ ID NO: 26576 - RNA, 21 nt, synthetic construct
  source 1..21: mol_type = other RNA
gccctcctccctctggtctct

SEQ ID NO: 26577 - RNA, 21 nt, synthetic construct
  source 1..21: mol_type = other RNA
gcctctaccacttctatgacc

SEQ ID NO: 26578 - RNA, 21 nt, synthetic construct
  source 1..21: mol_type = other RNA
gcctgggagggaagacaatgc

SEQ ID NO: 26579 - RNA, 21 nt, synthetic construct
  source 1..21: mol_type = other RNA
gcgatgctgaccccctgtgcc

SEQ ID NO: 26580 - RNA, 21 nt, synthetic construct
  source 1..21: mol_type = other RNA
gctacctggagcttcttaaca

SEQ ID NO: 26581 - RNA, 21 nt, synthetic construct
  source 1..21: mol_type = other RNA
gctcaatctcttcttctccag

SEQ ID NO: 26582 - RNA, 21 nt, synthetic construct
  source 1..21: mol_type = other RNA
gctcacagtgtgccaccatgg

SEQ ID NO: 26583 - RNA, 21 nt, synthetic construct
  source 1..21: mol_type = other RNA
gctcagtcacctcacagggtg

SEQ ID NO: 26584 - RNA, 21 nt, synthetic construct
  source 1..21: mol_type = other RNA
gctccaggtagccaccttcta

SEQ ID NO: 26585 - RNA, 21 nt, synthetic construct
  source 1..21: mol_type = other RNA
gctctactcaggtgggccctc

SEQ ID NO: 26586 - RNA, 21 nt, synthetic construct
  source 1..21: mol_type = other RNA
gctgaccccctgtgcctctac

SEQ ID NO: 26587 - RNA, 21 nt, synthetic construct
  source 1..21: mol_type = other RNA
gctgcctgggagggaagacaa

SEQ ID NO: 26588 - RNA, 21 nt, synthetic construct
  source 1..21: mol_type = other RNA
gctggagaagaagagattgag

SEQ ID NO: 26589 - RNA, 21 nt, synthetic construct
  source 1..21: mol_type = other RNA
gctgttaagaagctccaggta

SEQ ID NO: 26590 - RNA, 21 nt, synthetic construct
  source 1..21: mol_type = other RNA
gcttcttaacagcgatgctga

SEQ ID NO: 26591 - RNA, 21 nt, synthetic construct
  source 1..21: mol_type = other RNA
ggaagacaatgctcagtcacc

SEQ ID NO: 26592 - RNA, 21 nt, synthetic construct
  source 1..21: mol_type = other RNA
ggaagagaccagagggaggag

SEQ ID NO: 26593 - RNA, 21 nt, synthetic construct
  source 1..21: mol_type = other RNA
ggacctggctggagaagaaga

SEQ ID NO: 26594 - RNA, 21 nt, synthetic construct
  source 1..21: mol_type = other RNA
ggagaagaagagattgagctc

SEQ ID NO: 26595 - RNA, 21 nt, synthetic construct
  source 1..21: mol_type = other RNA
ggagcttcttaacagcgatgc

SEQ ID NO: 26596 - RNA, 21 nt, synthetic construct
  source 1..21: mol_type = other RNA
ggaggagggcccacctgagta

SEQ ID NO: 26597 - RNA, 21 nt, synthetic construct
  source 1..21: mol_type = other RNA
ggagggaagacaatgctcagt

SEQ ID NO: 26598 - RNA, 21 nt, synthetic construct
  source 1..21: mol_type = other RNA
ggagggcccacctgagtagag

SEQ ID NO: 26599 - RNA, 21 nt, synthetic construct
  source 1..21: mol_type = other RNA
ggagttggggcccctagaagg

SEQ ID NO: 26600 - RNA, 21 nt, synthetic construct
  source 1..21: mol_type = other RNA
ggataccggaagagaccagag

SEQ ID NO: 26601 - RNA, 21 nt, synthetic construct
  source 1..21: mol_type = other RNA
ggcacactgtgagctgcctgg

SEQ ID NO: 26602 - RNA, 21 nt, synthetic construct
  source 1..21: mol_type = other RNA
ggcacagggggtcagcatcgc

SEQ ID NO: 26603 - RNA, 21 nt, synthetic construct
  source 1..21: mol_type = other RNA
ggcagctcacagtgtgccacc

SEQ ID NO: 26604 - RNA, 21 nt, synthetic construct
  source 1..21: mol_type = other RNA
ggcccacctgagtagagctca

SEQ ID NO: 26605 - RNA, 21 nt, synthetic construct
  source 1..21: mol_type = other RNA
ggccccaactccatggtggca

SEQ ID NO: 26606 - RNA, 21 nt, synthetic construct
  source 1..21: mol_type = other RNA
ggcccctagaaggtggctacc

SEQ ID NO: 26607 - RNA, 21 nt, synthetic construct
  source 1..21: mol_type = other RNA
ggccctcctccctctggtctc

SEQ ID NO: 26608 - RNA, 21 nt, synthetic construct
  source 1..21: mol_type = other RNA
ggctacctggagcttcttaac

SEQ ID NO: 26609 - RNA, 21 nt, synthetic construct
  source 1..21: mol_type = other RNA
ggctggagaagaagagattga

SEQ ID NO: 26610 - RNA, 21 nt, synthetic construct
  source 1..21: mol_type = other RNA
gggaagacaatgctcagtcac

SEQ ID NO: 26611 - RNA, 21 nt, synthetic construct
  source 1..21: mol_type = other RNA
gggaggagggcccacctgagt

SEQ ID NO: 26612 - RNA, 21 nt, synthetic construct
  source 1..21: mol_type = other RNA
gggagggaagacaatgctcag

SEQ ID NO: 26613 - RNA, 21 nt, synthetic construct
  source 1..21: mol_type = other RNA
gggataccggaagagaccaga

SEQ ID NO: 26614 - RNA, 21 nt, synthetic construct
  source 1..21: mol_type = other RNA
gggcccacctgagtagagctc

SEQ ID NO: 26615 - RNA, 21 nt, synthetic construct
  source 1..21: mol_type = other RNA
gggccccaactccatggtggc

SEQ ID NO: 26616 - RNA, 21 nt, synthetic construct
  source 1..21: mol_type = other RNA
gggcccctagaaggtggctac

SEQ ID NO: 26617 - RNA, 21 nt, synthetic construct
  source 1..21: mol_type = other RNA
gggccctcctccctctggtct

SEQ ID NO: 26618 - RNA, 21 nt, synthetic construct
  source 1..21: mol_type = other RNA
ggggataccggaagagaccag

SEQ ID NO: 26619 - RNA, 21 nt, synthetic construct
  source 1..21: mol_type = other RNA
ggggccccaactccatggtgg

SEQ ID NO: 26620 - RNA, 21 nt, synthetic construct
  source 1..21: mol_type = other RNA
ggggcccctagaaggtggcta

SEQ ID NO: 26621 - RNA, 21 nt, synthetic construct
  source 1..21: mol_type = other RNA
gggggataccggaagagacca

SEQ ID NO: 26622 - RNA, 21 nt, synthetic construct
  source 1..21: mol_type = other RNA
gggggtcagcatcgctgttaa

SEQ ID NO: 26623 - RNA, 21 nt, synthetic construct
  source 1..21: mol_type = other RNA
ggggtcagcatcgctgttaag

SEQ ID NO: 26624 - RNA, 21 nt, synthetic construct
  source 1..21: mol_type = other RNA
ggggtgggggataccggaaga

SEQ ID NO: 26625 - RNA, 21 nt, synthetic construct
  source 1..21: mol_type = other RNA
gggtcagcatcgctgttaaga

SEQ ID NO: 26626 - RNA, 21 nt, synthetic construct
  source 1..21: mol_type = other RNA
gggtgggggataccggaagag

SEQ ID NO: 26627 - RNA, 21 nt, synthetic construct
  source 1..21: mol_type = other RNA
ggtagaggcacagggggtcag

SEQ ID NO: 26628 - RNA, 21 nt, synthetic construct
  source 1..21: mol_type = other RNA
ggtagccaccttctaggggcc

SEQ ID NO: 26629 - RNA, 21 nt, synthetic construct
  source 1..21: mol_type = other RNA
ggtcagcatcgctgttaagaa

SEQ ID NO: 26630 - RNA, 21 nt, synthetic construct
  source 1..21: mol_type = other RNA
ggtcatagaagtggtagaggc

SEQ ID NO: 26631 - RNA, 21 nt, synthetic construct
  source 1..21: mol_type = other RNA
ggtccatctggtcatagaagt

SEQ ID NO: 26632 - RNA, 21 nt, synthetic construct
  source 1..21: mol_type = other RNA
ggtgactgagcattgtcttcc

SEQ ID NO: 26633 - RNA, 21 nt, synthetic construct
  source 1..21: mol_type = other RNA
ggtggcacactgtgagctgcc

SEQ ID NO: 26634 - RNA, 21 nt, synthetic construct
  source 1..21: mol_type = other RNA
ggtggctacctggagcttctt

SEQ ID NO: 26635 - RNA, 21 nt, synthetic construct
  source 1..21: mol_type = other RNA
ggtgggccctcctccctctgg

SEQ ID NO: 26636 - RNA, 21 nt, synthetic construct
  source 1..21: mol_type = other RNA
ggtgggggataccggaagaga

SEQ ID NO: 26637 - RNA, 21 nt, synthetic construct
  source 1..21: mol_type = other RNA
gtagagctcaatctcttcttc

SEQ ID NO: 26638 - RNA, 21 nt, synthetic construct
  source 1..21: mol_type = other RNA
gtagaggcacagggggtcagc

SEQ ID NO: 26639 - RNA, 21 nt, synthetic construct
  source 1..21: mol_type = other RNA
gtagccaccttctaggggccc

SEQ ID NO: 26640 - RNA, 21 nt, synthetic construct
  source 1..21: mol_type = other RNA
gtcagcatcgctgttaagaag

SEQ ID NO: 26641 - RNA, 21 nt, synthetic construct
  source 1..21: mol_type = other RNA
gtcatagaagtggtagaggca

SEQ ID NO: 26642 - RNA, 21 nt, synthetic construct
  source 1..21: mol_type = other RNA
gtccatctggtcatagaagtg

SEQ ID NO: 26643 - RNA, 21 nt, synthetic construct
  source 1..21: mol_type = other RNA
gtcttccctcccaggcagctc

SEQ ID NO: 26644 - RNA, 21 nt, synthetic construct
  source 1..21: mol_type = other RNA
gtgactgagcattgtcttccc

SEQ ID NO: 26645 - RNA, 21 nt, synthetic construct
  source 1..21: mol_type = other RNA
gtgagctgcctgggagggaag

SEQ ID NO: 26646 - RNA, 21 nt, synthetic construct
  source 1..21: mol_type = other RNA
gtgaggtgactgagcattgtc

SEQ ID NO: 26647 - RNA, 21 nt, synthetic construct
  source 1..21: mol_type = other RNA
gtgccaccatggagttggggc

SEQ ID NO: 26648 - RNA, 21 nt, synthetic construct
  source 1..21: mol_type = other RNA
gtgcctctaccacttctatga

SEQ ID NO: 26649 - RNA, 21 nt, synthetic construct
  source 1..21: mol_type = other RNA
gtggcacactgtgagctgcct

SEQ ID NO: 26650 - RNA, 21 nt, synthetic construct
  source 1..21: mol_type = other RNA
gtggctacctggagcttctta

SEQ ID NO: 26651 - RNA, 21 nt, synthetic construct
  source 1..21: mol_type = other RNA
gtgggccctcctccctctggt

SEQ ID NO: 26652 - RNA, 21 nt, synthetic construct
  source 1..21: mol_type = other RNA
gtgggggataccggaagagac

SEQ ID NO: 26653 - RNA, 21 nt, synthetic construct
  source 1..21: mol_type = other RNA
gtggtagaggcacagggggtc

SEQ ID NO: 26654 - RNA, 21 nt, synthetic construct
  source 1..21: mol_type = other RNA
gtgtgccaccatggagttggg

SEQ ID NO: 26655 - RNA, 21 nt, synthetic construct
  source 1..21: mol_type = other RNA
gttaagaagctccaggtagcc

SEQ ID NO: 26656 - RNA, 21 nt, synthetic construct
  source 1..21: mol_type = other RNA
gttggggcccctagaaggtgg

SEQ ID NO: 26657 - RNA, 21 nt, synthetic construct
  source 1..21: mol_type = other RNA
taacagcgatgctgaccccct

SEQ ID NO: 26658 - RNA, 21 nt, synthetic construct
  source 1..21: mol_type = other RNA
taagaagctccaggtagccac

SEQ ID NO: 26659 - RNA, 21 nt, synthetic construct
  source 1..21: mol_type = other RNA
taccacttctatgaccagatg

SEQ ID NO: 26660 - RNA, 21 nt, synthetic construct
  source 1..21: mol_type = other RNA
taccggaagagaccagaggga

SEQ ID NO: 26661 - RNA, 21 nt, synthetic construct
  source 1..21: mol_type = other RNA
tacctggagcttcttaacagc

SEQ ID NO: 26662 - RNA, 21 nt, synthetic construct
  source 1..21: mol_type = other RNA
tactcaggtgggccctcctcc

SEQ ID NO: 26663 - RNA, 21 nt, synthetic construct
  source 1..21: mol_type = other RNA
tagaaggtggctacctggagc

SEQ ID NO: 26664 - RNA, 21 nt, synthetic construct
  source 1..21: mol_type = other RNA
tagaagtggtagaggcacagg

SEQ ID NO: 26665 - RNA, 21 nt, synthetic construct
  source 1..21: mol_type = other RNA
tagagctcaatctcttcttct

SEQ ID NO: 26666 - RNA, 21 nt, synthetic construct
  source 1..21: mol_type = other RNA
tagaggcacagggggtcagca

SEQ ID NO: 26667 - RNA, 21 nt, synthetic construct
  source 1..21: mol_type = other RNA
tagccaccttctaggggcccc

SEQ ID NO: 26668 - RNA, 21 nt, synthetic construct
  source 1..21: mol_type = other RNA
taggggccccaactccatggt

SEQ ID NO: 26669 - RNA, 21 nt, synthetic construct
  source 1..21: mol_type = other RNA
tatgaccagatggacctggct

SEQ ID NO: 26670 - RNA, 21 nt, synthetic construct
  source 1..21: mol_type = other RNA
tcaatctcttcttctccagcc

SEQ ID NO: 26671 - RNA, 21 nt, synthetic construct
  source 1..21: mol_type = other RNA
tcacagtgtgccaccatggag

SEQ ID NO: 26672 - RNA, 21 nt, synthetic construct
  source 1..21: mol_type = other RNA
tcagcatcgctgttaagaagc

SEQ ID NO: 26673 - RNA, 21 nt, synthetic construct
  source 1..21: mol_type = other RNA
tcaggtgggccctcctccctc

SEQ ID NO: 26674 - RNA, 21 nt, synthetic construct
  source 1..21: mol_type = other RNA
tcatagaagtggtagaggcac

SEQ ID NO: 26675 - RNA, 21 nt, synthetic construct
  source 1..21: mol_type = other RNA
tccaacaccctgtgaggtgac

SEQ ID NO: 26676 - RNA, 21 nt, synthetic construct
  source 1..21: mol_type = other RNA
tccagccaggtccatctggtc

SEQ ID NO: 26677 - RNA, 21 nt, synthetic construct
  source 1..21: mol_type = other RNA
tccaggtagccaccttctagg

SEQ ID NO: 26678 - RNA, 21 nt, synthetic construct
  source 1..21: mol_type = other RNA
tccatctggtcatagaagtgg

SEQ ID NO: 26679 - RNA, 21 nt, synthetic construct
  source 1..21: mol_type = other RNA
tccatggtggcacactgtgag

SEQ ID NO: 26680 - RNA, 21 nt, synthetic construct
  source 1..21: mol_type = other RNA
tcccaggcagctcacagtgtg

SEQ ID NO: 26681 - RNA, 21 nt, synthetic construct
  source 1..21: mol_type = other RNA
tccctcccaggcagctcacag

SEQ ID NO: 26682 - RNA, 21 nt, synthetic construct
  source 1..21: mol_type = other RNA
tccctctggtctcttccggta

SEQ ID NO: 26683 - RNA, 21 nt, synthetic construct
  source 1..21: mol_type = other RNA
tcctccctctggtctcttccg

SEQ ID NO: 26684 - RNA, 21 nt, synthetic construct
  source 1..21: mol_type = other RNA
tcgctgttaagaagctccagg

SEQ ID NO: 26685 - RNA, 21 nt, synthetic construct
  source 1..21: mol_type = other RNA
tctaccacttctatgaccaga

SEQ ID NO: 26686 - RNA, 21 nt, synthetic construct
  source 1..21: mol_type = other RNA
tctactcaggtgggccctcct

SEQ ID NO: 26687 - RNA, 21 nt, synthetic construct
  source 1..21: mol_type = other RNA
tctaggggccccaactccatg

SEQ ID NO: 26688 - RNA, 21 nt, synthetic construct
  source 1..21: mol_type = other RNA
tctatgaccagatggacctgg

SEQ ID NO: 26689 - RNA, 21 nt, synthetic construct
  source 1..21: mol_type = other RNA
tctccagccaggtccatctgg

SEQ ID NO: 26690 - RNA, 21 nt, synthetic construct
  source 1..21: mol_type = other RNA
tctcttcttctccagccaggt

SEQ ID NO: 26691 - RNA, 21 nt, synthetic construct
  source 1..21: mol_type = other RNA
tctggtcatagaagtggtaga

SEQ ID NO: 26692 - RNA, 21 nt, synthetic construct
  source 1..21: mol_type = other RNA
tctggtctcttccggtatccc

SEQ ID NO: 26693 - RNA, 21 nt, synthetic construct
  source 1..21: mol_type = other RNA
tcttaacagcgatgctgaccc

SEQ ID NO: 26694 - RNA, 21 nt, synthetic construct
  source 1..21: mol_type = other RNA
tcttccctcccaggcagctca

SEQ ID NO: 26695 - RNA, 21 nt, synthetic construct
  source 1..21: mol_type = other RNA
tcttctccagccaggtccatc

SEQ ID NO: 26696 - RNA, 21 nt, synthetic construct
  source 1..21: mol_type = other RNA
tcttcttctccagccaggtcc

SEQ ID NO: 26697 - RNA, 21 nt, synthetic construct
  source 1..21: mol_type = other RNA
tgaccagatggacctggctgg

SEQ ID NO: 26698 - RNA, 21 nt, synthetic construct
  source 1..21: mol_type = other RNA
tgaccccctgtgcctctacca

SEQ ID NO: 26699 - RNA, 21 nt, synthetic construct
  source 1..21: mol_type = other RNA
tgactgagcattgtcttccct

SEQ ID NO: 26700 - RNA, 21 nt, synthetic construct
  source 1..21: mol_type = other RNA
tgagcattgtcttccctccca

SEQ ID NO: 26701 - RNA, 21 nt, synthetic construct
  source 1..21: mol_type = other RNA
tgagctctactcaggtgggcc

SEQ ID NO: 26702 - RNA, 21 nt, synthetic construct
  source 1..21: mol_type = other RNA
tgagctgcctgggagggaaga

SEQ ID NO: 26703 - RNA, 21 nt, synthetic construct
  source 1..21: mol_type = other RNA
tgaggtgactgagcattgtct

SEQ ID NO: 26704 - RNA, 21 nt, synthetic construct
  source 1..21: mol_type = other RNA
tgagtagagctcaatctcttc

SEQ ID NO: 26705 - RNA, 21 nt, synthetic construct
  source 1..21: mol_type = other RNA
tgccaccatggagttggggcc

SEQ ID NO: 26706 - RNA, 21 nt, synthetic construct
  source 1..21: mol_type = other RNA
tgcctctaccacttctatgac

SEQ ID NO: 26707 - RNA, 21 nt, synthetic construct
  source 1..21: mol_type = other RNA
tgcctgggagggaagacaatg

SEQ ID NO: 26708 - RNA, 21 nt, synthetic construct
  source 1..21: mol_type = other RNA
tgctcagtcacctcacagggt

SEQ ID NO: 26709 - RNA, 21 nt, synthetic construct
  source 1..21: mol_type = other RNA
tgctgaccccctgtgcctcta

SEQ ID NO: 26710 - RNA, 21 nt, synthetic construct
  source 1..21: mol_type = other RNA
tggacctggctggagaagaag

SEQ ID NO: 26711 - RNA, 21 nt, synthetic construct
  source 1..21: mol_type = other RNA
tggagaagaagagattgagct

SEQ ID NO: 26712 - RNA, 21 nt, synthetic construct
  source 1..21: mol_type = other RNA
tggagcttcttaacagcgatg

SEQ ID NO: 26713 - RNA, 21 nt, synthetic construct
  source 1..21: mol_type = other RNA
tggagttggggcccctagaag

SEQ ID NO: 26714 - RNA, 21 nt, synthetic construct
  source 1..21: mol_type = other RNA
tggcacactgtgagctgcctg

SEQ ID NO: 26715 - RNA, 21 nt, synthetic construct
  source 1..21: mol_type = other RNA
tggctacctggagcttcttaa

SEQ ID NO: 26716 - RNA, 21 nt, synthetic construct
  source 1..21: mol_type = other RNA
tggctggagaagaagagattg

SEQ ID NO: 26717 - RNA, 21 nt, synthetic construct
  source 1..21: mol_type = other RNA
tgggagggaagacaatgctca

SEQ ID NO: 26718 - RNA, 21 nt, synthetic construct
  source 1..21: mol_type = other RNA
tgggccctcctccctctggtc

SEQ ID NO: 26719 - RNA, 21 nt, synthetic construct
  source 1..21: mol_type = other RNA
tggggcccctagaaggtggct

SEQ ID NO: 26720 - RNA, 21 nt, synthetic construct
  source 1..21: mol_type = other RNA
tgggggataccggaagagacc

SEQ ID NO: 26721 - RNA, 21 nt, synthetic construct
  source 1..21: mol_type = other RNA
tggtagaggcacagggggtca

SEQ ID NO: 26722 - RNA, 21 nt, synthetic construct
  source 1..21: mol_type = other RNA
tggtcatagaagtggtagagg

SEQ ID NO: 26723 - RNA, 21 nt, synthetic construct
  source 1..21: mol_type = other RNA
tggtggcacactgtgagctgc

SEQ ID NO: 26724 - RNA, 21 nt, synthetic construct
  source 1..21: mol_type = other RNA
tgtcttccctcccaggcagct

SEQ ID NO: 26725 - RNA, 21 nt, synthetic construct
  source 1..21: mol_type = other RNA
tgtgagctgcctgggagggaa

SEQ ID NO: 26726 - RNA, 21 nt, synthetic construct
  source 1..21: mol_type = other RNA
tgtgaggtgactgagcattgt

SEQ ID NO: 26727 - RNA, 21 nt, synthetic construct
  source 1..21: mol_type = other RNA
tgtgccaccatggagttgggg

SEQ ID NO: 26728 - RNA, 21 nt, synthetic construct
  source 1..21: mol_type = other RNA
tgtgcctctaccacttctatg

SEQ ID NO: 26729 - RNA, 21 nt, synthetic construct
  source 1..21: mol_type = other RNA
tgttaagaagctccaggtagc

SEQ ID NO: 26730 - RNA, 21 nt, synthetic construct
  source 1..21: mol_type = other RNA
ttaacagcgatgctgaccccc

SEQ ID NO: 26731 - RNA, 21 nt, synthetic construct
  source 1..21: mol_type = other RNA
ttaagaagctccaggtagcca

SEQ ID NO: 26732 - RNA, 21 nt, synthetic construct
  source 1..21: mol_type = other RNA
ttccaacaccctgtgaggtga

SEQ ID NO: 26733 - RNA, 21 nt, synthetic construct
  source 1..21: mol_type = other RNA
ttccctcccaggcagctcaca

SEQ ID NO: 26734 - RNA, 21 nt, synthetic construct
  source 1..21: mol_type = other RNA
ttctaggggccccaactccat

SEQ ID NO: 26735 - RNA, 21 nt, synthetic construct
  source 1..21: mol_type = other RNA
ttctatgaccagatggacctg

SEQ ID NO: 26736 - RNA, 21 nt, synthetic construct
  source 1..21: mol_type = other RNA
ttctccagccaggtccatctg

SEQ ID NO: 26737 - RNA, 21 nt, synthetic construct
  source 1..21: mol_type = other RNA
ttcttaacagcgatgctgacc

SEQ ID NO: 26738 - RNA, 21 nt, synthetic construct
  source 1..21: mol_type = other RNA
ttcttctccagccaggtccat

SEQ ID NO: 26739 - RNA, 21 nt, synthetic construct
  source 1..21: mol_type = other RNA
ttgagctctactcaggtgggc

SEQ ID NO: 26740 - RNA, 21 nt, synthetic construct
  source 1..21: mol_type = other RNA
ttggggcccctagaaggtggc

SEQ ID NO: 26741 - RNA, 21 nt, synthetic construct
  source 1..21: mol_type = other RNA
ttgtcttccctcccaggcagc

SEQ ID NO: 26742 - RNA, 21 nt, synthetic construct
  source 1..21: mol_type = other RNA
tttccaacaccctgtgaggtg

SEQ ID NO: 26743 - RNA, 22 nt, synthetic construct
  source 1..22: mol_type = other RNA
aacaccctgtgaggtgactgag

SEQ ID NO: 26744 - RNA, 22 nt, synthetic construct
  source 1..22: mol_type = other RNA
aacagcgatgctgaccccctgt

SEQ ID NO: 26745 - RNA, 22 nt, synthetic construct
  source 1..22: mol_type = other RNA
aactccatggtggcacactgtg

SEQ ID NO: 26746 - RNA, 22 nt, synthetic construct
  source 1..22: mol_type = other RNA
aagaagagattgagctctactc

SEQ ID NO: 26747 - RNA, 22 nt, synthetic construct
  source 1..22: mol_type = other RNA
aagaagctccaggtagccacct

SEQ ID NO: 26748 - RNA, 22 nt, synthetic construct
  source 1..22: mol_type = other RNA
aagacaatgctcagtcacctca

SEQ ID NO: 26749 - RNA, 22 nt, synthetic construct
  source 1..22: mol_type = other RNA
aagagaccagagggaggagggc

SEQ ID NO: 26750 - RNA, 22 nt, synthetic construct
  source 1..22: mol_type = other RNA
aagagattgagctctactcagg

SEQ ID NO: 26751 - RNA, 22 nt, synthetic construct
  source 1..22: mol_type = other RNA
aagctccaggtagccaccttct

SEQ ID NO: 26752 - RNA, 22 nt, synthetic construct
  source 1..22: mol_type = other RNA
aaggtggctacctggagcttct

SEQ ID NO: 26753 - RNA, 22 nt, synthetic construct
  source 1..22: mol_type = other RNA
aagtggtagaggcacagggggt

SEQ ID NO: 26754 - RNA, 22 nt, synthetic construct
  source 1..22: mol_type = other RNA
aatctcttcttctccagccagg

SEQ ID NO: 26755 - RNA, 22 nt, synthetic construct
  source 1..22: mol_type = other RNA
aatgctcagtcacctcacaggg

SEQ ID NO: 26756 - RNA, 22 nt, synthetic construct
  source 1..22: mol_type = other RNA
acaatgctcagtcacctcacag

SEQ ID NO: 26757 - RNA, 22 nt, synthetic construct
  source 1..22: mol_type = other RNA
acaccctgtgaggtgactgagc

SEQ ID NO: 26758 - RNA, 22 nt, synthetic construct
  source 1..22: mol_type = other RNA
acactgtgagctgcctgggagg

SEQ ID NO: 26759 - RNA, 22 nt, synthetic construct
  source 1..22: mol_type = other RNA
acagcgatgctgaccccctgtg

SEQ ID NO: 26760 - RNA, 22 nt, synthetic construct
  source 1..22: mol_type = other RNA
acagggggtcagcatcgctgtt

SEQ ID NO: 26761 - RNA, 22 nt, synthetic construct
  source 1..22: mol_type = other RNA
acagtgtgccaccatggagttg

SEQ ID NO: 26762 - RNA, 22 nt, synthetic construct
  source 1..22: mol_type = other RNA
accacttctatgaccagatgga

SEQ ID NO: 26763 - RNA, 22 nt, synthetic construct
  source 1..22: mol_type = other RNA
accagagggaggagggcccacc

SEQ ID NO: 26764 - RNA, 22 nt, synthetic construct
  source 1..22: mol_type = other RNA
accagatggacctggctggaga

SEQ ID NO: 26765 - RNA, 22 nt, synthetic construct
  source 1..22: mol_type = other RNA
accatggagttggggcccctag

SEQ ID NO: 26766 - RNA, 22 nt, synthetic construct
  source 1..22: mol_type = other RNA
accccctgtgcctctaccactt

SEQ ID NO: 26767 - RNA, 22 nt, synthetic construct
  source 1..22: mol_type = other RNA
accctgtgaggtgactgagcat

SEQ ID NO: 26768 - RNA, 22 nt, synthetic construct
  source 1..22: mol_type = other RNA
accggaagagaccagagggagg

SEQ ID NO: 26769 - RNA, 22 nt, synthetic construct
  source 1..22: mol_type = other RNA
acctgagtagagctcaatctct

SEQ ID NO: 26770 - RNA, 22 nt, synthetic construct
  source 1..22: mol_type = other RNA
acctggagcttcttaacagcga

SEQ ID NO: 26771 - RNA, 22 nt, synthetic construct
  source 1..22: mol_type = other RNA
acctggctggagaagaagagat

SEQ ID NO: 26772 - RNA, 22 nt, synthetic construct
  source 1..22: mol_type = other RNA
accttctaggggccccaactcc

SEQ ID NO: 26773 - RNA, 22 nt, synthetic construct
  source 1..22: mol_type = other RNA
actcaggtgggccctcctccct

SEQ ID NO: 26774 - RNA, 22 nt, synthetic construct
  source 1..22: mol_type = other RNA
actccatggtggcacactgtga

SEQ ID NO: 26775 - RNA, 22 nt, synthetic construct
  source 1..22: mol_type = other RNA
actgagcattgtcttccctccc

SEQ ID NO: 26776 - RNA, 22 nt, synthetic construct
  source 1..22: mol_type = other RNA
actgtgagctgcctgggaggga

SEQ ID NO: 26777 - RNA, 22 nt, synthetic construct
  source 1..22: mol_type = other RNA
acttctatgaccagatggacct

SEQ ID NO: 26778 - RNA, 22 nt, synthetic construct
  source 1..22: mol_type = other RNA
agaagaagagattgagctctac

SEQ ID NO: 26779 - RNA, 22 nt, synthetic construct
  source 1..22: mol_type = other RNA
agaagagattgagctctactca

SEQ ID NO: 26780 - RNA, 22 nt, synthetic construct
  source 1..22: mol_type = other RNA
agaagctccaggtagccacctt

SEQ ID NO: 26781 - RNA, 22 nt, synthetic construct
  source 1..22: mol_type = other RNA
agaaggtggctacctggagctt

SEQ ID NO: 26782 - RNA, 22 nt, synthetic construct
  source 1..22: mol_type = other RNA
agaagtggtagaggcacagggg

SEQ ID NO: 26783 - RNA, 22 nt, synthetic construct
  source 1..22: mol_type = other RNA
agacaatgctcagtcacctcac

SEQ ID NO: 26784 - RNA, 22 nt, synthetic construct
  source 1..22: mol_type = other RNA
agaccagagggaggagggccca

SEQ ID NO: 26785 - RNA, 22 nt, synthetic construct
  source 1..22: mol_type = other RNA
agagaccagagggaggagggcc

SEQ ID NO: 26786 - RNA, 22 nt, synthetic construct
  source 1..22: mol_type = other RNA
agagattgagctctactcaggt

SEQ ID NO: 26787 - RNA, 22 nt, synthetic construct
  source 1..22: mol_type = other RNA
agagctcaatctcttcttctcc

SEQ ID NO: 26788 - RNA, 22 nt, synthetic construct
  source 1..22: mol_type = other RNA
agaggcacagggggtcagcatc

SEQ ID NO: 26789 - RNA, 22 nt, synthetic construct
  source 1..22: mol_type = other RNA
agagggaggagggcccacctga

SEQ ID NO: 26790 - RNA, 22 nt, synthetic construct
  source 1..22: mol_type = other RNA
agatggacctggctggagaaga

SEQ ID NO: 26791 - RNA, 22 nt, synthetic construct
  source 1..22: mol_type = other RNA
agattgagctctactcaggtgg

SEQ ID NO: 26792 - RNA, 22 nt, synthetic construct
  source 1..22: mol_type = other RNA
agcatcgctgttaagaagctcc

SEQ ID NO: 26793 - RNA, 22 nt, synthetic construct
  source 1..22: mol_type = other RNA
agcattgtcttccctcccaggc

SEQ ID NO: 26794 - RNA, 22 nt, synthetic construct
  source 1..22: mol_type = other RNA
agccaccttctaggggccccaa

SEQ ID NO: 26795 - RNA, 22 nt, synthetic construct
  source 1..22: mol_type = other RNA
agccaggtccatctggtcatag

SEQ ID NO: 26796 - RNA, 22 nt, synthetic construct
  source 1..22: mol_type = other RNA
agcgatgctgaccccctgtgcc

SEQ ID NO: 26797 - RNA, 22 nt, synthetic construct
  source 1..22: mol_type = other RNA
agctcaatctcttcttctccag

SEQ ID NO: 26798 - RNA, 22 nt, synthetic construct
  source 1..22: mol_type = other RNA
agctcacagtgtgccaccatgg

SEQ ID NO: 26799 - RNA, 22 nt, synthetic construct
  source 1..22: mol_type = other RNA
agctccaggtagccaccttcta

SEQ ID NO: 26800 - RNA, 22 nt, synthetic construct
  source 1..22: mol_type = other RNA
agctctactcaggtgggccctc

SEQ ID NO: 26801 - RNA, 22 nt, synthetic construct
  source 1..22: mol_type = other RNA
agctgcctgggagggaagacaa

SEQ ID NO: 26802 - RNA, 22 nt, synthetic construct
  source 1..22: mol_type = other RNA
agcttcttaacagcgatgctga

SEQ ID NO: 26803 - RNA, 22 nt, synthetic construct
  source 1..22: mol_type = other RNA
aggagggcccacctgagtagag

SEQ ID NO: 26804 - RNA, 22 nt, synthetic construct
  source 1..22: mol_type = other RNA
aggcacagggggtcagcatcgc

SEQ ID NO: 26805 - RNA, 22 nt, synthetic construct
  source 1..22: mol_type = other RNA
aggcagctcacagtgtgccacc

SEQ ID NO: 26806 - RNA, 22 nt, synthetic construct
  source 1..22: mol_type = other RNA
agggaagacaatgctcagtcac

SEQ ID NO: 26807 - RNA, 22 nt, synthetic construct
  source 1..22: mol_type = other RNA
agggaggagggcccacctgagt

SEQ ID NO: 26808 - RNA, 22 nt, synthetic construct
  source 1..22: mol_type = other RNA
agggcccacctgagtagagctc

SEQ ID NO: 26809 - RNA, 22 nt, synthetic construct
  source 1..22: mol_type = other RNA
aggggccccaactccatggtgg

SEQ ID NO: 26810 - RNA, 22 nt, synthetic construct
  source 1..22: mol_type = other RNA
agggggtcagcatcgctgttaa

SEQ ID NO: 26811 - RNA, 22 nt, synthetic construct
  source 1..22: mol_type = other RNA
aggggtgggggataccggaaga

SEQ ID NO: 26812 - RNA, 22 nt, synthetic construct
  source 1..22: mol_type = other RNA
aggtagccaccttctaggggcc

SEQ ID NO: 26813 - RNA, 22 nt, synthetic construct
  source 1..22: mol_type = other RNA
aggtccatctggtcatagaagt

SEQ ID NO: 26814 - RNA, 22 nt, synthetic construct
  source 1..22: mol_type = other RNA
aggtgactgagcattgtcttcc

SEQ ID NO: 26815 - RNA, 22 nt, synthetic construct
  source 1..22: mol_type = other RNA
aggtggctacctggagcttctt

SEQ ID NO: 26816 - RNA, 22 nt, synthetic construct
  source 1..22: mol_type = other RNA
aggtgggccctcctccctctgg

SEQ ID NO: 26817 - RNA, 22 nt, synthetic construct
  source 1..22: mol_type = other RNA
agtagagctcaatctcttcttc

SEQ ID NO: 26818 - RNA, 22 nt, synthetic construct
  source 1..22: mol_type = other RNA
agtggtagaggcacagggggtc

SEQ ID NO: 26819 - RNA, 22 nt, synthetic construct
  source 1..22: mol_type = other RNA
agtgtgccaccatggagttggg

SEQ ID NO: 26820 - RNA, 22 nt, synthetic construct
  source 1..22: mol_type = other RNA
agttggggcccctagaaggtgg

SEQ ID NO: 26821 - RNA, 22 nt, synthetic construct
  source 1..22: mol_type = other RNA
ataccggaagagaccagaggga

SEQ ID NO: 26822 - RNA, 22 nt, synthetic construct
  source 1..22: mol_type = other RNA
atagaagtggtagaggcacagg

SEQ ID NO: 26823 - RNA, 22 nt, synthetic construct
  source 1..22: mol_type = other RNA
atcgctgttaagaagctccagg

SEQ ID NO: 26824 - RNA, 22 nt, synthetic construct
  source 1..22: mol_type = other RNA
atctcttcttctccagccaggt

SEQ ID NO: 26825 - RNA, 22 nt, synthetic construct
  source 1..22: mol_type = other RNA
atctggtcatagaagtggtaga

SEQ ID NO: 26826 - RNA, 22 nt, synthetic construct
  source 1..22: mol_type = other RNA
atgaccagatggacctggctgg

SEQ ID NO: 26827 - RNA, 22 nt, synthetic construct
  source 1..22: mol_type = other RNA
atgctcagtcacctcacagggt

SEQ ID NO: 26828 - RNA, 22 nt, synthetic construct
  source 1..22: mol_type = other RNA
atgctgaccccctgtgcctcta

SEQ ID NO: 26829 - RNA, 22 nt, synthetic construct
  source 1..22: mol_type = other RNA
atggacctggctggagaagaag

SEQ ID NO: 26830 - RNA, 22 nt, synthetic construct
  source 1..22: mol_type = other RNA
atggagttggggcccctagaag

SEQ ID NO: 26831 - RNA, 22 nt, synthetic construct
  source 1..22: mol_type = other RNA
atggtggcacactgtgagctgc

SEQ ID NO: 26832 - RNA, 22 nt, synthetic construct
  source 1..22: mol_type = other RNA
attgagctctactcaggtgggc

SEQ ID NO: 26833 - RNA, 22 nt, synthetic construct
  source 1..22: mol_type = other RNA
attgtcttccctcccaggcagc

SEQ ID NO: 26834 - RNA, 22 nt, synthetic construct
  source 1..22: mol_type = other RNA
caacaccctgtgaggtgactga

SEQ ID NO: 26835 - RNA, 22 nt, synthetic construct
  source 1..22: mol_type = other RNA
caactccatggtggcacactgt

SEQ ID NO: 26836 - RNA, 22 nt, synthetic construct
  source 1..22: mol_type = other RNA
caatctcttcttctccagccag

SEQ ID NO: 26837 - RNA, 22 nt, synthetic construct
  source 1..22: mol_type = other RNA
caatgctcagtcacctcacagg

SEQ ID NO: 26838 - RNA, 22 nt, synthetic construct
  source 1..22: mol_type = other RNA
cacactgtgagctgcctgggag

SEQ ID NO: 26839 - RNA, 22 nt, synthetic construct
  source 1..22: mol_type = other RNA
cacagggggtcagcatcgctgt

SEQ ID NO: 26840 - RNA, 22 nt, synthetic construct
  source 1..22: mol_type = other RNA
cacagtgtgccaccatggagtt

SEQ ID NO: 26841 - RNA, 22 nt, synthetic construct
  source 1..22: mol_type = other RNA
caccatggagttggggccccta

SEQ ID NO: 26842 - RNA, 22 nt, synthetic construct
  source 1..22: mol_type = other RNA
caccctgtgaggtgactgagca

SEQ ID NO: 26843 - RNA, 22 nt, synthetic construct
  source 1..22: mol_type = other RNA
cacctgagtagagctcaatctc

SEQ ID NO: 26844 - RNA, 22 nt, synthetic construct
  source 1..22: mol_type = other RNA
caccttctaggggccccaactc

SEQ ID NO: 26845 - RNA, 22 nt, synthetic construct
  source 1..22: mol_type = other RNA
cactgtgagctgcctgggaggg

SEQ ID NO: 26846 - RNA, 22 nt, synthetic construct
  source 1..22: mol_type = other RNA
cacttctatgaccagatggacc

SEQ ID NO: 26847 - RNA, 22 nt, synthetic construct
  source 1..22: mol_type = other RNA
cagagggaggagggcccacctg

SEQ ID NO: 26848 - RNA, 22 nt, synthetic construct
  source 1..22: mol_type = other RNA
cagatggacctggctggagaag

SEQ ID NO: 26849 - RNA, 22 nt, synthetic construct
  source 1..22: mol_type = other RNA
cagcatcgctgttaagaagctc

SEQ ID NO: 26850 - RNA, 22 nt, synthetic construct
  source 1..22: mol_type = other RNA
cagccaggtccatctggtcata

SEQ ID NO: 26851 - RNA, 22 nt, synthetic construct
  source 1..22: mol_type = other RNA
cagcgatgctgaccccctgtgc

SEQ ID NO: 26852 - RNA, 22 nt, synthetic construct
  source 1..22: mol_type = other RNA
cagctcacagtgtgccaccatg

SEQ ID NO: 26853 - RNA, 22 nt, synthetic construct
  source 1..22: mol_type = other RNA
caggcagctcacagtgtgccac

SEQ ID NO: 26854 - RNA, 22 nt, synthetic construct
  source 1..22: mol_type = other RNA
cagggggtcagcatcgctgtta

SEQ ID NO: 26855 - RNA, 22 nt, synthetic construct
  source 1..22: mol_type = other RNA
caggtagccaccttctaggggc

SEQ ID NO: 26856 - RNA, 22 nt, synthetic construct
  source 1..22: mol_type = other RNA
caggtccatctggtcatagaag

SEQ ID NO: 26857 - RNA, 22 nt, synthetic construct
  source 1..22: mol_type = other RNA
caggtgggccctcctccctctg

SEQ ID NO: 26858 - RNA, 22 nt, synthetic construct
  source 1..22: mol_type = other RNA
cagtgtgccaccatggagttgg

SEQ ID NO: 26859 - RNA, 22 nt, synthetic construct
  source 1..22: mol_type = other RNA
catagaagtggtagaggcacag

SEQ ID NO: 26860 - RNA, 22 nt, synthetic construct
  source 1..22: mol_type = other RNA
catcgctgttaagaagctccag

SEQ ID NO: 26861 - RNA, 22 nt, synthetic construct
  source 1..22: mol_type = other RNA
catctggtcatagaagtggtag

SEQ ID NO: 26862 - RNA, 22 nt, synthetic construct
  source 1..22: mol_type = other RNA
catggagttggggcccctagaa

SEQ ID NO: 26863 - RNA, 22 nt, synthetic construct
  source 1..22: mol_type = other RNA
catggtggcacactgtgagctg

SEQ ID NO: 26864 - RNA, 22 nt, synthetic construct
  source 1..22: mol_type = other RNA
cattgtcttccctcccaggcag

SEQ ID NO: 26865 - RNA, 22 nt, synthetic construct
  source 1..22: mol_type = other RNA
ccaacaccctgtgaggtgactg

SEQ ID NO: 26866 - RNA, 22 nt, synthetic construct
  source 1..22: mol_type = other RNA
ccaactccatggtggcacactg

SEQ ID NO: 26867 - RNA, 22 nt, synthetic construct
  source 1..22: mol_type = other RNA
ccaccatggagttggggcccct

SEQ ID NO: 26868 - RNA, 22 nt, synthetic construct
  source 1..22: mol_type = other RNA
ccacctgagtagagctcaatct

SEQ ID NO: 26869 - RNA, 22 nt, synthetic construct
  source 1..22: mol_type = other RNA
ccaccttctaggggccccaact

SEQ ID NO: 26870 - RNA, 22 nt, synthetic construct
  source 1..22: mol_type = other RNA
ccacttctatgaccagatggac

SEQ ID NO: 26871 - RNA, 22 nt, synthetic construct
  source 1..22: mol_type = other RNA
ccagagggaggagggcccacct

SEQ ID NO: 26872 - RNA, 22 nt, synthetic construct
  source 1..22: mol_type = other RNA
ccagatggacctggctggagaa

SEQ ID NO: 26873 - RNA, 22 nt, synthetic construct
  source 1..22: mol_type = other RNA
ccagccaggtccatctggtcat

SEQ ID NO: 26874 - RNA, 22 nt, synthetic construct
  source 1..22: mol_type = other RNA
ccaggcagctcacagtgtgcca

SEQ ID NO: 26875 - RNA, 22 nt, synthetic construct
  source 1..22: mol_type = other RNA
ccaggtagccaccttctagggg

SEQ ID NO: 26876 - RNA, 22 nt, synthetic construct
  source 1..22: mol_type = other RNA
ccaggtccatctggtcatagaa

SEQ ID NO: 26877 - RNA, 22 nt, synthetic construct
  source 1..22: mol_type = other RNA
ccatctggtcatagaagtggta

SEQ ID NO: 26878 - RNA, 22 nt, synthetic construct
  source 1..22: mol_type = other RNA
ccatggagttggggcccctaga

SEQ ID NO: 26879 - RNA, 22 nt, synthetic construct
  source 1..22: mol_type = other RNA
ccatggtggcacactgtgagct

SEQ ID NO: 26880 - RNA, 22 nt, synthetic construct
  source 1..22: mol_type = other RNA
cccaactccatggtggcacact

SEQ ID NO: 26881 - RNA, 22 nt, synthetic construct
  source 1..22: mol_type = other RNA
cccacctgagtagagctcaatc

SEQ ID NO: 26882 - RNA, 22 nt, synthetic construct
  source 1..22: mol_type = other RNA
cccaggcagctcacagtgtgcc

SEQ ID NO: 26883 - RNA, 22 nt, synthetic construct
  source 1..22: mol_type = other RNA
ccccaactccatggtggcacac

SEQ ID NO: 26884 - RNA, 22 nt, synthetic construct
  source 1..22: mol_type = other RNA
ccccctgtgcctctaccacttc

SEQ ID NO: 26885 - RNA, 22 nt, synthetic construct
  source 1..22: mol_type = other RNA
cccctagaaggtggctacctgg

SEQ ID NO: 26886 - RNA, 22 nt, synthetic construct
  source 1..22: mol_type = other RNA
cccctgtgcctctaccacttct

SEQ ID NO: 26887 - RNA, 22 nt, synthetic construct
  source 1..22: mol_type = other RNA
ccctagaaggtggctacctgga

SEQ ID NO: 26888 - RNA, 22 nt, synthetic construct
  source 1..22: mol_type = other RNA
ccctcccaggcagctcacagtg

SEQ ID NO: 26889 - RNA, 22 nt, synthetic construct
  source 1..22: mol_type = other RNA
ccctcctccctctggtctcttc

SEQ ID NO: 26890 - RNA, 22 nt, synthetic construct
  source 1..22: mol_type = other RNA
ccctctggtctcttccggtatc

SEQ ID NO: 26891 - RNA, 22 nt, synthetic construct
  source 1..22: mol_type = other RNA
ccctgtgaggtgactgagcatt

SEQ ID NO: 26892 - RNA, 22 nt, synthetic construct
  source 1..22: mol_type = other RNA
ccctgtgcctctaccacttcta

SEQ ID NO: 26893 - RNA, 22 nt, synthetic construct
  source 1..22: mol_type = other RNA
ccggaagagaccagagggagga

SEQ ID NO: 26894 - RNA, 22 nt, synthetic construct
  source 1..22: mol_type = other RNA
cctagaaggtggctacctggag

SEQ ID NO: 26895 - RNA, 22 nt, synthetic construct
  source 1..22: mol_type = other RNA
cctcccaggcagctcacagtgt

SEQ ID NO: 26896 - RNA, 22 nt, synthetic construct
  source 1..22: mol_type = other RNA
cctccctctggtctcttccggt

SEQ ID NO: 26897 - RNA, 22 nt, synthetic construct
  source 1..22: mol_type = other RNA
cctcctccctctggtctcttcc

SEQ ID NO: 26898 - RNA, 22 nt, synthetic construct
  source 1..22: mol_type = other RNA
cctctaccacttctatgaccag

SEQ ID NO: 26899 - RNA, 22 nt, synthetic construct
  source 1..22: mol_type = other RNA
cctctggtctcttccggtatcc

SEQ ID NO: 26900 - RNA, 22 nt, synthetic construct
  source 1..22: mol_type = other RNA
cctgagtagagctcaatctctt

SEQ ID NO: 26901 - RNA, 22 nt, synthetic construct
  source 1..22: mol_type = other RNA
cctggagcttcttaacagcgat

SEQ ID NO: 26902 - RNA, 22 nt, synthetic construct
  source 1..22: mol_type = other RNA
cctggctggagaagaagagatt

SEQ ID NO: 26903 - RNA, 22 nt, synthetic construct
  source 1..22: mol_type = other RNA
cctgggagggaagacaatgctc

SEQ ID NO: 26904 - RNA, 22 nt, synthetic construct
  source 1..22: mol_type = other RNA
cctgtgaggtgactgagcattg

SEQ ID NO: 26905 - RNA, 22 nt, synthetic construct
  source 1..22: mol_type = other RNA
cctgtgcctctaccacttctat

SEQ ID NO: 26906 - RNA, 22 nt, synthetic construct
  source 1..22: mol_type = other RNA
ccttctaggggccccaactcca

SEQ ID NO: 26907 - RNA, 22 nt, synthetic construct
  source 1..22: mol_type = other RNA
cgatgctgaccccctgtgcctc

SEQ ID NO: 26908 - RNA, 22 nt, synthetic construct
  source 1..22: mol_type = other RNA
cgctgttaagaagctccaggta

SEQ ID NO: 26909 - RNA, 22 nt, synthetic construct
  source 1..22: mol_type = other RNA
cggaagagaccagagggaggag

SEQ ID NO: 26910 - RNA, 22 nt, synthetic construct
  source 1..22: mol_type = other RNA
ctaccacttctatgaccagatg

SEQ ID NO: 26911 - RNA, 22 nt, synthetic construct
  source 1..22: mol_type = other RNA
ctacctggagcttcttaacagc

SEQ ID NO: 26912 - RNA, 22 nt, synthetic construct
  source 1..22: mol_type = other RNA
ctactcaggtgggccctcctcc

SEQ ID NO: 26913 - RNA, 22 nt, synthetic construct
  source 1..22: mol_type = other RNA
ctagaaggtggctacctggagc

SEQ ID NO: 26914 - RNA, 22 nt, synthetic construct
  source 1..22: mol_type = other RNA
ctaggggccccaactccatggt

SEQ ID NO: 26915 - RNA, 22 nt, synthetic construct
  source 1..22: mol_type = other RNA
ctatgaccagatggacctggct

SEQ ID NO: 26916 - RNA, 22 nt, synthetic construct
  source 1..22: mol_type = other RNA
ctcaatctcttcttctccagcc

SEQ ID NO: 26917 - RNA, 22 nt, synthetic construct
  source 1..22: mol_type = other RNA
ctcacagtgtgccaccatggag

SEQ ID NO: 26918 - RNA, 22 nt, synthetic construct
  source 1..22: mol_type = other RNA
ctcaggtgggccctcctccctc

SEQ ID NO: 26919 - RNA, 22 nt, synthetic construct
  source 1..22: mol_type = other RNA
ctccagccaggtccatctggtc

SEQ ID NO: 26920 - RNA, 22 nt, synthetic construct
  source 1..22: mol_type = other RNA
ctccaggtagccaccttctagg

SEQ ID NO: 26921 - RNA, 22 nt, synthetic construct
  source 1..22: mol_type = other RNA
ctccatggtggcacactgtgag

SEQ ID NO: 26922 - RNA, 22 nt, synthetic construct
  source 1..22: mol_type = other RNA
ctcccaggcagctcacagtgtg

SEQ ID NO: 26923 - RNA, 22 nt, synthetic construct
  source 1..22: mol_type = other RNA
ctccctctggtctcttccggta

SEQ ID NO: 26924 - RNA, 22 nt, synthetic construct
  source 1..22: mol_type = other RNA
ctcctccctctggtctcttccg

SEQ ID NO: 26925 - RNA, 22 nt, synthetic construct
  source 1..22: mol_type = other RNA
ctctaccacttctatgaccaga

SEQ ID NO: 26926 - RNA, 22 nt, synthetic construct
  source 1..22: mol_type = other RNA
ctctactcaggtgggccctcct

SEQ ID NO: 26927 - RNA, 22 nt, synthetic construct
  source 1..22: mol_type = other RNA
ctctggtctcttccggtatccc

SEQ ID NO: 26928 - RNA, 22 nt, synthetic construct
  source 1..22: mol_type = other RNA
ctcttcttctccagccaggtcc

SEQ ID NO: 26929 - RNA, 22 nt, synthetic construct
  source 1..22: mol_type = other RNA
ctgaccccctgtgcctctacca

SEQ ID NO: 26930 - RNA, 22 nt, synthetic construct
  source 1..22: mol_type = other RNA
ctgagcattgtcttccctccca

SEQ ID NO: 26931 - RNA, 22 nt, synthetic construct
  source 1..22: mol_type = other RNA
ctgagtagagctcaatctcttc

SEQ ID NO: 26932 - RNA, 22 nt, synthetic construct
  source 1..22: mol_type = other RNA
ctgcctgggagggaagacaatg

SEQ ID NO: 26933 - RNA, 22 nt, synthetic construct
  source 1..22: mol_type = other RNA
ctggagaagaagagattgagct

SEQ ID NO: 26934 - RNA, 22 nt, synthetic construct
  source 1..22: mol_type = other RNA
ctggagcttcttaacagcgatg

SEQ ID NO: 26935 - RNA, 22 nt, synthetic construct
  source 1..22: mol_type = other RNA
ctggctggagaagaagagattg

SEQ ID NO: 26936 - RNA, 22 nt, synthetic construct
  source 1..22: mol_type = other RNA
ctgggagggaagacaatgctca

SEQ ID NO: 26937 - RNA, 22 nt, synthetic construct
  source 1..22: mol_type = other RNA
ctggtcatagaagtggtagagg

SEQ ID NO: 26938 - RNA, 22 nt, synthetic construct
  source 1..22: mol_type = other RNA
ctgtgagctgcctgggagggaa

SEQ ID NO: 26939 - RNA, 22 nt, synthetic construct
  source 1..22: mol_type = other RNA
ctgtgaggtgactgagcattgt

SEQ ID NO: 26940 - RNA, 22 nt, synthetic construct
  source 1..22: mol_type = other RNA
ctgtgcctctaccacttctatg

SEQ ID NO: 26941 - RNA, 22 nt, synthetic construct
  source 1..22: mol_type = other RNA
ctgttaagaagctccaggtagc

SEQ ID NO: 26942 - RNA, 22 nt, synthetic construct
  source 1..22: mol_type = other RNA
cttaacagcgatgctgaccccc

SEQ ID NO: 26943 - RNA, 22 nt, synthetic construct
  source 1..22: mol_type = other RNA
cttccctcccaggcagctcaca

SEQ ID NO: 26944 - RNA, 22 nt, synthetic construct
  source 1..22: mol_type = other RNA
cttctaggggccccaactccat

SEQ ID NO: 26945 - RNA, 22 nt, synthetic construct
  source 1..22: mol_type = other RNA
cttctatgaccagatggacctg

SEQ ID NO: 26946 - RNA, 22 nt, synthetic construct
  source 1..22: mol_type = other RNA
cttctccagccaggtccatctg

SEQ ID NO: 26947 - RNA, 22 nt, synthetic construct
  source 1..22: mol_type = other RNA
cttcttaacagcgatgctgacc

SEQ ID NO: 26948 - RNA, 22 nt, synthetic construct
  source 1..22: mol_type = other RNA
cttcttctccagccaggtccat

SEQ ID NO: 26949 - RNA, 22 nt, synthetic construct
  source 1..22: mol_type = other RNA
ctttccaacaccctgtgaggtg

SEQ ID NO: 26950 - RNA, 22 nt, synthetic construct
  source 1..22: mol_type = other RNA
gaagaagagattgagctctact

SEQ ID NO: 26951 - RNA, 22 nt, synthetic construct
  source 1..22: mol_type = other RNA
gaagacaatgctcagtcacctc

SEQ ID NO: 26952 - RNA, 22 nt, synthetic construct
  source 1..22: mol_type = other RNA
gaagagaccagagggaggaggg

SEQ ID NO: 26953 - RNA, 22 nt, synthetic construct
  source 1..22: mol_type = other RNA
gaagagattgagctctactcag

SEQ ID NO: 26954 - RNA, 22 nt, synthetic construct
  source 1..22: mol_type = other RNA
gaagctccaggtagccaccttc

SEQ ID NO: 26955 - RNA, 22 nt, synthetic construct
  source 1..22: mol_type = other RNA
gaaggtggctacctggagcttc

SEQ ID NO: 26956 - RNA, 22 nt, synthetic construct
  source 1..22: mol_type = other RNA
gaagtggtagaggcacaggggg

SEQ ID NO: 26957 - RNA, 22 nt, synthetic construct
  source 1..22: mol_type = other RNA
gacaatgctcagtcacctcaca

SEQ ID NO: 26958 - RNA, 22 nt, synthetic construct
  source 1..22: mol_type = other RNA
gaccagagggaggagggcccac

SEQ ID NO: 26959 - RNA, 22 nt, synthetic construct
  source 1..22: mol_type = other RNA
gaccagatggacctggctggag

SEQ ID NO: 26960 - RNA, 22 nt, synthetic construct
  source 1..22: mol_type = other RNA
gaccccctgtgcctctaccact

SEQ ID NO: 26961 - RNA, 22 nt, synthetic construct
  source 1..22: mol_type = other RNA
gacctggctggagaagaagaga

SEQ ID NO: 26962 - RNA, 22 nt, synthetic construct
  source 1..22: mol_type = other RNA
gactgagcattgtcttccctcc

SEQ ID NO: 26963 - RNA, 22 nt, synthetic construct
  source 1..22: mol_type = other RNA
gagaagaagagattgagctcta

SEQ ID NO: 26964 - RNA, 22 nt, synthetic construct
  source 1..22: mol_type = other RNA
gagaccagagggaggagggccc

SEQ ID NO: 26965 - RNA, 22 nt, synthetic construct
  source 1..22: mol_type = other RNA
gagattgagctctactcaggtg

SEQ ID NO: 26966 - RNA, 22 nt, synthetic construct
  source 1..22: mol_type = other RNA
gagcattgtcttccctcccagg

SEQ ID NO: 26967 - RNA, 22 nt, synthetic construct
  source 1..22: mol_type = other RNA
gagctcaatctcttcttctcca

SEQ ID NO: 26968 - RNA, 22 nt, synthetic construct
  source 1..22: mol_type = other RNA
gagctctactcaggtgggccct

SEQ ID NO: 26969 - RNA, 22 nt, synthetic construct
  source 1..22: mol_type = other RNA
gagctgcctgggagggaagaca

SEQ ID NO: 26970 - RNA, 22 nt, synthetic construct
  source 1..22: mol_type = other RNA
gagcttcttaacagcgatgctg

SEQ ID NO: 26971 - RNA, 22 nt, synthetic construct
  source 1..22: mol_type = other RNA
gaggagggcccacctgagtaga

SEQ ID NO: 26972 - RNA, 22 nt, synthetic construct
  source 1..22: mol_type = other RNA
gaggcacagggggtcagcatcg

SEQ ID NO: 26973 - RNA, 22 nt, synthetic construct
  source 1..22: mol_type = other RNA
gagggaagacaatgctcagtca

SEQ ID NO: 26974 - RNA, 22 nt, synthetic construct
  source 1..22: mol_type = other RNA
gagggaggagggcccacctgag

SEQ ID NO: 26975 - RNA, 22 nt, synthetic construct
  source 1..22: mol_type = other RNA
gagggcccacctgagtagagct

SEQ ID NO: 26976 - RNA, 22 nt, synthetic construct
  source 1..22: mol_type = other RNA
gaggggtgggggataccggaag

SEQ ID NO: 26977 - RNA, 22 nt, synthetic construct
  source 1..22: mol_type = other RNA
gaggtgactgagcattgtcttc

SEQ ID NO: 26978 - RNA, 22 nt, synthetic construct
  source 1..22: mol_type = other RNA
gagtagagctcaatctcttctt

SEQ ID NO: 26979 - RNA, 22 nt, synthetic construct
  source 1..22: mol_type = other RNA
gagttggggcccctagaaggtg

SEQ ID NO: 26980 - RNA, 22 nt, synthetic construct
  source 1..22: mol_type = other RNA
gataccggaagagaccagaggg

SEQ ID NO: 26981 - RNA, 22 nt, synthetic construct
  source 1..22: mol_type = other RNA
gatgctgaccccctgtgcctct

SEQ ID NO: 26982 - RNA, 22 nt, synthetic construct
  source 1..22: mol_type = other RNA
gatggacctggctggagaagaa

SEQ ID NO: 26983 - RNA, 22 nt, synthetic construct
  source 1..22: mol_type = other RNA
gattgagctctactcaggtggg

SEQ ID NO: 26984 - RNA, 22 nt, synthetic construct
  source 1..22: mol_type = other RNA
gcacactgtgagctgcctggga

SEQ ID NO: 26985 - RNA, 22 nt, synthetic construct
  source 1..22: mol_type = other RNA
gcacagggggtcagcatcgctg

SEQ ID NO: 26986 - RNA, 22 nt, synthetic construct
  source 1..22: mol_type = other RNA
gcagctcacagtgtgccaccat

SEQ ID NO: 26987 - RNA, 22 nt, synthetic construct
  source 1..22: mol_type = other RNA
gcatcgctgttaagaagctcca

SEQ ID NO: 26988 - RNA, 22 nt, synthetic construct
  source 1..22: mol_type = other RNA
gcattgtcttccctcccaggca

SEQ ID NO: 26989 - RNA, 22 nt, synthetic construct
  source 1..22: mol_type = other RNA
gccaccatggagttggggcccc

SEQ ID NO: 26990 - RNA, 22 nt, synthetic construct
  source 1..22: mol_type = other RNA
gccaccttctaggggccccaac

SEQ ID NO: 26991 - RNA, 22 nt, synthetic construct
  source 1..22: mol_type = other RNA
gccaggtccatctggtcataga

SEQ ID NO: 26992 - RNA, 22 nt, synthetic construct
  source 1..22: mol_type = other RNA
gcccacctgagtagagctcaat

SEQ ID NO: 26993 - RNA, 22 nt, synthetic construct
  source 1..22: mol_type = other RNA
gccccaactccatggtggcaca

SEQ ID NO: 26994 - RNA, 22 nt, synthetic construct
  source 1..22: mol_type = other RNA
gcccctagaaggtggctacctg

SEQ ID NO: 26995 - RNA, 22 nt, synthetic construct
  source 1..22: mol_type = other RNA
gccctcctccctctggtctctt

SEQ ID NO: 26996 - RNA, 22 nt, synthetic construct
  source 1..22: mol_type = other RNA
gcctctaccacttctatgacca

SEQ ID NO: 26997 - RNA, 22 nt, synthetic construct
  source 1..22: mol_type = other RNA
gcctgggagggaagacaatgct

SEQ ID NO: 26998 - RNA, 22 nt, synthetic construct
  source 1..22: mol_type = other RNA
gcgatgctgaccccctgtgcct

SEQ ID NO: 26999 - RNA, 22 nt, synthetic construct
  source 1..22: mol_type = other RNA
gctacctggagcttcttaacag

SEQ ID NO: 27000 - RNA, 22 nt, synthetic construct
  source 1..22: mol_type = other RNA
gctcaatctcttcttctccagc

SEQ ID NO: 27001 - RNA, 22 nt, synthetic construct
  source 1..22: mol_type = other RNA
gctcacagtgtgccaccatgga

SEQ ID NO: 27002 - RNA, 22 nt, synthetic construct
  source 1..22: mol_type = other RNA
gctccaggtagccaccttctag

SEQ ID NO: 27003 - RNA, 22 nt, synthetic construct
  source 1..22: mol_type = other RNA
gctctactcaggtgggccctcc

SEQ ID NO: 27004 - RNA, 22 nt, synthetic construct
  source 1..22: mol_type = other RNA
gctgaccccctgtgcctctacc

SEQ ID NO: 27005 - RNA, 22 nt, synthetic construct
  source 1..22: mol_type = other RNA
gctgcctgggagggaagacaat

SEQ ID NO: 27006 - RNA, 22 nt, synthetic construct
  source 1..22: mol_type = other RNA
gctggagaagaagagattgagc

SEQ ID NO: 27007 - RNA, 22 nt, synthetic construct
  source 1..22: mol_type = other RNA
gctgttaagaagctccaggtag

SEQ ID NO: 27008 - RNA, 22 nt, synthetic construct
  source 1..22: mol_type = other RNA
gcttcttaacagcgatgctgac

SEQ ID NO: 27009 - RNA, 22 nt, synthetic construct
  source 1..22: mol_type = other RNA
ggaagacaatgctcagtcacct

SEQ ID NO: 27010 - RNA, 22 nt, synthetic construct
  source 1..22: mol_type = other RNA
ggaagagaccagagggaggagg

SEQ ID NO: 27011 - RNA, 22 nt, synthetic construct
  source 1..22: mol_type = other RNA
ggacctggctggagaagaagag

SEQ ID NO: 27012 - RNA, 22 nt, synthetic construct
  source 1..22: mol_type = other RNA
ggagaagaagagattgagctct

SEQ ID NO: 27013 - RNA, 22 nt, synthetic construct
  source 1..22: mol_type = other RNA
ggagcttcttaacagcgatgct

SEQ ID NO: 27014 - RNA, 22 nt, synthetic construct
  source 1..22: mol_type = other RNA
ggaggagggcccacctgagtag

SEQ ID NO: 27015 - RNA, 22 nt, synthetic construct
  source 1..22: mol_type = other RNA
ggagggaagacaatgctcagtc

SEQ ID NO: 27016 - RNA, 22 nt, synthetic construct
  source 1..22: mol_type = other RNA
ggagggcccacctgagtagagc

SEQ ID NO: 27017 - RNA, 22 nt, synthetic construct
  source 1..22: mol_type = other RNA
ggagttggggcccctagaaggt

SEQ ID NO: 27018 - RNA, 22 nt, synthetic construct
  source 1..22: mol_type = other RNA
ggataccggaagagaccagagg

SEQ ID NO: 27019 - RNA, 22 nt, synthetic construct
  source 1..22: mol_type = other RNA
ggcacactgtgagctgcctggg

SEQ ID NO: 27020 - RNA, 22 nt, synthetic construct
  source 1..22: mol_type = other RNA
ggcacagggggtcagcatcgct

SEQ ID NO: 27021 - RNA, 22 nt, synthetic construct
  source 1..22: mol_type = other RNA
ggcagctcacagtgtgccacca

SEQ ID NO: 27022 - RNA, 22 nt, synthetic construct
  source 1..22: mol_type = other RNA
ggcccacctgagtagagctcaa

SEQ ID NO: 27023 - RNA, 22 nt, synthetic construct
  source 1..22: mol_type = other RNA
ggccccaactccatggtggcac

SEQ ID NO: 27024 - RNA, 22 nt, synthetic construct
  source 1..22: mol_type = other RNA
ggcccctagaaggtggctacct

SEQ ID NO: 27025 - RNA, 22 nt, synthetic construct
  source 1..22: mol_type = other RNA
ggccctcctccctctggtctct

SEQ ID NO: 27026 - RNA, 22 nt, synthetic construct
  source 1..22: mol_type = other RNA
ggctacctggagcttcttaaca

SEQ ID NO: 27027 - RNA, 22 nt, synthetic construct
  source 1..22: mol_type = other RNA
ggctggagaagaagagattgag

SEQ ID NO: 27028 - RNA, 22 nt, synthetic construct
  source 1..22: mol_type = other RNA
gggaagacaatgctcagtcacc

SEQ ID NO: 27029 - RNA, 22 nt, synthetic construct
  source 1..22: mol_type = other RNA
gggaggagggcccacctgagta

SEQ ID NO: 27030 - RNA, 22 nt, synthetic construct
  source 1..22: mol_type = other RNA
gggagggaagacaatgctcagt

SEQ ID NO: 27031 - RNA, 22 nt, synthetic construct
  source 1..22: mol_type = other RNA
gggataccggaagagaccagag

SEQ ID NO: 27032 - RNA, 22 nt, synthetic construct
  source 1..22: mol_type = other RNA
gggcccacctgagtagagctca

SEQ ID NO: 27033 - RNA, 22 nt, synthetic construct
  source 1..22: mol_type = other RNA
gggccccaactccatggtggca

SEQ ID NO: 27034 - RNA, 22 nt, synthetic construct
  source 1..22: mol_type = other RNA
gggcccctagaaggtggctacc

SEQ ID NO: 27035 - RNA, 22 nt, synthetic construct
  source 1..22: mol_type = other RNA
gggccctcctccctctggtctc

SEQ ID NO: 27036 - RNA, 22 nt, synthetic construct
  source 1..22: mol_type = other RNA
ggggataccggaagagaccaga

SEQ ID NO: 27037 - RNA, 22 nt, synthetic construct
  source 1..22: mol_type = other RNA
ggggccccaactccatggtggc

SEQ ID NO: 27038 - RNA, 22 nt, synthetic construct
  source 1..22: mol_type = other RNA
ggggcccctagaaggtggctac

SEQ ID NO: 27039 - RNA, 22 nt, synthetic construct
  source 1..22: mol_type = other RNA
gggggataccggaagagaccag

SEQ ID NO: 27040 - RNA, 22 nt, synthetic construct
  source 1..22: mol_type = other RNA
gggggtcagcatcgctgttaag

SEQ ID NO: 27041 - RNA, 22 nt, synthetic construct
  source 1..22: mol_type = other RNA
ggggtcagcatcgctgttaaga

SEQ ID NO: 27042 - RNA, 22 nt, synthetic construct
  source 1..22: mol_type = other RNA
ggggtgggggataccggaagag

SEQ ID NO: 27043 - RNA, 22 nt, synthetic construct
  source 1..22: mol_type = other RNA
gggtcagcatcgctgttaagaa

SEQ ID NO: 27044 - RNA, 22 nt, synthetic construct
  source 1..22: mol_type = other RNA
gggtgggggataccggaagaga

SEQ ID NO: 27045 - RNA, 22 nt, synthetic construct
  source 1..22: mol_type = other RNA
ggtagaggcacagggggtcagc

SEQ ID NO: 27046 - RNA, 22 nt, synthetic construct
  source 1..22: mol_type = other RNA
ggtagccaccttctaggggccc

SEQ ID NO: 27047 - RNA, 22 nt, synthetic construct
  source 1..22: mol_type = other RNA
ggtcagcatcgctgttaagaag

SEQ ID NO: 27048 - RNA, 22 nt, synthetic construct
  source 1..22: mol_type = other RNA
ggtcatagaagtggtagaggca

SEQ ID NO: 27049 - RNA, 22 nt, synthetic construct
  source 1..22: mol_type = other RNA
ggtccatctggtcatagaagtg

SEQ ID NO: 27050 - RNA, 22 nt, synthetic construct
  source 1..22: mol_type = other RNA
ggtgactgagcattgtcttccc

SEQ ID NO: 27051 - RNA, 22 nt, synthetic construct
  source 1..22: mol_type = other RNA
ggtggcacactgtgagctgcct

SEQ ID NO: 27052 - RNA, 22 nt, synthetic construct
  source 1..22: mol_type = other RNA
ggtggctacctggagcttctta

SEQ ID NO: 27053 - RNA, 22 nt, synthetic construct
  source 1..22: mol_type = other RNA
ggtgggccctcctccctctggt

SEQ ID NO: 27054 - RNA, 22 nt, synthetic construct
  source 1..22: mol_type = other RNA
ggtgggggataccggaagagac

SEQ ID NO: 27055 - RNA, 22 nt, synthetic construct
  source 1..22: mol_type = other RNA
gtagagctcaatctcttcttct

SEQ ID NO: 27056 - RNA, 22 nt, synthetic construct
  source 1..22: mol_type = other RNA
gtagaggcacagggggtcagca

SEQ ID NO: 27057 - RNA, 22 nt, synthetic construct
  source 1..22: mol_type = other RNA
gtagccaccttctaggggcccc

SEQ ID NO: 27058 - RNA, 22 nt, synthetic construct
  source 1..22: mol_type = other RNA
gtcagcatcgctgttaagaagc

SEQ ID NO: 27059 - RNA, 22 nt, synthetic construct
  source 1..22: mol_type = other RNA
gtcatagaagtggtagaggcac

SEQ ID NO: 27060 - RNA, 22 nt, synthetic construct
  source 1..22: mol_type = other RNA
gtccatctggtcatagaagtgg

SEQ ID NO: 27061 - RNA, 22 nt, synthetic construct
  source 1..22: mol_type = other RNA
gtcttccctcccaggcagctca

SEQ ID NO: 27062 - RNA, 22 nt, synthetic construct
  source 1..22: mol_type = other RNA
gtgactgagcattgtcttccct

SEQ ID NO: 27063 - RNA, 22 nt, synthetic construct
  source 1..22: mol_type = other RNA
gtgagctgcctgggagggaaga

SEQ ID NO: 27064 - RNA, 22 nt, synthetic construct
  source 1..22: mol_type = other RNA
gtgaggtgactgagcattgtct

SEQ ID NO: 27065 - RNA, 22 nt, synthetic construct
  source 1..22: mol_type = other RNA
gtgccaccatggagttggggcc

SEQ ID NO: 27066 - RNA, 22 nt, synthetic construct
  source 1..22: mol_type = other RNA
gtgcctctaccacttctatgac

SEQ ID NO: 27067 - RNA, 22 nt, synthetic construct
  source 1..22: mol_type = other RNA
gtggcacactgtgagctgcctg

SEQ ID NO: 27068 - RNA, 22 nt, synthetic construct
  source 1..22: mol_type = other RNA
gtggctacctggagcttcttaa

SEQ ID NO: 27069 - RNA, 22 nt, synthetic construct
  source 1..22: mol_type = other RNA
gtgggccctcctccctctggtc

SEQ ID NO: 27070 - RNA, 22 nt, synthetic construct
  source 1..22: mol_type = other RNA
gtgggggataccggaagagacc

SEQ ID NO: 27071 - RNA, 22 nt, synthetic construct
  source 1..22: mol_type = other RNA
gtggtagaggcacagggggtca

SEQ ID NO: 27072 - RNA, 22 nt, synthetic construct
  source 1..22: mol_type = other RNA
gtgtgccaccatggagttgggg

SEQ ID NO: 27073 - RNA, 22 nt, synthetic construct
  source 1..22: mol_type = other RNA
gttaagaagctccaggtagcca

SEQ ID NO: 27074 - RNA, 22 nt, synthetic construct
  source 1..22: mol_type = other RNA
gttggggcccctagaaggtggc

SEQ ID NO: 27075 - RNA, 22 nt, synthetic construct
  source 1..22: mol_type = other RNA
taacagcgatgctgaccccctg

SEQ ID NO: 27076 - RNA, 22 nt, synthetic construct
  source 1..22: mol_type = other RNA
taagaagctccaggtagccacc

SEQ ID NO: 27077 - RNA, 22 nt, synthetic construct
  source 1..22: mol_type = other RNA
taccacttctatgaccagatgg

SEQ ID NO: 27078 - RNA, 22 nt, synthetic construct
  source 1..22: mol_type = other RNA
taccggaagagaccagagggag

SEQ ID NO: 27079 - RNA, 22 nt, synthetic construct
  source 1..22: mol_type = other RNA
tacctggagcttcttaacagcg

SEQ ID NO: 27080 - RNA, 22 nt, synthetic construct
  source 1..22: mol_type = other RNA
tactcaggtgggccctcctccc

SEQ ID NO: 27081 - RNA, 22 nt, synthetic construct
  source 1..22: mol_type = other RNA
tagaaggtggctacctggagct

SEQ ID NO: 27082 - RNA, 22 nt, synthetic construct
  source 1..22: mol_type = other RNA
tagaagtggtagaggcacaggg

SEQ ID NO: 27083 - RNA, 22 nt, synthetic construct
  source 1..22: mol_type = other RNA
tagagctcaatctcttcttctc

SEQ ID NO: 27084 - RNA, 22 nt, synthetic construct
  source 1..22: mol_type = other RNA
tagaggcacagggggtcagcat

SEQ ID NO: 27085 - RNA, 22 nt, synthetic construct
  source 1..22: mol_type = other RNA
tagccaccttctaggggcccca

SEQ ID NO: 27086 - RNA, 22 nt, synthetic construct
  source 1..22: mol_type = other RNA
taggggccccaactccatggtg

SEQ ID NO: 27087 - RNA, 22 nt, synthetic construct
  source 1..22: mol_type = other RNA
tatgaccagatggacctggctg

SEQ ID NO: 27088 - RNA, 22 nt, synthetic construct
  source 1..22: mol_type = other RNA
tcaatctcttcttctccagcca

SEQ ID NO: 27089 - RNA, 22 nt, synthetic construct
  source 1..22: mol_type = other RNA
tcacagtgtgccaccatggagt

SEQ ID NO: 27090 - RNA, 22 nt, synthetic construct
  source 1..22: mol_type = other RNA
tcagcatcgctgttaagaagct

SEQ ID NO: 27091 - RNA, 22 nt, synthetic construct
  source 1..22: mol_type = other RNA
tcaggtgggccctcctccctct

SEQ ID NO: 27092 - RNA, 22 nt, synthetic construct
  source 1..22: mol_type = other RNA
tcatagaagtggtagaggcaca

SEQ ID NO: 27093 - RNA, 22 nt, synthetic construct
  source 1..22: mol_type = other RNA
tccaacaccctgtgaggtgact

SEQ ID NO: 27094 - RNA, 22 nt, synthetic construct
  source 1..22: mol_type = other RNA
tccagccaggtccatctggtca

SEQ ID NO: 27095 - RNA, 22 nt, synthetic construct
  source 1..22: mol_type = other RNA
tccaggtagccaccttctaggg

SEQ ID NO: 27096 - RNA, 22 nt, synthetic construct
  source 1..22: mol_type = other RNA
tccatctggtcatagaagtggt

SEQ ID NO: 27097 - RNA, 22 nt, synthetic construct
  source 1..22: mol_type = other RNA
tccatggtggcacactgtgagc

SEQ ID NO: 27098 - RNA, 22 nt, synthetic construct
  source 1..22: mol_type = other RNA
tcccaggcagctcacagtgtgc

SEQ ID NO: 27099 - RNA, 22 nt, synthetic construct
  source 1..22: mol_type = other RNA
tccctcccaggcagctcacagt

SEQ ID NO: 27100 - RNA, 22 nt, synthetic construct
  source 1..22: mol_type = other RNA
tccctctggtctcttccggtat

SEQ ID NO: 27101 - RNA, 22 nt, synthetic construct
  source 1..22: mol_type = other RNA
tcctccctctggtctcttccgg

SEQ ID NO: 27102 - RNA, 22 nt, synthetic construct
  source 1..22: mol_type = other RNA
tcgctgttaagaagctccaggt

SEQ ID NO: 27103 - RNA, 22 nt, synthetic construct
  source 1..22: mol_type = other RNA
tctaccacttctatgaccagat

SEQ ID NO: 27104 - RNA, 22 nt, synthetic construct
  source 1..22: mol_type = other RNA
tctactcaggtgggccctcctc

SEQ ID NO: 27105 - RNA, 22 nt, synthetic construct
  source 1..22: mol_type = other RNA
tctaggggccccaactccatgg

SEQ ID NO: 27106 - RNA, 22 nt, synthetic construct
  source 1..22: mol_type = other RNA
tctatgaccagatggacctggc

SEQ ID NO: 27107 - RNA, 22 nt, synthetic construct
  source 1..22: mol_type = other RNA
tctccagccaggtccatctggt

SEQ ID NO: 27108 - RNA, 22 nt, synthetic construct
  source 1..22: mol_type = other RNA
tctcttcttctccagccaggtc

SEQ ID NO: 27109 - RNA, 22 nt, synthetic construct
  source 1..22: mol_type = other RNA
tctggtcatagaagtggtagag

SEQ ID NO: 27110 - RNA, 22 nt, synthetic construct
  source 1..22: mol_type = other RNA
tctggtctcttccggtatcccc

SEQ ID NO: 27111 - RNA, 22 nt, synthetic construct
  source 1..22: mol_type = other RNA
tcttaacagcgatgctgacccc

SEQ ID NO: 27112 - RNA, 22 nt, synthetic construct
  source 1..22: mol_type = other RNA
tcttccctcccaggcagctcac

SEQ ID NO: 27113 - RNA, 22 nt, synthetic construct
  source 1..22: mol_type = other RNA
tcttctccagccaggtccatct

SEQ ID NO: 27114 - RNA, 22 nt, synthetic construct
  source 1..22: mol_type = other RNA
tcttcttctccagccaggtcca

SEQ ID NO: 27115 - RNA, 22 nt, synthetic construct
  source 1..22: mol_type = other RNA
tgaccagatggacctggctgga

SEQ ID NO: 27116 - RNA, 22 nt, synthetic construct
  source 1..22: mol_type = other RNA
tgaccccctgtgcctctaccac

SEQ ID NO: 27117 - RNA, 22 nt, synthetic construct
  source 1..22: mol_type = other RNA
tgactgagcattgtcttccctc

SEQ ID NO: 27118 - RNA, 22 nt, synthetic construct
  source 1..22: mol_type = other RNA
tgagcattgtcttccctcccag

SEQ ID NO: 27119 - RNA, 22 nt, synthetic construct
  source 1..22: mol_type = other RNA
tgagctctactcaggtgggccc

SEQ ID NO: 27120 - RNA, 22 nt, synthetic construct
  source 1..22: mol_type = other RNA
tgagctgcctgggagggaagac

SEQ ID NO: 27121 - RNA, 22 nt, synthetic construct
  source 1..22: mol_type = other RNA
tgaggtgactgagcattgtctt

SEQ ID NO: 27122 - RNA, 22 nt, synthetic construct
  source 1..22: mol_type = other RNA
tgagtagagctcaatctcttct

SEQ ID NO: 27123 - RNA, 22 nt, synthetic construct
  source 1..22: mol_type = other RNA
tgccaccatggagttggggccc

SEQ ID NO: 27124 - RNA, 22 nt, synthetic construct
  source 1..22: mol_type = other RNA
tgcctctaccacttctatgacc

SEQ ID NO: 27125 - RNA, 22 nt, synthetic construct
  source 1..22: mol_type = other RNA
tgcctgggagggaagacaatgc

SEQ ID NO: 27126 - RNA, 22 nt, synthetic construct
  source 1..22: mol_type = other RNA
tgctcagtcacctcacagggtg

SEQ ID NO: 27127 - RNA, 22 nt, synthetic construct
  source 1..22: mol_type = other RNA
tgctgaccccctgtgcctctac

SEQ ID NO: 27128 - RNA, 22 nt, synthetic construct
  source 1..22: mol_type = other RNA
tggacctggctggagaagaaga

SEQ ID NO: 27129 - RNA, 22 nt, synthetic construct
  source 1..22: mol_type = other RNA
tggagaagaagagattgagctc

SEQ ID NO: 27130 - RNA, 22 nt, synthetic construct
  source 1..22: mol_type = other RNA
tggagcttcttaacagcgatgc

SEQ ID NO: 27131 - RNA, 22 nt, synthetic construct
  source 1..22: mol_type = other RNA
tggagttggggcccctagaagg

SEQ ID NO: 27132 - RNA, 22 nt, synthetic construct
  source 1..22: mol_type = other RNA
tggcacactgtgagctgcctgg

SEQ ID NO: 27133 - RNA, 22 nt, synthetic construct
  source 1..22: mol_type = other RNA
tggctacctggagcttcttaac

SEQ ID NO: 27134 - RNA, 22 nt, synthetic construct
  source 1..22: mol_type = other RNA
tggctggagaagaagagattga

SEQ ID NO: 27135 - RNA, 22 nt, synthetic construct
  source 1..22: mol_type = other RNA
tgggagggaagacaatgctcag

SEQ ID NO: 27136 - RNA, 22 nt, synthetic construct
  source 1..22: mol_type = other RNA
tgggccctcctccctctggtct

SEQ ID NO: 27137 - RNA, 22 nt, synthetic construct
  source 1..22: mol_type = other RNA
tggggcccctagaaggtggcta

SEQ ID NO: 27138 - RNA, 22 nt, synthetic construct
  source 1..22: mol_type = other RNA
tgggggataccggaagagacca

SEQ ID NO: 27139 - RNA, 22 nt, synthetic construct
  source 1..22: mol_type = other RNA
tggtagaggcacagggggtcag

SEQ ID NO: 27140 - RNA, 22 nt, synthetic construct
  source 1..22: mol_type = other RNA
tggtcatagaagtggtagaggc

SEQ ID NO: 27141 - RNA, 22 nt, synthetic construct
  source 1..22: mol_type = other RNA
tggtggcacactgtgagctgcc

SEQ ID NO: 27142 - RNA, 22 nt, synthetic construct
  source 1..22: mol_type = other RNA
tgtcttccctcccaggcagctc

SEQ ID NO: 27143 - RNA, 22 nt, synthetic construct
  source 1..22: mol_type = other RNA
tgtgagctgcctgggagggaag

SEQ ID NO: 27144 - RNA, 22 nt, synthetic construct
  source 1..22: mol_type = other RNA
tgtgaggtgactgagcattgtc

SEQ ID NO: 27145 - RNA, 22 nt, synthetic construct
  source 1..22: mol_type = other RNA
tgtgccaccatggagttggggc

SEQ ID NO: 27146 - RNA, 22 nt, synthetic construct
  source 1..22: mol_type = other RNA
tgtgcctctaccacttctatga

SEQ ID NO: 27147 - RNA, 22 nt, synthetic construct
  source 1..22: mol_type = other RNA
tgttaagaagctccaggtagcc

SEQ ID NO: 27148 - RNA, 22 nt, synthetic construct
  source 1..22: mol_type = other RNA
ttaacagcgatgctgaccccct

SEQ ID NO: 27149 - RNA, 22 nt, synthetic construct
  source 1..22: mol_type = other RNA
ttaagaagctccaggtagccac

SEQ ID NO: 27150 - RNA, 22 nt, synthetic construct
  source 1..22: mol_type = other RNA
ttccaacaccctgtgaggtgac

SEQ ID NO: 27151 - RNA, 22 nt, synthetic construct
  source 1..22: mol_type = other RNA
ttccctcccaggcagctcacag

SEQ ID NO: 27152 - RNA, 22 nt, synthetic construct
  source 1..22: mol_type = other RNA
ttctaggggccccaactccatg

SEQ ID NO: 27153 - RNA, 22 nt, synthetic construct
  source 1..22: mol_type = other RNA
ttctatgaccagatggacctgg

SEQ ID NO: 27154 - RNA, 22 nt, synthetic construct
  source 1..22: mol_type = other RNA
ttctccagccaggtccatctgg

SEQ ID NO: 27155 - RNA, 22 nt, synthetic construct
  source 1..22: mol_type = other RNA
ttcttaacagcgatgctgaccc

SEQ ID NO: 27156 - RNA, 22 nt, synthetic construct
  source 1..22: mol_type = other RNA
ttcttctccagccaggtccatc

SEQ ID NO: 27157 - RNA, 22 nt, synthetic construct
  source 1..22: mol_type = other RNA
ttgagctctactcaggtgggcc

SEQ ID NO: 27158 - RNA, 22 nt, synthetic construct
  source 1..22: mol_type = other RNA
ttggggcccctagaaggtggct

SEQ ID NO: 27159 - RNA, 22 nt, synthetic construct
  source 1..22: mol_type = other RNA
ttgtcttccctcccaggcagct

SEQ ID NO: 27160 - RNA, 22 nt, synthetic construct
  source 1..22: mol_type = other RNA
tttccaacaccctgtgaggtga

SEQ ID NO: 27161 - RNA, 20 nt, synthetic construct
  source 1..20: mol_type = other RNA
aaaagtcccttggatgaaga

SEQ ID NO: 27162 - RNA, 20 nt, synthetic construct
  source 1..20: mol_type = other RNA
aaagtcccttggatgaagaa

SEQ ID NO: 27163 - RNA, 20 nt, synthetic construct
  source 1..20: mol_type = other RNA
aaatttccttcttcatccaa

SEQ ID NO: 27164 - RNA, 20 nt, synthetic construct
  source 1..20: mol_type = other RNA
aacagcctgctgaactggtc

SEQ ID NO: 27165 - RNA, 20 nt, synthetic construct
  source 1..20: mol_type = other RNA
aacccgacacagacaccatc

SEQ ID NO: 27166 - RNA, 20 nt, synthetic construct
  source 1..20: mol_type = other RNA
aactgcgaccagttcagcag

SEQ ID NO: 27167 - RNA, 20 nt, synthetic construct
  source 1..20: mol_type = other RNA
aactggtcgcagttgatggt

SEQ ID NO: 27168 - RNA, 20 nt, synthetic construct
  source 1..20: mol_type = other RNA
aagagaccagggaggcttat

SEQ ID NO: 27169 - RNA, 20 nt, synthetic construct
  source 1..20: mol_type = other RNA
aagcacctgagcccagaaaa

SEQ ID NO: 27170 - RNA, 20 nt, synthetic construct
  source 1..20: mol_type = other RNA
aagcctccctggtctcttca

SEQ ID NO: 27171 - RNA, 20 nt, synthetic construct
  source 1..20: mol_type = other RNA
aagggacttttcctcccaga

SEQ ID NO: 27172 - RNA, 20 nt, synthetic construct
  source 1..20: mol_type = other RNA
aaggtgatgaagagaccagg

SEQ ID NO: 27173 - RNA, 20 nt, synthetic construct
  source 1..20: mol_type = other RNA
aagtcccttggatgaagaag

SEQ ID NO: 27174 - RNA, 20 nt, synthetic construct
  source 1..20: mol_type = other RNA
aatatcggtgaggaagcacc

SEQ ID NO: 27175 - RNA, 20 nt, synthetic construct
  source 1..20: mol_type = other RNA
aatttccttcttcatccaag

SEQ ID NO: 27176 - RNA, 20 nt, synthetic construct
  source 1..20: mol_type = other RNA
acaacagcctgctgaactgg

SEQ ID NO: 27177 - RNA, 20 nt, synthetic construct
  source 1..20: mol_type = other RNA
acacaacagcctgctgaact

SEQ ID NO: 27178 - RNA, 20 nt, synthetic construct
  source 1..20: mol_type = other RNA
acacagacaccatcaactgc

SEQ ID NO: 27179 - RNA, 20 nt, synthetic construct
  source 1..20: mol_type = other RNA
acaccatcaactgcgaccag

SEQ ID NO: 27180 - RNA, 20 nt, synthetic construct
  source 1..20: mol_type = other RNA
acagacaccatcaactgcga

SEQ ID NO: 27181 - RNA, 20 nt, synthetic construct
  source 1..20: mol_type = other RNA
acagcctgctgaactggtcg

SEQ ID NO: 27182 - RNA, 20 nt, synthetic construct
  source 1..20: mol_type = other RNA
acatggaaggtgatgaagag

SEQ ID NO: 27183 - RNA, 20 nt, synthetic construct
  source 1..20: mol_type = other RNA
accagggaggcttatgccaa

SEQ ID NO: 27184 - RNA, 20 nt, synthetic construct
  source 1..20: mol_type = other RNA
accagttcagcaggctgttg

SEQ ID NO: 27185 - RNA, 20 nt, synthetic construct
  source 1..20: mol_type = other RNA
accatcaactgcgaccagtt

SEQ ID NO: 27186 - RNA, 20 nt, synthetic construct
  source 1..20: mol_type = other RNA
acccgacacagacaccatca

SEQ ID NO: 27187 - RNA, 20 nt, synthetic construct
  source 1..20: mol_type = other RNA
accgatattggcataagcct

SEQ ID NO: 27188 - RNA, 20 nt, synthetic construct
  source 1..20: mol_type = other RNA
acctgagcccagaaaaggac

SEQ ID NO: 27189 - RNA, 20 nt, synthetic construct
  source 1..20: mol_type = other RNA
accttccatgtcacacaaca

SEQ ID NO: 27190 - RNA, 20 nt, synthetic construct
  source 1..20: mol_type = other RNA
actgcgaccagttcagcagg

SEQ ID NO: 27191 - RNA, 20 nt, synthetic construct
  source 1..20: mol_type = other RNA
actggtcgcagttgatggtg

SEQ ID NO: 27192 - RNA, 20 nt, synthetic construct
  source 1..20: mol_type = other RNA
acttttcctcccagaacccg

SEQ ID NO: 27193 - RNA, 20 nt, synthetic construct
  source 1..20: mol_type = other RNA
agaaatttccttcttcatcc

SEQ ID NO: 27194 - RNA, 20 nt, synthetic construct
  source 1..20: mol_type = other RNA
agaacccgacacagacacca

SEQ ID NO: 27195 - RNA, 20 nt, synthetic construct
  source 1..20: mol_type = other RNA
agacaccatcaactgcgacc

SEQ ID NO: 27196 - RNA, 20 nt, synthetic construct
  source 1..20: mol_type = other RNA
agaccagggaggcttatgcc

SEQ ID NO: 27197 - RNA, 20 nt, synthetic construct
  source 1..20: mol_type = other RNA
agagaccagggaggcttatg

SEQ ID NO: 27198 - RNA, 20 nt, synthetic construct
  source 1..20: mol_type = other RNA
agcacctgagcccagaaaag

SEQ ID NO: 27199 - RNA, 20 nt, synthetic construct
  source 1..20: mol_type = other RNA
agcaggctgttgtgtgacat

SEQ ID NO: 27200 - RNA, 20 nt, synthetic construct
  source 1..20: mol_type = other RNA
agcccagaaaaggacaatca

SEQ ID NO: 27201 - RNA, 20 nt, synthetic construct
  source 1..20: mol_type = other RNA
agcctccctggtctcttcat

SEQ ID NO: 27202 - RNA, 20 nt, synthetic construct
  source 1..20: mol_type = other RNA
agcctgctgaactggtcgca

SEQ ID NO: 27203 - RNA, 20 nt, synthetic construct
  source 1..20: mol_type = other RNA
aggaaaagtcccttggatga

SEQ ID NO: 27204 - RNA, 20 nt, synthetic construct
  source 1..20: mol_type = other RNA
aggaagcacctgagcccaga

SEQ ID NO: 27205 - RNA, 20 nt, synthetic construct
  source 1..20: mol_type = other RNA
aggctgttgtgtgacatgga

SEQ ID NO: 27206 - RNA, 20 nt, synthetic construct
  source 1..20: mol_type = other RNA
aggcttatgccaatatcggt

SEQ ID NO: 27207 - RNA, 20 nt, synthetic construct
  source 1..20: mol_type = other RNA
agggacttttcctcccagaa

SEQ ID NO: 27208 - RNA, 20 nt, synthetic construct
  source 1..20: mol_type = other RNA
agggaggcttatgccaatat

SEQ ID NO: 27209 - RNA, 20 nt, synthetic construct
  source 1..20: mol_type = other RNA
aggtgatgaagagaccaggg

SEQ ID NO: 27210 - RNA, 20 nt, synthetic construct
  source 1..20: mol_type = other RNA
aggtgcttcctcaccgatat

SEQ ID NO: 27211 - RNA, 20 nt, synthetic construct
  source 1..20: mol_type = other RNA
agtcccttggatgaagaagg

SEQ ID NO: 27212 - RNA, 20 nt, synthetic construct
  source 1..20: mol_type = other RNA
agttcagcaggctgttgtgt

SEQ ID NO: 27213 - RNA, 20 nt, synthetic construct
  source 1..20: mol_type = other RNA
agttgatggtgtctgtgtcg

SEQ ID NO: 27214 - RNA, 20 nt, synthetic construct
  source 1..20: mol_type = other RNA
ataagcctccctggtctctt

SEQ ID NO: 27215 - RNA, 20 nt, synthetic construct
  source 1..20: mol_type = other RNA
atatcggtgaggaagcacct

SEQ ID NO: 27216 - RNA, 20 nt, synthetic construct
  source 1..20: mol_type = other RNA
atattggcataagcctccct

SEQ ID NO: 27217 - RNA, 20 nt, synthetic construct
  source 1..20: mol_type = other RNA
atcaactgcgaccagttcag

SEQ ID NO: 27218 - RNA, 20 nt, synthetic construct
  source 1..20: mol_type = other RNA
atcaccttccatgtcacaca

SEQ ID NO: 27219 - RNA, 20 nt, synthetic construct
  source 1..20: mol_type = other RNA
atccaagggacttttcctcc

SEQ ID NO: 27220 - RNA, 20 nt, synthetic construct
  source 1..20: mol_type = other RNA
atcggtgaggaagcacctga

SEQ ID NO: 27221 - RNA, 20 nt, synthetic construct
  source 1..20: mol_type = other RNA
atgaagagaccagggaggct

SEQ ID NO: 27222 - RNA, 20 nt, synthetic construct
  source 1..20: mol_type = other RNA
atgccaatatcggtgaggaa

SEQ ID NO: 27223 - RNA, 20 nt, synthetic construct
  source 1..20: mol_type = other RNA
atggaaggtgatgaagagac

SEQ ID NO: 27224 - RNA, 20 nt, synthetic construct
  source 1..20: mol_type = other RNA
atggtgtctgtgtcgggttc

SEQ ID NO: 27225 - RNA, 20 nt, synthetic construct
  source 1..20: mol_type = other RNA
atgtcacacaacagcctgct

SEQ ID NO: 27226 - RNA, 20 nt, synthetic construct
  source 1..20: mol_type = other RNA
attggcataagcctccctgg

SEQ ID NO: 27227 - RNA, 20 nt, synthetic construct
  source 1..20: mol_type = other RNA
attgtccttttctgggctca

SEQ ID NO: 27228 - RNA, 20 nt, synthetic construct
  source 1..20: mol_type = other RNA
atttccttcttcatccaagg

SEQ ID NO: 27229 - RNA, 20 nt, synthetic construct
  source 1..20: mol_type = other RNA
caacagcctgctgaactggt

SEQ ID NO: 27230 - RNA, 20 nt, synthetic construct
  source 1..20: mol_type = other RNA
caactgcgaccagttcagca

SEQ ID NO: 27231 - RNA, 20 nt, synthetic construct
  source 1..20: mol_type = other RNA
caagggacttttcctcccag

SEQ ID NO: 27232 - RNA, 20 nt, synthetic construct
  source 1..20: mol_type = other RNA
caatatcggtgaggaagcac

SEQ ID NO: 27233 - RNA, 20 nt, synthetic construct
  source 1..20: mol_type = other RNA
cacaacagcctgctgaactg

SEQ ID NO: 27234 - RNA, 20 nt, synthetic construct
  source 1..20: mol_type = other RNA
cacacaacagcctgctgaac

SEQ ID NO: 27235 - RNA, 20 nt, synthetic construct
  source 1..20: mol_type = other RNA
cacagacaccatcaactgcg

SEQ ID NO: 27236 - RNA, 20 nt, synthetic construct
  source 1..20: mol_type = other RNA
caccatcaactgcgaccagt

SEQ ID NO: 27237 - RNA, 20 nt, synthetic construct
  source 1..20: mol_type = other RNA
caccgatattggcataagcc

SEQ ID NO: 27238 - RNA, 20 nt, synthetic construct
  source 1..20: mol_type = other RNA
cacctgagcccagaaaagga

SEQ ID NO: 27239 - RNA, 20 nt, synthetic construct
  source 1..20: mol_type = other RNA
caccttccatgtcacacaac

SEQ ID NO: 27240 - RNA, 20 nt, synthetic construct
  source 1..20: mol_type = other RNA
cagaaatttccttcttcatc

SEQ ID NO: 27241 - RNA, 20 nt, synthetic construct
  source 1..20: mol_type = other RNA
cagaacccgacacagacacc

SEQ ID NO: 27242 - RNA, 20 nt, synthetic construct
  source 1..20: mol_type = other RNA
cagacaccatcaactgcgac

SEQ ID NO: 27243 - RNA, 20 nt, synthetic construct
  source 1..20: mol_type = other RNA
cagcaggctgttgtgtgaca

SEQ ID NO: 27244 - RNA, 20 nt, synthetic construct
  source 1..20: mol_type = other RNA
cagcctgctgaactggtcgc

SEQ ID NO: 27245 - RNA, 20 nt, synthetic construct
  source 1..20: mol_type = other RNA
caggctgttgtgtgacatgg

SEQ ID NO: 27246 - RNA, 20 nt, synthetic construct
  source 1..20: mol_type = other RNA
cagggaggcttatgccaata

SEQ ID NO: 27247 - RNA, 20 nt, synthetic construct
  source 1..20: mol_type = other RNA
caggtgcttcctcaccgata

SEQ ID NO: 27248 - RNA, 20 nt, synthetic construct
  source 1..20: mol_type = other RNA
cagttcagcaggctgttgtg

SEQ ID NO: 27249 - RNA, 20 nt, synthetic construct
  source 1..20: mol_type = other RNA
cagttgatggtgtctgtgtc

SEQ ID NO: 27250 - RNA, 20 nt, synthetic construct
  source 1..20: mol_type = other RNA
cataagcctccctggtctct

SEQ ID NO: 27251 - RNA, 20 nt, synthetic construct
  source 1..20: mol_type = other RNA
catcaactgcgaccagttca

SEQ ID NO: 27252 - RNA, 20 nt, synthetic construct
  source 1..20: mol_type = other RNA
catcaccttccatgtcacac

SEQ ID NO: 27253 - RNA, 20 nt, synthetic construct
  source 1..20: mol_type = other RNA
catccaagggacttttcctc

SEQ ID NO: 27254 - RNA, 20 nt, synthetic construct
  source 1..20: mol_type = other RNA
catggaaggtgatgaagaga

SEQ ID NO: 27255 - RNA, 20 nt, synthetic construct
  source 1..20: mol_type = other RNA
catgtcacacaacagcctgc

SEQ ID NO: 27256 - RNA, 20 nt, synthetic construct
  source 1..20: mol_type = other RNA
ccaagggacttttcctccca

SEQ ID NO: 27257 - RNA, 20 nt, synthetic construct
  source 1..20: mol_type = other RNA
ccaatatcggtgaggaagca

SEQ ID NO: 27258 - RNA, 20 nt, synthetic construct
  source 1..20: mol_type = other RNA
ccagaaatttccttcttcat

SEQ ID NO: 27259 - RNA, 20 nt, synthetic construct
  source 1..20: mol_type = other RNA
ccagaacccgacacagacac

SEQ ID NO: 27260 - RNA, 20 nt, synthetic construct
  source 1..20: mol_type = other RNA
ccagggaggcttatgccaat

SEQ ID NO: 27261 - RNA, 20 nt, synthetic construct
  source 1..20: mol_type = other RNA
ccagttcagcaggctgttgt

SEQ ID NO: 27262 - RNA, 20 nt, synthetic construct
  source 1..20: mol_type = other RNA
ccatcaactgcgaccagttc

SEQ ID NO: 27263 - RNA, 20 nt, synthetic construct
  source 1..20: mol_type = other RNA
ccatgtcacacaacagcctg

SEQ ID NO: 27264 - RNA, 20 nt, synthetic construct
  source 1..20: mol_type = other RNA
cccagaaaaggacaatcaag

SEQ ID NO: 27265 - RNA, 20 nt, synthetic construct
  source 1..20: mol_type = other RNA
cccagaacccgacacagaca

SEQ ID NO: 27266 - RNA, 20 nt, synthetic construct
  source 1..20: mol_type = other RNA
cccgacacagacaccatcaa

SEQ ID NO: 27267 - RNA, 20 nt, synthetic construct
  source 1..20: mol_type = other RNA
ccctggtctcttcatcacct

SEQ ID NO: 27268 - RNA, 20 nt, synthetic construct
  source 1..20: mol_type = other RNA
cccttgattgtccttttctg

SEQ ID NO: 27269 - RNA, 20 nt, synthetic construct
  source 1..20: mol_type = other RNA
cccttggatgaagaaggaaa

SEQ ID NO: 27270 - RNA, 20 nt, synthetic construct
  source 1..20: mol_type = other RNA
ccgacacagacaccatcaac

SEQ ID NO: 27271 - RNA, 20 nt, synthetic construct
  source 1..20: mol_type = other RNA
ccgatattggcataagcctc

SEQ ID NO: 27272 - RNA, 20 nt, synthetic construct
  source 1..20: mol_type = other RNA
cctcaccgatattggcataa

SEQ ID NO: 27273 - RNA, 20 nt, synthetic construct
  source 1..20: mol_type = other RNA
cctcccagaacccgacacag

SEQ ID NO: 27274 - RNA, 20 nt, synthetic construct
  source 1..20: mol_type = other RNA
cctccctggtctcttcatca

SEQ ID NO: 27275 - RNA, 20 nt, synthetic construct
  source 1..20: mol_type = other RNA
cctgagcccagaaaaggaca

SEQ ID NO: 27276 - RNA, 20 nt, synthetic construct
  source 1..20: mol_type = other RNA
cctgctgaactggtcgcagt

SEQ ID NO: 27277 - RNA, 20 nt, synthetic construct
  source 1..20: mol_type = other RNA
cctggtctcttcatcacctt

SEQ ID NO: 27278 - RNA, 20 nt, synthetic construct
  source 1..20: mol_type = other RNA
ccttccatgtcacacaacag

SEQ ID NO: 27279 - RNA, 20 nt, synthetic construct
  source 1..20: mol_type = other RNA
ccttcttcatccaagggact

SEQ ID NO: 27280 - RNA, 20 nt, synthetic construct
  source 1..20: mol_type = other RNA
ccttgattgtccttttctgg

SEQ ID NO: 27281 - RNA, 20 nt, synthetic construct
  source 1..20: mol_type = other RNA
ccttggatgaagaaggaaat

SEQ ID NO: 27282 - RNA, 20 nt, synthetic construct
  source 1..20: mol_type = other RNA
ccttttctgggctcaggtgc

SEQ ID NO: 27283 - RNA, 20 nt, synthetic construct
  source 1..20: mol_type = other RNA
cgacacagacaccatcaact

SEQ ID NO: 27284 - RNA, 20 nt, synthetic construct
  source 1..20: mol_type = other RNA
cgaccagttcagcaggctgt

SEQ ID NO: 27285 - RNA, 20 nt, synthetic construct
  source 1..20: mol_type = other RNA
cgatattggcataagcctcc

SEQ ID NO: 27286 - RNA, 20 nt, synthetic construct
  source 1..20: mol_type = other RNA
cgcagttgatggtgtctgtg

SEQ ID NO: 27287 - RNA, 20 nt, synthetic construct
  source 1..20: mol_type = other RNA
cgggttctgggaggaaaagt

SEQ ID NO: 27288 - RNA, 20 nt, synthetic construct
  source 1..20: mol_type = other RNA
cggtgaggaagcacctgagc

SEQ ID NO: 27289 - RNA, 20 nt, synthetic construct
  source 1..20: mol_type = other RNA
ctcaccgatattggcataag

SEQ ID NO: 27290 - RNA, 20 nt, synthetic construct
  source 1..20: mol_type = other RNA
ctcaggtgcttcctcaccga

SEQ ID NO: 27291 - RNA, 20 nt, synthetic construct
  source 1..20: mol_type = other RNA
ctcccagaacccgacacaga

SEQ ID NO: 27292 - RNA, 20 nt, synthetic construct
  source 1..20: mol_type = other RNA
ctccctggtctcttcatcac

SEQ ID NO: 27293 - RNA, 20 nt, synthetic construct
  source 1..20: mol_type = other RNA
ctcttcatcaccttccatgt

SEQ ID NO: 27294 - RNA, 20 nt, synthetic construct
  source 1..20: mol_type = other RNA
ctcttgcccttgattgtcct

SEQ ID NO: 27295 - RNA, 20 nt, synthetic construct
  source 1..20: mol_type = other RNA
ctgaactggtcgcagttgat

SEQ ID NO: 27296 - RNA, 20 nt, synthetic construct
  source 1..20: mol_type = other RNA
ctgagcccagaaaaggacaa

SEQ ID NO: 27297 - RNA, 20 nt, synthetic construct
  source 1..20: mol_type = other RNA
ctgcgaccagttcagcaggc

SEQ ID NO: 27298 - RNA, 20 nt, synthetic construct
  source 1..20: mol_type = other RNA
ctgctgaactggtcgcagtt

SEQ ID NO: 27299 - RNA, 20 nt, synthetic construct
  source 1..20: mol_type = other RNA
ctgggaggaaaagtcccttg

SEQ ID NO: 27300 - RNA, 20 nt, synthetic construct
  source 1..20: mol_type = other RNA
ctgggctcaggtgcttcctc

SEQ ID NO: 27301 - RNA, 20 nt, synthetic construct
  source 1..20: mol_type = other RNA
ctggtcgcagttgatggtgt

SEQ ID NO: 27302 - RNA, 20 nt, synthetic construct
  source 1..20: mol_type = other RNA
ctggtctcttcatcaccttc

SEQ ID NO: 27303 - RNA, 20 nt, synthetic construct
  source 1..20: mol_type = other RNA
ctgtgtcgggttctgggagg

SEQ ID NO: 27304 - RNA, 20 nt, synthetic construct
  source 1..20: mol_type = other RNA
ctgttgtgtgacatggaagg

SEQ ID NO: 27305 - RNA, 20 nt, synthetic construct
  source 1..20: mol_type = other RNA
cttatgccaatatcggtgag

SEQ ID NO: 27306 - RNA, 20 nt, synthetic construct
  source 1..20: mol_type = other RNA
cttcatcaccttccatgtca

SEQ ID NO: 27307 - RNA, 20 nt, synthetic construct
  source 1..20: mol_type = other RNA
cttcatccaagggacttttc

SEQ ID NO: 27308 - RNA, 20 nt, synthetic construct
  source 1..20: mol_type = other RNA
cttccatgtcacacaacagc

SEQ ID NO: 27309 - RNA, 20 nt, synthetic construct
  source 1..20: mol_type = other RNA
cttcctcaccgatattggca

SEQ ID NO: 27310 - RNA, 20 nt, synthetic construct
  source 1..20: mol_type = other RNA
cttcttcatccaagggactt

SEQ ID NO: 27311 - RNA, 20 nt, synthetic construct
  source 1..20: mol_type = other RNA
cttgattgtccttttctggg

SEQ ID NO: 27312 - RNA, 20 nt, synthetic construct
  source 1..20: mol_type = other RNA
cttgcccttgattgtccttt

SEQ ID NO: 27313 - RNA, 20 nt, synthetic construct
  source 1..20: mol_type = other RNA
cttggatgaagaaggaaatt

SEQ ID NO: 27314 - RNA, 20 nt, synthetic construct
  source 1..20: mol_type = other RNA
ctttccagaaatttccttct

SEQ ID NO: 27315 - RNA, 20 nt, synthetic construct
  source 1..20: mol_type = other RNA
cttttcctcccagaacccga

SEQ ID NO: 27316 - RNA, 20 nt, synthetic construct
  source 1..20: mol_type = other RNA
cttttctgggctcaggtgct

SEQ ID NO: 27317 - RNA, 20 nt, synthetic construct
  source 1..20: mol_type = other RNA
gaaaagtcccttggatgaag

SEQ ID NO: 27318 - RNA, 20 nt, synthetic construct
  source 1..20: mol_type = other RNA
gaaatttccttcttcatcca

SEQ ID NO: 27319 - RNA, 20 nt, synthetic construct
  source 1..20: mol_type = other RNA
gaacccgacacagacaccat

SEQ ID NO: 27320 - RNA, 20 nt, synthetic construct
  source 1..20: mol_type = other RNA
gaactggtcgcagttgatgg

SEQ ID NO: 27321 - RNA, 20 nt, synthetic construct
  source 1..20: mol_type = other RNA
gaagagaccagggaggctta

SEQ ID NO: 27322 - RNA, 20 nt, synthetic construct
  source 1..20: mol_type = other RNA
gaagcacctgagcccagaaa

SEQ ID NO: 27323 - RNA, 20 nt, synthetic construct
  source 1..20: mol_type = other RNA
gaaggtgatgaagagaccag

SEQ ID NO: 27324 - RNA, 20 nt, synthetic construct
  source 1..20: mol_type = other RNA
gacacagacaccatcaactg

SEQ ID NO: 27325 - RNA, 20 nt, synthetic construct
  source 1..20: mol_type = other RNA
gacaccatcaactgcgacca

SEQ ID NO: 27326 - RNA, 20 nt, synthetic construct
  source 1..20: mol_type = other RNA
gacatggaaggtgatgaaga

SEQ ID NO: 27327 - RNA, 20 nt, synthetic construct
  source 1..20: mol_type = other RNA
gaccagggaggcttatgcca

SEQ ID NO: 27328 - RNA, 20 nt, synthetic construct
  source 1..20: mol_type = other RNA
gaccagttcagcaggctgtt

SEQ ID NO: 27329 - RNA, 20 nt, synthetic construct
  source 1..20: mol_type = other RNA
gacttttcctcccagaaccc

SEQ ID NO: 27330 - RNA, 20 nt, synthetic construct
  source 1..20: mol_type = other RNA
gagaccagggaggcttatgc

SEQ ID NO: 27331 - RNA, 20 nt, synthetic construct
  source 1..20: mol_type = other RNA
gagcccagaaaaggacaatc

SEQ ID NO: 27332 - RNA, 20 nt, synthetic construct
  source 1..20: mol_type = other RNA
gaggaaaagtcccttggatg

SEQ ID NO: 27333 - RNA, 20 nt, synthetic construct
  source 1..20: mol_type = other RNA
gaggaagcacctgagcccag

SEQ ID NO: 27334 - RNA, 20 nt, synthetic construct
  source 1..20: mol_type = other RNA
gaggcttatgccaatatcgg

SEQ ID NO: 27335 - RNA, 20 nt, synthetic construct
  source 1..20: mol_type = other RNA
gatattggcataagcctccc

SEQ ID NO: 27336 - RNA, 20 nt, synthetic construct
  source 1..20: mol_type = other RNA
gatgaagagaccagggaggc

SEQ ID NO: 27337 - RNA, 20 nt, synthetic construct
  source 1..20: mol_type = other RNA
gatggtgtctgtgtcgggtt

SEQ ID NO: 27338 - RNA, 20 nt, synthetic construct
  source 1..20: mol_type = other RNA
gattgtccttttctgggctc

SEQ ID NO: 27339 - RNA, 20 nt, synthetic construct
  source 1..20: mol_type = other RNA
gcacctgagcccagaaaagg

SEQ ID NO: 27340 - RNA, 20 nt, synthetic construct
  source 1..20: mol_type = other RNA
gcaggctgttgtgtgacatg

SEQ ID NO: 27341 - RNA, 20 nt, synthetic construct
  source 1..20: mol_type = other RNA
gcagttgatggtgtctgtgt

SEQ ID NO: 27342 - RNA, 20 nt, synthetic construct
  source 1..20: mol_type = other RNA
gcataagcctccctggtctc

SEQ ID NO: 27343 - RNA, 20 nt, synthetic construct
  source 1..20: mol_type = other RNA
gccaatatcggtgaggaagc

SEQ ID NO: 27344 - RNA, 20 nt, synthetic construct
  source 1..20: mol_type = other RNA
gcccagaaaaggacaatcaa

SEQ ID NO: 27345 - RNA, 20 nt, synthetic construct
  source 1..20: mol_type = other RNA
gcccttgattgtccttttct

SEQ ID NO: 27346 - RNA, 20 nt, synthetic construct
  source 1..20: mol_type = other RNA
gcctccctggtctcttcatc

SEQ ID NO: 27347 - RNA, 20 nt, synthetic construct
  source 1..20: mol_type = other RNA
gcctgctgaactggtcgcag

SEQ ID NO: 27348 - RNA, 20 nt, synthetic construct
  source 1..20: mol_type = other RNA
gcgaccagttcagcaggctg

SEQ ID NO: 27349 - RNA, 20 nt, synthetic construct
  source 1..20: mol_type = other RNA
gctcaggtgcttcctcaccg

SEQ ID NO: 27350 - RNA, 20 nt, synthetic construct
  source 1..20: mol_type = other RNA
gctgaactggtcgcagttga

SEQ ID NO: 27351 - RNA, 20 nt, synthetic construct
  source 1..20: mol_type = other RNA
gctgttgtgtgacatggaag

SEQ ID NO: 27352 - RNA, 20 nt, synthetic construct
  source 1..20: mol_type = other RNA
gcttatgccaatatcggtga

SEQ ID NO: 27353 - RNA, 20 nt, synthetic construct
  source 1..20: mol_type = other RNA
gcttcctcaccgatattggc

SEQ ID NO: 27354 - RNA, 20 nt, synthetic construct
  source 1..20: mol_type = other RNA
ggaaaagtcccttggatgaa

SEQ ID NO: 27355 - RNA, 20 nt, synthetic construct
  source 1..20: mol_type = other RNA
ggaagcacctgagcccagaa

SEQ ID NO: 27356 - RNA, 20 nt, synthetic construct
  source 1..20: mol_type = other RNA
ggaaggtgatgaagagacca

SEQ ID NO: 27357 - RNA, 20 nt, synthetic construct
  source 1..20: mol_type = other RNA
ggacttttcctcccagaacc

SEQ ID NO: 27358 - RNA, 20 nt, synthetic construct
  source 1..20: mol_type = other RNA
ggaggaaaagtcccttggat

SEQ ID NO: 27359 - RNA, 20 nt, synthetic construct
  source 1..20: mol_type = other RNA
ggaggcttatgccaatatcg

SEQ ID NO: 27360 - RNA, 20 nt, synthetic construct
  source 1..20: mol_type = other RNA
ggcataagcctccctggtct

SEQ ID NO: 27361 - RNA, 20 nt, synthetic construct
  source 1..20: mol_type = other RNA
ggctcaggtgcttcctcacc

SEQ ID NO: 27362 - RNA, 20 nt, synthetic construct
  source 1..20: mol_type = other RNA
ggctgttgtgtgacatggaa

SEQ ID NO: 27363 - RNA, 20 nt, synthetic construct
  source 1..20: mol_type = other RNA
ggcttatgccaatatcggtg

SEQ ID NO: 27364 - RNA, 20 nt, synthetic construct
  source 1..20: mol_type = other RNA
gggacttttcctcccagaac

SEQ ID NO: 27365 - RNA, 20 nt, synthetic construct
  source 1..20: mol_type = other RNA
gggaggaaaagtcccttgga

SEQ ID NO: 27366 - RNA, 20 nt, synthetic construct
  source 1..20: mol_type = other RNA
gggaggcttatgccaatatc

SEQ ID NO: 27367 - RNA, 20 nt, synthetic construct
  source 1..20: mol_type = other RNA
gggctcaggtgcttcctcac

SEQ ID NO: 27368 - RNA, 20 nt, synthetic construct
  source 1..20: mol_type = other RNA
gggttctgggaggaaaagtc

SEQ ID NO: 27369 - RNA, 20 nt, synthetic construct
  source 1..20: mol_type = other RNA
ggtcgcagttgatggtgtct

SEQ ID NO: 27370 - RNA, 20 nt, synthetic construct
  source 1..20: mol_type = other RNA
ggtctcttcatcaccttcca

SEQ ID NO: 27371 - RNA, 20 nt, synthetic construct
  source 1..20: mol_type = other RNA
ggtgaggaagcacctgagcc

SEQ ID NO: 27372 - RNA, 20 nt, synthetic construct
  source 1..20: mol_type = other RNA
ggtgatgaagagaccaggga

SEQ ID NO: 27373 - RNA, 20 nt, synthetic construct
  source 1..20: mol_type = other RNA
ggtgcttcctcaccgatatt

SEQ ID NO: 27374 - RNA, 20 nt, synthetic construct
  source 1..20: mol_type = other RNA
ggtgtctgtgtcgggttctg

SEQ ID NO: 27375 - RNA, 20 nt, synthetic construct
  source 1..20: mol_type = other RNA
ggttctgggaggaaaagtcc

SEQ ID NO: 27376 - RNA, 20 nt, synthetic construct
  source 1..20: mol_type = other RNA
gtcacacaacagcctgctga

SEQ ID NO: 27377 - RNA, 20 nt, synthetic construct
  source 1..20: mol_type = other RNA
gtcccttggatgaagaagga

SEQ ID NO: 27378 - RNA, 20 nt, synthetic construct
  source 1..20: mol_type = other RNA
gtccttttctgggctcaggt

SEQ ID NO: 27379 - RNA, 20 nt, synthetic construct
  source 1..20: mol_type = other RNA
gtcgcagttgatggtgtctg

SEQ ID NO: 27380 - RNA, 20 nt, synthetic construct
  source 1..20: mol_type = other RNA
gtcgggttctgggaggaaaa

SEQ ID NO: 27381 - RNA, 20 nt, synthetic construct
  source 1..20: mol_type = other RNA
gtctcttcatcaccttccat

SEQ ID NO: 27382 - RNA, 20 nt, synthetic construct
  source 1..20: mol_type = other RNA
gtctgtgtcgggttctggga

SEQ ID NO: 27383 - RNA, 20 nt, synthetic construct
  source 1..20: mol_type = other RNA
gtgacatggaaggtgatgaa

SEQ ID NO: 27384 - RNA, 20 nt, synthetic construct
  source 1..20: mol_type = other RNA
gtgaggaagcacctgagccc

SEQ ID NO: 27385 - RNA, 20 nt, synthetic construct
  source 1..20: mol_type = other RNA
gtgatgaagagaccagggag

SEQ ID NO: 27386 - RNA, 20 nt, synthetic construct
  source 1..20: mol_type = other RNA
gtgcttcctcaccgatattg

SEQ ID NO: 27387 - RNA, 20 nt, synthetic construct
  source 1..20: mol_type = other RNA
gtgtcgggttctgggaggaa

SEQ ID NO: 27388 - RNA, 20 nt, synthetic construct
  source 1..20: mol_type = other RNA
gtgtctgtgtcgggttctgg

SEQ ID NO: 27389 - RNA, 20 nt, synthetic construct
  source 1..20: mol_type = other RNA
gtgtgacatggaaggtgatg

SEQ ID NO: 27390 - RNA, 20 nt, synthetic construct
  source 1..20: mol_type = other RNA
gttcagcaggctgttgtgtg

SEQ ID NO: 27391 - RNA, 20 nt, synthetic construct
  source 1..20: mol_type = other RNA
gttctgggaggaaaagtccc

SEQ ID NO: 27392 - RNA, 20 nt, synthetic construct
  source 1..20: mol_type = other RNA
gttgatggtgtctgtgtcgg

SEQ ID NO: 27393 - RNA, 20 nt, synthetic construct
  source 1..20: mol_type = other RNA
gttgtgtgacatggaaggtg

SEQ ID NO: 27394 - RNA, 20 nt, synthetic construct
  source 1..20: mol_type = other RNA
taagcctccctggtctcttc

SEQ ID NO: 27395 - RNA, 20 nt, synthetic construct
  source 1..20: mol_type = other RNA
tatcggtgaggaagcacctg

SEQ ID NO: 27396 - RNA, 20 nt, synthetic construct
  source 1..20: mol_type = other RNA
tatgccaatatcggtgagga

SEQ ID NO: 27397 - RNA, 20 nt, synthetic construct
  source 1..20: mol_type = other RNA
tattggcataagcctccctg

SEQ ID NO: 27398 - RNA, 20 nt, synthetic construct
  source 1..20: mol_type = other RNA
tcaactgcgaccagttcagc

SEQ ID NO: 27399 - RNA, 20 nt, synthetic construct
  source 1..20: mol_type = other RNA
tcacacaacagcctgctgaa

SEQ ID NO: 27400 - RNA, 20 nt, synthetic construct
  source 1..20: mol_type = other RNA
tcaccgatattggcataagc

SEQ ID NO: 27401 - RNA, 20 nt, synthetic construct
  source 1..20: mol_type = other RNA
tcaccttccatgtcacacaa

SEQ ID NO: 27402 - RNA, 20 nt, synthetic construct
  source 1..20: mol_type = other RNA
tcagcaggctgttgtgtgac

SEQ ID NO: 27403 - RNA, 20 nt, synthetic construct
  source 1..20: mol_type = other RNA
tcaggtgcttcctcaccgat

SEQ ID NO: 27404 - RNA, 20 nt, synthetic construct
  source 1..20: mol_type = other RNA
tcatcaccttccatgtcaca

SEQ ID NO: 27405 - RNA, 20 nt, synthetic construct
  source 1..20: mol_type = other RNA
tcatccaagggacttttcct

SEQ ID NO: 27406 - RNA, 20 nt, synthetic construct
  source 1..20: mol_type = other RNA
tccaagggacttttcctccc

SEQ ID NO: 27407 - RNA, 20 nt, synthetic construct
  source 1..20: mol_type = other RNA
tccagaaatttccttcttca

SEQ ID NO: 27408 - RNA, 20 nt, synthetic construct
  source 1..20: mol_type = other RNA
tccatgtcacacaacagcct

SEQ ID NO: 27409 - RNA, 20 nt, synthetic construct
  source 1..20: mol_type = other RNA
tcccagaacccgacacagac

SEQ ID NO: 27410 - RNA, 20 nt, synthetic construct
  source 1..20: mol_type = other RNA
tccctggtctcttcatcacc

SEQ ID NO: 27411 - RNA, 20 nt, synthetic construct
  source 1..20: mol_type = other RNA
tcccttggatgaagaaggaa

SEQ ID NO: 27412 - RNA, 20 nt, synthetic construct
  source 1..20: mol_type = other RNA
tcctcaccgatattggcata

SEQ ID NO: 27413 - RNA, 20 nt, synthetic construct
  source 1..20: mol_type = other RNA
tcctcccagaacccgacaca

SEQ ID NO: 27414 - RNA, 20 nt, synthetic construct
  source 1..20: mol_type = other RNA
tccttcttcatccaagggac

SEQ ID NO: 27415 - RNA, 20 nt, synthetic construct
  source 1..20: mol_type = other RNA
tccttttctgggctcaggtg

SEQ ID NO: 27416 - RNA, 20 nt, synthetic construct
  source 1..20: mol_type = other RNA
tcgcagttgatggtgtctgt

SEQ ID NO: 27417 - RNA, 20 nt, synthetic construct
  source 1..20: mol_type = other RNA
tcgggttctgggaggaaaag

SEQ ID NO: 27418 - RNA, 20 nt, synthetic construct
  source 1..20: mol_type = other RNA
tcggtgaggaagcacctgag

SEQ ID NO: 27419 - RNA, 20 nt, synthetic construct
  source 1..20: mol_type = other RNA
tctcttcatcaccttccatg

SEQ ID NO: 27420 - RNA, 20 nt, synthetic construct
  source 1..20: mol_type = other RNA
tctgggaggaaaagtccctt

SEQ ID NO: 27421 - RNA, 20 nt, synthetic construct
  source 1..20: mol_type = other RNA
tctgggctcaggtgcttcct

SEQ ID NO: 27422 - RNA, 20 nt, synthetic construct
  source 1..20: mol_type = other RNA
tctgtgtcgggttctgggag

SEQ ID NO: 27423 - RNA, 20 nt, synthetic construct
  source 1..20: mol_type = other RNA
tcttcatcaccttccatgtc

SEQ ID NO: 27424 - RNA, 20 nt, synthetic construct
  source 1..20: mol_type = other RNA
tcttcatccaagggactttt

SEQ ID NO: 27425 - RNA, 20 nt, synthetic construct
  source 1..20: mol_type = other RNA
tcttgcccttgattgtcctt

SEQ ID NO: 27426 - RNA, 20 nt, synthetic construct
  source 1..20: mol_type = other RNA
tctttccagaaatttccttc

SEQ ID NO: 27427 - RNA, 20 nt, synthetic construct
  source 1..20: mol_type = other RNA
tgaactggtcgcagttgatg

SEQ ID NO: 27428 - RNA, 20 nt, synthetic construct
  source 1..20: mol_type = other RNA
tgaagagaccagggaggctt

SEQ ID NO: 27429 - RNA, 20 nt, synthetic construct
  source 1..20: mol_type = other RNA
tgacatggaaggtgatgaag

SEQ ID NO: 27430 - RNA, 20 nt, synthetic construct
  source 1..20: mol_type = other RNA
tgagcccagaaaaggacaat

SEQ ID NO: 27431 - RNA, 20 nt, synthetic construct
  source 1..20: mol_type = other RNA
tgaggaagcacctgagccca

SEQ ID NO: 27432 - RNA, 20 nt, synthetic construct
  source 1..20: mol_type = other RNA
tgatgaagagaccagggagg

SEQ ID NO: 27433 - RNA, 20 nt, synthetic construct
  source 1..20: mol_type = other RNA
tgatggtgtctgtgtcgggt

SEQ ID NO: 27434 - RNA, 20 nt, synthetic construct
  source 1..20: mol_type = other RNA
tgattgtccttttctgggct

SEQ ID NO: 27435 - RNA, 20 nt, synthetic construct
  source 1..20: mol_type = other RNA
tgccaatatcggtgaggaag

SEQ ID NO: 27436 - RNA, 20 nt, synthetic construct
  source 1..20: mol_type = other RNA
tgcccttgattgtccttttc

SEQ ID NO: 27437 - RNA, 20 nt, synthetic construct
  source 1..20: mol_type = other RNA
tgcgaccagttcagcaggct

SEQ ID NO: 27438 - RNA, 20 nt, synthetic construct
  source 1..20: mol_type = other RNA
tgctgaactggtcgcagttg

SEQ ID NO: 27439 - RNA, 20 nt, synthetic construct
  source 1..20: mol_type = other RNA
tgcttcctcaccgatattgg

SEQ ID NO: 27440 - RNA, 20 nt, synthetic construct
  source 1..20: mol_type = other RNA
tggaaggtgatgaagagacc

SEQ ID NO: 27441 - RNA, 20 nt, synthetic construct
  source 1..20: mol_type = other RNA
tggatgaagaaggaaatttc

SEQ ID NO: 27442 - RNA, 20 nt, synthetic construct
  source 1..20: mol_type = other RNA
tggcataagcctccctggtc

SEQ ID NO: 27443 - RNA, 20 nt, synthetic construct
  source 1..20: mol_type = other RNA
tgggaggaaaagtcccttgg

SEQ ID NO: 27444 - RNA, 20 nt, synthetic construct
  source 1..20: mol_type = other RNA
tgggctcaggtgcttcctca

SEQ ID NO: 27445 - RNA, 20 nt, synthetic construct
  source 1..20: mol_type = other RNA
tggtcgcagttgatggtgtc

SEQ ID NO: 27446 - RNA, 20 nt, synthetic construct
  source 1..20: mol_type = other RNA
tggtctcttcatcaccttcc

SEQ ID NO: 27447 - RNA, 20 nt, synthetic construct
  source 1..20: mol_type = other RNA
tggtgtctgtgtcgggttct

SEQ ID NO: 27448 - RNA, 20 nt, synthetic construct
  source 1..20: mol_type = other RNA
tgtcacacaacagcctgctg

SEQ ID NO: 27449 - RNA, 20 nt, synthetic construct
  source 1..20: mol_type = other RNA
tgtccttttctgggctcagg

SEQ ID NO: 27450 - RNA, 20 nt, synthetic construct
  source 1..20: mol_type = other RNA
tgtcgggttctgggaggaaa

SEQ ID NO: 27451 - RNA, 20 nt, synthetic construct
  source 1..20: mol_type = other RNA
tgtctgtgtcgggttctggg

SEQ ID NO: 27452 - RNA, 20 nt, synthetic construct
  source 1..20: mol_type = other RNA
tgtgacatggaaggtgatga

SEQ ID NO: 27453 - RNA, 20 nt, synthetic construct
  source 1..20: mol_type = other RNA
tgtgtcgggttctgggagga

SEQ ID NO: 27454 - RNA, 20 nt, synthetic construct
  source 1..20: mol_type = other RNA
tgtgtgacatggaaggtgat

SEQ ID NO: 27455 - RNA, 20 nt, synthetic construct
  source 1..20: mol_type = other RNA
tgttgtgtgacatggaaggt

SEQ ID NO: 27456 - RNA, 20 nt, synthetic construct
  source 1..20: mol_type = other RNA
ttatgccaatatcggtgagg

SEQ ID NO: 27457 - RNA, 20 nt, synthetic construct
  source 1..20: mol_type = other RNA
ttcagcaggctgttgtgtga

SEQ ID NO: 27458 - RNA, 20 nt, synthetic construct
  source 1..20: mol_type = other RNA
ttcatcaccttccatgtcac

SEQ ID NO: 27459 - RNA, 20 nt, synthetic construct
  source 1..20: mol_type = other RNA
ttcatccaagggacttttcc

SEQ ID NO: 27460 - RNA, 20 nt, synthetic construct
  source 1..20: mol_type = other RNA
ttccagaaatttccttcttc

SEQ ID NO: 27461 - RNA, 20 nt, synthetic construct
  source 1..20: mol_type = other RNA
ttccatgtcacacaacagcc

SEQ ID NO: 27462 - RNA, 20 nt, synthetic construct
  source 1..20: mol_type = other RNA
ttcctcaccgatattggcat

SEQ ID NO: 27463 - RNA, 20 nt, synthetic construct
  source 1..20: mol_type = other RNA
ttcctcccagaacccgacac

SEQ ID NO: 27464 - RNA, 20 nt, synthetic construct
  source 1..20: mol_type = other RNA
ttccttcttcatccaaggga

SEQ ID NO: 27465 - RNA, 20 nt, synthetic construct
  source 1..20: mol_type = other RNA
ttctgggaggaaaagtccct

SEQ ID NO: 27466 - RNA, 20 nt, synthetic construct
  source 1..20: mol_type = other RNA
ttctgggctcaggtgcttcc

SEQ ID NO: 27467 - RNA, 20 nt, synthetic construct
  source 1..20: mol_type = other RNA
ttcttcatccaagggacttt

SEQ ID NO: 27468 - RNA, 20 nt, synthetic construct
  source 1..20: mol_type = other RNA
ttgatggtgtctgtgtcggg

SEQ ID NO: 27469 - RNA, 20 nt, synthetic construct
  source 1..20: mol_type = other RNA
ttgattgtccttttctgggc

SEQ ID NO: 27470 - RNA, 20 nt, synthetic construct
  source 1..20: mol_type = other RNA
ttgcccttgattgtcctttt

SEQ ID NO: 27471 - RNA, 20 nt, synthetic construct
  source 1..20: mol_type = other RNA
ttggatgaagaaggaaattt

SEQ ID NO: 27472 - RNA, 20 nt, synthetic construct
  source 1..20: mol_type = other RNA
ttggcataagcctccctggt

SEQ ID NO: 27473 - RNA, 20 nt, synthetic construct
  source 1..20: mol_type = other RNA
ttgtccttttctgggctcag

SEQ ID NO: 27474 - RNA, 20 nt, synthetic construct
  source 1..20: mol_type = other RNA
ttgtgtgacatggaaggtga

SEQ ID NO: 27475 - RNA, 20 nt, synthetic construct
  source 1..20: mol_type = other RNA
tttccagaaatttccttctt

SEQ ID NO: 27476 - RNA, 20 nt, synthetic construct
  source 1..20: mol_type = other RNA
tttcctcccagaacccgaca

SEQ ID NO: 27477 - RNA, 20 nt, synthetic construct
  source 1..20: mol_type = other RNA
tttccttcttcatccaaggg

SEQ ID NO: 27478 - RNA, 20 nt, synthetic construct
  source 1..20: mol_type = other RNA
tttctgggctcaggtgcttc

SEQ ID NO: 27479 - RNA, 20 nt, synthetic construct
  source 1..20: mol_type = other RNA
ttttcctcccagaacccgac

SEQ ID NO: 27480 - RNA, 20 nt, synthetic construct
  source 1..20: mol_type = other RNA
ttttctgggctcaggtgctt

SEQ ID NO: 27481 - RNA, 21 nt, synthetic construct
  source 1..21: mol_type = other RNA
aaaagtcccttggatgaagaa

SEQ ID NO: 27482 - RNA, 21 nt, synthetic construct
  source 1..21: mol_type = other RNA
aaagtcccttggatgaagaag

SEQ ID NO: 27483 - RNA, 21 nt, synthetic construct
  source 1..21: mol_type = other RNA
aaatttccttcttcatccaag

SEQ ID NO: 27484 - RNA, 21 nt, synthetic construct
  source 1..21: mol_type = other RNA
aacagcctgctgaactggtcg

SEQ ID NO: 27485 - RNA, 21 nt, synthetic construct
  source 1..21: mol_type = other RNA
aacccgacacagacaccatca

SEQ ID NO: 27486 - RNA, 21 nt, synthetic construct
  source 1..21: mol_type = other RNA
aactgcgaccagttcagcagg

SEQ ID NO: 27487 - RNA, 21 nt, synthetic construct
  source 1..21: mol_type = other RNA
aactggtcgcagttgatggtg

SEQ ID NO: 27488 - RNA, 21 nt, synthetic construct
  source 1..21: mol_type = other RNA
aagagaccagggaggcttatg

SEQ ID NO: 27489 - RNA, 21 nt, synthetic construct
  source 1..21: mol_type = other RNA
aagcacctgagcccagaaaag

SEQ ID NO: 27490 - RNA, 21 nt, synthetic construct
  source 1..21: mol_type = other RNA
aagcctccctggtctcttcat

SEQ ID NO: 27491 - RNA, 21 nt, synthetic construct
  source 1..21: mol_type = other RNA
aagggacttttcctcccagaa

SEQ ID NO: 27492 - RNA, 21 nt, synthetic construct
  source 1..21: mol_type = other RNA
aaggtgatgaagagaccaggg

SEQ ID NO: 27493 - RNA, 21 nt, synthetic construct
  source 1..21: mol_type = other RNA
aagtcccttggatgaagaagg

SEQ ID NO: 27494 - RNA, 21 nt, synthetic construct
  source 1..21: mol_type = other RNA
aatatcggtgaggaagcacct

SEQ ID NO: 27495 - RNA, 21 nt, synthetic construct
  source 1..21: mol_type = other RNA
aatttccttcttcatccaagg

SEQ ID NO: 27496 - RNA, 21 nt, synthetic construct
  source 1..21: mol_type = other RNA
acaacagcctgctgaactggt

SEQ ID NO: 27497 - RNA, 21 nt, synthetic construct
  source 1..21: mol_type = other RNA
acacaacagcctgctgaactg

SEQ ID NO: 27498 - RNA, 21 nt, synthetic construct
  source 1..21: mol_type = other RNA
acacagacaccatcaactgcg

SEQ ID NO: 27499 - RNA, 21 nt, synthetic construct
  source 1..21: mol_type = other RNA
acaccatcaactgcgaccagt

SEQ ID NO: 27500 - RNA, 21 nt, synthetic construct
  source 1..21: mol_type = other RNA
acagacaccatcaactgcgac

SEQ ID NO: 27501 - RNA, 21 nt, synthetic construct
  source 1..21: mol_type = other RNA
acagcctgctgaactggtcgc

SEQ ID NO: 27502 - RNA, 21 nt, synthetic construct
  source 1..21: mol_type = other RNA
acatggaaggtgatgaagaga

SEQ ID NO: 27503 - RNA, 21 nt, synthetic construct
  source 1..21: mol_type = other RNA
accagggaggcttatgccaat

SEQ ID NO: 27504 - RNA, 21 nt, synthetic construct
  source 1..21: mol_type = other RNA
accagttcagcaggctgttgt

SEQ ID NO: 27505 - RNA, 21 nt, synthetic construct
  source 1..21: mol_type = other RNA
accatcaactgcgaccagttc

SEQ ID NO: 27506 - RNA, 21 nt, synthetic construct
  source 1..21: mol_type = other RNA
acccgacacagacaccatcaa

SEQ ID NO: 27507 - RNA, 21 nt, synthetic construct
  source 1..21: mol_type = other RNA
accgatattggcataagcctc

SEQ ID NO: 27508 - RNA, 21 nt, synthetic construct
  source 1..21: mol_type = other RNA
acctgagcccagaaaaggaca

SEQ ID NO: 27509 - RNA, 21 nt, synthetic construct
  source 1..21: mol_type = other RNA
accttccatgtcacacaacag

SEQ ID NO: 27510 - RNA, 21 nt, synthetic construct
  source 1..21: mol_type = other RNA
actgcgaccagttcagcaggc

SEQ ID NO: 27511 - RNA, 21 nt, synthetic construct
  source 1..21: mol_type = other RNA
actggtcgcagttgatggtgt

SEQ ID NO: 27512 - RNA, 21 nt, synthetic construct
  source 1..21: mol_type = other RNA
acttttcctcccagaacccga

SEQ ID NO: 27513 - RNA, 21 nt, synthetic construct
  source 1..21: mol_type = other RNA
agaaatttccttcttcatcca

SEQ ID NO: 27514 - RNA, 21 nt, synthetic construct
  source 1..21: mol_type = other RNA
agaacccgacacagacaccat

SEQ ID NO: 27515 - RNA, 21 nt, synthetic construct
  source 1..21: mol_type = other RNA
agacaccatcaactgcgacca

SEQ ID NO: 27516 - RNA, 21 nt, synthetic construct
  source 1..21: mol_type = other RNA
agaccagggaggcttatgcca

SEQ ID NO: 27517 - RNA, 21 nt, synthetic construct
  source 1..21: mol_type = other RNA
agagaccagggaggcttatgc

SEQ ID NO: 27518 - RNA, 21 nt, synthetic construct
  source 1..21: mol_type = other RNA
agcacctgagcccagaaaagg

SEQ ID NO: 27519 - RNA, 21 nt, synthetic construct
  source 1..21: mol_type = other RNA
agcaggctgttgtgtgacatg

SEQ ID NO: 27520 - RNA, 21 nt, synthetic construct
  source 1..21: mol_type = other RNA
agcccagaaaaggacaatcaa

SEQ ID NO: 27521 - RNA, 21 nt, synthetic construct
  source 1..21: mol_type = other RNA
agcctccctggtctcttcatc

SEQ ID NO: 27522 - RNA, 21 nt, synthetic construct
  source 1..21: mol_type = other RNA
agcctgctgaactggtcgcag

SEQ ID NO: 27523 - RNA, 21 nt, synthetic construct
  source 1..21: mol_type = other RNA
aggaaaagtcccttggatgaa

SEQ ID NO: 27524 - RNA, 21 nt, synthetic construct
  source 1..21: mol_type = other RNA
aggaagcacctgagcccagaa

SEQ ID NO: 27525 - RNA, 21 nt, synthetic construct
  source 1..21: mol_type = other RNA
aggctgttgtgtgacatggaa

SEQ ID NO: 27526 - RNA, 21 nt, synthetic construct
  source 1..21: mol_type = other RNA
aggcttatgccaatatcggtg

SEQ ID NO: 27527 - RNA, 21 nt, synthetic construct
  source 1..21: mol_type = other RNA
agggacttttcctcccagaac

SEQ ID NO: 27528 - RNA, 21 nt, synthetic construct
  source 1..21: mol_type = other RNA
agggaggcttatgccaatatc

SEQ ID NO: 27529 - RNA, 21 nt, synthetic construct
  source 1..21: mol_type = other RNA
aggtgatgaagagaccaggga

SEQ ID NO: 27530 - RNA, 21 nt, synthetic construct
  source 1..21: mol_type = other RNA
aggtgcttcctcaccgatatt

SEQ ID NO: 27531 - RNA, 21 nt, synthetic construct
  source 1..21: mol_type = other RNA
agtcccttggatgaagaagga

SEQ ID NO: 27532 - RNA, 21 nt, synthetic construct
  source 1..21: mol_type = other RNA
agttcagcaggctgttgtgtg

SEQ ID NO: 27533 - RNA, 21 nt, synthetic construct
  source 1..21: mol_type = other RNA
agttgatggtgtctgtgtcgg

SEQ ID NO: 27534 - RNA, 21 nt, synthetic construct
  source 1..21: mol_type = other RNA
ataagcctccctggtctcttc

SEQ ID NO: 27535 - RNA, 21 nt, synthetic construct
  source 1..21: mol_type = other RNA
atatcggtgaggaagcacctg

SEQ ID NO: 27536 - RNA, 21 nt, synthetic construct
  source 1..21: mol_type = other RNA
atattggcataagcctccctg

SEQ ID NO: 27537 - RNA, 21 nt, synthetic construct
  source 1..21: mol_type = other RNA
atcaactgcgaccagttcagc

SEQ ID NO: 27538 - RNA, 21 nt, synthetic construct
  source 1..21: mol_type = other RNA
atcaccttccatgtcacacaa

SEQ ID NO: 27539 - RNA, 21 nt, synthetic construct
  source 1..21: mol_type = other RNA
atccaagggacttttcctccc

SEQ ID NO: 27540 - RNA, 21 nt, synthetic construct
  source 1..21: mol_type = other RNA
atcggtgaggaagcacctgag

SEQ ID NO: 27541 - RNA, 21 nt, synthetic construct
  source 1..21: mol_type = other RNA
atgaagagaccagggaggctt

SEQ ID NO: 27542 - RNA, 21 nt, synthetic construct
  source 1..21: mol_type = other RNA
atgccaatatcggtgaggaag

SEQ ID NO: 27543 - RNA, 21 nt, synthetic construct
  source 1..21: mol_type = other RNA
atggaaggtgatgaagagacc

SEQ ID NO: 27544 - RNA, 21 nt, synthetic construct
  source 1..21: mol_type = other RNA
atggtgtctgtgtcgggttct

SEQ ID NO: 27545 - RNA, 21 nt, synthetic construct
  source 1..21: mol_type = other RNA
atgtcacacaacagcctgctg

SEQ ID NO: 27546 - RNA, 21 nt, synthetic construct
  source 1..21: mol_type = other RNA
attggcataagcctccctggt

SEQ ID NO: 27547 - RNA, 21 nt, synthetic construct
  source 1..21: mol_type = other RNA
attgtccttttctgggctcag

SEQ ID NO: 27548 - RNA, 21 nt, synthetic construct
  source 1..21: mol_type = other RNA
atttccttcttcatccaaggg

SEQ ID NO: 27549 - RNA, 21 nt, synthetic construct
  source 1..21: mol_type = other RNA
caacagcctgctgaactggtc

SEQ ID NO: 27550 - RNA, 21 nt, synthetic construct
  source 1..21: mol_type = other RNA
caactgcgaccagttcagcag

SEQ ID NO: 27551 - RNA, 21 nt, synthetic construct
  source 1..21: mol_type = other RNA
caagggacttttcctcccaga

SEQ ID NO: 27552 - RNA, 21 nt, synthetic construct
  source 1..21: mol_type = other RNA
caatatcggtgaggaagcacc

SEQ ID NO: 27553 - RNA, 21 nt, synthetic construct
  source 1..21: mol_type = other RNA
cacaacagcctgctgaactgg

SEQ ID NO: 27554 - RNA, 21 nt, synthetic construct
  source 1..21: mol_type = other RNA
cacacaacagcctgctgaact

SEQ ID NO: 27555 - RNA, 21 nt, synthetic construct
  source 1..21: mol_type = other RNA
cacagacaccatcaactgcga

SEQ ID NO: 27556 - RNA, 21 nt, synthetic construct
  source 1..21: mol_type = other RNA
caccatcaactgcgaccagtt

SEQ ID NO: 27557 - RNA, 21 nt, synthetic construct
  source 1..21: mol_type = other RNA
caccgatattggcataagcct

SEQ ID NO: 27558 - RNA, 21 nt, synthetic construct
  source 1..21: mol_type = other RNA
cacctgagcccagaaaaggac

SEQ ID NO: 27559 - RNA, 21 nt, synthetic construct
  source 1..21: mol_type = other RNA
caccttccatgtcacacaaca

SEQ ID NO: 27560 - RNA, 21 nt, synthetic construct
  source 1..21: mol_type = other RNA
cagaaatttccttcttcatcc

SEQ ID NO: 27561 - RNA, 21 nt, synthetic construct
  source 1..21: mol_type = other RNA
cagaacccgacacagacacca

SEQ ID NO: 27562 - RNA, 21 nt, synthetic construct
  source 1..21: mol_type = other RNA
cagacaccatcaactgcgacc

SEQ ID NO: 27563 - RNA, 21 nt, synthetic construct
  source 1..21: mol_type = other RNA
cagcaggctgttgtgtgacat

SEQ ID NO: 27564 - RNA, 21 nt, synthetic construct
  source 1..21: mol_type = other RNA
cagcctgctgaactggtcgca

SEQ ID NO: 27565 - RNA, 21 nt, synthetic construct
  source 1..21: mol_type = other RNA
caggctgttgtgtgacatgga

SEQ ID NO: 27566 - RNA, 21 nt, synthetic construct
  source 1..21: mol_type = other RNA
cagggaggcttatgccaatat

SEQ ID NO: 27567 - RNA, 21 nt, synthetic construct
  source 1..21: mol_type = other RNA
caggtgcttcctcaccgatat

SEQ ID NO: 27568 - RNA, 21 nt, synthetic construct
  source 1..21: mol_type = other RNA
cagttcagcaggctgttgtgt

SEQ ID NO: 27569 - RNA, 21 nt, synthetic construct
  source 1..21: mol_type = other RNA
cagttgatggtgtctgtgtcg

SEQ ID NO: 27570 - RNA, 21 nt, synthetic construct
  source 1..21: mol_type = other RNA
cataagcctccctggtctctt

SEQ ID NO: 27571 - RNA, 21 nt, synthetic construct
  source 1..21: mol_type = other RNA
catcaactgcgaccagttcag

SEQ ID NO: 27572 - RNA, 21 nt, synthetic construct
  source 1..21: mol_type = other RNA
catcaccttccatgtcacaca

SEQ ID NO: 27573 - RNA, 21 nt, synthetic construct
  source 1..21: mol_type = other RNA
catccaagggacttttcctcc

SEQ ID NO: 27574 - RNA, 21 nt, synthetic construct
  source 1..21: mol_type = other RNA
catggaaggtgatgaagagac

SEQ ID NO: 27575 - RNA, 21 nt, synthetic construct
  source 1..21: mol_type = other RNA
catgtcacacaacagcctgct

SEQ ID NO: 27576 - RNA, 21 nt, synthetic construct
  source 1..21: mol_type = other RNA
ccaagggacttttcctcccag

SEQ ID NO: 27577 - RNA, 21 nt, synthetic construct
  source 1..21: mol_type = other RNA
ccaatatcggtgaggaagcac

SEQ ID NO: 27578 - RNA, 21 nt, synthetic construct
  source 1..21: mol_type = other RNA
ccagaaatttccttcttcatc

SEQ ID NO: 27579 - RNA, 21 nt, synthetic construct
  source 1..21: mol_type = other RNA
ccagaacccgacacagacacc

SEQ ID NO: 27580 - RNA, 21 nt, synthetic construct
  source 1..21: mol_type = other RNA
ccagggaggcttatgccaata

SEQ ID NO: 27581 - RNA, 21 nt, synthetic construct
  source 1..21: mol_type = other RNA
ccagttcagcaggctgttgtg

SEQ ID NO: 27582 - RNA, 21 nt, synthetic construct
  source 1..21: mol_type = other RNA
ccatcaactgcgaccagttca

SEQ ID NO: 27583 - RNA, 21 nt, synthetic construct
  source 1..21: mol_type = other RNA
ccatgtcacacaacagcctgc

SEQ ID NO: 27584 - RNA, 21 nt, synthetic construct
  source 1..21: mol_type = other RNA
cccagaacccgacacagacac

SEQ ID NO: 27585 - RNA, 21 nt, synthetic construct
  source 1..21: mol_type = other RNA
cccgacacagacaccatcaac

SEQ ID NO: 27586 - RNA, 21 nt, synthetic construct
  source 1..21: mol_type = other RNA
ccctggtctcttcatcacctt

SEQ ID NO: 27587 - RNA, 21 nt, synthetic construct
  source 1..21: mol_type = other RNA
cccttgattgtccttttctgg

SEQ ID NO: 27588 - RNA, 21 nt, synthetic construct
  source 1..21: mol_type = other RNA
cccttggatgaagaaggaaat

SEQ ID NO: 27589 - RNA, 21 nt, synthetic construct
  source 1..21: mol_type = other RNA
ccgacacagacaccatcaact

SEQ ID NO: 27590 - RNA, 21 nt, synthetic construct
  source 1..21: mol_type = other RNA
ccgatattggcataagcctcc

SEQ ID NO: 27591 - RNA, 21 nt, synthetic construct
  source 1..21: mol_type = other RNA
cctcaccgatattggcataag

SEQ ID NO: 27592 - RNA, 21 nt, synthetic construct
  source 1..21: mol_type = other RNA
cctcccagaacccgacacaga

SEQ ID NO: 27593 - RNA, 21 nt, synthetic construct
  source 1..21: mol_type = other RNA
cctccctggtctcttcatcac

SEQ ID NO: 27594 - RNA, 21 nt, synthetic construct
  source 1..21: mol_type = other RNA
cctgagcccagaaaaggacaa

SEQ ID NO: 27595 - RNA, 21 nt, synthetic construct
  source 1..21: mol_type = other RNA
cctgctgaactggtcgcagtt

SEQ ID NO: 27596 - RNA, 21 nt, synthetic construct
  source 1..21: mol_type = other RNA
cctggtctcttcatcaccttc

SEQ ID NO: 27597 - RNA, 21 nt, synthetic construct
  source 1..21: mol_type = other RNA
ccttccatgtcacacaacagc

SEQ ID NO: 27598 - RNA, 21 nt, synthetic construct
  source 1..21: mol_type = other RNA
ccttcttcatccaagggactt

SEQ ID NO: 27599 - RNA, 21 nt, synthetic construct
  source 1..21: mol_type = other RNA
ccttgattgtccttttctggg

SEQ ID NO: 27600 - RNA, 21 nt, synthetic construct
  source 1..21: mol_type = other RNA
ccttggatgaagaaggaaatt

SEQ ID NO: 27601 - RNA, 21 nt, synthetic construct
  source 1..21: mol_type = other RNA
ccttttctgggctcaggtgct

SEQ ID NO: 27602 - RNA, 21 nt, synthetic construct
  source 1..21: mol_type = other RNA
cgacacagacaccatcaactg

SEQ ID NO: 27603 - RNA, 21 nt, synthetic construct
  source 1..21: mol_type = other RNA
cgaccagttcagcaggctgtt

SEQ ID NO: 27604 - RNA, 21 nt, synthetic construct
  source 1..21: mol_type = other RNA
cgatattggcataagcctccc

SEQ ID NO: 27605 - RNA, 21 nt, synthetic construct
  source 1..21: mol_type = other RNA
cgcagttgatggtgtctgtgt

SEQ ID NO: 27606 - RNA, 21 nt, synthetic construct
  source 1..21: mol_type = other RNA
cgggttctgggaggaaaagtc

SEQ ID NO: 27607 - RNA, 21 nt, synthetic construct
  source 1..21: mol_type = other RNA
cggtgaggaagcacctgagcc

SEQ ID NO: 27608 - RNA, 21 nt, synthetic construct
  source 1..21: mol_type = other RNA
ctcaccgatattggcataagc

SEQ ID NO: 27609 - RNA, 21 nt, synthetic construct
  source 1..21: mol_type = other RNA
ctcaggtgcttcctcaccgat

SEQ ID NO: 27610 - RNA, 21 nt, synthetic construct
  source 1..21: mol_type = other RNA
ctcccagaacccgacacagac

SEQ ID NO: 27611 - RNA, 21 nt, synthetic construct
  source 1..21: mol_type = other RNA
ctccctggtctcttcatcacc

SEQ ID NO: 27612 - RNA, 21 nt, synthetic construct
  source 1..21: mol_type = other RNA
ctcttcatcaccttccatgtc

SEQ ID NO: 27613 - RNA, 21 nt, synthetic construct
  source 1..21: mol_type = other RNA
ctcttgcccttgattgtcctt

SEQ ID NO: 27614 - RNA, 21 nt, synthetic construct
  source 1..21: mol_type = other RNA
ctgaactggtcgcagttgatg

SEQ ID NO: 27615 - RNA, 21 nt, synthetic construct
  source 1..21: mol_type = other RNA
ctgagcccagaaaaggacaat

SEQ ID NO: 27616 - RNA, 21 nt, synthetic construct
  source 1..21: mol_type = other RNA
ctgcgaccagttcagcaggct

SEQ ID NO: 27617 - RNA, 21 nt, synthetic construct
  source 1..21: mol_type = other RNA
ctgctgaactggtcgcagttg

SEQ ID NO: 27618 - RNA, 21 nt, synthetic construct
  source 1..21: mol_type = other RNA
ctgggaggaaaagtcccttgg

SEQ ID NO: 27619 - RNA, 21 nt, synthetic construct
  source 1..21: mol_type = other RNA
ctgggctcaggtgcttcctca

SEQ ID NO: 27620 - RNA, 21 nt, synthetic construct
  source 1..21: mol_type = other RNA
ctggtcgcagttgatggtgtc

SEQ ID NO: 27621 - RNA, 21 nt, synthetic construct
  source 1..21: mol_type = other RNA
ctggtctcttcatcaccttcc

SEQ ID NO: 27622 - RNA, 21 nt, synthetic construct
  source 1..21: mol_type = other RNA
ctgtgtcgggttctgggagga

SEQ ID NO: 27623 - RNA, 21 nt, synthetic construct
  source 1..21: mol_type = other RNA
ctgttgtgtgacatggaaggt

SEQ ID NO: 27624 - RNA, 21 nt, synthetic construct
  source 1..21: mol_type = other RNA
cttatgccaatatcggtgagg

SEQ ID NO: 27625 - RNA, 21 nt, synthetic construct
  source 1..21: mol_type = other RNA
cttcatcaccttccatgtcac

SEQ ID NO: 27626 - RNA, 21 nt, synthetic construct
  source 1..21: mol_type = other RNA
cttcatccaagggacttttcc

SEQ ID NO: 27627 - RNA, 21 nt, synthetic construct
  source 1..21: mol_type = other RNA
cttccatgtcacacaacagcc

SEQ ID NO: 27628 - RNA, 21 nt, synthetic construct
  source 1..21: mol_type = other RNA
cttcctcaccgatattggcat

SEQ ID NO: 27629 - RNA, 21 nt, synthetic construct
  source 1..21: mol_type = other RNA
cttcttcatccaagggacttt

SEQ ID NO: 27630 - RNA, 21 nt, synthetic construct
  source 1..21: mol_type = other RNA
cttgattgtccttttctgggc

SEQ ID NO: 27631 - RNA, 21 nt, synthetic construct
  source 1..21: mol_type = other RNA
cttgcccttgattgtcctttt

SEQ ID NO: 27632 - RNA, 21 nt, synthetic construct
  source 1..21: mol_type = other RNA
cttggatgaagaaggaaattt

SEQ ID NO: 27633 - RNA, 21 nt, synthetic construct
  source 1..21: mol_type = other RNA
ctttccagaaatttccttctt

SEQ ID NO: 27634 - RNA, 21 nt, synthetic construct
  source 1..21: mol_type = other RNA
cttttcctcccagaacccgac

SEQ ID NO: 27635 - RNA, 21 nt, synthetic construct
  source 1..21: mol_type = other RNA
cttttctgggctcaggtgctt

SEQ ID NO: 27636 - RNA, 21 nt, synthetic construct
  source 1..21: mol_type = other RNA
gaaaagtcccttggatgaaga

SEQ ID NO: 27637 - RNA, 21 nt, synthetic construct
  source 1..21: mol_type = other RNA
gaaatttccttcttcatccaa

SEQ ID NO: 27638 - RNA, 21 nt, synthetic construct
  source 1..21: mol_type = other RNA
gaacccgacacagacaccatc

SEQ ID NO: 27639 - RNA, 21 nt, synthetic construct
  source 1..21: mol_type = other RNA
gaactggtcgcagttgatggt

SEQ ID NO: 27640 - RNA, 21 nt, synthetic construct
  source 1..21: mol_type = other RNA
gaagagaccagggaggcttat

SEQ ID NO: 27641 - RNA, 21 nt, synthetic construct
  source 1..21: mol_type = other RNA
gaagcacctgagcccagaaaa

SEQ ID NO: 27642 - RNA, 21 nt, synthetic construct
  source 1..21: mol_type = other RNA
gaaggtgatgaagagaccagg

SEQ ID NO: 27643 - RNA, 21 nt, synthetic construct
  source 1..21: mol_type = other RNA
gacacagacaccatcaactgc

SEQ ID NO: 27644 - RNA, 21 nt, synthetic construct
  source 1..21: mol_type = other RNA
gacaccatcaactgcgaccag

SEQ ID NO: 27645 - RNA, 21 nt, synthetic construct
  source 1..21: mol_type = other RNA
gacatggaaggtgatgaagag

SEQ ID NO: 27646 - RNA, 21 nt, synthetic construct
  source 1..21: mol_type = other RNA
gaccagggaggcttatgccaa

SEQ ID NO: 27647 - RNA, 21 nt, synthetic construct
  source 1..21: mol_type = other RNA
gaccagttcagcaggctgttg

SEQ ID NO: 27648 - RNA, 21 nt, synthetic construct
  source 1..21: mol_type = other RNA
gacttttcctcccagaacccg

SEQ ID NO: 27649 - RNA, 21 nt, synthetic construct
  source 1..21: mol_type = other RNA
gagaccagggaggcttatgcc

SEQ ID NO: 27650 - RNA, 21 nt, synthetic construct
  source 1..21: mol_type = other RNA
gagcccagaaaaggacaatca

SEQ ID NO: 27651 - RNA, 21 nt, synthetic construct
  source 1..21: mol_type = other RNA
gaggaaaagtcccttggatga

SEQ ID NO: 27652 - RNA, 21 nt, synthetic construct
  source 1..21: mol_type = other RNA
gaggaagcacctgagcccaga

SEQ ID NO: 27653 - RNA, 21 nt, synthetic construct
  source 1..21: mol_type = other RNA
gaggcttatgccaatatcggt

SEQ ID NO: 27654 - RNA, 21 nt, synthetic construct
  source 1..21: mol_type = other RNA
gatattggcataagcctccct

SEQ ID NO: 27655 - RNA, 21 nt, synthetic construct
  source 1..21: mol_type = other RNA
gatgaagagaccagggaggct

SEQ ID NO: 27656 - RNA, 21 nt, synthetic construct
  source 1..21: mol_type = other RNA
gatggtgtctgtgtcgggttc

SEQ ID NO: 27657 - RNA, 21 nt, synthetic construct
  source 1..21: mol_type = other RNA
gattgtccttttctgggctca

SEQ ID NO: 27658 - RNA, 21 nt, synthetic construct
  source 1..21: mol_type = other RNA
gcacctgagcccagaaaagga

SEQ ID NO: 27659 - RNA, 21 nt, synthetic construct
  source 1..21: mol_type = other RNA
gcaggctgttgtgtgacatgg

SEQ ID NO: 27660 - RNA, 21 nt, synthetic construct
  source 1..21: mol_type = other RNA
gcagttgatggtgtctgtgtc

SEQ ID NO: 27661 - RNA, 21 nt, synthetic construct
  source 1..21: mol_type = other RNA
gcataagcctccctggtctct

SEQ ID NO: 27662 - RNA, 21 nt, synthetic construct
  source 1..21: mol_type = other RNA
gccaatatcggtgaggaagca

SEQ ID NO: 27663 - RNA, 21 nt, synthetic construct
  source 1..21: mol_type = other RNA
gcccagaaaaggacaatcaag

SEQ ID NO: 27664 - RNA, 21 nt, synthetic construct
  source 1..21: mol_type = other RNA
gcccttgattgtccttttctg

SEQ ID NO: 27665 - RNA, 21 nt, synthetic construct
  source 1..21: mol_type = other RNA
gcctccctggtctcttcatca

SEQ ID NO: 27666 - RNA, 21 nt, synthetic construct
  source 1..21: mol_type = other RNA
gcctgctgaactggtcgcagt

SEQ ID NO: 27667 - RNA, 21 nt, synthetic construct
  source 1..21: mol_type = other RNA
gcgaccagttcagcaggctgt

SEQ ID NO: 27668 - RNA, 21 nt, synthetic construct
  source 1..21: mol_type = other RNA
gctcaggtgcttcctcaccga

SEQ ID NO: 27669 - RNA, 21 nt, synthetic construct
  source 1..21: mol_type = other RNA
gctgaactggtcgcagttgat

SEQ ID NO: 27670 - RNA, 21 nt, synthetic construct
  source 1..21: mol_type = other RNA
gctgttgtgtgacatggaagg

SEQ ID NO: 27671 - RNA, 21 nt, synthetic construct
  source 1..21: mol_type = other RNA
gcttatgccaatatcggtgag

SEQ ID NO: 27672 - RNA, 21 nt, synthetic construct
  source 1..21: mol_type = other RNA
gcttcctcaccgatattggca

SEQ ID NO: 27673 - RNA, 21 nt, synthetic construct
  source 1..21: mol_type = other RNA
ggaaaagtcccttggatgaag

SEQ ID NO: 27674 - RNA, 21 nt, synthetic construct
  source 1..21: mol_type = other RNA
ggaagcacctgagcccagaaa

SEQ ID NO: 27675 - RNA, 21 nt, synthetic construct
  source 1..21: mol_type = other RNA
ggaaggtgatgaagagaccag

SEQ ID NO: 27676 - RNA, 21 nt, synthetic construct
  source 1..21: mol_type = other RNA
ggacttttcctcccagaaccc

SEQ ID NO: 27677 - RNA, 21 nt, synthetic construct
  source 1..21: mol_type = other RNA
ggaggaaaagtcccttggatg

SEQ ID NO: 27678 - RNA, 21 nt, synthetic construct
  source 1..21: mol_type = other RNA
ggaggcttatgccaatatcgg

SEQ ID NO: 27679 - RNA, 21 nt, synthetic construct
  source 1..21: mol_type = other RNA
ggcataagcctccctggtctc

SEQ ID NO: 27680 - RNA, 21 nt, synthetic construct
  source 1..21: mol_type = other RNA
ggctcaggtgcttcctcaccg

SEQ ID NO: 27681 - RNA, 21 nt, synthetic construct
  source 1..21: mol_type = other RNA
ggctgttgtgtgacatggaag

SEQ ID NO: 27682 - RNA, 21 nt, synthetic construct
  source 1..21: mol_type = other RNA
ggcttatgccaatatcggtga

SEQ ID NO: 27683 - RNA, 21 nt, synthetic construct
  source 1..21: mol_type = other RNA
gggacttttcctcccagaacc

SEQ ID NO: 27684 - RNA, 21 nt, synthetic construct
  source 1..21: mol_type = other RNA
gggaggaaaagtcccttggat

SEQ ID NO: 27685 - RNA, 21 nt, synthetic construct
  source 1..21: mol_type = other RNA
gggaggcttatgccaatatcg

SEQ ID NO: 27686 - RNA, 21 nt, synthetic construct
  source 1..21: mol_type = other RNA
gggctcaggtgcttcctcacc

SEQ ID NO: 27687 - RNA, 21 nt, synthetic construct
  source 1..21: mol_type = other RNA
gggttctgggaggaaaagtcc

SEQ ID NO: 27688 - RNA, 21 nt, synthetic construct
  source 1..21: mol_type = other RNA
ggtcgcagttgatggtgtctg

SEQ ID NO: 27689 - RNA, 21 nt, synthetic construct
  source 1..21: mol_type = other RNA
ggtctcttcatcaccttccat

SEQ ID NO: 27690 - RNA, 21 nt, synthetic construct
  source 1..21: mol_type = other RNA
ggtgaggaagcacctgagccc

SEQ ID NO: 27691 - RNA, 21 nt, synthetic construct
  source 1..21: mol_type = other RNA
ggtgatgaagagaccagggag

SEQ ID NO: 27692 - RNA, 21 nt, synthetic construct
  source 1..21: mol_type = other RNA
ggtgcttcctcaccgatattg

SEQ ID NO: 27693 - RNA, 21 nt, synthetic construct
  source 1..21: mol_type = other RNA
ggtgtctgtgtcgggttctgg

SEQ ID NO: 27694 - RNA, 21 nt, synthetic construct
  source 1..21: mol_type = other RNA
ggttctgggaggaaaagtccc

SEQ ID NO: 27695 - RNA, 21 nt, synthetic construct
  source 1..21: mol_type = other RNA
gtcacacaacagcctgctgaa

SEQ ID NO: 27696 - RNA, 21 nt, synthetic construct
  source 1..21: mol_type = other RNA
gtcccttggatgaagaaggaa

SEQ ID NO: 27697 - RNA, 21 nt, synthetic construct
  source 1..21: mol_type = other RNA
gtccttttctgggctcaggtg

SEQ ID NO: 27698 - RNA, 21 nt, synthetic construct
  source 1..21: mol_type = other RNA
gtcgcagttgatggtgtctgt

SEQ ID NO: 27699 - RNA, 21 nt, synthetic construct
  source 1..21: mol_type = other RNA
gtcgggttctgggaggaaaag

SEQ ID NO: 27700 - RNA, 21 nt, synthetic construct
  source 1..21: mol_type = other RNA
gtctcttcatcaccttccatg

SEQ ID NO: 27701 - RNA, 21 nt, synthetic construct
  source 1..21: mol_type = other RNA
gtctgtgtcgggttctgggag

SEQ ID NO: 27702 - RNA, 21 nt, synthetic construct
  source 1..21: mol_type = other RNA
gtgacatggaaggtgatgaag

SEQ ID NO: 27703 - RNA, 21 nt, synthetic construct
  source 1..21: mol_type = other RNA
gtgaggaagcacctgagccca

SEQ ID NO: 27704 - RNA, 21 nt, synthetic construct
  source 1..21: mol_type = other RNA
gtgatgaagagaccagggagg

SEQ ID NO: 27705 - RNA, 21 nt, synthetic construct
  source 1..21: mol_type = other RNA
gtgcttcctcaccgatattgg

SEQ ID NO: 27706 - RNA, 21 nt, synthetic construct
  source 1..21: mol_type = other RNA
gtgtcgggttctgggaggaaa

SEQ ID NO: 27707 - RNA, 21 nt, synthetic construct
  source 1..21: mol_type = other RNA
gtgtctgtgtcgggttctggg

SEQ ID NO: 27708 - RNA, 21 nt, synthetic construct
  source 1..21: mol_type = other RNA
gtgtgacatggaaggtgatga

SEQ ID NO: 27709 - RNA, 21 nt, synthetic construct
  source 1..21: mol_type = other RNA
gttcagcaggctgttgtgtga

SEQ ID NO: 27710 - RNA, 21 nt, synthetic construct
  source 1..21: mol_type = other RNA
gttctgggaggaaaagtccct

SEQ ID NO: 27711 - RNA, 21 nt, synthetic construct
  source 1..21: mol_type = other RNA
gttgatggtgtctgtgtcggg

SEQ ID NO: 27712 - RNA, 21 nt, synthetic construct
  source 1..21: mol_type = other RNA
gttgtgtgacatggaaggtga

SEQ ID NO: 27713 - RNA, 21 nt, synthetic construct
  source 1..21: mol_type = other RNA
taagcctccctggtctcttca

SEQ ID NO: 27714 - RNA, 21 nt, synthetic construct
  source 1..21: mol_type = other RNA
tatcggtgaggaagcacctga

SEQ ID NO: 27715 - RNA, 21 nt, synthetic construct
  source 1..21: mol_type = other RNA
tatgccaatatcggtgaggaa

SEQ ID NO: 27716 - RNA, 21 nt, synthetic construct
  source 1..21: mol_type = other RNA
tattggcataagcctccctgg

SEQ ID NO: 27717 - RNA, 21 nt, synthetic construct
  source 1..21: mol_type = other RNA
tcaactgcgaccagttcagca

SEQ ID NO: 27718 - RNA, 21 nt, synthetic construct
  source 1..21: mol_type = other RNA
tcacacaacagcctgctgaac

SEQ ID NO: 27719 - RNA, 21 nt, synthetic construct
  source 1..21: mol_type = other RNA
tcaccgatattggcataagcc

SEQ ID NO: 27720 - RNA, 21 nt, synthetic construct
  source 1..21: mol_type = other RNA
tcaccttccatgtcacacaac

SEQ ID NO: 27721 - RNA, 21 nt, synthetic construct
  source 1..21: mol_type = other RNA
tcagcaggctgttgtgtgaca

SEQ ID NO: 27722 - RNA, 21 nt, synthetic construct
  source 1..21: mol_type = other RNA
tcaggtgcttcctcaccgata

SEQ ID NO: 27723 - RNA, 21 nt, synthetic construct
  source 1..21: mol_type = other RNA
tcatcaccttccatgtcacac

SEQ ID NO: 27724 - RNA, 21 nt, synthetic construct
  source 1..21: mol_type = other RNA
tcatccaagggacttttcctc

SEQ ID NO: 27725 - RNA, 21 nt, synthetic construct
  source 1..21: mol_type = other RNA
tccaagggacttttcctccca

SEQ ID NO: 27726 - RNA, 21 nt, synthetic construct
  source 1..21: mol_type = other RNA
tccagaaatttccttcttcat

SEQ ID NO: 27727 - RNA, 21 nt, synthetic construct
  source 1..21: mol_type = other RNA
tccatgtcacacaacagcctg

SEQ ID NO: 27728 - RNA, 21 nt, synthetic construct
  source 1..21: mol_type = other RNA
tcccagaacccgacacagaca

SEQ ID NO: 27729 - RNA, 21 nt, synthetic construct
  source 1..21: mol_type = other RNA
tccctggtctcttcatcacct

SEQ ID NO: 27730 - RNA, 21 nt, synthetic construct
  source 1..21: mol_type = other RNA
tcccttggatgaagaaggaaa

SEQ ID NO: 27731 - RNA, 21 nt, synthetic construct
  source 1..21: mol_type = other RNA
tcctcaccgatattggcataa

SEQ ID NO: 27732 - RNA, 21 nt, synthetic construct
  source 1..21: mol_type = other RNA
tcctcccagaacccgacacag

SEQ ID NO: 27733 - RNA, 21 nt, synthetic construct
  source 1..21: mol_type = other RNA
tccttcttcatccaagggact

SEQ ID NO: 27734 - RNA, 21 nt, synthetic construct
  source 1..21: mol_type = other RNA
tccttttctgggctcaggtgc

SEQ ID NO: 27735 - RNA, 21 nt, synthetic construct
  source 1..21: mol_type = other RNA
tcgcagttgatggtgtctgtg

SEQ ID NO: 27736 - RNA, 21 nt, synthetic construct
  source 1..21: mol_type = other RNA
tcgggttctgggaggaaaagt

SEQ ID NO: 27737 - RNA, 21 nt, synthetic construct
  source 1..21: mol_type = other RNA
tcggtgaggaagcacctgagc

SEQ ID NO: 27738 - RNA, 21 nt, synthetic construct
  source 1..21: mol_type = other RNA
tctcttcatcaccttccatgt

SEQ ID NO: 27739 - RNA, 21 nt, synthetic construct
  source 1..21: mol_type = other RNA
tctgggaggaaaagtcccttg

SEQ ID NO: 27740 - RNA, 21 nt, synthetic construct
  source 1..21: mol_type = other RNA
tctgggctcaggtgcttcctc

SEQ ID NO: 27741 - RNA, 21 nt, synthetic construct
  source 1..21: mol_type = other RNA
tctgtgtcgggttctgggagg

SEQ ID NO: 27742 - RNA, 21 nt, synthetic construct
  source 1..21: mol_type = other RNA
tcttcatcaccttccatgtca

SEQ ID NO: 27743 - RNA, 21 nt, synthetic construct
  source 1..21: mol_type = other RNA
tcttcatccaagggacttttc

SEQ ID NO: 27744 - RNA, 21 nt, synthetic construct
  source 1..21: mol_type = other RNA
tcttgcccttgattgtccttt

SEQ ID NO: 27745 - RNA, 21 nt, synthetic construct
  source 1..21: mol_type = other RNA
tctttccagaaatttccttct

SEQ ID NO: 27746 - RNA, 21 nt, synthetic construct
  source 1..21: mol_type = other RNA
tgaactggtcgcagttgatgg

SEQ ID NO: 27747 - RNA, 21 nt, synthetic construct
  source 1..21: mol_type = other RNA
tgaagagaccagggaggctta

SEQ ID NO: 27748 - RNA, 21 nt, synthetic construct
  source 1..21: mol_type = other RNA
tgacatggaaggtgatgaaga

SEQ ID NO: 27749 - RNA, 21 nt, synthetic construct
  source 1..21: mol_type = other RNA
tgagcccagaaaaggacaatc

SEQ ID NO: 27750 - RNA, 21 nt, synthetic construct
  source 1..21: mol_type = other RNA
tgaggaagcacctgagcccag

SEQ ID NO: 27751 - RNA, 21 nt, synthetic construct
  source 1..21: mol_type = other RNA
tgatgaagagaccagggaggc

SEQ ID NO: 27752 - RNA, 21 nt, synthetic construct
  source 1..21: mol_type = other RNA
tgatggtgtctgtgtcgggtt

SEQ ID NO: 27753 - RNA, 21 nt, synthetic construct
  source 1..21: mol_type = other RNA
tgattgtccttttctgggctc

SEQ ID NO: 27754 - RNA, 21 nt, synthetic construct
  source 1..21: mol_type = other RNA
tgccaatatcggtgaggaagc

SEQ ID NO: 27755 - RNA, 21 nt, synthetic construct
  source 1..21: mol_type = other RNA
tgcccttgattgtccttttct

SEQ ID NO: 27756 - RNA, 21 nt, synthetic construct
  source 1..21: mol_type = other RNA
tgcgaccagttcagcaggctg

SEQ ID NO: 27757 - RNA, 21 nt, synthetic construct
  source 1..21: mol_type = other RNA
tgctgaactggtcgcagttga

SEQ ID NO: 27758 - RNA, 21 nt, synthetic construct
  source 1..21: mol_type = other RNA
tgcttcctcaccgatattggc

SEQ ID NO: 27759 - RNA, 21 nt, synthetic construct
  source 1..21: mol_type = other RNA
tggaaggtgatgaagagacca

SEQ ID NO: 27760 - RNA, 21 nt, synthetic construct
  source 1..21: mol_type = other RNA
tggcataagcctccctggtct

SEQ ID NO: 27761 - RNA, 21 nt, synthetic construct
  source 1..21: mol_type = other RNA
tgggaggaaaagtcccttgga

SEQ ID NO: 27762 - RNA, 21 nt, synthetic construct
  source 1..21: mol_type = other RNA
tgggctcaggtgcttcctcac

SEQ ID NO: 27763 - RNA, 21 nt, synthetic construct
  source 1..21: mol_type = other RNA
tggtcgcagttgatggtgtct

SEQ ID NO: 27764 - RNA, 21 nt, synthetic construct
  source 1..21: mol_type = other RNA
tggtctcttcatcaccttcca

SEQ ID NO: 27765 - RNA, 21 nt, synthetic construct
  source 1..21: mol_type = other RNA
tggtgtctgtgtcgggttctg

SEQ ID NO: 27766 - RNA, 21 nt, synthetic construct
  source 1..21: mol_type = other RNA
tgtcacacaacagcctgctga

SEQ ID NO: 27767 - RNA, 21 nt, synthetic construct
  source 1..21: mol_type = other RNA
tgtccttttctgggctcaggt

SEQ ID NO: 27768 - RNA, 21 nt, synthetic construct
  source 1..21: mol_type = other RNA
tgtcgggttctgggaggaaaa

SEQ ID NO: 27769 - RNA, 21 nt, synthetic construct
  source 1..21: mol_type = other RNA
tgtctgtgtcgggttctggga

SEQ ID NO: 27770 - RNA, 21 nt, synthetic construct
  source 1..21: mol_type = other RNA
tgtgacatggaaggtgatgaa

SEQ ID NO: 27771 - RNA, 21 nt, synthetic construct
  source 1..21: mol_type = other RNA
tgtgtcgggttctgggaggaa

SEQ ID NO: 27772 - RNA, 21 nt, synthetic construct
  source 1..21: mol_type = other RNA
tgtgtgacatggaaggtgatg

SEQ ID NO: 27773 - RNA, 21 nt, synthetic construct
  source 1..21: mol_type = other RNA
tgttgtgtgacatggaaggtg

SEQ ID NO: 27774 - RNA, 21 nt, synthetic construct
  source 1..21: mol_type = other RNA
ttatgccaatatcggtgagga

SEQ ID NO: 27775 - RNA, 21 nt, synthetic construct
  source 1..21: mol_type = other RNA
ttcagcaggctgttgtgtgac

SEQ ID NO: 27776 - RNA, 21 nt, synthetic construct
  source 1..21: mol_type = other RNA
ttcatcaccttccatgtcaca

SEQ ID NO: 27777 - RNA, 21 nt, synthetic construct
  source 1..21: mol_type = other RNA
ttcatccaagggacttttcct

SEQ ID NO: 27778 - RNA, 21 nt, synthetic construct
  source 1..21: mol_type = other RNA
ttccagaaatttccttcttca

SEQ ID NO: 27779 - RNA, 21 nt, synthetic construct
  source 1..21: mol_type = other RNA
ttccatgtcacacaacagcct

SEQ ID NO: 27780 - RNA, 21 nt, synthetic construct
  source 1..21: mol_type = other RNA
ttcctcaccgatattggcata

SEQ ID NO: 27781 - RNA, 21 nt, synthetic construct
  source 1..21: mol_type = other RNA
ttcctcccagaacccgacaca

SEQ ID NO: 27782 - RNA, 21 nt, synthetic construct
  source 1..21: mol_type = other RNA
ttccttcttcatccaagggac

SEQ ID NO: 27783 - RNA, 21 nt, synthetic construct
  source 1..21: mol_type = other RNA
ttctgggaggaaaagtccctt

SEQ ID NO: 27784 - RNA, 21 nt, synthetic construct
  source 1..21: mol_type = other RNA
ttctgggctcaggtgcttcct

SEQ ID NO: 27785 - RNA, 21 nt, synthetic construct
  source 1..21: mol_type = other RNA
ttcttcatccaagggactttt

SEQ ID NO: 27786 - RNA, 21 nt, synthetic construct
  source 1..21: mol_type = other RNA
ttgatggtgtctgtgtcgggt

SEQ ID NO: 27787 - RNA, 21 nt, synthetic construct
  source 1..21: mol_type = other RNA
ttgattgtccttttctgggct

SEQ ID NO: 27788 - RNA, 21 nt, synthetic construct
  source 1..21: mol_type = other RNA
ttgcccttgattgtccttttc

SEQ ID NO: 27789 - RNA, 21 nt, synthetic construct
  source 1..21: mol_type = other RNA
ttggatgaagaaggaaatttc

SEQ ID NO: 27790 - RNA, 21 nt, synthetic construct
  source 1..21: mol_type = other RNA
ttggcataagcctccctggtc

SEQ ID NO: 27791 - RNA, 21 nt, synthetic construct
  source 1..21: mol_type = other RNA
ttgtccttttctgggctcagg

SEQ ID NO: 27792 - RNA, 21 nt, synthetic construct
  source 1..21: mol_type = other RNA
ttgtgtgacatggaaggtgat

SEQ ID NO: 27793 - RNA, 21 nt, synthetic construct
  source 1..21: mol_type = other RNA
tttccagaaatttccttcttc

SEQ ID NO: 27794 - RNA, 21 nt, synthetic construct
  source 1..21: mol_type = other RNA
tttcctcccagaacccgacac

SEQ ID NO: 27795 - RNA, 21 nt, synthetic construct
  source 1..21: mol_type = other RNA
tttccttcttcatccaaggga

SEQ ID NO: 27796 - RNA, 21 nt, synthetic construct
  source 1..21: mol_type = other RNA
tttctgggctcaggtgcttcc

SEQ ID NO: 27797 - RNA, 21 nt, synthetic construct
  source 1..21: mol_type = other RNA
ttttcctcccagaacccgaca

SEQ ID NO: 27798 - RNA, 21 nt, synthetic construct
  source 1..21: mol_type = other RNA
ttttctgggctcaggtgcttc

SEQ ID NO: 27799 - RNA, 22 nt, synthetic construct
  source 1..22: mol_type = other RNA
aaaagtcccttggatgaagaag

SEQ ID NO: 27800 - RNA, 22 nt, synthetic construct
  source 1..22: mol_type = other RNA
aaagtcccttggatgaagaagg

SEQ ID NO: 27801 - RNA, 22 nt, synthetic construct
  source 1..22: mol_type = other RNA
aaatttccttcttcatccaagg

SEQ ID NO: 27802 - RNA, 22 nt, synthetic construct
  source 1..22: mol_type = other RNA
aacagcctgctgaactggtcgc

SEQ ID NO: 27803 - RNA, 22 nt, synthetic construct
  source 1..22: mol_type = other RNA
aacccgacacagacaccatcaa

SEQ ID NO: 27804 - RNA, 22 nt, synthetic construct
  source 1..22: mol_type = other RNA
aactgcgaccagttcagcaggc

SEQ ID NO: 27805 - RNA, 22 nt, synthetic construct
  source 1..22: mol_type = other RNA
aactggtcgcagttgatggtgt

SEQ ID NO: 27806 - RNA, 22 nt, synthetic construct
  source 1..22: mol_type = other RNA
aagagaccagggaggcttatgc

SEQ ID NO: 27807 - RNA, 22 nt, synthetic construct
  source 1..22: mol_type = other RNA
aagcacctgagcccagaaaagg

SEQ ID NO: 27808 - RNA, 22 nt, synthetic construct
  source 1..22: mol_type = other RNA
aagcctccctggtctcttcatc

SEQ ID NO: 27809 - RNA, 22 nt, synthetic construct
  source 1..22: mol_type = other RNA
aagggacttttcctcccagaac

SEQ ID NO: 27810 - RNA, 22 nt, synthetic construct
  source 1..22: mol_type = other RNA
aaggtgatgaagagaccaggga

SEQ ID NO: 27811 - RNA, 22 nt, synthetic construct
  source 1..22: mol_type = other RNA
aagtcccttggatgaagaagga

SEQ ID NO: 27812 - RNA, 22 nt, synthetic construct
  source 1..22: mol_type = other RNA
aatatcggtgaggaagcacctg

SEQ ID NO: 27813 - RNA, 22 nt, synthetic construct
  source 1..22: mol_type = other RNA
aatttccttcttcatccaaggg

SEQ ID NO: 27814 - RNA, 22 nt, synthetic construct
  source 1..22: mol_type = other RNA
acaacagcctgctgaactggtc

SEQ ID NO: 27815 - RNA, 22 nt, synthetic construct
  source 1..22: mol_type = other RNA
acacaacagcctgctgaactgg

SEQ ID NO: 27816 - RNA, 22 nt, synthetic construct
  source 1..22: mol_type = other RNA
acacagacaccatcaactgcga

SEQ ID NO: 27817 - RNA, 22 nt, synthetic construct
  source 1..22: mol_type = other RNA
acaccatcaactgcgaccagtt

SEQ ID NO: 27818 - RNA, 22 nt, synthetic construct
  source 1..22: mol_type = other RNA
acagacaccatcaactgcgacc

SEQ ID NO: 27819 - RNA, 22 nt, synthetic construct
  source 1..22: mol_type = other RNA
acagcctgctgaactggtcgca

SEQ ID NO: 27820 - RNA, 22 nt, synthetic construct
  source 1..22: mol_type = other RNA
acatggaaggtgatgaagagac

SEQ ID NO: 27821 - RNA, 22 nt, synthetic construct
  source 1..22: mol_type = other RNA
accagggaggcttatgccaata

SEQ ID NO: 27822 - RNA, 22 nt, synthetic construct
  source 1..22: mol_type = other RNA
accagttcagcaggctgttgtg

SEQ ID NO: 27823 - RNA, 22 nt, synthetic construct
  source 1..22: mol_type = other RNA
accatcaactgcgaccagttca

SEQ ID NO: 27824 - RNA, 22 nt, synthetic construct
  source 1..22: mol_type = other RNA
acccgacacagacaccatcaac

SEQ ID NO: 27825 - RNA, 22 nt, synthetic construct
  source 1..22: mol_type = other RNA
accgatattggcataagcctcc

SEQ ID NO: 27826 - RNA, 22 nt, synthetic construct
  source 1..22: mol_type = other RNA
acctgagcccagaaaaggacaa

SEQ ID NO: 27827 - RNA, 22 nt, synthetic construct
  source 1..22: mol_type = other RNA
accttccatgtcacacaacagc

SEQ ID NO: 27828 - RNA, 22 nt, synthetic construct
  source 1..22: mol_type = other RNA
actgcgaccagttcagcaggct

SEQ ID NO: 27829 - RNA, 22 nt, synthetic construct
  source 1..22: mol_type = other RNA
actggtcgcagttgatggtgtc

SEQ ID NO: 27830 - RNA, 22 nt, synthetic construct
  source 1..22: mol_type = other RNA
acttttcctcccagaacccgac

SEQ ID NO: 27831 - RNA, 22 nt, synthetic construct
  source 1..22: mol_type = other RNA
agaaatttccttcttcatccaa

SEQ ID NO: 27832 - RNA, 22 nt, synthetic construct
  source 1..22: mol_type = other RNA
agaacccgacacagacaccatc

SEQ ID NO: 27833 - RNA, 22 nt, synthetic construct
  source 1..22: mol_type = other RNA
agacaccatcaactgcgaccag

SEQ ID NO: 27834 - RNA, 22 nt, synthetic construct
  source 1..22: mol_type = other RNA
agaccagggaggcttatgccaa

SEQ ID NO: 27835 - RNA, 22 nt, synthetic construct
  source 1..22: mol_type = other RNA
agagaccagggaggcttatgcc

SEQ ID NO: 27836 - RNA, 22 nt, synthetic construct
  source 1..22: mol_type = other RNA
agcacctgagcccagaaaagga

SEQ ID NO: 27837 - RNA, 22 nt, synthetic construct
  source 1..22: mol_type = other RNA
agcaggctgttgtgtgacatgg

SEQ ID NO: 27838 - RNA, 22 nt, synthetic construct
  source 1..22: mol_type = other RNA
agcccagaaaaggacaatcaag

SEQ ID NO: 27839 - RNA, 22 nt, synthetic construct
  source 1..22: mol_type = other RNA
agcctccctggtctcttcatca

SEQ ID NO: 27840 - RNA, 22 nt, synthetic construct
  source 1..22: mol_type = other RNA
agcctgctgaactggtcgcagt

SEQ ID NO: 27841 - RNA, 22 nt, synthetic construct
  source 1..22: mol_type = other RNA
aggaaaagtcccttggatgaag

SEQ ID NO: 27842 - RNA, 22 nt, synthetic construct
  source 1..22: mol_type = other RNA
aggaagcacctgagcccagaaa

SEQ ID NO: 27843 - RNA, 22 nt, synthetic construct
  source 1..22: mol_type = other RNA
aggctgttgtgtgacatggaag

SEQ ID NO: 27844 - RNA, 22 nt, synthetic construct
  source 1..22: mol_type = other RNA
aggcttatgccaatatcggtga

SEQ ID NO: 27845 - RNA, 22 nt, synthetic construct
  source 1..22: mol_type = other RNA
agggacttttcctcccagaacc

SEQ ID NO: 27846 - RNA, 22 nt, synthetic construct
  source 1..22: mol_type = other RNA
agggaggcttatgccaatatcg

SEQ ID NO: 27847 - RNA, 22 nt, synthetic construct
  source 1..22: mol_type = other RNA
aggtgatgaagagaccagggag

SEQ ID NO: 27848 - RNA, 22 nt, synthetic construct
  source 1..22: mol_type = other RNA
aggtgcttcctcaccgatattg

SEQ ID NO: 27849 - RNA, 22 nt, synthetic construct
  source 1..22: mol_type = other RNA
agtcccttggatgaagaaggaa

SEQ ID NO: 27850 - RNA, 22 nt, synthetic construct
  source 1..22: mol_type = other RNA
agttcagcaggctgttgtgtga

SEQ ID NO: 27851 - RNA, 22 nt, synthetic construct
  source 1..22: mol_type = other RNA
agttgatggtgtctgtgtcggg

SEQ ID NO: 27852 - RNA, 22 nt, synthetic construct
  source 1..22: mol_type = other RNA
ataagcctccctggtctcttca

SEQ ID NO: 27853 - RNA, 22 nt, synthetic construct
  source 1..22: mol_type = other RNA
atatcggtgaggaagcacctga

SEQ ID NO: 27854 - RNA, 22 nt, synthetic construct
  source 1..22: mol_type = other RNA
atattggcataagcctccctgg

SEQ ID NO: 27855 - RNA, 22 nt, synthetic construct
  source 1..22: mol_type = other RNA
atcaactgcgaccagttcagca

SEQ ID NO: 27856 - RNA, 22 nt, synthetic construct
  source 1..22: mol_type = other RNA
atcaccttccatgtcacacaac

SEQ ID NO: 27857 - RNA, 22 nt, synthetic construct
  source 1..22: mol_type = other RNA
atccaagggacttttcctccca

SEQ ID NO: 27858 - RNA, 22 nt, synthetic construct
  source 1..22: mol_type = other RNA
atcggtgaggaagcacctgagc

SEQ ID NO: 27859 - RNA, 22 nt, synthetic construct
  source 1..22: mol_type = other RNA
atgaagagaccagggaggctta

SEQ ID NO: 27860 - RNA, 22 nt, synthetic construct
  source 1..22: mol_type = other RNA
atgccaatatcggtgaggaagc

SEQ ID NO: 27861 - RNA, 22 nt, synthetic construct
  source 1..22: mol_type = other RNA
atggaaggtgatgaagagacca

SEQ ID NO: 27862 - RNA, 22 nt, synthetic construct
  source 1..22: mol_type = other RNA
atggtgtctgtgtcgggttctg

SEQ ID NO: 27863 - RNA, 22 nt, synthetic construct
  source 1..22: mol_type = other RNA
atgtcacacaacagcctgctga

SEQ ID NO: 27864 - RNA, 22 nt, synthetic construct
  source 1..22: mol_type = other RNA
attggcataagcctccctggtc

SEQ ID NO: 27865 - RNA, 22 nt, synthetic construct
  source 1..22: mol_type = other RNA
attgtccttttctgggctcagg

SEQ ID NO: 27866 - RNA, 22 nt, synthetic construct
  source 1..22: mol_type = other RNA
atttccttcttcatccaaggga

SEQ ID NO: 27867 - RNA, 22 nt, synthetic construct
  source 1..22: mol_type = other RNA
caacagcctgctgaactggtcg

SEQ ID NO: 27868 - RNA, 22 nt, synthetic construct
  source 1..22: mol_type = other RNA
caactgcgaccagttcagcagg

SEQ ID NO: 27869 - RNA, 22 nt, synthetic construct
  source 1..22: mol_type = other RNA
caagggacttttcctcccagaa

SEQ ID NO: 27870 - RNA, 22 nt, synthetic construct
  source 1..22: mol_type = other RNA
caatatcggtgaggaagcacct

SEQ ID NO: 27871 - RNA, 22 nt, synthetic construct
  source 1..22: mol_type = other RNA
cacaacagcctgctgaactggt

SEQ ID NO: 27872 - RNA, 22 nt, synthetic construct
  source 1..22: mol_type = other RNA
cacacaacagcctgctgaactg

SEQ ID NO: 27873 - RNA, 22 nt, synthetic construct
  source 1..22: mol_type = other RNA
cacagacaccatcaactgcgac

SEQ ID NO: 27874 - RNA, 22 nt, synthetic construct
  source 1..22: mol_type = other RNA
caccatcaactgcgaccagttc

SEQ ID NO: 27875 - RNA, 22 nt, synthetic construct
  source 1..22: mol_type = other RNA
caccgatattggcataagcctc

SEQ ID NO: 27876 - RNA, 22 nt, synthetic construct
  source 1..22: mol_type = other RNA
cacctgagcccagaaaaggaca

SEQ ID NO: 27877 - RNA, 22 nt, synthetic construct
  source 1..22: mol_type = other RNA
caccttccatgtcacacaacag

SEQ ID NO: 27878 - RNA, 22 nt, synthetic construct
  source 1..22: mol_type = other RNA
cagaaatttccttcttcatcca

SEQ ID NO: 27879 - RNA, 22 nt, synthetic construct
  source 1..22: mol_type = other RNA
cagaacccgacacagacaccat

SEQ ID NO: 27880 - RNA, 22 nt, synthetic construct
  source 1..22: mol_type = other RNA
cagacaccatcaactgcgacca

SEQ ID NO: 27881 - RNA, 22 nt, synthetic construct
  source 1..22: mol_type = other RNA
cagcaggctgttgtgtgacatg

SEQ ID NO: 27882 - RNA, 22 nt, synthetic construct
  source 1..22: mol_type = other RNA
cagcctgctgaactggtcgcag

SEQ ID NO: 27883 - RNA, 22 nt, synthetic construct
  source 1..22: mol_type = other RNA
caggctgttgtgtgacatggaa

SEQ ID NO: 27884 - RNA, 22 nt, synthetic construct
  source 1..22: mol_type = other RNA
cagggaggcttatgccaatatc

SEQ ID NO: 27885 - RNA, 22 nt, synthetic construct
  source 1..22: mol_type = other RNA
caggtgcttcctcaccgatatt

SEQ ID NO: 27886 - RNA, 22 nt, synthetic construct
  source 1..22: mol_type = other RNA
cagttcagcaggctgttgtgtg

SEQ ID NO: 27887 - RNA, 22 nt, synthetic construct
  source 1..22: mol_type = other RNA
cagttgatggtgtctgtgtcgg

SEQ ID NO: 27888 - RNA, 22 nt, synthetic construct
  source 1..22: mol_type = other RNA
cataagcctccctggtctcttc

SEQ ID NO: 27889 - RNA, 22 nt, synthetic construct
  source 1..22: mol_type = other RNA
catcaactgcgaccagttcagc

SEQ ID NO: 27890 - RNA, 22 nt, synthetic construct
  source 1..22: mol_type = other RNA
catcaccttccatgtcacacaa

SEQ ID NO: 27891 - RNA, 22 nt, synthetic construct
  source 1..22: mol_type = other RNA
catccaagggacttttcctccc

SEQ ID NO: 27892 - RNA, 22 nt, synthetic construct
  source 1..22: mol_type = other RNA
catggaaggtgatgaagagacc

SEQ ID NO: 27893 - RNA, 22 nt, synthetic construct
  source 1..22: mol_type = other RNA
catgtcacacaacagcctgctg

SEQ ID NO: 27894 - RNA, 22 nt, synthetic construct
  source 1..22: mol_type = other RNA
ccaagggacttttcctcccaga

SEQ ID NO: 27895 - RNA, 22 nt, synthetic construct
  source 1..22: mol_type = other RNA
ccaatatcggtgaggaagcacc

SEQ ID NO: 27896 - RNA, 22 nt, synthetic construct
  source 1..22: mol_type = other RNA
ccagaaatttccttcttcatcc

SEQ ID NO: 27897 - RNA, 22 nt, synthetic construct
  source 1..22: mol_type = other RNA
ccagaacccgacacagacacca

SEQ ID NO: 27898 - RNA, 22 nt, synthetic construct
  source 1..22: mol_type = other RNA
ccagggaggcttatgccaatat

SEQ ID NO: 27899 - RNA, 22 nt, synthetic construct
  source 1..22: mol_type = other RNA
ccagttcagcaggctgttgtgt

SEQ ID NO: 27900 - RNA, 22 nt, synthetic construct
  source 1..22: mol_type = other RNA
ccatcaactgcgaccagttcag

SEQ ID NO: 27901 - RNA, 22 nt, synthetic construct
  source 1..22: mol_type = other RNA
ccatgtcacacaacagcctgct

SEQ ID NO: 27902 - RNA, 22 nt, synthetic construct
  source 1..22: mol_type = other RNA
cccagaacccgacacagacacc

SEQ ID NO: 27903 - RNA, 22 nt, synthetic construct
  source 1..22: mol_type = other RNA
cccgacacagacaccatcaact

SEQ ID NO: 27904 - RNA, 22 nt, synthetic construct
  source 1..22: mol_type = other RNA
ccctggtctcttcatcaccttc

SEQ ID NO: 27905 - RNA, 22 nt, synthetic construct
  source 1..22: mol_type = other RNA
cccttgattgtccttttctggg

SEQ ID NO: 27906 - RNA, 22 nt, synthetic construct
  source 1..22: mol_type = other RNA
cccttggatgaagaaggaaatt

SEQ ID NO: 27907 - RNA, 22 nt, synthetic construct
  source 1..22: mol_type = other RNA
ccgacacagacaccatcaactg

SEQ ID NO: 27908 - RNA, 22 nt, synthetic construct
  source 1..22: mol_type = other RNA
ccgatattggcataagcctccc

SEQ ID NO: 27909 - RNA, 22 nt, synthetic construct
  source 1..22: mol_type = other RNA
cctcaccgatattggcataagc

SEQ ID NO: 27910 - RNA, 22 nt, synthetic construct
  source 1..22: mol_type = other RNA
cctcccagaacccgacacagac

SEQ ID NO: 27911 - RNA, 22 nt, synthetic construct
  source 1..22: mol_type = other RNA
cctccctggtctcttcatcacc

SEQ ID NO: 27912 - RNA, 22 nt, synthetic construct
  source 1..22: mol_type = other RNA
cctgagcccagaaaaggacaat

SEQ ID NO: 27913 - RNA, 22 nt, synthetic construct
  source 1..22: mol_type = other RNA
cctgctgaactggtcgcagttg

SEQ ID NO: 27914 - RNA, 22 nt, synthetic construct
  source 1..22: mol_type = other RNA
cctggtctcttcatcaccttcc

SEQ ID NO: 27915 - RNA, 22 nt, synthetic construct
  source 1..22: mol_type = other RNA
ccttccatgtcacacaacagcc

SEQ ID NO: 27916 - RNA, 22 nt, synthetic construct
  source 1..22: mol_type = other RNA
ccttcttcatccaagggacttt

SEQ ID NO: 27917 - RNA, 22 nt, synthetic construct
  source 1..22: mol_type = other RNA
ccttgattgtccttttctgggc

SEQ ID NO: 27918 - RNA, 22 nt, synthetic construct
  source 1..22: mol_type = other RNA
ccttggatgaagaaggaaattt

SEQ ID NO: 27919 - RNA, 22 nt, synthetic construct
  source 1..22: mol_type = other RNA
ccttttctgggctcaggtgctt

SEQ ID NO: 27920 - RNA, 22 nt, synthetic construct
  source 1..22: mol_type = other RNA
cgacacagacaccatcaactgc

SEQ ID NO: 27921 - RNA, 22 nt, synthetic construct
  source 1..22: mol_type = other RNA
cgaccagttcagcaggctgttg

SEQ ID NO: 27922 - RNA, 22 nt, synthetic construct
  source 1..22: mol_type = other RNA
cgatattggcataagcctccct

SEQ ID NO: 27923 - RNA, 22 nt, synthetic construct
  source 1..22: mol_type = other RNA
cgcagttgatggtgtctgtgtc

SEQ ID NO: 27924 - RNA, 22 nt, synthetic construct
  source 1..22: mol_type = other RNA
cgggttctgggaggaaaagtcc

SEQ ID NO: 27925 - RNA, 22 nt, synthetic construct
  source 1..22: mol_type = other RNA
cggtgaggaagcacctgagccc

SEQ ID NO: 27926 - RNA, 22 nt, synthetic construct
  source 1..22: mol_type = other RNA
ctcaccgatattggcataagcc

SEQ ID NO: 27927 - RNA, 22 nt, synthetic construct
  source 1..22: mol_type = other RNA
ctcaggtgcttcctcaccgata

SEQ ID NO: 27928 - RNA, 22 nt, synthetic construct
  source 1..22: mol_type = other RNA
ctcccagaacccgacacagaca

SEQ ID NO: 27929 - RNA, 22 nt, synthetic construct
  source 1..22: mol_type = other RNA
ctccctggtctcttcatcacct

SEQ ID NO: 27930 - RNA, 22 nt, synthetic construct
  source 1..22: mol_type = other RNA
ctcttcatcaccttccatgtca

SEQ ID NO: 27931 - RNA, 22 nt, synthetic construct
  source 1..22: mol_type = other RNA
ctcttgcccttgattgtccttt

SEQ ID NO: 27932 - RNA, 22 nt, synthetic construct
  source 1..22: mol_type = other RNA
ctgaactggtcgcagttgatgg

SEQ ID NO: 27933 - RNA, 22 nt, synthetic construct
  source 1..22: mol_type = other RNA
ctgagcccagaaaaggacaatc

SEQ ID NO: 27934 - RNA, 22 nt, synthetic construct
  source 1..22: mol_type = other RNA
ctgcgaccagttcagcaggctg

SEQ ID NO: 27935 - RNA, 22 nt, synthetic construct
  source 1..22: mol_type = other RNA
ctgctgaactggtcgcagttga

SEQ ID NO: 27936 - RNA, 22 nt, synthetic construct
  source 1..22: mol_type = other RNA
ctgggaggaaaagtcccttgga

SEQ ID NO: 27937 - RNA, 22 nt, synthetic construct
  source 1..22: mol_type = other RNA
ctgggctcaggtgcttcctcac

SEQ ID NO: 27938 - RNA, 22 nt, synthetic construct
  source 1..22: mol_type = other RNA
ctggtcgcagttgatggtgtct

SEQ ID NO: 27939 - RNA, 22 nt, synthetic construct
  source 1..22: mol_type = other RNA
ctggtctcttcatcaccttcca

SEQ ID NO: 27940 - RNA, 22 nt, synthetic construct
  source 1..22: mol_type = other RNA
ctgtgtcgggttctgggaggaa

SEQ ID NO: 27941 - RNA, 22 nt, synthetic construct
  source 1..22: mol_type = other RNA
ctgttgtgtgacatggaaggtg

SEQ ID NO: 27942 - RNA, 22 nt, synthetic construct
  source 1..22: mol_type = other RNA
cttatgccaatatcggtgagga

SEQ ID NO: 27943 - RNA, 22 nt, synthetic construct
  source 1..22: mol_type = other RNA
cttcatcaccttccatgtcaca

SEQ ID NO: 27944 - RNA, 22 nt, synthetic construct
  source 1..22: mol_type = other RNA
cttcatccaagggacttttcct

SEQ ID NO: 27945 - RNA, 22 nt, synthetic construct
  source 1..22: mol_type = other RNA
cttccatgtcacacaacagcct

SEQ ID NO: 27946 - RNA, 22 nt, synthetic construct
  source 1..22: mol_type = other RNA
cttcctcaccgatattggcata

SEQ ID NO: 27947 - RNA, 22 nt, synthetic construct
  source 1..22: mol_type = other RNA
cttcttcatccaagggactttt

SEQ ID NO: 27948 - RNA, 22 nt, synthetic construct
  source 1..22: mol_type = other RNA
cttgattgtccttttctgggct

SEQ ID NO: 27949 - RNA, 22 nt, synthetic construct
  source 1..22: mol_type = other RNA
cttgcccttgattgtccttttc

SEQ ID NO: 27950 - RNA, 22 nt, synthetic construct
  source 1..22: mol_type = other RNA
cttggatgaagaaggaaatttc

SEQ ID NO: 27951 - RNA, 22 nt, synthetic construct
  source 1..22: mol_type = other RNA
ctttccagaaatttccttcttc

SEQ ID NO: 27952 - RNA, 22 nt, synthetic construct
  source 1..22: mol_type = other RNA
cttttcctcccagaacccgaca

SEQ ID NO: 27953 - RNA, 22 nt, synthetic construct
  source 1..22: mol_type = other RNA
cttttctgggctcaggtgcttc

SEQ ID NO: 27954 - RNA, 22 nt, synthetic construct
  source 1..22: mol_type = other RNA
gaaaagtcccttggatgaagaa

SEQ ID NO: 27955 - RNA, 22 nt, synthetic construct
  source 1..22: mol_type = other RNA
gaaatttccttcttcatccaag

SEQ ID NO: 27956 - RNA, 22 nt, synthetic construct
  source 1..22: mol_type = other RNA
gaacccgacacagacaccatca

SEQ ID NO: 27957 - RNA, 22 nt, synthetic construct
  source 1..22: mol_type = other RNA
gaactggtcgcagttgatggtg

SEQ ID NO: 27958 - RNA, 22 nt, synthetic construct
  source 1..22: mol_type = other RNA
gaagagaccagggaggcttatg

SEQ ID NO: 27959 - RNA, 22 nt, synthetic construct
  source 1..22: mol_type = other RNA
gaagcacctgagcccagaaaag

SEQ ID NO: 27960 - RNA, 22 nt, synthetic construct
  source 1..22: mol_type = other RNA
gaaggtgatgaagagaccaggg

SEQ ID NO: 27961 - RNA, 22 nt, synthetic construct
  source 1..22: mol_type = other RNA
gacacagacaccatcaactgcg

SEQ ID NO: 27962 - RNA, 22 nt, synthetic construct
  source 1..22: mol_type = other RNA
gacaccatcaactgcgaccagt

SEQ ID NO: 27963 - RNA, 22 nt, synthetic construct
  source 1..22: mol_type = other RNA
gacatggaaggtgatgaagaga

SEQ ID NO: 27964 - RNA, 22 nt, synthetic construct
  source 1..22: mol_type = other RNA
gaccagggaggcttatgccaat

SEQ ID NO: 27965 - RNA, 22 nt, synthetic construct
  source 1..22: mol_type = other RNA
gaccagttcagcaggctgttgt

SEQ ID NO: 27966 - RNA, 22 nt, synthetic construct
  source 1..22: mol_type = other RNA
gacttttcctcccagaacccga

SEQ ID NO: 27967 - RNA, 22 nt, synthetic construct
  source 1..22: mol_type = other RNA
gagaccagggaggcttatgcca

SEQ ID NO: 27968 - RNA, 22 nt, synthetic construct
  source 1..22: mol_type = other RNA
gagcccagaaaaggacaatcaa

SEQ ID NO: 27969 - RNA, 22 nt, synthetic construct
  source 1..22: mol_type = other RNA
gaggaaaagtcccttggatgaa

SEQ ID NO: 27970 - RNA, 22 nt, synthetic construct
  source 1..22: mol_type = other RNA
gaggaagcacctgagcccagaa

SEQ ID NO: 27971 - RNA, 22 nt, synthetic construct
  source 1..22: mol_type = other RNA
gaggcttatgccaatatcggtg

SEQ ID NO: 27972 - RNA, 22 nt, synthetic construct
  source 1..22: mol_type = other RNA
gatattggcataagcctccctg

SEQ ID NO: 27973 - RNA, 22 nt, synthetic construct
  source 1..22: mol_type = other RNA
gatgaagagaccagggaggctt

SEQ ID NO: 27974 - RNA, 22 nt, synthetic construct
  source 1..22: mol_type = other RNA
gatggtgtctgtgtcgggttct

SEQ ID NO: 27975 - RNA, 22 nt, synthetic construct
  source 1..22: mol_type = other RNA
gattgtccttttctgggctcag

SEQ ID NO: 27976 - RNA, 22 nt, synthetic construct
  source 1..22: mol_type = other RNA
gcacctgagcccagaaaaggac

SEQ ID NO: 27977 - RNA, 22 nt, synthetic construct
  source 1..22: mol_type = other RNA
gcaggctgttgtgtgacatgga

SEQ ID NO: 27978 - RNA, 22 nt, synthetic construct
  source 1..22: mol_type = other RNA
gcagttgatggtgtctgtgtcg

SEQ ID NO: 27979 - RNA, 22 nt, synthetic construct
  source 1..22: mol_type = other RNA
gcataagcctccctggtctctt

SEQ ID NO: 27980 - RNA, 22 nt, synthetic construct
  source 1..22: mol_type = other RNA
gccaatatcggtgaggaagcac

SEQ ID NO: 27981 - RNA, 22 nt, synthetic construct
  source 1..22: mol_type = other RNA
gcccttgattgtccttttctgg

SEQ ID NO: 27982 - RNA, 22 nt, synthetic construct
  source 1..22: mol_type = other RNA
gcctccctggtctcttcatcac

SEQ ID NO: 27983 - RNA, 22 nt, synthetic construct
  source 1..22: mol_type = other RNA
gcctgctgaactggtcgcagtt

SEQ ID NO: 27984 - RNA, 22 nt, synthetic construct
  source 1..22: mol_type = other RNA
gcgaccagttcagcaggctgtt

SEQ ID NO: 27985 - RNA, 22 nt, synthetic construct
  source 1..22: mol_type = other RNA
gctcaggtgcttcctcaccgat

SEQ ID NO: 27986 - RNA, 22 nt, synthetic construct
  source 1..22: mol_type = other RNA
gctgaactggtcgcagttgatg

SEQ ID NO: 27987 - RNA, 22 nt, synthetic construct
  source 1..22: mol_type = other RNA
gctgttgtgtgacatggaaggt

SEQ ID NO: 27988 - RNA, 22 nt, synthetic construct
  source 1..22: mol_type = other RNA
gcttatgccaatatcggtgagg

SEQ ID NO: 27989 - RNA, 22 nt, synthetic construct
  source 1..22: mol_type = other RNA
gcttcctcaccgatattggcat

SEQ ID NO: 27990 - RNA, 22 nt, synthetic construct
  source 1..22: mol_type = other RNA
ggaaaagtcccttggatgaaga

SEQ ID NO: 27991 - RNA, 22 nt, synthetic construct
  source 1..22: mol_type = other RNA
ggaagcacctgagcccagaaaa

SEQ ID NO: 27992 - RNA, 22 nt, synthetic construct
  source 1..22: mol_type = other RNA
ggaaggtgatgaagagaccagg

SEQ ID NO: 27993 - RNA, 22 nt, synthetic construct
  source 1..22: mol_type = other RNA
ggacttttcctcccagaacccg

SEQ ID NO: 27994 - RNA, 22 nt, synthetic construct
  source 1..22: mol_type = other RNA
ggaggaaaagtcccttggatga

SEQ ID NO: 27995 - RNA, 22 nt, synthetic construct
  source 1..22: mol_type = other RNA
ggaggcttatgccaatatcggt

SEQ ID NO: 27996 - RNA, 22 nt, synthetic construct
  source 1..22: mol_type = other RNA
ggcataagcctccctggtctct

SEQ ID NO: 27997 - RNA, 22 nt, synthetic construct
  source 1..22: mol_type = other RNA
ggctcaggtgcttcctcaccga

SEQ ID NO: 27998 - RNA, 22 nt, synthetic construct
  source 1..22: mol_type = other RNA
ggctgttgtgtgacatggaagg

SEQ ID NO: 27999 - RNA, 22 nt, synthetic construct
  source 1..22: mol_type = other RNA
ggcttatgccaatatcggtgag

SEQ ID NO: 28000 - RNA, 22 nt, synthetic construct
  source 1..22: mol_type = other RNA
gggacttttcctcccagaaccc

SEQ ID NO: 28001 - RNA, 22 nt, synthetic construct
  source 1..22: mol_type = other RNA
gggaggaaaagtcccttggatg

SEQ ID NO: 28002 - RNA, 22 nt, synthetic construct
  source 1..22: mol_type = other RNA
gggaggcttatgccaatatcgg

SEQ ID NO: 28003 - RNA, 22 nt, synthetic construct
  source 1..22: mol_type = other RNA
gggctcaggtgcttcctcaccg

SEQ ID NO: 28004 - RNA, 22 nt, synthetic construct
  source 1..22: mol_type = other RNA
gggttctgggaggaaaagtccc

SEQ ID NO: 28005 - RNA, 22 nt, synthetic construct
  source 1..22: mol_type = other RNA
ggtcgcagttgatggtgtctgt

SEQ ID NO: 28006 - RNA, 22 nt, synthetic construct
  source 1..22: mol_type = other RNA
ggtctcttcatcaccttccatg

SEQ ID NO: 28007 - RNA, 22 nt, synthetic construct
  source 1..22: mol_type = other RNA
ggtgaggaagcacctgagccca

SEQ ID NO: 28008 - RNA, 22 nt, synthetic construct
  source 1..22: mol_type = other RNA
ggtgatgaagagaccagggagg

SEQ ID NO: 28009 - RNA, 22 nt, synthetic construct
  source 1..22: mol_type = other RNA
ggtgcttcctcaccgatattgg

SEQ ID NO: 28010 - RNA, 22 nt, synthetic construct
  source 1..22: mol_type = other RNA
ggtgtctgtgtcgggttctggg

SEQ ID NO: 28011 - RNA, 22 nt, synthetic construct
  source 1..22: mol_type = other RNA
ggttctgggaggaaaagtccct

SEQ ID NO: 28012 - RNA, 22 nt, synthetic construct
  source 1..22: mol_type = other RNA
gtcacacaacagcctgctgaac

SEQ ID NO: 28013 - RNA, 22 nt, synthetic construct
  source 1..22: mol_type = other RNA
gtcccttggatgaagaaggaaa

SEQ ID NO: 28014 - RNA, 22 nt, synthetic construct
  source 1..22: mol_type = other RNA
gtccttttctgggctcaggtgc

SEQ ID NO: 28015 - RNA, 22 nt, synthetic construct
  source 1..22: mol_type = other RNA
gtcgcagttgatggtgtctgtg

SEQ ID NO: 28016 - RNA, 22 nt, synthetic construct
  source 1..22: mol_type = other RNA
gtcgggttctgggaggaaaagt

SEQ ID NO: 28017 - RNA, 22 nt, synthetic construct
  source 1..22: mol_type = other RNA
gtctcttcatcaccttccatgt

SEQ ID NO: 28018 - RNA, 22 nt, synthetic construct
  source 1..22: mol_type = other RNA
gtctgtgtcgggttctgggagg

SEQ ID NO: 28019 - RNA, 22 nt, synthetic construct
  source 1..22: mol_type = other RNA
gtgacatggaaggtgatgaaga

SEQ ID NO: 28020 - RNA, 22 nt, synthetic construct
  source 1..22: mol_type = other RNA
gtgaggaagcacctgagcccag

SEQ ID NO: 28021 - RNA, 22 nt, synthetic construct
  source 1..22: mol_type = other RNA
gtgatgaagagaccagggaggc

SEQ ID NO: 28022 - RNA, 22 nt, synthetic construct
  source 1..22: mol_type = other RNA
gtgcttcctcaccgatattggc

SEQ ID NO: 28023 - RNA, 22 nt, synthetic construct
  source 1..22: mol_type = other RNA
gtgtcgggttctgggaggaaaa

SEQ ID NO: 28024 - RNA, 22 nt, synthetic construct
  source 1..22: mol_type = other RNA
gtgtctgtgtcgggttctggga

SEQ ID NO: 28025 - RNA, 22 nt, synthetic construct
  source 1..22: mol_type = other RNA
gtgtgacatggaaggtgatgaa

SEQ ID NO: 28026 - RNA, 22 nt, synthetic construct
  source 1..22: mol_type = other RNA
gttcagcaggctgttgtgtgac

SEQ ID NO: 28027 - RNA, 22 nt, synthetic construct
  source 1..22: mol_type = other RNA
gttctgggaggaaaagtccctt

SEQ ID NO: 28028 - RNA, 22 nt, synthetic construct
  source 1..22: mol_type = other RNA
gttgatggtgtctgtgtcgggt

SEQ ID NO: 28029 - RNA, 22 nt, synthetic construct
  source 1..22: mol_type = other RNA
gttgtgtgacatggaaggtgat

SEQ ID NO: 28030 - RNA, 22 nt, synthetic construct
  source 1..22: mol_type = other RNA
taagcctccctggtctcttcat

SEQ ID NO: 28031 - RNA, 22 nt, synthetic construct
  source 1..22: mol_type = other RNA
tatcggtgaggaagcacctgag

SEQ ID NO: 28032 - RNA, 22 nt, synthetic construct
  source 1..22: mol_type = other RNA
tatgccaatatcggtgaggaag

SEQ ID NO: 28033 - RNA, 22 nt, synthetic construct
  source 1..22: mol_type = other RNA
tattggcataagcctccctggt

SEQ ID NO: 28034 - RNA, 22 nt, synthetic construct
  source 1..22: mol_type = other RNA
tcaactgcgaccagttcagcag

SEQ ID NO: 28035 - RNA, 22 nt, synthetic construct
  source 1..22: mol_type = other RNA
tcacacaacagcctgctgaact

SEQ ID NO: 28036 - RNA, 22 nt, synthetic construct
  source 1..22: mol_type = other RNA
tcaccgatattggcataagcct

SEQ ID NO: 28037 - RNA, 22 nt, synthetic construct
  source 1..22: mol_type = other RNA
tcaccttccatgtcacacaaca

SEQ ID NO: 28038 - RNA, 22 nt, synthetic construct
  source 1..22: mol_type = other RNA
tcagcaggctgttgtgtgacat

SEQ ID NO: 28039 - RNA, 22 nt, synthetic construct
  source 1..22: mol_type = other RNA
tcaggtgcttcctcaccgatat

SEQ ID NO: 28040 - RNA, 22 nt, synthetic construct
  source 1..22: mol_type = other RNA
tcatcaccttccatgtcacaca

SEQ ID NO: 28041 - RNA, 22 nt, synthetic construct
  source 1..22: mol_type = other RNA
tcatccaagggacttttcctcc

SEQ ID NO: 28042 - RNA, 22 nt, synthetic construct
  source 1..22: mol_type = other RNA
tccaagggacttttcctcccag

SEQ ID NO: 28043 - RNA, 22 nt, synthetic construct
  source 1..22: mol_type = other RNA
tccagaaatttccttcttcatc

SEQ ID NO: 28044 - RNA, 22 nt, synthetic construct
  source 1..22: mol_type = other RNA
tccatgtcacacaacagcctgc

SEQ ID NO: 28045 - RNA, 22 nt, synthetic construct
  source 1..22: mol_type = other RNA
tcccagaacccgacacagacac

SEQ ID NO: 28046 - RNA, 22 nt, synthetic construct
  source 1..22: mol_type = other RNA
tccctggtctcttcatcacctt

SEQ ID NO: 28047 - RNA, 22 nt, synthetic construct
  source 1..22: mol_type = other RNA
tcccttggatgaagaaggaaat

SEQ ID NO: 28048 - RNA, 22 nt, synthetic construct
  source 1..22: mol_type = other RNA
tcctcaccgatattggcataag

SEQ ID NO: 28049 - RNA, 22 nt, synthetic construct
  source 1..22: mol_type = other RNA
tcctcccagaacccgacacaga

SEQ ID NO: 28050 - RNA, 22 nt, synthetic construct
  source 1..22: mol_type = other RNA
tccttcttcatccaagggactt

SEQ ID NO: 28051 - RNA, 22 nt, synthetic construct
  source 1..22: mol_type = other RNA
tccttttctgggctcaggtgct

SEQ ID NO: 28052 - RNA, 22 nt, synthetic construct
  source 1..22: mol_type = other RNA
tcgcagttgatggtgtctgtgt

SEQ ID NO: 28053 - RNA, 22 nt, synthetic construct
  source 1..22: mol_type = other RNA
tcgggttctgggaggaaaagtc

SEQ ID NO: 28054 - RNA, 22 nt, synthetic construct
  source 1..22: mol_type = other RNA
tcggtgaggaagcacctgagcc

SEQ ID NO: 28055 - RNA, 22 nt, synthetic construct
  source 1..22: mol_type = other RNA
tctcttcatcaccttccatgtc

SEQ ID NO: 28056 - RNA, 22 nt, synthetic construct
  source 1..22: mol_type = other RNA
tctgggaggaaaagtcccttgg

SEQ ID NO: 28057 - RNA, 22 nt, synthetic construct
  source 1..22: mol_type = other RNA
tctgggctcaggtgcttcctca

SEQ ID NO: 28058 - RNA, 22 nt, synthetic construct
  source 1..22: mol_type = other RNA
tctgtgtcgggttctgggagga

SEQ ID NO: 28059 - RNA, 22 nt, synthetic construct
  source 1..22: mol_type = other RNA
tcttcatcaccttccatgtcac

SEQ ID NO: 28060 - RNA, 22 nt, synthetic construct
  source 1..22: mol_type = other RNA
tcttcatccaagggacttttcc

SEQ ID NO: 28061 - RNA, 22 nt, synthetic construct
  source 1..22: mol_type = other RNA
tcttgcccttgattgtcctttt

SEQ ID NO: 28062 - RNA, 22 nt, synthetic construct
  source 1..22: mol_type = other RNA
tctttccagaaatttccttctt

SEQ ID NO: 28063 - RNA, 22 nt, synthetic construct
  source 1..22: mol_type = other RNA
tgaactggtcgcagttgatggt

SEQ ID NO: 28064 - RNA, 22 nt, synthetic construct
  source 1..22: mol_type = other RNA
tgaagagaccagggaggcttat

SEQ ID NO: 28065 - RNA, 22 nt, synthetic construct
  source 1..22: mol_type = other RNA
tgacatggaaggtgatgaagag

SEQ ID NO: 28066 - RNA, 22 nt, synthetic construct
  source 1..22: mol_type = other RNA
tgagcccagaaaaggacaatca

SEQ ID NO: 28067 - RNA, 22 nt, synthetic construct
  source 1..22: mol_type = other RNA
tgaggaagcacctgagcccaga

SEQ ID NO: 28068 - RNA, 22 nt, synthetic construct
  source 1..22: mol_type = other RNA
tgatgaagagaccagggaggct

SEQ ID NO: 28069 - RNA, 22 nt, synthetic construct
  source 1..22: mol_type = other RNA
tgatggtgtctgtgtcgggttc

SEQ ID NO: 28070 - RNA, 22 nt, synthetic construct
  source 1..22: mol_type = other RNA
tgattgtccttttctgggctca

SEQ ID NO: 28071 - RNA, 22 nt, synthetic construct
  source 1..22: mol_type = other RNA
tgccaatatcggtgaggaagca

SEQ ID NO: 28072 - RNA, 22 nt, synthetic construct
  source 1..22: mol_type = other RNA
tgcccttgattgtccttttctg

SEQ ID NO: 28073 - RNA, 22 nt, synthetic construct
  source 1..22: mol_type = other RNA
tgcgaccagttcagcaggctgt

SEQ ID NO: 28074 - RNA, 22 nt, synthetic construct
  source 1..22: mol_type = other RNA
tgctgaactggtcgcagttgat

SEQ ID NO: 28075 - RNA, 22 nt, synthetic construct
  source 1..22: mol_type = other RNA
tgcttcctcaccgatattggca

SEQ ID NO: 28076 - RNA, 22 nt, synthetic construct
  source 1..22: mol_type = other RNA
tggaaggtgatgaagagaccag

SEQ ID NO: 28077 - RNA, 22 nt, synthetic construct
  source 1..22: mol_type = other RNA
tggcataagcctccctggtctc

SEQ ID NO: 28078 - RNA, 22 nt, synthetic construct
  source 1..22: mol_type = other RNA
tgggaggaaaagtcccttggat

SEQ ID NO: 28079 - RNA, 22 nt, synthetic construct
  source 1..22: mol_type = other RNA
tgggctcaggtgcttcctcacc

SEQ ID NO: 28080 - RNA, 22 nt, synthetic construct
  source 1..22: mol_type = other RNA
tggtcgcagttgatggtgtctg

SEQ ID NO: 28081 - RNA, 22 nt, synthetic construct
  source 1..22: mol_type = other RNA
tggtctcttcatcaccttccat

SEQ ID NO: 28082 - RNA, 22 nt, synthetic construct
  source 1..22: mol_type = other RNA
tggtgtctgtgtcgggttctgg

SEQ ID NO: 28083 - RNA, 22 nt, synthetic construct
  source 1..22: mol_type = other RNA
tgtcacacaacagcctgctgaa

SEQ ID NO: 28084 - RNA, 22 nt, synthetic construct
  source 1..22: mol_type = other RNA
tgtccttttctgggctcaggtg

SEQ ID NO: 28085 - RNA, 22 nt, synthetic construct
  source 1..22: mol_type = other RNA
tgtcgggttctgggaggaaaag

SEQ ID NO: 28086 - RNA, 22 nt, synthetic construct
  source 1..22: mol_type = other RNA
tgtctgtgtcgggttctgggag

SEQ ID NO: 28087 - RNA, 22 nt, synthetic construct
  source 1..22: mol_type = other RNA
tgtgacatggaaggtgatgaag

SEQ ID NO: 28088 - RNA, 22 nt, synthetic construct
  source 1..22: mol_type = other RNA
tgtgtcgggttctgggaggaaa

SEQ ID NO: 28089 - RNA, 22 nt, synthetic construct
  source 1..22: mol_type = other RNA
tgtgtgacatggaaggtgatga

SEQ ID NO: 28090 - RNA, 22 nt, synthetic construct
  source 1..22: mol_type = other RNA
tgttgtgtgacatggaaggtga

SEQ ID NO: 28091 - RNA, 22 nt, synthetic construct
  source 1..22: mol_type = other RNA
ttatgccaatatcggtgaggaa

SEQ ID NO: 28092 - RNA, 22 nt, synthetic construct
  source 1..22: mol_type = other RNA
ttcagcaggctgttgtgtgaca

SEQ ID NO: 28093 - RNA, 22 nt, synthetic construct
  source 1..22: mol_type = other RNA
ttcatcaccttccatgtcacac

SEQ ID NO: 28094 - RNA, 22 nt, synthetic construct
  source 1..22: mol_type = other RNA
ttcatccaagggacttttcctc

SEQ ID NO: 28095 - RNA, 22 nt, synthetic construct
  source 1..22: mol_type = other RNA
ttccagaaatttccttcttcat

SEQ ID NO: 28096 - RNA, 22 nt, synthetic construct
  source 1..22: mol_type = other RNA
ttccatgtcacacaacagcctg

SEQ ID NO: 28097 - RNA, 22 nt, synthetic construct
  source 1..22: mol_type = other RNA
ttcctcaccgatattggcataa

SEQ ID NO: 28098 - RNA, 22 nt, synthetic construct
  source 1..22: mol_type = other RNA
ttcctcccagaacccgacacag

SEQ ID NO: 28099 - RNA, 22 nt, synthetic construct
  source 1..22: mol_type = other RNA
ttccttcttcatccaagggact

SEQ ID NO: 28100 - RNA, 22 nt, synthetic construct
  source 1..22: mol_type = other RNA
ttctgggaggaaaagtcccttg

SEQ ID NO: 28101 - RNA, 22 nt, synthetic construct
  source 1..22: mol_type = other RNA
ttctgggctcaggtgcttcctc

SEQ ID NO: 28102 - RNA, 22 nt, synthetic construct
  source 1..22: mol_type = other RNA
ttcttcatccaagggacttttc

SEQ ID NO: 28103 - RNA, 22 nt, synthetic construct
  source 1..22: mol_type = other RNA
ttgatggtgtctgtgtcgggtt

SEQ ID NO: 28104 - RNA, 22 nt, synthetic construct
  source 1..22: mol_type = other RNA
ttgattgtccttttctgggctc

SEQ ID NO: 28105 - RNA, 22 nt, synthetic construct
  source 1..22: mol_type = other RNA
ttgcccttgattgtccttttct

SEQ ID NO: 28106 - RNA, 22 nt, synthetic construct
  source 1..22: mol_type = other RNA
ttggcataagcctccctggtct

SEQ ID NO: 28107 - RNA, 22 nt, synthetic construct
  source 1..22: mol_type = other RNA
ttgtccttttctgggctcaggt

SEQ ID NO: 28108 - RNA, 22 nt, synthetic construct
  source 1..22: mol_type = other RNA
ttgtgtgacatggaaggtgatg

SEQ ID NO: 28109 - RNA, 22 nt, synthetic construct
  source 1..22: mol_type = other RNA
tttccagaaatttccttcttca

SEQ ID NO: 28110 - RNA, 22 nt, synthetic construct
  source 1..22: mol_type = other RNA
tttcctcccagaacccgacaca

SEQ ID NO: 28111 - RNA, 22 nt, synthetic construct
  source 1..22: mol_type = other RNA
tttccttcttcatccaagggac

SEQ ID NO: 28112 - RNA, 22 nt, synthetic construct
  source 1..22: mol_type = other RNA
tttctgggctcaggtgcttcct

SEQ ID NO: 28113 - RNA, 22 nt, synthetic construct
  source 1..22: mol_type = other RNA
ttttcctcccagaacccgacac

SEQ ID NO: 28114 - RNA, 22 nt, synthetic construct
  source 1..22: mol_type = other RNA
ttttctgggctcaggtgcttcc

SEQ ID NO: 28115 - RNA, 20 nt, synthetic construct
  source 1..20: mol_type = other RNA
aaaagcgcagtcaatcaaca

SEQ ID NO: 28116 - RNA, 20 nt, synthetic construct
  source 1..20: mol_type = other RNA
aaaatgtccttgctcaggcc

SEQ ID NO: 28117 - RNA, 20 nt, synthetic construct
  source 1..20: mol_type = other RNA
aaacttactgaaaatgtcct

SEQ ID NO: 28118 - RNA, 20 nt, synthetic construct
  source 1..20: mol_type = other RNA
aaagcgcagtcaatcaacaa

SEQ ID NO: 28119 - RNA, 20 nt, synthetic construct
  source 1..20: mol_type = other RNA
aaatgcaggctgagccaaga

SEQ ID NO: 28120 - RNA, 20 nt, synthetic construct
  source 1..20: mol_type = other RNA
aaatgtccttgctcaggccc

SEQ ID NO: 28121 - RNA, 20 nt, synthetic construct
  source 1..20: mol_type = other RNA
aactggaccagtatgtcttc

SEQ ID NO: 28122 - RNA, 20 nt, synthetic construct
  source 1..20: mol_type = other RNA
aacttactgaaaatgtcctt

SEQ ID NO: 28123 - RNA, 20 nt, synthetic construct
  source 1..20: mol_type = other RNA
aagacatactggtccagttc

SEQ ID NO: 28124 - RNA, 20 nt, synthetic construct
  source 1..20: mol_type = other RNA
aagacctccccacccaccac

SEQ ID NO: 28125 - RNA, 20 nt, synthetic construct
  source 1..20: mol_type = other RNA
aagcgcagtcaatcaacaag

SEQ ID NO: 28126 - RNA, 20 nt, synthetic construct
  source 1..20: mol_type = other RNA
aaggaaaagcgcagtcaatc

SEQ ID NO: 28127 - RNA, 20 nt, synthetic construct
  source 1..20: mol_type = other RNA
aaggacattttcagtaagtt

SEQ ID NO: 28128 - RNA, 20 nt, synthetic construct
  source 1..20: mol_type = other RNA
aagtttgtggtgggtgggga

SEQ ID NO: 28129 - RNA, 20 nt, synthetic construct
  source 1..20: mol_type = other RNA
aatgcaggctgagccaagac

SEQ ID NO: 28130 - RNA, 20 nt, synthetic construct
  source 1..20: mol_type = other RNA
aatgtccttgctcaggccct

SEQ ID NO: 28131 - RNA, 20 nt, synthetic construct
  source 1..20: mol_type = other RNA
acaaacttactgaaaatgtc

SEQ ID NO: 28132 - RNA, 20 nt, synthetic construct
  source 1..20: mol_type = other RNA
acaaggaaaagcgcagtcaa

SEQ ID NO: 28133 - RNA, 20 nt, synthetic construct
  source 1..20: mol_type = other RNA
acatactggtccagttccgc

SEQ ID NO: 28134 - RNA, 20 nt, synthetic construct
  source 1..20: mol_type = other RNA
acattttcagtaagtttgtg

SEQ ID NO: 28135 - RNA, 20 nt, synthetic construct
  source 1..20: mol_type = other RNA
accacaaacttactgaaaat

SEQ ID NO: 28136 - RNA, 20 nt, synthetic construct
  source 1..20: mol_type = other RNA
accagtatgtcttccaggac

SEQ ID NO: 28137 - RNA, 20 nt, synthetic construct
  source 1..20: mol_type = other RNA
acccaccacaaacttactga

SEQ ID NO: 28138 - RNA, 20 nt, synthetic construct
  source 1..20: mol_type = other RNA
acctccccacccaccacaaa

SEQ ID NO: 28139 - RNA, 20 nt, synthetic construct
  source 1..20: mol_type = other RNA
accttgttgattgactgcgc

SEQ ID NO: 28140 - RNA, 20 nt, synthetic construct
  source 1..20: mol_type = other RNA
actcccagctggagggcctg

SEQ ID NO: 28141 - RNA, 20 nt, synthetic construct
  source 1..20: mol_type = other RNA
actgaaaatgtccttgctca

SEQ ID NO: 28142 - RNA, 20 nt, synthetic construct
  source 1..20: mol_type = other RNA
actgcgcttttccttgtctg

SEQ ID NO: 28143 - RNA, 20 nt, synthetic construct
  source 1..20: mol_type = other RNA
actggaccagtatgtcttcc

SEQ ID NO: 28144 - RNA, 20 nt, synthetic construct
  source 1..20: mol_type = other RNA
actggtccagttccgctgcc

SEQ ID NO: 28145 - RNA, 20 nt, synthetic construct
  source 1..20: mol_type = other RNA
acttactgaaaatgtccttg

SEQ ID NO: 28146 - RNA, 20 nt, synthetic construct
  source 1..20: mol_type = other RNA
agacaaggaaaagcgcagtc

SEQ ID NO: 28147 - RNA, 20 nt, synthetic construct
  source 1..20: mol_type = other RNA
agacatactggtccagttcc

SEQ ID NO: 28148 - RNA, 20 nt, synthetic construct
  source 1..20: mol_type = other RNA
agacctccccacccaccaca

SEQ ID NO: 28149 - RNA, 20 nt, synthetic construct
  source 1..20: mol_type = other RNA
agaccttgttgattgactgc

SEQ ID NO: 28150 - RNA, 20 nt, synthetic construct
  source 1..20: mol_type = other RNA
agcaaggacattttcagtaa

SEQ ID NO: 28151 - RNA, 20 nt, synthetic construct
  source 1..20: mol_type = other RNA
agccaagacctccccaccca

SEQ ID NO: 28152 - RNA, 20 nt, synthetic construct
  source 1..20: mol_type = other RNA
agcgcagtcaatcaacaagg

SEQ ID NO: 28153 - RNA, 20 nt, synthetic construct
  source 1..20: mol_type = other RNA
agcggaactggaccagtatg

SEQ ID NO: 28154 - RNA, 20 nt, synthetic construct
  source 1..20: mol_type = other RNA
agctggagggcctgagcaag

SEQ ID NO: 28155 - RNA, 20 nt, synthetic construct
  source 1..20: mol_type = other RNA
agctgggagtcctggaagac

SEQ ID NO: 28156 - RNA, 20 nt, synthetic construct
  source 1..20: mol_type = other RNA
aggaaaagcgcagtcaatca

SEQ ID NO: 28157 - RNA, 20 nt, synthetic construct
  source 1..20: mol_type = other RNA
aggacattttcagtaagttt

SEQ ID NO: 28158 - RNA, 20 nt, synthetic construct
  source 1..20: mol_type = other RNA
aggactcccagctggagggc

SEQ ID NO: 28159 - RNA, 20 nt, synthetic construct
  source 1..20: mol_type = other RNA
aggccctccagctgggagtc

SEQ ID NO: 28160 - RNA, 20 nt, synthetic construct
  source 1..20: mol_type = other RNA
aggctgagccaagacctccc

SEQ ID NO: 28161 - RNA, 20 nt, synthetic construct
  source 1..20: mol_type = other RNA
agggcctgagcaaggacatt

SEQ ID NO: 28162 - RNA, 20 nt, synthetic construct
  source 1..20: mol_type = other RNA
agtaagtttgtggtgggtgg

SEQ ID NO: 28163 - RNA, 20 nt, synthetic construct
  source 1..20: mol_type = other RNA
agtatgtcttccaggactcc

SEQ ID NO: 28164 - RNA, 20 nt, synthetic construct
  source 1..20: mol_type = other RNA
agtcctggaagacatactgg

SEQ ID NO: 28165 - RNA, 20 nt, synthetic construct
  source 1..20: mol_type = other RNA
agttagaccttgttgattga

SEQ ID NO: 28166 - RNA, 20 nt, synthetic construct
  source 1..20: mol_type = other RNA
agttccgctgcccagacaag

SEQ ID NO: 28167 - RNA, 20 nt, synthetic construct
  source 1..20: mol_type = other RNA
agtttgtggtgggtggggag

SEQ ID NO: 28168 - RNA, 20 nt, synthetic construct
  source 1..20: mol_type = other RNA
atactggtccagttccgctg

SEQ ID NO: 28169 - RNA, 20 nt, synthetic construct
  source 1..20: mol_type = other RNA
atgcaggctgagccaagacc

SEQ ID NO: 28170 - RNA, 20 nt, synthetic construct
  source 1..20: mol_type = other RNA
atgtccttgctcaggccctc

SEQ ID NO: 28171 - RNA, 20 nt, synthetic construct
  source 1..20: mol_type = other RNA
atgtcttccaggactcccag

SEQ ID NO: 28172 - RNA, 20 nt, synthetic construct
  source 1..20: mol_type = other RNA
attgactgcgcttttccttg

SEQ ID NO: 28173 - RNA, 20 nt, synthetic construct
  source 1..20: mol_type = other RNA
attttcagtaagtttgtggt

SEQ ID NO: 28174 - RNA, 20 nt, synthetic construct
  source 1..20: mol_type = other RNA
caaacttactgaaaatgtcc

SEQ ID NO: 28175 - RNA, 20 nt, synthetic construct
  source 1..20: mol_type = other RNA
caagacctccccacccacca

SEQ ID NO: 28176 - RNA, 20 nt, synthetic construct
  source 1..20: mol_type = other RNA
caaggaaaagcgcagtcaat

SEQ ID NO: 28177 - RNA, 20 nt, synthetic construct
  source 1..20: mol_type = other RNA
caaggacattttcagtaagt

SEQ ID NO: 28178 - RNA, 20 nt, synthetic construct
  source 1..20: mol_type = other RNA
cacaaacttactgaaaatgt

SEQ ID NO: 28179 - RNA, 20 nt, synthetic construct
  source 1..20: mol_type = other RNA
caccacaaacttactgaaaa

SEQ ID NO: 28180 - RNA, 20 nt, synthetic construct
  source 1..20: mol_type = other RNA
cacccaccacaaacttactg

SEQ ID NO: 28181 - RNA, 20 nt, synthetic construct
  source 1..20: mol_type = other RNA
cagacaaggaaaagcgcagt

SEQ ID NO: 28182 - RNA, 20 nt, synthetic construct
  source 1..20: mol_type = other RNA
cagcggaactggaccagtat

SEQ ID NO: 28183 - RNA, 20 nt, synthetic construct
  source 1..20: mol_type = other RNA
cagctggagggcctgagcaa

SEQ ID NO: 28184 - RNA, 20 nt, synthetic construct
  source 1..20: mol_type = other RNA
cagctgggagtcctggaaga

SEQ ID NO: 28185 - RNA, 20 nt, synthetic construct
  source 1..20: mol_type = other RNA
caggactcccagctggaggg

SEQ ID NO: 28186 - RNA, 20 nt, synthetic construct
  source 1..20: mol_type = other RNA
caggccctccagctgggagt

SEQ ID NO: 28187 - RNA, 20 nt, synthetic construct
  source 1..20: mol_type = other RNA
caggctgagccaagacctcc

SEQ ID NO: 28188 - RNA, 20 nt, synthetic construct
  source 1..20: mol_type = other RNA
cagtaagtttgtggtgggtg

SEQ ID NO: 28189 - RNA, 20 nt, synthetic construct
  source 1..20: mol_type = other RNA
cagtatgtcttccaggactc

SEQ ID NO: 28190 - RNA, 20 nt, synthetic construct
  source 1..20: mol_type = other RNA
cagttagaccttgttgattg

SEQ ID NO: 28191 - RNA, 20 nt, synthetic construct
  source 1..20: mol_type = other RNA
cagttccgctgcccagacaa

SEQ ID NO: 28192 - RNA, 20 nt, synthetic construct
  source 1..20: mol_type = other RNA
catactggtccagttccgct

SEQ ID NO: 28193 - RNA, 20 nt, synthetic construct
  source 1..20: mol_type = other RNA
cattttcagtaagtttgtgg

SEQ ID NO: 28194 - RNA, 20 nt, synthetic construct
  source 1..20: mol_type = other RNA
ccaagacctccccacccacc

SEQ ID NO: 28195 - RNA, 20 nt, synthetic construct
  source 1..20: mol_type = other RNA
ccacaaacttactgaaaatg

SEQ ID NO: 28196 - RNA, 20 nt, synthetic construct
  source 1..20: mol_type = other RNA
ccaccacaaacttactgaaa

SEQ ID NO: 28197 - RNA, 20 nt, synthetic construct
  source 1..20: mol_type = other RNA
ccacccaccacaaacttact

SEQ ID NO: 28198 - RNA, 20 nt, synthetic construct
  source 1..20: mol_type = other RNA
ccagacaaggaaaagcgcag

SEQ ID NO: 28199 - RNA, 20 nt, synthetic construct
  source 1..20: mol_type = other RNA
ccagctggagggcctgagca

SEQ ID NO: 28200 - RNA, 20 nt, synthetic construct
  source 1..20: mol_type = other RNA
ccagctgggagtcctggaag

SEQ ID NO: 28201 - RNA, 20 nt, synthetic construct
  source 1..20: mol_type = other RNA
ccaggactcccagctggagg

SEQ ID NO: 28202 - RNA, 20 nt, synthetic construct
  source 1..20: mol_type = other RNA
ccagtatgtcttccaggact

SEQ ID NO: 28203 - RNA, 20 nt, synthetic construct
  source 1..20: mol_type = other RNA
ccagttccgctgcccagaca

SEQ ID NO: 28204 - RNA, 20 nt, synthetic construct
  source 1..20: mol_type = other RNA
cccaccacaaacttactgaa

SEQ ID NO: 28205 - RNA, 20 nt, synthetic construct
  source 1..20: mol_type = other RNA
cccacccaccacaaacttac

SEQ ID NO: 28206 - RNA, 20 nt, synthetic construct
  source 1..20: mol_type = other RNA
cccagacaaggaaaagcgca

SEQ ID NO: 28207 - RNA, 20 nt, synthetic construct
  source 1..20: mol_type = other RNA
cccagctggagggcctgagc

SEQ ID NO: 28208 - RNA, 20 nt, synthetic construct
  source 1..20: mol_type = other RNA
ccccacccaccacaaactta

SEQ ID NO: 28209 - RNA, 20 nt, synthetic construct
  source 1..20: mol_type = other RNA
ccctccagctgggagtcctg

SEQ ID NO: 28210 - RNA, 20 nt, synthetic construct
  source 1..20: mol_type = other RNA
ccgctgcccagacaaggaaa

SEQ ID NO: 28211 - RNA, 20 nt, synthetic construct
  source 1..20: mol_type = other RNA
cctccagctgggagtcctgg

SEQ ID NO: 28212 - RNA, 20 nt, synthetic construct
  source 1..20: mol_type = other RNA
cctccccacccaccacaaac

SEQ ID NO: 28213 - RNA, 20 nt, synthetic construct
  source 1..20: mol_type = other RNA
cctgagcaaggacattttca

SEQ ID NO: 28214 - RNA, 20 nt, synthetic construct
  source 1..20: mol_type = other RNA
cctggaagacatactggtcc

SEQ ID NO: 28215 - RNA, 20 nt, synthetic construct
  source 1..20: mol_type = other RNA
ccttgctcaggccctccagc

SEQ ID NO: 28216 - RNA, 20 nt, synthetic construct
  source 1..20: mol_type = other RNA
ccttgtctgggcagcggaac

SEQ ID NO: 28217 - RNA, 20 nt, synthetic construct
  source 1..20: mol_type = other RNA
ccttgttgattgactgcgct

SEQ ID NO: 28218 - RNA, 20 nt, synthetic construct
  source 1..20: mol_type = other RNA
cgctgcccagacaaggaaaa

SEQ ID NO: 28219 - RNA, 20 nt, synthetic construct
  source 1..20: mol_type = other RNA
cgcttttccttgtctgggca

SEQ ID NO: 28220 - RNA, 20 nt, synthetic construct
  source 1..20: mol_type = other RNA
cggaactggaccagtatgtc

SEQ ID NO: 28221 - RNA, 20 nt, synthetic construct
  source 1..20: mol_type = other RNA
ctcaggccctccagctggga

SEQ ID NO: 28222 - RNA, 20 nt, synthetic construct
  source 1..20: mol_type = other RNA
ctccagctgggagtcctgga

SEQ ID NO: 28223 - RNA, 20 nt, synthetic construct
  source 1..20: mol_type = other RNA
ctcccagctggagggcctga

SEQ ID NO: 28224 - RNA, 20 nt, synthetic construct
  source 1..20: mol_type = other RNA
ctccccacccaccacaaact

SEQ ID NO: 28225 - RNA, 20 nt, synthetic construct
  source 1..20: mol_type = other RNA
ctgaaaatgtccttgctcag

SEQ ID NO: 28226 - RNA, 20 nt, synthetic construct
  source 1..20: mol_type = other RNA
ctgagcaaggacattttcag

SEQ ID NO: 28227 - RNA, 20 nt, synthetic construct
  source 1..20: mol_type = other RNA
ctgagccaagacctccccac

SEQ ID NO: 28228 - RNA, 20 nt, synthetic construct
  source 1..20: mol_type = other RNA
ctgcccagacaaggaaaagc

SEQ ID NO: 28229 - RNA, 20 nt, synthetic construct
  source 1..20: mol_type = other RNA
ctgcgcttttccttgtctgg

SEQ ID NO: 28230 - RNA, 20 nt, synthetic construct
  source 1..20: mol_type = other RNA
ctggaagacatactggtcca

SEQ ID NO: 28231 - RNA, 20 nt, synthetic construct
  source 1..20: mol_type = other RNA
ctggaccagtatgtcttcca

SEQ ID NO: 28232 - RNA, 20 nt, synthetic construct
  source 1..20: mol_type = other RNA
ctggagggcctgagcaagga

SEQ ID NO: 28233 - RNA, 20 nt, synthetic construct
  source 1..20: mol_type = other RNA
ctgggagtcctggaagacat

SEQ ID NO: 28234 - RNA, 20 nt, synthetic construct
  source 1..20: mol_type = other RNA
ctgggcagcggaactggacc

SEQ ID NO: 28235 - RNA, 20 nt, synthetic construct
  source 1..20: mol_type = other RNA
ctggtccagttccgctgccc

SEQ ID NO: 28236 - RNA, 20 nt, synthetic construct
  source 1..20: mol_type = other RNA
cttactgaaaatgtccttgc

SEQ ID NO: 28237 - RNA, 20 nt, synthetic construct
  source 1..20: mol_type = other RNA
cttccaggactcccagctgg

SEQ ID NO: 28238 - RNA, 20 nt, synthetic construct
  source 1..20: mol_type = other RNA
cttgctcaggccctccagct

SEQ ID NO: 28239 - RNA, 20 nt, synthetic construct
  source 1..20: mol_type = other RNA
cttgtctgggcagcggaact

SEQ ID NO: 28240 - RNA, 20 nt, synthetic construct
  source 1..20: mol_type = other RNA
cttgttgattgactgcgctt

SEQ ID NO: 28241 - RNA, 20 nt, synthetic construct
  source 1..20: mol_type = other RNA
cttttccttgtctgggcagc

SEQ ID NO: 28242 - RNA, 20 nt, synthetic construct
  source 1..20: mol_type = other RNA
gaaaagcgcagtcaatcaac

SEQ ID NO: 28243 - RNA, 20 nt, synthetic construct
  source 1..20: mol_type = other RNA
gaaaatgtccttgctcaggc

SEQ ID NO: 28244 - RNA, 20 nt, synthetic construct
  source 1..20: mol_type = other RNA
gaaatgcaggctgagccaag

SEQ ID NO: 28245 - RNA, 20 nt, synthetic construct
  source 1..20: mol_type = other RNA
gaactggaccagtatgtctt

SEQ ID NO: 28246 - RNA, 20 nt, synthetic construct
  source 1..20: mol_type = other RNA
gaagacatactggtccagtt

SEQ ID NO: 28247 - RNA, 20 nt, synthetic construct
  source 1..20: mol_type = other RNA
gacaaggaaaagcgcagtca

SEQ ID NO: 28248 - RNA, 20 nt, synthetic construct
  source 1..20: mol_type = other RNA
gacatactggtccagttccg

SEQ ID NO: 28249 - RNA, 20 nt, synthetic construct
  source 1..20: mol_type = other RNA
gacattttcagtaagtttgt

SEQ ID NO: 28250 - RNA, 20 nt, synthetic construct
  source 1..20: mol_type = other RNA
gaccagtatgtcttccagga

SEQ ID NO: 28251 - RNA, 20 nt, synthetic construct
  source 1..20: mol_type = other RNA
gacctccccacccaccacaa

SEQ ID NO: 28252 - RNA, 20 nt, synthetic construct
  source 1..20: mol_type = other RNA
gaccttgttgattgactgcg

SEQ ID NO: 28253 - RNA, 20 nt, synthetic construct
  source 1..20: mol_type = other RNA
gactcccagctggagggcct

SEQ ID NO: 28254 - RNA, 20 nt, synthetic construct
  source 1..20: mol_type = other RNA
gactgcgcttttccttgtct

SEQ ID NO: 28255 - RNA, 20 nt, synthetic construct
  source 1..20: mol_type = other RNA
gagcaaggacattttcagta

SEQ ID NO: 28256 - RNA, 20 nt, synthetic construct
  source 1..20: mol_type = other RNA
gagccaagacctccccaccc

SEQ ID NO: 28257 - RNA, 20 nt, synthetic construct
  source 1..20: mol_type = other RNA
gagggcctgagcaaggacat

SEQ ID NO: 28258 - RNA, 20 nt, synthetic construct
  source 1..20: mol_type = other RNA
gagtcctggaagacatactg

SEQ ID NO: 28259 - RNA, 20 nt, synthetic construct
  source 1..20: mol_type = other RNA
gattgactgcgcttttcctt

SEQ ID NO: 28260 - RNA, 20 nt, synthetic construct
  source 1..20: mol_type = other RNA
gcaaggacattttcagtaag

SEQ ID NO: 28261 - RNA, 20 nt, synthetic construct
  source 1..20: mol_type = other RNA
gcagcggaactggaccagta

SEQ ID NO: 28262 - RNA, 20 nt, synthetic construct
  source 1..20: mol_type = other RNA
gcaggctgagccaagacctc

SEQ ID NO: 28263 - RNA, 20 nt, synthetic construct
  source 1..20: mol_type = other RNA
gccaagacctccccacccac

SEQ ID NO: 28264 - RNA, 20 nt, synthetic construct
  source 1..20: mol_type = other RNA
gcccagacaaggaaaagcgc

SEQ ID NO: 28265 - RNA, 20 nt, synthetic construct
  source 1..20: mol_type = other RNA
gccctccagctgggagtcct

SEQ ID NO: 28266 - RNA, 20 nt, synthetic construct
  source 1..20: mol_type = other RNA
gcctgagcaaggacattttc

SEQ ID NO: 28267 - RNA, 20 nt, synthetic construct
  source 1..20: mol_type = other RNA
gcgcagtcaatcaacaaggt

SEQ ID NO: 28268 - RNA, 20 nt, synthetic construct
  source 1..20: mol_type = other RNA
gcgcttttccttgtctgggc

SEQ ID NO: 28269 - RNA, 20 nt, synthetic construct
  source 1..20: mol_type = other RNA
gcggaactggaccagtatgt

SEQ ID NO: 28270 - RNA, 20 nt, synthetic construct
  source 1..20: mol_type = other RNA
gctcaggccctccagctggg

SEQ ID NO: 28271 - RNA, 20 nt, synthetic construct
  source 1..20: mol_type = other RNA
gctgagccaagacctcccca

SEQ ID NO: 28272 - RNA, 20 nt, synthetic construct
  source 1..20: mol_type = other RNA
gctgcccagacaaggaaaag

SEQ ID NO: 28273 - RNA, 20 nt, synthetic construct
  source 1..20: mol_type = other RNA
gctggagggcctgagcaagg

SEQ ID NO: 28274 - RNA, 20 nt, synthetic construct
  source 1..20: mol_type = other RNA
gctgggagtcctggaagaca

SEQ ID NO: 28275 - RNA, 20 nt, synthetic construct
  source 1..20: mol_type = other RNA
gcttttccttgtctgggcag

SEQ ID NO: 28276 - RNA, 20 nt, synthetic construct
  source 1..20: mol_type = other RNA
ggaaaagcgcagtcaatcaa

SEQ ID NO: 28277 - RNA, 20 nt, synthetic construct
  source 1..20: mol_type = other RNA
ggaactggaccagtatgtct

SEQ ID NO: 28278 - RNA, 20 nt, synthetic construct
  source 1..20: mol_type = other RNA
ggaagacatactggtccagt

SEQ ID NO: 28279 - RNA, 20 nt, synthetic construct
  source 1..20: mol_type = other RNA
ggacattttcagtaagtttg

SEQ ID NO: 28280 - RNA, 20 nt, synthetic construct
  source 1..20: mol_type = other RNA
ggaccagtatgtcttccagg

SEQ ID NO: 28281 - RNA, 20 nt, synthetic construct
  source 1..20: mol_type = other RNA
ggactcccagctggagggcc

SEQ ID NO: 28282 - RNA, 20 nt, synthetic construct
  source 1..20: mol_type = other RNA
ggagggcctgagcaaggaca

SEQ ID NO: 28283 - RNA, 20 nt, synthetic construct
  source 1..20: mol_type = other RNA
ggagtcctggaagacatact

SEQ ID NO: 28284 - RNA, 20 nt, synthetic construct
  source 1..20: mol_type = other RNA
ggcagcggaactggaccagt

SEQ ID NO: 28285 - RNA, 20 nt, synthetic construct
  source 1..20: mol_type = other RNA
ggccctccagctgggagtcc

SEQ ID NO: 28286 - RNA, 20 nt, synthetic construct
  source 1..20: mol_type = other RNA
ggcctgagcaaggacatttt

SEQ ID NO: 28287 - RNA, 20 nt, synthetic construct
  source 1..20: mol_type = other RNA
ggctgagccaagacctcccc

SEQ ID NO: 28288 - RNA, 20 nt, synthetic construct
  source 1..20: mol_type = other RNA
gggagtcctggaagacatac

SEQ ID NO: 28289 - RNA, 20 nt, synthetic construct
  source 1..20: mol_type = other RNA
gggcagcggaactggaccag

SEQ ID NO: 28290 - RNA, 20 nt, synthetic construct
  source 1..20: mol_type = other RNA
gggcctgagcaaggacattt

SEQ ID NO: 28291 - RNA, 20 nt, synthetic construct
  source 1..20: mol_type = other RNA
ggggaggtcttggctcagcc

SEQ ID NO: 28292 - RNA, 20 nt, synthetic construct
  source 1..20: mol_type = other RNA
gggtggggaggtcttggctc

SEQ ID NO: 28293 - RNA, 20 nt, synthetic construct
  source 1..20: mol_type = other RNA
ggtccagttccgctgcccag

SEQ ID NO: 28294 - RNA, 20 nt, synthetic construct
  source 1..20: mol_type = other RNA
ggtggggaggtcttggctca

SEQ ID NO: 28295 - RNA, 20 nt, synthetic construct
  source 1..20: mol_type = other RNA
ggtgggtggggaggtcttgg

SEQ ID NO: 28296 - RNA, 20 nt, synthetic construct
  source 1..20: mol_type = other RNA
gtaagtttgtggtgggtggg

SEQ ID NO: 28297 - RNA, 20 nt, synthetic construct
  source 1..20: mol_type = other RNA
gtatgtcttccaggactccc

SEQ ID NO: 28298 - RNA, 20 nt, synthetic construct
  source 1..20: mol_type = other RNA
gtccagttccgctgcccaga

SEQ ID NO: 28299 - RNA, 20 nt, synthetic construct
  source 1..20: mol_type = other RNA
gtcctggaagacatactggt

SEQ ID NO: 28300 - RNA, 20 nt, synthetic construct
  source 1..20: mol_type = other RNA
gtccttgctcaggccctcca

SEQ ID NO: 28301 - RNA, 20 nt, synthetic construct
  source 1..20: mol_type = other RNA
gtctgggcagcggaactgga

SEQ ID NO: 28302 - RNA, 20 nt, synthetic construct
  source 1..20: mol_type = other RNA
gtcttccaggactcccagct

SEQ ID NO: 28303 - RNA, 20 nt, synthetic construct
  source 1..20: mol_type = other RNA
gtggggaggtcttggctcag

SEQ ID NO: 28304 - RNA, 20 nt, synthetic construct
  source 1..20: mol_type = other RNA
gtgggtggggaggtcttggc

SEQ ID NO: 28305 - RNA, 20 nt, synthetic construct
  source 1..20: mol_type = other RNA
gtggtgggtggggaggtctt

SEQ ID NO: 28306 - RNA, 20 nt, synthetic construct
  source 1..20: mol_type = other RNA
gttagaccttgttgattgac

SEQ ID NO: 28307 - RNA, 20 nt, synthetic construct
  source 1..20: mol_type = other RNA
gttccgctgcccagacaagg

SEQ ID NO: 28308 - RNA, 20 nt, synthetic construct
  source 1..20: mol_type = other RNA
gttgattgactgcgcttttc

SEQ ID NO: 28309 - RNA, 20 nt, synthetic construct
  source 1..20: mol_type = other RNA
gtttgtggtgggtggggagg

SEQ ID NO: 28310 - RNA, 20 nt, synthetic construct
  source 1..20: mol_type = other RNA
taagtttgtggtgggtgggg

SEQ ID NO: 28311 - RNA, 20 nt, synthetic construct
  source 1..20: mol_type = other RNA
tactgaaaatgtccttgctc

SEQ ID NO: 28312 - RNA, 20 nt, synthetic construct
  source 1..20: mol_type = other RNA
tactggtccagttccgctgc

SEQ ID NO: 28313 - RNA, 20 nt, synthetic construct
  source 1..20: mol_type = other RNA
tagaccttgttgattgactg

SEQ ID NO: 28314 - RNA, 20 nt, synthetic construct
  source 1..20: mol_type = other RNA
tatgtcttccaggactccca

SEQ ID NO: 28315 - RNA, 20 nt, synthetic construct
  source 1..20: mol_type = other RNA
tcaggccctccagctgggag

SEQ ID NO: 28316 - RNA, 20 nt, synthetic construct
  source 1..20: mol_type = other RNA
tcagtaagtttgtggtgggt

SEQ ID NO: 28317 - RNA, 20 nt, synthetic construct
  source 1..20: mol_type = other RNA
tcagttagaccttgttgatt

SEQ ID NO: 28318 - RNA, 20 nt, synthetic construct
  source 1..20: mol_type = other RNA
tccagctgggagtcctggaa

SEQ ID NO: 28319 - RNA, 20 nt, synthetic construct
  source 1..20: mol_type = other RNA
tccaggactcccagctggag

SEQ ID NO: 28320 - RNA, 20 nt, synthetic construct
  source 1..20: mol_type = other RNA
tccagttccgctgcccagac

SEQ ID NO: 28321 - RNA, 20 nt, synthetic construct
  source 1..20: mol_type = other RNA
tcccagctggagggcctgag

SEQ ID NO: 28322 - RNA, 20 nt, synthetic construct
  source 1..20: mol_type = other RNA
tccccacccaccacaaactt

SEQ ID NO: 28323 - RNA, 20 nt, synthetic construct
  source 1..20: mol_type = other RNA
tccgctgcccagacaaggaa

SEQ ID NO: 28324 - RNA, 20 nt, synthetic construct
  source 1..20: mol_type = other RNA
tcctggaagacatactggtc

SEQ ID NO: 28325 - RNA, 20 nt, synthetic construct
  source 1..20: mol_type = other RNA
tccttgctcaggccctccag

SEQ ID NO: 28326 - RNA, 20 nt, synthetic construct
  source 1..20: mol_type = other RNA
tccttgtctgggcagcggaa

SEQ ID NO: 28327 - RNA, 20 nt, synthetic construct
  source 1..20: mol_type = other RNA
tctgggcagcggaactggac

SEQ ID NO: 28328 - RNA, 20 nt, synthetic construct
  source 1..20: mol_type = other RNA
tcttccaggactcccagctg

SEQ ID NO: 28329 - RNA, 20 nt, synthetic construct
  source 1..20: mol_type = other RNA
tgaaaatgtccttgctcagg

SEQ ID NO: 28330 - RNA, 20 nt, synthetic construct
  source 1..20: mol_type = other RNA
tgactgcgcttttccttgtc

SEQ ID NO: 28331 - RNA, 20 nt, synthetic construct
  source 1..20: mol_type = other RNA
tgagcaaggacattttcagt

SEQ ID NO: 28332 - RNA, 20 nt, synthetic construct
  source 1..20: mol_type = other RNA
tgagccaagacctccccacc

SEQ ID NO: 28333 - RNA, 20 nt, synthetic construct
  source 1..20: mol_type = other RNA
tgattgactgcgcttttcct

SEQ ID NO: 28334 - RNA, 20 nt, synthetic construct
  source 1..20: mol_type = other RNA
tgcaggctgagccaagacct

SEQ ID NO: 28335 - RNA, 20 nt, synthetic construct
  source 1..20: mol_type = other RNA
tgcccagacaaggaaaagcg

SEQ ID NO: 28336 - RNA, 20 nt, synthetic construct
  source 1..20: mol_type = other RNA
tgcgcttttccttgtctggg

SEQ ID NO: 28337 - RNA, 20 nt, synthetic construct
  source 1..20: mol_type = other RNA
tgctcaggccctccagctgg

SEQ ID NO: 28338 - RNA, 20 nt, synthetic construct
  source 1..20: mol_type = other RNA
tggaagacatactggtccag

SEQ ID NO: 28339 - RNA, 20 nt, synthetic construct
  source 1..20: mol_type = other RNA
tggaccagtatgtcttccag

SEQ ID NO: 28340 - RNA, 20 nt, synthetic construct
  source 1..20: mol_type = other RNA
tggagggcctgagcaaggac

SEQ ID NO: 28341 - RNA, 20 nt, synthetic construct
  source 1..20: mol_type = other RNA
tgggagtcctggaagacata

SEQ ID NO: 28342 - RNA, 20 nt, synthetic construct
  source 1..20: mol_type = other RNA
tgggcagcggaactggacca

SEQ ID NO: 28343 - RNA, 20 nt, synthetic construct
  source 1..20: mol_type = other RNA
tggggaggtcttggctcagc

SEQ ID NO: 28344 - RNA, 20 nt, synthetic construct
  source 1..20: mol_type = other RNA
tgggtggggaggtcttggct

SEQ ID NO: 28345 - RNA, 20 nt, synthetic construct
  source 1..20: mol_type = other RNA
tggtccagttccgctgccca

SEQ ID NO: 28346 - RNA, 20 nt, synthetic construct
  source 1..20: mol_type = other RNA
tggtgggtggggaggtcttg

SEQ ID NO: 28347 - RNA, 20 nt, synthetic construct
  source 1..20: mol_type = other RNA
tgtccttgctcaggccctcc

SEQ ID NO: 28348 - RNA, 20 nt, synthetic construct
  source 1..20: mol_type = other RNA
tgtctgggcagcggaactgg

SEQ ID NO: 28349 - RNA, 20 nt, synthetic construct
  source 1..20: mol_type = other RNA
tgtcttccaggactcccagc

SEQ ID NO: 28350 - RNA, 20 nt, synthetic construct
  source 1..20: mol_type = other RNA
tgtggtgggtggggaggtct

SEQ ID NO: 28351 - RNA, 20 nt, synthetic construct
  source 1..20: mol_type = other RNA
tgttgattgactgcgctttt

SEQ ID NO: 28352 - RNA, 20 nt, synthetic construct
  source 1..20: mol_type = other RNA
ttactgaaaatgtccttgct

SEQ ID NO: 28353 - RNA, 20 nt, synthetic construct
  source 1..20: mol_type = other RNA
ttagaccttgttgattgact

SEQ ID NO: 28354 - RNA, 20 nt, synthetic construct
  source 1..20: mol_type = other RNA
ttcagtaagtttgtggtggg

SEQ ID NO: 28355 - RNA, 20 nt, synthetic construct
  source 1..20: mol_type = other RNA
ttccaggactcccagctgga

SEQ ID NO: 28356 - RNA, 20 nt, synthetic construct
  source 1..20: mol_type = other RNA
ttccgctgcccagacaagga

SEQ ID NO: 28357 - RNA, 20 nt, synthetic construct
  source 1..20: mol_type = other RNA
ttccttgtctgggcagcgga

SEQ ID NO: 28358 - RNA, 20 nt, synthetic construct
  source 1..20: mol_type = other RNA
ttgactgcgcttttccttgt

SEQ ID NO: 28359 - RNA, 20 nt, synthetic construct
  source 1..20: mol_type = other RNA
ttgattgactgcgcttttcc

SEQ ID NO: 28360 - RNA, 20 nt, synthetic construct
  source 1..20: mol_type = other RNA
ttgctcaggccctccagctg

SEQ ID NO: 28361 - RNA, 20 nt, synthetic construct
  source 1..20: mol_type = other RNA
ttgtctgggcagcggaactg

SEQ ID NO: 28362 - RNA, 20 nt, synthetic construct
  source 1..20: mol_type = other RNA
ttgtggtgggtggggaggtc

SEQ ID NO: 28363 - RNA, 20 nt, synthetic construct
  source 1..20: mol_type = other RNA
ttgttgattgactgcgcttt

SEQ ID NO: 28364 - RNA, 20 nt, synthetic construct
  source 1..20: mol_type = other RNA
tttcagtaagtttgtggtgg

SEQ ID NO: 28365 - RNA, 20 nt, synthetic construct
  source 1..20: mol_type = other RNA
tttccttgtctgggcagcgg

SEQ ID NO: 28366 - RNA, 20 nt, synthetic construct
  source 1..20: mol_type = other RNA
tttgtggtgggtggggaggt

SEQ ID NO: 28367 - RNA, 20 nt, synthetic construct
  source 1..20: mol_type = other RNA
ttttcagtaagtttgtggtg

SEQ ID NO: 28368 - RNA, 20 nt, synthetic construct
  source 1..20: mol_type = other RNA
ttttccttgtctgggcagcg

SEQ ID NO: 28369 - RNA, 21 nt, synthetic construct
  source 1..21: mol_type = other RNA
aaaagcgcagtcaatcaacaa

SEQ ID NO: 28370 - RNA, 21 nt, synthetic construct
  source 1..21: mol_type = other RNA
aaaatgtccttgctcaggccc

SEQ ID NO: 28371 - RNA, 21 nt, synthetic construct
  source 1..21: mol_type = other RNA
aaacttactgaaaatgtcctt

SEQ ID NO: 28372 - RNA, 21 nt, synthetic construct
  source 1..21: mol_type = other RNA
aaagcgcagtcaatcaacaag

SEQ ID NO: 28373 - RNA, 21 nt, synthetic construct
  source 1..21: mol_type = other RNA
aaatgcaggctgagccaagac

SEQ ID NO: 28374 - RNA, 21 nt, synthetic construct
  source 1..21: mol_type = other RNA
aaatgtccttgctcaggccct

SEQ ID NO: 28375 - RNA, 21 nt, synthetic construct
  source 1..21: mol_type = other RNA
aactggaccagtatgtcttcc

SEQ ID NO: 28376 - RNA, 21 nt, synthetic construct
  source 1..21: mol_type = other RNA
aacttactgaaaatgtccttg

SEQ ID NO: 28377 - RNA, 21 nt, synthetic construct
  source 1..21: mol_type = other RNA
aagacatactggtccagttcc

SEQ ID NO: 28378 - RNA, 21 nt, synthetic construct
  source 1..21: mol_type = other RNA
aagacctccccacccaccaca

SEQ ID NO: 28379 - RNA, 21 nt, synthetic construct
  source 1..21: mol_type = other RNA
aagcgcagtcaatcaacaagg

SEQ ID NO: 28380 - RNA, 21 nt, synthetic construct
  source 1..21: mol_type = other RNA
aaggaaaagcgcagtcaatca

SEQ ID NO: 28381 - RNA, 21 nt, synthetic construct
  source 1..21: mol_type = other RNA
aaggacattttcagtaagttt

SEQ ID NO: 28382 - RNA, 21 nt, synthetic construct
  source 1..21: mol_type = other RNA
aagtttgtggtgggtggggag

SEQ ID NO: 28383 - RNA, 21 nt, synthetic construct
  source 1..21: mol_type = other RNA
aatgcaggctgagccaagacc

SEQ ID NO: 28384 - RNA, 21 nt, synthetic construct
  source 1..21: mol_type = other RNA
aatgtccttgctcaggccctc

SEQ ID NO: 28385 - RNA, 21 nt, synthetic construct
  source 1..21: mol_type = other RNA
acaaacttactgaaaatgtcc

SEQ ID NO: 28386 - RNA, 21 nt, synthetic construct
  source 1..21: mol_type = other RNA
acaaggaaaagcgcagtcaat

SEQ ID NO: 28387 - RNA, 21 nt, synthetic construct
  source 1..21: mol_type = other RNA
acatactggtccagttccgct

SEQ ID NO: 28388 - RNA, 21 nt, synthetic construct
  source 1..21: mol_type = other RNA
acattttcagtaagtttgtgg

SEQ ID NO: 28389 - RNA, 21 nt, synthetic construct
  source 1..21: mol_type = other RNA
accacaaacttactgaaaatg

SEQ ID NO: 28390 - RNA, 21 nt, synthetic construct
  source 1..21: mol_type = other RNA
accagtatgtcttccaggact

SEQ ID NO: 28391 - RNA, 21 nt, synthetic construct
  source 1..21: mol_type = other RNA
acccaccacaaacttactgaa

SEQ ID NO: 28392 - RNA, 21 nt, synthetic construct
  source 1..21: mol_type = other RNA
acctccccacccaccacaaac

SEQ ID NO: 28393 - RNA, 21 nt, synthetic construct
  source 1..21: mol_type = other RNA
accttgttgattgactgcgct

SEQ ID NO: 28394 - RNA, 21 nt, synthetic construct
  source 1..21: mol_type = other RNA
actcccagctggagggcctga

SEQ ID NO: 28395 - RNA, 21 nt, synthetic construct
  source 1..21: mol_type = other RNA
actgaaaatgtccttgctcag

SEQ ID NO: 28396 - RNA, 21 nt, synthetic construct
  source 1..21: mol_type = other RNA
actgcgcttttccttgtctgg

SEQ ID NO: 28397 - RNA, 21 nt, synthetic construct
  source 1..21: mol_type = other RNA
actggaccagtatgtcttcca

SEQ ID NO: 28398 - RNA, 21 nt, synthetic construct
  source 1..21: mol_type = other RNA
actggtccagttccgctgccc

SEQ ID NO: 28399 - RNA, 21 nt, synthetic construct
  source 1..21: mol_type = other RNA
acttactgaaaatgtccttgc

SEQ ID NO: 28400 - RNA, 21 nt, synthetic construct
  source 1..21: mol_type = other RNA
agacaaggaaaagcgcagtca

SEQ ID NO: 28401 - RNA, 21 nt, synthetic construct
  source 1..21: mol_type = other RNA
agacatactggtccagttccg

SEQ ID NO: 28402 - RNA, 21 nt, synthetic construct
  source 1..21: mol_type = other RNA
agacctccccacccaccacaa

SEQ ID NO: 28403 - RNA, 21 nt, synthetic construct
  source 1..21: mol_type = other RNA
agaccttgttgattgactgcg

SEQ ID NO: 28404 - RNA, 21 nt, synthetic construct
  source 1..21: mol_type = other RNA
agcaaggacattttcagtaag

SEQ ID NO: 28405 - RNA, 21 nt, synthetic construct
  source 1..21: mol_type = other RNA
agccaagacctccccacccac

SEQ ID NO: 28406 - RNA, 21 nt, synthetic construct
  source 1..21: mol_type = other RNA
agcgcagtcaatcaacaaggt

SEQ ID NO: 28407 - RNA, 21 nt, synthetic construct
  source 1..21: mol_type = other RNA
agcggaactggaccagtatgt

SEQ ID NO: 28408 - RNA, 21 nt, synthetic construct
  source 1..21: mol_type = other RNA
agctggagggcctgagcaagg

SEQ ID NO: 28409 - RNA, 21 nt, synthetic construct
  source 1..21: mol_type = other RNA
agctgggagtcctggaagaca

SEQ ID NO: 28410 - RNA, 21 nt, synthetic construct
  source 1..21: mol_type = other RNA
aggaaaagcgcagtcaatcaa

SEQ ID NO: 28411 - RNA, 21 nt, synthetic construct
  source 1..21: mol_type = other RNA
aggacattttcagtaagtttg

SEQ ID NO: 28412 - RNA, 21 nt, synthetic construct
  source 1..21: mol_type = other RNA
aggactcccagctggagggcc

SEQ ID NO: 28413 - RNA, 21 nt, synthetic construct
  source 1..21: mol_type = other RNA
aggccctccagctgggagtcc

SEQ ID NO: 28414 - RNA, 21 nt, synthetic construct
  source 1..21: mol_type = other RNA
aggctgagccaagacctcccc

SEQ ID NO: 28415 - RNA, 21 nt, synthetic construct
  source 1..21: mol_type = other RNA
agggcctgagcaaggacattt

SEQ ID NO: 28416 - RNA, 21 nt, synthetic construct
  source 1..21: mol_type = other RNA
agtaagtttgtggtgggtggg

SEQ ID NO: 28417 - RNA, 21 nt, synthetic construct
  source 1..21: mol_type = other RNA
agtatgtcttccaggactccc

SEQ ID NO: 28418 - RNA, 21 nt, synthetic construct
  source 1..21: mol_type = other RNA
agtcctggaagacatactggt

SEQ ID NO: 28419 - RNA, 21 nt, synthetic construct
  source 1..21: mol_type = other RNA
agttagaccttgttgattgac

SEQ ID NO: 28420 - RNA, 21 nt, synthetic construct
  source 1..21: mol_type = other RNA
agttccgctgcccagacaagg

SEQ ID NO: 28421 - RNA, 21 nt, synthetic construct
  source 1..21: mol_type = other RNA
agtttgtggtgggtggggagg

SEQ ID NO: 28422 - RNA, 21 nt, synthetic construct
  source 1..21: mol_type = other RNA
atactggtccagttccgctgc

SEQ ID NO: 28423 - RNA, 21 nt, synthetic construct
  source 1..21: mol_type = other RNA
atgcaggctgagccaagacct

SEQ ID NO: 28424 - RNA, 21 nt, synthetic construct
  source 1..21: mol_type = other RNA
atgtccttgctcaggccctcc

SEQ ID NO: 28425 - RNA, 21 nt, synthetic construct
  source 1..21: mol_type = other RNA
atgtcttccaggactcccagc

SEQ ID NO: 28426 - RNA, 21 nt, synthetic construct
  source 1..21: mol_type = other RNA
attgactgcgcttttccttgt

SEQ ID NO: 28427 - RNA, 21 nt, synthetic construct
  source 1..21: mol_type = other RNA
attttcagtaagtttgtggtg

SEQ ID NO: 28428 - RNA, 21 nt, synthetic construct
  source 1..21: mol_type = other RNA
caaacttactgaaaatgtcct

SEQ ID NO: 28429 - RNA, 21 nt, synthetic construct
  source 1..21: mol_type = other RNA
caagacctccccacccaccac

SEQ ID NO: 28430 - RNA, 21 nt, synthetic construct
  source 1..21: mol_type = other RNA
caaggaaaagcgcagtcaatc

SEQ ID NO: 28431 - RNA, 21 nt, synthetic construct
  source 1..21: mol_type = other RNA
caaggacattttcagtaagtt

SEQ ID NO: 28432 - RNA, 21 nt, synthetic construct
  source 1..21: mol_type = other RNA
cacaaacttactgaaaatgtc

SEQ ID NO: 28433 - RNA, 21 nt, synthetic construct
  source 1..21: mol_type = other RNA
caccacaaacttactgaaaat

SEQ ID NO: 28434 - RNA, 21 nt, synthetic construct
  source 1..21: mol_type = other RNA
cacccaccacaaacttactga

SEQ ID NO: 28435 - RNA, 21 nt, synthetic construct
  source 1..21: mol_type = other RNA
cagacaaggaaaagcgcagtc

SEQ ID NO: 28436 - RNA, 21 nt, synthetic construct
  source 1..21: mol_type = other RNA
cagcggaactggaccagtatg

SEQ ID NO: 28437 - RNA, 21 nt, synthetic construct
  source 1..21: mol_type = other RNA
cagctggagggcctgagcaag

SEQ ID NO: 28438 - RNA, 21 nt, synthetic construct
  source 1..21: mol_type = other RNA
cagctgggagtcctggaagac

SEQ ID NO: 28439 - RNA, 21 nt, synthetic construct
  source 1..21: mol_type = other RNA
caggactcccagctggagggc

SEQ ID NO: 28440 - RNA, 21 nt, synthetic construct
  source 1..21: mol_type = other RNA
caggccctccagctgggagtc

SEQ ID NO: 28441 - RNA, 21 nt, synthetic construct
  source 1..21: mol_type = other RNA
caggctgagccaagacctccc

SEQ ID NO: 28442 - RNA, 21 nt, synthetic construct
  source 1..21: mol_type = other RNA
cagtaagtttgtggtgggtgg

SEQ ID NO: 28443 - RNA, 21 nt, synthetic construct
  source 1..21: mol_type = other RNA
cagtatgtcttccaggactcc

SEQ ID NO: 28444 - RNA, 21 nt, synthetic construct
  source 1..21: mol_type = other RNA
cagttagaccttgttgattga

SEQ ID NO: 28445 - RNA, 21 nt, synthetic construct
  source 1..21: mol_type = other RNA
cagttccgctgcccagacaag

SEQ ID NO: 28446 - RNA, 21 nt, synthetic construct
  source 1..21: mol_type = other RNA
catactggtccagttccgctg

SEQ ID NO: 28447 - RNA, 21 nt, synthetic construct
  source 1..21: mol_type = other RNA
cattttcagtaagtttgtggt

SEQ ID NO: 28448 - RNA, 21 nt, synthetic construct
  source 1..21: mol_type = other RNA
ccaagacctccccacccacca

SEQ ID NO: 28449 - RNA, 21 nt, synthetic construct
  source 1..21: mol_type = other RNA
ccacaaacttactgaaaatgt

SEQ ID NO: 28450 - RNA, 21 nt, synthetic construct
  source 1..21: mol_type = other RNA
ccaccacaaacttactgaaaa

SEQ ID NO: 28451 - RNA, 21 nt, synthetic construct
  source 1..21: mol_type = other RNA
ccacccaccacaaacttactg

SEQ ID NO: 28452 - RNA, 21 nt, synthetic construct
  source 1..21: mol_type = other RNA
ccagacaaggaaaagcgcagt

SEQ ID NO: 28453 - RNA, 21 nt, synthetic construct
  source 1..21: mol_type = other RNA
ccagctggagggcctgagcaa

SEQ ID NO: 28454 - RNA, 21 nt, synthetic construct
  source 1..21: mol_type = other RNA
ccagctgggagtcctggaaga

SEQ ID NO: 28455 - RNA, 21 nt, synthetic construct
  source 1..21: mol_type = other RNA
ccaggactcccagctggaggg

SEQ ID NO: 28456 - RNA, 21 nt, synthetic construct
  source 1..21: mol_type = other RNA
ccagtatgtcttccaggactc

SEQ ID NO: 28457 - RNA, 21 nt, synthetic construct
  source 1..21: mol_type = other RNA
ccagttccgctgcccagacaa

SEQ ID NO: 28458 - RNA, 21 nt, synthetic construct
  source 1..21: mol_type = other RNA
cccaccacaaacttactgaaa

SEQ ID NO: 28459 - RNA, 21 nt, synthetic construct
  source 1..21: mol_type = other RNA
cccacccaccacaaacttact

SEQ ID NO: 28460 - RNA, 21 nt, synthetic construct
  source 1..21: mol_type = other RNA
cccagacaaggaaaagcgcag

SEQ ID NO: 28461 - RNA, 21 nt, synthetic construct
  source 1..21: mol_type = other RNA
cccagctggagggcctgagca

SEQ ID NO: 28462 - RNA, 21 nt, synthetic construct
  source 1..21: mol_type = other RNA
ccccacccaccacaaacttac

SEQ ID NO: 28463 - RNA, 21 nt, synthetic construct
  source 1..21: mol_type = other RNA
ccctccagctgggagtcctgg

SEQ ID NO: 28464 - RNA, 21 nt, synthetic construct
  source 1..21: mol_type = other RNA
ccgctgcccagacaaggaaaa

SEQ ID NO: 28465 - RNA, 21 nt, synthetic construct
  source 1..21: mol_type = other RNA
cctccagctgggagtcctgga

SEQ ID NO: 28466 - RNA, 21 nt, synthetic construct
  source 1..21: mol_type = other RNA
cctccccacccaccacaaact

SEQ ID NO: 28467 - RNA, 21 nt, synthetic construct
  source 1..21: mol_type = other RNA
cctgagcaaggacattttcag

SEQ ID NO: 28468 - RNA, 21 nt, synthetic construct
  source 1..21: mol_type = other RNA
cctggaagacatactggtcca

SEQ ID NO: 28469 - RNA, 21 nt, synthetic construct
  source 1..21: mol_type = other RNA
ccttgctcaggccctccagct

SEQ ID NO: 28470 - RNA, 21 nt, synthetic construct
  source 1..21: mol_type = other RNA
ccttgtctgggcagcggaact

SEQ ID NO: 28471 - RNA, 21 nt, synthetic construct
  source 1..21: mol_type = other RNA
ccttgttgattgactgcgctt

SEQ ID NO: 28472 - RNA, 21 nt, synthetic construct
  source 1..21: mol_type = other RNA
cgctgcccagacaaggaaaag

SEQ ID NO: 28473 - RNA, 21 nt, synthetic construct
  source 1..21: mol_type = other RNA
cgcttttccttgtctgggcag

SEQ ID NO: 28474 - RNA, 21 nt, synthetic construct
  source 1..21: mol_type = other RNA
cggaactggaccagtatgtct

SEQ ID NO: 28475 - RNA, 21 nt, synthetic construct
  source 1..21: mol_type = other RNA
ctcaggccctccagctgggag

SEQ ID NO: 28476 - RNA, 21 nt, synthetic construct
  source 1..21: mol_type = other RNA
ctccagctgggagtcctggaa

SEQ ID NO: 28477 - RNA, 21 nt, synthetic construct
  source 1..21: mol_type = other RNA
ctcccagctggagggcctgag

SEQ ID NO: 28478 - RNA, 21 nt, synthetic construct
  source 1..21: mol_type = other RNA
ctccccacccaccacaaactt

SEQ ID NO: 28479 - RNA, 21 nt, synthetic construct
  source 1..21: mol_type = other RNA
ctgaaaatgtccttgctcagg

SEQ ID NO: 28480 - RNA, 21 nt, synthetic construct
  source 1..21: mol_type = other RNA
ctgagcaaggacattttcagt

SEQ ID NO: 28481 - RNA, 21 nt, synthetic construct
  source 1..21: mol_type = other RNA
ctgagccaagacctccccacc

SEQ ID NO: 28482 - RNA, 21 nt, synthetic construct
  source 1..21: mol_type = other RNA
ctgcccagacaaggaaaagcg

SEQ ID NO: 28483 - RNA, 21 nt, synthetic construct
  source 1..21: mol_type = other RNA
ctgcgcttttccttgtctggg

SEQ ID NO: 28484 - RNA, 21 nt, synthetic construct
  source 1..21: mol_type = other RNA
ctggaagacatactggtccag

SEQ ID NO: 28485 - RNA, 21 nt, synthetic construct
  source 1..21: mol_type = other RNA
ctggaccagtatgtcttccag

SEQ ID NO: 28486 - RNA, 21 nt, synthetic construct
  source 1..21: mol_type = other RNA
ctggagggcctgagcaaggac

SEQ ID NO: 28487 - RNA, 21 nt, synthetic construct
  source 1..21: mol_type = other RNA
ctgggagtcctggaagacata

SEQ ID NO: 28488 - RNA, 21 nt, synthetic construct
  source 1..21: mol_type = other RNA
ctgggcagcggaactggacca

SEQ ID NO: 28489 - RNA, 21 nt, synthetic construct
  source 1..21: mol_type = other RNA
ctggtccagttccgctgccca

SEQ ID NO: 28490 - RNA, 21 nt, synthetic construct
  source 1..21: mol_type = other RNA
cttactgaaaatgtccttgct

SEQ ID NO: 28491 - RNA, 21 nt, synthetic construct
  source 1..21: mol_type = other RNA
cttccaggactcccagctgga

SEQ ID NO: 28492 - RNA, 21 nt, synthetic construct
  source 1..21: mol_type = other RNA
cttgctcaggccctccagctg

SEQ ID NO: 28493 - RNA, 21 nt, synthetic construct
  source 1..21: mol_type = other RNA
cttgtctgggcagcggaactg

SEQ ID NO: 28494 - RNA, 21 nt, synthetic construct
  source 1..21: mol_type = other RNA
cttgttgattgactgcgcttt

SEQ ID NO: 28495 - RNA, 21 nt, synthetic construct
  source 1..21: mol_type = other RNA
cttttccttgtctgggcagcg

SEQ ID NO: 28496 - RNA, 21 nt, synthetic construct
  source 1..21: mol_type = other RNA
gaaaagcgcagtcaatcaaca

SEQ ID NO: 28497 - RNA, 21 nt, synthetic construct
  source 1..21: mol_type = other RNA
gaaaatgtccttgctcaggcc

SEQ ID NO: 28498 - RNA, 21 nt, synthetic construct
  source 1..21: mol_type = other RNA
gaaatgcaggctgagccaaga

SEQ ID NO: 28499 - RNA, 21 nt, synthetic construct
  source 1..21: mol_type = other RNA
gaactggaccagtatgtcttc

SEQ ID NO: 28500 - RNA, 21 nt, synthetic construct
  source 1..21: mol_type = other RNA
gaagacatactggtccagttc

SEQ ID NO: 28501 - RNA, 21 nt, synthetic construct
  source 1..21: mol_type = other RNA
gacaaggaaaagcgcagtcaa

SEQ ID NO: 28502 - RNA, 21 nt, synthetic construct
  source 1..21: mol_type = other RNA
gacatactggtccagttccgc

SEQ ID NO: 28503 - RNA, 21 nt, synthetic construct
  source 1..21: mol_type = other RNA
gacattttcagtaagtttgtg

SEQ ID NO: 28504 - RNA, 21 nt, synthetic construct
  source 1..21: mol_type = other RNA
gaccagtatgtcttccaggac

SEQ ID NO: 28505 - RNA, 21 nt, synthetic construct
  source 1..21: mol_type = other RNA
gacctccccacccaccacaaa

SEQ ID NO: 28506 - RNA, 21 nt, synthetic construct
  source 1..21: mol_type = other RNA
gaccttgttgattgactgcgc

SEQ ID NO: 28507 - RNA, 21 nt, synthetic construct
  source 1..21: mol_type = other RNA
gactcccagctggagggcctg

SEQ ID NO: 28508 - RNA, 21 nt, synthetic construct
  source 1..21: mol_type = other RNA
gactgcgcttttccttgtctg

SEQ ID NO: 28509 - RNA, 21 nt, synthetic construct
  source 1..21: mol_type = other RNA
gagcaaggacattttcagtaa

SEQ ID NO: 28510 - RNA, 21 nt, synthetic construct
  source 1..21: mol_type = other RNA
gagccaagacctccccaccca

SEQ ID NO: 28511 - RNA, 21 nt, synthetic construct
  source 1..21: mol_type = other RNA
gagggcctgagcaaggacatt

SEQ ID NO: 28512 - RNA, 21 nt, synthetic construct
  source 1..21: mol_type = other RNA
gagtcctggaagacatactgg

SEQ ID NO: 28513 - RNA, 21 nt, synthetic construct
  source 1..21: mol_type = other RNA
gattgactgcgcttttccttg

SEQ ID NO: 28514 - RNA, 21 nt, synthetic construct
  source 1..21: mol_type = other RNA
gcaaggacattttcagtaagt

SEQ ID NO: 28515 - RNA, 21 nt, synthetic construct
  source 1..21: mol_type = other RNA
gcagcggaactggaccagtat

SEQ ID NO: 28516 - RNA, 21 nt, synthetic construct
  source 1..21: mol_type = other RNA
gcaggctgagccaagacctcc

SEQ ID NO: 28517 - RNA, 21 nt, synthetic construct
  source 1..21: mol_type = other RNA
gccaagacctccccacccacc

SEQ ID NO: 28518 - RNA, 21 nt, synthetic construct
  source 1..21: mol_type = other RNA
gcccagacaaggaaaagcgca

SEQ ID NO: 28519 - RNA, 21 nt, synthetic construct
  source 1..21: mol_type = other RNA
gccctccagctgggagtcctg

SEQ ID NO: 28520 - RNA, 21 nt, synthetic construct
  source 1..21: mol_type = other RNA
gcctgagcaaggacattttca

SEQ ID NO: 28521 - RNA, 21 nt, synthetic construct
  source 1..21: mol_type = other RNA
gcgcttttccttgtctgggca

SEQ ID NO: 28522 - RNA, 21 nt, synthetic construct
  source 1..21: mol_type = other RNA
gcggaactggaccagtatgtc

SEQ ID NO: 28523 - RNA, 21 nt, synthetic construct
  source 1..21: mol_type = other RNA
gctcaggccctccagctggga

SEQ ID NO: 28524 - RNA, 21 nt, synthetic construct
  source 1..21: mol_type = other RNA
gctgagccaagacctccccac

SEQ ID NO: 28525 - RNA, 21 nt, synthetic construct
  source 1..21: mol_type = other RNA
gctgcccagacaaggaaaagc

SEQ ID NO: 28526 - RNA, 21 nt, synthetic construct
  source 1..21: mol_type = other RNA
gctggagggcctgagcaagga

SEQ ID NO: 28527 - RNA, 21 nt, synthetic construct
  source 1..21: mol_type = other RNA
gctgggagtcctggaagacat

SEQ ID NO: 28528 - RNA, 21 nt, synthetic construct
  source 1..21: mol_type = other RNA
gcttttccttgtctgggcagc

SEQ ID NO: 28529 - RNA, 21 nt, synthetic construct
  source 1..21: mol_type = other RNA
ggaaaagcgcagtcaatcaac

SEQ ID NO: 28530 - RNA, 21 nt, synthetic construct
  source 1..21: mol_type = other RNA
ggaactggaccagtatgtctt

SEQ ID NO: 28531 - RNA, 21 nt, synthetic construct
  source 1..21: mol_type = other RNA
ggaagacatactggtccagtt

SEQ ID NO: 28532 - RNA, 21 nt, synthetic construct
  source 1..21: mol_type = other RNA
ggacattttcagtaagtttgt

SEQ ID NO: 28533 - RNA, 21 nt, synthetic construct
  source 1..21: mol_type = other RNA
ggaccagtatgtcttccagga

SEQ ID NO: 28534 - RNA, 21 nt, synthetic construct
  source 1..21: mol_type = other RNA
ggactcccagctggagggcct

SEQ ID NO: 28535 - RNA, 21 nt, synthetic construct
  source 1..21: mol_type = other RNA
ggagggcctgagcaaggacat

SEQ ID NO: 28536 - RNA, 21 nt, synthetic construct
  source 1..21: mol_type = other RNA
ggagtcctggaagacatactg

SEQ ID NO: 28537 - RNA, 21 nt, synthetic construct
  source 1..21: mol_type = other RNA
ggcagcggaactggaccagta

SEQ ID NO: 28538 - RNA, 21 nt, synthetic construct
  source 1..21: mol_type = other RNA
ggccctccagctgggagtcct

SEQ ID NO: 28539 - RNA, 21 nt, synthetic construct
  source 1..21: mol_type = other RNA
ggcctgagcaaggacattttc

SEQ ID NO: 28540 - RNA, 21 nt, synthetic construct
  source 1..21: mol_type = other RNA
ggctgagccaagacctcccca

SEQ ID NO: 28541 - RNA, 21 nt, synthetic construct
  source 1..21: mol_type = other RNA
gggagtcctggaagacatact

SEQ ID NO: 28542 - RNA, 21 nt, synthetic construct
  source 1..21: mol_type = other RNA
gggcagcggaactggaccagt

SEQ ID NO: 28543 - RNA, 21 nt, synthetic construct
  source 1..21: mol_type = other RNA
gggcctgagcaaggacatttt

SEQ ID NO: 28544 - RNA, 21 nt, synthetic construct
  source 1..21: mol_type = other RNA
gggtggggaggtcttggctca

SEQ ID NO: 28545 - RNA, 21 nt, synthetic construct
  source 1..21: mol_type = other RNA
ggtccagttccgctgcccaga

SEQ ID NO: 28546 - RNA, 21 nt, synthetic construct
  source 1..21: mol_type = other RNA
ggtggggaggtcttggctcag

SEQ ID NO: 28547 - RNA, 21 nt, synthetic construct
  source 1..21: mol_type = other RNA
ggtgggtggggaggtcttggc

SEQ ID NO: 28548 - RNA, 21 nt, synthetic construct
  source 1..21: mol_type = other RNA
gtaagtttgtggtgggtgggg

SEQ ID NO: 28549 - RNA, 21 nt, synthetic construct
  source 1..21: mol_type = other RNA
gtatgtcttccaggactccca

SEQ ID NO: 28550 - RNA, 21 nt, synthetic construct
  source 1..21: mol_type = other RNA
gtccagttccgctgcccagac

SEQ ID NO: 28551 - RNA, 21 nt, synthetic construct
  source 1..21: mol_type = other RNA
gtcctggaagacatactggtc

SEQ ID NO: 28552 - RNA, 21 nt, synthetic construct
  source 1..21: mol_type = other RNA
gtccttgctcaggccctccag

SEQ ID NO: 28553 - RNA, 21 nt, synthetic construct
  source 1..21: mol_type = other RNA
gtctgggcagcggaactggac

SEQ ID NO: 28554 - RNA, 21 nt, synthetic construct
  source 1..21: mol_type = other RNA
gtcttccaggactcccagctg

SEQ ID NO: 28555 - RNA, 21 nt, synthetic construct
  source 1..21: mol_type = other RNA
gtggggaggtcttggctcagc

SEQ ID NO: 28556 - RNA, 21 nt, synthetic construct
  source 1..21: mol_type = other RNA
gtgggtggggaggtcttggct

SEQ ID NO: 28557 - RNA, 21 nt, synthetic construct
  source 1..21: mol_type = other RNA
gtggtgggtggggaggtcttg

SEQ ID NO: 28558 - RNA, 21 nt, synthetic construct
  source 1..21: mol_type = other RNA
gttagaccttgttgattgact

SEQ ID NO: 28559 - RNA, 21 nt, synthetic construct
  source 1..21: mol_type = other RNA
gttccgctgcccagacaagga

SEQ ID NO: 28560 - RNA, 21 nt, synthetic construct
  source 1..21: mol_type = other RNA
gttgattgactgcgcttttcc

SEQ ID NO: 28561 - RNA, 21 nt, synthetic construct
  source 1..21: mol_type = other RNA
gtttgtggtgggtggggaggt

SEQ ID NO: 28562 - RNA, 21 nt, synthetic construct
  source 1..21: mol_type = other RNA
taagtttgtggtgggtgggga

SEQ ID NO: 28563 - RNA, 21 nt, synthetic construct
  source 1..21: mol_type = other RNA
tactgaaaatgtccttgctca

SEQ ID NO: 28564 - RNA, 21 nt, synthetic construct
  source 1..21: mol_type = other RNA
tactggtccagttccgctgcc

SEQ ID NO: 28565 - RNA, 21 nt, synthetic construct
  source 1..21: mol_type = other RNA
tagaccttgttgattgactgc

SEQ ID NO: 28566 - RNA, 21 nt, synthetic construct
  source 1..21: mol_type = other RNA
tatgtcttccaggactcccag

SEQ ID NO: 28567 - RNA, 21 nt, synthetic construct
  source 1..21: mol_type = other RNA
tcaggccctccagctgggagt

SEQ ID NO: 28568 - RNA, 21 nt, synthetic construct
  source 1..21: mol_type = other RNA
tcagtaagtttgtggtgggtg

SEQ ID NO: 28569 - RNA, 21 nt, synthetic construct
  source 1..21: mol_type = other RNA
tcagttagaccttgttgattg

SEQ ID NO: 28570 - RNA, 21 nt, synthetic construct
  source 1..21: mol_type = other RNA
tccagctgggagtcctggaag

SEQ ID NO: 28571 - RNA, 21 nt, synthetic construct
  source 1..21: mol_type = other RNA
tccaggactcccagctggagg

SEQ ID NO: 28572 - RNA, 21 nt, synthetic construct
  source 1..21: mol_type = other RNA
tccagttccgctgcccagaca

SEQ ID NO: 28573 - RNA, 21 nt, synthetic construct
  source 1..21: mol_type = other RNA
tcccagctggagggcctgagc

SEQ ID NO: 28574 - RNA, 21 nt, synthetic construct
  source 1..21: mol_type = other RNA
tccccacccaccacaaactta

SEQ ID NO: 28575 - RNA, 21 nt, synthetic construct
  source 1..21: mol_type = other RNA
tccgctgcccagacaaggaaa

SEQ ID NO: 28576 - RNA, 21 nt, synthetic construct
  source 1..21: mol_type = other RNA
tcctggaagacatactggtcc

SEQ ID NO: 28577 - RNA, 21 nt, synthetic construct
  source 1..21: mol_type = other RNA
tccttgctcaggccctccagc

SEQ ID NO: 28578 - RNA, 21 nt, synthetic construct
  source 1..21: mol_type = other RNA
tccttgtctgggcagcggaac

SEQ ID NO: 28579 - RNA, 21 nt, synthetic construct
  source 1..21: mol_type = other RNA
tctgggcagcggaactggacc

SEQ ID NO: 28580 - RNA, 21 nt, synthetic construct
  source 1..21: mol_type = other RNA
tcttccaggactcccagctgg

SEQ ID NO: 28581 - RNA, 21 nt, synthetic construct
  source 1..21: mol_type = other RNA
tgaaaatgtccttgctcaggc

SEQ ID NO: 28582 - RNA, 21 nt, synthetic construct
  source 1..21: mol_type = other RNA
tgactgcgcttttccttgtct

SEQ ID NO: 28583 - RNA, 21 nt, synthetic construct
  source 1..21: mol_type = other RNA
tgagcaaggacattttcagta

SEQ ID NO: 28584 - RNA, 21 nt, synthetic construct
  source 1..21: mol_type = other RNA
tgagccaagacctccccaccc

SEQ ID NO: 28585 - RNA, 21 nt, synthetic construct
  source 1..21: mol_type = other RNA
tgattgactgcgcttttcctt

SEQ ID NO: 28586 - RNA, 21 nt, synthetic construct
  source 1..21: mol_type = other RNA
tgcaggctgagccaagacctc

SEQ ID NO: 28587 - RNA, 21 nt, synthetic construct
  source 1..21: mol_type = other RNA
tgcccagacaaggaaaagcgc

SEQ ID NO: 28588 - RNA, 21 nt, synthetic construct
  source 1..21: mol_type = other RNA
tgcgcttttccttgtctgggc

SEQ ID NO: 28589 - RNA, 21 nt, synthetic construct
  source 1..21: mol_type = other RNA
tgctcaggccctccagctggg

SEQ ID NO: 28590 - RNA, 21 nt, synthetic construct
  source 1..21: mol_type = other RNA
tggaagacatactggtccagt

SEQ ID NO: 28591 - RNA, 21 nt, synthetic construct
  source 1..21: mol_type = other RNA
tggaccagtatgtcttccagg

SEQ ID NO: 28592 - RNA, 21 nt, synthetic construct
  source 1..21: mol_type = other RNA
tggagggcctgagcaaggaca

SEQ ID NO: 28593 - RNA, 21 nt, synthetic construct
  source 1..21: mol_type = other RNA
tgggagtcctggaagacatac

SEQ ID NO: 28594 - RNA, 21 nt, synthetic construct
  source 1..21: mol_type = other RNA
tgggcagcggaactggaccag

SEQ ID NO: 28595 - RNA, 21 nt, synthetic construct
  source 1..21: mol_type = other RNA
tggggaggtcttggctcagcc

SEQ ID NO: 28596 - RNA, 21 nt, synthetic construct
  source 1..21: mol_type = other RNA
tgggtggggaggtcttggctc

SEQ ID NO: 28597 - RNA, 21 nt, synthetic construct
  source 1..21: mol_type = other RNA
tggtccagttccgctgcccag

SEQ ID NO: 28598 - RNA, 21 nt, synthetic construct
  source 1..21: mol_type = other RNA
tggtgggtggggaggtcttgg

SEQ ID NO: 28599 - RNA, 21 nt, synthetic construct
  source 1..21: mol_type = other RNA
tgtccttgctcaggccctcca

SEQ ID NO: 28600 - RNA, 21 nt, synthetic construct
  source 1..21: mol_type = other RNA
tgtctgggcagcggaactgga

SEQ ID NO: 28601 - RNA, 21 nt, synthetic construct
  source 1..21: mol_type = other RNA
tgtcttccaggactcccagct

SEQ ID NO: 28602 - RNA, 21 nt, synthetic construct
  source 1..21: mol_type = other RNA
tgtggtgggtggggaggtctt

SEQ ID NO: 28603 - RNA, 21 nt, synthetic construct
  source 1..21: mol_type = other RNA
tgttgattgactgcgcttttc

SEQ ID NO: 28604 - RNA, 21 nt, synthetic construct
  source 1..21: mol_type = other RNA
ttactgaaaatgtccttgctc

SEQ ID NO: 28605 - RNA, 21 nt, synthetic construct
  source 1..21: mol_type = other RNA
ttagaccttgttgattgactg

SEQ ID NO: 28606 - RNA, 21 nt, synthetic construct
  source 1..21: mol_type = other RNA
ttcagtaagtttgtggtgggt

SEQ ID NO: 28607 - RNA, 21 nt, synthetic construct
  source 1..21: mol_type = other RNA
ttccaggactcccagctggag

SEQ ID NO: 28608 - RNA, 21 nt, synthetic construct
  source 1..21: mol_type = other RNA
ttccgctgcccagacaaggaa

SEQ ID NO: 28609 - RNA, 21 nt, synthetic construct
  source 1..21: mol_type = other RNA
ttccttgtctgggcagcggaa

SEQ ID NO: 28610 - RNA, 21 nt, synthetic construct
  source 1..21: mol_type = other RNA
ttgactgcgcttttccttgtc

SEQ ID NO: 28611 - RNA, 21 nt, synthetic construct
  source 1..21: mol_type = other RNA
ttgattgactgcgcttttcct

SEQ ID NO: 28612 - RNA, 21 nt, synthetic construct
  source 1..21: mol_type = other RNA
ttgctcaggccctccagctgg

SEQ ID NO: 28613 - RNA, 21 nt, synthetic construct
  source 1..21: mol_type = other RNA
ttgtctgggcagcggaactgg

SEQ ID NO: 28614 - RNA, 21 nt, synthetic construct
  source 1..21: mol_type = other RNA
ttgtggtgggtggggaggtct

SEQ ID NO: 28615 - RNA, 21 nt, synthetic construct
  source 1..21: mol_type = other RNA
ttgttgattgactgcgctttt

SEQ ID NO: 28616 - RNA, 21 nt, synthetic construct
  source 1..21: mol_type = other RNA
tttcagtaagtttgtggtggg

SEQ ID NO: 28617 - RNA, 21 nt, synthetic construct
  source 1..21: mol_type = other RNA
tttccttgtctgggcagcgga

SEQ ID NO: 28618 - RNA, 21 nt, synthetic construct
  source 1..21: mol_type = other RNA
tttgtggtgggtggggaggtc

SEQ ID NO: 28619 - RNA, 21 nt, synthetic construct
  source 1..21: mol_type = other RNA
ttttcagtaagtttgtggtgg

SEQ ID NO: 28620 - RNA, 21 nt, synthetic construct
  source 1..21: mol_type = other RNA
ttttccttgtctgggcagcgg

SEQ ID NO: 28621 - RNA, 22 nt, synthetic construct
  source 1..22: mol_type = other RNA
aaaagcgcagtcaatcaacaag

SEQ ID NO: 28622 - RNA, 22 nt, synthetic construct
  source 1..22: mol_type = other RNA
aaaatgtccttgctcaggccct

SEQ ID NO: 28623 - RNA, 22 nt, synthetic construct
  source 1..22: mol_type = other RNA
aaacttactgaaaatgtccttg

SEQ ID NO: 28624 - RNA, 22 nt, synthetic construct
  source 1..22: mol_type = other RNA
aaagcgcagtcaatcaacaagg

SEQ ID NO: 28625 - RNA, 22 nt, synthetic construct
  source 1..22: mol_type = other RNA
aaatgcaggctgagccaagacc

SEQ ID NO: 28626 - RNA, 22 nt, synthetic construct
  source 1..22: mol_type = other RNA
aaatgtccttgctcaggccctc

SEQ ID NO: 28627 - RNA, 22 nt, synthetic construct
  source 1..22: mol_type = other RNA
aactggaccagtatgtcttcca

SEQ ID NO: 28628 - RNA, 22 nt, synthetic construct
  source 1..22: mol_type = other RNA
aacttactgaaaatgtccttgc

SEQ ID NO: 28629 - RNA, 22 nt, synthetic construct
  source 1..22: mol_type = other RNA
aagacatactggtccagttccg

SEQ ID NO: 28630 - RNA, 22 nt, synthetic construct
  source 1..22: mol_type = other RNA
aagacctccccacccaccacaa

SEQ ID NO: 28631 - RNA, 22 nt, synthetic construct
  source 1..22: mol_type = other RNA
aagcgcagtcaatcaacaaggt

SEQ ID NO: 28632 - RNA, 22 nt, synthetic construct
  source 1..22: mol_type = other RNA
aaggaaaagcgcagtcaatcaa

SEQ ID NO: 28633 - RNA, 22 nt, synthetic construct
  source 1..22: mol_type = other RNA
aaggacattttcagtaagtttg

SEQ ID NO: 28634 - RNA, 22 nt, synthetic construct
  source 1..22: mol_type = other RNA
aagtttgtggtgggtggggagg

SEQ ID NO: 28635 - RNA, 22 nt, synthetic construct
  source 1..22: mol_type = other RNA
aatgcaggctgagccaagacct

SEQ ID NO: 28636 - RNA, 22 nt, synthetic construct
  source 1..22: mol_type = other RNA
aatgtccttgctcaggccctcc

SEQ ID NO: 28637 - RNA, 22 nt, synthetic construct
  source 1..22: mol_type = other RNA
acaaacttactgaaaatgtcct

SEQ ID NO: 28638 - RNA, 22 nt, synthetic construct
  source 1..22: mol_type = other RNA
acaaggaaaagcgcagtcaatc

SEQ ID NO: 28639 - RNA, 22 nt, synthetic construct
  source 1..22: mol_type = other RNA
acatactggtccagttccgctg

SEQ ID NO: 28640 - RNA, 22 nt, synthetic construct
  source 1..22: mol_type = other RNA
acattttcagtaagtttgtggt

SEQ ID NO: 28641 - RNA, 22 nt, synthetic construct
  source 1..22: mol_type = other RNA
accacaaacttactgaaaatgt

SEQ ID NO: 28642 - RNA, 22 nt, synthetic construct
  source 1..22: mol_type = other RNA
accagtatgtcttccaggactc

SEQ ID NO: 28643 - RNA, 22 nt, synthetic construct
  source 1..22: mol_type = other RNA
acccaccacaaacttactgaaa

SEQ ID NO: 28644 - RNA, 22 nt, synthetic construct
  source 1..22: mol_type = other RNA
acctccccacccaccacaaact

SEQ ID NO: 28645 - RNA, 22 nt, synthetic construct
  source 1..22: mol_type = other RNA
accttgttgattgactgcgctt

SEQ ID NO: 28646 - RNA, 22 nt, synthetic construct
  source 1..22: mol_type = other RNA
actcccagctggagggcctgag

SEQ ID NO: 28647 - RNA, 22 nt, synthetic construct
  source 1..22: mol_type = other RNA
actgaaaatgtccttgctcagg

SEQ ID NO: 28648 - RNA, 22 nt, synthetic construct
  source 1..22: mol_type = other RNA
actgcgcttttccttgtctggg

SEQ ID NO: 28649 - RNA, 22 nt, synthetic construct
  source 1..22: mol_type = other RNA
actggaccagtatgtcttccag

SEQ ID NO: 28650 - RNA, 22 nt, synthetic construct
  source 1..22: mol_type = other RNA
actggtccagttccgctgccca

SEQ ID NO: 28651 - RNA, 22 nt, synthetic construct
  source 1..22: mol_type = other RNA
acttactgaaaatgtccttgct

SEQ ID NO: 28652 - RNA, 22 nt, synthetic construct
  source 1..22: mol_type = other RNA
agacaaggaaaagcgcagtcaa

SEQ ID NO: 28653 - RNA, 22 nt, synthetic construct
  source 1..22: mol_type = other RNA
agacatactggtccagttccgc

SEQ ID NO: 28654 - RNA, 22 nt, synthetic construct
  source 1..22: mol_type = other RNA
agacctccccacccaccacaaa

SEQ ID NO: 28655 - RNA, 22 nt, synthetic construct
  source 1..22: mol_type = other RNA
agaccttgttgattgactgcgc

SEQ ID NO: 28656 - RNA, 22 nt, synthetic construct
  source 1..22: mol_type = other RNA
agcaaggacattttcagtaagt

SEQ ID NO: 28657 - RNA, 22 nt, synthetic construct
  source 1..22: mol_type = other RNA
agccaagacctccccacccacc

SEQ ID NO: 28658 - RNA, 22 nt, synthetic construct
  source 1..22: mol_type = other RNA
agcggaactggaccagtatgtc

SEQ ID NO: 28659 - RNA, 22 nt, synthetic construct
  source 1..22: mol_type = other RNA
agctggagggcctgagcaagga

SEQ ID NO: 28660 - RNA, 22 nt, synthetic construct
  source 1..22: mol_type = other RNA
agctgggagtcctggaagacat

SEQ ID NO: 28661 - RNA, 22 nt, synthetic construct
  source 1..22: mol_type = other RNA
aggaaaagcgcagtcaatcaac

SEQ ID NO: 28662 - RNA, 22 nt, synthetic construct
  source 1..22: mol_type = other RNA
aggacattttcagtaagtttgt

SEQ ID NO: 28663 - RNA, 22 nt, synthetic construct
  source 1..22: mol_type = other RNA
aggactcccagctggagggcct

SEQ ID NO: 28664 - RNA, 22 nt, synthetic construct
  source 1..22: mol_type = other RNA
aggccctccagctgggagtcct

SEQ ID NO: 28665 - RNA, 22 nt, synthetic construct
  source 1..22: mol_type = other RNA
aggctgagccaagacctcccca

SEQ ID NO: 28666 - RNA, 22 nt, synthetic construct
  source 1..22: mol_type = other RNA
agggcctgagcaaggacatttt

SEQ ID NO: 28667 - RNA, 22 nt, synthetic construct
  source 1..22: mol_type = other RNA
agtaagtttgtggtgggtgggg

SEQ ID NO: 28668 - RNA, 22 nt, synthetic construct
  source 1..22: mol_type = other RNA
agtatgtcttccaggactccca

SEQ ID NO: 28669 - RNA, 22 nt, synthetic construct
  source 1..22: mol_type = other RNA
agtcctggaagacatactggtc

SEQ ID NO: 28670 - RNA, 22 nt, synthetic construct
  source 1..22: mol_type = other RNA
agttagaccttgttgattgact

SEQ ID NO: 28671 - RNA, 22 nt, synthetic construct
  source 1..22: mol_type = other RNA
agttccgctgcccagacaagga

SEQ ID NO: 28672 - RNA, 22 nt, synthetic construct
  source 1..22: mol_type = other RNA
agtttgtggtgggtggggaggt

SEQ ID NO: 28673 - RNA, 22 nt, synthetic construct
  source 1..22: mol_type = other RNA
atactggtccagttccgctgcc

SEQ ID NO: 28674 - RNA, 22 nt, synthetic construct
  source 1..22: mol_type = other RNA
atgcaggctgagccaagacctc

SEQ ID NO: 28675 - RNA, 22 nt, synthetic construct
  source 1..22: mol_type = other RNA
atgtccttgctcaggccctcca

SEQ ID NO: 28676 - RNA, 22 nt, synthetic construct
  source 1..22: mol_type = other RNA
atgtcttccaggactcccagct

SEQ ID NO: 28677 - RNA, 22 nt, synthetic construct
  source 1..22: mol_type = other RNA
attgactgcgcttttccttgtc

SEQ ID NO: 28678 - RNA, 22 nt, synthetic construct
  source 1..22: mol_type = other RNA
attttcagtaagtttgtggtgg

SEQ ID NO: 28679 - RNA, 22 nt, synthetic construct
  source 1..22: mol_type = other RNA
caaacttactgaaaatgtcctt

SEQ ID NO: 28680 - RNA, 22 nt, synthetic construct
  source 1..22: mol_type = other RNA
caagacctccccacccaccaca

SEQ ID NO: 28681 - RNA, 22 nt, synthetic construct
  source 1..22: mol_type = other RNA
caaggaaaagcgcagtcaatca

SEQ ID NO: 28682 - RNA, 22 nt, synthetic construct
  source 1..22: mol_type = other RNA
caaggacattttcagtaagttt

SEQ ID NO: 28683 - RNA, 22 nt, synthetic construct
  source 1..22: mol_type = other RNA
cacaaacttactgaaaatgtcc

SEQ ID NO: 28684 - RNA, 22 nt, synthetic construct
  source 1..22: mol_type = other RNA
caccacaaacttactgaaaatg

SEQ ID NO: 28685 - RNA, 22 nt, synthetic construct
  source 1..22: mol_type = other RNA
cacccaccacaaacttactgaa

SEQ ID NO: 28686 - RNA, 22 nt, synthetic construct
  source 1..22: mol_type = other RNA
cagacaaggaaaagcgcagtca

SEQ ID NO: 28687 - RNA, 22 nt, synthetic construct
  source 1..22: mol_type = other RNA
cagcggaactggaccagtatgt

SEQ ID NO: 28688 - RNA, 22 nt, synthetic construct
  source 1..22: mol_type = other RNA
cagctggagggcctgagcaagg

SEQ ID NO: 28689 - RNA, 22 nt, synthetic construct
  source 1..22: mol_type = other RNA
cagctgggagtcctggaagaca

SEQ ID NO: 28690 - RNA, 22 nt, synthetic construct
  source 1..22: mol_type = other RNA
caggactcccagctggagggcc

SEQ ID NO: 28691 - RNA, 22 nt, synthetic construct
  source 1..22: mol_type = other RNA
caggccctccagctgggagtcc

SEQ ID NO: 28692 - RNA, 22 nt, synthetic construct
  source 1..22: mol_type = other RNA
caggctgagccaagacctcccc

SEQ ID NO: 28693 - RNA, 22 nt, synthetic construct
  source 1..22: mol_type = other RNA
cagtaagtttgtggtgggtggg

SEQ ID NO: 28694 - RNA, 22 nt, synthetic construct
  source 1..22: mol_type = other RNA
cagtatgtcttccaggactccc

SEQ ID NO: 28695 - RNA, 22 nt, synthetic construct
  source 1..22: mol_type = other RNA
cagttagaccttgttgattgac

SEQ ID NO: 28696 - RNA, 22 nt, synthetic construct
  source 1..22: mol_type = other RNA
cagttccgctgcccagacaagg

SEQ ID NO: 28697 - RNA, 22 nt, synthetic construct
  source 1..22: mol_type = other RNA
catactggtccagttccgctgc

SEQ ID NO: 28698 - RNA, 22 nt, synthetic construct
  source 1..22: mol_type = other RNA
cattttcagtaagtttgtggtg

SEQ ID NO: 28699 - RNA, 22 nt, synthetic construct
  source 1..22: mol_type = other RNA
ccaagacctccccacccaccac

SEQ ID NO: 28700 - RNA, 22 nt, synthetic construct
  source 1..22: mol_type = other RNA
ccacaaacttactgaaaatgtc

SEQ ID NO: 28701 - RNA, 22 nt, synthetic construct
  source 1..22: mol_type = other RNA
ccaccacaaacttactgaaaat

SEQ ID NO: 28702 - RNA, 22 nt, synthetic construct
  source 1..22: mol_type = other RNA
ccacccaccacaaacttactga

SEQ ID NO: 28703 - RNA, 22 nt, synthetic construct
  source 1..22: mol_type = other RNA
ccagacaaggaaaagcgcagtc

SEQ ID NO: 28704 - RNA, 22 nt, synthetic construct
  source 1..22: mol_type = other RNA
ccagctggagggcctgagcaag

SEQ ID NO: 28705 - RNA, 22 nt, synthetic construct
  source 1..22: mol_type = other RNA
ccagctgggagtcctggaagac

SEQ ID NO: 28706 - RNA, 22 nt, synthetic construct
  source 1..22: mol_type = other RNA
ccaggactcccagctggagggc

SEQ ID NO: 28707 - RNA, 22 nt, synthetic construct
  source 1..22: mol_type = other RNA
ccagtatgtcttccaggactcc

SEQ ID NO: 28708 - RNA, 22 nt, synthetic construct
  source 1..22: mol_type = other RNA
ccagttccgctgcccagacaag

SEQ ID NO: 28709 - RNA, 22 nt, synthetic construct
  source 1..22: mol_type = other RNA
cccaccacaaacttactgaaaa

SEQ ID NO: 28710 - RNA, 22 nt, synthetic construct
  source 1..22: mol_type = other RNA
cccacccaccacaaacttactg

SEQ ID NO: 28711 - RNA, 22 nt, synthetic construct
  source 1..22: mol_type = other RNA
cccagacaaggaaaagcgcagt

SEQ ID NO: 28712 - RNA, 22 nt, synthetic construct
  source 1..22: mol_type = other RNA
cccagctggagggcctgagcaa

SEQ ID NO: 28713 - RNA, 22 nt, synthetic construct
  source 1..22: mol_type = other RNA
ccccacccaccacaaacttact

SEQ ID NO: 28714 - RNA, 22 nt, synthetic construct
  source 1..22: mol_type = other RNA
ccctccagctgggagtcctgga

SEQ ID NO: 28715 - RNA, 22 nt, synthetic construct
  source 1..22: mol_type = other RNA
ccgctgcccagacaaggaaaag

SEQ ID NO: 28716 - RNA, 22 nt, synthetic construct
  source 1..22: mol_type = other RNA
cctccagctgggagtcctggaa

SEQ ID NO: 28717 - RNA, 22 nt, synthetic construct
  source 1..22: mol_type = other RNA
cctccccacccaccacaaactt

SEQ ID NO: 28718 - RNA, 22 nt, synthetic construct
  source 1..22: mol_type = other RNA
cctgagcaaggacattttcagt

SEQ ID NO: 28719 - RNA, 22 nt, synthetic construct
  source 1..22: mol_type = other RNA
cctggaagacatactggtccag

SEQ ID NO: 28720 - RNA, 22 nt, synthetic construct
  source 1..22: mol_type = other RNA
ccttgctcaggccctccagctg

SEQ ID NO: 28721 - RNA, 22 nt, synthetic construct
  source 1..22: mol_type = other RNA
ccttgtctgggcagcggaactg

SEQ ID NO: 28722 - RNA, 22 nt, synthetic construct
  source 1..22: mol_type = other RNA
ccttgttgattgactgcgcttt

SEQ ID NO: 28723 - RNA, 22 nt, synthetic construct
  source 1..22: mol_type = other RNA
cgctgcccagacaaggaaaagc

SEQ ID NO: 28724 - RNA, 22 nt, synthetic construct
  source 1..22: mol_type = other RNA
cgcttttccttgtctgggcagc

SEQ ID NO: 28725 - RNA, 22 nt, synthetic construct
  source 1..22: mol_type = other RNA
cggaactggaccagtatgtctt

SEQ ID NO: 28726 - RNA, 22 nt, synthetic construct
  source 1..22: mol_type = other RNA
ctcaggccctccagctgggagt

SEQ ID NO: 28727 - RNA, 22 nt, synthetic construct
  source 1..22: mol_type = other RNA
ctccagctgggagtcctggaag

SEQ ID NO: 28728 - RNA, 22 nt, synthetic construct
  source 1..22: mol_type = other RNA
ctcccagctggagggcctgagc

SEQ ID NO: 28729 - RNA, 22 nt, synthetic construct
  source 1..22: mol_type = other RNA
ctccccacccaccacaaactta

SEQ ID NO: 28730 - RNA, 22 nt, synthetic construct
  source 1..22: mol_type = other RNA
ctgaaaatgtccttgctcaggc

SEQ ID NO: 28731 - RNA, 22 nt, synthetic construct
  source 1..22: mol_type = other RNA
ctgagcaaggacattttcagta

SEQ ID NO: 28732 - RNA, 22 nt, synthetic construct
  source 1..22: mol_type = other RNA
ctgagccaagacctccccaccc

SEQ ID NO: 28733 - RNA, 22 nt, synthetic construct
  source 1..22: mol_type = other RNA
ctgcccagacaaggaaaagcgc

SEQ ID NO: 28734 - RNA, 22 nt, synthetic construct
  source 1..22: mol_type = other RNA
ctgcgcttttccttgtctgggc

SEQ ID NO: 28735 - RNA, 22 nt, synthetic construct
  source 1..22: mol_type = other RNA
ctggaagacatactggtccagt

SEQ ID NO: 28736 - RNA, 22 nt, synthetic construct
  source 1..22: mol_type = other RNA
ctggaccagtatgtcttccagg

SEQ ID NO: 28737 - RNA, 22 nt, synthetic construct
  source 1..22: mol_type = other RNA
ctggagggcctgagcaaggaca

SEQ ID NO: 28738 - RNA, 22 nt, synthetic construct
  source 1..22: mol_type = other RNA
ctgggagtcctggaagacatac

SEQ ID NO: 28739 - RNA, 22 nt, synthetic construct
  source 1..22: mol_type = other RNA
ctgggcagcggaactggaccag

SEQ ID NO: 28740 - RNA, 22 nt, synthetic construct
  source 1..22: mol_type = other RNA
ctggtccagttccgctgcccag

SEQ ID NO: 28741 - RNA, 22 nt, synthetic construct
  source 1..22: mol_type = other RNA
cttactgaaaatgtccttgctc

SEQ ID NO: 28742 - RNA, 22 nt, synthetic construct
  source 1..22: mol_type = other RNA
cttccaggactcccagctggag

SEQ ID NO: 28743 - RNA, 22 nt, synthetic construct
  source 1..22: mol_type = other RNA
cttgctcaggccctccagctgg

SEQ ID NO: 28744 - RNA, 22 nt, synthetic construct
  source 1..22: mol_type = other RNA
cttgtctgggcagcggaactgg

SEQ ID NO: 28745 - RNA, 22 nt, synthetic construct
  source 1..22: mol_type = other RNA
cttgttgattgactgcgctttt

SEQ ID NO: 28746 - RNA, 22 nt, synthetic construct
  source 1..22: mol_type = other RNA
cttttccttgtctgggcagcgg

SEQ ID NO: 28747 - RNA, 22 nt, synthetic construct
  source 1..22: mol_type = other RNA
gaaaagcgcagtcaatcaacaa

SEQ ID NO: 28748 - RNA, 22 nt, synthetic construct
  source 1..22: mol_type = other RNA
gaaaatgtccttgctcaggccc

SEQ ID NO: 28749 - RNA, 22 nt, synthetic construct
  source 1..22: mol_type = other RNA
gaaatgcaggctgagccaagac

SEQ ID NO: 28750 - RNA, 22 nt, synthetic construct
  source 1..22: mol_type = other RNA
gaactggaccagtatgtcttcc

SEQ ID NO: 28751 - RNA, 22 nt, synthetic construct
  source 1..22: mol_type = other RNA
gaagacatactggtccagttcc

SEQ ID NO: 28752 - RNA, 22 nt, synthetic construct
  source 1..22: mol_type = other RNA
gacaaggaaaagcgcagtcaat

SEQ ID NO: 28753 - RNA, 22 nt, synthetic construct
  source 1..22: mol_type = other RNA
gacatactggtccagttccgct

SEQ ID NO: 28754 - RNA, 22 nt, synthetic construct
  source 1..22: mol_type = other RNA
gacattttcagtaagtttgtgg

SEQ ID NO: 28755 - RNA, 22 nt, synthetic construct
  source 1..22: mol_type = other RNA
gaccagtatgtcttccaggact

SEQ ID NO: 28756 - RNA, 22 nt, synthetic construct
  source 1..22: mol_type = other RNA
gacctccccacccaccacaaac

SEQ ID NO: 28757 - RNA, 22 nt, synthetic construct
  source 1..22: mol_type = other RNA
gaccttgttgattgactgcgct

SEQ ID NO: 28758 - RNA, 22 nt, synthetic construct
  source 1..22: mol_type = other RNA
gactcccagctggagggcctga

SEQ ID NO: 28759 - RNA, 22 nt, synthetic construct
  source 1..22: mol_type = other RNA
gactgcgcttttccttgtctgg

SEQ ID NO: 28760 - RNA, 22 nt, synthetic construct
  source 1..22: mol_type = other RNA
gagcaaggacattttcagtaag

SEQ ID NO: 28761 - RNA, 22 nt, synthetic construct
  source 1..22: mol_type = other RNA
gagccaagacctccccacccac

SEQ ID NO: 28762 - RNA, 22 nt, synthetic construct
  source 1..22: mol_type = other RNA
gagggcctgagcaaggacattt

SEQ ID NO: 28763 - RNA, 22 nt, synthetic construct
  source 1..22: mol_type = other RNA
gagtcctggaagacatactggt

SEQ ID NO: 28764 - RNA, 22 nt, synthetic construct
  source 1..22: mol_type = other RNA
gattgactgcgcttttccttgt

SEQ ID NO: 28765 - RNA, 22 nt, synthetic construct
  source 1..22: mol_type = other RNA
gcaaggacattttcagtaagtt

SEQ ID NO: 28766 - RNA, 22 nt, synthetic construct
  source 1..22: mol_type = other RNA
gcagcggaactggaccagtatg

SEQ ID NO: 28767 - RNA, 22 nt, synthetic construct
  source 1..22: mol_type = other RNA
gcaggctgagccaagacctccc

SEQ ID NO: 28768 - RNA, 22 nt, synthetic construct
  source 1..22: mol_type = other RNA
gccaagacctccccacccacca

SEQ ID NO: 28769 - RNA, 22 nt, synthetic construct
  source 1..22: mol_type = other RNA
gcccagacaaggaaaagcgcag

SEQ ID NO: 28770 - RNA, 22 nt, synthetic construct
  source 1..22: mol_type = other RNA
gccctccagctgggagtcctgg

SEQ ID NO: 28771 - RNA, 22 nt, synthetic construct
  source 1..22: mol_type = other RNA
gcctgagcaaggacattttcag

SEQ ID NO: 28772 - RNA, 22 nt, synthetic construct
  source 1..22: mol_type = other RNA
gcgcttttccttgtctgggcag

SEQ ID NO: 28773 - RNA, 22 nt, synthetic construct
  source 1..22: mol_type = other RNA
gcggaactggaccagtatgtct

SEQ ID NO: 28774 - RNA, 22 nt, synthetic construct
  source 1..22: mol_type = other RNA
gctcaggccctccagctgggag

SEQ ID NO: 28775 - RNA, 22 nt, synthetic construct
  source 1..22: mol_type = other RNA
gctgagccaagacctccccacc

SEQ ID NO: 28776 - RNA, 22 nt, synthetic construct
  source 1..22: mol_type = other RNA
gctgcccagacaaggaaaagcg

SEQ ID NO: 28777 - RNA, 22 nt, synthetic construct
  source 1..22: mol_type = other RNA
gctggagggcctgagcaaggac

SEQ ID NO: 28778 - RNA, 22 nt, synthetic construct
  source 1..22: mol_type = other RNA
gctgggagtcctggaagacata

SEQ ID NO: 28779 - RNA, 22 nt, synthetic construct
  source 1..22: mol_type = other RNA
gcttttccttgtctgggcagcg

SEQ ID NO: 28780 - RNA, 22 nt, synthetic construct
  source 1..22: mol_type = other RNA
ggaaaagcgcagtcaatcaaca

SEQ ID NO: 28781 - RNA, 22 nt, synthetic construct
  source 1..22: mol_type = other RNA
ggaactggaccagtatgtcttc

SEQ ID NO: 28782 - RNA, 22 nt, synthetic construct
  source 1..22: mol_type = other RNA
ggaagacatactggtccagttc

SEQ ID NO: 28783 - RNA, 22 nt, synthetic construct
  source 1..22: mol_type = other RNA
ggacattttcagtaagtttgtg

SEQ ID NO: 28784 - RNA, 22 nt, synthetic construct
  source 1..22: mol_type = other RNA
ggaccagtatgtcttccaggac

SEQ ID NO: 28785 - RNA, 22 nt, synthetic construct
  source 1..22: mol_type = other RNA
ggactcccagctggagggcctg

SEQ ID NO: 28786 - RNA, 22 nt, synthetic construct
  source 1..22: mol_type = other RNA
ggagggcctgagcaaggacatt

SEQ ID NO: 28787 - RNA, 22 nt, synthetic construct
  source 1..22: mol_type = other RNA
ggagtcctggaagacatactgg

SEQ ID NO: 28788 - RNA, 22 nt, synthetic construct
  source 1..22: mol_type = other RNA
ggcagcggaactggaccagtat

SEQ ID NO: 28789 - RNA, 22 nt, synthetic construct
  source 1..22: mol_type = other RNA
ggccctccagctgggagtcctg

SEQ ID NO: 28790 - RNA, 22 nt, synthetic construct
  source 1..22: mol_type = other RNA
ggcctgagcaaggacattttca

SEQ ID NO: 28791 - RNA, 22 nt, synthetic construct
  source 1..22: mol_type = other RNA
ggctgagccaagacctccccac

SEQ ID NO: 28792 - RNA, 22 nt, synthetic construct
  source 1..22: mol_type = other RNA
gggagtcctggaagacatactg

SEQ ID NO: 28793 - RNA, 22 nt, synthetic construct
  source 1..22: mol_type = other RNA
gggcagcggaactggaccagta

SEQ ID NO: 28794 - RNA, 22 nt, synthetic construct
  source 1..22: mol_type = other RNA
gggcctgagcaaggacattttc

SEQ ID NO: 28795 - RNA, 22 nt, synthetic construct
  source 1..22: mol_type = other RNA
gggtggggaggtcttggctcag

SEQ ID NO: 28796 - RNA, 22 nt, synthetic construct
  source 1..22: mol_type = other RNA
ggtccagttccgctgcccagac

SEQ ID NO: 28797 - RNA, 22 nt, synthetic construct
  source 1..22: mol_type = other RNA
ggtggggaggtcttggctcagc

SEQ ID NO: 28798 - RNA, 22 nt, synthetic construct
  source 1..22: mol_type = other RNA
ggtgggtggggaggtcttggct

SEQ ID NO: 28799 - RNA, 22 nt, synthetic construct
  source 1..22: mol_type = other RNA
gtaagtttgtggtgggtgggga

SEQ ID NO: 28800 - RNA, 22 nt, synthetic construct
  source 1..22: mol_type = other RNA
gtatgtcttccaggactcccag

SEQ ID NO: 28801 - RNA, 22 nt, synthetic construct
  source 1..22: mol_type = other RNA
gtccagttccgctgcccagaca

SEQ ID NO: 28802 - RNA, 22 nt, synthetic construct
  source 1..22: mol_type = other RNA
gtcctggaagacatactggtcc

SEQ ID NO: 28803 - RNA, 22 nt, synthetic construct
  source 1..22: mol_type = other RNA
gtccttgctcaggccctccagc

SEQ ID NO: 28804 - RNA, 22 nt, synthetic construct
  source 1..22: mol_type = other RNA
gtctgggcagcggaactggacc

SEQ ID NO: 28805 - RNA, 22 nt, synthetic construct
  source 1..22: mol_type = other RNA
gtcttccaggactcccagctgg

SEQ ID NO: 28806 - RNA, 22 nt, synthetic construct
  source 1..22: mol_type = other RNA
gtggggaggtcttggctcagcc

SEQ ID NO: 28807 - RNA, 22 nt, synthetic construct
  source 1..22: mol_type = other RNA
gtgggtggggaggtcttggctc

SEQ ID NO: 28808 - RNA, 22 nt, synthetic construct
  source 1..22: mol_type = other RNA
gtggtgggtggggaggtcttgg

SEQ ID NO: 28809 - RNA, 22 nt, synthetic construct
  source 1..22: mol_type = other RNA
gttagaccttgttgattgactg

SEQ ID NO: 28810 - RNA, 22 nt, synthetic construct
  source 1..22: mol_type = other RNA
gttccgctgcccagacaaggaa

SEQ ID NO: 28811 - RNA, 22 nt, synthetic construct
  source 1..22: mol_type = other RNA
gttgattgactgcgcttttcct

SEQ ID NO: 28812 - RNA, 22 nt, synthetic construct
  source 1..22: mol_type = other RNA
gtttgtggtgggtggggaggtc

SEQ ID NO: 28813 - RNA, 22 nt, synthetic construct
  source 1..22: mol_type = other RNA
taagtttgtggtgggtggggag

SEQ ID NO: 28814 - RNA, 22 nt, synthetic construct
  source 1..22: mol_type = other RNA
tactgaaaatgtccttgctcag

SEQ ID NO: 28815 - RNA, 22 nt, synthetic construct
  source 1..22: mol_type = other RNA
tactggtccagttccgctgccc

SEQ ID NO: 28816 - RNA, 22 nt, synthetic construct
  source 1..22: mol_type = other RNA
tagaccttgttgattgactgcg

SEQ ID NO: 28817 - RNA, 22 nt, synthetic construct
  source 1..22: mol_type = other RNA
tatgtcttccaggactcccagc

SEQ ID NO: 28818 - RNA, 22 nt, synthetic construct
  source 1..22: mol_type = other RNA
tcaggccctccagctgggagtc

SEQ ID NO: 28819 - RNA, 22 nt, synthetic construct
  source 1..22: mol_type = other RNA
tcagtaagtttgtggtgggtgg

SEQ ID NO: 28820 - RNA, 22 nt, synthetic construct
  source 1..22: mol_type = other RNA
tcagttagaccttgttgattga

SEQ ID NO: 28821 - RNA, 22 nt, synthetic construct
  source 1..22: mol_type = other RNA
tccagctgggagtcctggaaga

SEQ ID NO: 28822 - RNA, 22 nt, synthetic construct
  source 1..22: mol_type = other RNA
tccaggactcccagctggaggg

SEQ ID NO: 28823 - RNA, 22 nt, synthetic construct
  source 1..22: mol_type = other RNA
tccagttccgctgcccagacaa

SEQ ID NO: 28824 - RNA, 22 nt, synthetic construct
  source 1..22: mol_type = other RNA
tcccagctggagggcctgagca

SEQ ID NO: 28825 - RNA, 22 nt, synthetic construct
  source 1..22: mol_type = other RNA
tccccacccaccacaaacttac

SEQ ID NO: 28826 - RNA, 22 nt, synthetic construct
  source 1..22: mol_type = other RNA
tccgctgcccagacaaggaaaa

SEQ ID NO: 28827 - RNA, 22 nt, synthetic construct
  source 1..22: mol_type = other RNA
tcctggaagacatactggtcca

SEQ ID NO: 28828 - RNA, 22 nt, synthetic construct
  source 1..22: mol_type = other RNA
tccttgctcaggccctccagct

SEQ ID NO: 28829 - RNA, 22 nt, synthetic construct
  source 1..22: mol_type = other RNA
tccttgtctgggcagcggaact

SEQ ID NO: 28830 - RNA, 22 nt, synthetic construct
  source 1..22: mol_type = other RNA
tctgggcagcggaactggacca

SEQ ID NO: 28831 - RNA, 22 nt, synthetic construct
  source 1..22: mol_type = other RNA
tcttccaggactcccagctgga

SEQ ID NO: 28832 - RNA, 22 nt, synthetic construct
  source 1..22: mol_type = other RNA
tgaaaatgtccttgctcaggcc

SEQ ID NO: 28833 - RNA, 22 nt, synthetic construct
  source 1..22: mol_type = other RNA
tgactgcgcttttccttgtctg

SEQ ID NO: 28834 - RNA, 22 nt, synthetic construct
  source 1..22: mol_type = other RNA
tgagcaaggacattttcagtaa

SEQ ID NO: 28835 - RNA, 22 nt, synthetic construct
  source 1..22: mol_type = other RNA
tgagccaagacctccccaccca

SEQ ID NO: 28836 - RNA, 22 nt, synthetic construct
  source 1..22: mol_type = other RNA
tgattgactgcgcttttccttg

SEQ ID NO: 28837 - RNA, 22 nt, synthetic construct
  source 1..22: mol_type = other RNA
tgcaggctgagccaagacctcc

SEQ ID NO: 28838 - RNA, 22 nt, synthetic construct
  source 1..22: mol_type = other RNA
tgcccagacaaggaaaagcgca

SEQ ID NO: 28839 - RNA, 22 nt, synthetic construct
  source 1..22: mol_type = other RNA
tgcgcttttccttgtctgggca

SEQ ID NO: 28840 - RNA, 22 nt, synthetic construct
  source 1..22: mol_type = other RNA
tgctcaggccctccagctggga

SEQ ID NO: 28841 - RNA, 22 nt, synthetic construct
  source 1..22: mol_type = other RNA
tggaagacatactggtccagtt

SEQ ID NO: 28842 - RNA, 22 nt, synthetic construct
  source 1..22: mol_type = other RNA
tggaccagtatgtcttccagga

SEQ ID NO: 28843 - RNA, 22 nt, synthetic construct
  source 1..22: mol_type = other RNA
tggagggcctgagcaaggacat

SEQ ID NO: 28844 - RNA, 22 nt, synthetic construct
  source 1..22: mol_type = other RNA
tgggagtcctggaagacatact

SEQ ID NO: 28845 - RNA, 22 nt, synthetic construct
  source 1..22: mol_type = other RNA
tgggcagcggaactggaccagt

SEQ ID NO: 28846 - RNA, 22 nt, synthetic construct
  source 1..22: mol_type = other RNA
tgggtggggaggtcttggctca

SEQ ID NO: 28847 - RNA, 22 nt, synthetic construct
  source 1..22: mol_type = other RNA
tggtccagttccgctgcccaga

SEQ ID NO: 28848 - RNA, 22 nt, synthetic construct
  source 1..22: mol_type = other RNA
tggtgggtggggaggtcttggc

SEQ ID NO: 28849 - RNA, 22 nt, synthetic construct
  source 1..22: mol_type = other RNA
tgtccttgctcaggccctccag

SEQ ID NO: 28850 - RNA, 22 nt, synthetic construct
  source 1..22: mol_type = other RNA
tgtctgggcagcggaactggac

SEQ ID NO: 28851 - RNA, 22 nt, synthetic construct
  source 1..22: mol_type = other RNA
tgtcttccaggactcccagctg

SEQ ID NO: 28852 - RNA, 22 nt, synthetic construct
  source 1..22: mol_type = other RNA
tgtggtgggtggggaggtcttg

SEQ ID NO: 28853 - RNA, 22 nt, synthetic construct
  source 1..22: mol_type = other RNA
tgttgattgactgcgcttttcc

SEQ ID NO: 28854 - RNA, 22 nt, synthetic construct
  source 1..22: mol_type = other RNA
ttactgaaaatgtccttgctca

SEQ ID NO: 28855 - RNA, 22 nt, synthetic construct
  source 1..22: mol_type = other RNA
ttagaccttgttgattgactgc

SEQ ID NO: 28856 - RNA, 22 nt, synthetic construct
  source 1..22: mol_type = other RNA
ttcagtaagtttgtggtgggtg

SEQ ID NO: 28857 - RNA, 22 nt, synthetic construct
  source 1..22: mol_type = other RNA
ttccaggactcccagctggagg

SEQ ID NO: 28858 - RNA, 22 nt, synthetic construct
  source 1..22: mol_type = other RNA
ttccgctgcccagacaaggaaa

SEQ ID NO: 28859 - RNA, 22 nt, synthetic construct
  source 1..22: mol_type = other RNA
ttccttgtctgggcagcggaac

SEQ ID NO: 28860 - RNA, 22 nt, synthetic construct
  source 1..22: mol_type = other RNA
ttgactgcgcttttccttgtct

SEQ ID NO: 28861 - RNA, 22 nt, synthetic construct
  source 1..22: mol_type = other RNA
ttgattgactgcgcttttcctt

SEQ ID NO: 28862 - RNA, 22 nt, synthetic construct
  source 1..22: mol_type = other RNA
ttgctcaggccctccagctggg

SEQ ID NO: 28863 - RNA, 22 nt, synthetic construct
  source 1..22: mol_type = other RNA
ttgtctgggcagcggaactgga

SEQ ID NO: 28864 - RNA, 22 nt, synthetic construct
  source 1..22: mol_type = other RNA
ttgtggtgggtggggaggtctt

SEQ ID NO: 28865 - RNA, 22 nt, synthetic construct
  source 1..22: mol_type = other RNA
ttgttgattgactgcgcttttc

SEQ ID NO: 28866 - RNA, 22 nt, synthetic construct
  source 1..22: mol_type = other RNA
tttcagtaagtttgtggtgggt

SEQ ID NO: 28867 - RNA, 22 nt, synthetic construct
  source 1..22: mol_type = other RNA
tttccttgtctgggcagcggaa

SEQ ID NO: 28868 - RNA, 22 nt, synthetic construct
  source 1..22: mol_type = other RNA
tttgtggtgggtggggaggtct

SEQ ID NO: 28869 - RNA, 22 nt, synthetic construct
  source 1..22: mol_type = other RNA
ttttcagtaagtttgtggtggg

SEQ ID NO: 28870 - RNA, 22 nt, synthetic construct
  source 1..22: mol_type = other RNA
ttttccttgtctgggcagcgga

SEQ ID NO: 28871 - RNA, 20 nt, synthetic construct
  source 1..20: mol_type = other RNA
aaaaaccagagaccaactca

SEQ ID NO: 28872 - RNA, 20 nt, synthetic construct
  source 1..20: mol_type = other RNA
aaaaccagagaccaactcac

SEQ ID NO: 28873 - RNA, 20 nt, synthetic construct
  source 1..20: mol_type = other RNA
aaaagacgtgagtgagcccc

SEQ ID NO: 28874 - RNA, 20 nt, synthetic construct
  source 1..20: mol_type = other RNA
aaaagtcagaaaagacgtga

SEQ ID NO: 28875 - RNA, 20 nt, synthetic construct
  source 1..20: mol_type = other RNA
aaaccagagaccaactcaca

SEQ ID NO: 28876 - RNA, 20 nt, synthetic construct
  source 1..20: mol_type = other RNA
aaagacgtgagtgagcccct

SEQ ID NO: 28877 - RNA, 20 nt, synthetic construct
  source 1..20: mol_type = other RNA
aaagtagagcacataggacc

SEQ ID NO: 28878 - RNA, 20 nt, synthetic construct
  source 1..20: mol_type = other RNA
aaagtcagaaaagacgtgag

SEQ ID NO: 28879 - RNA, 20 nt, synthetic construct
  source 1..20: mol_type = other RNA
aaccagagaccaactcacac

SEQ ID NO: 28880 - RNA, 20 nt, synthetic construct
  source 1..20: mol_type = other RNA
aacttctgctggcatctcca

SEQ ID NO: 28881 - RNA, 20 nt, synthetic construct
  source 1..20: mol_type = other RNA
aagacgtgagtgagcccctc

SEQ ID NO: 28882 - RNA, 20 nt, synthetic construct
  source 1..20: mol_type = other RNA
aagcaaggctaggttggatc

SEQ ID NO: 28883 - RNA, 20 nt, synthetic construct
  source 1..20: mol_type = other RNA
aaggctaggttggatcaggg

SEQ ID NO: 28884 - RNA, 20 nt, synthetic construct
  source 1..20: mol_type = other RNA
aagtagagcacataggacca

SEQ ID NO: 28885 - RNA, 20 nt, synthetic construct
  source 1..20: mol_type = other RNA
aagtcagaaaagacgtgagt

SEQ ID NO: 28886 - RNA, 20 nt, synthetic construct
  source 1..20: mol_type = other RNA
aagtgatcggtgagagtatg

SEQ ID NO: 28887 - RNA, 20 nt, synthetic construct
  source 1..20: mol_type = other RNA
aagttgggcagaaaagtcag

SEQ ID NO: 28888 - RNA, 20 nt, synthetic construct
  source 1..20: mol_type = other RNA
acataggaccagatgaagtg

SEQ ID NO: 28889 - RNA, 20 nt, synthetic construct
  source 1..20: mol_type = other RNA
accagagaccaactcacaca

SEQ ID NO: 28890 - RNA, 20 nt, synthetic construct
  source 1..20: mol_type = other RNA
accagatgaagtgatcggtg

SEQ ID NO: 28891 - RNA, 20 nt, synthetic construct
  source 1..20: mol_type = other RNA
accgatcacttcatctggtc

SEQ ID NO: 28892 - RNA, 20 nt, synthetic construct
  source 1..20: mol_type = other RNA
acgtcttttctgacttttct

SEQ ID NO: 28893 - RNA, 20 nt, synthetic construct
  source 1..20: mol_type = other RNA
acgtgagtgagcccctccct

SEQ ID NO: 28894 - RNA, 20 nt, synthetic construct
  source 1..20: mol_type = other RNA
actcacgtcttttctgactt

SEQ ID NO: 28895 - RNA, 20 nt, synthetic construct
  source 1..20: mol_type = other RNA
actctcaccgatcacttcat

SEQ ID NO: 28896 - RNA, 20 nt, synthetic construct
  source 1..20: mol_type = other RNA
acttcatctggtcctatgtg

SEQ ID NO: 28897 - RNA, 20 nt, synthetic construct
  source 1..20: mol_type = other RNA
acttctgctggcatctccat

SEQ ID NO: 28898 - RNA, 20 nt, synthetic construct
  source 1..20: mol_type = other RNA
actttgagaaaaaccagaga

SEQ ID NO: 28899 - RNA, 20 nt, synthetic construct
  source 1..20: mol_type = other RNA
acttttctgcccaacttctg

SEQ ID NO: 28900 - RNA, 20 nt, synthetic construct
  source 1..20: mol_type = other RNA
agaaaaaccagagaccaact

SEQ ID NO: 28901 - RNA, 20 nt, synthetic construct
  source 1..20: mol_type = other RNA
agaaaagacgtgagtgagcc

SEQ ID NO: 28902 - RNA, 20 nt, synthetic construct
  source 1..20: mol_type = other RNA
agaaaagtcagaaaagacgt

SEQ ID NO: 28903 - RNA, 20 nt, synthetic construct
  source 1..20: mol_type = other RNA
agaagttgggcagaaaagtc

SEQ ID NO: 28904 - RNA, 20 nt, synthetic construct
  source 1..20: mol_type = other RNA
agacgtgagtgagcccctcc

SEQ ID NO: 28905 - RNA, 20 nt, synthetic construct
  source 1..20: mol_type = other RNA
agagaccaactcacacaatc

SEQ ID NO: 28906 - RNA, 20 nt, synthetic construct
  source 1..20: mol_type = other RNA
agagcacataggaccagatg

SEQ ID NO: 28907 - RNA, 20 nt, synthetic construct
  source 1..20: mol_type = other RNA
agagtatggagatgccagca

SEQ ID NO: 28908 - RNA, 20 nt, synthetic construct
  source 1..20: mol_type = other RNA
agatgaagtgatcggtgaga

SEQ ID NO: 28909 - RNA, 20 nt, synthetic construct
  source 1..20: mol_type = other RNA
agatgccagcagaagttggg

SEQ ID NO: 28910 - RNA, 20 nt, synthetic construct
  source 1..20: mol_type = other RNA
agcaaggctaggttggatca

SEQ ID NO: 28911 - RNA, 20 nt, synthetic construct
  source 1..20: mol_type = other RNA
agcacataggaccagatgaa

SEQ ID NO: 28912 - RNA, 20 nt, synthetic construct
  source 1..20: mol_type = other RNA
agcagaagttgggcagaaaa

SEQ ID NO: 28913 - RNA, 20 nt, synthetic construct
  source 1..20: mol_type = other RNA
agcccctccctgatccaacc

SEQ ID NO: 28914 - RNA, 20 nt, synthetic construct
  source 1..20: mol_type = other RNA
aggaccagatgaagtgatcg

SEQ ID NO: 28915 - RNA, 20 nt, synthetic construct
  source 1..20: mol_type = other RNA
aggctaggttggatcaggga

SEQ ID NO: 28916 - RNA, 20 nt, synthetic construct
  source 1..20: mol_type = other RNA
agggaggggctcactcacgt

SEQ ID NO: 28917 - RNA, 20 nt, synthetic construct
  source 1..20: mol_type = other RNA
aggggctcactcacgtcttt

SEQ ID NO: 28918 - RNA, 20 nt, synthetic construct
  source 1..20: mol_type = other RNA
aggtctcaagcaaggctagg

SEQ ID NO: 28919 - RNA, 20 nt, synthetic construct
  source 1..20: mol_type = other RNA
aggttggatcagggaggggc

SEQ ID NO: 28920 - RNA, 20 nt, synthetic construct
  source 1..20: mol_type = other RNA
agtagagcacataggaccag

SEQ ID NO: 28921 - RNA, 20 nt, synthetic construct
  source 1..20: mol_type = other RNA
agtatggagatgccagcaga

SEQ ID NO: 28922 - RNA, 20 nt, synthetic construct
  source 1..20: mol_type = other RNA
agtcagaaaagacgtgagtg

SEQ ID NO: 28923 - RNA, 20 nt, synthetic construct
  source 1..20: mol_type = other RNA
agtgagcccctccctgatcc

SEQ ID NO: 28924 - RNA, 20 nt, synthetic construct
  source 1..20: mol_type = other RNA
agtgatcggtgagagtatgg

SEQ ID NO: 28925 - RNA, 20 nt, synthetic construct
  source 1..20: mol_type = other RNA
agttgggcagaaaagtcaga

SEQ ID NO: 28926 - RNA, 20 nt, synthetic construct
  source 1..20: mol_type = other RNA
agttggtctctggtttttct

SEQ ID NO: 28927 - RNA, 20 nt, synthetic construct
  source 1..20: mol_type = other RNA
atactctcaccgatcacttc

SEQ ID NO: 28928 - RNA, 20 nt, synthetic construct
  source 1..20: mol_type = other RNA
ataggaccagatgaagtgat

SEQ ID NO: 28929 - RNA, 20 nt, synthetic construct
  source 1..20: mol_type = other RNA
atcacttcatctggtcctat

SEQ ID NO: 28930 - RNA, 20 nt, synthetic construct
  source 1..20: mol_type = other RNA
atcagggaggggctcactca

SEQ ID NO: 28931 - RNA, 20 nt, synthetic construct
  source 1..20: mol_type = other RNA
atcggtgagagtatggagat

SEQ ID NO: 28932 - RNA, 20 nt, synthetic construct
  source 1..20: mol_type = other RNA
atctccatactctcaccgat

SEQ ID NO: 28933 - RNA, 20 nt, synthetic construct
  source 1..20: mol_type = other RNA
atctggtcctatgtgctcta

SEQ ID NO: 28934 - RNA, 20 nt, synthetic construct
  source 1..20: mol_type = other RNA
atgaagtgatcggtgagagt

SEQ ID NO: 28935 - RNA, 20 nt, synthetic construct
  source 1..20: mol_type = other RNA
atgccagcagaagttgggca

SEQ ID NO: 28936 - RNA, 20 nt, synthetic construct
  source 1..20: mol_type = other RNA
atggagatgccagcagaagt

SEQ ID NO: 28937 - RNA, 20 nt, synthetic construct
  source 1..20: mol_type = other RNA
atgtgctctactttgagaaa

SEQ ID NO: 28938 - RNA, 20 nt, synthetic construct
  source 1..20: mol_type = other RNA
attgattgtgtgagttggtc

SEQ ID NO: 28939 - RNA, 20 nt, synthetic construct
  source 1..20: mol_type = other RNA
attgtgtgagttggtctctg

SEQ ID NO: 28940 - RNA, 20 nt, synthetic construct
  source 1..20: mol_type = other RNA
caaagtagagcacataggac

SEQ ID NO: 28941 - RNA, 20 nt, synthetic construct
  source 1..20: mol_type = other RNA
caacttctgctggcatctcc

SEQ ID NO: 28942 - RNA, 20 nt, synthetic construct
  source 1..20: mol_type = other RNA
caagcaaggctaggttggat

SEQ ID NO: 28943 - RNA, 20 nt, synthetic construct
  source 1..20: mol_type = other RNA
caaggctaggttggatcagg

SEQ ID NO: 28944 - RNA, 20 nt, synthetic construct
  source 1..20: mol_type = other RNA
cacataggaccagatgaagt

SEQ ID NO: 28945 - RNA, 20 nt, synthetic construct
  source 1..20: mol_type = other RNA
caccgatcacttcatctggt

SEQ ID NO: 28946 - RNA, 20 nt, synthetic construct
  source 1..20: mol_type = other RNA
cacgtcttttctgacttttc

SEQ ID NO: 28947 - RNA, 20 nt, synthetic construct
  source 1..20: mol_type = other RNA
cactcacgtcttttctgact

SEQ ID NO: 28948 - RNA, 20 nt, synthetic construct
  source 1..20: mol_type = other RNA
cacttcatctggtcctatgt

SEQ ID NO: 28949 - RNA, 20 nt, synthetic construct
  source 1..20: mol_type = other RNA
cagaaaagacgtgagtgagc

SEQ ID NO: 28950 - RNA, 20 nt, synthetic construct
  source 1..20: mol_type = other RNA
cagaaaagtcagaaaagacg

SEQ ID NO: 28951 - RNA, 20 nt, synthetic construct
  source 1..20: mol_type = other RNA
cagaagttgggcagaaaagt

SEQ ID NO: 28952 - RNA, 20 nt, synthetic construct
  source 1..20: mol_type = other RNA
cagagaccaactcacacaat

SEQ ID NO: 28953 - RNA, 20 nt, synthetic construct
  source 1..20: mol_type = other RNA
cagatgaagtgatcggtgag

SEQ ID NO: 28954 - RNA, 20 nt, synthetic construct
  source 1..20: mol_type = other RNA
cagcagaagttgggcagaaa

SEQ ID NO: 28955 - RNA, 20 nt, synthetic construct
  source 1..20: mol_type = other RNA
cagggaggggctcactcacg

SEQ ID NO: 28956 - RNA, 20 nt, synthetic construct
  source 1..20: mol_type = other RNA
catactctcaccgatcactt

SEQ ID NO: 28957 - RNA, 20 nt, synthetic construct
  source 1..20: mol_type = other RNA
cataggaccagatgaagtga

SEQ ID NO: 28958 - RNA, 20 nt, synthetic construct
  source 1..20: mol_type = other RNA
catctccatactctcaccga

SEQ ID NO: 28959 - RNA, 20 nt, synthetic construct
  source 1..20: mol_type = other RNA
catctggtcctatgtgctct

SEQ ID NO: 28960 - RNA, 20 nt, synthetic construct
  source 1..20: mol_type = other RNA
cattgattgtgtgagttggt

SEQ ID NO: 28961 - RNA, 20 nt, synthetic construct
  source 1..20: mol_type = other RNA
ccaacttctgctggcatctc

SEQ ID NO: 28962 - RNA, 20 nt, synthetic construct
  source 1..20: mol_type = other RNA
ccagagaccaactcacacaa

SEQ ID NO: 28963 - RNA, 20 nt, synthetic construct
  source 1..20: mol_type = other RNA
ccagatgaagtgatcggtga

SEQ ID NO: 28964 - RNA, 20 nt, synthetic construct
  source 1..20: mol_type = other RNA
ccagcagaagttgggcagaa

SEQ ID NO: 28965 - RNA, 20 nt, synthetic construct
  source 1..20: mol_type = other RNA
ccatactctcaccgatcact

SEQ ID NO: 28966 - RNA, 20 nt, synthetic construct
  source 1..20: mol_type = other RNA
cccaacttctgctggcatct

SEQ ID NO: 28967 - RNA, 20 nt, synthetic construct
  source 1..20: mol_type = other RNA
cccctccctgatccaaccta

SEQ ID NO: 28968 - RNA, 20 nt, synthetic construct
  source 1..20: mol_type = other RNA
ccctccctgatccaacctag

SEQ ID NO: 28969 - RNA, 20 nt, synthetic construct
  source 1..20: mol_type = other RNA
ccctgatccaacctagcctt

SEQ ID NO: 28970 - RNA, 20 nt, synthetic construct
  source 1..20: mol_type = other RNA
ccgatcacttcatctggtcc

SEQ ID NO: 28971 - RNA, 20 nt, synthetic construct
  source 1..20: mol_type = other RNA
cctatgtgctctactttgag

SEQ ID NO: 28972 - RNA, 20 nt, synthetic construct
  source 1..20: mol_type = other RNA
cctccctgatccaacctagc

SEQ ID NO: 28973 - RNA, 20 nt, synthetic construct
  source 1..20: mol_type = other RNA
cctgatccaacctagccttg

SEQ ID NO: 28974 - RNA, 20 nt, synthetic construct
  source 1..20: mol_type = other RNA
cgatcacttcatctggtcct

SEQ ID NO: 28975 - RNA, 20 nt, synthetic construct
  source 1..20: mol_type = other RNA
cggtgagagtatggagatgc

SEQ ID NO: 28976 - RNA, 20 nt, synthetic construct
  source 1..20: mol_type = other RNA
cgtcttttctgacttttctg

SEQ ID NO: 28977 - RNA, 20 nt, synthetic construct
  source 1..20: mol_type = other RNA
cgtgagtgagcccctccctg

SEQ ID NO: 28978 - RNA, 20 nt, synthetic construct
  source 1..20: mol_type = other RNA
ctactttgagaaaaaccaga

SEQ ID NO: 28979 - RNA, 20 nt, synthetic construct
  source 1..20: mol_type = other RNA
ctaggttggatcagggaggg

SEQ ID NO: 28980 - RNA, 20 nt, synthetic construct
  source 1..20: mol_type = other RNA
ctatgtgctctactttgaga

SEQ ID NO: 28981 - RNA, 20 nt, synthetic construct
  source 1..20: mol_type = other RNA
ctcaaagtagagcacatagg

SEQ ID NO: 28982 - RNA, 20 nt, synthetic construct
  source 1..20: mol_type = other RNA
ctcaagcaaggctaggttgg

SEQ ID NO: 28983 - RNA, 20 nt, synthetic construct
  source 1..20: mol_type = other RNA
ctcaccgatcacttcatctg

SEQ ID NO: 28984 - RNA, 20 nt, synthetic construct
  source 1..20: mol_type = other RNA
ctcacgtcttttctgacttt

SEQ ID NO: 28985 - RNA, 20 nt, synthetic construct
  source 1..20: mol_type = other RNA
ctcactcacgtcttttctga

SEQ ID NO: 28986 - RNA, 20 nt, synthetic construct
  source 1..20: mol_type = other RNA
ctccatactctcaccgatca

SEQ ID NO: 28987 - RNA, 20 nt, synthetic construct
  source 1..20: mol_type = other RNA
ctccctgatccaacctagcc

SEQ ID NO: 28988 - RNA, 20 nt, synthetic construct
  source 1..20: mol_type = other RNA
ctctactttgagaaaaacca

SEQ ID NO: 28989 - RNA, 20 nt, synthetic construct
  source 1..20: mol_type = other RNA
ctctcaccgatcacttcatc

SEQ ID NO: 28990 - RNA, 20 nt, synthetic construct
  source 1..20: mol_type = other RNA
ctctggtttttctcaaagta

SEQ ID NO: 28991 - RNA, 20 nt, synthetic construct
  source 1..20: mol_type = other RNA
ctgacttttctgcccaactt

SEQ ID NO: 28992 - RNA, 20 nt, synthetic construct
  source 1..20: mol_type = other RNA
ctgatccaacctagccttgc

SEQ ID NO: 28993 - RNA, 20 nt, synthetic construct
  source 1..20: mol_type = other RNA
ctgcccaacttctgctggca

SEQ ID NO: 28994 - RNA, 20 nt, synthetic construct
  source 1..20: mol_type = other RNA
ctgctggcatctccatactc

SEQ ID NO: 28995 - RNA, 20 nt, synthetic construct
  source 1..20: mol_type = other RNA
ctggcatctccatactctca

SEQ ID NO: 28996 - RNA, 20 nt, synthetic construct
  source 1..20: mol_type = other RNA
ctggtcctatgtgctctact

SEQ ID NO: 28997 - RNA, 20 nt, synthetic construct
  source 1..20: mol_type = other RNA
ctggtttttctcaaagtaga

SEQ ID NO: 28998 - RNA, 20 nt, synthetic construct
  source 1..20: mol_type = other RNA
cttcatctggtcctatgtgc

SEQ ID NO: 28999 - RNA, 20 nt, synthetic construct
  source 1..20: mol_type = other RNA
cttctgctggcatctccata

SEQ ID NO: 29000 - RNA, 20 nt, synthetic construct
  source 1..20: mol_type = other RNA
ctttcattgattgtgtgagt

SEQ ID NO: 29001 - RNA, 20 nt, synthetic construct
  source 1..20: mol_type = other RNA
ctttgagaaaaaccagagac

SEQ ID NO: 29002 - RNA, 20 nt, synthetic construct
  source 1..20: mol_type = other RNA
cttttctgacttttctgccc

SEQ ID NO: 29003 - RNA, 20 nt, synthetic construct
  source 1..20: mol_type = other RNA
cttttctgcccaacttctgc

SEQ ID NO: 29004 - RNA, 20 nt, synthetic construct
  source 1..20: mol_type = other RNA
gaaaaaccagagaccaactc

SEQ ID NO: 29005 - RNA, 20 nt, synthetic construct
  source 1..20: mol_type = other RNA
gaaaagacgtgagtgagccc

SEQ ID NO: 29006 - RNA, 20 nt, synthetic construct
  source 1..20: mol_type = other RNA
gaaaagtcagaaaagacgtg

SEQ ID NO: 29007 - RNA, 20 nt, synthetic construct
  source 1..20: mol_type = other RNA
gaagtgatcggtgagagtat

SEQ ID NO: 29008 - RNA, 20 nt, synthetic construct
  source 1..20: mol_type = other RNA
gaagttgggcagaaaagtca

SEQ ID NO: 29009 - RNA, 20 nt, synthetic construct
  source 1..20: mol_type = other RNA
gaccagatgaagtgatcggt

SEQ ID NO: 29010 - RNA, 20 nt, synthetic construct
  source 1..20: mol_type = other RNA
gacgtgagtgagcccctccc

SEQ ID NO: 29011 - RNA, 20 nt, synthetic construct
  source 1..20: mol_type = other RNA
gacttttctgcccaacttct

SEQ ID NO: 29012 - RNA, 20 nt, synthetic construct
  source 1..20: mol_type = other RNA
gagaaaaaccagagaccaac

SEQ ID NO: 29013 - RNA, 20 nt, synthetic construct
  source 1..20: mol_type = other RNA
gagaccaactcacacaatca

SEQ ID NO: 29014 - RNA, 20 nt, synthetic construct
  source 1..20: mol_type = other RNA
gagagtatggagatgccagc

SEQ ID NO: 29015 - RNA, 20 nt, synthetic construct
  source 1..20: mol_type = other RNA
gagatgccagcagaagttgg

SEQ ID NO: 29016 - RNA, 20 nt, synthetic construct
  source 1..20: mol_type = other RNA
gagcacataggaccagatga

SEQ ID NO: 29017 - RNA, 20 nt, synthetic construct
  source 1..20: mol_type = other RNA
gagcccctccctgatccaac

SEQ ID NO: 29018 - RNA, 20 nt, synthetic construct
  source 1..20: mol_type = other RNA
gaggggctcactcacgtctt

SEQ ID NO: 29019 - RNA, 20 nt, synthetic construct
  source 1..20: mol_type = other RNA
gagtatggagatgccagcag

SEQ ID NO: 29020 - RNA, 20 nt, synthetic construct
  source 1..20: mol_type = other RNA
gagtgagcccctccctgatc

SEQ ID NO: 29021 - RNA, 20 nt, synthetic construct
  source 1..20: mol_type = other RNA
gagttggtctctggtttttc

SEQ ID NO: 29022 - RNA, 20 nt, synthetic construct
  source 1..20: mol_type = other RNA
gatcacttcatctggtccta

SEQ ID NO: 29023 - RNA, 20 nt, synthetic construct
  source 1..20: mol_type = other RNA
gatcagggaggggctcactc

SEQ ID NO: 29024 - RNA, 20 nt, synthetic construct
  source 1..20: mol_type = other RNA
gatcggtgagagtatggaga

SEQ ID NO: 29025 - RNA, 20 nt, synthetic construct
  source 1..20: mol_type = other RNA
gatgaagtgatcggtgagag

SEQ ID NO: 29026 - RNA, 20 nt, synthetic construct
  source 1..20: mol_type = other RNA
gatgccagcagaagttgggc

SEQ ID NO: 29027 - RNA, 20 nt, synthetic construct
  source 1..20: mol_type = other RNA
gattgtgtgagttggtctct

SEQ ID NO: 29028 - RNA, 20 nt, synthetic construct
  source 1..20: mol_type = other RNA
gcaaggctaggttggatcag

SEQ ID NO: 29029 - RNA, 20 nt, synthetic construct
  source 1..20: mol_type = other RNA
gcacataggaccagatgaag

SEQ ID NO: 29030 - RNA, 20 nt, synthetic construct
  source 1..20: mol_type = other RNA
gcagaaaagtcagaaaagac

SEQ ID NO: 29031 - RNA, 20 nt, synthetic construct
  source 1..20: mol_type = other RNA
gcagaagttgggcagaaaag

SEQ ID NO: 29032 - RNA, 20 nt, synthetic construct
  source 1..20: mol_type = other RNA
gcatctccatactctcaccg

SEQ ID NO: 29033 - RNA, 20 nt, synthetic construct
  source 1..20: mol_type = other RNA
gccagcagaagttgggcaga

SEQ ID NO: 29034 - RNA, 20 nt, synthetic construct
  source 1..20: mol_type = other RNA
gcccaacttctgctggcatc

SEQ ID NO: 29035 - RNA, 20 nt, synthetic construct
  source 1..20: mol_type = other RNA
gcccctccctgatccaacct

SEQ ID NO: 29036 - RNA, 20 nt, synthetic construct
  source 1..20: mol_type = other RNA
gctaggttggatcagggagg

SEQ ID NO: 29037 - RNA, 20 nt, synthetic construct
  source 1..20: mol_type = other RNA
gctcactcacgtcttttctg

SEQ ID NO: 29038 - RNA, 20 nt, synthetic construct
  source 1..20: mol_type = other RNA
gctctactttgagaaaaacc

SEQ ID NO: 29039 - RNA, 20 nt, synthetic construct
  source 1..20: mol_type = other RNA
gctggcatctccatactctc

SEQ ID NO: 29040 - RNA, 20 nt, synthetic construct
  source 1..20: mol_type = other RNA
gctttcattgattgtgtgag

SEQ ID NO: 29041 - RNA, 20 nt, synthetic construct
  source 1..20: mol_type = other RNA
ggaccagatgaagtgatcgg

SEQ ID NO: 29042 - RNA, 20 nt, synthetic construct
  source 1..20: mol_type = other RNA
ggagatgccagcagaagttg

SEQ ID NO: 29043 - RNA, 20 nt, synthetic construct
  source 1..20: mol_type = other RNA
ggaggggctcactcacgtct

SEQ ID NO: 29044 - RNA, 20 nt, synthetic construct
  source 1..20: mol_type = other RNA
ggatcagggaggggctcact

SEQ ID NO: 29045 - RNA, 20 nt, synthetic construct
  source 1..20: mol_type = other RNA
ggcagaaaagtcagaaaaga

SEQ ID NO: 29046 - RNA, 20 nt, synthetic construct
  source 1..20: mol_type = other RNA
ggcatctccatactctcacc

SEQ ID NO: 29047 - RNA, 20 nt, synthetic construct
  source 1..20: mol_type = other RNA
ggctaggttggatcagggag

SEQ ID NO: 29048 - RNA, 20 nt, synthetic construct
  source 1..20: mol_type = other RNA
ggctcactcacgtcttttct

SEQ ID NO: 29049 - RNA, 20 nt, synthetic construct
  source 1..20: mol_type = other RNA
gggaggggctcactcacgtc

SEQ ID NO: 29050 - RNA, 20 nt, synthetic construct
  source 1..20: mol_type = other RNA
gggcagaaaagtcagaaaag

SEQ ID NO: 29051 - RNA, 20 nt, synthetic construct
  source 1..20: mol_type = other RNA
gggctcactcacgtcttttc

SEQ ID NO: 29052 - RNA, 20 nt, synthetic construct
  source 1..20: mol_type = other RNA
ggggctcactcacgtctttt

SEQ ID NO: 29053 - RNA, 20 nt, synthetic construct
  source 1..20: mol_type = other RNA
ggtcctatgtgctctacttt

SEQ ID NO: 29054 - RNA, 20 nt, synthetic construct
  source 1..20: mol_type = other RNA
ggtctcaagcaaggctaggt

SEQ ID NO: 29055 - RNA, 20 nt, synthetic construct
  source 1..20: mol_type = other RNA
ggtctctggtttttctcaaa

SEQ ID NO: 29056 - RNA, 20 nt, synthetic construct
  source 1..20: mol_type = other RNA
ggtgagagtatggagatgcc

SEQ ID NO: 29057 - RNA, 20 nt, synthetic construct
  source 1..20: mol_type = other RNA
ggttggatcagggaggggct

SEQ ID NO: 29058 - RNA, 20 nt, synthetic construct
  source 1..20: mol_type = other RNA
ggtttttctcaaagtagagc

SEQ ID NO: 29059 - RNA, 20 nt, synthetic construct
  source 1..20: mol_type = other RNA
gtagagcacataggaccaga

SEQ ID NO: 29060 - RNA, 20 nt, synthetic construct
  source 1..20: mol_type = other RNA
gtatggagatgccagcagaa

SEQ ID NO: 29061 - RNA, 20 nt, synthetic construct
  source 1..20: mol_type = other RNA
gtcagaaaagacgtgagtga

SEQ ID NO: 29062 - RNA, 20 nt, synthetic construct
  source 1..20: mol_type = other RNA
gtcctatgtgctctactttg

SEQ ID NO: 29063 - RNA, 20 nt, synthetic construct
  source 1..20: mol_type = other RNA
gtctcaagcaaggctaggtt

SEQ ID NO: 29064 - RNA, 20 nt, synthetic construct
  source 1..20: mol_type = other RNA
gtctctggtttttctcaaag

SEQ ID NO: 29065 - RNA, 20 nt, synthetic construct
  source 1..20: mol_type = other RNA
gtcttttctgacttttctgc

SEQ ID NO: 29066 - RNA, 20 nt, synthetic construct
  source 1..20: mol_type = other RNA
gtgagagtatggagatgcca

SEQ ID NO: 29067 - RNA, 20 nt, synthetic construct
  source 1..20: mol_type = other RNA
gtgagcccctccctgatcca

SEQ ID NO: 29068 - RNA, 20 nt, synthetic construct
  source 1..20: mol_type = other RNA
gtgagtgagcccctccctga

SEQ ID NO: 29069 - RNA, 20 nt, synthetic construct
  source 1..20: mol_type = other RNA
gtgagttggtctctggtttt

SEQ ID NO: 29070 - RNA, 20 nt, synthetic construct
  source 1..20: mol_type = other RNA
gtgatcggtgagagtatgga

SEQ ID NO: 29071 - RNA, 20 nt, synthetic construct
  source 1..20: mol_type = other RNA
gtgctctactttgagaaaaa

SEQ ID NO: 29072 - RNA, 20 nt, synthetic construct
  source 1..20: mol_type = other RNA
gtgtgagttggtctctggtt

SEQ ID NO: 29073 - RNA, 20 nt, synthetic construct
  source 1..20: mol_type = other RNA
gttggatcagggaggggctc

SEQ ID NO: 29074 - RNA, 20 nt, synthetic construct
  source 1..20: mol_type = other RNA
gttgggcagaaaagtcagaa

SEQ ID NO: 29075 - RNA, 20 nt, synthetic construct
  source 1..20: mol_type = other RNA
gttggtctctggtttttctc

SEQ ID NO: 29076 - RNA, 20 nt, synthetic construct
  source 1..20: mol_type = other RNA
gtttttctcaaagtagagca

SEQ ID NO: 29077 - RNA, 20 nt, synthetic construct
  source 1..20: mol_type = other RNA
tactctcaccgatcacttca

SEQ ID NO: 29078 - RNA, 20 nt, synthetic construct
  source 1..20: mol_type = other RNA
tactttgagaaaaaccagag

SEQ ID NO: 29079 - RNA, 20 nt, synthetic construct
  source 1..20: mol_type = other RNA
tagagcacataggaccagat

SEQ ID NO: 29080 - RNA, 20 nt, synthetic construct
  source 1..20: mol_type = other RNA
taggaccagatgaagtgatc

SEQ ID NO: 29081 - RNA, 20 nt, synthetic construct
  source 1..20: mol_type = other RNA
taggttggatcagggagggg

SEQ ID NO: 29082 - RNA, 20 nt, synthetic construct
  source 1..20: mol_type = other RNA
tatggagatgccagcagaag

SEQ ID NO: 29083 - RNA, 20 nt, synthetic construct
  source 1..20: mol_type = other RNA
tatgtgctctactttgagaa

SEQ ID NO: 29084 - RNA, 20 nt, synthetic construct
  source 1..20: mol_type = other RNA
tcaaagtagagcacatagga

SEQ ID NO: 29085 - RNA, 20 nt, synthetic construct
  source 1..20: mol_type = other RNA
tcaagcaaggctaggttgga

SEQ ID NO: 29086 - RNA, 20 nt, synthetic construct
  source 1..20: mol_type = other RNA
tcaccgatcacttcatctgg

SEQ ID NO: 29087 - RNA, 20 nt, synthetic construct
  source 1..20: mol_type = other RNA
tcacgtcttttctgactttt

SEQ ID NO: 29088 - RNA, 20 nt, synthetic construct
  source 1..20: mol_type = other RNA
tcactcacgtcttttctgac

SEQ ID NO: 29089 - RNA, 20 nt, synthetic construct
  source 1..20: mol_type = other RNA
tcacttcatctggtcctatg

SEQ ID NO: 29090 - RNA, 20 nt, synthetic construct
  source 1..20: mol_type = other RNA
tcagaaaagacgtgagtgag

SEQ ID NO: 29091 - RNA, 20 nt, synthetic construct
  source 1..20: mol_type = other RNA
tcagggaggggctcactcac

SEQ ID NO: 29092 - RNA, 20 nt, synthetic construct
  source 1..20: mol_type = other RNA
tcatctggtcctatgtgctc

SEQ ID NO: 29093 - RNA, 20 nt, synthetic construct
  source 1..20: mol_type = other RNA
tcattgattgtgtgagttgg

SEQ ID NO: 29094 - RNA, 20 nt, synthetic construct
  source 1..20: mol_type = other RNA
tccatactctcaccgatcac

SEQ ID NO: 29095 - RNA, 20 nt, synthetic construct
  source 1..20: mol_type = other RNA
tccctgatccaacctagcct

SEQ ID NO: 29096 - RNA, 20 nt, synthetic construct
  source 1..20: mol_type = other RNA
tcctatgtgctctactttga

SEQ ID NO: 29097 - RNA, 20 nt, synthetic construct
  source 1..20: mol_type = other RNA
tcggtgagagtatggagatg

SEQ ID NO: 29098 - RNA, 20 nt, synthetic construct
  source 1..20: mol_type = other RNA
tctactttgagaaaaaccag

SEQ ID NO: 29099 - RNA, 20 nt, synthetic construct
  source 1..20: mol_type = other RNA
tctcaaagtagagcacatag

SEQ ID NO: 29100 - RNA, 20 nt, synthetic construct
  source 1..20: mol_type = other RNA
tctcaagcaaggctaggttg

SEQ ID NO: 29101 - RNA, 20 nt, synthetic construct
  source 1..20: mol_type = other RNA
tctcaccgatcacttcatct

SEQ ID NO: 29102 - RNA, 20 nt, synthetic construct
  source 1..20: mol_type = other RNA
tctccatactctcaccgatc

SEQ ID NO: 29103 - RNA, 20 nt, synthetic construct
  source 1..20: mol_type = other RNA
tctctggtttttctcaaagt

SEQ ID NO: 29104 - RNA, 20 nt, synthetic construct
  source 1..20: mol_type = other RNA
tctgacttttctgcccaact

SEQ ID NO: 29105 - RNA, 20 nt, synthetic construct
  source 1..20: mol_type = other RNA
tctgcccaacttctgctggc

SEQ ID NO: 29106 - RNA, 20 nt, synthetic construct
  source 1..20: mol_type = other RNA
tctgctggcatctccatact

SEQ ID NO: 29107 - RNA, 20 nt, synthetic construct
  source 1..20: mol_type = other RNA
tctggtcctatgtgctctac

SEQ ID NO: 29108 - RNA, 20 nt, synthetic construct
  source 1..20: mol_type = other RNA
tctggtttttctcaaagtag

SEQ ID NO: 29109 - RNA, 20 nt, synthetic construct
  source 1..20: mol_type = other RNA
tcttttctgacttttctgcc

SEQ ID NO: 29110 - RNA, 20 nt, synthetic construct
  source 1..20: mol_type = other RNA
tgaagtgatcggtgagagta

SEQ ID NO: 29111 - RNA, 20 nt, synthetic construct
  source 1..20: mol_type = other RNA
tgacttttctgcccaacttc

SEQ ID NO: 29112 - RNA, 20 nt, synthetic construct
  source 1..20: mol_type = other RNA
tgagaaaaaccagagaccaa

SEQ ID NO: 29113 - RNA, 20 nt, synthetic construct
  source 1..20: mol_type = other RNA
tgagagtatggagatgccag

SEQ ID NO: 29114 - RNA, 20 nt, synthetic construct
  source 1..20: mol_type = other RNA
tgagcccctccctgatccaa

SEQ ID NO: 29115 - RNA, 20 nt, synthetic construct
  source 1..20: mol_type = other RNA
tgagtgagcccctccctgat

SEQ ID NO: 29116 - RNA, 20 nt, synthetic construct
  source 1..20: mol_type = other RNA
tgagttggtctctggttttt

SEQ ID NO: 29117 - RNA, 20 nt, synthetic construct
  source 1..20: mol_type = other RNA
tgatccaacctagccttgct

SEQ ID NO: 29118 - RNA, 20 nt, synthetic construct
  source 1..20: mol_type = other RNA
tgatcggtgagagtatggag

SEQ ID NO: 29119 - RNA, 20 nt, synthetic construct
  source 1..20: mol_type = other RNA
tgattgtgtgagttggtctc

SEQ ID NO: 29120 - RNA, 20 nt, synthetic construct
  source 1..20: mol_type = other RNA
tgccagcagaagttgggcag

SEQ ID NO: 29121 - RNA, 20 nt, synthetic construct
  source 1..20: mol_type = other RNA
tgcccaacttctgctggcat

SEQ ID NO: 29122 - RNA, 20 nt, synthetic construct
  source 1..20: mol_type = other RNA
tgctctactttgagaaaaac

SEQ ID NO: 29123 - RNA, 20 nt, synthetic construct
  source 1..20: mol_type = other RNA
tgctggcatctccatactct

SEQ ID NO: 29124 - RNA, 20 nt, synthetic construct
  source 1..20: mol_type = other RNA
tggagatgccagcagaagtt

SEQ ID NO: 29125 - RNA, 20 nt, synthetic construct
  source 1..20: mol_type = other RNA
tggatcagggaggggctcac

SEQ ID NO: 29126 - RNA, 20 nt, synthetic construct
  source 1..20: mol_type = other RNA
tggcatctccatactctcac

SEQ ID NO: 29127 - RNA, 20 nt, synthetic construct
  source 1..20: mol_type = other RNA
tgggcagaaaagtcagaaaa

SEQ ID NO: 29128 - RNA, 20 nt, synthetic construct
  source 1..20: mol_type = other RNA
tggtcctatgtgctctactt

SEQ ID NO: 29129 - RNA, 20 nt, synthetic construct
  source 1..20: mol_type = other RNA
tggtctctggtttttctcaa

SEQ ID NO: 29130 - RNA, 20 nt, synthetic construct
  source 1..20: mol_type = other RNA
tggtttttctcaaagtagag

SEQ ID NO: 29131 - RNA, 20 nt, synthetic construct
  source 1..20: mol_type = other RNA
tgtgagttggtctctggttt

SEQ ID NO: 29132 - RNA, 20 nt, synthetic construct
  source 1..20: mol_type = other RNA
tgtgctctactttgagaaaa

SEQ ID NO: 29133 - RNA, 20 nt, synthetic construct
  source 1..20: mol_type = other RNA
tgtgtgagttggtctctggt

SEQ ID NO: 29134 - RNA, 20 nt, synthetic construct
  source 1..20: mol_type = other RNA
ttcatctggtcctatgtgct

SEQ ID NO: 29135 - RNA, 20 nt, synthetic construct
  source 1..20: mol_type = other RNA
ttcattgattgtgtgagttg

SEQ ID NO: 29136 - RNA, 20 nt, synthetic construct
  source 1..20: mol_type = other RNA
ttctcaaagtagagcacata

SEQ ID NO: 29137 - RNA, 20 nt, synthetic construct
  source 1..20: mol_type = other RNA
ttctgacttttctgcccaac

SEQ ID NO: 29138 - RNA, 20 nt, synthetic construct
  source 1..20: mol_type = other RNA
ttctgcccaacttctgctgg

SEQ ID NO: 29139 - RNA, 20 nt, synthetic construct
  source 1..20: mol_type = other RNA
ttctgctggcatctccatac

SEQ ID NO: 29140 - RNA, 20 nt, synthetic construct
  source 1..20: mol_type = other RNA
ttgagaaaaaccagagacca

SEQ ID NO: 29141 - RNA, 20 nt, synthetic construct
  source 1..20: mol_type = other RNA
ttgattgtgtgagttggtct

SEQ ID NO: 29142 - RNA, 20 nt, synthetic construct
  source 1..20: mol_type = other RNA
ttggatcagggaggggctca

SEQ ID NO: 29143 - RNA, 20 nt, synthetic construct
  source 1..20: mol_type = other RNA
ttgggcagaaaagtcagaaa

SEQ ID NO: 29144 - RNA, 20 nt, synthetic construct
  source 1..20: mol_type = other RNA
ttggtctctggtttttctca

SEQ ID NO: 29145 - RNA, 20 nt, synthetic construct
  source 1..20: mol_type = other RNA
ttgtgtgagttggtctctgg

SEQ ID NO: 29146 - RNA, 20 nt, synthetic construct
  source 1..20: mol_type = other RNA
tttcattgattgtgtgagtt

SEQ ID NO: 29147 - RNA, 20 nt, synthetic construct
  source 1..20: mol_type = other RNA
tttctcaaagtagagcacat

SEQ ID NO: 29148 - RNA, 20 nt, synthetic construct
  source 1..20: mol_type = other RNA
tttctgacttttctgcccaa

SEQ ID NO: 29149 - RNA, 20 nt, synthetic construct
  source 1..20: mol_type = other RNA
tttctgcccaacttctgctg

SEQ ID NO: 29150 - RNA, 20 nt, synthetic construct
  source 1..20: mol_type = other RNA
tttgagaaaaaccagagacc

SEQ ID NO: 29151 - RNA, 20 nt, synthetic construct
  source 1..20: mol_type = other RNA
ttttctcaaagtagagcaca

SEQ ID NO: 29152 - RNA, 20 nt, synthetic construct
  source 1..20: mol_type = other RNA
ttttctgacttttctgccca

SEQ ID NO: 29153 - RNA, 20 nt, synthetic construct
  source 1..20: mol_type = other RNA
ttttctgcccaacttctgct

SEQ ID NO: 29154 - RNA, 20 nt, synthetic construct
  source 1..20: mol_type = other RNA
tttttctcaaagtagagcac

SEQ ID NO: 29155 - RNA, 21 nt, synthetic construct
  source 1..21: mol_type = other RNA
aaaaaccagagaccaactcac

SEQ ID NO: 29156 - RNA, 21 nt, synthetic construct
  source 1..21: mol_type = other RNA
aaaaccagagaccaactcaca

SEQ ID NO: 29157 - RNA, 21 nt, synthetic construct
  source 1..21: mol_type = other RNA
aaaagacgtgagtgagcccct

SEQ ID NO: 29158 - RNA, 21 nt, synthetic construct
  source 1..21: mol_type = other RNA
aaaagtcagaaaagacgtgag

SEQ ID NO: 29159 - RNA, 21 nt, synthetic construct
  source 1..21: mol_type = other RNA
aaaccagagaccaactcacac

SEQ ID NO: 29160 - RNA, 21 nt, synthetic construct
  source 1..21: mol_type = other RNA
aaagacgtgagtgagcccctc

SEQ ID NO: 29161 - RNA, 21 nt, synthetic construct
  source 1..21: mol_type = other RNA
aaagtagagcacataggacca

SEQ ID NO: 29162 - RNA, 21 nt, synthetic construct
  source 1..21: mol_type = other RNA
aaagtcagaaaagacgtgagt

SEQ ID NO: 29163 - RNA, 21 nt, synthetic construct
  source 1..21: mol_type = other RNA
aaccagagaccaactcacaca

SEQ ID NO: 29164 - RNA, 21 nt, synthetic construct
  source 1..21: mol_type = other RNA
aacttctgctggcatctccat

SEQ ID NO: 29165 - RNA, 21 nt, synthetic construct
  source 1..21: mol_type = other RNA
aagacgtgagtgagcccctcc

SEQ ID NO: 29166 - RNA, 21 nt, synthetic construct
  source 1..21: mol_type = other RNA
aagcaaggctaggttggatca

SEQ ID NO: 29167 - RNA, 21 nt, synthetic construct
  source 1..21: mol_type = other RNA
aaggctaggttggatcaggga

SEQ ID NO: 29168 - RNA, 21 nt, synthetic construct
  source 1..21: mol_type = other RNA
aagtagagcacataggaccag

SEQ ID NO: 29169 - RNA, 21 nt, synthetic construct
  source 1..21: mol_type = other RNA
aagtcagaaaagacgtgagtg

SEQ ID NO: 29170 - RNA, 21 nt, synthetic construct
  source 1..21: mol_type = other RNA
aagtgatcggtgagagtatgg

SEQ ID NO: 29171 - RNA, 21 nt, synthetic construct
  source 1..21: mol_type = other RNA
aagttgggcagaaaagtcaga

SEQ ID NO: 29172 - RNA, 21 nt, synthetic construct
  source 1..21: mol_type = other RNA
acataggaccagatgaagtga

SEQ ID NO: 29173 - RNA, 21 nt, synthetic construct
  source 1..21: mol_type = other RNA
accagagaccaactcacacaa

SEQ ID NO: 29174 - RNA, 21 nt, synthetic construct
  source 1..21: mol_type = other RNA
accagatgaagtgatcggtga

SEQ ID NO: 29175 - RNA, 21 nt, synthetic construct
  source 1..21: mol_type = other RNA
accgatcacttcatctggtcc

SEQ ID NO: 29176 - RNA, 21 nt, synthetic construct
  source 1..21: mol_type = other RNA
acgtcttttctgacttttctg

SEQ ID NO: 29177 - RNA, 21 nt, synthetic construct
  source 1..21: mol_type = other RNA
acgtgagtgagcccctccctg

SEQ ID NO: 29178 - RNA, 21 nt, synthetic construct
  source 1..21: mol_type = other RNA
actcacgtcttttctgacttt

SEQ ID NO: 29179 - RNA, 21 nt, synthetic construct
  source 1..21: mol_type = other RNA
actctcaccgatcacttcatc

SEQ ID NO: 29180 - RNA, 21 nt, synthetic construct
  source 1..21: mol_type = other RNA
acttcatctggtcctatgtgc

SEQ ID NO: 29181 - RNA, 21 nt, synthetic construct
  source 1..21: mol_type = other RNA
acttctgctggcatctccata

SEQ ID NO: 29182 - RNA, 21 nt, synthetic construct
  source 1..21: mol_type = other RNA
actttgagaaaaaccagagac

SEQ ID NO: 29183 - RNA, 21 nt, synthetic construct
  source 1..21: mol_type = other RNA
acttttctgcccaacttctgc

SEQ ID NO: 29184 - RNA, 21 nt, synthetic construct
  source 1..21: mol_type = other RNA
agaaaaaccagagaccaactc

SEQ ID NO: 29185 - RNA, 21 nt, synthetic construct
  source 1..21: mol_type = other RNA
agaaaagacgtgagtgagccc

SEQ ID NO: 29186 - RNA, 21 nt, synthetic construct
  source 1..21: mol_type = other RNA
agaaaagtcagaaaagacgtg

SEQ ID NO: 29187 - RNA, 21 nt, synthetic construct
  source 1..21: mol_type = other RNA
agaagttgggcagaaaagtca

SEQ ID NO: 29188 - RNA, 21 nt, synthetic construct
  source 1..21: mol_type = other RNA
agacgtgagtgagcccctccc

SEQ ID NO: 29189 - RNA, 21 nt, synthetic construct
  source 1..21: mol_type = other RNA
agagaccaactcacacaatca

SEQ ID NO: 29190 - RNA, 21 nt, synthetic construct
  source 1..21: mol_type = other RNA
agagcacataggaccagatga

SEQ ID NO: 29191 - RNA, 21 nt, synthetic construct
  source 1..21: mol_type = other RNA
agagtatggagatgccagcag

SEQ ID NO: 29192 - RNA, 21 nt, synthetic construct
  source 1..21: mol_type = other RNA
agatgaagtgatcggtgagag

SEQ ID NO: 29193 - RNA, 21 nt, synthetic construct
  source 1..21: mol_type = other RNA
agatgccagcagaagttgggc

SEQ ID NO: 29194 - RNA, 21 nt, synthetic construct
  source 1..21: mol_type = other RNA
agcaaggctaggttggatcag

SEQ ID NO: 29195 - RNA, 21 nt, synthetic construct
  source 1..21: mol_type = other RNA
agcacataggaccagatgaag

SEQ ID NO: 29196 - RNA, 21 nt, synthetic construct
  source 1..21: mol_type = other RNA
agcagaagttgggcagaaaag

SEQ ID NO: 29197 - RNA, 21 nt, synthetic construct
  source 1..21: mol_type = other RNA
agcccctccctgatccaacct

SEQ ID NO: 29198 - RNA, 21 nt, synthetic construct
  source 1..21: mol_type = other RNA
aggaccagatgaagtgatcgg

SEQ ID NO: 29199 - RNA, 21 nt, synthetic construct
  source 1..21: mol_type = other RNA
aggctaggttggatcagggag

SEQ ID NO: 29200 - RNA, 21 nt, synthetic construct
  source 1..21: mol_type = other RNA
agggaggggctcactcacgtc

SEQ ID NO: 29201 - RNA, 21 nt, synthetic construct
  source 1..21: mol_type = other RNA
aggggctcactcacgtctttt

SEQ ID NO: 29202 - RNA, 21 nt, synthetic construct
  source 1..21: mol_type = other RNA
aggtctcaagcaaggctaggt

SEQ ID NO: 29203 - RNA, 21 nt, synthetic construct
  source 1..21: mol_type = other RNA
aggttggatcagggaggggct

SEQ ID NO: 29204 - RNA, 21 nt, synthetic construct
  source 1..21: mol_type = other RNA
agtagagcacataggaccaga

SEQ ID NO: 29205 - RNA, 21 nt, synthetic construct
  source 1..21: mol_type = other RNA
agtatggagatgccagcagaa

SEQ ID NO: 29206 - RNA, 21 nt, synthetic construct
  source 1..21: mol_type = other RNA
agtcagaaaagacgtgagtga

SEQ ID NO: 29207 - RNA, 21 nt, synthetic construct
  source 1..21: mol_type = other RNA
agtgagcccctccctgatcca

SEQ ID NO: 29208 - RNA, 21 nt, synthetic construct
  source 1..21: mol_type = other RNA
agtgatcggtgagagtatgga

SEQ ID NO: 29209 - RNA, 21 nt, synthetic construct
  source 1..21: mol_type = other RNA
agttgggcagaaaagtcagaa

SEQ ID NO: 29210 - RNA, 21 nt, synthetic construct
  source 1..21: mol_type = other RNA
agttggtctctggtttttctc

SEQ ID NO: 29211 - RNA, 21 nt, synthetic construct
  source 1..21: mol_type = other RNA
atactctcaccgatcacttca

SEQ ID NO: 29212 - RNA, 21 nt, synthetic construct
  source 1..21: mol_type = other RNA
ataggaccagatgaagtgatc

SEQ ID NO: 29213 - RNA, 21 nt, synthetic construct
  source 1..21: mol_type = other RNA
atcacttcatctggtcctatg

SEQ ID NO: 29214 - RNA, 21 nt, synthetic construct
  source 1..21: mol_type = other RNA
atcagggaggggctcactcac

SEQ ID NO: 29215 - RNA, 21 nt, synthetic construct
  source 1..21: mol_type = other RNA
atcggtgagagtatggagatg

SEQ ID NO: 29216 - RNA, 21 nt, synthetic construct
  source 1..21: mol_type = other RNA
atctccatactctcaccgatc

SEQ ID NO: 29217 - RNA, 21 nt, synthetic construct
  source 1..21: mol_type = other RNA
atctggtcctatgtgctctac

SEQ ID NO: 29218 - RNA, 21 nt, synthetic construct
  source 1..21: mol_type = other RNA
atgaagtgatcggtgagagta

SEQ ID NO: 29219 - RNA, 21 nt, synthetic construct
  source 1..21: mol_type = other RNA
atgccagcagaagttgggcag

SEQ ID NO: 29220 - RNA, 21 nt, synthetic construct
  source 1..21: mol_type = other RNA
atggagatgccagcagaagtt

SEQ ID NO: 29221 - RNA, 21 nt, synthetic construct
  source 1..21: mol_type = other RNA
atgtgctctactttgagaaaa

SEQ ID NO: 29222 - RNA, 21 nt, synthetic construct
  source 1..21: mol_type = other RNA
attgattgtgtgagttggtct

SEQ ID NO: 29223 - RNA, 21 nt, synthetic construct
  source 1..21: mol_type = other RNA
attgtgtgagttggtctctgg

SEQ ID NO: 29224 - RNA, 21 nt, synthetic construct
  source 1..21: mol_type = other RNA
caaagtagagcacataggacc

SEQ ID NO: 29225 - RNA, 21 nt, synthetic construct
  source 1..21: mol_type = other RNA
caacttctgctggcatctcca

SEQ ID NO: 29226 - RNA, 21 nt, synthetic construct
  source 1..21: mol_type = other RNA
caagcaaggctaggttggatc

SEQ ID NO: 29227 - RNA, 21 nt, synthetic construct
  source 1..21: mol_type = other RNA
caaggctaggttggatcaggg

SEQ ID NO: 29228 - RNA, 21 nt, synthetic construct
  source 1..21: mol_type = other RNA
cacataggaccagatgaagtg

SEQ ID NO: 29229 - RNA, 21 nt, synthetic construct
  source 1..21: mol_type = other RNA
caccgatcacttcatctggtc

SEQ ID NO: 29230 - RNA, 21 nt, synthetic construct
  source 1..21: mol_type = other RNA
cacgtcttttctgacttttct

SEQ ID NO: 29231 - RNA, 21 nt, synthetic construct
  source 1..21: mol_type = other RNA
cactcacgtcttttctgactt

SEQ ID NO: 29232 - RNA, 21 nt, synthetic construct
  source 1..21: mol_type = other RNA
cacttcatctggtcctatgtg

SEQ ID NO: 29233 - RNA, 21 nt, synthetic construct
  source 1..21: mol_type = other RNA
cagaaaagacgtgagtgagcc

SEQ ID NO: 29234 - RNA, 21 nt, synthetic construct
  source 1..21: mol_type = other RNA
cagaaaagtcagaaaagacgt

SEQ ID NO: 29235 - RNA, 21 nt, synthetic construct
  source 1..21: mol_type = other RNA
cagaagttgggcagaaaagtc

SEQ ID NO: 29236 - RNA, 21 nt, synthetic construct
  source 1..21: mol_type = other RNA
cagagaccaactcacacaatc

SEQ ID NO: 29237 - RNA, 21 nt, synthetic construct
  source 1..21: mol_type = other RNA
cagatgaagtgatcggtgaga

SEQ ID NO: 29238 - RNA, 21 nt, synthetic construct
  source 1..21: mol_type = other RNA
cagcagaagttgggcagaaaa

SEQ ID NO: 29239 - RNA, 21 nt, synthetic construct
  source 1..21: mol_type = other RNA
cagggaggggctcactcacgt

SEQ ID NO: 29240 - RNA, 21 nt, synthetic construct
  source 1..21: mol_type = other RNA
catactctcaccgatcacttc

SEQ ID NO: 29241 - RNA, 21 nt, synthetic construct
  source 1..21: mol_type = other RNA
cataggaccagatgaagtgat

SEQ ID NO: 29242 - RNA, 21 nt, synthetic construct
  source 1..21: mol_type = other RNA
catctccatactctcaccgat

SEQ ID NO: 29243 - RNA, 21 nt, synthetic construct
  source 1..21: mol_type = other RNA
catctggtcctatgtgctcta

SEQ ID NO: 29244 - RNA, 21 nt, synthetic construct
  source 1..21: mol_type = other RNA
cattgattgtgtgagttggtc

SEQ ID NO: 29245 - RNA, 21 nt, synthetic construct
  source 1..21: mol_type = other RNA
ccaacttctgctggcatctcc

SEQ ID NO: 29246 - RNA, 21 nt, synthetic construct
  source 1..21: mol_type = other RNA
ccagagaccaactcacacaat

SEQ ID NO: 29247 - RNA, 21 nt, synthetic construct
  source 1..21: mol_type = other RNA
ccagatgaagtgatcggtgag

SEQ ID NO: 29248 - RNA, 21 nt, synthetic construct
  source 1..21: mol_type = other RNA
ccagcagaagttgggcagaaa

SEQ ID NO: 29249 - RNA, 21 nt, synthetic construct
  source 1..21: mol_type = other RNA
ccatactctcaccgatcactt

SEQ ID NO: 29250 - RNA, 21 nt, synthetic construct
  source 1..21: mol_type = other RNA
cccaacttctgctggcatctc

SEQ ID NO: 29251 - RNA, 21 nt, synthetic construct
  source 1..21: mol_type = other RNA
cccctccctgatccaacctag

SEQ ID NO: 29252 - RNA, 21 nt, synthetic construct
  source 1..21: mol_type = other RNA
ccctccctgatccaacctagc

SEQ ID NO: 29253 - RNA, 21 nt, synthetic construct
  source 1..21: mol_type = other RNA
ccctgatccaacctagccttg

SEQ ID NO: 29254 - RNA, 21 nt, synthetic construct
  source 1..21: mol_type = other RNA
ccgatcacttcatctggtcct

SEQ ID NO: 29255 - RNA, 21 nt, synthetic construct
  source 1..21: mol_type = other RNA
cctatgtgctctactttgaga

SEQ ID NO: 29256 - RNA, 21 nt, synthetic construct
  source 1..21: mol_type = other RNA
cctccctgatccaacctagcc

SEQ ID NO: 29257 - RNA, 21 nt, synthetic construct
  source 1..21: mol_type = other RNA
cctgatccaacctagccttgc

SEQ ID NO: 29258 - RNA, 21 nt, synthetic construct
  source 1..21: mol_type = other RNA
cgatcacttcatctggtccta

SEQ ID NO: 29259 - RNA, 21 nt, synthetic construct
  source 1..21: mol_type = other RNA
cggtgagagtatggagatgcc

SEQ ID NO: 29260 - RNA, 21 nt, synthetic construct
  source 1..21: mol_type = other RNA
cgtcttttctgacttttctgc

SEQ ID NO: 29261 - RNA, 21 nt, synthetic construct
  source 1..21: mol_type = other RNA
cgtgagtgagcccctccctga

SEQ ID NO: 29262 - RNA, 21 nt, synthetic construct
  source 1..21: mol_type = other RNA
ctactttgagaaaaaccagag

SEQ ID NO: 29263 - RNA, 21 nt, synthetic construct
  source 1..21: mol_type = other RNA
ctaggttggatcagggagggg

SEQ ID NO: 29264 - RNA, 21 nt, synthetic construct
  source 1..21: mol_type = other RNA
ctatgtgctctactttgagaa

SEQ ID NO: 29265 - RNA, 21 nt, synthetic construct
  source 1..21: mol_type = other RNA
ctcaaagtagagcacatagga

SEQ ID NO: 29266 - RNA, 21 nt, synthetic construct
  source 1..21: mol_type = other RNA
ctcaagcaaggctaggttgga

SEQ ID NO: 29267 - RNA, 21 nt, synthetic construct
  source 1..21: mol_type = other RNA
ctcaccgatcacttcatctgg

SEQ ID NO: 29268 - RNA, 21 nt, synthetic construct
  source 1..21: mol_type = other RNA
ctcacgtcttttctgactttt

SEQ ID NO: 29269 - RNA, 21 nt, synthetic construct
  source 1..21: mol_type = other RNA
ctcactcacgtcttttctgac

SEQ ID NO: 29270 - RNA, 21 nt, synthetic construct
  source 1..21: mol_type = other RNA
ctccatactctcaccgatcac

SEQ ID NO: 29271 - RNA, 21 nt, synthetic construct
  source 1..21: mol_type = other RNA
ctccctgatccaacctagcct

SEQ ID NO: 29272 - RNA, 21 nt, synthetic construct
  source 1..21: mol_type = other RNA
ctctactttgagaaaaaccag

SEQ ID NO: 29273 - RNA, 21 nt, synthetic construct
  source 1..21: mol_type = other RNA
ctctcaccgatcacttcatct

SEQ ID NO: 29274 - RNA, 21 nt, synthetic construct
  source 1..21: mol_type = other RNA
ctctggtttttctcaaagtag

SEQ ID NO: 29275 - RNA, 21 nt, synthetic construct
  source 1..21: mol_type = other RNA
ctgacttttctgcccaacttc

SEQ ID NO: 29276 - RNA, 21 nt, synthetic construct
  source 1..21: mol_type = other RNA
ctgatccaacctagccttgct

SEQ ID NO: 29277 - RNA, 21 nt, synthetic construct
  source 1..21: mol_type = other RNA
ctgcccaacttctgctggcat

SEQ ID NO: 29278 - RNA, 21 nt, synthetic construct
  source 1..21: mol_type = other RNA
ctgctggcatctccatactct

SEQ ID NO: 29279 - RNA, 21 nt, synthetic construct
  source 1..21: mol_type = other RNA
ctggcatctccatactctcac

SEQ ID NO: 29280 - RNA, 21 nt, synthetic construct
  source 1..21: mol_type = other RNA
ctggtcctatgtgctctactt

SEQ ID NO: 29281 - RNA, 21 nt, synthetic construct
  source 1..21: mol_type = other RNA
ctggtttttctcaaagtagag

SEQ ID NO: 29282 - RNA, 21 nt, synthetic construct
  source 1..21: mol_type = other RNA
cttcatctggtcctatgtgct

SEQ ID NO: 29283 - RNA, 21 nt, synthetic construct
  source 1..21: mol_type = other RNA
cttctgctggcatctccatac

SEQ ID NO: 29284 - RNA, 21 nt, synthetic construct
  source 1..21: mol_type = other RNA
ctttcattgattgtgtgagtt

SEQ ID NO: 29285 - RNA, 21 nt, synthetic construct
  source 1..21: mol_type = other RNA
ctttgagaaaaaccagagacc

SEQ ID NO: 29286 - RNA, 21 nt, synthetic construct
  source 1..21: mol_type = other RNA
cttttctgacttttctgccca

SEQ ID NO: 29287 - RNA, 21 nt, synthetic construct
  source 1..21: mol_type = other RNA
cttttctgcccaacttctgct

SEQ ID NO: 29288 - RNA, 21 nt, synthetic construct
  source 1..21: mol_type = other RNA
gaaaaaccagagaccaactca

SEQ ID NO: 29289 - RNA, 21 nt, synthetic construct
  source 1..21: mol_type = other RNA
gaaaagacgtgagtgagcccc

SEQ ID NO: 29290 - RNA, 21 nt, synthetic construct
  source 1..21: mol_type = other RNA
gaaaagtcagaaaagacgtga

SEQ ID NO: 29291 - RNA, 21 nt, synthetic construct
  source 1..21: mol_type = other RNA
gaagtgatcggtgagagtatg

SEQ ID NO: 29292 - RNA, 21 nt, synthetic construct
  source 1..21: mol_type = other RNA
gaagttgggcagaaaagtcag

SEQ ID NO: 29293 - RNA, 21 nt, synthetic construct
  source 1..21: mol_type = other RNA
gaccagatgaagtgatcggtg

SEQ ID NO: 29294 - RNA, 21 nt, synthetic construct
  source 1..21: mol_type = other RNA
gacgtgagtgagcccctccct

SEQ ID NO: 29295 - RNA, 21 nt, synthetic construct
  source 1..21: mol_type = other RNA
gacttttctgcccaacttctg

SEQ ID NO: 29296 - RNA, 21 nt, synthetic construct
  source 1..21: mol_type = other RNA
gagaaaaaccagagaccaact

SEQ ID NO: 29297 - RNA, 21 nt, synthetic construct
  source 1..21: mol_type = other RNA
gagagtatggagatgccagca

SEQ ID NO: 29298 - RNA, 21 nt, synthetic construct
  source 1..21: mol_type = other RNA
gagatgccagcagaagttggg

SEQ ID NO: 29299 - RNA, 21 nt, synthetic construct
  source 1..21: mol_type = other RNA
gagcacataggaccagatgaa

SEQ ID NO: 29300 - RNA, 21 nt, synthetic construct
  source 1..21: mol_type = other RNA
gagcccctccctgatccaacc

SEQ ID NO: 29301 - RNA, 21 nt, synthetic construct
  source 1..21: mol_type = other RNA
gaggggctcactcacgtcttt

SEQ ID NO: 29302 - RNA, 21 nt, synthetic construct
  source 1..21: mol_type = other RNA
gagtatggagatgccagcaga

SEQ ID NO: 29303 - RNA, 21 nt, synthetic construct
  source 1..21: mol_type = other RNA
gagtgagcccctccctgatcc

SEQ ID NO: 29304 - RNA, 21 nt, synthetic construct
  source 1..21: mol_type = other RNA
gagttggtctctggtttttct

SEQ ID NO: 29305 - RNA, 21 nt, synthetic construct
  source 1..21: mol_type = other RNA
gatcacttcatctggtcctat

SEQ ID NO: 29306 - RNA, 21 nt, synthetic construct
  source 1..21: mol_type = other RNA
gatcagggaggggctcactca

SEQ ID NO: 29307 - RNA, 21 nt, synthetic construct
  source 1..21: mol_type = other RNA
gatcggtgagagtatggagat

SEQ ID NO: 29308 - RNA, 21 nt, synthetic construct
  source 1..21: mol_type = other RNA
gatgaagtgatcggtgagagt

SEQ ID NO: 29309 - RNA, 21 nt, synthetic construct
  source 1..21: mol_type = other RNA
gatgccagcagaagttgggca

SEQ ID NO: 29310 - RNA, 21 nt, synthetic construct
  source 1..21: mol_type = other RNA
gattgtgtgagttggtctctg

SEQ ID NO: 29311 - RNA, 21 nt, synthetic construct
  source 1..21: mol_type = other RNA
gcaaggctaggttggatcagg

SEQ ID NO: 29312 - RNA, 21 nt, synthetic construct
  source 1..21: mol_type = other RNA
gcacataggaccagatgaagt

SEQ ID NO: 29313 - RNA, 21 nt, synthetic construct
  source 1..21: mol_type = other RNA
gcagaaaagtcagaaaagacg

SEQ ID NO: 29314 - RNA, 21 nt, synthetic construct
  source 1..21: mol_type = other RNA
gcagaagttgggcagaaaagt

SEQ ID NO: 29315 - RNA, 21 nt, synthetic construct
  source 1..21: mol_type = other RNA
gcatctccatactctcaccga

SEQ ID NO: 29316 - RNA, 21 nt, synthetic construct
  source 1..21: mol_type = other RNA
gccagcagaagttgggcagaa

SEQ ID NO: 29317 - RNA, 21 nt, synthetic construct
  source 1..21: mol_type = other RNA
gcccaacttctgctggcatct

SEQ ID NO: 29318 - RNA, 21 nt, synthetic construct
  source 1..21: mol_type = other RNA
gcccctccctgatccaaccta

SEQ ID NO: 29319 - RNA, 21 nt, synthetic construct
  source 1..21: mol_type = other RNA
gctaggttggatcagggaggg

SEQ ID NO: 29320 - RNA, 21 nt, synthetic construct
  source 1..21: mol_type = other RNA
gctcactcacgtcttttctga

SEQ ID NO: 29321 - RNA, 21 nt, synthetic construct
  source 1..21: mol_type = other RNA
gctctactttgagaaaaacca

SEQ ID NO: 29322 - RNA, 21 nt, synthetic construct
  source 1..21: mol_type = other RNA
gctggcatctccatactctca

SEQ ID NO: 29323 - RNA, 21 nt, synthetic construct
  source 1..21: mol_type = other RNA
gctttcattgattgtgtgagt

SEQ ID NO: 29324 - RNA, 21 nt, synthetic construct
  source 1..21: mol_type = other RNA
ggaccagatgaagtgatcggt

SEQ ID NO: 29325 - RNA, 21 nt, synthetic construct
  source 1..21: mol_type = other RNA
ggagatgccagcagaagttgg

SEQ ID NO: 29326 - RNA, 21 nt, synthetic construct
  source 1..21: mol_type = other RNA
ggaggggctcactcacgtctt

SEQ ID NO: 29327 - RNA, 21 nt, synthetic construct
  source 1..21: mol_type = other RNA
ggatcagggaggggctcactc

SEQ ID NO: 29328 - RNA, 21 nt, synthetic construct
  source 1..21: mol_type = other RNA
ggcagaaaagtcagaaaagac

SEQ ID NO: 29329 - RNA, 21 nt, synthetic construct
  source 1..21: mol_type = other RNA
ggcatctccatactctcaccg

SEQ ID NO: 29330 - RNA, 21 nt, synthetic construct
  source 1..21: mol_type = other RNA
ggctaggttggatcagggagg

SEQ ID NO: 29331 - RNA, 21 nt, synthetic construct
  source 1..21: mol_type = other RNA
ggctcactcacgtcttttctg

SEQ ID NO: 29332 - RNA, 21 nt, synthetic construct
  source 1..21: mol_type = other RNA
gggaggggctcactcacgtct

SEQ ID NO: 29333 - RNA, 21 nt, synthetic construct
  source 1..21: mol_type = other RNA
gggcagaaaagtcagaaaaga

SEQ ID NO: 29334 - RNA, 21 nt, synthetic construct
  source 1..21: mol_type = other RNA
gggctcactcacgtcttttct

SEQ ID NO: 29335 - RNA, 21 nt, synthetic construct
  source 1..21: mol_type = other RNA
ggggctcactcacgtcttttc

SEQ ID NO: 29336 - RNA, 21 nt, synthetic construct
  source 1..21: mol_type = other RNA
ggtcctatgtgctctactttg

SEQ ID NO: 29337 - RNA, 21 nt, synthetic construct
  source 1..21: mol_type = other RNA
ggtctcaagcaaggctaggtt

SEQ ID NO: 29338 - RNA, 21 nt, synthetic construct
  source 1..21: mol_type = other RNA
ggtctctggtttttctcaaag

SEQ ID NO: 29339 - RNA, 21 nt, synthetic construct
  source 1..21: mol_type = other RNA
ggtgagagtatggagatgcca

SEQ ID NO: 29340 - RNA, 21 nt, synthetic construct
  source 1..21: mol_type = other RNA
ggttggatcagggaggggctc

SEQ ID NO: 29341 - RNA, 21 nt, synthetic construct
  source 1..21: mol_type = other RNA
ggtttttctcaaagtagagca

SEQ ID NO: 29342 - RNA, 21 nt, synthetic construct
  source 1..21: mol_type = other RNA
gtagagcacataggaccagat

SEQ ID NO: 29343 - RNA, 21 nt, synthetic construct
  source 1..21: mol_type = other RNA
gtatggagatgccagcagaag

SEQ ID NO: 29344 - RNA, 21 nt, synthetic construct
  source 1..21: mol_type = other RNA
gtcagaaaagacgtgagtgag

SEQ ID NO: 29345 - RNA, 21 nt, synthetic construct
  source 1..21: mol_type = other RNA
gtcctatgtgctctactttga

SEQ ID NO: 29346 - RNA, 21 nt, synthetic construct
  source 1..21: mol_type = other RNA
gtctcaagcaaggctaggttg

SEQ ID NO: 29347 - RNA, 21 nt, synthetic construct
  source 1..21: mol_type = other RNA
gtctctggtttttctcaaagt

SEQ ID NO: 29348 - RNA, 21 nt, synthetic construct
  source 1..21: mol_type = other RNA
gtcttttctgacttttctgcc

SEQ ID NO: 29349 - RNA, 21 nt, synthetic construct
  source 1..21: mol_type = other RNA
gtgagagtatggagatgccag

SEQ ID NO: 29350 - RNA, 21 nt, synthetic construct
  source 1..21: mol_type = other RNA
gtgagcccctccctgatccaa

SEQ ID NO: 29351 - RNA, 21 nt, synthetic construct
  source 1..21: mol_type = other RNA
gtgagtgagcccctccctgat

SEQ ID NO: 29352 - RNA, 21 nt, synthetic construct
  source 1..21: mol_type = other RNA
gtgagttggtctctggttttt

SEQ ID NO: 29353 - RNA, 21 nt, synthetic construct
  source 1..21: mol_type = other RNA
gtgatcggtgagagtatggag

SEQ ID NO: 29354 - RNA, 21 nt, synthetic construct
  source 1..21: mol_type = other RNA
gtgctctactttgagaaaaac

SEQ ID NO: 29355 - RNA, 21 nt, synthetic construct
  source 1..21: mol_type = other RNA
gtgtgagttggtctctggttt

SEQ ID NO: 29356 - RNA, 21 nt, synthetic construct
  source 1..21: mol_type = other RNA
gttggatcagggaggggctca

SEQ ID NO: 29357 - RNA, 21 nt, synthetic construct
  source 1..21: mol_type = other RNA
gttgggcagaaaagtcagaaa

SEQ ID NO: 29358 - RNA, 21 nt, synthetic construct
  source 1..21: mol_type = other RNA
gttggtctctggtttttctca

SEQ ID NO: 29359 - RNA, 21 nt, synthetic construct
  source 1..21: mol_type = other RNA
gtttttctcaaagtagagcac

SEQ ID NO: 29360 - RNA, 21 nt, synthetic construct
  source 1..21: mol_type = other RNA
tactctcaccgatcacttcat

SEQ ID NO: 29361 - RNA, 21 nt, synthetic construct
  source 1..21: mol_type = other RNA
tactttgagaaaaaccagaga

SEQ ID NO: 29362 - RNA, 21 nt, synthetic construct
  source 1..21: mol_type = other RNA
tagagcacataggaccagatg

SEQ ID NO: 29363 - RNA, 21 nt, synthetic construct
  source 1..21: mol_type = other RNA
taggaccagatgaagtgatcg

SEQ ID NO: 29364 - RNA, 21 nt, synthetic construct
  source 1..21: mol_type = other RNA
taggttggatcagggaggggc

SEQ ID NO: 29365 - RNA, 21 nt, synthetic construct
  source 1..21: mol_type = other RNA
tatggagatgccagcagaagt

SEQ ID NO: 29366 - RNA, 21 nt, synthetic construct
  source 1..21: mol_type = other RNA
tatgtgctctactttgagaaa

SEQ ID NO: 29367 - RNA, 21 nt, synthetic construct
  source 1..21: mol_type = other RNA
tcaaagtagagcacataggac

SEQ ID NO: 29368 - RNA, 21 nt, synthetic construct
  source 1..21: mol_type = other RNA
tcaagcaaggctaggttggat

SEQ ID NO: 29369 - RNA, 21 nt, synthetic construct
  source 1..21: mol_type = other RNA
tcaccgatcacttcatctggt

SEQ ID NO: 29370 - RNA, 21 nt, synthetic construct
  source 1..21: mol_type = other RNA
tcacgtcttttctgacttttc

SEQ ID NO: 29371 - RNA, 21 nt, synthetic construct
  source 1..21: mol_type = other RNA
tcactcacgtcttttctgact

SEQ ID NO: 29372 - RNA, 21 nt, synthetic construct
  source 1..21: mol_type = other RNA
tcacttcatctggtcctatgt

SEQ ID NO: 29373 - RNA, 21 nt, synthetic construct
  source 1..21: mol_type = other RNA
tcagaaaagacgtgagtgagc

SEQ ID NO: 29374 - RNA, 21 nt, synthetic construct
  source 1..21: mol_type = other RNA
tcagggaggggctcactcacg

SEQ ID NO: 29375 - RNA, 21 nt, synthetic construct
  source 1..21: mol_type = other RNA
tcatctggtcctatgtgctct

SEQ ID NO: 29376 - RNA, 21 nt, synthetic construct
  source 1..21: mol_type = other RNA
tcattgattgtgtgagttggt

SEQ ID NO: 29377 - RNA, 21 nt, synthetic construct
  source 1..21: mol_type = other RNA
tccatactctcaccgatcact

SEQ ID NO: 29378 - RNA, 21 nt, synthetic construct
  source 1..21: mol_type = other RNA
tccctgatccaacctagcctt

SEQ ID NO: 29379 - RNA, 21 nt, synthetic construct
  source 1..21: mol_type = other RNA
tcctatgtgctctactttgag

SEQ ID NO: 29380 - RNA, 21 nt, synthetic construct
  source 1..21: mol_type = other RNA
tcggtgagagtatggagatgc

SEQ ID NO: 29381 - RNA, 21 nt, synthetic construct
  source 1..21: mol_type = other RNA
tctactttgagaaaaaccaga

SEQ ID NO: 29382 - RNA, 21 nt, synthetic construct
  source 1..21: mol_type = other RNA
tctcaaagtagagcacatagg

SEQ ID NO: 29383 - RNA, 21 nt, synthetic construct
  source 1..21: mol_type = other RNA
tctcaagcaaggctaggttgg

SEQ ID NO: 29384 - RNA, 21 nt, synthetic construct
  source 1..21: mol_type = other RNA
tctcaccgatcacttcatctg

SEQ ID NO: 29385 - RNA, 21 nt, synthetic construct
  source 1..21: mol_type = other RNA
tctccatactctcaccgatca

SEQ ID NO: 29386 - RNA, 21 nt, synthetic construct
  source 1..21: mol_type = other RNA
tctctggtttttctcaaagta

SEQ ID NO: 29387 - RNA, 21 nt, synthetic construct
  source 1..21: mol_type = other RNA
tctgacttttctgcccaactt

SEQ ID NO: 29388 - RNA, 21 nt, synthetic construct
  source 1..21: mol_type = other RNA
tctgcccaacttctgctggca

SEQ ID NO: 29389 - RNA, 21 nt, synthetic construct
  source 1..21: mol_type = other RNA
tctgctggcatctccatactc

SEQ ID NO: 29390 - RNA, 21 nt, synthetic construct
  source 1..21: mol_type = other RNA
tctggtcctatgtgctctact

SEQ ID NO: 29391 - RNA, 21 nt, synthetic construct
  source 1..21: mol_type = other RNA
tctggtttttctcaaagtaga

SEQ ID NO: 29392 - RNA, 21 nt, synthetic construct
  source 1..21: mol_type = other RNA
tcttttctgacttttctgccc

SEQ ID NO: 29393 - RNA, 21 nt, synthetic construct
  source 1..21: mol_type = other RNA
tgaagtgatcggtgagagtat

SEQ ID NO: 29394 - RNA, 21 nt, synthetic construct
  source 1..21: mol_type = other RNA
tgacttttctgcccaacttct

SEQ ID NO: 29395 - RNA, 21 nt, synthetic construct
  source 1..21: mol_type = other RNA
tgagaaaaaccagagaccaac

SEQ ID NO: 29396 - RNA, 21 nt, synthetic construct
  source 1..21: mol_type = other RNA
tgagagtatggagatgccagc

SEQ ID NO: 29397 - RNA, 21 nt, synthetic construct
  source 1..21: mol_type = other RNA
tgagcccctccctgatccaac

SEQ ID NO: 29398 - RNA, 21 nt, synthetic construct
  source 1..21: mol_type = other RNA
tgagtgagcccctccctgatc

SEQ ID NO: 29399 - RNA, 21 nt, synthetic construct
  source 1..21: mol_type = other RNA
tgagttggtctctggtttttc

SEQ ID NO: 29400 - RNA, 21 nt, synthetic construct
  source 1..21: mol_type = other RNA
tgatcggtgagagtatggaga

SEQ ID NO: 29401 - RNA, 21 nt, synthetic construct
  source 1..21: mol_type = other RNA
tgattgtgtgagttggtctct

SEQ ID NO: 29402 - RNA, 21 nt, synthetic construct
  source 1..21: mol_type = other RNA
tgccagcagaagttgggcaga

SEQ ID NO: 29403 - RNA, 21 nt, synthetic construct
  source 1..21: mol_type = other RNA
tgcccaacttctgctggcatc

SEQ ID NO: 29404 - RNA, 21 nt, synthetic construct
  source 1..21: mol_type = other RNA
tgctctactttgagaaaaacc

SEQ ID NO: 29405 - RNA, 21 nt, synthetic construct
  source 1..21: mol_type = other RNA
tgctggcatctccatactctc

SEQ ID NO: 29406 - RNA, 21 nt, synthetic construct
  source 1..21: mol_type = other RNA
tggagatgccagcagaagttg

SEQ ID NO: 29407 - RNA, 21 nt, synthetic construct
  source 1..21: mol_type = other RNA
tggatcagggaggggctcact

SEQ ID NO: 29408 - RNA, 21 nt, synthetic construct
  source 1..21: mol_type = other RNA
tggcatctccatactctcacc

SEQ ID NO: 29409 - RNA, 21 nt, synthetic construct
  source 1..21: mol_type = other RNA
tgggcagaaaagtcagaaaag

SEQ ID NO: 29410 - RNA, 21 nt, synthetic construct
  source 1..21: mol_type = other RNA
tggtcctatgtgctctacttt

SEQ ID NO: 29411 - RNA, 21 nt, synthetic construct
  source 1..21: mol_type = other RNA
tggtctctggtttttctcaaa

SEQ ID NO: 29412 - RNA, 21 nt, synthetic construct
  source 1..21: mol_type = other RNA
tggtttttctcaaagtagagc

SEQ ID NO: 29413 - RNA, 21 nt, synthetic construct
  source 1..21: mol_type = other RNA
tgtgagttggtctctggtttt

SEQ ID NO: 29414 - RNA, 21 nt, synthetic construct
  source 1..21: mol_type = other RNA
tgtgctctactttgagaaaaa

SEQ ID NO: 29415 - RNA, 21 nt, synthetic construct
  source 1..21: mol_type = other RNA
tgtgtgagttggtctctggtt

SEQ ID NO: 29416 - RNA, 21 nt, synthetic construct
  source 1..21: mol_type = other RNA
ttcatctggtcctatgtgctc

SEQ ID NO: 29417 - RNA, 21 nt, synthetic construct
  source 1..21: mol_type = other RNA
ttcattgattgtgtgagttgg

SEQ ID NO: 29418 - RNA, 21 nt, synthetic construct
  source 1..21: mol_type = other RNA
ttctcaaagtagagcacatag

SEQ ID NO: 29419 - RNA, 21 nt, synthetic construct
  source 1..21: mol_type = other RNA
ttctgacttttctgcccaact

SEQ ID NO: 29420 - RNA, 21 nt, synthetic construct
  source 1..21: mol_type = other RNA
ttctgcccaacttctgctggc

SEQ ID NO: 29421 - RNA, 21 nt, synthetic construct
  source 1..21: mol_type = other RNA
ttctgctggcatctccatact

SEQ ID NO: 29422 - RNA, 21 nt, synthetic construct
  source 1..21: mol_type = other RNA
ttgagaaaaaccagagaccaa

SEQ ID NO: 29423 - RNA, 21 nt, synthetic construct
  source 1..21: mol_type = other RNA
ttgattgtgtgagttggtctc

SEQ ID NO: 29424 - RNA, 21 nt, synthetic construct
  source 1..21: mol_type = other RNA
ttggatcagggaggggctcac

SEQ ID NO: 29425 - RNA, 21 nt, synthetic construct
  source 1..21: mol_type = other RNA
ttgggcagaaaagtcagaaaa

SEQ ID NO: 29426 - RNA, 21 nt, synthetic construct
  source 1..21: mol_type = other RNA
ttggtctctggtttttctcaa

SEQ ID NO: 29427 - RNA, 21 nt, synthetic construct
  source 1..21: mol_type = other RNA
ttgtgtgagttggtctctggt

SEQ ID NO: 29428 - RNA, 21 nt, synthetic construct
  source 1..21: mol_type = other RNA
tttcattgattgtgtgagttg

SEQ ID NO: 29429 - RNA, 21 nt, synthetic construct
  source 1..21: mol_type = other RNA
tttctcaaagtagagcacata

SEQ ID NO: 29430 - RNA, 21 nt, synthetic construct
  source 1..21: mol_type = other RNA
tttctgacttttctgcccaac

SEQ ID NO: 29431 - RNA, 21 nt, synthetic construct
  source 1..21: mol_type = other RNA
tttctgcccaacttctgctgg

SEQ ID NO: 29432 - RNA, 21 nt, synthetic construct
  source 1..21: mol_type = other RNA
tttgagaaaaaccagagacca

SEQ ID NO: 29433 - RNA, 21 nt, synthetic construct
  source 1..21: mol_type = other RNA
ttttctcaaagtagagcacat

SEQ ID NO: 29434 - RNA, 21 nt, synthetic construct
  source 1..21: mol_type = other RNA
ttttctgacttttctgcccaa

SEQ ID NO: 29435 - RNA, 21 nt, synthetic construct
  source 1..21: mol_type = other RNA
ttttctgcccaacttctgctg

SEQ ID NO: 29436 - RNA, 21 nt, synthetic construct
  source 1..21: mol_type = other RNA
tttttctcaaagtagagcaca

SEQ ID NO: 29437 - RNA, 22 nt, synthetic construct
  source 1..22: mol_type = other RNA
aaaaaccagagaccaactcaca

SEQ ID NO: 29438 - RNA, 22 nt, synthetic construct
  source 1..22: mol_type = other RNA
aaaaccagagaccaactcacac

SEQ ID NO: 29439 - RNA, 22 nt, synthetic construct
  source 1..22: mol_type = other RNA
aaaagacgtgagtgagcccctc

SEQ ID NO: 29440 - RNA, 22 nt, synthetic construct
  source 1..22: mol_type = other RNA
aaaagtcagaaaagacgtgagt

SEQ ID NO: 29441 - RNA, 22 nt, synthetic construct
  source 1..22: mol_type = other RNA
aaaccagagaccaactcacaca

SEQ ID NO: 29442 - RNA, 22 nt, synthetic construct
  source 1..22: mol_type = other RNA
aaagacgtgagtgagcccctcc

SEQ ID NO: 29443 - RNA, 22 nt, synthetic construct
  source 1..22: mol_type = other RNA
aaagtagagcacataggaccag

SEQ ID NO: 29444 - RNA, 22 nt, synthetic construct
  source 1..22: mol_type = other RNA
aaagtcagaaaagacgtgagtg

SEQ ID NO: 29445 - RNA, 22 nt, synthetic construct
  source 1..22: mol_type = other RNA
aaccagagaccaactcacacaa

SEQ ID NO: 29446 - RNA, 22 nt, synthetic construct
  source 1..22: mol_type = other RNA
aacttctgctggcatctccata

SEQ ID NO: 29447 - RNA, 22 nt, synthetic construct
  source 1..22: mol_type = other RNA
aagacgtgagtgagcccctccc

SEQ ID NO: 29448 - RNA, 22 nt, synthetic construct
  source 1..22: mol_type = other RNA
aagcaaggctaggttggatcag

SEQ ID NO: 29449 - RNA, 22 nt, synthetic construct
  source 1..22: mol_type = other RNA
aaggctaggttggatcagggag

SEQ ID NO: 29450 - RNA, 22 nt, synthetic construct
  source 1..22: mol_type = other RNA
aagtagagcacataggaccaga

SEQ ID NO: 29451 - RNA, 22 nt, synthetic construct
  source 1..22: mol_type = other RNA
aagtcagaaaagacgtgagtga

SEQ ID NO: 29452 - RNA, 22 nt, synthetic construct
  source 1..22: mol_type = other RNA
aagtgatcggtgagagtatgga

SEQ ID NO: 29453 - RNA, 22 nt, synthetic construct
  source 1..22: mol_type = other RNA
aagttgggcagaaaagtcagaa

SEQ ID NO: 29454 - RNA, 22 nt, synthetic construct
  source 1..22: mol_type = other RNA
acataggaccagatgaagtgat

SEQ ID NO: 29455 - RNA, 22 nt, synthetic construct
  source 1..22: mol_type = other RNA
accagagaccaactcacacaat

SEQ ID NO: 29456 - RNA, 22 nt, synthetic construct
  source 1..22: mol_type = other RNA
accagatgaagtgatcggtgag

SEQ ID NO: 29457 - RNA, 22 nt, synthetic construct
  source 1..22: mol_type = other RNA
accgatcacttcatctggtcct

SEQ ID NO: 29458 - RNA, 22 nt, synthetic construct
  source 1..22: mol_type = other RNA
acgtcttttctgacttttctgc

SEQ ID NO: 29459 - RNA, 22 nt, synthetic construct
  source 1..22: mol_type = other RNA
acgtgagtgagcccctccctga

SEQ ID NO: 29460 - RNA, 22 nt, synthetic construct
  source 1..22: mol_type = other RNA
actcacgtcttttctgactttt

SEQ ID NO: 29461 - RNA, 22 nt, synthetic construct
  source 1..22: mol_type = other RNA
actctcaccgatcacttcatct

SEQ ID NO: 29462 - RNA, 22 nt, synthetic construct
  source 1..22: mol_type = other RNA
acttcatctggtcctatgtgct

SEQ ID NO: 29463 - RNA, 22 nt, synthetic construct
  source 1..22: mol_type = other RNA
acttctgctggcatctccatac

SEQ ID NO: 29464 - RNA, 22 nt, synthetic construct
  source 1..22: mol_type = other RNA
actttgagaaaaaccagagacc

SEQ ID NO: 29465 - RNA, 22 nt, synthetic construct
  source 1..22: mol_type = other RNA
acttttctgcccaacttctgct

SEQ ID NO: 29466 - RNA, 22 nt, synthetic construct
  source 1..22: mol_type = other RNA
agaaaaaccagagaccaactca

SEQ ID NO: 29467 - RNA, 22 nt, synthetic construct
  source 1..22: mol_type = other RNA
agaaaagacgtgagtgagcccc

SEQ ID NO: 29468 - RNA, 22 nt, synthetic construct
  source 1..22: mol_type = other RNA
agaaaagtcagaaaagacgtga

SEQ ID NO: 29469 - RNA, 22 nt, synthetic construct
  source 1..22: mol_type = other RNA
agaagttgggcagaaaagtcag

SEQ ID NO: 29470 - RNA, 22 nt, synthetic construct
  source 1..22: mol_type = other RNA
agacgtgagtgagcccctccct

SEQ ID NO: 29471 - RNA, 22 nt, synthetic construct
  source 1..22: mol_type = other RNA
agagcacataggaccagatgaa

SEQ ID NO: 29472 - RNA, 22 nt, synthetic construct
  source 1..22: mol_type = other RNA
agagtatggagatgccagcaga

SEQ ID NO: 29473 - RNA, 22 nt, synthetic construct
  source 1..22: mol_type = other RNA
agatgaagtgatcggtgagagt

SEQ ID NO: 29474 - RNA, 22 nt, synthetic construct
  source 1..22: mol_type = other RNA
agatgccagcagaagttgggca

SEQ ID NO: 29475 - RNA, 22 nt, synthetic construct
  source 1..22: mol_type = other RNA
agcaaggctaggttggatcagg

SEQ ID NO: 29476 - RNA, 22 nt, synthetic construct
  source 1..22: mol_type = other RNA
agcacataggaccagatgaagt

SEQ ID NO: 29477 - RNA, 22 nt, synthetic construct
  source 1..22: mol_type = other RNA
agcagaagttgggcagaaaagt

SEQ ID NO: 29478 - RNA, 22 nt, synthetic construct
  source 1..22: mol_type = other RNA
agcccctccctgatccaaccta

SEQ ID NO: 29479 - RNA, 22 nt, synthetic construct
  source 1..22: mol_type = other RNA
aggaccagatgaagtgatcggt

SEQ ID NO: 29480 - RNA, 22 nt, synthetic construct
  source 1..22: mol_type = other RNA
aggctaggttggatcagggagg

SEQ ID NO: 29481 - RNA, 22 nt, synthetic construct
  source 1..22: mol_type = other RNA
agggaggggctcactcacgtct

SEQ ID NO: 29482 - RNA, 22 nt, synthetic construct
  source 1..22: mol_type = other RNA
aggggctcactcacgtcttttc

SEQ ID NO: 29483 - RNA, 22 nt, synthetic construct
  source 1..22: mol_type = other RNA
aggtctcaagcaaggctaggtt

SEQ ID NO: 29484 - RNA, 22 nt, synthetic construct
  source 1..22: mol_type = other RNA
aggttggatcagggaggggctc

SEQ ID NO: 29485 - RNA, 22 nt, synthetic construct
  source 1..22: mol_type = other RNA
agtagagcacataggaccagat

SEQ ID NO: 29486 - RNA, 22 nt, synthetic construct
  source 1..22: mol_type = other RNA
agtatggagatgccagcagaag

SEQ ID NO: 29487 - RNA, 22 nt, synthetic construct
  source 1..22: mol_type = other RNA
agtcagaaaagacgtgagtgag

SEQ ID NO: 29488 - RNA, 22 nt, synthetic construct
  source 1..22: mol_type = other RNA
agtgagcccctccctgatccaa

SEQ ID NO: 29489 - RNA, 22 nt, synthetic construct
  source 1..22: mol_type = other RNA
agtgatcggtgagagtatggag

SEQ ID NO: 29490 - RNA, 22 nt, synthetic construct
  source 1..22: mol_type = other RNA
agttgggcagaaaagtcagaaa

SEQ ID NO: 29491 - RNA, 22 nt, synthetic construct
  source 1..22: mol_type = other RNA
agttggtctctggtttttctca

SEQ ID NO: 29492 - RNA, 22 nt, synthetic construct
  source 1..22: mol_type = other RNA
atactctcaccgatcacttcat

SEQ ID NO: 29493 - RNA, 22 nt, synthetic construct
  source 1..22: mol_type = other RNA
ataggaccagatgaagtgatcg

SEQ ID NO: 29494 - RNA, 22 nt, synthetic construct
  source 1..22: mol_type = other RNA
atcacttcatctggtcctatgt

SEQ ID NO: 29495 - RNA, 22 nt, synthetic construct
  source 1..22: mol_type = other RNA
atcagggaggggctcactcacg

SEQ ID NO: 29496 - RNA, 22 nt, synthetic construct
  source 1..22: mol_type = other RNA
atcggtgagagtatggagatgc

SEQ ID NO: 29497 - RNA, 22 nt, synthetic construct
  source 1..22: mol_type = other RNA
atctccatactctcaccgatca

SEQ ID NO: 29498 - RNA, 22 nt, synthetic construct
  source 1..22: mol_type = other RNA
atctggtcctatgtgctctact

SEQ ID NO: 29499 - RNA, 22 nt, synthetic construct
  source 1..22: mol_type = other RNA
atgaagtgatcggtgagagtat

SEQ ID NO: 29500 - RNA, 22 nt, synthetic construct
  source 1..22: mol_type = other RNA
atgccagcagaagttgggcaga

SEQ ID NO: 29501 - RNA, 22 nt, synthetic construct
  source 1..22: mol_type = other RNA
atggagatgccagcagaagttg

SEQ ID NO: 29502 - RNA, 22 nt, synthetic construct
  source 1..22: mol_type = other RNA
atgtgctctactttgagaaaaa

SEQ ID NO: 29503 - RNA, 22 nt, synthetic construct
  source 1..22: mol_type = other RNA
attgattgtgtgagttggtctc

SEQ ID NO: 29504 - RNA, 22 nt, synthetic construct
  source 1..22: mol_type = other RNA
attgtgtgagttggtctctggt

SEQ ID NO: 29505 - RNA, 22 nt, synthetic construct
  source 1..22: mol_type = other RNA
caaagtagagcacataggacca

SEQ ID NO: 29506 - RNA, 22 nt, synthetic construct
  source 1..22: mol_type = other RNA
caacttctgctggcatctccat

SEQ ID NO: 29507 - RNA, 22 nt, synthetic construct
  source 1..22: mol_type = other RNA
caagcaaggctaggttggatca

SEQ ID NO: 29508 - RNA, 22 nt, synthetic construct
  source 1..22: mol_type = other RNA
caaggctaggttggatcaggga

SEQ ID NO: 29509 - RNA, 22 nt, synthetic construct
  source 1..22: mol_type = other RNA
cacataggaccagatgaagtga

SEQ ID NO: 29510 - RNA, 22 nt, synthetic construct
  source 1..22: mol_type = other RNA
caccgatcacttcatctggtcc

SEQ ID NO: 29511 - RNA, 22 nt, synthetic construct
  source 1..22: mol_type = other RNA
cacgtcttttctgacttttctg

SEQ ID NO: 29512 - RNA, 22 nt, synthetic construct
  source 1..22: mol_type = other RNA
cactcacgtcttttctgacttt

SEQ ID NO: 29513 - RNA, 22 nt, synthetic construct
  source 1..22: mol_type = other RNA
cacttcatctggtcctatgtgc

SEQ ID NO: 29514 - RNA, 22 nt, synthetic construct
  source 1..22: mol_type = other RNA
cagaaaagacgtgagtgagccc

SEQ ID NO: 29515 - RNA, 22 nt, synthetic construct
  source 1..22: mol_type = other RNA
cagaaaagtcagaaaagacgtg

SEQ ID NO: 29516 - RNA, 22 nt, synthetic construct
  source 1..22: mol_type = other RNA
cagaagttgggcagaaaagtca

SEQ ID NO: 29517 - RNA, 22 nt, synthetic construct
  source 1..22: mol_type = other RNA
cagagaccaactcacacaatca

SEQ ID NO: 29518 - RNA, 22 nt, synthetic construct
  source 1..22: mol_type = other RNA
cagatgaagtgatcggtgagag

SEQ ID NO: 29519 - RNA, 22 nt, synthetic construct
  source 1..22: mol_type = other RNA
cagcagaagttgggcagaaaag

SEQ ID NO: 29520 - RNA, 22 nt, synthetic construct
  source 1..22: mol_type = other RNA
cagggaggggctcactcacgtc

SEQ ID NO: 29521 - RNA, 22 nt, synthetic construct
  source 1..22: mol_type = other RNA
catactctcaccgatcacttca

SEQ ID NO: 29522 - RNA, 22 nt, synthetic construct
  source 1..22: mol_type = other RNA
cataggaccagatgaagtgatc

SEQ ID NO: 29523 - RNA, 22 nt, synthetic construct
  source 1..22: mol_type = other RNA
catctccatactctcaccgatc

SEQ ID NO: 29524 - RNA, 22 nt, synthetic construct
  source 1..22: mol_type = other RNA
catctggtcctatgtgctctac

SEQ ID NO: 29525 - RNA, 22 nt, synthetic construct
  source 1..22: mol_type = other RNA
cattgattgtgtgagttggtct

SEQ ID NO: 29526 - RNA, 22 nt, synthetic construct
  source 1..22: mol_type = other RNA
ccaacttctgctggcatctcca

SEQ ID NO: 29527 - RNA, 22 nt, synthetic construct
  source 1..22: mol_type = other RNA
ccagagaccaactcacacaatc

SEQ ID NO: 29528 - RNA, 22 nt, synthetic construct
  source 1..22: mol_type = other RNA
ccagatgaagtgatcggtgaga

SEQ ID NO: 29529 - RNA, 22 nt, synthetic construct
  source 1..22: mol_type = other RNA
ccagcagaagttgggcagaaaa

SEQ ID NO: 29530 - RNA, 22 nt, synthetic construct
  source 1..22: mol_type = other RNA
ccatactctcaccgatcacttc

SEQ ID NO: 29531 - RNA, 22 nt, synthetic construct
  source 1..22: mol_type = other RNA
cccaacttctgctggcatctcc

SEQ ID NO: 29532 - RNA, 22 nt, synthetic construct
  source 1..22: mol_type = other RNA
cccctccctgatccaacctagc

SEQ ID NO: 29533 - RNA, 22 nt, synthetic construct
  source 1..22: mol_type = other RNA
ccctccctgatccaacctagcc

SEQ ID NO: 29534 - RNA, 22 nt, synthetic construct
  source 1..22: mol_type = other RNA
ccctgatccaacctagccttgc

SEQ ID NO: 29535 - RNA, 22 nt, synthetic construct
  source 1..22: mol_type = other RNA
ccgatcacttcatctggtccta

SEQ ID NO: 29536 - RNA, 22 nt, synthetic construct
  source 1..22: mol_type = other RNA
cctatgtgctctactttgagaa

SEQ ID NO: 29537 - RNA, 22 nt, synthetic construct
  source 1..22: mol_type = other RNA
cctccctgatccaacctagcct

SEQ ID NO: 29538 - RNA, 22 nt, synthetic construct
  source 1..22: mol_type = other RNA
cctgatccaacctagccttgct

SEQ ID NO: 29539 - RNA, 22 nt, synthetic construct
  source 1..22: mol_type = other RNA
cgatcacttcatctggtcctat

SEQ ID NO: 29540 - RNA, 22 nt, synthetic construct
  source 1..22: mol_type = other RNA
cggtgagagtatggagatgcca

SEQ ID NO: 29541 - RNA, 22 nt, synthetic construct
  source 1..22: mol_type = other RNA
cgtcttttctgacttttctgcc

SEQ ID NO: 29542 - RNA, 22 nt, synthetic construct
  source 1..22: mol_type = other RNA
cgtgagtgagcccctccctgat

SEQ ID NO: 29543 - RNA, 22 nt, synthetic construct
  source 1..22: mol_type = other RNA
ctactttgagaaaaaccagaga

SEQ ID NO: 29544 - RNA, 22 nt, synthetic construct
  source 1..22: mol_type = other RNA
ctaggttggatcagggaggggc

SEQ ID NO: 29545 - RNA, 22 nt, synthetic construct
  source 1..22: mol_type = other RNA
ctatgtgctctactttgagaaa

SEQ ID NO: 29546 - RNA, 22 nt, synthetic construct
  source 1..22: mol_type = other RNA
ctcaaagtagagcacataggac

SEQ ID NO: 29547 - RNA, 22 nt, synthetic construct
  source 1..22: mol_type = other RNA
ctcaagcaaggctaggttggat

SEQ ID NO: 29548 - RNA, 22 nt, synthetic construct
  source 1..22: mol_type = other RNA
ctcaccgatcacttcatctggt

SEQ ID NO: 29549 - RNA, 22 nt, synthetic construct
  source 1..22: mol_type = other RNA
ctcacgtcttttctgacttttc

SEQ ID NO: 29550 - RNA, 22 nt, synthetic construct
  source 1..22: mol_type = other RNA
ctcactcacgtcttttctgact

SEQ ID NO: 29551 - RNA, 22 nt, synthetic construct
  source 1..22: mol_type = other RNA
ctccatactctcaccgatcact

SEQ ID NO: 29552 - RNA, 22 nt, synthetic construct
  source 1..22: mol_type = other RNA
ctccctgatccaacctagcctt

SEQ ID NO: 29553 - RNA, 22 nt, synthetic construct
  source 1..22: mol_type = other RNA
ctctactttgagaaaaaccaga

SEQ ID NO: 29554 - RNA, 22 nt, synthetic construct
  source 1..22: mol_type = other RNA
ctctcaccgatcacttcatctg

SEQ ID NO: 29555 - RNA, 22 nt, synthetic construct
  source 1..22: mol_type = other RNA
ctctggtttttctcaaagtaga

SEQ ID NO: 29556 - RNA, 22 nt, synthetic construct
  source 1..22: mol_type = other RNA
ctgacttttctgcccaacttct

SEQ ID NO: 29557 - RNA, 22 nt, synthetic construct
  source 1..22: mol_type = other RNA
ctgcccaacttctgctggcatc

SEQ ID NO: 29558 - RNA, 22 nt, synthetic construct
  source 1..22: mol_type = other RNA
ctgctggcatctccatactctc

SEQ ID NO: 29559 - RNA, 22 nt, synthetic construct
  source 1..22: mol_type = other RNA
ctggcatctccatactctcacc

SEQ ID NO: 29560 - RNA, 22 nt, synthetic construct
  source 1..22: mol_type = other RNA
ctggtcctatgtgctctacttt

SEQ ID NO: 29561 - RNA, 22 nt, synthetic construct
  source 1..22: mol_type = other RNA
ctggtttttctcaaagtagagc

SEQ ID NO: 29562 - RNA, 22 nt, synthetic construct
  source 1..22: mol_type = other RNA
cttcatctggtcctatgtgctc

SEQ ID NO: 29563 - RNA, 22 nt, synthetic construct
  source 1..22: mol_type = other RNA
cttctgctggcatctccatact

SEQ ID NO: 29564 - RNA, 22 nt, synthetic construct
  source 1..22: mol_type = other RNA
ctttcattgattgtgtgagttg

SEQ ID NO: 29565 - RNA, 22 nt, synthetic construct
  source 1..22: mol_type = other RNA
ctttgagaaaaaccagagacca

SEQ ID NO: 29566 - RNA, 22 nt, synthetic construct
  source 1..22: mol_type = other RNA
cttttctgacttttctgcccaa

SEQ ID NO: 29567 - RNA, 22 nt, synthetic construct
  source 1..22: mol_type = other RNA
cttttctgcccaacttctgctg

SEQ ID NO: 29568 - RNA, 22 nt, synthetic construct
  source 1..22: mol_type = other RNA
gaaaaaccagagaccaactcac

SEQ ID NO: 29569 - RNA, 22 nt, synthetic construct
  source 1..22: mol_type = other RNA
gaaaagacgtgagtgagcccct

SEQ ID NO: 29570 - RNA, 22 nt, synthetic construct
  source 1..22: mol_type = other RNA
gaaaagtcagaaaagacgtgag

SEQ ID NO: 29571 - RNA, 22 nt, synthetic construct
  source 1..22: mol_type = other RNA
gaagtgatcggtgagagtatgg

SEQ ID NO: 29572 - RNA, 22 nt, synthetic construct
  source 1..22: mol_type = other RNA
gaagttgggcagaaaagtcaga

SEQ ID NO: 29573 - RNA, 22 nt, synthetic construct
  source 1..22: mol_type = other RNA
gaccagatgaagtgatcggtga

SEQ ID NO: 29574 - RNA, 22 nt, synthetic construct
  source 1..22: mol_type = other RNA
gacgtgagtgagcccctccctg

SEQ ID NO: 29575 - RNA, 22 nt, synthetic construct
  source 1..22: mol_type = other RNA
gacttttctgcccaacttctgc

SEQ ID NO: 29576 - RNA, 22 nt, synthetic construct
  source 1..22: mol_type = other RNA
gagaaaaaccagagaccaactc

SEQ ID NO: 29577 - RNA, 22 nt, synthetic construct
  source 1..22: mol_type = other RNA
gagagtatggagatgccagcag

SEQ ID NO: 29578 - RNA, 22 nt, synthetic construct
  source 1..22: mol_type = other RNA
gagatgccagcagaagttgggc

SEQ ID NO: 29579 - RNA, 22 nt, synthetic construct
  source 1..22: mol_type = other RNA
gagcacataggaccagatgaag

SEQ ID NO: 29580 - RNA, 22 nt, synthetic construct
  source 1..22: mol_type = other RNA
gagcccctccctgatccaacct

SEQ ID NO: 29581 - RNA, 22 nt, synthetic construct
  source 1..22: mol_type = other RNA
gaggggctcactcacgtctttt

SEQ ID NO: 29582 - RNA, 22 nt, synthetic construct
  source 1..22: mol_type = other RNA
gagtatggagatgccagcagaa

SEQ ID NO: 29583 - RNA, 22 nt, synthetic construct
  source 1..22: mol_type = other RNA
gagtgagcccctccctgatcca

SEQ ID NO: 29584 - RNA, 22 nt, synthetic construct
  source 1..22: mol_type = other RNA
gagttggtctctggtttttctc

SEQ ID NO: 29585 - RNA, 22 nt, synthetic construct
  source 1..22: mol_type = other RNA
gatcacttcatctggtcctatg

SEQ ID NO: 29586 - RNA, 22 nt, synthetic construct
  source 1..22: mol_type = other RNA
gatcagggaggggctcactcac

SEQ ID NO: 29587 - RNA, 22 nt, synthetic construct
  source 1..22: mol_type = other RNA
gatcggtgagagtatggagatg

SEQ ID NO: 29588 - RNA, 22 nt, synthetic construct
  source 1..22: mol_type = other RNA
gatgaagtgatcggtgagagta

SEQ ID NO: 29589 - RNA, 22 nt, synthetic construct
  source 1..22: mol_type = other RNA
gatgccagcagaagttgggcag

SEQ ID NO: 29590 - RNA, 22 nt, synthetic construct
  source 1..22: mol_type = other RNA
gattgtgtgagttggtctctgg

SEQ ID NO: 29591 - RNA, 22 nt, synthetic construct
  source 1..22: mol_type = other RNA
gcaaggctaggttggatcaggg

SEQ ID NO: 29592 - RNA, 22 nt, synthetic construct
  source 1..22: mol_type = other RNA
gcacataggaccagatgaagtg

SEQ ID NO: 29593 - RNA, 22 nt, synthetic construct
  source 1..22: mol_type = other RNA
gcagaaaagtcagaaaagacgt

SEQ ID NO: 29594 - RNA, 22 nt, synthetic construct
  source 1..22: mol_type = other RNA
gcagaagttgggcagaaaagtc

SEQ ID NO: 29595 - RNA, 22 nt, synthetic construct
  source 1..22: mol_type = other RNA
gcatctccatactctcaccgat

SEQ ID NO: 29596 - RNA, 22 nt, synthetic construct
  source 1..22: mol_type = other RNA
gccagcagaagttgggcagaaa

SEQ ID NO: 29597 - RNA, 22 nt, synthetic construct
  source 1..22: mol_type = other RNA
gcccaacttctgctggcatctc

SEQ ID NO: 29598 - RNA, 22 nt, synthetic construct
  source 1..22: mol_type = other RNA
gcccctccctgatccaacctag

SEQ ID NO: 29599 - RNA, 22 nt, synthetic construct
  source 1..22: mol_type = other RNA
gctaggttggatcagggagggg

SEQ ID NO: 29600 - RNA, 22 nt, synthetic construct
  source 1..22: mol_type = other RNA
gctcactcacgtcttttctgac

SEQ ID NO: 29601 - RNA, 22 nt, synthetic construct
  source 1..22: mol_type = other RNA
gctctactttgagaaaaaccag

SEQ ID NO: 29602 - RNA, 22 nt, synthetic construct
  source 1..22: mol_type = other RNA
gctggcatctccatactctcac

SEQ ID NO: 29603 - RNA, 22 nt, synthetic construct
  source 1..22: mol_type = other RNA
gctttcattgattgtgtgagtt

SEQ ID NO: 29604 - RNA, 22 nt, synthetic construct
  source 1..22: mol_type = other RNA
ggaccagatgaagtgatcggtg

SEQ ID NO: 29605 - RNA, 22 nt, synthetic construct
  source 1..22: mol_type = other RNA
ggagatgccagcagaagttggg

SEQ ID NO: 29606 - RNA, 22 nt, synthetic construct
  source 1..22: mol_type = other RNA
ggaggggctcactcacgtcttt

SEQ ID NO: 29607 - RNA, 22 nt, synthetic construct
  source 1..22: mol_type = other RNA
ggatcagggaggggctcactca

SEQ ID NO: 29608 - RNA, 22 nt, synthetic construct
  source 1..22: mol_type = other RNA
ggcagaaaagtcagaaaagacg

SEQ ID NO: 29609 - RNA, 22 nt, synthetic construct
  source 1..22: mol_type = other RNA
ggcatctccatactctcaccga

SEQ ID NO: 29610 - RNA, 22 nt, synthetic construct
  source 1..22: mol_type = other RNA
ggctaggttggatcagggaggg

SEQ ID NO: 29611 - RNA, 22 nt, synthetic construct
  source 1..22: mol_type = other RNA
ggctcactcacgtcttttctga

SEQ ID NO: 29612 - RNA, 22 nt, synthetic construct
  source 1..22: mol_type = other RNA
gggaggggctcactcacgtctt

SEQ ID NO: 29613 - RNA, 22 nt, synthetic construct
  source 1..22: mol_type = other RNA
gggcagaaaagtcagaaaagac

SEQ ID NO: 29614 - RNA, 22 nt, synthetic construct
  source 1..22: mol_type = other RNA
gggctcactcacgtcttttctg

SEQ ID NO: 29615 - RNA, 22 nt, synthetic construct
  source 1..22: mol_type = other RNA
ggggctcactcacgtcttttct

SEQ ID NO: 29616 - RNA, 22 nt, synthetic construct
  source 1..22: mol_type = other RNA
ggtcctatgtgctctactttga

SEQ ID NO: 29617 - RNA, 22 nt, synthetic construct
  source 1..22: mol_type = other RNA
ggtctcaagcaaggctaggttg

SEQ ID NO: 29618 - RNA, 22 nt, synthetic construct
  source 1..22: mol_type = other RNA
ggtctctggtttttctcaaagt

SEQ ID NO: 29619 - RNA, 22 nt, synthetic construct
  source 1..22: mol_type = other RNA
ggtgagagtatggagatgccag

SEQ ID NO: 29620 - RNA, 22 nt, synthetic construct
  source 1..22: mol_type = other RNA
ggttggatcagggaggggctca

SEQ ID NO: 29621 - RNA, 22 nt, synthetic construct
  source 1..22: mol_type = other RNA
ggtttttctcaaagtagagcac

SEQ ID NO: 29622 - RNA, 22 nt, synthetic construct
  source 1..22: mol_type = other RNA
gtagagcacataggaccagatg

SEQ ID NO: 29623 - RNA, 22 nt, synthetic construct
  source 1..22: mol_type = other RNA
gtatggagatgccagcagaagt

SEQ ID NO: 29624 - RNA, 22 nt, synthetic construct
  source 1..22: mol_type = other RNA
gtcagaaaagacgtgagtgagc

SEQ ID NO: 29625 - RNA, 22 nt, synthetic construct
  source 1..22: mol_type = other RNA
gtcctatgtgctctactttgag

SEQ ID NO: 29626 - RNA, 22 nt, synthetic construct
  source 1..22: mol_type = other RNA
gtctcaagcaaggctaggttgg

SEQ ID NO: 29627 - RNA, 22 nt, synthetic construct
  source 1..22: mol_type = other RNA
gtctctggtttttctcaaagta

SEQ ID NO: 29628 - RNA, 22 nt, synthetic construct
  source 1..22: mol_type = other RNA
gtcttttctgacttttctgccc

SEQ ID NO: 29629 - RNA, 22 nt, synthetic construct
  source 1..22: mol_type = other RNA
gtgagagtatggagatgccagc

SEQ ID NO: 29630 - RNA, 22 nt, synthetic construct
  source 1..22: mol_type = other RNA
gtgagcccctccctgatccaac

SEQ ID NO: 29631 - RNA, 22 nt, synthetic construct
  source 1..22: mol_type = other RNA
gtgagtgagcccctccctgatc

SEQ ID NO: 29632 - RNA, 22 nt, synthetic construct
  source 1..22: mol_type = other RNA
gtgagttggtctctggtttttc

SEQ ID NO: 29633 - RNA, 22 nt, synthetic construct
  source 1..22: mol_type = other RNA
gtgatcggtgagagtatggaga

SEQ ID NO: 29634 - RNA, 22 nt, synthetic construct
  source 1..22: mol_type = other RNA
gtgctctactttgagaaaaacc

SEQ ID NO: 29635 - RNA, 22 nt, synthetic construct
  source 1..22: mol_type = other RNA
gtgtgagttggtctctggtttt

SEQ ID NO: 29636 - RNA, 22 nt, synthetic construct
  source 1..22: mol_type = other RNA
gttggatcagggaggggctcac

SEQ ID NO: 29637 - RNA, 22 nt, synthetic construct
  source 1..22: mol_type = other RNA
gttgggcagaaaagtcagaaaa

SEQ ID NO: 29638 - RNA, 22 nt, synthetic construct
  source 1..22: mol_type = other RNA
gttggtctctggtttttctcaa

SEQ ID NO: 29639 - RNA, 22 nt, synthetic construct
  source 1..22: mol_type = other RNA
gtttttctcaaagtagagcaca

SEQ ID NO: 29640 - RNA, 22 nt, synthetic construct
  source 1..22: mol_type = other RNA
tactctcaccgatcacttcatc

SEQ ID NO: 29641 - RNA, 22 nt, synthetic construct
  source 1..22: mol_type = other RNA
tactttgagaaaaaccagagac

SEQ ID NO: 29642 - RNA, 22 nt, synthetic construct
  source 1..22: mol_type = other RNA
tagagcacataggaccagatga

SEQ ID NO: 29643 - RNA, 22 nt, synthetic construct
  source 1..22: mol_type = other RNA
taggaccagatgaagtgatcgg

SEQ ID NO: 29644 - RNA, 22 nt, synthetic construct
  source 1..22: mol_type = other RNA
taggttggatcagggaggggct

SEQ ID NO: 29645 - RNA, 22 nt, synthetic construct
  source 1..22: mol_type = other RNA
tatggagatgccagcagaagtt

SEQ ID NO: 29646 - RNA, 22 nt, synthetic construct
  source 1..22: mol_type = other RNA
tatgtgctctactttgagaaaa

SEQ ID NO: 29647 - RNA, 22 nt, synthetic construct
  source 1..22: mol_type = other RNA
tcaaagtagagcacataggacc

SEQ ID NO: 29648 - RNA, 22 nt, synthetic construct
  source 1..22: mol_type = other RNA
tcaagcaaggctaggttggatc

SEQ ID NO: 29649 - RNA, 22 nt, synthetic construct
  source 1..22: mol_type = other RNA
tcaccgatcacttcatctggtc

SEQ ID NO: 29650 - RNA, 22 nt, synthetic construct
  source 1..22: mol_type = other RNA
tcacgtcttttctgacttttct

SEQ ID NO: 29651 - RNA, 22 nt, synthetic construct
  source 1..22: mol_type = other RNA
tcactcacgtcttttctgactt

SEQ ID NO: 29652 - RNA, 22 nt, synthetic construct
  source 1..22: mol_type = other RNA
tcacttcatctggtcctatgtg

SEQ ID NO: 29653 - RNA, 22 nt, synthetic construct
  source 1..22: mol_type = other RNA
tcagaaaagacgtgagtgagcc

SEQ ID NO: 29654 - RNA, 22 nt, synthetic construct
  source 1..22: mol_type = other RNA
tcagggaggggctcactcacgt

SEQ ID NO: 29655 - RNA, 22 nt, synthetic construct
  source 1..22: mol_type = other RNA
tcatctggtcctatgtgctcta

SEQ ID NO: 29656 - RNA, 22 nt, synthetic construct
  source 1..22: mol_type = other RNA
tcattgattgtgtgagttggtc

SEQ ID NO: 29657 - RNA, 22 nt, synthetic construct
  source 1..22: mol_type = other RNA
tccatactctcaccgatcactt

SEQ ID NO: 29658 - RNA, 22 nt, synthetic construct
  source 1..22: mol_type = other RNA
tccctgatccaacctagccttg

SEQ ID NO: 29659 - RNA, 22 nt, synthetic construct
  source 1..22: mol_type = other RNA
tcctatgtgctctactttgaga

SEQ ID NO: 29660 - RNA, 22 nt, synthetic construct
  source 1..22: mol_type = other RNA
tcggtgagagtatggagatgcc

SEQ ID NO: 29661 - RNA, 22 nt, synthetic construct
  source 1..22: mol_type = other RNA
tctactttgagaaaaaccagag

SEQ ID NO: 29662 - RNA, 22 nt, synthetic construct
  source 1..22: mol_type = other RNA
tctcaaagtagagcacatagga

SEQ ID NO: 29663 - RNA, 22 nt, synthetic construct
  source 1..22: mol_type = other RNA
tctcaagcaaggctaggttgga

SEQ ID NO: 29664 - RNA, 22 nt, synthetic construct
  source 1..22: mol_type = other RNA
tctcaccgatcacttcatctgg

SEQ ID NO: 29665 - RNA, 22 nt, synthetic construct
  source 1..22: mol_type = other RNA
tctccatactctcaccgatcac

SEQ ID NO: 29666 - RNA, 22 nt, synthetic construct
  source 1..22: mol_type = other RNA
tctctggtttttctcaaagtag

SEQ ID NO: 29667 - RNA, 22 nt, synthetic construct
  source 1..22: mol_type = other RNA
tctgacttttctgcccaacttc

SEQ ID NO: 29668 - RNA, 22 nt, synthetic construct
  source 1..22: mol_type = other RNA
tctgcccaacttctgctggcat

SEQ ID NO: 29669 - RNA, 22 nt, synthetic construct
  source 1..22: mol_type = other RNA
tctgctggcatctccatactct

SEQ ID NO: 29670 - RNA, 22 nt, synthetic construct
  source 1..22: mol_type = other RNA
tctggtcctatgtgctctactt

SEQ ID NO: 29671 - RNA, 22 nt, synthetic construct
  source 1..22: mol_type = other RNA
tctggtttttctcaaagtagag

SEQ ID NO: 29672 - RNA, 22 nt, synthetic construct
  source 1..22: mol_type = other RNA
tcttttctgacttttctgccca

SEQ ID NO: 29673 - RNA, 22 nt, synthetic construct
  source 1..22: mol_type = other RNA
tgaagtgatcggtgagagtatg

SEQ ID NO: 29674 - RNA, 22 nt, synthetic construct
  source 1..22: mol_type = other RNA
tgacttttctgcccaacttctg

SEQ ID NO: 29675 - RNA, 22 nt, synthetic construct
  source 1..22: mol_type = other RNA
tgagaaaaaccagagaccaact

SEQ ID NO: 29676 - RNA, 22 nt, synthetic construct
  source 1..22: mol_type = other RNA
tgagagtatggagatgccagca

SEQ ID NO: 29677 - RNA, 22 nt, synthetic construct
  source 1..22: mol_type = other RNA
tgagcccctccctgatccaacc

SEQ ID NO: 29678 - RNA, 22 nt, synthetic construct
  source 1..22: mol_type = other RNA
tgagtgagcccctccctgatcc

SEQ ID NO: 29679 - RNA, 22 nt, synthetic construct
  source 1..22: mol_type = other RNA
tgagttggtctctggtttttct

SEQ ID NO: 29680 - RNA, 22 nt, synthetic construct
  source 1..22: mol_type = other RNA
tgatcggtgagagtatggagat

SEQ ID NO: 29681 - RNA, 22 nt, synthetic construct
  source 1..22: mol_type = other RNA
tgattgtgtgagttggtctctg

SEQ ID NO: 29682 - RNA, 22 nt, synthetic construct
  source 1..22: mol_type = other RNA
tgccagcagaagttgggcagaa

SEQ ID NO: 29683 - RNA, 22 nt, synthetic construct
  source 1..22: mol_type = other RNA
tgcccaacttctgctggcatct

SEQ ID NO: 29684 - RNA, 22 nt, synthetic construct
  source 1..22: mol_type = other RNA
tgctctactttgagaaaaacca

SEQ ID NO: 29685 - RNA, 22 nt, synthetic construct
  source 1..22: mol_type = other RNA
tgctggcatctccatactctca

SEQ ID NO: 29686 - RNA, 22 nt, synthetic construct
  source 1..22: mol_type = other RNA
tggagatgccagcagaagttgg

SEQ ID NO: 29687 - RNA, 22 nt, synthetic construct
  source 1..22: mol_type = other RNA
tggatcagggaggggctcactc

SEQ ID NO: 29688 - RNA, 22 nt, synthetic construct
  source 1..22: mol_type = other RNA
tggcatctccatactctcaccg

SEQ ID NO: 29689 - RNA, 22 nt, synthetic construct
  source 1..22: mol_type = other RNA
tgggcagaaaagtcagaaaaga

SEQ ID NO: 29690 - RNA, 22 nt, synthetic construct
  source 1..22: mol_type = other RNA
tggtcctatgtgctctactttg

SEQ ID NO: 29691 - RNA, 22 nt, synthetic construct
  source 1..22: mol_type = other RNA
tggtctctggtttttctcaaag

SEQ ID NO: 29692 - RNA, 22 nt, synthetic construct
  source 1..22: mol_type = other RNA
tggtttttctcaaagtagagca

SEQ ID NO: 29693 - RNA, 22 nt, synthetic construct
  source 1..22: mol_type = other RNA
tgtgagttggtctctggttttt

SEQ ID NO: 29694 - RNA, 22 nt, synthetic construct
  source 1..22: mol_type = other RNA
tgtgctctactttgagaaaaac

SEQ ID NO: 29695 - RNA, 22 nt, synthetic construct
  source 1..22: mol_type = other RNA
tgtgtgagttggtctctggttt

SEQ ID NO: 29696 - RNA, 22 nt, synthetic construct
  source 1..22: mol_type = other RNA
ttcatctggtcctatgtgctct

SEQ ID NO: 29697 - RNA, 22 nt, synthetic construct
  source 1..22: mol_type = other RNA
ttcattgattgtgtgagttggt

SEQ ID NO: 29698 - RNA, 22 nt, synthetic construct
  source 1..22: mol_type = other RNA
ttctcaaagtagagcacatagg

SEQ ID NO: 29699 - RNA, 22 nt, synthetic construct
  source 1..22: mol_type = other RNA
ttctgacttttctgcccaactt

SEQ ID NO: 29700 - RNA, 22 nt, synthetic construct
  source 1..22: mol_type = other RNA
ttctgcccaacttctgctggca

SEQ ID NO: 29701 - RNA, 22 nt, synthetic construct
  source 1..22: mol_type = other RNA
ttctgctggcatctccatactc

SEQ ID NO: 29702 - RNA, 22 nt, synthetic construct
  source 1..22: mol_type = other RNA
ttgagaaaaaccagagaccaac

SEQ ID NO: 29703 - RNA, 22 nt, synthetic construct
  source 1..22: mol_type = other RNA
ttgattgtgtgagttggtctct

SEQ ID NO: 29704 - RNA, 22 nt, synthetic construct
  source 1..22: mol_type = other RNA
ttggatcagggaggggctcact

SEQ ID NO: 29705 - RNA, 22 nt, synthetic construct
  source 1..22: mol_type = other RNA
ttgggcagaaaagtcagaaaag

SEQ ID NO: 29706 - RNA, 22 nt, synthetic construct
  source 1..22: mol_type = other RNA
ttggtctctggtttttctcaaa

SEQ ID NO: 29707 - RNA, 22 nt, synthetic construct
  source 1..22: mol_type = other RNA
ttgtgtgagttggtctctggtt

SEQ ID NO: 29708 - RNA, 22 nt, synthetic construct
  source 1..22: mol_type = other RNA
tttcattgattgtgtgagttgg

SEQ ID NO: 29709 - RNA, 22 nt, synthetic construct
  source 1..22: mol_type = other RNA
tttctcaaagtagagcacatag

SEQ ID NO: 29710 - RNA, 22 nt, synthetic construct
  source 1..22: mol_type = other RNA
tttctgacttttctgcccaact

SEQ ID NO: 29711 - RNA, 22 nt, synthetic construct
  source 1..22: mol_type = other RNA
tttctgcccaacttctgctggc

SEQ ID NO: 29712 - RNA, 22 nt, synthetic construct
  source 1..22: mol_type = other RNA
tttgagaaaaaccagagaccaa

SEQ ID NO: 29713 - RNA, 22 nt, synthetic construct
  source 1..22: mol_type = other RNA
ttttctcaaagtagagcacata

SEQ ID NO: 29714 - RNA, 22 nt, synthetic construct
  source 1..22: mol_type = other RNA
ttttctgacttttctgcccaac

SEQ ID NO: 29715 - RNA, 22 nt, synthetic construct
  source 1..22: mol_type = other RNA
ttttctgcccaacttctgctgg

SEQ ID NO: 29716 - RNA, 22 nt, synthetic construct
  source 1..22: mol_type = other RNA
tttttctcaaagtagagcacat

SEQ ID NO: 29717 - RNA, 20 nt, synthetic construct
  source 1..20: mol_type = other RNA
aaaacatgtgatcagctgcc

SEQ ID NO: 29718 - RNA, 20 nt, synthetic construct
  source 1..20: mol_type = other RNA
aaacatgtgatcagctgccc

SEQ ID NO: 29719 - RNA, 20 nt, synthetic construct
  source 1..20: mol_type = other RNA
aacatgtgatcagctgcccc

SEQ ID NO: 29720 - RNA, 20 nt, synthetic construct
  source 1..20: mol_type = other RNA
aaccccagcccacctgccct

SEQ ID NO: 29721 - RNA, 20 nt, synthetic construct
  source 1..20: mol_type = other RNA
aagcactggaagccaggtgt

SEQ ID NO: 29722 - RNA, 20 nt, synthetic construct
  source 1..20: mol_type = other RNA
aagccaggtgtgcagggcag

SEQ ID NO: 29723 - RNA, 20 nt, synthetic construct
  source 1..20: mol_type = other RNA
aagctcctctgggaaggctg

SEQ ID NO: 29724 - RNA, 20 nt, synthetic construct
  source 1..20: mol_type = other RNA
aaggcatccacccttcccaa

SEQ ID NO: 29725 - RNA, 20 nt, synthetic construct
  source 1..20: mol_type = other RNA
aaggctgcagagaaaacatg

SEQ ID NO: 29726 - RNA, 20 nt, synthetic construct
  source 1..20: mol_type = other RNA
acacctggcttccagtgctt

SEQ ID NO: 29727 - RNA, 20 nt, synthetic construct
  source 1..20: mol_type = other RNA
acatcctctccctggggcag

SEQ ID NO: 29728 - RNA, 20 nt, synthetic construct
  source 1..20: mol_type = other RNA
acatgtgatcagctgcccca

SEQ ID NO: 29729 - RNA, 20 nt, synthetic construct
  source 1..20: mol_type = other RNA
acatgttttctctgcagcct

SEQ ID NO: 29730 - RNA, 20 nt, synthetic construct
  source 1..20: mol_type = other RNA
accccagcccacctgccctg

SEQ ID NO: 29731 - RNA, 20 nt, synthetic construct
  source 1..20: mol_type = other RNA
acccttcccaaccccagccc

SEQ ID NO: 29732 - RNA, 20 nt, synthetic construct
  source 1..20: mol_type = other RNA
acctgaagcactggaagcca

SEQ ID NO: 29733 - RNA, 20 nt, synthetic construct
  source 1..20: mol_type = other RNA
acctgccctgcacacctggc

SEQ ID NO: 29734 - RNA, 20 nt, synthetic construct
  source 1..20: mol_type = other RNA
acctggcttccagtgcttca

SEQ ID NO: 29735 - RNA, 20 nt, synthetic construct
  source 1..20: mol_type = other RNA
actggaagccaggtgtgcag

SEQ ID NO: 29736 - RNA, 20 nt, synthetic construct
  source 1..20: mol_type = other RNA
agaaaacatgtgatcagctg

SEQ ID NO: 29737 - RNA, 20 nt, synthetic construct
  source 1..20: mol_type = other RNA
agacctgaagcactggaagc

SEQ ID NO: 29738 - RNA, 20 nt, synthetic construct
  source 1..20: mol_type = other RNA
agagaaaacatgtgatcagc

SEQ ID NO: 29739 - RNA, 20 nt, synthetic construct
  source 1..20: mol_type = other RNA
agaggagcttccggcagacc

SEQ ID NO: 29740 - RNA, 20 nt, synthetic construct
  source 1..20: mol_type = other RNA
agcactggaagccaggtgtg

SEQ ID NO: 29741 - RNA, 20 nt, synthetic construct
  source 1..20: mol_type = other RNA
agccaggtgtgcagggcagg

SEQ ID NO: 29742 - RNA, 20 nt, synthetic construct
  source 1..20: mol_type = other RNA
agcccacctgccctgcacac

SEQ ID NO: 29743 - RNA, 20 nt, synthetic construct
  source 1..20: mol_type = other RNA
agccttcccagaggagcttc

SEQ ID NO: 29744 - RNA, 20 nt, synthetic construct
  source 1..20: mol_type = other RNA
agctcctctgggaaggctgc

SEQ ID NO: 29745 - RNA, 20 nt, synthetic construct
  source 1..20: mol_type = other RNA
agctgatcacatgttttctc

SEQ ID NO: 29746 - RNA, 20 nt, synthetic construct
  source 1..20: mol_type = other RNA
agcttccggcagacctgaag

SEQ ID NO: 29747 - RNA, 20 nt, synthetic construct
  source 1..20: mol_type = other RNA
aggagcttccggcagacctg

SEQ ID NO: 29748 - RNA, 20 nt, synthetic construct
  source 1..20: mol_type = other RNA
aggcatccacccttcccaac

SEQ ID NO: 29749 - RNA, 20 nt, synthetic construct
  source 1..20: mol_type = other RNA
aggctgcagagaaaacatgt

SEQ ID NO: 29750 - RNA, 20 nt, synthetic construct
  source 1..20: mol_type = other RNA
agggcaggtgggctggggtt

SEQ ID NO: 29751 - RNA, 20 nt, synthetic construct
  source 1..20: mol_type = other RNA
aggtctgccggaagctcctc

SEQ ID NO: 29752 - RNA, 20 nt, synthetic construct
  source 1..20: mol_type = other RNA
aggtgggctggggttgggaa

SEQ ID NO: 29753 - RNA, 20 nt, synthetic construct
  source 1..20: mol_type = other RNA
aggtgtgcagggcaggtggg

SEQ ID NO: 29754 - RNA, 20 nt, synthetic construct
  source 1..20: mol_type = other RNA
agtgcttcaggtctgccgga

SEQ ID NO: 29755 - RNA, 20 nt, synthetic construct
  source 1..20: mol_type = other RNA
atcacatgttttctctgcag

SEQ ID NO: 29756 - RNA, 20 nt, synthetic construct
  source 1..20: mol_type = other RNA
atcagctgccccagggagag

SEQ ID NO: 29757 - RNA, 20 nt, synthetic construct
  source 1..20: mol_type = other RNA
atccacccttcccaacccca

SEQ ID NO: 29758 - RNA, 20 nt, synthetic construct
  source 1..20: mol_type = other RNA
atcctctccctggggcagct

SEQ ID NO: 29759 - RNA, 20 nt, synthetic construct
  source 1..20: mol_type = other RNA
atgtgatcagctgccccagg

SEQ ID NO: 29760 - RNA, 20 nt, synthetic construct
  source 1..20: mol_type = other RNA
atgttttctctgcagccttc

SEQ ID NO: 29761 - RNA, 20 nt, synthetic construct
  source 1..20: mol_type = other RNA
caaccccagcccacctgccc

SEQ ID NO: 29762 - RNA, 20 nt, synthetic construct
  source 1..20: mol_type = other RNA
caaggcatccacccttccca

SEQ ID NO: 29763 - RNA, 20 nt, synthetic construct
  source 1..20: mol_type = other RNA
cacacctggcttccagtgct

SEQ ID NO: 29764 - RNA, 20 nt, synthetic construct
  source 1..20: mol_type = other RNA
cacatgttttctctgcagcc

SEQ ID NO: 29765 - RNA, 20 nt, synthetic construct
  source 1..20: mol_type = other RNA
cacccttcccaaccccagcc

SEQ ID NO: 29766 - RNA, 20 nt, synthetic construct
  source 1..20: mol_type = other RNA
cacctgccctgcacacctgg

SEQ ID NO: 29767 - RNA, 20 nt, synthetic construct
  source 1..20: mol_type = other RNA
cacctggcttccagtgcttc

SEQ ID NO: 29768 - RNA, 20 nt, synthetic construct
  source 1..20: mol_type = other RNA
cactggaagccaggtgtgca

SEQ ID NO: 29769 - RNA, 20 nt, synthetic construct
  source 1..20: mol_type = other RNA
cagacctgaagcactggaag

SEQ ID NO: 29770 - RNA, 20 nt, synthetic construct
  source 1..20: mol_type = other RNA
cagagaaaacatgtgatcag

SEQ ID NO: 29771 - RNA, 20 nt, synthetic construct
  source 1..20: mol_type = other RNA
cagaggagcttccggcagac

SEQ ID NO: 29772 - RNA, 20 nt, synthetic construct
  source 1..20: mol_type = other RNA
cagcccacctgccctgcaca

SEQ ID NO: 29773 - RNA, 20 nt, synthetic construct
  source 1..20: mol_type = other RNA
cagccttcccagaggagctt

SEQ ID NO: 29774 - RNA, 20 nt, synthetic construct
  source 1..20: mol_type = other RNA
cagctgatcacatgttttct

SEQ ID NO: 29775 - RNA, 20 nt, synthetic construct
  source 1..20: mol_type = other RNA
cagggcaggtgggctggggt

SEQ ID NO: 29776 - RNA, 20 nt, synthetic construct
  source 1..20: mol_type = other RNA
caggtctgccggaagctcct

SEQ ID NO: 29777 - RNA, 20 nt, synthetic construct
  source 1..20: mol_type = other RNA
caggtgggctggggttggga

SEQ ID NO: 29778 - RNA, 20 nt, synthetic construct
  source 1..20: mol_type = other RNA
caggtgtgcagggcaggtgg

SEQ ID NO: 29779 - RNA, 20 nt, synthetic construct
  source 1..20: mol_type = other RNA
cagtgcttcaggtctgccgg

SEQ ID NO: 29780 - RNA, 20 nt, synthetic construct
  source 1..20: mol_type = other RNA
catccacccttcccaacccc

SEQ ID NO: 29781 - RNA, 20 nt, synthetic construct
  source 1..20: mol_type = other RNA
catcctctccctggggcagc

SEQ ID NO: 29782 - RNA, 20 nt, synthetic construct
  source 1..20: mol_type = other RNA
catgtgatcagctgccccag

SEQ ID NO: 29783 - RNA, 20 nt, synthetic construct
  source 1..20: mol_type = other RNA
catgttttctctgcagcctt

SEQ ID NO: 29784 - RNA, 20 nt, synthetic construct
  source 1..20: mol_type = other RNA
ccaaccccagcccacctgcc

SEQ ID NO: 29785 - RNA, 20 nt, synthetic construct
  source 1..20: mol_type = other RNA
ccacccttcccaaccccagc

SEQ ID NO: 29786 - RNA, 20 nt, synthetic construct
  source 1..20: mol_type = other RNA
ccacctgccctgcacacctg

SEQ ID NO: 29787 - RNA, 20 nt, synthetic construct
  source 1..20: mol_type = other RNA
ccagaggagcttccggcaga

SEQ ID NO: 29788 - RNA, 20 nt, synthetic construct
  source 1..20: mol_type = other RNA
ccagcccacctgccctgcac

SEQ ID NO: 29789 - RNA, 20 nt, synthetic construct
  source 1..20: mol_type = other RNA
ccaggtgtgcagggcaggtg

SEQ ID NO: 29790 - RNA, 20 nt, synthetic construct
  source 1..20: mol_type = other RNA
ccagtgcttcaggtctgccg

SEQ ID NO: 29791 - RNA, 20 nt, synthetic construct
  source 1..20: mol_type = other RNA
cccaaccccagcccacctgc

SEQ ID NO: 29792 - RNA, 20 nt, synthetic construct
  source 1..20: mol_type = other RNA
cccacctgccctgcacacct

SEQ ID NO: 29793 - RNA, 20 nt, synthetic construct
  source 1..20: mol_type = other RNA
cccagaggagcttccggcag

SEQ ID NO: 29794 - RNA, 20 nt, synthetic construct
  source 1..20: mol_type = other RNA
cccagcccacctgccctgca

SEQ ID NO: 29795 - RNA, 20 nt, synthetic construct
  source 1..20: mol_type = other RNA
ccccagcccacctgccctgc

SEQ ID NO: 29796 - RNA, 20 nt, synthetic construct
  source 1..20: mol_type = other RNA
ccctgcacacctggcttcca

SEQ ID NO: 29797 - RNA, 20 nt, synthetic construct
  source 1..20: mol_type = other RNA
ccctggggcagctgatcaca

SEQ ID NO: 29798 - RNA, 20 nt, synthetic construct
  source 1..20: mol_type = other RNA
cccttcccaaccccagccca

SEQ ID NO: 29799 - RNA, 20 nt, synthetic construct
  source 1..20: mol_type = other RNA
ccggaagctcctctgggaag

SEQ ID NO: 29800 - RNA, 20 nt, synthetic construct
  source 1..20: mol_type = other RNA
ccggcagacctgaagcactg

SEQ ID NO: 29801 - RNA, 20 nt, synthetic construct
  source 1..20: mol_type = other RNA
cctctccctggggcagctga

SEQ ID NO: 29802 - RNA, 20 nt, synthetic construct
  source 1..20: mol_type = other RNA
cctctgggaaggctgcagag

SEQ ID NO: 29803 - RNA, 20 nt, synthetic construct
  source 1..20: mol_type = other RNA
cctgaagcactggaagccag

SEQ ID NO: 29804 - RNA, 20 nt, synthetic construct
  source 1..20: mol_type = other RNA
cctgcacacctggcttccag

SEQ ID NO: 29805 - RNA, 20 nt, synthetic construct
  source 1..20: mol_type = other RNA
cctgccctgcacacctggct

SEQ ID NO: 29806 - RNA, 20 nt, synthetic construct
  source 1..20: mol_type = other RNA
cctggcttccagtgcttcag

SEQ ID NO: 29807 - RNA, 20 nt, synthetic construct
  source 1..20: mol_type = other RNA
cctggggcagctgatcacat

SEQ ID NO: 29808 - RNA, 20 nt, synthetic construct
  source 1..20: mol_type = other RNA
ccttcccaaccccagcccac

SEQ ID NO: 29809 - RNA, 20 nt, synthetic construct
  source 1..20: mol_type = other RNA
ccttcccagaggagcttccg

SEQ ID NO: 29810 - RNA, 20 nt, synthetic construct
  source 1..20: mol_type = other RNA
cggaagctcctctgggaagg

SEQ ID NO: 29811 - RNA, 20 nt, synthetic construct
  source 1..20: mol_type = other RNA
cggcagacctgaagcactgg

SEQ ID NO: 29812 - RNA, 20 nt, synthetic construct
  source 1..20: mol_type = other RNA
ctccctggggcagctgatca

SEQ ID NO: 29813 - RNA, 20 nt, synthetic construct
  source 1..20: mol_type = other RNA
ctcctctgggaaggctgcag

SEQ ID NO: 29814 - RNA, 20 nt, synthetic construct
  source 1..20: mol_type = other RNA
ctctccctggggcagctgat

SEQ ID NO: 29815 - RNA, 20 nt, synthetic construct
  source 1..20: mol_type = other RNA
ctctgcagccttcccagagg

SEQ ID NO: 29816 - RNA, 20 nt, synthetic construct
  source 1..20: mol_type = other RNA
ctctgggaaggctgcagaga

SEQ ID NO: 29817 - RNA, 20 nt, synthetic construct
  source 1..20: mol_type = other RNA
ctgaagcactggaagccagg

SEQ ID NO: 29818 - RNA, 20 nt, synthetic construct
  source 1..20: mol_type = other RNA
ctgatcacatgttttctctg

SEQ ID NO: 29819 - RNA, 20 nt, synthetic construct
  source 1..20: mol_type = other RNA
ctgcacacctggcttccagt

SEQ ID NO: 29820 - RNA, 20 nt, synthetic construct
  source 1..20: mol_type = other RNA
ctgcagagaaaacatgtgat

SEQ ID NO: 29821 - RNA, 20 nt, synthetic construct
  source 1..20: mol_type = other RNA
ctgcagccttcccagaggag

SEQ ID NO: 29822 - RNA, 20 nt, synthetic construct
  source 1..20: mol_type = other RNA
ctgccctgcacacctggctt

SEQ ID NO: 29823 - RNA, 20 nt, synthetic construct
  source 1..20: mol_type = other RNA
ctgccggaagctcctctggg

SEQ ID NO: 29824 - RNA, 20 nt, synthetic construct
  source 1..20: mol_type = other RNA
ctggaagccaggtgtgcagg

SEQ ID NO: 29825 - RNA, 20 nt, synthetic construct
  source 1..20: mol_type = other RNA
ctggcttccagtgcttcagg

SEQ ID NO: 29826 - RNA, 20 nt, synthetic construct
  source 1..20: mol_type = other RNA
ctgggaaggctgcagagaaa

SEQ ID NO: 29827 - RNA, 20 nt, synthetic construct
  source 1..20: mol_type = other RNA
ctggggcagctgatcacatg

SEQ ID NO: 29828 - RNA, 20 nt, synthetic construct
  source 1..20: mol_type = other RNA
cttcaggtctgccggaagct

SEQ ID NO: 29829 - RNA, 20 nt, synthetic construct
  source 1..20: mol_type = other RNA
cttccagtgcttcaggtctg

SEQ ID NO: 29830 - RNA, 20 nt, synthetic construct
  source 1..20: mol_type = other RNA
cttcccaaccccagcccacc

SEQ ID NO: 29831 - RNA, 20 nt, synthetic construct
  source 1..20: mol_type = other RNA
cttcccagaggagcttccgg

SEQ ID NO: 29832 - RNA, 20 nt, synthetic construct
  source 1..20: mol_type = other RNA
cttccggcagacctgaagca

SEQ ID NO: 29833 - RNA, 20 nt, synthetic construct
  source 1..20: mol_type = other RNA
gaaaacatgtgatcagctgc

SEQ ID NO: 29834 - RNA, 20 nt, synthetic construct
  source 1..20: mol_type = other RNA
gaagcactggaagccaggtg

SEQ ID NO: 29835 - RNA, 20 nt, synthetic construct
  source 1..20: mol_type = other RNA
gaagccaggtgtgcagggca

SEQ ID NO: 29836 - RNA, 20 nt, synthetic construct
  source 1..20: mol_type = other RNA
gaagctcctctgggaaggct

SEQ ID NO: 29837 - RNA, 20 nt, synthetic construct
  source 1..20: mol_type = other RNA
gaaggctgcagagaaaacat

SEQ ID NO: 29838 - RNA, 20 nt, synthetic construct
  source 1..20: mol_type = other RNA
gacatcctctccctggggca

SEQ ID NO: 29839 - RNA, 20 nt, synthetic construct
  source 1..20: mol_type = other RNA
gacctgaagcactggaagcc

SEQ ID NO: 29840 - RNA, 20 nt, synthetic construct
  source 1..20: mol_type = other RNA
gagaaaacatgtgatcagct

SEQ ID NO: 29841 - RNA, 20 nt, synthetic construct
  source 1..20: mol_type = other RNA
gagcttccggcagacctgaa

SEQ ID NO: 29842 - RNA, 20 nt, synthetic construct
  source 1..20: mol_type = other RNA
gaggagcttccggcagacct

SEQ ID NO: 29843 - RNA, 20 nt, synthetic construct
  source 1..20: mol_type = other RNA
gatcacatgttttctctgca

SEQ ID NO: 29844 - RNA, 20 nt, synthetic construct
  source 1..20: mol_type = other RNA
gatcagctgccccagggaga

SEQ ID NO: 29845 - RNA, 20 nt, synthetic construct
  source 1..20: mol_type = other RNA
gcacacctggcttccagtgc

SEQ ID NO: 29846 - RNA, 20 nt, synthetic construct
  source 1..20: mol_type = other RNA
gcactggaagccaggtgtgc

SEQ ID NO: 29847 - RNA, 20 nt, synthetic construct
  source 1..20: mol_type = other RNA
gcagacctgaagcactggaa

SEQ ID NO: 29848 - RNA, 20 nt, synthetic construct
  source 1..20: mol_type = other RNA
gcagagaaaacatgtgatca

SEQ ID NO: 29849 - RNA, 20 nt, synthetic construct
  source 1..20: mol_type = other RNA
gcagccttcccagaggagct

SEQ ID NO: 29850 - RNA, 20 nt, synthetic construct
  source 1..20: mol_type = other RNA
gcagctgatcacatgttttc

SEQ ID NO: 29851 - RNA, 20 nt, synthetic construct
  source 1..20: mol_type = other RNA
gcagggcaggtgggctgggg

SEQ ID NO: 29852 - RNA, 20 nt, synthetic construct
  source 1..20: mol_type = other RNA
gcaggtgggctggggttggg

SEQ ID NO: 29853 - RNA, 20 nt, synthetic construct
  source 1..20: mol_type = other RNA
gcatccacccttcccaaccc

SEQ ID NO: 29854 - RNA, 20 nt, synthetic construct
  source 1..20: mol_type = other RNA
gccaggtgtgcagggcaggt

SEQ ID NO: 29855 - RNA, 20 nt, synthetic construct
  source 1..20: mol_type = other RNA
gcccacctgccctgcacacc

SEQ ID NO: 29856 - RNA, 20 nt, synthetic construct
  source 1..20: mol_type = other RNA
gccctgcacacctggcttcc

SEQ ID NO: 29857 - RNA, 20 nt, synthetic construct
  source 1..20: mol_type = other RNA
gccggaagctcctctgggaa

SEQ ID NO: 29858 - RNA, 20 nt, synthetic construct
  source 1..20: mol_type = other RNA
gccttcccagaggagcttcc

SEQ ID NO: 29859 - RNA, 20 nt, synthetic construct
  source 1..20: mol_type = other RNA
gctcctctgggaaggctgca

SEQ ID NO: 29860 - RNA, 20 nt, synthetic construct
  source 1..20: mol_type = other RNA
gctgatcacatgttttctct

SEQ ID NO: 29861 - RNA, 20 nt, synthetic construct
  source 1..20: mol_type = other RNA
gctgcagagaaaacatgtga

SEQ ID NO: 29862 - RNA, 20 nt, synthetic construct
  source 1..20: mol_type = other RNA
gctggggttgggaagggtgg

SEQ ID NO: 29863 - RNA, 20 nt, synthetic construct
  source 1..20: mol_type = other RNA
gcttcaggtctgccggaagc

SEQ ID NO: 29864 - RNA, 20 nt, synthetic construct
  source 1..20: mol_type = other RNA
gcttccagtgcttcaggtct

SEQ ID NO: 29865 - RNA, 20 nt, synthetic construct
  source 1..20: mol_type = other RNA
gcttccggcagacctgaagc

SEQ ID NO: 29866 - RNA, 20 nt, synthetic construct
  source 1..20: mol_type = other RNA
ggaagccaggtgtgcagggc

SEQ ID NO: 29867 - RNA, 20 nt, synthetic construct
  source 1..20: mol_type = other RNA
ggaagctcctctgggaaggc

SEQ ID NO: 29868 - RNA, 20 nt, synthetic construct
  source 1..20: mol_type = other RNA
ggaaggctgcagagaaaaca

SEQ ID NO: 29869 - RNA, 20 nt, synthetic construct
  source 1..20: mol_type = other RNA
ggacatcctctccctggggc

SEQ ID NO: 29870 - RNA, 20 nt, synthetic construct
  source 1..20: mol_type = other RNA
ggagcttccggcagacctga

SEQ ID NO: 29871 - RNA, 20 nt, synthetic construct
  source 1..20: mol_type = other RNA
ggcagacctgaagcactgga

SEQ ID NO: 29872 - RNA, 20 nt, synthetic construct
  source 1..20: mol_type = other RNA
ggcagctgatcacatgtttt

SEQ ID NO: 29873 - RNA, 20 nt, synthetic construct
  source 1..20: mol_type = other RNA
ggcaggtgggctggggttgg

SEQ ID NO: 29874 - RNA, 20 nt, synthetic construct
  source 1..20: mol_type = other RNA
ggcatccacccttcccaacc

SEQ ID NO: 29875 - RNA, 20 nt, synthetic construct
  source 1..20: mol_type = other RNA
ggctgcagagaaaacatgtg

SEQ ID NO: 29876 - RNA, 20 nt, synthetic construct
  source 1..20: mol_type = other RNA
ggctggggttgggaagggtg

SEQ ID NO: 29877 - RNA, 20 nt, synthetic construct
  source 1..20: mol_type = other RNA
ggcttccagtgcttcaggtc

SEQ ID NO: 29878 - RNA, 20 nt, synthetic construct
  source 1..20: mol_type = other RNA
gggaaggctgcagagaaaac

SEQ ID NO: 29879 - RNA, 20 nt, synthetic construct
  source 1..20: mol_type = other RNA
gggacatcctctccctgggg

SEQ ID NO: 29880 - RNA, 20 nt, synthetic construct
  source 1..20: mol_type = other RNA
gggcagctgatcacatgttt

SEQ ID NO: 29881 - RNA, 20 nt, synthetic construct
  source 1..20: mol_type = other RNA
gggcaggtgggctggggttg

SEQ ID NO: 29882 - RNA, 20 nt, synthetic construct
  source 1..20: mol_type = other RNA
gggctggggttgggaagggt

SEQ ID NO: 29883 - RNA, 20 nt, synthetic construct
  source 1..20: mol_type = other RNA
ggggcagctgatcacatgtt

SEQ ID NO: 29884 - RNA, 20 nt, synthetic construct
  source 1..20: mol_type = other RNA
ggtctgccggaagctcctct

SEQ ID NO: 29885 - RNA, 20 nt, synthetic construct
  source 1..20: mol_type = other RNA
ggtgggctggggttgggaag

SEQ ID NO: 29886 - RNA, 20 nt, synthetic construct
  source 1..20: mol_type = other RNA
ggtgtgcagggcaggtgggc

SEQ ID NO: 29887 - RNA, 20 nt, synthetic construct
  source 1..20: mol_type = other RNA
gtctgccggaagctcctctg

SEQ ID NO: 29888 - RNA, 20 nt, synthetic construct
  source 1..20: mol_type = other RNA
gtgatcagctgccccaggga

SEQ ID NO: 29889 - RNA, 20 nt, synthetic construct
  source 1..20: mol_type = other RNA
gtgcagggcaggtgggctgg

SEQ ID NO: 29890 - RNA, 20 nt, synthetic construct
  source 1..20: mol_type = other RNA
gtgcttcaggtctgccggaa

SEQ ID NO: 29891 - RNA, 20 nt, synthetic construct
  source 1..20: mol_type = other RNA
gtgggctggggttgggaagg

SEQ ID NO: 29892 - RNA, 20 nt, synthetic construct
  source 1..20: mol_type = other RNA
gtgtgcagggcaggtgggct

SEQ ID NO: 29893 - RNA, 20 nt, synthetic construct
  source 1..20: mol_type = other RNA
gttttctctgcagccttccc

SEQ ID NO: 29894 - RNA, 20 nt, synthetic construct
  source 1..20: mol_type = other RNA
tcacatgttttctctgcagc

SEQ ID NO: 29895 - RNA, 20 nt, synthetic construct
  source 1..20: mol_type = other RNA
tcaggtctgccggaagctcc

SEQ ID NO: 29896 - RNA, 20 nt, synthetic construct
  source 1..20: mol_type = other RNA
tccacccttcccaaccccag

SEQ ID NO: 29897 - RNA, 20 nt, synthetic construct
  source 1..20: mol_type = other RNA
tccagtgcttcaggtctgcc

SEQ ID NO: 29898 - RNA, 20 nt, synthetic construct
  source 1..20: mol_type = other RNA
tcccaaccccagcccacctg

SEQ ID NO: 29899 - RNA, 20 nt, synthetic construct
  source 1..20: mol_type = other RNA
tcccagaggagcttccggca

SEQ ID NO: 29900 - RNA, 20 nt, synthetic construct
  source 1..20: mol_type = other RNA
tccctggggcagctgatcac

SEQ ID NO: 29901 - RNA, 20 nt, synthetic construct
  source 1..20: mol_type = other RNA
tccggcagacctgaagcact

SEQ ID NO: 29902 - RNA, 20 nt, synthetic construct
  source 1..20: mol_type = other RNA
tcctctccctggggcagctg

SEQ ID NO: 29903 - RNA, 20 nt, synthetic construct
  source 1..20: mol_type = other RNA
tcctctgggaaggctgcaga

SEQ ID NO: 29904 - RNA, 20 nt, synthetic construct
  source 1..20: mol_type = other RNA
tctccctggggcagctgatc

SEQ ID NO: 29905 - RNA, 20 nt, synthetic construct
  source 1..20: mol_type = other RNA
tctctgcagccttcccagag

SEQ ID NO: 29906 - RNA, 20 nt, synthetic construct
  source 1..20: mol_type = other RNA
tctgcagccttcccagagga

SEQ ID NO: 29907 - RNA, 20 nt, synthetic construct
  source 1..20: mol_type = other RNA
tctgccggaagctcctctgg

SEQ ID NO: 29908 - RNA, 20 nt, synthetic construct
  source 1..20: mol_type = other RNA
tctgggaaggctgcagagaa

SEQ ID NO: 29909 - RNA, 20 nt, synthetic construct
  source 1..20: mol_type = other RNA
tgaagcactggaagccaggt

SEQ ID NO: 29910 - RNA, 20 nt, synthetic construct
  source 1..20: mol_type = other RNA
tgatcacatgttttctctgc

SEQ ID NO: 29911 - RNA, 20 nt, synthetic construct
  source 1..20: mol_type = other RNA
tgatcagctgccccagggag

SEQ ID NO: 29912 - RNA, 20 nt, synthetic construct
  source 1..20: mol_type = other RNA
tgcacacctggcttccagtg

SEQ ID NO: 29913 - RNA, 20 nt, synthetic construct
  source 1..20: mol_type = other RNA
tgcagagaaaacatgtgatc

SEQ ID NO: 29914 - RNA, 20 nt, synthetic construct
  source 1..20: mol_type = other RNA
tgcagccttcccagaggagc

SEQ ID NO: 29915 - RNA, 20 nt, synthetic construct
  source 1..20: mol_type = other RNA
tgcagggcaggtgggctggg

SEQ ID NO: 29916 - RNA, 20 nt, synthetic construct
  source 1..20: mol_type = other RNA
tgccctgcacacctggcttc

SEQ ID NO: 29917 - RNA, 20 nt, synthetic construct
  source 1..20: mol_type = other RNA
tgccggaagctcctctggga

SEQ ID NO: 29918 - RNA, 20 nt, synthetic construct
  source 1..20: mol_type = other RNA
tgcttcaggtctgccggaag

SEQ ID NO: 29919 - RNA, 20 nt, synthetic construct
  source 1..20: mol_type = other RNA
tggaagccaggtgtgcaggg

SEQ ID NO: 29920 - RNA, 20 nt, synthetic construct
  source 1..20: mol_type = other RNA
tggcttccagtgcttcaggt

SEQ ID NO: 29921 - RNA, 20 nt, synthetic construct
  source 1..20: mol_type = other RNA
tgggaaggctgcagagaaaa

SEQ ID NO: 29922 - RNA, 20 nt, synthetic construct
  source 1..20: mol_type = other RNA
tgggctggggttgggaaggg

SEQ ID NO: 29923 - RNA, 20 nt, synthetic construct
  source 1..20: mol_type = other RNA
tggggcagctgatcacatgt

SEQ ID NO: 29924 - RNA, 20 nt, synthetic construct
  source 1..20: mol_type = other RNA
tgtgatcagctgccccaggg

SEQ ID NO: 29925 - RNA, 20 nt, synthetic construct
  source 1..20: mol_type = other RNA
tgtgcagggcaggtgggctg

SEQ ID NO: 29926 - RNA, 20 nt, synthetic construct
  source 1..20: mol_type = other RNA
tgttttctctgcagccttcc

SEQ ID NO: 29927 - RNA, 20 nt, synthetic construct
  source 1..20: mol_type = other RNA
ttcaggtctgccggaagctc

SEQ ID NO: 29928 - RNA, 20 nt, synthetic construct
  source 1..20: mol_type = other RNA
ttccagtgcttcaggtctgc

SEQ ID NO: 29929 - RNA, 20 nt, synthetic construct
  source 1..20: mol_type = other RNA
ttcccaaccccagcccacct

SEQ ID NO: 29930 - RNA, 20 nt, synthetic construct
  source 1..20: mol_type = other RNA
ttcccagaggagcttccggc

SEQ ID NO: 29931 - RNA, 20 nt, synthetic construct
  source 1..20: mol_type = other RNA
ttccggcagacctgaagcac

SEQ ID NO: 29932 - RNA, 20 nt, synthetic construct
  source 1..20: mol_type = other RNA
ttctctgcagccttcccaga

SEQ ID NO: 29933 - RNA, 20 nt, synthetic construct
  source 1..20: mol_type = other RNA
tttctctgcagccttcccag

SEQ ID NO: 29934 - RNA, 20 nt, synthetic construct
  source 1..20: mol_type = other RNA
ttttctctgcagccttccca

SEQ ID NO: 29935 - RNA, 21 nt, synthetic construct
  source 1..21: mol_type = other RNA
aaaacatgtgatcagctgccc

SEQ ID NO: 29936 - RNA, 21 nt, synthetic construct
  source 1..21: mol_type = other RNA
aaacatgtgatcagctgcccc

SEQ ID NO: 29937 - RNA, 21 nt, synthetic construct
  source 1..21: mol_type = other RNA
aacatgtgatcagctgcccca

SEQ ID NO: 29938 - RNA, 21 nt, synthetic construct
  source 1..21: mol_type = other RNA
aaccccagcccacctgccctg

SEQ ID NO: 29939 - RNA, 21 nt, synthetic construct
  source 1..21: mol_type = other RNA
aagcactggaagccaggtgtg

SEQ ID NO: 29940 - RNA, 21 nt, synthetic construct
  source 1..21: mol_type = other RNA
aagccaggtgtgcagggcagg

SEQ ID NO: 29941 - RNA, 21 nt, synthetic construct
  source 1..21: mol_type = other RNA
aagctcctctgggaaggctgc

SEQ ID NO: 29942 - RNA, 21 nt, synthetic construct
  source 1..21: mol_type = other RNA
aaggcatccacccttcccaac

SEQ ID NO: 29943 - RNA, 21 nt, synthetic construct
  source 1..21: mol_type = other RNA
aaggctgcagagaaaacatgt

SEQ ID NO: 29944 - RNA, 21 nt, synthetic construct
  source 1..21: mol_type = other RNA
acacctggcttccagtgcttc

SEQ ID NO: 29945 - RNA, 21 nt, synthetic construct
  source 1..21: mol_type = other RNA
acatcctctccctggggcagc

SEQ ID NO: 29946 - RNA, 21 nt, synthetic construct
  source 1..21: mol_type = other RNA
acatgtgatcagctgccccag

SEQ ID NO: 29947 - RNA, 21 nt, synthetic construct
  source 1..21: mol_type = other RNA
acatgttttctctgcagcctt

SEQ ID NO: 29948 - RNA, 21 nt, synthetic construct
  source 1..21: mol_type = other RNA
accccagcccacctgccctgc

SEQ ID NO: 29949 - RNA, 21 nt, synthetic construct
  source 1..21: mol_type = other RNA
acccttcccaaccccagccca

SEQ ID NO: 29950 - RNA, 21 nt, synthetic construct
  source 1..21: mol_type = other RNA
acctgaagcactggaagccag

SEQ ID NO: 29951 - RNA, 21 nt, synthetic construct
  source 1..21: mol_type = other RNA
acctgccctgcacacctggct

SEQ ID NO: 29952 - RNA, 21 nt, synthetic construct
  source 1..21: mol_type = other RNA
acctggcttccagtgcttcag

SEQ ID NO: 29953 - RNA, 21 nt, synthetic construct
  source 1..21: mol_type = other RNA
actggaagccaggtgtgcagg

SEQ ID NO: 29954 - RNA, 21 nt, synthetic construct
  source 1..21: mol_type = other RNA
agaaaacatgtgatcagctgc

SEQ ID NO: 29955 - RNA, 21 nt, synthetic construct
  source 1..21: mol_type = other RNA
agacctgaagcactggaagcc

SEQ ID NO: 29956 - RNA, 21 nt, synthetic construct
  source 1..21: mol_type = other RNA
agagaaaacatgtgatcagct

SEQ ID NO: 29957 - RNA, 21 nt, synthetic construct
  source 1..21: mol_type = other RNA
agaggagcttccggcagacct

SEQ ID NO: 29958 - RNA, 21 nt, synthetic construct
  source 1..21: mol_type = other RNA
agcactggaagccaggtgtgc

SEQ ID NO: 29959 - RNA, 21 nt, synthetic construct
  source 1..21: mol_type = other RNA
agccaggtgtgcagggcaggt

SEQ ID NO: 29960 - RNA, 21 nt, synthetic construct
  source 1..21: mol_type = other RNA
agcccacctgccctgcacacc

SEQ ID NO: 29961 - RNA, 21 nt, synthetic construct
  source 1..21: mol_type = other RNA
agccttcccagaggagcttcc

SEQ ID NO: 29962 - RNA, 21 nt, synthetic construct
  source 1..21: mol_type = other RNA
agctcctctgggaaggctgca

SEQ ID NO: 29963 - RNA, 21 nt, synthetic construct
  source 1..21: mol_type = other RNA
agctgatcacatgttttctct

SEQ ID NO: 29964 - RNA, 21 nt, synthetic construct
  source 1..21: mol_type = other RNA
agcttccggcagacctgaagc

SEQ ID NO: 29965 - RNA, 21 nt, synthetic construct
  source 1..21: mol_type = other RNA
aggagcttccggcagacctga

SEQ ID NO: 29966 - RNA, 21 nt, synthetic construct
  source 1..21: mol_type = other RNA
aggcatccacccttcccaacc

SEQ ID NO: 29967 - RNA, 21 nt, synthetic construct
  source 1..21: mol_type = other RNA
aggctgcagagaaaacatgtg

SEQ ID NO: 29968 - RNA, 21 nt, synthetic construct
  source 1..21: mol_type = other RNA
agggcaggtgggctggggttg

SEQ ID NO: 29969 - RNA, 21 nt, synthetic construct
  source 1..21: mol_type = other RNA
aggtctgccggaagctcctct

SEQ ID NO: 29970 - RNA, 21 nt, synthetic construct
  source 1..21: mol_type = other RNA
aggtgggctggggttgggaag

SEQ ID NO: 29971 - RNA, 21 nt, synthetic construct
  source 1..21: mol_type = other RNA
aggtgtgcagggcaggtgggc

SEQ ID NO: 29972 - RNA, 21 nt, synthetic construct
  source 1..21: mol_type = other RNA
agtgcttcaggtctgccggaa

SEQ ID NO: 29973 - RNA, 21 nt, synthetic construct
  source 1..21: mol_type = other RNA
atcacatgttttctctgcagc

SEQ ID NO: 29974 - RNA, 21 nt, synthetic construct
  source 1..21: mol_type = other RNA
atccacccttcccaaccccag

SEQ ID NO: 29975 - RNA, 21 nt, synthetic construct
  source 1..21: mol_type = other RNA
atcctctccctggggcagctg

SEQ ID NO: 29976 - RNA, 21 nt, synthetic construct
  source 1..21: mol_type = other RNA
atgtgatcagctgccccaggg

SEQ ID NO: 29977 - RNA, 21 nt, synthetic construct
  source 1..21: mol_type = other RNA
atgttttctctgcagccttcc

SEQ ID NO: 29978 - RNA, 21 nt, synthetic construct
  source 1..21: mol_type = other RNA
caaccccagcccacctgccct

SEQ ID NO: 29979 - RNA, 21 nt, synthetic construct
  source 1..21: mol_type = other RNA
caaggcatccacccttcccaa

SEQ ID NO: 29980 - RNA, 21 nt, synthetic construct
  source 1..21: mol_type = other RNA
cacacctggcttccagtgctt

SEQ ID NO: 29981 - RNA, 21 nt, synthetic construct
  source 1..21: mol_type = other RNA
cacatgttttctctgcagcct

SEQ ID NO: 29982 - RNA, 21 nt, synthetic construct
  source 1..21: mol_type = other RNA
cacccttcccaaccccagccc

SEQ ID NO: 29983 - RNA, 21 nt, synthetic construct
  source 1..21: mol_type = other RNA
cacctgccctgcacacctggc

SEQ ID NO: 29984 - RNA, 21 nt, synthetic construct
  source 1..21: mol_type = other RNA
cacctggcttccagtgcttca

SEQ ID NO: 29985 - RNA, 21 nt, synthetic construct
  source 1..21: mol_type = other RNA
cactggaagccaggtgtgcag

SEQ ID NO: 29986 - RNA, 21 nt, synthetic construct
  source 1..21: mol_type = other RNA
cagacctgaagcactggaagc

SEQ ID NO: 29987 - RNA, 21 nt, synthetic construct
  source 1..21: mol_type = other RNA
cagagaaaacatgtgatcagc

SEQ ID NO: 29988 - RNA, 21 nt, synthetic construct
  source 1..21: mol_type = other RNA
cagaggagcttccggcagacc

SEQ ID NO: 29989 - RNA, 21 nt, synthetic construct
  source 1..21: mol_type = other RNA
cagcccacctgccctgcacac

SEQ ID NO: 29990 - RNA, 21 nt, synthetic construct
  source 1..21: mol_type = other RNA
cagccttcccagaggagcttc

SEQ ID NO: 29991 - RNA, 21 nt, synthetic construct
  source 1..21: mol_type = other RNA
cagctgatcacatgttttctc

SEQ ID NO: 29992 - RNA, 21 nt, synthetic construct
  source 1..21: mol_type = other RNA
cagggcaggtgggctggggtt

SEQ ID NO: 29993 - RNA, 21 nt, synthetic construct
  source 1..21: mol_type = other RNA
caggtctgccggaagctcctc

SEQ ID NO: 29994 - RNA, 21 nt, synthetic construct
  source 1..21: mol_type = other RNA
caggtgggctggggttgggaa

SEQ ID NO: 29995 - RNA, 21 nt, synthetic construct
  source 1..21: mol_type = other RNA
caggtgtgcagggcaggtggg

SEQ ID NO: 29996 - RNA, 21 nt, synthetic construct
  source 1..21: mol_type = other RNA
cagtgcttcaggtctgccgga

SEQ ID NO: 29997 - RNA, 21 nt, synthetic construct
  source 1..21: mol_type = other RNA
catccacccttcccaacccca

SEQ ID NO: 29998 - RNA, 21 nt, synthetic construct
  source 1..21: mol_type = other RNA
catcctctccctggggcagct

SEQ ID NO: 29999 - RNA, 21 nt, synthetic construct
  source 1..21: mol_type = other RNA
catgtgatcagctgccccagg

SEQ ID NO: 30000 - RNA, 21 nt, synthetic construct
  source 1..21: mol_type = other RNA
catgttttctctgcagccttc

SEQ ID NO: 30001 - RNA, 21 nt, synthetic construct
  source 1..21: mol_type = other RNA
ccaaccccagcccacctgccc

SEQ ID NO: 30002 - RNA, 21 nt, synthetic construct
  source 1..21: mol_type = other RNA
ccacccttcccaaccccagcc

SEQ ID NO: 30003 - RNA, 21 nt, synthetic construct
  source 1..21: mol_type = other RNA
ccacctgccctgcacacctgg

SEQ ID NO: 30004 - RNA, 21 nt, synthetic construct
  source 1..21: mol_type = other RNA
ccagaggagcttccggcagac

SEQ ID NO: 30005 - RNA, 21 nt, synthetic construct
  source 1..21: mol_type = other RNA
ccagcccacctgccctgcaca

SEQ ID NO: 30006 - RNA, 21 nt, synthetic construct
  source 1..21: mol_type = other RNA
ccaggtgtgcagggcaggtgg

SEQ ID NO: 30007 - RNA, 21 nt, synthetic construct
  source 1..21: mol_type = other RNA
ccagtgcttcaggtctgccgg

SEQ ID NO: 30008 - RNA, 21 nt, synthetic construct
  source 1..21: mol_type = other RNA
cccaaccccagcccacctgcc

SEQ ID NO: 30009 - RNA, 21 nt, synthetic construct
  source 1..21: mol_type = other RNA
cccacctgccctgcacacctg

SEQ ID NO: 30010 - RNA, 21 nt, synthetic construct
  source 1..21: mol_type = other RNA
cccagaggagcttccggcaga

SEQ ID NO: 30011 - RNA, 21 nt, synthetic construct
  source 1..21: mol_type = other RNA
cccagcccacctgccctgcac

SEQ ID NO: 30012 - RNA, 21 nt, synthetic construct
  source 1..21: mol_type = other RNA
ccccagcccacctgccctgca

SEQ ID NO: 30013 - RNA, 21 nt, synthetic construct
  source 1..21: mol_type = other RNA
ccctgcacacctggcttccag

SEQ ID NO: 30014 - RNA, 21 nt, synthetic construct
  source 1..21: mol_type = other RNA
ccctggggcagctgatcacat

SEQ ID NO: 30015 - RNA, 21 nt, synthetic construct
  source 1..21: mol_type = other RNA
cccttcccaaccccagcccac

SEQ ID NO: 30016 - RNA, 21 nt, synthetic construct
  source 1..21: mol_type = other RNA
ccggaagctcctctgggaagg

SEQ ID NO: 30017 - RNA, 21 nt, synthetic construct
  source 1..21: mol_type = other RNA
ccggcagacctgaagcactgg

SEQ ID NO: 30018 - RNA, 21 nt, synthetic construct
  source 1..21: mol_type = other RNA
cctctccctggggcagctgat

SEQ ID NO: 30019 - RNA, 21 nt, synthetic construct
  source 1..21: mol_type = other RNA
cctctgggaaggctgcagaga

SEQ ID NO: 30020 - RNA, 21 nt, synthetic construct
  source 1..21: mol_type = other RNA
cctgaagcactggaagccagg

SEQ ID NO: 30021 - RNA, 21 nt, synthetic construct
  source 1..21: mol_type = other RNA
cctgcacacctggcttccagt

SEQ ID NO: 30022 - RNA, 21 nt, synthetic construct
  source 1..21: mol_type = other RNA
cctgccctgcacacctggctt

SEQ ID NO: 30023 - RNA, 21 nt, synthetic construct
  source 1..21: mol_type = other RNA
cctggcttccagtgcttcagg

SEQ ID NO: 30024 - RNA, 21 nt, synthetic construct
  source 1..21: mol_type = other RNA
cctggggcagctgatcacatg

SEQ ID NO: 30025 - RNA, 21 nt, synthetic construct
  source 1..21: mol_type = other RNA
ccttcccaaccccagcccacc

SEQ ID NO: 30026 - RNA, 21 nt, synthetic construct
  source 1..21: mol_type = other RNA
ccttcccagaggagcttccgg

SEQ ID NO: 30027 - RNA, 21 nt, synthetic construct
  source 1..21: mol_type = other RNA
cggaagctcctctgggaaggc

SEQ ID NO: 30028 - RNA, 21 nt, synthetic construct
  source 1..21: mol_type = other RNA
cggcagacctgaagcactgga

SEQ ID NO: 30029 - RNA, 21 nt, synthetic construct
  source 1..21: mol_type = other RNA
ctccctggggcagctgatcac

SEQ ID NO: 30030 - RNA, 21 nt, synthetic construct
  source 1..21: mol_type = other RNA
ctcctctgggaaggctgcaga

SEQ ID NO: 30031 - RNA, 21 nt, synthetic construct
  source 1..21: mol_type = other RNA
ctctccctggggcagctgatc

SEQ ID NO: 30032 - RNA, 21 nt, synthetic construct
  source 1..21: mol_type = other RNA
ctctgcagccttcccagagga

SEQ ID NO: 30033 - RNA, 21 nt, synthetic construct
  source 1..21: mol_type = other RNA
ctctgggaaggctgcagagaa

SEQ ID NO: 30034 - RNA, 21 nt, synthetic construct
  source 1..21: mol_type = other RNA
ctgaagcactggaagccaggt

SEQ ID NO: 30035 - RNA, 21 nt, synthetic construct
  source 1..21: mol_type = other RNA
ctgatcacatgttttctctgc

SEQ ID NO: 30036 - RNA, 21 nt, synthetic construct
  source 1..21: mol_type = other RNA
ctgcacacctggcttccagtg

SEQ ID NO: 30037 - RNA, 21 nt, synthetic construct
  source 1..21: mol_type = other RNA
ctgcagagaaaacatgtgatc

SEQ ID NO: 30038 - RNA, 21 nt, synthetic construct
  source 1..21: mol_type = other RNA
ctgcagccttcccagaggagc

SEQ ID NO: 30039 - RNA, 21 nt, synthetic construct
  source 1..21: mol_type = other RNA
ctgccctgcacacctggcttc

SEQ ID NO: 30040 - RNA, 21 nt, synthetic construct
  source 1..21: mol_type = other RNA
ctgccggaagctcctctggga

SEQ ID NO: 30041 - RNA, 21 nt, synthetic construct
  source 1..21: mol_type = other RNA
ctggaagccaggtgtgcaggg

SEQ ID NO: 30042 - RNA, 21 nt, synthetic construct
  source 1..21: mol_type = other RNA
ctggcttccagtgcttcaggt

SEQ ID NO: 30043 - RNA, 21 nt, synthetic construct
  source 1..21: mol_type = other RNA
ctgggaaggctgcagagaaaa

SEQ ID NO: 30044 - RNA, 21 nt, synthetic construct
  source 1..21: mol_type = other RNA
ctggggcagctgatcacatgt

SEQ ID NO: 30045 - RNA, 21 nt, synthetic construct
  source 1..21: mol_type = other RNA
cttcaggtctgccggaagctc

SEQ ID NO: 30046 - RNA, 21 nt, synthetic construct
  source 1..21: mol_type = other RNA
cttccagtgcttcaggtctgc

SEQ ID NO: 30047 - RNA, 21 nt, synthetic construct
  source 1..21: mol_type = other RNA
cttcccaaccccagcccacct

SEQ ID NO: 30048 - RNA, 21 nt, synthetic construct
  source 1..21: mol_type = other RNA
cttcccagaggagcttccggc

SEQ ID NO: 30049 - RNA, 21 nt, synthetic construct
  source 1..21: mol_type = other RNA
cttccggcagacctgaagcac

SEQ ID NO: 30050 - RNA, 21 nt, synthetic construct
  source 1..21: mol_type = other RNA
gaaaacatgtgatcagctgcc

SEQ ID NO: 30051 - RNA, 21 nt, synthetic construct
  source 1..21: mol_type = other RNA
gaagcactggaagccaggtgt

SEQ ID NO: 30052 - RNA, 21 nt, synthetic construct
  source 1..21: mol_type = other RNA
gaagccaggtgtgcagggcag

SEQ ID NO: 30053 - RNA, 21 nt, synthetic construct
  source 1..21: mol_type = other RNA
gaagctcctctgggaaggctg

SEQ ID NO: 30054 - RNA, 21 nt, synthetic construct
  source 1..21: mol_type = other RNA
gaaggctgcagagaaaacatg

SEQ ID NO: 30055 - RNA, 21 nt, synthetic construct
  source 1..21: mol_type = other RNA
gacatcctctccctggggcag

SEQ ID NO: 30056 - RNA, 21 nt, synthetic construct
  source 1..21: mol_type = other RNA
gacctgaagcactggaagcca

SEQ ID NO: 30057 - RNA, 21 nt, synthetic construct
  source 1..21: mol_type = other RNA
gagaaaacatgtgatcagctg

SEQ ID NO: 30058 - RNA, 21 nt, synthetic construct
  source 1..21: mol_type = other RNA
gagcttccggcagacctgaag

SEQ ID NO: 30059 - RNA, 21 nt, synthetic construct
  source 1..21: mol_type = other RNA
gaggagcttccggcagacctg

SEQ ID NO: 30060 - RNA, 21 nt, synthetic construct
  source 1..21: mol_type = other RNA
gatcacatgttttctctgcag

SEQ ID NO: 30061 - RNA, 21 nt, synthetic construct
  source 1..21: mol_type = other RNA
gatcagctgccccagggagag

SEQ ID NO: 30062 - RNA, 21 nt, synthetic construct
  source 1..21: mol_type = other RNA
gcacacctggcttccagtgct

SEQ ID NO: 30063 - RNA, 21 nt, synthetic construct
  source 1..21: mol_type = other RNA
gcactggaagccaggtgtgca

SEQ ID NO: 30064 - RNA, 21 nt, synthetic construct
  source 1..21: mol_type = other RNA
gcagacctgaagcactggaag

SEQ ID NO: 30065 - RNA, 21 nt, synthetic construct
  source 1..21: mol_type = other RNA
gcagagaaaacatgtgatcag

SEQ ID NO: 30066 - RNA, 21 nt, synthetic construct
  source 1..21: mol_type = other RNA
gcagccttcccagaggagctt

SEQ ID NO: 30067 - RNA, 21 nt, synthetic construct
  source 1..21: mol_type = other RNA
gcagctgatcacatgttttct

SEQ ID NO: 30068 - RNA, 21 nt, synthetic construct
  source 1..21: mol_type = other RNA
gcagggcaggtgggctggggt

SEQ ID NO: 30069 - RNA, 21 nt, synthetic construct
  source 1..21: mol_type = other RNA
gcaggtgggctggggttggga

SEQ ID NO: 30070 - RNA, 21 nt, synthetic construct
  source 1..21: mol_type = other RNA
gcatccacccttcccaacccc

SEQ ID NO: 30071 - RNA, 21 nt, synthetic construct
  source 1..21: mol_type = other RNA
gccaggtgtgcagggcaggtg

SEQ ID NO: 30072 - RNA, 21 nt, synthetic construct
  source 1..21: mol_type = other RNA
gcccacctgccctgcacacct

SEQ ID NO: 30073 - RNA, 21 nt, synthetic construct
  source 1..21: mol_type = other RNA
gccctgcacacctggcttcca

SEQ ID NO: 30074 - RNA, 21 nt, synthetic construct
  source 1..21: mol_type = other RNA
gccggaagctcctctgggaag

SEQ ID NO: 30075 - RNA, 21 nt, synthetic construct
  source 1..21: mol_type = other RNA
gccttcccagaggagcttccg

SEQ ID NO: 30076 - RNA, 21 nt, synthetic construct
  source 1..21: mol_type = other RNA
gctcctctgggaaggctgcag

SEQ ID NO: 30077 - RNA, 21 nt, synthetic construct
  source 1..21: mol_type = other RNA
gctgatcacatgttttctctg

SEQ ID NO: 30078 - RNA, 21 nt, synthetic construct
  source 1..21: mol_type = other RNA
gctgcagagaaaacatgtgat

SEQ ID NO: 30079 - RNA, 21 nt, synthetic construct
  source 1..21: mol_type = other RNA
gcttcaggtctgccggaagct

SEQ ID NO: 30080 - RNA, 21 nt, synthetic construct
  source 1..21: mol_type = other RNA
gcttccagtgcttcaggtctg

SEQ ID NO: 30081 - RNA, 21 nt, synthetic construct
  source 1..21: mol_type = other RNA
gcttccggcagacctgaagca

SEQ ID NO: 30082 - RNA, 21 nt, synthetic construct
  source 1..21: mol_type = other RNA
ggaagccaggtgtgcagggca

SEQ ID NO: 30083 - RNA, 21 nt, synthetic construct
  source 1..21: mol_type = other RNA
ggaagctcctctgggaaggct

SEQ ID NO: 30084 - RNA, 21 nt, synthetic construct
  source 1..21: mol_type = other RNA
ggaaggctgcagagaaaacat

SEQ ID NO: 30085 - RNA, 21 nt, synthetic construct
  source 1..21: mol_type = other RNA
ggacatcctctccctggggca

SEQ ID NO: 30086 - RNA, 21 nt, synthetic construct
  source 1..21: mol_type = other RNA
ggagcttccggcagacctgaa

SEQ ID NO: 30087 - RNA, 21 nt, synthetic construct
  source 1..21: mol_type = other RNA
ggcagacctgaagcactggaa

SEQ ID NO: 30088 - RNA, 21 nt, synthetic construct
  source 1..21: mol_type = other RNA
ggcagctgatcacatgttttc

SEQ ID NO: 30089 - RNA, 21 nt, synthetic construct
  source 1..21: mol_type = other RNA
ggcaggtgggctggggttggg

SEQ ID NO: 30090 - RNA, 21 nt, synthetic construct
  source 1..21: mol_type = other RNA
ggcatccacccttcccaaccc

SEQ ID NO: 30091 - RNA, 21 nt, synthetic construct
  source 1..21: mol_type = other RNA
ggctgcagagaaaacatgtga

SEQ ID NO: 30092 - RNA, 21 nt, synthetic construct
  source 1..21: mol_type = other RNA
ggctggggttgggaagggtgg

SEQ ID NO: 30093 - RNA, 21 nt, synthetic construct
  source 1..21: mol_type = other RNA
ggcttccagtgcttcaggtct

SEQ ID NO: 30094 - RNA, 21 nt, synthetic construct
  source 1..21: mol_type = other RNA
gggaaggctgcagagaaaaca

SEQ ID NO: 30095 - RNA, 21 nt, synthetic construct
  source 1..21: mol_type = other RNA
gggacatcctctccctggggc

SEQ ID NO: 30096 - RNA, 21 nt, synthetic construct
  source 1..21: mol_type = other RNA
gggcagctgatcacatgtttt

SEQ ID NO: 30097 - RNA, 21 nt, synthetic construct
  source 1..21: mol_type = other RNA
gggcaggtgggctggggttgg

SEQ ID NO: 30098 - RNA, 21 nt, synthetic construct
  source 1..21: mol_type = other RNA
gggctggggttgggaagggtg

SEQ ID NO: 30099 - RNA, 21 nt, synthetic construct
  source 1..21: mol_type = other RNA
ggggcagctgatcacatgttt

SEQ ID NO: 30100 - RNA, 21 nt, synthetic construct
  source 1..21: mol_type = other RNA
ggtctgccggaagctcctctg

SEQ ID NO: 30101 - RNA, 21 nt, synthetic construct
  source 1..21: mol_type = other RNA
ggtgggctggggttgggaagg

SEQ ID NO: 30102 - RNA, 21 nt, synthetic construct
  source 1..21: mol_type = other RNA
ggtgtgcagggcaggtgggct

SEQ ID NO: 30103 - RNA, 21 nt, synthetic construct
  source 1..21: mol_type = other RNA
gtctgccggaagctcctctgg

SEQ ID NO: 30104 - RNA, 21 nt, synthetic construct
  source 1..21: mol_type = other RNA
gtgatcagctgccccagggag

SEQ ID NO: 30105 - RNA, 21 nt, synthetic construct
  source 1..21: mol_type = other RNA
gtgcagggcaggtgggctggg

SEQ ID NO: 30106 - RNA, 21 nt, synthetic construct
  source 1..21: mol_type = other RNA
gtgcttcaggtctgccggaag

SEQ ID NO: 30107 - RNA, 21 nt, synthetic construct
  source 1..21: mol_type = other RNA
gtgggctggggttgggaaggg

SEQ ID NO: 30108 - RNA, 21 nt, synthetic construct
  source 1..21: mol_type = other RNA
gtgtgcagggcaggtgggctg

SEQ ID NO: 30109 - RNA, 21 nt, synthetic construct
  source 1..21: mol_type = other RNA
gttttctctgcagccttccca

SEQ ID NO: 30110 - RNA, 21 nt, synthetic construct
  source 1..21: mol_type = other RNA
tcacatgttttctctgcagcc

(The sequence listing continues in the following parts.)

1. A method for inactivating alleles of the Class II, major histocompatibility complex, transactivator (CIITA) gene in a cell, the method comprising
introducing to the cell a composition comprising:
at least one CRISPR nuclease, or a polynucleotide molecule encoding a CRISPR nuclease; and
an RNA molecule comprising a guide sequence portion, or a polynucleotide molecule encoding the RNA molecule,
wherein a complex of the CRISPR nuclease and the RNA molecule affects a double strand break in alleles of the CIITA gene, and
wherein the guide sequence portion of the RNA molecule comprises 17-50 contiguous nucleotides containing nucleotides in the sequence set forth in any one of SEQ ID NOs: 1-34199.

2. (canceled)

3. The method of claim 1, wherein the cell is a lymphocyte, a T cell, a T regulatory cell, a B cell, a natural killer (NK) cell, a macrophage, a stem cell, or a fibroblast, blood cell, hepatocyte, keratinocyte, or any other cell type capable of being reprogrammed to an induced pluripotent stem cell (iPSC), or
wherein the cell is a hematopoietic stem cell (HSC), induced pluripotent stem cell (iPS cell), iPSc-derived cell, natural killer cell (NK), iPS-derived NK cell (INK), T cell, innate-like T cell (IT), natural killer T cell (NKT), γδ T cell, iPSc-derived T cell, invariant NKT cells (INKT), iPSc-derived NKT, monocyte, or macrophage.

4. (canceled)

5. (canceled)

6. The method of claim 1, wherein alleles of the CIITA gene in the cell are subjected to an insertion or deletion mutation.

7. (canceled)

8. (canceled)

9. The method of claim 1, wherein the composition introduced to the cell further comprises a second RNA molecule comprising a guide sequence portion, wherein the guide sequence portion of the second RNA molecule comprises 17-50 contiguous nucleotides containing nucleotides in the sequence set forth in any one of SEQ ID NOs: 1-34199, wherein the guide sequence portion of the second RNA molecule differs from the guide sequence portion of the first RNA molecule.

10. A method for inactivating alleles of the Class II, major histocompatibility complex, transactivator (CIITA) gene in a cell, the method comprising
introducing to the cell a composition comprising:
at least one CRISPR nuclease, or a polynucleotide molecule encoding a CRISPR nuclease; and
an RNA molecule comprising a guide sequence portion, or a polynucleotide molecule encoding the RNA molecule,
wherein a complex of the CRISPR nuclease and the RNA molecule affects a double strand break in alleles of the CIITA gene, and
wherein the guide sequence portion of the RNA molecule comprises 17-50 contiguous nucleotides containing nucleotides in the sequence set forth in any one of SEQ ID NOs: 1-34199 modified to contain 1, 2, 3, 4, or 5 nucleotide mismatches relative to a fully-complementary target sequence of the guide sequence portion.

11. (canceled)

12. The method of claim 10, wherein the guide sequence portion provides higher targeting specificity to the complex of the CRISPR nuclease and the RNA molecule relative to a guide sequence portion that has higher complementarity to an allele of the CIITA gene.

13. The method of claim 10, wherein the composition introduced to the cell further comprises a second RNA molecule comprising a guide sequence portion, wherein the guide sequence portion of the RNA molecule comprises 17-50 contiguous nucleotides containing nucleotides in the sequence set forth in any one of SEQ ID NOs: 1-34199, or any one of SEQ ID NOs: 1-34199 modified to contain 1, 2, 3, 4, or 5 nucleotide mismatches relative to a fully-complementary target sequence of the guide sequence portion, wherein the guide sequence portion of the second RNA molecule differs from the guide sequence portion of the first RNA molecule.

14. A composition comprising:
at least one CRISPR nuclease, or a polynucleotide molecule encoding a CRISPR nuclease; and
an RNA molecule comprising a guide sequence portion, or a polynucleotide molecule encoding the RNA molecule,
wherein the guide sequence portion of the RNA molecule comprises 17-50 contiguous nucleotides containing nucleotides in the sequence set forth in any one of SEQ ID NOs: 1-34199 or in any one of SEQ ID NOs: 1-34199, modified to contain 1, 2, 3, 4, or 5 nucleotide mismatches relative to a fully target sequence of the guide sequence portion.

15. The composition of claim 14, further comprising a second RNA molecule which comprises a guide sequence portion comprising 17-50 contiguous nucleotides containing nucleotides in the sequence set forth in any one of SEQ ID NOs: 1-34199, or any one of SEQ ID NOs: 1-34199 modified to contain 1, 2, 3, 4, or 5 nucleotide mismatches relative to a fully-complementary target sequence of the guide sequence portion, wherein the guide sequence portion of the second RNA molecule differs from the guide sequence portion of the first RNA molecule.

16. (canceled)

17. (canceled)

18. (canceled)

19. (canceled)

20. A cell modified using the composition of claim 14.

21. (canceled)

22. (canceled)

23. The modified cell of claim 20, wherein the cell is a stem cell or any cell type capable of being reprogrammed to an induced pluripotent stem cell (iPSC).

24. (canceled)

25. (canceled)

26. (canceled)

27. Use of the composition of claim 14 (i) in adoptive immunotherapy or (ii) for treating, ameliorating, or preventing host-versus-graft rejection (HvG), comprising delivering the composition of claim 14, or a cell modified by the composition of claim 14, to a subject in need of adoptive immunotherapy or experiencing or at risk of experiencing host-versus-graft rejection (HvG).

28. (canceled)

29. (canceled)

30. (canceled)

31. (canceled)

32. (canceled)

33. (canceled)

34. (canceled)

35. (canceled)

36. (canceled)

37. A method of treating cancer, the method comprising delivering the composition of claim 14, or a cell modified by the composition of claim 14, to the subject in need of cancer treatment.

38. (canceled)

39. The method of claim 1, wherein the guide sequence portion of the RNA molecule further comprises 17-50 contiguous nucleotides containing nucleotides in the sequence set forth in any one of SEQ ID NOs: 8042, 8688, 9031, 9831, 26812, 27897, 28044, 29458, 31275-31276, 31294, 32698, or 32704.

40. The method of claim 39, wherein at least one CRISPR nuclease is OMNI-103.

41. The method of claim 10, wherein the guide sequence portion of the RNA molecule further comprises 17-50 contiguous nucleotides containing nucleotides in the sequence set forth in any one of SEQ ID NOs: 8042, 8688, 9031, 9831, 26812, 27897, 28044, 29458, 31275-31276, 31294, 32698, or 32704.

42. The method of claim 41, wherein at least one CRISPR nuclease is OMNI-103.

43. The composition of claim 14, wherein the guide sequence portion of the RNA molecule further comprises 17-50 contiguous nucleotides containing nucleotides in the sequence set forth in any one of SEQ ID NOs: 8042, 8688, 9031, 9831, 26812, 27897, 28044, 29458, 31275-31276, 31294, 32698, or 32704.

44. The composition of claim 44, wherein at least one CRISPR nuclease is OMNI-103.
